United States Patent Application Publication US 2012/0017338 A1 - sequence listing, part 8

SEQ ID NO: 27803 - DNA, 218 bp, Zea mays
  Peptide Sequence Number=SeqID_69582
atggatctaaaaatggaagagcgcatccgatgctgggaggtgaggtcaaaggggaggaggatgccaagaaagagggctgcatccatccaagcacctgaaaggatacgaaagaaaggtgaggttggcatgaaagaaaatccatctggccccggcggcatagcgacaggaaagctaccggccggctcgccggcgcccgcggccggcggttgggcaaaaag

SEQ ID NO: 27804 - DNA, 1214 bp, Zea mays
  Peptide Sequence Number=SeqID_69583
atgacctgtgaggccagtgggcccaatacatctaaggccagcgggccgtcagcttcttgccgggagatcaccagtgctgttagtaacaatggtcgcgtttcactcgatgtaattatcgtcgtctacacggccggtatggtgtcgacgctggagcagctgctcatcgcggctgccttcctggtggtggcggcggcggcgtcgacagtgcccgtgtctcctgctgcggcagcgacacggccgtaccacggcggcggctgctacagccatttcttcgcgttcggcgactcgctcatcgacacgggcaacttcatccgctactccacggcgagaccttcttccaccgccccaccggccgctggtccgacggccgcctcatcgttgacttcattggtacttgagcggctggggtacccgcgctggccgccgtacctggacgggaagagcaaggacgacttccggcacggcgctaacttcgcggtggccagcggcacggcgctcaaccagctgctgttcaagaagcacggcctcaacgtcaacggcatcacgccctactccctcggcgtgcagatcggctggttcaagaaggtgctcgccatgctcgcctccaacgagcacgagcgtcgggagatcatggcgagctcgctgttcctggtgggcgagatcggcgccaacgactacaaccaccccttcttccagaaccggacgctggacttcgtcgactccctggtgcccctcgtcatcaggtccatcgggcgctcgctggagtcgctcatccagctgggcgccaagacggtgtacgtgccgggcatcttccctctgggctgcctcccgaggtacatcttcctcttccgcgacagcggcgccgccggctgcctgcggtggctgaacgacctcacgtcccgccacaacgcgctgctccgggccaagctcgccggcctccgccgcgcgtaccgggacgtctccatcgtctacgtcgactactacgccgaggtcaccgggatcgtcggcgccccggcgcgcaacggcttcgcccccgccacggcgctcgacgcgtgctgcggcggcggcggcttccacaacgccaacttcaccgtgcactgctccgagccgggcgccgtgcagtgcgccgacccgtccaggtacgtgtcctgggacgggctgcacatgacggaggccgtgtaccggatcatggcgcgcggggtgctcgacggccc

SEQ ID NO: 27805 - DNA, 552 bp, Zea mays
  Peptide Sequence Number=SeqID_69584
atggccgtggctgcttccatggcgatctatacctttcgcaagctgggcaaggcagagcgacgcggccccgtctccgtctctggccccagcgacgccgccggccccgccacctcgtcccccgcggcgctgctccgcccgcggcgggaggcgttcaagcatgggctcaaggagaagctcatccctaagctcatcttcccggagggcatgctggcgcagaccctcgcccagctcaaggagaagctcagcgcctcagtccccgacgggcgcgtgcgcgctgcggccctggctgaggcacagcagatcccgcaggagcaggcggcactcgccctcggcacgctcgcggcggtgctcccggccgaggaccccgtgcttggggacggtgccatcgatggtgctgccgccgacatccgcgacgtgctgctcttcctctatatccagtcttacaagcgcctcgttcagcggagcgcgcacaaggactcacccgccgtggcggacgtctggccgtccacctccgcgttcgatgggtacctctccgcgctctccctgatctag

SEQ ID NO: 27806 - DNA, 154 bp, Zea mays
  Peptide Sequence Number=SeqID_69585
atgacggtggccctgacccccaacatcgagatcgccatggggctctcgttcctcatcttcatcttttggaatgtcttctctggcttcataatcgtgagagatgatgcctgtgtggtggcggtgggtgtactgggcagatctggcgacatggacg

SEQ ID NO: 27807 - DNA, 417 bp, Zea mays
  Peptide Sequence Number=SeqID_69586
atgggagaagtgacggcgactgcgcttgtggtttggatgcgccttgtacccttctactgtcatttttttgttgccaatcaattcagctctaggagatcgacgcgtgcttggcgtgtcccgtggcctgaggggaagagcacggggactccgattggacgacatcttcttcgcctcaccatcaacaatgtcttcccctctaatgatgccgatggaggcagatctggagaatatatgaggcaagggaggcaactggaggaggagcggtgcttcatgaccaagcagctagagcggttcctaaggaggctgaccgagaagaaggcggcgtggaagtcccgggttcgggccaaggcttgccacgccatggctgccctccaggcactactacagatcatgttatatgagacggttaatttttag

SEQ ID NO: 27808 - DNA, 2238 bp, Zea mays
  Peptide Sequence Number=SeqID_69587
atgccgttcggcttgaggaatgcgggtgcaacgtaccagcgatgcatgaaccatgtgttcggcgaacacatcggccgaatggtcgaggcctacgttgatgacatcgtagtcaagacgaggaaagcctccgacctcctttctgatctggaactgacattccgatgtctcaaggcgaaaggcgtgaagctcaatcccaaaaagtgtgtcttcggggtcccccgaggcatgctcttggggttcatcgtctccgagcagggcatcgaagccaatccggagaagatcgctgccatcaccggcatggggcccatcaaggacttgaaaggcgtgcagagggtcatgggatgcctcgcggctctgagccgtttcatctcacgcctcggcgaaagaggcctgcctctgtaccgcctcttaaggaaggccgagtgcttcgcatggacccctgaggccgaggaagctctcgggaacttgaaggcgctcctcacaaacgcgcccatcttggtgcccccctctgccggagaagccctcttgatctacgtcgccgcgaccactcaggtggttagcgccacgattgtggttgagagacgagaagaggggcatgcattgcctgtccagaggccagtctacttcatcagtgaggtactgtccgagaccaagatccgctacccacaaattcagaagctgctatacgcggtgatcctgacgcgacggaagttgcgacactacttcgagtctcatccggtaactgtggtgtcatcctttcccctgggggagatcatccagtccagagaggcctcgggtagaattgcaaagtgggcagtggagattatgggcgagacgatctcgttcgcccctcggaaggccatcaagtcccaggtcttggcggacttcgtggctgaatgggtcgacacccagctcccgacagctccgatccaaccggagctctggactatgtttttcgacgggtcgctgatgaagtcgggggccggcgcgggcctgctcttcatctcgcccctcgggaagcacctacgctacgtgctacgcctccacttcccggcgtccaacaacgtggctgagtacgaggctctggtaaacgggttgcgaatcgccatcgagctaggggtccaacgcctcgacgctcacgatgactcgcagctcgtcatcgaccaagtcatgaagaactcccactgcctcgacccaaagccggaagcctactgcgatgaggttcggcgcctggaagacaagttctacgggctcaagctcaaccacatcgcccgacgctacaacgagactgcggacgagctggctaaaatagcctcagggcgaacaacagttcccccggacgtattctcccgagacctgcatcaaccctccgtcaagaccgacgacacgcccgagcccgaggcaccctcggctcagtccgagaaggcacccgggggctacacgcacctgctggtcgctatcgacaaattctccaagtggatcgaggtccgacccctaaacagcatcaggtccgaacaggcagtggcgttcttcaccaacatcatccaccgctttggggtcccgaactccatcatcaccgacaacggcacccagttcaccagcagaaagttcctggacttctgtgaggatcaccacatccgggtggactgggccgccgtggctcaccccatgacgaatgggcaggtagaacgtgccaacgacatgattctgcaaggactcaagccgcgaatctacaacgacctcaacaagtttggcaagcgatggatgaaggagctcccctcggtggtctggagtctgaggacaacgccgagtcgagccacgggcttcacaccgttttttctagtctatggggccgaggccatcttgcccacagacttagaatacggttccccgagggcgagggcctatgccgaccaaagcaatcaagccaatcgagaaaactcactggaccagctggaagaggctcgggacatggccttactacacttggcgcgataccagcagtccctgcgacgctaccacgcccgaggggttcgatcccgagacctccaggtgggcgacctggtgcttcggctaagacaagacgcccaagggcggcataagctcacgcctccctgggaagggtcgttcatcatcgccaaagttctgaagcctgaaacatacaagctggccaacagtcaaggcgaggtctacagcaacgcttggaacatccaacagctacgtcgcttctacccttaa

SEQ ID NO: 27809 - DNA, 168 bp, Zea mays
  Peptide Sequence Number=SeqID_69588
atgggaaggatgtttttgaaaataaaacttgatggtggatccatcatggccgtgatgggttcaacatcggaaaagatatacctctgccagttatgtaatcgcttccgcatttctgtacctccgatgttctataatgtctgcgtgacgggtgaaacgctcttgggaaag

SEQ ID NO: 27810 - DNA, 402 bp, Zea mays
  Peptide Sequence Number=SeqID_69589
atgaagtcacgtagcccccctgatgacggtagagcggcggagcgacaagagacacggagagagtacagagagggcgaggcccaggaggacgtcagtgcatcatcagccaagtcgacagagggaaaggggtgggtacgtggccggatccttgaatatgtcctcaccggagaacaccagaacaaatggacgcactatggcggctgggcgaaggggagaagtggccacgacaagtttatttccaattcaaatttcaattccaattcaaaatgtgtagagcttgaacatggttacaatgagtatggggcaaaaacacatagtgagatctactcccttcagattgtttacaaattgggtattacaaatcctaccccccttagaaagaatctcgtcctcgagatttag

SEQ ID NO: 27811 - DNA, 1359 bp, Zea mays
  Peptide Sequence Number=SeqID_69590
atggccgtgaccactgctcctccgggcatgtccacaggcggcatgtcggcgacaaccttgatgccgtacaaccacaaccagcgcacggagacggtgtggcggactggcggggcaccttgcagagcgcggggaaaggagctgctggcgcgcggtggtctatcgctgcctctagatgcagttggggaaggagatgcacgcaaggtcatcaaggtcgtcgctcggcatgggaattccttgggaaatcttgcactgtatactgctattggaggtgtacagccatccgctgtgggttatcctgattatgtgcttaaagagggtgaaggaggcacaattgtttttggcatgtcatccctcctcatattttcacctcaagaacttgactatctaatatgtggccaacaagaaatttgggagtctagaatacctggtgcagttacatggatgttaggatataagattgctatagttttatccaaggagtggatgatcacaatgttctactctagcacggtgacgggggcatcacaatgtcctactctagcgcgcagctcgcagagggcatgtggccacagttcactagccgttgaggaaccgctactaatattttatggcatgcaacattacctgccaatagctggttcacttgtctttgttcctttgatactcgtacctgcaatggatggttctgatgaggataccgcaacagtcatctccaccatgttattagtctctggtcttactacaatactacatacttttttgggttctcggcttccactgattcaaggaagctcctttgtatatttggctccagcgttggtaattgcaaactccgaggagttcagaaatcttagtgacaataaattcaagcacataatgagggaactacagggggctatacttgttggttcagtattccagataatattaggatacactggtcttatttcactgtttctgaggttaataaatccagtagtggtggcaccaactattgctgtagtgggtttggcattttttagttatggtttccctcaggctggcagctgtgtagaaatcagcatgcccctcattctgttggttcttctgtgcactctgtacatgagaaaaatatccttgtttggcaaccatatcttccttgtctatgcggtgcccctcagtgttgcaattgtatgggcttatgcattctttctaattgctggtggagcatataacttcaaatgctgcagctcaaacatacccagttcaaacatattgttggattcatgcagaaggcatttagagaccatgaggcgctgccgtactgatgtttctactgcgtggaaaactactgcctgggtgagggttgagagcacctag

SEQ ID NO: 27812 - DNA, 756 bp, Zea mays
  Peptide Sequence Number=SeqID_69591
atggccggggcgccgcagctacgggccacacagccacccccgcggatcctggccgagccgccgctgggcttgctcgcagcgtctccacagccgcccccgcggatcctggccgagccaccgctgggcttgctcgcagcgtctccgcagccgcccccgcggatcctggccgagccgccgcggagcttgctcgcagcgtctccgcagccgcccccgcggatcctggccgaggcatcgccgccgcggagcttggtcgcggcgcctccgcagccgaccccgcgtatactggccgaggcgtcgccgccgctgggcttggtcgcggcgcctcttcagccgcccccgcgggtcctgtccgaggcgtcgccgccgcggagcttggtcgcggcgcctccgcagccgaccccgcgtatcctggccgaggcgtcgccgtcgcggtgcttggtcatggcgcctctgcagccacccccgcgggtcctagccgaggcgtcgccaccgtggggcttggtcgcggcgcctccgccacggggcactcagctgctaccgcggggattgggcggggggggggcatccgccataggccgcgtagatgttcagattgatggagacgaagggcttccccagggtgccagttcaacagctcctgcgatgttcaattgcaatggcgatgttcgttattacagagaaggagacgaaggctacgttccacgattcgacatggctgacgaccagttctacggccttgacattgagagcacctag

SEQ ID NO: 27813 - DNA, 189 bp, Zea mays
  Peptide Sequence Number=SeqID_69592
atggccggccttggtcgagcccgttgcgacggcaaggccccgtggccaagctccccggcgcgcaccgtcagtcgatccgcccagtcgtatgatgatgaggatgattatgcttatgcttatggtaatggtaaagaaggcgtcgaggcggatctccaggagttccaggacgtcaatgagtttgaggattag

SEQ ID NO: 27814 - DNA, 280 bp, Zea mays
  Peptide Sequence Number=SeqID_69593
atgtgcgcctacggccaagcccatgctcgtccaagtagccaacgggacccagatgtcgtcttcttcctcccctccaccgtaggaggaggcggcgacgttggcctcggagacggcggcgttgggcttgaggacggcgcgacgtggcgggcgcccagctcagagacggcggcgcttgggctcgggctcggcgacggcgtggcgggcgctcacagctcggagacggggacagggacggcagcgcagtatcagcctggcggcgcaatatcagctccgggcgaga

SEQ ID NO: 27815 - DNA, 1092 bp, Zea mays
  Peptide Sequence Number=SeqID_69594
gagcccccgacgttctccaaaacgatgctcctaaagcaggacatccttgaacagtatgaccccggcatcacccacagcacgaagaatttcttgggtttcttgcttggagcagccgtcaccgcggcctgtatcctgctgctactgccgcctgctccgtgcccctgcggcgtcctgccggcacagcaagaatccgtcgtcttgggtaacggtaacggaactcaagctgatcccagcatgaagaagcttcacatggccggcaattcaaccgaccacgagctgctggagctactgaagcgagccgccatggacgacaggaccatcattatgaccttcacgaacgaggcgtggacggctcccggctcgctcctggacctcttcctgcagagcttccgcctgggcgtaaggacggcgccgctgctaaagcacctgatcgtcgtcgccgtcgacgccatggcgtacgagcggtgccagcacgtgcaccggctctgctaccacctccgcgtcgacggcgtcgactacgcggcggagcagtcgtacatgcagaaggactacctggacatgatgtggcgcaggaaccggttccaggcccggatcctggagctcggctacagcttcgtcttcacggatgtggacatcatctggctgcggaacccgctgctgcgcatcccggtaggcgccgacatggccatgtcgtgcgatttcttctacggcgacaacccgtacgacctgaacaagctggccaacggcgggttcgtgtacgctaaggcgaacgcgcggatggtggcgttctacgggagctggtacgagtcgcggaaagggtttcccggcgcgcacgagcagtacgtgttcgaccaggtgaagcaggagctgtcggcgcggcatggcgtgcgggtgcagttcgtggacacggcctacctcagcggcttctgcgagctccgcaaggacttctacagggtgtgcacggtgcacgccaactgcctcgtgggactccaatccaagctccagaagctcacccaagtgttcgacgagtggaaacagttcagggagaaggccgcgctgctgggcagcaacaccaccgcgctgacggactga

SEQ ID NO: 27816 - DNA, 1041 bp, Zea mays
  Peptide Sequence Number=SeqID_69595
atgagaggtttctcggattcccgaggttgttttctaagtttcttcctcggagctgcagtcgccgcggcctgcatcgtgctgctacagccgtccgctctgtgcccgttcgacggcctcacgccggcagatcgtcaagagctggcaatcttgagtaatagaactcatgctgctccctgctcgaagaagcttcacatgcctgctactacctcaccggacgacgtcaggcttctggcgctcctgagaagggcctccatggacgacaacaccatcataatgaccttcacgaacaaggcgtggaccgcgcccggctcgctcatggacctcttcctcgagagcttccgcgtaggcgtgaggacggagccgctcctcaagcacctggtcatcgtcgccgtcgacgacaaggcgcacgagcggtgcgggcaggtgcacccgctctgctaccgcctccgcgtcaggggcgtcgactacgcggcggagcagtcgttcatggagaaggactacctcgacatgatgtggcgccggaaccggttccaggcccgggtcctgcggctcggctacagcttcgtcttcacggacatggacatcgtctggctgcggaacccgttgctgcgcgtgcccgtcggcgccgacctcgccatgtcgtccgactacttctacggcgacaacccgtacgacctgaacaagacggccaacggcgggttcgtgtacgccagggcgagcgcccggacggtggccttctacggcggctggtacgaggcgcgggaggcgtacccgaggaggaacgagcaggacgtgttcgaccgggtgaagcacgtgctgtcggcgcggcacggcgtgcgggtgcagttcctggacacggcttacctcggcggcttctgcgagctccgcaaggacttccacaaggtgtgtacggtccacggcaactgcctcttcgggctcagggacaagctccagaagctcacccaggtgttggacgagtggaagcagttcagggccgacgccgcgttgatgggcagcaacagcacagcgctgacggactga

SEQ ID NO: 27817 - DNA, 707 bp, Zea mays
  Peptide Sequence Number=SeqID_69596
atgctgcgctgccacacgccaccgcaatgcgcccgcgcgccgctccgccaccacggaaggtgggagtcgcctccggcggcggcgcccgcggtggtagtgcggtgcgcgcggggtgcgccgcaggtgtccgggatcgaggcggcttcgccgggccacgcggctgtcacggcggcgttagctaaggcggaagggggtgacgcgcggcccagcctggccgagcggctgcggttggggaacctcctggaggacgggctatcgtacaaggagagtttcatcgtgcgctgctacgaggtggggatcaacaagacggccaccgttgagaccatcgccaatctcctccaggaggtaggatgtaaccatgcacaaagtgttggggttctcactgatggcttcgttaaggccactacaatgagaaaacttggacttatttgggtgacgaacagaaagcacatgagatctacaagtttgatcctgactggtaactctgctgctggtaggggtgatgttgttgagatcgaaacatggtgccaagaagatggaagaattggtacccgtcgtgattggatcctcaaggacctagctaatggtgaagttattggcagagctaccagcaagtgggtcatgatgaaccaaaatacacggagacttcagcgggtcagtgatgacgtgagggatgaggtgtttatgcactgtccaaaggctccaag

SEQ ID NO: 27818 - DNA, 369 bp, Zea mays
  Peptide Sequence Number=SeqID_69597
atggcccaagggcacatttccctttcaactttcaatgacttctggcttacgcacgaagggtgtctcggcatgatcaaattgagctctttaccaccaggttatccccaccctattggacgaggtctgtcgaatcatcatcgagatttagcagatgccataggattggctcgtgaagcagaaaggcaggaggatctctttcttgccaaggttgtcgaggccacgcagtctcgcctgactcacaacctgccttggacagcaggctctgatgcctcggtgagcaatcagtcgatagctccagcatatagtaaccttcctgtagcaactatggagtccaagctagaaggaggtccaacaaatgttaggaactag

SEQ ID NO: 27819 - DNA, 222 bp, Zea mays
  Peptide Sequence Number=SeqID_69598
atgaatagggaaaatccaactattatcatgtttttggagcttgctgcttgggtgtatcgcaatgtggacaaaccaagcgcgacaattagcgcccaggtgaagcacagaacagaggcggccaaggcaagagatttaccagcagtgaagcggcatggtacgatgaaagctgcatatgcacaaccatgtcaaggcacgctagccatcaagcatgagagcacctag

SEQ ID NO: 27820 - DNA, 405 bp, Zea mays
  Peptide Sequence Number=SeqID_69599
atggcgggttggttttataaaagtggaagggctcttttgaaagactaccaggccgaaggggtacgaataagctctgaccacccgattagagatggagggctcagatcacattgggacggcatcgaaccgggacccttcttcccccgactggacctgagcagaggcagcacgaaagtgcccagggcggcggcgtccgagatcccgacgggtgaagcggccatcggagcatggagccgggcagagaggctgttcgcgcgcatggggaggaaggactcaccacgcttccgctgtgccgaggcccgcacacggcacgatgcggcaagaccaatagaccgcaccactggtgaatcgagctccgaagaacgccgagcacggaggccagtgacacggcggcgacgaggatga

SEQ ID NO: 27821 - DNA, 873 bp, Zea mays
  Peptide Sequence Number=SeqID_69600
atggggacgccggagacgtcgcgggagccatgcccggaccggatcctggacgacgtcggcggcgcgttcgggatgggcgccgtcggcggctcggccttccacttcatcaagggcatctacaactcccccaacgggatgcgcatgtccgggggcgcgcaggccgtgcgtatgaacgcgccgcgcgtggggggcagcttcgccgtatggggcggcctcttctcaaccttcgactgcgccatggtctacgcgcgccagaaggaggatccctggaactccattatcgcgggcgccgccacgggtgggtttctctctatgcgccagggcatgggggcggcggggccggtccgcgctcatgggcggtgtccttctggccctcatcgagggcgccggccttatgctcaaccgcgtcctcgccaacccgccgcttcccgcggaggatcccaaccttaccgcggccatgggcgacaaccctttcccgggcctgccacaggcgccgccggtcgtggcacctccggaagtggcgagctccagcggcgcgggtgggtggttcgggggactgattggcaggaaggacgaagagaagaaatccagcgcgggcaagtcggagatcttggagagcttcgacacgcccagcagtccgataccatcgttcgagtacaagtgaggaaaaggcgttgtgatcattttgttgcaaatccattccgtatccaactagagattgttatagcttcttattggaagaacgtgacgtgcggtcgcgagtgggcgggcatgggttccgcctttgtcattggtgctgttgggggttctttcttccactttgtcaatgatctctgcaaggatttactggtagcccggaggctatgcgcatga

SEQ ID NO: 27822 - DNA, 195 bp, Zea mays
  Peptide Sequence Number=SeqID_69601
atggcgcaccggatagtctggtgcgccagccacgtcacccggccgttagggttcgaccgttggagctctgactggtggggtcgcctggctgtccggtggtgcaccggacaggtgaccgttggcgtcgaagtagccgttgctccgctggctcaccggacagtctggtgtgcaccggacatgtccggtgaattatag

SEQ ID NO: 27823 - DNA, 1287 bp, Zea mays
  Peptide Sequence Number=SeqID_69602
atggagccccgccgctccgtgctgctcctggccctcgccgtcgccgccgcgctctccgtcgcagtggcttacgacccgttggacccgaacgggaacattaccatcaagtgggacatcatgtcgtggacgcccgacggctatgtcgcggtggtgaccatcaacaacttccagacgtaccggcagatcacggcgccggggtggacggtggggtggacgtgggcgaagcgggaggtgatctggtccatggtgggcgcgcaggccacggagcagggcgactgctcccgcttcaaggccaacatcccgcactgctgcaagcgcaccccggccgtcgtcgacctgctccccggcgtgccctacaaccagcagatcgccaactgctgccgcggcggcgtcgtcagcgcctacggccaggacccggccaccgccgtcgccgcgttccaggtcagcgtcggccaggccggcaccaccaaccgcaccgtcaaggtgcccaagaacttcacgctgctggggccggggccaggatacacctgcggccccggcaaggtgacgtggaacgtgacgtgcacctactcgcagcacctggcgtccaagtacccctcctgctgcgtctccttctcctccttctacaacgacaccatcgtgccctgcgccaagtgcgcctgcggctgcgagcacaagacctgcgtccagggcgactcgaagcggctggcggtgacggggaagcacgcgcacacggcggcggcggtgcgcgggcagcaccgggacaaggaggcgccgctgctgcagtgcacgacgcacatgtgccccgtgcgcgtgcactggcacgtcaagctcaactacaaggagtactggcgcgccaagatcgccatcaccaacttcaactaccacatgaactacacgcagtggacgctcgtcgcgcagcaccccaacctcgacaacatcaccgaggtcttcagcttcggctacaagcccgtcgtctcctatggatccatcaatgacacggccatgttctacgggctcaagtacttcaacgaccacctgatgcaggcggggccgtacgggaacgtgcagtcggaggtgctcatgcgcaaggacgccagcaccttcaccttcaggcagggctgggccttcccgcgcaaggtctacttcaacggcgacgagtgccagatgccgccgccggacgcctacccctacttgcccaactccgcgccgccgacagccgcggcgtcgctgggcggcgcagcggcagcggccgtcgtggtgctcttgggcatgatcgtggcatga

SEQ ID NO: 27824 - DNA, 363 bp, Zea mays
  Peptide Sequence Number=SeqID_69603
atgtgggctgagaagctcagagaagattcttttgtttttgatggtgctacaagaaatataattgactgggcacgaagggaaatggaggatgacccccaggctaacaacgaggacataggaagatgcatgtttcttgagttcttaatgttcatgacatatgaggctatgctcaacagcagatcctcaaaggctacacatatgcttacagaaaaaagttttgatcctgctagcagcagcatgattagaaaggaggtgaaaatgggattggctgtaattgcttgtttattgctgaaccagaccttcctgatgaatcccaaatacccctccttttgcctaattaacccctgttacgagcgcctataa

SEQ ID NO: 27825 - DNA, 192 bp, Zea mays
  Peptide Sequence Number=SeqID_69604
atgggttggtcatgtggtgacaagaatgacggccgagatgcccggccgggctcctcgaaatttgacgacaagcccgggaaacacgcccggtcgaccgggggtggaaaatatcccagcctggactgcacgcgaacgcgaagggcacgcgacttctcgtcggtgtcgatctgctccggcgaccgcttgtcatcg

SEQ ID NO: 27826 - DNA, 567 bp, Zea mays
  Peptide Sequence Number=SeqID_69605
atgcaggcggcatgcaaccgcgccaagtgggcgcacctctccgactcccaacgcgcccagcttggaggaccaggcccacgcgtcatgcaactggtgcgccggtcgctacgtgtgagtaactgcatcgccactcacgccactaccacgcctcctcgactgcggagtcaataccgtgactcgaggcaaccctgcaatgccagccaagcgcgacggtcaaatgcggtcaaaattgggccggcagtgatggcggtggcaggcgggcaggagcagcggtcacggaccgggaaaggggataccccgaaagggatccttccctgtgaaggaaccaggctccgagcctccctactgatcagaggttcgaaggttggcccctcggaagggttcaacagccgcctcaaagcacgtgggccccacacccactactggtcagaggttcaaaggccggcccctcggaagggttcaacgaccgcctcaggctactcgggctccgcgcccactactgatcaggggttcgaaggctggcccccgaagggttcacagccgcctcagacacagagcgagggatga

SEQ ID NO: 27827 - DNA, 786 bp, Zea mays
  Peptide Sequence Number=SeqID_69606
atggcgcggcttataagcgttggcgcggacttagcaatacgaactcagttggtggctgaattgctgaagttctactcctgcgcaggcataataatatttttgccgaagacctgtgtttcgcactgtcgctcactcctgccgccaccatctggatcacgtcgccggcgccaaatgtcggcgcacctcaccgtcgcgctgttgctcgcagtagccgccgcgtcggcccgcggctccgacgtgccgtcgttcccgctctcccaggcgcagtccccgtccaactcctcgtccccgtcgaacgcctcctcgccgccgtgtcacctcgacctctccgccgagctcttcggtggcgtggcagcggcgtgcggcgccagcggggggccgggctcgctcgaccgcggccgctgctgtcctgtcctcgcggcctggctcttcgcggcgcacgcgcgcaccgcgctgtccgtgcccccggcacccgcgccctcggcggtcgccggggaggaggggctggggcccggcgacgacgggcccatggtgccgtacgacaaccagaggtgcgtgaacgcgctgggcgccgctttggagaagcgcggggtggcgctgccccggcccaacgcaacttgcgacaatatcggctcgctacggtgccccgccgcgttcgccgtcggccccggcgctggcgccgcggccaagaacgccacgcccaccgccgccgtgaagggccaggagaagagctgccgcaacgcctcctacgccggctgctctcgatgcgtgcagtccttttggaag

SEQ ID NO: 27828 - DNA, 1101 bp, Zea mays
  Peptide Sequence Number=SeqID_69607
atggggcgcgcgccgtgctgcgagaagagcgggctgaagaaagggccgtggatgcccgaggaggacgagaagctcgtcgcctacatcaagaagcacggccagggcaactggcgcaccctccccaagaatgccgggctcgcacggtgcgggaagagctgccggctacggtggactaactatctgaggccggacatcaagcgcggccgcttctccttcgacgaggaggagacaatcatccagctccacagcatcctcggcaacaagtggtcagcgatcgcggcgcggctgcccgggcggacggacaacgagatcaagaactactggaacacgcacatccgcaagcgcctgctccgcatgggcatcgaccccgtcacccacgcgccgcgcctcgacctcctcgacctctccgcgctcttcaagcccgccgccgccgccgcgtactaccccacgcaggccgacctcgacacgctccgagccttggagccgctcgccaactacccggacctcctccgcctcgcctccgccctgctctctggcccgccggcggcgcccgcgatcggcgaccagcaaccgcggcagcttctgccgtggattctgcaggcgcagatggcgcagcaggcggccgccgccgtggcgcaggcgcagctgcaggtggcgccgcaggccgaacagttcgtgcagcagcggcaggcggctggagccgcgtgccaaatgccggacctggtccacacgagcccgacggtgcagcagcaccagcaggtcgcggccgcgcaggagcagcaacaccagccccagggccaggacgacatggccgcggcttgccacagcatgcagccgcagccgcctacgggcggctacgccgtcgacaccctcgacatcccagcgctgatgcagatggtgcaggccgacgacgcgtcgaacctgcagcagtggagcagcatgatcacaagcagcaccaacaacaacaacgtcggctccggcgtgtccacaccgtcgtccagccccggtgccgcgcttgaatcactccaccaccgccaccacgacgtacggcggcgcgagcgatgccgacgccgccgcgctgttcaacatgcagctatctga

SEQ ID NO: 27829 - DNA, 267 bp, Zea mays
  Peptide Sequence Number=SeqID_69608
gttcgcatggctgtatttagtccgcatcatgttgatggccttggtttgacggtgaatcccctattgtacatgatgaagtgctacctgggtgtaccggagcagaagttgagggcacatctggatctggacacggttgaggcgctcatccagggctactcattttccaggagtgctgatggtatgacgaaacgtcactgcgtaaatttgcatatgctcccaaccacgttcccgatgactaaggagggtggtgtaggtatgctcaagtaa

SEQ ID NO: 27830 - DNA, 408 bp, Zea mays
  Peptide Sequence Number=SeqID_69609
atgtcgaagaaaactgttgttggctccaaccaaggtggtttggtttatcttaagtacaccttccggcaaggaggaaaaaggaaagttgctacttcaacctcttttagtgcgtcgaagccgaagagggccaaggtcttgacacaatccatgaaagcgtcaacccccgcttttgccgaagcatctggcgaaaaatctgaagatacaagagaagggattattgcaaacgcggctactgctctcgccgaagccgggccttcgaaggctgctccagtaagattgacggaagggagtcttcctgaaaaatctacatctcctgctcccgaagcacctccctttggtgatttggaatacattgttcggcacacttcgggaaatcagttatcattagaacaaattgctgaagtgtaa

SEQ ID NO: 27831 - DNA, 369 bp, Zea mays
  Peptide Sequence Number=SeqID_69610
atggccgcgcgaggggcggcgtcgtatccaccctcctcctcccctcagtgggcgttgcggcgcggttggctgtggctcgcgcacgcgtcacaggtctacggatctgggcctcctgcgtctcactgtggcctcctcgtcgacctagtggcacgttggcaacctctagctcctcaatcaatcaagattagaatcgacggcatcttcaccaagtgcgtatcaatgctcctgttaagggggttagctgctaaccccaatgaagacaatgcgatcaacatcaaccaacaagatcaaagtggcgcagcgaaagcgtgtgtgggtcctaacacacaagtccaagagaacttcaagaattgcatcagggggttgtga

SEQ ID NO: 27832 - DNA, 345 bp, Zea mays
  Peptide Sequence Number=SeqID_69611
atgaggctgcccacggttgttgcctccttgctgtattgcattctgccttattggggctttgggagttggctgctggaagacgggctgcctggttgctctggcgctggtattgatttcctcctcgctggttgttctgacggtactgctgctgctgaggaaactgcctctggtactattgggggggtatgcttcatcgccgaaggtcctatgagaagatacaccttcagaagatcaaaacagaagtggtgccgaagctaccatccggagagcttcagcatagtgacacgccttgagacgaaggatggcaccgacttaaagatgaaaagaccgattggcccactataa

SEQ ID NO: 27833 - DNA, 348 bp, Zea mays
  Peptide Sequence Number=SeqID_69612
atggtggcggactccggctgcgcaagaaaacgctctggtgagcgcggaccggacgagatagagagggagagggcacaccgaagggtgtcccgagtagctgacggtaaggcgaagctcaccgtagcactggccggggcacgggcgcaacggcggccacagaacaggcgttgggcatcggcgggcggtggcggagctctcggttcgtgcgggaagagcaagagagagggcgagggagctgggcagagggcacaaatgagagaggggaggtgggcgagcagggcacgggggctcgaacgtgggcgcgtccacggcggggagatcgtgggcgagagattagagacaggctga

SEQ ID NO: 27834 - DNA, 345 bp, Zea mays
  Peptide Sequence Number=SeqID_69613
atggaccaggggaactcgagaacaaacccattcctcacatcgccttaccctgagccttctgatgggtcagagcgtgaacaacaaccagaaaggaccctagaagaaggaagagtcatctacaggagttcacccatctgcaaagacatcgaaggacataaagcgtatgacaaggtccgaccatgggatgtttgtaacaggctcatgtatgccttggcctataaaaggcagaggtatgtcggtgcatacccggcataccctgtgggtctgccactgcccacacccctggggctcagcgtcctcaccgacctcgccctactccaccacaactctaaccgctgtctctga

SEQ ID NO: 27835 - DNA, 321 bp, Zea mays
  Peptide Sequence Number=SeqID_69614
atggggagttgctcacctcgagtggagactctagagcaccggagcaacggcgggacacagggagatcttgggtcgacagcgacggagctccggctgcaaggtgaggaagccggtgagcgcggaccgggtgaaccagcggggctgggggcaaatcggaagatgtcccacgttgctggcgaagaggcggagctcaccgaggcaacgggcgtggcagaaactcaacaacggccacagaacgggcggcggaccacggcgagcttcacggcgcgcgcgcagaacgagagagatagggcaagggtgctcggctgggggcgcaactga

SEQ ID NO: 27836 - DNA, 177 bp, Zea mays
  Peptide Sequence Number=SeqID_69615
atgacgaagacgaaggtcatgaaggacataccttcgttattgcagtacatgttaatgaaaggagaaacatatgaaatgcacaagacacagcctgtgagaaattacagtcatgccctttacatttactattggcttatagaaaaatctatgaggactgaatggccttttcccctttaa

SEQ ID NO: 27837 - DNA, 204 bp, Zea mays
  Peptide Sequence Number=SeqID_69616
atgagggggcagccgtccttgctgccaagcgtgcggaagcaatggcccgggaagccactgctgtatggaatcggcaccctgttggtcatgccactgaggacactgtatggagtgggtcgtgtttttggcgcaggacggtttctctgcaacatgaccaacgtctcttcgtcgctgcaaattgagcttgagagaatccagtggtaa

SEQ ID NO: 27838 - DNA, 642 bp, Zea mays
  Peptide Sequence Number=SeqID_69617
atgagggctgaaaagaggagcaggaaggcttggcttgctgcaatgcctgtgctgtttggcgccacaaaaggagcagaggtgtgttccttcaaatgccagatagcccactggagacaaggtcacaaagatgaatgccatccaccaagtgttaatacaaggcatgatgatgaagaagaaaaggctgaagtgggaagagctgccaaagagaatgtatcagttggtgttaaacaggttgctgaaatgaacaaaccagatgtaggatctgaaacttctgatgcaaaccatgatttgaagagttcaaatggtaaaagtaaacatatgccttctaaagcagtatgttccagtgtagagattcctggaggtcataagtccaacaacacagttgaaatttctcaaaacgttcagtctgttgacagtagtaagatgggatcaagtatcaaacatgcaaattttgttgaagatggttcttccaccgaggacttaaatgaggcattgccatgtaactctcattcttcttcactaaacattaatggtcatagcagttttgtaaacaaagaattctgcaatcattccaaggaataccaaagagctaaggatgccactgttgttgaggattgttctcagacaaacagtaccaggtag

SEQ ID NO: 27839 - DNA, 952 bp, Zea mays
  Peptide Sequence Number=SeqID_69618
gcgtccacagccgagctgttctgcccgcatcccgcacgctgcgctttctccacgcgcttcccccgccgtcgcgctttctccacgcgcttccccccgcctgccatcgccagcgcgctccctctgcgccgcaatcaactcccaggaaaccttccatccatggcgcctctcgagggatctccgcggtcaatttttacggagaaacgaatccagcgctccatccacgctccatcccagccgccgccgcgcgcatactcccccaactgctgcccccgcgcctccctccccctcgttcaccccatcctcctcgcgacgctcacttacgagctcgcccacctcggcacggacatgcgcgtcatcgaggtgcctccgcgcggaccagcgtgggacgacgggagcaggtggggcgtccgggctgaggtgcaggtgggagtccagggcgggcgggcggccttggcgaggaacgccacgagggccacggccaaggcgaccggtgacgggctcgagccctcgacgccggcgccatggagggggcaccgcgaaggtgtcgaggagcatctgtcgggcggctgggatggcatggcggcaccgagagcgaggagcctggatccaggagtgggcgggagggggccaatcgtggattctttcctcttagaggaggatgaggcaggcggtgcggcgcgcgtgatggccagactgcagtgcgagctgacggagctagaggaaaagaaggccgcacaggagcagcgggccgcggagtccctggcgcgcgtcaaggcgatccgggatgggtcgaggatgggcaagcttattgtctgcagcaaggtagacgatctctgcactaacgagctccatgagctgctccatgggctttcgcgggtcgatcaggagattcgagccctacttcctcctcctgctcctgctcggacagctgaagccggcggtttgatgagag

SEQ ID NO: 27840 - DNA, 213 bp, Zea mays
  Peptide Sequence Number=SeqID_69619
atgacagaggagtcggtcctcattccactcatgacatgtgaacccgggccagagcccccactcatgaccaacgagtctgtagacatatggctcactcacggtctacccagcctaggcatgagtcccttgacgatctacaagacccgcaacacgatgagggacgccaaggctcaggctacaaaggacaggagtcagcgtgatgtagaggagtaa

SEQ ID NO: 27841 - DNA, 1854 bp, Zea mays
  Peptide Sequence Number=SeqID_69620
atggcgcccacggcccaccggatctacgtggagtcgtggagtgatcgccacgtcgttgcgatttcgcgggatatgcggggttctcagtttgaacaggggatatactgcgaaacgttccattccgaagagggcggctggaggaactgtgaatcctgcgggaggagggtacattgtggctgcatcgtgtccatccacaagtatcagctccgtgacgctggtggggttgactgcgccaagtgtgctcggagcacccgtgctgccatggccccaccaagtcccgtatggacaaatcctattcatagttctcaaaatgtatctgacagaaaagacattactgtaaagagctggagacctcctgctgggcaaatttcaagtcagtggaggcagactaatctgtggagcgtgtccagtatacagtcagacttgcagcagcgtctagcttttgagtttgataggcctagcggcagtgaaaagctacttcctgggcgcacttttattcattcccaggaaaggaaatttgatgacatgcatgacagaccagcaactcctgcgggcatgaaccacattatgagggagagagatcccaatgggcacggtcagaccactaatatggatccagcatactcttataccctctatcacagagatggatcgcatccaaataatcttcatgattctaatcaccattgtggagaaaatgactctttgtcttctaggaaagtggcaatgccagaagcttctacaagtgtggatgctggtttcaagcttgattcacatcatacatctaatttaaaggatgatccaccatccctttcagttggtctggcttctaattttgcaccacagaatggaccgaaagaccatatcagaattgcacctactcagcagcaatcacaaatgacttcctcctcattgcagaaacaattctattctcatgctgtaactggttataatgaatttcaagcacagatgcgcaatggaagacccagaatggattcaaaggctagatcacaattacttccccgctattggcctagaataacagatcaagagctacaacacttatctagcgagtatccgacacattctacttatgttaataattcaaattctgttattactcctttgtttgaaaagatgctaagtgctagtgatgctgggcggattggtcgtttagttttgccaaagaagtgtgctgagacatacttccctccaatctcccaacctgaagggctccctttaaaggttcaggatgccagtggtaaagaatggatattccaattccgtttctggccaaataataatagcaggatgtatgtattggagggtgtcacaccttgcattcagtcaatgcagttacaagcaggcgacacagtaacctttagtcgaatagacccagaagggaaattgatcatgggcttcaggaaggcaactaacaattctttcgaacaggagcaagctacaaagcctgccaatggcgccctagcaacttcagaagcaaatggtaaagtttctgccccagattccagtccaaatgctgcagtttcccgtcaaaacaagctcaacacagagaccaaaagttctagtcctgtggaacaagccactgcattgaaaatggacaaggatggattaacacagaaggaagggcctggaactggtagttcttccccaggttctgtcaagagaaaaacaactattcttggtcaaaagaataaaagattacggatggataatgaggaatcaatggagttgaagataacatgggaggaagctcaagaattgcttcgccctcctcctaaggccccatccattgttattgttgatggccatgagtttgaggaatatgaggtataa

SEQ ID NO: 27842 - DNA, 474 bp, Zea mays
  Peptide Sequence Number=SeqID_69621
atggggtgcgcatgccctccgaaaccgcaagggaaagggatcaaggagacaacggcgtcgcggcgcagagcggtcgtcaaagcgtcaccagaaaagaagaagaagaaaagaaatgcacagcaaccagataaagccacaaaggcgcccagcgagtgcgccgctgctctcccagtaccagctccactcccaccaaacaagagcacgcacgcggcgtcgctctttcgcagggactgggaatggcgcgtcgcgattggcccggctctaccaaacctgcaggctgcggacggagcgagagccgagaggggaggacggactgaggacgcgacgtgtttctactattcaccggatggtctcggaagcaaaatactgcgccatagacctttgccaacacctaatcatatcacatccccagggatgcagaggcttagtggcggctcagatgctctgcatactgttaaccggttaattatttaa

SEQ ID NO: 27843 - DNA, 162 bp, Zea mays
  Peptide Sequence Number=SeqID_69622
atggggttaaaagcgaagatagcagagaggttcgggagttctggagcctggaggggaggtggacaaaagagtgtgggaattttagatgatgttttggtaagaaatccaggtgatcttgaacaatttatgggcctgtccgagccttgcacagagttttgctga

SEQ ID NO: 27844 - DNA, 720 bp, Zea mays
  Peptide Sequence Number=SeqID_69623
atgatcgagaggtcgacgaacctggactggtacaagggccccaccctccttgaggcgctggaccagatcaacgagcccaagcggccctcggacaagcccctgcggcttcctctgcaggacgtgtacaagatcggcggcatcggcaccgtcccggtgggccgcgtggaaactgggctcctgaagcccggcatggtggtcacctttgcgcccacgggcctgacgacggaggtcaagtcggtggagatgcaccacgagacgatgcaggaggcactgcccggcgacaacgtcggcttcaacgtcaagaacgtggcggtcaaggacctgaagcgcggctacgtggcctccaactccaaggacgaccccgccaaggaggctgccagcttcaccgcgcaggtgatcatcatgaaccacccggggcagatcggcaacggctacgccccggtgctggactgccacacgtcccacatcgccgtgaagttctcggagctgctcaccaagattgaccggcggtcgggcaaggagctggagagcgcccccaagttcctcaagaacggtgacgccggcttcgtcaagatgatccccacgaagcccatgacggagaaggtcgtcgtgataaacagcgtggagatgaaggacccaacgggagccaaggtccgaaatcatgtaggtgggaccccgaacctcacatatgctgttcagaccctcatgggtgggtcctag

SEQ ID NO: 27845 - DNA, 714 bp, Zea mays
  Peptide Sequence Number=SeqID_69624
atgaatgggcattatcctcacgaaccagtcatcactgagcttcagggtcgtatcacgaaagctgaggctgcattgcggggtaaggaggaggaaaatgtaatgctcaaacagcaattggaacagtatgagaggaaatggtcagaatatgaagccaaaatgaaatgtatggaagaggcatggaagaggcagctctcttctctgcagaatggatcaacatattcttgcaacatgaattttcagctgagccttgttgtcgctaagaagagcctagctgctgatgatgcagccactagagcagctcggactgattgtactcctacacatgcgcagtatgactctgaagatacattatccaccgggactcgtacacctgaagtgatcgagtcgaaacacgacaaccacaaccctgaagctaaagtttcagcaggaaactcggataggcgagtgaatgctgtgaaccacctagcaaaggagtttgaagacagacgacaggtgttcgaagacgatgcgggcttcctagttgcagtcaggtccggtcagattggttcaaatatgaacccagatgaggaactccggaagctcaaggaccgctttgcgacatggaaaaaagactacaaatctcggttgaaggagactaaggtaaaccttagtaaggttggcacccatgatgagaaatcacggaaaagatggtggggaaagaagagctcgaagtga

SEQ ID NO: 27846 - DNA, 696 bp, Zea mays
  Peptide Sequence Number=SeqID_69625
atggccgaggctcgggctatgctcccaagtgccactcgacagagtaagtctgacaggcagtcaggtcttgccaaaggcgccacagcgaactccgctccgcctgaccccagggctcggactcgggctaagacccggaagacggcgaactccgctccgcccgaccccagggctcggactcgggctaagacccggaagacggcgaactccgctccgcccgaccccagggctcggactcgggctaagacccggaagacggcgaactccgctccgcccgaccccagggctcggactcgggctaagacccggaagacggcgaactccgctccgcccgaccccagggctcggactcgggctaagacccggaagacggcgaactccgctccgcccgaccccagggctcggactcgggctaagacccggaagacggcgaactccgctccgcccgaccccagggctcggactcgggctaagacccggaagacgacgaaactcccccctcgcccgaccccagggctcggactccgcccctggcctcggccgaacgacttccgactcgcccgaccccagggctcggactccgccctggcctcggccgaacgactttccgcctcgcccgaccccttggctcggctcggccacggcaacagaaggcagactcaactcggctcggaggaaaccccacgtcgccctgcctag

SEQ ID NO: 27847 - DNA, 327 bp, Zea mays
  Peptide Sequence Number=SeqID_69626
atggccgcttggacaagaaaggccaccgccaaggccatggcgagctgcgtgacgacgggtgccgttcgtgacgacgatggtaacaagcagaggatcccgaaagggtacatccccctggtgctggttcgcgacggcgagggagaaggtggctcggagactaggatcctggtgcgcgtgagagacctcagggagccctgcatggcggtgctgctggagatggccgaggaacagttcgggtacgggcagcagggggtgctcaaggtctttccccctcccgcaacgctttcaccatgtggttgccatggcacgcaagtccaaggttgctag

SEQ ID NO: 27848 - DNA, 496 bp, Zea mays
  Peptide Sequence Number=SeqID_69627
ggagtacaagctgatcgggagagggagaggatcccaagtccttgaggcaagtgtcaatatcagcgtggagagagccgaggccatagtctggggcttggtcgcatacccgagcctgtctgatgatcgtgttatcctagtcatagtggttgaagcagtgataagtatgaaaaaaaagctcttggagatccgtcgagtatctgacgtcagctttgtagcttctagtgacgtcgggcgtgcttttatcaatactatcaaggctgaagccacgctcgagcgagacagaagtcttcccgaggccatggtcgagccagctctagggcttgcagtcgtgcagggaacaattgaaggagtggccttctgcaggattcacggggagcagttggccgagaccgagctcgggcgagacgaattcacgcgacctttgactaaggctgggctcggagttgtccttctgcccgagtcgggctcaggggaggtggaaacaactgtttcgtga

SEQ ID NO: 27849 - DNA, 2280 bp, Zea mays
  Peptide Sequence Number=SeqID_69628
atgcccatccaaactccatttcttcttctattccttctcacgaccaccgtggccatcttactctgcccagcggccaccgtcggggacgacattgccaccaccggtgcagctggggacgccgtggggacgtacctggtggtcgtctgccgagccaatgggcccaaggagggcggcgagaagctgcgcgaatggcacgcctcgctgctcgcctccctcctgaacaccagcaccactacgatcctcgaagaggcgcggtcgccggagggcgggcagctcgtctattcgtatcagcatgtcatcagcggcttcgccgcgcggctcacggtgcgcgaggtggatgcgctgcgcaagctcaaatggtgcatcgacgcgatcccggacgtcaactaccggctgaggacgacgtacacgccggcgctgctcgggttgagcacgccccagacgggcatgtgggcggcggcccgcagcatgggagagggcatcatcgtcggcgtcctcgacaacggcatcgacccgcggcacgcatcatacagcgacgagggcatgccgccgccgcccgccaagtggcggggcagctgcgagttcggtggcgcgccgtgcaataagaagctcatcggcgggcagtcgctgacgccgggggagcacggcacgcacacgtccagcaccgccgtaggcgccttcgtcagcgacgtccagatgttcagggccaaagtcggcgcggcctccggcatggcgccacgcgcgcacctggcgttctacgaggtgtgcttcgaggacacgtgcccgtcgacgaagcagctgatcgccatagagcagggcgcgttcatggacagcgtagacgtgatctccatctccgccggagacgacacgcagaagcccttctaccaggacctcaccgccgttggcagcttctccgccgtcacgtcgggcgtgttcgtgagcacgagcgccggaaacgccggcccggactatgggaccgtcaccaattgtgcgccttgggtgctcaccgtggcggcgagcaccatgacccggcgcgtcgtctccaggatcaggctcggcaatgggctggtgatccaaggcgaggcgggcaggaggtacaagggcctcaaaccagcgccgctcatctacgtccaaggcgtgttcgaagacggcgcgctcaacaccgtcgacgtccgcggaaagatcgtcttctgtgaccgctccgaaaccgccaccatgcgcggcgagatggtccgcgctgccggcggcgtgggcatcatcatgttcaacgacgcctccgagggcggtgtgacgaggttcctggggaacgtgtccatcgcggcggcgcgcgtcagcgaggccgacggcgccaagatcatgtcgtacatcaactccacggcgaaccccaccgccaacctccacttcaccggcgttatgctggacccttcctaccagccggccatcgccgaatactcctcacgaggcccctgcaacatgtcgaacctcggcgtgatcaagcccgacatcaccgggcccgggacgagcataatcgcggccgtcccgggcgccggcggcgggaatggcagcgcacccagccacaccttcggcttgctgagcggcacatccatggccgcgccgcacctctcggggatcgcagccgtgctgaagcgagcgcgcccagcgtggtcgccgtctgcgatcaagtcggcgatgatgacaaccgccgacgtgacgcacccggacggcacgcccatcaccgatcagatcaccggcaagccggcggggcccctcctcatgggatccggcatcgtgaacccgaccaaggcacttgacccgggcctcatctacgacctctcggcgctggactacaccacctacatctgcggcctcgggtacaacgacaacttcgtcaacgaaatcatcgcccagccattgcagaacgtgagctgcgcaacggtcagcaagatcgagagcaaggacctcaactacccatcgttcctcgtgacgctcacggcggccgcgccggtggtcgaggtgaggcgcacggtgaccaacgtcggggaggctgtctcggcgtacacggcggaggtcgtggcacccaaaagcgtcgccgtcgaggtggtgccgccgaggctggagttcggctctgtgaaccagaagatggatttcagggtgaggttcagcagagttggcgccgccgcagacggcggtacggcggaaggaagcctacggtgggtctccggcaagtactctgttcgcagcccaatcctcgtcctcgatggaacgcagaatttggtctag

SEQ ID NO: 27850 - DNA, 375 bp, Zea mays
  Peptide Sequence Number=SeqID_69629
atgggcaattcacttgtattccaacacccccctcatgttgaggctctctcaggccttagacgtggaataagagcgtcgacctcgggctcggtgggcggccgtccgtcagggaaggactctagccaggctcgcgcggagatctcccatgggtgcggcggccgcgtcgaagaggaggaaggcggcgcggcgggggttaacggttgcggaggggtcgggttcgggggcgtggccggggcggtcccaccggggccgggggcttgggggtggaacggcgcggggacggggaagggcagcggcgcgtccgacgggagagcgcgcagcgggaggatggcctggggctccggcattcgcggcggcggcggcggccgaagttag

SEQ ID NO: 27851 - DNA, 285 bp, Zea mays
  Peptide Sequence Number=SeqID_69630
atgacgtgctatttcttggaaatttacatggctcttgatggctttgcgatccttcgctgtggggttgaaggctcggatgacttagaggaggagggcggtggtggaccagatgggagcggctatgacggtgatgacgagggcggcgacgacgacaaggtcggcggagggaacaagagcgatggcagcagcagcagtggcaacgacagcaacaagggaagcaatagtgacaagggcaacgacggcaagggcagcggcaacaccgctggcaaggcgccaccggcataa

SEQ ID NO: 27852 - DNA, 579 bp, Zea mays
  Peptide Sequence Number=SeqID_69631
atgggaaaacgactgctgggccgattcctccactgcggcccacttcccctttccctctcctcggcccaggaaggcctccaccggcgctgtcgggtgggccggtctcacatgcacccactgccacgcgggtcccgcgcgtcaggccttcgttcttccatgtccgcgcgcatcggctcagcagaagcgcaccaatcgcaagaatcagcgccatttccgccgagatccatgcggaccgttgaacccgaccgcggtggacggattttggtggacccgagtcgatccccctgcgcctataaatgctcgagccgcgaccccctctccatatccgttcacgccaccattgtcgaccacaatcgccgccgcggcatctcctcaaaactgcaagggctcggagtcaaacaactgtgcaagaagattcgctggtgggtgaagatcgcgttcgtgagggatttgaagctcgtaaggactcggtggcttggagatttctcgccggagtgttatgagtctcggttacatttccgcctttcccctgacttctctggaaatcgaggcccagtccagaacacgaatcaagcttaa

SEQ ID NO: 27853 - DNA, 1202 bp, Zea mays
  Peptide Sequence Number=SeqID_69632
aggaggccgcggagagctgcggcagccacgccgcggccgctgcgtccggcggcggcgcggcggagctcgctacgtcctcgtcatcggccgccgcggcggtgcaggcgcggaagcagcagcagcagcagcgccataagctcgaggtgtacacagaggttctccggcgcctccacgacgccggcctgcccgacgcgcgggcgcccgggttcgacgacgagctctggaaccacttcaaccgcctccccgcccgatacgccatggatgtgaacgtggagagggcggaggacgtgctcacgcacaagcggcttctggagcaggccaaggatccggctcagcgcccggctttcgcggtgcgggccgtgcaggtatctccaattcttgatgggaatcagactgatgctgattcgaatactgcaggggaggaagtcgcttcaagactgttgaacaggcagcagagcatacatcctcctcctgcctttggttcttctacaaatcttgaggcccttgctcttgaagctagcaagtctcatcaagatcacgatagcacctctgataattgtcgatccctgtacagacgaggatgtcgcgtgcaagaggttatgaagctcctggagcacctgacagagccaagacgcctcggtaacactgttggtcacaacactatactcagcctttgcgttggagtgggagacgacaagctattgcttggaggactaggggacgagattggtgcccaagaacatgacatagacagaggtggtccgacgagtgttggggcagccgatgtcggtgtaggcaaccaactcataagtcagagagggtcaaagaagaagaccgtagtcgatggtggcacagaggtagcgaagaatccactttgcagtggtgaggtgtggttcccgcgaggtgcgcatgcgaaggaacacctactggattgcgtaggcgatgttgggccgagtgaatgtgtgagcctgctcaagaatgtcaatggtgtactagcgctggtgaaggaagaggacctagagctggtgctccatggtgacccctatgaagtggcggagagggcccaattcctttatctcgaactcgcactgcagggaggcaatggtgcgctgaagacgggcggcactggatgccgtgagcacgatgtcgtcgacgtagagcagaaggtaaatggtgtcgtcaccgcgccgaaggatgaatag

SEQ ID NO: 27854 - DNA, 213 bp, Zea mays
  Peptide Sequence Number=SeqID_69633
atgacctttactcatgtcatgctaagatatttcatggcaactctctcccactcgcagcccggggcccgccaagttttcagcagccggacttccgttttcctgcatgtggcggatacagtccccgttagagcattcaccggtttactctatggttgctacagtgctagtgctggcgatgagcaaacctctacgctcgagttctgtgcacattga

SEQ ID NO: 27855 - DNA, 231 bp, Zea mays
  Peptide Sequence Number=SeqID_69634
atggagggtgccagatcttggagagggcgtggagggtgcaacaagggtgtgcagcgagctcggcgtggggctcggacgcgcggtgttggcgcggcgacgcacggcggcgcggacgcagcatctctggctgcagcacgggacgagtctaggaggccgggaggatggtttacaggttaccattgcaagagtttagtgtttagaggctatgtggagggcgcgactatcggttga

SEQ ID NO: 27856 - DNA, 318 bp, Zea mays
  Peptide Sequence Number=SeqID_69635
atggatgaagaagacaatttctttcttattaggttcttcattgcagaggatacgatgaattatgagttgctcgatgatgatgaggaagaggtgcataaaggttcaacacaaaccaataaaaagatcaagttagggttcaaaagaaaggagcaaaagaaaccgaagagcaccctgcgtcactccgctataattcaccggactgtccggtgtgccacgggactgtccggtgcaccagcggagcaacggctcttcggcgcaacggtcgactgcacagtgcccctgacagcgctacagttcgcgacagaagtcagagcagag

SEQ ID NO: 27857 - DNA, 479 bp, Zea mays
  Peptide Sequence Number=SeqID_69636
atgcacatggtcctcgcttatttttgtctaacgtccgagattcgggacgtccgagattcggggtttgacgaggttgagcagggaagaacgagggaaacttcacggtacgaagtcacagcaaaggatgacggaatgcgtgcaacgcagggaaaagctccggccaggcacggcgagcgcgaaccgatggagcagcatcggccatccatggagaagcaccggggaagaacgacgagccgggaccggaaccagggacgcggcgcagggaacagggagaaacgccggcaagtcggaaccaagaaacagggaggcacacactgcgcaggggagttcggctgtgcgctggagctggagtcgggcgcgacggccatggtgagcatagtaggactcagggaggaagacgcgcaaggacttgagaccgagcagggggacgcgccggtgacgaagctccacggcgaggaagggcaccggcaaggatcctg

SEQ ID NO: 27858 - DNA, 1464 bp, Zea mays
  Peptide Sequence Number=SeqID_69637
tccgaaggtttcaagcttgaattcgttcgcctgccgctccgcgacgcggcggccacggccgtgaacaaacggcgctggccccgcgtcttcgccacgctcccgcgcctggtcctccgccccgccacattcaaccgccgcggcttccccgacgaggaccgctgcgaggacccgccgcgctggcttcgcgccctccgctgcgtcctcgaccgccgcgccgcgccggtcgtggctttcgaggtcgactgcggattcatgtgcgtgtacggcgagtggttcggctgggtcttccgcgaggtctgcggcagcggcgggctcctggagctcagcatcgccaacaccgactacaaagagtgctacgcgctgcccgacgctgtctacacctgcaagacgctcacctcgctggacctctacaattgccggctccaggtgccgatcagggccgctgcggtgaccctgcgcgccctgcagacgctccgcctccgcaacgtggtcgccagggacagcgacatccgtctcatcgtctgccggtgcacggcgatagaacgtctggagatccacggcatccacatggcgcgaaacatcgtcatacgcgcgccatgcctcaagaggctagacatctactcgtatcgcccgctctgcatctccctgaagaaggcgaaggcacagccactgaacatggtgaggctgagcctttcctacggctaccctgagcattattggagcctccatgacaccaaggacaccaaaagagagtactccgttcatgaaatagaggagatgcttgattataagaagatggccgagagggagcacaggcagacggatgagatcaagaacatggaaacattcctcactgcactcagctgcaccaagacgctccagttgcacttatcgactgaatactccgagtttcctactacgaagaacgtggtgttacctgtgttggtgagtctagcatcccaccaggttttggacatggtcaaggcttcaacgttgacgagtttgcccaagaaaaagtacctgcatggcttgaaatcactcagccttactctggaccacaaccatgcagttcttgctactctagtctcatgcttgctgaacagctctcccaacctcaaggatctcagaatcattgagctccggcacccggggagccccgtgcccttggctgcggagttctgggagaagaagataaccgcggacgggtttctgtaccacctggcgagcgtcaccttctacaccgactcgctcctggaaggccacccttgcgagggcatctgcaagttcctggtgatgaacgcgagggtcctcaagaggatgagcatcgtgtaccaccactcgcaggtcaggccggagcatgcagccaagctcgaggcggcccggagggagctccgtgtctggccgagggcttccgcggacgtgctgctggagttgactcctgtccatcggttcccatggttctga

SEQ ID NO: 27859 - DNA, 642 bp, Zea mays
  Peptide Sequence Number=SeqID_69638
atgccaaaatttggacatgggcagaaaaaatgttgggatgtaggacaaggagagcgtattgaagatcttgagcctttctacccagatcgtatggcacaacgtatcttgggaatgggagatatgcgccaagaagatgctgatgaattacagaagaagatcttgagtgcaaaattcaactttaatgacttcctgaagcaaacacaaatgattgcaaaaatgggttcattcagtcgtttgattggcatgattccgggcatgaacaaggttactcctgcacaaatccgtgaagctgagaagaatctcaagtttatggaatcaatgatcaatgtgatgactcttgaggaaagggaacgaccagagcttcttgctgaatcacgcgagagaaggaaacgagtggccaaggactctggaaagactgaacagcaggtgagccaattggtcgcgcaactcttccaaatgcgtgcaaaaatgcagaaaatgatgggcgctatgcaaggaaaagagtcaccagacatggacgagctcatgggatcgatgaaagctgaggagcagtctgctgccggtactggacggcgtagaaggaagtatggcaacctgaggcagcggcaactggatgccatgcgtggtttccgcagacggtga

SEQ ID NO: 27860 - DNA, 426 bp, Zea mays
  Peptide Sequence Number=SeqID_69639
atggagaaagatcgccgggatgtgcaacgggaggctgaacttgctctcaagcgcgccgtcgacaaggagtcagagctgaagagcgtccgcaactattgtgagaagacgaaggcctccacccgcgccggggttgagcgggcgcacacgctatttgtggaagcgtaccgtgagctcggcgcacagactgctccttctgataaatctggggaggaggtgggtctccgctttcttgggtggctacagcaggagccggagtcactcccatccatcgtgatgggcctcatgtcctacgcatctcttgttacctgcgagggggcgatgaatgccttgtcccgagaaggatgtaggcacttcgaagtcttcgaccgggcgagcgaggacttcgacagcagaattttccagatgatgaatcaagaagaagtttga

SEQ ID NO: 27861 - DNA, 251 bp, Zea mays
  Peptide Sequence Number=SeqID_69640
atgcaacgtttcttagtggaaatgtgtctgaggggtctgagcttgggtcgtggtctttggatgaagaggaatttgggagtcctttctcgtgggttgaggaatcttctgaggatgacctagattattttgctgcgttggatttagctacgtcggagtctctgccgcgatctatccctcgcaaggtgctgtcgacctcgactgatgcgagagctaaagactcacggaggcgaagaatgggtgtgtcgaaatag

SEQ ID NO: 27862 - DNA, 1242 bp, Zea mays
  Peptide Sequence Number=SeqID_69641
atggcttccgccgaaaccctagcccgctccccctcgcgcgagccttcctccgacccgccccgcgcaggctcttccgagccccaccacaacggcgccggtgactcgtctcgccgccgccgccgcagccgctgggagcagtctaacgacgactccgccaacaactccggcggcgagggcggggccgtgggccggaagcgcaaaacgcggtgggccgaggaggagccgcgcccagccatcgcgctgccggacttcatgaaggacttcgcggccgagatggaccccgaggtgcacgctctcaacgcgcgcctcctcgacatctcgcgcctgctgcagtcgggcctcccgctcgacgaccggcccgagggcgcgcgctctccgtcccccgagcccgtctacgacaacttcggcatccgcataaacacccgcgaataccgcgccagggagcgcctcaaccgcgagaggcaggatattatctcgcagctcatccgccgcaaccccgccttcaagcccccctccgactaccgcccacccaagctccagaagaaactctacatccccatgaaggaataccccggctacaactttatcggcctcatcattggccctcgtggcaacacgcagaagcgtatggagaaggagactggtgccaagattgtcattagggggaagggtagtgtcaaggaagggaagtttctgcagaagagggacctcaagccggatcccagtgagaacgaagatctccacgtgcttgttgaggcagagacgcaggaggcactcgatgcggctgctggtatggtggagaagctgctcaccccggtggatgaggtgctcaatgagcacaagcggcagcagctccgggagcttgccgctcttaatggaacaattagggacgacgagttttgtagaacatgtggtgaggctggtcacaggcagtatgcttgccctaacaagatgaacacgtttaagagtgatgtgcagtgcaagatctgtggggatggtgggcacccgactattgattgtccagtcaagggcacttctggaagtggtggtagcggtggtgcttctgctggaacggggagtaacccgccttggtcagccggtggtggtgctgctgtcattgggctcaatggtatcaagaaagactatgacgagacaaatctgtatatcggctacctgccacctacaatggatgatgatggattagtcagtctgttttcgcatggtttatattgtcatggctaa

SEQ ID NO: 27863 - DNA, 1290 bp, Zea mays
  Peptide Sequence Number=SeqID_69642
atggccgacgtcggcgagcctcctccctcgctctgccccttatgcggccaccccgctgccttctccgtttcaccgtcgacgtctgcggcggccagcatcggggatgaggccgcggcgctgcgcgaggcattggcgcggcagcaagcggcgctcgccgacgtccaggcggagctcgacgcggaacgcggggccgcggccggcgccgccagcgaggccatgaccatgatcctccgcctgcagcgcgagaaggccgaggccatgatggaggcacgccagttccgccgctacgccgaggagaagatggctcacgacgccgccgagctcgcggccctcgaggaggcgctctcgaagcgtgaggccgggatgcgggcgctccagggccagacgccccgtcacgcctgcgccgcgccgtcggggggctccaccccacgacgcccctctgtggccacgccgcgtcacccaccctcctcgctgtcccccgcggcgtcgtccggaggagggtactacccgcctctgcggtgcagcatcgaccacccgcccaccgcgtccgaagcagacgcgctcgagacaccgcgcgaccagctcaaccacctcgcccaccgtgtccacctcctcgagcgcggcgcgaccccgatggccgccaccaacaccacgcccatcatccgtgtcgcgccggggtctgccttcccgcaccatgcacgggcctactcggatgacagccttgacttgtacgatggtggcgactgcttcccggatgacgattgcggcgccagcgaccgggtatacaccgtggacgccattcatggggcacccctggcggttcctgagggctcctacgccggtagcacgcccatggggagcgactgctacggcggcgctccgtgggcagaagacgaggaggtgcgccgcctcagcgtgcggatgcaggcgttggaggcagaccgtgagtccatgaggcaagccatcatgtccatgggagccgagaaggcgcaggtgatgctgctcaaggagatcgcgcagaagctctgcaaagacgcgacaccaccggttccagcggcagcagtggcgcagcacggcttttacaaagggggcaacacgcagccggccatgaccatcactgtgcgaccaccacggcacccagctttgcttatgcaaaggaaactggtgaagaagaagccatcactccttgctgtagtggtcaagtgcggcaacaacgtggggctgcttctgctgctcgacaaggctcctagggcaggccacgggcaccagaggcctcccaagaggatctaa

SEQ ID NO: 27864 - DNA, 321 bp, Zea mays
  Peptide Sequence Number=SeqID_69643
atggccatctattgtgttacattgcaagtactgcgagaatgtcatggggatgttgcgacagttcctgatgatgattcaattgaccaatcagatggcaggatccatgactatgaaggcaaggtgacattagctactgatgttaatgaatatgttacttctgcggcaaacaacaacgaggagaatcttgatattacatcagtacagcaatctgaagtcactagagctgatttcttggatgtcacaagcaatactgaatacaacctaacagcaactccagattatgcaacttcaagtgcactgttgcaagattctgcttcatag

SEQ ID NO: 27865 - DNA, 99 bp, Zea mays
  Peptide Sequence Number=SeqID_69644
atggtgctggccacgctcgaatccttggatgatgccctgccatccaatagaaattggtccttcaaaaccactgctggagatgacatgttctttggataa

SEQ ID NO: 27866 - DNA, 225 bp, Zea mays
  Peptide Sequence Number=SeqID_69645
atgttgcggctccatctctttggctttgatggcttcggtgccgccgggccaatggtgaccgctggcccggctgctgaagacgctacccagggggtcgtacaagacgtcgttttagtctgggaagccaagttgtgtgtccggaccccctggaccgcggttctagatactaggacacccatcgcagagtggtggagtgtgcaggcttacggtacaggaccaggctaa

SEQ ID NO: 27867 - DNA, 1899 bp, Zea mays
  Peptide Sequence Number=SeqID_69646
atgccgttcggtttgaggaatgcgggtgcgacataccagaggtgcatgaaccacgtgttcggcgaacacattggccgaacggtcgaggcctacatcgatgacatcgtagtcaagacgaggaaagcctccgacctcctttccgaccttggagcgacattccgatatctcaaggcgaaaggcgtaaaactcaatcccgagaagtgtgtcttcggggtcccccgaggcatgctcttggggttcatggtctccaagtggggcatcgaggccaacccagagaagatcgcggccatcaccagcatggggcccatcaaggacttgaaaggcgtacagagggtcacggggtgccttgcggctctgagccgtttcgtctcgcgcctcggcgaaagaggcctgcctctgtaccgcctcttaaggaaggccgagtgcttcacttggacccctgaggccgaggaagccctcgggaacctgaagacactcctcacgaacgcgcccatctcggtgccccccgctgccggagaagccctcttgatctatgtcgccgctaccactcaggtggttagcgccgcgattgtggttgagagacgagaacaggggcatgcattgcccgtccagaggccagtctacttcatcagtgaggtactgtccgagaccaagatccgctacccacaaattcagaagttgttgtacgcggtgatcctgacacggcgaaagttgcgacactacttcgagtctcatccggtaactgtggtgtcatccttccccctgggggagatcatccagtgccgagaggcctcgggtagaattgcaaagtgggcggtggaaatcatgggcgaaacgatctcgttcgcccctcggaaggccatcaagtcccaggtcttggcggactttgtggctgaatgggtagacacccagctcccaatagctccgatccaaccggaactctggaccatgtttttcgatgggtcgctgatgaagacaggagcgggcgcaggcctgctcttcatctcgcccctcgggaagcacctgcgctacgtgctacgcctccatttcccggcgtccaacaatgtggccgagtacgaggctctggtcaacgggttacgcatcgccatcgagctaggggtccgacgcctcgacgctcgcggtgactcgcatctcgtcatcgaccaagtcatgaagaactcccactgccgcgatccgaagatggaagcctactgcaatgaggttcgacgcttggaagacaagttctatgggctcgagctcaaccacatcacccgatgctacaacgagactgcggatgagctggctaaaatagcctcggggcgaacaacggttcccccggacgtcttctcccgagacctgcatcaaccctccatcaagaccgacgacacacccgagcccgagaaggcctcggcccagcccgaggaccatccgaggcaccctcggctcagcccgaggcaccctcggctcggcccgaggtaccctcggcccccgaggaaggcactcgggggctacacgcacctgttggtcgccatcgacaaattctccaagtggatcgaggtccgacccctaaacagcatcaggtccgaacaggcggtggcattcttcaccaacatcatccatcgctttggggtcccgaactccatcatcaccgacaacggcacccagttcaccggcagaaagttcctggacttctgcaaggatcaccacatcctggtgggcgacctggtgcttcggctgcgacaagacgcccgagggcggcacaagctcacgcctccctgggaagggccgttcgtcatcgccaaggttctgaagcccggaacgtacaagctggccaacagtcaaggcgagttctacggcaacgcttggaacattcgacagctacgtcgcttctacccttaa

SEQ ID NO: 27868 - DNA, 972 bp, Zea mays
  Peptide Sequence Number=SeqID_69647
atgcaggcggcatgcaaccacaccaagggggtgctccctttcgacttcgacgcgtccagcatggaggcccaggcccacacgtcatggaccgggaaaggggataccccaaaagggatccttctccgcaaaggaaacgggccccgagcctccctactgatcagaggttcgaaggctggcccctcggaagggttcaacagccgcctcagagcactcgggctccgcgcccactactggtcaggggttcgaaggtcggcccctcgaaagggttcaacggccgcctcaggccactcgggctccgcgcccactactgatcaggggttcgtaggctggccctcgaagggttcgacagtcgcctcagacgcagagcgagggatgaccctgggggcagccgaccctggaggattcacgcctcgcccgagggccccctcaagcaacggacacaccttcggctcgcccgaggcccagtcttcgccaagaagcaaccttggccagatcgccacaccgaccgactgcaccacaggagcatttaatgcaaagcggccaagtccggcctcgggcgccataggaagctccgccttgcccgaccctagggctcggactcgggctcggccccggaagacgacgaactccgcctcgcccgaccctagggctcggactcgggctcggccccggaagacgacaaactccgcctcgcccgaccccagggctcagactcggcctcggccccgaaagacgacgaactccgcctcgcccgacccagggctcggactcgggctcggccccggaagacgacgaactccgcctcgctcgaccccagggttcggactcggcctcggccccggaagacgacgaactccgcctcgcccgacccggggctcggactcgacctcgaccacggaagacagactcgacctcgaccttggaggagcctccgcctcgcccgacccagggctcggaccgaccacgtcatag

SEQ ID NO: 27869 - DNA, 189 bp, Zea mays
  Peptide Sequence Number=SeqID_69648
atggggattaggttctttggaaccgaacctcgaaattaccatatccatgtgggacttatgaagatcaagaagaaggagttcctatcccttaagcagggaggcatgtcggtacccccgctcgtggcagttctggacaacagtctccacagatccaagctactcctcaagcaagtaccccagcaggactag

SEQ ID NO: 27870 - DNA, 732 bp, Zea mays
  Peptide Sequence Number=SeqID_69649
atggcccccgtcctcccagttgcccagggttgcggcaagcacatcgtgctcgtccacggcgggtgcctaggcggctggtcctggttcaaggtggccacggcgctccgcgcagcggggtaccgcacggacaagccggacctggcggcgtcgggcgtggacccgcgggcgctgcgggaggtgcccacgttccgggactacacggagccgctgctgaagctcctggcgtcgctcccggacggggagcgcgtggtgctcgtgggccacagcctcggcggcgtgagcgtcgcgctggccgccgagacgttcccggacaaggtcgccgccgtggtgttcctctgcgccttcatgcccgactgcgcggcgcggccgtcgcacgtgctggagaagcttattgtccgtatcgagcagttcgtggaggggaagtggctggagtggatggacatagaggtgaaaccccaggacggcgaaggcaagctcaccacctctatgctgttcgggccccggatcatccgagagaagttcacccagctctgctcgcccgagatatactcgatgctgcggaaaatggcgtgcgctacccgtgtgctgaaggagatcaccacccttctcgcggctattccaaccatcggctacgcgcgcatcctcgacatcgggtgggagtgggccggcgtcatctggatatacaacgttgtcaccttcctgccaatggacatgttcaagctagccatctga

SEQ ID NO: 27871 - DNA, 1290 bp, Zea mays
  Peptide Sequence Number=SeqID_69650
ccaagtcaatccattgaatttgctctcaagaagcagcaagacattgccaaagaggagtactttattcgtttaagtacttcgataaatgctgtgagatacttgttacaccaaggactagctttttgtggccataatgaatctgaagattctgcaaataggggcaattttattgagttagtgaaacttttgacagagcaaaatgaaaagattaagagggtggttcttcgaaatgctcctgaaaatcatcagatggtatctccagaaattcaaaaggatattgctaattgctttgcagaggtcatagtgaattctattattgaagaaattggtggtgatgtattctgtttgctggttgatgaatccactgatgtttctgataaagaacaaatggcagtggttttgcgttggaaacaagttagaggccaaggttatgatggagcaagcaatatgagaggtgagttcaatggattgagagctttgattatgaaagacaatgggtcagcatattatgtccactgttttgcccaccaacttcagttagtcattgtggcagtagctaaaaagaatgatgctattagtgatttttttgacatgatatctcttctacttaatgtggctggagcttcttgcaaaagaaaagacatgatacgacaaagtcaacaagatagagttcttgaatatgtggaaaagcatggcccaaatgacaaaaagagacgccaagctcgtgggctactagattatctcaaggattttgattttgtgtttcatttacacatgatgttgatgatcctgggctatgcaaattctctatcactttgtttacaaaggaaggatcaggatatattggaggccatgacagagcatgatattccaaagttggacatggaagaggagtacattgatcgccataaaccaaggaaaaagtcaaatcgaactaactatcaacattatagatgggattgtttaaactcagttattgacttgctactcattgagttcaatgatcgctttggtgaaacaaattctaatttgctaacttacatggctgctcttagcctgaaggattcttttggcaacttcaatttggagagcttaatggaattagctaagcactatttcgatgatttcagtccagagcaattgaaggatcttgctcatgaacttccaatttacattgacaatatacaagctgatgaaagattctctaatctgaatactattactgaacttgctaaattgatggtgggcacaaagaagcatcttgcttttcctctggtctacgtcttctaa

SEQ ID NO: 27872 - DNA, 339 bp, Zea mays
  Peptide Sequence Number=SeqID_69651
atggggagctggagcttgtggcagccatggcgagcagcaggtcgcctggctgggcatcccagcgggagtggagccgagggtgcagggcatggaggccaccatagctggggaagaacgacgatggggtggtcgccgacggaagaagacgacccaggtgccatggctgcagagagccagagaccagggcgccgcggccatggggaggaatggagaatgggctcggacctgagccatggatggggtgctacctgctccatgctccaatggagaaggaggaatagccatgggagaggggctctcgcagatacagccatgggagaagagaggggtgggctgtaa

SEQ ID NO: 27873 - DNA, 501 bp, Zea mays
  Peptide Sequence Number=SeqID_69652
atgaccttcatatgcaatactcttgaatttgagcacttggtcaattcagttgcaaatggattgctgacagaagttcatatccgtacacatgaagtggactacaacagagaactgagtcagaatcggaaagaaaaaataaaagcacttttgcactgcaaaaaatctgtgcgtccctttgacgctgatgccgaccttttagaaatgaaggctctatcacaagctcttggcattcccttgcacctagcagctgtggacgataaccccctgcccgacagaactgtgcaagtaaagtggattgacttcattcctcgaccaggacctctcggttcaatcagagaatactacctaggacctctcggttcaatcagacaatactacctacccagtgcaactgataaacatccagtcttgccagctgaaaactttcttttgtctggtcgcatgcctctagtcaccatattaaggactgtccgtgctactgccattctttatcgcaagtga

SEQ ID NO: 27874 - DNA, 612 bp, Zea mays
  Peptide Sequence Number=SeqID_69653
atgcaagctagtcatgctgaggtcactcgcttaatggaatgtgtggcaaggtccagagagaaattttgtcgtttacattggaatgatgcgtacttctcaaatcctgaagcatttttctcaagtgttgtttctgagttcgagcaattggtcaattcagttgccaatggattgctgacagaggttcatatccgtacacatcatgcggactacccagaattcagtcaggaaacagaagcccttatgttttgcttagcatcggtgcgtccctttgaagctggagctaacattctacaaatgagtgctctatcaagtgcacttggcatcccattgcacctggcatgtacggatgtaaccacgagtgatgatgaaattgtgacagtaaagtgctttgacttgtttcctcaatcagaatcaggagcaagcacaacatcaggagctacgagttcaatcagaagttactctctgtcaagcacaactgataaacacccagagcaaggaagggatgataacaactcaaccatgccggctggaaacttgttttcgtctgatcgcatgcctttagttatcttactgagtaggaagggtcaatatggcattctttatcgcaagtga

SEQ ID NO: 27875 - DNA, 696 bp, Zea mays
  Peptide Sequence Number=SeqID_69654
atggtgtcaggctttggctgctcttacgctgtcactggaaggaagcgcgtaaagttgttggcagccgagtcatcggatggtgaacccctcggctgttgcgtgccaatatgtgatgattcactgggggacttgattgagtggtgctccgagtggcatcacatgccttccgattgtggtgatcaaacacaacacactggtgtgtttgctgcaatgcaagaatacacctgttccactggtaacaatggtgtgatttatccacaatctgggattagccattcatctggtcaaaatggggcacagggcacatacttgcaacaccaacattttgaaggctgcatgtatatgagcgggaatggacagatgtgcggaccttacctgcctgaacaactgtatgaggggctatctagtggtttcttgcctcaaagccttgctatctatgctgtttttggtgggaaaacagtcgatcctgtgcaattgatctttctgaaacaattcctttcacaatggaatgtcggtgccgtggcttccaccccaaatgtatcgacagagacagagagagtgacttcccatgctaaaatggtttttccagatgtatggcttgcccttctgtctatatttgttcgtgtcatccttagcctgcctgccttcctgactgctttggttcttgcttcctccctgttagtctctttcaagtga

SEQ ID NO: 27876 - DNA, 621 bp, Zea mays
  Peptide Sequence Number=SeqID_69655
atggccgctctccgccacctcgccgccggccccacctgccaccaccaccaccaccacggcgtcgcggcagccaccgcctccctccggctccatcgcctccccctccccttccgcccccttcgctcccgctccggctccttcaccagggtttatgcgatctccagcaatgacatcagggtcggcaccaacgtcgaggtcgacggcgcgccatggaaagttctaggtgacaagacagcattcctctcccttccttcttttatccgaaggctattcattcacccacgattgctcaaggatatgcaacactgtaccagcataagttttatggatactactcatctagtcttcattgaaaaacaaaaattacgtcgttgcgcaaaatgcacatcattgttatgcaagatatgccggttaacttctctccacccaacaacagagttcctccacgtcaagcctggaaaaggcgctgctttcgtcaggacaaaactgcgtaactatgtaactggcaacacggtcgagaaaaccttccgtgctggaagtacgctacaggaaccatccctttcaaaggagaccaagcaatttacatacaaggatggctcccagttcgtgttcatggatctg

SEQ ID NO: 27877 - DNA, 333 bp, Zea mays
  Peptide Sequence Number=SeqID_69656
atggcccagaggctttcgggccaacccggcacgtttttggcctctctgggccgtgcttggacacatgtcctggcccgtgacccgaaccggcacggcccgagtcaacagcgtgccgggccaggcacgaccctgttcgtgccgtgcctaaccgggctcgggccgggtccgtgccgggcggcccggatggacatctatactcccggcaatgaggtcgggcaactttcccacgggcaaagagaaggcgacgggagcgacctccacacgtcggtgtccgcgtgtcaggaatggaggtgtaggcaatactggttgagcgggaatggagcggactgttag

SEQ ID NO: 27878 - DNA, 3573 bp, Zea mays
  Peptide Sequence Number=SeqID_69657
atgcccctgccgccccacgcctgctcagccggagcggggttcgtcgccaccgccaccttctcccacctctaccagctatgcgccagcgctgggcgctcggccctcaccacgggccaggctgcgcacgcccgtatgcttgtgtccgggttcatgcccaccacgtttgtctccaactgcctcctccagatgtatgcccgctgcgggggcaccgcccacgcgcacggggtgttcgacacgatgccccaccgggacacggtctcgtggaacaccatgctcacggcgtacgtgcacgcgggcgacaccgacacggccgcgtccctcttcggcacgatgccggacccagacgtcgtgtcctggaacacgctgatctcgggctactgccagcacggcatgttccggaactcggtgggcctgtctatggagatgtctcgccgtggtgttgccctcgacaggacgacgctcgctgtcctgctcaagtcatgcggtggcttggacgacctggcgcttggtgttcagatccatgcgctggcggtgaagacgggcctggagacggatgtccgggccggtagcgctctcgtcgacatgtatggcaagtgcaggagcttggatgacgcgctgcgcttctttcatggaatgggtgagaggaattcggtctcgtggggtgcggcgatcgctgggtgtgttcagaacgagcagtacacacgggggatggagctgttcgtgcagatgcagaggttggggcttggagtcagccagccggcttatgccagtgcctttagatcctgtgcagcaatgccatgtctgagcaccgctaggcagttgcatgcgcatgccatcaagaatgtttttagctctgaccgtgttgttgggacagcaattgtggacgtgtatgcgaaggctggtaacttggttgatgcaagaagggcattcattggtttgcctcaccataatgtggagacatgcaatgccatgatggttgggcttgtgcgcacagggctaggagctgaggccatgcaactgtttcagttcatgaccaggtctggtgttgggtttgatgtaattagcttatcaggtgttttcagtgcttgtgctgaggttaaggggtactttcaagggttgcaagtacactgcttagcagttaaatcaggttttgatgtggatgtttgtgtcagaaatgcaattctggatctatatgggaagtgcaaagcattagtagaagcataccttgtattccaggagatggagcaaagagattcggtctcttggaacgctattattgcagctctcgagcaaaatgagtgttatgaggatactatagctcatctaaatgaaatgctgcgctctggtatggaacctgatgatttcacgtacggcagtgttcttaaggcttgtgcaggtctacaatctttggaatatgggttggtggttcatggcaaagctatcaagtctggacttggtttagatgcttttgtttcaagcactgttgttgacatgtactgcaaatgcggcgcgataacagaggctcagaaactccatgatagaattggggggcaagaacttgtttcgtggaactccatcatatcaggtttttcactcaccaaacagagtgaagaggcacagagattcttctcagagatgctagacatgggtgtaaaacctgaccattttacttacgccaccgttcttgacacttgtgctaatctggctaccattgagttggggaaacagatccatggtcagattatcaaacaggaaatgcttggagacgaatatatctccagcactcttgtagacatgtatgccaagtgtgggaacatgccagactcgctgctaatgttcgagaaggcgcggaaactggatttcgtatcatggaacgccatgatatgtggctacgcgctccacggccagggacttgaagccctggagatgtttgagaggatgcagagagcaaatgtggtgccgaaccacgcgactttcgtcgcagttctgcgggcatgcagccatgtcggcctgctggacgatggatgccagtatttccatctgatgacaagccgctacaaactggttcctcaactggaacactttgcttgcatggtggatatactgggacgctcaaagggcccacaggaagccctagaatttatcagaagcatgcctattgaggcagacgctgtcgtatggaagactctgctaagcatttgcaagatccgtcaagacgtcgaagtggccgaaactgccgctagcaatgtcctacggctagacccagacgacgcgtcggtttacattcttctctctaacgtatacgctggatccgggaaatgggtcgatgtttcaaggaccagaaggctaatgaggcagggacggctgagaaaggaacctggttgtagctggatcgaggtgcaatccgagatgcacggtttccttgtcggcgataaggttcatcccaggtcgaaggaggtgtatgagatgctgaatagtctaatcggtgagatgaaactctctggatatgaacctgcatcagcattgtttgctgaggttgaagaagaggagaatatacagtgtacgggcgactgtacgatgaagaagatggacagcagaagaggtagcgggtcctgggctgggctggcgctggcgatggcgctagtattagggcgggaggaggagctcctggcgcagctccgcgcgctactgacgttcctaccacctcctgcgtcgcccccggcgccggcggctcccgttaaggtggagtccatcatgggcactagtggcggcggacgacgactggggagcaagagagaccgggacgacgacagcgaagccgaggccgagcagcacggcgacgaacctgcggctgcgcagcctcactattgtcctcatcctcctcctccctgcaaaaggacgaggaggaggaagaataagaagaagcggcagcagagcaagtgccttgtgacgacagtgcccgacttcgacgggtaccagtggaggaagtacgggcagaagcagatcgaaggtgccatgtaccccaggagttactacaggtgcatacagagcgccaagcaaggctgccaggcaaaacggacggtgcagcgcaacgacgacgacggcgccaccgcacccccagagtacacggtggtgtacgtggcggagcacacctgcacggccaacgacgacgcgctggaggccccgccggtcatcctggagaccaccaccagcgtcgtcgtccgtgcacctgcagcacacaccgatcccgtcgtcgtcgtcgttccggcaacggcaactacgtcagccgccgccgccgcctccgcttgttccaccaccgtcaccacggggactgaatctccggcgatctccggcgacgacgtggcctgctgctggagcagcagcggcagtagcagcagcggttacagctacgccgacgactcctgctgctgctgctgctgcgacgggttgctcgccgctgtcgtccacggtggctgcggcggctcgtgggcccccggaccggcggattcggtttcggtgccgtcgttccggttgcaggagatggaggacttgaccggaccgatccggtcgccg

SEQ ID NO: 27879 - DNA, 441 bp, Zea mays
  Peptide Sequence Number=SeqID_69658
atgcccgataccttgcatagagatcctgaggaggtctgggtttataagatcatatcttactgtggtggaccacagagggctctacagaccaggtttatacgagcaacctcgccggactatgaaccgctagtgatcagacaaggtttacgggaccggacccctaccaggttgttcctgatgtgtacaatgtgccaaaggttcaacacaaaccaatcaaaagaacaagttaggtctcaaaagaaaggagcaaaaaggaaaccaaaggctgccctagtgtggcgcaccggacagtccggtgtgccatcggacagtgtccggtgcaccagggtgaatcagctcaaactcttcacctttgggtttcccaggcgtagctccgctataattcaccggactgtccggtgtagcaccgaacagtgtccggtggcgcaccggactgtctga

SEQ ID NO: 27880 - DNA, 930 bp, Zea mays
  Peptide Sequence Number=SeqID_69659
atggacgagcagctttcaaaacctctctgtcagcttgttgaccgcaagatttatgtgaaaaatatccaagaaccaaacaaatctttgacatcaaagagagtttcatttgtggacaagccctccgaaaaaggagccaaaactgtggctaatgatgcttatgatttgaatatccagcaagatctgacactcctttccagtgaggtgccaaaaagagccaggtcatctcatccaactaagaagcatatggttgctaacaggacacctacggtgaatgataatgtggcgaataatagtatgctcacgaaacatgtcaagaaaaaaaagggcaggaacatttccagtgagaccagtcagaaggtaaaaccggtgatctcatgcccagaatcagatggttgtgctagagcttccattaatggatgggagtggcgcaattgggcacggaatgctactccgtcggaaagggctcgtgtgagagggtaccatgttcggactattctttctgcctcaaatgataatgtgtggaaaaattctcaagcaaaggtttcatctgcaagaacaaatcgggttaaactgcgaaatctgttagcagccgctgaaggttctgaactgctgaaaattacccaaatgaaggaggttctggtgattctcatttatgcgtttcttgatgtgcaggcaaggaaaaagcgtttgcgttttcaaaggagcaagatccatgattggggtctggtcgcacttgagtcgatcgaagcagaagactttgtaatagaatatgttggtcaactgattcaccggcgggtatctgacatacgtgagtctcaatatgagaagagtgggattggaagcagttacctctttcgcttggatgatgattttgtggtcgatgccactaagcgtggtgggttagcaaggttcataaatcattcttgtgag

SEQ ID NO: 27881 - DNA, 111 bp, Zea mays
  Peptide Sequence Number=SeqID_69660
atggggtttcgcgagaatcagcttgattcgtttcgggcgaggaaagaacatggatcacaatgttacgataaaaaacttgatagtgagaacggtggggatttagatcgctag

SEQ ID NO: 27882 - DNA, 963 bp, Zea mays
  Peptide Sequence Number=SeqID_69661
atggcgtccaccaacgcaatcgatttccaactcacccaggcccgggcgctgctgtccgaattcgacaaccggctccgcgagattgattccaagtgggagacccgcgtcggcgtcctcgaaacgaaagttgcggactctgctcgaaatctggagacgatctccaaggagatccgcgacggggtggtggcgcagttggcggcggccgaggcgggtgtggatttccggatccgcctgcttgagacggggaccatcattcgcgtcgctgcgctcgagtcgactgcccacgccttcgagctgtggcgtcctcacgtcgacttgtcgatcgacagtctcttctcctccattgacgcggtttgtaccgaggtcgagaaattggggatccaccggttcccaggaccgcgtcccagcgatggcgcagcagcaccggggaccgcgacgcaaccggaaccctcttctcatcggccacgttcatcgcctccgcccgaggtccatgacggcgacgatgacgatgaagaaattgacgatgacgatgacgacgacgacgacgacgacgacgacgacgacgacgacgacgacgacgacgacgacgaggattatgagggcttcacagacgaagagctggacaaattcgaaagcgccttcggatggggttctacattcttgagtgatcctcaagttctttgtatggactcgagtgatccacaaaacccccctcgtattggccggcaaaattatgagccgctcaccgcacaggagtttttttcactgcgccacaattggcaacagctgctcgatggcaagaagacatacctccgcccaccaaagaacaaccgtgttgccaagcacagttatgctaactgcacctttgtaaccccagaacctcttgagaaggcactacaatgtcagggcgtgtttggaagtaaagtatttcaaaaccatagttttggaatactacggttttaa

SEQ ID NO: 27883 - DNA, 267 bp, Zea mays
  Peptide Sequence Number=SeqID_69662
atgagttcattgtttgacttgaatatgcagccacccggtgaagatttagttttcgagttcaatgaagaagcagtagatttacaatatgaggttggcttgtttgacttgaacatggagccacctgctgaagaatcttttggccttgatttgaaccaggaaccactagaggcagaagatgatgatgttgtgatggacttgacatgggatgaaccggacacatttgatgttatgaagcggaaagattattcagaaaaagttaaaaattaa

SEQ ID NO: 27884 - DNA, 372 bp, Zea mays
  Peptide Sequence Number=SeqID_69663
atgggtggattccatattggaaatgtcataagcttcctagcaacaccaatcatcatgtcgcacataggcctctcgggaacattcaccttcttcgcgtcacttggttatttgtggctctctatatggatggtgaacgtagaaagtgatcctattgacagccgtactataagcaagtctgagttgcaattaattctagatgggagaattggatctaaagtccaaggcagtaaattcccatccgtaagggaattgttctcaaagactcaattcttggctgtcactttggccaatgtggtcaacaactggggctattttgttctattgtcatggatgcccgtgtatttcaaaacgttgtatggagaggatcggtaa

SEQ ID NO: 27885 - DNA, 165 bp, Zea mays
  Peptide Sequence Number=SeqID_69664
atggctcctgaatatgtgtctgatggccttctctcgatcaagtcagatgtttttagtttcggggtcctgcttcttgagattataagtggaaagaggagctcaggttttcagcacaatggagagttctacaaccttcttgaatacatacctacaaatatatgctaa

SEQ ID NO: 27886 - DNA, 1125 bp, Zea mays
  Peptide Sequence Number=SeqID_69665
atggcgatggcgtctcgggatggaggaggtgcggcgggccgggcggcgctgcgggtgggccggacgcgggagtaccggacgggcatggagacggagctgctgtccatcgacgccgggtcgtcgggcggcccggcggtgagcctcttcgtgctgtgcggcgacggcttcgaggccgcgcgcctgttccggtcggggaccctgtcgctgcacatggcccgcgtggagggcctcgtcccgatgtccatggccacggtcgccgtcggcgaccaccggtggatgctggcgcgcgacgccctcgtggcgcgcgtcgacgagcgcaccttcgtcttcgagctccccggcttcttctacgccgtcgccatgccgcccgacgccgagagggagtgcgcctcgatggcggagatcctctcgcggttctgctcgtaccacgatcttgccgccgacgccgccgccgatggtggaggcgaacttgctggtgagctggacacaaacccgtgggccggtgctcacgccaggataagtcgcctcaagaggcagcacacctcgccggctgccgccgacgcgccgtccgaccccgccaggcagatggagcgcgccgtccgcacgtcagcggtagtcaagctacttacccgatccctgctatctggcgtgctccagccgggccggcacctgaccgtcaccaccggcaccgcctccgccatcgccggcaccagctcgtggccctccacggcagcgctgccaagcagatcggtcgtggcagacctgctcgacgccatcgagacgaaccgggccgtgccgcgctgcggtggatccggtggcgacggcggactcggactcgggtggtggaacctcaacgtggagggtgtaatgctgttgctcagggtcgtccaggcggtccggggaaggaacaatctagcggcgccggcgccagggggaaagaggccacgggacgagggaccagctggccgcgacaccatgagaggtggcgttgtgggaggcagcagcgcggcacggcggtggtgtggcgctggcgggcggccggggaagattgggaatgcaccgttggcgcctgtggctgtggggtccagaccatcatcaaatagatgcttgattgacgatcggtag

SEQ ID NO: 27887 - DNA, 348 bp, Zea mays
  Peptide Sequence Number=SeqID_69666
gcagcaactcgtaccaatcaccagcaggcagcagcagcaggcgacagcaggcagcaactcgtaccaatcaccagcaggcaacagcagcaggcagccaggcagcaacagcaggcggcagcagcaggcagccgccaggaacaggcagtaccgcagtggcggtctgccggtctgggcgttcagcaggcagtactcgccactccacgtctccactactccgacagtccggccgccaggaagccagtcgccaggtctccaactccaaccgccatggcgtcaggaacagggaaacagccgcaaggatcacagaactggagtctggagaagttgaaacgacgtttcggctgctga

SEQ ID NO: 27888 - DNA, 900 bp, Zea mays
  Peptide Sequence Number=SeqID_69667
atggcgcggcacccgtcggcgctgggcaggttcgagcggatcgtggcggcggccgagggcaagcggatcgtcatgttcctggactacgacggcacgctgtcgcccatcgtggacgaccccgacgccgccttcatgagcgagacggcttttgttggtttggctggcgagaagcagatgcggatggccgtgcgtagcgtcgccaagcatttcccgacggcgatcgtgagcggccggtgccgcgacaaggtgttcgagttcgtgaagctggcagagctctactacgccggcagccacggcatggacatcaagggtccggcggccgccaaggcctcctgttcttctcggcacgccgcaaaggcaaaaggagtagtgttccagccggccagcgagttcctgcccatgatagaggaggtgcacgagcgcctggtacagacgacgcgctgcataccgggggccaaggtggagaacaacaggttctgcgtctccgtccacttcagacgcgtcgacgaaaagatgtggggcgagctgtcagagtcggtgaggggcgtgctgcgggggtacccgaagctgcggctgacgcacgggcggatggtgctggaggtgcggcccagcatcaagtgggacaagggcaaggccctggagttcctgctcgagtcgctcggcttcgcggactgcagcagcgtgctgcccgtgtacatcggcgacgaccgcaccgacgaggacgccttcaaggtcctgcggcgccgcggccaggaccagggcgtcggcatcctcgtgtccaagcaccccaaggagacgagcgcctcctactcgctccaaggccccgcagaggtgatggagttcttgctgcggcttgtcgagtggaagcgcctctccagggccaggctcaggctgcaatga

SEQ ID NO: 27889 - DNA, 552 bp, Zea mays
  Peptide Sequence Number=SeqID_69668
atgggtcgggcggagcggagttcgccgtcttccggggctgagcccgagtccgagcccttggtcgggcgaggcggagttcgtcgtcttccggggccgagcccgagtccgagccctaggtcgggcgaggcggagcttcctatggcgcctgaggccggacttggccgctgtcagcctcactctgtcgagtggcacagcagtcggagcggcgagggtggcgctgtccttttgtcaggctggataaggtgtcaggccacctttgcattaaatgctcctgcgatacggtcggtcgttgtggtgatttggccaaggttgcttcttggcgaagactgggcctcgggcgagccgaagctttgtgctgatgagggttaccagctgagattaggagtcttgagggtacccctaattatggtccccgacagtagcccccgggcctcgaaagggtgtgttaatactcgcttggaggcttttgtcgcacttttttgcaaggggaccggcctttcttggttgcgttttgttccggtgggtgcgcgcgagcgcacccgccgggtgtag

SEQ ID NO: 27890 - DNA, 264 bp, Zea mays
  Peptide Sequence Number=SeqID_69669
atgggatgggcatcagcgccagtgctgcgtggggggagaactcgtgcattcgatggcggtgggacgtgcgcgagcgccacacacgagaaggttggcgcatctggtggcggcacacaccacgtgggtggagaaggcaggatcgaatgtcgtaataggatgaccgaggatgaggaggttggcggctgggaaccaaccatgaacggcgaccaccgacaggggaaaccgttggagacagatggtggcgatatttgctgtcaaccctaa

SEQ ID NO: 27891 - DNA, 186 bp, Zea mays
  Peptide Sequence Number=SeqID_69670
atggggatcctagatttgcccatcgactataaattctccgaccctagatgcaatagaagacacagaggaagaagagtacaggattgtttccaggagggggtgatccacggggatcgggctgtgatcccggccggggagggtctaaccgaacaggccctaaggaggatgggagagtggctgtcatga

SEQ ID NO: 27892 - DNA, 126 bp, Zea mays
  Peptide Sequence Number=SeqID_69671
atgccctttcaaccagttcctggtggccagggtttcactgagattcagatgtcaaaacttaagaaaagcgaagcattcactagagaaagggagagagaaattgagcaggtatggaaccctgattaa

SEQ ID NO: 27893 - DNA, 1818 bp, Zea mays
  Peptide Sequence Number=SeqID_69672
atggccagctcctacgtgcgactcctcgtcctcgtcatggcctccctagtcccggcttccgttgcttcgctccctcacaagctccgtctctctgcctcggacgtcgccgcgctcggaccgctggcaccgcggccgcccgcgccggaccagccgaccgtcttcttcgaggtggaccggccgcaccggccgccgccgggcagcttcggcccgtgctcgacgctgctcctctcgcactccttcgcgtacacctacgccaagccccccgccacggtcgcctactcgccgccgccgtgcctggcggcggcgggcggccgcgcggccgttatctcgctcgccgtcctcgagtggcgcgctacgtgccgcggcgtccagtacgaccgcgtcttcggcgtgtggcttggcggcgccgagctcctccgcggctgcaccgctgagccgcccatccagagcggcgccggcgtcgagtggacggtctccaaggacgtcaccaagtacgcgtcactcctcgccgcccgcgaccccaccacgctcgctgtgtacctcggcaacatcgtggaccagcagtacatcggggtcttccacgccaacgtcacgctacacctctacttccgccacccgccgccgccgccgccgcagcccgggctaggccccgccgacgtcgtcgctccgatatcgcggagcctcccgttgaacgacggcctgtggttcgagatcaaggacgacttcgacatcgcgtccgcgagcatcacagtgccggccaacacgtaccgtgccgttctcgaggtgtacctctcctaccactcggaggacgagttctggtacgggaacgccgccggaaacggcccgttccgcgaggtcgctgttcagatcgacggcgacttggtcggcgtcgtgtggccgttccccgtggtctacaccggcggcatcaacccgttgctctggcgaccgatcaccggcatcggctcgttcaacctcccatcctacgacatcgagctcacggcttttctgggcaagctgctggacggcgagaagcacgaggtcgcgttcacggtgaccaacgccatggacacgtggttcgtcgacgccaacctccacctctggctggaccccaggggcgcagccacggcggcgggcattgtcagctacgacgcgccgccgctggacacggccaccgcgactctgcccgatggccctaacaacgggctctactacacgacagcgttccgacacgtctccgcctccgggtgggtgcacacgccgtcgtatggcaaggtcacggcgacgtggacgcaaaggttgggctacgagaacactatcaacttccgcgacagctttttccagccggaggtgaaccagaccacggacgcgtactccgccgcccacgtcgcggaccacgccggcgtgctgtacgcgcaggaggcgcagcagagcttcacgctgtacaagttcgtgggagtggtgaaccagaccgacgtcgactcgtacaccgcggcgacgaaggtgcagctcgggttcagcgacgaccgcgtcgccgccggccggtcggggttctgggcccggtcgctgagcaactcgcaggagtgcgcccgggacgtggacgtcgaggacggggaagccgtccgggagtcgtgggccgcgcgccagacgtacaggtatgaggcctccgacgcatgcttcttccggaacgtgaccagccgaggcaacaacgtggtgtccgaccactccgacgagacctgcgtgaaggaatcgccagccgccgccggtggcattgcagagcgggcggcggccgcagtagcaccgcggctgagaaaggaatag

SEQ ID NO: 27894 - DNA, 306 bp, Zea mays
  Peptide Sequence Number=SeqID_69673
atggagcactacacaacattctttgagcatcctacaactccgagactctacgaccacgctgttgttttattagatagagattcgagcgtgttcttgagttgcgccataggaagctccgcctcgcctgaccccagggctcggaaccggcctcggccccgggaagacgacgaactccgcctcgcccgaccccaaggcacggactcggcctcggccctgaagacgacgaactccgcctcgcccgaccccagggctcggaatcgggcctcggccccggaagacgacgaactccgcctcgcccgaccctag

SEQ ID NO: 27895 - DNA, 1107 bp, Zea mays
  Peptide Sequence Number=SeqID_69674
atggagcggaggctgtcggcgacgtccaggcggtccgcgccgtcggccatccaacggctgtcccacctggcgcagcgcgtcggcgccgtcaacctcgccgagggcttccccgacttccccgcaccgccccacgtcaaggccgccgccgtcgccgccattgccgcggacctcaaccagtacagaacctcgtggaggcatgtgggcatccttcctgatggatatgcattttgcttccacttccatgcagtaatcgaccaaggagacgaagttctcatcttcgaccctgcttatgaaacgtatgagacaagcattgagctagctcgaggcgtccctgtgtatgtgccattggatccaccttcttggactctgaacgaagaaaaatttctgaaatcttttacaagtcggaccaaggcgttggtcttgaacagcccacacaatccaacagggaaggtcttcagcaaagaggagctgcttattatctcccaagcttgtcagaaaatggactgctttgtgataactgatgaggtttatgagtatattacttacgatgcgaacaagcatatctcactggcttctcttccagggatgcaagagaggaccatcatcacatcctcactgtcaaaaacttacagtgtgactgcagcaagcatcgcctcagctattagaaatatccacataaaattaacagattcagctcctgcaccattccaagaagctgcattgattgcattaacaagcacagcagattactacatatccctgagaaaagactatgaggtgaaaagagacttcatccttctgttgctgaaagacttgggcttcaaaatcagcgtcaagccacaaggttcagtatttgtgtttgctgagctgccaaggtcctgccaactttcagatgtagaatttgtgacaaagttgatcaacgatgctggtgtggttgccgtgcctggccgtgggttcttccacaagacttgtgacggtgaaagctactgccaccgatatgtcaggtttgcgttctgcaagggcgacgacacacttaaggctgctgccatgaagatgaggaagctggcaagcaggcagggagaaccatggcttactggcagacaatag

SEQ ID NO: 27896 - DNA, 693 bp, Zea mays
  Peptide Sequence Number=SeqID_69675
atggcgacgcggaaccgcacgccgctctaccgcaagtaccgcgacgcgctgcggcacgtccgcgcaccggccggggcgacgtcgtcgtcctgcgggggcgggggagggtcggtgatcgagatggcctcgctgctgcgctccgaccggccctacgcgcccctcagcatcgaagacccctccgcctccagattcaccaaaatgatggatctaaaggttacattcaccatttccgtggacctcctcaagggtagaggtgctgtgtcagtcgggctacccccagcctgggtggatgtttctgaagagatatctgcaaacatgcagagggcaaggacaaaaatgacggagttggctaaggcacatgccaaagccttgatgccgtcctttggcgatggcagagacgaccagcgagcaattgaggttctcacacatgagataacagacttgctgaaaaggtccgagaagaggctgcagaagctgtccatgaaagatttgtcagaggattcaaatgtccgaaagaatgtccagcgttcccttgctacagacctgcaaaacctgtcaatggagttccggaaaaagcagtcatcatatttaaagcagcttcgccaacaaaaagagggtcaggatggtgttgatttggaaatgaatatgaacgggacaaagtctacatttgaagacgatgagtttgatgatgtg

SEQ ID NO: 27897 - DNA, 915 bp, Zea mays
  Peptide Sequence Number=SeqID_69676
atgggttctatttctcgaaagccaagggtcctttttataaagttgcaaaccgaaggggggcgtcagcggtgctgggccgaggctggctcatcggtcgggcttgggcgaggcgcaaacgaggtcggcggctcgggcgagggctcggcgcggacgcctgacaggcggggcccattggccagcggctcgagcgaggcagagggtgagcgactgagtgctagagcgctggcccctgactggtgggtcccccttgttagggctgccatcttcctcggctacgcgctcggcgcgagcgccatggccgaagccgatgactccgcgcgggcgaaagagcacagggcgcttgcagttgaccgtggggtctcggtacgatggcgaggtgccatcaccggcgatcaccgtcggccaattggtggaacagagaaatcaggggagagagatggagaagttcggcggagaaattcacctcaggtgaggcgcaatcgacgacagaacttcacctggcggtggctgaactcggtcagagacgacggacaggccttgctgggggcggaatcgggcgcaggaagcctgacgacgggggagctccggcctagccacgacctcctgatgcttgttgtggtgctccttatcttattagggtgttggaaactagctgctgatgagttgctttcttcgggcaatgagtcgctcagtgaccttgttccccatagtggaaacatccacgacctcctccttgcgctggggctgtctgattgttccggttggctgttgaggcaggaaggtgaggtgtctggctactctgtcgctgatattggtttcctccctgttggttgtgctggcagtactgttgttgttgctaagggaactgcctctggaactgttgttgatgctggtgctagtgcccttgagggatga

SEQ ID NO: 27898 - DNA, 284 bp, Zea mays
  Peptide Sequence Number=SeqID_69677
gcgggccagcgttccgcagctcgacaacgagctcaccgtctgcgtaacaacgtcaccgccgggcacgggtcgccacagtaacgacatcgaattcaccaacagtcacatccggcgccacccccaggcggttcaccagatgatcgagggcaccgttcgttaccttaaaaaccaaggtcactgcaaaggggtctttgattctataggggcgactgtcgacgaggggtccatgagcgaaggggcctccaatccggtgggcggccagttgaagacttttgtggcggagg

SEQ ID NO: 27899 - DNA, 303 bp, Zea mays
  Peptide Sequence Number=SeqID_69678
atgaagaatcaaatcatgtcagataaagcagtcacggacgtgttcctgtccgaggcttaccctggtgtcgcggaccgcccgccggaagggtctggacggtctacacatagatgtccgaactgccgcgccaccactgtgacaaccccgccactgaaacccgtttgccctacgctctgctccggcgtgctctactcctttattgtcgacgacaagacaaaggatatgcctcagcagggcagaagggagccttccaaagctcgcaccattagaagtgtggtgtttgagtccaagcacatttattag

SEQ ID NO: 27900 - DNA, 227 bp, Zea mays
  Peptide Sequence Number=SeqID_69679
agattcgtctgttgccatcaatcaccaaaaagggggagattgaaagctctcttgtgggttttggtggtttggacgacaacccaattaaaggactaacagaaacaactaatcaagccaagggtggaggcaagaagagcttcgaggttccgagtgcatgggagaaggtcaaggagaccgaggaacccaaagccaggggtgaagaagaagacttgcaaagtcaaggttga

SEQ ID NO: 27901 - DNA, 354 bp, Zea mays
  Peptide Sequence Number=SeqID_69680
atgaccatgccaaagtgcagaagaaccatatcatcaagatatttgctatggaatagggattatatttgggtgtatgctaacagacgtttgaaggacaaattggcgttggataaaaacattgttagagataatcactctaaagggaggagcatgcttgtggctgcacttatgggtatcatcaattcaaactgtgataatgcagactactcatcgtttcagccattactgcctgcagatgctgatataagagacagtggccaatgccccctctcaccaaaggccatctcagcagacgccatggacacacagcagctcgtcaagaaaattacacaaaggaagaagaaatatacttga

SEQ ID NO: 27902 - DNA, 1098 bp, Zea mays
  Peptide Sequence Number=SeqID_69681
atggcacgctacgcattcacaacagagagtgattcaagtattacatccctcatatttagcacaactcaagtactaaaaagagtatggcgacctgctggtagtccagtatctgctggtcacacaagtggatataacaaagagtgcgagtaccaaacaaattcgaagcacctggattccaatctgaaagcaataagacagaggcactacaattatttgcagctgctaaaggagaggccacgatacatggaaggaagacaaaaactctcggacacgctcgacaactacagtcatactgagtacagcttgcgggagcggggctctttcttcgtcgccggcagcggcacaccggtgattcacggtggagtacgcagtggagccacacttggagagagcaccgtggcgtctactgtggacttggagagaggaacgggcagatgtggtcgaaagggagggagagagaagggggagcaatgggggaaggcagccgcaagaccaggtggacgatttgtgagcaaaaggaatggggggaaggctgccatggatggaagggcgtggagggagcgcggctgccatgaagggggagcggggcgcgacagccatggatggaagctttgtgggcgattcgtggcggatttgggagatcaagtaggtgcttgggcagaccagcgatttgcagcagatttgggagaactaagctgccatggatggaagcgtgatttgggaggccgagttccctggcacagctggggaagcggggcaaggctgggggagcggggcgcggttgttggattggaagcatcgcggctgggggagcgagcgatttgtgggcgattcgcggcggatccatcgcggctgccatggattggcgtgatttgtgggcaatctcgccgatccatctcgtgcaaggaaagggggagcggggcgcgcaggcagccatggatggaagcccagcatgtggagaagaaagcgcggcgtggagaaaggcagaaagcgcggcgtgcgggcgggatgctgtttcggcagaaccgtgcaccatccgcctctgtggacgtctacattaggcacttaagtagtagtagagatttgacatgtagttag

SEQ ID NO: 27903 - DNA, 483 bp, Zea mays
  Peptide Sequence Number=SeqID_69682
atgcctccaactgatcccctctccattggtggcagcaaaggtagcggtcgtgttccaagtgctggtggcgatggtttcttcgaccggagcttgcacgaaaacttcgaccctcattgccacaagctgacattccccaactatgatggcgagtctgacacactccctcggctcaccaagtatgaaatttactttcatggacttatgcttcaaaaacaagtcaatttattcactacaagtctcagtgagccattctggaccaatgtcaagctccaatgtccctccaatttgcatacaaccatgagccttgcatgggcatgcaagcaccaatcagagacgacacctactagcaagaacacggtttcttgttcaacaggtcatggcaccaacaccaaagctaagtcggagatagcaggccctgcaaggtcacgatttaaatggtcgacgattgaggaattggcgaccaagcacgacgaggagtgctaa

SEQ ID NO: 27904 - DNA, 1161 bp, Zea mays
  Peptide Sequence Number=SeqID_69683
atggagaccacggagccgtcgcgtggcaccaagcgccctctcaccgccactgcaggcgatgacgacgatgctggcctggagcgcaagccgcggttccctaaggggaagaaggccaagtaccgcgacgtcggtgcggagggaggcccctctggcaacgctgtggacctcgacagcatgctgaatccggagcttgcggcggagcggcgggcgcggcagcgccacgtccagctcaaggagggagacgacgcgaagggaggtgccgctgaggtgaagggcttcgaagtccgctacaacgacagtgttaactttgttgacgatggtatacggatagagccgtttaacttggagcgagaaagggaagaagggtatttcgatgagaatgggaactttgtggagtatgcaagaggcaatgagattaaggatgcttggttggacagtgtggaagttgacccaacatatgctgcaaaggttcagaacaaaggcaaagagaaagtagacgagtttgaggacctctcttccgatgacattgggaggctaaaaaggcagatagcaaacttgcttgagccaggagaaacgataatgcaagccttgaaaaggttgaagggtacatccacggataaacgtggaaagatggctgaggggactaaacgtatatttgatgaattgactgaagctgccatgaagctaatggagaacggcgattataatgtttactcagatgatcgtgagacctttgaacgcgaggctgctgggtatgaacgtttggcacgtgctcgacttggtttgccagaagttgatggtgtctctgaagaccaaaaatataatcagacaccatcatctgcactggaaattgaccaaccatcatctgtactggaaatggaacttggtccctcgactgccaatgtatatacagccactgctgcaatcaatgatgatgacagtaacctggacatgtttggtgatgatgacaacgatgataccaaacatagttctgatgccaatactgtaggttcaggtttgaaacctggaacctcagatgtgaagattactactatagcagcagcacaggctattactatgaccctaactctggatattatggttctgcatctacgggaacctggtaaaattgtccccaattcatccttgatttacgtttag

SEQ ID NO: 27905 - DNA, 306 bp, Zea mays
  Peptide Sequence Number=SeqID_69684
atgtccggtgaccgttggcgccggatagtcgttgctccgctggctcaccggacagtccggtgtacaccggacagtccggtgaattatagcggagcgaattctcgagactggcgagttccagagccgctctttcttggggcaccggacactgtccggtgtacaccggacagtccggtgaattatagcgtagcgcctctggattttcccgaaggtgaagagttcagcatgaagtcccctggtgcactagacactgtccggtggcacaccgggcagtccggtgcgccagaccagggcacacttcggtaa

SEQ ID NO: 27906 - DNA, 283 bp, Zea mays
  Peptide Sequence Number=SeqID_69685
gctcaaatgtctccgggtgtggtaccaccagaaccttcgatccattcttactttaacggcagagaagaaagggtccttgctggttacagggagaggagactcggagttcgtcctagatgcaaaagtacctggctggttatggagaggtcagctgaaggctggaggtactaacttattcttgtatatgaaccatgatacttgtgagactgcttcgaacctgttacatggtgacttgagagctattgtaccagccctgcttcaaactcgtgacatgaccatttag

SEQ ID NO: 27907 - DNA, 141 bp, Zea mays
  Peptide Sequence Number=SeqID_69686
atggcgcggcgcggattgggcggcgccgccgtggtcatgttgggtagtggggagaacggctccttaccggccgatctcgtcgtgcggtcgggattagttagccacataaccctccgccgcgggcaatctggaaacgcctaa

SEQ ID NO: 27908 - DNA, 309 bp, Zea mays
  Peptide Sequence Number=SeqID_69687
atgcctcggctcaagcttggagaagcttcacagggtcttggggaagctatctgtcggtgggaaaatcctccgactgggtggtggaatgcacccgccctaatcctaagatgctcggctcaagcttggagaagcttcatagggtcttggggaagctatctgtcggtgggaaaatcctccggccaggtggcgaaatgcacccgccctaatcctaagatgaggagggggcctaagcgcttgcctgtttggtcaatttcagatgaacacaaggagactcgagggattatagtggttcaggccgctggagcgtaa

SEQ ID NO: 27909 - DNA, 345 bp, Zea mays
  Peptide Sequence Number=SeqID_69688
atggaggacgcgaggacatggaaaggggagttgcgggctcggcggctgtccttgtctgcggcgtatgggaagaatcgcggagtgcaggagccacagccatggatggaagggggagtcacatcatttgagggcgcggctgcagggaagaatcttgcgcgggctgccatggatggaagggggcgacgccatgaatgcggctacaatggaggacgtgaggacatgggaaggggagttgagggcgcggcggctgtcctcgtctgcgggcgcgaggcgcggggaggagaatcgctggtgggggcatgcgtccgcggatggcagaaccgtgcatgtggacgcctacactaa

SEQ ID NO: 27910 - DNA, 549 bp, Zea mays
  Peptide Sequence Number=SeqID_69689
atggggaataagatcgcgcggacgacgcaggcgtcggcgacggagtactacctccacgacctgtcgtccacctacaatctcgtgctcctcgacgtcgtcagccgcggccgcttcctcaagtccgtccggtgcaagcacgacgaggggttgctcctcgtcaaggtctactttaagtgcgccggcgagtccatagacctcaagcgatatgcgttagtgttatcagttgctgcagcgatacttccaatttctgtgccgatgggcaccgttctgagctgcgttgctgctgctggaaaggtgctggtgcctggaggtggcagtgatgacttttgtggtttcttggtgcctggaggtggcagtgatcacacattaaatttatgccaaaacaagaacgaccaggaagttcaaggatgtgaattttccaccagctatgtctctccaaaacggtgggattatgcgtggtatgcagtatgctctaacgggctcgactgcttgagtgacatttctcatttctcggccccaatagagtacaaagattatgctatattttga

SEQ ID NO: 27911 - DNA, 465 bp, Zea mays
  Peptide Sequence Number=SeqID_69690
atggcgaccactctttcgttatcctctcccctcttcctcggagctccggccagagctagagatgtggttccgtacggagtgacttcggctagtgtatcactgatgactctaaatatgccaggcaagggttacacgagtagagttcgttgtcgggagcagcagcgacgaacgacaatagtatctatggttgggattgctagtgcttttgcatatgccgacaatcttctcgctgctgcacctgtaggactgctggggcttcttcttttgttccagactacaagagtgaggttcgtctttgataacgaggccctggaggtgaaggttggagagcagctgcaggagtcaggtgaaaatgtattcgtcggcggcaagaaccgttggaatgctatggcacaggatggtcgacaattgtacgatgtgatggtggagcgtgctgggccctcgaagacgagtggccctaaatag

SEQ ID NO: 27912 - DNA, 219 bp, Zea mays
  Peptide Sequence Number=SeqID_69691
atgttgttggttcatgtgctcttttcaaagtttcgttggtactttgagctttggaagatgccgaggtggacagagaatgctgcttccaccaaatcagctgaattggtgaaacaacaagaccgtttggagtttgatgatcctgatgagatagacgatgaggaagaagttgagcatgaggaagaggaagttgaggaggatgtcgagtatgaagagccatag

SEQ ID NO: 27913 - DNA, 162 bp, Zea mays
  Peptide Sequence Number=SeqID_69692
atggcggtcagatgggggattcttgcaagtgctcttcccataaacaagccgccccaagtgccgtctcgggacaacgagcagcctgtggttcctgagtgtgttgccgaagatcttcctgagcaacaacctggtgaaggcaagtgtcctctgacctataattga

SEQ ID NO: 27914 - DNA, 267 bp, Zea mays
  Peptide Sequence Number=SeqID_69693
atggcgcagtcgctggagtggatggtggcatttctcgtggccgattacgtccgaggcgagagcgttcgtcgtgatgaaggacgtgactcttgcggtctcctcgacgatcgtttcagcgagggtgtcgtcgacggcggctgggcaagatccgtgttctcgctgggagttatgactgggcggtttcttgtggccgatggatgggcagagaaagacgcactgcgggtgagcgtgtgcgtgagagcaagtgcgctgaggatggtccattga

SEQ ID NO: 27915 - DNA, 339 bp, Zea mays
  Peptide Sequence Number=SeqID_69694
atgggcggtggtcaagcctcagtcgagcagtgctcaggcctcaggaggccagtgggcggctcttcggccttaagcgcacggtgggagcagcattttcagaagctggtgctcggcggcgcgatgggcggtggtcaagcctcagtcgagcagtgctcaggcctcaggaggccagtgggcggctcttcggccttaagcgcatgggtattgatcaacctcgaacttttctggatgttgacgaacctcgttcaaaagcacagaagtactgctcttttgtttcctgtacaattgggaccaagacttgtttgttttgctttgaaatatcaacagttcggagaataa

SEQ ID NO: 27916 - DNA, 234 bp, Zea mays
  Peptide Sequence Number=SeqID_69695
atgcctgtctttttcgttggcaggcggtacgcccgtgctgcggcatacactgtgctcatcatcactcgtacattgccagtgaagcttccgctgcacgccaatgctacacagaccgcagatatcagggcgcatggagattgcaccgttgttactagccctactttcccaccacctcattgtttccaagtccatggaaacaaacttgtatccacaaggataatccatatcctctag

SEQ ID NO: 27917 - DNA, 324 bp, Zea mays
  Peptide Sequence Number=SeqID_69696
atgccacccccagatccgcgctcgccgagacaaccccccatccccctcaagaagcccggcgatggcgccgtcatcgaggtcaaggagatcagaagatcgcctacgccaagatccgtctccagcgccatcggcctctcgtccaaccccaatcgctgctccaatgctccttcgaccaggttctcctgtagaagggaaagcgagtgcgagatctccatgtttgagatctccgtgcttgagggaagccccgccattcatgcctccgagcgccaccattctcgccaccgagctcgcgccctgcacgcccgcgccttcccctccccctga

SEQ ID NO: 27918 - DNA, 453 bp, Zea mays
  Peptide Sequence Number=SeqID_69697
atggcgcagaggatcgtcttcttcgcagcagacctagatctcgcctcccgagagggatcttgtcgggaagaagagatcatagggccggaccaccattgtcgggcagctgggagagagcgccgccgcacggggcaagtcttccccttcgccgatctgggcgagttgtcgggccgtggagcactgcgggttcgcggtgaatccgtccgtggtctcggcggggcaaatcaaggctccgtgcgtgaggaattgctcatcggcgtatcaccggcgacggaaaaccgcaccaccgcgtgggcagtgaagccatcgccccgattcaaggcgctggtgtgcgggtttggtgctccccagtcatggcgccgccgcgccgtgcgagtcctccgccgcgctctggatgctgtggcgccgcgggatatctcaggggaaggggatgagcgcctgccgtcgatctaa

SEQ ID NO: 27919 - DNA, 246 bp, Zea mays
  Peptide Sequence Number=SeqID_69698
atggcaacttcgggggcacaaaagcagcagagtccggcgcggaggaggatgacacggagacgcgtacaggccggacgacggacggacgcggcctggaaggtccccacccgcccggccggcgccgtggttcccaagtccacgccgcgccacggcctcgcgcgtgcggtgccgtgccgtgccctccgcgctggtgcgtgcgtgacaggcaagggctgccgcggactgccgcggcggcgttgtgcgtga

SEQ ID NO: 27920 - DNA, 431 bp, Zea mays
  Peptide Sequence Number=SeqID_69699
atggccaacagcaacctcccgcgccgaatcatcaaggagacgcagcggctcctcagcgaaccagcgccggggattagcgcgtcgccgtcggaagagaacatgcggtacttcaatgtcatgatccttggccccgcacagtcaccctatgaaggtggagttttcaagcttgagctattcttgcctgaggaatatccaatggctgccccgaaaagcccagtgccaggcacccttccaatttgttataggctacctgtctcttcctgtcttccatacttgcaagttaggtttctcaccaaaatttaccatccgaacattgacaagaaagtgatgcctcatatcagtcataatttgctgcagcttggtaggatatgcctcgacattcttaaggacaaatggagtcccgctcttcagatacgtacagttctgctcag

SEQ ID NO: 27921 - DNA, 387 bp, Zea mays
  Peptide Sequence Number=SeqID_69700
atggcgctcgttaccgtctacctgcctccctcaaaccgcaccatcaggccggaccaccattgtcgggcagctgggagagagcgccgccgcacggggcaagtcttccccttcgccgatctgggcgagttgtcgggccgtggagcactgcgggttcgcgatgaatccgtccgtggtctcggcggggcaaatcaaggctccgtgcgtgaggaattgctcatcggcgtatcaccggcgacggaaaaccgcaccaccgcgtgggcagtgaagccatcgccccgattcaagtcatggcgccgccgcgccgtgcgagtcctccgccgcgctctggatgctgtgtcgccgcgggatatctctggggaaggggatgagcgcctgccgtcgatctaa

SEQ ID NO: 27922 - DNA, 357 bp, Zea mays
  Peptide Sequence Number=SeqID_69701
atgcgggagagtggaggaggggtggagaacgcggtagcgaggagacggtgcgcgagggtgggggaggggcggagaacgcggaggtcgtgctgtggcgacgggagcgacgacgcgcggggggcagctgaggcgctaaccgtgcttcgacaaacgctacgggtgggacatgggaatggcgccacgggacatgggaatcggaatggcaacgctacgggtgacgctacgggtgggacatgggaatggcgccacgggacatgggaatcggaatggcaacgctacgggtgggacatgggaatggcgccacgggacatgggaatcggaatggcagaaccaggaatggggcagcctaccccttag

SEQ ID NO: 27923 - DNA, 1422 bp, Zea mays
  Peptide Sequence Number=SeqID_69702
atggacgcgtcgagctccctgtccctcctcgcactggtgaccatgctcagcctcctccactccgccacgaccgacgccgccgcgggtctgccggcggcgcggacgagccaccggaggctactgctgctacaccagcaggacaccaacctcgccgcgctgcctccgcctgcacgcgtgcacgtcgtcccagtcgacgtccacgtcccttctcatggaaccggctcttttccggcagcgtctcccggtccacacgggggcaagaacggtccgagtgaggcagcgccagcgacgccggcgacggcggcggcctatctgtcgagatccatgaggtggctgtacatggttgcggttccggcggtcgccctgctggcgctcgctggactggcgtgctggcttctgtgtcgcaagagcgccgttgccaccattgggccttggaagaccgggctcagtggccagttgcagaaagcgttcgttacaggagtaccgaagctgcagcggtcagagctggaacgtgcctgcgaggacttcagcaacatcgtggtgagctacccgcactacaccgtctacaagggaactctatcgaccggcgtcgagatcgccgtggtgtccaccatgatcacgtcgagcaaggagtggacagagcattcagagagctgcttccggagaaaggtagacgccctgtcgcgaataaaccacaagaacttcgtcaacctgctcggcttctgcgaggaggaagaaccgttcaccaggatgatggtgctcgagtacgcgccgaacgggacgctccacgagagccttcatgccgaggatttcgagcgcatcgcttggcgaggtaggatgaggatcgtcatgggactagcgtactgcgtccagcacatgcacgagctcagccctcccgtggcgcaccctgacatgcagtcgagctccgtactgctatctgaagacggcgctgcgaagatagcggacatgagcgtttggcacgaagtgatttctcaaggcaaaacgacgacaaatggtgacgaacaagcgtcgtccgctggcctgctggcggggaatgtgtacagcttcggtgctctgctgcttgagatcatctccgggaagcttccgactccataccccgcacacgagcgctccctgcagatgacctcggctctggtggagcgcgtaaccaacgacgaccggagcgtagcctcgttgcttgatccaacgctgggtggagaccacagggaagacgagctagcggtcatcggcgaggtgatccgggcctgcatgcagagcgacccgaggcgaaggccgagcatgagggaggtcgccgccaggctgagggaggccgtgggtatctcgccggtcgctgcgacgccgaggctgtctccgctctggtgggccgagctggaggtcctttccgccgcggaagcaagctaa

SEQ ID NO: 27924 - DNA, 1437 bp, Zea mays
  Peptide Sequence Number=SeqID_69703
atggacgcgcaggcgcagcctttcaccaggcgggcgctgtccaggagctgcgggtccaaggggagccggctgtccgttgaccatccgccgccgccgctggccggcggccctttcggcggacaagggggtggcagggagctcgtcctcgctcgcgacgcggagaaggtgagggagaagttctccaagctactgctgggggaggacatgtccggcaccggcaaaggggtgacctctgctctcgccctttccaacgccatcactaatcttgcagcttctgtgtttggtgagcagcgccgtctgcagcccatggccgacgaccagaaatcgcggtggaagaaggaggtcgactggcttttgtccgtcgccgaccacattgttgaatttgttccttcgcagcaggtcgccgagaatgggacctccgtggagataatgataacccagcaacgtcaagatctacagatgaacatccccgcgctgcgcaagctcgatgcgatgctccttgaatacctcgacagtttcgcgggtaagcaggagttctggtatgcgtcgaaagacgcagatggaccgggcaagggcagcacgccgaggcaggacgacaaatggtggctcccgactgtcagggtccctcctgacggtctgtcaggtgcatacagtaaatggcttcagaaccagaaggacctcgttgcgcaggtgctcaaggcagcaatggctatcaacgctaatgtccttatggagatggaggttcctgaatcgtacacggagtcgctaccgaagaatgggaagtccacccttggggattcagtgtacagacttataaccgacgatcatttcgaccctgaagaactgctacgctccgtggactcgtcggatgaacacagcattgttgatctgaagaacaggatcgaagcctcagcagtcatctggcagaagaaaatgacccacaacaaggacagcaaattgccctggggacatagtcacgagaagcggggaatgttcgaagggagggcggagaacgttcttctcctcatcaagcacaggtttcctggcattgcccagtcggcgctggacataagcaagatccaatgcaacaaggatgttggccttgccattttggagagctactccaggactctggagagcctggctttcacggtcatgtctcggatcgaggacgttctgagcgcggacttggccgctcgagatctcaggaacacggaatcgatgagaatcgccgccagcttagcttcggacgacaccgacaaggtcgtctcagacgctaaagccgaggtagagaagacggggagaatggagccggtttcgccggcgctatctgacttggtcggcccgaagctgacgaagatctcgccagttgcaaccaagaggttttcgtaccttgagaatctgggtggaacaagaagcccgatagcaagacactag

SEQ ID NO: 27925 - DNA, 219 bp, Zea mays
  Peptide Sequence Number=SeqID_69704
atgccgctgaacaatacgaacaaatcttccagtgggccttcatcgatcgaccctatgtcatgtaaaaaaggaccaaagtggtggttccttgaagatcatcagttcatcatcctatatggacacttcgcattcttgcccgtttaccagagatggccactgctgatggtgcattttgacaggagtgcatcacctggacctttggtccaaccgaacaattaa

SEQ ID NO: 27926 - DNA, 1032 bp, Zea mays
  Peptide Sequence Number=SeqID_69705
atggccaaggcgcctctgctgcctctgtcgctgctcgtgcacgtcgtcctcgccgcctcctttccggccccgtgcacggcgcagggtcgcaccgaaaacatctcggccgtcgaggccgcggtccgcgcccgcgcgtccgagctgctccgcgacaccaccaccaacgacacgacgcagcccgtcgacctgctgcccctcccgggcaacctctccggcgcgggcgtccgggcctgggcgctgcgcgtgagcagcaacgcgctctgggccgacggcgtcaacgccgccggtttcgtcgtcccgccgcgcgtcgtgccggccccgttcgcgcgctgcctcaccatcgtcttcgagcgcttcaccggcggctcggcggccgcgttcgccgcgccgcgcctctacgcgctggccgcgcccgtggccggctttttcgcgtacgacgcggcggcggggccccgacgcccgggttctcgctccgggcgctcggcgcgccgtggtgcggctgcccgagacgccgccgccagcctcagccgggtggtgggcgtggacggtgggtgtcggcgccggtggggtgctgggagccagcgtcttggcgctctcggtggccggcgcgatcagctggagcaggaggcggcgatgggaggagatggagcggcgggcaatggccccgaggaggaactggggaggatgacgggtgcgcgggagcaggatgccatcggcgaaggtggtaaggacgcgccccgagttggaggagcccagcacgccgccgtagcccgtagcggcaggccagttcctctccgagtaccaccagccgctggcgctgaggattctaacgtttccctcgttgttttgccacacatggggtggcccaatcaactaactttcttgcagttttcagcgaaaaatcgtctgcggcgcaagagaagcgtacaactcaatttgcatgatccggattacagatgcagtcgaaatagatatttattcttttgggtcaactttataggattgttattgtacaaaatgcatttttcatag

SEQ ID NO: 27927 - DNA, 549 bp, Zea mays
  Peptide Sequence Number=SeqID_69706
atgaccacgccggggccggatctgggggaggaggcagcggctgcaagggagccgccctgggagggagggatgagcctcctggggcggtggctggacgtggggcggagagggctggaggagggagttgtggaagatggttcgaactggagcatgggtcaaaggcagctcttttgtttgggacgtgcacttctaagaagatgccgtatcttagttcttgatgaggccacggcatctatagacaacgctactgatgctatccttcagaagacgatcaggacagagtttagagattgcactgtcatcactgtcgcacaccgtatacccaccgttatggactgcgatatggtacttgcaatgagtgacgttttgttagattgtggaagcctgcctccagatagtattgcagcatgccagcatttacatgctaacgggttcagtttattcccagggaaagtagtggagtacgacaagcctacaaagctcgtggaaaccgaaggatctctcttccgtgatcttgtcaaggagtactggtcatacacatcgaattga

SEQ ID NO: 27928 - DNA, 4158 bp, Zea mays
  Peptide Sequence Number=SeqID_69707
atggacatcttcgggagcccattctgctccaagcaagccgtcgcctcatgcggcggatggacggacatactcgactcctccagctgcacgaaccatatcctggaaaccggcaccgccgctctgatcaccgtcgctctcgcgctgcacctcctcgtcgtcaggattactacgaagaccagagcgtccgcacgccgcccccctgtcgcgcccggcctgccgctgcagctggccggcgcggcgttcaccgcctgcttgggcctcgtctacctcggcctcgcgtcgtggatgctggggagcaacttcactcagcacgcttccgcttacctcccacactggtgggtgacggcactgtcccagggactctgcttggtcctcgccggcttcgctctcagcggcgtcggaggagcacgtctcctcgggccaatgtctgcgcgcgcgtggtcggctctgctggccgcgtacgccgcgttcgtcgcttgttcctcggtcgttcacatggttgcggatagggcactgaccatgaagggttttctggacgctctgttcctgccaggtgcactgctgcttgtctgtggcgcttggtgcgtcaaggaagaggacggtgatggcggaactggaactgctgcttctttgtataagcccttgaagactgacgacactgttgatgatgagaggggtgggtctgagagccatgtgaccccgttcgctaaagccggggttttcagcgtgatgtcgttctggtggatgaacccgatgatgaagacgggctacgagaagccgctcgaggagaaagacatgccgctcttgggtccctcggaccgagcgtacagccagtacctggtgttcctggagaagctcaacaggaagaagcagctgcgggcacacggcaacccgtcgatgttttggaccatcgtttcttgccagaaaactgggatcttggtctcgggtctctttgcactgctcaaggttctcacgctgtcttcgggcccggtgcttctgaaagcattcatcaacgtctcgctcgggaaagggtccttcaagtacgaaggctacgtgttggccgtagcgatgttcctctgcaaatgctgcgaatctctgtcgcagaggcagtggtacttccgcacgcggaggctagggctccaggtgcggtcgttcctgtcggccgccgtctacaagaagcatcagaggctgtccaactcggcgaagctgaagcactcttccggcgagatcatgaactacgtcaccgtcgacgcctaccggatcggcgagttcccgtactggttccaccagacgtggacgacgagcgtccagctctgcatcgctctagcgatcctgtacgacgcggtcggcctcgccacggtcgcggcgctggccgtcatcatcgccaccgtggtctgcaacgcgccgctggccaagctgcagcacaagttccagagcaggcttatggaggcgcaggacgtgaggttgaaggcgatgtcggagtccttggttcacatgaaggtcctgaagctttacgcgtgggagacccacttcaagaaggtcatcgaggggctgagggaggtcgagatcaaatggctgtcggcgttccagcttaggaaagcgtacaacagcttcctgttctggacgtcgcctatcttggtctcggctgcgaccttcctggcatgctatcttctgaagatccctcttgatgccagcaacgtcttcacttttgtggccaccctgcgcctcgttcaggatccgattcggcagataccagacgtgatcggagttgtgattcaggcgaaagttgccttcaccaggataaccaagttccttgacgcgcctgagctgagtggacaggtcaggaagaaaagctgtctgggggatgagtatccgatagtgatgaattgctgcagtttctcgtgggacgagaacccgtcgaaaccagctctaaagaatgtaaatctggtggtcaaaactggacagaaggttgcaatatgcggcgaggtaggatcaggaaagtctacactgctggctgcagttcttggagaggttccgaaaactgaaggcacgatccaagtttgcgggaaaacagcatatgtttctcagaacgcatggatccaaacaggaaccgtgcaggacaacattctctttgggtcttcgatggacaggcaaaggtaccaggaaacactcgagcggtgttctttagtgaaggatcttgagatgttgccgtatggagaccgtactcagatcggcgagcggggcataaatcttagcggcggtcagaagcagcgtgttcagcttgctcgtgcattgtaccagaatgcagacatctatctccttgatgaccctttcagcgctgttgatgcccacacagcaacgagtctgtttaatggatatgtcatgggagctctgtcagacaagactgttcttttggtgacccaccaagttgattttctgcctgtattcgattctattctgggtgttatacttgaggcatttgaggttgggactgagagctatcagtttgatctcgatgtcaacttggctgcgtgcctgcgtggggagaaatgtgctaatgccatccttgccagcatggagttaatgtcagatggtcaaattattcgttctgcatcttatcatgatctattggcatattgtcaagaatttcagaaccttgtaaatgcccataaagacactattggtgtttcagatcttaacagggtgcctccccatagagaaaatgaaatattgatcaaggagacaattgatgttcatggaagcagatacaaagagtctttgaagccatcaccaacagatcaactgattaagacagaagaaagagaaatgggtgatactggtctcaagccttatattctctacctgcgtcagaataaaggcttcttctatgcttctctgggtattatttcccatatagttttcgtatgtggccaaatatcacagaattcatggatggctactaatgtcgagaatcctgatgttagtactcttaagttgacttctgtgtacattgcaattggaatcttctcggtgttcttcttgctatttagatcattagcagttgttgttcttggggtcaagacatcaagatccttattttctcagttactaaactcattattccgtgcaccaatgtccttttatgattctacccctcttggaagaatacttagccgggtttcttcagatctgagtattgttgaccttgatattccgtttggcttcatgtttagcattggtgctggcataaatgcatatagcaatctaggagtattggctgttgttacatggcaagttctgttcgtctctgtgccaatgattgttttggcaatcaggttgcagaggtattatttagcctcatctaaggaattgatgaggatcaatggcactaccaaatctgctctcgctaatcacttgggcgagtcgattgcaggggctataacaataagggcttttcaggaagaagatcgtttctttgagaaaaacttggaacttgttgacaagaatgctggtccatatttctataattttgcagcaactgaatggctcattcaacgtttggagaccatgagtgctgcagttctttctttttctgcccttatcatggctcttcttcctcaaggaacttttaaccctggctttgtaggaatggcattatcttatggtctatccctgaatatatcctttgttttctctatccaaaaccaatgccagctagctagtcaaatcatctctgtggaaagggttcatcagtacatggacataccaagtgaagcagcagagattattgaagaaaatcgaccagcaccagactggccccaagttggcagggtggaccttaaagatttgaagattagatacagacaagatgctcctcttgtattacatggaatcacctgcagtttccacggtggagataagatcggtatagttgggcgaacaggaagtggaaagacaactttaattggtgcactgtttcgtcttgttgagccaactggagggaaaataattatagactctatagacatcaccacaataggcttacatgacctgcgttcacgtttgggtatcattccgcaagatccgacactctttcaaggaaccataagatataatctagaccctcttgggcaattctctgatcaacaaatatgggag

SEQ ID NO: 27929 - DNA, 321 bp, Zea mays
  Peptide Sequence Number=SeqID_69708
atgacgaggcggccgtcggaggcgcggccggccggcctgccgaagtacgtcatgccgaacgggccctgctgcgccgggaaggcggcccagaagccgccggtgtcggagttggagtcgccgaagttgaagacggcagggaacctgcaggtcctcctggccctcgctgccgaagtcgaaagcagcgccgtcgccacgaggagcagcggccacgcggtcctcatcgtgccccggcaaccgatctgcatgcgtgtcggacaatccgtgacagccaacgccgacgctcggcggtgcaaggaaactgaagaaaaaaagatgaactag

SEQ ID NO: 27930 - DNA, 150 bp, Zea mays
  Peptide Sequence Number=SeqID_69709
atgctggggctccccaaacgccggttcgttgcgtttggtatgctggtggtacttacagtgtgtttggttggatgtgtgcttaactgtttacaaccaggcgcagggtatgcgttgacttcagatgaaattgcatttcttgctcgattataa

SEQ ID NO: 27931 - DNA, 1014 bp, Zea mays
  Peptide Sequence Number=SeqID_69710
atggagacggagcatggtggccacgaagaggaatcggcgatgctcccgtgcgtcgcgttcgcatcggagcacggttacaagttcttctccctcgcccacatgcgcatgcttaacagcgtcgacgtgcggccaatgcctccggtgctcggccgccggctcgtgccgtctccgtacggcgggatggtgctagccacggatgtgtgctacaggcacccgtgccacctcgtcgaccccttcaccggctcgcgcgcaccgctgccggacctgcccatccccttctcggagaaggagccggtcgggtgtctcagcgacgagccacgtctgcgctgcgcgcgcgtcaccgacgacgggttggcgtgggactggtcccggcgaggcgtcatggtggcccgcggcgacatggccttcttctgcgagcacggcggcgagcggtggatgccggtgcaccagtcaaagctcggctcgcccatgaccgtcaactaccgcggtgggctcttcttcgtcctcgagctgcgcacgctgaaaactacaatcatcgacgccggcacgctgcaggcccgcacgaagatccctgcgccgccgggcttcggcgacgtcgactacgcctacctagcgccatctacggacgacgcgatcctcctggtgcaccgcgccggggacagcgacggcgtggtctttaccaaagcgtactgcgcgcggcacagggacagccagaggccgccgaggtggaggccagtgctcgacatcggtgaccgcgcggtgttcgtcgacggcgcgcatgggttcacagtcaccgccgacccgacgggagcgaaggcgaaccgcgtgtacgtgatccttgcccatcagctgacgcacccatgtgggcgtctggccgtcgcatacgacgtcggcttcacagaccttacgaggctagagcgcatggggcggctgaatctaaacaccggcgaggttgagccaatgtggggccgtccgcactggatcatacctaggaatgaatcgggtcgtcgttaa

SEQ ID NO: 27932 - DNA, 795 bp, Zea mays
  Peptide Sequence Number=SeqID_69711
atggggaaggcaaagagcaagggccctaaattcgcggcggtgaagaagattatcaccaagaaaaccatcaataagtacaaggaggatgtgctgaaccacaagaagaaggacgtggacaaggagaaactcggccggaatgtgccgcaggtttcgtcggcgttgttcttcagctacaacacagcattggggccgccgtatcgggtgattgtggataccaacttcatcaatttctcgatacagaataagctggatttggagaagggaatgatggattgcctttatgcaaaatgtaccccatgtatcacggactgtgttatggctgagcttgaaaagctggggcagaagtatcgtgtggccttgagcataactttcatctatctgcacaatctaatttacctccctcacagaattgccaaggaccctaggttccaaatattagcatgcacacacaagggaacctatgctgatgactgcattgtggagagggtcactcaggtagaagggcagccaggtgcagtggtgagagctgtctcactgagtcaccatgatgtgggttctaagggttcgaagcagacttgcatttgcgtggtgtggctgaatgctatgttttccgagattagagattttactatatctgttcccaagcacaaatgctacatagttgctacttgtgatagagatttgaaaaggaggataagaaaggttcctggtgttccaatcatgtacatcacaagacataggtattcgatagaacggctccctgaggccacaattggtggagcaccaagaatctga

SEQ ID NO: 27933 - DNA, 447 bp, Zea mays
  Peptide Sequence Number=SeqID_69712
atggcggcggcgacgctccggtgggtgctgcagctgcaccgggacgtaccgcgggcagcacggttctactcggagggtctcgacttcagtgtaaacgtctgcacgctccgctgggccgagctgcagtcggggccgctcaagctcgcactcatgcacaccaacgacagtaagaccaaccctttcccaggagaggatctggttccagatatcaagagcgaaagggcattgcaagcagaggtggattttaggttctatagtaatcttgcatcgcagagagtctattcttcaatgctctccttcactgtacctgacataaacagtgccgtatcgaagctaatggcattgggagccgagttggatgggccaatcaagtatgagatccatggaaaagttgcagcactgcgatgcatcgatgggcacatgctaggcctgtacgagccagcttga

SEQ ID NO: 27934 - DNA, 162 bp, Zea mays
  Peptide Sequence Number=SeqID_69713
atgggttggttaaggcaagaatatcctagtgtaagaaagtttatggtgagaaaggactccttgttgggtgatgtatttgtggacattactccacaacccatcacactcaaccaaagatccaaatcagacagatatcataagaacaagcattcgagcatatag

SEQ ID NO: 27935 - DNA, 204 bp, Zea mays
  Peptide Sequence Number=SeqID_69714
atggcccgatgggtactgttgtgcctgggccgagcaccgggcacgctgggccggcacgggcacagcccgattatcccggaagcacgccgccgtgagggaccgatctggtgctccgactttatcgtcgtgagggaccgatctggtgctccggctttgccgcccgtgagggaccgatctggtgctccgactctaggtctcaaataa

SEQ ID NO: 27936 - DNA, 603 bp, Zea mays
  Peptide Sequence Number=SeqID_69715
atgcttgggagccatgagcggcggctgcagatccgcacccgccaccgcccagatcccccgcgggatgcgagggaacaacaactgcatggctccgcacccgccgcacctcccctgatctgcgaccagaagagctcgagccacgcgcaaggtagccagattattatttcagtcgagagaaatgataggctattttacaaactcttgattgacaatgtcgaagaactgcttcctgttgtgtatgaaccaacagtgggggaagcttgccagaagtatgggtcgatcttcagacgactacaaggtttatacatctgcctcaaggagaagtgtgttatccctccacctctcctcatagtaattgcttatatcatgctaggggcatgggaattccttgggaaagcttgcactgtatactgctattggaggtgtacaaccatccgttgtgggtacttaatatgcgatgtcagtgggttcaggagaggcacgctagcatcggagaagccaccgccggcagtggtcgtggagaaagtgggcaacgaaggtggaggagagggcgagggtctctatgatgcgatcgtgatcgcttcgaccaccgtccaacattag

SEQ ID NO: 27937 - DNA, 1149 bp, Zea mays
  Peptide Sequence Number=SeqID_69716
atggcgacgcgcaaccggacgccgctctaccgcaagtaccgcgacgcgctgcggcacgtccgcgcgccgcccggggcgccgtcgtcgtccggcggcggcggcggcgggggagggccggtaatcgagatggcctcactcctgcgctccgaccgcccctacgcgcccctcagcaccgacgacccctccgcctccaggtgccaccacctccaactctccacagccctcctcacatctcgtctggtctctcggacgtttgggaatatcagtgaagatcgagcaaatgtaaggcttgccatagcatgtcggtcgacggtgatcagtggcttaggcagtaaagctgtagtgctctgttctgatttgcaaacgcaaagtagaggcgctgcgacggtcgggctacccccagcctgggtggatgtctctgaagagatatccgcaaacatgcagcgggcaaggacgaaaatggcggagctggctaaggcgcatgccaaagccttgatgccgtcctttggtgatggcagagacgaccaacgagccattgaggttctcacgcacgaggtaacggacttgctaaagaggtcggagaagaggctgcagaagctgtccatgaaagattcgtcagaggactcaaatgtccggaagaatgtccagcgttctcttgctacagacctgcaaaacctgtcaatggagttccggaaaaagcagtcgtcgtatctaaagcagcttcgtcaacaaaaagagggtcaggacggtgttgatttggaaatgaatataaacggagcaaagtctacatttgaagatgatgagtttgacgatgtgggtttcactgaggttcagatgtcaaaacttaagaaaagcgaagccttcactagagaaagggagagagaaattgagcaggttgttgaatcagtcaacgaacttgcacagatcatgaaggatctttcagttctcgtgattgatcagggaaccatcatcgatcggatagactacaacatacagaatgctgcagcttcagttgaggagggttacaaacaattgcaaaaggctgagaggacccagaagaaagggggcatggtgatgtgtgccactgtccttgtcattctaatcttcatcatgatagtccttctgattttgaaggagatcattttctga

SEQ ID NO: 27938 - DNA, 621 bp, Zea mays
  Peptide Sequence Number=SeqID_69717
atgcccagcacgcctctggccctggcccagcctagagttcgagtctttctctgcagctctccctgcctagcggcccccctccacctctccctgcaagcggcccctcgcatcggtctccccgagaggccgagacgcagcatcgccttcctccttgcagccgccgcaccatcttcggtccacgcccgcacgctccacctccatccattctctggatgtcccatggaaattccaaatgctagagcggttctccgtgtgagatgcccgaggtgccactgcgttctcgaggaggccggcgcccctgtgtaccagtgcggtggatgcggtgctagccttcaagggtggacggagggcgtccaccaccgcaccgtgcccccgcccgcgactttgacccccgcgcgcgtcttcctcctgcccgcgaatcacacccgctcgcgtcgccctcgccgccgggtatcccgcccgcgccaggcacccctcccccggcgcgccgtgatgcccgccgtcgggtatcccgccctcgtcagcgcacccctcgccctcacccccgtcttcgaagagccctgcttccatcctcagcgccgccagctcgccggcatcctcctaatccttgctcgatgctag

SEQ ID NO: 27939 - DNA, 288 bp, Zea mays
  Peptide Sequence Number=SeqID_69718
atggagccgccgcacgccgtcgccgctgtagcagcaggaggagagggtggcactgcaagcccgggcaccggcctcgaagggccggtgcttaggcgggggctggacggcggtggggaaggggaggacggggagctgggggcagggcaggaggcggacgcacggataccggagcggcctagcgaggcggactgtggctactacctctgcacgggcgcctgcggcttcagggaccgctgccgttacaaccatccccgcgatcgtggtggcactgaggtgcgcgcaagctga

SEQ ID NO: 27940 - DNA, 834 bp, Zea mays
  Peptide Sequence Number=SeqID_69719
atgggaaatcctatcagcaagttacaagatatgatttgcatcaatgatgacagattactacccaatggtgctatcaagtatactagtttaccatcagtcaccactccacgggactcaagcctttcttctggcagtcctccatcgccggcaagtattgttcttcatcaaaggaatgaccatgagagattacacaataatcagcaaaatttgtctgacctcaaacctcaaaggtacataccacctggagggcgtaactgttcaagtgaaatgactacatcagtaaagcatatgcagcctattgagggtgcttggttgcacagctcatcaaatgagcatttgggctccaataacgacaaatctcaagcatcttcacagttaggaaacgataattcaaatcccaagcaaattacttcagcagaaaatggaacatctgacaccgtgcagcaaaagccacagtatgctgatgtagtttctcaaggacaagttgcaccagtgcggcgtcttactgtacttaacaggccgtcaattgcttctagcgatactaggcctaaagcaacaggacaagttgtcaatgctagtgttaaatctcatgctggagtagagataatgaatgaatgctcagatatcaaagaaaagatagttcttggaggttataagcaactaccagagagcactgtgtcacacagattgactgcatcacagaatatgagcagcggaactcttcccagtaatctttctgcatcttatgccaaaactcaaggatctgctggatcacacaatctttcagatttgaacatgaagcttgttgcaaagaaatcgatcacagctgggtaa

SEQ ID NO: 27941 - DNA, 774 bp, Zea mays
  Peptide Sequence Number=SeqID_69720
atggctttcttaggaaggagccaccaggtgatggtaaaattaggcgttctaccacaggcgcgtgatccactcaagtggtttcccttcgacatgcccagcccccttgtcaggtcccaccacgcccgaccccgggctcgatgctcggggttcatccgaggtattatttctctacatcctaacaatgataaggtacaacaaacaaaaatctttctgtaccgagaaactaaaccaaataatagaagccaccgttcctcgcgcacagacaaccaaacagacgctcaaccaaagtcaacgcacgcaacgattcaggatggaatgtttatagtaacggaagctggttttttttttttggaaagctggggctggtgccacaacggcactggaaaccagaggcagaaacgcacgcaacgctacctgaccaccagctactggacgagagagagagaggatacgtttcgtgcagcgctggaaattccgttgcaaggctatggtatttgcattgtgcccttttctttgaagacacaaatagtgtacagcagcatctctatttgctactggaggaccgaagctttaagaacggacacgaaggactccctgacaccattttcgccaccatccatcatcttggcatctactaggttagaagggcatcaggtgcagagcaatgtccagagcaagctttgcctgaaccggagtacagatgaggcttctcaaatccaggaggacagcttgtctcctttcctttctatgcatagatgcgccatcagtggatga

SEQ ID NO: 27942 - DNA, 666 bp, Zea mays
  Peptide Sequence Number=SeqID_69721
atggcccatttaaaggaactttgtgctgataagtccaactatcaaaaagaacaagtcaagtctcataagcaaacatctgcaaaagttcagttgggacagtcagaaccaaaagatccaaatagcattcgtgtgattcaacggaagcttgtctatattgttggtatgccaactgagttcgccagcgagaagttgctgagacagaagagtttccttggacaatatggaaagatagaaaacattatcattgataatgttggagctaaccaacaggttcctgactctggacgtgtatatgttacatttgcaaaagaagtagaagctatcagatgcatacaggcagttgatggttattccttggatggtcgacctttgaaagcaacctttggtgtgacaagatattgtcatatatggctcagcaataaggactgctacaagccaaactgttcgtatgtgcattataaagccccagcagaagaaatttgtacaaaagatgatgtttctgtggtgtgtgcaaggtcctccttctgcgcggtggccatggccgccgccgtctctaatcgccttgtcgttgcaatcgcgaggaaggcggatgagacaggagagggttttgaagtggtgagatggcctgagcgagggagcaaaaatggcaagaaaaatagaacctga

SEQ ID NO: 27943 - DNA, 594 bp, Zea mays
  Peptide Sequence Number=SeqID_69722
atggccttggtgcaatttataggtgctcaacttcgtgaagctgacggagctgtcgtacacacgcaggctgaagccgcagctgtccattaccaagctgcgagtgagttcctgccggtcatcgaagaggtgttccgcacgctgacggccaagatggagtccatcgccggcgccagggtggagcacaacaagtactgcctgtccgtccacttccgctgcgtccgggaggaggaatggaatgccgtgaacgaggaggtcaggtcggtgctcagggagtacccgaacctcaagctcactcacggcagaaaggtgctggagattcgtccgtccatcaagtgggacaagggcaaggccctcgagttcttgctcaagtctcttggctatgctgggcgcaacgacgtcttcccgatttacatcggagatgatcgcactgacgaggacgctttcaaggtgctccgcaacatggggcagggcatcggaatcctggtgtccaagcttcctaaggagacggcggcatcctactcgctgagtgaccctgccgaggtcaaggagttcctccgcaagctggccaataagaagggggcgcgccaaccatga

SEQ ID NO: 27944 - DNA, 168 bp, Zea mays
  Peptide Sequence Number=SeqID_69723
atgggcggtggtctccatgcgataagaacggttgatgtggggaatcgagcactggaccgccgggtagcgcttctcaggcgagctctgccgtgtgaagtgaacgcgccgccacggctggggagcgtggtgggggaaaatgcatcgtcggttgttgattcggaggaataa

SEQ ID NO: 27945 - DNA, 1032 bp, Zea mays
  Peptide Sequence Number=SeqID_69724
atgccgttcggcttgaggaatgcgggcgcgacgtaccggcggtgcatgaaccatgtgttcggccaacacattggccggacggtcgaggcctacatcgatgacatcgtagtcaagacgaagaaagcctctgacctcctttccgaccttgaagtgacattccgatgtctcaaggcgaaaggcgtgaagctcaatcccgaaaagtgtgtcttcggggtgccccgaggcatgctcttggggttcatcgtctctgagcggggcatcgaagccaacccggagaagatcgtagccatcaccagcatggggcccatcaaggacttaaaaggcgtacagagagtcttgggatgtcttgcggctctgagccacttcatctcatgcctcggtgtaagaggcctgcctctgtaccgcctcttaaagaaggccgagtgcttcacttggacccctgaggccgaggaagccctcggaaacctgaaggcgctcctcacgaatgcgcccatcttggtgccccccgctgccggagaagccctcttgatctacgtcgccgcgaccacccaggtggttagcgccgcgattatggttgagagacgagaagaggggcatgcattgcccgtccaggggccagtctacttcatcagcgaggtactgtccgagaccaagatctgctacccacaagttcagaagttgttgtacacggtgatcctgatgcggcggaagttgcgacactacttcgagtctcatccggtaactatggtgtcatccttccccccgggggagatcatccagtgccgagaggcctcgggagccggcgcaggcctactcttcatctcgcccctcgggaagcacctacgctacgtgctacgcctccatttcccggcgtccaacaatgtggctgagtacgaggctctggtcaacaggttgcggatcgccatcgagctaggggtccgacgccttgacgctcgcggtgactcgcagcttatcatcgaccacgtcatgaagaactcccactgccgcgacccgaagatggaggcctactga

SEQ ID NO: 27946 - DNA, 189 bp, Zea mays
  Peptide Sequence Number=SeqID_69725
atggcaaagcaactagggtcagaggctgaggctgaggccctcagtggccgagaagattctactgtgttttccatggcgaagactcagggcacccaaccagggattgcccggagaccaaggcgaccgaggaccgactggctagggctgccccgatattttttatcagtgaattttaagtcttgcaagtaa

SEQ ID NO: 27947 - DNA, 219 bp, Zea mays
  Peptide Sequence Number=SeqID_69726
atggagcactatggatgcatagtggacctacttggtcgagctggtaagttacaagaggcagttcgatttattgaaagcatgcctcttaagcctggtgcatttctagaatacttgaagtgcttccttcggcaaagaaacctttgctttttgggaagtatagtagggttctcaatcgccttcaggtggctcccttgtgatatcttggcattgtctccttag

SEQ ID NO: 27948 - DNA, 906 bp, Zea mays
  Peptide Sequence Number=SeqID_69727
atggtgcttgtgcttgcgctgggggatctgcacatcccgcaccgggcgcccgacctccccgccaaattcaagtccatgctcgtgcccggcaagatccaacacatcatctgcactggcaatctctgcatcaagtctcattttcctgatcgcacaaaggacattgctcggggtgaggaagccctcttttttccaagcggtcagcagtccaacaacgatttctggtggccaaccatatggatatttttgcatttccctagagcccaaggtttccaaagcctcttccaaggttcaaaagcttggggcatctcactcctgcagctaacgatgagtcttttgcagactgttggagaaagatgtttcttagatgagtgtgttagcggggcaatagcaggagctaaggagtttgagagcctagtcttagttgcagctcttgggcgagtctatctagggggtggaggtgtatctacgcttgttggaacttggaagatgcaagaaaaggaagtccatgactacctgaaaagcctttgccctgatctccatattaccagaggtgaacatgatgaggatgctcgatacccagagactaagacacttacaattggtcagtttaagcttgggctgtgccatggccatcagatgtcgatgttcccatggcaacaaagtgacatgtgtacaaccacttggatcccatggcatagtctggtaggtgtcgagacttgggactggtcgcaacaatgtctagtggagacgcccttgctgaggctgatgaaagattgtggcgacattatgcacatgaggtgccctaggggctggaacaaatgcctcggggaccgacgcaagaggtgccttaggggccaaaacaagaggtgccctaaggaccgacgcaagagttgccttaggggctga

SEQ ID NO: 27949 - DNA, 393 bp, Zea mays
  Peptide Sequence Number=SeqID_69728
atgggcagctccctggctggccggcgtgcttgctggttgctgcagttgcagacttgcagtcgcacagagctcacgtgccgacgtgcgaacttcgaggatttcgttgctggccatttccgccagcatgggcgcaacatccttgtcgcttgcagagcctacctggacggtgcccaggttggatgcctatcgggcgatggagtgcaggacgttgatgaaggcgacacgagctgctcggtgaggttcaagcagtcactgaagaaactcgttgaggagctgttgacggagttcactgtgaagggcgcggactgcggcaagttcctcaccgaggagaaggcaaagaggtcgtctggagcttgctccacatggacagcggacaccacattgaggctgtaa

SEQ ID NO: 27950 - DNA, 336 bp, Zea mays
  Peptide Sequence Number=SeqID_69729
atgtcgggtggaggcgtggagccgtggtggacgccctcgttgcgtccttatagagtagtagagattaaagaacacggtccaccacaccacacgaagcgaaagggtactggagctggattaatgggaacaaccattttagcaatgtgccttgtcattgatgaagccgatcgcatacttgagcaaaactttgaggaagacatgaaacaaatatttaaacgccttccccaggctactgttgaaggcctgcagcagggttattgtgtcatttctagcaataaaaggttcttggttatgtatgctttcctaagaaagaagcggaataagaagatcatgtaa

SEQ ID NO: 27951 - DNA, 303 bp, Zea mays
  Peptide Sequence Number=SeqID_69730
atggggcctgtttggttcagtttttttctgaccagcttttccgagaatctagctttgttcttgaaccgagttctcatgcttggttcacaaactcaaacagttattgggaggccaatactacctgatgctgctgttcatgctgttgtggaagagcatgccttagatgcaaaagtgatcatattcaagaagaaacggagaaaaaattaccgccggacaaagggccatcgtcaggagttgacaaaactgagaataatcaacattgaaggaatagataagccagagactgctgctgttgctgcctaa

SEQ ID NO: 27952 - DNA, 435 bp, Zea mays
  Peptide Sequence Number=SeqID_69731
atgggcaagagcaagagaggtggcagctcttcgcatcactcgggcgacaagcgtaagcgcgagccgactcctccctcggaggacttcggcgactcggaatactcggaggaggagttctcctttgagtccgagggttctctggctcctgcctctcctccggcgtcgtttgatgattcagacgactcccaggggatcaccgcggaggtatggacctacatccgggccgtcgagcgtgctgggctcgagggctcggatgagtcggagtactcctcggacgaggagaattcctccgactcgtccgaggagggcagcggcagcgacagtgacgacgacggaggcgacggcgacaacggcaagggcggtgacgatagcggcaagggtggcaacgacgatggcggcgacggcagcaagggcagcaacaagggcagtggctag

SEQ ID NO: 27953 - DNA, 210 bp, Zea mays
  Peptide Sequence Number=SeqID_69732
atggcgaacacaacggaagtgatcataccggcgaacgtcgaggcgcaaggacccagccacggtcgtggcggatctgcggcgatggggttgctccgctgctcgttaggttttgccagtcgtacaaacgcagtacacctccccaaggtccttacggagaggtactcaggaaaaaggcatgagccccctagagtatcactgaaagttgcctag

SEQ ID NO: 27954 - DNA, 1074 bp, Zea mays
  Peptide Sequence Number=SeqID_69733
atgtcgctgccacacccggtgccccgagagacggtggccagcgccgtcgcctccctcacgatgtggatgaagaagcgcacagcgcagacgcgcccaaacctcctcgccgacgagcgcgacgacctcgtcgtcctccagctctcgctccgcctctctgacgtcatcccgctctccacgctccgcacggactaccgcccctacgagtcgcggcgccgcctcgcagcctcccacgacctcttcatcgccgaccgcgccattgtcccccttctgccgcgcgtcctcgggaaggcgttctacgccaccaagaaggctccgattggagtcgatttcagccgcgtcggatggccggagcaggtccgcaaggtccttggctctgcttttctgtacctgcggtcggggacctgctcggggatcaaggtgggtaggctggacatggaggaagaggtgatcgtggacaatgtgatggccgcagtggaggaggctgtcgagaaggtgccaaagaagtgggccaacgttagggcactgcatctgaaggctgtggattcagttgctctaccaatttaccaggttgtaccagagttgggtatgaaaatcgaggtgcctgaaattattggatctggggaggttattgatgccgcagaagcggagacttgtgggaagaagattgacaagaagggggatgctggtgcccgtggaagagaggtatttgccaatgtgagtgccaagaggaagaggaataagaaggggcaggttgaggatgatgttgcgatgcaggaagaagtccaggtggagatagagaaaaagaagaggaaaagcattgtgatttctgctaatgacagccagatggctggcaagaagggtgaaaagaagggcaaacgtggtttggaaaataaggtgaacgaagccagtttggacaacaagaaggttaagatggggaagactgagcagaggaagaagaagagcatgaacggtgatggtgaagtcggtactgaggaaatgcagggagataagaagatcaaggtggagaaatcagatgtcaagatcaagaagttgaggaccaggataagagtataa

SEQ ID NO: 27955 - DNA, 348 bp, Zea mays
  Peptide Sequence Number=SeqID_69734
atggtgagacgctggaaccagagaaggggggccgaggaagccgctccgcaccggtgcaagagtatttggataaaccgaggatggccggggcaccactttaaccggtcatcggcgagtcgctgtcgcggttgttttgcgcggggagctcgatcattggggaggaagatgactatctccagagccatccatccgagtttggacgatggggatttgaccgtggggaaaatgtttgggttcaaacgcgcggtccgtccgatcggtgatccgagggctgagggatggctcgggcgtggcaggatctcgggcgacgatcttggatccaagggtctgggttgcgtactggtataa

SEQ ID NO: 27956 - DNA, 2040 bp, Zea mays
  Peptide Sequence Number=SeqID_69735
atgggcaggtccttgctgcaaaaacatcatcttttatacagtcattgtgcgcactggcccctttccactggcaagaagaccctgaagtcatcgatgtgcggtattgcccttgtcctcgccagtgaccgccttgtcatcgttccctgtgccactgcaactactgccgcattggagacccagcactcctgcaagaggaagggcgtgccagatgagctgaaggaggccctgcgccggcggggccctgatagcctaggctacagaagtcgctgccttcttgctgatggcacggttgttgttggtgatggttgcaatgatggagtagagggtaaaatcggtgtgagtgactctagtgttgctgatttgttcttcatcggagcaacactgcatcttaggggagctaagctggtttcgcagccgctggtggcccccagtggaagtgtctttctgtataatggtgagatatatggaggaattcaggttgcggatgatgaaaatgacacccaagctcttttcaactctctggaatcttgttgttcatgtgattgccatgctcttggtagagataaaacatgtacttgttgtggtactgggagtggtgccaaatcagttttgcaagttctttccacaatcaaaggtccatgggctttgatatactggcaggcagatcaaacagtgtcagatcgtgacatgtctaaccatactaaagctagctactgggaagagcttccttgtgggatatacagcatgcatatgaaagacattggaaagcatggtgcatgcatgaaggaagggtggattgtggaagttaacacacataaatggatggcttcttcattgaatggattgatcaaatgggagaggaaactcacagttcctaccatggagaacattcctgttgacagagggaaccatcagttgtctcagagcttcataagctcaagagaacctgaagaaaatacgaataatgggatcacaaaggcagattttctgtcagattctagtttatgtgatgcaaattgcataacacagtcagcacatagagtattggttgcattaagggaatctgtaatggtgcggactaaaatgaacacactctttcagggtactctggatagatctgaggacggagagtcagccccaatagcagtcctcttctccggtggcttagactccatgctacttgcagcactgctagaccagtgcattgattccaaatggataattgatttgttaaatgtcagttttgatgggcaacttgcccctgataggatttctgcaatagctggactgaaggagcttcagaggatatctccgtgccggagatggcgtcttattgagattgacactgctttgacagacttgaacggggaaagtgaacatgtgatgtcactcatacacccttcaaatacctttatggatttgaacattggtattgcactctggttggctgctggtggtgatggttgggtggatggaagtatatgtcgtatgcaagatggttctcgctataagtacaggtcgagatctagagtccttatagtgggttctggggctgatgagcagtgtgctggttatggtagacatcggactaaatataggcttggagggtggaacgcattggatcaggagatgagactagatgtgcagagaatatggaaaaggaatatgggaagagatgataggtgcatctctgatcatggcaaggaggcccgtttcccatttcttgacgagaacgtgataaaaactttgttggaaattccgttatgggaaattgctaagcttgatgaacctgttggaaggggtgacaagaagatcttgagagaggttgcaaggctgctgggcctacaagaagctgctcttcagccaaagcgcgcgatccagttcggttcaaggatagcgagggagtcgaaccgcaagaacttcggcagcaacagagccgcgaaccaggcatcagcaggcagcgtgcagattcaccagagtccagcttctccagtggcgtcggccacacgccagccatttcttaccaacaatcagccatga

SEQ ID NO: 27957 - DNA, 438 bp, Zea mays
  Peptide Sequence Number=SeqID_69736
atggcactatccacgacacaatgccccttttgggcattacgtcaaacacaagacatgtaccacgatgcaagagccacaggaacaacgacgttcgtcgcggtggagctgcacagcgatggggaaaaggagaggctcgctgcaggggggctgctcgccatgggtgcagagctagcagcaaggggcctccatggaaaggggaaaagctatcggtccctggagcttcctgtgccatgctccaatggtggggacagggggcgttggactccagtagggggagcattcggccagggagaaatggggcgagctccttcaaggtctgaaatcaatttgatcggtgacagattggacgtctggctagttgaggcagatggctctcagctggacatcaccctgctctgtgcttcaatgcttctgttgattagacttgcacttcagtag

SEQ ID NO: 27958 - DNA, 312 bp, Zea mays
  Peptide Sequence Number=SeqID_69737
atggggaagcctgtcccatcactcctcatgctcctcctcagccgaggcagggtcccactcaacagtccaacccggtggcaagacttcgcgcgcgccgctggattctacggggatctcgcggggtcgttcctcctcctgctcggacttcggggtggcgcatataaaacccgtggcgctgcaacccccttcttcatcctctcgggcgccgccagaagcttgtcggcgttaggggtggacctctgggtcatcaggcgcatcgctcatcggcgggtgtcgccgtgcggtcagcaagcgccgtcgtgcacggtctga

SEQ ID NO: 27959 - DNA, 933 bp, Zea mays
  Peptide Sequence Number=SeqID_69738
atgcggaagccggcggcactggtggtttctacggcggttttcgcagccgcagccgtagtcgccgtgatggcacgccagaggttgcgggaagcgaggcgatgggcacgcgcaggcgccgtgctgcgggacctgcaggagcggtgcgcggcgccggtggagcggctgcggcaggtggcagacgcgatggtcgcggagatgcgcgcggggctggcctccaacgactccgagggagatagcgggagcagcgtcctcctcaagatgctctttgggggcaaggaacaacgaatagtcaagcaagaatctaaaacggtatccattcctcaacatttaatgtccaggggatcaaatgagctgtttgattttattgctgctgctttagcgaagttcattgcctctgagggtgagggcttttatcttcctgagggcatgcaaagacaacttggttttacattctcctttccagtgaagcaaaattcagttgcatctggcactcttatcaaatggacaaagggttttgcaattgatgaaatggtaggaaaggacgtagtggcagaattaaacaaggctatcaaacgccaaggagttgatatggaagtcacagtactggtcaatgatacagtagggacattggctgctgggagatatgtggataatgatactgttgctgcagttatactgggtactggcactaatgcagcgtacatagaacatatggactcaattcctaaatggtgtggcccacctcctgagtctggaaacatggtgataaacatggaatgggggaactttaggtccacccaccttccactgactgaatttgatgtagccttggatgcagaaagtttgaaccctgatgaacagtatcctccaaggtccttcgagatgcaaataggagccgtattccttgtagaactccaaggccctccatcatga

SEQ ID NO: 27960 - DNA, 243 bp, Zea mays
  Peptide Sequence Number=SeqID_69739
atgcacattgtggatgtaagtgttaaccgttcggaggtcaacaccctgagtttgattgtagattctataacaaataaacttgttactgacacttcaccatcagccaaggatgtagagttgactaaatctgttcatgatcttgctgttaaagcactactttctaatgacgatactgaaagggaaatgtgcccttgggccatttctaagtgttttggtgatttagtgtccaacacaagtgcctaa

SEQ ID NO: 27961 - DNA, 150 bp, Zea mays
  Peptide Sequence Number=SeqID_69740
atggcggaaaaaggaaccaacttaaaggggaaaaggccatctagtccccgctgggttgtccataagtcaatagtaaatatgaagggcatgaatttgtgcgtcaagcttggacttttaccttctgtcaagccgaaggtatgtccttcatga

SEQ ID NO: 27962 - DNA, 276 bp, Zea mays
  Peptide Sequence Number=SeqID_69741
atggccgaaatgagcaacatggtgcccggcaacgccgctgtccagggaaagcgacgactttatgatggtgcgactgatgttgaggccgagcatggaggggttcatggcaaggatgaccggcgtggagggcaggcaccggacatgggcggattgacgaccatgggcgaggttgacagtagccggcagcgagctgcacgaggaacggcgatggacatgcccggacttggtgcaggcaagctgcggatagccctggcacacgacacgaccacgaagtag

SEQ ID NO: 27963 - DNA, 510 bp, Zea mays
  Peptide Sequence Number=SeqID_69742
atggtgcagaggtttacccggtccatgtgctccggcggggttccgaactccggtgagtacgattgcgctattccagtggcgcgggtcctcggtttaagcgcgggcatgcttcacggcctcctaggggatctatccgaaggcttggatcaagcggaggagggcgggaaaggggttggccacggttgttgccctcgggcggctcttgcgggtcgtggggaggtcgccggagctgcgagcgagctcaggagagttaggcgcggtacagaggaggcaacggggatgatggccaggcactggggtgggctttatagctgtggcgcgggcgtggtcacggggcggccgcgggcgtgcgggcgtgctctgagcgcgcccccgagtgtcagcccacgtcgaacatgtgtgggtttacttctgccagggttcaacgaccgatttgattgccttagcgtgcagatcttggcaaaacccccgtgtacggtctcttccctgcaccaaatcctacctttttga

SEQ ID NO: 27964 - DNA, 222 bp, Zea mays
  Peptide Sequence Number=SeqID_69743
atgtcgaaggatgatcttgctgatagccttgcatacaacagtataaagcttcatcccaaggccgaaggtccctgtgaatgtattatactcagaaaacatgttagtcgtgtttttgaggaccttcggaagacgaaggcccccaacaatttatctgaagattctgatgacagtgatgactttgatgtagaaagtggagatgaagattctaaggaccagccctag

SEQ ID NO: 27965 - DNA, 411 bp, Zea mays
  Peptide Sequence Number=SeqID_69744
atgaagctaaatacaatgctcaggccgaatcccaaaaagccaaggttgaagaccttcggcaacaacttgccgaagccaaagaaaattaactggttcatccttcttccagaccgcgcttttcatatcgtgtacagcttcatcccaaagccgaagggtgggagaggtaaagggagaggcgccgaggggagagggagagaacgggagaggaggggatgcgaccagggccatggacggctcgaccgggtcacggggcggcgcgacgtgaggcgcgcgcggcaccaggcggcggcggtgctggaggtaaagaaggggcccccagacgggtggtccccacgtgttagtgagagtgggagggaggacatgggcgtgggagctgatgggccctggtgggcaggtttcggccagggttag

SEQ ID NO: 27966 - DNA, 231 bp, Zea mays
  Peptide Sequence Number=SeqID_69745
atggcctcagtgcttgaaaaagacggctacgaccatgccagaattgttggaggagctggcctcggcataggtgttgatgacataagaaatcctttgaagaatgtgttgaatgttgtgaagagatttttctttgaattatgtaacaaaggaggccgacagctggctgcctcagaggccgaagagtacaccgggaagaacaaagagtcgaaaaagacaaaggaaacgaagtga

SEQ ID NO: 27967 - DNA, 324 bp, Zea mays
  Peptide Sequence Number=SeqID_69746
atgcggtcagtcgtcccttcttcaacagaattgcccgtatcgcgcgggtggccggcgctcgacgcgagatcctcggccatgaccgccctggactcggtctccccggttataaaggtaaccctaggctcgtcgggcggaatcgacaacagggagcccacgaatttgtcaccgtcgaggaaggtccgcgccggtccgctgcggaccgtggtcagctcccctaacctcacccctgtctccgatcattacgttaatgggaacatggagcgaccacccgggaaaacagtgctaccacaagggtataatgggacgcccttggatgattaa

SEQ ID NO: 27968 - DNA, 588 bp, Zea mays
  Peptide Sequence Number=SeqID_69747
atgggggagggagaggagaagccgttgcggtggttttcggtgcgggaggtggacgggcgcaaacgccgaggggccggctcggctgaggtcgggcacagggtcgaggcacggtcgcgggagctcggcacagcgcaggcgtggatgcgcctggcggcggcgacgtggccagagagcacaggggttctggcgcaaaataacccagactcagactacacagtcgtagtaccgcgggttgatttccttatttctcagggtctctttagtaaatacgccgaggcgaagagattagattactactctagcgaaccggatcgtcaccgtagggatcaatggttccggattcacgcattggcttcatcgcaccccatggaggcgcctgcgacggacacggcggcggatcatcggagctcaccgaaactcggcccccaataccccaaaatccaattaatgcccttctactcgatgccaggcgaaaagcgagacgcggggagggagtattaccgtctggtgcggtgcgaagctcacgacacacggttttcaaattcaaatttggattcaattgtaactgtgaacttaagctcattttaa

SEQ ID NO: 27969 - DNA, 222 bp, Zea mays
  Peptide Sequence Number=SeqID_69748
atgaaggggactcaaactgccgcccgccaggacacacaaccatcagcagccagggactccacgcctgccttcagccttcagccacccgccaggacacacaaccatcagcagccactcagccagggactccacgcctgccttcagccttcagccagggactctcacgccttcagccagggactcagccttcaggtgatccttctgactttggctaagcagtag

SEQ ID NO: 27970 - DNA, 642 bp, Zea mays
  Peptide Sequence Number=SeqID_69749
atgcagcacctcgagccctcgtggggaatgccttccgacaagatacgcctgcccgctcaggccctgcagacgatacccatcacctggtcgtttgctgtgtggggtttggacctcgttggtcccttgcataaggcactcgggggcttcacgcacctgctggtcaccatcgacaaattctccaagtggatcgaggtccgacccctaaccaacatcaggtctgagcaggcggtggcgttcttcaccaatatcatccatcgctttggagtcccgaactccatcatcaccgacaatggcacgcagttcaccggaaaaaagttcctagacttctacgaggaccaccacatccatgtggactgggccgccgtagctcaccccatgacgaatgggcaggtggagcgtgccaacggtatgattttgcagggacttaagcctaggatccacaacaacctcaacaagtttggcaagcggtggatgaaggagctaccctcggtggtctggagtctgaggacgacgtcgagccgtgccacgggcttcacgccattctttctagtctatggggccgaggccgtcctccccacggacttagaatacggttccccgaggacgaaggcgtacgacgatcgaagcaaccagatcagctga

SEQ ID NO: 27971 - DNA, 252 bp, Zea mays
  Peptide Sequence Number=SeqID_69750
atggggcgcgcccgtgtggctttcttctcgctgttgtttgagaagcgcgacctcgtggagattggcgctctccagccatcgctcggcttcaaggattttcgtcatgcagcccggctgcattccctcaccaatgcttcaaggatcttcgtcatccgggctgaggcggaggagcgcaccgagtgggggttgcctccgcgtgggtcggtgacccttttcttcccctggcgtttgggggagaaaggcatcctctag

SEQ ID NO: 27972 - DNA, 177 bp, Zea mays
  Peptide Sequence Number=SeqID_69751
atggccgagaccaaaggaaacttgaagaccctggcgcgtgctgtagcgggagggtcctgtaatcgtcactgcgattccgctgcgcttcgccgtcgccaggaccttggttggtcgggcatagcggtggaattgctcatcggagcaatggatccgctgcgatgccgctatgctacatga

SEQ ID NO: 27973 - DNA, 321 bp, Zea mays
  Peptide Sequence Number=SeqID_69752
atgtccctggctcctcgcgccctctgcctctcgccgccgcagctttttcaccgaggcgccctcctccgcccgctgctgcgcggcatggcctcctgtgccgccaccgggtctcacgtcgctgcagaggcgcccccttttggtgtggggggatggggcgccagcgacccgcggtggctcgtcctggagaagctacccgcgagctacccgacaacccgcgatctgacaccatcccgcgggaggtcctgcacgcctgttactccagggtgtttccttctgccaaaggggacaacctcaagctggttgcgtggtcttattccgtag

SEQ ID NO: 27974 - DNA, 328 bp, Zea mays
  Peptide Sequence Number=SeqID_69753
atggctggttaccgggggtcgggcgaggatgtgactcttcccgaggccgaggtcgaggccgaggctgagccccggggtcgggcgaggcggagcttcctgttgcgcccgaggcttaacttgaccgttgtcggtttcgcccgggtggtgatcccatcattaaatgcgcatgcgatgcggtcggctggtaaggcgatctggccaaggtcgcttgcacgaaaaggcttgcccttggctgagccgagggtgcgcttacggcctgaggagaccctcgggcgaggcgcgaactcgtccgggaccactgttccgcccgaggccaggctcaggcgag

SEQ ID NO: 27975 - DNA, 403 bp, Zea mays
  Peptide Sequence Number=SeqID_69754
atgtgggttcttaaagaatccgaaaagcctccacaaagcacaagatcaaccatcatcttccatgcaagcatctccaccaactcaagatgaggatcaggctcaagatgatgaagatgaagatcaagaggatgagccacctcaagaggaggacatggatcaagggggagatgaagatgatcaagacaaggaagatgatcaagaaataagggatcaaagaccgccacactcaagagtccaccaagcaattcaaagatatcaccccgtcaactccattcttggtgacattcataaggggtctgggtgcatcggactgtccggtggtgcaccggacagtgtccggtgcgcgaggctggagtctggtcaactggctgctctcgggaattcatcgacggcgtacggctaa

SEQ ID NO: 27976 - DNA, 165 bp, Zea mays
  Peptide Sequence Number=SeqID_69755
atggcggcctccagcgcagtggcgtcctccaattcctccccaacggctgccttcacccaaccggtccacggactcatgcgcgttccaaccgtccccaaccccacgaccctccgctgtcttcagttcatcacagacattgacgtaaaagcaacctctaaaatatag

SEQ ID NO: 27977 - DNA, 240 bp, Zea mays
  Peptide Sequence Number=SeqID_69756
atggcgatcgtgctctactgggtgtacgccgacggctaccagctgatccttcaccgctggctgcttgagcggtacaggctccacacactggacgaggaggaggacaacgtcgtcagcctctccaccgttgtccgtggtgtactcctacagcagctcatgcatgccatccacgtgatggtcttgttcatggttcatttttcagctatcttctaccagaaaacatctagctttccagagtaa

SEQ ID NO: 27978 - DNA, 378 bp, Zea mays
  Peptide Sequence Number=SeqID_69757
atgcaaaaggagcggttggtaggcggcgcgacgttctctttctcctttttccgtggcatgctggaggacatggtcggcatcaaagatctatccagtatcgccatcgcgtttgtcgttgaggtcaacaagctcgcccctaaggaaatgaccgacgtcaaagaccactctagggtcgtcgatgtgttcaccgtcgaggtcgacaagctcgcccaaggctggtacttggagcagtatccatgcatccatccatccatcctaagattgcatctttttttgagacccatagatagcagattcagaatgaacagaacaagggagtatgagactaccgaagtctcccaaccaaacaagcagtcggtgttgctcatctctgcataa

SEQ ID NO: 27979 - DNA, 1299 bp, Zea mays
  Peptide Sequence Number=SeqID_69758
atggcccaggtggggatccaagtaaatacaatcacgttcaatgttttgattgatggatatgcaaagagtggacagatggatcaggccagtgcaacctatagggagatgcaagcgaggggattagtgccagactcctgcaccttcaacattattgctgctagagctcacaagttcgggtatgctgcccagttagtccatgaccatgacatgtttagttcacatatgtcggctgatgggttggatatgttggtctgtaggctttgttgggatcatcgattggatgatgcctgggagcttctgcttggtgctattgagcagggtgttccattgcgtgttactggatttaatgcattgatcgctgcttatagtaaggagggactccacgaagaagcttctgaactgtatagaattatgaacaagttaggactggcaccatcctcgtctacttttaattacttgataatgggactctgcaatcaagtaagacttgatgaggcacagcttcttttagagcacatggttagcaaaggatattgtctaagtacatcatttactatcagcttggatgcatacttcagagacggtaatgcagttggcgcactgaaatgctgggatgatatgagcaaaattggtttgcagactgattttattgccttctcagcatatattaatgacctaagccgattagattacgtgaatgaggcttatcaggaatttgctgagatgacgagcagaggaattcttgcaaagaagggagaacaattcattgatgtcccttatgttgtgaagggtatggatgtgtcatttagtggcatattgagctttattgaagctgcggcgattgaaaagcttaaaaataatgagtgcacacctgcggacctatgctactcattgcaggaaactatctttgccatgcttgtcgaaattactgaacgtgccatggcacactgtgattcaaaggacattcttattgttggtggcgtcggttgcaacgaacgtttacaggagatgatgaagattatgtgctcagaaagagggggtaggctgtttgcaactgatgaccgctattgtatagacaatggggcaatgattgcatatactggtttactggcgtatgcacatggcatgaccactccccttgaggagtcgacatttacacaaagattccaaactgatgaagttcatgcaatttggagagagaaggagatgccggtgctaaataacacccattcagatgcaattgctgaagtttctatagatgaagcctccatggcgacaccaatcgttatagattactga

SEQ ID NO: 27980 - DNA, 588 bp, Zea mays
  Peptide Sequence Number=SeqID_69759
atgtgcaagaggagaaaaggtctgccaagatggaccgcgaagttccgagtgccagaaacaagcttggaggccaccccggacgacggcttcagctggcggaagtacggccagaaggacattctcggcgccaagtttcccaggggctactaccggtgcacgtaccgcgccgcgcaggcgtgcgccgccacgaagcaggtgcagcgatccgacgccgacttgtgcgtcttcgacgtcacgtaccagggcgagcacacctgccaccagaagccgcggcgcgccaccgcggccttgtccgcgcccggcgggaggagccagacaccgccgccgccgccaacgccgcctgcactaccgctggagcagcaggacccgggcatgcggctgctggggatgggattcaggcgcgtcctcagggtagagacggcggggctggcgctccacgacgaccccgacgaccgcggccccgcctccgcacccgccgcgccctttctccttcccctccgtgccgccggcttctctccacgccggcgaggcggcgacgacgacggacagcatccccgtggcagcggaccttctcgccgcccgcgttga

SEQ ID NO: 27981 - DNA, 402 bp, Zea mays
  Peptide Sequence Number=SeqID_69760
atgtccaaacagatcttagtgccaacgtcttctgtgaaaggaagcaacatatcaattggaggttctcttcagcttcttggtttctgcacctttgaggcatgtgttggcatattctggccgtcaatcatgaagatgagatctcagtacattcctgaggaagcgagaagcacaatcatgaacttcttccgcataccactcaacttatttgtttgtgtggtgctttacatcgtgaatgcattccctatcactgtcatgtttgggatgtgttctatcttcctcttcatggcagccatcttgcagagacggttgatggttgtctctgatcttgcagagacggttgatggttgtatctgcagcactgtattttcagatttctacttttttattcttctccatttttaa

SEQ ID NO: 27982 - DNA, 372 bp, Zea mays
  Peptide Sequence Number=SeqID_69761
atgtcgcccgaccgcccgatccgcagcgcccccacccccatccgccgccagatccggatcatcgctgaccgagggagccatcaggcgctactggctcgtgttggtcaactttgtgcaggtcgcgcctgtccaccgccgtcttcagggtcttcgcctgcctttgcatgcataggccggacaggggccaaggaatcgttcgactccggcgacctccctcccacccttccatcttggtgtttctacacgcaccgcaccggatctttctccgatgggatccaccttagattctggtcgcacgccaatcaatcagtgaaggctattggaagatctgggcggttgtcgtggggaaggaacaagggaaggatggcgtag

SEQ ID NO: 27983 - DNA, 354 bp, Zea mays
  Peptide Sequence Number=SeqID_69762
atggccgggataaaggaccagaaggacccccatgacaagatcctccaggggcagctcctggccgttgatgaagtcctggagcaactactggaccttggggatcctagtggggctgctaataaggaccacctcatggacgctactcttgtccatctttgtatctcttggacatttctcaacatgctccatgcacttcctgagcaggtcataggggcactggaccatccggtgggtggcacggactgtttggtgaaccagttgaccgttggctctggccgacgtgtcaactatccgttggtcggctggcacaccggactgtcaggcactctgcatggactaaccggtgatttatag

SEQ ID NO: 27984 - DNA, 222 bp, Zea mays
  Peptide Sequence Number=SeqID_69763
atgtcggttagggccaaaactactaatgctgctctcgtgttcccgattgaggactcggctagtgccaagccctttgaagtccctaagggtttggatcgagagctatcagctaaagaggtggctcccaagacttggatattgaggaggtcctacatgatgcaaagcacaccgtattcgattttgaatatattgagctctcgttcatgtttaagaaaaatctaa

SEQ ID NO: 27985 - DNA, 543 bp, Zea mays
  Peptide Sequence Number=SeqID_69764
atggtggggcgaatttggcctgcgggggcctatggcggccggtccacggcgcagtggcgggcgcccgcggcggtgaagccgccggtgagggcgaacaccactggccacggcgcacagccggacccacggaggattttgcgctacgacgacgaattccgaggtcaccgaccacccttcctccgcagcgagtccccggttctgtccccgaagcacgacgagacacacaggcacgaaatcgtggacgcgacgacggcaacacagattgaactacggcggcagaactttcctctccaatggcggcggcgcactgagaacctaacagtggcgcgaatgcggctaggtgggggcgaagagtggccacggggcaccgagcgcaggcttttatatggtcaactccccaaacggccgagcgagcttcgcggaggtcgtggcggcgaggactgttcacgccgcgcgacttttacggagaagaagacggcaacgaggaggggtccacatgcagtgacggcagcgagaactaaagagcaggtaaccggctgctaa

SEQ ID NO: 27986 - DNA, 186 bp, Zea mays
  Peptide Sequence Number=SeqID_69765
atggtcgtgatgtcagtggaggagaagatgatgggtcctattcttggcaggcctttgcgcttcctaggggttgccctaaagcctaccatccttcttgtgttaaccgggatgatgacttcaagtcaaagggtcggtggaactgtgcattggtcatcacgtgttttccctgttcttactatcatatag

SEQ ID NO: 27987 - DNA, 1005 bp, Zea mays
  Peptide Sequence Number=SeqID_69766
atgcaagaggagctcaataacttcacaaggaatgaggtatggcatttagttcaacgtcataatcaaaatgttgtaggaaccaaatgggtcttccgcaacaaacaagatgagcatggtgtggtgacaaggaacaaagctcgacttgtggccaaggggtattcacaagtcgaaggtttggatttcgatgaaacctatgcacccgtagctaggcatgagtcaattcgcattttacttgcctatgctacttaccatggctttaagctttaccaaatggacgtgaaaagtgcctttctcaatggaccaatcaaggaagaggtctatgttgagcaacctcccggctttgaagatagtgagtaccctaaccatgtatataaactctctaaggcgctttatgggctcaagcaagccccaagagcatggtatgaatgccttagagatttccttatcactaatggtttcaaagtcggaaaggccgatcctactctattcactaaaactcttgacaatgatttgtttgtatgccaaatttatgccgatgatattatatttgggtctactaatgaatctacatgtgaggaatttagtaggatcatgacacagaaattcgagatgtcgatgatgggggagttgaagtacttcttaggatttcaagtgaagcaactccaagagggcaccttcattagccaaatgaagtatattcaagacattctaaacaagtttgggatgaaggatgccaaacccatcaagacacccatgggaaccaatgggcatatcgacctcgacacgggagggtgtaaaattaatagaaagatcacatcggggacttgccagttcttgggaaggtctctggtgtcttgggcttcaaagaagcaaaattccgtagctctttctaccgccgaagccgagtacattgccgcaggccattgttgtgcgcaattgctttggatgaggcaaacccttagggactatggttacaaattaaccaaagcatcctcttctatgtga

SEQ ID NO: 27988 - DNA, 492 bp, Zea mays
  Peptide Sequence Number=SeqID_69767
atgaaggtgctactcgaaaggctgaaactcgctcttaagggagatcgaactcgagacatgaaggtgctactcgaaaggtttaaccattacgctagagaggctgagaggcattttcgcttgacctcagtattggaagaaatcaaccatattatggccccacaaatattactagtatcaaggtattggaactcaaagatggctaataagatcaagttatgtcgacttgaggttttggagtccaaccccaagctcaaacaacacaaaagagcaaaacgagaggtttgcactccaacttgttttgcagtaaaagtaccattttggtccttgtttgaggagaaactgagaaatggaggaaaaagaaatctacaaggggcttggggctatgtaaaggagtacaccaagacagcaagtgcgcatcgaactagccattactgggcgccgaaccccaaggagtacaccaagacaacaagcaagtgtagtactattgaataa

SEQ ID NO: 27989 - DNA, 503 bp, Zea mays
  Peptide Sequence Number=SeqID_69768
atggcctccttgcgtccccgccattgctcaggcgctccagatttccctctcgaggtgagcaactccccaacaccgtgcattgccctttcgtccgtgcaatcgctcgccggaggaagtctgcgtcgccgctatgccatcccgccacagaccgccactctctggtgcccctacgccggtgtcgtgcccatgatcgtgtccgtcgtgtcacctcgaaccttcctgtgcccttcccagcgccccatggcccctagcgcgtcgacgccctcgtcttcggcgaacctccgccgcaggcgcgagcgacaccaccgctggcggtcagggaaccctgcccgtggttgccattggatatcgggcgttcatccgagattgagcggcctaggtttaattagactagatctaatctcaaccgtctgtttcggatccggccgctcggacaacgagcagcccgtggttcctgagtgtgttgccgaagaccttcctgagcaacaacctggtgaaggcaa

SEQ ID NO: 27990 - DNA, 420 bp, Zea mays
  Peptide Sequence Number=SeqID_69769
atgggttgccatgagttatgggcttactttgggtaccttgttcttgggtacccgtcagcagccccgagcctttgttcagtttctttgagttgttcggaggctttattgttgggaactagagtctcaagcatgccccttgtgcagcgtgttctcttggtgctctgccaaaggcagaaaaccatctgcaaaatagggagcttctctgctcggattcctttcctatcctccgtccgcagctacgagggcaagtggttctatgtgaaaaatctcgaagggagtgcgtcgcagttgaccagtcgagtaccggtgtccaacgtcgagtggaactatggtgcggagaagaagttcaagtcgaaaatcgactacatgttggaggtcgttgccatgctgaacggaggggtctctctagcgagaggctga

SEQ ID NO: 27991 - DNA, 450 bp, Zea mays
  Peptide Sequence Number=SeqID_69770
atggccatcgcagttctattgcgaagaggggagggcagcgttttcactcaatatcgcaacagaacggcgagggcaacatactatcacatcggctcctccttcggaataagacctgcctctcgaaaattaaacaacatcaacctcaactcttccccctcaaaaaggtcccacaggtccccttctccaatgcatgacccagatgtcgacgcaagtagctcgcgacgggtaccccgatccagtcgcgacccacttcgaagatgggacctttccataccgatttggcgatggcttcttacacttcgtgaagactcactgatgctttgtttcgacacgcccatcctccaccttcacgagtctcctatgcccgcatcagtcgaggtcaccagtgcctcgcaaggggcgaatcacagcagagactccgatgcagccagattcaatgccgcaaaataa

SEQ ID NO: 27992 - DNA, 117 bp, Zea mays
  Peptide Sequence Number=SeqID_69771
atggcaaccatttcagtacggatatgggtgccctatttgatagggatactggcagcagagaagacatgtgactgcctgtgcgttgcaacaggaacatatataggtagattaggataa

SEQ ID NO: 27993 - DNA, 219 bp, Zea mays
  Peptide Sequence Number=SeqID_69772
atgacgaacatgaaatcgatgacagtccaaaatacgattggggcgagcaaggagatggacgtcgagctcgcgcgcagagggactcggcaggtcacagcttccatggcagatggagctcggctgggcgttggggatagagggagcagcagggagctcagccggcgagccagcgaaacagagggagcagggcgcgctgccagggagatgggcgccgagtag

SEQ ID NO: 27994 - DNA, 102 bp, Zea mays
  Peptide Sequence Number=SeqID_69773
atggcaacctccctagcagataggctcaggaaccgaacgtctccaccgagcataagtcaacaacaagtacaagccccataccacaagccatatcgtctatag

SEQ ID NO: 27995 - DNA, 309 bp, Zea mays
  Peptide Sequence Number=SeqID_69774
atggaactggttcctttgccgaccgagcttgccctcctcacccgcgccctcttctctctctcccaccctcgctcgtcgacgcccctactcgccgccgggctgcccaccgtcgaggatcgcccgaaggcctcgacgccgcttgtgcccgacctcgcctctcgctcaccgcagtcgctccttgcttgcctcgccgatccttgctgcttcgccgaccaccgccgaccgccttccctgcttggccgaccggccaacaaccccctagctcaccgttcacctatgcgtagtgaaccagaagaggaagaaggttga

SEQ ID NO: 27996 - DNA, 426 bp, Zea mays
  Peptide Sequence Number=SeqID_69775
atggcggcgccgccaccatccatggcgggggatcgctggagttgggcgattcagccacacagtgctcctattctattgtggctcgaggttatacggagaacagggtatgacgaacacactggtatgcatcttaccgcaaatggacgtctgattggtgctaatcgcggtaatgggcggatctggggctcgtcgcgatcgtcggtgagcaattgcggtcgctccaatggccggtctcgcccaatcccgccacgaacacccgacaggagcaatggcgaaactctacctcccaacttcgagtcctcaacggagtcagggccgaggatcgacggcggcggcacacagtccgacactgccctcgccggtgatgatggatttgtgcgtggcgtgagggggatgggggttagcgttcggtgccctattttataa

SEQ ID NO: 27997 - DNA, 216 bp, Zea mays
  Peptide Sequence Number=SeqID_69776
atgaagcacgccttccttcggaggcccttctggacccccacgggtccgagctgcagacaggggaaggcctgggggccggttctaaagaacggatgcccgttctatagggtggtccggagcttgtgtggccggaatgaactgcgctacatcggcgcaccccatctggaggcccggaaggcgaagaggtgcggtggtcgcaagaggagcgaggcatga

SEQ ID NO: 27998 - DNA, 1053 bp, Zea mays
  Peptide Sequence Number=SeqID_69777
atggcggcgccggcttccgcggcggccgggcgcggcggggccatgtcgtcggacaacgccaagggcctggtcctcgcggtgtcgtcgagcgccttcattggcgccagcttcatcgtcaagaagatggggctcaggagggccgccgactccggcgtccgcgcgggatatggcgggttttcttatttagtggagcctctttggtggataggcatgatttctatgattgtaggtgaaattgctaattttgctgcttatgcattcgctcctgctattcttgtcactcctcttggtgcactcagtataatcatcagcgctgcacttgcacatgccattctacaggagaaactgcacacatttggtatacttggttgtgttctctgtgttgttggatctatcacaattgtgctccatgccccacaagagcgtgacattgattctgtaaaggaagtttgggatcttgcaactgaaccagctttcctttgctatgcggctatagtagttgcagcagccttagtgcttatatattttgttgtccctcatcatggacaaacaaacataatggtgtacattggagtatgttctcttctgggatcactcacgacttgggcctttgcactgattgtagctacctgtgtgagcacccagattaactatctaaataaggcattggatacatttaatacagcagtagtctcaccaatatattatgtgatgtttacttcactaacaattatagccagtgtgataatgttcaaggattgggaccatcaaaatccaacacaaattgttacagagatgtgtggcttcatgactatcctatctgggacgtttcttcttcacaagacaaaagatatgactgatagtcctggacaatctttgttgacacgacggccaaagcatgctagtcagaatgcgtttgcaattgaagtgatgccactaaaatgtcaagattatatagatgacgagaccttgacgttatcacttcccaaggttgaaaatggttacctaaaggaagagtatcttcttagatacaaggactcgagtattgtctga

SEQ ID NO: 27999 - DNA, 1470 bp, Zea mays
  Peptide Sequence Number=SeqID_69778
atgacgggggagaagaagatgttctcttcctacgtcaagaacaaagactcccaaaactcaatcatattcggtgacaggaatcaaggcaaggttaaaggtcaattatgtaatatgggttataattgcttattcacaaatgtagatgtgtctgtctttagaagaagtgatggttcattagcttctaagggtatactagacgacaaactttatttagttgattttgcaaaagaggaggccggtctagatgcatgcttaatggctaagactagcatgggctggctgtggcatcgccgcttagctcatctggggatgaagaaccttcacaaacttctaaagggagaacatgtgataggtctaacaaatgtaaccttcgaaaaagatagaccttgtgcagcttgtcaagcaggtaaacaggtggaaagctctcatcatatcaagaacgtgatgactacttcaagacccctggagctgctgcatatggacctcttcggaccagtcgcctacctcagcatcgggggaagtaagtatggtttagtaattgttgatgatttttcccgcttcacttgggtattctttttgcaggataaatctgaaacccaagggatcctcaagcgcttcctaaggagagctcaaaatgagtttgagctcaaggtgaagaagataaggagcgacaacgggtctgagttcaagaaccttcaagtggaggaataccttgaggaggaagaaatcaagcacgagttctccgctccctacacaccacagcaaaatggtgtggtagagaggaagaacaggactcttatagacaaggcgaggacgatgcttggagaattcaagacgcccgagcggttttggtcggaagctgtgaacacggcttgccacgccataaaccgggtctaccttcatcgcctcctcaagaagacatcatacgagcttctaaccgtttttgggagtaaatgctacattctggtgaagaaaggtagaaattctaaatttgctcccaaagctgtagaagggtttttgttaggttatgactcaaatacaaaggcgtatagagtcttcaacaaatcatcgggtttggttgaagtctctagcgacgttgtatttgatgagactaatggctctccaagagagcaagttattgatcttgatgatgtagatgaagaagatgttccaacggccgccatacgcaccatggcgattggcgatgtacgaccacaggaacaaaaggagcaagatcaaccttcttcctcaataatggtgcaacccccaactcaagacgatgaacaagttcatcaagaagaggcgtgtgatcaacggggagcacaaaatgatcatgttatggaggaagaagcacctcaagcccctccaactcaagttcgagcgacgattcaaaggaatcatcccgtcgaccagatattgggtgatattagcaagggagtaactactcgctctcgattagctaatttttga

SEQ ID NO: 28000 - DNA, 2022 bp, Zea mays
  Peptide Sequence Number=SeqID_69779
atggcgcagtacaggcagcagtacggcggtggcttctccgactcccgcggccatcagcaccaggcgctcccggactggcaccggcctcaccacgcctctgccaagccatcctcccggatccgccgccccgggaagcccgcgccgcgccgccgatcgcctgccgctgccgttgccgccgcgctcctcctccttgccgccgtcttcctcctctcgcgccgcatttcacgcagttctgcagaggtcagccaagattcgagcgccggggaggcgttgccagagtggaaccagagcaaaagctggaagaagctcaagttcgggcaaggcggaggtggccggagcgcgcgagactccaggtactgggaccgggacgataggcgccgcgacgaggactacactgaggacgagaaggagaagaactcaggtggaactggggcctccacagatgctggtggcagtggcgataaaggtaccacctctgaggcaggtggcgaggataaaggattgactctagagactggcagtggcgctaaggatgttccagaggcgtctgaaggtgggaaagcagggaccttgtacaatgagggtggcaggaaggagctggcgcagtatgaggctgcagccatgggagccacaggaacaggggtgaaggaggttgatccagacgatgagtatgatgatggcatcgatatgcaggatgatttggaggatgctcatctgcattcatctgatggtgggaggaagcttggtggtggcagccatgagagtgttgaggagaaggacgatgtaactactgagaggcgcacagaagcaggtggagggatcgctgataatcatgatattactagtccagacaaaaagaaggtttcaggtactggagataagaagcatgtgtccaagaagaaaccaaaacgtaagaagtctggttcaacttgtgaaatgaagtttctcaactcaaccgctcagcttgtggagcctgggagaaatgagagattctctagttttaatttgaagtatgtagaagttgaagaaagacctattggatcagaatattgggaaccgagatttgccggccaccaaagtctgcaagaaagagaggagtcatacaaagcccatgaccaacagttgacatgtgcttttgttaagggtccaaatggtacaagcactggttttgatatatctgatgatgatcgaaagtacatgagtaaatgccacattgctgtatcatcctgcatctttggaaattctgatcgactgaggactccatttagcaaaacgaatccaataacatctcttagaaatgtatttcttattacactttcacagattacaagcctctcaaagaagacagtttgctttgctatgtttttggatgaagtcacattgcaaactttagaatctgaaggccagaaaatggacggcatgggtttcattggtatatggaagatcatattgattaagaatatgccgtataatgacatgcgtagagtggggaaaataccaaaatttttggcacacaggctatttccatcatcgaggttctcaatctggttagacagcaaactgagactacaaactgatcctatccttatcctagagtattttctctggcggcatggttatgaatatgctatttccaatcactatgatcgccattgtgtttgggaggaagtagcacaaaataaaaagctgaacaagttcaaccacacaataattgaccagcaatttgagttttatcaagcggatggactgacaaggttcaacccatcggatcccagcaggcttctaccaagctatgtccctgaaggctcttttatcgcaagagagcacacaccgatgtccaacttattttcctgcctgtggtacaatgaagttgatcgattcacacctcgtgaccagctcagctttgcatatacatacttaaaactgagaaggacaaatcctgacagaccattccgtctcaatatgtttaaggtgggcacggttgaccgccgaagtagctacttcgaaaattgcaagcgttag

SEQ ID NO: 28001 - DNA, 210 bp, Zea mays
  Peptide Sequence Number=SeqID_69780
atgcacgccgctctagtgctgtccccctgcccttgccgccgcgctgccggacatgcttcgttcgcttcgccgtcgcgctgtcaatggggctcgatgtatgcggctcgctctgccgagggtggattgccccttggggaggagtgcggtaaagaagaaggtgtcgaggcagatctccaggagttccaggacttcgacgagttcaaggattag

SEQ ID NO: 28002 - DNA, 174 bp, Zea mays
  Peptide Sequence Number=SeqID_69781
atggcgtatggcgagagggagagagtagacgaggggagaaactcacctcggattgcgagggcagaacacggacgtggcgaggcttcggggactgctccagtgaggcgagggcgcgactttgcgagcggcgaacacgcggcagttgcgtggagagatcgtgaccaactagcataa

SEQ ID NO: 28003 - DNA, 563 bp, Zea mays
  Peptide Sequence Number=SeqID_69782
atggagccacgtgttcgatcacggctgacacgcccagttcacgccagttcgcacacccgcgcccagccgtgcacgcccgtgcgcgcccacgccggtccacgctcgctcgtgcaccgcgctgcgtctataagaacaggcaagcctcggccgtactccctccgcgcctcacttaacgtctcaagcccagcgctttgctctggcgagctctgcgccgcccgccaagcaactcaagcgctcggccaccatggccagacccctccaagccatccccactcaatcccgtgccttggtcagcttcccccagagccccgtagagctcctcgaagcaagaaatcgggcgctatttcaccggagaagatgttccaccctcgctggagttgtaatccccgccggcacacgtggccacggcaaaccggctggattcctcgccgccgacgagttcgcccgcttgcgcacgtggaccgacctactccgaccatcgccagagacgatccgcacatcggcatgaccgtcaagacctcccctagaccctcgaccacatcaccggagcagtctcgccgccg

SEQ ID NO: 28004 - DNA, 666 bp, Zea mays
  Peptide Sequence Number=SeqID_69783
atgacagccacgtaccgcgttcgtccaccacgcgctgacaactggaccagccggttagcgttgcgcccctcccttgcctaccctcgctgcgccgcagacccactcgtcagcggagccctgttgatcttctcagacgcgcttactgctggtgcggcagacgcagaccccgcgctgatctcgcgatggttacaaccacccatgagttggccccgccttgcgcccgacggctacggatggaaccacttcttcctcgattcgtggagaccaggatatttagacccgttcggcgttcttgatgctctgttttctctgcgccgccgccatggtttggcgaggattgctcgccgaactcagtgtccgccgccggaccgcttcgctccgtggtcgtgctccaccgcctacgtcaagccctcggtggtcgatccgggaggaagcacagcgcacatgtatgctctctgcggcctcgtctgggcggaatcgagctccggcccaccaagattcctcgccggtgtgggagcttcaccgcatcgccgccatgtgctgtgggtagccttcctggcgtcgttccagcacccggatcattatgttaatgggaacatggagaaccacccgggaaaacagtgctaccataagggtagtatgggaggcccttggctaactaattag

SEQ ID NO: 28005 - DNA, 420 bp, Zea mays
  Peptide Sequence Number=SeqID_69784
atggacggctgtggagtcgtcttctccctaccgatgaccgagtgcaatggcgcaaccccgccaccacaacaaacgccagtgaactccccgagcagccacgcgagagccccaaagacgcgggcgtggtttgctgggtcagccgaggccgggaatttaggttcggctgttgaagctctccactatgcacgcgaggtggtggaaggtggccctgcacggtgggctccacgcgtaagtgtcagagtgccagcacatcgagcaggagtcactggatgttgggtcccgcccgtcagtgagtctgcggaagtgagggcgtgcggggttcaactatccgcgccggtcccacccgtcagtcccatcaacgagccaggctgcacggtgatcgtgggtttgggccgaattgcgtacagcgagcccagttag

SEQ ID NO: 28006 - DNA, 312 bp, Zea mays
  Peptide Sequence Number=SeqID_69785
atggagaatgggggctcgattgagaggagcagggggcgctggagcatcgggcttcatcctcagagcagggaagggcgctgcttgggcgctcggatggggggagagaagagctcctgctcctgtggcaagggacacagggaggaagaaggccagcgtcgagctctggtgtgctgcatcgagggggcgagtggagggagacgcagggagaaaagacggccggttggggaagctcggctgctcgagctcggaccagagagagggcgtggaagcatcggcaggaggaggaagaagacagggggtgcggtcggctga

SEQ ID NO: 28007 - DNA, 240 bp, Zea mays
  Peptide Sequence Number=SeqID_69786
atggataagacaaatacgaagaagattagcaatgagatgctggctgggttatctgaagattctgacgatagtgaaagttttgacttagaaagtggaaacgaagactactgttatccctcgcaaaagcagggaaagaagagaaaagatgctacttcggccttctctgagtaccccgctcctgctggggctaagggagaatcagatgaagtgtcaaaagcaatggtaatagcggaacattag

SEQ ID NO: 28008 - DNA, 330 bp, Zea mays
  Peptide Sequence Number=SeqID_69787
atggcgcaccggacagtgtccggtgctctaggaccatacagacttgaaccagccactctcggaaaaatggaggcgcgctccgctataattcatcggattgtccggtgtgccatcggactgtctggtgagccagcggagcaacggctctctgcgctaacgatcgactctgcaaaagcaacggtgcgccaacagtgccgcgacagagttagaagagccgaagtcagagggcaccggactgtctggtgcagcaagacgacaaacggctccaacggtcaactgctcagaaccctaacggacacgctgacgtggcgcgcaccggacagtgcatag

SEQ ID NO: 28009 - DNA, 333 bp, Zea mays
  Peptide Sequence Number=SeqID_69788
atggggtgcacccgtgttgccttcttcttactgctgttggagggaagcgtgatcccatgggggttggcgctctccagtaatcgctcaagctttcaagggattttcatcatgcagcccggctacagtccctcaccaatggtcatccgcagggatgatcaccagcctagtgatggggagaagcaagctgggctgcggcctctaccccgccctcagcttcaaggatgttcatcatccgggctaaggaggagggcgctccgagtggggtcctgcctcccgcgtgggctggtgacccgcttcttcctccagcattcgggggagaagggcatcctctag

SEQ ID NO: 28010 - DNA, 312 bp, Zea mays
  Peptide Sequence Number=SeqID_69789
atggacgaattgagcgcacagggaggttgcttaccacaagcgcgaaccgaagagcgcctagaggacggcggggaggcggtgaattcccgggtcgacggtgacagactctggctgcatgtgaaacactccggtgagcgcaaaccgggcaacccagaggggctgggggtgaaccgaggggtatcccgagttgcaggtgatgcggcggagcttaccgaggcaatagacgcgacggggattcaacggcggtcgtgtaatggtggcgatctttgggttttcaattcaaattcaaatcaagtttcaaattcaaactaa

SEQ ID NO: 28011 - DNA, 531 bp, Zea mays
  Peptide Sequence Number=SeqID_69790
atgaccgagggcgatcaagggaaaaatagggggcgggtctgggttgcttacctcgagaggaaacaccggagtcctagagcaacggcggaggcgcagggacgcctcagggcgatggtggcggagctccggctgcacatgaagaactctgatgagggtggaccgggcggaccagaggggatgggggcgaaccgaggggtgttccaggtggcgggtgatagggcggagcttaccggggcaacagacgtggcggggagtcccacggcgatcgtagaacaaacggtggacgtcggtgagcggcagcagaactgcctgggtgcgcatgcagggcgagtgagagggcgagagtgctcggctgagggcgcaaatgagcagggggaagtgggcgagcggggcgcgggctctaaacaggcgagggcgtgtggaggtggccgaggattgcgcggacgtgggcacgtccacggcgggggcatgggcgggaggttagggacgaggactgacgggtggggtccacgggacacagagagaggatga

SEQ ID NO: 28012 - DNA, 171 bp, Zea mays
  Peptide Sequence Number=SeqID_69791
atggctgaagctttcttcggcggcatgacgaaggtgatgcttgccgaaggtgttcaaaactcaagaaatggacgtgagttcaccggagaaacaaattataaatgtaccttcggattgatgaaaagtaaaggtacaggcgtgatgcaaaaagcgaatgtcaagtcagcgtga

SEQ ID NO: 28013 - DNA, 327 bp, Zea mays
  Peptide Sequence Number=SeqID_69792
atgtcctctttcttcggaaaccgggggaagcttcggcttaatagagtcatgaatgccattggttttgagtacccaagttatgaagatccctctattgacaatgaaactacagagaaaaggaaaatggttgctaagggtgctgggaaaacttcaaagaaaattattgaagctgacacagagaatgatgagtcaaagggcgacgaagaaccatctttggaccccgaaaagaagaaagcgaagacttcaagaaaatctgtcacaaggcaagaccaagggaaagggagtgctacaaccacctcttctttgggttgtacacggattcttgag

SEQ ID NO: 28014 - DNA, 282 bp, Zea mays
  Peptide Sequence Number=SeqID_69793
atggagtgccaggtcgccactaccgagaagaattggtgccgctgtttgggcaaaccctctgcgcaggcgtttgaagaaattgaagcagccgcgaagcagctcctgggatcatcgcacatcggccagcagtacataccggtttatgtagtgtctgatctgatcttggcggtcagatatagatctatcggccagaaaacccttcgtgcccctttggccgcgctaagtgcaaataagcccctcggttttcttcgaaagaacccaccgtcccacggatacttttga

SEQ ID NO: 28015 - DNA, 298 bp, Zea mays
  Peptide Sequence Number=SeqID_69794
atggcgcatgtgggcccagagtggtcacatggaatggcatatgacgacagtagatacacagacgtggctaagaggggagatgtcaaagtaaaagttgttcttcgctggagggttttcagtgtcggggacaacctcttcctctactacggcgtgggaaagtgggtcggcgtgcaaggtgtccacggcggtgttcccgacgacgatgcagtgttctcggagctctgcggtggtagtgttcaatcggccggcacggtgagcaaccagagactaaaggcatgccaaaacaaggattatacgg

SEQ ID NO: 28016 - DNA, 1101 bp, Zea mays
  Peptide Sequence Number=SeqID_69795
atggataacgatgatatcaagtatgatgaggaatatgtattgaatgcacgaggaatgaatctcttcacatgccaatggagacctttgaactctgaaccaaaagctctgatctttctatgccatggatatgccatggaatgcagtatttcaatgagaggtacaaggttggcgcaggctggatttgtagtgcatggaatggactatgaaggccatggaaaatcttctggacttcaaggatatattaatagtttcgatgacattgtggttgattgctctaagtactttgcaagtgtctgtgagaaagaagagtataagaaacaaaagagatttttacttggagaatccatgggcggggcaattgtgcttatgcttcatagaaaggaacctaccttttgggatggggccattttggttgctccgatgtgcaagatattagatgatatgaagcctcaccctattatgatgtcaattttaagtaagcttagcaatgtgatccctacatggagaatcattcctaatgaagatatcatagatagagcaattaaatgtgaggagcgacgtgaagaggtaagaaataatcattattgctataaaggaaagcctagggtaaagactggccatgaaatttttatggcaagcttggatattgaaagtaatcttgacaaggttactctaccattcatcatagtccacggtggtgatgatgctgtaactgaccccacaggtatcatcaatttcctatcttggatccaacagcggtttacagttacaagaacaatgttgatagctcacaaaaatcaatgggtgtgtgtacgagaagatgacatccatctgtcgataggtggaacaatcaatggtgtcgacatatgtaagattctctactggcacatgacactagcaagaaatagcagaactcaacagtttcatcacctacaacaacatgggtctgaaaaccctaagtacggagtgtactttggcaagtcttacacgttaaaggaaaaagaatctcaaggatatgttggcttttgggaatcaagggcagtgaccaagtcttcatgtccgagaagtaacaacgaaccaaatcgattaatacccagctag

SEQ ID NO: 28017 - DNA, 198 bp, Zea mays
  Peptide Sequence Number=SeqID_69796
atggagctcatgcattcaccggttacgggcaagaccttgagagtgccacggtcacaatactacagtgaatcaagtagctacgtggcgtttacagagaacgacggcgagctccacgacgacatctactcaggcaagtggggttttgagtattctagggttcaagtggcacttatgctctctaagtttaacctttcttga

SEQ ID NO: 28018 - DNA, 246 bp, Zea mays
  Peptide Sequence Number=SeqID_69797
atgcagcggaaattaactaacggtaaagaaagggaggatgggaaagcctggcccatcactcctcatgctgagcagcatggatcaagcagtctcattagctgcgagaagcagacgattcgaatcgagtttttaaccttgcaagtgaccgcacttgtacccaccataaccggaatgggagactacgtctcaggtcgtgtgaggagggcaatctgcgggcaggttcactcagtacgttcaaacgcttga

SEQ ID NO: 28019 - DNA, 435 bp, Zea mays
  Peptide Sequence Number=SeqID_69798
atggaaccaaaagccggaagcaccgatcgtctcatggcgtgcttgccgccatggaggttgagccaacacttgagcggttgtctggaggcgacgcacgtggcggtaacagatccggcccatgtcaaggtgagcccctcaacccctgatccgacacgaagcgttgagcgtctcatgggcgtgctcgctgccatggaggtcgagctagcacttgagtggctgtctagaggtgatgcgtgcgacgggaacagatccggcaccgaggacgcccgcgccgatgaggtgctggttcttgaccgtgaaggtgatcgtcatggcggggtaggtgcagtgcaagcggaacgattggttctaaggcgggttggtgggggcagaagtggaactccacctcacaggtgtgtgccacccactccgcgccgacatcgatgtctacattga

SEQ ID NO: 28020 - DNA, 123 bp, Zea mays
  Peptide Sequence Number=SeqID_69799
atggctggcgctgctctgcagctcggcaccggcctccctgtgatgctcggacgagctcctctgtccatggcgcccaaagagctcctctctattgctccaaatagattgaaatttttacagtag

SEQ ID NO: 28021 - DNA, 561 bp, Zea mays
  Peptide Sequence Number=SeqID_69800
atggaacagcaagattcttcgtccctgccacagcaggagatggagtctacgaggcgtctctctcctgtacccctgctggagatgccccctgctacaccccagggcgtcccggctgtaggaggagctgatggaggagatcctgatgacaacaacgatgtcggtggtagttcgagccacaacaccgcgctcgctgaggagcaggagctgggggatggatcgctcggcccatcactcgtgacacccctcgtggatgtcactttcacgacgcacttgacaccttgttgtgtcgggctatcgaccgacacacttggtcaatcaagtgaaggcaatcctaggttaaacaacgcagccaacctagtcgttgtgctcaacacagagctggaccactctcttaacgagttgagtagggctcgtgctgagatcacagagttgcgagcgcagcgcgtggagcaccgtcatcgggagtatggttctcctgccccgctaggactcagcacctgtaccgctcaccgccatgagggtaccatgcttatggcacgcctgactatagaaccaagctag

SEQ ID NO: 28022 - DNA, 137 bp, Zea mays
  Peptide Sequence Number=SeqID_69801
acaacgagcagtccgaggttcctgagtgtgttgttggagacctccctgagcaacaacctggtgaaggcaaggggctcaggctgtttcctgagcgcctctccataaggacctatttggggagtgacaacccgagataa

SEQ ID NO: 28023 - DNA, 1190 bp, Zea mays
  Peptide Sequence Number=SeqID_69802
ccatctccaacccctcccctcccaacaccattctcaaccatagccaaggcctctcgctgacttccactccggactcagcgaccacctcatcaacctatcggcgtttctctcaaggcgacgaatctttcagctaccaggctcgacaaggtggatgttcaaagacccaacgctggagtgacgtctcctcgtctggtggttcgtctcgtgagctttgctcctttaaagatgccctcgtatctggctccaggcgcctccctaccccaatccaggctccttctcatgccacgacaagctcaagagccccagaggctgtgaaggaaagggagaaggagaaggttggtgaatccttggtggtgcagaatcagtcggtgggatcacaacgggacgagtttggctggcaggtggttgagcgaaggaagaagacccaacgtgagctcttgccctacaagacctatggcgcgtacgaagcagtttggcggattgaagcacgaaacgaagctgctccacctctacctctggcgcccttccgggaatcggaggatgatcaggatcacaatgagcaggatccacatcttcgtcgtcgtggtaatgctggcgcggctggggattcacggcgacctctccaattccgtctgggaccacgactccccttgggtcgtgcgcatgacatgcataggtctcgggaggaggaccccctgccgcttcgcgttctgggaattgattgtaataacgacacgactgggaggcacgaggcgctgcagcttcgtgtccctggaaaaggtggagatgacgagacgactagggggcatgagatgtttgaagtgctaacgcttcgggctgcgagaaaagctagacacgaggagatggttgggagccaagagatgcaatcaacaagttgcatgggaaatgaggaagatatggcggcggatgagcgggagatccctatccccgaagctgtcggccaaagggcggtggaaaacttaaacagattctcctcttttcgctctagtgggccgctgggctggattgctccatggacgccccagctagatgtatctgctgggttgttgaattcccttggatccagcttgccccaccaggcttctagagacatgaattatccccctgtcgagtcgctgggctctatttggccaccattgccccagcaaatttctttatttgggttgtag

SEQ ID NO: 28024 - DNA, 207 bp, Zea mays
  Peptide Sequence Number=SeqID_69803
atggacggtggcggaggttctcggttcgtgtgggcagagcgagagatagggcgagagagctggacagagggcgcaaatggaagagaggaggtgggcgagcagggcacggggttcaaaaggggcgcgggggcgcggacgtggccggagaacgcgcggtcgagattgtgggcgagagggttttcaattcaaattcaaatcaagtattaa

SEQ ID NO: 28025 - DNA, 261 bp, Zea mays
  Peptide Sequence Number=SeqID_69804
atggagtgggtatttctcagcaggaaaatacttgaagatatatcggtggaatatttggacaatatttctggacagaacttgaagggggttactcgagaaatatctgggcggtatttctggaaagaaattgaggaaccttactggaatactaccccacttaaaaagaatgagggtggaactcttgaatcttggggatttgaactccttgaagtacctcataacaagggtgttacggggcctcctgctgctgttgttgcttga

SEQ ID NO: 28026 - DNA, 462 bp, Zea mays
  Peptide Sequence Number=SeqID_69805
atggaagacattgtggatgcaggcgccttctggaaagtgtcgaagataagcgatggcgccaatgcgctcggtgacctagaacgaatcggtgaaccaagggcacgcgtctgcgccggtcagggtggtgacacccgcggcagaacagaagggccaaagagacggcgaaccgaccaaaggggcgacagatctagtcgggaaagctgtagcaacgtggatccgaccgggaaggccacggcagcaatggaaccaacgatggtggtgatgaagggggagggcgacggggcgggtatagccgggcaggggcctacgccgggcctggcagggtggtgtgacgccggcgacgggagaagcgcagcgaaggaaaggggcggggcgctgctagacgccagagcgggcagggatggggtggtcaacggggatgcgccgccgctggacatgagccagggctgtggcgacggctag

SEQ ID NO: 28027 - DNA, 1332 bp, Zea mays
  Peptide Sequence Number=SeqID_69806
atgttcgtctccttcaccggcctaaccgggccctgcgcgcacagctccgccctccgcagtagggtctggcatgttctggtccagtgggaacatctgcttactggagagcctctcaacaaccttcgtgcacgttttccttcctttcagctcgcagacgagttgttcatcgagggagggagagatgttatgcttgaagacggagacattatctgtttccaaaaggctcctgttccagatggtgatgcacaagtgcgctatccagatgttccttcattcttggagtatgttcacaataggcaggttgtgcactttcggtgtctggacaaaccaaaggatgatgatttttctttggaattgtcgaagcttcatacatatgatgatgttgttgagagagttgcacatcaacttgggttggatgatccatcaaagatacggcttacgtctcacaattgttattctcagcaacctaaaccacagcctattagatataggggggtagcacatctactggatatgcttgttcattataatcagacttctgatatcttgtattatgaggttctggacattccactgccagatttgcagcgtttgaaaacgcttaaagttgcattccaccatgcaacaaaagacgaggttgtcgttcatagcataagacttccaagaaatagcaccatcagtgatgtgattactgatttgaaaaccaaggttgaactatctaatcctgacgctgagctccgcttgcttgaagtattttaccacaagatttataagatctttccacctcatgagaagatagagaacataaatgatcagtactggacattacgagctgaggagatcccagaggaagagaagaatcttggcccacatgatcgattgattcatgtttaccatttcatgaaagaccctaaccagaatcaacaaattcaaaattttggagatccttttttgatggttattcgggaaggtgagactgctgcagaggtaatggagcgcatccagagaaaacttagagttcctgatgatgagttctccaagcggagagatgtatatggtgcttgggaacaataccttggcttggagcacactgatacaacatcgaaacggtcttacacatccaatcagaatcggcacacctatgagaagcccctgtgggaacaatggcagagattgtataatgggtttggtataattcttcgtgctgttgagaaacgtacgaggataacccgatcagatagtagagttttgagacctgtcaaacagaaccttttgaaactaacctacccgttataccagaagggccgtttgcaagtcttctattatacatag

SEQ ID NO: 28028 - DNA, 1056 bp, Zea mays
  Peptide Sequence Number=SeqID_69807
atggacgcggtggatggcgaccgggtggtacacgggaggctcggtgcgggccgacgggtcgtcgggagccgagggagtggcacgctcgcggcagtggtagacgagggcggggtcggcgaaatgagtcgcgctcgtcaacggtgctggttcggcgggggccgagggagtggcttgcctgcggcggtggtagacgagggcggggtcggcgaagcgggccactcttgtcaatggggccgcacatggcatgggaggggtcgcttagggccgcgcgtggcgcgggaagagacgcaagcggaggcgtcgaggccgcgcgtggcgcaggtagaggcacgagcggaggcgtcagagccacgcgtggtgcgggtaacggcgcagggcggggcatctgggcctagggaaaagcgagctgttcttgttcatagtggaggagtacatggtggccactactatgctttcattcggccgacactctcggatcagtggtacaaatttgatgatgagcgggttacaaaagaagacactaaaaaggcacttgaagagcagtatgggggtgaggaagagttgcctcaaataaaccctggtttcaataacacgccatttaaattcacaaagtattcgaatgcctacatgcttgtctatatacgtgagagtgacaaagagaaaataatgtgtaatgtcgatgagaaggacatcgctgagcatttgcggatcgctcgagacgaggacttaaaggagcaaatcggtaagaatatatattttgatctggtggaccatgaaaaagttcacagtttccgcattcagaagcagttgccttttacttcattcaaggaggaagttgcaaaggaatttggcatccctgtacagtttcagcgcttctggttgtgggctaagaggcagaaccatacataccggcccaatcgtccattgacaccccatgaggaagcacaatcaaatactagtattattgtagtagacaattgcctaaggaggcccatggaggggctgcggcagcagcaaccatgggcccgccaaggacgattagataaggatagttag

SEQ ID NO: 28029 - DNA, 666 bp, Zea mays
  Peptide Sequence Number=SeqID_69808
atgcaggcgatgcgtccggccgcggagggggaggcacaggagcaggcggtgagggcggaggcggacgaggtgaagagggaggtggcgaaggcgcacgaggaggaggaggcggtgcctgaggagaaagacgtggcggttgtaggggaagaggcggaggcggaggcggagacggagactgaaggcgaggcggaggcagaggtcgaggtcgaggccgaggtcgaggtggaggcggaggccggtgcatcgtctgcgaagaagaaccgtatccaggtgtccaccaacaagaagccgctctatttctacgtcaatctcgccaagaggtacatgcagaactacgacgaggttgagctctccgctctggggatggccattggtaccgtggtgaccgtcgctgagatcctcaagaacaatggcctcgccactgaaaagaagatcctcacatcaaccatcggcaccaaggatgaggcgaagggccggcttgtccgtaaagccaagatcgagatcctgctgtgcaaatcagagaacttcaacagcatcatgtcgagcaagaagtccgagcgcccgaagccgcccgccgaggaagagatcaagaggctggcagctcaccacacagctcagctcggattattgataatggggcatcgcggcagtctgattaagtactag

SEQ ID NO: 28030 - DNA, 279 bp, Zea mays
  Peptide Sequence Number=SeqID_69809
atgggctacaagctattgttggtgcctggtatcagagaatacagaaactctctttctctttatgtatataacatgaccaatttagagttctttgaagatgctgctagagctagagcgcccacacttatgttcataggggtgttgcagagaactattgagctagagcagctcctttcactaaggtcgtcaatggagacacataaaccatcaatagtggggtatgatgaggataacaatgtgatttttcctttggacaagcgtcgtcatgatccaacttga

SEQ ID NO: 28031 - DNA, 351 bp, Zea mays
  Peptide Sequence Number=SeqID_69810
atggccgaccagctccaagccctagcgacagggccgttcaagaataaaattggttttcttaccaggcctctcacaccgtttcctgatgatgaaggagctcagggagatacttttgatgctcagcctgaagcgcatcccgctcagcaaatgccaccacctccacctccaccacaacaaggacagtactggcaacctgcatctagatattttgatccttattttcaacaaatgcatcaagggctccagactcatatagatggtcagtttcagggcatgatgtcacatgtcgatgaccggtttgatcacatgcaatccacatttgatggtccattctctgatttgcatgattga

SEQ ID NO: 28032 - DNA, 996 bp, Zea mays
  Peptide Sequence Number=SeqID_69811
atgagggtgctcgggtgcgcgccaaggtttacgcgccgagctggatctgactcctcagcccgcgctcttccctcctcgcagcagcagcagggggacgagatgctggtgccgcaccaggagctccctgtcgctggcccagaacctgccccacagccgatggaaggtgaggacttgagccttctctcgccctctgtgcttgtgttgacagaacccgccaacacagcggagacccagccacccgaggacccgcagacgtcgcgcttcacctggacaattgaaagcttcagtcgtcttaacactaagaagcactactctgatgcgttcgtcgttggaggatacaaatggcgtgtgctaattttccccaaggggaacaatgtggatcacttatcgttgtatttggatgttgcggattctgggagcctcccatatgggtggagccggatgtatgtagatcatcaatcacatacagagttgattattgttatagtgccatttgttatagtgcatgatacccagcaccaatttaatgcacgcgagagcgactggggtttcacatcgtttatgcctttgagtgacctatatgacccaaacaggggttatcttgtgaatgacactgttgttatcgaagctgaggttgctgtccgcagaatggttgattattggacttatgactcgaaaaaagaaacaggttttgtaggtcttaagaatcaaggtgctacctgttatatgaactctctccttcaaacgttataccacacaccatattttagaaaggctgtatatcatatgccaacaactgagaatgacatgccatctgggagtattcctttagccctgcagagccttttttacaagctccagtatagcgacaacagtgtagcgacgaaagagttgaccaaatcctttggatgggatacttatgattctttcatgcagcatgacgtgcaagaactcaacagagttctttgtgagaaactggaagataagatgttttaa

SEQ ID NO: 28033 - DNA, 297 bp, Zea mays
  Peptide Sequence Number=SeqID_69812
atgccgctcctgccgtcgctcaagctggacctgttccaccgcgtggcggccgcgggaacgggcacgggcgccgccgtcgtacgcttcccttttggcagcatccccgttacgcacctgtactattttttcgggcagaccgcagccaccgcggaagcagggagtgtggactcaagtgatgctgaaaaccctgggcttgatgatgtagatgttgctaacatgcacatggaggcaactgattcccagctgattgatgcactctatttctcgctgactgtggaccgaagagaatgcatataa

SEQ ID NO: 28034 - DNA, 636 bp, Zea mays
  Peptide Sequence Number=SeqID_69813
atgtgggagtacaccggggataacgactccaaccgccattcggccaaaaacctgatgagggaggagcttacatcacacgtccttgctatcacggtgggggttaggtcggatttcctggacgagagtggcccactaccgttcaaccaagcgcggttgaaagacctggggctttgcagcatcaaggtttcccgtccccctcttctggaagatgtcgctattaagtcggagaagaaatggaagagggaggtggagcaatctaccatggcggtgtgcaagaaacgccacctcgagatgaagcggacacgtcttacgcgagctgggctagggtggagcatcacctcgtccacggacatggaggacatgacctctactgaggtcaaagccagctctaatgcccagcccgagagagtgtgggacgctgtggaggtcgtcctgcctgttgcacgtggggagcatcctagggaaaggctggggaccgccagctcttcctcctcccctgtcgcgataaccgagcgcggaatcgctggcgaggcaggcgcactgccttcgatggtcacaataatggtggagtgccatgaggaggccaggacggtgattgtgcctactcctaccgcatcactagtggcgacgtcctag

SEQ ID NO: 28035 - DNA, 183 bp, Zea mays
  Peptide Sequence Number=SeqID_69814
atggccaacgacgttgctaatactaacccggcctctttggacaccgtcgggcctaatggcgatgaaggtacgctccatctggaatcacagcagaggactattgtgagcttgagaaaaagcgcgaacagattctttgcatgggagcccactctcaatcagtttgagttggacaaccctggctga

SEQ ID NO: 28036 - DNA, 2451 bp, Zea mays
  Peptide Sequence Number=SeqID_69815
atggacgacggcggaatccaggaggagccgccgtcgacgcggttcctgacgccgacgcgctcggggggcacacgctgggtggacggcagcgaggtcgactcgtccgagtccacgccgtcgtggtcgctcgaggacgaacgctcggcggggggcgtctcctccaacgggggcgccgcggcggcgtctcgggtgtcctccggcgcattccggcggcggttcgggaagcggccccgccgcgtcgactcgctcgacgtcgagtccatgaacgtgcgcggcgcgcatggccacagctccaagattctaatattctattcaagaatcatgaacccaatggctaaaaactctgagacacactttgcgcaggaaatatcgatgttgagcaccctcgcaatggccttccaaacccttggtgtggtgtacggcgacatggggacaagccctctctatgtcttcagtgacgtgtttagtaaagtccccataaagtcagaggtcgagatacttggagcactttcgctggtcatgtacactatcgcattaatcccattcgctaaatacgtcttcatagtcctcaaagctaatgacaatggcgaagggggcacttttgcgctgtattcattgatttgcagatacgcaaaagttagcctgcttccgaatcagcagcgtgtggatgaagatatttctagttttaggcttaagttgcctactcctgaacttgagcgtgctatctctgtcaaagactgcctagaaaagaagccactcttcaagaacattctcctgtttttagttctgatgggtacctccatggtgattggcgatggcattctcactccgtcaatgtcagatgctgttgtaattgtctccattgttgttcttctgctattgttcagtgtgcagaggtttggaacaggcaaagttggattcatgtttgcccctattttggcattatggtttattaatttgggatccatcggaatatataatcttgttaagtatgacatttctgttgtgagagcattcaatccagtgtatatatatttgtttttcgagacaaacggcattaaggcgtggtcagctcttggtggttgtgtcttgtgcatcacaggagctgaagcaatgtttgctgatttgggccatttctctgtcaaatcaatacaggtagcatttaccgccgtcgtattcccctgcctgctaattgcttacatggggcaagctgcttttttgatgaaaaacccacttgttgtagaaagaatattctatgattctgtaccaggggttttattttggccagtatttgtgattgctacacttgcagctatgattgccagccaagctatgatatctgcaacattctcttgcataaagcaggccatggctcttggctgcttccctaggattaagataatccatacttccaagaaagtgatgggccagatttacatacctgtgatgaattggtttctaatggtcatgtgcatcatcatcgtggcaacttttaggagtaccaatgatattgccaatgcatacggcattgctgaagttggcgtcatgatggttagcaccgcactggtgactttggtgatgcttcttatatggcaaaccaacttgttccttgtgctatgcttccctattctttttggtgcagtagagtttgtttacttaactgccgttctgtcaaagatacaagaaggggggtggttgccgctggctttctcatcactgtttctctgcataatgtacacgtggaactacggaagtgtactgaagtaccagagcgagatgcgcggcaagatatccctggacttcattcttgatctgggagccacacttggcacctatgttcctgtcccttatgtccctcttgaagaaaggttcttgttccgaagggttgggcagaaggactaccacatgttccgcagtgttgcacgctatggttacaaggacgttaggaaagaagaccatggcttctttgagcaacttctggttgagagcctggaaaaatttctcaggagggaagcccaggaaattgcgctggaggcgagcacaatggaggcagagcgtgatgacatatctgttgtatccgaggtgcctcagactcctgcaggtgacggggacctgcaaactccactgctttctgaccagagatcaggcgataacaacaggatggccgccacagatggaagcgaccctgtgctcccctccagctccatgtctttagaagaagatcctggcttagagtacgagctgtctgctctgagagaagccatggcctctgggtttacgtatctcctagcacacggagatgtgagggcgaggaaggaatcagtcttcacgaagaagttcgtcatcaactatttctatgcgttcctcaggaggaactgcagggccggcactgcaaccctgaaggtcccccattcgaacatcatgcgtgttggtatgacgtacatggtctga

SEQ ID NO: 28037 - DNA, 654 bp, Zea mays
  Peptide Sequence Number=SeqID_69816
atggttaaggtcactgagggaggcgaggaagacacgctccttcacctttgccttctagaggtacttcttcttaagcacctccttgtcaaacctcccgttggacatgtgcttgctagaggcttactcgtgcttgcccttgccccaaccagattggtgggcacgtgggccagccttcggcttacccttcttggggcaaaaagtgatgaagtggtcagggtcgctacagttgtagcatccatccttggactcacgacgtcacctgttcttccagttgttgtgaaaccacgtgaactagctggccacaagtgccatctcctcatcccaaggctctccacctgctcctctgtgatggtcaacaaagaagacaaagcaaacatagcaggcgcgcatctagttcctgatcgactggaaccgagaaaacatagtgtcaatggtctctctagtcaactaaacaaagttctcgtactctcactggtaaatctgaaagagtctggtctttacatgatcattgccctcatggaatttcttatgggtggaccagatctcatacgcaaaaatgtgaatcttctagtatgggtagtttgtcccatcgaagaatggaggtttgccaacacctcattccatgtcaccttctacgaatcaagaaccgattag

SEQ ID NO: 28038 - DNA, 111 bp, Zea mays
  Peptide Sequence Number=SeqID_69817
atgggaattaaggggtatccccaacccagagcacccaagattaacagaaaacaggggctctgttcacgagaaatcctggtcattggattgagattgtgtgatgcagggtga

SEQ ID NO: 28039 - DNA, 2308 bp, Zea mays
  Peptide Sequence Number=SeqID_69818
atggcctatgggatgatgaagacaggatgtgttgcacttgtattatgtttaaacataagtgtggatccacctgatgtaattaaaatttccccttgtgcaagaatggagtgctggatagatcctttttctatggcacctcctaaagcccttgagagtattggaaaaacgttgcattcacagtatgagcgctggcaacctaaggctcgatacaagcttcagctggacccaacagtggaggaagttaagaagctttgcaatacttgccgcaaatatgccagatcagagagagttcttttccattataatggccatggcgtaccaaagcctacatctaatggtgagatttgggtgtttaacaagagttacacacagtatattccacttccaattactgatcttgattcatggctgaagacaccttcaatttacgtttttgattgctcagcgtctggaattattgtgaaagcttttctagagatgaaggtcatcatgatttatgggcttgtttttgtttttgttcctggattgtctaatattcataacgacttttgtttacttcagcgcctagattggagttctagctcctctgcatcttcacggaaggactgcattcttcttgctgcctgtgaggcacatcaaactcttcctcagagtgcagaatttcctgccgatgtgtttacagcttgcctcacaacacccatcaaaatggctttgcactggttttgtaagcgatcattactccgtggttctctggatctttctcttattgaccaaattcctggaaggcaaaatgaccgtaaaactcttcttggggagctcaattggatttttactgctataacagatacaattgcatggaatgttcttcctcatggtatggcgtctgcgatggatgcatgggacatggctgctgagatttgcctttccaagcttcctcagttaattgctgatccaaatgcagagtttcagccaagtccgttttttacggaacaactgacggctttcgaagtgtggcttgatcatggctccgaggacaagaaacctcctgaacagttacccatagttcttcaggtcctgcttagtcaatcacacagatttagagcacttgttctgctcggaagatttcttgacatggggccgtgggcagttgatttggccctgtctgtcggaatatttccttatgtactcaaactgcttcaaacaagtgcaatggagttgcgtcaaattcttgtgtttatatggacaaaaattctctctcttgataagtcgtgccaggttgatttggttaaagatggaggacacacatattttgttaggtttcttgacagtttggatgcttacccagaacagcgtgcaatggctgcttttgttttagcagtcattgtggatgggcataggacaggccaagaggcttgtatgaatgcagggcttatagatgtttgcttgagacacctgcaacctgagaatcctcatgattcacagacagaacctttacttctacagtggctttgtttatgccttgggaaactctgggaagatttccctgatgttcagctgcttactttacaaacaaatacgccagaaattgtactatgcttattgtcggagcctcaacctgaggtcagagctgctgctgtttttgcacttgggactctcctggatactacatcatcaaatggcgctgatgatgattctgactatgatgaaaaggtgaaagctgaaataaatgtagttcgaagccttctgcagatatcttcagatgccagtccccttgttcgatctgaggttgctatagcgcttactcgctttgcattgggtcataacaaacatctcaaatctgttgcggctgagtattggaaacctcaatccaattcattgctgaagtcactgccatcattggcaaatataaataacccaaacaatgtttacagtcccaacaatattctacaaggcagcattggtcctgtgctgagggttggcagtgatagcagtgctgctggtcgtgatggaagaatgtctacaagtagcccaattgcaacaagtagcatcatgcatggctctccccagtcagacgattcttcccaactctctgattctggcttattactgagagagaatgctagtaatggtggtcccggctacactaggtccaggcctgttgataatgtcatttattctcaatttatatcaactatgtgttcttttgctaaagatccttacccaagaattgcaactattggtcggagagcactgtcccttataggtgttgaacaagtagtcatgaaaaatactagatttaatagtggag

SEQ ID NO: 28040 - DNA, 666 bp, Zea mays
  Peptide Sequence Number=SeqID_69819
atgaccaccacgactactataggcacctcccaagactgtatcagaaactctcatagatgcatcctccaagccatacacatcgtcataagtacgaccacgaccaccaccactgatgttgcaatgttgagcaacatggctaacaaaatgagcaacaccatggccaccaccttggatgttgagctcgtgaacaccacgactaccaccatggctgattgcatcacgcacaacattgtattcaacaccgtggggtggatcagtgatgaccccaacataccaatgaaggagacgttggtgttgaggtccaacaattgggagttgaggtcgaggtcgtcaattcaatccgagacacgacaatgtccaccagtaaattggttgaaggatgagggtgtactatgtgcaccaaagagattgcgagctgtatttgtcaaacttgagaaattccaagggaaactggtctcttcatcctcaaaacgtggatccgtgtcttcagcatgctggtggcaaaacaacttcagatccttggcatggcacagacctaggaaaccaccaaccaataggggctgccgcaacaacaaagagggccttagagcaatgaacaaggctgtagcagcaacaaaggggaccaccaatcaacatggccacaacgcggatcttgggacacaatag

SEQ ID NO: 28041 - DNA, 783 bp, Zea mays
  Peptide Sequence Number=SeqID_69820
atgtcgccactgggtgccagttggctgcattcctgggcggtgctatttggggtgggggtggcagcctccgacgcgcgggtacgcttcgacgccgaggaggaagtgcgtggggtccttcctgaggcgcgtgcgacggcgatgcaatttgtcgttgcgggcgagcacgtggtcgaggcgcgtgtgggagcggagcccggtcgacgccagatgtggcttctggatgtggaggcttgcatgaagagaagtgaggtggaggctgagatgagggaggccacggtgggcacgcggaggcaagggttgccagcacgggcgggcaggaagagcgaggtgacggatctgaagcagcagctgcggcagcttgccgggagccgcgctcccgatgcggacgcccagcgtcgtgatgtattcaagagggtgatctcctgcatgacggccggcatcgacgtgtcggccgcgttcggggagatggtcctctgctccgccacctccgacgtcgtaaccaagaagatgtgctatctctatgtaggcgcccacgcgcgcgcgcacccggacctagccctcctcaccattaacttcctccagcgggactgccaagatcaggaccccaccatccgcggcctcgctctccgcagtctctgctccctccgtgtccccaatcttgtcgagtatctcgtcacgccactcacgaccgggctgaaggaccccagcgcctacgtgcggatgattgctgctgttggtgctgccaagttgtatcacatatctgccaccgcttgctttctctga

SEQ ID NO: 28042 - DNA, 936 bp, Zea mays
  Peptide Sequence Number=SeqID_69821
atggacggcctccacaccgagctcgcgctggggctgctggagtgcggcgttgttggcagcggaggcgagacagcgccgttcgtggccaagacctaccagatggtgtgcgattcgcggacggacgcgctcgtccgatggggcagggggaacaacagcttcgtcgtcgccgaccccgccggcttctcgcggctgctcctcccctgcttcttcaagcacagcaacttctccagcttcgtgcgccagctcaacacatacgggttccggaaggtgcacccggaccggtgggagttcgcgcacgagtcgttcctgcgcggccagacgcacctgctgccgcgcatcgtgcgccgcaagaagcgcggcggtggaggaggagcctgctcgtccggcggcgatgcgccgcaggccggctgctgtatcagcaccatgggcgaggatcatcgtccggaggcggatccggacgagaagcaggaggcggatgccgaggcggctctgctggaggaggtgcagcggctgcggcaggagcagactgccatcggggaggagctggcccagatgagccggcgcctgcaggccacggagcggcggcctgaccagctcatgcccgccgagaagaagcgccgccgcatgcagctcgcgtcccagtcgcagcccgcccgcccgccgctcccgccggcgccgccgccaccggtgctccacccgctgctggcgctcggaggcgccgccgccaagggcctggacggctggcagtgggcggagctgcagaagccgtccgttgtgctccccgccttcgatttcgatcccgccgccagctgctgcggggcgcagcatgcgccgaatctcggcggcgccggcatcatcggcatgggcctgactgctgatgagaccacggtagagacccccttcccgttctgcctgctcggccagggtttcttttga

SEQ ID NO: 28043 - DNA, 492 bp, Zea mays
  Peptide Sequence Number=SeqID_69822
atgactgttgcagctccgggcccgttggcgcaccggacactgtccggtgtccaccagacagtccggtgcaccagccgaccgttggagcagaccatgtgtcgcgcgaagattgcgcggccgactgttggcgctggcgaccgttggctcactggacagtccggtgcaccaccggacagtccgagtggtccttgggaccggccattaggggctgattcaacggatccaaccgccttgtccccaacttggcgattcgggcgccaaacacttgggggttgttctgctcggcgggctctctgcggcggcgtggacggtctgcgtcctagggtcggattgtccatgaactggaagcaggagaggggtttcctgcgctgcaccgaacggtccgcgtctggtggccggatggtccacgtatgcgcagagtggcgggcattcgccaacgacatctggatctcgtccaccgggagggaccccgtcagggaggagagatcctag

SEQ ID NO: 28044 - DNA, 357 bp, Zea mays
  Peptide Sequence Number=SeqID_69823
atggcgggcggctgcagctgcaggacgatggatcggggactccgaggatggcggcaccaaagggagacgagacggatggcagctgcagcctggaagacggcggatcaaggactccgaggatggctgtacgaaggggagaaagggctttgtgaaatgtcagtgggggttgagatacgtgggaacaaggcctctggatacaaaattatcgtagcaactgatccaaaaggcttcgatgaccccgtttgtcctcttccaagtggtagaaaacacaccatgagcaaggagatgataaaacatatggccctttcaaaggacaagggaaagttggagcagaagccaaaccaggagaggagctag

SEQ ID NO: 28045 - DNA, 471 bp, Zea mays
  Peptide Sequence Number=SeqID_69824
atggtgaaggagaagaagcggaagcagcatcctgcgactcagccgcccctgggcgacgagggcgaggggagatgcgggcggaatgccaggaaggagaaggcggagccgccggagaggcaggtgccccggacgatcgagaacacaagggagcccgatgagactgggccaaaggaatcgatagcaggagggacctcaagttcaagcggactgacgttgtccagcatagggcctgtagcgcgttgtgtgggagaagcacgggaggttcacacggaagcaggtcgcgcggccctagcagcagcactgggtgaatcgggcggggtcaacgctgcaatcgctcagatcggcgctgatggtgaaaccgcgtggccccttggaccccgaccccggcgacacggaccaggaggagggaggttttaccgtttccaacgggagtcggcggcgggaaccggcggtggcggtaggcgggcttag

SEQ ID NO: 28046 - DNA, 1308 bp, Zea mays
  Peptide Sequence Number=SeqID_69825
cctttcagcagcacacgctcgccacaatgcgcacgaaaattggtggacaagagcccccagtaccgccgggacagcgccgccggacggctcaagcagcgcctggcaaggatcctcacgcgctccacctgcaccaccaataacgccgctgccgccagctcgggcggcacggccacggccacggccttcgtcagcctcgccaagaccaacaacgcccacaccgccgcctcctcatctcacccggagccggaagcgccgccctccccgtacttctgcacgccctgcacctacgactacgagcgccccaaggccgaccgcgggacacgcccgcgccgcagccgcacccgcagcgcgtcgctcgtacacatctccgtggactgcacgggcggggccgcctccggccgccgctccgcccactccgacgcgccgcttctgcagcacctcttgtcggaacaggtgccggcgagggacgtcgtcggcggcacgaagcagagcaagggcggcggcggcaggagcaagctgacgacggcgcggtcgtctccgtcggcgtcgaggcggcactgctcgtcctcctcctcctcctggggccgcgcccgcgcgcgccggcccagcagcacgcccacgccctacagctggtcgtcgtcgtcgcggtcgtccgccaccgcgacggacgacgagctcgcgccgttcagcggcagcgacgacgaggccggcggccaggcggccgacatgcggacgctcttctcgtccctcagcttctcgtccgaccccacatcatccgagttctaccgcaccaacggcggccgcagcggcaacggcaacgccagcaggaggagccacaggaacacggcgagtcgtcgtcgcggccgccgcgcgcgcgcgccacggcgtgcgctgtcgagatccagcggcggcgacccggcagcaccgcccgacgccttccggccgctggtgtccgtggagacgacgaggcgcactacggagcgcagcgagaggagcaaggaagacaagggtctcaataacgccaagaagctgacgatgacgatgctgggcgcggccgctgccgcggaggaggaggaggaggaggccatcgccgccggcgcgggcatggctgtggtgaagcgctccagcaacccttacctggacttccgcagctccatggtggagatggtggtggagcggcgcatcgccagcgtggggaagatggaggagctcctgggctcgtacctctcgctcaactcgccgcgccaccacccggccatcctcgctgccttcgaggacgtctgggaggccgtcttcggcgaggagtga

SEQ ID NO: 28047 - DNA, 761 bp, Zea mays
  Peptide Sequence Number=SeqID_69826
atggccttcagcgccacgacaactgttgcggaggtggaacacattggcagcctgccagaccaggcaccaatcaacttctccatgaacttcggctatgtcatcgtcgacgcgatggcagggcgagccctcttatactggctcatcaccacatggacagacggcacgggcccgggcagtcagcctcagagggccctcgcgcggtcaagctttacggcgcggccgtggggcccacccgccctcacgtgtgcgattgtgtatcggccgttcgcccacgcaaggtcgcaacgccgcgccccgacgtgccgcccactcgaaagtcgaaacccggctcgcgcgttcgcgcccgacggagggaaatcgctgtccgcaggcgtcgccgacgcgcgggccagcctgggatcgggtaccgtgcgtgcgtgtgaatgggcggccgccgcgatagcaggatgcgcggcgtggacggatcagcggcgggcgtacggggcggatgcgtgcgcgccaggggattttgggtttggcgatgcgggactgcggatgcggacggctcgcgtcgcgtcgcgtcgcgtgctgcggctatttgcgcatgcggggcggtgggggtgcgcggcaccggggcggcgcggcgtcggcaggcggatatcgacgccgatgtgcgcgcgaggaccttgtgcgtgcaactgcggcgtggcgtcctgcgcgccaggtgcaaaccgcgcgcgcgcagtggtgcggagctgcccttcggcggcggcggcggtctg

SEQ ID NO: 28048 - DNA, 432 bp, Zea mays
  Peptide Sequence Number=SeqID_69827
atggggagaattccacccaaagcgaacaaatccaagaagaaggctgagaagaggcagaggcagccgcgcgttgccttcctcaccaagagcgaggtggatcaccttgaggacggctatcggtggcgcaaatacggccagaaggcggtcaagaacagtccttacccaaggagctactaccggtgcactacgcccaagtgcggcgtgaagaagcgcgtggagcggtcgtaccaggacccgtcgacggtgatcacgacgtacgaggggcagcacacgcaccacagccccgccagcctgcgcgccggcggcgcgcacctcttcatgtccagcgcgcacgcgctgccgccgcacctgaccatgccgtcgtccagctttcgcccggacctgaacctgatgagcatgatgcaccccgccatggtggggcgcgaaccctaa

SEQ ID NO: 28049 - DNA, 177 bp, Zea mays
  Peptide Sequence Number=SeqID_69828
atgaaggagttctgcgacacgggcgacgtgctggtggctgctgctgccccggaggttgtcgggatggtggtcgtcaccggggaaaccgaaggctggggagggtcgtccgacatcctaggatcggtgaggtcttctgatactagattgttaggaacagggttacggaggtcttggtaa

SEQ ID NO: 28050 - DNA, 384 bp, Zea mays
  Peptide Sequence Number=SeqID_69829
atggggctcatggttggagttgctctaagccatgttggttcccacacatactgcaacgagtggagtaatcctgcccactacaagcttggtcaccatgatgttctgcattggagtggtagttctgatcaaactcctgatgtcgaagtcgccagggtgtcaggtgttaacctgagatgcccatgtgtattgttggtgaagtggagcgtgccaaagaagatttttgagatcgtcagggcattatgcgcatgcctgatattccttgacatgtcatcgatgaacttgaggttgccaaagaagatcttctatcatagtgtgaagcttattgttgccatcagatctacactgaccagcgtgatcgcccttacctggtgcaccaactattga

SEQ ID NO: 28051 - DNA, 981 bp, Zea mays
  Peptide Sequence Number=SeqID_69830
atggagctggtggtaggtgcttcggaatccaccatgaacactctcctgggcaagctgggcaaccttctcgcccaggagtatgctatgctcaggggcgtccgcggtgacatccagtacatcaacgacgagctcgccagcatgaaggctttccttctcgaccttgctcgggacaaccaagacaaccggaggaaggactggatgaagcagatccgtgagatggcctacgactgcgaggactgcatagatgacttcgcccaccgcctccccaaggattcatccaacttgctgaacaccaaatgctggcccaggtggatggctacactgatctatgacctcacgacgtgctggcctcgccgtgagatcgcttgcaacattgctgagctcaaggtccgggcgcaactgattgccgaacgacgcgtaagatatggagtgaaggaaccggacagcagcggaagcatgcctgctgacgcccccccggagaacattgctgaggaccagctcgcaaggcgagatctcaccattaaggaacccgtagggatggggcacgtcatggcggatcttgagaggtgggtgaagcacgacgagcagggcgcaggcggccagcgagctgtcgcgtccattgtaggatttgggggcgtggggaagaccaccgttgccatggcactgtacaagaaagtcatgaaggattttgactgccgggcgtgggtcactgtgtcccagaactacgacatagaagccgtcctccgtgagatcctcaagcaaatcaacccagattacatgcatcaagacggcggcactgctgcaaccatctctgagaagaccaagaccaacaggacagcatcagcatccattgcttgcaaattattgaaccgagctttgaaccaccgcacaggccacacgcatggaggaggcactgctggaagctctaagaaaaatgacaccagcaaagctgtaatggagcacctcaaagggaagagctaa

SEQ ID NO: 28052 - DNA, 426 bp, Zea mays
  Peptide Sequence Number=SeqID_69831
atggggctgtccaccgcggctcgggcgtactggcgctccatcgagcgcaccgggctcggtgggtcggatgagtcgggagtttccttggacgaggtggactcctccgaggacaaaggtttttcagaggtactatgtgtaaaccatgtaattttctttcttttccctatggcacccttttcctttcaagaggggccaaaggtttttaatggggccaaaggttgtaattttcatttttctttacgaagcccagtacaatacaagggccagtttcccccatatgtaaaatatgaaaaagctccagagtcgtccctaaggggatgcagagctaaaataccacctaagtcaaaggtgaagaaggtccaaagtcgttccgaaggggatgcagagcttagctctaaagtcattcttaagggaatgcagagctaa

SEQ ID NO: 28053 - DNA, 306 bp, Zea mays
  Peptide Sequence Number=SeqID_69832
atggcggtggctcaggtcaacggtggtggcactgcgagagtgcggaggacgacaggtgagcgcgggcaggggaaaccagagggggagggagttaattggggcatgtaccaagctgtggacgtcaaggcgaagcttaccgaggcaacagtcacgatggggcctgaacgtcggcgatggaacaagctcgagtctacgacgaacgcgcggcagttcttccctgacgtgcgcatggcgctaggctcgggtgggggctctacggacgtgcgaatgagggagggagaaagtgagtggggctctggaagctag

SEQ ID NO: 28054 - DNA, 768 bp, Zea mays
  Peptide Sequence Number=SeqID_69833
atggccctagcctctggaggtggttcttcctctaacccctcacctgctatgttttctttgtcttccttgttgaccatcatagaggagcaggtggagagccttggggatgaggagctcgtgcttgtggctagtcggttcatgaggctggcccatgcgaccatcactattgtcgacgcaagggaaagtgggagcacaccactagtaagcacaaatcccggggaggttcaagaaggaggtgctcaagaagaagatgaaggcctggagaacacatgtctcatggattctggttgttcacgccatatgactgaaagcttcagatggctgtccaacctcgaccccatgattagtaaggaatacatcacattcggggataagtcgagagccaccaaggtgatgacctcgcaactcggtgatttgcttcacaagaacactgttggtctagctcgagtttgctctttttgggaacatgataagatgagtgagaccatatttgtggaggaggagcacaacgatgtcgattgtagtgatctcgagccatctccattggctgccccagttgagcctgcttcgactacttcggttgatgggccagacataacttcttctatggctttgggtccattcgagcctaagcctgctgagtctggaggcaagtacacaaaagatgtcctgaagaaatttgacatgggtgaggccaagcctctttcgaagcccatttccatgatgacaccgctggatgccaatgaggacggagagcccgtggactag

SEQ ID NO: 28055 - DNA, 264 bp, Zea mays
  Peptide Sequence Number=SeqID_69834
atggcgaagttgaaggtcatgcgggttcatgttgatggaccaggagcggtgaaggacgagtgctgggagttgaccgagggaccagagtcgccggaaaacccacctagcgctatggatgacaggtttttcgacggagtttggcctcaaaactcggcggtggcggattcggtgggaatcagaggtggcttgtggcgtcataacgaagggtgtgtcgaggtgaagcaacttggtgtagagcgtgtgaccatccgatcaaaatcctag

SEQ ID NO: 28056 - DNA, 1779 bp, Zea mays
  Peptide Sequence Number=SeqID_69835
atggctggtcttgtggcctgcaacctgaaccaaccgatcagttactgggaggaacttgggaaattattgccagcgcgagagatctccaatactcgcggggctccaaaccaagtaaattctcttactttggatggggttaaaaggatccttgattgttgctacaacgatctgcctggagatgtcaagacctgcttgctgtacttgggcatgtttccaaagggctgtaagatcagtaggaagtgtgtgacccggcgatggatagctgaaggttttgttagtaggaggcatgggctgatggaggaggaagtcgcggagacatatttcaaccagcttctaagaaggaagttgatccgtcctgtggaccacagcagcaacgggaggctaaaaacctttcaggctcatgacatggttcttgattatattgcgtccaaggccagcgaggagaactttatcactgtggtcggcggccactggatgatgccagcgcccagcggcaaagtgcgtcgactttccatgcagagcaccagtcgtcccaaggcggccgcaggagattattcaacaactagaggcatgaatttgtctcaggtgcggtcactggccgcttttgggagcctcgcgcagctgcctttccaagcgttcaacaacaggatcatgcaagtcctagatttccaaggcctcaagggatttaagaacagacatatgaaacacatctgtgaaatgcttgttctcaagtacctgagcctcagaggaacagatatcaccgaaatcccgtcgaggattgggaaacttgagtatctagagacgcttgacataagggagaccgatgtcgtggagctgccaaaagatgtgaagcaactaaaaaggatcagcagcatacttggtgggaacaagcacaagaaccctcggaaaggcctgaggctgccccaagaaaagagcagaaagaagaagagacgacggacgacggacgacgacgggatgatgaaagcactccgtatactgtctgggatcgagatcaacgagaatacagacgtaagtgggcttcaccagttgacggagctaaagaagcttacagtttacatgctaaacgtgctagacgaatacagagctgacatctttgaacagctgctctcttctatcgagtatctttgcagctgcggtctgcaaacccttgcgatcaatgacgaagattctaaatttacccagtcactggacaagatgtctgcagctccaagatatctcgtcgcccttgaactctccggaaagttggtgaaacccccagaatggatcgataagctactgacactgaacaagctaaccctttccatcaccattcttcggactcctactttcgagaaactccgcagcttgccgttgctgtattctctaaccttttcattcagtgcagtaaagcaggatcagcaggacgacatcaaggaaattctggaggagaacaaatcaaccacagatggtgagatctttgtgccaaaaggattccagaatcttaaactccttcgtttctttgcaccacatattccaaagctggggttttctgacaatgcaatgccagtacttgagacaattgaggcgcggtttaaagccttcgaaggtctgtttggcgttgacacactagaaaatctcaaaggggtacatctcagagaagctaaagtgggggaaaatggcaaggaaatagcagacattaacgaaatcttggtacatgatttgaaagatagcaccgagggactcaaggcaatcgttgatcacactttcatcacttattga

SEQ ID NO: 28057 - DNA, 606 bp, Zea mays
  Peptide Sequence Number=SeqID_69836
atgtcccgagaaaatacttcgggaccagctcaccaaattgaattggtccctcggggggctagtgttggagcgaaggccgaacacagtatcgatcagtctaactcgactataatcaaacatgttttggcacaggcacatcaggtgaagggtactttggctcgcgcaagcagcgaagtcttcagctactcccttcagaggggcgaggcaaaggcccacgccaagcaagggtgtttgttagcagccccatacacgtgtcccaaaggctctgacggtgaagtcagagtcccgacgaagtcaagggagctacctcgcgaagtcaaggaagtaaacactaacgaaagccacaccaggtacctcatcttagttgatgacatatggtctgcagaaacgtggaagaggatatcaaagtctttgcctgacaatgataagggcagtagaattatagttacttcgaggcttcgtgctgttggtgcgacatgctgccagaatggaaaggatcacctctgtgcagttgattttctccgtgacgaagatgctgggcattcagtcgaagtttttctgaatcgtctaagagccacaacgatcacatggtcccggaaattatag

SEQ ID NO: 28058 - DNA, 300 bp, Zea mays
  Peptide Sequence Number=SeqID_69837
atgacgaaggtgatgcttgccgaaggtgttcaaaactcaaaaaatggaaggagcattttcagagaagatacacgtcgagcgcaagaagaggcctgtcaggcacgagaagaggcccgtctagcacgtgaggaagctcatagaaaccgagaagactcagaatacaagaagacgcatctacaggcgcaaactcagcatccaaagaatcgttcatttcttaatattttgatgaatgatatccatccttacttgtcgggccaagtaattgtcaactatgggatgtatcatacaccgttggtttag

SEQ ID NO: 28059 - DNA, 339 bp, Zea mays
  Peptide Sequence Number=SeqID_69838
atgggaaccgctgccgctgcgcagcccttggggagtcgtcgctgcgcgtgcctcgtggagcaacagtcgtcgtcgtgctttgggaacaacagccgctgtcgcgtgccccttaggatctgccgtcgcgcgcgtgcctcggggagcagccgccacgctccccctcggggagccaccgtcgtgcgcacccctcggggaaccgtcatcgcgcgcgcctcaggcagcagcctccgtgcgccgctcgggaaccacctccgctcgtacgtcgggggcatcccacagctattggaagcccagggcttgtattatacaatgtatatatatatccaaatccgcatctag

SEQ ID NO: 28060 - DNA, 681 bp, Zea mays
  Peptide Sequence Number=SeqID_69839
atgacggcatgtgagctcgtccgcatcaagcaaccagttgggcctgacgtggagcgtcttgggtcttgggtcgttgatgttgacaagaagatgaataataagctcggagtgctgtctgtcgtcgggtatggtggtcaggggaaaaccaccattgcgatggagctttaccgcaaattcggtcctcagttcgactgccgagcaatggtgactgtgtctcagaactccgaacctgagatagtgtggcggaacatactgagtcagctgaagcagcaggccgaaaatggtgtgaaggaaggcaaagatagcagcacgcgttccagaatggagaggaaaattcaagttatcagaagcatagtgaaccggcttaggcatccatgccgaaatgaagacgaagatggcagcactttgttgggaaggcacagacaaaatcatcaagcgggcctggtggggaacacactgagtcaggtaaagaataatggcgagcagcatggcaccagcttggagaagaaggctccagttaccggaagcatatggagtcgacttattatgctgctctcccggaagggaggggtggatggcgggcagcaaatacaagcagagctgaggagttacctagaacaaaagaggtaccttagagatccttctctttatcttgctttctctctgcttggtactccatga

SEQ ID NO: 28061 - DNA, 2268 bp, Zea mays
  Peptide Sequence Number=SeqID_69840
atggagacacaaacccgatcactgaccgagaaaacaaagaaagacgcaacaacaacagatctggggaattcaccggggtaccaaggcgcgtcccctgcgggcgcggcccagcgacgtgaccacgcggacctggctcgctggtgcgacctcgacgactcagcgccagcgtggccacagcgcggtgcggccaggcgaggtcgcagcccagctggcacgggcacacggctccagcgcgagcacgcaagcctgacacgtggctccggcgggaccaaccggcagtacttactattaattgatgatgtctggtcagaatctagttggctttatatcaagaaatgtcttcctgagaataataaaagcagcagaataattgtcaccacaaggattcaagctgtagcaacaacttgctctcctcgtgacaaagaccttcatcttattcatacagttaaatctcttgaggaggatgaagccagagaattgttcgagaaaaccctggacgaatgcaagggcactggatatgatcatctaaatcatagaaaaattccagagagagtttggaaaatgtgtggtggcttgccattggccatagtgaccatggctggtcttgtagcatccgacaagcagcagggggcccacaaagattggaatgaagtttgcgattctctctttccaaacaaagaagtatgccataaaccagaggaatttatgaggataataaatcattgctatcatgatttagacaatgacctcaagacttgctctctatatctaagcatatttccaaagggacgcaaaatcagcatgaagaggctcacaagaagatggatagcagagggttttgtcagcgagaagcaggggttgagtgtcgaggttgttgcagagacatgctttaatcagctcattgaaaggaagttaatacgggctgtagagcacaacagcagtggaagggtgaagagttgccaagtccatgacatggttcttgagtacctaatttcaaaggcagctgaagaggattttattactgtggtaggtagccactggtcaatgccaacacatagcaacaaggtccgtaggctttccgtccacagcagcgactctaaacgtgcacagcatgtggatagcatgaacctgtcccacgtcaggtcactgactgtgtttgagagcctggacaaactgcattttaaatcactcaaaactagaatggttcaagtattagacctccaaggctgcagaggttttagggagagccatgtcaaggtttcagacataagtgaaatggttcttctcaagtatctgtgtctccgaagcacggacataaaatatcttccccggaatatacacaagctcaagtacttggagactatagatataagggagacaggggttcaacggttgcctgcaactgtaggaaagcttcaacgaataaagaacatactcggtggagataaaagagcaaggaaaaccctaaaacttcctagagaattcaagggaacaacgagaaccttacgcatattgtcaggggttgagatcgcggagggatcaacaacagcggcatcagatcttaagtacttcacggggctgaggaagttggcaatttacaagatccaccaaaatgaagatatattcagagatttgctgtcctctatccagtatcttactggatattctcttcaaactcttaaaattgatgacgagtcatctgatttccataagaccttggactcaatgtcgtcctatccaacagatttgagtactcttgagctgtctggcatgttgcttaaactcccattgtggataaaggagctccatagacttgtcaagttaactctgtcagcaacagctctccgaacagataacttaaaggtccttagcaatctaggttcactgttttccctaaccttttcaatcagtgaagagcaggatcctgctttgggagccattctccaaagaaataagtctgaatcaggaggagagatcttttttccagctggaaaattcagtaagctcaaactgcttcgcatatttgttcctcttcttccattactcaacttctcaagcaaagcggtaccagagcttgaaaggattgaattgcgtttcaataggttggaaggtcttcatggtatggaaaatcttgaacgtctcaatgatgtgctcctgacagttgatggcaaacgcagtgaacctacaaagtcaatacttgatgatttgaaagaagtatcagtatcatccaagtacacagtaattgtcaatgagtcccatcatgattga

SEQ ID NO: 28062 - DNA, 372 bp, Zea mays
  Peptide Sequence Number=SeqID_69841
atgggcagcgcacgtgggcagggagtaggacaacacgggagcaggatggaagcacgtggagaatctggagtccgcgactgcaggggctcctcatggagtgctgaagctccagccacacaccagaggctgctggaattggacacaacctccataatagcctggatacacgaccttgcagcatcgaacacacaagcattcctgtgtttccgtaactcccaagcatcagcggaattctacaaaatattcaagattgtgctaagctgtggggtttggctggagcaaaagctcttaaaaggctctggccttaatctaggctttagttcccctgtacttcgaggtttggtttttggtgttttagctcagtttttttag

SEQ ID NO: 28063 - DNA, 393 bp, Zea mays
  Peptide Sequence Number=SeqID_69842
atggtgaccgacacgcccagaggcttgccgcagatgatcagcgcgctcccacgaaccccaattgcacttccactggaatcagcacggtggcgcagagggaaaccacggcggcgggcagagagcgacggtggcgctgtctcccttctctctattcctctcgatgtgttcgatggctctcggggtgccaagcttgttccgtctcagcacatggagaggggggctggtaacaatgctggggttttatgcccctgtgggcggagtccgcacccgagggattcggctaattctccaacaaattcggttgaagaccctaacaaccccgtcgagcggttaagcgcctgcggttcccaaccagtgcagcgtagcatacacacagcttgcattcgaggcccg

SEQ ID NO: 28064 - DNA, 273 bp, Zea mays
  Peptide Sequence Number=SeqID_69843
atgcgcaaaggagtcgaggaagtaggtccgcccgagatacaattcttctgggctgtggcctactggcctgtggggatggggtactacacgtatgtgtcactcgacgtcgccaggagagaaaccgaggaagcgttgaacaaatcagacggggagagtagctgggcgatgggagtcggacgaccaaagaaaatcgcgcatgagttgcgaacttttttgatggagtggccgagattcactcgaatactgttacgaaacgtgccacacaccctataa

SEQ ID NO: 28065 - DNA, 291 bp, Zea mays
  Peptide Sequence Number=SeqID_69844
atggccccgctcctcctgggttgctgtgcggatattgtgtggtcacggatgatcaccggtgtgcaggcaagctttccgcgtcgttggtgggcgggttatggcctcgggtcaccggcaattgctcaccggagccatatcgccgccgcgaatccactcaccgctgggggcagcggcatctgtgctaccaaccgtcagattggatctccggtgggccgattcaccagctccggcgatggcaccgccgtgggtggctgcgccgtcgtgctgggtgccggcctgggtagacgatga

SEQ ID NO: 28066 - DNA, 168 bp, Zea mays
  Peptide Sequence Number=SeqID_69845
atggaccacagattcaacagcttcgtcttcgtcttctaccgtcagatagccgcgtctctcctcatggtgcccacggtagtccttctcgagaggagaaatgcaagatccatgtcgtccgcgttgctcttcaagatctttgtgtgcgccttgatcgggtatgttcaatga

SEQ ID NO: 28067 - DNA, 1773 bp, Zea mays
  Peptide Sequence Number=SeqID_69846
atgccggagccatcaaccaccgaggggcggcgtattcagggagagctcaagaatctcctggaggatgtcgcggctttcagccgtgccatacgacgggcgccgttcccgacccggttccgaaccccgactactatcacaaagaactcgggggagacgaggccggaactgtggctcgcggactaccagctggcctgccaactgggtggaacgaacgatgacaacctcatcatccgcaacctccccctgttcctttccgacaccgctcgcgcctggctggagcacctgcctctggggcagatctccaactgggacgacctggtccaagcctttgccggcaatttccagggcacgtacgtgcgccctggaaactcctgggatctccgaagctgtcgccagcagccgagagagtctctccgggattacatccgacgattctcgaagcagcgcaccgagctgcccaacatcaccgattcggatgtcatcggcgcgttcctcgccggcaccacttgccgcgacctggtgagcaagctgggtcacaacacccccaccagggcgagcgagctaatggacatcgccaccaagttcgcctctggccaggaggcggttgaggccatcttccggaaagataagcagccccagggccgcctaccggaagatgtccccgaggcgtcaactcagcgcggcgccaagaagaaaggcaagaagaagtcgcaagcgaaacgcgatgccgccgacacggaccttgtcgccgctgccgagtacaagaaccctcggaaacctcccgggggtgccaacctcttcgacaagatgctcaaggagtcgtgcccctatcaccaggggcccgtcaagcacacccttgaggagtgcgtcatgcttcggcgccactttcacaaggccgggccacccgcggagggtggcagggcttgcgatgacgataagaaggaagatcaccaggcaggagagtttcccgaggtccgcgactgcttcatgatctacggtgggcaagtggcgaacgcctcggctcgacaccgcaagcaagagcgtcgggaggtctgttcggtaaaggtggcggcgccagtctacctagactggtccaacaagcccatcaccttcgaccaagccgaccaccccgaccgcgtgccgagcccgggaaaatacccgctcgttgtcgaccccgtcatcggcaacatcaggctcaccaaggtcctcatggacggaggcagcagcctcaacatcatctacgccgagaccctcgggctcctgcggatcgatctgtcctccgtccgggcaggcgttgcgcccttccacgggatcatccctgggaagcgcgtccagcccctcggacgactcgatctacccgtctgctttgggacaccctccaacttccgaagggagaccctcacgttcgaggtggtcgggtttcgaggaacctaccacgcagtgctggggaggtcatgctacgctaagttcatggtcgtccccaactacacctacctcaagctcaagatgtcgggccccaacggggtcatcaccgtcggccccacgtaccgacacgcgtacgaatgtgacgtggagtgcgtggagtacgccgaggccctcgccgaatccgaggcccccatcgctgacctggagagcctctctaaggaggtgccagacgtgaagcaccacaccgacaacttcgagccagcggagacggttaaatccgtccctcttgaccccagcagcgatgcctccaagcagatccggatcggctccaagctcgatcccaaatag

SEQ ID NO: 28068 - DNA, 273 bp, Zea mays
  Peptide Sequence Number=SeqID_69847
atgcagagctgtaatcacttcgagggtgacgaagctacaaaagtcgttcttaaaggagcgcagagaaaagaagggaaggtgtttttcgccttcggctcaaaagttacacacgggtttcgtccacagcaaagcaattcgttcatggatggaaagatcctaagctctatacaagaagtcataaaaggaagcttcagtccagcaaccttcggaatgcgcttcggattactaaccttcggcgccgccatcctgcagacaaacaacagtataaggtaa

SEQ ID NO: 28069 - DNA, 198 bp, Zea mays
  Peptide Sequence Number=SeqID_69848
atggctggcggctgcggggcggaggtagtagaggactgtggtgatgccactaatccgtcttctctggcggccatcagctggttcccttgctggctccgctggctctggactggagagcatacagacgcctgtctcctcgccatcctcggcccagtaagagctctctccttgcagatcccagttcctttcgccatcgat

SEQ ID NO: 28070 - DNA, 264 bp, Zea mays
  Peptide Sequence Number=SeqID_69849
atgcaagagatggtcttggagcaaaaaacagctcctaggctgaaggtgatcttgctcttgaaaatgatggacatggagttaccgatgattgaagataccgcctacctagtgcgccagctgtccgtgttttgtgttcgaccgcacatccgggggtaccctcgtggtgcttttggggaggacggtgtcaaggatcgtaactcgatggtggtgtctaccaggctgtgggatgctaatgagatgaaaatggaggggatccccccttag

SEQ ID NO: 28071 - DNA, 129 bp, Zea mays
  Peptide Sequence Number=SeqID_69850
atggccggacctgtgcccctcccgtgctaccgcacccggggctggggtctctaccagctcctacgcccgtccaggaatttttggtcgcaccgccatgcccctatttcagagattgaaatggttgcttaa

SEQ ID NO: 28072 - DNA, 321 bp, Zea mays
  Peptide Sequence Number=SeqID_69851
atggaggaagagcagaggccgcagtggcaccctgcgccaaggacagagaaaggtgctggacaccatgggagcaggaaagccgagcagagagctcgtagggagggccagcggccatggaaggaacttgctgctgccgtgagggagagggaggacggcgtgggaaggaagggagcagggcaggtgggctgccatttaaagaggcgctcgctgcagccattggtggacatgggtggcatgctgcagagctctgcatatgtcagtctgcttgcaggttctacaatttttattaaaggtcaaacctcatatcttgaatataaataa

SEQ ID NO: 28073 - DNA, 327 bp, Zea mays
  Peptide Sequence Number=SeqID_69852
atggggaagcatgtcccatcactcctcctgcccttcctctaccgagtgaccgcacttgtacccaccataaccggaatgggagaccacgtctcaggttgtgtgaggggtaaagtctgcgggcaggttcactcagggcggcgcggcttaccggcggtgagggaggtccggcgaagggtggggttagctctgggaagtcttggcgatcacgtcgaggcgggtgggctcgtcggcggcgtgtgctcatgcttgctcacgttggtagagttcaatccaagggcacagggagcttcatggggtgctaaggaaactacccgtgcaaggaattga

SEQ ID NO: 28074 - DNA, 1335 bp, Zea mays
  Peptide Sequence Number=SeqID_69853
atgggttcgctgccgccggtggacgggcagagacgccccccacacgttgtgatgatcccgtacccggcgcagggccacatcacgccgatgctgcagtttgccaagctcctccatactcgcggcttccacgtcaccttcgtcaacaacgagttcaatcatcgacgccacctgcgtgcgcgagggcccaacgcgctcgacggcacggatgggtttcgcttcaccgccatcgacgacggtctcccgctctttgaagcggacgccacccaggacatccccgcgctctgccactccaccttgaccacctgcctgccccggtttaaggatctcatcgccaggattaacgccgaggctgaggccgagggacaacccaccgtgacatgcgtcgtcggcgacagcaccatgaccttcgcgctccgcgccgcgcgagagctcggcctccgctgcgctacactctggaccgccagcgcctgcggcttcatcggctacttccactaccgccacctcgtcgagcgtggtatggtccccctcaagaacgaggagcagctcacggacgggtacctagacaccatcgtcgactggatcccgggcgcgcccaaggacctgcggctccgggacttcccgagcttcctcctaccgcccatctacaccgtgggcccgctccagctgacggtgcggaacaacgtgcaggcgaacagtcctgtcgctgctattgggtccaacctgtggaaggagcaggaggcgccgctccggtggctcaacggccgtgcgccgcgctccgttgtgtatgtcaacttcgggagcatcacggtgatgtccaacgagcagctggtcgagttcgcgtgggggctggccaacaccggctactacttcctatggaacgtacgcccggacctcgtcaagagtggcgactccgccgggctgccgccagagttctcagctgcgacagagggacgaagcatgctgtctacgtggtgcccgcaggcagctgtgctggagcatgatgccgtgggggtgttcctgacgcactccgggtggaactccacgctggagagtatttgcggcggcgttcccatgctgtgctggcccttcttcgccgagcagcagaccaactgccgatacaagtgcaccgagtggggcatcggaaaagagatcggtgacgatgtacagcggggcgaggtagagtcgctcatacgggaggccatggagggggagaaagggcaagagatgctccggcgcgtgactgaactcagggacagcgccgtggccgctgcagggcctgacggacggtctatgcgcaacgtagacaggctcatcgaagaggtgctcctagcctag

SEQ ID NO: 28075 - DNA, 522 bp, Zea mays
  Peptide Sequence Number=SeqID_69854
atggactgtgggttgttttctcaaaagggcaaggtctcttatgtaaaatgctcagcgcggagggaggaggacaggcgaacttcacaggggggttgtgacgagccgaccaccgcgtctcgcagtaccgcaacgtttattggcatagaagcttctaaaagtatttacgagagcataatttctacctactgtaaactgggattcccagaaacagcacacggggtaattataattgaagcatatgggaagataaagctctggcagcaagcagaaatcttggtgaaagggctgaggcaagcatcagagagtggactttatgaaaaagcaagggcagtctttgataatatgattaaaacatgtcctctgccaactgttgattcagttaatggaatgataagggcattgattgttgatggcagattggatgagttgtatgtcgttgtagaagagcttcaagatatgaactttaagatcagcaaaagtacagtgctccttttgcaaaagctggggatgtattcgaggtaa

SEQ ID NO: 28076 - DNA, 795 bp, Zea mays
  Peptide Sequence Number=SeqID_69855
atggtgctcgcgcgcaaaaagttgaagctgaagctccacacgctcctcccagccggcaaagccgcggaggaggagcatggagaggatgtggaggccgtaaaggagaggctcgcatcctccaagcggctgcgccccaagcgggagcggaggcccaagaagaagctgtcgctccccgaggtggtgcggcagacggaggaggagataagggaggaggtggagcggaggagggaggagaggaggaaggagaagaaggagaaaaggaggatcaggaggttgatggaggccgaggccgcggagccggaaacgcagcaggtggagggggagataggggaggccgattctgctgccgggtctgagtctgaccagccggtcgaggcaaaggatagcgaccaaaatataaacaagttggaagtgaccaaccccgctgttgggtccaacaataacattgttccagacaataggcagcagaatcacaaaatgcagttggccaaaactgttgtcgtgtctgacaatcatgtagtcgcagagcatagggagcaaagcataaagaaggtgtatgttggtggcatcccatactattcatctgaggatgacataagaagtttctttgaagcatgtggtagtatcacaatgattgactgcatgaattttcccgaaagcgggaaattcaggggtattgcgattctaactttcaagaatatggcggtggagagaatatggctctgggaagaatctgagtatcgtggagattacgtgcggaggaagatgaagtggtccaaagggtctaggatctag

SEQ ID NO: 28077 - DNA, 156 bp, Zea mays
  Peptide Sequence Number=SeqID_69856
atggccgggaaggcggcggacgcgacagcggcgaggtgggcggaggggtacccgtggagggagaagctggccaagtacaatggggagctcgggaagggagtgtgggggtactgggagctcggcactttcataggatgcaagaactacttggactaa

SEQ ID NO: 28078 - DNA, 204 bp, Zea mays
  Peptide Sequence Number=SeqID_69857
atggctagaggaggagcgactgccggcaaggcgtggaatgggaaatcgatctcggatggcatcgttgtagatgatgacgggctgctgctcggacctgaaggcgcgccgaccagcccatacgtcgctgtcgctcgttcctggtggagcgccgtcgtcggtcgcctgcctcggatcgctgcagcagccatgcagctagactcataa

SEQ ID NO: 28079 - DNA, 627 bp, Zea mays
  Peptide Sequence Number=SeqID_69858
atggaggcttggggagtcggcgaggtagcagtagtcgagctgcggcgcgggcaagtcgacgaacgggacgccgccgagaggggcgaaggaaaacgcgtcgtcgtcgagctgaggcaggggcgcgtcggcgtcggctcggccgcttgcgcgggggcgccggtgcagggcgctggacgcggctccgggagctcgcgcgcgtcgcgcggcgtcgggcgcgcgaggaaagtcgcgggcggagcggtggcctgggcgggtcgcggctcaggcgactgcaccccagggcgcgtccggcctcggccctggcagaggcgggcggaccccagacggcgcggcccctcggcggcacgcaccctgggcgcgcgcgggatcggcgcggcggcacggcgtcccccagccccggcggcgtccgttccgccgcccggcgcgcgcgggcgcggccccagctccggtggcgcagaggcgggcaggcccctcggtgcgagcgcagccggcaccttggcgcgctcctcggtggtgactccctggcagcccctggtgggtggcggctacagggagatgggccggcggctgggggccgacggcgggagggaggccgacggctgggaggtggagaggaaaaaaatgtaa

SEQ ID NO: 28080 - DNA, 507 bp, Zea mays
  Peptide Sequence Number=SeqID_69859
atggcgaaaagagtagtttctggtgtacagccaacaggatcggttcaccttggaaattatctaggggcaattaagaattgggttgcacttcaggcacatggtgtttcatcgattttgaattttagtgagaattgtacaccagaatttttgacgccttacctggatggaatcgtgaataaattacttgttcttcttcagactgcccctgcctctgcccgcccgacctccagaaaccccgcctccgcaaacctccgtgagagccatgtccgtcgcaaacctcgccgccgcaaacctcccgccccccgcctcgctgtgatacccgcctgtccgcaaaccttcgaccgtcgcgatcctcaagcccgcaaatccctccgcgaatcgcgccgcgaccatcacaacgccacgaaccgcctgccgcacgacccgtggaaccccgcagccgcccccgagcaaactctgccgcaatccgttcgccgcgtccccgagcaatcccgagcaagccgttaa

SEQ ID NO: 28081 - DNA, 276 bp, Zea mays
  Peptide Sequence Number=SeqID_69860
gcacgtggagccgctcggcatcagcgcccgcttccgcaaggaggtgctcgaccgcatctccgccgagaagcgagcaaatactgttgagctgatgaacaagatgcccaatcgactacaagtcaagactctagaatctcagatcacctgctcggggttcctgatcaccgacgcacgacttcagtcctcagtcgacgtcggcactcggcagtcggcacgtggccccagttcaccgacgctggctcatggttgtgtcccatatggcaatatgggtgtgcg

SEQ ID NO: 28082 - DNA, 381 bp, Zea mays
  Peptide Sequence Number=SeqID_69861
atgccgggggggccaggcaccaggcggggatggcatggggtcgatgcagcagtcgccttcttctcttctctgaggcgagcgatgacggcggaggtgctcgtgtcggggggaccaggcgggaatggcgcgataacagcgaggagtcaggggatggtgcgaggtggatctgagggaggggaggttaacgagaggaagcgaggtgtcgggtggcgtggattgtggcattcagtgagcttgcgtggcccatggtgcaaggcagaagaggagaggagtgcgggcaagaatggaaggggcgtgcatgtggatcattggagcacggacgaggatggaagggatgcgggaggagtatggaaggggcaggctaggatgaaagggaggtag

SEQ ID NO: 28083 - DNA, 408 bp, Zea mays
  Peptide Sequence Number=SeqID_69862
atgggccagtggtggcccctgcatcgaatacaccccagagcggccattcaatttgggagcctcaatttcgtcattagccgggagggccatattgttagagtagcgcctacccaacctcctccgcccaggaatcctgacaccatctcaaaagccttcggtgccctcagactcaccccatgtgggtggcgtgaggggcatgggctagccccgccttacgaggttgacaagataaggcgacagatcacaatccatatggggcctaacccctcgtatgatgatctgatggctttctttgcgtccttagaggacctctctggttatacaatgcagagacaatgtcctaccatggtgcctctggcagcagccccggtgccttcccgcctcgactatgccacgccatggcggtga

SEQ ID NO: 28084 - DNA, 405 bp, Zea mays
  Peptide Sequence Number=SeqID_69863
atggacaactccgttcttgtggccgtgacggcccacagcgtttggatacggatcaaatcaaggagccaaagacacgcgggggaagatttatatccgcacgctggcatgggtgatccccatcccaacagagcccggagctatcatgtggatctcggcacgcaacaaccacacgaggacgacagactgagctgcgcgaagatgggggaagggactggcaaatgggggccacccaccagtgaccggctcgcagcacacctgatgcctcgcgtggaatcaacggctaccgagcaggtcccatgttgcagcggcacgggatacgcgcacacacgcgagtcacaggctgaccgggcccaccagtcggtgccttatagcctaagtaacagctgtgccactaagagcacctag

SEQ ID NO: 28085 - DNA, 261 bp, Zea mays
  Peptide Sequence Number=SeqID_69864
atgaacgtatgtgagctcacccttgttgtactcacatccttccaggtcaagaacaagtaccctaggatgaggcgcatagaggatgttgtgaggccgacaaaggggtcatctagtggtgacttccttaggaaggagtcactgggcaatggtaaaaccaagcgttctacacgaggcctagtccggataggtcaagagtgtgccgcatgtcgagggggcacatgggtcataaatgcgctgcagtttgagtgtgtcatagcttga

SEQ ID NO: 28086 - DNA, 525 bp, Zea mays
  Peptide Sequence Number=SeqID_69865
atggctgagctccagtcccgtgtatccgaagccgattataccggggagaatctctgctgtgcggggcccacggtcagggtggtcttcgaccccgtctgttgcgacatgcgcgccgtcttcttgggggttgacttcaacagaaatggcgagaacctcgcccggatcctcatcctttcgccgtgtgcttgggggaaggtggattccgcatgcggggggcataaaacccgtcgcgacctcttgcctcgcctctcgggtcccctagtcgagccatcatcttctcccatcacgcacggcaacgcgacgccgcgactcgtgaggctaccaattgccaaatccgattgtccgccgttgataccgcccttagaaccaccttgtgtgcgcggtgtgggtctcgggagagttctgttggagcgttgtgaacggagctcgacagaggtgtacggtactcgtcgccggattcgtgcctctgccgcagacccgcggttcaccgtggatcgacctcgtggccgcctgaacacttggtaa

SEQ ID NO: 28087 - DNA, 531 bp, Zea mays
  Peptide Sequence Number=SeqID_69866
atggctgagctccagtcccgcgtatccgaagccgattataccggggagaatctctgccgtgcggggcccacggtcagggtggtctttgaccccgtctgttgcgacatgcgcgtcgtcttctcgggggttgacttcaacagacatggcaagaacctcgcccggatcctcatcctttcgccgtgtgcttgggggaaggtggattccgcatgcggggggcataaaacccgccgcgacctcttgcctcgcctctcgggtcccctagtcgagccatcatcttctcccatcacgcacggcaacgcgccgccgcgactcgtgaggctaccaattgccaaatccgactgtctgccgttgataccgcccttagaaccaccttgtgtgcgcggtgtgggtctcgggagagttctgttggagcgctgtgaacggagctcgactgaggtgtacggtactcgtcgccggattcgcgcctctgccgcagacccgcggttcaccgtggatcgacctcgtggccgcctgaacacttgtaaatcgtag

SEQ ID NO: 28088 - DNA, 201 bp, Zea mays
  Peptide Sequence Number=SeqID_69867
atggatgtgtgtgagctgccgctgagggtcttggcattcaccgttgttctgctcccggggctagggttgggtggtgcgcttatggtgggcgattctgggggaagcggggcatcaattgcatgggtggttctcaccggtggtagcgtcgctgtggtgggggtccacgcgggcatgattccgacgttgggagggtgcagatga

SEQ ID NO: 28089 - DNA, 342 bp, Zea mays
  Peptide Sequence Number=SeqID_69868
atgagcttcacgacggcgaggaggcacagcgcgagcagggcacgatgcgagtacgtggcgttgttgcgggtgtcggggtgctgcgcggacgagctctggcacggtgggcacgagttctggcgaggcactgtgggcgagctccggcggcgaggtttcggcaaggaaagagggcgcgagaagagagcgagcttgagcagggagaaggaagggctcggctgggattttatagagaaagagagagggagagcagaggtcgtggccatgaatggccaggggaagagtaacaggcggcatcaatggtgtggaatagaaactgtcgacgttgttaatggtgggagctaa

SEQ ID NO: 28090 - DNA, 399 bp, Zea mays
  Peptide Sequence Number=SeqID_69869
atggtagataaatcccacttccttctcgatcaaagggaggcgttggagcattccgctggtgatcatctgacaacaaagagtgaggccaccaaagcccacgctcgtgtcgcgtcgttccaagacgcccacaacaccctagttgatgcgtcagctatacaagggaaattcgatgctgccgaagggagcttcgtcgaggcgcaaagtcgcctggtgcaactagaaaaggaaaggcacctcctgtcgaaaatgggatactgtcaggtgtttgccattgccacttctcactttgaagacgggatcgagctagaagctctaagtgagggctattgtgatgccttaaatgattcggatctcatcagtatggtgagggccgcagagtcttttgcccggaagctgtaa

SEQ ID NO: 28091 - DNA, 240 bp, Zea mays
  Peptide Sequence Number=SeqID_69870
atggacaaatactatgtggaactcaatgtgcataacttggagttagctgatcaaactgagaacgctggcaagaaggacttcgaggaaccgagtgcacaggagaaggtcaagaatatcgaggtacctaaagccagaggtgaagaagatggcttgcaagaagtcaaagttggtcaagctaagaagagtcatgctgcattgaagactgtgatatatgaacgtgacttacaaccattaagataa

SEQ ID NO: 28092 - DNA, 318 bp, Zea mays
  Peptide Sequence Number=SeqID_69871
atgcttagctgctacgacctcaccaagttcgagctctgcacactcgacctgcagctgaaaggtttgctcctctcctctcctcctctgctcgtgaagtcgagacaagtatctattctagtcgcccaacatgtatacaaatttcaatgcatattgctggtggaattgaccaagaatttagttgccctattgataattttggagagatttgaagattttacaatatcatggctaccattttactcggaagaaaagttgatgtcctttgtttacttgtggtaccctaagacaaagggaactacatatgttcaatctccttga

SEQ ID NO: 28093 - DNA, 228 bp, Zea mays
  Peptide Sequence Number=SeqID_69872
atggcgacgatcatcaggaagaacacgaacagtgacgtgaagatgcttcccaaaccttatttgccttctcccggtgtaggatctcgaacgcgactagttctggagaccccttccgcttgcaaatgcacgtcgacgcttgggatgcagaagactaaaagctcccttatgggttttggtgttttagatgacaacccaattaaaggactaacatgtgttgctaaatgttga

SEQ ID NO: 28094 - DNA, 279 bp, Zea mays
  Peptide Sequence Number=SeqID_69873
atgaagatcatagatcatggagttggacatgggtgctggagctcatggacagctttagagatcaaattgtggcaacttgatgctttggagtcctatcccgtgctcaaacaggccaaagggtgcaaaatgatgaaaaaggttaagcatgcaaggtgttggcgcagttataagccaaaagagagagggaaggtgctaatgcgagatatagcgagcgattgtgatcttgagcaatacttcggcgttacgttcatccaccgtcgagctatcaagttacgatag

SEQ ID NO: 28095 - DNA, 192 bp, Zea mays
  Peptide Sequence Number=SeqID_69874
atggaagtcggggtcagtgaggcattgtacgccaaggcggtgagccctgatctgttgccagggaatcgatggggacggttgatatgttctttggaggacatggttgctggagtgacttggccgtccatcttgccaccgggttggactgtcaagtgggaccccgcctcagctgaggaggagcatgaggagtga

SEQ ID NO: 28096 - DNA, 519 bp, Zea mays
  Peptide Sequence Number=SeqID_69875
atgtggggcctcgacgccagcccatccgccaaggcgccgcgggagaaaagtcatcgccgcgtgcaagtctctggcgctaatctctaccgattcacccgtgcacgattgaagctgctgactgggatgcgcttaaatatccacgtcgcgcgcactcctgcgtccatggccgcagatctcgctctccatcaaacggcgcccacctttcaccctcctgctcggggcgcgccgtcgatccgccagggccagaagtttatcctccccagccgccagctcttgcggaacacatgcgacgctataaatttgtcgcgcgcttatccatctaccagaaacgcgatagaagccgatcgcagagaaatcacccaccatcacgaatcgagagttgccgccaccgccgtaccttggctacaccatcgatctgtgcctagaggatggcctatggtgttcgtcgggtgtctgggtgggtgctcgggtgatccagggcgcgcgggagaccaccttatgcccacaattgcttgctaa

SEQ ID NO: 28097 - DNA, 354 bp, Zea mays
  Peptide Sequence Number=SeqID_69876
atgccgctcgccgacatccaggcatatattgaagctgaaaacttgaggttggagaatgacccttgccaattttcagagaaggaaatcataattaaggtcgatcctgatcttgcaaggactgttctagtctccacaaaactggacacaaaaataccacaatttgcccgtccctctgatgttgaagtgtttcttcacccaccaaattgtgtgctagatgtttccttattgggagattctccctttttcacatcagtaccttctggtagagttggctcttgccatgaagctgtgttcaggtcaaatggagagtttaagaaggttatgccatacaaatatttgagaacacttccataa

SEQ ID NO: 28098 - DNA, 366 bp, Zea mays
  Peptide Sequence Number=SeqID_69877
atggccactcggtccgtcgtcgtcgcgagggctcttatattgtggttttatcactgcatctcgagtggtgtttctgttgcatcgtgctgtggtgttttaagaggtttaaagcaagaagtttgttttggtgctgagtttctatgcttttcaattgccagggatgctctggatgctctggaactgttccgctactgctgcaggcgaatgctcatgacccatgttgacctcattgagaagttgctcaactacaacagagaggattgttgtgagtgtgaacttgcttttgctctcgagcattcaaggactgacaagggcatgttgcatctatgttacgatgttggagattttaatcgatataacggctaa

SEQ ID NO: 28099 - DNA, 2148 bp, Zea mays
  Peptide Sequence Number=SeqID_69878
atgaagctcaggacgctttctatcacgaggtgcgcgccgtcgccgctggggtgcgtgggcatgggcggcgggaggaggaggacggtcctcgtggccctgcgccgggacgccgccggcagggagctgctcacctgggcgctcgtcaaggccgccgccgccggcgaccgcgtcgtcgcgctccacgtatccacggtcgccgcagacggagaaatggccgcggcggaggaggacaggacgagagccagcgactcgctcgcctccgtgctcggcgcgtaccgggggttctgcgagcgcaaccagatcgacctagagctcaagctctgcgaggggccgtccatcaagaaggccctggtggccgaggccacctcctgcgccgccgcgcacctcgtcctcggcgtcaccaggagctccaggccttccggatcgtccgccaccgccaccgccgtcgcgaggtactgcgccaagagagtgcccccgagctgcatggtcaccgcggtcagcaacggcgccgtcgtgtaccgcagagatccagtgcagcaccaccaccagctgctgctcagcccctacagcgcagtggtcgagacgccgcggcggctgtaccgcaagatcctggacgcgaggacggcggcgggagacaagtcccaggacgacatggcgatcggcgacgtcggccggtcggctcgccggaacatgtcccaggcgatgagcgccctggtctcgccgagagtgacgctggcgccgggtacggtgaggtcgtcgtgccacgggcaggagtcgtcatcgtcacctaaggtgtccgccggctggcctctcctgaagaaagacagcatgcctgcgttgccggagctgtcagaggtatctgtggttgagtgggccatgcagctgccgaccaggtgttgttccgaccagagatccgatgagaaacaggttccggaggagctggcctcgctcagagacaagtactcgtccaagtacacagtgttcaggcacagcgacctagccaagatcaccaatggcttctctccagatcgccttgttgggaaaggcggcgccggccgggtctacagggggtgtaccgaaggaggcaaggagctcgcggtgaaggtcctgaaaccatcggaggacgtggtcaaggatttcgcgtcggaggtcgacgtcctcagctcggtggagcacgagaacgccatgtccctcgtcgggttctgcgtcgacggcggcagggacaggctgatgctcgtgtacgactacatgccgcgaggcagcctggaggaggcgctgcacgggcacggcggcggggtgcaagcacctggcaagggcggtggtggggtagcgctaggctggccggagaggtgcaaggtggcggccggcgtggcgcgcgccctcgagtacctccacggcgacggcggcgaagggcaccgccggcccatgatccaccgggacgtcaagtcgtccaacatcctcgtcgccgccgacttcgagcccaagctgtgtgacttcggcctcgcgatatgggcggacgacgcggcagcgcaggtcaccggcgacgacgtcgcgggaacattcggataccttgctccggagtacttcatgcacggcaaggtgagcgagaagatggacgtgtacgcgttcggcgtcgtgctcctggagctcgtctccgggaggaagccggtgagcgccggcgggcccaggggcaaggggagcctcgtgatgtgggccaactccgtcatacagggcggaaaggtcatggacctcgtcgaccccaacctaccgctaccggcgacgggcggcgacggtggcgaggtcgagcggatggccctcgctgctgcgctgtgcatccggcgagcgcaccagcaccggccgaccatgagcaatgtggtgaagctgctggccggcgacggcgacgccgtcgcatgggcgaagtcgcaggtgggcgtgcccggcgacaacgacatcgacggccggcgccacggctgcggcgccgccacctcgccggaggagaagggcggcgacatccagtcctacatcaacctcgccctgcgcgacatcgtggacgacgacgacaacgacgcctcgtccgtcggcagcgccgtgtcgttggaggagtacctcagggggagatggagccgctcgtccagcttcgagggctga

SEQ ID NO: 28100 - DNA, 255 bp, Zea mays
  Peptide Sequence Number=SeqID_69879
atggcggcgtcgttcacgcgggtgtgcctgtgcggacccatctcctgtggcgtcgcgccggaggtacagctattcgcgcgcatcgactgcgtcggtgtccgggtgcgcgagcccgctgccggcggccgagctgcaggccgccgttgggcgggggaggccggccgcgggcaaaggaggcggctgcgagggcggccgccgcgtgttccgcggcaagtcgctgacggacgacgtgctaatgcggcggtttgtggttga

SEQ ID NO: 28101 - DNA, 1506 bp, Zea mays
  Peptide Sequence Number=SeqID_69880
atggacagaagagctggggcgatcctagtgttcctgctcgtcgtcctggtctgggatgtggcggcggtcgccgagaccgagcctggcagcgtgcggctagtacaggaggcgccacataggaaggtggtggaggatggggccaaggcggggagggtgccggtgtcgaccgtcgcgtggtccacgcttgccatggccgcggcgacggggttgggagcggtgcccttctttttcatggagctcgaagcgcagtgggctggcctttgcaatgggctggcggccggggtgatgctggccgccagctttgaccttgtgcaggaagggcaggtgtatggcagtgggagctgggttgtgttcggaattctgagtggaggtatatttatttggctttgtaagaagtttcttgagcaatatggagaagctctggtgtggggtgtttcctttgctggctcaaaagggttctctcagggtcttctagttactatagctatagcagtgcacaacataccagaaggcttagcaccaattgttgctgttcctgcattcctctgtgccgatgcattccagaaggtgcttcccttttgtactggtttcgcagcagggtgcatgatatggattgttatagcggaggttcttcctgacgcttttaaggaagcaactccatctcaagtagcttctgctggaacactcgctgttgctttcatggaaacattaagtacggtgcttctgggatttacagatggcaacaatgtggaagacgcatcaggcttcttagtatcacttgtgtttggactcggtccacttatcggtggaattatactcgtcacattctctcttgggttcagcatgccgcaccctcttctcaccggtgtcgcatccggcatagctttccgtctcgcggcatggagacctgtgcagctcctaatgacctcaaaaatgggtctcttcaccaccctcttcctcctcatcggaggttccctggcctaccacgccgccacatcaagcatcctccggttgttcaatcgcaaaaggtcttccgtgaacgtgatcgcgtcatcctccggcctctctctcagtgccctcacagtgcagtcccttcttgcctgtggcgccgtattccttcacgcatatgctgaagggcttgcgctcggtgtcgcggctcgcaaggcctatggcctcggccgctacatggttctcccagcctccctccacggtcttccacgtggcgctgccgcggcgagctgcgtgtatggtgccacagatagctggcgtggagcccttgccgctgccgctttgacagggctcgcagcgccgagcgccgccatcagtgcaatccttgcgaagatcgactatgatgggcttgactactggatggtcatagcgtgcggggctctgatccccagctttggccgcgtcttcaggcgctcactgcggttggacgtgcggaagagagcaaattggcctgctggtaggtgttgccttcgcctccgtgtgcttgatgtcgactag

SEQ ID NO: 28102 - DNA, 615 bp, Zea mays
  Peptide Sequence Number=SeqID_69881
atggccccgctcgtgccgatgtcgcagccatgggtggagaaataccggccgaggcaggtcaaggatgtggctcaccaggaggaggtgattcgggtgctcaacaacaccctccagaccgccgacctgccgcacatgctgttctacggcccgccggggacgggaaagaccaccaccgcactagccatcgcctaccagctctacggtccagagctgtataagtcaagggttttggagctcaatgctagtgatgatcgtggaattaatgtggtgaggacgaaaatcaagaactttgctgctgttgctgttggtactgcacggaaagcttttcttgtcgtgatggacttcagtggttatccctgcccaccttacaagattattatacttgacgaagcagattcaatgacagaagatgcccagaatgctttgaggcgtaccacagagacttactccaaagtgaccagattcttttttatatgcaactatatcagcaggataatagaaccacttgcatcaagatgtgcaaagtttaggttcaagcctctttcagaagaagtgatgagtagtcgcattatgcatatatgcaatgtatgttttgtcctcaatcttaatgctcag

SEQ ID NO: 28103 - DNA, 192 bp, Zea mays
  Peptide Sequence Number=SeqID_69882
atgggggcgagatccgcgatgactgcccaggagtgggcgagatccgtggttgcctgctcaggcgtggggcaggatccggcgggagccgcggctacctgctcgagcgtgggcaggggcacgcataggaaaacaacaactgaaatatctcgatatgctgttgaagcatgggaaatcaagtgcaacatccaatga

SEQ ID NO: 28104 - DNA, 171 bp, Zea mays
  Peptide Sequence Number=SeqID_69883
atggagaatatgaaccagaggagcacgcagaacctgacactgattacatctgggctcaacaggctaggagggtccttttcagacagggataacacggatgatggcctcggttcatttgtggaacttggaactgagatgcctagacaacagttcatgcttcacttcttttag

SEQ ID NO: 28105 - DNA, 672 bp, Zea mays
  Peptide Sequence Number=SeqID_69884
atggagggaatggaaatggttgcatttttggctgctgaagtaggaccaagagttgcagcatcgtgtgcaagtgcaacattatcaattttgacatgggatgattccaggatgcatgcagaaggcatcgatgctatgggtcatgctactcaactgaactatggaccctcaacatccatttcttctgaaactgtgaaaaatgctgcaatatgtggcttgtcagcagcagcaacaaagtccaagctttttgtagaccaggaggagcatgaatttcagagatcggcggcggatcggatcccaatgcccatgccggaatttgagatggcgatcatggaaagtgcaggtggtggatctatgcgctcggcggctaggaggatgtcggggtggttgttagggccggctgcgacaatgacgacagagccgctacggcctcggatggtgaaggcagggacgacgactgttggagaagtggagaagatacgccgtcaggtgctcgtttgtcattgtgggaagattggtagagataccggcggtggaattgacgagcacgatggaggtgtgcatcgtggtggtggatgcaagcggcagcgtgtgcggctaggaggtggacgacagggtggcgggttgtgttggtggagaggagctcatggtggccggaggatcgtaggcctctga

SEQ ID NO: 28106 - DNA, 633 bp, Zea mays
  Peptide Sequence Number=SeqID_69885
atgggccggcgtgccgctgccgtggcccaggcacggcccgtgagcctgttagtcgtgccgggccggcccggtggcactatggcctatctgacactacgggtcgagatagtggcccaggcacggcactatagtcatgccgtgccaggcactggcactatactaaccagaccgggtcgtgcctggaccgtgctttttcgtgtcgtgcctgggctggcccatcgtgttagtgccaaatggccatctatacccgaccccagggctcgaactcaaccccgactccggaagacggtctccgcctcgcccgaccccagggctcggactccacctcgacctcggaagacggtctccgcctcgcccgaccccagggctcggactcaaccccgactccggaagacggtcttcgcctcgcccgaccccagggctcggactccatctcaacctcggaagacggtctccgcctcgctcgaccccagggctcggactcaacctcgactccggaagacggtctccgcctcgtccgaccccagggctcggactcagcctcgacctcagaggagtcaccgcctcgcccgacctcgggctcgaaccgaccacgtcacaggggggggccatcattaccctacccctagctag

SEQ ID NO: 28107 - DNA, 1707 bp, Zea mays
  Peptide Sequence Number=SeqID_69886
atggtggccacggagatgatgagcattgagcaaagatcgatcaccatcacggtcgcccttggcggtacggcagggagcgagcacgaaaccaggagggccggggtcaatcaaaacccttgcccgaacgaaaaaaaattctatagataccggatggaagtcgttgtcccggcggcgctgtccgagatcctcggccggatcttcgccttcctcttcgacagcttgccccggccctcgcggggcgcccgggagctgcaccggcggcggctggagcggctgctgggcaatatcgccagcatggtcgaggaggccgagggccgccacatcaccaaccagcagctgctctcccacctcaaggcgctcaccgcggggatgtaccgcggccgcttcacgctcgaggtgacggacctcgacgacgtcgtcagcaggaacggcgacggcgacgacgaggacgcgggtgacggcgacgccacgactgccgccgccagtagtgcaggcaagaggtcgttcgcgctctgccggtcgttcagcagggcgaagcgttcccgcgtgacgggcctgatcgcgggcggcgacgggggcaccgagaggctggtcgccgtggccgaggagctggagggcctgacgcgcgactacatgcgcgagttcatcctgctggtgcaggggtacccgcggaaggtgcaccggccggtgcgcacgacgctgtacatggaccgctgcgtattcggccgccacgtcgagaaggagcgcgtggtggacttcctgctgcagcacgcgcccagcgggcgggcgccgtacctgagcgcgctcgccgtggtgggcgccaagaaggtgggcaagacgacgctggtgaagcacgcgtgcgacgacgagcgcgtgcgcggccacttcgtgcgcatcgagtggttcgagacgcccgacgtggtgcgggcggggggcctgccggggcagtacctgtgggagagcggcgggccggagtacctcgccggcgtgcgccacatcctcagcgagccgcggttcgcgaacgcggcggggccgtcgctgctcgtgttcgaggacgcctggcccatggacgagtcggcgtgggccgcgctggcgtcgtccccgaccccgctcggcgacgggagcaagctcctgctcacgtgccgcgacgccgacctcgcccggctcggcacggcggaccccgtggtgctgcacaggctgcagcgggaggagtactggtactacttcaaagcgttcgccttcggcggcgccgacccgcgggaccacccgcgggtcgcggcggtggcgcgggagatctccgagcacctggagcgcacgttcctcgacgcgcgggtgctcggcacgctgctcagggccaacttcgacgcccggttctggcggagggtgctcgccgccatcgtcagctgcgagcgccggcccatgcacgttggagtgctgctcgagctactgcccgtgcgcggcaggctgcagtcgtatgggtactgccggagcccgccaaagttcaccgtgcaggacgtgctcaccgcgcgaccgagtggtcgtgacggtggctcaggctcgggctcggaggaaggcttcactgtccatctctgcaaggagacgctgtacatggatcactggtatagcatcaccttcaagaacgatgtgagggttgtcacattcattgtcggcgtttcgaccccggggggtccctggtccgacgagtaa

SEQ ID NO: 28108 - DNA, 435 bp, Zea mays
  Peptide Sequence Number=SeqID_69887
atggccatagctggcttgacgctcggaggccttcctccgttagccgccgccgctgtccccgtccggccgtccgccgatgtccccgtccgccgacggctcgacgccgagccgctgtccgcctgtccggctggggcctctctctgtccctccgcggctccgcccctgtgcctccgtccgccgaggcgccgagctgctgtccgcctgcgggccgcgggcctgtccctccgtgctccgtccgccgaggccgagccgctgtgccttccggcttcgccgtccgccgagcaggtccgtccgactattcctattcgaatgaaagcggcccccaatttctactcgatgtcgccacggcctccgcgtgtgctgcgcctcctccacctcttcggctcttcctcatctccgccgccgacaactcccgaggagcccgacgactacgag

SEQ ID NO: 28109 - DNA, 861 bp, Zea mays
  Peptide Sequence Number=SeqID_69888
atgtcccaccacgacggaagcaagccataccagccgcgccgggggcccgagcggcacccgcagccagcggatgggatcgccgccccgcctcccgccgccgttgccccgtcggtggagcacctcgtggcggccgccgccgaggcggaggcattgaaccgcttcgccgcggaacaacagcagcagctgcaggggcacgagcaggaggttggggaggaagaggaggaggaggacgagcaggaagacgagatggaggaggaggacgaggatgagcacgaaggtcagcacggcggcatcggtggggagcacgttcccatggacgcggatgctgctgccgcggcggcggcggccgcagtctcgcagatggacccgcactcggcgttggtggctgggaccgtgccacccatggcgaccaaccagctcaccctctcgttccagggcgaggtctatgtgttcgactccgtctcccctgataaggtccaagccgtgcttttgctgcttggagggagggagctgagcagcctgggcggagcgtcgtcctctgcaccttatagtaagaggttgaattatccacatcgggtggcatctctgatgagatttagggaaaagcggaaggagcggaactttgataagaagatccgatactctgtccggaaggaagttgcacttaggatgcagcgtaatcgaggtcaatttacatcttcaaaaccaaagcctgatgaaatagcagcatcagaaatggcatccgcagatggctccccgaattgggcattagttgaaggccgacctccatctgctgccgaattaccatgcacatcagtcatgaactcaagattctccagctttgctggttctggtggttag

SEQ ID NO: 28110 - DNA, 513 bp, Zea mays
  Peptide Sequence Number=SeqID_69889
atggccaccctgtcagctaggttaccgcatgagaatgtgaggtacgaccttggatatgggcacgagcaactgacctatggcatgtgtgacttgatgggacgtgaaatggcacgttcaccgtattgtgcacaggtggtgacttgggttgtcctcgtaggtgacaatggcggagcctggctaatggctgacggtggcaaacttatgcgccatggggctcaactggtgatcatcgtggaggaccacacagatcttggtgctacccttgcaacccctagtgcacccaatgtcggcgagctgcccaggatactgtcggagtggaggagccagggttcgccgatggtagtggcgaggaagttaagagagctgaacgtgatgtggcttcctagagcgaggctctctccaccgatgaacgttgaagtgcgagccatcggagtggaagatgtcacttcgcacgctaacggtcccctacctagcgtaccaaatgtcgcggtttcaaaaactagggggcagtaa

SEQ ID NO: 28111 - DNA, 564 bp, Zea mays
  Peptide Sequence Number=SeqID_69890
atgacgggaaagaaagatggcaagggcaggaggaaggccaagggcaagaagaggaagcgtcctccgactccaccgttggaggactccggcgactcggagccctctgacgataggactcctccacctcctcggctccccgacatctgtttgcatggacgactccatggggctgtcagcgaggagagggcctacctccacgacatggagcacactggcctcaatgactcaaagaagtccgaggaggggatcaggacgacgatgatgggtataacgacggcgacacaggcgtttttttaccgagatatccggaaccacgcaagatcccaactaatcctcgttggtgcccctgcgcaaagggtagtctacaggagggccaagtaccagacgagtaactccatagagagccacgagccttctccacactcaaatgggtcgaggtccattttccttacaggcggcaaaggtggctgcgacggcaacaacagcgggggcagcaacagcggcgacgacggcaagggctgcaacggcgacggtgacgctggtggcgaggctccaccgtgttaa

SEQ ID NO: 28112 - DNA, 1128 bp, Zea mays
  Peptide Sequence Number=SeqID_69891
atgtcgtcctcctcctctgctgccacagccgcggcctcctcggcatccgttccggccgcatcctcctcggctcctcctataccacgcggaggggttgtcctgggggtgcccgcgccgcgttccgcacagacgcccgctggttacactggattccttgttcttgatggcctccagtttaggcaaccttcccctgggactcagaatattgggattgttggatcactcaatacatcccagattagtccaggcacaatatctggtccgcagaagcccagacctggtcttccatcatcaactcctattccatctggtagccaaatgccaggttcacaaagacccccatctcagtctttaatgaggccggtgactgtgagttctccttcgctggcttcacaacaaactccacaaagttcgtcttcaacatttaggccccaacagaggccacaagtttcacaaccaagaccacaacaatctcaacttgttactccacctcaacagaacacaattttaacacagcagcagcagcagcagaaacaacaacagagtgcctcacatcaaaatcaacaaattgctgcccctaaaaatcagccacagctttctcagcatccaactgctcgtactccaatatcaatgacaccaaagcctgatttgcctgctatacaaaatgttgctgttttacaatctgtggatacagctgcaactgatgcaaatgctagtgaaactggtactcgattactcaccaagagaagtatacatgaattagttgcacagattgatcctaatgaaaagctggatcctgaagttgaagatgttcttattgacatcgcagaagattttgttgagtctgtcacaacttttgcttgttctttagcaaagcataggaagtcaagcacattagaagcaaaagatgtactcctacatgcagaaagaagctggaatatcaccttgccaggcttcagtggtgatgaaatcaaactgtacaagaaacagcacataaatgatattcacagggagaggcttgctctgataaagaagtccatggcgactgacacgagaaactctgctgcccaagctgcagctaaccagaaaaatcagactccgaaaccacctgccccagcttccccgtga

SEQ ID NO: 28113 - DNA, 133 bp, Zea mays
  Peptide Sequence Number=SeqID_69892
atggccatcattttccagcacaagatcgctctccgccctggatctagagatggcaatgggtacccgaaacccgaatacccgacgggttttacacgatatgaaggcgggtacgggatgatttctctacccacgg

SEQ ID NO: 28114 - DNA, 3189 bp, Zea mays
  Peptide Sequence Number=SeqID_69893
atgcccttaaccgggagaggtatcattcaagtttggtgtctgttagcaccatttgaagattcacattctcaccagccagtgaatgcattcaataatggtaagcaaagaggaaggcctagaaaaataccttgtagtgataagctggtacctgttccaaaaggaccaagggggaggccaaaaaagagatcttacgatgatcagttagaacctgttccgaaaagaccaaggggcagaccaagaaagtatccattaccagttgcaaaatttgaaggttcatctcaaaacggtgaaagtcaggatattattctttttgatcccctttctacttcaagttttattccagatgacctttcattggcttctgtcatgccaactgaaaagtctgtgcaatcaacacctaaaagaggtagagggcgacctaggaaaaacccaagtgacaaactgacagactcatctggtattgtatcagaagatgtgtgtacagccctacctccaacaactgcaatctctacaaaacctaaaagaccacgggggaggcctcgaaaatatccaattccaatgaatgatggatctgtttcaggcgctgatgttgaattagggaaagagacaacttgtcagactgcttcatttggctgcagtttggaccacactgcttgcacagagtttaatgccaagttatgtattgttgcagttgatgcagcattgccacctattgacaaactgacctgttcacctggtactgtatcaggagatgtgtgtacagccccaactctaacaactgcaatctgtacaaaacctaagagaccacgggggagacctcgaaagtatccagttcaaatcaatggtagatctgtttcaggcactgttgctgaattaggacaagagtcaacttgtcagccagtttcatttggccacactgtttgcacagagtttaatgctaatttaagtattgttccagttgatgcagcattgccaattgtcgacaaactgtgcagttcatctggtactgtagtaaaagaaagtgtgtgtaccgaaccatctccagcaactgcaactcgtaagcaaccaaagagaacacgggggatgcctcgaaagtattcagacactatgattgacctggggaaagatacaactggtcatcctgttttatttggacgcagtatggatcacactgcttgcacagagtctaactctagttttagcattgttgcagttgatgcatcatcactgtttgcatcttcatctactgcaacttgtgatgataagtcaaaaggtcagagcattagagggaaagataagaagaaaacaatttctaatgctctatattgccctgtggtttctggtgttgaatcacagagcatttgttccacagaaattcttccaaatgatcctgcagtctctgttgagaatgctttgccatctgcacagaacacggtatcaatgaatgagctttgttcggctagcttgttaaaccgtgagggtaatgcgtgtaaaagtgctctttcagatgattctgaactgcctatccacatttcacctaaatcaagtaataaaagagagtcaagtggcaggaggggaagaggaaggcctaaaacgataccactttctgctggaactggtcattttgtggcttctgttgccagtctcccaaagacaacctgtgtactgactagttcaagcaatctcacgtcgttgaacaagagtggtggcaaatttatagtaagtagcgttagttcatgtggctgtgatgttgagaaatgcagtgttcattcaggtgttttgttgtctgatgatgcaccaccagcacatggcttacaaaatacaaattgtaaggaagaatcgaataccaaaataggaaaagcgggatctagaaataagcctgttgcagttgagcacaatcattttactgatcttaatgtaaaagaacaaaaagtgcagacaactccaatgtcaggtgatcctgtgatcttggttgaaaattgtatggaaggacaaggccccagaaaggctggggggcaacttcaaaggatacctgcttcaaacaagagtagtggcgcatctgttggtggtggaacatataaaatagagacattatccacaccaatgactaaaggatcatctaaaaataatgacatggcttatggggctggtttgaatcagtctcagaatgcaattgttggttgtgaaggcatggaagttattgaaagcaacactgccaattatacttctcattgtaatgaaaatgcacgagcaaatcaagttgcacccagtttcaagaacagtgatagggtcattgatgaaacggaagctgcggaacttgggccactcaaggaaccaagggaagatgacaatttgtttacttgtgtaaactcaaactcagcttcaattacaagtgacattgctcaaccaagagttgtcttgtgtttagctcacaacggcaaagtcgcttgggacatcaaatggaagcctcctttactaagtcaacctgaacagaaatcacgacttggttttcttgcagtattgttggggaatggcgctcttgaagtgtgggaagttccatcaccatgtatgatccagaaaatatattccccctctaaggtggagggttctgaccctcgttttctaaagctccaacctgtatttaggtgtgtcaaagtgaagtgcaggaacaggcaaagcattcccttgacagttgattggtcaccttctcctcctcatgatatgatattggcgggttgtcatgatggaacggttgctttatggaacttctcgatgaatttgccaacacaagattcaaaaccttttatgtgtgtcactgctgattctgttcccattagagctctctcttgggcaccatatataagtgaagaaagcacagatacctttgtcactgctggagaggatggtctaaagttctgggatttaagagttgcttcctttggtgattggtggcggcatactaatggggcagtatctggccccagccccacaagccaaggtctgaattctgtgattgttctgggagcttggtccctctggggacatcgcaatagatgtgtgttcgatggagcttcgcctaacctttcaggccttgtgatccaggtctcagaggaactagatcgttggagtttagcgggggcaaagggtgtctctcacctagctgcctggactctggagttgagtacttga

SEQ ID NO: 28115 - DNA, 300 bp, Zea mays
  Peptide Sequence Number=SeqID_69894
atggtcatgcggcggtccgcgggtgttctttgtctcgtcggccgactggtgctcacgaccgccaccgctacacctccctcatatgtcccatccccggttcgtagcgcgctcgtcgatccccactggtgtcgtgctatggaggaggaatatgaggccttgatggccaactacacctcagacttggtgttgtgccccctgacaccaacatggccacgtggtcatcgacaagcggtccaccagttgaacgtcaataatgtcttccttcatggtactctgaccgagacgatgtcctgcaactag

SEQ ID NO: 28116 - DNA, 2811 bp, Zea mays
  Peptide Sequence Number=SeqID_69895
atggcggaggcgatcatcgggcctctggtcgggaggctgcaggaggtggccgtgggcgaggcccgggcgctggtgggggtgaacgccgacatccaccggctccgcgacaagctcatgtggctgcaggccttcctccgcgaggccgacaccaggcgccgggccgtcaccgacgagatcaccagggtctggacgctgcagacgcgcgacgccgtgttcgacgccgaggacgcgctcgaccattaccacctccgtgccgacatgtccaggtacctacaagccacagaaccatcgatggccgaattattgttgcaacagacattcacgactcaaatacggatgagacgcggcctctccagaaaaatcagagccatcaacatgaggcttgatggcatcattgaaaacaaggataaatacaagatagaggattccaatacgaagacaggtgtgacatggaagccttctacctcgacatctatacgctacactcatagaaagctggatgatgtccacgatgcagacgcggtgatctatatggaggagcacgacaaactagaggatgcccttgtcaacaacaacctagctgaacaccaagacggcaaagacgaccactacccagtcatgatcaccgtgtccggagaaagcggcatcggcaagacaactctcgtgagagacatctacaaaaagatggagaaccagaaagtgttcgaggtgcaagccatggaaagcttcgcgccttacctgaccgctcccaacatcctccagcagatcacccagcagctgacgcaggacgacaccaactgccctaaagagatggcgcaggagatgctgcagagcaggctgagaggcaagaagtacctgctcgtgatcgacggcgaggtcagcggcactgagtggaagcacttcttgaccagcatcccggtgggcgccaggggcagcagggtggtgcacatcacgcagggcaagccggaagagccgcctagcagctaccaccacgtcaccatcgagctaaagaagctcacggaagacgccgccatggcgttgttccggcagaggctgcccaaggagctgcaggacaagaacctcagcaagtaccggaagagcgttttcaagatcacccaggggctgcctctggcggtggttctcttgtcgggcctcgtgcagaccaaggtgttcccgggcgagtgggtgaaggtcttccactacctcaagtccaagccgtcgacggcgaacctcgagagcatgctgtcggtctgcttcgacgacctcccgcacgagctcaagtgctgcttcctctacttcgccgcgctgccgaccaacaccacggtcgaggcgcgcagcctggtgttcatgtgggtcgcggaggggttcctttcctccaagggcgggaagacgatggagaagatcggcttcgtctacctgtccgagctgatcagccggaacctcgtcaaccgggccaaaatgaacgacgattccagcttcgggagcatgctggtcacgatccaaaccaaagtccacgacttcctgcagatagaagcgcatgaggcgagcttcgtggaggtccacagcaacgacgacatccccacgctgaccagcgctcgccgcctctctctgcagaactacaccgacaagtacgccgtcctggcgcacccgctgccgaagctacggtccatcttctcccagtacgagcaggagcctaacaagggtgaccgggggcaccaccacaggtccaaagggagccgggcgtacatgttccggttgtcccagcaaagggcgatctcgaagatgaagagagacatcaggtctcacatcaaggacctgttccatgggtccgagttcctccgcgtcatcaacctgcagggcatcgagatcggcgagactctgacgagcgccatcggcgaccttgtgcacctgcagtacctcggcatcacgtcgtgctcgctgagacacgtcccgtggtccatcggaggactcaccagcctccagacactggacgtgagggagaccaacgtccgagagctcccgaggtcgttctggatgatcaagaccctgcggcatgtgcttggcttcgtcctcaagctgcccaagcagatcggcaacctgaagcagctgcatacgctcgactccatagacctcgagcaagtttcagaggagacggatttggtggagacactaggagagatgatccacctcgagttcctctccatctggcacgtctcgcatgccaacgtgaaggctctctccgctgccatggagaagctcgagagcctcaggaccctcatcttggaaggaaagatcatcccttcaaacgtcttcaccaccgcctccctccgccgcgtcaagttcatgttcctgagcggggacctgctgcgttcatctgatctagacgacggtggtgaatccttcatcctccctaacctcgccatgctctctctggagaagacgtacgtgacgcaggagttcatcagcaagctgtctgagctgccgtctctcaccacccttgcgctgtaccctggctcgtacagggacaagaaactcgtgttcgcttcggccaagttcccgcgcctcaagaggatcaagacggtcgacgtggaggtgctggagagcgtcgaggttgaggtgagcaaggtccctgagctcaaagagctggagatccactcctacttcacaggtggttatcatcacattgacctgggtagtgaaaggaggaagcgttctcgaaagacgaggatcgtggttgatttgaagaaagtgaatggtgctgttcatgaagaaaatgctgacacttctggatggtggatgatattctcgtga

SEQ ID NO: 28117 - DNA, 1419 bp, Zea mays
  Peptide Sequence Number=SeqID_69896
atggaggcccaggcccacacgtcatgtaatcggcacgccggttactacgtgcaagaaactgcaccgccactcgcgccagacaggcggcacctttggcaggcgaagcaggcgacgcttcacctccgccataatgaccgcgtcaaaaaagggatcgggaaaagggatactccgaaagggatccttctccgcgaaggaagcgggccccgagcccccctactgatcagaggttcgaaggctggcccctcggaagggttcaatagccgcctcagagcactcgggctctgcgcccactactggtcagagggctcggactcgggctcggcctcggaagacgacgaactccgcctcgcccgaccccagggctcggactcgggctcggccccagaagacgacgaactccgtctcgcccgaccccagggctcggactcaggctcggccccggaagacgacgaactccgcctcgcccaaccccagggctcgggctcggccccggaagacgacgaactctgcctcgctcgaccccagggctcggactcgggctcggccccggaagacgacgaactccgcctcgctcgaccccagggctcggactcggccttggcctcggacgatagtctccgcctcgcccgacccagggctcggacttgggctcggccccggaagacgacgaactctgcctcgcccgaccccagggctcggactcgggctcggccctggaagacgacgaactccgcctcgcccgaccctagggctcagactcgggctcggctccggaagacgaagaactccgcctcgcccgaccccagggctcggactcgggctcggccccagaagatgccgaactccgtctcacccgaccccagggctcggactcgggctcagccccggaagacgacgaactccgcctcgcccgaccccagggctcggactcgggctcggccccggaagacgacgaactccgcctcgcccgaccccagggctcggactcgggctcggccccagaagacgacgaactccgcctcgcccgaccccagggctcggactcggccttggccttggacgacagtctccgcctcgcccgacctggggctcggactcgggctcggccccggaagacgacaaactctgcctcgcccgaccctagggctcggactcgggctcggccccggaagacaacgaactccgcctcgcccgaccccagggctcggactcgggctcggccccggaagacgacgaacttcgcctcgcccgaccccagggctcggactcaggctcggctctggaagacgacgaactccgcctcgcccgaccccagggctcggactcggccttggcctcggacgacggtctccgcctcgcccgacccggggctcggactcgacctcgacctcggaggagcatccacctcgcccgacctag

SEQ ID NO: 28118 - DNA, 2715 bp, Zea mays
  Peptide Sequence Number=SeqID_69897
atggccagatgggatctagaacaatttaaaaacgaactggatgaattcttgaaaggacaagagttgtactctcttgtgtcaattatatataggtacttgatcgttgttgatgacatatgggatgttgactcatgggaagcgatcagatatgtcttgaaggacaataattgtggaagtagaataatcatgactactcgcaattccggggttgtcactaaagtagaggaggtttatagattaaaacctctttctactgaaaactccgagaaattgttctacaaaagaatagagagtcaggaaggagaaagccttgatggtgaactctctagtaaaatcatacataaatgtggcggcataccattggctatcattgcaatagctagtttgttggttgaaagatcacgtgaggagtggccagaagtgtatgacaagattggtcttgggaatgaagacaatacaacaaagataatgttatacagctactatgatctgcctccttatctcaagccatgtctgctgcaactaagcatatttccagaagattgtttcattgatacaaaagctgtgatatggatgtggataggtgaaggtctagtccatcttgagaaagaggagggtagcctatttgaggttggagaaagatacttcaaggagctggtgaatagaagcatgatccagccgatagaggaaaaatatcattggtttgtagaaaggttctgtattcacgacattatgtttgatctcatctgtaagttgtccaaggatgaagacttcattacccttagcgggcaacattcatctcagtcactgcaatctctgttcaatctgcggtcagactgcaagctacgtcggctggccgtccgaaatcaacgtgtgcagcgcttccctgaagaaaccatggacatgccagaggtgttgagatcacttagcattatagattgtaatattgaggttatggccccaattgatagcttcagggtttgccgtgtgctgcatatagaaaacaactacgtacccatcagcctaaagcatctagggaagctgttgcatctcaagttcctagagatatttgacacgactattgatgagctccctagagaaattgggcatctgaggtctcttcagacactggtattagtcagtactggactagacgagctgccagtggctgtttgctcgcttacacggctcatgtgtctgatagcctatgggttcgaaaggttgccagctgacaggatagggaacctaacgtccctggaggagctacaactacatagggtggttggccggagtgccacccaagacctagtggcagagcttggcaagctgacgaggttgagggtggtcagaatcaccttctcagagcagctagaggagagctcgcaagaagcattagtgcaatctctgtccaatctgcggttactccaggaactagtgcttttttctgaaatgccagagcggggaagcgatatgtggggagactgggagctaccaaggcagctccggcgcctgattattgaaggcatcgtcttctcacgacagcctcgatggatcaaccgctcctgtctgccacgcctctactccttatatctgatggtgcacgctgttgaagcacaggacctagataatctagcgaggttgccagagctccagtacctcatgctatttggtttcagctggcctccaaggtatactgttggcccagacgacttcaggaatctaaggttctgcgaagtgggcacaacgttcgagtttcgtaagggcgccatgccaaggcttgaagtgctgcgatttggagtttgtgtgccgttcgagcagttcccaacgaaggatgtgatcgaagatcttgacttcgacctggataacgtcattttacttcagcaagtcagggtcaaagtcaactgtgcaggtgctactgtcacacaagtggaggaggtggaggccgtggtcatgcgtgccgtggaaaatcatgccaaccgtccaaccataaaaatggatcgagtatatgaacaaaatatcctatccgacgaagagcgggaggctctgcttcagcgacacattgaaaaggattgctgcgtgcgcacgatgaaggataaatctgatgctttcttcatcagccagctgcggaggtatcgacatcttcagaaagccattattttcatcgactgttcgggtgccagcatgtgtgaggttcagaaagtggaagcagcttatagacatgcagccgaggttcatccgaaccatccaagtatcgaacttatcagaacaaacaccgacggaatggcctcctcctcatctgaccatcccaacacagaggtaaatataaggatgatattatctttgtatttgaactctagatgcttaaatgaagtgatcatcctggatggagataagtatggtcagcagagggttgcctggcgcagcatatgggtatctggcttgtttttctaccggtctggtgcacggcggccagcgctgtgtatttgcaggaaggcagtgaccactgaccagtggaccgaatctggtggtgccgccgaatgcacgggtctctggagattgaaacagattgtaagtgtcttcgagatactctcacgtcgaatgagattgaaacagattggagaggcaaaagagttgccttccaatatattagataataaggagaaaacactgtacaaaaactggcacaaaaaaggcgccaacaccaaaaaacactag

SEQ ID NO: 28119 - DNA, 423 bp, Zea mays
  Peptide Sequence Number=SeqID_69898
atgcatcggcacctggtgagctgcgtgaccgcgaggctgctggtggtggtcgggagaggcgcgacgctgccgtccagggagacgcggtggctgcagcacgggtgccgctgttttgaccgcgccgcggtggaggacggcatcgagcagaccgtcctaactcctgacgctaccactggaggagcagcaggccgtgctactagcgtggctgggcaggttcctcaaggccggaggcgacgggttccccaacaagcagcgggcgttcgaggtgtggtggaggaggaccttcatcaggcagtacgccgagcagcctgggagtgggagatcatcgtggtcgtcgtcgtcgcggcagcactgaccgtcatccagtggttggctggaaacgacaacagtccatgcgatgcagtttctttcaagtttcagtag

SEQ ID NO: 28120 - DNA, 684 bp, Zea mays
  Peptide Sequence Number=SeqID_69899
atgcgcaggtgggaacgtgggagcggggctggcgcgtgggcctggtggggcaccacctggtggctggctcgcagctgcaagctgctcacgcgtgggcgcgcagcgctgggtggcctacggagcatggtgtgtcgtggctgggctacacaacgctgggtgggggcgcgcgctgttgggctgcgcaaaggatcctcctggaagctgcacggcgaggatcacagggctaaccccgtgctaaggagagtgacatctgacacccttgcaaatccgccgaacgacacccttgcgcacatcattgagctggtgctgaagagcagcgaggacagaggccggcgcgagatgaagtctctggtcctgaagctgttcaaggagagcagcaacggcagcgctaatagttcttcagcagactcgtcctgtatcacgaccttgtacgaatgtttccagaactgccaggattccctgctagtgctacctcgcgaagctaccggtgcagacgagcttgcggtcgaagaagatttgtcgtcaggcagcaaagtgcaggcgttcagaaagatcggaaagatcgatctagaggcggacaaccttctctggctagcggagatcttgtcggaccggcacgcggtcgacgagctagcgtccatctgggcgaggcagacggagctgggccgcggagctacacactag

SEQ ID NO: 28121 - DNA, 159 bp, Zea mays
  Peptide Sequence Number=SeqID_69900
atggtcgcccaaatcgacagcgaacataggactcaaaatctgcctgtcaaacccatcgaagtctctgcgagcaaccggtccaacagactacccacggccaagcggccagaccccgcacacaaggaactcttcaaccaagtccctgccactgcagattga

SEQ ID NO: 28122 - DNA, 309 bp, Zea mays
  Peptide Sequence Number=SeqID_69901
atgcagggtgccagagtccgtggaatatttgatggggtaggggcccactggctttgcggggcccggtgcggtggcaccggctgcaaccccccagggccggccgggacctacaaaagcgggattgagtcattggttcatgaagggtgcgaccacgtggcccatttgtcctcgtccgactttggtgccaacgagaacctttacccgaggttggcgaggttgcttagcgtagctgcggacgagatgctcatcgcatgtgggtcccctttcagcgctgaagtttgcctgcaagcgctctgtggtggagcttga

SEQ ID NO: 28123 - DNA, 468 bp, Zea mays
  Peptide Sequence Number=SeqID_69902
atggccggcaacgacgcataccgcaagtccttcctcgtgtcggccgtcgtgcactacacccgcggcgcggtgtttgccacggttgctacgcagatcggggtcacggcggtggcggggcacctaggcacgcattccgcgctcctgttcctcaccggcgccgggatgtccgcggcgccatcttccgcctcggtgcccgtcttcacctccacgccgacccctgtgcggtttcttcgcaacgcgtgggtgatgttcatggcttcgcacggcggggatttgtggctgatgcgctcggtatccctcaccatcgtcgttcaatgccacggatccgcgcctcttcgagaacatacagctggggtagtattgctaaagagcccctggggattggatgaattaacccgcagtccacactgtgggaagcctgagtctgggaaatatttcgagttagcccctgcatttctctgtttttga

SEQ ID NO: 28124 - DNA, 231 bp, Zea mays
  Peptide Sequence Number=SeqID_69903
atggataaaaatctggagcagggagggagcgcggactggggatggaacaggggaaaccacatggtgtggggagcagctcggtcaccaatggttgaagacgagcggagggaggcgagctgcgcgtccagagcgagctggagaagccgagcaagggaacggtcctgggtggccggacatgagggagatgagggagagaagagctcgacctgggatggggtgcgcggctactag

SEQ ID NO: 28125 - DNA, 462 bp, Zea mays
  Peptide Sequence Number=SeqID_69904
atggccaaacgggccacccgacccggcctggtaaagctcggcccgttttgggcccggcccgctaggcacgctacactgaaaattcacatggacaacagaccatgggatggtgaactgtttcgctggccctggaacttaactgaaccacctctctgttgcatagtgataataagcccaccaagctcccccgaaccgtcgagatcggacccgtgccgatgcctgttcgccagcggtggtgggcactcgtcaagggcggcagaggctcctcctcctcctcctcctcccagacacgagcccgaccaggtcgtatctggtccaccaccggcagcagatggggctagcggctacagctcgccgttgcctgaagttattcaccccgctcctgctcctgaaaccaacgggcagacagtacggaagcaggcgggcagcagatctactaccccgctaggcccctgcaaatag

SEQ ID NO: 28126 - DNA, 2319 bp, Zea mays
  Peptide Sequence Number=SeqID_69905
atggccgagctcgcagccggcgccgttggctcgctcctaggcgtcatccgcaacgagatgtcgttgctgggcagcgtccggggcgacgtgcagttcatcaaggaggagatggagagcatgaacagcttcctgctccacctggccaggacggcgcccccgggcggcgagcacgacgagcaggtgcgcacctggatgaaccgggtgcgcatgctcgcgcaggactgcaacaactgcctcgacctctacctgtaccggggcaaccccgacatccaccgcgccaggggcggcgtcaggcgctacctgtggtgctggtgggtcccctggttcctgcagaagctggtcgggcagcaccgcgcggccgtccagctgggcctgctcaagctccgggcgcgtgacgtcggcgagcggcggctgaggtacggcgtagagatccccggaaagtcgtcgcctcctgtggctggggcagctgctgcgacgccaccgccgctgccgtcgtcgtcgtcatgggattcagttcaggccgctgcacctgccccagatgggtacgacgacgaagaagacggcgatcctcagctcgcggtggcggctatggccaccgccgatagaaacgccttcattgaagcttgcactctggtggactactttcaggccaagctggtggagtgggttgaatcacttcagatagacgccagcgagacgttttccatctctgttcttgtaccggaacgggaaccacaacacatgatggcggacgccatcgctcttgcacaagaagctctgatttttccatccgcgggtgggttcctcgataaccttggctacaaccgtgctgtcttgatcgacatcccagcagtacacctggatatgttgccgctaggacccaacgaggctctatactacatcctgcgccagctcaaactcgagtctcagtcccatccgcaggataaatcaggccaaggggaggatgtcaatgatggtcttgattcctggcaagtttactgcagaaaactgggcatctaccatgaaaaaaagctcatgcttcgtgaaatcaaggagaaaataaaggaaatgaagattgacgacaagctcgacaagatcaagagtgctatccgcgatcgacgttccaagggcgcccacctgcagcagctgcttcagctggagcttcagcagaagaaggacgtggagcagctggacttggatttacttcttcatctgctcctccaatcacaatcagcatcgtcggctcaagaccaacggaaggacgacgaaggcatggataaattaccagaatgggacgacaaggtcatcgcaaaaatagccaggaagctcaagaagcacatggaagccaccggtgaagaagaagccaaggagcttaataaagagcagcaaacgggaacagaagaagaacaggaaggaaacagacaagtcgcgaggcagcagcagcacatagccccaatttgtctccctgaagatcaatataaacagatcctgctagaagtgttcccaaaggccggcagcagcgagcagcagagggacaggccggcggtgaagcaggaggctacagaggcgacggcgctgactacagtagggaatcatgcagtaacaacaagtgaacttggtccgaacggaaaagctgttttcgagactacagttgatcagaagatggccaagatcaagcagaagctgaaagagcggctgaagagctacgcgctagcgaccaagatcaaggaacacttgaactatgtctgccccctgatcatcctcatagtcaatgagaagatggacggatccacatggaccgagaccagaaacgccttgagtctgctagcctgtggcaccgatgcaatgatcgtcactaccacgaggagcgcccagtgggctaaggaatactgttacccacagcgggagcctatcgagtattccctcgccggccgctactacagtaccgtgctccagcttgcaagccggtgccttgtttatccggttgataccagcgccactggaaaggtcaagagctgcatggcaggtgctccagttcatcagatcattacaaagattgcaaggaaccagcacattttggagacacgcctgtcgcatcacctggcccgctacttctcgattttcaacgaccttcgactccgcggctctgaaacaatcagtactttctttcaagatctgtctaaatcgtctcaggtgtccctgctcaagggacgagcactacttcgtagtcgtctgccgcaagatgctgctgctcaagtatctgagcctaaggagaacaaatctacaaaagctgcccagcgaaatcaacaatctgcatga

SEQ ID NO: 28127 - DNA, 345 bp, Zea mays
  Peptide Sequence Number=SeqID_69906
atggccggcaacgacgcataccgcaagtccttcctcgtgtcggccgtcgtgcactacacccgcggcgcggtgtttgccacggttgctgcgcagatcggggtcacggcggtggcggggcacctaggcacgcattccgcgctcctgttcctcaccggtgtcgggatgtccgcggcgccatcttccgcctcggtgcccgtattcacctccacgccgacccctgtgcggtttcttcgcaacgcgtgggtgatgttcatggcttcgcacggcggggatttgtggccgatgcgctcggtatccctcaccatcgtcgttcaatgccacggatccgcgcctcttcgagaacat

SEQ ID NO: 28128 - DNA, 303 bp, Zea mays
  Peptide Sequence Number=SeqID_69907
atggcgctccacaagctctgtgacgacggcggcccccagctctcttacggaagcagggcgacgtcagcaaggactcgacctctccaacagctgtccctccgccaggctccgtcgcacctccgacagccacgacatcacgccagcaaggataagtctgaaacccaagggaccctcaagcgcttcctcaggagagctcaaaatgagttttgtaacacccctggtgttactaaaactgaaatctggcataacatcatgtgcattagcatatctgtgattttaatgactctagagtgcctttactag

SEQ ID NO: 28129 - DNA, 585 bp, Zea mays
  Peptide Sequence Number=SeqID_69908
tgcggagtattataccgccgtccgttgcagacttggaggcagccaaggcccagcccaagagaggtccaaagacccagcgccgagtgcgcaacggcacattctgttgtctctctctcctctccaacacggggtccacagtacacaggcacacagccgcccgcccgcccggcgcccgcacaggcacagcaactgagggagccccgacagcccgcactcggcactcggcaccagtccaccgcgccacaggctccaccctcccctctcggcccggctcgatggggtccggcgtgtcgtcgagcatggcgctggcgctggcgggcttctgcttcagcgtcctcttcatcgtcttcgtctgcacgcgcctcgcctgcgcgctcgtccgccggcgccggcgccaggcccgcgcccgcctcgcggccgccccgccgctcccgcactacgcccacggctacgccgaccccgaccctttcccgtcgttccgcgccgccccgccaccaccaccacgcccccgggcctcgatcccgccgccttccccacccgcgcctacgccgccgcacaagcctccgactccgacaacggctccta

SEQ ID NO: 28130 - DNA, 315 bp, Zea mays
  Peptide Sequence Number=SeqID_69909
atgggaggccgctccgttataattcaccggactgtccggtgtgccagcggagcaacggctacttcgctccaacggtcgactgcaaacgcattcaatgcgctacagtgcgcgccagagtcagagcacgcgcaattggcgcaccggacagtctacaggacatgtccggtgcaccaccagacagcccagaggccccaccagtcagagctccaacgctccataagaccaaaatcccccaaggatgtaaatgtaaaagctgagaacgcaccatcgagtgccgaaaagaaaacagggaagaagctccaaagtcgttcctaa

SEQ ID NO: 28131 - DNA, 393 bp, Zea mays
  Peptide Sequence Number=SeqID_69910
atgcctgatagtggctgggttcatgatgatgaggacatggttgatggctctttatcgatacaacttggtttgcctactgtttcttctacactttctctcacattttccttcctcaacctcaaggttataggattaatatcactgggtgactttctggagttgcatcgatggttccttttgcataatgttgagtattacagagcttcatcacaaacaaaaattcatgatgggagtctccttcaatgccgaaggtcttcaagacaaagatataccctgaaaataacgacaatgaacgccgaagctatagccgaggaatatcagcttcggcttaaagtggtgtcgaagagcaagcatgatgctgaactgaagaggaaaagactaattagttcctaa

SEQ ID NO: 28132 - DNA, 345 bp, Zea mays
  Peptide Sequence Number=SeqID_69911
atggctgtgcgcacagggaactcggcattggcagctcgcgtccacgacgagcaggcagggacgagcgcgtgcagcagcgagcgaataccagggcgcgctggggaaaaagatggagtagaggacgtcggcacaagacagagccgagctggagccaagaacgcggtccgaacagggagcaccagggacggccagcagaggagattgcgcgcggggggaaaaggagcggcgcacgcagtggaggagcaagcaggaagggaaaagctccgcgcgcaggggaactcgacggctgggcacgtggcgaggaggctccagggagcttcacggcgaccgccatgggagagctag

SEQ ID NO: 28133 - DNA, 1659 bp, Zea mays
  Peptide Sequence Number=SeqID_69912
atggtgcagtccgtggaccgcatcgtgcaatgcctcgcgtgcttctggatcaagatccgcggcatcaagcctcgtatccccgcgtccgccggcggcaagccccgtggaggaactactggaaggaagagagtggacgacgttgagaacggtgacgccgacgacgaccgctacttccccatggtgctcgtccagatgcccatgtgcaacgagaaagaggtctacgagacgtcgatctcgcacgtgtgccagatggactggccgcgggaccggctgctgatccaggtgctggacgactcggacgacgaggtgtgccagatgctgatcaaggcggaggtgaccaagtggagccagcgcggcgtcaacgtcatctaccgccaccgcctgtcgcgcaccggctacaaggccggcaacctcaaatccgccatggcctgcgactacgtcaaggactacgagttcgtcgccatcttcgacgccgacttccagcccaacccggacttcctcaagctcaccgtgccacacttcaaggagaacccggagctcggcctggtccaggctcgctggagcttcgtgaacaaggacgagaaccttctgacgcggctgcagaacataaacctgtgcttccacttcgaggtcgagcagcaggtcaatggcgtctacctcaacttcttcggcttcaacggcacggccggcgtgtggcgcatcaaggcgctggaggactcgggcggctggatggagcgcaccaccgtcgaggacatggacatcgccgtccgcgctcacctcaacggctggaagttcatattcctcaacgacgtcaaggtcctctgcgagctgccggagtcttacgaggcttacaggaagcagcagcacaggtggcactccggccccatgcagctcttccgcctctgcatcccgaccgtctttaggtccaagatcccgttctggaagaaggcgaacctggtgatgctcttcttcctgctgcggaagctggtgctgcccttctactccttcacgctcttctgcgtgatcctgccgctcaccatgttcgtgccggaagcggagctgcccatctgggtcatctgctacatccccgtgctcatgtccatcctcaacatcctgccggcgcccaagtccttcccgttcatcatcccctacctgctcttcgagaacaccatgtccgtcaccaagttcaacgccatggtgtccgggctgttccagctgggcagctcctacgagtggatcgtcaccaagaaggcgggccgcacctcgtcggcctccgacatcctcgcgctcgccgaggccgacgcccacgcccacgcgccggcgccggcggccaagctcgtgcgcggcgtctccgagggcggcctccaggagtggggcaggctgagggagcaggaggccgccgagtgggccaacaaggaggacgccgccgcggctctggctgccgccgcggccccggccacgcccaagaagagcagcaacaaggccaagaagccgccaaaccggatcttcaagaaggagctcgcgcttgcgtgcctcctcctcacggccgccacgcggagcctgctctccaagcaggggctgcacttctacttcctgctcttccagggcgtcacgttcctcgccgtcggcctcgacctcatcggcgagcaggtcagctag

SEQ ID NO: 28134 - DNA, 261 bp, Zea mays
  Peptide Sequence Number=SeqID_69913
atgaccggtatagggactactaaggggactaaagaaacaagaacaacaacgactaattcatccgccaatatatttccgaaaagtcgaaaactaagtgataatggttttgtgaaatcttctaggatgttaataggaactaaagaggccggccttcggcaaagggaaagcgtgaaaggatttaaaaaaggtgttcagcgaagtatgctagccattggccttacgttcaggatactccttcctgtccttgcgatgtttggttaa

SEQ ID NO: 28135 - DNA, 516 bp, Zea mays
  Peptide Sequence Number=SeqID_69914
atggaaaatcaaggtgctgttatgaagattttattagataacaatgcagattgcaacaaagaagttccccccatgtttactcctttgttcactgctctcaaagctcgctcactgagctgtgtcaagcatctgattaaggctggtgctgatgtgatgaagggggttcataagtgtaccccgttaatacttgctgcaaatgagggcttaacagatttttatgaatgtttactggaggctggagctgatcctaatgttcctgatgattctggactcctgccaatagaaattgcagcctttaaaaatagaagaaaagatgttgagatacttttgcccgtaacatctcgtattccgtctgtgcatgactggagtgttgattggctaattgcctatgtcaagtcgttgtcaacagatgaggatgatcctgtgtataaaatgaatctggctgatttgaagtctgaagcaagcaaggcatacaacgaaaaagattatcctactgcagtaaaattctactccgtg

SEQ ID NO: 28136 - DNA, 393 bp, Zea mays
  Peptide Sequence Number=SeqID_69915
atggcgccgccccacttctgcggcggtaggctggaccggcggctcctgctggcggcggccaatgacgacctccgcggcttcaagaggtctgcgagagcgcttgacggcgggaagggccgcatcagggaggcggtggagaccgccgccatgatcagcgccgccgccgctctcggagccctgcacgtcgccgccgcaaacgggagcacacgggtctgtgcttacctagtcgaggagcttgagatggacgtgaacgctactgccgtcgggtcagttcgttccaaaaaaaatgtggatgctgtgaggtatcttcttgatcatgatgctgatccaaataaacgtgtgcatcatgggtgtaccccactaactatcgcagttggaaaaggagtagtttaa

SEQ ID NO: 28137 - DNA, 549 bp, Zea mays
  Peptide Sequence Number=SeqID_69916
atggcggtttggggcttgtgcaggcgctgtggcgcggcgctctcttctttgccacccctcccctcacggccttgtctactgctgtgggcggggcgtcagccgtgcgacggtgaggagcggaggatctggctcctcagtggcggtgtgtggcgtcgacatgtgggctgcagtggccccaacggcgtttgcggtggtgtgtgtgccaacggatctggcgttgctactgaagttcgtctcggccacgtcgttgccttcggtggttgctttcgtctttcgggtcccggtttgcgtgtggaggtggaggcttgcaccgtgaagtcgaagctgctacgtcaggggatgtggcttggcaatgatgacatggggcgaaccccgcttcttcgtgggcttgtttgcttcgaagatgaggcatttggcggaggcgaggcggtggatcaaggttttggaagtgtcgctggtgaagaatcagagctgtctcgagtggggtatctcgtggcttggcaacgacggcgcgccacagtcttccttctcttctgccggtgtttgtag

SEQ ID NO: 28138 - DNA, 129 bp, Zea mays
  Peptide Sequence Number=SeqID_69917
atgtcgaagcaaccgcaggaatgtgatgaagaaagcatcagatttatccttgaactcgagcaagcggccttcctttttcaatgcgtcgctgaagctgagaagtacacaaacatacagactcgaaaataa

SEQ ID NO: 28139 - DNA, 270 bp, Zea mays
  Peptide Sequence Number=SeqID_69918
atggcggtgaggcgaggggtccctgcattggagcttcctagaaactgtagcgggttttctgaagcaatgatcaacttcaacctttattttgttgatcagccttacacttcacatgaactcccatatttgatggtgaataccaggaagggaggaggaattgatctacccactaatccacataaccggagggtacttagacaacaacaagaagaagagatgaatcctccaaatcctccacctgtcgtaactgatctagtagttgcagcttag

SEQ ID NO: 28140 - DNA, 177 bp, Zea mays
  Peptide Sequence Number=SeqID_69919
atgggtaaaggtttgagtgctttattggatgctgaagcttgtaggctactgctgccttattggcctgaaggctgcttcagacaaggagaggcaatgaactgcttgaagctatcccgtgccatggcaaagctctcagaattgtcccttgcccagaagaatattatgcaacaagactag

SEQ ID NO: 28141 - DNA, 2814 bp, Zea mays
  Peptide Sequence Number=SeqID_69920
atggagctcgccttgggggccatggccagcttggcccccaagctgggcgacctgctcatggaggagtatgtcgtgcacaagggcctcaagcccgacatcgagtccctctccgatgagcttgtgatgatgaacgccgccctccttgacgcgtcccggattccacctgaccagctcactgcggtggaaaagctctgggcacgcaaggtccgggacctgtcgtatgacatggaggacgccattgacgatttcatcctgcgtgtggctggtggtgacaactcagccaccgactccaaactcttaaagaagatccttgtgaaggtcaaggacgtgatgtcaataaagaagctcaaggatcgacgccagatctccgacaaggtcaaagacatcaagaaactctccagtgagttggctgagcttcgtgccaagtacacagtaaggggtgcaggtgctgatcttgctgcgagcatcggcattgacccccgtgtcatcaatctgtacaagaaagagtcggatctcgttggcatccaggagtcaagggacaaagtcatcaggatgctgtctttagggaccaaatatgatgatgcgcatgcgtctcatcaggatctaaagatagtctctatagtcggggttggaggattaggtaagactactctagccaaaacagtgcacgatatgcttaagaagcaattcagcccttctgcttttatttctgttggtagaactcctaatctgaatagaacattcgagaagattctagtggaacttgatgccaagtataagcaagttgacatgaccagatgggatctagaacaatttggaaaagaactgcatgaattcttacagaacaagaggtacttgatcgttgttgatgacatatgggatgttggatcatgggaagcgatcagatatggcttgaagaacaataattgtggaagtagaataatcatgactactcggaattttgagcttgtcacgaaagtagaagaggtttatagattaaaacctctttctaatgaaaactctaagaaactattttacaaaagaatacaaagtcaggaaggagaaagtcttgatgatgaactgtccactgaaatcatagataaatgtggcggcataccattggctatcattgcaatagctagtttgttggttgaaagaccatgtgaggagtggtcaaaagtgtatcactcaatcagtcttgggaatggagacaatacaacaaagatattgtcctacagctactatgatcttccttcttatctcaagccatgtctactgcaactaagcatatttcctgaagactatcagtttgatacaaatgctgcaatatggatgtggataggtgagggtctagtccatcttgagaaagaggagggtagcctatttgtggttggagaaagatatttcaaggagcttgtgaatagaagcatgatccagccgatagaggacaaatatgatcggttggtagaagtattccgtattcacgacattgtatttgatcttatccgtaagttgttgaaagatgaagacttcattacccttttggacagcggtgggcaacattcacctcaagctagtttaagaagagagaagaaaacatgtgtgcctcgctctgactgcaagctacgtcggctggctgtccgaaatcaccatgtgcagcgcttccctgaagacatcatggacataccagaggcgttgaggtcacttaacattatatattgtaatattgcgattatgaccccacttcatagtttcagagtctgtcgtgtgctatgtatagaatacagctatgtaccgatcagcctaaagcatctagggaagttgttgcatctcaagtacctagagctatatggcacgcctgttgatgagctccctaaggaaattgggcatctgaggtctcttcagacactgttattagtcaatactggactagacgagctgccaccggctgtttgctcgcttacacggctgatgtgcctgatggctgaggggttcaaaaggttgccagctgacaagatggggaacctaacgtccctggaggagctacggctagagagcatagttggtcagagtgccacccaagccctagtggcagagcttggcaagctgacgaggttgagggtggtcaacatcaccttttcagaggagcttgaggagagcttgcaagaagcattggtgcaatctctgttcaatctgtggggacttcaggagctagcactttcttctaaatggtcgcagcagggaagcgctatgtggggagactgggagccaccaaggcagctcaggcgcctgattattaaaggtatcatcttctcacgacagcctcgatggatcaaccgctcttgcatggcacacctctgcttcttatctctggcggtgcacgctgttgaagcacaggacctagataacctagcgaggttgccagagctccggtacctcaagctagatggtgtcagctggcctccaaggtatgatactggcccggacgacttcaggaatctgaggttctgcgatgtgggtacaatgctcgtgtttcatatgggcgccatgccaaggcttgaagagctggtgtttggagtttgtgcaggatactggagttgggaacacaatggtgtgctgttggagcagtgcccaacaatggatgtgattgaagatcttgacttgggcctggataacctcctttcacttgagcaagtcacggtcgtagtcgactgttcaggcgctactgctgcaaagtgcaggaggggaggccgtggtcatgcgtgccatgaaaatcatgccaccgtccaccataaaaatggaacgagtatgtga

SEQ ID NO: 28142 - DNA, 156 bp, Zea mays
  Peptide Sequence Number=SeqID_69921
atggcgtccagggtccctagccccatgcgacagcagccgctgccgagccacagcaccgtcggcaagcagcccttccccatggccgttgcaatgcgtctaaggaagaagaaaggaggaaagcattctatgcggttcacctatgttactactaattaa

SEQ ID NO: 28143 - DNA, 669 bp, Zea mays
  Peptide Sequence Number=SeqID_69922
atgggcaaggactcgaagccgaaggacgccaaggggaagggcaagcaggcggccggctcctctggcggcgacgacggcggcggcaagggaggcaagggcaagggcaagggcaagggcggcaagtccgctgacggactcggcacttgcacctacgtcaaagctaggcacgtattgtgtgagaagcaggggaagatcaatgaagcttataagaagttgcaggatggatggctgaataatggggacaaagttcctcctgctgagtttgctaaggtagcacaagagtattctgaatgcccatcagggaagaaaggtggagatcttggttggttcccgcgtggcaagatggctggtcctttccaggaggttgctttcaacacacctgagggaactgttagcgcaccattcaagtccacactactgatcgggtctcatcttttatcagcttcttaccacgacactgtttcctgtgcaggcacgggtatcactttatcctctgcgaaggaaggaagaactgatctggaaatgtcggttggggagactgcatcatcaggttgtatgagacgcaatgcaaactactcaccttctctaataagcgctggacatgtgtactttgtgttgggctattcgcattctgttccaaacaagttgccaaaacaaaagaatgtgtga

SEQ ID NO: 28144 - DNA, 369 bp, Zea mays
  Peptide Sequence Number=SeqID_69923
atggaggggccaaggagcgtgcatcgtgggggagcagggagagaagacgggaaagagagagatggcaggtgggtcccacggcagcgacagcgttgggcaaccgcccacgcgcgcgacaggcacggcagaacggagccgtggggcacgcaacgcacatgtgtgtgggccgaccggggcacaacgacgcaaggcatggcggcggtagtggcgggcaagcgtgcacgcgcgagcgaggcgagcgagcaggggcctgggtcgcgtaggggttggggcgctgagccaggatgcaggggcgcgggggtgggccaaggggagatgggccgcgcgcaggctgccaaggagggcgtgtctgggccgaaggggcaataa

SEQ ID NO: 28145 - DNA, 546 bp, Zea mays
  Peptide Sequence Number=SeqID_69924
atgtcagacaatggatcccacaagagcgagaaagtcctctcgggagaaaagcaaaaagagaagattgaggaatgtgcaagctccaagtcctccaagccttacaagaggaaggatggcaagaagaaaaagatcaagaagatcatctactgcgagaacgacacttcaacttcgcgaacgacctcaagtaacagtgaatccacctccaagcatcaccatcaacgaaagatggttaaacttctaaaacgtgattcaatgattctcccattcctcgcaatacaactactcattacttttggttctacttgggaggagtacaacaaggtgaatcctaggtacaagaaaatgacacccgaggaggtgtttgggaagtttctaatacatcgacgacttggcccaagggaacatcacctccatttagccacaaccatcgacatttttggccttaatgttaatgagatgtccctcatcatcaaaatcttttggcaaattccaaggaaccagaagtacaaggactacaagcctcatgacaaaatggtgaaggactaa

SEQ ID NO: 28146 - DNA, 348 bp, Zea mays
  Peptide Sequence Number=SeqID_69925
atggttgtacaaaacacaactcgtactctggttagtccacagattcacaacaaagcaatacccatgttgacaatcgatcactcatcatcaacccaaaccataagggagaaatcaaccttgtgttcgcaaagggcttgcttcaaatgtggtaagaccggtcattttattgaaaattgtccatatgcaaaatatgatgatggaagggaagaagagaagaaagggaagaagaaatttggaaataacaaattctacaagaaaaagggaggcgaagcccatatcgacaaggagtgtgattcggatgagagcttctccgactctgacgatgatggtgttgcaccaccactttga

SEQ ID NO: 28147 - DNA, 627 bp, Zea mays
  Peptide Sequence Number=SeqID_69926
atggagaacaagtcagatgaccttcagcacgagcatggtatgcccgatcagacgtctcgtcccttcacttcactcttactgtcggcaacatctgtcgcccaagcagcacaacaagataccggttctgacatcaaatcgcttagtctgctgcatggaagtagcttactcccacctgatgatggttacatctggaaggcgcgcgcgcagaacattgttccaggctgtgaatatcccaccatgtattacaagtgcgcccaggacaactgcaacacaaataaattggtggtatgctctgctgatggtcatcaggttcttgagacggttcttagtggttgccacaaccacccacgtcagcaagattgtgatctacccatacccaaggtatcaaaaacggatacttcaatgcctgtgtccagagagggagatgatgagcaactttcaagttcaagtgatagcgatgaagatgatgttgaccaagcaagagttgaagacatgtgccacatccagctgaaaggatcactgcacaaactggaactgcaaattctcaccgacagtatgcatcaatctgccttctttgacttacattttttaagtccatatgttgcagctggtgtagttcatatctaa

SEQ ID NO: 28148 - DNA, 564 bp, Zea mays
  Peptide Sequence Number=SeqID_69927
atgaaagtgaagctcaggtataaagaaagcaaatcaatcacctgtcaaggattgcaagtatatccaaagcagcctgaatctcgactgattgcagcaagaacacaagaaccagatagtgatgtgctgctgccttctccaatccaccaagtcaacgggctcaggtcatcaaaaacttcgatacaggagttcagcgttgctttggagggcagccagcagctgacggagaaaagcgacgcctacagcatcggcgtgctgatgctggaggagtggaggtggtcacggcgaggaagccgctggcgcgcggccaccggccggtacatcgtccgggacgaaggcggcgctggaccggaccaaggatctgtacggcctgcacgagctgctggaccaggcggtggcgggctggagcagtacatggacctggtgctgcgctgcgtcgaggaggccggcgccgaccggccgtcgatgggcgaggtggacggagagatcgagcaggtactgaagatggccggcggcacaggactccatccctacgctgagtcggcggcgtccattccaactccatga

SEQ ID NO: 28149 - DNA, 579 bp, Zea mays
  Peptide Sequence Number=SeqID_69928
atgacgtggggctggaccgagccagggaagacgtggagaaccagcagtgagtttgggtatcaccacaacagccttggcgtgggcggagaagcgccaagggtgctcggccacgagcaatggcggttcggtggtgacggtgagcgtgggcagaaggaaggagaacacgggagagggaacgaagccgtgggtgaatcagctccagaactgtggatatctccagtgattgaagatccggccacctaccataaacggtgctcacgaatggggaaagaaattcgcgtcagggggaggaaaggattaagggcaatcgaggggaaaaggaagggggtctcggcatgctccacttcgggcaaggaatcggtcggtggtggcttggtgtgggcggcacgacatggcgaggtccggcgcgggcgcgggggagtggaggaaggagaacagggacggctggcagcaggaccccagacgtcagagagagggagggaaaagaaagggggtgtgggggcgggcctgttgggccaaaagcggccgcgggctgggggagaggaagaaataccctttttctctttctccgaattttga

SEQ ID NO: 28150 - DNA, 732 bp, Zea mays
  Peptide Sequence Number=SeqID_69929
atgacatcggattggaatcatcttatgccccactatggccacttgttgagccaggccgaagtcgatagttttgacccacaacaaattggtaaccctaagtgtcagaactatgctgagggatctagaccaccacctgtagcaaataatgcaactcaaagagctaacctagcaaacttctttgctgatgagatgttaggctttgtcgtgcttggcttgcagtttactgctcttgagaagaacccattccacttcttacattgtcggtcaatcttgaaggatgaaccaaaatggacggaccatcacattgggcagcaaaaaccaaatctagccctcattgcaaatgactccaacaccattgacttagatccaaaggaatcattgccaagtagctttgcatcgaagctcccacttgaccgtgatttgagcaaggaaaaggcaaagaagacacaatctatggacacttcatccactgattcggagtacttgaccagacttggtgatctatctttggaacgattgtctgtttacaagttagttgcttcggtggaagaaagaaagttggaggcatatgacaaaattcacagacaaaagctcatcatagaggagaagttgaatctggagcatgtgaggacggacatgcagaaagaaaatgaggacaaggaggaaaaggatatgatccttagcatggatctgaacaaatgcaacatgttgcttcgagagtacaccaagtga

SEQ ID NO: 28151 - DNA, 533 bp, Zea mays
  Peptide Sequence Number=SeqID_69930
ccctcaccgccgaccccagacccccagcgaccgcgcctgccctgtcttcgacgacttcgctaccgcggaggaagcaacgccggtcaccgagctacaaaacctcgtgcaccccatcgcaactgtccgtccccgatccaacggtttgaatttgcggatatcgactgcggtcgcgcgcctgcctctgggccccgctatcaatgcttgcaccccatggcgctgggctgactgccgcctccgccggatgagcagggcgtcgcgtggaagccggcggcctcgctcaagccgccagcgcgctccctccggcaataacccgtgcatcgaggttgttggactcacggtccatgaggccgtcgatgtgggcctggggcaggtgtggttctccatcaccaccaccaccgtcctcgtcgcgcgggccatgagcgccttcgccgcgcaccgcgacgcctccttcttcactccgcctactcttcctcagtcttgctggcagcctccgcaggagtcaccacaagctgtccgtgtccagaccgtcccag

SEQ ID NO: 28152 - DNA, 357 bp, Zea mays
  Peptide Sequence Number=SeqID_69931
atgagtgaattaagaaatgctaaggaccaaagcatgacccaagcttttaggcaatatcaccttgggaaagacagacaagacttggcgccaccatatcttctcaaccagacccgatcatcccttggaactcgccagagcaacgaccacgtgttcgacgcactctggactcgccagagcacgcccgacgcgcgccccgcgtgccccgtgacgcgccaaagaccagccggcgccatggcccacgcccgtgcctataaagcacccaggggccttgaccgtacccctccgcacgcgctcgacctcaccggagctctaacccactggcgtcaccccgtgaagctcactgtgccattggattga

SEQ ID NO: 28153 - DNA, 162 bp, Zea mays
  Peptide Sequence Number=SeqID_69932
atggcggcgctcctcgacgccggcctcttcggccccgcccaaacgctggggtgtttccttgtgtcgtcagctggtgcgggcaacgatgctggtatgtccatgaaggtggaaagcctggtaagctcaaggtttcctgagcagcagctccgcacgcggtgctaa

SEQ ID NO: 28154 - DNA, 546 bp, Zea mays
  Peptide Sequence Number=SeqID_69933
atggccattgaactccttggcccattcatcactttgcaaggatttgtgattgagtttgggcatttggatattctgcaatgggaaaacaagcacaaaactatgcacacttattctagtgtgaatggaggtcgccaagatggatttgggaaacttgatggctcaacaaagtctttgtcgcaaggtgctgctatggatagcttctattccacgtttcacactaacctagagaggaggaaattctcaaaagaggaatacgcaacattcgcaagattggagatgaaggaagctatgaagcaactgttgtcatcaccggattttaacaggtgggcgttggctaacgcgaacaagatatcgtgtggctctgataggaggaaacttcagcatcaacaacaaccaacaacgacatcgtttcttgggactattttgatatgtgtttggcaccaaaaagagccaagcggacggtccggccctggagccggacggtccgcggtccggacagtccgcgcctgtgggccgaacggtccgtgcctgcgcagaataggttag

SEQ ID NO: 28155 - DNA, 228 bp, Zea mays
  Peptide Sequence Number=SeqID_69934
atgaagttttctgaaggccctactcttgtgactacaaaagatgctggtgatgcagttgcccttttgcagattttatctggttgcacttttgacagcagccaacttgtcttgacatctcgcgtgggataccaatccgtaaatgaaacaatattgcaagaactgagtaataaacactacccacctattatatctgcgatagaagaaagagcaaaatgtctaggtgtttag

SEQ ID NO: 28156 - DNA, 594 bp, Zea mays
  Peptide Sequence Number=SeqID_69935
atgaccgcgtcggaaaagggaccgggaaagggggataccccgaaaaggatccttccccgtgaaggaaccaggctccgagcctctctactgatcagaggttcgaaggctggcccctcggaagggttcgacagccgcctcagatcgtgtgggctctacacccactactggtcagaggctggcccccgaagggttcacagccgcctcagacacagagcgagggatgaccatgggtacgttcgatacataaccaaggctcgggctgcgctcctgagggctcggactcgggctaagtcccggaagacggcgaactccgctccgcccgacccagggctcggactcgggctaagtcccggaagacggcgaactccgctccgcccgacccagggctcggacttgggctcagccccagaagacgacgaactccgcttcgcccgacccagggctcggacttgggctcagccccagaagacgacgaactccgcttcgcccgaccctagggctcggactccgccctggcctcagccaacggtctccgcctcgcccgacccaggggctcggactcgacctcggccacggaagacggactcgacctag

SEQ ID NO: 28157 - DNA, 258 bp, Zea mays
  Peptide Sequence Number=SeqID_69936
atgggcaagcctgaacccgactattccatacatgaaatgacaatcgcgcactgggagtggagagatggcgagagtggcacataccctcctgacaaaggactgcctaaaaagggtgctccccagctgggtattaatcgatttggatcgccgaacttctcagatatgaagactggatcttcgaccctcatcgttacgagtcacttgattgtgattggtgttaagcgccggtgggcacgaccttcttataagtctaagtaa

SEQ ID NO: 28158 - DNA, 318 bp, Zea mays
  Peptide Sequence Number=SeqID_69937
atgacgcgaggaaactacgccgtgaggagaggctcgctggtttcccataaccacgagcaggtgacgcgcgcggtcgacgaccagaccatgtggaggaactgcagtaggggatcgacgacgttcatggcgaggggaaaggagcagcttgctgctggggggagaacgagctcgactgaatccgagctggagttcgcggcaacagggagcagggcgcgatgctggggaaagttgcgcgcacagggagctgggcatgggcagcggcccgcgtccacgacgagcaggcaggggagagcgcgcacaacaacgagtggccactag

SEQ ID NO: 28159 - DNA, 99 bp, Zea mays
  Peptide Sequence Number=SeqID_69938
atggcgtcatctggccggaataggctcgccggagtgcggcgagggctgttcctcgtcgtggactttgctctgcgaaacagagctttggaaatctgttaa

SEQ ID NO: 28160 - DNA, 177 bp, Zea mays
  Peptide Sequence Number=SeqID_69939
atgggcgttgcgggtggaggcatggtggcggtggtgatgcagctcgcggaggctgttggcggtggtgccgtgatggcacggttgatggcggcctactctactgttattggcgttgtggtggttgtgtggttgttggcggccgagcggtggttttcttgtgtcgacatggtggcgtga

SEQ ID NO: 28161 - DNA, 159 bp, Zea mays
  Peptide Sequence Number=SeqID_69940
atggcacaacagtcagatttggagaccggagaggtgggaagggagaggaatgggaacgctcaaagaataactgaacagtccctcggttggatccgtactcatgccacgtgtcgtgataaggtggaggcaagcgggctacagagtgtggagagggtataa

SEQ ID NO: 28162 - DNA, 108 bp, Zea mays
  Peptide Sequence Number=SeqID_69941
atggcgtccaacggcagcgacgtggtgatgatgtactggacacggcgctgctggagtcgtccaagcagcccaagccagctactctctgcatcaaggaaacagaaatag

SEQ ID NO: 28163 - DNA, 990 bp, Zea mays
  Peptide Sequence Number=SeqID_69942
atgtcgccaaggcggcggacggtggagagtgggcggcgggctgtggctgtgaagcaatggctggtggtggagaggaggagcgagcggaggaggatcgccgggatcgcgataccagaaaaggaatgggttaggctctttcgaaagaactctgcaaggtccaaccaaaattcaagtgatagtattcacaccatgataaggccttcatttccaaaatggtattttgtgcatgaagttcctgagcagttcccaaatagtgatgtcacagcaattgttgatgaaacctggcaaattggtgatcgagttgattggttgaaggaaggttgttattggtctgggacaattactaagataatcaatgaagatctggtcgagatagagctgccggcacctcccataggtgaaggaaaatgttataaagctaaatgtagtgatctgaggcctactctcgagtggtctctagcaagaggttggatggtccctctttcacaggcaaatggaaaaggttggcatgctgctcgtctacttcagcattataaatctgaatcagatgatgataatgacgacaacgatagctgggatgcccggcaaacggtgtgcagagcttcaaacacgcctgaggaagctccaggccccatggtccctgcacctccgtcagccacaaacaacgctcccagccacatgtatcagaaggatgctgctgtcacatccacagaggacctgctgaagcccagctcaacatccaagtcgccagaccccaggcacgacgcccaagctagcactcaacctgcaggtacgggggtctccatgaagccggaaccggttattggagtctcaacaatcaagaaagaggactcctccttgacagaaggtgaggttgatggcggcacggaagagtgcctggagaagctgggcgcgatcaaagccaggctcaaatacctcatgcagggcacgcggctggaacatgagcgcagcgccaccttccgtgggtag

SEQ ID NO: 28164 - DNA, 261 bp, Zea mays
  Peptide Sequence Number=SeqID_69943
atggagctgtccatgccggcgcccaccaatgttgcgcaccacgaccttctgttgacccctccgtggtgcctcacccttcctgcgaccctagcagaccagacaactacaccacctaccacggtggtcgggcagccggtgaagtgcgtccgcttcagcgacacaatgcaagtagccatcacgttgggagcctcccctcttctggtgctcctcgactccgggtcaacccatgacttcatatccgagtccgtggccagactgtaa

SEQ ID NO: 28165 - DNA, 540 bp, Zea mays
  Peptide Sequence Number=SeqID_69944
atgcaagttggtgaggcattgaagttcaacgtcggaggcgagaggttggacgtggccactgcaattgaaggatggattgtgttggtcactggagttcatgaagaagctcaagaagatgacctccaaaatgctttccaagaatttgggcaggtcaaaaacctgcatttgaatttggaccgtcgtaccggatttgtcaaggggtacgctttgattgaatatgagaagtttgaagaagctcaggctgcaataaaagaactggatggagctgagctttatgaacaaaaaatgagtgttgattgggcctttagcagtggccctgctaagcgcagatttactcggaaaagagttgaaattggtatgcaaatactggaacacattaaaatattagaaacaaaaactggccgtgctaaaacttatttgccctttcatttctgccttgtcacttttgctctggcactagctcttatccagtatcaaagtgtatcatgcttccgatttcccaaaatatatggtgaagtagcttacctgcttgattcttag

SEQ ID NO: 28166 - DNA, 616 bp, Zea mays
  Peptide Sequence Number=SeqID_69945
atggacgcaatacatgacaaagctctgtccgctcaggggacacgatctcgcctcgaccgagcccagcctcgggcaggaacagcagacctaggcggattcacgcctcgcccgagggcctcctcaagcaacgggcacacctttgactcgcccgaggcccagctcgggcaggcttcacgaagaagcaaccttggccaagatcacctcgccagctgttggggaccttcggcgtccgaaggcgccataggaagctccgcctcgctcgaccccagggctcggactcaacctcgacctcggacgacggactccgcctcgcccgaccccagggctcggactcaacctcgacctcggacgacggtctccgcctcgcccgaccccagggctcggactcaacctcgacctcggacgacggactccgcctcgcccgaccctagggctcggactcaacctcgacctcggacgacggtctccgcctcgcccgaccccagggctcggactcaacctcgacctcgaacgacggtctccgcctcgcccgaccccagggctcggactcagcctcgacctcggaggagcctccgcctcgcccgaccttgggctcggaccgaccacgtcgcagggg

SEQ ID NO: 28167 - DNA, 414 bp, Zea mays
  Peptide Sequence Number=SeqID_69946
atggctggatgcaaaggaggcaaaggcaagtgtcattcgtctgaggggaagcgcaagcaccctccgagccctccaacggaggactttgggggctcggagttctcggaggaggaattctcctcagagtatgatggctcgcctgccccgatgtcccccatggtgttgtccgatgacttggacgactccatggggctgtcggtggcagaccgagcctacatccagtccatcgagtgcacagggctcgaagggtcggatgactcggaggaggactcctcggagaactctgaggagggcagtggcagtggcagcggcagcgagggcgacagcggcaatggcaacaacgatggtgacggtggtgatggcgagggcaatgacgatggcgataatgccgatggcaagatgccaccgacataa

SEQ ID NO: 28168 - DNA, 225 bp, Zea mays
  Peptide Sequence Number=SeqID_69947
atggggcgtcttgtggtgggccggataaaggaaaccagcagaggcaagctagttctgatacgaaagaggcccacgtccgagttagctgctacaggagcgcgggtacatcgggatagaaatcagcattttatcatcggctcatgctttagagatcagcattctgtggttaaggattcattgggagcaccggaggtgcacccaatgggtgtagcccccgagctttga

SEQ ID NO: 28169 - DNA, 456 bp, Zea mays
  Peptide Sequence Number=SeqID_69948
aggggaagaggacgaactgaggggtgtcccgagttgcccggtgatgtggcggagcttaccgaggcaacggacgcggtgagggctcaaccgcgatcgtggaacgggcggcaggcttcagtgagcggcaacgaagctgtctggttgcacgcgcagggcgagagagggggccagagagctcggatgagggcgcaagtgagcagggggaagtgggcgagtgaggtgcgggctctaaagaggcgagggcatgcggaggtggtcgagaaacatgtggacgtgggcgtgtccacaatgggggtgcgcgggcgggaggttagggacggggggtctgactggtggggttcgcgggccagcgagagaggaggtgcactgctcaaagaaaacggcgccgacaggcttggcccaccaggcaacgggagagggagagggggaagagagcgtgcgggcggagtagactaa

SEQ ID NO: 28170 - DNA, 216 bp, Zea mays
  Peptide Sequence Number=SeqID_69949
atggacagaatcaatgccagtgagatcttcagcaaatgtcccccgctcgtcccgcacatcctctctgtcgtgctccgccgcgtcccagaccaggactcctccgtccgcgtcgcgctcgtggacaccgggcgcatcgtggcggcggcctcgcctccaccgcgcttcagcctctcacggacgcgctcctccaccagcaggactagtgcgcgcagctag

SEQ ID NO: 28171 - DNA, 183 bp, Zea mays
  Peptide Sequence Number=SeqID_69950
atggccggggtatgtcgttccgcgcgccagggcacagtcctccaaccgaaagggctcaacacgcagaagaaggtagggcaattcggggccgatgaagccatatggaaagaccaatatcttgcgcgggatacccaggcgatttgcccagatcgcgcaccaaaactagagcagttccgccggtga

SEQ ID NO: 28172 - DNA, 360 bp, Zea mays
  Peptide Sequence Number=SeqID_69951
atggactatgtagatgataatgttgaacaacaatatgtgattttgagctgggaccagtttgaaaccaatgcagcattatttggggcaaagagtactttcaatgaagaaatttataccacaaagcttgagagaggagagaggcttattcccggtgatgacctagaccatgatgaagagataaaatatccagcagtgcgtagagacaccgataacagcaagtacaagccaccatttactaaggtcccaagcagtacatgccatgttgcttcgtttaacaggacagtcaatattgatcccaatgattcactggcatgttcatcaacaatggtggattatgatgaaatcgctatatggagataa

SEQ ID NO: 28173 - DNA, 422 bp, Zea mays
  Peptide Sequence Number=SeqID_69952
caagcagccaagcacttttattccaaaaagggttaggtagtgaaaatgttgttattacccagttctacacaaaattagaggagaaacataaagctttggaagcagagaaggacgaggctgaggccaggaaaaagcgaaacccatgccaagcttctatcaagaagggccccccaccaaaggctgaactgaagaaggtgcctcctacccgtgccaaatcgccaaagtttacaagttcaaggagaaggagctgcagtgatacactattgacacctgacggggaaaataccaatgcaacatctacccaaccacatcgtcatagtatcaggagtcctaaagacgctaacagagtacaacaatgctcgccaaagagcggtgtggcaaccaaaacaagatctgtcaaggctgagctgaaggccctctaa

SEQ ID NO: 28174 - DNA, 351 bp, Zea mays
  Peptide Sequence Number=SeqID_69953
atgaagccgtggaaggagacttccaggagttccaagactacgacgagttctaggcgtgggttagcggcaacccccagtcggctgcttgtgaaggccgcgtttatctacgtttcttttccacactttgatttttattttcttagctaccgcacgaagtggccaactggatggaagcgtgagtggttctatttgaaggctgacgagaaaaagagggagaagctgatgaccatggttatgagtccactatctttgagcatcggaaagaagtgggtaagaagcatggacttgttcgacttgcttaccgttttaagtttgaaaacaattcaagaagcccttgcaaagaatggctag

SEQ ID NO: 28175 - DNA, 900 bp, Zea mays
  Peptide Sequence Number=SeqID_69954
atgccacgacggatccgcatgcgccaacaacctacaccatgtctcacagtccacgcgcgctatctccccctgccccctccccctctgcgcaaggccctgcattaccctcacgccggctcgccatctacgcccattctcccagtttccacgctgtcgtcccccccgccccgctcgtggtggccacggaaggcacaacaagaaggccgtgccggagatcctcctccacgctcccgttgctctggcttcctcagcgaggtcgagctccggctcctctgctgcaacctccctgcacaccctcgactgcgcccccaatcgtttcccctccccctgcacatctactcactcgctactgcctccgcgctcgccggcgttgagccgacgattgcgaggcaactttcgacgccactgcaaatcctcgaccgaaccagcagacaacaagaaatggccacaaagacagctataccgagaaagaagatgtgcatcccgctcatgcccttcttcgctaccagccacatcgcccccttcacggacctcacctttcacctcgtcacggccaggcctgacgacgtggaggccacagttgcagtcactccggcaaaggccttggttgtgcagtcagctctcgcccggcgtggcgccagtcatctggccacggtcaaggtggccacctacccgttcccctccgtggacggccttccaccggagtggagaaccactccacgcatcagccatgccagcgccctctaccggcccatgattcgccagtcagagatggacacatcaaaccctgaagcacttgtcgatgcaaagaatttgaacatgtttgttgggcaaagaatgcgcgcggttgttcaagtacaacacaatgaaggttggagtgcttgtcggacagtcctctaa

SEQ ID NO: 28176 - DNA, 151 bp, Zea mays
  Peptide Sequence Number=SeqID_69955
atgggcgaaagcctgatggagcaatgccgcatggaggtggaaggcctacgggtcgtcaacttcttttctcggagaagaaacaatgacgtccaccgtcaaatcccagggctcaaccctggacaggcggtggaaactaccaagctggagtacg

SEQ ID NO: 28177 - DNA, 132 bp, Zea mays
  Peptide Sequence Number=SeqID_69956
atggctatgactgctgcgatgatcggctacttcatcttcgttgacgcgtgcctgcgttggatcgctattctagctcttcttccactactctacgcttctaatggatgcgatgtgaatggattcttcatgtaa

SEQ ID NO: 28178 - DNA, 315 bp, Zea mays
  Peptide Sequence Number=SeqID_69957
atggaggtcggagcgttgctgggtggtccgtctcactacgatgatgctcaagcctgctccaatgttcccacccaaagggacgagttggccagcgaccctactacgcttgtggttccctcaaagactcgcgtggaggtcatcgaagctgggcgcgacgagggaggagcggcacaagtgacgttgttccgcctggtgtggcctaacattgcgtcgagaaggaacctgcgggagctctcccccccacggcggaaacaacatcgtgggtggtacccaagcggcaccgcctccgcctgtgcccctaacgatggctcttaa

SEQ ID NO: 28179 - DNA, 213 bp, Zea mays
  Peptide Sequence Number=SeqID_69958
atgaggatcgcctcgccgcggcccaacaattcctggacccgaccgccgtggccctcatcggagcgatggcagcgtaggatccgagggggagacctctcctcgaaatcggataaggaacctgttggggcgagtgaagggggagggggtaggatgtggtacgcagatggaagctctggcgatggtggcatcgagtggcggcggcagaggatctag

SEQ ID NO: 28180 - DNA, 228 bp, Zea mays
  Peptide Sequence Number=SeqID_69959
atgaagaacgaggtcaaatcatgtggtcttgcaattgttgcgccagggacatcgctggctacacgcctaggggctggtgtttgtgagaagatatgctctgttgtttgggctaggttggtcaccatcgccgaccaattgggtctgataactaggtcctgcaagaccttgagccaactccagagcaagaatgacaaactaaaactggagatggctcgggtgaaggcttaa

SEQ ID NO: 28181 - DNA, 324 bp, Zea mays
  Peptide Sequence Number=SeqID_69960
atgagctcagggaaggtgtttttcggatcttcggcattagggatggcaatgggttgggttcgaatcgggctactcagtgtcgccagggacgccgccctgctgatgctggccgtcgtggggccgtgcccgcttcccgcccgaagtacccgcgacaaagatcacggcggcgagactcactggcggagaaatagctctggcgaagtggtcgtcgacgttggggaggtcacgacggtcacttggaggtggctggagttggtccgtcttcgcgtgcaggcgggggagctcatcggcgatgaggattccggcctaactgagagcacctag

SEQ ID NO: 28182 - DNA, 351 bp, Zea mays
  Peptide Sequence Number=SeqID_69961
atggtgaaatgggatgcctttggccaagtaattaggaaatctagggagagacctgaaaggggcaagcggggaggcgtcgatgcagagtatagggaggtctatattggtcccgtagtcaggggtgccataagcatgatgaccatggggcagcgaacggtgtgtcggtcaaaagcccgatgccaacagggtgtcgagagcatcgtggaagtgacaaccacgagcggcgtcacgagtgatgggtcgggtgacccatcgttccggctcctaatcctccgaaagctcagtactatgggggtgcctccagctggggcacagaggaagggcgccttgcgtactccacctcctgcatag

SEQ ID NO: 28183 - DNA, 420 bp, Zea mays
  Peptide Sequence Number=SeqID_69962
atgtccgcgctccaggagcagatcgcggaggagtggaggcgcaaggaaaagaagggatcttgctccggctccgcgaccacgtcggggctcctcgcggagatgcaggccgtggagcgcgccgcacgtgagctcaacatcgtgctcgaggagatcgccaaggaggaagaggaggaggaggaggacgaggggcggcggcggcaggggatcgtggacgaggagcgcgcgagggaagtgatggagcgcgccgaggagctggcggcggcttgccggacgctcgaggagaccggcagcgccctgtggagaccggcgctgtgcggcccctgctggacttcatggccgacccagagggagcgcgggattcgaggggggctcaggccattttcccgagtacctctccataaggacctgttcgtggagtga

SEQ ID NO: 28184 - DNA, 309 bp, Zea mays
  Peptide Sequence Number=SeqID_69963
atgggggtaaaattaggaaagcagaatgatgagctggtcaaaactaatatgacactcagtggcattgggagcgacagttcaatcaagatgatgattgccaggacatggacggttcgacccctgatgccggacggtctgaggtacactagagagcgccacaaaatgaagaccctgccacggatggtccagcccctaaggtggaacagtccgacgttcccacagatagtttggtccctaagcccagacagtctgcaactactagagagggaaacaaagctggtccactatagtggacggtttgacctctga

SEQ ID NO: 28185 - DNA, 792 bp, Zea mays
  Peptide Sequence Number=SeqID_69964
atgtcatattggagaaaccctccatatactggtgtcaaatacttctacacgacagtgattgccctgttgtttggaacaatgttctggggtgtgggcagaaaaagggatagtcaacaggacctgttcaatgccattggttccatgtatgcctcggttattttcatgggagtacagaattctggttcagttcagccagttgtatcggttgagcgaacagtcttttacagggaaagggcggctcatatgtactcgccattgccgtatgccttgggacaggtcgtaatcgaactcccatacatctttgttcagtccttaatatatggcgtgctggtgtatgctatgatcgggtttgaatggacagctgacaagttcttttggtacctcttcttcatgtatttcaccctagcatactacacgttctacgggatgatggtggttggcctgactccgaactacaacgtctcctccgttgcttccacggcgttctatgccatttggaacctcttctcgggattcttaataccaagaactagaattccagtctggtggagatggttctactggatttgccccatcgcatggacgctcaacgggctggtcacttcacagtttggagatgtaaccgagacgttcagtgacggtggggtgcgtatatctgacttcgttgaggactactttgggtaccatcacgacttgctgtgggtggtcgctgtggtggtggtcgcgtttcctgtgctctttgccttgctctttggcctctcgctcaagatattcaacttccaaaagaggtaa

SEQ ID NO: 28186 - DNA, 1953 bp, Zea mays
  Peptide Sequence Number=SeqID_69965
atggacgagtttgaggcccggagatcagctgcttatgtcagccaacatgatctacacatgggagaactgactgttcgtgagacagtcaatttctctgcaagatgtcaaggaagtggtcatcgctatgacttgctagttgaattgtcaaggagagaaaaggacgcaggaatcatacctgataaagaaactgatacctacatgaaggctgctgctacaggagaccaaaaggctgatgtggtcacaaatcacattctaaaggtcttggggttggatgtctgtgctgacacaatcgttggaaacaatatgttgagaggcatatctggaggccagaaaaagcgagtaactacagctgagatgcttgtcaccccaggacgagctgttttcatggatgagatatcaactggacttgacagctcaacaaccttccagattgtgaactctatccgggaaaccattcacattgttggcggaacagcagttattgctttgctacaacctgcacctgagacatatgacctgtttgatgatataatcctcctgtcagatagtcaggttgtctacagtggtcctcgtgaatatgtccttgagttctttgagtcagttggcttcaaatgccctcagcggaaaggtgtagccgacttcctgcaggaagttacatcaaagaaagatcagagacaatactggaaacatggtgatgacacctaccgatacgtccccgtgaaggagtttgcagaagcatttcaatcgttccatgttggtgaggctatacgaaatgagttggctgtcccattcgacaagagtacgagccatcctgctgctctgaaaacatcaagatatggcgccagcgtgaaagagctacttaaagcaaatatcgacagagagatattactaataaaaagaaattcctttgtatacatattcaaggcagttcagctaacactcatggcactcattacgatgaccgtctttctccggaccaatatgcatcgtgactcaatatcagatggaaggatatacatgggtgccctgttctttggggtcctgatggtcatgttcaatggactggcagaagttggcctaactattgcaaagctcccagttttcttcaagcaaagggatcttctcttctaccctgcatggacatactccttaccatcatggatcattaagactcccctctccttgctcaatgtaacaatttgggttttcataacatactatgttattggatttgatcccaacgtagaaagactttttagacagttcctgctcctcttactaatgaacgaggcatcatcaggattgttccgtttcattgctgggcttgcaaggcatcaggttgttgcaagcacccttggttcattcggcattctgatatgtatgcttttgggtggattcctcctggcaagagagaatgtgaagaaatggtggatttgggggtactggatatcacccctgatgtatgcacaaaacgccatatcagtaaatgaattcctgggtagcagctggaataagcaagtaatccccggttcagcagaaccgcttggaaaactagttctagaatctcgtggactttttcctgaggcaaagtggtactggattggtgttggtgccttgcttggatatgtgctgctattcaatatactctacacaatctgcctcacattcctcaaaccatttgacagcaatcaaccgacaatttctgaggaggcattaaagataaaacacgcaaatctaactggtgaagttttagaagcatcatcgagaggacgggttgccagcactacaacaacaggtactttggacgagagcaatgatgaagcagcttccaaccatgcaacagtaaattctagtccagtcaacaaaggaatggtcctcccttttgtacctctctccatcacttttgatgatataagatacagtgtggacatgccagaggtattcactttttaa

SEQ ID NO: 28187 - DNA, 435 bp, Zea mays
  Peptide Sequence Number=SeqID_69966
atggagctcgggttcgtgatttatagcgacgagggagagcgaacggtgccggaagaggaagaacggtcggatcttcaaggcgccgttgatggcatgcatcaatggaggggagagtggggagggagtaacgtccgagttgatgcttcgttaactcgaggagacgaacgaataggggctcggcgtgagtcggttcggctgctcggtcgatcggcttcggggtcgggcctgcttgggctctgctgcgtaggcgtggggtgcgggtcctcggggcgtcgcaggcagcgcgctgtcgggcttggcacaggacacagcgcgcagggtcttcgtcggggcgtcggtctttggctcgggtcgaagctgcggggcggcgctgttggcctgggtagggctgggcgctcggggaagctcctgggcgcgtggcggggctcgggctag

SEQ ID NO: 28188 - DNA, 426 bp, Zea mays
  Peptide Sequence Number=SeqID_69967
atggcctacctcgtgctccagatggtggacctcgtcgccgtcttctcaggcaccgcctcccctgaggacgacggcaacggggacgccgccaaggccctcgagctcgcgcagatggtggtcggcctcgccgctggcgtgcactactacgcgcggtcttccaccatgccgcggcaggggctgcgccccgcgccaactgggcgcgtagacgttggggtgtgcgacggccatgtccacagacggttgattagcaagattctcgggcgcattggggattcaccgctgatcaggttcggcacatacacatgcgacgcgtgtgccgtgtcgggcacgctcaagtgggacatggccactgtcatggagtacaagggcctacccctacagcaggtcgtcgactactatgtcaggggcacgatgcagaatatctga

SEQ ID NO: 28189 - DNA, 204 bp, Zea mays
  Peptide Sequence Number=SeqID_69968
atggagaaggggtttggctgccctccatggctgcctggatctcaggcgcggcaggggttcgctccaggcgctgaacatgggaggagtggaagggggcgtcggtttggggaggatggcggccaggtggggctgctcgatggaatccacggcaaggcgggggtggccggacttgagaagggcaggaagccagatgggagagggagc

SEQ ID NO: 28190 - DNA, 621 bp, Zea mays
  Peptide Sequence Number=SeqID_69969
atgacgcagaaattcgagatgtcgatgatgggcgagttgaactccttccttggattccaagtgaggcaactcaaggatggaaccttcatctctcaaatcaagtacacgcaggacttgatcaagcggtttgggatgaaggacgccaagcccgcaaagactccgatgggaaccgacggacacaccgacctcaacaaaggagattccgattatgctggatgtaaggtcgataggaagagtacatcggggacatgccaattcttaggaaggtccctggtgtcatggaattctaagaaacaaacctccgttgccctatccaccgctgaggccgagtatgttgccgcaggacagtgttgcgcgcaactactttggatgaggcaatccctcagggactttggctacaatctgagcaaagtcccactcctatgtgataatgagagtgctatccgcatggcggataatcctgttgaacacagccgcacaaagcacattgacatccggcatcactttttgagagatcaccagcaaaagggggatatcgaagtgttccattctcgaaggaggtttgaaagggaaaaggtggacttggaccatgaaagacttccactgcacttcgatgagagg

SEQ ID NO: 28191 - DNA, 570 bp, Zea mays
  Peptide Sequence Number=SeqID_69970
atgacgatgatgatgaagataatcagcccccaacatcatcctttgaggacgaagatacaattcaaaggttcagaaaggtggaggatttcttttttaccattgacaaaaaagaacaaagaaaaaaagggatgcttcacatgtggggagaagggtcacattagtgataattgcccaaacaagaccacacccaagaagaggaggagcaaaggcaaaacatgcacaacaatcaaggcatgggaggattcatcaagtgaggatgaagccccaccaaggagtcatgaccatcattgctcttcatcatgctctacctcacgatcatctcacaaatgccttatggcacaaggtaacacaattgattcatcttctattgagtatgatagttataatgatagtagtgatgaaaaaacctcaatatatgaacttgtggatgctgttaaatttttaggaggagttgtgttgttgcgctcttgtgttggtgctcttttgattgtaaatgctagcaagaggctccgagttgtggggtgccttgtggagatgccatctctcacatcagaagatctgagggcttaa

SEQ ID NO: 28192 - DNA, 759 bp, Zea mays
  Peptide Sequence Number=SeqID_69971
atggcgcttcctgttgacgtggcggacctgtgccctaggcagggcgacgtggggctcctccgaagtcgaggtcgagtctgccttccgttgccgaggccgagcccgagcccccgggtcgggcgaggcggagatcgtttggccgaggccagggcggagtccgagccctggggtcgggcgaggcggagattcgccgtcttccgggtcttagcccgagtccgagccctggggtcgggcggagcggagttcgccgtcttccgggtcttagcccgagtccgagccctggggtcaggcggagcggagttcgccgtcttccgggtcttagcccgagtccgagtcctggggtcgggcggagcggagttcgccgtcttccgggtcttagcccgagtccgagccctggggtcaggcggagcggagttcgccgtcttccgggtcttagcccgagtccgagccctggggtcgggtggagcggagttcgccgtcttccgggtcttagcccgagtccgagccctggggtcgggcggagcggagtttcccatggcgcctttggctgggcccgactgcctgtcagactcactctgtcgagtggcactgcagtcggagtggcgcaggcggcgctgtccttctgtcagactgctttatgctgatgggggttaccagctgagaattaggcgtcttgagggtacccctaattatggtccccgacagtatctgaaagggaaatgtgcccttgggccatttctaagtattttggtgatttag

SEQ ID NO: 28193 - DNA, 213 bp, Zea mays
  Peptide Sequence Number=SeqID_69972
atggccatgatgggttcaacatcggaaaagatgtacctctgccaggtgaggaaacagcagaattttgctgtttttgcactaaggtggtgcccaagaacgtggtgccaaaggacgaacctcaatagtaacgtggttgcaagagggatgttggcctcccttttgaaaaacaatatacttttatgcgggaggggtttttgcctcccaaggttgtaa

SEQ ID NO: 28194 - DNA, 348 bp, Zea mays
  Peptide Sequence Number=SeqID_69973
atggcgtgtcccattccgttgcgaagaagcagggaagacgcttctgccaagcggggcccatatggcagcgattttcaaatcgagtgtgtcgggctcggtgggtcggacgactcaaaagaggcctcctcgaaggaggtggaggactcccccgactccgaggagtggagcggcggcgagggcgacagtagcagcagcgacgatgacagcaaaggcagcggcgacgacggtggcgggggcagcgacaacggcgacagtggtgaaggcgacggcaaaggcggcaagggcgacgacaagggcgacggcgatggaggcgacgacaaggccgacggcataatgctgccggcataa

SEQ ID NO: 28195 - DNA, 312 bp, Zea mays
  Peptide Sequence Number=SeqID_69974
atggctcgactctctctttctcgtgcccccggcacaaaccatcgagttacaatctacgacaccatcctaccccaaaagcaccacgagggtacccccggggggaacctccccagcgtgatgcccgacaacggagaaacagacgccggaatgtgcggcgacatcacgaagttggagaacggggcccagtgcaactcgtatctcgggacgaagcctcagaaatgggagaaactcctgatgaaggagcacaccgagaaagatgcaactaccactgccacgattgctgataggctcaagaaagagagcgagatttag

SEQ ID NO: 28196 - DNA, 702 bp, Zea mays
  Peptide Sequence Number=SeqID_69975
atgaaggaaatcgtggagggtgcatgctctgccgtgcatgtgcgtgaggggattagggggggcagttttcctggttggctgcatgcatatcacacaggaaatagcatcagcgggacccacgagcagatcttccaggttgtggacgatggcacgcactacagcataggcaagctggtgctcggcacacagccatcaacgcaggctcgtcggccgggaaggaatgtctcgcccgagcgcgaccgacagcgttcaccggccggagttcgtcgaagcggacggagcttggctagagcacagagtacgcgcagaaggaatgagggcgcgcatggaggaccagacgcgacggcacacacgacgagtcaatggagagggtatggtggagcttaccagccgagacggcagcggcgggctccggcgagacggctccggcgaggccagcgggcgacgacggggcaaggcaagcgatgcgcggccatggcgaacgtcgaatgcgcagggtcaggcacgaccgtaatagcggggcgaggagcaacttcgccgatgatggcgtactggccgcgcgctgggatccggtggcaggaggaaagcggcatgggcgagctgggcacgcgacagcagggccggtgcggtggggagaggctcgaccgtcggctcctgttctctcagctgttgcgcgcgttgggcgaggtggggaaggggtga

SEQ ID NO: 28197 - DNA, 405 bp, Zea mays
  Peptide Sequence Number=SeqID_69976
atgggctggtttcagcccatacggcccaatccagagagaaaggcgcccgcgcccgcgcgcgctggcggctttgcaaaaataccctcggggttctcattaactggaatccggtctttctactgttttcctgtatcactgacgctttgcacagaggcccttaaggttttatttcttcgcagtgggcggtccacgacggcgttcacgccccgccgagctccggcgagcacctacgccggccgattggggctacggctgggttctccgagcggcggacatgaaatcggggctaccacaatcatttcccctaacccaattgcgcttatgatcaactatggagctctggccacggtggccgtgagcatcgtggcaagacagccgtgttcccggcgatgggtggcggtctag

SEQ ID NO: 28198 - DNA, 111 bp, Zea mays
  Peptide Sequence Number=SeqID_69977
atggaaacaaaatcaaactgcggcgcaaaatcaaagcgtcgcgagaagaaggaggacaacatggaaactgagatccagatcgctgcaacagccatgcagctagacgcgtaa

SEQ ID NO: 28199 - DNA, 258 bp, Zea mays
  Peptide Sequence Number=SeqID_69978
atggtcggacagggtcaagttggtggacttgcaccccacataggcatggatgtcgagcctgtactcgaggagtgcctgcatctgggattatcaaacacaggtctacctatatggtatataaaaatcgggtctttagtgaatcctggatctgccattgtagacaaggacaatgacgatgaggtgaacgggagattacggtttgagtctttaatcacatttttagggattcagtttaacgagggatttgacctatgttaa

SEQ ID NO: 28200 - DNA, 165 bp, Zea mays
  Peptide Sequence Number=SeqID_69979
atggccaggcgtgcccgcgtgcgattgacctactggacccacatgtcggcgccatcactagagccaggccgcgcgagtgagaaagggacaatctggggcggcatccaacaaccctcatggattgtccggcccatcgctgcaccagtccagccaccaccttgctga

SEQ ID NO: 28201 - DNA, 231 bp, Zea mays
  Peptide Sequence Number=SeqID_69980
atggctttaagtcatgccgcaacagcgcccttccccaatcgtccagtcgcgaccaccgtcatagcagagagagtcgtccgcgccgccgtgagagaagaaaaggggagggcagtgggagcgctaccgcggatactcgtcgccggtggaattcaagcgccagcaaggctattcgggtgtgggactatcctcacagcaactggagaaagggataattggatggacgccagctga

SEQ ID NO: 28202 - DNA, 576 bp, Zea mays
  Peptide Sequence Number=SeqID_69981
atgggtgtcaatgacttgctcatcttcttggaaatttacacggctcttgaagtctttgcgactgttcgctttatcgacaaaaacacaatgcctaggggcaaaggtggcaagggcaagcatggcaagaaggaccaaggcgggaagcggaagcatcctccgactcctccatcggaggacttcggtgactccgagttctcggaggagaagttcttgtccgagggcgaggagtctccaccaactgtccccgtctcgtcattgtctgagggcttagatgactcgatggggctctcgacggtggagagggcctacatccggtccatcgagtgggtagggctcaaaggttcggatgactctgaggaggatgactcctcagaggatggctcttcggaggaggactctgaggaggaggatgggagcggcaacgatggtggtgacgaggcggtagtggtggtggcaaaggcgacggcgacagtgatgacagcagctacgacggctgcgatgagggcggcaacagcaaggacgacaatggcgtcagctgtaacatcggtggcaaggtgccaccagcgtaagaattag

SEQ ID NO: 28203 - DNA, 2982 bp, Zea mays
  Peptide Sequence Number=SeqID_69982
atgcccgacataccgagggatgtcgccgagcactcgctggatattcgggccagagcccgacccgtcaggcagcctctgcgccgattcgacgaggagaagcgcagagtgattggcgaagagatccacaagctaatggcagcagggttcatcaaagaggtattccatcccgaatggcttgccaaccctgtgcttgtgaggaagaaaggggggaaatggcggatgtgtgtagactacactggtctcaacaaagcatgtccgaaggttccctaccctctgcctcgcatcgatcaaatcgtggattccaccgctgggtgcgaaaccctgtccttcctcgatgcctactcagggtatcaccagatccggatgaaagagtccgaccagctcgcgacttctttcatcacgccgttcggcatgtactgctatgtcaccatgccgttcggtttgaggaatgcgggcgcgacgtaccagcggtgcatgaaccatgtgttcggcgaacacatcggtcgcacagtcgaggcctacgtcgatgacatcgtagtcaagacaaggaaggcttccgacctcctctccgaccttgaagtgacattccgatgtctcaaggcgaaaggagtcaagctcaatcctgagaagtgtgtcttcggggtgccccgaggcatgctcctagggttcatcgtctccgagcgaggcattgaagccaacccggagaagatcgcggccatcaccagcatgggacccatcaaggacttaaaaggtgtacagagggtcatgggatgcctcgcggccctgagccgcttcatctcacgcctcggcgaaagaggtctgcccctgtaccgcctcttaaggaaggccgagtgtttcgcttggacccctgaggccaaggaagccctcgggaacctgaaggcgctccttacaaaggcgcctgtcttggtgcccccggcggatggagaagccctcttggtctacgtcgccgcgaccactcaggtggttagcgccacgattgtggtcgagaggcaggaggaagggcatgcattgcccgttcagaggccggtctacttcgtcagcgaagtgctgtccgagaccaagatccgctacccacaagttcaaaagctgttgtatgctgtgatcctgacaaggcagaagttacgacactacttcgagtctcatccggtaactgtggtgtcatccttccccctgggggagatcatccagtgccgagaggcctcgggcaggatcgcaaagtgggcggtggaaatcatgggcgaaacgatctcgttcgcccctcggaaggccatcaagtcccaggtgttggcggacttcgtggccgaatgggtcgacacccagttgccgacggctctgatccaaccagagctctggaccatgtttttcgacggatcgctgatgaagacaggagccggcacgggcctgctcttcatctcgccccttggaaagcacctgcgctacgtgctgcgcctccatttcccggcgtccaacaatgtggccgagtacgaagctctggtcaacgggttgcggatcgccatcgagctaggggtgagacgcctcgacgcccgcggtgatttgcagctcgtcatcgaccaagtcatgaagaactcccactgccgcgacccgaagatggaggcctactgcgacgaggttcggcgcctggaagacaagttcttcgggctcgagctcaaccacatcgctcggcgctacaacgaaaccgcagacgagctggctaaaatagcctcggggcgaacgacggtccccctggacgtcttctcccgggatctgcatcgaccctctgtcaagatcgaagacgcgcccgagcccgaggcaccctcggctcaggccgaggcgccctcggctcggcccgaggtaccctcggctcagcccgaggtaccctcggcccccgaaggcgagacactggacgtcgaggaagagcagagcggggccatgcctgatcgagattggcaggccccgtacctgcaatatctccgtcgaggagagctacccctcgaccaagtcgaggctcggcgggtagcgcgacgcgccaagtccttcgtcttgctgggcgatgaagaggagctctaccatcgcagcccctcgggcatcctccaacgatgcatctccatcgccgaaggtcgggaactgctgcaagaaatacactcgggggcttgcggccatcacgcagcgccccgagccctggtcgggaatgctttccggcaaggcttctactggccaacggcggtggttgacgccactagaattgtccgcacctgcgaagggtgccaattctatgcgaagcagacccacctgcccgctcaggctctgcagacgatacccatcacctggcccttcgctgtatggggtctggacctcgtcggtcccttgcagaaggcgcctgggggctacacgcacctgctggtcgccatcgacaaattctccaagtggatcgaggtccgacctctgaacaacatcaggtccgagcaggcggtggcgtttttcaccaacattatccatcgcttcggggtcccaaactccatcattaccgacaacggtacccagttcaccggcaaaaaattcttggatttttgcgaggatcaccatatccgggtggactgggccgccgtggctcatcccatgtcgaatgggcaagtagagcgtgccaacggcatgattctacaagggctcaagcctcggatctacaacgacctcaacaagttcagcaagcagtggatgaaggaactcccctcggtggtctggagcctaaggacgacgccgagttgtgccacgggtttcacgccgtttttcctggtctacagggctgaagctatcttgcccactgacctggaatacggctccccgaggacgagggcctacaccgatcaaagcaaccaagctagccgagaagaatcgctggaccagctggaggaggctcgggacagggccttactacactcggcgcggtaccagcagtccctgtga

SEQ ID NO: 28204 - DNA, 3096 bp, Zea mays
  Peptide Sequence Number=SeqID_69983
atggtgtctcattatcagctgctttatgagctagcactgtcattacatctaagggagcctaagaattctcatatgcctagaagctctcgtctaagggacaagaagaagaatgaagaaaacaacagttttctgagcacccttcttgacaagagttcttgtataattatcccggagattgaatttccccttccatctgttcctacaacgagggcacctgaagtctctgataagcaaggcttgattgctggtccctgtagtattagccagcaaaaagctgaggaaactcttgtttatggtgatgaaattgatgaaatcaaagaggttgagaacatgagtgaatcaaccacttcctctgcatgtaaccaaagaaagttctacgaaacaaaatttggaatagttagtagtactgcattttgcttatcaacttcagatattcagattggagtaattggaaaaggtagatcacatcaaggaggtgggctcttagatcaagggcggttgccatgtgttcagtgtggcatattaagctatgcttgtgtagctatcattcaacctaaagaagcggcagtccaatatgtcatttctagggagtgcatgtcatcaagtgcaatacacagagaaataatggaatcggatgatacctcaaatcgaatggtgatagctcatcaacaaggatatgctcatcaaactgatgataatacaatacaaaatgtgagtgcagcccaagtttctgataggtgtagacagctatacagcagcagcacccatggatgcacttccgctcttgggcttctggcttctgcttatgaatcatcagaatctgatgaagaagcagatgcacctaacaatatatcaaacaattgtgaaaacaataatgcggcaaatggagccacaaatattcagtcctccagaacatcagttcaggatgaaaatacgaatttgcaattgtatgaagaggaaaataactccagagcaatagcatctctgatgcaaccagtggaggataagagtactgctatgactcctgttagtatggaaacaaatattatccatctagcagatcagggagagtcactaaccttccatgagcagtggcatgcgtatcttgactttgatgatctaactgcatcaggtgtaaaagcctctccgaatactagtttgggcacggctaaagctgcaatgaaaacagatgcactgactttgttcaagtacagcaaggattcctgcagaatgcacgtgttttgtctagaacatgctttggaaacttggacacgacttgaacaaattggtggtgctaatatcatgctcttatgccatccagaataccctagagcagagtcagcagcaaaagttatagcagaagaacttggtatgaagcatgcctggaaagatatcactttcaaaaaagcaacacgtgaagacactggaagaattcaattggctcttcaggatgaagatgcagaacctacgagcagtgactgggcagtaaaaatgggtatcaacatatattacagtgccaaacaaagcaaatctccactttacagcaagcaggtaccatacaattctatcatttacaaggcatttgctcaggaaaatccagacagcttcgcagatggacagcgatcaagcacaacaaagaaaaaggtagctggatggtggtgtggcaaaaaatggatgtcaaaccaagttcatccacttttagcttgtgaacaggtagaacagaatcatgaaacagtttacagcaaaacgatgttatctgctagttgtgacaggatgcaagaacaatcaacaagatctactaccctgatcaaccaaaattcttcaaaaaagataaccagaagaaaagagggggactctgttgagaaatctagaggcaaaaagaagagatgcagtgccagtgcttctgatgaagctgctttgcactgcagtgtgtatgatcagcctgtaaattctgataatcatgccaaatatgaagatggagatgaaagtgtggaagcacggaacacccgacatcatcaacaatatgaatcgctaaataaaaaatcaagtttgaagaggcgaaaggataataatagaagcaacagctttcatgagctacacaaggacaatgttgacattgactgcaggtttgatacagacggcactgaaaacacctcaataggtgactgggataatagtccaccacaagggggtgatgtcaaagcagtgaaatctggtgctcgattgctaggcactaagaggtttagcaaggagaagggaagtaatggtttgtcaaatgtaaacaagaaattggtaaagatgggtaagaaaattagtactaagaagcaaaagaatgacaaaacaaataggcagtttcaagaaaatcacaaaaaggctgacattgtggatttgcttcatgaagatgatggagatgaaggcacatacatagactgcaatgaaattcgaaaacaaaaaacagatgacgtgagagtaaaatctagaggcaaaatgcaaagtggcaagaaaaaagtcagcagatgtcaggcaagtgatggttcgcacaatggaggcaaggaaatgaaattatcaagtgacatagaagtgtgcaacagaagaggagatggaacaacggcagccaattttgaagaaattccaaaagaaaaggccgatgctgtgaaagtgaaacccaagatgcaaggtgacaagaaaaaaaccagtaaacatcaggcaggcgatggagataaaggagcaaaattttcttgcgatatagaagggtgtgacatgagtttcagcacccagcatgacctgtcgctgcacaagagagacatctgtcctgtcaaaggatgcaagaagaagttcttctgccataaatacttgctccagcaccgcaaagtgcacctggatgaaaggccgctcatgtgctcattcccaggctgcgcgaagacattcaagtggccatgggcgaggacagagcacatgagggtgcatacaggggtgcgcccgtacgcatgcacggaacctggctgcacccagacgttccggtttgtgtcggacttcagccgccacaagaggaagactggccactcgtgtgacaagaaaaagaaacgcggcctttga

SEQ ID NO: 28205 - DNA, 768 bp, Zea mays
  Peptide Sequence Number=SeqID_69984
atggccagcttggccaccaagctgggcgacctgctcatggaggaatatgtcgtgcacaaggccctcaagcccgacatcgagtccctctccagggagcttgtgatgatgaatgtcgccctcgtcgacgtgtctcaggttccacctgaccagctcactgagggcatccgctgccacaaacgccagagtcttcaagaagatccttggcaagatcactgccgcgatgtcgatgaagaagttcaaggatggcgccagatctctaacaaggtcaaagacatcaagaaactctcctaccagttagttgagctccgcaccaagtacacaataaggggtgcaggtgttgatctcgccacaagcactagcatcgacccctgtgtcatcaatctgtacaagaaagagtcagatctcattggcatccaggagtcaagggacaaagtcattagggcatgtacagtctctgttcaatcctcaccttttcagagcagcaagaagcattggtgcggtctctgttcaatctacagggactctaggaaccagcgctttcttctaaaatctggcagcagggaagccgtatgtgggggagactgggagccaccaaggcagctccagcgcctgagtattaaaggcatcgtcttctcacgacagcctcgatggatcaaccactcctccctaccatgcctctgcttcttatatttgtcggtgcacgccgttgaagcacatgacctagataacctagtgaggttgacacagctccagtacctcaagctctag

SEQ ID NO: 28206 - DNA, 387 bp, Zea mays
  Peptide Sequence Number=SeqID_69985
atggagggtgcacccatcggtcttgacgtggcactagcgattgctgcggcggtgcacgcttcttggcatggcagcgaccatgtcgatgcgcagcacgtagaagccgacgtgcgacaagcctcaggcgcaacaggaagctccacctcgcccgaccttgggcctcagcctcagaaggaggtctccgcctcgcccgacctcagggctcggcccccgcctcagcctcggaaggtggtctccgcctcgcccgaccccaaggctcggcctcaacctcagcctcggaggatggtctccgcctcgcctgaccccagggctcggcctcaacctcgacctccgaggatggtctccgcctcgcctgaccccagggctcgacctcggccccgaccttag

SEQ ID NO: 28207 - DNA, 690 bp, Zea mays
  Peptide Sequence Number=SeqID_69986
atggtggtttctgtatcagggcatggggcttctatcccaccgttatcttctcagagcagtgcaccacagtactcatatggtggacatcagggtacaagcaaaaagattgaaattccaaatggaagggttggtgttattattggaaaagctggggaaactattaggtatatccaacttcaatcaggagcaaagattcaagttacgagagaccatgaagctgaacctggtgcactgacaaggcaagttgagctttctggcaatcctgagcagataagcaaagctgaacagttgatcaaagaagttatagcagaggctgatgctgggtcatccggtgctgtatctggtggccggaaatacaatgcaccacagccaggcgctgagacattccagatgaaaattgctaataataaggtgggattgattattgggaagggtggtgagaccataaagtctatgcaggccaaatctggagcccgcattcaggttattcctttgcatctgcctgctggtgatacttcaactgaaagaactgtgcatattgatggcactcaagaacaaattgaacatgcaaagcagctggtggctgaggttaccagtgagccacaacatgcaaggagattgttatacgacttattccctttttctgaacatagcttattaatagttttgggcaaggttttcatgacttaa

SEQ ID NO: 28208 - DNA, 120 bp, Zea mays
  Peptide Sequence Number=SeqID_69987
atggcggcaaccgagccgagttgttgcgggatttcagcttggagaaggagaagagtcttgcaacccgggccccacatggtggaggtagtaatcgtcacaggtataatttattttaattaa

SEQ ID NO: 28209 - DNA, 405 bp, Zea mays
  Peptide Sequence Number=SeqID_69988
atgtccagtaaccagattcagatgtgggcgccgtgcgtgggtgcaaggccaagccgaggtgaaagagattcgacgattgagaatacatcaaagaataaaaaagtggaactcggatttttagatgaagagcgtgaccaagaacttcctgatttttcatcatttattccattcttacctcctctgagtgcagctaatctaaaggtctactatgccacacgtttcaccatcatagttgggataatggtgttcagtggttttcttgcaccaatcaagtgcactcaggttatacatcaagtaaagagcaagacatttgaaagctcatgggtcatctgtgttgctattgatgcaagcgaaagttggctgatctgtgagattcatgggtgcagattgatactaagtggctga

SEQ ID NO: 28210 - DNA, 2112 bp, Zea mays
  Peptide Sequence Number=SeqID_69989
atgtccgacatagcgccgtcgccgagctcgtcaccgtcgagcggaggaaatggaggtggcaacaattccacggcgcctgcaccccgcggttcatcaagctcaagctcaccccctaaaccgaggaatggctggcctagtagcagcccacctccaactccaagctcagactcagagggctcaagatcaacgccaccatcagattggcaagatccgtcgtcctcctcctctagccctccgccatcacgatcgtcacctccaccgccgtcctcgcagccgccaccaagcccaccaccttcgccatcttcttggagcggtggcggcaactcgacgtcctcgtcaccgccaactccaccttctcaaccctcaccaccaccctcgggcagatcgtcgtcgcctccgcaacggtcgtcagaaggctcctcaccttcgcctcagtcttcgtcctctaaccaggcccctcccgcaccgtcaggctggtcgccttcgccgtcgagagaatctcctcctcagtcgtcatctcaatctccgccacctcagagcgatgttgaccagccaaactcccagccttcgaatactccacaaagtccaccaccaccaccatctcctccgtcgtcgtcgccgcccgcgccgccgacgaaccaatcggtagtcataatccccgtccccgtgccgtctaataatagcccgccgggagcgctgccgccgcccgggctcgtgcccaccgcgcctggcgccaccgtgatgtcgagtaccagcgtcccgggttctgctgcgtcgtcgtcatcccaagaagccagtaccggcgcgtccaacggcggtggtgggagcacatcaacaagagtagtaggcagtagccatgttgccgcggccattgccggtgcggcgatcacgggcttgatgtttgctctgctggctgttttcctggtgtctaagaggaggaagaagaaaactggtgggctagtttatcacaacgatggcagcaactataacatggcgtcaggtcagttcatgggctcgaacaacccgtcgtacacgcagccggcggcgggcgagtcggcggacatgggcgggggaggagggtactaccactaccagaaccagtcaggcagcatggatgcggcggcggcgccggggtccatggcgtcgttcagctacgaggagctgacgagcatcaccagcaacttctcccgcgacaacgtgatcggcgagggcgggttcgggtgcgtgtacaaggggtggctgggcgacggcaagtgcgtggccgtgaagcagctgaaggccggcagcgggcagggcgagcgcgagttccaggcggaggtggagatcatcagccgcgtgcaccaccgccacctcgtctccctcgtcggctactgcgtggcgcagcaccaccgcatgctcatctacgagttcgtgcccaacggcaccctggagcaccatctccacggtcgtggcatgccggtgatggactggccgacgaggctcaagatcgccatcggcgccgcgaagggactggcgtacctgcatgaagactatttcggcctggccaagctcaccaacgacacgaacacgcatgtctccactcgcatcatggggacgtttgggtaccttgcgcccgagtacgcgtcgagcgggaagctgacggaccggtccgacgtgttctccttcggcgtcgtgctgctggagctcatcacgggacggaagccggtggaccaagcgcgccaaggggaggagagcctcgtcgagtgggcgcggcccgtcctcgtggacgccatcgagacgggcgacctcggcgcggtggtcgacccccggctggtggacggcggcgccgcctacgacaggggccagatgatggtgatggtggaggccgcgtccgcctgcgtccgccactcggctcccaagcgcccgcggatggtgcaggtgatgagggcactggacgacgaaggaggcatgtccgacctaagcaatggggtgaaggtggggcagagccggaatttcgactccggccaccagcaagcggccgccatccagcagctccgtgccaccgccttcgcctccgaggagtacaccggggagttcgagcagtcgtccggcatggattaccttaaatcagga

SEQ ID NO: 28211 - DNA, 735 bp, Zea mays
  Peptide Sequence Number=SeqID_69990
atggaggagaacggcgacgacgatgatgatgatgaggggatggaggtccggatgggcttcagccccaaggccggactttggtccgcatcggcctcgttcccatggaggcggtggctacataggagattgccaccgacctgctccaggtacccaacgcaaggcccacaaaggaggaggtcactgtctagcccccggtgcctgccacggggaaaagggcttgaggagccggaggccgaggttgggtgtggacgtcgtgcccctattcggcctagggccatgatatcaccatcccaggggtcaggatatcacaggctagccctcgaggggcaggctacgcagggtgacaccgtcgccgagatgggagcatcgcctgtggcgccgctggttgaggctgtccccgtctctgaggaggagacgagggtggccgatgcgccatcggccatggcgtcgcccaccgtcaccgacctcctgcgcgccatctctgacacccccgagactacccggagcccggaggcatccaacgtcgaggaggccgatccctcgaggcggcccagggtatcggctgaggagcatatcatcccgcccgccatcgctaaagtggctagtgatctcattcatgccggactggacctctcgatgtggggagggctgaccctgacatggatggcctctgagggaaatccctactttgtccttaacgacgccaaggagaagcagatttggtcggaattatga

SEQ ID NO: 28212 - DNA, 195 bp, Zea mays
  Peptide Sequence Number=SeqID_69991
atggccgcgggagaagaagagtgctgccgcaggggcaattcacgtgcgtcgccgctctgggcaatatgggcgtcagggaggctcgccaagttgttatttattgttcatgttaagatcattatgataattggaacatggagaaccacccgggaaaacagtgctaccacaagggtgatatgggatgcccttggctga

SEQ ID NO: 28213 - DNA, 495 bp, Zea mays
  Peptide Sequence Number=SeqID_69992
atgtgtgattcagcccatagtgatgggccccgtggggtcaggcagattaaatcccaacatttggcacccaccgttcgtgctacaaaaacaacccgcgatggcaagcgacctagtttgaaggttgccccatccattgacaacacggcgcaggcagcactactggcggaaaagaaaggcaaggccctcgcggacaacaccccccaagaggccttcaaagatgacgctgttaacagcaaaagacagcgccaggaccatcccacccccgagggcactgtgcgcacctgcagctctgaaggtgcaccacaagcaccaccgccaggcttcgccccaccagtgggcgaagacaccatagaagatggagaagtcattggcatcttagccgaagaccagctaaagctgcgggctctgcgcatcaaaaacaaccacctccagaagcagaaagaaaccctcgaggccaagcaccaacgagtcaccatgcaaaccaaggtgcgttag

SEQ ID NO: 28214 - DNA, 210 bp, Zea mays
  Peptide Sequence Number=SeqID_69993
atggccgcgggagaagaagggtgctgccgcaggggcaattcacgtgcgccagcgctcagggcgatatgggcgtcggcgaggctcgccgggatcattatgttaattggaacatggagaaccacccgggaaaacaatgctacgacaagggtgctacccgaaaggggcaagggcagtaggggaatggtcagtgtagggaggtccatgggttga

SEQ ID NO: 28215 - DNA, 291 bp, Zea mays
  Peptide Sequence Number=SeqID_69994
atgggcttcgctcctataccagctgtcacagaacctcccaaggtattaggcccacctacagatgtccttgttctgaggatctcagacagtcatgaagaaacagcagaactcaccagtttcatcacctacaacaacatgggtttgaaaaccctaagtatggagtgtactttcgcaagtcttacccgtcaaaggaaaaagactctcaaggatatgttggcctttgggaatcaaggtttctcaagactagaatgggttcacgccaaccgagagcatagatactccaccgtctag

SEQ ID NO: 28216 - DNA, 1950 bp, Zea mays
  Peptide Sequence Number=SeqID_69995
atgggatctttaccaaatgcagaagaatcaccatttggcctagagtctttgttctggcaggaaagcatacatgaatctgtggaatatggtgcacctgcttctgcaacaactcatactgaaaatggatttggtgaatcaaaaggttgccatgtcaagtctgcactcgaaaatactcatgtgtcagaacctttttcccaccatgatactgaagaaaatatttccaaaattggtggttgcatgcatacatcccagcaagataatggaatggaagatgctatcgagaatcctttaattagtttatcaactcctggttgcaagcatgaaggtgctttgtctgaggaagcagtgcacacaatgaaggattatgctggaacatgctcatcaaatcccagggtacccatgcagttgcatgacgaccttgcattcccaggtcctgaaaaatcaggagatgaatcagtcaatattgaggttaaagtacaccatggttctaatctgtctcagttaggatcaactgatctcttggatgatactgaattgcttcaccagggccataactataaagatcgatccaatgaggatatgctagagcaggctgcttctgaaccctgcacaaatggggatgatatcgtggaggctgcggctgctaccaaatgcttagaaagtggagcgatgctggttccatccgaagagagatcaaatttgaacgataggcagcttacccccaagctggaaagcccagacatcatggaatctggccttaactgtgataaagatgctcgcaatactttggacaatggatctgttgtggctgttgctggtaagagaactccatctggttctggtcactatgaacacaatgtctaccaagtttcaggcatttgtgctacgtctgaagctgcaccagtcggagtggtagaaactggaatagctgtggaaacgtcatccctggtagatgaccaacctaatcctgtgctggatggtgatgaagttgagaagcacagcttaaactgtgaggcagacactggtcggattcttggtactggatctgttacgagcaacacaacccttgtgcccaaggacggtcacaccatttgttgccaggaactggagctaccaaatggcttatcctcgtttctatttcccgaagaatctggaatttgtcagtatgcgagtgtctcaggatcagggccttgcctgcagcacgtaaatgaaagcaccagtacgcaagcgacttacaatattgaaacgctcaatcagcagcatcacgaggagtacgaccaaaccgctcgtggtatcctggctagcagttttcctgaagctgtagggattgaacagtcaggtctggcccctgctgcagaagcaccagtgttggcagtgccagatgggcagcctaacagcaagctggagggcaacgaagtggatgagcacagctgtagctatgatgccgagttcctgaacagagaagcgtctaaccttcacaaagatctgtttagtgaagatagtcatcgaagtcatctaccttctctgagatctcctcaacgatctgcctattttcacaacggaaatgattcgggttcagtaggagtctgtcaaagcagcaggcgaggaggtgtagacggactccgcgctaagcggcagagtttcaaagtttccagcagcataaaaggaagctacgtcgccaagactagcgtccctcgtccgaagccaggggacagcctgagccagtctgcgatagcgctgcgcggggtcaggaagaacacgaccgctgttgaagttggtggccatcctgtgagtttgaagccaaacgctgttcgctcggtcgccaaggacccatcatccagcagaggaccacccagggatagcctgagccagtctgcgatagcgctgcctaaacacagaaaggacgccactgctgttaagagcaagactaataataaaccttggctataa

SEQ ID NO: 28217 - DNA, 1876 bp, Zea mays
  Peptide Sequence Number=SeqID_69996
atggagtttgctgcgatgaaacggagagacctgctggagctctgccggcagcacggcctcgccatccgcggctccaaagccgacctcgccgccgtgctcgcaggcgcgctctcgggtttaggggggccgtacccagagcgcggcggcaaggacaaaccaaaactctgctatatacagggaacaatcacagcaatgagggaaataaccgaagggcctcctgttgctgttgctgctgcagctgagagtgtagttggtgtggtggtgaggaagggctgtctgaagcgtctgggaggtagtgctagcggtggcacttccggggcttccaagaaggtgagttttgcattggatgaaacgccagaggtgaagggacgaagacgaaggtcccaggtgattttgccactcgttgttgccaagacaagggggaggcgcaagggtaggaaggcacctagttctgcagcagtgagtggaagcggtcggcggcggaaacacgatggtggtggtggttctgctcgtggaagcgttaccagagaggttggtgcagatgccccagtgacacggtctaggatgaaagtggcgtctttacattctcacagtggggttgaaagtcagaataaccctgctaaggctgaggaaagagggaaggtggtaggaacagctactaggaggaagcagaagcgcaaggcccatgagaatgctggggatattgctaattcatgggcaggaatttctcgtaggatcacaaggagtttaagctcgtcggctgcagcagtctcattgccatgtgatgctgaggaagagagaggggctagaaaggtagaaagctcagtagcagctgatgtgatattggccaccctcgttggaaaaaagaggaggaagacatggtgcaggcctaaggccagggaggaacttcctgccgcagctctaggcgaaaggggtagctcgcagaagagtgatgttggtggcggttctgttgatcatggtgcttttcaagagttgtgtgcagatgctccagtgacacagcacgggacaaaagtgaagtggaagatccaggagaattctgaggatatttgtgccagagcgtcgtctggaatttctcataggaggacgaggaagtcaagctcgtccccagctgctgttctgttgtcccctgctgctgagaagatggaagtagcagatgataaggatgaacctggtgttaaggagttagctgaagttaaagtgttcgccaccacagcagtaccaattattgctgagagtacaagtaagaggaaggaagtagaccacgtccctgctgagctgaaacctgctaaggtagagttttacggcagaactacaagatcacactcaacagcagctgctgcattatcgcccactgtgattggaagcaagttaagaaaggcaggagatgtgcacacaaacggagaggtgtctaaggacttggaggttcctcgaaacgatgctcctattaccaggtcactgaggaacagagttgttcatattaacaacagcgcagttgatggaactcgtgcccggaagaagcttggaaccaagaggaagcccagtagtagaccagcaactcacgggcgtcagccacctgtacctcctgtagaggataaagaacaagttgctgtgccctgtaagttctcccaacacaggcgatcaagcagaaaccgtcctcggcctgatgaactgttaagaaacacatatttagaaaataacaaggtgaatggagtaccagtggggggcaaggacttgagtatagctcatcgattgacacataacgccgctaaggccagcgtgggagatgttgagtcgctgtcgccaggtttcgaagacagtctcaccaggagcaacaaggatgatgtgagaaccaaag

SEQ ID NO: 28218 - DNA, 465 bp, Zea mays
  Peptide Sequence Number=SeqID_69997
atgtctttccgcagcattgtgcgtgatgtaagagatggctttgggagcttgtctcgaagagggtttgaggtgaagtttctgggccaccgccgaggcagatctcacggtgctgtccatgagctgcgtgatccagccccagtgatccagagcagttgctgggctaatttgccccctgaattgcttcgagatgtgattgagaggttggaggccagtgaagccacatggcctaacaggaagagtgtagtctcttgtgcagctgtttgtcggacctggagagaaatctgcaaagagatcgttaagaatccagagttctctggaaaaatcacttttcctgtgtccttaaagcagcctgggcctcgagatgtaaccatccaatgcttcatcaaaagggataaatctactcaaacctactacttgtatctgtgccttagcacagacattgcaaataacaagataatgacatga

SEQ ID NO: 28219 - DNA, 357 bp, Zea mays
  Peptide Sequence Number=SeqID_69998
atgatgaaaagagatctgatgatggtaagcaacctcctctggaggcttctccctaggaaaaagtacttcaagctgaggaaacaaggaaagagcaaaacccttggaaaaaccagagactcaaccttgaatccgatgaccgaaagagaatgcgtcgatgaaagagaattgtgtgttgtcaaggttgaagatcaaagcttcttttatatagaagaaatcattgagaacagaatgattaaagagaaagctagtatgactatcatttctgttgtgcaaggagctatgggtgaaagaaagctcgaacaagagtttatgaatatgctgggcaagaatgtttggaggtggttgatagtcgcctag

SEQ ID NO: 28220 - DNA, 423 bp, Zea mays
  Peptide Sequence Number=SeqID_69999
atgatcgcagtgctggccctggcggccgccgcggcggtcgcgttcctggagagcgcggccggcgggatatcctacgcgggggacgggtggctgcacgagtgcgccaagtgggacgccgagggcggcaggttcctggcgtccaccttcttcggcggcggcgtggcggaggtgcgcgccggcgagggcgaggccgaggagcgggtggtcgtggccgaccccgtcgcggccggccgggtcgcgctggggctcgcggtcgacgcgcccaggcggcgcctgctcctggtctacgccgaccggccgccgcgcctcggctacgccgcgctgggcgcctacgacctcggatcgtggcgccgtctcttcctcacgcgcctcgacgtgccaggtgtgtgggcctctcggcagtacggttaccctgtttgctga

SEQ ID NO: 28221 - DNA, 837 bp, Zea mays
  Peptide Sequence Number=SeqID_70000
atgccagaggagcaagacatggttgccagaacaagaatctatcgtcggaggggccgcaatcgaaagctgaaatatacttggaagtctgcagggcatccaactgttagaaaaagaattggtgatgggaagcaatggtacacacaatataacccatgcgtgtgccagcaaatgtgtggtgttcgaagagctgcaaaaacaagtttagaggctgtcattgtgcaaaaagtcaatgcagaagcagacagtgcccctgttttgcagccagtcgtgaatgtgatccagatgtttgtaggaattgttggctgtggagatggttcactaggtgagccacctgccagaggtgatggttatcagtgtggaaatatgaagctccttttgaaacaacaacaaaggattttgttaggaagatctgatgttgcaggttggggtgcattcatcaagaatcctgtaaataaaaatgattatcttggagaatatactggtgaattgatctctcacaaggaagcagacaaacgtggcaaaatttatgaccgggcaaactcatcatttctgtttgatttaaatgaccagtatgtgttggatgcttatcgcaagggggacaaattaaagtttgcaaatcactcatctaaccccaactgctatgcaaaggtgatgctggtggctggcgaccatcgggttggtatctatgcgaaggagcatattgaggctagtgaggaactcttctatgattatcgttatgggcctgaccaggctccagcttgggctaggagacccgaagggtcaaagaaggacgaagcatccgtctctcaccatcgagcacacaaagttgctcgatag

SEQ ID NO: 28222 - DNA, 141 bp, Zea mays
  Peptide Sequence Number=SeqID_70001
atggacacaccagacagtccggtggcgcacgagacacccactgttcactgtccgatgccaaatgaaattataccaattgaaatctctatccttaatggaattttgaagccagatgagataccaattgaaaatccattttga

SEQ ID NO: 28223 - DNA, 789 bp, Zea mays
  Peptide Sequence Number=SeqID_70002
atggcttcgtcatctaaggcctccgactcctcctcccaacgatccaagcggtcggatcaagggacgggcagggaagccgctcccgcctctgttgtcccgatccacgggaacctgacgcagttgatacgccaaatcaaatcgaggcgcctcttgtacatcaaggagaaattggaggcgaacaggaagacgctgcagaggcactcctgcgcgctgttcgacgtggcagcggcggcggaggtggcgtcgaggggcagcgatggcggcaacgctttgtcgcagcgagcggcggagggacagttcaggctcgctgggtcagacctggcacacgggataggggagagggacgtggtgtacatgcaggaggagaacctggcgtccgggacgctcgtgctctccagctcgggcgctgccgcgcagcggacagtcgtgcggttcgtgaagctgccgttggttgagaggatccctccgtacaccacttggatcttcctggacaagagagctactcaagagcatgggttaaaccgagaggttgttaatgtcctctgccagtttattgattcaactccatcagaaattgaggaaagatctgaagtcctatttgagaaaaatgagaaaaactctggatcttcagataagatagagaggcaactttctcttgacaaaactatggatgccgttctggattcttttgataatctcttctgccgcagatgcttgagtgagaagcaaccctacagctttgagcctgatgaaaacaagaagccatgtggtcgtcagtgctaccttcga

SEQ ID NO: 28224 - DNA, 315 bp, Zea mays
  Peptide Sequence Number=SeqID_70003
atggtgattgaagaaatcattaagggacaacatgatatagaggagaatgtgaggtctacccaagacagtattgtcttgaatgcttctcaaggtgaaaaaggtgaagaagggggtgaaaaagtttgtaggacaaatgatctacctggaggtatggttcctgccaaaaagaaaaaaaaagttgaagctccccaggaaagaagggtcagcgagaggctcaaaaaggacagtggaattagaatcgaggagaaaaatagaaggatggatgccaagagaaatcttgaagatatcattaaggtttcaaaaaatgggggttaa

SEQ ID NO: 28225 - DNA, 366 bp, Zea mays
  Peptide Sequence Number=SeqID_70004
atgccgtccaccgaccttcgccgcctcactgcccgcatcgtcgacctcccgccgggctcgcccagatcatggaggacgtggaagcaactgcgcgggggcgggtttcgcaacaccatcggcatgaacgtggttctagaggcctgcgtgcgctgcggcgacgtcgaccgcgcgctccggctcttcgaggaaatccgtgggcccagggggtgtggtgtcgacggtgtcctacggcatcctgctcaaggtcctgacactacacgcctcctggacaagcagctcgtcctcgagctgcagcatgacggccacctggatctcatggatgccatctggacaaaaagggagcatatggatagccacctggagtag

SEQ ID NO: 28226 - DNA, 372 bp, Zea mays
  Peptide Sequence Number=SeqID_70005
atggtgccgccgcttccctctcgccttctctacttttctgtcagcggcttaaccctgatgcttggttcggtggcgcgtaagattcccgacgagctggtggagcactacctcggccgcagcgggttccactgccccgacctgcgcctaacgagactggttgctgtagccacccagaagttcctatcagacattgctagcgattctcttcaagacagaggggggggagggcatctaggtcaagaacccgagctgctgccatccctgctggatccaacaccagtggctggcacagaacttgctccggtcagctgtgacacagtcaatctggaaggtgacggcagtggtggtcaatttgagagcacagataagtga

SEQ ID NO: 28227 - DNA, 993 bp, Zea mays
  Peptide Sequence Number=SeqID_70006
atgcaaatgcagctgtcgaacggcgacgtgtacgagaagacgcacgacgagctggacttcgagttcctgggcaacgtgcgcggccgcgagtggcgggtgcagaccaacgtgtacggcaacggcagcaccgacgccggccgggaggagcgctacgacctccccttcgaccccaccgacgacttccaccactactccatcctctggaccagcgaccgcatcattttctacgtcgacgagaccccgatccgggaggtggtgcggacggcggccatgggcgcggcgttcccgtccaagcccatgtccctgtacgccacgatctgggacggctccgcgtgggccacgctgggcggccggtaccgcgtcaactacaagtacgcgccgttcgtggccgagttcgccgacctcgccatccagggctgcgccgtcgaccccgccgccgaccacgccgtggcgtcgtgcggcgcgggcctgggcctggccccgctcgccgtgtccgcggagcagcgctcggccatggcggcgttccggcgcgcccacacctcctactcctactgccacgaccggcggcggtaccccgtcgcgctgtcggagtgcggggccgggcgcggggctcctcccccggccgcatgtttggcccccgaccgggatgaagcagccaccggcgccacccggggcgcggcgcgcggccaccgcggcggcgccccaggacgactacttcatgtgatcgccggtccctggcccctcgccacgtcgcggcggcggggcggggatggttgcacgctgtggattggattggattggattggattggattggggggttgggcggggattgtccgggatggaaaagctcgcctcattgtactattcgcgccatggaagtaggtcgtgtttattgcctgtggtgggacccatgtccgtgccaacgccaattgccagccgcgtagccgttgatgaagaaaaagccattcgctggccgctctttaccttgtag

SEQ ID NO: 28228 - DNA, 249 bp, Zea mays
  Peptide Sequence Number=SeqID_70007
atggtacagtgttcagatcagatcgccaagttcaggtacctcaccgtcggtgaccttgcgcgcagatttgtgccatcaccacgattcacgcccgaattaaacacggataacgatcctcgggtaaaagatcttgccgtggatgagcttggaagtactgtgcgctcggttattcatctattcgcaccggcgacgtggccaagcggccatcaccggcgtgttcgccgttcaccgtggggcgccacgccttag

SEQ ID NO: 28229 - DNA, 858 bp, Zea mays
  Peptide Sequence Number=SeqID_70008
atgaatcccgcgaatcgcccgccgctcctccagctccgcgaaccgcccgcccgacgagctcttccacaaacggccagatccgaccgctcaccctacccccactcccggatctcgaccccggaagcgacgacaacgaggactgcgtgggcggtcgcgcgccgacgcgcggtccatgtccccgctccacagctcgtcatcgcggctcaagctaatcaatgcgctcgtcgtcccggcgccggatctcggccccggccccgatgcgacaggaacgcacggggaggcagccccgccggtaaccgcctcgtcccgctcatcctcctccacgtcctcctcgtcctcgtcgggcacgtcgtcagcgcgcggataaataaagaagttcaggagcttttaaggcttaccttaagcaaggcccgagtcaagctgaccgataataccttttttaactggatcattatggacactaacagcatggatccatttaatggtctctatgtgggagcatttagtccatatggaccagaaattgtgcagctccgtcggaagttcggccactggaatagtttcgatgacgttgagtttttcgagtatgtcgaagcagtaaagttgactggtgatctgagtgtccctgctggccagataacatttcgtgcgaagattgggaagggcaagcgacttgagaatcggggcgcgtatccagaggaaattcggtgtggtaatttctgtctgcagataagattgtttgaaatatgctcggatattgccagttataaaggtcagggtagaatagctcagcctggattcaaaaatcctcgatgggtggatggtgagctgttggtgctcaatggcaaggtagactga

SEQ ID NO: 28230 - DNA, 357 bp, Zea mays
  Peptide Sequence Number=SeqID_70009
atgatgtgtatttggataataatcatcctcattgggttctatgtattctgcgacggaccattcagcttcgtgcgcgacctgtccggccgcatggacggaccgtctgataatatattcggattgtctggcactatgcacagatgggtttcccaagtcggctcaatgatgttgctgggagagacatcagagcaatcttttgaaccaaccattgagggccgatttgatagatattcatgtgatgtccccaacggagtcaccaaaaagtgtgttcgcgccgatccgggcgccaatcactgctatcagtatcggcgacttcgctctctgcggaagcgcggacggtccgcagccgagggctga

SEQ ID NO: 28231 - DNA, 2262 bp, Zea mays
  Peptide Sequence Number=SeqID_70010
atggcttatctccacatcctcatagtactactctcctccctgcatctaatccttggaaaccatgcaacgacgacgagggacaccatctcagctggccaaccgctacgcattcacgacaagctcgtctcccagaatggaaggtacgccctagggtttttcgaggcgggtagctcccaaaacacaagcaactggtaccttggcatatggttcaatagcatccccaaatttaccgtagggtgggtagcaaacagggatgccccaatgaagaaccacacctcactggagctcaaaatctcccacgacggcaaccttgttgtcgcaaaccgggccaccgactccattgtctggtcgactgaggtcaacatgaactacagaaacaacaccattattgctgttctgctgaacagctcaaatcttgtcctaagggacgacgatgcctccaactcgtccagcattagtatatggcaaagctttgaccacccgacagattcgttgttccagtgggctaagcttggttgggacaacgccaccggtctcaaccgccgcctcgtctccaagaaaaactcaatcagcccggctagtggactgtaccgagaggagctagaccctagtggcgttaaccaagtcgtcctcgcgtcactgatcaggtccaccaaaccatattgggccagcggtgcgtggaacggaaataggtttaactcgtcgccggaggtgtcaaggaacgttggtttcctatcatttgtagagactacgcacgagaagtatcacacataccatgtgtcagatgaagtcgatgtttattacaacttgggtgtgtcgggtcaagtaaaggtattcgtttggcctcaaggttcacaggactgggtactcgcccatgccgaacctagatctccatgcgatgtgtatgcagcctgtggcccttacacagtctgcgatgatggcgctctgcctcactgcacttgcatgaaggggttcactgtaacgtccgttgaagactgggagctagatgatcgaagcagtgggtgctcaaggaacaccgcactagattgcaatttgtcaggtgaaagttcagtcagatccatggataagttcttgtctgttccatgtgttagcttcggacaaagtgaacacaaaacagatggcgctaaaagcagtgcgaaagatatccaaagtttagagaaaagcaaaagagtacttgctattagagctgctatcggtactagtgctgctgctgctgttttatgtttgtttgcactcatcatgctgataatgacgtggagaaacagaaggaagagctcttacgggatgtcacaagttgcccaaggttgcaatggcatcatcacatcgtttcgatacatcgatttacaacgcgcaactaagaatttctcagaaaagctaggtcaaggtggttttggttcagtattcaaggggttcttgagttgctcaacagcagtggcagtgaagaggcttaaccatgctcatcatggagagaagcaattcagagctgaagttaagtcaattggaataatccaacacattaatttagtcagattagttggtttttgctgccagggtgctagaaggttgcttgtttatgaacacatgccaaatggctctcttgatattcatcttttccggagccatactacactattgaagtggagcactaggtatcaaatagcattgggagttgccagaggactgacctacttgcatgaggggtgtcgcgactgcatcatacattgcgatattaaaccagaaaatattctcctttccgattcgtttgccccgaaaattgcagatttcgggatggccaagatcttggggagggacgctagccgagccttaactacattcaggggaactataggataccttgcgcctgaatggatcactggagtggctatcacaccaaaagttgatgtttatgcctatggaatggttctattggaaatcatttctggacagaggaatgcatctgtttcatgttcttccagtattagcgatcatgacatctattaccctgtgcatgtcgcacgtgtgattgttgagggagatgtaatgagcttgttggaccacagattgaacggcgacgccgattccaagcaggtcgaaatagcttgcaaggttgcatgttggtgtattcaggatgatgagtctaacagaccaacaatggccgaggtggtcaagacccttgagggtttactagaaattaacaagccccccatgccaacgttacttcaagctattgccggaagctaa

SEQ ID NO: 28232 - DNA, 216 bp, Zea mays
  Peptide Sequence Number=SeqID_70011
atggagggagtgctccgggcgggtcggggtgactccggtgaggaaacccggccacagggagggggaatcgggcgtgctaaggctcggactagctccagcgaggaaggcctgacgcagctccgggcggcttggacggctggcacggtgggcgcggatctccggcgggctttggctttggaggcagaaagcgagaaagggcgagcgtgggcgaaatga

SEQ ID NO: 28233 - DNA, 783 bp, Zea mays
  Peptide Sequence Number=SeqID_70012
atggcgcacgcaagaacccagtccacggtgacttgcggcgcgacgcggtcgtcgtactccggtgagcgattcccaacggtgtcccccctccgaggtccacagatcacccacgctagttccgggtactccggttatgatccccggtccctcctacggctccaatcgacggcgaatgggtggaaaggcacggcggcggcgggtttcacccgtggtgttcgcggcgacgcggtgatggtggcaagaagttggagaaatcacagagaagatagaagggacgcggcgcggaggccttatacccaggtcggggcctggaaatcaggcggagtcggttcagcgcatgctgatccacttctctcggcgaagctccgcggattacgcgcgaggtgggcaatgacgtgtgggccccgcgtggaagtggcgcagggagaggagttgatcgctgggactgccgagtgggtccatgtacaggcagaagcgcgtgagtggctgaccagagggggccacatgtcggcgcgcgcgcgtgacaaagccctcaatccagtgatcgacgactcgcattcagttaccatcagttataatcctatccatctgttcgctgatcaacgactcacacacatcgtctacctcccgacggccaatcatgccaatgacccagggcccatggcggagagcgccgtcgcgtactgggtttacgactcggtggccgacactgctcctatctgcggcggcaaggtcaccggagacaaggcagacgcggccatcgggggggtctggggtcactag

SEQ ID NO: 28234 - DNA, 844 bp, Zea mays
  Peptide Sequence Number=SeqID_70013
ggaccttacagatccgtactctccaaccctggtgcaaatcgtgcaggttttggaaaactttggcgtctgcaaggtgatagcatctgggcaccaggatttcaaggttggcgatcttgtgtgggggatgaccggatgggaggagtacactctcatccataacccggagtcatttttcaagatcaagcatcctgaattgcctctgtcctactacacaggcgttcttgagtcttttactgaatccaaatgtttctgtgttcctctgaaagaatcctatctcaacttctttattcgtacactgttcttcgaacagcatcaggagccgttggtcagcttgtttgggcagtttgctaagctcacaggatgttatgttgtcggcagtgctggttctgacgagaagctgtgtttaccaccattgctcaggtacttcccagagggcattgacatctacttcgagaacgtgggtggcagcacactggaagccgtgcttcccaacatgcgtatccatggtcggatccctacctgcggaatgatctcgcagtacaatctggaggagccagagggtgtgcacaacctatttgaaatcatcactaagcgcctgcgcatggagggtttcatggtcttcgactactacggccagtaccacaagttcgagcaagagatggtcgggtacctcaaggcggggaagatagcctacgtcgaggacattgctgaggggctagagaaggcgccggaggcactcatcgggctcttcaccgggcgcaacgtcggcaagcaactgttttgtgctgttcgtgtgaaatgtttcgattttctgccgtttgttttctgggcgatatgcgtgtga

SEQ ID NO: 28235 - DNA, 189 bp, Zea mays
  Peptide Sequence Number=SeqID_70014
atgcagtacaatggatcaagcagtctcattagctacgagaagcagacgattcgaaccgagtttttatccttgcaagtgaccacacttgtacccaccataaccggaatgggagaccacgtctcaggtcgcgtgaggggatatgtccgctggcaggttcaatcaggatttagtaatcattatgctaagtga

SEQ ID NO: 28236 - DNA, 561 bp, Zea mays
  Peptide Sequence Number=SeqID_70015
atgggcgtgacgagcaggaaggacgcgcggccaggatcccagtgcgcgacctgcagaagaacatgcgtgcgcgacaccaagaacctgtgttcgctgcaacatatcatcgagcaagcagagtgcgcgaagcaggcagccatgggagcagagaaaatcgcgcggacggccggaacagagacggcgagcatggtccgagctcgacggtgtccgcgagcgaagaaaaccgagctggggactgggcagagcgcggacggcgggattcgacggctgagagaggaatgcgccaccatgggcgagcgccagggaacttcaaggccaagagaacgcggggaaaacgacgccgtggggaagaaccgcgcagcgggtcaaacaggggctgagcaccggcagggaccgagcattgagattgggcgaccacgaagccgtacaccggccatgggaagcggtagaggaagtcgccatgtgaaggaggccgagctacaggagcaagggagaggagccgcggcgccatgggagaggacaggagcagagatagtgcgggcgcgtccacggctgctctag

SEQ ID NO: 28237 - DNA, 132 bp, Zea mays
  Peptide Sequence Number=SeqID_70016
atgccgaagattgtggaattaccatggataaacaggaacaatattgaattacatttatacctttggcttgacaaaaggcacaggacgcagcctgtgcaaaattacatccatgccctttatgttcactattga

SEQ ID NO: 28238 - DNA, 154 bp, Zea mays
  Peptide Sequence Number=SeqID_70017
atggggctcatcgtcagctttgttttccggggagtgatccttgagttaaatgaaaatataagagaagtttgtgcaacatttgccaggagctcgaccgaatgtctaattggggaaccgtcgtcgccctcgcggttatcgggtcgattcgatcagg

SEQ ID NO: 28239 - DNA, 309 bp, Zea mays
  Peptide Sequence Number=SeqID_70018
atggatggagctcggcgcgcgacgcaagagaagcagagaccgagccaggggcacgctcgtgcggcattagggaactcaaccaccatgggagcaggggagcagggagaggatggggctaggcgtgcgcagcagggagaaggggagggagaagaagggagggagcgcgccatggggataaggaagctgcgtgcactggaaacaatcagaggactgcggtcggctaaaaaatcagaggaggagaagagcggcggggaaaaatctgaagagtggcggatgaaacaaaaaatctacgaggagagagatctatga

SEQ ID NO: 28240 - DNA, 201 bp, Zea mays
  Peptide Sequence Number=SeqID_70019
atggacgccaactatatggtcaaggtccaatcaatcatagagccccaagctcaagcggagttcaagtgcagtttattcacgaatcagattaggactacaggagtggtcctcacgaaaacggacgtccatgccacatacagacttcgttttcgacgttctagataccattggaaagctaaggagataagctttccaacctaa

SEQ ID NO: 28241 - DNA, 727 bp, Zea mays
  Peptide Sequence Number=SeqID_70020
gccgaagtcggctttgtgaatccgttcgaggatagtgacaatattgacattgaagaggatattactaccatacgtcctacaaagccaagccatgtggactttgacaaatttaaattcaaaggaggacatattgaggagtttttagcttttaagacatggccactattgattgagtgggagatgtcgaagatgtctgaaaaagatgcttcggacgtggagcctgggttggtcagactttgttacaagtataaatttgaagatgaatttagagaacctagtgacgggtggcgtcgattgaaccgtgtttttgatgctgttgacttcttctatcctgactatcccaatatggttctagattcaaagaataggaagagaaaagtgactactaagcggagcaaagtcctaaagatgcaagttgagtcgacacctcaagcttcagaggaaattctgacagatggctgcaatagtgacaccttcggcgatcatagtagccaaagagaaaggttcctccaacctgtctcgatagaggataaaggtaaagggcctgttaagattgaagaggctaagaaggctattgaagatgacacaacgtttggagaagggccttttgaccaagacttggttggtcgaaggtatagggttcatcatgctgcggggaacgttatgggcgcaaagcagctggccgaagctattgcttttgctaaaagttgggtgcaatcatgtgaag

SEQ ID NO: 28242 - DNA, 186 bp, Zea mays
  Peptide Sequence Number=SeqID_70021
atggcgtggttttgctgcgagcctttcgcgaatggagaacagaacaaaggcaaggagccggggaggagcgggggaggagtggttggttttatacgaaagaggggtcgaggtggagagcgtggaggagcgagggccgagggtgcccgccccattgacccggatccctatatagtctgtaatttgtag

SEQ ID NO: 28243 - DNA, 324 bp, Zea mays
  Peptide Sequence Number=SeqID_70022
atgcaggtagataacccatcaagtgttgcctctgcttcaataacacaatcaacaacagcaactatcaagtcagatgatcctgcatggaagcattgttattgtccagatttaaagaagaagcattcactaaagtgcaactattgtgacaagttgatcaatgctggaattacaagagtgaagtaccatcttgctaacatggcaggctttaatgtttctaagtgcaagaaagtgccaactcctgttaaagaaaacatggtggctttgcttacaaagaactgtgatgcaaaggagaaaatgaaaggaaaaacaaagggaaagagatga

SEQ ID NO: 28244 - DNA, 468 bp, Zea mays
  Peptide Sequence Number=SeqID_70023
atgggcaagagcaagaaaggtggtggctcttcgcatcactctggcgacaagcgcaagtgcgagccgactcctccctcggaggacttcggcgactcggagtactcggaggaggagtcctcctccgagtccgagggctctccgactcctgtctctccctcggcatcgtctgatgatttaaacgacttccaggggatcgccgtggaggtatggacttacatccggaccgtcgagcgcgccaggctcgagggctcggatgagtcggagtactcctcggacgaggagacttcctccgactcgtccgaggagggcagcggcgacgatggcggtgacgacgacgacgacggaggcgacggtgacggcggcggcgacagcgacaagggcggtgacggcagcgacaagggtggaagcggcgacggcagcggcggcagcaagggcagcagcaagggcagcagcaaggccagtgactag

SEQ ID NO: 28245 - DNA, 120 bp, Zea mays
  Peptide Sequence Number=SeqID_70024
atgacgctaaaaatcctcagctctaccaaaagtgttatgtcgagcaaggtcgaaggagagagcttcagtcaacatatgacgaactacgaagcagaggagaaggaatcgaaaaataagtga

SEQ ID NO: 28246 - DNA, 159 bp, Zea mays
  Peptide Sequence Number=SeqID_70025
atgaagcccccgagctcatacaagaagatgagagtggttgaacctatcatcgatcgggtctggtgggaggacgtcctaaacatagatgaagcttggaagttggtcttgaagaagattgaagagtgcgccagggtggggctctccatgtccactttctag

SEQ ID NO: 28247 - DNA, 102 bp, Zea mays
  Peptide Sequence Number=SeqID_70026
atgtgggtcggcgagtgcagtgcgaacggaggagggccccgaggaaagcgccgggtggagttgctagacttttcggcctgccaggattactcggtcgacagg

SEQ ID NO: 28248 - DNA, 591 bp, Zea mays
  Peptide Sequence Number=SeqID_70027
atggggaactcatacagcgggggtggctcggcgccggcgccggcggcactggaagtgccgctgcacctgtgcttcttcctgctggtgctgctcctcttcctggcctgctcgtggtacacgagctacgagtcggccgcggagtcgttcgcctaccaggcgcgcatcgtgctcatggcgtcgccgttcgcgctgctgctggccgtgcggctgctgtccagcgtctctggcgagggcgcgggccggagcgtgggtcacctgctggcggtgccgatgcctgagcgggactccatccaccgcgccggcgggtcgccgtggggcgtcggggtcctgctcctgctgctcctcgtcatggtttcctaccagtccaacttccgggagaaatggttcccgctcgcaagcagtggctggccagcacaaggcaataagttgcgagcagctctcacgctctatatgttggtcacagtaatcttgtattttttaattactgaaaccactgagggcctagatgcttttggaaagggtgccatggcgataaatatggatgacccgctcaagaatttttctggatccaaagagtttgaggaagactaa

SEQ ID NO: 28249 - DNA, 378 bp, Zea mays
  Peptide Sequence Number=SeqID_70028
atgtggatggtgtcatgcaggggcgtcgtgcagctggtgcttgtgtcggccatcgcctgggtcatgctcgggctcgtcgctcttgccttccactttcaaccatgcatctcccctgtcgccttcctctcagctaagaatgtgaaccacaagttggcagtagaaacaaactctgaatttgtcatgttctcaaactatccagaactactgcaatcccatgccactatccaccttgagcagaggcagacaacgatgctctccctacccgcctgctcaccatttcgcctaccccctacccgttgtgacgctcgtcggaagagcacaaccaccgcgaccatcacgatacgaagcggagcaagaaccggaagccaatgcagctag

SEQ ID NO: 28250 - DNA, 159 bp, Zea mays
  Peptide Sequence Number=SeqID_70029
atgagggtggttgcctttgatgcaatctatgctcaggtttctggtgcccttctttgggtatacaaggttggggatccaattactacatccgcttttgttgatgagctgttaacatcagagtcatttggaccatctgagaggtactggacttactggtag

SEQ ID NO: 28251 - DNA, 270 bp, Zea mays
  Peptide Sequence Number=SeqID_70030
atggacatcttcttgatccgcgcctgtctcctccggctgctgctggtgctcttcgccgcatgttggagagacattgcggatggcgcatgttgggcggacacaagcaccggtggtgttggggacacggacacagccgttttccgtatcagcagagggcaactgcagccgttaattttcaggtccaaggttcagctccatgagattattttgcttcctggtgttgatcccaatgatccatctgttaaaggtctctgtattgtgatgcaatga

SEQ ID NO: 28252 - DNA, 537 bp, Zea mays
  Peptide Sequence Number=SeqID_70031
atgggcgtgcctgacctctgcgcgcgctggcgcgcaataaatgcgctgcagccgaagcgaattcccgaggctggcgagttcctgaggccgctcttccttggaacaccggacactgtccggtgtacaccggacagtccggtgtacaccggacagtccgcaaggattatggatccgaaagagaagccaaatgtatcgagcagtccaccaacaccacggctggactgcataaaatgctttgatatgctctggttctgttactcaccattccaccagatgcagaattattaccggtatggggagttcgacacctgcttcggcaagtggggcgatcttatgggctgcctcgctctcaagacaaagcggaaggcagaggtggaggagatcctcatcgcgcgggagaaggccaaaccacatatctggacctaccggacggtcgatgaggcatcggagaattggtggcggatgtacaagcatgctgtgatgatgtcaccactgccaggttctgctcagcttcctcccaggtccgatgaatcttga

SEQ ID NO: 28253 - DNA, 147 bp, Zea mays
  Peptide Sequence Number=SeqID_70032
atgcagagaggaagatatagcaggaaggaatgcatggagaagaagctgagatggagaatacggcaaccagattgcagctgccgtagtctaggggtggataacgagccagctcggctcggctcgtccgagttcgagctggctcgttaa

SEQ ID NO: 28254 - DNA, 267 bp, Zea mays
  Peptide Sequence Number=SeqID_70033
atggaggtggcagtggcagatctttgtcaacattccttcgtagtgttcatcgacgtcggcgtcgatgaagatgccatccgggcgtccagcgagtggtcgcgaactccaggcgtccgggcagcagcggctgatgggctctaccgtctctgcgtgcgggcgagcagtggtcctgggactccgggtccggctctgcgtctggggctccggacgagcggcggtccgggcgagcggcggtgcagcgagactacgagaggcttcagtgcttga

SEQ ID NO: 28255 - DNA, 153 bp, Zea mays
  Peptide Sequence Number=SeqID_70034
atgcggtgcagtcgaggacgtccgaccgtgcgaatggatcaggcggggaggataattggattagacctcgggttggctagatggctcatcgctggcgatggtccaccggggtgtcgcgtgctccgccgtcctagtgaccgtgggcgtgagtga

SEQ ID NO: 28256 - DNA, 133 bp, Zea mays
  Peptide Sequence Number=SeqID_70035
atggtcgcgtccctctttcacgcccgcgcgatattaaaaggccagagggtgtcagcttgggaaccatcgttcccgctcaccgttgccagtgaagaacagcaggccctaatggcgagctcgacaaatcccgaag

SEQ ID NO: 28257 - DNA, 1371 bp, Zea mays
  Peptide Sequence Number=SeqID_70036
atgggggtggccgccggcggtggggcgcggctgcgtgccagcagcgccaagaagcagcggcagcggaccctgaacaacatcaagatcacgctcctctgcggcttcatcaccgtgctggtcctccgcggcacggccggcttcaacctgctggtcagcagcggcgacctggacggcgcggcggcggacgccaaggtggtggaggacgtggagcgcatcctggccgagatccgctccgactccgaggcggacgacgtggtggtggtggtcgagggcgggtcgtcgtcgtcgtcgtcgccgcgcaacgcgacggcggccagcttcggcaacttctcggcgtcggcgacgctggtcaaggtgcgggagtacagcctgggcccgcccgtgcggggctgggacgcgcagcggcgggagtggatggcccagcaccccgagttcccgcgactccacccgcggggccggccgcgggtgctgctcgtcaccgggtcgccccctggcccctgcgacaaccccgccggcgaccactacctgctcaaggcgaccaagaacaagatcgactactgccggctccacggcatcgacgtggtgcacaacatggcgcacctggacccggagctgacggggtactggtccaagctgccgctggtgcgccgcctcatgctggcgcacccggaggtggagtggatctggtgggtggacagcgacgccatcttcaccgacatggcgttcgagctcccgctgtcccgctacgacggccgcaacctcgtcatccacggctacccggacctgctgttcgagaagcgctcgtggatctcgctcaacgccggcatcttcctgctccgcaactgccagtggtcgctggacctgctggacgcctgggtgcccatggggccccgcggcccctcccgcgtcgaggccggcaagctgctcacggccagcctcacgggccgcccgcccttcgacgccgacgaccagtccgcgctcatccacctgctgctggtgcagaaggagcggtggatggacaaggtgcacgtggagacggagttctacctccacggcttctggacggggctggtggacaggtacgagcagatgatggaggacaaccacccgggcctcggcgacgaccgctggcccttcatcacccacttcgtcggatgcaagacctgcggcaggtacgaggactatccgctcgaccgctgcatccggggcatggagcgcgccttcaacttcgccgacaaccaggtgctcaggctctacggattccgccaccgctcgctcaccaccgccaaggtcaggagggtcaccgaccccaccaccaacccgctcgaggcaaaggaggccgcgctcaacatggacgccaagttcacctag

SEQ ID NO: 28258 - DNA, 483 bp, Zea mays
  Peptide Sequence Number=SeqID_70037
atggaccgggtgtacctcgagaaccagtactacctacacggcgtctggacggcgctggtcggcaagtacgaggaggccatggagaagcaccacccggggtacggcgacgaccgttggcccttcgtcacgaacttcgccggctgtaatccttgcgacgacggcaagaattgcagtgacgagtacccgctggaccggtgcgccagcggcatggagcgcgccttcaacttcgccgacaaccaggtgctcaggctctacggcttccggcacgagtcgctggcgagcgccgaggtcaggcgcgtggcaaaccggtcgacggacccgctggaggccaaggaggaggctctcgctttcttgaagaagcccaatgagccggatctatggagcaacgatgtgcgcaagaatagaaagcgtaagggaaagggagatttagattctgttcttgcaagaatcctgaggagactgggatggcgatccaagtgttga

SEQ ID NO: 28259 - DNA, 321 bp, Zea mays
  Peptide Sequence Number=SeqID_70038
atgtcctacttcacaggctgtggttgtttaccaaagcagtccgtcatgatttactccacaaaatttgcaaaacctcaggctggaccggtggacttcgctgaaagaaaagatggagaaggcaatcgaaacgtccaagctaacttcaacactgtgaggacaggacgtgcaaacccggccatgcttgaccggattgaggttgagtactacggaactccagtaaacttgaagagcattgcacagataagcactccagatgtaacttctcttcttattcaaccatatgataagtcaagggccagagatcatgggctcatggcgtag

SEQ ID NO: 28260 - DNA, 969 bp, Zea mays
  Peptide Sequence Number=SeqID_70039
atgccggactggctgcagtccgtgcagctctggagtaaccaacaacagccctccgcgtccccgccgcagcaccaggatgagctgctgctgccgtgcaggccggtggcgctcaacgcctgcaggaagcccgggggcgcgttccagccgttcgagaaggagaagaagaagaaggacaaggaggagaagcagcgcgccgagctggagctgccgctgcccgccgcggcgagctcggccgtggtcggggacagctgcgacagggccggcgccaccgacacggacaccgacacggccgagaacaataaggccagcagcaacaaaggcggcaacgacaaggaggctcagctgtcctcgcagtcgcaggcgcccagccggaaggcgcggcggtgctgggccccggagctccaccgccggttcctacaggcgctgcagcagctcggcgggtcccacgtggcgacgcccaagcagatacgggagctcatgaatgtcgacggcctcaccaacgacgaggtcaagagccatttgcaggttctcacttcgcccttcattttgaacatcttgggcgggcctcagaagtatcgtctccacactcggcggccgaactcggcggcggcggcggtccagagcggcggcaccagcgtcgttgctccgccggccgcaccgcagttcgtcgtggtggggggcatctgggtgccaccgccggagtacgctgccgctgtcgctgtcgctgcggcagccgcagcgcagccgcagcaggtgcacctagccggcgacgcgtcgggaacgacgacaacagccgccgacaaggtgtacgcgccggtggcgacgacgttgacgcccgcaccgcgaccgcgaccgcgaccgcgtccggagaggcagtcgagcagctgctccggcgcgcggcgcagcggggacgcctgctctggctcgccggccgtgttgtcgtcgtcgtcgcataccgcctctgcctaa

SEQ ID NO: 28261 - DNA, 1038 bp, Zea mays
  Peptide Sequence Number=SeqID_70040
atggccggcggcaacgcgtcgtgcagcgtccgccctgatcacggaggcaacggcgacgtcgtcgctacgctggagaggatcggtcgaaagctagcacgcaagcaagcagacaaccaagcagtggtggacttgatccgcgagctgcaggctgtgcctatgacatacgaggcgctggaggccacaatgatcggtcgcaccgtcaacggcctgagaaagaccgcgccgtccgcgctggctcgcctgctcgccgacacgctctacaggcaatggaaggctcttgcccacgagtggcacgcgagcagcaagacgccgacgccgatgctgccagaggctgataacggtatcaaggagccttcctattcatcgccgccgccgccaaaggttgatgatgataaggacaccaagaagcgttcctcttcgccgccgccgccgcagcctctcgacgcacagcagtcggctgggccagaggccgaccgcgagatgggcgccctaccgacgacggcttccgtcaggaagccgaacatcttacggttccggatggtcaccgtcacagagccagagaagccagatcagcgtcgcgtaaggctcatcccgctggcgacaccacaccccgcaccgccgtcgaacgacgcaatgcaaaacgacagcggcaacaaacagcaagcgtgctgttcggcgacggcggcgagccaccaccagggtaccaatgctgataatgcgtgtgtaggttcgaccgacgtagcgcccttgacaacggtcgttaaaccatcgactgcattgtcgaaccatatcgcttcgtcgggggcttgcaagcgcaaagaagaggtttctacggattttgacgaggagaggctggcaaaggccagggcaagactccacgaggggtacgaggaggcctctgccgctagggagaagaggaagaccaagctaatcgatgtgattgacgtacctgagaaagcgaagcggcgtcctgctggtcaccggacacggaagaagcaacctccgatccggagccttaacttgtctcaggatgcctag

SEQ ID NO: 28262 - DNA, 384 bp, Zea mays
  Peptide Sequence Number=SeqID_70041
atgggcaagaacaacaaacgcaagcgcgagctgactcctccatcagaggactttggcgactcggaatactcagaggaggagttctcctctgagtctgaggggtctccagctcccgggattgccgcggaggtctggacttacatctgggccgtcgagcgctccgggctcgagggctcagatgagtcggagtactcctcggacgaggaggactcgcccgaggaggacgacgaaggtgacgacgacgacgacgacggcagaggcgacggcagcgacgacggtgacggcggcagcaggggcggcaacggaggcagcaggagcggcaacggcggcagcaagggcggcgacggcggtagcagcagaggcagcaacagggccagtggctag

SEQ ID NO: 28263 - DNA, 1371 bp, Zea mays
  Peptide Sequence Number=SeqID_70042
atggccacggcggcgctggcgctggcgctcctcgtcctcgcgctgccggcgtccctcgccgtgacgtctacgtacgtgcggccgccgccgagggccacgctgtcgtcgctgctcgaggacgacgccggcgccgacgggcagacgccgcagcaggtgcacatatcactggtagggccagacaaggtacgggtgtcatggatcaccgcggccgacgcgccggcgactgtcgactacggcacggacccaggccagtacccattctccgcgaccgggaacacgacagcctactcctacgtgctctaccagtctggcagcatccacgacgccgtcatcgggccgctgcagcccagcacaaactactactaccgctgcagcggcagctcctcgcgggagctctccttccggacgccgccggccgcgctgcccttccgcttcgttgtcgtcggggacctaggccagacggggtggacggagtccacgctcaagcacgtcgccgcggccgactacgacgcgctgctcctcccgggcgacctgtcgtacgccgacctcgtgcagccccggtgggactcgtacggccgcctcgtcgagccgctggcgagcgcgcggccctggatggtgacgcagggcaaccacgaggtcgagcgcctgccgttgctggagccgcgacccttcaaggcgtacaacgcgcggtggcgcatgccctacgactatgccgccgccgacagcgtcgccgccgcgccgccgtcggacgacaacctcttctactccttcgacgtggccggcggcgccgtgcacgtcctcatgctgggctcctacgccgactacgccgcagggagcgcgcagctccgctggctccgcgccgacctcgcggcgctccgccgccgcggcaccccgccggccttcgtgctggcgctcgtgcacgtgccgtggtacagcagcaacgaggcgcaccagggggaaggcgacgccatgcgggacgccatggaggcgcttctgtaccacggcgcgcgtgtcgacgcggtgttcgcgggccacgtccacgcgtacgagcggttccaccgcgtctacgccggcaaggaggacccctgcggccccgtctacgtcaccataggcgacggcggcaaccgggaggggctggccaacaagatcatcgacccccagccgtcgatctcggcgttccttgaggccaggatcggccacggccgacttgaggtggtcaacgccacgcaagcgctctggacgtggcaccgcaaagacgacaaccaaccagtggttggaaccaagtgtggatcaacagcctcgcgtccaccccaacttcaaccgaagcatcaagatgatgtcgtaatgggtctgtttcatagttggggttaa

SEQ ID NO: 28264 - DNA, 1992 bp, Zea mays
  Peptide Sequence Number=SeqID_70043
atggcctccgcccgcctcgtcgcgctcgctgcattcctccttctcctcctcttcgccctgggcccgggcgaggcgcgcgcggcggacgacggcgaggtgcgcgcgctgctggcgctgggggccgcgctggacccgacgggccgcctgctcccgtcgggaaggggctcgccggcacgctcccgcccgcccgtcgcggggctccgctccctgaccggcctctacctccactacaacgcgctccgcggcggcatcccgcgggagctggcggcgctcgccgctctcaccgacctctacctcgacgtcaacaacttctcgggacccatcccgtcggagatcggcgccatggcatcactgcaagtggtgcagctctgctacaaccagctcaccgggagcatccccacgcagctgggcaacctcaccaggctcaccgtgctggccctgcagtccaaccgcttcaacggcgccatccccgccagcctcggcgacctgccgctgctggcgcgcctggacctgagcttcaaccgtctcttcggctctatccccgtcaggctcgcgcagctgccctgcagccttgtggtgctcgacgtcaggaacaactcactcaccggcagcgtacccgccgaactggccgccaagctgcaggccggcttccagtacgggaacaacagcgacctgtgcggcgccgggctgcccgcgctccgcccgtgcaccccggcggacctcatcgaccccgacaggccccagcccttcagcgctggcatcgcgccgcaggtcacgccctccgacggccgcggcaacgggcgcgtgccatctaccagggcgctcgcggcagtggtcgtcgtcgccgtggccctccttttaaccacaggggtcggcctgttcgcgctctcgtggcgccggtggcaccggcagaaggtggcgggggcctcgccgtcgacgatctccggcggccggtgcagcactgaggtcgtgccttccgcggcgaaggcgtcgtcggctcgcaagagcgcgtcgtcggcgctggcgagcctcgagtactccaacgcctgggacccgctggccgacgcgcggggcgggctgggtttcgtctcgcaggacgtgcagctggcccagagcctgcggatcagcacggaggaggtggagtccgcgacgcgctacttctcggagctcaacctcctcggcgggcacggcaagaaggccggcggcctcgcggccacgtacaggggcacgctccgcgacggcacctcggtggccgtgaagcggctgggcaagacgtgctgccggcaggaggaggccgacttcctgagcgggctgaggctgctcgcggagctccggcacgacaatgtggtcgcgctgagggggttctgctgctccagggcgcgcggggagtgcttcctcgtgtacgacttcgtgcccaacggcagcctgtcgcagttcctcgacgccgacacaaccgccggcggcagcggccgtgtcctccagtggtccacgaggatctccatcatcaggggcatcgccaaaggaattgagtatctgcacagcacaaggacgaacaagccggccctcgttcaccagaacatctcggcggacaaggtcctgctggactacgcgtacaggcccctcgtctcagggtgcggcctgcacaagctcctcgtggacgacctcgtcttctcgacgctcaaggccagcgccgccatggggtacctcgcgccggagtacaccaccgtgggccgcctctcggagaagagcgacgtctacgctttcggggtcatcgtgctccaggtgctcacaggcaggaggaaggtgacggcgacggctcagctgctagcaggcaatgtcgatgacgatgagctcgtcgacggcaacctgcaggggagttactcggcggctgaggccgccatgctggcgaagatcggctcggcttgcaccagcgaggaccccgaccagaggccgacgatggcggagctgcttcaagaactggacaccatctga

SEQ ID NO: 28265 - DNA, 210 bp, Zea mays
  Peptide Sequence Number=SeqID_70044
atggccaccgtcaagctctgccttcggcatcgccaaggcagaacaggcctctgcctacccttcgagtctgaagccgaccgttggcggttcagagccgttggcgcaccggacactgtccgccatttgacagacatcggcctggcgcaccggacactgtctggtgcaccaccggacagtccggtgcactcagaccgagctgtctttggctga

SEQ ID NO: 28266 - DNA, 183 bp, Zea mays
  Peptide Sequence Number=SeqID_70045
atgggagaggaaagccaaatcaaaccccgcagaaaattggttgagccgcccctagggcggttgaaccgccccctgacaggtcagcagactgtctgccagtctgactgccagactgactggcagactgacctgcaggctggtcagataggacaggaccggttgaaccgcccctacggcggttga

SEQ ID NO: 28267 - DNA, 522 bp, Zea mays
  Peptide Sequence Number=SeqID_70046
atgtattctcggttgaatctaattatcaatgagctcaattcaattggaattaataagctaggtgatgcggagattgcgaggaagattatctctctactgccacaaccaagatatgggagaatcatcaccattcttcacaacatggaagagttgagtacattgagctcgacaattgtgatagaaaagattacaacattcgaaatctcgcgaaagatgggtcaagaggagccaacttctttaaggccatacgcttttgcatgtgatgaaaagaaaggcaagaagaaggctccctctccaagctactcaagtgaagaacaagaagaagaatgtgatgataatgaagatgatcaaccctcaacatcatcctccgaggacgaagaaacaatccaacgcatcagaaaagaaatggggatgattcgcaagattaatctaatgggtgtgcccctacaggtcgaggttcttctctttaaaacactgacagaaaaaacaaagaaagagaggatgcttcgcatgtggggataa

SEQ ID NO: 28268 - DNA, 219 bp, Zea mays
  Peptide Sequence Number=SeqID_70047
atggcaggggaggccaagaagctcttcttcgcatccgaggtgtatgatgtgaccaagttcttggaggaccaccctgggggagaggatgtgcttctccatgcatcaggtaatgacagaaccgtaaccttatcggtccaatttcgtgacaattgcatatttgggacattaaacatagcgcttcgcaatattgccatccaaaagatttatttcgcaaaatag

SEQ ID NO: 28269 - DNA, 321 bp, Zea mays
  Peptide Sequence Number=SeqID_70048
atggacacggcgagggctcaacggcgaccgcagaacaggcgcgagaccacgatgagcgacggtggagctccctgggtgtgcgcgcggtgcgaggcaagtgatgagggctacgagtgcacgagtgagggaagaggagggcgagcgggtattgggcagctagagaaaggccagggtggggacaaacgtggcctcagcgtgcgtcgtgggcgcggagtccacggtgacgcgtggcttgtgcgcgggcggttcggaggggaagagtccgacagacgggacccacgggccagtgatagcggccgagcgaactggcggcagggctaa

SEQ ID NO: 28270 - DNA, 384 bp, Zea mays
  Peptide Sequence Number=SeqID_70049
atgcaggcggcacgcaaccgcgccaagtggacgcccttctccgactcccaacacgcccagcctggaggcccaggcccacgcgtcatgcaaccgggaccggtaaagggggatacctcgaaaaggatccttccccgtgaaggaaccaggctccgagcctccctactgatcagaggttcgaaggctggccccccggaagggttcaacagccgcctcagatcgcgtgggccctacacccactactggtcagaggttcgaaggtcggcccctcggaagggttccacggccgcctcaggctactcgggcttcacgcccattactgatcaggggttcgaaggctggcccccgaagggttcacggtcgcctcagacgccgagcgagggatga

SEQ ID NO: 28271 - DNA, 237 bp, Zea mays
  Peptide Sequence Number=SeqID_70050
atggcgagagtagtgtgtaccctctgtggcaagaggctggacggtggtgtatctgtgctctcggttggcgtgaacccggtgagaaaacagcagaattttgctgtttttgcactaaggtggtgcccaaggacgtggtgccaaaggacgaacctcaacagtgacgtggttgcgggagggatgttggcctcccttttgaaaacaatatacttttatgcgggagggggttttgcctcctaa

SEQ ID NO: 28272 - DNA, 288 bp, Zea mays
  Peptide Sequence Number=SeqID_70051
atgcaggatgttggaggcggagcaccataccctatgctcacccgcaccaactacgacaactgggtggtgatgatgaaggtcatgatggatgcgtgtggactgtcgaaggcagtcgacactggcaacgttgagcgcaacgaggatcggtgggctatggagacgatcgtacgagtggttcctccagagatgcaccagtccttgggggtgaaagcgacgacaaaggaggcctgggacatcctgaagacgatgcgaaccggttcagggctggtgaagcggaccaagatgtga

SEQ ID NO: 28273 - DNA, 828 bp, Zea mays
  Peptide Sequence Number=SeqID_70052
atgcccaagcgatggtgtcctctatgcactaatgaggttgctaatcgcaagatgaacacttctctaatctcctcactatacaaagggttatcttatctcttagaaggctttctgggtgccttgttcggtgtggtatctggtgccacaccggacacaacagagcttcacaacccacttaccaggagcatactcatctattgcgacaacatcagaatcgtctacctctccatcaacccagtccaaaacccacacacaaagcatgttgatatggatcttcatttcgtctgtgagcctgtggcggtcgaggacgttcgtgtcctccacatcctgatgacctcacagtttgctgacatcttcaccatgggattttccatccttggtgttctcggagttttggttgaaagaatagctcctggatcattgccgtcatccatgaaagaacctgtcgtgctagttgtaaacaaggcagatggagatgaagaggtcaaagctgctggggataacatagtgggcgttgttcttctacaagaattacctcacctatcacatcttggtgttagagctcgtcaagagaaagttgtatttgtaacttgtgaagacgatgacacgattaaaaacatgaggttacttgagggaaaacatgtcaggttgggtgcatcatccaataatgttgatctttcagttgtatcaaacaaagatgactgtgctgccatgtcttcagagccatccgctggaggagatctatttgcacagcaattctcactattgactacagacaagaagttagaattgtctgaggttaactttcttttgcctcaaatcatgtaa

SEQ ID NO: 28274 - DNA, 561 bp, Zea mays
  Peptide Sequence Number=SeqID_70053
atgacattggggaatgaggagagaggtaccagaggcacccccacagagcaaccgggaggggcgctggggcctcctatggcgagcatgatgacaccgaacatgggttgctggagggtggtgaagctcgatgtagtcatggaacacagggttcatgacccgatcaaagaccacaaaggtgcctcggagaagctggctgtcgtgaagggagacgcgcacacaatagggaggcatgtggattctggcatggcgaaggacgggcgtcaacagagcaggtgcgagagcggacatgtcactgccaggaaagtgccctacgcgtgtgccggggtggggttagggaaaccgaagtttaacattgctggggaaaccgttgggcacaacgggcgtcactgcggtcgcgaggagcagtggaggccgacaattgttggggagaggccaaccaccaagccgggcgtcgtgaagaagctggggagcatcgccgcaatcgaaggaggacatagggtgctgcggggaaggaagcggacaccgaacaaacctgatgagggcgtcgcgaccgatgcagag

SEQ ID NO: 28275 - DNA, 393 bp, Zea mays
  Peptide Sequence Number=SeqID_70054
atggctggcgacgaatggcgcctggtgctggtgggatcgagattgggcaaacgtgaatgcgggagggaaaacgacgacgcggtcagtgaggagaggaaacggacaggtgcgggcataaggctgctctactcgcggctagggcagggaggcgtagaggtggccgcgcagagccaaaagggtacgacagcagacgtcccgacggcggctgcgctgtccttgcgtgcgggtgaggagccggaagacgaccagtgctgggagggggtgtcacagcttaaaggcctagacaccttatcccaagccaccaaacaactacctccattgaccccctttctttctaaaggaatgcccttcagactctttgatcacccaattgggaacattcaaagcaattaa

SEQ ID NO: 28276 - DNA, 1083 bp, Zea mays
  Peptide Sequence Number=SeqID_70055
atgggttcctattctaacaataacgacttgtcaccagaagtaccaatacagacatggattggtgatggtgatgaaggcaaaaatgttaaaccaaaaaaatcaagtctactggagcaactggaatctattgagcaatctttgaatgagtctggcttagaagctctctcatcctttctgaaaaccaaaaagaatttagaccaactggaagatgcaaaagatttggatgaaaatggcggcgttcacgttttgctgaagaccttgctgtcattatcttatctaagatcaattctaatgaagggtctggaaagtggccttagaaatgatgctccagatagtgctattgcaatgcgacaaaaggttttgcagtggcgtctttgtgaaattgggcttgaggattattcgtttgtattgttaagtagatacatcaatgctcttgaagctttaggtggatcagcttcacttgcagagggtcttcctacaaatacaagtctatgggatgatgcccttgatgcccttatcattggcataaatcaagtttgcttttcaggttggaaaccaaatgagtgttctgcaatagtgaatgagcttctttcttggaagcagaaaggtctatctgaatttgaaggcaatgaggatggaaagtatatttgggcactgagactcaaagccactcttgatagaacaggaagactaacagaagaatactctgaagcacttctttcaatattccctgaaaaagtcaagccaaaagcactaagcacccaaaatgatggcaatgttgatccgttttctcctgtctttccttatgcattggatggtcctccaccattccgcaaacgaatcatcatcagccctaggggagaggtgacacatcccaaaagaagcaaagagatggtaccagaactggcgggcgaagacacaattagtgaggatgtgttgcaccgttttgctttcctggtcacacaaggggcaactgtctgggttctgctggaaaaacttgcatttctcatttctaaccaaaggaaaaacttgcatttctgcggagcccaagacctcaaagtcttttctaggtttcaaaagtga

SEQ ID NO: 28277 - DNA, 513 bp, Zea mays
  Peptide Sequence Number=SeqID_70056
atggctcctctcgctctgggccccgtttctgctcccactctcgcctcctccgtccgccgccatgctcccgctgcttccctagcttcctcgcggcttaggccctatcgcagcaagcttggggtgcctgctgcctcctctcttcgtggcagttgggggttttcgttttggttcctgctcgatggcttcccccataagaatttgatgcaagactcaccaatcaagaaacatcgtcctttggatcttcttaggaggattggttctagatcggctataaagaagaagcttgtttttcgtggtatttctgatgataattgccagattgattttgtgcaagtaggggagttcaaatgctttgttccaaaccctagtttcaattcaaatttaaattcaaatttgagtcttcggtttggttctgacggttgtttcccttggggtgacgtgcaaaaagctctctttgccaacaagtcgtattcttacgtcgcaggcgcattccacgatggttgtgacttctag

SEQ ID NO: 28278 - DNA, 332 bp, Zea mays
  Peptide Sequence Number=SeqID_70057
atggagttcctgacgaaggtggagttaaggttcctccttgtcaatctttgggcacccttccttgacttcggtggctccattcaaaccgccgccgccgcctgcgctattctcgccgctgcctctaaccgccgccgcgccgccgcccctccccgccggcgtgccttcccggccgagcccgacaccgcccctcggagcgccgcccgtccacgccgcccgacgccgcccctcggagcccgattcgcgcacccggggcgccccggcgccacccgtccgtcgcccgtcccctcgcggcggcagaggaccaggcggcccattgacgcgcggccgttatt

SEQ ID NO: 28279 - DNA, 279 bp, Zea mays
  Peptide Sequence Number=SeqID_70058
atggcgtgccgacagccaccgagagaaaacaacagagagggaagggtgccgtgccgagaggagagaggaagatccgccgcgaacgaatcatgtgtacaccatcgacggggtcccaactgcgggtctgggagcttcaccgcgttcttaggaatgcgcccatggccgaaactgggtggcgcggtcatcatggcgtccccaattgctcaccggagcgatgggttcacggcggagccgccatgcgtcgtggccgggcctccttcgaccccctatttccggtga

SEQ ID NO: 28280 - DNA, 267 bp, Zea mays
  Peptide Sequence Number=SeqID_70059
gtgttctcaactgatgctggcaatcagacccaagtgggtatctgtgtgttgcaaagtgagcatgaaatggccacatacaataaatgcctgggagaaattgacctcatgggcattccacccgccccaagaggcttgcctcggattgaggttacattcgacatcgatgccaatggaatcgtgaccgtctcagccaaagataaggctacgaggaaggatcggaacatcaccatccgatcttcgagtgggctgtctgaggctgacatctag

SEQ ID NO: 28281 - DNA, 597 bp, Zea mays
  Peptide Sequence Number=SeqID_70060
atggcgatgctgatgatgacgtggacgtggacatgcaacgccaagctgctgctgatgacgctcgtcttcgctgctgcgctgagcgcgacggtgacgacgtcgcgggcgcagtcgccgccgctgcagtacaacttctacggcgcgtcgtgcccgcaggcggaggcgacggtccgcaacgtcaccgaggggatcatcgccaacgaccgcaccatgggcgccgccttcatgcgtctcttcttccacgactgcttcgtcaggggctgcgacgcctccatactgctggacccgaccagcagcaacacgcaggtggagaagaaggcgatcgcgctgcgcgggtacgcggccgtgaacacgatcaaggcggcggtggaggcggtgtgccccggggtggtctcctgcgccgacatcctggcgttcgcggcgcgggacacggccgtcgtctccggcggcttcgccggcttcggcatgccctcgggccgccgcgacggggtggtctccagcttcatcgaggtgctgcagaacatcccgtccccgaccttcaagctccccgacctcgtcagcaacttcgccaagaagggactcgacgtggacgacctc

SEQ ID NO: 28282 - DNA, 228 bp, Zea mays
  Peptide Sequence Number=SeqID_70061
atgccggtcgtcagcagcaggagggtccaccacagggggaagggccacgctaaagggcgctcttcagggcggtggcccacctgtgcggcccggacgaggcaggcgctgccgctcgcctatgcctacgctgctggcatggtccatgaccaccagggtggttccccggtcgagccggaggatctaccgtcccgtcccacggtcaactttgatgatcatccctatgtttag

SEQ ID NO: 28283 - DNA, 171 bp, Zea mays
  Peptide Sequence Number=SeqID_70062
atggccaaggcgcaccctgctggcaaagtgtaccacatgagggccaagcgacaaatggctcaaagccttggtcagatactcagattgctaagttcaaacgtcgatatgagcaagaagaagaggaaagcaaagacagatcagatccccttttattccacctcagaatcttga

SEQ ID NO: 28284 - DNA, 435 bp, Zea mays
  Peptide Sequence Number=SeqID_70063
atggaagcgccgacatgcgggccccgcatgtcagctgatgcatggcacacctgcgatccggctaagaccgaccgggtcgccacaaagtcatacggtgctgtgggcctagccgtcgggtggagggattcgccgcactcaagctttgccttcaccatcgctctgacctcgatcgtggattccggatcagacggttgtggtcacataccgcttcagatggtggatactctaatctgcgccgcagaattccgatctaacgatcgagatcttgtgatacccctttggccagtgtatcttgcaaaagagtccccaaataacttaggaaataacccgccatcctcggtagtgtgcagatcgttacaatcaggtccaaatagttacgggaaagaccttgagcttcctgacattaatggccgccgtccattaaaccgagaatga

SEQ ID NO: 28285 - DNA, 158 bp, Zea mays
  Peptide Sequence Number=SeqID_70064
atggccaggagcaagatgtcgggagaacacgccaaaagggagatggtgaccggggaaaagcccgaatcttcgggaaagaagaacaaagaaaggactccatcgaaggaggccgacgacaagcccaaggagcacaaggaggaatcgaccggctccatcaa

SEQ ID NO: 28286 - DNA, 243 bp, Zea mays
  Peptide Sequence Number=SeqID_70065
atggaaggagttcgacgagggggttgcgcagcacggtggcaagcatcgggcggggctccggcgagggcattctatggcgacgggcatgtctgcactggcgatgaaggacacggtggccagcgaggaaaaatcaagttgaaattaaagatggctttgttcagccaaagtcagctctgtctgggtgcaccggactgtccggtgcgccaggctgactcagacgaacttgctgctctcgggaagtga

SEQ ID NO: 28287 - DNA, 825 bp, Zea mays
  Peptide Sequence Number=SeqID_70066
atggcggcgacctcgtcagccgccttagtgaccatggtggtggtgatcgctgcagctgcgatcagcacggcttccggcacggcactactgcagtacaacttctacggctcgtcgtgcccaaaagccgaggaggcggtccgcaacgccactcagaagatcatctccgacgaccccaccatgggcgccgccttcgtgcgcctcttcttccatgactgcttcgtcaggggctgcgacgcttccatcctgctcgaccagtccaacagcaacccgcagccggagaagctagccatcccgctacgcggctacgcgcaagtgaacacgatcaaggcggccgtggaggccgtctgccccggcgtcgtctcctgcgccgacatcctcgcctacgcggcgcgcgactccgcggccgcctccggcggcttcgccttcgccatgccgggcggccggcgcgacgggtccgtgtccaacctcaacgacattcccgggaacctccctgccccgaacatgcaggtccaggacctcatcgccagcttcggcagcaagggcctcagcgccgccgacctggtggcgctctccggcgcgcactccttcggccagacgcactgctccttcgtcacgccccggctgtaccccgccgtggacgcgaccatgaacgccacctttcgccgcggcgctcaaggcggtgtgcccgccgccttcgcaaggcgggggcggcaccgtgctcaacaacaaccgtgtgacggaccccaacaagctgagcaaccagtattacaccaacttggccaccgggcaggtcatgttcacgtcggaccagacgctgaccagtag

SEQ ID NO: 28288 - DNA, 489 bp, Zea mays
  Peptide Sequence Number=SeqID_70067
atggcgccccgcatgctctgtgacgacgacggctctcagcccccttacggaagcaagaggacgtcagcaaggacccaaccgctccgacagctgtccctccgccaggctccatcgctcctccgacggccacgacatcacatcagctgggtgccaaaatctctccggctgccacgacggcatggccctcttagagagggtcggccgcgcggggacgaggacgagacaggcgctcgcttggaagccgctcgctccctcacccgcgtggacgcttgtaaccccctactgcaagcgcacccgacctgggcgcgggacgaacacgaaggccgcgggattcccacctctctcacgctgttctccggccgcctcgcttctccccccttcgcgctcgccctcgcactcgacccatctgggctggggcacgcggcgacactcactcgtcggcccaagggaccccccgatctcgaaacgccgacatttctagagtacaat

SEQ ID NO: 28289 - DNA, 174 bp, Zea mays
  Peptide Sequence Number=SeqID_70068
atggcagcgggcgggggtgctgcctgcgctccgcaaccagacgaaacggcgcgcgtggagcggttcagacgttgtcctggtggagatggcaagtccgttttcgtatgttggcaaatgactgttgtgtggtatatgcccatgcgttgccacgaggtaggggagcaggtggagtga

SEQ ID NO: 28290 - DNA, 507 bp, Zea mays
  Peptide Sequence Number=SeqID_70069
atggccttactcgacggcgagctggttgttcttcttctgctgcgccgagcccgccgagtggcgaagcggatgagagcagatccagatctctgcctgcccacaaacgtggggacgcagaccaagatagccatcgtcgatggctcttcgggcatgcgcggcggcgagaagggtggggagcagacgatggtggaggtgaagaccaaggataatgtacgggaggtggtgggggtgaaagggaaatgtgcccttgggccatttctaagtattttggtgattgagtgccaacacaagtgcttaagtgtaaatctatgccaattgatggacaaagtgcaaatcaagtctaaagccaaagtctgcttagtctgggtgcaccggatagtgtccggtggtgcaccggacagtgtccggtgccaggctggctctggcgaacttgctgctcttgggacttcgacggcggtgtactataaatcaccggactgtccggtggtgcaccggactgtccggtga

SEQ ID NO: 28291 - DNA, 243 bp, Zea mays
  Peptide Sequence Number=SeqID_70070
atggaagctccaaagatgacagatacctgtagaagtggcaatggtattacagaagccattcctttcgttgaatggagtgagaaaggaggacgtcggtttcttactcctgctggaattttaacatttaatagacatagcatgagcggattctcaggcatatcaaaatcacttaaaactttttttgatgctcaagtagcaaatacaggtgctttggaagctatccagattgcgtatccaaagtaa

SEQ ID NO: 28292 - DNA, 2352 bp, Zea mays
  Peptide Sequence Number=SeqID_70071
atgtaccagtggcgcaagttcgagttctttgaggagaagtctgccggccgcggcggcggcgggggttcagccgccgccgtgccggccgagatcgcgggccgagtcacctgctgctcgggcggccggggccgcgtcgcggtggggtgcgacgacggcaccgtgggccttctcgaccgcgggttccgcctctcctatggcttccaggcctacgcctcctcggtcctcttcctccagcagctcaagcaaagaaatgttcttgtcacggttggagacgatgaccagtcatcttctcaggcatcagcaatctgtctaaaggtttttgacctcgataaagtacaagaagaaggatcaagcacaacaactcctttctgtgttcaaattttgcggatcttcactgatcaatttcctcaagcaaagattacatcatttatggttctagaagaagcaccacccatactgatgattgccattggactggacaatggtttcatttattgcatcaaaggtgacattgcacgtgagcgtattacacgtttcaagttgcaagttgaggctgcttcagatggcagcactagtttgcctattactggtcttggttttcgagttgaggggcaagcacaccagctcttttctgtaactcctggttctgtaaccttgttcagcttgcatattcaaccaccaaggaggcaaacacttgatcagattggttgtcagacgaatgctgtagcaatgagtgaccgtatggacttaattattggtagacctgaagctgtatatttctacgaagttgatggtagaggcccttgctgggcatttgatggtgagaaaaagtttgtaggttggtttcgaggctatttactctgcattattgaagatcagagaacacataaaagcacacttaatgtttatgatcttaagaatcggttgattgcacatagcatgcctgtgggggatgtttcacacttagtatgtgagtggggttatattattctcataatgtcagacaaaaagattctgtgcattggagagaaagacatggaaagtaagcttgatatgttgttcaagaaaaatctttatacagttgcaatcaatcttgtacaaagtcagcaggctgatcctgcttccactgctgaggtgctgcggaagtatggtgaccatctgtatggaaaacaggaatatgatgaggctatgtcccagtatatccacactattggtcatcttgaaccatcgtatgttatacagaagttccttgatgcaaagcgcatctacaacttgacaaattatttagagaagttacatgatcgagggttagcatctaaagaccacaccacccttctgttgaactgctataccaaattgaaagatgtggagaaacttaaccattttatcaaggatgaagatggggttggtgagatcaagtttgatgtggaaactgccataagagtatgccgagcagctggatatcatgaacatgctatgtttgtggcaaaaaaggctgggaggcatgagttgtacttgaagattttacttgaggatcttggtagatatgacgaggcactgcaatatatatctggcctcgaggcaaaccaggcaggtcttactgtaaaagaatatgggaaaattcttgtggaacataggcctgctgaaacagttgaaatactgttaaggctctgtacagatgttggagatcctacgtcgagaagaggttcaaacagtatgcacttgcttatgataccatccccaatggactttgtgaatatatttgtgcacagcccgcaatatctgatgggatttctggaaaattatatcaaaacagtaacggactcacctgcgcaaacagaaattcataacacccttctggagctctatatttcaaatgatttgagcttcccgtctatctctcaagaaaatgaatatgagaatcactatatcaaagaaataaaaggtaaagaaactgctaatgtctataggtcaggaataaaggaaaaaactggtcttggaaaagaagatcctaaagtagcaaagaatattgttgataggagaaggaaagggcttgcgttactcaaatctgcttggacatctgagatggaagatcctttgtatgatgttgatcttgctctcattctttgtaacactaatgcattcaaagatggtttgctatttctatatgagaaactaaaactttacaaagaggttattagttgttacaagcaagcacatgatcatcaaggtttaattgcatgttgcaagaagttgggggactcatctcaaggaggggatccttctctctggggggatctattgaagtattttggggatcttggggaagattgctctaaagaagttaaagag

SEQ ID NO: 28293 - DNA, 306 bp, Zea mays
  Peptide Sequence Number=SeqID_70072
atggatcctaagggaaaagggatggtggtcaacgacaatgagaaggagtccatcttcaacgagccaagagacgacaaagtcaatgactccagctctagtcaaaagaagaaagacggaaagaagaagaggcacatcaggaaggctggctcgagcgaagtggccgctctcgggaatttaccggcgacgtacggctataattcaccggactgtccggtgtgcaccggactgtccggtgagccaacggtcgcccgggccaacggtcggccgcgcgatctgcgcgggacacgtggccgagccaacggctag

SEQ ID NO: 28294 - DNA, 600 bp, Zea mays
  Peptide Sequence Number=SeqID_70073
ttggatgcaattccaactagggttaagcttgcgaattgtgagttggatttgaggttctgttctgctacatgtgtggatcttgattcaactcttaatgagcttggagatggggaggacactcaaggatctaaagaaaaggagaaagaactccatgctctgaagttcctcacggttgagtcagaacaaggcgtggatgggtgcgacggagctatcagatctcttgtcctccagcttagagaaattcatggagatgtacaggttgtatcaacacctcaggctgaagaactgtttgtggaggttgtggctccagaagggaaagcattcgacaccaggtgcacccgcatgaagttctggtctgaactattatgtgcgctttgggactcttcaagtgtggccaagatgttacttcttaccatcagcaccaagagctacgagctaggatccttggattgtttggagcagatgattattcatgagatgacgatcacgagatggataccacagtcgtgtcgtgagcaacaagacaaaccatgtaaagaagaaaccaacagggataggcaaagacaaaaatcctgcagagaagtattgagcaacgaataa

SEQ ID NO: 28295 - DNA, 342 bp, Zea mays
  Peptide Sequence Number=SeqID_70074
atgtccggtgcaccagaggactccgacctcatagtcttcgctctcggaaatttccagaggccactccgctataattcaccggactgtctggtgtgcaccggacatgtccggtgctccaagaaagaacggcctcaggaactcgccagcctcgggttttcacgccagtcgctccgccataattcaccggactgtccggtgtgcaccggactgtccggtgcatctacggggcaacggctacttcaggcgccaacggctacctgcggcgcatttattgcgcgccagcgcgcgcagaggtcaggcacgcccatgatggcgcaccggacactctacagtacatgtctg

SEQ ID NO: 28296 - DNA, 393 bp, Zea mays
  Peptide Sequence Number=SeqID_70075
atgtggtttgacagcccgatgcgtgttgagcgaaggagattgaaggcggcaaatgcgaagagagcacatgatgcaagggaatggaaggcggctagagctgagaaacagatgttggggaatcttgctggtcgtctgagtggaagaaaaatggcgacggtggagctaatggtggaggaggacacatcaaggttgagtgagcttatcgcgcttgctaaggcaggattacatggggaagaggaggacgacacatcaaggttgactgagctcatcacactagctaaggtaggattacatgcgcaagaggaggaggacgagtttatgtctcaggctgtcgaagaagtagagtcctcttattacaagcagaagtgtgatgaggctaaggctgaggactag

SEQ ID NO: 28297 - DNA, 372 bp, Zea mays
  Peptide Sequence Number=SeqID_70076
atgggagggtcgctggcgtgcaggggcggcgcgcggacggcaggctggaggcgcggcctggcgcgcagggactcctggcggcggccgcctggcgcggaagcacagccggacggccggacgcagacggcggcgcagatccctgggcggcgctcggtcggctggctccgggcgcggcctggcgcgcaggggctggacggcggcgcggcctggcgcgcagggctcctggcggcggcgaccaggcacgcagaggcaggtcccggcggcggcgctgggggcgcgcggcctggcgcgcagggacttcgggcggcgaccgcctggcgcgcagggcagatcccggcggcggcggctggagaaaaacctaggctaggctga

SEQ ID NO: 28298 - DNA, 372 bp, Zea mays
  Peptide Sequence Number=SeqID_70077
atggctccctccacagctctcgctccggtggccttccgctccgccttctcgacgccgctcgcgtcgaaacctaccctagacgcagaggaagaggtggctcgtggtggcggcagcaagggagtgacaagagaggatatagagaaaggcgagagagatagggatgtgaagctgacaagaatttttggaaatatgcaaaatctctatgaaactgttaagaaggcccaaatggttgtccaagttgaggctgtccgggtgcaaaaggagcttgcagcgactgagattgatggttattgtgaaggcgaactaatcaaggagccttggcagccgcacacacctgttgagctgctcaaggtctttaatgactataattaa

SEQ ID NO: 28299 - DNA, 1236 bp, Zea mays
  Peptide Sequence Number=SeqID_70078
atgggggtgggttctgtacttcctgtgcaggtgtacctggggtttgcagttggttgtcttttctggtcgctcaggtactgtatcgtgcaattattggttttggtatatcaaggcttccgtggatatacatatactggtctgagttgtcaagtccttgacctgatcatatcagttttgcttataaggatgggggtttacctcagtactccaaaaactgacaagctatctgaaaatggagaaaatgatagacttaagtttggtctttcatctatgcaaggatggcgagcaaccatggaagatgctgtgagtttcctaatcaaggctattaacatcattttatttgcattagcaggggtgaaattaaggtcaccaattgattaccctgtgcatgaaggatgcaactttgtaatgtctggagcactgaggctgcattcagcattgctagatcttgatagcgagacagcattctttggtgtttttgatggtcatggaggaagagtcgttgccaaattctgtgcaaaatatctgcatggtcaagtcctcaaaagcgaagcctattcaactggtgacctaggcactgctgtccatagagctttcttcagaatggatgaaatgatgcaaggacagagaggttggcgagaactatctgcacttggagacaaaataaacaagtttagtggtatgatagaaggattgatttggtctccaaggggcagtgattcaaataatcaacaagatgattgggcttcagaggagggacctcactctgactttgctgggccaacatgtgggagtacagcgtgtgtagcattaataagaaacacccaacttgttgtggcaaatgctggtgattcccgatgtgttatttcaaggggtgggaagaacaaattcctgcctcccgagaagcaaattgtgacggccaatcctgatatcaatgtcgtggagctctgcgatgatgacgactttgttgttgtagcatgtgatggcatttgggactgcatgtcaagccaacagctggtggattttatccacgagcgtataaacacggagagcagcctgtctgccgtgtgcgagagagtgctggacagatgcctggctccatcaacgatcgctggagacgggtgcgacaacatgaccatgatcctggtgcagttcaaaaaacctgtcgatcggaacaagaaggccgaagcagcagggcaatctgccagcaatgtggacgaagccaagagtcggtga

SEQ ID NO: 28300 - DNA, 738 bp, Zea mays
  Peptide Sequence Number=SeqID_70079
atggcagtaatcatggctacaagctatatgccgtatttgggtgttggtctaagacctttatcgatatgcaataaacacactcaatgcacaaatctcattcccttttcagcaagatttaaaattagttgtgaatttttgaccaagttgcggataccatgccctagaagagatgttgaacctgagaagccaagcagcccttctataaagagggcagaagagaaagaggtggttgttgttcatgaaaccaaatgcaaggtatcagtagagattgccaggaactcagaacctttcatcggtgagcagttagcttctctgctctacctggagccagacagtgaacttacggctatgctaatcgcagcagaggccaaacaacaggaggaaaaagcaaaaggagtcagtgccgacgagcatgatgaagccactaagggttggaaagacattggtgttggtcagctctctatcagaagtaaagaaggcacagagaaaacttacaaagaatctactcctaccattgttataagaaaccatgaaggtgttggtatttgtcgacaaggcaaacgatctgatgcagctagacagcaaggacagtccagttgtataaaacgcggttttttgcttcaaccctctgcagctgctgctgtcactactaacaaggccgtgctggactcggtcatcagcttggctgctgctaagaagcctgctcgcacaaatacttatggtatgcctcttacttag

SEQ ID NO: 28301 - DNA, 153 bp, Zea mays
  Peptide Sequence Number=SeqID_70080
atgttggtttatataaggaagaaactttccgggttggtcaacgatgcttacaaggatgcacaccaacggagcgtccaggccatgaaagagaggatggctgacttggcgcagagcctgggaatgcctgcgggcctcggcgatggtctcaagtga

SEQ ID NO: 28302 - DNA, 228 bp, Zea mays
  Peptide Sequence Number=SeqID_70081
ttctggcatgcagccgtcccccgctcccctccccgctttgggccgcttggcagcccactcggcgcggcccagccgcctctgcgcgtgggcgcgacgtgcgcgtccggctggtgcgggcgggcgctcgcccttcttgcctcgcgcccgtgcaagatcgccgccgcaacgatcgtcgagcgtggcgagcccatggggcgcggcctctgcgcgtccgtgaaagtcgcctag

SEQ ID NO: 28303 - DNA, 522 bp, Zea mays
  Peptide Sequence Number=SeqID_70082
atgatactcgctctcccagtcccgcgtcgttcatccttaatccacacggtgataatgtgcccccgtctccccggctccggcatccatgcccagctctgccttgcctctgcgccgtcctcatgtgatgcttccctccgtgcagcaactgctccccctcacgtctcctgcaaggctgtgatccacccgcccctgcgaggcctacactgcaacacgcttcgcgcttccccctcaggccgaggcgatgaccgacgggcccggcgagcaggtggggatccggaaccggaagggcacgggtaccggaaccagttcctagatctagcgcggctgggggcggtggcggaggccttcttttgcagcgagatccaccggcggctagccgtcactatcgtgctcatcgtgctcagccgcgtggggtacttcatcccgctccccgggttcagtcgccgccgccgcctcatcccagactcttaccttagcttctccacgctcccagcaggaagcaatgtcgaggcagctaagtga

SEQ ID NO: 28304 - DNA, 795 bp, Zea mays
  Peptide Sequence Number=SeqID_70083
atgggctcgacgtgcctgtcgtgcggcgagggcgcggtggtggcagacgcggactcgggcgtgctcgtctgcacctcatgcggcatcatccaggacgccggcggcgcggagttcgtccaccagtccaccttcaacgagtcggggggcctcgatcgccgcgtctcctccctcgaggcgctccgcatggccaagtccgccaccgacggccagctcgccaccccgggcagcgccttcctccctgccctcgccgccgcctgcgcccttctcgtcgcgcggtcccaccgcctcccgctctccctcgccgaggccgcggaggccgccttatgctccgcgcccgccctcgccgacctggtctcccgcgtcaccgcccagctatccctccctcccctcccatgcttcgactacaccgccgcgctcgaccgtgccgtgcacctctcgacctcgctcaacgccgccgcgcccgacaagacggacgccattctcgcccaggcccggttcctcttccgctgcgcatccaagtggtcgctcaccacggggcggtttccacttcccctcgtcgcggctctgctcgccttctctgcggaggtgaacggggtcacttctgtctctttggaggacattgcaagggacatctcggcaggattgaggaccagcctgctccgatacaaggagctcgttgacgccctggtgcatgtcgcggggcacctgcttccatggggtgccgatgtcaatgccaagaacctgctcctcaacgctccggtcttgctccggctcatggagatgcgtgggttctga

SEQ ID NO: 28305 - DNA, 504 bp, Zea mays
  Peptide Sequence Number=SeqID_70084
atggagcacgcgccagatcagcgactacaaggccttgtccccgctgtaccactagcagcccgcgtaggcctgagtgctgtgctcccgatggttggatcgacgcactgtgatgcaggccactccatccaaagcctcgctgccccggtcggcgatgatcttctcgcggcccgcctaggtgaccgtgcccgcccagatccaccagaaggaggggaaatggcctcgccgtcgctgtcatcgtgggccgcatgggcatcccgtgtcctgctcgggcggcggctagggtttgtagccacgcccacactatcagcagcaggctaccacccctgcagccacatgctagccgcgagagcgcgggcgccaccgccacaggccacgattgctgccatgcccctcctcgacggcgctgaaggagagagggtgacgcgggggctggccaaaaacgccccgccgccaccatcaccgcgagctctctggcagctagctacagaggcggtgaacagatag

SEQ ID NO: 28306 - DNA, 312 bp, Zea mays
  Peptide Sequence Number=SeqID_70085
atgagggataaagagagctttttgccccccaatctgagggatagtgccttccttgagtggtggagaatgttatgcaccaagatctctggaatcgcaagggatggcctcaattctcttgtcattttgggagtttggaccttatggaagcagcacaatggctatgttttcgacaataagagccccagtattgctgatgctattagacgagttggtttggaggttgacctttcggagatggctggtgcacagaagttgtctttgctcaccgcccccattctgggcctccctgctagtaagctaacgctgtggtag

SEQ ID NO: 28307 - DNA, 840 bp, Zea mays
  Peptide Sequence Number=SeqID_70086
atgagaagccacggccacgggcaggcgagtgtggatatgcaaccgactcaccctccgcctcagcccaccgccgcgccgtccacctccacgtccgacgcccgcctctccgactacgagaggttctccgttctcggccacggcaacggcggcaccgtgaacaaggcgcggcaccgccggtccgcgcagccggtcgcactcaagcttttcgcggacggggacacctcggcggcgcgcgaggccgagatactgatgctcgccgcggaccccccccacgtcgtgcgcctacacgcggtgatcccgtcggccgccggggaggctcccgcggcgctggcgctggagctcatgcccgggggctccctgtcgggcctgctgcgccggctggaccggccgatgggggagcgccccatcgccgccgtggcgcggcaggcgctcctcgggctcgccgcggtccacgcgctccgcgtcgtgcaccgcgacctgaagccgtcgaacctgctcgtcggcgccgacggcgaggtgaagatcgccgacttcggcgcgggcaaggtgctgcgccggcggctggatccctgcgcgtcctacgtcggcacggcggcgtacatgtcccccgagcggttcgacccggaggcgtactcgggagactacgacccctacgccgccgacgtgtggagcctcggggtggccatcctggagctgtaccggggccacttccctctcctgcccgcgggccagcgcccggactgggccgcgctgatgtgcgccatatgcttcggcgaggcgccgggagccgccggccgcggcgtcggaagagttccgggattttcgtggcgcggtgcttag

SEQ ID NO: 28308 - DNA, 453 bp, Zea mays
  Peptide Sequence Number=SeqID_70087
atggcgagagcgggtgtggtgcacggggcgtggctagacgcgaccccgacgccaagcgcgggcatggctccaacggcgagagcgtgcgtggatctcgatgaatcggtcgtgcgcaagatttctgtgcccagcacgaggtccacggtgttctgtgccagcgatgcaaagatagggaagaggagcgagccgccgcaccgtcgaccccaaccattgctgcatggaggtccgccttgggcctccacgatgctccatacacgcagtggaggggcgccaacttccttgccccgggggagcacaacggacacagtggagggcgcccagtctgcgtgccaacttccttgccatgaagtggagactggaggcccctgtgcctgcacacccgtcaacgccatcaagtggaaccgcaccagcaccagcgagtgccccctactcgtgctctcagtaagtcagtag

SEQ ID NO: 28309 - DNA, 171 bp, Zea mays
  Peptide Sequence Number=SeqID_70088
atggcctggcagtggcaggcgcttacaatccgtatggaaatggactggcaggtgcttatggtgtgcttggtgctcatgctgcacaggagggagagcaaggatcttatatccttgagaccccatatagatgaagaatgtgcactgtatcatgtattaccatttatagattaa

SEQ ID NO: 28310 - DNA, 603 bp, Zea mays
  Peptide Sequence Number=SeqID_70089
atggcgtcccgctcctactccaacctcctcgacctggcaaccggagcagcggaccaggcgccggcggtcgcggcgcttggcgcgctccggcggcggctgccgcgcgtggtcaccacccccgggctcatcgacgactcgccggcgtcgccgtccacgccgccgcggccgcgcaccatcatcgtggccaaccagctcccgatccggtcccaccgcccggagtcgccggaggagccctggaccttcgagtgggacgaggactccctcctccgccacctccaccactcgtcgtcccccctgatggagttcatctacatcggctgcctgcgcgacgacatcccgcaggccgagcaggacgccgtcgcgcaggcgctcctcgagacccacaactgcgtgccggccttcctgcccacggacatcgccgagcgctactaccacggcttctgcaagcagcacctgtggcccctcttccactacatgctgccgctgtcccccgacctcggcggccgcttcgaccgcgcgctgtggcaggcctacgtctcggccaacaagatcttcgcggacaaggtgctggcggtggtcaacccggacgacgacttcgtgtgg

SEQ ID NO: 28311 - DNA, 444 bp, Zea mays
  Peptide Sequence Number=SeqID_70090
atggcgccgcggcgacacacggatttcggttgttcgtcgccggggagagagagagtgagttggggaagacgcgcgcagaccgttgatctagatgcagacgataatgatcagttggtggagtccgaaggaattgcaggtggtgatgaggatgatggttttggttatgactatggtaatgcaggagatagagtctgtgaggagctgctcccctgtgcccccgctggaggcgccccctgcaccagcactcgcgtcccggccactggactagctgttggaggagaccccgacgacgaaggcgacgacaacagctcgagccacaacaccgacctttcagaggagcaggagccggagggatgggttgctcgacccatcactcgtgacaccgctcgcgggtgtcacttccacgatgcgctcgacaccttgctatgccaggcacttgactga

SEQ ID NO: 28312 - DNA, 363 bp, Zea mays
  Peptide Sequence Number=SeqID_70091
atggatttcacactttgcaatcctacctttatggccccttttagagagataggagacatggtcaataccaggaagagaggcggaattgatctacctaccaacccattcaaccgctcagatgcagatgctgtaatagatggcgaacacgatgtaggatatgcaagcacagaggcgacaggagcgtctggagatgcgccaagagaggcaggagatgagggaggaaatgcgacaagaaaggatggtgtgacagcaacaatcaccattacctccaccaccaccagttccaccccaggacaagcaccgagagttcatgagccacaagccaccgacgttcaccagctctccagatcctctgcatgctga

SEQ ID NO: 28313 - DNA, 504 bp, Zea mays
  Peptide Sequence Number=SeqID_70092
atggggtccaggcacagtgcttgctctgccgaggctgggtgccgaggttctttcgttctgcttttgttagtcaccctcctgcagggagaggttgtccacattgtaaccactgctcaggagaaggcgaagtcgtggaaggagacttccaggagttccaagactacgacgagttttagggtgaggctgacaacagccgagtccggcctcaggcgccataggaagctccgcctcacccgaccccggggctcggcccccgcctcgacctcggaagacggtctccgccacgcccgaccccagggctcggactcaagtaatgatggcaccccgcgtgctcccatgacgacggcggttctcagccccctacggaagcaaggagacgtcaacaaggacccaacagccccgactgctgtgcttctacagggctcaagcgctcctccgacggccacgacatcacatgaacagggcactaacacctctccaacagccacgtcggcatgtacatag

SEQ ID NO: 28314 - DNA, 282 bp, Zea mays
  Peptide Sequence Number=SeqID_70093
atggggacacagccacataagatgaaaagaagcgggatctggtgtggctactccctttcttcaacctctcaccacgcacgcacacaggggaacaactggttcaggatttcctgcgcaggggcggggctgcgggtcggacgcgccctgagttctctctactgcggcaagcaggccgctcggccaggggaggcgcaaggcaagccaccagctgggcgccaagcacgccgccgcgcgggattggggagggagcaggcactgggcgggctgggcggccatggctag

SEQ ID NO: 28315 - DNA, 240 bp, Zea mays
  Peptide Sequence Number=SeqID_70094
atgccatgggtgactcgcttactcctcaacgttgtgcccctggattcggcctgcctcagggctataagactggacgccggggcgccgctggtcagcacgctgccgtctgtgcgggcccgtgctcatcccgccatgggacagcgcgacggaagtggccgccgccgtggtcgtctcgattcgcccgtgattgaccatggcgcggagtcctggcacagcccggggtcgattgacggtgtttag

SEQ ID NO: 28316 - DNA, 300 bp, Zea mays
  Peptide Sequence Number=SeqID_70095
atggcgctacacggacggatggacgaaggggaggtcgattttatacctcgggcagaaggagatggagcttctgcgcagctggccccacatggcggtgaaacagcacacccaggcgtgcactgtagtgaccagaagtgcgggacccgcccgtcagtcgcagagagggaggagcgcgtggtgtttatgtgggctgggcaagggggcaaagattttggtctttacaggctagcttgcatgtcgtgtgggacccagccccgtgtcgtagggggaggaccctggagcacgttggtgaagacttag

SEQ ID NO: 28317 - DNA, 564 bp, Zea mays
  Peptide Sequence Number=SeqID_70096
atggctgcctccgccacggccgcgaggcctctcgccgggaccgccgtcccgctcccgctctcgacgcggacgcggcctgccagggtcgccttgctctccctgattcctcctgctccggcccagcgccttgctctcaggcgtggcgcgtggctctcacccccggagcgcagccggtcggtgcggtgcctggcggctatgagcccggagatgcgggcaacgctggacaaggtcgtaggatccagcaaggtggtgctgttcatgaagggcaccaaggacttcccgcagtgcggcttctcccacaccgtcgtgcagatcctgcgctcgctcgacgtgcccttcgagacgctcgacgtgctcgccaacgaggcgctccggcaggggctcaaggagtactccagctggcccaccttcccgcagctctacatcgacggcgagttcttcggtggatgtgacatcaccgttggtaaactcctttatatttttctcgtttcattcacagatgctcgaggcgggaatttctatacgtttatactgagctcaagatcccatgatattggaatctga

SEQ ID NO: 28318 - DNA, 288 bp, Zea mays
  Peptide Sequence Number=SeqID_70097
atggttgaggatctcactgacatggagagtgaatcgtctcctgttgcttcaccatttcctgttccaaattcatccaaagaacatgaattggagatgactaagaattctactagtgtggtgcctgaaatgactagcagcaacagtatgcctaacttggatgctgcaaaagatggaaataccaaggttttatcttttgaattccgagcacttgaggtctgccttgggcctgcagatctttggaagatggagtatgtgcttgcatctggatctttttatcagtttatctga

SEQ ID NO: 28319 - DNA, 2529 bp, Zea mays
  Peptide Sequence Number=SeqID_70098
atggccggatcgggaagcgatggggctccagcgaccgccggcgccagcctaatgagcgactacctcgacggcccaaacgccatccaacggcgcgctgcgtcggtcgcaatcgtgcgctccggcgcgtggggcaggggacggcccgcgcgtcgtcgacgggcccggggcgggaggaccggagggcgcagtcgtcccgacgagcctcgctgtcgttatggcgctctcggggcgccggccacgaagacggcggccgttgactcgatacccagctccgtcccgggcgctgccgcgccgcgggggtggccaaggaataaagggtcctcgacggcgtggaggagctggaagccggtgcgcgcgctcgcgcacctcgggaagcgccgcgcggggtgcctgttctcggtcgaggtcgacgccgcccgcggcgtgccggcgtccatggaagggttccgcctcgccgtcaccgtgcgcaaggcggagaccagggacggctcggtgcagaccctgccgtgccgggtgcgcggtggcgccgcggacttcgacgagacgctcttcgtcaggtgcaacctctacttcgccggcggagccggcacggggaagccgctccggctccagccgcggaggttcgtcgtaaccgtcgtcgccgtcgagggacgaggacggggcgcccttctgggcacgcacaccgtcgacgtcagctcgctcgtgctcgagtctctccgcaagatcagctccgagggacgccgcgtcaggtggttcgacgagacgttcgcgctctccggcactgcggccggcggagagctgcagctcaagctcgggtttcagctcatggaagacgcagggctcagcctgtacacgcaggccgaggagagggaccgcgggtctccggctccgggctcctctcgtgccagggctcacaacaggaactccttcagcatttcaagcacgcccaagctttcgccatctgacgcttccgtctcaccttccatgagggcctacaagcagcttgtcgataggcttcgtgtcgacgagaatggagatcctgatcatcatcctgcggtacgatctctgatgcctcggaagcccggcgacgacgagctttcggcatccaccaccgacgccggggacgtgaacagcctccccgagtacgaggtcgtggagaagggcgttgagacggttaaagaagtcgtccactaccaggctcaacgcgaggtgctgcgggagctcgactccattgccgagcagatcgaggccatcgaggcgctgatgaccaacggcgggaagaagtcgcccagggcggcgggtcagcagcagcgtctggacgcggatgaagagatggtgacggtggagtttcttaggaagctcgaggcggacggtgtcggcgacaagaagaagctcaggctgcccttgacgccgagatccgagccggcgtcgccagcaaggaaggcggtgacgactccgcccgtggtgccagacttggggcggggcattggccctgccgtgcaaacgcgtgacggcgggttcctggtgtccatgaacccgttcgacctgccgctggggaacagagatgggcccccaaagctcgccatgcaggtgtccaggcctttcgtgctgccgggcgccacggcggccacagggttcgacgtgctccagaagatggcggcggcaggcggcgccgacgaggtgcgcgacagggtggcgtcgctcggcggcatggatgacattacggggaagacgcccgagcaggtgggctttgagggcatcgcggcggctgtgatcggcgggcgacgcaccgagggcgcgagctcgagcgccgcgcggtccgtgcggctcgtccggaagctcgccgtggccttgtccgagggccggagcgagcgcgtctccacgggcatctggagcgccggtgacgacccggagacgctggacgaagttttcgccttctccctgcagaagctggagaccatggccgtggacgcgctggcggtccaggccgagatggccgacgaggacgcgccgttcgaggtctccgcggccgcgggggacacgggcgtgttcgactcgctggtgccctcggacgagtggtccgagtctggtgcctcggacgggcgcgtcaccctggtggcggccatccaggtgcgcgacccgtcgcggcggtacgaggcggtgggcgcgcccatggtcgccgtcgtgcagtcggcgaggctgttgggcgcggcgggctacagcgccgggaggttcaaggtacgaagcctgcacgtcggcggcgtgcagatgaggtgcacgccgtccggaggtggcgggagcgcgcgctggggcgcggagaggcagaagctgacggcgatgcagtggatgctcgcgcacgggccggcccgcgctggcaagagggcggcgacgacgacggcgcaggcgggggcgagagtgcagcggcccgacgtcgtgtggagcctgtcgtcgcgggtgctcgccgggatgtggcttaagacggtgcggaacccggacgtaaggattggcggcggcggcggcggcacgtga

SEQ ID NO: 28320 - DNA, 602 bp, Zea mays
  Peptide Sequence Number=SeqID_70099
ggagagagagacagggcgccgagcttgaggacgacggcaccatgggcgagcgtcagggaaccccgagcagacaggagcgcggccacagaggaactctgcgcgcaggcatggaagggagaaactcggcgcggcagatagctccacggccagggcgagctggaaccagggcacgcgagatccgggaagagagagcagaggatgggaggagctcggctaggggaaaaagcagggacgtcgagcagagtgcgacgggcgtagggagctccggcaaggagagggcaccacggcagcagccggcaaagggccccgagccccggccgcgcgccatggaaggcatagagacgagcggccgagctgcaggagcacacgcggaagaaaccgctcggctgggcgtgtggccaacatgggagctcgagggaggagcgagccatggggaaagagaggagatgcgcgggggagaagaagaccgcacgcagaggagcttcgacggcgacctggagattgaagataagggaaccgcgcacgtggaaggagataaggcagaggaaggaatcagcagcaagatttttctatccagcgcgtcagctgaagaaaatcgatag

SEQ ID NO: 28321 - DNA, 522 bp, Zea mays
  Peptide Sequence Number=SeqID_70100
atggaggcccaattgctcatgtcgcttcgtcgccttgcagcctctacacctacaggagctgctagttctgtgactcagtcctctgcatctaaaggttttgatgttggttctctatcgtccactaagggaccaccttccatttccatttcagatgttccttttgttcctgatccgaccatacagctcatgtctgctagccaacttattgatcatgactgttgtgttattctttatcctaacttttgttatgccagcgttagggtaccactaaacaatgggggttctctggtcatagaacagactgaagctctggtatcagttgatgtgaatggtggtcacagtatgtttggtcagggaacttcacaggagaaggctattttagaagttaatcttgaagctgcaaagcaaattgcccgtgagttgcgcttgagggatattggtggcattatcattgtggattttatcgatatgtcagatgattcaattatgggacaatctggcatgaatgctgtgcatatttaa

SEQ ID NO: 28322 - DNA, 624 bp, Zea mays
  Peptide Sequence Number=SeqID_70101
atggagtggaagcgaaggctggtgttggctagaggacctgccctgaggaggccgactatgggggagtcgctggagtgtggtggtgccatcaaaacaacaacaagggtgactaggaggagcagcggtggcttcgaccagagatcggtataccttctgagttttcagatattggtttcccgtggcaacaaagttggggtatccaaaaagattactggaatagaacgcaccaggttaaagggcatcacaaaattactgcgacctcctggatttactttgacggctcgcacagtcgcagctggtcattcctgggaggaactgcagaaggaccttgatggcttgctatctacatggaaaggaataactgagcatgctcaatctgctgccttggctgctgatgagggtgtggaaggtgctgttcctgtaatgttgcacagagcgaagggtcaaactttatctgttgttcaagacgattttaatgaaaaggtcaagaggctggttgtggattctcctcgaacatatcatgagagttgctactttgactacgagggcgtgttagttagagggtgcggcaaccccttgctaggtctcaatcctttgatgaattgtgccacaaagaaagtttaa

SEQ ID NO: 28323 - DNA, 1389 bp, Zea mays
  Peptide Sequence Number=SeqID_70102
atgagttcctcttctgatattatatggaggccaggtccagtatactccttatcaataccttcagatggccagaaaaagcaggttattattgtgaaagacctatggatgaaaaccagtctaccaggtcttcctactcctacatggggatcatggctgatggaagctgattctcttgaaggtgaactttttgatggtggaaataaccagaacattgtgaaagatcactctgtcagggatacacggaatcaaggcttatctgtaggtgatcatattatattgaagcttgggaatggcacaccattacatgcaaaactgttgtcggataatcaatctaccatcatgcacaactgtgtaactgaaataccaaatgccagttatataagccaatatggaaggcctcaagtcgtagaggagccatggattcttgaatcaattgtgtctgcaaagaaaccagttgcaaaagtcaaagataagaaagggcaaaagaagcttgtaaattataagcacactttgagtggagttagtaaaaacatgcatgaacagtatcagcctgttgaagagccatggttatttcaatctatattggaactaaatgaaactatagttcttgctgatggaaaagtagaagcaagggacattatcagaaaattaaggaaaatagaaaaacctttaacgcctttggatgagagtaaaccgactggtggtgaaccgtcatcaagagttatacttatgaattcctctgtctgcactatgcagagaattgcagtattagaagatggaaaactagttgaactcttgctggaacccatcaagaacaatgtacagtgtgatagtatttatctaggtgtagtaacaaagctcgttcctcatatgggaggagcatttgtagatattggaatttcaaggccttcacttatgagcataaagcaaaaccgagatccttttgtgtatcctcaagtttttaagaaccgaggaacagatcatgttggtgattattgtaatgaagagaaccttccagcttatgaaaacgatgatgatatgagtgacgacgaatttgcagatgaagaagctcatgatggttcatcatttccagttgagaatgttacagataacaatgtcgatgatgatgaagttgacagcatttctgtttatgacgtagacaaagatgaagaaaatgaccacatggaagatgaatatagtgagggcatactgcaaggatatcaatcagaaatttccaatgatctcaagactttatcttcaattcagcatgctttaagagaatctaatgatgacacaaatggaagcagatggtctcaagttcgcaagggcacaaaagtaatggttcaagttgtcaaaagaaggattgggtacgaaaggtccaacacttag

SEQ ID NO: 28324 - DNA, 555 bp, Zea mays
  Peptide Sequence Number=SeqID_70103
atggcggtcaccggcgaccgggacgggacatatagtggcacgctcaatccaggccgtcttatgaaagaaaaactcgacaaagttcagaagaagtgccatttcaagaattatgatcttatccaaccacagaatcgcttctgctttgaaaagagggattggatgactgtgcagccaaacgagctgcctcatggatcccaactaattatgggtcttaatcctccttttggagtcaaagcaagtcttgcgaacaaatttattgacaaagcattgacattcaagcctaagctcattgtactaattgtccctaaagaaactaaaaggttagatcagaggagaacaccttatgatttgatttgggaggacagtgagtgtctttctggcaagtccttctatttgcctggttctgtggatcttaatgataaaatagttgaagggtggaatgcatctgcgccacccctctatttgtggagtcatcctggttggacaaagaagcacatgcaagtggctgaagagcatggtcatacttgtatggggaagatagctttgccatgttga

SEQ ID NO: 28325 - DNA, 357 bp, Zea mays
  Peptide Sequence Number=SeqID_70104
atgttggcgtcgagtctggaggcgtggggagcctcgggtgcgaccggggggcgaccgaggaggcgctacgcggtggccatctgtgcgatcaatgtggcgtccatggcacgttcttgctccaaggcgagagtagcgatgcgctcgtgctcccaggaggagacgacgaccgcctggatggtggtgatagccacaaccaacgctgagggagccgggggaagagccgacgaggaaggtacgacgttggcccatgtgggtgaggcgagggcggggaagcccagcggggaacctcgtcatggcttttatgccgtgaaggtcgtaagagaggcgccggggaggggccctaggccggcgttgtag

SEQ ID NO: 28326 - DNA, 129 bp, Zea mays
  Peptide Sequence Number=SeqID_70105
atggctgctatagccggcgcccagctcgcgcaggagatcggcaggccggacctcaccccttcctccatcgacagacattccctttgccgcgccaagattttgcgttatgttctaaaattcatatcttga

SEQ ID NO: 28327 - DNA, 231 bp, Zea mays
  Peptide Sequence Number=SeqID_70106
atggccggaacccccaaatccctattctcatgcctaaactcagatccgaaagccttcgtggatggcggtaatggtaggatatcactatggaatatactcaccgagatccgaagggcgcccaggccttcccacggcgcgcggcggaatccggtgaccggcgacgaatttcgggcaactccgaggtcgattacccccaatcggtcacgagcgcttcaccagagaccccactag

SEQ ID NO: 28328 - DNA, 420 bp, Zea mays
  Peptide Sequence Number=SeqID_70107
atgatgatgtcggacgatgacgatgctgagccccagctcaacgcggtggagggctactacttcgttgactccaagaacgagaaggagcctgtctgcttctccaccctgcctttctggttcggggacactgatgatcttcctgacggcaagaagaagctggtgctgcgcgggactggtgacccgggcgtcaaggtgtacgatgagattttgcgagtatttattgaaggaaaatctagaaaaaaattcactgaggttggtgcagaccatattgatgtcaagcagccgttcatcactgatgatgagggcatagatgaaatgaatgtggaagatgtcgataatgaatctgatgaagatgacgatgaatatttgtttgattcaatatgtgctatttgtgacgatggaggagacatattatggtag

SEQ ID NO: 28329 - DNA, 573 bp, Zea mays
  Peptide Sequence Number=SeqID_70108
atggcgcgcagtagcgaggcgatcctccgcggcagcgtgcaagcctcgagactaggcgccgccttcgacggcgcgggcgcgggtgcggcgctgaagagaggaagaaggggttcgaagatggatgtgaacataccggtggtccctgagccgacgagtgaatgtcgctgcgtgccccagctcagatgggtcgagcatgggggcgagcgcgaaggggggaaagcgaggcggccggagaccggcgtgagagaggtgggaatcccgcggccttcgtgttcgtcccgcgcccaggtcggggtgatgatggcgcctcctgttgacgtggctggtctgcgtcctaggttgggcgatgtggaagctcctccgaagccgaggtcgagtctgtcttccgtggtcgaggtcgagtccgagcccctgggtcgggcgaggcggaggccgttggctgaggccagggcggagtccgagccctgggtcgggcggagcggagttcgccgtcttccgggacttagcccgtgtccgagccctgggtcgggcagagcggagttcgccgtcttctggggctcttccgggacttag

SEQ ID NO: 28330 - DNA, 363 bp, Zea mays
  Peptide Sequence Number=SeqID_70109
atgaggcttcacagtctgtgctatggtacttcagaccccttcgccgccctcatgaaggagttgctcccgctctggctcctcggcgctttggtttcccactctatgttcgacatcgtcgatttcctgatctctgatccaacctccttagttccaggcaactctcgacgccacatactttcatttggtttctaccgcctagctcttgaggatacagctctagcttctgctacagtggatcctttggcacttgagcttagagatgaggatgagacgattcgccagttcaaggatcagggcactgctacagatacttcttcaaattcaaatgatgaggatctcaggataccgccactgcccccatag

SEQ ID NO: 28331 - DNA, 354 bp, Zea mays
  Peptide Sequence Number=SeqID_70110
atgtctcaggcgatggacaggctacctacggcggtctactgtgacatggtaacacttctaagtaggtggcgtctgggcggcaagcggcagactccggcgagggtcatcttgaccggccgtagggcaagtggaagttttgaagaaatgtctgaggagaaggtgtctaaggtgacgaaggtggccgaggagacgaaggttgtggacccttttattgctgggttttatgaatctatggcaaaaacaaatacagagaagatcacaaaggagataatggtggatttatcagaagattctgatgacagtgatgactttgatgtggaaagtggagatgaagattccgaagatcggccctag

SEQ ID NO: 28332 - DNA, 246 bp, Zea mays
  Peptide Sequence Number=SeqID_70111
atgcctgctttctcgggcgtgctaggcgctatccctcctgagccgccacaaccaccgcctgctagcgcagccagcaagccgcttgccacgcgcgcgacgtcgtgtttggcccccaccgccgttcggccgccttccccgccgccggcgtcgagctcgcctctgcgggaccgtagcccccacccctcattggctctctgcgcgagcgtgatcgcgcttccgcatcccatgttcaatggagccctaaag

SEQ ID NO: 28333 - DNA, 264 bp, Zea mays
  Peptide Sequence Number=SeqID_70112
atggggccactctccgcgcggattattttaatcgtttctcgccaacaagctcagggaaggtgttttttggatcttcgacatctcgaagcctacaagacttttttacggatcaagcttgttacgaaaaacgatctagcaccacgaaggggctactattgggggacgaagcagcttcatgagtatccgtcaagcttcggatcattgaccttcggcttcgtcatcatgtacataacaaagtggtataaggcgggggatgtcagttaa

SEQ ID NO: 28334 - DNA, 222 bp, Zea mays
  Peptide Sequence Number=SeqID_70113
atggcgaaactccctgccccgtccaaggaacccgacgcgggcgccaatgcggattcaccgtggcggcacacacacctccaccgagcttcctctcacgacgacgaccagcgattcggtggcgtggttggctcgttccaaaggggcggcagagtttgccggcagcgcctagatctcgctcctgggagggatcccgtcgggaagaaggtcctaggccttatctag

SEQ ID NO: 28335 - DNA, 957 bp, Zea mays
  Peptide Sequence Number=SeqID_70114
atggcagcaccggtgcagacgacagccacgacgcctcaggtccctgctgctgcggtagtcacgtcggtgttccagccagggaagcttgcggtcgaggtgatcacagtggatcacgatgcacagccaacaccgccgatcccgatcctgatcgctgctcccaaggatgccggaacctaccccgtcgccatgctactgcacggcttcttcctccagaaccgctactacgagcagctcctcaagcatgttgcctcttttggcttcatcatggtcgcaccacagttccacaccagcctcatatccaatagcgacaacgacgacatcgcggcggcagccaaggcgacggactggctccccgagggcctgccatccgtcctcccgacaggcgtcgaggccgacctttccaagcttgtcttggcgggccacagccgaggtggccacatggccttctccctggccctggggtacgccaagatcagcagcagcctgagcttctccgcgctcatcgggctcgaccccgtcgccggcacgggcaagaactcgcaactcccgccggcgatcctcacctacgcgccctcgtctttcgacatcgccatgccggtgctggtcatcgggaccgggctgggcgacgagagggagaacgtgctgttcccgccctgcgcccccgtggatgtgaaccacaccgagttctatcgcgagtgcagggctccgtgctaccacctggtgaccaaaaactatggccacctcgacatgttggacgacgacgctcccaagcttgtcacctgcctctgcaaggaagggaacagctgcaaggacgtgatgaggaggaccgtcgccggtatcatggtggccttcttgaaggccgtcatgggcgaggaggatggtgatctcaaggccatactcacagaccctgggctcgcaccaaccactctggaccctgtcgagtaccggttggcatga

SEQ ID NO: 28336 - DNA, 222 bp, Zea mays
  Peptide Sequence Number=SeqID_70115
atgggagtcgactgggaacatacctactatcatgtcggggatctccagaactgcttcagcctccaagtggttcagtctcccatggaagacgaggtgcctgctgattctacctctggaactgacctcctccttgctgattattctggcgattctgatgctgatgctgaggatactgcctttgaaactgctgctggtggtgaggtggatgctggttctgcctga

SEQ ID NO: 28337 - DNA, 570 bp, Zea mays
  Peptide Sequence Number=SeqID_70116
atggccttccagctccaaccggcggcgcggatcgacggtcacgccaccgccctcttcgtcccgacagtggcacgcggtggattgcggcgtgatgaagtgagaggtcaaagccctacttaccccgcacttaaatcccccaggtccggcccaggcgcacgcaacaaacggctccgaattccacggcgaagctccgccatgctcggcgggatggttgaaggtgagcgcttacaatccgggcccacgcgtcagaggtacaagcgagaacgagtggctggggcgcggggtcccgcaggcagagaccgtgagggtgagcgcgcacgcgatgcgactgacagccgggccccgggtgtaagtggcagcgcgcgtacaaggggtcaagcagtctcattagctgcgagaagcagacgatttgaatcgagttttaaccttgcaaggttttggagtaggtttgaactacaagttgcttttataaaattctacaaattcttcaaaaattacagtggcttggtactggtgtatgtttctctgtctcaaaaattggggatcagaaagtgttataacatgacttga

SEQ ID NO: 28338 - DNA, 2106 bp, Zea mays
  Peptide Sequence Number=SeqID_70117
atgaaagagtccgaccaaatcgcaacttctttcatcacaccttttggcatgtactgctacgttactatgccatttggtttgaggaatgcgggtgcgacataccaaaggtgcatgaaccacgtgtttggcgaacacattggtcgaatggtcgaggcttacgtcgatgacatcgtagtcaagacgaggaaagcctctgacctcctctccgaccttgaaacgacattccggtgtctcaaggcgaaaggcgtaaaactcaatcccgagaagtgcgtcttcggagtcccccgaggcatgctcttggggttcatcatctccgagcggggcatcgaggccgacctggagaaaatcgcggccatcaccaacatggggcccatcaaggacttgaaaggcgtacagagggtcatgggatgccttgcgactctgagccgcttcatctcgcgcctcggtgaaagaggcctacctctgtaccgcctctcaaggaagaccgagtgcttcgcttggacccccgaggccgaggaagccctcgggaacctgaaggcgctcctcacgaacgcacccatcctgaggccggtctacttcatcagtgaggtactgtccgagaccaagatccgctacccacaaattcaaaagctgctgtacatgtgccaagaggcctcgggtaggattggaaagtgggcggtggaaatcatgggcgagacaatctcgttcgcccctcggaaggccatcaagtcccaagtcttggcggacattgtggttgaatgggtcgacacccagctcccaacagttcggatccaaccggaagtctggaccatgtttttcgacgggtcgctgatgaaaacaggggcaggcgcgggcctgctcttcatctcgcccctcgggaagcacctccgctacgtgttgcacctccatttcccggcgtccaacaacgtggctgagtacaaggctctgcttgtcatcgaccaagtcatgaagaactcccactgccgcgacacgaagatggaagcctactgcgatgaggttcggcgcctggaggacaagttctacgggctcgaggtcaaccacgtcgcccgacgatacaacgagactacggacgagttggctaagatagcctcggggcggacaacgcccaaggcaccctcggcccccgagggtgaggcactgcgcgtcgaggaagagcgggatggggtccagcctaatcgagactggcagacccccgatgcatatccatcgccgaaggctaggagctcttacaagaaatacactcgggggcttgcggtcatcacgcagcgcctcgagcccttattggaaacgctttccgacaagacccacctgcccgctcaggctctgcagacgatacccatcacctggccgtttgctgtgtggggtctggacctcatcggtcccttgcagaaggcacccgggggctacacgcacctgctggttgccatcgacaaattctccaaatggatcgaggtccgacccctaaacagcatcaggtccgaacaggcggtggcgttcttcaccaacatcatccatcgcttcgaggccccaaactccatcatcaccgacaacggcacccagttcaccggcagaaggttcctggacttctgcgaggatcaccacatccgggtggactgggccgtcgtggctcaccccatgacgaatgggcaggtacaacgtgccaacggcatgattctgcaaggactcaagcctaggatctacaacgacctcaacaagttcggcaggcgatggatgaaggaactcccctcggtggtctggagtctgaggacaatgccgagccgagccacgggcttcgcaccgttctttctagtctatggggccgaggccatcttgcccacagacttagaatacggttccccgaggacgagggcgtacgacgaccaaagcaatcgaaccaaccgagaagactcactggaccagctggaagaggctcgggacatggccttactacactcgacgcggtatcagcagtccctgcgacgctaccatgcccgaggggttcggtcccgagacctccaggtgggcgacttggtgcttcggctgcgacaagacgcccgagggcggcacaagctcacgcctccctag

SEQ ID NO: 28339 - DNA, 252 bp, Zea mays
  Peptide Sequence Number=SeqID_70118
atggggagtagctctccccggacagaaaggagatcacgactcgtcggtgataatgaggatgatggttttgattatgattatggtaatggtttctggtattctttccgtatggaaagggttgcctttggtgcaacctatgctgaggtgaagaagaagaaggcgtcaaggcggatctccaggagttccaagacttcgacgagttcgaggattaggctagcgacctcccccagtcagctgcctatggtgggttaa

SEQ ID NO: 28340 - DNA, 399 bp, Zea mays
  Peptide Sequence Number=SeqID_70119
atggccgatgggggtagggtatgtcgccgcagtggcgggaggcttgccggcgtcttcaacgttggtgtcttctcatcgtctccttcatcacaccacctccgacgaagaacctggcaaaccccggacaaagaacgcagcgaggaagaaatgctgggacaggttttgcgaagactccgaccagcggtggcggctgaggtggcgaggggctactccgccgcggcgaaggagatgactgtccgtgatgcattgaactctgcattggatgaagagatgtctgctgatccttccgtttttctgatgggagaagaggttggagagtaccaaggtgcatacaagatttctaagggcttgcttgataggtatggtcctgatagggttcttgacacgcctatcacagag

SEQ ID NO: 28341 - DNA, 948 bp, Zea mays
  Peptide Sequence Number=SeqID_70120
atggcgccggaggaggcgctgcgctacgccaagaaggaaatacgggacgccgagccggtgctcgacgaccccgacctgtacgcgcctctgttcaagaacgtctcccagttcaagaggagctatgaactgatggaacggatactcaaagtttacatttaccaggacggccggaggcccatcttccacacgcctcccctcagcggcatctacgcctccgagggctggttcatgaagctcctcaaggagagccgccggcacgtcgtcgccgacgcgggcaaggcgcacctcttctaccttccctacagctctcagcagctgaggctcacgctctacgaggccggctcccacaacctcaggccgctggccgcgtacctgagaaacttcgtcagaggcctcgccagcaagtacccgttctggaaccgcacgagaggagccgaccatttccttgtcgcctgccatgattggggaccttacacgacgaccgcgcacagggacctccgcaagaacgccatcaaggcgctgtgcaacgccgatagctcggagggcatctttacccccgggaaggacgtctccctgcccgaaacaaccatccggacccccaggcggccgctccggtacgtcggcggcctgccggtgtcccgccggagcatcctagccttcttcgccggcaacgtgcacggcagggtccggccagtgctcctcaggcactggggcaacgggcaggacgacgacatgcgggtgtacagcctgctgcccagcagggtgtcacgccggatgaactacatccagcacatgaagaacagccgcttctgcctctgccccatggggtacgaggtgaacagcccccgcatcgtcgaggcgctctactacgagtgcgtgcccgtgatcatcgccgacaacttcgtgctgcccttcagcgaggtgctggactggagcgccttctcggtg

SEQ ID NO: 28342 - DNA, 717 bp, Zea mays
  Peptide Sequence Number=SeqID_70121
atggcacaagtgcatggcattcggggtagatgccgacaaccaccgtcaagctatgtcttcgattatcgtcatggcagaacgagccactgcttgaccttcgaatctgaaggtacctcgaagtctgaacctcgtactgattcaatggctggtcccaaaactaggttcaaagtaagggttctgagggtgctgctatacactgaccttaagagatactcaagcgatggcaaggtgccaccgggcgtggggacaacagacgtgaagctacggaacacctctcgtcatcagcacactgggaacaagatacagagatggccccacctatgggttcgccgcctcacccgaggtggccccaggggtcactgttggtacctcgagactagggtacccactcctattggatcaaggcccgtccaacgaggtcgttggcctcatgagggggtcagcttccacgtagggctcactggatccccaattatagggctccggagccgccacgtgcccacctaccctttgcccacacgcgaacaagatcggacagaggacaagaccgaacggggtcaacttcaagaaggggagcaaggttggacgatgtcaagacctaaaacaataccttatgtagacaccaacaattttgagtcaaggacaactcaaaaccaagaaggggagaatgatgagtacatggacatcaactatgtggtcaaggccaatcaatcatag

SEQ ID NO: 28343 - DNA, 339 bp, Zea mays
  Peptide Sequence Number=SeqID_70122
atggcggcgccggcgcggcgcaggtcctgcatctcctccggtggagccggagcgcctccttccgctgctgcttcgcctcttctccgccctccgccgcccgctgcgaggccggcgcaggggtttcggccaggccaggccttgatgctgtggaaatgcctgtacgggaacaacgtttgggctcatttttacgacgagctggctggtttaaacaaggatttcaggaagatgataactgagcatgctgatctcaaggcattaattgtgaaggacattcatcggatagaacccgtaaggatgttacagatactggtttctattgaagatggttcagtgatttaa

SEQ ID NO: 28344 - DNA, 1338 bp, Zea mays
  Peptide Sequence Number=SeqID_70123
atggcctccacaccgcggacgcccgcgccagacaggtcgccgccgccgccgctcgtcacacacaccatgccgtccacgccgcgaacgccggtgtcggacaggtcgccgccgcccgtcacgcacaccatgccgtcgacaccgcgaacgccggcgccggacaggtcgccgccgcccgtgcccactcctcccccgcccctggagacgcctccgccgccgtctccctcgtcacagccgggcgacgagtaccacacgccgccgccgtctctggccgacgggtcgccgcgggaggaggccagcttccccagcgacggggcccccaagagcccgcagctctcgcccatgcgcctcgccgcgccacgcctcctgccgccgcccagcccacccacccccaccgcgcagaacgggcaaggagaagaagggggcgcgaaggccgcggcgcgcgagccgctccgcctggcgacgggcctcgcccggtcgccgtcttcgcagaggtcgctcgccaccgccaccaactccctttctccgtcgccctcgccgacgcctccgtcgccgctgactcccgcgcccgtggtcgacaccagcagcaacaacaataataacaggagcggccagagcacgcccaagcgcgcagagacgaaggtgccgctgccgctgccgtcgccggccgccacggctgcggtcgcggttcgcttcgacccagtcgaggaggccgtcacgtcgccgctgcacctcggcaaggcgcgcctcgaccagcagcaggagcagcacgcggcggcggcggagaacgcgggatcatccgtgccccccgatgtggcggccgtggccgcggtcggcgagcggagggagctgtcggtgacgctgcgcctggccacggcggtgctcagcctcgcggccttctcggtcattgccagcgcccggacgtccggatgggccggcgactactacgcccaccacctgcagtacaggtacgccgtcgcagtgaacgtgatcgtctgcgcctactcgatcgcgcaatcgttcggcgaaatccgccgcctgatctcacccaggtttatattccggagcatgtcaagctactactgcagcctgttcctggaccaggcaagtgcagcgcatctatatattccccaccgaaactgctcgtgtcatgctctggcgtacctcctcatgtcggcgtcgtcggcggccgcgtcgcgcaacgacctgtgggtgtccaggttcggcacggacgccttcaacaggaagatcaccagcgccctgtggctgtccttcattgcgttcctgatgctcgctctgaacgcgctcatctccacggctaatctcttcagcatggtctga

SEQ ID NO: 28345 - DNA, 264 bp, Zea mays
  Peptide Sequence Number=SeqID_70124
atgggtcaaccatttcacaatatcgacaatgtaataaaagcctcagcaataatggttcatgagcaaggccattttagccctcgcaaggttactgtctccacaagtggttttgtccctcagttaggaacccaattgcttgctgccgccagtcttaatgcaaggacagatgaggttagaaactggataatgactataaacagaaaggagaaccttaacttgcttcttggcactttaagagtggatgatgccaaaagtcttttgtag

SEQ ID NO: 28346 - DNA, 564 bp, Zea mays
  Peptide Sequence Number=SeqID_70125
atggggaaaatactgttggtggggcagcgtgaaggggtgtcttggccgccttcagggcaagggaattttggggatttagcccgtgccgatggccgccgcagtgccgcacagccgccactcccgtcttggtcttgcggccagtcgccctcgggcctcgaccatcagcccctcgcccgctcgccgagacaccgagtcggcatcgaccgtcgtcgcgtctccgaggtccagcgcctagtggcccagctccaagcctccagccatcggcgcccgccctcctccgccgagacgccgagtgccgagcgcccgagcaccccggtccccagcgcccaacaagctagcaggctgcagaaactgaaggaaaaggcggcattcaggaacccggatgagttctattttaaaatgatcaacagtaggactgttggtggaattcatagacctaaagcgttcaaagtgaaaaagaaaatcgaaaagctaagctcaacacttcatgaacttgataacaagcctcaaaacaagcatgcttattttgctgaagacaggaaaattgcacgcgcggtgttctag

SEQ ID NO: 28347 - DNA, 243 bp, Zea mays
  Peptide Sequence Number=SeqID_70126
atgaaccaaagaagagcttcagttgaatgtgagcatggcgaaggtgcatgccgaagccgtcaactttggcgccaaagggattcagcaatagagcaaggggacacacttgtaatttcaaagttggtacctctgcaaacttcaatcgaaaacaagtaccaacaaggcccgaacctaaggggttccattgatgttcatattgcactccctagagaagatcttggggataacagtggatatggctga

SEQ ID NO: 28348 - DNA, 2145 bp, Zea mays
  Peptide Sequence Number=SeqID_70127
atgaaggagtccgaccagctcgtgacttctttcatcacacccttcggcatgtactgctatgtcaccatgtcgttcggcttgaggaatgcaggcgtgacgtaccagcggtgcatgaaccatgtgttcggtgaacacattggccggccggtcgaggcctacgtcgatgacatcgtagtcaagacgaggaaagcctccgacctcctttccgaccttgaagtgacattccgatgtctcaaggcgaaaggcgtgaagcttaatcccgagaagtgtgtctttggggttccccgaggcatgctcttggggttcatcgtctccgagcggggcatcgaagccaacccggagaagatcgtggccatcaccagcatggggcccatcaaggacttgaagggcatacagagagtcacgggatgccttgcggctctgagccgcttcatctcacgcctcggtgaaagaggcctgcctctgtaccgcctcttaaggaaggccgagtgtttcacttggacccctgaggccgaggaagccctcgggaacctgaaggcgctcctcacgaacgcgcccatcttggtgccccccgctgccggagaagccctcttgatctacatcgccgcgaccactcaggtggttagcgccgcgatcgtggttgagagacgagaagaagggcatgcattgcccgtccagaggccagtctacttcatcagcgaggtactgtccgagaccaagattcgctacccacaagttcagaagctgctgtatgtggtgatcctgacgcggcggaagttgcgacactacttcgagtctcatccggtaactgtggtgtcatccttccccctgggggagatcatccagtgccgagaggcctcgggtagaatcgcaaagtgggcggtggaaattatgggcgaaacgatctcgttcgcccctcggaaggccatcaagtcccaggtcttggcggacttcgtggctgagtgggtcgacacccagctcccaacagttccgattcaaccggaactctggaccatgttcttcgacgggtcgctgatgaagacaggagccggcgcaggcctactcttcatctcgcccctcgggaagcacctacgctacgtgctacgcctccacttcccggtgcccaacgatgtggctgagtacgaggctctggtcaacgggttgcgcatcaccatcgagctaggggtccgacgcctcgacgctcgcggtgactcgcaactcgtcatcgaccaaggcatgaagaactcccactgccgcgacccgaagatggaagcctactgcgatgtggttcggcgcctggaagacaagttctatgggctcgagctcaaccacattgctcgacgctacaacgagactgtggacgagctggctaaaatagcctcggggcaaacaacggttcccccggacgtcttctcccgagacctgcatcaaccctccgtcaagatcgacgacacgtctgagcccgaggcaccctcggcccagcccgagaaggcacccgggggctacacacacctgttggtcgccatcaacaaattctccaagtggatcgaggtccgacccctaaacagcatcaggtccaaacaggcggttccgttcttcaccaacatcatccatcgctttggagtcccgaactccatcatcaccgacaacggcacccagttcaccgacagaaagttcctggacttctgcgatgatcaccacatccgggtggactgggccgccgtggctcaccccatgacgaatgggcaagtagagcgtgccaacggcatgattctacaaggactcaagcctcggatctacaacgacctcaacaagttcggcaagcgatggataaaggaactcccctcggtggtctggagtctgaggacaacgccgagccgagccacgggcttcacgccgttctttctagtctatggggccgaggccatcttgcccacagacttagaatatggttccccgaggacgagggcctacgccgaccaaagcaaccaagctagtcgagaagactcgctggaccagctggaagaggctcgggacatggccttactacactcggcgcggtaccagcagtacctgcgacgctaccacgcccgaggggttcggtcccgagacctccaggtgggcgacctggtgcttcggctgtga

SEQ ID NO: 28349 - DNA, 892 bp, Zea mays
  Peptide Sequence Number=SeqID_70128
gctcttcctaaattttcgtgatgttcggaacatagttgttccgaaaatcggcgccgcactgccgttctctgtttcttattcctcgcggcagttccctcagcctcccctccacgcgcccctggtcctcccatggccggcgcttggctcccagctcgccgcgctcatctctctctcgcggagctccctagcgagcgcccctattcggaccgcgcccagcgccgcgcgcatgctcccaagctgcgccgccctgcttctctccctgctgcgcgcgctcgagcgccctgcgctctgctcgcctcggtcccttgctcgttctatggtgcgcagccgcgtcctcgagctcggcttcgagctccatctcccagcgtcgcggcttcttttccctcgagttctccctgccatggcgcgcttcgacctctgttcctccggcgccgtggaatccctgcgcgcgcgaagcttcctgctcaacggcgctcctccctgcgcccagccgagccccttcatagcgcccagccgctctcctttctcctccgcgccgtgctcctctgctccagcccaccgagcagctcgcccgagctccttccctgcttccatggccgctgcgcacttgcccctgctcggctccctttcctgcacatacccagccatggtctccagctcgccggacgcggaccgctgtccatgtcgtgctccctgcgctctcggtcctgccatctccatggcactcggccgcgtcttcctcagccatagcgagttcctggctgccacggttgtccagtggttggccggcgccgtatctgctcctctcggcctgcttatgcttgtgcttgtgtccaagctcgtctggccacggtctcgtcaaactgtgaaactccctcgttgcgcgctctag

SEQ ID NO: 28350 - DNA, 129 bp, Zea mays
  Peptide Sequence Number=SeqID_70129
atgcatatccttgagagtcttttactttgtcgggtgaggaagcaaccagcttttgttgcttctgttctaaggtggtatcaaaagaagaaaactaggagtaaagctgcgcaaggaatggatcctccatag

SEQ ID NO: 28351 - DNA, 429 bp, Zea mays
  Peptide Sequence Number=SeqID_70130
atgacgaaggcgaatgcttgccgaaggttgtggaaatccttagaggaaaggaggattactaattgtgttgatctattgttgttctttccagaatttcgacaggtaatattaagatacatttcagacataaacaaaatgacatacaattcacaatacattggtaccttcggcttgctcgaaggcagagacgtgaatacaattcagattcaacgtgaacagtacgggggtactgttcatctatttataggcaattgtacagcttcgtacgatattacattcttaccctcaaagattgcatacaagcttgctgattctgtaactgcgatcgcttttgagcttcggctttttgtttcaatcaacgctgatgttggtcacttgttctcaaatgctatgaataaagaacaaggcaacacaatcgttaaggactaa

SEQ ID NO: 28352 - DNA, 291 bp, Zea mays
  Peptide Sequence Number=SeqID_70131
atggggctcggtgtatgcggctcgctctgcctaggtggtgacgaggatgatggttatgactatggtaatgctagtccactacagccaaatgggacaattgctgagtatgttgatgtgtactcacccttgctttacacaccaaacccccaggttgtccacgttgcaaccactgctcaggagaagatgaagccatggaggaagacttccaggagttccaagagtacgacgagttttaggcatgggttagcggctacccccagtcggctgcctatgaaggccgcgtgtatctaa

SEQ ID NO: 28353 - DNA, 168 bp, Zea mays
  Peptide Sequence Number=SeqID_70132
atggtcttcagcgatgctgcacctcacctgcgatgtcatgcacaacaagacgaagtgtcgtcgctgctcctattcgatatcgttgtcgtcctggtgctctgcttggagattcgatacggggctcccatcctgctctaccgtgcccatgaccccctaggccatctctag

SEQ ID NO: 28354 - DNA, 396 bp, Zea mays
  Peptide Sequence Number=SeqID_70133
atggcgatggggcggccaagcagggaactagagggggaagtcacgggcgctcaccagggggcaaccggtagggcgctggggagccgagctgagggaggagcagctgggcgcgccatgggaggagaagtgaaagctccagcgaatcaagcagaagaaagggcagggagtggagggcgcgaccagaacggaagtagggaagagctccgcgtgccggaggagcgtgcgaccatggatgagcagtgcaggggctgtggacgcgcgcgcaagggagctcgacgggagggcggctggggcaggggcatccccagcgagctcgccatgggagaactgagcgagctggagagagccgcaacgctgtggagaagaagaagcttggagaggtcacagatattttag

SEQ ID NO: 28355 - DNA, 479 bp, Zea mays
  Peptide Sequence Number=SeqID_70134
atggccacgcctacaccagatcccaagcgtccatcaacggatctacgaacagattttaatgttgccaagagcgctacactctacgacaatgatggtgaaccgaggggtaggattctcaccaaaggtaatggcgtgggcgcctcggtccacgctgctaggcgggtcacggcggagcgcgtcgacggcaagcaattgcctgcacccggcttgatcccccagcttggaggaaccgcgcccacacctccccgagtcctggcgaagcaccctgatccggaattggggtccccgattgcaacccgaggccgatacggcgacaggttcacgattccgcggagcgacgggagctggagcatgggtgggctgcgcggtgagaagctctggtgggccagaaaggagtaccgcggcccatttaggtaccctaagacatttcttcagctgagatacatggaagacatcatgaacatccgcaaggtgatccg

SEQ ID NO: 28356 - DNA, 811 bp, Zea mays
  Peptide Sequence Number=SeqID_70135
atgcgcctccacgccggcgcacgcctcgcgctcctgctcgcccgccgctccctctcctcctccccccgtatcccgcgggtgcacacagggaccaggccggtggcggcaagggactactacgatgtgctcggcgtcagcaagagcgccagccaggcggagatcaaaaaggcctattatgggactctaaaggatgaacaaaaaagatcattatatgatcaggttggccctgatcagtatgagaaaactgcttctggcggaggcggaactggcttcgagggtggttttggaaatccatttgaggatatttttggtggtggcggtggcggtggtggaatgaatgatttctttaggaacatttttggggatagggactttagaggacgagatgttaaggttgcactcgaactatcatttatggaagcagttcaagggtgcagcaaaacggtcaccttccaaacgtctgtaacatgtgaaatctgtgatattcatgcaaaccgggcccttcaggatgcaatcaacctgcacaaaatgtggtggttctgggaaaactgtgaaggtttggataatgaggataccataaaggtggttcgatcaggtggagaagacccagatggccgtccaggtgatctttatgttcgtgaggatcctgttttccgaagagagaaaggtgatattcatgttgatgctgtcctgaatgtgactcaggcaattttgggagggacagttcaagtcccaactctcagtggagacgttgttctaaaggtcaagcccggtactcaacctggtcagaaggtagttctgagaggaaaag

SEQ ID NO: 28357 - DNA, 555 bp, Zea mays
  Peptide Sequence Number=SeqID_70136
atgcccttggcggcgccgacattccaatgcagcgactactgcacaaagctgctcgtcgtctatagcgtgatggaaggatacgtgatgcgatgtggtggcgctggaacagaggcacgaccggcaggagcaagtgccacgccgacgttggatgaagcgagcaagcgtggcccacgcgacctgctgatggcggcgaaggggatggcggcaggagcaggctacagcgacagcaacggcaagaatgtaatgcccttggcggcgccgacattccaatgcagcgactactacacggagctgttcgtcgtctatagcgcgacagaaggatacgcgatgcgatgtggtggcgctggaacagaggcacgaccggcaggagcaagtgccacaccgacgtttggacagagcgagcaagcgtggcccggcgacctgctgatggcggcgaaggggatggcggcaggagcaggtgtgggaacggaggcacggacagcaggagcaaatggcacgcctacgtccaaacgaaccgtgcgagcacgacccgacaacctgctaagaaaatggtag

SEQ ID NO: 28358 - DNA, 545 bp, Zea mays
  Peptide Sequence Number=SeqID_70137
ccaaagtccggcctcgggcgccataggaagctctgcctcgcccgaccccagggctcggcccccgtctcggcctcggacgatggactccgcctcgcccgaccccagggctcggactcagcctcagctccggaagacgacgaactccgcctcgcccgaccccagggctcggactcagcctcggctctggaagacgatgaactccgcctcgcccgagcccagggcttggactcagccttggcctcggacgacggtctccgcctcgcccgacccggggctcggactcgacctcgacctcggaagacagactcgacctcgacctcggaggagcctccgcctcgcccgacccagggctcggaccgaccacgtcacaggggggccatcattaccctacccctagctagctcaggctacggggaacaagaccggcgtcccatctggctcgccccgggacccccccaggtcgaaacgccgacaggtagagatgtcaatggtacccggtacccgccaaccgacaacccgtggggaattctcctattaggatacgg

SEQ ID NO: 28359 - DNA, 213 bp, Zea mays
  Peptide Sequence Number=SeqID_70138
atgacgaaggatgaattaaataacgttggattacaaatgtaccttcaacttgaaggagatgaaagtacaagcgtgacgcaaaagcgaatgccaaatcagcgtgaacagtacggggctaaaggtgagcaagacatcaaaatcatcccagagtgctacaggagggaggtcctagaggtactacatattttggatggatgcagctacaagaaataa

SEQ ID NO: 28360 - DNA, 201 bp, Zea mays
  Peptide Sequence Number=SeqID_70139
atgggtagcaccgaccaacgtgcctacgagctgtgcaaacacagggcgagggtattttatgagggaataggaaaaactgcaagtgacactgagggtggacgagcagcgttatgtgatagaccaaaccgagagatgaagccgcctagtagtggaaagacatggagaaggcctaaggctgatttcgtcctaagcagggcctag

SEQ ID NO: 28361 - DNA, 153 bp, Zea mays
  Peptide Sequence Number=SeqID_70140
atgaagctagttgtttacgcgcatcttttccttccacatcgtgatccgggtcgcggagattttgaagatcttagacatcgccagtgtctacttaaggatgatggcaaaggtgtcggagagtcacttgatgaagtggtctgcgtatgtttgtag

SEQ ID NO: 28362 - DNA, 930 bp, Zea mays
  Peptide Sequence Number=SeqID_70141
atgaagaacagccgggatggaaaaagttacagtaccaatttggcatttacgcctccagaatacatgaggactggacgtattactcctgaaagtgtcatatacagctttggaaccttgctgattgatgttcttagtgggaagcatattcctccgagccatgcccttgacctgattcgggaccgaaacttcaatatgctcttagactcatgtttagagggtcaattttcaaatgaggaaggaacagaaatggtccgattagcttcaagatgccttcactatgaaccccgtgagcgacctaatgtcagatcacttgtgcaagtattgactcctctacagagggatgtcgagaggccgagaagacctctgaacctctgtcccaccctgacacaggggcactgttgccctactccatcttatgtgctcatgggcattccgcgtggtggggcatcttctaccgaaccactgaatctttcccctcttgccgaagcttgttccagaaaggatctgacagcaatacatgaaattctagaaaagacaggctacaaggatgatgagggaactgcaaatgagctctcttttcagatgtggacgaatcagatgcaagatacgttgaactcaaaaaagaagggtgacaatgcttttcgacagaaggattttactgctgccattgattgctattcccagtttattgaagttggtacaatggtttccccaaccatttatgctcgacgttgcctgtcatatctgatgaatggcatgccacaggaggcattgaatgatgcaatgaatgctttggtaatatctcccacatggtcaacagcattctatcttcaggcagcagcactattatcacaaggcatggagaatgaagcacaagaagcactcaaggatggttgtaacttagagcaaagtagcagcggtggacattga

SEQ ID NO: 28363 - DNA, 111 bp, Zea mays
  Peptide Sequence Number=SeqID_70142
atggcgtgtcgtcttatccacctggtatacggtccctatagcgactctaacattgagatcccccataccgacgcttggcgagtccacatggcagagtcaaaggtcatgtga

SEQ ID NO: 28364 - DNA, 504 bp, Zea mays
  Peptide Sequence Number=SeqID_70143
atggggaaggtggattattccgccgtcgtgctgatgcgccccgagcagggctatgtgtacctgggttgtcgggatttcgaaccacctgacccttggttctggaagacacagctgctaaggagaggagagggctaccgccccatcaccgacgtctgtggtggggcggtagggaccgaggagccagaggccgagacctaccgccgtgcccatcttagggttgagcctggcaccatcgtggctaaggcggttcccgtgcgcaccatgtcaccgatggaggccatcaccgtctcctacagggtggaggcggagctaggtgatactgtgccgagcgcagtgtcgcctatggtctccgacctcttgcgcgctatccccgattctccggaagtcgcgccgtgctcgagggcgggggtcgtcgaggagctacgacttaatgtcctcgtcctctttccaggcctcgagaaggatctagaggctgcagcccagacctctcggaccctgtcctag

SEQ ID NO: 28365 - DNA, 261 bp, Zea mays
  Peptide Sequence Number=SeqID_70144
atggacgacagtaccggaggcttctgtgtctgccatgctcacgctctgaactggatctatggaggcaacattggaggagctgatccaccgccgatcaacgacgggaaccattctcctcaacacacgcaggaagatcgagaaggaggaggagacggaccttcactgcaagacgtcgtcgcaatgatggataggaacaacaacgacgacacggattggtattctagggacgtaggagttgatcctaagcaccaaagattctaa

SEQ ID NO: 28366 - DNA, 233 bp, Zea mays
  Peptide Sequence Number=SeqID_70145
cacgtacatggttcgcagagggtttaccttccaaaaccgggtgtgacactgcaccaccttttgctcctactggtgctgattgcggtgctgcactagctccggttcctaccggtgatggctgggatcaaactgtggccctgttcctgtggatggcactgttcctccagtggtcgctcctactggttgggaatcagcagcctagcccactgcccactacccaaggttgggagtag

SEQ ID NO: 28367 - DNA, 1326 bp, Zea mays
  Peptide Sequence Number=SeqID_70146
atgcacgttaatgtcctcaatacgctcttcaccagtctgaattctcctgggcagctcagagcttggcaggcgaatggcggtgatccttgtggccagtcatggcagggcattacttgctcaggatcaggggtcactaaaatcctattaccaaacttgtcactcaccggaaatctggcctacaacatgaataacttgggttcattagttgagcttgacttgagccaaaataaccttggtggtggaggccaaatacagtacaatcttcccaatgtgaagcttgagaaactcaatcttgcaggaaatcaatttggtggaaatttaccctactcaatttcgacgatgcctaatcttaagtatttaaaccttaatcataaccaactacaaggaaacatcactgatgtattttccaacctttatagtttgtcagagctggatctctcctttaattctcttactggtgatctaccacaaagtttcactggattgtcaagcctgaaaagaatgtatttgcagaacaaccaatttactggttatatcaatgtcttagccaaccttccccttgaaacccttaccatatctcataacctgcttgtctctaggaatgttggaaacaaccatttcactggttggattcccagtcagcttaagaagataaacaatctacagaccgacggaaattcttggagcacaggaccagcgccacctccacctccatatacagcgcctcctcctccaaaccattggaatggcgcgggtcagaatgatgatggttcatcaagttctggtggaagacctgggataggtggtggaggtgtagcaggaatcattatatcattgctgattgttggatcagttgttgcattttttctaatcaaaagaagaaaacacaaagctattatggaagaacaatttgaacagcatcagccgttcacttccttcccttcaaatgaagttaacgacatgaagcctatctatgagtccaccacagtagacatagagtctttggcttcacctgcttcgattaatctgaaaccacccccgaagatagaacagaacaaatcatttgatgatgatgatgatttttcaaacaagactgctgcaaatagaagtaatataacacctatgaaggcaactgtttattcagttgcagatctacagatggcaacagatagcttcagcttcgataaccttgttggagagggtacttttggacgtgtttacagggcacagttcaatggtggaaaggggtgcttacatatatatagacttaggaaccataactctaaatggaccagcagtggcggagctaaaggggcatacccttaa

SEQ ID NO: 28368 - DNA, 846 bp, Zea mays
  Peptide Sequence Number=SeqID_70147
atggtggacgcgtggtggtctctgttgggcgcggcgttcccggcgctggtggcgggtcagttcatccgcaccaagcgccgccgcgacgaggagcagcgcctcaaggcggcgcgcgggcgggagaagagctccgacgaggtcttcgtctgcgagcgcgtgtgcacttccaagcgtatgctcaacaaggtaggggccttctccaaggaccccataccggagacctgcgtcaccgtgtgcggcgtctctgaactcgacgcctgcgccgacgcctgcgcgcgcaccgtctgcgtcaaccagcaccaggaatttgatgctcgtgtaaaaggttcacacttagccaataaaaagatcaagtattgggttcaacaaaaaagcaaagggataactgaaggctcctctggtctggcgcaccggactgtccggtgtacaccggacagtgtccggtgcaccagaggactcaaactcaaactcgtcaccttcgggaaaatccagaggcactccgctataattcaccggactgtccggtgtacaccggacagtgtccggtgctccaaggaagagcggcctcaggaactcgccagcttcgggaattcgcaacggctagtccgctataattcaccggacatgtccggtgcacaccggactgtccggtgcgacatcgaggcaacggctacttcggcgccaacggctacctgcagcgcattaaatgcgcgccagcgcgcagaagtcaggcacgcccatgctggcgcaccgaacactctacagtacatgttcggtgcgccaccggacatccaggcgggcccagaagacagtgctccaacggtcgaatcccaacggcttcggtga

SEQ ID NO: 28369 - DNA, 1608 bp, Zea mays
  Peptide Sequence Number=SeqID_70148
atggcaagccgcatcgcatcgttcccctccttcctcgcctttgtcgtcgtcaccgtcgccacgttattcccctcctcttcctcccagcagcagcccgccgccgccgtgccacagcccagagggttctatataagctgcgggtcggacaaggacgtgcaggtagggagcatcaagtgggccaaggatgagggcttcaccgccgtcgggaacgcctccgccatcaacaagccccacctcctccccctgctcgccgcgctgcgctacttcccggacgccaccgcgcggaagtactgctaccagttgcccgtcgtcaagggcacgcgctaccttgtccgcaccacctacttctacggcggcttcgacgggggcaaggaaccgcccgtgttcgaccagatcgtggacggcaccctgtggagcgccgtcaacaccacggacaactaccggcgcggcatgtccacctacttcgagatggtggcgcaggggcagggcaagaccatgagcgtgtgcctagcgcgccgccccgacacggcgtccagccccgtcatctccgcgctcgaggtcatcgacctcgccgactccatgtacaacaccacggacttcagcaggttcaccatgaccaccgtggtgcgcagccgcttcggcagcaagggcgatatcgtcagctatccagatgacccgtacaaccggtactgggcgccgttcgcggacgccaaccccatggtggagagccactcctccatctcgcccgacgacttctggaaccagccgccggccaaggcgctcaaggccggaatcacaaccagccggggcaagaagctcgccgtgcagtggccgaccacggagctccccgcggcgacctactacgtggcgctctacttccaggacccgcgcacggcgagccccttcagctggcgcgtcttcgacgtcgcggtcaacggcaacgacttcttccgggggctcaacgcctccgcggccggcgtcatggtctactccagcatgatgcagctgtccgggaagacggagatcttgctcacgcccaacgagacgtcccccgtcggcccgctcatcaacgccggagagatctaccagatcgtcccgctcggcggcaggaccgccacaagagacgtggttgcaatggaagacctggcaagcagcctcaagaacctgcctccggactgggctggagacccttgtctaccacagcaacattcctggactggggttgaatgctcccagggatcacccgtgcgcgtcttgtcactctatctcagtggtaacaatctctcaggccccatacctgacttgagcagcatgcacgccctgactgcagtgcgccttgatagcaatcagttcagtggaacgatcaacccatcaatggaaaaactagccaatctcaaggagctacacctgaacaacaacaatctcacgggcaaaataccagatggtctgaaaaacaaagctggacttgatttgaggtgcaaagaacaactgaggggaacaaatttgaatgaggctgacaaggaggaaatcatgagtacgatgctgcacccatgcacacagttcaatgatgaagggagaggactgaagacttcaaaatttgtacgatga

SEQ ID NO: 28370 - DNA, 513 bp, Zea mays
  Peptide Sequence Number=SeqID_70149
atggaccccgacatagctgtcgagaggctcatatcccaggaaaatgaagttctggcaattgatcacataattaattcagctgccaaatcaaactacatgtctgctgggcagatatctgttcctattgtcttgaggggtccaaatggtgctgctgctggagttggtgcccaacactcacaggtttttgcacaaacttgcctctatatggttgctctgttgctgctgctggagttggtgcccaacactcacagatctagtactgttttccctagcaaatgctttagccccctttacttgtttgggccttcatgggctgttagatggggtacatatggatcagtgaatcttgttttgtcttatgatggcaaacctacatctcagtttgttgtggtggagccctccaaaaagggaagatatttgacaaagaagcgcttgaagcttcaaaggaagcgtataaagaatgagaggaaagaggcaaataaaaatgatcagcaaagtattaggcgtaagtga

SEQ ID NO: 28371 - DNA, 312 bp, Zea mays
  Peptide Sequence Number=SeqID_70150
atggcgctcggcgctcaccaggcccttctccacatccgcctctgccgcgcgctgactgcggtgatgtggtcgccatgggcacccgcgcctccgtctctgcctgcttgcagtgaggccccacactgccgcgcactctcactgaagcagctcgtgtgcgacggctcctcactcacggtcgcgctgccgtggctccccgttgccacgctgggcgaggccaaacctgacgacatcctcgccatcgacccccggtgtagtagcgccgtcgtggaggtcaccaggaccggtgggaatttcttgccaatttaccagtag

SEQ ID NO: 28372 - DNA, 986 bp, Zea mays
  Peptide Sequence Number=SeqID_70151
tggctaacgtgatcttcctggaatcgccggcgggtgttgggttctcctactccaacacatcctccgactacgacctcagcggagaccagagggcagcggacgacgcgtacctgttcctggtgaactggctggagcgcttcccggagtacaagagccggccgttctacatctccggggagagctacgccggccattacgtgcccgagctcgccgccaccatcctcatccagaattcctacgacgacgccaagacggccataataaacctgcggggcatcttggttgggaacccactcctggactggcgcatgaacttcaagggccaggttgactactactggagccacgggttgatgtcggacgaggtgttcgccaacataaccaggcactgcgacgacgactcggactcggacgtgggcgcgtgcgatggcgccgtgcaggcggtggacgcggggcagcttgattactacaacatatacgctcccgtctgtgttgacgcggccaacggcgggtcgtactaccccaccagtgcacagttacctgatccgtgcagctaccactacacctattcctacctcaatgacccggcagtgcaggttgctctccacgctagaccaacgacctggtcaggatgcgcaaacctgaactggacggattcaccggcttccatggtgccaacgatctcatggctagtcgagaacaagttaccggtctggatttttagtggggattttgataccgtgtgcccactacccgcgacgaggtactccatccgcgatcttaagcttcgcatcacaactccatggcgtccgtggacagtaaacatggaggttggagggtatgttcaacaatacaagggagggttcacatttgcctctgtgagaggagctggtcacatggttccatcctcccagcccgagagagcactaatattattggattcctttctcaaaggggtgctcccaccgtacgtaccggagcagtag

SEQ ID NO: 28373 - DNA, 3276 bp, Zea mays
  Peptide Sequence Number=SeqID_70152
atgccgccacggtcccgcgccgcggcaccgaggctcgcgtttctcgtgccgctcgccttcgccttcgccttgctgctggtgccgccgtgccactgcgtcaacgagcagggccaggcgctgctgcgatggaaggacaccctgcggccggcgggcggcgcgctggcgtcgtggcgcgccggggacgcgagtccgtgccggtggaccggcgtgtcgtgcaacgcgcgcggcgacgtcgtcgggctgagcatcacctcggtcgatctgcagggccctctcccggccaacctgcagccgcttgcagcgtcgctgaagacgctggagctctctggcacgaacctcaccggcgcgatacccaaggagatcggcgagtacggcgagctgaccaccctcgaccttagcaagaaccagctcaccggcgcggtccccgccgagctgtgccggctggccaagcttgagtcgctcgcgctcaactccaactccctgcgtggagccatcccggacgacatcggcaacctcaccagcctgacgtatctgacgctctacgacaatgagctcagtgggccgatcccgcccagcatcggcaacctgaagaagctgcaggtgctccgcgccggcgggaaccaggggatgaagggtcccctgccgcaggagatcggcggatgcactgacctcaccatgctcgggctcgcggagaccggcgtctcagggagcctcccggagacgatcgggcagctcaagaagatccagaccattgccatctacaccactctgctctccggccggatcccggagtccatcggcaactgcacccagctcaccagcctgtacctgtaccagaattctctctccgggccgatacctccgcagctcggctacctcaagaagctccagactctgcttctatggcagaaccagctcgtcggcgcaattcccccggaactcggacagtgcaaggagctcacgctcattgacctgtcgctgaattcgcttaccgggagcatcccggcgagtttgggcgggctacctaatctccagcagctgcagctgagcacgaaccagctcactggcaccataccgccggagctctccaactgcacgtcgctgacggacatcgaggtcgacaacaacttgctgtccggggcgatcagcatcgacttcccgagactgcgcaacctcaccctgttctacgcgtggaagaaccggctcactggcggcgtgccgacgagcctcgccgaggccccgagcttgcaggcggttgacctgtcatacaacaacctcaccggtcccatccccaaggcgctgttcgggctccagaacttgaccaagctgctgcttctcaacaacgagctgaccgggctcataccgtcggagatcggtaactgcaccaacctgtacagactccggctcaacggcaacaggctgtccggcgcgattcccgccgagatcggcaacctcaagaacctaaacttcctcgacatgagtgagaaccacctcgtcggcccggtgcccgcggccatatcggggtgcgccagcctcgagttcctcgacctgcactccaatgctctgtccggcgcattgccggacacgttgccgcgcagtctccagctcattgacgtctccgacaaccagctcaccgggccgttgagctccagcatcgggtcattgccggagctgacgaagctgtacatgggaaacaaccggctgaccggtggcatcccgcccgagctcggttcgtgtgagaagctccagctgctggacctcggcggcaacgcgttctccggtggcatcccgtcggagctcgggatgctaccgtcattggagatctcgcttaacctcagctgcaaccggctttcaggggagataccgtcgcagttcgccggccttgacaagctcggcagcctcgacctgtcgcacaacgagctctccgggagccttgagccgctcgcggcgctgcagaacctcgtcacgttgaacatatcctacaataccttctctggggagctcccgaacactcccttcttccagaagctgcccctcagcgacctagccggcaaccgccatctcgtcgtcagcgacggctccgacgagtcctcccggcgtggcgtcatctcgtcattcaagatagccatatccatcctcgccgcagccagcgcgctgctcctggttgccgccgcctatatgctcgcccgcacgcaccgccgcggcggcggccgcatcatccacggcgagggctcgtgggaggtgacactgtaccagaagctcgacatcaccatggacgacgtgctccgagggctgacgtccgcgaacatgatcggcaccggcagctcaggggccgtgtacaaggtggacacccccaacggctacaccctcgccgtgaagaagatgtggtcgtcggacgaggtgacgtcggcggcgttccgcagcgagatcgcggcgctgggctccatccgccaccgcaacatcgtgcgcctcctcgggtgggccgcgaacggcggcacgaggctgctcttctacagctacctccccaacggcagcctgagcggcctcctgcacggcggccgcgccgccaagggctcgcccgcggacgagtggggcgcgcgctacgagatcgcgctcggcgtcgcccacgccgtggcgtacctgcaccacgactgcgtgccggccatcctgcacggcgacgtcaagtccatgaacgtgctgctcggcgcgtcctacgagccgtacctcgctgacttcggcctcgcccgcgtcctggccgccgcgagctccatgctcgacaccggcaagcagccccgcatcgccggctcgtacggctacatggcaccagagtacgcgtcgatgcagcggatcagcgagaagagcgacgtgtacagcttcggcgtcgtgttgctggagatcttgacggggcggcacccgctggacccgacgctgtccggcggcgcgcacctggtgcagtggctgcgcgagcacgtgcaggcgaagcgtgacgcgtccgagctactggacgcgcggctccgggccagggcgggcgaggcggacgtgcacgagatgcggcaggtgctgtccgtggccacgctgtgcgtgtcgcgccgcgcggacgaccggcccgccatgaaggacgtggtggcgctgctcaaggagatccggcgccccgcggcggtggacgacgcgaagcagcggccacccacggccgccgcgccggtgtcgccggtgagcgcgcactcgaggggccaatcgtcgagctgctccttcgccgtgtcggagtactctgcctga

SEQ ID NO: 28374 - DNA, 340 bp, Zea mays
  Peptide Sequence Number=SeqID_70153
atggggatctcgagcatgccggagccgcgggacagcctgctggggtacctggtgtacaacgcggtggtgtcgatcgcggcgctggcggggctggtgcgggcggcgctggtgttcctggacctgcaggccgcgcagctgcccgggggcgcgggcgcgggcgcggacgacgaccgtctcgcggcgtcgggcccgggcctgggcctggcggagcggttcctgagggccttccggccggcgctgtacggggtgctggtgtccacggcgtgcggcgcggcggaggcggccgcgggcgacgacgactgcagcgtgtgcctgggccgggttcgaggcggaggccgtg

SEQ ID NO: 28375 - DNA, 718 bp, Zea mays
  Peptide Sequence Number=SeqID_70154
gaagaagggcatcggggggtcactggacaaggcgaaggtcaaagggaagatagtcgtgtgcgtccgtgggaagaacgcacgagtggagaaaggtgaggcggttcaccgggctggcggagctggcatggtgctggcgaacgatgaggtagcgggaacgaggctaatgcccgagcccctttttgatggcccatttgctcattttggcttaatgttggcatccggctacatcaccgtcccgtacaccgcgctggacgcgaagcctgcgccgttcatggccgccttctcgtcgcagggccccaacaccgtcacgcctgagatcctcaagcctgatatcaccgcgccaggggtcagtatcctggcggcgttcaccggggaggcgggaccgaccgggctcgccttcgacgaccgccgtgtcctctttaacgccgagtccggcacctccatgtcgtgcccgcacgtcgccggcatcgccggactcctcaaggccgtccatcctgactggagccctgccgcgatcaagtcggcgatcatgacaaccgccagggtgcaggacaacatgaggaagccgatgagcaactcgtccttcctccgcgcgacgccgttcggctacggcgcggggcacgtgcagcccaaccgcgccgccgacccgggccttgtctacgacgccaacaccacggactacctcagcttcctctgcgcgctgggctacaactcctcg

SEQ ID NO: 28376 - DNA, 867 bp, Zea mays
  Peptide Sequence Number=SeqID_70155
atgctcacggtgaagtacatcgacccgtcgtacatggtccgcgccgtggcggccgacaacctgtgctgcacgctgctggcgcactcggcgatcgacggcgccatggcggggtacacggggtacgtgccggggctcatcaacggcaactacggctacatccccgtggtggaggtcgccgaggcgcgcaaccccgtcgacacaagtgggcttgggtcaggacaagactcacccccatgccgtgtcatgccattgccacccatccttgggagctgcagctgcctatataataccaacagtgccgaagcaagaacatccaccctgcaccaccaccaccgggcaccagcgtcgtcgaagctgctcactccatcgccgctccaagcttcgtacgtcgtctacctcggcggccacgcgcacggccgcgcgggcgcggcgctggcgtcctgcagggcgcgcgccaggagctcgcaccgcgcgctcctgggctccgtcctgcgcagcgaggcccgggccagggacgccatcttctactcgtacacccgctacatcaacggcttcgccgcgacgctggaggaggacgaggcggcggaggtctcgaggcatccgcgcgtcgtgtcggtgttcccgaaccgaggccacccgctgcacacaacgcgatcgtgggagttccttgggatggaggaggaaggtggccgggtgaggcccggctccatctgggccaaggcgaggttcggcgagggcgtcgtcatcggcaacctcgacaccggtgtgtggccggaggccggcagcttcagggacgacggcatgggcccggcgccgcccgggtggcggggaatctgccaggaccagcaggcctctgacgacgcgcag

SEQ ID NO: 28377 - DNA, 358 bp, Zea mays
  Peptide Sequence Number=SeqID_70156
cggacatgtccggtgtacatcggactgtgtggcgcccaacccatcggatacttcggcgccaacggccaccagcagcgtattgaatgcgcgccagcgcgcgcagaagtcaggcacgcccatactggcgcaccggacactctacagtacatgtccagtgcgccactggacatctaggcgggcccaggagacagagctccaacggtcggaacccaacgactttggtgacgtggctggggcaccgaacatgtccggtatgctacaggatatggttgatggtgtgacttggccttccaccctgccaccgggttggacggttgagtgggatgctgcctcgacaggagaggaccaggaggagtag

SEQ ID NO: 28378 - DNA, 360 bp, Zea mays
  Peptide Sequence Number=SeqID_70157
atggccgacctcgtcgtgcccctgatcttggtgatgccgttgcggcttcgcctcgggtatttagacctgggcaacccgcgtcgtgcgccaaacctaaccctcaacctctctggcgccagagaaaacccggttctggtagaaggggttctgccgcaagctcagagttgcgcagccgccgttgaatcgggactcgattattattatgtgatttgtttacatgtttggtgtgatgttaatttctcctttatactgtgcttttttgtattgtggcgagtagaggagccaatggctgaagatcctggtgcccagcagatagaagtagttgagcaggagctcattgaaggcaagttgtgccattga

SEQ ID NO: 28379 - DNA, 312 bp, Zea mays
  Peptide Sequence Number=SeqID_70158
atggagcgccacgcccagaagcaggcgccgctagtcctcgcgctgtcctgcctcctcctcctcgcccccgccctcgtctccgccgtccccactccaagaagcctgcgcctggggggccagcagcagcacccgccggctctgaagctcacttcttctcaggtgggtgactttgtgttaattggggcacagcaggaggcggcgatcgcggcggcgatgaacatgggcaggccgacggcgagggtggccgtggaggtgaacgactaccaaccgtccggccccaacaaccgccacgacccacccaagggcccctga

SEQ ID NO: 28380 - DNA, 312 bp, Zea mays
  Peptide Sequence Number=SeqID_70159
atggagcagcatccgtttttgcgtggaggaaatgcccaaggagattctgggctggttctctcaactgacgctaaaccaaggctgaaatggacacctgagttacatcagcgatttgtagatgcagtcaatcaattaggtggagaagagaaagctactccaaaaacagtcatgaggctcatgggaattccaggactcaccttgtaccatttgaaaagccatctccagaaatacaggctcagcaagaacctccaagctcaagcaaatgccagtacatcgaagaatggattcccggaacaaccgcagcaacaatga

SEQ ID NO: 28381 - DNA, 372 bp, Zea mays
  Peptide Sequence Number=SeqID_70160
atgacgagctaccagaataggctcggctcggctcgggtacggctcgcgagccggctcgagctggctcgcgagcctgtccgcccatcacaatataacagcggccaggcagagggaggcggccaggcgggtggcgggtggcggcaagcggcgtgccggcgtggccgcgtgcgcgtccgcacgtggcggggcgccgtgtacagaacgccggaccgcacgggcgcacggcagcagcagcacgaccgcacagcgggcctagcgacagtcgcggcgcggactcgcggtggccaagcacgagcgtcggtcgctgtcgagcacgagcgcctgccgggctgccgaggagcagtggagcaccgccgtggagctgaggactga

SEQ ID NO: 28382 - DNA, 328 bp, Zea mays
  Peptide Sequence Number=SeqID_70161
atggagaagaagaaaaagtataggaaagcgaagggcgaagcacacatcaacaaggagtgggactcagactgctcttcatctgactccaatgatgagggacttgctgcttcagccttcgataagtcatcgcttttcccaaacgagcatcacacatgcctcatggctaaggagaagaaggtttatgcatccgggggcacaagctggattattgacaacagatgcacaaaccacatgacgggggagaataagatgttcacctgctacgtcaagaacaaggattcccacgacacgatcatatttggagatgagaatcaaggcaaggtcaaag

SEQ ID NO: 28383 - DNA, 204 bp, Zea mays
  Peptide Sequence Number=SeqID_70162
atggtggcttcattccgggctcgctcgattcgggagagccgccttcttggtttggagaggaaggagttcatccctgcgaaggaggtctcaggtggagattggaaggcgaggggctcaagcctcagctcccgctcctcctgtcctctgtccggctacccgtctgccatcggcctgtgggggatggatatcccccggatctgctaa

SEQ ID NO: 28384 - DNA, 363 bp, Zea mays
  Peptide Sequence Number=SeqID_70163
atggcccacggtggcgacgagccacccggcggcgccgtgcgtgccactggccgcgggcgtggcggctggggccgtgcgtgctggcgtcggacgccgctggtaccgagcgcgccggtgcggcagccccggtgccatggcctacgcaaggccgtggagtacgacatccagctcgagacggaggagtgcgtgcggaagcataatgtgctcaaggaaagtaataaaggtggaggtagatataatgtcataagtggattatgcagacttcagcttaaatttgtgaagaagctgaaaataagctgtgccaaacagggccaatgttctactgattcaatatgttggttttgccgtgttactaggaaatga

SEQ ID NO: 28385 - DNA, 303 bp, Zea mays
  Peptide Sequence Number=SeqID_70164
atggtcagggcactgcggctgcgggtggatgactacggggagaaggagctgagaccggtgggtccacacgtcagggagtgcaagtgcgccaaggaatatgggccgctcggtgatgaaggtggtgccgacgacatgacgaagatctcccgctcgttgctcgtcgtcatcgcgctggtcctcctcggccctcacctcccgccatccgaggcgctgacgcccaagcagggcgtcaggtccaagacctttcctgtccccgcccatccttgcttcgcccggggggacgtggcccaacagttcgactaa

SEQ ID NO: 28386 - DNA, 1224 bp, Zea mays
  Peptide Sequence Number=SeqID_70165
atgggccgacacccagctcccgacggctccgatccaaccggagctctagaccatgttttcgatgggtcgctgatgaagacgggggctggcgcaggcctcctcttcgtctcgcccctcggaaagcacctacgctacgtgctatgcctccacttcctggcgtccaacaatgtggtggagtacgaggctctggtaaacgggttgcgaatcgccatcgagctaggggtccgacgcctcgatgctcgcggtgactcgcagctcatcatcgaccaagtcatgaagaactcccactgccgcgacccgaagatggaagcctactgcgatgaggtttggcgcctggaagacaagttctacgggctcgagctcaaccacatcgcccgacgctacaacgagactgcggatgagctagctaaaatagcctcgggacgaacaacagttcccccggacgtattctcccgagacctgcatcaaccctccgtcaagaccgaggacacgcccgagcccgaggcaccttcggctccgcccgaggcaccttcggctgagtccgagaaggcacccgggggctacacgcacctgttggtcgccatcgacaaattctccaagtggatcgaggttcgacccctaaacagcatcaggtccaaacaggcggtggcgttcttcaccaacatcatccatcgctttggggtcccgaactccatcatcaccgacaacggcacccagttcaccggcagaaagttcctagacttctgcgaggatcaccacatccgggtggactgggctgccgtggctcaccccatgacgaatgggcaagtggagcaagccaacggcatgatcctgcaaggactcaagcctcggatctacaatgacctcaacaagttcggcaagtggtggatgaaggaactcccctcggtggtctggaacttggaatacggttccccgagggcgagggcctacaccgaccaaagcaaccgagccaatcgagaagactcactggaccagctggaggaggctcgggacatgaccttactacactcggcgcggtaccagcagtccctgcgacgctaccacgtccgaggggttaggtcccgagacctccaggtgggcgacctggtgcttcggctgcaacaagacgcccgagggcggcacaaactcacgcctccctgggaagggccgttcgtcatcgccaaggtcctgaagcccggaacgtacaagctggccaacagctaa

SEQ ID NO: 28387 - DNA, 1731 bp, Zea mays
  Peptide Sequence Number=SeqID_70166
atgccgtttggtttgaggaatgcgggtgcaacgtaccagcggtgcatgaaccatgtgttcggcgaacacatcggccgaacggtcgaggcctacgtcgatgacatcgtagtcaagacgaggaaagcctccgacctcctttccgaccttgaagtgacattccgatgtctcaaggcgaaaggtgtcaagctcaatcccgaaaagtgtgtcttcggggtgccccgaggcatgctcttggggttcatcgtctccgagcggggcatcgaagccaacccggagaagatcgcagccatcaccagcatggggcccatccaggacttgaaaggcgtacagagggtcatgggatgtctcgcggctctgagccgcttcatctcacgcctcggcgaaagaggtctacccctgtaccgcctcttaaggaaggccgagcgcttcacttggacccctgaggccgaggaagccctcgggaacctgaaggcgctcctcacaaaggcgcctatcttggtgcccccagctgccggagaagccctcttgatctacgtcgccgcgaccacccaggtggttagcgccgcgattgtggtcgagaggcaagaagaggggcatgcattgcccgttcagaggccagtctacttcgtcagcgaggtactgtctgaaaccaaaatccgctacccacaagttcagaagctgctgtacgcggtgatcctgacacggcggaagttgcgacactacttcgagtctcatccggtaactgtggtgtcatccttccccctggggaagatcatccattgccgagaggcctcgggtaggattgcaaagtgggcggtggaaatcatgggcgaaacaatctcgttcgcccctcggaaggccatcaaatcccaggtcttggcggacttcgtggctgaatgggtcgacacccagctaccaacagctccgatccaaccggagctctggaccatgttcttcgatgggtcgttgatgaagacaggagccggcgcaggcctactcttcatctcgcccctcgggaagcacctacgctacgtgctacgcctccacttcccggcgtccaacaatgtagctgagtacgaggctctggtcaacgggttgcggattgccatcgagctaggggtccgacgcctcgacgctcgtggtgactcgcagctcgtcatcgaccaagtcatgaagaactcccactaccgcgacccgaagatggaggcctactgcgatgaggttcggcgcctggaagacaagttctacgggctcgagctcaaccgcatcgctcggcgctacaacgagactgcggacgagctggctaaaatagcctcggggcgaacaacggttcccccggacgtcttctcccgagatctgcatcaaccctccgtcaagatcgacgacacgcccgagcctgaggcaccctcggcccagcccgaggtaccctcggcacagtccgaggcaccctcggctcggcccgaggcaccctcggttcggcccgagaaggcacccgggggcaacacgcacctgttggtcgccatcgacaaattttccaagtggatcgaggtccgacccctgaacagcatcaggtccgagcaggcggtggtgttcttcaccaacatcatccatcgtttcggggtcccaaactccattaccgacaacggcacccagttcaccggcagaaagttcctggacttctgcgaggatcaccacatccgggtgaactgggcgccgtggctcatcccatga

SEQ ID NO: 28388 - DNA, 213 bp, Zea mays
  Peptide Sequence Number=SeqID_70167
atggagatgactatatatagactcatggcctcatgggccacatgtgcttatagtataagggccttcatacacttcgggcgtgatcagttcacttctctgccagcctggctcggatatgggaaccaagccgcctggagccaggctaaggaggtgcaacacgagtttgattggtttgttgtatctgttaagcgagaaataacatcattggcataa

SEQ ID NO: 28389 - DNA, 159 bp, Zea mays
  Peptide Sequence Number=SeqID_70168
atggggtgcacttcgccgatgccggggaggaacaaggagcttcacagccacgacatcaccgtgaacgtcagccgtcgtgggcaacagtctcgggcatgggagagaggaagggaaatagggagccggcttcgcgaggacgccaggctaaaggaaagataa

SEQ ID NO: 28390 - DNA, 210 bp, Zea mays
  Peptide Sequence Number=SeqID_70169
atggagatgagcttgagggagaggacgaacgccgacctgggcgagctccatggaacctacggacggacgagaagggcccccgagctcgtcggcgaggcggcgaacagggagcttacagaggcgttcgtcggcttgacggggtcgagcaggcagatgcagcggagctactgggaggtgagcaacggtggcgtgcgcgtggagggaggctag

SEQ ID NO: 28391 - DNA, 411 bp, Zea mays
  Peptide Sequence Number=SeqID_70170
atggtgaggtcgcggccgagccgggcaaggagcacgcggccagcaccaagggcgagcgccaaggagagcagtgatgcgacggtggcgcagataagccacagcaggagcggggattcggacggtacggtacgcaggggccatagccgagcagaggggcgccactacgcgcagaggagctggtcggactcggcggcccgatggagcagcagcggccagccatggccggacccgagggggccagcccccaagccgagcggcgcgtcgagggtagaacggcaccagggagatggatggttggcgctggagattgacggcggccatggagggactcggcagggagaaacagagcagaggctaggggaggaccgcgacgctgggaagaaggctaagccggagctccgcagcgtgtag

SEQ ID NO: 28392 - DNA, 1005 bp, Zea mays
  Peptide Sequence Number=SeqID_70171
atggagaggtttattattaaagaaccacaagtttctagtcctaataatcaggctattgatcaagacaccgcccaagttgtaaagaatgcccaaagggcgatatacaaggaatgctggaacatgatagattcaccaattggtcacttcctgcttaaggacggagacaacacgaccagtttcttggaggtaaacgatacaacagggcaaggactttttgatgcgctggacaaagaactaaaacatcttggtcttgatatagataatgtcagaggacaaggctatgataatgggtcaaatatgaaaggaaaacatcaagggcgcatctacacaattttcgcaaattctacaaagaaatggcagatcctaaaagagaacatagaaggattgattctcaaaccagtgtcagctactcgttgggagagtcgtgttggcagtgttaaaacaattaggtttgagtatgcaaatattcgagaagctctacttcaagtatctgatagtgataatgatccattaacaagcagtgaggccaaatctttagtaaccaatgaacttggtgagtttgaatttatactggcaatagtcatttggtatgaaatattatatcatgttaattatgtaagtaaagacttgcaagcaaagggcatgcttattgatgcagctattcaaaaagtacagggcctgatttctttcttcaatcgttatagagaatcaggtttcttaaacaccttggaagaagccaaaggtattgcacgtgaaatggaaattgatacatcatttcacaaaaagaggcaaattaaaagaaagagacattttgatgagaatccagatgacacaaatgtcggcacacaatctgaggaggaatcatttagaataaactatttcatacctattgttgatcaagctatttcctcacaaggagatttgaacaatatgaaggttatcagaaaatatttggtttcttatttacttctaatacattacgatcattggataatgacaacttga

SEQ ID NO: 28393 - DNA, 411 bp, Zea mays
  Peptide Sequence Number=SeqID_70172
atggccgagagggaaaatccgagcgcaggggcgagctcggggaatgggcggccgagctggggattgggcagagcgcggacgggcgagcctgccagggagcagcgatggccaacagagaagctcgcgcacgcggaagctccaccggctgggagggcgcggcagccatggcaaacaggagcagtgtcgcggtccgcgtgccggccagggagaatcgacggcggccgtgggagagggcagaggaactcgaccggcgaagttggccggagggcgagctcggctgcgcgcagggaggagcaccggcgagcagggagcgggaggaacgccggtgagctcgtggcaccagggagcagggcacgacgctggagggcgagcagggcgcggctgccaggacgagcgcagggaggaagataa

SEQ ID NO: 28394 - DNA, 204 bp, Zea mays
  Peptide Sequence Number=SeqID_70173
atggacgcgtgctggcgcttggggtcgggccgggcgagcatagcagggagccaaggcgaggtcgtggtcatggtgaactggtacagggcggagaatgacgaggaggcagcggtgatctttgagggaaacacgcaggggatccccatcgacgacgactcactggaccgacgggcaatggttccaatcagcagcgccgacacttga

SEQ ID NO: 28395 - DNA, 296 bp, Zea mays
  Peptide Sequence Number=SeqID_70174
agaaggagaccaccaacagtagccccttcgcggcgctagataacgagctcgatccacggaatgcacaaaggcttctgaatgccgaagagggagaagggtctattcccgagaaggatgacgttattgccgaagctgaacatactattgctgaagctgctagtgatgacgaagaggatgatggcatcttgagtccgagcaagccttgccatattgaatttggaatatccaatgtgaaggcagaaaatttagttttaatgaaaaagcttggatattttgggaaaatgatgatgagttga

SEQ ID NO: 28396 - DNA, 492 bp, Zea mays
  Peptide Sequence Number=SeqID_70175
atggctgatctcgggccccttcctgcagccagccgtcgtttcctctcgctgctcttggagtcggtcgtccccgccgtgagccccttcttggtcgcctctctgtttttccccatccagtcgttgttcttcagcccgaggtgccctcagtccaacgcgccgttgtccactgcaagctcgccggctcgcccttctttaaggccctcgcaagcagccgctgctcctcctctctacaccctgccgccactgaagccctggtggccacgcgccctagcatccgctcgcccttgcgcgctcctcccccatggcaagctcgctctccccaacttgacgcctgcgatagccataattggtttctgcgtttccccgaccttcctcctagccctggtgctcgccccccatctccttcaccacgctgctccctgcctccttgctggtcggccatacgccctgctcccctatgtcgaggacgagcagcacaccggatctatgtag

SEQ ID NO: 28397 - DNA, 456 bp, Zea mays
  Peptide Sequence Number=SeqID_70176
atgggagaggtcggttggggcttaagggctgaaaccagggaatctggtgtgttgctcgtcctcgacatagaggagcaggggatatggccgaccagcaaggagacagggagcagcatggggagagcgagctcgtcatgggggaggagcgcgcttaggggcgagcagattctagggcgcgtggccaccagggctttagcggtggcaaggcgtatagaggaggagcagcggctgctggcgagggtcttaaataggggcgagccggcgagcttgcagtggacaacaactcgttggactgagggcgtcgcgatgacctgggctgaagaacgacgaccagatggggaaaaacagagaggcgaccaagaaggggctcacgacggggatgaccggctccaagagcagcgacgggaaacgacgaccggctgcaggaaggggccagagatctgccatggaaagtag

SEQ ID NO: 28398 - DNA, 174 bp, Zea mays
  Peptide Sequence Number=SeqID_70177
atgaatgtcgacgaagatgaaggcacgaaggagaggttcgacgaaggaggagcaggggaactccgaggtgtgctcgccagcggctggaacgtcctggaaagctcctacggcggcaacagcaagggtcgacgcggctacgctgcgtacttctttttaaaatggattgatatttaa

SEQ ID NO: 28399 - DNA, 315 bp, Zea mays
  Peptide Sequence Number=SeqID_70178
atggccgaccctcgcgcgcccgggccgcccacctggccacgccccgcgcgccgcctccctggccgcgctccccgcgccgcccctggccgtgctgtcctcggccgcacgctcgtccccgataacggtcagttggtgaagaccgaaggagttgcaggtgaagaccctgagcagcagtcggttggtgaaggtggtgacaaggatgatggttatgattatgcttatggtaatggttgtccacgttgcaaccactactcaggtgaagacgaagtcgtggaggaggacttccaggagttccaagagtacgatgagttctag

SEQ ID NO: 28400 - DNA, 583 bp, Zea mays
  Peptide Sequence Number=SeqID_70179
aactagcgcctcatcccctttcccccctgatacgacgcttcctctcccccttctgggcagcgacgccgtggggagccgccgccgccgcacgctccgctcctccctgcacctcatccccttcccctgctccccctcacacgacgtgcggcggtgcgaggaccggccctggcaccagcgcccccggtgcctggagcagtgcagggaggaggagcgggagaagcggcaagagcggagcaggcacgaggccgacgaccgcagcggcgagggctcgtcggaggatgagcgcgagcaggagaaggaggagaagcagaaggaccggcggccgtacgagcagtccggctgctgcaagccgccgacggcgtgccagtacagcggaggcatgccagtcggggcgcaggacgaggactgctaccgggccagcgtgatggagcaggtgcgccaggactggcacaagatctttgtgctcgacgtcgtcgtgctcgccgctctcgtctgcatctgctcatgcgggtgctgtgccttcaggaacgctcgccgctcccggtcccagtacccatatggggtggcgatgatggggtggtag

SEQ ID NO: 28401 - DNA, 270 bp, Zea mays
  Peptide Sequence Number=SeqID_70180
atgtcccttccctcgccacctcctcgagtcgactgcggaagccacaacaccagggcggctgagctcctcacctccattgaaattcggggcgcttgtgccggtttggagtcctctggtggccgtgggaggatagcccagtgcttgcgacgtggatcatgtctggaaacaccctggtgcgctggtggaactccgccgattcctgatcggggttggtcatcggaggccacgaccgccgtcctcgctgctggccacaacctcgccgcaccggcg

SEQ ID NO: 28402 - DNA, 156 bp, Zea mays
  Peptide Sequence Number=SeqID_70181
atggccatgagaagaaccaatgggatgacacgtctttcgacgatggaggtcaccatagacagctggtcacactttgcactagctccacatgctacatatggaatagctcagtgcaccatcaagcataatttttggatgcaggagacttacaggtag

SEQ ID NO: 28403 - DNA, 438 bp, Zea mays
  Peptide Sequence Number=SeqID_70182
atgaaccttgtcaagaaaagtggaaatggattgaagaagtttttactgagtctagccaagacttgcatcggcctgtggtgcaccagactatctggtgtgtaccggacagtgtccggtgcacaggctggttcagcagcgaagacgctgctctcgggaatcggcgagggcgacatggctaaaaatcaccggactgtccggtggtgcaccggactgtccggtgagccatcagcgcccgcgctcaacactcggcgacgaactcgtcgctctcggaaattcaccgagggcgccgtggctgaaattcaccggactgtccgatgtgcactggactgtctgggtgagaggctccaacttatggagattcctcacaaacgggaaacatctctaaagaagaaaaccgtggtattcaagtggatcattggatcacttgaaaggggttga

SEQ ID NO: 28404 - DNA, 471 bp, Zea mays
  Peptide Sequence Number=SeqID_70183
atggtggtcatggcctgtggcctgttcctattcctattcggccatggtgtcatggccgtgccaaacaatgccaaggcaggcatgccagcggcagcggcagtagtccagtcagtcgcagtcgcaggccaggccatccaggacggtcaaaatgagatgctagcgcagcgcgccgtgccaccacagtccacagcggccagcgttgggggcacggtggccgcccccgggcctccactccttttctcggagcagtggagtacagtggcggcagcaccggcagccaccatgcattgccacggcccgcccacggatgctgtgatttgtcacccaactgcacgctcctcctaccgggtagtgtacctagctgtaactgctaaagcgggcgcggcagcccccaccaccgctgtggagagagaatcacaaggtagtgggaggaatcacaagggattgattgagagggccaagatgcaataa

SEQ ID NO: 28405 - DNA, 408 bp, Zea mays
  Peptide Sequence Number=SeqID_70184
atggctcaactgggtgcagtcggagcgctgcgcgccggtaattgctcgctgagttactacgccgccgcgggaccgccctcctccgtggacaacaccaaccaggcctctgtcaccggtgagttccgctgcactgtgtccgccacgacgtacccttccattttatgcacggtagaactcggattagggcctgaggcctcggttgggcgtcaccccggcgaagcgccaccatggggtggcatcgccgctgtaccggccgggcgagggagaggagatggcctggggctgtgcgatcaggatctagcgatcgcgattagcgcgcgctggccgtcgatcagtgatagggcggacgccgtgcgacccgcgcgatttaaaaccctggccatcggatcgagatccgaggacctataa

SEQ ID NO: 28406 - DNA, 231 bp, Zea mays
  Peptide Sequence Number=SeqID_70185
atggggagtagctctctctgggcagaaagggaatcacagcttgtgggtaaagtgcacaacctctgcagagtgtttgaaactgatatatcagccgcgctcacggtggcaatgagattgatggttcttggttttgactctggtaatggttgtcagcattgcaacccctgctcagaagaagatgaagctgtggaaggagaccatcaggagttccaagattgtgatgagttctag

SEQ ID NO: 28407 - DNA, 237 bp, Zea mays
  Peptide Sequence Number=SeqID_70186
atggccgacaccccctgtgaccttatctcaatggacatatcgaagctattgggcttcatcttggtcgcagatggggcctctcttttttgcaggcacgcaacaatcctccttgaagagctcaccatggtaggagttccttcgacaaccacatttcacgccggggccgccaactccagcggacttaagccaccgacccatgtgcctctgactttggcctctatggctctcctaccctag

SEQ ID NO: 28408 - DNA, 513 bp, Zea mays
  Peptide Sequence Number=SeqID_70187
atgccccaccgcgtcgctgccctcctcctcctcccgctcgctgccgcgtcggaggcgccgggaccggcggctgaggccgcgctgctggagcggcacgaggtgcagctcgccaagctagaggaggtggcggagtcgcttgcgaggtccgtccacgcgctcgagtccgcgcttgccagatccgcggacccggatccctcgcagcctgttgccctggcggcggccgtcggggaccgtcccacggccgcgtcttcgtcttctccgcccgcgctgctcgagctcgaggcgagtgccgcgtcaccgcgctcctcgtctacctttcgccgcggagccgccaacatttgtcgtctcttgcgctgctcgccactgcggccgcctctccagccgccgctccccagcagctcccgcctcctcccctctctctccagccgccgatgccctgcagccgccgctgctccctccccggcgcccgcgcccatcgccccgcgacgctccgcgtcctcccaccgcggctga

SEQ ID NO: 28409 - DNA, 591 bp, Zea mays
  Peptide Sequence Number=SeqID_70188
atgggggaccttccccggcctttccgtgttgatcgcctgggccagtgccgcggcaaaacgagagttgagggcgccgccgacgcttcccttgtcctcctgagccaaattcgtaccttgctgggggcatcgccgagctgcgagaagggcgccagtggtcgagtggtgctgatacaacaactgtgggtggcggaatttctcgctggtgacgtcaagccaccgtgggtccgcttaacatcgcgggtagagcttcttcgcgggaaatttgtggtaagaactcctcctatgacttcgagttggctcccgcttcgtgtagatgcgtcgggaggaatcttttggggctggcatcactgcttggctgggttcggcaatgtcgccgccagtatggctctaggcgctgccgtgctgcaccgttggggaaggggtcgtagatcggtgatcgtgcgagcaggagtcgagcgtagatatgttaaatttgggtcgtggatctctaatcctaggggccctattacataccgtttcgtgaacatggagcgaccacccgggaaaacagtgctaccacaagggtggtatgggacgcccttggctgactaa

SEQ ID NO: 28410 - DNA, 168 bp, Zea mays
  Peptide Sequence Number=SeqID_70189
atgtcattgactcatgtggacccacatacgctgccaggtgggccagtgccgtctgtgaccgctccacctgatcgtcgacaatggcgtgattgcggcacggacgtgcgagctgttgctcaaatcccggagcactatgcgcctatttgtggcaccagagttctcgggtga

SEQ ID NO: 28411 - DNA, 252 bp, Zea mays
  Peptide Sequence Number=SeqID_70190
atgaggggatggaggattggtgatgttacgaattctcgaccatatttctgccttggagatctctgggaggctttcaatgagtggagcttttacggggctggtgttccccttgttataagtggaagtgaatctgtgattcagtattatgtgccatacctttctgctatacagctgtatgcagaccctttgaagcttccatcgaggatcagatacaattttctgttcttcaatagccttgctttagaaatgtga

SEQ ID NO: 28412 - DNA, 531 bp, Zea mays
  Peptide Sequence Number=SeqID_70191
atggcgggcccgtccggcgcatcctcctcctcgcgcggcggcggcggcggcggcgttgaccgcttctacagcccgccccacgtgcgccgccagcagcaggaggagcagctgcagcggctcaagggcctggcccaggggcagcgcacgtcgtccccggcggcggggacgctcacgcccagggccgccaggcagaagacgccaccggctgagacgcccgccccggttaacgagtccgagaggcgggtcgacgcgtcctccaagccgcccgtgtccgcgacggcctccaccgccaaggcggctgcgacggctgatgcggtcacgacctcgccgccggcgcctgcggtgctggatgaggtcgggaatctcgataggttccttatctccaccacgccatctgtgcccgtgcactacctgcccaaggtttttgcctcctcagattttttgttcctctttcggcggaatttaagttgcgtgcttgccttcgcctgtacccgttgccttgcacgcgcgtgcgtgcgatgcttggtttga

SEQ ID NO: 28413 - DNA, 126 bp, Zea mays
  Peptide Sequence Number=SeqID_70192
atggggctgttggatggctgctcaatgctccggattgaaatcggtgaagaggattatcaaacaccggttgagatggtttggacatgtctaacggagatctctagaggcactagattgttgatttag

SEQ ID NO: 28414 - DNA, 327 bp, Zea mays
  Peptide Sequence Number=SeqID_70193
atgagggtgccccgtgctcctgcacagtcactgtttggcatttctgcagctggagggcgtgagagctgcgagtcccacactcccagtacacaaagcacccagcactcatcggagcacccagaacacaaacccctctggagcagcgtgctccctccaaacaacaggtaccccaggaatagaggacagagcctgagccccagccttgcctctatgacccctgctccaagcagcctggtgctgctgccattgtgcaacgtctgtgcaatgctttacgcaatttgcgccgaagtagagaaaccagcatcagcaaagcactgtcagtggtaa

SEQ ID NO: 28415 - DNA, 513 bp, Zea mays
  Peptide Sequence Number=SeqID_70194
atgcaggcggcatgcaaccgcgccaagtggacgcaccccttcgactccaacgcgcccagcatggaggcccaggcccactcgtcatgcaaccggcgcgccggttgctacgtgcgagcgactgcaccacccctcgcgccactaccgcgcctcctcgactgcggaaccagtaccgcgactcaaggcaaacctgcgcatgacccaacagtgccagccaggcgcgtcggtcacgggtcagtcagctgcgggagaaggcgcgacggtcgatacggccaaaaatgggccggcaggaccgggaaagggggataccccgaaagggatccttctccacgaaggaaacgggccccgagcccccctaccgatcagaggttcgaaggctggcccctcggaggggttcaacagccgcctcagagcgctcgggctccgcgcccactactggtcagaggttcgagggccggcccctcggaagggttcaacggctgcctcaggccacttgggctccgcgcccactactga

SEQ ID NO: 28416 - DNA, 1164 bp, Zea mays
  Peptide Sequence Number=SeqID_70195
atgggacggtggtgtccccgatgtcactaccttcctgaaggtgtcgcttttgaaatttgtctcggccacgacgtcgcccttcggttgttgctttcgctcctcggcgtcctatatgcgggtggaggtgcggtcttgcagctgaaatcggagctgctacgtcagggatgtggctcgacaacgatgacgcgtgttaccatgcaagcgctccgaactgctccgccagacatgcaactaaaggacaagtttttggtacagaccacaattgttccttatggtacatctgacgaggaactcgttcctgcctttttctccaaagaaactggcagatacattgaggaaagcaaattgagagttgttcttgttagtgcataccaatcccttgaagagcaaccgactaataaaattcatgacactgagccagttgttgaagttcctgtactgaaagaggtgccaaatatagagaacgaagtgccagatgctgcaaaagaagttcctgcccctctggtacaagctccagcgattgtgactggaataccttcacctgtcgaagagactcctggcctgagagaattccgtgtgccgctgaatgaagcaccagctgtattggcagaatctccttccgctcaaaaagacccttctgttattacagttgaacatgcctctactgttataattgaacattcccctgctatttccattgaatcccctcctttgaaacaaagtgtcacagtttttaaggaatctcctccttcgaaacaaagcattgcagctttcaaggaatatcctcctccttcgaaacaaagcattgcagtttttaaggaatctcctccactggaggaaactagtcctaaagaagctgttgtgctaagtgaccgaggactcttcagtgtgcagaaccatcaattatctcatgtaacagaagatgttcagaatctgaaatcaaagctcaacaatctcgaatcaaaattggaagaggctggaaagatgataataaggctaaaagaagagagcagaagtaccacccaggagcgggataagctacagcaagaaatggtattcctaagaaagaagggaaccccaaggagccaagtgggtttccccttgctgtttgttgtctacgtcgcgcttcttggtaccttactcggttacctgctccgtctatga

SEQ ID NO: 28417 - DNA, 576 bp, Zea mays
  Peptide Sequence Number=SeqID_70196
atgacatcaacacacaaataccggcacgtgaggaagaccgcagacgccgaggagcgaaagcaacaaccgaagggcgacgtcgtggccgagacaaatttcaaaagcgacaccttcaggaaggtagtgacatcggggacaccaccgtcccatgtccgtgaaggaccgggctttcacccaaggaaaccagtgttgaggagagtgacgccctcaacgggtaaagcggcgcccatgggcgtcactgtcgccgaggctttcgtccaagaagcccccagcacaaacgccaggccaaggccccgggacaccacaggctacctccgccatcgtcagtgccctgacatcccgcacaaaccctcccagaagggcatcgacacgccggccggctaccacagcagccgcagagccacgacggacaccaccccctccggtcgggctcacggagccatgcggcgagcgtcccactgccgcaggcccgggtcgctgcacgcctgcaccccacgccgacaacaaggcaatcgtgagcaggcagagcaccgtgcaagaggcccacaaaagcaacgaatcaagcttgattcatag

SEQ ID NO: 28418 - DNA, 186 bp, Zea mays
  Peptide Sequence Number=SeqID_70197
atggcgccatggtattgggcgagggcgtcggtgccgcgcatgcttgagttcgccgagagggcgccaagctcgagcgacgcgagtcgcttccacaagcgcgagatctcccaggcccgcctccagaagtaccatggagtcaccaacttggacatgacctctggtggctcgttcatcgccaccggctaa

SEQ ID NO: 28419 - DNA, 2301 bp, Zea mays
  Peptide Sequence Number=SeqID_70198
atggacgccgaggccggcgtcgccggcgccgaccagcttccgcggaggcagtactacctgaatctactgcttttagcttaccagagctttggtgttgtttacggggacctgagcacatcgcctctctacgtgtataaaagtacgttctctggaaagctcagacactaccaagacgaggagacagtgttcggcgtactttcgctcatcttttggaccttcactctgattcctttgcttaagtatgtcatcatcgtcttgagtgctgatgataacggcgaaggtggaccattcgctctctattcgctcctttgcaggcatgcaaaactcagcttgctgccaaatcaacaagcagctgatgaggagctatcttcatactatagaaatgggttcgcgcctcgcaatggatcttcaccttggtcaagaaggtttctggagaagcacaaaaaaatgaggactctgtttcttctcatagttctctgtggcgctagcatggtgattggtgatggtgtccttaccccagcaatctcagtactctcgtctatgtctggattacacgttcgagctactggtctacatcatagttctgtagttctcctttcatgcattgtgttggttggtctatttgcattgcaacaccgaggtactcagaaggttgcattcatgtttgcaccaattgtcatcatctggctgctttccattggaggaattggtttatacaacattcttcattggaacccaaatgtatatcaagctctctctccatattatatggttaagttctttagaaagacaggcagtgaggcaatgtttgctgaccttggtcactttacgagtgcatctgtcagggtggcttttattaccgtcatatacccatgccttatgctacaatatatgggtcatgctgcatttctgtcgaagaacacatttcacatgccgacaggtttttatgatactatcccagaaccagtgttttggcctgtctttgtggtggccacacttgctgctgttgttggtagccaagctgttatttcagcaacattctccattgtgaaacaatgccatgctttgggatgtttcccgcgagtgaaggttgtccacacatcgaggtggatctatgggcagatatatattccagaaataaattggattcttatggttctttgcgtcgctgtcactattgcatttcgtgatactactcttattggcaatgcctacggtattgcatgcatgactgttatgcttgttactacattcttgatggcattaatagtcatctttgtttggcaaaggaacataatattttccctagttttcctggttttctttggatccattgaagctgtatatctttcgtcatctctcatgaaggttcctcagggaggatgggtgcctcttgtgcttgcattcatattcatgtcagtcatgtacatctggcactatgggtcaaggaggaagtaccagtttgacctacagaacaaagtatcaatgagatccatcctatctctcggtccaagccttggcatagttcgggttcctggtgttggattgatttacacagagctggtcactggtgtaccctccatcttctcccattttgtcacgaatctccctgccttccatgaagttctagtctttctctgtgtgaagtcagtgccagtgccatatgtttcaccagatgagcgataccttgtgggtaggattggacctaaagaatatcggatgtaccgttgcattgttagatatggttacaaagatgtgcagagagatgatgacaattttgagaacatgttagttatgagcatcgcaaagtttattatgatggaagcagaagatgcttcttcagcaagttatgatatcgctaacgaaggaaggatggcggtcataacaaccactgatgcctctggcagcccattggccatgagggatttcgacggcctagctgactccatgtctacgaggagcagtaaatcagaaagccttcgaagtttgcaatcctcctacgagcaagaatccccgagtgtaaaccggcgccgccgtgtccgctttgaggtcccagaggaggatggcatgggtcagcaagtgaaagaagaactcacggcactagttgaagcgaaacatgctgggatcgcatacatcatggggcattcttatatcaaagccaggaggaactcaaatttcctgaagaagtttgctattgatgttggttactctttcctccggaagaactgcagaggcccatcagtcacgctgcacattccacacattagtctgatagaagtcggcatgatctactatgtttag

SEQ ID NO: 28420 - DNA, 2865 bp, Zea mays
  Peptide Sequence Number=SeqID_70199
atggcgagggcgcgcctccctctcctcctcctcctcctcgtggcgttcctcgccggcacaggctccacggcggcccgacacgccgcgcccgcacccgcgtccgcgccccgggcgtcgccgtccatctccgcggcgcccgagtacggggcgccgctcccgcgcctcccgaaccagcaccagcgcccctccgcgcttgcgccgtcgcaggcgctggcgccggacataatgcccgtgctgccgtctccggccgaggacggcgccgcgccgccgcccgacgcggacgagcccaccatcccgtccagccccagcccgcccaacccggacgcgctggagcccgcgtgggcgctggcgccgttcggctccgcgcccgccgtcgccgcgcagtcccccgccgccgcgccggccccggcgtcggcgctcgtgctgctggccgtgccgtggctgctgctggtggtggtgggtgcacggaaaaaggtggtcctcgcgggttggtcggcctcggccgggctggctggctctgcagctcgccttgccgccactactctctgcgtcctcgtgaagaactgctgcttctgctgctacatctcatcagcttttacttctctatatctcctcggagattattatttgggtgattcttgcagagcggcgccgcagccgccgcctaagctcgacgcgccgcggcggtggatgcgacgccacacccccggccttctcgccgccaatctcctccgcgcctcgtcgctcctcagacccccgtccgtcctcgccgcccgcgcggccttgctccaccatgcgccggacgacgcccaccgcctgctcgacgaaacgccgcgcgggagggcggccgccatcgtacgtgccctcacgtccgcaccgtcttcctcctccggtgacacggcctgcatcgcgtgcctccactgcgcggccctcaagtcaggcgccgtgctggacccgccagtgcgcacgtccctgctcgcggcgtacgccagggccggccgcggcgcgggagcgggagccggagcaggcgccgccctggcgctcttccgcgaggccgttgcgcccgacgtgatcctgtggaacgcggccgtcggcgccctgacgacgagcagcccgctccatggcatggcggccaagagttgtctcggcgctcattgtctcggcgcgtggaacgctctcgttgacatgtatgcaaagtgtggtgagtttaggtccgcagaggttgtgtttcatagcatgccgtgcagggacaccacctcatggaactctgtcataagtgggagcatttttaacgggctcgctgaggtgtcagcgtgctacttcagggaaatgagttgctccatcttccagccagatgaggtgagcctctcttctgtcctctcagcctgctctcgtctggatgatctcttctcctttggggagtctgtgcatagctgtgcagtcaaactcggttatgaggacaccgcgtcttgctcagtagcgaattctctcgtgacgttctactctgagtttggaatgccagaggctgcgaagaaggtcttcgccagcaatttgaacaggaatttggtatcatggaatgctatgatcaagggtctagtccagaatgaaagagtaaccgaggcccttgctgttttgaggcaaatgagattggagaaccagccagatgtcgccactttggtgaccatagtttcaggctgtgctgatcaaggcctactttctgaaggggaaacactccatggatacgtaatcagaaaaggacttcttcgtgaggagccttccatgggaaatagcttactcgatctgtatttgaaatgtgacgaaccatctaatgcaggcctgttgtttatgacaatgccaagaagggacttgatatcgtggaacacaatgatttctggttactcaagatatggcccactgagagaagaggctcagttaatgttcaaaggattactttctgaaggttcatcgtgcagcttggccactatgctagctgtcataccatcatgctccattccggaagaacttagctttgggaaagcacttcactctttcagcctgaagtgtggatttacatctagtggggtttcggctgttaatgctttgatacacatgtatatgagctgtggtgatccactggccgccttttcgcttattgaaagaataataccgaataacaaaggctggagagcattgcagttctatcagaagatggaggatttcgaacctaatgaaatatctgttgtcgcatcacttgttgatatgtattgcaagtgtgggagactggacattgctgtcagagtatttgaagcttctgccgaaaaatcgattgccgggtggaactccttgatatcagcttttggattccatggccatgggatgaaatctatagatcttttctggaagatgcatgattctggaatgaaagccacgaaaagcacatttattgctctactgtcagcttgcagtcactctggacttgttgatgaagggtggaagtattattgccttatgtcagaaaagtttgggatcacaccagccccagagcaccatgtctgcattgtagacatgcttgggcgggctggtcggctgcaggaagcgcacaagtttgtggagagcttgccgtctcaacaaacacacggaatttggggcgcactgttaaatgcttgcagtagcaggagtgaactcaagatgggcgaatccatcgcaaaacatttgctacatttggagcctggaaatagcggttattatgtaactgcagcaaacctttatgcatacaaagacatgtggagtggtgtggcccaagttaggagcgttttgcaagataaagggctggtgaagccccatggtcgtagcactgttggttaa

SEQ ID NO: 28421 - DNA, 1176 bp, Zea mays
  Peptide Sequence Number=SeqID_70200
atgacactgccaaccccggtggtagccggcgttgcggctggcgccgccgcgctgctactggccgccgccctcgccgtggcgtggtggtggctcgtgatcgtgaggcggcgccggcgccgtgaccggagctccgacaccggatcctcgtcggaggctcctcctcccacgctggcggagtggggccggtgcggccgcacctcgtcggcgcccgagttccacggcgccaggcagttctcgctggaggagctggcgcacgccaccaacggcttcgccgaggccaacctggtcggcgcgggggcctttggcctggtgtacaagggcctgctgctagacggcaccgtcgtcgccatcaagcgccgcgcgggcgcgccgcgccaggacttcgcaaacgagatcaggaggctgtcagagatctggcaccgcaacgtcgtgacgttgatcggcttctgccaagaaggcggtctacagatgctggtgttcgaatacctgcccaacgccagtgtcagcggccacttgtacgacaccggcaaggagacgatgaccaggctggagttcaagcagaggctgtcaatagccattggagcagctaaaggtctgagtcacctccacagcctggcgccgccgctgatccacagggacttcaagacgagcaacgtgctggtcgacgagaacttcatcgccaaggtgtccgacgccgggatccacaggctgctgcgagggcctgatggtggcgccgtcgccgctctggcgagtcgcggtgtcttccaagacccggaggtacattcatcggcgcaggcgcagctctctgagactgagagcagcgacgtgtacagcttcggggtgttccttctcgagctggtcacaggcagggaggctgcggggctgatgccgccggggtccagcaaggactctctcgctcaatggatggaggcgcgtttcgcctcgaacgagctggtcgacccgagactgggagggagcttcacctcggagggtatggcggaggtggtgggcctggcgtccagctgcctgagcccgtcggcgaggcggcggcccaggatgcggctggtggcggcggagctggaccggatcctggagaaggagatggccctgaccaccgtcatgggcgacggcggcaccgtcatcttcacgctcgggagccagctcttcacgtcctga

SEQ ID NO: 28422 - DNA, 322 bp, Zea mays
  Peptide Sequence Number=SeqID_70201
agttttgtctcttgcccctcaaacactacaggttcatgtttgggatttttcagggcaggaaaacctgatattaatgaatgaatggaatggactacatgactacttccatgcagatcaagcggtagcatcagctgccatatccgatccatctatatgccatcttagaagttttaaagctccttgtttgcatgtaattcaaaatttactattagccattgttcctgaacagcccttgattttatttcttgaatgtacacctgattcgtctaatggaatcatggacaataggttgtgcagctgtgttggttatgagttacaatga

SEQ ID NO: 28423 - DNA, 162 bp, Zea mays
  Peptide Sequence Number=SeqID_70202
atggcgaaggtgaagatcatgcgggttcgtgccaatagactaggagcgatgaaggacgagcgctgggactttaccaagggaccagagtcaccggcaaaaattggattgactcccattcgcgcctctggtcgtctcaccggtccttcattcgttcagtggtga

SEQ ID NO: 28424 - DNA, 183 bp, Zea mays
  Peptide Sequence Number=SeqID_70203
atgggggctgactgggcgtgggagatgtgggccgtgaagcacgtcggcccctccggcattcaggctccctgtctcgcccgatttgtaactgactaccatgctctcgcagggaagccggtccaggctgcgctgctgctcaactacgccccctccgggccatctcggctccttcccgtcgtgtga

SEQ ID NO: 28425 - DNA, 1818 bp, Zea mays
  Peptide Sequence Number=SeqID_70204
atggcacaagggcacatttccctttcagcgctgcacgtcgccgccagaggcgacaggccaatgggtttccgcggtggtttgaggccgcccgtgacgcgcgtctgcttcgtcctcctgtgcctgtgcgcctcgttgtccgaagccaagaggacgccgcagcctgcgcctactacgggcaagaagcagcagccaccggcagcgtcgtcgtcccagcagagcccagcggtctcgtatccggctctccccgtccgggcggtgtgcctcggcggttggctcgtcaccgagggctggattctgccctccctcttcgacggcatccccaacaaagacctcctgctgcagttcaagtcggcgctgcggaagacgtacctgaccgcggacaacggcggcggcggcgccgtcgtggccaaccgcacgcaggcctccgactgggagacgttcaaggtacggtcggacaacgacgctggcctgcgacttgagaattccagttacttaataaacggtggatcgatgcagctgtggaggctgaacgacacgacgttcaacttccgcacgtccggcaaccagttcgtgggcatcggcgccagcgacggcatcatcgtcgcgacggccaccacgccgggcctgccggagacgttccagatagtgcggtgccccttcgacaagaacagggtccggatcaaggcggcgaacggctacttcgtccaggcgatagcgaccggcgaagtgatagcggactacggcgagcccacgcggtggtccgacttcgacgcgtcagtgttcctgatgaccaccgtcgggcagcagctgcaaggggagtaccagctctgcaacggctacggcgccgacaaggccgcgccgctgctgagggagcattggagcacgtacatagtggaggacgacttcaagttctttgcgtcgagtgggctgaccgcagtgaggatccccgtcggatggtggatcgccagcgaccccagcccgcccgctccgtacgtcggaggctccctccaagccctggacaacgccttcagatgggcagagaagcacgagctgggtgtcatcgtcgacctgcacgcagctcccgggtcgcagaacccctgggagcacagctcgtcccgagacggcacgcaggagtggggaaccacggacgccagcatcgcgcagacggtgcaggtcatagatttcctcgcgtccaggtcagaaactaataaacaccacgcccgcattctctctccgaatccacccaacgacagacgatacacgcacgcgcgcaggtacgcgacgagcccgaggctgctggcggtggagctgctgaacgagccgctggcgcctggagcgaccctggacagcctcaccaggtactaccgcgacgggtacgccgccgtccggaagcacgcgccggcggcctacgtggtcatgtccaaccgcctgtcgtcggggaactccacggagctcctctggttcgccggccgtgggttcccgggcgccgtcgtcgacgtgcattactacaccgtcttcaacagcttgttcggtaacttcaccgcgcagcagaacatcgacttcgtccggactaacttctccggcgagctcgccgccgtcaccacccgagatggcccgctcaccttcgtcggcgagtgggttgcggagtggaaggtgccgaacgcgaccaaggaggaataccagaagtacgcagcggcgcagatgaacgtgtatggacaggccacgtttgggtgggcctattggacggccaagaatgccaacaaccattgggatctcgagtggatgattagaaatggatacatctcgttgaaaggctag

SEQ ID NO: 28426 - DNA, 1320 bp, Zea mays
  Peptide Sequence Number=SeqID_70205
atgttcttcgacgggtcgctgatgaagacaggggccggcgcaggcctactcttcatctcgcccctcggaaagcatctacgctacgtactacgcctccacttcccggcgtccaacaatgtggctgagtacgaggctctggtcaacgggttgcggatcgccatcgagctaggggtccgacgcctcgacgctcgcggtgactcgcagctcgtcatcgaccaagtcatgaagaactcccactaccgcgacccgaagatggaggcctactgcgatgaggttcggcgcctggaagacaagttctacgggctcgagctcaaccacatcgcccggcgctacaacgagactgcggacgagctggctaaaatagcctcggggcgaacaacggttcccctggacatcttttcccgagacctgcatcaaccctctgtcaagatcgacgacacgcccgagcccgagaaaccctcggcccagcccgaggtaccctcggctcagtccgaggcaccctcggctcagtccgaggcaccctcggctcagtccgaggcgccctcagctcggcccaaggcaccctcggttcagcccgaggtaccctcggcccccgaggcacctcaagcccttgttggaaacgccttccgacaaggtttctactggccgacggcggtggccgacgccactagaattgtccgcacctgcgaagggtgtcagttctacgcgaggcagacccacctgcccgctcaggctctgcagacgatacccatcacctggccttttgctgtgtggggtctggacctcgtcggccccttgcagaaggcacccaggggctacacgcacctattggtcgccatcgacaaattctccaagtggatcgaggtccgacccctaaacagcatcaggtccgaacaggcggtggcgttcttcaccaacatcatccatcgttttggggtcccgaactccatcatcaccgacaacaacacccagttcaccggcagaaagttcctggacttctgcgaggatcaccacatccgggtggactgggccgccgtggctcaccccatgacgaatgggcaagtagagcgtgccaacggcatgattctacaaggactcaagcctcggatctacaacgacctcaacaagttcggcaagcgatggatgaaggaactcccctcggtggacgcccgagggcggcacaagctcacgcctccctgggaagggccgttcgtcatcgccaaagttctgaagcccggaacgtacaagctggccaacagtcaaggcaaggtctacaacaacgcttggaacatccaacagctacgtcgcttctacccttaa

SEQ ID NO: 28427 - DNA, 339 bp, Zea mays
  Peptide Sequence Number=SeqID_70206
atggacgccacgatcggagagtcggcaccgtcggtggagagggcgttcgaggggcagccgcatcccgggttctgggggctggtgacgccgcgatccatggccgtcgcggtggtgtacgcgttcgtgttctccatggtgtcgatgcgcatctacatgatagtggggctcgtcggcgccttcaacatgccctcgaacatcctctgcttcgtcaccctccggggcctcgtgtccctgctgcggcgctgcgggatcgccgccgccccgttcaccaggcaggagaacgtcttcctccagaccagcgtcatcacatgcgtcaacgtggcggtcgcaagtgaataa

SEQ ID NO: 28428 - DNA, 733 bp, Zea mays
  Peptide Sequence Number=SeqID_70207
atggagatggcgagggaaataggcagcggcggtgtgcgggaagaggcagcgacgtcgtgcgaggaagaggtggtgtcgcgcgtgccctctgcctctctcaggcgggtgactgggatgagggatgtggctaagggagagatgcgactggagagggtgttaggtcaagaagtggtgaagcgtcggtttctcctacattctgggtacggtgccgtcgacgtcaatgtcgagagactcggcgacctgatttgtcctctcattttcctcgaatccggcaccgctgccgtcgacgcaagggcctcatcggggtcctggtccggcagcactgaagcaggcctgctcttggcggcgtccagcagtcggaggtgccggtggagactggagacgatgaacgggtgctcgagcagctgccccgccgtggaccggtcgtcggagcatcgcgtcaggctggcaccggcccaggaagtccttggcctccgcggacagccaccagggcacctccagtacggcgaggcgcaccgcggcgagcacgtcggcgacaacgccagcccacggcgcgcgaccagtgtccatctcgaggacggtgcactcctatatatattcctgaagaacgcgtgcgctgaacctgtagtcgatgacccgtatatatatctgcagactgcagtgcaggccgcaggatcaaccgacgtgcaaactgaacttccgtataagattagcgatgtcttgcacgagatcg

SEQ ID NO: 28429 - DNA, 252 bp, Zea mays
  Peptide Sequence Number=SeqID_70208
atggacactggtcgcgcgccgtgggctggcgttgtcgccgacgtgctcgccgcggtgcgcctcgccgtactggaggtgccctggtggctgtccgcggaggccaaggacttcctgggccggtgccagcctgacgcgatgctccgacgaccggtccacggcggggcagctgctcgagcacccgttcatcgtctccagtctccaccggcacctccgactgctggacgccgccaagagcaggctgttgtcgcctaa

SEQ ID NO: 28430 - DNA, 1117 bp, Zea mays
  Peptide Sequence Number=SeqID_70209
atggtggggagcatccaagaggagccgaaagcggagcaccacttgcgtgtggagaaggcccgtggctctcttcgatgttacttgaccgaggttcaggccgctagaatgcgtaacaccctacttcctatcagtgctgagtatttgagtatcgctggtgtacacaaattagagatgagccgtgggcagtggagtgtgagttctcctgttgatctagtggtggtcgagctcatccagcctgattgcggctcgtgggcatgccttgcaaagcaagtcattgggaggctcacgaagcgggccatggagcatttttgtgctcccgcccgaggcgagacggaaatatgtctcctgtctgaggttggcctcggggcatctgttgtccgatggccttgggtgagacagaacaacatctctggtccaaggttggccccgggcgagatggaaaaacgtctcccgtccgaggttggtctcgggcaagagggaacatcatatcccatccgaggttggcctcaggggagatggaactatgtctcccgtctgaggttggcctcaggcgagatggaacaacatctctcattcaagcatgtgatgtccaatggccgggcgagaaataacaactcccatctgaggttggcctcggacgagacagaacagtgtctcccgtccgaggataaggcatattcaggtgcaccatcattatactggttagtggggaggggaacaaacattggtgctttaaagagcaacgataggctggtcctgggtagagaggataaaaaaggctctgctgaaggtgggagtgtgatgaatgctggagggcagtcagatgcagcggttcctaatgagaatagggaattggtagctgggaacctagaggctcttagaagtagggatgaggagaaaggaaatgtcgtcaacatggatgagagggacagaggttgtcttctgcatgatgaggcagatccaaggtggaccaaagttgcaagtaagaaattgaagaaaaaatacaagaggaagattctagctttggctacaagggctagctctagaattgcaagagatgggatacctatcctggagaaagccactaaaagagcccaagggaaggactaccctcaag

SEQ ID NO: 28431 - DNA, 699 bp, Zea mays
  Peptide Sequence Number=SeqID_70210
atgactcgatcgttcggtcttcgcctccccgggtcgagctcatccaacctggttgtgcatgccttgctaggaaagtcatcgggaggcccaccaagcgggccgtggaccgtttctgcgctcccgcccgaggccagcctcgagcgagtcgtgacagtgtctcacgtccggagttggcttcgagcaagtcagaactatctcccgtccgaggttgacctcgagcgatacagaattgtgtctcctgtccgaggttggcctcatgcgagacagaatagcatctcccgtccaaggttggcctcaggcaagacagaacatcgtctcccgcccagagttggcctcgggcagacggaacagtgtctcctgtccgaggttggcctcgagcaagatggaacaacatctctcatccaaggttggcctcgggcgagatggaacaacatgtcccgtctaaggttagcctcgggccagacggaacaacatcttccgcccaaggctggcccaggagagatagaacagtgccgcccgcccgaggttgtcctcaggcgcgatgaactatgtctctcatccgaggttggcctcaagcaagatggaacatcatcttccctccgaggttggcctcgggcgagatggaacaacatctcccattcgaggttggcctcgagcgatatggaacaacatctcctacctagagctggccttgagtga

SEQ ID NO: 28432 - DNA, 184 bp, Zea mays
  Peptide Sequence Number=SeqID_70211
atggagaagcggtttcctaagagcccacatgagatcttatataacgccatatcttttctgcagaaatggaagtctctcctcaagcaaaaggatttagagaaaggtgaggtgtttgatcagctccctgaagaatttggttgtgtaatttccaaccagcctttaggagaggtgtctgacattcgag

SEQ ID NO: 28433 - DNA, 297 bp, Zea mays
  Peptide Sequence Number=SeqID_70212
atggcccgtcttagatgcactgcacgtaagtcggtgatccctttcttgccctctcgccttgtggagcgcccactgcgtcgcacggtgacaggaggtggattctgggaggtagccctccctacgcctcagccagagatgccccctgcactaccacagggcatcccgactgctggaggagaccctgacggagacgacgacaacgatggcagtttgagccacaacatggagcttttggaggagcaggagccagaaggattgtggcggaaccgcccgaattattccagcttaagtgcctaa

SEQ ID NO: 28434 - DNA, 252 bp, Zea mays
  Peptide Sequence Number=SeqID_70213
atggaggcggagacttggctgtacggtgaggagtccgatgagcgtgagcagagaaagacagagggggaaggggtgaaccaaggggtgtcccaagttgatggcgtcgaggcagagctcatcggggcaacagacatagcgggctcccgatggtggccgcggaacaggtccgaaaccacggcggacggcggtgaagctccctgggtgtgtgtgcggtgcgaggcgagtgcaggagtgctgcgcgtgtgcgaatga

SEQ ID NO: 28435 - DNA, 312 bp, Zea mays
  Peptide Sequence Number=SeqID_70214
atgccatcgcaacagttcgacccgaggacctccctatactctgcagcgacgcctccccgctttcccctttcggtgttgctccccaccacggcgagtattgctccccaccgcgacgggtattgctcgccggagtggcctctggtccgcccgaggtccccctccgccatctgcccgtctcagccccgttcttgcgacccaggctttgccatagtgttcgcaaggtcctccccaacctccctggcttcccagaccaccccagcgcccctagaaatcctggtcagcctcacctccagcggcaccacccttggctag

SEQ ID NO: 28436 - DNA, 210 bp, Zea mays
  Peptide Sequence Number=SeqID_70215
atgggtgttactgtcacaaaacaatgtgttgctccagtatcaaataacacatttgcagaatgggattatattgagaacgaaggcaaggtgcctggttgttctggcggtattgctgctgctgctgagggaactgcctctgatactactgctggtgttgacgctgatgctggtgctggtgctagtgctgatgtccttgagatatggggatga

SEQ ID NO: 28437 - DNA, 537 bp, Zea mays
  Peptide Sequence Number=SeqID_70216
atggcgggcggaattgagctcgccggagctaaggagaggtggctggccggtgaagtattcgagctagggatcaaggtgaacatccctgatctttggctcaagggtgcagaggtcttctcaaagcattactctatcactgagagggatacagttgtggcagccatacaggatgctgcacgacgtgcgcttttgcagtactgttcgttgttcagcagggtagctgacagcctcgacctgaagtactaccctcgctgttcgactggtagtgccggaggtgtgatcgtctcaccagttggtgagggcaatcctagattgatcagcatggtcaacctggtcgctgtgctgaacaccaagctggatcacgccctggacgagttgggcaaggctcgggcagagattgcggaactacatgctgagcacgcggagcaccgccatcaggaagatggttccccgctcctgtcaggattcagcacccttatcgctcgccgccccgtggtcattatgcttatggcacccctaactgtaggacccagataa

SEQ ID NO: 28438 - DNA, 201 bp, Zea mays
  Peptide Sequence Number=SeqID_70217
atggcggcgctgcccgatttcacgatggaggttcgccggaggcgatggtgtggccacagtgtggccacgagagaagtgcaaatcaaagagaagccgaagtccagctctgccaggctcacaggactgtccggtggtgcaccggacagtgtctggtgcgccaggctggcctccggtgaacaggccgctctcgagaaagtttga

SEQ ID NO: 28439 - DNA, 204 bp, Zea mays
  Peptide Sequence Number=SeqID_70218
atggttgcacattccaccctcatggttgcactgttatcccgggttgtcactccccaagcaggtccttacagagagccgagcgggcccagcgtcaaaggagcatcagcggaagatggggagagcacgctgaccgagcgggcccagcgtcaaaggacatgggcgctgacaggcgggccagggcgtcaggcgcgcgtgcgcgaggcg

SEQ ID NO: 28440 - DNA, 159 bp, Zea mays
  Peptide Sequence Number=SeqID_70219
atgcagagaggatgtaaaatggacacttcgaaggatgggttctcggaccggtctgctatatctgatgtggcgctgacacagcagggtcaagtgccctacgaccagactagtcattgtgtcaactacccgtcagaacgactacctagtgtggcagtctaa

SEQ ID NO: 28441 - DNA, 108 bp, Zea mays
  Peptide Sequence Number=SeqID_70220
atggaacccaaagggaagggaaaggtgaccgacgagaaggagaagatcccaatcgaccacaagcccaaagatgatgagaattataatgaggtagaagtagaagaatag

SEQ ID NO: 28442 - DNA, 822 bp, Zea mays
  Peptide Sequence Number=SeqID_70221
atgtcgtgcttggcatgctgtggcggcgaagatactcaaagaacacctgataatggaggtccataccctggtggctacccaccaagggatgatgcttatcgcacagctgatccaactccgaggggtgctcaacctttgaaaatgcagccaatcactgtccccactattcctgtagaagaaattagggaggtcacagtggcttttggtgatgaagctttgattggtgaggggtcttttggcagagtatattttggtgtactaaaaaatggtaggagtgcagcgataaaaaagttagattcaagcaagcagccagagcaagagtttttggcacaggtatccatggtgtcaaggcttaagcatggcaatgtcgtagagttgcttggttactgtgttgatggaaacacccgcatccttgcatatgaatttgctactatgggttctcttcacgatatgcttcatggacgcaaaggtgtgaaaggagctcagcctggtccagtcctgtcctggacacaacgagtgaagattgctgttggagcagcaaaaggccttgagtatcttcatgagaaagcgcagcctcatattatacacagggacatcaagtccagtaatgttcttctatttgatgacgacgtatctaaaatagctgattttgatttgtcaaaccaagctccggatatggcagctcgacttcattcgaccagagttcttggaacatttggctatcatgcacctgattttggagttgttcttctggagctcctgactggaagaaagcctgtggatcatacattaccaagaggacagcaaagtcttgtgacatgg

SEQ ID NO: 28443 - DNA, 3762 bp, Zea mays
  Peptide Sequence Number=SeqID_70222
atgccggagtcctggagacccgccgaggcggatgccctgcagccggcggcaggcacggcgtccgcgtccggcccctcggctcggagcccgggcaatggcgccaaggggcgcggggcgggggagccccccggcgctgcggcgacgcgggtgccgttccacaggctgttcgcgttcgcggactccgccgacgtggcgctcatgctgctgggcgcgctcggggccgtggccaacggcgccgccttgcccttcatgaccgtgctcttcggcaacctcatcgacgcctttggtggcgcgctcagcgtccacgacgtcgtcagccgggtgtccatggtctcgctcgacttcgtctacctcgccatggcctccgccgtcgcttccttcgtccaggtcacctgctggatgatcaccggcgagcgtcaggcggcgcggatacggaacctgtacctcaagacgatcctcaggcaggagatcgccttcttcgacaagtacaccagcaccggcgaggtcgtgggcaggatgtccggcgacacggtgctcatccaggacgccatgggcgagaaggtcggcaagttcgtccagctgctggtgaccttcttcggcggcttcatcgtcgccttcgcgcagggctggctgctcaccctggtcatgatggcgaccatcccgccgctcgtcctggcgggcgcggtcatgtccaacgtcgtcaccaagatggcgtccctgggccaggcggcctacgcggaatcgtcggtggtggtggagcagaccatcggttccatcagaacggtcgcgtctttcaccggcgagaaacgggcggtggacaagtacaacatgtccttgaagaacgcgtacaagtccggcgtccgagagggcctcgccactgggcttggaatgggcacggtcatggtgctcctcttctgcggctactcgctagggatttggtatggcgctaagctcatcctggagaaggggtacacgggagccaaggtcatgaacgtcatctttgcagtcctcactggttctctggctctaggtcaggcgtctccaagcatgaaggcgtttgcaggtgggcaggctgccgcacacaaaatgttcgagacgatcaacagaacgccagaaatcgacgcgtacagcaccacggggaggaagctggaggacgttcgaggggacatcgagttcagggatgtctatttctcctacccgacaaggcccaacgaacagatattcaagggtttctccctcgccatacctagtggcacgacgatcgcgttggtaggccagagcgggagcggtaaatccacggtcatcagcctgatcgaacggttttatgaccctcagcttggcgatgttctgatagatggtgtgaatctcaaggagttccagttgaggtggatcagaagtaaaatcggccttgtcagccaggagccggtcctttttgctgccagcataaaggagaacatagcttatggcaaagacaacgcgacggatcaggaaatcagagctgctgctgagcttgccaatgctgccaaattcatagataaaatgcctcagggttttgatacttccgttggtgagcatgggacacagctttctggtgggcagaagcaaagaattgcgattgcaagggctattctgaaagatccaagaatcctactattggatgaagctacaagtgctctggatgccgagtctgaaaggattgtgcaggaagctctcgacagggtcatgacaaacaggacgacagtcatagtcgcacaccgtctgagcactgttcgaaatgctgataccattgctgttattcatcagggaacactggttgaaaaaggtccacacagtgagcttctaagagatccagaaggagcttatagccaactgataaggctacaggaagcaaaccagcagaacaatgggaaggttgatgccaatgctcgtccaggcaaacaaatatcaataaacaagtcagctagcaggaggtcgtcccgtgataacagtagccaccattcattctcagtcccattcggtatgcctcatgggattgacattcaggatggttcatctaacaaactgtgtgatgagatgccacaggaagtgcctctcagccggcttgcatctctcaacaaggcagagatcccggtccttatactaggctccattgcctcagtcatcagtggagttatcttcccgatctttgcgatactcctgtcaaatgtgataaaagcgttctatgagcctccacatctcctaaggagggattcacagttctgggcttccatgttcttggtgtttggtgcagtgtacttcttgtcactccctgtcagttcgtaccttttctccatagcagggtgcaggttgattagaaggatccgactgatgacatttgagaaggtggtaaatatggaggtcgagtggtttgatcacccagaaaactcaagtggagcaataggtgcaaggttgtcagctgatgcagcaaaagttagaggccttgtgggggatgcgcttcaattggttgtacaaaactcttcgacactagttgctggtttggttattgcatttgtgtcaaactgggagctatccctcatcatcttagctttaataccactcattggcctaaatggatggatccagatgaagtttattcacggtttcagtgcagacgcaaagatgatgtatgaagaggcaagccaggtggctaatgatgcagtaggcagcataagaacagtggcctcattctcagctgaagagaaggtcatggatttgtacaagaagaaatgtgaaggtcctctaagaacaggaatcaggacagggattataagtggaatcggttttggagtttcctttttcttgctatttggggtatatgcagctagcttttatgctggtgctcggcttgttgaggacaggaagacaacctttcctaaagttttcagggttttcctagctcttgcaatggcggcaattggagtgtcgcaatcaagtacccttacatcagattcttccaaagcaaaatcagctgcatcttctatatttgcaattgtagatcgaaaatcaaggatagacccaagtgaggatgcaggggtaactgttgaggcactacaaggaaacatcgtattccagcatactgttgcactcgttggagagagtggtagtggcaaatcaacggcaatttcattgctccagaggttctatgacccagatgtaggccatatactactagatggcgtggacatacagaagttccagcttaggtggttaaggcaacaaatgggcctggttagtcaagaaccagctttgtttaatgacacaataagggcaaacattgcctatggaaaagatggacaagcaacagaatctgagatcatatctgctgcagaattggcaaatgctcacaagtttatcagttcggcgctgcagggatatgacacagtggttggagagcgtggagcccagttgtcaggagggcagaagcagcgagtggcgatcgcccgtgcaattgtgaaggaccctaggatcctgcttctggacgaagcgactagtgcgctggatgctgagtccgagcggatcgtccaggacgcactggacagggtgatggtgaaccggacaacagtgatcgtcgctcaccgtctgtcaacaatacaaaatgcagatttgattgcggtcgtgaggaatggggttatcatcgagaagggaaagcacgatgccttgatcaacatcaaggatggcgcctatgcgtccctcgtcgcccttcactcggcagcctcttcatag

SEQ ID NO: 28444 - DNA, 513 bp, Zea mays
  Peptide Sequence Number=SeqID_70223
atggccgacgccatcactggggagctccaaacccgcactccagcgcctcaaacttcgaacccaacggtgctacgcgtagcggagagggaatcaaggaggatgggggtagttttacctctaatcggggcggtgacttctctgcccacgcgggacgtcttcctggtgacgctacgaagctccacgacccttccccaagaccccaacggcgacgtagccgagggtaggctgcggcggcgctctcccctcccttctcggtgctacggcggcgacacggtatcagcgagggcgagtctccaaaaacaggaggaacggtcggccagggttctggggaccccatatagacgcgaggtggccgaggtgggcaacgatctctctggattcgacggcgagcgcccgccattgtcgggcggtctgttgaagggtgaccgagcctatccggtcccacctggcagtctcaacgcagaggggaaaatcctgctaagcgggcccacgagcaagcgactccacgcgtag

SEQ ID NO: 28445 - DNA, 672 bp, Zea mays
  Peptide Sequence Number=SeqID_70224
atgaagaccgaggtgggcgtgaaagatggggaaaaggcttgggcgtccatgtttttgaagctgctggccatggtgaggatgaggatgacggatgacacatgcatggtgcacaacatcgcgacgcccggctgggtgtgcaccaagtatggagcgacccagcacgacatcccgagcgaagagttggacaccatggcgagttggagaccgacagaaagctcagcgcgcggcaaggaactcgacgtgcatagagaaacagagactgagctaagctcgacatcggacaaaacactgcgcatgagccggccatgggaaaaaccttggcgaggtcacggccagcgagctgaggggcgcgacggcttaaggattgaaggcgaggaagctcggccggcgaggttggccggtggcgctggggactgcgcgggaggatgcgcgcgcaggggctcggctgccgggaatagggaacagcggctgatgctccatgatttaaacggggaagaggcaaggaatcggctggagctcactgcgacgagggaatcgacgtttaggccgagcaccatggtggacgacatccatggcgagcagagcacggcttccagggaactcagccgccagcagagagagccggagagggacgacctgggcgctcaccaagggagctctgcaggccggtga

SEQ ID NO: 28446 - DNA, 201 bp, Zea mays
  Peptide Sequence Number=SeqID_70225
atgcccccgatttcgcgccccaagcgctttgcgttccgatgcccttccatcctctcccccacaccacgctccttccatattcgccagtacacagtgattactattagagagtggaaaaggggcgccatagacgatgctatcacccatcgcgaggacaacgggaggtcacgacatcgcctgagcattccaactcttccataa

SEQ ID NO: 28447 - DNA, 258 bp, Zea mays
  Peptide Sequence Number=SeqID_70226
atggaaggggctagctgctcgagggtaaagatggaaggtggcactggctgtactggacggatgaggctggctggtgttgggcgacatccgtgggagagagacgtgggcacgtcgggcgcggtggcgggtactgcgggcgcggcgacattcgtgggagcacgtgcaacgcgggcggggcgcgtgggcaagagcagagctatggacgctgactttacgctcttaatagagtgtgaacatattcgttttatcacgttctaa

SEQ ID NO: 28448 - DNA, 1053 bp, Zea mays
  Peptide Sequence Number=SeqID_70227
atggcgatggcagcagccaccggcacggtggtgctggtagacgcggccctggccccgtacgagcaccctgacctccggtggcttgtgcggaagcatgtcctcgccgtactccaggacttccccacgctgtcgccgtccgtcgacacctacaccagcgacagcggcgcgtccgccgtgctgctcaacgcgcggggcctcctcaccgtctcccccgccctgccaccggtccctctcaccctatggcttcccctggagtacccgtacctgccgccgctcgtctacgtcttccccgccgcgccgccggcttcgctcgcccgcgaccaccccttcgtggaccaccgcaccgggcgcgtccgccaaaccctgccctaccttgaggactgggccgtgccgcgctccagcgtcgccggactcgtgcggagcctcgttggtgccctgaggatgtgccacccgctgacgtcgcgcttcggctccgtcgtccacgccacggccacggccagagcgacgacgacgacgacgccgacgccggaggaggaggagcaggagcgcatgcacgcggcgctgctcgacgagctcgtctccaggctgggcagggacgcggccgccttccgcggccacgtggacgaggacatacatgccttgtcctccagccaaggcaacctccgagcgcgggccgacgccatggaccgcgccgtccgcgacctcgaaggcgagaggatgcggctggagcgcgccgtgacggccagccttagtcaccgcggcgagctgctgtcctggctgcacaagacgagctgcgcgcccgacgacgccggagcagcactactcctggcaccgcacggggcggcgggcggcgacgcgccaaggtggcttgagagcaaggcgtcggagctcgccatggacgacaccgtcgacgcccttggccgcgccctcgaggacggcgagcgcgtcatcggcttccacgagtacatcaagcgtgtcaaggtgcttgctcgggagcagtttttccattgctacgcagcatccacctcgatgagcaaggtcacaaaatattaa

SEQ ID NO: 28449 - DNA, 1701 bp, Zea mays
  Peptide Sequence Number=SeqID_70228
atggtgtcacaaataattgcgggacgccggggtccacatcttctaacaatacgtgaacggatttctgttggaaatgatggaggccctgttccagtacgactgttgagtgatctttttgacgaggctaagaaagccattgatgaagcaatagaatcggaaaatggatccctgacacattttgaggtttttactgctctctcatttcttctattctcacaacagaatgttgacattgccatcattgaatgttggagaaatgatgttgaggccacagagaaggttgaggacatgctcaaaattctagactggatgaccaacgtcacggagggtgtcggtggtggtctttatgcgctggtagcagttgatggaagtgtcgccctgctgcatggagtggaactcatggcagaggaagatgggctgaggatccttgttggctcgccgaatttgttgcacaaggtcttgaagtgggatgcccacttagttggacttttgcatcgccaatgtcatggggacgtgggacttgacgtaggcagtggcatagtggtgggcgatcaccatcggctgctcctagttgttggagggatgtcctctgtcgtggatgtggcaggtcttggtggagctagggatgcaacaaatgttattcgaagtactgaattagcagcatctgtcataacaacagtagggagggaacatctggttgcattgggtggctccctgcaaagcatagcaatagcaaagtctggaatcatcaaacaaggacgaccggttgtgattggtggaccattttcagaagatattgagcaaattattcgtgacagggcattcttgacacaatctcccgtgatatctgcttgtggtcatggcatcaagagctttacaaaatgcatagattgggataatggtaagccgtatcaacgctgttacatcagcattaagatttcaagggatgtacccttgtcgattgaaatgcatgacataaacctccagctgctgggagatcatcaacgtcagaatgctgtcacagctgcttgcgcagctctctgtctctgtagtcaaggatgggatatctctgacgcttctatccaagccggcttagaggagacccaacttcctggtaggagccagtttctcacagcagaggaagcctcggcacttgggttcgatagcgcatccactgtactaattgatggagctcatactgaggaatctgcaaaggctttatcaggcgtgataaaaactgtcagaccagaagggcctctagcgcttgttgtcggaatggctagtgacaaggagcatcttgcgtttgccgagcagcttctctcaggtcaaacgcctgacgttgtgctgctgacagaggcgagcgtcgccggaggaacctcccgcgcaatgccagcctcgtccctgaaagaagtatggatagccgcggcacgcgatcgtggcatcgagtacgtggacatcggtggcgtcagtggtgctgaaaccccagagcacattagtgatctcttggactgcagtccatcgtcgaattccggaagaaagcccatggtgatcgggtgccaagacgtggcgccgttctcctcgaacctgatcgttgctgcctcccagctcctggagagcagaggcacggctccaggcctcatctgcgtgaccggctccctgcatctcgtcggggccgtactgccccagttgggacggcattag

SEQ ID NO: 28450 - DNA, 756 bp, Zea mays
  Peptide Sequence Number=SeqID_70229
atgaaccgtccacgactcgagacgcagtacgccgtgaatggctgcggcggtgaacaagtgcgccgtgacagccagctgatgcggaaggtcttgtccttcggcggcgggatcctgcaatggcaaatggaagcgcctaaagaacacaacctcgacggcaacttgtctgcaacaatggagctcacgcccaacaatagtgcccacggtggcatttgcgctggcgccgcgggagagggcgagttgtgcgatggcgccggcggcagggaagtagtcaagggagaaggacggggaagagatcaaggaaagggcagtggctctgctattggaagtagccatcagaagggtggacgaagaaatgagaacagggtgcgctggcccctggccatcaataaaaaatggcatagaagggtatgggaatctgaatcaggaacagaacagaagctcccaaagacgaagagccagcaggggaatggctacttttcaaggctgatggatgacaacataatgggggaccttcagtcacaagcatgggaaagatggctgatagttcaacttcaaggaattatggtgggtactggcattggtttaagcatcagcaagtgtctagctgaacttatgggtgggcagataagttttgtcagccgtccttttgttggaagcacattcactttctccgccacactgaagcgctcatacaaagatacttcagttgattcaagtaggagcttgtcagaggcacgcactaccaactgcttttaa

SEQ ID NO: 28451 - DNA, 594 bp, Zea mays
  Peptide Sequence Number=SeqID_70230
atggcgacgaccttttcatcatcttcttcttcacttgaagaagagctgcttgagtattcaatatcgtcttttgctccaaccattttacccgttgccattggtatgctcctcctctgctccctcctcgtcgtctgtcgtctcctcgcgctcgtcctccgctgcccgactccggcgtcgtccccacagtccgcaccagccgacccaaccaccgctcaagccttaacccaacatttatctgtatcccgtggcaaggagcatctgcgcgtcacatccgcgatcgcgcgctctacgtcgcctcccgccgccgccgcacggccgcgacggatgctcggccaccgcttccctaccgccctccgcctcccacatggtctgctgcagaggaggagcatcatggcccgccgcggcctgaccatcatggccggtggcgaggcggagggtccgctcgcgggtttcttcgactacatggagcggctgcgcaactacgagcgctcgggcgtgccgcgcggcgccggcaccgactccgacgacgggtttgacctcggacgcatgcgccggctcctccgccggctcggcgacccccacacccacttcccg

SEQ ID NO: 28452 - DNA, 237 bp, Zea mays
  Peptide Sequence Number=SeqID_70231
atgccaggatccgaggacaacaccagcgagatcgcatcagcagcagtgaccacaaacccaaatgtcgccctagaacaaaagctggacaccatgacgaaggtgttcgctgatctcaccaccaaggtgtcaggcttgtcgctgcatgtgttcgacattgacaaccgcacgaccaatattgtggcgctaatctctacccctccttacaaccttccaggctatggtgcatccctgacttga

SEQ ID NO: 28453 - DNA, 177 bp, Zea mays
  Peptide Sequence Number=SeqID_70232
atgagacgccgtgctgttgtcgacgtggaaacacaggggcagacgcgagatggagaagtgctacgagaggccatgtcagaccattgtcaagagttagagtcagtttggacagaagcaacatggtggtgcttgacttcggtgaatgggaagtcagatccatatcaacttggacattaa

SEQ ID NO: 28454 - DNA, 273 bp, Zea mays
  Peptide Sequence Number=SeqID_70233
atgaagtccatcaagagaagcaaacgtttgttgaaggagcaaagaaagaagtctgagaccgctgtgcccgtcgtatgcagtgacaactacctatgcgatgcaaaccgtagttgtgagctgccaaacaatctttacttgctggtggcgcagttctttctggtggaggtctgggctctggatacaatggtagtgaattcattggagaaaggggttttgtttcctttcttctttgggaggcagagtgggttggagccgggagtccctgatttttag

SEQ ID NO: 28455 - DNA, 246 bp, Zea mays
  Peptide Sequence Number=SeqID_70234
atggacagcgacgccgccgcgatctgtggccacggcgtgggcaccacggcggacggcgacctctgcaccttctgtggcttccccatgtgccgcccctgctacgagtacaatcgcaaggatgacacccaggcgtgcccgcagtgcaaggccaacaagcgccaccaagggagaggtctcgaggtcaagcctagacccactgtcaagtgtgtgcttggacatgactttatcctgcactttccagtgtaa

SEQ ID NO: 28456 - DNA, 423 bp, Zea mays
  Peptide Sequence Number=SeqID_70235
atgagggagaagggacctgccgtcgtcgatgttctctgcctcggtcgttgttcggagtcctcggtgtggtcatggatgtttgaccagatgtatggagcgtgctcgatgtggctgtggacggtgaggggtcgaaactatctagcaattgctcgtcgtcgagtagtaatcttcacgtcgccgcatctagccatgagaagtgcccttcgcgccgccctatctggggcgattggatcgtcgggcagcagacatcgatttcccggccatggcgccgtcatttccctagtgggcgccgccgtgaagctcgctgggaagtggaggatgcatcgttggccgtcgatctggggaccagtggttgtgattaggggggtcgtaccgtttcgcattggagttatctcaggcgttcgatctcgattgggcggttga

SEQ ID NO: 28457 - DNA, 267 bp, Zea mays
  Peptide Sequence Number=SeqID_70236
atggcggcgaagtctagatacacacgccggcttccgctcagaagggaggtcgccatcaccgtcgccaacccagatggattcgcgtatatgcatctggctattgatgttgggttcgcgctggcaacctccgtggtggggcatgtggacatcgccgcggtcggaccgacggggaggtgggagaagacccggatgccgttgatttatggtggacgacgaggattaaatgatgtcgtgactgtcgatcgaaatgtggacgactcagattag

SEQ ID NO: 28458 - DNA, 617 bp, Zea mays
  Peptide Sequence Number=SeqID_70237
tgtgcctgcttgcccgcctacgagactcctctcctgcctggttcttctccctcgagacgtacccagatgtttctgccttccgtatagtagctgatgcagagtctgagagtcacattacatatctgccaggtctctactccttgctgacatttggtggccggtatgttgaggagtgggtccgagtcttctatgctacaatatggatcgaccctgaccatcagtggatgaggttccggttcgaccgtgaggatatcactctgcatacaactcagatccgggagttatttggattccctgagtcaacaaagagatttcacaacttgttctatggtacctcagaccctcctcgttgtcctcatgatagagtagctcccggaaccgctcacgttgctactctcttccggcctccattctcagacggctctcggtgctcttctgtagacttcaccccagcgacgaagttcctttatgagctgatgaggtgcaccctactaccgaggatgggatacagaaaggctaccactcgtattcagctaagggtcctcggtgctctggtttctatcacacccggttttggaaggcaaaccgaatgcgaaccatgtacgtgccaggattag

SEQ ID NO: 28459 - DNA, 3102 bp, Zea mays
  Peptide Sequence Number=SeqID_70238
cgaagcgcacgcacgacgagcgcaggctgcaaggcaaccgaagctagcgagctcctttgcttctacccgcggcaactcttcaggcgctcgcgacgcatcgagcccttaaggccgaggcgagcgcgagttcgggagcggaggagagaagcgctccgcgagacgactgggacccccaccgcgctcgggtcggaagctggatctgcctcggggctcgtgcccgcggctggatatcgtggggcgcgggggccggagcggctggtggagcggactgccggcggacggagggcgccgaaagttgagacggagaacttcttactggaaccgtcagaagattttgacgactcaatcggtagtgcttcaaaactgagctatttcccagaagtaaaacttggtgttaacattcctgcccatggagaaagccacaatttgctaaatgcggacgacaataaaaatgattatgagtggggcagagctcagagcaagcctgtacaaacttcaaggtcatccacgatggataatagtcaaagagctagtagaagcagtgcaagcccaagcaggcttagcccatctccacgctctatgggaaggacaagatcatctagttcagcttctcgctctagcccaccacttgctgttcaaacacaaatgccatcacaaagatcgtcagcccctccgattgctaagacattaacacctcctcgaaggtctccaagtcctgtctcaagaaggatgagtactggttcaagtcgcccaactttgaatgaaacaagaggagcttcaccagtgaaacctaatcacagatcttcacaaaagctgcatggatggcaatcaaacgttcctggtttcccttacgatgcgccttcgaaccttcgcacatctctaactgatcgtccagtatgccggtcaaggggtggatcaccttcatcttttagtggactagaaaaaggttcaagatctagaagacagtcaatgtctcctaccccacctagaagagccagttcatctcacagcattgaacgggaccgaatgagctcttacagcaaagcttctgcaacatcatctggtgaggatgatctggattctatgcagtctgtaccaattagctactccagtagcccagttgtgaaaaagagcttggttgtaatgaaaaccagaaccatggcaccatcaaagaatctgtccaaaaatttcacacctagttctgtcccaaagcggacatttgactctgcactttggttgatggatcaccgcaaagctccacaagataggttccgaccacttctatcaggtgcccctgccagcacatttggttctgggaatggaaatgatgtgcacaaacctatgttttcacacaattcctctttgacaactagcagcaatgcaagctcttatcatggtgccacttttggctcttatatgcatggcagccaagaacaacatgatttggttggtgaatgggaagcagatgatagttctcggggtcatgaggatatatttatgtttgataaattggatgagctcaataaagaagacattcattacaagagcacgggatctacggataattcactggtcatagtaaaacatctagtaagtagcagacatgacttggaaggaagcagtagacctaatcagtccttatgccattctgctgatagttctcaggttggcaatagtaaaaatgctaattgctctagatgtgggaagttttttgatgcgatggatgtggatgaagagggtgtctattgtgatgtatgtgcttcaatgattggaaatatcttaaccagtcctattgtacaacctataggagaagaaaaccagcaatttgataaaactacaaatttgaaacattgcatcgcatctgaccctcctatacccacaggttgtataggctatagcaaagaagtatctcttgatcatcaacttgtgaacagtgaatcgtacactgattgcctggaccaggtccctccaattcattcaatggggcacacacctcaggaaatgctactggggcgggaggaaaagattgacgcagagcatagaaagaaacatgttggggactcattaggaaatacaaatgatattgtcttccatcaatctaatgtgactgaatgtgaacaaatagaaccaacatctgtggggcatgaccttttcatcagagaccaaatggataaccataatcatggatcgtcccaatataatgaaactatctctgaaactgtgaccagtgacagttctcatcaaccaggatcaactacatatcaaaaccctaaacttgaaactactgaggaaccctattatgcaagagatggtgtcagtatgatgaagcgtagctttggactggacagcacttcagctgcttcttccagtgatcttggatcttcaaggcaatcaatcatatgttttgagcgccttaggagtggtaagaggggtgacttcgagaagtctcagataagcagcactatgagtcgtcaaagcattgcttctgtgtcagatatgtcaatctgtagctcttcagcttcactttgccctcagattggtgctgtaggtgattcctgtttcccaattgacactttagaaagcagcacttcaagaacattgatctcttctgaagaaaatgatgctttttgtaaggatgctttgccaagtgatatggaatgtttgtctccacaggttattgctgatgatgacagtcatgttgacttgaaaattcagagctatttaagtgaggtaggagatacaacagttgagaatcatagtgctggcagaatgcctgacatggatcataccagtacaaatatgtattctttagatactgaaatgccaagtgatacccgagagtcatcaggcctagaggaaagttgcctgcctgaaactgaagaggatgcttacgccatcaatcagtgcaataaaggtagtgctcgagaacattcaagtgatgagaacaactttgatgatattcaaatgcagtctgaaatagttcagggtttagctgaggaaaacagattggacgattgttgcatgtctgccatctctgaggaggatgtgttgatttctggacgagaagccgacataagggaacttccgaatgatggtacatag

SEQ ID NO: 28460 - DNA, 1020 bp, Zea mays
  Peptide Sequence Number=SeqID_70239
atggcgtaccggacagtccggaacgctttccgacaaggcttctactggccgaccgcggtggccaacgccactaggattgtacgctcctgccaagggtgtcaattctacgcaagacagacgcacctgcccgctcaggccctgcagacaatacccatcacctggtcgtttgctgtgtggggtctagacctcgtcggtcccttgcagaaggcacccgggggcttctcgcacctgctggtcgccatcgacaaattctctaagtggatcaaggtccggcccctaaccagcatcaggtccgagcaggcggtggcgttcttcaccaacatcatccattgctttggggtcccgaactccatcatcaccgacaatggcacccagttcactgggaagaagttcctggacttctgcgaggaccaccacatccgtgtggactggggcgtcgtggctcaccccatgacgaatgggcaggtggagcgtgccaacggcatgattttgcagggacttaaaccgaggatctacaacgacctcaacaagttcggcaggcgatggatgaaggaactaccctcggtggtctggagtctgaggacgacgccaagccgggccacgagtttcttgtcgttctttctagtctatggggccgaggctatcttgcccacagagttagaatacggttccccaaagacaagggcgtacgtcgaccaaagcaaccagaccagccgagaagactcactggaccagctggaagaggctcggaacacggccttactacactctgcgcggtatcaacagtctttgcgacgctaccacgcccgaggagttcggccccgagacttccaggtgggagacttggtacttcggctgcggcaggacgcccgagggcgccacaagcttactcctccctgggaagggtcgttcatcatcgccaagattttgaagcccgggacatacaagctggccaacgatcaaggcgaggtctacgacaacgcttggaacatccaacagctacgtcgcttttacccttaa

SEQ ID NO: 28461 - DNA, 297 bp, Zea mays
  Peptide Sequence Number=SeqID_70240
atggcgaacggaggctccaccatgacgctcggctcctttgctcgactttcttgtgctccaaaagatctcatgcccatctacgcactcgtgcacattccacttgatcttgcgatgctcccttactcgccccaaggcctcgccaccaacccgatcgtgactagcagcagcaaaaagcaaaaggaaagcacaactacaaactattttcctaaaccgtgcaatgaacgtgtccatctacaattctcttggactggctcgattacacatggtactaagataagggatgttcaaaaaccataa

SEQ ID NO: 28462 - DNA, 2640 bp, Zea mays
  Peptide Sequence Number=SeqID_70241
tcgaactgcacgtctgcacatgagatccccaacaattgtgacggcgccgtgccggcgtcgctaattctcgacgtgcaaacgaatccccccggtggcccggtcgtcatcgtcaccgccgcttccaccaccagctcatccatctccggcattccccgcaacgtctccaccccccccatggcatcccctccgccctctccatctcccgccgcgctcatcgcgcatctcgccgctgtgctctcctccccggactggcgcttccacccctcgctcccgcaactccctgccctcctcgcgccgtccctaccccgcacactcctcgtcccgttgccgctccgcctcgcggccgcagtcgcccgcgccgccgcgcccgtcccgccacctcctcgacatctcactcccggtcgtgctccgcctccacgccctctccccgccgccgctccgtccattcttcgaccgtcccttccgctccctcctcacccacttctcccgctacgcgctgacgccgctcatgctccggctgttcgcccacatgtaccgccacgcccccgcctgcacccacgggtgctacctacaatgcactcatccgtgccctctgcccgccgcgccgatctccgccacgcccaacggtacctcagcctcatggtccgctccggttggcgccccgacgctttcacgttcaactctttgatattgggttactgtcgcacgcagcagctggaagtggcccatgacttgttctgcaaaatgccgttcagaggattctcacaagatgcggtttcttacgctgctctgatcgaaggattttgtgaggcaggcaggatcgatgaggcactggagttgttcagggaaatgacgcaaccagacatgtacacacacgcggccttggtaaaggggctgtgtgatgccggaagaggagaggagggtctatgtatgctgcagaagatgaaggagctgggatggaggccaaccactcgtgcatatgcagcactggtcgatttatggtgtagggagcagaaggctgaagaggctgagaaaatactgaatgagatgtttgacagtgggttgatgccttgtgttgtaacatgcacaattgtcgtgaatgcctactgcagggaggggaggatgagtggtgcagtgagggtgtttgaatccatgaggtttaaagggtgtgaaccaaatgtctggacatacaatgcaattgtgcaaggtttctgtaatgctgggaaagtgtacaaagcaatggctttgttggaccagatgagagaatgtggagtagagccagatgttgtgacatacaatttgttgattcgaggccagtgcattgatggtcatataggaagcgctttcagattactccgtttgatggaaggaaatggtttagctgctgatcagtacacttacaatgtgttgattgatgctctgtgtaagactgggaaagttgatgaagcttgctctctttttgatggcctagaatatagaggcataagacctaattctgtgacattcaatacggtgataaatgggttatgcaaggctggtaaattcgatgttgcgtgcacatttttggaaaatatgatttcagctggttatgcaccagatacctatacatatagcccattcattgaaaatctatgcaagacgaagggatcacaagaaggattattctttatagatgagatgctacaaaaagatgtcaagccttcaacggtgaattatacaattgtaatcaacagacttttcaacgagaggaactatgggttagccacaaggatttgggggcaaatggtgtcacaggggtgtagtcctgatgttgtcacttatactacttctgtgcgggcatactgcaatgaaggcaggcttgatgaagcagaaaatgttgtgacggagatgaaaaaatgtaggaccattgtagatgcaatggcatataacactttgattgatggccatacaagtattggacagacagatcgtgcagttacaatcttgaagcacatgacgggtgttgcttctatgccaaatcattttaccttttttatcttgcttagacatcttttacagaggaggctagcagaacatgtacctttgaaagcaacttctgtgtggaagactatagagcttgctgatgtctttgaattatttgagctaatgaagaagaacagcgtcccttctagtgcaagaacttatttgtccattctggaggggttttctgaagaaagaagattggatgaggtgacttccttggtttctcttatgaaagaagagaatctacctctgaatgaagatatatacaatgctcttgttaattgcttttgcaaattaaggatgtattctgatgcttgggcattgctttgttccatgattggacatggttttttaccaaacttaatattttaccagtatctgctttctgggcttactgctgagggacaagcagatagggctaaagaaattttcagaagttcgagatggaaagagtacaataccgatgaaattgtatggaaagttataattgatggcttcataaggaagggtcatgcagatatgtgccatgacatgatatccatgttagaacagatgaaatgcaaaccaagtgatgaaacatatgcaatgctgacagaggaattgcccaccagggaatag

SEQ ID NO: 28463 - DNA, 2118 bp, Zea mays
  Peptide Sequence Number=SeqID_70242
atgaggccgtcgcccgcttccagtggagtcggccagaacctggctgcagcggcaatgctcctccgcgcgttgccggagccatcaaccaccgagggacggcgaatccaggaagagctcaagaatctcttagaggacgccgcggtccgacgggccgagagctccgcctcccggaggcaggggtacccctcggaacatcatgccgcgacttcccgattcatgcgggaagcctcggtccacaccgggcgcacgcgcaacacagcgcctgcggccccgggtcgcctcggcagcgagcaccatcaccgcgaccgtcgggcccacctcgacgagagggtgcaccgaggctaccaccccaggcgtggggggcgctacgacagcggggaggatcggagtccctcgcccgaatcacccggtccgcatgctttcagccgcgccatacgccgggcaccgttcccgacccggttccgaccctcgactactatcacaaagtactcgggggggacgagaccagaactgtggctcgcggactaccggctggcctgccaactgggtggaacggacgatgacaacctcatcatccgcaacctccccctgttcctctccgacaccgctcgcgcctggttggagcacctgcctccggggcagatctccaactgggacgacctggtccaggccttcgccggcaatttccagggcacgtacgtgcgccctggaaactcctgggacctccgaagctgccggcagcagccgggagagtctctccgggactacatccggcgattctcgaagcagcgcaccgagctgaccaacatcaccgattcagatgtcatcggcgcgttcctcgccggcaccacctgccgcgacctagtgagcaagctgggtcgcaagacccccaccagggcgagcgagctgatggacatcgccaccaagttcgcctctggccaggaggcggttgaggctatcttcgggaaggacaagcagccccagggccgcccaccggaagaggcctccgaggcgtcaactcagcgcggcgccaagaagaagggcaagaagaagtcgcaagcgaaacgcgacgccgccgatgtggaccttgtcgccgccgccgagtacaagaaccctcggaaaccccccggaggtgccaacctcttcgacaagatgctcaaagagccgtgcccctatcatcaggggcccgtcaagcacacccttgaggagtgcgtcatgcttcggtgccacttccacagggccgggccacccgcggagggtggcagggcccacgacgacgacaagaaggaaggtcaccaggcaggagagttcctcgaggtccgcgactgcttcatgatctacggtgggcaagcggcgaacgcctcggctcggcaccgcaagcaagagcgtcgggaggtctgttcggtgaaggtggcggcactagtctacctagactggtccgacaagcccatcaccttcgaccaagccgaccaccccgaccacgtgctgagcccggggaaatacccgctcgtcgtcgaccccgtcatcggcgacgtcaggctcaccaaggtcctcatggacggaggcagcagcctcagcatcatctacgctgagaccctcgggcttctgcgttttgatctgtcctcggtccgggcaggcgctgcgcctttccacgggatcattcccgggaagcgcgtccagcccctcgggcaactcgaccttcccatctgcttcggagcaccctccaacttccgaagggagaccctcacgttcgagggggtcgggttccgaggaacctaccacgcggtactggggaggccatgctacacgaagttcatggtcgtccccaactacacctacctcaagctcaagatgtcgggccccaacggggtcatcaccatcggccccacgtaccgacacgcgttcgaatgcgacgtcgagtgcgtggagtacgccgaggccctcgccgaatccgaggccctcatcgccgacctggagagcctctctaaggaggtgccggacgtaaagcgtcacgccggcaacttcgagccagcgaagacggttaagtccgtccccctcgaccccagcggcgatgcctccaagcaagttcggatcggctctgagctcgatcccaaatag

SEQ ID NO: 28464 - DNA, 909 bp, Zea mays
  Peptide Sequence Number=SeqID_70243
atgaccgcgtcaaaaaaacgggccccgagccccctactgatcagaggttcgaaggctggcccctcggaagggttcaacagccgcctcagagcactcgggctccgcgcccactactggtcagaggttcgaaggctggcccctcggaagggttcaacggccgcctcaggccactcgggctccgcgcccactactgatcaggggttcgtaggctggcacccgaagggttcgacagccgcctcagacgcagagcgagggatgaccctggcaaccaagtccggctttgggcgccataggaagctccgcctcgcccgaccgcagggctcagactcggccttggccctggaagacgacgaactccgcctcgcccgaccccagggctcggactcggcctcggccttggaagacgacgaactccgcctcgcccgaccccagggctcggactcggcctcggccccggaagacgacggactccgcctcgcccgaccccagggctcggacttagccttggcctcagacgatgggctctcttacgagagggttggccgcgcgggagagcgggacggcgcgtacaggcctctcgccccctcccacgcggacgcttgtaaccccctactgcaagcgcacacgacctgggcgcaggacaacacgaaggccgcggggaccccccggggtcgaaacgccgacaccggtcttggatctccgtcggtttcgcggttgaagccctacgatggtggctcccctttcctccctctgccccaatgtcgcgctctcggttggctaaacgaccaaggttcatggatttgtgggttcggggcacaaggcgctcacatatatactctagaagctggatctagcaccaaatttggtgggtggctatggggtagctggccatggctcgaatggcagtga

SEQ ID NO: 28465 - DNA, 164 bp, Zea mays
  Peptide Sequence Number=SeqID_70244
atggcgttaagacatgacctgcaaatggaagaggagaggaaggcctcaatatcgcatgggtcaaaggcgacaacagacaagggtatgagagaaaagatgaaggcattggagagccagtggtatgagtacaacaaagaatggagttacgtccaagcttacacgag

SEQ ID NO: 28466 - DNA, 402 bp, Zea mays
  Peptide Sequence Number=SeqID_70245
atggagctgatgctccaagcatgcgatttttgggaggctatagattcagacgatgtgaacaacttcgatggcaagatgaggccgtcctttggtctgtaccgtcatatattgtgtatcattgcgaagaagacaatgaagcaggacaggaacgcaatcaagacaatgtgcatggactctgatcatgccacaaggcaagattgtccaccaattgaggtccccaatgatccagtcgatgacgacaaggtcatagccaagtacttacgtgttgtgtcgtccaagttcgcacaaattgtgctctccatcgagacactcctcaacagcatgatgatgtcgatcatggaggtcattaagggcgacgaaggaccgcctcaagctagaccaagtgttgcctcaacatcatga

SEQ ID NO: 28467 - DNA, 450 bp, Zea mays
  Peptide Sequence Number=SeqID_70246
atggctgctctgtcttcggtcttcctcgccatcctcaccaaaaatccctaccgcgccgccgccgtttctcctgccgcgacgccatcttcccctacagccgcgtcgcgccgccgtcttcccctgcagccacgccgcgccctgctgctgctgtcgccgcgccgcgccctgctgctcctgccgcgtcgctccctgctgccgccgccgtcttcccctgccgcgcgcggccttgctccacagccacattgcgccctcccctgcgcggcttgctccacagccgcaccgcctctgcaccatccgggccgcgccaccgcctcgccgccccaccgcatcttcacggagagcgccaagctaccgaacgaggcgctactcgagtgcttttgtgtcgtgtcacagctgtcgctcttcgcgtcgcgccgcccctgcaccagcaccatcgcgccgctaccgtag

SEQ ID NO: 28468 - DNA, 676 bp, Zea mays
  Peptide Sequence Number=SeqID_70247
gtgcagggacaaccatcggtctacctccgtctatgtggtgtttctcggggccaacctcatctcttggccttctaaacgtcagtccgtgatctcccgctctagtgctgaggcggagtaccgggctgttgctaatgaggtgggaaaagttctggtatatgatcccgtatcattgcgtatcattctcgtacccgttcaagagtatccaatcaccaccgaggaaaaagaaaacaaggacgagtcagatatgcttgtggatttgtcaccgtacaaggaagatggctccttggagatcgagtactcttcacttgttgatgtaaggctactgaagggtatcgaaacatgcaacgaagttggatcagcaccggccggaaggccagttaccttgcacaaaaacgaaggcaatattgagagccagaaatcacccttggtgtcaaacaacactaaaggcgaagaacgcgcactaggaaagtcagaaagtacggtctgggaaaaaaatggtgagcccagtgataaggttgatcttctgcaaaatggctgggcaacatggaaacaaaatgctagtacgtcagcttggtcttacagagccctcaggagcagcgcccttggcccgacgatggcaattctacgagggaagaacagccagagtaaaccacccaatcgaaagaactccaagtga

SEQ ID NO: 28469 - DNA, 303 bp, Zea mays
  Peptide Sequence Number=SeqID_70248
atgcacccatccccgcctcctatcgcgctcggcagcctcgccggtgacctcaccgccgagagcgctcgccacctcaccatggtccggccaccccgagcaccctccggcctaattggcccctccattatgattccctatccccgccccctcccctttctctggcacgtgggcctgcgccacggcgccgtccccgcgccatccccgcgctgtttttcccgctggcgggccgagtgggccgcctgcccacgtggccgcgcgctcgcccgcgctcgctgggccaaaaatcccacccagcccagttag

SEQ ID NO: 28470 - DNA, 279 bp, Zea mays
  Peptide Sequence Number=SeqID_70249
atgaaaccagacaagggcagccacgttcaagacattccactccagggagccattataggcaatctggttcaggcagctcgccacaaacgagtggcagttgcaggactgcttgcatacatgtgctgcaagattaatgggaagacagcactgggcactgaaaggaacaaaggcgactttgatgaccccagtgcatggatgctccagtctccaaacatcctccccacgacatcgatattttcaagctctggctccactgtgagatccaccacttccggatag

SEQ ID NO: 28471 - DNA, 1704 bp, Zea mays
  Peptide Sequence Number=SeqID_70250
atggtggcggagccgctggtgcacaaggtgctctccatggcgacgtcgtcgtcctcctcctccaagaaggcgcggccggcggcggcgagcgccaacaagggcggcgcggctgcggcgggcgacggcaggctgggcatcctgtccctggaggtggccaacgccatgtcgcgcgcggcgaacctgtaccgctcgctctccgacgccgaggcggcgcgcctgctcgggccgctctgcctcggctcccgcgccgtgcgcgcgctggtcccgggcgacgacgcgcgcctcctggcgctcgcgctggccgagaagctcgacgcgctgaaccgcgtcgcggccgtggcctcgcgcctcggccgccgttgcacggcgccgccgctcgtgggcttcgaccacgtctacgctgacctcctcgccggccgctccggcgccaccggcgcgctcttcgccgtggcctccgcgtccgacgccgcgtcgctcgtgcgcaggctcgaccgcctcgcggccgccaccgcggctctctacgccgcgctcgaggcgctcaccgagctggagcagtcggcgcggaagctgcccaccgacgaggcccgccgcgcgctggagcagcgggcgcggtggcgccgccacgacgtgcgccgcctcagggacgcctcgctctggaactggacctacgacaaggccgtgctcctgctcgcgcgcgccgcctgcgccatctacgcccgcatccgcctcgtgttcggcgaccccatgctggggctcgacctgctgctggccacgccgtccagcgagtcgtcgaggcaatgcgaccagagccggcggctctccggtccaataacagcaaactcaggccccgtccgaagcgatctcagtgattgcggcaactcagggccggtttccagagtcgatccggacatgtcgcggccagtgaatcttcggtcaggctgtggagcgagcccggggaagatgctcatggagtgcttgagcctgagcagctcggcgtcatggaacgatgggttcgaggacgagttcctggaagattccagccgcatcagcacgatcagatcagggatgctggtgccattcagcagcgagcaggggctgtcgacaacgacgacgatgacgacaacgccaccatccaagagtggcaggattaccagaaaggcggcgcggttcgggcccaagagcacggtgacatcactggcgccgccgtccacagtcggcggctccgctctcgcgctgcactacgcgaacgtcgtcatcatcatcgagaagctgctccggtacccgcacctcgtcggcgaggaggcgcgggacgacctgtaccagatgctgccgtcgagcctgaaggcggcgctgcggaggagcctgaagacgcacgcgaagagcgtggcgatctacgacgcgttcctggcgcacgactggcgggaggcgctggagaagacgctggcgtggctggctccgatggcgcacgacacggtccgatggcaggccgagaggaacttcgagcagcagcagatcgtgatgaaggggaacgtgctgctgctgcagaccctgtatttcgctgaccgggagacgacggaggcggtgctctgcgagctgctcgttggcctgaattacatctgccggtacgagcagcagcagaacgccctgctcgactgctccagcagcctcgacttggatgactgtgtggagtggcaagttcagtag

SEQ ID NO: 28472 - DNA, 252 bp, Zea mays
  Peptide Sequence Number=SeqID_70251
atgcccgtgcagcaaatgtgccaaccggaaaaggaaatcaaagaagtccatggttgttggacaaagatggtgggcggttggctgaggaggagggagaggaggagcaggacgacagacgaggcacagcaggacgacgacatccagcagcaggcggcgcagcaggacgacgatgaccagcagcaggatgacaacgacgctcagcaggacgcctcaggttctggcgcctcaggtcgcctagaggggggtgaatag

SEQ ID NO: 28473 - DNA, 156 bp, Zea mays
  Peptide Sequence Number=SeqID_70252
atgtctgaggataaaaaagttgttgctgaatcgaagctgagcctttctgaggagatgcatctcggcccagtagccatcggcgccgacaggcgggaccgcctcatcagcctctctagtgcgcgcagcggctacaccatcgttgccttgtggggctag

SEQ ID NO: 28474 - DNA, 261 bp, Zea mays
  Peptide Sequence Number=SeqID_70253
atgccgtggttcatggcgagctccctcctcagccgccacgctaggaaatcctcagataatgctcttcaggtccctgtgcgtgatctggggcgttcgctggtgcttaccgaaggcgtccaggtccttgtcgtgtatgggtggagtccagggaatggggaattgcttgtcggagttctatcctccgccgcgggtcgcgctgttcatggccaggtgctctccatgccgcgacaaccggtgtatggaatcgggtgtcgccggtga

SEQ ID NO: 28475 - DNA, 270 bp, Zea mays
  Peptide Sequence Number=SeqID_70254
atgccgtggttcatggcgagctccctcctcagccgccacgctaggaaatcctcagataatgctcttcgggtccctgtgattgatttggggcgttcgctggtgcttactgaaggcgtcgaggtccttgtcgtgtatgggtacagtccagggaatggggaattgcttgtcggagttctatcctccgccgcgggccgcgctgctcatggccaggtgctctccatgccgcgacaaccggatcttaaggccagcagcgcgtaccggttcacttaa

SEQ ID NO: 28476 - DNA, 231 bp, Zea mays
  Peptide Sequence Number=SeqID_70255
atggcgaccagaggggcgcagggagaggaggctgaggaagatccgattcgccgtcaagccaccatacggaccgagcagggagggggagggaaggaagtacctgcgggctgggcgtcccgttggcccccgcatccgctcgcgaggccggcgcgccgcagaaggccctggcgagcggccggatccgattcgtcgccgccgcgaagcatctgcgcgggagataccgaaatctga

SEQ ID NO: 28477 - DNA, 426 bp, Zea mays
  Peptide Sequence Number=SeqID_70256
atggatcccaataagggcgagactgccggcggcggcggcggcggcgagggcgacctcgacctcaacctctccctgcagccgatgttggcgcccgagccggagccgccgggttacttctcctgcacctactgcgacaagaaattctactcctcgcaggcactcggcggccaccagaatgcccacaagttcgagcgcagcgtggccaagcgcgcgcgagagctggctgccgctggccgcgcgggccacggcggcgagcgcgccagtggggccgaggaggaggcgaggtccgtgattgggaaggaaatgggcattgcgaggtcggtctcggcaccgagctcctcgtcgtcgcaccagatcagggcgccgccggaggcgagcaggaataataatctcgccgacgatatcgacctctccttgaagctatga

SEQ ID NO: 28478 - DNA, 174 bp, Zea mays
  Peptide Sequence Number=SeqID_70257
atgtggagctatttttacaggatcacctattcaccccctctaggaggcttcaatgccttccaggaggtcatcgccgacttccatccagattgtggggaagaaggtgtcaagaacgcgcaaggcccctacctatcatacaaactgttggagtttcgaaccagctccgacaagtaa

SEQ ID NO: 28479 - DNA, 162 bp, Zea mays
  Peptide Sequence Number=SeqID_70258
atggcgccttcgcccctcctccttgcggaaagcgttcttggatccgagcaggagggggactgtcttacgacgggggagccagcgcctagcttggaccgttattccgagtcgggcgacgggcgcggcgtctacgacatgggagggcagtggggctccctctag

SEQ ID NO: 28480 - DNA, 623 bp, Zea mays
  Peptide Sequence Number=SeqID_70259
atggggatgatggggaccgtgtggggggatgacgatgaggttggtgggggagagttagagccacaaggtagggattctagggctgatgaagagtcaccagaagacgacgaactccgctccacccgacccagggctcggactcgggctatgtcccggaagaaggcgaactccgctccgcccgacccagggcttggactcgggctaagtcccagaagacgacgaactccgctccgcccgacccagggctcggactcgggctcagccccgaaagacagcgaactccgctccgcccgacccagggctcggactcgggctcagccccggaagacggcgaactccgctccgcccgacccagggctcggactcgggctaagtcctagaagacgacgaactccgctccgcccgacccagggctcggacttgggctcagccctagaagacgacgaactccgcctcgcccgacctaggggctcggactcgacctcggccacggaagacatactcgacctcggcttcggaggagcttccacatcgcccaacctagggcgcagaccagccacgtcaacaggaggcgccatcatcaccctaccccgagctgactcgggccgcagggaacaagaccg

SEQ ID NO: 28481 - DNA, 483 bp, Zea mays
  Peptide Sequence Number=SeqID_70260
atggagggggagaggaatgacatcaacgtgcagaggtcagacgagatcctcatgccgggtttccggttccatcccaccgacgaagagctggtgagtttctacctcaggaggaagatccagcagaagcctatctccatcgagcttatcaggcagctggacatctacaagtatgacccatgggatctcccaaagcttgcgagcaccggtgagaaagagtggtacttctactgcccaagggatcggaagtaccgcaacagcgtgaggccgaaccgagtcacagcggccgggttctggaaggccacagggacggacaggccaatctactcgtccgagggcaccaagtgcgtgggcctcaagaagtccctcgtgttctacagagggagagcggcgagagggatgaaaactgactggatgatgcacgagttcaggctcccctcgctcaccgaccccaagcgtccggtcgacaagaccattccactcaac

SEQ ID NO: 28482 - DNA, 654 bp, Zea mays
  Peptide Sequence Number=SeqID_70261
atgtggcaacggggagcaatcgccggtgttcacgcgtttggttcacaatgcatacatggaatagcgaagaagaggctatatgagacaggagagagagctattaccggctatcggccacatagttccccgaccatggtgagcaacgacgaccacctatgcctgcgtacgccgacgagcaattcctgccatccgatgcatcacccagttctagatggtaagggattggacccgagtgatcctgcacatgcccccatcacaaattggcctctaatcaccggcgccagtaagctccacgtgcggcgccacccttctttctctattcccagctcaacgcagtcgctcactccctcggttctttctctgctcaggatcaaagtggacaccgagataggcatggcggaacgaccgaaacagccaccgcaaccaagctttatacccagaggcctccagcggattcgtgcgcagcacaaccgaattttgttcacggcatgcgcgatctgcgggggagatagagttgaccagtatgacccacgtggcggtgttagcactacagcgcacggatgccagatgagcgaccgaccatgcggccccacctgccagtacccgacgctcgcgcctgcgatttgggccgagcgcgtgctaggcggcacgtag

SEQ ID NO: 28483 - DNA, 171 bp, Zea mays
  Peptide Sequence Number=SeqID_70262
atgggtaggccaaagggcgccatgtggcaaggaaagacagcacatcccaacggcgtcaaggtcatccagcaggcggcgcgcctgctgggtctgctggcgaatagagtgaccaaggccaaggacgggggctcctccatcaaacgcagatggaaacctggggtcgggacctaa

SEQ ID NO: 28484 - DNA, 351 bp, Zea mays
  Peptide Sequence Number=SeqID_70263
atgtctggtgctataatggttcacacatccgagatgcctcccaaaggttcaagatggaaagatatgtttgaacctgttgtgaggcgtgcccaattagttggcgttggaattcagatccttcaacagtttgtttgttataaaatggtgttctatactacaccccgcaaattctcgagaatgccggtcactgagacaaagggaatgctgcttgaagtcatcaccgagttctttggagttggttctaagaagaggttgcaaaagactaattcctttggtaccaacttttgcactatggattgtatagacttagagggatctcaccaagaagccctagtaactttcgatctataa

SEQ ID NO: 28485 - DNA, 378 bp, Zea mays
  Peptide Sequence Number=SeqID_70264
atggccgtgcgcgccatcgatacgccgctcctcctgtgcaccatggtggtggtgctgaccggcctcgtgtccccgtccaccgccgggctcagcctggacacggtgagggacttcctgacgcgggaggaggacaccattgtgttcagcctcatcgagagggccaagtacccgctcaaccggccggcctacgaccccctccactccgccgccggccgccgcctcaacgcctctttcgtcgagctcttcatccgcgagtccgaggccgttcagtccaagcctggcaagtatagtagaaacagaattcagtttttgttttcccgaacggtgaagaagaaccggtcgttgttgagcagcattctttttcgtgctgctgattag

SEQ ID NO: 28486 - DNA, 527 bp, Zea mays
  Peptide Sequence Number=SeqID_70265
atgggccgtttcctccccttctggcccatttacccctgttcaccaccgcgctgcccacctggctcacagctccgctctctagttcaccgccatgcgggccatcttggtttccaccatccgattccgctgcgcgctcacctcttcggcgttcggtgcctgaccaacggacctcgatgggagctcggaacagagcactgggcgcgatgtggtgggcgatgcggcgggcgaaaccaggggatgccaccgtcgcaatggccgaaatccgcgccgcccggggactcccaaaccgtggcgcgcatgctcaagacccactcgcagctccagggggccttcgttttcttcctcctggcggactactcattggtgagactggagctctggcttggcggttggccgcgcgccggtgatggtctgccgtggcctgtgcttgcacgccgctccggcgggttcgccgtcgtcgggtgggcggcgctgccgcctgggcgctctggggttgggggcgattacgctgggtcgtcggatcgtgg

SEQ ID NO: 28487 - DNA, 297 bp, Zea mays
  Peptide Sequence Number=SeqID_70266
atgccctcatcgtcgctgtcgtcgccgctctgctccacggacgagccgaaggagttctcctcatttgaggagacctccgacccctcgagccttgcgcgctcaacggagcggatgtacgtccacacctcagcggccagcccctgggagtcgcccgagtcatcgaaagacgtcggggagaggcgagagccagcgatccctcagactcggaggaaacctcctcctccgagtactcagaatctccgaagtcctctgagggaggacattgttggcaacttgttctcaaatgcttcggattaa

SEQ ID NO: 28488 - DNA, 318 bp, Zea mays
  Peptide Sequence Number=SeqID_70267
atgggcaaagacaagagaagtcgaggctcaccccgtcgtgccggcgacaagcggaagcgtgatccaagtcctccctcaaaggacttcggtgattcagagtactcggatgaggagaactccatcggctcgtttgaggagcggagcggcgatgatagcgacgatgagggagatggcggcggcgacgatagcggcgatggtgacgacgatagtggcaagggtggtgaaggcgacgacggcggtgacggtgacggtggcggcggtggtggcaaggacggcagtggcggcggcaaggccagtggcaaagcgccactggtttaa

SEQ ID NO: 28489 - DNA, 369 bp, Zea mays
  Peptide Sequence Number=SeqID_70268
atgtcacgtggcggtgctctgactgatttgggggaagtgggaaattgggaggctctggtggataattcgaggcaagggctggtggccaactccggcaaggctatctggaccagtcgtgaggcaagtgggtacggcggccagcacctggtctcatccatggtgaagatcttttcaccccgatgtgttatccgggcaccaccgggcacaaatcgcatcgccggtgcgaatccaggcgcgggggtcaccggtggcaaggtgcactgcaccacgatcttcatcagttactatacaatcaaaactctattcagtctgtctgacagagccatttgcagggcattaatctccgatttctatgtggctactcgttaa

SEQ ID NO: 28490 - DNA, 186 bp, Zea mays
  Peptide Sequence Number=SeqID_70269
atgaaggtgagtgtgttgactcccttctggctgctgacctcgttgcgtttggtggtggtggtggaggctgttgccaagatgcttggggttgacttgcctaagcaacagaagctgcagggtgattgccaacatattctggaatataaggcgagtgcttctgctatttcctttggttctggatggtaa

SEQ ID NO: 28491 - DNA, 579 bp, Zea mays
  Peptide Sequence Number=SeqID_70270
atggatcggcgagctgcccacgagatcaggcggcttgaggataccccgcacacatcggtgagcaataaatggttgcgcggtcaccgatccctcccgacagcgccacgggaagcttcactacgacttgggaattccgattggcggtgcgccagaggtggggagttggtacagaggcgggttaccggtggcggcttcctctgcacccggtgcacagcggcgatagagtttgggcttgtagtgcggcgaaaacgggtccttagcaagcgcggcaggtcgtccgtacttgtagccgaggcgaggcggacggttgcaaagtcagcgggctccaacggggatctcggccatggctggtactccgtcaacgccccgcgattgttgggggagatctacagtggccctgagcccacgcgtcagtggcggaggaaacctggtcaagcggctgtccgcccgggtccatgtgacagagagggagatcgtggccagctggggcgatttgttcgggattccgttgacgcatccgcgctcttcgcggagacgacggacctgacaaccgatcccacgtgcaagcgtctcggctga

SEQ ID NO: 28492 - DNA, 243 bp, Zea mays
  Peptide Sequence Number=SeqID_70271
atgactacttcgcgcaatggtcgactacaaaagcgcggtgatcagatgaacagtgaggaacagtgcgcgcagagtcagagccgcaggtatcgggctctcctcccccaatccattagatttagccacttccctagattgacaacttattatttctacctctggcaaaaggtggaaaacttggatgtattgaatgtggggtggttgggctacttttcgtccggtgtaaaagtcatactggaatag

SEQ ID NO: 28493 - DNA, 261 bp, Zea mays
  Peptide Sequence Number=SeqID_70272
atgagcagaccgccgcccgcggtagcgcgcctcttcatctccgccgcaagaaacaacggcccagcctctgacatggggcccgggcccacaagtcatacggctgatgtgcaggtctccgggagccgccgacgacccccgccgcctgtgttcgtggccagggtagctccgaccacctccgacgccgacccgcacaccgacgtgaccgtcgtgacctcccggacgtcactgaccaccccgccggagctctactgccgccgataa

SEQ ID NO: 28494 - DNA, 765 bp, Zea mays
  Peptide Sequence Number=SeqID_70273
atgccttatggcaagggagaagaagatgttcaggacggtgatgttgagtaccgacctaggggtactcatggttttattaagcgtgtgtatggtgctgccaataagctcagcacagagattgagattggagtgctcaaatctcattttgaaagaaagatctgtccccagcttgttgttcacttgatgctccactatagcttagatcatgacttagcagccttcttccatggacctattcaaggaataactaagcttaaggtactgtacctaagctccttggatattgagctgagattgacaagtatgaatgaatcagatagggagtcattcatcaagtacatctgccaacgtagagttgtagttgtggatgactggaggaacacttatggatttgttcgaggcgtgtacgacgctttgtttgatgagcagaagcaggctgttaggctcattaagaagggtatagcgaagctggcctgtatcatttggaaagagaagcaagtggccagcgtagagatatacgaagatgtgccttgtaatgataaccagttcactgaagttctgtctatgttagctcttttgatgaggtgtgaggatgaaaacttttccttggtagaggtgttgaatgatagctctagagcctgtggtgttttaagtggttcacaaaccatcaagatggctgatccagatcgtggtgtttgccttcttctgacatcaatgaatacaaagtttactaagctcgcgatagttcagaaatcaaggaattga

SEQ ID NO: 28495 - DNA, 471 bp, Zea mays
  Peptide Sequence Number=SeqID_70274
atgggcgtctgcgtgtccaaggtcgcctgctgttgctgctaccgccggcgcgagccgcacaacggggttactaacgacaggactgatgctgggtttgcggtggagaacatcgtgtctgagcagggtgagaaggctcccaatgtggtgtacaaggggaagctcgatgcccagcgcatcgccgtcaagcgcttcaaccgctctgcctggcccgacccacgccagttcctggtttctgggtcatcagcgaaacatcactcagaaggctcgagaatcgatggaatacagttctgcgattcttcggacagtgaggatgactgtccagtgtgcctagaagaatatgatttcgagaacccgaagatcgcgttgcaatgcaaacataatttccatcttagttgcatttacgagtggatggaaagaagtcaagcctgccctgtctgtgcaaagattatgttgttcaatgaggatgaatga

SEQ ID NO: 28496 - DNA, 297 bp, Zea mays
  Peptide Sequence Number=SeqID_70275
atggaggaaagcgagtttcagaaacatatggaatcggcaagactagctactcaagtatctgttgcaagcccaagtagctcacaggggcttcccacatatgcaagggcaaatcaggaggaaactgatatggcagatgttagggaaaaaatgaagagggcaatttctgttcaaagatatgtgcattatattgtatatgcaattgctattgctatcaatataaatttaagaaacttcattaattcaggcaatacaactttggagaatgcgagttgtgtttctgcctctcagccagtgtag

SEQ ID NO: 28497 - DNA, 189 bp, Zea mays
  Peptide Sequence Number=SeqID_70276
atgaaaccagacaagggcagccacgttcaagacattccactccagggagccattgtaggcaagccggttcagacagctcgccacaaacaagtgccagttgcaggactgcttgcatatatgtgctgcaagattaacgggaagacaacactgggcaatgaaaggaacaaagggttaatcaagaggaagtaa

SEQ ID NO: 28498 - DNA, 202 bp, Zea mays
  Peptide Sequence Number=SeqID_70277
gtgcggcgtcccctccatctcaactccaccgactaccgctcttcttgctctccgccggaggcctccttccaggtgtaggtgcggcggcttgtcactggagtttaggtccaaagctgattgcttggatgatttggattttgcaattatgcatgagatgagcaaattgtcataccgggttatggaggaagatgttatccgttaa

SEQ ID NO: 28499 - DNA, 447 bp, Zea mays
  Peptide Sequence Number=SeqID_70278
atgtcttccgaagatttctctagctgcttggattacacatacctaaagggtttgtttctaagcaaggccctgaagaacaagagaaatgttgaggaatttgaaaatgaagtaaacaaggtaaggcaagcatctactgaaacatctatcgaccttagcaccgctcaggtgagaatagatgatcttaaagatgaagtgaatcacatgaggcaacttaatgaaaactatcgaatcctggtggcaaactgttacaccctcggcaacagatgctataatgagatattagatggaaactgcaaggctagaaagccaaaggtgatcattgaagtacagcataccaaagccaaagctaaggatgatcctattgaagccaaaatagtagctgtcagggctgcaaagaaggccgtagatgatgttgttctcaagatttgtgagcaaatctcgaagtga

SEQ ID NO: 28500 - DNA, 1875 bp, Zea mays
  Peptide Sequence Number=SeqID_70279
atgtggcttgggcaaagccacgtgggggcatggtcgggcacgcgacgcgcgcgccagggtggttcgggtgatggaccgttgggtgtatactcatacatgggtgacgcggttatctctgccaaaaatggccagcaagcatgggcttatcttgaagataagggaaacaacatagatcttgttttgactgaggtttttatgcccggtgtatctgggatttctctgctgagtaggatcatgagacacaatattttcaagaatattccagtgattatgatgtcttcgagtgatgatatgagtacagtctttaaatgtctgtcaaaaggtgctgttgactttttggtcaagcctatacgtaagaatgaacttaagaacctttggcagcatgtatggagacaacggtgtcacagctccagtggtagtggaagtgaaagtggcattcagacccagaagtgtgccaaatcaaaaggtgtcaatgaatccggtaacaacagtggtagcaacgatgacgaagcaggcatgggacttaatgcaagggatgacagtgataatggcagtggcactcaagatttaaacgatctagtggggttgggtggcgttcagagaatggcacagaactcgtggactaagcttgctgtggagatcgacagtccacaagctacgtctctggatcagttagccgatccacccaatagtacctgtgcgcaagtaatccactcaaagtcagagatatgtagcaacagatggctaccagataagagcaacagaaactgcaagaagccaaaaaacactaatgatgactttaagggaaaggacctggagataggtggccctgaaaatttatatatgggtcaccaatcttccccaaatgggagatccatcaaagcagcagatcatgaaaacaattcaaaggaatcaatgatggaaaatttagaggagccaactgttcgagctgctgacctaattggttcaatggccaaaaacatggataccccacaggcagcaagagctgcagaagatacccctaatttctcttccaaagtgccagaagggaaagttaccacttttattgcaaggtaccacacatctgcggcttccaatcaaggtgggacaggattggtaggtagctgttcgccgcatgataacagctcggaggctgtgaaaacggattctacctacaacatgaagtcaaattcagatgctgccccgataaaacaaggctccaacggcagtagcaatgacaatgacatgggttccactacaaaggatgttgtgacaaaacccatgttgccctctgctattaaggctaatggatacacatcagcgttccatcctgtgcagcagtggatggttccagctaatgcaacagcagggaaaacgaaggctgatgaaaatacagccagaaatcactgcgtccattttgagaatggtgggtcaggagccctgcaatgtggttcctccaacgtatttgatcccccacttgaaggccaagctacaaataactatggtggtgtgaaagccgggagcaactcaggcagcaacaaggggcagaacaatgggagtacggctgctgcaaatgctggactggcagaaacggagatacaggccatggacaaaagtggagttggaggtggcaatggcaatggcaatgggagtggcagtggcagtggcaatgacacatatgtcagacggcttgctgcgaacatgacaccgcgacaagcacagctaaagaaatatagagagaaaaagaaagaccggaactttgggaagaaggtgcggtaccagagcagaaagaggctagccgaccagcggccacgggttcgtggacagttcgtcaagcaagctgtgcaaaatcaggacggagctagagagagatga

SEQ ID NO: 28501 - DNA, 696 bp, Zea mays
  Peptide Sequence Number=SeqID_70280
atggagagagtctgccacgtcattcatctgatgatagtactcgatgatagagcggtcgccctgcacgaaggtggcgttgaggtgcagagcatgggccttagttgccgaggaactattcctctcgatggcaacctaggcctagcgcacaatgccaccacactcatggacgacatcctagagctctaccgtaacgggcctcaggatcttggacaggactatactatccatccgtcgcaaggagggtatgtcgtatcggtgaggacatggtcaccgagggcgaaacgttgcaagggaggaggacgaggtcgcgccaacagatgtagaaggttgggtcgaggaggacaggaactagctagggaccagatgttctatatacccgtcgcttgggcatggaggatggctacgaccacaactttgtatgctaccggtggatcaaccacagttcctataggtaggttgttggccggatggggagtagaggggacaatggagacagacatgacgctgaccgtcgctgccgagagcaaagcaaaggttggcatagagggctctattggcggcagttgcccatcaacagaggtgaaggcagaggctgtgaagtacgacaatgggtggctagcgccagggccaacacctgatgcaggggcacaccacagttgtggcagcgtaggggaggagagggctgccaacggctga

SEQ ID NO: 28502 - DNA, 267 bp, Zea mays
  Peptide Sequence Number=SeqID_70281
atgggagacctgatgggagatggcggtatcgcacaccacataactaggaacaatagcacaacttggggcatggtcggggccacttggagcgccgaggccgcaagtggattcgctggggcactggggccacaggcaggagcggtggaggcgacaaacctgcaggggaaaaatagaggtggctatctagagggagacatggggtcagtatcgagaaagacgtctagctctatgaggagatcgtcggggctgagggatgactatcgatag

SEQ ID NO: 28503 - DNA, 318 bp, Zea mays
  Peptide Sequence Number=SeqID_70282
atgcctgcgaatgaccaccatcccaacggcctgctccaggagtcagcccctggactccagcatgatgatatggaaaaccagcagcagcaagtctgctgggagcgcttcctcctaaaggacactctcaacgtcttgctcgtggagagtgatgcttcaaccaggcaggttgtcagtgccctgcttcgttgctgcatgtaccaaggcttgccattttcgagtcgtagtgtaggggcaaggcatgctgagttgagtgctatgcgtaaggaagaaggtgtgggcattgtagttctatcaagcttcctgccattgtcacactag

SEQ ID NO: 28504 - DNA, 399 bp, Zea mays
  Peptide Sequence Number=SeqID_70283
atggtacatgattcgaagaagaggaagagaaaagtgactacaaagcaaagcaaagtcccgaagatacaggctgagtcgacacctcaggtttcagagaaaattctggctacacccgatgctaaggtggcggctgaagttgaggaactcccttctatggaagccggagagacgaagatcagagaagctattgccttgatagcacaaaaagttactcctttggagctgctcctagagagcgaagaagaggaagaggaggagcgaatagctccggtaatgagcccgttcttcgatatcgatgaagatgagtctgaggatattgtctgtacaatattagcattaaagggttctacatcgcctgctgcaaatgtgattataccaagtagttcggagtttagctag

SEQ ID NO: 28505 - DNA, 285 bp, Zea mays
  Peptide Sequence Number=SeqID_70284
atgacgtttcatatcatgcgcgcaccatcgtttttgccatcgtcagacatcccattcgtcttctcggccttaatcctgttcttcctccccaacctgctgcccccgcccacggtcgcagccgtgagccgaccgacgctcgtcgatgtgggtatggggcaagttggtcatgctcctggccattctccgtgcgtgtcgtcgaggagggcatggtggcgtctgccacatttaggttatcttggcaatgaggagtctgggtctaagatattggacaaccaaggcccgtag

SEQ ID NO: 28506 - DNA, 315 bp, Zea mays
  Peptide Sequence Number=SeqID_70285
atggtggccaagtctcggacggaggagacatcaccagagctacccaccggcacccatggcggcgcggcgacggagtgggagaagacggcgtgtgcacgagggagaagagtggcgaatgtgggaaggagaggagaccagcgcaaaggaggctggcatgctcggcgcaagaaaatgaagcagggcatggctacgggcttgcccacgtgcagagacaaggactgtaaaaatcagtggcaaaccaaagtctacccatgtcaaaacatgtcaaacgactttaaaagcttgccaactttttacatggtgtacctcaagtaa

SEQ ID NO: 28507 - DNA, 276 bp, Zea mays
  Peptide Sequence Number=SeqID_70286
atgcttcggtgtcgtagacatggaggaggagagcggcgcggcggcggcggccgcagcggtggaggagatccggtggctgccggccccgtgggaaccgagcgctccgagagctgcgcctgcctgatggccgtgcagggcgcgagcacggccctggccgggggcaccgcggcactggtgaccatgccgctggacaccgtgaagacacgactgcaggtgatggaggccgacgcggcggcgcggcccacgctggccagcaccgtgcgcgggctgctctag

SEQ ID NO: 28508 - DNA, 1434 bp, Zea mays
  Peptide Sequence Number=SeqID_70287
atgatcataatcacaaataactcgctactgtcggtgctggccgggtcggcggacccggcgcgggtggcggccggcgaggtgctggtcaacgggctgcccatggacgccgccatgttccgccgcgtgtccgggcacgtgccgcaggacgacgcgttgctcccggggctcaccgtcgaggagtcgctcgtgtacagcgcgcgcctgcggcttcgctccggcgggacgtcgtccggcgccgaggaccgggcgcgggagctcatggcggagctcgggctgggccacgtcgcggcgtccagggtcgccgacgtgtccggcggcgagcggaggcgggtctccatcggggtcgagcttgtgcacgacccggccgtgctgctgctggacgagcccacgtcgggcctcgactccgggtccgcgctccacattgtcaagatgctcagggacatggccgccgcgcacgccaagaccgtcgtgctcaccatccaccagccggggttccgcatcctcgagctcatcgaccgcgtcgtgctcctcgccgacggcgccgtccgccaccacggctccctcgacttcctccactcacgcctcgtcgccactggccacgccctccccgcgcacgtcaacgtcctcgagtacgccatggagaccatcgactccctcaagcccgacgtcgccgtagccactgcggtcaccgcgatcaccgccgcctcctcagcgaaccgagacgacgacgtcgcgccggtgctaacagtaccctcgtccgcgcggcgcgcggggtacgccaactcgccggcggcggaggcgcgcattctggcggggcggttcgccaagacgatgctgcggacgccgcagctgttcgcggcgcggatggcgcagtcggtgctggccggcgcgttcctgggcagcatcttcctgggcaccaccgacctgcagtcccgcctcggcttcttcgccttcaccctcacctacctgctctcctccaccaccgaggccctgcccgtgttcctccaggagcgccgcaccctggagcgggagatctcccgcggcgcctaccgcgtgtcctcctacgtcgcctccaacgccggcgtcttcctgccattcctcctcgccgcggcggtgctctacgcggcgcccgtgtactggctcgtgggcctggcgcgcgagcccgccgccttcgcctacttcgtgctcgtcgtgtggctcgtcatgctcaccgccaactccttcgtcgcctgcctcggtgcgctggtaccgaactacatcgtggggaactccgtcgtcgcgggcctcatcggctgctttttcctcttctccggctacttcgtggccggcaagaacatcccgcgttactgggtgttcatgcactacgccagcctgttcaagtacccgttcgaggctctggtggtgaacgaatacggcggtgcgcgtggcgcttga

SEQ ID NO: 28509 - DNA, 270 bp, Zea mays
  Peptide Sequence Number=SeqID_70288
atggctacaaagtggtttgttttgcatccaatcatgcagcttgagttttctgtgtacagacaactaaataagctaaaccacctattacatcaccgttacacatgtgatcaacgtggaggtattcctgttccgatcatcattagggcgagaggttatccactcttttctattggctatctgtacgtgtacttcccctttccatctaaaaagccactaaaagcaggtccagaggtgctttcagatttgcactacaagaaagtcagcttttag

SEQ ID NO: 28510 - DNA, 2445 bp, Zea mays
  Peptide Sequence Number=SeqID_70289
atggcggcggccgccatgtgcccggggccgatgaaggcgacgtcgcagggggcgttccagggcgagaacccgctggactacgcgctgccgctggccatcctgcagatctgcctggtcgtcgtcgtcacccgcggcctcgcctacctgctccgcccgctgcgccagccccgcgtcatcgccgagatcatcggtagagaagcgacgacacggagagaagagaatgagaagggaggaatcctgctaggcccgtcggcgctggggcggagccacaggttcctgcacgccgtgttcccggcccagagcatgacggtgctggacacgctggccaacatcggcctgctcttcttcctcttcctcgtgggcctcgagctggacatctccgccatccgccgcaccggcaagaaggccctggccatcgcgctggccggcatcagcgcgccgttcgcgctcggcatcggcacgtcgttcgcgttccgcgccaccatcgtcaagggcacgccgcaggggcccttcctcgtcttcatgggcgtggcgctctccatcaccgcgttcccggtgctggcccgcatcctcgccgagctcaagctgctgaccacggacctcggccgcatggccatgtccgccgcagcggtcaacgacgtcgccgcctggatcctcctggcgctcgccatcgccctctcgggctccggctcgcccatcgtctcgctgtgggtgctgctcaccgccgctggatttgtcgttgctgtctcgctcttccttcgcccggtgctggcctggatggcgcgccgctcccccgagggcgagccggtcaaggaggtctacatctgcgccaccctcgccatcgtgctcgccgccggcttcgtcaccgacaccatcggcatccatgccctgttcggcgccttcatggtggggatcgtggtccccaaggacgggcctttcgccggcgtcctcatcgagaaggtggaggacctcatctcggggctcctcctcccgctctacttcgtctccagcgggctcaagaccgacgtggccaccatcaagggcgccaagtcctggggcctgctcgtgctcgtcatcgctaacgcgtgcctcggcaagatcggcggcacggtgatcacgtccctgctcgtcaagatccccgtccgcgaggccgtcacgctcggcttcctcatgaacaccaaggggctcgtggagctcatcgtcctcaacatcggccgcgaccgcaaggtgctgaacgacgaggcgttcgccatcctggtgctcatggcgctcttcaccaccttcatcacgacgcccatcgtgatggccatctacaagccggcgcggcgggcggtgccctacaagcgccgcacggtggagtgcgcggcgggcgacgcggacggcgagctgcgcgtgttggcctgcttccacaccaaccgccacatccccacgctgctgaacctggtggaggcgtccaggggcaccgcgcgccgccgcctcaccatgtacgcaatgcacctggtggagctctcggagcggtcgtcggccatcagcctggtacagcgcgcgcgccgcgacggcatgccctttttcagcggcggcaaggagcagcgggcggagcaggtggtggtggcgttcgaggcgttccagcagctgagctccgtgcgggtgcgcgccatgacggccatctcggacctggacaccatccaccgcgacgtcatcgacagcgccgccgacaagcgcgccgccatcgtggtgatgccgtaccaccgggcgctcggccacgacggctccttcgcgtcgctggggtcggcgtaccacgccgtcaacaagcgcgtgctccgcgaggcgccctgctcggtcgccatcctcgtggaccgcggcctcggcgggcacgccccaggtgtcgacccaagaacgtgtccttctccgtcgccgtgctcttcttcggcggggccggacgaccgcgaggcgctggcctacgcgacgcgcatggccgagcacccgggcgtcgccgtgacgctggccaggttgcagccgagccgaccgccgctgctggacgaggccgagagcgcggccgacgaggccgcggtggaggcgttcaaggccagggtcggggccgtgaaggacgggtcggtgcggttcgaggagccggaggcgtgcaccagggagcaggtgctggagaccatcgagtcgctgtccgggttcaacgtgttcgtggtggggcggatgccgccggtggcgccgctggtggagaggcccgacgagctgggccccgtcgggagctacctggtgtcgcccgagttcaggacgtcggcgtccgtgctggtgatcaagaggtacgacccggccacgaaccccaagagcaagaggttcgaccccaaggcggggccgccggtggcgacggaggaggacgtgctggacgaggagatggggatggggcgcgccaccgtggtgcccgtgtga

SEQ ID NO: 28511 - DNA, 2388 bp, Zea mays
  Peptide Sequence Number=SeqID_70290
atggcgaaggtggcgtcgaacggggcgttccagggcgacaacccgctggacttcgcgctgccgctcatcatcctgcagatctgcctcgtcctcgtcgtcacccgcggcctcgcctacctcctccgcccgctccgccagccccgcgtcatcgccgagatcatcggaggcatcctgctgggcccgtcggcgctgggccggagcaccaagttcctgcacaccgtcttcccgccggcgagcatgacggtgctggacacgctggcgaacctcggcctgctcttcttcctcttcctcgtggggctggagctcgacatcgccgccatccgccgcacggggaggaaggccctggccatctccctctcgggcatcgccctcccgttcgcgctcggcgtcggcacgtccttcgcgttccgcgccaccgtcgtcaaggacgcccgccacgcgccgttcctcgtgttcatgggcgtcgcgctctccatcaccgcgttcccggtgctcgcgcgcatcctcaccgagctcaagctgctgaccaccgacctgggccgcctggcgctgtccgccgccgcggtcgacgacgtcatggcgtggatcctcctcgccctggccatcgcgctctcgggctccggctcgccgatcgtctcgctgtgggtcctgctaaccgccgccgcctttgtcgcagccgccttcttgctcctcaaaccggcgctcgcgtggatggctcgccggtgccgcgacggcgagcccatcaaggagctccacgtctgcgcgaccctcgccatcgtcctcgccgccgggttcgtcaccgacgtcatcggcatccacgcgctgttcggcgggttcgtcgtcggcgtggtcgtccccaaggacgggccgttcgccggcatgctcatcgagaaggtggaggacctcgtctcggggctcttcctcccgctctacttcgtctccagcggcctcaagaccaacgtcgccaccatcagtggcgccaagtcctggggcttgctcgtgctcgtcatcgccaacgcgtgcattggcaagatcggcggcgcggtcgccaccgccctgctcgtcaagatccccgtccgcgaggcggtcaccctcggcttcctgatgaacaccaaggggctcgttgagctcgtcgtgctcaacatcggccgggaccgcaaggtcctcaacgacgaggcgttcgccatcatggtgctcatggcgctcttcaccaccttcatcaccacgcccatcgtcatggcggtctacaagcccgcgcgcccgtcggtgccgtacaagcgccgcaccgtggactgcgcgcccggggacgcggcggcggacggcgagctccgcgtgctcgcctgcttccacaccagccgcagcatcccgacgctgctcaacctcgtggaggcgtcgcgcggcacggggcgccgccgcctcgtcatgtacgccatgcacctggtggagctctcggagcggtcgtcggcggtcaccatggtccagcgcgcccgccgcaacggcttgcccttcttcaacagcgccgacagggaggggcagatggtggtggcgttcgaggcgttccagcagctgagctccgtgagggtgcgcgccatgacggccatctcggacctggacaccatccaccgggacgtcatcgacagcgccgccggcaagcgggcagccatcgtcgtcatgccgtaccacaaggcgctccagcaggacggatccttccagtcgctcggctcggcgtaccacgccgtcaacaagcgcgtgctccgcgaggcgccctgctccgtcgccgtcctcgtcgaccgtggtctcggtggccccgcgcaggtgtccgccaagaacgtgtctttctccgtcgcgatgctcttcttcggcgggcccgacgaccgggaggcgcttgcctacgtgacgcgcatggccgagcatccgggtgtcgccgtcacgctggcaaggttccgcccgcactccgacgaggagagcgccgacgacgaggcggcggtcgacgctttcaagtccaaggtcgacggcatggtgaaggatggatcggtgcacttcgaagagcggcaggggtacaccaaggaggaagtggtggagaccatcgactcgctgtccaaggtcaacgtgttcgtggtggggcggatgccgccgacggcgccgctggtggagaatcccgacgagctgggccccgtgggcagctacctggcgtcgccggagtccaggacgtcggcatccgtcctggtcatcaagagatacgacccggcgacgaacccgaaaagcaagaggttcgaccccagcgcgaggccgccggcagcgacggaggaggacgtgctggacgaggagatgggcagcagatccactgtggtgcccgtgccgtggtcgccgatgaacgacgtggcctaa

SEQ ID NO: 28512 - DNA, 813 bp, Zea mays
  Peptide Sequence Number=SeqID_70291
atggcgcctcctgttgacgtggtcggtccgtgccctgggttgggcgacgtggaggctcctccgaggccgaggtcgagtctgtcttccgaggccgaggtcgagtccgagcccccgggtcgggcgaggcagagaccgtcggctaaggccagggctgagtccgagccctggggtcgggcgaagcggggttcgtcgtcttccggggctgagcccgagtccgagccctggggtcggccgaaatggagttcgtcgtcttccggggctgagcccgagtccgagccctggggtcgggcgaaacggagttcgtcgtcttccggggctgagcccgagtccgagccctggggtcgtgcgaagcggagttcctcgtcttccggggctgagcccgaatccgagccctggggtcgggtgaagcggagttcgtcgtcttctggggctgagcccgagtccgagccctggggtcgggcgaagcgaagttcgtcgtcttccggggctgagctcgagtccgagccctggggtcgggcgaagcggagttcatcgtcttccggggctgagcccgagtccgagccctggggtcgggcgaagcggagttcgtcgtcttccggggttgagctcgagtctgagccctggggttgggtgaagcggagtttcctatggcgcctgaggctgggcctggctgctgtcagcttcactctgtcgagtggcacagcagtcggagcggcgcaggcggcgctgtcctcttgtcagaccggtcagtggagcggcgaagtgactacggtcacttcggctctgtcgactggagggcgtgcgtcaggataa

SEQ ID NO: 28513 - DNA, 1752 bp, Zea mays
  Peptide Sequence Number=SeqID_70292
atgctcttggggttcatcgtctccgagcggggcctcgaggccaacccggagaagatcgcggccgtcaccagcatggggcccatcaaggacttaaaaggcgtacagagagtcatgggatgccttgctgctctgagccgcttcatctcgcgcctcggcgaaagaggcctgcctctgtaccgcctcttaaggaaggccgagtgcttcactcggacccctgaggccgaggaagccctcgggaacctgaaggcgctccttacaaacgcgcccatcttggtggttagcgccgcgattgtggttgagagacgagaagaggggcatgcattgcccgtccagaggccagtctacttcatcagcgaggtactgtccgagaccaagatccgctacccccaaattcagaagctgctgtacacggtgatcctaacgcggcggaagttgcgacactacttcgagtctcatccggtaactgtggtgtcatccttccccctgggggagatcatccagtgccgagaggcctcgggtagaattgcaaagtgggcggtggaaatcatgggcgaaacgatctcattcgcccctcggaaggccatcaagtcccaggtcttggtggacttcgtggctgaatgggtcgacacccagctcccaacagctccgatccaaccggaattctggaccatgttcttcgatgggtcgctgatgaagacaggagcaggcgcaggcctgctcttcatctcgcccctcggaaagcacctacgctacgtgctacgcctccatttcctggcgtccaacaatgtggctgagtatgaggctctggtcaacggtttgcgcatcaccatcgagctaggggtccgacgtctcgacgctcgcggtgactcgcagctcgtcatcgaccaagtcatgaagaactcccactgccgcgacccgaagatggaagcctactgcaatgaggttcggcgcctggaagacaagttctacgggctcgagctcaaccacatcgcccgatgctacaacgagactgtggacgagctggcaaaaatagcctcggggcgaacaacggttcccccgaacgtcttctcccgagacctgcatcaaccctccgtcaagaccgacgacacgcccgagcccgagaaggcctcggccgagcctgaggcaccctcggctcagtccgaggtaccctcggctcggcccgaggcaccctcggcccaacccgaggcgccctcggctcagcccgaggcaccctcggttcggcccgaggtaccctcggcccccgaggtgaccgacgccactagaattgtccgcacctgcgaagggtgtcagttctacgcaagacagacccacctgctcgctcaggccctgcagacgatacccatcacctggccttttgctgtgtggggtctggacctcgtcggccccttgcagaaggcacccgggggctacacgcacctgttggtcgccattgacaaattctccaagtggatcgaggtccgacccctaaacagcatcaggtccgaacaggcggtggcgttcttcaccaacatcatccatcgctttggggtcccgaactccatcatcaccgacaacggcacccagttcaccggcagaaagttcctggacttctgcgaggatcaccacatccgggtggactgggccgccgtggctcaccccatgacgaatgggaaagtagagcgtgccaacgacatgattctacaaggactcaagcctcggatctacaacgacctcaacaagttcggcaagtga

SEQ ID NO: 28514 - DNA, 210 bp, Zea mays
  Peptide Sequence Number=SeqID_70293
atggagcatagtgtcgggccgcggcatgccatgaatggggtcctctgctacgaaatcgtcaataataacttgcccactaggttcgccctcatctttacttcgcgtagcatcaatggtagggtgtcaggtgttcggattcatcgggatggcgtgtcgccgatgctttccagttcacaggggtttagatttaatgctaggcgtaggaagtga

SEQ ID NO: 28515 - DNA, 240 bp, Zea mays
  Peptide Sequence Number=SeqID_70294
atggcgactagctgtggcggctgtgtgcggtgtgcctgtgcggctgcgctgtgctgggcgagggcggcggatgtgcgacgggccgacgacagatgggttgaccgtggtgggctgcttgctggaccatgggccatgagtcgtgaatttggaatttgggctggactagttaatagtttcggtaaattccgaattttgaatttgcctgtagcagatttttacgcagtataccgaattgcataa

SEQ ID NO: 28516 - DNA, 522 bp, Zea mays
  Peptide Sequence Number=SeqID_70295
atgtcaacgtgtattgataacacaacaagctacgctctaatccttgaggcctttatggctctaccgtcatctgcccggccacaaggtcgtcgtggccacgccaacttgggagcaggggacacaggctcagcagaccgcaggcagcaggcagctggcataccgcaggcataccatgaggggacagcagacccgggcacagtagacgcatgcatccataccagagggcaggccgcaggccgggacacaggtttcagcggcttagcagacgcatgcatccatatcagaggggacgagggagaacatccgctcacaggatcactcgacataaaacacgatatcttagtttgcttcacgccctgtccaccacaaatatacagatacgcacaaaatctggtcgctgataaccaaagaaaaggtttggccaaagaaggtgtaaacgacatggccactggcccactgctcactactactactcgtttgacgggcatgagaccagttcgtttctttgtcagaaataattaa

SEQ ID NO: 28517 - DNA, 2403 bp, Zea mays
  Peptide Sequence Number=SeqID_70296
atgacgggggagaagaagatgttcacctcctacgtcaagaataaggattcccaagattcaattatattcggtgatgggaatcaaggcaaggataagtctgaaacccaaggaaccctcaagcgcttcctcaggagagctcaaaatgagtttgagctcaaggtgaagaagataaggagcgacaacgggtccgaattcaagaaccttcaagtggaggaattccttgaggaggaagggatcaagcacgagttctccgctccctacacaccacagcaaaatggtgtggtagagaggaagaacaggacgctaatcgatatggcgaggacaatgcttggagaattcaagacccccgagtgtttctggtcggaagtcgtgaacacggcttgccacgccatcaacagggtctaccttcatcgcctcctcaagaagacttcgtatgagcttctaaccggtaacaaacccaatgtatcttactttcgtgtatttgggagcaagtgctacattctagtgaagaaaggtagaaattctaagtttgctcccaaagctgtagaagggtttttgttaggttatgactcaaatacaaaggcgtatagagtcttcaacaaatcatcgggtttggttgaagtctctagcgacgttgtatttgatgagactaatggctctccaagagagcaagttgttgattgtgatgatgtagatgaagaagatgttccgacagccgctatacggaccatggcgattggagaagtacggccacaggaacaagatgaacgagatcaaccttcttcctcaactatggtgcatcccccaaccgaagatgacgaacaggtacctcaagtggaggcgcttgatcaagggggagcacaagatgatcaagtgatggaggaagaagcgcaaccggcacctccaacccaagttcgagcgatgattcaaagggatcatcccgtcgatcaaattctgggtgacattagcaagggggtaactactcgatctcgattagttaatttttgtgagcattactcctttgtctcttctattaagcctttcagggtagaggaggccttgctagatccggattgggtattggccatgcaggaggagctcaacaacttcaagcgcaatgaagtttggacactggtgcctcgtccgaagcaaaatgttgtgggaaccaagtgggtgttccgcaacaaacaggacgagcacggggtggtgacgaggaacaaggctcgacttgtggcaaaaggttatgcccaagtcgcaggtttggactttgaggagactttcgctcctgtggctaggctagagtccattcgtatcttgctagcatatgccgctcaccattctttcaggttgtaccaaatggatgtgaagagcgctttcctcaacgggccaatcaaggaggaagtgtacgtggagcaaccccctggcttcgaggatgaacggtaccccgaccacgtgtgtaagctctctaaggggctctatggacttaagcaagccccgagagcatggtatgaatgccttagagactttttaattgctaatgctttcaaggttgggaaagccgatccaactctttttacaaagacatgcgatggtgatttgtttgtgtgccaaatttatgtcgatgacataatatttggttctactaaccaaaagtcttgtgaagagtttagcagggtgatgacgcagaaattcgagatgtcgatgatgggcgagttgaactacttccttgggttccaagtgaagcaactcaaggacggcaccttcatctcccaaacgaagtacacgcatgatctgctaaagcggtttgggatgaaggacgccaagcccgcaaagacgccgatgggaaccgacggacacacagacctcaacaaaggagttgctacgccttgcttcgggctctggtatccaaaggggtctacctttgacttggttggatactcagactccgactatgctggatgtaaggtcgataggaagagcacatcggggacgtgccaattcttaggaaggtccctggtgtcatggaattctaagaaacaaacctccgttgccctatccaccgctgaggccgagtacgttgccgcaggacagtgttgcgcgcaactgctttggatgaggcaaaccctccgggactttggctacaatctgagcaaagtcccactcctatgtgataatgagagtgctatccgcatagcggaaaatcctgttgaacacagccgcacaaagcacatagacatccggcatcactttttgagagaccaccagcaaaagggagatatcgaagtgtttcatgttagcaccgagaaccagctagccgatatctttaccaagcctctagatgagaagaccttttgcaggctgcgtagtgagctaaatgtcttagattcgcggaacttggattga

SEQ ID NO: 28518 - DNA, 255 bp, Zea mays
  Peptide Sequence Number=SeqID_70297
atggccgcggcctcggcatgcggcaacggagcccattcgcacgtatggtacatcctcggaggggtcgaggccgaatccgccgatgagaaggccgaatccaccgaggagaaggcaacagcagtgatggagaggctggcggtggccacgagggcgttcttcgcttcggcctccggcggcggcaatggcggtgagggttccactgattgggcgtcgatggtagaatttcgtgatgaactaatgaaaggattcggctaa

SEQ ID NO: 28519 - DNA, 324 bp, Zea mays
  Peptide Sequence Number=SeqID_70298
atggcaggtgttgccttagatgtgaattgtgatgatctaaatggggaggagaagatgcagcaacatgagatgacaaatactaaaaacgatgatggtgtcacgacattgttacccactattgttgcatgttccctcccatgcttggaggtcctaatcgagatgaaagtggtggcagccaagatgaaagtggtggtggccgcatcaaaggagaaggtgcaacaagacgaaccgaaagctgctatctcagatgtgaaatgtgacaacccaaaagaggagggcaatgtgcagcaaaccaaaagttgttgcctcaaatgtgaaatgtga

SEQ ID NO: 28520 - DNA, 1212 bp, Zea mays
  Peptide Sequence Number=SeqID_70299
atgaagccaccagcttccggctccatgtgcgcactcgcctgcctcttcctcctctccgccggcatcctcctcgccgccgccgtctaccggccgttccagtcgcgcgcggcggcgtcgtgggacccattctccagggtgcagcagaaggaggaggccccggcgccgccaccgctcgcccgccgcggctcgtaccgtgctgcgccaccggcgccagacgccgtctcaccatcagccggcggccctgctgactggagcccggacgacgacgacgacgccgacgctggaccgccttcaccggccccggcgccgtccgaggaaggatggggggacggcgacgaggacgcccagtgcgacctattcgacggagagtgggtggaggacgcggcggggtacccgctgtacgacgcggcagagtgcccgttcctgagcgaccaggtggcgtgccgccggaacgggcgcccggactccggctacgagcggtggcggtggcagcccaggggctgcggcggcaccacgaggctgggcggcgcggaggccctggagctgtgccgggacaagcggctggtgctggtgggcgactcgctgaaccgcaacatgtgggagtcgctcgcctgcatcctctacgcggcagtgccggaccggttgcggacgcgcctcatcgacgacgctggctccgagtacatgatcttccgcgccatggattataattgctccgtggagttcttctggagccccttcctcgtgaagctcgaaacaaaagacaacaagaccaaggcactcgagctggaccagctgccgccaatgctgcagcggacgctcggtgctgacgtcctcatcttcaacaccggtcactggtggactcacaccggcaagctcagggccgtaaattggtgctacaaccaaacggctcctatctccagggggaacatcgctccatggtttccacaaagtttgatagacatcatcgagaaaaacatcaagaggatgaaaacgcctattgtatatatgaacatcactcgcctctcagaactccgaattgatgcacacccatcaatttacaccatcactcacgaaggaaaaccacttagcaaagagcaacggcaacaaccactcacatacagtgactgcagccactggtgcctaccagggctacctgatacatggaacatgcttttgttcaacttcctaattagacctctccccagtacataa

SEQ ID NO: 28521 - DNA, 318 bp, Zea mays
  Peptide Sequence Number=SeqID_70300
atggcggaaactggagtgcggcgagaaattccggcggcgctggcgatggattcctggtggcccgtcctcgaccactttctccttagccagagggacccaccgaacaccaaaccgaggacgaatcgtcgactaaccggggatttacttgcagcggcgctgtgcttgagttccgtcggccaactgcgcggcgatcagcggtgtgagtggtatggtggggttgcgcgaagagagatggcagggaagggcggctacaggttgatcaaaggccacacaacccctatttttgtcgaagatagcatgaatgaccacttacaataa

SEQ ID NO: 28522 - DNA, 144 bp, Zea mays
  Peptide Sequence Number=SeqID_70301
atgccgaagctctcctgcgcacagcttcggcttcgcgctatccttcgtactccttctcgtgcttcttcacgctgtggtttcaacttaagtccgaaggtccttacggagaggtactcaggaaagagcctgagccccctaaagtaa

SEQ ID NO: 28523 - DNA, 381 bp, Zea mays
  Peptide Sequence Number=SeqID_70302
atgcccctccttagctcctgcgagcctttcctccgcccgccatcactgcctgagcctcgaccaccgtggccagctccccacagccactttcaagccacatcagtcactcagttagcttcgccagttgcccttgaagctttccaagccctcggacccggcagaacctcaacggaaacccgagatcgtcctcgccggacttcggtcgcccgccgccatgtgtgggcagagaaatccgattgcaatatcgctgacggagagtacgtgctcatccccgagcaaggagctatccacgaggaagatcaggagcaagctcccgagactgccatcgagaatctccctacagccccagcaattgaaggcaagccccggttttatgcataa

SEQ ID NO: 28524 - DNA, 169 bp, Zea mays
  Peptide Sequence Number=SeqID_70303
caccgtagatctcgtcaccgaggttggcaccatggatctcggcgcctacctcggcgccaagatctacggtgctgagagcagccgccagaaggcgcaccggacagtgaacagggactgtccggtgcggcaccggactattcggtgccacaagaagacaaagctccaatag

SEQ ID NO: 28525 - DNA, 1122 bp, Zea mays
  Peptide Sequence Number=SeqID_70304
atggccgcctcaggctactcgggctccgcgcccattactgatcaggggttcgaaggctggcccctgaaggaaggacagcgccgcctgcgccactccgactgcagtgccactcgacagagtaagtctgacaggcagtcaggccttgccaaaggcgccacggcgaagtccgctccgcccgaccccagggctcggactcgggctaagacccggaagacggcgaactccgctccgcccgaccccagggctcggactcgggctaagacccggaagacggcgaactccgctccgcccgaccccagggctcggactcgggctaagacccagaagacggcgaactccgctccgcccgaccccagggctcggactcgggctaagacccggaagatggcgaactccgctccgcccgaccccagggctcggactcgggctaagacccggaagacgacgaaactccgcctcgcccgaccccagggctcggactccgccctggcctcggccgaacgacttccgcctcgcccgaccccttggctcgggctcggccacggcaacagaaggcagactcaacctcggcttcggaggaaaccccacgtcgccctgcctagggcacagaccgccacgtcaacaggaggcgccatcatcatcccaccccgaatcgactcgggacaacgtcagcagggactcgaccgctccaacagctgtccctccatcaggctccgccgcacctccgacagccacgacatcacgccagcagggtgcccagatctctccggctgccacattggcatggccttctcagagaaggttggccgcgcgggaccgaggacgggacaggcgctctcttggggccgctcgcttccctcacccgcgtggacgcttgtaacccccctactgcaagcgcacctgacctgggcgcgggacgaacacgaaggccgcgggacttccacctctctcacgctcggctccggccacctcgcctctccccccttcgcgctcgcccacgcgctcgacccatctgggctggggcacgcagcacactcactcgtcggcttagggacccccctgtctcgaaacgccgacacatatggggaggagctcggcgagggggagtggtcggtcaagtag

SEQ ID NO: 28526 - DNA, 113 bp, Zea mays
  Peptide Sequence Number=SeqID_70305
atggacgcgagctccaagattctgctcgtccaggccccttcccaggccgcccgtctcctacctcccaatgccagccctactcctatggccgcgccctccctcttctgcggcag

SEQ ID NO: 28527 - DNA, 1344 bp, Zea mays
  Peptide Sequence Number=SeqID_70306
atggccccgccggcaacgaatagcccgggagaggtcgacagcggcggccgcccgcatgtcatgttcatcccaagcgctggcatgggccacctcatcccattcttccgcttcatcgcggctctcgctgggcagagcgtcgacatctctgtggtgactgtccttcctaccgtttctgccgccgaggaggactacttcaccagcctcttcgctgccctcccccgtgtccgccgcgtcgacctccacctcctgccgttcgacgcgtccaagctcccaagcaacgaccgcgacccgttcgttctccggtgggaggccctgcgccgctcagcgcacctcctgggcccgcttattgccggcgccgccccacgcgtctcggccgtcattacagacgtgaccctgacctcccacgtcatccccatcgccaaggagctcggcgtccagtgccacgtcctcttcccctccagcgccaccatgctctcgctccttgcttacacccctgtacacatcgacaagaaggccgagcaggggagtgacatcggcgacgtcgacatccccggtgtgtgtcgcataccgcagtcttgtctcccgcaggtgctgcttcacctcgacaaactcttcaccaagcagttcatcgccaacggccgcgagatcatcaacgctgacggctttctgcaaaactcagttgacgaaggtgggaaggaagaaggatcgggctcccccgttgcctggcttgacgagcagccagcgcggtctgtggtgtacgtcgcgttcggcaaccgctgcgccgtgagccatgaccagatcagggagatcgccgccgggctcgaggcgagcaactgtcggttcctttgggtgctcaaaaccacaacggtggatagggacgacagcgccgtgctgacggaattgctcggcgaggagttcctggagcgagtgcagggtcgcggcctcgtgaccaaggcgtgggtggaccaggaggccctgctgaagcacccggccatggggctgtttctaagccacagcgggtggaactcggtgaccgaggcggctgccgccagcgtgccgctgctggcgtggccccgcggcggcgaccaccgcgtgaacgccatggtaacggtgagcggtggggttgggatgtggatggagcactggagctgggacggggaggactggctggtgaccggggtggagatcgcgaagaaagtaaaagaggtcatgtccgacgaagcggtcagggcaaggacgacgaggaccgccgaggaagcggccaaggcagttgcagagggtggcaccagctaccggagcatggaggagtttatttccagcgtcaaagcaaccgtggcgtcttga

SEQ ID NO: 28528 - DNA, 459 bp, Zea mays
  Peptide Sequence Number=SeqID_70307
atgtccaaggtcttcaccctcgacgcggtcgccaagcacaactccaaggaggattgctggctcatcatcggcggcaaggtgtatgatgtgacgaagtttttggtagaccacccaggaggtgatgatgttctgttgtcctcaactggtatgccttcttgtctttgcgtaccactaaaccagtgcctggctaaggttgcgaaaggcaaggatgcgactgatgatttcgaggatgtcggtcacagcaacactgcccgcgcgatgatggatgagtacttggtgggtgaaatcgacgcgtcgacgatcccttccaggacgaagtatgtccccccgaaacaaccgcactacaaccaggacaagactcccgagtttgtcatcaagatcctccagtttttggttcccctggcaatcctgggcttggctgttgccgttaggatgtacaccaagtcggagtctgcttag

SEQ ID NO: 28529 - DNA, 327 bp, Zea mays
  Peptide Sequence Number=SeqID_70308
atgaaccagttgcgcataggcatcctaatgaacttacagaaggttgagcagagacataccgatgtggatgccgaagtttgctgccgagatgatcggttgttgaaggggatctatgccgacggcgtgccctatgcccactgccgctggtttgagttggatatgctgttggaatcagttaatgcagcgactaagcgtgttgaagagctgatagaaaagatgcaagacaactcagtcaaacctgagagtccaatacgcatggatgagcatttaactccgttgaacctgaagtgcattgagcgactgtactgtgatcatgttcttaattaa

SEQ ID NO: 28530 - DNA, 432 bp, Zea mays
  Peptide Sequence Number=SeqID_70309
atggagtcctccacgggcgtgtgtcgggccaggcgcacatccggcgtggtggcctcggcctcagtcgcgagccccactagccaccgctgcttcgacgaggaggtgctggagggcatccgccgcgccgttgttgatagcgcctatgaggtcatcagcctcaagggctacacctcctgggccatcggctactccgtcgccagcctcgccgcatcgctgctccgcgaccagcgccgcatccacccggtctccgtcctcgccagggggttccacggcatccccgatgggaacgacgtcttcctcagcctgcccgccaggctcggctgcgttggcatccagggcgtcaccgagatggagctcaacgaggaggaggccaagcgactacgccgctccgccaggaccatctgggagaactgccagctccttggcctctga

SEQ ID NO: 28531 - DNA, 528 bp, Zea mays
  Peptide Sequence Number=SeqID_70310
atgaccaagcagaggaccgagcaggggatagcggctgtcggaccggcgtgtctagcccgaggaagacgacggaaccaccccgagcgagagactagagccgacggcgttgggcatatgagccagggagagcgcgcaccacgcgtggctagaggaggaccaactgacagtcggcgcgagctcaatggcgcggacagagaggaactcggcgtactggagctggaggccaagcccgacgagatggggcgcgcgtttcagggcgggacttcgggtggcggtgcgttgggagatggcctaagcgagcttgagcaggctgggagtttgaaggcgagctccaccaccaggggtaaagaaaggggcggccatcaggggcgcgagcacaggaagcaagagcgagctccatggctggaagctgagagcgagcccgagcagccagggaaggagctgcgcacgaccaacagtgaggaaggatgcccggccaccaggacgtggcgggtggccgagcggatgggaacgaggcaacggcggtga

SEQ ID NO: 28532 - DNA, 798 bp, Zea mays
  Peptide Sequence Number=SeqID_70311
atggctagctctgtgtgcctgcttgcccgcctgcgagactcctctcctgcctggttcttctccctcgagacgtacccagatcaggaagagcagggtggtcagttgaggatcgcctccaatcagattgccttccgagtccgtcgcctctcgtctcgggctcgctccacacctgctcgcttcgacccttcagtcctagtaaccaccactctagcttcctccactatgccagctcctgccgctctcgagccttccaccacacctactgtgccccctgcctccaccacaccagcttccactgctcctgctccctcttccgctccacctattcctccgcctcgctttcgggatcgtaatgagactgaggtgtgtccccttgctgtggacccatgcctgctcgttcttcagagagccacagctactagggtgcgtcagttccgacatgtaccagtggagtcttggttgcctactaagcgtgatccagcagttgcgcctctcttccacaccaggacccaggagtccttctacagagcacaattgacaacacagatagctccaaggattcaccggtgtcttgatctttcgtccttccgttcaatagccggtgcagagtctgagggccacattacatatctgccaggtctgtactccctgctgagttttggtggctggtatgttgaggagtggatccgagtcttctatgctatagtatggatcgaccctgaccatcagtggatgaggtttcggttcgagcatgaggatgtcacactgcaaacagctcagatccggaagctattttaa

SEQ ID NO: 28533 - DNA, 129 bp, Zea mays
  Peptide Sequence Number=SeqID_70312
atgggaatgggtttcatgatgggaaaaaagagacagaggctgtcacgtgggcccacatgtgcagggcgtgtgttgagtgtgcagatggaaatgggttttcacgagaggaatgtaggaaaatatggatga

SEQ ID NO: 28534 - DNA, 192 bp, Zea mays
  Peptide Sequence Number=SeqID_70313
atggacggctccttgcgtcttggtccgagcttccagcgcgcgctcagcctgcttgccgctctctctgctcggtctcgttctgcacgcgacttcctcagccccggatctatgcagccccgcccttgttgtcgacctcactcgctaccgatgtcacggcttgcgcatctcgagttcgacgagagccctgagtga

SEQ ID NO: 28535 - DNA, 225 bp, Zea mays
  Peptide Sequence Number=SeqID_70314
atgtggcagcagggggtacatggggtacaggacaatgtagagcagatgaagaacaagcggactgcaactttgggtgacgtactagcatcagcacaagttgatttgtgcaataccgatgatgacattgaggcttatgtttatgttcctgaagctgatatcctatcagtcttagatgtgcctccagggaaatgggcgagttattggcaaaaacggggtcaacaataa

SEQ ID NO: 28536 - DNA, 252 bp, Zea mays
  Peptide Sequence Number=SeqID_70315
atgagggaggcacaggagatgggggcgattcttgctctggcaacgatggaagttcttgctccggcagcaagggcagcttcagctcctactcggctagcaggcgacaaggccaagaatgaggaaccaggttcccggatcgatggggtcatgaaatgggaacatggaacgagattgttctcacgttcacaggaacgtggacaagttctacgttcctggtttctaagccccgaacttatgtgtgatgtgatctaa

SEQ ID NO: 28537 - DNA, 3249 bp, Zea mays
  Peptide Sequence Number=SeqID_70316
atggattcagtgaactacaatcaaactgtgatggtatacctggttataaacaaaggtttatttctgaaaatgtcaacgaatcctgatgaacctaagagtcgtgcccggacagactttttgctcaacaatgaactggaggtccagaagttttgggatgagaacacggtttttcaggctgatcctggcaatgactctccaagccccggggaaaaattctttgggaactttccatacccttacatgaatggcttgctgcatctgggtcatgccttctcattgtccaagcttgagtttggtgctgcataccacaggcttcgtggctccaatgttcttttgccctttgctttccactgcactggaatgcccatcaaggcctccgcagataagctagctagggaaatccaacaatatggatatcctccggtgtttcctgtggcagagggttctagtgctgcagtagcagatgctacccaggctgaccaggctgatgttgttgccccagataagtttaaggggaagaagtccaaggctactgcaaaggctggtgcacaaaagtaccagtgggagatcatgaagagctttggtctagatgatgaagaaattgccagatttcaagatccttatcattggttgactcacttccctccgctggcaaaggaggttctcaagaaatttggcttgggttgtgactggaggaggtcattcataactactgacatgaatccatactatgatgcttttgttaagtggcagatgaggaagctgaagaaattgggcaaagttgttaaagacatgaggtacacaatctactctccgttggatggccaaccttgtgctgatcatgatagggcaacaggtgaaggtgtgcagccacaagaatacgtcttgattaaaatggaggtgatatcaccttttcctcccaagctgaagtcattggaagggaggaagattaatgacactgatgtcttcatccttacagcaaggtctgcttttaatcttgcataccaacacctatccagggtccctgaaaaaccaacctgcttatgtgagctatctggcagtgatttgattggtttgccactgaaatctcctcttgccttcaatgaaacaatatatgctcttccaatgctcactgtcttgactgacaaaggtactggcattgtgactagtgtccctagtgattcacctgatgatttcatggcactgcaagatttagtcacaaagccagcattgagagcaaagtatggagtgaaagatgagtgggttcttccttatgagattataccaataatccacattcctgaatttggagacaagtcagcagagaaggtttgccatgatcttaagattaaaagccagaacgacaaggagaagcttgctgaagcaaaaagaatgacatatctgaagggatttactgatggaacaatgattgtaggtgagttcagtggtagaaaggttcaggaagcgaaaccgctgattaaaagtaagcttttggaagaaggcacagctgtgttgtatagtgagccggagaagaaggtcatgtctagatctggtgatgaatgtgttgttgccctcactgatcagtggtatataacttatggcgaggctgaatggaagcagaaggcagtcaaatgtttggaccgcatgaatacattctcaactgaaacccgcaatggttttgaacatacgctgggctggctgaaccagtgggcttgttcacgttcatttggactcggtactcgaattccatgggatgagcagttccttgtagaatctctttctgattctactctatacatggcttattatacagttgcacaccttttgcaaaatggtaatatgtatgggaaagaaatatcttcagtaaggccagaagaaatgacagatgaagtctgggatttcgtgttttgtgatggcccggcaccaaaaagcgagatccctgccgctctgttgaacaagatgaaacaggaatttaagtattggtatccatttgatatccgtgtgtctggtaaagaccttattcaaaaccatttgacattctgcatatacaatcatacagcacttcttcctgagcaccactggcctattggtttccgctgcaatgggcatctaatgcttaactctgagaaaatgtccaagtccacagggaatttcctaactctggaagatgccataaaaaagtactcttctgatgccactagatttgcccttgctgatgctggcgatggtatggatgatgcaaattttgtcactgaaactgcaaattctgctgttatgaggcttacaaaagaaatttcatggatggaggaggttacagctgctgaatctaaattaagaactgggccgcccactacatatgctgaccgtgtgttttcaaacgagatgaacattgcaatcaaagaaactgagaagagctacaatgctttcatgttcagagacgccctgaagtctgggttctatgacctccaattggctagagatgagtacaggctctcttgtggtgcagcaggcatgaaccgtgatctgttgtggcgatttatggatgtccagaccaggcttatcacccccatttgcccacattatgccgagcacgtgtggcagaagatcatgaagaaagaaggctttgcaataaaagctggctggccagtcgcagacaccccggatcctacactgagaattgcaaataaatacctgcaggattccatagttttgatgaggaaactgcttcagaagcaagagtctggttctaagaagcctaagaagggagctgcaccggcacctccgtccgaggaaaagaagatgagcattggtctcatatatgtgaacgagcactactctggatggaaagagcagtgcttgagggtgctgcagtccaagttcgacagccaaagccgctccttctcacccgatcaggaaatagcagaagctctgaaggagtgccccatcgggcaggaaatgaacctgaagcaggttcagaagctgtgcatgcccttcatcaagctgaagaaggacgaggcaaaggaggttggtcctcaggcgctggacttgaagcttccattcggtgagatggatgttctccgggagaacttggagctgatcaagaggcagctgggccttgagcaagtcgaggtgctctccgcttccgacgaagctgctcgcgctaaggctggtgaacatgcttcgctgctagagaagaacccaccatcacccggcgaccccatcgccatcttcctcagcaaacagagctga

SEQ ID NO: 28538 - DNA, 219 bp, Zea mays
  Peptide Sequence Number=SeqID_70317
atggcgctccacaagctctatgacgacgacggcccccagctctcttacggaagcaggacgacgtttactagcttacccacgcaaggccaccgccgcctcacgcacgcggcagccggccagtcgcggtacgttctccaggtcgtgccaaagtccgacgacaaagaaggccctgggggtgctggcgcgcatcgcgagtcccctcgccagcaagtatattag

SEQ ID NO: 28539 - DNA, 783 bp, Zea mays
  Peptide Sequence Number=SeqID_70318
atgtctacatgcccgtcttgcatcgtgtactgcgatttcggcttctgctgcggcggtgccagtgacgacggcggccttgaatgtcacgcgccgccgcagcaacttctgccgccgccgccgccgcggctgccgccgtgccatggccatacagaggtcacaacagtggtgaacgcgacagtgcaactgcctcctcctccgccgccgccgccgccgtgccatggccataaagaggtcatcacgacagtggtgaacgcgccaacaatgcaaccgccgcctctgccgctacatccacatgtactagtaccatacagtaaccagctgccaccgcctgttccggcaccaccgcacccgcctcgacctccgacgattacggtatacgacacgccgccaccgctgcaggcgatagttcctcgtcgtcagtgtgtgccgccgccgccgccgctgccgccacctgccaaggcgtatgatgctggttcttgttcgccattgccaccagttagcaagagcacacaacttgccaaacctgatggcgatgtaccatcatccaggaggtacgaaacggatgatgatccatcgtcgtcgtctgcactgagcatggtggtgccaacggcgacgaaggctcctccgactccgccggcagcttctgacgtggcgcccccccgcgcgcttcaacacccagtggagccttccggccgggatttcgagttcggcatggaatattactcgcagtcgcagcaacatcgtcggcaggaatactttcttatgcaaggacgacgaagctag

SEQ ID NO: 28540 - DNA, 270 bp, Zea mays
  Peptide Sequence Number=SeqID_70319
atggcgcttagaagtgacggacgacgtgtcggagccagaggtggaaggcgacacagaattggtctcatagtagaccactttcttcattttcttcttcttgtcgccactccggtgcgacttgacgcgggggagaatctgacggacccgaacactgctgaggcgcaccacaaccgccgtgaggtctatgtcggggcgctctctgcgatccgtgatgtctccgctcgccgtggctacgctgatccctttctcaggaagaagccaggggtgtag

SEQ ID NO: 28541 - DNA, 1884 bp, Zea mays
  Peptide Sequence Number=SeqID_70320
atggcggcggcgaccgtcgctgccgcgggcacggcggcgccggcggcggccatgcacgccggcatccggcgctcgcgctccgagccgcacctccgctgcccgcgccgcgcgggcgccgcgctcaccaccagccgctccatcggcgtgttcccgttccagctcggcgcggcgccgctgcgcccgccgccgctgcccgacggcggcgccgacggctcccggctgctcaccgtcgccgacgacgacccgccggaggagcctgggccggaaatgccgcccgcccggaggcccgaggcgcactggctcggccgcctcctcgagctccgctcccgcttccacgacccgaccaagcgcgacgtactcgacgacgacgacgacgacctctaccgcctcgacgctgaccaccacgacggcgggtgcggcgtgagctacgacgacgaggaggaggatgccaggtgggaccgccactccttcgccaagctgctggcaagggccccgctcggagacgcgcggctgttcgcgcagctggccttcctctgcaacatggcttacgtcatccccgagatcaagaagaaggcggaggccggcatcataagcgccaagctggacgcggactccacgcggccgcgcaccgcgccggcgtacgaggtggcctccggcccgcagccgcgccggcccatacgaccgcacctggcctacgaggtggccgcgtcggccgcgaactacgtccgcgcgcgcgcccgcggcctgctctcgttcggaacgccgcaggcgcagctgcaggccggccacggcaggctgtacaactcgggcgtggccgcgtacatggccgcgtcgacggtgacggcggtggtggccgccgaggacgaggcgcgccaggaggcggcgcgcgacctgcgctcgccgctgtcgtcgccgtgcgagtggttcgtgtgcgacgaggcggacgcgcggacgcggtgcctcgtcatccagggctccgactcgctggcgtcgtggcaggccaacctcctgttcgagcccaccgagttcgagggcacgggcgtgctggtgcaccggggcatctacgaggcggccaagggcatctacgagcaggtggtgccggaggtcgaggcgcacctgcggagggcgcgcgcggggcgcgcgccgcggctgcggctcacgggccactcgctcggcggcagcctcgcggtgctggtcagcctgatgctgctggcgcgcggcgtggtgacgcccgaggcgctgcacccggtggtcaccttcggggcgccgtccgtgttctgcggcgggaaccgcatcatggaggcgctgggcgtcggcgaggcgcacgtccggtccgtggccatgcaccgtgacatcgtgcccagggccttctcgtgccgctacccgggccaggccatcgcgctgctcaagcgcctcaacggcgtgctccgcgcccacccgtgcctcaacacgcacaggtcgctgtacatgcccatgggcgccacgtacatccttcagcccgacagcagcgtgtcgccgcgccacccgttcctccccgagggcgcggcgctgttccgcctggactcggagcgctcgccgacggccctggtagccagcgcgctgcgcgcgttcctctactcgccgcacccgctcgagacactgagcgacctgtcggcctacggcgcggggggcgccatactccgggaccacgagtccagcaactacttcagggctctcagtgcgctggccagggcgccaccgcggcgccggaagcaaccggagatcgtgtggcagttgcccggcgtcgagcggctgcagcagtattggtggccggggatcgccggcaccgtcatccccgcaccggtggccgtcctcagcaacaaggagctggtgtccgaggcatag

SEQ ID NO: 28542 - DNA, 1557 bp, Zea mays
  Peptide Sequence Number=SeqID_70321
atgggtgctgctgcacttcaaaaatatattgggagcttaggtggaattggggcatctggtgctggttctagctcatcatattctccaaaagagatgaataaggatatgatgccagagaagaatgtcaagacatttaaagatgtcaaaggttgtgatgatgcaaaaaaggaacttgaggaagtagttgagtatctcaagaacccttcaaagttcactcgccttggtggaaagctacctaagggcatacttttgactggtgctccaggaactgggaagacactactagcaaaggccattgctggagaagctggcgtaccattcttttaccgagcaggttctgaatttgaggaaatgttttgttggtgttggtgctcggagagtgaggtcattgtttcaagctgcaaagaagaaaggatcatagccatcactttgactgccagctacagatgcattcacatcactactgcttgccatttcactctgcaagtgcaaagaatagagcaaatcagacaatctgggtgggagcaggggaggcggatgagagtagaacactgcaggggaggcgggcaggcagactggcggatgagatcagctgagcttaggaggcgggcactgggaataattgtgatggctgcaacaaacttgccagacattcttgatcctgcactcacaagacctggtagatttgataggcatattgttgtcccaagtccagatgtgcggggtcgccaagagattctggagctctatttgcaagataagccagtggcaaatgatgtagatatcaatgcaattgcccgaagtacaccaggctttaatggggctgacctagccaaccttgtaaacattgcagcgataaaggctgcggttgaaggtgcggataaattgaatgctgttcagttggagtttgccaaagatcgtattatcatgggaaccgagaggagatcaatgttcatatctgatgaatcgagaaaggcatgtttgtttttgttaacttacctttttggcaatggacatgctattgttgcactcaacacccagggtgctcaccccatacacaaggcaactatccttcctcgtgggtctgcccttggaatggtcacacaactcccctcacaggatgagacctctattagcaagaaacaactccttgcacgtcttgatgtttgcatgggtgggagggttgctgaagagctgatctttggggaagacaatgttacaactggggcaagaaatgaccttcacactgcaacggagcttgcccagtacatggtatcgaactgtgggatgagtgatgctatcggtcctgtgcatgtgaaagaacgaccaagcatagagatgcaatcaaggatagatgctgaggtggtgaagctcctaagagaggcttatgggcgggtcaagcgattgcttaggaagcatgagaagcaattacatgctctagcaaatgcgctgctggagcgtgaaacgcttactgcagatgagatcaacaaagtagttcacccttaccaagaagagccccatctttccttccaagacgaggagtttgccctcgcttaa

SEQ ID NO: 28543 - DNA, 972 bp, Zea mays
  Peptide Sequence Number=SeqID_70322
atgggctggtggcctttctggagatccgagcaccggctgcagcgcttgatcgacgaggcggacgccaaccccaacgacgcggccaagcagagcgcgctcctgcacgagctcaacaagttaagccctgaagatgtcattaaaaggtttgaggagcgaagccatgctgtggatagcaggggggctgcagagtacctgcgggcacttattctcactaacactatagcagattaccttccagatgaacaatctgggaggtctgcaagcctgccagccctgttgcaagagttgaaacaacgtgtatctgggaatgaggacaaacctttcatgaaccctgggatatcagaaaagcaacctttacatgttgtaatggttgaccccaaatctacaggtagatcaacacgttttgctcaagaaatcttctcaacgatcttgtttacaattgctgttggcgtaatgtgggtgatgggtgctgctgcacttcaaaaatatattgggagcttaggtggaattggggcatctggtgctggttctagctcatcatattctccaaaagagatgaataaggatatgatgccagagaagaatgtcaagacatttaaagatgtcaaaggttgtgatgatgcaaaaaaggaacttgaggaagtagttgagtatctcaagaacccttcaaagttcactcgccttggtggaaagctacctaagccccaaggcagttgggagccgttgagtgcatttcaagaaggcaattcttgccttctgtcgactggcgcactggacagtccggtgcacctccggacactgtccggtgcggatttctttcctgttcttgcgcagccgaccgttgaaagtttggagccgttggcgcaccggacagtccggtgcccccttcataccgttggcctggccacgcgtcacgcgcggattgcgcggccgaccgttggctcaccggacagttcggtgcacaccggatag

SEQ ID NO: 28544 - DNA, 543 bp, Zea mays
  Peptide Sequence Number=SeqID_70323
atgtgggaactcagggcgtccttctccatgttcgctatgcggtgcagagcgccccttcggccagcaacgtatgagaggggttcggagtggaagacccccggtggcgaagttgaagacgatgttgaagatgatgggcatggagcttttgtgaatcgacgttgcaccccctacatggtgcgccagctgtcggtgtttggtgccgacggtgcactacggggtataccatatcgtgcttttgggaggatggtggcattgatctcaaatcgattgttcgtgccaggcacgatggaacacaacggattatacaggttcgagccacctagatacgtgatgccctacgtcctatatgggaagtcgtgccgtgatttcctctacctgctaatggattttagaaggcaggccaacaagggctacgcctttgtcaacttcatcacgctagaggtggcctaccagccgtgggggcctaggggcccaccacgcgcactggtaggttttcaagggcagcgccaagacctaacctactacaggacttcgtggcgctag

SEQ ID NO: 28545 - DNA, 411 bp, Zea mays
  Peptide Sequence Number=SeqID_70324
atggccccacctgcgagttcaccgcctcactcgaggtcgaccaggggccacttttggtacctcaagactagggtatccactcctgctggaccaaggcgggacccttgtgactatccctggtcgcatagccgcagatggtccaccctagctcaaaataagggcctgttcgacgaggccatatccactcctgctagaccaaggcgggacccttgtgactatctctggtcgcatagccgcagatggtccaccctagctcaaaataagggcccatccgacgaggccattggcctcaagtgggggaagcttccacatagggctctccggatctctagtagtggggctccgaaaccaccatgtgctccaagtatggggaatcccttcagttgtctcggggggtcgaaccccttatga

SEQ ID NO: 28546 - DNA, 315 bp, Zea mays
  Peptide Sequence Number=SeqID_70325
atggccgcctgcaggcctcacaacacgatgagacctagattatggtggctaggggccggtgcagcacagggacgacaacaatggtgctggggctcctcgccgcccgccataaagaccaagagtagggacacctgggtgaccaaggcatatacggacaaacgcagccttaccagggtagaacactcagttttaccacaacaaagtagctccttctcaaggaagctatcggtggccgacccccatcttggcatatataaggaggaggttagccaggagactagggagatacacactcgacaagaccagaagacctag

SEQ ID NO: 28547 - DNA, 657 bp, Zea mays
  Peptide Sequence Number=SeqID_70326
atggcagggaggatcctagtaatgcgaccaacatctttagctgatttcaccaagagtttggaagagatgaaggtgactcttctccagcatgatgtgaagttactcattgttgatagtgtggctgctcttatgtcgatggaaaatgagaaggctacagcaggtttcaggcaacaccctttaagatggagcctttcttttcttaagtctatagcagagttctcaagaattccagttgtggttacaaaccaagtacgcagccagagtaatgatgatggttaccatttttcctttgaagtggacagaaaggatggtagtaactgtgctgaaaggtttgattctcatcttgttgctgcactagggattcagtgggctcatgctgtaactgtccgtctagtctttgaatcccattcaggccacaggttcattaaggtggcaaaatcacctatgtctccggcagtagcatttccattcgctgttgagtcatcaggtattacattactaagtgacgagagcattgatgtgacaggtcctgatatcacctcaattcgttgtcaaggtttcttcgccctatctgtacttgatgatgacacctgccgtttccgtctgcctcaacaaaacacgcggtacggcaacttttactcgcgagctctgagctaa

SEQ ID NO: 28548 - DNA, 150 bp, Zea mays
  Peptide Sequence Number=SeqID_70327
atgacgcgtaccacaacgcgtgctttcaagatcgccaacctgagacgacgagccgggatgggtttcaggagaccattgtcacccctaactgtagagtacaagaacattagcttcactgtctggggtgtgaggggtcaggacaaggcatga

SEQ ID NO: 28549 - DNA, 765 bp, Zea mays
  Peptide Sequence Number=SeqID_70328
atgggtctttggagaaaacaaactacccaagctcaagaaactgagcaattcgacatcaggggaattgtaaatgagtttaagaatactatttgtgcatatcaacaccagaaagaaggaatggacattgaagtgtcccatgtaaaaagaaaagaaatccctttgtttgtttttcctggtggagtgcgtccttctcgtacttctagaacaacgcacaagaacagccgtgccattccaacacgtgatgtttcagctgatgatcaagtgggaaacctattgggcgttgccagttgtagtgatgctcaacatgtaccatgtaaaggcagttatatgaaacaaccagaaccagattttgctggaggctttcagttgccaggaagtatttctctgttgccccctagcttacccaataaagtagttctgaatgggtctgctaattttcatgcagaatctattgagagtgaacatccagaacactatcaggaaagcggtgctgcaaacaacttgctgaagttatccccagctattccagccacacctgatgaacttgatgagctgatcggttctgaaaataacttggaacaaatatgcagtctgaggccccaagaatctaataataatctgaagcgtaaagtcaatcaagagcttgagcatagcagggttggcgtaggcagacttgaggatagcatcactgtcggggatggggcgatctcaggagggaggggctgcaatgttttggctgacaatgggttgaagaacacagggtga

SEQ ID NO: 28550 - DNA, 201 bp, Zea mays
  Peptide Sequence Number=SeqID_70329
atgggagagcgccagacccctgaatatacagtccggacccccaaggttggtccaggacctctacgtgtgcaagccagacccctggaatgtgagccagaccccccaaaaatagagataatatcgaattacaaatgtaccttcggctcggaaggagatgaaaatacaagtatgacgcaaaagcaaaatgcccagtcagcataa

SEQ ID NO: 28551 - DNA, 1026 bp, Zea mays
  Peptide Sequence Number=SeqID_70330
atggccgcgcaggcctcgtcgccgatcgagttcctgctccgccggccgctgccgcgccagcggaggaggctgcctctggccggcgcgttcttcgcgcccacggggctgtccggcgcgccgctgctccgcgcgctggcgtcgctcgcggcggacttgctggggacccccgccccccgccgcgaggccgccttctccgacgccgccaacctctgcttccgcgagctctacgtcgtgctcttccgcgccgacctgctcgtctcctacgtcgcctccgccgcccgcgcctgggcgctgctacgggcgccccagctcgccgcctcgttccgggacctcgacgcggagctcgccgtcgtcctcgacgtcctccccgccgcctcgctccgcctctcgttggacgccgcccagtacctcgacttactccgcgcgcgctgccgccggcgggcgccggcccactaccacgaccccgcggaggccgctctcggagacctcctcctcgccgccctgcgccacttcgaggtcggccagccgccagacccctcgatgctccgatccctcctcctccaaatcggaatctccgacgccgcttcttgccgctccgaaatcgagtacctggaggagcaaatcctgagccaagaggaggacgccgacctccccctcattggcggcgtcgtcgccttgctccggtactgcctcttctcccttttcgaccccagcaacacaaagacgttgcgtgtttggctgtcggcggggaacaggcagcggctgctctcctggagctgcagcgacgacagctccttctcggtgcccaaggagttctcctgcccgatttctttggatttgatgcgcgatcccgtggtggtatccacaggacagacctatgaccggacttcgatcatacagtggatcgaggaggggcattccacctgccccaactccggccaggccctcgctgacaaccggctcgtaccaaaccgggcgctgcgcagcttgatttcacagtggtgtggggtgcaggctttcagttga

SEQ ID NO: 28552 - DNA, 474 bp, Zea mays
  Peptide Sequence Number=SeqID_70331
atgaactgttcctcttgctgcgccgctgccactccatcttctccggcgcttctcgccaggccgcgggggggtttagctgctagctgctccacgacgacagcaaatcagaaggtgcttttcctgggctcaaaacagtttccacggatcacgtatagccgtgcgtcgtcacggttgtcgcggagagaggtaatagcttttgccgggcaacaaccttgggacatcggcagatttgtcaagacgctgtatttcttcaacgggcctccaaaccttctcaagattgtagaatctatcatcagcagtttcactggacctgcttctagtgaagtgccaaagaaaatggaaacgtcggatgtggtgctggttactggagccaccggtggtgttgggcgacgggtggtggacgtcctgcagaagaagggagtacctgttcgagtattggtattctactgtcaaccatactcacattggccttga

SEQ ID NO: 28553 - DNA, 336 bp, Zea mays
  Peptide Sequence Number=SeqID_70332
atggtggtgatcaacaccgcaccaagcgatatggctacaccaaacatggaccatgtacgccctgcccatctttttgtctcagtagagtctttcagtggcatgtttcagtcctcttccccattacttagaaaaagtgagccaccggttcaggtacaagatactatcattaccgcctggacaattagacagccaacccgtaatcgcaacgacccaattgcaagagcggagctctaccaactgagctatatcccccccgagccaagtggagtatgcatgaaagagtcagatgcttcttctattcttttccctggcgcagttgggccatcctgcacttga

SEQ ID NO: 28554 - DNA, 99 bp, Zea mays
  Peptide Sequence Number=SeqID_70333
atggcgtactcctcctgtttgaatcggagtttgaaaccaaacaaacttctcctcaggaggatagatggggtgattcagggaccaggagattggatctag

SEQ ID NO: 28555 - DNA, 1278 bp, Zea mays
  Peptide Sequence Number=SeqID_70334
atggagagcagcggcatgatgctggtgaagagcgagatcgagagctgctacccggggccgtcggcggcggcacccagcgtggtgatcgggggagcgccggacggcgtcgaggggggccatcgtcatcaggtggtgaggaggaggaggagggagccgcctctcctcgcgcccatcggcggcggcggcggcattggcaagccgctgccgagcatcaccgtcaagaggagctccaggttccgtggggtcagcaggcatcgatggacgggtcggtttgaggcgcatctgtgggacaagaactcgtggaatccgacgcagcggaagaaaggcaaacaggtgtatctgggagcttatgacgaggaggaggctgctgcgagggcctacgacctcgctgctctcaagtactgggggcctaccacctacacgaacttcccggtcatggactacgagaaggagctgaaggtgatggagaacctcaccaaggaagagtaccttgcatcgctgaggaggaagagcagtggcttttcaagaggagtgtctaagtacagaggggttgccagacatcatcagaacgggagatgggaagcgagaatcgggcgcgtcttcggcaacaagtacctctacctaggaacttacagcacgcaagaagaagccgcccgcgcatacgacatcgcggcgatagagtacaagggcgtgaacgcggtgaccaacttcgacctgaggtcctacatcacgtggctgaagcccagcgctccgccggccgccttcaaccgggaggcgctcgtggcgcaggcagcgccggccgagcagctgcagctccaccaccacccggcagagacggcccagatgctcccgcgaggcaacccgttcctgctggaccacatgaccagtagcggcggcggccaggaggcctccatgtccacggtgtctcccggcggcatgaggaggcgaggctcctccaccgcgctcagcctcctgctcaagtcgtccatgttccggcagctggtcgagaagaactccgacgccgaggagggcgccggggacggggaggcggctgctgctgctggtagtggtcatccagggccaggagacgcctacgagtaccacaactttttccagggagaggcgcctccggacatgtgcgacctcttctcgtcaggcggcggcggcggcggcggccacgcgcgggttgctgggttccatagagacatcgccgcgtgctatgacggcgaggggctggatggctggagtgggtttggcaacatgccttctctgcaatag

SEQ ID NO: 28556 - DNA, 162 bp, Zea mays
  Peptide Sequence Number=SeqID_70335
atggctagatacgtgagcaagaagttctgccagcagtacaaggcgagaatactcatcggcgacaggctcgtcaccttgcagatatgggacacggcggggcggtataggttccatagccttggagaaaacctagacggagatgcggcgcaagagagagaatag

SEQ ID NO: 28557 - DNA, 681 bp, Zea mays
  Peptide Sequence Number=SeqID_70336
atggtcgcgcccccatcccacgtttccctccttccctaccattcctcgcaatcatcgcttggggagggagataaaggaggatgggagcccagcccgcgcatagcctcgtgcccccctccgcctccggtcgctggagcccagccaggtcacggcctcgtgcccctctccgcctccgacaggcaccaaatggcaggaagacaagaacccaacgcctccgcctgcatcaacggggaagctcgtggagctcccagcggcgccaagaaggggctccccaggaagggcaaggcttcttctgggaggacattaaacaccacacaaattcctcttgttgcgagccatccagatgtgtatgagccatgcggtttgaatggccgccaagtgatagacaggatccttcctgctgtgcgtgagatgctatcagaaagaaggtggctgcacatggtggcccttgaagataatgatccttcagacatatgtcatctgatgagcgagatggggcacagtgaaagaatcaagaatcagcctagcttgattggtttaccgcagctcgtgacacggaaaagggtgcgcaagaaaggcacaactcacttcaataaatccaaggatcagaatgctaatagttcctacggcacacatgatattgtgataggatcaacttggttggactacctcagctgctaa

SEQ ID NO: 28558 - DNA, 243 bp, Zea mays
  Peptide Sequence Number=SeqID_70337
atggcccagaggctttcgggccaacccggcacgtttttggcctctctgggccgtgcttggacacatgtcctggcccgtgacccgaaccggcacggcccgagtcaacagcgtgccgggccaggcacgaccctgttcgtgccgtgcctaaccgggctcgggccgggtctcgaggtcaaacctggatccactgtcaagtgtgagcctggacatggctttatcctgcacgtttcccagccagagtga

SEQ ID NO: 28559 - DNA, 264 bp, Zea mays
  Peptide Sequence Number=SeqID_70338
atggggaagtctccggcgaagtggatcaagtccgtgctcttcgggaagaagtcgtcgtccaggtccggctccaccaaggccaaagatttatcgaaaggtgcgagtaacaaaggagctgctgctgcggggaaggagcccgtgttctctgagagctccccagtgatctcggagcctgtgcttgttagcgcccacaacaatgagaccgtgcgggaggtggcgaaggaactatatcccctcttcgttgctgtgataaaacatccataa

SEQ ID NO: 28560 - DNA, 270 bp, Zea mays
  Peptide Sequence Number=SeqID_70339
atgcgggtgaagctcctggtcggttggcgggggaagttcttgccatggctgggttggacagcgatgccgctgggcattgggcaagctccctccactgcttcaacgacgtgctggtctgctgccagggttaaaccaccgtgcgctgttggctctgtcttgagttggccgaaagaatggacagggtgccaggggattgaagacgaccacctgttcgtcgacccatggatggatgacactgatttgatccctagaaaacagttcaggcgttaa

SEQ ID NO: 28561 - DNA, 360 bp, Zea mays
  Peptide Sequence Number=SeqID_70340
atggcggtcggtgcgccgggggagccatggagctctggcatcaccccacccttggtgatgcatcagtgttgtagttgcgacgattcatggaggaattggcgcgtggaagggggggatctggcgggatgggaagcgcccatgcggtgtgaagctcctggtcggttggcgggggaagttctcgccatggctgggttggacagcgatgccgctgggcattgggcaagctccctccactgcttcaacgacagtaagtcggctgctaaccgcccaccatgtcatcctcaaagcatgtcgcggttttctgttagtgctggtccgctgcaagggttaaaccaccgtgcactgctggcgctgtcttga

SEQ ID NO: 28562 - DNA, 324 bp, Zea mays
  Peptide Sequence Number=SeqID_70341
atggttgtttgctccttgctggggcattgggagctgactgctgctgagctgctttcttcaggcaatgcgacgcctagtggccttgttctccatagtggaaacatcctcggcctcctccttgcattgggactatctaactattctgattgggtgctggggcaggaagccgaggtgcctggttgttctgtctctagtattggtttcctcccggttggttgttctggcggtactgttgctgctgttgttgacggaactgcttctaaaattgatgttgatgcagacgttgattctggtgctgatatccctgaggatgactctgcttga

SEQ ID NO: 28563 - DNA, 1197 bp, Zea mays
  Peptide Sequence Number=SeqID_70342
atgacgtccctgctgctgggcaaccaaatagcgaggtcggcggtcggcctctgcagcgacagaaggcgggagctgcgtgccgacggcccagccaccgtgctcgccatcgggacggcgaacccgcccaactgcgtgaggcaggaggagtacgcggactactacttccgcgttaccaagagcgagcacctcactagcctcaaagacaagctcaagaggatctgccacaaaacagcaatcaagaaacgctacttccaccacacggaggagctgctacgcggccaccctgcactcatcgaccggtccatgccatcgttacatgagcggcaggacatcatggctagtgccgttcccgagctcgctgccgcggccgcagttgacgctatcgccgaatgggggcgtccagccacggagatcacgcacctcgtggtgaccacctactccggcgcccacatgccgggcgtggactggctcgtggcctcactgctcggcctgcgctccaccgtgcgccgcaccatgctctacatgaacggctgctccagcggctgcgtcgcgctccgtctcgccaaggacatggccgagaacaaccgcggcgcgcgcgtgctcgtggcctgcgccgagctcacgctcgcccatttccgcgcgccacacgaggcccacgtcgacacgctcatcttgcagtcactgttcggagacggcgcgggcgccgtcattgtcggcgccgaccccgtctccgtcgaagaaccggacttcgagatgctgtccgcttcgcagaccatgataccggagagcaagcaggtcgccgccggccagctctgtgaggatgggttccacttcaacccttccagggacatcccgtccctggtacgtgaaaacatagagcagtgtatggttgacgcgctctcgctgctcggcatcggcggcagctggaacgacctcttctgggcggtccatccgggtgggcgcgccttcttggacagcgtcgaggcggggctcaggttggaaccgcacaagctggaagcgagccgccgggtgctgagtgagtacgggaacatgtctgggccgtcggtcatcttcgtgcttgacgagctccggcgccagcaagagagaaaggggatgggggttattcttggcttggggccaggagtaagtgtcgaaaccatggttttgcaagcaacggatagccaaaagaagatttag

SEQ ID NO: 28564 - DNA, 642 bp, Zea mays
  Peptide Sequence Number=SeqID_70343
atgaaggacgcgggcggcggcacaccgtttgccatcccgccgtgcgtcgacatcaagtcctctgtggcctcgctcaccttcctcaagctggtcgtgccattctggcagctccagccctatggctccttgctcaccatgtctcgcacctccgcctcggccccttgcaccctctttaccacaaccgccaccatggaccttacttctcctaacaacaccagtggcactgccacaaacacgaaccaaccaccaccagtgtcacacccggatcttaggggcaccaaaacaccgggatgcgcggggaggacccgcggaaatcgacgcgccggcgagatcgcgtggattccgcgccacgccccacgcggttttctttcctgtgaactcgaaggtggtttcgaggtgagggagagacctggcaatgcgaccccaccaagcagtgaccgggcgtgtgacaaggagggagttcaaatggccaacatggtccacacgacaacggagcaagtaacacgactacgcgtgagcaagcactctggaagtggggcccgcatggcggtgaagcagatgaccgaggggccccagctgtcggcgcagcacagttgggccgagcgcgcggggaaaagtggaagctcagtcacgcgggactag

SEQ ID NO: 28565 - DNA, 185 bp, Zea mays
  Peptide Sequence Number=SeqID_70344
atgggggcgctgtcggtgcttgagttcaacgccgggctgatggagcacggagatgcacacgcaaccgttagggaggtccagccgacgatgcccatgaacgagggagggatcaggtggcgctggatatgggcgtcggtgttgaagccgagcaagggtaaaggggcagcactatgcagggagcgcgc

SEQ ID NO: 28566 - DNA, 1539 bp, Zea mays
  Peptide Sequence Number=SeqID_70345
atgcggcggctggcgaaatccctcctcctcgcctccctctccaggaccctccgccaccgcccccagctcccgctgcttcacccttggcctccccagccccgtcgcccggagccccgcctcctccccttctccactcaaaccctagccccgggccctgctcccccgcctgcgcttgttgcggcgtcgacgggcgagcccacaggcctcgcgcttctagagtccgcggagctgcacgagtccgagggggaccaccaggaggccctcggcctcgccctcaaggcgctcgcgccgctgcaggcgtcccacggcgggtggtcgctccccgtcgcgcgcgcgctccgtctcgccggcgccgcggccacccgcgccggcagcctcagcgacgggctcgagtccctcggcgctgccgcggatatcctggcgcgcgccaaaatggccatcgggcgccggtgggacgcggtgggcgacctccagcgtgcactggacctgaagactctgttcctggaggccgggagtgctgagcttgggaacgcctacagggacgtcgccgaggcctatgcgggtgtgctggacttcgacaaggcgctgccattgtgttctaaggcattggggattgcggagagacggtttggtgaggactcggcagaagtggctaagctacggcggcttctcatgtctgtctatactggtttgggtcgccatgaggaggctctggctcaaattgagcttgctaaggtggtatatgagcgattgggattgaatgttgaactttctcaggctgaaattgatggggctaatatccgtatcttgttggggagatcggaggaggcgctgaataacattaagagggtaatgcagcgggcagacaaggagagcgaggagcgtgcactagcatatgtcacaatggcaaagatattgatgtccgaggatacggttttggactcaaagcggtgcttggagatcgctcaggggatcatagatgcaaaggattccatcgaccctggtcggtttgctgaggcatatgctgagatatcaatgttgtatgagtcgttggcaaattttgaaacgtcttcgggctcgtttgaaatggcttcgaacttgatgaagaaaacactggcaattcttgagagcgccaaggagatgcatcacatcgaaggcagcatctcagcaaggctagggtggctcctcctgtatattaaaaatgttgatgagtctgtccaatatctggagagagcggttgataaattgaagaattgctttggaccacgacactttgggttaggttttgcttataggaatctggggcaggcctatcttgaaatgaaccaacatcaatcagctgtggagttcttcaaacttgcgcttgatattattgaagctacatttggaccgctacatgatgataccattgacacaaaacagtgcattgcaaatgcatacggactgatgaaaagacatgcaatcttaacactcaactattgcctgctgcgcccagcagatcgtgcatatggtggtgcaaaacactgttttgcactgtag

SEQ ID NO: 28567 - DNA, 861 bp, Zea mays
  Peptide Sequence Number=SeqID_70346
atggacgcggcggcaggcgcgccaataccagcgccgtcggacgcggggcagggcacggcggcggcgttcccgatcgccatcgtcatcgcgatcgggttcatggtcaccacgctcatcctcatcagctactacttcctcgtggtccgctgctggctccgcggcggggggcccggcggcctgctccaccgcgcgcgccgcgaggacgaccgcggcggcctggcggagcgcgtgtccgcggtcttcttcgccgaccacgatgccgctgagctcccgggcgggctcgacccggacgtagtcgccgcgctgcccgtcgtccggtactaccgccgccgggcgagcgggctcaagctgctgcccggctgctcccacgccttccacatcgactgcatcgacacctggctccaccacaacgtcagctgcccgctctgccgcgccgtcgtcaccgccgtcggcgtgctcgcgcgccacgaccacgacgcctcctgccgcgacctgctgcagctcggcggcggcgacgcgcggcgcgtcgtcgacgccgcggcgagggtcgggtacgggagctcctgcaggttcccgaccaaggccgcccccgccgtcgcgcaggagcccatcgcgcgctccttctccatggactgcttcgcgggggggctcggccggaagccgcaggaaaaggaaccagctgccggcagctgcggggaggccggcccgagccttgccgttgccgccgccggcggcagcagcgacgtcgctgaccgcggcgctggcgagacgagcggccggttccggcggctcctgtcgtcgttcgggctgggtcggagctcgcggagcacggtgctgccgatccacctcgacaacccgtga

SEQ ID NO: 28568 - DNA, 1032 bp, Zea mays
  Peptide Sequence Number=SeqID_70347
atggccacagttcctgccggccagtttcgccactgttcatcagagcgctcgtgctcggggtttcgttttgtttatcttggcctattccaggtcagagttcttcccgctccagtttccgatgctcgacagattaacgctagttcccagaggatgagcaaaccggcaggattaaacaaacgatgggggagagaaagagctgcattagtggtcatcgtgggggccaatagagtcgagaatactaaagcacctggggcctgggggcacagcacagcacagcggtgctcggcgaagagagatgacggggttcgggtcaccgtgcggggcgtgcaagttcctgcgccgcaagtgcgtgcgcggctgcgtcttcgcgccctaattataacaagagcagggcgcggcgcacttagccgccatccacaaggagttcggcgcccagcaacgtgtccaagctgctcgcgcacctgccgctcgcccgaccgcgccgaggccgccgtcaccatctcctacgaggcgcaggcgaggctgcgggaccccatctatggctgcgtcgcccacatcttcgcgctacagcagcaggttatgaccctgcaggcgcagctggcgtcgctcaaggcgcaggcggcgcaggggcagcagggcgtgcacgaagacgccaagggctacgtgggcagcgccgccgcggagcagctagggtacggctacccctggtgcagcggcaatggaggcgccgcagcagcagcagcaggcgccgtgggcgcgcccgccgcgcagccgggcgcgtacggcaatggcgcgcacgagtccctgaccgcgctgctggggtcgtcggactacatgcagcagtcgctgtaccacgcgttcgagcaggccggcgcggacgacgacgacggccggcaggggtacgccttcgaggcagcggcggagtcctcgtcgctcggggcggaggagagcgggtggaggtcgtcgtcggggtaccaagactgcgaggacctgcagagcgtggcttacgcttacctgaaccatcgctcgtaa

SEQ ID NO: 28569 - DNA, 351 bp, Zea mays
  Peptide Sequence Number=SeqID_70348
atggctggcgacggctcgcatatgcttatgctgggcctgctgctgcgcctagggccggccgtaggcggcaggaacgacgcgatggctctgtggcatggacttccttggtttgggaacactgcacttttcgagcaacaaccggacagcacctctttcgtgaagggaaaaccccgcgtgggtcgtgtggtggtagtgaacaaggccatacggatatacaatttttgtccacaggcggccacagcgccaagtcactcacaacacaaggacaaggccgctggatttcctgacaggatatacgagagggaccttgggaggttggcactgcactgggacatgttgttcatgtcatag

SEQ ID NO: 28570 - DNA, 846 bp, Zea mays
  Peptide Sequence Number=SeqID_70349
atggtgatcatcacagtcgtgggcatcctcgcggcgttcgcgctcctcgccagctactacgcgttcgtgaccaagtgccagctcctgcgcgcggtgtggtcgcgccagccgccgtggcaccggcgcgtgcggggggccggcggcggcggcttaacaggcaggcgggacgagccgtcgtccgtcgtccgcggcgacgggcggcggggcctgggcctgccgctcatccgcatgctccccgtcgtcaagttcactgccgcctcctgcgacgccggcgccggcgctggtggcgtggcgccgaggatatccgtgtcggagtgcgccgtgtgcctgagcgagttcgtggagcgcgagcgcgtccggctgttgcccaactgctcccacgccttccacatcgactgcatcgacacgtggctgcagggcagcgcgcggtgccccttctgccggagcgacgtcacgctgccggcgatcccgtcggcgcggcgcgccccggcggcggcggcggcggtccttcccaccagcaggcgccgggacgacgcgctcgccagcgaaagcattgtgatcgaggtgcgaggggagcgcgagaggtggttcagcagcagccacgggacgacgacgacgacgccccggcgccagccgccgaagcagccggcgccgcggtgcagcaaggcggcggagagcgtcggcgacgaggccatcgacacgaggaagacggacgcggagttcgcggtgcagcccttgcggcggtccgtctccctggactcctcctgcggcaagcacctctacgtgtccatccaggagctcctcgccacgcaaaggcaagtgcgcgacccatccgtgcgttcgtga

SEQ ID NO: 28571 - DNA, 570 bp, Zea mays
  Peptide Sequence Number=SeqID_70350
atggcaacaattcctaattatgacagatggcaggaggttgaaaggctccgagctgaaagaaatgcggttgccaacaagatgaaagggaaactagacccatctgttcgccaagcccttgttgaagaaggtaagaacctgaaagagggacttatagcactcgaggaggatcttgttcagctgacagataagcttcaacttgaagctcaaagtattcctaacactacccatccagatgttcctgttgggggtgaggaaagctctgtcctcaggaaagaggtaggcagtcagaggagcttcaattttgcaatcaaagatcatcttcagctggggaaggaacttgatttgtttgactttgatgcagcagccgaggtcagtggttcgaagttctactacttaaagaatgaagctgttttgttggagatggccctagtaaactgggctatttcagaggtctccaagaagggtttcacacctctcataactccagagatcgtaagatcatctgttgttgataactgtggctttcatccaagggccagtgacactcagctgtttggtattctggattaa

SEQ ID NO: 28572 - DNA, 156 bp, Zea mays
  Peptide Sequence Number=SeqID_70351
atgacatcgtgggcccacacgctagtggctcaaggcgcaaacgacgttcacgcctgggctgcacagagggagagtgtggagctgggccgaaagtgggatccgaggcccaggataaaagatgtatccaaagcatggataggtttgggtaggatgtaa

SEQ ID NO: 28573 - DNA, 156 bp, Zea mays
  Peptide Sequence Number=SeqID_70352
atggcaaagaatcgcctaattggttggttttcttttctgtggggcaccggacggtccagtgtgccatatgaccgttggccttggtcgacgtggcagatggatgttaagttgcctttcctgaatggagaacttgaggaagagacctacatggactag

SEQ ID NO: 28574 - DNA, 879 bp, Zea mays
  Peptide Sequence Number=SeqID_70353
atgggtgacttcgtgggccacgtgctgccgggcacgctgctgctggcggtgggcctgtggcgggtgtgggcgtcagtggcgcgcttcgcggccgacccggcggcgttccgcgtccgcgcctggaaccccgtcccggcggcggggccgcggctgctggagctgcacgtggtggccggcggcgcgttcctggacatgtgcgtggagctctactacgccaacccgctccgcgtcctcaccggcggcggggtcgacccgggccacctcggcggcctcgagcacgccagcatgctcctcatgttcttcctcttcggcgcgctcgccctcgtctccgagaagaccaggtacctgcctttatcggacgacgcgctgagcctggtgttcgcgagcgcattcacggcggagttcctgctcttctacttccactccaccacgcacgcggggctggagggctactaccaccgcctcctcctcgccgtcctcgccctctgcatcgccgcgctcgtcgccggcgcgctccttcccgccagcttccccgccgacctcggcgccggcgtcctcatcgccgtccagggcctgtggttctaccaggccgcgctcgcgctgtacggccccatgctccccgcgggctgcgtccgccacttcgactcccctcactccgacgcccgcatcgagtgccacggcggcaccgcgcaggagcgcgccgagcagctggccaacttccagctgttcgggctcgtgttcctcgcgttcgtctacgcgctcgggtgctacgccgtggccgcggcaagagtacgtagggcaggcgagtacatgaatggctgggctgttcaaaagaagctcgagtgtgatcttacctaccacatggacctgtcactgtaa

SEQ ID NO: 28575 - DNA, 1662 bp, Zea mays
  Peptide Sequence Number=SeqID_70354
atggaagatgacagcaggagggtggatacgatgcagatggggagcaacctggatgggagcttgctgcggagatcatcatcatggtgggcatcgagaggaaacaatgcattctggtggccagcgagggaggacgacgacgaggaggcgctgagatgggcggccatagagaagctacccacctacgaccgcatgaggaaaggcatcctgacagcagtgggtgacggcatacaggaggtggacatccaagggctcaacatgcaggaaaggaaatgcctcatccagcgcctcatccgcatccccgaggaggacaacgagaggttccttctgaagctgtgtgaacggatggagagagttgggattcagaacccaacaatagaagtgcggtttgagcatttgaccattgacacagagatctatgttggcaaacagggagtcccaacatttaccaacttcttctccaacaaagtcagggatgctttgattgctttgcacattatctcaagtggtaagagacctatatgcatccttcatggcatcagtggaatcgtaagaccaaacagaatgtctttgttgctaggtgctcctggatctgggaaaacgagtctacttctggctttggcagggaaactcgactcaactctgaagatgtcaggaagggtgacttataatggacatgccatggatgaatttgtcccccaaagtacatcggcatacattgggcagcacgatgttcacataggtgaaatgacgatatgctcactgaactctcaagaagagaaaaacatgccaaaattaagccagatcctgacatttgatgtttacatgaaggccatctcccaggaaggacaagagaacttcatcactgattacgtcctcaaaattttgggtctggatatctgtgcagatataatggtcggagactctatgatcagaggtatctcaggaggacaaaagaagcgtgtcacaataggtgagatgcttgttgggccagctaatacactattcatggatgaaatctccaatggtctggacagcgccactgcctatcagatcgtcaactctctaaggcagtcggtccacatccttggtgccactgcactcatctcattgcttcagcctgcacctgaaatatatgagctatttgatgacattgttctccttgctgagggccagatcgtgtaccagggtcctcgagaaaatgtcctcgagttttttgaggccatgggtttcagatgtcctgataggaaaggtgttgcagatttcctgcaagaagttacatctaggaaggatcaataccagtactggtgtacaagagatgaaccatatcggtacatttcagtaaatgacttcgtagattccttcaaagcattccatgttggccatgcattgcagtcggagctcgagctgcccttcgatcgaaccaagaaccaccctgctgccctcacaacatcaaagtttggtatcagcaagatggagcttctcaaggcatgcttttgtagggagtggctgatgatgaagaggaactcatttgtttacatcatcaaaatagtgcagatagttatagattcagatggttgtcacatacttgtaccagctcataatcctaggaaccattacaatgacggtcttcctgcacacaaaaatgcatcgacacagtgttga

SEQ ID NO: 28576 - DNA, 363 bp, Zea mays
  Peptide Sequence Number=SeqID_70355
atggaggctgctgaggcaaggaatgccagtttctggaaaatcctagttgttgttcatttttctgaagaaagaacaggagcaggtgacggcgcgggagctggcggttggcgtcgtcctagagtgctcttctgcctcatcacgcacaagcttcggagtgtcccggcagcggtggcggcggcgggtgggcgaaggttggatccgcggaagaaggctatgttagggttggcgaagtgcataaaaaatcttatctataccgctattgttgcggaaaaagatcccctggccgctgaggtccaccggtcaaggagacagttaaggaaaggtcttcgaactattgaggcctaccggtcagcaggagggtaa

SEQ ID NO: 28577 - DNA, 222 bp, Zea mays
  Peptide Sequence Number=SeqID_70356
atgctgttcaagaaaatagcttatctaatgttgattcttgctagtaaaggaaaacactcatgtaggttgtatcgatgggaatcacaggaaggagagggaccacagaggttggctttggagccggaccaggatgctttagcagagctgaaagatgtcggtttgcagttggccgtatccttcagtggagaaggttcaatacttgctattggtggtgaagtttag

SEQ ID NO: 28578 - DNA, 510 bp, Zea mays
  Peptide Sequence Number=SeqID_70357
atgcagggtacaggctccaaagatatgatccaagggtacgagagtgcatgcctgcagccgttggggaaggcacagaacacgccatcgccacgcgggtggacggccattctgtacggcacctcctcctcactattcacctcgaccacctgcccaccgccacggaacgccaaatcagcacgggacactcaagcccgccctagatcagagcgggatctgggaggacggatcgctcaccgtatcgggggagagagccggcgcggcctcttccccggtggcgagggccgccaccacgagcttgttcggcaccccgctccggccctccccgccaccgcccccgaggacagccatcggaagcgagggggtggaggaggaggggtcatccgcatccgcctcggcagcgggagggtcgggcttgatgatgtgggcgagcgggagccaggcggcgcagtagatcggggaagccgtaggactggctaccgccgccgcgagttaccatcgcgccaaagaagg

SEQ ID NO: 28579 - DNA, 375 bp, Zea mays
  Peptide Sequence Number=SeqID_70358
atggcctctgctggtgggaccctgttgtctgctgacccagtccgagtttgcggaatgcgtggaggtaccgtcgacctgagtgtcccagaatctttcgcgacggtggacaatagagtgaaattgagcgtccgcagaggaagaaggtgggagtgcgagcaatcggtggttgcgccatcaattgagctaaggaaaagggaccttgggcttcggttgttgacgtggggcgtgtcctcgggcggatgcgtgagggaccgtattaatcgggagttcgtgtgccgggtcaccactgatttctcgtcgaagatcatctccgccgcggatccgcattccgccgtggccaacgatctgtgctacgtaaccaccagtgagttctag

SEQ ID NO: 28580 - DNA, 282 bp, Zea mays
  Peptide Sequence Number=SeqID_70359
atggcctctgctggtgggaccctgttgtctgctgacccagtccgagtttgcgcgaaacgcggtagctgttgcgaatcgatcgcggaccgtattaatcgggagttcgtgtgccgggtcaccactgatttctcgccgaagatcatctccgccacggatccgcattccgccgtggccaacgatctgtgctacgtaaccaccaacgagcaaaccactgtggaatctgaggatcagcaagtagagatagctgagcaggagctcattgaaggcaagttgtgcccttga

SEQ ID NO: 28581 - DNA, 201 bp, Zea mays
  Peptide Sequence Number=SeqID_70360
atggagataaggtcgtggtgcatagttgaaggtgtcctagtgcttgaggtcctggcacccttggtgatccttcttcatttagccataaacggggttgcaccgtcgtggatcgacgccgaggacagcttccgcgtcgacccgttcacctgcgccatctccggttggattcacgtgcgcaccataggtttgttagaccgctga

SEQ ID NO: 28582 - DNA, 288 bp, Zea mays
  Peptide Sequence Number=SeqID_70361
atgaatgagaataacaaagttccaacccctacattcttcttctacctctgccatcctctctgtatttttcccagctcctatcttctcttcgtcgtagtgctgcccttcagcgaggtgctggactggagcaccttctcggtggtgctcgccgagagaagggcataccggcggacctcaagaacttcctgtggcacgccgcacgccacgcccatcaagtacgacttcttccacatgatcctgcactccatctggttgagtagagcgaaccaggtcgagctcgacggctga

SEQ ID NO: 28583 - DNA, 3054 bp, Zea mays
  Peptide Sequence Number=SeqID_70362
atgcagttccttggtgaagatgtcggcgaactgagaggtcgtcggcatgtgaaggacacggatatcaataagtgcaatgtgctctcggacgaagtgaagattgatctccacatgtttggtgcgctgatgttgaatgggattggttgcaatgttttcaagtcgtctagtcgaccctcgtggcatgcatctaatcaaatagaggctatagggcacacatcaaacaaggaaaatagagaagaaaaaaccccaccacgcgccaaggtggggtcgcgggcctcctgttccgtgcgcgcgtgctcctcggcgatttggaaagccagggaatgcctaaatttgttacctaatagcaaaaatgttcaagcagaaactgatataattgatgctcttactgttagacttccttatctaggggtgactatccttcctcttcagttcaggcaggtaaaggatcctatggatatcatccgcatggtgataacatgtcaagcaggtgcataccttcattttgaagagatcattgatgtcgctaaacttctgggattaagaagtgaagaggaagtagcggatgtggaggaggctattgccagagaagctgtggtaaatggtgatcttcaacttgcccttgatatctgtttaaatttaacaaaaaagagtcatggtgcagtgtgggatttatgtgctgcaattgctagaggccctccacttgacaatttggatactggtacccgtgaaaagctattgggtttcgctctcagccattgtgatgacgattctgttggggaattgttgaatgcttggaaggagcttcatgctcagggtacttttgagaaattaatgattacaaccgcaacaaatcctcccaatttcttgattgatggatcttcaatcacaccacttcctgtacaaagtgtgcaagacatacttgacctgagagatgacaatggccatgatagacgtagcgaccttgtgggaattgttaaagacatgctgtcaaaagtttgcttggacttttctaatggagacacacataattgggagtctatgttggaagaaaaccggaaattgtgtgctttggagcactgtaatgaagcatgtgatggtgaaataatggatcatctcactaggagatgtcgattttcaacaaaagtaaaagcagcaaccagtatcatatattggttagttataaatggtttggcccccaatgataatataatcatgattcttgcaaagtctataatggagcctcccattgatgaagagtttgatgtacttggctgctcggttcttttgaatctcatggaccctttcaatggagtgaaaataatagaggaagagctaaaaagacgagaatcttatcaagaaattagcagcataatgagtgtaggaatgttatatagttccctcaataattctaagaaagagtgctccactcctgaacagaggagaaacctgttgcttcacaaatttcatgagaagttcacctcagccgataccgatgatttagaccaggttgatatggcaaatacaaccttctggagagaatggaaatcaaagttagaagaggataaacaactggctgatcaagcgcggatgctcaagcagatattacctgatatagacacatctcgattcttgtctggtgatgttaattatatcaaaatagtagtttactcctttgttaattctgtaaagatggagaaaaaacacatactcaaggaagcagggcggatagctgaggcatatgggttgcaacgaactgaggtgcttttacgatttctcgcctgcagtcttgtgtctgaatactgggataacaatgatattctgaacgaaatttctgaattccgggaggatattgtcagctcagctaagggtgtgatcgatatgatatattcagatgtctatctggagatagatgggtataataaacaacgtctttcttacatttacggcattctttcagcatgtcattcatatctgaagaggaccaatgagatagaattgagatacccagtgcatgtgcatacccataagcttgaaccatttcagtactataaggtacttgaggaagagtgcaagaaagtctgcttcattgatggcttgaactttaaaaacattgctggactggataatctgaactttgagcatttcaatgacgaagtatgcaagaatatccatgcctccaccgtcactgctatagccgatatggtacagtctcttgtgagtatgtatgttgatgtactggccaagggactcatatcacaacaaggtgtttacaagcactatgttctggggttgctggcatcacttgaaggccgcagtgaagcacaatcgaacaacacagattatgaaaagttgcaggcttccctatgcgaatttgagttgaactatgatagttgcagggagtacatccaagctcttccagccacagatatttcatatattgtaagaaggtattgcaccctttgctttccatctaacttagcacgaagccatccacaggaaccttcatggaggaaacctcttgccacgctactagaattttggtctaaagttgttgatgacataccgggggattcaattgatgcttgctcatatggaagaacagactacttaaattcaaataggttatctctgtgcatgagagctttcaggcagctattaataattgatgagatagcactgcaccaaggctgcagttttgaatctgtagttgaagtatactttggaggacaaggacagttagggagtgagaatgcagatccaagcaattatttggacctcttagaactttataatgctgctacagaaaagtgtttgtcggatttgagtgaggaatcttgcgaatatcgaatattgcttcataatttgctgtcatctttgagccggtcaacgggaaaacatgctggtgctctagaaatggtcagatctggcgtttgggggaagttaatccgctattcggaagacatgcagctagagagccaatttcgagtgtatgcactacaggtgatgcaatgtctcacaggaagaaaccttaaatctcttccaaatgaaaag

SEQ ID NO: 28584 - DNA, 309 bp, Zea mays
  Peptide Sequence Number=SeqID_70363
atgactgagccgccaatatctccctccgctcccggtgctgatgttgatgcccatcgcaccgccgaggagcacgcgcgcacggaacaggaggcccgcgaccccaccttggcgcgtggtggggaccctgccttggcgcgcgccctcaaggccgaccgtaaagctactgtcgtcaagaaagagatcgaggcggccttcgagcgccttcgtgccgctcaagaacatatgcagcccacgagcggaccacggctgcaccacttcgggttgaggatctcgctcccgatggagcgattgatgtcccgccacttctag

SEQ ID NO: 28585 - DNA, 1572 bp, Zea mays
  Peptide Sequence Number=SeqID_70364
atggtcttattatgcaggtatgcagcaggagaatatagcaaattccgttcaatgccattggtggaaacagccatagcattagccgaaagtggcaaaattggggctttaaatcttatattcaagcgtcatccatatactgtctcttcagatattttacgtgttttgtctgctatcccagaaacccttgctgttcagacttatagtcagttgctgccagggaaatcccttcccagtgttgtcatattaagagctggtgattgggttgaatgtgaacagatggcttcatatataaacaattgccctgccgagttggacaaggtcgaagagatcaaaacggaaatacttgtaaagcactcaaaaggcttttcatggccttcagttgctgaactttgtgagtggtataagaacagagcaagggacattgactgcttaagtggacagctggaaaactctctggccatgatagagcttgcatgtcagaagggcattgtagagttgcagccattctttgatgatattaaatgcctctaccaggttgtatattctaatgaattgaatgagtttacaatgaatcttttgacatgggaagatctgcctgattatgaaaagttcaaaatcattctcaaaggagtcaaagaagatacagttgttcaacggctagaagaaaatgctatccgttttatgaagaaattatatgaacacaaacaagaatcctaccttgttagttggctgaaagaggtagctgctaaaaatgagcttttgatttgcttagctgtcattgaaaatggttgtggggaatcaccaatatatggtctcttcaaggatcttgctgagatgatagaaacctctgttcactgcatttatatgtgcagtgcaactaaccagtggaataccatgtcatcaatattatcaaagtcactctataaaacaaagagggagaaatcgttagtggctagtgaagaagactgcaatctgaaagatgctaagcatgctcttggttcttctatggtttcttatgaggagatgcaatgtgtctgtgctgatatcttatctggtctgggcaatgctccagaagatttttatcactatgattcagtacctgacaaacctaatgatgtcaaatatcttgatatattggagaagaggctaaaagttgctgaaggccatgtagaagtaggacggctctttgcttattatcagagtgccatcactgttcggatcctcatggattttcatagcctatgggatattgtcaactcggtggagctacaaccagatgtggatgatcaaccagagaaccggtcaaagaaccagtcttgttgcggaggttgttggagcgtcatggtctggaagttggctgctagcctgctgatcctagccttgagacaaagagggatggatgggtgtaggagggacgcaccactgactagcccattggccaggaggatcgatgacgtaggactgcgacgcctgctgtggcttgtagggcgccttagggcgtggaggtgtcagggctcgtcagttcatggacccagccacatgttgatggcgccggtccacgagttctggtag

SEQ ID NO: 28586 - DNA, 525 bp, Zea mays
  Peptide Sequence Number=SeqID_70365
atgggcacgttcgggtacatggcacccgagtacgcacagagcgggaagctgacggacaggtccgacgtgttctcgttcggggtggtgctcctggagctcatcaccgggcggaagcccgtagacgcatctcagccactgggagtagagagcctggttgaatggacggacgacttccgagaggtcgccgaccccgcgctggagtgcaggttctccaagaccgagatgcggaggatggtggaggcggccgccgcgtgcgtgcgccactccgccgccaagagaccgaggatggtgcaggtgtggcggtcgctggacgtggacgagtgctcgtcggacctgaccaacggcgtcaagctggggcagagcatggcgtacgactcgacccgctactcggcggacatcgagctgttccggcgaatggcgttcgccaacgacctctccaccgccgagctgggcgtcgtggacgaggacgaccaccggtaccacaacagcagcaaagccagctccagctccaggcggtacaagtaa

SEQ ID NO: 28587 - DNA, 143 bp, Zea mays
  Peptide Sequence Number=SeqID_70366
cgtcgtcggtagcctcaccggtacccgccgccccaggctcatcaagaacaccaccgtcatcttcgccaccgccccctccaccctcgtgggatgggacaataagtcggcacggacactcatgtatgaccttgctgggcgcgagg

SEQ ID NO: 28588 - DNA, 702 bp, Zea mays
  Peptide Sequence Number=SeqID_70367
atgcccccagcggcgataccttcggtggtcatgatggacgaggaaaataccggctctatgaagccagcaacaacagataacatggggaaggggcccgtagagatcgaggatgccaaaaaggccattgagtacgacacaccactaggtgaagaccaagagtttgggggctggggaggtcctgaggtttatttgcattgcttcccggatagcttggagactgaagtatgccgctacatggtggataacataagtttttctgaagctagaggccatattatcaacgatgcccttcgaagatttttcagattgcctcgcctacacgcatttgaagggctcaattttgagcaagacgctaaagaacaagaaaaaatattgagggcgaagctgcccagaaggaaattgtcgaagggcgtaaaagaaatctctatcgaagagtcaataaaaaataaggagaagctttttgcaggctcaaagggcagccgagaaggccgcatctatccaataaatttacaaccgaagggagctgaagcaataattgaatttaaacaaccggaagccgaagatgaagccaaaccaactactactgaagctgaagcagctgtaactaaagccgaagtggaggctgccgaagcagctaaaaaggttgctgatgaaaaaaaattagaatattgtgaacaaatttatgacgaagtgatgcattga

SEQ ID NO: 28589 - DNA, 513 bp, Zea mays
  Peptide Sequence Number=SeqID_70368
atgctggaggaggaggtgtcctctcctatctctccttgcaaggtacaattccttcgcttcgaaaccttcacaaatccatccatacaggatgtggcgctgaccatttgcttcttcatgctaccaccaaccacccttgaaggtgtgagcaaacttaaggaaaagtgggataggtacagggtgctggggaagagtaggcagaggaagaagggggatggcgtcgcactgtttgtctcaccaaatgcagaatatgtgtctgtaactgttgggaatcacatcatcatcttgaggaaagccgatggctatgcatcaccttgtggtgtttacacaagccaggtttctacatttttacaagtgactgcttggttcatagatttgattacactgaagaacctgaggcatgtttatgcgaagttcccatatcaactaaagatgcaatgtcagctaggactatccagttacctcgaagtttatcgtgcattgattaccatcaacgtcactcgctatttgtcctag

SEQ ID NO: 28590 - DNA, 1671 bp, Zea mays
  Peptide Sequence Number=SeqID_70369
atggcagaggagacgcagccagaggccgcagccgaggccgaggtggtcgtgaccgagccggcgccggcgccggcggaggcggaggtgcctgcggcagcagatgccgaagccgtgaccgaaacggagaagaaagccgatgagccggcggtcaccgccgatgacgcgggaaaggggaccggctcgttcaaggaggagagcaacctcgtggaggacttgcccgacccggagaagaaggtgctcgacgagttcaagcacctgatcgctgccgctctcgccgccggtgagttcaacctgcctcccccgccgccgccgccgaaggccaaggaggaacccaaggccgaggagacgaagacggaagaatccaagaccgaggatccggccgaagaagagcctaaggcggagtctgcggcggaggagcccaaggccgaggtagctgcgaatgccccggatgaggaggtcaagacggaggtgccgccggtcgaggaggccaaggctgagacagtggctgtggaagccaagcctgccgagcccgagccgcaggagaagaccgtcgtggtcgctgaggaggagcctgccaccaagacggtggaagcaatcgaggaaagcgtcgtgtccgccgacgaggcggccgcgcctgagcccgtgctggtctggggcgtgccgctggtgggcgacgacgagcgcacggacacggttctgctcaagttcctgcgagcgcgggagttcaaggtgaaggaggccatggcgatgctcaagtccgcggtgctgtggcgcaagcgcttcggcatcacctcgctcctcgacgccgacctcggcctgccggagctggagaacgtggtgttctaccgcggcgccgaccgcgagggccaccccgtgtgctacaacgtctacggcgagttccaggacaaggatctctacgagaaggccttcggcgacgatgagaagagggagcgctttctcaagtggcgcatccagctgctggagcgtggcatcctgtcgaagctggacttctcgcccaacggcatctgctccatggttcaggttaccgacctcaagaactccccgcccatgctcggcaagcaccgcgccgtcacccgccaggctgtcacgctgctccaggacaactaccccgagttcattgccaagaaggtgttcatcaatgtgccgtggtggtatctcgctgccaacaagatgatgagcccgttcttcacgcagcgcaccaagagcaagttcgtttttgctagcccagccaagtcagcagagactctattcagatacatcgcaccggaacaagttccggtccaatttggaggccttttcaaggaggatgaccctgagttcacaaccttggacactgtcactgagctcactatcaaaccatcgtcgaaagaaaccattgagatccccgtcaccgagaactccgcgattgtatgggaactccgggtgctcggttgggaggtgagctacagcgccgagttcacccctgacaccgagggtgggtacactgtcattatacagaaaacaaggaaggtgcccgctaacgaggaaccaatcatgaagggaagcttcaaggtaggcgagcccggcaagcttgtgctaactgtgaacaaccctgcatccaagaagaagaagctcctttacagatcaaaggtcaagagcatcagcgagtga

SEQ ID NO: 28591 - DNA, 186 bp, Zea mays
  Peptide Sequence Number=SeqID_70370
atggctttcgccgccattgacatcgacgggtttgttaagagtaagactctaccaagaacaggtaccaccgtggcaacgtgcgcaggactgcaggcgcatgcagctgaatgccttgcggtgatagtcagatcccgccggcctaaccggactgaccgcttcagcgaggccacggcctcaaacagctga

SEQ ID NO: 28592 - DNA, 642 bp, Zea mays
  Peptide Sequence Number=SeqID_70371
atggtcgtcgtcgtggctacggcgggcgtggtggtggccaacagccccctggaaggggtacgccctctgccggataggggcgggtgcaccctcgggcatgcacccgtccttcgcacagccttgggcgggctcgctgcagatgtggccatatggtcgccctccgcctcagccggccttcaccgtctttccacagtacggcggatctttcggcagcgctcccgacggcggcgtctacggcaccggctacactgcgcccccaccgtatgtctatgggggagctgtgccctcaccgtcgacattccaggggccgtcggcgccctatcaggcggctgcacaggcgccctggtgaaagggaaatgtgcccttgggccatttctaagtattttggtgattgagtgccaacacaagtgcttaagtgtaaatctatgccaattgatggacaaagtgcaaatcaagtctagaggagaaatcaatttggagatgacttggctcattcagccaaagtctgctcagtctgggtgcaccggacaatgtccggtgcgccaggctggctctggcgaacttgctgctctcgggacttcaacggcggtgtacggctataaatcaccggactgtccggtggagcaccggactgtccggtga

SEQ ID NO: 28593 - DNA, 609 bp, Zea mays
  Peptide Sequence Number=SeqID_70372
atgttggggaggcttgacatatttcagaagtcccattgtgtaaaggtcaatcctgacacacctcagaagcaagttcggttcttaacattgtcaggtgataaaaagctgttgactccgcaacctcggctaaggacaggatttttctcagttatggactctcagatgatacctgttgggtgcattcctgaagcatgcacttctgttggtgcagctaaatatgggaggccaattggtttagatgaaagccttaaggtggatttgattgtgattgggtcagtggcagttgatccaagttcaggagcacggttagggaagggagagggatttgcagagctggaatatggaatgcttcgctatatgggagctatagatgattcaaccatgatagtaactactggttgccatgggctgagccagcccacaggtgatgacagcagcaactgcgacttctgctgccatgcctgccttgtgggcatgccaggaggcaccgtagggctgttggaactggaccaccaacacacggcgcgcctgccggattgtccgcacacatggcacacccgctgtcatgggcatcatagggagcgagacgcaacagccaggctaggataa

SEQ ID NO: 28594 - DNA, 593 bp, Zea mays
  Peptide Sequence Number=SeqID_70373
atgaccttgctgcgctacgccaacctcttcaaaggtccgctgtctgaccttgttatcaaggctctggtggcacacagtggcctcaacagaccagccatgtcggggcagataaaaccaaggcttgatggatgtcagggcctttggctgttgttcaccgtgggaagtcagagctgttctttgctgcttgtgatcagctcggcaatgaggacatgcgtgcatgacaagcagttagttgatgacattccagtggagaagctgctagttcatgatgtgccagttgacattatctgcacccctactcaggtcatcttcacgaagactacgatcccaaagccacaaggttcggagatttttgtgtgcagtgatttcctctacgaattagtcttatgtgaccaaatattggagaattttatatgcagggatttactgggaaaagttatctccagaaaaattgggccaaatccgaattctaagagagctgaagcaacgtatagagcaagagacaggaactatgcttccttgtggaccttcggagaagctaccgccaacagctcagagaaagcagaggtggcagcggcgacgatgagactttt

SEQ ID NO: 28595 - DNA, 390 bp, Zea mays
  Peptide Sequence Number=SeqID_70374
atggcgtcttcaagcgcccttaatggcgacgttaccagagagaaatcagagagagggaaagaaggaaacggaagtattaacgcgctgacgaacggtcacgaaacgtcgggggtcgcggtcgggcagggcacactcgactgggcgcggggcttcggcgcgcatggcgcagtctcctgggctgctcgggcgtcgagggcaggggcgcgtccttgcgtgtcagctcggctgcgcggcctgggtcgggtcgcgggcggccgaggggcggctggtggcctgagcgcgcggggcggcttgggtgcaggggcggggcgatctgagcacggttgtgatgtccagcggcgtgaaggacaagcgagcagtgcgttggccggaaacgaaacgatttggtga

SEQ ID NO: 28596 - DNA, 345 bp, Zea mays
  Peptide Sequence Number=SeqID_70375
atgccgctcctcttccccgccacgccgccgctaccgctgtgccgcgccgcgcgcgtctcacgccgcgccacggcctccgtggcgtccgcggccaggagctcgtcgtcgtcctcggcctcgttcgacgcggccgccttcgaggccgagcggctgcgcctggacgccgcggcgcgggccgggatggagtccaccgccgcggcagcggaggccggcccgcgggcctggaagtgggcgatacggaagcgggtgtgggacgcgctcgaggctgagggcatcgcgcgggacccgcgccccgtccaccaccgcatccccaacttcgacggcgcccccgccgccgcagacgcg

SEQ ID NO: 28597 - DNA, 192 bp, Zea mays
  Peptide Sequence Number=SeqID_70376
atggcaatgggtacctgctaccccgaaatccgtgggtatgagaaactcgttgggtatccgaaacccgcattgtatgggtttaggcaagtaatacccaatggttttttatccattaccatctctatctataccgttgtagccccctcacatttgttatttggaagcccacaaacagaagctccaagcagataa

SEQ ID NO: 28598 - DNA, 651 bp, Zea mays
  Peptide Sequence Number=SeqID_70377
atgggtgcggctcgtccgcggcgctggaagctgccgttccaccgcaccgtcagcgccgtgggcggcgggggcggcgcgccgtgctcgccctcgtcaaggtcgtcctcctcgcccgcgcggtccgaggcgtgggcggccgaggcggtgccggaggagttcctgtgcccgatctccggcgcgctcatggcggaccccgtcatactgccgtcggggaagaccttcgagcgggcctgcctccaggcctgcgcggagctcgcgtttctgcctccgggagtcgaggccggggacgcggacactgtcatccctaactccgcgctcaaggcggccatctgcacttggtgcgcgcgctccggacgggaggtgccggcgccgccgtccgccgaggcggcgcggcaggccgtgcagcgcgctatgcctccggcggctgccaagtccgtgaggacgaccaccacaaggcgcgcggtggtgatggccgcgagcacatcaaactcgtccacgtcgtcgtacgggtcggcctcggagatcaccgcggcggaggacgaggccaaggccaaggaagaggcgccgcggaggaggacggtcaaggaagcggaggtggagccggcggcggcgccgccggctgacccgctggaggacgatgtggtgggcaag

SEQ ID NO: 28599 - DNA, 525 bp, Zea mays
  Peptide Sequence Number=SeqID_70378
atgggaacttacggacatttggacctcaacgcgctgtatatcaaaagatttcaatctgaccccaaggaatgttaccttgtgactgtgaagcgtattcttcgatatttagttcatatgcctcacatcaggttctggtatcttaaggggtctacctttgacttcattggatactcatactccgagtatgccggatgcaaggttgataggaagagcacatcagggacttgtcagtttttaggaaggtccctggtgtctaggagttcaaagaaacaaacatctgttaccctatacaccaccgaggctgagtatgttgccgtagaaaatcctgttgaacacggtcgcactaagcacaaagacatccgacatcactttctaagagaccatcaacaaaggggagatattgttgtttgccatgttagcactgatcaccagctagacgatatcttcaccaagcctttagatgagaaaaggctttgtaagctgcgtagtgagctaaatgtcttagattcgcggaacttagattga

SEQ ID NO: 28600 - DNA, 1728 bp, Zea mays
  Peptide Sequence Number=SeqID_70379
atggcgctgcaccacctccgcctcgcgccgctcgcgctccttcgcgccgcaagcctcccgcccctcgcctcctcccgtatcgccgcgcgcggccaccgccgcgttctcctctttgcgccgccgtcgtggccgtggcgccttctgtcgcccggtgcgaggccgcgcgcgcttgccaccgctgcggcagaggccgacgatgctacctcgggctcgggcaacgaattcttcgcagagagcacgtcgtgggcttcactcggcgtatccgaacgcctcgcgtccgccctttgcagtgccgggctctcgaggccttcccttgtccaggcaacctgtataccacatgttctcatggcaaatgatgtaattgtcgcagcagagactggtagtggcaaaacccatggttaccttgtacctttgattgaaaagctgtgctcaaaatcttctaccaccaaagatgacaattgtcaggacaccaccccaggagcacatgacatggtgttggtcctttgtcccaatgtcatgctctgcgagcaagttgttcgcatggctaattcattacttgacgagtctggcaaaccacttaaaagagctgctgctgtttgtgggccaaatggctggccagctgttcatccagatattcttgtagccaccccagctgctctattaaactatctatttgactatgacccggaaaagaggcgaagagagagattcatgcgtaatgtaaaatttgtagtgtttgatgaagcagacatgctactctgtggaagttttgagaaccaggtcattcgtctcatcaatatgttgagatttgatgaaaagctactttctagagcacaggattctggaaaggatatatcacttgggagtgatgatgaatatcatgaggattcaaagtttgagactgctgaatttggtagttctgacaaggaaattgaagacaatattgtggaagatagacttgtcaagttggagaatagtcacgttggagcacacaaggactggaggagagttagaaaaatatacagacgcagcaagcagtatgtctttgttgctgccacccttcctcagagtgggaaaaaaactgctggtggtgtgctacaacgtatgtttccggatgctgtatgggttagtggcacttatctgcaccgtcacaaccccaggtcagtgaaggagagcgtaggctcggctcccgactctgtgcctgtggattcaaacactgaccctatggcagatccaaagcgcagagcaaagtcttgcaagaccgtgacaacgggaggaatcaagaggcaagattctcatggatcgaattccaacattgttttggagtccttgtgtggctcattgcttggatctatgctagaagatattggaaagttgaatgatttcaagaaaacaattgctctagccaaacgagtcaccacttttatttataggcatggaaggatccttagtgaaatgagggagcaaataagtggcatggtcctagttagacctggagccactaggtttgccacttgcttccttactttgaagagcctacataagcatagagatcctttgaagggtctatttttgagtgatgcatggaagtcaaacaagttgtcaaaagcagaggttgggaagggagtttatgacattgttctagcctcaacgttttggagcacaattgaagattcatcagccctttccaaaaattcgagtcttcttgtttttgttcaaccaaaataa

SEQ ID NO: 28601 - DNA, 228 bp, Zea mays
  Peptide Sequence Number=SeqID_70380
atgaagaaaaagaagatgaagaaggtggtctactacaagtctgactcttccacgccctcaaccttcggaaaaccacaatactttgatggtgaagattattgtatgtggagtgataaaatgaggcaccatctaacctcactccatgaaagcatttgggatattgtagagtttggagcgcaggcaccacaagtgggtgatgaggactatgactccgatgaggccgcctaa

SEQ ID NO: 28602 - DNA, 1191 bp, Zea mays
  Peptide Sequence Number=SeqID_70381
atggcggcgtacttgagcatgggtgaagcgcaacgccgcatcggcgactacctctctcgggtgaccaacgccatctcctgctccgacgccgccgcgctcgcctcccttctttccgtctcctccgcgccggcctccaccccgctctccgacgcgctcgccgccatcccggacttcccgcgcctcgctggagatcgctaccccgaccttgccgacctcctcgttccgttgctccgagccatccacttccactccatccagcgcttcgccgacgcctactcctcgttcgagaaggcctccaagttcgttccgcatcttcccgattcggttcaatctattggagttttcgaggatgtgacgaactgggagacgccgtgggcgatggaggcgatgcacactgtggcgctcgagatcaggctaatcgccgagaaggcagatagggagcttgcgacgaatggaaagaaccctgacaagcttcaggcggctgggtcttttctgatgaaggtttttggtacactagcggtgaaagggcctaagcgtattggggcactctatgttacctgccagctattcaaaatttacttcaggcttggaacagtaaacctttgccgtagtgtcataagaagtatcgaaactgcaaggaattttgattttgaagactttccagtgaaagacaaggtcacttatatgtactacactgggcggttggaggtgtttaacgagaactttcttgttgcagatcagaagctaacttatgctttgatgcattgcaatcctcaaagcgagtcaaatttgaggagaattttgaagttccttatccctgtaaagctttcaataggtgtactgccaaaaaggactcttttggagcggtatagtttgcttgagtatgcagatgttgtcactgcacttaagagaggagatctcaggcttctcaggcaagctctagacaggcacgaagaccaccacatcattcagagacagaaggaaccagctaaggcacatcagattaagctagatgttgtcgtaaaagctctgaaatggcttgaaatcgacatggatgtggatgaggtggagtgcatcatggcatgccttatatacaagaaccttataaaagggtactttgctcacaagagtaaggtccttgtcctcagcaaacaagaccccttccccaagttgaacgggaagcctgtttaa

SEQ ID NO: 28603 - DNA, 2805 bp, Zea mays
  Peptide Sequence Number=SeqID_70382
atgcctggcataccgagggatgtcgccgagcactcgctggatattcgggagaagcgcagagtgataggcgaggagatccacaagctaatggcagcagggttcatcaaagaggtattccatcccgaatggcttgccaaccctgtgcttgtgaggaagaaaggggggaaatggcagatgtgtgtagactacactggtctcaacaaagcatgtccgaaggttccctaccctctgcctcgcattgatcaaatcgtggattccactgctgggtgcgaaaccctgtccttcctcgatgcctactcagggtatcaccagatccggatgaaagagtccgaccaactcgcgacttctttcatcacgccgttcggcatgtactgctatgtcaccatgccgttcggtttgaggaatgcgggcgcgacgtaccagcggtgcatgaaccatgtgttcggcgaacacatcggtcgcacagtcgaggcctacgtcgatgacatcgtagtcaagacaaggaaggtttccgacctcctctccgaccttgaagtgacattccgatgtctcaaggcgaaaggagtcaagctcaatcctgagaagtgtgtcttcggggtgccccggggcatgctcctggggttcatcgtctccgagcgaggcatcgaagccaacccggagaagatcgcagccatcaccagcatgggacccatcaaggacttaaagggcgtacagagggtcatgggatgcctcgcggccctgagccgtttcatctcacgcctcggcgaaagaggtctgcctctgtaccgcctcttaaggaagaccgagtgtttcgcttggacccctgaggccgaggaagccctcgggaacctgaaggcgctcctcacaaaggcgcctgtcttggtgcccccagctgatggagaagccctcttggtctacgtcgccgccaccactcaggtggttagcgccgcgattgtggtcgagaggcaagaggaagggcatgcactgcccgttcagaggccagtctacttcgtcagcgaggtactgtccgagaccaagatccgctacccacaagttcagaagctgctgtatgctgtgatcctgacgaggcggaagttacgacactacttcgagtctcatccggtaactgtggtgtcatccttccccctgggggagatcatccagtgccgagaggcctcgggcaggatcgcaaagtgggcggtggaaatcatgggcgaaacaatctcgttcgcccctcggaaggccatcaagtcccaggtgttggcggacttcgtggccgaatgggtcgacacccagctgccgacggctccgatccaaccggagctctggaccatgtttttcgacgggtcgctgatgaagacaggagccggcgcgggcctgctcttcatctcgcccctcgaaaagcacctgcgctacgtgctacgcctccatttcccggcgtccaacaatgtggccgagtacgaagctctggtcaacgggttgcggatcgccatcgagctaggggtcagacgcctcgacgcccgcggtgattcgcggctcgtcatcgaccaagtcatgaagaactcccactaccgcgacccgaagatggaggcctactgcgatgaggttcggcgcctggaagacaagttcttcgggctcgagctcaaccacatcgctcggcgctacaacgagactgcagacgagctggctaaaatagcctcggggcgaacgacggtccccccggacgtcttctcccgggatctgcatcaaccctccgtcaagatcgacgacgcgcccgagcccgaggcaccctcggctcggcccgaggcaccctcggttcagcccgaggtaccctcggcccccgaggccgaggcactgaacgtcgaggaggagcagagcggggccgcgcctgatcgaaattggcaggccccgtacctgcaatatctccgccaaggagagctacccctcgaccaagccgaggctcggcgggtagcgcgacgcgctaagtcgttcgtcttgctgggcgatgaggaggagctctaccaccggagcccctcgggcatcctccagcgatgcatctccatcgccgaaggtcaggaactcctgcaagaaatacactcgggggcttgcggccatcatgcagcgcctcgagcccttgtcgggaatgccttccggcaaggcttctactggccgacggcggtggctgacgccactagaattaaggcgcccgggggctacacgcacctgctggccgccatcgacaaattctccaagtggatcgaggtccgacccctgaacagcatcgggtccgagcaggcggtggcgttcttcaccaacatcatccatcgcttcggggtcccaaactccatcatcaccgacaacggtacccagttcaccggcaaaaaattcttggatttttgcgaagatcaccacatccgggtggactgggccgccgtggctcatcccatgtcgaatgggcaagtagagcgtgccaacggcatgattctacaagggctcaagcctcggatctacaacggcctcaacaagttcggcaagcgatggatgaaggaactcccctcggtggtctggagcctaaggacgacgccgagtcgtgccacgggtttcacgccgttcttcctggtctacggggccgaggccatcttgcccactgacctggagtacggctccccgaggacgagggcctacaccgatcaaagcaaccaagctagccgagaagaatcgctggaccagctggaagaggctcgggacaaggccttactacactcggcgcggtaccagcagtccctgcgacgctaccacgcctga

SEQ ID NO: 28604 - DNA, 762 bp, Zea mays
  Peptide Sequence Number=SeqID_70383
aaatccgaagataaaaatcacgcggcggaggcgctctttgttttggccctcaacgaggacaaccgggccgccttcggcgtgctgggcgcggtaccaccgctcctcgacctgctcacgtcgcccacccacgcgccccgcgcgcgccgcgacgccgggatggcgctctaccacctcaccctcgcggccgtcaaccagtccaaggtcgcgcgcttccccggcgcgcccaaggcgctgctcgccgtggcctcgggcgccgcggagccggggcccatccggaggctggcgctcatggtggcctgcaacgtggccgcctgcgccgagggccgcaacgcgctgatggacgcgggcggcgtggcgtccgtctccggcatcctcctctcgccttctcacgacaccaccaacggcggcggtggcaccgcggacctggaggagtggtgcctgtcggcgatgtacgcgatgagccgaggcagcctccggttccgcggcctggcgctcgcgtccggcgcggaccgggcgctccggcgcgtggtggccgacgagggcggcggcgtccggcgcgagattgctcggaagaccctccgcgccatgcggagcgacctcgacgaggacggcggcgagtacaacgacctgaccggaagcagcgcggagtgcggcgacggtgaggactgcggcgggagcatcgtgtcggacgggctcatgtcgttccggcgccggcagcgcgagctcggcgtctcgtcgtgcggcaacaccgccgagttctga

SEQ ID NO: 28605 - DNA, 249 bp, Zea mays
  Peptide Sequence Number=SeqID_70384
atgcggtcgcaactgtgtgcgagtgcgggcaaagcgaagcttaaggtggcgtgttggtgcaagctctgcacggacgaggacgacgagtaccgtcgactcaaccgtgtgcaccgtgcggtgtggtatgggcgtatgggcttatggctacgtgcagaggccagagggggagagcggagcggatggacggcgaggcggagcaaaggacaaggccgcataaaagctgagatggtcacgatcttattggaatag

SEQ ID NO: 28606 - DNA, 240 bp, Zea mays
  Peptide Sequence Number=SeqID_70385
atggcgggcggaaatgagctcgccggagctaaggaacggtggctggccggtgagggattcgagttagggatcaaggtgaacatccctgatctttggctcaaggcggttcttcaattcaaggacgtttgcctagtggtcagggaatcaaaggacatggtggtcaggaagggcttagggcaagcacacgagtcgtcaaacattggcagtgatcccattgaggatagcagcaacagattatga

SEQ ID NO: 28607 - DNA, 762 bp, Zea mays
  Peptide Sequence Number=SeqID_70386
atggacgcagcagaacatcacgtggaggagaccaaggaggaggaagcagcgcaggtgatggagacgacgacggcgcactctcggttcgggaggatctgcgtcttctgcggaagcagccaggggaagaagaagagctaccaggacgctgccgtcgagctcggcgaggagctgtttcagttacctccacctcatggcaacaatgttattatggctgcagataaaatacgatatgtctcgaggaacatcgatctggtctacggtgggggaagtgtcgggctaatgggcctggtctctcgagcggtctacaatggagggaggcacgtcatgggggtgattcccaagaccctcatgccgagagagataacaggtgagacggttggggaggtgaaggctgtggcaggagggtatggaacccttgaggagctgctggaagtgatcacctgggcgcagcttggcattcacgacaagccggttggcctgctaaacgtgaacggatactacaactccctgctgtccttcatcgacaaggccgtagaggaagagttcatcagcccgactgctcgccacatcgtcgtcctggcaccgacgccaaaggaactgcttgacaagctagaggagtattccccgcggcacgagaagctaggtcgtgccgaagacgaggtgggagacggagcagctgatgagcaactgcaagagctgcgaggtcccgccggggctcaagctcaaagatgggaagccgatcgtccaggcgcagagagctag

SEQ ID NO: 28608 - DNA, 1791 bp, Zea mays
  Peptide Sequence Number=SeqID_70387
atgtacgaccgatgccgccgcccccagattccgcacgcatggtgttcgacgggatgctcgacaggaaaccccgtttcatgggccgccgttatcgcggcgcatgcgcagaacagccgttgtgccgatgccatgggtctcttctcctcccatgttgcggttggggaccgcgcccggacgagtttgcgctcggcagcgcccgtgcgcgcctgcgcggagcttggggacttgggcctagggaggcaggtgcatgcgcaggccataaaatcggataacggaggtcatctgatcgtgcagaacgcactcgtcaccatgtactccaagagcggttcagttggggatggatttgcgctctttgagaggattagggacaaagatttattttcatgggggtcaattatcgccgggcttgcacagcaaggtcgtgaaatggacgcacttcacattttcagggagatgattgctgagggcatgcaccaccccaatgagttccattttgggagtgtctttagggcctgctcagttgttattaacagtttggagtacggggagcagattcacggtttatgtgtcaagtataagctggaccgcaattcatacgcaggttgctcgctgggtgacatgtatgcccgttgcaataagcttgactcagcaatgaaggtgttttacagaattgagtcacctgatttggtttcttggaattccttaataaatgctttctctgctgatgggctccttagtgaggctatggttctgttctctgagatgagatattctagtctgaagcctgatggtatcacggttatggctttgttatgtgcgtgtgttggctgtgatgctttgcgtcaaggtagatccatccactcgtacttggtcaaattaggtttaggcggggatgttatggttcatgcatatgccttcaaggttggactggtgagtgatgcaattctgagtaatgctctgattgacacttatgctaaatgtggaagtttagatgatgccaacaagctctttgaaataatgggcaccggccgcgatgtgttctcttggagcagcttgattgttggctatgcccaatttggttatgcaaaggaagcacttgatttatttgccaggatgagaaaccttggagtcaagccaaatcatgtaacctttgtcggtgtcctcatagcatgcagtcgtgtaggacttgttgatgaaggctgctattactacagtattatggaacctgaatatggcattgtcccaacgaaagagcattgctcatgtgtcattgatttgttggcacgtgctgggagactaagtgaggcagcaaaatttgttgaccaaatgccatttgaacctgatattataatgtggaatactctgctagccgctagcagaacacataatgatgttgagatggggaagagggcagcagaaggtgttttaaatattgatccttctcattcagcagcctatgtccttttgtgcaacatatatgcctcatctggcaattggaatgagtttgcaagattgaagaaggatatgagaagcagcggagtccagaaatcacctgggaagagttggattaaactcaagggcgagctgaaagtctttattgtagaggacagatcgcacccagagtctgatgaaatgtacacaatgctggatctgattggatttgaaatggtaaaagcgggttatattccagaactttcatgttactcacgtaaatatattagttctgaccacacatattatgatttgctgagtgaagaaatgttggctgaatatggagtcagttctcaatag

SEQ ID NO: 28609 - DNA, 597 bp, Zea mays
  Peptide Sequence Number=SeqID_70388
cgctgactcctgaggcagatcagaaagttttcagaagcaaaatgtttcggcccggcccggcccatttcagctgtgggatcgtcggtacaggcacgcacaagaaaagagtgagaccgaaggctcaccgaaccgtggcggggatagctgttggcgagccattgccttcgcttgcatccccaggaactccccctcgctttattcacaaccacaaccacctcccaactaaccttgtgctccaacgtggcttatttgtattcggagtggctttaggtcgcgatggttctctcgtgatgcagtctggctgggttgactgttgcccggttcagctgaaaatgcatgggttgctgctgaaaacccatgtgtctggatatggtgggatgtctgtccctgtggtctggaaactaccaggtgacccagaactgatggccccaactcgtgtcaagtccgtcaaggctctgttccggcaaagtgatcggaaagaaatatgctgcggtggttctgttccagcacaaggaaccaagagcggtggcaagagcctggagaagaggaaggatcagggaacgggggaagaggttgctgccacagctcaggtctcaa

SEQ ID NO: 28610 - DNA, 214 bp, Zea mays
  Peptide Sequence Number=SeqID_70389
gaggggagggagcgagagaagcaatcggaagaaggatactgaagaggtagcgctcccaccaatcgagcatgtagaggccgatggtgacattgtagaggtggatcttgcgcccgatccagttcatcctcttccccgcgacgtccggcgccgcagctcacctcgcccagatccgaaaggagcggcgcctctgatgctctatgactacgagggttga

SEQ ID NO: 28611 - DNA, 888 bp, Zea mays
  Peptide Sequence Number=SeqID_70390
atgtgctgcgcgcccaaggtggcgaacgcggagggacgagggccctgtctttgctgcgccggcggtgaggaggacgacgaggacggccagcagccggcagcggcgtggcgaatgctatcggggtacgagcggagccgggaggcgtccatgatggtcgacgcgctggccacggtcgtcgctggcggggcaacgccgccggcaacggccgcagagcacggagcggcacggattcccgcgacggcggcgtcacccagctctagctcgcagcccccctcgccgtcctccaccggctccggcacgccgcggaggcggtaccgcggtgtgcggcagcggccgtggggtaagtgggcggcggagatccgggatcctcacaaggcggcgcgcgtgtggctaggcaccttcgacaccgcggaggccgccgcccgggcgtacgacgtggcggcgctcaggttccgcggcagccgcgctaagctcaacttcccggagtccgccacgctcgcggcgccaccgtcggcggccgcggttcctcctcctccgtcgccgccgccgcagaggcccgaggcgctgctcgagtcgcaggcgctggcgctggcgggtggccaggagtactcagagtacgccaggttcctgcagtgccccgccgatccaccgcgactctacgaccaggcgcctgcggcgaccgtgccctccgcggcgtccggatcggcgtcttcgtcgttcccggtgctcttcagattcggcggaggaggtgagagcagcggcgtggcgagcagtcagtggtggacgcagggcagccgctccgtgagccaagaaggagccggctccccgccggcgagctgggcggactctgcttggtggccggcgcctccgcgggacccgccacggtga

SEQ ID NO: 28612 - DNA, 642 bp, Zea mays
  Peptide Sequence Number=SeqID_70391
atggatctcctagagttactgatggtagtgtccacaagctcacaaggcatgcacttatggattttaagcactggcatattttatagtgtagcttgggttactaaatctgggaaatctgacctggaagcaccgattgcaatccgccccacaagtgagactgtcatgtatccatacttctccaaatggataagaagccaccgagacttacccttgaggtgtaatcaatggtgtaatgttgttagatgggagtttagcaatccaactcctttcataaggagccgtgaatttctgtggcaagaggggcatactgcttttgcgactaaagaagaggcagatgaagaggttctccaaatattggaactgtacagaaggatatacgaagaatttttagcagttccagtttccaaagggagaaaaagtgagatggaaaaatttgcaggtggcctttataccaccagcgttgaggccttcattccaaacactggtcgtggcatacaaggcgcaacctcacactgtcttggtcaaaactttgccaagatgtttgatatcacttttgagaatgagaaaggtgttagggaaatggtttggcaaaactcttgggcctacacaacccgctcggtacttctcactcctttgatttaa

SEQ ID NO: 28613 - DNA, 453 bp, Zea mays
  Peptide Sequence Number=SeqID_70392
atggggaggagaggaggagccgcagcgacggtttcgagtccgatagaccgagcgggcgaggggagggagggcacgaccgagcgcggtggctcaggggctagtgtcggcgacgcggaacggcacgcagaagtgcgtccacgcgaggaagacggtaaggctagggtgggccccacatgccatagagagaagttgatggttttaaggtgttacagccaacaactactcgagcatgcgctcctcgatcacgatgccaccattgatggcatgacccctcgtcgttgtcctcgtcgtagagcgaggcggcgctgccgagtcttcgagaggagcgatgcttgcctggtcccgaacgcgtggcgcgggaccccgccgacggacacggtaacaatggagctctcggtggcgcgcaaggcgaggcggagcacgtactcgctaccgacgggcccggcaagctga

SEQ ID NO: 28614 - DNA, 356 bp, Zea mays
  Peptide Sequence Number=SeqID_70393
atggaacgccgtggtctgggaggtgtcgtccgcccggcgtgggcacacgtcggcagggacgggcctgggtggaggcttcagcgggcgaggacgacgccagcgagcacgacgattgacgaccgtcacccggtcatccccggaaacggggcaacgaaggtggagagagtgagggggatcctgacgctggggaggggagggttgtggccgccgagcctggagcagaagtcggcgtggggctctggctggcagaacgttctccaggcgttgtccaggcagaacgttctccaggctgtccaggcagtggcaaccctctctaggtcggtccaggtggcggtgagcctggtggacctctccag

SEQ ID NO: 28615 - DNA, 349 bp, Zea mays
  Peptide Sequence Number=SeqID_70394
cggtttttgcgggaggattgacggcgtcgtatgttcttctgttgatgcttgctggccgagggcatactcgggcgagatggagacttctcctgagaccgaggtcggcgtcattggcggagcaggtgtgagggatccggaagagatggccaagtcgaagaaccacacggcgcacaaccagtcgtacaaggcgcacaagaacggcatcaagaagcccaagcgccaccggcagacctccaccaaggggatggaccccaagttcctgaggaacctgaggtattcaaggaagggcaacaagaagagtgcttgtcgataccgctgctgcttaggtgctcgcgaaacagttacatga

SEQ ID NO: 28616 - DNA, 333 bp, Zea mays
  Peptide Sequence Number=SeqID_70395
atggatatccaacggcaccaggctttcttctacctcgcgcgccgtccaacgccactatggaggccggacttccttcccgacggcacaccgataacaatcccgagcacgcaaatgaagaaggctgggcgccagccgcaatgtccgagcgggatctacggcgccggcgatgggagtttgttgcagtccgccggtcttgaggagaaggagaagatggcaactgaaatccgtgcaggaacaagaaacagtcggcgagatttcaggcgggagatcgacgttctgttgcggcgtccaaaacagagggaacagggaaatgtcccgctgggcggaggatag

SEQ ID NO: 28617 - DNA, 1468 bp, Zea mays
  Peptide Sequence Number=SeqID_70396
aggcaaaccacaaatcccggaaaaatctctgaagcagaaatttgtttttcagtttgactttgtaaagggacaactacaacgcttcttccctgaagattatgattctgagaaaatcaagaagaacaatattgagtcacctaatttgtctgatcaaccactacaacgtgaccttatagtggcgccggtgaaacgaaggctagttgatgaatttaaatcttgtgacttgtctcaccgacagaagagaaaagttaagttgcagggaaactcactgcaaactcagacaccaagaagatcaccacgattggtaaacgtgaacaatacttgtaataagaacaaaaaagtgtcgaaaggaagagccaaagtgctgaaaacaccaccagatgcaacagatcaggtgaaggatagagcacataaatcatgtttgcttgatgagaaactagataatgccttgaaagctgttcatgaagaagcgacaggttccttatctcaggatctcaggaaactggattccccacggtgtgaggttggcttaagtaaagagcatggacatgatcaaggagatactggaaaaatgttggatgaagtcagtgatgtagaaaacagtaaagaacatgtgggaagcgatgctatggggaattctgaatcatatatgagtacatactgtgtagagccattgccaaccaactctaggttgacagcatattcaagaataaatgagctatcatttacatggaagcactcacaacatgccagttcccttgagaaagttttacttgacattcaaagagataacttcgtgaacaccattgcacgcatccagaaaatcgtccgggatgatccttcagatgtgcttagtgcagatgtaattgaagccactgtacagatagaaattcttaaatggggtttatgccttcaggacaagtgcgcccacaagatagtaaatacaatgttggattatgctaaaaaggtcaaggggagacacaatttcaatactgagatgaggaaggaagagttctctgcaaagctgcaggatctcctgaagtggcagcttaaagaactagaatttaaatacacttccttggaatcagattacaagaaagcaatggctgatgctagcaattttttctcgacatttgaagagcacaggaaaaagttgcatgccattaaggacggtatcaaggacctgcagcaggcctgtatgactaaggacgatgaaatgcaaaaattggcacttcaagtcgctgagcatgcgaccgcatatcagaagtctataatggaaaaggttagggtcaagatggctctgaagagccatgagcagactcttggttacataaaagagcagctagcctctgcggaatctggatcaattgatgtaggggcattggttaagatagagatggataatatgagtagggagattgaactctccaagcaaaatcttctaaatatcaacttcaagaaagagtaa

SEQ ID NO: 28618 - DNA, 1005 bp, Zea mays
  Peptide Sequence Number=SeqID_70397
atgtcgcctaaattccctccatacctcacctcatcgcttgcagagccgagaccagataatacagttcacttcagggagaaaacagaaacaaataaacgcagacaagagggcgaccaatctggcggagctgctggagcttgctgcagtgaccgcatggcgggagaccaagacgcgtcgagtggtgacgcggttctgagcctgcagttcagggcagctggaggagagccagcgctccgctacaagagacagcgcgtgcaggcggaggatggtcgacgcgggcatagcagcggcgtttgtgggggagaggatgggattcctggcgacggcaacgacaagggggaagaggatggcactggggctctagcagttgctgttactcatcattgtcgacaccgacgacaaaaaataaaaggaaaaaaaaagctttggatgacagtggtgacgccgtctctctccgagaagaagggcgcgagggaaaggatggaggcgacggtcgacctcaagtacgagccgctgttcccgaacggcggcgtgtcatcggcgaccaagaagacgaggctcagggtggcggccggcggagagacgtgggtgtaccgcgagtgcctcaagaaccacgcggcgagcctgggaggtcacgccctggacgggtgcggcgaattcatgccgtcgccggaggccgaccgggcggacccgagttcgctcaggtgcgccgcgtgcggatgccaccgcaacttccaccgccggctcgtcgagctgccactgccaccgcctctcctcgccttgccgccaccactggcgccggcgccggctgtcgcgtcgcacgtaatgcgtgacagccgccgcacgatgcgcggcgaggaggcgcgcctgccggccgcattcgacgacgaggcggaggagtcggacgcgagctcggatttctacgaggaccgcccgctgtcgccgatgccggcgcaggcggcaaattgtgacgcccgggaaccgccaggccacgacgtgggctga

SEQ ID NO: 28619 - DNA, 255 bp, Zea mays
  Peptide Sequence Number=SeqID_70398
atggacagggcgcggtcgggcgcgggttcctggcgggtcgcggccagcgcgtgcttggcgctcggggtcgcgcgggttagggacgctcggatgcgtgtaggggcgcactgccctggcgcgatggctggcggctgctggcctcctggcgttcggttgaagcaggggaaaggagagatagagaagagagggaagagagcaggagagagggagatgggagcaagcggcggctggctacagggagcgcgcgacggctga

SEQ ID NO: 28620 - DNA, 450 bp, Zea mays
  Peptide Sequence Number=SeqID_70399
atggcggcgcatctgcgctcggcggcggtgcgtctcggcgctctctggccgaagatgaggggcggtgcgtctcggcgctcacccaactggcggcgcgcggcagctccctacaggcccatgccagccgccatgtaccggagactcctcgtcgtcgcgccactctctccgcccgcggcccctccaggcccatgccaggcgcccgcggcaaggtcgccggagccaccgaggcgggcgttccactgttctacggcccccctggggttcaggtccaccccggcgtcgtgggccggtccctgtccgggcgagggcgagggcgagggcgtggatacgggggctgagaaggggctggagatcgcgaggctggggacctcgccgcggatcgtggagaagcttgccgcgcggggcatcaccaggctcttccccatccaggtgctgcctccctcgtggtaa

SEQ ID NO: 28621 - DNA, 465 bp, Zea mays
  Peptide Sequence Number=SeqID_70400
atgacttttcgaaaatacgtcttcaaagacaaacgatataggaggtccacttgcagcgggatcctggcagcaagatacattatttgttgttgttgccaacctactatcgctgctttctctgcctctaaagctcttttcggcttactactttcttgcaacctttgtgatctacaagcttcgtgctccaaattgaccatcgtgacttctttggatgttgttggcaagacagaagaggtcttagccattgagagcggcgctttgttgatcgtggatgaagataaagctctgattgatgaaggtggcgttgaggacattttggctgacttcgctgaagaggagtctcgcgtggatagtgataaatttgagtttgaagaatataatagtgacactcgacaatcaaagccaagccatgtgtgcttggaaaagtcaacgatgaaaaaggggcatgttgaggcaatgaaatga

SEQ ID NO: 28622 - DNA, 444 bp, Zea mays
  Peptide Sequence Number=SeqID_70401
atgggcaaaggcaagaggggcaagggatggcctcaccgtgccgacggcaagcgcaagcgtcctacaagtccaccctcagagtactttggtgactcggattactcggaggaagtttcctctaagtatgatcggtcgcccactccagcgtcccccgtggcatcgtccgatgactcggacgactatatggggctatccatcgtggcccgggcgtactggcgatccatcgagcgcaccgggctcggtggatcctccaactccgaggagtggagaggcggcgacggcgacggcaagggcggcagtgatggtgaagatggcgacggcgagggcgacggaaacagcaagggcgacggcgacgacagtagcaagggcgacggcaagggcgatgacgactgcaagggcgacggcgacgacaacaaggccaacaacataacgtcgctggcgtaa

SEQ ID NO: 28623 - DNA, 255 bp, Zea mays
  Peptide Sequence Number=SeqID_70402
atggtggtggttggcgagtcggaggccatcagaatggcctgctcgaggtcctctatggtggtgcagaagattctgggcgagggaggtggagatgtagaaagagatgggaagttggagttgttgaacgccgaactgcggttcacccagtttgtgccttcacatctatatggcatgattgcatgggctatttgtcggtacatggaaggatcctacgagaagatcgggccacaacaacttgctacacatgctgcatag

SEQ ID NO: 28624 - DNA, 174 bp, Zea mays
  Peptide Sequence Number=SeqID_70403
atgggcgaggaaggcggcctgacgtgggggccccagctggaagcatcacgggttgaagagcacgacacagtgaccgggcctgacctgagggtcccatgtgtcaacggcttgggtggaggaaggcaggccctgattgtcggcgcccggttgtggtcgggccgatgtcaaatttga

SEQ ID NO: 28625 - DNA, 246 bp, Zea mays
  Peptide Sequence Number=SeqID_70404
atgtcctcttccccttctggtcaagtcgtccaggctgccggggtcagcgcctctctgctccttttccctagctatccaggcatgctctccttctccctcctttgcttttgctctgctcctccatctcttctgttctatacttttattgattattccagattcagtgcaacgagtgatcagccgcgaattcatatcatcgttgtgggaaccggaaagtctgcatctgcccacaggatgatggcctag

SEQ ID NO: 28626 - DNA, 1983 bp, Zea mays
  Peptide Sequence Number=SeqID_70405
atgggctcctcctgcgacccctccccgtcgccgggcgccgacgacctcttcctctccctctccgacctcggccccacgtcaccctccgcgtacctcgacctcccgcccaccccgcagccccagcaggggatcaaaggcccgacgcaggacttgcttctcccctacatctccagcatgctcatggaggacgatatcgacgacaccttcttctacgactacccggacaaccccgcgctcctccaggcgcagcagtctttcctcgacgtcctctccgacgacgccactgtcccgaccaccaccaccacccacagcagcgccagcgtcaaccaccaccactcctcctcctcctccgacgcatcagccagcgggccgctcacccccgccgctgtcgactcctacgcaccggcccccgccgcccagttcgacagcttcgacttcgaccccgcggccttctttagcaacggggccaactccgacctcatgacctccgccttcctcaagggcatggaggaagccaacaagttcctgcccacccaggacaaactcgtcatcgacctcgacccgccagacgaccccaagaggttcgtcctccccacccccgccgcggacaagctcgcgcccggattgaacgcggccgctcccaccgtccatgtggccgtggccgtcaaggaggaggaggcgatcctcgctgcgcctgatgccgcgcctggcagcggcggcgccgtcttgggccgcggtcggaggaaccgcttcgacgacgaggaggacctggaactgcagcgccggagcagcaagcagagcgcgctggagggggatggcgacgagcgggacgtcttcgagaaatacatcatcgcctcccccgagatgtgcacggagcagatgcagaagctgcggatcgccatgcaggaggcggccgccaagagggaggcggcggcaggcgagaacggcaaggccaagggccgccgcggcgggagggagggcctccaggcccgcctcgccggcacaggcagcatggtgtaccagtcgctcatggccaagcgcacgtctgccaccgacatactccaggcgtaccagctgtacatggccgccatctgcttcaagaaagtcgtctgcctattctcaaatcacaccatctacaatgctggactgggcaagaagaagatacatatcgttgattacgggatacagtacggcttccagtggccgtgcttcctgcgatggatagcggatagggagggtgggccgccggaggtgaggattactggcattgacctgccccagcctgggtttcgccctactcagcgcatcgaggagacagggcgccggctcagcaagtatgcccagcagttcggtgtgccattcaagtaccaggcaattgcagcttccaagatggagtccatccgtgtggaggatttgaacctggatccagaggaggtgctcatcgtgaactgcctataccagttcaagaacttgatggatgagagcgttgtgatcgaaagcccaagggacattgtgctcaacaacatcagaaatatgcggcctcatacattcatacacgcaattgtgaatggctccttcagtgcgcctttcttcgtgacaaggttccgggaggctctgttcttctactcggccttgtttgatgcgctggacgcgaccaccccaagagacagcaaccagaggatgctgatcgaggagaacctcttcgggagggctgccctgaatgtcattgcgtgtgagggcacagaccgagtggagcgccctgagacgtacaaacaatggcaggtgcggaaccaacgagcaggcttgaagcagcagccattgaaccctgatgtcgtgcaggtagtgcggaacaaggtcaaggattgctaccacaaggactttgtgatcgacgtcgatcaccgctggctcttgcagggatggaaaggccgcatcctctatgccgtctcaacatgggtggcaaatgatgccccctcttacatctag

SEQ ID NO: 28627 - DNA, 465 bp, Zea mays
  Peptide Sequence Number=SeqID_70406
atgggcggcgcccatgtccgcgctccaggagcggatcgtgcaaggaaagggggagccgggcgcgcgggcagccatggatggaagccgacgcggccgagggactggggcgcggctgccatggattggtcgcgacagccatggatggaagctttgtgggcgagattcgcagcggatttggcagactggcgattcgcggccatggatgtgatttgtgggcaatgcagaatctccatctcgcgtcgtgcaaggaatgggggagccgggcgcgggcagccatggatggaagccaacgaggctgggggaccgggtcgcggctgccatggattggtcgcggtagccatggatggaagcattgtgggtgagattcgcggcggagattcgcggccatggatgcaagcccagcgcacggggaaaggcagagaggcagaaccgtgcaccaatttcctctatggaggcctacgttag

SEQ ID NO: 28628 - DNA, 315 bp, Zea mays
  Peptide Sequence Number=SeqID_70407
atggcggtggtcgaggggacgaagaagaaggtaatcatcgacaccgaccccggaattggtagagcacagaaagccaccaagctgaggatcgcaagcttcgtccacggtacagacggcctgggaaaccaggacttccctcgaccagctaccaagcctgtagatcagtctgctgctgtctttctggttgagcagacaaatctgtaccctggtcaagttaccgttgtcacccttggcccacttaccaaccttgctctgattgtgtggattgtttcctacacgttgctctgcttctcgtttcttctggggttcaactga

SEQ ID NO: 28629 - DNA, 546 bp, Zea mays
  Peptide Sequence Number=SeqID_70408
atggacaagaatgtccgggccgcagaagatccatggacgaccgtggtgaacacgggcaggcacggacaagacgagcggtggagacagccaccgaggggccgcgagcgcgacgaggcaaacgaagaccaaattgttatagaaaccaagatacagtaccccatagaaatgtggttgaatcctgacaatgagcttcagataaatgcaccggaggatggagttgcccctccgagagctgctgccgtctccgccggtctgccaccaccaccgtctgtgttccacgatcctagcagagatcaagagaaagggagagggagtacagagtctagagagacggagagaataatgaacgacaagagcaagaaggggaggcggaggtccacgccggggagccctggctgccctgcggcggggctcaagagccgggggtcccgggccccgcccggccgctcggtgcctggccggctggcgagcctggtgaaggagcagagggccaggctctacatcgtgcgccgatgcgtcaccatgctcctgtgctggagggattaa

SEQ ID NO: 28630 - DNA, 357 bp, Zea mays
  Peptide Sequence Number=SeqID_70409
atgggcgacctcctcccacctcgtgccgagtccgcggtagttaaattggagcccctctgcgcccttctctacctttcccatcaacctagcaccgacctaagagccaccatcactgtggaattcgtgcgcacggggaagaacctcgccaggtccccgccgccatcgatcagcgtccgcacgcgttgccccgattattattatgtattttgtttacatgtttggtgtgatgttaattttctctttatactatgcttgttcgtattgtggcgagtagaagagagtgtggctgaggatactagtgttcagaagatagaagttgctgagcaggagctcattgaaggcaagctctgcccttga

SEQ ID NO: 28631 - DNA, 540 bp, Zea mays
  Peptide Sequence Number=SeqID_70410
atggaggcaagaagagattcgaggtaccaagtgcacgtgagaaggtcaaagaggccgaggaacccaaagccaggggtgaagaagaagacttgcaaagtcaaggttgatcgagttgagaagagatatggaaaatcctcccaaaagttgaagtcaaatggaggaagactggaggaaaaagcacttagtgtgctgttggctggtgcacaggacagtgaatacttcctgcatggctacctcagcagtgtccctctcagagatggcatagtgctctcagtaagcctctgcaccttggaggtcatcttccggatggcgcaccaggcaggtttgtcggtcgaaagctcgacacatcagggtatcaagagcgccgtgaaagtgacaaccacgagcggcgtcacgagtgatgggtcgggcgacccatccttcccgctcctgctccttagaaggctctgtgctgtggctcgagctgccaccatcatcgtctctgtcggggtctcctctagcagttggggtgccctgtggtggtgcagggggcacctctag

SEQ ID NO: 28632 - DNA, 261 bp, Zea mays
  Peptide Sequence Number=SeqID_70411
atggctcctcgatggaccatcatcattgaactagaatctgaaggtggtcgcaccatcgtcatcatccccgacttcactagctggtaccaccaggaccagctcattctcatcatcatcaactcctccctcacccaagacgttctcgccacctctacatgcaatgcctggagccctggaggacgttggagaagatgtttgcgtaaagctccaaggagaacatggtcttttgatgaaaaagaaatgtactttgtgaaaatctag

SEQ ID NO: 28633 - DNA, 1557 bp, Zea mays
  Peptide Sequence Number=SeqID_70412
atggggccaccgcagccagccaggcccggcgtcatcaacatcgaggcctgcgcgcggccgatcgccgtcgaccaccgcatcagccttccctactacttccgcatcgcgggcagcctcctccgacaggctaatatatatcggaacgagagtaacttcctcgacctatatgtcatccttctgagatactcgagcttgctgtgtgaaacaattccgaggcatcgtgattaccatgccttcaagttaagagaaaaggcattttttgataaacttgttgatgttatcaaagaacttgagacattgaagccagttgtgcagcggcagattgccgatcataacagaggaggtactgtggaatctaatatgaatagtctaaatggagacaatggtacaactcataggatagagcagcatactccaagctcttatactccacagccatttgtaggtagcactaatggagcatcgcaaaaatccttccatgctgggagacaagtggcatcattactgagtgtccagaaacaatatatgaatctaccatatccaaaagaagaaacactagctagacactccatattaggacctaacggtcttaatggtcgatggaatgggcctgttactggaattaaggcattatcttatgcatttacctactgctcgttacaggttcagtatccaagcaattttgaattaacacaaaacgatataacaagtttagtgccatccatcttgaaccaagatgatccgcaaggtcccagtactgcacctccacctccagatagcccctccaatgacaatgacgatatgaaatctgttctctctcttgatgatggtcgatggtctgtatcagcagacgaacacacttcatttacttctgctaatttggaagaagagttgttacagttgaatatcaaacaaccttctcctccaccagttctggcagaggtacaaagaccaatttctccatcaagagttgctgatccaacaccaggacttccgacctcgggaactgcccgttttcagaacttgcatgttccgatcaagttgatggattgttttctaagggttgccgagtcaaacaccaaaagaagcttagaaacctgtggggttcttgctggtaccctgaaaaatagaactttttatgtgacaaccttaattatcccaaagcagaaatcgacatctgttacgtgtgaagctacaaatgaagaagaactatttgaagttcaggacatgggctcactgttcactcttggttggattcatacacatccaacacagtcctgcttcctttcttccgttgacctccacaaccattattcttatcaggtcatgctgcctgaagcaattgcaatagttatggcacctactgacacaacaagaaaacatggtatatttcatctcacggatccaggtggtatgggcgtgatccatgattgtcaagagagaggtttccatcctcataaggcacctcttgatggttcgccaatctacaagcaatgctcccatgtgtacatggacaccgacataaagtttgatatgattgatctccgagaacgatga

SEQ ID NO: 28634 - DNA, 453 bp, Zea mays
  Peptide Sequence Number=SeqID_70413
atggacaagggttgcactcaacccatctcaagtgatcacaaagatctacttgagttccatagttcttccttatatcaatattccatttgtggggaatatccacaactaggagtctctcagaaccttacacaagatgaaaatcacaactcagaccgccaggcgccattgcccgccgtgcccccacgcccgcggcagtggtactcctcagagcagctcctcttcgacgtccccgctaatgcctgtgccggctggtgggcgcagcaggtgcgttgcgacgacggggagatcttcgtgtcggtggagcccgcgacgctggtgcggctgtgcggaggggatgcagcggccggggacttgccaggacagaggcagcaactcagtcccgggttgctcgacctccatgcgttcgacaccgagcttattcccgatgtgaggccaattatctgtattctttag

SEQ ID NO: 28635 - DNA, 486 bp, Zea mays
  Peptide Sequence Number=SeqID_70414
atggcgtttcaagtaccaggaatctatgatggtgcccaaacgtttggctatggaggaggtctagatgaatctgatatgagattcacatcaaacaagttgatgagcaagtctactatttttcctaatggtaactatctgaaggccttcactaagaaagaaaaggcagcacatgtcgtgaaaatcaaagtggtgggatttcagttgtatgttagcttctttgaggtatatggtggcaaattatttgaccttctcaacgataggagcaaactttgcatgagagaggatggaaagcaaaaggtttgtatagttggtttgcaagagtatagagtgtccgatatagagactatcaaggagttgattgaaaaaggcagtgctaccaaaagtactagcacaaccggtgcaaatgaagagtcctcaaggtctcatgccatttactaccgaacatcagttgttgatatatttgttatgttgtcgaatgtggtgtaa

SEQ ID NO: 28636 - DNA, 1170 bp, Zea mays
  Peptide Sequence Number=SeqID_70415
atgaaagagtccgaccagctcgcgacttctttcatcacaccttttggcatgtactgctacgttactacgccatttggtttgaggaatgcgggtgcgacataccaaaggtgcatgaaccacgtgtttggcgagcacattggtcgaacggtcaaggcttacgtcgatgacatcatagtcaagacgaggaaagcctccgacctcctctccgaccttggaacgacattctggtgtctcaaggcgaaaggtgcaaaactcaatctcgagaagtgcgtcttcggggtcccccgaggcatgctcttggggttcatcgtctccgagcgggacatcgaggccaacccggagaaaatcgcggccatcaccagcatgggccccatcaaggacttgaaaggagtacaaagggttatgggatgccatgcggctctgagccgcttcatctcgtgcctcggcgaaagaggcctacctctgtaccgcctcttaaggaagaccgagtgcttcacttggacctccgaggccgaggaagccctcgagaacctgaaggcgctccttacaaacgcgcccatcctggtgcccccccgctgccggagaagccctcttgatctacgtcgccgctaccattcaggtggggcaggcgtgggcctgctcttcatctcgcccatcgggaagcacctccgctacgtacttcgcctccatttcccagcgtccaacaacgtggctgagtacgaggctctggttaacgggttgcgcatcgccatcgagctaggggtccgacgcctcgacgctcgtggcgactcgcagcttgtcatcgaccaagtcatgaagaactcccattgccgcgacccgaagatggaagcctactgcgatgaggttcgacgcctggaggacaagttctacgggctcgagctcaaccacatcgcccgacgatacaacgagactgcggacgagctggcgaagatagcctcggggcagacaacggttcccccggacgtcttctcccgagacctacgtcaacccttagtcaagaccaacgacacgcccgagcccaagaaggtctcggctctgcacgaggcaccctcggctcagcctgaggcgccctcggccccgcccgaggcaccctcgcctaccgagggtgaggctctgcgcatcgaggacgtgcttttcggtcacgcctaa

SEQ ID NO: 28637 - DNA, 632 bp, Zea mays
  Peptide Sequence Number=SeqID_70416
acggacgcctgggatctaacgacctgctcgggccaggtccctcggccgccagcggtggccccgctcgcgtccacggcggtggcccaccggagacgagggcgcgagcgcgttggggtgccgggaagggctcagggaggttcaggggagtgtggcgaacatgaccatgggcacaacatcggcacaagggcattagagggcgcggaccgtggtagagtggcccaatggtggcgcggacttgctccggcgagcaatcgtgcgaaggatagggaaacaaacggggaaataagggcatggggaggttgctcacctcgagaggaaagtctagagtgcttgagcaacgacgggacacagggagacctcaggtcgatgacagtggggcttcggctgcaaggggagaacatcgatgagcacggaccgggcgaaaccgaggtgctgggggcaaaccagagggtgtcccgcgttgctggagaatatgcggagctcaccgaggcaacagacgcaacagatgctcgacgacagccacggaacggaggcggatcacgtcggagctccacgggcgcgtcggatacggagcgaggactaccgggtaaatacccagatattcaggtcggatacgggtacccggaattcgg

SEQ ID NO: 28638 - DNA, 333 bp, Zea mays
  Peptide Sequence Number=SeqID_70417
atgccgctcccgccgtcgctcgagctggacctgttccaccgcagggcggccgcgggcacgggcacgggcgccaccgccgtacgcttccctttcggcaacatccccgtaacgcacccgtactatttcttcaggcaagatgcaaccgcagccgccgcagaagcagggtgccgtgtgctcaagctggcgtcggcggacaccgtggcgcagagcgactcggactgttcgtccgtagtggatctgtcgccgtcgccaccgaccgctgtgtcggcgaggaagcccgccgtgttcgatctcgacctgaactgctcaccgccgacagaggcgggagcatag

SEQ ID NO: 28639 - DNA, 495 bp, Zea mays
  Peptide Sequence Number=SeqID_70418
atggctgtccacccagggatcgacggcagaggagtcgtcttctccacggcgtccttcgcggcctgcgcgtgctcgggagacacagctccgccagcggggtgccctcaaatgcgtactgacgcgcacccaatagcctcgccaggatcaacgctatgcgtagataagcatcggacgaacacagtggtgtgtttcttaccggagctcgatgcgcagagtagccggctccggcgtccagcagcgcgccgttgcgttcgtgagcagcgatggcgaggccccggtgcccaacacggtgacgcagaggatgatgtccactgcgcgaagaacaccgcaggcccacgcgtgttgaagaacctgggcctgctccccccagctcccgagctctctctctctctctcttttctcgacggcagaggcagtggatccacaggacccgcgagtttatgggagaacagggcgaaggagtcgcggccggcggttgcggcacttcggttataa

SEQ ID NO: 28640 - DNA, 180 bp, Zea mays
  Peptide Sequence Number=SeqID_70419
atggaggctgactgccatggaggatctgagcatcgaggcgaaggaggccgcgaagcagtaaaatcagtattagtaccagttgaaaaggacagtgggcgccatctactaggtctctgtttggatgtcgatattgagagccgtggaattgaaatgggagcaatatcaatactgagtgcctga

SEQ ID NO: 28641 - DNA, 561 bp, Zea mays
  Peptide Sequence Number=SeqID_70420
atgggcaagcctgaactcaattattccctatgtaaaaagacaatcacgcactgggagctgactggagagatggctttgttggcgcagggagtgccaccgcctcgggctcgatgggcctgggcttgccgagggaggagtgctacaccggataagcgcccagttgatgccctcgaagaacggctgctgcccctcttcactctccgggatcttgagctgctggccgacgacgttaaacaccatggcacggaagatgtcgaacgtccaccagtccaccgcgctaccgtggccctcgccaccgtccgaccgcacgacacacacttctgcgtggtgccgccccacgccgccgacatccccttgtcgtcaccgccctcctactctgtcatgcactcatgctcgcgatacagaagcgaaggaccggggtggaagaagaagagagggaaaaagaaagaggcgatggcaatggatggggtggatctatggagaggacgagacaggagcagggtcatccggcgggacgcggatcaggaccacctctacgaactcggcgaatccaagcggtga

SEQ ID NO: 28642 - DNA, 135 bp, Zea mays
  Peptide Sequence Number=SeqID_70421
atgttccttttaaaggccttcgatgatgactgtgtcctagtcagtgatgtgaaggcctaccagagcctcgttggggctctccaatacatcgccttcacctggcccaacatcgcctacgcagtccaccagcgctag

SEQ ID NO: 28643 - DNA, 174 bp, Zea mays
  Peptide Sequence Number=SeqID_70422
atgctccctgctggcccaatagcagtagcagtggtgcgcctcggcctgctggatctctcctgggctgggagaatggcttcacctcgtgagtcagagccaaagccgtttttggagaagccagagctctgccaaaggggccctaaaagcttgagtgatctcaacattcatatctag

SEQ ID NO: 28644 - DNA, 216 bp, Zea mays
  Peptide Sequence Number=SeqID_70423
atggatccatggagatgcgttgtttacgagatggaaattggaataagtattaacgtgcggatactgtgtcaagcatttgaacgtactaagcacatgccgagaaatatggtaaatcggttctctggaagacatggttgctggcgtgacttggccgtccatcttgccaccgggttggacagtcgagtggaaccctacctcagcattggaggagcatga

SEQ ID NO: 28645 - DNA, 176 bp, Zea mays
  Peptide Sequence Number=SeqID_70424
gtgaccccggagccaccctagctcacgcctgcgtcaactccagcgacctcaccgccgtggagaggagccgcgccacccgcaatcacaacgagcagtctgaggttcctgggtgtgttgttggagacctccctgagcaacaacctggtgaaggcaagtgtcctgaacctggggtgtag

SEQ ID NO: 28646 - DNA, 408 bp, Zea mays
  Peptide Sequence Number=SeqID_70425
atgttgcctttccttcgcatcaccaaggtcatggaattcccattagacacgcagggcagcgaaagtcgtcttgatgcagacgaacgcgccaagcagtgccatgtagtcgtcgacacccttcatgtcctcgcacggtttggtcctagtgatccagatacagcatcgccgaggtatccacacgggtggactcaccagccaagcaccacaagcggtggactgggctgcctcaccggctgcaatggacaagagcaggaggcatgggacgacaaccttgatgatccacctagggatgaaaacgggacggatacagccagatacatgatctcttaccctaataaaaagaaaaaatgggtacccgaattctgggtactcgtatccgacccgaatatccgggtatttaccggatag

SEQ ID NO: 28647 - DNA, 276 bp, Zea mays
  Peptide Sequence Number=SeqID_70426
atgaaggatgctacatggcgtgcactctcacagtattgctcgttgtttagtagggtggctgacagtcttaacctcaggtattacttccgccgttcgactggctacaccagaagtgtgattgtctcacctgttggcgaaggcaatccttggttgagcagcatagtcaacctagtcgttgtgctcaacactgagctaggccacactcttgatgagttgagtagggcacgtgctgagattgtggagttgcgggttgagcgagcggagcgctgtcaccag

SEQ ID NO: 28648 - DNA, 240 bp, Zea mays
  Peptide Sequence Number=SeqID_70427
atgtggtggtgcagggggcgcctccagcgagggcataagggagagactccacctcttgctaaggtggggaagaagaatcctactactccctcttctgtcgccgatgttcctgctcctcaagtaggcggtggtgtagcctcttcaagtgactcgactgaccagtcaatgtgctctgaagcggaagctccacaagacaagagggcaggaaaggaatcactgatttgcgtgttgtgtgcctaa

SEQ ID NO: 28649 - DNA, 160 bp, Zea mays
  Peptide Sequence Number=SeqID_70428
agattcgtcgctcatcctgggcgacatttaccgggccgtcagcagaagaggaccctacgaggttggcgccggccagggaggcgtcaaggaagggaagaccatcgatgtggcgactggtgctgatgccgccgctcacaagaagcagtgctgctcggcttag

SEQ ID NO: 28650 - DNA, 240 bp, Zea mays
  Peptide Sequence Number=SeqID_70429
atggccgttggggaggctgtctgtcgatgggcgcaccggacagtccgaaatgcatacacacgagggtatcctgacaccgctctccgtgccaaaggttcaacacaaaccaataaaaagatcaaagatagggttcaaaataaaggagcaaaagaaaccgaagagaaccctggtctggcgcaccggacagtgtccggtgcaccaggggcgatcgacttaaactcttcaccttcgggtttctga

SEQ ID NO: 28651 - DNA, 1359 bp, Zea mays
  Peptide Sequence Number=SeqID_70430
atggtgaggaagaaaagaactggccctggagagagttctggggagtcttctggagcgcctggtcatggctcctcacagcgtcctcaggcaacacaacagggtacccgtggtggagggcaacaccagggccgtggtggatatctgggccctggagtgccgccttcacagcacccaggtggtggcccacctgagtatcatcaaccgcttgactaccagggacgtggtggatatcagggccgtggtggaccaccttcacagcatcctggtggtgggacaccccctgggtctcaaccgcgtggctaccaggggcacggtggataccagggccgtggcgggccaccttcacagtatcctggtggtgggacaccccctgggtctcaaccacgtgactaccacggacgtggtggtccgcgtcccagagggggaatgccacagtcataccgtggcgggcatgtgggaggtagtgttgtaccaagtgttccttcaggtccatctaggccagttcccgagctgcaccaagccccagatgtccaacatcaagcccctgtggtggcaacaccatcttcgccaggagctggctcgtcctcgcagcctgggaaggctgaggtgagcgctggacaagtccagcaacagttccagcagcttgcgattcgtaaccaaagcttagccagccaagctggtcagatggcaccagcgtcaagcaaatctgttaggttcccattgcgccctggcaagggtacgcatgggtccaggtgcattgtgaaggcaaatcatttctttgctgagctgcctaataaagaccttcaccaatacgatgtatcaataacacctgaggttacttcacgcggcgtcaatcgtgctgtcatggcagagctagtaaaactttacagacactcccatttggatgggcgtctgcctgcatatgatggaaggaagagtctttatacagctggagcgttgccatttgcttcgaagacattcgaaattactctgcaagatgaggaagacagtcttggtggaggccaaaggcgccagagggtatttcgggtgaccatcaaatttgctgctcgcgctgatctccaccatctggctatgtttcttgctgggaggcagccagatgcccctcaagaggctcttcaagtacttgacatcgtgctacgtgaaatgcctactgccaagtattgtcctgttggtagatcattttattctcccaagttagggagacctcagcaacttggtgaagatatgtcctctactgcattttttgaggccctccctgtaattgattttgtttctcagcttcttaatagagatatctcagttagaccattgtctgattctgatcgcgtgaaggtttga

SEQ ID NO: 28652 - DNA, 603 bp, Zea mays
  Peptide Sequence Number=SeqID_70431
atggcgcggtgcctcgcgctcgtcgccctcctcgtactcggcctcgccgccgccgcctccgcggccgacgcgcccttcgtcgtcgcgcacaagaaaatttcgctctcccgccccaagccgggcgtcgagcgcgtcgctgtctccctcgacctctacaaccagggatccgcgactgcctatgatgtgtccattaatgacgactcttggccaacagaagtgtttgagcttgtcactggagagaaatcgaagacattggaaaggcttgaccctaaagttaatgattaccttgactctttcagtggtgccactgcttcacacacatatgtcctggagaccaaaacacagggcaggttccagggttcaccagctatcattacataccgtgttcccacaaagacagctcttcaggaggcatactcaactcccatcttcccactggatattctcgctgagagacctccagagaagaagtttgaatgggctaagaggcttgtgatgaaatacgggtcacttgtgtctgttgtctcttttgttggactgtttatctaccttgtcgcgagcccgtcgaagagcagctcaaaggcaagcaagaagagacgctga

SEQ ID NO: 28653 - DNA, 291 bp, Zea mays
  Peptide Sequence Number=SeqID_70432
atggcgcgcggcgagggcacgcggcacggcgagggcaagcggcgagggcgctcgacgcggctgctcggagtgggcgcggcgtggggaggcggctcgataaatttacaagcataccttcggctccttgacaaagggagatacgaaggttcttcgaaggctaagcgacacaaagctatggcccttgaaaagaaagacttttcgccttattcagatggccagaatccgcgtcactgcaaaattgatcagtcctacctccttagaggcacaataggataccctgcctatttctga

SEQ ID NO: 28654 - DNA, 1287 bp, Zea mays
  Peptide Sequence Number=SeqID_70433
atggcgagaaccttgttgtggctcgcgctcttgtgcgccgccttggcgttttgcacccgtgcagcaggcctccggctcgagctcacccacgtcgacgccaagcagaactgcagcaccgaggagcgcatgcgccgcgccacggagcgcacccaccgccggctggcgtccatgggcgaggcgagcgcgcccgtccactgggccgagtcgcagtacatcgcggagtacctcatcggcgacccgccgcagcaggcggaggccatcatcgacaccggcagcaacctcatctggacgcagtgctcgacctgccagccggccggctgcttcagccagaacctctccttctacgacccgtcccggtcgcgcacggccaggcccgtggcgtgcaacgacaccgcgtgcgcgctcggctccgagacccggtgcgcgcgcgacaacaaggcgtgcgccgtgctcaccgcctacggcgccggggtcatcggcggggtcctcggcaccgaggcgttcacgttccagccgcagtcggagaacgtgagcctcgccttcgggtgcatcgccgcgaccaggctcacgccgggctccctggacggcgcgtccggcatcatcgggctgggcaggggcaacctgtcgctggtgtcccagctcggagacaacaagttctcgtactgcctcacgccctacttcagccaaagcacgaacacgagccgcctgttcgtcggcgcgtccgccggcctgagcagcgggggcgcgccggccacgtccgtgccgttcctcaagaaccctgacgtcgacccgttcagcacgttctactaccttcccctcactggcatcacggtgggggatgccaagctcgccgtccccgaggccgcgtttgacctccggcaggtcgcgacggggctgtgggcgggcctcgtcgacgtggcgtaccaggcactgagagatgagctcgttcagcagctgggcgccagcatcgtgccgccgccggccggggcggaagggctcgacctgtgcgcggccgtggcgcatggggacgtcgggaagctggtacccccgctggtcctgcattttggaagcggcggcggggacgtcgcggtgccgccagagaattactgggggcccgtggacgatagcacggcgtgcatggtggtgttcagctcgggcgggccaaacagcacgctgcccatgaacgagaccaccatcatcggcaactacatgcagcaggacatgcacctgctctatgacctcgattttggcatgctctccttccagccggcggactgcagcttctag

SEQ ID NO: 28655 - DNA, 177 bp, Zea mays
  Peptide Sequence Number=SeqID_70434
atgtccgtgtgcgttctctcctcttttggcgacaactcggcgaccggcgctgccaccccacgtttggtgcccaggttttcctggggcccttcgccggtgacgagcatcatcaggattatgtggcaacaaggtggtaccgggcacctgaactatgtggttcctttttctccaaagtaa

SEQ ID NO: 28656 - DNA, 591 bp, Zea mays
  Peptide Sequence Number=SeqID_70435
atgccgccgcagaacggcgcgtgggtggcggaggcgcaggcgcagcgggggacgaagcagccggcggcgcggggacggcggcccggcgcggcgctgctgctgctcctccttctcctccgcgtgggcgcgctgtgcgcctccgcggccgcggccgcgctcgccgccgccgccacgccccggcggcgcgcgccgttccggttcctgctggcggccgacgccatcgtggctgtctactcggcgctggaggccgccgccgccgcgtgggaggcggcccggggagccacgcctctgccggaggccgtgcagctctggttcgacttcggccacgaccagggcttcggctacttggcgctggccggggccgctgcggcggcgcgggacgtggcagggtgcggccgcgggcgggaaggatggacgagcggcggcgggggcgcgggcgctgcggcgtgcgtccgggccgacgtcgccgtggggctcggcttcgcgggcttcgccttcctggcactcgccgcgctcgtcaccggcttccggctcgcctgcttcctcgccaccggctcccggttcccgccgacgcaaccggcatcctactga

SEQ ID NO: 28657 - DNA, 660 bp, Zea mays
  Peptide Sequence Number=SeqID_70436
atggaagcattagtcataggatatcggttgttgaaattcagattcagctacactttcttaactaggacatgcttaatccagggtacatggctgatgtgttcatcttctagaggatatcttgcaccagagtacaccattcaagggcagctgaacaaaaagagcgacgtctacagctttggtgtgctgctgttggagattgtcagtggcagatgccacactgatcctagattacccgttgacgagcagttcctcctagaaaaggtctggacactctatgagttcgatgatctcgagagcatcattgataggacactaaagcgcgattttgacaccgaggaagcactctggttgcttaaggtaagtcttgtgtgcatcccggatagccctaagatcaagtcctccatgtcaatggttgccaagatgctgcaagggtcctcaattaaggtcgaatggatgcaatcaaaactagaagggtgtgcgccatcgaggatcactgcagctaaggcaatcgtgaaggctggaatcgttgttatggcaccgcaagctattagtgtgctaggtggatttaggcctcaagggaaaacgattgacaatgttgtaaaggttgtggagacaacacttgccatgcaggaggctggatgcttctctgttgtgtattag

SEQ ID NO: 28658 - DNA, 633 bp, Zea mays
  Peptide Sequence Number=SeqID_70437
atggtggcgatcgagaaccagagccaggccgcggtggcggcggaggcggtggcggcgccggcgtcgcggatccccagggaggcgcggcgcctgctgcacgagctggcggcggcgtgggcggacgtggccgactgccgcgcgctggaggtcgtgccgctcaagggggccatgaccaacgaggtctaccaggcgcgctggctcactgcaggccctgccggccagaaggaggagcccagggcggagagggaggtgaggaaggtgctcgtgcggatttacggcgacggcgtcgacctcttcttcgaccgcgaggacgagacattgtcagctgccgaccttcgcgatcctgaaatttcagctctggtggcttccaagctgagggagttccacaaccttgacatgcctggtcccaaatctgtgctcatttgggacagacttaggaactggctcagaactgccaagagcttgtgtccacctgaagaagccaaggaatttcggttggacagtctggagaaccagattactgcattggagaacgagtgttcaggtgattaccagtggattggtttctgtcacaatgatcttcagtatggcaatatcatgattgatgaagagaccaacgtgctgaccatcatt

SEQ ID NO: 28659 - DNA, 735 bp, Zea mays
  Peptide Sequence Number=SeqID_70438
atggacgcggcggggtcggcgccgtcgccggcggcggtggtgagggagcgcgtggcggtgaagctccggggctacttcgacctcgccaaggaggagatggacaaggccgtgcgcgccgaggagtgggggctccccgacgacgccaccgcgcactaccgcaacgcgatgcgcgtcatgctcgaggccccaggcccgcgcgcgtccctgatgccgtctccctccagcgagagggggcaggtcagggtgtaccaggagaagatcgccaagtggcaggcgcaggtcgaggagcggctcagagtgcttggtcagagaagtgctgaaggtgccactgctgcagtagtgcctaagaagattgttttgagtgcaattaaaacaggagctactaataaacctcaagagttggatgatgctgttcttcgaagactggtgaaaagaatatatgtgccactacctgatccaaacgtacggaggctacttctgaaaaatcagctcaaaggacaagcattcaaattgtcgaggtattctggaagtgacctgagagccgtgtgcgaagaagctgcaatgatgccaataagagagctcgggccacagagtattcttgctattaaagcaaatcagttgcgacctttgaagtacgaggatttcaagaacgcgatggcggtgatcaggccaagcttgcagaagagcaaatgggacgagcttgagaaatggaacgaggaatttggttcgagctga

SEQ ID NO: 28660 - DNA, 213 bp, Zea mays
  Peptide Sequence Number=SeqID_70439
atgcaggagaggtatattgctgcacactcagccaatgggggaaaagagatcagagaagaaggggggcagcagtggcgtcggatggaggcacaagagaagaacgggactctaccgttggactccggcaccagagagaaggggagggtagcagcaccgtcggatgcctgcacgaaaagaaggggagggcagcagcgtcgtcggacgcagcactga

SEQ ID NO: 28661 - DNA, 291 bp, Zea mays
  Peptide Sequence Number=SeqID_70440
atgaaccacgacattgctcgaaattcctctaatcatgaaccatacaagaacaagggatctctagaaaattatttgccaagtactaaagacgatcaatctacatcagaacgaaaagtgagggaagcactggtagaggtcattcttggttttttactaatgatgttgctggtagaggaagcactggtgggggaaccatatgctgctagtagagatagaaaaggcagctctttaatgtcaaccattgaacaacaacagatctacatgagggctatgactttgattcttctttaa

SEQ ID NO: 28662 - DNA, 411 bp, Zea mays
  Peptide Sequence Number=SeqID_70441
atggaggaagcagaagaaatagttgactctgtcaatgaaaggaacgatgacctgctctcagcatggtgtgaaatggttaacaacaaagtgactcctttgcctgcaacgcctctacatattcttccagccataaccacattctgtgtttctggatatgagtgctaccacctgcgatattggactgaaattacttctgaaactgatccagatcatccatatttcaaaccctgtgagatgatgcaagtgttctccttgggattatcaagccctctcactcatcctgttaatatttatgggtatttttctgttcgtgataactgggaaccactccgcaattatctatttaagcgctcaagagctgatccagccatgatttctcaggcaagtgatgcttgttcttgttctgaatag

SEQ ID NO: 28663 - DNA, 138 bp, Zea mays
  Peptide Sequence Number=SeqID_70442
atgagggagcctcgggcgagacgaagattctctcgagcatctgtcctgaccaagacagacctcgggcgaggcgggatgtggagttttgagaagacccctgaggtggacctcgtgcgaggcgatgtcttgtgtttctaa

SEQ ID NO: 28664 - DNA, 1104 bp, Zea mays
  Peptide Sequence Number=SeqID_70443
atgcggaccaagacctcgggcgcgagttctgcctcgctcgacgctcaactcaacctcgagcgcaagctccacctcgcccgaaccaggcctcggtactggctctccctcgaatctcgtggagggtcacttagtcgactgtggcacgcgtcatcaagtctcaagacaaggctcggtcgcaaccttggacggacctccgcctcgcccgagttcggctcttccctcgatatctttgacagaggacttcccaatgtcatcaaaaatagtggagtgacgcatcccacagacagagacagtcagcagcggtgtgattgtgtgaacatagaagaatcaacagatcctttccttggagacgatcggaggcaactcgccatctttgaccgaccatgcgcagtctccaatcgttcagcagcgccgcccgtgaagctgatcacggcgttcggcagcccgttcgcccaccgcgtggaggtggcgctcgctctcaagggggtgccgtacgagctggtcgtggaggacctagccaacaagagcgagctgctgctcacgcacaacccagtccaccagtcggtccctgtcctcctccacggtgaccgcgctgtctgcgagtccctcgtcatcgtcgagtacgtcgacgagaccttccaccatggcgcggcgccggggatcctcccggccgacccctacgaccgcgccaccgcccgcttctgggctgacttcatcgacaacaagtgcttgaagccgatgtggctgtcgatgtggacggacggcgaggcgcaggcgcggttcgtcagggagacgaaggagagcctgggggtgctggacgcgcaactccaggggaagaggttcttcgccggcgacgcgctcggcttcgtcgacctcgccgcctgcacgctggctcactggctaggcgtgctggaggaagtggccggagtgcacctgatagcggcggacggcgagtaccccgctctgcgccgctgggccaaggagtacgtctccgatgaggtcgtgagccggtcgctgccggacagggacgagctcgtcgccttcttcaccgccagcaaggagaggtacaagtcgtgggtcagggcagaggtggagcgacattga

SEQ ID NO: 28665 - DNA, 240 bp, Zea mays
  Peptide Sequence Number=SeqID_70444
atgacttgcgtcagtgcttcttcctggtgcgatagaaatgtccttatccgaccagtcagcctcacgccaggtcggcagcatgggtgtgtggccagcaaaccaatcaggcggagagaaactcgatggaggctgtctgaagatcgtaagcgagttaggaaccattcgagcagcggctgggactgggacgcgagtccagcaaatcaccagaggccggctcgcatggagatgggatcaacatga

SEQ ID NO: 28666 - DNA, 348 bp, Zea mays
  Peptide Sequence Number=SeqID_70445
atggaccttgacgtggttgtagaggaggaggagcgtcggctcgagaaccacaatgaggcggaggatgctaggttctttatttgttttgatgagacccatggagatcctattgagattgatactgtcgctggctctggaatagggactggcacatgctccacgagcccggtagagtcagtccctgatcttgatgctggtgatagcaacttgaactcgaagaaaaggtctaagtattggaatgactttgatgaattgactaagattatgaatggtaagaaagtcaagaatgttgctcgttgcaagcaccttcgctacattatcagtgacaatctgaaccacgtgctctag

SEQ ID NO: 28667 - DNA, 126 bp, Zea mays
  Peptide Sequence Number=SeqID_70446
atgggattcgccttgaagacttcccacggtcccaccgatacggccagtttcaagaatatgttctggtttgtgcatcaagaatactttttatcagaattcactcgaggaatgcaagaattaggatag

SEQ ID NO: 28668 - DNA, 600 bp, Zea mays
  Peptide Sequence Number=SeqID_70447
atgaaagaaagaggcatttgccccacagtggcaacatacacttctgtgataaagtgtctttcctcttgtgggagattggaagatggtgaaattttgcttgatgagatggttgctgagggagtatgtccctccccggctacctacaattgcttcctcaaggagtatcggggaagaaaagatgtgactgctgccttagaactgtataataagatgaaggcacctggttcactgaccgcaccagatattcacacttacaacatactgctgggaatgttcagcaagctgaatcgacatggaactgttatggacatttggagtgatatgtgtgaaagcactgtgggtcctgatcttgattcatacactttgttgatccattgcttttgtgatagtcagaagtggagggaagcatgtcagttcttcatggagatgatcgagaaaggttttcttccccaaaagatcacctttgagacactgtatcgtggtctaatacaagcagatatgctgcggacctggagaaggcttaagagaagggttgatgaagaagcagcaaaatttggcgatgagttcaaactctaccacatgaagccttacaagaggtga

SEQ ID NO: 28669 - DNA, 438 bp, Zea mays
  Peptide Sequence Number=SeqID_70448
atgtggtccccgggagtcagcctcaccctctccttgctctgccattggggcccgcctgtaagccgttatccggccacaggagcgtgcgccgacatgtgggacacgctgtccgccactccttacccggatttgtgcgctgacttgtggaaccaggatgtcaggcgttccttcacaacgggcgtgccgcgcatggcggcggcatgtcgtgatccatggcctcgtgcggacttgtccaccaacctcgccaagtcgacggcggcggagctgctgcagcgcggagaaagggtcagtgagcgtggatcgagggagatagaggggaagggagcgaaccgaggagtgtcccaagtcgctggtgacgaggcgaagctcaccgaggcaacagacacggtcagggctcgacagcgacgaggggaagagggagtggggtgcgggtgctag

SEQ ID NO: 28670 - DNA, 317 bp, Zea mays
  Peptide Sequence Number=SeqID_70449
ggtgtgccgccgctgctcggccctgcgggtgtgtcaccgcttgccctcccacctcgggagtgctgccgtctctcgccagcctcggagccctagggtcgccgccgctcgcccgcaccggggacccgccagatctctccctctggatcgaggagccaccgccaccatgccatcgatctgggaaccgtcgctgcgacttgggatcgaggaaccgccgccatcgcatgtctgggtcagggagccaccaccaccgcaaccgtcggccaggggtccacctccgcgcgcgctctcgggcaaccgccgccgtcgcacgcgtctag

SEQ ID NO: 28671 - DNA, 2014 bp, Zea mays
  Peptide Sequence Number=SeqID_70450
atgggtgtgtacatgaagcctgtgattgatgaattggtctatgcttggaaggaagggggtttatgcatggcttccgaccctcccggcgacggcgccggcggggaagagccgacgccgggccctgcccccgccgtggaggtgcttgctgctcccgccgttccgctcaggccgcgctgggccacggagatcaaggtctacacccgtaagcacccccgcaaaacccctaaacctcctccagaaccagctcccgcccccgcctccgtccctgcccctgcccttgctcctgccccggccccgaatcccctttccgaaaccttatcctcgattcgtcgctccatccgccgcgcggacacggttggcgctgcggcgcggcccgatccggcagcgccggcctcggttcccgcccgggggccacctggggaacgcggtgccgcctcgggggacccctcatctgaggtgaaccgtgtcggcggcggtatttctaacggccacggcgacgaccgggcggcggccgcggctgagaagtctgagaaagcacggaaacgcagggtgaggagtgagttgcggcgccgactggcgggggagctcgaccaggtccgcgtgctctccaagcggctgaaggaggctgccgaggccctggcgcagcaggaggcttctgagcctgcgcctttgcccatggtggtgctgccaacacagcagcaggtggtggatgctgggtatgtgcaactgcagttctcagctggtgatatggcggtgcccatgtctgctcagattgcagctgctgttactcctgcccgttccatgctgcagcgcagaccactaaccgtgtcggttgttcataatgaagcctttgagaaggtgaagcggacgccaaaggccaatcaattgtaccaaaattcggagttcttgcttgccaaggataggatccctccctcagattcacatgtgcgcaagaaatctaagcaccacaagaagaagcataggtccctagaatctcgtggcgcagactttgatgctgagcggcggctgtactctcatgcgttcaagaagtcctcgtcacttctaagccgtttaatgaagcacaagtttgggtgggtgtttaataagcctgttgatccagttgcacttggtttgcatgattattttactattatcaagcacccaatggatcttggcacgataaggggacggcttagccgcggacagtacaggaacccgaaggagtttgctgaggatgtccggctcactttccataatgcgatgacatataatcccaagggtcaggatgtgcattttatggcagagcagttgtcaggaatcttcgaggcacagtggcctgagattgaggctgaggttaactaccttgcatcgtgtcctccattgccgaagaagtttccacctccaccaattgacctgcacttcctagagaggtcagattcgatgagacaccacatggcattggacaccaattcaagaccgatcagtcatactcccacttacacccggactccatcaatgaagaaaccaagggcaaaggatccaaataagagggacatgacaatagacgagaagcgtaagcttagtgagaacctgcagaatttgccacctgagaagcttgatgctgttgtgcaagtcattaagaacaagaacctatcagttatgcagcatgatgatgagattgaggttgaaattgatagtatggatgctgagacactttgggagcttgaccggtttgtggccaactacaagaagaacctgagtaagcaaaagaggaaggccgagcgagcgatgcttgccagacaagatgcagagttgcgtgcgcagcgccttatacaacaaccgcaaccaaccccagtcccccaagaacctgttggtgaaaaatctctaaagcaagttgcaaaaggtgagcaactaccaacatctgcatcagagaaaaacgacgagaatagacagaacgtgagtggttcaagcaattcaagcagctccagcagtgactcaggatcatcgtctagtg

SEQ ID NO: 28672 - DNA, 303 bp, Zea mays
  Peptide Sequence Number=SeqID_70451
atggaggcccaggcccacgcgtcatgcaaccggcgcgccggatgctacgtgcgagcaactgcactgccactcgcgccactgccacacctcctcgactgcagaaccagtaccgcgactcgaggcaacccagtgcacgacccagcagcgccagcctggcacgatggtcaatacggccaaaaatgggccgacagtaatggcggtggcaggcgggcaggagcagcggtcacatcggaccgggaaagggggataccccgaaaaggatccttctccgtgaaggaaccaggctccgagcctccctactga

SEQ ID NO: 28673 - DNA, 189 bp, Zea mays
  Peptide Sequence Number=SeqID_70452
atgtcgcggtacaactcactttcttcaatatcattttcgtttctgtgggaaggctcacagaaaatctgcacacaaaactacaaaagtttaaggtcaccaagaaccttgcaggataacacaagtgctggattttggaaatggaccatgggctttatgctccacaacatggatgggagaacaacagtgtaa

SEQ ID NO: 28674 - DNA, 1518 bp, Zea mays
  Peptide Sequence Number=SeqID_70453
tatgatgccataggttgggctccaaaagagtacaatcctgatgacaaacagaacagtaactttgaatctcaaaaagacgatggcagtggcacagcacagtcgggatttgtttgggatgaaaaatctggttactactatgattctgcatctggattctattatgacggaacaactggcctttactatgacagcaactctggagtttggtattcgtacgatcaacagactcaacagtatgtcccttgtactgaccagagcaatactaaggcagccggggagacgtccagtgaaaacatgatctcagatagtatttgtgggaaaaaggttgtgatctctgcgcctgctgccacaattaaacaaaacaagaaaacatcactccctgatgctgttcaagctgctgcaaatgcagccctggctgcagaaaagagagaaaaggagaaggcaaaagagattaagttggcctcaaaaagtagtctcatagctaataagaagaagatgaacaatgtcctagccatgtggaagcaaaggaatcaagaagggcaggccgcacggattgtcattgatgacaaagaaccaccaaattctgatgatagatttaatcattcacatagtggaactggtttctcttcgaaaagcaagccaaattttgaatttgaaaatgctatggataattctgttcgccaaggaattgcatcgacccaaatgttggattctgatgtaaagcctagacctgtcagtaacagcttaggtactacagttatgggtgtcataagaggttctactagaggagtgatcaagtcggatactacgtttcatgcattatctgatgccgggagcactgattcccgcaccactataatcacaagatcaaatgggttaatgacaagtcctgtggaacttgtaactcctgcaccctacaaaactgatgtgtctgccttagtctctaatacttcatcgggagtttctgggagtggtaaacgtcggttttctgaggcaccagggcaatcccagtacagggatcgagctgcagaaagacggaatctgtatggatcatctcttcgcactgatgctgttggattggattcaactggtcactatccgtcccgaaagggtccaagtgagatagggtcgatgccatttcctcctggcgtgggtgaacgttctaatggtgaaattggcaacaacgaaaactatgaagttattaccgctgatagcgcaatcgacgaaagcaatgtgggtaaccgtattctacgcaacatgggttggcaagagggactgggaaacatcgctttgagaacaaagtggtggaaactgaaaggaaagacgacagaagccttcaaggaaagggtcatcaaagagggcactcggaagaagacaaacaataattgggagaagatggcaacctgcattcggaaggtggctttaaaggtgcgtggagcaagtgagcaaccaaagggagtggaggcgaagctaaagttttttggtggtggaatgaggaagtctaaagggacctattaa

SEQ ID NO: 28675 - DNA, 270 bp, Zea mays
  Peptide Sequence Number=SeqID_70454
atggatgctcactatactgccgctactgaggctattcatctgcttgaatttttgtgtttgtattgccagaatggtcttgctactaaggttgagaagtcccgcaagcaaatgaaagagcggaagaacagggccaagaagatccgtggtgtcaagaagttgtgtcatttgcaagccaatccattttgtcatgcagttgtcatttgctcacctctgatccatatcagctttgatcgtgctgcatttgcgccagtgaacagtgattgctcatga

SEQ ID NO: 28676 - DNA, 126 bp, Zea mays
  Peptide Sequence Number=SeqID_70455
atgactgatgacaatatcacacagatgcaagaggcacataaagcagccatatgcagcatcagaaagcagcactgtgattgtgaaacactgtattatgctgatggaatagccaaaccgaataagtga

SEQ ID NO: 28677 - DNA, 852 bp, Zea mays
  Peptide Sequence Number=SeqID_70456
atggggcggtcgccgtgctgcgacaagacgagggtgaagcggggcccgtggtctcaggaggaggacgccgtcctcaggagcttcgtccagaggttcggcaatgccggcaactggatcgccctgccgcagagagcagggctgaagcggtgcggtaagagctgccgccttcgctggctcaactacctccgcccggagctccggcacggcggcttcaccgacgaggaagacagactcatcctctccctctacggcgagatcggaagcaagctccccggacggacggacaacgacgtcaagaactactggaacaccaagctcaagaagcggtacttggcgtcgtcctccacgtccacgacacaaggaaggtcgccgccgccgccgtcaccaccaccagctcctgctcctcctagcggcgacaacagtagcaacgccgccgctgccgccgacatccaccatacccaccaagacgaaaaaccctgtcttccgccgacacctccagccctcaccgagttcgatacaaccttcgccgacgacacgctgctcttcaagtccgagcagctgtacgccgagctcgtgggcctcatcgggaagcaatcgtcgtccactggcgacagggacgaagcgtcgacgccatcgtcgtcctcgtctgcagcccgaccccgacggttagcagctcaggtagctgcactttgtggcccgtggacggtggacgtgcgtgacacagcagcactgctgtccgagcccaccaccgccctgctcgacgcttacggtgctgctgacgacgcgttcgggccggctctgtccgcctgctccttccaagacctgctggcctcgtcttacgtcgatttataa

SEQ ID NO: 28678 - DNA, 633 bp, Zea mays
  Peptide Sequence Number=SeqID_70457
ggcgacgtgggggttcctccgaagccgaggttgagtctgccttccgttgccgtggccgagcccgagccatggggtcgggcgaggcggaagtcgttcggccgaggccagggcggagtccgagccctggggtcgggcgaggcggagtttcgtcgtcttccgggtcttagcccgagtccgagccctggggtcgggcggagcggagttcgccgtcttccgggtcttagcccgagtccgagccctggggtcgggcggagcggagttcgccgtcttccggcggagttcgccgtcttccgggtcttagcccgagtccgagccctggggtcgggcggagcggagttcgccgtcttccgggtcttagcccgagtccgagccctggggtcgggcggagcggagttcgccgtcttccgggtcttagcccgagtccgagccctggggtcgggcggagcggagttcgccgtcttccgggtcttagcccgagtccgagccctggggtcgggcggggcggagttcgccgtggcgcctttggcaaggcctgactgcctgtcagactcactctgtcgagtggcactgcagtcggagtggcgcaggcggcgctgtccttctgtcagactggccagtggagcggtggagtga

SEQ ID NO: 28679 - DNA, 243 bp, Zea mays
  Peptide Sequence Number=SeqID_70458
atgaccgatcaagatcatggtctagatcaagatctcctcgtgcgagaagtcatggtcggaaccaaagagatggcctgtatgatgataatcgatttgacagaagaagggaatatgattgggatgataggaggcatggccccatctgccactgttgttgtcaagggactgtctatgaagactaatgatgatgacctatatcagattcttgtacaagttcttcataacttcttgcaccggttttaa

SEQ ID NO: 28680 - DNA, 696 bp, Zea mays
  Peptide Sequence Number=SeqID_70459
atgggtgggtcttctcctggacaagaaaatcttacaaggcctacttatgggccccgcactgttgctgcactctgtgactggatttgttctatatgcggatgtatgaatttcgcccgcaggacctcctgttttcagtgcaatgaacctcgtgctgaggatgctctaccagctgatgcgacaggtccaactcatgttttagttgttcgtggcttagatgaaaatgctgatgaggaaatgcttcggtacgaatttgctaagcacgcaccattaaaggacatccgccttgttcgggataagtttactcatgtgtctagaggttttgccttcgttcatttccattcggtggaagatgctacgaaagctctggaagctacaaatgggattacactcgagaaaaacggtcaggttttgcgtgtagcatatgctaaaagtacacatggacctgcatcagggggctcacagtcaaacagccttgctgcagctgccattgaggctgcatcatttgctcaacaggaagcagaaaaggacctacacatggttttcattgacttagagaaggcttatgacaaaataccattgaacgttgtgttgtgggctttggacaaacataatgttccaaccaagtacgttggaatcattaaaaacgtgtacaactatgtgactagtgttcgaacacgaatcaagcttgattcatag

SEQ ID NO: 28681 - DNA, 915 bp, Zea mays
  Peptide Sequence Number=SeqID_70460
atggagatgagcactcaacttaattcgctctggcctgcatatgcgctcctatacgcgcgtgacgacgtggtgaataatggcgatggttgggctcggacatgtatatatataccacacacatcatcagcgaacaactgcttccagttcatcgcctacttcggcgtgtcgacgaacctggtgaactacctcaaggaccggctgcacgagggcagcaaagccgccgcgaacggcgtcaccaactggatgggcacgtgcgccatcacgccgctcgtcgccgccttcctcgccgacgccttcctcggcagatactggaccgtcgcgctcttcctggccatctccgtcgtggcctacgtggtgctcgcggtgagcgcggcggcggcggcgcaggggagcgccggcttctacgcggggctgtacctgctggcgctgggcagcgcgttgcagccggtgctgtcgtcgttcggcgcggaccagttcgacttcgacgacgacgacgacgaccacgacgacgagcgcgggcgccggcagagctccttcttcaactggttctacctctccatcaacgtcggctcgctggtgggcggaaccgtgctggtgtgggtgcagtccagcgtcggctgggggctcgggtacgccatacccgtgctcttcagcgtgctggccgtcgcggcgttcctggccggcaccgccacgtaccgccgccaccagccgcccgccggcagcccgttcactagggtcgcgcaggtcgtcgtcgccgcggtcaggaagtgcggcgtcgaggttccggaggacgcgtcggcgctgcacgagtgcgaggacgccgacggcatgtctgcgatacagggcagccgccggctcgcgcacaccgatcagttcagggctgctttctcctctagacgtttgaaaagtttgtag

SEQ ID NO: 28682 - DNA, 174 bp, Zea mays
  Peptide Sequence Number=SeqID_70461
atggcctttgtgccgacgtttagtggaaggattcgtaccgacgacatctccctcggcgatctcaccgtcggggagtttgtgctcttccgccggtgcccggcttcaaggatgttcatcagccttgtgggggtggagagcgagctgagctacggctccatctcccgcatgaactga

SEQ ID NO: 28683 - DNA, 882 bp, Zea mays
  Peptide Sequence Number=SeqID_70462
atgggcaagtgcgtgaggatccgcggcagcagcaagccgcgcgccgccgccgccgcggcggcgtcgtgcctcacgctgtgcagcgggcgccgcgtgccgccgtcggaggcgtcggcggcgtgcagcccgaggacgagaagcaggccgcggcgccaccgcggggcaggcctccggcggtggtgcggcgccaaggagagcgcgtacggcggcagcccccggcgccacaggggcgagggcgaggccgacgcgcggagcccccgtggccgggtgctcggtgtcggtgcccgccagcagcagctctgcgccgacgacgggctcggccagcagcacgaggaggaggcgtctgcgacgatggccggcgactgcgacgacggcgcgggcgtggcgaaagtgaataaggcgaataaacacgagaacgacgagtgcggctgccgcgtcgtcggcggcgtcgccagccagacgccgtcgccgtcgccgtcgccgccaccgccgccgacggaaaccgagatagaggccttcttcgcggacgcggagctggccgagcgccggcgattcgcagaggcgtacaattacgacgtcgccctcgaccgcccgctggaggggcgcttcgagtgggtgccgctgccgctgacggggggtcggaggtggatgatccattggaggacgctttctgatgagctccccatgctgctagagctgtgcttatcgaccagttctgccacgcgtgatctttcgttctcctcgatcgtctgtttgcttgttttttggagcaagctagggcaggcgggagagaggcgagcgagcatcaggtcgtggtatattctgggagggcatggtagcagtacgggtacaaagtcccttgtcgtggagagaaacgcatga

SEQ ID NO: 28684 - DNA, 198 bp, Zea mays
  Peptide Sequence Number=SeqID_70463
atggcctactcgatgtcatctatggtggtacagaagaatttgggtgaggaagaagcagacgaggaaagagatggtaggttgttgaggttaatatacgacatcatcaacaagggggaggagaaagcactcgtggtggttgtatggttggttgctcatgcaagaggtccccgaacttggcattttatgtcacttgagtaa

SEQ ID NO: 28685 - DNA, 1464 bp, Zea mays
  Peptide Sequence Number=SeqID_70464
atggcggacctcgaaaccctagccacgcccgcccctgcctctgcctccaccaagaagaagaagaaacactccaagaagcacaaggccgccagtgacgcccccaccaatgtcaccgtcgacgcatcccttatgggcggttcctcctacgtcgcggccgcccccgtggtcggctacttcccctccgggtacgacccactcactaccgctgccggggcggagtctgcccccggcacccagctcttccggcacgagaagcatcccacctgggtggacctcgtggtccggagccccggcggcggacacgacttcgttggccggagctatgccggtgaggccgccgtgccgcaggtctgcgactacgcgcttggcgtccttgacaaggcctccggcactctcaggatcgtgcccatcgctggcaaaaagattctgaggctagagccacatcttgaagtgcagcatccagcgcattcgcagcactctgaggtggcatcagaagcggcttcagctgcaggaaatgatgaattgaaggttcaggatctgacaatgatgtatggagccaagacggacagggacaagcttaaaactaacagttgcaagactatatggaacaaaaggaatgaaagtgccactattatttcccctgtttgtttatgttttttaggaaatagtgtatctaagaggcgcttgcagcattccttgcaatttcaaaaggacaataagtggagatcgttaaaggaacaaaggaatgatccttccgcttatgaggacattgatcttggaatatcagagaccaatgtcaacgccaatgataggcaggaacctgtacttgttcggaacattccaccttatgatcctaccgcagatacatcagaaaatgcatatcttttggacgagattattccaaagagtatgcgggagcatcttttggaaattgtccgtcattttgaatcaggagaaatctcctcaaaaggctatgggagttttgtctcaaaacgtgtgcacaagttaaaggagcttcagggtgaagataaaaagaggtttgcttggatactttcctacatccaacatctcctatctctattggcgcggaatggctccatgtccaatcgcaaatggaaaggcagaaatgaaaaccagataagccatggaccagcaaccccgcaggctgtatatcgcaggctgctgttcatgtttacagaaccggggtccagtgtcatgccaacagagaaaaaagagcttctgaccaactacatattggtcctaacactttttgccgatgacttcagatccaaccccagcgacatatgtgaggaccttaaaatgacccgccaaaatcttaaaccatactatgaccagttgggatgcaaatctgtgacagaaggtgcttttaagtctactttcatgacgctcccagcccctctcaagttcccaaaggaagttacgagaaagcggcgacggcagtag

SEQ ID NO: 28686 - DNA, 909 bp, Zea mays
  Peptide Sequence Number=SeqID_70465
atgtgggggcggcactactggggcggcggccggcgcccaagctgggcgcccggagggaacggagccggcaccggcggcgtggtggtgatgttcgcgtggctgtccagccaggagcggcacgtgcgggcgtacgtggagctgtacgcggcgcacgggtgggcgtgcctcgtctgccactccgacttcctcaccctgtttttccctgagaaggctgccatgctcgccgacagggtgattggggagcttgtcaaggtgctgaagattacacctgtacctgttgtgtttgcgtcgttttcgggagggccaaaagggtgcacatacaaggttcttcaggatgagtaccagctcgtacgagattgtctatgcggacaaatgtatgattcaagccctgtggattttgtcagtgacttgggcactcgcttcctcctcgatccaagtgtcctgaagatgtctgaacctcctcgtgtcttgtcatggatgactaagggcattgcctcaggtcttgatgttcttttcataaacaaatttgaagaacaacgtaaagattattgggaaacactatactcatcggtgcattttggtccaatactaatactctgctcagaggatgatcaacttgctacatattcagttgttcaaaattttggccagcatctgctagagcttggtggtgatgtgagcctaattaaatggcatagttctccgcatgtcggccactacaagcatcatcctgaggaatacagagctgctgtgacggagctcctaaagaaagcctcgacgctctacgcgagcagacgacaactcaacggacacgccgtgggcacaagcgagcacaccgacgcgccccgcgcctgcatccacctccaagtccaacccacacagagatgccgcgagctctgtcggtcgtag

SEQ ID NO: 28687 - DNA, 285 bp, Zea mays
  Peptide Sequence Number=SeqID_70466
atgaacgtcggcaacggcctgaccgacgaccgcaccgacatgacgggcatgttcgagtacttgtggcaccacggcctcacctccgacgagaccctggtgagcgctggaggcgtgcccggggacctccctgatccacccctcgccggcgtgcaaggaggtgtgggacgtggccaccagggagcaaggcaaacatcgacggctacagcatctacacgccgcgcgccgtgcgagaagggaaccccgtacgcgtacgagcgcatcttcgaaaaaggagccgccgcgtaa

SEQ ID NO: 28688 - DNA, 571 bp, Zea mays
  Peptide Sequence Number=SeqID_70467
gctcctactccgatgagttcatctgcctccaccgacccctcctcccgcctccactatggcagcacgtccctcaaagccgacgatatgacggcgagctcacctgggcgctcgcgaaccgcttctagggcatcggttccttctttgctccggcggcgcttggaggcagaggggcaatgggttctcgcccaatcggcttcgcgtgatgctgctgggggtggacaagcgtcgcaagggcaggacggtgccgccgtggaggaagaggacagcggtggcggcgactacgacactgtgctgaaggcccacgctagatccggtggcggcgactacggcgccgtgctgaaggcccgcgctagatccggtgccagcgacggtgggtgcgtctgcttcatcccgtccaccctcgtttcgattctccactcctcgcgatgctgccatctcgtcttgtcattcacctcgttttggattattggggagttctcatcctcgctggagacagcgggtgggcactggcgggtggactgtcttctccgtgctaaaggaatgccatcctatttcgccgtgctggaccagg

SEQ ID NO: 28689 - DNA, 393 bp, Zea mays
  Peptide Sequence Number=SeqID_70468
atgtctccaccactaacatcatcaagccgcccatggaggcacgataaggaggaggtgatgcgtcagctcgctgaacggcgcgacaaggaggatgaggaggtgttgcgacagctcgccgaacggtgcgacaaggaggatgaggaggtgcgccaacagctcgccgaacgacgcgaaaaggcgaaggaaaagtaccaatcatacttcacggtggaccgctaccagaacatcattcgtcgaggagagatcgatatggaatctctcctaccttcacctcaggctcccattccgtcgccgcccgtcacgcgaccgactttagatacatctagacagtctgtgggtcatcttggacagtccggttacatcgtggaccatccgatgtatttcgccggatag

SEQ ID NO: 28690 - DNA, 387 bp, Zea mays
  Peptide Sequence Number=SeqID_70469
atggtgatcaggcagccgatcaaagctccctgtctcgcgcatcgcggatggtctggcgtctcagctcggacagtctggagcccacgcggacagtccggtagtgagcagaggccacaacaaaaaggcgagatccaagttcttcatggagaagaagatctctgcgcagtcgcggatcgtccggcaacgcgcaaggaaggagcagctcctacgccgaggtcgcggaccgtccggacccgtgacacggaccgtccgcgttcccgcagagaacacaccgctaggtggttcatctccagtgattggtgcacaggtcgcactagtacacagaagctctatagtggcggttctaaacatatttacactggcgtttttcagtaccgccagtgctag

SEQ ID NO: 28691 - DNA, 330 bp, Zea mays
  Peptide Sequence Number=SeqID_70470
atgggcaggggcaacagttttgctttttgtttatctcttgtcgtcagtcctcgcctcctcctgcctcctcttcgtaacgacaggcagcagacccagaccgatgcaggcgcatgcacagtcgtcacctgcctgccaacgctgggcgtacaggtgggaagtgggaactgcgatcagcagttcagcaccaaggaggaactggagagccatcaggtagcagcgagcatccaatccaatgactctaaacccatcgggcgtcttggcctgattgattggaatggaacgggacgggaggagggggagtcgtctgcgtccatctcatcactccagtga

SEQ ID NO: 28692 - DNA, 1887 bp, Zea mays
  Peptide Sequence Number=SeqID_70471
atggcaaggacgccaggggcagatcaggcggggagctgggcgctgccgagcatcggccgccgcggcggcggcgtttccggcgacctcctcccggcgttcggcgagctctcccctaccggcggtaacagcaacaccatcaacccttacgactgccgctacaggtggtggcagagtttcctgatcggtccggtgctctactcggcgtggtcgtcgccgttcgagctggccctcgacagggcggccaccacgccggttgtcgtcgcgagcctggtcatggacgcgttcttcgccgccgacatcgccgtctccttcttcgtcgcctacttcgacagatccgccaatctcttcgtcgacgaccgcaggaagatcgccaccaggtacctcaagcggccgtcgttcgcgatggacgtggcctcgacgatcccgttcaacgtgatctaccagctggtgagcggcaggagcactgggtggttcaggtacctcaaccttctccgcctgtggagactgcagcgcgtcagcaagctctttgcgaggttggagaaggacatacgattcgactatttctacaccaggctcatcaagctatgcggcgtgacgttgctggcgctgcactcctcggcgtgcatcttcctgtggatggcgttccaccacggcgacagggagcacacctggctcggcagccaggtgcgcgacttcgcggacggcagcgtctgggtcaactacacctacgccgtgtactggtccatcaccacgctcgccaccgtcgggtacggcgacctgcacgccgtgaaccccggcgagatggtgttcgccacctgctacatgctcttcaacatcggcctcacctcctacatcatcggcaacaccaccaacctcgtcgtccacgccgcaaccaacacattcaagatgagggacatggtgcggcgggtctcgatgttcgggagcgtcaaccggctgccgccggagctgagggagcagatgatggcgagcgcgcagctcaggttcagcacagcggaggtgatccagcagcagctgctgtccgacctgcccacggcgctccggtcccgggtcgcgcaccacctcttcagggacgcggtccagcgctgctacctgtttcagggagtctccgacgacctcgtcgtgcggctggtttcagagatgagggcagagtatttcccaccccaggcggacatcatcctccagaaggtgacctccacggcctgctacatcatcgtctccggctcagcgcttgtgatgaagatagggccgcatggcatggcaggggaaatgggcgtcattctgggcgtcccgcagccgttctccgtccgtagcaggaggctcacgcaggccttgtgcatcagccacagccatctcctggggatactccgttccaacaccgcagatgccaacaccgtatgcgccaattttgttaagcagctcaaatctctcaaggaactgcaggttgcagaggatgcgccgtttttcgaggagacattttccaaaacaagcatggatgagcttcagatcggctccatctttcaacagctacttaacgacggcgacgctgccaggatgattccaaggcagaatcagaaagccaccttcggcaccgaacaacacgaagagaccgctccctgcatgttgccgcgtcgacaaggcggactacgagtggtcattcatgatcgctttcccagcgatggcgcggagaagaacctgggccatgccgcggggaagcttgtcctccttccggattcgctgcaagagctgatgaaagtagccgaggtgaagtttgggaaggcgccgaggagggtgctcaccgtcgagggcgccgaggtcgacgacgttgccgtgctaagggatggagaccacctggtgttgtgttgctag

SEQ ID NO: 28693 - DNA, 774 bp, Zea mays
  Peptide Sequence Number=SeqID_70472
atggtcacaatcaaaaccggagtaagggggattaagaacatgcacacaagcgcacaatcacatcaacaacacatactatcggggaccataattaggggtaccctcaagactcctaatctcagctggaaactccgcctcgcccgacccagggctcggactcgggctcggtcccagaagacgacgaactccgcctcgcccgacccagggctcggactcgggctcggccccagaagacgacgaactccgcctcgcccgacccaggctcggactcgggctcggccccggaagacgacgaactccgcttcgcccgaccccagggctcggactcgggctcagccccggaagacgacgaactccgcatcacctgaccccagggctcggactcagccctggcctcagccgacggtctccgcctcgcccgacccagggctcggactcgggctcggccccggaagacgacgaactccgcttcgcccgaccccagggctcggactcgggctcagccccggaagacgacgaactccgcatcacccgaccccaggctcggactcagccctggcctcagccgacggtctccgcctcgcccgacccaggggctcggactcgacctcgacctcggaagacagactcgacctcgaccttggaggagcctccacctcgcccaacccagggctcggatcgaccacgtcacaggaggcaccatcattatcctgccccaagctaactcaggctacggggaacaagaccggcgtcccatccggctcgccccggtaa

SEQ ID NO: 28694 - DNA, 1158 bp, Zea mays
  Peptide Sequence Number=SeqID_70473
atggcgaccgctctccccgcctccgcctccgccgcttgccttctccagctctcccggcgcggtctccctggaacatcttctgtgctctccccgcttcgcaccgccactttccgctggcacggtgcctgtaacgtggcctgttcatgctctcccggcccccggccggcggttcccgcggagcgaagggacggcgtcgctggccatgccacttctccagagggaactgtacgaatcgtcgccgtggttggagaaggtagcatcagcccgattaaggacgcgccctgggaagaggtcatgcgccacacggctgataggctgaagtgggtcgatgaaggatttgaaatgcttgtcttcacggataatttggttggtcatgataacctcaggaaagagttactatcacactgtgatatgctagtcaatgttgcaataacaaatcaggatgctgttcagtggcttataaacaacagcaaacacatttctaataagaacaattgccttgacctcaatgctgagatacccagtaaaccgaatgtaatgccactaaccatgttcagagaacaaaaactaagccatgaaatagcggaagatctttttgttggttggttggacagcatggaatggagttggcgagtggcagctggacaaaatccagcatatgatcaattcccatgtcagtaccagttattttacagagggaaagctaaaggttcattttggtatgagccggtttttcaggtcaaaaccctggaaggggagctggtttggaggcgcaggaggtatcgtgtgagaagggctagcactcctggtacattttacttcagtgtgttggataatggtgtcatttccaaagaatattggacaattgttgacgttgcggaggatttcagctggggtctgttccattatcatggcgcagcacaagctgctgggctatcatacactggagcagtgcttgttactccagatgggtcttatcctgacctggaagacccaagattggcctctgctttagagaactgtgctataaagaaatgggagctctatacagtcgataactgctcctgcatgggtgcaccactgggaactcctgagggttcaaagctgcaccatcaaatttctccaggaaaagaaagtagtgttttgcagagaagatga

SEQ ID NO: 28695 - DNA, 231 bp, Zea mays
  Peptide Sequence Number=SeqID_70474
atggacaaggcagtccgggctggctgcatctttatgaagagacccggcgtcatggttccagatgatatcatacctgatgtccttgccgcattggatacttcaagcaaagctccagcttctgaaatcaaagaattttgcactggtgaagttcgatcacaggtcagtgatgatgttattgggtatctcgaatctgaagataatttcctggatgaactataccgctttggctga

SEQ ID NO: 28696 - DNA, 594 bp, Zea mays
  Peptide Sequence Number=SeqID_70475
atggaaaacataaagtgcattggaacgtgtaggattagagtggttgatagatacagaagaaagacagctaaaaagcactcgcgccatcagattagtgagcagttgttgtcttcaattcagtatctcacagaccttgcagtctctacggatggagacgttggcaagtttactgatacagtaaaggagtttgcagtggcgaagacagggaggggcacgggggggcaacgtcccccccccccaaaatgctcccgtaaattcagccttcagctcaggctgctcggcgcctcagctggtgacgggctgacggctgaatgctgtctgctggtttgcagtagtgcagtctgctcgccggctcctgctcggcacttcggtttcggtagctttcaatttcagttcaataaagatatgaagagtcaaaagagactaagaacaacacttcatcgttcctttaagccagttgattctagcactttggtagctgctgatgtccatgctgaaactgaaagtcctactaatccaacaaatgctactgctactgctcaagtcaaggctgatgtagctactgcactgccagagactaaagattcaaactga

SEQ ID NO: 28697 - DNA, 1125 bp, Zea mays
  Peptide Sequence Number=SeqID_70476
cgacgactgggcgaacgctgcctcgcttcgtcacctcttcgccggcggcgacgatcacccaccaggctcaaaggactcgcaaaattatgataacaataatcaaagagtccatcctcaaccaatcgacgataacatgaatcagaacggggactcaatggacactgtgatcgggaggatattcaacaacatatcctctttaaaatccgcctacattcagctgcaggaagcccacaccccatatgaccctgacaagatccaggaagctgataaacttgtcatagaggagcttacgaggctttcagaactcaagcacgcttacagagaaaaacatcctaagccaatagctgcatcccctcaagattcacgcttgctttctgaaatacaagagcagcagaacttgttgaagacctacgaggtcatggtaaagaagttccagtcccagatccagtccagagacactgagataacccatctacagcagcaaattgatgaagctaaacttcggaaatcaaagctagagaagaaactgaaacagaggggcctacttaacagggagtcggaggaatctgacgaagaagagaactacttttccattgaattgacaccaagtttgtttacatctgccgttgataatgcctaccagtcgatacatgacttctcgaagcctttgatcaacatgatgaaggctgcaggttgggatcttgatggggctgctagtgcgatcgagcctggtgtgaaccctgattcagtattcggaaagttctgcagaagcaagtacctatcgcttgtgcatcaaaaaatggaaggttctttcttcggcaacgtggatcagaggaactacgtcatgagcggcggccatccaaggacacctttctaccaggcattcctaaagctagcaaagtccatatggttgctgcacaggttggcgcactccttcgatccaaaggcaaaggtgtttcaagtgaaaaagggaagtgaattttcggatatccacatggagagcgtcgtgaaggacatcatcctagaagatgtcgcggagaggccgaaagttggcctgatggtgacgcctggtttcctgatcgggaccagtatcatacagtcccgtgtgtacctttcaggtgccaa

SEQ ID NO: 28698 - DNA, 2394 bp, Zea mays
  Peptide Sequence Number=SeqID_70477
atgcaaggctcttattcttttactctagaagaagacaccacctcatatggcacttactttagaggtggtattgtcacacaggtgaagccaccaaaggttcttaaattcaaaaccttgaaggatgcaatcaaggagccaggagaatttctcatgagtgatttctccaagtttgaccggccacctcttctacatttggccttccaagctttggacaaatttaggtctgagttggcacgatttcctattgctgggtcagatgatgatgcacagaagctgatagaccttgctattagtattaacgaaactcttggtgatagtaagcttgaagaaattgacaagaagctcctgcagcatttcgccagtggttccagggctgttttgaatcctatggctgcaatgtttggcggtattgtaggccaggaggttgttaaagcatgctcagggaaattccatccactttaccagtttgtaaacataaaaggtcatttgtctagattttccttgaaaagaacttccataaggccgtctgtagcagtctacccaaagtttacccaaaagcactgttttgcactgttccgcactgttcgcagagtggagtttaaaatatggttcttctactttgattctgtcgaatctctgccagttgaaccgttggagcctagtgatttgaagccagagaacagtagacatgatgcacaaattagtgtctttggggctcagcttcaaaagaaactggagcagtcaaaaatctttcatggttggttctggggctcttggattcaaaatgggaagctgactgtgacagatgatgatgttatagagaaaagcaatctcagtcgccagtttctcttccgtgactggaacattggacagcccaagtccacagttgctgcaactgccgctatggcaattaatcccgagcttcatgtggaggcccttcagaatagagcaagtcctgagactgaaaatgtgtttaatgatgccttttgggagagcttggatgctgttgttaatgcattggacaatgtcactgcaagaatgtacattgactctagatgtgtatatttccagaagccacttcttgaatcaggtactctgggtgccaagtgcaacacacagatggtcattcctcacttaacagaaaactatggggcatccagagatccaccagaaaagcaggcacctatgtgcactgtacattcatttcctcacaatattgatcactgcctgacatgggccagatctgagtttgagggtctacttgagaagactcccactgaagtaaatgcttttctgtcgaaccctggtggatatgcaaccacagcaagaactgctggtgatgcacaggctagagaccaacttgagcgagttattgaatgccttgagacagacaagtgtgagacattccaagattgtattacctgggcccggttgaagtttgaggattatttctccaaccgtgtaaagcagctgacattcacttttcctgaagacgcaatgactagctctggtgctcctttctggtctgctcctaagcggttcccgcgaccactggagttctcatcttctgactcaagtcaccttaacttcttgttggctgcttctatattaagggcagagacatttggaatacccatacctgagggtgttaagatagagacagatgagaaggctactagcctatcctctgcgtctgttgatgatgctgccgtcattgaagagcttattgcaaagctgcaagcaatttctaaaacattgtcaccaggattccgtatgaaccctatacagtttgagaaggatgatgataccaatttccatatggacttgattgctggttttgctaacatgcgggccaggaactacagcatccctgaagttgacaagttgaaggcgaagttcatagcgggaagaatcatcccggccatcgccacctcaactgcgatggccaccggccttgtctgcctggagctttacaaggtccttgctggtgggcacaaggttgaagactaccggaacacatttgcgaacctcgcaatccccctcttctccatggcggagcctgtgccgcccaagaccatgaagcaccaagacatgtcctggaccgtgtgggaccggtggaccgtaactggcaacatgacgctgagggagctcctggagtggctgaaggagaaggggttgaacgcgtacagcatatcctgcgggacctcgctgctgtacaactccatgttcccgagacacaaggagcggctggacaagaaggtggtggatgtggccagggaggtggccaaggtggaggtgccttcctaccgccgccatctggacgttgtggtggcctgtgaggatgacgatgacaatgacgtcgacatcccgcttgtgtctatttacttccggtaa

SEQ ID NO: 28699 - DNA, 630 bp, Zea mays
  Peptide Sequence Number=SeqID_70478
atggagagcacaggctctgctctcgcttctgtgcctgtggattcaaacactgaccctatggcagatccaaagcgcagagcgaagtctaatgatcctagatggaactatggatattggatagagattgggaatcgagataaggtcacatgcaacctttgcaagaccgtgacaatgggaggaatcaagaggttaaaagaacatcttgctggtggttatgcggacacattaatgtgttctaagactacaactgagattagaaaagaagtgaaggcatatttggacaagaacaagaggactaggcctactttccttgatgatgatgatcatgatggtcaggggcagcaaggcgaagaggattccaccacatctatgcaacaacctagctcggggacaactgccaaaaggaagagagctgcatttcagtttagaacaactgcacagccacagacatcaaacaaggaaaagaaaaagggaaaattgcaaccatgcttcgaagaactactgaacaagttgtggatgagaggcgctcctcagggtcacaccaccaaaccaccatggaagcatgcactaagtctaaggctgacaaagattatgtcaacaagcaatgagctatgtagttctatgagtgtg

SEQ ID NO: 28700 - DNA, 793 bp, Zea mays
  Peptide Sequence Number=SeqID_70479
gaaaaaattagaaaaaaccgctgcagatagtctaatttgtcaggaatctgggccactgtcttattctattcacgtcacgcaggacgcgaatgtcgaaacggcatcaccgccgccgccggcgttggccggttcggcggcgcagttccgtgggcaggcgcagctcccgcgcttcgccgcgccgcgccgctacgacctgcgcctgcgccccgacctcgtcacctgcacattctcgggcactgctgccgtcaccgtcgctgtctccgcgccaacccgcttcctcgtcctcaactctgctgacctctcaatcgacagcgcctccatccgtttccgggatttggcgcctaaggaggtggtgtttttcgcggacgacgagatcctggtgctcggattctccaaggacctggtgctcggtgagggcgtgctcagtatgaagttcaacggcacgctcaacgaccagatgagggggttctaccggagcaagtaccagtataagggaaagatgaagaatatggcagtgacacaatttgagtctgtggatgctcggcggtgcttcccatgctgggatgagcctgcattcaaggctaagttcaagctaacacttgaagtaaatgttgggatggtggcattgtccaatatgccaatagctaatcagacagttgctggtcctatcaggactgttcactatgtggaatcacctcttatgtctacttatttagtggctatagttattggtttgtttgaatatatagagggtgtaacaccagaaggaacattaggggtgagctcctactga

SEQ ID NO: 28701 - DNA, 108 bp, Zea mays
  Peptide Sequence Number=SeqID_70480
atggctgagcagcggcgaggtagagcagcagagtgcgtcggtgacaacccaaaagaggagggcaatgtgcagcaaaccaaaagttgttgcctcagatgtgaaatgtga

SEQ ID NO: 28702 - DNA, 1392 bp, Zea mays
  Peptide Sequence Number=SeqID_70481
aaagcgttggcttcatatataagaaaatttgcctactcaaatgctaaaaccgaggacctttgggctgttcttgaagagaattctggtgaacctatcaagaatatgatgactacatggacaaagcaacaagggtaccctgttattaatgcaaagcttcaagggaattatctggaacttgaacaggcacagtttttgttagatgggtcctctggccccagaatgtggattgttcctataactgcagactgtggttcatattatacacagaaaaaaattctactgaaaggcaaaagtgataggctggatataagagacattgcttcacagtgtggtaaccaagagaagggtggaaacttttggattaagttgaacattaatcaaacaggattttatagagtccaatatgacgataaacttgcagctgcacttcaaaatgcattgcaggccaagaagctgtctgtaatggataaaattggcattgtggaagattcactggccttatctatggcctgcaaacaaaccttaacatcgttgctacgtttactgtatgcttaccgcgaggaggctgattacagtgttctttcacacataaatactgcgagtttaagtattgctaaaatatcggttgatgctactcctggattggtcggtgacatcaaacaacttctgatcaagcttcttctgccacctgctgtaaaattaggttgggacctcaagaatggtgagagccacctggactcgttgcttagaccagtgctcttggttgctcttgtcaaacttgggcatgataagagtataaatgagggagctaggcgtttcagtatctttgtacatgatcggaacacttctcttcttcgtcctgataccagaaaggctgcatacctagctgcaatgcagaatgtaactgcttcatacagatctgcttataatgatcttctgaaagtctacagggagtcagatgaagcagaggaaagggggcgtgtcctaagcacactgtgcttttgtaaggacgagaatattgttcttgaatcactgaatcttctttttaccaatgagtttcgcaagcaagatgcatattatgtacttcaaggtcttgacgtggagacgcgtgataccgcatgggtgtggttgaaggataactgggatcgtgtgacaaggaaatacggggacacacaagcaggaggttttatcagatacgtcgtcacattgttcacctccaacgagaaggcagcagagttctcccgcttcttcgcaacccgcaagaagcctgaattcgagagaacactaaagcagagccttgagaacgtccggatcagcgcaaggtggatccagggcatcaagagcgaaccgaggctcgctcaaacggtgcaggagctgctgcgtagaccctga

SEQ ID NO: 28703 - DNA, 348 bp, Zea mays
  Peptide Sequence Number=SeqID_70482
atggcgccgccgtgcggtgtgttagcgccgccagtcaggttggcgggggtagcagacaagttgtttgccgtcgatcatgagatctgcggctcggattcgattaggggtaacgtttcagccgaaaacctcgtagccattgatctatggatggacgctcaggaatcgatacagtatagtggaatctgggccgtggattgcgtatcctgggtcaggatcacgtaccgttccgttaaacctggatctaatcttgcacgtccaatttggatcgtgtggttcagacgcgcccgtaccccttcgccgcgcgcttttgctaaagaaaccctagagaatcagctaataaacctgtag

SEQ ID NO: 28704 - DNA, 330 bp, Zea mays
  Peptide Sequence Number=SeqID_70483
atggtcggccggccaccgccccctccctcctccgccgctgccggtgccccattcccccttctccctctctcctaccgggcgacgctcgccatgcccctggcggccatgtatggccctgcacgcgccacccccgctgtcgccagctgtccgccatcacctcatccatgcgcgctccttcggatgacgctgcagccatcctcaccgccacccgggcagccattatggcggcttgccagcgggcctagggtgctgctcgtgctcttgagcaggagcaggcggttgttgattccatcgagcgccagtacgccgagacctaccatcgtctcgtcg

SEQ ID NO: 28705 - DNA, 246 bp, Zea mays
  Peptide Sequence Number=SeqID_70484
atggattctcaggcgccaacaaactcagatggtgaccaaggaagatacaacgaagagcaggcgcgcgtgtgggctgagacagtggaggagaaactgggccacgcgggaagctcccaagaatatccgaaaataattgatagtctcaaaagagccttacttgggctattctgggcctcaccggaccggtctggtggtgcaccagaccagatccgcaggaggctaggacttgggcttttggcggcctga

SEQ ID NO: 28706 - DNA, 752 bp, Zea mays
  Peptide Sequence Number=SeqID_70485
cacatgttgggatgaagaaccttcacaagcttcttaagggcgagcatgttttgggactaacgaatgtttgttttgagaaagacagacattgtgcaactttccaagaaggaaagcaggttaaaggaggacaccatccaaagaatgtcataactacatcaagaccgctggagcttcttcacatggatctctttggtcctgttgcttatcttagcatcacgagaagtaagtatggtcttgtcattgtggatgattatacatgcttcacttgggtattctttttgcaggataaaggcaaaacccaagggactttgaagcgattcttaaggcaagctcaaaatgagtttgacttgaggatcaagaagattagaagcgacaacagtacgaaattcaagaacctccaagttgaagagtatcttgaggaggaaggcatcaagcatgagttctatgccctctacacaccacaacaaaatatagtggtggaaaggaagaacaggacgctcatcaacatggcgagaacaatgcttgaagtgtacaagacacctgatcaattttgggcaaaagctgctaacatagtttgccacaccataaaccggctctatctgcacctcctcttcaagaagatgtcatacaaactcctaactagtaacaaacccaatagttcttattttcgagtatttgggagcaaatactacattttggtgaagaaaggtaggaattccatgatcaaagatgctttgaaggatccagactag

SEQ ID NO: 28707 - DNA, 471 bp, Zea mays
  Peptide Sequence Number=SeqID_70486
atggagatagcaagtgtgccttttgtcactcggatgaatcgattcaacacttgttttttgcttgtcactatgcccagttcatgtggaggtgttgctgctatatgctgggctatctggataagtaggaatgatttagtttttgacaaaaaacccgtgttaacatacttgcagtatgctgctaactgttggggcattgagtccctgacaaggtggaaaaggaacaaggcttactcaagcagttacgacggcgagatggaccggaaggaacctcactggcagttgaacgtcgtcgtcgcctcttcagcatggccatattgtcttgggctcgtcgtcgtcgacgaaggggaccggctcggagtgcgccttcttgcgtcgccgacgcgtcgtcgcccgatccgtcccgtggtcacacttgccgtggaaaggggccgttactttcttcttatgtgcgcgaagccacgctgggggtga

SEQ ID NO: 28708 - DNA, 1142 bp, Zea mays
  Peptide Sequence Number=SeqID_70487
atggaggcagaagtaaagacgatagtacccgatgacgtccttggcaaggccgaggcaaggcgccagcacgacacggctgagatcaccggccggcttcacactatcgatggccacatgcaaatgggccatgcctccgactaccatgagcttgctctaacggtagcctgccgttctgcccctctcggttctgcctctactatctccgacgagtgggtccccgtgcgtcaagtgcgttcagtgtctcttgcccacgtcctactcacaggatcgctcgagactcgagagaaccgcctcccgactgctactgctgctacctcccctttctgcatgccttcgctcccctcttctccttcgtttagggtttgccgccgccactgcccgatccgaggcagatgtcaccaacaacagccatggcgctgttgtcccaggccccgtctaactcaggtacatgccctccttgtctccctcctctccttcctgccggaccacccgctctgtgaccacctcgtcaccgtcgttttcgccttcgcttctagcctcaccgtgcccatctccagggaccatgaggacctgcacctcgccgcctcatatacgtgctcctcgtcaccgccaaccgccccaaccacgtgtccgactacgccgcgtgtgctcgcttgcgacgcctgcgcaccctcgatgccacgctaccaggtctccttgctgaggtcctcgggcacctctacgcgctcgccggccaggcaatcctacctcctcctgctcgcctccgctacacgccacgctgtgcgcctcgggaggctcgcctcgagcgcttccatcctggcggtagcaggcctgcccatccccttcatcataccttctcacctgctcttcgaccatggagatgatggccattcttgccaaggtcgcctcggctatgctgtagtgggcaccggcggtgcagcgcacattcaagtgcagttcaagggatgctgcattcgtccaacgtcgtgctgctacactcgctactcactcccttgctccagttcccggatgcctttggagctgaggatgagcgcctgtgaggtgtctcccagcatgaaaattggtgtcgtcatattctctggcagtggcaggatgtatgagtactcgagccctacatggag

SEQ ID NO: 28709 - DNA, 222 bp, Zea mays
  Peptide Sequence Number=SeqID_70488
atggcctgggccaagatgtggtcgcacggtcgcacccgtggtggccaggccacatctacaaagtcaggctcactatctcatcgatgtcgaggagagcacgggtggttcgagcccagcgagctcgtccccttcgaggaccgcttcaccgagaaggtggcccacaccgaggccgtcgacgaggtagcctcgccgcatcgcgctggcgctgctctgccagtgtag

SEQ ID NO: 28710 - DNA, 144 bp, Zea mays
  Peptide Sequence Number=SeqID_70489
atgaggaatgagaaagacagaacaaggtgtaggagtaatctagccctagtattagtcttcaatcaacctatttcttcacctcactttggcttgacatcgtctagagacgtcttgggtggcctgccgacctcaaggcaaccatag

SEQ ID NO: 28711 - DNA, 909 bp, Zea mays
  Peptide Sequence Number=SeqID_70490
atgacgatgagagatgagatcgtcttcttcgacgtggagacgacggctccgtcggcggccgggcccggtcggtggtggctgctggagttcggcgccatcctggtgtgccccaggaagctggtggaggtaggcagctacgacaccctcatccgcccgggcgacctctccgccgtctccaggcgattcacggacgacgtggaggcggccataatggcgtcggcgccgcccttcaaggacgtggccgacaagatattcgacatcctggacggccgcgtttgggctgggcacaacatccagcgtttcgactgcccccgcatccgcgaggccttcgccgacatcgggcgccccgccccggagcccgtcggcgtcatcgactccctcaacgtcctggccgcacacttcggccgccgcgccggagacctcaagatggccaccctcgcgacctacttcggcatcgggaagcagaagcacaggggcctggacgacgcgcgcatgaacctcgaggtgctcaagcactgcgccaccgtcctgctgctggagtccagcctgccggacgtcctctgcgcgcagcagtctcgccgagccgcggtcaccaggaggacgtcgcaggcgcagaccatcaagccgccacctaaacatgctgtgcaccaccacctgcggcccggcggcgtcgtcatgtcgcagacaaagctaccatttaccgctgtaacagctacacctgcacctgcggccgccaccccctgcggcaagaggaatagcctgggcaaggtggtggcgagggccgtgacggcggcgaccactgccccattgagtagcagtagcagcacaagcacaaacactaggcgccccgtgacggcgaccacgcccttccacatgatcctcaggcactccagggccatcctcagatga

SEQ ID NO: 28712 - DNA, 645 bp, Zea mays
  Peptide Sequence Number=SeqID_70491
cccaggtttagctggtaccaagcattcctggctgcagggctcttgcttggttttggtgctagcgctgctgtctttatcaagaaactgttccttcctaggctcaagtcttggatccgcaatgttgtagcagaaggtaatggcactgaaggcaaccagcttaagcctaggattgatgatgaaacggctgatgctgtaaaggcttctgcttcggctgtttctgctattgccaaaacaaaccaacaactgcttgcttcaaaggatgaaggtttcaatctctaccgtccgtttcgctgcttctttcttgccaatggttcaactcactccaataatgtcattctgtttttgttagcagaaaagaagatactagtgacgttgacacaagctctagattcccaagccaaggagttaaaatccttgaccgattcaatcggtcataccagggaacccataaatattaccagggatgataggttttctcagtaccgcccactggaagaccatgcccctactgttataaggaatgcagtgaggtcttcatttgcgccagcacctgctgaacctacagctggatcattttcaagatcctatggcgagccatccttctttcatgcttatgaacagcttacatctgaggaccagttatag

SEQ ID NO: 28713 - DNA, 588 bp, Zea mays
  Peptide Sequence Number=SeqID_70492
cagccgatgtccactgcacaacgaagcgataggtcttctggcagtaagccatgggagatgcattcgtattcacaacagaggcctggttatggatccaactcccagttgagtgatgatggatcatactctgatgcccaggacagctatgctccttcctatcaccagaatggaaaggcccctgattttcaagcggatgaacctaggcctttgacttacaacactggggttgaggaaagaccgccaccgcagcgccgctgggtgccccctcagcctccaggtgttgcgatgccagaagcagcagctgccatacgtcaaccaaaggcccttccaaagcagccctccagcgatgcctctgaggcagctggtgagatgcaggtgaatggttcaagtgcatcggatgctgtgactgaggttcctgttaatggtgctactgcaagcgatgctggacgcaggtctgccaagaatgagaatgaatccattcaggtgttctccaggggctatttcctgcgtttgccagggatgagaatgaatggcggcgtcaaaggtgggataccaccagcaaaggaacattaccctgacagaggatga

SEQ ID NO: 28714 - DNA, 189 bp, Zea mays
  Peptide Sequence Number=SeqID_70493
atggggagcccgcccgccggctctccacaaactggctctgatctcagtcacaatgggagcaccacaaacgataagactggagcagaagccgaagggtggccgcgcctgccaaaggagcctcgtagcgctggtggcagtgccgacaacatcgggaacgaggggcgtggtcgtggggacggaagatgctag

SEQ ID NO: 28715 - DNA, 558 bp, Zea mays
  Peptide Sequence Number=SeqID_70494
atggactggagcgcggtgacggcggaggacttggtggacgcgctgcgggaggtggactggtccatgccgccgcggcctgtcccggagttcttctcccgcttcaccgtcccacgctcctactccaagtggaccagccgcctcaagtgcaacctctactactacaggacaaactatttcatcttgatcatgttcatccttgggatgggcttcctttggaagccagttgctatagttgctgcttttatgactggacttagcatcgcatttctcaatgatagttttgcagtcactttcaatgagaaagtcacaaggaccgtaagacaattttcaccacatttagctgcaaagttgaggccacctataacgtgtgcaaacactggatctggcataaaattccatctcaccatagtcttcaaaactgacagcacctgtttccttggttgcagtgagctgtatactctggttgacctcatgcagtcttctcacagtcctctgggcacttctcattgctctatttggttcatgggtaatgaaggtgtctggtgccgttgtttgtga

SEQ ID NO: 28716 - DNA, 618 bp, Zea mays
  Peptide Sequence Number=SeqID_70495
atggcgctcaacctgtcccaccagaccggcgcggccgtggcggcggcaccggcggcgccacgcacggccgtcgtcgcggcggcggcaacggcgccacgctcggccatcgttgctgcggcggccaccgtggcgccgccgcccgcgtcggcgcccacccccgctccggcgctccagctgcagacgaagacggtggacccggccgccgcgcaggcgcccttggcgtgccaggcgctggtggaggccacgcccgaggcagagcacgccgacgtggccgccgagctccggagcagggccggggtgcccgtcttcgtcatgatgccgctcgacaccgtgcgcaaggacgacaactcgctcaaccggcgcaaggccgtggaggccagcctggcggcgctcaagagcaccagggtggagggcatcatggtggacgtctggtggggcatcgccgaggccgacgggcccgggcagttcaacttcaacgggtacatggagctcatggagatggccaggaagaccgggctcaaggtccaggccgtcatgtccttcaaccagtgcggcggcaacgtcgacgattcagtcacggtaaaattgctggagctggaagcattccagttggattaa

SEQ ID NO: 28717 - DNA, 213 bp, Zea mays
  Peptide Sequence Number=SeqID_70496
atggccttccatggagctccggggggcgggtcgccgaggctgggagaggtggggattgcggcattgatggcaggatggtggcgcagtgcgtgggaaggggatcgcgtggggaagggcggtgatggcgtgatggctcgggtgagcggtgatagcgggatggtggcgcagggcgtggggaaggggaacgcatgtggaagggcggtgatggcgtga

SEQ ID NO: 28718 - DNA, 678 bp, Zea mays
  Peptide Sequence Number=SeqID_70497
atggaaagtgcatccagaagtgtgatgtttgtattctctttaactggcactgttgtcaacttgttgttggttggtgttatcattggaaaagctggagaaactattaggtatatccaacttcaatcaggagcaaagattcaagtcacaagagaccatgaagctgaacctggtgcactgacaaggcaagttgagctttctggcaaacttgagcggataagcaaagctgaacagttgatcaaagaagttctggcagaggttattcctttgcatctgcctgctggtgatacttcaactgaaagaactgtgcatattgatggtactcaagaacaaattgaagctgcaaagcaactgatcagtgaggttaccagtgagaaggagcccctcatattatctggagagctggatgttgacctagatgattttagcttggagaaatatttatctgcaaaaactcttgcttcttcaaggtccttccagatagatagctatcatggatctggaatggtttcattggctgacctgtggctgaagtactcagatgatgttgaagaagaagatgatcgaagtgatgcttctgctgatgacaaaccgactacaaaaaatcccacaagtagtcctctagattatatattcacaatcatatgcatctttatatctcgcatagagatctatgattga

SEQ ID NO: 28719 - DNA, 468 bp, Zea mays
  Peptide Sequence Number=SeqID_70498
atgccctcgttgcccctagctttgcctccggctcccgctctagctccgcttccaaggaggcaaggacctcgcctcctcacggataggtcaagtctgccgaccgaccggctcgtgcccgccatcctatcttgcaagcgccgggccacggcgatgcagcgtggcgcgctgctgaccagggctgtcgtcgcgaggctctacctcgtcgtgctcaacatcgacacccacaagtgctgggcccgcgactactacaacaactacgcccagttctgctgggttggcgactccgttcactgcgcgtcagccatccgttctgttgcctgcgcaggaaggcaagagagggagtatgagatgacactcaagaggacgttgcagagtatttgcttgctcacagttcatcctaacaccaccacctctgtcgtgcttcaggttgtgggtgatgatggctctatatctttccacatgatgtag

SEQ ID NO: 28720 - DNA, 240 bp, Zea mays
  Peptide Sequence Number=SeqID_70499
atgtcgactcccaggaacaacgaagatcctcttctcgaggagctgctagtcaccacgaccggcgaggaagtggatcctaagatccttgacctcgctatgaagattaccgagaaaatgttcctcaaggtgaaagaggaagatgcaaagaaaaagggcgaagaagaagaatcaagaagaaaggccgaggaagacaaaggaaagggaaaaattgaatacaacgatgacttcgtagagctttag

SEQ ID NO: 28721 - DNA, 203 bp, Zea mays
  Peptide Sequence Number=SeqID_70500
gctgcagcctgagccttgggacagagcctgggatagaggatgagaggagtgcgctgggagcgggctgggaggaggactgtgcgtctgcgcgcactgcggtgctgggcctgggagcttgggaggagccggaatggagcctggaggaggacgccgtcggcggtcgacccgtcggccgcctgggagctactgagctagggacctag

SEQ ID NO: 28722 - DNA, 666 bp, Zea mays
  Peptide Sequence Number=SeqID_70501
atggaacggtataggggctccgtggacggtgagcatgagtttcggcgagtctccacggacggcgggacggctggttcggtcgacggcgagctcaggaatggggagagcgcgcgcgagagagggagagctcggggaggaagagaggaaggaactcgaccgaattttatagggagagggcgctgggggagggaagagaaacagcgggcggccattgatggcattcatggatcttcaatgagggagagagaaacagatgcattgaagttccctaacacagaggaagaacgatcgcgcggctggggcttcggtttgcagctcgggcgtcggtcaggtcgctgtgatattccggtcgcgggggagggcgtcgggcatcgcgctgtgctcggccgagctcctggcttggcgcggcgaggtgcgtcggtgcaggggcagggcgaggtcctgctcggttcctggcgtcagggcgggtcgggtcgcgtcctgacacgcgtgcagtcagcggcctgttgcctgggcgtgcctggtgggcggtcggcgtgcaggggcacgactggagaaggggcgtcgggctcggctgctcctggcggctgcgcagcagggagggaaaggggagaggagaaaaggtggggccgggtgggtagaccagggggccgcagtggcggctag

SEQ ID NO: 28723 - DNA, 120 bp, Zea mays
  Peptide Sequence Number=SeqID_70502
atgacggccaccatcaagaggactacgagggtgatcggatggtaccactcgcacccacatatcaccgttctaccgtcccatgtagtgaagatgctcaaaaggttggaaaaatccaagtga

SEQ ID NO: 28724 - DNA, 222 bp, Zea mays
  Peptide Sequence Number=SeqID_70503
atgcccaagctcaggctcatcttcaccgttattcttgtggtgtctctactgttcagtggacaaactgcagctacacaagccagcgatgcagatctttctgaagcggttgaggttgagagacgcagtgggaaggttctgacgtacgttcaggactacgactacggcgggtccaaccccaaacatgacccacgcaggaagccagggagcggacaccctccatag

SEQ ID NO: 28725 - DNA, 267 bp, Zea mays
  Peptide Sequence Number=SeqID_70504
atgactgatgtatatttgttactgggagctagggcttattggctgctccgccgaggtcatgcaatggccctactgggagctcgacgagatggacgacacactcacctacagaggggagctagggtgtgttgtgcatgcctgcgagctgtagagaagagggggcagtctggatccgaaccctcagcaaggattttgcagctcctactagagaatggcattagagtaaatgaactaacaaggatagaggttgctctcgtcgtcccataa

SEQ ID NO: 28726 - DNA, 480 bp, Zea mays
  Peptide Sequence Number=SeqID_70505
atgcaaagaaacccacaatccatgtcaaccgccatgcaaggcatgtcaacatcacacgagtcatgcaagcctatttttccccttacatctctaattgctcagccaccagaactgccgctattccaccagggagtgtcccagccgccgcatggaggatctgcgcgctggggcttgagggcggccgagccgccgccggatctgacgggcagcatgcacacgggctcgcaggcgatatacacgatgaatagtaaatcgcagatccactcaaaatttcataccgtgattcctgttaagtttagcccattaaaaataggaaaacgtatggacccgctagtaaacccgttaattcgtcggttaaccgtcaaacagtggcgcgaacacatgtcagatttagtctggaagtgcgaagagaatgttggcgcaggttttaagtgcaagtattatagagaaacaaagagcggaggggtggtgtccaattga

SEQ ID NO: 28727 - DNA, 432 bp, Zea mays
  Peptide Sequence Number=SeqID_70506
atggcctccttcctccacatcggccgaaatcgcgggcccatctgcgccgtcgtgaactggtcgtcctccatcgcctgccccatcttctcgcggtctcgccttaaggcaaagcaatcccaaattgcagagaactcggaaaacagcgccgcctgcgccgctccgactgctgtgccactcgacagagtgaggctgacagcagctaagtccaacctcgacgccggacgacggactccgcctcgcccgaccccagggctcggactcagccttgacctcggacgacagactccgcctcgcctgaccccagggctcggactcagcctcgacctcggacaacgaactccgcctcgctcgaccccagggctcggactcaacctcgacctcggaggagtcatcgcctcgctcgacctcgggctcggaccgaccacgtcatag

SEQ ID NO: 28728 - DNA, 197 bp, Zea mays
  Peptide Sequence Number=SeqID_70507
atggagatgcattgtgggctaaccttgggatatatggttgaaactcttatcaagtcaaagtatatggcgaaccaaaaggtgaaggactacctatcacggctcggtggcgattggagcgcggtgaacaccctggaggatgtgttggcgatccggctcaagcttgttggcggtcgtgagggatccatcacgctggagag

SEQ ID NO: 28729 - DNA, 333 bp, Zea mays
  Peptide Sequence Number=SeqID_70508
atgggcatagattcacatttaagcactttgtgtttgcactcaatcaccaaaatacttagaaatggcccaagggcacatttccctttcagccgcaccgaggtgcggaagaccagggaattcccccatccgtgtgctccgtcatcgtggagtcatcgggcatcacgggccgacccttcgcctcgaccattgccgatttttattgtgtatcttattcacatgtttggtgcaatgttaatttttgctatactatatcattatgttaattggaacatggagaaccacccgggaaaacagtgctaccacaagggtttatggacgcccttggctgattaa

SEQ ID NO: 28730 - DNA, 402 bp, Zea mays
  Peptide Sequence Number=SeqID_70509
atggaacgtccgggggatttaaaggccgcgggaacgagaacgcgtgcagtgcatgacgggttcgcctgcgccgacgtgtcagccagccatttcgttctgatcggcacttggcttgcaagttacaggaaccccgggaggcccatcaacaaacaaatcgggggagcttgtggttgcttacacgagaaacggccgaacggggctggtgtttttgcggagcaattcggccgtggctttgcttccggatgcactccagcccgtcgtcaagcttgcgacagtaggttgagtgacggaagggggccgcgtggtgggtacatccgttcagatcgccacttgacattaaagatccaaacggggaagtactatgccgccgtttcgccgggctcgttcctgctcggactctga

SEQ ID NO: 28731 - DNA, 993 bp, Zea mays
  Peptide Sequence Number=SeqID_70510
atgaaagtgggccaccccgaacaagaaacccccaataacaagaaaaggaggccgagaacaaagttcaagcagatctcggagggcatacgattcgccgtgcaggtcctcagcgacccgcagaagcgcgcggtgtacgaccagtacggcgaggaggggctcaaggggcaggtgccgccgccgggcgccggcggggcgggctcaaccttcttctccaccggcggcgacgggccgacggtgttccggtttaacccgcgcaacgcggatgacatcttcgccgagttcttcggcggctccagccccttcggcggcaaaaacgggagtgggatgcccggcatgcgggccggcgggtcgaggttctcctcgtccattttcggggacgatatgttcggctctgcgttcggcggcggcggcccggacgggcacggcatgcacaccggcggacgtgccgtgaaggcgccggccatcgagcggaagctgccgtgcagcctggaggagctgtacaagggcaccaccaagaagatgaagatttccagggaaattgctgacgccagtgggaagacgatgccagtggaagagatcctaacgatcgacgtgaagcccgggtggaagaagggcaccaagatcacgttcccggagaagggcaatgagacgccccacacgatcccggcggacctcgtcttcatcatcgacgagaagccgcacccggtgttcacccgcgacggcaacgacctggtggtgacccagaaggtcccgctggcggaggctctgacggggcacaccgcgcgcctggcgacgttggacgggcgcatcctgacggtgcccatcagctccgtgatccacccggggtacgaggaggtggtgcgcggcgagggcatgcccgtccccaaggacccgtccaggaagggcaacctccggataaagttcgacatcaagttcccggcgaggctctcggcggaccagaagtccggcgtcaagaggctgctcgggcagtag

SEQ ID NO: 28732 - DNA, 1188 bp, Zea mays
  Peptide Sequence Number=SeqID_70511
atgcctattgttcagaaatctgtgcaggctgttcaggaaaagcaggagcttgctgaaactcagaaagaaatgaccaaacttcagatagtacatgaggattctgcacaaaagagtgaaggtactgctccatcagttttcatgaatagggaaaatgaggttgcccttgtgccattgcaccaagtaaatgctgttcagtcacctcctgtgcaattccaaagttgcagtggccttattctacagcaactgatgccagtccaagaccagcagcgctcgaaccaaaccgctgtgtactgtatgcgaggccaaagccatctggagcacagacaggcccaaatgttcgaagctgctggtcaatctctgcagacacacactcggaaaactcagccaccgacagtagttgaggtatctcaggtaaccagtcaggcaccagagttctaccctcatccgcagcaccaatggcaacatcagaccggccagcaggttttctcacaggcaaggcaaccacaaccacatgtactacagcagcagtacagcaacatccagcaaggtccagcacagatggttcagctgcaaacgtcctctccacatgctcatagtacaccacaggtcacagtagtatatcctccatacgggcctcatcagtctgcctgtggtaatgctgaggcacgcagtgggggcatagttgtgccaccttcatactctacaatttcttcatcccaccggaagcatcatgaagctgctcctgtttatgtacaaagcaacacagtttctgttccactggcggagcagcatcagcagcttcattcactcggcaatggctcatttgtacctcagccaagcaaagttagtccatgcggtctagcgtcatatacggtacaagggaatgcacagacctatagccctgcttatggaagcccttccagcaatcctgctactattgttgctgtccttaatcaacaagcacatggcagttctcccatggtgcttcatcacttgggaccccagtcagtgctgaaccatccgatagacattgctgaaaaggttactcggatgggttactcgaaggatcaggttgagggtcttgcactccgtatggtggctgcaggccagcctgcagaccataaccccctgcatgataggttgagctctgttagccatggtgtagctcctcatgcatggtctggatag

SEQ ID NO: 28733 - DNA, 267 bp, Zea mays
  Peptide Sequence Number=SeqID_70512
atggaggcttctgccccatgcgctagggaggaggggctggagcttggagatggcgccctggctgctgccgtgtgggagagaagacagggagatggagagcgcagggatgatttaatgaggcatcgctggaattccattggccgaaggcgcggtcgcttggcactggttgaaaggagcggctgcaggcccattggctgctctgcgggcattggtgaagagactagtgtcaatgactggttgaggagggtgacgatgctgattagttag

SEQ ID NO: 28734 - DNA, 318 bp, Zea mays
  Peptide Sequence Number=SeqID_70513
atggtcgactacgccacagaaggaaagaaatccgcaccagacagtgtccgtttaaagttttacaggatcacctattcacccccctctaggtgctctcaggagcggagtccgtcgtcttcaggggctgagcccgagtccgagccctggggtcgggcgaagcggagtttcctatggcgcctgaggccgggcctggctgcctgtcagcctcactctgtcgagtggcacagcagtcggtgcggcgtaggcggcgctgtcctcttgtcagaccggtcagtggagcggcgaagtgaatgcggtcactttggctctatcgtctag

SEQ ID NO: 28735 - DNA, 483 bp, Zea mays
  Peptide Sequence Number=SeqID_70514
atggcccaagggctcatttccctttcagctccgcccgaccccaaggctcggactcaggctcagccccgaaagatgacgaactccgctccgcccgaccccagggctcggactcgggctcagcccctgaagacgacgaactccgcttcgcccgaccccagggctcggactcagccctggcctcagccgacggtctccgcctcgcccgacccgggggctcggactcgacctcggcctcggaagacagactcgacctcgacctcggaggagcctctacatcgcccaacccagggcacggaccgaccacgtcaacaggaggcgccatcattaccctaccccaagctggctcaggctacggggaacaagaccggcgtcccatctggctcgctccgccaaaaaagtgactctacgccgtcagggatgcctgagtggcctactgacctagagccccgtgagaaggaagaggatcctactgagagcacctag

SEQ ID NO: 28736 - DNA, 420 bp, Zea mays
  Peptide Sequence Number=SeqID_70515
atggccatcattttcaagagcaagatcaccttcagcctaggagcagttttttgctttgggaccatctcctgcgtggcggatgtagagagaactctacactgcatagcaactccactcgagaagaaatcatcctcgggagcgccaaagggagctgcagcgaaatcacgaaccatgccaccgctaacagcgcaacgggacatggtcccgcatgaggctaggctcgggatcccccagaggggtggatcaactccaactcctcaccttcgggtttctggagaagccactccgctatacttcaccggactgtccgagtcagagcaggcgccagaaggcacaccggacagtgaacagtacatgttcggtgcggcaccggattgtccggtgccccaagttgtcagagctccaacggtcgaaccctaa

SEQ ID NO: 28737 - DNA, 870 bp, Zea mays
  Peptide Sequence Number=SeqID_70516
atgtcctacccgatcacgggcctcgccgcgctcgcctctcgcgcttacctgtccgccgaagccaacttccacctccccttcaacagggcttccgttcccgcgccagcctcgccgctcccgcagcgccgccgcgtcctcgtctgccacgacatggaaggcggataccgcaacgacgcggcaccgcagggcggggacaagccggacgcctacgcgctctggcactggcacctcgtcgacgtcttcgtctacttctcgcactacctcgtcacgctcccgccaccctgctggatcaacgccgcccaccttcacggcgtcaaggttttagggacgttcatcgcggagtgggatgagggcgtgaagatttgcaaggagatgctcgcgaccgaggcttctgcacagatgtatgcggaaaggctcacagagctggctcataccttgggatttgatggttggctgattaacattgaggtcaatcttgacgttcacttcatcgataacctgaaagagttcgtcaagcatctaaccatgacaatgcacgatgcagttcctggctctttagtcatatggtggtatgacgcaatcactgtgaatggtgaccttgattggcaggataagctcaacaagtacaataagccattctttgatgaaaatgacccacaagattcagctacagttgctggcgacagaaaatatgatgtatacatgggtattgatgtttttggacgaaatacatttggtggtggtcaatggactacaaatgttgcccttgatctacttaagaaagttgatatctcagctgccatatttgctcctggatgggtatatgaaactaagcaaccacctgactttcagagagcgcagaatcagtaa

SEQ ID NO: 28738 - DNA, 686 bp, Zea mays
  Peptide Sequence Number=SeqID_70517
aggacatagcaacattcaccagaaagaaacaaaatcacaagtatggatcatatgttaaagccgataaggtggagctacacgctccagataaccacggttgggtcctttacaaagcaactgtttcttccagtgctgggcacacattaactggtatcaacattgtctgcacattgaaatttactggcgaaatcagtccagaatcagaagatggtagcatcttggtagaagatgtcgatggaacttcactgtatcaggcatcactaggccacctcagtattcgaaatactgacaaaaacacagagttccctccagcagaatcttggataactgaaggagattacatctcgtggtcaaaatgctctaacggatctgaactcgtgaatctgaaaatcagctggaagctgaagaaccctgatcaaccacaaccaccattcagcaagtacaatatctatgtggagaagttaacggcagattcagacttgaaagttcccagtcccaaaagctatcttggagttgctagtgtcgatgccttctatgtgtcgggcttagaggtctccaacgaagtcaccggtctgaaattctttatccaagcgccgcgcgacatggagccgacgctcgtccccatcggcgaggccagcgtcatggcggctgtcgcgaccgggtgccggacgcgcctcaatgactga

SEQ ID NO: 28739 - DNA, 555 bp, Zea mays
  Peptide Sequence Number=SeqID_70518
atgtcgggagacaccgcggcggcggtgcaggcaggaggagacgcgcagcaggccgtcggcaggaaccggattcaggtgtccagctccaagaaacctctattcttctacgtcaatctcgccaagaggtacatgcagcatcacgacgacgacgtcgagctctccgcgctcgggctggggcctaagagtctttctaatttgcttgcagccatatcgacggctgtaaccgttgcagagatcctgaagaacaatggtcttgctgtcgagaagaaggttagaacatccacagttgacatcaaaaacgaaataagcacccggtcaatccaaaaggctaagattgagatagtgctgggaaagactaacaagttcgatgaactgatggccgccaatgatggagatggaaccgcaggggatggcgtgggaaagaatgacaagttcgatgaattgatggctgccaatgatggagatggaaccgcagggggtggcaacaaacagagatttgttatagattttcctaccatttttatctcttctcctctccttgatagatctagttaa

SEQ ID NO: 28740 - DNA, 657 bp, Zea mays
  Peptide Sequence Number=SeqID_70519
atgcagtgggcgggtctgagatcgcaggcgcccggttcccacggcggcgtggacggggccgaggccaagaaccgcgaggattacaaggaagcagcgaggttgagggactcgctgaggtccttcgaggagaaggagcctgtgttgtgcctccgccggttgatgaagaaggccattgaggaggagaggtttgaggatgctgctaaatacagagatgaattaaagattttggctccacactccctcctcaaatgttctagtgatgcaactactttggggataagagttcaagtcaggagcgtctatattgaaagccggagccagccattgaaagggcaattcttttttgcttatagaattagaattacgaatagttctcagcgccctgttcagcttctcaaaaggcactggattgttacagatggaaatggaaggacagaaaacatttggggagttggagtagtgggagaacaacctgtcatattcccgaagactggttttgagtactcttctgcatgcccattgagcactccaaatgggagaatggaaggtgactttgagatgaagcacatcgacaaggctggatcatcaacattcaatgttgcaattgcgccattctctctgtcaattcttggtgacgataatgatgttctgctatga

SEQ ID NO: 28741 - DNA, 216 bp, Zea mays
  Peptide Sequence Number=SeqID_70520
atgtcagggactcaatttgtgaagaccagaaagatagaaggggcccgaagtaaagtgtcagtggctggtacgataattgatcacgtgatgcggaagacgagccaagtcgaccccaagtgcgggctactccgcatggtgatgttgaaggacgaacctactggatcaagtgctaaggcaaggatgatcgtcaagtggtcgtcacctatcaaacactaa

SEQ ID NO: 28742 - DNA, 198 bp, Zea mays
  Peptide Sequence Number=SeqID_70521
atggggagtctgaaccagaacaaagatgtgattctcaccatggtttcaactgtgcagtattcaagacgcccaacacctacaaattgttggaggggatgctttcatgtcttcaatgctggagaaaagctaaatcttgttgaatttaaagcctactttccatcaaaagtgtcatccaagttattgatattgtcaagatga

SEQ ID NO: 28743 - DNA, 306 bp, Zea mays
  Peptide Sequence Number=SeqID_70522
atgactatggaggacctctcgaagaagaccactaagttaagcaatgctcgagtcaaggatgctgatttggagccttccaagagagaggctctcaaggaagattataagatcgtcagcaagaactatgaaatcctcactgaaaactgcaaatacctcaagactgctgtcgagaaggctaaaggcttgatgaaatccttcgttagttcgaggaagaaatcttcgagcacccctacctctgaaacaggcctagtcaagatgccagaggaccacctgactcacagggtagagatatcaacagggacctga

SEQ ID NO: 28744 - DNA, 207 bp, Zea mays
  Peptide Sequence Number=SeqID_70523
atggcaatcccaaaaacattagatggagatagggatgttatcaagtggcctaagaaatttgtacttctggatacagacttgtttgaatttgatgattctagacatgacacaactccagaaggtcttagtctaactaatcatgcgggctgtgctatttggatggatatccagaccatcttaaggaaaggagttgttgattgccaatga

SEQ ID NO: 28745 - DNA, 1089 bp, Zea mays
  Peptide Sequence Number=SeqID_70524
atggatttgggctcgtgctacctcggtgggaacgccgacgcggtggagttctgcccgcaccgcccgttccgccacgtgctggccgccgccacctacacgctgcaggagcaggagcgcgaccgggcgggcagcatatccctcttctcagttgacgttgcctcggaggacgcgtcccggaggctccagctgctgtatactgtggagaccgccggcatcttcgatatgaagtggagccccaagtcgccgctgctcgcgcaggccgacgcccacggccgcctcgcgctccggcgcttggagcaggaggacggctcggacacaggcattctcctcaccgatgtctctgctgaagatatttcttcttcaatgtgcttatatgtggactggaaccaaactgcggagtctctgtctgttggattatcagatggctcactgtctctggtttcagtgagagaggaccggctggagatatcagaacagtggactgcacatcagttcgaagtctggacatgctattttgatcgtacaaggccacacttgctgtacagtggatcagatgactgttgtttcagttgctgggacttgagagaaagcccatcaaacattgtttttcaaaacaaaaaatctcataagatgggtgtctgttgtattacacagaatccgttggaggggaacatgctacttactgggagttatgatgaatttctcagagtttgggacatgagatttatggcaaaacctgtcaatcaaaagttgataaatctaggaggtggtgtgtggaggatgaagtatcatcctagtattgcagatgttgtattggctgcgtgcatgcacaatgggtttgccattgtaaaagtaggttctggagatgctacgctattagaagatctatggcttggagtcatagatcatggcgccaagatgctcaacacattgagttatgactttaatgatctaagagttaaagagatgcaaaggctggcgctctcagcgaactgggcactctctggaaaaacattggacgccgcaactataattcaccagactgtccggtgtgcaccagactgttcggtgtgccagccgcgcgtctag

SEQ ID NO: 28746 - DNA, 354 bp, Zea mays
  Peptide Sequence Number=SeqID_70525
atggcaacaggtttggtcgggtttaaaaacccatgggttcacatgtttgggtactataggaacaaacccgtacccataaacccgtcaggggctccctatggatccctgcatggagaacgagggatcgacaatgcccaattgagttggagagtggagctgccatcgcgactcaggtgctttcccgagtgcgatgctcggtctgaggcatgtgttcgtggtcagatggttgtctttggtgtaacctatgctcagactagaatgcagtggaatgagaagacccttcgagtaggttgcagccgaatagaagatcctgtctcaaaatgtcctgcacttcaaataaagcttataccatag

SEQ ID NO: 28747 - DNA, 2337 bp, Zea mays
  Peptide Sequence Number=SeqID_70526
atggccgggtggagaaaggcgtggatgtcggtgctggaccgggccggcggcggtggcagcaccgtctccctgcagggccgcctccacctcccgtccatcctcgccagctacaagcggggcggtaataagtacggtaacggccacgtcagcggcaaggcggtggcggcctgcttctcggtcgcggtcgcgctcgccttcttctacgcctcggtcaccggcgggcccgccgccgccggcttctcctcctcctcctacgcgcttctcttgccgtggctgtcgtcgaactcgtcgtcgacgtcaccgaagaaatcgcctccaacacaccctcctcccgtttctcctgccgtggctgcgggcggcgctgctgaccacccgacagacgcgcgcaacgcgaccgcggtgtcgcgtcgcgtgccgagcggcggcgcggtggggggctcgtcgggttcggaggtcggcttggggcgagcgtcatcggcgccccggcgaacgggcagcgcgcagggtcgtctccccctgcaggacgccgggaacgccaccgtgggttccgacgccaaacccaccagtaacagtaaccgaacaagagaagatggaccccaagtagaaaccgcgatgcggatgcagcagtggcaaaaggcagacggagccagtcgcgcttcccacgacgccgccgtcgtcgtcggtgatggcggtcagcgagcggcgaacactacggacatcgccaccggcaactccacatacacagggacttcgagcagagaagaaacagacaaagacagcgccgttggctacgtccagaacctgccacggcgagtggctttgccatcacgaccggagcggaaggcggaaagacacaggcgcaggagagccgtgaggcacaggcacccgaggcgacggaaggagaccctggtctcggcgcaagatctcgctgcccgagcgcagcgacgacaagatggctggcgtcaaaaccagcttggccgtcgggccagggaacgacatggccgcaggtgcgaaacgccagcatgggcgctgtcggtgccggcaacaaccgtgtcgtgtggacgtccggcgtgcaagacctggtttcctttcgccaagtgcgacgtgttcagcggccggtgggtgagggacgagagctacgggttctacccgcccaagtcgtgcaaactcatcgacgacgacttcaactgccacaagaacggccggtcggacagtgacttcctcaggtggcggtggcagcctcacggctgtgacattcccaggctgaacgcgactgaattcctggagaggctgagagggcagaggatcatattcgtcggcgactcgctgaaccggaacatgtgggagtcgctggtctgcatcctccgccatggcgtcagggacaggaggagcgtgtacgaggcatcggggaagaaccagttcaagaccagaggatactactccttcgtattcagggactacaattgctcggttgatttcataagatcaatattcctcgtcagggagacgatccgtgagggcagaaacggcactgaagacgcgaagctgaaactggatgagctagacgcgacgaccccagcataccagaccgcggacatcgtcgtcttcaacaccggccactggtggactcactacaaaacatcaagagggctgaactactaccaagagggcaaccatgtgtatcccagcctcgatgttctggacgcgtacaggagagccctcgtcacctgggctagatgggtggacaagaacatcgatccgaggaggactcaggtcgtgttcagaggatactcactctcgcatttcagaggagggcagtggaactcaggagggagatgccacggggagaccgagccaatattcaaccagacgtaccttactgagtaccctgagaagatggttgtcttggagcaggtcttgaggcagatgaaaactcccgtcatatacctcaacatcagcacgctcaccgactaccggaaagatggccatccgtcagtctaccggatacgttgtgatacggaggaggaacggatggcgatggtgaagaagcaggactgcagccactggtgcttgcctggcgtgccagatacgtggaatgaactgcttgatgtacaggaaaacaacgccgcctgcgctgctccgactgctgtgccacctgccagggtgaggctgacagcagccaagtccagcctcgggcgccataggaagctccgcctcgcccgaccccagggctcggactccacctcgacctcggaagacggtctccgcctcgcccgaccccagggctcggactcaacctcgactccggaagacggtctccgcctcgcccgaccctag

SEQ ID NO: 28748 - DNA, 459 bp, Zea mays
  Peptide Sequence Number=SeqID_70527
atggcggctctcggcccccttacggaagcaagaggacgtcagcaaggactcgacggccccgacagctgtccctccgccaggctccagcgctcctccgacggccacgacatcacacaaaccgggcgtcaaaatctctccgaccgccacgatgcactctgctacaccccccattgtacacctggatcctctccttacgcctataaaaggaaggaccagggccctcttagagaaggttggccgcgcggggacgaggacgagacaggcgctcgcgtgaggccgctcgctccctctcccgtgtggacgcttgtaaccccctactgcaagcgcacccgacctgggcgcgggacgaacacgaaggccgcgagatttccacctctctcacgcccatctccggccacctcacttccccccttcgcgctcggcctcgcgtcgacccatctgggctggggcacgcggtga

SEQ ID NO: 28749 - DNA, 282 bp, Zea mays
  Peptide Sequence Number=SeqID_70528
atggcagaacccgacggcggcgggctcccgcgatttgcctctggtggcggctggaagaaggagtcaaagggaggagcacgaggagaggttgggtctgcttttgaagcccgggcgacggagaatcgtgggtgcgaggttagcgcgcggattcaacagctcgttcctacatccccggcgacggaatcggtcgcccaagcgctgcggcggatggagaagatggcgctgacaacgcgggccccgcgcgccagcggcaaaggggaaaatgcgcagcgcagggattag

SEQ ID NO: 28750 - DNA, 412 bp, Zea mays
  Peptide Sequence Number=SeqID_70529
atggtcccggccgagaaaaccctcgaacctggccctccatcactaatgggccgatcaactgcccactctgcaacggcccagccggagggtggctatgaaaggagagaacagtttaactgttatttaccggattcatctaagagcctcaatgctgacctctatgttgaggacgaggacatgttttatgaacctcaagctgaaaaagattggcaatcaaagcatagtagatcagatggcaatcttgctgatgagaattatgatggactctggaggatggatgaatttaattcagaggatcatctttttactcaaagagacaaacatgttgatataagtggctatggatttaaagacggatactctccagagcgaagaaactcaacaagacctgtcacagtatttgagaatacag

SEQ ID NO: 28751 - DNA, 216 bp, Zea mays
  Peptide Sequence Number=SeqID_70530
atggcctattcatatgctcatatggtgaggagtgaggacaggagctgtaggtatgccatccgccgagcagtagaaattaaaaggttggctgcaccagaatcagcatgcgcggcggtggagatcgagcagagtacacaaggtcgttctgttcaaactcggaagtggcaaatgctgcttcctggtggctggttgagttattcgtttgtgtacatttaa

SEQ ID NO: 28752 - DNA, 1458 bp, Zea mays
  Peptide Sequence Number=SeqID_70531
atgaaggatagaacgtgcaagaaacaatcaccatcaatgaagaatgatatgaacgagaatgacgagtttcatataagattggataagctggatattccaaacatggatgcacctcttcatgggaggtcactgtttaacaatccagaaaagttggataggaaagaaacagcacctcggaagaaacttgagacaaattggttgcaaagtgttactgggcagccaagaactcaagaaccaagctgtcggttatcacttaacgagaaattttctaattgggattctcctactttccgttcaaagagtactactggactaactgataaatcgagttgcaccatgttgcataaggataaatcttctttcgatgccgctccagatttggacatgtatcaaactgtggagtcaactcaaaagaggcctgtttcaaaagttcattctatttatcagaggcctgagaaacctatttttgaagacgaaattcacatgcagcatactgtttcagatatgtttcatgataaaattgaattatcgaacccatatcagaacaagaatctccagagtgacattgatatgagcactttcattgggcagaaggtggagaagcaagaagatgaatttccatgcttcagcagttcaagtgcagacaccttccgtgcagagaaagcagcgcgttctgtaagacaaactgttgatcgacacagtacatgctcacagccttctggcagggattcattcaggcacgggttcagtcctggtttcaatttccaggagtcagaaccaaacacgttttgggcagatagctatgtttgcaatggtacttttcaggcgggtcttgagttcagtggtgtggttgcaagaaaagacagtgataagaatgaagtcaagattgaggcatctgagaaaccagatactaagatattgacaggaacatgttggctctctgcagataacaggaatgtgattaatgggactgaaacatgttctgatggctcagaagcgttcaattgttctgaagcacagaaggaaacttcagcagtagtgacacaaattcctgcgaacttgagctctcttcgggaaacctcagcagaactgttccaagttcgtaatcacgtcatacctgtaaagagggaaaagatagataatcctggtgttgacttcgatgctgtgatgcattcaaaaagcaagatccacgatgttagagatcattctaaactaaatactacgtttcgatctcctttcattggagaggtggtggggattgagaagaagattgtagcgaacgtgtcacccgacaactctgatgttcagtatcagtttatgcttgaacaacgtgttcttcggcggctttgtgttcagaagatagtggtgcctacaccgatgaaggacaggctagacaaggatacaaacttcacgatagcggaggatggatctcttcatgtccttccaaaaagcgtctaa

SEQ ID NO: 28753 - DNA, 177 bp, Zea mays
  Peptide Sequence Number=SeqID_70532
atgggttcacgccgatcgagagcacagatactgcaccgtctagcctcttgccacggaaggaggttcaggttccactccacagatgttgaagtaaaagttgttctccacttgaggattctcaatctgggagacaacctcttcttctactacggtttgttcctcgtgttctatacatga

SEQ ID NO: 28754 - DNA, 801 bp, Zea mays
  Peptide Sequence Number=SeqID_70533
atggatgccaagatagagcgccttcggatgttgaatactgaggccatcagggacaagtctgcgatcgagaacaagagttcaaaccttctagagaaggttggctcgcttgagaaagggaatgaggggctcgaccgccagctgagcgaggagaaagttgtcgtgaccaaggagttggggtccctcccgtctattgcgacgggcctcatgtcttacacctccctcgttacctacgaaggggcagtgaatgccttgtcccatgtgggctataggcacttcgaagcctttgaccagagtaatgaggacttcgaccagggattgttccaggtcgaagacgtcgtgctgaagcattcggttggggcgttgtacgaccggatgtggggtccccatggtcgtggagtcatccgggagagggctggtcgagcgatggcacaagcgttgagggatgaagagattgaggacctcgttggcttggagagctcatgtaacaccctgaatttggggccctgttcaaagatcaaccatgttcacctagttccaaactcaaaaccaaatggtccaatggacaaagtggcgccaaaataccctaggcataccctagtgaagttttatatcaaaccaaaatcgtttgacatgatttgccctaagatttgtctcgggggcaatactgctgacacagccaacttgacactccaatatcttttaaccctgaccacatctacacttggatcttgcacagcagaggtagagcttggctcagtgaagagaccctacatgggatctttgctaagatatacacgttag

SEQ ID NO: 28755 - DNA, 258 bp, Zea mays
  Peptide Sequence Number=SeqID_70534
atgtcgtcgcctactgcgcctgcagcagctgataggagaatgccctcgcgtgcgtgggctaacaaggtggtgggaccaaagggggccaagattggagaagctagcggggagttgtatgtggatgactacttgattgaagatgtgggcatgttcgacactcagacggtgctgtcggctggcggggctgggtctgggcagatggtggcggtaccggtaaagccagttgaagagaggacccatgcaaagactgtgatgtga

SEQ ID NO: 28756 - DNA, 414 bp, Zea mays
  Peptide Sequence Number=SeqID_70535
atgggccgttttcatcgtctcgttgaccagcggtacccatacatgcgagcgtcgccaggtcccgcgtcggtcgagcacaagtcggtgggtgctgatggtgcagttggctgccggagagtcctcctgctacgagctgaattagcggagcttcgcctgcgaccgcgacgaggcactgggaacgcatcgccgcggagaatcacgcgttggccggggcaaagaagtctgtcgccgcccatcagacccgtcgcgtcttggcttgggtccgcgcctcgtgcttccggggttaccggcgtcgcgccgcggattccgagcgagttgcggggcgtgggcacccccggagcttgtggccgcgctcaccagtgcgggcagtcagcgctgcgccatggacaccctctgggctacgtgctccggtga

SEQ ID NO: 28757 - DNA, 261 bp, Zea mays
  Peptide Sequence Number=SeqID_70536
atggggtctcctgaactgtgttggcctccaggtggttcacctttccgtactagtggccttgttccccacagtggaaacatctgcggcctcctccttgcactggcgctgcctggttgctctgattggttgctagggcaggaaggcgaggtgcctggatgttttggcggtactgctgttgttgctgaggaaaatgcctctaatactactgctggtgttggcgctgatgctggtgcttgtgtccttaagggtgactttgcttga

SEQ ID NO: 28758 - DNA, 507 bp, Zea mays
  Peptide Sequence Number=SeqID_70537
atggggcacactttctgctcaatcttagaccaacggttctggttccacggaccgcacgaatcattatctgcacatctgggccatccgattaagactggacggttaggattgggcgctagaggctttatcttctccggtcagccaggggcggcgctttccgtggtcatggcggcacagtcaccagaggcaagggagactagggcttctaaggtgctgggggtggtctgggtagccagagaggactcgacaagcactatgcttggcacggcgcgagggggcttcggttggccaaacgatgaggaatcgcggcagcggcaagctccgacctgcgcaggggagaaggttgagcacggaccgaacagaggagtcaaggaaaggggaaaccaccatgggttcccggtgcgccaagctcaagcaaagctcactgtggccaagccgctggcagaagcccagcaacgacggtggaacgacaaagcaatagagggggcagcgctgtgggctgggtga

SEQ ID NO: 28759 - DNA, 423 bp, Zea mays
  Peptide Sequence Number=SeqID_70538
atggcagccccgccaaccactcgtcctgtcgcattaactctacggcaggacaggcggcacctttggcaggcgaagcaggcgacacttcacctccgccaacatgaccgcgtcaaaaaagggatcgagaaaggggatactccgaaagggatccttctccgcgaaggaagcgggccccgagcccccctactgatcagaggttcgaaggctggcccctcggaagggttcgacagccgcctcagagcactcgggctccgagcccctcctactgatcagaggttcaaaggctggcccctcggaagggttcgacagccgcctcagaacactcgggctccgcgcccaccactggtcagaggttcgaaggctggcccctcgtatgggttcgacagccgcctcatgccactcgggctccgcgcccactactga

SEQ ID NO: 28760 - DNA, 333 bp, Zea mays
  Peptide Sequence Number=SeqID_70539
atgaggataatgctggtttctattgtgattatgattatgattatggtttctgctttcacaaaacaccaggttgcctttggtgcaatctatgctcagctagacttctcagtttcagcgactgacatcaaggagccatcggccaaagctactgccctcagtggaaacttctattctgaagtgtggatgaatggtggccgagagatggaagacgaagccatcaagcgaaatgaagaagaatcccatcttgcctcagaagaagcaagaaaagctgaagaggccgctgatcgtgaaagacgtataggtatgcataacaccctaggtgttactagtaga

SEQ ID NO: 28761 - DNA, 624 bp, Zea mays
  Peptide Sequence Number=SeqID_70540
atggcgagatttaagaaggggagagtgaatggggaagaggaagaggtggcggctccattgatgggagaaatgagcggggagaggaagaggaaggggtgcggccgttacagttgtttgaaggtggacacgcgcgtgtgcccggtgctgctgctggagctggcggcgcccacggcggcgctggtgcgggagatggtgtcgggcctggtgcacatcgtgttggagtgcgagcatgccaggggaccgccgtccgccgcgggcagcggcaggaggctggtggagacggtgtggcgcgcctactacaacggcaggggttgcggcggtgttttgatgcttgccttcgtaagtgtccctcactcttattttgctctgggtccgccgctgggcacgagtgccgtgcggcaccgtggactggggcgtgcttcgcgcgctggagcccgtgtccatggggccgacgtcatccctgtcgccagctgcggcggcggcgcgggcaacgtcatgtacatgtgcgtgcggttggagcacatcgtgggatcccgtgactcggaggccttctacgacatgatgagcccggacagcggcggccgagctgagcccgagctcagcgtctacctcctcagagtctga

SEQ ID NO: 28762 - DNA, 1482 bp, Zea mays
  Peptide Sequence Number=SeqID_70541
atggccaaacaaagaaagggaatgataaggctcacaattctgaacatgtatggggagaaagaagaagagaaggaagaggttaaaacaatcagcggtataattaacttagcccggttgctagacgatgacgacgatgatgtgctttttgagatcgaaagcctcctgtcaggagacattgaaatccctataccaagcgatcgcttcaacgttaatggatggtcacggtacaacacttacatggctaacaaggcctctgagatagagggactgcgcagcctggtgaaggagatggaagagagagaggcgaagcttgagggcgagctgctggagtactatggaatgaaggaaatggagattgatgtcgctgagctgcaaaagctgctcaagatcaagacagtggagatcgacatgctcaataacaccataaactcactgcaggaggagcggaagaagctgcaagatgacgtggaacgtggagcagttaccaagaaagagctcgaagtggctaggaccaaaatcaaggagctgcagcggcagatacaggtggaagcgggccagacaaaagatcagctaatgctgctgaaacagcaggtcattggattgaaggccaaggaggaagaggcggtaaaaaaggaagccgaggttgagcggaagctgaagaagctcaagcagttggaagtggaggtacttgagctaaggaggaagaacaaggagttgttgtatgagaagagagatctcattgtgaagttggatgcagctgaagggaaaataactgagagtgatgtagttgccaatgcaagagaagagataaacaagctgaggcatacaaatgaggacctcacaaagcaagtggaaggcctacaaatgaacagattcaagctccgggactatcagactccatcatggaaggtctctgcatgtgattttaacaggacactgagcctcaaatcacaggacagggccaaacaactgatgttggagtatgcaggatctgaacggggtcacggtgacacagatcttgagagtgtttcttcagtgccttcttcacctggaagcgaagactttgacaacatttcaattgacagttatgccagtagatacagtttcataagaaaaaggcctaatctgatgcaaaaaatcaagaagtggggaaggagcaagaatgacagcagtagtttaggctccctcatcagtggttctccgaggaggaaaccaaagggccccctggaagctgtcatgctaaaaaatgctggagatggtacagccataacaacatatggaaagagggttcccaatggtgtcttggacgatgaaaatgtcgtgtcctcattccaattgatgtccaagacagtcaaaggttttgctgatgagaagtatcccgcttacaaagataggcacaaacttgcaactgaacgggagaacgcgataaaagagaaggctgggcaagcaagagcacaaaggtttggcggtggacatagttaa

SEQ ID NO: 28763 - DNA, 375 bp, Zea mays
  Peptide Sequence Number=SeqID_70542
atgtccggtgcgccaacggctctctggctgccaacggtcgagtgcgccatttttggaaggaaatcgggcaccggacagtgtcccggtgtgcaccggactgtccgatgtcctgtgaggcctagaggtgctttgcctcttgctgctaggcctcaggcaaagaggccacatggtggtcatgcccggtggggtgccggtcgtgtggtatatggccatggaccctgtcgcggaggtgttggtgttgatcgctttccccctttgggactagggatgactggtatttttcctaacaccttttatgggaagataccgcaacaatggtgtcgtggttttggaaaccgagggacaatgatatttgtgttcggcaggggatgctag

SEQ ID NO: 28764 - DNA, 960 bp, Zea mays
  Peptide Sequence Number=SeqID_70543
atggcgcctagaaagcatccatctggtagtaagaaaaggaagagaaggaaagaagtagaggaatttatagaatcacaaagaggtgccatggataaatttgttcgcactaatacaagaacttcaagtaatgaagatcaaccaaatttggctatagttgttgtggcggaacaaccaaataccaacgaagaagatcatgaccctacatttgaagaaaatgttgacatcaacacaaatggtaatgatgtgactggccatgatccaatatttgattcatctcatatagaaaatgatagctttgatgaacagtcggttcctactgaggatatctatgacccaaggaattggggtaatcttgataacaagtcgagggatatattggttgggaaggggcctataagagaagaaaatattgtatttcctttggattctaatggtagacatttttcatatactcattactctagaaagatgaggaatggagaagttcatgatagaaaatgctttttaattcagaaagatgtagcaatcatcatcataaaacccacaacagaatgcataaatagagtaggtataaacacaatcattgaaagtctaaacatggatcaaaggaggtcgtcatcggaggatgccatcgaggccactagattggaggaggtcgtcgccagaggatgcccaagccaagctcgatcagaggatgtcacgcgcgaccaccaccgctcgctcctacacaactgtcaccttcgctcgcaccacacgtcttgcgcgtccgccgctcgagcctcggcgggctgccccgaccgatcgtcgttgccaccaccgcttgaagatcctctaggatcgctgccgccgcgcgtgcctcaagagggatgcgtcgtcgctcgtgcatcgagggggagggagggcgtcaccacaggcgccgctaaaaatctgatccctagcggcctagggctctttttatag

SEQ ID NO: 28765 - DNA, 174 bp, Zea mays
  Peptide Sequence Number=SeqID_70544
atggtgctcgaagtttccgctattgaaaacaagtattcaacacgtgccatccttgcctccctcagcgacctcgaccacgactctgacgatatagcatcttcctcgagcgacaaggagactaacaagcaggtcaaggacaagctgaatgggtttgctacatcactgacaccataa

SEQ ID NO: 28766 - DNA, 264 bp, Zea mays
  Peptide Sequence Number=SeqID_70545
atggggcgccatggccaaaattccaagccacgcccaggtgatctagcccataaactaaatggatcaacgcgcagaggaggatgtggttctttaccggagatgagggggccgaataggctgtccacgcgaacagaacgcttcacatggagctccctcgctggtgatccggccaccggtccaatcccgccaggcgaggccgtgacagacctcttggtggacccagccatccccccggcccgctccctagggatcaacatcggctag

SEQ ID NO: 28767 - DNA, 123 bp, Zea mays
  Peptide Sequence Number=SeqID_70546
atggcgaggcctcggcgcgacggcgcagccggcctgctgccaggcgcagcggccagggcagagcccctgcgcgccgtcccacatgctgtgcaccagtgcgccttggaatctgtcaaagtgtga

SEQ ID NO: 28768 - DNA, 1011 bp, Zea mays
  Peptide Sequence Number=SeqID_70547
atggagcggtacgaggtgatcagggacatcggctcgggcaacttcggggtgacaaagctcgtccgggacgtcaggaccaaggagctcttcgccgtcaagttcatcgagagagggcaaaagattgatgagcatgttcagagggagattatgaaccaccggtccctgaagcacccaaacataattagattcaaggaggtaatttctcagacatcttggaaaggaaatgttctggtcgtgctaactcccacgcatttggcaatagttatggaatatgctgctgggggtgagctatttgaaaggatctgcagtgcggggagatttagtgaggatgagcaagtatgccatagagatctgaaactagaaaacactctcctagatggtagtgtcgcaccccggctcaagatctgtgatttcggttactccaagtcttctgtgctgcactctcaaccgaaatcaactgttggcacacctgcatacattgctccagaggtcctctctagaaaagagtacgatggaaaggttgctgatgtctggtcttgtggagtaacactatatgtgatgctcgtcggcgcgtatcctttcgaagaccctgatgacccgaagaacttccgcaagacgatcacgagaatactcagtgtacagtactcaattccagactacgttcgcgttacaatggagtgcggacatctgctgtctcggatatttgttggaaatcctgagcagagaataaccattcctgagatcaagaagcacccgtggttcctcaagaatctgcccatcgagatgaccgacgagtaccagcagagcatgcagttggcagacatgaacaccccggggcaaagcctggaggaggtgatggcgatcatccaggaggcgcggaagccaggggacgccatgaaccttgccgggcagctgccctgcctggggagcgtggaccttgacgacattgattttgacgatattgacgacatcgacactgagaacagcggcgacttcgtttgtgcagtgtga

SEQ ID NO: 28769 - DNA, 450 bp, Zea mays
  Peptide Sequence Number=SeqID_70548
atggccgcggcggccggcggcaacgcgggcgaaggcggcagtaccccacctctcatgtcgagggccgggttggtggaaagctgggagtacgtgttcgacaagttgggcaacgacaaggcaatggaggtgttgatggccctgctgctgcgggacgcccgggccgagaacgcccgaaaagcccggaaggaggaggaggaggaggaggaacggcgcgcgcgcgtcttcgagcagtggcagccgccgccgcccgactcagcgccgccgccggtggcggtggcggcgccgccccgggtggaccagaccgtcgtgctggccctggccgcgccgccgcactgctgcctctcaatcacattcacgggaagacgaagccgccgtcggcggcggacctcgggcgttccgtcaaacccgccaagaacacccgccgtggcggcgtgtagcagactgggctaa

SEQ ID NO: 28770 - DNA, 240 bp, Zea mays
  Peptide Sequence Number=SeqID_70549
atggacaggtccttctctcccctgctagctttgctttccctcgcctgtatcggcctgagctccctccgctccggttccgccgcaacgaccaccgctggcacccccgacggctcagagctgtgggggtacgtcgaagtccggccaaaggctcacctgttctggtggtactacaagagcccgcagaggacggcgacgccgacgaagccatggccgacagtcctctggctgcagggtggcccg

SEQ ID NO: 28771 - DNA, 1410 bp, Zea mays
  Peptide Sequence Number=SeqID_70550
atggctgatacggccaccgtcccgctcctgacaagccacaaagccgatccggcgaaggttccgccgacttcaatcgacgacatgatcgagaagtacatcggagacaccggcggcgccgtgcagctgctcaaggcagtcttcgtggccttcgcctgggccttcgacgcgcagcaggtgttcatctccgtgttcacggacgcggagccgcagtggcactgcgtcgatgtagctggcggcaacaactcgtcctgcacgccggccgcggcctcgccgtgcgctctcccgcccggcacttgggcgtgggaccggccggccaagacgtctgtggtatccgagtgggcgctccagtgcgccggcccggcgctcgcctccctcccggcgtcgtcgttcttcgccggctgcctggtcggcggcttcgtgctcaccacgctggcggactcggtcctcgggcgcaagaagacgctcctcctgtccctggtgtccatgtccgtcgccggccttctcaccgccttggcgccgaacgtctgggcgtacgccgccctgcggtttgtgtccgggttcgcaaggtcgacagtggggacgtgcacgctggtcctgtcgaccgagctcgtcgggaagaggtggcgacacacggtgagcgtggcggcattcttctgctacaccatcgggttcctgtcccttccgttgctagcctacgcgttgcgcgaggattcctggcggagcatgtacttctggatggtcgtgccttgtctcttctacgctgctctgattcatttgctagcccaggagtcgccgcggtggttactggtgcgcggccacaagagggatgcgattgagtcgctgaggcagatcgccacgctggacgacagcggcggccacaccaccacaaatctctccatgctggaactggaactggaagcatgtgttagcatgcacaacgaggacggtgcgtcgtcgagcggtagcggcgtgttcgccacgctgcaggtgatgtgggagcgtccatgggcgatcaggcggctagccgcgatcatggtggccggcttcggcgtgggcatggtctacttcggcatgccgctcaccgttggcagcctgggctccaatctctacctgagcaccgcgtacaacgcgctggccgaggtgccgtcgtctatcctctcatggcttctcatcgccagggccaacaggcgcacctcggtcgtcgtgctcgccgcgtcggcgggggttctcagtctcgcgtgcgccgccatgccacagcgagcggaggctgcgcggatggcaggcgagttgctgtccttcttcgcgacgtgcacggcgtacgacgtcatcttggtctactccatcgagctgttcccgacgtccgtgcgtaactcagcggtggggcgctggtgcggcaggcgatggtgctag

SEQ ID NO: 28772 - DNA, 285 bp, Zea mays
  Peptide Sequence Number=SeqID_70551
atgtcgcctatcccaacctttttcctgtcccaagaggcaagacgtgacaaggggtgcctatgtgagcgtgattctgcatggaaagtgcacattttgcttgattcccaactaacgagtttacgatgtttcacgggttatggcgatggcgggagctggacacgtcccgatgttggaaacgagtcatggtgcctgtcccaacgtgtttccataaggaaactgtccgtgacgcgcgcagcacgtgcagaggcaggacgtgacaagtggtgggctatgaaatcaggttga

SEQ ID NO: 28773 - DNA, 570 bp, Zea mays
  Peptide Sequence Number=SeqID_70552
atggagccatccacatttgatgattctatggattaccaaatccttgcgtgccttgtaactaataagacgttggcaaaagatcgctcttcatgggatcctactgatgatgaggtgcagcgtgttgttctgtctttgttggaaggttccaaggatattgatgccaataaactaaaacaatatattgccgaatttgagatgatagtcaaaaacaattgggaatgttctgaacgaattgtggcaaataaggagatgatgcttgatgtgttcgactatgtcgttgctgactttgtccccaatttttatcaggagccaacccttcgtttgccttctatttctcctagaagtaatggttgttggaccaaagagcagctgttcaagaaattgacgggccctataagtatgaaccattgtaccgaaaaacttaagaaatgtggtttttcaaaacagcaactttgggatgctatcgatatattgaaggctgatttagaattgcgtcgggtattcatcagattagaagattctgaggcaagagggtatatgattcatgccctgcgtaacagcaatgtttag

SEQ ID NO: 28774 - DNA, 888 bp, Zea mays
  Peptide Sequence Number=SeqID_70553
ggcgcgtccggcgtcgggctcggcaacttccaggagatcgggccgctggacgtgaacctgcagccacgaaactcgacatggctccagaaagccgacctcatcttcgtggacaacccggtcggcgtcgggtacagctacgtggaggacgacagcctgctggtgacaaccgactggcagcaggcggctgacgccaccacgctgctcaaggcgctggtcacggaggtgccgacgctgcagagcagcccgctgttcctggtcgccgagtcctacggcggcaagtacgccgccacgcttggcgcgtccgtcgccagggccgcccgcgccggcgagctgaacatcacgctcggaggtgtcgccctcggggacagctgggtctcgccggaggatttcacgctctcgtacacgccgctgctcctcagcgtgtcgaggcttgacgacaacgccggcgacgaagcaaacacgatggcggagacggtgaaggagcagatcgcggcgggcaatttcagcaacgcggaggcttcgtggaacgatctgctgcatttcatcaaacataggagcggcgacgttgacgtatacaatttcctcgacggcagcttggaccaggggacaccagcggcggcctcgtcaccaggcaccgtgaaggctctgatgaagtactcgaggtacctcagcggcagggaggacttggccgccggctccaacaacatcaccggcatcatgaatggagtcatcaaggagaagctcaaaatcatccccaaagacctggagtgggaggagcttaacgaggctgtttataacgcgctggtcaatgatataatgaagccaaaaatcgaggagattgatgagctactgtcttacggtgtcaatgtgacggtgtacaacggccag

SEQ ID NO: 28775 - DNA, 1434 bp, Zea mays
  Peptide Sequence Number=SeqID_70554
atgacctccgccgtcctcgccggccgggatgaggtccaccacggacacccgcaccaccgccactggggcggcgcccgcgcccccctcatgcccaagccatcctccaatcctaaccctaggcgctaccgcccgggaccaaaccctatcgtcagtggctcgccgccggcgccgcgggccggttcggctgtcgcggctgagcccttgccgtcgcccttaaggcacgtgaaattcaggccgtcggaactgacacccgccgaggcccgtcatctccgcgagcggctcaccggcgagcttggccgcgtccgcgctttcgtctcccgcatcgactcgtggcaggacgggcgtcgccggggcccggagcccgagccggagcctcccgcgcgccgctcttccccgccgccggcgctggtggaggcgatgcggaggcgatgtgcggatatcctgacgcggctgcggagatcgaagaaaagcgtgtggttcaattcccccgtcgacgtggagggcctcaagctgcacgactaccgcgccatcattcggagccccatggatctcggcaccgtcaagcaaaacctcaccgctggccggtacccctcgcacgaaggcgttcgctggcgacgtccggctgaccttcaacaacgcgctgcggtacaaccctcccgaccaccacgtgcacaggggatgtacaaggaggcggtctcgtggttcgagcagcagcgccagcagctcgagccgccaatgcagcttgatctgctgccaccaccaccaccaccgcaactcccagtttctgtgccagtgcaagcgcccctgaggatgtggggtgggaggaggcccaagcccaaggctaggcagccaaacaagagggagatggatgaggaggagaagcagaagctgagggtggagattgagaacctgcctgaggacaaggtgctgaatgtgctgcagattgtgcagaagaggaacagagatccagcattgtcgggggaggttgtggagcttgatttcgatgagctggatatcgagaccctatgggagcttgatcgatttgtggtcaattggaggaaagctctaaagaagagccagcggaattctaggatgaatggtgatgctgctgtgatgaatgcagatgccatcgatgcgacaattgttccggatgatgatgacagggtcgaggttgctgtcaatccgtctgtggtggttgaaattggagagtcggagactgacgttccagagaagaatgaagtggaggctgagatgggtgacgagtatgtggatatcggtgatgagatgctgacgatgaattaccagtcggtggagatccagagggattccctggccgccagcagctcaagcggaccaggaagtggctcgtcttcatcaactgattcggacttggaccctgaatctgatggggataatgcaagcgccccgcactag

SEQ ID NO: 28776 - DNA, 417 bp, Zea mays
  Peptide Sequence Number=SeqID_70555
atggcccgaccgtgccgtttcatttcccacgtcgccgccgccactcaacgtcgccggagcctgcctcgccggaagcccgcggccaccatcgccggagcccacggccgccctcaccggctcccacgcccgaccccgccagagcccacgaccgccctcatcagagcccgcctcgtcggagcccacagcggccctcatcggctctcgcgcccgaactcatcgatgctcgcgctcgacgccagtgacgcccgcacccgtcccgatcccgcaagtgatgatcacggaccgacgccgaagaccatggccgagtggtcaacaatttaccatacagaggagcaataccttgaggaagtcaaaacccggccatatgcccacggatgtggaggtgtatatgttttatatgggcaggagatggtttag

SEQ ID NO: 28777 - DNA, 1362 bp, Zea mays
  Peptide Sequence Number=SeqID_70556
atggagatggacccgccgccgccgccacccctgcacgccgaccgccgcctccgcttccgcgactacctgctcgcgctggaggaggagcgacgcaagatccaggtgtttcagcgcgagctgcccctctgcctcgacctcgtcacacagactatcgagggaatgaggagtcacatggacagcgtcgtcgtcggcagcgaggagacggtgagcgaccacggcggccccgtgctcgaggagttcatgccgctcaagcccacaaccctctcgtcctcctcctcccagccccagtcccaggacgatcacgacagcgcccactaccttgaacaccgtcgcgctgccgccgccacggccaacgacgttgtcgatgccgacaaggacgacgaggcgctgggagatccggagacggcagcagccagcagcagcaggccgttgccacatccggagacgaagaaggcgatgccggactggctgcagtccgtgcagctctggagcaaccaacaacagccctccgtgtccccaccgcagcaccaggatgagctgctgctgccgtgcaggccggtggcgctcaacgcctgcaggaagtccgggggcgcgttccagccgttcgagaaggagaagaagaaggaggacaaggaggagaagcagcgcgccgagctggagctgccgctgccggccgcggcgagctcggccgtggtcggggacagctgcgacagggccggcgccaccgacaccgacaccgacacggccgagaacaataaggctagcagcaccaaaggcggcaaggacaaggaggctcagctgtcgtcgcaggcgcccagccggaaggcgcggcggtgctgggccccggagctccaccgccggttcctgcaggcgctgcagcagctcggcgggtcccacgtggcgacgcccaagcagatccgggagctcatgaatgtcgacggcctcaccaacgacgaggtcaagagccatttgcagaagtatcgtctccacactcggcgtccgaactcggcggcggcggcggtccagagcggcggcaccagcgtcgttgcgccgccggccgcaccgcagttcgtcgtggtggggggcatctgggtgccaccgccggagtacgctgcggcagccgcagcgcagccgcagcaggtgcacgtgcacctagccggcgacgcgtcgggaacgacgacaacagccgccgacaaggtgtacgcgccggtggcgacgacgttgacgcccgcaccgcgaccgcgaccgcgtccgggtccggagaggcagtcgagcagctgctccggcgcgcggcgcaatggggacgcctgctctggctcgccggccgtgtcatcgtcgtcgtcgcagaccgcctctgcctaa

SEQ ID NO: 28778 - DNA, 1029 bp, Zea mays
  Peptide Sequence Number=SeqID_70557
atggccggcggcaacgcgtcgtgcagcgtccgccctgatcacggaggcaacggcgacgtcgtcgctacggtggagagaatcagtcgcaggctagcacgcaagcaagcagacaaccaggcggtggtggacttgatccgcgagctggaggccttgcccatgacatacgaggcgctggaggccacaatgatcggccgcaccgtcaacggcctgaggaagaccgcgccgtccgcgctggctcgcctgctcgccgacacgctctacaggcaatggaaggctcttgcccacgagtggcacgcgagcagcaagacgcagccgcagacggcgccgccagaggctgataacggtatcaagaagcgtccctctttgtcatcgccgccgccaaaggttgatgatgataaggacaccaggaagcgttcctcttcgccgccgccgccgcagcctgtcgacgcgcaacagtcggctgcgccagaggccgaccgcgagatgggcgccccgccgtctacgacacgcgcggcttccgtcatcaggaagccgaacatcttacggttccggatggtcaccgtcaccgagccagagaagccacatcagcgccgcgtaaggctcatcccgctagcgacaccagaccccgcaccgtcatcgaacgacgcaatgcaaaacgacgccgacaacaaacaacaagccacgtgctgcccggcgacggcggcgagccaccagagtaccagtgctgataatgagcatgtaggtacgaccgacgcaacgcccttgacgacggtcgttaagccgtcgactgcactgccgaactcggtctcttcgtcagaggcttgcaagcgcaaagaagaggctcctacggatttcgaggaggagaggctagcaaaggcgagagcaagactcctcgaggggtacgaggaagcctccgccgccagggagaagaggaagaccaagctgatcgatgtgattgatgtaccggagaaagcgagacagcgtcctgctacccaccgcacatggaagaagcaacctccggtgccttaa

SEQ ID NO: 28779 - DNA, 978 bp, Zea mays
  Peptide Sequence Number=SeqID_70558
atggcaatggtgcacatatcactggtagggccagacaaggtgcgagtgtcgtggatcaccgcggccgacgcgccggcgactgtcgactacggcacggcctccggccagtacccattctccgcgacggggaacactacgtcctactcctacgtgctctaccactcgggcagcatccacgacgccgtcatcgggccgctgcagcccagcacaacctactactaccgctgcagcggcagcgcctcgcgggacctctccttccggacgccaccggccgtgctgcccttccgcttcgtcgtcgtcggggacctaggccagaccgggtggacggagtccaccctcaagcacgtcgccgccgccgactacgacgcgctcctcctcccgggcgacctgtcgtacgccgacttcgtgcagccccggtgggactcgtacggccgcctcgtggagccgctggcgagcgcgcggccctggatggtgacgcagggcaaccacgaggtcgagcgcctgccgctgctggagccgcggcccttcaaggcgtacaacgcgcggtggcgcatgccctacgactatgccgccgacggcacaccgccgtcggacgacaacctcttctactccttcgacgtggccggcggcgccgtgcacgtcctcatgctgggctcctacgccgactacgccgcggggagcgcgcagctccgctggctccgcgccgacctcgcggcgctccgccgccgcggcaccccgccggccttcgtgctggcgctcgtgcacgcgccgtggtacagcagcaacaaggtgcaccagggggagggcgacgccatgcgggacgccatggaggcgctgctgtaccacggcgcgtcgacgcggtgttcgcgggccacgtccacgcgtacgagcggttccaccgcgtctacgccggcaaggaggatccctgcggccccgtctacgtcaccatcggcgacggcggcaaccgggaggggctag

SEQ ID NO: 28780 - DNA, 264 bp, Zea mays
  Peptide Sequence Number=SeqID_70559
atgtccggcgccgacacgtcgtgcagcgacgtcctcacgaccgtggcgaggatcgatcgcaggctagcgcacgagaaaggcaatgatgccgtggtcgagttaatccgcgagcagcaggccgtggacatgacgtatgaggtgctggaggccacaaagatcggccacaccgtcagcgccctgaggaagagcgcgccgacggcgctggctcacctgctcgccgacacgctctacaggcaatggaaggttctggctgacgacgagtag

SEQ ID NO: 28781 - DNA, 546 bp, Zea mays
  Peptide Sequence Number=SeqID_70560
atggccaaaagcgggtcggcagtaattgcagaaacagacaggcggaagcagctccaatcaccaataggctcgcaccctctcctgaaatggcaggggagccctctcccacggagtaaagacgacacacccgtgtttcgttcctcgaacggctcgcgcacgcgcaacagacgccccgcgaatcgcctgtcccgtcgcattaactccttgacagggcaagcgacacctccggcaggagaagcggggaccgggaaaggggatatttcgaaaaggatccttcccagcgaaggaaacgggccccgagccctcctactgatcaggggttcgaagggttgcttcctccggggttcggcaacccagagcactcgggctccgtgccctttactgatcaggggttcgaaggctggcccctcagaagggttcgacagccgccccagagcatgcagagtcagggatgaccctgggtacgtccgttacatggccgaggctcgggctacgctcccgaggtaccctaggacatttccgaggccagtgggaatgattttgtaa

SEQ ID NO: 28782 - DNA, 510 bp, Zea mays
  Peptide Sequence Number=SeqID_70561
atggtagagcgacccatgttgccagcgcgatcgaggactggtgagacacgtgtcttggacgtgggggacgagcatgcggtgcgatactcgatggtttgtttgttgatcctcaaaaaccaccctgcactgtggatgacagattttgctgagtttgggcctcaaaacttggcgacggcgattccaaagggaatcagtggtggcacatggaatcacaacgaaggatttttggtgtgttcaaatgacactggtttgaaatacacaatgatctggttctttgatgaaaacacaattaaatgtctaactaaagtgttaagtgttgaacgagttttagtgaagaacatacaaagttcaacacaaggacaaaggcaagaaggacttcaagggaccaagaggaaggagaaggtcaagaggaccgaggtatctaaagccaaggggaagaaggggttcttgcaagaggtcaaggttggtcaagctgagaagagacgtggtgcattgaagaccatgacataa

SEQ ID NO: 28783 - DNA, 369 bp, Zea mays
  Peptide Sequence Number=SeqID_70562
atggactacagcatgcagggatccaaggactcgtactcgccgcaaggcaagttgaccgtccagtttcgtgtcctccattcagttcacaaccacttgtacccggactctcagccagggctgtatcctcctccgccgcaggggggctacggctacggctaccagtaccagggctaccttggcgaatcggcgaaccctccttattactactacactggcagctggcccgagcagcccccagctccgtccgacggcgccccctttcgctaccgctacctgcaggaccaggacgatgccgactgcatcaccttcctcagaggatgtcttgctggtctgtgctgctgctgcttactggagcgatgctgcatctaa

SEQ ID NO: 28784 - DNA, 704 bp, Zea mays
  Peptide Sequence Number=SeqID_70563
tctccagctcggccgcccagcttcctgtgcgcgccttgcttcctgtgcgcaccttgcttcccctgttcagctctctgctgtcgagctcctccggctatgcttccctgctcagcgcatttctccctgctctctccctcctctggccatggattcttgggagcagaagtagccccagctcggcaacacctataagctccctagaaccagcgtctcgtcgagccccgccgcatgtcctatttcctgctcgcccatggaagctgcgcccagcctttgtccccatcgcgccgatccgcgctcgccaaggtcacctgccgttgcccagctcgacgcctttccctgctacaaagttcgccgtctgtccgtacgtcgcctgctgcttagatcccagccaggttgaccttgtcatggtgctggaactctcgtggatccggcatgtcgtctacttggcagctccggctagtcgcatcgtcacgctgtttactccttcgacgccatctgatgcacacctccggagctcgcccgtgtcgtattttagtcaacatcatatcctgcgcgacgcgctccggtgtcgtttgtcgcgttttgcgcgtccttaccacctccaactttcaatgttcactgtcgtccactacgctcaaccatgcgacaaccacgccatccatggcattgaagtccgcgtggtgctcaccacgtgctcgacgtaa

SEQ ID NO: 28785 - DNA, 519 bp, Zea mays
  Peptide Sequence Number=SeqID_70564
atggagacctcgggagccggggaaacctcctgggcggaaggaagaccggtgccctcgtcctccgcgcacatcggtagctcgtcttgcagcactgctgcagcaatggaaggccgccgctccctctcctcggtccgcgccaagccgccaccacgggactctagcgcgccttcgccctgggcgcttcaccgaagtacttgcggctcgtgcgcaggtcgacgggcaagcctgggcatggccgccatcgaattgcgtagatactttcccctcttcgtcgagcttcgtcgcaagtcttctggtgagtgccttctcgattggttcgcctgtgtccccgcatcgcatgggattcctaggataagcgtttggggtgccatgggacgttcaccgatcatggtgccgccgcgtgatactgctggcactggcatgccggtctgtcgagctggtgaagaagggggttcggatctggacggttgggcgttaatcggacggctctggatagaactggtgttccggctggagtag

SEQ ID NO: 28786 - DNA, 378 bp, Zea mays
  Peptide Sequence Number=SeqID_70565
atggcgcaccggacagcggagcgccaccggacactgtccggtgcgcctgccacgtcacctggtcgttggatttcgaccgttggagcttctatcttctgggccactggacagtccggtggtgcaccggacagacgaccgttggtgcaaagtagtcgttgctccgctggcacactggacagtccggtgcgccaccggacactgtccggtgcttcaccggacagtccggtgaattatagcggagcggcttccagaattcccgaaggtgagcagttcggagttggagtccctagtgcaccggacactgtccggtggcacatcggacagtctggtggcacaccggacagtccggtgcgccagaccagggcacacttcggctga

SEQ ID NO: 28787 - DNA, 1698 bp, Zea mays
  Peptide Sequence Number=SeqID_70566
atggggcacaaggaggggattttttcaaccaagcctgaaaattcaccccgaggtggatcgaacccaggacttggaggtgctactcggaaacgcaccactaggctagaggttgttttgcaagtgaatgttagcgttaacaaattggaagatcctgtgcttgaagtccttcagtttgagaaaagtatatcaaacaattgtatgcctgggaatcttgtggatggacaatgtgacagtaacgatgatccatgtcaggagctgcttagttggttgctccctttagatcgcacattaccacctcgttctttggcaccccctactctcaatccaagtgtatcacacaagcaatcttattctgcttctggttctcaaatattcaacttcagaagttactccatgccttcagcctcttctgttcagacaccaaataatataagaccaccaccaatatctgaaagtcaagaatttatgcctgaaaaacctgcaaaaaccccagatattataaatgatgggcaactttcgtttagaggagttcctttagaacctgaacggtattctgtacgttgtggtttagaaggcgtgtatctaccagggaaaagatggcggagaaaagttgaaatcattcaaccaattgaggttcaatcttttgctgcaaaatgtactgtggaaaatcttctctgtgtcacagtaaagaatattgctcctactcatgcaaaagatatagtcgtattcatcgatgcaattactattgtatttgaggaggcatccaaaggaggtgctcctttgtctttaccaattgctagtattgaggttgggcatggtcacagcttgccaaacctagcactcaggaggggcgaggaacactcttttattctcaaaccagcaactatgtcctcaagggaacggaagactaacagtcatgcacctctggccttatcactcccaacgatgaccggtgctactttaaatactcatacaccaaaggctggtgagccgtatgctgatctaagtgaccaatatgctgtactgatactaacactcgaagctactaatatgacatccgaaaaccttacattaactgtccttgctcctgaagcatctggttcttcttcagttgtatccttgaactcatctccaaccaccccaaatggttcttttgatggtgttaatgagtcagcaaaaagatctggggtgggaaaagatgggattggctttcgaagattgaattctgtcctagctactccaaaagaaggtgataatggaggaaacagaatgagtaatgcttcaggctgtactcatctgtggttgcaaagtgcagtgcccctagggtgtgttcctgcccgctcaagcaccactgtcaaacttgagctgctaccattatcagatggaattatcacacttgatactctgcaaataaccgcaagggagaaaggccttgcttacataccggagcactccttggagatacatgccacctctgggggaaagaattacgtaggccttcctataactgtaatatcgtttaaagcaattgaatttggtataccatacctcatcttcagcggcggccgagcaggcgctcacgctattctgactcatgcttcggcgcgtcgtccctcgcccgaacgccttaatggtgagccccgtggtcaggtgctgctcggcgctgccggctgtctgagtcaggatctaggtgcatga

SEQ ID NO: 28788 - DNA, 810 bp, Zea mays
  Peptide Sequence Number=SeqID_70567
atgggtggcggtctagtcaaattaaaggggtcgggagcatcgcagacgtatgataatgctcaaacaagggagcagaggacgggaactgaccggagttgggctggcgacggtgagctcggtttcacggtggcggaaatcggatttggggggaattccaaattcaagttctctggtgggagtcaacaagctctgaaagattatgctaaagttttcaaacatcccctatctcaatgtcaggttgaggccttggctgccttatttgggtggtctgttcctgtggagatcagctcccaaagactgattgatgatcttgccttgaaggaaatacctctgcatggccccaaatttacatggtcaaatcagcaagctgctccggtgttggtgaaaccagatagggttttctgtacagttgactattgtccttttcaaaccttggatttgaagctaaaggcaactgccaggggtctccatgcttggagtgccaagcagccgaacgctcaggataggcatattttctctatatcagccaacaggatctactcgacaaaggatgcttatgaagggctgttcattgggtcggtgtcctttcctcatcatgacagagtatggaaaacgtgggcaccccaaaatgttatttttcctttggtgcttaggcaagcagaggaggagtgtgatttatgggtggctgctggagacaagggtatctccctactgttggcagccactcaggtgctaaatggggtggagtaccgggtgaagcaagtgcaagaaatgcaattgaattgtgataaagctggttacaattgttaa

SEQ ID NO: 28789 - DNA, 810 bp, Zea mays
  Peptide Sequence Number=SeqID_70568
atgatccatccatcggggggcattgccgttgcccgcgcgtcccatccatggaatcccgcacgcaacggccgcggacgcaatcgtcgccggccggcccccagcgtgtcaggtcgaccgcgcctcggcacgagcgacgccgacctggcctggccgccacccgccacgggttcgcgcccccgccacggcagacgaccaacgagggcgccgagcctgctgtctgtgtcgccattcgtcgcgcggcaagacgacgccacgccggcggacgacgcgcctgtgcgcgcgcgccggctttggcagcttcccgtgcctgggaagcagagccagggacagggagggaggaggcggcagatcccggcgttcgggaggtggaaccagcacagcgtcggcgacgaggtgcccatcacgcagtacttcgagtcggcagtacaggccagcctcctcgccaggcccggccactgctaccacgacgccggcgccggcgaggtgctgctgttccggtcgtccgcctcgccgcctccgcacaagccgcccaagaaggtgcggagcacgacggagtgtcacggtcaccaccagcaggttcaggttgaggaggtggggagcaggaggaggcagcagcagcggcggcggcaggagccgttgccgccgttcgtgtccggcgacgtgtcccgcgcggcgaggccgagggtcgttagggcggcggtggacgaggacctgtacaaggtcccttccgatatgctacgcaagaagaaagggaggaagcatgtgaggagcgtgtggatgggctgcgtgggcctcacctgcgtcgcctga

SEQ ID NO: 28790 - DNA, 492 bp, Zea mays
  Peptide Sequence Number=SeqID_70569
atggcgggcacagctcctgtggatcgcgggcgagacgtgggagcgaggatggaaggagggcgcagtcgacggcgacgccgccgtggggaggatgtttggcgcgtcattggtgacggaggcaggggcatagatcgtcgcgacgccgttttccccttctcagacaccgtcgagcacgaactctccgtgctccgtggccagacaatcctgttttgtgggaacgcgggctcgacgtcgcgtattccgacgtgcgtgtgggtagggcattctctgaacgtgcgagccaaattgatgcccataatggctcggggtagggtagaatttggtggagcagagaatgaggaagaagtgactgttgaagaggaagagactactccatcagcagaaaatccacctaccgggaactgtttttactttgacatctatggaacagagcccgactctcctacaacacaaggcaagccccggtgcatttgccacctccttgctgtttaa

SEQ ID NO: 28791 - DNA, 942 bp, Zea mays
  Peptide Sequence Number=SeqID_70570
atgctcaacgatgcctcccgcaaccgcccgtacaacctcgccatcgacgccacggtcattgaccccaccttccgcgtcctcgacattggtttcagcgccccaaaggttggattggatttggctccagctcctaaggatgataatgctcagtgtctgccctgccctgcccggcctcgtggaaaggcgctccgctcttggctctccccacctgcgggcaggggctgttggttcggggggaggcagtcaaatccgcctgcggctgaatcgggggagagggggtgcatggcggaggagaacaggcagcagcggcggctgttcgcgaacctgcgcagtgtccagtggcagatcgatctcggcatcgtgccggcgtcgcccggggcctccgtcgacaagctctgccacgccgccgcggattcgcggaggaggtatgttagtttgaggcgccgccttatggtagacccgcatcttccaaaggaggaggacagatcatccaaccttgttgttgacaacccgctctctcagaacccaggctttcttgaaaaggtcgcaagctcacacttgtttggctctatagcacttcttgcgaaaagtgggaatctttctctaactgaattaatgttagaatggagccgaacaagtttatgtttttatgcgacttcaagagttgacaaaggtttaagttcagagctccagaatcagaattggagagttctttctgtagctaatgaatgtagcatagaggttcctggtgttttaaatgttcaaaggcttcagcagttgcttctcaccttggctactctaataaaaaggagatgtggttctgtcacttctgtgaccgttgccgtgtacggagacgaggacaagccagcgcttataatgtttatagagatgtggttctgtgactgttgccgtgtactcaggctttatttcaacaggatttaa

SEQ ID NO: 28792 - DNA, 558 bp, Zea mays
  Peptide Sequence Number=SeqID_70571
atggtgcgcacgaagaatgtgtcagcaccagggggaggagacgacgaggaccctccttgccccttcaggcaggtcaagggcaagacattttacctcaagcagcagaaatgccgcaagaagcggcgtatggatagagcaacccgagcagcacttgcagtggcagtagcagcagagcaggcagagcgagcccgggtacgtaggttcagacacatacccgtggagtcttggctgccagctcagagggaccctgcaacagcagatctgttcagtgccaagattcaggaatcattctaccgagcacagttgtcagcgcagattgcccttggacgaggttccgttttgagcgagaggatgtcactttacatgtcagccagattcgccagctgtttggatttccagagtcatcgactcaccttcacagtctgtgctatggtacatcagatcctcctcgacgccctcacggcggagtcgctcctgccactgctcacgtcgcggccctgttcataccgcttttcccagatgggtcgcaacgctctccagcagacttcacccctgtag

SEQ ID NO: 28793 - DNA, 201 bp, Zea mays
  Peptide Sequence Number=SeqID_70572
atggttttagtttatcttataagggttggcaggcaaatcgtgaatgtcccatcatttatggtgagagtggagtttgagaagcacatcgacttctcactctcaagcccgttcggtggaggccctccaggcagggtgaagaggaagaaccagaagaaggcaagtggcggcgggggtggcgatggtgacgaggacgaggaatga

SEQ ID NO: 28794 - DNA, 282 bp, Zea mays
  Peptide Sequence Number=SeqID_70573
atggagggaatggaaatggttgcatttttggctgctgaagtaggaccaagagttgcagcatcgtgtgcaagtgcaacattatcaattttgacatgggatgattccaggatgcatgcagaaggcatcgatgctatgggtcatgctactcaactgaactatgcagcagcaacaaagtccaagctttttgtagaccaggaggagcatgaatttcagaggttatctgccaccatcataaatcatcaggcctgttgcaataaaatggttgcggattctgcaatttag

SEQ ID NO: 28795 - DNA, 687 bp, Zea mays
  Peptide Sequence Number=SeqID_70574
atgcgggcatctcagcaccacgcaccaccgcagccactgccgctccctccgcctccgctgtctctcccgtcaccgtccgcggcgcctcggcgtgggcgccacagcagcacccactcatcctcctcgtcgtcctcctcctgcatctccggcccgtcgccgtcctcggctccgttcccgcacgccagcaccacctcctcgctcgtgccattctcgtgggagcgccacgcgggcgtgcccaagaactcgtcccgtcacccgtggcgggccgcctcgcccacgtgcaccccgctgccgccgccgccgccgctccgcccggcccctcgacgccggcgcgccaaggccccggccacgtcgtcctccgacgccaaggaggaccccttcgtcgccgccttcgccgagtgcaccagggacgacgactacgctgccgacgtcgacggcgacagcaacaagctcgcgccggtgccggcgaagaaggcagcggtggtgtcaccaggccgcgccgagcgccggaggtggatggccggcggcggcgggctcgtggccttcctcgacatgcacgggtgcaagagcgccatggatgtcgtcgtcgctgacggcaccttccagccccgcgccggctcgtcgctgctgcgaatcatcgatcccaggccgcgccggcccggggagccccaaccccaagctaagtaa

SEQ ID NO: 28796 - DNA, 351 bp, Zea mays
  Peptide Sequence Number=SeqID_70575
atggatgattcatcacttgctttcagaagaggtaacaagacacatatttttcttgtagttgtaggtgtgttcaagcagattataataaacaagacattacatgtgggctcggagatggggacggcggcgcactcggcgctcgggctcggcggcgctcgggctcggggacggggacggcggcgctcgggctcgaggacggggacggcggcgctcaggctcggagatggggacggcggcgcactcggcgctggggctcggcggcgctcgggctcggggacggggacgggcgcggcgcttgggctcgtggacgggcacggcagcctggcggcgcaactgtgtgagagcacctag

SEQ ID NO: 28797 - DNA, 855 bp, Zea mays
  Peptide Sequence Number=SeqID_70576
atgggcagcgaccacctgagcggcgatcgctgtgtgctgagtgttgactgtttgctgctatgtgcccgtgattctcctctattccggccgaggcaggtcaaggatgtggctcaccaggaggaggtgattcgggtgctcaacaacaccctccagaccgccgacctgccgcacatgctgttctacggcccgccggggacgggaaagaccaccaccgcactagccatcgcctaccagctctacggtccagagctgtataagtcaagggttttggagctcaatgctagtgatgatcgtggaattaatgtggtgaggacgaaaatcaagaactttgctgctgttgctgttggtactgcacggaaagctggttatccctgcccaccttacaagattattatacttgacgaagcagattcaatgacagaagatgcccaggcgatgtccacactgagtgtcatttctcaaggtgatcttcgtcgtgctataacctaccttcagagtgcagctcgcttatttggatcttctatctcttccagtgacctgatcagtgtttctggggttatccctgaagatgttgtcaagtcactgcttgcagcctgcagatctggtgaatttgacgtggcaaacaaggaagttagcagcattatagcagatgggtatccggtctcacagctgatggcacagtttctagatgttattgttagcgcggatgatattccagatgatcaaaaggcaaggatatgtaaaaagcttggggaaaccgataagtgcttggttgatggggcagatgagtatctacagctgctggatgtcgccagcgagactatccgctctcttttcaacatgccgcggacgctg

SEQ ID NO: 28798 - DNA, 216 bp, Zea mays
  Peptide Sequence Number=SeqID_70577
atggcccaagggcacatttccctttcagcccgcacccgaggtgcggaagaccagggaattcccccatccgtgtgctccgtcatcgtggagtcatcgggcatcacgggccgacccttcgcctcgaccattgccgacgagcaagccactgtggattctgaagtacaacaagtagaagtagctgagcaggagctcattgaatgcaagttgtgcccttga

SEQ ID NO: 28799 - DNA, 384 bp, Zea mays
  Peptide Sequence Number=SeqID_70578
atgcactctcaaggaaccagtaccactagcagctttactagacctttcatagcaactggattagggtctatttatgctccagacaccactccttctaaatcaaacgtgcatacaactaaaccagtgactacgcctcttgctgccaaaccatccaatgagactcaggatggtgctaaagaacatgtgtatggtgcatccaacaatgcaggttcactgatcaatgcacataacagcccaaccaacattgagatacagcagaggaccactaaaaaagaaaggctgcaaagaggctatttacaaaagaacttggaagtggagacattgctgacgaggccagctgtacagttgaatgagattgctcaaaaaatgggctatagattttga

SEQ ID NO: 28800 - DNA, 378 bp, Zea mays
  Peptide Sequence Number=SeqID_70579
atggccctgcccacacgttcaggcggcccgatgttgttgaaggtgctccggcgagcaattgctggagtcacagtgccccacaacacccccgatggtcacccgcacttccgtgatgcccaaccgaacgccctaggccacacgccacgaccaatcggtggcgcaggcgcgattccaccggcggccggacttggtcccccctactccaagcgtcgatggcggtctgtgttgcgcgcaagagataatgggagaggggaagaaagccacggtgtgcccgagctttatccccagatgccgcggtccacggaccccgatttcaccggagttgttgcggtcatggcggcgtcttcttcacggttcggcgagaggaagaagcgctga

SEQ ID NO: 28801 - DNA, 1359 bp, Zea mays
  Peptide Sequence Number=SeqID_70580
atgcctcaggataacgagggttacattttgtaccctgctggttatcccgagagcaaaattaagaaaattcattctaggaagtctcactctggccctaaccatgcttttatatataagggtgagacatctagctctaggcaaccaacccgtgctaagttgcctagaaagaaaactcctattgcatcaaatgatcatagcatttcatttaagacttttgatgcatcttatgttttgactaacaaatccggcaaagtagttgccaagtttgttgggggcaaacacaagggctccaagacttgtgtttgggtacccaaagttcttgtttctaatgccaaaggacccaaaaccgtttgggtttatgcatccgggggctcaagttggatactcgacagcgggtgcacaaaccacatgacaggggagaagaagatgttctcctcatatgagaaaaaccaagattcccaacgagctatcacattcagggatggaaatcaaggtgtcactgtctttagaagaagtgatgattcaatagcatttaagggtgtgttagaaggtcagctatacttggaaaaatcccatacccaagaaaccttaaagggattcttgagaagagctcaaaatgagttcgacttaaggatcaagaaaatcagaagcgacaatggaacggagttcaagaactctcaaattgaaggctttcttgaggaggagggcatcaagcatgagttctcttctccctacaccccacaacaaaatggtgtagtggagaggaagaatcaaactctattggacatggcaagaaccatgcttgatgagtacaagacaccggatcggttttgggccaaggcggtcaacaccgcctgctacgccatcaaccggttatatctacaccgaatcctcaagaagacatcctatgaactcctaactggtaaaaagcccaatatttcatattttagagtttttggtagcaaatgctttattcttgttaaaagaggtagaaaatctaaatttgctcctaaaactgtagaaggctttttactaggatatgactcaaacacaagggcgtatagagtctttaacaagtcctcaggacttgttgaagtttcttgtgacgttgtgtttgatgaaactaacggctctcaagtagagcaagttgatcttgatgagataggtgaagaacaggctccatgcatcgcgttagggaacatgtccattggggatgtgtgtcctaaggaatccgaagagcctccacatgcacaagatcaaccatcctcctccacgcaagcatctccaccaacccaaaatgaggacgaagctcaagttgatgaaggagaagatcaaaatgatgagccacctcaaagatga

SEQ ID NO: 28802 - DNA, 1105 bp, Zea mays
  Peptide Sequence Number=SeqID_70581
gctgagttccctttccctccgaggctccgacgctgctctggccccgtctctctcgtcttcctggctctccccgcgcaccaaaccctccccaaaacccaaacgcttctcgccctcccgtcctgttctcgaccatgtcggtgtccgacggggacgacgacgaggccttcctcatcgccctcgacgccgcggaggccgccgcgctggactcctccaagcgccgccgcctctccaccacctcgtcctcaccgacccccctcagcctcacccgccgcaccgagggggccctacctggccgcgctcaagggaagtccacagctccacctggaagcagcagctgcaagaccttggctatgcccacaagcggcccgacggctctaaatccttagccccgggtacgggcgcgagcggatcgtgcttcaagtgcggggaccccgggcactgggcacgggagtgccctcaatccgtgccgaacacggggggaggaggtcagatcggcggtggcggtggcggtggcggcggtggcggcggcggatatgtaaatgcgggcgtagaggtggaggacaaggcgtgcccctgcggtgtcgggagctgcctcgtgctcacgtccaacacgccgaagaaccccggtcgcaagttctacaagtgccccatgcggatcagaagtcagaacatcaaattggatataattgaagagaattcagacaaaagcaaagagggtggtggtggtggctcttgtggctttttcaagtggtgtgacgagctacagcctagggttggtgcaccactgcaagcttcagcgcaataccaagcggattccatgccaagcatccaaaaccccagccagaggagctcgtcttcctgcttcaagtgcgggcaggagaaccactgggctcgagactgtccgaatcaaccgtcggatccttatcctgacaagggtgggagaccagtagctccagcgggctcacctggtgcgtgctacaactgtggtcggtccggccactggtcccgcgactgcccaacctcgaatagtggtggtggtggtaccggcaccagccgtgccaggtcgtcctcagccttgagctcgtggaatagtcagagatactga

SEQ ID NO: 28803 - DNA, 687 bp, Zea mays
  Peptide Sequence Number=SeqID_70582
atggaggtccgtcttgtcacgccaaatgaggattctgtggtcggcactgctggatgctactctagatcagttgcacagttcacagctggtaccagcgtctccgtcgcagttaaagggtcagccttggcattcccaggtctcggctcccctctcagtcaagccgtttcatttcctccctcctacaaatatcctgatatggacgacgacgacgactccccgcctcatgagtcggcggcggcggcggcggcagacctatcgctgacactggcgccggcgccggcgctggcgcctcccgcgccgcctccggcgctgcccgccgtcgcctccgacggaggcgtggcgacggcgcgcgtggacggcaaggacgtgcgcctgttcccgtgcctcttctgcaacaagaagttcctcaagtcgcaggcgctcgggggccaccagaacgcgcacaagaaggagcggattgtcggctggaacccctacttctacatgaccccgccgcacccgcagcccaatgcggcgccggcgagccccaccgccccgccgcccgcctacgcggcgggcggcctcctccccgcgccgtacgcggcccacgtgtacgcccccgtgccggcggcgccgccgccgccgtcgttccccatcgcctcgcacggctccagcggggggctgcggtactacgcgccgtcccactag

SEQ ID NO: 28804 - DNA, 324 bp, Zea mays
  Peptide Sequence Number=SeqID_70583
atgccccgtgctctgggcgccaactgtgttccaagggatagacagggaggggaagtaagccacggccgccaccctggattcacgggatacgaactgtgtggcctcgatttggggccggggcactacgcagtgtcgcggggtcgtccagattcctcgccgcccctcctcatcgccgtgaagccgccgcagtcacttcgtccgctcgtcgccgtggggagcttcactaccgccactatatctagtatggattgcgctcccaggttcaccaattcatccgcttcgagtaggatctatcaaagccgagaatcacgcatcggggtatag

SEQ ID NO: 28805 - DNA, 324 bp, Zea mays
  Peptide Sequence Number=SeqID_70584
atgaagtctgctggcgaagggcgcaccggacagtccgatagtcgttgctccgctggcacaccggacagttcggtgcgccaccggacactgtccggtgctacaccagacagtccggtgaattatagcggaggtgcgcctgtgaaacccgaaggtgaagagtttgagctggttcaccctggtacaccggacactgttcggtggctcaccggactgtccggctctctagaggatatggttgctggagtgacttggccgtccatcttgccaccaggttggacagtcgagtgggaccctacctcagcagaggaggagcatgaggagtga

SEQ ID NO: 28806 - DNA, 258 bp, Zea mays
  Peptide Sequence Number=SeqID_70585
atggtgacgatgagtaccgagtctagcgacgctccggtcatcttcctgtgggagattgctcatgttatttctgttgatgtgctgcatgctctgggaacctacgttcgacctctatatgacacaaggcgggtgtctgagccccctcgtgcttgtcttaacactgacctagacagtgctaccctggatctctcaaaggtacatgaagagcttgaagatgcacatgcaaggattgcagccgtcgaagctcaactcaaatga

SEQ ID NO: 28807 - DNA, 249 bp, Zea mays
  Peptide Sequence Number=SeqID_70586
atggaagtaggcaagatcacctattcacccccctctaggtgctctcacaagcgccctcacctcacctctctctccctcaccggactgtgctcatgcccctcgccagagtcatgcccgcacctcgccctgccgtccacgctgcggcctcgcctcgcctcgcccacgcccccgaccacgcccccgccgagcccctgcctggccgtgcctcgccattcgtccaaggttgaagacaacccagattttgattaa

SEQ ID NO: 28808 - DNA, 126 bp, Zea mays
  Peptide Sequence Number=SeqID_70587
atgaagctcccagagctggggattgaactctacctcaccggagacaccggatcgacgtcgccggacttcagtcgaccgccgacgcacgtagaccgagctccacgacagagcttgcaaaattcataa

SEQ ID NO: 28809 - DNA, 234 bp, Zea mays
  Peptide Sequence Number=SeqID_70588
atgcagttttgtataaaactactcctaccatggagcactggccaggttggttgccttcagaagacgaggtcagatgatggtccctgcagcttgcaagtacggttggattcagatgtgttagcacaggtcaagcttctatctggactaaaaaatgaacttagaatctcacacattgagcataacgaagttcttatgaagatcattttaaatgagcatgtcaagtcattgaggtga

SEQ ID NO: 28810 - DNA, 231 bp, Zea mays
  Peptide Sequence Number=SeqID_70589
atgaagatgagggctcctgtcgtggcctttgctgctcttctcatgctgctgctggtggctacaagagcacatggaatcaggctggacaggctgttacatgatgtgatcaacagcagcaaggagggggacaagctaacgacgggcgagccagcgccgagccaggaccgttattccgagtcgggcgacgggcgcggcgtctacgacatgggagggcagcggtgctccctctag

SEQ ID NO: 28811 - DNA, 99 bp, Zea mays
  Peptide Sequence Number=SeqID_70590
atggtgccatcgaagctgtggaagctcgtgaggtggctcaacgtcgggacggagaagaagctcgctgacgccagggtggtgatcgaccggagatgttag

SEQ ID NO: 28812 - DNA, 288 bp, Zea mays
  Peptide Sequence Number=SeqID_70591
atgcgcgtagccgcccccgcacccgcctccatctcgtgcagccatgccccccaacaaccacccgtgtcccgccccaacccccgtcgccatgcgcgcagcctggtggggctcgggctcggcggcatggtgggcgccggcgtgttcgtgaccatgggccacgccgctcgcctctacgtggggcccagcctcgtcgtgtcctacgccattggtggcctctgcgcgctgctctccgccttctgcgtacgactccgtggacatgggcgacggcgagctggtggtcctcgatag

SEQ ID NO: 28813 - DNA, 383 bp, Zea mays
  Peptide Sequence Number=SeqID_70592
gcagtggtagaacggaggctggatcttgcctgccactgccaccaaccactactgaaccacaacgcttcatgagcggcagtgggccgtggcatcctcggcgaatctcagccgcagctgtatcatatcgatcctcgcctctcgccggcagccggccgggagctcacggcggggcagacgggtccggtctgctatggctccggtcactggtcaggcgcgctgcccagcgcatcctcctcgccctcgccctcggctgccgcaaccggccgtcgctgccggagtcgccgccacttcctccagctgctgcggatgtaacatatgattaccgcccccggttcgtgtatcgtgtcctcgtcttccagcaatggctgggggtgtggttttag

SEQ ID NO: 28814 - DNA, 420 bp, Zea mays
  Peptide Sequence Number=SeqID_70593
atgaagcctagatctaccgatagcacgcctctagaggtcgtgtcaccgtcatcagtgttgaccgggaaccttgactggaagaggattgagaaattgatcaaggaactaccaactgcaccatcggatttatcgaatgccgaagttcctgacagtgacactggaacaccaagagggtacactggcgtcgtcgtcggcatccagtgcgtcatacgacgtgacgagcttccacaagatgagcttctaggcagagcaacacgagatcctggatgcgctgatcgacaagaaaaccatggggcccggcggctctgggaccatgttcaagatcgagctagcagcggcgagctggtagcggtgaagaagttgtgggtgtcgtcgtcgaagtggctgctgtgtgggacgagcaacaggcagattgactag

SEQ ID NO: 28815 - DNA, 168 bp, Zea mays
  Peptide Sequence Number=SeqID_70594
atggcggtcagacgaaggattcctgcattgctcttcctagaaactgtagcaggtcaagaacaggtaccgcatgatgaggcacatgaaggatgttgtgatgagttcgtgagaggtctaggccgtcttctcccagtcaacattaggttgctagatcgttgtctccattag

SEQ ID NO: 28816 - DNA, 132 bp, Zea mays
  Peptide Sequence Number=SeqID_70595
atggcgaggatttcatcgtcgcagcgcccaaacgagctccatagatcagtttttcccacttctaacgatgctacacgaattcaggaaaaatataattctaggagaagcaatctcaccgtgaatctcgtgacg

SEQ ID NO: 28817 - DNA, 168 bp, Zea mays
  Peptide Sequence Number=SeqID_70596
atgtccttaagactaacttcaccaattaccccaagatcctacatggacttgctccttggtgaggacatcttcaacaccgacgacgagctttggaggaagcagaggaagacgacgattttcaagttcacctctaagaccttgaggttgtccgtaggacagaggtggtga

SEQ ID NO: 28818 - DNA, 324 bp, Zea mays
  Peptide Sequence Number=SeqID_70597
atggagctccgattggaatcagcacacaaaggaggggatggtgctcttgcccgcgcggacacgacagcggcgttaccgtttgagagaatgagggagagtatggagttcctggaagtgggtcatgccgacgacatctggtgggagggatttgtgctccacctggagtcgttttcgaatgggcagaagacatcggcgtttgagtggagtggggagaggaagacgctccgagcgataggcagcaccggcacaacaacaaggtttacagggaggatggggaagaagccctcgaagcatcgagacttgtcgtgtggcgtggtctgctaa

SEQ ID NO: 28819 - DNA, 439 bp, Zea mays
  Peptide Sequence Number=SeqID_70598
gctcatgttggtatacggtttcctggttatttctttatgcattctggccggagcctatgtcatcgtgacctcatcgctgacagttgggggagagaaagatcgtgcaacgagcgtgtgatggttggcctcggttcatggatcgacgggggggaattggagctcagtgtcatggtggtgctcgtcaactccaacccggtcaccatcttggccgactcgggcctcgctgtcgaccccccgacacgttcctccctcgtcgccgagtcctctcatctctcctccctccccatgcacgcgaacagccctctgctgcagcagccaaagcggtggccgcggcgatgtgctgctactcggacaccagagtacggcaacagcggcaaatggaggcgttcttctttccccgctactggtgaccgtgttctgggtggagaatcgagcaccg

SEQ ID NO: 28820 - DNA, 975 bp, Zea mays
  Peptide Sequence Number=SeqID_70599
atggcggcgtctctgcgggcctcgtcctccctccgctcgcgcctcctctcgttctcctcggggtgttctctgtgtccgtggcgtctcctcctctcctcacctgtccactcggacgccccccaccagaccgaaaccctcgctttcgacgagatccagctgtcgccggagaagccggctaccgccactgccttcgtcctgcacggcctcctcggttccggccgcaactggcgctccttctctcgcgccctcgtctccgaactccgtaaccgctccccttcagacgagtggaggatggttctcgtggacttgaggaaccatggcagatcggctgggatcaaggggctcggcccaccccacaacatatctactgccgccaaggacctcgctgatttagtgaaggcccgtggttggccatggccggatgttgttgtgggtcactccatgggtggaaaagtcgctctagatttcgcggagagctgctctcgcgaacagctctgggtccttgattctgtccctggacaagtagaaacagagaacagtgatggtgaagttgaacagttgttacgtgccaccaggtgggttgtcgaccacatgctcagccttggattttcgaagtctctttcagaatggatcggcagtaacttgaagaaggacaacgatcatgtgacctgggctttcaatcttcaggctgccatagacatgtttagttcttatagggaaagggactattggtcggtgctggaacacccacctaaggatttggagattgcaatagtgcaagcagagcacagtgatcgatgggtccctgatgacgttcaaaggctaaaagcattagccgggagagagtccaagcctgatgtaggaaaagtgtcacttcacgttctccctaactctggccactgggttcatgtggacaatccgaaagggctactcgagatcatggtacctaactttctatcagcagttcaaaattga

SEQ ID NO: 28821 - DNA, 662 bp, Zea mays
  Peptide Sequence Number=SeqID_70600
aacttggtcaatctttggcggactttggaaaggcgattaagcatttaggtgcttgtgaaggagatttgatggaaaaggtgttttctgaagttggttcgaagtcagagatgttgtcaataaagctgcaaagagaggcagacaaccttctctttaactttgaagaacccttgaaagattatgtgcgtgctgtacaatctataaaagccactatgcttgatcgagccaatgctttcaggcagcacttcgatttggatcaggagaggaagtataaagagcttaatctgtacttgaaagcagacagtgaggaggctactaagaagtttgaacacatagttagactaatgaatgaagagcttgctcgtttccaggagcaaaagacagctgatattggactcgcattccatgaatttgccaaggcgtcctcccaaagctcgaagcttgttccacatcataaatgtgatttgtgtttcctcatgatgtttgggaatgggatagggggttggcagctggactctattttagaatttattgttgaagatgctctcagtagttatagagatgcagcccttaatcatgtgccgtttacagagaggcttctcatgatcctgggacctgggctccccaggtggctcctccatagagaaaccagacaaccgatgtaa

SEQ ID NO: 28822 - DNA, 1554 bp, Zea mays
  Peptide Sequence Number=SeqID_70601
tcgggcgaagcgaagttcgtcgtcttctggggccgaggccgagacgggggccgagccctggggtcgggcgaggcggagcttcctatggcgcccgaggccggacttggctgctgtcagcctcactctgtcgagtggcatagcagtcggagcgacaccatccttgcattaaatgctcctgcgatacggtcggtcggtgtggcgatctggccaaggttacttctcggcgaagaatgggcctcgggcgagccgaagtgcacgccgtgcctccccacctcgcacctcccaagtcccacccacaaccacaaacactcccaaacccttctcagtgcgtggtcccactcacttcgcatgggcaattgctccccgtccccgcgtcgccgccgcccgacggagccggactcgccgccgctcggcagcaccgtgtccgcgcccaccgtgacggtcaactccatctccgtctcctcctacgcgctggccagatctccctccgtctccgccgccgcggtggacgccgaggacgccggcgtcgtgcgcgtttacggctccgacgggtgccccgtcgcgtggcgcctccgcgtctcgctcctctacaaggcggcggcgcccctccacttcacgccctccgaggcggccccgctgggccgccccgtgctccgcctctccgccgccgacccggaggtctgcggcaccgccgacgagctgctgcgcctggtggacgcgcggttcgagggcaagccgcgcgtcgcgccgccggagaggccccgcgcggcgtcgccgtcggccgcggccgcggcggaggtcgccgagctggtgcggctgcagcaccgcagcgcggagcggcacctcgagggcgtggcggcgaaggtggcggagatggttaagaaagggaagaagtcgggcaaggggaggaacgttgtggagggcgctgaggtgaggaggctcggcaagtggtacggggacgcaatggaggtgatgctggagcacgccaggatggaggagaccctcatcttccctgacatacagagggcatcgtttccaggagtgtgcgataaggttaacgagcagcatgggaggcacctgccaatgatgaatggaatcaaggaggatataaaaacactgctgacgttggaattagggagccccctattccatgaagtggtggtcaacctgtcagttcgcctcaaagcgttgcaggaccacaccaaagagcacttcaaggaagaagagagtgaccttctgccacggctagagcaagtaagacggatgcagcgggaggaggggaaggtttctgacaagtctagttcagcgtgggcttctgaggcggtagctacaatggagatgacacactcgaagctcttccccttcttcatgactggtctccttccccaggaggccatgcaatacttggacctagtgtgccgatgcaccaagaacacgcgccatctggtctccatgctcagatctcttgcagagcgtctggaagatgcgaacccgtcaattatacacaacaacccaaccaaactgtatgagcacctccttgtaaagtccccataa

SEQ ID NO: 28823 - DNA, 390 bp, Zea mays
  Peptide Sequence Number=SeqID_70602
atgggcaaggacggcgacaaggcggtgctcctgagcgcggcgccgcagtgcccgttcccggaccagtgggatggcgccgcgatcaacacggggctgttcgactacgtctgggtgcagttctacaacaacccggagtgccagttcagctcgggtcgcaacgccttcctggacgcgtggaagcagtgggagtcggtgccggcggggcagatcttcctcggcctgcccgcctccaaggacgcggcaggcaccgggttcgtgcccgcgggccagctcacgtcgcaggtgctgccgctcatcaagggctcgcccaagtacggcggcgtcatgctctggtccaagttctacgacgaccgcacgggatacagctccgctatcaagagccacgtctga

SEQ ID NO: 28824 - DNA, 678 bp, Zea mays
  Peptide Sequence Number=SeqID_70603
atgccccaggtggacctggagagcctggtgtgcggcgtgtcgggcgccggcgccggcgctggtgacaggaagggcagcaccaaccccaagttcgcggccgccgccgccgtggccaaccccgtcgcggccaagacgcggtccaactccacgcgcgtcgcgggcgccccgccgccccccgcggccggcaccacgttcttcggcctcccggcgaggatccgcccgaccttcacccggcgccgcccgtcgcagggccggatcttgcacggcaagcgcgcgggcggcggcggcggcggcggcggcgaggtggagccgcggtcgcccaaggtgtcctgcattggcaaggtcctgtccgaccgggagcggcacggacggcgccggcgcgggtggtggtacggcgtggccgccatgttccggtgcgacggctgcgcccgtgtgcccggcggcgcgtccaggaagaaggtggcgctggaggacgatgccgggcggcggcggcagcagcagcagcagccgggcggcattgcgggaatgcggaggttcaagtccgggagaagagccgcatcgtggggagacgaggcgctggccgcggcggcgacgggggccgacccggacgagggggaggaggaggaggaacccgacagcaaggacgctgtgcagtggtcccggcggccggtaacttag

SEQ ID NO: 28825 - DNA, 198 bp, Zea mays
  Peptide Sequence Number=SeqID_70604
atggggatcaaactgcactgggggttgtggcaatacctcttcagcgtgcgagtgtatctggaccacgacgacctgccatatgttgggtcggccatcattcaactacgaactggacggaagaaggagtacctccaggtgccccttccctcctctgtccgttatgaaggagtgccccgcagtttactggtcgagaattga

SEQ ID NO: 28826 - DNA, 885 bp, Zea mays
  Peptide Sequence Number=SeqID_70605
atggcaaaccgagctctagctccattcctgctcgtgaccaccctcttggtgtcgctccttgccacatgccatggcggtggcatcgctgtctactggggccagaacgacggcgaggcgtccctgtccgagacgtgtgcgtcaggaaactacaagttcgtcatcctcgccttcgtctacaagttcggcaagggccagacgccgcagctagaccttgccagccactgcgacccctcatcgggcggctgcacggggttgagcaaggacatacgttcgtgccagaacagcggcatcaaggtcctgctctctatcggcggcggcgacggcagctatggcctgtcgtccgagggggacgcgcgggacgtggccgcgtacctctggaacaattacctcggcggcacgtcgtcgtcgcggcccctcggcgacgccgttcttgatggaattgacttcgacatcgagcttggcggcgccaagtactgggacagcctggccagggacctcaagaacaagggcggcaagggggtgctcctgagcgcggcgccgcagtgtccgttcccggacgagtgggacggcggcgcgatcaacacggggctgttcgactacgtgtgggtgcagttctacaacaaccctccgtgccaggtgaacgccggccgcggcgcgttcatggacgcgtggaaacagtgggagtcggttccggcggggcagatcttcctaggcctgcccgcctccaaggacgcggccggcactgggttcgtgcccgccgacgatctcaactctaacgtgctgccgctcatcaggggatcgcccaagtacggcggcgtcatgctctggtccaagtactacgacgaccgcgcaggctacagtgacgccatcaagagccatgtgtga

SEQ ID NO: 28827 - DNA, 2034 bp, Zea mays
  Peptide Sequence Number=SeqID_70606
ctattacaattgaaagcgattggggttatttgcacggtgttttcatcatacacacagcacaggagttacttggttgatgaaacacttcaccttcttcgtaagttgcagttttccaagaatgccgttagaacctaccatctagcagatgaagaccaaaagcaaatccagatgataacagcactgttagttcacttggttcagtttagtgctattgttcctgatagcttaaagggaacagttgattggaccactatcgttgatgcctctagtgatgctgattattatccaattcaatgccatgaagcggcaacagaggcttgttgtcgtttttggactgatgtccttcaacgttttactgctgctaaatctcaagatatgtcggaaaccaaagggataatagacaatcttgttcaggatttcctaacgatactaaacttgccggagtatccagctgctgcttctattcttgaggttctctgcgtgttgctgcttcagaatgctggattgaaatctaaggacattaatgctcggtgctttgctattgatcttcttggtggtattgcatcaagattaaagcgtgattctgtcgtctgtagtgaagaaaagctttggatattgcaagatttcactgataaaggcagtgacggctcaatttttttgaaaaacaagtgttgcgtttgtcttggtggaagaggcataaatatagcctgtaatgaatgtggaagatgtttccattcagattgtatgggggctggtagtcaggataacttacagcgtgatagtgtctgccccttgtgtttttgcaaacaacagctcaatgtgctacagtcgtactgccagtcacaaattaaagaaaatggcaaaaaaactgctgcctctgccagtaagaaatctgctaaaccaactgaggtgtcagcagtggaaattgttcaacaaatactactgagttatctccaagaagctggttcacaagatgatgggaacctgtttactcgatggttctatctgtgcatctggaacaaagatgaccaacattctcaggagaagatcatttactatcttgctagattaaaatccaaggagattctgcgagattctggcaatggtctggcaatttccagagattcagcaaagaaaatttgcttggcacttggtcagaagaactcattttgtaggggttttgataaaattcttgcccttcttttggctagtttgagagaaaattctcctgtaataagagcaaaagcattacgtgcggtcagctgtatagttgaagctgatcctgaggtcttgggtgacaaacgtgtccaatatgctgttgaagggagattttgtgattcagctatttctgttcgtgaagctgcccttgaacttgttgggaggcatattgcttcacatcctgatgtgggcctgaagtatatagaaaaagttgctgagcggataaaggacactggagtcagcgttcgcaagcgtgcaatcaaaattataagggatctttgtgcttcaaatccgaacacggacacaactcatgcctttgtggagataatttctcgtgttaatgatgaggagtccagtgtacaggatcttgtatgtaaaacattttatgaactatggtttgaagaaccaactgggagtcataagcacttggttgctgatggaagttcagttccaatggagatagctaaaaagactgagcaaattgttgacatgttgaggaagatgcccaatcaccaacccctgattaccatcataaaacgtaacttgactcttgatttcctccctcagtcaaccaaggctgcagggattaactcatccatggtggcatcaattcggaagcgttgtgaattgatatgcaaacgcttattagaaagaatattgcaggttgaggagggagctgctaatgagatggaaatccacacactaccttatattgttgccttgcaagcattctgtattgttgatcccacactctgcattccagtaactgatccttctaagtttgttgtgacactgcaaccataccttaatattcag

SEQ ID NO: 28828 - DNA, 1209 bp, Zea mays
  Peptide Sequence Number=SeqID_70607
ctctaccgcgccttcgatggtggtggtggcggtgaagcggccacgcttttgctgctcctggcatgcctccccactgccgtctcgctgctctttagcttcaccgttcgcgtcatcccaccacgacgaccaccgataagcagcagcacggcggaacgcaagggcgtgctgggtttccttggcgtctctgtcctcgtcggcgtctacctcctcgctctgaacgttgtcgaggtgaaggcagcgacccgactgccgaggcgtttctaccacgtcaccaacaccttgctcgtcctcatcctcgtcgtcggcccactcgtcgtcgtcgtgaagcaggagtaccaccagcagacctcatcccatagccatagtacgcttcagcaagacgtcccccgagctgtgccgggaccgggagagcaagagatcaactactcggttcggcaggctctttgcagccagcacatgctgctgctcttcgtcgccaccgcctgcggcatcggcggcatcatgacggtggtggacaacatgagccagatcgggcagtcgctggggcactcgcagcgcaccatcacaatgctggtgtcgctcgtgagcctggccaactacgctgggcgcgtgctggccggcctgggctccgactacgtggtggcgcgctacaggctgccgcgcccgctggcgctcaccgccacgctcctcctcgccttcttcggccacctcctcgtcgccgcgggcctgcgtgatggcgtctacgccgcgtcgctcatcatgggcttctgcctcggctctctatggacggtgctgttcgccgtcgtgtcggaggtgtttgggctgaagcacttctccacgctctacaacctgtccacgttggcgagccccgtcggatcctacgtgctgagcgtgcaggtggcgggccggatgtacgaccgtgaggcgcaacggcagggccatcgccggcaagacgagctcgcctgcgttggggttcagtgcttcagggcatcgttcgagatcatcgccggtgtcacgttgctcggcgtggcggtgtccatggtgatggcctggaggacgagggcgttctaccatgataggacgcggttcttattcagtgctgctgctgctgatgtcgcagacacagccgccacgacagacagcagcagcagcaggcaagaagacgaaaacaaaacgatagctgcaagtcaaagtatcggtatttgctag

SEQ ID NO: 28829 - DNA, 1332 bp, Zea mays
  Peptide Sequence Number=SeqID_70608
gggaagtataaggtgtacaatctttgttctgaaaggctatatgatgcatctctttttgaaggaaaggtggcctgctttccttttgatgatcataactgccccccgatacaacttgtcatatcattctgccatagtgcctactcatggttgaaggaggatatagaaaatgtggtggttgtccattgcaaagctggtaaggcaaggacaggattgatgatctcgagtcttctactatttctaaagttctttcctactgctgaggagtccattgaatactataaccagaaaagatgtgtagatggaaaagggctgattctaccaagtcagattagatatgtgaagtattttgagcgcatcttaacttacttcaatggtgaaaatcagccacccaggaggtgtatgcttagggggtttcgtcttcatagatgcccctattggattaggccatcaattacagtctctaaccacaatggtgttcttttttctacaaagaagcatccaagaacaaaagaactaatgtctaagtttactaattactaccataatttcagccagaagatttctggtttagtgcaccaaagaaggggattatggttttttgcattgccgggagaacctggcttagccgaggtagctggtgatttcaagatccagtttcatgatcgacagggagatttttactgctggctaaacacaacaatgatggagaacagggtaaccttgaacccaactgatcttgatgattttgacaagagaaaactgccctcacctggattccagattgaggttgtcctggtagattacgatggctcgcaaccagcaaaaccaaaaccaggcgctggacctgctgctgataaatctcatgctgattcctcggctagcacggttgcaaaagaaaatagtgctgcacctgaagaatccaacaagggaactggaagcaataatgatagagatgaagtcttctctgacagcgacggggaggatggatcttctaacggaaggaaggagaagactgccggcggtggtcaaagcagtgtaaatgctgctaaaccatcccagacaggcaacatggaggaggcggcggcatctgctgctgctagcagactggacaaagtggctataagcagcgaacagggaaccacaaaggcacctgatggtacatctctcaaaactgaagtcagcagcaaggccagctccaccacagcaccacctcctccagctgctgactcttccagcatgagcgaattcaaggcgattgccgcagatgcctcggtgttctcgttcggagatgaagatgattatgaaaccttggaaattaacaacggaaactaa

SEQ ID NO: 28830 - DNA, 489 bp, Zea mays
  Peptide Sequence Number=SeqID_70609
atggcggacgccgtcagtcaggacgtgatatttctaggagccccccggaaggtgagcggcgcgaagccgaccatgaaagaagtgcagggcggcgggaacgggatcaggcacgatcgccgccacctccgcaagcaccacctcgcggcgagcgggggccagctagtagacaatctaggcgatggcgtcgagggactcgagcctgccggcgcgggcgaccgtggcgccagtgaggcagagcgcgcgcgacaggagggccggaggggagcgaatcgaggtagtggctggctggcgacggaggtagaggagaagcagtacggaagagagaggctgagacaaagcggaatcgaacgtcaactcataggaaatttagatgaaggtttgagatccggagtggctatagagactggccacgtgttcgcacccgcgagtgtctcagtacaccggatgaccggaaacgcggaggaggctggaaactccagcgggttttaa

SEQ ID NO: 28831 - DNA, 378 bp, Zea mays
  Peptide Sequence Number=SeqID_70610
atgagcggcgtcacctgctgcctttgcttctccggtcagctcaactccgatctccgtaggctagccgtcaacctgatcccgttcccgccgccctgcacttctttcatgatatgggacgccaagaacatgatgtgcatcgtggacccgccccacggttgctacctgacggcgtccgccatgttctgcgacaagatgagcaacagggaggtggacgagcagatgcttaacgtgccaaacaatgactcctacttcgtggactcgatctccaacaacgttcagtccacggatgtgcctcttttgagagtgaattatacttttactcaattaggatattgtgtttctttggatctttgtttgattaatgatttttttggatga

SEQ ID NO: 28832 - DNA, 198 bp, Zea mays
  Peptide Sequence Number=SeqID_70611
atgaaggctagaagtagaagctacactggccgctatataaaagaagcatgggcaaccagtgacatccatctccatgatctatccacaaaacaaacaatggcgaagcagactgagagctacgagctgcacaaactgcggccccaggtggatgacctgttcaaggagttcgacgccctggtcgacagactttctggatga

SEQ ID NO: 28833 - DNA, 795 bp, Zea mays
  Peptide Sequence Number=SeqID_70612
atgtacaagagggcaccacagaagctgaaaagcaagttctacaggatgacaattagacctgctatgttatatggtccatttggaggcccaggataccacaatcaagaacgtgagaagcactttgaacatcttacacctaatatgagcaaaacacgaaatggatctgcattttctcaggatgaaattaactcacacagagagcattttcgtaatgaactgaccccagattcagttgcttcaaagaagccaaaagtaaggaagaaagaaattaacaattctgtttcaacttctccccacagcattcctaataatcaagaagttattgctaccttctgtgaggcggtggaggatttctgtggaaaagctgaaattcctgacgatggtgatggtggtgactggttgtcaatcccacttgacgatgttaaggttcttgtgaatgaaaattacatctgtttcgatccaaaaggatattgcatgaggttcctatggatacagttacaaggtttgtcgatagatgtgaaggaaaattctgacgcctttgatgctgaacctctggttttctctgctttggagtccagtcatgctgcgttggcaattatgacccaccatgatatgccaaagcaactgtatcgggaagaacttattgagcgtattatcgatttctcaaggcatcagatcacagattgtatggcagcaagtaacccaacctttcgagctctctacaaaccagctggaaatgttgcaaatgatggtaatatcaaagcacatgctgatattttccccttgaatatgtag

SEQ ID NO: 28834 - DNA, 302 bp, Zea mays
  Peptide Sequence Number=SeqID_70613
accctagagctaaactcagaggtttcaacagtgcactccagtttctttctaatgtgacttttactgattactctgattattacaataacgtgcgtactgagttatctaatgtttttgccaagtatgatagcaaatttggtggcaccaggttgcaaagggcaactcaatccgattggcagatgggcgacgatcgagaacagcacaacttggagaatccagagcttcaacaagccttcgagaatcagtatctagatggtgatggtgatgataatcaagatgctcaacctgttattgttgcctag

SEQ ID NO: 28835 - DNA, 1971 bp, Zea mays
  Peptide Sequence Number=SeqID_70614
atggcgaggaggaggccgatggactacgaggagctgaacgagaaagtcaagaaggcgcagtacgcggtgcgcggggagctgtacctccgcgcctcccagctccagaaggagggcaagaagatcatcttcaccaacgtcggcaacccgcacgccctcggccagaagccgctcaccttcccgcgccaggtcagggtcgccatctcatccgcatcgcatcctcatggagttggttgctcgacgacgccttctcttctttcttacccagacggcacttcatcccgttcccgtgcgcaggtggtggcgctgtgccaggctccgttcctcctcgatgaccccaatgtcggcctcatgttcccgcccgatgccatcgtgcgggccaagcgctatctcgccatggcgccgggaggtctaggtgcgtacagtgatgcccgtggtatccccggaatcaggaaggaagttgctgacttcatccacaagcgtgatggatatccgagtgacccagaactcatttacctgacagacggcgccagcaaaggtgtgatgcaaatgctgaatgccatcattagaaacgagagggatgggatcttggttcctgttcctcagtacccactttattctgctatcatttccctctttggtgggtctctggtcccatactacttggaagaagaggctaactggaaccttgactttgcaaacatccgacaagcagtggccgaggcacgttcgaagggaatcactgttcgagcgacggtgattataaatccaggaaatcccactggccagtgccttagtgaagcaaatataagggaacttgtgcgatattgctaccatgaaaacttagttctgcttgcagacgaagtgtatcagcagaacgtttatcaagatgagcgcccatttataagcgcaagaaaggttatgttcgacatgggtccgccaataagcagggaggttcagcttgtttctttccacactgtgtccaaagggtactggggagagtgtggacaacgtggtggatacttcgaaatgacaaatcttcctccaaagacagtagatgagatctacaaggttgcatcaatagtactgagtccgaatgttcccgggcaaatctttatgggagtgatggttaaccctcctaaacctggagatatctcatacccgaagttcactgccgaaagcaagtccatcctcgaatctttgaggaggagagcgcgcatgatgacagacggtttcaacagctgccgaaacgtggtgtgcaatttcacagaaggagctatgtactctttcccccaaatacagctgccagcaagagccatcgaggcggcaaagagagccggcaaagcagcagacgttttctactgcctcaagctcctggaggcaacggggatttccactgttccgggatctggttttgggcagaaggaaggggtgttccaccttcggacaactatcctttcccagccgaggaagacttcccctacccatcatgtcgagcttcaagaagttcaacgactcatttcatggagcaatacgagggctactccaggatgtgatgtcaacatgaaaagaagcgaccgcgccaccattttgcttctactgcccatactagtagaaacagtgatcggtgcactatgtgatatttttgctgctgcaactgcggccttagtctgctatgtatgtgttgcctgttctgaaagagtaaagaagcgaccgataatgtatatcctgagccgcgcggcggggagaaagcatttcgcttttaagggaaagggaagcatcagcagcgccgccgccgctagagccctagacagacttaatcgctatctgggtcagtccaaaacagtcggaaacaaacccgacagaggatattttactcttgaatttacctggagccactggcactttgctgctgcctgtatccgtggtgaggactccgaacggtccgcgcgctcagattcagttactatctaa

SEQ ID NO: 28836 - DNA, 645 bp, Zea mays
  Peptide Sequence Number=SeqID_70615
atggctggcgtggtggtgggagatgtcggcatcgacaaggcgatagagacgaggaactcctccaattcagattatagaagggtggtggagatgaatagatctaagcaaagacttgattcagttatggacggattggtaggcctcttgaaagttcgtgtggtccggggtatcaaccttgcctaccgcgacgcaagaggcagcgatccgtatgtcgtcctacggcttggcaagaagaaactgaagacaagcgtgaagaagagatccgtgaaccccatatggcaagaggagctaactctgaccgtcacagatcccagccaaccactgaagctggaggtgttcgacaaggacaccttcagcagagacgaccccatgggagacgcggaggtggacgtggcgccactgatggaggcggtgagcatgaacccgcgggaggagagtctgaggaacggcgccatcatcaggtccgagcggccgagcgccaggaactgcctcgccgacgagagccacgtgtgctggaggaacggcaagttcgcgcaggacatgatcctccggctcaggaacgtcgagagcggggagatacagctgcagctgcagtgggtgaacttccctcctggtcctggtcctgctgctgcaacaaccaggtga

SEQ ID NO: 28837 - DNA, 366 bp, Zea mays
  Peptide Sequence Number=SeqID_70616
atggcggcgttcggctgcgtccacgccgccgcggctacccttggcggcggcgcgcggttcgcggtgcgcgtcctgtgcggccgctggttcatgctcttcgcttccaccatgatcatgaccacgagtggcggcgcctacatcttcggcgcctactccaaggcgctcaaggcgtcgctggagtacgacctggacacgctcgacaccatcggcttctccaagaacatgggcataagcctaggcatcgtgtcgggcctcatcaacgaggtcgccccgccgtgggtcgtgctggttaccggcgccgccatgaacctggcgggctacctcatggtctacctcgccatgtccgccgccgctcatcggccaccg

SEQ ID NO: 28838 - DNA, 205 bp, Zea mays
  Peptide Sequence Number=SeqID_70617
gagtgctattaaagaattatcggttgctttgacatatgaaagttcaagtatacactgcctatacttacgtgcctcaagccatcatgcaattggagaatataaagctgcgataaaaggttatgatgatgtacttgatttggaacttgattccatggataaatttgtgttgcaatgtttgtccttctaccagaatcacattgattag

SEQ ID NO: 28839 - DNA, 528 bp, Zea mays
  Peptide Sequence Number=SeqID_70618
atgaagttgttttcccatgataaggtctgtttcgagaagctggtgaagtgtgcgatgctatcattaagtctggcaggtggcagtgattcaggagcatcagtttcttctgctatcgttggatggtatttgcaaagagatggtgtgaagcatgctaggaggatgtataagagattgcttgctttacctcggccaagcctcaagttcatgcaatactgcatagcgctggaggcgaaccttgcatcgctcggagacaacggcgccctcaaagatgctcggcggctatatgattcagcgctcgacctgtatccccaggaaagagaagtgtggcggagctactacgacctggagctgaagatgggaacatcggagtctgccaacgccgtgtactcgcgctctctagctgggctgttggtgatgctgttccttagtgttgaggtgctatggtgtaacagtgtcaattgcgacgtgaacaaattctgggatctcgaaccatttgttgagattttgaaagtgtactggtggtcataa

SEQ ID NO: 28840 - DNA, 384 bp, Zea mays
  Peptide Sequence Number=SeqID_70619
atgtcccgcgccgcggtgacaggatccgagaacacccctgcggacgcatccaggattcaaggcctccccctcccttcccctgccctcaccccctcggcgatgcccggattcatggtggcgcaggcgctggaggcgtccacagggggcgacactgtgaccctgcccccgttcgacatcagcgcccctcccccccgaccaccgtcgatttgtagaagctcctcgcccgtgcttgcttcaccagcgattcggggaggccatgcccccctcggtcgcaccccctctctccccctcgccgcctcctgcctcctccccctcgaccgcatctacctccctccgtggcctcgctaccaaggatcacgactccccctcgtccacatcgattga

SEQ ID NO: 28841 - DNA, 453 bp, Zea mays
  Peptide Sequence Number=SeqID_70620
atggaagagcaccaagtcaagccatcggatctgccacccactagtttgcacaaccaggattcagccgcaactcctgttaccagtgctgaccctgctcgtcctgctgcttcaaatgattctcccagtcaggttgccagtgcagctcctgctgctgtttctgcacctaccgctgctcctgcagaagatgctgcagggcgtgaggcgtcagcatctgtgttctctgcgtctggtttatcctcctgggctaagaacctaaaaattcctcagccttcaccagcggcacagcaagatgagggtgctgaaggaagcacctccccaacaacaggacagcctggtgtttttggttctttaacgaaaggcattgtggattcctctaagaatgctgtaaaggcagtgcaagtcaaggctcgccacatggtctcacagaataaaagacgataccagttcttatag

SEQ ID NO: 28842 - DNA, 532 bp, Zea mays
  Peptide Sequence Number=SeqID_70621
gccaaggcccgtcatgcgcaacaaggacggcggcggcaaagaaggcagcaagggggaggaggaggacctgctcctcaagcagctgcaggagatgaagaaggagatcgtgggcaagtgcctcggcctgccggtggccatcatcgaggcggctaggggcttcgccgacctcgagcccttgccggatgatactagtcccctcaaaccggtgaccagcaaggacattgacaaggacaagcagctgtctcaagcaaataaggttgggcgaggtggaggctcctccgaggtcgaggtcgagtccgagcccctgggtcgggcgaggcggagaccgtcggctgaagccagggctgagtccgagccctggggtcgggcgaagcggagttcgtcgacttccggggctgagcccgagtccgagccctggggtcgggcgaagcggagttcgtcgtcttccggggctgagcccgagtccgagccctggggtcgggcgatgcggagttcgtcgtcttccggggctgagcctgagtccgagccctag

SEQ ID NO: 28843 - DNA, 180 bp, Zea mays
  Peptide Sequence Number=SeqID_70622
atggccaatgccggcaggaagctcccctacgtcttcctgctgctggtggcccttgcagctggcgtgttgagcgtcgtcgtcctgcagaaggtgagggagcagcgcgtctttgctcggcgtctccaggaacgtgaccgccagcttgtcaccctgcggatccttctccaggtagcacattga

SEQ ID NO: 28844 - DNA, 192 bp, Zea mays
  Peptide Sequence Number=SeqID_70623
atggcccggccctctgtttacattggtggctccagggaaactgccagtgcagagaaggtcaaagaagcacacaagagagtgatggtggccaatcatccagatgcgggtggaagtcattaccttgcttcaaagattaacgaggcaaaggatgtaatgacagggaaaacaaaagggggtgggtctgccttttga

SEQ ID NO: 28845 - DNA, 258 bp, Zea mays
  Peptide Sequence Number=SeqID_70624
atggcggcaaagatggagtctgacaaggtagccaccctgcctggatacccaaccgtgatcgcccacgcagagcccagtgtgccactggactatccggtgcaccagcggagcaacggctcttcggcgcaacggtcgactgcaaaagcgcgcgtcagagctacagtgcgcaaacagtgcgcgcaggagtcagagcagtcaccaaaggcgcaccggacagtgaacattacctatccagtgcggcaccggactatccggtga

SEQ ID NO: 28846 - DNA, 408 bp, Zea mays
  Peptide Sequence Number=SeqID_70625
atggacttcgcctcgcccgaccccagggctcggcccccgtctcggcctcggaagatggacttcgcctcgcccgaccccagggctcggcccccgtctcggcctcggaagatggactttgcctcgcccgaccccagggctcggactcaaccacgacttagaagacgacgaactccgcctcgcctgaccctagggctcggactcagcctcgactccggaagacgacgaactccgcctcgcccgaccccagggctcggactcagcctcagctctggaagacgatggactccgcctcgcccgaccccaaggctcggattcaacctcgacctcggaggaatcgccacctcgcccaaactcgggtccagaccggccacgtcgctagggggccatcattaccctgcccctagctag

SEQ ID NO: 28847 - DNA, 291 bp, Zea mays
  Peptide Sequence Number=SeqID_70626
atggtcggtgcgggcgatgtaggggcggatgggcgttggagccggcgaggcggtgggggcggagcgggcgccaatgggagcgagaaggccgtcagcgggcgcctacggtggcgggagccggtggcggggcggaaaacggcgggacgggcgactgctggggctggaggtgacggtaggcacgggcgccggcgagggcggtggtgggcgtcggtgaaggggtgggctggcatcggcggtgaagcgctcgtgacgggtgaaatgaaacggcgtggttggggcgtcgtggcttaa

SEQ ID NO: 28848 - DNA, 1573 bp, Zea mays
  Peptide Sequence Number=SeqID_70627
atgggcgattgggctgtaaggcagcccacctttctgaaaaaagaggcctggaaagcccagctccaccagctaaacacaaacagcgcgctcctcatcgcctcctcgttcggcgacggcgccctgcagaccgcagttcgactcggcaggcagctggccaaccgccgagccggcggaccaccagactcggagacctcctccgcaaatgcgagccagcaggcgcccttgactcctgtggttgcagttcccgcctgctcttcttccagagttcccgctgcccggcttcggcggttggcggctggtgcggaggcgtccgcaggattacggcggcatccgcagcaaccaggccccgggcctatccagcacgcaagcacggtgcacggcagtgcccgtcgccggcacagtaaggatttatcgcgggaagttccttcttgcaactactccgtactcgcttcagttcaccatgatgactcaagcggtgatgaaaggctgaattatgcttctgataatgagcctatccagaaacagcagaagtctttgagctcttacagtgttgtgcaggctctccgctgcctaaggaggaagcctgcagttgcatttgcctactttaaagatatacatagccttggttttaaccatgacttctcaacctactcagagatcatacaaattttatcccattcattccaggggaagatgttggtatccttgttttgtgagattctttcgggaactgctaatggtgacccagaaatcttaacacttattggtcacttgagcaaaacttgtgccacttctcacatactctcatatgcagtcaattgcttaatcaaggcatacactaacagccacgacgtacaagaaacagtagagatgttttgtcacctttgcaggcttggatttgttcctacactttgggcttgcagtttccttatcaaatttgtatcccagagtggtgattcagatatggttgttagagcttatgatcaaatgaagtgctttcagttgatgctggatactcaatcattgaacatagtcattaggtcgttttttgaagtaaataaggcagaagaatcatttcaagtgtgggttaggatgattgaaatgggaatgaaacctgatgcacatggatactcatcatttataattggcctttgtgattgtggaaagtacgatctagcttataacatggtaagcaaatacactgttcttcatgagatcacccaggaaagggttgcaattgagtccatcgcttataatatggtaattgatggactatgcaaagaaatgaaactggaggaggctgaaaaagtcttggacatcaagaccagacatggatctacccctgatctatatggttatagctatctcattcgtagttattgcaaaatgggtaacttagaaaagtgcctcaagaagctaggcatgatatctgaagttattgttcacttccagaaatttagagatctaggactccatcttgacggcgttctttataacattgctatggatgcttattgcaagcttgggaacatgaatgaggcagttcttcttctaactgaaatgatggcgggag

SEQ ID NO: 28849 - DNA, 156 bp, Zea mays
  Peptide Sequence Number=SeqID_70628
atggagcttgactgcgccgtcggtggtctcgcttccggccttccgcccctatcgcgcgtcgaccgcttcctggacaaccgcgtcatgggttgcatgtgctcatcggaagcgtcgtggctggacaaactgacggaaattcatgttaagcctaaataa

SEQ ID NO: 28850 - DNA, 1359 bp, Zea mays
  Peptide Sequence Number=SeqID_70629
ataactggtggtgctgaagctgttaaaaaagcactgtttggagtatcaaccatcatttacaagcacccatcaaaagagaacattcctcttgaaacttcaattcctgatcctactccaagcattataatcccttcagaacttcctgtctatcctgctagtaacttttactcggccccagatgctgctataccttctgtacatccaagcatgtctgtcttagggtcaacacgtcatgttcccgaacttgctgtacctgccgatgatcatggtcggctgcctatttatcaatctattcttccagttattcctacttatagtgccccaaaatgttcaggagaacttgagtttcgtgttttatgccctggtggaaaaattggcttggttattggaagaggtggggctaccataaagaatataaggcaagagagtggtgcaaggatagatgttgatgatgcaaagaatgacaaggaggaaagtatcattaccattatatccactgagtccaccgatgatgttaagtctgccgctgtggaagctgttttgctgcttcaagccaagatcaatgattctgaggatgatagaatgaatcttcgccttcttgtgccaaataaggttataggctgtcttattggcaggggtggttcaatagtcaatgacatgaggaagaagactaaggcaaacatcctcatttcgaagggcgataagccccggagagcatcttccagtgatgaacttgttgaggtatctggagaagcagacaagctgcgtgatgctcttgttcagataattttaagacttagggaagccgttctgaaagagagtgttgaaagccaaaattctgacagggatggccaactaactgttgctgcctctgattccttatatggaagcagtcttcctttgcctgcattattacctcacaaccaacaaattgcccccttgggctatgatagaagaggtgaacctgagcgagctctggaagtattccctcgtaccagttcgtatgggtatagttccatgcaggcattccttgatatctatgaattcattctcatcttaattgttgacatcctcgaccaggtcacggatgatggctatggaggacttccatcctatgcatcaaaggcatatgaagaacatgtaccacgtttggaaatgactgtacctgctagtggcatctcaaaagtaatgggaaaacatggcacaaacttggacaacattagaaagatttctggagctcacattgaaattattgaaccaaaatcctctcgtcatgagcatattgcttacatatctggaacctctgaacagaggcattcggctgagaatttgatcaaagctttcataatgtctacctaa

SEQ ID NO: 28851 - DNA, 210 bp, Zea mays
  Peptide Sequence Number=SeqID_70630
atgactcccgaagggctcgacgatgcactgtcatcgcttggcgcttcaaaagaaggcgatcgatctagggtcgcgagggtgggggtggagggacgacgcgactatctcgagcgggaggagggcgtgccaggaaagggggatggcgacgtggacctccctgtcatcacgccgaggataatgggagacttgttctcaaatgctatgagttaa

SEQ ID NO: 28852 - DNA, 201 bp, Zea mays
  Peptide Sequence Number=SeqID_70631
atggagaaggatcgtcaagatgctgtgcggaagcgctgggcggtcactagtgtaacaccccagagcacgcccgacgcgcgccccgcgtgccccgcgtcgcgccaaagcccagccggcgccatggccatcgcccgcgcctataaagcccccaaggacttcgaccgtacccctccgcacgcgctcgacctcaccggagcctaa

SEQ ID NO: 28853 - DNA, 288 bp, Zea mays
  Peptide Sequence Number=SeqID_70632
atggcggaacaggggacgagattcataccaccgttgatggtgcagaggatcccgaccacgatgaggcatggttccacggcggcccgacggcagtatagaccctcacccgcggtggcacaggtgtggccaaggcggcaccattgctggcccccagtggcacgagttcaccctcccagttctctttccgccgcccagcctagcctccacaacggtagtggaggtgctcgacgacgattgctccagcaccctcatctctttctctatatcagccttggcgtggctcagaag

SEQ ID NO: 28854 - DNA, 165 bp, Zea mays
  Peptide Sequence Number=SeqID_70633
atgaagcatgattttgctttcgaagctgcattcttagagccgaagcaactgtttgtatctgtatggtatgatgatgatgatgatgatcctatggttactcttcaatatctgcctgctcggcttcagcagcggctgcttcttcgtcagaagcgccttcagtcataa

SEQ ID NO: 28855 - DNA, 216 bp, Zea mays
  Peptide Sequence Number=SeqID_70634
atgcaggatgtagttgatggatctacggtcaccacagagggcagccttcacgatgagcgattgctgttcttccagcagcgccctcttccgcatttcaagaatgcggatttgcctccgaacatcctgtgtatgattgtgtatccaaagttgtgcattgggcatccaaagttgtggatcaatggaatagagaaacagggggtcctaaaggaaatctaa

SEQ ID NO: 28856 - DNA, 1050 bp, Zea mays
  Peptide Sequence Number=SeqID_70635
atgcatccgagctgctctccactggcagtgcctccgggcttccggttccacccgacagacgaggagctcctctactactacctgaggaagaaggttgcctatgagcccatagatcttgatgtcataagggaggtggacctcaacaagcttgaaccatgggacctcaaagatcggtgcaggattgggacggcggagcctcaggacgagtggtatttcttcagccacaaggacaggaagtaccctacggggacgcgaaccaaccgggcgacgacggctgggttctggaaggcgaccggacgggacaaggccatcttcctcggcaacgctgggaggaggatcggcctgaggaagacgctggtgttttacactggcagggcaccccatggcaagaagacggactggatcatgcacgagtaccgcctcaacgatgacaacgtcgaggtgccgccgattacggaggatggatgggtggtgtgtagggttttcaagaaaaagagcatccagaggggattcgaccagctgggcacagcgtcggctggcgacgacgacgaactccaatccttccactccccgggcggcgtgatgaccactctggcggagcagaagcacggcctcctccaccagctcacgcacggcggagtcgtcgttcccgccttcgacccctgcatgaaccttccacacctcacgagtgcggaagggcagcttgccgccacggcagcatttacatccggcacatcggctgtggccatgaacctgctcgacatgggtcgttgttctcgccacaaccacaaccacaacatgctgaagatgacaacaacaccatgtggctctgccagtgacatgccgctgaacagcggtgagcgcttcggtgccgccgccgattggtcgatcctcgacaagctgctggcgtcacaccagaatcttgaccaactcttccattgcaagttcgggggaacaaccttcgcggtgcctcaccattatcagcaggagatgcagcagcagcacatggagatcagcgcgtcttcactgcataggctgcctctacattag

SEQ ID NO: 28857 - DNA, 327 bp, Zea mays
  Peptide Sequence Number=SeqID_70636
atggcaggcgagaaggtggcctctaaactcgccttggtgatggcctctaatgttcctgggatgatagaggaggctttggttaacgagagcagacttttgactaaggcggcggggccaagtgccgtagacgttctggcgatccggctgagggcccatgaagccaatccatgtgcggccttccaaaaatcaacaactaagggtgggcatattcaggtactaacgaatactcattatatcagtgatgctgatttagttcgacttgtgggcgaggacacaacactaatgctgaaggaggatgaagttgttgtttttccaaagctttcttaa

SEQ ID NO: 28858 - DNA, 310 bp, Zea mays
  Peptide Sequence Number=SeqID_70637
atggcctctagagacttcagtggcggccttggtgcagttggagggacactggggtgtctggccacgggcggtggtggcgtgacgtcgatggcgagcgctatcgaggagaaatgcaatgagatcctcgggagctacaataaggaggacgaagctctgagcatggccttcggaggtcagaaaaataccgatttgtgtggagcacagggactatggtcgatggctaaggtgaaggtcgtgtgggctcgtgttgatgtacttggagcggtaaaggacgaatgttgtgtcttggctgatggatcggagcagacgg

SEQ ID NO: 28859 - DNA, 616 bp, Zea mays
  Peptide Sequence Number=SeqID_70638
acatttcgccgagcagccttcgagccacagcaacatagagatcggctacgagccgctagaggagctgctggggtcaagcacagcgctgaggctgacaactggagaggcacaggatgataatgcctcggatgcgatgaacagggactccttcgcgctgccgtcaccgccgcttgggactcccaccatcagcgcctgttcgcctgctaccgtgcccagccaatctcccaccaccttgaacgtcgtcgtcagtttctcccccgtggccattaacggtaggcctctccgattcccatcctctggcaccgttactccctcccttgacccttcccttctgctggtggtgttgccggatcgggatctcctgcagtactgcatgggccactgccgcgtgggctccgcgtgcgacagagcccacgcgcagcgacccaactgcacggtgcagtacgtcagaggatccgtgtccggtgttgcctgtgctacggcgccttttgctgtgatcaccggtgctccactacggcaagtccgcctctcgctctgctgcccagcatcaaatgtcgtccgtgttcgacgccggaaatcccgcatccttgctgcgacgtcgcaccaccatgattaa

SEQ ID NO: 28860 - DNA, 267 bp, Zea mays
  Peptide Sequence Number=SeqID_70639
atgacttccgccaaagaaagaaggagttgtacagatacaccgaagctgctagggacttcggaggaagtatgtttcaacttcagccacaggagccaggctgcacttacctttggcctcaaaatgcttcagcaatcaagtgatgagcacatcgtcaccatctacttcttttatcccaggacccacttccctatgaccaagttcctgctagtcatcccaagttcccaatgccaagatttgcaccaaagggatagaaagggaggcatctga

SEQ ID NO: 28861 - DNA, 183 bp, Zea mays
  Peptide Sequence Number=SeqID_70640
atgaacaaggaccggaggcgatccaggaccatagacgacccgctgcggcagagcctgcgcgtaggcgacggcggcgtggccccggcgccgccgctgccgctaccgctggagcagagcaatatatatgcgatgggacacacgggccctctgggcagtggacggcatgtttttggtgacagctag

SEQ ID NO: 28862 - DNA, 723 bp, Zea mays
  Peptide Sequence Number=SeqID_70641
atggcgtttcttctaacgctgctactaccgtggtggccgctgtcgccgtggctcagccccgctgcggcgtggttcatcttcttcaacgccgtcgtcagcgccattgccgtcatgtctaccagcggtagcggcagcggcggcgccggggccacgccgccgtcgcctacgcgcaggctctgccgcagcgggtggagcagctgccgatcgatgaaagcagcagtgctgccgcggcctcgcactgttgctggccagaagcagaggcggcgtccgcgactgagcgcaattcacaggctgcggccgcaacaaccggcgagacggcagcgatcagcagcaccgcgcaaccgagcgcctctgtggcggtggcaacagccgtggtccacgcgccttcggcaccgccaacggaggaggaggggcaatgcagagaaggagcaagaacatgatgagtctgctattagcttggacgaggcctacgcgctagcccatcgccatcgcacgaagccgctggcgtcgccgccgtcagcagcagcctctgccaccgctgcgttgccgacggagcacaagaaggtggtggcggactggcggagggtacccaaagcaggggaggcgcttgaggggaaggcggagttgaacgcgcgcgcagacctgttcatccggcagttccgcgaggaactcaagctgcagaggctcaactccgtcctcaaccacacccacgcccttggctaa

SEQ ID NO: 28863 - DNA, 402 bp, Zea mays
  Peptide Sequence Number=SeqID_70642
atgcgctataccgatgccgacgtgcacagggacggtttcgagtggggttgcgtctatcgtgctctagctgcccccgcgtccaccgccacctcctccatctcgcgcctccgtttctgttctctagttgcccccgcgtccaccgccacctcctccatctcgcgcctccgtttctgttctccagttagcctatcccgacagcaccagcgagcctttacttctagccaacaccagtgggtttctgcaatttctgcaggctctattccgacagggcataatggattctttttgttatgggattgcctcagtgagattgtttttaatgcccaagagattgtcatatctggatattgtatgcatatgacactcgacgtgctccaagatcttcccctgacagacctgtaa

SEQ ID NO: 28864 - DNA, 660 bp, Zea mays
  Peptide Sequence Number=SeqID_70643
atgaggctgaggagaagagtctacgggctcggctatgagcaggctcggactcgggctaggtcccggaagacggcgaactccgctccgcccgaccccagggctcggactcgggctaagtcccggaaaacggcgaactccgctccgcccgaccccagggctcggactcgggctaagtcccggaagacggcgaactccgctccgcctgaccccagggctcggactcgggctaagtcccggaagacggcgaactccgctccgcccaacgcagggctcggactcgggctaagtcccggaagacggcgaactccgctccgcccgacccagggctcggactcgggctcatccctagaagacgacgaactccgcttcgcccgaccccagggctcggactccgccctggcctctgccgaacgacctccgcctcgcccgacccaggggctcggactcggcctcggccatggaagacagactcgacctcggcttcggaggagcctccacgtcgcccaacctagggcgcaggccagccacgaggacgtcagcaaggactcaaccgctccgacagctgtccctccaccaggctccgtcgctcctccgacggccacgacatcacaccagctgggtgccaagatctctccggctgccacatcggcatgtacttag

SEQ ID NO: 28865 - DNA, 246 bp, Zea mays
  Peptide Sequence Number=SeqID_70644
atggagtccctaggcgtacgatggcggtgggcatcagttggtcctcttccctcaaggtatcttcctttagaatgctttgacctcaacaaaacaccatttatttcatctaaggttccttctgctgcacatgattaccatcacagtctttcctgtggtagacaaggattagtactagcacggtgccaagatacaaaagttgtggatggagaatggaggctgattcttgtgcatgcttctaaatactaa

SEQ ID NO: 28866 - DNA, 255 bp, Zea mays
  Peptide Sequence Number=SeqID_70645
atggcagcagcgagcgacgaccttaacggttgggggtcgagggagtggcagcaacctgcaaaagaagagctctcgattcgagtcagagtcaccggggatccgaaaccgttggcgtccaacaggtgggtgacgcgcacagcgcagtcgtttatccgcttcgctttctccttcctgcagcatgcacagtcgtcgctgctgcggtgcaattcagtcttgtctcctctagcaggtgctgcctccgagtcagtggagtaa

SEQ ID NO: 28867 - DNA, 282 bp, Zea mays
  Peptide Sequence Number=SeqID_70646
atggggctcggtgtatgcgactcgctctgccaaggtggtgatgaggatgatgattatgattatgcttatggtaatggttgtccgcgttgcaaccactgctcaggtgaagatgaagtcatggaggaggacttccaggagttccaagagtacgatgagttctatgtgtgggttagcggcaaacccccagtcggctgcctgtgtaggccatgtgtatctatgtttcttttctgcactttgattattgttatagactatgtggatgtcttggacatcatgatgtaa

SEQ ID NO: 28868 - DNA, 225 bp, Zea mays
  Peptide Sequence Number=SeqID_70647
atggaggcgcgctccgctataattcaccagactatccggtgtgccatcggactgtcctgtgagccagcggagcaacggctctctgctcaaccaacggttgactgtggagatgtcagagcggaacagtaccgcgcagaagttagaacatcaaagtcagagagcatcggactgtctggtgtggcaccggactgtccagtgtggcaccggactgtccggtgcagctag

SEQ ID NO: 28869 - DNA, 276 bp, Zea mays
  Peptide Sequence Number=SeqID_70648
atggttatggttatagtaaggggcgaaccaagtgcttgcatgaagaagcgaatcaatcataatggagacaaggagaggcaaaactcaactaaaatggaaaagggaactcgaccgactatcatgagcaaagtgagggaattccttctgattgggtcccttagggaagagacagaagccctcaccggtgaccccagacccccctctagcgaccgcgtctgcctcacctccggcaacctcaccgccacggagggagcaacaccggtcactgagctgtaa

SEQ ID NO: 28870 - DNA, 2400 bp, Zea mays
  Peptide Sequence Number=SeqID_70649
atgaaagagttcgaccagctcgcgacttctttcatcacaccttttggcatgtactgctacattactatgccatttggtttgaggaatgcgggtgcgacataccaaagttgcatgaaccacgtgttcgaagagcacattggtcgaacgatcgaggcttacgtcgatgacatcgtagtcaagacgaggaaagcctccgacctcctctctgaccttgaaacgacattccggtgtctcaaggcgaaaggcgtaaaactcaatcccgagaagtgcgtcttcggagtcccccgaggcatgctcttggggttcatcatctccgagcggggcatcgaggccaacccggagaaaatcgcggccatcaccaacatggggcccatcaaggacttgaaaggcgtacagagggtcatgggatgccttgcggctctgagccgcttcatctcgcgcctcggcgaaagaggcctacctctgtaccgcctcttaagaaaggccgagtgcttcacttggacccccgaggccgaggaagcccttgggaacctgaaggcgctccttacgaacgcacccatcctggtgcctcccgctgccggagaagccctcttgatctacgtcgccgctaccactcaggtggtcagcgccgcgatcgtggttgagagacgagaagaagggcatgcattgctcgtccagaggccggtctacttcatcagtgaggtattgtccgagaccaagatccgctacccacaaattcagaagctgttgtacgcggtgattctgacacggcggaagttgcgacactacttcgagtctcatccggtgactgtggtgtcatccttccccctaggggagatcatccagtgccgagaggcctcgggtaggattgcaaagtgggcggtagaaatcatgggcgagacaatctcgttcgcccctcggaaggccatcaagtcccaagtcttggcggactttgtggctgaatgggtcgacacccagctcccggcggctccgatccaaccggaactctggaccatgtttttcgatgggtcgctgatgaaaacaggagcgggcgcaggcctgctcttcatctcgcccctcgggaagcacctcctctacgtgttgcgcctccatttcccggtgtccaacaacgtggctgagtacgaggctctggtcaatgggttgcgcatcgccatcgaactaggggtccgatgcctcgacgctcgcggtgactcgcagcttgtcatcgaccaagtcatgaagaactcccactaccgcgacccgaagatggaagcctactgcgacgaggttcggtgcctggaggacaagttctacgggctcgagctcaaccacatcgcccgacgatacaacgagactgcggacgagctggctaagatagcctcggggcggacaacggttccctcggacctcttctcccgagacctacatcaaccctcagtcaagaccgacgacacgcccgagcccgagaaggcctcttccctgcccgaggcaccctcggcccccgagggtttctactggccgaccgcggtggccgacgccactagaattgtctacacctgccaagggtgtcaattctacgcaaggcagacgcacctacccgctcaggctctgcaaacaatacccatcacctggccgtttgctgtgtggggtctggacctcgtcggtcccttgcagaaggtgcccgggggctacacgcacctgctggtcgccatcgacaaattctccaagtggatcgaggtccgacccctaaacagcatcaggtccgaacaggcggtggcgttcttcaccaacatcatccaccgctttggggtcccaaactccatcatcaccgacaatggcacccagttcaccggcagaaagttcctggacttctgcgaggaccaccacatccgggtggactgggccgccgtggctcaccccatgacgaatgggcaagtagagcgtgccaacggcatgattctgcaaggactcaagccacggatctacaacgacctcaacaagttcggcaagcgatggatgaaggaactcccctcggtggtctggagtctgaggacaacgccgagccgagccacgggcttcacatcgttctttctagtctatggggtcgattccatcttgcccacagacttagaatacggtttccaaggacgagggcctacgacgaccgaagcaaccagaccaaccgagaagactccctggaccagctggaagaggctcgggacatggccttactacactcggcgcggtatcagcagtccctgcgacgctaccacgcccgagtggttcagtcccgagacctccaggtgggcgacttggtacttcgactacaacaagacgcccgagggcggcacaagctcacgcctccctgggaagggccattcgtcatcgccaaggttctga

SEQ ID NO: 28871 - DNA, 1158 bp, Zea mays
  Peptide Sequence Number=SeqID_70650
atgtctggcgaacgaccacggtcgtcgttgccgccgcggccggagccattccgcttctggcttccctacagaagcagtgtagggtcatggaggcagcaaccaccgccgccgtcacctgtgctgtcgactatgccatcctcaccccgacctcagccaccttcaccgccaccaccaccaactccggtagggcctgtgcaccagaggccggcgccacacaccacggtggaagatatccctctccaagccgagccctctcacgaatcggacacgatttcagtccagagctcagactcgtcgcagctccgaggcggccgaccgtccacagctgacctggagttgacgctctccggcgccccgcccgccggccaggaacagaggtcgggcgtagacgacggcaaccgccgcaacgacaccaagatcgccatttccggcttcccgcggtcgcggctcttcgacggcgcacgcgcgccgtaccggcgggagatcgaggacgggctcaagagcttggccgcgcgcgagacgccggcgccgaggccggagagcggccacgggtaccgtgtcatcacgctcgccgggcacaatgtcggcgcgagtatggtccttggctatggcggcggcctcacggaagcgccagcgccactgccgagagccgcggagccaggggtgccggtgccgggtcccggttcgagaccgtcggcggtggccgcgaacgtgaacagcaacgtgcagagcgtgaacaactcgtcgatggaagagagcacgtgcaccgccggcaatcctggcgtgcacgtggacatcaagaacgcgcgcgaggagctcgctgcggtgacaccaacgccgattcagatggaagaagagaagccaaaggagcctgtgagaagaccgccgcttgctgtgacgccgcagcagaagagctcagcagcaggtggcgctgaggtggcaccggcgaggccaaggccgaggcggtgcttgcgcgcactgatgatggagaacgggagcaacacagaggctgcgcggaagccgaggccgagcgcctgccggttccagtgcgtgacggatcatgcaccgacggcgacggcgacgccgagcaacggcggtggcgctggcgataagaatgcagaggatggcgggaaatccagcacggaaggggcaagctga

SEQ ID NO: 28872 - DNA, 276 bp, Zea mays
  Peptide Sequence Number=SeqID_70651
atgtggcctactgcacgtgacataagccaacgatcggagcctgacgtaaggcctccgggttacgccgcctctgcatttattgaggataaggcgcgccgcctgtctattccactggcaggcgcgcctgccgtcgtcgtgcccgggggtcctcgcgttctggcggtacaccaccgagccggccgccttgctgatgagcatgatgagctcgaggcagggcagccgccagttggagcgcagcagcagatcgtccatgatgctcagcagcagcggctgcag

SEQ ID NO: 28873 - DNA, 1152 bp, Zea mays
  Peptide Sequence Number=SeqID_70652
atgccgacaccagtgaagtcggtgctgcccgtagtgctcctcggctgcggcggcgtcggccgctacctcctccgccacatcgtctcctgccgtcccctccacgccaaccaggtatcgctcttctccttgcccgtgtccgcggggcactgtcagctgttcaagaaccctgaggctaggggcaaagtcatagacgccgctaccacactcggaagaacaactggtctggtgctagttgactgttctgcaacttatgacactgttagcctgctgaaagatgctgtggatcatggatgctgtgtcgtattggcaaacaagaaacctcttaccggtgcttatgaggattttcagaagttggtctccaacttccgtcggataagatttgaatctactgttggagcaggtttgcctgtgatagcttctgtaacccgtattattgcatctggagaccctattactcgtattgttggcagtttgagtggtacacttgggtatgtgatgagtgagcttgaggatggaaagaaatttagtgaagttgtaaaaactgccaagtcccttggctatacagaaccagatccacgtgatgatctaggtggaatggatgtcgctagaaaggcattgatcctggctaggcttcttgggcaacagataagcatggagagtatcaataaacggtgctctgtacactgggtggcattttcactgttactggttagagacatggtcagtgattcagttacactgaagattttgtatttctctacgcctcaggttgagagtttatatcctagtgaattaggacctgatgcagtgtccacaaaggacttccttgaaagtggtttagtgcaacttgacaagagcatggaagaaagaatcagagcagcatcttcgagaggaaacgttcttcgctacgtctgtgagattgaaagcgcagggtgccaggtaggccttaaagagctcccaaaggattctgcgctgggtagattgaggggaagtgacaatgtgggcgcaggagctggcaacgacaccactgccgccggcgtccttgctgacataatcgatctccaagacctgttccagacgatggctttgatcgttgatcggcatccacaccagtacaccatcttgatttttgcaaggcaccagagcgtttga

SEQ ID NO: 28874 - DNA, 1041 bp, Zea mays
  Peptide Sequence Number=SeqID_70653
atggccgcggccgccgccgaggatgagaaggggctcctgtcgtcggtagtgggcgacatccggtgctactccggctccgaccccctccgcccgtggctccgggggatgcggaggatggagagggcgctgccgccagcgacgctgcgggagaagctgcccaggttcctccagaagtgcgcccaggagttccaggacaactcccgctaccgcgacgacccgcggtacctccgcgtctggatccagctgatggactacgtgacggacgcaaagccattgctcaagacgatggagaggaatggaataggcctcaaaagggcttcgttctatatggcatatgcactgtattatgagaagcacaggagattcaatgatgcagagaagatgtaccgtttgggaatccagaaccttgcagagcctattggggagttgcacaaagcacatgaacagtttcgtttccgcatggattcatacaagaagaaagataaactgcaggaaagaatgcctaggaaagtggggtctagtgctacatctatgaaccaagtcaaaggtgaaagcagacactataaagaactgaaatccaatataaagcaaacatcagaaagcagttctaatccttcattagggccaactaaagttggtgttctctccagaggaaactcaggagcaaacaataatttgccccgttgtaatagtgatgatactgtcgttgtacggtttataggctctgctttggttgggaagtcagagactgaagatgcctgtcaccacggcctagttgagccaactataaacactaaagaggctttggatgccattaatagcatgtttatggagccactggaacctgaaactgttctcaagagacaatcaaagcgtgagaacccaaatcataatcagcaaacaaggcatttggtatctttgttgatgaagatgaacctagtggcaataatactagcatgctccagacaacagtatgaagcaaggcatacaaatgagtcagcaaacagtgatttgagatctttgttgatgagatgttcctaa

SEQ ID NO: 28875 - DNA, 933 bp, Zea mays
  Peptide Sequence Number=SeqID_70654
atgctctttgctctagccgacaagtgcaccagagctgccgaaagtcgtgcatggcactcggccccacaaaccggggttgcccaatcgggaggctcgggtgccatccctcgggacggtaagaagaaaaagaagaaggaccacgacttccagaggtcgcggtccatcgccctagtcatcgcagccacgaccgggggccggggcaaccgcaacaaacgcccatggccgcagaggggtagcagcggcccatgccctatgcaccccaacggtcgccatagcgctacggagtgtcgtgagatcattgatctcacgaaacgtgtcagcaagcgacgtgagcagtcctccaaggatggctccccacctcgtcgccgacctggcaaagaaaaggtcgacgacggcgaggtgccgcagttgaacgggacctcgggtatgctggtctacaacctcaacaaatcgagcctacaccctaggagggccaagtaccaaggaggaatcggttacgccacacacaacagggacaagtgcggaggcaaccacctctacactgggcagcctcaccagcagcagcgaccacctctgcgacgggcaacccctgccagcggaggcaacaacctttgcaatgggcagccctcgccagcagaggcgaccacctcaacccctgccagcggaggcgaccacctctgcaacgggcagcccccgccagcggaggcggccatctctacaccagtggcttaccggcaacggcggacgcctcagcacgtgcagaaaggtcctcgcccccgtcctcctgcaagggtgaggacaagaccatccaagaatgtggccgccacctccacggcgcacgacatcttgtacaaccccccggggcggcatcgaaacagcgtggtcgacggtgcaggggacgctacgggtgcggcgaacctgcgcacggtgtga

SEQ ID NO: 28876 - DNA, 906 bp, Zea mays
  Peptide Sequence Number=SeqID_70655
atggctttccttatcactgtacagggtcatctgcacaccaatagggtctgcgacaatgtctggacattcattctaacagatgcaaccttcaagagcgctgagattcaagaaacaccgagcaagatgggtctcaatgcggtggtagccgcctgctacgtctttccagtacttgtctctgtgctcgcagtccgcttcttctacgtactgtggcacagtggccaaccagagtcaaggttgtgcgccaccagattgcgttgtctcattgtccttggctccggagggcataccgcagaaatgatgaacatagtaacaacacttcagaaggataggttcacaccaaggtactatgtggctgcacttacagacaacatgagtcttcagaaggcacaggtctatgaacaatcacttattcaggtggagagcaacggaacgaaggctggcgagagcgctcatttcatgcagatatatcgtagtcgtgaagtgggccagtcttatgttacatccatcgcaacaacattgctagccacgctgcatgctatgtggctggtgataagaatcagaccacaagtggtgcttggcttgggatggtcatccattttctacattgaaagcatcgcaagagtgaagaaactgtcattgagtggtttactgctgtacaagctacggatcgctgaccagttcttcgtgcagtggccccagctgcagcatgagtatcctcgagcgtgctatgcagtgttttccatctcagagattcagaatacggtggcaatctatgcacactttgacaaatgcaagttacttaagagcggtggtgcttgctgtagaactggcgatgtcagcgtcatgaacaagtgcatgagggctgtaactgcttatggcctcaagatctacctaattaatttttga

SEQ ID NO: 28877 - DNA, 252 bp, Zea mays
  Peptide Sequence Number=SeqID_70656
atggatcttggatccgagggcctgcattgcgtaccggttcacgcggaacccagatctaatctgagccctccgtttctgatcgggcggctcagtttcgcccgtaccccttcactctaccggtttgcagaagagaccctagaaaatctaggaatcaacccgccgtcctgggggcgctattcactgagtctctggtttcttgcgccagagtccctacgctttctagaaattgaggcccaatccagagagttataa

SEQ ID NO: 28878 - DNA, 363 bp, Zea mays
  Peptide Sequence Number=SeqID_70657
atggcacacaacctgttacgcgtcgccatcgtgctgcggatccggtcttctccctcgtgcgtgaggcagatttgggcagcgatcgcggacgaggccattgattgccagggggagcacatcgtgcgagatgtgatccagaacgtcatcacgccgccgcaagtcgtcgccatggtcagcttcgccgttgaccgttcaaactgcgtcgtccccggccgatctaacgcacgcactgaggacttggaagagctcccaacaaaagtagtgaagattcaagaagtggttcctgaaggtctattaaacaaggtctactctagtgcgtgttcatccagtggctgggagctatctaactggttatcgtggtag

SEQ ID NO: 28879 - DNA, 858 bp, Zea mays
  Peptide Sequence Number=SeqID_70658
atgaagagggtgtactctaaactgcttacatttacatgcttcagtaagttccagttccagggggagttaagtttccaggaccatacatggaagacaatctcttcatcagccaaagaactgatgtccagtcttctctctgttgagccttacaagaggccaacagcaagtgacctgttggggcatccttgggtgataggggactacgcgaagcaggacctcatggacgcggaggtcgtgacgaagctgcagaggttcaacgccagaaggaagctgcgggcggcggcgatcgccagcgcgctcagcagcaaggtggcgctgcggacgaagcggctgatgaacctgctgggacggcatgacctgagctccgaggagctcgacaacctgcgggctcactttgcacggatatgcgccgacggcgagaacgcgacgctggcggagttcgagcaggtgctgagggcgatgaggctggaggcgctggtcccgctggcgccgcgcgtgttcgacctgttcgacaacaaccgcgacggcacggtggacatgagggagatcctgtgcgggctgtccagcctccgcaactcccgcggcgacgacgcgctccggctctgcttccagatgtacgacgctgaccgctctgggtgcataagcaaggacgagctggcgtcgatgctgcgagcgctgcccgaggagtgccttccgggcgacatcacggagcccgggaagctggacgaggtgttcgacgagatggacgccaacagcgacggcaaggtgagcttcgacgagttcaaggcggccatgcagaaggacaacgccctccaggacgtcgtcctctcgtccctccggccacctccgccgccatag

SEQ ID NO: 28880 - DNA, 324 bp, Zea mays
  Peptide Sequence Number=SeqID_70659
atgacgaagttgaggccatatccaatgctacagaatgtgctgcatgactggagtgacaaggattgcgtgatcatcctaaagcgatgcaaggaggcgattgccgccagtggaaaagtgatcgtcatagatattgtacttgggtcatcttcccttgcaatttgcaacgagacccagctctggcttgatcttttcatgtccacggtaacgacgggcaaggagcggagggaggaagaatggtatcggctattcaaggaagctggattcagtgcgtacaagatcagcccagttctagggcttctctcgatcattgaggtttttctgtag

SEQ ID NO: 28881 - DNA, 804 bp, Zea mays
  Peptide Sequence Number=SeqID_70660
atggagccgcagtgcaacgtcggtatgttcacgcgcgccgagctgctggaggccagcgtggagcttcgtcatcacgccctcggctgcgtcaagtccacggccctccggtgcgctgtcaagctcggcgtcgccaacgccatccagcgccgtggcggcagggcctccgtcgaggacctgctcaccgagctctctctggacgcgagcagactccgctgcctgcacagcgtcatgcgcgcgctcgccgcgttgggcgtcttcaaggaggggagcgacggcgagtacggcctcactgccatttcctcgctgctcgtggacgacgacagcagcgtccgagtgctcaacctggcagattgggcccttgctggtgtcgatggtagcgacgacgacaacaactgcagtgctcgaggaacggcgttcaagatgacgcacggcgaggacgtctgggatgtcctcgcgcgcgacgcctttctgggcgacttcttcaacggcgcgctcgcgtcagagactcggttcctcatggacatagccatccgcggatccccccaggtgttcgagggaatagcatcgctagtggacgccggcggtggcaccggcgcagcagcccaagcggtggctgcagcattcccggacacccggtgcacggtgctggagcttccgcaggtggtagacgctgctccgattgatgggccggttcgctttgtcggaggtgacatgacgaagttcatccctcctgctgatgccgttcttctaaaggtgatatgcaatctttacttggtacttattacggaaaatcgaatgggatga

SEQ ID NO: 28882 - DNA, 333 bp, Zea mays
  Peptide Sequence Number=SeqID_70661
atgcaagaacagcagggatctcaacaagaaagataccttgtgaggaaggcactcaagtctgctctatctcacttgaaagcagaccatgcaggagattttcttagttgccatggccagagagaggaaccatctgtagttgagtcctactataacaagcggatagtcggctgccctggtggtgagggagaggatgaacacgatgttgtatggttctggttgaaaaaagatgagccgcatgagtgtccagtctgctcgcaatactttgtgcttaaggtcattggtgatggtggtgatccagatggtcatggcgatgaagatgatggacatcactaa

SEQ ID NO: 28883 - DNA, 189 bp, Zea mays
  Peptide Sequence Number=SeqID_70662
atggacgaaggtgagctcgcaacggctgctgttttgtggggaagagaggaggagcagggaagggcgccggccacggccatggggagagcaggggcgaggggaggtggagctattgtcaggcgccggtcagaggtagaagaaaaggggggcgtcagcatggagcagggcataggggcgccctgcgcatag

SEQ ID NO: 28884 - DNA, 420 bp, Zea mays
  Peptide Sequence Number=SeqID_70663
atggcgcccccctgcaatctttccccttggctggtcgacggaatgcctgtgggaaatattgtgttgtgcgcagccccgctcgccacgtcgtcgttcacccccggagaggaaccccttgtttttcgtggaggagaaggcaagccgctcaacgctcatcggatgttcggagcaatgcgcaaatcggaaacaccatcgttctttcaaacaccgattgggtttgtttatgacgaggttgaaatgtttcggtggtttttgtcatataatcgtgcgatggatgctcatgttggtggtgtgattgaggaggtatgtagtgtcaagcgagaatcgcgggtaaaaagtagtagtgctcatgtgatgcctaagctgaaatgcaaattattgggtgaaaagcgcttcgatatacatgtataccaaatttga

SEQ ID NO: 28885 - DNA, 180 bp, Zea mays
  Peptide Sequence Number=SeqID_70664
atggcgcgacccctctgcctagctcggtcatgctgttgggaggaggatctgacgagttcgacccccgtgtcagtgaaagtgaatgacgaggcaggcccacgtgacagcgacaccagcaaaacggtgtggaaaaggatgacgggctgcgtggtggaattccaggctgggccgatttggtag

SEQ ID NO: 28886 - DNA, 231 bp, Zea mays
  Peptide Sequence Number=SeqID_70665
atggagggacctcagcgcagggagatgggcgcgcataggggcgagccagggagctctggccgggcgcaggaacatgccatgggagcagaggagcgcgtgcgctggaagttggacggcggccgaggattcagggagaggaagccgagcaccagagagtcgagtagaggccggggacgcgcgcgcacgggagctccacagcaggggaaggcgctgaagagggcgagcagatag

SEQ ID NO: 28887 - DNA, 381 bp, Zea mays
  Peptide Sequence Number=SeqID_70666
atggggagagcaggggcgaggggaggtggagctgctgccgggcgctggccagagaggaggggaagtcggcttgctagcttgaggaagaagaagggaaggaggggtgcgcgtccatggggaagctcgcgcatcgtccattgcagggggtggagcttgcgcccatggagcagggaagggagcaggcctaggcgctcggatgagggaaaggaagaaggcctgctggagatgtggcgccctggaggagaggaggagctgctgctcgcctacaccattggagccgaggagaggaaaccatgggaggaagggagctccctgcgcactgaacagaggagaagagagctgtgcgtgagaggaaaaaggagaagagagagtggcagctag

SEQ ID NO: 28888 - DNA, 672 bp, Zea mays
  Peptide Sequence Number=SeqID_70667
atggcggggttcaaggtgacgcggatctcggagggccccgtgaagccggcttcggcgacgcctgaggagacgcggcagagctggcgtgggtacctggccgtgaggagacgctgccgcttgttgggcgcgggcgaggccccggccgtgatccgggcggcattggccaaggcgctggcctttttctacccgctggcggggcgcatcatggatggggagcagccagggcgccccgccatccgctgcaccaccgacggcgtctacttcgcggaggccgaggcggactgcaacctggaggacgtgcggttcctggagcagcccctgctgctgcccaaggaggacctcgtgtcggcgctgcgcacgcgagagggatccgttgttcgtcgggccagatccgggcacgcgcgcgcggtagatctggggagcacggcaccactgcagccgggcgaggggtcaaaaccccaggttcgagaaggcatgctcaccatagccacgtcgacgagattttggggcagaggacgcgtctgcaagaatcatggatggaagggtgtggttagggcggcggagacctcgcggcggattctgcgtgggggaggagggtgggatcctcggctgagatcgcgtacgggtgcgatggcagaaccgtgcaccaagtgttgtggacgtctacactaa

SEQ ID NO: 28889 - DNA, 265 bp, Zea mays
  Peptide Sequence Number=SeqID_70668
atgaagcatttgagaacaagtccccaacagcgccgatacgagtgccaatcactaccatccaagacgtctccagacgacgtggagtcgaagagagatgaagattttaaggtgaagaatgctactcatcttcagttcctcacctcaaactctagactggtcgagggggtgggcaacaggaagttcaccgccgacgaggtcgttttcccaaccgtcgttgtcctagtgcagatctacaccaacgaacatgatagcaataagatcgaag

SEQ ID NO: 28890 - DNA, 240 bp, Zea mays
  Peptide Sequence Number=SeqID_70669
atgacgaagaaatttgagtacaagttcatcacaaatttgaaattcaaaaataataaaaaggaaaggaaatcagaaatgagccagggagggtcgtctgcactcggggttgctgtttgtgtccgcaattggaaggagaagccgcggaaccgtggcaatttctcgtcgtcgatcgatttccgccgcggacaacctcgcaccgcgaccgggtgctacagcgtcaaggccgatcgcatctcataa

SEQ ID NO: 28891 - DNA, 243 bp, Zea mays
  Peptide Sequence Number=SeqID_70670
atgaagcagcccactaccgtccttctcgccatcgcactgctttggggtgctctcctcgtccctgctgcagatgccgcaaggcaactaccaccggaaggccgggtcgccgtcgagaaccatgaggcggcggcggcggcaacggcgtacacgacgctgcgggagagggcatggtcgaagacgacggccatggcgtggacgcagcagctcccgtcagggccgagcccgaggggtcctggccactag

SEQ ID NO: 28892 - DNA, 180 bp, Zea mays
  Peptide Sequence Number=SeqID_70671
atggcatatgcaatatctttctcttattatgatgttatacttgtggcccttaagggggctcgagctgtttctcgagtgcctctccgtggtgatgaggaggatggttatgattatgcttatggtaatgatgaagtcgtggaggaagacttccaggagttccaagagtacgatgagtcctag

SEQ ID NO: 28893 - DNA, 1371 bp, Zea mays
  Peptide Sequence Number=SeqID_70672
atggcaccgttacggcgctgggcagacctgccggcagatctcctctgccgcatcggagaccggctcgacctcaagtgtctttcgagctcccccgcccatcgtctcgggaagccgctgcaattggctccagcaacggctggatcgcgctctccgtcgtcctcttcaacgggcaagaccgtcttcgtgctcctcaaccccatcgccgctgtggagatcctcctcccgccgctgatctacgagagtcgctgggtttccaaggtcgtcttcaccccgagccccgccaaggatgacttcgccgccgcggcaatctgcgatatcgacaggatcgcgtacgtcaccgccggtgccaggaggtgggccgtcatggaccccgtccgcctcacctgcggggaccagctcaccgacgtcgtatacaccgacaaaggtaaggtcttttgcctcaccaagtgcggggacgtgcatgtgctccgtcttcctgagcgccggcgccggaagcctgccaacgctgatgaagcaggatcctcggagccagagttctctgttctccagtcaccacaacctaatgagcgcacaattacattccgcccactgcgttggcaacatcagcgcaattttcggatgatgcgctatgaacaggcccggccaagagaccaggatctaactattccactgagggtgaccttctgtgcagagacactcatcccatataagaaagttccacctgaatcgcaaggaccacacctaaatgcgccggccactgttgagcccctgttgtctgaggccaacctcccgttcaaccctgccactgtctttgctccaccttatgacactgtctcgtcgttcactagtgcgaagaacttggtgttctgtgagggcaatctgtaccaagtttggaggaacgcaagctgcactgttactttgcagctgcctgcaggaggtcagcatcgcgtcgctgaaaatgagatattggtgctgaggtattatcctcgacggcggccttgctgggatgtggtgaaggacctgggaggtcactcgctttttgtgggaaggaacaatgcggtgtcgatgtatggagagggtgtgccaggactgaggggcaactgtgtctactggattggtgggcgtggtagggatcaaggcatggtttttgacatggaatctgggaggtccacgccgtgcagggttcctcctgttggctttttacctgggcatccgcatagcacaatctgctggtatttcttgagcgatgtaatgagcatcaataactgctacagcaatagtgtcagcagcagcaacagcagtggaggaagaaaaatttatcaaactcgagcaagagcacgagcagatcttgcacaagacatggaagaatga

SEQ ID NO: 28894 - DNA, 648 bp, Zea mays
  Peptide Sequence Number=SeqID_70673
atggccacttcttcctccgcccgccctaagcctctcctctccgccgcgccgcagcaggtcgctctcgccgatgggtccgccactgcggctgaccgcgccgatgcagatcgctgcagaggacagcgcagtggtagttcgtcctcgtttgcgccgccagcctgggactacacccaggacctgccccgacgagatcctcgcgctcgtcttcgcgtcactctcgcccaccgaccgcaacgcctgctcacgctagatggaggtcgacaccaccgcctctccctcgatgcccgcgccgcgctgggcaacgctgccccgcgctgttcgcacggtggcgcagatagcctctccgactacggcgttgtggccgtcacggagacttattatgtcgtggggaggagggtgggggtgtggggcggaggcgtccatcgcggagacgagatctgcgcgctggtggtaggagatcccttgatggcaccgcagatggcgtggggagaagggtggggcggaggcgtccgtcgcggagccgggatctacgcactgggggaggttcgccgaggagagggggcgcgcgggcagacagctgtacagaggcagaacgcggggcgggtgtggacgcctacaataaggccttatagagtagtaaagatttag

SEQ ID NO: 28895 - DNA, 471 bp, Zea mays
  Peptide Sequence Number=SeqID_70674
atggcgatgctcaagtcggcggtgctgtggcgcaagcgcttcggcatcgacgagctcctgcgcgtcgacctcggcctgccggagctggagaaggtcaccgacctcaagaactcgccgcccatgctcggcaagcaccacggcgtcacgcgccaggctctcgcgctgctccaggacaactaccccgagtttgtggccaagaaggtgttcatcaatgtgccgtggtggtacctcgtggcaaacaaggtgatgagcccgttcctgacccagcgcaccaagagtctcacatacatccatcctcacacgtttgataacagatacgtcgcgccagagcaagtccccgtccggttcggcggcctgtacaaagaggacgacaccgagttctccgcctctgacgccgtcactgagctcaccgtgaaaccatcctccaaagaaaccgtcgaggtccccgccaccgagggctccacgtgctag

SEQ ID NO: 28896 - DNA, 324 bp, Zea mays
  Peptide Sequence Number=SeqID_70675
atgggtttgtgctccctcatctgccctcatctgctgcctgaacctagccctcttctcctcctcgcctcgcccgacgctgagtccggccctcaggtgcaaacttccgcctcgcccgacgctgagttcggccacaggcgcaatctccgtctcgcccgacgcttagttcagcctcaggtgattcgtcggccttgcccgagcacggcctcggctacctgctccactgtgaatcccgcgagcggccactccgccgactgtggcacatgtcaagggatggctcaaccaatgcctcgggaaggcttccgcctcgcccgagcagggctctga

SEQ ID NO: 28897 - DNA, 3492 bp, Zea mays
  Peptide Sequence Number=SeqID_70676
atggacgccggagcgggcgtgagcgcccccaccgccgcggcggacggggcgtacggactcgcccgcatcgtggcctggtgttcgtcctcgcccctcttcttctggctcctcaccgtcgtgctcgtcgccgccatccacatcgcctccgggtccaggccctccggctccaggacccatgggaaggagagggagaaggaggaggaggaggaggaggaggagaaggcacgccgcgataggttcgcggctgccgaggagagggaggtgtcgggcaggcgagacgaccgggttctggagatgatgcgcagtttcagcttcatgaaggccaccgaggaggatttcatggagggcatgacggcgtacgagtgcaacggccgcggcgtcgacgccggcttcgcgcacgggcttgttgcgcccgagccgtttgcgccgccgccggcgttgatggcgacgagcctcagcttcaagtttcaccaccagatacctgaaattccaacggagacgacggtggtttcgagggaattcacagcagcaagagaagaggacggacaagaacgagtggaagagaaggaaccacaaattcccttggaatcattggttccgttgcaatctgcagacaagcaagaacaccgacgagaagcagaggaaacagagttcttggtcgatgagcaggtagaagagcagagcagggaggcagcgccaccgaagatcgtcgcgaccacgcacaactatcagttcttgacggagcgcgacttccgggggttcgtcagggggccggaggccatgacggtgcgcgtccaggagtctttcgtgccgccatcgccgcctgcggcgcaccagcccgaggagcgacgggtggtcgacgtatcttcccgcaccggccggttcctcacggagagggacttccggccggcgaacgaccccgacgtgtgcgagagcgtggcgtcttccgggaagcggacgccgtcgctgcagtcgaagccagcgagctctccgtccgtcgcgtacatgggcggcgccgccgtcggcgggaggacgagcttcgcgtcggagttctccggtttcggcgactccgactccgagtccagcgccagcgacggctactcggtgaaggatctcgccgtcgactccgacagcgactggttcctctcggagaaggacttcccggcgtccgcgcgcgactccggcaacctcaagagttacaaagccaaggtgctcaaggcgatcgaggccctggagaccgcggcggcggccaagcgcgagccaccttaccaggactcagcgacaacattgtcgccgggctcggtccgacaggactcaccagacaccattcccgatggttcaccgaagttccctgaggacatgtggtctcgcagcccttcgccggatgtcgagtacaaagaggacgaggagaaggtaacacgagaagctgaagcacagtacgacggggacatcgaacagagaagcacggcggaggatgaggggggcgtcgacatgagcgacgacgagcactcgtcgggcggcgagaagggagaatctgcgccagtctatgatctagctcctgttgctgacaactgtatggatcattcggagaaggagatcatcgctctaaatgatcactcgggaggtgaagctgcttctgatgcgcaaagaagtccagaggcagtctctgcgagacaattagcagctgtaccatcggatcaagctgctggcccagccaagagaagtccggagccatcggagcaggaatttgttggtattgttgatcattcacttgagcacagttctgacgaccggaaagaaactgccagcgaaagcgatcagtcatatgaaatagtatttgatgacaaaagaaaacccgaacctccggagacaggattcctggatacagcagaggaagaatatggtggcacaaatgatcgttcaaaccatctcatttcttatgagaagaagaaggtgagtttcagtactacagatgatcggccatacgctgcagttgctgacgagaagagcgtcccagagactccagagcaaggattcagtctaactgaccatcgagatggagtagctcctgacgccacgaacatttcagagaccagagaagacgaggaacaagacagtgcagctcgacaggcctacgtttcagtcgccgggaaggcaaaggtgtacgacgaagatggggaggatccagaagtgaggtggaaggatctttcagccgaggaggaggacgagctggagtcgctgtgggagcaccaagacctgatagagcagctgaagctcgagctgaaaaaggttcggtccatcgggctgcccacgatcctcgaggagtcggagacgccaaaggctccgatggaggacctcaagccatggcggatcgatgccaagttcctgcgcgaagaccccatggacgagctgaacaagttctacaagagttacagggagaggatgcggaagtttgacattttgtgctaccagaagatgtatgcgatagacttcctacagctcagaggcccccagcaatccagcaactctctaaagtccctgtcgcccacggtggcatccatcctgtcgcacaatttccggtcatcgcgtcgcagatctccggaggacccgtcggagcggttcttgagggagctccgctacgatctggagacggtgtacgttgggcagacgtgcctgtcgtgggagttcctccggtggcagtacgagcaggcccgcgacctcccggagtccgacccttaccacagccaccagtacaaccaggtggccggcgagttccagcagttccaggtcgtggtgcagaggttcgtggaggacgagtcgttcaagggccctaggctgccgaactacatcaacaaccggtgcgtccttcgcagcctcctgcaggtgcccgtgatcaaagaggacagcttgaaggacaggatggaggaccagcgcaaggggaactacgtgataacgagcgaggagctggaggacgtcatggaagaggcgatgcacatcctgtgggagttcatcaaggccgacagggtcgagacgacgacgacggcggcgtccgtgctcaagggcctgtcgagcgctcacgtcgagctccaggacccttcggaccatgatctcatggcgcacatccactccacgctacagaagaaggagaagaggctcaaggacctcctcaggaccggcaactgcatcgtgaagaagttcaagaagcccaaggaggacaggtcgaaccagaacctcttcttctcgcaggtggacatgaagctggtggcgagggtgctgaggatgccgaggatcaccagcgagcagcttcagtggtgcaaggccaagctcgacaagatcgtcctggccacagtttacggagctcatggcgcttccatgataccaacattacctagaaattacaatcacgcccattttcaatcttttaccactggtccatcccgactatgccgcaaggcaatttttaactgccctgccattcctggccctggatga

SEQ ID NO: 28898 - DNA, 174 bp, Zea mays
  Peptide Sequence Number=SeqID_70677
atgtcggtcgacttgtggtttggtggtttgggtctcaaaacaacccagcactacggatggcgggttttgctgagtttgggcttcaaaactcggcggtggcggttctggagggaatcggtggcggtacgcgacatgatcgcacagggtgtgtcaaggcgaagcaactccgtgtga

SEQ ID NO: 28899 - DNA, 267 bp, Zea mays
  Peptide Sequence Number=SeqID_70678
atgggggcgggggccactgaaatccaggctccctctttcgtcttgcttgcctgctgcgtgctgcctacgcactcactgagctactgcaggctacagctgctcgtcgttgggccgggcgttagtcgagccatttcacgcgccgtttcaacggttggtgtttctggaaaacacggtgtcgtagcagtcagatgtttgtaccctgaactgttttacaaccgcgcccgtgaactttttggttttacttttggtgtttctagaaaaacatag

SEQ ID NO: 28900 - DNA, 292 bp, Zea mays
  Peptide Sequence Number=SeqID_70679
aaagtgcgctaggtttcactgcccgtgcctcgagcaccacggcggcggcggcagcgtcagcgggactgttctggccgacgacggcatcgacgacgacgagctcggcgcccgtcaggtggaggggcaccccggcagcccggagcagctcgtactccttgagatcacccgccggttcgtcgtcgtcgtgcgtttcttctggggcagccattgccgccggttcgtcgctcaggaggccatgctcaagacatcggtctcatttgtggtcgacggtggcttggataccctgttttga

SEQ ID NO: 28901 - DNA, 210 bp, Zea mays
  Peptide Sequence Number=SeqID_70680
atgtcgagatcattcccagcggcgttcaccggcggcaccgcggcgttcccaatgagacactgcagtagagatgaaaagggcagcgtcatgagcttcactggcttaaggagattaccgaacacaagtgacacagaaccatacaaatatcaaaataaggaacttacttaccaacataagctctccaagtttactatagaaactatagtctaa

SEQ ID NO: 28902 - DNA, 243 bp, Zea mays
  Peptide Sequence Number=SeqID_70681
atgaagattgcggataaggctacaacgagagcagtggctaaggatgcatttatgaataaagatctgataaaatctctagaattatctaggaaaaatcttgatattcaatctgtcaagagttcttttgtttctaatcatatgagtgttcctgattctgatatggataatattatccataatgaggatgagggtaacaatttgactgatctagaaaatgtgatggttctaagaaaaaggtcgtaa

SEQ ID NO: 28903 - DNA, 1440 bp, Zea mays
  Peptide Sequence Number=SeqID_70682
atgggtgaaacaatctcgttcgcccctcggaaggccatcaagtcccaagtcttggcaaactttgtggctgaatgggtcgacacccagctcccaacagctccgatccaaccggaactctggaccatgtttttcgacgggtcactgatgaagacaggagcaggcgcaggcctgctcttcatctcgcccctcgggaagcacctacgctacgtgctatgcctccatttcccggcgtccaacaatgtggccgagtacgaggctctggtcaacgggttgcgcatcgccattgagctaggggtccgacgcctcgacgctcgcggtgactcgcagctcgtcatcgaccaagtcatgaagaactcccactgccgcgactcgaagatggaagcctactgcgatgaggttcggcgcctggaagacaagttctacgggctcgagctcaaccacatcgcccgacgctacaacgagaccgcggacgagctggctaaaatagcctcaggaattgtccgcacctgccaagggtgtcaattctatgcaaggcagacccacctgcccgctcaggctctgcagaccatacccatcacctggccatttgctgtgtggggtctggacctcgtcggccccttgcagaaggcacccgggggctacacgcacctgttggtcgccatcgacaaattctccaagtggatcgaggtccgacccctaaacaacatcaggtccgaacaggtggtggtgttcttcaccaacatcatccattgctttggggtcccgaactccatcatcaccgacaacggcacccagttcaatagcagaaagttcctggacttctgcgaggatcaccacatccgggtggactgggccgccgtggctcaccccatgacgaatgggcaagtagagcgtgccaacgacatgatcctgcaagggctcaagtcgcggatctacgacgacctcaacaagttcggcaagcgatggatgaaggagctcccctcggtggtctggagtctgaggacaacaccgagccgagccacgggcttcacaccgttctttctagtctatggggccgaggccatcttgcccacagacttagaatacggttccccgaggacgagggcctacgccgaccaaagcaatcgatctaatcgagaagactcactagaccagctggaagaggctcgggacatggccttactacactcggcgcggtaccagcagtccctgcgacgctaccatgcccgaggggttcggtcccgagacctccaggtgggcaacctggtgcttcggctgcgacaagacgcccgagggcggcacaagctcacgcctccctgggaggggccgttcgtcgtcgccaaggttctgaagcccggaacgtacaagctggccaacagtcaaggcgaggtctacagcaacgcttggaacatccgacagctacgtcgcttctacccttaa

SEQ ID NO: 28904 - DNA, 264 bp, Zea mays
  Peptide Sequence Number=SeqID_70683
atgggggcgcgacaacgtggggaaaacggccagccggggagtaaaataaggccaatcatcgggcactcaaccgcggtccacgtccgcggcccggcgcgcgacacggcgagcggcgcgtgcgggcgggggccctgccttcgaccccgagcgcgacggcgcacgcgcgtggagggcactgggggctcgctcgcggtgggcgggacgggggccgggccggctttggtgggcggtgtgggcgcccgtgccgcccgcgatctgttctga

SEQ ID NO: 28905 - DNA, 726 bp, Zea mays
  Peptide Sequence Number=SeqID_70684
atggcagccagccagccaaaagggcgccgcttttttcttgggtggagtttcttgcgggatttcgggtacggcaggcggaaaaggccaaagcttgcagctggttcttggaaagggggtcgcaagatgcacgcgctgccggctgctgctgcagccctgcccgccgcacggcaagcgtgcgaacgccaagaacagatggggaccacgagaaggcgagtaatccgaggcaggaacaggacgattagcgcgaaattggaccagcgcacgagaaaccccctaatcctcgaccacgaaattcaagaatgcggaagagctaggatgtgtgggccaagggaaaaccataccgacgcggcgaggctgctggacgccgatcctacggtcgcagcagcagaaaagaatgcatgctcgatgggaggaaagagagagagaaagcgaacgagcgattcggccgaggaaaaggaggcctccacctcgaggaaatctggaacctttccgagatttctttcacccgttctttgttctctctctggctcggttggtggcaactggactacgcccgagcccagagcccaggccggagaaacagacacacgaggtgggagaagatatggattgggtgaatccatatctcacacccaattccatggtgggattaagggtctgtttggttgggctgtggctgtggaaaaagttgttgtgggctgtgagctgtggaaaaagctgctgtag

SEQ ID NO: 28906 - DNA, 219 bp, Zea mays
  Peptide Sequence Number=SeqID_70685
atggaggaggccatgagggagcagcaagaaaggtttcgtaaagagggatctggggttttgagccacaacacgccaccactggtgataccagcaccaggacaagcttgtggaggggaggaaactactacagaagaaactccaaaccagatagacgacttcgtaaacaacttcttcgcttctggaggtagtggtcacaactcaaatgacccttatatgtga

SEQ ID NO: 28907 - DNA, 573 bp, Zea mays
  Peptide Sequence Number=SeqID_70686
atggctctggttctgcccccacaggccgtacacgcaggctgccgcgtccgcccctcggtcagctccacaacctcagctccactctcgcaggctgccgcgtccgagcctggcatcatcacccagccactgcccctcggtgctgtcgcgcccttctcagcctcggtgcggctacaaggacccaccgcgctggatgtgccccctccgctgcgtcctcaaccgccgtggcccatcgactccaccgccgttgtcggtcctccgccccaccacctttcaaccatcgtggcttccccgatgagggcgacaggaccgctgcgaggacccgacgcgctggatgtgcgcccctcctttgcatcctcgaccgtcgcgtttgtgaaccccgatctaaaagacggagagagggttcgcggcgctgtacacgaacaagggcccgactgccgcttctgcaggtactcatcgcgggagcaggtgctgggcgaggtgcgcaagctggtggagctgtactacaggcggggcgagcaggtgagcgtgacggtcaaaggcaatagcgtgggcagcgtgctggcgatgatgtga

SEQ ID NO: 28908 - DNA, 438 bp, Zea mays
  Peptide Sequence Number=SeqID_70687
atggacaagaagctgagcgagcacttctctgcctacgacgagtacaggaacttcaacaactggctcagtgtcatgaattttattagtcggttgctcttcaaggaattggtatgcactaacaagaacaactctcaatttgctttcctcaatgtatctgccagtttctttggagaactgataagaaagaaaatagtgagatttacagttacagtaaatgacatgaaaagaacactgcaactaaagggggcgctcaaattcagattgtgggatgtgaagcaagaacttccattttgtcaaccatttgtctgcacgatctctacatctagacaactggaagctaagcgagatctcgtcgctggtgtcgtctacggcaccgacttcttcacgaagaggaaaattcaagacagtagaggaatcttaattggacagattgagtag

SEQ ID NO: 28909 - DNA, 471 bp, Zea mays
  Peptide Sequence Number=SeqID_70688
atggtgtgtccaatttgcacagataaggttgatatgaacttgattgtccacatcagctcacagcatcgaggtttcttgaagatcaagctttcatatttgacccctgagattcatgtccaggataagtggagaaatcagcaaggttcatctggggtgcgttattcaacacttgccttattgaagaaagatctacatgagaggataagtggatcatctcgtgctgccccagtcagcacggtgcctgatcctctactgtcctcttttgttggtagcttttatgaagtcgatttgccaaaggatgctaaaaaagagtccttggttgagacagaagtgagaagtgataacatagagcagagagcagcggagagctttgatgagcctttgctccctgaggtgaaggaggagaaaaccaggaggagccaatttgtgcaggggcttgtcttgtccctgatgtttgatgacatcttatga

SEQ ID NO: 28910 - DNA, 294 bp, Zea mays
  Peptide Sequence Number=SeqID_70689
atgtttagagggacgagcaccaccgacacacaagaacaactggcggatttcatgaaggaccagttcgacatcctaactaagcaaaaggtgatcacctacgccaagttgtaccctaaagaattcgacaagatgccgctaccacccaagttcaaggaagatggggactaccccttccaagtcaacatggtcgatatatcctcgatcaacaaaggaaaaggtgtggttgatccatgcaatggccctttagaatttaatctagaagagcacacatcggcagaggtgaaggaccggtga

SEQ ID NO: 28911 - DNA, 171 bp, Zea mays
  Peptide Sequence Number=SeqID_70690
atgaagggcgaccgtgagatggccgatgaggccattaaaaagaacgaaaaagaatctcacgacgcccgagaagaagcaaagcaagctgaagaagctaccgaacgtgccatgattatagccgacctttcgccaccaccggagcatacaatcctgaagcagacccggttatga

SEQ ID NO: 28912 - DNA, 420 bp, Zea mays
  Peptide Sequence Number=SeqID_70691
atggatatggaagtgtacgagcgcctcaccgccgaaaccagtcactaccgtggcacgcgtttcgatgcgctgatcgggctcgacgaggtggagcctagtgacgaggaagaggatgaggaggaagaagagcgagcggcgggtgccggggctggagacgagctgctctgcccgttctgcagcgaggagctggacgcggtggggctgtggtgccatatggacgacgagcaccgtgctgaggtcaatgccgggctgtcaatattagatcttacacgtatagttgtcatctttcggacgtcgagggtcctgctctttgcatatagcgttgaacaaggtgcttatgcttatgtaccaaacattgtttggaggctccttttagttgttaagattgagattttagctgcaaatgttgtgtttttctag

SEQ ID NO: 28913 - DNA, 291 bp, Zea mays
  Peptide Sequence Number=SeqID_70692
atgagactcgacaaccccttccaattgcgacatcctatggggcccaaggaacaaaggcccgctcggagaaaccccaagacaccccgatggaagggccctaaggagcccaacaaaccaagtcttccgaagacacgtctaatcgcctcgttgtatccctggatcaggttctcgaaagccatcaacgatgcgccaggaggaaggaggagggtcggcccagaccagggggacgaccaacgaagaacagaccacaagatactcgacgatttagctgtagtgaacaccgatacatag

SEQ ID NO: 28914 - DNA, 543 bp, Zea mays
  Peptide Sequence Number=SeqID_70693
atggcttcacctacccctgcaaatggtggagacacctgctttagctttgactacctttcccaagagggctttccctctattctatgggaggtgttgagcgcagctaggtatcccacaccgcctctatacacagtgcagctgtacgaggagcaccgggtgccacgctgctccgagaccgtcggatttagggtggatgacactactgaggcagcaccattgaaggctctaacaaccttttgcggataccactcactggagatgatgatgcacccgcttggactcttccccgctgagaagatggatgatctgatgtggtgtgaccgagtggccacaccaaggatgtgtggtatgcatactgacctggttgggaggatcattatccagtgcatgagtgtgttgtatcgcctgcaggccctgcaaagcgatgttatggcacatttgactgtgctagctcagactgccaagatgaccctcgatgacatggacgtcttcatggttgatttatcctttaagttggtggataaggatctccaaattgagtag

SEQ ID NO: 28915 - DNA, 462 bp, Zea mays
  Peptide Sequence Number=SeqID_70694
atggaggcatatgaggatagcgaggaggaccccgaggagatcgagatagcttctagcctagacaccgctcaatctagaggccagcgctgcctctgctactcaggattgcctggtgcaatattaagtctcaagctcaaaatcaaaatttacgttgccatttaccttacaatgattaagttactctgtaaaacgtgggttttgagtataatagtggaaagaaattcctattttacaaatggtaccaagagcgcgccgcggggcaaaatgagcaagttccccaccaccgtcgcaggctccaacgatgtatggactaatggcttagcagaacaaaattctgcgatagttggtgcagcatcggctccagcctcagtatttcagtggtgggaacaacagcgttcgcaagcagcttctacttatgatgggttcctgagcactcagccgtcgctgttcaccaagggctga

SEQ ID NO: 28916 - DNA, 270 bp, Zea mays
  Peptide Sequence Number=SeqID_70695
atggcggctgaaagagcgccagcgacctggtggcggggccgtgcggggggcctcgtggcggggccgggtggcggcggcctggcggcgattccgggtggcggctgcgcgagggcagcagcctggtggggggccgcgggggccgggggacggcagtgcaggcgcggcggtcagggaaacgacgacggcggcctgacggctaggtggcggcggccgcgatgcaggagcgggagcacggcggccagcactagagcatctgaggaagaagattga

SEQ ID NO: 28917 - DNA, 137 bp, Zea mays
  Peptide Sequence Number=SeqID_70696
gacacccctggaccatcacctctatatattgggagccgctgggaagtcaccgcgagaaaaggagaggagaagaggtccacttcgtccgctgccggagtgcaccgtctaagcggtcgctcgacgttcaaggggggaag

SEQ ID NO: 28918 - DNA, 533 bp, Zea mays
  Peptide Sequence Number=SeqID_70697
atgcatgagtatgaaatttgtggaaagattgtcaatgatgctaaggtctggaggaagttttgccactctccggcttcgacggggtttgaagttgctgggcacagttttctttcttcgcttgttaacttgggagcctccaataaagtagtcgcctgccttgtaacactttgcttggagacttgggaagttgctgcacaagttgttaaagacgaagaggatgctaagcagaaattatgtgatgacctaaaccatctagtccaggagagtgctgcttcccaatatgcaagattggaggagctgaagaaacgtttagaatctctaaatcccataagggattctgttaatgtgtcaggtgtttatactgcacagcatgctactctgaattcagtacctcagcaaccaactgcacaaaatcctgcagatgtaactgggccgtcagatattgccacaaagcctgcttctatgcaacagcagcctatacctgcggaggcagaaaaagaagagagaccctcgaattcggcaagagggaaggg

SEQ ID NO: 28919 - DNA, 378 bp, Zea mays
  Peptide Sequence Number=SeqID_70698
atgggaaagaagcaagaaaagatggtggcttttcgcatcactccggcgacaagcgcaagcgcgagccgactcctccctcggaggacatcagcgactcaaaatgactcccaggggatcaccgcggaggtatggacttacatccgggccgtcgagcgcgccgggctcgagggcttggatgagtcagagtactcctcgaacgaggagaattcctccgacccgtccgaggagggcagcagcggcgatggcggtgacgacgacggaggtgacggtgacggcggcggtgacggcggcaagggcggtgacgacagcgacaagggtggcagcgacgacggcggcagcaagggcagcagcaagggcagcaacaaggccagtggctag

SEQ ID NO: 28920 - DNA, 426 bp, Zea mays
  Peptide Sequence Number=SeqID_70699
atggcgcatcagaccggtctggagcaccagtcgaaagcctacaaagcaaagattagttttgattggtggggtatttataggttctcacaactagtcattggtggcacaccagtggcgcatcggaccggtctggagcaccagccgaaagcctacaaagcaaagattagttttgattggtggggatatttatactccatccaccagccacattcattgtcgcgcaccggatgttgtgagaaagattcttatgccctgtttggaaatgcccttagtgtgttgcccatcgagaagtacgaccatatcgtcaccgtgcttcgtcaaatggacctttccaccactatgccaactcaaatattgggaaagatcaatgctcatgagatgtacatgcacatcaacgacaaaggtagctcttcttccaagatgtag

SEQ ID NO: 28921 - DNA, 177 bp, Zea mays
  Peptide Sequence Number=SeqID_70700
atgactcgccccgtcgcattaactccgcggcgggacaggcggcacctctggcagaagaagcgggcgacgcttcgccttcaccataatgaccgcgtcagtaaagggaccggtaaagggggatacctcgaaaaaggatccttccccgtgaaggaaccaggctccgagcctccctactga

SEQ ID NO: 28922 - DNA, 1443 bp, Zea mays
  Peptide Sequence Number=SeqID_70701
atggcacgtctgcttgacccatccggtctccacttcgtgggctggctcgtcaccgcgggctccattggtcttgccgcactcatctacgctctcctcaggctgcagcgtgaggcggcgttgtactggaccaaggcgaccagggagaagcgtgccgcatggaggagattgcggtgccctagctcctgccactcgtggtctgaggactacttccacgagaaggattgcaagtgcgttgcacaggctggcgcttcgcccttgctgcatcactggtctgagaggtgggtggagctggatgacaacccggagatatcctcctcctgttactactgtgatgagccgtgcggtgtgcctttccttggagtctctcctatatggcgttgcctgtggtgccagcggcagatccatgttgattgccatgcaaaactgttgaaggaaaccggaaacacttgtgatcttggccttctcaggaggcttatagttcctccccaatcagtgaaagaaattggtcaaggttcaggaattagtggaatgctgaactcaatcaaggacgggtttgccaattcaacagttgggaaccgtaggaggtcacgcaacaagaagcgcatgaataaccatcctggtggcaagataaattccattcccacaaaattctcagtcattgattcagtgcttgaaggatttgctagattgaagggcctggatgggaagtatgcactagcaaagcctttatctcaacattctgtaaagcaaacatatcgatctgttattcctaatggacgagtcagaaagtatgaacttgttgatttgccacaagattcaagaccactgctggtattcatcaatggcaagagtggaggtcgaaatggaccttctcttagaagaaggctgaacatgttgttgaatcccatacagatatttgagctaagtgcttctcaggcacctgaagttggattacaactattccacaatgtgaaacacttcagaatccttgtttgtggtggggatggaactgtagcatgggttcttgatgctattgaaaagcagaactacgaatctcctccccctgtcgccattcttcctctcggaactggaaatgacctatcacgtgttatgcgctggggagggggtttatcttctgttgaacgacaaggaggcatatatgcacttttaaatgatgttgaccatgcagctgttacagtgcttgatcgctggaatgtaaccatcaaagagaagaatggaacagaaggtattggatgtgatgcaaaggttgcttatgacttccacaccactagggaggaaaaaccagataaattttgcagtcagtttgtcaacaagcttatatatgctagagagggtgcaaaggatatgatggataggtcatgttctgatttaccgtggcatgttagccttgaggttgatgggaaaaacattgaaattccggag

SEQ ID NO: 28923 - DNA, 249 bp, Zea mays
  Peptide Sequence Number=SeqID_70702
atggtgtataggagttcggtcgctttgagatgcgtaacaccctacgtcctggtcatgcttcggaagtcaccattttgcactgttggacttcgaacttcattgggtgcaccaaaagtgatccccatgagtgtaacctctaccttcgagagcatttttgcgaacaatccactcgaaagtcatctcttcaagatttatctaaaatcactttcatcttccacttgtgcttttcagaggtcggccttgtcttga

SEQ ID NO: 28924 - DNA, 377 bp, Zea mays
  Peptide Sequence Number=SeqID_70703
ggaagagatctctcacaggctctagggcaagattcgtacgttttggccgctcagcagagggaagaacaggggcagaagcaaagagccacgtgttcgacgcgctctgagctcgccagagcacgcccgacgcgcgcccccgcgtgccccgcgtcgcgccaaagccaagccggcgccatggcccacgcccgcgcctataaagcacccagggacttcgaccgtacccctccgcacgcgctcgacctcaccggagcccaaaaccaccggcatttgcccgtgcacggcgtgcccgcggccgcccgatttcccttcaccgtagaccggccaacagaaccctttccaaccccgtccaaccctcggagaagactgtgcacacctcg

SEQ ID NO: 28925 - DNA, 1224 bp, Zea mays
  Peptide Sequence Number=SeqID_70704
atggagcccaaccttcaatccgcactggaggaacaaacgaagattcttcgcgcgctcagtgcccgcctcgctgcccaagaagcgcggtggcgcagttgggagtcgaaagtggcgcaccattcggtgtcgatccacgaccttgaggtagcagtggccactgtgccatccgcgacgttgaggtcggagcgagacgctcaggtcgccgcgacccgcgagtgtctggccgtggtcgctgacgactggggtggcctcttcggcacaggcgacggctgtatcgtcgccgataactggggtgggctgttcgagtatcctgctcacttccaggaggaacaggacatcgacaactgcatccccatcaatgatggcacccgcttcaccgaggaagacgacgacaaccaccccgccacgctcgaaccactgctcaccgacaccaccaccgccgccgaggtcgattccatcgccaacaccgacgatgtcgaggctgactctctcgcctccgcctccacggtgggggtcgccacatcccaggccgccgagatgcagctccacgtcgggtgggcgcgctggctggagggacaggccgactacctaagacacgatcggatgctccactccaatctagattccctcacttcgagcaaccacccgctgctccaggatgcctcagccaccaacaactcgcccacccagtactcgacagaatgcttcagccatgacatcgtcttgttgaggactatcagtgctgcgcccacaagcgaggaccgcgcgctgcagcagaggcgcctcgagtgcctcgtcgcgtggcccgagtggcggaggattggcggacggaactacatcatgctcgagcatcaccccaacaggatgttcgacgcgtgcgataggttctggcactgcgtcttcgcgctctatgacttcggctctgtgcagggcctgcagaggaagctggagcggctctgcctggcggggagcgcacctgacctggaagtcctcgccgtgctttcgggcctgcgcgcgcgaagcctttccgaccagcgtgccgctaaccatacccgcacgtccatgcggagcatatccacgaccgccaccccgttcagactctgctctacacggagcggctacatcgcaagcgggacttcgacgggcacgacttgcagcaccaggtcacagagctggatctcctccgagttcgagcactcctccattccgacccccaaccagaag

SEQ ID NO: 28926 - DNA, 519 bp, Zea mays
  Peptide Sequence Number=SeqID_70705
atggaggcgacgactgggttaattttggcgaacgacggcttccacccggtggtcccaggtgggcgcgagccaaggaggttgcaacggcccccgatttgctgcgctaaccgaggcgagcccgtgggttacgcgattcgcacggctcgtggtcaacgcagccgagaactccgccacttcggtacagatgagcggcaattgacgtgtgggtcccccgctagtgccacaaatcgcggacatcggcgcggatcatggtgtgttgtgcggcgcgcgcgccctcccgcggaatccgcgcgccagccggcgtggtccgagtcctgcgctcgtggggaagacggacctgcccaggggtcccacctgccggtgtcccaacggaggatcagcgcgagtgcccgcggagaatctcccctggatgaccgagcccaggaaatcagtgaggtgagcgaaggaaagaggattgggccacgaagtgggatggtgggctgcggtagaaggaagctgggcctatttccagtgaattga

SEQ ID NO: 28927 - DNA, 564 bp, Zea mays
  Peptide Sequence Number=SeqID_70706
atggcgccgaggtcaggaactggaagtctggaagattccatgagctacgggttctgtcctcctctccctcctaatctttctctgaaatggtatgaagcaagagcatttactgctgccagacacctctcaacaacatcgctatcctgcaccagacaaatgagatggggttccttggtttcgccaaagtcaggtgaatggtcctatgtcctccaaactgattctgtcacaaagaaaggtttaaatgcctataaggacctcattactacaggattgaacaagaagttttcgcaacctctgcagcagcttttcaaagaacttgcaaatggaacaaaacgacgtggagttggtgtgcaggggggggatgacgacacgggtcgatggcacgggggtggggatgatgacgcgacggaggtcacggcgggcgtcgagcgggacgacgaggacgggggtggggatgacgacacggcggaggtcgacgacgaggacgggggtggggaagacaacacggcaggtcgcgaacgccgatcgaagatagcttgggctccatgccgcaccggtggatag

SEQ ID NO: 28928 - DNA, 708 bp, Zea mays
  Peptide Sequence Number=SeqID_70707
atggagggcgccattcagggatcctccgcggctgtcgtgcccccatcctcgccccgccccactgccttcctacgagagacaaacggagtaaaggcacgcgcggggtcggcaaacgcggcgcgctcccctcctcagtccctatccaccggtgcggcatggagcccaagctatcttcgatcggcgttcgcgacctgccgtgttgtcttccccacccccgtcctcgtcgtcgacctccgccgtgtcgtcatccccacccccgtcctcgtcgtcccgctcgacgcccgccgtgacctccgtcgcgtcatcatccccacccccgtgccatcgacccgtgtcgtcatccccccccttgcgataggatctaggagcagcaaggcaccactggagtcggcctcaaccacctacccgctctcctctaagccgacctcgaagttgggggtgacggcgttgttccacggtgtcaccctgaagctgacgcggaggaagcggctcggggtcgcaagacgaaatgccctgggcgatcgccagcctatcgccccccgcgtcgtcgacctccacaacggcgcgtctgcaccttgcagggagctcgagtcgtcatcggcaccggatagcgatgttgttgagagacttccagttcctgacctcggcgccatggacctggacccagaggggatcttccgcgacgacagcgatgaagacgaagactag

SEQ ID NO: 28929 - DNA, 183 bp, Zea mays
  Peptide Sequence Number=SeqID_70708
atggcgctagggttctccatggcgtggattgtggcttctggctaccagaagctactgcagactaccaaacgcctagcttttcagtccgtagtgcgccatttcgtagggccgtcgacagcaggtgcagctgccaacgacatagagcccatggcactaggaaccctacgagggaattatatataa

SEQ ID NO: 28930 - DNA, 622 bp, Zea mays
  Peptide Sequence Number=SeqID_70709
atgacggactccgcctcgcctgaccccagggctcggactcaacctcgacgccggatgacggactccgcctcgcccgaccccagggctcgggctcaacctcgacgccggatgacggactccgcctcgcccgaccccagggctcggactctacctcaacctcggacgacggtctccgcctcgcccgaccccagggctcggactctacctcgacctcggacgacggtctccgcctcgcccgacccccgggctcggactcaacctcgacctcggaggagtcaccgcctcgcccgaccttgggctcggaccgaccacgccacaaggggggccatcattaccctactcctagctagctcaggttacggggaacaagaccggcgtcccatctggttcgccccgaagtgtagggtacaacggttgcgaaacctggaagaggctgaagccaggtaccttgaggtgctcaagaaggcatgcccggacctggcaatcaagtttcacgcaccaaaacctgaagacccatccgtggctcagatggacctcggctcgcaaccagttgtattgaagaagccaacagaaaaagggtacaagcatttaaaggtactgtacctcaaagggtatatcaatg

SEQ ID NO: 28931 - DNA, 357 bp, Zea mays
  Peptide Sequence Number=SeqID_70710
atggagctaataaagaagcgtttgaaggagtttgggatcttcctctcatccaggcttaaggttttaagaattaaaaagagatttcaggctggaccttttgaagttgaacccatccgtgtaactcattcaattcctgactgttgtggcttagtgcttcgctgtggtgatgggataattttccatactggtgactggaaaattgatgaatcaccagtggatggaaaaaaatttgaccgacaagcattggaggagctctccaaagaaggtgttactcttgtgtttgttggaatgtcactcaggacataccttgaagctgctttcaaggatggaaaggcaccactggattcatttaccttg

SEQ ID NO: 28932 - DNA, 224 bp, Zea mays
  Peptide Sequence Number=SeqID_70711
gattggacgcttgtggcgctggaatttctcgcctggcgtgtggcatcgccgcgggaccgccccgtgccgtgggcggtcgggctccagggcgccgacttggccaacaccggcgggctcaccaccgcctgggtgggtggcgccaccgtcgggccgcgctgggaggaagacagacctgggccatcagatccgaatcgtgaggataggattagatccagtaggggcgg

SEQ ID NO: 28933 - DNA, 198 bp, Zea mays
  Peptide Sequence Number=SeqID_70712
atggcgcagagtgtcttcttcttcgcagcagacctagatctcaccttcctgaagggaccccgtcggggaggagagatcctaggaatcctaactgattctacgcacgcgcggaccgtccgtgccaccaacgcggaccgtctggcctcagggccggactgtccgcgaggacattttctgtgttcaagagtccgtgtctag

SEQ ID NO: 28934 - DNA, 468 bp, Zea mays
  Peptide Sequence Number=SeqID_70713
atgggcgcaccggacagtccggtgcgccaccggacactgtccggtgagccagccacgtcagcagttgaccgttggaggcttgtcttcaagtggcaccggacagtctggtgccgcaccggatatgcactgttcactatctggtgcgcctctgacttctgcgctctgactctgcgtgcactgttcttcactgttcagcggtcagcacggcttttgcagtcgaccattgctcgagtagcctttgctccgctggtgcaccggacagtctggtggtccgttcatgcttcaacttcttctactgcgcagaaggcaaagagggccaaggtcttaacacgtaggccaaagcctattgggacggccgaagtgctgatgcttattgaaagtgcagaggctaccccgttagccacagaaacagctcctgcgatgccaatcgaagctagtgtaggcccggtcaaagagccggaatcataa

SEQ ID NO: 28935 - DNA, 471 bp, Zea mays
  Peptide Sequence Number=SeqID_70714
atggaactacgccatggtggcagggagcatgcgcgtgatagtcgccgtatcgctgagttgtcagcagaggttgaacgcttgcagcgagagattgtggagcggcatagggctattgactgggctataaattcacgatctatagcctgggattgtgaggtgactgcccgaacccaggtggaagagctaagcatagccctggaaaatctgcaagtgtataataatgctctgcatgaggaagtgcacttgttgtatgaccagctacatccgaacgtgccaccagaggttgcggcgatgggagctggtgcagcaggagcagctggcagaggaccttatggggagctaaatctctttagagcccctccttccatgaacaacatggatgatcgtcctcctgaagctagaagtggagcgggagcagccaaggacacgaccgacccgtttattgtagtagtaggttgtttccttatgtga

SEQ ID NO: 28936 - DNA, 636 bp, Zea mays
  Peptide Sequence Number=SeqID_70715
atggggatggggcatgcgcgtccctgcgaccagagggagtgccgcggctacaggggcgcggtttggccagggaggagcagccgacgctggagctggaagaggcttcggccatggggaaaacaaggggccggggaggaactcggctgggaggagctcgacgcaatggagcacggaggaaggagaggggtgcacgccatggttgcgcaggagcgagctccggcagcgcgcgtggggctggaacaccgagctggcagccggcgcgcagagagaggcgaccgaggaagatggagaagctcggccgagcgccatcggggcgagccgagggagaaaggaagccgcggcagagagctcgccgctcacgcggccgtggcgagcagagcacggcgggccagggcgagcagagagagcagaggagatccggctgacggcgtcgttgggcgagcaaagcgcgccgcgcagagaagactccactggagaatgagcagggagaacaaaggagctgggcgagaaatttcacgcgcgggcgccagggaatatgatagggccgagcaggacgccgagaggagggagatgaggggaggatcgagctcatcggctggggatagaggagcggctgggaagataagactgctgtga

SEQ ID NO: 28937 - DNA, 153 bp, Zea mays
  Peptide Sequence Number=SeqID_70716
atggcggcaccgtcgctggaggaaaggcagaccggggctcttagggcgctaggggttggtctggatagctggacagggttgaggcgacaaacggcggagggagagtcctcggcgaaccagagaacactccagcgagcaatcgcgcgtgactaa

SEQ ID NO: 28938 - DNA, 189 bp, Zea mays
  Peptide Sequence Number=SeqID_70717
atggccggagaacgactattcggtcacactgtggttcttcccaactccaacctatgctacacggagagaatggagagaatggtccttacggagaggtactcagaaaacaaccctagtcccctaaagtatcacaggatcatcatcgggataacatcatcatatcataagtattcacatcatggtcattga

SEQ ID NO: 28939 - DNA, 258 bp, Zea mays
  Peptide Sequence Number=SeqID_70718
atggtgggcggttggctgaggaggagcaggacgacggaggaggcacagcaagacgacgacgtccagcaggcggcgcagcaggacgacgacgaccagcagcaggcggcacagcaggatgacgatgacggtcagcatgacacctcaagttctggtgcctcaggttcaaggaatgtctacttgcgaggtcctgcgagtctccctcaacgtcccatacttcgggacaggcggccgctgattcggccggatgtggagaggcat

SEQ ID NO: 28940 - DNA, 108 bp, Zea mays
  Peptide Sequence Number=SeqID_70719
atgacggcaccaagtcctggggccaccacggcagcgcgaccagggctggatgctcctgtgtctgcacgaccaaggataatcccctacttgctgaggaggttgtcctga

SEQ ID NO: 28941 - DNA, 468 bp, Zea mays
  Peptide Sequence Number=SeqID_70720
atggcgcctgggattgtgaggcgactgtccaatcctgggtggaaaatccgagcctggccttggaaaacctgcaagcatataacaatatcctgcacgaggaggtgcatgtgttgtatgatcagttacactcaaacgtaccacctgaagttgcagagatgggtgctggcgtcgcgggagcagatgccaacaaggacctgtggtcatgatggggcagggacttctcggggtagtggggacgagaccccgatcccaccacctatacctccaactttggcggaggatattgctgcactattgaacactactgctgacaatacccagtttctccaggaaatggcgggaaaccagattcaccagcaaggaggccgatgccaaaatcaagctccgagagacactacttacatggaattctcagaaactcgtccccctatcttcattaaagctgaagaacctctagaggcggattaa

SEQ ID NO: 28942 - DNA, 243 bp, Zea mays
  Peptide Sequence Number=SeqID_70721
atgatgaaggggttccgtccagaaccatttgcctttgctagaaaacctctccaatccttggagaagcttctccgaaagatggatgaatatatcagagcaaacaatgacttttgccaaagaaggaaagatgcccaaagatatgtggagatgactaggggcttcggaggaaggttccactcaaagcatatcacaaagattcataattcaagccagcatgaagacaaaactagccagccccaatga

SEQ ID NO: 28943 - DNA, 807 bp, Zea mays
  Peptide Sequence Number=SeqID_70722
atggtggcactagcgaagtttgtgtgggcaactgcttcgtatggcggggagcccttggtcgaggtcttcgccaagaattattgtctccattggcagaaaaaggttatggtggcaagattgcacagtttggtacatgcacattcatgccaaggaactgggaagacttcaggtgaagttgcggagctcgtgccatgcgccaagaataaatgggggaattggttaaaccgtgtgtttgaggtgaatggccttcgctatggcccgtatcctgaggaggaatctgctgaagctggggatgaacgagggaagaaaaaggtggcgacgcgggtaggagaaggctgctcgaaggggaaggctgtgattacggcaacgaggaagaagcaaaaagttgaagttgaggtgaaaggggaaaacattggtgctattgtaacagtagtgatggaaaagaagcaccaggaatctgcgcggaagaagcggaaggcgccgctacggttcatggacccgcaacgcaatgtgaaggcgccacgccccagcgcgaagggctccaccgcagctgctatgatgcctctgcctgcagtggctgccaggagggtgccctcacctgcgagggctgacgaggtgatgggggcgaaatgggccaagattggagaagctagccaggagttgtctatggtcgactacttgatcgaagatgtgggcatgtttttttatgatggggctaggtctgggcaggtggtggcaatacctgcaaagccggttaaagagagggctcaagtgaagaccgcgatggtgactttgctggacccctag

SEQ ID NO: 28944 - DNA, 129 bp, Zea mays
  Peptide Sequence Number=SeqID_70723
atgaagtgttcgcttgagagcgcggtgaaaaagcttcggctatggttaaattttttaacagcacaacagtgcaatgtcaatgaatgttgtggtgggaaggtgaatcgccaaattgcctacacccgctga

SEQ ID NO: 28945 - DNA, 480 bp, Zea mays
  Peptide Sequence Number=SeqID_70724
atggtgtcctactcaccattgaggagcccacaaagggctgggtcttttcccaccctaatcctccacaagccaaccacaaagagagggggtgatacaaacttcttggagttgtccacaaccttggagactcccaagcaacctcaatccatcaaggaactcgaaggttccaagaataataagttcacaaaagaggtgtttgcaaaaatctcaagagatgagaaagagagaggagagcaaaacaaattcgagaatcacaagcacaaacctcacacaaagggctcttcaatcaagcgatttaggagcgatttggggtgtgtgagagaaggtaccttcggattcaggattaaaagcatacacgaggagaagagcatgattgtgacaaaggttgtcattgcttcgaagctatgcgcaagggagcttcggcttaatcgtggaaaaaggaaccgacttaaaggggaaaagactatccagtcctcatag

SEQ ID NO: 28946 - DNA, 390 bp, Zea mays
  Peptide Sequence Number=SeqID_70725
atgggcaagagcaagaaaggtagcggttcttcacaccattctggcgacaaacgcaagcgcgagccgactcctccctcggaggatttcggtgactcagagtactcggaggagttctcctccgggtccgagggatctccggctcccgtctctcccccggcgtcgtctgatgattcagacgactcccaggggattgtcgcggaggtctggacctacatccgggccgtcgagcgcgccgggctcgaggtctcggactcgtccgaggagggcagcagcggcgatggtggtgatgacggaggcgacggccatggcggcggcggcaggggtggtgacggcggcagcaagggcggcaacggcggtggcagcaagggcagcaacaaggccagtggctag

SEQ ID NO: 28947 - DNA, 1896 bp, Zea mays
  Peptide Sequence Number=SeqID_70726
atgaaagagtccaaccagctcgcgacttctttcatcacacccttcggcatgtactgctatgttatcatgctgtttggtttgaggaatgcgggtgcaacgtaccaacggtgcatgaaccacgtgttcggcgaacacattggtcgaacggtcgaggcctacgtcgatgacatcgtagtcaagacgaggaaagcctccgacctcctttccgaccttgaaacgacattctggtgtctcaaggcgaaaggcgtaaaactcaatcctgagaagtgtgtcttcggggtcccccgaggcatgctcttggggttcatcgtctccgagcggggcatcgaggccaacccggagaaaatcgcggccatcaccaacatggggcccatcaaggacttgaaaggcgtaaagagagtcacgggatgccttgcggctctgagccgtttcatctcgcgcctcggcgaaagaggtctgcctctgtaccgcctcttaaggaaggccgagtgcttcgcttggacccctgaggccgaggaagccatcgggaacttgaaggcgctcctcacgaacgcgcccatcttggtgcctcccgccgccggagaagccctcttgatctacgtcgccgccaccactcaggtggttagcgccgcgatcatggttgagagacgagaagaggggcatgcattgcccgtccagaggtcagtctacttcatcagtgaggtactgtccgagaccaagatccgctacccacaaattcagaagctgctgtacgcggtgatcctgacacggcggaagtcgcgacactacttcgagtctcatccggtaactgtggtgtcattcttccccctgggggagatcatccagtgccgagaggcctcggctcccaacagctccgattcaaccggaactctggaccatgcttttcgacgggtcgctgatgaagacaggggcaggcgcggcttgctcttcatctcgcccctcgggaagcacctacgctacgtgctacgcctccacttcccggcgtccaacaatgtggctgagtacgaggctctggtcaatgggttgcgcatcgccatcgagctaggggtccgacgcctcgacgctcgcggtgactcgcagctcgtcatcgaccaagtcatgaagaactcccactgccgcgacccgaagatggaagcctactgcgatgaggttcggcgcctggaagacaagttctacgggctcgagctcaaccacatcgcccgacgatacaaggagactgcggacgagctggctaagatagcctcggggcggacaacggttcccccagacatcttctcccgagacctgcatcaaccctccgtcaagatcgacgacacgcccgagcccgagaaggcctcggctcagcccgaggcaccctcggcccccgagggtttctactggccgaccgtggtggccgacgccactagaattgtccgcacctgcgaagggtgtcagttctacgcgaagcagacacacctgcccgctcaggctctgcagaccatacccatcacctggccgtttgctgtgtggggtctggacctcatcggccccttgcagaaggcacccgggggctacacgcacctgctggtcgccatcgacaaattctccaagtggatcgaggtccgacccctaagcagcattaggtccgaacaggcggtggtgttcttcaccaacatcatccatcgttttggggtctcgaactccatcatcaccgacaacggcacccagttcaccgacagaaagttcctggacttctgcgaggatcaccacatccgggtggactgggccgccgtggctcaccccatgacgaatgggcaagtagagcgtgccaacagcatgattctgcaaggactcaagccgcggatctacaatgacctcaacaagtttggcaagtga

SEQ ID NO: 28948 - DNA, 765 bp, Zea mays
  Peptide Sequence Number=SeqID_70727
atgggccttgccaaggcggagctgcgtgagcccagcacgctacaggtggaggcatcggctgcgggcaggataggcccccttgtggccaatgcttctccagtttatgatgtgccatcctttgatgttatcatctcttctgcaagtctcagcttttcactttttggtattgttgctaaccttcttgaaagatacatgctcagacatgttcttgaaaaatgtatgagtgaagctggagtggacggggctgttattgttcaacctattaatcatatgtttgatcattcgttggtaactagtgtgttgaagaaatacccatccaagttcgttggttgctgtcttgcgaatcctgcagacgatgggactgggattaaacagcttgaacatctgattgtacaagaaaaataccgtgctgtgaggttcaacccaaacttatggccatctggtcaaaagatgaccaatgaggttggaaggtcattattttcgaaggcaggagaacttggagtaccatttggaataatgacgatgaagggagttggtccatatattcaagaaatagaggaactgtgtagggattatcctgcaactaccgttattcttgaccatatggctttctgcaagccaccaaccttatgtgttgcattgacatacaggaacgatgaagaagagaaggcattctcttcatttctaagcttatccagattcccacagatgaatatgatcatgaaaaatattatcccttatccaagcaagccatcttcagtatga

SEQ ID NO: 28949 - DNA, 228 bp, Zea mays
  Peptide Sequence Number=SeqID_70728
atggccgcttcttcctcctgcaaggtcatcgactcccacctgcacgtctgggccacgccacagcaggccaaggaggagtacccgtacttcccaggccaggaacccacgctgcgtggcgacgccgacttcttactcgaggtcttcacgcccgccaatccgacccgtggaagcggggatggattttcctctggcgacggcgagttcaggataagtgttacgcttatataa

SEQ ID NO: 28950 - DNA, 243 bp, Zea mays
  Peptide Sequence Number=SeqID_70729
atggtggtggtggcggtggagaggagcagccgcctccttgttgctgtggtcgcgaaggagaggatgtcgcgagaggcggtagtggcgcgggggcacaggaacctgcacggggcaaccactggtgatgatgacgataaagccatagagtccagtcaagccgccaccgcccaccggccactggccaccgccaccagccactccgccccggtgtctggtactcgtgggacaggcggacaacgctag

SEQ ID NO: 28951 - DNA, 558 bp, Zea mays
  Peptide Sequence Number=SeqID_70730
atggcgtttgtagaggagcggcttgggcggcgtcgcgtagggggagaaggcggcggcgtcgaagaccccgcgcgcggcatcgggttcgccgaggcgggcgtagcgggcgacgaggagggacgcgaggtagccattggcggcgagaccagagacgacggcgagcgcgtggggtcgtcgagggtcggcggcgtgcggggaggaggtgatggcggcggcgagggattccttgagggcctggtagcggacattcatctcacggtcacgcttatgcctcccaaccccattgttggacgacagcgccagccgccctgtcacgacggcgccatcagcggcgctcggaccgaagccccattcccatgcctaatctcaaatccgaacgcagtaaccagtagcagtgataattggggttcgccaaggaaggtccttaccgagattcaaggtatgatgaaccccacccacgacgtgcgccggagtcgtgtgcccggcgacgaattccggccgcccaagtggtcgatcctttcttccccggccacgaacgacaaccagataacccaatga

SEQ ID NO: 28952 - DNA, 1713 bp, Zea mays
  Peptide Sequence Number=SeqID_70731
atgcttgcgtccggctcctgcgcgcccgaccgccacacgtaccacctcgccgccacggcctgcgcgcgcgccccggaccttggcctaggccgccgcttcgaggctgccgccgcggcatgtgggctcgcggcgtccgacctcctggtggccactgcactcatcgggatgcatgccgaggccggggacatgggcgccgcgcgcagggtgttcgacggaatgccttgccgggacgctgtggcgtggaacgccgtgattggtgggtatgcgcgcgcggggcacctgtctgaggctgtggagctgtttggcatgatgaggtctgcggttggagcgtgcccaactgaggccacgcttgtgagcttggtttctggttatgccgtgttcggttcttggaagggccatggcatgatgcacgccgctgtgattaagtctggcttccagcgcagcctcttcgtttccaatgctctcctggagatgtacacagagttgggttgtttgagtgaggcattgttggtgttccggcagatggaggtgaaggattctgtgacttggagttcgatgattggtggacttgtgcggagtaacaaaccgggttatgctgttaggcttttccactggatgctctcgaaatcggaggtgttggtcacacggtctatcttgctcaatgtgatcttggcctgctccgagttgggggactggagagaaggaaaatggattgaagaaaactttgtcatgtgtaatggcagtgaattcaagagagatccctctgtagtaaccagactgatatatatgtacgcaaagtgtggacagttaggttcgtctgagactcttctacatgaatccacagaggttagatgcgatgtggttgcatggaatgccctgatcaaagcctgtggagagcttggactagtggaaaaagcaatcgggtttgcgatacaaatgcataggacaggcatttacccagacaacgttacattcttggagattctacatatgatctcattaattccatcactgaaaaaggggatggaagttcatgctcacattgttaaaagaggtttccagaatgaacgggcgattgctaattcacttatttacatgtatggtcgatgcgggagtctcagtctttcagttaatgcctttactgggattatggataaggatgcaatctcttgggcttctatgatgcaggtttatgcatggagtggacttgcaccagaagttgttaagctttttgagatgatgaagaaaacaaaagtacaacccaaccactacactttaattgctgtgttgactgcctataaaaacacaggtcttgttgaggagggaatgggcctgcttaagtgcatgaaagagcagtatggtctggagccatttatagagcatgtttcatgtgttgttgatatgctctgtcgtactggacgcttgagtgatgcatatcacctgatccagagttcccactctgaacatgcaagaaaccctaaattgtgggggacattactaagtggttcccgttactggggggatttggtgattggagaagcagcagctaggcatctctcgtctttggatccaggaagcaacgctaactataagatgctggctgatatttatgtttcaactgggagaagggacagagctgaggatgttctgagaatgtcgatgtcaaaagaactggacttgagaccaggctgtagctggactgaaggtggctaa

SEQ ID NO: 28953 - DNA, 1086 bp, Zea mays
  Peptide Sequence Number=SeqID_70732
atgacgacggcggttctcaaccccctacggaagcaaggagacgtcagtaaggtcccgacaaccccaacagctgtgcttctacagggctcaagcgctcctccgacggccacgacatcacatgcacagggcactagcacctctccgacaaccacgttggcatggccctcgtacgaggaggtggccgcgcgggaggacgggctggcggacaagctctcgccctctccctcgcgaacgcttgcggtggccaatcccgccgccgccgacgacgacgacgacgaagcagcagcagcagcacaagcgcttcggcgggtggcccatgcccatcccgtgctacctcgatcggaaggaacagcgaccgcgatccagctccacgactcgcgcctgcaatggaacaagcagaggcgatcgaatcggtccgtgtcgcgcgtgccaggactcactccgatctggtcatctgggttcaccggagtcgtggctgcggcgcggccacgtacgcgcgcgcgcaggggtctttgccaccatccagaccagactccagaggagcttctcagtgtccgactgtccgctctgcacctcggcgtcttgttccggccgagcaggatccgatcacaggccggactgtgtgcaccgttgcctagggctgcgtactacggggccatacccgctttggaaactcaaccttttgtgcatttgcaaatggctagaattaaaatggctgctagattggctaccccgacatcttcgagtgtcgtggacaaagtggaaactagaaccactaagacgacactcgaggtgtcaaccgtgactgcggccactagagtcgaagcccaagctgaagaggaaaaggcgaagaatgttctggctggtcttgataaagatgagtccgataaaggtagtgaggaagaagctgtgtttgaagaggatggcaacgacatccggctatacatgtccaaacgggctatgtatatcgggcagcccatggcacgatatgtttttggtccgtcacgagcacgacatgactcggtggtgggcaggcctaggccaacacgacccgttattcatgtcatgcttgggtcattggtgtga

SEQ ID NO: 28954 - DNA, 874 bp, Zea mays
  Peptide Sequence Number=SeqID_70733
atatatcaacgagaaccgcgagaaaacactcaccgcggacaaggccctcgcggcggcgtcggcgccgaaccggagcgccgacgtgccgttcaccgcttacaccaatcccgacaccggtcgccgcgtccggagctccggcgggttcacgttcccggagctcagcctcagcgccggcatcttggacgagccaccgcgcgtgtcgttggaggtgttccgcccgatcgacgaggactcggtgatgcccgcggaccctccgctcgccgccgccgccgtgccccgtgtcgggctacccccgcgcgctccgccggcggcgctggtggacgaggaggcgatgagcgacgcgagctcggacctgttcgacctggagagcttcgcggcgtcgtcctcgtacccgaccacgtaccgcgggcgggggagccggcgcaactcggccgacgacgacccgccctacgtctccgccgcggcggccgccgagccggcgctcagcgagtgcatgtacccggccagcgaggcgagcgtggtgtggagcgtggccacggccgagggcggcgcgttcgacgcgggcagcgtcgccaacttctccagcgccgcgtccgcgtgctgcgtcgacgacctccgctacgtcgtcccggagtcccccgaggccggcttcaccgccgccatgtcacgcagcgcccgccggaagaagagcggcggtggcggcggcggcgggttcctgaacagctgccggtgcgagaaggccgtcagcgtggggcccacgccggtgcgggtggtccggccgccggctcacccgggcgcggccgccaagatgtcgtccggtgacggcgcgtcacggtaccaccgcggccacgctcacgtgccggtccggacgtga

SEQ ID NO: 28955 - DNA, 267 bp, Zea mays
  Peptide Sequence Number=SeqID_70734
atggtgaatccacgcccccagatcgcctcctccctcttgcccatgatcctgttgctacccgacgggtctcgctgcctctgcggcaacccatttgtttgtttcgtctacccgctgctgccgctgctagcggaaacgagcagctggacagtacctccgttggttcgagatagcttctccatgattggttcggctcttgggggtatagcaggagcgttttatggtttcaaccatgctcattacgtctatgtgattgtgatttgtgagtga

SEQ ID NO: 28956 - DNA, 627 bp, Zea mays
  Peptide Sequence Number=SeqID_70735
atggcgtcccctgtcgatgcgcagctcacacaggcgctggaacaacagacccgcgccattctcacggagctcgacaaacggttctcggcgatcgactccaagtgggaactccgcgtcggcgcgctggagtcccaggcggctgacttcgcccgccactccgacgaatttgcctctgccatccgcgcggacgtcgaagctcacctttcggcggccgatgcggatctcaccgatcgggtccgctattgggaggccactaccggagcgcgcgtcacctccctcgagtccgccctgcacggattcgaagcttggcgcccccggatggaatcctccatcgacgccctccaatccaccatggattcagttcacgccgagctctccaaagtggagatccagtggtcacatggggcgcgcgtcgaaggcttcaccaagcccggcatcctcggcgcgcgcggatcggcgccggtgggctcctctgccaccgtcgaccacgctgacggctcacgttttgggccccgcttcgcttcttctcaccgggaatgtggatttgggccccctgtggccgatctccactacccggtcaagggaagctgcggagccttctcgtcggccggagttggttcgggttga

SEQ ID NO: 28957 - DNA, 216 bp, Zea mays
  Peptide Sequence Number=SeqID_70736
atgggcaagaacaagaagggcggaagttcgtcgcaccactctggcgacaagcggaagcgcgagccgagccccctcttggaggacttcagtgactccgagtactcggaggaggagttttcctctgagtccgaggggtcgccggtgtcctcctcgaggggggtgggctcgcgcgtctgcttgacgtccgagtggagcgctgcacttccgcccaattag

SEQ ID NO: 28958 - DNA, 258 bp, Zea mays
  Peptide Sequence Number=SeqID_70737
atggtgctgcttgtgagacccttcgccagcatgtgtgctccctttaagggtgagcatgccatcatcgaacgactgcttggtggcaccctaagggtctgcataagaccacattccatgctaatgatgcaccgtctgcttcctcggtctttgcagatagatacctcttcccttttattgtcagagcttgttgcacccacgatcaaggcgtgttataatgcaatcgacttggtcatggactcatgggaacaagttggttaa

SEQ ID NO: 28959 - DNA, 393 bp, Zea mays
  Peptide Sequence Number=SeqID_70738
atggccgaggggagcaagagtgaagatcttgcgctagctagccatattactttgggaaatcaactatggaaagaggtcatattgaagctaagaaaggaaaggtcaaaagaagaaaagtgctttaaaaccccctttgagtgcttcgaagcagaaaagagtgaaaattctggcaaattggccaaaccgtactataccaaaagggcgacagtaatatctgtattctcgactatcaaggcgggaaagggaaaaaagtcgaagaggagggaagtgactataattccaactcaggatgaagtacccctggccagcatggagctgacggtgtcgagcaatgagcaggaacaaccgaagcttacatctaccgcaatacggtcccctcaaaagggaaaataa

SEQ ID NO: 28960 - DNA, 228 bp, Zea mays
  Peptide Sequence Number=SeqID_70739
atgcggaagctcgtccccaaccggcattctgggctccacagtggttctaagagattcacggtgttgctggaagtcctcgtgcccgggagcgaggagatcaaccacgaatggcgatcggagttcttcaccggacatcagggcccgccgcggcttgtgggcagagagttgtatggcactaatcacggtgaggaagcctcttccgagttcgtgctgtccttcttcgcgtag

SEQ ID NO: 28961 - DNA, 417 bp, Zea mays
  Peptide Sequence Number=SeqID_70740
atgggcaagagcaacaaacgcaagcgcgagccgactcctccatcggaggacttcggcgactcggaatactcggaggaggagttctcctccgagtctgaggggtctccggttaccgtctctcccccggcgtcgtctgacgattcagacgactcccaggggcttgctgcggaggtctggacttatatccgggccatcgagcgctctgggctcgagggctcggatgagtcggagtactcctcggacgaggaggactcgtccgaggagggtggtggcggcgatggcggagacgacgacgacggtgacggtgatggcggcagcaggggcggcaacggcggcagcaagggtggcaacggcggcagcagcaggggcaacaacggcggcggcggcagcaagggcagcaacaaggccagtggctag

SEQ ID NO: 28962 - DNA, 1551 bp, Zea mays
  Peptide Sequence Number=SeqID_70741
atgtccattggtgatgtgtgtcctaaggaatccgaagagccaccacatgcacaagatcaaccgtcttcctccacacaagcatctccaccaacccaagatgaggatggagctcaaaatgatgaaggagaaaatcaagatgttgagccacatcaagaggagagcaatgatcaagggggagatgcccataatcaagatgaggaagatgaacaagttccaaggccgccacacccaagagtccaccaagcaattcaacgagatcaccccgtgaactccatccccggcgatattcaaaaggggccacacatggtagaggaagcactacaagattcggattgggtggtggcgatgcaagaggagctcaacaacttcactaggaatgggccggcaggacacgggctgattcgggatctgggggtgcaaggtgagtgggtcggcggcggcacgaaaagctccagtttggggcctgcgacgagggtttactgcttcgtccatcaggtccccgtctgtggcgtgtgcatatgcttcccggaacatcagctatgtgtgatatggccaccttctagcattaaagatacaggttcgcgccttcacactgaactgaaagaagcgatagtccagactggaatggagaaaaatgtatttggaaatcattatgtgacaatagctaaagctgatactcagacacctcctgcttttgcatcagatcctctcaaaactttatccaatcgtgatgatagagaatttaatagtgcaaatgcagctaaagatgctgctttgccatcaacattacattctgggatgtactcttctgctgtaggatctgagacaactattcatgttgatccagaaattgttgaaatagagggttctagtcctgtatcgacccaattttcagtgcaggactccaacttcatcaggagtccaagcccacatgggcctggtgctatgacaagaaaaggcgctaatactgttgatagacaaaattctgagatttcttattatgctgatgatgaagatggaaataggaaaaagtatactaaaagggcatcacccatccggctgttcgcctttgatggtctccaatccaaattaatcctctactctaattatggggcaatggtggtggagcgtggccagtggggcctgcagggccgcgtgttccttggcagccttgcggacgacttgttggagggtggcatggcagtggcttgtgaccacgaagtctggtcgtcgtggggtgctttgctgtggtcacgggttgcgaggcttggtgcggtggaggtggcgtggagtccagtggccgccgctcacgatgccatcttctaccagtccagcttcatcattgctctggccaaggtgtggggtttggtggtggtttgtgggctacacgcggatgagctagtgttgccttcccaacctagctggccatcactcgctgccaagacaagtggcctgggaggccgtgacgactcctgcaatctgccatcctcccgctatgcccatattgcctgtgactgtaacaattgcaaagaggaggatgcggactgctag

SEQ ID NO: 28963 - DNA, 420 bp, Zea mays
  Peptide Sequence Number=SeqID_70742
atggaactccccgccgcgtctgttgccccagtaagctccgccctatcacccgccacctggaacgccccttggtttgccttctccccctctggttcgtccggtctgcgttcaccggagcatttcttgcgcagccaaagaaccgccgttgtcgacccacgtcctcgcctcgcccgagccttcattcgtgagcccctaagtctccacttgaggtcaccccaacctccccagctatccggactgaccccgaacgccataagaactctagtctgcctcgcctccgacgacggcgtcgtcgtgcccacggggaggcgccgcctctggatgaccggcgaaggcaatatctcagacgcccatcttaacccctcgttcctaatcagacggcccgatttcaataaacccgatctaacccaggccatctga

SEQ ID NO: 28964 - DNA, 183 bp, Zea mays
  Peptide Sequence Number=SeqID_70743
atggggttgggcgttcggccatcattgtgccctccaggttctgcgggtgttcgtaggtacccgctgaagcgtgttgtggtttgctgcgcgggacaatggggtgtggcgctgggaactccgagccgctatcactgcgtcacggcggacccgcctttcgccacgattggagcatgcttcacgtag

SEQ ID NO: 28965 - DNA, 171 bp, Zea mays
  Peptide Sequence Number=SeqID_70744
atgactacaaaacgtagagtagggtacggtgaaacacgggaaaggcatctcaccactgctagacgcacggatggactcaaccgcgggagcttgcagtctgcgatagatttcggtcaacggccagatgaagcccagggacaccacaccaaggactgggtcgacgggaagtag

SEQ ID NO: 28966 - DNA, 519 bp, Zea mays
  Peptide Sequence Number=SeqID_70745
atgagactgcgtggtggggccacctctgcggaagcctccccacccacgatctcttcgtgccggtgtaacaaaaagccgccacgcccgcaacaaccttcgtcgcacacccttggaatctgtaggctttccccctgcgcatataaaacttggggaagggctctcggccgcgctcgtcgtgttccaaatcaccgagaaactcgccaccatttgagagttctgcgagagaagagattgggcgttgacgacgcgttcctcgcctcctgtgccctggctgccactggtttggagtcgatcaccgtcggggaagcctgcgcggaggtgtcactgtgcgtcggccgcttggaatcgaccctgtggcgccagaattcgtcgccgcgtcaatttatccaccgagccgcgtgggtggagcggggtactcatgggatcacgaggtgtacgggagtcgcgatcccttggcagatgggtaacatgacttgtgggtacatggtacaacctctgcagagtgtaaaactggtatag

SEQ ID NO: 28967 - DNA, 477 bp, Zea mays
  Peptide Sequence Number=SeqID_70746
atggccgactggcgtcccatgccatggctgccgggtgggtgggtggccctcatcacgagcattggtgtgggtggccctcattgggcccccatcgcgggcattgctatggcaactatgaactcggcccatttttatattacacagaataatagaactgctctttgttctatgagtgcttattcgagcactaacacaatggtactatattgcagactgttgaatattcagattggtgaggcatcaaggcgagcatggcttggcgaggaagctgatccacagtactcagatcgactgctcagaccatacaagaggcccgtggaggtttatatggaccaacaggattcaaggtggtttatatccaaggatgcaattgtatctggccttggtcttctaggcatcaagcagggtggacctgagacaacgttgtctaagcctcgtcgaaagagagtcgtccgcaaaaaggtcgcttcaggttga

SEQ ID NO: 28968 - DNA, 711 bp, Zea mays
  Peptide Sequence Number=SeqID_70747
atggccagggtctcactacgaggcttctccctagagtcctcattacgcaaatgctggaaatggtcaaactgcataaggcacacctaccgtaaccaacttatagtccagactacagggagtgactgcataaagttaagttgtagcaatagcatagctacgaaggaggaagggcagggtggtctcggcataggtgctgcgtggacggcgaggtacgctccggcgaggctccacgggcggtccgagcactgcagggcagtggatggtccagcgtcggcgaaggcgcggacgacggaacgtgctctactgcgagaaggaggaaggggcaagcgaggcacaggggcgcggggtcgggtgcacggcgtcgcactggttcctggcggcgcggtcagcgcggtcgaggttggcccggctggcgcgtcgggggaagctgcaggggcgccgggggggctcgaggtcctgggcgcagggtgtcgcgcccggctgctcggcgcggtcggggctggggcgctcggccggtgccctggcagcgcacctgggagagagaaacgagggggaggagagagaggagagagaggcggcggctggctgggagagggcgtgcgcggcaagctcaccagccagggagcggcggctgtgagaggagcaggggcggcgctaggtttaggtgttggggatgttgggccctggtgggctttagggatttttatttaa

SEQ ID NO: 28969 - DNA, 781 bp, Zea mays
  Peptide Sequence Number=SeqID_70748
gaggaagggcagggtggtctcggcagaggtgctgcgtggacggcgaggtacgctccggcgaggctccacgggtggtccgagcactgcagggcagtggatggtccagcgtcggcgaaggcgcggacgacggaacgtgctctactgcgagaaggaggaaggggcgaggtggctggggttgagtgcggatgacggggcacgagctccgacgagctacgtacgacggccgacgaacacgtccgggcgaggtagcgatggagaaaagcttggacaggggagggagaagacagaggagctcggcggattttatagagagagggagagagatgtagggtcggccggggtgaggaacggacgcgcggcacttggggtcgcttggtcttctgttgttgctcgatggctcggcttcatggcagcgaggcacatgggcgcggggtcggggtgtcgcgcccggctgctcggcgcggtcggggctggggcgctcggccggtgccctggcagcgcacctgggagagagaaacgagggggaggagagagaggagagagaggcggcggctggctgggagagggcgtgcgcggcaagctcaccagccagggagcggcggctgtgagaggagcaggggcggcgctaggtttaggtgttggggatgttgggccctggtgggctttaggatgggtcgagcgcgtgggcgagcgcgaaggggggagaggcgaggcggccggagccgagcgtgagagaggtggaagtcccgcggccttcgtgttcgtcccgcgcccaggtcag

SEQ ID NO: 28970 - DNA, 231 bp, Zea mays
  Peptide Sequence Number=SeqID_70749
atgcctcccaagcgcaagtccccggcgacgattgcccctgccgcggggtccccgaggaagacgcggagcatggttgctgctgctgctgcagggaagcgggcaacggagcctgctccggcgaaggcagtgccggccaagaaggaagacgaggcggcggttgccgagttgaatgggaggaagaggggcaagaaggaagccgaggcggtgacggtggccaccacgaatctctag

SEQ ID NO: 28971 - DNA, 183 bp, Zea mays
  Peptide Sequence Number=SeqID_70750
atggcggtcagacgggggattcctgcattgctcttcctagaaaccgtagcgggttttctgaagttagtggtactttataaaggagaagaacaggtggtccaggaggagccgtacaacgaggagtacgatttgatccaggtggcgtctcccagtcaactttatgacgccatggatggacattag

SEQ ID NO: 28972 - DNA, 546 bp, Zea mays
  Peptide Sequence Number=SeqID_70751
atgaggtttcgcagaggcagcaagagctctagcaaggccaagaagggcgccgccgccgctccgtggcagaacggagagcgcaaggtcgacggaggagggcccggctccaacagccggcaggtcgcgccggacgacgacaccggcatcgtcggaaacgtcgacgacggtagtagcagagacgagacgttctatgaagccaccgcctggttggaatcagactgcgaagatgatttctacagcgtcaacggagatctgacgcctgcgagatcgttcgcatcccgatccagcggccggaacactccgccacctagaccccgcgatctaccgacgctggcggcgatcctcaaggccgaacccctgaagccgcaaaggaggctgggcgacctcctgcgggaggcgcaagacgacgatgacgacgacaacgacaccgccgtcgacggcctctccagagacgactccttgcgcatgggcgcggaggccaaccggtgctgcgtgccgcggctcgcgcgggccattagctgcaacgggaggacgcagcgcaagtga

SEQ ID NO: 28973 - DNA, 336 bp, Zea mays
  Peptide Sequence Number=SeqID_70752
atggccgaggcttcaccaagtctcgtaggtcatgatcgcgactttgtctggacggattacgttccgggttctcgtgggtcggtttggggagtttgtgtcctcacgtcaatggcgtcgccgttcccggggcgcgccaccgtccgcaggtggccgatgtgggagggatgcatcatggcccttagatttgggatgtgcaatcgcagattgatgactccataccccttcgctatggaagctcgggcatcgttggattctgtttggatggatggaattagaagtagaaatccccttcaggccattaattctataccatcaattagaagatcagtggtatag

SEQ ID NO: 28974 - DNA, 504 bp, Zea mays
  Peptide Sequence Number=SeqID_70753
atggcgtcgcaaacaacggcggaggcgcagaggctcgacggggcgacggtggcggactccggctgcgcaagaaaacgctccggtgagcatggaccgggcgcagcagggagggagaggggacaccgaagggtgtcccgggtagctgacagcaaggcgaagttcaccgtggcactggacgggacacgggcgcaacggcggccacggaacaaacggtgggcatcggtgggcagtggtggagctctcggttcgcgtgggcagagcgagagagagggcgagggagctgggcagagggcgcaaatgagagaggggaggtgggcgagcagggtgtggggctcaaaaggggcgcgggggctcggacgtggctggggaacgcgcggtcgtgggcgtgtccacggcgaggagatcgtgggcgagagggttttcaattcaaattcaattcaagttttaaattcaaaccaaatcaaatatatgcaacaattcaaagaatatttaggctcaatatga

SEQ ID NO: 28975 - DNA, 234 bp, Zea mays
  Peptide Sequence Number=SeqID_70754
atgcaggcggcatgcaactgcaccacgggcatgcaccctttcgacttcgatgcatccagcatgaaggcccaggcctacgcgtcatggaccgagaaaggggatactccgaaagggatccttctctgcgaaggaagcgggccccgagccctcctactgatcaggggttcgaaggctggcccctcggtagggttcgacagccaccccagagcactcgggctctgcgtccactactga

SEQ ID NO: 28976 - DNA, 408 bp, Zea mays
  Peptide Sequence Number=SeqID_70755
atggtgaagcgatggcttcccctcgaggccaaccccgacgtcatgaaccagttcatgtggggactgggggtccccgaggacgtggggttctgcgacgtgtacggcctcgatgacgagttgctcgccatggtgccccagccggtgctcgcggtcctacttctctacccccaggaccggagcaaggagtcccaagcttcagctacctcgtcggtggagaccaaggagcccagcaagaacgtatatttcacaaagcaaactgttgggaatgcctgtggcacagttggtattattcatgcactggggaatgctacttccagaatcaagttaggtgaggggtcatattttgatagattttataaacgaactgctgacatggatcctatccaggtttacatattaagtgggtga

SEQ ID NO: 28977 - DNA, 450 bp, Zea mays
  Peptide Sequence Number=SeqID_70756
atgcccgacataccgagggatgccgccgagcactcgctggacatccgagccggagcccgacccgtcaagcagcctctgcgccgattcgacgaggagaagcgcagagccataggcgaggagatccacaagctaatggcggtggggttcatcaaagaggcgaaaggcgtcaagctcaatcccgaaaagtgggtcttcggggtgccccggggcatgttcttggggttcatcgtctccaagcggggcatcgaagccaacctggagaagatcgcgaccatcgcccagcaccccgagcccttgttggggacacccgggggctacacacacccctgggaagggccgcttgtcatcgccaaagttctgaagcccggaacgtacaagctggccaacagtcaaggcaaggtctgcggcaacgcttggaacatccaacagctacgtcgcttctacccttaa

SEQ ID NO: 28978 - DNA, 198 bp, Zea mays
  Peptide Sequence Number=SeqID_70757
atggggatgcgctggttttgctggttatttttggtgtggagtttgtcctacttccgggagttgcttggcttggtggcgcccagaattagtctggaagcagggtggagtgctgtctgcgcagaaatctgctcaccgggtgccaggaaacaggtggctgtagagaattgcttggggattcgtcaagaaacgacccagtag

SEQ ID NO: 28979 - DNA, 516 bp, Zea mays
  Peptide Sequence Number=SeqID_70758
atggccggcgcggatgcctgtgagccggtgctggccttctcattcctgttcgcccttcctccgtctctctccatccgtcgccccagggcacgggcgcggccgccacagtcgtgggatccacacgccgccgcgtcgggcctctacccctccccgcgatggctgccttcctccccatcggcgctgccccaccggatcaggcaccggtggcccctcgcctgcctgcgcgcccgccagcggagcagcggcggcggccgggctaacctgcctgcggcccttgtccgccctccagcgctgcagcgctccaccgccgcggcaggcgagctcttccctgccacaagcccctcccctctactcccgggcacgcccgatggcccctcctcgacgtctgtgccccccacgcgcagcgccccccagccttcctacgcatcctgcgcgccgctgccccccacgcgcagtgcccctggccttcctgtgcgccctacgcgcgccgccctcctcatcgcgctggccacctaa

SEQ ID NO: 28980 - DNA, 1389 bp, Zea mays
  Peptide Sequence Number=SeqID_70759
atgtcaaaagctgcacttaaacatggtcatgttgtatttcatggttttccctcgtattacagtacccagtcactatgttctgatacctttttcacaactttcttagcaaccagtgattatagacaatcacttcagtttcaacatctgaatgaggagaaacgaaacatacaagttgaggtcatcagaggtggtaagagattagtagcttcaatatttgaccttgttgttggtgatgtagttcccctcaaaatcggtgaccaagttcctgcagatggtatactgatatatggtcattctcttgcaattgatgaatcgagtatgacaggggaatccaaaattgttaataaggaccaaagggcccctttcttgatgtccggttgcaaggttgcagatggttatggctctatgctggtaactggtgtcggtatcaatactgaatggggtatgctgatggccaacctttcagaggatattggtgaagaaaccccgttacaggtacgcttgaatggtgttgctactcttattggtatagtgggtttgtcggttgctggtgctgtcctcgtcatcctctggctaagttatgcaaacttaaatgcctgtttcttacaggtgactattgtagttgttgctgtgcctgaaggacttcctttagcagtaacattgactcttgcatattcaatgagaaagatgatgcgagacaaggctctggtgagacggctctcatcttgtgaaacaatgggatcagcaaccactatttgcagtgacaagactggaactcttaccatgaataagatgacagttgttgaagcatatttgggtggggaaaaaatggatacttatgataacgccagcacgatgtgcaccagtgtgacagctctattaattgaaggaattgcacagaacacaacagggactgtgtttatgccagaggatggaggagctgcggaaattactggctcaccaactgaaaaagcaattctttcttggggcctaatgattggtatggactttaaggatgtgagatcaaaatcttcggttcttcatgttgtcccattcaattcagagaagaaacgtggtggtgtggctctgcaagtgtcagatacagaggttcacattcattggaaaggggcagcggagctactattagcatcttgcagaagctggctttctactgatggttctattcagcaaatgaattccatcaagcataacgaattcaaggaacggattgatgacatggcaatgagttcattgcgttgtgtagcttttgcatattgcccctgggaacccaaaatggtcccaatggaatctctagataagtggaagttgcctgaggatgatctgactcttattgggatggtcgggataaagcgttgtcgctgtgactaa

SEQ ID NO: 28981 - DNA, 1026 bp, Zea mays
  Peptide Sequence Number=SeqID_70760
gtacgcatggtcacaggagataatgttgaaacagcgaaggccatcgctgtggaatgtggaatattagacgcaaaagatgctgcatcagaacctaatgtaatagaaggaaaagtcttccgcgagatgtctgaaactgcacgagaagatattgctgacaaaattacagatctatatgccactgtagatttcatttatattaacaacaatatacttaaatcaatggagaggttacttcgaacccgcgacctggtaatgggaagaaggggccatgttgtagctgttactggcgatggcacaaatgatgctcctgcattacatgaggtcttttcaatgggaatatcaggaacagaagttgccaaggaaagctcagacattataatctgggatgatgacttcacctctgtggtcaaggttgttcgatggggccggtctgtttatgcaaatattcaaaagtttatccagttccaacttactgttaatgttgctgccctagttataaatgtgattgctgctgtgtcctccggggatgttcctctgaatgctgttgaggcactgtaccagatagcagttcttctcatcttcaattttgatggcaaaaggattcttcgtttacagaatggaagttgggagcatgctgagaaaactaaaaatacctttgtctttaatgcatttgtcttttgccaaatcttcaatgagttcaatgctcgcaagcctgaagagaagaatgtcttcaagggagttgcaaacaaccacctttttgtggccatagtgggtgcaaccaccgtgcttcagatagcaagggatcatagtcctatcaatacccttcattccacttgctcccaaacaagccctaagtattacactccgtcgcagattttgataatcgagttcctcgggaagttcttcgatactgctagacttgattggagactatggttgctgtcagtggctattggtgcagtgagaggtggggtcgtcaagaggcttatggcccaagtatcattagataagagtagtactggataa

SEQ ID NO: 28982 - DNA, 291 bp, Zea mays
  Peptide Sequence Number=SeqID_70761
atgggcgataaaccttcaaagtcgctgctacgggctctgtggtgcgtctcagagcccttccccgtggggggttcccgttctgctaatcttgctatcttccccaggagaaggttcgtatctcctttccgaaaagatgcatctattttcctatctttggccaaggagatgcttttccgttacttgactttcactagtgtgatgccgatctcttactcgaatgcttctgccactttaggaagggatagaggaaacaaactgggaataggaattgatagcggtagctgtagatag

SEQ ID NO: 28983 - DNA, 186 bp, Zea mays
  Peptide Sequence Number=SeqID_70762
atggcacatagctggcttctatcttctatcctatcttattatgccgacgcctttctcggccaaatgatagaggcgcttcggacagtcgaggtgcagtgccagtttcaagaaatgcgtatcgagataccagtatcgggctggtattggctcagggcccagcttcacctaagaacagcccttttataa

SEQ ID NO: 28984 - DNA, 528 bp, Zea mays
  Peptide Sequence Number=SeqID_70763
atggatcctaatgcaagcaagccggaactcttccacataattttcaaggcgacgcttggggccttccatgttatagtcagccaactctattttctcaggtacctgagaaagaggttgtgggagtatgcatgggggcagtctgttggtgacaacctgttgaactctgtttatgctatgggtaagtgtgtgcaagactttatggcggatgagaagattcacaagcctacgctgcttgggccgcattttgctttgctggtttggctgtatgagcatactcaagtgaggaagactgtcttctcggggaagacaggctttcgaggacaaaaggaaagatacatgaaaaaatcccaacttaaagtagtggaattgccaagcctatcgggatacgagccaatccctagcctagaagcgaggagagagggtatttcaaattcacaaagccaaactgacaagcgagagccggtgagtaaggtggaggcagaaaggaagttgtatgaatctctttttcccggaaaagtatacttgtga

SEQ ID NO: 28985 - DNA, 216 bp, Zea mays
  Peptide Sequence Number=SeqID_70764
atgcgccaagcagcaaaatcttgtgtgcacattcacaggaggctctcagtttcgccgcgctttactgtcgggggtagaagaccattcgtcaaccaacttcatagagggagggggcctgaaaaggtccagttcaccatcaagtgcttctcctgctacatgagaaggtccggcttccatcccgacatgatccgcagggacgttcgggtgcagttgtga

SEQ ID NO: 28986 - DNA, 327 bp, Zea mays
  Peptide Sequence Number=SeqID_70765
atggggggagagagagatgagacggcgggcgactgtggccgggttcggttggcgtcacggaaatggcgtggcacttctaatcaagccgcgctgccgaaacaggaggcaaagccgaccagcgtgcggcgagatgccgttacctggcccccagcaaatccggccggtgctccaccccacctggctgcaaagggcaaagcaaacccaggcgcgcgccggagcaggagccggacttacgacacgacgatgcgtgccgcgcgctcttccatcgcgctcacctctgtgcttatctcatatactgtactccccaagcgtgcgacccacgcgtag

SEQ ID NO: 28987 - DNA, 654 bp, Zea mays
  Peptide Sequence Number=SeqID_70766
atgaagacggtggtggcaggggaagctgcgcagaccaacgagaaggggcagcgctgtcactgggtgaggacgtgtgagcaagttgggggaaggaggagcagaggcggggaacgatgggaggaggccgagctcctggaagaggagaggcgcttgagcagggacttcaccggcgaggggaggaccggtgggaggaggccgagcagggacgacggagctggcggcgcccgtgaggaggttgaagagcctggcgcggcaaccggctcaacggagcgaccgacgtggactcctgggtttgcggcacgaaccactagcaggggctcggactcctgggcgcgcgatgtgcggaaccaccggcagggagcccgccgagcccagggatgggcggcggcgaacaggaagtggccgacggcgggggaggggcagcggtcgcgcccagatggcaaatatgcatggatcacagtcgcttatgccacaaatgcagtgttcggtatgggagccacaaatagcagcatgatgggaatgcagcagcagcagcaagggctatacgggaacatgcaggcaggtgcacagaacgtgccacagggtatggcgggccttcagaaccagacccagaatcccaacttcactcagcagaggcaacaaaaccaacaatga

SEQ ID NO: 28988 - DNA, 990 bp, Zea mays
  Peptide Sequence Number=SeqID_70767
atgacgcacccccccggcattcgctcgctcgaaaccctaaacctaatcccctccccttctcccgtggctcctacctcttgctccttggtgaccgacgaaatctcgcctctcccgccgacggctactgaggtgttcctcctcgcggtggtgctctcaaggcgactaaggtgctccggctgcgcagggaccccagtcgtcggcgaggagccatctgtctacggcatggacgatgaccttcatccgaccgttgtggacgaggagcaccggctagaatatcataacaaagcagaggatgcccggatcctatttggcagtagtgttgccatcaacatcgataatgatgatgatgtccctggtgccgccaccggtggtcaagcgggcacaggatccacgagcccgacaccgaccggcacaagcaccgccgccaccagttccacctgggccaccggacagtcatcgttcactgtctggtgcgccttctggcgctgctctgattctgcgcacttgtcggggaccataattaggggtaccctcaagacgcctaattctcagctggtaacccccatcagcgtaaagctgcaaaggcctgatggtgccactcgacagagtgagtctgacaggcagtcaggccttgccaaaggcgccacggcgaactccgctccgcccgaccccagggctcggactcgggctaaggcccggaagacggcgaactccgctccgcccgaccccagggctcggactcgggctaagacccggaagacggcgaactccgctccgcccgaccccagggctcggactcgggctaagacccggaagacggcgaactccgcctcgcccgaccccagggctcggactcgggctaagacccggaagacgacgaaactccgcctcgcccgaccccagggctcggactccgccctggcctcggccgaacgacttccgcctcgcccgaccccatggctcgggctcggcctcggcaacagaggatag

SEQ ID NO: 28989 - DNA, 531 bp, Zea mays
  Peptide Sequence Number=SeqID_70768
atgagaaggggttctaagggtagggttaaggagaaagctttggaacttgttgaacatcttagagcagtgggggaaacaaatgctctctttcaaagaaatcctgatggtgaacagttgtatgggatctgtgaagcaattgatgaagaaaaggatccagagtgcttgatgctttcttttcatgtagtggaagttgtcatggagctgtttccagatccatctggtttggcagcacagttcacaggggacgtttttgagattctgagcaagtattttcctgtctacttcacacacggagtgggtaatggtttggacactacacaggaagacctctctatagcattgatgcacgttttttgttcaacccaattttttgagccttttgtcatccctttgcttcttgacaaactttcttcctctcttccattggcaaagtttgattccttaaaatatttggacaaatgcattcgcttctatggagctgatagaatggttagacatgcatcaactgtttggtacaagttgaaagagtga

SEQ ID NO: 28990 - DNA, 393 bp, Zea mays
  Peptide Sequence Number=SeqID_70769
atgccggcgaactgcgcgctgatgctggcaaactgcgcgatgagcagatcaagtttggcggagaaggatgtcgtaggattggggacgccgccggccatattggcaaaattggcgcagaggattcttattagtcctcgtaaaattgactatcacactggtgtttttgcaagcaagattaccccagcaaaggatggtaagcctgttttgattgagctgattgatgctaaaacaaaagaacacaaggagacacttgaggtggatgcagcactcatagctactggaagggcacccttcaccaaaggacttggcttggaaaatatcaatgtcgttacacaacaaggttttgttcctgttgatgagcggatgcaagttatggatgcaactggcaatgtg

SEQ ID NO: 28991 - DNA, 192 bp, Zea mays
  Peptide Sequence Number=SeqID_70770
atgaaggaagatgaggcgaagaacaagattgaagaagaaaatgatcgatggagaccaaacaacgaatccacctcttcacaagatgagaatgatagtgaaagcgaaactgaggatgacgaggaaaatgaaagtgatattgaagatgatgacgatcttcaacaattcttcactcaactaagcaagaagaactag

SEQ ID NO: 28992 - DNA, 531 bp, Zea mays
  Peptide Sequence Number=SeqID_70771
atggagttgttgcccactgaccagatatgcagtggacatgaaaacattgatatggggattgagatgctgtcattgggatcatttaaaaccggagccattctctcgaagttgaagcatgcagttgccagtgagaaaattcaaggtgtcatccctggaacaaatagctcagctccacagaaatataattcagagaacatccaacatgagaacaagatagtatcccagaatataaacagtgctggtgactgcattggagattgcaaaaacagctccaacgccttttcttcaagggaagaaaatacaatcgctgaaaccagatgtccaacggataactcgaactcctgtcagtttgcactgagcaatggttcgcccattctcaataaccacagtgctccacaggatagcctcacttatggagataatgatctaaagtacattgattggcctggcattgacaattttgaggatgttgatacattattcagcaaggggtttgactcggccttatttcccaattatgatttttcctag

SEQ ID NO: 28993 - DNA, 1122 bp, Zea mays
  Peptide Sequence Number=SeqID_70772
atggcctcagggtcacggggcacgggcacttgtgcagcagcgcaagcagacaagggccacacattggaaatatcggtggtgtcgaacgaggcgcgggcgatgcacaacgtggggctggcggggctcacgttctggagccccaacatcaacatcttccgcgacccgcggtggggccgcgggcaggagacccccggcgaggacccgctgctcaccagcaagtacgccgtcggctacgtcaccgggctgcagggcgcggtgtccggcgccggcgccctcaaggtcgccgcatgctgcaagcactacaccgcctacgacgtcgacaactggaagggcgtcgagcgctacaccttcgacgccgtggtgtcgcagcaggacctggacgacacgttccagcccccgttcaagagctgcgtggtggacggcaacgtggccagcgtcatgtgctcctacaaccaggtcaacgggaagcccacctgcgccgacaaggacctcctgtccggagtcatcagaggggactggaagctcaacgggtacatctcgtcagactgcgactccgtcgacgtgctgtacaacaaccagcactacaccaaaacccccgaggacgcagccgccatctcgatcaaagcagggctggacctcaactgcggcaccttcctggcgcagcacaccgtggcggccgtgcaagccggcaagctgtcggagtccgacgtcgaccgggccgtcaccaacaacctcgtcacgctcatgcgcctggggttcttcgacggcgacccgcgggagctgccgttcggcaacctcggacccagcgacgtgtgcacgccctccaaccaggagctggctcgcgaggccgcgcgccagggcatcgtgctgctcaagaacaccggcaagctcccgctctccgccacctccatcaagtccatggccgtcattggccccaatgccaacgccagcttcaccatgatcggcaactacgaaggcacgccatgcaagtacacgacgccgctgcagggtctgggcgcgaacgtggccaccgtgtaccagccggggtgcaccaacgagggtgcagcggcaacagcctgcagctcgacgcggccaccaaggccgcggccagcgctgacgtga

SEQ ID NO: 28994 - DNA, 399 bp, Zea mays
  Peptide Sequence Number=SeqID_70773
atggacatgttcttcgtgctcgtcgagcgcgtcaccggctacggcggccacgctgaggacgaccagaaggacgcttcagaccacattggtgcagtcacaagcccaattccacagcggcccgaccagataacacgacggtcacattggagcagccgcaaaccctatccctatccaggaccagttatccccgacgcaaggtcgcaagccctctcggtctctccgtctctagcggcggcgccacattctcctctccccgacgcaagtctcgcacggccgcgccctaggtccagcactctagcttggggacgcgacgcccagacgcctgcggccctgctcctctgcgattcggccattcggttcggcaaggagcgcacagacaaggagcgcacaggcgactag

SEQ ID NO: 28995 - DNA, 162 bp, Zea mays
  Peptide Sequence Number=SeqID_70774
atggctaatctccaagggtcgctgccagcaactgccaactgcccagcattctggatggtattgacatacacaaagtttgaggagagtattggagcagagagctctataacatattacaacttgcaacaaaaagagccttgcctaataacatcagggagctag

SEQ ID NO: 28996 - DNA, 546 bp, Zea mays
  Peptide Sequence Number=SeqID_70775
atggcggaaacacacaactttctatgtatcttgttgcattgcagggctggatattcacgatggggagccgagaacgttctaaatggtcgaactggtgaaagaatgaaatccttggttttcatgggccctaccttttaccagaggctgattcatatgtccgaagataaggtgaaataccgtaatactgggccggtccaccccctcacgaggcagcctgtcgctgacaggaaaaggttcggtggagtcaagtttggggaaatggagcgtgattgcctcctcgcccatgggtcagctgccaacctgcatgagcgcctcttcatgctgagtgacttctcccagatgcacatctgccagacgtgcgagcgcgtggctaatgttgtcatgaggtctgtccccggaggcaaaaagatccgtggcccctactgtgggttctgcaagtcttcggagaacattgtgagaatcaacgtgccctacggcgcgaagctgctctaccaggaactattcagcatggggatctgcctcaagtttgagaccgaagtctgctag

SEQ ID NO: 28997 - DNA, 468 bp, Zea mays
  Peptide Sequence Number=SeqID_70776
atggaagagctacagaaagacagtgcgctaccatcaaatagctctgattctgagccagaagctatggaattggatgacaatggagcaggaaaatcccatagcatcgagggaaacagggattctcctatagacactgatgaaggccagccatctatggatgttgatattaagggaaaatcatctctcaacgatgatgttaatggaaagtcttcttctgagccattttccaatcctccaatcaacatgagtgtggaaagcctagagaagttttgcaaagaagcgtcgaggtccttctttgatgaagttggtctgattagccatcagataaattcctacaatgagtttgtctcgcatgggctccaggagctttttgattcgctgggtgaagtgattgttgaacctggctatgatccttcaaagaaaggatcaggtggatactttttggtcaagggaatggagaaggtctaa

SEQ ID NO: 28998 - DNA, 444 bp, Zea mays
  Peptide Sequence Number=SeqID_70777
atggggcctagaggaggacaggccagatcgtcagacccaaggccgccttcccccgcgcacctcgcgcctactcccccgatcccgcttctcttaaaaattattttcccaattagagaagacatctgctatgcttcaggtctacttcatcaggtaattgttagtaaatattatgtgactggaaatgatgctgggcggaggaacaaagaacgaaagggcctcccatggggagccccatcaccgctgcatatgacgagggcttgctcccctcctttgcgtggccaacttcaaaaactaccagtacgtagtgcgtcgctcacccccaccctcccacacacacacacaccattacattgcctcttaaacttgtacttatctaatggctatgtgttcagtagtggttctgaccccaagtcacagattcattggtactggtcagttacttga

SEQ ID NO: 28999 - DNA, 738 bp, Zea mays
  Peptide Sequence Number=SeqID_70778
atgatgattgaggtagcaatagcaaagccaataccttgggtcatgccccatcatcctcgccctcgccggtcctgtgggctcgtcgtctccctcccatgggagaacaacatcgtcgaatccggcggctgcgaactggaggtcgggccgcacctagtcctggttgagcaggtcgtcgaggcgttcggtgccgtgggggcgcgacggtcgtggcagcgaaggttgaggcagagggatcgtcgtcgtcggagggaaccgctcacgccacccaactctttgctcccccgctgcgaggatgagcttcgccacggtcgactccacttctgccccttccccggggtgccgggcatctatctctctgcgtcgggggcgagcttctccatcggcgaccgatctgcgcaccgagcttgcggcggcctcgtggaacgtggatctaggcaccgggggagtgcggcgcgcttgtcgtcgtcgatggtggtgtggggtggggcgtgggatctgggcaccgggcgggggcgccaacagcttctccaccggcggtgtacttgtgggacgtggatctggccgtcgaggggtgcgacgctcatcgtcgtcgacgagtgtgtgggggatctgggtactgggggaggggcggagcggtggatcggcctcgtgggcgacgtcgccgaaggcaaacggagcccaaaattccggcgtgaaaatcgcgtgcagccgatcgtgcgcgggttctggctcgggtag

SEQ ID NO: 29000 - DNA, 291 bp, Zea mays
  Peptide Sequence Number=SeqID_70779
atgggaggcctctccggcctctcctcccacaggctacagcttgaggaagaagaagaacagtcctcgatgcatcttcgagtgatgctcttcgatccaaaggtacttatactgcaaatacccctctctccgtcgcccccaagccgttttttctatagctcagagctgctggaatttggacctgactttgaaacatgccgtgtggccgtgtggggtttgaaagagatgacctgcattgcagttgcaggcagcagcgacaggccacagcccacagtattggtgaacattatttaa

SEQ ID NO: 29001 - DNA, 639 bp, Zea mays
  Peptide Sequence Number=SeqID_70780
atgcctggtctgaaggttggcagctggggcaccgacactggtggtccaggtgctcctgctcgtcgtcccgtcggatcacaggagcgatctgcgaggaagatggggaagggagatgaagaaacgtcggcggcggctgtgtgcgctagaaatgttagggtaaattgtggcacggttagccatgtttcgcacacagctgtggacgttgcagttgcggtggaggccatgcctggtctgaaggttggcagctggggcaccgacactggaaaaggaggtgttcatgctctgctcccaaccattcctgaaagtcccaacagggtagctatgtatgtaccagtccacaaaaacaaaggtgcatttgactttcgcaaagggggaggtgcatttgacattccgacgatagagcggagcaacctgcaatgcatcgactctgcgatctttctgacgacgagacgactgctgctcctttttaccagatggcgcggtgcaacctgccacacagacagacagacagacagacagacagacagacatgtgttgcgtatgctctacggcatggtgccggggaagggaaatggtataaagctccagacgaagctaccatatgattcgtattcctatcgtcgtatagacggatactga

SEQ ID NO: 29002 - DNA, 1617 bp, Zea mays
  Peptide Sequence Number=SeqID_70781
atggcggaggtgcatctaggtctgccaggtccctgggcggcggattacagggagatggccgaccactacaccactaagatcggtggagtccctgattggccaactggtgatatgggcttcaagcccgagactcttcagtgcagcttatgtgggaccaagctttgtcttgttgctcagatccgtgatggcacaaaacgcttttggaaggttctaagagttcaaaaatgccataatgttatgcaaacagaaggtggtggtgatgaattaggtcaaccgaatggaccttcttctacaagtcttccagaagaacagaatgataaaaataaaattcctgagacaaatgatgacgattttgatctagatgccttagccgaagcacttgaacaagctgcaactttggcatcaaactcaaagaagaagaacaaatcgaagcatgctaatgctcctgtaaaacgtcctgtattgaaggagcaagcatgtgatctgagcatacctggtgaggacaactttgaaacaactcgttaccatgaactatatgggggcaaaggcgctgtgggttcaagtagcagtgagttggttttggacaaagaaatcatggatgccgcaaatgacgaagaagaaaaatgggaaggagaaaagtatgagtacgatagagctattggtgctgacagaacttttttaaaattcaagaaacggctggatgcatatccccagcaatgctttaggtattcttatggtggcaagccactgttggctacaacaaaattacaagatcctggcacctgtaggctgtgtggttcaccacgccagtatgaactgcaattgatgtctcctttatcatactttctccatgaagctggagacggttcctcaaattatgcacccagcagctggacttggctgactgttataatatacacctgccccaagattccatcttgtcccttgggaactttgttagttatccttgtcacggcaatcttgaaagctcagtgggctgctacatgcacgtgcctggattgtcaactccaatcaagggtggccatgttacgcttgagcatcaagggatatgatccgcaacaaggaaacaaggtgctgccacttctgttcgtgccaagatcaggagacttttgttttaatagaacatctccagacactgatggccaacagcatgagggaactggatgtggtactgaaagcgatcatgatagatctctaaatcatcacgaggtgcaaggggtgcatcaggagtttgcatttctcatggcggtgggcagaggttgcaacaaaggtgctgagagtcggacaacattctgcaaggctcatggaggagggagacgatgccaagagttaggctgcaccaaaagcgtggcagggaagacagagttctgtatcgctcatggtggtgggcgctggtgtgggatcaaggaatgctcgagtgcggcaagggggaaatccggattctgcctaaaacacggtgaagggaaaaggtggaggatcgagggttgcactcgcggtgctgaaggtcattctgggctgtgcatctcacacggaggtggccgccggtgccagcacccgaactgcggtaagggggcgcagggaagcaccatctcttga

SEQ ID NO: 29003 - DNA, 226 bp, Zea mays
  Peptide Sequence Number=SeqID_70782
atgaaaagccgtatctgtctcggcggacaggacccgctcgtcactgagaccgggacccgcagagcattgcttgaccgctggcccgcctccgccttctccgacacattctacgaaccgcctcccactaccgctcattgccgccggtcgccggagacgcgctgcaccgccagctgtccgccttcgcccgccgaccccggcctgccgcagcttccccttcacccgccag

SEQ ID NO: 29004 - DNA, 534 bp, Zea mays
  Peptide Sequence Number=SeqID_70783
atgagccggtccgcgtgggccgtgttgccgaacttggtgacgcggcggacgaagagcaccaagaggcccgagaggagcaaacggagaggaatttcgaattggcaggtgctgcctccacctggtaacggtgggctgaaatactatggttgtgatcttattgtattgggagctgatcttattgtaatggcaataagtgtagttgatggatggactaatgctgacactaaacttatggagcatgttttgcttgtggtgttaaagagggctaggatggagcgtatgaaggcattggagaagatgatgaattccaaatcagcatcttccattgcgaatctggtggctttgatcatttctgtcatcttttgcttcttcatactttggcaagggagggcgtattgtggcggctacaagggaccgatgttcctatgtggcggtgacaacgacaccgtggagccaaggcaatgtcagcaagctgattttttagattggaatctatggttctttttaaagatcgaatatgttctagcatcttaa

SEQ ID NO: 29005 - DNA, 261 bp, Zea mays
  Peptide Sequence Number=SeqID_70784
atgaacggctctagagattcgttcttctacttgtttcacattgtgccagtgaatcattctctgaaaaaaaaacatgcaattgtccttttccatttcctgggtggacttcttgtatatgacattttctgggtgttcttcactccagttatggtcagtgtggctaaatcttttgatgctctgataaagcttctgttttctactgcggatgatgcacggccattctccatgcttggccttggtgacattgtaatacctggttag

SEQ ID NO: 29006 - DNA, 246 bp, Zea mays
  Peptide Sequence Number=SeqID_70785
atggatcttttgaaagctgctcgagggctatgcagatcctacatgcttcaagttccaagtaacagtattggattcaccttgaaggcttcccaccgatatggcatgtttcaagaatatgttctggtgagtgtatggcttacacagacctgttttgacaagagccgagcagcgatgcttccatttcggaccacgacctacctaaatgctaatggttccaaatgtctgaagtaccaaagacagggctag

SEQ ID NO: 29007 - DNA, 339 bp, Zea mays
  Peptide Sequence Number=SeqID_70786
atgggaagtagccctctccgggcagaatgggaatcacggcttgtgggtggttatgagattgatggttttggttatgactatggtgctgctagtccactacagccaaacaggatacttgctgagtatgttgatgtgtactcacccttgctctacacaccaaacaccccccatccccaggttgtcagcattgcaaccactgctcaggagaagatgaagccgtggaaggagacttccaggagttccaagactacgacgagttctaggtgtgggttagcggcaacccccagtcagctgcctgtgaaggccgcgtttatctacgtttctttttccgcactttga

SEQ ID NO: 29008 - DNA, 294 bp, Zea mays
  Peptide Sequence Number=SeqID_70787
atgacgacgatggttctcagccccctacggaagcaaggagacgtcagcaaggtcccaacagccccgacagctgtgcttctacagggctcaagcgctcctccgacggccacgataccgctgggcgtgttcgtttcggagggcgagactggcaagagaggcccacccgttggcacttcgggcaatggtgaagttgagccgacgcggggcgcctggctcgcctcggcctggtccggtagagaaggctgcacgctcgcgtctccgtccatgcaggcttacgggtggcttcctgcctag

SEQ ID NO: 29009 - DNA, 247 bp, Zea mays
  Peptide Sequence Number=SeqID_70788
atggggctatccgccgtggagcgggcgtacattcagcccgtcgagcacgcggggctcggcgtgtcgaatgactcagaggaggtctcctcggaggaggcagaggactccttggactctgagaaggacagcaacggtgagggcgacagcggcagcagtgacgacagcagcaggggcggcgacgacagcagcgggggcggtgacggcggcggcgtggtcaacgacgacgttgatggcggtggcggcgacg

SEQ ID NO: 29010 - DNA, 585 bp, Zea mays
  Peptide Sequence Number=SeqID_70789
atggtcgtgcccacgtccgcgcaattcccggccactacccccgcacccgacccctactcaaaccccctccggcctgctctaccatttcctccacttgtagatagctcccagcccaccctcgctcgtgcgttgtctcttccccgagctcggaggaccgccgccattcaccgcgcccgcacatccgttctgccgccaccgttgagtcctcattgtgcccattgtctcggtaagttccgcctcggtgtccacaactcgagacacgcctcaattttccccctccccctctggttctctctgcccgtgctcatcagagctttccctgcgcatccagaatcaccgccgtcgacccaggccctcgccgtgtccctgtcaccattcaagggcccagaatcttctctcaaggcccatgatcgtgttcgtcgcattcccccaaacctccatgagcccttctcggcgtcccggcgggccccagcacgctcgtgccctcgtctccggtgggcctccgccatggacgtgagcggcgccaccgctggcggccgagggacctggcccgagctgaccgatagatcccaagagtctgtttga

SEQ ID NO: 29011 - DNA, 291 bp, Zea mays
  Peptide Sequence Number=SeqID_70790
atggcgggcgtgaggaccgagggtgttacagcaggtaaggcattatcctcgaacatggacgaaaaagaggaggctttaaagggtaggttcaaagtgataacggacaagaatgtaagagaggaggtaaatgggcataagaacaaaggatataagtaccacaaaggatgggttaagacaggacctacaggtggaaaagaagaggatacgtccaagggtcagataggtaaactgccactctcaattgaggtggaagagaggagatttttaaagggcaggcataaagataagtag

SEQ ID NO: 29012 - DNA, 255 bp, Zea mays
  Peptide Sequence Number=SeqID_70791
atgacgaaggacttcaccatgactgctgagttagcaccatacgaggatatggtggatgagtccaaggttgctgatctcctcatcaagttcatcttctcaaggtggtgggctagatgccttcttcttctggttccttacttctctgatgagagcttcattcccttgattgggatcgatgagtccaaggatggagccagttgtatgctgatgtggttgtggaatcatcggaggtgggcaccaatgttgggtacttga

SEQ ID NO: 29013 - DNA, 120 bp, Zea mays
  Peptide Sequence Number=SeqID_70792
atggttaacaggtctgacggggaaatggtattcgtggacgataagcagttgaaagctaaggagcccctggtgcttattgattactatgagcaacaccttcgctacaaccccacctcgtga

SEQ ID NO: 29014 - DNA, 456 bp, Zea mays
  Peptide Sequence Number=SeqID_70793
atgactcaagaccaaaagaagccgaagaaaatagtaaataaatccaagaagtgggcagccaaccaggtctctggtggcgcatcgaacatgtctggtgtgcaccgaattgtctactcagagagccccaccaacggactctcgggagctatagcatcggactgtccggtgtgcaccgaacagtctggccaacggtcgtctacaaccttatcaacggtcgactgctgcagccctcaacggtcggctgacatggccagggcatcgggcatgtctggtgagcaccgtattgcccggtgcgcccgacgacagaaacaacctgctttctgtccaacagctataattgagggggagactatttatacccctccaaccggccatttgaaggtgtgggagcccaaggtgttagaaatatgccctagagataatcatagtgatgagcatatttctttgtatccatga

SEQ ID NO: 29015 - DNA, 243 bp, Zea mays
  Peptide Sequence Number=SeqID_70794
atggcgccaccatggcaggtggttcggtggccggagttggtaggcagagtcgtaaccgtcgggtcccatggcaacgattattattatgtattttgtttacatgtttggtgtgatgttaattttctctttatactatgtatgtttgtattgatgcgagtagacgagcaagccacagaggatccggagcttcagctggtagagactgctgagcaggagctcattaaaggcaagttgtgcccttga

SEQ ID NO: 29016 - DNA, 165 bp, Zea mays
  Peptide Sequence Number=SeqID_70795
atggcgacgccgtggcaggtggttcagcggccggagttggtaggcagagtcataaccgtcggatcccgtgtcgacgatcattatgttaatgagaacatggagaaccatccgggaaaacagtgctaccacaagggtggtatgggacacccttggctgattaactag

SEQ ID NO: 29017 - DNA, 228 bp, Zea mays
  Peptide Sequence Number=SeqID_70796
atgcaggcagatgcacgcagtgcagtccctcgaacggcgccgtcgatgaggaacttgatcagtgttggtcaggcggacgaagcgagcagtcacgagtatgctctccaaaaacctgatcgtccgcacacccgtccaatgggaacacgtctttcgacgaccgaggtcaccatagacatgttaatcaagtctttggtaacctctgtcgtctacacaatccaggaattgtga

SEQ ID NO: 29018 - DNA, 1236 bp, Zea mays
  Peptide Sequence Number=SeqID_70797
atgaagggtctgcacgacgacattgaggacttgatgaccttttttacccttgtcacatcatgtggttgtggtgtcgcaggccccctcaagttcgatgtggcggggtacacggaagggacgttcccgcgtttggtctacttcgaggattcgtggaccaaggtgagcaacatcatcttcctggactcgccggtgggtacaggcttctcctactcgcgggaggaggccggcctcaacgtcagcctgacggaatccgggcggcagcaccatgtcttcctccgcaagtggctggcggagcaccccgagttcgcgtcccaaccgctctacatcggcggcgactcctactccggctacactgtgccggtgacagcgatggacatcgctaccagcagcaggtcgagggacgacgatgatggttatccgaagccgaacctggtgggctacctggtgggcaaccccggcacggacgaccggtacgactcggggggcaaggtgccgttcatgcacggcatggggctcatctccgacgagctgtacgaggccgccaggctgggctgcggcggcgacttctacaagactccggacctcacaaacacgcgctgcgccagcgcgatgattgctatctacatggtgaccgtcggcgtgaaccccatgcacatccttgagcctttctgcgggccgcaggggccgggggtccggagcatcttccaggacaacggcagcaggcggtcgatgctggtgcaggacgatgtcccccacccgggattcttcaccaaacagccggtggagtgcaggaacaacgggtaccggctgtccaacatctgggcggacgacccggaggtgagggatgcgctaggcattcacaaggcttccatcggctcgtggagtcgatgcaccatgctgccgtactacaggcacgacgtcagcaccgccatcccctaccatgtcaacctcaccaaggcagggtacagggcgctcgtctacagcggcgatcatgacctgggcatgaccttcgtgggcactcaagagtggatcagaaggatcggctaccccatcgtcagcgattggagaccatggttcgtcaaccgacaggtcgcagggttcacaaggacatacgcccacaacctcacattcgccacagtgaagggaggagggcacacagctccggagtacaggccgaaagagtgcctggccatgttggatcgatggacatcgtcagcagctggccagctctcatga

SEQ ID NO: 29019 - DNA, 258 bp, Zea mays
  Peptide Sequence Number=SeqID_70798
atggggacctcgagcgagggcatgagccatgtaaacacggaggctatgtctgatgccttcgttgtcaacctagctgacatgtgtgggtcgcttatggggtcaacatgcgatacagacaccgacaacgacaccttcatgaaaaaagtggtcgatggtatcgaagactcgacactcttccctagtcctcgttggcgcacccgcgcaagggtatcgctctcccttagtcctcgcaagaaccaagtgctctctatgagatga

SEQ ID NO: 29020 - DNA, 435 bp, Zea mays
  Peptide Sequence Number=SeqID_70799
atgggcggcgcctactgccgccgccgctcgccgctcgagcagcaactcctcccggcagtgctggtgctgctcgtcatcgtcgccgccagcagcagcttctggggtgtggccgccaaggagacgggccggaatgtgatcacgcacatcaaggggttccgaggcccgctgcctttccatctcgagacagggtacgtggaggtggacgacgagaacggagcgcgtctcttctactacttcatcgagtcggagaggaacccggcggaggacccgctcatcctctggatcaccggcggccccggatgctccgcactctctggactcctcttcgagatcgtcggtagacacgaaccgccgatgttcatgatggtcaaccggcacatacaacaacaaccgatgtacatggcacttttgcctctacggatgaaagagacataa

SEQ ID NO: 29021 - DNA, 318 bp, Zea mays
  Peptide Sequence Number=SeqID_70800
tacacactgcaggaccccacccatggacgagacaccagtcaaaaacaggaagagcgagcgagcctcccctactccgagaatggcacaatgccggaggtcaggatccaaatggggtccagcaaaatcgaacctccggcacgaacctatggagacttcaccggaatttggcggcgccggaggagggccgaggttctctcaggccccaccatcagcggcgatagcggtggggaggagcgtccgaaactggttccaggaagttcaatgcggtcggagactcgagagtgggcccggactgtcaagaccacggcacaggagaaa

SEQ ID NO: 29022 - DNA, 1133 bp, Zea mays
  Peptide Sequence Number=SeqID_70801
tgtactcctggctcgacggcagcggtgaagagtacaccgatgctcctgcgctgtcggcgccggctccaacgccggtggatggtcatggtgtctctgggccgcagtttctgatggctgccactgggctggacggggacgatcttgcggtaccaaggcctgtgcaccctagccgggtggcggcggctgctgctgctgctggtggactggagatggtcggcacgagcgtacttgggcagtccactcaaggtgcgactgcaagtgaagcaggggagctccggttcctgagggcgatacggatcagccagcagcacaacatcgtgaggtcaggaccagcgagccacactcaagtggcagctagcacggatgcgggtagcctggtcatggcaatgcaacacacacaaagcgctttcgaagcagcagcagatccggaaggcggcggcgacaaggtgcgtggaagcgacgccgcagagaaggacgggtcctgtgactgcaactgcgactccagcttcgagtgcaacatctgcctcgagcgggccaagcagccggtggtcacgtcctgcggccacctcttctgctggccgtgcctgtaccggtggctgcacgcgcagtcgcccttctgcgactgccccgtctgcaagggcgaggtgttgctaacgagcatcacaccgatctacgggagaggcggcgacgaagaaggggactccggctcctccgccgtccccgacctgccgcccaggccgcaagcgaaccggagggacagcctgaggcagcagctgcagacggcgacggacgccagagggatcgccgcggtgctgagggagatgatccagaaccagggcatcgtgacctcggttcccgcaggccggcaacgggctggtagcgctcggaggcagcgaaggcagggtagcaacgcgtcgcgctccgcggtggtgaacgcgggcaatgctgcccctgagggcagcgatccgatccagccgccacactccaatggcggcaacggtgagcaggttgttcatgcagctcctcaacaaccaccaccggctgttgtgctgggcgagcctgggccaagtaggcggtcgaggcattcggagtccgcagccataagaaggacaaggaggaggccacagcagtag

SEQ ID NO: 29023 - DNA, 1440 bp, Zea mays
  Peptide Sequence Number=SeqID_70802
atgctgttgtggcgagtgctgctccggcaccggcggccgccgttccccgtccacgccgccggattcttcaccagctccggaagcaacaccactgcgcctcctcctgctggagcggaggggctccgcgacgagccgggggaggagggctccctggcgcggcgggtggagcgggcggcgtcggtcggcgcggccatgcggggctggatggcagacggccgcgccgtgcaccgtggccacgtattccacgccatcaaccgcctccgacgacaccgcctacaccgcaccgccctgcaggtcatggaatggatcgtgagagagaggccctacaagctgagtgagcttgattactcgtatctgctggagttcacagctaaagtccatggcatttctgaagccgaaagcctcttccttcgcgtgcctcaggaatgccggaaagagctcctctacaacaaccttgtcatggctgctttagatctgaatcacattaagcattcatacgcttacatgaggaagatgagagaattgtccctgccgatctcgccgtatgtttacaaccgcctgatcatccttcactcatcacccggtcgcaggaaaactatatccaagatcctttcccagatgaaagctgatcgtgtggtccctcacacgtcaacctacaacatcctattgaaaatacaagccaatgagcacaacattgatgggctagccagggtgttcaatggtatgaaaagagcaaagattgagcccaatgagatcacttatggcattctagccattgcacatgctgttgcaaggctatatactgtttgccatacatatgtagaagccattgagaattccatgacaggtactaattggtccacgctggaaattcttcttatcctgtatggataccttgggaaggaaaaggagctaaagaggacatgggagatcatgcaagacctccctcatattcgatccaaaagcttcacactagcaatcgaagcatttggaaaggttggctccattgaccaggcagaaaagatatggatccatataaaatcaacaaagaagttaagccttacagaacagtttaattctatgttatcagtttactgcaggcacggtcttgttaaagaagctttgaacacaatagatatgggaaagaaggaagtcgtcactaaaaaggtgaggagttcaacaccatggttggagaccacacatctgttgcttgagaactttgcagaaattggagacttggaaaatgcaaagagactgtacagtgaactgaatgaatccaaatattctctgaattcctttgtgtataacaccctcctgaaagcttatgtgaaggcaaaagtttatgagccggatttgtcgaggacaatgattttgagaggggcaatgcctgacgctgagacatatagccttctcagactgattgaacaattcaagatctaa

SEQ ID NO: 29024 - DNA, 216 bp, Zea mays
  Peptide Sequence Number=SeqID_70803
atggttcagatcatcgagcaccgcaacttgtcccccgaggacttcctaatggaggaaggggcatcatcttacatgccacgaggctccaaccgccctgtgcctggtgctgctgctatgcacgcccgcgcagcagcacacgcccgctcagacctccaggactccgtcgagggctgcccatggtggggcattgtctgcagccagggagttgctgcgtaa

SEQ ID NO: 29025 - DNA, 160 bp, Zea mays
  Peptide Sequence Number=SeqID_70804
atggcgataaggagcactctacttcctgaggccaactttgctagggtgtctaccaacatacaacagtggttgtttggtgctcttgtacctcacactgtctttgacatagcagactttctactgtgtgagattgaggatgtgatctctgacggtttccatg

SEQ ID NO: 29026 - DNA, 294 bp, Zea mays
  Peptide Sequence Number=SeqID_70805
atggcgcccttgcaagctcccctccagaccggttccttgctttccctcgaatcccagcagcgagtaggcgtcgtccccatggcgggagctcctttctccccacgctccagtacctcgccgtgggatccccctctcctccctgctctggcatcgacacggccagggacacgaccagcggcagcctcctactgttcacgtgagaaatcaaggaagaagactccccctgtccatgacatgtacctccttgatttggttgatggtgtgacttggccttcatccctgccaccgggatag

SEQ ID NO: 29027 - DNA, 405 bp, Zea mays
  Peptide Sequence Number=SeqID_70806
atgtcagagctccaacggtcggaacccaacggcctggtgacgtggctggcgcaccggacagtgtccggtggcgcaccggactgtccggtgcaccatgcgacagcagcctccaccaaactagccatttggtggaggctgctgtcgcatggtgcaccggacagtccggtgcgccaccggacactgtccggtgcgccagccacgtcaccaggccgttgggttccgaccgttggagctctgacatgtgggcccgcctggctgtccggtggggcactggacaagtcctatagactgtccgagctttacaatattgttggaagacctaatgaatttgtttatggtgaaagaggatatgggtcagtttatgaggttagtttatctataacactcatggatgtgaatttatag

SEQ ID NO: 29028 - DNA, 183 bp, Zea mays
  Peptide Sequence Number=SeqID_70807
atggcttatggggattctgctagggcatataaattaacaggccggatggggattggagatataccaggatggggattggagagccactttgttggattggagggcgccgccgccgaggattgggattggggtggcagcggatatctgtcttgggatttgtggctgcacgagaatgttggctga

SEQ ID NO: 29029 - DNA, 736 bp, Zea mays
  Peptide Sequence Number=SeqID_70808
gagcaccgagaaggtctgctcggtgaaggtggcggcgccagtctacctagactggtctgacaagcccatcactttcgaccaaggcaaccaccccgaccgcgtgccgagtccggagaagtacccgctcgttgtcgatcccatcatcggcaacgtcacgcttaccaaggtcctcatggacggaggcagcagccttaacatcatctacgccgagaccctcgggctcttgcagatcgatctgtccacgatccgggccggtgcggcgccctttcacaggatcatccccgggaagcgcgtccaaccccttgggcaactcgatctgcccgtctgctttgggactccctccaacttccaaaaggaaaccctcacgttcgaggtggtcgggttccgaggaacctaccacgcagtgctggggagaccatgttacgccaagttcatggccgtccccaactacacctacctcaagctcaagatgtcgggccccaacgggatcatcaccgtcggatccacgtaccgacacgcgtacgaatgcgacgtggagtgcgtggagtacgctgaggccctcgccgaatccgaggccctcatcatcgacctggagagcctctccaaggaagtgccagacgcgaagcgccacgccggcaacttcgagccagcagaggcggttaagtccatccctctcgaccctagcaacgacgcctccaagcaagtccggatcggctccgagctcgaccccaaatag

SEQ ID NO: 29030 - DNA, 291 bp, Zea mays
  Peptide Sequence Number=SeqID_70809
atgggtcgcagcaacctcgccatcggagtagatcctagcctccgcaccgccgtcgtcaccctatttattcggcgtcgtttgcctcgcctcaccggtttgaagctgtttgaaaatgatctgctcagcaaactaattgttgctcaaaatagaaaagagtttcaccttagttcccagaagaagttgtcatcgaagaggagtctcctccagtgcctgaatgcctatcagttgggttttgatgctaactgggttatcttgatagaaggtcttgaatttcctcctgcaacaaagtga

SEQ ID NO: 29031 - DNA, 315 bp, Zea mays
  Peptide Sequence Number=SeqID_70810
atggcgaggcgaggatgccgacgtggagaggacggctgggtgccggtgagcgcgcacaccaaggagtgcggcgagcagcggcgtacgtccagatgcagcgacgagagaggtcgagcagtgagacacgccgggcgtctcggagctgcagcggagctcgagcacgaggctaaaggcgagcggctgaggaagtcgacgtcgagctgctgctgctccaccgatggggagaaccagggtgtgttgactgttgaggaatcagggacttgcgactataggctggaaattagctcgaggctcgcgagacggtcccttctttaa

SEQ ID NO: 29032 - DNA, 303 bp, Zea mays
  Peptide Sequence Number=SeqID_70811
atggaggcgaccaagaccataggtatcctagggtgtaaaagaggggaaatgatttttgggcggagtttgaactccattgatattgcaattgtggggctgcgggctccatatgtgataattgggaaggggtttgcttcaactgggctctttggaaggtttagcaggatggctggatttttgccaatcagaggtacagggtttccagaagtatggatggaaaagggaattaaacagcggcaggggagatggatggaggaggtgactgtttattccaaacagttattttatgtgattgacatttga

SEQ ID NO: 29033 - DNA, 107 bp, Zea mays
  Peptide Sequence Number=SeqID_70812
agatactgaaactcaactttcacgagaggaaggagaacgcttgggaagattcaagctcagatgacatttctggtgttatcgcacgctttgatggtgctgaccttcag

SEQ ID NO: 29034 - DNA, 507 bp, Zea mays
  Peptide Sequence Number=SeqID_70813
atggcgctggctgggggcggccagcgaggagaagcagttggtggttgggcaatgcctagcggctatggggaggggaggagggagaagaaaaaagatcgttacaatgaaggtttggttggagtccttaaacaagccttgtgtcagaacaagatcccagggcccaagtcttatattgcacatatactgagtatgtttggcctctgtggttttccaagcaagctaggaggaaatatgagaaatgttgtgtgcaatggcgaatctctaagtgctcatgcggctatcctatcagcaagatgtcctaaattattaccatctaaaaaaccttttgtacgtgatgggtcagtaacttatgaatggggcagaaggtcatgctatcatgttcgaatgtctgatcatgtagatagtcacgctctgaagaaaattttggagtatgcatacactggtttggtcactgtagatgatgccattgttaagcctgtaaaacacttgcaaagtattgccatttga

SEQ ID NO: 29035 - DNA, 360 bp, Zea mays
  Peptide Sequence Number=SeqID_70814
atggcgggggtggttgttggcggcatgcggtggatggcgggggaggtcattggtggcttggggacgaggatagagaggtcgaatggccgatgctatacggcgggcacaacaggcggtggatggggcgggaggttgtttgtgggcagagcggatggggacgggtacaggaggataaggccggtggaggtggccgtgaggaggcaccggagggaggccgccaccacggaggtagaggtggtggtggcacggcaggagaggtgcacaaggaaggcggctgccatggtggtggtggtcatcggtggtggagaggtgtggggaggagatcagagcaccacggtgtcgaagaaggtcgctacataa

SEQ ID NO: 29036 - DNA, 165 bp, Zea mays
  Peptide Sequence Number=SeqID_70815
atggggagggccctgcgctggcgtgctgctgcgtttcaaggagccgagtggagggaggcgaccgagcagcagatcagagatggggcggcgccgatgaagcagggagggaaggcgcatccatggaagaagaagggcagaggaggggaggtcggcctgcttgcttga

SEQ ID NO: 29037 - DNA, 501 bp, Zea mays
  Peptide Sequence Number=SeqID_70816
atgtcgagcggaggcaccggggtgacggaggtgccagagcgagccaacggtctgggctcaggcgctgtccagtggacaggatgcaggggagggccggcacggccaccagagggcgaccatggccaaggggaggagtgctcccctgcgctagcaaaagaagaggggtgtctagcagagctagaagaagtcatggagggggaagatgccatggatccaagggtgcttgaattcgagggaggctgggcgctagaggcgctgagtggacctgaggcgcgccacgcagtggaagcgtggagtcgggcgggaggcggagcacccgttccggcgaagaatcccggtggccaggagcgcgattccgcccaggcgaagccgcgacgagcatccgtgtgcgcttggcttccacccgagtcaatccccgagggctggacatgggtggtggagcacgacctcggagagcagtggcccgacgatggaagatctgtaccgacgaggaatccctag

SEQ ID NO: 29038 - DNA, 336 bp, Zea mays
  Peptide Sequence Number=SeqID_70817
atggtgaagccccagggcgagcaatcggatcctgagcgacggtatagacgtggttccatggcggaccgacgagttcccccgcgagcttggtttatgggggggtcacccgtgatgacgatggctaggggaaaagcggggccagatttttataccgaggcagagtccgcgttcaaggagtccatggccgagaatctcgccgacgccgttgcccgagatccctggcgagtttggcggtgctcagctgcgaggcacgcggtccgttacgaagaagacgcaactgacatcccgggtccacggcatagagaggcttacaagtgggaccgcccgtcggtgtga

SEQ ID NO: 29039 - DNA, 414 bp, Zea mays
  Peptide Sequence Number=SeqID_70818
atgccgagcggaggcaccggggtgacggaggtgccagggaggctctcgccgccagagcgagccaacgaggaagaggggtgtccagcagagctggaagaagtcgtggagggggaagatgccatggatccaagggagcttggattcgaggaaggctgggcgctagaggcgctgagtggacctgaggcgcgccacgcagtggaagcgtggagtcgggcgggaggcggagcacccattccggcgaagaatcccggtggccaggagaacgattccgcccaggcgaagccgcgacgagcatccgtgtgcgcttggcttccacccgagtcaatccccgagggctggacgtgggtggtggagcacgacctcggagagcagtggcccgacgatggaagatctgtaccggcgaggaatccctag

SEQ ID NO: 29040 - DNA, 336 bp, Zea mays
  Peptide Sequence Number=SeqID_70819
atggtgaagccccagggcgagcaatcggatcctgagcgacaatatggacgtggttccatggcggaccgacgagttccctcgcgagcttggtttattagggggtcaccagtgatgacgatggataggggaaaagcggggccggatttttataccgaggcagagtccgcgttcaaggagtccatggccgagaatctcgccgacgccgttgcccaagatccctggcgagtttggcggtgctcagctgcgaggcacgtggtccgttacgaagaagacacaactgacatcctgggtccacggcacagagaggcttacaagtgggaccgcccgtcggtgtga

SEQ ID NO: 29041 - DNA, 375 bp, Zea mays
  Peptide Sequence Number=SeqID_70820
atggcgctcatcatgctcatcggcgatggtagcactacgtgccacgccgtgcggcatcttgctcacgccctgcccctcgtcgctcctatcgctgtctcgagaatttatgtcgtgccgaagccgtcgatcgtgcccgtgggcacccttccactgatgctcgccatatcgacgattcctgtggtgggcgccatgccacggatccatgtggtgccgaacaccgccgcactgccccctatgttagctgcagtaccacccatcatgccaaaattgacgctgccgctaatgcccgtcgtcaggccgaaggttggcgactcgccaccaatgcccgtcgtcatgcctaagggcgcgaattcgtggaggacggggagtggatag

SEQ ID NO: 29042 - DNA, 405 bp, Zea mays
  Peptide Sequence Number=SeqID_70821
atgtccacgaagaatcgtggatggctgcgtttccccgactccgaagaagaattgcccgagggcaagcacggcagcaccagcgggctttccgcaatcgacgcaggcgtggtgcagtggaagggggcgggtttgaaaggagcccccgatcaaccccccatgtcgtgccagacgatgcagacgccggatgatttcgggcatagctgttacggaagcgagggcggagtgtgcggtcccacacgtcggtgtccgatcccgcgcgatgggagacagaccaggcgggtccgtttgccaaagactaagcgcacggagaccaggctatgcgcttgggctaacgtggtggtcccacgcgacaacgacctcacgcgagaaatgcgggaggagtctggctgggccgactttgcgtag

SEQ ID NO: 29043 - DNA, 633 bp, Zea mays
  Peptide Sequence Number=SeqID_70822
atggtgcaccgcaatgggtctatcattgaggagagtgactcatacgaagagactcaatcagaagaagtctcagtggagcctcctcaccgctctcacactaagcagggccatggtttgggccatgttgagtttggggggagttcctcccaacctcagccgactcaagtctctcatagtgagaggactccgtcttgtctaccgaggaccatgtccagccgttctcgttgggctcacaatcagcatgtcgatgacccgacaagcgattatgatagattgaaggacaatttaaccaatcttcctcggagggcggtccacccatatgtgacctccaacttcatcaaactagggctcaaaaatccaattgagcacctagtggatttcagtgcatgtagtgggggcctgctccaagatataagttcttgggacatgcatgtggtacacccttatgagctatggaagacaacaaatttgcagaggtactatgggtacttgaactctctcttcctgtcacacccggatttaagggataaagccgggtgcgtctcatatgtgtgccaaggaagaacaacacatataataacagaatgcatagagataaatgtcataaatatcataaatgtacctattacatag

SEQ ID NO: 29044 - DNA, 345 bp, Zea mays
  Peptide Sequence Number=SeqID_70823
atgcaggggaggtggctatttatgccctatggccacgtggatgagaacgaggcacaggctgacccatggttcacgccgagcccgggatacccagtggctgccacggagggatcccaacgactcggagaagaaactcctgacatcacgggcccagacgtaagtgaggggcgtgcgaggctggttgctgccccatcggtcccacatgtcagtggtcgagtgcagcgcgcagagcacgccacattgggcccctggcgggtgacggagaaatgggtcgagggaagggtttcggcccaaactgaggatttccttaactcacaagttaagattttaggtgttacaggataa

SEQ ID NO: 29045 - DNA, 414 bp, Zea mays
  Peptide Sequence Number=SeqID_70824
atggactgttacaggaggcttcggcttcgagatgaagacgatatccagatcctgttctcgagcacagtgaactttcagcagtactcaccccaggtcaagaacaggtgccgcaagataaagaacatgaatgtgtctaggggggtgaatgtaaaaaaactcaagacacgtatcttgacgaagacacagtgtcttagctctatgttcgagacaggagactatctgattggtcactttaatttattgaatactctgattggtacaatgaatatcttcacgtttccagatggctcggatctatgtacaattcgtgagctttatgctggcaagttttctgcttgtgatcaagccaagccccgtcccttctccggacggtttgctaaacatatatccactgcaattgaaatgaccggctga

SEQ ID NO: 29046 - DNA, 171 bp, Zea mays
  Peptide Sequence Number=SeqID_70825
atggaaaaaaccatattgaacatcagcaccaccgactacatcgacgatcacaatgctttggaggccatcacactcgaggtacctccaaagatgcaagaggcgattgcgagcaaggcgtccgccaagatcgcgtgggacgcactcaagaaaacacacctcaacgtggactga

SEQ ID NO: 29047 - DNA, 344 bp, Zea mays
  Peptide Sequence Number=SeqID_70826
atggtcggcgatgtcgacggccggacagggagggagctcgaggaggcacggactgtggccatggcgaggcgagtatgggatgagctcgacgaactgcgacacgaggagcgaggacgtgcgtccagcaagagggtgacgcgcgctgggatgggtgccgagcagagcttgggcgccaaggaaggtgaggccgtcggcctgaggtggggaaggagaggatcggctggcgttgaagatgggcaaagggaaggcgagtctggcgagtgcacggcatggggagcagccgagacaagagctcacggcaaggaaatctattccggggagccgatcgcgagagccaaggagag

SEQ ID NO: 29048 - DNA, 165 bp, Zea mays
  Peptide Sequence Number=SeqID_70827
atggccatcaccatcttgcacagtgatgtcttcttagcttgtgcttatttcaatagatcaaattatgcacgctgttgcatgcactggaatcatttggtcaaggtacagcttggttatcacaccggtaagccatcagtttatggtacctatccattggctctatag

SEQ ID NO: 29049 - DNA, 477 bp, Zea mays
  Peptide Sequence Number=SeqID_70828
atgcggctgcatggcgtagggactcggtcactcgacggtgcagcgcaggtccacacaaagagacacaacaagctccttcatgacagaatgaaggatcttgtgtttgtcaaattcaactcaagactaaagcaaaagaaagatgacatggataaagatcccattgagaaacgtgtccattatgttgttttagaagatgaagataacaagtggatcactggcattgagccaacaaaaggagatgaagagcaagaagaagaaactgaaacatcatcacaaggagttgcagctgcatctcaaagagaaatagaagagagaactaaaagagttaactggcagaaattaagaagcaggaagagaaataggttgatccctagtttccctacatttgaggaagaggagtcatctccatcttctgatgaagaagatgaaaatgatattgatatgctatctcgttctgattctgaggctgaaccatag

SEQ ID NO: 29050 - DNA, 2910 bp, Zea mays
  Peptide Sequence Number=SeqID_70829
atggacgactcctctggctgcttctcgcgtgctcgtgggtggcagccgcgagaggccagcaaacagcacggactgatccagccgaaggtaccggcggcactgagcacgatcctggggcgatgggggctgaaggcgtcgccggggtggaacatcagcggcgagctctgcagcggcgtcgccgtcgacgacaccgacgtcgacaacagccccaccatcaacccgagcatcaagtgcgactgctcctacgacgacaacaccgtttgtcacatcaccaaactgagagtgtatggcttgaatgttgtcggccagataccagccgagctggagaacctcacctatctcagtaacctgaacctgatgcagaattatttgacaggtcccgtgccttcattcatcgggaaatttcccatgcagtatttgggcattagcttgaacaactttactggtgaacttccgcctgaactgggcaacttgtccaaactggagcaaatatattttgacagctctggcttcagtggtccattcccttcaacattctcgaagcttaagaacttgaagatcctctgggcatcggacaacgacttcacaggaaaaatacctgatttcattgggaacctgactcagttggaagttctgagatttcaaggaaattcttttgaaggcccaatcccaaaaagtctgtccaatctaaccaaattgacaaccttgatattaagaaattgcaggatatctgatactcttgcaacagtaaatttttctaatctagctggattgaccttattggacttgagctttaacaatctcacaggccaaattccacagtccatactgaacttggacaaccttggattcttgtttctcggaaataacagcctttctggaagcctgcctgatattaaaagcccttcactaaacaatttagatttttcttacaaccagctctctggtagctttccttcttgggctacccagaataatttgcaattgaacttggtggccaacaacttcattcttggtagcagcaacaacagcattctgccttcaggcctaaactgtctccaacaagatattccttgtttccgtggctctccggaatattcctccattgccgtagactgtggaagtaacaaatcatttaggggcttagataatactttttatgaaatggatcctacaaatattggagctgcatcatattatgttactggtcaaacaagatggggtgttagcaatgttggaaaatttaatgaggccccaaatggaagttatacaatagatagttccgagcagtttcagaatgcactggattcacaactgttccaaacagcaaggatgtcaccatcatcgctacggtactatggcattggacttgagaatggaaattatactgttgagcttcagtttgcagagtttgcttatccagaatcacccacctggcaaagcactggaaggagagtttttgacatatacatccagggtggtctgaaagaaaagaatttcgacataaggaagacggctggtggaaaatcatatgttgcagtatataagaaatacaatgcaactgtgtccaaaaacttccttgagatccatctcttctgggcaggcaagggcacttgttgcattccaactcaagggtattatggacccatgatctcagcattgagtgtgacaccaaattttactcctactgtgcgaaatggtgttcccaaaaagaaaagcaaagcaggggcaattgttggaatagtaattggtgcttctgtcttaggactagccgccttagctggaatctttatgctggtacagaagagaagaagagcagcacagcagcaagaagagctttacaacatggtgggaaggccaaacatcttcagtaatgctgaactaaagttagctacagataatttcagttctcaaaatattcttggagaaggcggatatggaccagtttataagggtaagctacctgatgagagggtaatagctgtgaagcaactttcccaaacatcacatcaggggaaaagccagtttgtgacagaagtggccacaatttctgctgtgcagcaccgcaatctagtgaagctatatggttgctgcattgacagtagcacccccctgctggtctacgagtaccatgagaacggaagccttgatcgagcactctttggtgacagtggtacgatccttgactggccaactcgcttcgagatcattttaggtattgcaagaggcctaacctatcttcatgaggagtccagcgtgcgcatcgtgcatagggacatcaaggccagcaatgttctacttgacaccgacctcacgcccaagatttccgatttcgggcttgccaagctctttgatgagaagaagactcatgtcagcactaaaatcgcaggcacgtttggctacctggcgcctgagtatgcaatgagaggccatctgactgaaaaggccgacgtcttcgccttcggggtattggcaatggagactgtcgcaggtcgaccaaacactgacaattccttggaggaacacaggatctatctctttgagtgggcctgggagctgtacgagagggaccaagcacttggcatcctggacgcaaggatcgaagaatccgacggtgaagaggcagtcatcagagtcatcaatgttgcgctcctctgcacgcagggttcgcctcaccagcggccaccgatgtcgcgtgtagtgaagatgctcaccggagacatcgaggtgcctgaggtggtgaccaagccaagctacatcactgagtggcagcgcaggggtgggaacagcagctatgttaccagcggctactctggcgacacgaccggggagttcagcgtgcagagggagacgactgcgcctctcaccccgtcgccggcgatgactggagtcatcgacgacgggcggtga

SEQ ID NO: 29051 - DNA, 225 bp, Zea mays
  Peptide Sequence Number=SeqID_70830
atggcaagtctaggaggcggggtgggagctatagccctcgttatcgctctccaaggcgccgtactccttcaccggctcgtggacgcagctatagcaggtcgccatagtacaaatgagcttggcctgaagcccgtgcctgattcttctctgtgtgaggacttggttcttggtttggctgtggggaacaaatttggaactgtcgtcaactgcatgacttcagttcag

SEQ ID NO: 29052 - DNA, 213 bp, Zea mays
  Peptide Sequence Number=SeqID_70831
atgggccatagtggcggcacgacctattctagaggttgcatgatgaggaaagggatgatgacctgcactgtctatgggaggaagaagaagagtctaatgagcgaggtctgcttgtcagggagagggggggctattgagattgacttacactttgtccgtgaacttgttgcccttggtgaagttcatgtgctacatgttccaatgtcgtcctag

SEQ ID NO: 29053 - DNA, 402 bp, Zea mays
  Peptide Sequence Number=SeqID_70832
atgtcgcgcgcgttcgacgactactatatcaaggattatggcgtcatctcagcgccgaagaaggcgttcacgtactcgccggagctgcacgacgtggtggaggtgacgagggccggctacgatgcctgctccagcgccaacaacatctccgccttccgcaccggcaacgacgccgtgcccctcaccgccgtcggcacccgctacttcctctgcggcctcacgggccactgcggcaacggcatgaagatccgcgtcgacgtcgtcgccgccgcggcctcgccgtccgcgccgggccccgccgctgccgccgcggcgccgccgacgacctcgtcgccctgcatcgtcggagtcgtcgccgcctcgctactgctgcttctgctgcacgccgtcgtcagctactag

SEQ ID NO: 29054 - DNA, 765 bp, Zea mays
  Peptide Sequence Number=SeqID_70833
atgagggcggcgtcgcaccgtgcggaggagctgagttgccctccgctctcctccaacttaccgcccccggcgccgaagccggaggagacattggagccgacgtccctgcgccacgtagtgttcgggatcgcctcctcccggcgcacgctgccgctccggctccccctgctccggctctggctgcgcgcccccgcgcgcgccttcctcttcctcgacgcgccggcgccggcgccggacgcccgcgacctcccgccgggcctcgctctccgcgtctccgccgacgcatcccgcttcccctacacgcacccgcgcggcctttcctcggccgtccgcgtcgcgcgcatcgccggggagctcgtctccgggctcaagcagggggagggggaggatgtgcggtggctcgtgctcgccgatgacgacaccgccttcgtcctcccgaacctgctccacacgctccgcaggtacgaccaccgcgagcactggtacctcggcgcgcgctccgagtccgcggcgcagaacgcgtggcacgccttcgccatggcatacggcggcggcggcatcgccgtcagctggccgctcgcgcgccgcctcgcgcgcgtggtcgactcctgcgtcctgaggtacccgcacctctacggcagcgacgccaggatctacgcctgcctcgccgagctcggcgtcgagctcacccacgagccaggcttccaccagagacatcgaaataatctacctgatggaggagacattaaagtattcgtggcataa

SEQ ID NO: 29055 - DNA, 807 bp, Zea mays
  Peptide Sequence Number=SeqID_70834
atgacgctgcaggcgccttccacgccgccatctccatgtcctccacctccttcgtcagatcagatcagcactcaccatggaaccttccaacgagaggtgtctcagtcttgcactgctgatgcggttgtcggggccaaggtcgcacgccttgtgggtggcgatggcagcgtggagcagtgggatgcggcgaggcggagcacgcgtgggggcgtgtcgcgaggcgcgtcgcgcgcatcacaacgagatggacgggggcgagggagcattgtgaggttggccgcgcgcatcacggcaagacggacgccgtcggtgaccccgaggactccgcctggtcagggccacggttcagatcggttagacgacaggtcaaatcaggaaacggcgacgcgagattcttcgatccgcggggtgcgctctcaccttggggcgcttcgggaaggtacggacgaagaggatggcgatggagacgtgcgcttcccggcggcggcgacggagctccggcgagtctccacccaacgcgcgcccaacgcgcgcggaggacaggggaggaggcgacgcgggcaggagtacaggacgccaggtcgccgcgctggtgctagcagagtagcagtagcagcctgcctaggcctagctacaagagtacaagtgcgagtggtagagtgggagagcagccgacgggccgagcgtagagcgcagagcgaacacgggagaaagaagaaggggcaggggtggcggtttgcctatggcctgtggggcggtgtcgcggtccgcggtgggatgtggggcggcgaccaacagaagacctga

SEQ ID NO: 29056 - DNA, 2127 bp, Zea mays
  Peptide Sequence Number=SeqID_70835
atgacacccggtgcggcgcctttctggtgcccaaggaggagtctgttgctattgcacggcaagcttcggctgtggcggagaagcatatggagggcgctggggcccaagaatgtcctctactacatcctgagggagatcgagctcaagcagcagaagactcaggctgatgccaaatcacaggggtggcggcccatccgcgaggaaaaaaggagaaggattgaagaaatcaagaatgagattgaaaaactgaaagcgatggataagattcaagagatcaagaacctgattgaaaacgtgaaggacaacaaccagaagctgcagccgtacctgagcaaaccaaagcggaaggaagaccacatcacgaaagagaagatcaggaacaaaaaccatgcattacctgagctcctcgtcctgctgctcatgtcatctgctgctgcggacaaaacggacgagaagatccaatggaaggcattggaagatcactacgatgtcatactccagaatgcagccaagagtctcaaagagcatatggatcaagtaaacaaaggagcagccaaggggcaagggatcattcacaacgttgcccagtacgctcgcatcctgcaagatgtgttcccaagtgtgagcagcagcagcaacaacaacagcacgaggcagccccaggacgcccaggagcaagaagccactgccgaagctacaacaggcaagattcagatcatcatcgacaaggtgaaacaagacatcctgagtgaggtgttcgaggcggtcggtggtgccaaggcccaggaagccaccaagactgataccactacaagaacaacagcagcaacaaccctggacgaggcccaagtcaaaaaaatgatccaggaggctatacatcagctgaaggaagagaaaccagctgacaagaaacaagaaacagatgtctcgggtggtcagggttcaaccgcagcagctcctagacaagaaaaccccgacgagaagaaggcccagccggacactactggtagtagttcagctcagcagggttcaagtcagggagctaaagctagtactgttgatgaagccacgaagaagaccggagaactcctggttcctattattaaacaaaccacagagaagatgggagatctccagaggaagatcaaaaggcagctggatatcaacggaattgtggccaagattagaagtcatctgactggtcaagagaccatgatcatcctcagagtagattaccagcatgtggacgagtgggagaagaccaggagtgccttgagcctgctgcctcgtgtcgctgtcatgatgatcctgaccaaaacagacaggaatctagaaagagccaggacagaatactgccatccacaaggggagcccatggactacacctatctcgcagcgttctaccaccacatcgcgctggagattacaggcctgcatcagaagagcacatccagcgatgacgacgccgcgcagcagatccggctcctgcgcgccatcttcgataagtgcgagccatacttcatgtgcatgaagatatttgcccaaactctgtacgccaggcccaggagaagcaaacaagagctgcagaagctgtacagcaccctggaggggctccagcagagatcgtaccgcagcattgctatgaagatgctcaagttctcctacagggacgtgaagaaagagtaccagtcctccttgctgtacctagctatcttccccccggggcacaggatccggcggtcgaccttgatcgcgcggtgggttgtggaacggatggtgaccacggaagactggcgctggtccagtgccgtgagcatcgctgagcaatgcttcgacgcgctcgtcatcagggggcttgtccatcccactgagatcagcgcgacagggagggtcaagagctgcatggtgggcgatgtcacctacgacttcattaccaagatggccaagaagcggcgcattctggagccacgcctgtcgcaccacctggcctgccacttctccgttttcagcgacctccatctcagtgtgtctgacaatatcagcaatttcctgaacaggctgtctgattcatctcagtggcctcggctcaaggtgcttgatctggaaggctgcaggacgaatctctag

SEQ ID NO: 29057 - DNA, 528 bp, Zea mays
  Peptide Sequence Number=SeqID_70836
atggaattcaattccaaggatccaaacggaacgttagtgaaatctcaatatgaaagtttgttccaaggtcgttcgagcgagtacaaaaagtacatgaaggtgatacaaaaaaggatgacaaatctttacaaatcagacctacgtaaatggtgtgttttagtgatgagcgatcttcggtatgcattcgaatatatgactaatgtgggtacatcagctcaagcacttgtggaggttgatttctacgaaagaaagcaaggggagtttggtagacctttagctgaaaaatggcaaaggcgcggttcgtgttacgaaaaaacaagcaagaaaggaaagatagcggtggctagcgatgatgagaccgatagtggtgataaaattccacaataccaagagtctgccggtagcagttcggtgacgtcttccgatgatgctggtggtggtgctggctgtagcgatgttggtgctactggtggtggtaatggtggtggtaatggtggtgctgaggagtacaatatggcacaagcataa

SEQ ID NO: 29058 - DNA, 1164 bp, Zea mays
  Peptide Sequence Number=SeqID_70837
aggacgagcaggtcgctggtgccgcctgcgtcggcgacgccgcgggagacgctgcggctgtcggtgatcgaccgcgtggcggggctgcgccacctggtgcggtcgctgcacgtgttcgccgcgggcggcgacaagaagcggcagcaggcgacggcgacgccggccaaggcgctgcgggaggcgctggggaaggcgctggtggactactacccgttcgcggggcggttcgtggtggtggacgcggagggcggcggggagacgcgggtggcgtgcaccggcgagggcgcctggttcgtggaggccaacgccgcgtgctcgctcgaggaggcccgccacctcgaccaccccatgctcatccccaaggagcagctgctgccggagccctcgccggacgtcaacccgctggacatgccgctcatgatgcaggtgacggagttctcgtgcggcggcttcgtggtggggctcatctccgtgcacacgatcgcggacggcctgggcgcggggcagttcatcaacacggtggcggcgtacgcgcggggcgccacgtccgccacgcccaaacccgtgtgggcgcgcgacgtgatcccggacccgcccaagatgccggcgccgccgccgcgcctggacctgctggacctgcgctacttcacggcggacctgagcccggaccacatcggcaaggtgaaggcgcggtacctggagtcgacggggcagcgctgctcggcgttcgacgtgtgcgtggcgcgcacgtggcaggcccgcgtgcgcgcgctgcggctccccgacccggccgcgcccgtgcacgtctgcttcttcgccaacacccgccacctgcttccgacggcggtcacggcccgggcgaggctgggcgccgacttcgcgcgctgggcggcgggcggcttcgaccgcgacccctacgagctcaccttcacctacgactcgctcttcgtctccgactggacgcgcctcggcttcctcgaggcggactacggctggggcaccccgacacacgtcctgcccttctcctaccacccgttcatggccgtcgccgtcatcggcgccccgcctaagcccaagcccggcgcccgcatcatgaccatgtgcgtccaggagcagcacctgcccgagttccaggagcagatgatgagccagcaggccgcctag

SEQ ID NO: 29059 - DNA, 581 bp, Zea mays
  Peptide Sequence Number=SeqID_70838
agcttgacgggaagctattcgtcaacttggagcaggcccctacctggcgcgccaactgtcggagttttgaccccgaggggtccctggaccgacgagtaaattgtcgccgcgtgtcccagcccaaatgggtcggcacgagatggaacacaaaggggggagaaacagcaaaaggggaaacccgcggccttcgtgttgtcctgcgcccaggtcgggtccgagcccgaggtcgggcgaggcgggaggctcctccgaggtcgaggctgagtccgagccctggggtcgggcgaaggcggagatcgtcgtccgacgtcgaggtcgaggttgagtccgagccctggggtcgggcgaggcggagtccgtcgtccggcgtcgaggttgagcccgagctctggggtcgggcgaggcggagcttcctatggcacccgaggctgaacttagctactgtcagcctcactctatcgagtggcacagctgtcggagcagcgcaggcggcactgttttcctgtcaggtcggtcagtggagcggcgaagtgactgcggtcacttcggccctgtcgactgaggagcgcgcgtcaggataa

SEQ ID NO: 29060 - DNA, 195 bp, Zea mays
  Peptide Sequence Number=SeqID_70839
atggggtctaggtgcgccacatgccctaaggtccttggcgcccgtgaagggctcgagacacaccacatgcccggtccgccacaccatgggagaggggccccttctaaggggacgacccttccacaaactcaaacaactgaggacactacaggaacaaaacacaagcctcggactcctaggcagacacacacttag

SEQ ID NO: 29061 - DNA, 1488 bp, Zea mays
  Peptide Sequence Number=SeqID_70840
atggcccggctcccgagccggagaagcagcgagtcggcgaaacaggcggtgacctatctcccgagccggcgaagtgtgaaggcgtacaatgttggtgggccagaccgactgtttcgtaggaagggttttgagagcctgaaaaccaccatctctttccccttttctcttccccccattcactcccccctagctcttcctctctccctgcctgcaccctgctcaccggactaccgctcgtcgagcctcgccgtcgtccatggaactcatcggaccgtccgcaaccgcgccggagcctcgtcggaccatccgctcggatcgtccgtcgccactgttcgtgcccttccctgctatgtccaagctcgccgagcccctgcccacctcgcaggaccgtccgagccccgcccggaccgtccgctgcctgccaagccagccgtgccgagcccctgtctcgtccgcgcctcgcccgagttcgccggacagtccgcgcccacgccgggctatccgccgtcgcgaacaccgctcgagccgctgcatcgaacttctggccactcctcgccgttcatcgcaagaagccctctcgaggcactagctgagccatccctcgtcgtgcgctgtagtcgggcgaagcggcctcctgtaggattcatggcattatcgttggccgaggccgagctcgtgcgaggcggagagcttgcccgagggctgagcttgggtcgggtgaggtggagagcttgctcgagggctgagcttgggtcgggtgaggcggagtgcccgatgtctcgtccgctctgcttgtcgcatatgggcgccccatcggagggtgccaggtggcgtgcgcacactatttggcacaggcgtaaccataccgctatgattaggcgtgactgctgtcttatccaccgttgtgctccgctgccacagcgtggtttggcacatgcattaaatgcgcctgcccctgcctattttcgagcgcccttctcttgtctgtacgaggctggctcgggcgagacggactgggcagaggcgacatctggcgaggcaccctcgagcgaggtagacgcgtcagcagctcattcttcacaacgcgtgtgcgtgtctcctacccgagccactgaccggtgggtccacctcgtcagccgtcttcctcctcaaatcggactcactgctgcatcgggtctgggagcttcaactcgccaccaggatggtgctcgtggcctcgccggacttgattggcatgtgctgcactgggaatctctcgtcgtagtccactgttgtcgtgtgttcgccgcgctccgtggccggtggtgccgcttgattgcaccctccgcggaaggaactcaagatggaatcgacactgacccaccagggagggagaagcctgtcaccggcgagcgcacctccgccaacggcctgggcatttcgctactcggcctcggtcggggaagaagcgctctggccgtccaatctgatgtgggcgggggaggttag

SEQ ID NO: 29062 - DNA, 535 bp, Zea mays
  Peptide Sequence Number=SeqID_70841
cgcggtcgcgtccggcgtgacctgcaagatcacctacggctccggctcgatcgccgggttcttcagcgacgacgacaagttcatcgagacaacgcgcgaaagcagcataacgttcataatcggcaagttcgacggcatcctcggtctcggataccccgagatctccgtcggcaaggctcctccgatctggcagagcatgcaggagcaggagctgctggcggaggacgtcttctccttctggctgaaccggagcccggacgcggcggcggccggcggcgagctcgtcttcggcggcgtcgaccctgcgcacttcagcgggaaccacacctacgtccccgtctcccgcaagggatactggcagttcgacatgggggaccttctcatcgacggccactccaccggtttctgcgccaaggggtgcgctgccatcgtcgactccgggacttccttgctcgctggcccaacggccataattgcccaggtgaacgaagcgatcggggcagacgggatcatcagcacggagtgcaaggaagtt

SEQ ID NO: 29063 - DNA, 330 bp, Zea mays
  Peptide Sequence Number=SeqID_70842
atggcgaccagagagtggtccacggtgtgcgcggcaccacgatgttccatgagatcgacgacagcgacaactttctcaaatgcattgctcgatatggcgcgcacgccgcccggcttggttcctatcatggctctgggtcgagggaaggtcgcggtaagcaatatttatggccggggcggaggggcaactggagaatcggaggatcccaactacccaccgaagtcgcgatctccgttagcttcggtgttcgttccgacgaggaagaagaccagtccgacaaaaagggccccacatgtcatcaacactggatttgggagggcgcgcttttga

SEQ ID NO: 29064 - DNA, 660 bp, Zea mays
  Peptide Sequence Number=SeqID_70843
atggccgccccacgaaccactcgtcccgtcgcattaactctgcagcaggacaggcgacatctttggcaggagaagcgggcgacgcttcgccttcgccataatgaccgcgtcaaaaaaaagggaccgggaaagggggataccctgaaagggatccttctccgcgaaggaaacaggcctcgagcctccctactgatcataggttcaaaggctggcccctcggaggggttcaacagccgcctcagagcgctcgggctccgcgcccactactggtcagaggttcgaaggccggcccctcggaagggttcaacggccgcctcaggccactcaggctccgcgcccactactgatcagagagtgagggtgacagcagccaagtccggcctcaggcgccataggaaactccgcttcgcccgaccccagggctcagactctggctcggccccggaagacgacgaactccgcttcgctcgaccccagggctcggactcgggctcagccccggaggatgacgaactccgcttcgcccgaccccagggctcggactcaggctcggccccgggagacgacgaactccgcttcgcccgaccccagggctcggactcgggctcagccccggaagacgacgaactccgcttctcccgaccccagggctcggactag

SEQ ID NO: 29065 - DNA, 1152 bp, Zea mays
  Peptide Sequence Number=SeqID_70844
atgacctgtcatccggaccactgtctgtgcaaggcggacatcaagttgtggctcttctccaagaagaagtggtctaggagccttgatgtcgaggacagcaaggtcaaggttttctgggacctagcagacgctaggttcagcgtcgagccagagcctgtggaggggttctatgttgtagtggtgttctacctcgagctcgcgctcctgctcgacgatatgaagaaggatgcctacaggaagactagagccagccaattgacgatgaatgccccgttcatggcgaggagggagcacatatatggcaagaagatccactccgccaaggcacagttctgcgacaatggccaattcaatcacatttccatagagtgtgataccgtcagcgtcaaggatctatgtctcaagatacgggtcgataagaagcccatgatgcaggtgaagcgcctagcatggaaggatgatgaatttgatgaatcatcgagtaggcttgatccactcaagtttgatgacaggaagagtattaccctcaggaggtcaaagttggtgaaatggttcatggagccattctttgatgatctaatttttgagtgttttatgtggctaggtattggcaagacagagtatgggaccctgagttacagaatgtgcatagtatcggactccccacccaaagaagaagagttcatggaatggctgcaaaaggaagacaggaatggtgcatgtataccgactcagcaggaagtgctgggcaagaaagaagccattcaggaggcctataattttgagtattcagctgcaactgtacaacagatgttgagagacaaatcagttgtgagacaccctatcaatattgttgctgagaaggatcgattgaggagtgagttgtcgatggctctaagccgtaggaatgaagctaaagcagagaggatgcgtgtgaagcagaaaaatctgcaaagaaggccacaaccagagtcaaaagataataaggttgcaaatttggagagtatgaactggaagaatcgtgctgataacttcaagaacgctttggaactgaaacttgtaaatatatctttgaaggcaggagagtctggttacgaccctttcttgaggagatggacaagatcaagaaactattatgcatcaaagccatga

SEQ ID NO: 29066 - DNA, 405 bp, Zea mays
  Peptide Sequence Number=SeqID_70845
atggtgatctatgtgcaaggaatcggcaagtggctcaccgtgtggctcggtctacgtgcgccggcggtcggacaaaagtccggcgacgtcaatctggcacctccggtaatgtggtgttcgatccaagggctcggggagcttcgcttagctctagggaggctagccgagggtttggatggggtggaggagggctggagtggctggtccacggtggtcgggactctggcggccgctggcacgccgtgcgcagagcgaacgccgatgaacttgcgcttgggtggggctgagagcgagcgggggtgtacggtcaaggccgtggttggctttataggtgcgggcgtaggcacggggtctggcgttgcatggtgcggcgcgcgcggggccgagcgccggggcatgctctag

SEQ ID NO: 29067 - DNA, 204 bp, Zea mays
  Peptide Sequence Number=SeqID_70846
atgaccaatattaacccactgtactttattcaacatttttggaaaattttaaatcactatgattgtaacctcgctgacggagagtacatcctcattctggagcaaggagttgctcaggaaggagtccaggaggcagcaccagagcctgctatcgaggatctacctgccccagcttttgaaggcaagcctcggttttatgcataa

SEQ ID NO: 29068 - DNA, 204 bp, Zea mays
  Peptide Sequence Number=SeqID_70847
atggcaggggcttcaatccggcgcggccatggcagagggcaagcaccggcagctggagaagccgagggccatggaagcagggagctcgaccggcgagctgagcttatgcgcatgaatgcagagagaattcccgagctagcacgtgtactggaatctaggatattacgatggcttgagataagaacaagggagcaagagacgtga

SEQ ID NO: 29069 - DNA, 249 bp, Zea mays
  Peptide Sequence Number=SeqID_70848
atggggacgggtctgagcgcgccgagtgcgcagctacttggccgctgcgcgcagggacaaggcgagggcgcgcggggcttgcacgccgggcaccgggcttgcggcacagggagacgacgacaacagcaggcacgagctgctcgccgccgacgctgcgtcacgaattgcagcagggcgcggctgcacgtgaccatggtgcgtcgagcgccacagacggcgtcacggagcaacgcagcgaggggctggtag

SEQ ID NO: 29070 - DNA, 273 bp, Zea mays
  Peptide Sequence Number=SeqID_70849
atggcggcgctccgggcgaggcgtggctccggcggcggcgcggcgaggtcggagggcgagaaagtgggcgaccgggcggttgttttactggagtttcgcgcaatctgttctgtttggggaagatgtacagtagggcgaccccgacgtgtgggaccggctgaaacggacggcggcggggcgctggcgctccacgcgctgggacacggttgcgtgcgcgcaacgcgcgctggcccactgggccgcggcgctggacgcagcaggcgcgcgcgctag

SEQ ID NO: 29071 - DNA, 1002 bp, Zea mays
  Peptide Sequence Number=SeqID_70850
atggttgattggtataaacataaggttgagatagtgaaggatgcatatgagaaaggttctaaaaattgtcagatgttatctcattttatacaaaaggatcttacaaaagcttgtgcagaggaagtcacaactgtcattatggatgaaattcgaggtagaaaattctcagtgcttatagatgaatctcgagatatttcaataaaggagcaaatggcaatgattctaagtcacaatttatctatctctatgcttcgtgggcaagggtacgatggtgcttctaatatgagaggcgagtttaatggggtgcagaaaatgattcgtgatgaaaatccttatgctttctatgtgcattgttttgcccatcaattgcaactagtagttgtcacaatttcgacttctagtgcagacattgcagatttctttaactatattcctttaatagtcaacaccgtgggggcatcttgtatgagaaaggatgccttacttgcaaagcatcatgatgtgttgctagaaaagattgagaatggtgagattatgactggaagaggtttaaaccaagaaagtagcctagcaaggcctggagatactagatggggttcacatctaaaaactttgcttcgcattttggtgatgtttgaggcaatcatagatgtccttgaaatagtgaagaaagattctattaaaccagcatgtaatggtggagctttaggtttaattggaaaaatggaaagctttgattttgtgttcatcctgcatttgatgatagaaatattgagtatgacagatattttgtcacatgctttgcaaaggaaggatcaagatatagttgaagcaatgcatttgatcacggatgtgaaagagagcttgcaagatatgagagaaaatggatgggagccattactaaaaaaagtgaaaccattctgtgagaggaatgagattgaagtgccagatatggataaagaaattaatgttagagggacatctagacgaagaaagcaaaag

SEQ ID NO: 29072 - DNA, 180 bp, Zea mays
  Peptide Sequence Number=SeqID_70851
atgccgctgtggacaccttcttcagtgggtatcgccgtcgcggcttgtgggagctacgtgggccctggccgtcgtgtggatggaagacaagatcattatgttaattggaacatggagcttaacttgagatatccgtgctaccacaaggatggaatgggacgcccttggctgactaattag

SEQ ID NO: 29073 - DNA, 285 bp, Zea mays
  Peptide Sequence Number=SeqID_70852
atgggtgtcagtgatctgcttccattcttggaaacttacgcggctattgaagtccttgcgactgttcgttggctccaggggttggatgactctttggaggactccgaggaggaggacggtggcggcggcggcgatgggagcggctatgagggtgacgacgagggcggcaacgacgtcaatggaggtggcgagggcgacgatgacaacggctacgacgtcggcaacgagagtggtggcggaaagggaagcggcgacaatgtcggtggcatggcgccatcgacataa

SEQ ID NO: 29074 - DNA, 159 bp, Zea mays
  Peptide Sequence Number=SeqID_70853
atgaagagaaacaaacagggccttagtgatgttgccccacttgtcaaaaagattgatgatccagacatggcaaatgataaggatttgctacgagttgttctaacgttggactatgcttgcaaggaggttggattcttttatgtgctgtatatcaactga

SEQ ID NO: 29075 - DNA, 846 bp, Zea mays
  Peptide Sequence Number=SeqID_70854
atggctggcctggccatgaaccactgcatgttcgacgacatcggcgccatgaagttcatcaactcgtgggccgagacggggcgtggtgtcgctgagctcaccgtgtcgccgttcctggaccgcaacgtcctgaaggcgcgcgactcgccggtgcacaccttcccgcaccacgagttcgccgagatccccgacatctccgacacggcggcgctctacggcgcgcaggagctacagtaccgctccttctgcttcgacccggaccagctggagcgcgtctgcgggctggcgcttgccgacggcgccctcggccgttgcaccaccttcaaggcgctgtcggggctcgtgtggcgcgcgtgcaccaaggcgctcgggctggcgctcgggcagcgcacgaagctgctgttcgccatggacggacgacgctggtttgtgccgcctctcccgcggggctacttcggcaacgacatcgtgctgaccaacgccctggccacggccagcgagctgctgtccgtgcccgtgtcgcgcgcagtcgggctggtgcaggaggccgtgcggatggtgactgaagactacatgcggtcggcagtggactacttcgaggcgacacgagcccggtcatcgctggcgtgcacgctgctcatcaccacatggtcgcgcctcgagttccacggtgccgacttcgggtggggcgagcccgtcatgtcgggcctagtcacgctgccggagaaggaggtcatcctcttccatgtttcgcgcgagagcaggggagagcgcggatcgaggccgcaatcccgtctgcgagcagtgattccgcacgatttgggtgccggattgccttccatgtag

SEQ ID NO: 29076 - DNA, 576 bp, Zea mays
  Peptide Sequence Number=SeqID_70855
atgaagattaagatgacacgtcaaagtgggtatagagggtatcaaaagctaggagagaatgttaccaaggaaaaacgtgatatgcacgaagcagtcaattgcttgactcctattgcacctggcaaatacggagaccttggtaaaacacttgaaggagacaatctgtggcctgaatacccatcaaatttgaaggtagtgctggaaaactatatcagccttgtcaaaggacttgttacactggttaaccaggatgatgacatttgtgcccttgaggtccaaaatcgttccggtgtgtggatacgtgccaacccgattcctgaaacctttctttgcaacatcggtgacatgctccaggtctggtcaaatggaatttaccaacccacagttcatagagtcatcaacagctcccatcaacgccgcgtttctgctgtgtttttctatgagaccgattttgatgctgccgtagagcccgttgagttgtgcgtggagaaaacaggcggcgtcgccaagtatgacaaggtcgtgtatggggagcgtctggttcggaaggccttctgctgctttggccatttatag

SEQ ID NO: 29077 - DNA, 381 bp, Zea mays
  Peptide Sequence Number=SeqID_70856
atggcgcccgaggctggacgtagctgctgtcagcctcactctgtcgagtggcacagcagtcagagcggggcaggcagtgctgttttcatgtcaggtcggtcagtggagcggcgaagtgactacggtcacttcgactctgtcgaccgaagagcacgcgtcaggataaggtggcaggcgatccttgcattaaatgctcctgcgatacggtcggttggcgtggcgatctggccaaggttgcttctccgcgaagactgggccccgggcgagtcgaaggtgactcctatttctgagtggtcttttaaagttaaagatgattttctaataggtgggtgtttgacttccatccgtggagtccaaggaagttgcaggagaaacccctga

SEQ ID NO: 29078 - DNA, 780 bp, Zea mays
  Peptide Sequence Number=SeqID_70857
atggtaccggactcccaccacgacgatccaaaccaccagttcctgtccaaccttgggctggagctgctctcgtcgtcgccgacttcgtcctccggcgggttccggacctcctcctcactgctcagaagcctcacggagccatcggcagttgccacgggcttccagcagtaccagcagcaggcggtgaaccaagcgccgcctgaaagcatcagggacgacgctctgcagttcgttaatagcacgccgttttggagcgcctctgccgtgtttgcttccgcggcggagggggctacaagccgcttaccagcgagtgccgccggaccaccgtccgcgcagtctatgccggcgaattttgcagtcaagagcgcattattagaaggtgcccgcggagactccagcagcatcactgcgaataagacgagcaccgatccaacgccgcggctaaaaaaatcgaggacagggacaccgtcaccattgcctgataccttcaaggtgaggaaagagaagcttggtgacagaatcacagcgcttcagcaactagtctccccttttggaaagtcactcagtgttccttacctaaagaagaataggcagcaagaagtgccccctcacaaggtattgtgggacggaggtggtgaggcagcgggagcaaatggagaactcactggccgagggctgtgcctggttccgatatcgagcacctttgcggtggccagcgagacgacgacgacgccgccgctcgacttctggacaccgtttggaggccctgccttccggtag

SEQ ID NO: 29079 - DNA, 279 bp, Zea mays
  Peptide Sequence Number=SeqID_70858
atgggtttcaaaaccctgagtacggagtgtacttttgcaagtcttaccggtcaaaagaaaagactctcaaggttaagatggtttgagggagtcaaggttgagatccccgaccacggcagcggagcagtggctccggcgagcctgtaccgaccggaaaacgcaatgaccgacactcaagtgcggctgacacctacttccacccataacgaccttaatccctcaaccaatttcggagttctagctcccaatctctctgtccacggtgatggcgcgaactga

SEQ ID NO: 29080 - DNA, 348 bp, Zea mays
  Peptide Sequence Number=SeqID_70859
atggggatgtccaccgcggcccaagcgtattggcactccatcgagcgtgccgagcttggtggatcggatgacttagaggaggtctcctcggaagaagtggactcctctgactcttccaagggctggagcagcggcaaaggtgacgatggcgaggacgacggcagcagcggcgatgacgatggcaaggatggtggcggtggcgacggcgagggcgacggtgacggcagtaagggcaatggtgacggcagcaagggcgatggcgacggcatcaaaggcgatggcaatggcgacggcgacaagggcgacggtgacggcggcaaggccagtggcataatgctgctggtttaa

SEQ ID NO: 29081 - DNA, 483 bp, Zea mays
  Peptide Sequence Number=SeqID_70860
atggcggacgccttgtgggggggtttgttgcgggggcgcagggagaataaagcgagcccctttggccaccttcccatttattccccaccgaacgaccctgtcttagcttttgcgccacaatttaccgtatgccaccgtcgtgacgaagggagtgccgtaggggcgctgtcgtcgttcctctccaccatcacagctcggaagccatggagtgacctcaagcaaaccagaggaggtgtagatcgggagccggggagtcgtcgtgctcgtgggtcctcggtgcggcgagatttctcgtcgagatcccttgcgccaccatggaacaattcgagtcgcggccggcaattcataccgcgctactgtggttttgctataatttgtatgtttgtattaatgcgagtagacgagcaagccacagaggatccaggggttcagcaggtggagactgttgagcaggagctcgttgaaggcaagttgtgctcttga

SEQ ID NO: 29082 - DNA, 1221 bp, Zea mays
  Peptide Sequence Number=SeqID_70861
atggctcgtggtattgtaggccggctgcatgttgctgctgatgtgcagaaactttgcactttagcaattgaaaaggctaatgagtggcttagctcaaacattcaatctgaaacaaaacaaaatgatacacttccttctgcctgcaggtttaaatttgaagatattacagcttcatctttggtgttggttctcaaggaagctgtttcctcacagtatcatgctatcaaaggctataaactctggtactggaatagcagagaagcacctttcacaggagagcctgctgttttccccaaagaccaaagaaggattcttatatccaatctgcagccctgcacagaatattcgttccgtattatttcatttactgaggatggtgaactgggccattctgaatcaaaagtatttaccaagagtgtggaaattattcgtaagaacacagagctcggagcagaaggttgctcatcttctgccaagggagctggtaagagacaaaatgttaggtcattaggcttccaagtgcgccagctgggtaatgtcttccgaaaagcacagactgaggagaatggttaccccagcgcactgtgtaaagatgagattgaagattcatgcgatcagagtgattctgtgattccagtcaaggaccaaattccacgtggtgcctcccgtaagctcgatctcaatgagacctcagtcccagacctaaatgcagaagtagtcatgccaacagagtgctgccagaatgacaacggctgtagttctggaaagaatgcattcacaaaatcgaatggttgtggtgactccgaaacttgtgcggaggggcatgtaggggatgcaccggccatggaatccttgtctcaaagtcgcaagcaggcatcagatttggagcaggagacttgtgttgatgacagcaatttggtggcccgtgcagttaggctctttgccccgaagttaggccagttagatgacaactatgagtactgtgtgaagattatacgttggttggaatgttctggcctcattgagaaggatttcaggatgaaatttctaacctggttcagtttgagatcgacagaacaggaacggagagttgttatcaccttcatccgcaccctaatcgatgaacccagtagtttggctgcgcagcttttggattcctttgaagaaattgttaccagtaagaggctaagaactggtttctgtactaagttgtggcactaa

SEQ ID NO: 29083 - DNA, 288 bp, Zea mays
  Peptide Sequence Number=SeqID_70862
atggcgttcttcaccaatatcatccatcgctttggagttccaaactccatcatcaccgacaatggcacgcagttcaccgggaaaaagttcttggacttttgcgagggccaccacatccatgtggactgggccgtcgtagcccacccgatgacaaatgggcaggtggagcgcgccaatgtgtcctacgaatgggtgagagagcatgtaagcggcaaggccgaccaagccgagggactcctacgcctccgggatacggatacctcactcatcaccttccgcgaaaagtaa

SEQ ID NO: 29084 - DNA, 459 bp, Zea mays
  Peptide Sequence Number=SeqID_70863
atgccggcgaccagcacggagccgatcaagcctctccgcgccgcggcggctgacggcacagacccttacgcgttctcgcccaaggcacccagctgctccagccgctggcgcgagctactcgggctcaggagagcgtcagccgcgcagagcccgagcaccaaggcctcggcgtcggcgtcgcccgcggcggccaagaccccggcatcagcggcgagggcgacgaactccgcggcggcaaggtcgctcaagctcttactccagctcaccctgcagcttccacgcggcgtccaagtcgcggtcccggacaaaattacttttgggggagagcttgtacattccagtttccagcagaagactacacataacctgactagtgtagtgctgaccggtaacacaactaacagatctggccaatgctcatacagattcatgccacagaaccagcacgagaagatgtga

SEQ ID NO: 29085 - DNA, 213 bp, Zea mays
  Peptide Sequence Number=SeqID_70864
atggacgtgggcagggagcggcgggacgtcgacgcgccggtgctgggcgagggccccgccgtgatggccaacgtcgaggcagtggcggagctggcgttccggtgcgtggcgccagacaaggacgatcggcccgacgcccgggaggtggtggccgagctcgcgaggatccagacgatgctccccgagcttcccggccggatcgcacagaattga

SEQ ID NO: 29086 - DNA, 3102 bp, Zea mays
  Peptide Sequence Number=SeqID_70865
atggccttcttcgtccgcgtccgcatggtactcatcttgctcgccgtcgccgcagcacgcagcgccaccgcactcaccccaccaccatccagtgccacagaccttgctgcgctgctcgccttcaaagcaatgctcaaggacccccttggcatccttgccagcaactggactgctactgcatcattctgctcgtgggcgggggtctcctgtgacagcaggcaacgcgtcactggcctcgagttcagcgacgtgccgctccagggcagcatcacgccacagctcggtaacctctctttcctctcgacccttgtcctcagcaacaccagcgtcatgggtcccctgccagacgagctcggcagtctgccctggcttcagacccttgatctatcacacaacagactgtcaggtaccatccctcccagccttggcaacatcactaggctcgaggttctcgatcttgcttacaatgatctaagcggaccgatcccacagagcctgttcaacagcacacccgatctgagtgaaatatatcttggctcgaatagcttgacgggagcaattcctgatagcgtcagctcattgctaaagctggaggtgctcaccatagaaaaaaacctcctctcgggctccatgccgccttctttgtttaatagttcgcagctccaagcactgtatgtcggacggaacaatctctcaggtcccattcctggaaatgggagctttcacctccctctgctgcaaatgctgtctctccaagaaaaccatttcagcgggccaatccctgtaggactctctgcatgcaagaaccttgactcactgtacgttgctgcgaacagtttcactggccctgtgccgtcatggctggcaacacttccaaaccttactgcaatagccttgtcaatgaataacctgactggaatgatcccagttgagctgagcaacaataccatgcttgttgtgttggacctcagtgaaaacaatctacaaggggggattccaccagaactgggacagttgacaaacctccagtttctaggtcttgcaaacaaccaactaaccggtgccattccagaatccataggcaatctatcggaccttacccaaatagacgtatctagaagcagattgacaggatcagtgccaatgtcatttagcaacttgctgaatctcggtcgcatctttgttgatgggaaccgtctctctgggaatctagatttcctagctgcattatccaattgcagaagcctgactaccattgtcatttcaaataatgagttcacagggatgctaccaacttcaattggaaaccatagcacgctcctagaaattttgcaagcaggtaacaacaacatcaatggaagcatccctggtacatttgctaaccttaccagcttatcagtactgtctcttagtggaaacaacctgagtgggaagatccctacaccaatcactgacatgaacagtctccaagaattggacctctccaacaacagcttgtctggcaccatcccagaagaaatcagtggattaacaaacctagttcgtttacgtcttgacaacaataaactaaccggtcccattccaagcaatatcagtagcctaagccagctgcaaattatgacgttatcccaaaactcattgtcttcaaccataccaacaagtctgtgggatcttcagaaacttattgagcttgacttgtcacagaactctttaagtgggttcctgcctgctgatgttggaaaattgacagcaattaccatgatggatttatcaggaaacaagctgtcaggtgacatcccagtctcctttggtgaactccacatgatgatatatctcaatctgtccagaaatttattccaaggatcaataccaggttcattcagcaatatacttaatatccaggaattggacctatcctccaatgcactctccggtgccatcccaaaatccttgaccaatctcacttaccttgccaacttgaacctttcttttaacagattggatggacagataccagaaggaggagtgttctcaaatatcacactcaaatcattaatggggaacaatgcgctgtgtggccttcctcgcctaggtatagcacagtgctacaatatcagtaatcattcacgatcaaagaacttgttgataaaagttttattaccttcgctcctggcattttttgctttatctgtgtccttgtatatgttggtaagaatgaaggtgaacaaccgaagaaagatactagtaccctcagacacaggcttgcagaactatcagctgatctcatactatgaacttgttcgtgcaaccagcaacttcactgatgacaacttgctagggaaaggaagctttggtaaggtcttcaaaggcgagctagataatggatctttgatagcagtgaaggtactaaacatgcagcacgaatcagcttccaagagttttgacaaagaatgcagtgcacttcgaatggctcggcatcggaatctggtgaagataattagcacttgttccaatcttgacttcaaagcactaattcttgagtatatgccgcatggtagcttggatgattggttgtactcgaatagtgggaggcaactcagtttcctccaaaggtttgcaatcatgctggatgttgcaatggcactggagtatctgcatcaccaacattttgaagctgtcctgcattgtgatttgaagccaagcaatatcttgcttgacaaggacatgattgcacatgtttctgacttcggcatttccaagttgctagttggagatgacaactccatcacattaacaagcatgcccggaactgtaggatacatggctccagagttcggatcaacaggaaaagcatcacgagccactgatgtttacagctatggaatcgttcttcttgaagtcttcgtggggaaaaggccgaccgattcaatgtttgtcagtgacatcagcttgagggagtgggttagtcaagcattcccacatcaactcagaaatgtcgttgacagtagcatacaagaggagcttaatactggtatccaagacgcaaataaacctcctgggaacttcaccatcttggatacctgcctagcgtccataaattga

SEQ ID NO: 29087 - DNA, 480 bp, Zea mays
  Peptide Sequence Number=SeqID_70866
atggggctcgaccaggggagtgagccgcgttggtctgggcgggctcgccggagcagggacgcgcacaaggaatgtgtcggtgaggaaacagggcagctagcgccggtcacgacgagcagcaccaagacccaggagcagaagcgagctcggccgtgcccaggggctccaggccgcgtgcgggcacgcgaggaagtcgccgggggctcagccgcaacgccgcgagccgctggccgcgcgctgcgagcagtgccacgcaagccgcgccctgcacgggccgcaggggtgctcgccggggcgcttgccggggcaggaagctacgcatgggaggggccaggctcgcgcaagaacagggaactgcactggggaaagcgctcgccacggggaagaagagggagaggggcgcggcgagagggagttctggccggtgtgcgtccaccggagtcgcacaggctgaccgtggctagccgcagggcgggctaa

SEQ ID NO: 29088 - DNA, 191 bp, Zea mays
  Peptide Sequence Number=SeqID_70867
aatggatcttggagtgcaaacacaagagacctggcttgaaagccttgcaagaagcaatagatgaatttattgttgctcatgaggaacaacaagagaaggagaagagagagaggcccgtgcagcagaagatggatgggcagttgttcatcacaaggggaggaaaaagaccacagatgctgaaactggaatag

SEQ ID NO: 29089 - DNA, 918 bp, Zea mays
  Peptide Sequence Number=SeqID_70868
atggccaacgacgacactgtggctggccaaactggtggcggtgaggctgttgttccttcaacggagcccatcaacatagatcctgacactgttgtggtcgatgctgaggcagacacacctactagttctcggcagcgtggcgcgggggcgataaggacgctcaagcggggtgcgtggacgccggaggaggacgagctgctggcgcgggccgtggcgaaggacggggaggggcggtggcgcacgctgccgcggcgggcggggctgcttcgctgcggcaagagctgcaggctccgctggatgaactacctcaggccggacatcaagcgcgggcctatcgccgccgacgaggaggacctcatcctccgcctccaccgcctgctcggaaaccggtggtcgctgatcgctgggcgtctgcctggccgcacggacaacgaggtcaagaactactggaactcgcacctcagcaagaagctcgtcgcgcggggcatcgacccgcgcacgcacacgcctctgcccgcagcagctgcgagcctgcactcgcactcccaccgcgccgacgacgactcaccagcaggagccgccggttcgtctgccgacaagacgccgccgccactggtggaagtcgagccatcggttgcgccgccgccagcgcagccgaactcatctttcggcgacggaagcagcggcgacttcgcggggggcatgatgggtctaggctccgagggcttcgatggagtcggtgatccgttctgtgcaccagctcctggcggcttccacttgggctgccccgtcgtggacgacgccaccttctcctcgttcctcgactcgctgatgaacgaggagcgcatgcgcatcgccgattacattggagatcacagggatgctgatggtgggaacgaccagggtggagcttattag

SEQ ID NO: 29090 - DNA, 903 bp, Zea mays
  Peptide Sequence Number=SeqID_70869
atgtgcaacctttggaagaaatattcggaccaaggtatttttatgggtaaggtccaccacactggtataatggcccctcgcgtatcctcggtggttgcactattggccgcgccgccccagcaaatctcacgcacagaaacaccaaagccccaaaggcccaaactcaccacctcccaatggagaacggcgacgaaaaccctcgcctcccccacggccgccgccgagacggacgcgctcaacggcggcgtcgcggaggaggagcaggtccccatcacccaccccgcaaagtcctacgtcacgctcgccgacgacaaccccgctcctaacggcggcgtcgtgaaagagggaggagggcggtgcccacaccaccgcgaagtcctacgcagctgtcgcccgcccaagccgagatcgaggacctcccgcgccgccaagctcgacctggaggagaagctcgctgaggcccgccgtgagaacaagtccctcgccgaggagacgcaccgcagcgaggggatcttcacgcaggcccgggaggaggtcaccatcgccgagttcgccgccacctctgccgagaaggaggtcgcctcgctccgcgcggaggtcgaacgcctcgatgctgttctcaggatcgagaagggcgagcacgagctggacaagcagagacacgagaaggtcgccaaggaggtggatgccgtgcgccaggagaagctcaagctagaggaggagatcagagccctgaaggcttccgccaccgccgccgccaccaccaaggagagggaagctgcgccggcttctgaggccccgaaggaaggggaagtcgcgtggctggggatggcggtggctgcggctgccggcgccgccggcacggctgccatcatgctagtttatctccgccttaagaggtag

SEQ ID NO: 29091 - DNA, 393 bp, Zea mays
  Peptide Sequence Number=SeqID_70870
atgggttacaagtggtggaagggtgtatggcacatgagggttcaaagagatggacacaacaaacttaccagaggaaaggcagcttcacgagctctaggcccggtggctagacggggtctagaggcggcgcggtctggacgagatccggtggtgatgggatctggacgggatcccgggcatagcgatgactatcgaaaagagatgttccttccatgtgctgattggttggcacaaggtatatacgttttttgtaaaataaaaaataatcatatcgggtcgggcgagcactacgggccgaggctacagcccaagcacgacacgacgttcttggctcttgcaagcattaggtcgtctctgagaccacattggcgcaatggactacatggtgtttga

SEQ ID NO: 29092 - DNA, 1008 bp, Zea mays
  Peptide Sequence Number=SeqID_70871
atggcggacgcgcgccgacaagcagcaagatggctggcggcggagccggaagagcacgacgacggcggcggtggtggtgctgcggcggcggagaccgccggcgtcttgtccggtgagtaccaggccctcgagacgtccacgctggtgtcggctctggcccacgtcgtcgctagcggcggcgaagggtacccgccgtggtccggcgcccggcggggggatgacagtcgtcgtcctacggcaacaatggtggcgccggtcggcaccggcggccacggctactccgccgcaaccgcaccgacaccgccggctcacttcttcggagcagggcgcggcggccatggagggccactactcgccccacggcctccgccgccgaggcgggcggcgagcggcggttccgcggcgtgcggcagcggccgtggggcaagtgggcggcggagatccgcgacccgcacaaggcggcccgcgtctggctcggcacgtttcgacaccgcggaggccgcggcgcgcgcctacgacgaggccgcgctccgcttccgcggcagccgcgccaagctcaacttccccgaggacgcgcgcctcaccacggcgccatccgctgcggtcgctccggcggcggcgggatccacgacgacgatggccgtggcggcctcggcgggcgggtcgtaccagcaggaggccagcgccgccgtcgtctctgcagactacctgcagtaccagatgatgcttctgcagggggccaccagcggccaaggcagcagcagtcatggcgggtatcctctgtactacgactatggcggccacggcggggctggcgctggcgctggtggtggtgccatgagcagctcctactctttccccgcctccacggttaccgtggcttctgtgccgtcgtcctctgcctcctccgctcccagctatggcgaggcggcgcagtgggcaggcagctggccggagggtagtgcgtggagctatccggcgaccacggcttttggtgtcgtcaagcca

SEQ ID NO: 29093 - DNA, 342 bp, Zea mays
  Peptide Sequence Number=SeqID_70872
atggggctatccatgatggcttacatcacacgtcgtagagcacgtggcagcaccgggtctcgccttgtgtggggagtagtgactgggaccgcccttccttgtgatagctctggaccgcccttggctagggtccgggtggtgctcgggggaggtcccgtatcctccggtttggcagcaccggacccccttaggccagaggtccgggtgggccgccatgagggtcgaggccgttcccgggggtctggcccccaggcgcaagtgccgagagccctcgtcttcaagacacgtggcaaacctggaccccctccgctgggattccagagcgctggttataggggctag

SEQ ID NO: 29094 - DNA, 171 bp, Zea mays
  Peptide Sequence Number=SeqID_70873
atggctggcaagcggggcctagatgccagcgctggaatccagggtttagcgcgcaccagagtggacgtggggttgggccgcatggagagggaaatagtggagtgggccgagctaaagggatttggcccaacgaggttagctcaacttaaggttagacttcatcagatgtaa

SEQ ID NO: 29095 - DNA, 269 bp, Zea mays
  Peptide Sequence Number=SeqID_70874
atggtatgtctccaattagccgacggcggcgcgacgacaacccatccaccctccgccaacatcgatggtggccagaatagtcaactgctggggggagattctgttatggggatgcttccgaccgatggggcccacctggcggtgacaaaacgaaagatgccagcacctggaatccagggtttagcgcgcaccagagtggacgtggggttgggccgcgtggagagggaaatagtggagtgggccgagctaaagggatttggcccaacgag

SEQ ID NO: 29096 - DNA, 333 bp, Zea mays
  Peptide Sequence Number=SeqID_70875
atggaattccatgagaagaaccgttgcaatgcaagaagaccagcagtaaagtcctccagcacagccggcttcgacatcaacatgctccagtcctccagtaaagtccttggcagtagtcagaacccaggagaccagcagaagataccctcgaggaatcaggacgggttcccaccagaaacaaaaagcagacaccaacgttccaagacccaattccagaagcagacgaagagtttaggtcgtctcttgttggatgccttgaatgatgggaattcaactcagtgggcatcagaatatcagatcagatcacgcggtttaggtcttcaggaaacctaa

SEQ ID NO: 29097 - DNA, 531 bp, Zea mays
  Peptide Sequence Number=SeqID_70876
atgaacgtcgacgagcagggagtggtcggtcgagtagggagcgggacagggggttcggccggggaacgcggacgcgatggcgaacggtcgcgggacgtcgggggtcgcggtcggctggcgcgttcctggcgcggtgctacgtggcgcgtcggacgtcggttccgggtcgcggtcggggttggcggccttcgggccttgggcgcggcgctgcagggcctggcgcggggtggccggacggttgggcaggagcgcgcgcagggcggccggggtcgcacttggtcgtcggctgcgcagcgcggtcgggtgcaggggctcaacgcaggtggcgcgtcgggggcgtttggcgtgcttggcgcggccgagtcgcagggcaacgcgcggtcggcgcctaggctggcggctgcgtgtggagcagagaggcagggaggaggagagagccgggtggggcccgcgcgggagcaggaggcggtggcggctaggaaggaacagggggcggcggctgctcctacatggggccctggtgggctttag

SEQ ID NO: 29098 - DNA, 153 bp, Zea mays
  Peptide Sequence Number=SeqID_70877
atggctggcaagcgggtcccagatgccagcgcctggaatccagggtttagcgcgcaccagagtggacgtggggttgggccgcgtggagagggaaatagtggagtgggccgagctaaagggatttggcccaacgaggaaaggtgttttgattga

SEQ ID NO: 29099 - DNA, 129 bp, Zea mays
  Peptide Sequence Number=SeqID_70878
cgctccaacactcagtctggtgaccacgctcacccaactgctcacctcaccgtggccgagacgcttggagcaattgcatccccggagctctaccgtgggggatgcctcaggatcgagttggctggccag

SEQ ID NO: 29100 - DNA, 222 bp, Zea mays
  Peptide Sequence Number=SeqID_70879
atggtgggaagaaggcgctgctccggcgttcggcgactggtggagaaactcgccgccatgggaggaacagagggaagactcgaccgagctgaaaatgcagccgatgacgaccagggagaccgagccaaggatgctggcggcctgcagcttgcatccatggaggggcgagcacaggaagaggctgggccgagctccaaccggaggggcttgctactgccgtga

SEQ ID NO: 29101 - DNA, 498 bp, Zea mays
  Peptide Sequence Number=SeqID_70880
atggcggagacggcggacatggagcggatcttcaagcggttcgacaccaacggcgacggtaagatctcgctgtcggagctgacggaggcgctacggacgctggggtccacctctgccgacgaggtgcagcgcatgatggccgagatcgacaccgacggcgacggctgtatcgacttcaacgagttcatcaccttctgcaacgccaacccggggctcatgaaggacgtcgcaaagccgctcgcgtcgtcccgcagtggcgactcgggcggaacccgcgcccatgtcgcccaaacccgccggccccctccgccaccctcgctgccgcctaagcacgctgccgggaagcccacaccggtgaaggcggcgacggggctcacgtcagtatcccttcatcagtcactggaggtcaggcagagcatgttcgaggagatgcagcagacaatgaagctacaagagtcgcaagccaagcaccaggatttatgggccaaaatgagctaa

SEQ ID NO: 29102 - DNA, 1317 bp, Zea mays
  Peptide Sequence Number=SeqID_70881
atggaagtgattgacacgggaactcctctcagtgttccagtcggtggagctactctcggacgaatttttaacgttcttggggagcctattgataatttgggtcctgtggatactagtgcaacatttcctattcatagatctgcgcctgcctttatcgagttagatacgaaattatctatctttgaaacaggtattaaggtggtcgatcttttagctccctatcgacgtggaggaaaaatcggactgtttgggggggcaggagtaggtaaaacagtactcatcatggaattaatcaataacattgctaaagctcatggaggcgtatccgtatttggcggagtaggggaacggactcgtgaaggaaatgatctttatatggaaatgaaggaatccggagtaattaatgaaaaaaatattgaggaatcaaaggtagctctagtctatggccaaatgaatgaaccgccgggagttcgtatgagagttggtttaactgccctaactatggcagaatatttccgagatgttaataagcaagacgtgcttttattcatcgataatatctttcgttttgttcaagcaggatcggaagtatccgccttattaggcagaatgccctccgcagtgggttatcaacctacccttagtacagaaatgggttctttgcaagaaagaattacttctaccaaaaagggatctataacttcgatccaagcagtttatgtacctgcagacgatttgaccgaccctgctcctgccacaacatttgcacatttggacgctactaccgtactttccagaggattagcttccaagggtatttatcccgcagtggatcctttagattcaacctcaactatgttacagcctcggattgttggcaacgaacattatgaaactgcgcaaagagttaaggaaactttacaacgttacaaagaacttcaggacattatcgcaattcttggattggatgaattatcggaggaggatcgtttaactgtagcaagagcacgaaaaatcgagcggttcttatcacaaccgttctttgtggcagaagtttttaccggttctccaggaaatggccaaattggtgtattaccaaaccacgcccccattaacacagctgtagatatgggtcctttgagaatacgcctcctgaacgaccaatggttaacggcggttctgtggagtggttttgcaagaatagttaataatgagatcatcattttaggaaatgatgcagaactgggtagtgacattgatccagaagaagctcaacaggcacttgaaatagccgaagctgactcggacctgttctga

SEQ ID NO: 29103 - DNA, 171 bp, Zea mays
  Peptide Sequence Number=SeqID_70882
atggaagccaagcctttcgtggttcaaaaacgccgaatctcgtctgaatcatcatttgtcaggacttttcggaggttcatcatgacaggggcttttgctcatggagctattttttcattagggattacaatccggaacagaatgaagataatgtattggcaagaatgttag

SEQ ID NO: 29104 - DNA, 528 bp, Zea mays
  Peptide Sequence Number=SeqID_70883
atggcacaccgaggatccaggatctcaagagtactaacaggtccggtccaggccctcggcctccacattctggtcgaggcccgcgacgacgatgatggcgtcagattggcgcgccgcctcgatggccgtggcgatgggctggttcccgcggcacgtgacgtcggtgcagccggcctgctgcacaacccgcgcggcgtacgaggcgacgccctacagcggcatggtgtagcggcaggtcttgcccacgtagttcccaatcatggcaacggtggcgtcggcgtgcgggccgacgacgacgacgtggtgcgcggcggggcggagcgggagcacgtccctgttgtgcttggcgccgcgccggttcttgaggagcatgacgcggtgcgcgccgcatcgagcgccaggtcctggtgctccctggagcacacgtccgcggggcccaggcgcccgaacgatccggccgcggggtccccgtcgaacatgccgagccgcatctgcacggtgacggtgttgaggagctacattcagtga

SEQ ID NO: 29105 - DNA, 1784 bp, Zea mays
  Peptide Sequence Number=SeqID_70884
agcagagcgtagactgcccccgcctccgctcgccctccgggatcctcgccgccgcaaacatctcgccaaccacgcacaccgaaaaccccgcccgcaccgcatgcccgattgcgactccgtcgacggcaccatacgcgggcgctcgggcctggacggctacatcgtctccgactgcgactccgtcgacgtcttcttcctcgacccactacacgcgcacccccgaggacgccgccgccgccacgctccgcgccggcctcgacctcgactgcgggccgttcctcgcgctctacgctggctccgccgtcgccgcgggcaaggtcgccgacaccgacgtcgacgccgcgctcctcaacaccgtcaccgtgcagatgcggctcggcatgttcgacggggaccccacggccggacccttcgggcgcctgggccccgcggacaatagaagaggagcactttcgctgatgattacggcggaggagaagagccccgaaagggaggaggaggaggaggaggcgaacccgcgcgcggaggcttttctggagatcatctgccgcgtcccggcgggggaggtggaggcggcgctgtccgcttgcggcatcggccccacggccgaggtcgaggaactggtgctcaagtcccgcgaatgctacaagcgccctaagtccgccgtctgcttcttccgctgggcgggacagtccgtgtcgcacaccgcctacgcatggaacctccatgtcgacatcctcggcaaggccgccatgttcgagcccatgtgggatgccatccgctccatgaagcaggagggcggcggcgggctcgtctccgtcgccaccttcgcctccgtcttcgcctcctactgcgctgctggcaacatcaaagatgcaatcgcggccttagacgtcatggaccgctacggcctcaagcacgactccgtcgcgctcaactcgctgctctcggcgatttgccgcgtcgagggtcgcgcgcaggatgcgcaggacgtcttcgagcgtaccaaggccaccatcccatccgacggcgacacgttcgcgatactgctcgaggcatgggagaaggaggggaacgcggtgcgcgccaagagcgtctttggcgagatggtcgtccgcatcggttgggacgcagccaacgtatccgtgtatgactccttcctctccactcttgttcggggcggcttgttggacgaggccttcaaatttctgcaggtgatgcggagcaagggctgcttgccggggatcaattttttctacagctgtggatctggtcgtccacaaggcgccatgattggcctccactgcaatgctggtagcatagacgatgctcttgggttgcttgacaaaatgcccctcaacggcgtctttgcaaattctgtcacatacaacaccatactggaaggattcatcaagcatcgcaaggctcgtgaggctgaaagtttcctaacggagatgagcaagaatgagcaactgcctacttcatccaattgcgctgctgctatcagcttgttctttaaggagtttaacccatctgtagcaatcgacgtgtggcgctgtattgtggagcacaacattaccccagctgaggactctgccaaagagctaatagcagggctgcttgattttggtaggtttactgaggtgacgaagcgtgctgatgagatgattgacatgagagttgagttgtcacggtccacaatggagaatatgaagcgtgcttttgctaaggctggcaggcaccaatcatatgacaacattgcaagaaggctaaagcgatattag

SEQ ID NO: 29106 - DNA, 186 bp, Zea mays
  Peptide Sequence Number=SeqID_70885
atgaacttacacagattacaaatagacgagaacaacatatcaggccccataactaactcttttgccaacttaacaagcattaaacatttccttgttgataacaataatttatctgggcctcttccaccagaattagcagatacacgtagtcttcttgctatcttgattcctatagctgccaaatag

SEQ ID NO: 29107 - DNA, 777 bp, Zea mays
  Peptide Sequence Number=SeqID_70886
atgtcctatgcgtctctcgtgacctacgaaggtgctgcgaatgccttgtcccgcgagggatgcaggcacttcgaggccttcgaccaagccaacgaggacttcgatcgtggcgtgttccagattgaagatgacgtgttgaagtgctctgctggggcgctttatgataggatgtggggccctcacggacgtgacatcgtccgagagatggccgaccgagcgctggcacatgcgatgagggaggagggccccgcctgccttgaaagctcgccagcccagaaggatgctgcggtggaggcaggggtggaagagcaatccttgctccaaggaggcgacgctgagggtcctgcagcggcggacgcttctgagcaggttccgacgtctgggcctgtgcaagcaaactgtgatgatgacacaaatgatgatattttgatggatggaaatgtggtgtttcttagtgacgcgtttggcgaatctaatgttgggtcgtggtcttcggaaggtgaaaagttggggagcctattttcttggacagatgacaaatcctcagaagatgatttagattattttgcggcgttagatttagctgtagcggagtctccgttgagggtcgcccccttaatacgccggcgacttcagtcggggcagtccttggtgacccactggggcaaaaaaagatgggggtatcgaaacaaagtgtcagagagtctttgcaaggtattagaagacattgccgaatgggcatggagaggtcgtgtcttcggatcggaccatggttag

SEQ ID NO: 29108 - DNA, 490 bp, Zea mays
  Peptide Sequence Number=SeqID_70887
atggggctcgaccagggagctagccgcgccggcccaggcgagctcgccggagcagaagcacagagggggagagggggcttggcaccgccggccaccctcgcggtgagcagggaccggatgcctggcgcgtcgccacgccgaccgaccgccgcgtcgcgccctgcgcgggggagggcagccatggccagggggcgagccggccgagggggcatgggcgggctagagccgcgccgtgggggctcgccgcgcccgcaatcggttgccgtgccgtccgggcccgctctggttgccgcgggcgcacgcccggggcgcaggttccccggaattgggccgccaaacgggggccggggggcaaggcaggggcagggcccctggacgtgggggcccccgccaacggttggctcggggaaaggggacaaaccggtccttgccgttgaagaagggagcccgggggttcgctggaaagacccggaaatcggcgggggcgggg

SEQ ID NO: 29109 - DNA, 1803 bp, Zea mays
  Peptide Sequence Number=SeqID_70888
atgaccgaaaccaagatccgctacccacaagtccagaagctgctgtacacagtgatcctgacgaggcggaagctgcgacactacttcgagtctcatccggtaactgtggtgtcatccttccccctgggggagatcatccagtgccgagaggcctcgggcaggattgcaaagtgggcggtggaaatcatgggcgagacaatctcgttcgcccctcggaaggccatcaagtcccaagtattggcggacttcgtagccgaatgggtcgacacccagctgccgacggctccgatccaaccggagctctggaccatgtttttcgacgggtcgctgatgaagacgggagccggcgcgggcctactcttcatctcgccactcgggaaacacctacgctatgtgctacgcctccatttcccggcgtccaacaatgtggttgagtacgaggctctggtcaacgggttgtggatcgccctcgagctaggggtcaggcgcctcgacgcccgcggcgactcgcagctcgtcatcgaccaagtcatgaagaactcccactgccgcgacccgaagatggaggcctactgcgatgaggttcggcgcctggaagacaagctctacgggctcgagcttaaccacatcgctcggcgctacaacgagactgcggacgagctggcaaaaatagcctcggggcgaacaacggttcccccggacgtcttctcccgggatctgcatcaaccctccgtcaagatcgacgactcgcccgagcctgaggcgccctcggtccagcccgaggtaccctcggcgcagcccgaggcaccctcagctcggcccgaggcaccctcggttcagcccgaggtaccctcggccaccgagggcgaggcattgcacgtcgaggaggagcggagcggggccacgcctgatcggaattggcagaccccgtacctacaatatctccgccaaggagagctacccctcgaccgagccgaggctcggcggagggcacccgggggctacacgcacctgctggtcgccatcgacaaattctccaagtgggttgaggtccgacctctgaacagcatcaggtccgagcaggcggtgacgttcttcaccaacatcatccatcgcttcggggtcccgaactccatcatcaccgacaacggcacccagttcaccggcagaaagttcttggacttctgcgaagatcaccacatccgggtggactgggccgccgtggctcatcccatgtcgaatgggcaagtagagcgtgccaacggcatgattctacaagggctcaagcctcggatttacaacgacctcaacaagttcggcaagcgatggatgaaggaactcccctcggtggtctggagcctgaggacaacgccgagccgagtcacgggtttcacgccgttcttcctggtctacggggccgaggccgtcttgcccactgacctggaatacggctccccgaggatgagggcctacagcgatcaaagcaaccaagctagccgagaagactcgctggaccagctggaagaggctcgggacaaggccttactacactcggcgcggtaccagcagtccctgcgacgctaccacgcccgaggggtccgaccccgagacctccaggtgggcgacctggtgcttcggctgcggcaagacgcccgagggaggcacaagctcacgcccccctgggaggggccattcatcatcgccaaagttctgaagcccggaacgtacaagctggccaacagtcaaggcgaggtatacggcaacgcttggaatatccaacagctacgtcgcttctacccttaa

SEQ ID NO: 29110 - DNA, 231 bp, Zea mays
  Peptide Sequence Number=SeqID_70889
atgtttggtttacaggtggtgatgaggaatgatggttatgattatgcttatggtaatgctagtccactacagccaaacatgatatttgctgagtatgttgatgtgtactcacccttgctctacacaccaaaccccccttcctcaggttgtcctcattgcgaccacttctcaggagaagatgaagccgtggaggaagacttccaggagttccaggagtacgatgagttctag

SEQ ID NO: 29111 - DNA, 330 bp, Zea mays
  Peptide Sequence Number=SeqID_70890
atgacaaagcctctctctgttatcgctttacgtcttctggggtcgaacctgaccagcttgatacttactacaaagggtaagaatgatgacaaagaacatgaagccgaggattctgatgatctggaagacattgccaaagctctcgggtatcatgcaggagcaactatactctatgggagcgatagggacattttggtctatgtccctaactccgaagagactaaaataggactaatgcttagcaaagcacttatgcttcagcaaaatatggaggagcaaaagaccaaagcaactatatcaagtctccaatccaaagttaaaaagctttag

SEQ ID NO: 29112 - DNA, 195 bp, Zea mays
  Peptide Sequence Number=SeqID_70891
atgaccaaggatgaacaaagtgcaaatcacaagttaaggaagaagaaaagaagtggagagtggctgtgtgcagccaaaggctgtttcgggctggggcaccggactgtccggtgtgcaccggacagtgtccggtgcgccagaccagcatggagcaaaccagccgctctcgggtttttcttcggcgacttcggctaa

SEQ ID NO: 29113 - DNA, 456 bp, Zea mays
  Peptide Sequence Number=SeqID_70892
atggatcttcgaactagaacccacgtgcgagaagaacttcgtgtcgcggctagggatgctcctggtgctcgaggagcggacatagaccacgagcgcagggacatcgtggcgagggcacagacgacattgatcagcatcatcaacacgcggaacgacaagaggcttggcaccaggacagagatcaagcacaacaccgacggcggtgtgagcaggaactcgatagcggttacggcaccggcgggctttcggccgaggtggtgtcgatgcagttggggcttctgcatgatgacggcacaaagcacgacgtcagcgatccacgcgagggcgcgacagcagcacaacacggcgagggtagcggcaattggtgttcgtctcgcagcgaggatggcgcaggtggcctatgcgcgggcaccggcagaggaatgcagggggaagactctggccgtgaggagctga

SEQ ID NO: 29114 - DNA, 330 bp, Zea mays
  Peptide Sequence Number=SeqID_70893
ccgcaagcaacacggaggaagctgatgggaggaggcggcgacgtcggtccatgtgggagcgacgagagcgagaaaacccgatggggaacgccagccacacttctgagaggcaccggggagaaagtgctagtcggggaggaggcgttggccggcggagacgtcgacgacggcggcgtgaggaccggcagcaatggggccgacgacgggccgctaaagggctgggggctccgacgacgggcgctgctgggcgccgacggcgctgttgaagttggcggctgggtgagcagggaggtgccgacggctggagagcagaggacagccagcggctag

SEQ ID NO: 29115 - DNA, 501 bp, Zea mays
  Peptide Sequence Number=SeqID_70894
atgggcaaaggcaagagaggtcgaggctcgccccgccatgccggcgacaagcagaagcaggatccaagccctccctcggaggacttcggcgattcggagtactcggaggaggaggtttcctccgagtctgaggggtcgctggctctcacctctcccccgacgtcgtccgatgactcgaacgactcccaagggatagctgcagatgtgtggacgtacatccgctccgtcgagcgcgccggtctcgaggggtcgaatgagtcggaggtctcctcagatgaggaggactctttcggctcatccgaggagcggagcggcgacgacagcgacgacgagggcagtggcggcgatgacgacagcgacgacggtgatggcagcgagggcgacgacgacgacggcaagggcggtgaaggcgacgacggcggcaacggcggcaacagtggcggtggcagcaaggacggcggtggcggcggcaaggccagtggcaaagcgccactggtttaa

SEQ ID NO: 29116 - DNA, 498 bp, Zea mays
  Peptide Sequence Number=SeqID_70895
atggacagtgtggtcctctcgtggctcaacgacaccatcaccgtcgagctacaggatattggggatctctccgtaggtgagtactgccgccagatgaagagcatggcagactctccacgacctcggcgagcccatcgccgatcgtaccgtggcgctgaaccttctgcgtgcctcagaccctactacggccacctgaagtctctcatcaagaggatcgtgctcttccccaacttccacgttgtctgtaacgagcttctcctcgaggagctcaccatggagactgaggcacccgctctcgccccggccctctacagtgctcctctggcggttaggctcctcgccctttgtcgaccagggctcctacccgaccctctccccgctgtccctgcggacccttgtccggctcccatcgtcgacagaggtcgtcgtccccacaagggtggccacaagagtggcggctccacccggggtggtctttccggtcggggtggtggctag

SEQ ID NO: 29117 - DNA, 231 bp, Zea mays
  Peptide Sequence Number=SeqID_70896
atggtggagctggcaaagtttatgtgggtagtgactacgtatggtggagagcccttggttgaaatctttgccaaagaatattgcctccattggcagaagaaggttgctggcagaaagattaagcaatttggctcgtgcacgttcaccctgaggactgggaagactttgggtgaatttgtggaacttgtttcgtgcgcaaagaacaaatgggggaattggtgtgatttctag

SEQ ID NO: 29118 - DNA, 213 bp, Zea mays
  Peptide Sequence Number=SeqID_70897
atgactcatcgcctttgcatgcaatgccccactgaccccggctgccgttgtgcagtggctgcacttgcacccaccatagctagcatgggagacctcgtctcaggacaaatgaggggaaagtccgcgctcggcttcactcaggaagatcctcggtggcaggctcttgggttggctcctggacttcctcttggacaactccttgctcgggaatga

SEQ ID NO: 29119 - DNA, 555 bp, Zea mays
  Peptide Sequence Number=SeqID_70898
atgaagattatgatggtgaacttgatggatgctagtctagtgattcccccgatcctggcacacatatgctatgcattcggttatgcccttaaaaccacgtgtgacacaacttctcaagctttggaaaataaacaggctacgcccaaagctaaggggtttcctactgtcgaagagactcccttggcaatggttgtttccgaaacaaaggaaactgttgcctctaggctcttactatgcaccaaggatgaagatgaagaacacatagctctagtgatgagcttgttcttctctgacaatgatgaagatgatagtgcacaggccaaggctattattgcaacggtcatggcaacaatggataccatgcatcatgttgtacctgctatagaattggaaagccaaaaggttcagacaacgcccccagcgacgatactttcagcgatcatgatggccaaagaaaaaactggttctacgaagcctgcgacagtaggtgataagggtaaaggacccacagaaatcaaggaggccaaaaaagccattgagataacacaccactag

SEQ ID NO: 29120 - DNA, 243 bp, Zea mays
  Peptide Sequence Number=SeqID_70899
atggtggatgccataccgaggattaagctcccaggagtcccgaatttatacccgagcacgcgggagagaccgacctcggttccccagccgatccgcatggatttcgcagaggctattgcggaggatggttacggtaaggggatggagctgacgacgaagtcgcgcaaatcctggaggatccgcattatccctttaaggattaatgaacttcggacgaaggttaaagacgatacaattacgaag

SEQ ID NO: 29121 - DNA, 141 bp, Zea mays
  Peptide Sequence Number=SeqID_70900
atgaacgtatgtgagctcactcttgctgtctcacaccccaccaggtcaagaaaagaagtcagccttgtcttagtttcgccttatgctttagaagttagcattctgcctcttggggttgatgattcattgggtgctccaaag

SEQ ID NO: 29122 - DNA, 201 bp, Zea mays
  Peptide Sequence Number=SeqID_70901
atgtcgctcttagtgcaccccgagttcttcccaaatcccctagggggactagatgtgatggtgtcctcgtctccagcgaggcctcaccgcgggaacgacgagcagcccgtggttcctgagcatgttgccaaagatcttcctgagcaacaacctggtgaaggcaagtgtcctctgacctattatgtcctacttactttataa

SEQ ID NO: 29123 - DNA, 528 bp, Zea mays
  Peptide Sequence Number=SeqID_70902
atggcgcggtgggactctaatgagttagcgagggacaggtataaaaggttaagaaaaattgaggtggggccatggcccaccttgcccaccccttggatccgcccctggacaggcggaatctcgccgcgctggccgtctcactggcgcccagccccgcctgcctgcagttgcacgcgccgtgtggcccgctgccaccgcattattagttgtctgctcctccactgctgcctgtacactacactacagatgggcacgcctgctatatatacggcgcccattggagtgccgattcaaagtttcaacaacacctgctacttgagccaacaaacaacacacagcttgtcctcgccattgctcacttgggagcatccaatccaacccacaacacttcgtgactgcaatatgaagctgctcgctggaggccagaggaggaggcagaggggattcggcaaggccctcaaggagcagagggccaggctctacatcatccagagatgcgtcgtcatgctcctacgctggcacgactga

SEQ ID NO: 29124 - DNA, 130 bp, Zea mays
  Peptide Sequence Number=SeqID_70903
atggcgaactcgattagagcacgtaccgcagatgggggtcaatggagggagctggccacggagattgggcgtcccgcggcggaggtgaagtgcggtgaggaattgaaacgaatcaagcttgattctcgaa

SEQ ID NO: 29125 - DNA, 213 bp, Zea mays
  Peptide Sequence Number=SeqID_70904
atggcgggctgttggcggtggatgtggatcgacctcgtgggcgccgccgccgatgggataacctggagttggcccttcaggtgtcaggctattagcaaagtcaattttgatccctcagaggagattggggcgtgcctggcaacacaagatggcccttcggcgcgcttcaaggatgtgcgtggaatgcatgtgctgagatttgactacagctag

SEQ ID NO: 29126 - DNA, 231 bp, Zea mays
  Peptide Sequence Number=SeqID_70905
atggcctcagtgctcgagaaagccggctgcgaccatgccaagattgttggagaagttagcttcggcataagcgtggatgatattaaaactccttggaagcatgttctgaatgctgcaaaaagacttttcttcgaactctggaacaaaggaggccgacagttggctgccctggaagccgaagagtacactaggaagaacaaggagttgaaaaagatgaagaaagcaaagtga

SEQ ID NO: 29127 - DNA, 201 bp, Zea mays
  Peptide Sequence Number=SeqID_70906
atggcttatgctgaaaacaaatggttaattatgtttttgaggaccttcggaagaggaaggcccccaacagctgatataccagtttctaagactctgcagaggttgcacactttacccacgagtcgtgatccctttttgcctcgggtcgatcaaaccctcaaacagtaccaaggtccttatggagaggtactcgagaaatag

SEQ ID NO: 29128 - DNA, 420 bp, Zea mays
  Peptide Sequence Number=SeqID_70907
atggagaggagcagggccggtggaggtacgacccaagctcgagcagagggggagctcggcctagagctgggcggcatcaatggtgaagaaactcctacgcacagcggtggtcgagcgggagaggggcgctggcttcttgctggccgagcagaggcgtcggggcctgggcgttccctggccacgggcagggaagagcagggggaggtggttggtgtgcagaagtggccgaccatgggcgacagcgagttcactgctcgagctaggggccggtctggccatggcagggctcctgccgacaaccccgcccgtgggagagaggaacgtggccaagggggagagcaggggctcggcacacagggggcgggagattcaacaccatggatgaaagaagaaattttcggacgagctgctgctggctga

SEQ ID NO: 29129 - DNA, 384 bp, Zea mays
  Peptide Sequence Number=SeqID_70908
atgcggggaaaggcgaactgctgctgcctggccagggtgcagctgtccgtgctccacctgggcgacggtcatgccgcgcgtgggccgggccacgtccagaacgggagtgaggacctgccagtgcgatttggggcggccgccgctcgctggtgcggtgttggtgggcaggtggctactgtcgtcggtgctgaggtggtggtcgccataggtgaggctgcctctgccgaagcggttgcctccgtcgacgagaccgttagtgccacctgcgctccgggcctctggctctttggctttaatggctggttctcgtcccccgtgatgggacgagaacaagggccttccagcggtagcgattgccctgaggccatcgctgctgctgtctag

SEQ ID NO: 29130 - DNA, 363 bp, Zea mays
  Peptide Sequence Number=SeqID_70909
atggcgtgtggcccgcggaaacggattggtgttccttgcgccgacgcaggggacccacgggtcagcctcacgaattacttggccaggcgcgatcgcagccgaaacgtggtgggcccctatggtcattcgctagcatgtcacaatggtctgcggaccagctcgagcgcagctgcgcccaaccgacatctccaggctattaaggatggtgtaaagcttctcgtatggccggttgggccatgggagtaccgcatcggctgtgcgccggtggaactccgccgtgtggattgggctgcaccaccgctctggtcgtctggggaagaaccagtcgtggccctagatccaggagttaacggtggtgattag

SEQ ID NO: 29131 - DNA, 726 bp, Zea mays
  Peptide Sequence Number=SeqID_70910
atggagcctggccgggtgccgacgcgggcgaacctgatgcgcgccctgcggtggctcgtggacggcgccagcgccggggactccctggtgttccacttctcgggccacggcgtgcagaagctggacagggacggcgacgaggcggacggctacgacgaggcgctgtgccccgtggacttcgaggacccccgcggcggcggcggcgtcatcctggacgacgagatcaacgccaccatcgtgcgcccgctcggcaagggcgtgaaggtggcacgccatcgtcgacacctgccacagcggccaccaatactcgacctcccctacctctgccgcctgtccaggaccgggtactggcagtgggagaaccaacagacggcccgcctcgccgcgtccggcgagaccaagtgcaccagcggcggcctcgccatctcgatcagcggctgcggcgacagccagacgtcgcaggacaccacggcgctctccgggtccgcctccaccggcgccatgacgtacagcttcatcaaggcggtggagtcggagccgggcaccacctacggccgcctgctgacggcgatgagagccaccatccgcgacaacggcggtgagttcggcataccgggccccatcggcaccttcttccgccgggtcatcacgttcagctgcgcgcaggagccccagctgtgcgcttcagagacgttcgacatctacaggaaaccttttctcttgtga

SEQ ID NO: 29132 - DNA, 998 bp, Zea mays
  Peptide Sequence Number=SeqID_70911
atgaacatgggtggaaggtccccggcggcgacgacgatccggtgcaagtactgcagcgcgagcctgaccgtgtgcgccggcgagcgcgccatccagtgcgcgcaatgctgcggcgtgactcgcatccggcgggtcgctgtcctcgcggctcccgctgccggcgctgacgaggccggcttccgtcgcgggcttcccgccgtgcggcggccgcggcaagaagcgcgccgtcctgatcggcatcacctcctctgccagcgcttcgccttccccagcgacggcatcatcatgctcactgacgaccagaaggacccgttccgggtgcccaccaaggacaacatccggatggcgatgcagtggctggtgcaggggtgcagcagcggcgactccctggtgttccacttctctgggctgggcgcgcaggtcgccgacgcggactgcgacgagcaggacgggtacgacgaggccatctgcccggtggactcgttccagaagggccccatcctggacgacgagatcaacgagaccatcgtccggccgctggtgcccggcgccaagctccacgccgtcgtcgacgcgtgccacagcgattccgtcctcgacctccccttcctctgcaacatgtccaggaccgggaactggcagtgggaggatcaccgtccaccgtcgggcgtctgcaagggcacgagcggcggccaggcggtgcttatcagcggctacagcgacggcaaaagcaagttcagcatgacgccggaggcctgcgcggcggtgggggccatgacccacagcttcatcaaggcggtggaatgcgagccccagggggtcacctacggccgcctgctcacctccatgaaagccatcatgaccaacgccggcggctgcaaccagcagctgcagggcgcctgcgcacccgcccgcaaggtcgtcaacttcagcggcgtgcaggaacctaacctgtcttgctcggagatgttcgacgtctaccgcaagccctttgcgct

SEQ ID NO: 29133 - DNA, 204 bp, Zea mays
  Peptide Sequence Number=SeqID_70912
atggccatgatggattcaacatctggaaagatgtacctctatcaggtaaattatgttattgtaattcgcttccgctatttccttactctggctatttgtcatatttccatcctagatcatgcccttattcgattggcacaagctgatgtcccttatccagtttacctattcttgaggattacatttgtcactttatcaacctaa

SEQ ID NO: 29134 - DNA, 228 bp, Zea mays
  Peptide Sequence Number=SeqID_70913
atgtgggggagcagtggccgttattcccggacgtgcatcatcatagttagtgaaagtggatgggaccgtgatcccatcactccctgtttatctgcagcgtcatgtggggtcgggtccatttttcttacaaataacaacagaatgagaaggggggaaagtgccctgaatggctcagatttatcaactaccggcgtgaacgttgcactttatgatggaagcacaatgtga

SEQ ID NO: 29135 - DNA, 1032 bp, Zea mays
  Peptide Sequence Number=SeqID_70914
atggcaatcccatttaaaccagccccggctccgccacccatcctcgccttacccgccagcgccccagcccagcgatcgccggagcccgggcctccccaccgctcgcgccggcggtcgccgatcatggccaccacccccgccgaggatccggagcctgggctacctcctcccaaagcgctctgcgagcagccgcggcggcggcgcccgtgcgtcctcctcagcttctcggcagcgcgcgaccgcttcctccggggtcggttcctctcggcgggcctgcgccccttctccgtccgcctcccctcgccggccggcaccagcaccgtcgtccacctctgggcgccgccgcggcccgcgcggcggcccgtgctcctcctccacgggttcggcgcgtcggcgacgtggcagtgggccccgtacctccgcagcctcctcgcggccggcctcgaccccatcgtcccggacctcctcttcttcggcgcctcctcgtccacggtccccgaccgctccgacaccttccaggccaggaccgtgaaggccgccatggacggcatgggcgtgcgccgcttcgccgtggtcggcgtcagctacggcggcttcgtcgcgtaccggctggcggccatgtacccggaggccgtggagcgggtggtcctcgtgtcgtcgggcgtgtgcctggaggagggggacctcgccgcgggcctgttccccgtcgccgacgtcggggaggcggccgagctgctcgtcccccgccggccggcggaggtgatgggctcagaccaccttgaggagaaggccgagcttctacacgctctcatcaacgataggaaactgtcagatcttccaaagataaaccagccaacgctgatcatttggggggagcaggatcaggtcttcccaatggagctggcgcataggttggagaggcatcttggggagagttctagattagtagtcgtaaaaaacgctgggcacgcggccaatctagagaagtccaaggaggaggtgaagccacaatgtgacggttggaaattctga

SEQ ID NO: 29136 - DNA, 1242 bp, Zea mays
  Peptide Sequence Number=SeqID_70915
atggggatgacgatcgaagacgtgatcgaggagtgcaaggtgttctacttcgccgggatggagaccacgtcggtgctgctcacgtggacgatggtggtgctcagcatggacccggagtggcaggaccgcgcgagggaggaggtgacggctctgttcggcagggacggcaagcccgagtacgacggcctaagccgcctcaaagtcgtgaccatggtgctctacgaggtgctccggctgtacccgccggccacctccgtcgtccggcaaacgtacaaggagatggagctgcctgtgctgctcatccaccacgacccggacatctggggaggcgacgcgcgcgagttcaggcccgacaggttctccgagggcgtgtccagggcctccaaggaccccggcgcgttcctcccgttcggctggggcccgcgcatctgcatcggccagaacttcgcgctgctggaggccaagatggcgctctgcatgatcctccagcggttcgagttcgggctcgcgccatcctacgctcatgcgccgcataccgtgataaccttgcatcctatgcacgattgcaagaatgggattgctaagcaagctaagatttcaatggcatattccttcatacataggccattgagcgacgaggcacaccgcgtcagcactcccgtggtggtcacttgcaatgaccagagacgggaggtcttcgttgcccagaacatcgctaacaagaaaattgaccgcaccgttgcattcgacaaggtgctaggtccaaagtctcaacagcaggacgtcttcaaccatgctgttgtgccacttgtcagcgaggttgacggttataattgcacaatatttgcatatggccagactggaactggcaaaacgtacacaatggaaggaggaggggacaaagcactgaatgctgacctcccgactgatgccggtgtcattccaagtgttgttaagcgcatatttgacatcctcgaggcacagagtgcagagtacaacatgaagttgattataaagaagctagagcttccagtcaagtttgatattagaagtcttcttttgcttttacattttgttttttatgatcttgatcttagaagcagggttttgatgattgcaataagatatcatgaggcgcgccgaagagaacaggggcctcctctccgcctcctccttcgacaggcagctgctgcggaaggaggtggtgaggagggtcaaggccgcggtggcgggacggagtga

SEQ ID NO: 29137 - DNA, 123 bp, Zea mays
  Peptide Sequence Number=SeqID_70916
atggcacagagggtcgccttcttcgcagcagacctaaatcccgcctcccggaaagagatcccgtcgaggagagatcctacggaaaaaagtttaatgggacagtcggtggtggtggattcatga

SEQ ID NO: 29138 - DNA, 486 bp, Zea mays
  Peptide Sequence Number=SeqID_70917
atggcgtgcgaggtggccgaggtctgggagctcgtgccacggggaaggtcggcgtcggcgacggagacgacggtggcagaatatgtcatcgggaaggcgcagcagctgaagcacctcctaggccggttcatccagtgccggccgacggggaaggcgaggacgaacccggtggtgacagcggcgctgtacaggctggtgaaggagagcgcgacgatgtactgcgagctcacggaggtgatggtcgtgctcttggaccgcttcgccgacctgggcactcctgcttgcgtgcacgtccactccatcttcaccagtactgcttggaatttaggtatgctgagttcacacttcacagacagaactgcttggaatttggatcatatgtcaggtcttcctatcttttacatggcttcatgctggtacgaagattggcattcagtgtgcgagatctatggaatctattttcaagtgaagcacatgccaaactaa

SEQ ID NO: 29139 - DNA, 324 bp, Zea mays
  Peptide Sequence Number=SeqID_70918
atggcggataatcctgttgaacacagccgcactaagcacatagacatccggcatcactttctgagggaccaccagcaaaagggagatatcgaggtgtaccatattaacaccgagaaccagctagccgatatcttcaccaagcctttagatgagaaaagtctcaaaggtgcattgaaagggaaaatggacttggacgttgcaaagacttccactgcactccggtattggtgtatttacttccaagttcatacttatgctcttattgcctttttgctcttaattgacaattttggtgaggcaatggggttaaagggccaaagatga

SEQ ID NO: 29140 - DNA, 939 bp, Zea mays
  Peptide Sequence Number=SeqID_70919
atgcaggcggcatgcaactacaccaagggggcacaccctttcaacttcgacgcatccagcatggaggcccaggcccacacgtcatgtggccggcgcgccggttactacatgcaaaaaactgcaccgccactcgcgccagtgccgcgcatcctcgaccgcggaatcggtgccatgactcgaggcaaccctgcgcatggcccaacagtgccaaccagacatgccggtcacggagaccgagaaaggggatactccaaaagggatccttctccgcgaaggaagcgggccccgagccccctactgatcagaggttcgaaggctggccccccggaagggttcgacagtcgcctcagagcactcgggctccgcgcccacaactggtcagaggttcgaaggctggcccctcggaagggttcgacagccgcctcaggccactcgggctccgcgcccactactgatcaggggttcgaaggctggccccccgaagggttcgacagccgcctcagaacacgcagagtgagggatggctatgggtacgttcgatacataaccaaggctcgggctacgctcccgagggtgaggatgacagcagccaagtccagcctcaggcgccataggaagctccgcctcgcccgacccgagggcttggactccacctcgacctcggacgacggtctctgcctcgccccgaccccagggctcggactcaacctcgacctcggacgacggtctctgcctcgcccgaccctagggctcggactcgacctcgactccggaagatggtctccgcctcgcccgaccccagggctcggactcaacctcgacctcggaagacggtctccgcctcgctcgaccctagggctcggactcgacctcgactccggaagacggtctctgcctcgcccgaccccagggctcggactcaacctcgacctcggatga

SEQ ID NO: 29141 - DNA, 450 bp, Zea mays
  Peptide Sequence Number=SeqID_70920
atgaagctccatttgaaacgatggcgaatggtcgcgggacgtcgggcgtggatggcgcggcggggtccttgcgcgtgtggtcggttccgggtcacggtcggggttggcggcttctgctggtcggggcaggggcgctgggttgggcgcgaggcggccggtcggctgcgcgggcgcggcgcgtcgaggctggttcaggacagggacgcgcttggttgctggcatccgctcggcgggtcctggcgtgggggagggcgagcggctgcaggggcgtcggggcaggggcggtcggtgccggggcctggcgctggtggcacggccagaggtgatgagcgggatgcgaagagccaaccggtgacggcgctacggctctacaaacagcggctgctgctgtggttgggcgagtggcgaggagacgagcaggcgagtggcgaggagacgaggcgtctgtag

SEQ ID NO: 29142 - DNA, 282 bp, Zea mays
  Peptide Sequence Number=SeqID_70921
atgaaatacctccgtgctttggcgccgcgggtggagaaggagattgcatcggtggggactggggagcaaggaataattgtagcgccgatcgagagcagcgaggctagcttgggcgcggcagcactggaggaattgtttccgatgcgggaaagagacgaaggcactacgcgatccgccatgggtatatgggagaatttagggaaaatcgctgcgggagggagaaaactagaaggtggcatctgggtgacgtggcgtaaaagtaggatatggggccgaatttag

SEQ ID NO: 29143 - DNA, 900 bp, Zea mays
  Peptide Sequence Number=SeqID_70922
atgccgggcgacgtcgacgacgacggtccctacttcttcagcgcgccggcgagccccgtgcactacatcctccgctccccgccttcctccacggccgccggcgcggcctcgcccgccgcctccgccgatgccgactgctgcgcggccgccgcgggggacttcgagttcgccgcgcacatggcggatggacccggacccaagggcggcgcggcgatgagctccgccgaggagctcttcgtcgccggccgaatccgcgtcggctgcctctccccgatccgacgacaggaggccgggcgtgaggggggcagcggcagcggcggcggcgaggaggaggaggaggaggcggagcgggacagacgctcgccgcgggctactcgccggactaggtccgtttccccgacgcgtagccccaggggcgccgccttcgccgagccttccgacaccttcgcgtccgcctcatcgtcttcctcctcctcctcgtcatcgtcctcggcgaagaacagtcggcggcggatatcgctgcgggacctcctgagccgcacgggcggcgactgcgcgggggcggcggaccaggcatcgtcgtcaggcaccgggagcgccgaggtcaccagcaggccgggtttctggccgccgtctatctggccatcgccgcgctcgtcgtccaataacttgccgctgccctgcccggcgccacagccgccgggccgccgctccgcctcatcggacagggccgcggcgccgggcggcggcggcggcggcagtgctcggcgcaccacgtcgctgccgtaccgacagagcctggttctcgggtgcctgggcttcggggctcgcagccggagctacggggctcgccaagtccacgcaccccctcttctcttcacgctgaacacgaaaagctag

SEQ ID NO: 29144 - DNA, 309 bp, Zea mays
  Peptide Sequence Number=SeqID_70923
atggtgcaaagtctagccttcgcagtggatctacgcggtcgcgacgcgaccgcgtttgtgtgtgaagtcgaggccgaggccgtgaaaattgtagggaaggaactccaagctgaactcttcaccttcgggaaaactcagaggcgctccgctataattcaccggacagtccggtgtacaccggacggtggccggtgctccaggaatgaaagtgactctgaactcgccagcttcgggaattcgctccactataattcaccggacatgtccggtgtacaccggactgtcccggtgaccgttggcgcgaagtag

SEQ ID NO: 29145 - DNA, 336 bp, Zea mays
  Peptide Sequence Number=SeqID_70924
atgacgatcaccttcaacaccaaggaggtttcctactttggatccctcacctgcattgcaggccggaagggagtcttgtatcggtatcgcatcgtggacccagccgaggataaatcacctctgaaggccccaatcgcggacacagacccgccccatctgacctcagcaagggctattccgacgaattccaaagcacgaagccctcgactagtccccgccccagaaagtatcatggtcacatcggctaggttcggggctatactagcacttatgacccagccgactgaagcggcacactcggtgtggcggactccgttctccacctcgcccacctag

SEQ ID NO: 29146 - DNA, 255 bp, Zea mays
  Peptide Sequence Number=SeqID_70925
atggaaaacaagaagaggctggagattatgcgggccgaggctgaacaccatgcaagatgggcggctaaggcggaggcggatatggagtggctgtggaccgagatgaagggtatgcccaacgttattcagagtctgatgaccttctttgcccatgttatatacaagggcaattttgaggcattggtcgcaaagggtgcagccacaaagtactcttggcatcaaaggattttgtcgtcgaccccagcatttatatga

SEQ ID NO: 29147 - DNA, 138 bp, Zea mays
  Peptide Sequence Number=SeqID_70926
atggcctgccccacggtggcaaagctcaccggagcaagccgatccgacgccctggcgaccctgcgaatgtccgacaaagaattccccaaagccccaaccataatctctgtacgggagggaactcggcaactctgctag

SEQ ID NO: 29148 - DNA, 405 bp, Zea mays
  Peptide Sequence Number=SeqID_70927
atgccgacaacagtccagaaggcattggcaaagctgcagtggaagaggatatgtgacgttctcataggttatgtagaacaaacttcaaaggctagccaagagaagaagcagactcttagcaacgctttgctttcccagatgaaggtggacaaggaggtgggagacaaaagccataacaagagggtgagagaggaccctaaaaatagaggagctcgacatcttggaatgagacttgagggtggaaaattttgtggcaaggtcattatccgagcactagacgtcgtgccaaaaggaggtgatttttcaatcatggatgacacaggtggtgatagcatgacagaggtggagcaaggacagcaaggaggcccagtgggcacccgggaggtcactagtgaggcttgctag

SEQ ID NO: 29149 - DNA, 147 bp, Zea mays
  Peptide Sequence Number=SeqID_70928
atggcctcctgctgcatgctggggcggtttcgacgctaccaagatgtggcacaggcgacggcagaaaagaaaaacgataaaattgacattatgcagttcaaagttactaattacaaggacattgtagaaccaacaccgcaatattaa

SEQ ID NO: 29150 - DNA, 119 bp, Zea mays
  Peptide Sequence Number=SeqID_70929
atgaacctacccgtcctcgacgtgcttgcggtggcagttgcggccactgcgcaggttgcgctttccggcaagacgctccctcacacgacacaggcgccgggctttatggtggcgcatgg

SEQ ID NO: 29151 - DNA, 489 bp, Zea mays
  Peptide Sequence Number=SeqID_70930
atgggcccttcctcgctcccgcctccactccgtagctcccacctcacccccgctcctcgcaggctcgaccccacccgttcgggcaccttcgccaaggtttactacgcgagggacctgagcgccggcgccggcacgggccacagctgcagcgtagccatcaaggtgatcgacaaggcgcggctgcggcgcacggaggggatggtggagcagctgcgccgggagatctccatcatgcggatggtgcggcaccccaacgtggtgggcatccgggaggtgctcgccagccgctcccgcgtcttcgtcgtcatggagtacgcgcgcggcggggagctcttcgccaaggtggcccggggccgcctcgacgaggaccacgcgcgccgctacttccaggtactggtcgccgccgtcggcttctgccaccgtcgcggcgtcgcgcaccgggacctcaagcccgagaacctgctgctggacgaggtggggcggctcaag

SEQ ID NO: 29152 - DNA, 717 bp, Zea mays
  Peptide Sequence Number=SeqID_70931
atggtgcatctcgactgtgaggatgccgagattccagtagaggaccacgttgtccatctgccagcagcccggcatcgacaacaccgcatcggtgaggacgtgatcgtcgagagcgtagcagtggagcttgaacaagacctggtcacgccagcgagagtactgctgggacgagtcaagatgaggacgacggaggcgaggccccggatgcgtcgggaacctgatgacgcggcttcccctatccgtggcgcgggcaagaccttccctgccacccctgttctcgtcggtgcccaggaggccactgtcaccctgcacggcgcgggcatggacctgttcccctcgccggcgctgtctccttcagcacatgcacggccgggctcggatcccttctccccagcgccgcctccctacacgacgcgggcgcggcccccttctcaccggcgccgccacgaacggcaccgcgatgtccctactgccctggtggtcgctcgacggcgcgcgcaggctgtcgctcgtgcctgggagcacaaccgtgaggctgtcgccacactcgagcgccagctcgtcgcgtccgtccactcgttcggcggagtcccttcccacacccgacctgtctgctccagcccgatcacccctcgcgccgcttcctctccaagtaaggacggccttcacgttgtccacggggacctccgtcatttatcagcggtgacactgcaatag

SEQ ID NO: 29153 - DNA, 339 bp, Zea mays
  Peptide Sequence Number=SeqID_70932
atggcgcctctgacatggacgttgagcaacctcaccatgcccagctgcatgcatgttgttggccgagtaaccatcaccggccccgcttcctctccaaagggtgccgagattctaggagaggaccacgttgttcatctgccaacagcccagcatcggcaccaccgtatcggtgaggatgtgatcgtcgaggacgtagcagtggagattgagcaagacccgatcacgccagcgagagtactaggacgagtccaagatgaggacgacggaggcaaggccccggatgctggggagcctgcatggagattgacaatgaaggtcacacagcaagtgcacatatga

SEQ ID NO: 29154 - DNA, 363 bp, Zea mays
  Peptide Sequence Number=SeqID_70933
atggcgcctctgacatggacgttgagcaacctcaccatgcccagctgcatgcatgttgttggccgaagtaggaccacgttgcatctcgactgtgagggtgccgagattctaggagcagaccacattgttcatctgccagtagcccagcatcggcaccaccgcattggtgaggatgtgatcgtcgaggatgtagcagtggagattgagcaagacccaatcatgccagcgagagtacaaggacgaggccaagatgaggacgacggaggcaaggccccggatgctggggagaccgcatggaggctaacaatcatggtcacacagcaagtgaagaaggcgaaccgccatatcgctcatactgactga

SEQ ID NO: 29155 - DNA, 1497 bp, Zea mays
  Peptide Sequence Number=SeqID_70934
atggctagcaacatgtacggcaccacggtggcctgtaggatgtgctacagagaccagtacaggccgccgccgcgcgacttcacttgcgaggccaggaaatcggaggccaggaggtggggaaacgggtaccacctcatccccaggctctgccagtggaagcccagaggcagcaagtctgatggctcactgctcggcgacggccacggtggccgcgatgctcgctgccactcttgtggttcccataacagctgcgagtgcgaaactagagactgcgatgctatggaagatgctgctgcgagctcttaccgagatttcaagcaacattcaaggggaaatcctcaattttcagatgatcaagtttcatcgaagaataagtcagcctatgctagtcaagggttggctgaagcctgcaaatttgtttacaatgatgctaagtttgtaaatgaaagggctcaaaatgacattctattactttcacgtggcataacaaggctgaacaaacgcgcatgccaggatgctgctgttttgggcctggggtttctcaaacttgatgctcgtgcacggaaggatactcaaaagattgaccacacagtgaaggagagagcagcgcttcttaaccattttgccagagcatttaaggagcgagctcagtcagacttgaagaaagctgcagacaaacattggagtgatggtgccttggaggcagacctgcgacgagctgacttggttgttaaacgacgtgccatggaagacgctttcatggcattgaagatactttcctcttccaaaccttccctatggtgtggtgggcaaaatgttggtgtcacaatgtgtggaagggaaccaaacatgccttacataatcacaccagaagttattcaacgcaacatgccaacatcgaagtttgttcaggatatccatgacatgatggtgaacagattatatgagcagcttccgaaggacggttcatcttctcgtacaaattcaacagggtttattacgcttgagaagaacgggaaggctcttgaactgtttcctggtgaagtttctgctgatcagatttatgccatagaggaagcataccagagtatggcatctgccttttctgaagctgatggtattgactacacagatcctgaggagcttgaattgttggtagcaactctaattgacctggatgccatggatgggaaaaggagtgtttccttgattgctgaatgttcaagctctccagatgttaatactaggaaagccctagctaatgcattggctacagctccatctatgtggactcttgggaatgctggcatgggtgcattgcagaggctggctcaagatcccaactacgccgtagctagggctgcatcaagagccattgatgaactcaagaagcagtgggaacttgaagaaggtgacagtctgaggtttgtgatgaaccagaatctggcctccagggatactgaggatgacaattcaccagcggatgatgccgcatga

SEQ ID NO: 29156 - DNA, 1197 bp, Zea mays
  Peptide Sequence Number=SeqID_70935
atggcagctcctcttctcctcatcgtcgtcctcgtcgccaccaccgccgcggtctctgctgcaggctcggacaccaccatattccccacagaagcgctaccgaccaagtccggctacctcccgatccccgcggccaacgcttccatgtactacgccttctacgaggccacccacccgctgaccccgccggccgccacgccgctcctggtctggctcgagggcgggcccggcctgtcctccttcgccagcaacttcctccagatcggcccctacgtcttctcctcctcgcccgccgactccgacaccgactcctccgacgcgtcttccttggcgcccccctcgctgcgcttgcgccccaacccctacgcgtggaaccgccgcttcgggctcctcttcctcgagagcccgctcggcaccggctacagcgcggcgccgtcgccctccgccatcccgacgacgcagcccgccgtggcggagcacgtcctcgccgcgctccagtccttcctctcgtcgcagccggacgacgccaccttccgcgcccgcccgctcttcctcaccggcgagagctacgccggcaagaccatccccacggtcgccgcgctcatcctggccagcaccagcaccaccagcaccaacccggctctccccgagcacctgtccacgaggatgaggatcaacctgcgcggcgtggccatcggcaacggcttcgtgcacccggcggcgcaggtgaccacgcacgccgacgtcctctacttcgcgggcctcatcggcgcggagcagcggcgcgaggcggcggccatgcaggcggaggcggcggcgctggccgcggcggggcggtggcgcgaggcggtggacgcgtggttccgcgcgctgtcgtggctgcgcgacgccacggggctcccgtcgctgttcgacgtggcggcagcggacgacgcgtcgtcgccgctgcaggccctgacggccgccggcgcccgagccgcggggttcatgaacgacgccggggtgagggcggcgctgggcgcgcgacgcgacgcgccggcgccgccgtgggagctcgtcagcgccgcggtcgtggcggcgctgcacgacgacgtgatgaagagcgccaagccggacctggaggcgctgctgcgggggccgccggcgccggcgccgtccccgcgcgtgctactgtacgagggggtccgtgacgcccag

SEQ ID NO: 29157 - DNA, 372 bp, Zea mays
  Peptide Sequence Number=SeqID_70936
atgggtatgggtttgggcaaaatttttatacccgtcacggggtatgggttttttagcggggcgtattttttcttcgcgggtgccaaaggttcagtacaaaccaataaaaagattaaagttagggttcaaaagaaagaagcaaaagaaaccgaagagaatcctggtctggcgcaccggactgtccggtgcaccagggtggatcgacttcaaactcttcaccttcgggtttctgagtccgcgctccgctataattcaccggactgtctgagacaccaagttgtggtggtccttgtgagtggtctaagtgacctgttgattaaggagaaaagctcactcggtctaggtgaccgtttgagagagggaaagggttga

SEQ ID NO: 29158 - DNA, 330 bp, Zea mays
  Peptide Sequence Number=SeqID_70937
atgacgccacgactggagttctcaagcgacaggaaccaaattagctacctatcgcacctttcccctcactcaatttctgaattgaagctctacacccgtctgcccacggtgaccgcgaaagcttatggaaattcattcgtgttcccagtgattggctccaagggcggacacggtgaatttcggatggcgcggtggcgttcggagaatgaaaagagtgctgttgcaagagataggtggctgtcaccgtggcggggtcaccggcgagcaccggatatgcacaaggtgaactactgcgacgtgaccttaagcagcctgacagtccatctttag

SEQ ID NO: 29159 - DNA, 276 bp, Zea mays
  Peptide Sequence Number=SeqID_70938
atggccatgatgggttcaacattggacaagatgtacctctgcgaggtaccaaactttgggatttttaaagctgagaccgggcctgatgatcgaggaccttttaactggtcacatgcctcatcatgggtaagctttgcctcgggaagaccaataccagaaaggccaacacgcaatgggagtggagagatggcgagagtagcgtgtgccctccgtggcaagaggctggacggtggtgtatctgtgctctcggttggcgtgaacccgatctggtcttga

SEQ ID NO: 29160 - DNA, 309 bp, Zea mays
  Peptide Sequence Number=SeqID_70939
atggaatttccaattaaagggaacgtggaggatcagtgggtcacgcaggtcatggtgctcacaagaatcagcgtcggaccactagaattttggttggtcgacaccgacgctgtcaacgggttagcgtgcgacgtcgagctcgtgttccaacaaaactatgccagtaatggccaaacggccaccacggcagtcacactagagctatacgatcgcaagggactacaagttcaccgtgcactaccaatttgggacgaggaagggaagacaccgcgaattttggcttctaccgatcacaccggaagacagtga

SEQ ID NO: 29161 - DNA, 270 bp, Zea mays
  Peptide Sequence Number=SeqID_70940
atggcaagcttcaaccaagagagcagagcaggcacacagagggaggaggcacctctacagggcaagtacggaggcatttctccgaagaaggcgctcatcaacaaggaccacgagcgcgcctacttcgactccgcagattgggtgctcggcaaggtagcaaattactcgtcaactcaactggtcgcagcccaaagaccgcgccagcaaggcgtgagcagcaacagcccgacgacggtgcccgcagccgagcccctcaagcccaagctgcag

SEQ ID NO: 29162 - DNA, 477 bp, Zea mays
  Peptide Sequence Number=SeqID_70941
atggcgacggcgacgtgcctctggacgctaccatcccgcgcgacaagtggctccggccgcagccgggcgccctggccgcgtgtccaggaccaggatcgttggctagagtttgagcacaaggtcccttacgacctctttgatattagagtaaggttgatggtgcgtagtatccagaccacccatgtgaacatcaactatatccctccgcctaggcggactcctgtctacccagtggtagtagagaaagtccatgtgaatctccatcaccttcgtgtggagaatggagtgattctggaggacagctcagaggagattctagtgacacccacaccgttgtcagagtcacaagcctttgcagcaagagcatcagcccaagcccctgctcttggaggcgacgatccggatgattctggtgatggtggagaagatgatgatgaagaagaagaggacaacaataatgaagaagcccgtcattga

SEQ ID NO: 29163 - DNA, 432 bp, Zea mays
  Peptide Sequence Number=SeqID_70942
atggagaatcaagtagaggaaaaatctctggaaaatattaaggtggtctgtgaatacccagacgtatttctggaggagttaccagttttggaaggcaaatcgaatgccaaccataagataaggccttcacaggtagctaactggaggtttgccactaagataactagaactcgtcgttgtcctaaaactcctcaaagtcctccatattgccatcatatcctcctgagcactgaatacagtggggataacctggggtgggttggttttaaagcaaggggccaaattttagtaataaacccagttattacccaaatgtactccctccaagaggaaataccagatatcataattataaccatcatcataaaagtatccaaagttcatctaatcaaagagggtcccaaggccactcctaaccatgagcacgactga

SEQ ID NO: 29164 - DNA, 231 bp, Zea mays
  Peptide Sequence Number=SeqID_70943
atgaaggagacggcatcggatgaggatgagtctgtccagcgggccccacctggcggcgaccacgcggagcagcattgggaaggccgtgcggcgtgtgatgcgaaggggggagagcggggcgcagagtggctgaccgggcgggtcccgcgcgtcagcgcggcttttctggcgcacggtgggctgcggttctggggtgatttgggccgagagggaggaaaatatttcaattga

SEQ ID NO: 29165 - DNA, 144 bp, Zea mays
  Peptide Sequence Number=SeqID_70944
atgaccttggagcctcatcccttgcagcccggctggcgttcattggattccgagtctttcggtttcagggccgaagatactattgagtccactgcaaaggtttatgaagcactcgggttcaaaaagaacaagaacaattattaa

SEQ ID NO: 29166 - DNA, 174 bp, Zea mays
  Peptide Sequence Number=SeqID_70945
atgaagggaaaggtcgtcgccgctctgcctcaccgcatcgagtcgagctacatttccctaatggcttctccatcaaacccaaagatcctttacgaaaaaggcaaaaagatcaaattcaatatagtagaaattagcatgggtaaatttatgaaccggaaaaaggttgtgaattag

SEQ ID NO: 29167 - DNA, 141 bp, Zea mays
  Peptide Sequence Number=SeqID_70946
atggcggtgcgcacggagctcgtcgaagttggcaatgtctcgagtggagctaggcactgggctgaggcagcaacggaggaagtgaacgagggcttgggcagcctttataggcgatatctgatggagacccgcaggtggaag

SEQ ID NO: 29168 - DNA, 276 bp, Zea mays
  Peptide Sequence Number=SeqID_70947
atggaccgggtagctccgaccatcttcgacgacgacccgaccatcgacgtgatccccagatcatactcaacctcactgaccaccccacgagagtgctattgcctccggcataaaaatgaaaaacaacaagcaaccatatttttattagaatacttaagcagtatagctccagagaaaaatataacaagtcctattttagtaaggaaatatagtgccacctaccccataagagaaatagagaaaactttagaaaattatagaaacctttccatgtag

SEQ ID NO: 29169 - DNA, 111 bp, Zea mays
  Peptide Sequence Number=SeqID_70948
atggaggaacttcatgatatgggcaatgatcaaagattgtgtggttggctacatctatggatgatcgttgctcatcgtttgatgaagatggaatggatgtgcaaggcaaat

SEQ ID NO: 29170 - DNA, 258 bp, Zea mays
  Peptide Sequence Number=SeqID_70949
atggaggaatcactggctctaaggatgtcgcggatagcgctgctgcccctagccctaccaaagatgcttagtcacagaggggcacagctgctatgtacatatgctttcggaaggatatatgatacacgttcatgtccacacgctcgatacaggttggcccagagcagacttaacaaggtccctgtcatacttggagacacagatgactacatgtttgatgagatgattgatccttacatgatgttctgtgcgttgtga

SEQ ID NO: 29171 - DNA, 399 bp, Zea mays
  Peptide Sequence Number=SeqID_70950
atgaccaaaacaggatcatatggaagggaagctcttaatcaaactatggagaaagggctgactgaagaaagggggagcaattatctgttgaagattcagaaaaggctgaaatatctacccttgatatttactctccttgccatgaccaacctgggatcggatgaagattgggatgaagtgctggcaggggaggtttgggtccatggaatgtatagagacttggtagaccttggactaatgacaagctctgtcactggtgattgccctgttcttaatcaaattatggagaaagggctgaccgaagaaagggggagcagctatctgttgaagattcagaaaaggctgttcttcatggacatcaataatttctggtttcgcaatgcatgggctgtcagttga

SEQ ID NO: 29172 - DNA, 700 bp, Zea mays
  Peptide Sequence Number=SeqID_70951
acagaaaggagcgaaaccacgagcagtcgtatgccaaggcgccctcgaccgaagcaccaccttcgaggcgctgtcggggctcgtgtggcgtctctggcgtctcaggcaagcatccggggcggcggcggcgcgctgtgcgggtggcggcgcggacgcgggcggaggcgcggacgtgggtgtgcgggcggcggcgcggacgtcgacgagggacgtgggcgcgctgtgcgggcgacggcggcggacgggcggcggcggcgcggtgggtgtgcgggcgcgcggctgtgcgggcgtgtgtgcgttgtgtgcgtccgtgcgcggggtaacggacgacgttagggaaattgcactatttccgacggctggccgaaggccgtcggaaataaggctatttccgacggaagatgtcggccagaggaccgtggcacttcagcagttccgtgcattgcatttgtatccatctcctcggcaacgcaacagccaacagcaacaggcaacacagacaagagagaacaacagaaaggcaaaggccaacacgaacactgcgacagcccagaggcaggtagaacgttacgctacagagtccgtcgccacaggcggaaacggcaccctactttcatgtggtcaggcggcccagccgttcggagctgcacctggacctgggcatctcactgacatcttgcgccagggccaggtggcatga

SEQ ID NO: 29173 - DNA, 1395 bp, Zea mays
  Peptide Sequence Number=SeqID_70952
atgccggccatggtggtggaggaggatctcatcagaggggcggcgcccgagccggagccggagccgcacctcctggtggtgaccttcccggcgcagggccacatcaacccggcgcgccacctcgcgcggcgcctgctgcgcgccacgggggcgcgggtcaccgtctccacggccgtgtccgcgctccgcaagatgttcccgggcgagcaggcgggcgcggagggccaccgcgacgccgcgggggtgtggtacgtgccctactccgacggctacgacgacggcttcgaccgcgacgcgcacgacgccacgcactacatggagcagatcaagctcgtgggcgccgccacgttgggggccgtcctcgaccgcctccacggcgtgggccgccccgtcacgctcgtcgtgtacacgctgctgctgtcgtgggtggccgacgtggcgcgcgcccgctccgtgcccgccgcgctctactggatccagccggccaccgttctcgccgtgtacctccacttcttccgcgccacggacggcgtcgaccgggccatcgccgcggcgggcggcgacccgtgggcgagcgtccggttcccgggcctcccgccgctccgcgtccgcgacctgccgtcgttcatcgtctccacccccgagaacgacccctacgcgttcgtcgccgacgcgttccgcgagctcgtcgagacgctgggccgcgaggacaagcccagcgtgctcgccaacacgttcgacgcggtggagcccgaggcggcggcgtcgctgcgggaggctggcgtggacgtggtccccgtcggccccgtcgtctccttcctcgacgacgcggcggcaggggccggcggcgccaagaacggaggcaacaacaacgacctgttcaagcaggacggcgagggctacctcgactggctggacgcgcaggcgccgggctccgtggtgtacatctcgttcgggagcctgtcggtgatgagcaagcggcagatcgaggaggtggcgcgggggatggccgagagcggccgcccgttcctgtgggtgctgcgggaggacaaccgcagcagcgagggcgccggcgccggcgccgcgccgctggccgactgggagggggagcgcggcatggtggtggggtggtgcgaccagtggacggaccaaggcaccaacgcgtggctggtggagcggatcggcaccggcgtcagggccgccgtcagcgacaaggacggcgtgctggaggccgacgagctgcggcggtgcctcgacttcgccacctccgagatggtgcgcgccaaggccgccgtgtggagggagaaggcgcgcgccgccgcgtcggaaggcggctcgtcggagatgaacctcagggcgttcgtcgcgaagcagatcgccggcggcaagaactag

SEQ ID NO: 29174 - DNA, 1740 bp, Zea mays
  Peptide Sequence Number=SeqID_70953
atgtcatgtactttggatgaggatcagcagcagttggtaacagaacatgcatctgacacagtttttcatgctccacctcaagtttgttcacttaatctcggttcatcacctgatagtccattggatatggcttctgctagttgtgcaaatccatctagctctgctagtagggaatccaatattgctgaaaggaatgtaagcacagaatgtaatggcagcagtattggtgatgcaaatataattcacaggaagtgtgaagatcaaaatgggccttgtgctggtcctgacaagtcattttcctccaaccttagtgttatttgctcttcacagaagtctgcagagagtcgtctttccataaatattgacaaagcaaatgataaacctcttgacaacgatgaaaaagaaaagcaacctatatctaacttggttcaggaattgaatgaacatccaattggctgtgttacacctactgcccctagaactacttcccataggaaccggtttacatctatatcacgtgcttttggagatggttcaaaattactgccagaagaccacgtgttgactggctttgctggtggttctaagaaaccacgaagtcaagtttcatactcagtttctcctaaaagtgaggaacttggcataaaaaacaaaggtcatttccgcaagatacaatctcatgttagtgcaaagataaatgatgcaaagaaacttcctgatagttctagaagtgggcatagcagcccggagtcattgacttgcgttgcaaatgttcttgttacagtgggtgatagaggttggagggagtatgatacccagatcacaatggattccgatggtcagagtgaaaggaggatatgcgtgaaacttgctgaagggaccaagtatgctcacaaggtctgtcaagttttgcagcctggggccacaaaccgctatacacatgccatgatgtggaaaggtggtgctgaatggtgcctggaatttcctgacagaagccagtggttgattttcaagcaaatgcacgatgagtgctatagccataacatcagagctgcttctgtgagaaacattccaatccctggtgtccatttggttgaaatccatgatgataatgatgtggtatcctttgtgcaatctgaagcttatcttgttcacatcggaacagatgttgaaattgctcttgatcaatcccgtgtgttatatgacatggacagcgatgatgaagagtggatatcaagctggcggaaatccttagtaagagacaacaccaccacacttcagtttgcagaagatttgtttgagagggttatggacaaactagagaagtttgcatatagccacaactgtaatggactcagcattgatcagatgaaggaactggagactgatgatgtacctctgcacactattgaagtgatacatgcatattggcaagacaagaggcagaaaaggggaatgccacttattcgacattttcagtcggctatgtggaagatctacgagcagcagctgcatgaatgggaatcaaaagtatgcagaatgcagagttcgtcaaatgggtaccaagaaaagaaattgcctcccaagcctgcattgtttgccttctgtttgaggcctcgtggactccatgtaccatacaaggggccaaagcagcgttctcataagaagcttatgtccacaggctgccatagcttttcaagagagcatgatggcttttaccggcaaggtaatctcccttaa

SEQ ID NO: 29175 - DNA, 1593 bp, Zea mays
  Peptide Sequence Number=SeqID_70954
atggaatccagtggcggtgataaacccactgcaacagatgctaccgaatcagtggtgggtttagatggcgaggagactttgtctgagagggaatctgttggagcaagacatggccctgccttgtctaatgggggtggaaaggaggctccttcgagcagttcatctgcagggaataagaggaagcacggcatcttgggttctaatcaaatggaactcaatgaaccagggatgccaagttccagctcaggtgattccacatggagtttagatagtctggatgaccgtcaccagatctcattgttgagaagtaagaatgaacactctgaacattcagttacttcagctggagttacagtgatcaggcagcctcgtggcgtcttgaggttaaggaagcgggatcagaatgtcagtactgagagttggactggtggtcataatattccacaagctaatggagttcctaggtcttcccaactcctgaggcggaacaagaaggggaaatcaactgtgttcgagcagaatagaattggtggtgatgaacctgtcagttgcttgagaactgagaatggtacttgtgatcaggataccggctccaagttctgttctgaaactgagttctcagctgaaaagctgtcacatctttcaggtgaagccccaaaagctgttcatgttgacaagggtgggtgtgaccatgtcaaagatgatgatgataacatatgtgctggatcaccaaggaagggaatgaaatcatctgatacgtcatcaaagagatgtattcctcagcattcaaatcattttaagagttcaaacaaaaaaatcaaggatgtacctagtcctgctagattgctgcggaagcgtgatggtaaagttccattcaggaagcgtcgtccgcgtcggcatttttatgaagttagccctagcgacgtggatccattttgcattgtaaaagagaggatcagagttttttggcctcttgatgagacttggtactttggcttggtcaaggaatataatccggacacaaggttacatcatgtcaggtatgatgataaagatgaagaatggatcaatcttcaaaatgagaggattaaactcctgttcttaccagcggaagctcgcaatagatctaaatgcaccaactcaaggtcagtgtttgacctgaagcatgaacagggtgacagagaagacatggatggaagcgaaggcaatacagaaagttctgagtcaggtcccattggctcatggttagctcgatcaaaccaagcaaaatctgctgcactttgtaacatcagcaagcaagatcacagtcattccaatattgttccaatttcatttgaccaaaagcagtgccgtggttctgatgctaaggagtctaatgattatataccatgtgattcatttggaaatgggagtgcaaaagttctcaaggatagaaccacacctgaggacaggaggtttcgctttgtttattctaggaaacggttttgcagaaaaacgaatggttttcttagcatttccgaacagcattctaattgtcagataagagcaagatttgctatggttcttgctgcatgtcctgggtatggaatctag

SEQ ID NO: 29176 - DNA, 537 bp, Zea mays
  Peptide Sequence Number=SeqID_70955
atggggcaatctattgaggaactggattcaaaggtccaaactactgttccagggacttctggacgaggtagcaagcgttcatggaaacaacagggccgtattattgttggagcagcaaaaggaattttcaaggaggcggaggcggaggggtcaggtgcggaggtggaggcggttaccggagcgcgagagacggcggtgagggacccgggcattcggctcacgctcgctaacctgctgcacgccgccgccgccgccgtaggtatcctccaagccatcggcgtcaccccaccggtggcggcttcaaacgccgaggccgaacgacccgaccagccccaggtcaatgatacctgtcttccacccgaggaaggtatacacgagagagaaggtggagcactggagccggctacgcgttggaagggtacggcgtgggccaagagcggtgtcagggcagaccatcctatcccttcctgcttgcgccattgtgccgctgccgccgacgccgatccagcgggcggtgcccacgacctccgtgacgtg

SEQ ID NO: 29177 - DNA, 636 bp, Zea mays
  Peptide Sequence Number=SeqID_70956
atggatgatgctaacaacctaattgcaatacaagtaaactgctgtctcacggtaatcagggttaaatggtcacttcatgcaagggaagagatattaattgagcttctcagacatttgaggggtaatgccacaagagctattctagagagtattagaaagtgtacgagggacatgttggaagagcaggaagctgtgcgcgggcgcttgttcactattcaggatgttatgcagagcactgtccgtgcatggctacaagatagaagcctcagagttacacataatctggcaatttttggcggcggtggcatggttttatccataatcactggccttttcggaatcaacgtcgatggcatacctggagcgcagaacaccccctacgcttttggtttgttcgcgggacttctcttctttgtagggatcgtcctaatcggcatggggatgctgtatcttgggttacagaatccagttaacagtgagaaggtgaaggtgaggaagctggagctccagcacctggtttcgatgttccagcacgaagcggagcagcatggcaaggtcagggaaggtgttagccggcatggcgcctcgccgagttcatccacggcctctgatgaagggtacattcttatctcctga

SEQ ID NO: 29178 - DNA, 456 bp, Zea mays
  Peptide Sequence Number=SeqID_70957
atgcaggtggcatgcaatcgcaccgcgggggcgcaccccttcggcttcgtcgcattcagcatagatgcccaggcccacacgtcatgtaaccggcgcgccggttactacgtgcaagaaactgcaccgccacttgcgccaatgccgcgcctcctcgactgcggaaccggtgccgcgactcgaggcaaccctgcgcatggcccaacagtgccaattgtgcacatcgatcacggggaccgggaaaggggatatttcgaaagggatccttctctgcgaaggaaacgggccccgagccctcctactgatcaggggttcgaagtctggcccctcggaagggttcgacagccgccccagagcactcgggattcacactcattactgatcagaggttcgaaggctggcccctcggaagggttcgacagccgcctcagagcactcgggttccgcgcccactactga

SEQ ID NO: 29179 - DNA, 498 bp, Zea mays
  Peptide Sequence Number=SeqID_70958
atgtcaaaatatgacatgacgggaattggattaaatctgcgggagattctgatgaaaatgggtgatgagcttttatcagtcaacggcattgatgtaaagggtaaatctgcatttgatgcttcatccatgctgcaaggtccaaaggagacgttcgttacgattaaggttaagcatggcgactgtggtcctgttgagtcaatgaaggtgcagaggcaactggttactcgaactccagttttctatcgtttggagaaaagagaaaacaatgattcatctgttgggtatattcacattacagagttcaatgcagtggccaaaaaagatttggttagtgcgctaaaacgtctacagaaatcaggcgcctcctattttgttctggatttgagggacaatcttggtggactagtgcaagtatgccatccattttcttcccaattatacatcattgctatgcttgtctttggcctgctatactgctggatgtgtgtagaggactag

SEQ ID NO: 29180 - DNA, 393 bp, Zea mays
  Peptide Sequence Number=SeqID_70959
atgctcgccgtcgatcttaggcggcgcatcaacaggcatgtcaacaccatcaagaagaaggtggtggaaacctcaagcacgaagcttgaggttaccgtcgttggccctcctccaggccccgtcatgcctagggtcgcacgcatcgaccccgacatagcacgatggtattcaagcctcatcatgcatgaggtgagtagccggtcgtggagggcccatgggagctccccacgcacacgggtggctccaagacccaactcgtctgccacaagctccatggtgttcggggtagcagccaacatccttcatcgggctttgcctttggccttcgccaaggcagaacggggcgctgcttacccttcgagtcagacgcacaacggagctcagacgttttag

SEQ ID NO: 29181 - DNA, 2896 bp, Zea mays
  Peptide Sequence Number=SeqID_70960
atgtagagatattgatgttgatgctattcatgatcacatgactttaattaaacaacaaaatgatcatatagcaaagttagatgcaaaaattgccgagcacaacttagaaaatgaaaagtttaaatttgctagaagtatgctctataatgggagacgcccgggcatcaaggatggcattggcttccaaaggggagacaatgtcaaacttaatgcccatcctaagaacttgtctaactttgttaagggcaaggctcccatgcctcaggataacaagggttacattttgtaccctgccggctatcctgagagcaaaattaggagaactcattctaggaagtctcactctggccctaattatgcttttatgtataagggtgagacatctagctctaggcaacccacccgtgccaagttgcctagaaagaaaactcctattgcatcaaatgatcataatatttcttttaaaacttttgatgcatcatatgttttaactaacaaatccggcaaggtttatgcatccgggggctcaagttggatactcgacagcgggtgcacaaaccacatgaccggggagaaaaagatgttctcctcatatgagaaaaaccaagatccccaaagagcgatcacattcggggatggaaatcaaggtttggtcaaaggtgtcactgtctttagaagaagtgatgattcaatagcatttaagggagtgttagagggtcagctatacttggtagattttgatagagctgaactcgacacttgcttaattgctaagactaacatgggttggctctggcaccgccgactagcccgtgttgggatgaagaatcttcataagcttctaaagggagaacacattttaggattaacaaatgttcattttgagaaagacaggatttgtagcgcatgccaagccgggaagcaagttggaacccaacatccacacaagaacatcatgacgaccgacaggccgcttgagctactccacatggatctattcggcccgattgcttacataagcatcggcgggagtaagtattgtcttgaaaaatctcatacccaagagaccttaaagggattcttgagacaggctcaaaatgagttcgacttaaggatcaagaaaattagaagcgacaacgggacggagtttaagaactctcaaattgaaggcttccttgaggaggagggcatcaagcatgagttctcttctccctacaccccacaacaaaatggagtagtggagaggaagaatcgaactctattggacatggcaagaaccatgcttgatgagtacaagacttcggatcagttttgggccgaggcggtcaacaccgcttgctacgccatcaaccggttgtatctacaccgaatcctcaagaagacatcatatgaactcctaaccggtaaaaagcccaatatttcatattttagagtttttggtagcaaatgctttattcttgttaagagaggtagaaaatctaaatttgctcctaaaacggtagaaggctttttactaggatatgactcaaacacaagggcatatagcgtctttaacaagtcctcaggactagttgaagtttcttgtgacgttgtgtttgatgagactaacggctctcaaatagagcaagctgatcttgatgagataggtgaagaacaggctccatgcatagcgttaaggaacatgtccattggggatgtgtgtcctaaggaatccgaagagccttcacaagcacaagatcaaccatcctcctccactcaagcatctccaccaactcaaaatgaggatgaggctcgagatgatgaagtagaagatcaagcgaatgagccacctcaaaatgacggcaatgatcaagggggagatgcaaatgatcaagataagaaggatgaagagccaaagccgccacacccaagagtccaccaagcaatccaacgagatcaccccgtcgacaccatcctcggcgacattcataagggggtaactactagatctcgtgttgcacatttttgtgaacattactcgtttgtttcctctattgagccacacagagtagaggaagcactacaagattcggattgggtggtggcgatgcaagaggagctcaacaacttctctagaaatgaggtatgccatttagttccacgtcctaatcaaaatgttgtaggaaccaaatgggttttccgtaacaagcaagatgagcatggtgtggtgacaaggaacaaagctcgactcgtggccaaggggtattcacaagtcgaaggtttggattttggtgaaacctatgcacccgtagctaggcttgaatcaattcgcatattattagcctatgctacttaccatggcttcaagctttatcaaatggacgtgaagagtgccttcctcaatgaaccaatcaaggaggaggtctatgttgagcaacctcccggctttgaagatagtgaatatcctaaccatgtctataagctctctaaggcgctttatgggctcaagcaagccccaagagcatggtatgaatgccttagagattttcttattgctaatggcttcaaagtcggaaaggccgatcctacactctttactaaaactcttgaaaatgacttgtttgtatgccaaatttatgttgatgatattatatttgggtctactaacgagtctacatgtgaagagtttagtaggattatgacacagaaattcgagatgtctatgatgggggagttgaagtatttcttaggattccaagtgaagcaactccaagagggcaccttcattagccaaacgaagtacactcaagacattctaaacaagtttgggatgaaggatgccaagcccatcaagacatccatgggaaccaatgggcatctcgacctcgacacgggaggtaagtccgtggatcaaaag

SEQ ID NO: 29182 - DNA, 1410 bp, Zea mays
  Peptide Sequence Number=SeqID_70961
atggcttccgccgaaaccctagcccgctccccctcgcgcgagccttcctccgacccgccccgcgcaggctcttccgagccccaccacaacggcgccggtgactcgtctcgccgccgccgccgcagccgctgggagcagtctaacgacgactccgccaacaactccggcggcgagggcggggccgtgggccggaagcgcaaaacgcggtgggccgaggaggagccgcgcccagccatcgcgctgccggacttcatgaaggacttcgcggccgagatggaccccgaggtgcacgctctcaacgcgcgcctcctcgacatctcgcgcctgctgcagtcgggcctcccgctcgacgaccggcccgagggcgcgcgctctccgtcccccgagcccgtctacgacaacttcggcatccgcataaacacccgcgaataccgcgccagggagcgcctcaaccgcgagaggcaggatattatctcgcagctcatccgccgcaaccccgccttcaagcccccctccgactaccgcccacccaagctccagaagaaactctacatccccatgaaggaataccccggctacaactttatcggcctcatcattggccctcgtggcaacacgcagaagcgtatggagaaggagactggtgccaagattgtcattagggggaagggtagtgtcaaggaagggaagtttctgcagaagagggacctcaagccggatcccagtgagaacgaagatctccacgtgcttgttgaggcagagacgcaggaggcactcgatgcggctgctggtatggtggagaagctgctcaccccggtggatgaggtgctcaatgagcacaagcggcagcagctccgggagcttgccgctcttaatggaacaattagggacgacgagttttgtagaacatgtggtgaggctggtcacaggcagtatgcttgccctaacaagatgaacacgtttaagagtgatgtgcagtgcaagatctgtggggatggtgggcacccgactattgattgtccagtcaagggcacttctggaagtggtggtagcggtggtgcttctgctggaacggggagtaacccgccttggtcagccggtggtggtgctgctgtcattgggctcaatggtatcaagaaagactatgacgagacaaatctgtatatcggctacctgccacctacaatggatgatgatggattagtcagtctgttttcgcaatttggggatattgtcatggctaaggtgatcaaggatcgaaacaccggacagagcaaaggatatggatttgtcaagtattcagacgtgtcagaggccaatgcagcgattgctgcaatgaacggtcaccatcttgaagtatccaccacccccagcagctcccatccctccaccaggcactacatcaagtga

SEQ ID NO: 29183 - DNA, 231 bp, Zea mays
  Peptide Sequence Number=SeqID_70962
atggtggatctctgcacctacacgcaaggagtgaaaagtatggaaagttctttatgccccatagtgtcttctgtgtttaatagatacattatgaaatgttcttcatggaacattaatgatggccaattgaagctagaggaaacatctcttacaaaatccatgcttgaaagtaccaaatctttcttacttgactgtggggctaaaatatatgtatgggttggatgtgattga

SEQ ID NO: 29184 - DNA, 123 bp, Zea mays
  Peptide Sequence Number=SeqID_70963
atgatggtcatggtcgagaatgatgcaatccaaaacggcctttatgcgccgaatgatctgcttctgtgcctaagtcgcggaccatccgaaagcgtgaagaggaggatctgcttctacgcctag

SEQ ID NO: 29185 - DNA, 786 bp, Zea mays
  Peptide Sequence Number=SeqID_70964
atggatatgatagtactagccattaccaactcggtcgtttcgtcttctctccgatatcttcgccaggctcagagcggagttgtttcagttcagccaccgtctacggcgctgcagacacgtatggagaacgcgaacgagtccgaggaggaggcacagcgacgacgagtgcaggaggaagaagacagtagcagcagggcggcgacaaggtgggtggcggccaccgctgtcgagatcgaactggaggttttggagtgccccgtctgctaccggcctctcaagcctccggtgttccagagactagaaacacagacaaacacctcggtttcgcacggagcgttagcattatcattcgtcccgtggacatacgcagtgtgcagttgggcatgcggtatgctcgtgttgctgcgccaagctcgccggcagaaactgccacacgtgcgggcgtgcggcggcgccaccggcttcagccgctgcttcgcgctggagcacgtcgtggagtccgtccgggtcccgtgcgccaacgcccggcgcgggtgccccgccaagacggcgtaccacggcaaggaagagcacgagaaggcatgcccgcacgccgagggcgaggccgacgccggccctgccattccacagcgcccagctgagcaaggtggaaacaggggcagtagagcccgaaacttggtcgtcgtagtactagtgcttgccagtattccagttgcgatccccgctgtccgtggcatcgtcgagcattttggcctaccagatccttgctcgtgcgtggcaacatga

SEQ ID NO: 29186 - DNA, 380 bp, Zea mays
  Peptide Sequence Number=SeqID_70965
atgcaggcggcatgcatccgtgccaagtgggcgtgccccttcgactcaaacaagcccagcatggaggtccaggcccacgcgtcatgcaaccggagcagcggccacgtcgtcagccaagcttacgtcccatccaggggtagcgaaggagccctctcccacggcatgaagacggctccgagcctccctactgatcagaggttcgaaggccggcccctcggaggggtgcaacggccgcctcagatcgattgggttctgcgcccactactggtcagaggtttgatggccgacccctcgaagggttcaacggccgcctcaggccactcgggctccgcgcccactactgatcaggggttcgtaggtgtcacacccggttttggaag

SEQ ID NO: 29187 - DNA, 282 bp, Zea mays
  Peptide Sequence Number=SeqID_70966
atgggtcaggcaaaccgccttctcggcctgtgtgattctttgtttgctgggggctggggctggccggcgatgctgctcgacgcagaagaggccatccgtcagggcggagttaaagtagttaaagtaccgattaacgaaataggggagattataactcccatcgttgtcgaggaaatgatcctcgatccctgggacccaccggtcagtgaacgcgctaaggaaagagcccctgatcgttgtggccttttagtcagtccgaagaggcaggtgcgccaaccttag

SEQ ID NO: 29188 - DNA, 237 bp, Zea mays
  Peptide Sequence Number=SeqID_70967
atggcgctcggcccgccccggtgcgatacctacgtggccagccccagtggctcagtcccacaactgcatggccgtgtgtgccccaacatggccgcgtgtgcccccggcgcggctcagcgccctggcgtggccgtgggactcgagcagtttctagagtacctctccataaggacttgtttgttggatgaccgcctgggacaacaatacatccatgagggtggaatgggacacacttag

SEQ ID NO: 29189 - DNA, 243 bp, Zea mays
  Peptide Sequence Number=SeqID_70968
atggtgacacaatcaaggcagtcgatgaagaaggtcgatgtcgaagtcgatattgtcgaaccatcatggccgaggcgtgcgccagaatctgaagaaattactagagaaggcctccacgacggttgcgatttacagaagaacgacaaggaaggtgtcgatgcagcggttgttgaagtggacgaagtagacgaggatgagagagcaacactgacgatgaggttatattggacaaagtcgaagtag

SEQ ID NO: 29190 - DNA, 114 bp, Zea mays
  Peptide Sequence Number=SeqID_70969
atggaccagcccatggacatcctcaccaaaacacttcggcaggtccaactcaggataaatagtatagtggttagagacatatgtcatttgaaagataagcatatgtgtgcctga

SEQ ID NO: 29191 - DNA, 642 bp, Zea mays
  Peptide Sequence Number=SeqID_70970
atggcggcggcaccccctcgctggtggccgctcctcctgcagctcgcaatcgcccttggcatcctgctcgcggcggccgaggcttggacgggggagatccgcggccgcgtcgtctgcgacgtctgcggcgacgcagccatcggcccggaggaccacgccctcgaagtgactacaacaggaggtcgggacttcaggagcatatgtagagggatgtcggagcacagcagggcgacaggagaggagagcggcggcgctggagaagggatggcgacgctggagaagggcgcacgcgtgactgatggccacactaggcctgcaaaaggtgtgatttatgcgacccatttgattaattcagaaggtgcggaggttgctgtcctctgcatcacaaaatctggtgaggttatcaactatcaagccttcacaaactccaagggcgtgtatactgtcgccgagactatgccggagagcgacaggtgggactcgtgcttggcgaggcctatgagcagcttccatctacattgcacacggcggggtgatgctcactctggggtgaagttcacttacaacaaatcgtctgggaacccgcacaccgtcaagcctttcctctacaagccggccaccgtccctctgtattgtagttaa

SEQ ID NO: 29192 - DNA, 369 bp, Zea mays
  Peptide Sequence Number=SeqID_70971
atgccgttggcggaggtgcgctcgccggtgacaggcttctccctccctggtgggtctacgcgtggtaaacaggatgtagagggattgaagggaccttaccagtgtcgattccatcttgagttccttccgcggagggtgcaatcaagcggcaccaacttcatcaattatagcttagattcaagcatcggctgcaccatggccaccactacttcatccaccccgccgtcacgtatgagcccagctgttcacggtgaaaacgcgaccacaacgaccccgcggcatccgcggccgccgcgcggatcttggtgctctgttgggcggagtcggctaccgcggaagcaggagatgaagaggggaggtcacggctag

SEQ ID NO: 29193 - DNA, 369 bp, Zea mays
  Peptide Sequence Number=SeqID_70972
atgccgttggcggaggtgcgctcaccggtgacaggcttctccctccctggtgggtctacgcgtggtaaacaggatgcagagggattgaagggaccttaccagtgtcgattccatcttgagttccttccgcggagggtgcaatcaagcggcaccaacttcatcaattacagcttagattcaagcaccggctgcaccatggccaccactacttcatccaccccgccgtcacgtatgagcccagctgttcacggtgaaaacgcgaccacaacgaccccgcggcatccgcggccgccgcgcggatcttggtgctctgttgggcagagtcggctaccgcggaagcaggagatgaagaggggaggtcacggctag

SEQ ID NO: 29194 - DNA, 138 bp, Zea mays
  Peptide Sequence Number=SeqID_70973
atggagcagctagcaactgggcagactgcaggtacatgtcagtgcgaacatggacctggttttgctgtattctcctcacagcataggatgaacacaggccatcatccatttggtgaaacaagttttgttgttaaataa

SEQ ID NO: 29195 - DNA, 594 bp, Zea mays
  Peptide Sequence Number=SeqID_70974
atgcatgccccgaggaggttcaggaaggccttcacggcgcagctcctgcggagcctgcgggcggccggccaggcgtccaagtccctgggcctccgggagcgccgggacgccgtgcggctctcctccgacgtagcgctggctctggcggcgtccgcacgggccccacgctcgccgccggcgtgggcgcgcgcgctcgtcgcgaggcacgcggcggagcggcgcaacgaggcgctcctgcgccgcgtcttggacggcgccggctacgagctggcggcggcgagggccaggaaggatgcgcggagcaggagggtcgtgaggaggtcgcgccgggtatgcagccgcggcggcggcgccgggaggaagaggaggagcctgctgctggcggcgggcggcggcggcaggtgcgccgcaatggcggcggccaggaggatggtgagggcgaggctgcgggtgctgaggagcctcgtgccgggagcggaggccatgcgtggcctctccctgctctccgagacgctggactacgtcgcgtgcctcaagacgcaggtggagctcatgcaatgcctgtgcaaaggaccctgttccctgctgcgctga

SEQ ID NO: 29196 - DNA, 411 bp, Zea mays
  Peptide Sequence Number=SeqID_70975
atggacgcgcccacgacacgtgtttcccgaccactcccccacgcacccaaccccttttctggagcccacacccactcgctcactcccctctctcagttgtgccctcagcagacaccctcgctcctctctctcgcaccgcacgcacacccgtggagctctaccgtggtctgccgtcgagcttctgtcgtgttcgttgccccgtcatcggaccttcaccgtgcagccggagctccgccgccatcaacccaaggcctccctacgttctcgtcgttgctcaagcgctccagagtcccctctcgagacaacgagcagcctgtggttcctgagtgtgttgccgaagatcttcctgagcaacaacctggtgaaggggactcaggctattttcttaagtacctctccataaggacatga

SEQ ID NO: 29197 - DNA, 2241 bp, Zea mays
  Peptide Sequence Number=SeqID_70976
atgggctacaactgtctttttactgatataggtgtcactgtctttagaagaagtgatgattcaatagcatttaagggtgtgttagagggtcagctatacttagtggattttaatagagctgaactcgacacatgcttaattgctaagactaacatgggttggctctggcatcgccgactagcccatgttgggatgaagaatcttcataagcttctaaagggagagcacattttaggattaacaaatgttcattttgagaaagacaggatttgtagcgcatgccaggcagggaagcaagttggagtccatcacccacacaagaacatcatgacgaccgacaggccgcttgagctactccacatggatctattcggcccgattgcttacataagcatcggcgggagtaagtattgtcttgttattgtggatgattattctcgcttcacttgggtattctttttacaggaaaaatctcaaacccaagagaccttaaagggattcttgagacgagctcaaaatgagttcggcttaaggatcaagaaaataagaagcgacaacgggacggagttcaagaactctcaaattgaaggcttccttgaggaggagggcatcaagcatgagttctcctctccctacacgccacaacaaaatggtgtagtggagaggaagagtcgaactctattggacatagcaagaaccatgcttgatgagtacaagacaccggaccggttttgggccgaagcggtcaacaccgcctgctacgccatcaaccggttatatcttcaccgaatcctcaagaagacatcatatgaactcctaaccggtaaaaagcccaacatttcatattttagagtttttggtagcaaatgcttcattcttattaaaagaggtagaaaatctaaatttgctcctaaaactgtagaaggctttttacttggttatgactcaaacacaagggcatatagggtctttaacaagtccactggactagttgaagtctcttgtgacgttgtgtttgatgaaactaacggctctcaagtagagcaagttgatcttgatgagataggtgaagaacaggctccatgcatcacgctaaggaacatgtccatcggggatgtgtgtcctaaggaatccgaagagcctccaagtacacaagatcaaccatcctcctccatgcaagcatctccaccaactcaaaataaggatgaggctcaaaatgatgaagagcaaaatcaagaagacgagccacctcaagatgatagcaatgatcaagggggagatacaaatgatcaagaaaaggaggatgaggaagaaccaagaccgccacacccaagagtccaccaagcaatccaacgagatcaccccgtcgacaccatcctcggcgacattcataagggggtaactactcgatctcgggttgctcatttttgtgaacattactcttttgtttcctctattgagccacacagggtagaggaagctctccaagattcggattgggtggtggcgatgcaagaggagctcaacaatttcacgaggaatggaggaaccaaatgggtcttccgcaacaagcaagatgagcatggtgtggtgacaaggaacaaagctcgactcgtagccaaagggtattcacaagtcgaaggtttggatttcggtgaaacctatgcacccgtagctaggcttgagtcaattcgcatattattggcctatgctacttaccatggctttaagctctatcaaatggacgtgaaaagtgccttcctcaatggaccgatcaaggaagaggtctatgttgagcaacctcccggctttgaagacagtgagtatcctaatcatgtctataggctctctaaggcgctttatgggctcaagcaagccccaagagcatggtatgaatgccttagagatttccttattgctaatggcttcaaagtcggcaaggccgatcctacactctttactaaaactcttgaaaatgacttgtttgtgtgccaaatttatgttgatgatattatatttgggtctactaacgagtctacatgtgaagagtttagtaggatcatgacacagaaatttgcgacgtcgatgatggggggagtggaagtattttctaggatttccaagtcaagcaattccaagaggggcaccttcattagccaaaacgaaagtacactcaaagacattcttgctaagtttgggatgaaaggatgccaaacccatcaagacacccatgggaattaa

SEQ ID NO: 29198 - DNA, 1360 bp, Zea mays
  Peptide Sequence Number=SeqID_70977
gattgttcaggcgccaattagtgccctatgttcaatgcaaagttctgggaataccccttctgttgtcaatagtagcgctgaaggggagatgatagaacctgctgtagatgaggatgcacaatcatctttggcacagcaagtggacacagcagtgccagatgagaaggcacagttatcaacagatcagccaagtgatatggaggtctcggagccttctttggatgagcatcttgttcaagatgagaattcttcattaggtggcaaagacagcgacggtaccttaaatgcttcaaaacctcctaaacctggaaaagcaccgtcaccagaaaagatgaaatattggaaggaacatggctttagtagtttgattgttgctgcccctggccacgaagtagagcgtcttgttgctgatatgcttccacttttgtcttattcagccccatttgctatatatcaccagcatctcgagcctcttgcaaagtgcatgcacagcttgcagttatcaaagatggctattggattgcagctttctgaaccctggctgcgtgaataccaggattggactggagtcgcatgcaccgtggtggtccacgtgtcagtattcatcgcccgtctcctcgactccactacggcgcagcgcacaacaaaccctaatcctgaacggcggctctgcctctgcggcactgcctgcgtcttcccgccgccgctcgctcaacgctcattccctgctccctcgtcttcgcgccgccgctcgccgcaccgcctccggcctccctcgtcttcgcgcggtcgcgccgcctccgtggctccgtgtcccagccggtcagcgagcccgcgagcttcctcgacgtcggcaatggcgcaaggaaatggaggtggcgccccgactccacttccccagctcggtgcacgggccacggccaccctgtctctacctgaacggcaagccacaacagcgtctaccgcagatccgactccgaatcatccgacctccattgaggatggcgccggtggcagttcttcgttcacgccaacgccgagtgcaagcccaactgttgtaggcagcagctcggacacaggtaacaagcgaggtaggaaaaccacctctgatgtgtggaatgacttcgagcaactctacaaacaagttaatggtaagaaagtcagggtgcttgaggagaggagacgttgtctaactagtgagatggtggagaccttgacatgtttgaaggattggcagatgggcgacgatcgagaacagcacaacttggagaatccagagcttcaacaagccttcgagaatcagtatctagatggtgatggtgatgataatcaagatgctcaacctgttgctattgcctag

SEQ ID NO: 29199 - DNA, 210 bp, Zea mays
  Peptide Sequence Number=SeqID_70978
atggagacggcagaggaggagcgaggttcctatatttttggttactacaagagggtgtggaaaacctgggctccgccgaagtgtcatttttcatttggttggctgcacaatacagatgctggactgatgaccgatgatgagagaagattatggaaattagctaggaccaagggtctttcctttttagcagagccccttcttgaggcttga

SEQ ID NO: 29200 - DNA, 576 bp, Zea mays
  Peptide Sequence Number=SeqID_70979
atggtgggcggcggcggcgacccaaggccggaggacgagcccttctccgacggagacgccacggagtcggacaccgacgagtctcctccgcaggggattagtgctcgccgccccggcgccaccactaacccgatcctgactcgcctcgcggtgtcgcggaacccgagcccgctggccgcggccaccgcggcccccggggtgtgcctcctccgcttcgcctgggagtccgccgcgggatccctcgtcggcgccgttgtcggatacgagactttgagcgttgcatgggcgtttgtgctatctgaaagagtgaagaatcccaaaatacagacaatctgtattcaatatgttttcaacttattgtgctgctttgtcattctacctgccctacatggtggagaattagctgtgtctgcgagaatgggtctccttgcagccctaagcaattgggggtggagggcctacgctaatgatcaggcttcatatggctatgtccagcagcgtgaggattcagttgtggatgtgtattgcaggccagatttccatgatatcaccatctatctacagcatacaccataa

SEQ ID NO: 29201 - DNA, 258 bp, Zea mays
  Peptide Sequence Number=SeqID_70980
atgccagccggcggcgccatggccagcgcggaggaaatgacgtcagatcatggtggattctatggcatgctccttaccttgagggctaggtctcggcgtttcggggattggccggtgaggcaccccggcaatcatgcgatagtggttgagcgagcgccagtgcccagcgacgaggactgcgcagagaggttgacccatgggcccaaggtgtcagcgctggtacagatgggttgggctgagtgggcgaagaaagagtag

SEQ ID NO: 29202 - DNA, 468 bp, Zea mays
  Peptide Sequence Number=SeqID_70981
atggaagttgtgacacatttgttccaagcatatttggatagtgcacgtgaaagcacacttgttgctccaaatgaacctattgcaactaagacacttggtgtaaatacagtcgttgaagattttttatatgaggatggagatgcaaccaactgcgaaataagtgaattggatgtttacataaaagagaaaccatttcggtgggttgatcctagtggtaaaggtgcacggtttgacatattgtcatggtggaaagtcaatcaagtgaaatatcatgttctctcgttgcttgctcatgatgtacttgttgttcaagtctctactgtcgcctcagaatctgctttcagctctagtgggcgcattgttaccaaattccgcagtagtttagagcctgaggaggagaacctggctgatgatgaggacaatgggaaggacagtgacatcgacgactacatggagatggatatttga

SEQ ID NO: 29203 - DNA, 336 bp, Zea mays
  Peptide Sequence Number=SeqID_70982
atgtcgtttttacaccctctactcagcatcacagaccgtgtcgctaagatacatgttgcgttggtacgatatatggttgatatgatgagtacagcgtcgggtactgtgggggacagatatccctcgagtccactaggaggtgaaagacccttgcttgggggccacataccagttgtcccacaaggtcgtcttgactgggccggaaaaaggaccgcaagtgaaatgtgccgactcaagaaggcgatgggcccgtacccggatcgtccgtggattatgcgcaatctcaaggaaccgtccgactttcccacgcccggcgcccttgaacgtcagggatag

SEQ ID NO: 29204 - DNA, 612 bp, Zea mays
  Peptide Sequence Number=SeqID_70983
atgagtaggggtaagagggacaagggctggccctaccatgctgacgacaagcgcaagcatgtcccaagtcctccctcagaggattttggttactcggagtactcagaggaggcttcctccgagtatgatcgatcgcccgctcctgtctcccccatggcgtcgtccaaggacttggatgactccatggggttgtccactgcagctcaagcatactggcgctccatcgagcgtgccaagcttggcgggtcggatgacttggaggatgtctcctcgaaaaaggtagactcctccgactcctctgaggagtggagcggcagcgaaggtgacggcggcgaggacgacgacgacagcaagggcggttgtggcggcgacggcgccggtggtgatggcgagggtgatggcgacgacgatgatggcaagggtgacggcggtgacggcaaggacgacaacggcaagggcgatggtgacggtggaaagggcgacagtggcgatgaagatgacggcaagggcgacggcggtgacagcaagggcgacgaaggcgagggcgatggtgacgggggcaagggcgacggtggcgacgacaaggccagtggcataatgctgctggtttag

SEQ ID NO: 29205 - DNA, 603 bp, Zea mays
  Peptide Sequence Number=SeqID_70984
atgcgggattacatcggaatggtcatggtggtcgaagacgattgggaattccagccactagaggtcgagcctttcgacgagtgtgtccaactccttttgctgctgtcggaggatggctttgcgggcaaggatgcacgcctaacgctggtgctggtattccttctcttggatgggggatcccaagtcccccccttcgttgttgccttgtggtggcgtggccacgaagtaggctctttcttgcgtctcatcgaagtccaagacaggttctatcgaggcactgctcgagtcatcctcaaggagatcatggatggacgcaggttggcagccgacgacagccaccatggttggtggtgggactgcttccacccgctgtttagcggcaacggtggacgcattgaggcatcgcttgagtgtggcggcacatcttttgaggcatcatttctccgccttggtctaggtagaatgcctaggccccaggcctatgtcattggcctcgttgtgggtaacaaggcggagttcgccggtctcctaggcgaggaagtcaagggagccaaaggtgatccagcttctaggagcaaatgtcttactcttggaagatgctga

SEQ ID NO: 29206 - DNA, 237 bp, Zea mays
  Peptide Sequence Number=SeqID_70985
atgccgccagacttgaggagcgaggagaccccaagacaacctagagcatcactgacatcccaaagcgcacgcagtgtcaccctcggcaattacggtggcggcgatgtcatcaaaatgagagaccatccagccaagggtgacgccaccacctcaacaaatgccttcggcgatggcatgctccacacggtcgggcagcttctgtgggcgatcaatcagaggcacttcgatcgacggtga

SEQ ID NO: 29207 - DNA, 870 bp, Zea mays
  Peptide Sequence Number=SeqID_70986
atgccccgtgatgcctttggatcccgcatggcaccacgtggaggcgacttctcgggttgcgtcgcaatcttaggttccttcgctggttgcgctagggaaggtgactaccaggaagcgctcatctcgtgtatatgtgttgtacaagtccgtgagggacgcgaccctggtggtcaaactggcacctccgtttccttaggccttcaggttgctgtagccggggaggtcgttccaagggcagcgagcgtggccatcctggaggtggttctcattgactcgtcgtcatccacgtccgccctaggggaactctgggaagccggtgtagttggaccgaccttcgggagcaaacaacatcggccgtggatacttgagtcggccccgcttcgagatgacgcgaccctggaaaccattgagtgcatgcttactggtttcggggatgctcgggcggaggcgctgcgaatgacgcatgtgggggtagagcagctctgcgtgggtgccgcccacacagtaaaggaagaaagcgagctcgccgacgacaagggctcccaacttggagagacactccacggagtgaagtctcgtgtcgggttggccgaatcatcatcacgggaggcggaggttcatctagtgcaagcgagctcgaagcttgagagggagcgcgacgcgaccaaaggcgaatgcccttctctcgggaaggagcgtcgagctccaagagctccatcaggttgtcggcatggtggtggcgtcacccttggctggatggtctctcattttgatgacatcgccgccaccgtaattgccgagggtgacactgccaaccgaagcgacaaggagctagacgctatcgaggaacaagtccgcccctatgcctag

SEQ ID NO: 29208 - DNA, 1164 bp, Zea mays
  Peptide Sequence Number=SeqID_70987
atggagggcactttcggcgtgccgtattacgagtggctcaagccgcggtcctcctcttcgacgccgccgccatcgccgtcgtcctcgtctacgtcctcgacgacagtctcagcaccatcgatcgaccaactagccgccgccgctgccgatgtcgtcgtccatgatgagcgcgacgccatgatgtgcttgccgcttcttggcaggcttgaagggagggcgacgactcgtgatcttggccataatccgatcaaagaagaggaggccgccggtgttgacctgagcatcggcctgccggcgccggtaactggcgccagcggctactgttctgaagcggcgccttcgtcgcccgtggacgaggatgaggatctcgaggaggaagaggacgagaaggcaaggaaacgtgacagtgacgagtgcaaggtggaaggagcaggtggagagcgatatcgcagtgagatggtggtggtgtccggtgagagaccggccgattacatgcgtgtgggtggggaggagggcatcgtcggcagccgcggccggcggtactggatcccgactccggcgcagatactcgtcggcccggtgcagttcatctgccatgtctgcagcaagactttcaacagatacaacaacatgcagatgcacatgtggggccacggccgcgagtaccgcaggggcccggagtcgctcaagggcacgcaggcggcgacgctggcgctgctgaagctgccgtgctactgctgcgcgcccgggtgccgcaacagcgtggcgcacccgcgcgcgcgcccgctcaaggacttccgcacgctgcggacgcactacaggcgcaagcacggcggcgacaagcgcttcgggtgccgccgctgcgccaagcccttcgccgtcaagggagactggcgcacgcacgagaagaactgcggcaagcgctggttctgcgcctgcggctccgacttcaagcacaagcgctccctcaacgaccacgcccgctccttcggcggtggcggccacttctacgtcacgccgccgggccaccagcaggcggccgtgccgccgctgctcaagcccaaggagcggatcgtcatacgcttcgatcaggcagcagcgccatggaatggagcccacgcgcccatatgcatgacagacaggttaacagcaccgcatgtatag

SEQ ID NO: 29209 - DNA, 153 bp, Zea mays
  Peptide Sequence Number=SeqID_70988
atggcatctttagggtatgcgggtcactgtagagactccggcactaaggccttcatgaccgaggttgtctggccccatgagtcaatgaagggcattgtgagtctattgggtgcaccgaaggtgcacctaatggatgtagcccccaagctttga

SEQ ID NO: 29210 - DNA, 984 bp, Zea mays
  Peptide Sequence Number=SeqID_70989
atggttcaaagcaaaagggtctacatgcagcactcgctcgcttccctccgcctcgaatggtcacgccacccagaccctgcagcagcagttaatcgtcacgcccccatccttccccagcaaacacaacacaagcagacggggagagattcagatccactcgtcacacatccgcgttaccccctctcccttggtttcctctcccaccaccaacccccatcccggttatctccgccgccgcccgctttgggaaggcgcgacgaaggcaggcgagaggctccagccggacgaggaggaaagaggagcagcagggccggaggagagatgttcctgtgggactggttctacggggtgctggcctccctcggcctgtggcagaaggaggcgaagatcctcttcctcggcctcgacaacgccggcaagaccacgctgctccacatgctcaaggacgagcggttggtgcagcaccagccgacgcagcacccgacgtcggaggagctcagcatcggcaagatcaagttcaaggccttcgacctcggcggccaccagatcgcgcgccgcgtctggaaggattactacgcaaaggtcgagctcgattcatccgtccttataatacgtgccgtgtggtcagatctatgttcgtcccttgcgcccttgattaaaaacgttgatgctgtagtatacctggtagatgcgtatgataaggagcgatttgctgaatcaaaaaaggagctggacgctctcctgtcagatgattccttggcaaatgttccatttctcatccttggcaacaagattgatatcccgtatgctgcctctgaagaggagctgcggtatcacctaggccttagcaacttcacaaccgggaagggcaaggtcaaccttggcgactccaatgtccggccacttgaggttttcatgtgcagtgttgttcgcaagatgggctacggcgatggtttcaagtgggtctcccaatacatcaagtag

SEQ ID NO: 29211 - DNA, 654 bp, Zea mays
  Peptide Sequence Number=SeqID_70990
ctcatgagagcagtagcagtcatggcaggaatagaggccgagctagagggcgacgttgctggagcttacagaccgagctggggcttcacggcgagctcagagggagcagagaccagggcgaactggcggctaggcggtcgagcgctgggaataggaagcgccgagcagggaggaacaagctttggggagatgggacgagcagaggaagtgccgcgcagaatccgagccagggagaagctgggagccgcggcacggaggagcatggggaggaagatgagcagggatgggcgagctcaggctccaagacgccatgggagggagagcaagccggagggagccgcacacagcagcaggcgcggtaccaagcgcgaccatgggagcgagccaggcgcgcgaccacgcgatgcagggaaccggctgggcgcgcgtgggagagggagcaggggcgcgacggctagagagggtgctcggccatggggagaaccacggctggctgggcggtgggattttatcccccggcggctggggatcttttctccccagagcggcggccggatgaagacgaggaacggcggtgacttgaaaaatatcagagcacgcaagatcgtagatatttttgaaccgaaatttctagtgatagcaaaagagtcgacg

SEQ ID NO: 29212 - DNA, 1209 bp, Zea mays
  Peptide Sequence Number=SeqID_70991
atgaaccatgtgttacgcctcgggaagcacctacgctacgtgctacgcctccatttcccggcatccaacaatgtggctgagtacgaggctctggtcaacggattgcggatcgccatcgagctaggggtccgacgcctcgacgctcgcggtgactcgcagctcgtcatcgaccaagtcatgaagaactcccactgccgcgacccgaagatggaggcctactgcgatgaggttcggcgcctggaagacaagttctacgggctcgagctcaaccatatcgctcggcgctacaacgagactgtggacgagctggctaaaatagcctcggggcgaacaacggttccctcggacgtcttctcccgagatctgcatcaaccctccgtcaagatcgacgacacgcccgagcctgaggccccctcggcccatcccgaggtaccctcggcacagtctgaggcaccctcggctcggcccgaggcaccctcggttcagcccgaggtaccctcggcccccgagggcgagacgctgcacgtcgagggggagcgaagcggggtcacgcctgatcaaaactggcagaccccgtacctgcaatatctccaccgaggagagctaccctccgaccgagccgaagctcggcgggtggcgcggcgcgccaagtcgttcgtcttgctgggagatgagaaggagctctaccaccgcagcccctctggcatcctccaacgatgcatctccatcgccgaaggtcaggaactcttgcgagagatacactcgggggcttgcggccatcacgcagcgcctcgagcccttgtcgggaatgctttccaacaaggcttctactggcccacggcggtggccgacgctactagaattgtccgcacctgcgaagggtgtcagttctacgcaaggcagacccgcatgcccgctcaggctctgcagacgatacccatcacctggccttttgctgtgtggggtctggacctcgttggccccttgcagaaggcacccgggggctacacgcacctgttggtcgccatcgacaaattctccaagtggatcgaggtccgacccctaaacagcatcaggtccgagcaggcggtggcgttcttcaccaacatcatccatcgtttcagggtcccgaactccatcatcaccgacaacggcacccagttcaccggcaaaaaagttcctggacttctgcgggatcaacccatccgg

SEQ ID NO: 29213 - DNA, 557 bp, Zea mays
  Peptide Sequence Number=SeqID_70992
ccccgcgaaagggcccgccgcagccccggctcggccttgcacgcggccatggcggctcgcccgcccgtggtcggcctggccccagccttgcgcgcggcatggcgtggcggcgcagctcgcctgcccccagctcggccgtggcggctggagctcggccacggcgccccaccccgcccgcgcagcgccccgcctgcccgcggctcggcgcggccttgcgcccgccctatccgacgtcgcggcgtggcttgcccgtccgcgaccgcggcccgacccggccaacgcccgacgtcctgcgcagccccgcccggcacgagagcgacctggtcgaggaacccgaagagctcgcaggagaagcccctgagcagcagttggttggtggaggcaagattcggggtgtagctcacttcgccgtcgtgccgtcaatggggctcggtgtatgcggctcgctctgccaaggtggctatgagatcgatggttttggttatgactatggtgctggagaagatgaagctgtggaaggagacttccaggagttccaagactacgacgagttctag

SEQ ID NO: 29214 - DNA, 318 bp, Zea mays
  Peptide Sequence Number=SeqID_70993
atggcaggaatagaggccgagctagagggcgacgttgctggagcgtacagaccgagctggggcttcacggcgagctcagagggagcagagaccagggcgaactggcggctgggcggtcgagcgctgggaataggaagcgccgagcagggaggaagaagctttgaggagaatggacgagcaaaggagtgcccggcaaattcgagcaaggagaagctggagcgcgacacgagaacatggggagaagatgagcagatggcaactcagcttcagaaccgcatgggaaggaagcggccgaagggacgccacagagcaagggcg

SEQ ID NO: 29215 - DNA, 1203 bp, Zea mays
  Peptide Sequence Number=SeqID_70994
atggagctgaacaaggtgctgtacatgtacgctgccaccgtggcgctactgctctgctcctcggcgaacttcatacagagcccctccgacgtgctgggctccgtggcgctccaggatccgacgccctccgcggcgcacgacttcggcgccgtggtctccgatgcgcccgtcgcggtgatgcagcccgggtcccccgccgacatcgcgcggctcctgagcgcgctgtcctccgcggggccggaccgccgcccgaaggcggccgtggcggcgcgtggcgcggggcactcgctgcacgggcaggcccaggcgcgcggcggcattgtggtggagacgcgcgccctgccgcgcctcgtggaggtggtgcggcgcggggacggggacggggacggggacggcggcgcggcgtacgcggacgtgggcgccggcgcgctgtgggtggaggtgctggaggagtgcctgagggccgggctggcgccgcggtcgtggacggactacctgtacctgaccgtgggcgggacgctgtcgaacggcggcatcagcgggcaggcgttcaagcacggcccgcagatcagcaacgtgctgcagctggaggtggtcacaggcacaggggaggtggtgacatgctcgcccacccagagcccggagcttttcttcgccgttcttggtgggctcggccagttcggtatcataaccagggcaaggatcccgctgcaacttgctccgcccaaggtgagatgggtgagggccttctacgacagcttcgagaccttcaccaaggaccaggagctgctggtctcaatgccggagctggtggactacgtggaggggttcgtggtcctgaacgagcagtccctccgcagctcctccgtcgccttccccgcccaggtcgacttcagcccggacttcgcctccggcgccggcagcaacaaggttgtggacctggtctcggggcagctgagctatctgaggccccacgcgtacagcgtgcaggtggcctacctggatttcctcaacagggtgcggatggaggaggagagcctcaggagccggggcctctgggacgtgccgcacccctggctcaacctcttcgtgcccaggcatggcgtcgcgcgcttcaaggacctgctcatggacaccatcacgcagggagacttcgagttcgaggggcccgtcctcgtctaccccctcctcgctaacagctaa

SEQ ID NO: 29216 - DNA, 309 bp, Zea mays
  Peptide Sequence Number=SeqID_70995
atgggcatctgctgctgcatagccgctggctgccggagcgggtgggtggcgtgccttgctttcctcgcctgctgttggatgtctctggagtttggtggaagaggagttgcgaagcttaacagcctctcctctttcgctattgcaacggatcaagctgcaagggccagtacggagcgcgaagcgggtctggtacgcgatggtgggaaacgcatcggccaggcagaacgggttcctctagcagacgtgcgcgacttctggcgcgtgggcatgaacgaccacgacacaggcacatcatccgacgtgggctag

SEQ ID NO: 29217 - DNA, 1206 bp, Zea mays
  Peptide Sequence Number=SeqID_70996
atgcctcaggataacgagggttacattttgtaccctgtcggttatcccgagagcaaaattaagaaaattcattctaggaagtctcactctggccctaaccatgcttttatgtataagggtgagacatctagctctaggcaaccaacccgtgccaagttgcctaagaagaaaactcctagtgcatcaaatgatcatgctatttcattcaaaacttttgatgcatcatatgtgcttactaacaaatccggcaaggtctatgcatccgggggctcaagttggatactcgacagcgggtgcacaaaccacatgacaggggagaagaagatgttctcctcatatgagaaaaaccaagatccccaacgagctatcacattcggggatggaaatcaagattctttagattacaatttgctttctgtatctcaattatgtcaaatgggctacaactgtctatttactgatgaaaaatctcatacccaagagaccttaaagggattcttgagacgggctcaaaatgagttcggcttaaggatcaagaaaattagaagcgacaacgggacggagttcaagaactctcaaattgaaggcttccttgaggaggagggcatcaagcatgagttctcttccccctacaccccacaacaaaatggtgtagtggagaggaagaatcaaactcttttggacatggcgaggaccatgcttgatgagtacaagacaccggatcgattttgggccgaggcggtcaacactgcctgctacgccatcaaccggttatatctacaccgaatcctcaagaagacatcctatgaactcctaaccggtaaaaagccaaatatttcatattttagagtttttggcagcaaatgttttattcttgttaacagaggtagaaaatctaaatttgctcctaaaactgtagaaggctttttactaggatatgactcaaacacaagggcatatagagtctttaacaagtcctcaggacttgttgaagtttcttgtgacgttgtgtttgatgagactaacggctctcaagtagagcaagttgatcttgatgagataggtgaagaacaggctccgtgcatcgcgctaaggaacatgtccattggggatgtgtgtcccaaggaatccgaagagcctccacatgcacaagatcaatcatcctcctccacgcaagcatctccatgcttcaacatgtgtgtttga

SEQ ID NO: 29218 - DNA, 2331 bp, Zea mays
  Peptide Sequence Number=SeqID_70997
atggcgttcgcccacgagcaggcgagaggtgacgccgccggcggtgccaccagcagcgtcgtcgcggacgcgagcgagctcaggcagaggggcagcaagggtcacaagaagcccggcacggtcgcggaggacgacgacaaggagtcggggaggggcgcgggcgcgggcgcgggcgcggcggggggctgcgaggtcacggtcacggactcgatcgagcgggtattcgaggcggagccggtgccgccgtggccgcagcaggtgacgccccgggcgctggtgacgagcctgttcctggccgtcctgttcagcgtcatcgtcatgaagctcagcctcaccacgggcatcatcccctcgctcaacgtctccgcgggcctgctcggcttcttcctcctccgcgtctggacggcggccgtcaaggacccccggaggcccttcacccgccaggagaacaccgtcgtccagacctgcgtcgtttccgcctacggcatcgccttcagcggtacgatacgatacggcgcggccgacagctgctcagctctgctccccgttccaagcttaccactgtctctgtctgtctgtctgctgggcacggggtcaggtggctttgggagctacctgtttggcatgagcgagacgatcgccagccaggcggccgaagaaaacaatgccgggaacgtgaaggagcccaggctggcgtggatgatcggcttcctgttcctcgttagcttcgtgggcctcttcgctctcgtccccctcagaaagactgaaaagtccgaaaaatctaaaactgacaagaaatctgaaactgacaagaaggcactgggctttgcttttcaggtcatgatcatagattacaggctcacgtatccgagcggcaccgctactgctcacctcatcaacggctttcacaccccggatggctctgaacgggccaagagccaagtgctgacgctgatcaagagctccgtggccagcttcttctggggcttcttccagtggttctacacggccggggacggctgcgggttcggccagttccctgcgctgggcctggctgcctatcagaacaggttctacttcgatttctcgacgacttacgtcggcgcaggaatgatctgcccgcacaccgtcaacgtctctgtcctgcttggagggatcctctcgtggggacttctatggcctctgatagcccagaagagagggagctggttcgatgcgaaactcccggacagctcacttgaaggaatgcaaggctatcgggtgttcatcgccattgccatcattctcggagacggcctgtacaagttcgccacggtgctccttcgcaccgtcgcctcgatagcggcgtcaaccgagaagaggaaattcttcggcgcgctccccgtgaacggtgacggcagcaacggcgccgccgctccagcgccaccaccctcgttcgacgacgctcgcaggaccgagttcttcaccaaaggaccagatcccggtgccggtcgccatcggcggctggagtggtaccacgtcctggcggtgtacctgatggcgcccgtgctggccttctgcaacgcctacgggatggggctcacggactggtcgctcgcgtccacgtacggcaagctcgccatcttcgccttcggcgcgtgggccggcaagccccacagcggcgtcctggtgggactcgccacctgcggcatcatgatgaacatcgtgtccaccgccgcggacctcatgcaggacttgaagacggggtacatgacgctggcctcgccgcgctccatgttcgtcagccaggtggtcggcaccgccatgggctgcgtcgtcgggcccagcgtcttctggctcttctaccgcgcgttccccggcgtgggcacgcacaggagcgcgtacccggcgccctacgcgctcatctaccgcaacatggccatcctcggcgtcgacggcttctccaagctccccgacaactgcctcacgctctgctgcgtcttcttcgtcggcgcgatcgccgtcgacatggcgagggacatggctccggagaaggtggccaagtttgtgccgctgcccatggcgatggccatcccgttttacattggcccgtacttcgccatcgacatgttcctggggagcgtggtactcttcgcgtgggaatgggtggacaaggatcaggcaaacttcttcgcgtatgccgtcgcgtccggcttgatctgcggcgacggagtatggtctctgccgcaggcgctgctctctcttttcaacgtcaagccgccgatatgcatgaagttcctatcgaggcatatgaatgacaaagtggatgatttcattgctactttgtcctag

SEQ ID NO: 29219 - DNA, 1277 bp, Zea mays
  Peptide Sequence Number=SeqID_70998
ctacttatgttggtgttggaatgatatgcccatatatcgtaaatgtctctcttcttcttggaggcatcatttcgtggggattaatgtggccacttatcagcacaaagaaaggaagttggtaccccgaatctcttcctgatagcagtctacatggactaaatggttacaaggtgtttataaccatagccgtaattcttggggacggcctgtacaacttcttgaaagtattcggtcacacaataggcgcattaatatcaatgtattggaagaaacatgcaaacagacttcctgtgtctgacaatatgacccctcctgccacagttgaaaccgagtcatttgacgacaagcgtcgcattgagctgttcgttaaggatcagattcccaagacagttgcattgggtggctatgtcgttctggcagctacatcgatcggctgcctccctctcatcatccctcagatcaagtggtaccagatttttgtggcatacatcttcgcacctatactagccttctgcaatgcctatgggtctggcctaacagattggtccctcgccagcacctatggcaagcttgcaatctttgtcatcggtgcatgggcaggggcttcacatggcggagtgcttgttgggttagctgcatgcggtgtcatgatgagcattgtgggaacagcttctgatctgatgcaagacttcaagaccgggtacctgactctagcctcgccaaggtccatgttcatcagccaggtgataggcactgccattggatgtgttactgcaccatgtgtcttctggttgttttacaagtccttcgacattggtgcgagtggtggcgcttatccagcaccttacgccatcatgtaccgtaatatgtcaatcctgggcgtggatggcctgtccttgcttccaaagaactgcctcacgctatgctacatcttctttgctgtttccttcaccatcaatttgatcaaggatcttgtgccaaagaaggttgccaagttcatccccatccccatggcagcagcaattcctttctaccttggaccatactttgctattgatatgttcttgggcagtgtgatactcttcttttgggaatggaagaacaaagctgaagcagactcgttcggaccagctgttgcgtcaggcttgatgtgtggcgatgggctctgggcactgccccaggctgttctttctctagccaatgtgaaacctcctatttgcatgaagtttttgtcgaggtctttgaatgccaaagtggacaccttccttgggaactag

SEQ ID NO: 29220 - DNA, 930 bp, Zea mays
  Peptide Sequence Number=SeqID_70999
atggaatgccgtttttatttcccagtcaaacataaaggtcttgctggtgccacagcagatgtccattgctacgatgtgtcattgaacaagtggagcaggcttaccccacttggcgagcctccttcaccaagagctgcacatgtggcaactgcggttggaaccatggtggttattcagccgttggatcgcgccttaagggccacgaaacatccaacctttctactgcgcccgcgaaaccttctaggaggttcctgtcgtctcccgtgggcgccgtcatgggtcaaggaggcccccgaccccctcttcaacgctgccctccaggagctccggctagacgccccccctaatctgtctcccctcagtgacaccgacgtgcgtggaagcgttgcagcgaactgcaggctatgggacgacctttatgtggctgcgctgttgctgggtggcggcagccgcacaggatgtcgcgcaccgcgacgcagtccgcgaacgtgcgccgcaccccgcgcagcgacgtcgtgtacagcaccaccgcctgcggccggggcgcacgcggctcgtccgcgagctgatgctgctggtgctgccgtcgccacctggacgcggccgccggccggtgccccgggtggtggtgaaatctttcggtttgaagcccggttcagcgaagtttggaaattactactaatccttacaaatttatcaaaggaggtttggtttaattcagctcttttcgttcaagctcgtgcaacaggatgtttgatccttatacaatttgctggcgagtccattctgtggccatattacctgttcagtagagatgatggaagcagcagaatggtcagcaagccgaagttggacttggttgaggacttgagtagtacatactacagagaagctgcagatgctggtgctgttggaatttctgtttactag

SEQ ID NO: 29221 - DNA, 366 bp, Zea mays
  Peptide Sequence Number=SeqID_71000
atgtctggtagcacagcgtgtgtgacccgcatgacgcccctcgatgttgacctagatcaggctgcgcatcagctccccgcccacctcgtggaagtagcgcgcgtacggacaagacaacgcatcgtgggcctagatggagtcttgagcgcctcgacgtcggccacgagcccctcaagatccttggcgaagtcgcaggcatcaaggaggaggcgaagggcaaagttgagggagggtaccaaggggggtctgtcgcggcggggcagggggtggggacgtagtggcaacacgtgggggcaggcgcaggtgtgggccgaagtggaggaagaggatgatagtgggcatttagcacgggcgcggaggagatga

SEQ ID NO: 29222 - DNA, 3096 bp, Zea mays
  Peptide Sequence Number=SeqID_71001
atggaggaacctctgttggaccatgaatcttcttccttatctgaagcaacaggtcgtagatcacttttctcagatgctggattgtttagtaatatcaccttttcttggatgggtcctttacttgatcttggcaagaggaaaacactagaccttcatgatgtgccattcttggatgacagtgacagtgtccacggaatcacccctaagtttaaatcaaagattgcctcgatttctgccacagggcaatacactgatgttacaacagttaagttagtcaaatctcttgtgctcacaacatggaagctaatcattatcactgcagtttatgccctaatccgtaccgttacttcatatgttggtccctatctcatcgagcacttcgttgactacttaaatcaaagcacacgatccactaaaagaggataccttttggtgttggcatttgttgctgcacagctgatggaaggtctctcatcaaggcatttgctctttagatctcaacaattaggcttgcgcgtgcattctgctcttattgcaattatttaccaaaagggtcttgccctctccagccaatccaagcaaggtagttcaagcggggagctgatcaatgttgtgaacattgatgctgagcgagtaggagatttcaattggtctctgcatgaactttggctgctcccagtgcaaattagtctcgcaatgattatcttatactctactcttggcttggcatcattcgctgcccttgctgcctgtgttttgacaatgttggctaacatacctttggggcggattgagcaaaattaccaggagaaaactatgaatgccaaggatgctagaatgagtgctatgtctgagatattacagaacatgcatattctcaagcttcatggttgggaattggttttcttgtcaaagattaaagagataaggaaggttgagatgaactgggtaaagaaatatgtctacacctcatcaatgcttatatctgtatttttttgtgcccctgcatttgttgctatgatcacttttggaacttgtataattatcggcatcccattagaaacagggaaagtattatctgctctagcaacatttaggcagttgcaaggtccgattcacagtctgccagacgcgatctcatcaatcattcagacaaaagtatcacttgacaggatatgttcatttctctgccttgaggaattagcaagtgatgcagtaactaagcttccgagtggtagcaccgatatatccattaaggtgagaaatggtagcttctcctggcaaaaattctctcaggtgcctactctccaagatctggacttgtgtgtgcaacaaggaactagagttgctatctgtggaactgttggatcgggagaaagaggaatcaacttaagtggtggacaaaaacagaggatacagattgcccgtgctttgtatcaagatgctgatatcttcctatttgatgatccatttagtgcagttgatgctcgcactggactgcacttgttcaaggagtgcttgctagaatttttagcttcaaaaactgttatatatgttacccatcatgttgaatttttaccttcagctgatcttatcctggtcatgagagatggaaaaataacacagtcaggggattacactgaaattctgaaatctggagaagatctcttggaattagttgcatcccataaagatgccttatcaactttagacatgctggagcgccctattgaaaattttgagagtacatatcatcctggtggcaatgaaagtaacctgtttatagcgggggataagaaagaccagaacgaggaaggagatattcaaaatggtcagctagtacaagaagaagagagggagaaaggccgggttggatttattgtctactggaagtatattatgatggcatataatggagcacttgtgccacttattttgctagctcagataattttccaagttcttcaaattggatgcaatttctggatggcttgggcagcaccaatatctgaaaatgtgaatcctccaatcagtagtttgcagatggtaaatgtgtactttgcattagcaattgttagctcattgtgcatattcattcgatcacatcttcttgtcatgaccggatgtaagactgctaatattctatttgagaacatgcacaactgcattttccgagcaccaatgtctttctttgactccacacctagtgggcgaatcttgaacagagcttccacagatcaaagcacagtggatacaagaatttttgacctgatgggctatcttctatttcctgctattgagattctaggaacagttattctgatgtcacatgttgcatggcaagtcttcatagtttttgtccccattattactgcatcgctgtggtatcaggttcgatatgcaccgcagctgccttttgttttaaaaggcctgacgtgcaccttactcggaggaaagaagacaggtattgttggtagaacaggtggtggcaaatcaaccttgattcaggcactatttcgcattgtggacccatgtattggccaagtgtttatagatggcactgacatctgcaccattggactacatgacctccggacaagattgagcatcattccacaagatcctgttatgtttgaggggaccttgcgaaccaatattgacccccttggggagtacagtgacgagaaaatctgggaggcattggattcatgtcatcttggggatgaagttagaaagaacgagcttaagcttgactctacagtgacagaaaagggcaaaaactggagcacaggtcagcgtcaacttgtgtgtctgggaagggtgattctgaaacggaggaagatcttggttttggatgaggcaacttcatccgtggatccaattacagacagcttgattcaaaaaaccttaaaacaacaatttctcaaatgcacaatgattacaatagctcaccgtatcacatcagttcttgatagcgacaaagtcttgcttctggataatggtgaaattgcagagcatgacgccccagcaaaactgctagaggacagttcatcccttattctccaaactgtatctgagtataaccatgggatctga

SEQ ID NO: 29223 - DNA, 702 bp, Zea mays
  Peptide Sequence Number=SeqID_71002
atgtctttctttgactccacacctagtggacgaatcttgaacagagcttccacagatcaaagcacagtggatacaagaatttttgacctgatgggctaccttctatttcctgctattgagattctaggaacagttattctgatgtcacatgttgcatcgcaagtcttcatagtttttgtccccattattactgcatcgctgtggtatcaggttcgatatgcaccgcagctgccttttgttctaaaaggcctgacgtgcaccttactcggaggaaagaagacaggtattgttggtagaacaggtggtggcaaatcaaccttgattcaggcactatttcgcattgtggacccatgtattggccaagtgtttatagatggcactgacatctgcaccattggactacatgacctccggacaagattgagcatcattccacaagatcctgttatgtttgaggggaccctgcgaaccaatattgacccccttggggagtacagtgacgagaaaatctgggaggcattggattcatgtcatcttggggatgaagttagaaagaacgagcttaagcttgactctacaggtgaaattgcagagcatgacgccccagcaaaactgctagaggacagttcatccctattctccaaacttgtatctgagtataccatgggatctgataagtggcgaatgcaagaaagcagctaa

SEQ ID NO: 29224 - DNA, 1752 bp, Zea mays
  Peptide Sequence Number=SeqID_71003
atgtcgacgtcctcagctggtactttgataacggcggcggaagtctcactggcttgcaagatcattggtttcttcaatgactgggctcttcggttggcgactcttgccagcttggcctgcaccctagtcctcatgctcttggccgacacccgccggcacaacaagtaccccttgcttgtgttgttagtttgggcggcgtaccaggtgcagccacaggtcgggggctacgccctcacccacctcaccatcagcagcgcaacaacaacaacaaccacgacgacctcatcagcgcgcgagcagcagctagtggcgttctgggcgccactcctcctgctccatctggcaggaccggacaacatcgtcgccttcaccctggaggacggcaagctctcctggcgcaagctcctcgacgccatatggaaaataatacaggccctgtatgtcatgctcaagtacatatacctttgcgacagcggggtcctgcgctccgcgtcctccatcatggtcaccctcggtgtagccaggtactccgagagcgtggtcgcccttttgcgaggcaacatggacaacctatggggctccgcctccgccggcgacgacgagcgcaagccgccgcaaagcaccggcgagtacggggctgctgccgccgccgataaaaatgaaaaagaactgaccaccctgctctattcccacactcagttcctggcttgtggccgccgtgccatggccgattcctccgtcgacacggattcgcccaactatgccatcgcccggaacatcttctcccagcaggacccagatggtgtacgcaaggtggccgggatggagtcctccctcatgtacgacgtcctctacaccaaggtcaccgtggtgcacacctggggaggctacctcctccgtctcgtctcgccggtcggcacggcgacggcttcctccttgttctggctctaccccaaggacagcgaggagactcctgacgtcgtcatcacctacatcttgctggcggctgccttcttcctggacgtggtatggctagtgagggccctaggctccacctgggcatactcgttcctgaatgctagggcaaacatgtggcttcaccataaactgctgtgcagcggatgctggctcaggctccgccgcatccttgtcgggctagatctgttgtggctattagggattcggaaggatccgagcagccgcaggatgtggtctggaagagttgggaggtacgacttgctggctgagtgcacccggcgtccatccatggtggagcgcctgtgcacctggctggccagcaacctcagattggaggacatctggaaggaataccagcactcgagagcccagaaggtgctgttcgagcggattcagcagagactgtccggcagtgctgaccgccgctactccatggaggacatcaccacactctggggccaggaggcggtcaagagaagaagaaagcgggacaagctcaaaggcatcaagctgggtattttcggccgtgagttccaagaggacgtcctcttgtggcacatcggcaccaccatcttcctcgcccgcagcgatcgacagctgctcaaggacaaggccaacaagtatctgggagcagtcgaggcgctgtcggactacctcatgtttctgcttgctgtacgcccgagcatgctgccgggactagagctccggaagctgttcgaggtcacctgcaaagctttgaaggactcagggtcagtgctctcgaaaggctggtga

SEQ ID NO: 29225 - DNA, 522 bp, Zea mays
  Peptide Sequence Number=SeqID_71004
atggtgcggcaccacggccaattcttgcgacggcgacaaaatttcgcgcaccccggacgagttctttgcccgccattggctcctacaccatcaacgggcgcgggcaaaccagatgatggcctccaattgcagacgctggcaaggttctatggtggcggcggcactcacaactctctctccgctgaggcgctcggatttcgggtccgttgctggcacaggctaggggaggggcgagggcccaagatttataggcctggcctatgccagcgcgaggaaaatggagggggggagtccgagcccacggcgagtctgggtccggagatcccgcgagttttagttcggttctgttatggcgacttcgacatcggggcattgcgcggagttcggtcacggggcgcgcgagcttggggagaagacggcctgccagtggaccccgtccgtcggtgtccagcagtcagcggcgcggcgcggtggagagatgggcttgcgcgggtgaaaacagggggtagatgggccgagtaa

SEQ ID NO: 29226 - DNA, 135 bp, Zea mays
  Peptide Sequence Number=SeqID_71005
atggcctccttctctgtttcactgctcgtcaccatcatgttgctgttgctgctaccatcgggtaaagacttaagtaatgtgctgcagtggaatgccatcatcccttgccctacagactgcaatgctcttctctga

SEQ ID NO: 29227 - DNA, 269 bp, Zea mays
  Peptide Sequence Number=SeqID_71006
atgagggagaggatggaggcgtcgctttccaaatcgccggagagtcgccaggagcggaggagccgaggagtcgcggagcattcgagagatagtgagagatacagatccatccaagggaagggaacgaaccgagggttgtcctgggtcactggtgacgaggcaaagctcaccgaggcaacagacatggcgagggctcgacgacgaccgcagaacaagcacgggaccacgacagacagtgacgatgtcttcgctggtgcgcgcgacgtgag

SEQ ID NO: 29228 - DNA, 288 bp, Zea mays
  Peptide Sequence Number=SeqID_71007
atggaccgagatctagtcctcactggcgccaaggccatgcgtagtcgtggcccaaggaccattacggggtcgcacccgtccgcagcctccgtgcgccgatgtcgaccctcatggagccgtgcgacaccaaggctggccatgctgagtcgtgcggtcacgttcctaggtaggccgtatcaagacccctggagctacgttggcagcgtcgtcgctgtcactccaaggcgcggcctcgtgctggatcttggatcccatggcaacgagcagggcggagagctgggagagtga

SEQ ID NO: 29229 - DNA, 1044 bp, Zea mays
  Peptide Sequence Number=SeqID_71008
atggagcggcgcggccattgccacggcggcaagcccccgcacccgcacccgccgccgcgccgggtgcgcacccggcagccgtccagcggctccttctcggcgtcgctcctggacgccatctaccgctccctcgacgacggcgacggcgccgacgtcgtcgttgacgccgcgcgtgggagtgtagaggagaaggcggccgcgaccgcgacggcgcagttctggtggttgaacaaggcggcggcgcccaagccctgcaggcaatcgtcgtcgaccgcggacagggacaggcgccggcgggaggcgggagttgcgcgcccgcgccactcggggtcggggtacgcgtcgtcgaccgcgtcgtcgtccgactcatcggctgctagctacagcagcctctcctgctcgtcggcgtcgaccgtaggtatcgagtctacgtgccgccgccacggcctgcccccgccgcgggtgtcattgtcagaggaatccgtcgccacggacgcggaggagacgaccccgccgccacccaacagcaaaccaaagaagaaagccaggccatgtttccccgtggcaagaatccgaccaagggcctcagtgccaccaccatcgtccgggccacagccgccgtcgtcgccggcgacgttcgcgtgcgcactcaaggctctgttctcctcggcgcgcctccagaggaagcccaaggctccggcaccagcaagaacgacccctccgcccaaaatctcgcatcctccgcgcatgtcgaccacgagcgctgcgaaggctgctgatgcgccgcagccgtcggagccgacgacggtacggctccaccctgaagccgaggcgtcggtggtgcgacgaagggtggaggagctggtgcggggcctcgaggagctggaggaggacgaggagaggagcgacgccagttccgacctcttcgagctggagagccttcgtggcgccggcgccgacgagctgcccgtgtacggcaccaccagcctcgtggccaaccgcgctatcgcgcaggggccaggcggccagctcgttaataagtaa

SEQ ID NO: 29230 - DNA, 759 bp, Zea mays
  Peptide Sequence Number=SeqID_71009
atgcctttcagcagcatgatccaggagatgaagggcaagatcggcgccatctcgttgcgcggcgtgctacggttccggccggggggccacgccggggccgggcgagcgccggcagccgagccggacgaggcgtcgcgggagggctgctgggcgcagttgcctttcgagcttctacgtatggtgctggtcagggtcgaggaccaggagccacggtggccggcccgcagcgccatcgtggtgtgcgcctgcgtctgccgctgctggagggccgccgtcaagattgtgcgcgtgccggaggcttctgggaaactcaccttccccatctctcaagcagggttagctgatgatgggaaatttctacttgctgcacgcaaatgtcgtaggcccgcatgcactgaatacctaatctcgcttgatgcgaagaacacatcggctggttcctacattggcaagctaagatcaaacttcttgagaaaaaagtttaccgtctatgatgctcatccaccttgtgccagagctgcggtttcaaagggttatattccaggacctgccggagaggatcaagctgctgcaggaagagatcgggcagtagcaggaggaggcgccgggcatgctcagcgttttccgggacctcaaccccgacgagatggtggccaggaacaccccaagtccgacgtggtgcggaaggagggcggcgacacccgggtggagatctactgtgccgcgtgcacttcaacggtgatggctcgtgggatgtga

SEQ ID NO: 29231 - DNA, 1710 bp, Zea mays
  Peptide Sequence Number=SeqID_71010
atggcggatgtgtgcagactacactggtctgaacaaagcatgtccgaagggtatcaccaaatcaggatgaaagagtccgaccagttcgcgacttctttcatcacacccttcggcatgtactgctatgtcaccatgccgttcggcttgaggaatgcgggcgcgacgtaccagcggtgcatgaaccatgtgttcggcgaacacattggccgcacggtcgaggcctacgtcgatgacatcgtagtcaagacgaggaaagcctccgacctcctttctgaccttgaagtgacattccgatgtctcaaggcaaaaggcgtgaagctcaatcccgaaaagtgtgtcttcggggtaccccgagggatgctcttggggttcatcgtctccgagcggggcatcgaagccaacccagagaagatcgcagccatcgtcagcatggagcccatcaaggacttgaaaggcgtgcagagggtcatgggatgtctcgcggctctgagccgcttcatctcacgcctcggcgaaagaggtctacctctgtaccgcctcttaaggaaggccgagtgcttcacttggacccctgaggccgaggaagccctcaggaacctgaaggcgctcctcacgaatgcgcctatcttggtgcccccagctgccggagaagccctcttgatctacgtcaccgcgaccactcaggtggttagcgccgcgattgtggtcgagaggcaagaagaggggcatgcattgcctgttccaaggccagtctacttcgtcagcgaggtactgtccgaaaccaagatccgctacccacaagttcagaagctgctgtacgcggtgatcctgacgcggcggaagctgcgacactacttcgaatctcatccggtcctagcggacttcgtggctgaatgggtcgacacccagctcccaacacctccgatccaaccggagctctggaccatgttcttcgacgggtcgctgatgaagataggagccggcacaggcctactcttcatctcgcccctcgggaagcacctatgctacgtgctacgcctccatttcctggcatccaacaatgtggctgagtacgaggctctggtcaacgggttgcagatcgccatcgagctaggggtccgacgcctcgacgctcgcggtgactcgcagctcatcatggaccaagtcatgaagaactcccactgtcgcgacccgaagatggaggcctactgcgatgaggttcggcgcctggaagacaagttctacgggctcgagctcaaccacatcgctcggcgctacaacgagactgcggacgagctggctaaaatagcctcggggcgaacaacggttcccccggacgtcttctcccgagatctgcatcaaccctccgtcaagatcgacgacacgcccgagcctgaggcaccctcggcccagcccgaggtaccctcagctcagttcgaggcaccctcggctcggcccgaggcaccctcggttcagcccgagaaggcacccgggggctacacgcacctgttggtcgccatcgacaaattctccaagtggatcgaggtccgacccctaaacagcatcaggtccgagcaggcagtggcgttcttcaccaacatcatccatcgtttcggggtctcgaacttcatcatcaccgacaacggcacccagttcaccggcagaaagttcctagacttctgcgaggatcaccacatccgggtggactag

SEQ ID NO: 29232 - DNA, 330 bp, Zea mays
  Peptide Sequence Number=SeqID_71011
atggctctggctttgatggtgcgaactatccagaccacccgtgtgaacaccaactatatccctctgccacgccaggctcctgtcgacccagtggtagaagaggaagtccctatggatctccatcaccttcttgtggagaatggagtgattctagaggacaactcagaggagattctagtgacacccaccctattgttagaatcgctagcctttgcagttggagcgtcatcttcagcaccgcaagcaccagcagcccaagcccctgctcctgcaggcgacgatccagatgattctggtgatggtggagatgatgaagatgaagaggaataa

SEQ ID NO: 29233 - DNA, 126 bp, Zea mays
  Peptide Sequence Number=SeqID_71012
atggaggtgggcgccaacggtgtcacgctcatacccatcgccaacccacccgtcaacgcgctccaccacattatttcattcttcagggtcaccatagaggtgggccaccatagaggtgggcgctga

SEQ ID NO: 29234 - DNA, 177 bp, Zea mays
  Peptide Sequence Number=SeqID_71013
atgtcagtgggcgcgctagcccgtggcgctaaggggtgcaagcgaggagcttcaaggattttcgtcgtgcagcccagctgcattccctcaccaatgggcagtttggtggggagaagcaagctgggctgcggcctctgccccgccctcagcttcaaggattttcgtcgtccgggctga

SEQ ID NO: 29235 - DNA, 240 bp, Zea mays
  Peptide Sequence Number=SeqID_71014
atggagcttgtgggtggaattgacgaccgtgtgaccattaattgctcgccagaggttctttctccatcgtggacccacctctaccggggcggggacccctatgctactaactctctggtgcataaaggttcaacacaaaccaataaaaagattaaagaaagggttcaaaaagaaaggagtaaagaaacccaagtgtgccctggtctggcgcaccggattgtccgatgtgccagtggatag

SEQ ID NO: 29236 - DNA, 315 bp, Zea mays
  Peptide Sequence Number=SeqID_71015
atggagaagcacgatatccactctccgatcaagacgatggtggtcgtggtgatggagaaccgcagcttcgaccacgtcctcggtcggctacgtcgacttcgaccccggccacagtttcgaggatgccaatgggtagatcttcggttcctagcgacgtacaccggtttggccattggcgcgttgtccgagcttccttaccgacgaccagccgtcgtgtctgacgacctgctcgccgagcccgtgactccggtgcaggcggggttggccggtaatggcactgccgccctgggcttttctctcactctgcttgcccag

SEQ ID NO: 29237 - DNA, 1072 bp, Zea mays
  Peptide Sequence Number=SeqID_71016
ggacaaggtacgagactacagagacgagtgtgagaggttggatcagtgcagtcgcctttatgactcctcaatctcaaatgtaaattttgagcttgatgcaagtcggattgttcaggaacttggagggaccaccactgtaatggagagagagaaggcttccattcaagagttgatgaatgttgtcaatgaaatgatgtggaacacggaatttgctattaggtcgtatctgatgttgaggccaagattcacccgtacaggtgctggagttgcaaatggtggttcttcaaatccttctgctggtgctccacccaatcagccagtgttagatttctacagtggagtcccaaagcgcccttccatttttatgcagcacactgtcaataggtttgagtgctatcttgcggagtgttgcaagtggattggggagctagagcagctggttcaaattgagacaaataaaatatcatcagattctctagattctcttccaaaagttatgtcaaatgtgcatgattacttcatctatgttgcttctaaggtggaaaatcttcatcaatatgttgaatcaatgaaagctgaatatcttaatgaacaacgccgcaacggcaatgggagcaatccatttctagaggcaaacagacgagaggcagctaaacaagaagcagctgccagaagggtccatccaacactgcatttgcctgcccctgcgcagcccatgccacaaatcgctgcaccagctacaagccaaccgcagcaaccttcctttccgtctgctgcgacttcctcaagtgccttttcaacttttagcacaccggcttctgctccatcctcatctagtctgtttgcaactccaacaactccagctccatcagccaacctttttggtgcatctgggtcggctcagttgaccacaccatttgggacagcctccactccaacattggcatcaacacctgctcctggatttgggactagcactacatctttgggtggaacatctctattttctacaccatttggaggtggggctacagcttcaggttccagctttggtggtgcatcgaaattgtaa

SEQ ID NO: 29238 - DNA, 642 bp, Zea mays
  Peptide Sequence Number=SeqID_71017
atgagcaggagcaactggctgtcgaggtgggtcagctcctgctccgatgacgccaagacggcgtttgcggctgtgaccgtgccacttctctacgggtcgtccctggccgagccgaagtccatcccgtccaagtccatgtacccgaccttcgatgtcggtgatcggatacttgctgagaaggtctcatacatattccgggatccagaaatttcggacatcgtgatcttccgggctcccccaggacttcaggtttatggctacagctcaggtgatgtgttcatcaagagagttgtggccaagggaggagactatgttgaagtgcgtgatggcaagctgtttgttaatggagtagttcaggatgaggattttgtgctggagccacacaactacgagatggaaccagtggttagagacgttagacatattttcgttggaattcttgcttttgttagccttgtgccggaaggttatgtgttcgtgttgggagacaaccgcaacaacagctttgattcccacaactggggtccacttccagtgaggaacattgtcgggagatctatcctccggtattggccaccatcgaagatcaatgatacaatttatgagcctgatgtgtcccgcctcacggtgccgtcctcgtag

SEQ ID NO: 29239 - DNA, 279 bp, Zea mays
  Peptide Sequence Number=SeqID_71018
atgcggacctcgccgcaactctctcctactccattgaatctcgagcgctgtcgccgtggggcttgggtaagtgctgccgccgtcgtgctccaggctgtggggtgctcggcgttctcggggaaggcgctcagagcatcaccgatataccatggaaggacgttcaagactcactacgcctggggcgttcttccgtcgtcggaattcttcatcggtgcaggttttgtgccgtcgtccgccccgcaccgtgggcatgggtgccgctacactaagcactggtaa

SEQ ID NO: 29240 - DNA, 1554 bp, Zea mays
  Peptide Sequence Number=SeqID_71019
atggagccgtacgcggcgacgaagggcggcgagtccgacgccggcaccggcctggaaggtacgcgtgccgcccggcccgacctccttcgcgcaattggggtctcgccgcttccgtgggggtttcgccgcttcgcttttgcccgctcactcgctagggttttagatctcccatgcgactgcttggtccccgcgcttgctaaccgtagttttggcgtggatgctttcgcagagtcgatgcggaagctggggctcggcgaggacgacgaagcgggggaggagaagcttccggagcggccgggcgaggcggactgcacctactacctccgcactggcgcctgcggctacggggagcgctgccgctacaaccacccccgggatcggccggctccggttaatggcgttgggaagaccacaggtatggagtacccagagcgccctggacagccactctgtgagtactatgcaaagaatggcacatgcaaatttggttccaattgcaagtttgatcatcccagggaaagtggttttgtacctgtcgctttaaacaacagtggattccctctacgtctgggtgaaaaggaatgttcgtattacatgaaaactggacattgcaaatttggaggtacatgtaaattccatcacccagaacttggttttcttacagagacgcctggcatgtacccaccagttcaaccatcacctatttcctccccacatccatatccacatcattccaactggcaaatggggaggcctgctgttgtgccagggtcatttttaccaggcccatatccaccaatgatgcttccacctacagttatgccaatgcagggatggaacccttatgtttcacctatgaaccaaactacaccagctgggggccagcaagctgttccagcagggccatcttatggcttgtcgcaccaggagccaacctctgcagtgacttatggcagtcattatgcgcaattgtattcttcttctgggacttcaagcagcaacatacaagaatatgtgtttccagagcggcctgggcagcctgaatgtgaacattacatgaagacaggaacctgtaaatatggagcagcctgcaaatatcatcatcctcaatacttcagtggaccaaagtctaactgtatactgagccctctgggtcttcccctgcgtcctcatgatagaattgtagccccagttcctttggaaatgggttctcagcgatgtgcttactacgcacaccatggcttttgcaagtttgggccgacatgcaagtttgatcacccgatgggtactccaaactacagtcttccagcaccatcacttactgatgtgccagtcgctccatatcctcacactttctctgttactcctattgctccatatctgctgccccctgatccgcggccgcaatacactctagccaaggatccctctgcttatccaccacaagcgcccggaactacgtacggacctgttggggcgatatcaaaggtttatgcccgccacacgcttatccgatccccgacttctggagctgctggcatgcaagcgtcgtaa

SEQ ID NO: 29241 - DNA, 375 bp, Zea mays
  Peptide Sequence Number=SeqID_71020
atggggcaggaagaagaacaacttgttgtaaatgagtttggctcgaatgcagctggacatgggcgcacagaatctgccataggggccattactccaccagcgacattgaggacgccgggggttattgaccagatcaacgtagatgcatcgaggatggcaatacatcaagaagaagagcagttgaatactatgagaactattggtaagcatgaacaggacacaccaatggttctgcaaagctatgttcttgcatgtggtctcgcgacagaagctcggtggaatattggccctattttggcacagcttattttcagctttctttataaatttaagcagaagttatgtcaacaagcaggcttcctgcagcaagcttaa

SEQ ID NO: 29242 - DNA, 582 bp, Zea mays
  Peptide Sequence Number=SeqID_71021
atggtgccgacggcggatcttttcctccccctcgccaatcccacgttgctcggtgtcggtggggcaaaggagaagaaagggagggggttggccgagttacataggatgcggaggtgcgaagggggtagtgccgagttggtcttcgcgaggtggttaagctggccggttctcgggcgcacggcaatggcagcatggccgcggcggctgctacgacgcaagcgcgaggtcacaggggtggctttatccccggcggagaccagctccgagtctgtcgccccgcattgcgcgcttctggttacaacgacctcgccgcgagaaaggaggatgaccctgacaacctggggccagccgtcagtgcctggtgggatgacgcggagcgcaccatgtagctgtcgcgtggtcccgcgaaacattggaggaaattccaaggagcgaaagtcgaaggatgttgagcgcagggcctttggcaaacgcttacaacgtagtacgtcgggcgtgcttgatatggccatggagtggaccactgccgaggccaaggccggcaacacaactgacgttggcggctttcctgcctgtaaataa

SEQ ID NO: 29243 - DNA, 273 bp, Zea mays
  Peptide Sequence Number=SeqID_71022
atgtatgactgttattgtaatacagatgacattgaggctgatgtttatgttcctgaagccgatatcctgtcagtcttagatgtgcctcctgggaaaatgggacgagttattggcagaaaggggtcaacgataatggctgtgaaagaatgttgcaaggttgaaatacatattggtggtgctaaggggcctccagacagggtgttcatcattggaccagagaaggaggtcaggaaagctgaggccatctttcgaggccgaatgctggagttctag

SEQ ID NO: 29244 - DNA, 168 bp, Zea mays
  Peptide Sequence Number=SeqID_71023
atgaccccctacctctggccgcactatcccacctccccaaccacccggaactggaaccacggcggagaaccgccgcggaacctcgtcggcggagaagagggatccgatcctccggaaattgtagctccggaagtagggcaggagcccgacctctcctttgcattgtga

SEQ ID NO: 29245 - DNA, 333 bp, Zea mays
  Peptide Sequence Number=SeqID_71024
atggggaatgcatgggagctatccacgaggttaccaaattgggagcttggcactttgagagatccaacatggactttgggtaaacttgagtgtcccgatacatctacgaaaatcgttgttgatgggagtttgcattctatatcgcatttgaacttttgtattactttggttgtgtgctttacatttctagcatatcttgctaggttacataattgtttgatgatgtttggtgggaattgggagttcaatgatcacccggaaagcttatgggtgacacaactcaaggtgtacatggccagaaagacaaagaaccatcttataaagagcagttag

SEQ ID NO: 29246 - DNA, 366 bp, Zea mays
  Peptide Sequence Number=SeqID_71025
atggcattagtgatggacaccattgttgataaggagatgataaatgtgattcttcaacgggatcggtgcatccacgagaggagatcgaaggagactccaattccagtcgcccccatccgttcctcatctcaccagaagcgaagccggaggagggaggaaggagatcgcgagcagccggagccggaggccgagaggatgaagacgttcgacccgtggccggtcttcttccgccgggagtggaagcgcaactggccctttctcacggggttcgccatcaccggcttcatcatcaccaagatgacggccaacttcaccgaggaagacctcaagaactccaagttcgtccaggaacacaagaagcgctga

SEQ ID NO: 29247 - DNA, 480 bp, Zea mays
  Peptide Sequence Number=SeqID_71026
atggaggctacagcggaggcgctcacgcaggaggaggtccttcgccggtgtcggcgtcgcgcggcccggctagctggtgtgtactgccgaatctactgggccatggccaaggaggtgcgcgcgcggcaccggcagtacgtctggcatctcgcccggagcccactggaggcagagcagccgtcggcgcctctggaggtctcgtcccggcggcggtcggggagccaccaaagccggcactggtgtcaaggagccccagatctgggcgtgcgggcggagggcgggatgaagtcgtcgctgaggagccggcaggagccgcggcgggtcagcaacggcgtaatcatcggcgccatgctgctgtccctctgcgtcctcagtttcgtcaaggccagatactgcgccacccccctcggcaaggccgaggaccagctcgaggagcagatgaacgccagcatccggatgcagccggaggagtcgtcgtag

SEQ ID NO: 29248 - DNA, 831 bp, Zea mays
  Peptide Sequence Number=SeqID_71027
atgtaccacgactacactgacgtactggtgccgctgttcatcaccacgcaccagtttcgggagcgggtgagcgggatgaagccgtgctcaccccggcacgacgtgatcgacgtcgacaacgaccgagaggtgcactgcttcccaaggatcgtggttggcgccaccttccacagggacatgggcgtggacccgcggcgctcgccgggccacatctccgtggtggacttgaagcgcgccctgcgcgccgccttcaggctgaagcgcgaggcggcatcccgcggcggcgtcccgcagcggcgccacggggcacggcaaaccgcggctgctcatcatctcccggtgtggctcacgctggttcctgaacgagcgggagatggcgcgcggcgcgggcgacgccgggttcgaggtgcgggtggcggagcccgaccagccacggacatggcgacgttcgtggcgctggtgaactcggcagactccatggtgggtgtgcacggcgccgggctgaccaacatggtgttcctgccctgcggcgtcgtgctggtccaagtggtgccgtttggcgggctggagtggctaacgggcgtcacgttcaaggagcccgcatcggacatggaggtgagctacatggactacaacgtgcgactggaggagagctcgctggtggaccagtacccgaggggccaccaggtgctcaccgacccctatgccgtgcacaggcagggctgggacgcgctcaagacggcgtatctggacaagcagaacatccagatggacctggacaggttcagggccacgctgcgggaggccatggtccggttgccgtctccatga

SEQ ID NO: 29249 - DNA, 1314 bp, Zea mays
  Peptide Sequence Number=SeqID_71028
atgggaacaatgaaggaatctatggagaaggctgtgaagaacaaagtggctaaagcagttgtacctgctattgatgtgatgtttcaagcactcaggtatgttcctggctggttcttctttggctcactgatttgcgaatttggaactaaggtagtgccacccaaaaagattctgaagatgcttccggagctgtttgaccatccagaccagaatgtccgggcttcttctaagggtttgacactagagctttgtcggtggattggcaaagaccctgtaaagtctattttgttcgagaagatgagggatactatgaaaaaggagctggaagcagagttggcaaacgtgtctggatttgctaagccaactcgaaaaataagatctgaacaagagaaggaacttgaggaggaggctgtgccagagacaagtggggctaacacttctgaagaggctgtggcagatgcccctgtggagatcgatgaatacgaccttgttgatcctgtagacattttaaccccactagaaaagtctggattttgggacggtgtgaaagcaactaaatggtcagagagaagggatgctgtggcagagctaaccaagcttgcgtcagcaaaaaaaattgctcctggtgattttcatgaaatttgccggacactaaagaagctcatcacagatgttaatttggctgtttcggtggaagctactcaggcaatagggaatttagctagaggtttaagagcccatttttctggaaatgcccgaatgctcctttcggttttacttgaaaaattgaaagaaaaaaagccgacaatgacagaagcactatctcaaacacttcaagcgatgcacaagtctggctgttttacacttattgatgtgattgaagatgttcgagtggctgtaaaaaacaaggtgccccttgttcgttcctcaacgctgacctgggttgcattttgcattgaaacaagcaataaagcgactgtactaaagttgcacaaggaatatgttcctatctgcatggagtgcttgaatgatggtactccagaagtacgagatgcttctttttctgttttaactgccatagccaagatggttggtatgaaaccattggaacgatccctggagaaattagatgatgtgaggaaaaagaagttgtcagatatgataggttcttccagtgacactgttctgagttcagggacagtattatatgaagatgtttgcaacctgtcagccttcttctcccaagtgcctatttacagttcttatgctgcgttgttttttttgaaattaccatttgtgattgtgttttgttag

SEQ ID NO: 29250 - DNA, 480 bp, Zea mays
  Peptide Sequence Number=SeqID_71029
ccggccatgtcgacggaggacgagaagctcctcaaggaggcgaagaagttgccgtgggacgagcggctgcagcataagaactggaaggtgaggaatgacgcaaacatcgacctcgccgccctatgcgactccatcaccgaccctaaggacgcccgcctccgcgagttcgattccaatgcgccggtacaggagaaggcgctcgacgcccttctcgcgttccagcgagctgctgacgccgatgcatcaagatacgcgaaggaggtttgtgatgcaattgtggccaagtgcctcactggccgaccaaagactgtcgagaaagctcaagctgcattcctcctatgggtggaactggaggcagcagaggtcttccttagttctgaactggagctgtggaacaggcgagcaggcagaggggcacatgtgactagagcaggcgagcagctgccggtgttcgggagttcaggcataggggatcactag

SEQ ID NO: 29251 - DNA, 924 bp, Zea mays
  Peptide Sequence Number=SeqID_71030
atgcagagagccaaggtaaaaccagatgctgtcgtgattgccagtgtactttctgcttgcgcacacttgggtgcacttgatcttggtaagtggattcatgactatgtgaggagaaacaatatcaaagctgataccattatggaaaactctctgattgacatgtttgcaaagtgcgggtgcgtgcaggaggcactacaagtgttcacggatatggaggagaaggacaccttgtcgtggaactcaatcatactaggactagcaaacaatgggtttgaggatgaggcgctggacatttttcacagtatgcttactgaaggtcccagacccaatgaggttactttccttggtgtgctgatcgcttgtgccaacaggcaactagttgaggaagggcttgaccactttgaaaggatgaaatcagttcacaacttggaaccacagatgaagcattacggatgcgttgttgatattctcagccgtgctggtcagctggagaaggcggttagttttatcagtgagatgcccctggctcctgaccctgtggtttggaggatactgttaggggcgtgcaggacacatggtaacgtggctgttgccgagatggccaccaagaagctcagtgaactagaccccggtaacagtgcggactccatgttgctgagcaatatttatgcaagtgctgatcgatggagcgacgccatgaacgtcaggcgatggacggctgataatgcagtaggtgagtccgagctcgtgcctgaccgcgatgacagtgtgctcgagctcgggatcgtcaggaagctcacgaccagctgcgccaaggccgggaggagcatctccctcgcgctcgaggcctttccctgcgacatccaggagcagctcaatcggttcatggatggcaggttgttgcagttaccttatttggcttaa

SEQ ID NO: 29252 - DNA, 2715 bp, Zea mays
  Peptide Sequence Number=SeqID_71031
atgggcggcacgtccaagctgctctcctccctcctcctcacttcctccccgctacgcctccgacccactactgccgccgccgctgcgctcttcctcaccccgcccgcggcggcctcgcgccgcctgctcctgctctcctcgccttccccgccccgcaccctctccacctcgtcctcttcccttccgcacggctccagccaggcctccccggcgccatcgccccgagctccattccccgagtggtcccgcctcgtcgaccggcttgccgccgccggatacggctccggcgctccctttgccgctgacgatctcgcgatcgcccttgcctccggatgcggcctgtcggacggggcgctggccgctgtttccacctgcctcgcattcgcgcgggaccggcctgacctcctcagttctcttccaaggaaggatgtgaagatcctggtggccaatgcggcgccgtccctgttcaaagacggggaggcatcagcgctgcggcttcggcgctaccttgctggggaagaaaccgatgtcattgtttcggacagagctgaaactgtcgatattgttcgatatctgctaagttacacatacggttcttctgtcagcgactcagaacacaagaaacttattgattctgccgtgagaaatatcatggctgagttagtgagttttagtggtctttcccaatcgtccacttttgaggaatcaactcccaaccaaatttgctcgagtcagcttgaacgattttccaggcctccagggcaaaatatcgaaatgaagcgaggtgactggatttgcacaagatgtagcttcatgaactttgcaagaaatgttaggtgtcttgagtgcaatgagcagcggccaaagaagatgctgactggtggagagtgggaatgccctcagtgtgatttctataattatgggaggaatatgtcatgtttaaaatgtgattgcaagaggccagcaacaatcccatcgattcctgcatctgttggttctggtttaggtggtgtggcacagcttcttagtgtaacgagtgctggtaaatctgaaattgagagaaaacttgctgaaagtgataaaaaagcagaaagatggttgagcaaagtatctcaacttcaagattcagctgacttaagtagtctagcagaagatgaggactttcctgagattatgcctatgcgcaagggggtgaataagtttgtggtgagcatgcacaaaacaccactggaaagaaggcttacaaatgcacagtacagaagtaacaatagccccccagcatccgacccaaagataagtcaaactttggacaggatacttgggcgttcaactcctactacagccccaaacaatcaatctgttactagtgatgcacctactgaagctctgaagaaatcaacagaccacctcggtggcattgatcctgttccgtttgtgcccctgtctgcagatctctttgcaaaaccacagactaataatggacagagcaatcagaatggaaaaatcaatgcagaagatgacagttccatggtaaataatgcagtccctttacctgagaggcaaagcacaggatcattagataccgctgagatatggtctgagaaagtagcagaacctgacaatgcaaaggattccccaagtgcagtttctgatgaaaattttcctgagattatgccaataaggaaaggtgaaaaccgatttgttgttagtaagaaaaaagatcgctcattgacatcacaacagtacaaaaggcgcagtattcttgagcaggcagacagttctgattttgtcccatttgttccatttcctcctggctactttgccaagaaagatacaccaatagagagtactacagacacaggaatcgtgcccgaaggcagtcaaccaaaaggtaacctgaataatgggaactggaacataaattacaataagcatcaatcacaatctcatggggcacaatgtaggcctagtggtgctgcatatactggcactcggatcatgggcaactcccaggggaactacaatgggagcaatggtgaatctacttaccatggagctaactttgaacaggaaccttataacaaaggttataggaacaacaactattggagcagtgataacaataacagcaacaatgcctggagtaacaacagcaattttaacaacaataatgactggagtggtaacaattcctataacagcagtactgagaacggtaatagcagctacaacagtagtcatggttataactacaatggtacatggagcgacagcaaccacagtgcatggagcagtagcagcagcaacaataaccagagtggttcatttgttgataataacagtgtcactagcagccgcagttccatgaatgatgcaaatcacgtgagtcacagctcaggttatggaggaagctcaaacagaggttatactggaaagagcttggaaggatctgctgtaaaggatcctgatccactagacatgtccgaggaagctaaggctgagagatggtttaggagggcagctcagataaaggacatctctgagctagcgaacattccggacgaggacttccctgagataatgccgatgaggaagggggtaaacagattcgttgtgagcaagaggaagacaccattggagaggagattaacttccccacagtacagaaggaacctgccaattgtcagatctgaaacggacgaggatgctagctga

SEQ ID NO: 29253 - DNA, 345 bp, Zea mays
  Peptide Sequence Number=SeqID_71032
atgacgcgcctgttccgctgcggcattacgcaagtggtggtcctgtcagctccattccattccatggcgaagctgtgctggatccgatcctgggcacccacgtcgttgcgtaacttgaaggagaggacaacccgatgtggttctggaccgccgttaatcgtcagttttctgaaccatgagacagacagcgacgccctgaacctgaactttcgatccggccagaacggcaacgagaacatgcggtacgaagagaaaaatgttcgccttggccgtgttgtctggcagttgcagagccacccatcggaggggtcggggaaggagacaaacaggtcgtcaacatgctag

SEQ ID NO: 29254 - DNA, 1386 bp, Zea mays
  Peptide Sequence Number=SeqID_71033
atgacatggctccatcccttccacctcttgcggcaacgaagcccaccattccgtcccgtcagtaaccctcgcctccgcgacctaattgctctccttctgagacaccaagacaggaggagccatctcctccaaatccacacccaatttattgcccaccaggtgttcgaccaaagtcccgcgccgtggcgcgccttcctcaaggcctactcccacggtcctttccccctggaagctctgcacctcttcaagcacgcgcgccagcacctggctgatgacacatttgtcttcacgttcgtgctcaaggcttgtgcgggtctggggtggcatcgagctggtgcacagctccatgcgctcgttgtccagaaggggtgcttggtggaagcacgcaaggtgttcgatgaaatgccagtgaagaatgtagtttcgtggaatgtgatgatcactggctttgctggatggggtgaggttgagtatgcgaggcttctgtttgatcagatgccctgcaggaatgttgtctcatggactgggctgattgatggatatacacgtgcttgtctttatgcagaggctcttactcttctccgccacatgatggcaggaggcattagcccgagtgagataactgttttagcagttattcctgcgatatctaatcttggagggatccttatgggtgagatgctgaatggctattgtgagaagaagggtatcatgtcagatgcccgggttgggaattcactcatagacttgtatgctaagattggctctgtgcaaaactcgctaaaggtgtttgatgaaatgctggatagaagaaatttggtgtcatggacatcaataatttctggttttgcaatgcatgggctgtcagttgaggcacttgagctgtttgcagagatgagaagagcagggattaagcccaacagaatcaccttcttgagtgtcatcaatgcctgcagtcatgggggtctggtagagcaagggttagcgtttttcaaaagcatggtttatgagtacaatatagatccagagatcaagcattttgggtgcatcatagacatgctaggtagggctggacgtttgtgtgaggctgagcaaataatagaagggttgcctatggaggttaatgtaactgtatggaggatactgttgggttgttgcagtaagtatggagaagttgcgatgggggagagggcaataaagatgatatcagacttagaaagagaatctggaggtgattttgcagtattgtccaatgtacttactgagcttggtaggttcagtgatgctgaacaagcacggaagttactggatcagaggaaaattgttaaggaagcaggtgaagtgaacctcatgtccagttcttgctcctctttaactagtaactag

SEQ ID NO: 29255 - DNA, 897 bp, Zea mays
  Peptide Sequence Number=SeqID_71034
atggtggcggcggcggaggggagcgggcgcagggacgccgaggcggagctcaacctgccgccagggttccggaaggtagcgcgacaaccggtgcccgtgcccatcatcgcggaaacggatctttacaagttcaatccgtgggatctgcccgagaaggcgttgtttggtcgcaaggagtggtacttctttacgccgcgggaccgcaagtacccaaacggctcgcgccccaaccgcactgccggaaaggggtactggaaggcgactggggccgacaagtcgatcgtgcccatgggcagcaccagggcggcggggatcaagaaggcgctggtgttctactctggcaaggcgcccaggggcgtcaagacggactggattatgcatgagtaccgcgtcgctcaagcggaccacaccctggggaagaagggctcacagaagctggacgagtgggtgttgtgccggctgtataacaagagaaacaattgggacaaggtgaaggtcgaggagcaggagttggaggcggcgccgcgccgacagcatcacttgcagagcgcggaggattccatgtctaacagtttccagacgcacgactcggacatcgacaacgtcttcgagctacaaaattgctacggtaacaacatggtgcaagggcaggccatgacccccaggaacgacattggcgtcgtgacggtgaaggaggacaacgactggttcaccgacatgaatctggatgatttgcaggcatcctacaacatggcccatacggtgaatccgaacccggcccaaaccgcgaacctggtggcagggcaaggccatggctacttgcaaggctatggctacttgcagtacatgaactcaccgtcgatgaagatgtggcagacaatcttgcctccgttctga

SEQ ID NO: 29256 - DNA, 1011 bp, Zea mays
  Peptide Sequence Number=SeqID_71035
atggtgacgtacgacggtgcagcccaggcgagggggccgagcatgccgaggaccggaggcgccgccgcgtccgctgccaaggtgctgcccatcgacgtgccggccgtcgcgctgtcggagctcaaccgcctcacgggcaacttcggggacagggcgctggtcggggaaggctcgtacggccgcgtctaccgcgccacgctcgccaccggggaggtcgcggcggtcaagatgttcgacaacggcagctcctccggccagtccgaggccgaattctgcgagcagctgctgggctactgcctagagctcaacaacaggatcgtgctctaccagttcgccaccataggctccctctacgatatactccacgggaagaagggggtgaagggcgcggcgcccgggcccgtgctgacgtggatccagcgcgcgcggatcgcctacggggcggcgaggggcctggagcacctgcacgagaaggcgcggccgtcgatcgtgcaccgcgacgtgcgctccagcaacgtgctggtgttcggcggccacgacgccaagatcggcgacttcaacctcaccaaccagtcccccgactccgccacgcgcctgcactccaccaaggtgctcggcacgttcggctaccacgcgcccgagtacgcgatgacggggcagctgacgcacaagagcgacgtgtacagcttcggcgtcgtgctgcttgagctcttgacggggaggaagcccgtggaccacaccatgccaaagggacagcagagcctggccactccgaggctgagcgaggacaaagtgaagcagtgcgtggaccccaagctcaaggacgactacccgcccaaggccgtggccaagctcgcggcggtggcggcgctgtgcgtccagtacgaggccgatttcaggcccaacatgaccatcgtcgtcaaggctctgcagcccctcaatgttgccagcaacggcctgcttggcctgttcaatcacgagagcattaaccgcgcgtgccattgcgtgtga

SEQ ID NO: 29257 - DNA, 218 bp, Zea mays
  Peptide Sequence Number=SeqID_71036
ccgtcactgcctgttctgtgtacacacacatcacggcgaccctcctcggcgcgacgctgctgctgctcgcctcccccgccgtcgtcgtgcgcgcgcagcaacgagggggcaacccgtgcccgacgagcgcggtggcggacctcaaggtgtgcgcggacgtgctggtcctgctcaagctcaggatcaacgtgccgcagggcaaagagaggagaccctga

SEQ ID NO: 29258 - DNA, 306 bp, Zea mays
  Peptide Sequence Number=SeqID_71037
atgtcgccccacacgcccgccgttgctccgtcgtcccacggcgcgagcccgtcgtacaagtccgggaccaccaccgactgccacgaggaggagaaggccgggggtgcaagcgcaacgccgccgaggtcgagctacgggaagaagctgtcgtcgctgaggaacgggaaggcggacggcaggcacgcgtccgcgagcgacggcggcggcgacgacgcctgggatgagggctcggcggctcccgcgtcgacagcaaagcgtcgtccagagatgaaggaagggaaacggagggacaagacggagctatga

SEQ ID NO: 29259 - DNA, 570 bp, Zea mays
  Peptide Sequence Number=SeqID_71038
atggccaaggtccctttcctgcacgtgctcccgacagcaggtcgaccccgagagcagccgcaagaagagacgaacagagaagccaacgccaacgcctccatttcgtcgaatcccctcctctcttcgtccataatggcaattatctcctctcccgcggggaatcggagggccaaagtgcgccttcgtatccgccttccagcgcgtgttcggggatgccaggatgcccacctcgacgtcgactacctcgtgttctccgacgccgctgcctctgtgaccggcggcggttccccgttcgcccgtgcgacctacctatgctctccaatcctggccttcctgcttctcgggaactcactcgtccatgatgcctggggcaatctcctcttctccgccgcaagtagcctgccctgctcacgcattgctgctgtttttagaactgtttgcttaccgatctgttgtgttccaagttccaaggaagaatttggcaaaatgggtcgttttatcttgccgctcttcataatacaccgtttcgagttagggtcgtcaaaagggtcgcttaagtctgcgcgctga

SEQ ID NO: 29260 - DNA, 1062 bp, Zea mays
  Peptide Sequence Number=SeqID_71039
atggcgtcgccgtccatccccgccgctctccgccacccgcacctccccgccgatggaggacttcttttccactcgtccggcgacccaaccgcgcgctcctcgctctcgttcaggcaaaactttctttctcagagactgttctttccctgttgccacatctattttctggcaccgcaccgtgaaacattttggataggagacatgacaatgagaaggtgtcagacaggtcctggtcctgttttggctgcaaggagtcctggtttgggcaacgttgacaatctccatgagagttcaagcttatctaggagctgggatttgaacagacagattgatgatgaccgtgatgtactcatagaatgtagagatgtccataagtcatttggagagaaacaagtattaagaggtgttagtttcaagattagacatggtgaagcagttgggataattggaccttcagggacgggaaaatcaactatattgaaggttatggctgggctgcttgctccggacaaggtctttcaaagtgctgcactttttgattctctcacagttcgtgaaaatgttggattccttttatatgaaaattcaagcttacccgaggaccgcattggtaaattggtgacagaaactttggctgcagtaggactaaagggtgttgaagatcgtatgccatccgagttgtctggtggaatgaaaaagcgtgttgctctagcacgttcgataatatttgatgatacaaaggatgtagtggagccagaggtccttttatatgatgaacctacagctgggctcgacccgattgcatcaactgtcgtggaagaccttatacgttctgtgcatatgactggacgggatgcccttggcaagccaggaaaaatagcttcctatgttgttgtgacccatcagcatagcacaataagaagagctgttgataggttgctatttcttcatgaggggaaggttgtttgggaaggaatgacacatgagttcacaacatcagctaatccaattgttcaacagtttgcatctggtagtttggatggacccataaaatatttttga

SEQ ID NO: 29261 - DNA, 174 bp, Zea mays
  Peptide Sequence Number=SeqID_71040
atgggcatcgtgtttacgcggctcttctcgtcggtcttcggtaaccgcgaggctcgcatcctcgtcctcggcctggacaatgctggcaagaccaccatactctcaattggattcaacgttgagacggtgcagtacaacaacatcaagttccaagtatgggatcttgttttttag

SEQ ID NO: 29262 - DNA, 933 bp, Zea mays
  Peptide Sequence Number=SeqID_71041
atggaccgggctttcacccaaggaagccagtgctggggagtgcgacgccctcaacaggggaagcgacgcccatggacatcaccgtcgccgaggctttcgtccaagaagtcccctagcacaaacatcaagccaagaccccgggacaacgcaggctacctccgccaacgtcgctgccctgacatcccgcccaaaccctcccagagggacatcgacatgcttgctaccgcaaagttgtgttggatgccacccccaccggccgggcacacggaatcgggcaccaccttgcggcgagtgccccactgccacaggccagtgtcgctgcaccccctgacgacaactcggcggccgcgagcacacagcccctgcaacctctcccctcccgagccgccaggagcaccgtgcaagagggccgcaaaatcctcccaaagagccagccaaccggcaggccgatggcactgccgaccggcgctagcaccgaagctcacgccctgccccgtgacagcacgtgccacggcgcacagcggagcagccacgggtcgtgtaggacgcggacacctggcgggcgagcacgccaccgccgagagacacgcacacgccgccagcgggctagtccgccccgcccctgtccgccacctgcggcgtccacgtgggcgcacagcaccgccacggccaccaagaccatgtcccgagcgcggatccgggcgctcgcgacgcccaacaagcggatgcctcgctgccaccgtcttaggggtccgcgcgagcatcccggtctgcctaggggtggatcttccaggtgcactcgatgatgctgccattacagagtcattagaactacacaaaattaagagccgccaatgggcgattttcaaaacatctgcaataaagggagaggggctcttcgaaggtttggactggaaaaagatttgccggtag

SEQ ID NO: 29263 - DNA, 225 bp, Zea mays
  Peptide Sequence Number=SeqID_71042
atgtccgcggcggcgctcccggacaatatcgcaacgttctctaagctatggcatggtagcgttcaatcgaccaagaccaagagcattactagagttagaggatgtggaaatgtggaccagagggacgtgaacggacctgtggatggctggccatggcgcgacgttgcacggcgtgatcttggccgatttgggggaaaacgaaaatttgcgagctatggtggataa

SEQ ID NO: 29264 - DNA, 618 bp, Zea mays
  Peptide Sequence Number=SeqID_71043
atggtgagggtcagtgtactcaatgatgcgctcaagtccatgtacaatgcagagaagaggggcaagaggcaggtcatgatcagaccgtcgtccaaggtgatcattaagttcatgacggtcatgcagcgtcatggatacattggtgagttcgattacgtggatgatcacagagcccggaagcttgtggtggaactgaacgatagactaaacaaatgcggtgtaattagcccctggttcgactttggaataaagaaaatcgatggctggactgcgaggctgcttccgtcaagccagtttggctatatcgtgctccaaccttgcatcgaactctgcctctgtgctcagcatccggtcactggccgacgcacctcctcatccccatggcgtgctcccctcgatcatcgtctccagcagcccctactctgccccacgctgtgcgccgccggggggatccaatgcgcagatcagactgggaggaagaagaccttatggtcgttgatcatccagtcgagggctaggattagactggggcgtaacccatggttaaataaatcttgtgcgctggtcgtagatccaacgactgatctccgtcaataccctttcggccagtcattctag

SEQ ID NO: 29265 - DNA, 1671 bp, Zea mays
  Peptide Sequence Number=SeqID_71044
atgcgcaagctgagcgcgccccggggcggcggggagaagctgggcgtgctgggcttcgaggtggcggcgctcatgtcgcgcgccgcggggctgtggcgcgcgctggacgaccaccacctggcgcgcctccgaggggaggctatccgcctggagggcgtgcggcggctcgtggccgacgacgacgccgcgctcctggcgctcgcgctcgccgagatggccgccgcctgccgcgacctgtcgcgcgccgtcgcccgcctgtccgcgcgctgcgccgacccgctgctccgccgcttcgacgccctcttcgccgcgctcctcaagcgccgcgccgccgacccgcacgggctgcgctacgccgcgcgcgccaagatggaccgcaaggcgcgcaagatgcagcgcctcgtggccgccacggcgcacctgtgccacgagctcgacgtgctcgccgacctggaacagcagcagcagcagcaggccgggaccggggccgggaccagcaacagccgggccgagcgcgcgcgccgcgtcgccaggcagaggcaggaggtggagcggatccgcgccgcgtcgctctggccgcgcaccttcgactacgccgtgcgcctgctcgccaggtcgctcttcaccatcgtcgccaggatcatcgaggtgttcgacctggactacgccgtggacgacgacgaggaggaggaggaggagacggcgtcgtccagggcctcgcggctctcgtggggctcctcgttcgtcagcggcagcatgcacatggtgtacccttccgacgtcgtcgtcgccggcgccgacgcgcctcggacggcgctgcgacgtgcgaggtccgggaagactgctgccgccgctaccggcagcaagagccacatgtccaggagcaagagcctgaggcagcagctcaggtggccggcggcggccggcaagcacctcatcggctgcgtcgtcgtcacggggagcagcaggcctcagggcagggacgggtggatcccgcagagcttcagctacgtatccgattccgacgaccactccagcggcgccggcatcatgagcttccactccctgggcgacggcaggcaaccaccaccaccaccaccaccgacgacgacgacgtccgtgttcgacgcctcccgcgacgcgctggcgcacccgccggaggcgtctctgggcggcgccggtctcgcgctgcactacgcgaacctgatcatgttcatcgacaggctggcggcggcgtcgcaccacatccgcgccgacgagagggacgcgctgtacggcatgctgacgggcagcctccgggcgtccgtgggcgcgcggctgaggccgtcgttcgccgccgccgcgccccgcgccgaccccgcgctgtgggcggacacggtgcggcggaccctcgcgtggctcgcgccgctcgcgcgcaacacggcccggtggcaggccgagaggagcttcgggcagcggagcgtcgcgccttgtggcagcggcggcggcggcgccgccgccgtgctgctgctgcagacgctccacttcgcggaccgggggaagacggaggccgcggtcacggacctgctcgtgggactcaactacgtgtggcgagacggggctgctgagctcgacgcgaagctcggactcggatcggagtcagccgcggggcggcggcggcggttacgatga

SEQ ID NO: 29266 - DNA, 1710 bp, Zea mays
  Peptide Sequence Number=SeqID_71045
atgtcgtgctctttagattatttcgtttcaaaatttgcccttgtaatattcaacaagaaaaattgtttgatttctcacatttcggatacttacacattgttgctatctaaaaataactttcagaagcggaatcttatgcttactagctacaatacaaatgcaagctatatccagcctcaacaaaagggtaatggccaacaaccagtgaccgctctcagagttaagtttaaggttagttcttcccattctggtgaacctgctcccaaagtcgaagcccagctagtcgcaagcgttaaagcacagccatctgcgaaggtggaagctcagtcgagtatgaatgtgaaagcccggccagttgtaaacgtgaaaacacaaccatttgcaaaggtggaagctcagccaattatgaatgagaaagtccagccaactgcgaagatggaggtgcagccactcgcgaagatggtaactcagaacatcactggtgtccaagctctgccaaagacaaaagctaaaaagtcaaagtcagaaaaagaaaagaaacctaaaaaagttcaagcgatcacatattttggtctcgtatggaagaaaaataagactgacaaggatgatggaagtgagttcagggcaaatgatgtaatccttaaaagcaaggatagtataggttcatcaataagaccaacatgctgtctctgtgacaaagcttattctccggatttcttgtatgtacgctgtgagaggtgccggaattggtttcatggtgatgccttgcaacttgaagaagaaaggattggtgagttggttgcataccggtgctgtaggtgccgaagaagagccataccacattgtcctcattctgatggttatacaaagcctgaaccagaattaagtgaacaaacagttgctgcatcatctcagtcaactatgctatctagtgaggacacttatgctttagcagatcaggacccactgcttgcttcttacgggatagttgaaccgattggtgatgatacaatggatgttggtttgtcaatgaacatgtcaagctttgcccctggaagtaaccagaaactgtctataagaagagcacaagcaaaaagtactgaatacattgaccaaggtggaagacctgtgagtgagtataatatccaaaatcaacctccagggattggaaacatcaatctcagccacacgaatgaaatttctttttcagaggtagacagtgttgatgcttcagagctattggggtgggatttaccccaaggagctgcatatgctacacctcttgatttcactgctaatcaccagtcgaatgacacttgctgtggcagctttggaatggacgagtatgagccccagacttatttctcgttcaccgagttacttgaagctgatgatacacagcttgacaatgcctttgggatgtctgctggtctgcaaggtgattgcaatggcacaggaagctttgttcaacaaggagatggtttgtctttcatggtagaagatggagcttcaaatatgaacttcccaacaaatgatcccacccccgatgaggtagcgtgcagcaagtgcatgcatactcagccaccacctgatctcaaatgtgctgtctgtgacctgcacatacacaggcagtgctcaccgtgggatcaaggtgaagaacctgttgacagcagcaattggagctgtggtggttgccgggagtggcgatga

SEQ ID NO: 29267 - DNA, 3087 bp, Zea mays
  Peptide Sequence Number=SeqID_71046
atggacgccgagccccgccgggagggttccgatcgggcgcccgccgccgactcctccgcggcgccggacggtgacgaggcgatggcccgtggcgtcgctgctgcggagaagcctacagcggccagtgaggcgggggctggtggagacgtcgcggcggcggagcgtgggcgtgacggggagacgccggctggagatccgggggtggtggctgacgaaggcggtgctgtgggcgaccagtgtcctgcggcgcctcaagcgagcgaggtggacgagggtggcgccgcgggcaaggagcggtctgatggtggtctggcgaatggggcagttgagggcagcagcattgcgggggaagtgccagatgtggctcctgtggtatctgaagcacggatggacgaggacgggggttgctccacaggcaatgagtactctgaaatgaagatggaggtggatggcggctgcgtagcagaacgagagggcgatggtcaggaacaggaacaagagtgcactgcagctgctgtggaaagcgaggttaagacgggggaaggtgacggcggagtggtgaatcaagggactacggcacatgctgggggtcttcaggttaaagaggaggtgggggaaggcttggtgggccgctacattggacgtagcgctccagggcgcacgaggattcttattgggaaggttgtgtcctatgatagcacagctggggtctacagcctggtgtttgaggacggacacgctgaggagctggggcttcctcagctccaggagcttctcatgtcggatgataatggtgcattaggcatgaaggtgagctgccggaagaggaagctagacttgctggtttcatcagggagcgccttggaggtcaaagagccaccaagtactaggcagagggttgatggatgcgagatgtctgccaggcctgatgagctgcagcatagtgcgtctggctcggatatgtctgaggatgttgagtcttcgagcaattcatcagatttcactagagaagaaacatctgagccatgccctcctgtacaggctgtggagttgcctccgtcgtcaggcgacattcctgtgccagaagagtccataagttctctcctctctgtttataacttcttgcggtcgttcagtgtgcagctgttcctgagtccatttggactggacgattttgttgcggccattaattgcagcgtgcagaataacttgttggatgctgtgcacgtctcgctactgcgggctctgaggcggcatcttgaatctagatctgcagaaggatctcgatcggcttcaaattgcctgaagtacgcactctatcaacacactcttaaccacagggggaagagctttggtagaagccttctagtcgccgaatactataaacttcctgttaccatgaagttgagggtgctgcaaatactctgtgatgatgtcattgaatcagaagaactcaaaactgaactggaaaatcgagtaggctacaatgaggagatggagtatgagatagaatctagtgcatttttggaggctggttcaagatcagtctcaactagagcagcaaaggcctcagcttgcaaaaacacgaatgatttccataatcttctcgaaagtgctccaaatgtaacaaatcccgaaactgctccagcagtcctgtctcaggatggcaatagtgatgattgccgaatatgtgggatggatggaactttggtatgctgtgatggctgcccgtgggcatatcattcaagatgtattggtcaaaacaaagctttccttcctcagggtgactggttctgtccagaatgtatggttaacaagcttggcccaacttcctcaagaattgagcgtggtgcaagaggagctcaaatgtttggcattgatatgtgtgggagactattcttaggaacttgcaactatttgctggtgatcgaaacagcttcagatgcagagtcttatgcaagatattacaatcagtatgatgttgccaaggtcctccaaagccttgctgtctcagatgcatatgtggacatatgcaagcaaataaaggactactggaaacatttacttggtataattcataacgagagatcaacaacaggtaaagaagttggtgcgaaagtagcacttcctcaaacaaacgcgcagcagaaatttgtggctaatcagagcgcaatgtgctcagtcgaatgcctggaggaacaaaaatgcaagtcaagcttaggtgttgtcactgagaaaaatgctgaagttttcaagcaaactgtgtcagctcagaacaacatacataatgcacacagaaatggagcttttggaccatctgtggtatcctcagtttctcatcagaatggatccattgtaacaggtgggtctaacatagcacaggcgcagccagctcagagtattttccatccagacccatccaccgtttctgtgacgtcaggatcattttgtccatcttctctaggtaaacaccaccttcagatgtttccggaaagatctggaaacatgagtggtgtcaaggcagcaaaattgtcttcttttaaaccacaagcttacatgaacctctacaatcatggcaatattgcagcatctgctgctgccaatatagctgttattacatccgatgacagtaaagtttcagcatcccaactgactgcgaaacaccggaagaaaatggctgcagacaatgctctacaattgaaagcattttcttcagcagccacacaatttctttggccgagtaccgaaaagaagcttatggaagtcccaagagatagatgtggttggtgccttgcttgtagaagttcagcaattggaactaaaaaggcttgttttcttaacatggccacttcaaatgctgttaaatgctctgctcgaattcttagtgtaatgcgtgtaataaaaaattctgatagccactttcctagtattgttgcttatttagccaacatggaggaaagtttgcgtggcctcttggttggttcactacaagatatgcagcagaaagaaaggtggcatcagcaactacaagaagcttcgaactgcagaactgtaatacccctcttgcttgaggctatgccacaataa

SEQ ID NO: 29268 - DNA, 987 bp, Zea mays
  Peptide Sequence Number=SeqID_71047
atggatcatcgtcaagacgccggcgatggcgaggaggagcgccagcagcagctgggtgatctggagaccgacaaggaaccggtgcagaagcaagggcagctatcgccgtcgtcctcgtggcgggctgcggcggcggccagcatcagggagagcctatcccgctcgctctcctctctcagccaccagcaggaggagaaggacgacgacgaggtggagctgaggtgggcggccgtcgggaggctgcccaccatggacaggctccacacgtcgctgcagctccacgcgggccagcggcaggtggtggacgtgcgcaggctgggcgcggcggagcggcgcatggtggtggacgccctcgtcgccaacatccaccgggacaacctccgcctgctccgcaagcagcgccagaggatggaccgcgtcggcgtccgccctcccacggtggaggtgcgctggcgcgacgtccgcgtcgaggccgagtgccaggtggtgcatgggaagccgctccccaccatctggaacgccgtcgtctccggcctctctaggcccagggtgcgcatcctccacggcgtcagcggcgtcgccaagccttccaggctgacgcttctcctgggcccccctggctgcggcaagaccacactcctcaaggcgctcgcggggaagctcagagccaccggtctcaaggtgacaggagagatagagtacaacggcgtggagctcaacaatggcttcgtcccggagaagacggcggcttacatcgaccagtacgatcttcatgtccctgagatgactgtcagagagaccatcgacttctctgcaagattccaaggcgttggcaacagagctgagatcatgaaggaggtgattagaagggagaaggaggccgggattacccctgaccctgatgtcgacacttacatgaaggcgatatctgtggaaggtttagaaaggagcatgcaaacagactacattatgaagcccagcgtataa

SEQ ID NO: 29269 - DNA, 3060 bp, Zea mays
  Peptide Sequence Number=SeqID_71048
atgatagtaggaccctcaaaagcactcttcatggatgaaatatcaactggattggatagttccaccacatttcaaattgtttcttgccttcaacaattggctcatatctcagagtctactatactagtctcacttcttcaaccaacaccagagacatatgagctttttgatgatattattttgatggatgaaggcaaaattgtataccatggacctaagagttgcattatgggtttctttgaatcatgtggattcaagtgccctgatagaaaaggcgccgctgactttcttcaagaggtattatccaaaaaggaccaacaacaatattggagccatagtgaagaaacctacaattttgttaccattgaccagttatgtgacaagttcagagtgtctcaaattggtcagaaccttgctaaggagatttcaaagccttgtgataaatcagaagggcttaaaaacgccttgtcttgtagtatctattcattgtccaagtgggaacttctcaaagcatgttccgcaagagagcttctcctcatgaaacggaatgccttcatctacataggaaaatctgttcagcttgcacttgttgccgcaattacagggacggtatttttgcgcacacatatgggcgttgatatagttcttgctaactattacatgggttcactcttctatgcactcctcctactgatggtgaatggattccctgagctttccatggcagttatcagacttccggtcttttacaaacaaagagactactacttctatcctgcatgggcttatgcagtgccagcttttatcctaaaggttccaatctctttagttgagtcaatagtttggacatcattatcttactttctcattggctatactcccgaggcatccagattttttcgtcaccttcttatcctcttcttgattcacactggagcattatcgatgtttagatgtgtcgcctcttactgccaaacaatggtggctagcatagtgggtggtacaatggcacttctactcatccttctattcgggggtttcatcattcctcgttcatccatgcctaattggctggaatggggattttggctttctccattatcgtacgctgagatagggttagctgaaactgagttcttagcaccaagatggctaaagttgacagcatctggtgtgacacttggaaggagagtattactggatagagggttgaatttctcagtcaacttctactggatttcaatcggagcattgattgggtttatttttttatgtaatataggttttgctattggcttgacaattaaaaagcctccaggaacttcaagagcaattatttcttatgataagcttagcagacttaatagaagagaccagtgtgtgcttgtggatactaaagatgggataaataagcaacaagaaaattcatctgctcgtagcgggactggaagggtggtattaccttttgtgccccttgcagtatcatttaaagatgtgaactactatgtagatacacctgcggaaatgagggagaaaggatacatggagaaaaaacttcaactactccacaacatcacaggagccttccagccaggagtcctttcagcactcatgggggttacaggggcagggaaaacaaccttgcttgatgttcttgctgggaggaaaactggtggtgttattgaaggagatataagagtaggaggttatcctaaagttcaggaaacttttgctaggatctcaggttactgtgaacaaactgatattcactccccgcaaatcacagtgggagagtcagttgcatattcagcctggctgcgccttccaacagaaattgactccaaaacacgagatgaatttgtcaatcaagttcttgaaacaattgagttgactgaaataagagatgctttggttggaatgccaggaataaatggactctcaacagagcaacgaaagcggctcacaattgcagttgagcttgtatccaacccttcagtcatattcatggatgagccaacatccggcttggatgcaagagccgctgctattgtcatgcgtgcggtgaagaatgttgcaaatacaggcagaacagttgtgtgcacaattcaccaaccaagtattgaaatatttgaggcatttgatgagctaatgttgatgaaaaggggtggacagttgatctatgctgggccgctgggataccgttcatctatactcatcaaatatttccaggcaatacctggggtaccaaagatcaaggacaactacaacccatcaacatggatgctagaagttacttcaacatctttggaagctcaactaggactcgattttgcacaagtttacatggactcatcaatgtacaaacatgaacagcaaagtctattcaatatattgggatgcatgtatggcaccactatattttctggcatcaacaactgtcaatcagtgatgccattcgtttcgattgagcgatctgtcgtgtacagagaaaggtttgcaggaatgtactctccttgggcttactccttggcacaggtcactatggagattccttatgtgcttgtgcaaatagtgttgttcatgttgatagcttacccaatgatagggtatgcatgggaagcagcaaagttcttctggttattgtataccatgttctgtacactgctctacttcctctatcttggaatgttgatggtgtcggtcactccaaacatccaagtggcatccatattaacatctttgttctacaccatacaaaacctcatgtctggattcattgtgcctggtccacaaataccaaaatggtggctctggttgtactatacatctcccatgtcatggacactcaatgtattcttcaccacccagtttgggtatgaagatcaaaagaagattgacgtatttggggagaccaaatctgttgcagcattccttaaagactactttggtttcaaacgtgaattgctaccactgtcagctatagttctagcagccttcccaatattctttgccgctctattcggttacagcatttcaaaactaaactttcaaaggagataa

SEQ ID NO: 29270 - DNA, 144 bp, Zea mays
  Peptide Sequence Number=SeqID_71049
atgggaacgggcacgggtacaaaatcctacccgcaggggctgtttggtgtggcgcgtctaccaccacaccgtgcctcacttgcggcggtcaaattggctgccacaactgcggcagctgaagtgtggcaggctgtggctgcttag

SEQ ID NO: 29271 - DNA, 267 bp, Zea mays
  Peptide Sequence Number=SeqID_71050
atgacgccgactaggtggaatcagggccaaggtgaccggaacggctcgacaagctactggccaggaattactcaccgttgccttggcaccgccgtcgagctgctgctctacgtgggcagggctcctaacgtcatgtgggattcgagcttcagggctagggattcgggcacgccggcgtacctccgccgcgtttgcttgggcgccgccgctctgggcaacgggaggatggtaggtgaagcgctccaatcctctgggactcaaatgtga

SEQ ID NO: 29272 - DNA, 354 bp, Zea mays
  Peptide Sequence Number=SeqID_71051
atggccaaggttttcaagtcgataagtcgagtcgaaaaggatatgcagctcttgcatgttcaagaaaaagacatgccaccacaatacaagaaagtcaatttttcattgatgttggtcggctgttcacattgtgcattaatgaaatgcaaacatgaaactggctacatgtcacatctatttttaatcatgttatcattttgttgtatcaagctggttcgtgtggaggcagctttaacattgcgtgctttagcagaggttgatcctacttgtgtaggtggtttagtttcatatggtcttacaacattgcaagctctacgagagactgtatcatttgataaggtcttctgcatataa

SEQ ID NO: 29273 - DNA, 381 bp, Zea mays
  Peptide Sequence Number=SeqID_71052
atggcgaagggcgtcggtggcggggatcccataccgctgtcgcggttcggcgcgctggtggcccagctggagtccgtagtggcatcggccaggcagaagacccccgacgcgctgctctgcttcgacctcctctccgagctctcctctgccatcgacgaggcccccaaggagaccatacaactttggcaaaggaaatgtgaggatgctctccaatccttgctcgtccttgggacacgacgtccagttcggcgcttggcgtcatcagcgatgggccgaattatcgagaaaggcgatgtgatatctgtatattcaagggcaagtaacttgcaggggtggttggtcgatgtgaaaagggctgaggccactgcatgtgcaggttag

SEQ ID NO: 29274 - DNA, 243 bp, Zea mays
  Peptide Sequence Number=SeqID_71053
atggaggccaccagggcgatccgtcctgtcctcggcgactactaccgctccgacagcacgcccatcgccgaggcgctctggcgcgaggctaaagagtgcatctacgtccagcgcgacgaccagaagggcgtattttgctataggataggagtatttatcgggcaatccgaggttggtggcctaaatacatccctaccctcggttaccagctacattctaggaatataccgtgcaacagtgtaa

SEQ ID NO: 29275 - DNA, 393 bp, Zea mays
  Peptide Sequence Number=SeqID_71054
atgaccttccctccttcaacattgaaggctcagaaggacaggagatggaggcagaggagtggtgactcatcaaggcagcctcatcctaggccgacaggcgacgggagccaagagaccatcgagcgcatgcttggtaactttgaagagacgatttcagttgcatgcgctttgatgttgtgggatttgatctcctacgaccaggctagccagctccgtggcgaggtcgcgcgcctgcacaaggagcgtaacgacgcgcgacacgaatcgcctttgagaggagagtcccaactccaggaggatcttcatgaggcaaagctttgggctgaggaggctgaatcaagccttagaaaggttaatgctcgcctagaggagacaaactcagagctttcatga

SEQ ID NO: 29276 - DNA, 324 bp, Zea mays
  Peptide Sequence Number=SeqID_71055
atgcggaccgtccgggcccatgggccggaccgtccgctcattttggtgtccaacacctgtgaggcagagaggatgatcaagtcctatgccaaacaacactgcaaggtggaacggccaaacaagtccccgtcgagcaagcctacgaggctaagaggccgaccaagtccctaccgagcaaccctgcgagattttgtggagtggttccacgtgttcaagagattggcagataataatccagatctttgttctgagaaggtggacatgaagaaggacgaggatttgattgttgtgaggagacaggaagatattgaaatggaaattgag

SEQ ID NO: 29277 - DNA, 254 bp, Zea mays
  Peptide Sequence Number=SeqID_71056
gtgaagttggagaagatcacttcaacaccgatgaacgagtggtggcaggtcttaacactgacctggactgtgctaccttggatctctcaagggtacatgaagatcttgaagatgcacatgcaaggattacagcccttgaagctcagcttgaaggaaggaatccacctgaagcccaagtccttgccatagttgtatccccaccccataagaggattcactatggagccccaggatcaattaccagactactttag

SEQ ID NO: 29278 - DNA, 330 bp, Zea mays
  Peptide Sequence Number=SeqID_71057
atgtcgggatttgaggacccgtcgtacatagagatgttggtgggcgccagtacctttgcgaggaactacgctcctctgatagcgtgcctgaaggcacgtgctctcccgggcttgctccgcaaatgggcgaaaaggaggtcatgggcctactttgggtaccttgttcctaggtacccgatagatggtgatacccacttgagaactacaagaaatgaagggttggagaacagtgatatcaagattatcactaagaacaccataatcgacgtggcccataagaaggcggcggcgccgtggagcattttggagaccatggtgggcccatggtag

SEQ ID NO: 29279 - DNA, 336 bp, Zea mays
  Peptide Sequence Number=SeqID_71058
atggctcgtgcggcggctgcaagaccatgtggcgaggcacaggggcctcctgcacgggagcgtggagccgccggtgtccaggggggagcactaccgcgggtgaggcagcggccgtgggggaagttcgcggcggggaggacgatggcttgtgcggcggctgcaagaccatgtggcgaggcacaggggcctcctgcacgggagcgtggagccgccggtgtccaggggggagcactaccgcgggtgaggcagcggccgtgggggaagttcgcggcggagaccatacagggaaacacggcaccctccccgacggcaccatacacggaaacacggaactaa

SEQ ID NO: 29280 - DNA, 417 bp, Zea mays
  Peptide Sequence Number=SeqID_71059
atggaggagagagggatatccgctgcgaacgaattgcgtatacaccttcgatggggtctcgactgcgggtctgggaagcttcaccacgttctcaggcatgtgcccatggcccctccaagcacgtttggcgcgctgggcactagtaatcgctcaccggtgtgttgctccgcggcgggcccgctgtgctacgtgggaagcgtcctgtgcgtcgccatcaccggtaagaccttgctccctggactcaccccaaccccctctacgcgtagcaccgtagatatccaagttagttgtgcgggtcgcacgatctgggcaccgcggcaatggcgctgccatggtccgctcggactcggttgctggcgtagggtggaagaagacgacacgggagccctcgatctacgaatgaacggctcagattga

SEQ ID NO: 29281 - DNA, 444 bp, Zea mays
  Peptide Sequence Number=SeqID_71060
atggcggccagatttgataaatgggagaagacgtgtatcgggtgcaatgaaatgagtggagggaagcgcattaccaggtcatttattcccccggccaatcgcatcagcgacattcgcggcggaggtggcgcggacgcggcggtctttttgttacgcgaagtccgcggggaggagattgagctaacgaaatgggcccacttttcttcgtccagtggttttgttctccacaatagaagcatgcacaacctcctacttgcactggagctgcttggctattctggttggtcgctggggcaggaaggcgagctgtctggttgtcttgatgctgatactgatttcctcccggttgggagttctgacggtactgctgctactgctgaggaaactgcctctggaactggtgctgatgctgacgctgataaccttgagggtgaccttgcttga

SEQ ID NO: 29282 - DNA, 270 bp, Zea mays
  Peptide Sequence Number=SeqID_71061
atggcggcagactcctttttttcctctgctgcttctccctatttggtggaggcacggacgatgactaaggccgagagagagtccccagaacctccaacttatactcttggctccagggcaacgctcgagtccaccaacggccacggcgagctcccaagcggcttccgcggcgaggaaaatggcttcaggcgcaaccacccaaggaagacgcggcctgaccactgggatccactccacagcgattcaacgcgtcaggtgcaagcacgatga

SEQ ID NO: 29283 - DNA, 306 bp, Zea mays
  Peptide Sequence Number=SeqID_71062
atgggtgtaggcaagggacgacttgacgactcccaggggatcgccgcggaggtatggactttcatccaggccgtcgagcgcgctgggctcgagggcttggatgagtcggagtactcctcggacgaggagaattcctccgactcgtccgaggagggtggcggcgacgacgacgacgacaacggaggcaacggtgatggcggcggcgacagcggcgagggtggtgacggcagcgacaagggtggcagcggcgacggcagcggcggcagcaagggcagcagcaagggcagcaacaaggccagtggctag

SEQ ID NO: 29284 - DNA, 236 bp, Zea mays
  Peptide Sequence Number=SeqID_71063
ctcgctttgccaagggtggtttgcctcttggagaggagtgcggtggtgatgaggatgatggttatgattatgcttatggtaatgtggacccgggggatatctatcccccacaagcccccgatctttgggttgattttgaaataatcggcccaaagatcccaggaccttggacttcattgggtgcaccggaggtgcacccaatgggtgtagcccccgagcttcgagtggatttttga

SEQ ID NO: 29285 - DNA, 639 bp, Zea mays
  Peptide Sequence Number=SeqID_71064
atggagttcaatgcgttagtgggcgatctgtctcacaatgatgacatgcaggccagctccaacgttcccacccagaagggcaaatttgtcagtgattccatcatgcttgcgacactcctagaggttcctgtggaggccgttgagaccgggatcgatggaggcggagcaacgcgagcgcagacattcctgccagtgcccaccgtgttgccttcgcaacacacggggaaggaacccaccagagtttcctcccccaccacggtggtggcgttgctggcagcggaccacatggtgccaaccacgcctgcttctacgttagcgacctcgaagaatatgaccacccaaaggcggtcctcccagtatgttggttcgtctgtgtccccctcttccttttgtcactcagctttcgtctttgtttccttctttgcctcccctgatctccttgctctgaggggtatttcagccgccagtgtctttccccttagtggggcttctctagaggggaagggtgttccaatcctgcttccgtcaccaccattcttgggcgcctttatggcgatttctcagcctaaggtggaaccatcgttggttgcggcctccttttcttcaagaagggtcgtggtcccatcaccgccggggtaa

SEQ ID NO: 29286 - DNA, 219 bp, Zea mays
  Peptide Sequence Number=SeqID_71065
atgagaaacccatattgctggttgaagacatccttgaagaatttgaagatgatgcgaaaagggactaagccagagaagaaaggatttgatccgaagtggctaggtttagcagactgcatcgacagggcaggaagggacattgagagaatggagctgctggctattcagcagcaaggaccttgcaatagggttctttggaacccgcaacttgagatttaa

SEQ ID NO: 29287 - DNA, 132 bp, Zea mays
  Peptide Sequence Number=SeqID_71066
atggcgcatcggatgctgcgtccgccaccggggggggcactgctggccaataccactgcctggcaaccgagctctccatacccattcagcctggagatctttctaaagagcccctcggttttgttatattga

SEQ ID NO: 29288 - DNA, 1056 bp, Zea mays
  Peptide Sequence Number=SeqID_71067
atggcggcttcgggagggctcgagcagtggcagaaggacgggttcttccaggcggccgaggaggtgcaggagtccgcggacttgatggaatcagtctatagaacttggatgcgtgagcgtagtaatggatctggctcagaggagttggagcagtttgagagggctgtaagttcaagcaacgataagtattcattggaagaaggtacagtagcacggcgtcggcagtttgttgtagccattgaggatcagatatctcgtgtagagaaagaaataaatggttctttaatggacaatggcgggcaagggctcaactgggtgaagttagatgacgaagagcgagatgatctagttgctttcctttcagcacctgcagagttctattcagaaatgaagagcacagacatcagtgaccgtgttctatctagacaaaagaatgtgccagttggcaggaacgatcagagtgatccacctttaatcattaaagacatatatgaagtggcacgcacagaaatttctactgttaagagtgatgtttgtggtctagctgaggagttacatggccttagaaggaatttgagttcagggaatgatcattggaagattgacattggtaacaagatggatgatgatagaaaattgtcaactggggttcaggccgcaagtcagacaactccttcatcaagcatccggagaagcgcagaatctataacaagagtgagatggttttggaatagcttgtggaaatccaagagggatgaacaacgcccattaagatatgatatgtcatataatcttgacctcagggttgtatccttattaacacagagatttaatgggctagcggagagaagcagaaattatttgacaagttggaaggaaaattccaggacttctggaaggacgggtgggcttcatatacaaggccaacaacagaacattcagtttggccgttctattcggatcaccctcttactggtgctgagtatctttctgattggtcagtgcccaacttgccttgttttaaactgtgggaaaagtgataaattactcacatag

SEQ ID NO: 29289 - DNA, 255 bp, Zea mays
  Peptide Sequence Number=SeqID_71068
atggatttcaggaagaaggccaatgagggctacactttggtcaacatgacctcgctggaggcagcttgccggctatggggggctcatgggggttcaccacatgcacgggatagcatttatctatggtccaacccggtgaggtccaccctcataaacccggtctctggtgtccaccgcacagacctcattagtggtgaatcgtcactaggtgaaccacttggcatggaggccgcagatgttggggcgaaggcatag

SEQ ID NO: 29290 - DNA, 987 bp, Zea mays
  Peptide Sequence Number=SeqID_71069
atggggttggggccggggcaggggcacgatgaacagaacctcctggccctggcctccgccgccgccatgggggccggcggtattttcagctcgccagcggtgctcgacgacgactggtacttcgaccccgtggctgcggccgccgccgccggcgctcaggggcagctgctcctggcaccgccgggcccagcgcccgacgccgggtcgcagatgttctcgctcttcaacgtcggcggcgccgcgacgttcgacgtccatgggttcgacctcggcctcggcggcggaggcggtggcgacctggtcccgtttgccggcgcggggaatgcgtcgaattccgcgtccttttccctggtaccggcagggaacgccggcggcttcctcggctcgttcggcggcttcggtacagcgccggcgcaaatgccggactttggcgggctcggcgggttcgacatgttcaacagcggcgccggctcctcctccgcggcgccccctcctcctgcctcggtgtcactgacggcgcccttctctgggcgcgggaaggccgccgtgctccgcccgctggagatcttcccgcccgtgggcgcgcagccgacgctgttccagaagcgcgcgctccgccgcaacgccggcgaggaggacgacgacaagaagcgcaaggtggaggccgtcgccgcggccgcgggggcttcctcgggcggcggcggtgacacggtgctggacgacgccgacgacgacgacggcgggagcatcgacgcgtccgggctcaactacgactcggaggacgccaggggcgttgaggacagtgggaagaaggacggcaaggactccaacgccaacagcacggtgactggcggcgccacgggcgacgggaagggtaagaggaaggggttgccggccaagaacctcatggcagagcgccgtcgccggaagaagcttaatgaccggctctacatgctccggtccgtcgtgcccaagatcagcaagtaa

SEQ ID NO: 29291 - DNA, 489 bp, Zea mays
  Peptide Sequence Number=SeqID_71070
atgggcgtcggcgggttcttcatggatgccattgatgcgtcggtttcaaaggagagtaatggggaagggagaatggatgctttgatgttccttattgaagaggaagacgaatggacgcgggtgcacggggcaggcacgcggtcaggctcttggcgcgggcggcatccttggcgcggcgcggtcctgggcgcgcgcttggagtggtcctggttgcggccgggcgtcgggctcgcaggcttggggcgcgacgctcggcagtcggggtcgcagggctcgtctgtcctgggcgcgtcgggcgtctcctggcggcgtgggttggggaagcagagaggcagggagaggaacgggagggcgcggctgttggacatagcttatttccgacggcgaccgtcggaaataatgctatttccgacccgttacgaccgagggacagctaccatcggatataagtcggtggccatcagatataagttacgttcgatggtttag

SEQ ID NO: 29292 - DNA, 119 bp, Zea mays
  Peptide Sequence Number=SeqID_71071
atggcgtccccaattgctcaccggagcgatgggttcacggcggagccgccatgcgtcgtggccggcctccttcgaccccctatttccggtgagtaccctctacccaggttcgcaataaa

SEQ ID NO: 29293 - DNA, 391 bp, Zea mays
  Peptide Sequence Number=SeqID_71072
tgagcagttcgacaaattcgtcggcatggatacaagctgacgacgacggccagcccgaccgcggcaaggatggacgcaagctggagacgagcttggtcaggtcgtcgggcacagaggtgctcggagggtccgacgagcacagccggctgccggctgcctttgcgcaagaacttgggcagaagaacacatccacgtgttcgacgcgccctggcaacgccagagcacgccccgacgctcagccccgcgtgcaccgcgcctgcgactataaagccaaccccggccttgaccccagccctactccggccatcaccgttgacgatccgcccctcgacgtgaccgctaggacctctcggatctcacccgaccctccaccggacctctcccaccaccg

SEQ ID NO: 29294 - DNA, 556 bp, Zea mays
  Peptide Sequence Number=SeqID_71073
atgcagcccaaccgtgggatagcggcgccgacaccctgggcccggctgtcggtctctcgtgcttgtgaatcgtcgctggcgcgtggacccggggtcacgagtcacccatccgtagctcgccatcgctgccttgtgggccctgttggccagaatcgcccacctcgctgcccatggcggatcgccgccggggaaatcgggcgactccctgctaattcgcccggccgttgctcgacgctagggactataaaatgtggctcacgtgacccggtcctccccttctctcgcccactcgcgcccacatcggataaaccccatcacaaaccaccgtcgcgttcgtccgttgggaggttcgccgtcgtcgccagtgactcgagcctacgccaccaattagcgaccggggttgactcgggtgcgttcggcagcgtgcgcggatcgcgagggcgacgaattgagcttgggaggtcaaacttgggccctggatttgctcgccgacgtcgtggagtccggggcattccgccgtgcgccgtggtcagggcacccgtgcgcataatccaag

SEQ ID NO: 29295 - DNA, 303 bp, Zea mays
  Peptide Sequence Number=SeqID_71074
atggggggaaggcggtgctggctgcactggcctagagcaggctcgccggtggctcgccaagcggcggccacagccacgggcgcgcagggtgtggccccaatggccatccagcacggtagctcgccgacggcaagacgaacggcggggctgggctcaggcgcgcgccaccaagggcctctgaccgcgccctgggaaagggggcaggggatgggcgggctggagccgcgcccggggcagacgacgtcgcgccatggagcgcgccacatccgcgaatggaaaaagagaaggaaagcgaagagctga

SEQ ID NO: 29296 - DNA, 234 bp, Zea mays
  Peptide Sequence Number=SeqID_71075
atggagcactggttcactgggtcttcgcgcgccggcgggattgccgccattgttgaccgcgcggtgccacgattgtacatcgtcagggtaggggacgagtctcagtcgtgggatcttaatcctaggggtaagatgagggctcaggtcgcggccgacttacggattggggaatgccacactatcgagatcgtagggccagggagcgggcatggttgcactgaactggatctgtga

SEQ ID NO: 29297 - DNA, 240 bp, Zea mays
  Peptide Sequence Number=SeqID_71076
atggcggtgatgggttcaacatcggacaagatgtacctctgtcagttaccaaattttgggattgaaaatgataaagatgagacaagacgggtaagctttgcctcgggcagactaataccagaaaggccaacacgcaatgggagtggagagatggcgagagtagcgtgtaccctccgtggcaagaggctagacagtggtgtatctgtgctctcggttggcatgaaccccgtctggtcttaa

SEQ ID NO: 29298 - DNA, 165 bp, Zea mays
  Peptide Sequence Number=SeqID_71077
atgtctgcgtcattaaacagctccaaatcatccatgctggacccactgcacaattacaacgagctagatctggttggggtaggggctgggaaaaccgaccagaggtccaggcatcagaaattcagcattcagcattcagattcagcagttcagcacttcagctaa

SEQ ID NO: 29299 - DNA, 780 bp, Zea mays
  Peptide Sequence Number=SeqID_71078
atgctggaggttcaaggtctggtcacgcgagtggtggccatgagtgtggtcgatctgcttggcgtggtcgtggaagccattttggaagccgcttccatagaggatttgcaagagagaccggtgaaggatctcgtagcagggatgagaaggacaacaaacgagcagaggaagagggccatgcgcctgatgacaatggcaagaaacacaaagctgagttgtgttgtgagatctgaggagaaccacgtgtcgatggattgtcccgtgttcaatgggtcgaaaccaagtgcaatattatgcgacatcatggggggtgagtcgggtttcttccagattccaacttatgggaccaaagatattgtggttggggaagggctttatgaaattttctttaaagttgataaggtttgcagaaatgaggtgtgggaggattttaagcctcacgaaaattctgagggaggagataaagggcagcatgaggacctggatgatgagtttgatgggcttgagcttgaggacaatcaaccgaagccagtgtctaatttgaaagataatgtaatggaggattcggctactactggtagtggaaatcagcagacggatcaaagaaatgttgaggcagctcaacttgttttgggagagacactaaaattaacacccacggttgagccttgggatgatacagcagaaaataatactcctagcttttctcaggatgctggagttgttgctgcccatgcatctgaggccagtggctttggcgttcttcattcgggtgcctag

SEQ ID NO: 29300 - DNA, 1491 bp, Zea mays
  Peptide Sequence Number=SeqID_71079
atgaaggaggaggtgaagaaaatgttactggatgttggatcctctgatttgtctcataagttagactgcattgatacactagaacggcttggactggattaccactataccaaggagattgatgaattaatgtgcaatgtcttcgaagctagggatcaagatcttgatcttactacaacatcacagcttttctatttgcttaggaagcatggatatcatatttcttctgatgtatttttgaagttcagagatgataaaggagatatcgtaacaaatgatgcaaggtgtttactgaggatgtacgaagcggcacatgttagagtgaacggtgaagaaatacttgacaatattctcattcacaccaagagacaacttcaatgtattgtagatgatctcgaaccaacactgcaagaagaagttagatatgcattggagacacctcttttcagaagactcaacagagtacaggccaggcaattcatctcaacatacgagaaaagcactacgcgtatcaatatgctcctggagttctcaaaattagacttcaacatcttgctcaccctatactgtgaggagctaaaagatcttacgctgtggtggaaagagttccaagcacaggctaacacgacaatctatgcacgagataggatggtggagatgcatttctggatgatgggagtcttctttgagccccaatactcctattcacgaaagatgctcacgcagttgtttatgatcgtgtctgtactcgatgacttgtatgacagccattgcaccacagaggaaggcaacgccttcactgcagcattacaaaggtgggatgaagaaggcgtggagcaatgcccaacatacttgaggactctgtatacaaatatacgtgccaccataaaagccatcgaggaggacttgaattttcaaaacaacaaacatgcaaagttggtaaaaggactgataatcgacatggccatgtgctataatgccgagacagaatggcgtgacaagaaatatgtgccagccaccgttgatgaacatctgaaaatttcagcacgcagcagtggctgtatgcacttggtgagccaggggttcatttcgatgggagatgtggcaactagcgaggccctcgagtgggcctctacctatcccaaaatcgttcgagctgtctgtatcattgcacgcctcgctaatgatataatgtcgtacaagcgagaagcatcaaacaatactatggtgtctacagtgcaaacttgtgcaaaagaatacggcaccaccacagtagaacaggccatagaaaagatcagagagctgatcgaggaagcgtggatggacatcacccatgagtgcctcagacagccacagccgaaggctcttctagagagggcggtcaacctggctcgtacaatggattttctgtacaaagatgcggatggatacacagattcacggagtatcaaaggcatattggattcattgtatgtgcatctaatagactaa

SEQ ID NO: 29301 - DNA, 1728 bp, Zea mays
  Peptide Sequence Number=SeqID_71080
atgctcttggggttcatcgtctctgagcggggcatcgaggccaacccggagaaaatcgcggccatcaccaacatggggcccatcaaggacttgaaaggcatacagagggtcatgggatgccttgcggctctgagccacttcatctcgcgcctcggcgaaagaggcctacccctgtaccgcctcttaagaaaggtggtcagcgccgcgatcgtggttgagagacgagaagaagggcatgcattgcccgtccagaggccggtctacttcatcagtgaggtactatcagagaccaagatcccctacccacaaattcagaagctgctgtacgcggtgatcctgacgcggcggaagttgcgacactacttcgagtctcatccggtgactgtggtgtcatccttccccctgggggagatcatccagtgccgagaggcctcgggtaggattgcaaagtgggcggtggaaatcatgggcgagacaatctcgttcgcccctcggaaggccatcaagtcccaagtcttggcggactttgtggctgaatgggtcgacacccagcttccagcggctccgatccaaccagaactctggaccagatttttcgacgggtcgctgatgaaaacaggaacgggcgcgggcctgctctttatctcacccctcgggaaacacctccgctacgtgctgcgcctccatttcccggcgtccaacaacgtggccgagtacgaggctctggttaacgggttgtgcatcgccatcgagctaggggtccgacacctcgacgctcgcggtgactcgcagcttgtcatcgaccaagtcatgaagaactcccactgccgcgacccgaagatggaagcctactacgacgaggttcggcgcctggaagacaagttctacgggctcgaactcaaccatgtcgcccgacgatacaacgagactgcggacgagctggctaaggtagcctcggggcgaacaacggttcccccggacgtcttctcccgagacctacatcaaccctcagtcaagaccgacgacacgcccgaacccgagaaggcctcggcccagcccgaggcaccctcggctcagcccgaggcaccctcggctcccgagggtgaggcactatgcatcgaggaagagcggagcgggaaggcacccaggggctacacgcacctgctggtcgccatcgacaaattctccaagtggatcgaggtccgacccctaaacagcatcaggtccgaacaggcggtggcgttcttcaccaacatcatccatcgcttcgaggtcccaaactccatcatcaccgacaacggtacccagttcaccggcagaaagttcctggacttctgcgaggatcaccacatccgggtagactgggctgtcgtggctcaccccatgatgaatatgcaagtagagcgtgccaacggcatgatattgcaaggactcaagccacggatctacaacgacctcaataagttcggcaagcgatggatgaaggagctcccctcggtggtctggagtctgaggacaatgctgagccgagccacgggcttcacaccgttctttctagtctatggggccgaggccatcttgcccacagacttagaatacggttccccgagggcgagggcctacgacgaccaaagcaatcgagctaaccgagaagactcactggaccagctggaagaggctcgggacatggccttactacactcggcgcggtatcagcagtccctgtga

SEQ ID NO: 29302 - DNA, 522 bp, Zea mays
  Peptide Sequence Number=SeqID_71081
atgggcgttacctgccctcgcaaagtcatgttctcaaggtgcaaaattggatatctgatttacatagtagccgactcaagggctatcatcagacatcttcgattgctcgggggctacgccaactcatgggctgggtcgtcgcccacctcgccaactcgctacttcgacagcttgggggctaggccttcacccgcctcgcctactcgctacttcattgactcgggggctaggccatcgcccgcctcacctactcactactttcacagctcgggggctgggccgtcacccgcctcgccgactcgctacttcaatagctcgagggctgggccgttgcccgcctcaccaactcgctacttcgacagcttgggggctgggccgtcacccgcctcacctaatcgctactttgacagctcgggggctaggccgtcacctacctcaccgactcgagggctgggctatcgcccacctcaccgactcgctacttcaaaaactcaggggctgagccgtcgcccgcctcgctaa

SEQ ID NO: 29303 - DNA, 607 bp, Zea mays
  Peptide Sequence Number=SeqID_71082
gtgatggcaagaatgcccatcttaagacactggaagatgctgaggagaggttgcagttggtcaaggctgacatgctggactatggcagcgttgcgtccgcggtcgccggctgtcagggtgtcttccatgtcgcgagccctgtcccctccggcaaatcctccaaccctgaggaagatgtcatagctcctgctgtaactggcacactgaatgtgttgaaagcttgctatgaggccaaagcgaagagagttgttgtggaatggtatttcctttctaaaacattggcagaacatgaggcttttgcttatgcagccaaaactgggctagacattgtaactatttgcccatcattggtaattggacctttgttgcaacctgcagtaaatacaagtgttaaagtcttcctcagttatatcaaaggagatcaggagatagttaaagatggacccaaaaatcttgtggatgttcgtgatgtcgctggtgcccttctgttggcttacgaaaatctgcaggcatcaggacgatacctctgcagttcaccagcaataagagtctctgatattgtaaacatactgaagaccgaatatccaacatacacttaccctcaaaa

SEQ ID NO: 29304 - DNA, 186 bp, Zea mays
  Peptide Sequence Number=SeqID_71083
atggcggcgaggctcatcggcatcgatagtgctccagaagagagaaggccccaatcggcctggccacatgagctggctcccacgacggtagtggctcaccagagagcggtagcgctccagggaattgtcgcgctagatgtggggaagcatgccgtgtgtgaaagtcgcctagatgtgggtgaatag

SEQ ID NO: 29305 - DNA, 252 bp, Zea mays
  Peptide Sequence Number=SeqID_71084
atggccaaggagatttgggacaccctcaagatggtgctcaaaggtgataaggtcaccaagattacaagaatggagatcatcaaacgagtgctcagaaggttcaccatcaacaaaggagaagggccaaagagatatgcaagcaatgatgacagggacgaagacaagaaggggaagaagaagatggagaagaagaaattcttccataagaatggagacaaagcccatgttggcaaggaatgggactctaactag

SEQ ID NO: 29306 - DNA, 1476 bp, Zea mays
  Peptide Sequence Number=SeqID_71085
atggaggcaccggactgtccggtgtgcaccggacatgtccggtgcgccaacggctccaagactaccaacggtcggcttcgccatagaaggaaagaaatcgggcaccggacagtgtccggtgtgcaccggactgtccgatctgagcaaacggaggaaggagttgaaatagactccaagcccagatcctgttcccgggtcaaagggaactttcagaaccctaggtacactaagatgtcacctgaggaaattcttggaaaatttgcgagagggcgcaagatggcaaaggaagctaggtatgtcgacgacattgccaacgaacctcttccacactacgagccgcaacccgttgctctcaaggcgacgaccaacaaggaggcgctcctcgacagggtggcacaaattgaggtggtcgatctcaatgaggaggaaatgacgcttgtgatcatgtgcttcaagaccacagtgaagggacgcaaggactaccccaacaagagcaaatcaaggggaaatcgtacatgcttcaagtgtgaagccatgataccttccgtgaggctctctcctggtcctgcagccttctcaggctccagcctacgctcaaaattaccgtcaattccatccatctccagtctcaaaccctccaaatatgtggtctcctcgctgaaaccactctacctagcaccgctagatggtccgcgcactgccgagcttaagtctcggagacagccacttgagttccgttgttctgcttctgctgctgatgacaaggagtcaaagactcaggtggtgccagttcagtcggaaggcgcacagaggttgaagatctccatctatttcgccacctggtgggcgcttaatgtgatatttaacatttacaacaagaaggttctcaatgcattcccttacccctggctcacctccacactctccctcgcctgtggctctgctatgatgcttttctcgtgggccacccgtcttgttgaggcccctaagaccgacctggacttctggaaagttcttttcccggttgctgtggcgcatacaattggccatgttgctgctacagtgagcatgtctaaggtggcagtgtcattcacacacataattaaaagcgcagaacctgcattcagtgttttggtgtcaaggttcttccttggggagacgtttccaattccagtatatctttctcttcttccaatcattggtggttgtgctctagctgctgtcacagagctgaactttaatatggttggatttatgggtgccatgatatccaaccttgcatttgttttccgcaacatcttctcgaagaggggcatgaaggggaagtccgtcagtggcatgaattactacgcttgcctgtcaattatgtccctggtcatactgactccatttgctatagctatggaaggccctcaaatgtgggctgctggttggcaaaaggctcttgcagaagttggacccaatgttgtctggtaa

SEQ ID NO: 29307 - DNA, 2013 bp, Zea mays
  Peptide Sequence Number=SeqID_71086
atggagtttgctgcgatgaaacggagagacctgctggagctctgccggcagcacggcctcgccatccgcggctccaaagccgacctcgccgccgtgctcgcaggcgcgctctcgttgcaggggcctcctgttgctgttgctgctgcagctgagagtgtagttggtgtggtggtgaggaagggctgtctgaagcgtctgggaggtagtgctagcggtggcacttccggggcttccaagaaggtgagttttgcattggatgaaacgccagaggtgaagggacgaagacgaaggtcccaggtgattttgccactcgttgttgccaagacaagggggaggcgcaagggtaggaaggcacctagttctgcagcagtgagtggaagcggtcggcggcggaaacacgatggtggtggtggttctgctcgtggaagcgttaccagagaggttggtgcagatgccccagtgacacggtctaggatgaaagtggcgtctttacattctcacagtggggttgaaagtcagaataaccctgctaaggctgaggaaagagggaaggtggtaggaacagctactaggaggaagcagaagcgcaaggcccatgagaatgctggggatattgctaattcatgggcaggaatttctcgtaggatcacaaggagtttaagctcgtcggctgcagcagtctcattgccatgtgatgctgaggaagagagaggggctagaaaggtagaaagctcagtagcagctgatgtgatattggccaccctcgttggaaaaaagaggaggaagacatggtgcaggcctaaggccagggaggaacttcctgccgcagctctaggcgaaaggggtagctcgcagaagagtgatgttggtggcggttctgttgatcatggtgcttttcaagagttgtgtgcagatgctccagtgacacagcacgggacaaaagtggtgaatttgtgtgctgaaagtggggttgaaagtcggaataatcctactgagggtgaggaaaaagaggaggtggtagaagcagccacttacaggaaacagaagtggaagatccaggagaattctgaggatatttgtgccagagcgtcgtctggaatttctcataggaggacgaggaagtcaagctcgtccccagctgctgttctgttgtcccctgctgctgagaagatggaagtagcagatgataaggatgaacctggtgttaaggagttagctgaagttaaagtgttcgccaccacagcagtaccaattattgctgagagtacaagtaagaggaaggaagtagaccacgtccctgctgagctgaaacctgctaaggtagagttttacggcagaactacaagatcacactcaacagcagctgctgcattatcgcccactgtgattggaagcaagttaagaaaggcaggagatgtgcacacaaacggagaggtgtctaaggacttggaggttcctcgaaacgatgctcctattaccaggtcactgaggaacagagttgttcatattaacaacagcgcagttgatggaactcgtgcccggaagaagcttggaaccaagaggaagcccagtagtagaccagcaactcacgggcgtcagccacctgtacctcctgtagaggataaagaacaagttgctgtgccctgtaagttctcccaacacaggcgatcaagcagaaaccgtcctcggcctgatgaactgttaagaaacacatatttagaaaataacaaggtgaatggagtaccagtggggggcaaggacttgagtatagctcatcgattgacacataacgccgctaaggccagcgtgggagatgttgagtcgctgtcgccaggtttcgaagacagtctcaccaggagcaacaaggatgatgtgagaaccaaaggtatgcaccaaagtgttagtaacagggagttccaaaatgccaagggtggagatgtgggtaagcagccgactggaaggggatgtgttaggcgatcaacacgcatatctgcgacgtcggttcgaatctga

SEQ ID NO: 29308 - DNA, 591 bp, Zea mays
  Peptide Sequence Number=SeqID_71087
atggctgccccgcgaaccactcgccccgtcgcattaactccgcggcgggacaggcggcacctttggcaggagaagcgggcgacgcttcgccttcgccataacgaccgcgtcaaaaagactcgggctcagccccggaagacgacgaactacgcttcgcccgaccccagggctcggactcgggctcagccccggaagacgacgaactccgcttcgcccgaccctagggctcggactcgggctcagccccgaaagacgacaaactccgcttcgcccaaccccagggctcgaacttgggctcagccccggaagacgacaaactccgcttcgcccgaccccagggctcagactcgggctcagccccggaagacgacgaactccgcttcgcccgaccctagggctcggactcagccctggcctcagccctggcctcagccgacggtctccgcctcgcccgacccaggggctcagactgaacctcggcctcggaagacagactcgacctcgacctcggaggggcctccacctcgcccaacccagggctcggaccgaccacgtcacaggaggcgccaccattaccctaccccaaactaa

SEQ ID NO: 29309 - DNA, 1503 bp, Zea mays
  Peptide Sequence Number=SeqID_71088
atggagatgggtggacctgtgagcatggaggaggatctagagatggagaggaagcttgcaaaaaagctcaagttgaagaaaggaaagttgggaggtcctgatgatggtatggatgacctttttgcggaccttgggtttggtggtgactttggttcagatgatggtgaaacaaaagcatatgattggaatgtggtggaggacactaatttagacaagagaaaaggtaaaaagaaaaataaggagaaaaaggatgacacagtgatggaggaaccagatgacattgatgaagagaatggtcggaaaaagaagaaaaaaaagaagaaggatggtatggagaaggaggaactggttgatgtaggtgaagagaatggtcagaaaaggaaaaagaagaagaagatgaaggatgactcagagatggacgaaccagatgatgaaggtgttcacatggatgaagagaatgatggagcagtcctggaatctgaggatggagtgtctaatgtggttgaactgcccaaagaatcaaaagggaagtatgtacctccgagtctgcgtaatgcttccaattcagaatcagaagaaattgcccagatgcgtcgcagatctgttccacgaagtgatggctcccagataattggggatgaggttttggctagttgttcccgaggacctcgtggcaatgaacagttaagggtctcccatcaaccatgtatggcatgtttggtcggtgttgacttcagtgccaagatccttgcatctattgctaagtcatttgaggatgagtattcaaaagaagatggtctatctttgagaaaccttaccttactcttctgctatttgtgcatatttggtgttacctcaagcgatcttgtgtatgatcttctgtcgattctgagcaagcgcttgacagagctagatgtctctacagtgttgaccatcctacagtgctgtggaatgaagctgcggggagatgatccatgtgctatgaaagattttgtccttagtattcagaactctgtgaatgatcttaaattgcactctggtgttggagcagacgggaagactgatatacgtagcagaagaatggaatttatgcttgaaaccatatgtgacattaagaacaataagaaaaggcctaaagaggatccttcacaccatactcgaataaaaaagtggcttcaaaagcttaaggcagaagatgtcctcttgcgtgggttaacatggagcaggcttttggaccctgataagaaagggcagtggtggttgtctggggatgttccatctacagtagctaagattgaagatgttgcagctgttataagcaaggatgttgcagagacaaaaaaacttcttcagcttgcagctgctcaacggatgaacactgacatacgaagagcaatcttttgtattataatgagtgctgaagactatgtagatgcttttgaaaagctcttgaggctgggcctttctgggaagcaggcatgcatcaatgttcctgaagattag

SEQ ID NO: 29310 - DNA, 420 bp, Zea mays
  Peptide Sequence Number=SeqID_71089
atggacaagagcaagaagggtgggagttcttcgcatcactccgttggtaagcgaaagcgtgagccgactcctccctcggaggacttcggcgactcagagtactcggaggtggagttctcctccgagtcggagggttcatcggtccatgcctctcccccggcgtcgtctaatgactcagacgactcccaggggctcgccgcagaggtatggacctatatccgggccatcgagcacgctgggctcgcgggctcggatgagtcggagtactcctcggactcgtccgaggagggcggcggtgacggcgatggcgaggacgacgatgacggaggcaatggcgacggcggcgatgatagcggcgaaggcgacggcgggggcggcagcaagggcagcaacaagggcagcaacaaggccagtggctag

SEQ ID NO: 29311 - DNA, 483 bp, Zea mays
  Peptide Sequence Number=SeqID_71090
atgtctactgcccggaggatcgatccctttttaaaggcggctctctccactcgcattccaagcgctacgggcgaagtctccaccgacgagctgcagggttctcaccctccggcgcgggggctgggtcccacacgtcatgcgagcggaccggaaacagaagaagccaaaccgctgcacacgaagcagggcaagcgacacctttggcaggcgaagcgagcatcgtttcgcctccgccgtgacgaccgcgtcaaaaaagggaccgagaaaggggatattttgaaaaggatccttctcagcgaaggaaacaggctcccgagccctcctactgatcaggggttcgaaggctggcccctcggaagggttcgacaactgccccagagcactcgggccccgagcccattactgatcaggggttcgaaggctggcccctcggaagggttcgacagccgccccagagcactcgggctccgcgcccattactga

SEQ ID NO: 29312 - DNA, 360 bp, Zea mays
  Peptide Sequence Number=SeqID_71091
atgacctcagggcggatgctgttgccacaaggccctcacccacgtccccactcgaggggtgaggacaagcagaaggccgtcgagttggagccgtcgcaggctgagtcttctccaacacgctccaaggtcctccccctacgacacgggggctgggtcccacgcgtcatgcaagctggcccagggcagaaaaaaaaagccaaaccaccacgcgcggtgcgcacaactgcccagcggtcacgagcattcctccacttccgcctaggccagcgggcgaaagggcgggccgcgatgcaggcggcatgcaaccgcaccaagggggcgcaccctttcgacttcgacgcgtccagcatggaggcctag

SEQ ID NO: 29313 - DNA, 456 bp, Zea mays
  Peptide Sequence Number=SeqID_71092
atgagcgacgccaacgcgagtgtctcctgctcatggtgtttgttcaaggtttcaaggctcggcccccgtcttggcctcggacgacgaactccgcctcgcccgacccagggctcggactcagcctcggctccggaagacgacgaactccacctcgcccgacccagggctcggactcggcctcggccccggaagacgacgaactccgccttgcccgacaccaggactcggacttggcctcggccccggaagacgacgaactccgcctcgcccgaccccagggctaggactcagccttggcctcagacgatggtctccgcctcgaccgacccggggctcagactcgacctcgacctcagaagacagactcgacctcgacctcggaggagcctccgcctcgcccgacccagggctcggaccgaccacgtcacaggggggccatcattaccctacccctag

SEQ ID NO: 29314 - DNA, 1215 bp, Zea mays
  Peptide Sequence Number=SeqID_71093
atgggcgagacaatctcgttcgcccctcggaaggccttcaagtcccaagtattggcggactttgtggctgaatgggtcgacacccagcttccaacggttccgatccaactggaactctggaccatgttttttcgacgggtcgctgtgaaaacaggggtaggcgcgggcctgctcttcatctcgcccctcgggaagcacctccgctacgtgctgcgcctccatttcctggcgtccaacaacgtggctgagtacgaggctctggtcaatgggttgcgcatcgcaatcgagctaggggttcgacgcctcgacgctcgtggtgactcgcagcttgtcatcgaccaagtcatgaagaactcccactgccgcgacccgaagatggaagcctactgcgatgaggtttggcgcctggaagacaagttctacgggctcgagctcaaccacgtcgcccgacgatacaatgaaactgcggacgagctggctaagatagcctcgaggcgaatagcggttcccccggacgtcttctcccgagacctacatcaaccctcagtcaagaccgacgacacgcccgagctcgagaaggcctcggcccagcccgaggcaccctcggctcagcccgaggcaccctcggcccccgaggcgcatcgagcccttgttggaaacgccttccgacaaggtttctactggccgaccgtggtggccgacgctactagaattgtccgcacctgccaagggtgtcaattctatgcaaggcagacccacctgctcgctcaggctctgcagacaatacccatcacctggccgtttgctgtgtggggccaggacctcgtcggtcccttgcagaaagcacccgggggctacacgcacctgctggtcgccatcgacaaattctccaagtggatcgaggtccgacccctaaacagcatcaggtccgaacaggcggtgacattcttcaccaacatcatccatcgctttggggtcccgaactccatcatcaccgacaacggcacccagttcaccagcagaaagttcctggacttctgcgaggatcatcacatccgggtggactgggccgccgtggctcaccacatgacgaatgggcaagtagagcgtgccaacgacatgattctgcaaggactcaagccatggatctacaactatctcaacaagttcggcaagcgatggatgaaggagctcccttggtggtctggagtctga

SEQ ID NO: 29315 - DNA, 903 bp, Zea mays
  Peptide Sequence Number=SeqID_71094
atgcttcggcgccactttcacaaggccgggccacctgcgaaaggtggcagggcccacaacgacgataagaaggaggatcacaaggcaggggagttccccgaggtccacgattgcttcataatctacggtgggccagtggcgaacacattggctccgcaccgcaagcaagagcgtcgggaggtctgctcggtaaaggtggcggcgccagtctacctagactggtccgacaagcccatcaccttcgaccagggcgaccaccccgaccgcgtgccaagcctggggaaatatctgctcgttgtcgaccccgtcatcggcaacgtcagtctcaccaaggtcctcatggatggaggcagcagcctcaacatcatctacaccgagaccctcgggctcctgcggatcgatttgtcctcggttcgggcgggcgcgacgccttttcacgggatcatccccaggaaacgcgtccagcccctcggacaactcgatctacccgtctgcttcgggactccctccaacttccgaagggagaccctcacgttcgaggtggttgggttccgaggaacctaccacgcagtgctggggaggccatgctacgccaagttcatggctgtccccaactacacctacctcaagctcaagatgccgggccccaacggggtcatcaccgtcggccccacgtaccggcatgcgtacgaatgcgacgtggagtgcgtggagtacgctgaggccctcgccgaatccgaggccctcatcgccgacctggagagcctctccaaggaggcgccagacgtgaagcgccatgcctgcaacttcgagccaacagagatggtcaaatccgtccctctcgaccccaacaacgacgcctccaagcagatccggatcggctccgagctcgaccccaaatag

SEQ ID NO: 29316 - DNA, 1596 bp, Zea mays
  Peptide Sequence Number=SeqID_71095
atgggatgcattgcggctctgagccgcttcatctcgcgcctcgacgaaagaggcctacctatgtaccacctcttaagaaagatcgagcgcttcacttggacccccgaggccgaggaagccctcgtgaacctgaaggcgctccttacgaacgcacccatcctggtgccccccgctgccggagaagccctcttgatctacgtcgccgctaccactcaggtggtcagcgccgcgatcgtggttgagagacgagaagaagggcatgcattgcccgtccagaggccggtctacttcatcagtgaggtactgtctgagattaagatccgctacccacaaattcagaagctgctgtacgcggtgatcctgacgcgacggaagttgcaacactacttcgagtctcatccggtgactgtggtgtcatccttccccctgggggagatcatccagtgccgagaggcctcgattaggattgcaaagtgggcggtggaaatcatgggcgagacaatctcgttcgcccctcggaaggccatgaagtcccaagtcttggcggactttgtggccgaatgggtcgacacccagcttccaatagctccgatccaaccggaactctggaccatgtttttcgacgggtcgctgatgaaaacaggggcaggcgcgggcctgctcttcatctcgcccctcgggaagcagctccgctacgtgctgcgcctccatttcccggcgtccaacaacgtggctgagtacgaggctctggtcaacgggttgcgcatcgccatcgagctaggggtccgacgcctcgacgctcgcggtgactcgcagcttgtcatcgaccaagtcatgaagaactcccactgccgcgacccgaagatggaagcctactgcaacgaggttcggcgcctggaggacaagttctacgggctcgaggtcaacctcgtcgcccggctatacaacgagactgcaaacgagctggcgaagatagcctcggggcggataacggttcccccggacgtcttctcccgagacctacatcaaccctcagtcaagacaaacgacatgcccgagcccgagggtctggacctcgtcggtcccttgcagaaggcacccgggggctacacgcacctactagttgccaacgacaaattctccaagtggatcgaggtccgacccctaaatagcatcaggtccgaacaggcggtggcattcttcaccaacatcatccatcgcttcggggtcccgaactccatcatcactgacaacggcacccagttcaccggcagaaagttcctggacttctgcgaggatcaccacatccgggtggactgggccgccgtggctcaccccatgacgaatgggcaggtagaacgtgccaacgacatgattctgcaaggactcaagccacggatctacaatgacctccacaagttcggcaagcgatggatgaaggaactcccctcggtgctctggagtctgaggacaacgccgagccgagccacgggcttcacaccattctttctagtctatggggccgaggccatcttgcccacagacttagaatacggttccccgaggacgagggcgtacgacgaccaaagcaattga

SEQ ID NO: 29317 - DNA, 387 bp, Zea mays
  Peptide Sequence Number=SeqID_71096
atgaacgtatgtgagctcactcttgctgtctcacacccccccacaggtcaagatcaggtaccgcaggatgaggcgcatggaggatgccgtggcgagttcgtgagagattgtaatcttgccgacggagagtatgtgctcatccccgtgcgggacctgtccaagaggaggaccaggagcaggggtgttgctgctattgaggatctccccgcagccccagcaattgaaggcaagccccggctatggtgggtacaagtgcggtcactgcacggcggcagccgaggtaccatgcaggaaatggttgatggtgtgacttggcctaccaccctgccaccgggttggacggtcgagtgggatgttgctccggcaggagaggagcaggaggaatag

SEQ ID NO: 29318 - DNA, 143 bp, Zea mays
  Peptide Sequence Number=SeqID_71097
atggcggctcccgactctccccctacgacctcacctctctgcgcggcaaggagcacatggcaatggcggcgcccagggttctcattcctaggacgagaggcgctggccgagtcttatagggcgcgagattgtagctgggactg

SEQ ID NO: 29319 - DNA, 186 bp, Zea mays
  Peptide Sequence Number=SeqID_71098
atggcggctcccgactctccccctacgacctcacctctctgcgcggcaaggagcacatggcaatggcggcgcccagggttctcattcctaggacgagaggcgctggccgagtcttataggacgcgagattgtaactggggctggcaacaaaaactccagcatgatgcatcttttattgagatataa

SEQ ID NO: 29320 - DNA, 2139 bp, Zea mays
  Peptide Sequence Number=SeqID_71099
atggacttgctgcacactgaggtatatgatgcacttaacaatcttgagaagagtatcattactgatgatgattcaaccaagacaagcatacagaggcaaatagttgagatgaaagatttgcttaatgtcgaaagaaatgagtatgaggttttgcttcttccagttataatggggagttctcattcattcaaaccaaatattgatattttggagcttaatcgtgttagacgtagtctcctcctagatgctcacacttgggaccgcaggttgtgcggcatagattcactcgaagcagatagccatatttccagaactgatccgtttaatctagagaaaacccaaggaatcaatgaagggagatctgatttgcttcagactgttaggaaacacggaggaacatatgaagaaccatgtccccaacactcttcagaaagcccaaggaaatctctcttgtctacagagggccatctgaatgataaaaaatatgtcatggttgagacagatttgccggttgggctagtggatggtgatgcaggtcttgatttgatcttcaacaaattgaatacatgtgaagaaggacgttgtctatcaaaatatcctagcaagacaggaccagtagagaggttaccttcacttgcatctattttagctgacaaaatagatatggcatggtctggatttggtgaattagactacaatcttccacatggtttgagcaaagcaaatgaaaatacatctttgaacttgtttggcaatccaagttacaagaaggctactggtccagtccgaatccattcatttgatactgtgttgagattacatcagcgagaacaaactggagtaatacctgcttcactccattcagcactgaaatcaattgattcctttagagacttgacaagccttgttaaggatccaatgacaaacatgcggagagccttttctcaaatatctcccaggacaagaggaaacttaaatactgttcttacacgtgctcccaagtatatcacatcagcttctcgtatggtgaatgatggggctcgactgcttctgcccaatattagctgtgaaggttctgtttttgtcactgtctatgatgacgagccaaccagtgtagtgtcatatgctatgacatcacaagaatatgctgaacatgtcacacataaaatgaatgcaaatactagcttttcagattttactagtagtaatggacttgatggatctctgtcctcacatgaagagctttcaaattttagaggagctcacttcagattatccttcgatgatgatgcatctcctactgatagtacaaagttttctgtcacttgctattttgcaaggcagtttgctgcacttagaaagaaatgttgtccaagtaatagtgattacatacgctcgataagtcgttgtaagcgatggagcgcgcaaggtggaaaaagcaatgtttactttgcaaagacaatggatgagagattcataattaaacaagtcaccaagacagagctggactcttttgtagaatttgctcctcattacttcaggcacttgacagaatcattgacttctagaagccctacttgcctggccaaaatattggggctttatcaggttagtatcaagaattcaaaaggtgggcgtgaggtgaagatggatctgatggtgatggagaacatactcttccaaagatcaatatctagggtgtatgatctgaagggttctgtgcgttcacgttataattctgatgcttctggtcacaacaaagttcttctagactctaatctcatagaagcactacatacaaagcctatttttttggggagtaaggcaaaacaaagattggaaagagctgtctggaatgatacatcatttcttgcgtctttggatgtcatggactactcccttttggtcggtgtcgacgaagagaaaaaagagctggtggttggcatcatcgatttcctgcggcagtacacctgggacaagcagctggagacatgggtgaaggcatcggggatcttagggggccccaagaatgagtctcccaccgtgatttctccaatccagtacaaaaagaggttcaggaaggccatgtcgaggtacttcctcgccgtccccgaccaatggacctcgaaaggtggttaa

SEQ ID NO: 29321 - DNA, 697 bp, Zea mays
  Peptide Sequence Number=SeqID_71100
gaacaactatctcctccccaacgaggagaaacaagccccgctgagcaccggtgggcacaagggccccgccgccgccgaggagtctactggcgtgttggacgttggtgacgatgtgttgcttgcttcccctctcgtcatcgacgctgacgccgtcgacattgacgtgcctgctccagctcccgttgtcaccgctgatgtcgacgacattgacgtgcttgctccagctcccgttgtcagcgctgatgtcaaccctgttcataccaagcggggacgcggacggcccccgaagcccaaggaccccgttgctgagggctacggtggtaagcccgctacagctcccgtcgccgccgctgccgtgcctgtcaagcgcgggcgcggacgtccgccgaaaccggggggggggggtcgccgaggactcagctccccactgcgtcttccgtcgtcaccactgatggcaatgcccgtgccctgtgaagcgtgtgcgcgggacgcccccccaaagctcaaggaccccatcaatgtggccactgaccaggccaccagcggcatgctcagcccacgtggccgtgggcgcccgcccaagaaggccaaggtcgccgtggaagatcccagaggtgaacctgctgcagctcgagacgttgttgttgatgccagtgctgtacatgtcaagcgtgggcgtggacggcccccaagatga

SEQ ID NO: 29322 - DNA, 728 bp, Zea mays
  Peptide Sequence Number=SeqID_71101
tccggtggaggtacacttccaattacagcaaggacactggaaaccataattcgtctatcgacagctcatgccaagatgaaactgaggcatgaggttctgaaatccgatgttgaggctgcattgcaagttctaaattttgcaatataccacaaggaattgactgagatggaagagagagaacagagagaaatggagatgaaacagcaagctgccctcccacctgccatggagaagtttgacgtcacaccatcgccggcaccggcggcagggcagccacgagcgctgccgctcacgttctacgacctcgttttcttggccatcccgcccgtacaacgcctgttcttctacgacagggccgacctgctcgacgtctccgacttcacgctgggcgagctgccacgattcagggactccctcgccgccgcgctacaccacttctacccgttggcgggggaagctaacgtgcgagctggtcgacgaggaggccgccgcgccgccgaagggaccgagggaccagggagcgccgggaggaggaggagggatcgagggagcatggagcgccgggtggatggagcagccgagcagggagccagccagccagggaccaccgggatgaggcagcagccgagcagggagcaccgggagaagggagcagccgagtgccgcgcccgacaccgagtcgccgacgccgcgagacagagagccgcggccgccgcacggagacgcag

SEQ ID NO: 29323 - DNA, 399 bp, Zea mays
  Peptide Sequence Number=SeqID_71102
atgggaaagagccaagcatctgagacaagatcggatctcataccaaagttgaagccaagggaggtcatgagagccttattgaagatgacgatggagacggaggacaccaccgagaggctgagcgccctcgccgtccctagctggaacttgtccctgaccaccccatctccacctcgccacagcaagaagactacaagcagagtgcgtcatagagcaccgatccacaccggcgggcaacacctgcgaggcacaacaaccgcatcgagaataacaggacacaaccatgagctagtttttccggccaaaactacctctttgatcccaaaaaacgaaattcaagcaaacaaagatgtatctgggaagcgagctcatggctgtgaagcgaaatcgtggatctga

SEQ ID NO: 29324 - DNA, 939 bp, Zea mays
  Peptide Sequence Number=SeqID_71103
atgccgccgccgccgccgctcctcgagccgcgcgactacctcggcgccggcgccacctcgtcgtgctgctcgtcgtgctgctcctccggccgcgagggcgcggggccccacctcgcgctgcggctcgggcttccggggtccgacgactcccccggccgcggcgcggacacggagcacgcccgcgcccacgtcgacgccgcgctcaccctcggccccggccccggccccgcgcctcccaggggcagcgccaagcgcgggttcgccgactccctcgaccggtccgcgaagctggacggcgttgccgcggatgacgctgctgggggcgtcacgcgggtagctggagctgctgccggagctccgcccgctgccaaagaccttttcatgatagcttttagtgccatggacagggcacaagttgttggatggccgcctgttaggagctaccggaagaataccctagctgccagtgccacaaagacaaatgggggagatgaaggtaggagtgaggcgggatgctgttatgtcaaggtcagcatggatggagccccatacctaaggaaggtggacctcaagacctattcaagctatgaggatctctcgcttggtctggagaaaatgttcagttgcttcatcactggtcaaaacagttcatgcaagacttcaagaagggataggcttactgatggttctagggttgatgcccttcaggaccaagaatatgtccttacttacgaagataaagatgctgactggatgctcgttggtgatctgccctgggacttgttcaccacattttgccggaaacttaggatcatgagaggctctgatgctgctggcatggttgctgatcactatcatctgcccttagtggtggtttataatcaactaaactatgcatttggacatgctcttgttttggaaacacaaaaccagccttag

SEQ ID NO: 29325 - DNA, 276 bp, Zea mays
  Peptide Sequence Number=SeqID_71104
atgaggccacgcacgcactctggagaccgtgcaggagcactcaggccaactattgcgaccgcactagcgacgcagacgcaaaaccacggcgacggcgagttatccccgtgcggaacgctgcggcgcaatggtggctggcgagggattggggaaaaggaaggagaggaagggataaggaacggcagcgctaggtttatacccagggagggctcggacttgcaccaggctcggagtagtcatggcgccgcaaagctcgccgagatccccgcgaagtag

SEQ ID NO: 29326 - DNA, 741 bp, Zea mays
  Peptide Sequence Number=SeqID_71105
atgggcctctggtctggtcccacaaccgcagtccagagtccagagcgagggaagtcgcagcctctaccctctagtggcggccgcggcgcgaggtcgtactgtctccgaatcgaatcgaccgctccaccagacacacgaggtggacgtgcgcagcggctggtggctgcccctgccgctgtctgtctgtctctctctctcctgccgtgtgccgtgccatctcccctcttccgtgccgggctgcgggagccgggaggcgccgagcgagccagccaggctgccaggagacgcgcgcacggcacggcgcgccgcccgcctgccctgtcttgggcgaacctggcccggatttcgtggcgactttaccggacggtggcgcccgcctccccagtttggccgtgctgcatccgcagatgcaaatcgtcgttggaactcatcaacacctgtaactttcgaggcgaagcgaagcatcatttgtactactacgtgcggggcagccgggcactagctagtcgctgcgattattatgatgtcccgttcaggtatcatcatcgtcagtctgatgggacacacagcgcgcaggtattcgacgcaatgggcggctcggaattgatggcgctggtgtcgtcgtcgtcgtcttcggcgcgacaatacctgcgctgcgctgcgcagcgcaggcagccatgcacgcaccaccggcagtgccagcaaaccaccaccactgctgtagcctgtaggaaggagtag

SEQ ID NO: 29327 - DNA, 270 bp, Zea mays
  Peptide Sequence Number=SeqID_71106
atggctgttggcagaaccaggggaatgggaaaggcaaagggaaagagagggaatgggaatggcagcgggcgcgagagaggggacggggaatgggaaaggaaagtaatgagaatgtcagccctcacaagagaggggaatgggaaaggcaccggcgcaagacaggggaatgagaaagggagaacagggaattggaatggcagaacaggaaagctttgtccgagttatataggaccgtctactatcttagcccgagttggcagcttggcttag

SEQ ID NO: 29328 - DNA, 357 bp, Zea mays
  Peptide Sequence Number=SeqID_71107
atgatgagtgacatcaactccaccaaattgagcatcctttgcagcttggaccgtgccgaggtcgtcaacaacgatggcggcgtcgcgcagcgaaacaagagcgatgatgacatggtcgtcgaggcattctgtgtcaagtggtctctcgccactgcccaagagaagtcagaggccgagttgctagagcttctggggaggcttggccaactagaattcatggaggacgccatcaggaaaatagttctctggttcccagttccttttagaagaaaatatggagcctatattatgcgcctagaaggtggtgaattgagctcacagcttcaccctggaacacaatcttttggcaatagttga

SEQ ID NO: 29329 - DNA, 213 bp, Zea mays
  Peptide Sequence Number=SeqID_71108
atgcagttggaaccaaaggatccagtgctctcgaagctggataatggcgaggccaagaatggggttcctggagacattgcgaggaagtttatcttcctgctaccacaacaaagatatgggagcatcatcaccatccttcacaacatggaggacttgagcaacatgaccccgaccattgtgattgtgaaaatcgcggcttttgagatatcgtga

SEQ ID NO: 29330 - DNA, 510 bp, Zea mays
  Peptide Sequence Number=SeqID_71109
atggagtcccaggatgggtacttcacttctttattgaaccaagaatgtgtagatggatttggctcttatgattgtgtggaagttgacaatgcagtggcagagttgccgatggcgaatgaaatgaacttgcagccgattaaaaggggtcgatccaagaatttcagtgaagaggaggacctaatgttggtttcggcatatatgaatgaagtgaatatttttcaaagttactatgatgccatagaaaggaaaaatcatagtggcaagatgagcgatgacaagtttgctgaagcgaaagcagaatttcgagaaaaacaagggaagacattttctgtcttccatgagtgggtgattcttaggcatgagccaaagtgggcgttcagagaatcaaagctcaaagaccaccatgaagccaacaatggtaatagtgatgcacctgtcaacattgacatatcgccggggaggaaaagccgagaaggaaaaagcacgcgagagagagcatggtgcttgtga

SEQ ID NO: 29331 - DNA, 372 bp, Zea mays
  Peptide Sequence Number=SeqID_71110
atgcagcggggcgagttcgtggcgcagcgccatgatgcgctcgagcagacgcggaggtcggcggcgagggcgtcatgcggggagtggaggacgagggagatcacacgcggtagccacggcaagttctatacaattccaaatcccatcttcgattcactcggcccccgagatgccgctgggtccttcgtgcaaacaatggcgggggctgccgttggcgctgccgacgggcagccgccacagtcaatcttcgcccgaggagattcgggcgcgtgccgccggctggcacagcaagtggaggtcggcgtcggcctactgtgggagctagagctcgccgcgccgtggagggcggtaccaccagagtgcgcgctgcac

SEQ ID NO: 29332 - DNA, 315 bp, Zea mays
  Peptide Sequence Number=SeqID_71111
atggcgcaggaaggtggagcaacggcgctgcgaagggtggctgctgggcgccatagaaggagagtagaagccgagttccctgcgtgctgccgtggggaagaagggctccctggccgatgcttcgggtgttccctgaccgcggcggggaagacctggggcgccatggctgagggcgtgaaaatttgggcgctgggagctgctgccgctgcttgtgtagtagctcggctaggggaggaagaagactgggagggcgctcggctgctcgccatggacagcagagagagggaggaagggatgggcggcatgggagcttag

SEQ ID NO: 29333 - DNA, 684 bp, Zea mays
  Peptide Sequence Number=SeqID_71112
atggaggcgttatcaccattaatggaagagagtgaatcggggagaagggagaaacggccgggtgactgggcgcgaggcggcattgggcgcggggtgttagagaagaaggacgtcgagcgcgatcgggtcttcgggctgctcctggcgcggctcggtgtcacgggtcggcgttgcggcgtcgcgcgctggcttctgcggtcctggcgcgggtctgggcaccggggctctgggtccgatctttctggcggcgcgtcgggcttgggcgtcgggcggcctttgtcgagtttcctggcggcgtccgctaggagagagcaggggagaagagagaggaatgtcaggagggtggtggcggcggctaagcaaaggagcaggggcgcgcggttagacctcaacaccaagaaatccaagctctaccgccccaccaccacagcatgcaaatcaactattaccaccaccaccccaccgaagcaagaggacttcgctgaccaaccctttcaaggggtattccacatgatcaccgaaggatccagctccgaattcgacacaaaatggcagaagaaagaccactatcgaagggtcaatcatgtagccctcaccgggccagttgttcaaacaaagtggtccaatgtaccactcaccttcgacgcaagtgttggggactcgttctcaaatgctatgagttaa

SEQ ID NO: 29334 - DNA, 384 bp, Zea mays
  Peptide Sequence Number=SeqID_71113
atgacggaggtggttgctcgagctcctgttgtcgatggtggtcgtttgagttcaccggagcagtacatgttcttaacctggggggatgtgagtacagcaagggtgagctcacatacgttcattgctcaacaagttgtggggaataatgtgcatgagctcacatacagtggggctcatgtgaagtgtaaggattaccaaagaggatggttaaagttgagcattgcttttaagcataagctattacaggaaacttcatcttcaagatacaagcttctcccttatgacaaaggcatacaagatgaagacagatccaaagaggtaagagtaaacgccaaagctatcaccagatggacagcttcggctcgtaatgaagatgatgaataa

SEQ ID NO: 29335 - DNA, 519 bp, Zea mays
  Peptide Sequence Number=SeqID_71114
atggcttggagagcgagcttgggatggagagggaaaagagctcggttgcacttttatagaggaggagagggagatgagagggcgccggggagggaagaacgggcagccttaagcaccaataatggccccgagaagagaaatggcggggagggagcaatggaggtgttatcaccattaatggaagagagtgaatggggagaagggagaaacgaccgggtgactgggcgcgaggcgacgttgggcgcggggtgtcagggaagcagggtgtcgcgcgcggtcgggtcttcgggctgctcctggcgcggctcggtgtcgcgggttggcgttgcggcgtcgcgcgctggcttctgcggtcctggcgcgtcggtcgggcggctcggtgtgcatggcacgggtctaggcgtcggggctctgggcgcgatcttctggcggcgcgtcgggcttgggcgtcgggcgggcttggcgagttcctggcggcgtccgctgggagagagcatgggaagaagagagaggaattga

SEQ ID NO: 29336 - DNA, 162 bp, Zea mays
  Peptide Sequence Number=SeqID_71115
atggcgccgcattggcccccttcgttgacatgcacgactaatggctgcaccctttgccttagggcatcgggtcttcgggtcccgtcatggccttcacatgttctgattgattgtcacacccggttttggaaggtgcataaagggttcaacacaaaccaataa

SEQ ID NO: 29337 - DNA, 246 bp, Zea mays
  Peptide Sequence Number=SeqID_71116
atggctcccaagaaagcaacttcaaaggctaccacctccatcgacaacgcagcgaaggcggcccttctcgctgagaagaagggaaaagcagcccttgttggagacgtaccacatgaggccctcgaggatggggcagtcaatagcaagcgacaccgccaagagaacccacccacaccaaagggcaccgttcgcacatgcaactctgagggactacctcggaaccccccactaggcttcaccccctag

SEQ ID NO: 29338 - DNA, 558 bp, Zea mays
  Peptide Sequence Number=SeqID_71117
atgaatttgacgacgctgttcggcttgcgcatatcaccgaacacctgctggggcatcgtactgcactgtgactggtggagcgagacaaggagccagacgtcgatggtcggcgatgtcgacggccggacagggagggagctcgaggaggcacggactgtggccatggcgaggcgagtatgggatgagctcgacgaactgcgacacgaggagcgaggacgtgcgtccagcaagagggtgacgcgcgctgggatgggtgccgagcagagcttgggcgccaaggaaggtgaggccgtcggcctgaggtggggaaggagaggatcggctggcgttgaagatgggcaaagggaaggcgagtctggcgagtgcacggcatggggagcagccgagacaagagctcacggcaaggaaatctattccggggagccgatcgcgagagccaaggagagcgcttgcctcttcgctagtcgtcggctgggggaaagcctcgggacgctgggatgggtatgcaccgacaatgccccgccgtgtggaagggcctgcgccgccgtcctctactag

SEQ ID NO: 29339 - DNA, 183 bp, Zea mays
  Peptide Sequence Number=SeqID_71118
atgagttccacagctgttggtctgtggacgaattccaggctggggttgaggtttttcgtgtggattgggcctggtgtgtgggacgtcctcaacttctttatgtttgtttcacgagcacttaggatgacttttattgagatggcttcgcttgaagaatctgaaacaatgccaggctcaacataa

SEQ ID NO: 29340 - DNA, 2004 bp, Zea mays
  Peptide Sequence Number=SeqID_71119
atgagttcctccccgtcctttggtctcctggccttagcagcagtactcctagcactgaacttagcacaacatggctccctcgccgcaaccgtcggccccagggtcatcgtcgtcggcgccggcatgtctggtaataacaaggcacccatatacgtcgttcgtctatgcgactatgccttggtgttacgcatcatatacatatatatctgcgctgtgttatatgcaacacatggatctcttcttccagggatctcggcggcgaagaggctgtcggaggccgggataaccgacctgctgattctggaagcgacggaccacatcggcgggcggatgcacaagacgaacttcgccggcatcaacgtcgagttaggcgccaactgggtggagggcgtgaacggcggcaagatgaaccccatctggcccatcgtcaactccaccctcaagctccgcaacttccgctccgacttcgactacctcgctcagaacgtctacaaggaggacggtggcgtctacgatgaagattacgtccagaagagaattgaactggcggacagcgtggaagagatgggggagaagctctctgccactttgcacgccagtggcagagacgacatgtctatccttgccatgcagcgcctcaacgaacaccagccgaacgggccggcgacgccggtggacatggtggtggactactacaagttcgactacgagttcgcggagccgccgcgcgtgaccagcctgcagaacaccgtgcctctcgcgaccttcagcgacttcggcgacgacgtctacttcgtcgccgaccagcggggctacgaggccgtcgtctactacctcgccggccagtacctcaagaccgacgataagtctggaaagatcgtcgacccgcgcctgcagctcaacaaggtggtgcgagagatcaagtattccccgggtggcgtcaccgtcaagacagaggacaactcggtgtacagcgcagactacgtcatggtttctgcgagcctgggtgtcctgcaatccgatctcattcagttcaagcccaagctacctacatggaaggttagggcgatctaccaattcgacatggccgtgtacaccaagatcttcctcaagttccccaggaagttctggcctgaagggaaaggaagggagttcttcctctacgccagcagcaggagaggttactacggagtgtggcaggagttcgagaagcagtaccctgacgccaatgtcctcctggtcaccgtgaccgacgaggagtcgaggcgcatcgagcagcagtcggacgagcagaccaaggcggagatcatgcaggtgctgcggaagatgttccccggcaaggacgtcccggacgccaccgacatccttgtcccgaggtggtggtccgacaggttctacaagggcaccttctccaactggccagttggcgtcaaccgctacgaatacgaccagcttagggcaccggttgggagggtatacttcaccggcgagcacaccagcgagcactacaatggctatgtccatggagcctatctttcaggtatcgactccgctgaaattctcatcaactgcgcccagaaaaagatgtgcaagtaccatgtccagggaaattgttttttcgaagcatgtcgaatgatgaattcaagatctctggtcgacaccgctttgggtatcgacagtgaaattttctctgacaggctctcgtttatttgctctgttgaccttatttccgaaggtccagccttagtgcaatcaggagcaacacttacgtcgatagctttttccaactctccaggtttgtctttggaaatccttgtaggaaaaggagtagccattttcgaaggcctcaaaacaacgcctagaatgctggccatccttctccctttcttgggtgtctctactaaagcagatgttattcttgacagcccttgccccaccggagaactctacggcttcggctgcttctcggccttggaactttctgtttttaatttctccatttga

SEQ ID NO: 29341 - DNA, 231 bp, Zea mays
  Peptide Sequence Number=SeqID_71120
atggcttgcccgcctcataggcacgaccgcggccccaacgagggcgcatggccctcggtggccggacgtggaggcgcgggccccaggcgcccagacggccccggcccgacacgacccggcgtggcgaggcgtcctcgtcgcggccttcggctggcgcggaagcgccctcgacgcggcccttcgaggcggctcggcgctcgccggctccggcgatggataccagcacgatga

SEQ ID NO: 29342 - DNA, 240 bp, Zea mays
  Peptide Sequence Number=SeqID_71121
atggtccgcggcctccccgtggcggcccggcctcgccccgctcggcgcggcaccctccccacgcagctcacccagccgtggcgcgacccggttcgccggccatggcggctcggccccgcccgccttggcgtgtcccgcccctgcgcagcgtggccccggcccggcgcggcttcggctcgcgcggccgtggtgcccctgcgtagcgcagcgcgtgcgctgctcggccccggctgcatgtga

SEQ ID NO: 29343 - DNA, 555 bp, Zea mays
  Peptide Sequence Number=SeqID_71122
atgtcgatgggcgcaccggacagtctggtgtaccaccggacactgtctggtgtgccagccacgtcacccaaccgttggggttcgggagcagatgaccgttggaggctttgtcttctagtggcaccggacagtccggtgccgcaccggacagtcgaccattgcgcgaaggagtcgttgctccgctggtgcaccggacagtcaggtggcacaccggacagtctggtgaattatagtggagctacgctggagaaaaccgagattgccgagtttgatcctgtacggtcctggtgcaccgaacactgtccggtggcacaccggaaaaggttaaaccctatttccctttcagctggcgagggtgttctatggagagtaccagtgcggaagtcattgtgtgcgggctcgagaggccatgatggcagggcgattcctcaccggggcgggttccccatcgcagggccaccatacgctgtgaccctgcaacctcgtcaccattcggtaccttcggattcggatcagaaccgcagtgtgagaagcacaaaagaatacgaaggttga

SEQ ID NO: 29344 - DNA, 216 bp, Zea mays
  Peptide Sequence Number=SeqID_71123
atggtgctctacgcgcacgagctctacaatggcttgcactcccacctccaggcctctggcatcgacggcgtcaaggtcgacgtcattcacgtctggtgccgttcatctccatccgcttctcgcgtggggcttctgtcttgccaccggccagcctcgccggtgaagtccgccaccgtcctcaggtctccgagctctggagccggcctccttcattag

SEQ ID NO: 29345 - DNA, 276 bp, Zea mays
  Peptide Sequence Number=SeqID_71124
atgaagtgctcgcttgagagtgcagtgaaaaagcttcggctatggttaaattttttaacagcacaacagtgcaatggcaatgaatgctgtgcatttgagaacaagtccccaacagctgcaatgggagctggaccatcgggaacagcaaacgaaggacatgatgaggagttggacctttttaggcctcctgcttccatgaaccttgctgacgaacggtctcctgcgaaaggaaatggagcagcaaaggatgacgaaaactataatagtatagtttag

SEQ ID NO: 29346 - DNA, 735 bp, Zea mays
  Peptide Sequence Number=SeqID_71125
atggcgaccatcttcatggcagcagtggtggcctctgatctgggcggcatcagtgtgcgtctaggaaaccactcacgctcaatggcagtgatggcatgggagcaggtgtcggacttggaggaggtaggccatttccaggcacgaccacgactaccacctcatggtgctccccaccttcctgcacaagcaattcaaccgcatcaagctcgacttcttcctgcactcgtcgttcccctagtccgaaatctacaagacactccccgtgcgcgaggagcttctgcgcgccctgctcaactcgacctcatcggcttccacaccttcgactacgcgcgccacttcctctcctgctgcggccggatgctcgggctctcgtacgagttcaagagggggcacattcgcctcgagtactacggtcgtacggtgagcatcaagatcctgcctgtgggggtacacatggagcagctcaagacggtccccgaggtgatgtcaggctgtcagcagtaccagttctattgtgacctcttggcgcaaccggaggcggatgccatcggggtggccttttcggatgactggatctttgttggatcggtctccaagcagctaatcgttgtgtttgacttctggtttgtcaggtgtcaaatactcagatcaggacgctacatcgtaccgaagtggagcaacaggatgacttatagcagttcaaattcatttccttctgttgcatgccatgtgtag

SEQ ID NO: 29347 - DNA, 326 bp, Zea mays
  Peptide Sequence Number=SeqID_71126
gtgtattttatttggagctgaactgcccatcgcttcagtttgagtatggagtgaaactgaagccgctggtttgtatttgtgacacaactaagtttatcaaggaaaaaaagtgcatgacgaatgaggaatctacaagtagcaggtgtattttatttggagctgaactaccatcgcttcagtttgagtatggagtgaaactgaagccgctggttcgtatttgtgacacagctaaggtattgtactcacggatgattgggatagcgattaactacccagaccgagagtttggaatcacccacgctgtgtttgattctaggatgagttaa

SEQ ID NO: 29348 - DNA, 819 bp, Zea mays
  Peptide Sequence Number=SeqID_71127
atggccgccgccgcagcagcagccccgccgtcggagtgcgcggacctgatgcctccaccgcctactgcgccccgtccccgccgccgcgcaagggaagtcagctcccgatacctctcgacgcccgtccccccgaccccgcgcctctccaccgtaagctttttcgacgagacgggcgccggcaacccgcgcgcctcggtgggctccaactccgccgatgtcctcgaagctactccgcggcctctcctgcgctccaccagagggccggtcgcgcccaccgcgcggagggggtacccgcgccttccgacgcccgcgcgtgccggctcctgccctacttccgccgcggtggaatccgacgcctcctcgtgctgcttttcgtctgatacgtcgtccacgtccactgacttctctgaggccgatggggcgctcgggatggccccagccgcgccgtgcgagagcccgacgctgctgggcccagcgtcctgccgcgggggacgcctctcgtcagagctccgctcgtcggtgccggagtcgggcgggtcctcgcgggcgtccaacccactatgctaccgctcgctcaactcggcactgtcgatctcgatggcgatggccgggaaaccgactccggcagggaggccaccacaaccgcaagggccgaaggcaactgatctgaagaaggcggcgaccgtagggggcaggaaggccgtggggaagcaagaagacgtgcaccagctgcggctgatggacaattcgtacctccagtacaggttgctcaacgcccgggctgaggctgcaggcaaggccaaggcagctgctgctgag

SEQ ID NO: 29349 - DNA, 453 bp, Zea mays
  Peptide Sequence Number=SeqID_71128
atgatatcatgtttgaaccaatggagcgatgttgaggggagttacgcaagctgccttagaggagcaacaagggcactgtataacggctcgctaaggctaccaatcattgggagtgtagatgtcaactgcgaggaacttacagaggtcctaaaatcagctacacaactgcttgaaccgcttacatcttgcatcgacaatttcctgccaaaggtcgaacaaatcgacgatgtggcatgtaatcttgcccaagttattgctacggaaaagaccttgatagaggagtgtggtaatcttctataccatgcgcagaacctgcagcctatgtcacttcccctcgctggcatttgctctgacttcgccacaaagtatccaactgatgcgatgacaaattccaattgcatagatgagggagagcagtttgtggagtcaagcgatgcaactgaaacaaaatga

SEQ ID NO: 29350 - DNA, 391 bp, Zea mays
  Peptide Sequence Number=SeqID_71129
accgacaaggcatcgatgcgacgagataattgactacgtgaagttcctccagctccaagtcaaggttctcagcatgagcagactaggtggagctgcagccgtcggccctctcgtcgccagcatggcatcaaagatttgtgttaaaaataagacaacgggggatcttgtcctggcaactgctgagatcaactcatcacaagttgaatctcatagagctctatcggatacatgtacgcagggagtcttcaaaatgttttctactattccccgagtgaagtctttagcatggggatactgttctgatgcttttgatgactcaagttttaatgaaattctagttgtatcaagtgatgcttctatcacggtctatgttatgtgttgtgatacttga

SEQ ID NO: 29351 - DNA, 885 bp, Zea mays
  Peptide Sequence Number=SeqID_71130
atggccggggactcgtccccttccccggcctccgcacctgtccaggtgcgctgcgctggttgccgtagcatcctcgctgtcggcctcggtgtaactgaattcatctgccccaagtgccgcatggcgcagcgcctcccgccacagctcatggccaagtccacctcgccctcgtcgcctctgcccaaagccccctcgaagccttctctgcctcctacgcagccccggatgggtgcgccgtcggctcagggggtggaccccacgaagatccagctcccctgtgcgggctgccaggccgtcctcaacgtgccccacggtctcgcccgcttccgctgtccgcagtgtggcgtcgaccttgccgtggaccacgccaagctacaaaacttcctcgccgcctccaacagcgccacgtcatcaggccatgccccgacctcggtgaggacgcagccgcctctggcgacattcctctccgtgttgccgctgcagctagtgcctggtgcaacaatttccatggtgctgcctgccgctgaaccacatgaggagatcaatgaggtacgctgttgtgtgatcatgttgaaggctttgtataatgttgtaaatttgcacaatatgtttcttggtttatgcgtagcattctccattgttaaagttgccattgatgttgagcgtgatgaagatgaaggtggcactgttggagaaacttttactgactataggccttccaagctatcacttggtctatctcatccagatccagttgtagaaacttcttctctgtcagctgtacaacctcctgaaccaacttactgcttgaatatcatggacgaattagatgagacaaatgcattgtcttgtttgcaaattgaaacaatagtttatgcttgtcag

SEQ ID NO: 29352 - DNA, 258 bp, Zea mays
  Peptide Sequence Number=SeqID_71131
atggcccccagaacccggtacttaaccacgcgcggtcaatcgcaacggaacgcgagatttgcgccggcgacgtgcccgccatgctcggtcttccgttggggacgacactacgcacctgggcccatccgccagcgacagaaaggtggtgaacgcggcgcggttgggactgactcacagggcccgcactccagtgagcacggcacgcgcgcgaccgacgagtggaccccgccagtcggcgcgggtgtgagcttgggctga

SEQ ID NO: 29353 - DNA, 126 bp, Zea mays
  Peptide Sequence Number=SeqID_71132
atggggaaaaagcgtggcattcttttggaggaccttactgctgctaccatcccaatacccagaggtttagttgagtccaaccttttctatacgaaatttgatactttcatggtattaatcagctag

SEQ ID NO: 29354 - DNA, 321 bp, Zea mays
  Peptide Sequence Number=SeqID_71133
atggccagtcagtcgtcttctccacttgattgggagatgcgcttcctgatagcccttggagcggctgaagggctttcgtacctacaccgcaaaatcaaatctagtaacaacattttattggatgagaacttcgaagcccttgtcggtgattttgggctggcgaaggtgatcgaagtcgatgtctgcagttgcagtctagtacccgtcagagatagggcgactgggcgagggccagctctgcgtctcgtcatcgtctaccctctgacgattcttcgaagaagaattgactttgtgctgtgtcatagtgatgtgttaggttag

SEQ ID NO: 29355 - DNA, 324 bp, Zea mays
  Peptide Sequence Number=SeqID_71134
atggcgtcgaggcccacaggtgtatcggctccggtcgtgggcctttcacttctctgcctcgcagagttgctcggcgggactcagtcggtggaccccgcctcgcaaagttgctcggtgggacttggtcggccaatccgcctcgcagagtttctcagcggaacttggtcgactggtccacctcgcagagttgttcggcggacttgggagccactcaacaatggtactacaagttggaatgtgggaaaccttaaccctaatccagggttgggtgtatattatatagatcaaaacagctctgaagacccgctaccgtcgctccactaa

SEQ ID NO: 29356 - DNA, 1074 bp, Zea mays
  Peptide Sequence Number=SeqID_71135
atgaccatgaaatgcctaagattaccaatgatccaagaccaggaatttttattattttgtggtgttgcttttattgaaatgtcggagatacgtgctttagtcagccgagctactgctaggagtcttgttctgattgatgaaatatgtagaggcacagaaactgcaaaaggaacatgtatagctggtagcatcattgaaagacttgataatgttggctgcctaggcatcatatcaactcacctgcatgggattttcgacctgcctctctcacttagcaacactgatttcaaagctatgggaactgaagtggtcgatggatgcattcatccaacatggaaactgattgatggcatatgtagagaaagccttgcttttcaaacagcaaggagggaaggcatgcctgacttgataatcaccagggctgaggagctatatttgagtatgagtacaaataacaagcagggagcatcagtggcgcacaatgagcctcctaatggcagccccagtgtaaatggcttggttgaggagcctgaatctctgaagaacagactagaaatgctgcctggtacctttgagccgctgcggaaggaagttgagagtgctgttactacgatgtgtaagaaaatactgtcggacctttacaacaaaagtagcatcccagaactggtcgaggtggtctgcgttgctgtaggtgctagagagcaaccaccgccttccactgttggcagatctagcatctacgtgattatcagaagcgacaacaggctctatgttggacaggtgatacagccccataaaatgccgacactgacgacagagctcctttttttctgcctgcagacggacgatcttctggggcgcttgaacgcccacagatcgaaggaaggcatgcgggacgctacggtattatacgtcttggtccctggcaagagcgttgcctgccagctggaaacccttctcataaaccagctcccttcgaggggcttcaagctcatcaacaaggcagacgggaagcacaggaacttcggtatatctcgaatctctggcgaggcagttgctactggacggaactag

SEQ ID NO: 29357 - DNA, 408 bp, Zea mays
  Peptide Sequence Number=SeqID_71136
atggctgcccctcgccgactccatcctccggcgccgccggccgcgctgctcccctcttcccgtgctgtgagcttcgctgtctccatatggccctatctctggggcattgggtttgggatgttcgatcggagggcttggtccaagccaaggaaggtctcacgaggcatttcagtggcgtccaggaaagctaacaaacagggagaatactgtgatgaaaaaaatggagaggtgcagaaaaccatcatccatacaattgactcagaggcttgtgtattcaaatatattagggttggatccgaatttaagaaacggaaggtgtgcttgaaagatggaaccctgaacatggagattttggtatttaaatcaaaatttcctcgtgaggttctactttgcagaggatctgggtga

SEQ ID NO: 29358 - DNA, 793 bp, Zea mays
  Peptide Sequence Number=SeqID_71137
atggaatccctcaacttggtcgttgccggcacgtcgggtcgaaaggatcgatatcggcggcggtctaaaacgggctgcggattgcgacgggttcggggttcccctgctgctgcttcactcagtcaggggattggagtcccaagacgagcagccctaaggcctgatttggtggaaaggccactccccatgatcaaatctaaaatcttatacacttccccgttggagctctacaaccattggatcctgaaaaactttattaggagctcctccatcttctctggcatccagatcgtgaccgagttgttttactccagcgattgtgctgtgcatgggccggagaaaacatcccgtgttgtagcctgcctgcctgccgaggaggacgtggagcaagtagttccacgcggaaggccagccgccgccgcgtcatggctgaccgcgcgcgttgccgtctccgtcccgctcccgctcccgctccccgtttgctctttagcgattattacagttcacatgaaagaatctccgatagcatcaaggcagacacgacactgcgacagagctgttctttccttcacggatggcggtggtggcggtgatcaagcaggagggagcctaagcatggacatgggcgtgggctactgtggcggagggggcgctgagtgctcgtcgtcctcggtggcgaccggggcgacagaggagaagcagctgctcaagggggagatggcggtgaacccgctgtgcgagcagccggtggcggcgcacgtggagagggagagaagcacagggaggatgaagg

SEQ ID NO: 29359 - DNA, 1125 bp, Zea mays
  Peptide Sequence Number=SeqID_71138
atgaagaggcagtggagccatccgtcggtcgtgctcccgctgctcgccgccgtcttcctgctcctcacgttccggtgctccctgcgccacgcgcagcagcaggcgtctagcctccgcgccgacgacgcgggaacaagcacaagctacgccgtcgacgccacgctcgcggagctcgcggccgtggacccggccgcgtcggcggtgctgcgggccgccgaggcgctgctggaggccaacctgacgagggctcccccggagcgccggaacgccgcggtgcgcggcctccgcgactggctcggcaagcagcggttcgagccgcaggtgatggccgagctcgtggacctcatcaagcgccccatggaccggtacgccgccggggcgaggggcggcgacggcgacggcgacgccccccggccgtacgcgtcgtgcgccgtggtcggcaacagcggcgtcctgctggcgcgggagcacggcgcgctcatcgacgcccacgacctggtgatccggctcaacaacgcgcccgcgggcgacggcaggtacgcgcggcacgtgggcaccaagaccggcctcgcgttcgtcaacagcaacgtgctgagccggtgcgcggcgcgcgcgacccccggctgccggcgctgccgcacctacggcgaccgcgtgcccatcctcacctacatgtgcagcgccgcgcacttcgtggagcacgcggtgtgcgccggcggcggcggcggccccgacgccgcggcgccggtcatcgtgacggacccgcgcctggacgcgctgtgcgcgcgcctcgtcaagtactactcgctgcgccggttcgtgcgcgacacgggccgccccgcggaggagtgggggacgcggcacgaggaggccatgttccactactcgtcggggatgcaggccgtggtggccgccgccggcgtgtgcgcccgggtgtccgtgttcggcttcggcaaggcccccggcgcgcggcaccattaccacacgctgcagcggggcgagctggacctgcacgactacgaggccgagtacgagttctaccgggacctccaggagcggccgggggcgataccgttcctgcgggactccggcttcaggctgccgccggtcgtcgtctaccgctga

SEQ ID NO: 29360 - DNA, 609 bp, Zea mays
  Peptide Sequence Number=SeqID_71139
atgggcacctctccgcatgtgcatgtcaaccagctccttatccacatgtcagcggcgaaccgcacaaccttccctttgtttattcatttcagcggggctaacgacgccatgagccgaagtatcccagctcagttacataaaatgcagagccctgctaccctttggcttatctcacgaagatcgttgagagccgtcgtcactgggctctggggagcagagagatcgagcagtgtatctgaggacgtttccgccgtcggtgaacaaggagcacagtcacgccgacgccttcctaaggcaatcgtacctgctccttggactccgggatcttgcccacgttgccgctcgggattcaattggggacctggggggtttcgtcctggtgtggagtcgacgcaccttgctgcgccgggtgagaatttgggctgggggcgtgccaattgctcgccggacctctgctccgccgctgacccgtccctcgttgtggccagtgcccaccactactcgaacaaaggctggggtgctagattgtgtgtcgccggtagggggctccgccgtgggatcctaacggcgcggccgtgttcgtctgagaggagggtgatggccttgtga

SEQ ID NO: 29361 - DNA, 288 bp, Zea mays
  Peptide Sequence Number=SeqID_71140
atgaggatgatccgcaagattaatctaatgggtgtgcccctacaagttgaagatcttctctttaacattgacaagaaaaagcaaagaaagagagtgaaagcatctaggccctggttggttttagtgattaatggcaacgtaatattacatgtgactaacgtgtgttttgcagaggcgaatgaggttgacataatacccacaagtcgtgatcccttttcaagcctgggttgtaaagacccgatcttcctatcaggagattgggcaggggacgactatgtacccctgtag

SEQ ID NO: 29362 - DNA, 156 bp, Zea mays
  Peptide Sequence Number=SeqID_71141
atggggcaaccgggcgccgtggatagacccgcctatgctgcaggtgctgtagaagagcgtgtgaccgaggatactggtgagcagcagatagaagttgctgaggaggagctcattgaaggcaagttgtgccatttattcacttttgctacccaataa

SEQ ID NO: 29363 - DNA, 453 bp, Zea mays
  Peptide Sequence Number=SeqID_71142
atggatccccagaatcaggtccccaatgctaagatgtatatgatatattgcaatatatctttactatctattaaggctgtaagggtagcctgccttttttggttctgcctctccctggccgtaggatcttctatctcggttctgccgctccgacatcaatcggaggcaccaccgcaaacgctgacggagatcgctgccaagttacctgggagaacagataacgagatcaagaaccactggaacacgcacatcaagaagaagctcgtcaagatgggcatcgacccagccacgcaccagcctctagccaactcgaaggcggctgcttcctcgcagtccactgttacagatgaatctgctaaaaccagcaacaccagaaaggagctgagcttgaagaaagatggtagccgtagggaggctccactgtccactgattcgtcggagcagtcaagctag

SEQ ID NO: 29364 - DNA, 312 bp, Zea mays
  Peptide Sequence Number=SeqID_71143
atggcggacgcgggggtgacgggggtgctggccaagctgggtgagctgacggaggaggaggcgacgacgctgctgcgcgtggacgccgagattcgggcattgcggcagaagctggcctacctgcaggcgctcgtacgcggggccgaccgccagcgccgcggccgcgcaagcgagctgctcctgctctggctacgcgagaccagagtggttgctttcgcgggtggttctgccatacatagcggcgatggctcttcctcccaggactaccatatctacacagaacaagcatgctctcatgaagttgtgatgtaa

SEQ ID NO: 29365 - DNA, 282 bp, Zea mays
  Peptide Sequence Number=SeqID_71144
atggcgcaccacctcggcctcctcatcgtcgcgctcctctacgcctgcgccttctccggcgggctcctcgtcgccgcctcgctggcgctgctggcctccctcgcgggcgcgctgctcgtgacgctcgcgctcgccgcgtccgacgcgcgcaggctggcgggcctggccgcgcgcgtcgccggtttggccgcggccgacctgaggctggcgcgcgcggtcgcggcgtacgccgtggtcaaggccgcgagctgcgcactgaactgctgtagcatgagtgcatga

SEQ ID NO: 29366 - DNA, 549 bp, Zea mays
  Peptide Sequence Number=SeqID_71145
atgctcaagtcacggacctggtatcttggcctggccgcgatgcactggacgagaattagatggccccccatcctgctgttacatctgttttctgccccatgctcccacggaaacgcgaggcgcccgctcgtcctcaatccatcctcctccctcaacggcctcctcgactatccctcgccacgtgccggcgacccgaccgtctgcctccactgtgcgggcgcagccccagccctccgccacgtgtcccgccacatgggccaccatccgccccctccaccacgtgggcaggcacgctgccccacctcatgggcacacaggagagaccctggccatccatcctgctcatggtgccctgctcgtggcgtccatgccctgcgcatgcggccaggccgacgggatctgcccagcgttgaccagaacgtagagcaaggaagaagagagaatgatgagcaggtcccatttgttattgtctatctgaatgattttgagggcccgaattggggtgcggctgatggagtagaagtaaaaaatgtgggccaacaaaagtag

SEQ ID NO: 29367 - DNA, 273 bp, Zea mays
  Peptide Sequence Number=SeqID_71146
atggcaccacaacacatagtccttatggttttccagagcagccaccaaccaaaactagcaacccgagatgtcaccacggcaactcagtcgcaagtctaccaccacgatagcgcatgccccaacacttaccatgctgctctggtttcattccgatccagtttcatcaattatcaagggagtggatcacgtgggctggttatgggaaagggacaggctgctgctggttcacgtagtcttgctatcgcactagagggcaatgacgctaggcattaa

SEQ ID NO: 29368 - DNA, 966 bp, Zea mays
  Peptide Sequence Number=SeqID_71147
atgcatctcaacagtgacggtcccgatgatccacgaaagaaccacactatccatcaggcgttgggatgggatagtgaggaaaatggtgtcggtgaggacgtggtcatccaaggcgtagagctagagggcgaggaggacagggtcacgccagcgggtgtaggtggaggaagtcgggtcgaggacgacgggagccagagagcagatgttctggacacccgctgcctgggcgtgaagggcgagggcattcgtcgtgttgcgctcgtgctcttaggcgagggcagcatcacgttcgtgttcccgagcagcggcaacagtcaccgtggcaacagtgagggccacgaacaaggtggagcgagcgttagcgacggcggaggagaggggcgccgcaacaggggcgggggcgctgggaacgcactaggcgccaacgtggaagggaaacggtgccatcgatgcaagcgcaaacgacgcattggtggtatgcgcgggcgtgatacaagctacaggggcggaggcggccgacgcaggggtgggcagggtcgacgtgaggacgggcgcgaccagcgcatggccggcggggatggccaaagtgagggtgggcgcggttgtagccaccgtggactagcagcagagcgaaggggaggggaggagggagaaggagcgggcgtgcgggtaacggcggccagcattactgctccaaaaatacctccaagtgctctgaagtcaggagagtcagattatgttgtgtcagcttacttgatgcgattcatcatagcagggaaccttcttggtctcccagcaataactgtgcctgttggtcatgacaagcaggggcttcctataggtttgcaactgataggtcgtccatggggcgaggcaagcttactgagggtggcttctgcagtggaggagctgtgtctgaagaaacggaagcgaccctctgcattttatgacattttgaaggcctga

SEQ ID NO: 29369 - DNA, 117 bp, Zea mays
  Peptide Sequence Number=SeqID_71148
atgtcagaaaatactttgttgaggatagaagcatcacttcgtgagatgtgcaaagagcgaagcctacaaaatcacttcgataatagatattcgcctcgacttaaactagctgtttag

SEQ ID NO: 29370 - DNA, 762 bp, Zea mays
  Peptide Sequence Number=SeqID_71149
atggacgaggctggcatgagttggacctcgatcgccccaaccgggcggtcagcgccgacagatggtcaaaatcctctatatcctctggatgatcatttcgataaaacagcttttgctacaatttctgggttggtctattcctacaagtgtcatattactcactatgtattgtcatttgtcaattctggtgttgctgcccccaattattcagacccagagccagaagttgttcttgtagatgaagatagggacccggtggaaagagtccatgaagcactgcggtgccttcctcagtatgatccgtcagtgcgttggacaaccgaggagaaccccccttttctttattggaagatccgtgactttgcacacgcttacagctcggggatcacaactccttcagttgttgccgagtatgttattgcaggcattgaagagtggaacaacaagaagcccccaatgccaatgttgatctatttcaatgcagaagatctcaagaagcaagctgaggcttccacaaagagatttcagcgaggaaatccgatatccattttagatgggatcttcgttgccattaaggatgacatcgactgcttcccatatccaacaaagggtgctacaacattctttgaccaaatccatactgtggagagagatgcagtctgtgtggctcggttgcggaaatgtggagttatctttattgggaaagcaaacatgcatgagctaggccttggagtaactggaaacaatccaaattatgggtga

SEQ ID NO: 29371 - DNA, 240 bp, Zea mays
  Peptide Sequence Number=SeqID_71150
atgaagatagcccttctagcaggattctatgccaggcaccgaccacgcttaaggtccccaagccatgatgtcagcagtgagacaaggaagatagccttccaagcaggattctatgtgcttaaatgtagcagtctgggacattttttgtccatggtggagatgctccgaatggtgagggaggcaagggccgaagccatgtcatcatccaacaacagcaatcggtcaccagcttggcagtga

SEQ ID NO: 29372 - DNA, 178 bp, Zea mays
  Peptide Sequence Number=SeqID_71151
ggcgtggaagagcttggcaggcggcaagcaggggtttgggaggatggtttcgctctcgacttggttccgctatgccgcacaaaagttcgagtactgcgtttccctctcgttgaagcagcgacaactaaagaatagtagcacagcatgggctgaattcttattgtctgctcaggaatag

SEQ ID NO: 29373 - DNA, 1263 bp, Zea mays
  Peptide Sequence Number=SeqID_71152
atgaaggaggagatggtggtcggcctgtcggcgccggggccggtggggaggtggggcgccgcgccgccgcaggcgatgctggagaggatgaaggactacggccaggagggcgccttcgcgctctgggacgatctctcgcccgaggaccgagagctcctcgtccgggacatcgagagtctagacctttcaaggatcgatcggatcatccggcgctcccttggatcgcaaggcatcccgttgcctgccgtcgagcccgtgccggaatctagtgtatccaaggtggaggacaggtctcctgaggacaaggaaagatggtggaagaaggggctcaaagccatctctgaggggaagctggctgttgtccttttggctggtggtcagggtactcgtctgggaagctcagatcctaagggatgtttcagcccgagtaacactgtgctgatccactggtatataatgacaagccccttcacagatgcttccactcgcaaattcttcgaaacccgtagatactttggcctagaccctgaccaagtgacatttttccaacaaggcacacttccatgcgtctctgccgatggtagatttattatggagacaccatatagggtagcgaaggctcctgacggcaacggtggagtttatgctgcgctgaagtccaagaagctgatggaagacatggctgcgcggggagtgaaatacgtagactgctacggagtcgacaacgcgctggttcgagttgcggatcctacgttcttagggtacttcatcgacaagggtgtgtcttctgccgccaaggtggtgaggaaggcttacccgcaagagaatgtcggggtgtttgttcaacgaggccgcggtggacctctctccgtggttgagtacagcgaaatggacgcagctatgactactgagatcaatcagtcgacagggcgactccgttactgctggagcaacatctgcctgcacatgttcactctggacttcttgaaccaagtggcgaacagcctcgagaaggacagtgtataccatctagctgagaagaagatcccttccatccatgggttcacaacgggcctgaagctggaacagtttatattcgacgccttcacttactccccatccacagagcttttcgaggcgtcgaagtttccccgctttcctcctacgccggagagaacctggaagcgatctgccgcgggcgaacgttccatgcacccagcgagatatcgttttaggatatcgttttgtgtaactgtggactga

SEQ ID NO: 29374 - DNA, 1038 bp, Zea mays
  Peptide Sequence Number=SeqID_71153
atggcgcccaaggacagagtgcctctcgtcagtgccgggctcgcggtggcgtcgctgctgctgctcctgctttgcgccactcggtgcgaagcgagggccatggcggcgacggcgaggcgactgagcagcagcagcagcagcccgctgctcaacgcgctgttcaagctcaacttcatccggacggtggagccagcgcgccgcattccgaccgccggcgacgaggaagccgcgagcgacatcaactcgccgttctgcgtcaacccaccggacgcgccgtcggctcgtcccccgttcaagccattcacgcattcgttcccgggccaggcgcaacagctgcagccgatcaccaccgagccgccgtccttcgagcccagcccgccggcgccggagaatggcgcctcggggcggagggggtggagatcaaggacaggggcggagggtcaaagccagggtggagatcaaggccagggcggaggtcaaggccagggaggtagtcaaggccagggtggaggtggtggagatcaaggccaggaaggcccaccggcatccacgacgccgaactcgccgccacaggtcggtccggggggcataccattcggatcggtgccgccgagccccatcgtcgtggtgccgagcccaccaggatccggccctgatcccggctccggcttaggaggcggcggctcgggttccgacggcggtccgttccagccgccgatcatatacccacctccgctggcgccgccgctgccgccgggcgcggggcagacgttgtggtgcgtggccaagcccacggtgccggaccccatcatccaggaggccatggactacgcgtgcggcgccggcgccgggtgcgactccatcctgcccagcggctcgtgctaccgccccaacaccgtgctcgcgcacgcctccttcgcgttcaacagctactggcagcaggccaaggcgaccggcggcacctgcgactttggcggcaccgccaccatcgtcaccagagacccaagctacgaggagtgcaagtttgatcttatgtga

SEQ ID NO: 29375 - DNA, 804 bp, Zea mays
  Peptide Sequence Number=SeqID_71154
atggcgttcctcctgcccaagctcacaacgccgtcctgcaagttgcccccgagccccctcctcaagccccagctcgtcccgccgggccacggcggcggcaagatccaaggctcctccgtctccggctctggcgcggcgcaggtcgcggccccgggccacctcagcctcctgctcctgctcagcgcctcgcagcaggcggccggccccgcggccaagtcgacggcgaccaagaaccggggcaagggcggcggggatccgcaaaggtcggatttttacctcaacctcggcaccgcggtgcgcacgctgcgggacgacctgcccgacgtcttcgtccgggaatccaactacgatatctaccggtggatcagaaatttcacgggcgcctgctgttcagagaaaatcgggctcgatgtatcacgcatctggcagctgacagcgaactcgatcgttgtccggtgggagctgtggggcactccccgtgtcccatgggagtcatacggctgcttcagcgggacgtcgaggtacaaggtcgacaggaacgggaaaatctacgagcacagagtcgacaacttggcgctggacttcccacgatcagtagccagagtgggcagcatcgctgacatggtagtcgccacgccgagccccaatttgacgttttggaatgcggttgtgacaggcgatggttgctcgtggacaaagctttatgaagccgtggtggaagctgtggaacgggaagagcatagttccactggcattggccctgttggctgcagcttcggttgcggctgtggctgcagtttttga

SEQ ID NO: 29376 - DNA, 354 bp, Zea mays
  Peptide Sequence Number=SeqID_71155
atggcgcctccggttgacgtggtcggtccgtgccctaggttgggcgaggtggaggctcctccgaggtcgaggtcgagtctgtcttccaaggtcgaggtcgagtccgagcccccgggtcggacgaggcggagttcatcgtccttcggggctgatcccgagtccgagccctggggtcgggcgaggcggagttcgtcgtccttcggggttgagcccgagtccgagccctggggtcggtcggagcggagttcgtcgtctttttttattgagcccaagtccgagccctggtgtccggcgtatcgtagttcgtcgtcttccggggctaatcccgagtccgagccctggggtcgggcttag

SEQ ID NO: 29377 - DNA, 429 bp, Zea mays
  Peptide Sequence Number=SeqID_71156
atgcaggcagcatgcgactgcaccaagggggtgcaccctttcgacttcgacgcatccagcatggaggcccaggcccacacgtcatgtaaccggcacgccagttactacgtgccaaaaactgcagcgccacctgcgccagcgccgtgccttctcgactacggaaccgggaccgggaaagggaatactccgaaaggaatccttctccgcgaaggaagcgggccccgagcccccctactgattagaggttcgaaggctggcccctcggaagggttcgacagccgcctcagagcactcgggctccgcgcccactactggtcagagaagatcaaccatcttcctcaacaatggtgcatcccccaactcaagacggtgaacaggtacctcaagaagagggacaggatcaagggggagcacaggaagaacaagtga

SEQ ID NO: 29378 - DNA, 636 bp, Zea mays
  Peptide Sequence Number=SeqID_71157
atgggctcgatgcgatgtcccgccgcccctggcgagactgcggtgcttgggacggaggtaggggaagcggtgtgggtcgacggggcggggaggatgagctgccgagatggtcagtggatgcgggagcctggaactgcaagggaagcgccgaggcggagaggaagaggaaaaataaataaaccaagcccccaaagggcagggttccgcgaaagaagaaggtggtcgttttgtggcgggccgcggccggctcccctaccgacgctccgcgttcccggggctgctgggactgggacagtcagctgttactccgattctgcaagtgactactcccaggcgagggctgtatttgcataccgctcgatccaccgttgcaagtttatatctcactgtgaacgtgtactccctcgtgctcctatttacttaaggatgctggagggaagtgttagccttagccatataccccagccggccacagctgcgccatccaacgagaacagtcaccatggtggaaacatgcacaccgtcgaatgcccaactccacgcaagttcaatggttctagcagggatccacaactcttgctgccagtgccagtgctagctggtgatcggctcgtggacgccatgaccagaggctaa

SEQ ID NO: 29379 - DNA, 1290 bp, Zea mays
  Peptide Sequence Number=SeqID_71158
atggatgacagcgccggcgaagccgatggccgaagtcaggtgagccgaaatcgtggagccctcctttcttctgctccccaacccttatcgcggtcaaagccgccggacatcaagaattggttctcgagctatgtttatgactctcctgaggttacggagcatgttgctgatcacgacggcggcgacggcagcgagacccaagacccattcgagcattcgtcattaaaacgttctctccaggatggtggagttgctttgacagaaagtggttttggaggccaatctgagcctgagaattttcctagaaaatatttggtcccggtcgatgggaatgcgacgaagcccgcccccaaaaggaagcaaagcctgcgggcgttgtttggagcgagttttcttagtgaggttgaggaagttaatgcaactgaaagtcatggtctgttccctgtgcagctaaatgcactgaagcacgtgccagattgtagaagccttcctcttaatgaaatatgtgagacgcattcagaaaaaatagattgcacaacaagcttgcctgatgctactagacatagccaagaagccacaattgagcacaaggcgctggtcaattttgatcgtattagttcagctgacactcgagaaagcacccctgcagatgaggaggttgagagtaaaacgtctgctaactgtgatgatgcacttttggctgatactggagaaggctttgcagaagacatcaacggccatattgaattgcctggcagttttaacaatatcactcgagctgggactggggaaaagatccaagatggtgttgaccacagcacacatattgttagtcgcaacagacccagtttagctgagactgaagataattgtgcattacgcgaaactgacagtgaagagaattctcccctaggggaagctgaccgctgcaagctttcatcagacagtaaaaggcgacaagaaatagttgcatcagatggttttatcgctgtaaagaggaaaaggaagcaaccagaggaacacataacaaataaaaatctgaggcacctaactgggggagagaagcaaaagaggaacttaaaagagaatgtcagcattccagaccagaaggttttggtccaagagcaaaccagacgtcccttggcggataggactaatttttcagaagtaaacgcatctccagcaccagagccgagcagcaaatggaagtgtcctcgcaaaggcaagccctatgttggtcgtccaatgaagcagctccggttggggcagtgggtgcgccgtatgaattga

SEQ ID NO: 29380 - DNA, 1224 bp, Zea mays
  Peptide Sequence Number=SeqID_71159
atggaggagccgcctcagctgttcttgtgccccatctccatggagctgatggaggaccccgtcacggtgtccaccggcgttacctacgaccgccgcagcatcgagcggtggttcttcaagtacggcaagacgacgtgcccggccaccatgcagcggctgaattccttcggcctcacgcccaaccacactctcaagcgcgtcatctccacctggcttgaccgcgcctcctcctcgtcgtcgagcacgccgctgcgtaacaatctggcgcgggaaaagctaccgtcgttgctcgcgagcattgaggccacgccgttcaaggtcaccgcgctcaaaaacctcaggtgctgcatggacggagacgtggcagcgcaggaggacttcgtcgcctacggcggcatccagatgctcggacgcgtcatgacacaggcgttggcggagagctgcgccggtggagacttctcggcgttccggacgtgtgaggaggccggcgccgtcctcgccacgctccctctctccgacgacgcgtcggtggagctcgtgctcaaacccgagtgcatgaagcccgtggtcgcggtagtgcagcgcggcagcgccgagtctaggctgcacgccatggccatcctcgccaagatctccagtgccagcggcgccgaccgtgactggacgcctggtgtagacgtcgaggaccttgtcaagtcccttctcgagctcctgtcggacggtgcctcagcgaagctgagctcccgcgcgctcgacgtgctcctcgacgtcatggcgcgctcccgcggcgctcggcgtgccaaggccgtcgaggtaggcgcggtctgcgtgctcgtggaactcctccccgacgccagccgccgcgtcgctgagcgcgcgctgctcctactcaagcgtatgtgtaagtgccccgagggccggctcgccttcgcggaccacgcgctggcggtgtcggccgtggcgcggacgatgctgcgcgtgtcaggcctcgccagcaggcttgccgtcagcgtgctgtggctggtggcgtgcgcggtgacgcccgcggagagggtgctggatgacatgctgatgagcggcggcgtggcgaagctgctggcgctgctgcaggtggagaactccgcgtcgaccaaggagaaggcggcgaaactcctcaggatgcacggcgcgttctggaggcagtacccgtgcttccccaccggagcaactccaagaggttgctaa

SEQ ID NO: 29381 - DNA, 1443 bp, Zea mays
  Peptide Sequence Number=SeqID_71160
atgcccgcaaagaagcgccggttcccatcgctgtcttcgaaaccccacggcgacgtggcggctcccacctctgatgccacctccggtggaggcgtagaaggaagaggagggcgcccgccgctgccgagcaggggcgcctgcaggccgaggttgactgacccggagccacagggcggactcgaagacgattcggacacggagggtgacggcggcgcggacggcgacagtgaatcctcgcagagcgacggcggcggcaccgacgagtttgtggactttggaatatttgatgttttacatggtctgaagcttatagtgcactgttctgtctctctcaggtttatgctagtgaaattagcagagatacggaaggaggttcagtgccctatctgcttaggcattatccggaagacaaggacagttatggaatgtttgcaccggttctgtagagactgcatcgacaaatctatgcgactaggaaataacgaatgcccagcgtgtcgcacccattgtgcaagcagacgttctttgagggatgatcccaattatgatgcactgattgcagccctgtatccagatattgataagtacgaggaagagatacaagaaaccattgaggaaacattcagaagacagtctgacgcaattggtaagaaacgttccatggcaaaagcaactgcaaccgcctttgcaaggaagtacaggagaacacgggggagagttagaaccattccccctgatattgcccctactggctcttctgaggaggaaagtggagaaggaaattccaaagagacaatcagagagcaatcttctgctgatgatcattctccagatttaagacagaaaagatgcaggaagaggtctggaccacaaggatcacctgctggaaccattggcagtatcgactacagctttgaggagaatgatgaattagttggtggaaaagaaattttagccacctctccgttgcagggagaaatgcttgcttgggggaaaaatggtgcacggagccaaaatcgacatggcagtgttggttcaaatggcaggactggaaggagtgggcgcattgcaaaattggttgattacctccatactgctgatgaaatggataaagagtttcagttgtttcttcttctccttcctgtcgatggacaaaccatacctaacttggaaaagccttatctaagctgtcgaccaaccttgtccattaaacatcttgcacagttgtcttgtgaagtcgaagaacttgagatgtacataaggatggaccgccaccgtgtaagtgttggctcgaggccttccagtacaggtgaggcaaaatcacgtccatttgatgacttggaaagactgaacgaagaaaaacttgtttcggagcttcatccttcatttgtctctagcaacggtgatatggagttacgatatgctttgagaactcgggagtag

SEQ ID NO: 29382 - DNA, 453 bp, Zea mays
  Peptide Sequence Number=SeqID_71161
atgctcaactttctagagaggctgctgctcaagggcgactcaatgaaccgaaaccagttcgagtccatgttgtgtgtcccgcgtgagcccttgccagacaaggccaagatgttcgagatgcacgggtacaggatcagcaagggccaaggcttctttatcttcgagttcacgattctttccattgaggatggtacactcttaaagtccttcagccaccttctccatcgtaacaagaaggtagatttcattgaacagttcaatgaaaagcttttggtcaagcaggaagggaagaatcttcaaattcttgatgtaagccttacacctaattgcagtcaaacaaagaatacatttgctagattcgatgataatcctctgattcgcactaaaagtatgttagctgctttatttgtcaagcatagatcaacaaagatgaaaaatgtctctgttcgttga

SEQ ID NO: 29383 - DNA, 447 bp, Zea mays
  Peptide Sequence Number=SeqID_71162
atgaaggagttgaagaagagaaaacagaagcaaaccaaggtgacgatgaagcattgcaaagtttgtgtttctaagaagaaacacaaagcacagacttctcaggcttcggaagaaggagagactactcccaggtatgatgaagttatggagctactcattctcgaggaaactcccctggcgagtgttgcctctgagacaaaagaggattctactttggagcattttccaagcagcacagaggaggacgaacgcatagctccggtgatgtgcatgttctttttttatgacgatgatgacaatgacgatgatgatgagaaggccgaagctaccaccacaaaagccatggtgatggatgatgaattgttgctacttgcagctgttgtggcactaaacatcatggagatcccccaatactcccgccagcggcatcttcgccagccaagatag

SEQ ID NO: 29384 - DNA, 129 bp, Zea mays
  Peptide Sequence Number=SeqID_71163
atggcggataacattggttttccaaagcatgaagctaggatatccatgatgcccttcgatgaattttcagaattcctcgcttacacacatttgaaggggctcatcttgagcaaggcgcttaaaaactag

SEQ ID NO: 29385 - DNA, 663 bp, Zea mays
  Peptide Sequence Number=SeqID_71164
atggcacaggggatcgcgaagtctaccgcccccaacaccagcaaacctccgctgggcgcgaagtccgccgcccccggccccagcaagccgctccctgccatgcccgcacaggagcgaaggcctccatccccaccgtgtagtgctaagacggaggtgggtatttccgtggaggactatctcgtggggtctgggtgtttgacgagactatggtgcagggtcggaggtgggcaactggatgttgtcccggcaccgatggtggctgggtcggtcgctgtaacgactggggcgaaggggtcttcacaagacccatggtccaagttttgctctagcggcgagatcgcttcggctgcagccgctaaggacgtggcgggctcagttgcgcaacaactgaagcatctttttatgctaggcggccgccttagccgaacatattgcatcggggccctgacctcagagttcgctgccgaaaggcgacgactcgagggggggattgagcgcctccagacgcagcacacggaggctgtgcgggacaaatcggccgaggagaacaagagccgcaacctgatggagaagctgtcggctgtggaggccgaaaaagaggacctcggccgccggctggtggtggaaaaggagtgtgcggacagggcctgcgcagaggcctag

SEQ ID NO: 29386 - DNA, 207 bp, Zea mays
  Peptide Sequence Number=SeqID_71165
atggcgcagagacttacatggtccacgttcgtcggtgagcggaagaagtccggcgagggtgattcagggtctctggatttggcctactggttccaaagatatggagctctcaagtcgggtctgtctcttagcctgagcctgaggcaaatcttcggttttgtcgtgtctagggtccgaatcccaatggaatcttcagatatgtggtag

SEQ ID NO: 29387 - DNA, 135 bp, Zea mays
  Peptide Sequence Number=SeqID_71166
atggcgtgctggcggccagagaggaagaaggtcactggtggctcagtcgtggcgttcaccggtgcagcggttcagaaatggtctttaacttatttggggttaacttatatccacaagccatatctcagggtttag

SEQ ID NO: 29388 - DNA, 513 bp, Zea mays
  Peptide Sequence Number=SeqID_71167
atggagatcgtgcgctcccagaggcaggtcgccgccgcagccagtggcggcggcggcggcggcgcgggggccctgccgacctacaaggcggcgccgcagctcgaggtgcggctggaggagttcgagctcttcgccatcgaccgcctccgagttctcaaggggatttcggatggactctcgcgtgggaagaggccggaggagatggagaaactggtcagtgaattgtggaagacacacatgaggcaccaggatccagcagagaatttgaacaaggatataatatcgcactttgtgctccgtctagtctactgcagaacggaagaattgcggaagtggtttctctccatggagactacactttttcggtatcgctttcggcttgagagtcctgaaacacagaggatgcttatgactgagtttcaattgccgtataaagcactgccatactcagagtttgagtttttggccttttcctgtttgcttcgtgaagtgatttttgttttcatgttttag

SEQ ID NO: 29389 - DNA, 280 bp, Zea mays
  Peptide Sequence Number=SeqID_71168
atggccctatccgccgtcgtccctgttgaccgtatcggacaccgctgctcaccaacctgttccagttcaccatggttgtgccagctccccggcttcttccccgaccacgccctgcatctcctacgcgcgaggccagggctcggggtcctccactggctgctgcaatggtgtccatctccctgctggaactccctcggcgccctccctgcttctctctccctcatctccctctgctggccggagcttcctcacccatcttccatggccgccctgctccctg

SEQ ID NO: 29390 - DNA, 3201 bp, Zea mays
  Peptide Sequence Number=SeqID_71169
atgcccgacataccgagggatgtcgccgagcactcgctggatattcgggctggagcccgacccgtcaggcagcctctacgccgattcgacgaggagaagcgtagagtgataggcgaggagatccacaagctaatggcagcagggttcatcaaagaggtattccatcccgaatggcttgccaaccctgtgcttgtgagaaagaaaggggggaaatggcggatgtgtgtagactacactggtctcaacaaagcatgtccgaaggttccctaccctctgcctcgcatcgatcaaatcgtggattccactgctgggtgcgaaaccctgtccttcctcgatacctactcagggtatcaccaaatccggatgaaagagtccgaccagctcgcgacttctttcatcacgcccttcggcatgtactgctatgtcaccatgccgttcggtttgaggaatgcaggcgcgacgtaccagcggtgcatgaaccatgtgttcggcgaacacatcggtcgcacagtcgaggcctacgtcgatgacatcgtagtcaagacaaggaaggcttccgacctcctctccgaccttgaagtgacattccgatgtctcaaagcgaaaggcgtcaagctcaatcctgagaagtgtgtcttcggggtgccccggggcatgctcttggggttcatcgtctccgagcgaggcatcgaagccaacccggagaagatcgcagctatcaccagcatggggcccatcaaggacttaaaaggcgtacagagggtcatgggatgtctcgcggccctgagccgcttcatctcacgcctcggcgaaagaggtcttcctctgtaccgcctcttaaggaaggccgagtgtttcgcttggacccctgaggccgaggaagctctcgggaacctgaaggcgctccttacaaaggcgcctatcttggtgcccccagctgatggagaagccctcttggtctacgtcgccgcgaccactcaggtggttagcgccgcgattgtggtcgagaggaaagaagaggggcatgcattgcccgttcagaggccagtttacttcgtcaacgaggtactgtccgaaaccaagatccgctacccacaagttcagaagctgctgtatgcagtgatcctgacgaggcaaaagttgcgacattacttcgagtctcatccggtaactgtggtgtcatccttccccctgggggagatcatccagtgccgagaggcctcgggcaggatcgcaaagtgggcggtggaaatcatgggcgagacaatctcgttcgcccctcggaaggccatcaagtcccaggtattggcggacttcgtagccgaatgggtcgacacccagctgccgacggctccgatccaaccggagctctggaccatgtttttcgacgggtcgctgatgaagacgggagccggcgcgggcctgctcctcatctcgcccctcgggaaacacctacgctacgtgctacgcctccatttcccggcgtccaacaatgtggctgagtacgaggctctggtcaacgggttgcggatcgccgtcgagctaggggtcagacgcctcgacgcccgcggtgactcgcagctcgtcatcgaccaagtcatgaagaactcccactgccgcgacccgaagatggaggcctactgcgatgaggttcggcgcctggaagacaagttctatgggctcgagcttaaccacatcgctcggcgttacaacgagactgcggacgagctggcaaaaatagccttggggcgaacgacggttcccccggacgtcttctcccaggatctgcatcaaccctccatcaagatcaacgacacgcccgagcccgaggcaccctcggtccagcccgaggtaccctcggctcagcccgaggcgtcctcggttcagcccgaggtaccctcggcccccgagggcgaggcactgcacgtcgaggaggagcagaacggggccacgcctgatcgaaattggcagaccccgtacctgcaatatctccgccaaggagagctacccctcgaccaagccgaggctcggcgggtagcgcgacgcgccaagtcgttcgtcttgctgggcgatgaggaggagctctaccaccgcagcccctcgggcatcctccagcgatgcatctccatcgccgaaggtcaggaactcctgcaagaaatacactcgggggcttgcggccatcatgcagcgcctcgagcccttgtcgggaatgctttccggcgaggcttctactggccaacggcggtggctgacgccactagaattgtccgcacctgcgaagggtgccaattctatgcgaagcagacccacctgcccgctcaggctctgcagacgatacccatcacctggccctttgctgtgtggggtctggacctcgtcggccccttgcagaaggcgcccgggggctacacgcacctgctggtcgccatcgacaaattctccaagtggatcgaggtccgacccctgaacagcatcaggtccgagcaagcggtggcgttcttcaccaacatcatccatcgcttcagggtcccaaactccatcatcaccgacaacggtacccagttcaccggcagaaaattcttggatttttgcgaggatcaccacatccgggtggactgggccgccgtggctcatcccatgtcgaatgggccagtagagcgtgccaacggcatgattctacaagggctcaagccccggatttacaacgacctcaacaagttcggcaagcgatggatgaaggaactcccctcggtggtctggagcctgaggacaacgccgagccgagccacgggtttcacgctgttcttcctggtctacggggccgaagccatcttgcccactgacctggaatacggctccccgaggacgagggcctacaacgatcaaagcaaccaagctagccgagaagaatcgctggaccagctggaagaggctcgggacaaggccttactacactcggcgcggtaccagcagtccctgcgacgctaccacgcccgaggggtccggccccgagacctccaggtgggcgacctggtgcttcggctgcggcaagacgcccgagggaggcacaagctcacgcccccctgggaggggccatttgtcatcgccaaagttctgaagcccagaacgtacaagctggccaacaatcaaggcaagatctacgacaacgcttggaacatccaacagctacgtcgcttctaa

SEQ ID NO: 29391 - DNA, 429 bp, Zea mays
  Peptide Sequence Number=SeqID_71170
atgaaggggctactgttgggggtcttcttctccgccgagggtcctcaagacaaagtcttcattggcaaagtgattttgaggactctctctctaccaaagatcctcaagacgaagatactgtctggaagcaacaatgattttgccctaggtcactacaacaagtttgtagaggtacggggcacctcctcaccggcgttgatcggtgttgtgattcgcgccgcgttccggatgggtgctcgacacacatatcttcaccgtgatattaacggacaggaaaacgaagaagaagttgtagtcgaagaagaagttgtcccgcaagctgagaatcccccggttgagaacaacttctattttgacatctgtgggatagaccccgaacctcctgcaacacaaggcaagccccggtgcatttaccacattccttgttga

SEQ ID NO: 29392 - DNA, 825 bp, Zea mays
  Peptide Sequence Number=SeqID_71171
atgacgacggcggccggcatgccggggtcgccggtgggctcggccgcggcggctggcggtcccgcggcgcccgaggtggcggccatggacgcggtgatcgggtggttccgcggcgagttcgcggccgcgaacgcgatgatcgacgcgctgtgcggacacctggcgcagatcggcggcggcggcggggccgagtacgaccccgtcttcgccgcgctccaccgccgacgcgccaactggttccccgtcctccacatgcagaagttctaccccgtcacggacgtcaacgccgagctgcgccgcgtcgcggccgcccgcgccgccgcggggccctgctgctactcggaggaggaggtcgcgtccacggtgatccacgatcccatggaagacctcccctctgaggcggagcccgaacccaggccggagcaccagcaggatcctatacaccaggatccggctccggaggccgaggaggctgacggcaccgtcatcaaccccgccttggagtgtcacgaggaggcggacgcgggggctgactcctcgggagattcgtcggagcggaaggccccctctacggaagacgacaccgtcccagacggactcctcacctcgggcacccttttgggctttggcctgtccctggtcccgcggagaaggccgcaggccgatggcagactggtttgcagctacggcctacgggcgctcgagcgtctccgcccgacccgtctggtctggccgagggcggccaacggcctcgaatgcatcgttgcagttgggcacaccagcctggtggaccgtgacggctcccgtcgagacttcagccgctag

SEQ ID NO: 29393 - DNA, 324 bp, Zea mays
  Peptide Sequence Number=SeqID_71172
atggcgttggccctggcaaaacagaggaagacgttgttgacttttgttattgaatacgacgagaaggtgtgtgcctttccgacagagaatgacgagaaggggtgtgcctttccaaccactgcccctgtagactttgatatcactaccaccgaggggaataacataccccccacctatagaagaaaccgcatgtccatccccgatgcagctcacatgtttgaggtcttatatgtagtgatgcacaatttggaggagctacaaaggggtgcgaggataaatcaactgcatattgcaaatctcctgcatcatgggtacatcctatag

SEQ ID NO: 29394 - DNA, 402 bp, Zea mays
  Peptide Sequence Number=SeqID_71173
atggacagcagtaacgtctatatcaacggctactatgcattaaatgtgtcgtcagatgtcaggtaccgcagtcgtggatggtccggtcctgcaccccagacggtccgcgaggacgcttataattcattttaccgaacccgtcactttcgggtttttctggttcttcaccgaccggacggtccacgcctgaggccggacggtccacgcttggtctcggacggtgctcgcttctccatcggacgtgttcctgtcctagggtcaccctggtggacggtccgccgcaagggtccggatcgtaagcccttagatgttttttccaaaaagcttctccagtccggaataatttacggtattccagacagtcgagttagaatggttgtagatgaacttatgcacctgtga

SEQ ID NO: 29395 - DNA, 765 bp, Zea mays
  Peptide Sequence Number=SeqID_71174
atgccagaagcaaggaggctgttcgatcaaatggcccaggtggggatccaagtaaatacaatcacgttcaatgtttggattgatggatatgcaaagagtggacagatggatcaggccagtgcagcctatagcgagatgcaagcgaggggattagtgccagactcctgcaccttcaacattattgttgctagagctcacaagttcgggcttgcaaagaagggagaacaattcattgatgtcccttatgttgtgaagagtatggatgtgtcatttagtggcatattgagctttattgaagctgcggcgattgaaaagcttaaaaataatgagtgcacacctgcggacctatgctactcattgcaggaaactatctttgccatgcttgtcgaaattactgaaagtgccatggcacactgtgattcaaaggacgttcttattgttggtggcgtcggttgcaacgaacgtttacaggagatgatgaagattatgtgctcagaaagagggggtaggctgtttgcaactgatgactgctattgtatagacaatggggcaatgattgcatatactggtttactggcatatgcacatggcatgaccactccccttgaggagtcgacatttacacaaagattccgaactgatgaagttcatgcaatttggagagagaaggagatgccggtgctaaataacacccattcagatgcaattgctgaagtttctatagatgaagcctccatggcgacaccaatcgttatagattactga

SEQ ID NO: 29396 - DNA, 324 bp, Zea mays
  Peptide Sequence Number=SeqID_71175
atgtcgcgcgcgttcgacgactactatatcaaggactctggcgtcatctcagtgtcgggggtgacgcagaggaggaccgacaataatgacgagtccgtcatcctcgccatcgtcggggtgtgggacgtgctctccaatgataagaccatgtacatcatgggacttgaaaatcttatatctctcaatatttgcttggttcatgaacatgtcatcgacaattatagtgttggcattcacatgctcatattgcttgtgaatatcagaggacatggtgataagcatgagaaaaatacatctagtgagttatttgtgtgctttccataa

SEQ ID NO: 29397 - DNA, 522 bp, Zea mays
  Peptide Sequence Number=SeqID_71176
atgaggataaaaaattaccgaggaactgcaaagcggaagcagcatcttggcaatcaggttcatcacctattggagacagataaatctacacaccaaacggtccaaagcgccagctgcatcggcggcctgacgagcctggtctccctcgacctctctaccagctacgagttctacgatctactcgacgacggtttcctgctgcacagagactcaaactcagacgcgcgactcacggtccaaatcttcgagaccttggtcgcgaacctaagaaacctaagggagctgtacctcgtggtcctgtccagcgacgacggcgtcgggccgcgctggcgctggtgcagcatcgtggctgcatcgtgccccgagctccatgtgctcagcttgccacactgcaggctctctggccccatctgtggccacaccggcgggagcggcgaccgggggcaggggtggccacggcgggcggggccgaggctggcatccagcggcgactttgatttggtggaagagacacgggattga

SEQ ID NO: 29398 - DNA, 294 bp, Zea mays
  Peptide Sequence Number=SeqID_71177
atgacggcgtccgcgaggcccggggagagggcaaccaacttcgccgtcgcgtgcagcctcttcagtcgcttcgtccgccagaacggcgccgcgcccgcccagctaggcctcgggatcaaaggcgaggtcgagcagcaaaggacgccggcgacaattaacttgctccccggagtggacggcgaggagaccgagaggaggaaggagaccatggagcttttcccgcagagcgccgggttcggtgtcaaggatcccgctgctgcccctaggtgcgtactgctgcttcacatcatgtaa

SEQ ID NO: 29399 - DNA, 1497 bp, Zea mays
  Peptide Sequence Number=SeqID_71178
atgatgcaactcgctgacgtcctcctggaggagggctacgctgttgcggtcgcgcttatcgacttcaccatggaccaggacgtcactttggcagccgccgtcgaccgcgtcgcctccgccaagccgtcggtcaccatccacaggctccctcggatccagaaccctcccgcgatcacggactgcggtggcgacggactcctctggtacttcaagaccgtgaaacgctacaacgatcccctccgtgagttcctctgctccctgcagcagcagcagcctgcccgaagcgtcgtccacgcggtgatcctggacgggccctccgccgacgcgctcgacgtcaccaaggagctcgggatcccggcctacacccttctacgccaccaacgcctccgccgtcgcggtgttcctccagcttccttggacccacgcggaaggcccagccaagcttcaaaggagctcggagacacccctctcagcatctccggcgtcccacccatgccggcgtcgtacctcatgccaccgatgctcgacgacccggccagcgagacgtacaagacgatgatgcgtgtgtcgcgccggaacccggagcccgaaggcatcttggtgaacacgttcgcgtcgctggagggccgggtgctgagagctctcagggacccactgttcctccccatcggcgacgacgggtgcaggaggatgcctccggtgtactgtgttgggccgttggttgtgggagccggtgacggcgacggcgtcggcgtcggcgaggcgaaagaaaagcacgagtgcctcgcgtggctcgacgagcaaccggagcgcagcgtcgtgttcctctgcttcggaagcttaggcgccgccgcccactcggaggagcagctcaaggagattgccgtcggcctggagaggtccgggcaccggttcctgtgggtggtgcgggctcctctccccaccgagggcgtggacccagggaggctgttcgacccgcgcgccgacttcgacctctgtgcgctcctgccggccgggttcttggagaggaccagagctcgcggcctcgttgtcaagctatgggcgccgcaggtgaacgtgctcaaccacagggccacaggtgccttcgtgacgcactgcgggtggaactcggtgatggaggcggtcacggccggagtgcctatgctttgctggcctatgtacgcggagcagaagatgaactcggtggtcatggtggaggaggccgggatcggtgtggatctggttggatggcagcagggactggtcaacgccgaggaggtcgagcgcaaggtaaagatggtaatggagttcaaggaaggggagcagctcagagcacgtgtgacggcgcacagggatgccgcggccgtggcctggaaggatggcggctcatcgcgcgcggcatttggtctgttcttgtcggacgtggacaaccatgtacacaaggccaagacatggagtagcgctaatggtcgcgatggcaaattgggtcaaagctga

SEQ ID NO: 29400 - DNA, 108 bp, Zea mays
  Peptide Sequence Number=SeqID_71179
atggagtcaactcgccacaagcatccgcgccctgccatagaccaacccctccacgacaattgctcggcgtataaaggatgggacgaaaaagtcaaagggggtgattaa

SEQ ID NO: 29401 - DNA, 399 bp, Zea mays
  Peptide Sequence Number=SeqID_71180
atggcgtcggccgttacctccattgatggagagaggggaagtgggggagagggggagaggagaggacgcagatggttacaggcttggggaggcgagcagtcgggcgcggctggcgcgaggaagaggaagtggccagggtgggcctcgcctgcaagtgggagagaggagggggagatgaagggaggcaagacaaggttgtggatattagaaaaaagcttcagagcaaaaaatccgaaggtcgtcactgaggtaaaacataccgaagctgaagctaaggatgatgttgccgaagtcgagaccatttctgccagagctatagagaaggctgaagatgatgcgatcttgaagatctgcgaacaaatttatgatgaagctatgcgaagtgacccaggaaattga

SEQ ID NO: 29402 - DNA, 3030 bp, Zea mays
  Peptide Sequence Number=SeqID_71181
atggcgaacccggtcctagggcttggcctcgcgccaccgggcgctgagccctccgccggaacgccaccgtcttcacgccgcgcgccgcgcttggccaagcggcgccacgcgcccgcctcctcccgtttccgcgcggcgcaggcctcagtcggaacatggaacccgtttggcggcggcggcggtacggatggacagactcgaggttttgtgtttggtgctgcttccccagtgagccagcagccttcggagccagcagtggagatatcttcatccagtgaggcgcccttcgtgtttcagagtgtgagggagaaccttcctcggtttgaggagggattgtctggttcatcaatgctccctgataagatggggaagctgaacctgcgcacatcaggtgaggttggcgatggtctcggtcaggggagggatcgaaaggatggaagttcagcatttggtgttgatatatctggtttgttttctaacaaggaagataatgggctccaggagaagcttacacagttgaatttaggccacagagaacccttgcaaagtgagaagagggatagtgctaatggtgtgccacaagcatttgtgtttggatgtaatggagctgggagttttgctgattgtaagaacacagttgcctctggtgcacagtcagatgatcctagttcagtttgtggcactgatgcaaaagctatggctgggaagtcgacgcaattcaatataggcagtcaagcaccttcctggggtggagggattgagggtactaatggagcaccagaagctttcacgtttcaaagtaccgcagtaagtggtcatgtggataatataaacaatgttgtctccggtgccaataccagtgccaatacaagttcgtccactgttgctaaaggtgtgggtgatgtagatttgcttccagaaaagttaacacggttgaatataggaagtgacatgcccttgcatgagtcgaaaagtggttatcagcccaaagtgtttagagcagtccaagggacaatttttggaaatgaaacaagcagcacatcagataggagcagtgaattcctctctgcaaatagcaatacttctagttcaagcagtgatttgttctctacagcaaatagcaacacttctaattcagctaatggcacttactgttttcctccagagaagacaccagatttgaatgcaggagagggagtcatgtcggagagcttggaaagtgatagttctaactgtccaccacaaacctttttatttgaaagaaatgaaacccgaagctctgtttcacactctgcaagcatagccatggatgacggtggcaattttgtcaatcacaaaaatactgacacctgtagttcagctcgtggtacatttgattatgcaggtgctctcccagagaagatgacgaaattaaatataggatgcagaaattcataccatagcaggaaagatgaaactgctactgaaccaccagaagtatttgtatttgggtgtaatgtttctagcttttcttctacccatactgcaagtaaatcacatgatcccacgactcctgaattttgttttcaaagtaaagcagaggcaacttcaggatatggggctgttccccaaaccaaagttcaggagtcatacttgtttacgactttgaataattcttgtagtccctctacttttgagaatgcagttcctgctttcagttttgggacaatggatgcagaaatagaaactgctccagatgatcatttttctgtcaaacaggatttgcctgggttttccagggagaccttatttggtttagacagtataaaatctgcatacaaggacaaaagggaagcacacaaaggcaaaatgaaaaataaaaggccaactaggctaaagcaacatgctcagctccatcaggttatttctaaggaagcctgtaacgatggaaaatcatcagatttagcaggtgactattcaccaatggattgttcgccatatcctgcagaagctgaacatgtgccaacagaggcatatgtggcttctggtcagcccgttcacattggtgatagtgttatctcaaactggaacaccagctgtgctgaagatgatgtagtttctgcaaccgagcacttgattattgatgtaaacctaccaatgtttggagatgaaggtagaggaccgaaactagatgcatctgagagcaattttggtagcagcttttctagttttcaaggagatcaaagtaatggaccacagcattctttcactaatattgggcaagactgtaacgataatacctacagaactccccatgattttgttgagcctcctgcttttcaatcaagctcatcaaatttcagtgggctgaactttagattcggtgtgtcatcctctccacaaatctctgcagcagcacaaagacgtaacacaagaaggaagttaagaacaaagggcagtctggcatcgaaaccttcaactatcggctcttttgaacagtcaaaatcttcacaagatactaagggcatgcggtttttctgtgaaacaagcaaaaatgaagacccagtgaaagagcaaccgtcaagaaagtcttctacttctgcggccttggaggcttgtgaaacctggcgtactagtggaaataaagcctatgaaaatgggcactttgctactgcagaggattattatacccgtggaataaactctgttacccactatggtgtttctggacattgttctcgcgcattgatgctgtgttacagcaaccgtgcagctacaagaatgtcgcttggcatgatgtgggaagcacttcaagattgtttgactgctacatcaattgaccccacctttcttaaagctaaagttagagctgccaattgccatcttgcattgggcgatcttgaagatgcattaaggagttacatggcctgtttgaacagtaacactgggagttcttctgaccctaaaatattagccgaggcttctgatggcctggaaagagtcaagggcagatctagtgctagaggctcttacatgagtggggtctggtaa

SEQ ID NO: 29403 - DNA, 819 bp, Zea mays
  Peptide Sequence Number=SeqID_71182
atgacgcatggttggggccctctgcctagtacactcggtattggcaacatcggtgcgtgcctttgtcttcgacgcgttctcgggcttagcaaacccatagtacgcctcgctcacgacagcttgactgcattgacctcgacgtcaaccttctcttgcaccgactgccgcgactacgtcgctgtctttgtctatggcgccctcctgcactacagtcaacctgatgcctggcgccctgcattgacctcggcgtcggacttgtgcgtgctgcgcccgcgacttgtgcgggcacaactaccctatgcacgacaccttgacaatggctctgccgtccttgcacttggctacctcgacattatcgacacaaaaggctaccgcttgcatgagctccttttgggtttcttctatagtcattgcctcttcaccgcgacacagggagtggagccatcctgctcttcagcagatattaagaaggcataccggaaagctgcattgagacatcacccagacaaggctgctcaattattagtaaggaacgagaatgctgaagatggattttggagggatgttatcaaggaagtctatgcagatgcggatcatctgttcaaaacaattggggaggcatataatgttctttctgacccggacaagcgtcaagagtacgactttgaagagaatctaagaaatgctcggagagtatcgagttcaaggagcatgcgtaggtcacctgaacataactacagcgacagaggctttaatccacggcagtggcagtcaagcagagcatcacgttggtacagcaaatcagacgattactggtaa

SEQ ID NO: 29404 - DNA, 738 bp, Zea mays
  Peptide Sequence Number=SeqID_71183
atgactatagaagaaacccaaaaggagctcatgcaagcggtagccttttgtgtcgataatgtcgaggtagccaagtgcaaggacggcagagccattgtcaaggtgtcgtgcataggtcaagctgtcgtgagcgaggcgtactatgggtttgctaagcccgagaacgcgtcgaagacaaaggcacgcaccgatgttgccaataccgagtgtactaggcagagggccccaaccatgcgtcatcgtctaaagggaccagcaaagaaggcctcgacaacgattgtggtgcagaatggcaaggaaggaggtgcctcttgttttcagttgtcgactagtcggcgactagtcgtcgggtcggccttgggatctcgactggcgactggtgaggtaggctcgacttttctggcaagtcgggcgacttggcaacgactggaaattctcagtcgactagtcatcgacttggtctggcaagttggccgacttgtgtcccagttcgcccaagcagcccaaaggtccattatacaacataaaccctacctcccagcacctctggccgcctccagccagtcctctacacgccgcccctcctctgcacgccctcacagcaagctctgcaagcttgcccagcctctgctcaccctcccccgccctctcatcaatctgcaggaggccttgatgcgtcaaggggagatggaagatgcatctacagatcgaccacaaggggagtcaggaaaccagtag

SEQ ID NO: 29405 - DNA, 237 bp, Zea mays
  Peptide Sequence Number=SeqID_71184
atggtggtgtcagctggtggtgcccatagatgtgagttcctcgagcaggagatcatctcagacttgggcgaaggatgggaacgaggtgatctgcatgaggatggctcacagctcgaccgtgagggtgtcgaggatctaggagtggaccatgctgtctatctgccactaggaatgtgtcgacacggtactgttagtgaggacgtggtcgccgagggcataacggttgacagtcagtag

SEQ ID NO: 29406 - DNA, 487 bp, Zea mays
  Peptide Sequence Number=SeqID_71185
acacggtcacacgggccacgggcgggagcacagcgagctcacccgccgcccatacaattcgacgaggaagggggagggggacgagctgcgagaggattcaggaagcatcacctccggacgggtccgcgacgcgatcggcgcgggagctgtaggaatccgctggtgggtggcgagagaagcctcccgctcgagcgtgaccggtggtgacgaggtcggggccggggggacggaacggaatcggttggtggaggcggtggtatccggtgggggctggagctcgatcggaaattcggaagcggacgacgatacggacaaaaaggatgccggatgtggattcgggtgcggtcaaggcctcgtctaccaagggacacaatctcgcctcgcccgatcccggcctcgggtgggaacagtagtcccggacgaactcacgcctcgcccgagggcctcctcaggcggtgggcgcaccctcgactcgcccgaagcctag

SEQ ID NO: 29407 - DNA, 609 bp, Zea mays
  Peptide Sequence Number=SeqID_71186
atgccgaatggaaatattcaggattatcaagctgggcattcttctattcatgggccactacctcatttctgccagattcctttgcgtagtatgcaagtacctcaaatacaagtaccccatcaacagttcatcggtaacaatgtggtgcatggtttaaatccttcagccgcaggccttccgttagatccaagaatgctggctttcccattcaatgatgagcacacttttgggcatcaagtgcatccacctctgataaaccaagccaacaatggggctttaagaattctgccatatcaggagcttgtagcattgcaagagcagataggtgatgtcaatactggtttgacagaaagctatatccaagaaaacttgaggtccacttttcatgttccaggagcagctagcatttctgatcagttctgtgagctttcgttagagaacgatgcttgcataatatgccaggaggagtatgaagctagagaacttataggagcccttgaatgtggtcacaagtaccatgaggattgcataaagcaatggttgatggtgaaaaacgtgtgccccatctgcaagacaacagctttgtcatcagatagaaggaatggatga

SEQ ID NO: 29408 - DNA, 534 bp, Zea mays
  Peptide Sequence Number=SeqID_71187
atggaaattggctatttccactggcattggtgtaaaccaatggtaatcttatttccactggtggttaccttacaacaaccgccagtgcaaatagtcggtggttctgttaagaaaaccacgaaaatcggtttcgactcgcggttcgttaagccaaccgcctgtgatctttgttgtataaatgccccttcgtcctccccaacaggagttgtacctcacagccaacttacattggagacgattttgggtgtccaaatatcacaaaatataaggggaggttttgatcttcatttttggaagaaatttgctaagaaaggtgattatggagaggacattctggatgtatacttatcaaggctaaattcatcaaacatatccgaggtccatagatttattgatgtcgctacgaactatgcttggagaacaaaggcaaagcacatatattgtccatgtgtggaatgcaaaaatgttgttgtatttaatgacatagaacaaaccatttatgaaggattatataatttggataaagtatggtga

SEQ ID NO: 29409 - DNA, 276 bp, Zea mays
  Peptide Sequence Number=SeqID_71188
atgtcgggagaacatgccaaaaaggagttgatcacaagggaaaagcctggatcttcggggaagaagaatgaaggcaagactctgtcaaaggaggccaagctgactcggagacgccacctagacctcgtcaaactcctcatagtagtcctcctcctggccacctgctcttcacctgtggggggtttatatcacaagggtgagctcacaaaagttcatcgctcaacaagtgtggggaataatgtgcatgagctcaccaaaaagtgggggctcatgtga

SEQ ID NO: 29410 - DNA, 438 bp, Zea mays
  Peptide Sequence Number=SeqID_71189
atgaccgccctcggattgaggatctacggcccagatctaaccacccataccacgaaccgcgcggcggagatggccttccagctccaaccggcggcgcggatcgacggtcacgccaccgccctcttcgtcccgacagtggcacgcggtggattgcggcgtgatgaagtgagaggtcaaagccctacttaccccgcacttaaatcccccaggtccggcccaggcgcacgcaacaaacggctccgaattccacggcgaagctccgccatgctcggcgggatggttgaaggtgagcgcttacaatccgggcccacgcgtcagaggtacaagcgagaacgagtggctggggcgcggggtcccgcaggcagagaccgtgagggtgagcgcgcacgcgatgcgactgacagccgggccccgggtgtaagtggcagcgcgcggtag

SEQ ID NO: 29411 - DNA, 522 bp, Zea mays
  Peptide Sequence Number=SeqID_71190
atggagctctccctcccagccgagccctctccctttctcccactgccgagctcgctctcttctggcggccttcttcctggccgagaccttgccaccggagctcgcccacacctcctcgccagaactcgtgctcgccggcgggaccgtctgcgcccaccccggccacctcgaccgagctcccttccgctcctctgcctctgtgaccgaccaccaacgccgtcgtgccgagcgctcgtcgctgctctacgccctcgtcgggagccgtccgtcgtggccgtggtcgtcgttgcccgcgtcggagcttgcccgtgcaacaccccggcgaccgtgcccacaccattcgtcaatcatccaccatccgtggagcctcaccggaattcgcgccccaccgtccaaacgcatcgtcggagttacgccgttcgtcatcgacgtgatcgcgcagcacaccaactggaccatccgcgcccacgccgttcgtcgtcatccgttcacccaaggttgaagagaatcaaaaccatttga

SEQ ID NO: 29412 - DNA, 449 bp, Zea mays
  Peptide Sequence Number=SeqID_71191
atgaagaaggtggtctactacgagaccggctcattcacgccctcaacctccaacgccgagtcgacatcttcaaagcgccaagagcacaagaagtatagtaagatccctctacgctacgctcgcattcctaaacgtgcttctttacttttcgttccattaggcaaaccaccatattttgatggtgaagactattctatgtggagtgataaaatgaagcaccatctaacctcactccacgaaagcatttgggatattgttgagtttggagcgcaagcacgacaagtgggcgatgaggactacgactccgatgaggccgcccaagacgtcttcaagatggcacatgaaggggacaaagtcattaagatcaccaagcgggaaacaattgaggggaactcggtcggttcgtcctcaacaaaggagaagagccacaagctaggctcaagaccatg

SEQ ID NO: 29413 - DNA, 1722 bp, Zea mays
  Peptide Sequence Number=SeqID_71192
ttcgaggaggtggcgtacaaggtgaagctcgggaagccgacgacgacgacggccggatggtgcgacaagctgtcggcggccgcggcgagcatggcggtcggcggcggaaggaagaagaaggccaccgcggcggcggctgggtcttcgccgtcgtctccggcagcgttgcgggagaagacgaggaccatcatcagcggcatgtccggggtggtgcggccgggcgagatgctggcgatgctgggcccgtcggggagcggcaagacgacgctgctgacggcgctgggcgggcggcacggcggcggcgggcgcgcgctgctgtccggcaagatcacgtacaacgggcagcccttctcgggcggggtgcggcggcgcacggggttcgtgacgcagcacgacgttctgtacccgcacctgacggtggcggagacgctgtggtacgcggcggcgctgcggctgccgcgggcgctgggcgcgggcgagaagcgcgcgcgggcggaggcggtggcgcgggacctgggcctgggcaaggtggcccggccagcatggtgggcggggtgcgcggcgtgcgggggctgtcgggcggcgagcgccaagcgcgtcagcatcgggctggaggtgctgccgtcgtcgcggctctaccacatgttcgacaaggtgctgctgctgtccgccgacggccgccccatctactacggccgcgccgccgacgcgctctcctacttcgcctctgtcggcttcgcgtcgccgctctccctcaaccccgccgacctcatgctcgacctcgccaacggtatcgcgccgcagacgacgagcggcgacgggatggcggcgctgctggccggcggcggcgagggcgagcacaaggaggtgcgcggcaggctgtccgcggcgtacgagcggcacattgcgccggcggtgaagctggacttcgcggtgctggtgcagcgcgggctcaaggagcggcgtcacgagtcgttcaacaagctgcgcgtgttccaggtgctgagcgtggcggcgctggcggggctgctgtggtggcgcacgccggcgtcgcacctgcaggaccggacggcgctcgtcttcttcttctccgtcttctggggcttcttcccgctctacaacgccgtgttcacgttcccgctggagcggcccatgctgctcaaggagcgggcctcggggatgtaccgcctgtcctcctacgtggcgtcgcgcgccgccaccgacctgcccatggagctgggcctgcccacggcgttcgtgctcatcctctactggatgggcgggctggacccgcgcccggggcccttcctgctctcgctcgccgtcgtgctctacagcgtgctggtggcgcagagcctcgggctcgccatcggcgccgtgctcatggacgtcaagcagggaaccacgctggcctccgtcatcaccatggtcttcctcatcgccggcgggtactacgtgcagcacatcccgcccttcgtcgcctggctcaggtggctcaactacagcttctactgctaccgcctcctgctcggcatccagttccccgacggcggagggtactacgactgcggccacggcgcgctctgccccgtcgccgagttcccggccatcaaggccgtcgggctcaacaaccactgggtcgacgcctgcgtcatggcgctcatgctcgtcggctaccgcgtcgtcgcgtacattgcgcttgaccgcctcaagcccaggtga

SEQ ID NO: 29414 - DNA, 702 bp, Zea mays
  Peptide Sequence Number=SeqID_71193
atggcgactcggtccaagtccaacgcaagggtcgatggagcgggcccgtctcggttgagttgggccgcgagagggaagacggaagacagtttgattagttgggaaattggaatggagtctggacttgaacttggacctggtctcctccagtcctgcacttgtggcgtatgggccagctcagttataaacagtgttcggggtgttacagtgttagactgtgtgcactgtgcaatagaccttttgccgggagacggaaggggcgaggaggtctgcggcaaggttccggcgattcaaagtgacggcgcagccctaagcaatagcatcctccacgcatccttcagccaactggcttccctggagttccataacccaagttcatcacacatgagtatgcccccatcgtttcaacaattgttagaggtttacaacccatttctagagcgagccgaacaaccaaattcacaggaaacaactaaagaaacacattcaccactacctcaagttggttcaaagcaaaagaaggtttctagaagagggggtggattcactaaagaagaggatagagtaatttgttctgcgtttttgaatgtcagcaaagacccaattacgggtgtgaaccagtcttctggaggtactacaagcgcatttttgagtattttgatgctagaaagcccacaggttccaatagaagccagattgtaa

SEQ ID NO: 29415 - DNA, 276 bp, Zea mays
  Peptide Sequence Number=SeqID_71194
atggagcttcgctttggcgagaaattcccagcaccgcagcagtctccaacgcgattactcccgcccactgcttcgtcacacactagcgaatcacccgagacccggttcggggcagaggcaccatccgacaccgtttacgctatggcggcacgatgcgcaccccccacacgtgctctctcagctcggccacaaccgtacaatggagtcgcgatagtggaaacaggattgaccgaggactacggcgctacatataggcataagacggtcggggcttga

SEQ ID NO: 29416 - DNA, 456 bp, Zea mays
  Peptide Sequence Number=SeqID_71195
atggtagagttctcaggcttggtcccagattcatggcagtcaatgtgcccactgcccaagcttgtgatggaacgaaggatatattatgatgaagttgagagattattagttgaatggataaacatgtctaatgagctctataacatagtttcagttttagaaagccataatctgattctgagcttccgctactcagccggatcagactggtttacacttccagccagcgtgaagtgtgtctttgccttctcaaccatcccaggcctccaatatgcttgcagcggtgcagagcagcaacatgttgcattgtatgatgcggcagaggcaccctctccactctccggtggctcgaccacaacgccagagtcgtcgccatcctcgtcccgttttgagttccagagaaccgacgccggcaacaggcacagggaggcatccttcacgtcccctacggaatag

SEQ ID NO: 29417 - DNA, 234 bp, Zea mays
  Peptide Sequence Number=SeqID_71196
atgcaggtggcatgcaaccgcaccgcgagggcgcaccccctcggcttcgtcgcatccagcatggatccccaggcccacacgtcatggaccaagaaaggggacatttcgaaaggtatccttctccgcgaaggaagcgggccccgagccctcctactgatcaggggttcgaaggctggcccctcggaagggttcgacagccgccccagagcactcaggcttcaggctcattactaa

SEQ ID NO: 29418 - DNA, 213 bp, Zea mays
  Peptide Sequence Number=SeqID_71197
atggcgtctatcctcaaccctcctccactgcaggcgaatgacagcggtaatcaaggcggcggtggtgaccctgctcctcctccaccgcgccaagatcaatcctcaccgctacaaggcacaagagcaggcgtcgcccgcctcacaaacgttgcccttcatcaaggaaacagaattgagaaagaaatagaaaattggaagggaatattattctga

SEQ ID NO: 29419 - DNA, 915 bp, Zea mays
  Peptide Sequence Number=SeqID_71198
atgcccccgcctcccctccgcgctcgcacccggcctgttcccctcgcccgcacaaaccgccccatctgccccatccgcgagtcgcgcacgggccatctgcatgccgcatccgccccatcctcttgccgccctaaagtcgctcatcgtccgttgactgtccttcgcctcgcgaaggaggacaaagtagaaaactctcttccaaaagagagaagaaacacgagacaccttgtggggctcacgatccacttcaaaaccgcctccgccaatggcgtagcaccattacccgtcacgcggattggcactagcagccgagcaacgcccgccgtccatctccatccgacggccgacgccgtgtcccccaaaattttcgcgatcccgccctgcttctgcctgctacaaatgcccgccccgagacacaggcccagcatccacagctcgcatccgatttccaatttcaaatccttcgatcgcgcagcgccgcccgccctctcgcagctctctccgatggcccgcacgaagcagacggcgaggaagtcaactggcggcaaggcgccgcggaagcagctggccaccaaggcggcgcgcaagtcggctccggccaccggcggcgtgaagaagccgcacaggttccgccccggcaccgtcgctctccgcgagatccgcaagtaccagaagagcacggagctgctcatccggaagctgcccttccagcggctggtgcgtgagatcgcgcaagacttcaagaccgaccttcggttccagtcctccgctgtcgccgcgctgcaggaggccgccgaggcgtatctggtgggtctctttgaggacaccaacctctgcgccatccacgccaagagggtcaccatcatgcccaaggacatccagctcgcgcgccgcatcaggggcgagagggcctga

SEQ ID NO: 29420 - DNA, 1089 bp, Zea mays
  Peptide Sequence Number=SeqID_71199
atgcacagacatctcttctacctctgccaattcaaaggccatgctgttataccagcagtagctgcaacgattcaactagttgtggcaaatttcggcacatccccaacactcgagatatcaagaaagcaaagccaattggaaattgctcatcggattttccaaaatatgacagcaaaaagtactgtgacatggacagcattaatttctggttatgcccaagataatcaggtcgaaccatgtctccatttatttgcactgatgaggcagtctgtgtgcaagccaaatgacatcacatttgcaactatcttgagtgtctgcactaatcatgcatttcttgtacttggtaaaagtgtgcaagccctacaaatgagaatgggttttggttcctatgtgcatgtgtccaatgcattgatatcaatgtatgcaaaatgcgggagcattggtgaagcacgagctgtatttgagagcattacatgcaaagacctggtctcttggaactccttgatctttggatattcacagcatggccttgctgagcattgcctatacttgctaagagaaatggaaggacatataataccggatgcaatctccttcctaggtgtgctctcatcatgccggcatgcatgccttgtggcagagggccgacgctgcttcagggcaatgattgaacatggagtaataccagagatagatcactactcatgtatggttgatctttttggccgtgcaggactgcttgatgaagcatgggatctgatccagacgatgcccatgcctccaaatggtgtcatatggggctccctgctagcttcctgtaggctgcatgggagcatttcgatcggcatacaagctgcagagcaccgtctaaagctggaaccaagttgtgctgcaactcatgtccagctagcgaatttgtatgggagcattgggtgctgggatgatgtggcaagagtgaggaaagtgatgaaggagagagggctgaaaacaaatatcggttctgcatggaagatgatgggcaataaactgggttactttgatgcaatgggttgtgcgatgctttgcaagggagcatcttttattgtctag

SEQ ID NO: 29421 - DNA, 357 bp, Zea mays
  Peptide Sequence Number=SeqID_71200
atggagacgtttgtaatgatcataataaaaaggctcaaggatgccaaccttttcgtgtcacaaggagggctcatcattctagcacaggaagttgaggagtgtttacttaaagttgagcagtcacctcctgaaagcacatcgaatgctcttcaagtagcaactgcagctcttgatgtattctctttaattgtggaggccttcaagcatctggatgacatagagagccccttctttggaaggagaacttcaatttttgatacagtcgcaaaagttcggtcctgtgtggtgatgctagatcttgaatgtgacgatttgataaatgatatgttccatcacttcttgaggactgttaagtaa

SEQ ID NO: 29422 - DNA, 339 bp, Zea mays
  Peptide Sequence Number=SeqID_71201
atgggggtcggaaaaacgctgtccacggcgagggcgattccgcggtggaaggaggagcgtgttgagaaatgccggtgcgcaggcgagcaatcccgatcagcgccaccaaatgaagttttcccccactccaaggaagcccacgggcaagacttcgagggcgcagtcgaggcaatctgtggttcacaagcgacgaccctgattcctttcgcggcggcaagaaattcttgcgtttgcggtaggaaaggcgagaggaaaagggacgagtggattgagtcaacggccgagccttttatgcatcccctgcgtggtcaacgtggtccggttctggatttactttag

SEQ ID NO: 29423 - DNA, 198 bp, Zea mays
  Peptide Sequence Number=SeqID_71202
atggcggtcggaacaatgctgtccacgacgagggcgattccacagtggaaggagcgcgcggcaccaaatgaagttttcccccactccaaggaagctctcgggcaagacttcgagggcgcggtcgacgacagtctgaggttcacaagtggcggccccgattccttccgcagcagcgagaaattcttgcgtttgctgtag

SEQ ID NO: 29424 - DNA, 441 bp, Zea mays
  Peptide Sequence Number=SeqID_71203
atggactccgactctgcgctcgccgtggccagggatgacgtctcgtcctcgctggactccgagatgtcgctggactccgtcgcgtctgactcagaatccacgctggactccttcgagctcgcgatggactcagcagcagaggaggtcgcgccggactccttcgagctcacgctggactccttcgagctcgtgccggactcagcagcagaggaggtcgcgccgaaggccaagtccggcgagctagagctcggcccatttctatgtggtagctgcggcgtcgtccatgacaaccgtgcatcgtggaaccgtgtgcactcgacatttcgtccatgctctcgctgcggtgtcatcaacaaggacaacctaatcgacgcccttcttcacggtgcacaagagtgggactgcaagcccgagtgcgacggcaaagcatcacaagtgtag

SEQ ID NO: 29425 - DNA, 1413 bp, Zea mays
  Peptide Sequence Number=SeqID_71204
atggcgttggctagctttgcgggtgtcggaagtttccaatcccttctccgcttgtcgggtcagagggtttttgtgtctgtgaacgggtctcacccaggttcattttgctgctttgtacaggtggcgagctggggggcctacttgctgtcacgcgacattcttgccatgtccttcgccccgcgagactcccacgaggcgcaggttcagtttgcactagagcgtggtgtgccggcgatgattggtgtcctcgcctccaatcggctcacctatccggcacgttcctttgacatggcgcactgctctcgttgcctcatcccgtggcaactttacggtatgttgaatttgtatcgcccccaatgctacaagggatcattatcttcagctgattaccccgtcgcttcatggtccgatgtacgtgcagatggcctgtacttgatagaggttgatcgtatcctgcggcctggaggctattggattttgtctgggccaccaatcaactggaagaaacactggaaggggtgggacaggactaaagaagacctggatgcagagcagaaagccattgaggcagttgccaggagcctctgctggaagaagatcaaggaggcgggcgacattgctatctggcagaagcctactaaccacattcattgcaaggccatccacaaagttagcaagtccatacccttctgctctaaccaaaacccagatgctgcctggtatgacaagatggaggcttgtataactcgactcccagaggtcagtgacttaaaggaggttgccggcggtgcgttgaagaaatggcccgagaggctcactgcagtgccacccagaattgccagtggcagcatcgagggggtcacggaagagatgtttgtggaagatactgagttatggaagaagagagttgggcactacaagtccgtgattgcgcaacttggtcagaaaggccggtaccgcaacctactcgatatgaatgcaaagtttggcggcttcgctgcggcattggtgaatgatcccttgtgggtcatgaacatggtccctactgtggggaactcaacaacccttggggcaatatacgagcggggcctcattggaagctaccaggactggtgtgagggcatgtccacttatccccggacctacgacctcattcatgcggattcactgtttacactgtacaatggcagatgtgaggcggacaacattctgctcgaaatggacagaattctgaggccagagggcacggtcatcatcagagatgacgtggacatgttagtgaagataaagagcatcacggacgggatgagatggaatagccagatcgtggatcacgaagatggtccgctcgtccgggagaagctcctccttgctgtgaagacatactggactctggacgacagcaaacaatag

SEQ ID NO: 29426 - DNA, 411 bp, Zea mays
  Peptide Sequence Number=SeqID_71205
atgggggtgggcgcgtcgagcgtgggggcggcggaggggtgcggccgggggtgggggccgcggcacacgtcgctgggcgacatgccggagagctgcgtcgcggcggtgctgctctacctcgacccggccgagatctgccaggtggcctgcctcaaccgggcgttccggggcgcggcctccgccgactgcatttgggccgccaagctgcccgccaaccacaggtacctcgccgcgctcgcggccgcggcagacgacgacgactgcagctgcggctgcgacggcgtggcggccgaaggcagctgttccactgtggcgatcaagaaggagctatacgcgcgcctctgccggcccaccccgttcgacggcggtaccaaaatgccccatgattttggtgcgagatggtctaactaa

SEQ ID NO: 29427 - DNA, 207 bp, Zea mays
  Peptide Sequence Number=SeqID_71206
atggaggcggaagtggcagcccagatttatgagacggcgattggaagtggggcgagcgagctgctggtgagggcggtggcgaaggcccgcagggatggaggcggccgggtgcgacggctgcgggttgcggcatggggcagatctagaatcggagagggagggggcaacgggctgacgcaactcgttctgtgtattctgctggattga

SEQ ID NO: 29428 - DNA, 1230 bp, Zea mays
  Peptide Sequence Number=SeqID_71207
atggctcccatggcctatatagctgcctgtgccgcggcattgtcggccttcgtagctctgctccactgggcgtaccgatggagccaccccaggtcgagaggcaggcttccgccgggctccatgggcatccctctcctgggcgagacgatgcagttcttcgcgcccaacccgacctgcgacgtgtccccgttcgtgaaggagagggtgaggcggtacgggagcatcttcaagacgagcatcgtggggcggcaggtggtggtgtcggcggacccggacatgaactacttcgtgttccagcaggaggggaagctgttcgagagctggtacccggacaccttcaccgagatcttcggccgcgacaacgtcggctccctgcacggattcatgtacaagtacctcaagaccctggtgctccgcctctacggccaggagaacctcaaggcggtgctcctcgccgagacggacgccgcctgccgcggcagcctcgcctcgtgggcggcgcagcccagcgtcgagctcaaggaaggcctctccacaatgatatttgatcttaccgccaagaagctgatcggctacgagccgtccaagtcgtccgagagcctgaggaagaacttcgtggcgttcattcgcgggctgatttctttccccgtcaacatccccggcacggcctaccatgaatgcatggaggggcggaagaacgcgatgaaggtgctcaagggcatgatgaaggagcggatggcggatcccgagcggcgttgcgaggacttcttcgaccacgtgatccaggagctccgcagggagaagccgctcctgacggagaccatcgcgctggacctcatgttcgtgctcctcttcgccagcttcgagaccacggcgctggcgctcaccctcggcgtcaagctcctcaccgacagccccaaagtcgtcgacgcgttgagggaggagcacgacgcgatcgccaagaacaggaacgacccggatgcgcccgtcacgtgggccgagtacagatcgatgaccttcacgaatcaggtcatcatggagatggtgaggctcgcaaacatcgtgccggggatatttcggaaggccctgcaagacgttgagatcaaaggctacacgatcccggcggggtggggtgtcatggtgtgcccaccggcggtgcacttgaaccctgacatctacgaagacccgttggcgttcaacccatggaggtggcagtctgaagtgctgtga

SEQ ID NO: 29429 - DNA, 333 bp, Zea mays
  Peptide Sequence Number=SeqID_71208
atggcgactcgctggcagcaccgccatagattcctgctggccccgctcctgctctccctcctggccgcaaccgcggagaggtgcgagcagtcctatggcttcctcccctacaccaccaccgtcctcgggaacctcttcctcgtgctagagtacgccttcgtcatgtacaaggtgaccatgtacctatcggcggggagtgagctgctgctcgagatcatgggggtcggcctcgtcggtggactcctcctccccatcctcagcgccctccccgacgctctcctcatggtatataagtttgatcttggtgctttaaacgagaatgttgaaggttaa

SEQ ID NO: 29430 - DNA, 267 bp, Zea mays
  Peptide Sequence Number=SeqID_71209
atggtgcggttggtccgagcccaaggtcgggcgaggcagagacttctcctgaggccgaggccggggtcaggcaaggacgtgattcctcccgaggccgaggttgaggccgagccttggggtcgggcgaggcggagaccaccttccgaggccgagcctcaccctggtgggtggcacagcagtcggagcggggcgagcggcgctgttttcctgtcaggtcggtcagtgaaagggcgaagtgactgcggtcacttcgaccttgccgactga

SEQ ID NO: 29431 - DNA, 273 bp, Zea mays
  Peptide Sequence Number=SeqID_71210
atgagggttcgccataacgccacgaaggtatccgcgacccttgtatccgaggaacacccctggagaccatgcaatttcaccgaggcgccatctcagccgcagatccgccttcgaccatcgactggaatccctgcggctcaacccatgagacccttatgctttttagttattgatgcccagtccagaggagaagaacctattattgaggatcctggtgaccagaagatagaagttgctgagcagaagctcattgaaggcaagttgtgcccttga

SEQ ID NO: 29432 - DNA, 720 bp, Zea mays
  Peptide Sequence Number=SeqID_71211
atgtacgaggctttggttaacgggctgcgcttcgccgtcgatctaggggttcggcgcctcgacgctcgtggcgactcgcagcttgtcatcgaccaagtcatgaagaactcccactgccgcaaccggaagatggaggtctactgcgacaaagttcggcgcctggaagacaagttctacgggccggagctcaaccacatcgctcgacggtacaacgagactgtggatgagctggcacaaatagcctcggggcggacaacggttccccccgatgtcttctccagagacatacatcaaccctccgtcaagatcgacgacacgcccgagcccgaggaggcctcggcccagcccgagaaggcactcgggggcttctcgcacctgctggtcgccatcgacaaattctccaagtggatcgaggtccgacccctaaccagcatcaggtccgagcaggcggtggcgttcttcacaaacgtcatccatcgctttggggtcctgaactccatcatcacggacaatggcacacagttcactgggaagaagttcctggacttctgcgaggaccaccacatccgtgtggactgggccgccgtagctcaccccatgacgaatgggcaggtggagcgtgccaacggtatgattctgcagggacttaaaccgatgatctacaacgacctcaacaagttcgacaagtggtggatgaaagagctaccctcggtggtctag

SEQ ID NO: 29433 - DNA, 189 bp, Zea mays
  Peptide Sequence Number=SeqID_71212
atggcgcaccggtcaggcccaggcgcaattgaaccagccactctcgagaactcaccaggcgcgctccactataattcaccggactgtccgatgaacatggatgaacagtgccgcgcagagtcagagcagcaaagccagaggtcaacggacagtgtccggtgtgccatcggactgtccggtgtcgcttga

SEQ ID NO: 29434 - DNA, 501 bp, Zea mays
  Peptide Sequence Number=SeqID_71213
atggcggtgcgcgcgagcctcgcctgcttcccctccgacccagcgctccacgcggcttgcggcatgccgtggggcgtcgccatcaccccgttctctgccacagatgagcgcggcttcccgccggccaccggcaccgagggccacctcctcccgcgctgccagtcctgcttcgcctacttcaacttgctctgtccgctcgaccgctggtcctggaactgcgccatctgcggcgccgagaatgacctctccgccgacgcagctgcgcgctacgcccgcgacggtggccacgacccgcccgagatgcgctccgcgttcgtcgacctcctcctcccagcgcgctgtggtacggtgcggtattgcggtaacctggtggtggtggaattttgcagtggaggagggcgaggcggcagcggcggcggctccgacgcccgtgtacgtggcggcgatcgacttgtccttgattccattggattcctaggagggagcagggtggggagctga

SEQ ID NO: 29435 - DNA, 555 bp, Zea mays
  Peptide Sequence Number=SeqID_71214
atggcaatggcaaccttcacatcatccccagttctctgcagcttcaggaccatcgaacagaagaaggcccctctgctgaacaacagcacaaaacggccgcttcacttgggcttcccaaggagcgtgccgacgtcgccgagcttgagagagaggctagacctgcgcgtcgccgctgtctacaaggtgaagctcctcggccccgaagggcaggagagcgtgctcgacgtgccagaggacagctacatcctggacgctgccgaggaggccggtctcgacctgccctactcctgccgcgccggcgcgtgctccacgtgcgccggcaagctcctggagggctccgtcgaccaggcagaccagtcgttcctcgacgaggcgcaggtcggtgccggtttcaggctttcagcttctccctggaaagagacagtcaaacagatgggagctttcagggatgttgctgcggccaatgcagacggcaagcgtttacgtcgccgaaaggccggctgggccggcgggcgcaatgatttggatgctactagacaggaacgtgtcacatga

SEQ ID NO: 29436 - DNA, 171 bp, Zea mays
  Peptide Sequence Number=SeqID_71215
atgaagatgtcgaggttgtcgccgccactgggtgctatgccaccaccggccagttcaagagaaaggggagagctcgtctcaattgttatcaacactgagctgcctcacgatctaggcctcggtttgggagcatctaggggcgccgcacatggggatgagcttcccgactga

SEQ ID NO: 29437 - DNA, 1689 bp, Zea mays
  Peptide Sequence Number=SeqID_71216
atgagggcgcttggaacggttgcttgggcatggctgctgctcctgcagcagctcgccggggcctctcatgtcgtctacgagaaccttgaggtggaggcgacgacagccgccgtgcggccctccattgtcgaccccctgctgaggaccgggtaccatttccagcctcgcaagaactggatcaatgctccactgtactacaaggggtggtaccatctcttctaccaatacaacccgaagggcgcggtgtggggcaacatcgtgtggggccactcggtgtcgcgagacctgatcaactgggtggccctgcaaccggcgatcgagccgagcatcccgtccgacaggtgcagaacgtgggcgtacccgcggaacaggtcggacccgctgctgcgggagtgggtgaagccgtcgcacaaccccatcatcgtgcccgggggcggcatcaacgcgacgcagttccgggacccgaccacggcctggcgcgccgcgggagacggcctctggcgcctgctcatcggcagcgtcaccgaggcgcgccacggcgtggcgtacgtgtaccggagccgcgacttcaggcgctggacgcgggcgcggcggccgctccactcggcggccacggggatgtgggagtgccccgacttctacccggtcggcgcgcccggccggcgcgcgggcgtcgagacggagacgtcggcggtgtccgacggcgacggcggctctcctcgtcgtcgtcagcaggccaagtacgtgctgaagaacagcctcgacctgcggcggtacgactactacaccgtcggcacgtacgaccgggcggccgagcggtacgtgccggacgaccccgccggcgacgagcgccacctgcggtacgactacggcaacttctacgcgtccaagacgttctacgacccggtgaagcagcggcgggtgctctggggctgggccaacgagtccgacaccgccgccgacgacgtggccaaagggtgggctgggatccaggcgattcctaggacggtgtggctagaccccagcgggaagcagctcctgcagtggcctatcgaggaggtggaggctctgagaggcaggtcggtcgctctcaagaacagggtgatcaagccaggacagcacgtcgaggtcaccgggatacaaacggcacaggccgacgtggaggtgagcttcgaggtgtcgagcctggcgggcgccgaggcgctgctggacccggcgctggccagcgacgcgcagcggctgtgcggcgccaggggcgcggccgtggagggcggcgtgggcccgttcgggctgtgggtgctcgcctccggcgaccgcgaggagaggaccgccgtgttcttcagggtgtttcgccgcggcggcggcggcggccacgacaagcccgtggtgctcatgtgcaccgaccccaccaagtcatctctggacgcgaacctgtaccagccgacgttcgcaggttttgtcgacacagacatttctaacgggaagatatctctcagaaccctgatcgaccggtcggtggtggagagctttggagccggtggcaggacctgcatcctgtcgagggtgtacccgtcgatcgccatcggcagcaaggctcgcctctacgtgttcaacaacgggagggctgacgtcagggtgtcccgtctcaccgcgtgggagatgaagaagccactcatgaacggcgcttga

SEQ ID NO: 29438 - DNA, 240 bp, Zea mays
  Peptide Sequence Number=SeqID_71217
atggctgcggcgtcctcaacggcagcatctctacacggcgacgacgccatggctgcggcgccctcaacggcgacaaagcagccgctgctggacagggccgaggttcgggtaggcgccggaggcggcggagagggcgaggccctggaggcggtgttcctggcgctgcactgtgcggcgcacctggccgccgcggccgtcgtcgcgcacgagaagcgggctcgggccggcacgggccactaa

SEQ ID NO: 29439 - DNA, 432 bp, Zea mays
  Peptide Sequence Number=SeqID_71218
atgcccagggcgcagccttcggctactctgcctcctcatctagccccaacactcgacatctcctcccatgactcctccggcatctcctatcatgactcctccagcatctcctcccacgacgactccttcagctactcgacgggagacgtcatcacgactcgcccgtggccaaccccgagcgagagatacaatcacgactctcccgaggccaaccctgcgagggagacacagtcacaactcgcccgaggccaacctcgggcgggatacacagtcacggctcgcccgaggccaaaccccggacaggagacacagtcatgcctcgcccgaggccaaccccgggcgggagacacagtcacggctcgaccgaggccatccctaggcgggagacgcagtcacgtctcgcccgaggccaacctcgggcgggagacatag

SEQ ID NO: 29440 - DNA, 420 bp, Zea mays
  Peptide Sequence Number=SeqID_71219
atggtgatatatcagatcttccaaattctgggtgcagaaaggaggctaagagtgcggactatccagtacaacacaactgctaatatctgggacctttacgattttgttgatccagatgttgttttgacaatattggtacaccaggttattttggcttctttaagtgatgcactggaaacaaggctgtggctccaagattggttggtggttgtcatcgctcagtacaacaaagcatacaagaatgtcacatctggaggtggtactgagatttataatattgatgtcaatttctcacactgctcgcaactgcagcctttgtcacggtttgtgtttgctattctgttgagccccctgcttcaagtcagcagtgaaggcattcatccagattatgtgacatatttgcaatgcctcttgaggtaa

SEQ ID NO: 29441 - DNA, 297 bp, Zea mays
  Peptide Sequence Number=SeqID_71220
atggcgttggcaggtctactgagatcaacagtcgatagactaaaacaagaaaggaatataacacccaaactggttttcattcacggagcacatgatgacactacagaatttgagaaataccttgttgaggatcagaccttggatgggtccccgttatctagctccacaggtttcagctcattccttgatgaggtttctggcgctacctcagacatttgctacctgatgatcttgaacgcaccaaccaatctcgattttgtattagttagacgtttgctacatgaaaaggaattctga

SEQ ID NO: 29442 - DNA, 585 bp, Zea mays
  Peptide Sequence Number=SeqID_71221
atgctagaaactccctctcgcctggatggctgttggcgccgcggactccatggggttcgttgcacccaactccccgcaatccctgctggctacccgggccctgaaactccgtgcttcgtggctagaaaagggaggactgccgctccttcctccgcgcacaacgattcctcccctcgtttccccgaacatagcagtagcgtcctcatcatcgccgtagtcggcgcgggtggagagaacgtgcgccagaatcgccatatccaccataaacgcactcagttcgagagctacgggtgcggcggcgggaacacctgggtacctcgacatcaaggatcctcggcacccccatcacgtggcggaccctcggtccatgcgcgccagcctgtcctcaccttcgcggcgggaagtagtgatcgctgggcgtactcacatcaggcggtaatggcgcgtcgcgtcgccggtggggtctttgccgtgggtgtgagcgcgccgcgatgtcttctgttcatcgccgtgctgtgcgggggtggaagaaacacgacggccgtaggatgcaaaagggatggtgtagatcagttcaatgcgtaa

SEQ ID NO: 29443 - DNA, 261 bp, Zea mays
  Peptide Sequence Number=SeqID_71222
atgggtgtcgagagaagggaattgggggccatgagtgttcgtcgcttgttgaatcactcgtcagagccctccaccgcgcgaaacctcaaactcgccatggagagagggtctcagttgcacgactacaggtcaacgatcagggcaccgggatgcattgggagcgattccgatgagtcctccaccgtgcttgggagggtggcgatgccgtctcggtatagcgggaggagggtggtgaccgctagccgttgcatggcctactaa

SEQ ID NO: 29444 - DNA, 546 bp, Zea mays
  Peptide Sequence Number=SeqID_71223
atgagtgatgggttgggtgacccatccttctggctcatgttcctccaaaggctccgtgctgtggctcgaactgccaccgtcgtcgtctccgtcgagccaagtccggcctcgagcgccataggaagctctgcctcgcccgaccctagggctcggacttggcctcggccccggaagacgacgaactccgcctcgcccgaccccagggctcggactcagcctcggctccggaagacgacgaactccgcctcgcccgaccctagggctcgtactcggcctcggccccggaagacgacgaactccgcctcgcccgaccctagggctcggactcagcctcggctccggaagacgacgaactccgcctcgcccgaccccagggctcggactcagccttggcctcagacgatggtctccgcctcgcccgacccggggctcagactcgacctcggaagacagactcgacctcgacctcggaggagcctctgcctcgcccgacccagggctcggaccgaccacgtcacaggggggccatcattatcctacccctag

SEQ ID NO: 29445 - DNA, 360 bp, Zea mays
  Peptide Sequence Number=SeqID_71224
gttcagaacttgactgctacgaacatcatgaaatgtgacgatgatacatttgtgagagtagatgtggttctgagacacatcaagttgaacaacggtgacaaaccattatatatggggaatcttaacctcttgcatagaccattgagaactggaaaatgtgcagttacaaacgaggagtggcctgaggatatctacccaccatatgcaaatggaccaggctatgtgatttatggtgatatagcaaaattcattgtgtcacagcatgctaatcagagcttaagaagatctcccatggaggatgaagaccagtatgaaaaggacatgcaaccagatgacactgtggctgatgaagatatgtga

SEQ ID NO: 29446 - DNA, 207 bp, Zea mays
  Peptide Sequence Number=SeqID_71225
atgatggttgtggagtgtttgtcaatagggatagtgctttgggttgagtcagttggactaactagggtcccgaagacagttgtcgatgatgaaggtgaacatcatgcaggttcgtacatatggactgagagcggcgaagtacaaactctaagtcttgacagagagactagagatgctgggtggatatatttggtggaaaacacctag

SEQ ID NO: 29447 - DNA, 159 bp, Zea mays
  Peptide Sequence Number=SeqID_71226
atggttcagggccttggtggaggcatgcgtgtagttcttgatggtgtggcagcggtacaacaaatcgtcgtggatggcatcaaggcgctccttggtgaactgatgaggttgacaaatacgaaaatgaagatgaaggcaaacatgtgcagtgatgtatag

SEQ ID NO: 29448 - DNA, 147 bp, Zea mays
  Peptide Sequence Number=SeqID_71227
atgattgaaggatgccttccttattatgataagaaaaatgatgaaattgagaaggcacataattctaaagaaaggcctccttttcgagctcctccaaagcattatgcccatgggttaagagagcgagacctctcaagtgtgtcctga

SEQ ID NO: 29449 - DNA, 249 bp, Zea mays
  Peptide Sequence Number=SeqID_71228
atggcgcctgagggtctgggttgccaaggcgggcgatttgcgatggaaggcagctgcagtcgaggcctgggtgcacatagcaacagagggatggttggccctacgtcgatgacgtcttcgccctgcaggtggcttcgccgccgccgacgaccatggcagcgacagcgccgtggtggtgcccttcgtggtgaactactatggttgtatgaccaggtcgacgtgcttgtggttggcgaccggttcgtttga

SEQ ID NO: 29450 - DNA, 1113 bp, Zea mays
  Peptide Sequence Number=SeqID_71229
atgagtctcacggggtccgccctggaggcggcgctacaggcggtggggcgcggcctcgacgcagctggagaccaccggctgctctactgcaagggaggtggaaggctcgtcgcgctcgaggaggaccgtgcgcgggacctcccgctccccgacggcggcgtcctcccgagcgtgccccccgatgtcgaggtcgagcagtgccgcagagaccccgagcgcatccgccccttcccctctggcccaagctctgccgcagcggatgggccctttgtctgcagcttcgataagatggctgagtatttcaacaggaagtcatgcttgtccgagacagtaccgctgggttccttcaactctctgttcagcttcaccggttcatggaagaatgatgctgcggctacgaaggcccttgcgattgatggctattctctgcctctgtttcgagtgaaaattaggagttctgaactgacgctgcttgagagcgttaagcacgcgatcccaaatgtttgggatccatcagcattggctagctttattgagaattacggtacccatattattatttctgttacggttggtggtaaggacgaagtatacattaagcagcattcatcgtcccaattgtcagggttagagttcaaaaattatgtgagggaaattgggagggaaagattctcagatgtggaaaacaagtcaaatgcaactcctatcaattacagcgagaagaagtgtgtggtcttctctggactaaggcaggatattacagtaatattcagaaggaggggtggttgtgatcttgttcaaagttttagtgattggaaaggaactgttgcctcagcaccagatgtcataggcatgacctttctttcaattgtctctcttgttgacgatgtaccaggaaagaagcaccttgctcgtgcagttgagctatacttgacctacaaacctccaattgaagaattacagtatttcttagattttcaagtcccactagtttgggctccagctccaccaggtattgctagtcaccataggaaggaacctgtctgcccatcgcttcagtttagcttaatgggcccaaagctcttcattagcacagaacaggaaatgctatag

SEQ ID NO: 29451 - DNA, 273 bp, Zea mays
  Peptide Sequence Number=SeqID_71230
atggcgcaccggacactgtctggtgcaccaggccaggcagccaacgaaccagccactctcgggtttcttccggacgcgctccactataattcaccggcttgtccggtgagccagcggagcaacgggtccctgcgcgccaacggtcgactgctcagatgtacagtgatgaatagtgccgtgacagaagtcagagcgcagaagtcagagggcaccggactgtccggtgcagcaaaaagacaaacgactacaacagtcaacagctccaaaccctaa

SEQ ID NO: 29452 - DNA, 240 bp, Zea mays
  Peptide Sequence Number=SeqID_71231
atgggcacggactccctactgccaccagatccgaaatggacgtcccagattagatcaactctcaaccgaaccggtttaatcgtgaccgctcatgtggatccaacggcgagtggacatcgtctccacactatgccagaccgcatggtcttgcccacggcgcatgacggcagcctcaccggcgagtgccccctagacgcccctcggtcccgaaatccaccccaagtagtgaaagggaaatag

SEQ ID NO: 29453 - DNA, 99 bp, Zea mays
  Peptide Sequence Number=SeqID_71232
atgaagcacaacgagttcactacaagaacggagctcaaatcactaacacggttgatcaagtgcgcggagacggattgtggaagacttagaattctcaag

SEQ ID NO: 29454 - DNA, 132 bp, Zea mays
  Peptide Sequence Number=SeqID_71233
atgggagaccacatcttaggtcgtgtgaggggatatgtccactgccaggttcactctggtactaggcttaccgatttaccatatttctcggatttagtaaacattatgctaagtgaaagaaaactaagttag

SEQ ID NO: 29455 - DNA, 282 bp, Zea mays
  Peptide Sequence Number=SeqID_71234
atgtatgtcagcgcccagggaactcgtaccatggaggttgggcctctggtgatcgcgcatgggtggcaatttcccgccgtcgctgctgggtcaccatccgccgtggccagggggctccatgcgatgatttctggtgaggcttcctctcccaggatcgatttcttctcctctacattgaccatagttgaatcgagctcttgtgcctgggagtcgaggcaaggcagtgcgacaatggcgccatggcggtgcacgctcgccgtcgtggcgtgggatactggatga

SEQ ID NO: 29456 - DNA, 333 bp, Zea mays
  Peptide Sequence Number=SeqID_71235
atggcgcaggaagtggggcgctcggatgggaatggagcaacggcgctgcgaagggtggctgctgggcgccatagaaggagagtagaagccgagttccctgcgtgctgccgtggggaagaagggctccctggccgatgcttcgggtgttccctgaccgcggcggggaagacctggggcgccatggctgagggcgtgaaaatttgggcgctgggagctgctgccgctgcttgtgtagtagctcggctaggggaggaagaagactgggagggcgctcggctgctcgccatggacagcagagagagggaggaagggatgggcggcatgggagcttag

SEQ ID NO: 29457 - DNA, 261 bp, Zea mays
  Peptide Sequence Number=SeqID_71236
atgggagatatgggggtgggggaagttgccgcccaccatgcgtgctcacaggccgccaacggggtcctcacgatttaccgacattcgggcacggggcgtggtttgggggcgtttgcagcgcttgggtttgggcaattggggtccatcggccatgttgccggtgggcgcaccgccgaggtggctactccgccgtcgtggctgaggttggttgaggaagatgaagcctcggccgttgatcagctcatgggcggtcacgattga

SEQ ID NO: 29458 - DNA, 207 bp, Zea mays
  Peptide Sequence Number=SeqID_71237
atggatggtggcagggctgtcctcaccaagcccagcaagcaattgccaccgattcttggccaccaaagctcaacgataaccatcgacacgctcctcaagagaatgcgaagctccctgaccccatgtttcagctcgagcgatgacgttccccagtttccctcgcggcggcaactcttcttccgcactgatcccctcggttctcggtga

SEQ ID NO: 29459 - DNA, 303 bp, Zea mays
  Peptide Sequence Number=SeqID_71238
atgtcgggagatcacgccaagagggagatcgtgaccggcgacaagcccgcgagctcggggaggactctctcaagggagtccggcaacaagcacaaggaggaatcctcttcatccatcaagtcccatcggagaggcaacaagaaaaagaagatgaagaaagtggtctattacgagtccgactcatcgtcgcccttcacatcaagctccgagtcgtccgtcgcttctaagcgccatgagtgcaacaagtatagcaaaccaccatatttgatggtgaggattattgtatgtggagtgataaaatga

SEQ ID NO: 29460 - DNA, 627 bp, Zea mays
  Peptide Sequence Number=SeqID_71239
atggacgccgccgccgccgccgccgttgtttctcttaacgggaagatgggggccgaggagaggaaggcgcagaagagctactgggaggagcattccaagaacctcaccgtcgaggccatgatgctggactcccgcgccgctgatctcgacaaggaggagcgccctgaggtatttaggtgcatatactgctactgccttgttttagtgcctttctggatccagctgcttggatatgggcagcatctgtcagacactcagcctttgctacgtggtatcccatggcaatctctgaagggacgcgttgtatctcctgtcctgtctttgcttccttcatatgaaggaaaatctgtactagagcttggtgctggaataggccgtttcactggagaactcgctaaaacagctgggaatgttcttgctctggattttattgaaagtgcaattaaaaagaatgaaagcattaatggtcactacaagaatgcatcctttatgtgtgctgatgtgacatcccaggacctagtgcttcaagctaactccatcgatctgatattttcaaattggttattgatgtatctttcagatgaagaggttgaacagctagttcagagaatggtaaaatggttgaag

SEQ ID NO: 29461 - DNA, 225 bp, Zea mays
  Peptide Sequence Number=SeqID_71240
atggcgacgcgggcgcgggagaagctccgagagcggctgttgaaggagcggccgcgctgctgcatccaccacctgatagcggcgaggttggggaaggagggagacggtggctgtgaccagtggctggcgactgagaacgggatcctggatgggagcgagggttccgtagtggcatttataggctggaaccgggaaccggggagatccgatcgacctcaactgtaa

SEQ ID NO: 29462 - DNA, 3084 bp, Zea mays
  Peptide Sequence Number=SeqID_71241
atggcgcctcaccccaagctttatcgtttatccggtccccacaccatggctctcagtctcctccacctagccttattaacaacaatggcctcatcactgctcacgccggcaccgcccgcgctcgtctcggcatccaacgccacggccaccgacctctcggccctcctcgcgttcaagcacaggctttccgaccctggcgacgtcctccgcggcaactggacgcccggcacgccctactgcggctgggtcggcgtctcctgcggccaccgccacaggcagcgcgtcacggctctggcgctcgctccccggcgtgcggctcgccgccttaacctcagcggcaccgagctcacggggaacatcccagctagtctcgggaagctgccacgcctactctccctcgatctctccaacaattacctgtcgggcgccgtcccagccacgctcggcaacctcaccgcgcttgggatcctcagcctcgactccaacaacctcaccggtgaagtcccacacgagctgtccaatctgcggagcgttggcttccttaccctgagtaggaatgacttgagcgggccgctggcccagggcctgttcaacgggacgtcgtcgactcagctgagcttcctcagcctggcacacaacagcctgaccggggacatccctagcgccattgcttccttgcaaaacctccaggtcctcgagctgtcggggacccagctctcggggcagatcccgtcctcactgttcaacatgtccagcctgctaggcctgtacctctcccggaaccacctctcggggccggtgccagacaaccagagctttaacctccctttgctggaacgcgtgtacctcagcaaaaacgagctcaccggcacggtgccgccaggctttgggacgtgcaagtacctgcagcagctcgttctgccatacaaccgcttcaccggcgggataccgccgtggctgtcaaccctgccggagctgacgtggatctccctaggtggcaacgacctctccggcgagatccccgccgtcctgagcaacattaccggcctcaccgtactagacttcaccacgagcaggctgcatggggagatcccgccggagctgggccgcttggcgcagctgcagtggctgaacctcgaaatgaacaacctgacaggtaccatcccggcctccatcaggaacttgtctatgctctccatccttgacgtatccttcaactcactgaccggacctgtcccgcggaaactgttcggggaatcccttaccgagctctacatcgacgagaacaagctcagcggagacgtcggtttcatggccgacctgtcaggctgcaggagcctcaaatacatcgtcatgaacagcaattccttcgccggtagcttcccaagctctacgctggccaacctctcctccctccagatcttccgggcgtttgagaaccaaataaccgggcacatcccaaacatgccgagcagcgtctcgttcgttgatctccgcgacaaccgattaaacggggaaatcccgcaatccatcacggaactgaggaacctcagaggccttgacctgtctagcaacaggttgtctggaactatccccgcacacatcgggaaactgacagagctgtttggcttgggcctggccaacaacgagctccatggccccataccagacagcatcgggaacctgagcaacctacaggtgttagagctatcaaacaaccacctcacctcagtgatacccccggggctatggggtctcgagaacattgtgggtcttgacctgtctcgcaacgccctgcgtggctcgttcccgccggaagagtccctcgccaatctcagctacctcacaagcttgaatctctctttcaatagactgcatggacgagtcccagagggcggcgtgttctcaaacatcacgctgcagtcactggaagggaacgctgcactgtgtggcctgccacgccttgggctcccacgctgcccaaccgatgagttcgacgacgaccaccggcaccgatctggtgtcctcaaaatcgtacttccgagtgctgcagcagccattgtagtaggagcttgcctgttcatcctggtcagagccagagctcacgtcaacaagagggcaaagaagctgccggtcgccgctagcgaggaggcaaacaaccgcaagacggtctcctacttggagcttgcgcgcgccacaaacggtttcgacgacggtaacctgctaggagccggaagctttggcaaggtgttcagaggcgtgctggacgacgggcagaccgtcgcggtaaaggtcctggacatggagctggagagggccaccgtgagcttcgatgccgagtgccgtgcgctccgtatggctcggcaccggaacctggtcaggatcctcaccgcttgctccaacctggacttcagggcgctggtgctcccgtacatgccgaacgggagcctagacgagtggctgctctgtagggaccgccgcgggctgtccttgtcccgaagggtgagcatcatgtcggacgtggctctggcggtggcttaccttcaccacgagcacttcgaggtggtcctgcactgcgacctcaagccgagcaacgtgctgcttgatcaggatatgacggcttgtgtggccgacttcggcattgcaaggctgcttcccggcgatgacacttccgtggtttcgaggaacatgcagggaacgattggttacatggcaccagagtacgcttcaaccggtaaagcgtcaaggaagagcgacgttttcagctacggggtaatgcttctcgaagtcgtcactgggaagaagcccaccgacgccatgttcagcgaggagctaagcctgagagagtgggtcaggcaggctattccatcaggactcgctcatgtcgtggaccatagcatccttcttgtagacgaggaggcaacaagcagtggggatgtcctgcgtgccgactggagctgcctagcgcagatgctgaacttgggtttacagtgctcgtgtgacttgcctgaggatagggtgtcgatgaaggatgtggctgacgagctcgcacggatcaagaagagtttactatgctccagctga

SEQ ID NO: 29463 - DNA, 1443 bp, Zea mays
  Peptide Sequence Number=SeqID_71242
atggcggatgtgtgtagactacactggtctaaacaaagcatgtccgaagggtatcaccaaatcaggatgaaagagtccgaccagctcgcgacttctttcatcacaccttttggcatgtactactacgttactataccgtttggtttgaggaatgcgggtgcgacataccaaaggtgcatgaaccacgtgtttggcgagcacattggtcgaacggtcgaggcttacgtcgatgacatcgtagtcaagacgaagaaagcctccgacctcctctccggccttgaaacgacattccggtgtctcaaggcgaaaggcgtaaaactcaatcccgagaagtgcgtcttcggagtaccccgaggcatgctcttggggttcatcgtctccgagcggggcatcgaggccaacccggagaaaattgcggccatcaccaacatggggccaatcaaggacttgaaaggcgtacagagggtcatgggatgccttgcggctctgagccgcttcatctcgcgcctcggcgaaagaggcctacctctataccacctcttaagaaaggctgagtgcttcacttggacccctgaggccgaggaagccctcgagaacctgaaggcgctcctcacgaacgcgcccatcttggtgccccccgctgccggagaagccctcttgatctacgtcgccgctaccactcaggtggtcagcgccgcgatcgtggttgagagacgagaagaggggcatgcattgcccctccagaggccggtatacttcatcagtgaggtactgtccgagaccaagatccgctacccacaaattcagaagctgctgtacacggtgatcctgacgcggcggaagttacgacactacttcgagtctcatccggtgactgtggtgtcatccctccccctaggggagatcatccaatgccgagaggcctcgggtaggattgcaaagtgggcggtggaaatcatgggcgagacaatctcgttcgcccctcagaaggccatcaagtcccaagtcttggcggactttgtggctgaatgggtcgacacccaacttcctgcagttccgatccaaccgaaactctggaccatgtttttcgacgggtcgctgatgaaaacaggggcaggcgtgggcctgctcttcatcttgcccctcggaaagcacctccgctacgtgctgcgcctccatttcccggcgtccaacaacgtggctgagtacgaggctctggtcaacgggttgcgcatcgccatcgagctaggggtccgatgtctcgacgcccgcggcgactcgcagcttgtcatcgaccaagtaatgaagaactcccactccgtgacccgaagatggaagcctactgtgacgaggttcggcgcctggaagacaagttctacgggctcgagctcaaccacgtcgcccgacgatacaacgacactgcggacgagctggctaagatag

SEQ ID NO: 29464 - DNA, 1986 bp, Zea mays
  Peptide Sequence Number=SeqID_71243
atgtcgcggtccgatgggccgaaagctctgctctcccgacggcaggggtacccctcgaagcatcgcgtcgcgacttcccggttcatgcgagaagcctcggtccacaccgggctcacgcgcaacacagcgcctgcggtcccgggtcgcctcggcaacgagcaccaccaccgcaaccatcgaacccacctcgacgagagggtgcgccgaggctaccaccccaggcgtgggggacgctacgacagcggggaggatcggagtccctcgcctgaaccacccggtccgcaggctttcagccgggccatacgacgggcgccgttcccgacccgattccgaaccccgactaatatcacaaagtactcgggggagacgaggccggaactgtggcttgcggactaccagctggcctgccaactgggtggaacggacgatgacaacctcatcatccgcaacctccccttgttcctctccgacaccgctcgagcctggctggagcatctgccttcggtgcagatctccaactgggacgacctagtccaagccttcgccagcaacttccagggcacatacgtgcgccctgggaactcctgggatctccgaagctgccgccagcagccgggagagtctctccgggactacatccggcgattctcgaagcaacgcaccgagctgcccaacgtcaccgactcggatgtcatcgacgcgttcctcgatggcaccacctgccgcgacctggttagcaagctgggtcgcaagacccccactagggcaagcaagatgatggacatcgccaccaagtttgcctctggccaggaggcggttgaggccatcttccgaaaggacaagcagccccagggccgccagccagaagatgtccccgaggcgtccactcagcgcgacaccaagaagaaatgcaacaagaagtcgcaagcgaaacgcgacgccgccgacgcggaccttgtcgccgccgctgagtacaagaaccctcggaaacctcccggaggtgccaatctcttcgacaacatgctcaaggagccgtgcccctatcatcaaggacccgtcaagcacaccctcgaagagtgcgtcatgcttcggcaccactttcacaaagtcgggccacctgcggaaggtggcagggcccacaacaacgacaagaaggaggatcacaaggcagaggagttccccgaggtccctgactgcttcatgatctacggtgggccggcggcgaacgcctcggctcggcatcgcaagcaagagcgtcgggaggtctgctcggtaaaggtgacggcgccagtctacctagactggtctgacaagcccatcaccttcgaccaaggcgaccaccccgaccgtgtgccgagcccggggaaatatccgctcgttgtcgaccccgtcatcggcaacgtcaggctcaccaaggtcctcgtggacggaggcagcagcctcaacatcatctacgccgaaaccctcgggctcctgcggatcgatctgtcctcggtccgggcaggcgcggcgccttttcacgggatcatccccgggaaatgcgtccagcccctcggacaacttgatctgcccgtctgcttcgggactccctccaacttcagaagggaaaccctcatgttcgaggtggtcgggttccgaggaacctaccacgtagtgctggggagaccatgctacgccaagtttatggccgtccccaactacacctacctcaagctcaagatgtcgggccccaacggggtcatcaccatcggccccacgtaccgacacgcgtacgaatgtgacatggagtgcgtggagtacgccgaggccctcactgaatctgaggccctcatcgccgacctggagagcctctccaaggaggcgccagacgtgaagcgccatgccggcaacttcgagccagcggagacggttaaatccgtccctctcgaccccagcaacgacgcctccaagcagatccggatcggctctgagctcgaccccaaatag

SEQ ID NO: 29465 - DNA, 654 bp, Zea mays
  Peptide Sequence Number=SeqID_71244
atgaagtcagggctcggtccactcaagggacaccaactcgcctcgcccgagcccagcctcgggcaaggagtgaggcttacagcagccaagtccggcttcgggcgccataggaagcgccgcctcgcccgaccccagggctcgtgccccgtctcggcctcggatgacgaactccgcctcgcccgaccccagggctcggactcggcctcggctccggaagacgacgaactccgcctcgcccgacccagggctcggactcagcctcggctccggaagacgatgaactccgcctcgcccgacccagggctcggactcggcctcggctccggaagacgacgaactccgcctcgcccgacccagggctcggactcggcgtcggttccggaagtcgacgaactccgcctcgcccgaccccagggctcggactcagcctcggctccggaagacgatgaactccgcctcgcccgacccccggggctcggactcagccttgtcctcagacgatggtctccgcctcgcccgacccggggctcggactcgacctcgacctcggaagacagactcgacctcaacctcggaggagccaccgcctcgcccgacccagggctcgggccgaccacgtcacaggggggccatcattacccttcccctagctag

SEQ ID NO: 29466 - DNA, 447 bp, Zea mays
  Peptide Sequence Number=SeqID_71245
gtgcttctctcctcgcatcttctctgcgtctccgtcctgcacatctcgcgctccctcctcctcggctcctcccaaaccccaccctcccctgcttgcccgcggctccggcgacagccgctttgcactccggttccctccaccgccgctccaaaggtccagccgccatcgcttcgggctccagatcccagcgccagcgccccaaaggtccagcctcaaggtatcaatgattctgaggcatacgacatattttttgcgacatggatgcacccgattttccctgccctcttctatgcctgtgaaagagtcataaggaaatttcatgagaacgactaccattcaggtattgtgaggcaccccttctctataactctggcaccaggagataactacttgactgtgcatatccgcgcgctgggtgaccgggcatccaaactttcgattctctga

SEQ ID NO: 29467 - DNA, 621 bp, Zea mays
  Peptide Sequence Number=SeqID_71246
atggatcccgcagccatgttgagatccccgtgctctatcgtctcgccgggctccttattaaccgccccacttctcccagtacgcctcgccgtccagccacgccgccgagtgcctggttttattgcgccctccggcaggccgtccgtcgcgcggcgcgccgcggccggagacaagttcgaggccgagacgcccatagagaaaagtcggttcccgtttcttctggttgacagagttattgattacaaaccaggagaatatgctgttgcaatcaagaatgtgacaataaatgataacttcttcccagggcatttccctgaacgacccataatgcctggtgttctcatggtcgaggcaatggcccaggtcggaggaatagtgatgttgcagcctgaagtgggtggatctcgagagaacttcttttttgcggggatcgataaagtgaggttccggaagcccgtgatcgctggagacaccttgataatgagaatgactctgatcaagctgcagaagagattcggaattgcaaagatggaagggaaagcttacgttggcgccgacctggtgtggagtcctgagacagtggtcaataacgaagttgaagatcatgcggggtcgtactga

SEQ ID NO: 29468 - DNA, 390 bp, Zea mays
  Peptide Sequence Number=SeqID_71247
atgtccgcctccactgcctgcgatggtctccctcacctcattcctcttctcgcatgggctgccggcgcagctgcaggacacgaaggctgcgaagctggtgtggcgccagcggagatgcgatcccccccatggtcggcgagctgggaattcgggtacgggctcgcgctctgtaggaagcggcaaatgttgactaagttggcaagaagggagaagacaaccaacatcaagccagatcatgatattgatgtctatatgaagatattagacttggaggtctgtgctgatacgctggtagggaaggagatgatgaggggtatttctggtggtcaacgaaagcatgtcacaatagatcctgtatatggtgtctatgaaggttcttacttcttatag

SEQ ID NO: 29469 - DNA, 1763 bp, Zea mays
  Peptide Sequence Number=SeqID_71248
atggcgaggccgcgggacacggccgcgtccgtggtcgatactgtcgctatctgttctgcccccaccgtcatcggtgctggtggtggcaccggcccagaccgtgctgatagccgcctaaatttcgccggcggtttgttccgtccgctctccctccgctatttcgtcatcgtggttctagggttcgtgcccgctgtctccgattcgacgccaagggttcgtgtccgctgtctccgattcgacgccattctactcctcagtttgttccgtccgctctccctccgctatttcgtcatcgtggttctagggttcgtgcccgctgtctccgattcgacgccaaggtttgttccgtccgctctccctccgctatttcgtcatcgtggttctagggttcgtgcccgctgtctccgattcgacgccaagctgcgtgctgtgctccattggtgtcctccgtttgtgcaatctttgtccgacttcgtcgtcctatggtttggggtttgtactggcaactgcgtgatgtgctccatcggtttgttccgtccgctctccctccgctatttcatcatcgtggttctagggttcgtgcccgctgtctccgattcgacgccaagggttcgtgtccgctgtctccgattcgacgccattctgctcctcagtttgttccgtccgctctccctccgctattttgtcatcgtggttctagggttcgtgcccgctgtctccgattcgacgccaagggttcgtgtccgctgtctccgattcgacgccattctgctcctcagtttgttccgtccgctctccctccgctatttcgtcatcgtggttctagggttcgtgcccactgtctccgattcgatgccaagggttcgtgtccgctgtctccgattcgacgccattctgctcctcagtttgttccgtccgctctccctccgctatttcgtcatcatggttctagggttcgtgcccgctgtctccgattcgacgccaagcacggggctgctgctcgccattgctcccttcaccgcctcagtcctcagccggccgtctccttcacgtttgttccgtccgctctccctccgctatttcgtcatcgtggttctagggttcgtgcccgctgtctccgattcgacgccaagggttcgtgtccgctgtctccgattcgacgccattctgctcctcagtttgttccgtccgctctccctccgctatttcgtcatcgtggttctagggttcgtgcccgctgtctccgattcgatgccaagggttcgtgtccgctgtctccgattcgacgccattctgctcctcagtttgttccgtccgctctccctccgctatttcgtcatcgtggttctagggttcgtgcccgctgtctccgattcgacgccaagggttcgtgtccgctgtctccgattcgacgccattctgctcctcagtttgttccgtccgctctccctccgctatttcgtcatcgtggttctagggttcgtgcccgctgtctccgattcgacgccaagggttcgtgtccgctgtctccgattcgacgccattctgcacctcagtttgttccgtccgctctccctccgctatttcgtcatcgtggttctagggttcgtgcccgctgtctccgattcgacgccaagggttcgtgtccgctgtctccgattcgacgccattctgctcctcagtttgttccgtccgctctccctccgctatttcatcatcgtggttctagggttcgtgcccgctgtctccgattcgacgccaag

SEQ ID NO: 29470 - DNA, 657 bp, Zea mays
  Peptide Sequence Number=SeqID_71249
atgcagcacctcggacccccgtcggaaacgctttccgacaagaaggcacccgggggcttcaagcacctgctggtcgccatcgacaaattctccaagtggatcgaggtccgacccttaaccagcatcgggtccgagcaggcggtggcgttctttacaaatatcatccatcgctttggggtcccaaactccatcatcaccgacaatggcacgcagttcactaagaagaagttcctggacttctgcgaagaccaccacatccgtgtggactgggccgccgtagctcacccaataacaaatgggcaggtggagcgcgccaacggtatgattttgcagggactaaagccaaggatctacaacgacctcaaaaagttcggcaagcggtggataaaagagctaccctcggtggtttggagtctgaggacgacgccgagccgggccacgagtttctcgctgttctttctagtctatggggctgaggccatcctacccacagacttagaatacggttccccgagggcaaaggcttacaacaaccaaagcaaccagaccaaccaagaagattcgttggaccaactagaagaggctcgggacgtggccttactacacttggcatggtatcagcagtctctgcgacgctaccacgcccgaagggtttag

SEQ ID NO: 29471 - DNA, 1464 bp, Zea mays
  Peptide Sequence Number=SeqID_71250
atgtcgcctcctccgcccccgccgctgctgcgcaacgagctgtcgcgcaggacggcggtgctgggcctgcgcctgtgggtgctggtgggcatcgccgtcggggccgccttcgtgctgctcctcgtgctcatctccctccacctcgccgcggcgcggcggaggcggcccaggaagggcgtcgcgcacgcgcccgcgcacgcgccggcgggggcgccgccgctgtccccgtccaccatcccgcccgtgtccaaggagatccaggaggtggccgtccacgtcggctcgctccgccactacctcgagacggggcacgcgttcctcaaggacggcggcggcggcgacggtgagtccgtggcgtacgggtcgcagcgcgtccacatcgaggccggcaagggccagcgcatggtcgcggcggcgtccgacgcgctgtcggcggccgtgggccccgaggtgtcgcacctcggctggggccactggtacacgctgcgggagctggaggaggccaccgccgcgttcgcccccgagcacgtcgtcggcgagggcgggtacggcatcgtctaccgcggcgtcctcgccgacggctacctgtcgccgtcaagaaccttcctcaacaaccaggggacaagccgagcgggagtttcagagtggaggtggaggccatcggccgcgtccggcacaagaatctggatacttgtgtacgagtacgtggacaacggcaacctcgagcagtggctgcacggcgacgtcggggcagtgagcccgctcacctgggacgtccggatgaacatcgtgctcggcatggccaaagggatcacgtacctgcacgaggggctggaacccaaggtggtgcacagggacatcaagtcgagcaacatcctgctggacaggaggtggaacccgaaggtctcggacttcggcctcgccaagctcctgggggcggacagcaactacgtcaccaccagagtgatgggaacgtttggctacgtggcgccagagtacgctagcaccggcatgctgaacgagaggagcgacgtgtacagcttcgggatcctgatcatggagatcatctccggccgaagccccgtcgactacgccaggcctgccggagaggtaaaccttgtagagtggctcaagaacaaggtgaccaacagggactacgaggccatcgtggacccgaagctgccggagaagccgtcctccaaggctctcaagaaggcgctcctggtcgcgctgaggtgcgtggatcccgactcgcagaaacggcccaagatggggcacgtaatccacatgctcgaagtcgacgacttcccgtatcgagaggaccgtcgaactcttcggccgggcaacggcagccccctggagaaggcgaggaatccggcggcggggtcatgcgacggcagcagctgctacgggggcgacacgaccaccgcgagcacgccgtccagactagtgcaggacatgtag

SEQ ID NO: 29472 - DNA, 258 bp, Zea mays
  Peptide Sequence Number=SeqID_71251
atggtccacatcgtcaagcaccatgatttcatgctcgagggcttcctggtggaggaagaagctgcgtcttccacaccacgggccaccaaccgctctgcgcctggtgctgctgctgtgcactctgcgcgacagcacactcccacgcagacgtccagagcgtctagggctgcgcctggggcgttgtctgcggctagggaattgttgcgccaccctcctagctccacggcctcaccggggggccatgaagtagtggtgtga

SEQ ID NO: 29473 - DNA, 798 bp, Zea mays
  Peptide Sequence Number=SeqID_71252
atggagatggggacgccggttgccaggaccttagtaaccaggtttccggatcgatgggatcgaggaacgggaacgtgtttttttggtggtggtggtggtgggatggaagaggaggaacaacaaattttaaaaggtgatgaggtgattgttgaactggatgcttcattagaggacttgtacatgggcggttcattaaaggtttggagagagaaaaatgtcataaagccagcaccaggaaagaggcgctgcaactgtaggaacgaagtttaccatcgacaaataggtcctggaatgtatcaacagatgactgagcaggtctgcgaccaatgtccaaatgtgaaatttgtacgagaaggtgaattcttgactgttgatattgagaagggaatgaaagatggacagaccagatttaccggtaacggtatttttcgaaaacaggctcggttatcggaattttatgttggtatagatataggaatcggggtaagacttgcttcgattattccttcaccataccccactcacgaggttttgtttttcgaggaaggcgagcctaagattgatggcgaaccaggcgatttgaagctgcaagctctggttggtttcgagaagacaatcaagcatcttgacaaccatctggtagaaattggcaccaagggcatcaccaaaccgaaggagatcaggaagttcaaaggtgaaggcatgccactataccaaagcaacaagaaaggtgacctgtatgtgacattcgaggtgttattcccgaaaaccctaaccgctgacctgtgccaagcttaa

SEQ ID NO: 29474 - DNA, 402 bp, Zea mays
  Peptide Sequence Number=SeqID_71253
atggaggcggagacttggctgtacggtgaggagtccgatgagcgtgagcagagaaagacagagggggaaggggtgaaccaaggggtgtcccaagttgatggcgtcgaggcagagctcatcggggcaacagacatagcgggctcccgatggtggccgcggaacaggtccgaaaccacggcggacggcgactccgactctatcgatctagggctccaagtctatcttggtcctacagtcaggggtaccataagcatgatgaccatgggacaacgagcggtaggggtgctgagtcccaacatgggctggggaaccatcctcctaatggcggcgctctgcgcgctcaacacgcagttccgcaatcttcgcacgaggattgcccaactcgtcaagggcgtggtctag

SEQ ID NO: 29475 - DNA, 324 bp, Zea mays
  Peptide Sequence Number=SeqID_71254
atgcagtcggttggggcgctgcgcctgcgcaaggcagcggcggctgaagccgctgggcaactgcccagcgcccgcgaggcggacgagcgcgtccgtgctctgcgcaccggttgttgggccgtcatgggtgcgctgggaagacgtgggcaggcacgagcagcggctaacccccttaacaggagcattgatttgcacttgatgacgctgctgctgtctctgatcttgactgatgccaattggataggtgcaagagaaaaaggggaaactactttaaggccatcaaaagacaaggagaatgataagacatgcaagataggggcatga

SEQ ID NO: 29476 - DNA, 297 bp, Zea mays
  Peptide Sequence Number=SeqID_71255
atgaaggagaaggtggacgtgtcggcggtggacctggaggccggtatcggggagacgttgtaccgtggatctcgtgaagatgtcatcccttccgtcttcctttcttctcccccaccccctctggatcctccatcgctgccacaactttcgtctatgtgggacaaggagggtgcggccaagggcaacgcggtgaccccaacgttagccacggccatgctgggctcgctggcgccctgggtgtgcgccgccgcgggggcgcccgtgatggcgcccaggcttaagctactgcaaggttaa

SEQ ID NO: 29477 - DNA, 474 bp, Zea mays
  Peptide Sequence Number=SeqID_71256
atgacgactgcgtcaaagaagcgggccccgagccctcctgctgatcaggggttcgaaggctggcccctcggaagggttcgacagccgccccagagcactcgagcttcaggctcattactgattagaggttcgaaggctggcccctcggaaggccgccccagagcacgtagagcgagggatgactctgggtacgtccgatacatggccgaggctcgggctacgctcccgaggccgggactgccgccgctctgcaaactcgctcgcgccatcgttctgtgcacgcggtcgggccggggagcatcgttggtgggtggtggtgtcgaccgtgggctcggtgttgatgtggggaatcgagcactggaccgccgggtagcgcttctcaggcgagctctgccgtgtgaagtgagcgcgccgccacggctggggagcgtggtgggggaaaatgcatcgtcggctgttgattcggaggagtaa

SEQ ID NO: 29478 - DNA, 393 bp, Zea mays
  Peptide Sequence Number=SeqID_71257
atggccgaggcggaggcgagcagcaggcggcgccgctgcggcggcgcggcggagctgtgcgcgacggccgcgcggctcgcggacgcggcctcgtggtggtgcgcggtggcgctcgtggcgctcgtgctgctgggcgcgctccgcgccgagaccgacggcgtcggcgacggcgacggcggcggcgcctaccgtgcgctccggggcccgcgcctgggcggccccgcggcgcggccgtgcgaggaggtgtacgtggtcggggaaggcgagacgctgcacagcatcagcgaccggtgcggggaccccttcatcgtggagcgcaacccgcacatacacgaccccgacgacgtcttcccggggctcgtcatcgcgctctgccccaccaggaacacctag

SEQ ID NO: 29479 - DNA, 303 bp, Zea mays
  Peptide Sequence Number=SeqID_71258
atggggcagcaacttgctatatgcattacaaaagtaaggctgaaaacttctgaggtgattagtcacactagggaaaacagttttgtcaaattcgaaagaattctagactctagagtacgaactgaacccacttcaactacagtctccaagaggagaggagcttctttacttgattggagcttggtttctcttattaatatgatcatcttctttgctattcgatttgctgttccaagaagaggtatggtgagaatgatggttatccttctcagaaagggagagatcaagaaagatgagatataa

SEQ ID NO: 29480 - DNA, 261 bp, Zea mays
  Peptide Sequence Number=SeqID_71259
atggcattcgcatggcatggcatgggactatgggagatagccagagagacaccggacgcgatgcgacatgatgtggacgacaggcagggatcggcgccgtgcccgccgtccgcactctcggcgtgcgtctcggcgaggtccgcgctccggtcagcgtcgacaggattcagagcttcagatgccggtagcctgtattgctgtatccggacggcctctcacccaactctcaacaagaaacaggtggatctggacgtttcatga

SEQ ID NO: 29481 - DNA, 405 bp, Zea mays
  Peptide Sequence Number=SeqID_71260
atggtgttcaagagggtggccgggatccaagccatcgctgagtccggctgcttcaaggcaagctccttccacttcccaacaattaagctattaactgctttaatcacaatcgctctgcccctcccgacgaattttggtgatattgagtttggcttctttcctcatgttgcacctaagactgtcgaacacattttcaaacttgtgcggcttggatgctacaacacaaatcacttcttccgggttgacaagggtttcgttgcacaagttgctgatgttatgtcaggtcgaaccgcccctatgaatgaggagcagaaaaaagaagcggaaaaaacaattgttggtgaatttagtagtgtcaagcatgtcaggggaatcctcttcatgggaagtttgatagtcgcctag

SEQ ID NO: 29482 - DNA, 140 bp, Zea mays
  Peptide Sequence Number=SeqID_71261
cgtgctctttaccacgccggacctcgtcgtgctctttctcacttgcctcaccgtgaccggcactccccgaggagtgacgctcgagcacttgctatcgtcgaagaaggttgccggcgacgagtttcctcgatcggacacgg

SEQ ID NO: 29483 - DNA, 1449 bp, Zea mays
  Peptide Sequence Number=SeqID_71262
cttatcagaaatcttatcagattaggtctttccattgctagatactacatcaattacaagctgatgaagaaaatgttaaagcaatatgtccaacagacccagcatggtgggaaagatcgtgaacaagttcttaaagagttttcaaggattcttgatgaccagattgaaagaatcgtgctttttctgctacaacaacaaggccatcttgccagtaggattgaggaattgggagaaaaacgctctgctctggaagagtatgacatatcacaagtttatcagctacatgatgcatacagagaagtcgggcttgatcttataaagcttctccgctttgttgacgtgaatgctaccggtatacgcaagatactaaagaaatttgataaacgctttggctacaagttcactgattattatgtcaccactcgcgcaaatcatccttattctcagcttcagcaagtctttaagcaagtgggaattgtagctgttgtaggtgcattatcgcgcaaccttgaatatctgcaacatcatgaaggaagctttgtatccatctatgatcgtccagcagttactttgaaggaccctattatagaccaagtaaaccatgcagtacagaagctcacgcatgccacgaattttatgcaattcttgggacaacactcgcttattgtccaggaagatgcacaaagcgggtcagaggaccttgttgatgatcagagctaccatttcatgtcgctgatgcttaatctagtgaacacattcctttacatggtgaatacatatatcattgtgccgactgcagatgactatgcagtaagccttggggctgctgcaactgtctgtggtataattattggatcgatggcagtcgctcaagttttctcctcagtctacttcagcgcctggtcaaataagtcctacttcaaacctcttgtattcagtagcattgtgctgtctcttggaaacctgctgtatgcattggcatttgatctaaattcactgtcagttctcctaattggacgactgttatgcgggttaggctctgcaagagcagtgaaccgtcgctatatcagtgactgtgtgcctctcaagatgaggctacaagcctctgccgggttcgttagtgctagcgctcttggcatggcatgtgggcctgctctggctggttttctccagactaaattcaagatatactcgatcacttttaatcagagcacattgcctggatgggttatgtgcattgcttggcttatttacttactgtggctatggtttacattcaaggagccggaacacttcactaaaactttggtcaatgaacatccatcagaatcaggtcgccaaggaaattctaacttggaggaaggtctagctcaaccattgcttctaggtgtagaacagaggcaggatgagaactcagacgatagatcgaaccatggatctattgagtaa

SEQ ID NO: 29484 - DNA, 156 bp, Zea mays
  Peptide Sequence Number=SeqID_71263
atgggcgttcacgaaacagagattgagggcgatgagaaattcacggtctctggtgaacgattggaggcaagacttggtggcttggtgtgtgatttccctacggacccgatggtgcgctcaacttatagagtccgcgagcggtggtcggtgaattag

SEQ ID NO: 29485 - DNA, 177 bp, Zea mays
  Peptide Sequence Number=SeqID_71264
atggaccacatatgcagggcctcaaatagtgttgatgttgagattgaggatgaggaggagccatatgaggctgcacgggccttagattctgatgacgactgtcatggcttattcccgtcggttgtcagccgccaggcgtcccttgtcggggataagtttatccccgtcagcggctga

SEQ ID NO: 29486 - DNA, 1692 bp, Zea mays
  Peptide Sequence Number=SeqID_71265
atgtctgggtgtaagtctctagcgtgttgggttgtgtccttcggccaccagttggtgggccagctcactcaggcgctggagcaccagacccgtacaatcctcgttgagctcaacaagtggttcacgacgatcgactccaagtgggaagcgcgagtcgaggcggcgcaccaagcagcggtgggcgccgtcgtggagtggcggccccgggttgatgcctccatcgagcatctgcaacaacaccaagcagatgaagatgctgtcgacgggttcggtgatgtgggcgctgtcccagatccagtggaggaggaggtacatgtcgacaagcccaccaagtgtttgatgggagtcctcaaccgcgaaacctatcctcgacaagggcttcaggcacagccgtccagcctgatgacgctctcctacgacgctaaagccgacgatgacgaggtgtttactggcgtgttggacgctgctttccccaccgccttcaacgacgactccactgattccaacgacatcgagggcttctacgcgtgggcaaacaccgaggacacagaggcagccccgccaacatcctcgtcgctaccttggacgctctcgagcctcatccaccacacgctggctagggacgtcgtccatgccgccttcgacccagtctgccacaccgcagttcccctacacggcggcagtggccaccacgacgccaagcagctggttccggacaccaccttctccgccttcttccacaagtccgtcgtcgtgctcgcctccacccgggacatcgtcggcctccatggcgcttcctccgcagcatactacatcgccaatccggccaccttcgcccgagagcgcctcccagatcacggttgggccggcttcgtggtgaacgcgcaggcgttgtgggaggaaacaggggaacggccgtgctatggtgttcacagaagcgttgggacacatgtttcaaaggtgctgtcagtcactctagatcaatggacagatgatgagatcaactccatgatagaagttggtggaaactcttatgccaatgctatatacgaagcacttctgccagaggactatgagaagccgcatccaaattctagccaagaagagagagctgaattcatcagatcgaagtatgagttgcaagaatttgtgaagccaagcctcgtctccagctataagggctccttaggggataccagttctcaaaaacatacagataatttcgtgtttccttctgctagtttcagcagtgaggctagaatggttgagatcattggaatactaaaagttaaggtgataagagggactaaattggctgtaagagacctgatgagtagtaacccctacgttgtgctgaacctaggacaacagaaagcaaaaacttctgtgagtaaatgtaatcagaatcctgtttggaatgaagagtttaagctgtcagtttaccagcaatgcgggcctctgaagcttcaagtgttcgaccacggcacgctgtcaaaggacaattcagaagcaagaattctagtttcagaaaaaagagtgtcgatggtacagttcaagaccttggaacacatgctgcttcactcagggcatcaggattctggatgtgctaagattctgcatcgacttgagggcaagtcgagttttaaggaggagggaatgttacatcgccattgtcagatactccacatatga

SEQ ID NO: 29487 - DNA, 423 bp, Zea mays
  Peptide Sequence Number=SeqID_71266
atggcggatggcggtgatccatcgattctggcgagcaattcgccgccggacgatggctcacgagctcgattgcccacccgcgcgcgatccacacagaacggagatcccttggtcaactcctcagccaacgagcaacaccgggcgtgggatgagcacatggcggcgagatggaatgcagagggaaagcaacagcagcgcccgacgtgggaatcgctggagcaggcgggggaccttctctcccgcttctatttctctcgcgtcggctggttcaatggtggcaatcccgcacggctaaaatcttccaaggcgtgcgaagaacggtggcgactgatatttaaatctgtgaggaccccgcaacggcccgagaagggggaagaaacgaggaccgggctcgatggtcgtccgatggccatgcgaggatag

SEQ ID NO: 29488 - DNA, 555 bp, Zea mays
  Peptide Sequence Number=SeqID_71267
atggcggtcaccggcgaccgggacgggacatatagtggcacgctcaatccaggccgtcttatgaaagaaaaactcgacaaagttcagaagaagtgccatttcaagaattatgatcttatccaaccacagaatcgcttctgctttgaaaagagggattggatgactgtgcagccaaacgagctgcctcatggatcccaactaattatgggtcttaatcctccttttggagtcaaagcaagtcttgcgaacaaatttattgacaaagcattgacattcaagcctaagctcattgtactaattgtccctaaagaaactaaaaggttagatcagaggagaacaccttatgatttgatttgggaggacagtgagtgtctttctggcaagtccttctatttgcctggttctgtggatcttaatgataaaatagttgaagggtggaatgcatctgcgccacccctctatttgtggagtcatcctggttggacaaagaagcacatgcaagtggctgaagagcatggtcatacttgtatggggaagataagcttgccatgttga

SEQ ID NO: 29489 - DNA, 186 bp, Zea mays
  Peptide Sequence Number=SeqID_71268
atggctctgatcatctatacatgcgtgatttgggtgcggcaatggtggacgaacggctccaaccacggcctctgtggtaagccaggcgtcggagcacagtttcgtctggaggtagaaggtgatggcctttgccatggatctagtgttgcacggttgggattaggccaagcatacatgttcggctag

SEQ ID NO: 29490 - DNA, 369 bp, Zea mays
  Peptide Sequence Number=SeqID_71269
atggtgaagacgacgtgggagaccggggaggacactgtcgtggcaggggtgggggctgaggcggcgggaagcacctccaatctctttgccccgcacggacctgagctgccatcgtcgccttgccgtcgggatcgctcaggagaacaaccatggtgcttatgtgcgtgcctcgacccttgtttggatgtctctcatctcgtggatctagggttctttggtgattttgtcttggggagtcgccctctcgattccccctcgatccagccggagcagtcccctttccctcctccacacaagggcaccgtcatctcctccttgtgttgctcaatcgcccagtacaacatggattactcgcaggagttcagttag

SEQ ID NO: 29491 - DNA, 525 bp, Zea mays
  Peptide Sequence Number=SeqID_71270
atggaggtcgtggcctttgttacggccatccgtcaatgtcatctgcttcgtcgcgtgtatcaggggcggacccaggcccatggccgcctgggccacggcccggggcgcaggcccattaatgttttagaagatcctagatcctgggccagcgtccagggtctgccgagcgctcgcccagtggccagcgcggcagcgccccagccgccacaagcagcagccaccccaccccacccggccgccagaaaggccaaaccgcacccgccggcgtccctgccgtccagcgatccaggtccggcgtcccgcgtccctgccgtccagcgatccacgccaccccacccgccggccgccagaaaggccaaaccgcagaaaccgagcgccctgtgtctggcgtcccgcgtccctgccgtccagcgatccaggtccggctgccgtggagccggtcagccggtcagccggtgccgcctgcgccccgcctgcgccctacctacgaccctgcgtgactccatctccgccgctgcgatccgg

SEQ ID NO: 29492 - DNA, 123 bp, Zea mays
  Peptide Sequence Number=SeqID_71271
atgacggcaccaagtcctggggccaccacggcagcgcgaccagggctggatgctcctgtgtctgcacgaccaaggataatcccctacttgctgaggagcttacatagacatgctcaaatctaa

SEQ ID NO: 29493 - DNA, 162 bp, Zea mays
  Peptide Sequence Number=SeqID_71272
atggctgccgctgcacgggagctgtgcgccgccgttggggaaggcagatgcacaagtgccatcaatcatggatcggacgacgagcacgctacagaggatccaggggttcagcaggtggagactgctgagcaggagcttgttgaaaacaagttgtgcccttga

SEQ ID NO: 29494 - DNA, 983 bp, Zea mays
  Peptide Sequence Number=SeqID_71273
atgaatccgagaagcttcccagctggtaccccgaacacacatttcttcgggttaaacttccaacgacggccagatcaggcaaaaggcgtgacgggggccaccgctgcggcgccaaccctcgaccctccgctgctccgcctgcgctggagaccatgcaactggaagagatctctgatttatgggatggacggagccaagccagtggcggccgggaagcaggacctggaagagatctctgatttacaggatctctttttctgctacatgtggcaatcacagctagcgaaataccctcagctcggcgccatcgacattggcgccgagctagtacgtctcggcgccaattactttgcgtgtacaacgttctgcgtggctccaacgtggcgggctgacgggcggccgagcagcgggctgggggcgcgtcgggggcgctacgacggcgtgcgggagggagggcgggcggccgggcgggagaggccggcggccggggcggctggcgagtgggtagccggggcggacggggcgctgccggacggggtggcaggggcggctggcggatgggccgagcgagccgctgggacggctgggcgacggcgagagagcccgacggtgggacgggcggacgagcggccgtggcgggcgggcgggagaagaggcggtgggctgggcgtcgggaagggaggggccggcggcgcggcggcgtgcaggatggaggagccggggggcgtgatggcgtgtgggatggcggcgcgcaggctatcgggagcaggcggcagcggtagtggagatggaggaaaacgaatgaagtggaggaaggagatggttaccggtattaaatacctcggcgccaagatccatgggcgccgagctcggccccaagatccacgacaccgagttgtctgccacgtcagctcgccaagtcagttacgcgcgacgcctacacgttcgacctcggtgccaatagtgatggtgacgaggcaagg

SEQ ID NO: 29495 - DNA, 130 bp, Zea mays
  Peptide Sequence Number=SeqID_71274
atggagctcgccgtcaacctccctggggggatcttcaacctacctatggaggagtggagcactgaacccaagcttcgccacagacccgctaatcaccatggaccgccccctccgttgcctgcgaaccccg

SEQ ID NO: 29496 - DNA, 841 bp, Zea mays
  Peptide Sequence Number=SeqID_71275
atggcgcacggttctgccaaacgcagacgcgtccatcccgccccgactgtcgcggcgcgaatcgcggctgtcgcatcctcccatcaataccgcggccgccgcttcctccgtccacacggtaaacctggtggcctcttcctcgccctgcccgcctgcctcttccccacctcgacgccgcccccgcccctgcatccagcgtgctccccgccccctcccccgcgccaccgagacaacgccgtcctcaccgtcgcacggttcagcgacgagatgagcgagctcgccgcgcccaccgacccacccttcccccaaaatccacgctggaaggaatcgtcgctggaagaaatcctcaccaaaatccacgctggatgggatctgtgtgggcaccgtgggtcgcctaaatcgatgccgcaccattggcaccttccatcctcgacgccttccatccatggatggaaatcgtcctttccatcggcggcacccttcttctccccacacagcgccctacctccccatcattctctgcatcccatctgcggtgcaaccccgtacgcgccgagagcggccgcggtggtggtcgtccagtcatcggatgtctggcaagggccatggcgaaggagggggaagggcatcaggaaggagcagggcggaggcttcttcacctgtgggatcgatgccgatctcattgggtggataaaaacaagctccgtagaatcagaaaatgtaagcaaggccctttatgaaactattggcaaactgtcaatccacaaggaggaggcaaggcttattgggcagctgtgcagtggcatgctggccaatctgatcggttgttgccgcgagagag

SEQ ID NO: 29497 - DNA, 657 bp, Zea mays
  Peptide Sequence Number=SeqID_71276
tcacttggagaggctacaccaccgcctatgcaaggagcaggaacaccgttgtcaggagagggagcagcaggactcttcctccccacctcagtagggggtggagtctatgaggcggtcctcccttgtgccccaactggaggcacccctacaccaccacacggtgtcccaattgctggaggagatcccaatggagacaacgatggtggcagctcaggccacagtactgagctttccatggagcaggagctggaaggatgggtcgcccgacccatcactcgtgacgccactcacgattcacattcacgggaagtactcagaccgctggaaagctaccggtcaggtgcgccgaccgaggacgctctccggggtgcagaggcctgctcagagcactatgctattggtgaaggcaatcctaggttgagcagcatagtcaacctagtcactgtgctcaacactgagctgaaccacgttcttgatgagttaagtagggctcgtgctgagatcgcggagctgcatgctgagcgtgcggagcgctgtcaccaggagcatggttctcccgcccccgctgggactcagcacccgtatcactcgccgccacatggacaccatgcttatggcactcccgactgtaggaccaagatagatctagatccttag

SEQ ID NO: 29498 - DNA, 540 bp, Zea mays
  Peptide Sequence Number=SeqID_71277
atgaaacatgggttaggtcaaggaagaaaaggtggggatgaggagtatgctgcagatgaagatggccctgacacaactgatcatccacgagactttggaacagatgttactgcccaaatctcagaagcacatttcgatcaccaggctgaagatggcacccatgacaagggtggaatgaggcagcaggggagagggaggggccgtggagggagaggcagaggccgtggtcagcattatggccacaacagccgagatggccaccatccgattggcactcccccgtcggagcatccagctgtgctgaagccgcccctgggcccccgcataacggatggcacaaaagggtttgttttcaagattttggtgctgaatatttttttggtgaatggttcaagtgttactgttgcgggagtcttcaacaggtcactcgccacatgcgccttccagcagagttccactccaattgtccaccacaattgtgtgctctggcttagagtttcgctactcaagcttatgttagaccgtgatttcctgttgtga

SEQ ID NO: 29499 - DNA, 763 bp, Zea mays
  Peptide Sequence Number=SeqID_71278
atggagcacaaaggggggaaacaaggagacatgcgtaaaggggaaacccgcggccttcgtagaccatcgtctgaagccgaagctgagtccgagccctggggtcgggcgaggcggagttcgtcgtcttccggagccgaggccgagtccgagccctggggtcgggcgaggcggagttcgtcgtcttccggggccgaggccgagtccgagccctggggtcgggcgaggcggagttcgtcgtcttccggggacgaggccgaggccgagtccaagccctggggtcgggcgaggcggagttcgtcgtcttccggggccgaggccgagtccgagccctggggtcgggcgaggcggagcttcctatggcgcccgaagccggacttggctgctgtcagcctctctctgtcgagtggcacagcagtcggagcggcgcaggcgacgctgtcttcttgtcaggccggtcagtggagcggcgaagccatccttgcattaaatgctcctgcgatacggtcggtcggtgtggcgatccggccaaggttgcttctcggcgaagactgggcctcgggcgagccgaagctttgtgctgatgggggttaccagctgagattaggagtcttgggggtacccctaattatggtccccgacaggtccgtccttgagcatccaacagccgaggtcgaactaacctcccaccgacccgagtccggcgccgtcgacgaccagcgcggtggcgccatcgctggtgaaggtcgggacacgattctagcgt

SEQ ID NO: 29500 - DNA, 594 bp, Zea mays
  Peptide Sequence Number=SeqID_71279
atgccggagccatcaaccaccgaagggcggcgtatccagggagagctcaagaatctcctggaggatgccgcgaaggcacccgggggctacacgcacctgctggtcgccatcgataaattctccaagtgggtcgaggtccgacccctaaacaacatcaggctagcgagccgagccggctcgcgagcctatatcgagccgagtcgagcctcatcatcgagctcgcaaagtgaccgagccgagcctggctcggctcgctattccactgagcctcaccgagccgagccaagcctggcttggctcggctcgtttccagccctagtggcgttcttcaccaacatcatccatcgctttggggtcccgaactccatcatcaccgacaatggcaccaagttcacccgcagaaagttcctggacttctgcgaggatcaccacatccgggtggactgggccgccgtggctcaccccataacgaatgggcaagtagagcgtgccaacggcatgattctgcaaggactcaagccacggatctacaacgacctcaacaagttcggcaagcgatggatgaaggagctccctcggtggtctggagtctga

SEQ ID NO: 29501 - DNA, 324 bp, Zea mays
  Peptide Sequence Number=SeqID_71280
atgacttggcttggtgcagccgaagtccagctcggtctggcacaccggactgtccggtggtgcaccgaacagtgtccggtgcgccaggctggcttccggttaacaggccactctcgggaaaaatcggcggcgtacggctataattcaccggactgtccggtggtgcaccagactgtccggatcacctattcacccccctctaggtgctctcagcaccttgttgaggcggccaccgaccaggccgataagagcatggaggccaacatgtgtatcctcgacaacttcgaggaggaggtcacgatcacccgcttgtcggtgacatga

SEQ ID NO: 29502 - DNA, 423 bp, Zea mays
  Peptide Sequence Number=SeqID_71281
atggctggcggttcgctcgagccaggccaaactcgagccgcgcccaaccagcgcaagaggaaggctccggcccctaccgcagacgctgaggacgaggcggaggcggaggagctgcagagtgtggaggagctggagagagaggtagccgatctggaccgccgcgtcctcgaacacgtccgcggcaccgccaccctcctctccgacgctattgtctcccgcctcgacgcgctccgcccgcccgctcgccctgaagctgcagttatctcggaaacatcagttaccgaagacgaccaggagcttgagaagaaagtcaagatcctcaaatctaagatcgaagctaatattgcagacctgccgaagaaaacatttgatttgagtgctgtagtttcggcgctgaccattttgttgcgtgaaatatggtag

SEQ ID NO: 29503 - DNA, 219 bp, Zea mays
  Peptide Sequence Number=SeqID_71282
atggatggcgcttcaccgtggccagggtggcagggtgctccgcgctacaagctgggttggttagacatgcataccgcttcggtggggtttgaatctaagctgacccgctcgatcgtaatccaacggtccacagacgaagataccccttcagccaacgcgttttgcaaaagaacccctatgtttccatccaatcaacccgccctccttggcgtgtgcaag

SEQ ID NO: 29504 - DNA, 483 bp, Zea mays
  Peptide Sequence Number=SeqID_71283
atggcccaagagcacatttctctttcagctacgagggagcagcaagaaaggtttcgtgaggagctgcgacaacaacaaatgacattcatccgacaacaatcagagtacatggctgcttacaacacacaggtgcaacaagcaatgaactcttggtttacagagcaggcacaacaacaactattcatttcccctcaatttcagtcgccgatacctcaatggggattacatgctccgacacctcctctagctcagggggttatgggccacaacacgccgccaccggtgataccagcaccgagacgagcttttggagggggagctactaaagaggagactccaaaccagatagacgacttcgtcaacaacttctttgcatctggaggtagtggtcacaactcaacgacccctatatgtgatgatttgactcttttggtgaatttggccgatgcgatggattctaatgtatttgtgatggaattatga

SEQ ID NO: 29505 - DNA, 489 bp, Zea mays
  Peptide Sequence Number=SeqID_71284
atgaagcacggtactgggacatcagatggggacgcgtcccgttcccactcgtggcacgatgccgtgcaggaggccatccaacgcggcaccgaagtggtctgggatgacctcgaggggcaggccgggcaggatgctaccattgtcaaggtggcagcacctccccagacggccttggtcgaggccatccctgtatcttccgagaaggagccaggggtgccggacaccacatcgaccatggcatcgcccaccgtctcagacctcctgcacgccatccccgactccccgatcatcgttcgcgtccccgaggtggcgagtaccgaggaggccggtccctcaaagcattccgaggaaccgactggggatcagaacatgcctcttccctccgctgaggcaagtggcggacttgtccgcgtggggtcggaccctttggcttggggaggtccgaccctgacgtggatggatgaggatggctatcacacccggttctag

SEQ ID NO: 29506 - DNA, 420 bp, Zea mays
  Peptide Sequence Number=SeqID_71285
atgaagcccatcgtcgatcgtaccgtggtgctgaaccttctgcgttgcctcagaccccgctacggccacctgaaggctctcatccagaggactgtgccattcctcaccttccacgccgtccgcaacaagcttctcctcaaggagctcaccatggagactaaagcatccgcccagcttcggccctctacagtgctcctaccagcggacagacgtcttcgagggcaaggccccgggtgcatccttgcctcgtcctcccacattggccctcctgacggcgccccctacggcgtgcccccaatgactccggctccgccccagctcctacctccggggatccccaccccgacaccttggtccccactggctggaggatgggactcagcctccatcgtcgtcgccttcagtaccccatggcgatga

SEQ ID NO: 29507 - DNA, 549 bp, Zea mays
  Peptide Sequence Number=SeqID_71286
atgacggagccgctcaccaaggaggacctcgtcgcctacctcgtctccgggtgcaagcccaaggagaactggagaattggcacggagcatgaaaagtttggttttgaagtcgacacattacgccctataaaatatgatcagattcgtgacatactgaacgggctcgctgagagatttgattgggagaagataatggaaggaaacattgttatcggcctcaagcagggaaagcaaagcatctcactagaacctggaggccaatttgaacttagtggcgctcctctcgaaacgttacatcaaacttgtgctgaggtcaactcacatctatatcaggtcaaagcagttggagaagaaatgggaataggatttcttgggcttggctttcagccaaaatgggcactgagtgatataccaataatgccaaagttaaatgagatgctatcactagaaatgctgtctctggtacgtatcccatttccgacacacagtatagacttgttagtactcactgttgacaccttggggataatgactgataactccctgtag

SEQ ID NO: 29508 - DNA, 126 bp, Zea mays
  Peptide Sequence Number=SeqID_71287
atggcggacatcgccaaagacagccaatcttcaaccccacgcacaaaacttcaaatcgaggaatgctacacatataggaaaccaagatttgacttcaaattttctttgaaattaaaacaccagtaa

SEQ ID NO: 29509 - DNA, 408 bp, Zea mays
  Peptide Sequence Number=SeqID_71288
atgccccagattctaatctacgctatcaaatccccatccaacggccagccgttaaatacccatggaccactctcgtttgttcctctgctgatctacggttgcgatgcatcctatcacactgctcctgatgactcaatcccgttccactacgcgtgcggcggtgctagagcgcccgcggcagcaccatggccggtgtcgcccaaactccgaaccacgcgcccaaacatcgattctacgaatgctacgcaaggcagtaatgacggcgaacatggccaagggcaccttaccggcaatgacgtcgcagaggagtcgggctacggcgcgagcaggttctacgactgggcagcaggtccctcgccgcccaccgactacaccgagaacttcgaggcccaccgtcgatccccgtag

SEQ ID NO: 29510 - DNA, 198 bp, Zea mays
  Peptide Sequence Number=SeqID_71289
atgaagacaaacgatctgagacatgtacacctctgccaatactgcactactgtagttggtcttgacagggtgtaccgagtaagatgtctcatgagcttccttgaggatcaattcccaaatagactggacattgggaacacacaagtggtctttgaaccacatcacacttctgcatctttgagagcacctagagggggg

SEQ ID NO: 29511 - DNA, 345 bp, Zea mays
  Peptide Sequence Number=SeqID_71290
atggggttcggcaaccgccccagaccactcgggctccgagccctttactggtcaggggttcgaaggctggcccctcggaagggttcgacagccgccccagagcatgcagagttagggatgaccctaggcctcggcctcagcctcggccgcgggagaaggtctccgcctcgcccgaccctaggcctcggcctcagcctcggcctcgggagaaggtctctgcctcgcccgacctcaggcctcggcctcggcctcgggaggagtcacatcctcacccgacctcagcctcggcctcaggagaagtctctgcctcgctcgacctcggccttggaccgactacgccactag

SEQ ID NO: 29512 - DNA, 851 bp, Zea mays
  Peptide Sequence Number=SeqID_71291
cgcgtcggcgtccggcgacacgggggaggaaaacgagcgcctccggcggggagaacgcgcggctgacccgcgagctcgggcagatgaagaagctctgcaacaacatcttgctcctcatgaccaagtacgcctcctcccagcagctagacgcctctgcagcgctctcctctgtcgtcaactgctccggcgagtcatcggaggccgtacccgcgcctccgcccctccccccggcgatcctcgaactaatgcccgcgtgcccgggtcttgccaccgcggccgcgggcctcgtcgccgaagcggatcctgaccaggcctcgaggctgttcggcgtctctatcggcatgaagcggatgcgcgacgacgacgacaccggcgaggaacaggcggaccacggcgccgcagcggatgtgaagacggaggcgtcggatccgcagcatcgcatggagccgtcgccggagtcgccggaccagcatccgtggcccatataccggcctacgcccgtgtaccattcgatgcggccctgcaacgggccggaccagggcgccgggtccgaccaagacgggtccaactccagcctcgggcgcaacagggagctccgcctcgcccaacctcaggcctcggcctcagcctcggccgagggagaaggtctccgcctcgcccgaccccaggcctcggcctcagcctcggcctcgggagaaggtctccgcctcgcccgacctcgggcctcggcctcgggaggagtcacatcctcgcccgacctcagcctcggcctcaggagaagtctccgcctcgcccgacctcggcctcggacggactacgccactggggatgcatcattaccctacccctag

SEQ ID NO: 29513 - DNA, 375 bp, Zea mays
  Peptide Sequence Number=SeqID_71292
atgcaggccttcctcagcaacctgagcaagtgcgaggagggccacgacgaccagacggaggactggatgaagcagatcctctgcgaggccgcctacgacatcgaagactgcatcgacgacttcgcccacagcctccgtccagacctcagggccagcggctgggtgacggccgtccgcaagattctatacttgatccggacgtggtacccccgccgcaacatcgccacccagatcgtcgatctaaagaaccgcgcgcagcatatcggcgagcgccgaaccaggagcatcagggacgtgccgttgcagatcgagtctaggagggagctcctgcagcgatcagggaggtcccctgacggtttgctgctacacacctga

SEQ ID NO: 29514 - DNA, 431 bp, Zea mays
  Peptide Sequence Number=SeqID_71293
atggccgagcagggcggcgcagccggggaggccgctggcagcgacccccctgcgcctgcgcctgcgactgccccggcgccagccccagcgcttgctgcggacgcggccgggcagaggtccctgccgacgccgttcctgaccaagacgtaccagctggtggacgacccggcggtggacgacgtgatctcgtggaacgaggacggctcgacgttcgtggtgtggcggccggcggagtttgcgcgcgacctcctccccaagtatttcaagcacaataactttctccagctttgtgcggcagctcaacacctacggattaaggagatggtgcccgaccggtgggaattcgccaacgacttcttccgccgtgggggagaatccgcctgctttccaaattcctccgacggaagggaacaaccggttccgctggcggg

SEQ ID NO: 29515 - DNA, 279 bp, Zea mays
  Peptide Sequence Number=SeqID_71294
atggcggcggccagccccgcccccagtcgacctcggctctccggtgagctgccctccatgtcctggccgctcagtcgttcgccgcgccgatcgcccaggaagatctgcgatgctctcgtcgttgccgagctgcccagggtcgtccgagctttccccagcgtccttgtagttgaagaatggaagattggagaagaagctgcccacttcgtgcgtgcacaggaaaaagaatcgcatgtgctcgcatgtgcggttacagcagagaggaataagtccatgtag

SEQ ID NO: 29516 - DNA, 189 bp, Zea mays
  Peptide Sequence Number=SeqID_71295
atgccgccgactctgatcttgactggttgggagaggttggaggatgccaaccggacaggtgcaaaagggaagagtatagctagaaaaggtaagatagaaaagatggtggtctttccttaccaaggggaaactgctctaaggccatcgaaagacaaggggcaagataagacatgcaggataggggcatga

SEQ ID NO: 29517 - DNA, 444 bp, Zea mays
  Peptide Sequence Number=SeqID_71296
atgttgctcacgtcggtggcggctcgacgacaattcttcaactccggtgagcaatccaccgagggaagggtgcccgtggttcttatactgcccgaggaaaagaacatccaggtgacacggaccttgggccaggcggttacgcggagccgtggtgctcgggtctgttatgagaggggagacgatgaacctagaaatcagtcctacctgctagtgaaacgagcacggtgggaattttggaagcggagctcgctgaccaggctggattctgcgcagacgcagctaagaactcggcctggcggttgcggccccgagatgagggtgctgacgccaaggtcccacgggacagcgattcaagacgagataggtggggggtttaggctgacgggtgggccagtcaccatgtgctggtgcgcgtgtaggatgcaagcgcgcgcatggcgctag

SEQ ID NO: 29518 - DNA, 237 bp, Zea mays
  Peptide Sequence Number=SeqID_71297
atggcgccgccgcgcgcgtccctgcaccgccgtgcaacctgtgcgacagcggtgggggtggcgcttgtgggtcattggatccacggtggacgcacaagattagatggagagcgtaccacttcggtgattaggtccggatcgtggatctataaagtgacgactgagattagaagcgtccactggccatcgtcgtttatgatctggatgttgcggggtgatcgggcggtcgggatttga

SEQ ID NO: 29519 - DNA, 174 bp, Zea mays
  Peptide Sequence Number=SeqID_71298
atggagggccttgatgggttcaacatcggaaaagatgtacctctgccagataatgctggagtgattgtgaatcccaagggtgatatgaaaggtttcgctatcactggacctatcgacaaggagtgtgctgatctttggcctaggattgctagcgcagcaaacaccatcgtttga

SEQ ID NO: 29520 - DNA, 276 bp, Zea mays
  Peptide Sequence Number=SeqID_71299
gttattactcttgacttggggctccttgttgctgcaactaaatatcgaggagagtttgaagagagactacagaaacttatggagcaaattaagcgaaatgaagacattattctctttaggcgaatagtgcttataaggtggttactacaaactgcactcacattttcacgccatattgagcttaatgttaaggctatgaacaatgtaaataatatcattggaccagcaattgttggaaaggtggaggcatcgaccaaccatctttccgagaagtag

SEQ ID NO: 29521 - DNA, 279 bp, Zea mays
  Peptide Sequence Number=SeqID_71300
atggcggcggccagccccgcccctagtcgacctcggctctccggtgagctgccctccatatcctggccgctcagtcgttcgccgcgccgatcgcccaggaagatctgcgatgctctcgtcgttgccgagctgcccagggccgtccgagctttccccagcgtccttgtagttgaagaatggaagattggagaagaagctgcccacttcgtgcgtgcacaggaaaaagaatcgcatgtgctcgcatgtgcggttacagcagagaggaataagtccatgtag

SEQ ID NO: 29522 - DNA, 228 bp, Zea mays
  Peptide Sequence Number=SeqID_71301
atggccacctccatcctggcgctcttctcgacgatcgcgctgctgctcccagcgacctgcctagccgttgcgcaccccatgggcaatggcccttatatagctcgtccagtcgcacgtcggtgcccgcgggtccgtcgagatacaccacgcgtgtggccatgccagtccacgtcgatgagccacgcatggtctaacgtggagatggcgagcgtgaggcacacctggtag

SEQ ID NO: 29523 - DNA, 231 bp, Zea mays
  Peptide Sequence Number=SeqID_71302
atggcctcaggcgcaaatgctgtggaatcatgcgacacaagtatgcatcaagcgggctggcagtgcctcagggtggactgcacggagctacggtcccgcgccatgaagctcgccgagctcctgcggcaggcggcgtgggtcgagctgtacgagcgccccgccgcgcgcgtcatggccgacacggagcgggtgctccacaaggctgcgggcatggccgcgcgctgcttctag

SEQ ID NO: 29524 - DNA, 1026 bp, Zea mays
  Peptide Sequence Number=SeqID_71303
gtccgctctggtagtgttcattctcacatgaactatggtaccattgtgtatgagtggggcaaggagggacctataatgtactgcagccgcactatttttgaggatgctacacctgaactggttagagatttcttctgggatggtgattttcgtctaaagtgggatcccatgcttgcatactccaaatctttggatgagttccctcagaatggagcaacaattgtccactggataaaaaagttcccattcttttgcagtgaccgtgaatacatctttggaggacgcatatgggaatctgggaagacttactattgtgttacaaagagtcacgccttcatcttcctcgccgcactagggcagatgcctcgcaggagctactcacctgcaccagagctgcctgggaaaaggccgcgcgtcgtggccgctgccggggcagggacacggacccgggccttgcccatgccggggtgggggcaccggcaagtggttgatttcgtggactttccgaactccatagcagatgaaagcagggagaaggctactgtgaaatttggactgggtgttccatatccatcattgcccaagaaagaaaaaccaaggcgtgtggagttgtacttctcaagttggcgtattagagctgttcaatcgcctaaacatgtgggtcagcaatctgcgtgcgaagtaactttggttcactatgaggacatgggcataccaaaagatgtagccagggttgctgttcgccacggcatgtggggtgctgtgaagaaacttcagtctgggttcagagcgtaccagcaaatgagagacacagaaaataccctgtcacacagcgccattatggctcgaatgaccaccagggtatccatcacggcttcgaatggtggcttagaccatgacctctccatcgccgataaaatcagtggcgagaatgacagctcccatgcagttcagcatggttttgactggaagtgggtggtttttggtggtgcggtggctgcggtttgtgtgctcaacaccggactg

SEQ ID NO: 29525 - DNA, 801 bp, Zea mays
  Peptide Sequence Number=SeqID_71304
atgaccgctgagaagtctcgccgcctcatcacatctgattgtggaggcggaggtggcgatgccaagctagaggcttcggtctccgaaggagtggtcaatggggacaagtggtcgcgttttgctgatctcggcgggatggagcaggtgttagatcagcttctggtagaagtggtggtccccctgtgccgtccggagctgccgtatcaccttggggttaggtctgttgctgggctactgttgtacggactgccaggttgcgggaagaccacccttgcacatgccattaccaatgagactggtgtgccgttctacaagatctcagccccagatatcgtctctggagtatctggttatgttattgtcattggagctacaaataggcctgatgctgtggatcaagctcttcgaaggccaggaagatttgatcgagagatatatcttggggttccatatgtgaattcaaggaaacagatactgatgatgcttgctcggaagcttcgacttgaagggcaatttgactttttaaagatagcaagggccacaccaggttttgttggtgctgacttgaaagcattagtcaataatgcagggtatctggcaatgaagagattaattaataaaagaagagctcagtattgttctgaggtaaagcaaaggaaacattacgagacaatgcgaagtgttgagcgtctcgtgggcgtgctcgtcgtcgtggaggtcgagccagcactcgagcggttgtccggaggcgacgcgcgcggcggtaacagatctggcccaagtcaaggatgttggacttaa

SEQ ID NO: 29526 - DNA, 793 bp, Zea mays
  Peptide Sequence Number=SeqID_71305
atggcgcttcctgttgacgtggtgggtctgtgccctaggcagggtgacgtgggggctcctccgaagccgaggttgagtctgtcttctgttgccgaggccgagtccgagccatggggtcgggcgaggcggaggtcgttcggccgaggccagggtggagtccgagccctggggttgggcgaggcggagtttcgtcgtcttccgggtcttagcccgagtccgagccctggggtcgggcggagcggagttcgccgtcttccgggtcttagcccgagtccgagccctagggtcgggcgaggcggaggtcgttcggccgaggccagggcggagtccgagccctggggtcgggcgaggcggagtttcgtcgtcttccgggtcttagcccgagtccgagccctggggtcgggcggagcggagttcgccgtcttccgggtcttagcccgagtccgagccctggggtcgggcggagcggagttcgccgtcttccgggtcttagcccgagtccgagccctggggtcgggcggagcggagttcgccgtcttccgggtcttagcccgagtccgagccctggggtcgggcggagcggagttcgccgtcttccgggtcttagcccgagtccgagccctggggtcgggcggagcggagttcgccgtggtgcctttggcaaggcctgactgtctgtcagactcactctgtcgagtggcaccgcagtcggagtggcgcaggcggcgctgtccttctgtcagactgctttatgctgatgggggttaccagctgagaattaggcgtcttgagg

SEQ ID NO: 29527 - DNA, 1776 bp, Zea mays
  Peptide Sequence Number=SeqID_71306
atgtgtgaatctccatcatcctcgatgtcgccgtctccgtcaccgtcaccgccgcagccgtctaggccgccaccggagtacaagcacttctgtcgagtatgcaacaagggattcacgtgcggcagtgcgctcggtggacatatgagagctcatggcgctagcgacgttgatgggttcggcgtcgacgacgacgactcgctcgacgaagagccgacggcgcccgcgcggtgcactggggcagatcagtgggacgtggcgggaacgtcgtcggcgactcacgcgtacgcgctccgggcgaatccgaataggttgatcaggagctgtcaggtttgcaagaactgcgggaaggagttcacgtcgtgggatcttttccttcaacacgggaaatgcaactcatcagagggcggcgagggagaagagggtgagatggatgggtcagactcgctacgttcgtcgctgcctgcctcagaagccggcggcggcggcgaggaggacccggcagtggcagcagccgcatggtcaaaagggaaaagatcgcgtcgtgtcgtcagaacagatgacccttcgtccaccatggtgtcggcggagcggtgcacgtcaggggacgaggacgaagagcttgcaaattttcttgtcatgctctcgtcgtccaaatccaacaacaacgacgaccaaacgatcgttattacagccgaccatcataaggagccagtatgtgcctctactggtgaaggtggtggtggtggagagcctttaccatttcaatcgcaaacaatctctcttttcacgcaaacccaaacacaagagccagttgtgccactgctgccttcgacggtagcggctacggtatctcaatacatcgcacccatatcacgtggagtttttgagtgcaaggcgtgcaagaaggtgttcacctcacaccaagctcttggaggacatcgggctagccacaagaaagtaaaaggttgttttgctgctaggttcgacaacaatgccaccgaaacagcgatcaataatcctactatagctgctgataccaatagtaaggccgttgttgtcaataatgcagatgcaagcgtagacgccgccacaagagtttttgctatcactagcgtcgacaccgatgtagggacaagtaatgaggcaacatcatcgtcgttgtcaatggcacatgctgttcccatacgacacaatccagcatcagccaccaccaccacgttcaccgtcgcagcgcattgcaagaaaaacgtgaagatgcatgagtgttcagtatgccaccgcttgttcacctctgggcaggcactcggaggtcacaaacgatgccactggctcacctcaaacacgtcagatccatgtaacccactagccatcccacccctaactgaagatctcgtcgtcggcgaagttaaacaccacgacgataccctccaaccaacggtggatgccaccgagccactcctcgacctcacaatagcagcaaatccagctgtagcactagctgcttctacaatgcgccccgacatagcatctactgtacacttgaagcaactagttgtcgcagcaccaagtaataatgttagccaccgaaagaaaactgcagcaacgggtagccataccacagatgcggtggttgaggaagatgaggcggatagcatcataatcaagaaagctaagattagcgatcttaaagacgtggtcaatatggatggtgagtctacacaaccatggctacaagttggtattggttcctcgtcagcccgaggagatgatggatga

SEQ ID NO: 29528 - DNA, 504 bp, Zea mays
  Peptide Sequence Number=SeqID_71307
atggaaatggacggcccgtcggtagcagcagcgatagacaaacgtaaaggaggtcggggaggaagagagactccctgtcctggaggtcgggaaggagcaggagctgctccggctgtccccgcggcggtcggtgagacggattgccgtggaggtggcgccacggctgctggagttggggaagacggaagacgacggatctacgggctagtgggctacggccagtcggccactcggccaggcggccagccgtgcagtgcaggatccaactccaaaccagacagcgcatcagaggacaggatccgcccgcgcagtgcaggatccgccgtgcagaggactgctgcaggcaccaccgccgtgcagtgcaggatccgcccgcgcagcagcagctgggctgggatccgcccgcgcagcagcagccgggagccggcgagccgcccgcacagcagcttgccgcgttggggacttccggactttgccacttggggactggggttggggacttga

SEQ ID NO: 29529 - DNA, 258 bp, Zea mays
  Peptide Sequence Number=SeqID_71308
atgccctattcgcggtgctgccagttctggcacttgttgtatgccccgtttcctgctatgggaatccgaggtccacgtctctccggaaccacactagcagccggtacaccacctcaacgccagccagagccgccggcggatggtcctcgggcggcgcgacgtggtacgggagcccttacggcgccggcagcgacgaaaaaaagtagactaaaagaactatattggtggactgaggttatattggtcaacatcatgtga

SEQ ID NO: 29530 - DNA, 683 bp, Zea mays
  Peptide Sequence Number=SeqID_71309
atggccggcggccctgtctgtcgtgcggtccccgccccgacattcgtgatgccccctatcagttttagaggtggcgaagagcggaccccggatccaaagccccagtggaaccccaggccggagcagatccggattctggaggccatcttcaactccggcatggtcaatccgccacacgacgagatcccccgcatccgcatgcgcctgcaggagtacggccaggtcggcgacgccaacgtcttctactgcggcgcccgtcaagccgcagctcagtccttgatccagaaccaattccagctgctcgcctcgcccacgcaagcacaggcgccagcttcctcatcctcgtcctcctccgaccgctcctctgggtccagcaagccggtgccgcagccgatgttcacgacggcagcggccatggactttccagggccgctcggcgcgacgtgtgcgcaaatgtactaccaagcccaccccgtggcgtcggtctcggcgtcgccagcgcacaaggtgcaggaccctgtagcctccgacgagcccgtcttccagttgtggccacaaggctacttcctgtcggctgtcgaggtcgccaccattctcgggggcagtataggcacgacgtgcccgtgcagcagcagccaccggcggcgttgcctgcgggagcgttcttggggctatgcaacgag

SEQ ID NO: 29531 - DNA, 507 bp, Zea mays
  Peptide Sequence Number=SeqID_71310
atggccgattggctggggaatggggggtatgtcttggctttgggggaaataatatctccgtgttgggcgtcgggggagatacgtacgggtacccgtaagttggcggcttccgtggctgctctgcgcagtaccgtgcggacgctggctttaggtcgggccgggcgggttgttttgttagccagccagtaccctgcctgcctgcctgtacgagcggtgtacgtgcttggcaagccgtgctcgtatgctgtactaactctagagcaggcggaccctgaacggaaggtgggcgctgcatgcggagcggaggttctaggcgctcgagctggtgcggaccgtcaatgggggaggaagcctgacgcggaagccaggtcgtactactccggtggcggactggctggctgcgacgccacctctccgagggaaggcgccgacttcttcggtgttcttcggaactgcgctgttcgttctaggttttgtgtccctcttcacgggacacgtggtcactga

SEQ ID NO: 29532 - DNA, 2843 bp, Zea mays
  Peptide Sequence Number=SeqID_71311
atggcccgcgctgtagctgacactgacgactggaccggggccgtacggtccccgccggccggccggccggcctgcctgctgcgtaccctctcggcctgcccccgcaccgcaccgcaccaggcttttgcgggtcgctgtgcgaggctgcactttgacaggtgggacacggtgactcaggtcccactgggcagtggggtgcgctcggcggtggaattttggtacgcgatgcgcaaagccttttgtggcgtctggttccggatacgggatctttcgagcaagtggcagagccgcctgttttctaacccgtcacccaggcagatcttagccaatgacgttcgggacccacctgacggagactccacatgtcatccgcgtctccctatggcccgagtcccattcgggcagcagcatcatcagccgccgccgccgccgccgcgcttccactttgtcttgagccctgccctcaacgacgactcgcgggccggcagcacagcacgtatagctatggaaggaaacggtggcgcgggcggcggtagcggaagcgcggcaccgccctgggatctcgccatgcactgggcacccgccgtagtgtcgtcctacccgccgcagcccttggagctgcagcagcaggagcttacctgcctcaagctggggaagcggcccgcctgctgctgggcaggggcgccgggcaaccaagcggcgcaggtccacggcaatggcggcgctggtggcgcagctgctgagggtaagaggaaggacaaggcgcctgccgcggcggccgtgacgaggtgccaggtggaggggtgccacctgtcgctggcggacgccaaggagtaccaccggcggcacaaggtgtgcgaggcgcactccaaggcgccccgggtcgtcgtcctcggcgccgagcagcgcttctgccagcagtgcagccggttccacgcgatctcggagttcgacgacgcgaagcggagctgccgacggcgtctggccgggcacaacgagcggcggcggaagagcaacgccagcgaggccatggcaagaggcgtcgcgcacccacacggagtgacggctttcggccacggcggcttcctgccctcgcgcggcctcgtccccgcagggtcgtccccggcggcggctggtgctctctctcttctgtcatcggccagaggcagcgtggcgggcgccagcgggccctggctggtcacggcggcgcgggaggacatcccggcgcgctccagcgcggcgctcgacgaccttatcgccgagaaccgcgccgccgcgctcctcgcgcggcagtacttcgtctccgaccgctcgccggcgcccagacgggatttcgtcgcctcttcgacggcgggttgctccctccagcagcagcagcacccgcccgaccacgaccacacagccggctggcacccgcacccccacccctacagtggcggtggcggtggcagctgtggtggtcggtaccagtaccaccacgtggcgccgccgagcgcgtggcacgcgacgacgctggaccttatgcagccgacagcaagcaccaccgccgctcccgccaccgccggcgcagcgttgtggccagcagtgccggagagggcgggcgcgaggtcgtctcgctctcgcagcgagaccaaggatggcgacgcgtcgggatgtagcggcttggacgcgtgggcgcccactggtggagctcgtgtgctgacacaggaggttgctcaggagcactttgccgctctcgtggacgtcgatcccaagccacttctagaaccgccttgcaaactcacagcgaaagagggcgagaccacacctccacagacagaggccgagcatgccagccggacgaggacgagccttcgtgtcgtcgagcagggcccggcggcccgtagcttaaggagtggcatggacaaactctgcaggagccttggcggcaagacgctgtctgcggcgcgagggagcaccaggacgctgacggcgcggcaggagcagcgtcagaggctgaggctgaagcgtcaagcaaagcagcaacagagacagcgcagcgggggcagcaagcgatggggagcgcggtggctaggggagcggatgcagcagggcgcgcggcgcagggtggcactggccataggcgagaagcgcgaaggaggccgagatgaccagcagagcagacgggcccgctccgaggcgcggcagcacaatccggcacggcggcagcggaagcacaggggacagaggcaaagcggggggcggcagcttttgcgagggaagcgccaccccactgggattggaacggggttgacggagcggcggggggcaggagagcgggcggtggaagggggtctgtacgcgagggatcggcatcttgcaggaggaccggattgcctgtggccggaggcgccacaggcacagcaccgcatggggtcgctcgcggcaatcacgcacgaagtgatcagacttcagaggcaaggcaacggaagccagccgaaggcgagcccaacttcggcagtttccagggaactggaggagggagcggttttgaaggcgaggtcgtggcctcagcagccgaaggcacagtccgatgtccccatccagcacgtctggttggagagcagtaatagcgtcttcttcaacccccggcagccgaattgcagcagcagcccgcatggcggacggcaaacaggggtgaggcgtcaacgagaggacccagccagcctaagcggcccaacccaactcatctcgaggcgccggaagctgctccacgccagcaccagcctcggtgcagcgccggtttttgaaaagctgtgcaccagcgagactgttctgaagctgtcatcgcccgacggcacctg

SEQ ID NO: 29533 - DNA, 207 bp, Zea mays
  Peptide Sequence Number=SeqID_71312
atgcagcagggccagggcggcgcgtggacgccgatgcagcactcgtggggcgccatgtggcgcgccaacaccggcaagccgctgcgcgccccgttctcggcccgactcgtctcgggctccggcaaggtgctcgtcgtcgggaacgcgatccccgccggttggcgcgcgggtatgacgtactggtccaagctgaactacgccacctaa

SEQ ID NO: 29534 - DNA, 483 bp, Zea mays
  Peptide Sequence Number=SeqID_71313
atggggcgagcctcgcccgcggctggtgcgcgaggccgggacaccgggacctggggctcgggcggggatgaggcaggccagacgcgctgcgcgggtggccggaactgggcgagaacgggcgagaggagcgcgttgggcgagatcggtggcggcggtttccgttttcagcacaggcacgtcgaccagacgcaagggaccagcgggaggcggcttttggaggggaagctaatgacatctgggccccacggctcaaggcgatcggccgccgagcgcgtctgcgcgtggctctggcacgcgggccccccgtgggcagcgacgacggcgaccgaaccacccacgcgcactacacgcgctggaagcgcggcggccggcggcggccggcgagcgggcgctcccggttgggctgcaactgggccgcgtgagcgcgcatgccgtgggccgaacggaagcacagggaggctaggccagggaggggtggcttag

SEQ ID NO: 29535 - DNA, 342 bp, Zea mays
  Peptide Sequence Number=SeqID_71314
atggccatgatgggtccgacatcggaaaagatgtacctctgccagaaagagagtcttggtgtagtgtctccgtctcagtcgattaaggaccttgttgatgtaggcctgctgaccgaggacccttcaactggtcacatgcctcgtcatggttcatgtaatcacttccgcatttctgcatttccgatgaacatattgtctgtcagatgggtgaaacgttcctggaaaggtgggcctaatgacttgggaggtcccgtcacaccagcgcagggagccctcacctccgacgaccgatccttcgccgcgattcacgtcaccggcgactggattcatgcctggagttga

SEQ ID NO: 29536 - DNA, 499 bp, Zea mays
  Peptide Sequence Number=SeqID_71315
gcattctcaactgtcgggacaccgggattatattgctccagaggttctgctgaagaaggggatatggaatggaatgtggtctctaggcgcgatcatgtatgagatgctagttgggtatccaccattttatgccgatgatccaataactacatgccgaaagattgtgcactggagaaaccatttgaagtttcctgaggatgcaaagttgtcaaatgaagcaagagatctcatttgccggttattatgtgatgttgaccacaggattggcagtgcaggggcagatcaaataaaggcacatccttggttccaaggagttgcatgggataaactttatgaaatggaagcagcatttaagcctcaagtaaatgatgagctggatacacagaatttcatgaaatttgaggaactggaaaatcctccagccaaaacaggctctgggccttcaagaaagaagtacaaagcagagtataatagtattagtgtattactgctggtatag

SEQ ID NO: 29537 - DNA, 483 bp, Zea mays
  Peptide Sequence Number=SeqID_71316
atgaagaaagtggtctactacgagactgattcttcgtcgccatccacctccggctccgacgcaccgttcgtcacttctaagcgccatgagcgcaagaagtttagtaagatccccctacgctatcctcgcatttccaaacgtactcctttactttccgtcccattaggcaaaccacccgtttttgatggtgaagattataatatgtggagtgacaaaatgaggcaccatctaacctcactccacactagcatttgggatgttgttgagtttggagtacaggtaccatccgtaggggatgaagactatgacttggacgaggttgcccaaatccggtacttcaactcccaagccaccactatactcctcgcctctctaagtcgagatgagtataataaggtgaaagggttgaagagcgctaaggaaatttgggacatgctcaagaccgcacacgaaggagatgaggtgacaaagatcaccaagtag

SEQ ID NO: 29538 - DNA, 246 bp, Zea mays
  Peptide Sequence Number=SeqID_71317
atggcggacgcgcccgccgcggcgatccccgccgccgccgccgaaccgctcgcggcggtggcggaggaaggggaaggggaagcggagggggaggcgcccgccgaggcggcggtggggtccaccctcaccatggagcgcgtcgccgccgcgaagaagttcatcgagaaccactaccgttcgcagatgaagaccatccaggagcgcaaggagaggtactgtaccgtgccggccgtgctgatcccgtga

SEQ ID NO: 29539 - DNA, 1341 bp, Zea mays
  Peptide Sequence Number=SeqID_71318
atggctatagttgttacagaggagcaacctgataataacccagaagatcagggctttacaccagaagaaaatattgacaccgataggaatgataacaacatgagtgatcatgagcctgtttttactgaggatatctatgatccaataaattgggataatcttgataacaagtcaagggacatattagtagagaagggacccatcagagatgaaaatattgaatttcctttggataccaatggcagacatttttcatatactcattactctagaaagatgagcaatggagaagtttatgatagaaagtggttgcttttcaatacagaaaactgcaagagttcattgggtcatgaggggttcaaagattggaagcatattaatgagaggttgaaagaacatgaggctagtatacaacatattacaagcatgaactcttggaatgaactgagggtgaggcttggtaagcatgaaacaattgacaaaaacattcagcagcaaatcacaaaggagaaagagcgtatcagacaagttttacaaagaataattgttgttgtgaaatttcttggtaagcagaatttagcttttagaggaccaagtgagcaactttacaatgatcaaaatggtaatttcttagcttgtgttgagatgattgctgaatttgatttggttatgcaagatcacctcagacgtattcaaaacaatgagattcattatcactatcttagtcataaaattcagaatgagtttatttctcttttggcttctgacatcactaaatctatcataaacacagttaaagaggccaaaattttttcagttatccttgattgtacccctgatgttagtcatcaagaacaaatgagtttgttgatccaatgtgttaatatgtctactcgtaaagttgaggagtattttttgggtttcatgaaggtagatgatacatccggtgatggactttttaattcattacttgattctattatgtcctttggcctaaatattgaagatgttcggggtcaaggttatgataatggatctaacatgaaaggaaagcacaagggcgtgcaaagacgactgtttgatataaatccaagagctttatttatgccatgtgcttgtcatagtcttaatcttacactttgtgacatggctaaatcttgtggcaaagctatttcattttttgggattgtgcaacgagtaaatacattgttctctagttctactaaaagatgtgatgttttgaaggatcatgttgaaagcttaactgtgaattcatggtgcaatactcgttgggagagtcggattaaaactgccaaagcaataagatttcaagctccttag

SEQ ID NO: 29540 - DNA, 342 bp, Zea mays
  Peptide Sequence Number=SeqID_71319
atggtccagggctaccgaaagtgcacgacccccaaatcccgccatggtcgagcgtcgacaacgccgacctcgccccagatcgatagcgccaacatctccccaaatcccaacagcaccgatagcgccgacctcgccccaaatcccgacagcgccgacatcgctgacagcacgcggcccccaaatcccgccatcgcccagacatcgccccagatcgatgataatctggcagcccacaaccctgtcatccccgaccatggccccaaacctcgccctagatcaatgcagacctaccatcgacgccgatttgggtcctccttaaagaccatggcaggacgctcctaa

SEQ ID NO: 29541 - DNA, 2285 bp, Zea mays
  Peptide Sequence Number=SeqID_71320
ccacacttcctccgcactccaaccctttcgacgaggttctctcctccatgtccccacgagaacagacctccctcctctcgcggcagcgctgctggcgccgcgccagggacctcttcaaccgcctgcgcgcgctccccggatacgcccccaaccccgtccatgacgccgtcctcctgcgccacctcgcccgcgcgcgccggtgggccgagctccaccgcgcctggatcgggatgcccttcccaccctccaacccggcctacgcagccctcgccgacgcactcgccaaggccgggttggcgcggggagccctcctcctgctccgccacatgcggacccggggtgtcgcgcctgatgaggtgtccatgaacaccttcgtccgcatcctcaaggacgagggccgccacgacgacgcgctcgctctcttccacagttggtgcgacggcaggttcgaggtcgatttccttgatcttgactgcatcacagttgatttggacggtcctatgcagttcttgcttgctgacatgtacgacgacaaaattgctgctcctgctgctggtgttgcaccagagcgtcctaggaagcccaagcttgtggtgacgtataacgtgttgattgatctctatgggaaagctgggaagctgaagaatgcgctagacatgtttttggacatgccagctcatggggttatgccagatacgtatacgttcaatacactaatcaacatatttgggttttctggcaattcagcgcaggcagaggtgctgtttgctagcatggtgattaggggtgtcaaacctgatactaagacatacaatgtaatgatgactgtgtttgcatccattggagatttagagggagttctgaagtactactgtcaaatcaggaatgcaggcttacatcctgatgctgtgacctataggattttgctgcaggtgctatgtgagaggaagatggtacacaaagcagaagatgtgattgaagggattctcaaagctggcagttttgttcatgaacagtcccttcctgttgtcatgaagatgtatgttgatctaggattgcttgatgaggcgattgcattctttgagaaacattgccgaggtaaaggggtctcatccaagaacttcagtgcgatcatggatgtttttgcagggagaggtctgtgggaagaagctgaacatatcttctgctctgaaagaggagatgggaatgagaaggacattgtggaatataatgtgatgataaaggcttatggtcaggcaaagcagtatgacagagtctcttctttgtttgagagcatggaggaatctggtgttccatcagatgagtgcacatataattcgttgattcaaatgttttcttttggtggatttccacacagagctaagaagctgttaggtaaaatgaaagatgcaggatttgaaccgaaatgtgagacatactctgccatcattagaagttattctcgccattgcttggtaccggaggccatagatctgttcaatgaaatgaaggcatcaggtgttgagccgaatgtcattgtttatggaattttgattgacatgtttgcagagacagggaatgttaaggaagcacttcattatagtaacttgttggaacaatctggaatctctccaaaccatattgttctaacttctcttataaaagcctacagcaaatttaattcctggaaggaagcacaggatttgtattcaaggatgaatgacatggatggtggccctgacatcattgcctccaatgccatgctaaacctttatgcaaaacttgagatggtcactgaggcaaaagagatctttgacagcttaagaagaaataaccatgctgatgctgtttcatacactaccatggcatacctctacaagagcattggtttgcttagtgagtccattaggatcacacataaattacaaaaatcaggtttgctatctgattgtgcttcatgcaatgctgttatggcgtgttatggggctaagggcaacctaagagattgtgcagagttagtgcatcaaatggtggtggctaacattccaccagacgcgtcaacatttgaaatgatattttctctactgaaaaatggtcatgtttcaacaaaagaaattttacagctagaatcagcatatgatgatggcaagaagtctgccaagcaagctatcattgcattcttgttctccgtagctggcatgcatgatgctgcattagagatttgcgggaagatgttaatgccacagtcgacattggatgcatgtgcatataatgtttgcttcaag

SEQ ID NO: 29542 - DNA, 237 bp, Zea mays
  Peptide Sequence Number=SeqID_71321
atggagctcccgtgcgtcaccgccttggcacacacattgtggatctggcgtagactcgtcttgggccacggagttcccgtgcaaccaccatcattgccatcattgagggagatcgtatgggggtgcggggtagcgacagggcaccggtgttcgtccatgcgaggcgagcacggggctgggggcgatggcggtgttgatcgtctaggcgaggcgtgtgagggtgatcaagggggctag

SEQ ID NO: 29543 - DNA, 195 bp, Zea mays
  Peptide Sequence Number=SeqID_71322
atggcacaacctcaatggggacaaagagtgggtagagtgaggggcgcgacggtttctggtgctccacttgcgaggaaggagaagagatggggaggcggtcaggtgtttacaccaccggagcctgtttgccccgcgctctgctccggcgcgctcttctcctctgttgtcgacgaccagacgaagttttctaaataa

SEQ ID NO: 29544 - DNA, 504 bp, Zea mays
  Peptide Sequence Number=SeqID_71323
atgaccatggagcacggcgaggattgctgcgtcaaggtggcggtccacgcgcgccccctcatcggcgacgagaagctgcagggctgtaaggactgcgtcgccgtcgtgccgggcaagccgcaggtacaagggaaaaaaagtgtcggcagggcaaaaccttccgcatttttggttcagatcggcagccactccttcaccttcgaccatgtctacggcagcacaggcacgccgtcggcggccatgttcgacgagtgcgtggcgccgctggtcgacggcctcttccagggctacaacgctacggtgctggcatacggccagaccggatcagggaagacgtacaccatgggcactgcctgcaaggaggggtcgcatatcgggatcatcccacgagccatggctgcgctgtttgacaaaattgagaacctgaaaacccaagtggagttccagttacgagtatcgttcatcgaggtgcaagaactgttccagatacttgcgtgcgaatga

SEQ ID NO: 29545 - DNA, 1635 bp, Zea mays
  Peptide Sequence Number=SeqID_71324
atggctctaacatcaaaggagatatcattaacatgcaaccctaaggatattgaagatgaagtagctaaagaatgggaacacacaatgctgcaggatagcatgggcaaggagttgaatgaattaaatcgacaacttgagcgaaaagagtctgagatgaaaatgtatggatgtgatactgttgcacttaagcagcacttcggaaagaaacttatggagcttgaagaagagaaaaaagcagtacagcaagagagggatagattgttggctgaagttgaaagcctaagtgctgatggccaaacacataaactccgagatgcgcagctgcagaaactaaaatcccttgaagcccagattctagacctaaagaaaaagcacgagaaccaaattcagattttgaaggaaaagcagaagagtgatgaagctgctaagaaactgcaagaagaaattcattttataaaagcgcaaaaggttcaactacaacacaaaattaaacaggaagcagaacagttcaggcaatggaaagctacccgcgagaaggaacttcttcagttacgcaaggagggacggagaaatgagtatgaacgccacaagcttcaggcacttaatcagcggcagaaattggttttgcaaaggaagaccgaagaggctgctatggctacaaaaaggctgaaagagatattagaagctaggaaatcttccgcccgtgacagttccgctggcagcaatggtacatctcaaggctataatatgggtgagagatcgctgcaaaaatggtttgatcaagagcttgaagttatggtgcatgtgcatgaagtccgaaatgagtacgaaaaacaaagccaactgcgtgctgcgcttggtgaggagcttgccattttgaaacaagaagatatacgggctggtggatctagtccccaaagagggaagaatggaaactctaggacaaataccttgtcaccaaatgcaagacaagctaggatagcatcacttgagagcatggtgacaatctcttcaaacactcttgttgcaatggcttctcaactctcagaagctgaagaaagagagcgtgccttctctgggcgtagtcgttggaatcaattgcgatcaatgggggaggcaaagagcttactgcaatatgtctttaatgttgctgctgatgccagatgccaagtaaaggagaaggaagtggagatcaaggaaatgaaggaacaaatgacagagctggtgggcattcttcgacacagtgaatcacgcagaagagaaatggagaagcagctcaagcaaagagaacagacaactccaatggccactacacctccgaaaagtggaaatggcacgacgaagcactctgctgatgaccccaacacaccactgtcccctgtcgccgttcctgcacagaagcagctcaagtattctgctggaattgtaaatagccccagcaaaggagttgctgcgataaaaaaagagcaacttaagtatttaatatcttcattgacaattttcaatgcagatggttccaattgcacagttgtctgcggggaagagagtttcaatagcagggcattcaggaaagctctggaggtggaaaagaagccatcaccagtggctgatgcagtcaagtggacgaatctctag

SEQ ID NO: 29546 - DNA, 360 bp, Zea mays
  Peptide Sequence Number=SeqID_71325
atgaagtacaggcagaggattgggtggagtggccgcaatgcaacgacccgagggacgcgtggtctaggccacgctgttgcaggaccccgtcgagctgttgcgcaactgcgcaagctggacgagccgagggaccagatcgcgcgctccgtgcaacatcgtcgggcagccgcggagcaccggcactaccgccagtactctgggagacagtgggagaatggtgggatggggcctgggagcttccatcccacttgcatacaaggttggagacaaaatgagtggaattactacaagatcagtaaatatagagtttgttcaaaggaaatgcaattcgtactgaagcttattcattatgacaattag

SEQ ID NO: 29547 - DNA, 246 bp, Zea mays
  Peptide Sequence Number=SeqID_71326
atgggggtagggctggttgggggcagcgccgaggccggggagcacgtgaggaggacggggtggggtggcggcgtcgaggactgtgatgggaatgcagggatgttcagatttagatcagtacatgttcaaccacgggactatcaaggtatttttgtttcatgctttcataaatcagatgctctctaccctcaaaacatccactttgaggatggatcaatgtactttgaggagttactgaagagctag

SEQ ID NO: 29548 - DNA, 525 bp, Zea mays
  Peptide Sequence Number=SeqID_71327
atggccaaggatatagtagttcttcaaaggctatgctggcagaggataagggtaaagggctcgaaaaatttgaagaggccaataaagctatcgaagatgacacgccgcttgggcctattcttgagcaaggctctaaagaacaagaaaaatgttgagggtgaagctgcccaaaaggaaatagttaaacttagattcgaagtatctgggctcggtacgactgcaaagagaaagaaaaactgtttaagatcttggagaatgattttattgaaagtcaagtcgaagttcaagctatgtctaaagaagagaataaacttaaggaaatggtgcatcgcaacactcgaagttgagctaaagcgagcaaaggaagaatatgaggctaaaacttctaagataagcataagaagtttgactgtcgaagcttcggagtggtccaaaaaatcttatcagatatatggaacaaagacaaagaaaatcagtattgaggaatcaatgaagaacatagagaaggctcgaaaggcgacttaa

SEQ ID NO: 29549 - DNA, 513 bp, Zea mays
  Peptide Sequence Number=SeqID_71328
atggtgaggacgaagaatgtcacaccatcagggggaggagatgacgaggaccctcctcgccccttcagacaggtcaagggcaagactgtctatcttgagcaacaagagggcagaaagaagaggcgtatggacagagccgctcgtgcagcacttgcagcggtagcagcagcagatcaggatgagcagggagggcagttgaggatctcctcagatcagatcgcctaccacgttcgtcgcctcgcatctcggcctcgctcctccactactcactccactccttttgacccagtctccactccacctcccacttcactagcttctatcgctctcgagccgtccaccacacccaatgtgtccagcactgagtcacagctgcccgggtacgtcgattcagacatgtacctgtggattcttggttgccagcttagagggacccagcagctgcgccactcttcggcaccaagactcaggagtcgttcttcagggtgcagttgtctgcctaggttgccttga

SEQ ID NO: 29550 - DNA, 387 bp, Zea mays
  Peptide Sequence Number=SeqID_71329
atgggatatagggaggccaccacacatattcagctctggctactcggtgccttgatctctcactcggagtttgatgtggttgattttctgatttgtgagattgaggacacagtgttggatggtctccgtgctcgccatacttcttccaatgatgatgatgatctagagattccgccaccacctgctgtgccacctcgatcccatgatcatgaggctggtagctacagtgctgctccagctgcccctcctgctattaaccctgctttgtctgctattcttcagtcgctcactcagcagcagcctcatttggccgtagagcaggctaggcaggtagctattcagcaacaaatgttcgagcagatgttgtcgatgtttgagaatatttag

SEQ ID NO: 29551 - DNA, 294 bp, Zea mays
  Peptide Sequence Number=SeqID_71330
atgcgtgcgtcatcgttttcgccgttgacggacatctcgttcgtcttcccggccttcgcgatgttcttcctccccaacctgctgcgactcggcatactatctatgtcgtctccaaatgtccaggtcttcgtcgtgtccttctccaccaatgaacatcggatgatggatgtcagccaagccgcctccatccgccgtccgttccctccattcgacggccatcctgccgcgcctcgctgcgccggccacgccgcctctgacggacattttggctatcgcagctcgcagctctcatag

SEQ ID NO: 29552 - DNA, 273 bp, Zea mays
  Peptide Sequence Number=SeqID_71331
atggcgagcaaggggaatggagaggaagggctttggtcgtggctttatagagagagggaggggagagggagagacggggagagaaacgacggtcttcaaagccatggcttcaaggcgccattaatggccgtggacgacgggctctgctcggtgtcgcggcgggtcggggaagcagggggcgtggtcctgcgcggggccggggcgctacagggcgggtggttggctgctcagccggctggaggcacgcagggcgtgggcgcggcagctgcgtag

SEQ ID NO: 29553 - DNA, 1044 bp, Zea mays
  Peptide Sequence Number=SeqID_71332
atgaatcctccaccgaaccctctaccggctgggaccgatccagtagctgtcgctcagatgcagctgttgcagcaaatggcaaacaccatgattgaaatgaaagctcagatgtggcaaaaacgtcgggagatgcggcagaaaatgcgacaggagatgagacaagaacgactggaacggcagcaacaaccaccactacctccaccaccaccaccagctccacctcgggaaaagcaccgggaattcatgagtcacaagccacccacattctctagctctccagatcttctacatgctgatgattgtctgaaatcagtggagaagatgcttaatattgctcaatatactaatcaggagaagctgtcaaggtatgctctagagaaggtggctgatgatgaaaggaagcaagagcagttcatggagagactcattgggccaccccaataccagctgggtacaccagctcgtcctggaggagggcaacagtcctaccaacaacctactcagcatacaccagaggcgactccacagactccgcaccctcgtcaggctgcccccactggcaacctggtgagacctgttggacaaggtacagtcaccacttgcttcaagtgtggtgaggttggacactacgccaatgattgtacgaagagtaaccccaacacacccgctcgaagcaatattcagggcaagcaacagactccggctaccggcaagggtttcagtattgctagagtcaaagtcagtgctgatactactgctgatactgctgacggtgctgatgccggaagaaatgcaagcctagacatcgagactgcagctccaattggcttcgatttcacattcagcggcatgttcacccttgccattaagatgggtttgcagtttcgtgtaagacaaactgatattgatgggatacttcgcctccgggagaacgaattgaaacggcatgctggggacaaaacttatgcctatgttgctgaagggttcgaaaatctgttggactggaatgatgttatgaagttccaagcgaggaatggatcctag

SEQ ID NO: 29554 - DNA, 1362 bp, Zea mays
  Peptide Sequence Number=SeqID_71333
atgggctacagtaccgctgtgtatgggtggggcagaggtcagaggtacgagtacagatgggctgatggtgtgcagataaagaaacccatagaggtatcagcaccaaaatatgtggagtatctgatggattggattgaaggccagcttgacgatgaatccatatttcctcaaaaacttgcactttactgcatagagcttattgttcccgttattagacacaaggacatgtcacatatgcgtgtatctgtgttgtttcttcctgatcatgctgaccatgctggttcgatggctttatacgaattagcggtttttagtccctctgatcctgttctggttgaaggaacaaactatgctgggcagtattcagcagtactagaacaatccaatgaaactgcaacagaagaacacacgaaagaaatgccatgttgctggaagacatgccatttctgctctgatcacaaacaacacaccagacatgaagggttcatcatcatgtggatactagaggcaacacaacacgtgacaggcacagatggtactactactggtgccactgctaccacgagatgcggtagacgggagcagaacggatggacgcgacaccgcatctccaacacagagctagtactgaacactgatggagcatgtcggcgaaacgcggggaatgtgcaccccgccgccgccagtagcctagacgcggccctcccagaggcagggctgttcgtcggcgcagagggcgaggagcgccggcggcggtgcgaggccgagcgcggcggcgcggcgccaccgctgggcgcgggtgacgccgaggcatggcccgtagcgcgtgtccatgtcgaactcgcggcccgccctctcccgctgctccgcctccgcctcctcctgctggcggctgccggcgccgtgatctgcggtgacgagagacgaatcaaaatcgaatcaatcggtcgatccgccggtactgccgcggaagcgaacagcgatcgggggattcggaccgggatcggtacatggggccgggtggacgttggtggcgagtgcggccttcttgtggtgatgcgccgccgccttcttggagacgccgccagtgggcttggtagtggcggcggcggcgtgcgtcttctgctgacggaagaaggacttcatgtcgcctccgccgcccctcgtcatggctccggcgatctctctcctgctgatggcgctgctggtggcgctgggttgaccgttgaagaggatgggaatgggttggaaacttggaatgcggcagcagaggagtgggcttggtggatttggattgagagggggttgctgtttatttatatattagggtggctgcacccgacggcgctgcggccgttgtga

SEQ ID NO: 29555 - DNA, 237 bp, Zea mays
  Peptide Sequence Number=SeqID_71334
atgagtctcttcgggcttggacgaaaccagaagacattccgccccaagaagagcgctccatcaggtagcaaggagtatgaattggtgagattttatcagaatgttccagaagtaggcaaactttacgttgtctgtttcggctttaatctttctgttccgactatgtccagagctaaaggatatctagctcgattgacatttttgtttgctatcgccaagagctatgtttatcactga

SEQ ID NO: 29556 - DNA, 330 bp, Zea mays
  Peptide Sequence Number=SeqID_71335
atggacgaagcccgcccacggagacgcgtgatccgcggcggacccgtgatcttcgatgagcaattcgtcgggccccagcatggcaccacacctgcgtcgaccacgagcgcgatccagaagttaaaggctcaaggcatgtcatatacatattatgttacttatgagtatgggatcaaatttcgagctaaccccgaaatgaatatccaccatttcacttatttaaggatgaaggatatctttaaagcatatatagttttgggtaaggagtggggtaagaaaagactctatccaagattgtggatcttgactcatcttggtgacctcacttga

SEQ ID NO: 29557 - DNA, 264 bp, Zea mays
  Peptide Sequence Number=SeqID_71336
atggagctggctgctgctgagttgctttctttgggtaatgattcactcaatgggcttgttctccacagtggaaacacgcacgactccctccttgcactggcgctgcttggttgttctggttggttgctgaggcaggaagacgggctgcctggttgctctgacgctggtactgatttcctccctgctggttattctgacggtactgctgctgctggttctgacgctgatgctggtgctggtgctggtgctggtgaccttgcttga

SEQ ID NO: 29558 - DNA, 570 bp, Zea mays
  Peptide Sequence Number=SeqID_71337
atgcccgcctcggcggctcctcctgcccagcccgcggcaccgccccctcctcctcctcccgcttctcctgcccctccgagtaaggatgccgaggtgatgctgaagatgggaagcacaactgacaagcgtgaacagtatagattgatgagagatgctatggagaaaaggttcattcgggttgccaaaggttcactagtcgggggtgttcggctggggatgtttactgcgactttctttggcatacagaaccttcttatcgatactcgtggagtacatgatgtattcaacattgccgctgctggctctgctactgcagctgcttttggccttatattgccagggtcaatgatgtggcgtgcaaggaatgtattggtgggatctgctcttggtgctggcatctgctatccacttgtggttgattctacaggctgggtacagttaaagctggcagaaaaggccaatcttgagattgcaaattcaaaaccatcatccgatttgacagagggaaaagaaaatcaaagccgtgtgggtgctgctatcgaacgacttgagggtagtctgaagaagtga

SEQ ID NO: 29559 - DNA, 762 bp, Zea mays
  Peptide Sequence Number=SeqID_71338
atggcgaagcttgggacgcgaagacgggaccgaggcgggcagacggcggagggggaccttgggcggaccgaagaccacttcggcgagcaataccctccgcgatgggggataatctggcgcaccgaggccgacatgagcttcgaagaaaggcgaggggaggaggttccttacctagaggcggcgcacggggcagcttggcacaacacgggggacttcgattggccagacgacgaggaatcgcggggcagggcccatgattggctcacagtgaccatcaccctcaaccaagctcggtctgcggccttgcccaaggtaaccatcagtcgtggtggcccttccaagggagccaccacccacactagtggtgttttaagggaaggacaacacgaagacctacgcggtccactacgtcgacctactgctaggctccacattatgaaggctcagctcgtcggccacgtcacaagcccatggagtctagggaaggtcatggcagccggtagccccgagcttatggcatttggggtaaccgccgatgacctcctccaagtgctgcctttggctaccgccaaggcagaaagggatactacttaccctttcgtgtctgaaggcaacaacaatatgccgacaagtaacccattcaacatggatgctacaggcgcagtgctgttgcataggataggcatttttggaacaagtaacaggtacgaccccacctacgggctcgtcgcctcacctgagatgggcctgaggcctctattg

SEQ ID NO: 29560 - DNA, 1332 bp, Zea mays
  Peptide Sequence Number=SeqID_71339
atggcaatcgcggtcggccattttcacgacctcaagccccccgccgtgcggaaccggcactacagcctccacaccgtcgcgctgctcgacagcccgctgctcgacagggatcatagggagcacggcgccgccggagggggccacaccggcctgtccccgcggcgccggagccagtcctccccgtgcttcacgaccgtggcgcctgctgccggctcggagcacgcggaccggtccgagaacaagatgccgcgcgtggagatcgtcgcgggccgccacgcccgcggcgtgcgcgagctcatcgctggcgccgcggccgccatcacgtccgggacccggcttgtccccgcgcagaacggcctcagtggtgcgctgctgctcaacggcagccgcgctggcgagcacgtcgccgtcatcaagccgctggacgacgcggcgacggcgaacggtggcggtggtgggtatgcaagcaagaccgtgctgcgggaggtggccgccttcctcctcgaccacgacggcttcgccagcgtggagccgaccgcgctgatcaagatctcgcgccccgcgacggcgacgacgaccgtggcgtcgatccagcgcttcgtggcgcacgagtacgacgccggcgagctgggcccctcgcggttctcggtggcttccgtgcaccgagtcggcatcctggacgtccgcctcctcaacatcgatcggcacgccggcaacatcctcgtcaaggacccgccgcggggcttacagcgcgcccacggaagctcatccacgccggcgcggctcgacctcgtgccgatcgaccacgggctctgcctgccggagcagctcgacgacccgtacttcgagtggctgcactggccgcagtcctccctgcccttctccgacgacgagctggcgtacgtggcgtcgctggacccgttcaaggacgccgagacgctccgcgccgagctgccgtccctgaaggagcccgccatccggatactcaccgtctgcaccatcttcctgaagcgcgctgccgctgccgggctctgcctcgccgacatcggcgacatgatgacccgcgagttcacggctcagcaggatgggctgagcacactcgaggcgctatgcaagcaagcgcacgactccgtcctcccacacccctcgcccgacggcgacggcgacggcgtcgacgagagtacaagcgtctccggcgggcggaaacacgtgtcgttcggcgacctgagcctcgcggagtggacgtcgttcctggagatgttcgagcagctgctgccggcggcgctcgaggacaagaagtgcgctgtgctagggacgtcgtcgtcgttttga

SEQ ID NO: 29561 - DNA, 526 bp, Zea mays
  Peptide Sequence Number=SeqID_71340
atggcggaggcgggggccgactcctccaacgcggccgtcgacggcggtggcggtagcgtccaaaacgactatcccaccattgacccgacctcgttcgacgtggtgctctgcggcacgggcctcccggagtctgtcctcgccgccgcctgcgccgccgctgggaagacggtcctccacgtcgatcccagcccgttctacggctccctctactcttccatccagctctcctccctcgcctccttcttatcccgtgaggccaccccgcccacctcgaccgtggcagcggccgcctccgattggcataccgtcgtcgatctccaccgacggatcgtgtactccgaggtcgagacctcgggggcggcgccagagccggcgaggcggttcaccattgacctggtggggccccgggtgctgtactgcgccgatgaggcagtggacctcctcctgcggtcggggggcagccgccatgtggagttcaagagcgtggaggggggcagccttctccctggaaggctgcctctacccg

SEQ ID NO: 29562 - DNA, 183 bp, Zea mays
  Peptide Sequence Number=SeqID_71341
atggcaaggggcacaatagtgaagtccgacagaacccctcggcttctcgtggacgcggccttggtcatgttgaaacctcgattacgcgaaaagcgttttcacgagaatccgcccaagaatccaagcttttctgaaaagctggctgtggggaaaagctggctgttgggaaaagctggtgggtag

SEQ ID NO: 29563 - DNA, 204 bp, Zea mays
  Peptide Sequence Number=SeqID_71342
atgacgcctagggaacttaacaactaccctcgcaaagatactatttacttgtgtcaagaagttgtattcaagatcatggctggatgtaacaagcaaagaagcaatgattcaaatattacaattctggatggtgacttaaaagcatgcagaagacctagaaagaagaatgaagagaagcgaagaagaatgaagaaaagcagatga

SEQ ID NO: 29564 - DNA, 204 bp, Zea mays
  Peptide Sequence Number=SeqID_71343
atggagttgcggccaccggcctgggaaccgccgctaccgcatatgggactgccgtcgctcgccctctggatcgggagccgccgcctccggcctgggaagcgccgcctctacttcggatcgaggaaccgccgccaccgcatgtcgagacatctggacctggtccggctcgaccagattgcactgtctggcctgggcttcctctag

SEQ ID NO: 29565 - DNA, 1491 bp, Zea mays
  Peptide Sequence Number=SeqID_71344
atggcccaggtggggatccaagtaaatacaatcacgttcaatgttttgattgatggatatgcaaagagtggacagatggatcaggccagtgcagcctatagggagatgcaagcgaggggattagtgccagactcctgcaccttcaacattattgctgctagagctcacaagttcgggtatgctgcccagttagtccatgaccatgacatgtttagttcacatatgtcggctgatgggttggatatgttggtctgtaggctttgttgggatcatcgattggatgatgcctgggagcttctgcttggtgctattgagcaggatgttccattgcgtgttactggatttaatgcattgatcgctgcttatagtaaggagggactccacgaagaagcttctgaactgtatagaattatgaacaagttaggactggcaccatcctcgtctacttttaattacttgataatgggactctgcaatcaagtaagacttgatgaggcacaacttcttttagagcacatggttagcaaaggatattgtctaagtacatcatttactatcagcttggatgcatacttcagagacggtaatgcagttggcacactgaaatgctgggatgatatgggcaaaattggtttgcagactgattttattgccttctcagcatatattaatggcctaagccaattagattacgtgaatgaggcttatcaggcatttgctgagatgacgagcagaggaattcttgcaaagaagggagaacaattcattgatgtcccttatgttgtgaagggtatggatgtgtcatttagtggcatattgagctttattgaagctgcggcgattgaaaagcttaaaaataatgagtgcacacctgcggacctatgctactcattgcaggaaactatctttgccatgcttgtcgaaattactgaacgtgccatggcacactgtgattcaaaggacgttcttattgttggtggcgtcggttgcaacgaacgtttacaggagatgatgaagattattgatgttcttgatcgagctatgatacttactggcaggcttattaaaatggcttttaagccaaacactatcacactcaacgttttcctttctcatttctgcaagcaaggatttgggaatatagccctcatgtgggctgagaagctcagagaagattcttttgttttttatggtgctacaagaaatataattgactgggcacgaagggaaatggaggatgacccccaggctaacaacgaggacataggaagatgcatgtttcttgagttcttaatgttcatgacatatgaggctatgctcagcaacagatcctcaaaggctacacatatgcttacagaaaaaggttttgatcctgctagcagcagcatgattagaaaggaggtgaaaatgggattggctgtaattgattgtttattgctgaaccagaccttcctgattgatcccaaatacccctccttttgcctaaattaa

SEQ ID NO: 29566 - DNA, 237 bp, Zea mays
  Peptide Sequence Number=SeqID_71345
ggcgagggtgcggcggcctcggccccagccacgacttgggcgcggcagccccgtccttggcgctggcttcatccccggcgggtgcgcgaccttgacgagggcacaaccgaggcacatgggcgcgcgacctccggcggcgtggccccattacggaggcacgcggctccgacgctcgagcgcaggcgtggctccggcgtacgagagttcagccccggcggcgcggccccgtcgagctag

SEQ ID NO: 29567 - DNA, 1175 bp, Zea mays
  Peptide Sequence Number=SeqID_71346
atggcctctcttttcctcctcctcctcgtcgtcgtggcggcgctcctctggccgcctgccgtcgcggcgcccgaggagcacctcgtcaccggtctcccgggcttccatggcgccttcccctccaagcactactccgggtacgtgaccgtggacgagcgcagcgagcggagcctcttctactacctggtgctgtcggagcgcgacccggccggcgaccccgtcgtggtctggctcaacggaggtccgggatgctccagtttcgacggcttcgtctacgggaacggacccttcaatttcgagcctgggagctcgcctggaagcctgcccaagctgcagctcaacccctacagctggtcaaagaaggtctcgaacatcatgtacctagactctcctgccggtgtggggatgtcgtactcgctgaacagatcggattatgtaacaggtgacctgaaaaccgcagctgacgcccacaaattcctgtcgaagtggttcgagttgtaccccgagtttcagttgaacccgttctacatctcgggggagtcgtacgcaggggtctacatccccacgatcactgacgaagttgttaaagggctatctgattggcaatcccgtttaactgacgtggactacgatttcaattcctttcgtgccatttgcgcatgggatgggcctcatctcaaccgacatgatgtcaaagcgtcctgccgcggcacattcttcggcgccgtggatgatctgtgccaggagaagaatcgacagagtgcgctgggtaatgcgtctcaggactggagccacagaacagaacacattgagtcgacagcatcgtcgtctgatgggttgggccattgggtaaggctaggagagacggacaggccgtttccagtgaggaagcggatgtcggggcgttcttggccgctccgtcttgctctcaaggacggccacgtccccatgtggccaggccttagtggcagatcacttccctgcacgagtgatgaagtcgctacggcgtggctggacgacgaagatgttagagctgcgattcatgccaaaccaaaaagcttaattggatcatgggaactgtacactgcaaggatagacttcactcatgatacagggacgatggtgagctaccacaagaagtttacggctttgggatatcgcgtgctaatctacag

SEQ ID NO: 29568 - DNA, 510 bp, Zea mays
  Peptide Sequence Number=SeqID_71347
atgggggtagatgagggcggcgtttctctcctcggggtgaagctccaattggctagcatgacgaggaacggtgccgagcttcgcatgacccctgatgtgggctcgcagacgcttccgtgtggtggctcggcgaggcgtcgacgcgactcgacaacggtgatggcgagcgcgatacacaacgcggcaagccacatgaacggccacacggacatggtcgcaaaagatcatagggtcaggtgtgggcggttttcatcccatttgcagtatggggcagcacaacacagggtgacaggggaggaggcggcgccggctgaaacgaacacgccggtggccaggtctggcgacgcgccagagcagcgcgggcaggccgcggcaagcggctgcaacagcagacggtggcggcgaggtggggctgggaagcgccactgtccatcaggcgggtgcaacggcgctcgccggagtgatacgcacgaccatgtcagagggacacggcggctgctgcgcacgtag

SEQ ID NO: 29569 - DNA, 375 bp, Zea mays
  Peptide Sequence Number=SeqID_71348
atgaccctacgcaatcacggattgtctggcccaaagcgtggaccctctggccaatgcgcagggaagatttgctccggcagtaggggcacggacccttcagtcaagagttgtggacagtctgcgccgctgcaccgccgtccacctcatagagctgaacccaaggtggtggccatcatagaggtgattcagtgctccaaagatcttcaactttatttgaccctacatcatctaaaggtgtcttggttggtttgccaaccccaagaccacccgacacagagagaaactgttcttgcagcgaggtcgcggaccatccggccccgagtcatggacagtctgcaccgccgcagagagtatcgccaggtgaaagtcgcctag

SEQ ID NO: 29570 - DNA, 309 bp, Zea mays
  Peptide Sequence Number=SeqID_71349
atggagcctcggtggcgcgcggggcggcatgggcgcgaccgaccctcggtggcgtgcgggcagcctgaccagcgcgtgcgcgcggcctcgggccccgacggtgtggggcgtgacctcggcagctcgaagcgcggcccaccagcggccgcgcccacgcggcgccccaggtgcgcgcgagtccggccaggcggacggcttcggccccggccccgacgacgcggtggctcgtcaccccggcggcgcggccgtccaacgacggtgcagcctcggccaggcgcgtgcgggcgcggccctctgaaagggaattag

SEQ ID NO: 29571 - DNA, 168 bp, Zea mays
  Peptide Sequence Number=SeqID_71350
atggcggtcctagggcgaggtagccttgggcgaggcggagatgggagccctaaggtgtgggaggttcgggcgaggtggagatctacccgagcatgtgacctacttcgagatcgagctcggttatatccagaagacattcaaacaaggttcacaatactgaagaaatga

SEQ ID NO: 29572 - DNA, 207 bp, Zea mays
  Peptide Sequence Number=SeqID_71351
atggatatctatacttatgcacgcggtcgaatcgtctctgagttacatcgagcggatcttcaacaaccccgccacagatctcccatcgatttcgcgcttgtagttgaggacgaacccgtggagcggatgaggttttggatcctgaaggagaaagcgggtcctaagggtggaagcagagcaattggagctcgaactggagatgcgtag

SEQ ID NO: 29573 - DNA, 531 bp, Zea mays
  Peptide Sequence Number=SeqID_71352
atggaagggcccgactgcacggcaccagcggctgacggcacctacgggaacatggcagcgtcacgagcgggcggcggcggcggaatccatagaaaccttgttcagcacaggaccctgtcgagcgcgaggccgatgttgacgcaaacagcgagcgcgacccaccacgtgaccaccccgtcagccccgtggtccgattctggatccgcatctgcatcggcatctcgtcatcgtccttggagcagggaattatcggcctccaacatcacgacccagcgatttggccgaaaatattgtggtgaaggatggcgtgggcggtctcgtgcccagatcgacgaagaaccagacggatcctctcgggcgccgatggaagggatggcagggagcacggcgaggatggcggggcatgaacacggcgcaagggcgcggatttggggactgcctacactgagcaatggggagaggaggaggaggagttgtagccctggcggacgcgcgtaccttccatccgcgaggaccttccagcggacctga

SEQ ID NO: 29574 - DNA, 291 bp, Zea mays
  Peptide Sequence Number=SeqID_71353
atgacgttggaatcacggggagggggcgcgcgggcgggggcatgggcaagagagcgtgagcaggagcacaacgcagacatcgagatgtgggagaggggaaggcgagggcacgccccgcagcattcaaaacaggtggctgaagctacattcattttcatccctacctacgttctcctctgccactggactcgtcttcgtccagccgcgattctctttctcctcaaagtgccaaatggtgggccgcatggttcaaacttcaaagcaaacttcggtttgcatctctccggttga

SEQ ID NO: 29575 - DNA, 294 bp, Zea mays
  Peptide Sequence Number=SeqID_71354
atggtgctgtcagcgttttccaacggcgattgcgctgggtgcctagacagggagcaggtcaggaaggccaagctcatgagcctcaactgcatcgccgccaaccgcgatgagacccacactgtggagtccctctcctgtcaatattgggtgagtcttgcaatcgggacaacctgtcggctgcgaggccaccccaatccccctttagttcttcactgcattggaatcttgcggaacaccgaccaccagttacaatcatcaccgtccacggcaggcccgacgcgtcccctgtcctga

SEQ ID NO: 29576 - DNA, 1632 bp, Zea mays
  Peptide Sequence Number=SeqID_71355
atggcgacatcaactagcaaatcccaacctctgctcttgaatagagcatgtatgtggatacttctgggcaagttacctgatggaaattgtaagatgtctagggattcgattcttgcagcggagcttccatctgcatactctcgttttagttggaaaggcctctctccacgagatctcctttgctcattttgtcgccttcagaggttgccagagccccattttgatgtcagtagggtctcctgtgatacattaatgtcagctttgagctctgaagaaagaggagcgccagcaggcagcgcagaaaatcagtacaccaatgatgtcaggatcaacaaggaaaaaccagatctttttaaatgtgaagtgaacatacgttcacggaagcaagaaattttactagagtattctgcagctgacacttggagcaaggaatctaatgctattcagaattcttcattgaaggtcttgatttggttcaataattattttaagaaactaacctcaaaaacaggcaagctatatctttctgagtctactgctggtgtcaaggtacattcaaatatttttcttcaagagtttgcaatgtgtctacctgtttatggcaagaatggaggcagttattcagcaatgtgcagtgcagttggatcattttctatggatacacaaaagaagcaccttgaaagcactgcaaagttaacacgcattgaaggtccagactctggtgttttcccgtcccatggatcattgacttgtataagttatactgcttcccttgtgacgaaggataaagcaaaaacatatttgttggagagccacaatgagtttgagtttgagattgggacgggtgctgttagtaatcagcttgaatcatgtgtaactcaactgtcagtgaatcaaactgcacgttttgtagctgaactgcctcctagggatttaatcatggctgcatcttgtgagttctcacatgacctctccaatgtatctagcggtgtacatattttaaacattgttgtagagagctgcttcttggagttctctgtaaaggttctgcaggttgattttggctgtggatctggtagccttcttgattcgttgttagagcatccaaccacgctggaaaagcttgttggcgttgatatttctcgaaaaggcctcacacgtgcagcaaagagccttcatcagaagctgagcaaaaaatcaacgacgcagacaaatgttccaactgatgtgttgtatgacagatcaataactgactacgattctcgcttatatgggtttgatattggcacttgtcttgaggtgacggaccttacctcttggaccttttctattgtattcttatttggacgacgaggcagacgaaagcactggtccctgcaagttccgcaatcacgaccacaagttcgagtggaccaggctacagtccagtgctgggctactggcctcgcggtgaagcatagctacagcgtggaattctccggcgtcggtggcttaggcgaggagccaggctacgcttcccagatcgctgttttcagaagactggtgcagggccaggaagcgatgtgcctggacaaggatggcgatcagccttacgaggttctctgggagtggcctaacgcgtgtgtgaactag

SEQ ID NO: 29577 - DNA, 645 bp, Zea mays
  Peptide Sequence Number=SeqID_71356
atgccaatactggtagcctgggagagagttatttggagcagagggggcgaaacagccacatctttgtatgatataaacttggaagcaatgctggttggcctgttaattcctgttggattttcttggagagattattatgcatttaggacagcacaatatgttgctccccttgtcctgaaaaactggcgatcaaagatggttcagtcagcttctagtgaagaaagctctggttcagctgtccaaattctgggtacatctggtgatccaaatttggtcggtgccttcatatcttctcaggatatcgatacagctccacataattctctctcaaaggaaatgttggatagcaaggttcagataaatgaacagaactgtgacatcaaaggtaatgttgccgttgaaaaactgtcttttgagagaacatcggctgaagctggtaaaaactcgaaaaatatcagtcagcttctagtgaagaaagctcttgaggtcgaaaaatttgaaggatcagtctggagcgccggcgaggggcgccacggagctgtcgggagcgccggcgagggccgggagcacggagcagtcgcgagctcgtcgaggagagagcaggagcgcccagttcagtcgaggagacgagcagcgctcgggtag

SEQ ID NO: 29578 - DNA, 204 bp, Zea mays
  Peptide Sequence Number=SeqID_71357
atggcaagagctcatccacagaagctgtgtctctgggtgcaggctgtttgcagtgcgggggagttccctggcgccttttgcccccttgcgatgtcagaactttcaaaatccaaagatattgacgcttatgtggagggccgaggcagaatgtggcgttctggctggaacaagttgaatgcaagctctatggatcctgatatgtag

SEQ ID NO: 29579 - DNA, 492 bp, Zea mays
  Peptide Sequence Number=SeqID_71358
atgggcgtcgctgctgcacgcgagcccgccaggccgcggcagatgcccgcccgcgcgccggcgaggccgcggcggcagcagccagctccgcccttgtggtcggggaagagaagagagggtaccggcggcagagtctcgaacgccgccgagagaccgagacccaactggccggagccgacgagccccgggctggccgcgacttccggcgagaaggacgcggcgtccggtagcgagcgtaactgccgccgtgaaagccgtctcccctccatgttcctgaccgagagacaaatgcaggcggcgactgggagtaggaataaaaaatacactagtgctcgttttggacactttgttcagcgacgtaggcataatgctgacataacccagctcatcgtcacagcctcccacggacctagaaatcgatcactgatccaatttaactacctctacaggatagacctcaacagaaaactgttgagtaacggcagcaagtga

SEQ ID NO: 29580 - DNA, 495 bp, Zea mays
  Peptide Sequence Number=SeqID_71359
atgtccctggtctctttaggttgttctgcttctaacccctcaactgctttatttgatctatcctcttctttgtctatcatagaggagaaggtggagtctcttggggatgaggagctggcacttgttgctagtcgtttccctaagaagggaaagtctcaagctgacctacgtgaccacaactctggtctgtgcaaaggcaagcaggagtacacctcgggaaagcacaagtctagggggagtgaccttgaccatgactccgatgagtcggtctcatcttcgggcgacaaggagcctgagagaagcattgaggacaagctcaataggctgtgcttcaacgccaacaccactggtgacctctgcaccatgacacttggtgaggaagcggtgggcgacgatggcaaggacatcagcgatgattccacctctgaggtgtcacactgcaccgatgatcttgctactgagatagagaaactgatagctactttggctagttag

SEQ ID NO: 29581 - DNA, 384 bp, Zea mays
  Peptide Sequence Number=SeqID_71360
atggacgagcggtcgaggtcgcgggcggttcggctgcccggtcgggcgctcggtgcacgacttctggcgcggtcggatggcttgcgtgcagggacgctcggccgtttgggtcgccggtacgcgaggcagctggagcgtcgggtggctgggcgcctgggcgcaaggcgcgggttcttgggcgtcggtcggggcgcgcttggcttctggcggtgcgggcagggaagggaagcgaggggtggctgggcgcgcgcacggctggcgtctcgggtgcgacagagagagcaggggagagggaaagagaaagcaaggggaggagagagaaggtggcagcgcttggctgggagcaggggcgcagctcctagctgggccgaatgggccgattag

SEQ ID NO: 29582 - DNA, 324 bp, Zea mays
  Peptide Sequence Number=SeqID_71361
atggagccaacagctatggttcgaaccccaatggtacacaattttaccatatttttgcataaccgtggaaattgttggtgtaatggcacgcacaagcacacctctaacactaagcacaaatctaagaagagcttcgataaggacacactcaagcagaaatacctccacaaggccaagctcaaggagtgtgccttcttcgcctccctcgacaatctcgataatgaattcaaccatgcatcctctacctcaagtgatgatgatcctgagaggcaggtcgaggacaagccaaatgaattgtgcttcctgtcggtatttagagtctga

SEQ ID NO: 29583 - DNA, 150 bp, Zea mays
  Peptide Sequence Number=SeqID_71362
atggagaggctgctgggatttctgggcgcttgcttgggggatttttctgggcgtccatgggaggtggagctcctgctgcttccatggaaaaagggttttgagttcggtttgaacatgagatatttggccgagtcggataaaattgattag

SEQ ID NO: 29584 - DNA, 339 bp, Zea mays
  Peptide Sequence Number=SeqID_71363
atggccaatggccaagggaaggagtgctcccctgcgctagcagaggaagaggggtgtccagcagagctggaaaaagtcgtggagggggaagatgccatggatccaagggagcttgtatacgagggaggctgggtgttgttttggtccatgggcaccgttgacatgggcggcgaggcgggtgagctagaggctgccaggggctttacaaatcctaccccccttaacagaaatctcgtcctcgagatttgtcaagttgtcgtgtatggccgagttgatctaagtcaccaatttaggcttaagtcaattagggtatggccatatcctttgtaccagcaataa

SEQ ID NO: 29585 - DNA, 267 bp, Zea mays
  Peptide Sequence Number=SeqID_71364
atgttggtgcctctgctcggcacgccctcccctcggtgcgcgctgctgcccccttgtcgtggcgcccgctgggcgtgtgcctacgcgcttggccggtgtatgggggagggtgttgccaccgccatggatctggccgcgccgtcgtgcacagatgggaaggtgggagataacctcggtgaccatcaaattatgatgaacggtgggagatcacagaactactcgccagagtacctactctactgcgggtccgtacaccaccaacagtag

SEQ ID NO: 29586 - DNA, 1020 bp, Zea mays
  Peptide Sequence Number=SeqID_71365
atgtatggctgcctccaatgcgtcaggacagaggaaatggagccgctgtatccagcccatgagcctcgaagtgacacagatatcaggttgagaagcccccagcggaaggcacgtgaggtagaagaagccagcgtggtactcaagagtccacaccgaaagaccgctgttgcagctcaggtatcaacgcaggtacaacagccctcgctacctccgcaacagcctgacgaggtcggaaccaaaaattcagcagcggaggttgtaatggacgtcatatcaccgaaaaccactcaggtgggcgttgtccatggcaacccagtcgacgatgacaaggaacagcgggcgcggtacctcaaatactcgcagaaggcgctcggcttcgccgtctgcacgtttgtcgggtacgcaagcaacgcatcgtccaccggaagcgcggccttcaagatggccgccgcgcccttcttcgtggccatcatcgccgacctcctgacgctgaagacgaaggcgaagcacggctgcgccctgatctacctgtcgtcgttccacctgatcctcatgacgtacctcatcttcatcgcgttcgacatggcccacgcctacgccgtcctcttcctgccgctggtcgcctccgcctcccacctccagcagaagctgtggccgccgccgccgcgtgacgacgggagcgccgacgacaggagcaaggccgttagcaaggacctggacagcatcctagagctgtcctctctgatcctcaactggagcagcttcgtcagcgcgatcatgaccgtggacaatgacgagatcgcgcccgaggctgtagggctcctgttcttcctcaccatcgttctcgggatctatctcatgctggccaccactgtgagagctccggcgctcaatctccctaccaagtacctcgacgtcctgctcatctgccttctcctcagcactcttatcgccaccgtcatgacgtttagtggtgcaaattggacgggaaagcagtcctctaccggcgggtcaacctag

SEQ ID NO: 29587 - DNA, 127 bp, Zea mays
  Peptide Sequence Number=SeqID_71366
aaaagcccaattcacccccctcttgggcatcgtgatcctttcaagcacaccagtggaaggtatcaagataaatgaggagattttttcaatcgctttcaaggggttctgcaactggtggtcaggataa

SEQ ID NO: 29588 - DNA, 1158 bp, Zea mays
  Peptide Sequence Number=SeqID_71367
atggtgcgcacgaagaatgtgtcagcgccagggggaggagacgacgaggaccctcctcgccccttcaggcagcgtgccattgcagcccgggtacgtaggttcagacacgtacccgtggagtcctggttgctagctcagagggaccctacagcggtagatcttttcagtaccaggactcaggcgtccttcttccgagcacagttgtcagcgcagattgccctgcgagcgcatcggcttttggatctacctgcttttctgctagcagccagtgccaactcagaggtgcatctctcctatttgccatgtcttctttctctactgactacaactggcagatacattgaggagtgggtcagagtcttttatgctatagtatggattgactcggaccatcagtggatgaggttccatttcgagcgagaggatgtcacattacatgccagccatatacgccagctatttggattttcaaagtcgtcgactcgtcttcatagtatgtgctatggttcatcagatcctcctcgtcgccctcacaacggagttgcaccagccactactcacgtcgcggccctgtttagacctcctttcacagatgggtcgcaacgctctccagctgacttcacccctgcagcgaagtatctatatcaggtgatgagacggacactgctgcccaggatgggttacagagaggccaccacacatattcagttatggctacttggtgccttgatctcacactcagaatttgacatcattgactttcttatctgtgagatcgaggacacaattttggatgggcttcgtgctcgccgtcagctgccgtatgcgcactacctctattacatcttcacgcagctgattaggccacctcagttccagggcaccctcgaggcctcacacctccagtttggatcatatcatccagcccatgaggacccattcctagtgccagatactcaagctgaggatgaggcgttccgccagttcaagacccagggcacaactgtcgttgatgatgatgatgattatgatgatgactttgggatcccgccactgcctcctatgcctcctcgctcacatgatcacgaggcagggagttccagtgctgcccctgctgcccctcctgccattgatcctggtctggctgcgatactctag

SEQ ID NO: 29589 - DNA, 447 bp, Zea mays
  Peptide Sequence Number=SeqID_71368
atgaagagcgcctttctcagtgggccaatcaaggaggaggtgtacgtggaacaaccccctggcttcaaggatgataggtacccgaccatgtgtacaagctctctaaggtgctctatggacttaagcaagccccaagagcatggtatacttaagaagtttgggatgaaggacgcaaatcctgctaagacgctaatgggaactgacggacacttggacctcaacatgggaggtgctagatttcaatccgatcccaaggaatgtcaccttgtggctgtgaagcgtattcttagatatttagttcgtacgccttacatcgggctttggtatcctaaggggtctacctttgacttgattggatactcagactctcactatgccgggtacaaggttgataagaagagcacatcagggacttgtcagtttttgggaaggtccctggtttcctag

SEQ ID NO: 29590 - DNA, 528 bp, Zea mays
  Peptide Sequence Number=SeqID_71369
atgaggccggcaccaagtgtttccaggcccacgtcaacgtcgacgatttcgccggcagcgccaccaccggcagccgcgaagctggcgtcctcgccgtggcactcaacggtgccctacctgttcggagggctagccgccatgctgggcctcatcacgctggcgctcctcatccttgcctgctcgtaccggaagctcaacaactacctcagcaccggcgacgcttcctcttccccctccagacccgaagccacggatggcaacggcttcaagtcgccggcggccactgccccggcctctccagcgaccttcgccgacctcgttgccgtcgtcatggccggggaaaaaatccccacattcttggccgcgccgatcgtccgacgaacgcacggtaacgacagcgctgccacagccaccggagaagggtctccggagacggaggaggagctggagagccgcggcaaggcaggggagcgggagtgccgtgtgatcgccgacgccgaacgggaacgccatctgagtcacgtgtga

SEQ ID NO: 29591 - DNA, 483 bp, Zea mays
  Peptide Sequence Number=SeqID_71370
atggctgatcttgtggccgtgggcataaagaggagggacgccgaagtgggcagccatggattccccatcctccttggtcccaagaggatcaaactagaggacgaggcagagatcccggagccgatggaagaagaggaaccacttgcagacgtggacgcagacgccggtgcagcagcaccggtcgttgtgcaggcgcagccagccgtgtcggtgtcgatgccctcaccgtcaccgctgcagccagctcagggccacgaggaggctgctgtcctccgtgagccgcagcctggcctgcaacaggcggcgccgatggacgtcgaggaggatttccggcagccgcagccgcagcctggcctgcatcctcgcttttggtcaggtggaaggctatggtctgttctgatggcgggagctcctgtttgtgcaagcgtgcaacaaccaaaaagtggcgcgccactgttccaggcagcctttgtcacctgctag

SEQ ID NO: 29592 - DNA, 1278 bp, Zea mays
  Peptide Sequence Number=SeqID_71371
atggcgatcggattactagcgtttgagagccaccaggggctctggaacagcggatactattcacagttgtttggaattggaggagttctcatcactcttaccattcttatgttatccacgggctactttgggggaattggtgccccatttgctccatatttctggccgtatctaggacaagttccaaagaagagggaacgcaaaaggcctgtgagagtgtacatggatggatgctttgatctcatgcactacggccatgcaaatgcattgcggcaggccaaattgctgggcgatcagcttgtagttggagtggttagtgatgaggagattgtggcaaacaaaggtccacctgtcctttctatggaagagaggttgactcttgttagtggtctcaagtgggtcgatgaggtcgttcccaatgcaccctatgagataacagaagaattcatgaatactctcttcaacaagtacagcattgattacattattcatggagatgatccttgtcttctacctgatggcactgatgcatatgcgctagcgaagaaggtcgggcgttacaagcaaatcaagcgaacagaaggtgtctcgagcactgacatagttgggaggatattgctaacattcaggcagaaagatgctgacactgatttaagtgttgtcgttgctgagaagtctggagagaaatcaaatgatgaagtgaaaagtcagctatctcatttccttccaacttctcgccggatcatgcagttttcaaatgggcaggctccttcgccaggtgctcgtgttgtctatgtagatggcacatttgatcttttccacgctggccatgttgagttcctcaggagtgccagacaacttggtgactttcttcttgtgggtatctatgacgacgagtcgatcagggatagaagaggctgtcgtcctataatgcatctccatgagcgtactcttggtgttcttgcctgccgttatgttgatgaagtcattattggtgcaccatgggaagtttctaaggacatgatcactacgtttaacatttcattggttgtccatgggactgtagctgagggcaattcagctggtgaaattgatccttatgctgttccaaagagcatggggattttccagacaatcaggagcccaaaatctataacaacattgtcagtggcgacaagaatagttgacaatcatgaagcttacaagtactctgtctccgaaagctacatgttccaaggaccgaagactactgcaacaccaccaattgcaggaagctag

SEQ ID NO: 29593 - DNA, 234 bp, Zea mays
  Peptide Sequence Number=SeqID_71372
atggctaaatcttgtgagaaagttgctacgttctttggaattgtgcaagctgagaaggcctttgaagttaactatttcttagttgttgttgatatggcaaacagctcactgaaaaatagatttgaagaactccagacattcaagaagcgggaaccaaagcaacagagagttgtcaacgtgcgcgccggcgcagaatacgtctacgagagtgaatctacgggctacggtgattga

SEQ ID NO: 29594 - DNA, 450 bp, Zea mays
  Peptide Sequence Number=SeqID_71373
atggaagaaggtcgcaattgctatgcagatgagcattatctgccgaccctattccacgttagtagtgaccgcacagtgccattttatattttaaaagaatctggttgtcaaatatgtcttctaggtactgatgtcaaggctctcatatgtattgaacagatgatggaccctgctggcattgcaaactggtcagtcacctacgttgactggtctgaaggaaagtggcatcccagatcttttcgtgctaaggatgtcacttatgaacgcctgaagaatatgacttcgattgatgtgagctaccacatcaccagtgatgacaagaaagatctattgcagaggccttgcatgtggaatggactgaagagaccatgctacttgtttgcaaggaaattttaccctgaagcattagacaatcttgtgaacttattctcaaactacacaattttctga

SEQ ID NO: 29595 - DNA, 297 bp, Zea mays
  Peptide Sequence Number=SeqID_71374
atgggcagcgcacggatgatccaagtccacgacaggacaaacgatcagctatccaacaacggtttaaagaggccaaccaaacaaagaatttgcatcatggtgcagcacagggatcaggtcacagaactgttatcaaggtctgacattgataaaaatttaaaagatgagttccgtagtcaaggatgtgccttggggggcatttttcaaaagcaaggcggtctgggcaatgatatatgcacacttttgtggaagttgggggcattatacttgtttgtcttggctaccaacattctttag

SEQ ID NO: 29596 - DNA, 981 bp, Zea mays
  Peptide Sequence Number=SeqID_71375
atgctgtttcatggtgacctgcgtgccgccggtgagccacatccgcctcctcccccacccaactccctccccctcgaacaacgcagtgctgccagaaacgccccctctccctcctcatatgccatcgtgcttcttgtgagtattgctgccacgacatccacgcaggccatagccaggagtgccccctccccctccggccttcccctgaaacggcgacacagtcgttcaggcacaacctcgcctctccgcgtcgatctgcacgtcgccaaaaaccccatctcctcaaacacatattcccgtcgagctgctcgccatgaggagccctatccccttcctcgatgtccgtgcaggtcgagctgcacatcgtcgggagcccaatccactcaagcgtctcttcctgatgagctgcacgccgccaggatccccatctccatccctagccttcttgcgttcacaacgctattggactcttccaagttccatcctaatgagcggtggtggaccgactgtgtgtttagagttttgcagaatggtcttgctatcgatgtggagtcacataatcagattaaggagaggaagaacaaggctaataagatctgtggtgtgaacaagacaactggctcgaattgcaacaaggtgaatcgtgcagtctgcaagttctattcgaaagaggttgtggataccacacctggaagagttggtggcggattcttcatcaactcaaaggcagaaggaagacttttaagctgcccactttctgacaagggcgagcggcaatacactagtgtttactatcatagaaggatggcagagacagagaaggatatttttcgcagcatggatgagtcgagattcatggttggaggaaggtttaagaaaatgacggggtccacattgagcatcaagaaggtgatggtcaaaacttcgggcttccaagaaggggttgaaaaatttgtagttggagcgaccattaggtcatga

SEQ ID NO: 29597 - DNA, 312 bp, Zea mays
  Peptide Sequence Number=SeqID_71376
atgcctatcttggtgtcacccgccaaggaggaacccatcttgctctacgtagccacaaccactctggtggtcagcgtcgcggtcatagtcgaaaggcaagaagagagacataccttgcctattcaaaggccggtatacttggttagcgagaagtgggcgctagcctactcttcatctcaccccttcgaagtacatctacgttatgcaatacgcctccactttgctgcatacaacaatgtagtcgagtgcgaagccttggttaatggcctgcacatcgccatcgacctaggggttaggtgcctcgacgtctga

SEQ ID NO: 29598 - DNA, 144 bp, Zea mays
  Peptide Sequence Number=SeqID_71377
atggctggggtgcctcatcctgtggggcttgctgctcttgctgggtacgcctcccacctcggcgcctgttgtcagacatctgtggaaggcattcatacatcagaattgatgttgcagtcttttagcataagtgaaaggtgctaa

SEQ ID NO: 29599 - DNA, 666 bp, Zea mays
  Peptide Sequence Number=SeqID_71378
atggcggcctcggtgctgcaggccgagcgccacctgctcctgctcggcagcggccgcaaccgtcccctcctccgcatgctcccgccacgcgtgctcttcccgcaccggcgccgcagctggccccgggccgtgagggtgtcacccggcgacggcgagggcgcgggagggttcgcgagcgccgtggagaagcgctcgataccggggatagttgaggaggaagggtatggagcgaggggagaggagttggaaggggacgtggccggggctttggagcagaggtggcctccgtgggatgggttggccgagcggtacaagctcatcggcgccacctccctcgccttcgtcatctgcaacatggacaaggttaacttgagtgtcgcaattattccaatgtcacatcaatatggttggaactcatcaactgctggcttagttcagtcctcattcttttggggttatgcattgagtcaactaccaggaggatggctggcaaaattgtttggcggaaggaaagtgcttgaggtcggtgttgtgacatggtctttggccactgctataattcctgttgtagcaggttttatgccagggcttgtactatcgaggattctggtaggtattggagaaggtgtttcaccatcagctgctacagatttaattgctaggtaa

SEQ ID NO: 29600 - DNA, 1569 bp, Zea mays
  Peptide Sequence Number=SeqID_71379
atgaacgtcaatccaaaagtcgcatatgcaaggggaagctgccagtgccagccggacaggcatgaggagatcgccaaagaagcagcatcggcagtaagctctgcggcgatggggtacacgtacactccgacatactactcgggcctgcaggacaccatcgcgtcgctctgcaagtccatcctgccctccttccgcgtgggccggcggctcaccgccgaccaggccgccgcgcggcgccacgccgagcagctcaagtggcagcaggagtccttccaccgcatcctccacctcgccgcgctccaccgcgagggcatcgctccggcctccgacgttgccgccttccgcggaaccatgctcgcggcgctcgtcgcgccgccgcagcacctcgagcagcccgctgtgctccgggacaagctcctcttcctccaggagctcctctacgccaagtgcgtctccgcggcggagtacaacgcgtccaaggcgcccctcgtgcagcggctcgccgcgttcggcgtcatcgtcgactgccccgacgcggaggtctcggccgaggagtggtcggagatcgacctccgtgacccgcctcctcccgccactgcggcggcctccgacaagccgaagcacaaggccttcgtcacgccatggaagagcagatccaagaaggaccaggacgtgaacagcagcgcatcaaggccgccgctggcccctgtggaccataacaacgccaccaacgcgccagtcttcatgaccgagagctcgccgtcggaaacggttccctccgggaaggccgagaaagggaagaggaggcatctggcagggatgttccacagcggcggcagtggcaccgagaacaaggagcctgcgggggaggaaggggtcgtcgagaaagagacggtgagaggtaagaagaagagctcgtgggggttcgatggcatcaagaagtggacgaaagccggtgcctgtaacagtggcgaggcggcagccaccggtgagcagccgcagcatgttcctccgcgctcatcttacagcgagtgccagctggaggcgagccccatggctgcttctggaccggatgccaagagggccaagacgaggctgcactcggacacggacaatgactctgcttccgagctgctgcgtgacaagaacacaaagaaagagctctcaaggattcaggctgagctatcatctacaaatcggaacttgaacttctcgaatcagcagatggaggccatctcaacaaagcttccggtggacaagtctgacctcaagtcctacttcccaaaggcatggtgtgatcagcacggggatggcgtgatcaccgcggctaaggaagggttcaagcagcacgtcgaagagatggagaagcagagggacatcactggcagtgagggctgggctacctttgaggacatcgaccttgatgacaacttcaacccgagggccttctctcgccaccagccggactctgcggtgaaaggcaagaaagtcaatgaaagcctcaccagcagtttcacaaacccattctacagcgagaagaacccgttcttgaacacaaactacaactga

SEQ ID NO: 29601 - DNA, 210 bp, Zea mays
  Peptide Sequence Number=SeqID_71380
atggcggtagcgccgggcagcagtggtgttgatcgtggcgggcgcgatttcgagtatggatcacggcgagatgcagaaactgggggctgtggagagggaagcgctgaccaagttcttgacggacagggaggtggaagacgagctcgccggattcttgcactactacgtggcaaacaagcaaggagaagatggaactgctccggtggttga

SEQ ID NO: 29602 - DNA, 150 bp, Zea mays
  Peptide Sequence Number=SeqID_71381
atggctacagcgacggcagttggcggacccgacagggtggagactgcggcgtcgtccgcggcggcagtgctggccgtcgccgttgcctcgcagaggttgctaggtctgctcgctcttgcgggacccatagtcaccgcgataatcatgtga

SEQ ID NO: 29603 - DNA, 279 bp, Zea mays
  Peptide Sequence Number=SeqID_71382
atgagcggcgatgcccgcgccattgcagcagtaggctgccaccgcgggctcgcgtggccaggccacctggggctgccgccggccgagccaactccttggctgtgcgcgccctccactagggacggctcggctggccccgccgcgctcggccgacaccggcgagccccgaccaggaaaggccgatccccttccctgtacgttccaaggaagaagacgacggaccaatctgcaaattccataacagcaggggattttgtgctgatgtttgaaaattcatag

SEQ ID NO: 29604 - DNA, 363 bp, Zea mays
  Peptide Sequence Number=SeqID_71383
atggctaggttgtttatttgtcagactctgattgctgatttcttgtttcagagtgagctgctggctgccgagatcaattacatggccaaaagggagaatgagcttcagaatgaccacatgaacctcaggaccaaggacccaagaacatgccctacaggccaccgaccagaagatcaacctgcaggacaccaagaacatgccctacaggccgctcaagtgccagtcctgctgcccaggattcttctgcccaggaccactaaattcttggcaattttaaatcgcctaatctatcgcacagcggcatccaagaacaataaagaacagggaatgagctactgggcttcagatctgatgatccattag

SEQ ID NO: 29605 - DNA, 336 bp, Zea mays
  Peptide Sequence Number=SeqID_71384
atggttaaaaattttggcagggaaacagtgcaaatagcaatgaatgctgtggtaacttcacacctactcgtctgtttatatagtgctgcaggtcttcaagggagaagcggctttataatgtgtgagcagttaacagtgccagatgtgaagaacatcaatgaggacactgaaatgattcatgttgttaaaactgaagatccgaatgatgcatctggtgtggtttctgcggtgattacaaatgttggtgttgcttcctgtattacaggtgaagctctcttggttaatatgcatttagaggacattgcgactgaaacaaaggactcagagattcaatag

SEQ ID NO: 29606 - DNA, 738 bp, Zea mays
  Peptide Sequence Number=SeqID_71385
atggcgttcactctccgcctcgggacagcatttctggtgctcctcctcttctcttgtgccgcagaggcgggcgaggttggtgtgaactatggaatggtggcgaacgacctgccgaaccctgcgtcggtggtgcagctgctcaagcagaacggcatcaccatggtgaagatatatgacgccaacgcaaccgtgctgacgtcgctggccaacacgggcatcaaggcgatggtgatgatgcccaaccagaacctggcccacgcggccagggacccggtgtacgcggcgcagtgggtgcaggacaacgtgaagaagtacttacccaggacgcagatcaacgccgtcgccgtcgggaacgaggtgttcgacgacccgaacgtggacaagatgaccctcgtccccgccatgaagaacgtgcagaaggcgctggcggatctgggcctcgccaacgccgtcaaggtgtccacgccgatcgccttctcggccgtcagggattcgttcccgccgtccggctccaggttccgggacgacatcgcgcagccgatgcagcagccggacgacatccccctggactacgccctggggaacgcccagcacgccgtgctcgacggcagcaacaagtactacagcctcctggacgcccagctcgacgccacgcactacgccatggaggccctcgggttcggcaacgtggagccgttctcggggagaccgggtgccccacaagggaagataggatag

SEQ ID NO: 29607 - DNA, 939 bp, Zea mays
  Peptide Sequence Number=SeqID_71386
atggcgcaccatcttatgaccctggccgccattgtcgcagcggtcgtgctgctcctgccctgcgccacgggttatccatgggccttctgcggcgagaacaataacttcaaggccaacagctcctatcagtcccatctcagcctcgtcgccgccaccttgcccaagaacgcctccacgtccccggacctcttcgctaccgctgtcgtcggcaccatcccgcggcagctctgggctatggggctctgccgcggcgacgtcgacggcacggcctgcttcaactgcctcacccaggccttccgagacctaccgaaccactgctcgtacaacaaggacgccaccatgtactacgacccctgcatgctacactactccaacaaccagttaatccccgacgacgactcgggagatttttacaccatcaactccacagcagctgtcaactcggatccagtggggttcaaccgtctcgtggccgcgctcgtgaacgccaccgccgactacgccgcgcacaagtccacgcggcggttcgccacgggcgagacaacggccggctccgtctcggaggagttccccaagctgtacagcctagcgcagtgcacgcccgacatgaaggcggcgcggtgccgagagtgccttgcggcgctcatatcgcagtcgctggacgcgttccagaaccttaccctaggccgggtgctttggatcaactgcacctaccgctacgaggccgcgcccttcttcaatggaccggccatggtgcagatagcagtgccgagctcatctgtacccgtgccggcgccggcgccgacgttagcgccagctatccagccatcttatgggacgccggcggcggtggccggagtaggtgagtctcagtcgactgtgcatatctcgtcatatctaaaggtccctgattctgggatgttgggttccaaattttga

SEQ ID NO: 29608 - DNA, 366 bp, Zea mays
  Peptide Sequence Number=SeqID_71387
atgaagaagacttcaaaaggagggggtgttgaaattcagacagctgaagctgataggttgttagcatcactatttggaaatcccattggagtaagtggagctccacagcctaaggagagggagctcttgaacgccgagggtgtccagggcatcgttgaaggcggcatagagacggggtccacgacgtcgttatttttgtcgaacaagtcgcagaccaaattgaagtcaccaaggaggacccagggactgcggagaagagggagcatgcttatgatcttgtcaaagaagacgtgcgggagccgtgattggataggcgtacacgttggtgtatattacccatgccttgctatccatagtcatcactag

SEQ ID NO: 29609 - DNA, 366 bp, Zea mays
  Peptide Sequence Number=SeqID_71388
atgacccatcttctagcgtcgctgacgggcgtggctcaccgagcagtggccgcctcccttcaccctgtgcgcatggcggacgtcgcggactccgtgggcatcggatctcaaccactaccgcgggatcctcgggagagctggacttcctggataaaggcaggagcggtcaccgtcggccaatcgaacggtggtcagttgcaaccgcgaagagagagtgaagcacgctggaatactgcgcctcgctatgccctgcatccggtcgtcgtccagttcgccagtggcgacgagcaagccactgtggattctgaggttcagcaagtagaagtagctgagcaagagctcattgaaggcaagtggtgcccttaa

SEQ ID NO: 29610 - DNA, 549 bp, Zea mays
  Peptide Sequence Number=SeqID_71389
atggctaatccccagcaccatttgtggctcagcatagtgatctggtttgggagtcttgagttcatgtctcttggcttcggctatgacatggtgctctttccgcctagacacccaaccgatgttgactatcgtttctcccaaccagggggagcaaagccactcctggtacactggccgatggaggaacatctagacttccgtctctatcctcctcgtcacaggagacgaagacggaacaaacacaaccgcgccacgggcagcgctctacgcccaaccaatgctctcaggccagctgacgatgtcgactcccttgcgagggacctatcgtgcgttagcttcacacccggagcatcgacatcaacacacgtcgctccaacatcgactccattgaccctccccttcagatcagggagtgtcggctccaccgactccccctcccatgggtcgggtgacgccggcttcgccagcactcccacctacagactgggaggcgccagctccacctacttcccctcctatgggtcaagaggggccgactccaccatttga

SEQ ID NO: 29611 - DNA, 255 bp, Zea mays
  Peptide Sequence Number=SeqID_71390
atggtgatgacgacgaggggatggatgtctggctgggcttggccaggctctgatctgagccatcctcggttggctgttggtttggatgtgctggtgctcgagcttgaggcatctatgcctccgctcgattcgcgggcgtctgccgagctggggcctatcctcatagccgaggaggaggaggtggcggtggacaaagggcccgaggagccaggggctgagaaggctaggcatgccttggtctggcctaaagcgtaa

SEQ ID NO: 29612 - DNA, 322 bp, Zea mays
  Peptide Sequence Number=SeqID_71391
atggagcaaagtatactgaaggcagccctggtctggcgcaccggactgtccggtgtgccaccggatagtgtccggtgcaccagggaggatccactcgaacttgccagcttcgggaatttggggagccgctccgctataattcaccggactgtccgaggtcagagcagcgccagaaggcgcaccggacagtctacaggacctgtccggtgcaccactggactgtccgatggcccacttgtcagagctccaacggtgggaacccaatggcctggtgacatggctagcgcaccggacagtgtccagtggcgcactggactgtccg

SEQ ID NO: 29613 - DNA, 529 bp, Zea mays
  Peptide Sequence Number=SeqID_71392
gttaccgaatgctcctgacatggaaatattttccatgtacggagtaggcattcctactgaaagggcatatgtctataagttggccccacaggcagaatgttatatacctttccgaattgacacctcggctgaaggcggggaggaaaatagctgcttgaaagggggtgtttacttagccgatggtgatgaaactgttccagttcttagtgcgggctacatgtgtgcaaaaggatggcgtggcaaaactcgtttcaaccctgccggcagcaagacttacgtgagagaatacagccattcaccaccctctactctcctggaaggcaggggcacccagagcggtgcacatgttgatataatggggaactttgctctaattgaggacgtcatcagaatagctgctggggcaaccggtgaggaaattggtggcgatcaggtttattcagatatattcaagtggacgccaatgcgatacgatgttgtaccgctattttcagcattgtatattaaactgtacaggtggtctgtttga

SEQ ID NO: 29614 - DNA, 445 bp, Zea mays
  Peptide Sequence Number=SeqID_71393
atggcgaaggccgagaagacgaacgaggcgtctgacgacgacaaaaatgatgcccactccacttccgctgcgctgttactgtcgctgacatggcgggccccgattgtcagcctcgtctccacactgcaccagccgaatgcccaccacacgcgcctcctgcgtccagcgttggatgtgtcgctgtttgactgggccacttcccgggtcaactcctctctcgtgccgttctcttacacgtgggacccatctagccagccccttagtccgcgtgccacgctccttctctccgcggaagacccgtgcctggctggtggaccccggcgctcggatccgtcttcttcgcgtcaccagccgcgcggacttggcaaacgccacgctggaacctcgccgcgcatctcggaggcccaaccgaatcccagtcgcgcggccaagtctccttccccac

SEQ ID NO: 29615 - DNA, 399 bp, Zea mays
  Peptide Sequence Number=SeqID_71394
atggcggccgaagagtctttgcccacgaggtgggggtatcccgcagcggacttctcacaccggtgccaatccacggtggaggtcacacaaccatcagactgcggcgacgcggcaaattggaggcgttcgggtaggtctctcgcacggacaccacggcaaacgcaaacaagggttcaggcggagctccctgatcccacagcgcgagctagaaggcgctggaacaggggttccacccacggccgtgcgcgcgacggtgacagacccgaggtgttctctggacggggagaagctacgctggcggcgcacgcgaaatcgaggaggagaggagagagagtttgcggccgagtcatatatacgggagaaagtcgttcggtcaagcaacgattccagacgaattag

SEQ ID NO: 29616 - DNA, 996 bp, Zea mays
  Peptide Sequence Number=SeqID_71395
atgtcgtggtcgtcggaggagcgcttgagccctgtagaagcacatatgtcggggctgtcgggtcgggcgaggcggagaccgtcttccggggtcgaggttgagtccgagccctggggtcgggcgaggcggataccgtcttccggggtcgaggttgagtccgagccctggggccgggcgaggcggataccgtcttctgaggccgaggcgggggtcgagccctggggtcgagcgaggtggagcttcctatggcgcctgaggctagacttggctgctgtcagcctcaccctggtgggtggcacagcagtcggagcagggcaggcggcgctgttttcctgtcagacgatccttgcattgaatgctcctgtgatacggtcggttggcaaggcgatctggccaaggttgcttctccgcgaagcctgccggagctgggcctcgggcgagtcgggggtgcgcccgttgcttgaggagaccctcgggcgagacatgaatccacctgggcctttgcagctttatgctaatggtggttaccagccaagtttaggagtcttggggggcgagttcgcatcgcagcgtcgcccgcagcagcagcggaccgcggaccacgccacctcatccagcggcattgagcgagggagcgattcgatcagaatcgacatggacggcggcgagcacgaagcggaggagtcctcctctaagcgccgggagcgcctgctcgccctccgctccgccgcaaacgtgtcgccggcgggggctcctccgccgacggccgcggggagcctcctcccggatcctgacctcccggacgacgaggccgcatccgtgtgcccgcccccgccccagcgtttcgactactacaccaaccccgccgccgccttcacatcctcctcaggaggcgccacaaatcccacctggtcccacaagcgcaagagccctcccgcctgctacgccccgcctccgccggcttacggtccgtactaccctacaagcacctactag

SEQ ID NO: 29617 - DNA, 1233 bp, Zea mays
  Peptide Sequence Number=SeqID_71396
atggcggttcggatctcagtgcctgttgttcctctagagggcaatggaggtgccgccgccgctgacggccatgctccaccaacaccaagtcaggacgcgtcaacacaacgaaggaaaggggaggagaaggggagggaagctttgggcgggagaggaagcctagcagcaacagtaggcagtagcagggttgaccggaggggcagtggagtctggagagtaacccaacaaccccctcctcccctccccttctgtcttattgccacctctccacgtctccaccaaacaaggcaacaagggagaagtagatctgcatctgcgagaggaggcagcgggggtggtgatgatggagagccagccgctgcaggccccgacggccacggctccggcccccggatctgcggagccagccggagctccgccggccgtcgtaagcgccgcttcctagctcccttccttgctcttcctttatttcttgcttgcttgctgtgccattcttcgcctgggatccagttcagctcactgcttggccaccgaatccggatcatgtcattcttgcagacccccggcaaggagttcacgcgcacctgcaagggcctcgtcgtcgtgctcatcggaggatacgtgctgctccagctcctcccttcgtcactcaactacctcgccatcatcccctccaagacaatcccctatgtatggaccgtctttaccgctggttacatcgagcaagtcctcccaggggccattggcagttctcttggtcttctcttttgtggaaaggacattgaaccagcatggggccgcaaggaattcttgaagttcattattttgatcaactccatctgtggcattcttgcattttgctttgctattggactctactacgtcactggaaaggagagcttccttgtcacaccactttctggtttccacggttgccttgctggctttcttgtggccctgaagcaactcttaccaaaccttgagcttcctatgtgctttttctggaaaataaaggcaaagtggatgccattctttgttgtatgtttctcaagtatcatggccttcatcgtgcctgattccattaacttcctgccaactttggtgtccgggatgtacgttagctggctttacctgagatacttccaaaggaacccactgactggacttaagggtgatcccagtgatgacttttccttccccagtttattcccagctgccatgaggtacttttaa

SEQ ID NO: 29618 - DNA, 255 bp, Zea mays
  Peptide Sequence Number=SeqID_71397
atggacccaacgaatcagagctcctcaggtgcagggcggcaccgctctgtcgctgctgcgaagggccatggtcagcaacatgtgccggcactgggagtattgactatatgcactggcaatgggaaggatgtcctgttggatggaagggtcaattcacttgagatcaggagtttgctaatcatcaagaaggcgaaagggagaatattgaacaagcatttggtgtcctacgatgtcgatggtgttattttgaagtga

SEQ ID NO: 29619 - DNA, 516 bp, Zea mays
  Peptide Sequence Number=SeqID_71398
atggcggccgggctggcggcggcgacgaccgagatgacgaaactgtgtgctcagctagctgttgaaggttcagcagttactggtgtctacaagccacgccctcgcgcaagtgaccatatatactgcccggtgggtccctccgtccccgtgcccctgctgctatcctcgcttaattcgacgatggaggaaagctgcgacaagcggagcgagaagcaggtggtggcggcggcgaagaagaagaagctggcgaagagcgggcatggcaggaggtggtcttcgtcgacggacctgcaggacatcgagacggcgaccaggacggccgcagtcgacggcggcatgaagcagcagcggcagcaggcagcgcgggagggccagggagaggcggtggagcagcgtcggcgctgtggcggcgccggcgcgcgtctgtcccggaagatcaaggagcaccgggcgcggttctacatcgtgcgccgctgcgtcgccatgctcgtctgctggcgcgacgccgacgactag

SEQ ID NO: 29620 - DNA, 485 bp, Zea mays
  Peptide Sequence Number=SeqID_71399
atggctcgccagagggagggaagctgcttcgcatccgccgccgtggaattcagcgggctcaagctcaacgcggcgtctggtttgaacgtactcgcagcagcgtcggcaagcaaggttctcttctcgcgccgcccagatctgagcgctcccatggccatgccgtcctcccgctccccggcgccgccgccaacggcctcctcctcctactggtgctacatgtgcgaccgcttcgttcgcgccgccgcttcctcctcctcctcacccacttcgccgtcctcctcctcccccgcctgcccgtcctgcggcggggggcttcctcgaggagatggggcgcgccgccgccccgcgcccgccggccccgtcgtgccgccccgccgcggcgccgactccgcgcctcgcccttcaaccccgtcaccgttctcggccgctcctcgtcccgcccgagtcgacgccgaatgctccctcctctctcgccgccgactctg

SEQ ID NO: 29621 - DNA, 225 bp, Zea mays
  Peptide Sequence Number=SeqID_71400
atgtcgtgccgcacttcggctcctgctgtagctaggcgacgcgtctgcggcggccccgtcctgaagcgagggtacctatttatgggcagcaacccgacggtgctgccgtccaccgacatgaccgacactgccattgtgctgccactaccggacactaggatcaaggacgccaccacaaggtggtggggttggcaacgtctgttcatgctcccgtctccaccataa

SEQ ID NO: 29622 - DNA, 216 bp, Zea mays
  Peptide Sequence Number=SeqID_71401
atgggtgcggggcatccttggaagggtgaggatcgcagggttggggtgggtccctggaatggcgccttccatcgacggagcgcgggcgctgacgcgatgatggcgggggcggcgatggagggtccctggaatggcgcgacggagagcgaggcggggcgagaattttgggggcgggggcacggtaccagtgtggacgcccacactggacccttatag

SEQ ID NO: 29623 - DNA, 411 bp, Zea mays
  Peptide Sequence Number=SeqID_71402
atggagccatgtgcagggatgccttttcaattcaggtcaccaggcgtgggggccacaggcatgatgccttctcaagtaaagcacatttatggccccaccaacaaggtcaccacctcacccaaggtgggcctgggggccactgtcggtacctcaagattggggtacccactacttctgggtcaaggcaaaccctctgggactaccctttgtcaccatgctaatgatggtttgccacgtgtcttggagacgagggctctcgacacctgcgcccgggggctggaccccccaggaatggcctcgaccctcatggcgggccacccatacctctgtcctatgggggtccggtgctgccacatgctagccaacaccggaggagacatgacctcgcccgaacaccatccagacccctag

SEQ ID NO: 29624 - DNA, 354 bp, Zea mays
  Peptide Sequence Number=SeqID_71403
atgccccaaggtcccctgctgagtgctgacaccagaacaaccatgcaggaatgtctttccccccatggcggcctgatgcgcgtatggtacagctccggcgaaaccccaccccgtcgatcacatgagcaaccacaacagatggagaactacagtgggtccgtacctcgaggccgaagacacaccggcagcgaacgatttgagtggcaggccaattcctctctctcccttccatctctgcacgccatggctactggattggcacaggggttcacggtgacctatatatgcgtcagagggggcgagtctgagctgagagggtcagttgcgggagaaaccaaggtcggcatgcgttga

SEQ ID NO: 29625 - DNA, 318 bp, Zea mays
  Peptide Sequence Number=SeqID_71404
atgcgctatcgccaacccagacgccacctcttcctccccttctcccctcccgcgcctatttgtatggatcgcttccgagatcggatctacgctgttgcgggtcagttaaagcctgaggaggttgctggtatcataaaggactttaatgaacctggtactcttgcaccaactggtcttttcgttggaggtacaaagtacatggtgatccaaggtgaacctggagttgtcatccgaggaaagaagctcaaaaatgaaactaccgggcgacaatattcgaaagcggaggtagcacttatatttagcgttatggatatctaa

SEQ ID NO: 29626 - DNA, 174 bp, Zea mays
  Peptide Sequence Number=SeqID_71405
atggcgagtggaggttcactacacaggagggcacattttggcggctacgagagaccgattttcctgtgtggtggtgacaacaacaccgtggagccaagtcaatgtcggcaagctgatttttcagattggaacctatggttctttttaaagatcgaatatgttctagcatcttaa

SEQ ID NO: 29627 - DNA, 279 bp, Zea mays
  Peptide Sequence Number=SeqID_71406
atgggagagttgctcacctcgagtgaagacttaggagtgcttaagcaatggcaggggatgcagggaggcctcgggtcgacagcggcggggcttcggctgcatgcgaagaacgccggtgagcacggaccaggcgaaccaaaggggttgggggcaaactggaagatgtcccacgttgttggcgaagaggcaaagctcaccgaggaagcgggcgcgatagagaatcaacgacgaccacataatgggcggtggaccacggcgaacggcggcagaactccctag

SEQ ID NO: 29628 - DNA, 393 bp, Zea mays
  Peptide Sequence Number=SeqID_71407
atgggtacgatagggacaaacatgcacacgggttccacaagcccgacggtcgatgcaagcacctctgcccctatccttggtaagctttctagaaggaggggtccaacctcaaaggagtacataaatgaaagggaaataggcctaaaaaccatttccacacttgttttggtgacatctaccaccttcgtccggctacgtgccgagaaagttgacctggagactaagattgagtaccttctaaccatggatactgaggatgcatgggaaaattggaggccaagtcgaagagtcgacggcatgcatgatcgtgttgccacgctagagttggaattttcgattgcgaagacttatgacgagaagctagaagctgagatgtgggctggcgtggattag

SEQ ID NO: 29629 - DNA, 1245 bp, Zea mays
  Peptide Sequence Number=SeqID_71408
ctcggccagggccccgccattgccgcctggattaacggctcgccgccgcctagccctgacgccgccgccgccgccgccgccgccgcctcgggcccgcggagccaggagtacgcggcgctgcaggcgctgaaggtggccgtcaccgacgaccccaagggagcgctcgcgtcgtggcagggcgccaatgtgtgcgcctacaagggcgtgtactgctccgcgccgcccgacggcgccgcggccgccggcgcgtcgacggtagtcgcgggcatcgacctcaaccgcgccaacctcaggggcacgctccccgacgcggtgtccctcctggcgcacctcaccttcctccacctcaacagcaaccggctcgggggcgccgtccccgacacgctccgggacctgcagtacctgacggagctggacctgagcaacaacctcttctcgggcccgttcccggcgtccacgctgctcatcccgtcgctggtgtacctggacctccgcttcaacgccttctccggggaggtcccgcccgaggtgttcgccaaggagctggacgccgtgttcctcaacgacaaccagttcgagggccagatcccggacacgctgtgggcgtcgcccgccacgggtcatcacgctgggccaacaaccacttcaccgggcgccgtcccggcggcctacgagttcggcgccggcgccggggccggggccggtggccgggtccgcgaggtgctgttcctgaacaacaacctgaccggctgcgtgcccgaggcgctgggcttcctccccagcatgcaggtgctggacctcagctacaacgcgctgtcgggacacctcccggggacgctctcgtgcctgtcggggatcgaggtgctcaacctcgcgcacaaccagctcacgggcgagctcccggacctgctgtgcgacctgcgccggatcaccaacctgtccgtgtccttcaacttcttctccgggatcagccagcgctgcgaccggcagctggggagccgcggcgtgttcgacttcgtgggcaactgcgtgcccgggcgggacatgcagcggccgcagcccgagtgcgacgagttcccgggggaaggcggcctcagctgcctccgcatccccggggcgcggccagccgggtgtggcgacgcgggcgtcactattggcgtgggcgtcggagtgggcatcggggggctgccgttcgggttgccaggcgctgccgctggaggcgtggtcaccgtcaccgtgccgtga

SEQ ID NO: 29630 - DNA, 563 bp, Zea mays
  Peptide Sequence Number=SeqID_71409
atgcgcgcgtccgagatcgatgacggcatgccgctgatccacatgctgcgcccgctgctgcattctggcggcgacctcggccggcgcggccgcgtgccgtgcgacagctggcggttcgctgtggagaccaacaccctccgcgactgggacactgtcccagcccgctgcgagaagtatgtcggcaactacatgctcggcgggcactaccgcagcgactcccgagccgtcgccaacgaggccatcgcctacgccgagggcctcaacctcaccggccaaggcaaggaggtctgggtgttcgacgtcgatgagacgacgctctccaacctcccctactatgctaagcatggcttcggggttgagccatacaactggtcgacgttcggcgcgtacgtgaaggaggcgaacgcgccggtgctgccggagacgcagcggctgtacaagaggctgcaggcgctgggcatcaagccggtgatcctgactgggcgacgcgaggacaagcgggaggccacggctaacaacctcgccgcggcgggctacaccggctacttgaagctgctgctcaa

SEQ ID NO: 29631 - DNA, 390 bp, Zea mays
  Peptide Sequence Number=SeqID_71410
atggccttgcacggttgcacccaggtcgaagccgcacccaggtctccggtcgctgcgcccaagtcgatgccgcagccgcgagcgtctccgggcggcacacgcccaggcccaggtctgcggccgcagcgcgccaactcgaagccgtgccggcgccggtcctcgcgccggttgagggtatgcactgattcctgccggggtggttattacacttctgcactcaacctggagggtgcatcaattagagaactgaagctgaaatatcagaagctgaaatatcggaataaacctaacaattgtaatgcggacgatcatgtcaatgctgaaagatcccccttaagaaaagctgaggagaaaaaagtgctggcgagaaagcatgaagattgtgaatga

SEQ ID NO: 29632 - DNA, 234 bp, Zea mays
  Peptide Sequence Number=SeqID_71411
atggtgcggtgtgggaagggcccgtgcggacgaggcggttggccagagaaccacgtcacggcggtgaagcatcgccgtcgaccctcaccggtgaaccgcacaaaaatagagagaaaacagggacaaaggaaaaggggaggcgctagcgatccctacctcgggtggagctcaggcgaggtggagctcgggaccttggcgggttttgggcgcggacgcaacaacaacaccggatga

SEQ ID NO: 29633 - DNA, 486 bp, Zea mays
  Peptide Sequence Number=SeqID_71412
atgggcaagaacaacaagcgcaagcgtgagccgactcttccgtcagaggactttggcgactcggaatactcagaggaggagttctcctctgagtccgaggggtctccggctcccgtctctcccccagcgtcgtccgatgactcggacgactctcaggggattgccgcggaggtctggacgtacatccgggccgtcgagcgccccgagctcgagggctcggatgagtcggagtactcctcggatgaggaggactcggacggcggcggcgaggacgaggacgacgacgacgacgacggtggcgacggtgacggtgacggcagcggcagcggcaggagcagcggcggcggcggcaaggacggtgacagcggcggcagcagcaggggcagcaaccagggcggcagcagcaggggcagcaaccggggtggcagcagcaagggcagcaccaggggcggcggcggcggcaacagcaacagggccagtggctag

SEQ ID NO: 29634 - DNA, 528 bp, Zea mays
  Peptide Sequence Number=SeqID_71413
atgagggtcgacagcgatgcttcaccgtcgtgccatggttctctggccaaccgctgtcgtccacgcacgcccttccctaactgcgccgctgtcattagcacccaacgggcggtactctatttcgcggctgtggaagacgaggaccccgacatctggggcccactggcagtctcccgcgccaacttctcccctcttctcccctctgtgcctctgactggagggccctttgcatcagcgcgtatccacgggtccgcgcctgtgcccacctcacatcaccgaccagcgggctcggccttgccgtggccctacccatcacgcaccagtgcccctcgtgtccccgccgctttccccctcccgttgtccgagtcgccgacccgtgggccccgcccgctagagcgcgcccgcgctcataacgagcagcccgtggttcctgagtgtgttgccgaagatcttcctgagcaaccaccaggagaagatgtaggcaacatggaggactttgaggagttccaggactacgacgagttttag

SEQ ID NO: 29635 - DNA, 510 bp, Zea mays
  Peptide Sequence Number=SeqID_71414
atggagcgcggtgccgtcgtccttccgctccagggcgccggggttgggcgcgtcctcctccccgtgcaagtgcgggtacggtcgttcttgaggagcaggagggcgacggagcggcggcgccggctcgcgagttccgcggcgccggcgaggtgcagcaagatgtacgttcccggctttggggagggttcaccggagcggaaggcggcgatcaacctccagcacttctttaactacatcgctgtcagcattgtcctagcacagcttgagtgtatgaaattactgaggcatgtgtggtttcgtctcttggaaacaaacagccttgaggattctggagggattctcactttgtcagatgaattgatgcgactgcaggtccgatctgcatatgtgaagaacgagttcgagtgggacaatttgaaggaattatccttcaagatggttgatgaggccaacacaaagctcatgagggattacgtcgtcgaggtcagccacattgaagacgaaaactaa

SEQ ID NO: 29636 - DNA, 360 bp, Zea mays
  Peptide Sequence Number=SeqID_71415
atgggcctaggcgctgggcgcgcgtgcgcgaagcaatatccggggatttggaccactgcacgcgatcgggatcagacagttgagatcaacgccggggggggggtttacggctgcgggccgcgccgctcctactcctcggcggtgaagtcgctggagctggggcgggtgtgggctacaggggctccgaggtcactagagttggccaggaccgacgagaaggacccggcgaactcactagtggaatcccggccacgagaccagggccagaggcgggagaacggtggaggggaagctctaggcgggttggggttactccggcgaggaatcccggccacggggaggggcaatcgtgtgcactaa

SEQ ID NO: 29637 - DNA, 150 bp, Zea mays
  Peptide Sequence Number=SeqID_71416
atggataagatcaagaggattgaggtacctaaagccaaggtggcgaagaggttcttgcaagaggctcaagaccctagatcaagtggagtcatggtcacaaaaatgagaagaagtatcaaagtcataacctggaaggacccaaagaactaa

SEQ ID NO: 29638 - DNA, 330 bp, Zea mays
  Peptide Sequence Number=SeqID_71417
atgagtgccccagcgggcagcggcggcggcggggagcgggcgatgaacatccgcggcatattccggttcgcggaccgggtggacgtcctgctgatggccctgggcacgctgggcgccattggcgacggctgctccaccaacctgctgctcatcttcgccagcgacgtgatgaacgcgctcgggtacgggggtgcccaggccggcggcggcgccaagagcgcgcagttcatgcacgaggtggagaagtcgtgcctgaacttcgtctacctggggctcgtggtgctggcggtggcgttcatgggtacagtaccttcagctcaccacacctag

SEQ ID NO: 29639 - DNA, 231 bp, Zea mays
  Peptide Sequence Number=SeqID_71418
atggatacgatactgattgtggagagcatgtcagagcaagtggtgcaggaagctcttgatcgaataatgtcagggaggaccacaattgtggtggcacatcggctaaacacaatcaagaatgtagactcgattgcttttctgggagagggtaaagtggtggagcgtggctcttacccgcagctcatgaacaagaagggggcattctataaccttgcaactcttcagaagtaa

SEQ ID NO: 29640 - DNA, 234 bp, Zea mays
  Peptide Sequence Number=SeqID_71419
atgggtgacaatactctgatggagatcgtcatggtacagtacctgcaaaagatcgcaggtgcactaaatctcgctgccgatgaccccgcgtcgcgatcctcgctggcgctgcgattcgtgcccagtggcgcgcggataacttcgcggggtgaaagacctttggcaatcgatgaagatggggcactgtggtcgctctgtcaccgtgcccacttgcgccgcgacgtggccgcgtga

SEQ ID NO: 29641 - DNA, 540 bp, Zea mays
  Peptide Sequence Number=SeqID_71420
atggacgaggcagcgacagcggccctggcggcggcgagggggcggtggacgcagtgggaggaggtggtggtgtccaacgaccgcggcagccgcctcgtgcactactacctccgcggcaacagcgaggagaagcagctggcggtggttgggcgggagcggagcccgcgtcacatgtcgtacgccgtgcaggggcggttcctccgcgcgctcgcggctgccgccggggcggtcgccgtcgcgccgtcgccatcacggtcgcctctgccggctgctggggcggacggcggcgctccgaggaggtggcggtccagacgggaggtcgtggactggctgtcctccctcgtttctggtaagatttctgtgccggggagttcgggacccgggttgtgctttctggagttggatgtagatttggatgattccgagctcggcgcgtttggtcctgttttggctcgatttggtgctatcttttgctttcaaatcgctccggttttggttcgattgaaggcggttcatgttctgctccgcttctctgcgtga

SEQ ID NO: 29642 - DNA, 223 bp, Zea mays
  Peptide Sequence Number=SeqID_71421
attcctcgtcaagcgccgcatcctcctcggacttgtctcccccgagtgtcgtgtcgcacacctgcgcctcctcctcgtcggactcggctcccccctagagccgtgtcgcacgcctcaggtacttctgttctccgaggttcctttggtttggttctgctcaagtcaggcagaggcgactagctcatggatctgctcatcggctgatcagataggcagcgtgaag

SEQ ID NO: 29643 - DNA, 363 bp, Zea mays
  Peptide Sequence Number=SeqID_71422
atggactactgctaccccagctacgcaacaagggatgcggagaacatggcagataggtttggaaattgtggctggtcgatcaagccacccagggaagaacgggcttataaccaccagggaacggtgttgcccacatatacggacgcgagggagaccaggggaaagggcggtagagtcaagccctgcctggtatcgcgcaggtccgttggggacgcggagtatgcgactcagttcgctggaccggataagaagggaggtagttacaccgccagggagatacggtggtccctgaacttagctggaagaaggttcctagagttacgccgagttgggggaagaatcgattttacacagggcatatga

SEQ ID NO: 29644 - DNA, 555 bp, Zea mays
  Peptide Sequence Number=SeqID_71423
atgaccagagaaggcggagtagaggcccgcggcggcgcattgtcgacatgcagcgcacccagcgctctgatggactactgctaccccagctacgtaacaagggatgcagagaacatggcagataggtttggaaattgtggctggtcgatcaagccacccagggaagaacgggcttataaccaccagggaacgacgttgtccacatatatggacgcgagggagaccaagggaaagggcggcggagtcaagccctacctagtatcgcgcaggtccgttggggacacggagtatgtggctcagtttgctggactggataagaagggaggtagttgcgccgccagggagatacggtggtccctggacttagctggaagaaggttccgggagttacgccgagttgggggaagaatcggtctgcagagcacgaactgcgccgtttgttgcgagcggccagcagaaaggagaagcacctggcaatggggccccatagcacagagagcaggccagcgaccgcaccaaggaaaattgagtgggccacgcggtggttccatctga

SEQ ID NO: 29645 - DNA, 420 bp, Zea mays
  Peptide Sequence Number=SeqID_71424
atgggggagagagagatggaggaaagcgacggtttcgggaggcggacatgcgcgggtggcgcggctcggctcgcgtgcagggcgttgggcgcggtcgacgtcggggcgctgggtcgcgcggtcggttggcacggtagggcgtcgagcctggcagcggtgcgggcgtcgctcgggtggtcgggtcacggggcttggtcgcggcagctgcgcggcctgggcgcgctcctggcgcggtgttcgggagcggggcacgacgtcctagcgctgggctcctggcggcgcggcttggggaaagggaggaggagagatgggcgcgggagagagagaatgggagggggaagagtggcggcggcggcagctgggtgccaggggagggcgcatggttggcttacatgggtcttattgggccttaagggttaa

SEQ ID NO: 29646 - DNA, 1485 bp, Zea mays
  Peptide Sequence Number=SeqID_71425
atggggagcggcggcgcgagcgcatcggtgggagggaagatgcgaggggtttggctgagttttgagtctgggcttgggcgcgaggtatacaagttcagtagtaccatgtttaatatgaagctgatggagaagctgcgatttatattgtccaagttcaatagtaatctatctcatcccaagctgatggataagtcacgatttgaagcatccgagttcaacactctatttgatccgaatacgatggagaagacggcggaggacctgtcgttcgatgttctgtggcttatctttgctaatctggagttacctgaccttgtgcgtgctggatcagtctgttccatatggcgtgacatatacaccagcctatgcaacagtggatcttacaatcctcagcacacaccatgccttctctacacctctgagtctgccggcacaaaggcagcttgcctgtacagccttgcagagaagaagacctacacgttaactctgccggaccctcctctctgtagcaggtacatctttggctcgtcatatggttggattgtcaccgctgatgagaggtctgagttgcacattgtaaaccccatcaccggcgaccagattgccttgccatctgtcaccaccattgatcaggtgaagccgatctttagtgatattggagtcgtttgcggatatgagcactcagggtactctggggtgtgggaagtttcggacataccgtccatatttgacctcagtgagctacgtgaccacctcttccacaaggtcttcctctcttcagatccatccgcgggagactactttatggtgctcatccataacccacactgtcagctttcctttgcaagggcaggggatgataaatggacttggttgccacaaggtgattcctatgatgattgcttatttaatggtcaattgttgtatgcctgcactcaactaggagaaatccatgaattcgatcttggtaccccaacaatcacgcacaagatatttttgggtcgtgttaaagatctctatgacgagaagatttacatggttcaagcttcatgtggtcagatgctgcaaatatggaggtccgacgacactatagaagaaggggataacgaagatgaatatgatccagattttggacctgacttgccttggcatagtacctccatgatcaaagtttataaactggaaccaacttcaaaaaaacttgttgagataagtagcctgggtgcgaatgtgttgtttcttgggcacaacctatcactttgcctccatgcagaagaacacccacagctgaaagcaaatcatatctacttcgctgatgacgaaccatatacatatttcaagagtaaacgacgtgatattggtgtatttgacttggaacgtaattgcagcgagaaaatagtatctcctcagctttggtccaactggccagccccagtgtggttagttccaaatccaaggcgaataggcctatcattgtgcaagtag

SEQ ID NO: 29647 - DNA, 567 bp, Zea mays
  Peptide Sequence Number=SeqID_71426
atgcagtacaatggatcaagcagtctcattagctgcgagaagcagacgattcgaatcgagtttttatccttgcaagtgaccgcacttgtacccaccataaccggaatgggagaccacgtctcaggtcgcgtgaggggtaaagtctgcgggcagcttgctgcgcgggtcggtggtggagctcgctgcgcgacgagtgagcgaggtagtggcagcggcagcgacgtccgacagcaatgcaagggaggagctctctgccggggctacaggaacagcggcgtttcgccgaggagctgcgcagggaggagaggtggggcgagctgctgctgcgcgagggagaacgagccggggaaaaagaaggggcgccctgctgcaggtagaagaactcgtggggtcctggtggaggtcgctggccaggtcaaggacgacgctggtcagggacggctggacctaggaacgtcgagctgctggattgaacagggctgcacgtggggaggagggcttcctgctgccgtgcctgaagggggcgccaaggggagagaagggggcgccatgggaagctccaagtag

SEQ ID NO: 29648 - DNA, 477 bp, Zea mays
  Peptide Sequence Number=SeqID_71427
atgtggtactgctctctatctctctcccctgcaaggtgcacaggctacaggccctcctcctccaagaggaagcaaggactggaaatttccgccgacagtgtgcagttagagatccaaggaccacacaggatgatgagacagagcactatgcaccttgtagaccttgaaggggacattctatgggggcgggacattgccggggagggtcggcgacacctaggatggcgcgtggtggggcgggggaagcgtgtgctacgcgtggatgggggaggggaggcccggtgcggtgagtggcggcagtgtccgaggctcaaggcgacgatggcctgggctcgtggtgttagccgaacgttcctcgcggtggccgaaggttcctcgcgacggcatggagctcgactgcgtgccttgggcaacggcgggcagggacgcgtgcacggaaagagcggcgacggggagacaggcgcgcatgcaaattaa

SEQ ID NO: 29649 - DNA, 993 bp, Zea mays
  Peptide Sequence Number=SeqID_71428
atggctgaggcgacatggcttcgccagttcctattggaactccacccgcccctccaacatgctacagttgtctattacgacagcgtgagtgtcgtctacctctcgacgaacccggttctacgcaagccgagccagccaccatcaagccaggccgccacgtttgctctgacatcgccgctcgccgccgtagacctggaccgccggctgctctacctcgacggcaacttcaccttgaggactggttgcgcccggggtggacgtccgcgtccacttctccgccaagttcctagttggcgggctcacgccgacgaccctaacggcgcgtcggcgtcggcctcctacgggcgtgcaccgtcggaagatgcgaggatggcgctgtgcacaccagctcttccagcgcggcggcgcaggattccacggaccccaagcggcagaactgagatcgatgctgggggtggctgcggaagcaagaaggcgtgcattgtcgccgagatgggagagcgaggcggcgttggaggacaacagctagacggatcgcgagggagtctgactacgcggcgagcaaggcggagatggatggccactggtagaggtgcggagacaagaacgtgcccgaacatgccgggcactggctccgccactgtcaccaccagtgcacagttcgacaccgacgacgaagaagagttctccctggatacggacgatctggacgctcgcgttggaggagacggggaggctggcacgggctaccatggcgtggcttcgccagcttgccgcactgctgcgccaagcattcgcacgtgccgcgcgtctggggtcgagggcagcgactccgccaccgcgtacgggcatcgagaactcgccgaggccagcgactccgccaccgcgtacgggcgcggagaactcgccggggccagcgactccagcaccgcgtacgggcgccgagaactcgccgaggccagcgactccgccaccccgtaccgacgccattaa

SEQ ID NO: 29650 - DNA, 207 bp, Zea mays
  Peptide Sequence Number=SeqID_71429
atggcaacgggttccagaatagtacacaaggcaatttcaagccggttattcaattgctcaaattgttcagcggaagaaggctcatgtgttgcttctaaaatcagttctaagaaggcaaccagggacaacaaaactgataagggaagaaacatgttctggataaatattggcctttgtttcaagactccaagccaagtagccaagtag

SEQ ID NO: 29651 - DNA, 378 bp, Zea mays
  Peptide Sequence Number=SeqID_71430
atgtgcatgcttcttgtcgatccttcgaggctcagatatgctgattccgacgtggctgcggccaatggcggcgtcattccggggcccaacaggttcagcctcgagttcgacagccactcagtatctacactctcttgtttcatttgtgcatttctaaatttcctgcattttggaattaactgtcccaggctcgagggagatgcaaccactctcagaatggttattggattaatgtacacaattgtgatgtttgtcggcatcaacaattgttcaaatgcgcagccaattgtttcaattgagaggatggtcttctacagagagagggctgctgctgggatgtactctgcaatgccatatgtcgttgctcaggccatttaa

SEQ ID NO: 29652 - DNA, 387 bp, Zea mays
  Peptide Sequence Number=SeqID_71431
atggggcgctgggagaacggcaccggaatccaaagcagcaagaagagatggccgtgtggggaagctagtgaagaagctatcaaggattccattgccggacagcaggggcagggttgggcgtgcgctttggatctagacagcgttggcagattcttgcggggtccgatcgccgtttgggtaaatgattatcgaatcgccgggatggatgtctctggcgaggccctcgccgtgattagatcaaggcgtggggcggtgctgaccgttgatcttttctcggacgactacaattatgttagggcaatacctattcgtggatgcgtctgttccgtccgatttgggcgtggcgtgtgttgggccgtcgatcgtcgagtgggctgtcaagattaa

SEQ ID NO: 29653 - DNA, 519 bp, Zea mays
  Peptide Sequence Number=SeqID_71432
atgcctggttggctgccgcacgacccacatcctctggtctcacacgcactcaccgccgcgcgggacccgcgtgtcagcgcatcttctcccccaaaccctctgctcgctgcaacagaccgcgccgtggaacccggatctctctccctacctaacgcgcgggcgtcgcgggttagttactgcttgactcgcacaagccgttgggagctcgtggccggaaatcgcgcgctggctgggtttaaaggcatgcgaccggggcattggggacttcggtccgccacagttgagccacaccggcgacgccagggcccctctctcctccctacgtccactgcattctctttcccctcggcgaccgcgatggggcgctgggagaacggcaccggaatccaaagcagcaggaagagatggccgtgtggggaagctagtgaaggtgcacggtgtgaccctctggagtcttcgacgacgatccgctcctgcaacctcgaaactaggcgcttgcggaaagatatccggtcgtag

SEQ ID NO: 29654 - DNA, 291 bp, Zea mays
  Peptide Sequence Number=SeqID_71433
atggtggggtgggtggcttgcccagctggcgccacgtttcccgcctctcgggcgcggggtgttgtaggaacgcacaggtttgtggccgctgatgagaagagggcgggggtgcgcgtgctgggagccccaggcaggtatcactgcagtccgtactcatttccctacccccagctccaggatccatcggaagactgtgtgaaaaatgtgagtggaacctttccgtccctacagcccacccttcccactcccgtttctgtggaaccagcaaaagtgcctcaaaaagggctttga

SEQ ID NO: 29655 - DNA, 201 bp, Zea mays
  Peptide Sequence Number=SeqID_71434
atgagattgatggttctggttatgactatggtgctggtaagtggtattctttccgtttggaaagggtacatcgggctaataacttgggttaatgctaaaacctggctttctaatagttgtcagcattgcaaccactgctcaggagaagatgaagccgtggaaggagacttccaggagtttcaagactatgatgagttctag

SEQ ID NO: 29656 - DNA, 123 bp, Zea mays
  Peptide Sequence Number=SeqID_71435
atgggggatggcgtgaggttaagcatatcttatctctaccaatcaatcggcatatatgccaagtgctggaagaataaggaaaacatgcacgcgctgatgcgcacactatggctaaagccatga

SEQ ID NO: 29657 - DNA, 684 bp, Zea mays
  Peptide Sequence Number=SeqID_71436
atgatatcgtcgtcatcgaacgcggtagcggtgctggagctgcagcagtccagcttcggcacggtcgcgccaactatggcatggtcgttggctaggacgacgagcgtgggccgccgtgcacgctatctctccacggcgcacgtccctacgacggggaagcgggagcagaagggccttttcgacaccatcttcggcgcgttgtacagggaggagcagatgctggagacaaaccccatcctgaataaggtggggagcaagagcaagccccccgttgtcatcgctgcttcggcgcccaagaaagtcgccgaagagagcggtagtggcgggctcagcctgggcgggttcttctccaggcccaagaaagggggagatgctaacggggacatcaagggcttcactgcaagaagcaatggcttatacctaaagattcaagttactctcgcagggttccaagctaagcagcacggttttgctctctatattaggttgtttactcaagatcaagctctaaagctcgtcatctgtattctctggaactcaagacaaatgcacatcctgtcagaataccgtgtatccattggagaaggctgcgtcgtggttcatcctgatgggctcatcaattggattcgttgtgtggatcaagttagattttccccactggtggagatcggcaataccactcag

SEQ ID NO: 29658 - DNA, 1443 bp, Zea mays
  Peptide Sequence Number=SeqID_71437
atgcagcggaacgctacgagccaggcccgcgggaaacgtgattcgtttccgtctctgagcggccaggctgcttcgagaaagcaaccaatcacgccgtcattgaatgcattgacagagctgacatcactgtctatggagagttcaacaccgcagcagcaacaacatctctacgggacaaattcattcacttggtttggcccgattccgagggtgataattccagacccggaattaatgagagaggttttgtctaacaagtttggccactttggcaaaccactgtttagccgtgttggcaagttactagccaatgggctcgctaatcatgaaggcgagaaatgggcaaaacacaggagaattctcaaccctgcattccaccatgagaaaataaagcggatgctgcctgtatttgctacctgttgtgccgatatgattaacagatgggaaaattcaatgtcttccaaggaaccttctgagatggacgtctggcctgagttccaaaatcttactggagatgttatctcaagaactgcttttggtagcaactatcaggagggcaggaacatcttccagctacaaggagagcaggctgaacgccttatacaatcttttcaaacaatatttatcccaggctactggctcttgcccaccaaaaataacagaaggatgaaagaaattgatcgggagatccgtaaaattctgcatggaataatcaggaaaagagagagggcttttatagatagtgaaggaactaatgatgacttgttaggcttattggttgagtcaaacatgagggaatcaaatgggaatgcaaaactcggaatgactaccgaagatataatcgaggaatgcaagttattttactttgcaggtatggagacaacatcagtcctgcttacatggacgttaattctgctaagcatgcaccctgaatggcaagagcaggcaagagaagaagttttaaaccactttggaatgggtacaccagactttgataacttgaaccgcctgaagattgtaaccatgattttatatgaggtccttaggttgtacccaccagtagttttcctatccagaagaacctacaaggaaatggagctcggtggcatcaaatatccttcaggcgtgagccttctactgcccatcatcttcattcaccatgatcccaacatctggggaaaagacgcaagcgagttcaatccacagaggttcgaggatggcatttccaatgcgaccaagcatcaggccgccttctttccatttggatggggtcccaggatctgcataggccagaacttcgcgttgctggaagcaaagatggcactgagtaccatcctccaacgcttctcctttgagctctcatcatcctacactcatgcgccatacaccgtgataactttgcatcctcagcatggtgctcaaatcaggttgaagaagctttga

SEQ ID NO: 29659 - DNA, 420 bp, Zea mays
  Peptide Sequence Number=SeqID_71438
atggatctaacggctggcatgccatcacccaccttcagccgagatggacggaaccgggcggcggcgccattggccggtgatgagttttctggccgactgaggcccaaactgcacaccagaagcccctacccgaggaggaggatcaggcaaaccctatggttagtggctcacctcccatcggtagccagggcgagctgctcacgatacgcggcgacagtgcggcggagcacctgctccgacgaagaattccggtggccaggagcacgattccgcccaggcgaagccgcgatgagcatccgtgtgcgctgggcttcctcccaagtcgatctccgagggctggacgtggttccatggcggaccgacgagtttccccgcgagcttggtttatggggggggttcacccgcgatgacgatggctag

SEQ ID NO: 29660 - DNA, 386 bp, Zea mays
  Peptide Sequence Number=SeqID_71439
atgggtcgcgtcttcatgacgagcaagatcgggcttgctggatgggccaacgtcgcaacaaggacgagcagggtggggcaaaaacacatgtcaggaagcccctttgtcccccacgtggatccgcccctgcctaatcctatagagaaaagcacaagacccagggaatcaaaactggcgggcacatggcggcctggctccaacggtagcacgctgcttcctctacagcaagtaaagctgcaactgtcaaaagcgacgatggtgcgcgatattgccggacctgtgccaaatagcgtttgtcagcaggggccaaacaatgcttcggcattcgactgctgcctgtctgcctgccgtgatagagcaaaaacccatcgggtttcgggtaacgg

SEQ ID NO: 29661 - DNA, 1161 bp, Zea mays
  Peptide Sequence Number=SeqID_71440
atgcgatggccaggggactcagatgctgcggccagcagggaggcgcagagccgaaccaggggcgagctcaagggagctggcacggtggccggagatctagggcaccgcgagctgcacgacaggggaattctgagctgggagcgcggcaaccatggctggagcaggcgtggcgctgggcgttggagaccagagaggagagctgaggggcgcgtgaagttaaaggaaccagggcgctctgctccttcttctccacagcgagagttcgggtgtgccagagtgatggcgaggagaagagacggtgtacagacgagtgcgccagacggcgtctgcgtaggcgaacggaatgggcaaggacggcatccagtacgcagtggtcagatactgctctgtactcccttggaggagcgggagcgattcttcctcctctctggatacctgacatcgtcgccgtggtcgtcgcaggtggacgccttcacggcggagccgttcaagggcaacccagccgcggtgtgcctcctcgaggacgccgccaaggccgccgacgagcggtggatgcagtccgtcgccgccgagttcaacatctccgagaccgccttcctcctccgggaaaagtcctccgcggccggcgccgtcccgctgttccagctccgatggttcacccccgtcgctgaggtggagctctgcggccacgccacgctggcttccgcccacttcctcttcacatccgtcctcgcggagcacgagaagctcgtcgagttctcgaccaagtccgggattcttacggccaaaaaggtccctgcgccgcagagcacgggcgtgtcgggcgaggggaagctgttcattgagctggatttccccacgattgaccttgttgattgccatccttccgagctgccggcaatccccgacaccctcaacggagcctccattgtcagcgttcacaagtcaacgacggccggtgacctcattgtggagctttcatcaggaaaggaggttgctgatatcattcctaacattcatgaaattgaaaagtgttccggcagaggaattattgttacagggccagcgcctgctggatctggctacgacttcttcacgcgttttttctgcccaaaatttggaatagatgaggtgatgtcatactctatgtccttaacctga

SEQ ID NO: 29662 - DNA, 1002 bp, Zea mays
  Peptide Sequence Number=SeqID_71441
atggtcgatgcactgataatcaaagaagttcccaggctgatcctgcagatgctgattctaaaccaaccagtggttcaaagggaagccatattcgcactgggactaaagttactgaagaagcaggacagcccattccacgtaggcgccaaaataaaggcaacagaaaagcgcacagctcactatggtggtgtgtcagaaagccctccaggcaattcagttggatatttctatggatctactccagaaaatcacagttataaaagttcaaagctgagttcatctcctcatggaattcctactgggagctcgcctgttgggtctgtgcccaaatcttctccacaatctcagcatcttacttttcatcttttagaaaaaaataaactccagccgcaaaggtacaataagttcaaacatcactgccttatggagcgtaagaaattaggcactggccagagtgagcaaatgaactcactgtatcgcttctggtcatactatctgagagataattttaatgaagatatatacaaggattttaagaaactcgcactggaggatgctgcagcgagctacagatatggtctcgagtgtctattcagattttatagttatggtttggagaaaaaattccaacccaatgtatatgaagatttcgagaagcttactttcgaattctaccgtaatggtgatctttatggactcgaaaaatactgggcatttcaccattaccgaaatccagatatcggtcctgtagataaacttccagagctggagaggcttctgagggaggagttccagaccctagaggacttcaaggcaaaggagaaagcccgagcgacgacggagaaaggaactggcatcagtagcagcagtgtggtggtggccgcaagtcatagcaaggctgagactaagcagggtgtgggctatgttgatggcatagtcatctttgagaacttgatttttgaataccttctcgaatttaaaatgatgcaacgaatcatatag

SEQ ID NO: 29663 - DNA, 138 bp, Zea mays
  Peptide Sequence Number=SeqID_71442
atgggggggtgcactggtggctcctcgcgagaaggagccgaggcatgtgctggtgtagcagagggggacgaggtcacgtctggcccaagcgacggcacggtgaagatatcgtccaaactcttttattcaaacttctaa

SEQ ID NO: 29664 - DNA, 234 bp, Zea mays
  Peptide Sequence Number=SeqID_71443
atggcgtccatcgtgctgctgctgtcggagctactgggcggggagagcgccgccagcgtgctggcggccgagcgctacatggccggccaccagagcttgcggccgggagtcgttccagcccgccgtgaccatcgcagcgccgtcggtcgccggcacggcacggtatcttcggacttgaatcagaaagggagaagctcaaaagatacgaaggttgacacagtgccgaagctgtga

SEQ ID NO: 29665 - DNA, 483 bp, Zea mays
  Peptide Sequence Number=SeqID_71444
atgacggcaccgcgcgatcgggtcaacctgtcacgtttggcaaaaccgagcgcgctgcggggggccgtggtttctccagatcctctcaattccgggtgccagagacgattgttttccccaaacccggcggcccagcatccagctccaaccggcagtgcgggcgccgctgcaattcatggtgcgccgcccaccgtccgcaggctcctcatggcttccatcgtgctcctgctgtcggagctgctgggcggggagagcgcgagcgtgctggcggccgagcgctacatgggcggccaccggagcctgcgggagttccggccggccgtgacggaggcgccgcccaagcgtgcccaaaggctggcggagggccagcgcgcggcggccgggacagagcgggcgcgggaggagggcaagcagaggaaggatgacgattcgttcgaggacctcgcgctgcccagggtcgcggtcgacatcatgtggccttga

SEQ ID NO: 29666 - DNA, 342 bp, Zea mays
  Peptide Sequence Number=SeqID_71445
atggctggggaaggggagacggaggaggcgggagatttatgtacggtgtacaacgcaaaccctgcggacgtgaagcatgagctgcgcggccagcattttgcactgaatcatgaggattcagtcatctccaaagtggccatgcgctcaccagaaccagagctcgggcaggttgtacagatgaatgcaaagggtgaaaagcagatgtacccaaattgtacacagcaaacgaaaccaagtagtccagctcacggcaaaactgttatttcagaaatgaaaccaaagaaagattgtatcactgacatgtatgatatacacctggatgttaacatagcacgctcctag

SEQ ID NO: 29667 - DNA, 454 bp, Zea mays
  Peptide Sequence Number=SeqID_71446
atggccgggccttgggagcataaagccccctctgcccccccgcgcgtgaccaccccaccccatcaactgctccgcgtcgccgccgttgcctcacaggtcaccgccgtccgcgccgccggagctccaccgagctcgcccgagcggcgtcccaagggacttcacgctgaactcttcacctttgggaaaatccagaggcgctccgctataattcaccggactgtccggtgccccagaggagagcaactctggaactcgccagcttcgggaattcgctccgctataattcaccggacatgtccggtgtacaccggactgtccggtgagccagcagagcaacagctacttcgcgccaacggtcacctgcagaagctccaacggcgggcccatcagtcagagctccaacggtcggaacccaacggcctggtgacgtggctggcgcaccggacactgtccg

SEQ ID NO: 29668 - DNA, 715 bp, Zea mays
  Peptide Sequence Number=SeqID_71447
aggggagccctgcttgccccttcacgaaatcgctgccagaagaaagcctgccgctgcctttgctggaggctccgaggcagccttctgcctcgcctcctcgagcgcgggccaggattcggcccccataacggccgcctcgccggacgccgccggaggtggcgtggtcttcctccatggcgatgcgctaggcccgactccggcgtcgccagccggatccgccacctccaccgcagccgcgccggcggcgcccgcattcggctcctccatcgtcaacgctaacgcgcaacagaaacacagagcagcaataagagattacctgtctgcagcgtttttatcccgccgccgccgccgagagcgcgagacacaggcgcaggattcggaacagaccagcgagcgtcttattagcgtgcgtccatggacgcgccggcgacccacggcgactagtccgcttcccccgcacgtcgtccactgccgctttgtccatggatctgcttctcgcgccgcgctcccctgtcaccaccaaggcaccaacaaaacccctctcgctccccttccccgccaaaccctagcgctcacggtttctctattcgtcggcaatggtggtggcgggggcgaggaggaggccggcgagagccgcaagctcttcgtgggcaagatcctagctggggcgcaggagccaaagctgcgggcccactttgtggtcacgatgagctaa

SEQ ID NO: 29669 - DNA, 1986 bp, Zea mays
  Peptide Sequence Number=SeqID_71448
atgcttgtagttcataaattatcaaacttgttatggagcaaaattctctttcgatattactatgcttgtaggtccagctattttttcttcggcatatctgacgtcgagttacttttttgtttgtaccaggggaaatctattgaagttagacaggcagctggtctattactgaaaaacaatctgcgaacgacttacatttccatgcaatcttcatcccagcattatgttaagtctgagctgttaccatgtataggggcaaccaatagggcaattagatccacagttggaacagtgatcagtgtgcttttccaaattgtacgagttgctggatggattgagttgtttcaggcactccataagtgtttggagagtaatgacctggatcacatggaaggtgctatggatgcgatatacaagatctgtgaggatgtccctgaagagcttgatgttgatgttcctggtttgtctgaacgaccgatcaacgtgtttatgccaagaatactgcagtttttccagtcaccacatgcaagtttgagaaaactatcattgggtatcataaaccagtacatagtagtgatgccatcggcactctacatgtctatggatcagtatattcagggattattcaaccttgcaaaggactcttcagcagatgttcggaaactggtttgttcagcctgggttcagctcattgaagttcgcccatcaattttggagccacatcttaaaaatgttactgaattgattctgcaagctaataaagattcagatgatgaagttgctctggaagcttgtgagttctggtctgcatactgtgatgtgagcatgcctcctgaaggtttacaggagttcttgccgcacttaatcccgactttgttgtcgaacatggtatatgctgacggcgatgagtcccttgatgatgctgaggaagatgaatcctttccagacagggaccaggatttgaagccccgcttccatgattctcgattgcatggatcggaaactggagatgacgatgatgatgctgatgctgtaaatgtctggaacctgcggaagtgtagtgctgctgggttggatgttctctctaatgtgtttggtgacagcatccttccaactttaatgccattgattgagcaaaacttggctcgaacagatgatgattcttggaaggagagggaaactgctgttttatgtctaggcgctatagcagaggggtgcattagtggtctatacccacaccttcctcagattgttgcctttctaatcccacttcttgatgataaatttcctcttatacggagtattacgtgttggacgctctctcgatacagcaaattcattgttcagagccttgatcatccaaatggacgcggacaatttgataagattcttatgggagtgctcagaaggatattggatactaacaaaagagtgcaagaggctgcttgttcggcgtttgcaatccttgaagaggaagcttctgaagaattagtaccccatttggaagtaattttgcagcacctcatgtgtgcctatagaaaataccagagacgaaatctccggatactctatgacgccctcggtaccctggctgatgctgttggagcagaattaaatcaggcaaaatatctagacatatttatgccgcctttaatcacaaagtggcagcaactttccaattatgacaaagatctatttccactccttgaatgctttacatctatcgcacaggcattgggaccaggatttgctcagtttgcggaaccagtgtttcaaaggtgcattaatcttatccattcgcaacagttgtcaaagattgatcctactgcagctggtgcggtgtatgatagagaattcattgtttgttcgttggacctactatcaggacttgcagaaggtcttggcgctggtattgaaagtcttaaactatcagttctgttacatggggctgtaccatgggtgccgagtagattgtccagctggtaa

SEQ ID NO: 29670 - DNA, 162 bp, Zea mays
  Peptide Sequence Number=SeqID_71449
atggctgccattgccgctgggcataggaattggtccggcctatgcctcaatcgcagatcgaacggctcagatggtcccgtaacccttcgaccgagcaaggtttcaaataagtccctgaacttcacagaatcaaacccgcggtccattgtgactattcactga

SEQ ID NO: 29671 - DNA, 429 bp, Zea mays
  Peptide Sequence Number=SeqID_71450
atggcagaaaagcgacacctcaagatgcacgccgtcgatctcaagcggcgcctcaacaatcgtgtcgacgccatcaggcagaaggcggtggaagcctcaagcacttttcttgaggttaccgacgttggccctcctccaggctccgtcatgctcgaggtcgcaggcggcgtcctccgacagagcacggtggtattcaaggtggtcactgtcatccggcatccaggcacgggcgaggccgccaccggctatcgaccgctatgctccataccgggtgaggagggcccatggaagctccccacgtgcactggtgtctccaagacccaacccgtcggccacaagctccatggtgttcgaggtagcagccaacaacctccaccgggtgttgcttacccttcgagccagaagcgcgacggagctcagacggtttag

SEQ ID NO: 29672 - DNA, 482 bp, Zea mays
  Peptide Sequence Number=SeqID_71451
atggaaggggatggcggggagcgtggcgaggatggcgtgggaggtctcgtgccgcccagatcgacggagaaccgggagagggcaaggatgctgctcctgagttcccccttcgtgtccgtgtcgccgccgccgccgccgctcatctcccatggcgctcgcccggcgctgcggatcgaggcggtcaggcagctgacgaggcgggtggtgacgaccaaggcggacaagacgatcggggtggaggtggtgcacctggctccacaccccaagtacaagcgccgggagcgcatcaagaagaagtaccaagcgcacgaccccgacaaccagttcaaggtcggcgacgtcgtcgagctccaaccctcctgtcccatctccaagaccaagcacttcctcgccatcccgctcccgccccgtgacactcgccgcaagtctcagctcctaccgccgctccagtccgacgacagccaggagtcatccttgcgaga

SEQ ID NO: 29673 - DNA, 495 bp, Zea mays
  Peptide Sequence Number=SeqID_71452
atggccgccgggagaggccacgcggaggacatgctgggcttcaaggaggacgacgccatgcgcttcatcttcggcgaagacatcatgggaatggaggaccacggcgccttcgacagatccctcatggagcttcaggttttcaaggaggtcttctgcggggccgcccataacgtcgccgccaccacccatctgcccaccgagatggaccttggattcgtccacaccagcgccgccgctgcccacctcaaggccacggagacctcgccctctccatttgtctcccatgcgcagcagcagcagcctgctgccgctgccactgctgatccacagctcacaatggatcgtagccagccaaactatggacctcgccacgaccttcacccccagatttggatgtgcacgcgcaagatattggagctgggatgtgcaatgctcccgggctgggctgcagcagcagcactagcgcggttgatgaccccatgccttccttcatag

SEQ ID NO: 29674 - DNA, 186 bp, Zea mays
  Peptide Sequence Number=SeqID_71453
atgggaaagatgatagttcaaaaggtaggcataagaaaagcatcatggaaagatctatatattaggaaggtacaagataagcatcaaggtaaagatcgagggatgacaagggttaaggtgataacggacaaacacacaacaaaggatgtatttagacaagacttgcaaggcgtcaaggaagggtaa

SEQ ID NO: 29675 - DNA, 231 bp, Zea mays
  Peptide Sequence Number=SeqID_71454
atggcggcgtcggcgttgtggcagccgcaggagcaggggctccgcgagatctgcgcccacctggaggcgcatatctcacccaactctgaccaggcccgcatctggcagcagctccagcagtacagccagttccccgacttcaacaattacctactcttcatcctggcccgcggagaggcgcgtggtggcaactccagcttgtataagtccaagatttcctctccctcctga

SEQ ID NO: 29676 - DNA, 810 bp, Zea mays
  Peptide Sequence Number=SeqID_71455
atgacacttgcattgaacaagagaagctacctcttgaggatcaaatatctcagacatggttttgtgggaaatactgtaaagagtcatgtcgggacagataatattcttgacagtgacctttcatggtccatactgagatgcaacaatgacgggcagaagctacattctgttcagaagattgcctgtttggcagaatgtaatatgaaattagcagtggctcttactctattggaggaatgtttcattcgtatggtggatcctagaactggtgtggacatgataccccatgttttatacaacaagggatcaaactttgctcgtgtggattatcagggattctatactgtaatcctggagaaaggtgatgaaatattatgtgtggcttctatcagagtacatggaactaaagccgctgagcttccttttattgctacttctgtagactttcgacggcaaggaatgtgccgaattctaatgagcatcattgaaaagatgctctgttcatttaatgttaagatgttggtcctttctgccatcccagagttggttagcacatgggtgtcaggatttggcttcaaacctatcgaagatgctgaaaggaaacaacttcataatgtaaacttgatgttgtttcctggaacatccttactaacaaagagattggatggatttattatggccacaaaaccaggcgaggaaaaggatatacatgaagtttctggagtgcctaatcttaagcgtatgcctaatgggaaagcaaatgagcatttcaaactccatgaccttgatttgtcctgggacagagtttaa

SEQ ID NO: 29677 - DNA, 552 bp, Zea mays
  Peptide Sequence Number=SeqID_71456
atggatgggacattttccaagagaaaagacttggctctcaaatccaatcaagaaaagaaagggaaagctaaagtgcaaattgaggaggaatcctcaagtgatgatgatcttgatgccaacattgctttgatgctcgtcctcaacctcccacccacgatcgcccgccgtggatgcgcccacgtccgcgcgttctccggtaacagagctccgccaccgcccgccttcgaccgctgcctgttctgcggccaccgtcgcatccgtgccctgtcccatgccacggtgagttccgcctcgctccggagccccaccgtcgtcgccccgtccttgcgcctccgtcgttgccccgtgactctagcgcttcccctcaagcgccttctggtgctcccacgccggcgtgatacccatggccgagtccaccaggccgccctgaacacgcccgaactagcccccaagcctctggagccccgccgtggccaaccttcttgtttccaacgagctctcgccgcgggaccgagcggcgccaccgcgcccatgcccgcccttggacgttag

SEQ ID NO: 29678 - DNA, 571 bp, Zea mays
  Peptide Sequence Number=SeqID_71457
atggcgcctcctgttgacgtggctggtctgcgccctaggttgggcgatgtggaagctcctccgaagccgaggtcgagtctgtcttccgtggccgaggtcgagtccgagcccctgggtcgggcgaggcggagcccgtcggatgaggccagggtggagtccgagccctggggtcgggcgaagcggagttcgtcatcttctggggctgagcccgagtccgagccctgggtcgggcggagtggacccgagtccgagccctgggtcgggcggagcggagttcgccgtcttccgggacttggcccgagtccgagccctgggtcgggcggagcggagttcgccgtcttccaggacatagcccgagtccgagccctgggttgggcggagcagagttcgccgtcttccgggacttggcccgagtccgagccctgggtcgggcggagcggagtttcctatggccggtcagtggagcagcgaagtgacggcggtcacttcggctctgccggctggggggcgcgcgtcaggataaagctttatgctgatgggggttaccagctgagaattaggagccttgagg

SEQ ID NO: 29679 - DNA, 150 bp, Zea mays
  Peptide Sequence Number=SeqID_71458
atggcgaggcgcggccgggacggggtggtgtggcacggcgaaggctcggccgcatacgactccgaccatcctcggcagagcgagtatcgtgcaccgagccccattgacggcatgatgtcgaagcgaactacacctcagttcctcttttaa

SEQ ID NO: 29680 - DNA, 210 bp, Zea mays
  Peptide Sequence Number=SeqID_71459
atggcgagagtagcgtgtaccctccgtggaaagaggctggacgatggtgtatctgtgctctcggttggcgtgaacccgcatacccttgagagtcttttctttagtcgggttacgagtaacttgattgtgattggtgttatgtgccggtgggacggccttcttataacggttcaaagttacttgatggcacttgattgtgattggtgttaa

SEQ ID NO: 29681 - DNA, 222 bp, Zea mays
  Peptide Sequence Number=SeqID_71460
atggagaaggagcccgggttgcgagaaagaaaagccaggggggtttttgtgaggttctctggagaatatggttgccagagtaacttggccgtctaccctgccaccgggctggacattcaagtgggaccctacctcaacaggagaggagcatgtggagtgatgggccaggcttctgaaagggaaatgtgcccttgggccatttctaagtattttggtgattga

SEQ ID NO: 29682 - DNA, 343 bp, Zea mays
  Peptide Sequence Number=SeqID_71461
atgggcagagcgacgtggccgaggatcccgactacgtgcgcgagtgcgcgctcgctggtccacagcgggcacggggagggcgaagctgacaggggaggcccacaacgcagacaaagaatgggcgcgcgggcaatggctcagcgcctggcagaacgggcctgtgggatagagaaagaagagggaagcgcgagcgaagcaattggcgccgacaggttggccccactgggcagcgagcacgagggagagaagggagtgcgggacagacttccgctgataggcggggccctcctgtcagggacggcaggcgcgcgggctcgcggcctggctgggctgagctgggctg

SEQ ID NO: 29683 - DNA, 516 bp, Zea mays
  Peptide Sequence Number=SeqID_71462
atgtggtatgaaggggagtgtttttttgtcaagaacgtggctgggagtgcctcgctattcaccggttgggagtcgatatcaacggaggagtggcaccatggggcggaggtgaacctcaagagtgaggtggaccatcttctgatgatgatcctgacgtcgaagcagcgaggtctcaccattgtgcggctggggatcagacacctagcacagtgtcttctgtccctccttgagggtgtcaccgtcaaggcggagcggaagcgaaagagggatgcgggggaggaggccttggcaacaccgctcgaaggcctccaagcgaagaaagagaagagggcatcctgccctgctcgcatggaatcagggggagctagctccaacgtcccctccctaggggacgggttggccgacgacgttgtcgcggctaagggcatcacacgggggaagaacccgtgggagaggtggcgtcacggatggcgcctccagcgatggatggcgcctccagcggttgcttggaagaag

SEQ ID NO: 29684 - DNA, 261 bp, Zea mays
  Peptide Sequence Number=SeqID_71463
atgcggggaaggcaaactgctgcttcctggacatggtgcagctttccgtccttcgtccgggcggcggtcgtgccgcgcacgggccggccacgtccaggtcttcctcgcgccgtcagccgcgctagagggttgcccagcacgtcgtgcgccgcgagggtggtgctcgtgttctggggcggcctcggcgagggcgggagtgaggacctgccggtgcgctttggggcggccgctgttcacgggcgcggtgtcggtgggttctaa

SEQ ID NO: 29685 - DNA, 345 bp, Zea mays
  Peptide Sequence Number=SeqID_71464
atgccgtcggggtgctcggtgtccagtctcgcggcgcggttcgccttcttcccgccggagccggcgacgtacgccgtccggaaggacgaggccacgggccgcctcgtcgcctccggcgtgccgcgggacaacgccatggacgtcctgctcgtcgacaccagcagggggaacaaggtggtggccttctacttccggaacccctgcgcgcgcctcaccctgctctactcgcacggcaacgctgccgacctcggccagctgtacgacctctttgtgcagctcaaggtcaatctcaagatcaacctgatggggttagtagtgcactatgcttcctgcccatctctgtga

SEQ ID NO: 29686 - DNA, 1008 bp, Zea mays
  Peptide Sequence Number=SeqID_71465
atgaaggcagcagaggacgcggcgggcccggaggcgacgccgacggcggcggcgcagacggtctggtacgaccccatgtcatcgccgcaggcgccggcgccgcagcagcagccggcgatagaggctgcggcgccgacctcgccgtcggtgagctccgaggcgcggcctctcagggtgtacgccgacggcatctacgatctcttccacttcggccacgcgcgcgcgctcgagcaggctaagaagtcatttcccaacacctacttgctggtaggttgctgcagcgatgagatcacccacatgtacaaagggaagaccgtcatgaccgaggacgagcgctacgaatcgcttcggcattgcaagtgggtcgacgaggtcataccagacgctccatgggtgatcaaccaggagttcatcgacaagcacaacatcgactacgtcgctcacgacgcgctcccatatgctgacacgagtggagctgccaacgatgtctacgaattcgtgaaatccattgggaagttcaaggagacgaagcgcaccgagggcatctcgacgtcggacatcatcatgaggatcttgaaggactacaaccagtacatcatgcggaacctgaccaggggctacagccgcaaagacctcggagtcagctacgttaaggagaagcagctgagggtcaacatggggatcagcaagctgagggagaaggtgaaggagcaccaagagaaggtgatcgagtcgctttgcagctatttcgagagagaccttcgcgtggtccgtagaactctgatatcgattgcgctgcgcacgcagttccacagcgcggccaagattgctggaaccaaccccgtggagtggatggagaatgccgaccgttggatcgtcgggttcctcgagaagttcgaggaaggatgccacatgatggaaaccgccattaaaggtcgaattcaggagggtctgaagaggcaaggcaggtcagagtcgaacctttccggagaggactccgactcgtaa

SEQ ID NO: 29687 - DNA, 249 bp, Zea mays
  Peptide Sequence Number=SeqID_71466
atggtgaatttgaacataacggaggccacagtatttgcacacgttgggtgcctccagatcaaggcagatatactcgattgggtggccaagcccagggccggccctgagggtatgcagggtatgcgaccgctcagggcccccaagattagtagggcccccgtttgtccaaattatgtccaaatacatatatgttacagaaaatttgctctaatgtatttaaatttggtttactgtgattttaaggtttag

SEQ ID NO: 29688 - DNA, 388 bp, Zea mays
  Peptide Sequence Number=SeqID_71467
atggttcacaacgtcgagcaccacgacttcatccccgaggacttcccgatggaggaggaagctgcctcttccacgccttgggcctccagccgccctgcgcctggtgctactgctgtgcgttctacgcggcagcacacccctgcacaggcgtccaggacgtcaagggctgcgcctggcgccttgtctatggccagggagttgttgcaccaccctcctagctccatggcctcgccaggtgccatgaagcagtggcgtgatgacgtcgaccgcctgctcagcatgggctgccccgacgaaggacttacgggcggagctcaaccgccggcgtacgggagaggacgccccacctcattggaggggccagacgacctgcgggcagaactcaacc

SEQ ID NO: 29689 - DNA, 423 bp, Zea mays
  Peptide Sequence Number=SeqID_71468
atggcgcgtagctatttttgcaaaccgaagccggatttgggcgaattgatagcgcgtctccgctgtccctttctccccgtcgtctacgtcccttccggccgcgtccttcccctcccaagatcaacccccccgcgcgcttgtctccttcccccggccatctccggcaccggatttttcgtcgccgccttgtcctggccccttccgcgaagacccattcccacacaccctttatgccaacttgccgcccccgcggattcgcgcgcaccgcggtcggtgtctaggcttgattggccctggcccaggagcacggcgaaaggcggcgtcttggttagggataggcggggggagtggggtcgtcgtgaaggaggcagcagcggttcgcgtggatcgaggaagggattttattgcgttgggatttggtag

SEQ ID NO: 29690 - DNA, 576 bp, Zea mays
  Peptide Sequence Number=SeqID_71469
atgggcgcaatacagttcaaagctccgcccactcaaggaacgcaatctcgcctcgcccgagcccagcctcgggcaggaacagtagacccaggcagattcacgcctcgcccgagggcctcctcaagcaacgggcgcaccttcgactcgcccgaggctcagttcggggctcggacccaacctcgacctcggacgacggtctccgcctcgcccgaccccagggctcggactcaacctcgacctcagacgacggtctccgcctcccccgaccccagggctcggactcaacctcggcctcggacgacggtctccgcctcgcccgacccagggctcggactcaacctcgacctcggacgatggtctccgcctcgcctgaccccaaggctcagactcaacctcgacctcgcccgaccccagggctcggactcaacctcgacctcggatgacggtctccgcctcgcccgaccccagggctcggactcaacctcgaccttggacgatggtcttcgcctcgcccaaccccagggctcggactcaacctcgacctcggacgacggtctccgcctcgcccaaccctag

SEQ ID NO: 29691 - DNA, 381 bp, Zea mays
  Peptide Sequence Number=SeqID_71470
atgacccttaggaagaaactcaactctaatgactgtaatcttgctgacggagagtacgtcctcgtgccggagcaaggagctgctcaggaggtagccccagacccagcaccagagcctgcaccagaggacatgcctgccactgctttggaaggcaagccccgattgccctcctcacgcgacctgagacgtggtctcccattccggttatggtgggtacaagtgcggtcactgcacgacggcagtcggggtcagtggggcattgtacgccaaggcggttctctggaggacatggttgctggagtgacttggccgtccaccttaccaccgggttggactgtcgagtgggaccccgcctcggctgaggaggagcatgaggagtga

SEQ ID NO: 29692 - DNA, 348 bp, Zea mays
  Peptide Sequence Number=SeqID_71471
atggcttctagggatttcctgggagggttcggccgggatggagggcaagcgcctgtgggtggcgctggcgccgccccggggcccggcggggagtcggacgagatcgagctcagcctcggcctgtccctcggcggctgcttcggcgccgagccttcgcaggaggggaggagcgccgaccctcggctccagcgctcgtcctccgtcgcgtcgatctgctccttgcctgctgccaccaccggcaccagctgcggggcgcaggacgccggcccaggccccgttgtctccctccgccggacctgctccgcacctcctccctgcccgacgaatcaagctgattcatcaaattag

SEQ ID NO: 29693 - DNA, 1089 bp, Zea mays
  Peptide Sequence Number=SeqID_71472
atggcggcgagcgcgggcggcgtcgcggcgcggcctctggtcgggggaggcggggcgtgggagaacagggcgccgctgcagacgtcgcgccccttcaacatcgcgcaccggggctccaacggggagctccccgaggagacggcggcggcctacgcgcgcgccatcgacgagggcgcggacttcatcgaggcggacatcgaggccaccaaggacggccacctcgtctgcttccacgacaccacgctcgacggcaccaccgacgtcgccgaccacccggagttcgccggccgccggcgcaccctcgaggtgcagtggggccaacgtcaccggatacttcgtcagtacgtggacactgatttcacgctggtggagctcaagacgctgcgggcgaagcagcgatgggacttccgtgacaagtcccacaacggcgtctcgccgatcatcacgttcgacgagttcatcgacgtcgcgctgaacgccaagagggtggtcgggatctacccggagatgaagaaccctgtgttcatgaacaagcacgtgcagtgggctgacgggaagaagtacgaggacaagttcatcgcgacgctgaagaagtacggctacggcggcaagtacatgtcgccggcgtggcgcgccaggccggtcttcgtccagtctttcgcgccgacgtcgctggtccgcgcggccggcctcacggactcgccgctcgtcttcctcgtcgacgacgtgaccgtgcggaccgaggacaccaaccagccgtacgacgagatcacctcaggcgagcacctggactacatgaagaggtacgtggtgggcatcgggccctggaaggacacggtggtgccgccgaccaaggacaaccggctggccacgccgtcggacctcgtcgcaatggcgcacgcgagggggctgcaggtgcacccctacacgtaccgcaacgagaacaagttcctgcacttcgacttccggcaggacccctacgccgagtacgactactggatcaacgatgtcggcatcgatggcctcttcaccgacttcccggcgagcctccgccggttccaggagtggaccgccaagaacaaagactga

SEQ ID NO: 29694 - DNA, 1232 bp, Zea mays
  Peptide Sequence Number=SeqID_71473
tgccaacgaatggtaatacggttagatgtgacagtgttattgggaatcctttgctgcaatcttgtcatgtgtacactctggctgtgccatcagctgctcagcagggtcgaggtttgaattcgaatgacagcaatgatacaacaccttcaaactcacaaaacgaaggagcgaacaattcatttaatgcaattgaaattgcttcaataacttctgcaacagccatcgtttccatcctccttgcactgattgcactcttcatatacacaaggaagtgcgcgccccggatgtcagctcggtcttctggaaggagagaagttacactcttccaagatattggtgtcccaatcacttatgagactgttgttcgagccactggaagtttcaatgcaagcaattgcatcggaagtggaggctttggagccacttacaaggctgaaattgcacctggagtgttggtagctattaagagactctctgtcgggagatttcagggagcccaacagtttgacgctgagataaaaactctagggagattaagacatccaaatcttgttaccttggtaggttaccatctaggcgagtctgaaatgtttctcatatataactacttgtctggaggaaaccttgagaggtttatacaggagagatcgaagagaccggtagactggaaaatgctgcacaagattgcattggacgttgccaaagcacttgcttatctgcatgatacctgtgttcctcgcatccttcaccgggacgtgaagccgagcaatattttgttggacaccaactatactgcttacctctcggactttggactggcgagactcttgggaaattcagaaacacatgcaaccactggtgtagctggaacatttggatatgttgctccagaatatgctatgacttgtcgtgtttcagataaagctgatgtgtatagctatggtgttgtcctgatggagctaatctcagacaagaaggctttggacccgtccttttccccatatggtaatgggttcaacatagttgcttgggcttgcatgctgcttcgtcaaggccgtgctcgggaattctttattgatggtctgtgggatgttggcccgcatgatgacttggtagaaacattgcatttagcagtgatatgcactgctgattcactctctatacggccaactatgaagcaggtcgttcagagattaaagcagctacagcctccaattcgtgaacatcgatag

SEQ ID NO: 29695 - DNA, 138 bp, Zea mays
  Peptide Sequence Number=SeqID_71474
atggcgcccagagtgcgggcaggcgaagacgtggcgcgcatggcggccctgtgtcgggcgagggtggggcgcgaccgattgaacgtgggcggcggaggaggtcagcggcggagcgatggcgagggcagggcaacgacg

SEQ ID NO: 29696 - DNA, 378 bp, Zea mays
  Peptide Sequence Number=SeqID_71475
atgtgtgcttacatgtacatgaaccatcatccacaactgagggagaacagcgccgttcactccactccgacaattgtgccagctatcagggaagggccgacaacagcaagtcacgacctccccccgagttcggcctcgggcgcaacagggagctccgcctcgcccgacccaggcctcggccctcagcttcggtctcgggagaaggtctccgcctcgcccgaccccgacctcaacctcggcctcgggagaaggtctctgcctcgcccgaccctgggcctcggcctcagcctcggcctcggaggagtcgccgcctcacccgacctcggcctcatatcagctacgctactcgggatccatcattaccctacccttagctag

SEQ ID NO: 29697 - DNA, 765 bp, Zea mays
  Peptide Sequence Number=SeqID_71476
atgaagttcaaagcggccgtgacggccgacccgggcggcctgctgcgcggctggtccccggcgtccggggaccactgccgctggccgggcgtgtcgtgcggcgcttccggggaggtggtcgcgctcaacgtcacctcctcgcccgggcgcgcgctcgcgggcgcgctgtctccggccgtcgcggcgctgcgggagctccgcgtgctcgctctcccgtcccacgcgctctcgggcccgctcccgcccgcgatctggacgctgcgccgcctccgcgtcctcgacctctccggcaatcgcctccagggcgggatccccgcagtgctcgtttgcgtctccctccagacgctggaccttgcctacaaccagctcaacggctccgtgcccgcggccctcggtgcgctccctgtgctacggcggctgtcacttgcctgcaaccgcttcggtggcgccatccctgacgagctcggtggcgccggttgccgcaacctgcagttcctcgatgtctctgggaacatgctcgtcggtggcataccccggagcctggggaattgtactgagctgcaggcgctgttattgtcctcgaacaatctggatgacatcatcccgccggagattggtcggctcaagaacctgcgtgcattagatgtgtccaggaacagtttgagtgggcctgtgccagcggagcttggtggttgcattcagctgtcagtgcttgttttgccaatccttatgcacccactgctggttctgattcttctgattatg

SEQ ID NO: 29698 - DNA, 252 bp, Zea mays
  Peptide Sequence Number=SeqID_71477
atgaagttcaagaacatgttgttgggaggcacgaaaaccgtgatagaggaaagaacgggcatagagaggggcaagggcatgcaggcacgtgcggtgttgacgacggtggggagcacgggcggtgcgaatctcatgcccgcattggatggggctatgatagagggggccatggtggagctggtcgagcactgccacgctggaggaagtggtggttacatgggaagtggcggtcatggcgggagcgggcacgat

SEQ ID NO: 29699 - DNA, 504 bp, Zea mays
  Peptide Sequence Number=SeqID_71478
atggcaaatcggggtagtgttgctgcatcgacaagggattgtcgaggtgacagagagtctaaagagaatgtcgtggccggggtggccgagacgatagtgcaaggtggtggcataggtagtggaggtgagagcatagggtctggtaacattggtggaggatggatgttattgaggtacaaaggaccagaaagaaccatgtcacctactaaggtgataggaagagtcgacccattatcgatagtgatggaggaaggaaagctacggcttggaggtggtgtggaacgaggcaccagagtcagtaacctagtcggttcaaggagagggaagcaaagaaaaggggtgcgagaagagagccaagtgaggcacccctatatagccaccgggatggagttggggctagaaggggcgagcatgctagggggaaacgacaaggtctcgatcggcatgaaggcaatcacggcactggagaatacaagcgacctagtagcgtcgtggcatacataa

SEQ ID NO: 29700 - DNA, 123 bp, Zea mays
  Peptide Sequence Number=SeqID_71479
atggcggaactggacaaggtgttctcaccggcaattgacagggcgaagaggtcggctcgggcgcaaggtctgcggtcgtgctggcgacatgccgccagggaaatcggcaacgaatcaagctga

SEQ ID NO: 29701 - DNA, 291 bp, Zea mays
  Peptide Sequence Number=SeqID_71480
atgaccgcgtgggccgaattcccctcagtcggcccaccagacatgtccttccgcgcagcccaagatggccatgacgccgacatccaggttccgccgatcagccgtaacccccgcgtttcactgtctggtgggaccgccaactctacgggctctcctaggccgctgaggtctggggcccgcatgtcagggtgggtcgtcgtcaacaactcgcccgagcttcgtgcgggtgatggccagtggaccagcgcaaaatccgcgtgtgccgtgacgattcttcccctgagcctatag

SEQ ID NO: 29702 - DNA, 102 bp, Zea mays
  Peptide Sequence Number=SeqID_71481
atggcggaatccggcagcgccgacgatggcaccgccgctggcaaccctgtacgccgccgtgtggtctcaatagcatactggtttgtcgcgggtgggatctaa

SEQ ID NO: 29703 - DNA, 132 bp, Zea mays
  Peptide Sequence Number=SeqID_71482
atggccatcaggttcatgagctcagggggcaccagtgagctggagaagagggggagcgctcggctggtggagatcctgcttcaagggaaggaggggcgcgaccctggagagggagattgtgatgagaactaa

SEQ ID NO: 29704 - DNA, 198 bp, Zea mays
  Peptide Sequence Number=SeqID_71483
atggaggagtatgacatgaacctggacgggctcctggactgcgaggagttcgcggagttcatccggaagcacatgcacgaattagttgggattatgttccaagagaggggaaatgtttacaggctgctgaagcaggagggcggcctgcggtgtgcagtcactcgtggtgctctggatttctatgtttatatggcatga

SEQ ID NO: 29705 - DNA, 393 bp, Zea mays
  Peptide Sequence Number=SeqID_71484
atggcggaggacctggcctcattctccgcgcaggatctaagcaaccttgagcagcagatcgagttctcgttgtacaaagtttgcctcaggaagcaagagctactcgaccagcagctgctcgagatccgccaaaggaacctggctgcggctactgctagcgggcaacaccagcaggctggcgagatggtgggaattaacccgaggccgttcctgtggtgggacgtgggagccagtggcagtggcagccagagccagcagctgctgcacggccgggacgccgcggagtcgtcgatgacggtgctggggctgtcaccgcagatgcataggtacagactccagccgcgacagcccaacctgtggcaggacaccgacgtccacggctggctatggtaa

SEQ ID NO: 29706 - DNA, 366 bp, Zea mays
  Peptide Sequence Number=SeqID_71485
atggggtggggccgggggcagcgagcggggccggtggcggccgcgccggtgggagtggcggttggggatgggagcggtcgcggcgcgcggggccagggtgggtgcaccggctggagcggcttgcacgggtgggagcaggcgtgcggcggcgactttgatttggtggaagagacacgggagttagaaaggggtgagaagaggataaggaagatagcggtgaacttgaccagccccgccgtacctcaacggaaagctaacttcctacgactgttacaagtagcggaactaccaatgccaattgcggagacgtgggaagtggatttccaaattagctttcttcctccatttcgaatagaagctgattaa

SEQ ID NO: 29707 - DNA, 210 bp, Zea mays
  Peptide Sequence Number=SeqID_71486
atggagcaggtgctacgcggcagcgggtgcgacaagaggagggggtctggtgttgtcggtgatgatggcggcggtgggtgcgctgcaaagggggcgtggggcggtggtagtgtgcatggaggcgggcacgcgtgcgaggggcacggggctctagccaaagagaagaaaaacttcactacccaatgcatgcagaggactgggtataactaa

SEQ ID NO: 29708 - DNA, 168 bp, Zea mays
  Peptide Sequence Number=SeqID_71487
atgtcaagcctatcaaaagctaagatagaaattcatgattataatgaagaccatatggcatggaacaaaggctcttacatgactagtgtggaaatgtgtatgcaatatcttaagtcacgccataaggttgcacttgtggtgacgattaaagaatctctagatatttga

SEQ ID NO: 29709 - DNA, 459 bp, Zea mays
  Peptide Sequence Number=SeqID_71488
atggccgggaaggcggcggccgcgacggcggcgaggtgggcggaggggtacccgtggaaggagaagctggcaaagtacaagggtgagctcgggaagggggtgtggggatactgggagctcggcgcgtggaagccgctcggcatcagcgctcgcaagcgcgcccgcctccgcaaggaggtgctcctcgccggcgaggactggagctacgatcctccccgcggggagatgcgtaccaagcgcaagggccacaagtgcgaccgcatctccgccgagaagcgagcaaatactgttgagctgatgaagaagatgccccagatgctgctcgactacaaggacgtttacattgcaatccagtgtgcttcgtttccgtttctcaggtcagcaaatacatcttgggctgctgttagagattcttgtgtggaagtgaaaccatgccaatttgaagccgtgatggcttag

SEQ ID NO: 29710 - DNA, 663 bp, Zea mays
  Peptide Sequence Number=SeqID_71489
atggcgtcaacggattctgcagctcacggcacacccgccatgcgcgccgagaggagcgcggcggcctgcggcttctgtttgcgaccgagcgggggagaagggagtggtcctgacgagtgggcccaagaagtcagagagcgggcgcgagagcgaccagccaaggcatcgccgacatatgtggcactggctgtccaggcgcctttctcccttgcgaacaaccgctatgcaaagaggtcaggcatgcaaaactttcagcggtgcccaatccggcgcacccgcggtggtctacactggccacggagagacgaggatgcgcaatggagtacttactccggtgagccattggcgctgcattgcccaaaaattatcgtgttacaactagcactactcaatgcggacttagctcagagctatcaagggaactcgtaccgtggtttggtgcgtaggaagttcaacgaccacgcaggcggtggagtcttgacgatgatgaatttcgacgagaaattccttggtcccggtcgacgctctggcccaagaaaccctatcggcaccctcggggtgttacgacgaacaccagacgatcctatcacttcgatttctaccatggtcagtggatggaggaagaagaatgagctgcccaagcgggcccatgtagcagagtaa

SEQ ID NO: 29711 - DNA, 381 bp, Zea mays
  Peptide Sequence Number=SeqID_71490
atggcgagcttgtctaccgcgtccctcgccgcgtgcggctcatcttcttccgctcttcttccccgaaatccgcgccgagctcaactacctcgcgcaaccgactccgtagaaatcggcggcgccgttctgaccggcacggccccacggtacatatataccgaggcgctctactcatccgggccattagacgtcgctacctccgaccctgttccctggccgtccgtttgtaatcgtatggctctcggcgttggatacccctttgcgatagcgttttgcataaaagtccccggagaagttgagtatcaacccgcagtccagcttgtgggtcaactgtgtcttaggattaattgcaccagggcccctgctctttctggtatttga

SEQ ID NO: 29712 - DNA, 366 bp, Zea mays
  Peptide Sequence Number=SeqID_71491
atgggtttgtgctccctcatctgccctcatctgctgcctgaacctagccctcttctcctcctcgcctcgcccgacgctgagtccggccctcaggtgcaaacttccgcctcgcccgacgctgagttcggccacaggcgcaatctccgtctcgcccgacgcttagttcagcctcaggtgattcgtcggccttgcccgagcacggcctcggctacctgctccactgtgaatcccgcgagcggccactccgccgactgtggcacatgtcaagggatggctcaaccaatgcctcgggaaggctttccgcctcgcccgagcagggctctgacctcaataaacgcaatagggaatcacgacgtcaccccatag

SEQ ID NO: 29713 - DNA, 335 bp, Zea mays
  Peptide Sequence Number=SeqID_71492
gtttatgcatccgggggctcaagctggattatcgacagcggatgcacaaaccatatgacggggagaagaagatgttcacctcctacgtcaagaacaaggattctcaggatgcgattatctttggagatggaaaccaaggcaaggttaaaggattgggaaagatagccatcacatccgagcattctatatccaatgtatttttagttgaatcgctcagggaaataggtgggaagcactcatcacaacaagaacgtgatgacaacatcaagaccactggagcttcttcacatggacctcttcggacccgttgcctacctcagcatcgggggaagtaa

SEQ ID NO: 29714 - DNA, 489 bp, Zea mays
  Peptide Sequence Number=SeqID_71493
atgggggcaatgatctccaacctggcattcgtcgtccggaccatcttctccaagaaggggatgaagggcaagtccgtgagcgggatgaactactacgcctgcctctccatcatgtcgctggtgatcctcctgcccttcgccgtcgccatggaggggcccaaggtgtgggcagcgggctggcagacagcagtcgccgagatcggtcccaacttcgtctggtgggtggcggcgcagagcgtgttctaccacctgtacaaccaggtgtcctacatgtccctggacgagatctcgcccctcaccttctccatcggcaacaccatgaagcgcatctccgtcatcgtcgcgtccatcatcatcttccagacgcccgtccagcccatcaacgcgctcggggccgccatcgccatcctcggaaccttcatctactcccaggaggcagatacccctgctcctgatccaatgaacaacctcaaccttatggtgctctaa

SEQ ID NO: 29715 - DNA, 330 bp, Zea mays
  Peptide Sequence Number=SeqID_71494
atggcgtggggaggagagtggggcggaggagagggaggcaacttgaggccggtcattcaattgagctgcctagcaacgctgacgcttctgattgaacagtgttggtcctggcaatcagaaaagaggcccaactttcagcagatagtttcaatcctcaaagatctcaagatagttcttgaaacagatggaacactccacaaggtcccaagctcgatctgtcaggccttggaatccaatgatcagaacaagaagaaggccggtaactggatccagaggctgtcatacgctcaacctgatttctccgggcctccacccccaaagttattgtag

SEQ ID NO: 29716 - DNA, 180 bp, Zea mays
  Peptide Sequence Number=SeqID_71495
atgtcgggtgggtactgggtggctggagaatgcaagcaggagagcgacgtgtccagcaccatccgtttcggattccacgcgctcttatcgttgctcacccagaagatcgcgcagcggtggtccgagtcactctcactccacggcctcgccgataatggactcgtggtcaactcctcctga

SEQ ID NO: 29717 - DNA, 330 bp, Zea mays
  Peptide Sequence Number=SeqID_71496
atgacgaaagttcgccgcagcgcgcgccttgccaatcgtccggcaatgccggccctaaagcgggcccaaatcatcctctgccaacggcttgggctcactgcagaggagactaatcacaactcggtagagcaggctctgaagaagtacgtcgccatgttcaacactgctctgcccgaacctgtcaccgccgctcttaccagcttgctgggaatcgacgacgagcatacggaacaacttgatgaggcattgatcggcttggtggggcaggggatcgacggcatcaatccaatggaaggcgtcccagccgcagggggggcggtggatgagtga

SEQ ID NO: 29718 - DNA, 156 bp, Zea mays
  Peptide Sequence Number=SeqID_71497
atgacttcacgagaatttcaagcaggaaagatagattacagttacaatgatccgaatatttttaatccaagcgcagcgaacagactcagctccaactggacggtatctccaaggagcgtggcacactacgagatcgatcaggaatcggcgacgtag

SEQ ID NO: 29719 - DNA, 255 bp, Zea mays
  Peptide Sequence Number=SeqID_71498
atgaaagaattgtttgctctcagttttgtctttgcagcaatagcgaagcgtcgccaagggaaccacatggctaggagctgcaggcgcggagttgctgcacaggaccaacatggagcaaagcacaggtatggccccacctacgccacggatgacgagcagttgtctaccccgactcagagcatcggcccgtccggtagggtcgctggcctccagggcggtgtcaacacgggccctatcggtgcgattgctcagtaa

SEQ ID NO: 29720 - DNA, 243 bp, Zea mays
  Peptide Sequence Number=SeqID_71499
atggagcctggtagaggaagtcatagtgcgaagttcccttacctagccaaatgcaaaggaaggagggccaactccgcccgggagacggaatgcatccgccccacgcccagcgaatgtcaaagctggaacttcatcggtaggctaggagaatcatattccagattccccttacttggcgcgtcaaatgtcggtcatgggagcagggccgatgacctagtatttggcacgccaaatgttctataa

SEQ ID NO: 29721 - DNA, 909 bp, Zea mays
  Peptide Sequence Number=SeqID_71500
atggctggaacgatcaacctgtactgcattggcctgaaatatgcttcggccacctcttcgtcggctatcttcaacatcgtgccggtggtcgccttcctcttggccgtcatgttcaggatggagaccctgaagctcaggagcgtccatggcatagccaaagcctgcgggatactcctctgcgtcgccggcgtcatcgtgctggcgctgtaccagggcccccagctcaagtcgccgaaccaccagcagctgctgaagcagcacgcgggcgcggccgccgcgcaggtccaccattccagcagggagtgggctctggggatcttcctgatgacaacgtcggtcgtgatatggtctctctggacggtgaagcaggggcccctgctgctggagtacccttccaagctcctgaacacgacgctgcagtgcgcgttcgcgagcgtccagtcgctggccatcgcccttgtcctcgagagggacttgtcgcggtggaagctcgccggccccgtcagcctcgcatccgtgctcttcacgggcgtcgtcgtggcggcgatctcgtactacctgcagatctgggtgatcgagaagagaggtcccgtgttcctgtccatgtcgatgccgctgagcctcgtcttcaccatggccatcgcctccttcctgctgggcgaagacgtcagcctaggaagcattatcggcagcgtcctcctcgtcgccggcctctacaatgtgctgtggggcaagagcagggaggagaagcaacaagcggcggcggcggtgggtgagacgacgacgacgacgacgacgacgacggatggcggccgcgacaacggagacgcggagaagaacgccgcggccgtgcagccggcggacggggaggacgacgacgacgacgacgacgcggcggccaaagtctga

SEQ ID NO: 29722 - DNA, 225 bp, Zea mays
  Peptide Sequence Number=SeqID_71501
atggcgcagcggcttaccctgtccacgtgctccggcggggcgggcggattccggcgaggacgatccggcgcttctggtgaggttgcgctcggtctggggcctcgggaagcttcacgggactccagggaggctagccgagcagttggcgcgggcgatggttcgttgggaataatttttggcttgctcatgtttgattttgaatgtttagtggagtttctttcttaa

SEQ ID NO: 29723 - DNA, 435 bp, Zea mays
  Peptide Sequence Number=SeqID_71502
atggcgagtagggggaatgagagcagggcttcccaaggcgatgacatcaacgtgttgtggacggtgctccggcgcggcttcggttttgggcggacaacgatggccgagcgcaacgacgtgcaagtgctggacggctccgagtcctgggcgatgggtcatgctgccagcactgctcgctactggtggaggcatcggggaccaccccctttcatccttgagggctcagaagcaaaagaattggaagtagaggagtggcaccagatcgaggcggcctctaaccgggtcggcaagagtttggggaccatggagcgcatcctccataacttcgaagaggcggtttcgattgctcgcacgttgttgacacatgatataattccccatggccagggtgttggggaccttcggcatccgaaggtcctcaaaaacaggatttaa

SEQ ID NO: 29724 - DNA, 294 bp, Zea mays
  Peptide Sequence Number=SeqID_71503
atgtgtgaggcgaacttgcgtaccgaagatgccgaatcaaccttgcgggtggcaaacgctcgtttggaggcggcaaacccgaacctcttgcaggagcacaatgcggccggagaaccgcttcgcagtctctccttcgcagatcttcaaaagaagatcttcgtggtccatgatgccatgaaggcagctcaggaggcaaagaaggtggcaaacgatgaagtgtgtaagctctcgctcacctgcgactgtgttgtcaccgcgctgaaagggaaatgtgcccttaggccatttctataa

SEQ ID NO: 29725 - DNA, 207 bp, Zea mays
  Peptide Sequence Number=SeqID_71504
atgacagggcggatgatcggaggggtgaacacgttccgaccaactgacggcgtggatgaccaaattgaagcttggggaagcttcatgggtttaccagaggtgacgcacacaccaggatttggactgggcacgaacagaaacgtgggtcgacgaagagggtgtcaaggcggcgttctacagagcaggtctacaatattggtgtggtga

SEQ ID NO: 29726 - DNA, 441 bp, Zea mays
  Peptide Sequence Number=SeqID_71505
atggcaggaggcaagagcagcaaaggcaagcgtgacaagaagatccagggcagcaagaggaagtattctctgactcctgcctcagaggacttcggtgactcggagttctcgaaggagcagttctcctctgagggtgaggagtccccgccgctggtgcccccttgccatcatccaaagggagcggggctcgagggctcggatgactcggaggaggaggactccaaggaggaagaggaggaaggcgacgacgaagcggacgagggcggctatgatggcgacaacgagggaggcgacgatggtaaggtcgatagtggtagtggtgggaacaagagcagtggcaggagcggcggcgcgacaacaacaactagggcaacaacagcagcaagggcagtggcattggcagcggcaacgtcggtggcaaggtgccaccggcataaataa

SEQ ID NO: 29727 - DNA, 130 bp, Zea mays
  Peptide Sequence Number=SeqID_71506
atggccgcgcgccgggcagctgcgtcggggaccgcgccacacgggggcgccaacaccggccccagggggagcgcaaagggaaccgcgccaccccgtcaggggtcggtgaagggcgaggggacccctcctg

SEQ ID NO: 29728 - DNA, 165 bp, Zea mays
  Peptide Sequence Number=SeqID_71507
atggagaaggagtctcgcagagacaaaggatggagaaggagtcacgtcaagttttggaggaatgccagaaccgagatgttggcaattggctattgcatcgatgcagggaaaggtggacatgatctatatgaagtaattgttctttctgaagctattgtatcatga

SEQ ID NO: 29729 - DNA, 279 bp, Zea mays
  Peptide Sequence Number=SeqID_71508
atggaccaattttacttgctttgttttgatcacttgagttctcttgcagataacatcccagaattaccatgccccccctgtcatatcgttaccaaacctggtcaactcccagtcgagtttcttgaaccctcagctgcccagaagttggtaattggatttgactgtgaaggtgttgatctctgtcgcaatggtgctctctgtattatgcagcttgcattccctgacgctgtttacctagttgatgctattgagggtggaaaaaaaacttattccagcttg

SEQ ID NO: 29730 - DNA, 561 bp, Zea mays
  Peptide Sequence Number=SeqID_71509
atgcagcgccccgggcacagacgtcgggctctcgccgcgcgggcgcagcactatgagcgcgaatggggcacttcaagcgaaacggagtaccgggcagcaggatcgcagcgccctgaccctccactatttacaccacgagcagagcaacactgggagagccgagccaccaggaggatgaagagaggacgggagggggaggcagaggcaagtgccgcacctgagggggcgtcggtgtcgctggtggcagcggagtcgaggggctcggattggtggggagggaggcaggaggcgagcgcaccggcgacggagaagaacaaggacaaaaagagacacgaggacgagggatgcgcggccgcgcctagacgttgctgcggcgacggttactgccgtgtcccgcggctgtcggctgggcttgggcctggtcatgcattgcgtgagctacaccggcaggcggcagcccagtctgtgatggtgattagtgctggggaattgggccgggacggtgattgtgatgcactgaggctattggactccctggacgatctatcatcaccatcgtaa

SEQ ID NO: 29731 - DNA, 146 bp, Zea mays
  Peptide Sequence Number=SeqID_71510
atggggttggcggaccgtccgggccaagtggtcggaccgttcgcgatctatccagtggggtccgaaccgcgggggtccgccaccgccgacccgggccgtcgtcgcgccattgccgccaccgaggagtccccggagcccgccttgag

SEQ ID NO: 29732 - DNA, 462 bp, Zea mays
  Peptide Sequence Number=SeqID_71511
atggcaggtgcacggtcaggaggaggcggtggtaggggcacgctggggaggatggcaaggtcggcagtggcgcggtggcagggaggcgacagatccgacgtgcggactgcagagacggatcgcggtgcgatgcgtgctagaaatgtttgtgtggcttctgtggacttgttcagccaaaacagcgcagttgctactgctgcgagagaggatgggatacaatgtgtgacgctcctcacctacctcgccgccgcacagatctacaggacgaataggtctcggcactatcgtgttatggtcctcgataatgctcaccattccacacccgcaggggtctcctgttctgctgctgatggcgtgcgtgacctagatctggcgaaggcgtccgtggatacaggttggttttggccactatcactctgcctgtccactttattcaactggttagatcgtgtttttgtctag

SEQ ID NO: 29733 - DNA, 474 bp, Zea mays
  Peptide Sequence Number=SeqID_71512
atggaaggaagagatgccgagggtgggagcgggcatccagatggtgtcgagggtcacctgaaccagctgttgcacctgtccctgctcctcacatcgcgggggcttcctgtccactttgccgcgccggagccgcgcctcagggaggtccgcacgcgcctgcacggctcggggcccgacgccgcggcggtgtacttccacgcgctggatgtgcccgcgcacgactccccctccccggacccatcctccccgttcccggagcacatgcagcccctgtttgaggtcttctgcaccggcgcgcgggcctcgcgagccacgctggagaggaggtggaggaattggagaggagaggaggcaagcggtggccggcgggtgctggagattagggtttttggcaagcggccgggacgctgcgtgcctgatggctgtgcgggatcggacgtcgggatcagacggttgagattgtttacaggatag

SEQ ID NO: 29734 - DNA, 159 bp, Zea mays
  Peptide Sequence Number=SeqID_71513
atgacagtgaaaggggttcagattacaatatttgcattcactactacaactgaggagaaaagaaaggtgatccaatttgcattgaatgaggagcaacctatttgtggacttgtgttcaaaggttgttgccttgcacagcatcaggttcttgctggttaa

SEQ ID NO: 29735 - DNA, 186 bp, Zea mays
  Peptide Sequence Number=SeqID_71514
atgaagggaaggcacaatgttggcaagcgcaagggtgagctcaagtacaccaccagcaagcaaaagtcccccttttcaacgacaactgcagttgcactccacccagacccagctcgacctcttgtctctttgcctgcggcgcacactgtacagacaattattattattatctggggtccaagctag

SEQ ID NO: 29736 - DNA, 144 bp, Zea mays
  Peptide Sequence Number=SeqID_71515
atggaggtgacaacagaccagaccatgatgaagagcggcccgcgacccactggtgcggggccccgagtgtcagccaattgcgaccaaggtgtacgcggtggtcggctgacaccgaggacccaccggtcggaaaaagggtcctaa

SEQ ID NO: 29737 - DNA, 180 bp, Zea mays
  Peptide Sequence Number=SeqID_71516
atggctacaatgaatggatcagaaagtgtatttacaacgtgcaagggtgacaagaatatgaacactctaatgcaccacccttttagtaactgggctgatacagtgagtcgctatttcacaagatcgtcatggccagacgtgaacctgaagctaaagctgacttccagccaatccaactag

SEQ ID NO: 29738 - DNA, 171 bp, Zea mays
  Peptide Sequence Number=SeqID_71517
atggccatcaaggagacactactgatggaggcgccatctttggtagctgaggacaaattagagtttgtcttccggtgcagtttataccttttccaaatttactgcatcaccgtttattgcttttcaacatatttcacgttgttgcctatcttaagcagatttggtgactag

SEQ ID NO: 29739 - DNA, 804 bp, Zea mays
  Peptide Sequence Number=SeqID_71518
atggcggcggaggccgtggtggtggccgaaggcaacgccggcccaacaggaagaggaaggccgccgccgaggccgagcgcggcacaggaagagagcaccttgtgcagcctcctggcgtccaccgccccgaccaccgcgggcggcatccagatcgcgttcagcacggcggccgtgcatcagcagcagcatgctgccggtggggccggcggcgccaagacatcagcgaagccgtcgtctctgagtctgagcagcagcggctcgtcgagcaacatcagcttcgacggccggaaccccgcgcgcaacggcggcggcggcggcggcggcgaccccgtgtacgagccggacacggaggcgctggcgcaggtgaaggagatgatctaccgcgcggcggcgatgcgcccggtgtccctcggctccgaggacgacgccggcgccggcgccgagcgcccgccgcgccgccgcaacgtgcgcatctcgtccgacccgcagacggtggcggcgcggcagcggcgggagcgcatcagcgaccgcctccgcgtgctgcagaagctcgtcccgggcggcgccaagatggacaccgcctccatgctggacgaggccgccagctacctccgcttcctcaagtcccaggtccgggacctgcaaaccctagaccgccgcaactacggtgcagcttcttcgaatgacgccgccgccaccatggctgccgttgtcgggtcgtcactcagctacaaccgtggcaccggtgccatgcccgcattcaccttcccggcagcaggcgaaaccctacgaggagcaggatga

SEQ ID NO: 29740 - DNA, 282 bp, Zea mays
  Peptide Sequence Number=SeqID_71519
atggtgatagctagtgaatcggtgcggtttggacaggcgatagcgacaacgagtccttgtggatttgatggtcatcatgagggaagagtagatacgaccaagaaagtcgtagcagttgtgcagcgaatctcaccacaagatcagtctggccatggaaagagcaacatttgtgctttaactcccaccggctacgttgaggacaccgagattaagttgatgaaaacaacacaggtcatccaagtttggtgggagcaaactcacccgatactgaaagggaattag

SEQ ID NO: 29741 - DNA, 965 bp, Zea mays
  Peptide Sequence Number=SeqID_71520
ctcaaacctgatgccaggggtccagtgttgtgttttgttggaccacctggtgttgggaagacttctttggcctcctccatagcaaaggccctgaacagaaaattcttaagaatctctcttggtggtgtaaaagatgaagctgatattaggggccaccaaaggacatacattggaagcatgccagggagacttattgatggactaaagagggtatctgtgagcaatccagtgatgcttctagatgaaattgacaagactggttctgatgtacgtggtgatccagcatcagcactactggaaattcttgatcctgagcagaacaaagcattcaacgatcagatggaagtcattgagctgccaggctacacacctgaagataagttaaaaatagccatgaattatctcataccaagggtattggagcagcatggcttgagtacggcaaatcttcagattcctgaggctgggaagctcttcatcttggtaagcatgaggtcacccaccttccacttgacgacggtcgcgaccacggaagcaggtcctgcagcccgcggtggtggtcgtcgaggaggaggcggagaggtgcgcaaggcggtcacggaggcagtactgatggggatcgacgggacgggtcgggtggcgccggcctttgacgctcgcttggtctccggatctcttcttcctctccgcctcacccttccccgtcagtactgcctccatgagattggtgatcacggagcgagattgggggatggaacgggggtggggcgcggggtcatgaagcgagaatgccgaggcagcggggtggggcgcgggggtcacagaggcagggcgtggtggggatgggggcgaagccgaaggaaggtgcgcgaggttaggggcgagggcatgaggacggtgcggggggcgatgatggcggggcgtcgacggaggattgtctgggattgcgggagcgccaatggaag

SEQ ID NO: 29742 - DNA, 828 bp, Zea mays
  Peptide Sequence Number=SeqID_71521
atggtcccgaacgaggaaatccttgaaccttgttccacaatcactaggcgggccgtcaccgttcactctacaacggcccaacgagaggattttttaaccaagccagaaatcgcccccgaggggggatcgaacctaggacctagagttagtgccgttgaaacctgcatttttgtagctaaaatttcagttggtttggtcactgagaacatgttgggtggtaagaaagttacagctgtatttgttctaggtggtcctggaagtggaaaaggcacacagtgtgccaacattgtggaacactttggattcacccatcttagtgctggagatcttttgcgtgcagagattaaatctggctctgagaatggaaccatgattgaaaacatgataaaggagggaaagattgttccatcagaggtgactataaagctgttgcaggaggcaatgataaaaaatgaaaatgacaaattcctgatcgacggatttccaaggaatgaggagaatcgtgcagcatttgagaatgttaccaaaatttctcctgcatttgtgctattctttgactgttctgagaaagagatggagaaacgtctcttggggcgcaatcagggaagagttgatgataacattgaaactatcaaaaaaaggttcaaaacctttgttgagtcaagtttgcctgtcattgagcattacaactcaagggacaaggttaaaaagattgatgctgcaaaaccaattcctgaggtgtttgaagacgtcaaaaccatttttgccccatatgctccaaagcttcatgagatccggattcacttaaaaaacaactctactccataa

SEQ ID NO: 29743 - DNA, 1065 bp, Zea mays
  Peptide Sequence Number=SeqID_71522
atggcgggagccgacgacctgaaggtgctgggaatgtggacgagcccgtttgtgatccgagtctgcatcgtgctcaacctcaagggcctggcgtacgagtacgtggaggaggacctcggcaacaagagccccgctcctgctcagctccaacccggtgcacaagaccgtgcccgtgctgctccacgcgggttgccccgtaaacaagtcccagatcatcctgcagtacatcgacaaggtctggacagggaccgggccggccgtgctatcgcgcgacccctacgagcgcgtggccgcgctgttctggccggccggatagggataacctcccacggggaaggaggcttcagctcagcctttgtccgtgtctgtcctcatgggatcgaggacgaggcaccaaggaagaaggcacgccttggatgggggcaaggtttgaccaagtatgagaagcagaaggttcaaggccctgtggatcctgctgaagctgttgctgatggaagtccagctgatggcgaactgaagaccgcctctcttgtgcctatgcctgccccttatgttgcacctgcacctcctgctgcaccagtgcttgcgcctgctcctgcgccagcaccttctgctgctcctgcatttttgtctgcccctatgcaatgctcatctccagttaccgggccaccatattgttcctcagtttttagaaacatatactcatcaagttacatcagtcaatggagcataaccttcaacctcctatggttagagatttttttggtggaatacaaggcaacaaaagagaagtcgaaagagatagataggcttgccagggagcagaaagcagaggagcgtcaaaagcagaggggaaaagagtctgatgtggaggcagggatagagataccagaagagagaggtctagggagcatgactataatcgtgatcgtcagtatgagcaaagttgtagaaaagacaaatcctatgattagagagagagaggatcagagcaccgaagcaatctctatagaaatgggagcgattctgaaagagtcggtcatagatacaggagtggtgatatga

SEQ ID NO: 29744 - DNA, 1062 bp, Zea mays
  Peptide Sequence Number=SeqID_71523
atggagaggatcagtggcccgcgcctcgctgtcctgctcgctctcgccgtcttcaccgccgtcgccgcagcggccacggacgaggcggcgcacgccgcggccggggagggcgtcctggccgtgtaccccgaccaggcgcggcagctgcacaccacccacaccccggcgttcctccgcctaacggaggccgccgggctcctcccggctgcgacggggggcgcgtcgtcgtctgccgtcgtcggcgtgctcgacaccgggctctaccccatcggccggtcctcgttcgcggcagcagatgggctcggcccggcgcccgcgtccttctctggtggatgcgtctctgctggctccttcaacgcgtccgcctactgcaacagcaagctcatcggtgccaagttcttctaccaggggtacgaagctgctctcggccaccccatcgatgagaccaaggagtcgaagtcgccgctggacactgagggccatggcacgcacaccgcctccacggcggctggctcgccggtggccggagccgggttcttcgactacgccgaggggcaggccgtgggcatggaccccggcgcgcgcatcgcggcgtacaagatctgctggacatccggatgctacgactccgatatcctcgccgccatggacgaggccgtcgctgacggcgtcgacgtcatctcgctctccgtcggcgccaacgggtacgcccccagcttcttcaccgattccatcgccatcggcgctttccacgcggtaagcaagggcatcgtggtctcctgctccgccggcaactccggccccggcgagtacaccgccgtcaacattgcgccgtggatcctgaccgtcggcgcgtccaccatcgaccgcgagttccccgccgatgtagttctcggcgacggccgcgtctttggtggcgtctctctgtatgccggtgaccccctggactcgactcagttgcctctggtgttcgccggggactgtggttcccctctgtgcctaatgggcgagctcgactcgaagaaggtggcccggcaagatggtgctctgtctgcgtggtaa

SEQ ID NO: 29745 - DNA, 864 bp, Zea mays
  Peptide Sequence Number=SeqID_71524
atggcactaagaaaagatcgtggaaacatagagcctactgaacagtcttattcagaggaaaaccgtccaggttgtgcgtgtgttgctgtgccaagagtactcttaccagaagatgcaacggaaccaacaactggcatcaagttccccactgtactcgaagacaattccaatctgactacagagattatctataatgttgatgcttctaggtcccttgttggaatgggttttagaagcatgcgaataatgagggtcaaaaatctgaatctttatgcctttggattatgtagttactgcttaattattgccttttggttacttaccgtgggggcagtctttcccctaccggccgagtttttattatgttatattggcatattctcagatatacaacctgattctgtctgcaagaagctgggtccaaagtacgcttatattccagatgctgagttaaaggatcacccagatttctatgaagatcttctgagggaaaatattgatatgactgttaggctagtagtaagctacaatggtctcagcattggcacagttcgagatgcatttgagaagtctcttggcttccggttgcaaaagatgaatcctaatactgattatggttgcttgaagacttttggttcttgttttagtgaagacattcgtatacctgctggtacaaagattgacttccggcaaacatctgatggccagctaataactgaaattgatggcaaacaaattggcactgtccagagcaaagatctttgcagagccttcttcgatatgtatattggtgaccccccagtttcagtggagactaaacaagacattgcgcaaaatgtggctggactcataagaagatgctag

SEQ ID NO: 29746 - DNA, 461 bp, Zea mays
  Peptide Sequence Number=SeqID_71525
atgaacactcaactaagtttccgacttgcgataccaatcgtaacccaatatcatgagatattggagagtccattgggaacctgggaagcaccaaccccgcagaggccgccaatcgtagcgccgcccagcctcaccgcgcagcaccaggcaaccaaatgcccaaatctccaaacaaaccccactccttccacacgaccgcaacagatcccgcattcgttgctcggaccgcgattccgcaaaccaaaagcgccgaacctggcctggccgtcccccgggatcgcgcggtggctgatggtgaccgtcgtgctcgtgccgcgccgcctcgcgccggctgcggcggggatggagacgaggcctagggccccaagcttcccttccttgggcgccgcggcgtggcgtggagtgccggtcgcttcctcgccggattcgggagcaaatccaattccaagggaatgggggag

SEQ ID NO: 29747 - DNA, 378 bp, Zea mays
  Peptide Sequence Number=SeqID_71526
atgcaccacgtccacgagcgcctccgccgctccaacgctccaacgcttgagcgcctccaacgccactccaacgccacgagcgcctccgccgctccaccgaacaactccaacgccactccagctcttgcagcagtagaactctattgcagccagatccgctacctcttggacccggacatctacaccgacggcaggatctccgtgcagggcatcgacgccgtgctcttcgcgccggacgacgccaaggccacgcagaccgtcgacccgaacaggaagcctcctaccatcgtcacccacaagaagaagatcaagctccggcgagttcatctattgctcaacctcagtattggccaacgtgaaaacatggaggtgaagtga

SEQ ID NO: 29748 - DNA, 282 bp, Zea mays
  Peptide Sequence Number=SeqID_71527
atgagtaattccgcactgaccgtgcagatgaatcaagtgcactccgaacttcaacatgcccgtggtttgatcgatgaaaaggattcagagctccagcgtatccgtctgagcaacaaccagtatgttgaagaaaacgataggctcagagctattctcggtgagtggagtgctcgagccgcaaagcttgaacgtgcattggaggcagagcgggtgtcaaacgtcgaattgaggaaaaatattgcaaagtttagaggtcatttgtacaaagagcaggaggcctga

SEQ ID NO: 29749 - DNA, 1014 bp, Zea mays
  Peptide Sequence Number=SeqID_71528
atgggaaccttctgttgctgtgaacccaaaagcttatttattgcagtagctgaggtacagtctgtatttgaaagtgagtcaacatccggtggtaaacaaagaaaagttggaaatatattgagttctgagaaaggaaaactgttcgttattgtggcttctgatcttatcacaactcttgagtccaaatggggtgtgaagcttgtagtacacaaatcatttcccggatctgccttggagcactgcaggtatgcccatcctgtgaatagcaacgaatgttccgtcattctaggaggagattacattacaactgaatcgggcactggccttgttcatactgcccctggccatggccaggaagactacataacaggtttgaagtatgggcttcctatcatttctcctgtggacgatgaagggaacttcacggctgaagctggacagttcggtggtttgtctgtcctgggggctggcaatgctgcagttgtgaagtatctggatgaacagtattcactcattttagaggaaccatacaaacacaagtacccctatgactggagatctaaagaaccaactatattccgagcaactgagcagtggtttgcatctgtggatggttttcgtgatgctgcaatggatgcaatcagacgagtaacttgggttccttctcaggcacaaaacaggattgttgccatgacctctagccgttctgattggtgtatttcacggcagagaacttggggtgtccctattccagttttttaccatgtggactcacaggaacctcttataactgaagaaacgattgaacacatcaaggacatcgaggacccccccagggaggccggcgacagcgcacgtgtctgcgccgatcatggtggccgcgcccacggcataatagaaggggtaacgacggatcctgccgggaaggccacgacaacgatagatccagtcaggaaaccgacgatccggccgaagggacgacaaatatatccgggaaggtcgtggcaacagtga

SEQ ID NO: 29750 - DNA, 144 bp, Zea mays
  Peptide Sequence Number=SeqID_71529
atggagcgttgcgttgacgaagctgagactttgacacagcggtgtagtacgtcgtttgcgttgcgtgtaaccacacatacacgcatccaggccgggaaaggcaagatccgcgacgccgcaaaagcctacaatagggcaatgtga

SEQ ID NO: 29751 - DNA, 1080 bp, Zea mays
  Peptide Sequence Number=SeqID_71530
atggtgtcggcccacacacacattctaacactaactattgtgttgaagaaaggtagcgatgcatggtggtatatgacaactgaggaacttcttccagatagatatcgggacaaagcatctgaatatcgcaagggaactgatacaatggatgtttggtttgactctggctcttcatgggcagctgttttagcaaaaagggacggtcttaattttcctgcggatatttatcttgaaggttcagatcaacatcgtggatggttccagagctcattgttgactagcattgctacaacagggaaggctccctactccagtgttattacacatggatttgtactggatgaaaagggtttcaaaatgagtaaatcaattggtaatgtagtggacccagagaaaatcattgttggtggcaaaaaccatagggaagaacctggctatggagcagatgttctccgtctatgggtttctagtgttgattacactacagatgtgttgattggcccacaaatcttgcgccagatgtctgacatgtatagaaaactacgaggcacgatgcgatttcttttgtcgaatctccatgattggaagccggataattctgtgccgtacaatgatctgccaaaaatcgacaagtatgcacttttccatttggagactgtcatgacttccatgaaggatagttatgaaagttatcaattctataaagtataccagatccttcaaagatttgctactgttggtttgtccaatttctatttggatgttgcaaaggatcgcctttatgttggaggccgagtcagcttcacaaggaaaagttgtcagactgtgctcatggcacatctgctctaccttgttagggccatttccccgattatgcctcacctagctgaggatgtctggcagaacctaccctttcaatacaccttgcaggatggatcccttgcaaactttgtttttgatctgaaatggccagaaaagaatgaagaatggctctcggccccgaaggatgatgttgatttcctgggtgttatcctggaggagagccgcacatcatcatattttaagaggggttcaaaatag

SEQ ID NO: 29752 - DNA, 1020 bp, Zea mays
  Peptide Sequence Number=SeqID_71531
gcaaatgtctatcatgcaacaaagacggatggccaggagcttgcaattaaagtctacaaaacctctgtccttgtttttaaggatagagaccgatatgtccaaggagattatcgttttagacatggttactgcaagcataatcctcggaaaatggttaagacctgggctgaaaaggaaatgagaaatcttctacgagtgagggcagctggaatccgatgccctgcaccattactcctaaggcttcatgtactggtgatggaattcatagggaaaggaggctgggctgctcctcgtctcaaggacgctgctttgtcagatgacaagttgcatgaaagttactttgagggtcacttgtatattattgatgtttcacaatccgtcgatcttgatcacccttcagctttggattttctgaaggaagattgcttgcatgtttctgacttctttaaaaaacgtggtgttcctgtcatgacagtaacggatttgtttaattttgttattgatcaaagcatttctgatgaagatgttgatgattacctggaaaaggctcagcaaaagattttggaaaatggtggtgcggttccaaatgatgatgaaattactcctacagtcatggtgcagacgttggactacgtgaagcaatgtgaggcagatattgtcaacatgtcaataatgcaacgttcatcctctggctatgagccaaccgcagataagctttatgaccaaccattgttagggtttgtgcggactaaaaacacaaacactgaaaaggagcaaggacaaccggcacgaaacttagttgaggttgaagaagacgagagcgaatcttgcttgagttctgatgaagatgattcgtggcacgaggatgatcctaaggtgggacccgaggaaaggaaggctgctcggaaggaaaacaagaagaaagtgaaggaagagaagagggaggcccgcaagaccaagatcccaaaagctgagaagaagaagaggaagaaaatggcgaaggcaaaatgcaagcggtag

SEQ ID NO: 29753 - DNA, 765 bp, Zea mays
  Peptide Sequence Number=SeqID_71532
atggcgggagccgacgacctgaaggtgctgggaatgtggacgagcccgtttgtgatccgagtctgcatcgtgctcaacctcaagggcctggcgtacgagtacgtggaggaggacctcggcaacaagagccccgctcctgctcagctccaacccggtgcacaagaccgtgcccgtgctgctccacgcgggttgccccgtaaacaagtcccagatcatcctgcagtacatcgacaaggtctgggcagggaccgggccggccgtgctatcgcgcgacccctacgagcgcgtggccgcgctgttctggccggccggatagggataacctcccacggggaaggaggcttcagctcagcctttgtccgtgtctgtcctcatgggaccgaggacgaggcaccaaggaagaaggcacgccttggatgggggcaaggtttgaccaagtatgagaagcagaaggttcaaggccctgtggatcctgctgaagctgttgttgatggaagtccagctgatggcgaactgaagaccgcctctcttgtgcctatgcctgccccttatgttgcacctgcacctcctgctgcaccagtgcttgcgcctgctcctgcgccagcaccttctgctgctcctgcatttttgtctgcccctatgcaatgctcatctccagttaccgggccaccatattgttcctcagttacagacatgcttggaccatttttgttcttgcaaactaggaacagtgttacctacgatcccaaccagtacaagccctga

SEQ ID NO: 29754 - DNA, 390 bp, Zea mays
  Peptide Sequence Number=SeqID_71533
atgacaacggcgctgtggatgcctccaccgccgccggatcaaagggagtatttgtaccgggagggtcgcaggcacgacggcggcgaaggcgacccgctcctgctgcccgccccaatgcctccgcgctggtgggactcgccgtaccacccatcgccaccaccacatctgcgggaccatgcgcggccctcgccgcgccgagtgccgatgtcggcctcctcaggaggctactaccgacagggcggcggcgcgtacgaccgctcctaccctgacgacccgcagcctatctacaaaccgtcgcgctcggaccggtactggccgaaggacgacggcgggggatacaagggttttgttcggtatggcggcgtggccacagggacggccgtgacatga

SEQ ID NO: 29755 - DNA, 2364 bp, Zea mays
  Peptide Sequence Number=SeqID_71534
atggctgggctagccggcgtggtgtgcctctgcctcctcctcgctgccagctctgtcaccgccgcggcggcggcagcggccgaggaggagtccctgtcctcctacatcgtgcacgtcgcggcggagcacgcgccacggtcgacacgcccgcgcttgctctcccgctcatacacctctttcctgcacgacagcctgccggcgcacctgctgcgcccggcgccgctggtgttctacgggtacgcgcacgccgcgactggcttcgcggcgcggctcacggagcgccaggccgcgcacctcgcgtcccagcactccgtcctcgccgtcgtccccgacgagacgctgcagccgcacaccacgctgacgccgtccttcctcggcctctccccgtcgtcggggctcctcccgaggtccaacggcgccgcggacgtcgtcattggcgtcatcgacagcggcatctaccccatggaccgcccgtccttcgccgcagacgcgtcgctgccgccaccgccaagcaagttccggggcacctgcgtctccacgccgtctttcaacggctccgcgtactgcaacaacaagctcgtcggcgccaggttcttctaccagggcatgcagcagcgcatgggcgtggccgcctttagtgaggcgggggagtccttgtcgccgctggacacccaaggccacggctcgcacaccgcctctaccgctgccggctcggccggggtggacgcttccttcttcaactacgccaagggcaaggccatcggcgtggccccgggcgcgcgcattgccgcctacaaggcatgctggaaacacgggtgctctgactccgacatcctcatggcgtttgaggcggccatcactgacagggtcgatgtcatctccgtctcgctcggcgcctcaaagcccaagccaagaaagttctacaaagatggcattgccgtcggttcgttcagagccgtgcgcaacggcatcaccgtctctgtatcttcgggaaacttcggcccaggagagttcaccaccgtcaacgtcgcgccctggttcttgacggttggcgcgtcaaccataaaccgcaggttcccagcgagcgtcgtcctcggcaacggcgagacatccaccggcacttcgatctacgccggcgcgccgcttggcaaagccaagataccgctagtatacggcaaggacgtgggctcgcaagtctgcgaagccggcaagctcaatgctagcatggtcgccgggaagattgtggtgtgcgaccccggcgtgaatggccgagcagcgaaaggcgaggccgtcaaacaagcaggtggcgccggagcaatcctcgtgagcgacgaaagcttcggcgagcaggccctgactaccgctcacatcctccctgcaacagccgtcaagtttgccgacgccgagagcatcaagaagtacataagatcgaatgcgtcaccccctgtcgcgacgatcgagttccatggcaccgtcgtcggccggacgccttcgtcaccgagaatggcgtcgttctcgagcaggggcccaaacctccttgcgcccgagatcctcaagccggacgtgactgcccctggtgtcgacatcctagccgcgtggaccggcgagaactcgccgtcgcagctcggcagcgacccgaggcgggtgaagtacaacatcatctccggcacgtccatgtcgtgcccgcacgtgagcggcatcgccgcgctgctccggcaggcgcggccggactggagccccgccgcggtcaagtccgccatgatgaccaccgcgtacaacgtcgacaacgccggggacatcatcaaggacatgtccaccggcaaggcgtcgacgccgttcgtgcgcggggccggacacgtggacccggaccgcgcggtcgacccgggcctcgtgtacgacgccggcgccgacgagtacctctccttcctgtgcgcgatcggttacaccgccgagcagatcgccgtgttcaggacgaaagacgaccccgcggtcgactgttcgaagcgcaaggcctccgtcggcgaccacaactaccctgccttctctgtggtactcaactccaccagggacgccgtcacgcagcgccgcgtcgtgcgcaacgtcgggagcagcgccagggccacgtactgggccagcgtcaccagcccggccggcgtgcgcgtgacggtgaacccacggaagctacggttcagcgcgacgcagaagacgcaggcgtacgagatcactttcacgtcgcgacgcatgtggagcgtgcccgacaagtacacgttcgggtccatcgtgtggagcgacggcgagcataaggtgactagccccatcgccatcacctggccagcgacagcgagccaagtggcggcgatgtga

SEQ ID NO: 29756 - DNA, 125 bp, Zea mays
  Peptide Sequence Number=SeqID_71535
atgggccgtcgcgacctcaccctgcttcgtgggggcatgcccctgcggcataatcgctggcagggcgccgttgtgctgtcttggcgcgccgccgtggtggactgcgccgccgtgctgagtggctg

SEQ ID NO: 29757 - DNA, 447 bp, Zea mays
  Peptide Sequence Number=SeqID_71536
atggccaacatctgcggatccaccgcaacaacctccgtgagctccgcgcgattttcccctatcccatcctcctttggactcgcgacttccgatataaaactgggcactgcccctcctctctcctcccatctccttgcgccaccgtgggcgaatcgaacagcaccaaagcggcaatggagggccaccaccctcgatcttgcggagggccatggcagggtcactgcgtgcctctccgacgaccgccgggcatggccacggacccacgcgctgccgtgggcaccgaactacgtgagcattctgggcatgagcgctggtctgggagcctccacggaattccttcaatccaaatgttcatcaccgagtcgctgcaccatggttgagggtctcctcagcatgaaccctggtgagattctggaccccgttggttcgcttgctggtccgctctaa

SEQ ID NO: 29758 - DNA, 510 bp, Zea mays
  Peptide Sequence Number=SeqID_71537
atgaatcccaatgaagataaagtggatgatgtcaacgacaagattccagcctcgacaatggtgaaaaggaaggatgagtcacatagatatttgctgaatggaatgaagaacaacaagaggaccagaaaaatgtttgggtacaagattaaaccacctcaaccgcaagcagaagcgccaaagctcgtgaatacccaaacaagagaatcaaatcaagctcagctgttcaacatgcaggcaaccgatcaaccatcatctgctagcaataaagcaaagctgactcgcagagaggtcaaagtaagaggtgcttgtttctactgcaatgaagaagggcacttcatttgccaatgccccaagaagcatctagactggctcgcgaagaaggccttcaagcagaactcaaccagtgatgatccagaagaaattgtcttcactcgctcaaagtacaaagtaattcaaacaactgatgagggcggcatgttgctgaacctaagagttgagccgagagagtga

SEQ ID NO: 29759 - DNA, 743 bp, Zea mays
  Peptide Sequence Number=SeqID_71538
acagggattccagtgcagcccgatctcctctcgctccagtcatgcagcgcgctcctcaatctcacgtcctctctgctttggtggcgattggggcacaagcgtgcggactcggaatttgttacagtgtcgggcatggctagaagatggtgctggagtgtagggcccatcggtaggcgtcctaggcctggaacacaggtggttgatggcccaaaagtgcaggaatcagcccagttgcggactcctttcatgcccccgctcgccccctcccctgctgcccgtcacaacagttccggtccctctccagttccggagatcggcagctgctccaacctcaccatgctcggcctcaccgagaccagaatctctggtctgctcccggcgatcctgggccaactcaagagcctcgacaccatcgccatctacactgcgatgctctctggcctgatacctcccgagctcaagcaatgcaccagcttggtcaacgtctacctgtacgagaacgtgttgtctgggtccatcccgttgcagctcgacaagcttgggaacctcaagaccctgctgttgtggcagaacaacctcgtcggtgtcataccgtggagctcaggggcgacgatggtgggtctctctgaaggggagaagcacttcatccaccgcggcattgcgcaagacatttccactaatggacttttgagcagttctgtattaactttgcaaatgaaaaacttcagtaacactttaatgag

SEQ ID NO: 29760 - DNA, 261 bp, Zea mays
  Peptide Sequence Number=SeqID_71539
atggagagtcatgatctccgagcagaaaggggatcacgacttgtgggtggtgatgagaatgatggttttggtattgactatggtgatgctagtccactacagccaaacaggacatttgctgagtatgttgatgtgtactcacccttgctctacacaccaaaccccccttccccaggttgtccgtgttgcaaccactgctcaggagaagatgaagccgtggaggaaaacttccaagagttccaagattacgacgagttttag

SEQ ID NO: 29761 - DNA, 306 bp, Zea mays
  Peptide Sequence Number=SeqID_71540
atggagtctcccaggaagcataaggccagtgccgtgccagtcaaggagaaagtgaagttagaagatggaaatgatttgttagtcaagcgcagaaagactgaattttcagggtccattgtccaaccagaacgggaaattgaagtctttgacccggagaacaaagtgcctgatggtctcccagttgaatattctactgacaaggatcccatggatgcgctcactagttgtgcagtacagaactttggtcaagcgaaaggttgcattaatatatcttttcaatttggttacgtactaaacgacaactga

SEQ ID NO: 29762 - DNA, 1192 bp, Zea mays
  Peptide Sequence Number=SeqID_71541
cggcggggcgccgtggctggagcggtgcgggccgagcgtggggatggtgctggtgcagctgttctacgcgctggtggacgtggcgctgaagacggcgtacgggctgggcatgcgccccatcgtcttcgtcgcctaccgccaggggatcgccgccgccacgctcctcctcgcgtcgctcgccgccagggggtgcacgctgcggcccatggccgtcggcgcgcggggcttcgcgctgctcttcgcggcgtccctagccaccgccactggccagtacttgtacctccagggcctccacctggcttcgccgtccatggccagggccaccaccaacctcgctccaggcatcaccttcgccattgccgccgtcatcgggctagagaaggtggacatcaggagcccgaggagcgtggccaagatcgtcggcaccgccatctgcctcgcgggagcagcatccatggcgttcttcaagggcccggcgctcctcggcgcggctcttccctcgaccaccagcgacaacagcgactgggtcaagggaggcatctacctcgtgggaaacgccatctgcgtctccatctggtacatcttgcaggtgcccgtctgcaagtcgtacctggaccctgtgtctctggcgacctggatgtgcctcctggccaccttgcagtgcgccgccatggcgctgttcctggagcccaacaactacctggagatctggaagctgaactcgctctgggagttcccctgcatcctgtacggagtaagtctcaccctggacagctgctccggcgcggccaccattctgcgctgcgcatcgccttgttggatcggagtgatagaagctgaacgaatattgcagggcgtgtttgcctctggcgccaacttcttcctccagtcgtggtgcatagcggtgaaagggcccctctacagcgccatctttacgccgctgagcgccgtcatcacggcgacactgtccacgctcttcctgaacgaacagctccatgttggaagcgtcctaggtgcggttacgatcatcgcggggctgtacgtcgtgctatggggtaaagcggaagatgcgaacggcggacaggtcggatccaagcagacggcagatgcggatggcatcgctgtcacagtagacactccgaccaatctttcagaaccgttgctaccgacagtggctgagccagtgttttga

SEQ ID NO: 29763 - DNA, 915 bp, Zea mays
  Peptide Sequence Number=SeqID_71542
atgggtgccgcgctcttggcttcttggccatgggacaacctcggcttctacaagtacgtcctgtacgggccgctggtgggcaaggcggtggcgtcacgggcgtgggaggcggcgagccccgaccgctggatcctcctcctgctcctcctcttcggcctccgcgcgctcacctaccagctctggagctccttcagcaacatgctcttcgccacacgccggcgccgcgtcgtccgcgacggcgtcgacttcgaccagatcgacaaggagtgggactgggacaacttcctgatcctgcacgccctgatggcggccgcggcgctgtgcgcgttcccgtcgctgcggcatctcccggcgtgggacggccgggggttcgccgtcgcgctcgtcgcccacgcggcggccaccgagcccctctcctacctggcgcacagggcgctccacggcagcagcggccgcctctacgcgcgctaccactcgctgcaccactccagcagggtgccgcagccgttcacggcggggctggccacgccgctggagcacgtggcgctgggcgcgctcatgtcgctgcccctcgcggccgcgcgcgccgccgggtgcgcctccgtcgcgctcgccttcgcctacgtgctcgccttcgactccctccgcgccatgggccactgcaacgtcgaggtcgtcccggcctcgctcttccgggccatcccggccctcagatacgttctctacaccccgacgtaccacgcgattcaccacaccaagaaggaggccaacttctgtctcttcatgccgctgttcgatctgctgggtggcacaatcgaccgacgctcgtgggacatgcagaggaagatgagcgcaggccaccaaactacctatattggactaacccattttagctttaacaaccttactagctaa

SEQ ID NO: 29764 - DNA, 213 bp, Zea mays
  Peptide Sequence Number=SeqID_71543
atgtccggtggtgcaccgggacagtgtccagtgccccaggctggctcggcggcgaactggccgctctcgggaatcggcggggtgacgtggctaaaaatcatcggactgtccggtggttcaccggactatctgggcgagaggctccaacttgtggagattcctcgcaaacgggagaagaacaccaagcaaaaagaaccgttgtattcaagttga

SEQ ID NO: 29765 - DNA, 249 bp, Zea mays
  Peptide Sequence Number=SeqID_71544
atgccgcctgccgaccgctgtgttgcgctcgcgcagcaggggcacatcacatcaggcgtcacgcacggaattccctccttgtccgtgccgtgggtgtcgccgctggccggtccagatgcggaagagagacatcaaaaagtagaggaagttggctctcatgcaaaagctaaacgatacacatgcttgaagataaaaaggataaaagagaacaagacaagagatccatctaagagccaacctgaatgttag

SEQ ID NO: 29766 - DNA, 513 bp, Zea mays
  Peptide Sequence Number=SeqID_71545
atgtcgaggagccctgccaaggaggccgatggcagcgcacacgtctgcgccgatcatggtgtctgcgcccgcggcaaaatagaaggggtaacagcggatccggccgagaaggccacgacagctacgaatctggctgggaagacgcgatccggccaaagggatggcagatcgagccgggaaggtcgcagcaatgggagaggcagggcaggacgccatgctggacctaaggccgacggcgcattctccggagctggtgtgtggcagtcgcaccgggaagaaggtcggcggtggcaggatccgggcgacgtggcggcccctggaaggcggcacgttctagcgccagtaggaggaagctccgcggccatggcagcggcagactgggcggctagtagagctgagagggaggaccgcagtccgccgctggtggcacagggtgagacgggcgagccaagtgggcgcgctggagaggaaggggccgacgtctcgagcggatctgaccacggagacgagtga

SEQ ID NO: 29767 - DNA, 936 bp, Zea mays
  Peptide Sequence Number=SeqID_71546
atggcacactacagccagtgcactcgtgacgaaagtgcaaggatctgcgaagcggacacacatagagacaacctatcgctaaaggtgacggaagtgcaaggggaggtgagggggaacaagtcgctggcacacgaagaactggagcatccatactgcaataacggtagaagacgtctggttcctgtatttgcatctttgactacacagagagctgaagccagggccgagggctcggtcacgtacccgagcctacctgatggggaagttgcacatgtcatagtggtatgcgcatcaaatgctcatgtcccctgtgaccttcgactgagacctgcctcggggttgccttccttgcccgatacgggctcgggcgaggcggagacggtagttctggggagagaggacctcggctgggacgaggattctactgagtatgtaccttgtcagagggcaggtccgggtgaggcagagttatgggtgaccgtcgagaagggcctcgggcgaattgtggtttataccttattgtcctctttgaatgtgcctggtggcaacctcgaggtgcataaaggttcaacacaaaccaataaaagatcaaagttagggttcaaatgcaaaggagcaaagaaaccgagtatgccctggtctggcgcaccggactgtccggtgtgccaccagacagtgtccggtgcaccaggaccatacaacgtccaactctccacgtactctcgggtttctgaggacgcgctccgctataattcaccggactatccggtgcaccagcggagcaacgactccttcgcgcaacggtcgactgcaaaagccgctgactccgtgaacagtgaagaacagtgcgcgcagaagtcagagcagtcaccagaggtgcactggacagtgaacagtacctatctggtgcggcaccggactgtccggtgccactag

SEQ ID NO: 29768 - DNA, 537 bp, Zea mays
  Peptide Sequence Number=SeqID_71547
atgaagctgctgaagaaatgcgtcacctcactcaggatggccaagactaaaggccccaatacagggagcttcgtcaagaaagcccaatcaatgatgatgaatgatctgaagcagttcctgatgagctatgaggcaaccatgtcctcgtatgggggcaatactgctgtcatggcgaagtcctttgtcatggtagtcagaaagttcgtcgtcttccggagccgaggccgagtccgagccctagggtcgggcaaggcggagttcgtcgtcttccggagccgaggccgagtccgagccctagggtcgggcgaggcggagttcgtcgttttccggagccgaggccgagacgggggccgagtccgagccctggggtcgggcgaggcggagtttcctatggcgcccgaggccggacttggctgctgtcagcctcactctgtcgagtggcacagcagtcggagcgacgcaggcggcgctgtcttcttgtcaggccggtcagtggagcgacgaagtgactgcggtcacttcgtctctgtcgactga

SEQ ID NO: 29769 - DNA, 670 bp, Zea mays
  Peptide Sequence Number=SeqID_71548
gactgttcattgtaggctactaagattggaagagctattaatctgttgcaaaaacacatctcataggagattcggcacctgtgttcttggaaatgttgtggacatatgcgattacttttgtgttccagaggttggaaagttttggttggtgaatgggtcagtactacaaatgtttccctggcagagagatgacgcaataagggcacttgacatgtataaaagagcaattgagcagaggagtcgttgtgccataagtccagaagagtttgtgaattttttgaatcacgcgttggattttggttatggtccgcattcatgctctaccactcttgaccactacatggaacaattctttggcattgggagcactgcaacatctacaaaggaatgcttccaagtagcaccgaaagcaacccatgtagtttttgagagaatggaatttccattgtcattggtgcattcccattattatgtttacaaaaggctagcattagttggagatgctgctcatattgtccacccctttgccagccaaggtgtcaacttgggctttggtgatgttgtcgctttagcaaaagttattgctaagggcttgttcgctgactttgctacaatggcacgacaaggacaagaaggctgtgatgctagagacagaagcatctcactgtag

SEQ ID NO: 29770 - DNA, 384 bp, Zea mays
  Peptide Sequence Number=SeqID_71549
atgggtacccagatccatgagctccaagagcaagtggagatcagggacaacaccatcgaggttttggagaaccaactccatgacctacaactggagcttgatgatgccaaagcacatcaaaatgcaccaccaggagtagcgggttgcctttcctgcagcagtgggacagcagaggcggggctggctgcgccggacgggcggcgcaggagggagcacggcctggagcgcggcggcctagagcggcggcacacagaggcggggctggaggacggcctggagagcagcggcctagaggacgacctggagggaggacgacctggagggaggacggcctggagagcagctgcctggagcggcggcggcctggagcagcggcacgcatag

SEQ ID NO: 29771 - DNA, 177 bp, Zea mays
  Peptide Sequence Number=SeqID_71550
atggtctctcattccggttatggtgggtacaagtgcggtcactgcacgacggcagtcggggtcagtgaggcattgtacgccaaggcggtttaccttgcaaggtttaaaaactcgattcgaatcgtctgcttctcgcagctaatgagactgcttgatccatgctgctacattgagtaa

SEQ ID NO: 29772 - DNA, 207 bp, Zea mays
  Peptide Sequence Number=SeqID_71551
atggaccggaagaaggcggccaacaagggcatcccctacaaggagttcttcttcgtcgcagtcaccaccattgcctctgatcataattgccgccctctcgatgcatcactctctgttcctttcacatgtacattatgcatgcttttctatgccatcccatgctttacatgccgcatcgtcgacgtcatctcccctcgcacaaaataa

SEQ ID NO: 29773 - DNA, 534 bp, Zea mays
  Peptide Sequence Number=SeqID_71552
atgtggcggctgaagatcggcgagggcgggccgtggctcaagagcggcaacgggcacattggaagggagacgtgggagttcgacgaggatttcggatcggaagcagacagggaggccgtcgactccgcgcgggaggagttcagcaagaaccggctccggatgcgacacagctccgatctcttggcccgcatgcagatagcgaaggagaacggtttcagcctcgacctgcacaagacgagagacgacgacgggcggtctcctctgctggtggcgacgacaggctccagcacggtgtcggagacgctgcgaaaggcgctggactacttcgcggcgatacaggcgcacgacgggcactggccaggagacttcccagggccgctgttcaccacagcaaccatgatcacggttctgtacgtgacggggtcgttggacagcacgctgtcgtcggatcaccgcagggagatctgccgctacctgcacaacccccccaacccgcccttccaaaggttgctttttcttagaaatatcacctaa

SEQ ID NO: 29774 - DNA, 300 bp, Zea mays
  Peptide Sequence Number=SeqID_71553
atgggaatcacactttgttctggaccgatcgttggatccatggacaatgtattgccaatcttgcacctcgcctccctccccaaagagaagggtgaagcgacgtactgtactgtccaggaagctgttactggtcgcagctgggtattggatattcaaggagccctcacggttggtgttattgtggactttgtctctaggaattactgtacagctatgagctatgtcgaagatgttcacctatatgggcttcacctagtggccaatactcagtcaagtctacttacgaggttttcttgctag

SEQ ID NO: 29775 - DNA, 549 bp, Zea mays
  Peptide Sequence Number=SeqID_71554
atggacaatccttctggtgacttcagcagaaagtaccgccacatatctaagggagggtggggcttccaggttgcagatcaggggtggcaggtttcagattgcacagcagaagctctcaaggttttgttaatgctgtccagattttcatcagacattggaagcgatcagatggaaacatgccgcctatatgatgcagtgaatgtgttgtttggatcttggggtatttgtttcacatatggcacatggtttgctattgagggtctatcagctgttgggcagagttatggtaacagcacttgtatccagaaggcctgcaagtttctcttagcaaagcagctaaagaatggtggatggggtgagagtcatctttcatctacaaccaaggcatacacaaatctggataaggagaagtcacacatagtgaacactgcgtgggcaatgttggcgctcatgaaagctggacaggcggaaagagatcccactccacttcacaaagctgcacggcttatcatgagtatgcagctcagcaatggcgacttcccacaggag

SEQ ID NO: 29776 - DNA, 468 bp, Zea mays
  Peptide Sequence Number=SeqID_71555
atggcgctccgcaagctctgtgacgacggcggctttcagctctcttacggaagcaaggcgacgtcagcaaggactcgaccgctcctacagctgtccctccgccaggctccgttgctcctccgacagccacgacatcacgccagcaaggtttgcacccttagacatgttgcatatgtccatttcaatgtttctagcacttccttttgtcctctaattctttgtgtagcaaaaagtgcatttggacttggttttggccatattgcaaatcttggagaaactatggcaaagagggaaacccccaaagatagccaaaaaggattgaaggacttaggcttaaaagagcctaagttgtgtcggtctgggtctcaccggaccggtccggtggtgcttcagaccagatcacttgagagattgagtgcaacacttgtcccttgggacaccacaatgcgaaataagcaagcattttag

SEQ ID NO: 29777 - DNA, 567 bp, Zea mays
  Peptide Sequence Number=SeqID_71556
atggatttttcgagattgtatgaagtgtcaaatactgtagatgagcatagagatatgcgtctagatatagacagcatgacgtatgaggagcttttagcattagaagagcagattggagatgtcaatactggtctgacaaaaagtcacattgtagataaattgaggactagcctatatgttccaggaatatcgagcatgtctgatcagccatctaaatcttctctagagaatgatgcttgcataatatgccaggaggagtaccaggctagagactgcgttggcacccttgactgcggtcacaggtaccacgcggagtgcgtgaagcagtggctgatggtgaagaacttgtgccccatctgcaagacgacagcattgtctgccaacagaagacaaggacagagcgggtatattgcgcactcttgctccaagctgtcaaaacatgccaatgtttacatccaaatcagtggaaatacaatcgaggacaggattgcaagtcagcgaaacatcatggcgccctctccgaaccacgttgtcaatgtcgagtgccaatcacccgtaaccacttga

SEQ ID NO: 29778 - DNA, 849 bp, Zea mays
  Peptide Sequence Number=SeqID_71557
ggacgagttcagcctcgagaccaggtccaccatcggcgtcgagttcgccaccaagactgtccaggtcgacgacaagctcgtcaaggcgcagatctgggacaccgccgggcaggagaggtaccgcgccatcacgagcgcgtactaccgcgggcccgcgacgcggtgggcggcgctggtggtgtacgacgccatccaattttttttctctctaaccatttcgaatacccattctctaaatcctggcacgcccctggtgccccgccgcgtcaccttcgacaacgcggagcgctggctgcgggaccacacggacgccaacatcgtggtcatgctggtgggcaacaaggccgacctgcgccacctgcgcgccgtgtcacccgaggacgccgcggccttcgcccagcgccacggcaccttctccatggagacgtcggcgctggacgccaccaacgtagagcgcgccttcgccgaggtgctccgccagatctaccacgtcgtgagccggaacgcgctcgacatcggggacgaccccgccgcgccgtccagaggcaagaccatcgacgtcgacgccgccaaggacgagaggtctcgcctgttagggatgaaaacgggacgggaaattctcgaagctgagtactcccagtcacaacaaaacaatgctgtcgtcttgcagatggggcacaagttcttcaccatcagccactgcttcacgcactccgcgtgcgtcaacagatgcacactaaacattattcaagctaccagtggaagagaagtgatgcaatcagccatcaaggctgattgcaaggcgatacgagcccagcagctgcaatgtttatgtcaaacctggggcag

SEQ ID NO: 29779 - DNA, 540 bp, Zea mays
  Peptide Sequence Number=SeqID_71558
ttgttccaagtcagtttacctgccgctgtctacaagctaaaatcacaactggtggaagcagatttcgatggtgatttctgtggatggaaaaagaactatatgtatatgaaagtggggttcgggggttttctcgacctgtgtgagaaggtcttcttcttaatacaatacccgggggctgtcttaccccccgcagtttttgtgagggagcacaacgaggatggaaaccgtggaacctggtgctttatattagtagagaaatctaaaatctcatcaaggaaggtgtggacatggatcttgagggagttcaggctgtatgtagtcttgccacccaactcaagtcgactctgttcttggtggagtaaggctgctgcttctcttgaaaaagacctgaggaagggcttcatctccttggttatcctggtcacctgggaactgtggaagcacaggaatgactggctgactgcgtgttcgatggcgtgcaacctcaggcgcaaacagttatctttctggtggctgtcgagggtcacatgtggtgtctag

SEQ ID NO: 29780 - DNA, 612 bp, Zea mays
  Peptide Sequence Number=SeqID_71559
atgaagctgtggaaggagacttccaggagttccaagactacgacgagttctaggtgtgggttagcggcaacccccagtcggctgcctgtgaaggtcgcggttatctacgtttcttttccgcactttgatttattgttccatggacaaccatgtggtgataaagttcacttttcaagaatgactgctatggtacaagttctagaaaaaaataacatcgaaacaattacatacctgtttcaatctgatggatatggatcacatgcaataactcattggacagcatttctcgtatctgaccccctacttcgagttccctgtgcccagctgttactggtgcagcacgaagaagttgggctaatcatcccaggtgcacaagtcttggtcaacaagaaggacgccgccacggcgctgtacgcgctctgcagcggcgcacgcgagaaccggcagcgcgccgtggagaccggcgacgtgcggcccctgctggacctcatggccgacccggagtccggcatggtggacaaagccgcgtacgtcctccactccatggtgacctccggcagaaccgcgccgccgccgtcgaggaatcgcatcctcgtcctggtcgagatgtga

SEQ ID NO: 29781 - DNA, 423 bp, Zea mays
  Peptide Sequence Number=SeqID_71560
atgaccaacgccttcagcttctaccgaggtggccgggcatgcaatggcgtcaatgaagcgctgcagcggatattgatcctccaggtcccaacgtctactagtgctcgcggcttggaagaagcaaagattagaaaactacctagaaggctagaagaaaggactgttcaggctctcatacatgccagcgattcccctctgtcgattgtgctcgtcggagtaggcaacggaccatgggatgatctgttcatggatttcaccgagatcatgtcgagggaaacgtcacagggcgacaaggagggcaagttcacgttggaagcgctgatgaagataccggcccagcacgatgccataatcagccagaacatcagtgagctgatgacaagggcgccggctacaagagcagcttttcgtccaccgtgctga

SEQ ID NO: 29782 - DNA, 132 bp, Zea mays
  Peptide Sequence Number=SeqID_71561
atggcgatttgtttattggagttcgattgtcccaaaggaccagtgatcgttctgaccaggctatcaggtgttaggggggcaccagaccggtccgatgcaccaatggaccccgtcttccaccacgtcatctag

SEQ ID NO: 29783 - DNA, 122 bp, Zea mays
  Peptide Sequence Number=SeqID_71562
atggctgttgtccgagaagtcagggaagggagagatacgactgactgcccaagggtagagggacagggtaatgcggtgacgcccacgcaacaaccatctgcggagctcggcgcctgttgcag

SEQ ID NO: 29784 - DNA, 792 bp, Zea mays
  Peptide Sequence Number=SeqID_71563
atggagccgacggtgcacgacgtcctggcgttccatcgcgtggaccgcgctgcatacgagcacatgctctccctgggcgccgggcgccactcatcccgcgacgccgttgcgctcctcatgtggttccatggcaaagccggcttggacgccgtctcccacgtgcgcgctctggtccgcacccaggctgccgccgcccagctggtcgaggaggcccgcgccgtcctcctccacggcgccgacgcggagacgacgacgctcctctctttggcgtgtggcgaggacgacgacgcccgcgtgcggcggttcctggcgtcttgcggcacggccgatgccccgaggcgcggcgtggcggacgtcctcggcggcgtcggagcgctcgtgttcgacgaccggctacacgcgatcctgcggcggtacgaggcgggcggcagagatggcggcgcgctcccgggggaactggctgcgccgtatcgtcgccgcgtggcggcggaggtgcaggaggaggacggccggtcgctgttcatcacgttctccaaagggttcccattaacgcgcgtggaggtcgaggagttcttcactgagaggtggggcggcgactgcgtggcaagagtgatgatggagaagacgccggcgggggagccgccgacgtacgggcgcatcgtgttccggcgcgcggcgactgcggcggcggtgctggccgggcgaccgctggtgaagctggtggtgaacgggcgccacctgtgggcgcgcatctgcagcaatccaaacagctgcaacagtgtcggcttgtag

SEQ ID NO: 29785 - DNA, 546 bp, Zea mays
  Peptide Sequence Number=SeqID_71564
atgacgatacaattcttcaaccacgtgaaaaccatctggagcaccaccaagcacatagtgatgggcaaggctaatggaaatttctataagcctaaaggagaagcggcgaaaaacaggaagcagaaagaaagaaccatggggcaaagaagatgcatggtgaagcgaagactgaaaatgaccgagcacgtaacactgaaacttttcttcccggagaaaggtcgagttccacctcctcaacgagacaacgactatctaccatgggccccgatgaagcaggaagggacaccgagacaaagaagggtgagagagaggctacgcgaggcgcaagcaacgtcaatgtttcggcagcaacaagatgatccccagaccttgcccccaccgccaatgcccctcgatgtttcctcagtttcttcctccatgaccttaaggatgatcaggctaaagactttatcaacaacatattcacttctagcggtagcggacacaactccaacgaccccaagtggttgtagaagcttgttttatctgtttgagaatttatattag

SEQ ID NO: 29786 - DNA, 195 bp, Zea mays
  Peptide Sequence Number=SeqID_71565
atgggcaagaacaacaagcgcaagcgtgagccaactcctccatcggaggattttggtgactcggagtactcagaggaggagttctcctctgagtctgagaggtctctggctcccatccccctgcgtgaatcgtctaaagtagctgccgagcgacttgtagacgatgttagagttttagagataactgccgagtaa

SEQ ID NO: 29787 - DNA, 324 bp, Zea mays
  Peptide Sequence Number=SeqID_71566
atgaactcagcagtctgcggcaacatcccagtagcaaagcgtcgagccatgatcctttttgtattcgcattcccaagcggagccgaggccctggggcagaaggccgtcgcctcccgacctggccgaccaccactgtcgtcagcatgcaggagtagcgagcaggtcggcggcctagccacggcgcacccattcaccggaggtcatcttctcgctctcgctctctgccccctcttcacagaggctgagaagggtggagtcgtggagagaaggaatgagggggagaatttagggattcgacgaagctctaaggcaggggatgcatga

SEQ ID NO: 29788 - DNA, 111 bp, Zea mays
  Peptide Sequence Number=SeqID_71567
atggcctcggttgggaaattctccggcaaggcgccgacgcatgggcacctgcgccaccgtgaacaaccagctgtgggagatgatccagctatggataagcttcttaaatag

SEQ ID NO: 29789 - DNA, 713 bp, Zea mays
  Peptide Sequence Number=SeqID_71568
gcgtccacatcgtatggtgcacggttctgtccccgtctccttcgagatcctctccgcgatgcacgcctctctctcctccaccccaccctcctccccacgccatcgacgccgccatcatcgcatccgtaccaaggcgcctctgccccagccgcgcccccttccatcctctccacgacggacgccgcacacgtgcccccgcccagccccgcgcatcatgcagtccccgccccctccgcgccagggctcaatcccaccacgccgtcgccgccatcatcgcctccgcagaatccgccatgagtgatggtcctcgctcgacccgctctctgtcgatggcgtccacactgcacccatgctcccgcccggacgcgccccccgcccacctaccccgctgtgacagtcacctccccatccgtcgccctgccccatcagccgcgtcatcccggcttcccccgaaccccgctctgcacctctctcaagctccgacgcgtcatccccaccctccccacggaaccccgatcgagcgccaccagtcgcagaattatgggcgagcaccgccagccaccatgggctccgccaccgttggcgccctcctcctcggcttcgcgcacgccccggccccgacggtagaggcagggcgcccaggtccacggagtcgtacaccaggagtcctctacaacatcaacaccgaggagtcagcatcggcctgcacaatg

SEQ ID NO: 29790 - DNA, 1914 bp, Zea mays
  Peptide Sequence Number=SeqID_71569
atgcccggccctgcccgtgcagccacaaatgcacttcccgtgcgtttcagccttttgtgcttgattggttggcctggccatcagtgcgggtgcgcaccttcatcagtttgccgagttgctgcgtcctgtgttaagggtggagcttggaatttggatcgtgaaaagcatatcccaaggcatctacaagtccagcttctgaagcagaacacttcaggtcatcaccagagttcgaagaatgaggtttcaagccccatatctgttttggagcggaagagtggagagctccacaagcctgtaagatcattgacacagcaaattctgcagggacaacttcatgctacttctgctatgctgcctgtcgctaccatggagaaggcaacgaaatgggagcctggggacataaagggaatggaatcgcatgatgcgtatctgatagccagccagctgaatcttcttgatgaacacagagacaccgcgtatgttgctgacctccagatggagcttcagcaagcacgtgataggataagtgcgatggaaactgagcgacggtcagctaagaagaggcttgaccacttgttcaagaaacttgcggaggagaaagcggcttggaggaacagagagcatgaaaaggtgcgtgctatcctcgaagatatgaaggcagaccttgaccacgagaagaaaaaccggaggcggctggagatgattaacatgaaactcgtcaacgagctgaaggaggccaagatgtcagcaaaacagctgttacaagagtatgagacagagaggaaagcacgtgagctcactgaggaggtgtgcaacgagctagcaagagaggtggatgaagacaaagctgagatcgaggccctgaaacgggactcccagaggttgcgagaggaggtagacgaggagcggaagatgctgcagatggcggaggtgtggcgtgaagaacgggtgcagatgaagcttgttgatgcaaaacttactctcgacgcaaaatacacacagctgagcaaactgcaacaggatgttgaggcgtttattgctgcatgcagtactgctaatggagacgtcacggtagtagagcaagcagagagcataatacaggcaatcaagtcagtcagagcccaagatgctgagttcaggtacgagccaccggccgcatcagaagacatattttccatttttgaagagctgcgtccaagtgaggagcctgtcatcaaggagatcgagccatgttacaagaatagctctgccaaatgtgaaccagaaattcaagaggttagcccaatgaccgatatattcctcgaaaagaaagccaaggcaaactcgaacaaaagccctaaagatgaaagcgacactgaagatggcagcagctgggagacaataagccacgaagatgtccagggttcaagcggttcacctgatggaagcgagccttcggtcagcaacaaggtctgcgacggaagcattccttggaagagcagaaatggattcgagcgtatggagagtgagaagctgaaggatgagtcagctgatgcctgcctgacaaacatgaaccagcccaagaagaaagaatcggccatttcaaagctctggaagtcgtcccgcccaaagaacagcgagatatgcaagaaagacgcagttgaaacggtaaatgcaagatcgtcaaacgtgcggctctcagtcgggacctattccactgttgaaagtggcatccaagaaatagggctcagtccaccgtgtgttgagcagtggagctcaccagactcgatgaacgtccaattcaaccggggattcaagggctgtatagagtacccgcggatgtcccagaagcacagcttgaaggcgaagctcatggaggcacggttggagagccataaggtccagctccgccaggtgctcaagcagaagatctag

SEQ ID NO: 29791 - DNA, 3545 bp, Zea mays
  Peptide Sequence Number=SeqID_71570
atggagccccggccgtcagccagccaggtccggcgtccgggtctgcgccctgcggcgtcactgctgtcgccaccgtctccgatggtcccacatccatccagcgggccgcgcgtgctgaaatctgtcagattctgcagttcattccaaatggctgctgcagcagagcacggcaactgcgatgcttgggcggccagagacccttctggggttctctcaccatacaagtttaaccgcagggcagtgcaaagcagcgacgtttcgctgaagatcatatactgcggggtgtgttacggtgacgttatgtggatacagaacaagcacaacgactcagtttatcctctggttcctgggcatgagatagctggggttgtgactgaggttggcgcagacgtcaaggccttcaaggtgggtgaccacgcaggcgttggaacctacgtgaactcgtgccggcactgcgagaactgcaacagctctctggagaactactgcccagaaacagttttcacttacaacacaactgatgctgatgggaccatcacaaaggggggctactccactcacattgtcgtccatgaaaggtactgcttcaagatacccgatggctaccctctggcgcaggcagcgcctcttctgtgtgctggaatcaccgtctataccccaatggcgcggcacaacatgaagcagcctgggaagtcgctgggagtcattgggctcggtggcctaggccacatggcggtcaaatttggcaaggccttcggcctcaaggtcacggttttcagcacgagcgaatcgaagagggaagaagccattaacctccttggagcagataactttgttatatcgtcagacacgcagcagatggaggccctgaaaaactccctgcacttcatagttgacactgcttctggtgaccatccattcgatccgtatctctcgctccttaaggttggcggtgtgatgacaatagtgtgctttccaagtgagatcaagatgcaccctgcgagcctcaatcgtggtgggcggaccttgtctggtagtattgtcggaggtacaaaagacatccaggagatggttaacttttgcgcggagaacaaaatctatccagagatcgagatcatcaagatggattatatcaacgaggctctcgccaggcttgttaaccgagaccgcgcgcccgcgccgccgaaaccgccggcggcctcctaccaggtttcaactgaagcacgcagtccacaccgaagcaacgcttcgctcctcttcgccgtagtctttctcggccctccgctcccatactggttgttctacttattcaacgcgcgcgacatacattggagttgcgatccaaactgctggtgcagttttacttgtcacaacccttggtggttcagcataaactccatgagcgacgacggcatggcctccgctgcggtggagccgcccaagcgggagcaaaattttctagtgaaggtggggatggaggcatggacgcagtcgttcgcggttgcacacaaagtcaggttggtgcacatcctcaagaatctccacacctcggaggtgaaaatctactccgacgcgtccaaggagttcataggagtactggatggtgagtctggcggcgaggtgctgcaggagtacgtgcaacagtcaccgcagcttggggagctgctcgaggcatggcggctccaccgggagaacccggggatggcgcacatacttttgctctttgcagctgtcctgggccaccctgatggtaagctgcggcgacatggttcggttaagaagagcttggacggtgtcgctaggatgatactggaggataaggagaagatgggggatgtgtatttggagctgaatagtggtgagttccgacggcagaatgcagcactggatttgcttgctgcaattgtcaggcgtggagggggtctagcgtctgaggtcgctgagagatttgattttaagatacctattttgccgcagctggctgggacaatgaagaagaaggggagcagggatggaaggaatcggcggaagggtgccgactttgggtccacaaggcggtcgtttattgggtttgccatgtcatttttggaggttgggaatccaaggctgcttagatgggtccttcaacagaaggaggtatattcaggggtgcttcgtgggattggaaatgatgatgctgagactgtcatctatgtcctctcaactttgcgagacaatgtcctggtagatgagtctcttgtcccaccagggctcaggagtgtcctctttggaagtgtcacattggagcagctgagcttgatctcaggaaatcttgaatcaggggaagcagctgacattgctcatgaggtattggtcatgtatgctcatgctggtcaagttattatttgcaggttttcagccatctcccttgcagctgatgtcatagcttcagcaaaatgcaatagcattgttcaaactctttcatccagttcacatggtctggtatctgtagatgatgaagaagttcaggtagtcttgaagtgcatggtgcccaatgtatgctctcgagcaatgataaatagggggttgctgcattctgatgatcttgtgaagcatggttctctgaggcttgtttttgaatcagttaacctgctttgttatatcactgaatccatcaattgcatggtatcaaaagggagactgaagtcagaattcattggctcagagaaagtaaccatgaaaatagatggtttcccagtattaagctgttctgatgctacagatgcatccttagttgatgaggttcaccagggagatgaaatgcaggtcaagaggtggacatctctaagagaatacatccaagatgaagttcatggagctatgcctgatcctcaagtctttctcaagttactctcttctaccagccaaaaacatcaaagttattctcagagcatacaaaagaataatgctcaactttctgagcctcctcaaaagaaacgaagatgcagtccttcctgtgaagttgatgatattattattggtggcattgatgttgagcaggataaggacgcatctgaagaacaaggcctggaattaaaaaatgaccgcacaaccaccttgtgtgagatatggagcttagataaacaagatccaaagacgaaagatgcaaatgttgtggaaaatgtcttccactcgaagttgctggatgttctcaggctttatttgggggtgatgcccagctcttttgatggatcatatgacttctttaagattataccacctaacccattggatctgtccatggatgagcaacagtccctgttatcttttttacttgaatattcaggccaatctagaggatgtttggacccagaaagagttccagaatcaatgtacaagtatctgcaacccttggtttatatcatgttgcattcacagattaagaacatccgtgatcaagcatatattttagttaaagctgctatggcaagttcgggtgcttttgatcataacttcacagagattgatgcatggttggttttcttgcctggttatgaggccaaatg

SEQ ID NO: 29792 - DNA, 567 bp, Zea mays
  Peptide Sequence Number=SeqID_71571
atggcgctgcacttcaccgcggtggtggtgcgctcgcgatggacgagtaaccagtgcttggacaagatccagagcacgacagccaagttcaacaccctgatgcactcgcccccgggcggcggtggcatctgcgcgccgttcgcgcaccgcgccgtgtcggcgatgtaccgtgggctgaggcggtggctcgccggcgagatcatggctacggcgagcagggccagctgctggggcgagtcgtcgtcgtcggtgacggtggccgcgggcggcgacgtggagcagagctgggagtcggccttcatacagaagcactggtcggcgcagcagctgtggcgcaccgagcagcagtgctggcggccccagtgcgggctgccagagaagtctgttgccgtgctcaaggcgtggatgttcgagaacttcctgcacccgtatcccaaggaccatgagaaggacgtgctggcggcaaggagcagcctcaccaggaaccaggcacagatcgaaatcccaccagactcgtttcaaattcgattcttttttggcgagatggggtttcgaattggttcataa

SEQ ID NO: 29793 - DNA, 1374 bp, Zea mays
  Peptide Sequence Number=SeqID_71572
atggaggcgctcgtggtgcggcagctgggcgatcccaccctgccccctggcggtgaagcctccccgttcgccgcggtctctggggatcacccagtgccggagatctcatcgccgacggctgtccgagtgcgagtcgcggcgaccagcctcaacttcgccacgttcctccaggtgcagggcaagtaccaggagcggcccccgcttccgttcgtgcctggatccgactactctggcgtggtcgacgcagtcggtcccggcgtgcgtgggctccggcccggcgaccgcgtctgctcctttaccggcctcggttccttcgctgacttcatcgtcgccgaggagaagcagctattatcccctaaaatgctcttaaaactcaaggacatcatcaagccttttttacaagcttttttgagtatctggctatggagctggctgttgaaagaatctaagtatcttgtggattacatgttgtcgggtatgataattagtggtacccagattattcccaaaaacgcatttaaaactcaagggcatcatcaagaatctgactgtagagctgactgtggaaaggatctgagtatcgtgggattacatgctgccaggaagggctcggtcctgacctcgggcagacttttgcctcgcccgagcccggctctgccctcgatatctgtgacggaggacgtccccgacgtcatcagatacagtggggctaacacccccttaagaagcttttccccatacctagccctgtgtcaaccactatggtatgagcgacccctcgccagaggggctcaggaacatgaccgagccctcggcttcagcctcgactctttagcaggaaacaagcaggcacaagtcaacaacaaggtacaagaccatgctgtctacagagcacaaaggaatcccttcacagtatttttggtgcctgatggatgcgacctggtcacagctggggctttaccagttgcatttggtacatcacatttggcccttgttcaccgagcccaattgaaggctggccaggtgctacttgttcttggtgctgctggtggtgtcggggcatctgctgtgcaaataggaaaagtttgtggtgctgttgttattgcagttgctaggggggctgagaaatcggattatctcaaatccataggtgccgatcatgtaattgactcaagcaaggataatgttatagaaagtgccaagtctttcttaaaggctagaggcttgaaaggtgttgatgttttatatgacccagtcggggggaaattaactcaagatagcctgaaacttctcaattggggagcacaaattcttgtcatcggatttgccagtggtgatgtttccagttattcgagcgaatattgctcttgttaa

SEQ ID NO: 29794 - DNA, 525 bp, Zea mays
  Peptide Sequence Number=SeqID_71573
atggaaagctccatgtcgtcattcctgacgcgcgacgcgtccttctccctcatcgggccgaagagctccgccctgaacaccgctaacctcgcggcgagctcgcatcggtgggccgggaacaactgtctacccacgacgaaggttccggagcacggtcggctcccgaacgacgatggcgctcacgtcgtggacgcggagacgacgatcaggacacacctacccgtgaagcggtcattgccgttgcgcaacaacgtcctgaattggttggatttaggtataaaggtttgctccgtgctttcctttttccacaccttgctatccttgctgaaggcggtgaagctgaacccgaccctcacgcgatcctacccctgccctcctctacgaggattcaagaaggccgacacttttatctgcatgcgccgtcgtgatcccttctgggtagagaaagatgctccagtcgtagtcgccaacgctaaagttcctcgagtggacgcgctcgccggcgcccatgccttcgagcagtga

SEQ ID NO: 29795 - DNA, 807 bp, Zea mays
  Peptide Sequence Number=SeqID_71574
atgaagtacactcaagattttcttaagaggtttggaatgaaggatgccaagcccacaaagacaccgatgggaactgacggacatcttgacctcaacaaaggagaaggacagcgccgcctgcgccactccgactgcagtgccactcgacagagtgagtctgacaggcaatcaggccttgccaaaggcgccacggcgaactctgctccgcccgaccccagggctcggactcgggctaagacccggaagacggcgaactccgctccgcccgaccccagggctcggactcgggctaagacccggaagacggcgaactccgctcagcccgaccccagggctcggactcgggctaagacccggaagacggcgaactacgctccgcccgaccccagggctcggactcgggctaagacccggaagacggcgaactccgctccgcccgaccccagggctcggactcgggctaagacccggaagacggcgaactccgctccgcccgaccccagggctcggactcgggctaagacccggaagacgacgaaactccgcctcgcccgaccccagggcttggactccgccctggcctcggccgaacgacttccgcctcgcccgaccccttggctcgggctcggccacggcaacagaaggcagactcaacctcggcttcggaggaaaccccacgtcgccctgcctagggcacagaccgccacgtcaacaggaggcgccatcatcatcctaccccgaatcgactcgggtcacggagaacaagaccggcgtctcatccggccagctccgccagaggggcaatga

SEQ ID NO: 29796 - DNA, 282 bp, Zea mays
  Peptide Sequence Number=SeqID_71575
atgtcgggagatcacaccaagagggagatcgtgaccggcgaaaaggccacaagctcggggaggactctttcaagagagtccggcaacaaaaacaaggaggaatcctcttcctccaccaagtcgcttcggagtggtgacaagaagaagaagatgaagaatgtggtctactacgagaccgactcttcgtcaccctctaggcgactttcaaaaaggccacctgttcaggtgaccccgaaggacgccaagtcggtgatcaaaggagataaacgggagcaaaaataa

SEQ ID NO: 29797 - DNA, 498 bp, Zea mays
  Peptide Sequence Number=SeqID_71576
atggctgccatcatcaccagcactagggtcggttgtgttatcatcactgtcttcatcctcttcttcctcttcgatttgatcggtgttatcatcaccatgaccgcttctagccggcggtttaccgcgcttagccgccgctgcactgcaggctgcagcggtgacatcgtgcagggctgtgtagactgcaggtctgcagccatcagagtcggaagcccgcaccccgcacgtgtcctcaggtcgcccgtgcggtgggcaagaacaaccctgtccctcaacttgctcccggagggcacactgtccgacttccgagaacggcaggctgctgctgcccttcaaggtccagatgcatacatacaccgccagcacggttgcatcgcagtcatcacaccagcagctgaacaaacaggcatggccgcatgggctgcaagcatttctgtgaaaaaatatgttacatttcagatgaaatcaatattgtcccgttatacaaatgggaagtga

SEQ ID NO: 29798 - DNA, 1059 bp, Zea mays
  Peptide Sequence Number=SeqID_71577
atggaggtagtcaatggtttgatatcatcaagattgatcacagattggctccaagaaaccgcccttgagcagctctcaacaatatcatcatacctttctgttctaattaacaatgccaaattattgaaaggaaatgttcatttgttgacttcagctctaagtgtgattacatcaacaatgaggttgtctatgaaaaggaagatataccaaccacattttaccttgtccctccatggtgtatttaatctgtgccaaactattggtggtagctcaagaagtacagagcataagcttgtaatggaacttggtatcgatgccattctgatgaatggtcctataccaattttatctgaaatggataagtcaagaatatcaatggttgtttcatgggcaacttcaagcatcttctggttgtactctaaccaaagatcgctgttggaaatatcctgcaaagagccaccaagaaatgagtctctactttcaaagattttgcgcttgttagccgcttctgtaatacttggaaagatatctagcatctttcatggaaagagtgtagatcttgcagggaacaccagtgaaactctttgctctttcttggacaatgcatatgaaagggctgaaacggcaaagagttgcagtgtgaatgatactctagctgtcattatactacaccttcaagaccatatgccaaagaacagtgattccttgccatcagttattgcagccctttgcttgttgcttcttgacagatccatgaacaaacacctggccaacaaccgagggaaaattgaaatgctttgctcaaagataggctgcccggctgaatcaaatcctgcatggagatggcattactatcaaccatggaaggattctgctttgcagcgcacggggatggagcgactggaagaagagcaggcctgccgaagcctcctggtcctattttccagtgccttcagtgcctgcctgtcagagttcccggtgttgtccctagatgatgttgagaagtctggccttttccagtgggaaagagacttaatggctaaacaatcttccacttag

SEQ ID NO: 29799 - DNA, 1872 bp, Zea mays
  Peptide Sequence Number=SeqID_71578
atgggaagactgttacatggtgaaggcactggttctggaggctctcactcggggcaagtgagttttgcgaagcggggagacccgcccccggacgacgaacacgagaagcagcaggccaaaccaatcccgttcccgtcggcctctagcaggtcctccccaaatcccccgcgatccccgaaaccctaccctccagcgccgcaagcccgcaacacgacccttccgccacctccgtcgcgctcccgcaatccaggccgcggctcggaggccgtggcggcgagtaagccgcggaagaggcaactggtgatggagtccagcgattccgaggccgacgagttctgcagctccacgcggcagaatgctagtggtgccgcgtcgttgggcaatgctggtgtcagcagccaaggcagtggcgatcggtcggaggagaaacctgtgacttctagtcctgagaagcttccaggggttaagtccagtgatgtagatggttcagacaagaaaacgggagttcagctggagagcagtagttcgcagcctgctgtcaagaggatcagagttgagactgtccatggtgatggcaatggatgcagtggaggcgcatctaagtgtgggactggtggaaaaatgctgcctcgggggctcccagcatggcggtttgagaggccagaagtaaggggagggcgtgttctggatgacaaaggtggggtgagtatgaaagcaagcagtgcttcaaagatgaaggagcaggtatcaagtttgggtgacaagagacaggcagagctgcagaaacatgaaagaaggacaccattgaagactgatcagggcaaagcaatcgattctggccaacaggaggttttaaggttgcaagggaaaaggggtgttttaaggatattgccaaagaatgataaggtgaccagggatactggtgatggtaagattctgtcaaggcaaactgaggtggatgaggagactggtaatggcaggattccaacaaagcgaggtgttttaaagctcctgccgaagaacaatggtgctgtgatggagagtaatgaatgcaagcttctgtccaagaaggttaaggtggatgaggaaactggggatgacaagatgccaatgaagaaaactaaggtggttgataaggagaccagtgatggcaagattcttgcaattacaactaacttggatgcagagtttggtggccataagttgccaatgaagaactgtactgtggacatggaaactgttgctgggaagtttcagcaaaagaacagtaaggcagatggagaaaccaaagggagatataaaggatatgaagagaaaagtggcgcccctgcagaatttcagaagcatgatgcaaatggtgagaagagagttctgggaaagctactctctcccgttgcgctgaggaaaagtgatccaagcgtagtgggagtttctttgggccagagaatgaaacaacaaaattcaaagcaacaactgaagaactattctctgagcttgaaagatgatagcactaaatcaagtgaacagaagaatctgaaaaaaagattgcttgagcataaagggtcatcagagagtttgtcaaagaaggcacaactgaaagctgttgatcagcaagccacatctggccctgtgctcaacaagcttgaaaagaagccaagaggaggacccctcaacaaacataagcaggatctcaggaacaagataaaacatgtgcttttagataatgggtggaaaattgacctaaggcagaggaaaaacaaagattatgaagactcagtctatgtttctcctaccgggactggctattggtcaatcactaaggcttatgcagtttttccaagaacagtttcaaaatatgggtcgctcatctaa

SEQ ID NO: 29800 - DNA, 219 bp, Zea mays
  Peptide Sequence Number=SeqID_71579
atggcgcggagtttgttgagaatgaggacacagccgccgcggcacgcaacagagagaaggagctggaagaagccccctcccgatcctgcagcatcagccccacaggcagtggcacagggcgagatcgcgcctggacgagcagggtcagcagtgcggaacaaggaaatgggccggccaacggggaattcggcccaggtcaggtacggttatggcaagtag

SEQ ID NO: 29801 - DNA, 342 bp, Zea mays
  Peptide Sequence Number=SeqID_71580
aagtcagagcaggcccagaaggcgcaccggacagtgcacaggacctgtccggtggccccgctgtcagaatctccaacggtcggaacccaacggcctggtgacgtggctggcgcaccggactgtccgagagaggaggaggagttggggaggggaagggagatggacgcgaccgttactcggcgtgggaaggcgaaggggaaggagatagagcggcacagaagccggagcgatgtcgaggagccgggcggcttggctgccgtggtagcaatgcgtctgcgtgctcgggctcatgttcccgtgcggcggcttgaagggcaaggtcgggtggggcccacccgttag

SEQ ID NO: 29802 - DNA, 432 bp, Zea mays
  Peptide Sequence Number=SeqID_71581
atgcggaggccggcgcgtgggcccctcctgtcagcattatcctctccgcgcagctcgggattcagtttcctcttcggcattggaaacgaaatatctgcaacaaactctggggtatataacacacgagcctctcgccctcgctcgtcaacaccagaaagccagtcccaaaaccaaaagatcccaggattagtttgcgctggtgtctgggcgccgggccaatggatggccgtgggcggcaatggcaccgccggctgtgcaggacatgccagcggccaacgatggggtgcggaagtcaccggcgtcgttgccagatgggaagaagaagggcctgtggccgtctatcgcgaaataaacgatggaggtcccggatggattcctcctcggtgcatctgggtggttgcctggctcggccgcggcaaggatcgggagtag

SEQ ID NO: 29803 - DNA, 414 bp, Zea mays
  Peptide Sequence Number=SeqID_71582
atgtccggtgcaccagaggactccagtgcaaactcgtcgtcttcgggaaaatccagaggcaactccactataattcaccggactgtccgatgtacaccggacagtgtccggtgctccaaggaagagcggcctcaggaactcgccagcttcgagaaactgcaacggctgctccgctataattcaccggacatgtccggtgtacaccggactgtccggtgtaactgcggggcaacggctacttctggcgccaacggctacctgcggcacatttattgggcgccagcgcgcgcagaggtcaggcacgcccatgctggcgcaccggacactctacagtacatgtccggtgcgccaccggacatccaggcgggcccagaagacagagctccaacgatcggaacccaacggctttggtga

SEQ ID NO: 29804 - DNA, 576 bp, Zea mays
  Peptide Sequence Number=SeqID_71583
atgcgcggcgcgcgggtcctcctcgccggggcgccgcagccgctggcgtcggacccgtcgctggacgcgccgcagcgcgcgcagctggagcgggcgatcggggcgaccaccaccgtgctcttcgtcgccaccgtgtcgtacgtcgcgctcagcgccatcttcagctgcctctgctccggcggcgggtcgtcccggcggcggcagcaacccgacggcggcgatacccggccgcagctgccgtctgccgctgccgaggagaccaagcgcgcgctcgaggagatccccgttgtggtggtggtggcgcaggaccccgctgggagtggcggcggcgccggcgccgaggacggctcggaggagccaggggagtgcgcggtgtgcctggcggagtacgcgggcggggaggaggtgcgcgtgctgcccgcgtgccgccacggtttccaccgcgcgtgcgtcgaccgctggctgctcacgcgcgcgcccacctgcccggtctgccgcgcccccgtcgccgcgcacgccgagccgcccgacgccaaggaccgctccacgggcgatgtcgatgccgcgtttccctaa

SEQ ID NO: 29805 - DNA, 199 bp, Zea mays
  Peptide Sequence Number=SeqID_71584
atggctttcctcaccatcctcctcctcgcgcgcatttccagctccattgccatctcgtccaactacatctcaaggagcgccgagcagcagggcgcgcagccgttcctcacctcgccctccggatcgtacgccgcgtacctccgccgcgccgtgacggcgccggcggcctcgggcggaggacgccgggcttatggtccaa

SEQ ID NO: 29806 - DNA, 273 bp, Zea mays
  Peptide Sequence Number=SeqID_71585
atgcagtgcacaacttcagctgcaaaagttcaggataacacagatgcatcgtcatgttcactttcaacagacaagtctaatgctgcagcattggagtggcagaggatacagaaaaagatgaagatgacactaccacgttgcaaagggcatagtgaaccatgcattccgaggtctgtgaagaagggccctaatataggccgtttgttctatgtctgtgctcgtgctcagtgcaccaggaaaggtgaacgtggcgtggcccctgatgtcatttaa

SEQ ID NO: 29807 - DNA, 243 bp, Zea mays
  Peptide Sequence Number=SeqID_71586
atgtcgctgcgtccgagcgagcgggtcgaggtacggcggaaccgctacaaggtggcggttgacgcggaggaggggcggcggcggcgcgaggacaatatggtggagatccgcaagagccgccgtgaggagagcctcctcaagaggcgccgtgaggggctccaggcccaggtccctgcccctccctccggggttgagaagaagatataccaggagttttattactttatgcttgtgatttcttag

SEQ ID NO: 29808 - DNA, 426 bp, Zea mays
  Peptide Sequence Number=SeqID_71587
atggcaggggcttggatgggagatagcctcgctggtctgggcgggctcgccaaagcaggggagcagggccatggccgtgccaccgcggctggctggctgagcgagggggcggccacgcgggttgcgccatggctggggcacggccgcagagggctggccatggctggagcacgaccaccctgctccgtgtcgctgccgcgcaaggaagatggcatcgcaaggcgggatgcagtcggggcatgtggggcacaacggctgggagacaggccgcaacgcaggctgccgcgccgtaaagaaaacgaagaaggatgtgccagacttctcacctcacgacacagcctgacggagagagctcgtggatgcctcctggtgaagctccggcacgcggtgctcaacgacggcctggccgacgacaatttgcggtag

SEQ ID NO: 29809 - DNA, 1713 bp, Zea mays
  Peptide Sequence Number=SeqID_71588
atgggcgtgttccctgtgttcgtggtggacggcgagccgtcaccgctcaagtcgcaggcgagggcggcgcgcttcttccgaggctccgggatggacctggccgcgttcccgagcacagaggcggagtccagtgtgaccgctgcaccggtcaaaaggaggaatgctgcattcacgcgatgcgttgaggagtgcgtggaactgcttgaatatcttggcatgcctgtactgagggcaaaaggtgaagcagaagccctttgcgcccagctgaataatgaaggtcatgtaggtgcttgcatcactgcagacagtgatgctttcctcttcggggctaagactgtcgtaaaggtcctcagatcaaattgcaaggaaccttttgagtgctaccacatagcagatattgagtctggtcttggactaaagaggaagcaattggtggccatggcgcttcttattggcagtgaccatgatttgcatggggtgcctggttttggcctggagactgcacttcgttttgtgcagctatttgatgaagatgaaattttagataagttgcatgaaattggtaaaggggtgtatccgttcctcaaaggatttgacaatccacatattgatgatctcccatcatcgtccaagaaaagcccaattaaatcgccgcactgctcacattgtggtcacccgggcagcaagaaaaatcatatcaaggatgggtgcaattattgcttggtggattcattagagaactgcgtggaaagaccagctggattcaaatgtgaatgtcctagttgtgacgaggcacgtgatctaaacgaacaaagacggcatgaaaattggcaaatcaaggtctgcaaaagaatagctgctgagacaaattttcctaacgaggagatcattaaattgtatctaagcgataacaatctggttgaagaaaagggtgttcccttgcttagttggagtaagcctgatgttgaagctttggttgacttattaagttataagcagaattgggaaccatcttatattcgccaaaggatgcttcctatgttatcaaccatatatttaagagaggtggcatcttcttcgtctacaccattgcctctttgtgatcagtatgagtttgattcaattgagcggactaaaataaggcacggtcacccttattacttggtgaaatggaagagagctacccgtggtatgaattctaatatgcctagcaagaagccagtaacggagggagaaacaagtagcgaggtagtggtgttggatgacgatgacaatgaggatacagtggtttgcgagtctccagagttattagatgaacctgatgttccacaagtgcttatggatgatggctgttgctttctattgactgatgaagacattcaacttgttggtgctgcttttcctaaggaaacagcaaggtttcaggaagaacagaggctgaaagaagcaagatcaagatcgcggaaatccaaaacgagcttagcagacagtgggtgcgagacacctaaaggtccgagacctagtggggtgcagcttagcatcacagagttctaccgctcgaagaaagggcaggacatggaatctgggaagaagaagcaggcgggagaggggcacgctgctgcgagggatggctcgagaaaatcctctgacagggacctcaacaacaagagcctgccgaagtccgttcgccgccgcctcctcttcgattgctga

SEQ ID NO: 29810 - DNA, 546 bp, Zea mays
  Peptide Sequence Number=SeqID_71589
gctctaaaacccagccagtacagaactgaagatagctttgccagacgccagctcttagacaatcattatcgaatgatcgctgtagtcctcaaatcttccctggttcctctggcctcctttataatatcttgtttattgttaattgcacttgaagattttggattgctatgcttggtgagtattctaaattcatcgactgattgggagcaacttcaaagatattccttaaagcaagggagcattgttgaatctcatgaagaggatgcttcgaggagagtgacaactgatgaaacggagagtcaagaggatggtcaagatcagtttgagagagccaaaactcaaaacatggaaactgcaatctcagaggtttttgagcaggtgattttattattgtctgctatgttgaattttgcttcacgatctggtggccaatttagtcgtaccatccgcttgctcaatgatggcgtgcgccaggtgttcgacaaaatgcagtggttgcttctcctgaacatcgatagtgtcctagagtcatgcagtgccccttaa

SEQ ID NO: 29811 - DNA, 697 bp, Zea mays
  Peptide Sequence Number=SeqID_71590
accacgtccatgcccccgctcgccccatccccgtgatgcccacgcttgccccgcccgcctgcaatccttccaccacgcgcacaatagcggcaccgtgcccttgccgcgcagcatccacccgccccatccccgcgaagcccacccctgtgcccgccccatccccacgatttggcagtgccgccggcacgtaccgacgtacgccccctaccctgcttgtgatgccctccccccacccccgagagcgccacccaggaaccaccccaccgccgaggcgacaccagagcaaggagcaggttatcgcgtgatctcgtggagccctctggcagaccgcgcgcaaagtaggaaggggaggactatgacaggctcagagcgctgcaggctactcgtgtccatggatctgcgccctctaacactgttggtcgtcatgggctcgctccccaccactctggtcggcaggcttgaaatggggccgacctgcgacctcttcgatccgcgtgacgcgtcggggttcactaaccttctggctgcgctcaccgttgtgatcatcgcggtcaccgcgtcatcgcccgtggggttcatcgtgctgcgcttcgtggcgggtctctccctcgccaactttgtcgccaaccagcactggatgtcgggcatctttgcaccctccgtcatcgggctcgccaacgctgtcacgactggctga

SEQ ID NO: 29812 - DNA, 195 bp, Zea mays
  Peptide Sequence Number=SeqID_71591
atggctcaccgccttagcgtacaatgcctcactgaccccgactaccatcgtgcagtgaccgcacttgtacccaccataaccgaaatgggagaccacgtcttaggccgcgtgagggataaagtctgcgggcaggttcactcagacaacgcatccccagggatcgttgtctataaaccatcatcattccgatattaa

SEQ ID NO: 29813 - DNA, 231 bp, Zea mays
  Peptide Sequence Number=SeqID_71592
atggtcgtgacggtgcgggttgtggaggcagggtcgtccgctgttcaaaagcggcgttttgtccggttgcccgggaactcggactcggtccgtagcaagcaagcgggcgtcctcgtcgttttgggcaggagtggcaagcgtcaagcgcaagtggtatcgggacactgcggcgacgcgttcgccgcacgcggttctggtgcgggagcctcccagctgctgcccgctctgtga

SEQ ID NO: 29814 - DNA, 144 bp, Zea mays
  Peptide Sequence Number=SeqID_71593
atggcgccctgcaggggatcctcggcgagcagtgccatggcaaggttggtgcagccgctcgctactgctggccgtggagcagggggaggcgctagagggaagggacgcaatgggaaggagctcggccagcgtccaagcagggag

SEQ ID NO: 29815 - DNA, 411 bp, Zea mays
  Peptide Sequence Number=SeqID_71594
atgggtggcgtcgctcttgcccgtggcagggagctcaccggagatgaggcggtctcgggttacaagggggagctgggtcatattgcaatgaattgcccaagtaagaagaagaagaagaaggatggagaggacaagaagaagaagagattatatcacaagaagaaggatgtcaaagcctatctagtggaatgggattcagatgcaagttcggatgatgatgatgatgatgactcttcatccaagcttaatgtcggcatcgccatcaaggaggctccttcactcttctcatctccacattgtcttatggcaaagggtgatgccaaggtaaaaataatagatgatataaatgatattgatgatgatgatgaggtagatgatctagatgatgatggttattcatttatgatctag

SEQ ID NO: 29816 - DNA, 523 bp, Zea mays
  Peptide Sequence Number=SeqID_71595
ggtccgtgagaggaagacaagggactttaaccaagttaatcgcattaaggatgaaatggagcacctcttggtgaaggaggatgagatcaaacatatacggcaagagatccaagaatctgaggttagagaggcattagaaagtatgaaagtgggtaagacaatgggcactgatggtatctcaattttgacatggagatgccttggggacatagctataattgagacaacatcatatgctgacgctattcaattttatgcagatatgaatatccaatcgcccccatccatttacccaccaaagagatactgtgacttaacaggttttgagggtgggaaggtcccaggtgggttatcccacttttggatggagatgcgggttcaactcgcccctagaaatttgacaggcagggtcgttccaattggattgagggctcttggtgctagagtgcaagcatgcgagaagagagaggttgatggtgttggcgagctcccaggagaagtcggcaggccttggggccagtaa

SEQ ID NO: 29817 - DNA, 447 bp, Zea mays
  Peptide Sequence Number=SeqID_71596
atgtgtttgccgtgcgctccggcagcagcgattccgacaggccccacggcggtcgcaacccagccagcggcgagaaccctgggacaaggacaattactagcgtcggcgctacagcaagcggatcaggccaagaggacctgcttgtggccaccaatattacagaggcgtgggtttgtgctagaggatgctaaaggtctatcacttaatggggacctcaatgtgcatccagtgattgcaaggtcttttcccctacacacccaatctttttggtgtgggttcattgcattaggagtgaaggtcgtccatcaatatggtaatttgtctataagtgcggcttatttcaaatgcaagttacggtggtatcgtcttcaagcacacctcttcaagcagcagttgccgatgttcaaaagttcacaggatgcgaagaggattggaccaaggcaatga

SEQ ID NO: 29818 - DNA, 204 bp, Zea mays
  Peptide Sequence Number=SeqID_71597
atggcagaggtcgatccacagcggaggaagactcctggcgagcaattaatggcgttggggtcaggatctccccacgacaacctgtccgatgacacccccacacaccgacgcccaccctggttcccaacaccacggaagaacaacaactatgagcaaccgaggtggcgacgcttcactccttcatgggcggtgtctggtggctag

SEQ ID NO: 29819 - DNA, 267 bp, Zea mays
  Peptide Sequence Number=SeqID_71598
atggaggacattgagtgcctacataggaaagcgattgtaggattcccagagccaaatgaggcaggggccgtagaggagatgtcagagttgggagagccggtgggggagttccaattgatagcagtcttccgaggggtccttgcggatcagcatgggttcaacggtaggaggggacaacttcctagtggaactaagcaaagtcatagcagggatacccgaccccgtctcatacgtagaatcaccctcgataagttgtatcttcgctga

SEQ ID NO: 29820 - DNA, 948 bp, Zea mays
  Peptide Sequence Number=SeqID_71599
atggagacagaaaatgttcaagcaattcctgaaggcaatcaagcaccaaaaaatgagttatcaaacagcaacaatggtagtcctgctatggagatttcaccaaatagtgtgcctgataattctcgtcttactgtaagtgatcagatggctacagcatttgttactgtggaatccccagatgctatttcaaaagtagctgcttcaaggatagtttgttctctcccatatatatccaatgaaatattgaaagaagcacaaactcttgagaaggcagcaccttattctgctgtgaaaagtgctagtttgaatgaaaatgaagttgatccaattcatgcatatgctgccaaagctgttactgagcatccagaccaaaatgagaatcttgtaccagtgaatgcagatgaaatggctgatgaaggcttgaatgagatcctacctgatgacaaggatgacaagaaagattgtcaactggaagttagtagtgggcctgtcattttgaatgacagttctactcctgtctatcctgaatttagcaatttcttttatgcaaaagatggaacagaagtttctaacaatgcagtagattcaaaaaataacgcagaacagcatgctttttctaatcagggaaaagggaacatggaggaatgtaaagattctgatggaaacaatgcaagtgaatcgagtgttgcccaaaagctagtgtctgttattgtgctccctgcttcagacacaggcgattttagaccgcaaaaatatgattgggaggccttgtaccgaagatccgaaaaacatcttcctgaagctcgttatgaaaaggtggatctcatgcatactaatgaggtcctaacatgggattatgattttgctaatcacctcactaggctatgtggacttgcaaaatgctctagcaatgaattcttgttggttggggcagtgaaagtcgcctag

SEQ ID NO: 29821 - DNA, 369 bp, Zea mays
  Peptide Sequence Number=SeqID_71600
atgcctgagctcctcccctcacatgtgggcggtatggacgggggaaaggatttctgccccaccgtggctgatcatcgcggcgtggtagctgttcatccgggcgacggtggtcggccatgttcttggcaacaacctgtgcttatgttggtctggtggcacccgggaatggcatgggaaaacccttctatgcagctttccctagaaactggtcttcaaagtaatcgttgtccctggccgtacgatatggctctaagaatcaaggaacgattatccccttcggttccaactgtcaaggccgatcttgctgcctatggggtgattcaccagcgtatgagcctggcatcaattgcttttcaatcccgcgcttga

SEQ ID NO: 29822 - DNA, 159 bp, Zea mays
  Peptide Sequence Number=SeqID_71601
atggcccctaagaggaagagacaaatccaatctcttgcaccttgtcgaaactggggttctgccgccgaaggcgttgtgttcttggagaatctagcgcgggtcactgttccaacagaggacactcatgaggctatcgtcttcgtgcctttcctcacctga

SEQ ID NO: 29823 - DNA, 282 bp, Zea mays
  Peptide Sequence Number=SeqID_71602
atgggagtcggggctaactggtgcaccacatccacaccagcgaggaacgacgcctcggtggacaaccgcccagatctgaacgtactcagcgccttcattttggttaccactaacgagaccctagtgcacaagctagggctaaaaatcccgcagatagcaaaagaacttctcggcatcacaactagccacacattgggagaagatgcggtgggggcgatcttcgaccaccgagggcagaaggccaaatgcaataaggagtcggacgagggttctggcacctag

SEQ ID NO: 29824 - DNA, 1191 bp, Zea mays
  Peptide Sequence Number=SeqID_71603
ccgctggcagacaaattcgacagagcagctcgcctgctggccgcaatccgtccgaccatggcattgctgccgggggcggcgcggcgcctcctctgcagcctcttcctctgtctctggctgtccacgctcgcgcgtgccgcgacgcgccgctacgagtgggaggtcagctaccagttcaaatcgccggactgcgtgcggaagctctccgccaccatcaacgggcagacgcccggcccgaccatccgcgccacgcagggcgacaccgtggaggtgaaggtcaggaactcgctgctgacggagaacctggcgatccactggcacggcatccggcagatcggcacgccgtgggcggacggcacggagggggtgacgcagtgcccgatcctccccggggacaccctcacctacgccttcgtggtggaccgcccggggacgtacatgtaccacgcgcactacggcatgcagcgctcggcggggctgtacggagtcgtcgtcgtcgtcgtcgcggcggcgcccggagccaaggccgacgacgcggagccgttcgcctacgacgacgagcaccacgtgctgctcaacgactggtggcacaacagcacctacgagctggccgtcgggctcgcgtccgtgccaatggtctgggtcggggagccgcactcgctcctcatcaatggccgtgggaggttcaattgctcggcggcggccgtgccggggacctgcaacgccaccagcccggagtgtgacacgccggtgttcgccgtcgtgccgggacagacctaccggtttcgcatcgccagcgtcacatccttgtccgctctcaactttgagatcgaggggcttatgaagggtcagatggcgttttgccctttcgcctttcgagtgattgtggcggtcgtcgttcgcttgctggtcactctcgaccttctcttttctgtctcttccttgagtgtacctccgaccgagttgtttgacggatctcaggttcatgggatgtcgcgctccgtgggccatgagccatggatggtcgccgccgatcaggcggtcacactaccacccgtcgggctacttcggctgggctccttgtctttctccctttccctcatgagccgcggtggcgctgctgatggaggagatttgctccagccaccatctccgggacatcattggtccacctacatccctttcgaatga

SEQ ID NO: 29825 - DNA, 133 bp, Zea mays
  Peptide Sequence Number=SeqID_71604
atggtgggaggcaaaagcggcgaaggcaagcctgacaagaagagccgaagcgacaagaggatgcatcctccgacccctctatcggatgacttcggtgactccaagtactcagaggagaggttctcctctgaag

SEQ ID NO: 29826 - DNA, 333 bp, Zea mays
  Peptide Sequence Number=SeqID_71605
atgaagctccctgtaatagcttatgctgaaaacaaatggttaattatgttttttgagggccttcggaagaggaaggcccccaacagaggggctaaatcgacacttcaggcttcggaggaaattctggttgtacccatagctgaggtgccggttatgcctaaggaaattccttctgtaggaaccaaaggggcaaagattgaggatgctttcgatttgatagctcaaaatgttgttcccttgaggccgcttttagaaagtgaggaggatgaggaaaagcggatagctccagtaatgagctctttctttgatattgacgacatggagtttgagtaa

SEQ ID NO: 29827 - DNA, 339 bp, Zea mays
  Peptide Sequence Number=SeqID_71606
atgtgggatacaggttctgcattaaaaaaagatattttaccaaaccaaggtatgatgaagggttatcacccttatcaccttcagcaggatgattgggactccctggtgtgggaggaccatcaaaggagttggctcagcccggttaggtgtcttggccttcatcgtatgagagcttctctgctgcctagcattccaaagcctgctttgcctttgaagcttactttgatcgcttttttccacctccaaactagccttagccagttgaaaggaggtgatgattttgttccaaagccaaaagaggacaaggttatcgtgcttcgaagtaacgaatcaagctga

SEQ ID NO: 29828 - DNA, 195 bp, Zea mays
  Peptide Sequence Number=SeqID_71607
atggccgacacagccacctgccacgtcacctggagtggtttaaaaaatataaaccctgttctagaggcttcccatccatggagggagccagagaggggtttatatttttatgaaaaaatacttaagaacgttagccataccgacattcttaaagccatgtcagctaagaacatccgtatagctgaacgttcttaa

SEQ ID NO: 29829 - DNA, 309 bp, Zea mays
  Peptide Sequence Number=SeqID_71608
atgaccggagatatcgtctccgacaagattattcttctcagagaggcgtctccgtctccagaatacggagcagccagtgtattctctttcgatgttgtccttcgtccgtctcgtgtggaaagcgccataccagctgcagcggtaaggctctcgcgagtggcatccccaacattcggtggcgttggggctcgccgctcagacgctcacatcaagctcacgacagccgagctcaagagcgagagcggcgcatggggaaggagactgggacggcgagacatgcacttctacactgatgcttttgggaagtaa

SEQ ID NO: 29830 - DNA, 471 bp, Zea mays
  Peptide Sequence Number=SeqID_71609
atggcgcctcctgttgacgtggctggtctgcgccctaggttgggcgatgtggaagctcctccgaagccgaggtcgagtttgtcttccgtggctgaggtcgagtccgagcccctgcccgagtccgagccctgggtcgggcggagcggagttcgccgtcttccggggcttagcccaagtccgagccctggggtcgggcggagcggagttcgtcgtcttctgggacttagcccgagtctgagccctgggtcgggcggagcggagttcgtcgtcttccgggacttagcccgagtccgagccctgggtcgggcgaagcggagcttcctatggtgcctgcggccgggcctgactgcctgtcagcctcactctgtcaagtggcaccgcagtcggagcggcgcaggcggcgctgtctttttgtcaggccggtcagtggagcggcgaagtgacagcggtcacttcggctctgtcggctga

SEQ ID NO: 29831 - DNA, 1857 bp, Zea mays
  Peptide Sequence Number=SeqID_71610
atgaccacgtacacgccgcggctccttggtctccccgacggcgtgtggcggccgcgccggggcggcaaaggggaagaggacgacggggcgggcgtggtcgtcggcgtcgtcgactcgggcgtcgaccccgaacaccccagcttcgcgtacgcgccacggccacgggcggcgccggccgatccgcgcggggacgacggtggcccgttcgccggggcgcgcggttgcgtcgtcggccccaggttcccgcctggctcgtgcaacggcaagatcgtgacggcgaggtacttcgctgccggagcggcggccgtgcttccgctggacccctcacgcgacttgtcgccgttcgacgccgaggggcacggcagccacgttgcttccatagcggcggggaaccgaggagtgccggtggtcgttggcggtgcaatgtatggcttcgccagcggcatggcgccaagtgcaaggttagctgtgtacaaggctgtatacccggctggaggaacaatggctgatctcatcgctgccatagatcaagcaatggaagacaaggtcgacgtgctggtactgtccattggaccagatgagcgtcctgctagcgaagtcacgttcctcagcatgctggatgttgctctgctgtccgcgaggagagccggcgtgttcgtcgctcaggccgccggcaacagcggcccggctgagtcttccgtcgtctcctacagcccgtgggtgacgaccgtagccgccgcgaccactggccggagctacacgtcgtggctagtcctcggtgatggtcgccgcattccgggactcggattgtccgcgccgacgatccagtccagacttgtcgccgccaaggacgccgcggtgccggacgcggccagcatggaacacgcggaggaatgccagcacgcggaggcgctcagcttccgcaccgacgtgctgcgcggcagcatcgtcgtctgctctttctcgcgagggttctacaacggcacgtcgacgttgagcgccatccgcgacgtggcccaggctctcgggttcgctggcttcgtcctcgtggccgacgcgcagcatggcggcgacttcctcgcgcagccgctccctttctccgtccccggcgtcatggtccctcgggtcgccgatgctatggtgctatggtcgtactacgccgcgcacacggtgtacggcggcagcgcaaccgtgttcggagccacagcggcgatcacggaaggaagagtcgccgcgtttacggacgcggcgccggtggtggcgcggtactcgtcgcgggggccggacgtcattgacagggagtcaacgccggcggacgtgctcaagccggacatcctcgctcccggcgaccagatcggctcgctgcacacggggacgccgttccactacggcgccggattcgtgaaccccgccggcgcactggaccccggcctggtcgtcgcgccagagcccgatgactacaccagcttcctctgctcgctgccacagctcagccccgacgacgtgctagcagccaccggtttggcctgccagacgccactagcttctccggtagacctcaacctgccgtcggttactgtctccgcgctgcgtggctccctattcgtccggcgcagggtgacgaacgtggcgagcaacgccgaaacctacctctgctccactctgccgccggccggggtgagcgtcaccgtgcggcctgcgtggtttgaggtggcacctggggaaactcaggaggtggtgatcgagctgagagtgaccagggcgtcaaacgcgttcagcttcggtgagatacttctcgccgggagcttggaccacctcgtgaggctgccgctggccgtgcgaccccttgccacatga

SEQ ID NO: 29832 - DNA, 363 bp, Zea mays
  Peptide Sequence Number=SeqID_71611
atggccgagccggcctggctcaagatcgggcatctaccgcggcggcatcgtgcccgtcaactaccaaagaaaggcggggtgaggttcagcatcaacgggcgcgactacttcgagctggtgctcatctccaatgtcggcggctgcgggtccatccagtcggcgtccatcaaggggtcgcgcaccgggtggatggccatgtcccggaactggggcgtcaactggcagtccaacgcgtacctcaatggccagagcctgtcgttccaggtcaccagcagcgacggccagaccaaaaccttccccgacgtcgcgcccgccagctgggggttcggtcagacgtttgcgacctcgcagcagttctcttag

SEQ ID NO: 29833 - DNA, 283 bp, Zea mays
  Peptide Sequence Number=SeqID_71612
atgtccggtgagccagcggagcaacggtcactacgcgtcaacgatcacgccaagagggagatcgtaaccggcgacaagcccacaggctcgaggaggactctatcaagggagtccgacaacaaatacaaggatgaatcctcttcctccatcaagtcactaaggaagggtgacaagaagaaaaagaaaatgaagaaagtggtctactacgagaccgactcttcatcaccttccacatccggcgccgagtcgacaacttcaaaacgccacgagcgcacgaagtata

SEQ ID NO: 29834 - DNA, 2163 bp, Zea mays
  Peptide Sequence Number=SeqID_71613
atgcccatccaaactccatttcttcttctattccttctcacgaccaccgtggccatcttactctgcccagcggccaccgtcggggacgacattgccaccaccggtgcagctggggacgccgtggggacgtacctggtggtcgtctgccgagccaatgggcccaaggagggcggcgagaagctgcgcgaatggcacgcctcgctgctcgcctccctcctgaacaccagcaccactacgatcctcgaagaggcgcggtcgccggagggcgggcagctcgtctattcgtatcagcatgtcatcagcggcttcgccgcgcggctcacgacgggcatgtgggcggcggcccgcagcatgggagagggcatcatcgtcggcgtcctcgacaacggcatcgacccgcggcacgcatcatacagcgacgagggcatgccgccgccgcccgccaagtggcggggcagctgcgagttcggtggcgcgccgtgcaataagaagctcatcggcgggcagtcgctgacgccgggggagcacggcacgcacacgtccagcaccgccgtaggcgccttcgtcagcgacgtccagatgttcagggccaaagtcggcgcggcctccggcatggcgccacgcgcgcacctggcgttctacgaggtgtgcttcgaggacacgtgcccgtcgacgaagcagctgatcgccatagagcagggcgcgttcatggacagcgtagacgtgatctccatctccgccggagacgacacgcagaagcccttctaccaggacctcaccgccgttggcagcttctccgccgtcacgtcgggcgtgttcgtgagcacgagcgccggaaacgccggcccggactatgggaccgtcaccaattgtgcgccttgggtgctcaccgtggcggcgagcaccatgacccggcgcgtcgtctccaggatcaggctcggcaatgggctggtgatccaaggcgaggcgggcaggaggtacaagggcctcaaaccagcgccgctcatctacgtccaaggcgtgttcgaagacggcgcgctcaacaccgtcgacgtccgcggaaagatcgtcttctgtgaccgctccgaaaccgccaccatgcgcggcgagatggtccgcgctgccggcggcgtgggcatcatcatgttcaacgacgcctccgagggcggtgtgacgaggttcctggggaacgtgtccatcgcggcggcgcgcgtcagcgaggccgacggcgccaagatcatgtcgtacatcaactccacggcgaaccccaccgccaacctccacttcaccggcgttatgctggacccttcctaccagccggccatcgccgaatactcctcacgaggcccctgcaacatgtcgaacctcggcgtgatcaagcccgacatcaccgggcccgggacgagcataatcgcggccgtcccgggcgccggcggcgggaatggcagcgcacccagccacaccttcggcttgctgagcggcacatccatggccgcgccgcacctctcggggatcgcagccgtgctgaagcgagcgcgcccagcgtggtcgccgtctgcgatcaagtcggcgatgatgacaaccgccgacgtgacgcacccggacggcacgcccatcaccgatcagatcaccggcaagccggcggggcccctcctcatgggatccggcatcgtgaacccgaccaaggcacttgacccgggcctcatctacgacctctcggcgctggactacaccacctacatctgcggcctcgggtacaacgacaacttcgtcaacgaaatcatcgcccagccattgcagaacgtgagctgcgcaacggtcagcaagatcgagagcaaggacctcaactacccatcgttcctcgtgacgctcacggcggccgcgccggtggtcgaggtgaggcgcacggtgaccaacgtcggggaggctgtctcggcgtacacggcggaggtcgtggcacccaaaagcgtcgccgtcgaggtggtgccgccgaggctggagttcggctctgtgaaccagaagatggatttcagggtgaggttcagcagagttggcgccgccgcagacggcggtacggcggaaggaagcctacggtgggtctccggcaagtactctgttcgcagcccaatcctcgtcctcgatggaacgcagaatttggtctag

SEQ ID NO: 29835 - DNA, 360 bp, Zea mays
  Peptide Sequence Number=SeqID_71614
atgcggccacggccagcagcgacatggccggggattgcggctaggggctccgtccagctgtgcatagagaagggagaggaggatagatggagttcacctcggtgcggacatgacaatggtagggcgaggatggatggcgagcgcgtcagggatcgggaggcggcgctcagcgcggccgttccggcgtgcaaacactctagcggactaattgctttggccttcagatgttcacaaccaactgatgcaattcttgaggatcccttggacctgtgggttaggacccacacacgcttttgttgtgccactctgattttgttggttgatgttgatcgcattgtcttcattggggttagcgactaa

SEQ ID NO: 29836 - DNA, 252 bp, Zea mays
  Peptide Sequence Number=SeqID_71615
atggcgggtatagctgggattgcgcatcggagcaatctcctcgccgcggagctaccgaccgccacctgggccaccgttctggccgcgggcactgctgggtctgggcgtgcgtcaggccgtgccgaacatgtcctggccgtcgcggggcattcggatggtcagttggcgggaaaagttctcgccatagctgggttggacagcgatgccgctggacattggtcaggctccctccactacttcaatggacgataa

SEQ ID NO: 29837 - DNA, 177 bp, Zea mays
  Peptide Sequence Number=SeqID_71616
atgacctcattaatcattatgatacttattgattatgaaaaggacaagcatattgaagatgaaactcacagggtttttaatgggtatagatattttcacgggtacgggtttaggatggcaaaactcaacgggtttttacccgttgccatcaactacgtcgagattgtggaagactaa

SEQ ID NO: 29838 - DNA, 300 bp, Zea mays
  Peptide Sequence Number=SeqID_71617
atggaggaaggagaaggcgagcctttgggaagggtcttgccggcgactgtggagcagggtcagctgttcacggcacgcagcaacctggcggggacggacaagctccgacgagcaattattgaagcctcagtgcatcacttcgacagatacggccatgaccccattccaagggacgttatgaagctccagcagacctgcgttcgcctcaatcgccaatgtagaagagtgccctcggcaacgcgcgagtccgcggccatggcgagatccgtctgtggcacacacaactcacttctccgctga

SEQ ID NO: 29839 - DNA, 201 bp, Zea mays
  Peptide Sequence Number=SeqID_71618
atgactggttttaaagatcacactgacatttcccaagataatatccttaggccgattgttgagagtctgtcggccaacgagcaacaacgatatcaggatctcatgagccaagtgatggaggacgtgtgccaccaactcgccaaggttcatgagcaggaggaggaggaattcctatcgcaattcactgtggatcaccactag

SEQ ID NO: 29840 - DNA, 110 bp, Zea mays
  Peptide Sequence Number=SeqID_71619
ggacatggaaccaccaggcggttgttctggacagtttgaagactaaatatctccagtcatcgcacgagcactcaccattgtattcacgctactcgtcgccagggctctaa

SEQ ID NO: 29841 - DNA, 186 bp, Zea mays
  Peptide Sequence Number=SeqID_71620
atggctaaacacgcgcacacgccgtcgcgcggacctggccatggcaatagggtattcgctggtaatcgggaaagttcgaacatgggagttgagtttggagagatgacggccatggcggcgccgtgggcactctgtgccaccgtgtgtggagttggggaagagggtgttgaggtgatgttctgttaa

SEQ ID NO: 29842 - DNA, 1695 bp, Zea mays
  Peptide Sequence Number=SeqID_71621
atgagccaggtactgggccagcatgagccgttagacgctgatgtccctaacaaggtccaaccggaaccttggccgtggcgtcgctgtccgaacgccagacaggagacaggggagatgaaaaagaggcggcggtggtgtggaactagagatgtccaaacgggccgcccggcccggtccggcccgggcccggtgaagcccgtcatacgtgcaaacaaagagcagcaaaagaagaacaagtggggcgacagggacagggaggaggggaaggcagaggaaatggaagcctctttcttgaggaaagatggcggtgatcaagccagtgcggcgacaatgtccggcgagcacaggaacaagggccttgactgggatttgaacgactggaggtgggacgccaacctgttcctggccacgccggcggccatcgtgccgtccgagtgcagcagcaggaagctgagtcgagctcagggggagatcgacttcggcgtcgtcgttgacaagaggcggaggctctcgccagaggaggacggcagcgccggttgcagcaattctggggtagcagatggagacaacaatcatgtggtgcctgctcagagagggcggagcagcgaggaggagacacccaggaaaggtgccagttcgagcaccactccgtcctgccaggttgacggctgccatgccgatctcagcggtgccagggactaccataagaggcacaaggtgtgtgaagcacataccaggacgactgtggtctgcatcaagaatgtagagcatcggttctgtcagcagtgtagcaggtttcagcttcttcaagaatttgatgaagggaagaagagctgccgctcgcgtctagcacaacataatggaaggagaaggaaagttcaaccacaaactgttgtgaatgggaattccatgagtgaaaatcaatctctaagtaacacctcaatccttctgttaaaacaactttccaggctagagtctggtagctcctctgagccaatcaatcatcctaattctttggttaaccttttgaagaaccttgctgctattgctagcacacagtcatatcaagatattctaaagaatgcaaattcaaattcaatattgtcaaatgctggtaataatgctgcaaatggatctactgtgcatgagcaaactatacggtcaattccaatcagaggagaatcattagcagaagagcctccagtgaaaaggcgggtacatgattttgatttgaatgatgcttgctttgaagaagttgagacttggatggatcaaggaataacacccgatttcctaatctccctcttgcttaaacatatccccttcactattgggcgcgcagggaagaacccctggtgcattaccggtccacgctacgagagccgaacagataaaattgtgttcaagctgtttggaaaagagccaaaagattttcctgtagatctacgggaacagatccaacactggttatcgcattatccaactgatatggaaagctatattaggcctggttgtgttattctaactatttacctccgcctccctaattggatgtgggatgagaaaaagcttattagcatatccaatgatggactttggagaaaaggatggttgtatgctagggtacaggactgcctaacactgagttacaatggtagtcttattgttttgcattctcccctggcaactgggtaa

SEQ ID NO: 29843 - DNA, 228 bp, Zea mays
  Peptide Sequence Number=SeqID_71622
atggggtcgccctgtcagcgggccgctcttcgtccgcgcaaacaaatcatcgaagcttgggcgcaccctcgctcccacaccccgtcgtggtcaggcgttgccacatcccgggtagctaaagccctgccggatagaaggatagagcggactatcgcgtggtcggggaaatgcggtaatggcgccgtcgtgctcgtgttcacgggcgcggctaccggaatgcgctcgtag

SEQ ID NO: 29844 - DNA, 342 bp, Zea mays
  Peptide Sequence Number=SeqID_71623
atggaagccaactcttccacgctttcgacaaccctagccgccacacacccagaaaggggccaatttttctaccagcgcctaatgactgaaaatcgcccaaactccccagcaatgacacccgtggatcctaacagttctatgctactagtcaccgacgttcctccgcaagtgcttcttaaaaatcatgtagcaggctatttgttaaaggtggagtacatgctgcgatggtgggatccctgcatcctactccagttgccacactgccatttctcgctccacactctgctgtggtacctttctgtgaaggggtctacaaatacgccacagcttgggacgctttga

SEQ ID NO: 29845 - DNA, 189 bp, Zea mays
  Peptide Sequence Number=SeqID_71624
atgtcgcaccttaaaacctgcacagaatttcttcaaaattcgcagatagttagcatagaggaagagaagagggagtacaaaatccaaagggtgtatcgcacctcacaacaattcacaacatcaaccacatctcaagaactcgaaggttcttccaaaatccaaagagagaaggggcgagacaagcgttga

SEQ ID NO: 29846 - DNA, 233 bp, Zea mays
  Peptide Sequence Number=SeqID_71625
gcttcgaccatcaagagaatgaactcttcgagtgctacgaggctaaagatcctgagcatctgtttggtgaaggcaaagatacaaacgatcggagatacattggttctatttatggttttggttacgatgatgataatgatgtttcctcgatgaggaaatggttcacgggtaaagaagaaggcatcgaggttgatccccaggagttccatgacttcgacgagttcgaggattag

SEQ ID NO: 29847 - DNA, 156 bp, Zea mays
  Peptide Sequence Number=SeqID_71626
atggtgtttttgagaccattcagtattgaatggatcgatgctcaggtaagggattcagtatcccatggatgtgtaagggtatacagacatgagaatactgagaagtgtaatgtacttgcaacgatgcacctacgtccacctaagaaggtacactaa

SEQ ID NO: 29848 - DNA, 321 bp, Zea mays
  Peptide Sequence Number=SeqID_71627
atggcgcggggctacaggaggatgtccggcgacgaggggctgatacagaaaggtgcgcagccatggaaagaaaggagcagaggggcgctcgcttgctgcaggaaagggaggggcgtccgtgggagagagctggtgactttggcgccatggggaagcaagagcggcatgcttgctgcaggaaaagtagggcgacatgatagggagatggagcacgccatctgcagagaggacggcagggcgagctcgccaccaggggaaaacggcggtgtggtggagatgaagcagggagttgtgctcatcttcaggaaggggaggagctag

SEQ ID NO: 29849 - DNA, 489 bp, Zea mays
  Peptide Sequence Number=SeqID_71628
atgggcaggggcagaggggcaagggttggcctcgccgtgccgacggtaagcgcaagcatcctccaagtctgccctcggaggattttggtgactcagagtactcggaggaagcttcctccgagagacccctcggaggaggtggaggactcctccaactccgaggagtggagaggcggcgagggtgatggcaccgaggacaacgacaacagcggcaaagacgatggcaagggcggtggcaacaacgatggcaaagatggcgacgacgacagcaagggcgacgacaaaggagacagcgacggcagcggcaaaggcgacggtggtgacggcaagggcaagggttatgacgacggtgacacgggcgacggaggcaagggcgatggcggtgacagcaaaggcgacagcgacggcgagggcgaggacgacaggggtgacggtggcaagggcgacggcggcgacggcaaggccgacaacataatgctgctggtttaa

SEQ ID NO: 29850 - DNA, 390 bp, Zea mays
  Peptide Sequence Number=SeqID_71629
atgcccgccaccgaattaccccgtgcatcagccgagtccatagcaacgacgtgcacccgattcaacgacggcggctttcccagatctcacccggtgacaccttcccttaacaaaatctccatggtgcttttggtggtgtgtgcggagatggacaacgggcaggtcggctacgaggtgcggcggtcttatagtggcgaggtggggcggttagtggcgctgaccccgattggtggagctggtggtggtggtggatctgattcatctgaaaatctgtttctactcatatctttcattgtcgaggttatatttcttcttgatttaaggaccatcagtcgtggtgttagatgccattatccaagttgggataacaattgcgagtacatagggtag

SEQ ID NO: 29851 - DNA, 179 bp, Zea mays
  Peptide Sequence Number=SeqID_71630
gtggcaatgagattgatggttttggttatgactatggtgctgctgtgaccgggggccggggcgatcgcaacaagcgcccacggccgcagaaggctgaatgggacctcatgtatcagtcacccgagggggacctgaaggatgtcttcaccggaggctcctattccggtggagacaactag

SEQ ID NO: 29852 - DNA, 687 bp, Zea mays
  Peptide Sequence Number=SeqID_71631
atgaacagtgcgtggacagttcgcgcagagtcagagcagcgccagaaggcgcaccggacaatgaacagtgcttgtccggtgcggcaccggactgtccgggtggtcgccgctgatcaggtagtcacacagccatccgtcgggctacttcagctaggctccttgtctcctttccctttccctcaaacgtcttcttggagatgcgatgcttcccgcacggcgcaagaggccaccgaggccaaggccgagccgcttcgcacacaactttctgacgccgatggtcgtgtaactggtaaggcagttgccctccgatttctttctggcttccttgcctcttttcttaccttattcgtctcctctagcagctttgggggcaagctacggaaactacaccatcacctaggccagcttctggacaacaatggggcccactgcacttccctggtggaacgtttagataatgccctgtgccgcattcgggatattgttgactttgatgttcatcggggagtcgtggtggcgttgatgatgggggagatttgctctggccgccatcttcagtatatcatcgaccctcctccatctctttcgaatgaggggcaggaagacctactagaaggttatgacgaggtggctagtcatgtttttcttagggtgtcggctcatgacgttgtgcatgatgcgcgctga

SEQ ID NO: 29853 - DNA, 1167 bp, Zea mays
  Peptide Sequence Number=SeqID_71632
atgccggaaccatccaccaccgaggggcgacgtatccagggagaactcaagaatctcctagaggatgccgcggtccgacgggccgaaagctctgcttcccgaaggcaggggtacaccccggagcatcgcgccgcgacttcccgattcatgcgggaagcctcggtccacaccgggcgcatgcgggacacagcgcctgcggccccgggtcgcctcggcaacgagcaccaccgccgcgaccgtcgagcccacctcgacgagaaggtgcaccgaggctaccaccccaggcgtgggggacgctacgacagcggggaggatcggagcccctcgcccgaaccacccggaggcgatcgaggccatcttccgaaagaacaaacagcctcagggcgccagccgaaaaacgtccccgaggcatccgctcagcgcagcacgaagaagaagggcaagaagaagtcgcaagcgaaacgcgacgccgccgacgcagaccttgtcgccgccaccgagcacaagaaccctcggaagcctcctggaggcgccaacgtgttcgacaagatgctcaaggagtcgtgcccctatcatcagggtcccgtcaagcacacccttgaggagtgcatcatgcttcggcgctacttccacaaggccgggccaccggcggaaggtggcaaagcccacgacaacgacaagaaggaaggccacaaggcagaagagttccccgaggtccatgactgcttcatgatctacggtgggcaggtggcgaccgcctcggctcggcaccgcaagcaagagcgccgggaggtctgctcgatgaaggtggtggcgccagtctacctagactggtccgacaagcccatcaccttcgaccaaggcaaccaccccgaccgcgtgccgagcccggggaagtacccgctcgttgtcgatcccgtcatcggcaacgtcaaacttaccaaggtcctcatggacggaggcagcagcctcaacatcatctatgccgagaccctcgggctcttgcagatcgatctgtccgcgatccgggccggcgcggcgccctttcacgggatcatccccgggaagcgcgtccaaccccttggacaactcgatctgcctgtttgcttcgggattccctccaacttccgaaaggaaaccctcacgttcgaggtggtcgggttttga

SEQ ID NO: 29854 - DNA, 570 bp, Zea mays
  Peptide Sequence Number=SeqID_71633
atggggaagcctggcccatcactcctcatgctcctctcctgcggagtagccgaagggataaaaagcggtggcgcggcttattggcggcaggagaggtccggtggagggttgggtgaggtccgggagctcctggcggtcatgtcgaggggcggatcaccgacgatgatggccgaaggagggctggtcgcgtgcgcaggcgctcaggctcgtcggcgacgcgtgctccgacctgcccacgacggtagagttcaattaaatcacactgggagcttcactggagaccagcggggctgtaggcgcaaggaatcgaagggtggctcaccgtgcagctcggtctatgtgcgcctatggtcggacggagtccggcgacgtcaatccggcacctccggcgatgtggtgttcggtctgagggctcgaggagcttcactaagctccaagaaggctagccgaggaattggatggagtggaggagggctggagtggctgatccacggtggtcggggctcgggcggccgctggcacgccatgggcagagcaagctccggtgaacttgcgcttaggcggggctga

SEQ ID NO: 29855 - DNA, 141 bp, Zea mays
  Peptide Sequence Number=SeqID_71634
atgggtgcaatcctttttctccccaaatccaaggagccggccaatggccatgcatttcctgggcgtcgtaaggtagaagaacctgtttgtgaggctgacctgtgggcccagggcggatctctggtgctccaaataggttga

SEQ ID NO: 29856 - DNA, 273 bp, Zea mays
  Peptide Sequence Number=SeqID_71635
atggacggagcaagacgacgacatggaggagctggagggagtgccgcacgtagagacgagctcggctgccgcggctacggaggagcaagggaagtaagcagcgacgcgacatccatggaagcaggggcacgtgccaaggctggagcaggagcacgccggcgagcagaggagctaggcacggcaccagggagctccgagcagggtggccacagagtggagcatgcggccatctggggacagggaagaagggcgcgacatggggggactcggtag

SEQ ID NO: 29857 - DNA, 579 bp, Zea mays
  Peptide Sequence Number=SeqID_71636
atgacaaggagccgagctaatggaactgcatcccctgatttgccaaaacctgaagcgaactctccaccggattcctcaaaaaggcaacggacagtctctccagttgactgtgtgatgcctgcggaaggcttgaaagtacagtttggtgtcagcacgaagtttctagataatgcagggcggccaaagatgagcatagtggttgagatccctgagaacctctgtaaagttttggaattctgcgatgttcttgctagaaagctgtcccaggaatctggtagcagttctgaatggagacccctgattaagaagtatggatacattaatcgtccaactatccgtctgaacatccctcctatttccaacagcgatgcggtggccttctcaactgatatatgccagagagagcctagtggtaacattcagaagcttgctttcggcaatgtgggcgccacggaattggactctctgttcgttaaagggagcaaggtggacgcatttttttcactggagttatacgattaccagcaaaatgctggcattcggctggttgcaaagaggctggttatacactcgaattag

SEQ ID NO: 29858 - DNA, 225 bp, Zea mays
  Peptide Sequence Number=SeqID_71637
atggacgcccttccctgccccggccatggacgcatccctggtggtgaagtggattcccccctggatcgacatcgaggccacatcgatgacaagggcgcgcgtcaatggtggtggccattagcgtccttcccccgcactggtgattcgatctctcggttccccgagatggtgcccgatcttatactgtggaagggacagagtccgagcccacgagacaaatggtaa

SEQ ID NO: 29859 - DNA, 546 bp, Zea mays
  Peptide Sequence Number=SeqID_71638
atggcctccgcctccccgtccgcgtctgcgtcgtccgagcctgctgcggcgcccgagcgcgcgggccagggctacgcgctgctcgagttcggcgccatcctcgtctgcccgcgcaggctcgtcgaggtcgcctcctacgccacgctcgtccgccccgccgacccggcctctgccgtctcggcggcctccgtgcgctgcaacggcatcacacgggacgccgtgtccgcggcgccgcccttccgcgacgtcgccgatgccgtctacgacctcctcaacgggcgggtctgggcagggcacaacattgtgaggtttgattctgcaagaataagggaggcgttcactgagattggtcgctcacctcctcagcccaaggggatgattgacaccttgcctctgcttacccaacgctttgggaggagggcaggggacatgaagatggcaagcttggcaaattactttggactagggaagcaaagacacaggagtcttgatgatgttagaatgaaccttgaagttctcaaatactgtgctacagttctgttcctg

SEQ ID NO: 29860 - DNA, 474 bp, Zea mays
  Peptide Sequence Number=SeqID_71639
atggtcacgtcccctttaagccttttttacgtagtgtgggtacctaccgatggttctgactgtaattccttggacagatggaagttgcacaagcagtgcatcaagtaccttggccctaaagaggctgatgtagtacaagctgagccgtcagatagtcgacacggctggaagcgacaaggggagcaagtggatctttgtgctcagtacatgcaagactctctacatagaccagaagcgaacggccctaaggagcggagtgtggatctcaccgatgtcatggtaaggaaaaaggagcctaatgtcagtgtcctggcctcacagtggtcatcatccccagacgcttcagctgaaaattactggtgttgttttgctggcttttcggtcttgctacagttgagcccatcagaaggtgaagaagatggcgacttcagcctgaggggcagctactctcagctggtcagcctgaggggttga

SEQ ID NO: 29861 - DNA, 726 bp, Zea mays
  Peptide Sequence Number=SeqID_71640
atgggagacatggtccttctgcccaacggcgcggaggtggccatcatcaacggcgccgccgcggacggcaccgctgggtgggagtccgccaagacgtcggcgtacgcgcccgtcgtctaccgcccggaccactcgccgggggaccggttcgaggagcagaacgcggcgggcgtcgcgcggctgtaccactcctcggcggtgctcctccgcgacggccgcctgctggtgggcggcagcaacccgcacacctactacaacttcagcaacgtgcagttccccaccgacctcagcctggaggccttctcgccggagtacctcgacgcgtccaacgacatgctccggccgaggatcctcgacccgtcccccaccggcgcgccggcgaccgtgggctacggggcgacgatggtgatccggttcctggtcccggcattggcgcggagaaggcgcggcggccgcgccggctgcctcggtgacgtgtcggtgacgatggtggcgccgtccttcacgacgcactcgttcgcgatgaaccagcggctgctgttccttgacgtgaccaagaatgtggcggtgcgcggccgagccgacacgttcagcgcgtcggtgacgatgccggcgacagcggtgctggggccaccggggtactacatgttgttcgtggtcagggaccacatatggagcacggccacggcggcgacgtcgaccggcccggacagggaccacatatga

SEQ ID NO: 29862 - DNA, 441 bp, Zea mays
  Peptide Sequence Number=SeqID_71641
atggaggcccaggcccacgtgtcatgcaaccggcgcgtcgaatgcttcgtgcatgcaactgcaccgccacttgcgccaccaccgcgcctcctcggttgcggaaccaatacgcgactcgaggcgacccagcagcgccagcctggcgcggcggtcagtgcggccaaaaatgggccggcagtaatgacggtggcaggcaggcaggcaggagcagcggtcatgtcgtcagccaagctcacgtcccatccggggcagcgagagaaccctctctcacggcgtgaagacaacgcgcccgtgttccgttcctcgaacggctcgcgcacgcgcaacggccgccccgccaaccactcgccccgtcgcattaactccgcgggaccgggaaaggggataccccgaaaagggtccttccccgtgaaggaaccaggctccgagccaccctactga

SEQ ID NO: 29863 - DNA, 378 bp, Zea mays
  Peptide Sequence Number=SeqID_71642
atggcgcaccggacagtccggtgcgccaccggtgcgccaacggtgcgccaccggtgcgccaacggtcacttccaacggctagttctgacacagagccgttggactcatggcgcaccggacagtgaacagtccactgtccggtgcacaccggacagtccggtttcacctattcacccctctctaggagactttcaattggcatcagagccagtgcttcattatgagtctaaccaattcgaagtgatgtctggatatcatgccaagagggagatcatgaccgccaacaagtctcgcaagctcggggatgactcttctcaagggaatccggcaacaaacacaaggatgaatcctgttcctcccatcaagtcacatcggtaa

SEQ ID NO: 29864 - DNA, 1988 bp, Zea mays
  Peptide Sequence Number=SeqID_71643
atgagataatttctttgaagaatgcacagcggcgtcttgaagaggaggtatctcggcatgtggaggataaaaaggtgcttcagcatgagctttcacacctcaaagatagcaagggtgacatggacaggaagcacttttcgatcaaggagcaaatacaagaggtgaatttcaatgtagaatcactccaatcacttgctcaagaggtgagggatggaaatgttgagctaaaagagaccataaaaaatcatgatggtgtaaaagccttgtacgttgataatctgatgttgctggagagaacgctggagaaaaatgctcatttggagagatcactttcagctgccactaatgaaattgaaggattgcaggagaagaagtctgcattggaagaatcatgtaaacaccttcattccaaggttaatggccatcagtctgagagggccatgtttgttgcacggattgagggtatttctcataccgtagagaagctatcagaaaagaatgtcttcttggaaaatttgttatctgataagaatactgagctggagttgcttagaaggaagctgaaagattcagaggaatctactcatgcattccgcaaccaaaattctgtacttcgatctgaaaaaagaactcttatgcgtgaggtggatagcatcaatagtgctctactcagtttggaaacccaatatgcagagttagaagggcgatatttggatcttgagcaagacaaagacaaggccctcaatgaagtgatcaaactacgagacctgttgaggctagaaaaagaaaaacacaaagaagccaccaactcagacatgactaaattcagtgctatacagaagcagataggccttctgctaaaagaagttcaccgcagggaggaccagcttcaagaggaggagcacaggattgttgaagctcagactgaaatttttatcttacagaggtgcttaggtgacatggctgaagcaaatgctgatgtcttggcacaattgcagaagcaacaagtggtatgcaaggatcaagaggagaaagttgatttcttgtcacagaacaaccagcagctgactgaagggataggttctgtagtggaagtactgaatctggatgagaaatacgaatcattggatctgatgaagattgatgttgttgtgcagctcctcttgcatgagatcaagtgcctactgaatactatttctgatgctcaggatgtgaagcagaaccagatccttgagaagtcccttgttgtcacgcttcttgagcactttgggcgagaggtggctgacctgaggtcggaaaggagtgttctgaagcaagagtggcaagcaaagagtgaggagctgcagcagctgcagagtgaaaagcatgacctcctaaagataagctgtgagctacggaaggaaatggaggctcgtaaccgcaaagtggatgaactgaaatctgaggcaaagttcttggttcgacaactgtcggaattgcaagagtcacggcagtcgttgcaagcagagattgtcaagctgattgcagagaactcttcactctctagcaaagtttacagatccagagagaaagagacgtcatttgatgaggatttcagcacacttgttgatgaagcgatcaggacagatattcttggtgtcatttttagaagcctttatgaagagaggacatcacaattgcagcgtttgcatgaggattttgggtctctacatgcagcaggcaatgagctgtatcaggaaatcaagctgatgaacaagaagctcggagacctacagcttgagaacaactatcttgagaaggaactcagtagaactctaagcatctgtgatggctctggtacagaaatttcctccggaagaaggcgtgctatgaggagggacacgaagctattaaaatctggcaggaaaagccaagagggtggccagaacatggaacaacgaaaagaagttgacaatgctgggcctcgagaaatcgaacgaaatgcttag

SEQ ID NO: 29865 - DNA, 462 bp, Zea mays
  Peptide Sequence Number=SeqID_71644
atggccggcgatggccatcccacgcaacagcgcttagaacctttgaaacgacaggtgctaaccaatgcttggatcctagcggagattaaccctacacccagccgagcactgaagccaaccagcgaggaggaattcaaggaggtcggagtcaggatgttgtacgccgggcgaggtggggaaggtgtcggtgttcccggcggtgatgcgcgcacaggagaggatgagggcccgaggtgggcgatggaggccgtgaggcgcgccggtgctcgtgacttggggaagaaccagggccagtccgcggtcgcagtgccggagggaggaggaaggagcgagcagcggagtcgccggacctgggcgccattgaagagcagcgcggcgagcagggagctgctgccccggggaaagggctcggtcgtgggagaagaatggagaggagagagaggtagccggcacgatacttaa

SEQ ID NO: 29866 - DNA, 330 bp, Zea mays
  Peptide Sequence Number=SeqID_71645
atgaacatcaaaattgaaatgtccgcaattctgcacagtggcggatctgcgtccgaggctgtctgggctgcagccccgatcgcggcccagccagcgaataggctcatcacttcctgcaagcccagcaacagcttctcggctcagcatcagaagacggctgcaagaggttccgctgtccgcgcctccaacggtgagttcctgcaggctgcagaaggccgaggttctcggctcaacatcagcgaggtctcgcagattggagaaggttgcagaaggcctccatgcgcaaagcagaagcaggcaagcagcgaaggaccgaaggctattgtttga

SEQ ID NO: 29867 - DNA, 945 bp, Zea mays
  Peptide Sequence Number=SeqID_71646
atggccatgtcgccatccaatccaatgcgcaagtactcatggtggtgggatagtcacatatcccccaagaactccaaatggctccaggagaatctcaccgatatggatagcaaaatcaaagtgatgatcaagattattgatgaggatgctgactcgtttgccagaagagcagaaatgtattacaaaaggcgcccagagctgatgtctttgcttgaggagttgtaccgtgcttatcgagctttagctgaaagatacgatcatgcagctggagaactccgacaggcccataaaaagatggcagaagcatttcctgatgagtttcagttggactttgatgatgacttgcctacagaaactgtaactactgaaactgaagcagacaatcgtgatatgactccatttttcctttcattcatcaaggctggtgattcgaaaaaacgtgctaaagaggatcaagaccatgagaagctgcaaaaagagatatcgagtttgtcacaggaaaatcaagaactcaagaagaaaattacatcagtgttagaaaaaggcaatatggctgaatttgaagttctttctctcaaggaggcccttgcagaacaagaagcggagaaggaagctgcattttcacaatgccagcaatccagtgatcgattacagagcctcaagtctgaaatattgcatacccaggaggagttcaataaactgaaagaggagatgcaaaatggactgcagaatttgagcactgcagaggagaggtgccttctgcttgagacagctaaccagaatttgcttctcgagctagataagctgaagcttgcctcaaaagaaaagcatgacgagctaaatgaaaaacacattgaattggagaagcttagcatctctatacaagaagagcaactcaagagcatgcaagcagaaatggcccggctatctgtggagaagcaatga

SEQ ID NO: 29868 - DNA, 813 bp, Zea mays
  Peptide Sequence Number=SeqID_71647
atgaatccatttgaagatagcgacaatactgataatgaggaggataacactatcatatgtcctacgaagccaagccatgtggacttcagcaaatctaagatcaaaggaggacatattgaggattcgaagaagaggaagaagaaggtgactactaggtggagcaaagttctgaaggttcaagttgaatcgactcctaaggctttagtggaaattctggctgcacccaaagctaaggtgacagctgagattgaggaactccctcctatggtaatcaaagaggcaaagattggagaagcgattgccttgatagcgcaaagagttacacctttggagtcactcccagagatcgaagaagaagaggaagaggagcgaatagctccggtgatgagctcattctttgatgttgacgaagatgaaactgaggaaaaagatactatcggtacaacactagcgccgaagggcactgcactgcctactgcagatgtgactggtccaagtagtccaaggtttgaacagattactgcagcggtgacaccttcggcgatcatggcagccgaagagaaggtttcctctaagcttgctctagcgaaggacaaaggaaagggacttgctaagtttgaagaggccaagaaagcagttgaagatgatacaccacttagcgaagggccttttgaccaagacttgggtggtcaaaggtatagggtccatcatgctgcagggaaagttatgggtgcgaagcagctagccaaagctatcggttttgttgaacaacttggatacccttcgaggtctattatctttggggcgagctag

SEQ ID NO: 29869 - DNA, 624 bp, Zea mays
  Peptide Sequence Number=SeqID_71648
atggccagcagggtggcgcggctgctggctcgacctgcagcgctagcgggtggaaggggagcagcagcgggggaggaaggggagggccgacggccggtggccggagagatgcccgggggtccgacgacggctgtggggtgggttgggagaaggttggacagaaagctgagcaaagggagtaatgaaaatatggataagagaaagttgcaacctgagaataatttatctgatggtgcaagacctcttatttctgaagacttggtgactcatcccatttatcttgatcatttggatgggtcggatggggccaccctcagttcatatgcttttgaaaccctcatcttctggcccaagggattcaaatctccagaaacacctgatttgacagaattcaagctaaatcctaatgccaagagtttcactccgtcagcatctttgaggccaccacaccctgcatcatctgatgcatcatattactatactaataacattccagcagcaccacttggacctggtttgccagtgggcatggggttcccaccggcatatggcacccagcctgtcatgtataatgctcaacctggagcatcacagcagggttacatgcatcctgttggtctacag

SEQ ID NO: 29870 - DNA, 163 bp, Zea mays
  Peptide Sequence Number=SeqID_71649
atggctaggagccatcctccttcgaccgcgttggtccgaggcggcgccgccggcctccacagcggggtcttcgctggcgaacgtcaatccgtgaccctggtgacacaaagccccagacgaagcactaagaacgtgactgatagcaaggcgatcgtcatggcgg

SEQ ID NO: 29871 - DNA, 816 bp, Zea mays
  Peptide Sequence Number=SeqID_71650
atggctcaggtcataaaggatggttctgccagaggacaaagatttgcttctgatgttgtaaagaaacctgagactatgataataccagcaagggagcttgtacaagtttttgccaaggatgtagcacttggcggtgatgagctgccaaaaggtcctggtcatgacaaaaggaaggacttgctgattgattctgccatttcccgctctcattaccttgaagagagggaacttgagcgctgggcaccagatgaaggagattcagagtgtatcgaactggagaagtatgacagaaagggaaataggagctgggatcagttcgaaaccaatgcagccttgtttggggtaaagagtacattcaatgaagaaatttataccacaaagcttgagagaggtcctcatatgagagagcttgaaaagcatgcttcgagaatagctagagaaatagaaggagaagataccaaagatattcatcttgcagaggagagaggcttattcctgggtgatgacttggaccatgatgaagagataaaatattcagcagtgcgtagagacaccgataacagcaagtacaagccaccatttactaatgtcccaagcagtacataccaagttgatttgtttaacaggacagtcaatattgttcccaaggatttgctgggatgttcatcaacaatggatgaagaatcatcatcccacatatttgatgatattgatgcatctgccactattcaaaccaatagcgttagacagccaacatctgattaccttccagatagactctcgtccaatgatgaaaacaggtactatctcccatga

SEQ ID NO: 29872 - DNA, 177 bp, Zea mays
  Peptide Sequence Number=SeqID_71651
atgggcagggcgaaggtcgacgacagcggaccaacacccacagagtcacggcgttgcacggtatgcgatgtctcacgctccgcctacggcgacggcctggtgaacttgcgcgaggtacatgaaataggagagggcgcagtaccagcatttgggcggcaaccactgggtcggttctag

SEQ ID NO: 29873 - DNA, 345 bp, Zea mays
  Peptide Sequence Number=SeqID_71652
atggaccttggcctacagggccgacttgtgcgcggtgatggctatggagcatcaccaagcttcgcgggatgggttcacaacctagatgggagagatgggacaccagaactcaacaaaatttcttgtcgacacaactacttcatcgtgatgccgcgcacggtcgtggtggaacgattccgggtgcaatccgatacaaacgaacaaggcctaaagatatctaattgggtgctgggaatcctggtgcgctggagggaagaccgtcggcactgctccgacggtggtgaggtcgcgtgtgcaaccgtagctagagctgaggaagaagaagaacccctgtgcttctggtaa

SEQ ID NO: 29874 - DNA, 426 bp, Zea mays
  Peptide Sequence Number=SeqID_71653
atgggtatgagtgaattttttcctaatgggtatgggtatggcttcgtgtgcccactgggtaccttacccacttccatccctatgcctagtggtgggacaacagaaccccatgatgacaaagtggcggcgataggtcagaagggaaagagaccaccgaccgaggaagctaccgaccatttcgagaaactgctcaaagccccatgtccgaaccattgctacccggtccgacacgcgtacaaggactacaagctactaaaaaggttccttggtggagaaacaccgcctgagattggggtggagcctaggcatggcgatgagcgaaagaaggcaggagttgcgttccgagatgagaccggatgccagatgatttttaggggggttagattactacacgccaagaagacatcggaagtcggaacgacgtga

SEQ ID NO: 29875 - DNA, 543 bp, Zea mays
  Peptide Sequence Number=SeqID_71654
atggatttgcttttgcgcctgcttcctcggcggtcatcccttcctgacggtggtcgttgcgagggtgcgcgttcccctctagcaccaccactaccgaggttgatgccaataatggatgtggacttcacaacaagagataaggctcggagaagggcattcaggatctccctagtcatgacctgttgtgcggtgtgccaacctttagggcgtccatgcgcgagcaaggcacttctcatggcatctcatgtggagtgcagacgttcacgacggccatgcgcaagcagacatgaatgtcatattgtcatgggtaatggggagactctaggtgccacaacttcagcggtgatgccgccctcctccatggatggtgagcctaagtgccggcgggttggagcactggtagacggccgcggggatgggtcactcgtccacacccacccgattcctggtactagtggtagcttgggattgggggagaaatcattgtgcaaacacagttctggtgtgggagaatacaatataaatgaaacattattctcataa

SEQ ID NO: 29876 - DNA, 519 bp, Zea mays
  Peptide Sequence Number=SeqID_71655
atgggaggtgagggagagggggaaagggcacggttcgagcagcgtggggagtgccttgagcgggtgctgcaacggcacagcacgaccacgatgaggaagagggtgtggggtgagagagagagaaagagatgggaggggctcaccatggagcggccggcaacgatctcgattagcgacgacgatggtgattgtggtgagggaggagcgagcgtgattgagatgggggtggagcgagcatcacacggctttgttagggtttcagatgacatcaagataacccttactactttgaaagagatggaacggaacgaaaagaaagagaaaagaggaggtcttccactagtaactgctcttctagcactcatagacacttcttcaactgagacacatggaagacattatgcactactgacaaactttctgcataactttgctgccttgactgtgctatcttcagattctcccgatcatcatgatattctctccggcttcaagcaaatggttagggcaaacacctag

SEQ ID NO: 29877 - DNA, 366 bp, Zea mays
  Peptide Sequence Number=SeqID_71656
atgggtctagcaatccatccctcccgctccggctcctccgagagctccgtgtcgtggcttgaactgccaccggcgtcgtcatcgtctccgtctccgtcgggtctcctccagcagccaggatgccctgaggtggtgcaaggggcatctctggctgaggtgcaagggaaggcggcctctcagactccacctcccgctgaggcgagggggaagagtcctgctgctcctggtcctgctcctgctcctagcgtcggcgctcctgctcctcgtgcaggcgacgatgcagtctctccagctggttggactgacctgacaccgtgcgatgcaagggacgctccgccagtcgagaaggcaaaaagggaatcatag

SEQ ID NO: 29878 - DNA, 558 bp, Zea mays
  Peptide Sequence Number=SeqID_71657
atggtgcccgtccgcgtgcacaccgtgctcatctccacccagcacgacgagaccgtcaccaacgacgagatcgccgccgacctcaaggagcacgtcatcaagcccgtgatccctgagaagtacctcgacgagaagaccatcttccacctcaacccgtccgggcgcttcgtcatcggcgggccccacggtgacgccggcctcaccggccgcaagatcatcatcgacacgtacggcggctggggagcccacggcggtggcgccttctccggcaaggaccccaccaaggtggaccgcagcggcgcctacgtggccaggcaggcccgccaagagcatcgtggccagcggccctcgcccgcccgctgcctcgtgcaggagatcctcaagatcgtgaaggagaacttcgacttcaggcccgggatgatcagcatcaacctcgacctgaagaagggcggcaacaggttcatcaagaccgccgcctacggccacttcggccgtgacgacgccgacttcacctgggaggtggtgaagcccctcaagttcgacaaggcatcggcttaa

SEQ ID NO: 29879 - DNA, 1824 bp, Zea mays
  Peptide Sequence Number=SeqID_71658
atggcaagacaaggcgttggaccgccgcctagacgcctaggcgacacctttaaaacagtggacacaactctgttggaaagcaacatccgtggagtagcattttctgcaagctggttcaagccgatagacgattggcctgcggaatctccttgtccatcaacaggggcatctcgtcctgcacaacaccaaaaacgtggggctggcggaaggcgtggcagaagacgtttgttggtgtctgaacccggtactgttactgatgatgacaacagctggacttggtggaccggaggaaatataataaaacgtactttgcagaggggggctcttctacattcaaccataagaaaagctgctcgccaagggatattgttaaatgcagctcttgtcaagaagcgaaatcttatgctcactagttacaatacaaatgcaagttatatccagcatctacagaagaataatggccaacagccagtgaccgctcccagaaatgtctctaaggttagttcttcccattctgctgagcctgcccccaaagtggaagccgagccagtcacaaaggttaaggcacaacgagttggaaatgtggaagctacaacccagccagttctaaatgtgaaagcccagccacccgccaaagtggtaactcagaacatcactagtgtccaaaagacaaaagctaaaaagtcaaagtccgaaaaaccaacgaaggctaaaaaagttcaagcgatcacatatttcggtctcatatggaagaaaaataagaacgacaaggatgatggaagcgagttcagggcgaatgatgtaatccttaaaagcaaggatggtataggttcgtcaataaaaccaaaatgttgtctatgtgacaaagcatattctccggaattcctgtatgtacgctgtgagaggtgcaaaaattggtttcatggtgattccttgcaacttgaagaagataggattggtgagttggttggataccgatgctgtaggtgccggaggagggccatccccccgtgtcctcattcagataattatgtaaagcctgaacccgaatttagtgagcaaacagttgcaacatcatcggtgtcaactatgctatccagtgggaagacttctgcttcagcagatcaggacccactgcttgcttcgtatggaatagttgaaccaatcggggaagagacaggggatgttgatttatcagcgaacacggcaagcattgccccgggaagtagccagaagctgtctataagaagagcactagctaaaacttctggataccttgaccaagctggtaaatctgtgaatgagtattatgtccagaaccagaatacacctccaggcaatggaaacatcaatttcagccacacgaatgagatttccttttcggaggctgacagcgtgggcgcttcaggactactggggtgggatttttcgagaggaaccgcgtatgctgccccacctggtttcacttctaatcgccagcagaaccgcactagccgtggcagctttgtgccggacgagtgtgagcgtgagccccagacttatttctcgttcactgagctgcttgaggctgacgacgcacagcttgatgacaacgcgtttgggatagctactggtctgcaaggtgatgctaacggctccggaagctttgtccaacgaggagttggttttggtggtacgtctttcatggcagaagatggagcttcgaatatgaacgtgccaacaaatggtcccacgcctgaagaggtagcgtgccacaacggcacgaacactcagccgccacctgatcccagatgttctgtccgtgacctccgcacacaccggtag

SEQ ID NO: 29880 - DNA, 246 bp, Zea mays
  Peptide Sequence Number=SeqID_71659
atggctcgtccccttgcaatcagtcttctacctttcagtttctcctccttagcgtggctttgcatcaatctatgcagagaattaaagcagatgatgtctcctccgatcttgagaatttttttggatgatctgatatgttatgagctaaactttgccggcattttatcctttcctcagttcctctacataggtcatggtatatcgtcatatcatgtattcaacttagggtttacctatttcgattaa

SEQ ID NO: 29881 - DNA, 1437 bp, Zea mays
  Peptide Sequence Number=SeqID_71660
atggacaccgccgcgggcccggggccccgggacggccccgatcggacgccgcaggggcccggcgcctcccccgaggaggccgccgctgatggcgtgaagacggacatcgcaggtggggcggaagcgcttgcagcggcaggcgcggccggtgaggccgatccgggtggaggcgccgctgcggcggggcgtgggggtgacgcggaggcctcggcgagcgagcccacggcggaggaggttaacgaaggctgcggcggcgccgctgctgctgcgggcggagatcgccccgccgcgcccgaggcggatgcggacggcggcgcgggcaaagggcggtctgctgtgcacgcggtgagtgaggtggagcagggccaaggcattgcgggggcagcgcaggatgtggatcccgcggtgtttgaggtgaagaagatggacgtgagcgagggtggcgacgcaagcaagcagaatcagcactctccgtcttgtacggccagcgaggtggatgtggggatcgttcctgtggcagtgcgagatttggatcctgtggggtctgaagtgatgatggaggtggacgacggccatgtcagggaacaagagcgcgcgggagtggctgtggcgggcagcgagtttaagatggaggaagctgatggaagagtggtgcatcaagggtctgctgccacatctgctgggggccttcaggcgcgagccgaggaagtgggagagtgcttggtcggccgttacattggccgcaacgcgccaatgcaagcggggatccttattgggaaggttgcatcctatgatagcacagctggcatctacagcgtggtgtttgaggatggacataatgaggatttggagcttcctgagctccacgagttcctcatgcccgacaagaatggcacgttaggcatgagtgtgaactgcaggaagaggaagctgggcctgctggttttgtcggggagtgtctcggaggtgaaagagccagcaagtactagacagagggttgacggatgcgagatgcctgccaacactgatgcactgcggtatagtgggtctggctcggatatgtccgaggatatcgaatcttcgagtaattcatccgatttcactaaagaagaaccatctgagccgtgtcctcctgtacaggctgtggagttgcccccgtcatcgggagacattcatgtgccagaagattccataagctatctcttttctgtttataacttcctgagatccttcagtgtgcagctgttcctgagtccgtttggtctggatgattttgttgcagccattaattgcactgttcagaataacttgttggatgccgtacatgtctcgctattgcgtgcactgaggcggtatcttgaatctaaatctgctcaaggatctcagatggcttcaaattgcttgaagtacatatactctatcaacccccccttttaa

SEQ ID NO: 29882 - DNA, 1602 bp, Zea mays
  Peptide Sequence Number=SeqID_71661
atgctgaatgatttacagaactttgaaagtggtccaaatgtaacaaattcagatgttgctgtagcagatgtttctcaggacggtaatagtgatgattgccgaatatgtggaatggatgggactttggtatgctgtgatggctgcccatgggcatatcattcgagatgtatcggtcaaaataaagctttccttccccagggggactggttctgtccagaatgtgttgtcaacaagcttggaccaacttcatcaagaattgaacgtggtgcaagaggagctcaaatgtttggcattgatatgcacgggaggctattcttaggaacctgcaactatttactggtgatcgaaatatcttcagatgtagagtcttatgcaagatattacaatcattatgatgttgtcaaggtactccagagacttgcactctcagatgcatatgtggatatatgcaggcaaataatggaatactggaaacatttactcggtagagttcagagtgagagatcaacaatattgaaagaagttggtacaagacatactccacaatccagcatgttgagttttactccaacaatgtcaggagatggaagtggctggacaactttaaaagatggtggggacagtaaaacagtagcacttcctcaaacaaatgtgcaacagaaaattttcgctaatcagtatacagtgtgctctgctgaacaaacggagaagaatgttgatgtttgcaagcaagctctgtcagctcagaacaacatacataatgcacctagaaatggagcttctggaccatttgtggcatcccccgtttctcatcagaatggatccattggaacgggtatgtctaacatagcacaagcacagccagctcatagtatatatcgtccagacttatccactgtttctgcaaagtcagaatcatttcgttcatctttgcaaggtaaacttcaccttcagatgtgtactgaaagacctggaaacatgagttgtggcaaggcagcaaagttgtcttcttttaaaccacaagcttacatgaacctctacaatcatggcaacattgcagcatctgctgccgccaatctagctattattgcatccagtgaaggtaaggtttccacatcccaactgtccgcaaaaccaaagaagaaggtggctgcagacaatgctctacagttgaaagcattttcctcagcagtcgcacaatttgtttggccgagtactgaaaagaagcttatggaagttccaagagatagatgtggttggtgccttgcttgcagaagttcagcaagtggaaacaaaaaggcttgttttcttaacatgaccacatcaaacgctgctaaaagttctgctcgagttcttagcacaatgcgcgtaataaagatttctgacagccatttccccagtattgctgcttatttagccaacatggaggaaagtttgcgtggcctgttggttggttcactacaagacatgcagcagagagaacggtggcgtgaacaacttgaagaagcttccaactgcagaactgtaatacccctcttgcttgaggtgagttacaggatggcatcctttggtacctctcaatattctacaactgagttgtga

SEQ ID NO: 29883 - DNA, 2160 bp, Zea mays
  Peptide Sequence Number=SeqID_71662
atgagccatttgttcttcatttggaaagctctggttgtcttttgcccgcgggtgcaccggacactgcacagtcgccgatttgtttccttccctgacgaagttgaccgttgccgaccattagacattgttgatcacttggcacaccggacagtccggtgcagtctggtgaccgttggccaagctggcgtgaccggcgccgattgcgcggccgaccgttgtcgcagacgcccggctaacaccccggacagtccggtggatgtatcgattccagcagtctacactgaaggattcatttatggtggtctaagatctaggttcggtatatcgcttaatgttttgctagcatatgaggatgttagatatagcttggtagatgaggccagctggcgacaacaactaccagcattttatcctggaggcggcgtcaccgtcgccgatccctcctctcaactggcaacaatgggtgcacaggatgcaactgccctgagtgttcagcagggccgagcgaggacagctgctgaaaacctcgtccacgtccctgccgcccaggtttcacttccaggtgccctagccctagggaactttgagcaagagctcggagaagacgcgctgctgccgccggtgctgagccaggagcagcaggacgccgtgaagagatacaaccatctgatgggggtccacgtggcgtacttccgcgtgtgcatcgaccctacggtggccagttccaggcggctcctccagcaggcaatccaggatctcaagaaccactgtgctggcgatgctctggtggcgcattattacgtgaacaacaggaacaacaacgacccagcagatcagccagacactactacggccattcggcagcaagcaattgctcgctctgctgatgcctcctctcggcagcatcatggcgcctgcagaggattcaacgaccatcatggcggcggcgttgttccttccgttcaccgggaggaggaggaagctctggcggctccggtggtggcgatgagcatgagccccgccttgcggctcgtggacatcaagggcaaagtcgcagctttctgtgccgatcgcaacgggagccgcttcgtgcagcaggcgcttgaggcggcagcgccggaggagatcgccatggtttacaaggagatcatgccctgcgtgcgcacgcttgccgtcgacatgtttggaaaccatgccatccagaagattcttgagcatgggccgaggtcctgcaagcgaggggtcatcagtaatctgatcggccatttgttgcccctaagccttgacaagtacagctgccgggtggtacagaagtctttcgacgtaggggagcacgaccagaaggtggcgatggccaaggagctcggcagcaaagtgctgaggtgtgtccgcgaccagttcgcgaaccacgtcgtccagaagtgcgtcgagtgcctgccgtccaaggacatccactccatcctccgaagcttctacggccgggccaaggcgctgtccacccatcccttcggctgccacgtcatccaggtttttgctctcgcgctgcatctgcatcgacgatgtgtcgtcgtcgtcggtgtctcatctgatccttcaaaacttgacgactcccagaaagtgctggcccgctgcaaagaccacgagatctaccacgcgctgacggcggagatcatggagaacgtgaacaagctggcggcggacaggttcggcaactacgtggtgcagcagctggtggagcacggaggcggcgccatgcggtccgcgatggtcaggaggttcgccggccgcgtcgtcggcatgagctaccacaagttcgcctccaacgtggtggagaagtgcctggcgttcgggagccaggaggaccgccggctcatcgccgacgagatcgtcgccggcggcggcggcggccagcagcagcacttggaccatctcgtggacatgatgatcaacccgtacgcgaactttgtgatccagaagatggtggtgacggcggaggagcggcaggtgaggttgctgctggaggtggcaagtagcaacgcggcgagcctggcgaggtacgcgcatggacggcacgtcatcgacgccatggagaggttccttggcggcgccaaggctgttgtgcacgcagaccctgctgcactaccctgccgccgccgatga

SEQ ID NO: 29884 - DNA, 645 bp, Zea mays
  Peptide Sequence Number=SeqID_71663
atgagcgcagctccaattgcaagcaacagtacaaacccagccgtcgctggcgcgtccgagcttgctgtcgaggaggaggaggaggaggcgccgggcacaaccgtcggcctcgtctgcccctggctgaccggcgccgcggccgtgggcgtggccggcgccggtgcttcgtcaggctccggcgctgccgccgccgtcgctggtggtgctgccagtttgaagagagagagctggagagaggtggagttgcacgccctgggcagccggacggcgagcgtccggttgacgggcacgccgacggagacgctgccggtgaggatgaggcacgcgcagccggtgctggccctcatcagcgcccccagcgaccggcagcagtcgtcggtcggggaggcgctgccgttggtgatgaagttgaggcacggcgtgaagctggtgaccagcgacgccgtgcacgacatggcgcccccaacgacgccgccggggccgggctgcccggacgccggcgccggcgcggccaccaccagcagcgtcgccaccaccgcggccaaggcgagcagcatcggcctactcctcgtcgtcgtcgccatcatgcgcgcgctcgatctgctagctagctctctcgatcacacacactcgacttggagctag

SEQ ID NO: 29885 - DNA, 1381 bp, Zea mays
  Peptide Sequence Number=SeqID_71664
gatcttcgctgcgacgtggaacgtgggtggcaagtcaccacccagggggctaaatctagatgaatggctccatacttctccttctgccgatatctatgtcttagggtttcaagagattgtccctttgaacgcgggaaacgttcttggcactgaagataaccttccagccaagaagtgggtgtcccttatcaggcggacgctgaacaagaatcctggatctagtggctgtggtggtggctaccatacaccctcaccagtcctggatccggttgtcgagttagacgccgacttcgaggggtctgcgagaaggcaggacaacttctcattcttccaccgtcggtcgttccacaatctcagccgtagcttaagaatggacggggacttgatgttcccgcagccaaggctagatcgcaggttcagcgtctgcgatccagtcaacctaggaggcagaccaagcgattttgatggaagtctgcgttgccccggatcacctgatgaggatacaatcgatatggaaatgggtgacagcgtacaagtttcaccattccctcatagctacagtgcatctgcaccttccgaacagaacgatgaccaatcaaacagctccaggtattgcttagttgccagcaaacaaatggtcggcatatttctcacggtctgggtgcgcaatgaaataagagacgacgtcaggaacttgaaagtctcttgcgtgggtagaggattgatgggttatctcggaaacaagggttcgatttcagtgagcatgtgcctgcaccagacgagcttctgcttcgtatgttgccacctgacctcgggggagaaggaaggcgacgagctgcgcaggaactccgacgtcctggagatcctaaggaagaccaggttcccgcgggtccgcggcgccggtgacgtcaggtcacctgagacgatcctcgagcacgatcgggttatatggcttggggatttgaactaccggatcgccctgtcttactgctcggcgaaggctctcgtggaaatgcatagctggaagcagttattggagaaagaccagctgcggatgcaacagagatacggacgagttttccagggctggaaagaagggaggatctacttccctcccacgtacaaatactctttcaactcagaccggtgcgaccgcatcctctggcacggcaacggcctgagccagctgtgctacgtccgcggcgagtcccgcttctccgaccaccggccggtgtatggcatcttcctggcggaggtcggcgtcgtgcgccagcggaggaggaacaacgccgggtacttcggatctagggtcgaggtggaggagctgttgccgcgctctcggagctatagactgagagatgatgaagttttgctgagctga

SEQ ID NO: 29886 - DNA, 2151 bp, Zea mays
  Peptide Sequence Number=SeqID_71665
atggacacgcccgaccgcgccgccgcgcagtccgcggccacgcgcaccgaggtgaccaccctctctctctatcactcccgtctcctcgactgcgcgggacagttcccttcccctccctccctcccgtcccgcctgccgcctcaaatgaggccggggagccctgcatccaccccgtaccccgtcgaggcgggtacggggaggccagctgcccgccgccgggcgccagcgccacggttccgccccgcaagaccgcaacccggcgcggagcctacgccaacaccggactcgccggtgttcagcttcctcaacaacctgtcgcccatcgagcctctcaggtcgtcggcctacagcaccaacagcctccaggggttccagtccatcaacatcacgtccatctcctccatcttcacctccccgcacgacaacgtgagcaaggaaccgaggctcccaaagagcccgcttggtgaaatttctgacaaggaggttcgtgccgacgccgccggtacgaacgagccacccgagccttcgaacgcggccaggttgtttgcctgcactagcaccgtgactcgagaaacgcgcacgggtacatgtacgggcgtggctggtcctcctcccaccaccggggggccatgtgatctggccctgcctcgtcagttcgacaataacggcagtccagaccacaacacgacgccctgccacggtgtcaggtcagaccttaaacaggacaaggctaggaagctgctacaagctgcacagaacgctaaaaaaaacgcgctggagaagaggaagtgcttgttttccaccgaagtccggctcctggacggcggcggcggcggcggcggagagcctgggagtgacagtgatggagtcttgggatgcgagtggtccgacttagtctccccgacctcagcgaagcttttggccttcgacgccacgatggacgagcatcacagaggagtgcatttggcggctcagaacgcagagtcgtgtgggtatttgctgtcgaaacttgccggagacggtggcgtatcggacggagcatatcctactgcgtctgctcaggtatactatcaggaacttgtgatgggagaagatcagtcagagaacgccgctcctcaaatggacgctcaggaaaccatctcagccgaagaaacccaggataatatctatgaagcggatgtgtgtgttccattagagtacaaggtagtggagagccaacagcagcgtggcatacggagacgctgcctggtcttcgaggcagctggtgggttttcgaatagcgctgtgaaaagggggactattgaagatcgctcggtctcaacatgtagtaagggcaaaagccctgcggaaagccagccgcgtggactgcgaggcatcgggcttcatctgaatgcgcttgcgttaacaccaaaggggaaaatggcctgtcaggatcctcctcctacggcttctgctctccttccatcgtcagcgtctgaaaaggatgcgcgtggcgagctgctttgtgcaggagagaatttcgcacactcgggcggtgagctgttggagtttcccttggatggttgttcggctggaggagggtttcctgtaaatgaccatcatgtctcaggtcagagcgtcagccctcaaaagaagagacggaaaacggataatggcgatgatggtgaggcatgcaagcgatgcagctgtaagaagtcgaagtgcctgaaactttactgcgagtgtttcgctgctggtgtgtactgctcagaaccttgttcgtgccaaggatgtatgaacaagcccatacacgaggaaaccgtcctctccactcggaagcagatagagtttcgtaacccgctagcgtttgctccgaaagtgatccgcatgtctgatgccggtctggaaacaggggtatggcgttgcgtacttctgttggagattgagatgaagatcctaacaacactccggcttcggctcgtcacaagagaggatgcaattgtaagaagtcaagctgtctcaagaaatactgtgaatgctaccagggaggtgttggatgctcgagcaactgcagatgtgagagttgcaaaaatgcttttggcagaagagatgattcgtaattattgtttaggaacatgtacagtacagtcccatcctggggcatttttctga

SEQ ID NO: 29887 - DNA, 141 bp, Zea mays
  Peptide Sequence Number=SeqID_71666
atgacggaagaaagcgccaagaagagcaagctttcgtggtccaagtccctcgtcaggaagtggctcaacatccggcccagggcgcaggacttccatgccgatttcgacgccggccaccaggacacttttttccgcccgtag

SEQ ID NO: 29888 - DNA, 234 bp, Zea mays
  Peptide Sequence Number=SeqID_71667
atggtgaatcgcgggtgcgtggtgaagcccgtccgaggtctcagcggggcgatcaagaatcggggcaaagtggaaatcgctcattggtgtgtcaccgacggtggaaactgcgccgtcctgtgtgcagcctcttttctcgtctctatccccgacgagcaagctactgtggatactgaggcccagcaaatagaagtagctgagcaggagctcattgaaggcaagttgtgcccttga

SEQ ID NO: 29889 - DNA, 639 bp, Zea mays
  Peptide Sequence Number=SeqID_71668
atggggaactggcgcgtgggccgattttcgccccagtcggcccatcatggttctcccgcgggggcagtagcaatgcgcgccgcgtccatcgctatcgccgacaggattggggagcttcttctagctccgccgcaacagaacggcgccgtggttcgctcgacctgtggccgctcgtgtgcctcgtcggctatgggactccgttgccagcgactccgcgcgtgctcgcgcgctcgaccactgccgcgtggggccgtcgggtcggcaacatccccgccctcctcacgcaacgacctacgtactgaacccaccgggtttctcgccaacggccacccacgattcatggggtcaggggctcaacgaccgcgacaacagggtaggatctgcaattcgcctccctgcggactccatgccttcataaatttcacccgggttgtgccatcaccactctgtgggttcaccggagaaccaatttggagggaggatagaacttgtgtcgggcgctccgtggtcgggctccactacctgcgtccagcccttggtgatcgacccgggagggagtctggcgcacaaggatgctcttcgcagcgtctcttgggaggaatcgcgctctggaccaccggaatttttcaccggagttga

SEQ ID NO: 29890 - DNA, 516 bp, Zea mays
  Peptide Sequence Number=SeqID_71669
atggtgacacagagaaccacgcccacggcgatgcgcggcgcggcacaccctgcagaccacggcgagaaattcttagcgcctccagtgatcccacccagcccgcttgcacagatacgatccgagaactactgggaaggctactggactcagggcgaagctcaggaacggtccatggcgcccgcaacgaactccacgattggcgcagacgctccgagctccacggaagccgcggccgagaagaaggagtccgaccgcgcgatgcctgctcacagggccccgccgatcagtgagtccgcgcgccagactcgcggacctcgcgttgttggcacagccctcgcggaatccggcagtcgttggcgcggatacgaaacaggcacagcgaagaagggggaagggatagagatgacaggcaggtcccacctgcgggccccacaggtcagcgaaaggatgagaggggcgcgtgatagagttgggctgcacagccaggggagggagtggaaatgggccgagtacaag

SEQ ID NO: 29891 - DNA, 387 bp, Zea mays
  Peptide Sequence Number=SeqID_71670
atggcgcaccaggaagcctcaacgcgctccgaattcaccagactggacgaattagctggtcgaggaagggctacaagggattggaggaaccggtccaaggcctactattttatagtcacggaggaacgatccatggcgcccgcaacgaactccacgattggcgcagacgctccgagctccgcggaagccgcggccgagaagaaggagtccgaccgcgcgatgcctgctcacagggccccgccgatcggtgagtccgcgcgccagactcgcggacctcgcgttgttggcacagcccgcgcggaatccggcagtcgttggcgcggatacgaaacaggcacagcgaagaagggggaagggatagagatgacaggcaggtcccacctgtaa

SEQ ID NO: 29892 - DNA, 837 bp, Zea mays
  Peptide Sequence Number=SeqID_71671
atgaatccggatactcaggtgatcttggatgagattgcgcggcgcttctcggagcacgatgtgaagtgggatcggtgtctaacggagcaggaatcccgctgggatgcggcgttctctgacttcaccaaaggtcaggagcgacgcgttcaagcgttggagcagaatacaagtctaatcgcggactggcgctcttccatggaaggggtggtcgacgatcttcgcttggaggtcggcaaggtctccaaaaattgggaacgcgccgtggtggacaaatcgacttccatggcgggagttctcgcgccttcacctccggttgtcgagcgcccagctgcccggtttacagccgaaccgccccatgggcatcacatcgaattgttcaccgaggaggatggatttgggtcagtcaccaccctactccatccccccggtcaaagtagagattattttgacgtgtacgcagtagaagtgaggttgtgggaggaggtctccaggccattgcggcggccggaaggcgttcgaccatcgtttccgatggttgccaaagggccagcaagaggtgccttgccgctgcccttaccacctaagatggagcagtttggcgtcgtagcagaggaagtgaaacgtggagactacaaccatcctcgcgtcgaagataagttcgctgcgctgagagcttaccatcgctctcgtgggttgtgtcagcgtgtgctgaaaattggaccaaggatcatcagtgtcctgcaacggtttagctacatgcattgcaagagatctaggagctttaccaaggggatgaggaacaactgtcagaagccacagatattgagtcccctatga

SEQ ID NO: 29893 - DNA, 150 bp, Zea mays
  Peptide Sequence Number=SeqID_71672
atggctcgtagaagatcccaaacgaacaagaagtccaaggagaacaaggaggtaaattacgaaagcttttttggtagcatagtctttaaattctgcataaatcttgcagctctgaaactgaaatctggcagccctgaaacttcatcctag

SEQ ID NO: 29894 - DNA, 348 bp, Zea mays
  Peptide Sequence Number=SeqID_71673
atggagaagagcaggggcttgactacggacggcgagtgcgtggctccgggaggtaatgggggagaagaaacagaggaaatgaagtccattaatcgcagaagtgaaacggtcgcgggcgtcgtggccggtgcgaagctggtcgctgcttggggcgcgctcgacggcgtcgggtcggtctcggtgtcgcgggcagggcgcgagttgacgttgcggtcggtcgagtcgcggctcgcgcgcgggcgtcgcggcgtgcagggagcacagcggctcgggctgcagaggcgccgcgcgcggtgcagggcacttgtcgcgcggggaggccagggcttgggcgcgcggcgtgcttga

SEQ ID NO: 29895 - DNA, 561 bp, Zea mays
  Peptide Sequence Number=SeqID_71674
atgggctggacatgtgctgcaggaaaccgagcagagcgcggtccagtgaaggaaatcgacgacgaggtgtgcttggtcggacagggagaggaaacggaggtggagaccgagctaggagtgggcgcgagctgggcgagcgcggacctgaggaggggcgagcaccagggagaagagggcgctcgacgcaggggagatggccgacgattccatggatgccaagcggagaagaggacgcgtgtgggaggggatccggcgccaggaacaggaagcggagcgcgcagggagctcgggcgagctgcagagatggggctggggcaagcggcatggtggcctgaggtagtggccggtggcaatgagattgatggttctagttatgactatggtgctgctagtccactacagccaaacaggatacttgctgagtatgttgatgtgtactcacccttgctctacacaccaaaccccccatccccaggttgtcagcattgcaaccactgctcaggagaagatgaagccgtggaaggagacttccaggagttccaagactacgacgagttctag

SEQ ID NO: 29896 - DNA, 771 bp, Zea mays
  Peptide Sequence Number=SeqID_71675
atgacagtcacagtgatgacaagtacaacggcgtcagggtggcgaagcagcaggagggagggggagaaggctgcttatcacaagacctggaactcggtctcctccggcgacttcagcttcacgtccacagcgtcgtctgacgcggaggctgtcatcatccaggctctgcgctcggaccgcctcttgtacgagcctgcagatcatatggacgaccacgacgacgcctcctgctgcaggcttatcaagcagccgccgcacaacaagcagtccatcagcaggcagaagcaggccgccgtgggcgacgacgagccgcagctggacaccagcagcatcgttttgagcagcggcagcggcaaggctaataaggcaccagtattagacttagtaacgacggcggaggccttggcgacgttctgtggcgcgacggccatgtctgtggagtcgcacaacccctaccgcgacttcagggactcgatgcaggctatggtgatgagccagcaaggcaccactaaggactggcgctggcttgaggacatgctgggctggtacctgagagccaacggcaagacgacccacgccctcatcgtcgccgcctttgtcgacctgattgtggcgctcgccatctcgcctccggctgcagaagattataattactcctcctcttcttcttcgtcgtccttgtgtctgctggctacccctcctgccagtgctagtgcaaccaactgctctgctgcttcatcgtcctcatccattgatgattgctcttgctga

SEQ ID NO: 29897 - DNA, 153 bp, Zea mays
  Peptide Sequence Number=SeqID_71676
atggccaggattcctcagaggttgtcttggccttgtggtgcccgttccctactcctcgtagaattcccagaagaagaagatgaaattcaagaagttgtttctgtagaggagtctgcttcagtgcctgctcatcaaatgatgggagccatctaa

SEQ ID NO: 29898 - DNA, 111 bp, Zea mays
  Peptide Sequence Number=SeqID_71677
atggttaaagtgctgaggcacgtggcacaagaccgtgaggtccaaaaatgtgcacattttgcatacaaccccttagggtctcaagctagggttttccaggggtctatttag

SEQ ID NO: 29899 - DNA, 243 bp, Zea mays
  Peptide Sequence Number=SeqID_71678
atggccgacatcgacgatggcttcctgcggcgcgagacacgagtgacgagcggcggcgcaagcgttgcggtggtcgtggctgtacgagacacgagcgacggcgcgagcgtctatggcggcaaccgcccgacgtcgagcggcgatggtggcgatgaccgcttgcggcagcatccgaagacgatgatctcctccaatccagcgcatctcggggtccttcgacgaagaccgcctctagtctggtag

SEQ ID NO: 29900 - DNA, 1947 bp, Zea mays
  Peptide Sequence Number=SeqID_71679
gttcctgtcatcattgatcacaatgggtgcaatggaaatgcggatataaatttccagttcactgggtttatgatatccggtaaagtagtgggagctgttggtggtaagagctgctcaaaacggggaggacctgctggtgtgaaaattgaactgatgacagattctgatgagttgattgcatctgctttgacgtcatcatcaggagaatattcatttacaaacataattccagggcgttacatattacgtgcttctcatcctgattatgaaattgagttgagaggctcaccagagattgacctgcgatttggaaatgccgtggcagatgatgtcttctttgtatctggttatgacatttatggcactgtggttgcacagggaaatccaatagtgggagtccacctatatttgtattcaaatgatgtaacgaaggtcccttgcccacaaggtttcagtgatgcacccaaggaaggtgcactttgccatgcaatatctggtgctgatgggaagttcacatttagatcactaccttgtggtagctatgagttgttgccatactacaagggagagaacaccgtatttgatatttcaccatcttcactttctgtttctgttgagcatagtcatttgacgattccccaaaaattccaggtcactggattttctgttggagggcgtgttatcgatggttatggtgctggtgtggagagtgccaatgttatagttgatgggcagttgagagccataacagatagtcttggatactatagactcgatcagaagtttgcatacaaaaatatgggttataattttgcatatggaaatacgggatacaccatgtggtcagagcagtgggtcggtaacaatgtaaaaacggaatataccgtatttgaatacgagtctgattggttgcctgcattagaggctatccaggttacatccaagaagtatactataactgccgagaaggatcattataagttcaaccgtttggaggattttatgattttaccaaatttggcaagtattgatgatatcagatcagttagatatgatgtatgtggtattgttcgaacagttactctgaattcaaaagcaatggttactttaacacatggaccagaaaatgtaaagccacagcggaaattagtgggtgaaaatggacatttttgctttgaggttcctgctggtgaataccagttatctgcattacctgtagattccgaacgctcttctagtcttatgttttcaccgggatctattagcgtcaatgtaaatagcccgttgcttgatctggaattctctcagtcacaagtcaatgttcatggtaaagtctcatgcaaacagcaatgcagccagaacattctggtctcacttgttagattggctggcggagttgaacaggaaaagaagacaactacattggaacaagataatgttaattttgtgtttaagaaagtatttcctggaaaatatcgtgtagaggtgaagaattctttacccgagggcttagctaaggatgattggtgctgggaccagagtatcttgaatatagatgttggtactgatgataaaggatcacaaagaatttgtgttgaaacttcagggcaacatgagattcatttaactaatccttgtatttcctttgggacctcgtctgttttgtttgatacagctaatttaatgccgatccatatcaatgcaaagaagtatcttgtaaaaggtgaaatccatgtggacatgagctccattcaggaaaacattgattccaaggacatagtcgtggatatcttgaagagtgatggcagtttcatagaaaagatatccacatcacttgttcttggaaaggacaatcaaaatgacttcactgcctttgagtactctatttgggctgaccttggggaggacttcatctttgtcccccatgattctagaatttgtctctaa

SEQ ID NO: 29901 - DNA, 120 bp, Zea mays
  Peptide Sequence Number=SeqID_71680
atggtagttgatcaggtacagcttttggatcgccatcacctatttgtcaagttcggtagtgtggatggagggctaacagcaaatacgttttggatatccctaggtttctcggagtactaa

SEQ ID NO: 29902 - DNA, 168 bp, Zea mays
  Peptide Sequence Number=SeqID_71681
atgaccgccacaacgccgcgcaaagggctcaccggctcccgagaggacagagtccgcgcctcccaggcatgcatattagttgtcttctacgcacatgctgatggaattatctatcaagagatgatacgtcactatgttcaaattgttaaaacagtatacgaatgttag

SEQ ID NO: 29903 - DNA, 339 bp, Zea mays
  Peptide Sequence Number=SeqID_71682
atggctgctgcgaggcccgacgtagaggttgcgcgggggcgagacggttgcacgacgcagcgcacgatgaggtgctacgcacggcagcacagacggcacgacgaggctacgcagcggggcacatacacaggagcaggactaagcagcatgacaccgagaaaaatggaaatgaagaacatagaagggaaggcactcaccagagacgacgagctcgccggcatcgacgtctgcggcgtggcgaggctttggtgcagtgcggctttggccaggagacgatgcacatgccgcgggtgccgagacagcaagggcgctgcacaggagatgagacgtgtagggtag

SEQ ID NO: 29904 - DNA, 237 bp, Zea mays
  Peptide Sequence Number=SeqID_71683
atggagttgagacaggatctgcaaatggaaaaggagagggtacgtccaagggtcagacaggtaaattgccgctctcaaattgaggtggaagagaggagatttttgaagagtaggcataaatataagtgtcaagaggcgataactaacaagggtatgagagaaaagatgaaggcattcaagagccagtggtatgagtacaacaaagaatggagttatgtccaggctttcacgcgataa

SEQ ID NO: 29905 - DNA, 462 bp, Zea mays
  Peptide Sequence Number=SeqID_71684
atggagatcacaaggaactcggtaggagctgacttaccagaaatcgagcagcgcagagcccccggccatggcatcacgcggccaacggcgaatggatgttctggtgagcaattgtggtgttcccgtggagatttgtcaccggagtggtcacattacaacacgggaaccaagcgaacccaccaagcttttcctgtgccacaaacagcgacacagacggatgcccacggtgagatgcggccgcggcaaacgtcgtggccccggcgagcacattgggcactgcgggtggcttccctcacacggaaagcgcatgcttacacgcgggacgaagcggcaatttggccagaccacccaaatcacccccagaagtggcacacggggattgcccctgcggcgacacacatgcccagcacacgcatactagcggcagcgttgaggattcttgacgcaaacccacactggtga

SEQ ID NO: 29906 - DNA, 201 bp, Zea mays
  Peptide Sequence Number=SeqID_71685
atggatggcacacggctcgaaatcgtcctgtctgggtcttcgtctggtcacctttgtcttccgctcgtcttcgacgtcgaggtcttcccatatttcgacgagcgtggttggatcaaagagttcgatgcttatgcggctaccctgggtggtcttcatcctcaagacggcaagcccttgagtcgaacaatcttcgcgccgtag

SEQ ID NO: 29907 - DNA, 160 bp, Zea mays
  Peptide Sequence Number=SeqID_71686
gagtgagtgccccatattcagggtatcgatagaggcccccaggctcacattgggtgaggcggcgaacccgcaggagctctggcaggtccggatgctcaaggcttccataagaccagggaccatcccaggatgtggtctaggaccaacaatgttcctttag

SEQ ID NO: 29908 - DNA, 393 bp, Zea mays
  Peptide Sequence Number=SeqID_71687
atggcgtttggggtagccgtcgtcggcacccaacatgctcgggctacggccatcaccgacctgataaaggctactgcttacccttccaatctgaatgctagcagcatcctggcaaagcagaaagggagtggggccaacagatgttacaacgacatcaaccttgccatgacaaaggtggcccatcgaccatgggagatcctcacaagggacattccacgcgctctgaaagggctcaatacggcgccaatacccaactcaactcccacaagctccatggcgttcagggtagcagccagtgacctccgccgagctctgcctttggtcatcgccaaggcaggatggggcaccgcttaccattcaagtcagatgcacaacggagctcgggcagtttag

SEQ ID NO: 29909 - DNA, 402 bp, Zea mays
  Peptide Sequence Number=SeqID_71688
atggcatcgcgcggccaacggcgaatggatgttctggtgagcaattgtggtgtttccccgtggagatttgtcaccggagtggtcaccattacaacccacgggaaccaagcgaacccacccaaagcttttcctgtgccacaaacagcgacacagacggatgcccacggtgagatgcggccgcggcgaacgtcatggccccggcgagcacattgggcactgcgggtggcttccctcacacggaaagcgcatgcttacacgcgggacgaagcggcaatttggccagaccacccaaatcacccccagcagcggcgcacggggattgcccctgcggcggcacacatgcccagcacacgcatactggcagcggcgttgaggattcttggcgcaaacccacactggtga

SEQ ID NO: 29910 - DNA, 323 bp, Zea mays
  Peptide Sequence Number=SeqID_71689
atgtcgcactccgcggacgctatcgcgatcctcgcgtccaaccaagctccagttctccaccaccggcgtcagtattcatccacgccatcgttgggggcgcacaggcgggtcagtggtgttggccgaaccactggggagctctgggtgctctcggaccaggagaactgccgccgaacgaccggaatttcttgtcggggaccatctgcgccgctgggcatagaaattggatctcgcctctgcacaatcgccgacgagcaagctacagaggatcctgaggttcagctggtagagattgctgagcaggagctcgttgaaggcaagtt

SEQ ID NO: 29911 - DNA, 348 bp, Zea mays
  Peptide Sequence Number=SeqID_71690
atgccgcactccgcggacgctatcgcgatcctcgcgtccgtacgcgttgacccgaaccaagctccagttgtccgccgccggcatcagtcttcatccacgccatcgttgggggcgcacaggcgggtcggtggtgttggccgaaccactagggagctcttggtgctctcggaccaggagaactgccgccgaacgaccagaatttcttgccggggaccatctgcgccgctgggcatagaaattggatcttgcctctgcacaattcccgacgagcaagctacagaggatcctgaggttcagatggtagagactgctgagcaggatctcgttgaaggcaagttgtgcccttga

SEQ ID NO: 29912 - DNA, 254 bp, Zea mays
  Peptide Sequence Number=SeqID_71691
attcgcctattgaccccccctctaggcgactttcaattggtatcaaagcccggtacttcattagagtccaaccactcaaagtgatgtcgggaacatccgctaagagggagatggaaatggacacaagccgcgggaaagctccatcgaaggagtctggcgccaagaagaagaagatgaagaaagtggtctactacgagaccgactcttcgtcgccatccacctcccgactgcgacgcaccgtccgttacttctaa

SEQ ID NO: 29913 - DNA, 165 bp, Zea mays
  Peptide Sequence Number=SeqID_71692
atgacgctacgcgaagaggaggactatgggaactacgtccaaggtttctcaccggctttgaagacaaagacagtggtccgtgaccccaagcgatggcttcgcggcgttcttctgtttcagcgacgactctctcgacacttatggcgaatgctccaaaatatgtag

SEQ ID NO: 29914 - DNA, 423 bp, Zea mays
  Peptide Sequence Number=SeqID_71693
atgacaccgcgcggccaaggacgtggatcgacggtggcgtcgtacagcgacacttccttggcgacggacatgacaaagctctacccgcccccctcttggtcacgccatcggtacggcacggatgcacgtggggaggatgcggcgcgcgacgaagggggcaggggaggcgaaggaggcgaagtggcggtacggcgtcgtgcggagcacgagaagcctcaccattgcatgcaagcttctggaagcttcaggaatggcagatggctgcagttgaagtggaggcagggaagaaagcggagatggggaagggtgcgactgaggaagatgactagtgggtcccaccagcaagtgagatctttcctccagcccaagcccgcgcacaagaaagtggagaccgatagtaggggcccacgcgccagcgtctaa

SEQ ID NO: 29915 - DNA, 492 bp, Zea mays
  Peptide Sequence Number=SeqID_71694
atgaacgtatgtgagctcattcttgttgtctcacacccccccacaggtcaagaacagacggtggcgctgagacccaagcccacggtgagacgcggccgcggcggccgccattgcttcggcaagcacagcccgacgctccaatcgatccccagggtcgcaattcgggcacacgatccaggggacggtttaggtgagtcacagtggctaccccacgatgacaccgcgcggccagggatgtggatcgatggtggcaccgtacagcggcacttccctggcgacggacatgccaaagctctgcccgctacccctctcggtgacgccgtcggtacaacacggatgcacgaggggaggatgcggcgcgcggcgaagggggcaggggaggcaaaggaggcaaagtggcggtacggcaccgtgcggagcacgagaagccactctattgctggcgagcttctggaagcttcgtgcttgtggatggctgtagttgaagtggag

SEQ ID NO: 29916 - DNA, 263 bp, Zea mays
  Peptide Sequence Number=SeqID_71695
atggggagggctcagggaggtcgaggggattgcagcgaacatgagcgtgggtacggcaccgacgcagtggcaccggaaggtagtcatccacggtgtgatggctcggccacggtgcagcttcactccgggaggtctggtgagcatgaacaaagagaacagatgggaagtgggcgaattgaagggtgtctgggtcatggacatggaggcgaaagctcactgaggctgtggacatatcgagggctctactacgactgtggaaaggg

SEQ ID NO: 29917 - DNA, 234 bp, Zea mays
  Peptide Sequence Number=SeqID_71696
atgggggcgagcgtcgttagaggtgggggggagtcgcgggggcgctgggggccggcaggggagcttgaggcggtggtcggcgtcgcatcacattcattagactgcaatctcgctgatggagagtatgtgctcatccttgagcaaggagttgaccaggaggaagttcaggagccaactcctgaatctgccatcgaggatttgcttgtagccccagtaattaaaggcaagccctag

SEQ ID NO: 29918 - DNA, 285 bp, Zea mays
  Peptide Sequence Number=SeqID_71697
atggcggtccctagttttatagtggctagggtggagtctttatgggagcgttcggtcgggacgaacccgaaatcaccgcgcagtcgttgcgattcttctgtgctagcaacgatggggctcatggcggaggcgaggaaatcccatccagattccacgcacgtctccgccaggttttttgcgaaggtgggggaaggaccttacagtttgggtccacctatcagggagttttcaagttcacataaaaattcaaaactccgaaatttatgttcaaatgctaccatatga

SEQ ID NO: 29919 - DNA, 1205 bp, Zea mays
  Peptide Sequence Number=SeqID_71698
atggggcacgaccatatgtctcgtataaagatgcatatggcagaaggttcttttggtgacaggaaccggtgccagcaacctgggtgcaatgaggttgtcgatggaagggtagtgtactgcaaaactcacagcggagagttgtcatgccaacagttcagtcacctccagagcggactggagagctcaggtttatcggtgcgtcctgtaactcctgttaatgacagccagtttaagggatctgtttccattgcagcagtaccatgcactgagcaagagttacatgtcaagcacgaaggggatgatcgaggtaaactaaaggatagttctgggtacactttgggtcagactgcacaatttgtcttccctggggcaggcatgttttgcaagaacgatagctgcagcaagcaagcacatgagaactcaatctactgtaagttgcatagcggtgttagcaagggctgcatggtccgaggctgtacaagaggtgcacatggaggcacacctctgtgcattgggcatggaggcgggaaacggtgtgtgatccctggatgcccaaatgccgcgtgtggtcaaggcctcagtgaccgctgtgtgaggcatggtggtggcaggagatgtagattcgaagggtgtgcgaagggcgcacaggggaacaccgattactgcataaggcacggtgggggaaggcggtgcaagtttgaaggttgcacgaagagtgcgcagggacggacagatttctgcattaagcatggtggtggcagccggtgcaagttccaaggatgcggcacgagcgcaaaatggggaacagatttctgctctatccacaggaaggctttgttgggaggcgacaatgccgccgtccctgaagctttgcctgccgcttcagaaaaacgacgtcgtgccaagaagcccaagaaggcggcgaaactgtctgaggcctcccaagagaatgccacagcagcagcagctattgctggtaacagcactcaacatatgggcggtcttctcatagctatccctgttgctaaccgtgacatgttaaccaaagccgtggcagcgacggggcaagctgcaatagcctccgcacagatagtggcgccgctgtccatgaaatcgccgacgccatctggagcagcggcggctaccttgactgggagggtcccgagcaagcagggagatgctgggtctgtagaaagatggtggca

SEQ ID NO: 29920 - DNA, 913 bp, Zea mays
  Peptide Sequence Number=SeqID_71699
atggcgcctcctgttgacgcggtcggtccgtgccctgggttgggcgatgtggaggctcctccgaggtcgaggtcgagtctgtcttccgaggccgaggtcgagtccgagcccctgggtcgggcgaggcggagaccatcggctgaggccagggctgagtccgagccctggggtcgggcaaagcggagttcgtcgtcttccggggctgagcccgagtccgagccctggggtcgggcgaagcggagttcatcgtcttccggggctgagcccgagtccgagccctggggtcgggcgaagcggagttcgtcgtcttccggggctgagcccgagtccgagccctggggtcgggcgaagcggagttcgtcgtcttccggggctgagcccgagtccgagccctggggtcgggcgaagcggagttcgtcgtcttccggggctgagcccgagtccgagccctggggtcgggcggagcggagttcgtcgtcttccggggctgagcccgagtccgagccctggggtcgggcgaagcggagttcgtcgtcttccggggctgagcccgagtccgagccctggggtcgggcggagcggagttcgtcgtctttcggggctgagcccgagtccgagccctggggtcgggcggagcggagttcgtcgtcttccggggctgagcccgagtccgagccctggggtcgggcggagcggagttcgtcgtcttccggggctgagcccaaagttcgtcgtcttccggggctgagcccgagtctgagccctggggccacctttgcattaaatgctcctgcgatttggtcggttggcgtggcgatttggccaaggttgcttcttggtgaaggctgggcctcggacgagccaaaactttgtgctgatgggggttaccagctgagaattaggagccttgagg

SEQ ID NO: 29921 - DNA, 432 bp, Zea mays
  Peptide Sequence Number=SeqID_71700
atggcgccccgcacactctatgacgacggcggctctcagcccccttacggaagcaagaggacggaccccccggtctcgaaacgccgacaagatctactcgtcatcggggatttccgagttagggattggcgacggctgcggcgctcaggttggggttctcatcgacggcgtcagcggcttcccctcccgcctctcgccagtcgcttcgcgccctcgcctccggtcctccgcacactggccggtgaccctgcgtgcgtacctctctctctctctcctcccgcctccggtggttcgttaacggcgcccaaccccggcggctgcgccgcgcgcggcttgagggcagagggagccagcagccgctgctccaccaagcggtcgcgccgctttgggagcgcttatgcccccaaagcgaagcgttacccgtcctcttag

SEQ ID NO: 29922 - DNA, 459 bp, Zea mays
  Peptide Sequence Number=SeqID_71701
atgggcaagagtaacaaacgcaagcgcgagccgactcctccatcggaggactttggcgactcggaatactcggaggaggagttctcctccgagtccgaggggtctctggctcctgtctctcccccggtgtcgtctgacatttcagacgactcccagaggattgccgcagaggtctggacttacatccgggccgtcgagcgctccgggctcgagggctcggatgagtcggagtactcctcggacgaggaggactcttcagactcgtccgaggagggcggcggcggtgatggcggagacgacgacgacggaggcgacggtgacgacagcgacagcggcaggggcggtgacggcggcagcaagggcggcaacggtggcggcagcaggggcagcaacggtggcggcagcaggggcagtgacggcggcggcagcagcaagggcagcaacaaggccagtggctag

SEQ ID NO: 29923 - DNA, 783 bp, Zea mays
  Peptide Sequence Number=SeqID_71702
atggaggtgcatctgaggaaggtcatgcacagaagccggtttatgcggaagagctccatcatccctgctatcacgaaccgaatcaagagagatctgattcacaatccgctacatctaatcttttctgtggattttcttggagtaacaaaatcaactttatcatcacttagtaaaggatttgcagagctctctactgatgggcaatttcttcagctgagatcaaagcaggtttggtcaaggagaatcactggtgttggtgatgggctagttcaagggactgaagcatttgctcagggtttggctttcggggtttctggtgttttaagaaagccagttgagagtgccagacagtatggtgttataggtattgcacctggcattggccgtgcttttgtgggtttcattgtccaacctttaagtggggctctggattttttttcactgacggttgatggaatcagtgctagttttatgagatgtgttaacattttaagtaacaaatctgttccgcagaggataagagatcctcgtgctatacatcgtgatggtatagtaagagactatgacaaatttgaagctgctggccaggtcgctgtcggaggcagaggcatcgcacatggcgcagtcggaggtgacagggtcgcacatggcatgagtggtgtcgacgggaccgtgggtaaagaaagagcagggacggcgatagagtcgttatcctggatgtcgaggtcgggaggtggggaagagccagcgaggggaaagacgtactcgtcaaagaccacgtga

SEQ ID NO: 29924 - DNA, 939 bp, Zea mays
  Peptide Sequence Number=SeqID_71703
gtagttgcaactgttgccactttatccttcttttgccatcggccaactgttattgcaatcatggaatttatgaatgccatcaaccttgcaaacgggtctgatactgataaagataaaagcacttatcctgctactgtagaagatagtgcaattgaggaatctaagtctgatctggaatcagagccatcaataaaacccttactggctaaaggtaaaagcagaatagtttttcatcttacatccagcatggcagaggcacagatattactgatgaatgaaaatggtgaccggcttgctactttatcacaaaataatctctcgactgatataaaggtgttcacatcatcattcagcataaaggctgcactcggaaaccttaaaataagtgatgatagccttcttagcagccacccttacttttgggtttgtgatatgcgaaatcctggaggtcgttcatttgtggagatcgactttagttcatacaatgttggtgatgaagactattgtggttatgactatagccttgtagggcagctttcagaagttagaattgtttacctcaaccgttttgttcaagagattatcagttattttatgggacttgtgccaaaaagttctgatgccgttgtaaagctgaaagacaataagactaactcagagaagtgggttagcaaaaccgatatggaaggatcacctgctctcaaattggatgtttcattcagcaggcctataattgttatgccccgtgaaactaatagtaatgactttttggagcttgatgttctatacataacagtccaaaatgaattccaatggataggtggtgataagaatgagatgagcactgttcacttagacattttaacagttacactagagaggggtgcaaacatggaaataaaggggcggaggcacaataaagcctttaccaggatttga

SEQ ID NO: 29925 - DNA, 1365 bp, Zea mays
  Peptide Sequence Number=SeqID_71704
atggtacgggacataaatttagttattggtatgaatatggtgcgtggtgaaaccataattcaagatgtagaaggtctctcctttgaacttcgtagatcattgcgtgatttgagacatcagttgccagtggtggaggcagcaattaaggtggatgttttgaaagcaacactatccaatcgagaatatgaaattatttctgaatgtgcattgtctaacttctctgagacaccacatcctgtgcctactctggatgatcctcgatatggcacttccactactccatcccatgtatcagcttcttcttcagaaagtattcatgtcttgtccgaaggtgcagaaacatggatagctaataaattttctgtctcaataaatctggttgagctttctctgcattcaggatcgacaagagattctcctctggcgagcgttcaggcgagtggagcatggcttttctataaatcaaacacacggggagaaaattttatgtatgctactctcaaaggattttctgtttttgatgatcgtgaaggaaccaaagatgagttaaggcttgccattgggaaatcagcatctgttcgggacacatcatctgttgatggctatgataatcctaatgaacttgattcaggtgaacgaagaatacaaaaggatctaggccttgagccaatcccctcgatgcttattcttgatgccatcttccgaaaatcttcgtcatccgtctctgtctgtgttcagcggcccaagtttcttgtggcacttgacttcttactagcagtaatcgaattctttgtgccatctgctcagagtcttctatccaatgatgaagacaaggaccttttacatatgatcactccagtagtattgaatgatcaaatttatttccaggagcattcaacatttagtctttcacctcagaagcccttgattgttgataatgaaagatttgatcacttcgtatatgatgggaagggtggaaagttatatttgctggatagtgaggggaaaattctctcaagcccttgtactgagagtttcattcatgtgcttgggtgtaagagattgcaatttcggaatgtcactatagtgaatggtgaatatttggattcctgtatctctctcggtgatgatagctgttattcagcatcaaggaatgaccatgtctacttagtaagagaagatgatgggtccttgtcaacccccagcaaggaaattagaggagacagtgttaaaaatgggagtgctgatatatcaaccgaatttattatggaactacaggctattggaccagagcttactttctatagtacatcaaggaatgctggtgaaaacttagcactgtcaacaaaggcacagcttggataa

SEQ ID NO: 29926 - DNA, 1566 bp, Zea mays
  Peptide Sequence Number=SeqID_71705
atggctctgacgctgcgttcctcgacgtcgttcctgtcgcatgtggaccccgcctccaagctcctccacaaacccaccgacgaggcgccgccctgctgcgtctccgtgccgcctgcgcccagccgcaggccgcgcgcgctccgggcggccgcggccacggccacggcgccctcgccggcgacgcaccgcgcgccggcggaggcggccgagctgctgcacggaggcggcgcgggccagcagcacgggctgccgcgcggcggggtgccggtgtacgtgatgctgccgctggacacggtggggccaggcggccagctgtcgcggcagcgcgcggtggcggctagtctgatggcgcttgcggggcgccggggtggagggcgtgatggtggacgtgtggccgtcatgtccttccaccagtgcggtggcaacgtcggcgacacctgcaacatcccgttgccgccatgggtgctggaggagatgagcagcaacccgaacatcgtatacacggacaggtccggacgccggaatcccgagtacatctccctcggctgcgacacacttccagtgctcaggggccggacccccatccaggtctacaccgactacatgcgcagcttccgccagaggttccgcgactacctcggcaatgtcatcgcggagatccaagtgggtatgggtccttgtggagagctgaggtatccttcgtaccctgaggccaacggaacatggcgtttcccgggcatcggggagttccagtgctatgacaagtacatgcgggcatcgctggaagccgcggcggtggcgtcgggccacgaggagtgggggaggggcggaccgcacgacgccggcgagtacaagcagatgcccgacgacacgggcttcttccggcgcgagggcacgtggagcaccgagtatgggcatttcttcctggagtggtactcgggcatgctcctggagcacggtgaccgcgtcatggacgcggccgaggccgtgttcggcggcacgggcgcaacgctctccgccaaggtcgccggcatccactggcactaccggacccggtcccacgcggcggagctcacggccgggtactacaacacgcggggccgcgacgggtacgcgccgatcgcgcgcatgctggccaagcgcggcgctgtgctcaacttcacgtgcatggagatgaaggacgagcagcagccgcagcacgccagctgctcccccgagctgctggtgcagcaggtcaaggctgcgaccagcgccgccggcgtgcagctcgccggcgagaacgcgctggagcggtacgacgatgcggcgttctcgcaggtggtgtcgacggcgcgcggcgcaggcctggccgcgttcacgtatctgcgcatgaacaagacgctcttcgacggcgacaactgggggcggttcgtgtccttcgtcagggctatggccgacggtggcgcgaggccagcgctgccgcggtgtgacacggggcactcggacctgtacgtcgggtttgtcgacgccgccaaggagaggaaggcggcggaggccaagggcgccgccaccaccgcagcattgtag

SEQ ID NO: 29927 - DNA, 510 bp, Zea mays
  Peptide Sequence Number=SeqID_71706
atggacgaaaagcgagcgcacggatgggtcgggctgggaccagaggacgacgaacgccatggcgggttggaggctggatttaacaacgacgcagccgggataattaaaaatactacgatagccaagaatcggctcggagaagacaatcggcacggaagagagaaactcgacgcggaagctcgacacgtcgtggcgagcagggaacttcgcgcgcgcaatagaagagttcgacacgcgcaggagctgagagctgagcgtcggcctgcaggacgccgcgaaggaattctgcgagcagagcgtgatgcaggagcacacacagcccaagtgagctgggcaccggtgaaccagcaggggaagacgccatggggcgaccttgggagaaggctggagcaaggagggagcaggaaaaccagaggccgagtgcgtggaagggaactagtgaccggctactttagcatgacgaagcgatgcagaaatacggaagcaggacacagcgagctgctcggctag

SEQ ID NO: 29928 - DNA, 498 bp, Zea mays
  Peptide Sequence Number=SeqID_71707
atgtcccccagcacagagaccgcccagcgcccaccgcccagacaatcgtccacagctcctgcccccgccacgccaaccgacacagctcgccgccatctccccatagggaccaaatccgatgctcgagccgtcggccacagcggcagcacagagaccacaccgagcggagaagctcgtcaacgctacgccctgccccactcgacgcaggggctgcaagtggccccatgtgaaggcggaacccaccaggctagcgaaagccgaccgtcaacggtccacggggaggacggcgccagagcaggcaagcctacgccctccgcccagcgtggcggaaaagaccacagagcggggaatccggtggacgtcgccaggggcacgcggggaagcgtcaccgccctgctctggcgcggcaaagccgtgggcagagtggagacggtccagcatagtagcatggacagtccgctccggaaggtccgctatgttagcctgaacggtccgtga

SEQ ID NO: 29929 - DNA, 1395 bp, Zea mays
  Peptide Sequence Number=SeqID_71708
atgggccaggcagccgcgcctggcactgcacaggggccgcgttggtgggcgggacgggccagactaggcggtgtcgcctggggccacgccggtgagagtgctggcgatcacatgatgggcgagaccgatgaccatgttggaaaccctaaaccagggtgggctgttgtgtgtatagggaaatacatgggctgggccaatgcccattacaacagaaaatacacaatccatgtgttggagtggttttcgatggaatctaaactaaattccacaccaacccattccaacacacatggatttagatggataaatgtgcatttaaataaggccttggtccgactagtggatacagaatggtgccaacctctggagatagtaaaagaagacactattgttatagcaatgagaaagcagggtggtactcagaaatttgtaaaagctgagatacgtggttatgaggaaggttcaagattcttgattgtattccgtctgggcccagcatatggaccaatcaggattgagaaccggacgagtcataccacaatcagtacttgccagtctggtttaggggaggagagttggatccaagtgaagccacatgcaaccagaaaatattcttgggatgacccatatggacagaaagttattgatgttagcattgataaaggcgatgatacttgtgtcctatgtgttgacctggaaaatcctattggaagttccaccagttttagggaacatggcctcatgtttactgttgataccagtgacattaagatattgaagtttgctgattacataaggaaagaggaagtatatggattgcctggatctgaactgactgatcaccaaggatcgtcattgaaggaaaatgagacagagccaggtgctggacccttggagctcattgttgaacttggagttgttggaatatctttgattgatcataagccaagagagcttttatacttgcatctgcagaaggttttcgtttcatacttgactggttatgattttgggaccactagcaggtttaaattaatccttggcgagttgcaactagataatcagttgccactgtctacaatgcctgttgttttgtctaccgagagcaggcctgattcaaatcgttctgttttcaaagcaaacgttgctgttagcaatgtaacttctaatggcattcaagtttacccacatgtctatatccgggtaactgatcaaacatggagactaaacattcatgaacctattatttgggcactgtttgacttctacagcaatcttcgttttgtcaccaccatcaacagcacaactgtcacggaagtggatcctgagatacgaatagagctcattgatatttcagagataaggctaaaaatatctctgggaaactgcgcctag

SEQ ID NO: 29930 - DNA, 423 bp, Zea mays
  Peptide Sequence Number=SeqID_71709
atggcgtgcgactgtggtgaggacaaagaggatgatggagcggaagcaagatgtggttgcagggtgtacaggggacgagctattacagcgggcaagaagacttcgggtagcgagatcttccacgggcaagccaaagggtcaaacataatggaacaagaattattgggtggagctgtagactatggtagcggcatcggagtgaggggtcaggtccttgaggatgaggttgttgcggaccttatggaaggacgagaccatgaccaagcgagtgatctagtcctggaggtgattgtagcgctcgttgaggctgcaaaggaggttgagggcgagcgtgcgatcagagatgggctctacgatatcagagagggaggctgccatgcgcttcagctgacggcatactcaatggcggagaggtccccctag

SEQ ID NO: 29931 - DNA, 399 bp, Zea mays
  Peptide Sequence Number=SeqID_71710
atggggaggggttcaatggctagaggagccgaggctgggcaggtcggaggcgcgtgtgcaagtcggcgacggggtcctggccacagcagcgcagatccggcgggacgacagggcggcgcatatccaggcggcaaagagggttgcaatgaagaagggggtgatacaccgttagcttggcgcgaaagcagggcggtgtacccactcgggcatgttgctgatagacataaacaggttgagcatagcggcgaggaaccaacatgggcgaaggcaccaaacagagccctagaggcgggggcggtgttgaagaaggggccatcggggcctaggggtctagcatgtggcgacagggtggcacatgggccggtgaggggcgacggggcaacctggatgggagtatga

SEQ ID NO: 29932 - DNA, 348 bp, Zea mays
  Peptide Sequence Number=SeqID_71711
atgtggtcgtccgcgtctacccgctccctgcagcacgctccatccagctctgtcgaacccccacagtcgactggagaatcctccactctagttgcggccctcaccaccatccagtccgccatcaccgccgctcaggatcgtgaatgggtcgtggctcgtgcctacgagcacaagcacgttgcggccggtgttcacaacaatcggtccctggaatccgtcgtgttggatccgacgtcaccccatttcgcacgttggcgtgatcaggtgctcctcatgctccagcgctacaccctcgttgaccacgtcctcgacaacgtcgtcgctccattggctccatcttggatctag

SEQ ID NO: 29933 - DNA, 282 bp, Zea mays
  Peptide Sequence Number=SeqID_71712
atggggcgaccttgggagaaggctggagcaaggagggagcaggaaaaccagaggccgagctgcagaaatatcaacgatgagataggaacagagctggtggcctggtgtccacgtatgaagttcaaaaatatcaatgctcatcaacaaaatatcaatgctcatcaacaacggtgggagatgaggacaacgctggaagaaatatcacggctggagcacgctggttccagggagcaagcaccgcacaggagagaaaaatatcagagagagaagaatggtgggtaa

SEQ ID NO: 29934 - DNA, 822 bp, Zea mays
  Peptide Sequence Number=SeqID_71713
atgtgctccagcccagattttcgagccctggtgcttgagttcatgtccaatggaagcttggagatgctcttgcactctaaaggcaggaacaggagccacatggggttccttacaagaaggatggacgccatgctagacttggccatggcaatggcatatctgcaccatgagcatcacgaggtggttctgcactgtgacttgaagccaagcaatgtgctattcgatgatgatatgacagcgcacgtagcatactttggcatcgcagagctgctactaggtggcgacaacaacatggtcgtctccaccatgcttggaacacttggatacatggcaccagagtacggatcccttggaaaggcatcacgcaagagtgatgtgttcggctttgaaatcatgctattagaagttttcattgggaagaggcccacagatgcaatccatcctgagctttttgtgtcacacccagattttagagataaattcgggcgcgtctcatatgaaggcagcgctattctccccgttccgactactgtgccaaccaccaaggtaaaactgatgacagcaggtctcgacctccctcgagttcagcctcggtcgcaacagggagctccgcctcgcccgacccaggcctcggcctcatcctcggcctcggaagaaggtctccgcctcgcccgacccagggtctcggcctcagcctcggcctcgggaggagtcacaacctcgcctgacctcagcctcggcctcaggagaagtctccgcctcgcccgaccccggcctcagaccgactacgctacaagggatacatcattaccctaccactag

SEQ ID NO: 29935 - DNA, 276 bp, Zea mays
  Peptide Sequence Number=SeqID_71714
atggatatgttggggagagaaaaatcgaaaaaaggaggttataaaatgacttggagaggactagacattgatttgaaggatcagaaggtgcaaaaaattccagacgataagtttgctttcaagaagattatatatgccgtcgacattaatagagcactttcgtgcatcctaaccttttgtgcgtcgttcacccccttcgcaggcttctatgccccgggtccacagtccacacccgccgaggccacccccgtcctcccccacgcgccgctcgcgtga

SEQ ID NO: 29936 - DNA, 585 bp, Zea mays
  Peptide Sequence Number=SeqID_71715
atggaacccgttgtgattcagggaccgaagattgatgagatcagccaccagcacgaccatgaccggcgcaagttctacctggccgcttcgagcggtgggcatcagtggcttctgctcatctacatgcatggctacgaagtcgaaggaggagcttccgcgacctcggcatgtcgcttcacgagctcaacgctggcagcgacaagtgacaaacttgggggagatcatgcgctctttctaagggcgaactatcccttcttcatcaccatgcggcatgggcatggttctgagatcgatcttgaggcgtctaccttgccggcacaccctaggactacagtaggggttcttccctcctggattttcaaaaaaaagggctacaatgttcccatctttgacctgaagaaggggggctatggagatgttgatacttggatcaaaaagtcggtaaagacgctcgatggcacccccttgggtgaagatgtcggcaaactgcagcgtggtgtagacgaggctgacgcgctgaagaggactgcggagctcgtggagaagctgacgcagctaggaggcctctgccacgtcgttggctag

SEQ ID NO: 29937 - DNA, 930 bp, Zea mays
  Peptide Sequence Number=SeqID_71716
atgtcgtctccttcactggttgatactcagctcatccaagcgctggagcaccaaacccggcaccacgacaaatcctcatcagccctctgcgcagacgtcgaggcacatctctcggcggccgacacagatctgttggatcggatctgctactgggaggcctctattggtacgcgtgaagccggctatctcccagcctccaagtcgtcgagcctccgctctattcgtgagtccgacctcgcctgcccagatcaatttatcgtcgactttgtggtcgcgctcgtgcacctcaacccgctcgtccacgtcgacttcagcacagttcccgtcgcaaactccatcgaccctcgtcatcaggtgcccaaggacaagtacgtgattcctactttgctcgccaagtgtttgattaattgcttcgactgcaactgtggctctatgttgtatgatgacatcaagattggagctcaaaagtctatgagcgctataggcagagaagagaaggaagttcgatttgagttgaaaacacatggctccaagagggatgatgaccctgctattttggttttgaatgcttgtgccagtcatgaccttcatgaccatgttgttgggcttcagagggactacaaagcaatcatccacgacctgaacccactgattcctcctatatttggtgctgaccaatttgggtggtgctctgagtggaatgcagccatgaccaagcttactgggtggcacagagatgaagtggtcgataagatgttccttagcgaggtttttaacagcagcaatgtttcctaccttttgaggggaaaagatacttttgtatgtctttgcatcattagcaacaactcattagctgttgaagaggcacaaatgccccatacgatttctttgactacaatgagaattatgatgaatgcctcatgtcagtga

SEQ ID NO: 29938 - DNA, 525 bp, Zea mays
  Peptide Sequence Number=SeqID_71717
atggcggcgcaaacctggcagcggacaacatggccggagtttgtcatctccgcgcacaagcacccaggcgtcgattccctagcgctacacgtaaagagaaataaggcgatctcgattgatggctcgttaccggatttcacagtgtggaggtccctggccacgacggtgtgcggcaacgcggtggagcgccagcgccggcgaccaattccaccgcaccgatcggtcgaccgcgcccgtgaacgccatatccgacatccacaagcccaggcggagtccaagatcgccacaaaactccgcgccgcgaccaatcgcatgagcatcaaaatgcccacggcggcggcgcgcgcagccccacacaccccgcacacacgacggtggataatggtctgcgaaggtaggagggagaagaaacctggggcacagttttatagcaacaaaggctcagcggccgatccggagatcgggcaggatctcaacaacccgcgcgcaccgagcatggctgcatcggaatcggacttcggttga

SEQ ID NO: 29939 - DNA, 1485 bp, Zea mays
  Peptide Sequence Number=SeqID_71718
atggacgacggcgccgcaaccacaatcgtccaaggcggcgacgcgcacgtcctgctcctgccgttccctgggatgcagggccacgcgaacccgatgctccagcttggccggcggctggccttccacggcctgcgccccaccttggtggtctcccgccacgtcctctccaccacctccacctccaggtcgtgccccatccccgtggccgccatctcggacggcttcgacgacggcgggatctcctcatgcccggacaccgcggagtacgtgcgccggatggaggccgcggggtcggagacgctggcggggctcctggacgccgaggcccgcgcggggcggcccgtccgcgtgctggtgtacgactcgcacctgccatgggcgcgccgcgtggcgcgggccgccggcgtggccgccgccgcgttcatgacgcagatgtgcgcggtgggcctcgtctacggcgaggcgtgggccgggcgggtggccctgccactggcggacggggccgcgctgcgcgggaggctcgccgtggagctgggccccgacgacgtgccgccgttcgtggcggcgcccgagtggtacccggcgttcaccgagtccgcgctgagccagttcgacgggctggagcacgccgacgacgtgctcgtcaactcgttccgtgacctggagccaatggaagcggattacctggagtcgacgtggcgcgcgaagaccgtcggcccgacactgccgtcgttctacctcgacgacggccgcttgccatgcgacaagacatacggcgtggacctcttctcgagcaccgactccgaggcggcgccgtgcatgacgtggcttgacaagcaggagccctgctccgtcgtcctcgcgtcgtacgggaccgtcgccaacctcaacaaggagcagctggacgagctcggcaacggactgtgcgattccggcaagcctttcgtttgggtgctgaggtccaacgaggcagagaagctgtctcgacagctcggtggcaggtgcaaggagaggggcctcattgtccccttctgtcctcagctcgaggtgctggcacacaaggccacaggtacgcacgagatgtactcgacgacgatgagaaatttatttttggaagagaagagtttaaaaacatttttgcgcaaatgttacataggttgcttcctgacgcactgcgggtggaactcgacgattgaatccatcgctagtggtgttccaatggtggcgatgccgcagtgggcggaccagccgacgacggccaagtatgtggagagcgcgtgggggattggggtgcgcatgcggaagggttccttggtgaggaaggaggtggagaggtgcataagggaggtgatgggcggggagaggaagcatgtgtacgggaggaatgccgctcgttggatgcacaaggccaaggaggccatgcaggaaggaggaagctctgacaagaacattgcagaattcgcagccaagtatttaccaaagtag

SEQ ID NO: 29940 - DNA, 1485 bp, Zea mays
  Peptide Sequence Number=SeqID_71719
atggacgacggcgccgcaaccacaatcgtccaaggcggcgacgcgcacgtcctgctcctgccgttccctgggatgcagggccacgcgaacccgatgctccagcttggccggcggctggccttccacggcctgcgccccaccttggtggtctcccgccacgtcctctccaccacctccacctccaggtcgtgccccatccccgtggccgccatctcggacggcttcgacgacggcgggatctcctcgtgcccggacaccgcggaatacgtgcgccggatggaggccgcggggtcggagactctggcggagctcctggacgccgaggcccgcgcggggcggtccgtccgcgtgctggtgtacgactcgcacttgccgtgggcgcgccgcgtggcgcgggccgccggcgtggccgccgccgcgttcatgacgcagatgtgcgcggtgggcctcgtctacggcgaggcgtgggccgggcgggtggccctgccgctggcggacggggccgcgctgcgcgggaagctcgccgtggagctgggccccgacgacgtgccgccgttcgtggcggcccccgagtggtacccggcgttcacggagtccgcgctgagccagttcgacgggctggagcacgccgacgacgtgctcgtcaactcgttccgtgacctggagccaatggaggcggattacctggagtcgacgtggcgcgcgaagaccgtcggcccgacactgccgtcgttctacctcgacgacggccgcttgccatgcgacaagacatacggcgtggacctcttctcgagcaccgactccgaggcggcgccgtgcatgacgtggcttgacaagcaggagccctgctccgtcgtcctcgcgtcgtacgggaccgtcgccaacctcgacaaggagcagctggacgagctcggcaacggactgtgcgattccggcaagcctttcgtttgggtgctgaggtccaacgaggcagagaagctgtctcgacagctcggtggcaggtgcaaggagaggggcctcattgtccccttctgtcctcagctcgaggtgctggcacacaaggccacaggtacgcacgagatgtactcgacgacgatgagaaatttgtttttggaagagaagagtttaaaaacatttttgcgcaaatgttacataggttgcttcctgacgcactgcgggtggaactcgacgattgaatccatcgctagtggtgttccaatggtggcgatgccgcagtgggcggaccagccgacgacggccaaatatgtggagagcgcgtgggggattggggtgcgcatgcggaagggttccttggtgaggaaggaggtggagaggtgcataagggaggtgatgggtggggagaggaagcatgtgtacgggaggaatgccgctcgttggatgcacaaggccaaggaggccatgcaggaaggaggaagctctgacaagaacattgcagaattcgcagccaagtatttaccaaagtag

SEQ ID NO: 29941 - DNA, 522 bp, Zea mays
  Peptide Sequence Number=SeqID_71720
atggcgctcgcgcaaggccgctcgctccctcccgcgtggacgcttgtaaccccctactgcaagcgcacccgacctgggcgcggggctaacacgaaggccgcgggttccacctcccacgcctgtctccctccggctgctctgcccccttcgcgttccgcctcgcgccgacccatctgggctagggcacgcggcgacaattcactcgtcggagtggcgcggtgcgctgacgactggtcgcgggggaagaagccgctgccatcaggcccgtcacgctacccaagcctcggctccgcgggcagtggcttccgcgactcgcccgtctcaaccgactcctccgaccgttggtcccgtgccgcgctgagcaatgacgagcgtgagaggcctcgcatcgtgcttgatccgcccaaacgtgacgccttggccacccctacccctcctgctgaggcaggacgcagccgaccgagcccatttggagccacgaggccacaggaggatgtgctggctgataaggggctggactag

SEQ ID NO: 29942 - DNA, 1016 bp, Zea mays
  Peptide Sequence Number=SeqID_71721
accgcagatcgagcgagcgaggagtccaccgtaccgccagcgaggtcatggaacgtcggctccggccaatcgcgcccaaacccatgccgccgctgatgcccactggcgccgcggcgaccagcgtgctgtggcgggcgcgcaagcgcggccgcgacgaagaccgtctccttttgtcccctccgctgtcaaagagggagacggagagggaggcggcgggggcgtcgtcttaccctaaccctcaacctccagcctcggcggcccccgtggcggcgacgaggagaggacgacggtacgtgcctatgcccgagggtcttcttacaggctgtgaggagcggctccggaggctctcgctcgtggcggggtcgtctccagcggctgccttgccgtggccggctgcggcggcggcgccatcgtcatcggacgcggcgacgacgaggcgggtgttccccgtggagcgcgacctgatctcgaagctgcaggtgcccaaggtcatcaggcctcgccccgctcgccctctgtggaccaccatctgcatcgactccagcaacatcgccgtcgtcggtagcggcccggagacggcggcgtctgcgtccaacaagacggcgagggaggtggaggccgaactggagctcccgggcgcgctcccggccgtcgtgtcgggcccccgcaaccgtgtccacctggtgaacgacgcgtacaaggctatggtgggacagcccgtgtgcccgtggctcgacgcgctgccgggcgccggcgcgtcgaggaggatcaacggcatcgtggcgctggacgtgcggacgttcggcccggcgccacgcctgccgaagaatgccgggtcatcatcagacgccttcccatgcaccgcaaggatcacgtgggagcacggtggcggcagcgccatcgcctccctcaccgtgccgtgcgccgtcgagcacctggccggcggatccggtgactatcgcttcatctggaggtttgactccagcagagcgtccatcatctactgcatcgcgtga

SEQ ID NO: 29943 - DNA, 240 bp, Zea mays
  Peptide Sequence Number=SeqID_71722
atggcggacggcgagacgagctcgtggcgaggcacgacgacggcgagactgctgcaccgggatcgtgcaagggttgagacggaatgtgcaggctacgctggccgtgccggggctgcacagatgagtcacgccggatcgttgcgctgggctggctggggagctcctccatgtggcgagaaggcggagtgccatcgcgccgggcaggattcttctaccacggctttgactccaccggcttga

SEQ ID NO: 29944 - DNA, 1206 bp, Zea mays
  Peptide Sequence Number=SeqID_71723
atggaggcgccacagccttgggtgatcctacgtcgcgtcctcgtccgcaaggacccggaggcgaagcaggcagggcacccccccgccatctccactgcactgaggtcgccgccacgggtcaccaacctcgccgtggccgtgggcccaaacgctcaccccggccgccccgtccgtttctacgaggtcccctacctcgtcgccaccggcccctccgctctcctgtattgcttttacttcgacgtgatccccctcgtcaccgacgaactcttgctggcgcggcggttcgtcgcgcccgcggacgcaaagcgccagccaaccacgggctccgccgaccgcgtcccccggcgcaccgggtcgtcctccatgcccgttacctacaacatcaggaacgtcggcctcatccctggtttatctggcggctacgtgatcgccgagctccaggtcaccaagcgcagcaaccgggccaagctctttcgcctgatgtcaggcgatgaccgtcgctccgaggcgggccgcctcttcgagggcgacaggcaacggtggtacgagacggagctacactgccccttgcccaccatggaacgggagtgggctcctcagggcgtggtgtccctcgccaacaagctctggtggttcgacctctcgtgggggctcctcagctgcgaccctaacgacattgttcaccccgtcctgagctaccacaagcttcccccgggctgcgttttccttgagcccatggcgttcatccactacatccggtgcatctgcgtcagcgaaaacatgctgcggtacgtggagatggtccgaggcagcttccgagacggcatgtttgtcggcgaacagaaggtggtcatgtggacgttggtccccgttcccagcggcgacggtgacatcgagtggaagtggcacaaatcgtacgagatggacttcaaggacatctgggacgatgccatctacaaggcggctggtctgcctgcgctggtccctcaaatcgtgctcgtgagccccaggaaccacaatgtggtctacttctttcgagacaataggttgttcggcattgacgttccctcgcatcggctcgtgcacgtcctcgaggattgctacaagctggaagcgcccgttcacagtttgtccgtcttcccttgggacctgccatcttggattgctaacggactgcgggtcctggtgaatgccgggcgtacttag

SEQ ID NO: 29945 - DNA, 387 bp, Zea mays
  Peptide Sequence Number=SeqID_71724
atgccgccgaacggcacgcccaccgtggccccagggatccgcgtcgcaccaccatctcgcaccgcgccgccggtctgcgtcggcccagcgtgcggcgatgggagccgggctcccccagtccccaccccctctcgtgaagtggaaacgtctgggggtcgtcgctgccgccctacgtcaggtggccaggtcgtattagggcacttcgccggcgatgagtaccacaaggcagtgctgcgtcatcacgccggaggccgaggccaacgccactgccatcatgcgcgcctgctcccggccgccatcctcatccgtgtcgctagtgttttgtcttctacggcaccttctggtcacagtgggactactccccgcagcatgactgcatgcacgtag

SEQ ID NO: 29946 - DNA, 363 bp, Zea mays
  Peptide Sequence Number=SeqID_71725
atgaagaacccaatcgtggccaactttccttggagctccgagaacattgcatcgtcgcccgggaacaccgtcgtggacaccttgcgcactgacccactctcccacgcccgcttcgtccaaattcacatgcgtaccacacctctgaacggacttgctggagttctgaccccgccatcgttgcgggcagacaagggagtctctggggtgatgccagtatgcttacttccagtgatgggggtcgccggcgacgagaatcgcgaccgaagccaggtgttcgaccggagtcaagtgagggggcataacgtcgtaagagagatagaagggaagggtctaggcgaagatgtcagtgacacattagaatag

SEQ ID NO: 29947 - DNA, 252 bp, Zea mays
  Peptide Sequence Number=SeqID_71726
atggctcagaaaataagaatgtggccggagttgaagcagagattgttggaaaaagagcatcacatgagaattttcgtcaactcggagaactattttaggatcaatatggagattaccaggtcagagatttatacgagagtaggagataaccagataatagggcagattcataggggatcccgagatttggatgataaagccaacatgattcacaagaaaaagggttaccagatcaggcaaaaggagaggtag

SEQ ID NO: 29948 - DNA, 201 bp, Zea mays
  Peptide Sequence Number=SeqID_71727
atgggcaacacgacgcttacagtaattgacaccggatcaacgaggtttgttgacccctcccttacgatagagacctttttggacacctatatcttccaagtttgtatgatgtcaagccagggtcccttaacaaactttgttcatgcatactacctctcccactttgctgtagacattctggcacaaagctacacagaatag

SEQ ID NO: 29949 - DNA, 237 bp, Zea mays
  Peptide Sequence Number=SeqID_71728
atgaggactcacaatgagcgtcactgcagcagcccatcattttgtagcaggctaggtgtccaggccacggaggagatggagcaggccagcaaggacgcgctgctcacccactgcccaggggcaggaacagccgagcagggtcacggtggcacatttgaaaccggcgagggccgatgggtaggccttctactcgccggtgtcacggtgtgccttgtcagatgcgaagatggcccctag

SEQ ID NO: 29950 - DNA, 294 bp, Zea mays
  Peptide Sequence Number=SeqID_71729
atgtcagctaacctccgaccattcaaccatttatcagaccaaaacaagatatggagtatgaagcaagacaaatgtgtatttgatttcaaggagcataccaaggaaatatacactattcggtggagcccaacaggcccaggaacaaacaatcctaatcagcagttgcttttggccagatattggagcacagaattgggaattggaatcaacttttctaaattctgttgtttggttgtacgtgaaattgagattttgaatcagaggccgaattccctggaattgggctataactag

SEQ ID NO: 29951 - DNA, 618 bp, Zea mays
  Peptide Sequence Number=SeqID_71730
atgagtgtgctgttcctttgttttttatgtttcttgccattttcttctttcctttttccatggtttctagatgggagggaatcagaggggaagaagatgtggtcaggggactcaactgctagaatctggacaattccagatggtccatgtggttccaacatgcaatcatctcctcctggtgttcatgttttgaaacattttaaaggtcggaccaatgaaaagagtaaggatgtcaccacacttgactggaatggtgaaggtacactgctggctacaggctcctatgatggacaggcaagaatatggagtagagatggagacctgaagcagacattgttcaaacacaagggacccatattttcattgaaatggaataagaaaggagattttctcctaagtggaagtgttgataaaactgctattgtttgggatacaaagacatgggaatgcaaacagcagtttgaatttcattcagctccaacactagatgttgattggagaaataataactcttttgcaacatgttcaaccgataacatgatctatgtttgcaagattggggaacagcgtccggttaaagcattcagtggccatcaggtcagccttctcggtgattag

SEQ ID NO: 29952 - DNA, 1158 bp, Zea mays
  Peptide Sequence Number=SeqID_71731
atggccatgaaccacgctggccatccaggaccaaatcatgagagtttctcacggcaccacctatcttgctcaccacaaaacagtaagccaaggtgtaatcttagcttcaggccacgagccgaaaggattgaaggtggatggaatgaagatggaaaggggccaagctcatgggattacttctgccacaattttccagagtggatattagacaagagcaatggggatgttgcagcagattcgtaccatatgtaccctgaggatgtcagattgctgaaggaaatagggatggacgcctataggttctccatctcttggtccagaatactgccgaatgggacgctcgaagggggtattaatccagatggcatcaagtactacaaaaatctcatcaatttgttgttagagaacggaatagaaccgtttgtaacccttttccactgggacacacctcaagcactgatggacaagtacggcggttttttagataagagtattgtaaaagactatacagacttcgccaaggtgtgctttgacaacttcggtgacaaagtaaagaactggtttacctttaatgagcccgagactttttgtaccttttcgcacggaactggacaatgcgccccagggcggtgctcccctgggataatcactccaacgggatccacaagttgtgctaacccaattggaaactcgctcactgagccatacattgttggccacaaccttctccgagcccacgccgaggttgttgatctttacaacaagcattacaagatagattacaagggtgagaatggacgcatagggattgtatttgacgtgatgggccgtgtgccattcgaaaaatcggcgtttattgatcaacaggccgaagaaaggtcctgggacatcaacctaggatggttcttggagccggttgtccgtggagactatccattctccatgaggtcgttggtaagggaccgactacccttcttcactaacgaggagcgagagaagctagtgggctcctatgacatgctggggttaaactactacacctcaaggttctccaaacacatcgatatcacgcaacacaacacgctaaggctcaacactgacgatgcatatgccagtcaggaaacgaaagggcctgatggcgagcccattggtcctccg

SEQ ID NO: 29953 - DNA, 261 bp, Zea mays
  Peptide Sequence Number=SeqID_71732
atggagaaggcgcggcggcggcacgtgccggcgttcagggagtggaactactattactcctcctcctcgtcaacctccccggactccgcgcccgccgcggccgagccctgctggtggcccgtcgacgaggacctttaccgcgtgcctccgccggatgacaacgacggcgccgccgctgtctcccgccttcccaggcgccggaagcgtgcagcgaggaggagcttgtggatgggttgcttgggcctcaactgcgtggcctga

SEQ ID NO: 29954 - DNA, 366 bp, Zea mays
  Peptide Sequence Number=SeqID_71733
atgggaggggataggtatgaggatgtatcaaacatgatggggatgggtctgggatgctataacccggtggggaattacccattgacatctctagccagcggtgatagaacttgggctgagtctgcgatcttcgccggtggttacggaagccttggcctgattgtaacgagctctgagagaaagcttctagttctacaggcccacatggttagcggatgtggatatactgggcacgggtccatggctgagatgatgcgcgttgggctctgcggtcagttggatagagtccgtgtcgtacttcagggtggagttctggttgaggaagatataccgagcaatggggcccacatgtcagcagcacagtga

SEQ ID NO: 29955 - DNA, 519 bp, Zea mays
  Peptide Sequence Number=SeqID_71734
atgagcttgacggcgtccttggttcaattggatgtggatggggggtgctctatccacacgcgccggtgtgaaccgaagcacgacgaacatcaacagcgatgctccagcatcctttgggcttgggcaaaggctccaggacatcgacacgtgacgaaaaatatggtgtggggctcagctcagacggaggagtatggaggaggtgtggtcacacgagctatccgccgacatccatggcagcatgacatcagagtgggagaagacaaggagggcgtcggcgaaatgcggatagattacagatcgtcgcggcgtctacgacgcaggaatccgaggctaccacacggcattgcagcggtgaaatacggcacgggacgagctgggcacagatcgaggctctggcgacgtcgcgaagctgaactccgacaagcaaatgatggcgatgacgacgggggtaatgcagacgacgacgtgcagcgctgcgaggatggcgcgggatgggcgaggaagagcatggacagctag

SEQ ID NO: 29956 - DNA, 348 bp, Zea mays
  Peptide Sequence Number=SeqID_71735
atggcggacggcgaggcctaccaaatcttcgaacgcgcgcagcagcttgggcaggcgcaggaggagggagaaaaggctaggaacggagagggagaagaaatgagcattggaaggggaagagaaagcgcatcggctccattaatgatgcttcggccgagcttgcaacgggacaagatgaagctgctgagtgggggagaggagaaaggcgtgctgcagtggggaaaggagagcagcagacgcggtgtcagtgctccagtaggaggcgaaggaccagcgagggcggcggccaggaagatcgagcgatggcagttgcggctgtccagtgtccagtctgcgtgcgtcttgtga

SEQ ID NO: 29957 - DNA, 225 bp, Zea mays
  Peptide Sequence Number=SeqID_71736
atgtctgcagcacaaggactggacaccatgactgagcagctgctgagctgcatgcaggagcgatcagtaggtgtcatcggtgtctgcctcttcctcgtcgctctccagctctgccatctcagccagcagcgatcagtaggtgtcatcggtgttagcgatcagttgggttgcattcttctggtttgtttggtttaccgccagagaatgcctgagcctgacgactaa

SEQ ID NO: 29958 - DNA, 447 bp, Zea mays
  Peptide Sequence Number=SeqID_71737
atggagaaggggttcggctgccctccatggctgcctggatctcaggcgcggcaggggttcgctccaggcgctgaacatgggaggagtggaagggggcgtcggtctggggaggatggcggccaggtggggctgctcgatggaatccacggcaaggcgggggtggccggacttgagaagggcaggaagccagatgggagagggagcgtacgtgcagaaagcaaacaaggagcccaagccaaggggacgagctcacctgctcgagctcggaccctgagaaatgccctgtgcgctggattagagatggagatcttgggtttggttccatggcgtcggtcgacattggaggaaggaaggaggaacagaggtgcttctctgctctgcgcaccgtggcggccatgggccagagaagggcgccccggcgtccatcgctggagcagaggcacatag

SEQ ID NO: 29959 - DNA, 393 bp, Zea mays
  Peptide Sequence Number=SeqID_71738
atggccgcgcgcagggggccgaggggtcgcgctcagggggacggggagccgcgtcgctgggggccagaggccgcgcgcagcgggccgggggtcgcgcgcgagggggatcagggagtcgcgccgaggggaccaggggccgcatcaccggtggccaggacggccgcgtcgggggggcgagggagccgcgcgcgagggggggacgccgcgccgggggagcaggggcccgcgcggccggggagggccggggccgtgccgccggggccgaggctgcacagggggaaaacaggtggggcgcgcaggggaagaaaggggagagggagaggaagagagagagggagaggggagctcacctcggggatccaaatttcggcgatcaccgtctccaagacctag

SEQ ID NO: 29960 - DNA, 108 bp, Zea mays
  Peptide Sequence Number=SeqID_71739
atggcgatctggccaaggttgctcctccgcgaagcctgggcctcgagcgagccgaaggctacgctcgggcgaggcgagatcgtgtcccctgagtggacggagccttga

SEQ ID NO: 29961 - DNA, 162 bp, Zea mays
  Peptide Sequence Number=SeqID_71740
atggcagcggtgggttttaacagaatgcggcgtgagtgggcgaccggaggagagagaaggggcgcccgcaagctttatagtccccggagagcgattccgcaagcgacggcgtcgaccgagtcgtggcaggagctcgccgccgatttcgcgaggtatgattaa

SEQ ID NO: 29962 - DNA, 192 bp, Zea mays
  Peptide Sequence Number=SeqID_71741
atgctcaaggaagaagtatcctcaataagctcaaatctaatggcatggacacatcctacatcctggtgtgaattactatcccttatactgcgtttggatgctggtattgaggcccagattttggaattggaattggtcacggagaacgataattcacctttcacctacataataattgatgagcagacgtga

SEQ ID NO: 29963 - DNA, 165 bp, Zea mays
  Peptide Sequence Number=SeqID_71742
atggagaatgatcggaaggtgacctcgaagaaaaaggaaggaggtgatctagctggcgaacccatggtaggcaacaaaggccctgcttgtgaaagcaaggagggcaaagacaagcgcccagatcgttggaggcgcagagggatgtcatatgtgacatcacgctga

SEQ ID NO: 29964 - DNA, 171 bp, Zea mays
  Peptide Sequence Number=SeqID_71743
atgaacgggaagccaacatgtacagatatcatggactatgttctccagaagctacgcgggtttcaatttctgcagtgcgagggggaggaaaggtgggatggtagccagcggcgtcagcaacagcagcaggcacaaggatacaggaatcagcagcatgcactaatgagctga

SEQ ID NO: 29965 - DNA, 852 bp, Zea mays
  Peptide Sequence Number=SeqID_71744
atggaggctggcagaccgtcagtgagaaaaggcgccatggaagaccacatcaggtccttttacttctattttactatttatacagacagtcaaccaacatttagccatggagccaatgctttatctgaagcatggaatggatatagaaagccaccatcagaacaaaagtactctgaggatgtcggtcatatccaccaaggactcaatttcgagcccaccagggaggagctgaatagcttagcgaaagcgtgtagccgactttgggagctcgatatgaaccgtatcgttcctggtaaggactacagaattgactgtggcgaggggaagaaagtttatcagaagggtgatatggcatctgaaagcttgttcagctggctaggcgatgatgtgctaagaaaacccacctactcacatttttgtgcacttctggataactataacccccaccaggataagcacgaagaaatagcttttgttgaagagatcgccagaacatcgccgattaagtacttgcaccggtacttagtgcagaagggggttgtgcctcaggactacgaggacttcaagagaatgctggcatccctatggtttgatttgtatggaagaggtggcaactctagctgctctactgcctttgagcatgtgtttgttggtgagatcaaaggacggggacaaggagagagtgagttttacctggaagaagccaagggaaatgtggattaccaaggggaagataaccgcgtcgatattggcccgtacagtgtgaacgtcaagtgtaccgattggggaacaacaaaattggatcaacctttcccattgcagagaactgattatctgagtctggggccataa

SEQ ID NO: 29966 - DNA, 261 bp, Zea mays
  Peptide Sequence Number=SeqID_71745
atggcggtgaggtgctggccaatgggccatggtgcaaacgatcttggtgcggcgtgtgttctagaactcgttctcccacaactcggcctccgtggtggcgtccatgtcgatggcgggtcagacgagaagatcccattcggattaaggggggaaggcggtgaggtcgaaggtggctggggaggtggattagaggtggaggtggtgagggcgccaagcgcatcacagagacagaggacaggaatgggtgcgggatgggagagg

SEQ ID NO: 29967 - DNA, 165 bp, Zea mays
  Peptide Sequence Number=SeqID_71746
atggccggatccgtggtggtgtgtggcgccggcaagtgggtagcagtggcctgtcgacgtctgtggtggtgcgcgtgccagcggatctggcgcctcgcagaggttgctgctagggatgaccagcgggaggtgcaatgtgcggcgcattttgtccctgggtcctag

SEQ ID NO: 29968 - DNA, 554 bp, Zea mays
  Peptide Sequence Number=SeqID_71747
tcagctccactcccgcggcatccctcaccacggcctccacttctccgccttctccgagtcagttcccctccgcacccacaacccccgccgcgcccacccccacttctgatgcgtccgccccaacgccgatagtcctcgcccctcccctccccgttgcgcccacccatgccccctccacgcccacgcctcccctcaaccaccgcaccgagatcgccgccgatctgagctcccctccctgttgcgcccacccatgccccctccgcacccgcgcctcccctcaaccaccgcgccgagatcgccgccgatctgagatgctatcgtgcacacctccgattttgcccgagatcgccgtcggttcgacatgctgccatgcacgctgccgatttgggatgccggtgatggtggccaaccccaagatctgtgtggccaaggccgtcgatgcctttgtggagttggcgaaggcgagcaggtgtggtgctccaactgattctcatgcgtcgtgcccatggtgcagcctggcagaggcggtggcgacggggagcaaccactattga

SEQ ID NO: 29969 - DNA, 333 bp, Zea mays
  Peptide Sequence Number=SeqID_71748
atgcgggtggccttcgcctgcagcgtatgtgggcagcgtacgaccaaggccatcaatcctcatgcctacaccgatggaactatgtttgttccgttgttcaatgcaactcttgtcctcccaattttttgtgcagtaatgtttggctggccaaaaggatttggcaatcgcttatctttgactcaataccttatgacctcgaaaagaaataagagcggaaatggcggcttgactgcttcattgctacgtggtggtggttcgcagatactcgcaactgctctcatctgttcccgctcagacgaaaagaaggctgtggggattggttccacactgtag

SEQ ID NO: 29970 - DNA, 396 bp, Zea mays
  Peptide Sequence Number=SeqID_71749
atggggccggtgaggccggggttggacttgagcacaatctgctcgagcgaggacgacgacgtgaacagcgcggtcgacgtcgaagcagacgaagacggagagcatccggaggtgcggcaggccgcgcagcgaggcggggtcgagcctggccccgggcctgcagggcggggtggtgacgtcgggggccaggtggaggcgggtggtgtggagcacgcgtgcgtcgtcgggcgcgagctcgcactgcaggcccggcaaaggcgtgtcggtgtagggtcgcgggtggagctgcggccacgccgggtcgccgaggaggtccgccatcaaccggaagatggccgccagctccgcccccggcagctctggcgccggcgcgtcccatccagggattgcgggtga

SEQ ID NO: 29971 - DNA, 531 bp, Zea mays
  Peptide Sequence Number=SeqID_71750
atgacagctactgctatactagcagtgcatgttttactctgcaggctgccgagcaaggagaagaagcgttctaggcaaaagtgttccaattggattaattctggactagaaagagcgaaagagtcggatgcactaaatctaggcctgaaacagttcttgttggttacatttggcaccattgttggaagcttgattacgttgatggagttagtcccaccaatgtcactgtaccgcataatctatgagctctctccaccttcatcattgggacttttctcaaacttcttcgatatacacttgggagacttgagtgatcctgaaaccataagagctcatatttgtctgatcaggttcggcacatacacatgcggcgcgtgcaccatgtcgtgcatgctcaagtgggacatggccactatcatggagtacaagggtctgcccatgcagcaggccgtcgactacttgaaagggaaatgtgcccttgggccatttctaaggattttggtgattaagtgtccaacacaaatgccttaa

SEQ ID NO: 29972 - DNA, 216 bp, Zea mays
  Peptide Sequence Number=SeqID_71751
atgtactaccttgctgatgagcccgaggtggacttcgtctggcagcccaaccaagagtcatcggtactcgtcatgtcgcgcgcgttcgacgactactacatcgtggactgtggcgtcatctcggcgccggaggcgtggggcgtgctctccaatgatgagaccatgaaaatcgtgtcatatatcgaagtcggcatgatattgatggttgtaatgtag

SEQ ID NO: 29973 - DNA, 818 bp, Zea mays
  Peptide Sequence Number=SeqID_71752
atggtggttcccgtgatcgacttctccaagctggacggcgctgagagggctgaaaccctggcgcagatcgccaatggctgcgaggagtggggattcttccagctcgtgaaccacggcatcccgctggagctgctcgagcgcgtcaagaaggtgtgctccgactgctaccgcctccgggaggccgggttcaaggcgtcggagccggtgcgcacgctggaggcgctcgtcgacgcggagcggcgcggtgaggtggtggcgccggtggacgacctggactgggaggacatcttctacatccacgacggatgccagtggccgtccgacccgccggcgttcaaggagaccatgcgcgagccatggacgagaacctcggcctcgccaggggcaccatcaaggacgccttctccggcggcggccggcacgatccccttcttcggcaccaaggtcagccactacccgccgtgcccacgcccggacctcatcacgggcctgcgcgcgcacaccgacgccggcggcgtcatcctcctgttccaggacgacaaggtcggtggcctggaggtgctcaaggacggcgagtggaccgacgtacagccgctcgagggcgccatcgtcgtcaacaccggcgaccagatcgaggtgctcagcaacgggctgtaccgcagcgcttggcaccgcgtgctgcccatgcgcgacggcaatcgccgctccatcgcatccttctacaacccagccaacgaagccaccatctcgccggcggcggtgcaggccagcggcggtgacgcgtatcccaagtacttgttcggcgattacatggacgt

SEQ ID NO: 29974 - DNA, 3141 bp, Zea mays
  Peptide Sequence Number=SeqID_71753
atgcccggcataccgagggatgtcgccgagcactcgctggatattcgggccggagcccgacccgtcaggcagcctctgcgccgattcgacgaggagaagcgtagagtgataggcgaggagatccacaagctaattgcagcagggttcatcaaagaggtattccatcccgaatggcttgccaaccctgtgcttgtgaggaagaaaggggggaaatggcggatgtgtgtagactacactggtctcaacaaagcatgtccgaaggttccctaccctctacctcgcatcgatcagatcgtggattccactgccgggtgcgaaaccctgtccttcctcgatgcctactcagggtatcaccaaatccggatgaaagagtccgaccagctcgcgacttctttcatcacgcccttcggcatgtactgctacgtcaccatgccgttcggcttgaggaatgcgggcgcgacgtaccagcggtgcatgaaccatgtgttcggcgaacacatcggtcgcacggtcgaggcctacatcgatgacatcgtagtcaagacaaggaaggcttccgacctcctctccgaccttgaagtgacattccgatgtctcaaggcgaagggcgtcaagctcaatcccgagaagtgtgtcttcggggtgccccggggcatgctcttggggttcatcgtctccgagcgaggcatcgaagccaacccggagaagatcgcagctatcaccagcatggggcccatcaaggacttaaaaggcgtacagaaggtcatgggatgtctcgcggccttgagccgcttcatctcacgcctcggcgaaagaggtctgcctctgtaccgcctcttgaggaaggccgagtgtttcgcttggacccctgaggctgaggaagctctcgggaacctgaaggcgctccttacaaaggcgcctatcttggtgcccctagctgatggagaagccctcttggtctacgtcgccgcgaccactcaggtggttagcgccgcgattatggtcgagaggcaagaagaagggcatgcattgcccgttcagaggccagtctacttcgtcagcgaggtactgtccgagaccaagatccgctacccacaagttcagaagctactgtatgctgtgattctgacgaggcgaaagttacgacattacttcgagtctcatccggtaactgtggtgtcatccttccccctgggggagatcatccagtgccgagaggcctcgggcaggatcgcaaagtgggcggtggaaatcatgggcgaaacaatcttgttcgcccctcggaaggccatcaagtcccaggtgttggcggacttcgtagctgaatgggtcgacacccagctgccgacggctccgatccaaccggagctctggaccatgtttttcgacgggtcgctgatgaagacgggagccggcgcgggcctgctcttcatctcgcccctcgggaaacacctacgctacgtgctacgcctccatttcccggcgtccaacaatgtggctgagtacgaggctctggtcaacgggttgcggatcgccatcgagctaggggtcagacgcctcgacgcccgcggtgactcgcagctcgtcatcgaccaagtcatgaagaactcccactgccgcgacccgaagatggaggcctactgctatgaggttcggcgcctggaagacaagttctacgggctcgagctcaaccacatcgctcggcgctacaacgagactgcggacgagctggctaaaatagcctcggggcgaacaacggttcccccggacgtcttctcccgggatctgcaccaaccctccgtcaagatcgacgacacgcccgagcccgaggcaccctcggcacagcccgaggcacccttggctcggcccgaggcgccctcggttcagcccgaggtaccctcggcccccgagggtgaggcattggacgtcgaggaggagcagagcggggccacgcctgatcgaaattggcaggccccgtacctgcaatatctccgccaaggagagctacccctcgaccaagccgaggctcggcaggtagtgcgacgcgccaagtcgttcgtcttgctgggcgatgaggaggagctctaccaccgcagcccctcgggcatcctccagcgatgcatctccatcgccgaaggtcaggaactcctgcaagaaatacactcgggggcttgcggccatcatgcagtgcctcgagcccttgtcgggaatgctttccgacaaggcttctactggccaacggcggtggctgacgccactagaattgtcggcacctgcgaagggtgccaattctatgcgaagcagacccacctgcccgctcaggctctgcagacgatacccatcacctggccctttgctgtatggggtctggacctcgtcggtcccttgcagaaggcgcccgggggctacacgcacctgctggtcgccatcgacaaattctccaagtggatcgaggtccgacccctgaacagcatcgggtccgagcaggcggtggcgttcttcaccaacatcatccatcgcttcggggtcccaaactccatcatcactgacaacggtacccagttcaccggcagaaaattcttggatttttgcgaggatcatcacatccgggtggactgggccgctgtggctcatcccatgtcgaatgggcaagtagagcgtgccaacggcatgattctacaagggctcaagccccggatttacaacgacctcaacaagttcggcaagcgatggatgaaggaactcccctcggtgatctggagcctgaggacaacgccaagccgagccacaggtttcacgccgttcttcctggtctacggggccgaggccatctctccggaaaagattttgagttctctggaagaggctcgggacaaggccttactacactcggcgcggtaccagcagtccctgcgacgctaccacgcccgaggggtccggtcccgagacctccaggtgggcgacctggtgcttcggctgcggcaagacgcccgagggaggcacaagcttacgcccccctgggaggggccattcgtcatcgccaaagttctgaagcccggaacatacaagctggccaacaatcaaggcgaggtctacgacaacgcttggaacatcaaacagctacgtcgcttctacccttaa

SEQ ID NO: 29975 - DNA, 507 bp, Zea mays
  Peptide Sequence Number=SeqID_71754
atgcaggcggcatgcaaccgcgccaagtgggcacgcttctccgactcccaacgcaccagcatggaggcccaggcccacgcgtcacgcaaccggcgcgccggatgctgcatgcaggcaactgcaccgccacttgcgccaccgtcgcgcctcttcggttgcggaaccaatgccgcgactcgaggcgacccagcgcacgacccagcggcgccagcccggcggcgcttctggcaggagaagcggccgacgcttcgccttcgccgtaataaccacgccaaaaaaaagggaccgggaaagggggataccccgaaaaggatccttccctgtgaaggaaccgggctccgtgcccccctactgatcagaggttcgaaggctggccctccgaggggttcaacagtcgcctcagatcgcgtgggccctacacccactactggtcagaggttcgaaggccggccccccgaagggctccacggccgcctcaggctactcgggctccgcgcccattactga

SEQ ID NO: 29976 - DNA, 285 bp, Zea mays
  Peptide Sequence Number=SeqID_71755
atgtcgcgcacgttcgacaactactatatcaaagactgtgacgtcatctcggcgccggaggtgacgcagaggaggaccgacagcaatgaccagttcgtcatcctcaccactgtcgcgagcgcgtatggtggtgcttggctgatgactgacgatgtacgagagaactttttccggcaggtgtgggacgtgctctccaatggatcacaaatagattataattgtgacatatatcgaagtccgcatgatactgatggttgcaatgtagtagtaaaacagatatattaa

SEQ ID NO: 29977 - DNA, 465 bp, Zea mays
  Peptide Sequence Number=SeqID_71756
atggcatgctcaggctccaaccacactagtggagcccagcaaacaagccagtggtctatcggctacggtgagcactgccacttgcctaggggtctcacaaaggcaaggccaagacctgcgctggctcgtagtagagccgtcgtcttcaaccaagctctatcgatgacctcgccagtggcagccaccggtcgcgaggtccccttcggtgggccaccactcgcactgttagtgttccaaggacagggcagcaccaagacctgcacagtccactacgtcggcctactactaggcctagctcatcgactacagcacaagctcatggcgtctaggaaggacaaggcaaccagtggccccaagctcatggcgtttggggaaaccatcggcgacaccctccaagctttgtcgtcggctatcaccaagacagaaaggggttgttgcttacccttcgagtctgatggatggtag

SEQ ID NO: 29978 - DNA, 489 bp, Zea mays
  Peptide Sequence Number=SeqID_71757
atgggcaccgcatcaccggactccggcgaccttatcgaggtggggccggcgaggccgggatctccggtagccgtggtgaccatcaaccggccttcggcgctcaacgcgctgacgaagcccatgatgatctccatggcggctgcgttccggcggctgggtgccgacgacgccgtggcagcggtggtgctcgcgggccgcggtcgcgcgttctgctccggggtggacctgacggcggcggcggaggtgttcaagggcgatgtgaaggacgtcgccacggaccccgtcgtgcagatggagctctgccggaagcccatcgtcggcgccatcgccgggttcgccgtcactgccgggttcgagatcgccctcgcctgcgacatcctcgtcgctggacgctccaccaagttcttggacacccacgccaagtacgtctatcatcctccacttcatacagatcactgtattgtcgaatcagctagtgttctaacttag

SEQ ID NO: 29979 - DNA, 229 bp, Zea mays
  Peptide Sequence Number=SeqID_71758
atggcactcgcgacatcattgctgtcgccgtcacgccggtggcgcgtaagggggaagccacgaaaggtggcgacacgtgtgggggaagccacggaaggtggcaaggcggacatcatccatggggagatcgtgaacgggatgcgagagcgtgtggggaccttgagtgcagctatggcctaccggcggcgaccatccccgggagggaaggaagatgagcgaggagagagag

SEQ ID NO: 29980 - DNA, 273 bp, Zea mays
  Peptide Sequence Number=SeqID_71759
atggcgcccacagccgctgcatctagtccatggccaagcaccaaccaagcagtgaacgtcctaggcgacacgctgccctcgtctagtgtcggcagagctgcagttcccactgttgaagtatactcagtgataattgtctgtggttcaattgaaccatggtatgccattgttcttccatggacctctagcccaaagaacaataatatgtctatagtcatcatctcaaaaacccccgtggggaaaataaatgatgagacatataactcaggctaa

SEQ ID NO: 29981 - DNA, 309 bp, Zea mays
  Peptide Sequence Number=SeqID_71760
atggcccatgtgggcggtgcagccaaggcgcggttcccctggtcccagcgcgtgctcgaggcctccggtggcacgctgccctacctggtcgcgggcgcgtggccccctggcggctcggctgcccagcacgggtcgcgcggcgcccacggcgacacggctgcagccccccgcggcggcacgggcgcggccacccagcgctcgtgggcgcggctccggctgctgtgggtgcggccccggcgactgtgggcgtgcagccccggccatggctcgggcgtggccacggagcggcggcacggatcaggccggtga

SEQ ID NO: 29982 - DNA, 600 bp, Zea mays
  Peptide Sequence Number=SeqID_71761
atgttctacgtgtacctggccatcgtgctgggcacgctgctgatcctggccgtcctggaggtgaagtgggcgggcgtgacggtgttcgagtggttcaggaacgggcagttctggatgacggcccagctgctccgcgtggtgttcaggcgggacatctcgttcaagctgacgtcgaagcagcccgcgggggacgagaagaaggacccctacgcagacctgtacgtggtgcgctggacctggctcatggtgacgcccatcatcatcatcctcgtcaacatcatcggctccgccgtggccttcgccaaggtgctggacggcgagtggacgcactggctcaaggtggccggcggcgtcttcttcaacttctgggtgctcttccacctctaccctttcgccaagggcatcctggggaggcacggcaagacccccgtggtggtgctcgtctggtgggccttcaccttcgtcatcaccgccgtgctgtacatcaacatcccccacatccacgggccaggcggcaagcacggcggcgcgatcggaaggcacggcggcgacgcacaccaccatggcaagaagttcgacggctactacctctggccgtga

SEQ ID NO: 29983 - DNA, 327 bp, Zea mays
  Peptide Sequence Number=SeqID_71762
atggcgacgcgcctgcttgtgcgcccatcgatcatccaccttttaacagcgccgctgtttcaacgtctcaaccacccgacggaagacaagcgcatgcgcatcgcggcggcgcaggcccgtcgctgtgcctacttcctcttcctgagcctgggcctgggcccaaacggctgcaccatggcggcctggcgggctttatgtttctggaggcagcaggccataacaggaaacattaacataatagaatcattcctaattcgtgctccaatgttgaagcgcttcggcactgctattgggccgtttctttgtgctggattttgtcaagatcgg

SEQ ID NO: 29984 - DNA, 357 bp, Zea mays
  Peptide Sequence Number=SeqID_71763
atggccgttagctttgccgagtgtccaaggtggacactcggtaaagtcgctgtcgatgcggcgcagcaggacgacgatgacactcaacaggacgactacacaacaagacgacgacgacgctcagcaacaggtggagcagcaggccgctgtcgatgcggcgtagcaggacgacgacgacgctcagcaggacgactaaacaacaagacaacgatgaagctcagcaataggtggaacagcaggccgctgtcgatgcggcgcagcaggatgacgatgacgctcaacaggacgactacacaacaagacgacgacgacgctcagcaacaggtggagcagcaggccgctgtcgatgcggcgtag

SEQ ID NO: 29985 - DNA, 1071 bp, Zea mays
  Peptide Sequence Number=SeqID_71764
atggagctcttcccctcccagccggacctctccctccagatcggcctccccgccagcgccacgccgcacgaccaccaccacggcgccgccctcagcgccaggttcctcgcggcagccgcaggcggcggtggcaacgggatccctggcaacccggcggtggccatggcgccgtcgctgcagctgcccatgccgatgccgctgccaatgccgatgccgatgccccccaacgccgccgccgccgcgggggccgccggcggcctttactaccaccccgacgccgccgccatgctgcggcccatacgcggggtgccgctgtaccagcacccgcacacgcacgcggtgccgccgacgttcccgccgcacgcggcgggggcggcgggcccgtgcttctgcgagccttgccacgtcgccgcgggcgcctggcgccgcgccgggtgcggcgtcgggacgcgcgtcgtcgccgggttccccacggcggccaagcgcgccgccagggcgccgcgcatgcgctggacgtccacgctccacgcgcgcttcgtgcacgccgtcgagctcctcggcggccacgaaagggcaacacccaagtcagttcttgagctcatggacgtgaaggatctcaccctggctcatgtcaagtctcacttgcagatgtacaggaccgtgaagaacaccgaaaggccggcagcttcgtcagatctagctgatgggttcgagaacgggtcggcaggcgagatctgcgacgacaactcgctcgatctgcacggcgccggcaggccagagtcgggggcggcgcggcatggaaggttagctgcctgtaacgatcatgggagcagcaccggtgctcatggtgccctctggaatagctcctcaagggaagactggaccggctttcccagcgagtccaacaccgggcgcatgagcatgcattctcgatctctcaaggatcagacgatgcagtccaagagcctggagatcctctcggacatgaactcctcctgcgtgtcggagacgacgtcgtgtgccagcgagttgaacctggagttcaccctaggcccacgcatcaggcactag

SEQ ID NO: 29986 - DNA, 1687 bp, Zea mays
  Peptide Sequence Number=SeqID_71765
atggcggcggggcagcagcaggcgagcggcggcgccaagcacgggtgcgtgtgcgggttccccgtgtgcgcgtgcgccggcgccgcggcggtggcgtccgccgcgtcctccgccgacatggaccgcgtggccgtggccgccaccgagggccagatcggcgccgtcaacgacgagagctggatcgccgtcgacctcagcgacgacggcctgtccgccgacggcgccgacccgggcgtcgcgctcgaggaccgccccgtcttccgcaccgagaagatcaagggcgtcctcctccacccctacagggtgctgatcttcgtccggctgatcgcgttcacgctgttcgtaatctggcgcatctcgcaccgcaacccggacgcgctgtggctgtgggtgacgtcgatcgcgggcgagttctggttcggcttctcgtggctgctggaccagctgccgaagctgaacccgatcaaccgcgtgccggacctggcggcgctgcggcagcggttcgaccgcgcgggcgggggcgccggcggagggacgtcgctgctgccggggctggacgtgttcgtgacgacggcggacccgttcaaggagccgatcctgagcacggccaactccgtgctgtccatcctggccgccgactaccccgtggagcgcaacacgtgctacctctccgacgactccgggatgctgctcacctacgaggccatggcggaggccgccaagttcgccaccgtctgggtgcccttctgccgcaagcacggcatcgagccgcgcggccccgagagctacttcgacctcaagtcccacccttacatgggccgctcccaggaggacttcgtcaacgaccgccgccgcgtgcgcaaggactacgacgagttcaaggcgcgcatcaacggcctcgaccacgacatcaagcagaggtccgacgcgtacaacgccgccagggggctcaaggacggcgagcccagggcaacctggatggccgacggcacccagtgggagggcacatgggttgagccctccgagaaccaccgcaagggagaccacgccggcatcgtactggtgcttctgaaccacccgagccacagccgtcagctcggcccgccggcgagcgcggacaacccgctggacttgagcatggtggacgtgcggctcccgatgctggtgtacgtgtcccgcgagaagcggcccgggcacaaccaccagaagaaggccggcgccatgaacgcgctgacccggtgctccgcggtgctgtccaactcgcccttcatcctcaacctggactgcgaccactacatcaacaactcgcaggcgctgcgcgcgggcatctgcttcatgctcggccgcgacagcgacacggtggccttcgtgcagttcccgcagcgcttcgagggcgtggaccccacggacctgtacgccaaccacaaccgcatcttcttcgacggcacgctcagggcgctggacggcatgcagggccccatctacgtgggcacgggctgcctgttccgccgcatcacgctctacggcttcgacccgccgcggatcaacgtgggcgggccgtgcttcccggcgctgggcggcatgttcgccaaggccaagtacgagaagcccgggctggagctcaccaccaccaaggccgccgtggccaaagggcaagcacggcttcctgcctcatgcccaagaagtc

SEQ ID NO: 29987 - DNA, 345 bp, Zea mays
  Peptide Sequence Number=SeqID_71766
atggagatgacacatgaagtatggaagagacttgaggattattatgagggcacatcggtggtgaaggaagcgaaagtttccaccttcaaggacaattatgccaaattcaaattgtcgagtgctcgggaaccgggtacccgaaaaaatggccaacttcgtcgactaactctacaaggcggaccagatgaccaactcttcgatgatgaccaactccgtgagatggaccgaatgaccaactctccgatgaccaactctgatgaccaacttccccgaccaactctgcgaggcggactggatgaccaacactccctctgctcccagcaccgaggatgcgttgcacactaa

SEQ ID NO: 29988 - DNA, 135 bp, Zea mays
  Peptide Sequence Number=SeqID_71767
atggcactgttcactgtccgtcagcgcagtcgaccgttggcgaagttgactgttgctctgttggctcaccgaatagtccggacaagcataagagccccatacaaggaggatctcaagggtgtgggcatcatttaa

SEQ ID NO: 29989 - DNA, 276 bp, Zea mays
  Peptide Sequence Number=SeqID_71768
atgtacaagattccgtggagtcaccattcagcagaagaagctacatgggagactgaggattttctacgctctcgcttccccgactttctacccaaagaagtcgattgtaaccttgctgacggagagtacatcctcgtgccggagcaaggagctgctcaggaggtagccccagatccagcaccagagcctgcaccagaggacctgcctgccactgctttggaaggcaagccccgatttatgcataacctgttatttatgctattttacttcacttaa

SEQ ID NO: 29990 - DNA, 822 bp, Zea mays
  Peptide Sequence Number=SeqID_71769
atgaccagggaggtgagcaaggggcagagggcaccaatgtccctcgaccagagaccgaggcacatagcacgacggacgaacttagtcgcggcgaggtcgaccgacgagggaaaacaaggaacacagcggtcagtcggtgagctgaatattgggagcgacatccggggccagcgatgcggccaggggcgcgcgcacgagagattggagctcggtagcttgtggctagcagggaggagctcgcggggaaaggggcttcggctgggcgcggctgccaggacaagcgcagcagggagccaggacgagaccgcggccaagcaagctctggccggcacgggcgtgacggccagggagctcggcacggtgccggagccggaggccgagcgggcagagagcaccatggtagatagcagggagagcgcgcgacgcagaggcgagcagggcgtgaactgggtagagttgagccagggagcttcggcaaacgcgaaaccgtacgccgaccatgggaagcggacggtcgggcagaggaagccaccatgggaaggaggccaagctggaggagcaagggaggggagccgcggcgctgggcgcgcgcaggagagatgcagggaggagagaagcaagggaaggagcgcgcgcgctcaggagatgggcacacgacgtggccacggagaagaaatggccagggcgcgcgccaggaagaagcagataaggacgtctgggaaaaaaatctggggagaagaagagcggcgtgggatagaggcgctggagatatttttcttttttttagaaattcatagatattttgaattgagatttttttag

SEQ ID NO: 29991 - DNA, 298 bp, Zea mays
  Peptide Sequence Number=SeqID_71770
atggatccttctaaggatagtgatgatatcgatatcgaggaagataacaccatcatccgtccaacaaagtcgagtcatgtggactttggcaaaccaaagaccaaagaaggctatgccgaagttgcgatgctgcctgctatggaggggacttatttgatcattgcagctttggagactcaggaagcaaagcgcctctttcttcttcccgagaacgtcgagttcgccgccgggccagcctgggcaccagacactgttcggtgcaccaccgcacagtccggtgcaccacatgctggtgctg

SEQ ID NO: 29992 - DNA, 378 bp, Zea mays
  Peptide Sequence Number=SeqID_71771
atggacggtggatggggccgcaaaggtggggctacatccatcgaggtcaggcagaatggctcggacggaggggagattctagaggatgccgagcccaccacgacggtggcagctgagaacggggcgagggggatgaaggagacgacattgggcgacgcgaaggtgttgatggaggggctcgtgctcattgtcgtatatcgcgatgcttcgaagcaggcagagcagggcattgtaggcccaagcggggcaatgtcaatggagcagcaggaggtcgggagatggaggaggacaatgcaaaggatgacatgctggaggttatcaggaaatggaggagaaggacgatgcggtgggcgcgagaggcgaagcacggtggggtag

SEQ ID NO: 29993 - DNA, 1031 bp, Zea mays
  Peptide Sequence Number=SeqID_71772
gtcctggatggggcaaatactatattgggccgatccagttcctggtgtgtttcggagcagtcgtcgggtgcactctcctggccggacagagcatgaaggcaatctacctgctagccaaccccggcggcacgatcaagctgtacgtgttcgtggccatcttcggcgtcttcatgatgatcctggcgcagctgccgtccttccactcgctccgccacgtcaacctcgtctccctgctgctctgcctcgcctacagcttctgcgccgtcgccggctccatatacctaggaaactccgataaggcgcccccaaaggactactccatctcaggtgacgcccagaaccgtgtgttcggcgtcttcaacgccatcgctatcatcgccaccacgtatggcaacggcatcatcccagagatacaggcaacagtggcggcgccggtgacggggaagatgttccgggggctgtgcctgtgctacgcggtggtggtcacgaccttcttcagcgtggccatctcggggtactgggcggtcggcaaccaggcgcagggcatcctgctgagcaacttcatggtggacggcgcggccgtgatccccaagggcctcctcctcgtcacccagctcttcacgctgctgcagctctcggcggtgggcgtggtgtacctgcagcccaccaacgaggtcctggagggcctcttctcggacgccaagcagggtcagtacgcggcgcggaacgtggtgccgcgcctcgtgtcgcgcacggtggccgtcgcgctggccaccaccgtcgcggccatgctgcccttcttcggggacatgaactcgctcatcggcgccttcggtttcctgccgctcgacttcgccgtgccagctctcttctacaacgtcaccttcaagccgtccaagaagggattcgtgttctggctcaacaagactatcgccgtcgtcttctcggggctcgccgtcatcgcgtccgtcgcggcggtgcggcagattgccttggacgccaaaacttacaagcttttcgccaacgtgtga

SEQ ID NO: 29994 - DNA, 171 bp, Zea mays
  Peptide Sequence Number=SeqID_71773
atgttcgatcggagattttattcggagactgttgacactcttgtaagctttaagtcggaattaatggacgatacgttaattaatcgcgcgatgcggaagaagaaccaagtcgactccaagcgcgggctaatccgcaagctgaagctgatgaatcaacctgaagatggttaa

SEQ ID NO: 29995 - DNA, 1851 bp, Zea mays
  Peptide Sequence Number=SeqID_71774
atggccgactccacggccatgaccgtcgacttcctccgtgcgcggctgctctccgagcggtccgtctcccgcgccgccaaggagcgcgcggacgagctcgccaagagggtcgcggagctggaggagcaggtccgggcggtgacggcgcagaggcggcaggcggagtgggcggccgccgaggtgctcgccgttctggagtcccagggctttggcgaccatctctcggatggggccgacgactccgacggctctgaagtccaggacggcgaggaggaggacggcaagagtcgcggcgatacggccggtgccgctggcgaggatggtgagggggagccatcggcagccaagggcgaggcggaggacgcgctgtccgggaccacggcccagcccggcgggctttcgtggaaaggccgcagcgtgagcccgcgcaaggccaggcagctcaagcagcggcacaggcggagcttcttctacttgctctcctccgccgatccctcgcccaagtaccgagtggggcaatcgtgccgcaagaacaagaggcggatggagctgagcaatgtcagcaggtcggtggcaacggaagaagacggcgagggcggggggagtcagagaggtcggcaagatgggccggattttacggacgacggcgaggtgggtgtcgatgagcggagtccaggggccggtggtggtgtcggccagtacgtgatcaggtacgagaaggatggtggggagatggcgagggtgctggagaggcaggccgagctgatagggcagtacgaggaagaggagaacgctcagagggagtgggagaaacagtacaacgagaacaggaatgcaaataagggtgatgtcgagccaaagaataatgcgaaaaacgtccccagcaccaacaacccgtctgctgaacgtctgccgaacaaagagagctccaacaacagcgcggtcccaaggcaagatcaaacatcagacggcgattcaggatacagcagggacactcggtctcctaagcgcgacaccaccgtcagcgcaccatcagatgggagcccatcgagtgacaccctcaacagcaaggcgtccggctggagctcgtcacggttccacgactgcacggacagacagcttgatgacacaccggcgccatgcagcatcgcggacatagagagtgtcctgcaggcgctgcaacgcgccaggatatccctgagcgccaagctgagcaagccagtcccccccagccaggtgacgctggcgctcccggcgcccggagacgagcacagagagtacgacgacgaggacctgccgaccgacgaaggctcgtacggtgatgaaaagctgagcggctcaagtccttcctgccaggagatgctggcgctcccggcaccggaggattaccatggccatgaaagggagggctcgccgctggtttcgcatgtagagaaagcaagcacctcgagccctccacgcgaggaaatgctggcgctccccgcgccaagagacgagtaccgcaaccgcaaggaggccgaggattacatgaggatccccgccggcattcccggtctgttccggctgcccgtagactcgtttccagtggatgagaagatgttctcaggtaccgcctgtggttcagggtttcgtctgggactgcgagcagcggcgcctacttctggtaggtgtatcagcgtgccaacaccaccagatcttacggttgggagtggtcgtttcctttgtggaattccaggacttcagagtatgagcagaggaatcaagggcagagatgaagatctgttcaacagcggggtatcccccgcaccgtcttctataagaggatgcagtaactacgacaaacgtctagag

SEQ ID NO: 29996 - DNA, 354 bp, Zea mays
  Peptide Sequence Number=SeqID_71775
atggcacttgtggctgagaacgggagcttacgacgaggagagggtggtggtggtgaaaagcacggggaggccgggacggaggcggacgcagtggcgaacaatgggaagcgcgggccattccctcgccaagggatacggcatgaaaccacacgagcggagagcccggccgaggccgcgccgcggacggccgtcctagccgctccggccaccgcgtcgggtgctccagcccttgcagtcgccgccacaatagcactgccggcgccgccacgcggctcgttgtcctgtacagctcgtataacgcccatcccccacgcgacgccgcgcgggtcggccgcatcgatagttcgacactga

SEQ ID NO: 29997 - DNA, 256 bp, Zea mays
  Peptide Sequence Number=SeqID_71776
atgaggtatacacttgacgaagcaggttcgtggctgcactgcgggtaccacttgacgacgtcgatcgtggccccggcgctgctgagcctgccgttcgcgttcgcgtcgctggggtgggcggcggggacgatctgcctcgtcatcgccgcggccgtcaccttctactcctacaacctcatctcgctcgtcctggagcaccacgcgcggcagggccgccggcagctccgcttcagggacatggccacggacatactag

SEQ ID NO: 29998 - DNA, 375 bp, Zea mays
  Peptide Sequence Number=SeqID_71777
gtgaactatgtcctcaacacgatactttcactcaacatggtcattgcgtttctagttgctcttactctgatactcgacaacatagtccctggtggtcatcaagagcgggggttgcatgttggtcacgtactcgcaccgcatgtcaatgatggcgctgctgccacagagcttgaactgtactccaggacctggccgtggccggaacccaccggaagcaacaggctgtaccgaattggacaattggtagactacgcctgtgacaaggctgccacgagcattcgcgtggaatggcagggcggtggccgcgatgatggtggctgggtgtctggcgttggtggcgacagggcagcacactcgccgctcccaacatcatga

SEQ ID NO: 29999 - DNA, 345 bp, Zea mays
  Peptide Sequence Number=SeqID_71778
atggcgacctccggcttgatggtgtgggatttcgagccgggctgcggcctccgcccctccctcagcctcaaggattttcatcaccaaggctggggaggggagagtgccgagttgggggtcggcccctgcgtgggcggtgacccgctccttcactcagtgatggggggagaagcggagacaaccgatcaagccaaggatggaggcaagaagagcttcgaggtaccgagtgcacgggagaaggtcaaggagaccaggaacccaaagccaggggtgaagaagaagacttgcaaagtcaaggttgatcgagttaagaagagttatggtgcatcaaggatcactacataa

SEQ ID NO: 30000 - DNA, 588 bp, Zea mays
  Peptide Sequence Number=SeqID_71779
atgaaggttatgaaacaaattacctgtgtcgcgacggtgtgcgagcgcgtggggaagagcttggtgatgcactgcgccgcccggctcggcgaggcagccctgctctgcgaggaagatagcgggagcgacgcacggcgaaggactgaggcgcgcgatagcggtgtagctggaggactgaggcgcgcgatagcggtagctggaggactgcgcgataccgacgggcggaggacggcggattacctcagtcgcgcgcggccggcggaggactgggccagggaggcgaacggccggcggagcagcgcaggacctcagggagcggcggagcggcgcagaacgagcaggcgcacgacggagcggtggaggactgggccaggaggcgcacggccggtggagcggcggagcggcgcacggcggactggcaaaagcataacgggtaggaaacgcgcgacggtagaagaggattggggattaggtgaccccgtgcccctctcagtccgaccggaagctcccgcgtgtgcgactactgtgcagcctgcaccctcgcctagccgggcttgcagtggctacgccagcgggcctcttccctag

SEQ ID NO: 30001 - DNA, 345 bp, Zea mays
  Peptide Sequence Number=SeqID_71780
atgggagttgcggctttctcggagcgttcttttgttgggggtttcccctacttcagaggtctcatcctaggagacgggttgtgctggataccgttcccccacttcatggggtcaggattgttgtcggaggtgccttctgggtcgcgccagacccagaggcacacacttcttttcgccgagcgcgtcgacgtccctgggcccaaaccgactttggcgcgatcctgcatggaacgaaaacccgtcgaggttctcgtgctttgggacctatcgacggaattctcgctggcgctgttcatgttggccctgcagctgccttcggcgccaccagggatgatctcttcctag

SEQ ID NO: 30002 - DNA, 180 bp, Zea mays
  Peptide Sequence Number=SeqID_71781
atgccgaatccgtcgtggtttgttgcagcggccaacagaacttggggtggggatggacctgacgactggggcccacagaccagtgaaagcgacaagcgcaagcgtcgtggctgcgacggcacaagggtctggcatcgcgggcccaccaaccgtaaaagaaatgaggaaattccttgctag

SEQ ID NO: 30003 - DNA, 273 bp, Zea mays
  Peptide Sequence Number=SeqID_71782
atgggtcaagctccatcagatgaattctctatgcctacttctagagtgatgttcaaagaggttgacgctccttcaccatccccagctttgtggaatggaccacagggtccaagggtgaaacttggtttggcagactggattctttctgcttgtccagtgaaggaaggacattcaatagtgagatgcctctgtatgctgactcaaaggcgaagcatggggccaagtgagtcgcagttgactgtggtatacctcaaggaaaagcttgctagctag

SEQ ID NO: 30004 - DNA, 216 bp, Zea mays
  Peptide Sequence Number=SeqID_71783
atggcccaaaggcacatttccctttcacctctgagctggacgaggccgcactgtgggatgacgtcgtcgccggtcttcgtctggtgccgatcaagcgaaggaccagcggctgcagcgaaggcttcgagcgaagggtggcgtctttgccttcgccccaacatttgccctccgagggaccagttcgacaaagtcatctggtgccgaagacgtcgctag

SEQ ID NO: 30005 - DNA, 303 bp, Zea mays
  Peptide Sequence Number=SeqID_71784
atggcgaggaaaagaggcggctgcgattaccggtctgcacagggaggggggtcaaacgtggacgggacagtgagggcaggaaaaggggaaaccgaggcaggttcccgttataagccaagagaaaggagaggtgctgctagaaagaagagtggtgatcttgagcaagtagagttactctgcctgagtgctgtcgaggaagttgaaaacagccacaacgctactgtaactgtcaacaacatagtggaagcctcgatcttccacctggtgacagatctaagcaaacggaggatggagttgaaatag

SEQ ID NO: 30006 - DNA, 2475 bp, Zea mays
  Peptide Sequence Number=SeqID_71785
atggtttcaaaatcatattcaaatctgctagacatgaccccaggagatgggtttgactttcgacgaccttttaagtctcttcctcgtgttgtaacttctcctagcattatatctgaccatgattgggattccataagtgatggtgattcagttggttcagcattttctatcgagaggaaaataattgtcgccaacttccttccgctgaattgtacaagagatgaaaccggggaactgtccttctcattggatcatgattcactactcatgcaacttaaagatgggttttcaaatgagactgatgctgtgtatgtaggcagtttgaaggttcatgtagatcccagggagcaggaccaagttgcacagaagcttctcagagaatatcgatgcatacctacttttctcccatctgatctgcagcagcagttctatcatggcttctgtaaacaacagttatggccactttttcattatatgcttccaatttgccttgacaagggtgagttgtttgatcgcaccctgtttcaagcctatgtccgagccaacaaactttttgcagataaagttatggaagcaatcaatacagatgatgattatgtttgggttcatgattatcatctcatgctgctccctacattcttgaggaagaggttacaccgaataaagattggtttcttccttcacagcccttttccctcttcagaaatatacaggactctgcctgtaagggatgaaatcctgaagtcactgcttaatgctgatctgattggtttccaaacatttgactatgcccgccacttcctatcttgctgtagcagattgctaggcctgcattatgagtcaaaacgtggttacattggaatagagtattttggccgaacagtgagtttgaagatcctttctgtgggtgtccatgttggtcggcttgaatctgtcttaaagttgcctgctacagttagtaaggttgaagaaattgaacaaagatcatcaatcccgcaagaagcacggggaaaggatgtgcaggaagctatcacagaagctgtctctgtggctgaaagggttaacacaaagtatggttcttcaagttacaagcctgtcgtcctaattgataatcgcataccgttttatgaaaaggttgcattctatgccgcgtctgactgttgtattgtaaacgctgtgagggatggcatgaacttagtaccatatgagtatactgtttgccgacagggaaacgaggagatcgacagagtcagaggccttgacaaagacacccatcacacaagcacacttattgtttcggagtttgtgggttgctccccatctctgagtggtgctttcagggtaaatccttggagcgtcgatgatgtggcggatgccttgtgccgcgcaactgatctatctgaatctgagaaacggttgcggcacgaaaagcattatcgctatgtcagtactcatgatgttgcttactgggcgcacagctttgctcaagatctggaaagagcatgcagagaccattacagccgaaggtgttgggctattgggtttggcctgaatttcagagtcattgctctttctcctggcttcagaaagctttcttcggagcactttgtttcttcttataacagggcttctagaagggcaatatttctcgactacgacggcacacttgtgccccagtcgtcaatcaacaaggctccaagtgaagaagtcatctccattcttaacaccttgtgtaatgatccaaagaacgttgtgtttatcgtaagtggacgaggacgtgattccctcgacgagtggttttctccatgcgagaagctccgtctagccgcagaacatggctattttatcaggtggagcaaggaagctgcatgggagtcgagctattcgagtccgcggcaagaatggaagcacatcgctgaacctgtcatgcaggtatacaccgagacaacagacggatcttcagtcgagtcgaaggagagcgctctagtgtggcactatttggatgcagaccatgatttcggttccttccaagcgaaggagctaaaggatcatcttgagagggtgctatcaaatgagcccgttgttgtgaagtgtggccattatatcgtagaagtaaagccgcagggagttagcaagggtcgtgctgtcgacaagctgattcaagcactggccaacaacaacgggaaggcacaggatttcctgatgtgcgtcggcaacgacagatctgacgaggacatgttcgaatgcatcaacggtatggcctccaacgatgtctcatcgaccacagtaccggaggtgtttgcctgttcggtcggccagaagcccagcaaagcaaaatactatgtggacgacaccagcgaagtgatcagattgctcagggatgcaacccgcttctcatcgtcgcagcggagggaggacgtcaacgccagccgcgggcgtgtgaccttcagagacgcactcgattacgtggactag

SEQ ID NO: 30007 - DNA, 729 bp, Zea mays
  Peptide Sequence Number=SeqID_71786
atggcagaggaactgtcccgaaactggttgaaccggtttcaggcccggttgaaccggtttccagggctaaaaacaacttttgaatattttgaagagaacaaaggtggaactcttgtgggaaggtcctacaatgccatacttgggaggccatgctatgccaagttcatgcacgtccccaactacacctacctcaagctgaagatgcttggccatcactttatcatcacaacaagcgcctcctacaagggcactccagatgctcccaaagttggctatggcaccttcaagtccaccgaggacacaaaggagatcctagttgaccctgccgacttggccaagcacatctgcattggagaagccctttccagcaatataggagggcgtgctcatcgacttcctccaggccaaccacaacgtcttcgcttggaagcctgcggacatgccgggatcccatgggaagttgttgagcactcccaaagcatccaaccaatgaggccggttgcccaacatctccacctttttgatgagaagtgcaaggacataagcgaggaggtccccaagctcttagcgacagagtttgttagagaaaatcaccacttagtgtggattgtaaatcctgtacttgttaaaaagaagaatgggaactggataatgtgtgtcgactacatgggccttaacaagatgtgtcgaaagatcctttccctctcccacgcatcgactaggctatag

SEQ ID NO: 30008 - DNA, 462 bp, Zea mays
  Peptide Sequence Number=SeqID_71787
atggctaagttcagccaagacagcacaagcctgtggcgcaccggactgtccggtgttgactggacagtgtccggtgcccaggctggcccgacggcgaactggctactctcgggaatcggtggggcgacgtggctaaaattcaccggactgtccggtgagtcatcagcgcccgcacccaagtcttcggcgatgaactcgtcgctctcgggaaatggaaaaggcgccgcggctaaaaatcaccggactgtccggtggtgcaccggactatccggtgagtcagaggcgcccgcggccaatggtcgtctgcgcgatcaactagcgacacgtggccgagccaacggtcgaattgtcacaccggacagtgtccggtgcgccaacgggcccggaggaccaacggtcggctgcgcccgttatggaaggaaatcacgcaccggacaggaactgttcatgtccggtgcgtga

SEQ ID NO: 30009 - DNA, 663 bp, Zea mays
  Peptide Sequence Number=SeqID_71788
atggccatgttgagtgttgacagctcaagacggctttctcgcggagggactgcagaagacatcggctgggctcgggagcgtaaggcgaaatccaaactccggccctgttctttatctcatcaggcaaggcaagtatttgccttgccatcttggcctggtgaactggtagcacttacggagctcgattctccattccaggtcatcattgactcgcagccattgacggttgctatccttgcatcactgctctttggagagtcgattggcgcgataggagttggaggactcgtgttgggcgtcgtggggctcttgcttctggagcacatgattattggtgggcttcctttgctagtgatatctgttcttaatcatgatcctgctctgagtggccatattcaagatcttacatggagcgacatattagcacttggttatacatctatatttggcagtgctgtcagctacggtgtatacttttacaatgctactaggggtagcttaaccacacttagttctctcactttcttgacccccatgtttgcatccgttttcgggtacctgtacctgggtgagaccttctcaacagtacagattggtggtgcgcttctcacactggttgccatctacatggttaactacaaaagcattataggtgagaaataa

SEQ ID NO: 30010 - DNA, 204 bp, Zea mays
  Peptide Sequence Number=SeqID_71789
atgccgtggaatggagtggatgatggatgtgggggcagtgggcaccgcactacagagggagaagaggaagaagaaaagaaaaaagagaggaagattgatgcagatgatggcgactacttgatgaccttgatctttgaacatggaatggaacggccgcaaggtctacccaacatgctgattgctgtattagttaaatacatctga

SEQ ID NO: 30011 - DNA, 927 bp, Zea mays
  Peptide Sequence Number=SeqID_71790
atggacagcgtcgagtacttcaatcttgccgacctctgggaacagtactatgaatggagcgcgtacggcgccggagctacggtgcagctcccaggaggggacagagtagttcagtactatgttccatacctgtcagggatgcagctatacaccaacaaggtcctgactgcatccagaagttttggtgaagataatggcatggatttatggagtgatgatgaggacaacgagaagatgtcgagatcctggagttccacctctgatgaatcattgttcaactgtgatgtgttatggtccaacaggaagcgtccagggcacctgtactttgagttctttgaagtaggttcaccttatggaagggttcctctcattgacaaggtttatgaactatcccagggctttcctggattgacatcactgaagagtgctgagctttcgcctgttagctggatgtcagttgcctggtaccctatataccacattccttaccagcgcagcgtgaaggacttatctgcatgcttcctaacttaccataccatttcctcctcgtttcaagatcacgggcttgagaccatgaccactgattgttgccatccagttgcaaacggcaaacaaaatggccacatggataagaagagcaacaccgtatcactgcctccatttggcctcgcagcacacaagatacaagtaaggcagttgtacgcacacattctcattcagtctgattggatacctgcacatgagcgcgcaggctcggacgaggctgactgtgtggatacaccagttttgagcgtttctgtggatgcaagtgaaatgacttatgttgcatctgttcatgcagaccacgtcttccacgtacagggtagtctacaagagcaagacagctgcataatgaggaacccaatattagatggcaattcagcgtga

SEQ ID NO: 30012 - DNA, 1395 bp, Zea mays
  Peptide Sequence Number=SeqID_71791
atggggagggaggccgcggccgcggtggcggcggagctggaggactcgttggggaacgctgctgctgccgcggcggcggcgcccgtgctgagcccgctgagcgagacgctgtggcgcgacagggcggcggcgggcggggtcctcctcggggacgtgtcggcgcggctggcgtggcgggacctcaccgtgaccgtggcgctcggcaccggcgacacgcaggccgtgctgcagggcctcacgggccacgccgagcccggcaccatcaccgcgctcatgggcccgtccggctccggcaagtccacgctgctcgacgcgctcgccggacgcctcgccgccaacgccttcctcgacgggaccgtcctcctcaacggccgcaaggccaacctctccttcggcgccgcggcctacgtgacgcaagacgacaacctgatcggcacgctgacggtgagggagacgatctcgtactcggcgcgtctccggctccccgacagcatgccgagggaggagaagcaggccctggtggagggcaccatcgccgagatggggctccaggactgcgccgacacggtggtgggcaactggcacctgagggggatcagcggcggcgagaagaggcgggtcagcatcgccctggagatcctcatgaggccccggctgctcttcctggacgagcccaccagcggcctcgacagcgcttcggcgttcttcgtgacgcagacgctgcgggggctggcgagggatggcggccggaccgtcgtagcttcggtccaccagccgagcagcgacgtcttcttgctgttcgactgcctctacctcctgtcaggaggcagaacagtctactttggcaaggcttcagaggcttgcgaggagtacgtgtacgtgtttttggcttgctacaccaatgggggcatgcgtgtctactgtgcacgatccgatcgagagcagttcttcgcgcaagctgggttcccgtgcccgccgatgcgcaacccgtcggaccatttcctccggtgcataaattcggacttcgacagggtgaaggccaccctgaaagggtcgatgaagacgaggttcgaaagatcttacgacgatccgctggagaagatcacgacctcggaggcgatgagcaggctggtcagccactaccagcactcgcagcactacgtcagcgcgcagcagaaagtagacgagatggcccggctcaaagggactgtgctggactctggagggagccaggctagcttcctgatgcaggcgtccacgctcacgaagcggtcgttcgtcaatatgtccagggatttcgggtactactggctgaggctcatcatctatgtcgtcgtcacgatttgcatcgggactatatacttcaatgtcggcaccggctacagctctatcctg

SEQ ID NO: 30013 - DNA, 468 bp, Zea mays
  Peptide Sequence Number=SeqID_71792
atgtcgtcgagcgccgagaagctccccgtgtgccttgtcaatgacgcagacgacgacgacgagcagagagtgccagggcgcttcaattacgtcaccggggtggagtatgagtatccaaggccgctcggcaagacgaagccatgcaagtgccccagcgtgtgcctgcccagcgacgaccctgactgctcgtgcgcacggctgaacagcgggcaccttccgtacacggcctgcgggctgctcgtgaagcgcgttccggtgctctacgagtgcggccccgagtgccggtgctcaggaaactgccgaaacagggtcgcgcagaaaggcgttcgtctcaggttcgaggtcttctggaccggggacgcctgcgggtggggcgtccggtcctgggaccccatccgcgccggcgcattcgtctgcgagtacgctgggcaagccgtcgatgttctggtgttccctttgtatatataa

SEQ ID NO: 30014 - DNA, 153 bp, Zea mays
  Peptide Sequence Number=SeqID_71793
atgggcaagctggagaggccgctggccatctatgggagcagggagccgagctgggaaatgacggccatgggaggagcttgctgctgtcgtgagggagagggaggacggcgtggggaggaagggagcagggcaggtgattcgagcactggttag

SEQ ID NO: 30015 - DNA, 714 bp, Zea mays
  Peptide Sequence Number=SeqID_71794
atgatcctgcgcgcgcggaccatctgcgcggctgctgctcaacaggggagacgctcgacggcgaagctaaagcagagcaagtgcgacatgcaccgtgagcagtttctgtctagggcaaggtctaatctcattggtgtgcatgacggatttgagctccctgtgtctctgctcgcttggctagccgtcatcccggtcttgcactcagcgacgtgcatgctaccgccgccagggggcttcttccccctgcagccaccgccggcccccagccgccggccttcctcccacctccggccgccagcctccctcccaacttcccggcgcgccgccctcccctgggccgccgctcctccttcccgtcgcgtcccgagcccgctctccctgcgcttccgtcgctcccagggccgtcgcccctgcgcggccgccactccccggtgccgcgactccggcgtcccgcctggcgccgcggatgccccttcacccgaggtcgcgcaaccctctgccaccgagccaggcagccccgtctcgccccacggcgaccctgcccctacgccatctcgccaggagctcccgcgccgccgaccaacgcgtcaggccgcgcgcgtccgactgacccagccccgggcagccgccccggcaccgcgaccaagcgcccggagccacctcgccggagctccctcgcatcgcttcctctccgacccggctgcgtctcttgct

SEQ ID NO: 30016 - DNA, 330 bp, Zea mays
  Peptide Sequence Number=SeqID_71795
atgaaggcgaggccgaggtgtgggtccacggtggtcgttcgtcttcccgggtgtcgaggaggagacaagaggcgaaggggatggagtccaggatggaggccgaccgaggtgcaggcttacatcgagcaacaaggcagcggcgtcgagcgaggaggaggtgagaggcaaaggcgatggaggctaggatggaggcggggccgcgcagcgcgcgaggttgcgccaccagagcaagccgtcacggccctcggagttgtcctcagaggagcccacgatgccgaggcccgcttgttagcagtggtaacatttggtgaaatattgatgatccggtga

SEQ ID NO: 30017 - DNA, 490 bp, Zea mays
  Peptide Sequence Number=SeqID_71796
agtgcaccatgctggtgcacacaaacaaatatattttgagccccaatatgtgaagactaggattgtatcgtgtggtgggctctacccaggtctcaatgatgtcattcaacagattgtgcttacacttgaaaaatatggggtgaaaaacattgttgggtacatcatgggttccgtggatttttttctacattataaccttgaagtgccagctaggaggcccgatatgatctttgtacttcgtcgggtagaggaagccgcacaaagagctatcaactttgcatacattgagtataatgacgcggctgcagctggagggcaaagcgaggaggctgctaaagaggtgctatttgtgggggtggaggaggaggtggaaaaggaggggaagcgtgaggaagagaagagggagtgggaaaaaggcgaggaggttggtagagaatttgttgcacatgtgccgctacctggcaagaggagattaagtgcatggtcttag

SEQ ID NO: 30018 - DNA, 162 bp, Zea mays
  Peptide Sequence Number=SeqID_71797
atgaagactgcaatcgcacacggccgctccacacgaacaagactgccaatggaggggtatgacttgcgcttctacattggacagatggaggagttctgtgagacgaagaaggccgcgcgacctgcggccgtgaagcagtccgtcgccggcggcggtggctag

SEQ ID NO: 30019 - DNA, 165 bp, Zea mays
  Peptide Sequence Number=SeqID_71798
atggagggtcggttaggcaaagacgacctgttcgacaacactaatgaggctcagattaacgttgacgccgtcgacgacggtgaaggcattgcagcccttagtgatgctacgacgatgtttgagacgatgagtactggtagaaagaagcggaagtgcacttggtaa

SEQ ID NO: 30020 - DNA, 576 bp, Zea mays
  Peptide Sequence Number=SeqID_71799
ccgattccccctttaataaagctactaaagggtagcaagaagtcctccaaaacagcagacaaatgctgtgctcttctcgagtcactgcttgcttttaatcaatgtccgctggccttgacatctgaggaaggcggagtgctcgccatcgtagaggtacttgaggaaggctcccttcagggcagagaacatgccgtgggagcgctcctgacgatgtgcgagagtgaccgcagcaagtacagagacctcattctgaatgaaggggcgattcctggccttctcgagctcacagtccatggcacacccaagtcccgaatgaaggctcatgttcttctcgacctgttgcgggattcaccgtactcgagaccaaagctgcaggcagacacgctcgagaacatcgtgaccaacattgcgtcccaaatagatggcgaagaccgtggcggcaaggcgaagaagatgcttgccgagatggtgaagaagatagatcaaaataatgagattcctggtgatgccggtccaggccttgacaaggaccgagtgaccggtctaagccctcatacactcaagctgttgacgtag

SEQ ID NO: 30021 - DNA, 204 bp, Zea mays
  Peptide Sequence Number=SeqID_71800
aaaaaggaaacagaatcacgcagaagagaaggcaaagggttcgcttagcggcagcggcagcggcagccccactagaagcagaacgcacctctcgtccctgacggcgaggttgagcagcgcgagcagcgcggcctccccagcctcgggcgcgggggagcggagcttggcgacgagcgggtcgactgccgcgtcgagcttgcgccg

SEQ ID NO: 30022 - DNA, 255 bp, Zea mays
  Peptide Sequence Number=SeqID_71801
atgctccctccggatctgctgctctcggggatttggcgcagcggctttgcgcctccacacttggtcgccggcctcctcacctccacaagcccacgtcatcgccgtctcctcttcgccatcgccccgctcgcctcctgtgccaacgacccgaccaacctcgccgccaagcagggccacaccgttgattcactgtcagctgatgaggttcctaccataacacttaagcaaggaatcctgtacacttctctcctgtga

SEQ ID NO: 30023 - DNA, 1362 bp, Zea mays
  Peptide Sequence Number=SeqID_71802
atgggcgaaacgatctcgttcgcccctcggaaagccatcaagtcccaggtgttggcggacttcgtggccgaatgggttgacacccagttgccgacggctccgatccaaccggagctctggatcatgtttttcgacgggtcgctgatgaagacaggagccggcgcgggcctgctcttcatctcgcccctcggaaagcacttgcgctacgtgctgcgcctccatttcccggcgtccaacaatgtggtcgagtacgaagctctggtcaacgggttgcggatcgccatcgagctaggggtcagacgcctcgacgcccgcggtgattcgcagctcgtcatcgaccaagtcatgaagaactcccactgccgcgacccgaagatggaggcctactgcgacgaggttcggcgcctggaagacaagttcttcgggctcgagctcaaccacatcgctcggcgctacaacgaaaccgcagacgagctggctaaaatagcctcggggcgaacgacggtccccccgaacgtcttctcccgggatctgcatcaaccctctgtcaagatcgacgacgtgcacaagcccgagaaggcgcccgggggctacacgcacctgctggtcgccatcgacaaattctccaagtggatcgaggtccgacctctgaacagcatcaggtccgagcaggcggtggcgttcttcaccaacatcatccatcgcttcagggtcccgaactccatcatcaccgacaacggcacccagttcaccggcaaaaaattcttggatttttgcgaggatcaccatatccgggtggactgggctgcagtggctcatcccatgtcgaaatgggcaaggctcaagcctcggatctacaacgacctcaacaagttcggcaagcggtggatgaaggaactcccctcggtggtctggagcctaaggacgacgccgagtcgtgccacgggtttcacgccgtttttcctggtctacggggctgaagctatcttgcccactgacctggaatacggctccccgaggacgagggcctacaccgatcaaagcaaccaagctagccgagaagaatcgctggaccagctggaggaggctcgggacagggccttactacactcggcgcggtaccagcagtccctgcgacgctaccacgcccgaggggtccggtcccgagacctccaggtgggcgatctggtgcttcggctgcggcaagacgcccgagggaggcacaagctcacgcccccctgggaagggccattcgtcatcgccaaagttctgaagcccggaacatacaagctggccaacaatcaaggcgagatctacggcaacgcttggaacatcaaacagctacgtcgcttctacccttaa

SEQ ID NO: 30024 - DNA, 429 bp, Zea mays
  Peptide Sequence Number=SeqID_71803
atggacccccacatgtcattgactcatgtggacccacatgcggctggaggctactctgatctcttactgggccggcataaggttttgcccaagccatactgggccttccgccccctggtggcgtcaccaaaggcgactggtccaacaggtgctggtaacctggtccagtcggtcttccaccagagctgtccacctaggaggatactgattctctccggcggtgtttttccttcgcgtcagcttgggggtcaagcagcctttcaagagccggggggatgttggcaaccaggacgtcgtgtgctggacagcaggccggtgctcttcgcgctcaggatgttcctgatgatgaacagcacgtcaaggctccgtgtgttcgcagtcgccgtgcgactcgtcccaacccgcgaaaatggaatccgatgcatataa

SEQ ID NO: 30025 - DNA, 1605 bp, Zea mays
  Peptide Sequence Number=SeqID_71804
atgtacatgccgccgccgccgcccaccggcggcgccggcgagcagcctaggctttaccaggtctggcggggaagcaactataatcatcctttgttgttgttgtttttgacgaaaacaggaggggatgaggattcccctactttttataccttttccttgatcattcatttggcattgtccgaaactgacccatgcgtctactggggaatgaacagttttctggctattgatagtatttttatgaacggtggcagcatggaattcttcttgcagggaagattcatatttgggcctgatgtgagatctgtgtttctcactatgatcctcatcatcgcaccagtggttgtcttctgtctgtttgttgcaaggcatctcataaatgatttccccgatagctggggaatctcagtgatggtagtagtggttgtcttcactatttatgatttgacgttgcttctttgtacctctggtagagatcctggtataataccccggaattctcatcctcctgaacctgaatccattgatgggatcaacgacacgggtgttcagactccacaacaatttcgtttgcctcgcacaaaggaagtacttgtaaatgggatcagtgtacgggtcaaatactgtgatacttgcatgctgtaccgaccacctcgatgctcacactgttccatttgcaataactgtgtggaacggtttgatcatcactgtccatgggtcggccagtgcataggactgcgtaattatcggttcttctatatgtttgtattctcgacgacattgctctgcctctatgtatttgccttctgttgggtgtatgtgatcaagattagagctgctgagcaatcgtcagtttggaaggccttgctgaagacaccagcatcagttgctctgattatctactgttttctctgtgtatggtttgtgggtggtttatctgtcttccatttatacctgatgagcactaaccagacaacatatgagaatttcagatatcgctatgatcggcgcgataacccatataacaaaggtgttctgaacaattttctagagatattctgcactgctatccccccttcgaagaacaatttccgggcaagggtgacagcggggcaagggctgcagcaaacgcgctcacagtccaggggtttcatgagccccagcatgggcaagcccattggagatcttgaaatggacaggaagccagtagcaccttgggacgagccaaggacggcggctgatatcagggacttggaagcagggcttggggtcatgttcgatgagaaagagggcagggtagctcatgcatccccagatctgagcagagaccttccagcagagttcgtggaaggccgatctggtatgcactcgaggcagtcaagctgggttcagagaggagacgcaatcgaagcgtcggcggtgcaaatggctaatgcgcgcaccacggaagctagcaacaatgttgcctggagcggttccaacggatgctgtgcttggtttgccacaccagcgctgcgtgctttgggtactcgcaagtggcatctgggcaccccgctcccatgcaaacttgttcttggtatgtggacatggtacttgctagtgtag

SEQ ID NO: 30026 - DNA, 252 bp, Zea mays
  Peptide Sequence Number=SeqID_71805
atggacaaccccgagatgcagcggttccttcaggtgagaaccggttcctcgcgccttggcggtctgcaagagcagcaaaaggcgatgatgaacgagatggttggcaagctaacgagcgtgtgctgggacaagtgcatcactagcgctcccgggagcaagttcagttccggggaatcaacctgcctgaccaactgcgcccagaggtttctcgacatgagcgtgatgattgccaaacgctttgagatgaagtga

SEQ ID NO: 30027 - DNA, 186 bp, Zea mays
  Peptide Sequence Number=SeqID_71806
atggccggagtgcccacagcgctccatgggatcggatccggtatggcgctcacggtgctctctccaattgatgagtatgaggcggccagcgggttcttggtttatatcccaggcggatctcaacaaccccagcgatcccggcggcgctgcgcggatcctagggaggtcgttgagctcgggcgttag

SEQ ID NO: 30028 - DNA, 123 bp, Zea mays
  Peptide Sequence Number=SeqID_71807
atgtgggagcggggtaagcggctggtcggtggtccccgcgacgcagtgaaaggaggacatgcggtgtgcgctggcgcgactgccctgtgggtccaccatgtcggcgccgagggatgcaaatga

SEQ ID NO: 30029 - DNA, 447 bp, Zea mays
  Peptide Sequence Number=SeqID_71808
atggagggcagccagagctggtcgcggcctcggcttgctcgcagctgctcgcagccaggcctgcggtggcctcagatggcctggccatgcaagcgcgcggcgccagcttgcagcaatggcggcgcggcacctccggccatgacggggctcggactaggggcgagaacagatcaggacggcgaggggaagaattggaacctggtcactgtagaatatatcttccttgatgtacactttacaaatcttttacatggcttgagagttcatatagagctttttgagcaagattacaaggcttggttgaatttcaaattttgcttttacttaatcgagcagtctcaagttgacacaatagagattccgctggagaatgtggattcggactacgtatttagacatagaccgactatcgagaaagcggattcggacaccgattggataacataa

SEQ ID NO: 30030 - DNA, 372 bp, Zea mays
  Peptide Sequence Number=SeqID_71809
atgccgctcccgatcccttgcacccgcccctgccccccgtgggtcccgcgcgcgcccggccgcgaagcagccgccgcgcctcccgtggaccttcctccacccgcgaatccagcgtcgcgcccggccgcgaatcagtcgccctgcctcccgcggaactcgcctccaccagcgaatcacccgtcgcgcctccacctgcaaatcacccgctgctcctccatctccgtgaagcgcccaagcggatctcgcgcgccatctgcgaaacgccatcgcgaaacacccgccagccatgccgcgaaccccacgccgcaaacgcccgcacggccgtgcgcgcttcgccccaagttcaataccccgcgcgtggccccgagctag

SEQ ID NO: 30031 - DNA, 369 bp, Zea mays
  Peptide Sequence Number=SeqID_71810
gatccgttccagacaacgctcaaatgtcagtcccgacggcggcggtgccagagcgtggccgacatcgaccaggacgagcccctcgatccaaaggccctcgccgaccccgacaacagcttctacgagatcaacggtgtgaggctgcaccacaagcctctcgtctgcattgtccgtgccatggttcttgcgttcgatcgaccggcgtttgggctgacatcccgggccagtcgctctgctgatgatgcaaagcctctcaatccttactcaatagtggcagtcgaaggttggattcttggagagatcaccgcgattgagatgggagatgtcctccagaaaactattgttgtcagagttatagcacaggcataa

SEQ ID NO: 30032 - DNA, 468 bp, Zea mays
  Peptide Sequence Number=SeqID_71811
atggccacgctcctagatgaggatggcgagcgtcatagggcctgcgtggcatgcggctggatcgctggagcttgctcgcggatgggtggtttcggcgaatggctcggtgaggggaacgagggcaggcagagcatcgcgcgggcgcccacgacgaagagcgtgtcggccgacgagtccgtctcatcgccagaaaggggagggcttgttgggtcgagaagagggacccaggaggacggggagaggagcgggtcggcggctggtgaatcgtcggtgaagtcgtcccacccgtcgtcgtcggtggagtcggcagaggggagggacgactcagatgatgtgtttgctccatctctcgctccgcttatcatcatcatcaacatcatgaaagtgacagtgattggacttggtttcgtgaaagctgaaggtgtggttaactccatggctaggcatggagatcgcaggattgtgtag

SEQ ID NO: 30033 - DNA, 693 bp, Zea mays
  Peptide Sequence Number=SeqID_71812
atggcttgcatatactctgttttggaggccacattacgttgtttctacattcttcattggttgatctttggcctcctaagatgtatcacatgttttgagttcccaaactattcagtaactaaggaccagctgaaaaagattttacatgacactgatcttgaaagcattgaacagtgctatatggagacgaacacagcagagttcaaccttgaggaagctctgaatacggtcctaatgcaaggcattcctttgggcaaggaaaaacgtatttctattgaacgtgattggcctgtggaagtatcacacatgtacatttacggggacaatataaggcttcagcaggtcctagcagattatctggcttgcgcccttcaattcacacaaccagctgaaggacatatcgtgctccaggtcattccgaagaaggaaaacattgggtctgtcatgcagattgctcattggaattcaactctaggcgttccagaggccctgatacaggagatgttccagcacaacccaggggtgtccagggagggtctcagcctgtacataagccagaagctggtgaaaacgatgagcggcgcgttgcattacctacgagaagccaacacctcttcgttcatcatcctgatagagttcccggtcgcccagctcagcagcaagtggtccaagccttcgccaagtaaattctga

SEQ ID NO: 30034 - DNA, 315 bp, Zea mays
  Peptide Sequence Number=SeqID_71813
atgtcagaatatgcagagtctctctttcaggcaagcattatcgaaggaataaagggggtcagcgcagctaggagttgggcccagagttggcgtgatgaagatgagaaaaatgctgcatctgctgggccttcatggtttagaggacatcgttggaggaactccaaacgtgctcgctcacaaaaatccagaaactggagttttgaaacagacgaggaggatgaagtatcagctccatcagaggtatctttggcacgacaagctcttgggttgagcacttctggtccgcttaaacttgaagatgttaaaagcgcgtaa

SEQ ID NO: 30035 - DNA, 243 bp, Zea mays
  Peptide Sequence Number=SeqID_71814
atgttggtgctcttcgaaaccccaccagattttgccctattcaaggcgctcgacaaggggaagctcgacaaggtcgagattaagaagcagttggaggcggacataatcacagttgtggatacctctggagatagccgccatgtctggatgacaagggagtgtcgatggccggcttcctcagtacctgatgtaggggctgagatctctattgggtgtcatactctctccagaggttttaaatga

SEQ ID NO: 30036 - DNA, 273 bp, Zea mays
  Peptide Sequence Number=SeqID_71815
atggatgtgggtgcaaaaaacggcgtcgtgggcgagtttgtggcggcggcggtgctaccacgcgagagcgtacgcgacgtgcggctggggagagctggggcgcgcgctaggtgggctgcggacgcgcgcagcggctggggcgcagggatgggccacgcggtggagctgggtcgtgacgcagctggggagacgcggagcgcatggggtgggctgcacgctagggcgtggtgtgggccgcggggaagcgcgcacgcgctggcctaccggggttga

SEQ ID NO: 30037 - DNA, 235 bp, Zea mays
  Peptide Sequence Number=SeqID_71816
atgtcggcatgtgtgctgggcaccctgctcgcccagactgccgccaccatgacggcagtcggcgtgcggggccccctgctcgctccccacgtcgaccctactgccacgcgtaaggctgcccttgctgccagcatggccgacccctcctccttcctcaacaacacggttggcctgctctccggcgctacgtacgggcaccgcgacaccctcgtggatggggtcccctacatcgccg

SEQ ID NO: 30038 - DNA, 210 bp, Zea mays
  Peptide Sequence Number=SeqID_71817
atggacaaagcttggttgaatgtggtggctcagctgcgagccaacgtaggtattggcctcgcctttgtaaggcccccaggcatgtggcagtgctcatcgtggtcggtagcccacctccatcaagttgaggttgacgaaggcgtagcccttagtggcttgtttgctaagctccaccggtatggatggagactaagcacaccacatggttag

SEQ ID NO: 30039 - DNA, 324 bp, Zea mays
  Peptide Sequence Number=SeqID_71818
atggctcgtcgaagtggaggaagctccgcgacgacaaggcgcagttcctggaccgacgcttcgacctggaccatcctcgcgtcccagacattgcccatcacagtgcatcactacaaggcgtcaaggcctagcttcgtcggcttcttcgagccggagagcgcgcttcacgtccttgtccggtaccatgtcatttttttggcatacatctggcgcgagatcagcgacacgacgaacgcgagccaggtcgtgctgacacgtggagagcaacttaataacatcgacatgcccggcgggcggctgcacgagagagtccttcctatctaa

SEQ ID NO: 30040 - DNA, 2034 bp, Zea mays
  Peptide Sequence Number=SeqID_71819
atggagatatacaacgaagccgtgagggatctcttaagacctgatgcaacacaactaaggctactggatgatccagagaaaggaactgtggtagagaaactcaccgaggaaactctcaaggacaaaggccatctcttggagctccttgcaacgatcgagagttcagcaaagcagttcatgggacgaggaaactcaagcacccttctggcttgtgtgaattttgttgatttagcaggaagtgagcgtgcctctcagacacaatcagctggtatgaggcttaaggaaggcagccacattaacagaagcctgctaactttgggaaaggtcattcgccaactcagcaagggaagaaatgggcatatcccttacagagattcaaagctcactcgcatattgcagtcatctttaggcggcaacgcgagaactgctattatctgcacaatgagcccagcacactgccatatcgagcagtccaggaacacacttttgtttgcaaattgtgctaaaaatgtagttactgacgcaaaggtcaatgtggtgatgtctgacaaggtgttagtgaaacatcttcagagagaaattgcaaggctagagaatgagttgaagtttcatggatcagcctataccagcaatcatgctgatgctttgagagaaaaagatgagctgatcaaacaggatcaacgaaataggtcttcagagtcccttccacataatgtgtctgaagatgctctttcttcttttgatacttacgatgttgtttatggagaacaagatggtctaggcccaaaagcatttgatgtacatccaatatctatcttgcatcaaccaagaaaccatatttctgataacattcagatatatcaaccaaataaggaggcttcctcagaggtctctgaggagcattgcaaggaagtccagtgcatcgaaacaaatgagcttaggaggagtccattattctttcctgttgatcgatatcatgttggcacaaacattgatgaaggaaagcatgatgaaaacataacggacacatcagacagtgccatcaaattgtacacatgtgattctgagccatcttctgataccgaaaaaacaaataatgatgaatctttagccctgaagaggtgcgtgataagctctagggatagtgtactaactagaagcagaagttgcagagctagctttatggtcattccaaatagttggtttggtgattcgttggatatgagaatgacaagaccaggtgacattttcaaatattctcaaagaaggccaaagaacgttaggagtttgtatcctgaaaatggtcattgttcaaatgatcttacattcacttgtaatgaagaagatgaagacgccatcaacaatgtcgttggcataacaaaagtggaagagaagttagaagagtgttgtacatcccagctagagggcaatcaggatgacgttactgaagaaattttggacataaaacatgccaatgatgttgataaagatatatcagtgaccagtgtcgactctccttcacggtggcctattaactttgagaaaaaacagaaggaaatcattgagttgtggcatgaatgcaatgtatctatagtacacagaacatatttcttcctcctctttaagggggacaaagaagacaatatttacttggaagtggagcacagaagattatccttcattaaaagttctttcagtgttgcatctgaggctaatgctgctgctacatcaagcttgagaaatcttcggcatgaaagagacatgttgtacaggcaaatgctaaggagactcaatcttttggaaagagagagcctttacaacaaatgggggatcgatcttaattccaaacaacgaagactacagctatcacgtcgcatctggacacagactgacatggaacacgtgagggaaagtgtcgctcttgtcgcaaaactagtagaacacctggagaaggggcaggtcatcaaggagatgtttgggttgaccttcacactgaacccacaagctgaacgaagaccttttcagttgtgttag

SEQ ID NO: 30041 - DNA, 468 bp, Zea mays
  Peptide Sequence Number=SeqID_71820
atgactttgcctctttatggttgcccttctaataccgaggattcacacaagggaggccctccaagagctgttgagccgttctttatttgcaagagggtgcataaaaatagagttcccaaactagccctaagtgggatgtatagtacacgtgaagaaaaagacggtgggaaaaagttagtaaaattttggggggaaaagcgtgtccacgccagtgacatggacatcagtcacaagatctggccgactggccgtgcaattggcaaggcaatcgacatgctttggatcatgaaagactaccccggccaccttctgccattggaccgcagggatgggcatgacgttgatgtcctatgctgtcccatttgggagcaggagcacctgcctcgatttcgcgaaggatatggttttgttgtgacagagagactggtatgggtggtggatcccactgcccctttcgtgcgcctctaa

SEQ ID NO: 30042 - DNA, 214 bp, Zea mays
  Peptide Sequence Number=SeqID_71821
gaggggcagcggcggcagcaaggccgcccgcgtggccaggctcgtggacgcgtacctagcggcctcggctgcgctggaggccggcctgcgccccgccgagttcgaggagctcgcgcgcgccgtgcccgcccacgcgcgccccgccgccgacgcgctgtaccgcgccgtcgacacctacctcaaggagccaccttatttggtcttccagaaatga

SEQ ID NO: 30043 - DNA, 1719 bp, Zea mays
  Peptide Sequence Number=SeqID_71822
atgcttgacgcaacagatggagctcagactgttagcaaaattgttattctgaagccaaatccagaaagagggattaatcagaaagcagctactgcaagaactttacatcaacagccatgtacatcgaatgctcctggatgcagtggaagggaaaactcaaagttttcaattaaggaagtcaagaaaagattcagatttgtgactggtgagagaagtgaaagaaatttgtcacctgcagaggaccttcaaggagacccacgtaagatcaaagattctgttgttgcaattaataaatattttagacatctccctgaagggagcttggcaaacaagtctgcatcagacattgagaatggcatcaaaccttttatcagcagtaagcaaaagaatcaaaatgggagcataactgaaatcagtggccatatagtagcaccaaaaggtgcatctgtattttatgaagaggccaggaggcatttatcagagatgctaaaaggtaatgactgttccataaactatccagaagttcaaatatcaaaatccttggaaggcatactttctcttcctcatggcaatgtgtcaaccactgggagtagcctgaggggaaaggattaccttgacccctcacctggagaaacagatgtttacgatgcatgtgaggttgagagagaagaatgcacacaagagagaagccaatcacaagaggattttggaagcattgctcactgtacttgcacaacagttgatgatcaggtgacagttcgagaaggatattacacgaatgaagcacaagaaggaccaagacatgctcatgatgagccagacactctgtatattgaaggacttgataaattcatttgccgcgaaaacattcgcaacgaagagtccagtccagcagaacaaagcagagacgatatacgtcaagagatactagaagaaataaatcagggaaaagagcatgttaaaatgtccctagcttctgttgagggcatagatgaaaagttggggcagcaagagccagaaacaccggaaccaagagcatcagccaaattaatctcagacggttctcctaatcaaagcgatgaaaagcaagagaggcccagtccagtatctgttcttgagtcatccttcgaagatattggcagtccagactgcataaacaagaaagagtgtgagctgcatggtctccaaaggaccctgtattttccagataatgaaccagacgttaatgtcctttgggaggacaagaatgtcaggttggactacataaagctggtgctagaactctcagaactgtgcgcagaacaaaatctagaggtatggtacctagaagacgagttgatcagcccctgcttgtttgaagaactacagagccagggtgatcagacggatgatcgaatgcttctgtttgactgtatctgtgaagctctaacagagatccaagagagatattttagactctcctcttggctaacttttctaaaacacgacatacggacacctccgacaggagagaacctaatcacagaagttgataggtacgttaacgggtatattatccagtacagtcttccaagtactctagagcagacaattaaaagggatctggaagttcagacgtggatgaacattagatcgaaaaccgaagggattattatggagatgtgggagtttgtattggatgagttgatagatgagactgtctccgatttgtggatttga

SEQ ID NO: 30044 - DNA, 354 bp, Zea mays
  Peptide Sequence Number=SeqID_71823
atgggaggtgtgggcagggaagaagtagtatcggtcatggtgatctgggaagagaaagacataagagaagatgtgatggatgagtttggcgtctactggatcaatggctccaataccatgttgaatggcgcaaggcacatctacccccatggggctgtgcatgtatttatagatcaaaagatacatgcagatatgtacaagcaaggcaacaacctgccgagaagggaggcgcagctccagccaagaataatgagatacgctaacagaataacaagatatcctaacatgcttattgacttaccatccacatccgcagtcaatgaatttgtgctgctcaaaccatctagttcataa

SEQ ID NO: 30045 - DNA, 474 bp, Zea mays
  Peptide Sequence Number=SeqID_71824
atggcctacagtactcggatgcccaagactctcttcgctgcatccaaatccaccgagggaaatttccgacccaaacttatcgaacgctccaggcccgatccaaacagcgcacgggcaggtctggccctgggactgggaggaagaagcgccccggacccgggcggcgtgcgcgtgtccggttcccacggtgcgcgcacgtacgggtacggcagccgcgtcgggatcgcggcggcgtgcccgcgccgcgcttctgccgccggactctgccaaagaaaaaaccccatcgttcctgtcagctctccagtgcaggcgcccggcaccgcaccgcacctcacacgacgccgacgccgacgcgaccgagagaggctgctctggagtggagtggcgccgatggctatcggacaaggcatgccgggagcaggcgccctggtgccaggacatgagcgccacctctcccagacagagcacgcctga

SEQ ID NO: 30046 - DNA, 921 bp, Zea mays
  Peptide Sequence Number=SeqID_71825
gacgaagctaagtcggagctggggttatacgatgagctgaaagaggcatgcatagcagctgagaacctgatgaagagagccctaaacgaatcttccaggcgccaaaaggcagatggagaagtggcctccgcgcttcagaaagcaaaggaataccaggagttgtactttgaggagacgaggaagcgtgaagagctcgaaggagctcttgcaagagcgcaccgagagatcgcgcggttaatgcaggcgaagcaggtgttcgtggtcgagcgaaacacggcagcggacgaactccaggaggccatgtcagagaggtcgtccctggaaggccacgacgtcgacgaggatgccgttttgcgaacagccggcggtcaagcgactgagcaacaggaggaggaggaggagcatgtccagacacaacacgatctgggcaccggtgaaagggacctggaactggaagcgcggctcaaccagagcaagctggccgcgttctcgccgtcgtccgtcatccagtcgccgtacgacgaagaccgcgtcccggcctgcttcctctgcccgatccttcaggtgtgggtgcttgcattgcatcctccgcaggcgctgagtacagtgcatgcttggcgctcttgtttgaatgtcgttgaattcacgtatatgcaggagcccatgagggatccccacgtcgcggcagacgggttcacgtacgagggcgacgccatcagaggctggctggacggagggaacggcgcctcccccgtgaccggccagccgctcgcgcaccgggagctggcaccgaatctcgcgcttggcgccgtgatccaagattacacggtgatgaggcggcggcagtgccggttctgcgattcgcacgacggcgttgctgcgcttcaattttttccatcgcctgtgggctgccagcggtga

SEQ ID NO: 30047 - DNA, 309 bp, Zea mays
  Peptide Sequence Number=SeqID_71826
atgacgaccaagatattttccctccttatgctccatgctctttctgcatgtgttgctaatgcgaccattttccctcaacgctcacaagctcctatagctgcccttcttcacccatacctcccatcaatgatagattcacatcaacaactattaccattcagccagctagctactgcctactctcagctacgacaacttcttccatttaaccaattggccgcactgaacctcgctgcttatttgcagcagcaaatactactaccttttagccagctagctgcagcaagccatgcttccttcttgacatag

SEQ ID NO: 30048 - DNA, 1639 bp, Zea mays
  Peptide Sequence Number=SeqID_71827
atgacgaacaggtacctcaagtggaggcgcttgatcaagggggagcacaagatgatcaaggtagaggaggccttgctagatccggattgggtattggccatgcaggaggagctcaacaacttcaagcgcaatgaagtttggaccctggtgcctcgtccgaagcaaaatgttgtgggaaccaagtgggtgttccgcaacaaacaggacgagcacggggtggtgacgaggaacaaggctcgacttgtggcaaaaggttatgcccaagtcgcaggtttggactttgaggagactttcgctcctgtggctaggctagagtccattcgtatcttgctagcatatgccgctcaccactctttcaggttgtaccaaatggatgtgaagagcgctttcctcaacgggccaatcaaggaggaagtgtacgtggagcaaccccctggcttcgaggatgaacgataccccgaccatgtgtgtaagctctctaaggcgctctatggacttaagcaagccccaagagcatggtatgaatgccttagagactttttacttgctaatgctttcaaggttgggaaggccgatccaactctttttacaaagacatgtgatggtgatttgtttgtgtgccaaatttatgtcgatgacataatatttggttctactaaccaaaagtcttgtgaagagtttagcacggtgatgacgcagaaattcgagatgtcaatgatgggcgagttgaactacttccttgggttccaagtgaagcaactcaaggacggcaccttcatctcccaaacgaagtacactcaagatctgctaaagcggtttgggatgaaggacgccaagcccgcaaagactccgatggggaccgacggacacaccgacctcaacaaaggagactccgactatgctggatgtaaggtcgataggaagagtacatcagggacgtgccaattcttaggaaggtccctggtgtcatggaactctaagaaacaaacatccgttgccctatccaccgctgaggccgagtatgttgccgcaggacagtgttgcgcgcaactactttggatgaggcaaaccctccgggactttggctacaatctgagtaaagtcccactcctatgtgacaatgagagtgctatccgcatggcggagaatcctgttgagcacagccgcacaaagcacatagacatccggcatcactttttgagagaccaccagcaaaagggagatatcgaagtgtttcatgttagcaccgagaaccagctagccgatatcttcactaagcctctagatgagaagaccttttgcaggttgcgtagactccaactcgaactcgtcgccttcgggaattttcagaggcactccgctataattcaccggactgtccggtgtacaccggacagtgtccggtgctccaaggaagagcggcctcaggaactcgccagcttcgggaaatcgcagcggctgctccgctataattcaccggacatgttcggtaaggcaggcacgcccatgctggcgcaccggacattctacagtacatgtccggtgcgccaccggacatccaggcgggcccagaagacagagctccaacggtcgaatcccaacggcgttggtgacatggctggcgcaccggacatgtccg

SEQ ID NO: 30049 - DNA, 171 bp, Zea mays
  Peptide Sequence Number=SeqID_71828
atgagccggacgctgggagcctgggataagaacgatgctgaaaatatccagggagtaagcaatattttagaatcgagatctctagcgaccacaaaagagtcgacggtaattgcgacagttgattcgattcaaaaatctgataaatttaccagagaatcgaagctcaattaa

SEQ ID NO: 30050 - DNA, 183 bp, Zea mays
  Peptide Sequence Number=SeqID_71829
atgactgcaccaaagatagggctggcgattgttgaaacaccaagggtgataaaggtatgttgcttgctgcgattgcttgttggagcctatagggttgaagagctgggttttcacatactgaagctatcattgatggaaggaggtatttatacacatgttagaccttgtgctcatgtagattga

SEQ ID NO: 30051 - DNA, 124 bp, Zea mays
  Peptide Sequence Number=SeqID_71830
atggcactcggcaaagaagcaagctttgccgagtgcctccaagagcactcggcaaagaatctgacgccgggccccactagtggacctcgttgccgagtgcaggctggagacacttggcaaagag

SEQ ID NO: 30052 - DNA, 430 bp, Zea mays
  Peptide Sequence Number=SeqID_71831
atggggttcgggtggggctcgcccgcgcgagggagcagggcgcttggcgttcctcgccagggcgcgcgtgacatggctgcttgggacgcgacgagggctgggcaggcgcggcgcgctgggctgcacggcagggagagcgcgcggaggcggctgggcgagcggcgtgcaggcggcggcgctagggtttgggatgctgggctgtgcgcgctgtggccgccaggggaggtcgcggctgggcgggagagacggggcgccggcgctgggtgggccgcgcggccgcgcgcgggggtgggccggggggtggctgggccgcggccaggggagcgggctagcgcgctggtgggccgcgaagagctggccgcggaaggctggggagcgcggcgcgcggggtgggccgcggagtgggctagggaaggaggggttgagggag

SEQ ID NO: 30053 - DNA, 456 bp, Zea mays
  Peptide Sequence Number=SeqID_71832
atggcggccaagatattttccctccttatgctccttgctctttctgcatgtgttgctaacacgaccattttccctcaatgttcacaagctcctatagctgcccttattcccccatactctccatcaatgatagcttcacaacaacatctactaccattcagccagctagctaccgcatactctcagcaacaacaatttattccatttaaccaattggtcgtactgaaccccgctacttatttgcagcaacaaatactactaccatttggccagctagctgcagcaagccctgcttccttcttgacaccgcaacagttgctgcctttctacctgcagtttgtggctaaccccgcaaccctcttacaactgcaacaattgctgcactttgtccaacttgctttgacaaacccatcagcctcctaccaacaacacatcattggtggtgccctcttctag

SEQ ID NO: 30054 - DNA, 240 bp, Zea mays
  Peptide Sequence Number=SeqID_71833
atggctgaactcgccgaggacggggaagaggagaatggggcgcagcaaggccgaccacgaccgaggttgcggctgctcggccgagactcgcgcgcggggagaggggggagctcgcccggccatggggttggggtggggctcacccgcgtgagggagcagggcgcttggcattcctcaccagggcgcgcacgacatggctgcttggggcgcgacgagggctgggcaggcgcgacgcgctag

SEQ ID NO: 30055 - DNA, 456 bp, Zea mays
  Peptide Sequence Number=SeqID_71834
atggcggcaaagatattttccatccttatgctccttgctctttcttcatctctagcaaacctttctccctactctcagcaacaacaatttcttccattcaaccaactgtctacactgaaccctgctgcttatttgcagcaacaacaactactaccattcagccagctagctactgcctactctcagcagcaacaatttcttccatttaaccaattggccgcactgaacccctctgcttatttccagcagcaaatactactaccatttggccagctagctacaacaagccccgcttccttcttgacacaacaacaagtgcttccgttctaccagcagtttgtggctaaccccgcaaccctcttacaactgcaacagttgctgccctttgtccaacttgctttgacaaacccagcagccttctaccaacaacacatcattggcggtgccctcttttag

SEQ ID NO: 30056 - DNA, 506 bp, Zea mays
  Peptide Sequence Number=SeqID_71835
aggtgccccctacaacaccacagggcaccccagctactggaggagaccccgacatagatgatgatggtggcagctcgagccacaacacggcacttttggaggagcaggagcagaaggatgtgttgcccgacccatcactcgtgacgccgctcgcggttgtcacttccatgatgcgctggacaccctgctgcgccaggcctttgatcagcacacacggtcaatcgagtatcgctgcatggtctactagcatagtcgtgggacatacccagaccacagggaggctacctgcctggtgcgccgtttggaggatgacctctgaggtccagaggcctactcagagaactatgccatctctgagagggacactgatgaggagtgtgattgtctcacctatcagtaagggaaatcctaggttgagcagcacaatcaacctggtcatcgtgcttaacatcgagctgtaccacgttcttgatgagttgagcaaggctcgtgaggagaaatcctag

SEQ ID NO: 30057 - DNA, 704 bp, Zea mays
  Peptide Sequence Number=SeqID_71836
atgaatgttccagtagctgaagaaaatgttccagaggcactcgttgatacgagggttccatctatagaagtatctgggcacaaaagcaaacaagtctgcaacatgggtccacgccgagcatcgtcaaaaagaaatgttgaatctgatgatctcaaattttgtcagagaaagccaaaaaagacaaggctgttatcagaactcataggttctgaacaggtaggggtttctagagatgccattcaagtggaccatactaacagtgttgatctctgtgagggtggtaaaagaaaaatgcaccttgaggttggaaaaggtaatgacactgctaatcagcaagtggacgaaatccagtcaagagctgtcaagaacaaggcaaaatacacaggagtagacaagttagaagatggatcctctctaatgaactggctgaaaagcactaataaggaagttagaacaaagaaaaaagactcagaacacaagaatcttgattcctcttctatttcaaggtcttacccagatatagttgcttctaatgatatgcatcatgattttctaccctcagttggggatgtgggccaggcaaatgtatcatctactaccagtgccaagcatgggaatggaaatgcacagaatgacaaactggagcaaaatatgcagaagatggatggcctgtgtgaaaatgaatctagaaacttgaaacagag

SEQ ID NO: 30058 - DNA, 384 bp, Zea mays
  Peptide Sequence Number=SeqID_71837
atggaggctggcggcgaggagttcgcgatcggcgtggtgatctccgcgaagaccaccctgggggaggagttcgagggccagatcgtcgccttcgaccgcccctccaacctcctcgttatccatatccttcgcaaatcgctcatgctcgtcacccgcatctccttgtcatttacctatcggtctggctgtttatcacaggagggcgtgggtagggcggagaggggggagcggaggaacgtgagggtcctcaaagcgaactacatccgggagttctcggtggtcagtaagggtgacgaccctctcgatcctgccagctgcatgctggacctcaactccatttatgcccgggaggatgctgcactcagcttgcttgtgcaaatgtga

SEQ ID NO: 30059 - DNA, 246 bp, Zea mays
  Peptide Sequence Number=SeqID_71838
atgggcctgcccagcaggctggtggctgccaaacataaggccatgtcgcccactcctgcgagtggtgtcgctggccacaccatcgcgctgccctgggcgccatggcttgtcaggactgaaatgacaaggaaccaacccattgctgcttctactaccagggaggatttggtcatgggaggaagcagtcgcacaactgcaaatagaagagcatggctggcgagcactagattgggtggtgacgtcatt

SEQ ID NO: 30060 - DNA, 362 bp, Zea mays
  Peptide Sequence Number=SeqID_71839
ttgaggattccgaattaaaagaaagatgtttggttgaaacacccaatgctatctggatacaccttcattatgatctgatagtgaatctcttagagtggcttaaaatgatggttaccaataagagggcagatgaggtagtgcatccaaacctcgaggttaagccaccaaaatgtgcccttaagcaggaaatcttggttggcttcaagtgtgtcgatcctgatgttgacaagagcccaaagatgagtcatgttgtccagatgcttgaaggagttcagaatgcatatcatcagaatcaaagaaagctcagtcaggtgggaagaatggaaatcgagtcacaacagccgctagaggatatgagctaa

SEQ ID NO: 30061 - DNA, 567 bp, Zea mays
  Peptide Sequence Number=SeqID_71840
atggcgtccagcgcctctcggttcatcaagtgcgtcacggtcggcgacggtgccgtgggcaagacatgtatgctcatctgctacaccagcaacaagttccccactgtgagctcttcatttctctaccttatcccagttcctattggcaaaaaggttgctgtgcgatttcccgtcaacttaggggatttcattacaagcaatggttttttccctgtttctgttttcttgaggacggattacatacccacggtgttcgacaatttcagtgcaaatgtcgttgtggatggcaccacggtgaatttgggcctgtgggataccgcagggcaggaagattacaaccgactgaggcctctaagctaccgtggtgcagatgttttcgtgcttgcattctcactttggataccggagcttcagcattatgcacgtggggtgcctgttgtgttggtaggcacaaaatttgttaccgaccaaaacggacaacaaggagctgaccacctctccccatggattccctccatttctctatccaccaaaccagcccttatagtaaacatggaaaactttatg

SEQ ID NO: 30062 - DNA, 378 bp, Zea mays
  Peptide Sequence Number=SeqID_71841
atggctgggaaaagaggggtcgcggctgggggcgccgacggcggggaagaagttggccgcggctggggcgccagcggcgggggatatggtcggcgtctacaggagtgcagcggttgggggcaagcagagattgaagctgagagaattggtgttggtgtcaccccagaagctcaaagtatatttgatgcgctgtccaagacgcttccggttcagtgggacaagactgacattgtcgtaatgaaggaggttcgtgtacgcagtccgtacctgcctgaaaatgttaatggaggaacagctgcagcaaatgaacgcgttaagaaagtgattgactttgaaaggaaaagattacattcacgtgtacctggccaattctcttga

SEQ ID NO: 30063 - DNA, 643 bp, Zea mays
  Peptide Sequence Number=SeqID_71842
actggactttgaaggtcacgcgcacgcaagcaggcctatgacggttttcttcgtcgcacgaacagcggtaggagcgggcggcagtttcactgggtggcttgcgacgtcggcaggagcagctcgccaggcggggaacggggatggtcgggacagcagggcgtcgagcagcatggcgcgtggcctggctcgacgagggccggcgtgcaacgagcagccctacagcgcacgcggcgccaagcgcagtggctgctcggccatggctaggggacgagcacgggcagaggccgcgcaagcaggggatgcctggttggccacaagccgccctgggcgcaccagccgcacaccgcgagccgccgacggccgcgcggactggccgctgggggctggccgcgccgcgctcggcgagccgcttccgctgccgcacgctggccgcaacaccgcgtcgagcacggggtctcctggccgcgtcgaggcccgggcgagctggccagaaatggctgccatgccgtgctgggctacagggggcaagagcgccgtcaaggggctgcgacgcagggaagctctcgccgccggccgagaacaggggaagaaaggtgaggtattcgagcgcaaaggcgaggtacttatggctgcgtccgagtga

SEQ ID NO: 30064 - DNA, 243 bp, Zea mays
  Peptide Sequence Number=SeqID_71843
atggcgtgggcgctgccggcaggcgggggaggggagtggcggcatctacgtgattggaggaggatatttcgtgaagtcagggttgccataagcatggtgaccatgggacggcgagcggtaagggttctgagtcctaacaggggtaggggaaccatcctcctgatggtggcgctccgcgcgctcaacactcagttccgaaatctctgcctgagccttgcccaactcgtcaagggcatggtctag

SEQ ID NO: 30065 - DNA, 308 bp, Zea mays
  Peptide Sequence Number=SeqID_71844
ggtcctttatgcaagatcccaaggcttagctgcaaattccagggacgacgggttctattactcagaagccgaggcactgacacgcgggaccagggggtccatcagtcagcgactgcgtgaggggaaaggaaaggtggagacgagtggggctgatgggcgggtcccccttgtcagggctgccgtcttcctcagccgcgcgctcggcgcgagcgccatggctggagccagcgactccacacgggcgaaagaggcacggggcagttgcggttggccgggggtctcggtacgacgacgaggtgtcatcaccg

SEQ ID NO: 30066 - DNA, 144 bp, Zea mays
  Peptide Sequence Number=SeqID_71845
atgcatatttattctatgggaaagcatatgattttagttggtatgaagtttgttcatagttggccatttctgggccgtgtatatggaatagctgcacttgatgtgaaaaaactcaaagatgttggtctctgcacagtggaataa

SEQ ID NO: 30067 - DNA, 261 bp, Zea mays
  Peptide Sequence Number=SeqID_71846
atggcgcccctgcttttccctgtccggccaggaaaacgcccttccctgttttcctcttcccagcacgccaaagcaccctactgttccctgcgccctactctcccatggaaaccagcaggagctccattttccaccatggagaaggcaagccgctcaacgctcgtcgatgtgcgaagctatgcaccaatcggaatcaccgtcgttcttgcaaatgccgtttggttgtatgagtggaagcgtgtagagaggaaaatgaagtag

SEQ ID NO: 30068 - DNA, 321 bp, Zea mays
  Peptide Sequence Number=SeqID_71847
atggaggtgggcggcgcgggagcgggtggaagggacgagagggtaccgcagtggggcgcgcaggagacacgggagctaatcatggcgcgcggggagatggggcgggagaccgtcgcgacgtgccgcagcgccaagacgatgtgggaggccatcgccgcgcgcctccaggagcgaggctaccgacgaaccgccgagcagtgcaagtgcaactggaagaacctcgtcaactgctacaaggtctattttgggttgttagcagtccgtccacaactctccctcgcgttcacctttgctgcattatttccgcaaccatttccataa

SEQ ID NO: 30069 - DNA, 861 bp, Zea mays
  Peptide Sequence Number=SeqID_71848
atggccgccaccttgccgcgcaaaggtctcaccggctcccgagaggacagcttccgcgcctcccagtctatgtatgctgatgtggaatgcttcacaggtttcagaaaaccttctgagaaggcatgtataaaactttgggcaaaaggagatcttcctacccagcatatcttgcctcggaggagggttgttgtattcaatactatgggtttgatggaggtaatttttaacaggcctgttgatattctaaggaaattgtttgatgggaacaccttgagatcacaaatcgaagaattctttaatcgctttggtgccggagaggctgctgcaatgtgcttaatgatagctgcgaagctactttatgctgaagatagtctgataagcaattctgtttctaagaaagttgctgaggcatttgaggaccctgggcttgttgggatgcctcaaattgctggtaccactgctttatctaatacacgaactcaggctggaggctttagtatgggccaagttgttcaagaagcagaacctttgttttctggtgcaaatgaagggctttgtttgtgctcgtcaagactactttatcccatatgggattatggtgattcaaagaccggctggctttcagctggggccatgaaaattcttgagagcaagattcattcgctggaaacatttttaagatctagaagaaataagagaaggagccacgcagtaccattgacacttaacctcaagggtaaaaacacaaatatcattgacattgtgcacatagtcttcatcagtatttcactgtcaagtcattgttccatcttcctaggaactgatatacgtaaagatacacagtatattcttatacaatag

SEQ ID NO: 30070 - DNA, 219 bp, Zea mays
  Peptide Sequence Number=SeqID_71849
atggcgccagtgccctgcacagcatccccatcccccaagctcctagcgcgcagagcatttctctgggtccgagctcgagcagaggaagttcttccccaatggccgacgccctactcagggaatgaagccaatgctccagcggcccccatgtccaggagctcgacgccggccttcttcctgtgtcccttgccgcaggagcagcaactcttccctctctag

SEQ ID NO: 30071 - DNA, 528 bp, Zea mays
  Peptide Sequence Number=SeqID_71850
atggggacgagctcacctgctcgagctcggacccagagaaatgctctgcgcgctaggagcttgggggatggggatgctgtgcagggcactggcgccatggacgccagagagagaggagctcgaggggtcgagctgctgggatatgggagcggctgcttgcttgaggaagaagaaggggaggggatggagaggggcgctgcacctggagccgagcacgcaggcgagcaagatcccggcaaggagtggcgccatggatccaaggagaaatttctcctgttcctgcggagaagaagggcgcggcttcctgcgctggtgatgaagtggtggcaggacactgcgtgggggaggagtcgcaggacctggggcaactccagagagcagcaccatggggaaacggccttccctgctgctggcgaggtacgccagggaggcagccatggaaggccttgctcctgcgctgagaagggggaaaacgctagaagaggcttctgcgctaaggaacagaggagagaatggagtgtcggctga

SEQ ID NO: 30072 - DNA, 528 bp, Zea mays
  Peptide Sequence Number=SeqID_71851
atggggacgagctcacctgctcgagctcagacccagagaaatgctctgcgcgctaggagcctgggggatggggatgctgtgcagggcactggcgccatggacgccagagagaggggagctcgaggggtcgagctgctgggatatgggagcggctgcttgcttgaggaagaagaaggggaggggatggagaggggcgctgcacctggagccgagcacgcaggcgagcaagatcccgacaaggagtggcgccatggatccaaggagaaatttctcctgttcctgcggagaagaagggcacggcttcctgcgctggtgatgaagtggtggcaggacactacgtgggggaggagtcgtaggacctggggcaactccagagagcagcaccatggggaaacggccttccctgctgctggcgaggtacgccagggaggcagccatgggaggccttgctcctgcgctgagaagggggaaaacgctagaagaggcttctgcgctaaggaacagaggagagaatggagtgtcggctga

SEQ ID NO: 30073 - DNA, 438 bp, Zea mays
  Peptide Sequence Number=SeqID_71852
atggctaccagtagacgcctgtccacgctacggtgcggcccgggacgaaacttgggcaccggcgagcaattccggcgaggcagcgctagtccaggggctggggagttcgtggccaccactggaacgacgccgcaaccgcaccagattggtacccagggcatgcacgccagtgaatcggccggtcaacaacggtggatcccacacacccgtgggctcggcaatggcggcgctaatttgttcagggagactaggcttgcgcgagaagtattacaggtgacaccttcgacaatcatggcagtcgaagataagggttcctccaagcctgccctagcggagaacaaagggaagcggtctgctgaatttgaagaggccaagaaggcaatcaaagatgatacaccgcttagtgaaggatcttttgaccaagacttgggtggttga

SEQ ID NO: 30074 - DNA, 186 bp, Zea mays
  Peptide Sequence Number=SeqID_71853
atgaagcttcttcaagatcttgttcctgaatgcagtaagttcttgtcaatgaaactcgcaactgttaaccccgagcttggctttgacattgagcagatcatatccaaacaaatgctgctttcacaagactggcatcttgctttctatggagtcgaaccaggatcaagcggccttactggcccataa

SEQ ID NO: 30075 - DNA, 210 bp, Zea mays
  Peptide Sequence Number=SeqID_71854
atggcgtaccggcgcatggacccggagccgttcctccctccagggttcagcgcagcggtggtccagcatcgcggggttatggtcagctcatgcttggcggtcaggctcaggatgaagaccccatccctccggcccctgaggatggacatcagctccccctggtcttcttcgggctgggtcaacctttgcctccggcaggccttgacctaa

SEQ ID NO: 30076 - DNA, 432 bp, Zea mays
  Peptide Sequence Number=SeqID_71855
atggcaatgctgccgcgtccaacagcgctcgtcgcagcggtggtggtggcggcggcgctggtgctcgggatggcgtcggcgcaggggccggccgccgcgcccgcgccgggcccggcgcccgggatcagcgacgagtgcttcaacgcggtgctcaacatgtcggactgcctgacgtacgtgacggcgggcagcaaggcgcggcacccggacacgccctgctgcccggagctggccgggttgctcgagtcccaccccgtctgcctctgccagctgctgggcggcgccgccgagtcctacggcgtcagcgtcgactacaagcgcgcgctcgcgctcccggggatctgccgcctcaccgcgccgcccgttagcgcctgcgcagcacgttacgacgacacaattactcacgaaatggaagtcgcttctagcagctaa

SEQ ID NO: 30077 - DNA, 1326 bp, Zea mays
  Peptide Sequence Number=SeqID_71856
atggagaaatgggaagttccttgcatcctgcaggaaattgtccctctcaatgctggtaatgtgcttgtaatagaagacaatgaaccagctgctagatggcttgttcttataaaccaatcactaaatcgaccagctgacattgatgccaacgtctttcagcatgaaccatctccctctgttgattcttcttcctctcgagcttcatcaagcatcggcacctcattctccgacctatcaaaaacagcaagtggtgccacaatcttccagaattccttgttaaaagccattagcaaatctttcatgccagtgcgtagaaaacaacttaaggcctgcaattgcccggtagaaatgaccagaacgtcctacagggatgcttgctttggatgtcaaaaagcatatgcagatgagactgattcctctggagaggatgaagagaaagggaaagataaagagaaatcaagggactctgatggctctgtggtcgatggaattacttctggtcctgccactagggatcaactaaaatataatctcatagcgtgcaaacaaatggttggcatttttgttactgtgtgggtgaagaaagagctagtgcagcatattgggcatctaaggaaggcttgcatagggcgcgggattctgggctgtcttggaaacaagggatgtatatcaataagcatgacactgcaccagacaagcttttgtttcgtatgcagccatttggcttcaggtcaaaaagaaggagacgaattcaggaggaactcggatgttctagagataatgaggctcacaatgttttctaggatctgtagaagagctggaagaaaaatcccggagagaatagttgaccatgataaggtgatatggcttggtgatctgaactaccgtattgcactgagctatgcagataccaagaagcttttgatggaaaatgactgggatgctctttttgaaaaggatcagcttaaaattgaacgggacgctgggcgagtatttaagggttggaatgaggggaagatatattttgctccaacatataagtactcctttaactcagatgcttatgctggtgagactgcgacatcaaagaaaaagagaagaactcctgcgtggtgtgacagaatattgtggcgtggtgatgggattgtacaattatcctactaccgcggggagtctagattttctgatcaccgtcctgtttgtggaaccttcgctgttgaggttgaggtgctaaacaagaagacaaacaggcgctcatcaaatgctgacatgagaattgatgctgaagagctcttacccacgggcaagggcaagggtaaaaggtaa

SEQ ID NO: 30078 - DNA, 297 bp, Zea mays
  Peptide Sequence Number=SeqID_71857
atgtgggcccatatcattgatatcattgggttcaagtttctaccttgtgggcctagagacttggacttctcattggagagtacagcagattacccaaagctaacggctggtataggggtggataagtctaagaactctaaacaaccgcagcggtatcactatgacccacagttgacacgagatttcggggtaaaggcaagagagaaaagggaagtagtcgactactacgatacagcagttgagtgggaacccgaggagggggatctcgccataccagagtatttggataactctcag

SEQ ID NO: 30079 - DNA, 471 bp, Zea mays
  Peptide Sequence Number=SeqID_71858
atggggggactgggaggagctaccactaccagcgtctgcgctctcagcctcctctccgccctgctgcttctgcactactgcctcctcctggcaccttctgccgctgtggtctccaaggagaggacgcagtcgagaaagctcttgcagagcctcgtcgtagtagcacgcgtcagctcagactcggagaaggcgcgaccagaggtggtccgggcagcggccaagccggcagccatgggtcccggcggcgccgcggtgtccgagaacctgaagaagcagacgccgagcaggttatcttccatgcacttaattagacaaaaggactatccgcatgaagatcacaaggatctctgtcaggaatgcagcgtcacaatcagtggggcgttccctgatattgaccccaaaacaagcaggaagaagcccttcagcatcacaaagaaattatatggaactcatttgaattccgccatttga

SEQ ID NO: 30080 - DNA, 255 bp, Zea mays
  Peptide Sequence Number=SeqID_71859
atgcagaaaacaaaggcaaaaaccccatgggatgtacaaggcgtggatctccgttgcgatggcgtctcactgaaaaagttcgactgggatatattgagatactggttgatcaagctggacatcgatgcaattatagtgtactctttgaaaacgtccgatcaagccagtcattggtgcgatcacaatgtatcctttgaaaacgttagtctgcatatctcgccattatgtaccataacaccaaaagatgtgatatag

SEQ ID NO: 30081 - DNA, 1527 bp, Zea mays
  Peptide Sequence Number=SeqID_71860
atgggtgaaacgatctcgttcgcccctcggaaggccatcaagtcccaggtcttggcggacttcgtggctaaatgggtcgacacccagctcccaacggctccgatccaaccggaactctggaccatgttcttcgatgggtcgctgatgaagacgggagcaggcgtaggcctgctcttcatctcgcccctcggaaagcacctacgctacgtgctacgcctccatttctcggcatccaacaatgtggccgagtacgaggctctggtcaacgggttgcgcatcgccatcgagctaggggtccgacgcctcgacgctcgcggtgactcgcaactcgtcatcgaccaagtcatgaagaactcccactgccgcgacccgaagatggaagcctactgcgatgaggttcggcgcctggaagacaagttctacgggctcgagctcaaccacatcgcccgacgctacaacgagactgcggacgagctggctaaaatagcctcggggcgaacaacggttcccccagacgtcttctcccgagacctgcatcaaccctccgtcaagaccgacgacacgcccgagcccgagaaggcctcggccgagcctgaggcaccctcggctcagtccgaggtaccctcggctcggcccgaggcaccctcggcccaacctgaggcaccctcggctcagtccgaggtaccctcggcccccgagggtgaggcactacgcatcgaggaggagcgaagcggggtcacgcctaatcgaaactggcagaccccgtacctgcaatatctccaccgaggagagctacccctcgaccgagccgaagctcggcggttggcgcggcgcgccaagtcgtttgtcttgctgggggacgagaaggaactctaccaccacagcccctcaggcatcctccagcgatgcatttccatcgccgaaggccaggagctcctacaagagatacactcgggggcttgcggccatcacgcagcacctcgagcccttgttggaaatgccttccgacaaggtttctactggccgacgacggtggccgacgccactagaattgtccgcacctgcgaagggtgtcagttctacgcaaggcagacccacctgctcgctcaggccctgcagacgatacccatcacctggccttttgctgtgtggggtctggacctcgtcggccccttgcagaaggcacccgggggctacacgcacctgttggtcgccatcgacaaattctctaagtggatcgaggtccgacccctaaacagcatcaggtccgaacaggcggtggcgttcttcaccaacatcatccatcactttggggtcccgaactccatcatcaccgacaacggcacccagttcaccggcagaaagttcctggacttctgcgaagatcaccacatccgggtggactgggccgccgtggctcaccccatgacgaatgggcaagtagagcgtgccaacgacatgattctacaaggactcaagcctcagatctacaacgacctcaacaagttcggcaagcgatggatgtag

SEQ ID NO: 30082 - DNA, 657 bp, Zea mays
  Peptide Sequence Number=SeqID_71861
atggcaaaccaagggcaagggtatcgagattatttctctcaagctgcatcttcttcggctgatcgctccttctcgcctccccccacagcccccaacaccgatgagcttggcctcttttcccagtcggtggtgggcaccagacccttggctcctttggtgaccatggaaaacctagacctcaactctcatattgacagcttctcgttccttggcacctactcggggtacatgcagccagaaggaggtaccagcgagcaaggggttcctcctgtggcccctggtggtacatctcgccacagcgcattccatcctcctcgccctaacgaaagtagaagcaaaaatagccatggtcctaactcattgaacaatggagcgggatacagccgacagtcattacaatccggtccccaggttcctgctccagggattggaggcagacgacactcactaggatctggtccccaggttcctgctccggggatgggaggtagtcgacagtcactgggatctggtccccaggttcctgctctaggaattggaggcagccgacactcactgaggtccggtccccaggtttcctgctccgaggatggaagtaggaggtcgtgggagatcgaggaacatctcatttcctacagaagacatcgacacccatga

SEQ ID NO: 30083 - DNA, 279 bp, Zea mays
  Peptide Sequence Number=SeqID_71862
atgtctgctcaacctaggacgatgaatgacactgccgatgctactactcctgcgacagcattgtcgtctctaacattgcccgacgaagaggttgacgcagacgacctcgacgatgcggccaacacccacatggagagcaagattctgacgatcatgggtttcttggaggaccccgaccagaaaaagagcaaaagagtaagattcttggaggagaacgagatgcacttatgctatgcaacatttcatgtgggcgaaatgaaacatagtactcctgcgtaa

SEQ ID NO: 30084 - DNA, 678 bp, Zea mays
  Peptide Sequence Number=SeqID_71863
atgacatcacaggctggggggagtggaggagacgtgggtggcagtgccggtgccggtgccggtgcagggcaacacgggcagatgcagagcctggcaagacaagggtctctgtataacctcacccttgatgaggtgcagagccatttgggagaacccctacacagcatggaccttgaggagctgctgaagagtgtctttcctgatggcctggaccctgatggtggcactaccagccagtatgagcagagttcgggcctcttgcgacaagggagcatcacaatgccgcttgagctcagcaagaggactgtggacgaggtgtggaagggcatccaggatgtgccaaaaagaaatgtcggggagggtgatcagcagagccaggagcgggagcggcagccgacccttgagaagatgacgcttgaggatttcttggtgaaagctggggttgtggccgaaggatatcttaaggacttgaatgatgtaggcaatgtggatcaggtcagtagcgctggggctgcagggccaggtgctattctggagtcatactctgatggccacattacttcaccaatgatgggtgcgctttctgattctccgacgcctggtagaaagcgtggttccccaggagatgtgacagataagttgatggagagaaggcaaaagaggatggtcaagaaatag

SEQ ID NO: 30085 - DNA, 684 bp, Zea mays
  Peptide Sequence Number=SeqID_71864
atggcctcccgccccaacttcggcctcaacgagctggacttcgtcttctccaccctcgtcgtcggctccatcctcaacttcgtcctcatgtacctcctcgcccccaccgccgccgcgtcgtccgccgcctccgcgctccccagccacatgttcgagcccggcgccttctcgctcggctcccgcgtcgccacgctcgtgtccaagggcgccaccttcgcggtggtcggcttcgcagccgggctcgcgggaaccgcgctctccaacggccttatggcgatgcggaagcgcatggacccggcgttcgagacgcccaacaagccgccgcccacgctgctcaacgcggccacctgggcgctccacatggccggcagcagcaacctgcggtaccagacgctgaatggggtcgagtacatgctcggcaaggtcgcaccggcgccggtgttcaaggcgtccgtcgttgttctccgctgcttgaacaacgtgcttggtggggtgtccttcgtgctgcttgctaggttgactggggcgcaaaaatcagataagccggcgacggtcgcggaagagaaggataggttgatagctgtgggcaatgctgcagcagatgccatcggtgaggcgagagatggagaggaggtgaggccacagggccatgccagagcaatgatcgttggaactacaatttag

SEQ ID NO: 30086 - DNA, 1660 bp, Zea mays
  Peptide Sequence Number=SeqID_71865
gctcgtcagccaacaggaagcaagtgcacactcccaccccactcccgcgcgccgcgcccgcgaccggggcggcggggccggtggtggtggaggcggcggccatggcggagctgcggcactcgatggcggtgcgctcgtccaactcccccgccaagcgcgattccgacacctccgcggcgtcgtcccccttcctcctgtccccctccacccgcggcagccgcggcggcggcggcggggacgacgacggcaaggacgcccaccgctcgtcccctctcctctcgcatcaccaccacaagcgtgtccacctgctgacgtccccgttccgctccctcctcgcactcgaggaccccaggtcctccgccgcctcgtcctcctacaggatcctgcttgctctcctcgcgctccttctcgccgctgtgattttctgcgcgcccttgttctggtcccgcctcaacactccgttcttgtgccacaaggaggggatcacgctccactgccctgaggtgaaacgaaggaacccccatctctatgggaaaatccacgtgctgccacgatgtcctggaagccctgtgcagagcgatgcagcaatgagccctcaggcgagtctacctttcacgtttgttaaagacagcaatatagcatatattatatgtaatgctgttgcgattgctaaaataatgagagcaacacttattctacctgttctgaagcaggaccaaatttggaaagaccagtcgcgtactgtgaagaacatcccaaagtatgcttcagcacagttttatattgataatgtacttccaaggatcaaagagaaaaggataatgtctatcaagccatttgtggacagattggggtatgataatgtaccaacagagattaaccggctgagatgcagagttaactatcatgcattaaagttcctacctgatattgaggaaatggctgttaagcttgctgcaagaatgaggaacaaaactggcagcataaatccatacatggctcttcacctgagatttgaaaaagggatggtggggctttctttctgtgattttgccggcacacgggaggagaaggcaatgatggcggcttataggcagaaagaatggccaaggcgcttcaagaatggatcccatctatggccactggcgctgcagaagagaaaagaagggcggtgccctcttgagcccggtgagatcgctgtgatcctgcgggcactggggtacacgagcggcacacagatatacgtcgcgtccgggcaagtgtacggcggcaagaaccggatggctcccctcaggaacatgttccccaacctggtgacgaaggaggagctagcgagcgcggaggagctggcgccgttccggcggcacgtgacgagcctggcggcgctggacttcctggtgtgcctgcggtcggacgcgttcgtgatgacgcacggcggcaacttcgccaaactcatcatcggggcgcgccgctacgcggggcaccgcctcaagtcggtgaagcccgacaagggcctcatgtccaagtccctgggcgaccccgacatgggctgggcctccttcacggaggacgtcgtcgtcacgcaccgcacgaggacgggcctccccgagcccaccttccccggctacgatctctgggagaacccgctgacaccctgcat

SEQ ID NO: 30087 - DNA, 290 bp, Zea mays
  Peptide Sequence Number=SeqID_71866
gctggctggggatcagcgtgatggagttcaagaggaaggtggctgagtaccgcgcccagcaccaggcttgtggtccccggcgccgacgccacggacactggcacccctgtcgccgggagagcaccctcggcgaggcgatcgaggcggcgacatcgaggcacgtgcaccggctgtgggtggtcgacgaggaagggctcttgcgtggggtcgtgtcgctcaccgacatcctccgggcagtgcgggaggccgcgctcggcgaggacctggagctgcacagcatcgtgccgtga

SEQ ID NO: 30088 - DNA, 333 bp, Zea mays
  Peptide Sequence Number=SeqID_71867
atggctctgctcctcgctctcttactcgtgctactcttggccaccggtggtcaagccgacgccgatgagccggcaacgtcacagcagcgcgctgttccggcggagcaggcgccggcgccgaagggctacgaaaccctgagggaggaaccggcaccaaccggcggtcaccgtcaccgggagatcaagatcggagcatgcttccccatcagcgacggcggcagcagcgctttctcctgctaccagcggtgcacgagcaaaggctacgccggcgggcgctgcgacaccctgcccagcggcttccccggcgactgcttctgcatcacgtacgcttga

SEQ ID NO: 30089 - DNA, 436 bp, Zea mays
  Peptide Sequence Number=SeqID_71868
gaagacttctgtttcaattttcttcgtatcccaacaatccagattgatactgctgctttccgtgacgatggttctcttggccataagatctcaaggcggtgaacaagctctcatgcagacattgaaccgtgcacgtgaactctatgcacagagattgcaggccagtcctagtgttgatgagcttgcctctttgcttgcccaatgtgccatagcagaggctcagtcatcaaatactaaccctccacaagggcctgggtcagaccctgtcaatatgctgaattctgatgaggcctgcattcttgctgagagtggaaggaagcagatcatcctggacgcatttgctgatgggagcagcttcatttgcttgaaatgtggggggctctttagcacatctcgcaaggatgagcacttagcctactggtgcgggactgcatga

SEQ ID NO: 30090 - DNA, 242 bp, Zea mays
  Peptide Sequence Number=SeqID_71869
atgacaaaagaagctggccaaggatctggatcatcagagcgcatcggaggcatgctcgtcctgcgccaagttctgatgagcgagaactcgagggccactcctctggaactggaaaatgtcatctcagaactcgtcaaggctctcgcggacatactgtacagctcacctgattccggcacggaagagattgtgcaggcgatggtcaatgcatcagcctcagttggctcaccatcagagagaag

SEQ ID NO: 30091 - DNA, 600 bp, Zea mays
  Peptide Sequence Number=SeqID_71870
gcatccgaacccagcaacgactgggtcggcgtcttctctccctcgggttccagcgaacacggaggaggactgggggccgggaacggagcagtacaagttcatcgatcgaagcagccctggctcgtcttcctcgcgcaccgtgttctcggctactcgtcgggtggctggtacgagacaatgatgggctcgtacggggagccgatgggccgggacgggcttcaagacctctggcagaggtacgatatagcggtcttcggccacatccacggatacgagcgcacgtgccccgtctaccaggcaaaggcaagactgagcttgcatctctgcatcaggcgagatgaacttgtgagacagtgtgccgtactggagcttcttcagggacgccgacacttgatgttcggcaagctcacggccatcaacagctcgttcctcttgtttgagtacaagaagagccgcgacggccatgtgtatgaccgtttcagtctcgcacgactaccgtcacctggtggcctgctccgtcgacagttgcccccgaagcaccttggccgtctgatcgagctccggactctggagacatgtgttgatagatacactgtttga

SEQ ID NO: 30092 - DNA, 1881 bp, Zea mays
  Peptide Sequence Number=SeqID_71871
atggataaacagaggaacaccaagaatggggaagtggggaacaatgtgttttgcagaatgattcttgatcatattgctggggacttatgtctcaatgaggagaacgtgccttgcaatactccaagaaactccgttcactccgcgtttggtggcaggacagttgcttctactagcggcagcttcaatactgattcggtgagcccaggcgagtatgtcagggatcctggatccctactgagtttacaaccgtggatttttagaagaaacggctcacagaactacagggaaagtgtgcgcgcgagtggtaaaggcaagaatctggtcgatgtccttggagagggtcaagctgtcgaaatctctccaaggagcccttgtcttggttctgggcctggaagaggctgtggagctcttaggagcagaagatctcgtaggaatttgatgaagccacttgtgccaatggaaaactcctacgttccacagctttacagtgagaacttcgaaatggaagaatgcacgtttgctccagctccctccccagcttctactaggccattcgttgtgacagacggtacaaggataattagtaaatcacgctatgagccagtacctctgccctttaatattagattagacgaggaatgtagaggcacctcattgatgccaggaagtatgattggaattgctcctctacctgagctgaagaaactcaaacatgaggccagagatttacacgatgcaaggcttggtctgtctggttctcagcgaagtagcaaatcgcatgaacaagcaggtctacgtgatcgactcctactattctctactggggtgagcatcggtattctgtcaaataagaaggaatttgatacattgaagggcacactgaaacaaatggagaacttagttcaggatttacaagatgagctggagatgaaagagggtttaactgtgaaagaattacttaatgaaacatctatcgaacatgatgatgataatagcaaactacacggagttgatccagagccaatgagcaaaattgaggctgagcttgaagctgagctagcaaggctggaactgaatatcacttcgataagtttagaagaagaaacatctgaaatcaatggggccgacgatgattccattggtgacattgtttgcggggaactgaaagctgatacggtccctcgcgacctcacagagtacagcagtgaatctgaccatcgcagggacagcagggaaagctccccaggttacacatgtggagccaactgtcctgtctcgccaagagatctcagcatccgtcttcacaaggtgatccaacacaggctcgaagaccgaatcaaggagctcgagtcagcaatcgtgcacggacagaagcagacgcaactgcagatgatggtgactgaccaaatggtctccgaccgaatacgctcgaacagcgagtcaggttcttcttcaggccagggaagtcccattttcatacaagaaaccagctcgctggcagaaccgtaccgtctaaacctatctggagacgcgctcgaagcttacgatgaagcttacgaagagttcatgaggatcgcggactccccttacaccacaagtccaaacgggaagccacaggcaaccgaagattgcttggcagaccgtggtctagtctggggaatggaggacagctctaggaagctgagagaagtgcccacctgggagagagctctaaggagtgcagatcctagcagagatcacgagcgcgatagggatgagtcaggtggcgacgacgacgatgacgactgtgaagtgctgatccggcagatcgtagagagaactagacaaggttcacatgtactcgttaacgcccagaaacttctgttttctgtggaccaatag

SEQ ID NO: 30093 - DNA, 3236 bp, Zea mays
  Peptide Sequence Number=SeqID_71872
atgaaagcggacggcacagagtggtggattacagtggtctacgggccccaatccgatgcagacaagctcctgttccttcaggaattgagggcccttgcctcccagggacacgagaggtggctggtccttggggattttaatctcatttaccaggcttcagacaagaacaatctaaacctaaacaggcgcctcatgggttcattcaaatccaccatagatgacatccaccttaaggaacttcgtctgaatggccgccaattcacctggagcaatgggcaggctgaaccgaccatgacaagaattgacagattcttctgcacgcccgattgggagcttctcttcccaacctgctacatccactccctaccctccctcatgtcggaccacacccctctgctcttgcaaggagagataatgcgcaaaacaaacagttccttccgcttcgagaacttctggacacgcattgacggattcaaagaagcggtatattcggcctggaataagccgttaccctctgtccagcaaccactcttgcgcctgcacatcaaactggctcgaacggccaaggccatcaaagcttggaggagagtgaaagtaggagacacgaaacttcagctggccatagtcaaggaagtgattcttcgcttagaaactgctcaggaagcgcgcactctatctcttgtcgaactgaacctcctcagaagattgaaagttaaatccttggggctagcactcgttgagaaatcacgaatcagacaaaggtcccgcttgaccgccgtccgccttggggacgccaactcaagatttttccatctcagggcttgctctagggcaaggaagaacttcatccaagccttgcaaactgagactggcttggtcgtcacacaggaaggaaaggagaaggtcatcactgaccacttcatgcagcatttgggcacaacggcccctagaacaaggacgttcgactggaattcgctaggctaccaccacatggatctttcctccctggaagctcctttctcccaggaagaaattaaagagactatcctctcaatgcctcgcgacaaggcgccaggcccggacgggttcacaggtaccttctacagggcgtgctgggacatcattaaggacgatttaacagcagcgtttaaccagctccacaatttaaatgggcaaggattcaaacttctgaatgcaggcaatattgttctcatccccaaaaaaaaggatgctttgcgggtgagcgacttccgccccatcagcctcatacacagtgttgccaaaattttctcaaaattattggccaacaggcttgcgccccacctagacgatcttgtttcaaagtgtcaaagtgccttcattcggaagagatgcatccaggataacttcttatacgtgcaaaatattgtcaggcaattccaaaagaacaaaacacaagcactattcctaaagctagacatccagaaagcgttcgacacgataaattggagctaccttttagaatatctacaagctcgcggatttggtcaccgttggcgcgaatggattaccatcctttttagcacggcgagttccagagccctgataaatggtgttcaaggagaaagcttcgaccacaggcgtggggtgagacaaggggaccccctctctcccatgctgttcatccttgcctttgacccactgcaaaggattttagaccttgcttcagagcatggtgtcctgacacctctccctcttgctgcagctaagctcagaacctccctctatgctgatgacgcggctatcttcatcaatccaacccgtaatgacctgcaagcggtcaaacagatcctcaatgcgttcggagctgcaacgggtctaacaacaaattttgagaaaagctccatccaccccatccgttgtgaaaatgtagatttgtccaacatcctccagccgttcccgggatgctgcaaaaccttcccttgccaatacctcggccttcaactccacacccgcccactacaaaaaattcatgtccaaccactagtggagaagatcggacagcgtcttgccggatggaaaggtccactgcttaaccgcgcaggacgcctcacccttgtatcttcagtgctctcctccatgccgatctaccacctaaccatattcccccttgcgaaatgggccacaaagcaaattgataagattcgacgctctttcctatggaaaggcgaggataacgcgcacggggggcactgccttgttaattggaaaatggtggctagaccaaaggacctaggaggtctaggggtgctagatcttgagaaattcagtcgtgccctccggctccgttggctttggcaagaatggacagacagctcaaaaccttgggaggggctccaggtcccttgcaacaagcttgatcgcctgctgtttcaggcatccaccacggtggtgattgggaatggcatcaaagcgaagttctggcaccatggctggctggatggggaggctccacgcaacctggcacctcacctctacaagctgatcagaaggaagaataaatctgtggcccaagaactgactaacagtgcttggattcagtctctgagaaggaaatcacaaccaccacgcaacttgaggaatttgtctgcctctggactaggatccgtcaccaacatctccagcattagcgagtggtgggagaagacggagactctctttccgcaggatcgcaaaagggagttcaatggcctggtcatctacactatgtggaacctttggaaggagcgcaaccgaagaatctttgagcattgctcgctgccaccgctccagatcgcagagagagtaagagagggggctatcgcgcgcgggccacggcgcggcgccggcggcgggggtcatgcgggcggcggcgtccgcgttcttcgcggggtaccactgcttcacctccgtggcggcgctgctgggcgctgccgttctcggcggcggtgctgggtggccgaggcggcggcggcggcgccagcgccggcgccggtggcgctgcgcgcgctagcggcgcggctgcgcgccgtgttcgccgccgcggggttcccgccctcgcccttcttcgcgctgctagaggccaagctgtcgcagaccgtcttcacgttcgccgccgcgctgccgttcgcgctcaccttcctgctgctcgccaaggcctgcgtcgccgccatgttccgggatgacgccgcgtcgccgaggcggcaccggcggcgcag

SEQ ID NO: 30094 - DNA, 684 bp, Zea mays
  Peptide Sequence Number=SeqID_71873
atggagacaaaagcaattttctgcaacctgcaaaatgaaggggcaagcagctgggtgggaagtcctcttttagtgatccggtccgcatttcaagaacggttctttactgcaagccaaatggagagcttgcagcaaagaggagcccaggacttccaaattcgtttccatggagcaaagcggatggaactaaggaaaaaggctgcagcacgtgtaatccgcatcggttcaagaacagatttcatgcttggtgatattttgcatcctgcgataaattgggctgataaagagtctcatctggatcctgatgaaatggccaagatgaagtctgcttttattggtaacctgccagaagatgttaatgaggagtacttgagaaagctttttggacagttcggtgaggtagtacgggttgctatctcaagaaaaggacaatgtccagttgcttttgttcacttcgccaaacgttcagagcttgagaatgctatagaagaaatggatggtaaaacggtgtcagttgctcgacctacggcagacaacgacaagaagcgatctcgtgaagaagtgagaactagaagatcaaatgcatcaggagataggcgagattattctcatggaagatatggacacgattcacttgatcgtcaagtgaaagctccaagattatctaattatgtggtcttatga

SEQ ID NO: 30095 - DNA, 636 bp, Zea mays
  Peptide Sequence Number=SeqID_71874
atggcgacgaggcagggtgcagttgacggcgacgcagatccggatccgcagactgttgagcagcctggcgcagcactgctgggaacagcagcctggcgcagcactgctgggaactgcgccctggcgcagcaggcacggcggacagcagcggacagcagtggacagcactgctgggaactgcgccctggcgcagcaggcacggcgaccaggggcggacagcagtggacagcggcggccaggaagggtagatccgcgacggcggatgggcagcagccaggatccgcgaggatggccgcggaactggacgagatccgcgacggcggatgggcagcggcgcagatctggacgagggcggcgcagacgagctcgcagtccagcgaacgggcggcggccggatctgggcagcggcggccggatctgggcagcggcggcgcggatctgggcagcggcggcggccggatctgggtggcggcggcggccggatctggacggcggcggcggccggatctgggcagcggcggccggatctgggcggcggcgggcgggatccgcgcagatgaggccgcaggcggtagggccgcgacggcggccggaaggagagatggtggctggaaaaaaaattctaagaaaccctaa

SEQ ID NO: 30096 - DNA, 201 bp, Zea mays
  Peptide Sequence Number=SeqID_71875
atggcgtcgccgcggggcgggttcgatgagcaagatcgccggacggagaagggcaccgaggtgttcgtcggcgggctgccgcggtcggccacggaaagcacgctccgagagggatatggttttgtgcggtttgcaaagagggattatgctaatactgccaaaaggcaaaagaatggtattgagttccacatctatatgtag

SEQ ID NO: 30097 - DNA, 99 bp, Zea mays
  Peptide Sequence Number=SeqID_71876
atggcggtgccgtctcgggctgccaccatcgcggcggcgtctcgagctgctgctgggttgctaaccaatgaagggcgcttcaacaccgtggagctgtag

SEQ ID NO: 30098 - DNA, 1158 bp, Zea mays
  Peptide Sequence Number=SeqID_71877
atgcccaattgcaaactcaatgaggtacaccaaagctctgaatcagagaaagataagcaacttgtaccagataacgcagcaacaaccaatatgtcagatgtacaacgtgaaaattctcatgtacagaacaatcagaagtacgaaattatcaatgtgccttctgattctaggccacttctagttttcattaacaagagaagtggggcacagagtggtgattcactgagacagcgtctgcaaattcttcttaatcctgtgcaggttttcgagttgagcaaacagcaaggtccagatgttggtttagctttatttcggaaggtaacccatttcagagttcttgtatgtggtggagatggcactgctggttgggttttggatgccattgagaaacagaagtttgaaaccccgcctcctgtagccatccttccagctggtactggtaatgatcttgcgagggttttatgttggggtggtggccttggtgttattgagaagcggggaggtctattctcagttttgcaagatgtagagcatgctgcagtcactgttcttgacagatggaagatcacaataaaggacaaccaagggaaacttatgagaccaccaaaatttatgaacaactactttggggttggctgtgatgcaaaggttgccttagatatacacaacctgagggaagagaaccctgaacggttttatagccaggactccgaaggtatccttgttgccaatatcaggagttacatgggaggggttgacctttggaagaacgaggatgatgtctctgacacttacctccctcagtccatgcatgacaagaagctggaagttgttagcttcacaggaatgctgcatctcgggaaactgcaggttgggctttctcgtgcaaaaagattagcccaaggccatcatataaaggttgaagtcagtactacaatgccgatccaagttgatggagagccatggtcccaggagccgggaaccatagaggtttctcatcatagccaggccttcatgcttaagagagtctccgaagaaccgctgggtcatgccgcttcggtaatggccgacatcttggaaaacgctgagagcagtggcattatctcagccttgcagaagaggactttgctccaggagatagcgtctaggcttttgtag

SEQ ID NO: 30099 - DNA, 561 bp, Zea mays
  Peptide Sequence Number=SeqID_71878
atggcgctctccgaatatccagcaggatcaaccatgcacggggccaacggcggcagagggcatacaacggcatggagctgcagcaggaaggtgacacgggtgacaacaacacagcagccgttccgtctcaggaccgagcaaagaggaaaagccaaggaagggagtttcgtcgagaggttgaggaagatgcagcaagaggaggagaggctgcgcaacccactcgcgcaaggtttaccctacagcactgatgaaccagagatccccatgaaacctccaacgaaggaacccaccgaaccgatcgaccatgtgctgcacagcgaagtgcgtgtggccagacgcgccaagttcgacagccaagcggatgaggagattgagatcaagtacatgaggaagcagcaggttccaagagcacatccgatgccggacttctccaagccatttgtgccgaaaaggtcagtgaagcttcctacaatcggcagggagccaagatttcaccccaggttgatgaggcgcatctcgacggccgaatgctctttgaaaatgctggccagtagaaagtag

SEQ ID NO: 30100 - DNA, 3081 bp, Zea mays
  Peptide Sequence Number=SeqID_71879
atgcccggcataccgagggatgtcgccgagcactcgctggatattcgggccggagcccgacccgtcaggcagtctctgcgccgattcgacgaggagaagcgcagagtgattggcgaagagatccacaagctaatggcagcagggttcatcaaagaggtattccatcccgaatggcttgccaaccctgtgcttgtgaggaagaaagggggaaatggcggatggtatcaccagatccggatgaaagagtccgaccagctcgcgacttctttcatcacgccgttcggcatgtactgctatgtcaccatgccgttcggtttgaggaatgcgggcgcgacgtaccagcggtgcatgaaccatgtgttcggtgaacacatcggtcgcacagtcgaggcctacgtcgatgacatcgtagtcaagacaaggaaggcttccgacctcctctccgaccttgaagtgtcattccgatgtctcaaggcgaaaggagtcaggctcaatcctgagaagtgtgtcttcggggtgccccgaggcatgctcctagggttcatcgtctccgagcgaggcattgaagccgacccggagaagatcgcggccatcaccagcatggggcccatcaaggacttaaaaggtgtacagagggtcatgggatgcctcgcggccctgagccgcttcatctcgcgcctcggcgaaagaggtctgcctctgtaccgcctcttaaggaaggtcgagtgtttcgcttggacccctgaggccgaggaagccctcggcaacctgaaggcgctccttacgaaggcgcctgtcttggtacccccggcggatggagaagccctcttggtctacgtcgccgcgaccactcaggtggttagcgccgcgattgtggtcgagaggcaagaggaagggcatgcattgcccgttcagaggccggtctacttcgtcagcgaagtgctgtccgggaccaagatccgctacccacaagttcaaaagctgctatatgctgtgatcctgacaaggcggaagctgcgacactacttcgagtctcatccggtaactgtggtgtcatccttccccctgggggagatcatccagtgccgagaggcctcgggcaggatcgcaaagtgggcggtggaaatcatgggcgaaacgatctcgttcgccccttggaaggccatcaagtcccaggtgttggcggacttcgtggccgaatgggttgacacccagttgccgacggctccgatccaaccggagctctggaccatgtttttcgacgggtcgctgatgaagacaggagccggcgcgggcctgctcttcatctcgccccttggaaagcacctgcgctacgtgctgcgcctccatttcccggcgtccaacaatgtggccgagtacgaagctctggtcaacgggttgcggatcgccatcgagctaggggtcagacgcctcgacgcccgcggcgattcgcagctcgtcatcgaccaagtcatgaagaactcccactgccgcgacccgaagatggaggcctactgcgacgaggttcggcgcctagaagacaagttcttcgggctcgagctcaaccacatcgctcggcgctacaacgaaaccgcagacgagctggctaaaatagcctcggggcgaacgacggtccccccggacgtcttctcccgagatctgcatcaaccctctgtcaagatcgacgacgcgcccgagcccgaggtaccctcggctcagcccgaggtacccacggctcagcccgaggcaccctcggcacagcccgaggtacccttggcccccgagggcgaggcactggacgtcgaggaagagcagagcggggccacgccagatcgagattggcaggccccgtacctgcaatatctccgtcgaggagagctaccccccgaccaagtcgaggctcggcgggtagcgcgacgcgccaagtcgttcgtcctgctgggcgatgaagaggagctctaccattgcagcccctcgggcatcctccagcgatgcatctccatcgccgaaggtcgggaactgctgcaagaagtacactcgggggcttgcggccatcacgcagcgccccgagcccttgtcgggaatgctttccgacaaggcttctactggccaacggcggtggctgacgccactagaattgtccgcacctgcgaagggtgccaattctatgcgaagcagacccacctgcctgctcaggctctgcagacgatacccatcacctggcccttcgctgtatggggtctggacctcgtcggtcccttgcagaaggcgcccgggggctacacgcacctgctggtcgccatcgacaaattctccaagtggatcgaggtccgacctctgaacagcatcaggtccgagcaggcggtggcgttcttcaccaacatcatccatcgcttcggggtcccgaactccatcatcaccgacaacggcacccagttcaccggcaaaaaattcttggatttttgcgaggatcaccatatccgggtggactgggccgccgtggctcatcccatgtcgaatgggcaagtagagcgtgccaacggcatgattctacaagggctcaagcctcggatctacaatgacctcaacaagttcggcaagcggtggatgaaggaactcccctcggtggtctggagcctaaggacgacgccgagtcgtgccacgggtttcacgtcgtttttcctggtctacggggctgaagctatcttgcccactgacctgaaatacggctccccgaggacgagggcctacaccgatcaaagcaaccaagctagccgagaagaatcgctggaccagctggaggaggctcgggacagggccttactacactcggcgcggtaccagcagtccctgcgacgctaccacgcccgaggggtccggtcccgagacctccaggtgggcgatctggtgcttcggctgcggcaaggcgcccgagggaggcacaagctcatgcccccctgggaagggccattcgtcatcgccaaagttctgaagcctggaacatacaagctggccaacaatcaaggcgagatctacggcaacgcctggaacatcaaacagctacgtcgcttctacccttaa

SEQ ID NO: 30101 - DNA, 198 bp, Zea mays
  Peptide Sequence Number=SeqID_71880
atggcgcaccggacagtccggtgcgccaccggtgcgccaacggtgcgccaacgattgcataaaagcccttggtcttctattccttcgtgcgacgaggtcctcgacggtgctccgcacgggaggcataactccggcgagctagaccggccggagaagaccaagaccggtgctcagcttcggactaaaccaaatccatga

SEQ ID NO: 30102 - DNA, 492 bp, Zea mays
  Peptide Sequence Number=SeqID_71881
atgacactttggctagggaacagtgcgtacctctacatatctgtcgcatttgcacagatgttgaaggcaataacatttggcctggaagaaatgagctataaaatgctttctatcatgtctgtcatcagtgttggagttattgtggcttctgttggtgaaattacaatcagttgggttggagtggtttaccagatgggtggagttgttgcggaagccctaagacttatcttcattgagatatttctgaagaaaaagggtgtcaagctcaacttgatatccatgatgtactatgttagcccttgcagtgctgtatgcctctttattccctggctgttcttagagaagccaaagatggatgatagtatttcatggaacttcccaccattcacattgttcttaaactgcctcatgtctattggtctgtttgacttaaaatccagcatctctgcagccatagctggtgttgttgcgtataacaaccacaagctcaag

SEQ ID NO: 30103 - DNA, 1128 bp, Zea mays
  Peptide Sequence Number=SeqID_71882
atgcgcgcagcctggtgggacctggtggggctcgggctcggtggcatggtgggcgccggcgtgttcgtgaccacgggccgcgccgcccgcctctacgcgaggcccggcctcgtcgtgtcctacgccattgccggcctctgcgcgctgctctccgccttctgctacaccgagttcgccgtcgacatgcccgtagccggcggcgcctccagctacctcctcgtcaccttcggaaggagtactgcacaagatagatcccaatgccccagaagcatgtccttcatccctgagcgtatccgtgttatgggaagatctccagcattcactgcattggcagctacttttgaaagttcaagcaacagaaatcttttgactccacgtgtagttaagaaactttacctgagatatgttacacctgattcatcgaatacttccaagtcatctgtaattgccgctctggctggttctttggatcgcccttctcaaactcctgctccagcattcgtgaaagatggttctgagtcagagaagccaaaacagaagggagatggtaaaggtgttcatactgtggtcactcgagttgaatctctgactataaatgaagatgtaaaagaaaacaagccagaagatgaagacagccttccaatttacctgtatgaacgtctgaagaccacaactactgatcctgtcactgaaattgatgtcacgaggcaagaggtgatttcccgttctcacattactttcttgttccaaaaaaatgtaatggtcacattattttcaatttggcatgcaggggagttcgcggcgttcctgacgggggcgaacctgatcatggagtacgtcttctccaacgtcgccgtggcgcgtagcttcacggtgtacctcggcacggcggtgggcgtggacgtgcccagcaagtggaggatccccgtgccgggcctgccccaggggttcaaccaggtggacctcgtcgctgtcggtgtcatcctcctgctctccgtctgcatctgctataggttgaggttttgcctacaagtgtcattctacttgtcttttctctttgttctcagtcttgtctgttctccgcttgctgacacagaacttttggcctccgattttcaaatgttttag

SEQ ID NO: 30104 - DNA, 333 bp, Zea mays
  Peptide Sequence Number=SeqID_71883
atggggaaatcatttgggtttaaatatcacgggtcactgaaactgcattaccaggagcatggtcactggcatatggcctacagtccagcgttgcagtgcctgaaccaaataccatgcttcgtgctatctctcctgcttaagattcaaggattggttcccctcaaccttgagtatttactccaatcccaacaaggcatcagagcatctttgtacataaagatgggagtcatgttccagggagccaacaaggcagcaggagctgctcagccagttggtgttcaacaacatgtgctctttccaggaagcgaggaatggaccccacattcacaatag

SEQ ID NO: 30105 - DNA, 153 bp, Zea mays
  Peptide Sequence Number=SeqID_71884
atggcggagccagagctccggcgagtctgtttcgagcagcagaacgcggtagcatttaaattgagggtaggacgagtatcactagctcaccagaggtgtgagaacaacggcgagctccatgggaacatccacttaggcaagtgggtacggtga

SEQ ID NO: 30106 - DNA, 252 bp, Zea mays
  Peptide Sequence Number=SeqID_71885
atggtggcatcccctgtctatggtggcccctggtacggcataagtgagatgggaagcggttgtcgtgactttataatctcatatgccggtcccaagctgggagatcggatctggcgcgagaatcccgggcggattctggtcagcgcgggcgagctccgcgccttcagttgcggaacagaacggaggacagggacgctcctgacggacgaggcccacaacacggcgactgaggaaggcaggtgccttatttaa

SEQ ID NO: 30107 - DNA, 399 bp, Zea mays
  Peptide Sequence Number=SeqID_71886
atgatgtatgaaagaggctttcgtgaagcacatgagctcttccaaaaagaaagaagcgcagccgggcagggcctgtcccggcgcacggtgcgcctacccgcggccgcggcaacgccggggtcgcagccgcccggccacgtgccggcgtcgtcggacgtaccccacgacgagtactcgtggcgcaagtacgggcagaagcccatcaaggggtccccttacccgcgcggctactaccggtgcagcagcgccaagggttgccccgcgcggaagcacgtggagcgcgccgccgacgacccggccgtgctcgtcgtcacctacgagggcgaccaccgccacgacggcgacggcgacggcgacggcggcgttggcgctggcgctgcccgctcccgcgcggcgtga

SEQ ID NO: 30108 - DNA, 552 bp, Zea mays
  Peptide Sequence Number=SeqID_71887
atggcggtggcaggcgggcaggagcagcggtcacgtcgtcagccaagcctacgtcccatccaggggcgacgagagaaccctctctcacggcgtgaagacaacgcgcccgtgttccgttcctcgaacggctcgcgcacgcgcaatggccgcctcgcgaaccactcaccctgtcgcattaactccgcggcgggacaggcggcgcctctggcaggagaagcgggcgacgcttcgccttcgcccataatgactgcgtcaaaaaagggaccgggaaagggggataccccgaaaaggatccttccccgtgaaggaaccaggctccgagcctccctactgatcagaggttcgaaggctggccccttggaagggttcgacagccgcctcagatcacgtgggctctacacccactactggtcagaggttcgaaggccggcccctcggaagggttccacggccgccttaggctactcgggctccgcgcccactactgatcaggggttcgaaggctggcccccgaagggttcacagccgcctcagacacagagcgagggatga

SEQ ID NO: 30109 - DNA, 282 bp, Zea mays
  Peptide Sequence Number=SeqID_71888
atggtggcatcccctgtctatggtggcccctggtacggcataggtgagatgggaagcggttatcgcgactttataatcccatatgccagtcccaagctaggagatcggatctggcgcgagaatccctggcggattctggtcagcgcgggcgagctccgcgccttcagttgtggaacagaacgaaggacagggacgctcctgacggacgaggcccacagcacgacaactgaggaaggcagttttaaattccaaatccaaggatttaattcaagttttttatga

SEQ ID NO: 30110 - DNA, 582 bp, Zea mays
  Peptide Sequence Number=SeqID_71889
gcattgatgttctaccccaagggcttagtgtgcaaggaggagagtcaatacaagatgcaggcactcaactccatgactcgacgagaatgtcaattatggccacaatcgttcttcacctcggtctcgaaggatgcaataattatcttgagggtgcgtactgtcatggaacctcccaaggtattaggcccacctacagatgtctttgtcccgaggacctcagacagtcatgcagagccggcgcgctataattcaccggactgtccggtgtacaccggacagtgtccggtgctccaagaggacgcggctctgaactcgccagtctcaggaatttgcatcgggtgcttcgctataattcaccggacatgtccggtgtacaccggactgtccggtgtaacagcggcccaacggctacttcggcgccaacggctacctgcagacgcattaaatgcgcgccagcgcgcgcagaagtcaggcacgcccatgctggcgcaccggacactctacagtgcatgtccggtgcgccaccggacatccaggcgggcccagcgtcagagctccaacggtcggaaccctaacggccgg

SEQ ID NO: 30111 - DNA, 522 bp, Zea mays
  Peptide Sequence Number=SeqID_71890
atggagctctccctcccagccgagccctctccctttctcccactgccgagctcgctctcttctcgcgcccttcttcctggccgagaccttgccaccggagctcgcccacaccgcctcgccagaactcgtgctcgccagccggaccgtctgcgcccaccccggccacctcgaccgagctcccttccgctcctctgcctccgtgaccgaccaccaacaccgtcgtgccgagcgctcgtcgctgctctacgccctcgtcgggagccgtccgtcgtggccgtggtcgtcgttgcccgcgtcggagcttgcccgtgcaacaccccggcgaccgtgcccacaccattcgtcaatcgtccaccatccgtggagcctcactggaatttgcgccccaccgtccaaacgcatcgtcggagttacgccgttcgtcatcgacgtgatcgcgcagcacaacaactggaccatccgcgcccacgccgttcgtcgtcatccgttcacccaaggttgaagagaatcaaaaccatttga

SEQ ID NO: 30112 - DNA, 324 bp, Zea mays
  Peptide Sequence Number=SeqID_71891
atgtcgggagcatccgccaagagggagatcaggaccggcgacaagtccgcaagctcggggagaacgcactcaagggagtccgcccacaagcacaaggaggaatcctcttcatccatcaagtcccaacggaagggtgacaagaagaagaagatgaagaaggtggtctactatgagaccgactcttcatcaccctccacctccggctcggaatcagcatccgcaacttctaaacgccatgagcgcaagaagtatagtaagatgccccttcgctatcctccgaacatggacatccatccacaggaagatgaccgggggtatcactag

SEQ ID NO: 30113 - DNA, 351 bp, Zea mays
  Peptide Sequence Number=SeqID_71892
atggagaagttaaattttcaaatccaatgcggcggtactgaggcaccccgcgcgtggcccaacaaaaccatgaagtgcgaaggcgacagctatctctggccgcatgatgaacaacacccgagtccaccacatgagcggtcccaaggacgccacatgaccagaagaggtgatatactccaggatgccatcagtgcatccagacctccacgagagagcaccggacccctgtacactcaacccggacctccgagtatggtccaggactcccaagtgagcaagccagaccccttggatgaggcccggacccctctgagtgaggtccaggccacccacagcaaggtcccggggtag

SEQ ID NO: 30114 - DNA, 677 bp, Zea mays
  Peptide Sequence Number=SeqID_71893
atggatggcaagcagaaaggaagattgcgctgcgcctataaaggaacaaccagatataaccagaaacacttgcactgccttagggttcgtaattgctcggccacgaggatttacctccacaacgtcgttccgttgctgcgaaggatcgcctccctgcgcacaaactcacacagagcgacaccagttttagcaatccccagcctaaccaagcccgaagtcgggcagccgacaaatccgactctgactggttaccccgaggagtttgaggagcgggcacaggaacgacataacgctgccgctagtggtagaggtggtttcagttccggacgcccccgcgctgggagggcgcgctcggacgagggatcggacgcggcggcgattgggaaggtaagctcgactcggagcgggagggaggtggagatggctgcagccggcggagtgtgcgagcggcagcatggcagccagcgctggtttgagggcgccctggagctgggagtcggcgtgagcgtgaccactggcacccggcgtgtggcggccgtcgcgggaggcggacgggcagttcggctggctctgtggaccaggccactgagtcgtcgtggccccctctcggaccagcgcaatgggctttttggtcgcaaactcgcaaagaattggcggcccaggatacccgactgcgg

SEQ ID NO: 30115 - DNA, 1311 bp, Zea mays
  Peptide Sequence Number=SeqID_71894
atgaccgagcttgacctttctgcagaggtgctcaaccttgtcttacattgttccttcatttctgcattcgaagcaaccatgaaaccattttacctgtaccggctctacttgcattccagtttatccttgtccaaaagggtcgctaaggcacagggacatagtcaagaaaattggagggaaggagcatgtctgtacggcaggtttccactccttgttgacgccagtactggtatctcaatgtatgaaagtggagatattgtgaagtacctgttcaggaactatggacaaggaaggagtccttcacctggtctccttgagagtacgattttcacaggatgggtgcccactcttctcagagctggaagagggatgacactgtgggacaaagccggtgctgtacctgcagagaagctggagctcttctcgtacgagaataatccctgtgcaaggatagttcgagaggctctctgtgaactggagcttccttatgttctccagaacgtcggagagggatcgtcgaggacggatttgcttctaaggaagtcgggctctaagcaggtgccatatctgatcgaccctaacactggattccagtcgggcgaccataagaagatactaccttacttattccagcagtacccatctcaccctgtccctcgcaaaagcatctccatccttcgctcctctcttcccgcactgttctcggaatcgctcttctcctccgcgctgttcttggaatcgaaaggtgggaagcgcaatgagcaacgagttgacgactcctacgtggacagctacatcagcacgatcggcgtcgactttaaaatccgcacggtcgaggtggagggcaagaccgtaaagctgcagatttgggacacagcagggcaggagcggttcaggaccatcacgagcagctactacagaggagctcacgggataattattgtttatgacatcacggacatggagagcttcaacaacgtgaagcagtggcttgacgagatcgaccgatacgccaacgacagcgtgcgcaagcttcttgttggtaacaaatgtgatctggccgagaacagggctgtcgatacttcagtagcacaggcttacgctgaagaggtaggcatcccgttcctcgaaacgagcgctaaggagtcgatcaacgtcgaggaggcgttcttggcaatgtctgctgcaattaagaaaagtaaagcagggagtcaggcagccctggagaggaagccctccaatgtagttcagatgaaagggcggccgatccagcaagagcagcagaagagtagtagatgctgttcaacatga

SEQ ID NO: 30116 - DNA, 450 bp, Zea mays
  Peptide Sequence Number=SeqID_71895
atggaacggaatccggccggaattcacgccgcggcgaggatttcgcgcgtggtttcggttgagaggagaacgccgacaagcgggtcccacacagcaggcgcgcctatgagaacgggctgcgcgggtgcaagctggtttgggcgggctgaagggtttcagcccaaacgcgcagagttttggaacatggaaggtttgatcgagaggtacaggagaacctgttcagaaatgcatggtgaaagtagcaaccacaacaaaactcagacaatacaacaagaggtgttagcgttaacgcatgaaatggatttgcttcaaaagggaggacccatgacagatctaagaacatccatgcagatgcagatcatctctagggagatcgagatgctcaggaacaagataattgagcagaacgagattctgaatttgagcaacatggcgatgacaccggtttag

SEQ ID NO: 30117 - DNA, 615 bp, Zea mays
  Peptide Sequence Number=SeqID_71896
atgtggcggaggcgagtgggcgccctcctccgatctccacgaacttcttcctcggcctcctcggcctgccagagccgccgccaccatcttctccccagcgaggaacctcttgctctcaaccgtcttgccaggctcttcacgtcccaggctggaagtgatggtggcgatacccagaagccctttattgcttttgtcttaggtggtcctgggagtggcaaaggaacacagtgcactaagattgcttcggattttggatttgcccatctgagcgctggtgatattctccgacatgaaatagcatctggcagtgagaaaggggagttgatcctagaaatcataaaggaagggaggattgttccgtctgagataactgtggaactcatcagaaaagcgatggaaatgaacaatgctaaaagggttcttattgatggcttcccaaggtgtgaggaaaacagaatcgccttcgaaaggattgttggaacagaaccagacattgtgattttctttgactgtcctgaggatgagatggttaaacgccttctaggccgtaaccaggtttggttccagactgatatttgctcaaaggacgtaggagtttcctacagtgtagtgtaa

SEQ ID NO: 30118 - DNA, 1224 bp, Zea mays
  Peptide Sequence Number=SeqID_71897
atgggcagcaggagggctttgcagcttggggcagccgtgttagtcatcttctccttctttggtaaaatcggagctctcctagcatctatacctcttgccttggccgcctctgttctgtgcttcacctgggcgctaattgtcgcgcttggtatgtccatattgcgatacacccaagcagcaagctccaggaacatgataatagttggatttaccctgttcatctccttgtcgatacccgcatactttcagcagtatgaacccagctccaacctaatcttgcccagctatcttctttcatatgctgcagcgtcaagtggaccagttcgcacagccagcagcgggctgaactatgcagtgaacgcgctcctatccatcgacgttgtggtggctctccttgtcgcgttgatccttgacaacacagtgccaggcagtagacatttggacagatcccaaatccctcgaggtggatcctgcgacattggaaccctaccgattgccggagaaagtttcatgctggttcaggcccattcgccgtcgaggcaagatcgagatggcgggacctcgctgccacgtgtccccaatagcatcacgcaagaagtggttcctgacgttgacaccccaccgttgcggttgttcgagggctcacccgtggaccctgacgttcccctttggggcgactggtacgtgctgtcagacaatgactctgatgattttcctgtggacgacgagggtggcgaggagcagcatgacagcgaggtagaggagcagcagctgcagggtggcggggaaggtcacgtcaagggaccagaagagaggatgggcatcatggccaccatctcaaatgctctcagagcactgctttctgctttgtctgcaaaaagttctgaacatatcaactatgaagacattaatgcttgtgagatggatctagcttctaccatgcagccacccaatatttgttaccatgtcgatgctattgttgtagaggtccaagcgcttattggcatgctgcccactaaagaattgtgggctcataactgtaacaattttgtggactttggtggcactgaagaccgtgtacaagctatccttcagcaaacgatggatcttgacaatgagcaggttttgtaccccgaagatgttgagcctccagaggttttgcccactcttcctggaccagcacctttgcctctcccatcaccaaacagcttgtcgtgttattga

SEQ ID NO: 30119 - DNA, 222 bp, Zea mays
  Peptide Sequence Number=SeqID_71898
atggaggcggcctaccgctggcacaagaaggctaggctgctcatcgcacgtggtgccatccacaccgtcgcatccgtgtacatctccgccgacaacctgctctggaacctctacctctccttcgcggcgatctggatcggaggcgatgactccgatggtttgcctatagacaagggtggcgaggagccgcagggccgcgaggtggaggagcagcaacaatag

SEQ ID NO: 30120 - DNA, 327 bp, Zea mays
  Peptide Sequence Number=SeqID_71899
atggcagcatcgggtcttcgcctgagcggggagcaggagtgtatgcggataagtccggagcacaccagagtaggtctggacatgtgtcagctccggacccccgcctgggccttaagcgcagctacgccagcagcggtggcagccgaggcaagttcgcatccgctttcagtaacggcgcaaaatttcgaccacgggtctagcgaggtccctgtgtcgcccttcgctgcacccattaggccggcgagcatagtagacggtaccaccgccagctgcctagcctccgccctacatcaaaaccaagttagaaaaatggaatcacccggctaa

SEQ ID NO: 30121 - DNA, 539 bp, Zea mays
  Peptide Sequence Number=SeqID_71900
atggcgcctcccaagctctatgacggcggcggctctcagctctcttacggaagcagccacgacatcacaccagcagggtgccaagatctctccggctgccacattggcatggccttcttagagagggttggccgcgcgggaccgaggacgggacaggcgctctcttggggccgctcgcttccctcacccacgtggacgcttgtaacccccctactgcaagcgcacccgacctgggcgcgggacgaacacgaaggccgcgggacttccacctctctcacgcccgtctccggccacctcgcctctccccccttcgcgctcgcccacgcgctcgacccatctgggctggggcacgcagcacactcactcgtcggcttagggaccccccggtctcgaaacgccgacacttttgaaggcaacgacatgccaagtcgtgatacttcgtcctgggagattttcaactcatctctatggcgctcgagctatgacatagtaaagcggtggatcctctccaaggtggtgagagagacgctggcatcgcg

SEQ ID NO: 30122 - DNA, 261 bp, Zea mays
  Peptide Sequence Number=SeqID_71901
gggagagttgatgataacattgagacaatcaagaagcgtctaaaagtgtttgaaagtttgaacattcctgtcgttgactactactcttcaaggggaaaagttcacaagataaatgccacgggcactgcagatgaaatatttgaagcagtccgtaggctgttttcttccttaagtttattctctctagcaccaaacgtctatgcatattggaaattatggtgtatgatagcaagttggaaagtgatagttgttagaatatga

SEQ ID NO: 30123 - DNA, 348 bp, Zea mays
  Peptide Sequence Number=SeqID_71902
atgacgctgatggacgacgtcgatgtcgggaagccgcggctaccgtggacggcggcgggtgacggtgttgggcgacggcgttcggcggcggtcgtcgggcgcccgggcgggggcggcggccgtgggcgtgggggcggcgggcagcacggcggcgcgtggagcgggcgcaccagcggcgtgcgggcgtcggtccgaggccgaggtcggacgaggcagagacttctcctgaggccgaagctgaggtcgggcgaggttgtgactcctcccgaggccgaggctgaggccgaggcccgaggtcgggtgaggcggagaccttctcccgaggccgaggctgaggctgaggcctag

SEQ ID NO: 30124 - DNA, 195 bp, Zea mays
  Peptide Sequence Number=SeqID_71903
atgcggcctgagactgggtctcccatgctagctatggtgggtacaagtgcggtcactgcacggcgacagccggggtcagtggagcattgtaccattcaggaaatggttgatggtgtgacttggcctaccaccctgccaccgggttggacggtcgagtgggatgttgctccggcaggagaggatcacgaggagtag

SEQ ID NO: 30125 - DNA, 975 bp, Zea mays
  Peptide Sequence Number=SeqID_71904
atggttgtgcatcatgaaagctgcttaacgaacggccacctagagacgacgatcatcgactggatccccggcatgccgccgatcagcctcggcgacatttccagcttcgtccgcactaccgacgcggacgatttcggtctatggttcaacatcaccgaggccaacaactgcacaaaggccggcgccctagtcctcaacacgtacgatgcccttgaggcagacgtcctcgccgccctccgcgctgagtacccgtgcatctacaccgtcgggccgctgggctcccttctccgccggcaccacgacaacgaagacgcagacgccgtcggcggctcgcttgacctgagcctgtggaagcatgacaccgagtgtctgtcctggctggacgcgcaggagccgggctccgtcgtgtacgccaacttcggtagcctcaccgtggtcacggccgcgcagctcgcggagttctcttggggcctcgctgcaacaggccgcccgttcctctggatcgtccgggaggacctcgtcgtcggcaggccggcggctgcgctgcctctggggttcgcggcggagacggcggcgcgaggccgcctggccgcgtggtgcccgcaggagcgggtgctgcggcaccgcgccgtggggtgcttcctgacgcacaacgggtggaactcgacgtgcgagtgcctcgccgctggcgtgccgatggtgtgctggccggtgttcgcggaccagctcaccaactgcaagtacgcgtgcgaggtgtggggcgtggggcgccgcctggacgccgaggtaaggagggagcaggtcgctgcgcatgtcgatgaggtgatggagagtgttgaggtccggaggaacgcgacgaggtggaaggcgatggcgaaggaagctgctggcgtcggtggatcgtcgcacgagaacctgctgggcctggtggaagcgctccgggtcagctcgctcaactcagagtccgagacatga

SEQ ID NO: 30126 - DNA, 1209 bp, Zea mays
  Peptide Sequence Number=SeqID_71905
atggatcgcttggcgcggccggcgagcccgggcggcggcgggctgggctacgcgtcgcggcggggcctctacgcgcaggcttcgtcgcatcacctggccggcggcagcgcgcagacgtcgcccggcggatccccgaaggagctgtccccagtccaccgccacgcgcgggcgggatccctcggcggcgctggggcggcctccaccgcaggccgccgcgcgggggtcgggcgccggggccggcgctcgcgcgcagaacagcgcccgctcgcgccgccgcgcagcgcctcgctcgggtcatgggcgggcgcgggcggggacgccggaagcgggagcgacgacgacgacgactacgagctatctggtccacccatcgagctctccaacaccccgcgccgcacctccacccgatccccttccccctcggtaggccgtcaccttgcggatcagacgcaggtgggccggccgccgtcgctgaccaaccgttacacggctgggaagtcggtccccatgatcccgtcgatcaagcggccggccaccagtgggccgggggctggagctggttcagagtcgcccatgccgaaccgaagggagcagaggagatcagttgatcttggaagttcattgagagctcgtcgtacatcttcttcacttaatgatgaggtaatttctttcatgaatattaacacacttcaagtggaaaatgaaagcatgtatgacaaattaaacatgttggaagcaatcaaccttgtttttatcttacctgcatcttcccagcttcagcttgcagaagaaaggtttgatgatggagatgccaaatccatgcacatggagagagaggattctgatgctggcgatgcagcagaaacagagccaattttgattaacaggaaagatgcagcgctagaacaaagaaagattgctatgagaattgcttcgcgaaggtccagcagtgcaagctgtaatgagattgcaacccttaagtcagaagcaaaggttactactaatgtggttacatctctatctcggagagtgaaaagtgctagatcagaattgagatctcttcaggcaacagctaacagaatgatcctgtcacaggaagagctggaggaggttgtgctaaagagatgttggctggcccgctactggacattatgttctaaacttggtatcaagatcacttttgcactgtttatactcctttactactag

SEQ ID NO: 30127 - DNA, 168 bp, Zea mays
  Peptide Sequence Number=SeqID_71906
atgtgggagcaccggtcatcgtgtatcctggccagtgcaagctcgccggagccattgctccaccgcccatggtcggggaccttaattcgcgaaagaatagaagaaaacaaagaagagatagaagttgaagaagcaaggactacaccaccaccacatgaagaaccctag

SEQ ID NO: 30128 - DNA, 285 bp, Zea mays
  Peptide Sequence Number=SeqID_71907
atggaggtggcagtggcagatctttgtcaacattccttcgtagccgtgttcatcgacgtcggcgtcgatgaagatgccatccgagcgtccagcgagcggtcgcggactccaggcgtccgggcagcagcggctgacgggctctaccgtctctgcgtgcgggcgagcagtggtcctgggactccgggtccggctctgcgtctggggcttcgggcgagcggcggtccgggtgagcggcggtgcagcgagcagcggcactgcgagaggcttgaccgcttgagtgcttga

SEQ ID NO: 30129 - DNA, 388 bp, Zea mays
  Peptide Sequence Number=SeqID_71908
gaagggggagggggaagaagaggccgaacaggagcaggtccggcgggacggcgaatggcgcagcgaagagagcagggtggccggggccggggcggcggcctttgtggcgggcgcgggcacgacggctggggtggacgcggacgcgtcggccggcgaggcggccggcatggccttggaggacttgggtggtgccttggccagcgcggtcgccggggactgggcgagggagttggtggcggagagcaggacgaggagtggcggttgtggagctgggaggctgcccccgggagcgaaggttgggcctcccgggggcagcgatggcaggcagcggctgggtggaagggagccgccggcggctgccgtgggaggagaggaggaaaaaccctaa

SEQ ID NO: 30130 - DNA, 2151 bp, Zea mays
  Peptide Sequence Number=SeqID_71909
atgaacctgtacggctgtgccaacccaagtcagaaggcgccggctgcgtccggggatctgaaccgcgggggagaagatctggacgccggtttcgcgtgggttcggtgggtgatccgcggagagggggaggaggagtggtggagtcccgcgctggccatgaggctgaaagcgaggcggaacaaacgaaccaaggaaaagaaaaacccacgcgcgagggcagggcgggcgttattggaagccacgctgcgtgctcgggagggagggagggatctccggaggcaggccgacgtggctggcaggatgcgtgggaggaccgaccagcttgggtggacgacgtgggcgctcgtctttttggtggggaccacaatgacagtgccagcacggcaacggataaagaaggagctgagcggccttgtcgctgctggtcaaggagaacaacctgaacgaccacagtgctacgcccacctcagcggcctcctcgcgcgctgcggccgcgctggggacctccgcctcggcacctcgctgcacgccatcgtcgccaagaaccccagccacttccgcctctgcccacgccgttcctgcctgcagcacgtggtcgtggtatggaactccctcgtcgccatgtacggccgctgcggctgccgcggggacgccgtcagggtgttcgacgaaatggccctccgggactccgtgtcctggaactcgctcctctccgcctccgcttcggccacggatgcgctcgcgctgctcaggcggatgctgagcgccgcgccaggcgccgccgcgtgcgaccacgccacgctgaccaccgtcctgtccgcgtgcgcgcgcgctggcgggggcacgggctccgcgtcgctccccgcggtacacgggctggcggcgtcgtgcgggctcgacgctgaggtgtccgtcgggaacgcgctgatcaccgcctacttcgagtgcagctccccgggctctgcggagcgtgtgttcgacggcatggcggacaggaacgtcatcacgtggacggcgatggtctccgggatggctcgggcagagcgatatagcgagagcctgtctctgttccggcagatgaggcgcgcggtggacgccaacagggcgtcgtactcgagttctttgctagcatgtgccggatcacgcgccgccagggaagggcagcagattcacgggcttgccgtcaaggctgggctggagactgatctccatgtcgagagtgagctcatggacatgtactccaaatgcgggttgatggaggatgcgctgagggtgttccgctccggccaggatcctgacgaagtttccttgacggtgattcttgctgggtttgctcagaacggactggaggaggaggcgttcaggttgttcgctgagatggtcgggaaaggaatccgcgtcgacgcaaacatggtttctgcagtcctgggtgccttcggtgcttcggcgccgtttgctcttgggaaacagatccacgcgctggccatcaagagatgcttcggagggaacacctacgtctgcaacggcctgatcaatatgtattccaaatgcggcgagctacaggagtctatccgagtgtttgacggaacgcccagcaagaacacggtcacgtggaattccatcatcgctgcccatgtcgggtcacccaggaagggactggagatactggactccatgccatcgaagtatggaatccatccgaaggtggagcactacgcatgcgtggttgacatgcttggccgagccagccagctggatgacgccaaggcgttcatagaagacggaccgttcaaggacagcgctcttctgtggcagtcgctgatgggagcttgcagcttccacaagaactcaggagttggtgaatgtgcggcagagaagttgctcctcctggaccctgactgcactgccgcttacgtcttgctctcgaacgtgtactcgtccgagggcagatgggacgacagggccaggatcatgaagaggatgagagctaggggcttgaggaaggacactggcaagagctggattgagctggaaaaggaggtccgttcttttgccgctgggccaacaaggtctcgccctgatgatgtgctggtgcagttgtccgcagttgccagtgatcaagaagatgtagtagagagcagtgctttgtga

SEQ ID NO: 30131 - DNA, 1407 bp, Zea mays
  Peptide Sequence Number=SeqID_71910
atgaggcatttggcggaggcggggcagtggattaaggttttggaagtctcgctggtgaagaatcagagctgtctcgagtggggtgtctcgtggcttggcaacgacgacgcgtcgcagtcttccttctcctgtgccgcaattggtgctattttctcggcaacagattctgtttgcaccttacaggtgcttaaccaggatgaaacacccctactctatagtctagtttttggtgaaggtgttgttaatgatgccacatctgttgtgctcttcaatgcaattgaaaaccttgatattgataattttgatgctattgttctgttgaatttcgtcggaaaatttctctacttgttcttcaccagcaccatacttggagtagctaccgggttgcttagtgcatacattatcaagaagctctgctttgccagacattcaactgatagagaagtttctatcatgatactcatggcatacctttcatacatgatatcaatgctgttggacctgagtggaattcttactgtcttcttctgtggaatagtaatgtcacattacacttggcataatgtgacagaaagttctagggttaccaccaagcatacttttgcaactttatcattcattgcagaaattttccttttcctctatgttgggatggatgcattggacattgagaagtggaaattagctagtagcagttgggctgatgttatgtcagtacaacaacagcaaagccttttagtcccaaacaagttgggtcctaagaaaccaattgctttaagtgcaattattttgggcttggttatggttggaagagcggcatttgtattccctttgtcgttcttatccaacctaagcaaaaaggaggcccgtccaaagatctccttcaagcaacaagtcagtgctagatctctcttctttttttttcattcttctgccattgtgtccctctggaaacctgaaagagctaagttgctgtttacagcatctggtcacactgaagtgcgagtcaatgctatcatgatcaccagcacagttattgttgttctattcagcacaatggttttcggcctgctgacgaagccgcttctcagtctcctcatcccaccaaggactggactgaacacgtcgtctctgctctcaagccagtctatgctggacccactccttactagcatgatggggtctgactttgatgtagggcagatcaactcccctcaatacaacctccagttcattctcaccgcgccagctcgctccgtccatcgcctttggcgcaagtttgacgatcggttcatgcgcccggtgttcggggggcgaggtttcgtcccctttgtgcctggttcgccggtggagaggagtgtccctgaatctcacctgggcactgtgacggaggctgagcgcagttga

SEQ ID NO: 30132 - DNA, 270 bp, Zea mays
  Peptide Sequence Number=SeqID_71911
atggcggtggcaggcgggcaggagcagcggtcacgtcgtcagccaagcttacgtcccatccaggggcagcgagagaaccctctctcacggcgtgaagacggcgcggccgtgttccgttcctcgaacggctcgcgcacgcgcaacggccacctcgcgaaccactcgccccgtcgcattaactccgcggcgggacaggcgggaccgggaaaggggataccccgaaaaggatccttctccgtgaaggaaacaggccccgagcctccctactga

SEQ ID NO: 30133 - DNA, 726 bp, Zea mays
  Peptide Sequence Number=SeqID_71912
atggtctcattaatcattacgatacttattaattatgagaagaatacacatattggtgatgaaactcgcgggccaaatctccagtttgttcctctttggcgtgccagttgtcggtgttcagccccaactgcgcactacggggtggctgagcacaaactaaagggtccttttctgagtttgtgccaaatccttcctagtcacggaggatgtagtagcttaggaagtcggccacgactatctacatatgaggttgatgccataattgctgctcatcggggtctgcttgatgaggataagcagacccatatcttaatacaacagttgcccaatgacttcgaggttgaagtagttcttagtatgctagctggggagtcttctgaatcgaaggagcttgaattggggagtggagcccctgagcaatcgggcaccaccaagaaggtagatagccttgcaagtcctaggcgcaaacggcccagccagccagatgcaaaagttgatgtctcgaaggtcaagcagaaaaggagaaaactttggcgcacgtcggatatgcaaccagtgtctactcaggttgagctggtcattggtgatgaggtggtggatgctgatctgattgatgaagtggaaggtggtggtgtagctaagtcggctagatatgttgtggaggaggcggaggaggatgaagaagatgaagaggagcttccgcttatccgtcgtgagcgacgctag

SEQ ID NO: 30134 - DNA, 138 bp, Zea mays
  Peptide Sequence Number=SeqID_71913
atgacgatcgagaggccgcttgagctactcaacatggatctattcgatctgattgcttacataagtatcggcaggagaaaaatcacaaacacaagagaccttgaagatattcttgagacaagctcaaaatgtgtctga

SEQ ID NO: 30135 - DNA, 363 bp, Zea mays
  Peptide Sequence Number=SeqID_71914
atgctcgcgccccctgctctgccgcgctgctccccttgctccgcctccccctccgtacacggccctgcctctcgctggcacgccgcgggagctccaggcgcgctattacccctgccccgcctccccctcgcaccgcttctggaggaggacacggcggtgcaagtgtcgcgagggagccaaccaagtagttgctggacacggaggagtcttgatccggtgccagtggacatagagcagtccggaagcgtcgactggaacaggtttggtggcctcctaggccaaggtgtctggttcctgtttcctgctggcccttctggttcgggtcttgatggtcttgagttctttgagataaagtgcaagtaa

SEQ ID NO: 30136 - DNA, 498 bp, Zea mays
  Peptide Sequence Number=SeqID_71915
atgcatatccaaatgagtcatcagaatccccttactttggctcatctgtggattacggtgttcggcaattctacaccagcaatttacagtggtcgattacttagcagccagggtttcatggcctacgtgcagacggactccgggaagacgacgaccttctacttccccatcaccggcatcatcatgcagcccactagaatgcaacaacggggcgggagcatggggatgaggaccgctcctagctctgagcccgtggccagcgtcgcctccatcgagctcaacattcttcaccggatgtggttgcgtcatgtgatggaggtcgacatcatcgtgcttggagacgtcacgggcaatgccacctccatttctgcactcgatttccgactcccaacgttgcagctgaaccaagttgctccacatcagcagtgttgttgctttgacctccagaagcttccaaggcagcgcaggagagaacaggaggaggcggcgcgcgtgtga

SEQ ID NO: 30137 - DNA, 324 bp, Zea mays
  Peptide Sequence Number=SeqID_71916
atggggttaagcgcagtgcgactacagtcgcacgtgcgagagcgcgctgcgcgtgccaagggcacgcgagccgtgcagaccctcgagacgcgagtcgccggggctcgggaccgggcagggggcacggccggggggcgtgcggccaagagcacgcagccgaggcacggcggggcgcggccagggcgcggcacggagccgggggcagggcgcggccgagggagcggcgcgggggcggggctcgccggggagcaggggagggcgcgcggggaggccgccggaggggggccgcgacgagggtgggggctcaccggggtggtgggggag

SEQ ID NO: 30138 - DNA, 438 bp, Zea mays
  Peptide Sequence Number=SeqID_71917
atggcgccatggttgaagcaaccccggccgatgctatggacgattctgcgggagtcgggcgctacaaccatggtaaagaaaccagatttacttacagtggtgaagcagaggctctcaacgggactccagcgacaaggccgtggaggcgaccggacgacgatagcgcgcgggtcccgccgaggtactggccttgggtcacggcgaataccggcgtccatgatattcaccagtggagagggagatctcacatcggatggtcgatcccgcgctaaagtctttgttagacgcagtcctctccccaatcgctcagaggacgaacagccaggctcggctttggtccgagcttccggcggcaatggtgaaataggctgcggggacaactttcttcctttcttgtccactctctctcggctcgcacagctcaacgatagtagatga

SEQ ID NO: 30139 - DNA, 369 bp, Zea mays
  Peptide Sequence Number=SeqID_71918
atgtccgccgcgggtgactgcgtaggattcgctggtcgttgctcctgggtagctccacttgatccgagatcccgggctgcgtctgccgccccagtgccttacccaggtgcatggtgctacatggcgtcgtgctgggggttaccatgggcgcgctctacgggattggtggctggagtaggaccaatttctcaccgtggtcgtggatggtcgcggctccgccttgtgtcgtggccaggaggaattgctctgagaatcctgtcccgagcccttataaagacagtgcgcctgggacctgaattttgcagagaaacccccatagaactacagaatcatgcgcgcagtccagaaccgtgggaatgtgataaatga

SEQ ID NO: 30140 - DNA, 357 bp, Zea mays
  Peptide Sequence Number=SeqID_71919
atggcgtgccgaactgggcctcaaccggaacttgttttaccccatctcatcccactgactccacccacccgcccgctgcctccgccggatctcgtcggactcggatccgcccgaccaccccgcgccgccgccgcgcagcagcagcaggcgggcggttctaggagctgcgggctccccgcaatggttggttccgcggccagctgctgctcgctcggtcaggcgcgatctaaacagttcatgctgcaatcgtttctcctcctcgacagccacaagaagctcctctgctgccatctcacacatgtctttctcttcacgatcatttgctaccaaagatttgagaccctcgatttcctatga

SEQ ID NO: 30141 - DNA, 969 bp, Zea mays
  Peptide Sequence Number=SeqID_71920
atgcagtatcacctacgccgatgcggcggaggcgccctcgccgctctctggcggctccgccacaacgcttcctctgccgtagcgtcgcctcctgtggcctggaggcgaccctgccttcctccacggttctactccaccgccgagatgagccagcagctccctgcgaacctagtggagatcatggagcagagaatgaagttgatcgagcagaggagcgcgtacctccaagagcaaatcaaccaggaaatcgagggtctcaaatctttggtagcaaatgatcatgaagagaaagacatgcgtgagatggcagaagaggagcttcttgtggctgtcgaggaggagaaacgattgcagcatgaactgtttagatcgctgcttccaaaggatgaagcagatgaaaaggattgcatattggaggtgcgggcaggaactggaggagaagaggcttctttgtttgcaatggatatatttagaatgtacgagaaatatgcccagaagaatgggtggaaatttgatgtcattgacataatggagtctgctgtgaaaggatacaaggaagctagtggaactatatcaggtcctggggcgttcggcaaactaaagtttgagagtggcatccatagagttcagcgagtgccagcgactgagaaatctggacgaatgcacactagtgctgtatcagttgctgttcttccgcaagctgatgaggtcgcggttgatgtccagctgcgaaatgaggacctgagaattgatacctacagatcaggtggctctggaggtcagtctgtcaatacaaccgatagtgctgttaggataactcatattccaaccggaacagtggttgcaatccaagatgagagatcacagcacatgaacaaggccaaagctctgaaagttctccgagcgcgactgtatgagttggagaggcgtagactacacatggacgggtcaaagcttcgatcagaacag

SEQ ID NO: 30142 - DNA, 870 bp, Zea mays
  Peptide Sequence Number=SeqID_71921
atggtgagcgacggcgcgcgcgggctgctgggcgcgtacgagctcgggcggacgctcggggagggcaacttcgggaaggtgaagcaggcgcggcaccgcggcagcggcgggcagtttgccgtgaagatcatggagcgcgccagggtgctgtcgcagcgcgcggacgagcagatatgccgcgagatcgccacgctcaagctgctcgcgcaccccaacgtcgtccgcctccacgaggtcggtgtcgagacaggcgtgtgggtccgcctcggcctatcccagtcccaccatagtgaggctgagctggtggacacggtgctccatgtcgcgctgctccggaacagaggcagcggtctccaaatcaacaggaaaggtatggagcaaaccatttcccttcacatccgtcgtatgcgtgaagttctccatgttgttgatgacacactgttggaggcattcgctgctgggcaagacgcagcgatcccgcggatgaacgtcatccctgaacgccgtgttcacgtgcaaaatgtgcacatttgtgtgatctacgggtggacaacagtggtgccgctgccggtggttgagtgtggcctccccactgcgtccccgtcaccaccggtgccgatgggagacgcggagtcgtcggcaatcgcaccgatggacgtcgatctggaggcaccaccgcctcctccacccactgcagcggcagttggtcgtcgttccccaactccgccggtgtcggtggtcgttgggaccatcgctgctcgtcatggacagccccctcgcaccttcgacgccccgcgcgaacgtgtcatcttcaccggccaccgcccaaatggggtggccccatcttcctcctccaatgggagggcctaa

SEQ ID NO: 30143 - DNA, 333 bp, Zea mays
  Peptide Sequence Number=SeqID_71922
atggggtcgcactcacctgggacccgggtgaaagtgagacccgttgacaagtatggcggctccatgacagaccgcagccaagggagctacgctgagtaccacagatggcgaaggcctagcgcgcgcggccatagagctcgcgagggcaccctgcacttgggcttgagggagctcacaggggaaggtcggaggctcgtccatggagggagctccgctcggtcgccaaggaagaggagcaggggcattgggtgccgagcgccatggatgggcataaggataggaggtcgtgcgtccttgatttatatggccccgagtcccagggatccgcaataa

SEQ ID NO: 30144 - DNA, 189 bp, Zea mays
  Peptide Sequence Number=SeqID_71923
atggcaccaagtggtagcaagagtcatcaacgtccaacttaccactcaaagagatacgttctcttggtccttacagaaacatgggagattcacagtagtgttcggaggaacccactggataagacaatggtccgtgttgcaaaaagaggaaaacatgacacaaatcaagtggggatgtcgtgcgcttga

SEQ ID NO: 30145 - DNA, 1749 bp, Zea mays
  Peptide Sequence Number=SeqID_71924
atggcggcacccccgcccgcgccgttcctcctcctgctcgccgtggcagcagcgtcgctcgccggcgccgacgacccttaccgctacttcacctggaccgtcacctacgggccaatcagcccgctcggcaccacgcagcagtttttttcttcttctccccttccggtcccccaactcctccatgctttgcacctgagtcagtttttccccccttcttctccccttccggtcccccaactccgccagggcatcctgatcaacggccagttcccgggcccgcgcatcgactgcgtgacgaacgacaacctggtggtgaacgtggtcaacagcctggacgagccgttcctgctcacctggaacggcgtcaagcagcgcaagaactcgtggcaggacggggtagcgggcaccaactgcggcatcccgccgggcgccaactacacgtaccgcttccaggccaaggaccagatcggaaccttcttctacttcccgtccctggccctgcaccgcgccgcgggcggcttcggcgcgctcaacgtgtaccagcggcccgccatcccggtgccctacccgccgccggccggggacttcacgctgctcgtcggcgactggtacgccgccgcgtccccgcacgcggacctccggcgcgcgctggacgacggcggcggcggagcgctcccgccgcccgccgcgctgctcatcaacggcgccgccgcgtccggggccgcgccgttcgtcggcgcccaaggcgggacgtacctgttccgggtgtccaacatcgggctccgcgcctccgtcaacgtccgggtgcagggccacgcgctgcggctggtggaggtggagggcacccacccggtgcagagcgcctacgactcgctcgacgtccacgcgggccagtcgctggcgttcctcgtcacgctggaccaggcgccgctggactacgccgtggtggcgtccacgcgcttcgccgccgccgagctcacggccgtcgccacgctgcattacgcgggggccacggcccgcgcgcccggcccgctgccgccggccccgccgcccggctacggctggtcgctgggccaggcgcggtcgttccggtggaacctcacggccagcgcggcgcgccccaacccgcagggctccttccactacggcgccatcccgacgtccaggacgctggtgctggccagctccgcttccctcgacggcgccgggcgtaggcgctgcgccgtcaacgccgtgtccttcgtcgtgcccgacaggccgctcaagctcgccgacagatacgacatcgccggcgtcatcgactgggacggcctccccgcgcggctcgacggcgccgcggcggtgccgcgcgccgggacgcccgtgctcaggctcggcctgcacgagttcgtggaggtggtgttccagaacacggaggaggagctgcagtcgtggcacctcgatggatacgacttctgggttgtagggtacggcgatggccagtggaatgagacgcagcggcagacgtacaacttggtggacgcgcaggcaagacacaccgttcaggtgtaccccaacgggtggtcggcgatcctggtgtcgctggacaaccaggggatgtggaacctgcggtcggcgatgtgggaccggcagtacctcgggcagcagctctacctcagggtgtggacgccggagcagagcctctccaacgagtacgccatccccgccaacgccatcctctgcgggaaggccgccgccctcccacactga

SEQ ID NO: 30146 - DNA, 741 bp, Zea mays
  Peptide Sequence Number=SeqID_71925
atggcgaatgcggccgcctccgccctccgcgtcgtcaccggttgccggtccctccaactcatcctcgacgcaggccggcgggggcggggacacgtcgcggcagcggcagggccggcccgcgcgcgccggctccaacccgctcctcgtcgtctgcggctgcttcagcgtcgtcacggccgccactgcgtcgccgtcaacgtcgtctccgatgtccagtgcttccgcgctggctccgactcatgtctccaattgttataccatcagatatttgaatactggctgggaatgctccagatctttgttgctgtcatgacgaaggcatacccaagtattgaaaggggtgatctgattttgctccaggagattgcgagctacatgatttttgcttgtggagctgtctatgtgatatcggctgaaagttttcatacaaacactccccaaaatattatcatggctattcatgaagtccctactagctgtgtctattataggtccgtactgcggctcgaatgctcgatccctggcttcggctacctcggctggatggacgactggctccggtccccagccctagacaacctccaggacctcgaactaaactcacacagccctcaaaaggttgctgttgttcgtaggaaccgatcagctagacgtctcggtggtctccgcgccaaggttgggtgtttttgggaagtctatcgctgcttccctaaactctatatccctacagcattactttga

SEQ ID NO: 30147 - DNA, 906 bp, Zea mays
  Peptide Sequence Number=SeqID_71926
atgcatatcctactgggtaactgcatgttcggtcgccagcttcatagttctgaagaactggaggtgctgccaattgtcggtccacccagagtcggcaagagtaccctagtcgctcatgtttgcaaggacgaaagagtccaaggtcatttctcagaaatcgtgtggctgaatgaccttgattttacagatggagagcatcaaaatcaagtgtcaaactcgaacaaagacaagagattgctagttgttatagaactatctggaaatctgtatgaagatgcttggaacaggttctatcttgcttccaaacggagcttttgtagcgggagtaaaatcgtactcacaagcagttcagacagagctgtaaagtttggaacatcacaggctctaactctgaatcatctgtctcatgaagcatactggtatttcttcaagacacttgcatttggaagcattgatcctgaggcacacccaaggcttgcacaagtagccatggagatagccagaacgcagaatcgttcaatcaatgccgcatacaccatctgttatttgatgaggaacaattttaacatccacttttggtgcaaggttctgagattcttcagagtgttcgtccagaatcatgtctccaaattcaacaagcatccatatgatcttttgaaccaaaacagaccaatacagattagccgaatggctacaccttctgaatatgtcattattcgtcgtcagtatcagtgctcttcacaagaggaggttcccaagataagaggccaagatgtagtgtatggaagcatgaagacttgcggaaaatttgaggtcctagcatggagatctctaatacccccctactatagctctgtccatacttatgagattcaagagccaaggactacaagtgtaggaagctga

SEQ ID NO: 30148 - DNA, 399 bp, Zea mays
  Peptide Sequence Number=SeqID_71927
atgggcaagagcaagaaaggcgagagctcctcgcaccattccggcgacaagcgaaagcgcgagccgactcctccttcagaggacttaggcgattccgagtactcggaggaggagttctcctccgagtccgagggatcgtcggggattgctacagaagtgtggacctacatccggcccgtcgagcgcgctgggctcgagggctcggatgagtcggaggtctcctcggacgagggggactcctctgactcgtccgaggaggggagtgacagcaacgacggtggcgatggcgacaggggcgacggcgatggcgacggcagcaggggcgatggcaagggcgacgacggcaacagcagcggcaacggcaagggcggcagcggcagtggcaaggccagtggctag

SEQ ID NO: 30149 - DNA, 882 bp, Zea mays
  Peptide Sequence Number=SeqID_71928
atggggctcgacgtcatggagatcgggatgggcgccgatttgagcctggatctgaggcacttcgcctccaaggccctgcttgaatgctcagtcagcacaggatctgtgggggtgctgtcgggtgctcgattcgtcggtgggcctaaaagttttggagctttgcgatcgcagaagcaagacaaggggcggtgctcgccggaggccaggtcccgcggcgctctcttaccgttcaaggctgatgtgggctctggcgcgccggcgttcgcgccgctcttcttgagaacggacgacaaggctgcggctgcgcgcgtcggggtgccggatctgtcgtccttgctgtcgccgccggcgaccatgcctcctgcggacgccggcgccgaggagagccgtcgccaggttgtgggatttgcgcaagctgcggccagggcggctgccatggcgccgtctgcccctgcgcttgggctccagtcgcagcagcagcagcagcagcagcagcaggcaaggaaggctcggcgttgctggtcgacggagctgcatcgcaagttcgtcgccgccttggatcagctcggtggcccccaagttgccacgccgaagcaaatcagggagctgatgaaggtggatgggctgacaaacgacgaagtgaaaagccatcttcagaaataccggctgcacaaccgcagggcgcctggatccggcgtggtgcgccagccgatcgtgctcgtgggagggctgtggattccccaggagcaaggcagccctcagtctggatctccccacggccccctccaccacctgtccacctcggtggccgccgtctcgtccgccgccaccgccagctgcgaggaggaagacggccggtccgagagctatggctggaaatga

SEQ ID NO: 30150 - DNA, 549 bp, Zea mays
  Peptide Sequence Number=SeqID_71929
atggaagctgatccgccgttgccgccagcgagcgcactgatggtggagctcgtggaggaggtcctgctgcgcttcccacctgcggacccggcaagcctcgtccgggccgcgctcgtctgcagacgctggcgccgcatcgtcacgggcccgcggttccgccgccgctaccgcgacctccacctccaccgcgggcgcgggggttcgcatcccccgatgctgggcttcctcgccaacgccggcacggggacccgcttcgtgcctacctccaccttccgccccgcatccgcgcgcgcgcgcgcggccgcggatggcctcctccttctcgggcggctgggcgcgcgctcgaacgcccgccacggccgcgccctcctgcgccgggacaccggccgcgacggcgcccgtcaactgcaagcttccccgtctggggaccccgccacaggccgccgtacggaccctgcccccgccctccccctggttcgccctaccccctacagctggaaacgccgccctggctcttgcggccgcccacaaatcaccgccctccccctg

SEQ ID NO: 30151 - DNA, 255 bp, Zea mays
  Peptide Sequence Number=SeqID_71930
atgccgccgtgcgccgaccaccgctcaaatctacctgtcgacgcacgcgttgacagcctccgcctcgaagaagcacagctcggcgtcaccctaacccccaccatcagcgcacgacgacgacgatcggagcagatcctcgagcgaggtgcggaggcaggccacgacgccctcacggcagcgtcccgccacgcctggctgcttgggcctcagccgtcgcctgacgagctccgcggcacatgccacggcgcgccctag

SEQ ID NO: 30152 - DNA, 612 bp, Zea mays
  Peptide Sequence Number=SeqID_71931
ccacgtggagacgacgcgcccgcgtccgctcggcacccagacgacaacgtcgacttcgcgcccagcgcgctcgccgggaacgcgctctacttcgcgttccagacgggcgcggcggccctggagtacgatttgggcacgcgggagatggcggtggtgcgcctgccgccgccgccacgcttggactggcagcgcgctgtgctcgccaccagggacgatggtcgtctgggactcgccacggcaggcaagtccacgatctacctgtgggcgagggaggcgccgcctcgaggagatgggagttgggtacagaccagagccatcgagcttgacacgctgctccctgtcggtgccctctcggcctttgttgatgtggttagctttgtggatggcgtcggtgtcgtgtttgtgcggacgggcgatgggctattcaccattgatctgatgtctcgccgggtcacaaaggtattcaaggacactttcttctccggcattttcccctacatgagcttccacactccaggtatgctaccatacttcaaatcagcggatatgccaagaattgttttgccatttgttatacctgtaatgagcagaatgtggggtcttgaaagttga

SEQ ID NO: 30153 - DNA, 228 bp, Zea mays
  Peptide Sequence Number=SeqID_71932
atgacttgtgaggtctattacttcccaaaggatgctgacagtacatatgcttttggtccttcgtcgacctccaccaaaaggcagggtgcatattttgagcatcgaatttggcctagtggacagtccacccctggggtcggaggagtaaatattcgttgtacaatcaacgagactctaatctcccatgctctgacctacaatctgtcatttatggcgcccaagcgctga

SEQ ID NO: 30154 - DNA, 1149 bp, Zea mays
  Peptide Sequence Number=SeqID_71933
atggcgaccagcaagatggcgagggtagtgagcacggccgtgctgctgctgctgctgctggcaactgctgctggggactcggcggcagcatcgtccggtagcaacctggggccaagaaagccgctgacgctgcaggctggcgctgatgattgcatcacaccagaaaacttctgcgacttctctgatgatcagtgttgcagtggctccgtttgtacagagaccatctttggtaaggctgttgggcgtcatcgaggtctatgtaccgggggcctcaccagacagagaaggtcaccttcaagaccggcatcgtcggcctctccgacagtttcgctgccgctgcatttgcccttggggaatgaggaatcactgcatttgccacggtacgacgacgacgacgtgttcgattcttcaacagccccggagtacgacgacaacgtgttcggcgcacactgcgcgcaagccacgcggcgtgatgcagttgcgggagacgtcgatccggttgcggtgtgtctcgcacctgacaacgacgggtacatggtccaagacaacacctccttctctaagcccgtcggccgcttgtgctgggtagatccgctgctcgccaatcagcacaaaaaggtccgcgacgggctcatcggcgggacggagctgtcacacacagtccgcctcctccactgctccttgttgtcgccaaaccaggcggaggtggtggaatcgtttgagctagagtccgcccctcctcctcccgtcatctacgactgttacgtcgagctgggctcctacagcatcatcccgtcgctcttctgcgcggagcaggccaaagaggatgagttggtgatgcccaaggaggaggttccgagcaccttgcccaacagcagggatgcagtgtcgctccccaaccgtgtcgcgagcatcaccgacatccacatcgaggaggacagccctgtgtgcaagcttgttgttgagatcatgggtttctcaatttttgttgcacgacttggattaccaggtgttgacctcatctcgtacagggatatgattaatcatgggcatctgatcactgaagcaatttcaatacctatgagcggtgatgcagataatggttacgaaaattatatgcatgttaagatgagtgaaaggatttattaa

SEQ ID NO: 30155 - DNA, 516 bp, Zea mays
  Peptide Sequence Number=SeqID_71934
atgtcgtcggggccagcagcatgcggtgtgtgcggcgcggccgcctgctgcccgcacctcttgcacaccggtgacggcaacgacgacgacctcatcagccgggccttcttctccgtcttccctgtcgtcggtcatcaccgtcgtcatgagtccaccagcagccccgccatgcagcagccatcggggtgcctgcacgagttccagttctttggccatcaggacgaccaccaccaccaagaaaccatcgcctggctcttggaccacccaccgccacctgcgcccgagcttggcggcgacgacggcccgtccccagctggtgatgagaacgacgaccagcctgcgtttcacccgtttgggacaccacagtaccaccaccccggaaaagggaacgggaacgggctcacctttgagctggacgccacgctgggcctcggcaccgcgcggcaaaccactgagacagcagaagcaagcgccaccatcgaacgtactactcttcctatatatcaatatatgtaa

SEQ ID NO: 30156 - DNA, 423 bp, Zea mays
  Peptide Sequence Number=SeqID_71935
atggagcgcgtccgcgggctgacaattaccgacggcgccctcggccgctgcaccaccttcgaggcgctgtcggggctcgtgtggcgtctctggcgtctccggcgagcctccggggcggcggcggcgcgctgtgcgggcggcggcacggacgcgggcggcagcgcggacgcgggcggcggcgcggacgtggatgttatgtcgaaaacgctcggcaaagcctgtaaatcactcaacaaaaaaagtctcagtgaactgtacatcagcaacgacttctttgctgaatactttttgtcgggtactcggcaagtattcgaccaaaaaaagtcgctgtcatggcgccaggttacgacgattgagaatgtgccgagtaccatggtgacactcggcaaaggcacactctttgctgagtgtctactgtactag

SEQ ID NO: 30157 - DNA, 330 bp, Zea mays
  Peptide Sequence Number=SeqID_71936
atggaagcccgcaaggatgcagacgaagccaccatcccatatgtgtactcggtccccatgtgccccaatgcgcttggagcctggtttcatcaagttcgtcaatctgttttgatccgcaagacagacgcctccaccggtggtccctacacctcccagcttacttttgtcaggcttcattatcgtcacccagggtcagttggcatggaagtgtttgcttcatctgacccatcattggggattgtcacgaccgtcgacgcctcatccacgacgagtctcgtccccgctttcggtttgagcgacaggcgtccgtccacactgagggcatattag

SEQ ID NO: 30158 - DNA, 180 bp, Zea mays
  Peptide Sequence Number=SeqID_71937
atggcctcatatgagtgtgatctcaggctagtggagatgggccaatgcctagaactgttaaggcatgaaacacgcagagaacttgagttcccacttgacgtagtttggggcaatcttactaaccttaggttctggcccctaaccacacaccacctattagatcggcggttcccaccttga

SEQ ID NO: 30159 - DNA, 336 bp, Zea mays
  Peptide Sequence Number=SeqID_71938
atggtagcaccaaaatttaatggcgacgcggcgttctcgctggtgaggcggcagctggagtcgctgagcgtggacaacatgctgctccggcgcgccgtggaggtcctccgcgcggaggtccgtagcagcaacagcagggccgcgcggcccgctgcttctgcggcgggggcccgtggcttgggcagggtggcggcgaccgcgccacaaacgcatacgcagccttaccacgtgacaaagccggaccaccgcccccgaggcgccgcgagggaggctgcggccgcgccggacgacgttggcgaggagctgaagaaggcgttggaggcccgcctgcactga

SEQ ID NO: 30160 - DNA, 370 bp, Zea mays
  Peptide Sequence Number=SeqID_71939
atgaacggcgaatggctcaacgggcagggaacgacgaggtttgacggggtttggacacgtctccgacgagacacgatagcgaggcacgatggcgagcaggtcgctactccggcctccgtccacaacggcgttgacagtgagcgagcacagtggcagacaccggcgaggggcgtggacagtccaacgaatcggcgaaggcgcgggcaacgggacgtgctccactgcgagaaggaggaaggcatgaggagagagagcaagcttgggcagggagaaggagagggctcgacgtcggattttatagaggagagggagagaagtgaagggtcggtcttcatggctgccattaatggcatccgcatcaatggaggcg

SEQ ID NO: 30161 - DNA, 396 bp, Zea mays
  Peptide Sequence Number=SeqID_71940
atgggtgccaaacaactgtttgaagctattggctttgccaaacaacttgggtaccctttgtggctaaaatcttcgagggagggtcgaatcttgagtaaggcattggaaacagaagaaacattgaaagtgaagctgctcagaaggaaatttgaaccttcactccgagaaaatgacttcattgaaagccgaagtgaagagaagaacgaagctctaaagctcaaggagagaatgaacagtaaaatcttagagctcgaagctttaactctggagaaagacaaccgccttgcagtgctcgaagctgaaatgaagcgagtaaaggaagagtacgaagcagaaactgataaaatacaacgagtgtctgctgaagcagatgtcaactgtcacacctggatttag

SEQ ID NO: 30162 - DNA, 459 bp, Zea mays
  Peptide Sequence Number=SeqID_71941
atgattttcgttaacttagcatggtttttacttttgcatgctacgcccaagactgtggaactgcctatcattgaggagtttccattggttgacaaggctttagaatcacagggagccactacttcggatctttgcctgagcagtgaggaagaagacaaagaacacatagctccagtgatgagcttgttcttttatgatgatgatgaagacgatgatgcaaaggccaaggatactgctgcaaccgctatggcgacaaaggatattatgctacctattgcagctatggcggtactagagagcccgaaggtccttatagcgtccccaatagtgacatatttggtggttatgatggctaaggagaaaactaattctatgaaacctgcaatgacaagcgataagtggagagggcccgtaggaatcgaggaggccaaaaagctattgaggatgacacgccgctag

SEQ ID NO: 30163 - DNA, 285 bp, Zea mays
  Peptide Sequence Number=SeqID_71942
atgcctcttgacttgtttctcatggcttatgcggagcgggtgtggggcttggaggcactgatcgatggcaaaggtggtgtcatgttggttcatgctaatgcactgagagcgatattcaagtgtcctctaagggaaaaccacatcaaatatagagaattcatgaacatgtatgaggacatgtgttggttcatcatgagaagagtaattcacttcaaagagaactatcatgatgccacctctaagttaggctcttcccaaccgattgtgtcttatcacgatatctaa

SEQ ID NO: 30164 - DNA, 357 bp, Zea mays
  Peptide Sequence Number=SeqID_71943
atggaccccgcgcgtcagcctgaagccgcgccagcgcgtttgggttcccccactaaccattgggacccatgtgtcatattcatccccaacctcgctgtaaacatagcggtggctcaaacaaaccccattgagattgggattcttccactggcgctgccctcatccggaccccccttcacggaatgtaccacaaagttcaccatcagccctgcatcgctcagggagtgtaagatcgaagactatcgtgctcgaacgggggattcatcgatcgcagaggggcgcaacgtcgaggtgtcttctccgtcgctgtggctgggatttgtggaggaagacgacgtcgtggccgtagatttgtaa

SEQ ID NO: 30165 - DNA, 414 bp, Zea mays
  Peptide Sequence Number=SeqID_71944
atgggcaagggtcacaaacgcaagcgtgagccgactcctccgtcggaggatttcggtgactcggaatactcggaggaggagttctcctccgagtccgagggatctccggctcccgcctctcccccggcgtcgtctgatgactcagacgactcccaggggcttgcggcggaggtctggacgtacatccgggccgtcgagcgctccgggctcgagggctcggatgagtctgagttcccctcggacgaggaggactcggacggcggcgaggacaaagatgacgacgacgacggcggcgacgacgacgacggtggagacggcgacggtgacggcggcaacggcggcggaggcggcggcgacaagggcagcaccagaggcggcagcagcacaggcagcagcggcaaggccagtggctaa

SEQ ID NO: 30166 - DNA, 249 bp, Zea mays
  Peptide Sequence Number=SeqID_71945
atggcttcggcggcggcggcaactcaggtggggacttacttcctgcggaactactacaacctgctgcaacaaacccccgatgtcgtccaccagttctacagcgaagccagcaccatggtccgcgtcgacgacctcaccggcacgaccgcggctgccaacaacatgatgaagcagaagagaaaccgagaagaacccagcttagatcagactgaagaactagatgcggtggacgccttcaagacctgctga

SEQ ID NO: 30167 - DNA, 381 bp, Zea mays
  Peptide Sequence Number=SeqID_71946
atggacaacagcaaggttgggagatgcacacagggaggagcaaaggtcgagcagggagtcagcgcgcgcaggagtttgacaacggctgggcagagggagttggagggggccgcgacgcgagggagctgctcggctggtgtccacgccgagcgggagcagagagcaaggccggacttgaggaagaggagggaggtcggggagcagggcgagcaggaagggcgcgccatgggagcccggggcacggaccaaatccaagcaggggaaacaagcgcgatggccatggtgagcataagaaagggactcagggaggaagacgtgcgcgaagctccaatctgcggccagcgtagggcaccagagagacgcggcaagggagaagcgtga

SEQ ID NO: 30168 - DNA, 534 bp, Zea mays
  Peptide Sequence Number=SeqID_71947
atggcgcctcctgttgacgtgactgggctgcgccctaggttgggcgatgtggaagctcctccgaagccgaggtcgaatctgtcttccgtggccgaggtcgagtccgagcccctggttcgggcgaggcggagaccgtcggctgaggacagggcggagtccgagccctggggtcgggcgaagcggagttcgtcgtcttctgggctgagcccgagtccgagccctggggtcgggcgaagcggagttcgtcgtcttctcgggcagtgcccgagtccgagccctgggtcgggcggagtggagttcgccgtcttccggggcttagcccgagtccgagccctgggtcgggcggagcggagtcgccgtcttctggggctgagcctaagtccgagccctgggtcgggcgaagcggagcttcctatggtgcctgaggccgggcctgactgcctgtcagcctcactctgtcaagtggcacagcagtcggtgcggcgcaggcggcgctgtccttctgtcaggccggtcagtggagcggcgaagtga

SEQ ID NO: 30169 - DNA, 507 bp, Zea mays
  Peptide Sequence Number=SeqID_71948
atgtgcactgatgatattctgatgtacccagacaactcactggtgagagacataagccgaatgcagcagagcaactacgggagggaaggattctcgcatataactgtcacaggtgctcttgctcacgggacgaaggagatagctactgcccagggctgtctcctaaaatatggggacctggagcgaactcaaccaggttctgaggctgtcttcggtgtggatcgtgtggatcgtgtggaagtgtggctacaaacatttggtccaggtcaaaggaccccaatccacaggcattcttgtgaagaggttttcattgtcctcaaggggaaaggcacgctcttactcgggtcgagctcgctgaagtacccaggacagccgcaggaagttcccgtctttcagaataccacattttcgatccctgtaaatgatccacatcaggtctggaattctaatgagcacgaagatttgcaagttcttgtgatcatatcacgcccaccggtcaagatgtga

SEQ ID NO: 30170 - DNA, 789 bp, Zea mays
  Peptide Sequence Number=SeqID_71949
atgaggaagatcctccacatccagggcgggcagtgcggcaaccagattggggcgatctgcgacgagcacggggtcggcgccacgggccgctacgtggggaattcggacctccagtttgagccgcatcaacgtctactacaacgaagcccagcagcggccatttcgtccctcgtgccgacctcatggatctcgaatccgagaccatggactctgtgcgctccagcccctttcggccagatcttccaccccgacaacttcgtcttcggacagtccggcgccggcatcaactgtgccaaggggcacgacaccgagggcgcggagctcatcgactctgtcctcgacgtcgtctgcaatgaggccgtgaactgcgactgcctcagggcttttgacattacagctccaggaggtgacgtgatctctggtggttttgacgactctgctagttggaacaacaacatggtttgggttgttgacaacagcgacgatggccatggttgccacaactgcgttccagttctgattgaaagtatggactctctggtgttcaacgaaatgccgctggagagtgtgatttgggatgaggaagccaagcatggagatgtggtgaacctggaagggaagggtgaccagacgcacaacaattgcgagcagggtgttgttcctaatgctccatggaagttgggtgatccgttgttcagtaaagtgggtctaaaagtggcatgggatggggagatgcaatttgaatctcatacgcatgaagggttattgctcaaggtggagaagtcttag

SEQ ID NO: 30171 - DNA, 2181 bp, Zea mays
  Peptide Sequence Number=SeqID_71950
atggggaagcccccgggggccaggaatccggcggaggcggaggccgatggcgacgacgcggtgttcctcgagctgtcgcgggagctcaaggaggagggcacgcggctgttcaacaggcgggacttcgagggcgcggcgttcaagtacgacaaggcggtccagctgctccccgccgggcggcgcgtcgaggcggcgcacctccgggccagcatcgcgcactgctacatgcgcatgagccccgcggagttccaccacgccatccacgagtgcaacctcgcgctggaggcggtgcccaggtacagcagggcgttgctccgccgggccgcctgcttcgaggcgctgggcaggcccgacctggcgtggggggacatccggacggtgctgcgttgggagcccggcaaccgcgccgcgcgccagatctcggacagggtgcgtacggcattggaggataagggtatctcggttgccttggatgtgctgccagaggatgagaatgagattgctagcgccaaaggagaggagaggaagaaatctcgtaataagcgttttgattcggttgcgggggggcgggagggtgaaaatggtattgcgctactagaatctgcttccacggagaagcaggctggcccgagacaaacaaatggaacagggaatcatcaggatcatactgaagatagtgaatccaatggtctcgagaagctagaacaaagtactgagacgggagagaaggacatgggcaaaaagcgaggtgcacacgctgctggaaagaaaccgaggtgtggtgagagcaagcagcaaaagcattctgcagtgaatcattgtcaggacaacattggtgccaaggaggaagtcatgaaggatgtgaagctggtctttggagaggacatcaggtgtgctcagatgccagctaactgctctctgccacaattgagagaaatagttcagaacaaattcccgtcactgaaagcgtttctgatcaagtataaagacaaagaagaagacttggtgacgataaccttgtctgaggagctaagctgggcaagcaatctggcagtttcgcaagtgccaatccgattctatgttgtagaggttaatcatgttcaagagcttggtgtggatggggtcaggagacgtccttcctttgccacgttagagagaaatcgtgatatcatgttggataatgggaccattgggcatgatgttgagcataagcattacgctgatgactggatggtacagtttgcacagatatttaagaatcatgttggttttagttctgatgcatatctggatctccatgaccttggcctgagactgcactatgaggctatggaagacacaatacaaagagaagaggcacaggaaatatttgaggttgcagagtccaaatttaaggagatggcagcactggcattgtttaactgcggcaatgtccacatgtctcgtgcaagaagaaggccatgcttggctgaagatcctttacaggaatttatacttgagaaagtcaatgtttcatatgattgggcatgcacagaatatgccaaagctggtgcaatgtttgaagaagctgtcaaaactaaatctgacttttttgaaggacttattgctcttggccaacagaaattcgagcaggccaaactctcttggtattacgctcttgcatgcaagataaatatggaaactgaagttttggagttgttcaaccacgcagaggataatatggagaagggaatggatatgtgggaaagaatggagacattgcgcttgaagggactgtctaaaccaagtaaagagaaggttgtacttgagaagatggtcttagaaggttttgtgaaggatatatcagcagatgaagcatttgaacaggcttcaagcatacgatcacatataaatatcttgtggggaaccatcctctatgaacgttcagtagttgaattcaatctgggacttcccagctgggaggagtcactgactgttgccatggaaaaatttaagatcggaggtgcctctcaagctgacatcaatgtgattgtaaagaaccattgtgctaatgaaaccacccaagaaggaacttctacaataatgccaaaagagaaacaatacttacgccatgaatttgagatccttggaattgaattccattctaataatagtaatttaggtaaagatcaattaacctaa

SEQ ID NO: 30172 - DNA, 405 bp, Zea mays
  Peptide Sequence Number=SeqID_71951
gtgcgtgtccgtagggataaactagccaacattgcgagaacaaagtggtggatactaaaaggggatactatagaagtcttcaagaaaaggaccatcaaagatggcacttggaaggaagaagttgacacaaacaatatgtgggagaagatagcaacttgcattcggaaggtggtattagagttagagttgtgtggagcaaccaaagggagtggagaccaagctaaagatactttgtggtggaacgagaaagtacaaagagcaattaaggagaacaaagaatgctacgaacatttataccatgacaagaatgtggacaacatagaaaagtacaaggtagcaaagaagacaacaaaatttgttcatcttagaagctttgttgcacttactcatggaaaaaaggaataa

SEQ ID NO: 30173 - DNA, 498 bp, Zea mays
  Peptide Sequence Number=SeqID_71952
atgtctttctcttctagttttgtgctctatatggtttctgttaaagaggcaagagatacactgaagctctggtacagggatagaaaagaagtgttagcttggcaaaaaagtcagaagaagcttgcaagcgagaagggtgaagtctacactttgcttgggcggtcgcgccattttccttacctgactcagtatggtcctggccaacgaggtcatattgagcgtgctgctataaatgcaccagtgcagggaagtgcagcagatgttgctatgtgtgccatgcttgagatcgaaaggaatgtccgccttaaggagcttggttggaggctcttattgcaggtgcatgatgaagtgatactggaagggccttcagagtctgctgaggtggccaaggctatagtggtggagtgtatgtccaaacctttctacggaaccaacatcttgaacgtcgacctggctgtcgacgccaagtgtgcaaagagctggtatgctgccaaatag

SEQ ID NO: 30174 - DNA, 732 bp, Zea mays
  Peptide Sequence Number=SeqID_71953
ggagatcacatatcatgtgcagaggggcgcattcactgttcattgaatatcaatactgagacagggcgcttgtcagcaagaacaccaaatctacagaaccaacctgcccttgagaaggataggtataggattcgccaagcttttgttgcagccccgggaaattctcttatcgttgcagattatggtcaggcgggtggtgatttccattctaggacagccatgaatatgtatcagcatatccgtgatgctgtccaagaaaagaaagttcttcttgagtggcaccctcaacctggtcaagagaaacctccagtgccgctattgaagggcatgtacaaccctgagcccctggattggttttccaagcagaagatacagctaagagactacacagtgcaatggaccatctctaaacgatgtctcttaataagttgcggtattggggtggcggaggcaggttattgtgatggcgatgaccagaagaacccaagtgtgggagtgtcccaaagcctagagtgccttgaggcatcgggagtttgggtcttaggctcttccttcaagacaagaatagctttattccttcatggggtccccgagatcgaactacccggaatggtgggccctgcttttgcgagagcggaggatgcttttggcgctgagaggaggaaagctaaaatgcttaatttttccattgcttatggaaagacagctgttgggctatcccgggactggaag

SEQ ID NO: 30175 - DNA, 396 bp, Zea mays
  Peptide Sequence Number=SeqID_71954
atgccgtcagccttcttcgcgtggcggtcgcagcacgggacgtcgctggtgggcatcctcttctctgcgttgggcgtccttggcgtaggcagggaagtagctcggcgcgacttccgcccgacgtccttgggccaccgcgaggcccgtgtgccctgggaccgcctcacatggagctcggccaggttcgcgctctcctatctcgcaccgacacctgggagcagcagggcctgccgtcgcacgcgatgctcagcgggacgatgcggccaaatcctcaccaggttatgcaaggacaagcacagcgtgtggttcaacacacacgtcgaggtggagcgtcttagcctccacgccgttcccgccaaggagggcctcgctgccgaatggtacgcctcgcagtag

SEQ ID NO: 30176 - DNA, 207 bp, Zea mays
  Peptide Sequence Number=SeqID_71955
atggcgagccgcggccagccctgcatccctgcaagcgacgcggccaagcctggcccgcccagcgacagggaacgccccaacctccctctcgcagtgccccctcaaagatccagccgcccctctcccacttcttccctctcccttctcccttgggcacgacagcagcagtcccgggtcatccatggtggccatcggcgcgaccgctaa

SEQ ID NO: 30177 - DNA, 267 bp, Zea mays
  Peptide Sequence Number=SeqID_71956
atggctggagcacgaccaccctgctccgcgtcgctgccgcgcaaggaagatggcatcgcaaggcgggatgcagtcggggcatgtggggcacaacggctgggagccaggccgcaacgcaggctgccgcgccataaagaaaacgaagaaggatgtgccagatttctcacctcacgacacagcctgacggagagagctcgtggatgcctcctggtgaagctccggcacgcggtgctcaacgacggcctggccgacgacaatttgcggtag

SEQ ID NO: 30178 - DNA, 361 bp, Zea mays
  Peptide Sequence Number=SeqID_71957
atggggctgtcaatctcgtacccaccggacgactacctgccagcagtggaggacgacatggggcggctgttcatccggtctctcagcttcgacgacatggaggccgccgccgattcgccttcgtattcgccttcggcattgccccccgcctttggctccaggaagctgatcatggagggctccctgggcttcttcgaaagaagagaagctgacagcgtccagatgcagaacgtgttgtccatcaggaatcctaaacctcctgatagagaagcctgcagcagcgtcagtcccggtcatgaaaacttgcataactccattgacgaagctatcatgttgaaaggtattgatcaagatcatatca

SEQ ID NO: 30179 - DNA, 315 bp, Zea mays
  Peptide Sequence Number=SeqID_71958
atgccgtggcctgagatgtggttgcctcccgcgaccgaggaggagggtgaggcagaggacgttgtggggagtactccgttgtgggtgggggatctcaggcgcggtgggggtggaggacgagtgggtactggggagtgcgagggggcgagccgcgagccagaaaagagaggcggacgtgacgaagctcaagctcaacaagctcaacacgcgcggctaacggaaatcttgggtccgagctgcaggacacgcgtcagcacccgatcggtcgaagacgcgtcgaacgcggaggagcctccaattcctagtgtcttttaa

SEQ ID NO: 30180 - DNA, 174 bp, Zea mays
  Peptide Sequence Number=SeqID_71959
atggggtggtttctgtttataattgggttcttctttgctgccattccatggtatcttggagcttttgtgctgatttgtgtccgagtacgtgattacagggagaaaccaggatatgttgcttgcactattgctagtcaactcctgtcactaaactacaccattgcatttcaatag

SEQ ID NO: 30181 - DNA, 201 bp, Zea mays
  Peptide Sequence Number=SeqID_71960
atgggggacccaaagggtgccgttattggtggtgcgggccgggcgcccgacgggcggggtatccgtaaagaaggacgaggagtcccgcccgagcggggccttcccgtcggcgtccggcatctggccaccccatggtggctcccgcggtggcaaagacgattaacgtgtgcctccagcctggacggcggtgttggggcttaa

SEQ ID NO: 30182 - DNA, 996 bp, Zea mays
  Peptide Sequence Number=SeqID_71961
atggccaatgcactgccaggccagaaaaccggcgaggtcacggcgacgcagaatccgttcgagttccatgtgtacgggccgcgacacctgtcgtcccccagctggtgggatctcctccgttcgagctggaaggatcccagctaccggcggatggtgatcgcgtgcttcatccagggggtgtacctgctggagctggaccggcaggacaagcgcgacgagcgcaccgcccttgcgccgcagtggtggcgccacttcatgtacaggctctcccagacactcgtcgacgagcgcgacggctccatctacggcgccgtgctcgagtgggaccgccgggccttgctggctggctacgcgccgttccgccccgccggcgccccggccgccgtcgtggcgctccgcggcacgctgctgagcggggccacgttccggcgcgacgtcgtggacgacctccggttcctggcctgggacagcctcaagggctccgtgcggttcgccggcgcgctggccgcgctgcggtccgcggcgcgcaggcacggcacggggaacgtgtgcgtgggcgggcactcgctgggcgccgggttcgcgctccaggtgggcaaggcgctggccaaggaaggcgtgttcgtggagtgccacgtgttcaacccgccgtcggtgtctctggccacgagcctcaggggcttcgcggagacggccggcgagatgtggggctacgtgcgcgcgtggctgccctacgtgggctcggctgcggcggcggacgcgggcggcgaggccaaggaagtgtcgctggggcgcgccgggacggcccaaccggggctggcgaggatgttgacggtgtccaaggggccgaccaagttccttgatgcgcacgggctgcagcagtggtgggctgacgatgtggagctgcaggtcgccctcaaccacagcaaactcatcgaccgccagctcaggtcgctctatgccgcgcagccggcctcgccgcaagtgaaccagtag

SEQ ID NO: 30183 - DNA, 828 bp, Zea mays
  Peptide Sequence Number=SeqID_71962
atgtcgttgccgtcagcgaccgcaccgtcctcttcgggcgcgacgcagcccttgccaacggagcagcagggagtctcgagggagcggcggatggagtcgctgggttggctgacggagtcggcggtgatgccgaagaagcacaaggccatcgagggcgtcggcgccgcctccatcctcgacctcaaggcacagctctaccgcacccaggaagaggcccgaaaccccatcgcccccagcgccgtcgcggccgctgcttctggtggggagtttcgccgcgcaaagatacgctccgcacccaccgaccccctcggggccaagaactccggcgttgaatcccgggcgcacaaggataagctggagcttaaagccgtgaaagacggttcagaaagctatgctgctctggaaaagaaagcagagttgtatgaaaagttatccagaggtgaactacctgatgaagaagacaaggaaaaatactgtgtggatttcttccaaaaaggtttcgatcgggtttatgagcctcagataccagaatgtagccacagagccactgatggtgcggaaccggtaaacgatcgtgaagattctatgcctaatgccaaaccattgggccttggccgagcaggcactacaatcgacagagatgaacacaagcgctttgtgagggaagttcacgaggaagtaactgaggcaaggcagaaggcctcaacagtaagatctcgacgacaagagcaggatgctgctcgtagagagaaactcaggcaagcttacctgaagaaacgattggagaagttgattgctgaaaaacaggcctcttcaaccagtgattga

SEQ ID NO: 30184 - DNA, 435 bp, Zea mays
  Peptide Sequence Number=SeqID_71963
atggctgctctcagcactctgtttcttcattccagatcacagcatgaacttgaagtttccacaaagcagccaatatttgtgggttctagtgttagtgatacaataaaaacctgtattgcaatgggaaacgagcgtgctgcactcagagtgaagtccgaattcaaggttcctgataagaggtggtactggcttaaaacgtgcgctttagccacagttggaaactgggatggtttggaaaaattttcaagggagaaaaggccaccgggaggctataaaccttttgtggaagcatgcattgatgctggtcaaaaaaatgaagctgtcaaatatattccaaagttaacagatcctcgtgaaagatctgagggtgtgtttggttggatggacaagaaaggatggaaatgggtgaccacattttttatagtgtttgaatga

SEQ ID NO: 30185 - DNA, 333 bp, Zea mays
  Peptide Sequence Number=SeqID_71964
atggaggaccggatgagggagaagaagctgggaatcaaggtgatacatggccggaaaaggggatgtgtcgccggcattccagctgcagctgccgccccgccacaaaccctaggaagcctgccctttccctctcacggcgcccacgggccacacggagtctacggcctggctcttggctgtgggcagtgtcgcagtgggcctcctctcaagggctcaagggctcactcggtcacatcggcccacatggcgcagctccgctataattcaccggactgcccggtgcaccagcggagcaacggctatctgcgcgcaacggtcgactctgacggatga

SEQ ID NO: 30186 - DNA, 657 bp, Zea mays
  Peptide Sequence Number=SeqID_71965
atggtggccttcaggttccatcagtaccaggtggtggggcgcgcgctgccgacgcccggcgatgagcaccccaagatctaccgcatgaagctctgggccaccaacgaggtccgcgccaagagcaagttctggtacttcttgaggaagttgaagaaggttaagaagagcaacggccaggtcctggccatcaacgagcacatcgagctgctgctacatgtgaaccttgccatccctgagctctctgccggtcgcccaatctctgtgtcaatatcgacttttaatgttactaagagcgatttctatatggaaatgagtatctttgagcgtaacccgacgacaatcaagaactacggcatctggctgcgctaccagagcagaaccggctaccacaacatgtacaaggagtaccgcgacacaaccctgaatggcgctgtggagcagatgtacaacgagatggcctctcgccaccgcgtgaggtccccctgcatccagatcatcaagactgcgacggtgcacttcaagctctgcaagagggacaacactaagcagttccacaacagtgagatcaagttcccgctcgtgcaccgcaaggtcaggccgccgaccaggaagctgaggaccacgttcaaggcttcgaggcccaacctgttcatgtga

SEQ ID NO: 30187 - DNA, 282 bp, Zea mays
  Peptide Sequence Number=SeqID_71966
atgtccggtgcatcagaggactcggacttcaaactcttcgccttcgggaattctcggaagccggcgcgctataaatcaccggactgtacggtgtacaccggacatgtccggtgctccaaggaagagcggcctccggaactcgccagcctcgggatttcattgaagcagcaccgctataattcaccggtttcgcctatccaccccccctctaggcgactttcagatattccagaacaatcatatctaatcgctctttcgcatgctctatatgtattcttttag

SEQ ID NO: 30188 - DNA, 336 bp, Zea mays
  Peptide Sequence Number=SeqID_71967
atgaaggcgaggtcgcagattgcgccgaagcctctcaaggcggtggcgatggcccccagaccgagcggccctaagcggaagccgaggccgaagccggcggggaagggcgacccccgcgcacccaagaagccacccaccaccttcttctacttcatgtatcattttcatctaggattgagattattggttaatgtcattgctgaacttaacatatggcactgggaggattttcggaaggtttataagcaagaaaaaacaagtgtaaaatcaatgcaggaaatagggaaggcatgcggcgaaaaatggaatacgatggcatttgaggagagcggataa

SEQ ID NO: 30189 - DNA, 111 bp, Zea mays
  Peptide Sequence Number=SeqID_71968
atggcagctgataccccgtacccagggctccctcttcttgttcccagtggcaagatggctcccatatccgagatgatattacccgagcatgctctcatcctggcgacgatg

SEQ ID NO: 30190 - DNA, 240 bp, Zea mays
  Peptide Sequence Number=SeqID_71969
atggcgtggcggcgcgtcctcacccagattgcaaggcatcgaccaacaaaagcaatctacaatgaaactagttgcttcctccccctttggggcgctttttcaaaagtgacatcactgcagtgccactattcagtgccattgtttgacatctatatggtcttgttgctcactccaggtgccagaattaaaaatttgcaagagaggaaccagtcaagttacatcggtagccttgcacgccgg

SEQ ID NO: 30191 - DNA, 315 bp, Zea mays
  Peptide Sequence Number=SeqID_71970
atggctcgactagcacctcgggaagacttccgcatcaaccaagcaggggctctgatctcgataaatgctacagagaatctcgaggtcatcaagcgccaggacgatgacgtgccctgtaagcagcctttggcccataccctggagccggccacgcgacacattactggttggttaaggatctgtggtcgaaacactgacaattatctccctgccacctcaacaaaaatatgggagcatcatcacaattcttcacaacatggaagacttgagtcaaatgaccccgaccattgtgatcggaaagattgcgacatttga

SEQ ID NO: 30192 - DNA, 168 bp, Zea mays
  Peptide Sequence Number=SeqID_71971
atggagagggagaaggaccaaaaggaggaagtgggggtcctgcctgaatcgctggcacaacggttgcctgaagagctggaggaggggcagactaaactggtggcagctgaacaccgatctgggactgggactgggtcctcaggggctggacgatatgaaccaaactag

SEQ ID NO: 30193 - DNA, 1617 bp, Zea mays
  Peptide Sequence Number=SeqID_71972
atggcccggagccccggaggtactggcagccacaccgagcacacccagctgccagctttgctgctgctgctgctgcttcctggcacatgcagttctatcatagctgctggcccgcgtgccttcctgcttgctgactcagttgagcaccagctctgctgtctgcgcgcaggacagcgcggtggggcctggcctgcttttgccccagatggatgtgaggaggggttagacttgcatggtgttgtttccttgacaaggggggaagaaagctttagtagcattccagctttaattggtgctggtcaactgacaaaggatggagctcttggcactgcaaatgcacctattcacatggtcacagcagagacaggtcaatttaaggatcagctttggcgtaccttccgaagcattgcactaactttccttcttatttcgggcatcggtgctctcatcgaggatagaggaatcagcaaaggtcttggtctgaatgaagaggttcaaccaagcatagagtctactacaaaattcagtgatgtaaagggtgttgatgaagcaaaatctgaacttgaagaaatagttcattatcttcgagatcccaagtcattcgcgctcacacatttttcagtcacgacgtcctgctcgccgtgctggttgtgctcctcgcctcgctcgtgctccatggtgcgcttcacacgtcttggtggaaaacttccgaaaggagtcttgcttgttggtcctcctggcactgggaaaaccatgctagctagggctattgctggtgaagctggtgttcctttcttctcttgcagtggaagcgagtttgaggaaatgtttgtgggtgttggagctcggagagtgcgagacctttttgctgcagcaaaaaaacgatctccttgcataatatttattgatgaaatagatgcaattggtgggagccggaatcctaaggatcaacagtatatgaagatgaccttgaaccagctgcttgtcgagttggatggttttaagcagaaccaggggataattgtcattgctgcaaccaactttcctgagtcactagataaagccctaatcagacctgggcgttttgaccgccatattgttgttcccaacccagatgttgaaggtcgacgtcaaatcctagaatcccatatgtcaaagatcttgaaaggtgatgatgtggacttaatgatcattgccagaggaacacccggattctccggtgcagaccttgctaacttggtaaatgttgctgcacttaaggctgccatggatggcgcaaaatctgtcacaatgaatgatcttgagtatgcaaaggaccgaatcatgatgggtagtgagcggaagtcggcagttatctctgatgaatgcaggaagctgacagcataccatgagggtgggcatgcccttgttgccatccacacagaaggagctcaccctgtccacaaggctaccatcgtacccaggggggtggccctaggaatggtggcccaactccctgacaaagaccagactagtgtgtcaaggaaacatatgctagcgaaactggatgtctgcatgggaggccgcgtggcagaagagcttatatttggggatactgaggtgacctccggtgcgtag

SEQ ID NO: 30194 - DNA, 249 bp, Zea mays
  Peptide Sequence Number=SeqID_71973
atggccggcattaccaagcgccgcacctccccggcctccacctcctcttcgtccggcgacgtcttgccgcagcgggtcacccggaagcgtcggtccgcccgccgcgggccccggagcaccgcccgtaggccgtcggcgcctccacctcccataactggtaggaataggctgtacaagcgtgaattattgatcacggcactgaaactaacttgccgggaaatccaagtgaccgaaccatactacctgtaa

SEQ ID NO: 30195 - DNA, 1140 bp, Zea mays
  Peptide Sequence Number=SeqID_71974
cccaccgcacctacgcgccacgacggcccaccatcgcctcgccctcgcgcacggacacggtgcacataaaccgcaacagcaggagaccgtgaattccgaggcactcacaggtggaggcgccgacggcctacgggcggtgctccggggcccgcggcgggcggaccgacgcttccgggtgacccgctgcggcaagacgtcgccggacgaagaggaggtggaggccggggaggtgcggcgcttggtaatgccggccatgccggtagaacgacgacgagcggagaaggaaggaagggaggaggtagcggcggcggcggcagcggcagcggcggctagggttggagagggcgaggcttttatagccggatgggggcgggcgggcggagacgcggaggcgggggcgcgcggtgacaagtgtcgggcgggctctgaaatgggtgcaaagtgggggaggcaacgccaacgccccccgtcgggggcgatgccgagggcgcgcaggcgcggccaaccgcgcgcgcgcgaggtggcaagcgccggcccccagccccggatgctgcctgcgccctggtttcccggggtcgcccgccgcccactgctggctgcttgggctcgggacttggtggtggttcgattggacggatggctgggtttcactgccgcaccgagccccggccccggcccccggcaccgcgcgctctgtggcgattcactggtaaaggctgcggtgaagcttaaaagttggggttcgccaaaaatagcagctctgcctctcctgctcctcgactccggcttgctaacttgggacttccatttccgggtcttgaaaggactcaaacaccgcggccagtgctttgtggaggtgcaagtacaaggaagcgccgagccattgttgaggtgtcgtgtgtcggtagttgtggtcgatgtagctgtcgagaacgccgaagaagacaagccgcacaagtcacggacgcagaaggagggcgccatagatgaagacggtgatgtggtcgaggcagtcatagaggaaaaggccccagccaagtgtcagcgtctaaagggatcaacagataagacctccacgacggttgtggtgtggagaagagataagcgtggagatgtatcaaggatcctggagttgcggtg

SEQ ID NO: 30196 - DNA, 261 bp, Zea mays
  Peptide Sequence Number=SeqID_71975
atggagcacagggagcagaggacgcgaccaaagaaggcaagggcggggccaacggcagcctgcgcagtgggcgggcctgacgacagcggaggcgccgaaggtggagggcgcgaccagagaggggtgggcccgacgacggcgggcgcagccgaagcagagaggggaggggccgacggcagcctgcgcaggggagactggcggagtgacagagcatttacttatgttggtcacaagtcctgcggctacgccaaaggttcttaa

SEQ ID NO: 30197 - DNA, 573 bp, Zea mays
  Peptide Sequence Number=SeqID_71976
atgaccaagcaatccaagctctcacagagtactattctgaagttcttcctccaagtaatactcctggggtggccattctggacatgtgcagcagctgggtcagccattatcctcccggttacagacaagagaagatcgtggggatgggtactgactcagtatgtcgtgcaagacctcaatgtgaacccaaagcttcctttcgaagataacacttttgatgttatcaccaatgtggttagtgtagattaccttacaaagccaatagatgtttttaaggagatgcgacgaatactcaagccaagcggccttgccataatgagcttttcaaaccggtgcttttggacaaaagctatatctatatggacctcaactggtgatgctgatcatgcatggatagttggtgcttacttccattatgttggaggttttgaacctccccaggcacttgatatatctcctaatccaggacgaactgacccaattgctatcaagaaacaaatagaaggaaaaatacaagaagcaagttgtttggccctgatcgcaggacctattggtgagctgatgtttccgtga

SEQ ID NO: 30198 - DNA, 498 bp, Zea mays
  Peptide Sequence Number=SeqID_71977
atgaatgaactggacttgaatacagctgctcttgatccggatcattatgctacaggattgagagttcttcttcagaaggagctccgaaatagcgatgtaagccagcttgggagaattgttctcccaaagaaggaggcggagtcttacctccctattctgatggcaaaggatggaaagagtttatgcatgcatgacttgctaaattcacaactgtggaccttcaagtataggtatattggttcaacaacaaaagcaggatgtatgtgcttgaaaataccgggtgacgagatattcgacggcatactgaactccctgccggagataccagtggcgaacgtgaggtactccgacttcttcgacccgttcggtgactccatggacatggcgaatccgctgagctcctccaataacccctcggtcaacctggctacgcatttccatgacgagaggatcgggagctgctcgtttccctacccaaaatccgggcctcagatgtga

SEQ ID NO: 30199 - DNA, 801 bp, Zea mays
  Peptide Sequence Number=SeqID_71978
atggcttcaatgttaaacattgtcataggttctcatgtatgggtggaagataaagacttgtcctgggttgatggtgaggtattccgaattgatggtcaaaatgcccatgttcacacaaccaaggggaagacggctgtggtgcatccaccttttagagaaaagagggttgagggggttgggggaagggttttcaggtctctgttcactttcaaaggaatatcaggatttgagaagtgtttcaaggtcattgcaaatatctcaaatattcatcctaaagacacagaagcaccacctgatggggtggatgacatgacaaggttatcatacttgcatgagcctggtgttttagataacctggctgtcagatatgcgaaaaatatcatttatacctacactggtaacattctgattgcaataaatccattccaaaggctacctagtctggttgatgcccttactatggaaaaatacaaaggtgcaaatcttggtgacctagatcctcatgtatttgcaatagctgacgccgcttacaggcaaatgataaatgaaggaaagagtaactccgttttggtcagtggtgaaagtggtgctggtaagactgaaactacgaaattgttgatgagatatcttgcatttctgggtgggcgatccggaacaggagagaggacagttgaacaacaagttttagaatctaatccagtccttgaagcctttgggaatgcaaaaactgttcggaacaacaactcaagtgtttttaaggcattgcctaggcgacgcctaggcgtccaggcgctcggataa

SEQ ID NO: 30200 - DNA, 543 bp, Zea mays
  Peptide Sequence Number=SeqID_71979
atggcgcgtgaagaggttccagaggatccggagatatggggtttccgctcagtcggtgctgatgacaaagatgttgaagattttggcgcgtggaccctggagcattctgatgggcctggcccatcccttctcccagcttcgccagagcagccttgtgcgacgtctggccacgacgtgtcgcaacctgagcttccaaagattccagacgtgcctgcagtttctcagctgctccctcaccctcctgtcaagaaaaggcagttcaaggcacatgatgttactctcccccgccggagcagaagggttgctgaggcagctccgtggtcgccagggccaattgtttctgaagcacaaaagagggtcatcaagagcttgggttttgctgctcaaaatgaaaaaattagccaggaagctcaggatgcttacaacaaattatttgtcaaccctgcctctgatgcccacatggtagcattggcatccatctttggttggacagttgatgagggggaggagatcaaatcagtggatctcattgccgggttctga

SEQ ID NO: 30201 - DNA, 666 bp, Zea mays
  Peptide Sequence Number=SeqID_71980
atgaagcagctaatgctgcagttgctgaatctcaagcaagaagtgaagcattgtttgtatcttgtggttgaatgcagatttgaagaagctacaaaaaatttggaatcttcactaacatttgagaagcaacggcatcaggcaaatttgatagaattagatgaagcgcgagaaaagattgaagaacttcaaagagaagttggggacactgatgaaaaatccaccctgcttcagactagtatacaaagccttgaagaaaggttaggagagaaggatgctctattgacaacagaaaggctagaaagtgaagcaactaagaaatcgctcaatgaatctgaggatagaaacaaggacttactaatgaaaattgaagttgctgagaaagacattgctcacttccaagaaactgtccaaagaaatgaagaaaatatggcagcactggaaacttcgttgagatctgaaaggcagcaaaaggatgcaatcatgaaacaactagctgaatctcagggtgaaataggagagctgcaaaggaagcttgaagatgctgatgccagaaatgggcttcttcaagattctttgcagaggttccattcttaccttaaattgatatcctgtgtgatgtctcaattgcctagttatccttctgccaaatcacacatcatgttatga

SEQ ID NO: 30202 - DNA, 1305 bp, Zea mays
  Peptide Sequence Number=SeqID_71981
atggaattgaagctttttttctttgatttaggcactctattctcagtttctccccatcattcatggaacacaacagcatcaggaggagccagatcagatggtcttgggggcccttcaacctctaatgctcgaagaataaggcgaagaagcattagcattacacctgagattggagatgacatcgtgagtcgagatactgttattgagcatgaagcatatatttttaagatgggcctgtttaacagggcagttcgggctatgaacgaaacacaaaagcaaaatcgcctccaaagggatcatgtcgaaggttcatgctcatatgttatggaagatcaaagcaacaccaatgactgcccaaataaagatgatgcatcttggagaattggtgctactgacagtgactcaagaaaccgaactggttctactcagaaggccatgtcactaccttcttcgcctcatgaatatagaggattctttggagaagttttccgtggtatatggaatggaactgatgttgccatcaaagtgtttctagaacaggatttgacaactgaaaacatggaagatttttgcaacgagatatacatcctcagccggttacgacacccgaatgttatattgcttcttggtgcatgcattacacctccacacctgtcaatggttactgaatatatggaaatggggtcactgtactatctcattcatatgagtggtcagaaaaagaaacttagttggcgtaggaagttgaaaattattcgtgatatatgcaggtctaatgtcactgagcaatttgaccataaacggcatcatggtatttttttctcgaacacgcagaagaggtgcatatcattatattacgaagaaaataggagatccaaaatggaccagatagttcacagggatctcaaaagtgcaaactgcctggtcaataagcattggactgtcaagatatgtgactttggtctatctcgactgatgattgatagtcctatgaccgataattcctctgctggcaccccggaatggatggcccctgaacttatacgtaatgaacctttcacagagaaatgtgatatattcagccttggtgttatcatgtgggagctgtgcacattgagtcgcccatgggaaggcatctccccagttcaagtggtgtattcagttgctaatgaagggtcacggcttgagattccggaaggacccctcggcaggttaatcgcagattgctggtctgagcctgagaatcgaccgagctgccaggagatcctaacccgtctgctagactgcgaatatactgttagctaa

SEQ ID NO: 30203 - DNA, 204 bp, Zea mays
  Peptide Sequence Number=SeqID_71982
atggcgagcatcagtggaagggtggccacgggcgagcgacgggggcaaggcgtgaacaagatgttgcacacgcccaccgcgggaaccgtcggtatggcgagcatcaatggaagggtggccacgggcatgatcgacggcttcgattattgtgcaatagtcagagacatctttatggttctatctatccatgaattatgcgtttaa

SEQ ID NO: 30204 - DNA, 561 bp, Zea mays
  Peptide Sequence Number=SeqID_71983
atgcttgccagcgcgacgagagcagggacgtcgtcgacgaccaagcccgaccacgcggcgggcgccgtccacggagccggagccggagccggcggcacccccatcgtcgtcaccgacggcgggcaggaggtcaccgtctctcagttcgtcgcgcagctaggtttcagctgtgttttgacagatgaggcggcgcggcggaggctggacagcatccaccagaggttgaggctgctggagcagcagatggagacgctggaggccgagtggcgcacggttctgccgtctccctccgcgctccctccacgctgcatcaacgcccgcagtgcctctgcctctcaccacgccccttcccccgccgcacccctccaccgcgccccttcccccgccgcgccagaaagcgtcgcggatccaccgtacgcccgccctggcaccgtggttccacgccttggatccaccaccacctcctcctctccccataactgcgtcgtctgcccccgcccgtacacctccaccgcgcccccgtctccggcgtcgggagcgagacccccacggcggcagtga

SEQ ID NO: 30205 - DNA, 648 bp, Zea mays
  Peptide Sequence Number=SeqID_71984
atgatggcaaggacacagaagaacaaagccactgctcaccatctggtctctgaaggtaacttgaaatatactctaatctttatcttagaactcttacctatgcaaaaaggggtcaacattttgaagcaagaaggggtcaaatttgggagctttgacatccttacagataatgatgttcgtgaaggtatgaagaagttctccaactggcccactgttcctcaactctactgcaaaggcgagcttcttggtggatgtgatattgttattgctatgcatgacagtggtgaattgaaggatgtttttgaggagcacaatattcccctcaaaccacagggtagcaaaaatgaagaagcaggtcagcccgagtctgcaactgagaagggtggtgcagttgctgaaccaatcgggcttactgatgctcagaaagctcgtttggaaagccttattaattccagcccagtgatggtattcatcaaaggtacaccagaggaaccaaggtgtgggttcagtgggaagttggtccacatacttaagcaagagaatattcctttctcaagttttgacatcctttcagatgatgaggttagacaggggctgaaagtgctctcaaactggcccagtttaccctcaactgtacataaaaggtga

SEQ ID NO: 30206 - DNA, 1263 bp, Zea mays
  Peptide Sequence Number=SeqID_71985
atggactcactccttgcaagtttggactggaggaatgagtttggtccgcctgttttgcaaagaatgggtagcttcagtttattatcaccggtagttcaatctaataagaatccaaaagctgtgacatcggcagtagcagcatgtaaacatgaatctggccttctctcaattccttctcatggcattttcatcggctcgcaaaaatcgccaagtctactcaaatcaaccaatgaaaccaaggggatggaggtgcaggtgctggatttgtcttccgattccgagggcgaggtgtcggcgcactcgcccgatcacaagcgcccctctcagcagccgggtgtagaccccaatcgccgggttggcgacaatggttccagcgccgtggacagcctcttcgaggaagcgggcgcggcgaggccaccgcgtcaccccagcgacgcgctgaacaaagggaaggagaaggtcgtcgatgtggagagcgtggagtctccaaagcacggtggggaatcgctcggtgctgctggccgcgtcctgggagctgggagtgatccgtggagcgcactggtgagcaagtgcaaggctggggacagtgggaataatggaactgagtgttgggatagttggggtgactggggtgatcagcttactaactcggcccccgtggcgcgtctagggtcagagaggacggggtttcatgagacatatgaactgcgagggacgcctcagcttcacagtgactcttcagcattcagtgaccagtggaagggtattctgggtgcaagccctgctgatcctgtcaactcactgtggtgctccagggatactagcatgaaagatagtgaggatgaaaccttgtctcaaaggtctgtgtctgttcgtgaaatttctagctgtgattattttcttaccgaagatagtagctcgtcatggctgtcgaaggtcaaggggctgaacttcccacttcctgatgagcatcagttgagaaccaggcagattgagaatgatgagatgtttgcccgtagacttcaggagcagctcaatcagcaacagccaggatctcagcattctgaagcggttgttacactggactactcaagccttaatgttgataaaacaatagcctggacattacatgagcaagatgctgagcatgccagatttgctgcaagagaagtccagtctagttctgttttttttttgaaagttatggaacgcattatcaagctggccaagagctatgtgttgaaacggaagaggatggcataa

SEQ ID NO: 30207 - DNA, 255 bp, Zea mays
  Peptide Sequence Number=SeqID_71986
atgtcgcatcatcctttgttgactttattgccgtcagcggggcaagcgttggtacaggctgcatttaatgcgcacgtttgcgcctgtgagaacttcggccgtgactgggttcgtgtagagatgtcaatggatgaggcagcgcggcggaggctggacagcatgcaacggaggttgaggctgctggaacagcagatggagacgctcgaggccgaggtaggagaagccaccagcagtagaatgcacacctacgcctag

SEQ ID NO: 30208 - DNA, 444 bp, Zea mays
  Peptide Sequence Number=SeqID_71987
atggccgctggagccagcgactatttgacggtggagtaccactccagagactcccctctttcccctccgacgacgagggagccaccggcggcagcggcgtcctcgtacaccacggtgggcacgtgcctcgtggacgtcgacggagacgcggcgtgcctgcccctcgtcctcctgctccttgtcttctccgccgccccgtctcctgctcacggctgcgaccgctgcgtgcgccggtccagggccacctattaccaggcctcctcgctcgccctcaacggtggggtcgtccaactggcggttcatgtcgcgggaccacgggccggcgtggagcacggcgcaggcgccgctgtagttccggctggtggtgaccggtggctacgacggcaagtctccgacgtcgcgcaggaagggtgctacctctgcgacacgcgcaagtggcagtga

SEQ ID NO: 30209 - DNA, 645 bp, Zea mays
  Peptide Sequence Number=SeqID_71988
atggagtcgacgagaagaaaggagtgcctgccagtcagggggaaaaggaagacaacaacagagggacttcatataaggggattgggagaaagcagcggcatgggcgctgcggtggaaggacaggaacacagtgggatgacgctgttatggacacggagcacacttagaggcacggcaaggcgcggatttatcggattttggaatccggtgaacagccgtcacatgccgatccaagctctagttccagttagcgacaaggatgcccaggcggacgcccccaggtccgccaactgcaacggctcggcgaccggcgcggacatctttgagagccccgccgtgcacgacgctattgcgcacgcgtcgctgcgcgagaggagaagcttcgtgatatacacaagtgcttgttgcatgtctgaagagaagaagatgtctaaggagaagaagatgtctgaaaagaagaagatatctgaggagaagaaagttgtggacccttttcttgctaggttttacgaatctatggcaaaaacaaatacaaagaagattacaaaggaaataatggtggatttgtctgaagattctgacgatagcgatgactatgatgtggaaagtggggatgaagattctgaagaccggccctgcggctaa

SEQ ID NO: 30210 - DNA, 864 bp, Zea mays
  Peptide Sequence Number=SeqID_71989
atggcctgtatagcgaaagggatgggacaacgcccataccgaaagctgatcagcagcatgatggggagtgacgcaagaatcgagaggggtccgtcgggggaggtttggccactgggcactgaccaagaaagagtgatgactgatgagcaccccccagcccagctgccgctcaaagcgacaggtggagatcggagggaggaagaagaactgagctgcggatcgagggaagggaacaagcaagcagccagagccaggtcgtggggagccggcggcagtgatcttcttgcgtcgaaggcgaggccggagcgtcggtttgagcgctcgtgcgatatgggggagcaggagaacaacaagatcggcggcagcggcaacgacaacgccatggcggtggacgaagcgggcgcgggcgcggccgcgaacaaggggaagagcctcggcgccgcggacccgcgcctgcaggccatttccgacgccatccgcgtcgtcccccacttccccaagccagggatcatgttcaacgacatcacggagctgctgctgcggccgggcgtgttcagggacgccgtggacatgttcgtcgagcgctaccgcggcatgggcatcgcggccgtcgcaggcattgaagctagaggattcatctttgggccagccattgcgctagccataggagcaaagttcataccactacgtaaacctaagaagcttccaggtgaggtattttctgaaagttatgtacttgagtatgggatggattgtttggagatgcatgttggagctattgaacccggggagcgcgtagtggttgtcgatgatttggttgcaactggtggaactctttctgctgcaataagacttctcggttag

SEQ ID NO: 30211 - DNA, 2073 bp, Zea mays
  Peptide Sequence Number=SeqID_71990
atggcagcgcaagtggcggcggtggtggtgccgaatgggagcccgggcgctgtccccgcggtggtgtcgccgggagcggtcggcgtcggactcggcgtggcgcagccgctcccgaccacgtcgctctacgtcggcgacctggaggggtccgtctcggactcgcagctgtacgagctcttcagccaggcggggcaggtggtgtcggtgcgcgtctgcagggacgtcacctcgcgccgctcgctcggatacgcctacgtcaacttcaacaaccccttggatggaatcctgcagaagcacacatttggttccaggcaagctgtcctcaggttctgtgctgatggaacttttttcttgacatcgtggggttgtgattttggcttgcctgggttggcaaggcaagtacctaacattttactgtcaaaaaggcttgtgagggctgattcactattccatgttacagctgcaagggcattggaagtgctgaactttgctcctcttaacaacaaacctatccgggtgatgtattcaaaccgtgatccaagtagccgcaggagtggatctgctaacattttcataaagaatcttgacaagatgatagacaataaatcccttcatgagaccttttcttcatttggtaccattctctcatgtaaggtagccatggatgaaggaggccaatccaaaggctttggttttgttcagtatgaaaaagaagaagcagcacagaacgctataaaaagtcttaacggaatgcttataaatgataaacctgtttttgttggaccttttcttcgcaagcaagaaagggatcactcttttgacaagacaaaatttaacaatgtcttcgtgaaaaacttgtctgagtctaccacaaaagaagatttactcaaaatctttggtgaatatgggaatattacaagtgctgttgtgatgattggcatggatggtaaatcaaggtgctttggtttcatcaattttgagaatccagatgcagcttcccgtgctgttcaggaacttaatggtaagaagataaatgacaaagagtggtatgttggaagagctcagaagaagtcagaaagagagatggaactaaaaaggagatttgagcagatcttgaaagatgctgctgacaaatatcaaggactgaacttatatctcaagaacttggatgatagcattggagatgatcaacttcgtgaattgttctcaaattttggcaaaattacttcatgcaaggtgatgcgtgatcaaaatggtcttagcaaaggctctggatttgttgctttctcaactcgtgaggaagcatctcaggctgcacagttttctcagatgcgccctgctgtaccaatgacacccactctagccccgcgccttccaatgtaccctcctatggctcctcagcaactcttctatggacaagcgccacctgctatgataccccctcagccaggatttggtttccagcaacaacttgttccaggcatgaggcctgggggtcctcatatgccaaattattttgttccagttgtccaacaccaacagggccaacagggtccacgcccaggtattaggcgtggagctggagcccagggtcagcaacctgtgccaccatttcagcagcagattgttccaagaggacggatgtaccgttacccaactggtcgcaacatgcctgaagctccggcgatgccaggggttgctggaggtatgatgcaggcatacgatatgggcggcttccctgtgagggatgctgccttatccccggctgcccaaattgggactctgacttctgcccttgcaaatgctaatcctgaacagcaaagaacgatccttggtgaaaacctatacccactggttgagcaactggaaccaaaccaagcggcaaaggtcactggaatgcttttggagatggatcagactgaggtcctccacctgcttgagtcccctgatgccctcaagtcaaaggttgctgaggcgatggatgttctccacaatgtggcccatcagcaaaacgcaaacaccccgaccagtcagcttgctgcattatcactaaccgaaggcattatctcctaa

SEQ ID NO: 30212 - DNA, 1218 bp, Zea mays
  Peptide Sequence Number=SeqID_71991
gacaaagacgacgaacttgaggcaaaatttttcgaggagagagctgctctagaagctaagtatcagaagttgtatgaaccactttactcaaagcgttacgaaattgtcaatggtgtggtcgaggttgagggtatcacagtagaaagtgcagctgaaacccctgcggagcaaaagactggagatgagacctctgctgatcaaaaagaagaaaaaggtgtaccagctttctggcttaatgcaatgaagaatcatgaaattctagctgaggagatccaggagagggacgaggaagctctcaagtacctcaagaacatcacgtggtataggatcagcgagccgaagggctttaagcttgaatttcaatttggtacaaatccgttcttcaagaattcagtgcttacaaaaacatatcacatgattgatgaggatgaaccaattttggagaaagccattggtactgaaattgaatggtaccctgggaagtgcttgacacaaaaggtgctaaaaaagaagccacggaagggttcaaagaacactaaacctatcacaaaaactgaagattgtgagagcttcttcaacttcttcagtccacctcaagtccctgatgatgatgaggaaattgatgaggatatagctgaacagttgcagaacgaaatggaacaagattatgatattggatctaccatcagagacaagattatcccacatgctgtctcgtggttcactggagaggctgctcaagatgaggagtttgaagttatggatggtgaggatgacgatgatgaagacaatgatgatgaagacgaagatgacgaggatgatgatgatgatgatgattacgattcaaagaagaccaagggaactgccggaggggaagggcagcagggcgaacgacctgcagagtgcaagcagcaatattatatgtgttcttatgcttggagtgaagatggttgccactctggagatatgctgcccagtgagcgcgctaggcctcatgggggtaactgcgtgaagattttatttttgtaccgctctagcgttccagactccatttcagaagttccggaattcatcttggtctttagaaataaagaaagcagatttgtgaactttaacgccagccaccgttactactgctcccagccgacgttccaggggccactcaggaaggaacagacggctcctggtctacaggggttgtctccacttctctattga

SEQ ID NO: 30213 - DNA, 1089 bp, Zea mays
  Peptide Sequence Number=SeqID_71992
atgatgctggtgaagagcgagatcgagagctgctacccggggaggccagcgcacccagcgtggcatcgatggacgggtcggtttgaggcgcatctgtgggacaagaactcgtggaatccgacgcagcggaagaaaggcaaacaggtgtatctgggagcttatgacgaggaggaggctgctgcgagggcctacgacctcgctgctctcaagtactgggggcctaccacctacacgaacttcccggtcatggactacgagaaggagctgaaggtgatggagaacctcaccaaggaagagtaccttgcatcgctgaggaggaagagcagtggcttttcaagaggagtgtctaagtacagaggggttgccagacatcatcagaacgggagatgggaagcgagaatcgggcgcgtcttcggcaacaagtacctctacctaggaacttacagcacgcaagaagaagccgcccgcgcatacgacatcgcggcgatagagtacaagggcgtgaacgcggtgaccaacttcgacctgaggtcctacatcacgtggctgaagcccagcgctccgccggccgccttcaaccgggaggcgctcgtggcgcaggcagcgccggccgagcagctgcagctccaccaccacccggcagagacggcccagatgctcccgcgaggcaacccgttcctgctggaccacatgaccagtagcggcggcggccaggaggcctccatgtccacggtgtctcccggcggcatgaggaggcgaggctcctccaccgcgctcagcctcctgctcaagtcgtccatgttccggcagctggtcgagaagaactccgacgccgaggagggcgccggggacggggaggcggctgctgctgctggtagtggtcatccagggccaggagacgcctacgagtaccacaactttttccagggagaggcgcctccggacatgtgcgacctcttctcgtcaggcggcggcggcggcggcggccacgcgcgggttgctgggttccatagagacatcgccgcgtgctatgacggcgaggggctggatggctggagtgggtttggcaacatgccttctctgcaatag

SEQ ID NO: 30214 - DNA, 210 bp, Zea mays
  Peptide Sequence Number=SeqID_71993
atgagaggatcgcttagtcctcggcgacggggtgcatcagtggctgcctactccgacccccaacgtctgcccctcgggaactgcctcaccgtcgacgctcttgagcctgagtggcaatcgggtggtccgtcggctagtgcaccacctttccccatggccgcgcgcgccgtggtggtcgtggtctgcgacaacaagaccattcgacgatga

SEQ ID NO: 30215 - DNA, 183 bp, Zea mays
  Peptide Sequence Number=SeqID_71994
atggctagatacgtgagcaagaagttctgccagcagtacaaggcgagaatactcatcggcgacaggctcgtcaccttgcaggtggtatggttcatgcccttgttacgcagatatgggacacggcggggcgttaaatttgtcctctaccgattcgtactctttgctaaacgtctaaacccgtag

SEQ ID NO: 30216 - DNA, 423 bp, Zea mays
  Peptide Sequence Number=SeqID_71995
atgccaagtcagcgtgaacagtacgggggggaccggtatctgaagccgttcgtgattccaaaaccagaggtcacggtcgttcccagggcgaaagatgacgactgtctcatcctcgcaagcgatgggctgtgggatgtggtgacgaacgaagaggcatgcaaagctgcgcgccggcaaatccaagtgtggcacaagaacaacggtgccgctggcgcatcgtggtcgttgtgcgacgagggtgatggatccaccaccgaccccgctgcccaagccgcagcggattatctcgtgagggtcgcgctgaagaagggtaccgaggacaacgtcaccgtcatcgtggttgacctgaaacctcgaaagaaaagctcaggagcaactcgtagcatcgggcgttctgggtccatcacagtagagctgagctga

SEQ ID NO: 30217 - DNA, 110 bp, Zea mays
  Peptide Sequence Number=SeqID_71996
atggcggacaccttctccgtcagcctgtggttctttatttccgcagccgacttcatcccgaacagcatgccgcacggtgtgcccggagacattagacttcgcctctggag

SEQ ID NO: 30218 - DNA, 270 bp, Zea mays
  Peptide Sequence Number=SeqID_71997
atgagcgacggcaaggactccctcgacctctccgccctcggcgctgccatccccaactcggccgagctcagcgcggaggacaaggctaaccttgtggcgtcgatcaagaacacgctcgagggattggcgtcgcggcataccgacgtgctcgagagcctcgagcccaaggtcaggaagcgcgtcgagaagctcagggagatccagatacttgtcacagtggtatgggtggtgcacactagcaccggaaattccaacgctaataggatctag

SEQ ID NO: 30219 - DNA, 853 bp, Zea mays
  Peptide Sequence Number=SeqID_71998
ggacgagttcagcctcgagaccaggtccaccatcggcgtcgagttcgccaccaagactgtccaggtcgacgacaagctcgtcaaggcgcagatctgggacaccgccgggcaggagaggtaccgcgccatcacgagcgcgtactaccgcgggcccgcgacgcggtgggcggcgctggtggtgtacgacgccatccaattttttttctctctaaccatttcgaatacccattctctaaatcctggcacgcccctggtgccccgccgcgtcaccttcgacaacgcggagcgctggctgcgggaccacacggacgccaacatcgtggtcatgctggtgggcaacaaggccgacctgcgccacctgcgcgccgtgtcacccgaggacgccgcggccttcgcccagcgccacggcaccttctccatggagacgtcggcgctggacgccaccaacgtagagcgcgccttcgccgaggtgctccgccagatctaccacgtcgtgagccggaacgcgctcgacatcggggacgaccccgccgcgccgtccagaggcaagaccatcgacgtcgacgccgccaaggacgagaggtctcgcctgttagggatgaaaacgggacgggaaattctcgaagctgagtactcccagtcacaacaaaacaatgctgtcgtcttgcagatggggcacaagttcttcaccatcagccactgcttcacgcactccgcgtgcgtcaacagatgcacactaaacattattcaagctaccagtggaagagaagtgatgcaatcagccatcaaggctgattgcaaggcgatacgagcccagcagctgcaatgtttatgtcaaacctggggcaggtag

SEQ ID NO: 30220 - DNA, 189 bp, Zea mays
  Peptide Sequence Number=SeqID_71999
atggccattggggaggttgtctgtcgatgggcgcaccggacagtctggtgcgccagccgcgtcacccaaccgttagggttcgaccgttggagctctgtcagcctgggccaccggacagtccggtggtgcacaggacagtcactgttcactgtctgtgtaccgcaatgcataaataccttcgacgtgtag

SEQ ID NO: 30221 - DNA, 330 bp, Zea mays
  Peptide Sequence Number=SeqID_72000
atggcgagcacggggcggtcgatgctgctgtcactgctcctcttcgcagtgacgctgtcgctgctggagatgtacagggccaagttcgcctcgtcggagctcatgaccattgccggtggattcgtctgctccctcctattcctgctactcctcacctttattggaaactatcaagaagctagtggagatagaactgggtggggtgcagttgttgtagcacaacttgtagctcttattgtagccggcactgtccaccgtgtctgtatcacaacatggaaaagaaaacaagtcacttgtttaggtaaaggagttggaacctcgaattgttaa

SEQ ID NO: 30222 - DNA, 102 bp, Zea mays
  Peptide Sequence Number=SeqID_72001
atgttgcgggcttggggaatctctatagctccaggaacaacccaacacagctcatcgggtgatccgccagcggtggcgacccctgccctaccaagtggatag

SEQ ID NO: 30223 - DNA, 549 bp, Zea mays
  Peptide Sequence Number=SeqID_72002
atggcccagtcattagcattcatcggaggtgaaaccttcacaccagggagccgcatcacctttggcaccctcgacttatttgccaccttcaccggcgagcttagcctcgtcatccacggcatgcccgacaccaagggcacgcaactgacatgctccaccgggagcaaggtagagaagcggcacctaaaaaggcgcgtcgccaccctaaagcggtgccttaataggcacaacaagacaaagatggtggaagccccgtcctcgacccttgtggtggtcatcgaccgccaaccaacatccgttctcgacctgctcgaggatgactcgaggcatggttcgaccgggatcaactctaacgccgaggaggcactaaaaagggaggagctcgactccctcgtgcagaaactcgaccgcgtctacgatgatgtcgagcggaggtgccttgaagctgaaaggccccgaccgaagaaggaggaagttgagcagccacgcgagaggatacgcgagcgcagtcccaccctgttggggtcgggacctcacactttcgggtag

SEQ ID NO: 30224 - DNA, 393 bp, Zea mays
  Peptide Sequence Number=SeqID_72003
atggcgaacccagtggagaaaaatgggagcgtcgggagcaccccgataagcgccgaacgtcgccaccgtccccggcgcgatgaagaggaagttgccaccgtaggtcgaccaccaaggccactggctaagaacggcggtgaccatttccagaagctgatggactcgctgtgtcaaaaccatggctttcccatcaggcacaagctctgggagtgcgagctcctaaagcgctttatctccaaacctcccgccaaaaaggcaagaccggaggaaccgacaaaaccaacagaacaggaggtccccgctgatgatttccccaagccaacagggttcctcatgatcttcgatggtgccgaggcctacgacgataagtgccgcatcaaggccattcattga

SEQ ID NO: 30225 - DNA, 1572 bp, Zea mays
  Peptide Sequence Number=SeqID_72004
aaggcggagtacttcaacatccctatcccctcttccattcggtatgaaggcaagtggttctatgtgagcaacgtggctgcgagcggtccgtcgttcacctgtcgtgagctgatgtcctcagatgaatggtcgatgcatcaatactctagggtcgacgaccatgaccatcattcccctgcacggctcgctctatcgaagattgaggccagggtcaaggtcgttacggcgttatcatcgggatccttcatggatgaagacctgctccctcccgtgtccaaagacgttgtgagcactctggtgagccccttctccctggtgtgttgcttcatttctttccttctcccttttcctctgatgtgcgctctattggggatcgaacccttggtggtgtgccttccaccccttcctgaggtcgccatcatcgaggaggagcgaaagcgaaagaggaacgcagattgtgagaccttggcggagcgttccaggcgcgtccgagaaaataaggagaaggggaaggccccccaacccatctacgcagagttggggaggggcggattggtcaatgatcccatcactcttgcgatgcccctagaggttcccaccgaggccgctgagactgggacgcgcgtcgtgagcagcagaccaagcggcgccaaccccgcttgctcctacaccgacggcttcgaaaaagatttggtccttgtttcctgcttcgtcttttctggtttccttgctttggttactgtgtatgtgttgtgcaagtcagtaaaggatgccgccacggcggtgaggagagggcctccggctctttcgacccctgttctttctgtggtggacggagcaaccactgatgaagtacctaggtcgctcatgccaatcctcctgcctgtccaaggggtgctggtggcgccaactcccgatgcctgcctcattgccgcgcctccctctgtggtgtcctcgagggggatttcagccatctatttgtctcccctcagcggagcttcaccagaggggaaaggtgttctggccatgctaccatcgctgccgtcccatggtggtgtggtggaggacgtccttctcctccccctgagatgtgggggcatggaggatctcagccttggcactatcgaggagacgctcgatagctttcgaaacatggtctcgattgctcaggcgttgatgacatgggatttcattccctttgggcagaagcttcatgtggcggtcgcccattctgtggcgaagaagcgtaaactgatcgagctccactctagggccgagcgtcttgagagcgaggaggcccaacttcgttctataggcgagggtgcccggattgaagctggtcgcctacgtgaggagatccaacttcgggtggcccttcgcgaggcgagtttccgaatcggcgaggtcgagccttcccttgagctccgaaagatgcattctcgggctgatgacgccaagaggacatctgaggagatgaaggcggtggctgaggcccggctgcgagagctctcgttggctcgcaatggtgccattgctacatcggtcgaggtggctaatgcgcttttcgagtga

SEQ ID NO: 30226 - DNA, 414 bp, Zea mays
  Peptide Sequence Number=SeqID_72005
atggccaagaccgctttcaatgaaggtaacacgaataagtcacccagacagtcaggccgctgcgccccgcgagaagtaagtaaaaaggtttacacctaccaaaaatcacatcagttaacacaggaagaaccaccgccacaaaaatctacgaacacgaaaggcgccaacaaggtgacgctagactttaggggtcggcggtggcaaaaggtgggagcacacttggctgacaaccaggcgaaacccctgaagcttgacgcttcactcgaaaagcgcattagccacctcgaccgatgtagcaatggcaccattgcgagccaacgagagctctcgcagccgggcctcagccaccgccttcatctcctcagatgtcctcttggcgtcatcagcccgagaatgcatctttcggagctctga

SEQ ID NO: 30227 - DNA, 321 bp, Zea mays
  Peptide Sequence Number=SeqID_72006
atggcgctggggagcggcggcggtgtgcgtggactcccaggcagcggcgtcggatgctctcctggaggcggcgggagttttccaggaggcggcgatgtggactcccaggcaggcggcgtcggatacttgtgcgaggcggtaggggatctagcggtcgttggagctttatttggaagctctcagtcttctctatctgctggtgtactggactgtccgatggtgcatcagacactacaaagtgtaacggtcaacagatgcatgattggccattgttcgtttcaggcgggcactggactatccggtgcaccatttgaccgttga

SEQ ID NO: 30228 - DNA, 147 bp, Zea mays
  Peptide Sequence Number=SeqID_72007
atggggaggaagagggtagctgttaggaaactttctgctagtaggaaagatggttgcaataatcctcctcaaccgtggaagatactgccatggatggtactaatagggttcaagatgattcctttatgtaccaccctagaatgctaa

SEQ ID NO: 30229 - DNA, 1365 bp, Zea mays
  Peptide Sequence Number=SeqID_72008
atgtactgctacgttactatgccattcggtttggggaatgcgggtgcgacataccaaaggtgcatgaaccacgtgtttggagagcacattggtcgaacgatcgaggcttatgtcgatgacgtcgtagtcaagacaaggaaagcctccgacctcctctccgaccttgaaacgacattccggtgtctcaaggcgaaaggcgtaaaactcaatcctgagaagtgtgtcttcggagtcccccgaggcatgctcctggggttcatcgtctccaagcggggcatcgaggccaacccggagaaaatcgcggccatcaccaacatggggcccatcaaggacttgaaaggagtacagagggtcatgggatgccttgcggctctgagccgcttcatctcgcgcctcggcgaaagaggcctacctctgtaccgcctcttaaggaagaccgagcgcttcacttggacccccgaggtcgaggaagccctcgggaacctaaaggcgctccttaccagcgcgcccatcttggtgccccccgctgccggagaagccctcttgatctacgtcgccgctaccactcaggtggtcagcaccgcgatcgtggtcgagagacaagaagaggggcatgcattgcccgtccagaggctggtctacttcatcagtgaagtactaaccgagaccaaaatctgctacccacaaatccagaagctaccgtatgcggtaattctgacgcagcgaaagttgcgacactacttcaagtctcatccagtgactgtggtgtcatccttccccctgggggagatcatccagtgccgagaggcctcgggtaggattgcaaagtgggcggtggagatcatgggcgagacaatctcgttcgcccctcggaaggccatcaagtcccaagtcttggcggactttgtggctgaatgggtcgacacccagcttccagcagctccgatccaaccggaactctcgaccatgtttttcgacgggtcattgatgaaaacaggagcgggcgcgggcctgctcttcatctcgcccctcgggaaaaacctccgctacgtgctgcgcctccatttcccggtgtccaacaatgtggccgagtacgaggctctggttaacgggttgcgcatcgccattgagctaggggtccgacgcctcgacgctcgtggcgactcgcagcttgtcatcgaccaagtcatgaagaactcccattgccgcgacccgaagatggaagcctactgcgatgaggttcggcgcctggagaacaagttcttcgggctcgagctcaaccacatcgcccgacgatacaacgagactgtggatgagctggctaagatagcctcggggcgaacaaaggttctgaaagttgcctag

SEQ ID NO: 30230 - DNA, 978 bp, Zea mays
  Peptide Sequence Number=SeqID_72009
atggggaccctggggagagctgctgctgagatgcatatgaagaagctaacctacatcggtagctggactgctgtatctacggagcatttgaattttgaaatgtggttggtggtgaacaagacaaactctgaagtagtccttaaatttgatgataaggagttccattggaagcaaaatgaaattaaaaggaagcaactcctgagaaattgggcgcttaattggcttgacttcacatggcagcctatcgatgagatttactcctattttggaacaaagattgcaacatactttgcgttcctaggaatgtatgcgcgatggcttttcttcccagctgtttttggactggcaactcaactcatagattttggatggggtattcattgttcactatctgaatacaaaaacctggacaacgtcagcttcttgagtgattctcttactgttgaggaaaaggagtttggtgttgtgtctgtggttgtggagaaaagaaagtttcaaaggaacgaatggttcggtgtcctccttagaataaggaacaatgctatcattgtgctggctatcatttgtcttcagctgccatttgagttggcctatgctcatctatatgaaattgcagaaactgaggttatgaggtatttgttaactgcagtatatcttgttgcaattcaatattacaccagaattggtggcaaggtattagaaaatctaattgagaattccattccttacctcaagtacagttacaaaaagtacatagctgttcacaagaaaaagcgtgggaaagaatcgacagtgggtaggtcagtccggttatcaacaagagtggagaaagagtatttaaaaccctcttatactgcaagcattggagcagaactcgaagatggtttatttgatgactttctggagctgactcttcagtttggaatgatcatgatgtttgcctgtgcatttccattgattttctgctttgcagctctg

SEQ ID NO: 30231 - DNA, 1026 bp, Zea mays
  Peptide Sequence Number=SeqID_72010
atggagaaccaaacgacggcggcggcggcggcggcggaggaccatatcagcaagctgccggacgacgttctcgtccacatcctctccctgtgcccttactatactctcatgagaacggtttcggtttcaacatcgtggcagcgcctcctcacccaacaactcccagacctgaccttctgcttgtcgttgcctgtgcacaaggatccgtccatgaaaacaccgagcgaggagcgcgtccagagcatggcgcggacgctccgccgccggtgccacggcacagcagcagactacaccatcaagaatcttcgtctggtctacagaaaggacgtggccatggaatcccggtacgcagacgagttcatcgcgctcgccaacgccacgaagctgaatctcatcccccacattggcaaggagtccttgtcctgctcagttgacgcggacgccggcgactggtccgtcgagctgccgcccgctacggtcgagttggatgtgcagccgttcagcttcgccgtgaggccgccgcgcatccacggccccggcctcaacgcccttcggtccttgacgcttggggacgtggtggttcgcgaggacttcccgctcgtcgtcaccgtgttcccgtcgctggaggacctgcatatcaaaggctgcatcctcactgtcagcatgaccatctcgtcggacaccatgcctcgcctcaaacacctccgcttcaccgaggtcagcgtgacggcggatgacaccaaagccgccatcaccgtgctcgccgatgacctgaggactctccgcatgtcatgccggcgatgtagctatactgaatcgccatcgaagccgctcatgttcatgtgcgacggggacggcatggccgcattcaccaaatactcattggtccgcttacgcgcacccaagctggcggtgttcgagtggcgatgctgctacgctgacgaggtgtgcgtcgacgccgtgggtcgcctctccaacgtcgcgatcgagatcgccgccggtaggacacggacgagggctccatag

SEQ ID NO: 30232 - DNA, 819 bp, Zea mays
  Peptide Sequence Number=SeqID_72011
atgagctccacctcatcgggccgccgcgccccctcatcttcggcggcggtcgcctcgtcgccgggacagaagcgggcgagggatgaggccagcagcgggtccccatccgaccccgacgccgccaaaaaccctcgccgcgcttttgcctcctccccgttcgccgacttcggcacctacatggctgcgaagaacagcaagctcgctgcgcagttcgatgccgacgccaacacctcaggcacggacgccggcggtctattcgatggcgtctccatcttcgtggacggcttcacagtcccttctagccaggagctgaaagagattatgctgaacaatggaggccggtttgtcaactacttttccaggcacacggtaacacacattgtttgcagcaacctgcctgatagcaaaatgaagaatctgaggagggatcacagtatcaaagtggggattgtgaaagtgaagctttcaatggatactttggagctatcaaaggactcgttgtcctcagatgaacagaatgcatcagcattgaagaaagagagagcggagatttcacgatggtacccttggtgtgctcaatcccctaatgcaaagtcaaggtgtcaaacttattcagtacaagatctacaggcagtcatttttccttgtcattggagaaaagtgcagctaaacctttctggccgaccacattcaaccctaacagatccaaattttgttgagaactatttcaagttttatgtgatgttcttgtttggtgttgtagtactctcgactgcacttcattgggacatggagaaaccgtgctatggtgagctatag

SEQ ID NO: 30233 - DNA, 852 bp, Zea mays
  Peptide Sequence Number=SeqID_72012
atggcgccccgcatgctctgtgacgacggcggctctcagcccccttacggaagcaagaggacgtcagcaaggatccaaccactccgacagctgtccctccgccaggctccatcgctcctccgacggccacgacatcacaccagctgggtgccaaaatctctccggctgccacatcggcatgttactcttttccactttgaggatgaaccccgctctggtgtttgtgaagttatatccaccttaagagagaaagctaaacttcgcattatgatgctaactggagaccatgaatcaagtgcccagagagttgctaaagctgtttgtattgaagaagtccacttctctttaaagccagaggataaattaaataaagtgaaagcagtttcaagggaaggaggtggaggtttaataatggtcggtgatggtataaatgatgcaccagcccttgcagccgcaacagttggaatggttctagcccaacgtgccagtgcaactgcagtggctgttgcagatgttctgctgttgcaggataatatttgtggggtgccattctgcattgctaaggctcgtcaaacaacttcattggtcaaacaaagtgtagctctggccttaacttgtattgtttttgctgcgcttccttctgtcctgggatttcttcctctttggttgactgtacttcttcacgaaggaggaacccttctagtgtgcttgaactcgatacgagccctgaacactccgacatggtccttggtagatgacatccggaagctcgtcgatagcttaaggaattatttcccatccaagttcaacagctctccctcaagctacaccgcaaacactgctcccttgtag

SEQ ID NO: 30234 - DNA, 501 bp, Zea mays
  Peptide Sequence Number=SeqID_72013
atggcggcgctctacctaagcagtagcggttgtggtggtgttgcagggcagggcggtgcagctgcgagggctcgaggggtgacttgcccgctgcagtggtggagtggagggcagcgatggctgtataggcgctgcctgcggtggcagttgcagctcctcgttggcgatgggtgtgcggccaagagctctcgacacaggatcggtcgtgaggagttccttaacatttcttgcgacatggagtacaaaaagagggtggatgcgctagtgtttttctctttacttctcctaggatactttgctgctcatgcgcatgggaacggtcatgtcacggatgatgtcaatgtttctgctccagctgaagaaggaattttgcgagaaaaaagagcacaatgcgctcaagggtttcttccatgcaaagataacaagtgctactgttgcattgggggccgaactcatgattgctactatacgatggctcagtgtagtcatgcatgcttctaa

SEQ ID NO: 30235 - DNA, 273 bp, Zea mays
  Peptide Sequence Number=SeqID_72014
atggggtgttacagcgaccaagagctctcgtcacaggcagaacgacatttcgacggtattcaaatgattaacatttgtaaaaggtcctacatcacacatcaagttgggtatgagccctacttcggcaagactgtgtacccggagcccaagcgatgccggcgtacggacgacaagaagtggcggtgctccaatgaggccgccccagtctccaagtactgcgagcgccagatgcaccgcgcccacaaccgttcaagaaagcatgtgaagaagtga

SEQ ID NO: 30236 - DNA, 387 bp, Zea mays
  Peptide Sequence Number=SeqID_72015
atggagtacagaaagagggtggatgctctagtgtttttctcgttacttctcctcggatactttgctgctcatgcacatgggaagtgtcatgtcacaaatgatgtcggtgtttctactccagctaaagaaggaattatgcaaggaaacggagcacgatgcgctaaagggtttcctccatgcaaagataacaagtgctactgctgcattgggggctgcagccgtccgaacaactacagctcctgtggttacagggcagccgaacaagtcgttggtgcaaggtcggagcagtggcacactgatgctcaaggtggttccagaggtccactcagacagatgctagaggcttttggatgcaacatgcctcatcagggggaaagtggctcctaa

SEQ ID NO: 30237 - DNA, 879 bp, Zea mays
  Peptide Sequence Number=SeqID_72016
atggttgtacttatgactatagctttcgtatgggcccagccatggtttcggcgtaataagctcaaggattctaatcccctcaagaaaatgactggcttcaatgccttttggtttactcaccacttatttgttattgtgtatgcactgctcattgtccatggggacctgtttatatctaagcaggaaatgacatggatgtaccttgctgtccctgtgctcttgtatgtaagtgagcgcattcttcggctatttaggagccatgatgctgttaggattcagaaggttgcagtatatccagggaatgttttggctctctatatgtccaagccacctggattcaggcacccattttcgattacatcagcaccaggagatgattatcttagtgtccacattcgcacaaggggtgattggacttcacgtcttaggactgtcttctctgaggcatgccgccctccatctgatggagaaagtggactccttagagctgacccttccaaggggatcaccgagaccaacgcgaggttcccgaaactcttgattgatggaccatacggtgctccagcgcaagactatcaggaatatgatgtgctcctgctcattggactgggcattggagccacaccattgattagcattgtgaaggatgtacttaaccacatccagcttggaggatctgttgcaggcacggagcctgagggcagtggcaaggccaagaagaggccattcatgacaaagagggcctacttctactgggtgaccagggaagaggggtcctttgaatggttccgaggggtcatgaatgaggtggctgagaaggacaaggatggagtcattgaactccacaaccactgctcgagtgtgcaccaggaaggggat

SEQ ID NO: 30238 - DNA, 489 bp, Zea mays
  Peptide Sequence Number=SeqID_72017
atggcgttcatggagcttgaatggagggatagagaagaggaaacagaaacattaacgcgctggcgaacggtcgcggctgggacttcggtttgcgactcgggcgtcggtcgggctcccggcatcgcggtgcttggctttgggtcctggtcgcgcgcttggcgtggctggtcttcctgtgcgcggcacgtcgggcggtggcggcgcgcctgggcgtcggtcgtgcagtgctcggggggcgcgacaaggcctagctcggggtggccaggtggggtcacggctcctggcggcgtcggggcgtgttcggcgtgcttggcgtggtcgagcgagagcagagcggcggcggcgcaaggtaaggagaggagggaggagagagagaagggctgcggtggggcctgcgcgcaagaggaggaaggggaggaagcaaggggcggtggcggccagcagggaagggagccagggggcgcggcttgctccactacatgggcctaa

SEQ ID NO: 30239 - DNA, 941 bp, Zea mays
  Peptide Sequence Number=SeqID_72018
aactaggtagtgacattgatccagaagaagctcaacatgcacttgaaatagccgaagctaacttgagtaaagctgaagagagtaaggagaacttgacctcagcgctagagaagaatatggcagccactgaagctgccacggacacaggcagttcaaggaggtcacaagatgacactacaacattagtcccacacagtgggaatttgggagaaccaatccagaagggcgtgaagaccaccagattcaaagatgatgacgaggttgtggaaatcaccattgtacagcgcgattcagtggcaatcgaagatgtcagggtagtcgatgatggtggctcagggcatagtaatgggtttgatggcctgtcacttgtgtcaccttcctcatcaaggagcggcaagctatcatcaaagattaggcaagtgaaaaatggactaaagatgaagaactcaagcactaaggcgccacagacacagttgggaaagaacatgaggaagagattggacagaagcaagagcggggctgctgtagcgctcaagggcttgcagtttgtgactgcaaaagttggtcatgatggctgggctgtagtggagaaacggttcaacgagctacaggttgatgggatggatggatctgatgagtttgcagtgcaattgtttgattcattagcaagaaagagagggataacaaagcaggtgctgactaaagatgagctcaaagatttctgggagcaactcagtgatcagggttttgacaaccgtttacagatattctttgacatggttgataagaatgccgatggaagaatcacagaagaggaggttaaggagattattaccctcagtgcatcagcaaacaaactttccaagctcaaggaacgagctgatgagtacacggcactcataatggaagaacttgaccgtgacagccttggatacattgag

SEQ ID NO: 30240 - DNA, 384 bp, Zea mays
  Peptide Sequence Number=SeqID_72019
atggtgactgacaagtgggtttggagtcacaagaggaaggctgacggttctctagataggtattctaagttgtccaggaaggatataaaggctcgttgtccagcttgccgtggtctctgcaattgtaaactgtgcagccttggtcataccaagggtgctactcataaggtgatctttcttccactcagggaaccgccaagtggtgaaaggaagatactcagcataaaaatttccaaccatcaattttacaagcttttacctgtaaaacttgaccgggagcaacttgacgagttggaattagaagctaaaatacaaggaacaaaaacatctaatgtccgtgtccaggttgctgaaaatggtcagagtgagtcactctactggtaa

SEQ ID NO: 30241 - DNA, 1605 bp, Zea mays
  Peptide Sequence Number=SeqID_72020
atgccgccgcgccgcggtagaaggaaggggaagggcagggcaaagccaagagcgaaggccaccgagcccgagcctgagctagaggaagccgccgattccgagatcgaggcgggggacgcgaaggcggaggagtccggcgaagcgaaagaagatgaatcggcaagcgacgccgagtccatggatgcagatgccaacgaggaagccgtcgagaacggagcggatgagatggatgcggagcctgaagccaaagccgagccggaagcggtagccaccgaggcggaagcgaaacctgacgtctcggatgccgaggatgaagaagccggtgaaacgtgctccgaccgcgaagcagatgccaaggatgttgattcgaaggccaaagcggaggagtccgacggcgaggatgaggagggagccaccgccgagaccgacggcgaggatgaggagggagccaccgccgagaccgacggcgagagtgaagaggaagccgctgagacgggcggcgagaacgaagaagatggtggggactccgacaccgaaggtgatgctgaggaatcccctccaccccctccttcccgcagccgccgccgtaagcgagcggccactcccgatgatgaagcagaggagacccctacaccgtcgcgtcgccggcgccgtcggaagtcgaggcagcgtggtgactctccgccgccacttccggaccacctccgttgccgtcgtagcgacgggaagaagtggcgctgctcgggccgtgcactcccaactgttagcttctgcgaataccactacgcgagggccaacaagggcaagaagctaccagcggatggagagctccttgctgtcgctcttcagaggcagaagaacaagaggaagggcaggaggagaatcaatccgtcgacgtcccctcaggcagccacgagtgaccgccagaccagggatctcccaaacggactgatgacgatcttgccaggtagcagtggacctgcagcactgtcaactcctgttactacaaaagttggtgtagaaatttctgcaccgatgcagcggtgctatcgatccaagaatgctgagccattgcctgttggtccctgtgaaggttgttcctcgtgctatgagtatgacgaaagcagcaccaagaatgtgtcactgctgcgggcgctcgcgcagcgccctctcagcccgcgcccgtccaagaggtggattctggattcccttggagtcgttgatagtgcttcacacggccccaacatcacctactacgccacccacaatcccggcctcgcctaccacatttggtgcagccctaacatcccctgctacacctcacacatgtttgcaccttcgatcgcgcttcgtgtgccacctcattctttgacttgcttcgccacactcgtgcatgtctacttgcatcgtgcacaggagggtgccctgactcgctatccggtcaaagtcgtcggtgtaccaccctcctctacttcattgcgatcctcgtcatgtccatccgatgtctcccccgtaccatcctctgtccatcgctccctcatcgatcctcactggcgctgtgctatggaggaagagtacaaggctttcctcgccaatcatacctag

SEQ ID NO: 30242 - DNA, 420 bp, Zea mays
  Peptide Sequence Number=SeqID_72021
atgcttccacattccaaattgttgccaggagagacgtggaaacctgagacacttccatctcagaagagatttgagtctataacttcctcccttacctttattggaggcacaataaaaaatgcacttgaaatctctttgttgacgcatgtcatatatggatgcaaatgccatggctgcaaaagcaaacttgctattgcgggagctaaaaatgtgaaggcagatttagcttttacaaaggaatattgtgctcaacttgaagaagagagtaaaatattgtgtgagagttatgacaagagtgataatccaaaagatgatgatctgatactaaatatattctttattctgttgactgcagttcccttgcccaccactgcatgtccaacatcacatactttgcccacgaattcatgggctcgttga

SEQ ID NO: 30243 - DNA, 516 bp, Zea mays
  Peptide Sequence Number=SeqID_72022
cctggagcttcgctcggcttccaactccggcgcccggccgagctccctggtaccgcgcccctacttctccttcttccctgccgcgtgctgagcgctctgctccctagcgcggccctgctttcccaagccaagtccctctttctctctctggtctatgtgccgcgcgtcctggccaagctcccagctcagcgcccagcttctctgcttcctgacgcgcgcgcccagctgagttctgaccccgtcgtgagctcgcccctggcgctcagcttcccgtccagccgcgtgctcctccctgtgccccagctcggcaacagctataagctccctggaaccagcgtctcgtcgagccccgccgcacgtcctgtttccttctcacccatggaagctacgcccagccttaatccccgtcgcgccgtgctcctccctctgtccctgctgcgcgcgtcgagctctggtgattttcctcccgcgcccctgttccttgcttgcccctgtgccgtcattcagctcgtcctt

SEQ ID NO: 30244 - DNA, 449 bp, Zea mays
  Peptide Sequence Number=SeqID_72023
atggagcgaggcttggaggcagaggaggtggaggtcgtggagcgcatggtggcagacgagcgcctagtcgagtgggaagtctcccgcgaggacggtggcggcggtgaggtggacacggttcttgaagccgaacaagagatcgaggttgaggaggccagcgtcgacgatgacggctgggaggccgtggcgcgcgagggaggcggcgaggctggcggttgtggtggtctttccgacgccggccttgctggagtcactcaactacatccgagcgacgtgcccttgcgtcggccgagcaaaatgcagcacgtcatcaaagaagcacgagggggtggggagacggaggggcaggcggggccagaggtggaggcggcgtgcgcaggcggggccagttgggagagaatagacgctttcgcaagtcgcaactccactaaattgaagacaaatttcag

SEQ ID NO: 30245 - DNA, 138 bp, Zea mays
  Peptide Sequence Number=SeqID_72024
atgatagcattggtcattggtggaggtgcttatgtccatatgattgatggtcgtggtgccagctccaatcttgattccacaagccagaatatagctgcaacatttgtaaatgtgtttgtgaatgccgggtttgactag

SEQ ID NO: 30246 - DNA, 1371 bp, Zea mays
  Peptide Sequence Number=SeqID_72025
atggagaatggaagagttcgggaacatatattaggtactgaagctaacaatgtgcttcgaattagaaaagaaagacccttgactagtgactccattgatccactgcaaattggacaggaagcatcagttcatcagtttgggaatactgatgtgagttgttctggatcatctcagaggtattcttgtggtaacgatagctttaggaaaactaacaggtcatcatcaagcagaatatgccggcatgcagaatctgctgttggttcgaaaactcttgcagaaatgtttgctttatctgattctgaaagactgaagctaaattcagactcaaatgctccagttctatgtaatatgattgaccgtgataatggtcatagcaaggatggatgctttatagttttaccaaagcatgcacctgtgctgtctatccgaagctcaatggacatgccttcttgcttggaaggctcctctcagggtaaaaataatctaaacatatccaatatttacaacaatggtaagtttcagattgattcttcccgggataaaccaagatcactgaagcaaattggcagtggcactgaagctcacttgagcagtgctcactgtttccaaaatcttacaggtgacaacttttcaactcctgattgcttaaatgataaagtattgttgacaacagatgaagacgtagttcgacaatcagctgaatctgagccttccaggttcaacttgcaggtttctaggaaacaacgggcagcatgcatcggcaccagcaaagcctggggagacaaacagagaggttgccatcaatatcacaatgaatctgaagttaacatgtcaagtgatgatgaagaccattctttttaccaatctttggaagcatttcaggtcgaggaaaactgggacttctcatatcttctcgacatacttatatgctctggtatcatagttgttgactggcagctcatctgcaagtcatggtacttgcctggttaccctgttggccctcatgtctttgataggcttgaaaggaaatacaataaaatcgcaacatgggcaaagcctgagaggaggcttctttttgacctcgtgaattcaattctttccgaggtccttgcaccatgtgttgatgtgcacccatgggtgcagcctagtagacactgtgtggcattttggggccctgaagggcctgttgagaaggtttggcagacaattgttaggctgcaggaagactgtgtcacaaggcatcctgatgagatggttcttgatacaaattggctggaagtaggcaccgacatcaatatggtggggaagcagatagctaggatgttacatggcgacctcttggaagaagtcatagtggacttccttggttga

SEQ ID NO: 30247 - DNA, 231 bp, Zea mays
  Peptide Sequence Number=SeqID_72026
atggccaaaggtggtgacttcggccacaagtcaaaaatgggcattattgtaaaaccttacaaggctgtgcacaaagctaagaggatgtctgctatcgagaaaacatccttgataactagaactttagagacccaggaagctgtgcttcagagacctaggagacaaagactgaagaggccattgctccaaaggctcaaggggccacttcagagacagcgaagaagaagatga

SEQ ID NO: 30248 - DNA, 276 bp, Zea mays
  Peptide Sequence Number=SeqID_72027
atggctagtagagatcatggtgcaactcatgagggaaggacagaaccctccgagccaaaaggtttactgcccataccccaggtgctcagccttcatccgatgcaggagtcctcctcaaggcacacagctgctgatgctgccacattgaggaagtgcgtgaaacgcataggctctttgtgcttgagctgtaaagtcccatgcatatggcattatagcatgagttactatgaatacaagatgaggtgcggctatgagttctgctacacttgggaatga

SEQ ID NO: 30249 - DNA, 1482 bp, Zea mays
  Peptide Sequence Number=SeqID_72028
atggaggagcagctacctgacgatatgcttgtggaaatcctgagccgcctcccgcccagcagcctagcggcgtcacgctgcgtctccaagcacttgtgctccatcgtggacgcccgacgtctcctgcgcgccggccacctccttcctctccgcctcgacgccttctactgcatcagcctggcctcggtcgatcgggagacatatcttttcgcacggccatcggtagcgcgtcggatccccggcgcctgccttgacttcagggtagatcttgaggttgtggatcactgcaacggtctactgttgctgtgtgacatggtgctcaaccctgccacacggcaatcggcagccctgcctaacgccccggatccatccattgagaacatgcttggggtcgccacagtttgggccgggacagcgccgcaccgccccccattttacttgtatacagactttaatcttgtgtacgaccccatggccgagtcgccggagcatttcgaggtatttctgatccccgtgttatcgtgcggccatagtggtttgatgtccgacaatatcaccatcaaccttgaggagcaagaatggccgccatcgacattcagaacccacgtcttctcgtcgaggagctggaggtgggaggagaggtcctgggtccgccaaggggagcctacggggaccatggccgatatgctgcgctccgagcatggctcgaatcagaaggctgtctattttcgaggtgcactctatgtgcattattcaaatgaatctgtcatgaggatatccatatccaaggataggaatacatatcaaatgatgagacttccagcaatacggagcaaacagatagttgagagtgctaccttttacttgggaaaatctgagaaaggagtatattgtgcgttgttttattgggcccaggatgacagcgacccccagtttcgagtctggtctcttatggaggaagagatgaatggacgtgatggacaaattcatatgaagtggttgataaagactagcatcagccttaaacccctgctggcacaacttcatcattgtggtcacgacttgactccagatgaatggatgatcatctataaccgccatgaccgtgaccttgctggttcatctgcacaagatgataatgatgatgaatgggactttgaaaatgctcatgagattgtccttgaagcacctaacaatgttaaagactggtaccctatagattttctcggatttcatccttacaaggagattgtcttcttttccttatcatggaagacaatatcttataatttgaataccacaaaggtgtcttgctcgacaaagcacgacgagagccaaccatgccatcaggtggccggcacatccactgctattgccggtgcccaacaacatacacgagcccggacggataacaaagatcatcgctacgactctgttaacaaagatcataccgtcgtagatcgcccttcactctgcgattaa

SEQ ID NO: 30250 - DNA, 195 bp, Zea mays
  Peptide Sequence Number=SeqID_72029
atgggagaatatgaggtccttgtaatgacccctcaaatattattgcacaatttgcggcattgtttcatcaggatggacttaattgcactattgatatttgatgaatgtcatcatgcacaagcacaaaaaaggcatccatatgcacaaattatgaaggaagtgtttgttatggctgacatgattttaatgcagtaa

SEQ ID NO: 30251 - DNA, 777 bp, Zea mays
  Peptide Sequence Number=SeqID_72030
atggtggacaggggcacgtccccagtggcggtggcgctcggaaggtcagcctggggcgcgcccgtggcgacggcgcttgggaaggtgggcggcacagcggtgggaagccgactactagaatctggaaaagttgggctcctaacaaatgccgtcttttcatttggctggtggaatatatcagaatctgaggctcgtgaattgatggagcactttgtggagttacctccagagctatgctctttgaagataattgggttctcaaaagatatgggcagttctttgtccttgctaccatctctaatgtatcgcttggagaatttgttggtggctattgagttgaaggatgtcatgtcatcttatttcccagaggcttctcaaattagtgcctcgggtatccttgaatcattgactactgaaaggtgtttagagaggatctctttggagcgattagaagtcctaggtgatgctttcttgaagtatgtagttgggcgtcataactttatttcatatgagggacttgatgaaggtcagttgaccaggagacgttctgatatagtgagtaattcgaatttgtatgagttatcaattagaagaaatttgcaggagaactgcgccccattatatattaagcagaaaaaaggggtggtcttaaaagaccaatacaaaaatcccagcttggtcacggcccttaggatggttagggaagaggcggtgctctggtccatgactggtgccaaggccttgtccttcctccaagtcgatgagttgctggcttaa

SEQ ID NO: 30252 - DNA, 213 bp, Zea mays
  Peptide Sequence Number=SeqID_72031
atgaccctcactgctcctgctgtcaccgactgggttgctgattctagtgcctcctaccacaccactctagatgctagatctcgctacctgcctcctaggggcgcccctacttcagcttcatcatcgtcctccgcatcctacttcagcttcatcatcgtcctccgcatcctacttcagcttcatcatcgtcctcgccacagccgcacgctctga

SEQ ID NO: 30253 - DNA, 159 bp, Zea mays
  Peptide Sequence Number=SeqID_72032
atggcggaggatgcggatgcggaggggaggaccatggaggatgcgtctgcccgaagcagagatcgaggagcattgatggcggggctcgtagatggcggatcgaggccttgttctagcatggtcaacaagtgggtcaaggaggagtcacctctggtgtag

SEQ ID NO: 30254 - DNA, 909 bp, Zea mays
  Peptide Sequence Number=SeqID_72033
atggaaggggggagtctcgcgtgctcctggggaatcggactcatcacccccggttcttttgggtgcaccgccggagcaatcaatcttcctgaagggcgcggggcaaaggagatcctgacagaagatttggggctgccgcggcttcctgatgccgctggccgggaggaagacgaacagttccctagaggtggaactgcagacagtgtgaatggcacgatcgggtcgctgatccccccaggccgatttcgccccagcccttggtatgagatggtctgtgcgcctgtggtcttgccccattctgttgggccgcctgagacgcagattacagtaccagcctcgcaccattctcttcttgaagaactgaaccgtgatggtgatcaagctattcagtcagcttctactgtagatcccagttcctttcctgggcaagctgatctgcattcaagtaaaaccaagctcaaagtttactcaagaagaaaaggtggaccaactcaggagatacaagtggcccctaacccctcgagtgttggggctcccatcctggacatggcggatggtacaagcagtttgatcacagacatctcagtacctctggtcgatccatcaaccttcattagcaggatcaacaagaggtctgcacatcttcttccaacgcctagggctgaacagaggaacctgaattctcagactatgactgtgcctcgacgcagtaggcgcgttgctgggattggcgtcgaattttccatgcaagaatggcgcaacaggtcttctaggaaggctatgggggctctgcatataatcaaggaatctgatggagttaatcctgaagcactgatggggttagttctgcagacaggatggacaaccgtggtggttaacttgtgtatatgggccctagggggatgctga

SEQ ID NO: 30255 - DNA, 573 bp, Zea mays
  Peptide Sequence Number=SeqID_72034
atggatgcactaactaatttcaaacccaaaagagtggacgtactaaccaattcaaccaaaaagcttaagtttttaagagaagcaaccacaatttttatatctcttttggactatttccagaaagtaaaggacagttggagaattgtcaaccaccgggatatcattccaacagtgccacgtcttatgggctattgccatgtggaagcaccagtttatcttaaatttggggacgcaaaagatgcaccggtaaataacagcattctagatgatgaagaccaaggtgacgtgataggggagtacacacctgatgttcttgttactgaatttatgaaaggcgagaagcaacttgtggaaaaactactgcaaacagaaataaatttactccgctcaatcagggatggttcggctcttatgcagcacatggaagacttctactatgtcacccttcttgaggtttttgagaactatttctgcttttctcataccaaattgtgtcaaaagctcctcaagaatgtgagatcaagttatcaagtggcagatactgccaatgatgaataccaattgacagcgtga

SEQ ID NO: 30256 - DNA, 747 bp, Zea mays
  Peptide Sequence Number=SeqID_72035
atggcctcgatcagtgctcccgcagtagcatgccgcgtcgcgccggcgcgcgcaacaacctcggttcttcccgcgcactcgcggcggccgggatgcaggtcggtggtgtggcggtgctgggccgcgacgagggggagacggaggcggtgggcagggctgcgggcaaggtgccgcataagctgcgacgtcagccagccgtcagccgtgcagccagattctgagagctctggggagggattggtggcgcaggacgacgggccgcggcggccgccattcgacatcaacctcgccgtcgtgctcgccgggttcgcgtttgaagcctataccagtcctccggcagatgtgggctggcgcgaaactgatgcggctgactgtcagacagtgttcctgtccgatgtgtttcttcgtgaagtatacgatggacggcttgtcgtcaggctgaagaaaggcataaaccttcctgcaatggatccatggggtactagtgatccttatgtaattctacaactgaatggccaaactgcaaaaagccaaattaaatgggcgacaaaggagccaacatggaatgaagatttcacgtttaacattagaaaatctcgtgaaaatcttctgcaggttgcagcttgggatgcaaaccttgttaccccacacaaacgcatgggaaatgctggattataccttgaatcattttgtgatgtgctagtctgtatagagtcatggccaaactcatgtcgaaacatgatgtaa

SEQ ID NO: 30257 - DNA, 261 bp, Zea mays
  Peptide Sequence Number=SeqID_72036
cactctgagttcgacggcgaggtcctcgtcctcgaggtctccaccaggtacttcgtcggcggtgaccacatcttcggccctgacccatcatcccagaggagatggacgatgaagcgttggatcaaggagatggaggaggtggccgccacggccgccacttccagcactgcacctccccctcccttccttccaccagattctagatctcttgatcccgacaccagttttcttggatctattggcgagttcatcgactcatga

SEQ ID NO: 30258 - DNA, 648 bp, Zea mays
  Peptide Sequence Number=SeqID_72037
atggcgttggctcgcctccgcctcctcgaccgctacggtctcctgtcgccggcgctctctgcgacggcgctgcggtccttgggagacctgcgcgcgctctgcacgctctccaccacgctgcggtccggcgccggcgaggacgagatcgagcgcatccgccgcgagttcgatgacgccaagcgcaactacctcagcattcccgccgccatcaaggacatgcccaagatgaatccgcaaggcatttacgtcaacaagaacgtcaagctggacgacctccaggtctacggcttcgactacgactacacgctgtcgcactactccgagcacctgcaatgccttatctacgatcttgccaaaaggcacttggtcaatgagttgaagtatccggagagttgcttgcagtacgagtatgaccgcaccttccccatcaggggtttgtactatgacagacttaaagggtgcctactcaagcttgatttcttcggctctattgaaccagatggttgcttctttgggcggcaaaggttctggttctctatctctaatttcttctcttctcctgttgtcgttctctgtcctcctggctcttgggttttgatcattggcgtcgacgcactgcacaaggctcttgcctcctgttcatattag

SEQ ID NO: 30259 - DNA, 426 bp, Zea mays
  Peptide Sequence Number=SeqID_72038
atgaccgacgcgggcgccgccagggccaggaggccgggcggcggcggcgacggggacctcccgctccgcccgccggagccgccgcgggacccgctggagttcctgtcccgctcctggagcgtgtcgtcgtccgcggccgacgacgtctcccgtgcgctcgcgcccgcgctggcctccggggccgccatcgccgaggacgtcgccggggagctcgacgccgcctccgggtcctccttctccttcgcgtccgccgccacctcgcagctcgtcttggaccggatcatggcgccgacgtcggtggaggtggcgccgctgacctccggccggctctcccacagcagcgggcctctcaactgcggcgggtcgctctccgacagcccgcccgtctcgccggagatcgacgacaccaaggtctccctcttctaa

SEQ ID NO: 30260 - DNA, 147 bp, Zea mays
  Peptide Sequence Number=SeqID_72039
atgcatcaaggcatcagttccatgatttctctcattcgctcagtatcagggagtggatcacgtgggctggttatgggaaagggacaggctgctgctggttcacgtagtcttgctatcgcactagagggcaatgacgctaggcattaa

SEQ ID NO: 30261 - DNA, 330 bp, Zea mays
  Peptide Sequence Number=SeqID_72040
atggctggaagcgacgttgacacaacactagctcctagagcgactgaacgctctaggaactccgacgatgccataggcaacgaagaaaacaaatggggccctggaagccctgaccccctgacgggagagtcacttgaccttgttggaagcctcgaccatctccgccttgacaatggtggcatcaggccccgggaccttgaggggaccctcaccgacatcgtggtgcgcaccgcgacatcagccccatctcaactcgaactgccatgccagggattgcagccaggatgggaccctgcccggagcagtcgcgttcccctcgctaggaaatga

SEQ ID NO: 30262 - DNA, 798 bp, Zea mays
  Peptide Sequence Number=SeqID_72041
gataaccaagctaatgccatgaaggaaccaggaaccggtgggtatggctatgggacgaaaaatgacaagaataaggatgtggatacaatagcttcggacttcatcaagctgaagcacaaggcttgggcactccagaagagcacaaccataaacggcggggggacgggcacggcggcggagccacagtacgtggccaccgggcagatcgagccggacctcgccggcgccgcactcacgatgctcggtgatgtggcagccgacgcgaagcaggagcaccgcgacccggtgtacgcccagagagtgtgcctgggcgcgctgcagggcacacgacggccggccccgaccatcgcggccacagccatggggacacgccatggacgagcggagcgtgagcttgagcgaaatccgagcagggaaagagctccggccggacttggcagaggaagcagagaaccaggcgtggccacaggggagggatacaggcgaggaaccgcggcacgcagggacgctcggccggacgctgcaagcagagagagggacgagccgaaggaggagcgagcaaggaggagcgtgcagccatggaggaatcttgggcgcggcaaggaagctctagggagcagggagggcgcacggctggagagagatgggggaaggagagaggagcggcgcggctggagcagcaatgccgcggcagggaaggagctcgacgccggagcaagagaaggaggccgcagtccgaacgctggcgagcagggagaggaagaagctccggcaggcgtgctcccgtgggagaactag

SEQ ID NO: 30263 - DNA, 171 bp, Zea mays
  Peptide Sequence Number=SeqID_72042
atgaacgaggtctacgacagtttggccagaagctcaatagtaaagagcgcggggagcaatccaaaagatgctatcctggagatccacttatgtgtgaagaggttcaagaggtttgttgatatgctagttgatagattaaaactctatttcacggtagagacaacaagataa

SEQ ID NO: 30264 - DNA, 354 bp, Zea mays
  Peptide Sequence Number=SeqID_72043
atggctcccaagaaagtgaccaccaaagctagctctctagacaatgccacgaaggtggccctcgtcgacaatgaaacggggacagtcaacagcaagcaccctcgcaccaaagacccgcccaccctagaaggcagcattcatacatgcagctctgaagacctcccacatgacaacgccccaccgagttttgtccccgcggcacacctcccagcccaaggggccgaagacatcttacaagaaggcgaggacctaggaatcttagctgaagaccaactcaaactgcgagtcgttcgcataaaaacaatcaccttcagaagcaaaggagatactcgcagccaagaggcagcgaactaa

SEQ ID NO: 30265 - DNA, 1716 bp, Zea mays
  Peptide Sequence Number=SeqID_72044
atgagggttgtgtggtcattgatcatcgaccagagactcatacacctcaccccacatatgtttccttgccatggacaatggtcacacaatccagaggccgtgctctacaacatccacagcctctccaaggacccctcccaagcgctcgccgtcttccgccgctccgtcgccgccggccagccagttggctccgcggcatacaacctcatgctccgcaccctcgcctcccacccctctgcgcagcgccatttctggcccttcctccgcgagatgcaggaggctggccactccgtcgaccagggcacctacctcgctgctctcgcctccttcaagaaggccagtctcaccgccgactatgcctccctcaccgcgcattacgacaagttccggaaaggtgccaagtccgccaccgcggcggcggaggcggtccgggaccacgacgccgcgggcctcgatagcaggctctccgccatcggtctccttccgcttacggagacctccgtcaccacggtgctccgagagctgagggagcatccgattaaggctctcgccttcttcagatgggctgggcggcagcaggggtacacgcacagctccgtggcctacaatgccatggcaagggtgctcggcagggaggagtcagtgccggagttttgggacttgatccgggaaacaaaggctgctgggatgcacgtcgatatcgacacttacctcaagctgtccaggaacttccagaggcgccacatggtccgggaggctgtggagctatatgagctcatgatggatggccctttcaagccagcacagcaggatggacccatcatcatcaggcgcatctcgatggggccgtcgccagatcttgagcttgtcaatcgggttgtcaacaagtttgaggctgtctggggcgtcaagaccaaggagttgcttgatggggtccatagggcgcttacacgtaatgggatgttcgatgaggctgcagagattgtgcaaacaatgaaggcccaaggccaccagccggacaatgttacatatagccagttggtgtatggtctttgcaaggctgacaagctggaggatgctcgcaaggtgctcgatgaaatggaggctgaagggtgtgtcccagatttgaagacttggaccctgttgatccatggttgctgtttagctggggatgtggatagagctgtgcaatacttaaccgagatgatcgaaaagggcttggacgcagatgccaatttgctggatgtgatattgaaaggtctatgtagccatgaaaaggtcgaagaggcttactctttctttattgagatggtggataagactgagttgaggccttggcaaggcacttgccagcatctaattaatgacttgctgagggtaaacaaacttgaggaggcactgtctcttctgaagacaatgaaaacctgcaagttcccacctttcgccgatccattccctccttacattgccaagtatggaacggttgaagatgcaaggaactttttcaaggccatgacagtgaatacttctccagaacctgttgcctacctgcatgttctcaagttgttctttgcggagggaagatattctgaagctcaagatctactgtatggatgccctaatcacatccgcaagcaccccgatgtcattaaactgtttggatcaataaaagttgagagtgcctctgcttctagattgggttcaagcaagcaatag

SEQ ID NO: 30266 - DNA, 1410 bp, Zea mays
  Peptide Sequence Number=SeqID_72045
atggcgcctcccaagctctatgacggcggcggctctcagctctcttacggaagcagctgccgccagcagccgggagagtctctccggaactacatccggcgattctcgaagcagcgcaccgagctgcccaacgtcaccgattcggatgtcatcgacgcgttcctcgccggcaccacctgccgcgacctggtgagcaagctgggccgcaagacccccaccagggcgagcgagctgatggacatcggtaccaagttcgcctctggccaggaggcggttgaggccatcttccggaaggacaagcagccccagggccgcccaccgaaagatgtccccgaggcgtcaactcagcgcggcaccaagaagaaaggcaagaagaagtcgcaagcgaaacgcgacgccgccgacgcggaccttgtcgccgccgccgagtacaagaaccctcgaaaacctcccggaggttccaatctctttgacaagatgctcaaggagtcatgcccctatcatcaggggcccatcaagcacacccttgaggagtgcgccatgcttcggcgccactttcacaaggttgggccacctgcggaaggtggcagggcccgcgacgacgataagaaggaggatcacaaggcaggagagttccccgaggtccacgactgcttcatgatctatggtgggcaagtggcgaacgccttggctcggcaccgcaagcaagagcgtcgggaggtctggtcggtaaaggtggcggcgccagtctacctagactggtccgacaagcccatcaccttcgaccagggcgaccatcccgaccgcgtgccgagcccggggaaatatccgctcgttgtcgaccccgtcatcggcaacgtcaggctcaccaaggtcctcatggacggaggcagcagcctcaacatcatctacgccgagaccctcgggatactgcggatcgatctgtcctcggtctgggcaggcgctgcgccttttcacgggatcatccctgggaaacgcatccagcccctcggacaactcgatctacccgtctgctttgggacaccctccaacttccgaagagagaccctcatgttcgaggtggtcgggtttcgaggaacctaccacgcagtgctggggaggccatgctacgccaagttcatggacgtccccaactacacctacctcaagctcaagatgtcgggccccaatggggtcatcaccgttggccccacgtaccgacacgcgtacgaatgcgacgtggagtgcgtggagtacgctgaggccctcgccgaatccgaggccctcatcgccgacctggagagcctctccaaggaggcgccagacatgaagcgccatgccgacaacttcgagccagcggagacggttaagtccgtccctctcaaccccagcaacgacgcctccaagtag

SEQ ID NO: 30267 - DNA, 531 bp, Zea mays
  Peptide Sequence Number=SeqID_72046
atgaacaaagacgaagaagaaaagaatgaaattctggtaagcactcaggatagtgggatcatgtttggatcacaagaagaggttgatcagaaagaagaagctgagaaagatatgaggaatcccaaaaacaaaaagcaggttgaagaaaagatgtgtgctaaaaaagaggatagaagggttagtgaaagacttaagaaggacgcgggaatcagaatcgagaagaagaacagaagaatagctgctaaaaggaatttggaagagctagaaaaagacaagggtaaagaggctgcaccctatatgcaagatgatcatggcagcaattctgatttcttatataatgaggaagggtctgaatcagacggcttcattattgttcaatctagaaagaaaaagagagagaaaagacttggcattaaaatatctcctattggaaaaggtcaggaaaatcctgatccaaatagaaagaaaaccaaaggtgctgggaaaatccctgccacaaatgaaaaacaaaccagcaagggtgtaaaatga

SEQ ID NO: 30268 - DNA, 117 bp, Zea mays
  Peptide Sequence Number=SeqID_72047
atggagacttgcctgactacttgctgcgccggctccggtgaactgcttgctgcgctggggaccagggagagtcggcctgcctctaatggccggatgggtgagccggcgtccggcgag

SEQ ID NO: 30269 - DNA, 429 bp, Zea mays
  Peptide Sequence Number=SeqID_72048
atggttctttgcatttgttcatacatgcttttggttgattcaggtttggctatcacatgtctgaagttgagcttaattacgttgatggagttcgtcccaccaatgtcactgtaccgcataatctatgagttctctccaccttcatcatcgggacttttctcaaacttctccggtgtacacttgggagacttgagtgatcctgaaactttcgactaccttcagcatgctcaagctcgccaaggaggccagcaggcggcaacatcccgttcgactacctcatcccacccaatgggaatggacaagtgcaacgcgaatagcgtggacaacgacaacgtacacaaggcgggcatggtgatgaacgggttgcccatcagtgtgtacgcatcggagacgttggggtgtgcggcggccatgtccacagacggttga

SEQ ID NO: 30270 - DNA, 258 bp, Zea mays
  Peptide Sequence Number=SeqID_72049
atggcgtccctttgcggactccacactcggcgaggccaggacgttcatggaggcctacccaagcttcatgaccatgtcggtgctgcctccaacgtgcggatgcagatgctgcggtcagacaacataaagttgtggccttgcactgagagcaaatataataaggacacggtgcttatcataaaacctattaaacttgctctcaggcaactgcaggtctcaggttatgtacaaactagatattatgttgcgattctctaa

SEQ ID NO: 30271 - DNA, 1326 bp, Zea mays
  Peptide Sequence Number=SeqID_72050
atgtcgccgctgaggctgtcagtcctccttgtgctcctgtccagcctcttggccccttccactgccctgcgcagctcgacgctgctcctggcgcgttctcctcagtccgtgtcgctcagtgccgttcccgggacaccggtcaccgcatgggcggccaccctcgccgcccagacggcgtccgacgcggcgcgcgcagccacgctcgcaacgggaccccgggacccgccgccggccagtgccgtggacgccgccaagaaagggccgcgccgcttctcagcatccccagctacgtggcccgcgcgcgcctcgggcacgccggcgcaggcgctcctcgtggccatcgaccccagcaacgacgccgcgtgggtgccgtgcgccgcctgcgcgggctgcgcccgggcgccgtcgttcgacccgacgcggtcgtccacgtaccgccccgtgcgctgcggggcgccgcagtgctcgcaggctcccgccccgtcgtgcccagggggcctgggctcgtcgtgcgcgttcaacctgtcgtacgcggcgtccacgttccaggccctgctcgggcaggatgcgctggcgctccacgacgacgtggacgccgtcgcggcctacacgtttgggtgcctccacgtcgtcacgggtggctccgtgccgccgcaggggctcgtcggcttcggccgcgggccgctctcgtttccgtcgcaaaccaaggacgtgtacggctccgtcttctcctactgcctgccgagctacaagtcttccaacttctccggcacgctcaggctcggccccgccgggcagccgaagaggatcaagacgacgccgctgctatccaacccacaccgtccttccctctactacgtcaacatggtcgggatccgcgtcggcggcaggcccgtgccagtaccggcgtcggccctcgcgttcgacccgaccagcggccgcggcaccatcgtcgacgccgggacgatgttcacgcggctgtccgcgcccgtgtacgccgccgtgcgtgacgtgttccggagcagggtgcgagcgccggtggcaggcccgctcggtggcttcgacacgtgctacaacgtgaccatctccgtgccgaccgtcaccttctcgttcgatgggcgggtgtcggtgacgctgccggaggagaacgtggtcatccgaagctcctcgggcggcatcgcgtgcctggccatggctgcgggaccaccagacggtgtcgacgctgcgctcaacgtgctggccagcatgcagcagcagaaccaccgcgtgttgttcgacgtcgccaatggccgcgtcggtttctcgcgcgagctctgtacggcctga

SEQ ID NO: 30272 - DNA, 417 bp, Zea mays
  Peptide Sequence Number=SeqID_72051
atggctcgcaagaggctgcccttggacggaagaacgcagtcacagctcgcccgaggtcaccctcgggcgggagacacagtcacgactcgcctgaggccagccttgggcagagacccagtcacagctcgcccaagggtggtctcgggcgggagacacggtcacgcctcgcccgaggccaacattgggcgggagacgcagtcacgactcgagcaggagacacagtcatgcctcgcccgagccatcctcgggcgggagacacagtcacggctcgcccgagtcatcctggggcaggagacgcagtcatggctcgctcaaggccacctcggacgggagacacatgttcttatgactgatatttataaagggcacttctttgcaattctaacgacttatattttgcaggttcttataccatag

SEQ ID NO: 30273 - DNA, 378 bp, Zea mays
  Peptide Sequence Number=SeqID_72052
atggatcatgccttcctcggcgtgggcaccgacggtaacccgagcctgcggcacaagagtaggtgcaacgcgacgatgaggtcgtcggagctgctcacgagcgatgaaggaatcgacgagggacggggagggcaggatgaggaagagcagcagaagccggaggggaggtggcgccagagcccgacgaggtggcggagcgagcataagagtctgcgagtgttggtggggcagggggcggctgggattagcggggcgagacggcggtggcagcctgagccggagcgtgagagtgagcggagaggcgaggacgagttggtggccggagcatgcggtggcagcggcagcgagcaacacaaggtgggcgaggatgcacaatag

SEQ ID NO: 30274 - DNA, 495 bp, Zea mays
  Peptide Sequence Number=SeqID_72053
atgggcacggggaaccgcgtcctctacaagctcgcgctcgtgccgctccgggagtaccccttcttcctggcgcagttcgccacgtttcggacttatcttgtctggcagcttcttctatctgctattttcttgaagaggcgctatagaattaatgagatagcaggatgctttctagtgaccgttggtgtcataataactgtagcaaggcaagaaatcatatttctagatgcttctaagaaactgaagtgtggctcagttgatctttttgttgtcaattcatacggctctgcttatcaatccttcaaaaatctttgtctttgtaagttccgctgtccatctacgctttcaccctaccactgccgtatatcggtgtggcatcatctctgccacctggctttgttgcgggtgcagcagtactcaccgctggcttactactgtacagcctaccacaggcacgacattttggaaatactttttcacaacaaaaatgactag

SEQ ID NO: 30275 - DNA, 405 bp, Zea mays
  Peptide Sequence Number=SeqID_72054
atgacactcggcaccgcagaccagggttgcccagacgggtggctcaggtgccgtcgcctaggtcggcaaaaagaagaagaagaaccacgaccacgagaggccgcaggctactgctccggtcgtcgcaaccgcgactgggaccggaacaagcgcaacaagcgcccacgaccacaggggggcaacagtggctcatgccctgtgcaccctaatagtcgccacagcgccgtggagtgccacgagatcatcaagctcgtgaagcgcgtcagcgagcggcgcaagcaaacctccaaggatggctttccccaccttatcgtcggcccggcaaggagagggccgacgacggtgatgtggctgcgggagaccgagacctcgggtatcagtcactcgagggagaccgggacctag

SEQ ID NO: 30276 - DNA, 1590 bp, Zea mays
  Peptide Sequence Number=SeqID_72055
atggaggcctccgccaaactgcccgtcgtcgtcccgaagggcgtcggcggcatggacaacgacgacgtcgcgccagcgggcggcaagaagcaggcggcggcgggcaggtgggggttcgtgcagttcttcttcgtgctcgccgtcgtcttctgcgtgctactctacgcaccgcgcgtcctcgtgctcagcccgtacgggtacagcatcgacgtcgggctcttcgcgccgacgccgacgacggcgacggcctcgtcggtgccgcagcgcgtcgccggaggcaatgcggtggcccttgaccttgacaaccaggtgcggtccccgtgctcgtccatgcgcgaccacaccatctgctgcgaccgctccagcgtgcacacggacgtgtgcttcatggccggcgacgtgcgcacggacgccgcgtcgctgtcgctcctgctgttcccgccgcaccagcaggcgcagaacggcacgtcgtcggaagaggacaaagaggagagggtgcggccgtacccgcggaagtgggagcgcttcatcatggacaaggtccccgaggtgcggctccgtgtggcggcgccgcggcggccagatggggagcgggaggaggaggagcaccggtgcgacgtacggcacgacgcgccgttgctcgtcatgtccgcggggggctacaccggcaacctgttccacgcgttcaacgacgggttcctgccgtcgtggctgacggtgcagcacctccgccgccgcgtcgtgctgggggtggtctcgtacaacccctggtgggccggcatgttcggcgaggtcatctccggcctctccgaccaccccgtggtggacctcctccacggcacgcggacgcactgcttcccgggcgccatcgtggggacccgctaccacggcatcctcatcgtggaccccgctaggctccgggacaacaagaccatcgtcgacttccaccagatgctcgccgacgcgtacgagaagccaccacgggagacggcaagaccagcacagcagcaggacctgcgggacgccgagcagcggcggcgacggcggccgaggctggggatcgtgtcgcgcaaggggacgcgggtgatcgagaaccaggcggcggtggcgcggctggcctcgtccgtggggttcgacgtggacatcctggagacggccaacgggctgccgctctcggcgtggtacgcgtcgctgcgtgcctgcgacgcgctcgtgggggtgcacggcgcggacctgaccaagttcctgttcctgcggccggggcgcgcctcgctcacccagatcgcgccgctgggggtgtccccgatcgcgcgcgaagacttcggggaacccgccgcccggatggggctggcgtacgagcagtacgaggtgcgcgccggcgagagctcgctggcgcgcaggtacgcgccgggcgacgtggtgctgaccgacccggaagcggcgaagcgggacaaggggggatggaacttggtggcgcgcgtctacctcggcggccagaacgtgaccctggacctcgctaggttccggcagaccctggcgaggatgcacgcgcacgcgatgcggcagcggcgccggcaggagagactgtga

SEQ ID NO: 30277 - DNA, 276 bp, Zea mays
  Peptide Sequence Number=SeqID_72056
atgaccctcactaagagaaaagacaaacagcaagcatcatgtcaggttgagcgatgttttagccacatgtttggtgagcatggtcatctaccatacctaagatattcatatggttctggtgctttaattggtatcttaattgtgaatagtgagtcaaccgatcaagccaaggatggaggcaagaagagcttcgaggtaccgagtgcacgggagaaggtcaaggagaccaggaacccaaaagccaggggtgaagaagacttgcaaagtcaaggttaa

SEQ ID NO: 30278 - DNA, 288 bp, Zea mays
  Peptide Sequence Number=SeqID_72057
atctctgttgcgcgcctaggtgcctccgtcgcacgggaagacttcgccaagtcgccggcaacaaccagcaagcgcccgcgagcccatgctgggagcactgcaaaagctcaccatcatcgtcgcgtccgtttccttgcctcgtcgtcgcattcacgcatcagcaggaagccggagccaccgctgcgacgtctgcttgctggagcttcgctgagctaccctccgcgatcatcttcgtcgagcttccttccgagccagcctggccatgagccaccgctaggcgaggcctag

SEQ ID NO: 30279 - DNA, 432 bp, Zea mays
  Peptide Sequence Number=SeqID_72058
atgggtcaagaagaaccaacttcttcaaagccatatgccttcacgtgtgatgagcataaaaagatgaaagggaaaaagaaggtagagtatcttctctttatcattgacaagaaaaagcaaagaaagagacgatgcttcacatgtggggaaaaggccacttttgagataattgcccaaatatggacgaagccaagaagaggaggagcaaaggcaaggcgctcacaagtgtcgaaacttgggatgattcttcaagtgaagatgaacctccaaggagacacgaccatcactcttcatcacgctctttacactcatcacacaaatgccttatggcaagaggtaatactatggttatgtggtgtaagtcacaaggctcaagatgaagctcaagaattgaacaagggtgctggagctcagatatgtcaatctagatga

SEQ ID NO: 30280 - DNA, 862 bp, Zea mays
  Peptide Sequence Number=SeqID_72059
atggacgccgccgtgtggggaggggcgaacgtcggccccgccaataggattcctaagattcgacggagtggagctgcggtagttccacaggccaaggaactggcctccaaggtcagaggtcagaatctttcgtctagccaaccaggcccgcttgtccgcccccgacagcgacaccaaccagctcgcaaacataagtcccgcgacgcccgggcaagagcagcaccggtgaagagcgctccgctgccgtgcgcgcccccgcgccggcctcccactggatcgctccacctcatgctccaaatctttattggtttccacgttgccccctcgccgtccccaaccatcgaccgcgccgcgcccgctgccgcctcccagctcgctctatataaacaccacgcgagcggtgacatggcggagggggagttcaagcccgcggcgatgcaggtggaggctcctgccgaggcggcggcggcgccgtccaagccgcggttcaggatgcccgtcgactccgacaacaaggccaccgagttctggctcttctccttcgcgaggccgcacatgagcgccttccacatgtcgtggttctccttcttctgctgcttcctctccaccttcgcggcgccgccgctgctcccgctcatccgggacacgctggggctcacggccacggacatcggcaacgccgggatcgcctccgggtccggcgcggtcttcgcgcgcgtggccattgggcacggcgtgcaacctggggggcccgcgcttggctccccccggcccttcttactcttaacaaccccccccgctaataattccgccgtcttcaattccgcctcgcccaacctggctcggggcgctttcttcaggg

SEQ ID NO: 30281 - DNA, 132 bp, Zea mays
  Peptide Sequence Number=SeqID_72060
atggagatgtgtctcaacactataacaatgtatcttgagctcccactccttcaaatgaccggctatggggtggtctggtacaccatcggaccagtccggagaccaccacgtgagtcgaacattggaaactag

SEQ ID NO: 30282 - DNA, 426 bp, Zea mays
  Peptide Sequence Number=SeqID_72061
atggccgaaggcaaaggaggcaaggggaagtgtcactcgtcggaggggaaacataagctccttccgagtcccccatctgaggattttggggactcagagttctctgaggaggaattctcctcgggggactacggctcgccgaccccgacataccctgcgacgtcgtctgatgactcggacgattctaaggggttatcgatggcggagcgggcctacatctggtccgtcgagcgcgtggggctcgggggatcagatgacttgggggaggactccttggagaactcctcgaagcaagaggaggactccgaggagggcggcgacagcggcagtgagggtgacgatgacggcgagggcgaaggcgacaacgatggaggcgatggcgatgacggtgagggcgacaacaccgatgtttgtgcatttgcttga

SEQ ID NO: 30283 - DNA, 492 bp, Zea mays
  Peptide Sequence Number=SeqID_72062
atggcgcccaggaagagaaaacagggtgctgccatgccagacatccctccgattgatcccaacagacaacttcctttctatgttggagagtcatctaggtctgctcgagttgagtctgcggatgctgttatcgggcgtgtgtgcgatggacagaaaagaatttgcagccctggtagcgctcgtcgcaagcggacacgctgggtaggctccttggccatgtccaccgagacgaagaggagaaaaggaaagctttggcgctcatccggcttagaactggaggctgactccacttctccagaccttggtaatgacgtggcgaatgtcgatcttgaagatgacgttgagagttgcggtggcactagagttagtaggtatgttttggaggaagaggaggatgaagaggatgtgccctccttggttcacaggaatcgtcgcagcaaggccagcaacgatgtcccagaccaagccgtcttagggttggttagcttctag

SEQ ID NO: 30284 - DNA, 414 bp, Zea mays
  Peptide Sequence Number=SeqID_72063
atggtcggtcccaaagatcacactaatgcctccccagataatttccttagattgactatggaatgtctctcggtcgatgagcaacaatggtttgaagacctcatgaagcaattggatgatgatgtgctacgacaatgtgcatgggtgcacgaagaagcgaagttctggtcacacctcactctagatcgacaccagagaattatcaagaaaggggagatcaagctcgacttccttgtaccttcactccaaaatagcaatcattatgtagatcaacaaagggatcagttagagcagtttctgggaggggtagaacacttactcaagaaactcacaggtgcgctcgaaaaatctactatacctagttttccatctcacgaggtcgcatcggcaacaaatgggcctccacaatcctag

SEQ ID NO: 30285 - DNA, 114 bp, Zea mays
  Peptide Sequence Number=SeqID_72064
atgaaaaaggagatcggaaaatatgatggaagtgacagtattgccgtgcagcttgctaacgaaacacactggaatgatcttgtaattattatgtattcaagttacagcggctga

SEQ ID NO: 30286 - DNA, 2835 bp, Zea mays
  Peptide Sequence Number=SeqID_72065
atgtgcgacgagcgcgcgcgcatgctccaggaccagttcaacgtcagcgtgaaccacctccaggcgctcgctatcctcgtctccaccttccaccactccaagacaccctccgccatcgaccagaccacgttcgcaaggtacgcggagaggacggcgttcgagcggccgctcacgagcggggtcgcgtacggggtgcgggtcacgcacgccgagcgggagcagttcgagcgccagcagggatggagcatcaagaagatgtactcctccaagaccaagaagcagtcgcagggaccagggaacgctgaggacgccgaggtgcgggagccggcggaggagtatgctcccgtaatcttcgcgcaggacgcatacaagcatgtcatctccttcgacttgctatccggcgccgatgaccgcgacaacgtactccgagctagagaatctgggaagggtgttcttactgctccttttaagctgctcaataatcgccttggagtgatctccacctacgctgtgtacaagtatgagcttcccccaaatgccaggccacaggagcgcattcaggctgctataggctacttaggtggcatatttgacattgaagcgcttgttgacaagttgcttcaccagctcgcgggcaagcaatccatcatggtgaacgtttacgatactactaatgatagacggatcagtatgtatggttcgaatgatacaggcagtggcatgtgccaagtcagcacactgaactttggtgacccgtcaaggaagcatgaaatgcactgcaggttcattcagagtccaccttggccttggatggcaataacgacatcaattggaactcttgtgattgctttactgattggatacataatttatgctactgcaaaacggattgccagagttgaagatgactttcaggagatgagtgtgctcaaaaagcgtgcagaggatgcagatattgccaagtcacagttcttggctactgtttctcatgagatcagaactccaatgaatggtgttctaggtgagggatgctccaaatgctcatggatactgatttggacacaacacaacaagactatgttagaaccgcacaagccagtggcaaagcttttggtatctctcatcaatgaagtacttgatcaggccaagatcgagtctggtaaacttgagcttgaagcggtgccctttgaccttagaacagtttgtgatgacattttgtctctcttctgtgggaaagctcaggagaaaggactggaggtaatcaaagactacaaccatgctgtcacacactgcacttttactgtattttattataaatgcactgactttattctggttattccttactatgacacacaacgggagcagctggcagtgtttgtttctgaccaagttccacaagcactaattggcgatcctggcagaataaggcaaatcattacaaatcttgtcgggaactctataaaattcacagagaagggtcatatctacttgacagttcatgttgttgaagagattatgaattgtcttgaggttgagacgggaactcagtccgccaataccttaagtggctacccagtggcgaacagaaagcgcagttgggaaaactttcgagtctttagcagggaactgaactcatctgagatgccttttgcacccatcgcatcagactcaataagcttgataatatcagttgaagatacgggtgttggaatcccgttcgatgctcagtcccgtgtcttcacccctttcatgcaagtaggtccatccattgctcgcatccatgggggcactggcattggattaagcatcagcaaatgcttggttggactcatgaggggagagattggatttgcaagtaaaccccaagttggttctactttcaccttcactgcggttcttacgagggcccattccagcagaaatgagaataaatcgtcagaatttaaagggatcaatgcattggtggtagatcataggccggtccgtgccaaggttactaggtaccatttacagagactgggagttcagaccgaattgacaactgacctagatcaatatatttctaaaattaattgcggatcacaaattgcaaagcttgtgctcattgacaaagaaacctggctgaaggaatcccactctatgcctcttttggttactaaattgaggaacaaagatcagccagactctacaaagttatttcttttggagaaccctaaaagtactgccaaaagcaattcacatatattcagggaatttaacttgaatgtaattatgaagccacttcgagcaagcatgcttcaggtttcgctacacagagcattgggtgggatagataaactgcactgcaggaatggagtacttggcaattcaacactgggcagccttcttcacaagaaacgaatcttagtggttgacgacaatattgtaaatctcaaggttgctgcaggcgctctgaagaaatatggcgcagaagtaacttgtgctgatagcgggaagaaagcaatcacgcaactgaaacctcctcacagttttgatgcttgtttcatggacatacagatgcctgaaatggatggatttgaagccacaaaaaggattagagtgatggaaagagatctaaatgagcaaatagaacgtggagaagccccaccggaatgcgcagggctccggcagtggcgaactccaatattagccatgacagcagatgttatccaggcgacgcacgaacagtgcttaaaatctgaaatggacggttatgtatccaagccattcgagggcgagcaattgtacagagaagtagctcgctttttccaaaatcaagaccaagttcagtag

SEQ ID NO: 30287 - DNA, 440 bp, Zea mays
  Peptide Sequence Number=SeqID_72066
aatctagagattcgtccccagagctcgacgccgccaacctcctggaggggccgaggaggagggcgagggggcaggagcctggaccgtcagagccgcaggatggcaacaacagaaggaagacatctaagaagaaggggaaggcgcacggcgggctgcccgtgatgcttgtggacctcaacgccggcgccaaggagctgcggctgtcacgttgggatagcagccagggcacgatcgtcaagggagaggggtacctccaattcatgcgccaatgtacattcaaggaaggcgacgacgtcgcgatttgggcctttgtgcagcggcggttccgcctcttcggcgtggacatgtgccacgacagcctactgcacctcctcgtcgtcaagaaacaagacgaagcccggtgccgtgtctgccgtgcccctgcgcagcccgagagttag

SEQ ID NO: 30288 - DNA, 1443 bp, Zea mays
  Peptide Sequence Number=SeqID_72067
atggaaggcaggatgacaagtttggaagccaccatgaaagtttcctcatcgatggcaagcagcatatcaaggaatgctgaccctgaccaacagactctacgccccaattcggtggagcagttttattttccaagacctggtcaatctttgccaggcattcctccattctttgggcctccctcctccagtttgtatcttcctaatgacaatgaagctaaatttggcaatcagtttgaatcaaatccttcacagaatacagattgggatccgcaggctatagtgagcaacctaaccttccttgagcagaagatcaagcagctcatatctactgctggttccctgctcccttcaatgaagaatccacttcttagcagcaatccagcagttaggcagcttggcaacactcttggttctcctatgggccttggcatgaatgctaatcagagaccaagtgtagacagcaagactgatattcctgacacaggaaaaacttctgattatgatgaactgatgaatagccttaatcctgcccaagatgaaagagatgagatgatcaaatgtccaaatccctgtggtggggaagggtctgaaccgactcccatggaggaccatgatgtgaaggaaagtgatgatggtggtgagggagagaatctcccccctggttcatatgtagtcttgcaattggaaaaggaggagattttagcaccacatactcatttctgcttgatctgtggtaagggtttcaagagagatgctaaccttaggatgcacatgaggggccatggagatgagtacaaaactccagctgctcttgccaaacccacaaaggattcaggtgcagatcatgcacctgttacaaggtactcatgcccatttgtgggttgcaaacggaacaaagagcacaagaagttccaacctctcaaaacaatcttgtgcgtgaagaaccactacaagcgaagccactgtgacaagagttacacctgcagccgttgcaacaccaagaagttctctgtcatcgcggacttgaagactcatgagaagcactgtggtcgtgataaatggctctgttcttgtggaacaaccttctccaggaaggacaagctttttgggcacgttgcccttttccaaggccacacacctgcgcttcccatggaagatgtgaaggtatcagaagcatcagagcaacctcaggacagtgagccgatgaatgaaatggcgaggagtaatatgtatagcttcccctgtagttcgtctgatggtatatcgaacctcgacatgaaaatggctgatgatgtgcgtggttatttctcgccgctgaactttgatccttgctttggcgcgctcgacgatttcactcgccctgggtttgacatctctgagaaccccttctcattcctgccttcaggatcttgcagttatgggcagcagaacggagatagctga

SEQ ID NO: 30289 - DNA, 1467 bp, Zea mays
  Peptide Sequence Number=SeqID_72068
atgtcgaccaccgcctacaacatgtcgtcggcgtacatgccgaacccgagcatcggcataccggactggctgaacaagggcgacaacgcgtggcagatggtggcggccacgctggtgggcctgcagagcgtgccggggctggtgatcctgtacggcagcatcgtgaagaagaagtgggccgtgaactcggcgttcatggcgctgtacgcgttcgccgccgtgtggctgtgctgggtcatgtggggctaccagatgtccttcggccagaagctgctcccgttctggggcaaggccggccacacgctcggccagggcttcctcctcagccaggcggggctcccggcgaccacgcacttcttccacggcagcggcgtcgtcgagacgggcgagatcacgcccttgtatcccatggcgtccatggtctacttccagtgcgtgttcgccgccatcacgctcatcctgctcgccggctccctgctcggccgcatgaacttcaaggcgtggatgctcttcgtcccgctctggctcaccttctcctacaccatcggcgccttctccatctggggcggtggcttcctcttccactggggcgtcatcgactactccggcggctacgtcatccacctctcctcgggcgtcgcgggcttcaccgccgcctactgggtcgggcccaggctcaccaaggacagggagaggttcccgccaaacaacgtcctgctcatgctcaccggcgccggcatcctgtggatgggctgggctggcttcaacggcggagacccctacgccgccaacatcgactcctccatcgccgtggtcaacaccaacatctgcgccgccaccagcctcctcgtctggacctgcctcgacgtcatcttcttcaagaagccctccgtcatcggcgccgtccagggcatgatcacgggtctcgtctgcatcactcccggcgcaggcctggtccagggctgggcggcgatcgtgatgggcatgctctcgggcagcatcccgtggtgcacgatgatggtggtgcacaagcgctcccgcctgctgcagcaggtggacgacaccctgggcgtgttccacacccacgccgtggccgggttcctgggcggcgccaccacggggctgttcgcgcacccggacctgtgcccgctgttcctgcccgtcaccaactcccgcggcgccttctacggcgacggcatgcagttcctcaggcaggtggtcggcgcgctcttcatcatctcctggaacgtggtggtcaccagcctcgtgtgcctggtggtgcggctcgtggtgccgctgcgcatgcccgacgacgagctggccatcggcgacgacgccgtgcacggcgaggaggcctacgcgctctggggcgacggcgagaagtacgactccaccaagcacggctggtactcggacaacgacacgcagcacaacaaggcgcccagcggcgtcacgcagaacgtctga

SEQ ID NO: 30290 - DNA, 405 bp, Zea mays
  Peptide Sequence Number=SeqID_72069
atggatggcggcgaccacccccgcggcggtgagccctccctctcacagcttctccaaggcctccagaaggggctggagattcttctgcctctcgcgcggggccccatagcgccaatggcttccagcagcggtcaccactcgttgagaaaacaacgggagcctcccgtcatcattccggagggaccgggaaaggggatactccggaagggatccttctccgccaaggaagcgggccccgagccccctactgatcagaggttcgaaggctggccccttggaagggttcgacaaccgcctcggagcactcgggctccgcgcccactactggtcagaggttcgaaggctggcccctcggtagggttcgacagccgcctcaggccactcgggctccgcgcccactactga

SEQ ID NO: 30291 - DNA, 234 bp, Zea mays
  Peptide Sequence Number=SeqID_72070
atggatgttaagaagaaacaacttaagacaggttttcttgacccgttgatgatatcccaagctcgctacaaagaagttgctcagagacatggagaagaatacaaagacttggatggtgctgaatttgagaaagccgtcaaacagaatcagagaaagaaaatgaaggttcctaaatccaagatcaatgttgaatcgttagaaagagatatggttttcgtcctctttattaaggtt

SEQ ID NO: 30292 - DNA, 180 bp, Zea mays
  Peptide Sequence Number=SeqID_72071
atgggcacgaatcttgaactaaaactaggggggtgtctatattcagtacatattaagctttctttgcccgacatcatctcccagttttttgcattcgccaacaagttctgctatgagggcttgaagccaacctacgacaaccgggtcacaaccatggtgctggctctcgacgacgcctga

SEQ ID NO: 30293 - DNA, 462 bp, Zea mays
  Peptide Sequence Number=SeqID_72072
atgcacgtcttcgagctgtggcgccctcgcgtggaggcatcggtcgagtccctccactcctccgtcgattcgatccgcgccgaggtctccaagatggggatccgctggtccaccgacgcccgtgtggatggatctggacaacccggtctcctcggtgcgcacgggtctggatccggaagggtccctgctcctgaagaacctccagatcgcccacgttttgggtcctgcttcgagaattactaccgggatagtgggcacgtgcaccccggtgccgacgctcactacccggtcacgggaagctggggactcgtctcggcgtccggatcctgttcatggcgattcatcttatgctggccgttcgtcgtggaagtcggctgttccacagtctgctcgctgggatccatcgcgcggtttggctccagaatcctccaaaactccaactcagccagcgccaacaattga

SEQ ID NO: 30294 - DNA, 687 bp, Zea mays
  Peptide Sequence Number=SeqID_72073
ccgaccctcgacgagagcggcgtggcagttcgccagaccggcggccgggaccgccaccgcgggatccggatctctgatgcgccggctggaggcccccagtctgccggcgtggctcccagtgcccccgtcgtggctcccaacgcctctgccgcggcctcccaccccttggacaagggcaaaagggctgcaggcagttcctccgccccaggtggcaccggagggtcggaggaagagaggcgacgccgactgcgccgcgccgacggatcgtttgttgcggaccccccgggcttcctctccctctgctcccaaggccgcgcctcccccgcccccggctactgccgccgagacagtgccacatggcccccaggctccagctgggggtccgacagcagcggcgccaacgttaagcggcgccgcaacggcgaagggggtccccactgctccgaaggctgcggcagcctcaacgacggcgataccgtcgagtacaccatcggcagtggcagaggaggccccaactgcgcccgcccccgccatcgaggccgacgcgggggggctcttcatgagactaaggcagcgatcctacgggagtgggaggcgcttgaggctgaacaccagcgcctaagcgactggcgtacccagctggaggagcgcaccaaggcggcgtcctgccagttcgccttcgagtag

SEQ ID NO: 30295 - DNA, 396 bp, Zea mays
  Peptide Sequence Number=SeqID_72074
atggagatagatgtgatcaagaaatataaattttcactaagcatccgagcccgcgtctctctggagagggcgcatgagcgccgtctgaacgtcaagggtcgcaaccttgactacgacttcgctgcggtcgcaccgcaaactccaacggacgcccggattcatgcgggtgtcccaatggccggcgtgggctgtgccgcactggtggatcatctccgcgcggcggcctggccatccaagttccggccacacctgctagagaagtacgacagggtgcgtgatgaaaagatgctggagaagttggccacacatgacgtggaaactgtcaccacgctcttcgctctggctgacaagtgtgccagggctgccgagggccgtgcttggcactcgacaccatag

SEQ ID NO: 30296 - DNA, 264 bp, Zea mays
  Peptide Sequence Number=SeqID_72075
atgaaagctgaaacacagaagggtaccatttttgcaagtgtcaactttgacgatgatgacaatgtatttgatgaggaagccgaaaaggcaagagttgctcatttaaacgagagcaccatcaatgccattattggtggtcgggtatccaaacaccttgaagacagtgtcaccattggtgatatatttgttgagtcatgtgctcaaaaggagggcaccataaatgttgacaagatagaagaggtgattgacgagccctatacttga

SEQ ID NO: 30297 - DNA, 99 bp, Zea mays
  Peptide Sequence Number=SeqID_72076
atggggaacaacgctaggctcccggtgccgaatgtgagccttgggtttgatggtcttgtccctgctccaaactatggctatgccaccggcaggccctaa

SEQ ID NO: 30298 - DNA, 906 bp, Zea mays
  Peptide Sequence Number=SeqID_72077
atgaccgggaactacgccctcaagattcatcttccatgccaatccaaagcagcaagagaatggacaagtgttgcatttaccccttttggttttcatggaagggatcacagggtggaaacttcagttaaatgttactgtttgcagccactcatggattcggagagcatggtctcaccaaatctaatactgatttcggatgaagctcttctcactatcagcatggtttttgcatatttggctggagttgtaccctctgggcagacatctcctcgtgtcagaaatcagaatgtttctcaacatattccagagccaagctcctctcattctggtagggacctaaagttcttgcctgaaaggaatgctgcatttgaccccaacgatatgtggagtgaagtaagaaatatctctggaagttctgaactcgatggaatcaggtggttgcaagtatcgactaccttgatagatagtttaattcaaccagtatttatgaaatggattgaagaagaacaggccttggaaaatggacaaatcaacgaaaaacttatgaagacgataagcagcaaactaaaggagggcaataagatcttgaggaggtttaacagatttgggaaatctgaactctatttggatatgctctttttcctaagatttggttctgcaaggtgtgacagttattttaatgtcaaatttcttgctgaacatggagaaagaattttagaggaccttgttatttccttagctgatgtgattgctagtatttatctggagcttatgtcagtggatggtgatatgtctgctgaagttgttggttccagcttggttctatgttctctatcaaccagagaactccaaaagctgcgcaatgagggatcaaatcccctcagatcaatgagaaaatcttcttag

SEQ ID NO: 30299 - DNA, 213 bp, Zea mays
  Peptide Sequence Number=SeqID_72078
atggcgtcgacggtaggtcaagcgaggagaggctcggcgggcatgcggagaggagggactgggaggggcgccagcaaggtggaggagagctacaccgagcaacagagaaagagggagggcgcgaccaggtggccgatgggcctggggaggggggcagtcgggcaggccagggtagagaggggagctcgcgaccaggcggcgacgtcgccctag

SEQ ID NO: 30300 - DNA, 384 bp, Zea mays
  Peptide Sequence Number=SeqID_72079
atggtcatggcgtgggacagcatgcggtcctgtccccagcgcatgtgttgccccaacacaagcatggctgcggtaaacaactttggcgagaggaagatggaaatgtgtggagcacagggacagtggtcgatggctgaggtgaaggttatgcgggcttgtgctgatggaccaggagcggtgaaggacgagtgttgggtcttggctgacgaaccggagcagccaggtgaccagccgtggtggctgacacctcggacacacactcgcgtgatccacaatgattttgtcaatcgttgtgcctttgtttcatttgaggaagggtcactggaccggcccacaactttcagttggcttcaacttcagttttgtgcccttgctgaatgctga

SEQ ID NO: 30301 - DNA, 510 bp, Zea mays
  Peptide Sequence Number=SeqID_72080
atgtccacacggagtttgcttgggaggtgtggggtgcttctgtgtgggctctttgccttgctgatctggcacctgggagtgggaagttgttggaccataaaattgaagggtggtaaggaggtcctagaagcattagatggagttcgcacaaggcctggtatgtacattgggagcacaggaccacgcggcttgcatcatctggtttatgaaatcttggataatgctgtggatgaagctcaagcgggccatgcttcgaagattgatgtagttcttcatgatgacaattctgtcagtgtaacagacaacggccgtggggtagagattcctactgatatgcacccccagacgaagaaatcttgtgtggagactgtcttaacattaatgcacgctggtggcaaatttggaggttcaaaaagtggttacagtgtctctggagggcttcatggtgttggcttatcagttgttaatgctttatcagaggtttatattttgatctcttactggctttga

SEQ ID NO: 30302 - DNA, 904 bp, Zea mays
  Peptide Sequence Number=SeqID_72081
gtcctctgattcctactctgatacagtgctaggatacgcaaacagtatccgcactattgatggtggtactcatattgatggtctaaaggcttcattgacgagaaccattaataaccttgcaaagaagtcgaagactattaaggataaggatattaccttgagtggggagcatgtaagagaaggaatgacatgcatcatttcagtgaaggtccctagtccagagtttgagggtcaaacaaagacaaggttgggaaatccagaagtacggagaatagttgagcagtctgttcaagaaaacttaacagagtacttagagcttcatccagatgttctggattcaatcctatcaaagtcccttaatgctctcaaggctgcgttggcagccaagcgtgctagggaactagtcaggacaaagagtgtgttgaaatcttcatcactccctgggaaacttgctgattgtgcatcagctaatcctgaagaatctgaaatctttattgtcgaaggtgattctgcgggcggtagtgcaaagcaaggacgggatagaagattccaggctattttgcctctaagaggtaaaattctcaacattgaaagaagggatgaagcagccatgtacaaaaatgaagagatccaaaaccttattcttgcacttggattaggagtgaagggtgaggattttaagaaggaggctctccggtatcataagatagttatacttactgacgctgatgttgatggagcacatatccggactctcctccttactttcttcttcagatatcaacttagaataggtgctgagaacaggtcaaacatgaaggaaagtctatggcggtttttcatgggaaagtccttccagtactctattggcaatgtagaaaaatccacaaataaaacagggtga

SEQ ID NO: 30303 - DNA, 405 bp, Zea mays
  Peptide Sequence Number=SeqID_72082
atgggaggtgaacagctgatctccatcccgaattgcagtaataaaagagcattatttgatgaaggttgcatctacgttggtgtacctcctctttacaaggttgagcgtggaaaactagcacattactgctatgatgatgccgacctcaaagagatagttaacaccttccctgcaaatgcatcatatcatatccagaggtttaaaggtttgggtgagatgatgcctgcacaattatgggaaacaacgatggatcctgagaggcggctgttgaagcagcttagggttgaagatgctgccgaggccaatgttgtgttctcgtcacttatgggcacccgggttgaatataggaaggaactgatccagaaagctgctagcatgatcaacatagatcaacttgacatttga

SEQ ID NO: 30304 - DNA, 868 bp, Zea mays
  Peptide Sequence Number=SeqID_72083
cgctcgacgcctcatgacacaccctgcccggcgacccacgacctccacggacaccgccgagatcgccttcctcggcgccactgctatccccgacccgcagtccacgctggccaccccgatgccgctgccggagatccccttcctgcacacatcaacgccgcccccgcctcctccgccggcgccagtcacacaaaagcagaagcacggcagcggcaagcagcggtcgcgaccggggcgcctcatgcggtcggtgcgcgccgcgttccggtcgttcccggtcatccaggcgccgtcctgccgcggcatgccgtcgctgcacctctcgggcctgcagggtgccggtgtccggagccacttccatggcgcaacgcacgccacggggacgttgtacggccaccgccgggcgcgcatcaccatcgcgttgcacgagagcccaggcatgccgccatgcgtgctgctggacatcggcgtgccaacggccaagttcatccaggacgtgagcgcggcggggatggtgcgcgtcacactcgagtgcgagaagcagcatcacgcggtcgacgcgggcatgcggcggctgctcgacgagccggtctggacgaccgaggtgaacggcgagagcgtcgggtacgcgtcgcggcgggaggcgacggagcgcgacgagtgcgtgatgcggatgctgcactccacgtccatgggcgtcggcgtgttgccggccgacatgacccacccgtccgacggtgagctcacctacatgcgcgtgcattttgatcgcctcgttggctccaaggactccgagacgtactacatgcacaaccctgagggcagcgcaaccgggccggagctcacaattttcttcattagaacttag

SEQ ID NO: 30305 - DNA, 458 bp, Zea mays
  Peptide Sequence Number=SeqID_72084
actaaccgcatcatggaggcctgtgagcttacttttgatgagacttcgccttgtccatcccttgtatttgaacctgcaggtccagatcagatggtacaggccatgtttgtggaggaggatcatgacaacgccgattggggtgatcctgagccgactccactagctaccctagtcgagcctgcttccactactttagctgatagacccgaccccacttcttccaccacttggggtccgctcgagccagtgcttgctaagactggaggagttgaggctgctgttgatggggaggcaaccgaggcaggcgatgacccagcccccgagctggtgaagaacgagtcggtgaggcgggcgatgactcagcctcgagtggccaggcggcaaggcggcgacgacccagccctcgagctggtgaagcagcgagtcggcgaggcgggcgacgatccacccccgagcta

SEQ ID NO: 30306 - DNA, 1260 bp, Zea mays
  Peptide Sequence Number=SeqID_72085
atgtcttgctcagatgggcatcctgttgcttcctccagcataggcatctcccacaacttttcaacccctttgtgccaggttgagaatgctcccacggcctctgaagcatcacgagttctcctcgccttcacgcccacagagtttcaacatctctctattgtcaaggccacaagagcggaggggaagcgcaagaagaaggcattcgtacccctctcggtccaagcctctgagctcgccaccaccgctcccgacgcccctcgcctctactctgttctgctcagcactcctctgaaaccgggcgatgcaaccactctagaagtgctatacatgctcactcactctttagagcccttccccgctgagattagccagtcagagtcccagttggtttactaccgtgacagtgcggtgcttctctcgccctaccatgtcctggagcaggttacctacatcaaaatgccaagcaataggatcgaatccttcacaagggtcgatcctaccacacgagctggttctgaagtgaaatatggcacatacagtaaccagatgccaaactcctatttgccagttcttgtgcattatgagaataaccgcccatttgctgttgttgaggagcttttactcattgagtactttcttgccaggcttgagtatcaatctaggccatctatcagtggagcttcgtcctttaagaatcttcttgcaaggctgccacctcgggttcattcagtttactatcgtgatgagattggtaacatctcctcatcccatctgcgcactgattcacacaagtccgatctagaaattgagcccagatatccgttatttggtgggtggcactgcacgttcaccattggctatggtcttccattgcaagattttgtctttgagtcagttgatggccggcgctacatcaaccttacttttggttgccctctattggatactgtggttgacgatcttacagttaaagttgtgcttcctgaaggatcaaaaaatccagagcatgtagttccttttgtgacagagaaacatcttgagactagttattcataccttgacgttgttggaaggacgacggttgtactgaagaagaaaaatgttgtaggggagcacaacgttcctttccaggtgtactatgaattcaatccgatcttcatgctggcggaaccattgatgctgatatctgcagtgttgctgtttttcgttgccttcattgcgtatcttcacatggatctttccatcagaaaatcatcatag

SEQ ID NO: 30307 - DNA, 291 bp, Zea mays
  Peptide Sequence Number=SeqID_72086
atgaaacacacaaatgttacaagggcttatttgtgcgatgaagagacagttaggataaatcacatttgtgatgcctttcatgtagtttgcatagaaggtccagaccgtgtcaaggaactattgccatgggtgcctcatttgactatggtgaagacgcacccgcatgtagaaaagtcggtggccaagcgtttcatgtgcgacatttctatttgtgggcttatgctcgcgcgggatgccgagcgatgtttttgtcacggctacgcgatctggaaactgcagttgcgttgctaa

SEQ ID NO: 30308 - DNA, 276 bp, Zea mays
  Peptide Sequence Number=SeqID_72087
atgggaattaatgaaaggaaaaagaataatgtgaatcaaggttatcctaggacccttgtaatctgtccactaaaatgtatcaaggcaataccaatccactatgttattctaaaagaaaacctaagcataaaagactgtaatcttgctgacggagaatacatcctcgtgccggagcaaggagctgctcaggaggtagccccagatccagcacccgagcctgcaccagaggacctgcctgccactgctttggaaggcaagccccggttttatgcataa

SEQ ID NO: 30309 - DNA, 2652 bp, Zea mays
  Peptide Sequence Number=SeqID_72088
atgcccggcataccgagggatgtcgccgagcactcgctggatattcgggccggagcccgacccgtcaggcagcctctgcgccgattcgacgaggagaagcgcagagtgataggcgaggagatccacaagctaatggcagcagggttcatcaaagaggtattccatcccgaatggcttgccaaccctgtgcttgtgagaaagaaaggggggaaatggcggatgtgcgtaaactacactggtctcaacaaagcatgtccgaaggttccctaccctctggctcgcatcgatcaaatcgtggattccactgctgggtgcgaaaccctgtccttcctcgatgcctactcagggtatcaccaaatccggatgaaagagtccgaccagctcgcgacttctttcatcacgcccttcggcatgtactgctatgtcaccatgccgttcggtttgaggaatgcgggcacgacgtaccagcggtgcatgaaccatgtgttcggcgaacacatcggtcgcacagtcgaggcctacgtcgatgacatcgtagtcaagacaaggaaggcttccgacctcctctccgaccttgaagtgacattccgatgtctcaaagcgaaaggcgtcaagctcaatcccgagaagtgtgtcttcggggtgccccggggcatgctcttggggttcatcgtctccgagcgaggcatcgaagccaactcggagaagatcgcagctatcaccagcatggggcccatcaaggacttaaaaggcgtacagagggtcatgggatgtctcgcggccctgagccgcttcatctcacgcctcggcgaaagaggtctgcctctgtaccgcctcttaaggaaggccgagtgtttcgcttggacccctgaggccgaggaagctctcgggaacctgaaggcgctccttacaaaggcgcctatcttggtgcccccagctgatggagaagccctcttggtctacgtcgccgcgaccactcaggtggttagcgccgcgattgtggtcgagaggcaagaagaggggcatgcattgcccgttcagaggccagtttacttcgtcagcgaggtactgtccgagaccaagatccgctacccacaagttcagaagctgctgtatgcagtgatcctgacgaggcaaaagttgcgacattacttcgagtctcatccggtaattgtggtgtcatccttccccctgggggagatcatccagtgccgagaggcctcgggcaggatcgcaaagtgggcggtggaaatcatgggcgaaacaatctcgttcgcccctcggaaggccatcaagtcccaggtgttggcggacttcgtagccgaatgggtcgacacccagctgccgacggctccgatccaaccggagctctggaccatgtttttcgacgggtcgctaatgaagacgggagccggcgcgggcctgctcttcatctcacccctggggaaacacctacgctacgtgctacgcctccatttcccggcgtccaacaatgtggctgagtatgaggctctggtcaacgtgttgcggatcgccatcgagctaagggtcagacgcctcgacgcccgcggtgactcgcagctcgtcatcgaccaagtcatgaagaactcccactgccgcgacccaaagatggaggcctattgcgatgaggttcggcgcctggaagacaagttctacgggctcgagctcaaccacatcgctcggcgctacaacgagactgcggacgagctggctaaaatagcctcggggcgaacaacggttcccccggacgtcttctcccgggatctgcatcaaccctccgtcaagatcaacgacacgcccgagcccgaggcaccctcggtccagcccgaggtaccctcggctcagcccgaggcatcctcggttcagcccgaggaaccctcggcccccgagggcgaggcactgcacgtcgaggaggagcagagcggggccacgcctgatcgaaattggcagaccccgtacctgcaatatctccgccaaggagagctacccctcgaccaagccgaggcttggcgggtagcgcgacgcgccaagtcgttcgtcttgctgggcgatgaggaggagctctaccaccgcagcccctcgggcatcctccagcgatgcatctccatcgccgaaggtcaggaactcctgcaagaaatacactcgggggcttgcggccatcatgcagcgcctcgagcccttgtcgggaatgctttccggcaaggcttctactggccaacggcggtggctgacgccactagaattgtccgcacctgcgaagggtgccaattctatgcgaagcagacccacctgcccgctcaggctctgcagacgatacccatcacctggccctttgctgtatggggtctggacctcgtcggtcccttgcagaaggcgcccgggggctacacgcacctgttggtcgccatcgacaaattctccaagtggatcgaggtccgacccctgaacagcatcaggtccgagcaggcggtggcgttcttcaccaacatcatccatcgcttcggggtcccaaactccatcatcaccgacaactgtacccagttcaccggcagaaaattcttggatttttgcgaggatcaccacatccgggtggactgggccgccgtggctcatcccatgtcgaatgggtaa

SEQ ID NO: 30310 - DNA, 867 bp, Zea mays
  Peptide Sequence Number=SeqID_72089
atgtacttcgatgggtcgctgatgaaaacaggagcaggtgttggcctgctcttcatctcacccctcgggaaacatctccgctacgtgctgcgcctccatttcccggcgtcaaacaacgtggctgagtacgaggctctggttaatgggttgcgcatcgccatcgagctaggggttcagcgcctcgacgctcgtggcgactcgctgcttgtcattgaccaagtcatgaagaactcccactgccgtgaccggaagatggaggcctactacgacgaagtttggcgcttggaagacaagttctacagtcttgaactcaaccatatcgcccgacggtacaacaagactgcggatgagctggctaaaatagcctcggggcggacaacggttcccccagacgtcttctccaaagacatacatcaaccctccatcaagatcgacgacacgcccgagcccgaggaggcctcggcccagcccgagaaggcacccgggggcttctcgcacctgttgatcgccatcgacaaattctccaagtggatcgaggtccgacccctaaccagcatcaggtccgagcaggcggtggcgttcttcacaaacatcatccatcgctttggggtcccgaattccatcatcactgacaatggcacacagttcactaggaagaagttcctggacttctacgaggaccaccacatctgtgtggactgggccgtcgtagctcaccccatgacgaatgggcaggtggaacgtgccaacggtatgattctgcagggacttaagccgaggatctacaacgacctcaacaagtttggcaagcggtggatgaaagagctaccctcggtggtctggagtctgaggacgacgccaagctga

SEQ ID NO: 30311 - DNA, 192 bp, Zea mays
  Peptide Sequence Number=SeqID_72090
atggagctttccaagccctcggacccgacagaacctcaccggagacccgagatcatctttgcccgacttcggtcgcccgcggccgcacgtggaccgagaaatccggaccttccctacatcctcgaccacctcaccggagcagtctctccgctgagtttgaaattgattaaagaaactgaccaaaccttttaa

SEQ ID NO: 30312 - DNA, 897 bp, Zea mays
  Peptide Sequence Number=SeqID_72091
atgggctccggggaggagccgtcgcagatgcggagggcgctggtggactctctcgcgggcgccatctccggcggcatctcccgcaccgtcacctcccccctcgacgtcatcaaaatccgcttccagcttgtctgggcagaaatgttgatgagagttctactgagtttggatggttggaaatgttgttggttttctgaaactaaggttcagttagaacccacaacctcgtggggtattcttcgaagggatgtgtatggaccttccaaatacactgggcttctgcaagcaaccaaagatattctcagagaggaaggtttaccgggattttggagaggaaatgtaccggctctgtttatgtatatgccatatacagctatacaattcactgttctacacaaactaaaaacatttgcttctggttcatctagaacagaggatcatttggatttgagcccttacttatcttatgtaagtggagctatagcagggtgcacagcaactatagggtcatatccatttgaccttctgaggactattcttgcatctcagggtgaaccaaaggtttaccccaatatgaggtctgcgtttattgatataattaaaactcgtggtgttcaagggctttattctggtctatctccaactcttgttgaaatcataccatatgccggtttgcagtttggttcatacgacactttcaaacgttcgatgatgacatggaacagatataaatattcacatcttagctttggaagcgaggatgattcagtatcaagtttccagctatttctttgtgggtttgcagctgggacattttcaaaggctgcatgccacccacttgatgttgtaaagaaaaggttccagaacaagaactttttcatgcaccctctacattag

SEQ ID NO: 30313 - DNA, 630 bp, Zea mays
  Peptide Sequence Number=SeqID_72092
atggccaagatccagcctctgcctgcagtctcgtcgccggcgccggcctccaacgcggacgagccgtcgcaggtgtacacggtgtggatgaagtcgctggtgttcaacggcaacggctgcacggtgtatggcgcggacggcggcgtggcgttccgcgtcgacaactacggctgcaggggcgggcgcgaggccttcctcatggaccgcgccggcaggacgctcgtcgggatccagaggaggagctgcttcgggatgttcaggagatgggaggcctaccggtactccgaatccgagtccgacggccgcgaggagacgaggacgccgtggttcgcggtgcgcaaggcgcggcggggcggtagagctgccgtgacggtgcatggcagcggcgggaggagcggggcgtatgcgatcgtcggcgggtactcgcgcaagccggactacagaatcatcggcagcactgacggtgctgccgtggcggcgatcgccaggaagcagacgccggccggggtggttctgggagacgactacttgatgctgacggtggcgccggggacggaccgtctcctcgtgttgggcttggtcgtcatctgtggcctcatgacccgtcgctgtgatggccgatggcgatga

SEQ ID NO: 30314 - DNA, 264 bp, Zea mays
  Peptide Sequence Number=SeqID_72093
atgagctcagggacgacgacaacggaggaggagagcggcaaggggccgccgccgcagcaccagcaccacttcgtgctggtgcacggcgcctgccacggcgcgtggtgctggtacaaggtggccacgctcctggcctccgcgggccaccgcgtcacggcgctcgacatggcggggtgcggggccagccccgtgcgcggcgaggacgtgggttgctgctacagccgcccgctcctggacgcggtgggagcgaacgaatcaagctga

SEQ ID NO: 30315 - DNA, 573 bp, Zea mays
  Peptide Sequence Number=SeqID_72094
atgcagcccaacagtgattcttcacctcgccttcgtctgacctcgtcgcccagctcctccaccgccctcgcgatgcagcctcgtcgctgctggagcctcggccttcacgactaccacaccgctccatcaaaaagggcctcgccgccggatgcggcgtggggtatgtgcggcatggagcaggagagcgcgtgcaatctagggaggaggaagatgaattcgagcgagaggtggataggcctcggctcgtgcaaagcgttggaagaaagagcggagattggagctccctccgcattcggtgtggagattaaaggcggcggctgggggcggagacacgattcagagcgcgctcgcgatggggagggccagacgggagggaggcaaagatggcaggcgtccggtgcacgctcggaggagaacggggatgtcaggttgtgcgggtgggcatgggtccggcgtctacttgcgggagcggcggcgccggagacgggatgtgtggggcgcggatggcgcagagtgggtggggtggaggcgggggcatacacaggtgtggacgcccacactgctgtcttatag

SEQ ID NO: 30316 - DNA, 204 bp, Zea mays
  Peptide Sequence Number=SeqID_72095
atgggaatggtgtacttgggcctgtccgtgttaacggttgagttcgatgatgtgcacaggcttgctgatggtcatgtgaaacattcgactgaagtgttttatgcaggctctctatggaaggctcacttgtacgtcgacccccgggaaaaggtcactgcgcgctatcagttttgcagcaattctgcggagtgtgaccgctactag

SEQ ID NO: 30317 - DNA, 741 bp, Zea mays
  Peptide Sequence Number=SeqID_72096
atggacttaacgaaaggaaaaagcttggttgttcttgtatacaactcgcttgggtggaaacgagaagacgtcattcgtataccagttttcagtgattcgattgtcgttcatgattctgaaggacgagaaattgaatcacaacttctgcctatagctacagcctcgttgaacataagagaaaaacatgtcaaggcttacctgggcacaacgccagcacatatttcttcgaagtccactcagtactcacctcaaggaagtgaaagtagtaatctacaagttggtcaaggcaacttgaaacttcaatataatgaagctggaaaatatccctgtactccgatagttcaagcaaactttgagcagaaatacaagtattatattggacaggatggaaatggaagtgatcctcaggcttctggagcatacatattccgccctaatggcacagttccaatcagtactgatgggcaggtttctctcacagttctgcgtgggcccatattggatgaagtgcaccagcagataaattcatggatttttcagattaccaggctttacaaggagaaggactttttggaaactgaatttatagttgggcccataccagtagatgatggaaatggaaaagaagtagcaactgaaattgttacaaacatggttacaaacaaaacattctacactgattccagtggacgtgatttcatcaaaaggataagagattatcgatcggagtggaaagattga

SEQ ID NO: 30318 - DNA, 2007 bp, Zea mays
  Peptide Sequence Number=SeqID_72097
atggaagcgaacgcgagtagaagcgaaggggccaaggcccaagggggccaagagcgcaagcacttcgcctccatacagcacttgagcactggcatcctgctctgccagagagaactcagacgcgcccggtgtcctctgcagctctgccacccccaagaaagcgaggacgacggctcgccctcgcgcggcgccttcatcatgctcccgccgttcggcaacccgctctgggtaccggaggacatggacgaccagcagcagcacgcgcctccgccgacgcccatggagttgctgacggtgccggcgcaggggcacgaggagcagaacctcctagccctggcctcggccgccgccgttgccggggccggatgtgttttcagctcaccggcgatgctcgatgacgactggtacttcgaccccgtggctgcggccgccgccaccggcgcgcaggggcacctgctcctggcgccgccggggccggtgcccggccccggcgccggctcgcagatgttctccctcttcaacgttggcggcgccgcgacgttcgacgtccatgggttcgacattggcctcggcacgctcggcggcgggtccggtggcgacctggtcccgttggcgggtgcagggaacacatcgaattccgcgtccttttccatgtccctgaacgccggcctcctcgcctcctcgttcggcggctttggcacagcgccggcgcaaatgccggacttcggcggcctgggcgggttcgacatgttcaacaacggcgccggctcctcctccgcggcgccccctcctgcctcggcgtcccttacggtgccgttctccgggcgcgggaagcccgccgtgctccgcccgctggagaccttcccgcccgtgggcgcgcagccgacgctgttccagaagcgcgcgctgcgccgcaacggcggcggggaggactacgacaagaagcgcaaggcggaggccaccgccgcggctgcgggagcttcgtcggcctgtggcggtgacgacgctgaggacgatgacggcgggagcatcgacgcgtccgggctcaactacgactcggaggacgcctgcaggggcgtcgaggatagtggaaagaaggacggcaagggttccaacgccaacagcgcgggcgacgggaaaggtaagaggaagaggttgccggccaagaacctcatggcggagcgccgtcgccggaagaagcttaatgaccggctctacatgctccgatccgtcgtgcccaagatcagcaagatggacagggcctccattctcggcgacgcgatcgagtacctgaaggagctgctgcggaagatcgaggagctccagaacgaggtggagtcatcagcatccccagcttccacggcctcgctgcctccgacgcccacgagcttccgccctctgactcccacgctgcccgccctaccatctcgcgtgaaggaagagctgtgcccgagcgcgttgcctagccctacttccaagcaaccaagggtcagtatatatacatacttctctctgaaaccacgcttcatcggcagcgttctttcagatgaaatggttgaggtgaggacgacgagggaagggcgggaggtgaacatccacatgctctgcgctcgcaggcctgggcttctgctcgctaccatgagggcaatcgaagggctcgggctcgacgtccagcaagctgttgccagttgcttcaacgggttttccttggacatcttcaaggctgagctgtgcaaggacggcccagcgctcctcctcctgccagaagaagagatcaagtccgtcctcctgcagccacaaccaatcactgcccccgtcttgaaggccgtgcgcgcgcatgtgcggctggatctaccgccgccgccgccgccgccgggacgtgcgcgctcgttgctgcttcggaagtgcaggcagcgggattcgctctgcgccggcgtgctgcaggtgtaccgtacgcgtcgccctgagaccggcggcggagctccggcaccccgtcgcgccggtcag

SEQ ID NO: 30319 - DNA, 429 bp, Zea mays
  Peptide Sequence Number=SeqID_72098
atggccgcgatcctcccccacgagccgccgcgatggccgcgatcctcactctccctccccccacgatctgctccccccatctcaacaatccccgtcccatcgccgtgcgtctcggctgtcatcttccctaccggaagcagcggctgggggcaagatggtgcggcttggggcaagatggtgcggtggctcacctaccggaagcggcacagctacgccaccaaatcgaaccagacccgcgtcgtcaagacacctggtgggaaacttgtgttccagtacaccaagaagcgcgcgagcggaccgaagtgcccagtcaccgggaagaagatccaaggagtatgtgccgcccatctttctattttatcctctcgttattgtgttaggtcgttgcatcatgctccatgcagagatttcaactttaatgctgcttga

SEQ ID NO: 30320 - DNA, 306 bp, Zea mays
  Peptide Sequence Number=SeqID_72099
atggatctagacgatgcagagtcgaatagtgatgaagcaactgagctagttactagatcaattcgggtgatgatggagtctggctgtgaggaggtgacacttgaagcagaagttactaacaagggtgcccttgctctctatggtcgcctggggtttatccgagcaaaaagactgtacaggtactatttgaatggtgtagacgcttttcggctgaaacttctgtttccacgccctgatcctggcctgcctccaatgatggttggcaatgacagggatgaccagaagatggattctccctacttgtga

SEQ ID NO: 30321 - DNA, 543 bp, Zea mays
  Peptide Sequence Number=SeqID_72100
atggctagaaatagtggttggggctacaaatacccccaaccacctccattcaagatttctaaacctcctccctgcggacgccgtgaggataaaagcaaagagagagtgagagccattgaggtcgtgctcgtgccgccgaagtaccctggctggtgcgatggggattgttcaccaggatacggcaccgccgcggagccatacccaaccatggaccgactttatcgcgacgccgctgcgggtattagcccagttgcgagccggggatttgttgtcggtgcttcatcggcgccgtatcgcctcgctgggccgtggacaggggcggagtctgagccctggggtcgggcgaagcggagttcgtcgtcttccggggccgagcccgagtccgagccctgggtcgggcggagcggagttcgccgtcttccgggacttagcccgagttcgagccctgggtcgggcggagcggagttcgccgtcttccgggacttagccagagtccgagccctgggtcgggcggagcggagttcgtcgtcttccgggacttag

SEQ ID NO: 30322 - DNA, 882 bp, Zea mays
  Peptide Sequence Number=SeqID_72101
atgcgcttggctaaccccttccacctaaaacatagtacctattttacttttaatcccttccatatgaaaccgttggatctggattggatgctttggccccgatcctcctacgtcggcgctggaccgcgcgctgccaccgcagcggcctcggcctcgggtccggcgttcgcccacaacgcgcgccttgcggcggccctggtccctgccgcggccttccttctcgaccttggcgggctccccgtcttcgccgtcctcgccatcggcctagcggcggcataccttctcgacgcgctccagctgcgccagggctccttcttcaccgtctgggcggcgctgctcgcggccgatgtcgcttttttcttctccgcctccctatcgtccgcggccgctgcctcgctgccgctgaccgtcctcgcgctgcttctctgcgctgagacctccttcctcattggcgtctgggcgtcgctgcagttccgatggatccagctcgagaacccgactattgttgctgccctggagcggctgctctttgcctgtgtgcccattgccgcccccgccctcttcacgtgggctctcgtgtctgcggtcggcatggccaatgcatcctactattttgccacgttctgcatggtgttctactggctgttctctataccccgtcggtccagcttcaatagccggaagcaggatgctccaatgctggacagtgatggcattcttggtcccttggagagctgtgtgcattctctgtatgtgctgttcgtgccggtgttgttccatgccgtgtcccatcgtgcaacactcttcacatcgttggccagtgtgttaattgttgctgctgttcttcataccgttctgtccagctgtacgacgaatctatag

SEQ ID NO: 30323 - DNA, 159 bp, Zea mays
  Peptide Sequence Number=SeqID_72102
atggcgaagaggctgctcccgtcgctgaaccgggtgctggtggagaagctggtgcagcccaagaagaccgccggcggcatcctcgtcccggaaacatccaagcaggggttgggcggttgcaggttgggcgatttggatcgctttgcaggttgcgaatag

SEQ ID NO: 30324 - DNA, 390 bp, Zea mays
  Peptide Sequence Number=SeqID_72103
atgaggcaggcgaggccgtactcggggatcttctgcggcggggtgtcggcgcggacgggcccgcacgcgctgccgctggcgcgcatcaagaagatcatgaagcgctccgcgggggaggcggcggccgccgcggacggcggcgccaggatgatctcctgcgaggcgcccgttgtgttctccaaggcgtgcgagctcttcgtcgccgagctcacgcgccgcgcctgggccgccacgctcgacggcaagcgccgcaccgtgcacagggaggacgtcgccacggccgtgcacaacaccgacctcttcgacttcctcgtcgacgtcgtcacggcggacactgcaggtggaaccggcggcggcgggcacgacggcgacggtgacggcgcgctctaa

SEQ ID NO: 30325 - DNA, 390 bp, Zea mays
  Peptide Sequence Number=SeqID_72104
atgaggcaggcgaggccgtactcggggatcttctgcggcggggtgtcggcgcggacgggcccgcacgcgctgccgctggcgcgcatcaagaagatcatgaagcgctccgcgggggaggcggcggccgccgcggacggcggcgccaggatgatctcctgcgaggcgcccgttgtgttctccaaggcgtgcgagctcttcgtcgccgagctcacgcgccgcgcctgggccgccacgctcgacggcaagcgccgcaccgtgcacagggaggacgtcgccacggccgtgcacaacaccgacctcttcgacttcctcgtcgacgtcgtcacggcggacactgcaggtggaaccggcggcggcggcggcgggcacgacggcgacggcccgctctaa

SEQ ID NO: 30326 - DNA, 288 bp, Zea mays
  Peptide Sequence Number=SeqID_72105
atgggcatgcatggtggtggttggctccagcgagcagggcggcgcgctcaccagacagccttgtcggtggagatggcgtggaagagcggaagcgatttgacggcggcggcgacgcaaaagcagcctccaaatcaagatgatgtagacatcttctctaagttagagaatctcatggttttcctgtgtgagaattgctcgatagcatggagaggttctttaactcgtggagataaatgtgtgccagtaataattctagaggcaataagtaacaccctaatcactcattga

SEQ ID NO: 30327 - DNA, 240 bp, Zea mays
  Peptide Sequence Number=SeqID_72106
atgccacaatgttcgtctccccacgtgaagagggtcaacccaggagagggactcctggcggccggcgtggagagcgaaggtgcaagtctgtatgtaggcattgaggagatcgaatccaaaggcacaaacatcgatgaggagggtggggcactccatgaagaacacccggtggtggctagagttggggaggaagaagctgtgatagtgagacgtggggagaagaagcgctgtgcgcagtag

SEQ ID NO: 30328 - DNA, 462 bp, Zea mays
  Peptide Sequence Number=SeqID_72107
atggtcaacacggccagaagtgggctggcagtaatggcggtggcaggcgagcaggcgcagcggtcgcgtcgtcagccaagctcacgtcccatccgggggcagcgagagaaccctctcccacggagaagcgggcgacgcttccccttcgccaaaatgaacgcgtccaaaaagggaccgagaaagggggataccccgaaaaggatccttccccaagaaggaaccaggctccgagcccccctactgatcagaggttcgaaggctggccccccggaagggttcaacagccgcttcagatcgcgtgggccctacacccactactggtcaggggttcgaaggccggcccctcgaaagggttcaacgaccgcctcaggctactcgggctccgcgcccaatactgatcaggggttcgaaggctggcccccgaagggttcacagcagcctcagacgctgagcgagggatga

SEQ ID NO: 30329 - DNA, 363 bp, Zea mays
  Peptide Sequence Number=SeqID_72108
atggctggaggacgtctccaccgcagggctggagggcgattgccaccaccagaagctggaagaagaggtggcccgccgacccgcgcaggaggtcctcccctacggcgcgggggctgggtcccacacgtcatgcaagccaactcagggcagaagaagccaaaccgccgcgcgcggtgcacacaacctcccagcggttacaagcgaccctccacttttgcccagaccaacgggcgaaagggtgggcagccatgcaggcggcatgcaaccgcgccaagtgggcgcgctcctccgactcccaacacgcccggcatagaggcccaggcccacgcatcgtgcaaccggtgcgccgtttgctacgtgtga

SEQ ID NO: 30330 - DNA, 423 bp, Zea mays
  Peptide Sequence Number=SeqID_72109
atggactccaagcgccggctgcaggggcccttctcgctacgcatcactaacgagtccggcgagacactggtggcttaccaggtcatcccggcaaactgggcgcccaacagctactaccgctccaacatccagtacgaggcttttggctctgccgctggacaggctactggctctgctgttggactggtcattagctctgctgctcgactgcacacgttaattaccaggatcattggcttgatctgtttggtattgttgtatcatttgcaagggattgagccattgaggtggtgctgtgtgtctgctggagacgtcgtcggtccagagtttcatcttttcgaaaaagttttgaacccaaataattttcctatgaatttcgttgattcctgcgtgacaggggctcacagctttcaactgttctag

SEQ ID NO: 30331 - DNA, 231 bp, Zea mays
  Peptide Sequence Number=SeqID_72110
atgggagggccgcggcggcattgcctggactggagggcgagctgccctggggcaagaaggagcaagcgcagggaagaccagtttgctcgtaatggtgggggatcagggagccagggactgagggacaacagcctccaggtccaggaaggtgatgataccaaccagttccaactcatcggtaactctgaactctccttccaactccaagtgcgcgtgcccaatacgcagtag

SEQ ID NO: 30332 - DNA, 706 bp, Zea mays
  Peptide Sequence Number=SeqID_72111
ccgcccgcgcccgccccgtgtggggctgcgcggcgcgcgggtcgccgccgcggcgcaggggccgtcctgcctctacgtggggccaatcgagaccgccagccaggagaagctcgaggcgctctaccaccaggccagggattcttactacagtggtcagccattgatcatcgatgacatgttcgacaaagtcgagcttaagctccggctttatggctccaaatccgtcgtcaaatacccccgttgtagcctcataaggcattcaacctacgccgacgccgaggaggaccaatcgatgttcatggcgttatcaagcatctggatgctgctcctcctgtttggtacctctgcagttcttgttcctactctgtacactctgagcatcgcgttcggggatgtgtttggggcaaggcaccttctgtacggtgaaaagtccctcgatgcggtaacaagagttaacgacttggctttggttggattggggtatctggttggttatcccatcgcatctgcgtccgttggcgcgctgcaaggcttattgtcaaacaatttggttgccctaaaagggtcctgcccaaattgtggcgagcaggtatttgcatttgtcaagattgaaaaaaccgtgagagcacctcatcgagcagaatgccatgtctgtcagtgccctttggagtaccgcacgaaaattgagtacaatgacatctgctga

SEQ ID NO: 30333 - DNA, 309 bp, Zea mays
  Peptide Sequence Number=SeqID_72112
atggcgcggagagggaacaggctacagagggagaggacaaccaaatcgggcaatcagctgggcatcctcgtgttgcgcctgcgagcaggtcatcgagggagtggcggttgcgtggagaacacataccaaccagccgcgaccgagaagggcggggcgaaggaaggacaacgtgtggctccgctccacgggacgacggcggcgtctcagggtccggacagatcttttttgcgcagcggcagggagaggagacggatggacatggatggctacgagtcagacggaaccaggagtagagttccatacttataa

SEQ ID NO: 30334 - DNA, 1884 bp, Zea mays
  Peptide Sequence Number=SeqID_72113
atggacaaccttgagtactgtgagataaactcggacataactctcaactatataacccaaatattgatggaagaaagcgctgacgagaatattagcgcatacaaacatcacgatgcactccaggccatggagaagcccttctacgatattcttggaaaggcatatccatcctcatctaaacagactatggtcaacagtggtagtcaatcaggtctgcctgatgatattaacaacagtcatcacgacctggaacgcagtggtaactctgtcagtgatcttcttcgtgggcgcaagggggtgcgctcgataggcatagatggcggttctgaactttgcgatgtggctttgcagttcaacagaattgctgaggaagcaaagaagtttgttccaagtattgggaacttggtggttgatccagagagcaatgacctttccagttccaaagaggcaaatgggtcagcaattgggcaacatagcaatcaaacaaataaaataaggagctaccctcacgtggacttgaagttggtggaggggagaaacagtaagtattcagcaatctcaaccagtgaaataattcggaatgaactatttgacagagttctgctctctgatgagcagtatctttgcgatgttgctcaccttagagaaatggcaaaagaagcaaacataaatctgcagtatgttcagaacacaggatctgcccaaggaaaacagaagccacaaagtaagaagcaagaaaaggaagcggttgatctcaggggtcttctcatccagtgtgcacaagcgatatcatctaacaaccatccatttgccagtgagctgctgaaaaagatcaggcaccattcttcaccatatggagatggttctcagaggctggcagtttactttgcagatgctcttgaggcacgtgcagctgggactgggagtcaaataaaccagagattagtggtgaagcgaacaagcgtcacagacatgctgaaggcctaccgcctttccatcgcagcatgccctttcggcagggtagcatactacttcgccaataaaacaattgttgatgtgttggggagtcgaccaagggtgcatataattgattttggcatcatgtttggctttcagtggccatcgctaatccagcggcttgcaaagcgagaaggtggtccccctcaacttcgcatcacaggtattgacgtgcccgagacaggttttcgcccctgtaaacagattgaggagacaggaaagcggttggctgagtatgcaagaatgttcaatgtacctttccagtatcaaagtgttgcctcacggtgggaaagcatatacatagcagatctcaatattggcagggatgaggtgctcatagtcaactgcttgcacaagatgaaaaacctcggcgatgagacagaagacatagacagtgcaagggacagggtactgcgtatcatgaagaggatgaatccagatgttctcataaccggtgtcatgaatgggttgcacagctccccgttcttcctaccacgattcagagaggctttgttcttttactcatcacagtttgacatgctaaattcaactgttgtgcatcagaatcatgaggcaaggatcatgatagagagggatctccttggggcagatgtgtttaatgttgtagcatgtgaaggtgcagagaggattgagaggccagagagctacaaacaatggcaagcaagaatcctcaaggctgggttcaagaaacttcctgttgaccagaccattctaaagggttcagtagacagaaaggagctttatcatggtgactttgtcatcgacgaagacagtggctggttgctacagggatggaaaggaaggataatgcatgcgctgtcgtcatggaaacctaaagattcatag

SEQ ID NO: 30335 - DNA, 99 bp, Zea mays
  Peptide Sequence Number=SeqID_72114
atgaggagtccagatgcccaggttttcatcgtatccttctccggtaacgaacaggtgggtaatattgtgagccgtcgcaacgcacgggtaaccgactag

SEQ ID NO: 30336 - DNA, 279 bp, Zea mays
  Peptide Sequence Number=SeqID_72115
atgaccgcttctaaagaacgcactgatgtctcccaagacagtattcttaggccaactattgagaacctgtcggtcactgagcaacagttgtataaggatatcatgtgccaagtggaagaggatgcacatggccaactcgccaaggttcaagaggagacgaaggagaatttcttagcacacttcgtggtggatcgtcaccagaagattaccaaacatggagagatcgagatcgcatctcttctacctttgtctcaaatctccaatactatccgtcattaa

SEQ ID NO: 30337 - DNA, 216 bp, Zea mays
  Peptide Sequence Number=SeqID_72116
atggccgtggcgagcgtggcagaatccgggggagcggttcggcttgcggtcgctcttgcgcgagggcacggcggagccgtggtccgcggcgcgctcgcgacgggagctagggttagggttcggggagcggcggcgatcctgggagcggccgcgggacttggagcgggagcattcacagcgtcctacaaagataatgcacttagtgtgagtggttga

SEQ ID NO: 30338 - DNA, 297 bp, Zea mays
  Peptide Sequence Number=SeqID_72117
atgggcgtcggcgcccgtggaggacttccatgcgatgcgttgctcctagatccggtggaggcagtagagggaggggcgaagagaggaagcgagtggggcacagcgacaggcggcgcgtcttccatgataggggtgggtgacaggaggtgcgccgggtgtggtggggcgggcagtgcggttgccagcgccgagggcctcgcccggggccatcgatatcgacctatccgtcgtggtcgaggcagtagaccatgggcgtcggtgcccgtggaggacttccacatgatgccccgctcctaa

SEQ ID NO: 30339 - DNA, 825 bp, Zea mays
  Peptide Sequence Number=SeqID_72118
atgtcgtcgtcgtccgacctcgagcagcaggtggccaccgccctccgccgtgtgacccccgtcgccgccgcgcctgctgtagaccgtggaggcgcgccggatctggcggcggcgattcagcgccgaatggcctcgcaacgcgccaggggtgccgacgcgttctacgcgaagttcgcgtcggcccggtcgctcgccgaccagaccttctcacgccgacgagtacagctgaagggactcaaggatcagctccgggacctccagtcgcagctcagggagtctcttacacttcagtcgtgcaaggaatggaaatacaggattgccacggagccgatgtcggaggccacagctacgaatgagcggctccgtagctgggttgcggatttcagggacaagaggaacaagggtgctgcaatcgtatttgagcaacttcaagctgtcgaatcacttgaggcaaacagtaatgaagatgcagagatggcggagaaggtaccaaaagctgttctctggtacaataagttccttggcttccgggtgatcggaggagaaagaggtgtgaagttcgtgttcgacaagattgacccacagcgtccggagaaggaatactcgtttcgcgtaagtccgagatcacaattcatcgatagtgatcctcatgtcaaggacattgatgaattggcgaaggatttggatttgaacgaacatctattcgagtttatgcaggacaataggacatacaatgtatacactgtcaagtttcagttgaagacatacaatctatacactgtcaagtttcagttaaagaggctctatggtcttgttattatgtag

SEQ ID NO: 30340 - DNA, 204 bp, Zea mays
  Peptide Sequence Number=SeqID_72119
atgggggctaggtttttctccgtgccgcgactcggagattattattatgtattttgtttacatgtttggtctgatgttaattttctctatatattgttcctatttgtattgtggcaagtagaagagcctgtgactgaggatcctggtgcccagcagatagaagttgctaagcaggagctcattgaaggcaagttgtgcccttga

SEQ ID NO: 30341 - DNA, 174 bp, Zea mays
  Peptide Sequence Number=SeqID_72120
atggaggaagaggcagaagcatatagaaataaaggatcccttggtgatggtggtgataagaagcttccaccagtagtctttatcccctctggcatccaaaggtatcaatatgtgccattaggtgttatgaaactagtttttggctcatcttcctttttcatccaaatttggtga

SEQ ID NO: 30342 - DNA, 327 bp, Zea mays
  Peptide Sequence Number=SeqID_72121
atggcgctcggcttccgtgcccctgagcgctcccatggcgcccggcatttctccctggccgtgctcgcgcccctgtggccgcggctctccctctggtctcagggatgcgcacgccccatctccatggcgctcggcgcccaactctccttggcggactcacacctccgtgtcgtgtctgctcgtccatgctcgtcgaccccgatgacctatctttcaattgcatgctacttacattgggatctaaagctctctgtcgtgctcgaccgtacaagtctccaactcgtcgacatcctttgcgtcgtcgaaaaatcccgagagtttgaataa

SEQ ID NO: 30343 - DNA, 960 bp, Zea mays
  Peptide Sequence Number=SeqID_72122
atggcgcacccactcggccaaccttcacccccctccctggcatggccacgactgcgcctacctccttcccattacagcagtgtgctgcctgctgtgtccccatccctaccgatgccccctgaccgcgtcgtctccactacgaagcctcctaccatgtcgtcgcactttccttcgctgcctcagtgctcgccctcacactcggcatggccaacaccgctgcttcttccactggctgtgtggtgctcacccccacaccccctgctccgcacggtgtggcgctcgcccatgtgcaccccttactctagtggcacttcccttttctacttcgatggtgcgatctctgcatcctccagcggtgcaacaccacttccaagcagcggcacgactgtgttacccaccacccactatagcagcatggctcccaccccaatctacggtgggacagccccctctagtgcggctgctgtcatttcttccggcactggcgcgaccgcctccttccccaccggcaacacgggctcctacaacaagtggctacaactttctccattgccatcccatagcacccctacacctgccactctcgagcatccccttcttgcacggactctccatagtgttcctcatctcgccaccgagtgccccgccgttgccttagccaacggcaacacctctatcttggctccgcccagtactactgcaatcactatgcgctcctcccttcatggcggccaacttatctggggtaccttcgtggcttttgatcgggtcatgaaccctattccccatgactgtgttgagctacaccctcaggcagaccgccatgctattgagcccctaatgtttcctagtgttgtgattgcgtccatgacaatctcccctactagtgactctctaggggtgcctcccttggctctcttctcacacctcttttcttcatcgtaccctcccaccggctag

SEQ ID NO: 30344 - DNA, 471 bp, Zea mays
  Peptide Sequence Number=SeqID_72123
atgccatcgataagagggagggcgatcggtggctgtgatcggagggctaccagcgaaggaaagtgcgacgacatggtaggaggcttcgtagtggagacgacgctagataaagcaagcggggagaggtggctaccgctagggagctcttgcacatgggggagggagccattgccagggaggccgcttaccggtcagggggcatcggtagggatggggacacagcaggcagcacactgctgtaatgggaaggaggtaggcgcagtcgtggccatgccagggaggggggtgaaggttggccgagtgggatgtcctcagcaatcagggagtttatatgatggtgaagacatcgatggttctaatgaagaggaatctcaaagtcgtaagggtgttcgtgccaacatctccaacgatggtgatcatatctcgacaaaagtaataagaggaaataaaagaattgtggcaccaccatag

SEQ ID NO: 30345 - DNA, 825 bp, Zea mays
  Peptide Sequence Number=SeqID_72124
atggccgagcagagcgagcgtatggccaggagagcacacggcaggatgctgggagagaaccgcggcgcgagcagggagccgaccacggcgagcagaggggcatggctgcgcgcacagggagctcgacatgggcagcagcccgcgtccacgacgagcaggcaggggagagcgcgcacagcaacgagcggacaccagggcacgcgcgcaggggacttcggctgggcgctggagttggagtcaggcgcgccgaggagaagccggcagaggagcgcggcgagcaccagagagcagcgcgcgcggcgcgcggcaaaggagctgggaacgcgcggaagagaactcgacggcggcaatccggggcgagcgcagcagggagccgggacgagaccgcagccgagcgagctccggccggcatgggcgcgacggccagggagcaggagggcgcgcgcaggaaggctgaagcttgcagaggagaacgtaggggatgggcgcgccatgggagaagctcctgcgcgcagagaagaggaccgagcagaggaagtcggcgcgcaggaaggttgggcgccgagcgccatggagatggggcgtgcgcatccctgcgaccagagggagagccgcggccacaggggcgcgagcacgaccagggagaaatgccaagcgccatgggagcgctcaggggcacgtaggccgagcgccatgagtgggcagaggggattcgacgagctggagccagggacacaacatgagagagagctcagggagatgagcgcgtgccggctgggaggagaagacaggtcctcggcggcaggatttttttacaggccatga

SEQ ID NO: 30346 - DNA, 627 bp, Zea mays
  Peptide Sequence Number=SeqID_72125
atgagagtcttttctttagtcgggttacgagtcactttgattgtgattggtgttaagcgtcgatttccgctgcaaaatgttggtgtctgtgatttgtgtttacttaatcctgcggtcctggttgaattaagatatttatctctcaatgattattcttgcaacatcatagttggcaaaattactaaagatgcttactttgctatcatgagtagtgataatgatctatttgttgatgctcatgaaatgtggactagaattaaattgatgtatcttaagtccaaatggattgcttctatctccttgttttcttgtgagactaacttgttagaggaagaagaagagagtgatcgatggatacacaacgatgaatccacctcactaacaggtttgttttccactagcttcaaatgtgttgctgctaacaatgatagtggagatgaaagcgacgatgaggaggaattcaaggatgatagcgaggatgcaaacaagaatgaaaagcccacatcattgcaaggtacattttcccatacttctttgcatgcttccgcttataatgatgatagggaaaatgagaccaaggatgtagaagattcgccaactctacacccatctcaacaaagaagataa

SEQ ID NO: 30347 - DNA, 264 bp, Zea mays
  Peptide Sequence Number=SeqID_72126
atgctggacatgggatgtcctaaggtcatagtggatgaagtcaaaggggtgagtaacttgggacatagaagaatagatggtcatggcaaagcgagattgtgtcaccacgagggcaaggaatggccaaggtggctgaaagtcgagagaggacgtcatggtagggatggtcaagacaacggggccaagttgaggcaggggcagtggacgcacgagcgcagggttggacaaaatgggcggaggaaggtggggtggggaaaagattag

SEQ ID NO: 30348 - DNA, 765 bp, Zea mays
  Peptide Sequence Number=SeqID_72127
atggcgcggcacctcgcgccttcgtctggaagcctccaccgtctcctcgcgtcctgccactacccgcccacctcccaggcgccgcctccccgtccgctcctcctcccgaagacccgatcggcggctatgcagctcccgcgacgcgggcggcgcgacgtcgtcgccgctgcagctgcctccgcaccgtccccctcttctccgggtaccgaggtggcagtctggggtaaggtctccgccgtgctcttcgatatggatggcgttctctgcaacagcgaggagccctcgcgacaggccggcgtcgacgtcttcgctgagatgggagtcgaggtcgccgtggatgactttgtccccttcatgggcactggtgaggccaatttccttggaggtgtcgcaagagctaaaggagtgaaagatttcaatcctgaaagtgccaagaagagattttttgagatatatcttgacaagtacgcaaagccaaattctggcatcggattccctggggctctggagctcatcttggagtgcaaaaattctggtcttaaggttgccgttgcatccagtgccgacaggattaaggtggatgccaatctggctgctgctggtttgtccgtgtttctatttgatgctattgtttctgctgatgcgtttgaaaaattgaagcccgctccggatatattcctggcagcatcaaagagcttaggtgtcgacacaaatgaggctacaaacatgtgggtttctaaggatgtagctgcattgcagcaataa

SEQ ID NO: 30349 - DNA, 459 bp, Zea mays
  Peptide Sequence Number=SeqID_72128
atggcaaatcgagccagcgttaacgccagcatgggggctacgctcgacactacgggcgcgagggtgggcggcgcgggctctgctcgactgggtggtgcgagtgtggtcgatgacgcaacggtgaaggaaagggcgccccctgcgggtggcgctaggatggaggaatgggacgtcggcgccgtggtctgggaggagcagtacgccggcgctcggcttgacggtacgaaatccgcgagcagaggagggaggtccgcagggaggtcgtcgacggcagagatcagagagaaggccggtagcgggtggcaagtcaccatggcggaccaccgacgaggaaagggggcgtctgcgctgaccatggagagagatgctcgacgccggctgtcaggggagagaggaaaggagagggaagagctggctctgataccatgttgggaaatggaaagcctaactagtaactag

SEQ ID NO: 30350 - DNA, 219 bp, Zea mays
  Peptide Sequence Number=SeqID_72129
atggctgtgtgtcctatccatgtatctgaatatggccgcgttggatattcacatatgtgttgctttatcctgcagttcactgttgttggtgtgcactctgccaaattcgataatgaaaaggaccttgaagctatacgtaatgctgttctgcgctacaacattactcacccggggtttgtgaaagggtctctagctgagttggttaggtggtctgagtag

SEQ ID NO: 30351 - DNA, 2229 bp, Zea mays
  Peptide Sequence Number=SeqID_72130
atgttcccgtcccgggtccatcgcggtggccgccgcagccgggtggattcgaacctcccgagccgtcctctcccaaggtcacctgcatcggcccaagtccgcgtcaagggcggtaagcgcaagcccaagcacacctcagccgccactctgcactcctgctccagacgcggcggagtcgggagcgcagaggtcagctttcgccgcgccggcgacgaccgggacggaccccagagcaagaaccagggctgggtgtaccagatcccggtcaacatctgcgaggcactcaagacatttggctcctgcggtggccgctcgctctgctcgccgtctcggcatggcggagccggcgagcggggcgcactccccaccgatgcaaactgtggcaagaagcggcggcagggcgctcctgctgggggtagctggctgtgcggtgctgccgtggcgaggtgccttctggcgatccaggaggaggacgacgacgaggtcggcaacggcaagggagctgcagttgtgccggcagaagagatgaggacatcggaagtggggctcgtcatggaagggtgggatgtcgaggaggagaaggctgtgatgatgggggatgtggaggtggagaagaaagatgagatcttggtagtggggaaggaagaagaggggagagtaagtgtctgcatccccccgaggaatgcactgctgctaatgcgctgccggtcagacccagttcgcatggctgctcttgccacccgcttctgggggtctccagctgcagctaccgtggagcaggtggacaatgaggtggctgggtgcctcaacgacaatgaggaagaagaagaaaaggaagaggaggctgaggctgagccactggagtgcaaagatggagctcgctgttcagctgtttctgtcaaagacttgaaatgtgaagagtgtggttctgatgaaaatgatggcgctgaagcaggggagataaatcaagaaaaggcagaagctgaagagagttctaaatgtggagatctagtggaagaaaaggagggtgcatcatgcagagtaggggtggaggaagcacaaattgttcggaaagatgccgagttggaggttcctttgggagaagttacagagatggaaaaccaagggccggacatggtggagttggtggtcagtgaggaagaagttccaggacatgagaaagttgacgaagagatgatggggaggagatcaatcaacagctattctccctcggcaactctgaaagaggaccgcaccaaattgcgacggttgagtagcaggatgtgtgttagcactagtagcagggcctcatcatccagtgatagggttggcaggcgacacagcttctcagctgagatggaggcacggcggtctagcttctcgagcttgaaggattcaaggagagctagtttctccattgatagagatggccggaggtggagcttctcaattgaacaggagcatcttgttgcgcagcctaaggtgctgatggcatccagaaaggggaagaagacgtcttctgaggcagagtcagaaaaggattgtgatgttgttgctccaaacagtgcagaggaaggtcaagaatcctatgacgatggaaaggaagaagacactactgagaatgtagcggaagaaggaaaaacaaagtctgcggaagcgaaccaggaagtagagaaagtagaaactagagcagaagagtgtgaaggtgggacagtaccagtgatacataggaggaagaagagtggtgagttaccagattgcctcctgttgatgatgtatgagccgaagctctccatggaggtctccaaggagacatgggtctgcagcaccgatttcgtccattggaagtcttaccagggcaagaataaccgcaatcactggcaacagaaggcttctgctgctggaacagtggagactaaggaaaaggagaatgctgaaggcaccaccattgcgaatgatgtacaagagagcaaagatccatcaacggtgaactcagctgtgcccatgccatgtccagttgtccagaagacaccaccactcaaaccagctaccacagaacagaagctgaagctggagttgccgccagttaccaatgcggcagcctatgctccatttgttctgaaaaggtgcaagtcagagccgatgcgatcatcggcgcgtttggcacccgatgcttgcttctggaaggaccgccatcggccgctgaatgcggctggagttgggttctga

SEQ ID NO: 30352 - DNA, 327 bp, Zea mays
  Peptide Sequence Number=SeqID_72131
atggagcagggcaaggagcgacccgtgacgcagatgacaccactcctcccccatctggacatcatcgtcggaggaggaatcaagatgctcgacaatccaaaccatcatgtcaagcaggaaggcaggggaaagcctaagctaaagcccctacctggcgcgccaaatgtcggaggtaaactccagccggctggaagaatgcacccacctaatccaatgaatgagggtctgcctagggtttacctattgagatcgaaagaacataaggatttagagtggtttggaccactggagcgtaataccctgtgtccactaaattgtattgcctga

SEQ ID NO: 30353 - DNA, 174 bp, Zea mays
  Peptide Sequence Number=SeqID_72132
atggacagcgccacaatcttttccatacccgagagcgcgctccgctataattcatcggactgtccggtgcaccagcggagcaacggctacttcgcgcaacggtcgcctgcaaaagctagagatttagaggaacagtgtgcaacagtgcgcggcagagcagagccgcccgtctga

SEQ ID NO: 30354 - DNA, 702 bp, Zea mays
  Peptide Sequence Number=SeqID_72133
atggcgcgcaagccgccgcagaagatgacgacggcgcggaggagccgcgccgccgaagtgcacaacctgtcggagcggacggacaaggcgtcaatgcttgacgaggcgatcgagtacctcaagtcgctgcagctgcaagtgcagatgatgtggatgggcagcgccggcatcgcggcgccgccggcggtgatgttccccggcgtacaccagtacctgcctcggatgggcgtcgggatgggcgcggcagcggcggcggcgctgccgtccatgccgcggctgccgttcatggccccgcaaccggtggtgcccagcgcgccggtgagcgtgggcccggtgccggcctaccggggccacatgcccgcggtgggcatcacggagccgtacgggcactacatcggcgtcaaccacctgcagccggcgccgccgccaccgcaggtccagtctgggcagcactacgcgcagggcgtgagctactaccccgccgccgctgggggcgacgggcgaaggccgtgcagcaggctgcagagcttcaccacgtgccggggcccggcgggcagcatcatgccccgccggcgccgcacccggagtgctgctcccggagagcgcgcaaggcagagggccaggtacggtgccatgcgctccgcccttctcatcctccgcttcagtttttgggctacaaatgggagcactacgatgagatga

SEQ ID NO: 30355 - DNA, 1548 bp, Zea mays
  Peptide Sequence Number=SeqID_72134
atggcagcgcagcagcaggccgccgcctccgtgcttcagagcttcccgatcagggcggccgtgctcgcgctctgcgtcgcgctgctgccgctgctgctccccgcgcaggcgcctgacgtcgcggccgggggagccggccaggctttcctcgccaaggcgtgggagctgctgcacctgctgttcgttggcatcgccgtctcgtacggcctcttcagccgcaggaacagcgccgacgatgggcgcgccggggctgcagcagcagagaaggacgatgccgcggggcccgaacctgccaaggcggacgcgaggtacgcgtggcggatgttcagggactcgatcgcgccgttcgatgacgacgacgccgacgtgctggtgccggacagccctcccggtggcggcggaggcggcatggcgcgctcgtggagcgcgctgcaccggcccgtggagcccgtcgtcgtcgtgtccactggaggcggcggggtccggatcgggcaggcccaggccccggacgcacaggcgccgctgtcgctacccgtccggatgctgaagccgcagcaggcacaggacgccagcgcggcgggggctggggctggggctgtcgacttcgagccgcagtgtgcgcggccgcgccggagttctcagagctcggcggtcgactgcgcccacgacgacgagaccgtgctcccttcgccgataccgtggcggtcgcggtccgggaggctcgacgcgcgccgacccgcgtcgtcgccgagcccctcgccgtcccccaagagggtgtccccggcgtcgtccttgtccagggagacgctggccaaggcaagcgaggaggagtactacgccaaggccaagaggaggagcccgtacaggtgctcttccatctcctcctcgccgccggcgccgcccccgcctccgcctccgttcctcgtccacggttaccacccgacgaccgagcgccggtcggcagcgccgaaaagctttaaggaggagctgcagcaccacagcatgagaggccgaggagaagaccactacttgccgaagacgagcagcaactctttctccttgccagcgaatccaagaagctctttctcttctaacggtggctcgtcctcgtcggtttcggttggcaagtcggtgagaacgttcaggacaagggagccagcagttttccaagaccaaagccaagaactgcccgacgactccggtgatgatcgtgacgcgctggacgtgcacggatcagaggagccgtacggctacagagcttatcagtccatttccaggttccagtacgagaggtcagggagcgactctatcctgggcggtgtggcagtctcgtcggatgagagcgagagcagcgacgacgacggcggggatgacgtcggcggtggcgggtactcgacgagggagtcgacgccggaggtggacgagaacgaggtggacaagaaggcggaggagttcatcgcccggttcagggagcagatcaggcggcagaggatcgagtccataaagaagtccgcggggacgcgcggcgtcaagcgccacggcaagtag

SEQ ID NO: 30356 - DNA, 537 bp, Zea mays
  Peptide Sequence Number=SeqID_72135
atggccggatccgcaatcatcgcgagcccccagcaagtatatgtacctcttcccaacctcagatatctcggtggcagtggagaggcaaaggatgccgggactagggagcaggggcaacgctcaccaaggacgatcgccacctcaccaccacgacatccgccgagtcaagttcgacggcatccccgcgacagcgacgaaggcaccaaggaggcatcccaactcgtcctccctctaggtgttgtaagagctaacgccaggcacgctgaagagctcggcggcgcagatcctacgcatctactaccacccattatcctacgacacgaaggtgacgccctctacgccacggtcaccttccttccccacgcgacgcaacaaccgcaacctttcatccacagcgccccccgctcaaccgcacccatccccactcatggttgtcatgcggcacgtccctgtcatcctcaccacagaaaaagcccctaccgccgttggggccatcgtcgtgccgatagatgtggacatccaggtgatgcttcatag

SEQ ID NO: 30357 - DNA, 270 bp, Zea mays
  Peptide Sequence Number=SeqID_72136
atgtggtcatacatgtcgtcgtcgttgagctcaggcctcctgctgccgccacatgaacaggctcggcctgccgtcgtgcaccggcggcaaaaggcttcccacggaggttctcaacatggatgggatagacacggccatacgggcgcctcgacgaagcccttcgggagcagctccgccagagaacttgctcttcatatcattcatgatgacacctacgcctctggcactatgaaccttaccacggagacacacactaattatcaaaagtaa

SEQ ID NO: 30358 - DNA, 414 bp, Zea mays
  Peptide Sequence Number=SeqID_72137
atggctgcgtccacggccagccccgaccacccattgcaaccgctggccccgcaacggtgcaggagatcgctgaacgccgcccaagccgctggccaccgtagcagcgccggatgtcgtcgcatgccgggaaggccgaatagagggcggtgccagttgagaagccggtccaagcgagcgggccacgaccataccttcgttagctggacgtgcggggagcaggttattgatggctggcctacccgcctctccgcagtcgccgatgagaccattgacggatggacccccaacccggtgagctttgttcaaccggacatggaggcgagttcggcgaggctgtcgatgatggtgtcgtcgacaaggccgccgaggccaaggcggagcgagtgtcagcatattgccacgtgggatctgtga

SEQ ID NO: 30359 - DNA, 1410 bp, Zea mays
  Peptide Sequence Number=SeqID_72138
atggaggaggtcgcggcggccgcgaagaggtggccggggtggcccggggacagcgtgttccggctggtggtgccagtgctcaaggtcggaagcataatcgggcggaagggcgagctcatcaagcgccttgtcgaggggaccaaggccagagtccgcatcctcgagggccccgtcggcgccaccgagcgtatcgttttggtttctggaaaagaagatccaggcttggagctatctccagccatggatgctctcatgagagtttttaagcgtgtcattgggataacagatggagctgcggagggcactcaggctgctgctactcctggtgtatgtgctgcccgattgttggttcctggagctcaggcaattaacctaattgggaagcaaggtgccactatcaaagcaatccaggagagcacgggtgctacaatacggccgtacccttatttcaactgcatgcttttaatcttgcatgattggaatagttgtattgaactcttggtaatggaagatgaacatgagagaccattttatgtaactgacgatgaaaggatagttgagatacagggcgatacagagaaagttctaaaagcactgcaagctgtttctaaccatcttcggaagtttttggttgaccatagtgtacttccattatttgaaaaaactaatactgcagtgagccaagatcacaatgttggttggagtgatatgtcacatccttcaattggttctgcacaagtgaatcaaccaccttcagtggtagatgaatatattcttccagtgaagagggatactttgtatcttgaacgagaaactttgttagatcataacattcatcgctcaggcgtatcactttatgggcgggatccagccttgtcaacactacgaccacctggaatacatggtgctggcccgctacttacacagataacccaaaccatgcaaatcccacttacctatgctgaagacattataggagttaaaggagcaaatattgcgtacatacgagctaatagtggagctgttgttacaattcaggagagtttgggtagtccagatgatattactgttgaaataaaggggacatcttcacaggtacaagctgcacagcagctcatccaggactcgttggctgcacaccgagaacctgtcagaagcagttatgtgggagcaggattagattcactgtataggtccagctactcacaatatggcagctccacctatccttcgtcatcactgccatcttattctagcatcgatgatgttagtaggtacccatcttcaggtcttggtggctatgggtcgagttacagggatctggtagattatactgcatcccaattcccagtacccagacttcggagtccaatttgctttgacaatggaatcggaaatcgtgcttgttaa

SEQ ID NO: 30360 - DNA, 192 bp, Zea mays
  Peptide Sequence Number=SeqID_72139
atgggtagctttcttgaggagctattatgttgtggtgtacatgatcgtgctctttatggccgacaacatggaaggcgaaaagccttggcacgatcattgtcgtctctgtgccacatcgaccctggctgtcgtatccagggtctcgacgcggggcgtcgtcttgcggggcctgtaggtgacaagcgcacttag

SEQ ID NO: 30361 - DNA, 786 bp, Zea mays
  Peptide Sequence Number=SeqID_72140
gcgccacgctacacaggggcaccatggccgcacgagccgaagccgcgcctggccggggccgcgctgcgcagggccacgccgtgcaagggcaggggccgggctgggtgcaccgcgagtaggggcgtgtcggggatgcgtcgtgccgggacgggggaccgagccgtgctgggacgccacgccggggaccgaggcaccgtgcgccgtgggcgcgccgaggcggggacgggcgagcgcggagccagggcagggaccgcgcgcaggccaagggtccgtgccgggggctgggcaaaccgcggccgcgccaggggagcgcgccgtggaagccacggcctcgccagggccgggcgggcgctccagtgcgcggggagggaggccgcgctacgccatgggcagggggccgctccacgccgcgggcgcgaggaaactgcgcgctggggccgagccgggctagggcggtgcacagctctgaggtcgcggcggggccacggccgcgcgttagaggccaggtcggggacgcgcgagcgcgggggaaccgggtcggggacgggtacgccgtgcacaagccaggggcccgcgccgagccggccgccgcgggcaggccgcgccgcgcggggaggaagaggtcagccgcacgcacggggaggaagggacatggaagagggagacggggacgagcctcacctcggcgattcccgatggcagcgggacgtcagcgcacgaagagtcttgacgatcgccgacggtcgtttttgcttgggctggagagcagaacatcgtatcatccgg

SEQ ID NO: 30362 - DNA, 390 bp, Zea mays
  Peptide Sequence Number=SeqID_72141
atggcggccaaggctcccgagcgcgcggtgttggacaagatccacccaaggcggtgctccgggtgcgagatggcgcagggtagaggagggttcggcccaggtcgatgggcacccccgagccgcacgcggattctggctaggagcgcgccatgcgcgggatctatggcgaggttgctcaccgatgtgaggagaaaggggatgagtgaggcggtggtgcagcctctccaagtggctagactgaccagtcaccggacggcgaagcggacgctcagcgagacgagagggcaaaaggggatgacggacttccgtgcggtgtgtctaagacgagccatctacaaaagacaccgtaagcataagagtgagaacagaactaatatgaccagcaagtga

SEQ ID NO: 30363 - DNA, 297 bp, Zea mays
  Peptide Sequence Number=SeqID_72142
atgtggacgcacgcacaggatcgaccatggggaacggaacgtgcaggacggggaacctgcgtgtggggcttggccgttgaggtgcttgcgcagcgcggggctgcgagggaccacatgcggggctgctggctgctcggcaagctaggtgttgcacagcagcgacagcaggcgcaccggccgggaacacatagccatgggttggacgccggcgtcggccagcgtagtgcgaacgacaaggagcaggcgcaggtcgacggtcacgatggcgagcaggggaggatgagcgtcaggcgctag

SEQ ID NO: 30364 - DNA, 100 bp, Zea mays
  Peptide Sequence Number=SeqID_72143
atggcgaggacggacttcggtgcggcggtttcgacggtgagctccgaacgctcgtcggggatggcgaggggaggtttggcggcgattttggaggcatcgg

SEQ ID NO: 30365 - DNA, 777 bp, Zea mays
  Peptide Sequence Number=SeqID_72144
atgggatacaaagaggccaccactcatattcagctatggctacttggtgccttggtgtcacatttagagtttgacatggtcgacttccttatttgtgagatcgaggacacaatattggatggtctccgtgctcgccccactgagaacccagtcccagtgccagatccagtgtcagatgttcgggttgaggatgagaccttcagacagttcaagaaccagggtgtcgttgctgacacttcttcaactgatgatgagggccttgggatcccgccactgcctctatgccacctcgctcacatgatcacgaggcggcagcagctcttggcagacagggccgagcactgggcgttcatgacacatatcctttaccacactggtgttcagctccctccaatacagtctactcctcctccagctcttcagacatctatcgtaccagctcttctggcaggacccccacttcccttgtttggtccttctccttctcaactctggccggtcactttggacttctcatcactggtcatcagaaccgtcagcgctcagccaccagtgccaccaacacctgctgttaccactgctgttgtggcggtgtccatgactgcaccagctccggcggatcctgcatcgcagccttcgtcagagtcagtacctgctccagcttctactctaaatcctggatccgagagagactctgatcctcagcttgcgtttgcgcttctgcctcgaccgcgaccggatgcgccctcgcttcctccttcctcttctggtgtgtag

SEQ ID NO: 30366 - DNA, 1839 bp, Zea mays
  Peptide Sequence Number=SeqID_72145
atggagtctaccgagtttgatggccgactcggcctcaactcatttatacaaataggacaggtgtacacgtatgaaatacccataggtaatcaggctatcaagacatcatctatgttgatgggaaacaacgctcatgcttttgttcatggtgttagcatggcgctagaccacttcttggatgcgcaccgccgccagggcaggtgtgttggcggtggggcactgttaggcatcatcaaaatctgtgggtcagtgccagacagagtactggggaagcagctgcatgcccggtgcgtcaggtgtggacatgatcatggcgacatcagggtcggcacgtctcttgttgacatgtacatgaactggtacagtgttctaaacggcaggaaggtgtttgagggaatgctcaagaggaatgttgtcacctggacatcgttgctcactgggtacatccaggctggagtgttattggatgttatgtcactcttcttcaggatgcgtgctgaaggggtctggcccaatccgttcacattttcgagtgttctctcagtggtggcgagccaggtttggttgctgctccactgtgtttgtgtgcaattctctgatgaaatgtatgcaaagtgtggactactggttgaagaagccagggtcgtgttttgtaggatggagaccagggacatggtgtcgtggaacacattgatggcgggtcttgtgttgaacgggcgtgatcttgaagccctaaaactgttccatgattcacgatccagtattaccatgcttacagagtcaacatactcaacagtgataaaattatgtgcaaatcttaaacaccttggcctggcacgtcaactccacagtagtgttcttaaacgtggttttcattcgtatggcaatgtaatgacagccctcatggatgcctacagcaaagcaggtcaactggataaggctctggatatatttttgttgatgtcaggatctcagaatgttgtttcatggactgctatgattaatgggtgcattcagaacggtgatatacctcttgctgctgctctttttagcagaatgagagaagatggtgttgctccgaatgatttaacctactcgacaattctgacagtgtcagaggccagctttcctccccaaagtcatgcccaggtgatcaagaccaactatgagtgtacaccaattgttggaactgcacttatggtctcttactctaagctttgcggcactgaagaagctctttctatattcaaaatgattgaccagaaagatgttgtttcatggtctgcaatgttgacttgctatgcccaagctggtgattgcaatggtgccacaaatgcattcatcaagatgtccatgcatggtttgaagccaaatgagtttacaatctctagtgctattgatgcttgtgctagtccggcagctggagttgacctgggtaggcagttccatgctatttctatcaggcacagatgccattatgcactctgtgtgagcagtgcacttgttagtatgtatgcaagaaaaggaagcatcgagaatgctcagtgtgtctttgagaagcaaacagatagagatttggtgtcagggaactcaatgctatcagggtacgcacagcatggttacaaccaaaaggcccttgatgtatttcgacagatggaagttgagggcattgagatggatggtcttacattcctttctgtgattatgggatgcactcatgctggtcttgttgaagaaggcaagctggatgaaacaatgagccccatagaaggcatgccattcccagcaggtccaacaatatggcgcacattgctaggagcttgtaacacccggctttaa

SEQ ID NO: 30367 - DNA, 105 bp, Zea mays
  Peptide Sequence Number=SeqID_72146
atgaaggtaatagctgcctacctgcttgctgttctgggtggaaacacttccccgactgctgatgatgttaagagcattctggaatcagtggctgaggttgattag

SEQ ID NO: 30368 - DNA, 399 bp, Zea mays
  Peptide Sequence Number=SeqID_72147
atgggcaagaaacgcaagcgcgagccaactcctccgtccgaggactttggcaactcggaatactcagaggaggagttctcctctgagtccgaggggtctccagctccggtccctcccccagcatcgttcgatgactcggacgactctcaggggatcgccgcggaggtctggaattacatctgggccatcgagcgctccgggctcgcgggctcggatgagtcggagtactcctcggacgaggaggactcgtccgaggaggacggtggcggcggtggcgaaggcgacgacgacgacgacgacggaggcgatggcggcgacgacgacggtgacggcggtagcaggggcggcaacggcggtagtaggggcggcaacaggggcagcaacaaggccagtggctaa

SEQ ID NO: 30369 - DNA, 450 bp, Zea mays
  Peptide Sequence Number=SeqID_72148
atgggcaagagcaagaaaggcggaagctcctcgcaccattctggcaataagcgaaagcgcgagccgactcctccttcggaggacttcggcgattccgagtactcggaggaggagttctcctccgagtccgagggatcgccagtccctgcctctcccccggcatcgtctgatgatttagacaattcccaggggattgctgtagaagtgtggacctacattcgggccatcgagcgtgctgggcttgagggctcggatgagtcggaggtctccttggacgaggaggactcctctgactcgtccgaggaggggagcgacggcgacgacggtggcgagggcgacagcggcgatgggggcgacggtgatggcgatggcgacggcagcaggggcgacgacaagggcgacggcggcaacagcaacggcaagggcggcagcggcaaggccagtggctag

SEQ ID NO: 30370 - DNA, 742 bp, Zea mays
  Peptide Sequence Number=SeqID_72149
gacgctagacaaaaagcgcaagtggcaggcaacggcccgcctccgcctccgccgccggcggcaggcccaccagccgaagcttgtcatcgcgtcgttcgcgctcacccgcgaccgcatcgacgcgctgaagcggcgcgtggccgccaaggtcgcggcggacggcggcggcacgggccgcgtccactgctcggcgttcacggtggcgtgcgcgctggcgtgggcctgcctggcacgcgtgggcggcggggagcggccccgcgcgcacctgctgttctcggtggagtgccggcgccgcctggcgccgccgatcccgcaggagtacctgggcaactgcctccggccgtgcttcgtggaggtgggcacgggcgagctgctgggcggcgacggcgtggcggctgcggccgcggcgatcggcgcggccgtcgcggcgctcgacggcggcgtgctggatggggcaggcgggtggttccacaagatcctgtcgctggtcccggagcgcccgatgtcggtgggcgggtccccgcggtacggtgtgtacgagactgacttcgggttgggccggccggccaaggtggagctggtgtccatcgacaagacgcccggcacggtgtccctggcggaggcccgcgacgccggggtggaggtcggcgtcgtgctgcaggaggccgagatggcgcgcttcggctcctgcttcgccgatgcactggaggtgctctgtgacagtgtgactgaactgaactga

SEQ ID NO: 30371 - DNA, 743 bp, Zea mays
  Peptide Sequence Number=SeqID_72150
atggggtcctccgcatcaagcagcctctcgcagaggaaccgctccatctccgggggacgacccgaacgcggaggcggccgccatctcatgccggcgattccgtacgcctccaacgttgttgccgcccgggcttctgcacaaacccctccaaagggcatcaacgcgccgccgcaatgctgcgtcggccgccaccctctccggctgggcacacggaaccgggcaacaacttgccgcatgcgtcacactgccgcgcaccaaagccgaagcccgctgtcgctgtcggccctggcacccgcgggcaccaaagccacctgccgtcgggcgctccaccgccgtcgccaccatcttgtgcctgcccaggtcacttgttgtcgttgccatgccatcaaacgagaggagggccccgtcgccgccgccatctcggccgaccgcgtagccctgctggcgcacctcgccgggccactggacgcctctctccatccgtgcagcctcccaacgcccaagcaggttccacccctcctccccacaagcaccaccacctcaatgaggaccgcgctcgtgagaggcaggggcgcggggtctacgttaacacctgcccttgaatccgcctgcatcgacaaccttcatgccgccgccgcccttcaagtagtcgccaatgccgcgtggcacccgcccttgaggtgcgggtgtgggtgggaggggagagctgaggagctcctcgccgccgccttcctcgtgcccgc

SEQ ID NO: 30372 - DNA, 495 bp, Zea mays
  Peptide Sequence Number=SeqID_72151
atggctacttccccgatcatctgcaattttcgtccccgatcatccgtctccttcatccctgtcagaggtttggagcaggcacggagacctgtccccgaccccatggctcggaggccgcgtccggcctatcctgtgcccccgtcttacccgtggttcgccccgaacatgggccgagattgcccgctcgccccgacgcgtgcgcgactcgttcgcggcacgttaagtgtggctttgcgcgtgtgcgtgttcgcgcagcgttctggcgtagctcgtcgtgctcgcgacacgatcgtctaccccctagcccccgtctacccccccaggatccggggtgtagttcgcttcgccgtcgtgccgtcaatggggctcggtgtatgcggctcgctctgccaaggtggctatgagatcgatggttttggttatgtctatggtgctggagaagatgaagccatggaaggagactttcaggagttccaagactacgacgagttctag

SEQ ID NO: 30373 - DNA, 657 bp, Zea mays
  Peptide Sequence Number=SeqID_72152
atggccgctaccaagatccttgacaggctcaaggtgggggcttcacctccagcgcccggcggcgcgctcccgctcaccttcttcgacgtgccgtggctcttcacgggccccgtggagcgcgtcttcttctacccctacgcgcacacggcggaccacttcgccgcccacctcctgccgtccctcgtctcctccctctccgccacgctgcgcgcgttctacccgctgctcggccgcgtccgcccgtgcccggacggcggcggcgggtacgaattcttctgctccgacggcggcgaggccgtcgagctcatcgtcgccgagagctccgacgacttcgacgagctctccgccggcgggccgagggacgtcgcccggctctacgcgctggtgccgcggctcccgtcgcccggggccgacggctccttcgccctcgcggcggcgcaggtcaccgtgttccccgcccgcggggtcgccgtcggcgtgtccatccaccacgtggcctgcgacgactccagctacacgcacttcatcaggacctgggccgcccagtgccgcgtggctagcggcggcgcggacgcggtgtcacctcctttatctgaccgtgactggacgcctactagaagtacacacggctgtcacagaagaatgcataataggtaa

SEQ ID NO: 30374 - DNA, 378 bp, Zea mays
  Peptide Sequence Number=SeqID_72153
atgtccagtcggagcattctgtttcttcatgccgccgacgagtatgcccccgatgttcttcgccgtcgcttcgtcgacgcgttgcaagctcatcatggcaccatcagcttctgtgccatgacgccacttgccgtcgtcgtttcgagcgtccctccagtgctccgtataccgtatgtgctgcgacacggccgtcggttcctcgtcttcgcccgcagccccgccgtgttcgaaattcgtgtcaaggccttccacttctttgtaattgaagctgcaactccctgctctactgcgaacgtgaagaaggtgaaaatgcaactccctgctctgatgggcgaacttaaagaaggtgaaaattgttcgatacacactaaagtctag

SEQ ID NO: 30375 - DNA, 351 bp, Zea mays
  Peptide Sequence Number=SeqID_72154
atggccagcctgctcggtctctgcccggcgcagcggctcgtggccagccagcacgacgcgcgcggcctagctcctatcccgttgtcgagccctctcctacgcgcctgtcccgcgtgcccaggcgtccggccccggctccctagcccgccgtgtggagaacgagaagaagaagcaatcgtcctgttcgtgggtgatatgggttgtgaccgcatgagattccatcgtattgaatcagatgtttggattacgggtggtgacgaggatgatgtttatgactatggtaatggtaaagaagaaggcgtcgaggcagatctccaggagttccaggacttcgacgagttcgaggattag

SEQ ID NO: 30376 - DNA, 501 bp, Zea mays
  Peptide Sequence Number=SeqID_72155
gcgctgggaagggctcaggcaggttcgggatggcacaacggactcagtcatgggcacgacaccgacgcagaagcaccggagggcaccggtctgcggcagagtggcccggcaacgacgctagcctactctggcgatcgattgcgtgagcaacaaggctatgggaatgggaaatcaggggcatggggaggcgagttacctcgagagacagctctggagcgcttgagcgatggcgagaatacagcggggccccgggtcgacggcggcggcaacatggctgcacgtcgaggagtctgtatagtgcggataactgcttggggtaagaaatatcgcgttgaggatgaactcggaccattgtttcgccttgttgccgtgcccacttgcaccggcgacgtggccaagcggttgtcaccggagtatgcgccattcaccgcgattgcgccatgcctcaggccatttaccacgtcgtcgcaagtcatagtgactgccccgcgactgccgtag

SEQ ID NO: 30377 - DNA, 537 bp, Zea mays
  Peptide Sequence Number=SeqID_72156
atggaccgcaaagatgtcgggatcctcgccatggacatctacttcccgccctcctgcgtgcagcaggaggcacttgaggcccatgatggggcgagcaaagggaagtacaccattgggcttgggcaagattgcatggccttttgcagcgaggtggaggatgtcatctcaatgagtttgacggttgtcaattctctgctgaaaaaatacaagattgatcccaagttaatcggtcgcttggaggttggaagtgaaacagttatagacaaaagtaaatccatcaaaacttggctgatgcagatctttgaggaaagtggtaacagtgacattgaaggtgttgactccagcaatgcatgttatggcgggacagcagccctactgaattgtgtgaattgggtcgaaagtaatcctgggatggccgttatggtcttgtcgtttgcacggatagcgcgggttgtcatccagcctttccttccgcatcagtttttgttatttggtttttttcttttagaacacgcaatcactttctgccatctgtaa

SEQ ID NO: 30378 - DNA, 375 bp, Zea mays
  Peptide Sequence Number=SeqID_72157
atggcacctggcgaaagcatgcagaggatgcagggagccatgcgcatgtgttgcccaggcctgcccacccgtgtgtattcttctctcacctctcgcttgtgttcacctacctctgccctcctgtgcgggtgtgcgtcaaacaccctaccactctcgcacaggctgctggtgaacgaggcccatgaccgtgtcagtgaatttctcggtgcaattggtattgatgtgcatgatgcggaggcccagctcagctgcagcggcgggatcagcagacaatgcagagcagcagctgccagggctggaacatgcgctgcactgcacgcaatatctgaacctttgggacacattgaggggagtggtgctgactcaggaggctga

SEQ ID NO: 30379 - DNA, 597 bp, Zea mays
  Peptide Sequence Number=SeqID_72158
gaaattgacccaaaggtagaaaatgatgatttatccaatgaaggaatggaaggattcctgtcagaactgacaaatgcgattccaggagtagatgaagctatgagttttgctgaaatgctaaatttggatactgctcctacagggcatacattacggttgcttcagttcccagcaaccctagagaagggtcttgagaaaatgatggagttgaaaaatagatttggcggtctgttgaatcaggccagtcgattgtttggtcttggtgatgagctgaacgaggatgcaatgcttgggaaacttgaggctgtcgagtcaaaactgctaaaagcacggatgaaaatgcaacaaaaatacattgatcagttccatatgttatacgatgacttcaacatcaccaagcttcccttgctttcagaagaggtttgtggtgttcaagctctccaaaacttttcccagcacttccttacaccatacaagtctactcttaaaaggggcaccgtcgaggagctcgaacagagaataactatattaaaatctgcactgcaagaagctgagacagagttagatagggttaggaaagggaagcagtcagtgtga

SEQ ID NO: 30380 - DNA, 198 bp, Zea mays
  Peptide Sequence Number=SeqID_72159
atggcgccgcacctcgtcgtggtccggcctcagcgcaacccaaattccgctccaattggggtttacttctgccctatgccgcggggaaacgtcggtgcgccggggaggaagatcgccggcgtgctctgccgcggaggcgcgtctatgcgtctctcgctgcctctgctggggaagagggccagtgggccatcgatctag

SEQ ID NO: 30381 - DNA, 141 bp, Zea mays
  Peptide Sequence Number=SeqID_72160
atggctccagggaggaagggaatacgaagcacaagggaacccccaccagctgcaaaacttcaagattgtttacctagttcaaagaaatcaattcttactgactatgagaaaacagagggcagagaatgtgctgaggaataa

SEQ ID NO: 30382 - DNA, 303 bp, Zea mays
  Peptide Sequence Number=SeqID_72161
atgaagctgtggaaggagacttccaggagttccaagactacgacgagttctaggtgtgggttagcggcaacccccagtcggctgcctgtgaaggccgcgttatctacgtttcttttccgcactttgatttattggctaaaatttcagtatcctcttggagttcacaggctaaaccaaaatccaaactccattcagtgtggattgttgcagaaaatgtgcctgaagaactttagaattatcaggccatttgtgaactgggctccacaattggtgttgtggaagaagtggacattctatccttag

SEQ ID NO: 30383 - DNA, 273 bp, Zea mays
  Peptide Sequence Number=SeqID_72162
atgacgtgcggggccgagaatatgtgggtcttcatcggtgccgcaaaggacaaaatggacccacatgtcatcgtaaatatcacgacggctcgatactttgccaggtccggctggcgacgtggacctggatatagccggatagagacccacgggtacaccgtacgccagagtggtaaagggacacgcgcgtcatcggcatcacatactctaacgccaaactctatctccaacgcggcgttaggctcacgtgttggtaacataatgatgccgtaa

SEQ ID NO: 30384 - DNA, 1332 bp, Zea mays
  Peptide Sequence Number=SeqID_72163
atgccattgatgcaaatatttataggaccgaaagttaagattgtttctaaactgctgcatcttcatagtagttttatttcgacttcagttcttagttatgtcgggtttggttttatttcccctcatattgtaaactgctcagttttccttggatctgtcatatcttggggctttctttggccatttattagtgcacaagctggtcattggtacccagataaccttggtaacagtgatttcagaggcctatatggttataaggtcttcatagccatttcgattatacttggagatggcctatacaacttggttaagatatttattgtcattgctagagaattatgcagcatgcaatcgaaacaacatgagctgcctgttcaagctctggaagatgacgggagttgtgaacaactagcagatgagaaactacaaacagagatattcctcaaagatagtatatctccttggtttgctgcttctggttacattgtcctggcagcaatatccaccgccagtgtgcccgccatatttccccagctcaagtggtaccttgtcctcctgtgctacttcttcgctcccgtggttgcgttctgcaactcctacggaatgggcctcaccaacctgaaccttgccccgacctacggcaagatcgccctcttcgcgttggcctcgctcgtcggcagtgatggcggtggagtcatcgccggccttgcagcctgtggcatcgtaatgtccgttgcctgttccacagccgatctaatgcaggacttgaagagcgggtacctgaccctctcgtcgccgcggtcgatgttcactgcccagctgatcggcatcgcgctcgggtgcgtcatagctccgctcacgctgtggctcttctggacagccttcgacatcggcgaccctgacggggagtacaaggccccctttgccatcatgttccgggagatggccatcctcgggatggagggcttctccgcgctgccactgcactgccttgacatctgctatgccgccttcttcctcgccttggccaccagtctcctcaaggacgtggcgcccgcaaacgtgtccaggttcatccccataccgatcgctatggctgcgccgttctacgttggcgcctactttggcgtggacatgttcataggcacggcgatcttgtacgcctggcagaagctgaaccgggagcaggctgatggttacgcggtggctgtggcgtccgggctgatctgtggagatgggatctggagcatcccttctgctcttctgtccatcctgggagctgttccacccatctgcatgtcgttcgaggcttcctctgctcccaggtga

SEQ ID NO: 30385 - DNA, 951 bp, Zea mays
  Peptide Sequence Number=SeqID_72164
atgcagcaacgcaaggccaaggttgtctggggtggcgccgagagcgcggcggcgcaggagatcccggcgtcgtcgcagctggcgatggcacacaacagcagctggcctgagggcgaaggggctccggagcactcaccagtgccgcggaagaagaggctttccctggacgagaagcgatggaacacggtggtcaacgtcatgcttgtcgccttcgtcatggccgtgccgccggtcgtcgtcgttttcgctgggggcggcattgcgcccgcggtctggatcgcggccgccaaggcccagctacgccgaggttccggcgatggcccaccagacagacttctcggcggcctcctggccgatggactcgatgagagaacgtgccgcagcaggtacgagtcctccctgtacagccggaggccggcacggcgaccttcaccgcacctcatagcaaagctgcggagacacgaagagctccagagacggtgcgggccgaacaccgacgcgtacagccgcgccgtccagcagctgagggccggcaaaagcgtgggctcgcccgagtgcaagtacgtcgtctccatctcgtaccgtggcctcggcaaccgcatcctggccgccgcgtcggcgttcctctacgcggtgctcaccgaccgcgtcctcctcgtggaccccagcaacgacatgggcgagctcttctgtgagcctttccccggcacgacgtggctgctgccgcgggagttccccctcgcgagctacactaacttcagcatcgacaccgccgagagctacggcaacatgctgaagaacagggtgctcagggccgacgtgccgccgccgccgacggagacgcagttgccggcgttcgtgtacctccacctcgaccacgactacggcgacgaggacaagatgttcttctgcgacgacgacccgctgctgctgtcgagcgtgcagtggctg

SEQ ID NO: 30386 - DNA, 276 bp, Zea mays
  Peptide Sequence Number=SeqID_72165
atgtacctgctgagcctgtgcgacgtgctggtgaccagcggctggtccacgttcgggtacgtggcgcaggggctcggcggcatgacgccgtgggtgttgcacaagcccacgaatgccacgtcgccgccggacccgccgtgcttccgggatgtgtccatggagccgtgcttccatgcgccgcacgtctacgactgcaagctcaagcgtggagccgacacagggaaaatgctgccgcacgtcaggaactgcgaggatatctcagatatgttctattaa

SEQ ID NO: 30387 - DNA, 234 bp, Zea mays
  Peptide Sequence Number=SeqID_72166
atggagagtctagtcacattttatatttctatagaataccctaggaaatcaataaatatgttccctggagaatatgatattcttgatatgcagatgacaggcaattactccggcctccgtgtatcagtgaccagcaaccttcccctatggtttgaagcagcgaaagatatagagaatgctgatgaagagaagctggaagaaattcaagaatgggaggtcggcaatgctagttga

SEQ ID NO: 30388 - DNA, 320 bp, Zea mays
  Peptide Sequence Number=SeqID_72167
atgacgtcgaggctggagagcggcgggttccagctcccgaacaccgagcaggagaacgcactcttgctccgcgcgctcatctccgtcgtgtccggtgacaccgccgccgcgtcgttggtcccggaggcggccgccgcagaggcccctgccgccgcggcgtcagcgtgcgggtgccccggcggctgcgacctcgccgccgcgtcgagcagcgacagcgatggcgcggagtgcttccgcgagcggcggaggcgcgggcaaccggaggcggaggcggagcagggcgaacaattaaatgggcgtgcggcggcgtcctgggggca

SEQ ID NO: 30389 - DNA, 879 bp, Zea mays
  Peptide Sequence Number=SeqID_72168
atgaatgctacttgtgttgttgagggaactggtgaaagtgattgcttattgatggtggaatctgtttgtgtggtagagtgccagaagcagcgtcgactcaagtcagagaggtctgcactggcgcgcccgacggccttgcatgagctcaacagcgctggaggtgttgagctgctagtgctctcgccgagatgcttgattggtaacccgggaggaatgagcaagagctcgacgacatcatcccggagcagatcaggcacaggcacaggcacgttcccgagccctgggaccccgaactacaaccggcattgtgcaggcagcatgcagtactccaagggttggagttcagagcgcgtgccgctgggcactggtagcaatagacggtatgggggcagtggggttgtgcttccgtttaacaatgggaggaagctgccgtcgaaatgggaggacgcggagaagtggatcctaagtccggtttcctgtgatggtatgggaaggatgtctgcaccggctccgcatcatagacggcccaagtcgaagagcgggccccttggccacccagctggcattccaggggcttatgccgctgtctcaccgcttgttccttgctttgatggtgttctggcagaagctaattttgcagtgcattcacctttctctgctggggttctcataccagagcacgggcgcattggtgacttcagcagtggaagaggtagatgtggtgacgatggtagcagcagatcctactctgcagagaaggagccatatatattaagatctgcaagcatacatgcctggacagaaacgcttatggaggcatctgcttttgctaacatctccgaagaaaccgtacaaggtttggttcagccttttccttaa

SEQ ID NO: 30390 - DNA, 1041 bp, Zea mays
  Peptide Sequence Number=SeqID_72169
atgagaacaaccaaagtgaaaggtcaaaccatctcaactttaaccgcagagagtcccctcgcctctgcctgcctgtcccatccccagtccaccaagcagcgcccgtcaccatctctccccatcccctttgccaccctcggtcttctccctcctcagggcaggcaggggaagcagaagaaggaagcgagagcacggagcctgatttggtttgctttttgttgcccagactcggagggagttggtgcctctgtgtctctgtgttcgcagcaggacggaggcggcggagggaaggagcagcagcagctgcaggtggtggcgcagcccggggagaggaggcagcaggcgctcgcgcccaagcggagctccaacaaggaccgacacaccaaggtcgacggcaggggccggcggatccggatgcccgcgctctgcgccgcgcggatcttccagctcacgcgggaaatcggccacaagtccgacggcgagaccgtccagtggctgctgcagcaggccgagccggccatcgtcgccgccaccggcacgggcaccataccggcgtccgcgctcgcctccgtcgcgccctcgctcccgtcgcccacctccgggctcgccaggccgcaccaccacatgtgggcgccgtccgccggcttctcctcgccctccttcctgaactctgccgccgcgggcacgggcgatgccgccggtatcatgcagcggatggggatccccgcgggcttcgagctgccgggagcctccgccgccggagccaccctcggcgccggcggccacatcggctttgcgcccatgttcgctggacacgccgccgccatgccggggctcgagctcgggctatcgcaggacggccacatcggcgtgctcgccgcgcagtcgatcagccagttctaccaccaggtgggtgctgccgccggcggcggcggccagatgcatcacgcgcacgggcaccatcatcaccatcaccagcagcaggaggacggggaggacgaccgcgaggacggcgagtccgatgacgagtctgggcagtag

SEQ ID NO: 30391 - DNA, 690 bp, Zea mays
  Peptide Sequence Number=SeqID_72170
atggccgttggggaggctgtctgtcgatgggcgcaccggacagtccggtgcgccagccacgtcacccaaccgttagggttcgaccattggagctctgacagattggggcaccggagagtcactgttcactgtctgacgaccgttggcgcagtagccgttgctccgcatggcacaccggacagtccgctgaattatagcggagtggctctccaaaagcctgaagctgagcagtttagagttgatctccctggtgcaccggacactgtccggtggtgcaccggacagcggacagtccggggtgagatgacatacaatcccgcagctgatctggtgctcggacaatccacggaagaaacaccaaagaagtccgaattggcttcaaagaagaggaaacatcatgaggccgaagctgcacccacagcagagcctgaagaggatggtggccaggaggatcggaagaagaaaaagaagtccaaggaaagcgatgagagtcctgctgctgaagctgatggtgagaagaaaaggaaaaggaagtccaaggagggcgaggagcctgctgtggctgcctcagaaggtgagaagaagaagaaaaagaacaaatctgacgcggacggtgaggatgttgcagtgcaaaccgaagcgtctggtaagaaagataagaagaaaaagaagaaaaggcattgccgatga

SEQ ID NO: 30392 - DNA, 699 bp, Zea mays
  Peptide Sequence Number=SeqID_72171
atggcctccatggcgttcgccctggcgggggccttcaagggcctctccctggcgcccaccaccaccacctcctccttcccgcgctgcgaccgcgcctcgctctccgtcggcggcgcagcgggcgtgccggtgccggtgccggcgcggcggctcaccatccagatggcgcacaagaagggggccgggagcaccaagaacggccgcgactccaagggccagcgcctcggggtcaagatatacggcgaccagctcgccaagcccggggccatcatcatccgccagcgcggcaccagggtcctgcccccctcttgctcccttcgcttcccttacctgttactggtttgctttgggttaagcatattaaccaccgaccagtaccttcatacggattacggactgcgaatgctagaatcttacgatgtctatcctggaaataacgttggaatgggcaaggatcacacactcttttctttgatagatggactcgtcaagtttgagaagtatgggccggacaagaaaaaggttagtgtttacccatatgagaaggagcctgaaaacccaaacagttacagagcaaggaagagagagtacttccgcatgcggcgtgaacggaagaaggcgagagcggagggcgccgctgagcctcagttggtactagctgctgttgatgaaaactctgaggtcagcgcggactgctga

SEQ ID NO: 30393 - DNA, 579 bp, Zea mays
  Peptide Sequence Number=SeqID_72172
atgcagaagaggatgtcctctccggggaggtgggtcgatggcagcgagtacgccatcatcaccgccgtgcagggcaccttcggctacctggacccggagtattaccatacggggcagctgactgacaagagcgacgtctacagcttcgaagtgatactcgctgagctcctgacgaggaacaagccgatcatcgagaaggggaacggcgagaaggagaacctgtccaactacctgtgggaggccaaggagaaacctctcgaggagatagtggacggtcaggtctgggaggaagcgagcaaggaagcggtcgtgtgctttgctcgcctggcgctggagtgtctggatctgaggcgagaggcgaggccaaccatgaaagacgtggagttgaggctgcagctcctcaaggccaaggcacgcgctgctgcttcgggaccgagagcggacggcgagttccatcctcccggtgaaacagggcgacgcactaggcgctacggcgtggttccggtgactgctcaggatgggacgcgtcagtacagcctagagcaggagatcgcgtcgtccctgtggataccacgctga

SEQ ID NO: 30394 - DNA, 441 bp, Zea mays
  Peptide Sequence Number=SeqID_72173
atggcgaaggtgggtttgcggacggctccgggtcggtgcaagcgggccgcccttcatcgacggcgagcggggaactgggtggacaccgggacacgtaatcgtggattcgatgggagaggggatgggaggaagcagcggagggtgaggaggcgtcattggatccgctgcgggacggtgtgcgagaccggcgccaaggcggacgccgccgcggacgcgtgcggtgtggcggtgctacgggaggactgcgcggcgaggcatgagcggcctgggtcggacccaacacgggcgatggtggggacggcggggatccggcgtgcagggagaggtgggcgagggggcacaggggggcggatgtgcgagggagggaatgggggagaggcaggggcggcggggttcgcgatcggcagaacgtgggtgtgcacgcctacattagatacataa

SEQ ID NO: 30395 - DNA, 303 bp, Zea mays
  Peptide Sequence Number=SeqID_72174
atgcggctgtctcctgctctttctgtacttgttcatggccctgacctgctccatgctaatgggatccatttggacagacaccggttgaacaatggggttcttgcgacgaacagcacaggaaggaactgctggtgggatctatacaagaatgtgtccatgactcgtgtccgaatgcatggactgctatggaatttcaggtatttcaggttcagatacttgaggtccgagttcggtgaattggttccaggattgggtatatggtattttggccattcgcaccagcgtctaattgattccatttag

SEQ ID NO: 30396 - DNA, 1284 bp, Zea mays
  Peptide Sequence Number=SeqID_72175
atggcggtggaggagggccgacgagggcggcggcgccacggagcacccggtcgaggtgatcggccgcatccggaacctcacctcgggtgtctcatccgcgctggagttcgcgtggggcgggacggccgtgccgtgcgcggcgacgccgacgggtgtcgcgacttcaccctcgacggcgtctctgtgtcggaggaggaggacctcgaggggttctatcgccgagctgtctatagatgttcttacatgtttgcaatttgcgtgctagctgtgttgagcatattgattaagcttggcatccgagctccccttcgtttcaccctggtcctctgcttggcatccgagctcacaccgcagcatttcggtgggtccacggggtacgaccacgacgacggtggcggccggaaagcgttggactccgtcttcgccgacattgttggcgtggaggctgccattgtgcgcccgcagttcttctccggtacccacgccattgcctgtgcgttgtttgcgcttctgaggcctgggcatgagctcctggcagtcgctgggcccccgtacgacactttggaggaggtgattgggatcagggggtcggccaatgtagggtcactcaaggatttcggagtgacgtaccgagaagttccgatgcaaaatccaaactgcatggtgatggttgataattgctatggtgaatttgttgagatatcggaacctgcaatggtgggagcagacttgattgctggaagtttgataaagaatccaggtgtaactattgcgccttgtggtggttatgttgctgggaaggagcatttagtcgaagcagctgcagcccgtctatctgcacctggccttggggtggaatttgggtcaacacctggccatgttatgcgtgcgctatttcaaggcctgtttcttggtccgcaaatggttggagaagcagtaaaaggaggtttgctcattgcggaagtcatgtcagccaagggatacaaagttgaaccacttccgagggttcctcgtcatgatattgtgcagattgagatgacaataacaaaagcgaaaattggagtagatccctcaggatgtgtcgaactagcaaagcatgtcagattgaacaaccctaaccttgtgttgtctggtttgatgataattgggatgcttgattactcctcaactccgaagaatttcaaggcactagccaactgtcgggaagatgtgtgcaaggagcttggaataccggaagagcagctcgaactatttgtggacatgtcatctgactttgaacaaaca

SEQ ID NO: 30397 - DNA, 666 bp, Zea mays
  Peptide Sequence Number=SeqID_72176
atggtgggtggatccgtcgagatcctcggttcccttgcgatagaagcggatggcgggcggcacgataggcgagaggtagagtgggcagggaaacacgaagggcgggatggcgggtggggaaacgcggagctcgacgcgagaggggcgggtttgcagagctgggccggccaagatcctcgcatgtctgcgaggagagcaggctggaggttggcaaggctcacagcgaggagatcgagctggtggttgcctggttggtgcggagctcggccgaccgagatcgtcgcgacgaggaggatggaggttgccgagcgcatcggggacgccgtggatcctggagcgcacgaaccggcgatagaacccctcgaggtcctcctcctccgacacagagacgccgtcgagggtgaagtcgcgacacccgtcggcgtcgccgcgcacggcacggccgtcccgccccacgcgaactccagcgcggatgagacacccgaggtgaggttccggatgcggccgatcacctcgaccgggtgctccgtggcgccgccgccctcgtcggccctcctccaccgccatctcccgtcgcgtccaccgtgtgctcagcaggcgatggagtcgccaccaggtgtcgcggcgtggctggaggcggagcagaccgccccgtcttcgccctag

SEQ ID NO: 30398 - DNA, 570 bp, Zea mays
  Peptide Sequence Number=SeqID_72177
atggagcagtacccccaaccatcacaagattatactacaactccaagactccgcgaccacgcttttgatttgttagagagagatttgagcgcatttttgagctatgactttgtcattttgattcgtgcgcttgtgtgcacaaaggttcaacacaaaccaaaaaataatcaagttagagatccaaattcaaaggagcaaagaaaccagagtgtgctgaggaacggcgcaacggacagtgtccggtgggccaccggacagtgtccggcgccctccgctataattcatcggactgtctggtgtaccaccggactgtctggtgcaccagcggagcaacgactatccaacgcaacggtcgactgcaaaaagagcgctgacagcgttacagtgaagaacaatgcgtggcagagtcagagcgcagagtcagaggcgcaccggacagtgaacaggacttgtccagtgccacaagaagacaacagcgccaacggtcgactgctcccgaaccctaacgattgtgtgacgtggtggcgcacccggacagcctacagtggccggttcgggggtgcactgtaa

SEQ ID NO: 30399 - DNA, 528 bp, Zea mays
  Peptide Sequence Number=SeqID_72178
atgacgcgtgggtctagaaacctaataccgcgtcgcggtcccatctgccatagacctactcaaaaccccacaccacaccgtctggtcgtccatggagaaaactcgttgagcagattccttgttcctgcagtaaccctgtccaacccccgcagcggcggcaaccacagaaacactgcctgtaaattccattcctccgcgttcggcctccctcatcgcgcgaccgttccctctgctcgaatcggcaagcccgcatttcgagccccggaggtggccgcgaaccctaaccctacagcgaggcgtcgccggagttgtgggggctccgttggccatgtcgatggactcggacagctcgtcgcacagcggcgccgactacaggagtttccgccagatcacccgagaccgactaggacttaccgttttagttcgtatccgtatcacaacacaactgaggcacatttagtgttaaactgcaatgggattaaactggcgatgtgggcgacacaacaccactgtgctagagtcttgtag

SEQ ID NO: 30400 - DNA, 747 bp, Zea mays
  Peptide Sequence Number=SeqID_72179
atggagaattttggtatccatggatattttattgggtcatttgctatacccattgggagatatatacttattgtcgtcccttcccacgcaaccaatgaactccacccattgtatgtctccactggatcagcagtgccgctgccatccaaggtcttcaacaacaattgctatgaagatggctacagcagtgagattactgccaggttctccatcatcagtttctgcggcaatgtcctcatttgccccaccaatgtccccttcggcaagggttccagcactagcggggctagcaacaagcagtgctttctcaaatcaacacaggagtttactccccaaaggctgtctggttgtggacaaacagcagttaccttcacactcatctctgttgcaagcatcacttgggatttcctctcctgggcagatgtcttcacgaggcgtggacggtctgcgactaggggctggacagtccgcgacctggtaacaaatcccgcgagaaacctaacagactctgcgcacgcgcggaccgtccgcgccaccaccgtggactgtccggaccgcggaccgtccggcctcagggccggaccgttcgtggtgtccaacatatgccaaaagtatgttgacaccttttcgggcgccaatcactataacgagaaccgatggtggtggcctctgcagaggcgcggacggtctgcgggcaggggccggacagtctgcgacctggtacaggggcttgggttccctgcctga

SEQ ID NO: 30401 - DNA, 330 bp, Zea mays
  Peptide Sequence Number=SeqID_72180
atgacaagcagcctgccagcacgcccgagaggcggtggcggcctgcctgcacgcccgcgcggcggcgcggcagccggctcgcccatagagtcgaggaagcctgtgtcgtggagggcgcccacgccgggaaaggaggcgtcgtggacgggaacagcacaaggaggggcgcggcgaggaggcgtgagctccagacaacgcgacggcgtggaccaaatccggtggcactgcgggccatgctggcttgccggggagcagcggaagggcggccacgtcgacagggaggagaggggtgagcgtatgagcgcgggccaccaccgccacaacgattag

SEQ ID NO: 30402 - DNA, 288 bp, Zea mays
  Peptide Sequence Number=SeqID_72181
atggggtctaggaacatgtcggacaacctgagggtggagctcgacccaatcacggagaacagggttcatggctcgatcgaaggccacaaaaaagccctggatagtctgactgtcgtgaagagtgacgcgcacaacggtcatggtgacaccgggcgaagtcgggaaagcggtggcactggaggccagggcaggccccctggtggtaggaggaacaccatggaaagtcggggcatgtgcgctggggtagtgtatgacggcaattacaaggggctaaccccaaaaccctaa

SEQ ID NO: 30403 - DNA, 150 bp, Zea mays
  Peptide Sequence Number=SeqID_72182
atgccagacaagggcggcggcgggcagatgtcgacacaggtgacaggctcgatgctggtggctgtagaggagggggcagcgaacaagagtcctagcggcgaggatgatgaacttagaatacttttgctattgacagtcagggcttcataa

SEQ ID NO: 30404 - DNA, 315 bp, Zea mays
  Peptide Sequence Number=SeqID_72183
atggggtattcagcggtagagcctaccgtctgtaaccggaaggtcccgggttcgagctccagcctctgcatattatgcggtgactctgtactgaagcatgcatcaagtgacttcagaaagttgggccagcgcctatttatctttgtaattggaggtgctactcggtctgagttgcgtgttgcccataagctgtcaggcaaactgaagagagaaattatccttggctcctctagtcttgatgacccaccgcagttcatcactaaactgaagatgttatcaaccgaggaactgtcgcttgatgatttgcaaatataa

SEQ ID NO: 30405 - DNA, 333 bp, Zea mays
  Peptide Sequence Number=SeqID_72184
atgccggaggaggagtcgacgtcgatcccgctcagccaggcggcggaggccgtcgaccccgaggacccagccaagtcgccgccgcgacccagctcgcccaccacctccacacgcaaggcatgctgtgctgttcttcaaagttgggtctcaagaaaatttatgactggatgtgtagtccttttccctgttgcagtcacgttcttcatcacatggtggtttattcaatttgttgatgggtttttcagtcccctatatgcaaaacttggaatcaacatatttggtaatccttgtacaaatacttcaaactttctgtacatggtgattgtaaactaa

SEQ ID NO: 30406 - DNA, 2313 bp, Zea mays
  Peptide Sequence Number=SeqID_72185
atggcgcaggctgcatggcatcctcgcccttcactacgcctactgctacttctcatcaatgcgtgcgccgtcctcaacagtccggtggccgcgcgagccgagcggacggggtacattgtccacatggacaagtccgccatgccgcgacaccactccgatcaccgcgactggtacgccgccaccgtcgcgtctgtgacggacgcgtcagcgggcgtccgaactaagccgcagctcctatacacttacgacgaggcgcttcacggcttcgcggcgacactctctgcctccgagctccgcgccctccgcggccagccgggcttcgtctcagtctacccggaccgccgagcgacgacgctgcacgacaccacgcactccatggagttcctcaacctcaactccgccagcgggctgtggccggcatccaagttcggcgagggcgtcatcatcggcatgatcgacaccgggttgtggcccgagagcgcgagcttcaacgacgccggcatgcccccggtcccgtcccggtggcgcggcacgtgcgagccgggcgttcagttcacgccctccatgtgcaaccggaagctcgtcggagcgcgctacttcaacaggggccttgtcgccgcgaacccgggcgtaaagatctccatgaactcgacgcgcgacacggaggggcacggcacgcacacgtcgtcgaccgcgggaggcagccccgtgcggtgcgcgtcctacttcgggtacgggaggggcacggcgcgcggcgttgccccgcgcgcgcacgtcgccatgtacaaggtcatctggcccgaggggcggtacgcgtccgacgtgctggcaggcatggacgcggccatcgcggacggcgtcgacgtcatctccatctcgagcggcttcgacggcgtgccgctgtacgaggaccccgtagcgatcgccgcgttcgcggccatggagcgcggcatccttgtctcggcctcggctgggaacgaaggcccacggctcggcagactgcacaacggcatcccgtggctccttaccgtcgctgccggcacggtggaccggcagatgttcgtcggcacgttgtattacgacgacgccatgagagggaccatccgcggcatcactacgtacccagagaacgcttgggtcgtggacacgaggctggtctacgacgatgtcctatcggcttgcgactcaacagcggcgttggccaattcaacgaccgctcttgtcgtgtgccgtgatacggggagtctgaccgaacagctgaacgtcgtcgccgaggccggtgtctccggggccatcttcatctcggcggacggagcagatttcgatgattccatgcccctccccggtattattatcagcccggaggacgcaccacggctgctgagctacatcaactccagcacggtgccaacgggcgccatgaagttccagcagacgatcctcggcacgcgaccggcgccggtggtcacgcactactcttcgcggggcccgtcgccgagctacgccggcgtgctcaagcccgatatcctagcgccaggggacaacatccttgcgtcggtgccgcccacaattccaaccgcgatgataggccaaacacgactggccagcgacttcctggtccagtccgggacgtcgatggcttgcccgcacgccagcggcgtcgcggccctgctgcgcgcggtgcacccgagctggagcccggccatgatcaagtcggcgatgatgaccacggcgaccaccgccgacaacacgggcaacccgatcacggctgacgtcgtcggtaacaccaccgtcgcgagcccgctggccatgggttcgggccaagtcgaccccaacgccgcgatggaccctggactggtgttcgacgccgggccgggcgacttcgtcgcgctcctctgcgccgcgaactacacgaaggcccaggtcatggcgatcacgaggtcgtcggcgtcggcgtacaactgctcctccgcgtccagcgacgtgaactacccgtccttcgtcgcggccttcggttttaacgccagctccggcgccatgcagttcaggagaacggtgaccaacgtcggcgtgggcgcctcggtgtaccgcgcgtcttgggtgtcgccgagcaacgcgaacgtgtccgtgtcgccggggacgctggagttcagtgcgctggggcagacggcgacgttccaggtgggaatcgagctcactgcgcctaccggcggcgagccgactttcggggacatagtttgggccgacgctagcggcaagtacagagtgaggactccctacgtcgtgctttctggtctcccgtatccgtcgtag

SEQ ID NO: 30407 - DNA, 117 bp, Zea mays
  Peptide Sequence Number=SeqID_72186
atggtggatgaagtgcaaatcatcaagaagatagcctatgttgatgctaatgacactagggttgcagagatgggtgtcggattggctgtagggatgggtgctggtatggatgtctaa

SEQ ID NO: 30408 - DNA, 459 bp, Zea mays
  Peptide Sequence Number=SeqID_72187
atgctgccgctccatgtcgcggccgcggtggtggtcaccatgctcgcgttcccggcggcggtagtgctgggcatcgccaccgacgaggactgcaagtgcttcatgtgcgtctgcgacctggacccgcacccgctgccgccagaggtgccgacccaccaccctccgccggcgcagccggagccggtcccttcgccgcccccgccgcccccgtccccatcgccaccaccgccggcgccggcgctcccggtgtactacccgccacagaccgggtactactactacccgccgcagccgtacgggtacccggcgggggagatgtacccgcgggacgacaacaggcgggagtccaagtctgatgcggcccggcggcacggcagctgcgggcgcgccagcttggctctcgccgccgcgctcgcgtgcggggtgctggctctgcttctgcgctccgcagcagcttga

SEQ ID NO: 30409 - DNA, 339 bp, Zea mays
  Peptide Sequence Number=SeqID_72188
atgaccacatatccattggagcttgttgaactgactgccaagaccaagagagataaatgcactacaagttgtgcatgtgtggattcagtcagcatcgacgccatactcgagcaacacctggacgatgttggtgtggtcttggccaacgacgaggtcgagcagtgtgcggtcagactcgtctatggcgtctgcaacacgtcactcgggctctctgtggttgagcacctccttgagctcctcgaccgcactgtcatcgacaacaagtcacgtggccacaaatgttcctacaaagctcgccctgattccattgtccacaaacaactgcttcgtcctcgttga

SEQ ID NO: 30410 - DNA, 366 bp, Zea mays
  Peptide Sequence Number=SeqID_72189
atgcccccgcctttccgcgatgctatccgcccgagccctgctattcccacggcagggaagatgtccccctggctccactccacgcacgacgctagaccctcgctgtgcccccgcccactctctcctcgtcatcctcgcagtgcccccgcccgcgcgctctcgcctcttgagccgcccccctccagcatggggcaccaagctggagctgccagtgaaggtgccgtactgggagactggggcatcaactacctgctgttggtgggggcgtggggctcaccatcgacctccccgccattgacacctttactatcccgctcaccaccgagggagccttccgagaattcagatgttttagtgtatgaatag

SEQ ID NO: 30411 - DNA, 2700 bp, Zea mays
  Peptide Sequence Number=SeqID_72190
atggcctcgtgccctctgttcctccttgtcccgcggccccctccttcccttgtcggcgccgaccgctgcccaggctccgcgggctgctcagatctcccaactagctgccgtcctcatcctggacgccggcatggttacccatttcgttgcaactcgtcttcttcctcgtccgcgcctcgcgagcgcccgcccaggcagcgccccggtggccgtggcgacgccatcgaccccgtaggcttcctcaccaagctcggcgtctcggaccgcgccttcgcccagttcctccgcgaccggcacaaggccttgaaggaccgtagatgggagctgtgttctcggtttattgatctgaaagaggcatcttctgggtttgagttattgggcatgcaccgacatcgacaacaccgcatcgatttcatggaatgggctccaggtgctcggtattgttctttgattggtgattttaatcagtggtcgccaactgaaaactgtgccagggaaggtcatttaggacatgatgattttggatattggtttatcatacttgaagataagctcagagaagggcaagaacaagatgaatatttcttccaggaatacaattatgtggatgactatgataaaggtgacaatggcattgatgctgatgaaataatgcgtaggatgaaagaagagtattgggaacctggagaaatcaggtcccgtcagtctcagttagagatggttgttaagctatatgagcaaatgtttggcccaaacggtccacaaacagaggaggagctaggtgaaattcctgatgcccaaacaagatacaatgagttcaaagcatcgcagaaggctgactcttccagccagccttcctatgatatcattgacaatgggcaggagttcgacattttcagtgttgtaactgatcgtgcatcatttgaaaagtttcaagcaaaaaaacctccccttgcttactgggttgaaatgaggaaaggtcgaatagcatggcttgagaaatatgttccaacaatttctcataaagacaagtacagggtttattttaatactcctgatggtgctttagaacgtattcctgcttgggctgcatatgttcttccagatgctgaggggaagcaatcctatgcagtacattgggaaccacctcctgaagaaatttacaaatggagatttggacgtccaaaggtgaagggttcacttagaatatatgaatgtcatgttggaataagtggttcagagcaaaaggtttcatcatttcaggagttcacatccaaagtcctaccgcatataaaaaaagctggatataatgctgttcagctgattggtgttgtggagcacaaggattactcctccattggctataaggtcactaattattttgcagtcagcagcagatttggcaccccagatgacttcaagaaattagtcgatgaagcgcatggccttggattagtagtgcttctggatattatccactcctatgcatccgcagatgaactggttggcttatcactttttgatggctctaatgactgttacttccacagtggaaaaagagggcatcacaagtactggggcaccaggatgtttaaatatgatgatgtggatgttctgcacttcttgttgtccaatttgaattggtgggtcactgagtaccggattgatggattccagttccattccttgtcttctatgttatatactcataatgggttttctacttttactggtgccatggaagagtattgcaatcagtatgttgacaaggatgcactgatatatctaattctagcaaatgaaatgttacatcgtcttcatccagatattgtaacaattgctgaagatgcaacattttatcctggattatgtgagccaattactcaaggcggattgggattcaactactgggtcaatctttctataccagaaatgtggttgtggcatcttgaaaatgtccctgaacaagaatggagcatgaataagattattaaagtattagtaagcagtaaccagaatatgctatcatatgttgaaaatcataaccagtccatatctggacgcaagtcttttgctgagataattcttaattcaagagagtgctctgttggttctgttgacgacaatttgattagagcttcttctttgttgaaattgatgaaactaattactttcacgacaagcggaggcgcttatctcaacttcatgggcaatgaatttgcacatccagaaaaagttgaatttcctatgccaagcaatgactattccttcgagttagctaatcggcaatgggaactattggacaaagtttttcataaacatatatttaactttgacaaggatgttatgagcttggatgaaaatgaaaggataatttctagaggtccacccaacattcttcactgtgatgacacaagcatggtcatatctttcacaagagggcctttatttttcatatttaattttaatcctcaagtctcccatcagtcgtatcgtgttggtgtggatgaagctggggaataccaactcatcttcaacacagatgaaactaaatatggtggatgtgaaaccctcaagagtagtcagtatatgcggaggacctctgataaaagagctgatggttgtcgcaactccttggaattggcattgccatctagaagtgctcagatttacaagttagttagaattttgagaatttag

SEQ ID NO: 30412 - DNA, 291 bp, Zea mays
  Peptide Sequence Number=SeqID_72191
atgggggcgacacatgtgccgcaccctgcaccatcggagaggatgagtatgacctgggaattgcacctacaatgttgggacgtgggcatccatgccaccgtcgttggagaagaggatctgtcgagggcaattgataggggaggggacgacatgattcatagactcagaaaccaggaggacagggtcctcaacgtcaacagatgtcccgaagctatcgatccctttgttttttcatcttatcaacaaaaaccacaaggaccacaaagccccatcttctacgcagttgcatga

SEQ ID NO: 30413 - DNA, 414 bp, Zea mays
  Peptide Sequence Number=SeqID_72192
atggtgattcctcataggttcaaagacacacggagtcaccatgccgcggagcagaaggagcagcagcttcgcactgtgagggctgcttttgggctagaccgcgagaatgtgcacaagagaggagagaaggaagaggggcgacgtttaatcttggatcggactaatctgcgttctgtcaaacaaacgcaatgcattcaactggaaggtaaacgccatcggctgatcggccgttgcccactcatgctctaccgcatacgcgctgtcgcctggaccctagaaggagaagctgctcctccgttgtctggaaggagaagaccagagaagaagctgctggaggaggacgccgacgatgctgatgacccggagaccagtcgtagagactgtttgtttcagattatagattatatcatctaa

SEQ ID NO: 30414 - DNA, 1221 bp, Zea mays
  Peptide Sequence Number=SeqID_72193
atgctccagcctctctccgttcgagccactgccccatggaccctccatgcatccggtcctacgccccagcttttctcccccacgccgtatgatgggatgaattccaacgacaacaacacggggaactggaaggcgatcttaacagcaccagaggcccatccggataagcacaaacccgcaaccaccttccgaaataccagttctcgcacatatataacttgcgggccgcgtacctccttacccccccgagccgcaaacctgcaaccaccttcccaaatcctagttctcgcttctcgtcgtctagcctcggcccgttccaaaagccccgcagctctcgcatctcatcagacgccaccaccacctccggcgaccgaagatgatctctccggatgcagcccgcaacgtcgtaggcatcatcggcaatgtcatctcctttggcctcttcctctccccagtgtaagcacggatcgatccctccgcgtttcgacgagcgagcctggtggttttaatttggttagggttttgtttgtgctgacggagaggcggcgcatgcatttttacctgtgcagtctgacgttctggcggatctgcaaggccagggacgtggaggagtttaagcctgacccctacctggcgacgctgctcaactgcatgctctgggtgttctacggcatccccgtcgtccaccctaacagcatcctcgtcgtcaccatcaacggcgtcgggctcgtcatcgaggccatctacctcaccatcttcttcctttactctgatggcccgaaacgcaggaaagcgttcggaatcctggccgtggagattttgttcatggtcgccgtggtgcttggtgtgattttgggcgcccacacgcacgagaagcgctccatgatcgtcggcattctctgcgtcattttcggctcgatgatgtacgcctccccactcaccattatgagccgtgtgatcaagaccaagagcgttgagtacatgcccttcctcctctcgctggtgagcttcctcaatggctgctgctggacggcctacgcgctcatccgcttcgacctctacgttacgatccccaacgcccttggcgccttcttcggtctcatccagctaatcctctacttctgctactacaagtcgacccccaaggagaagaatgtggagctgcccaccgtctccagcaacgccggcggcggcaacgtcaccgtcagcgtcgagcgatag

SEQ ID NO: 30415 - DNA, 297 bp, Zea mays
  Peptide Sequence Number=SeqID_72194
atgaaaaagaggaatccacagctagagcagttcctatcagaaccattctcttcatcagttgttctcaaagggggacttatgcttactgaggactctacaattaaggatttggatgatgcttttcaagatgctgacacatattatcagtcagaggaccagtctgccgcagtggtgagatacttttcactgagccaatggtctggggttctaatactaagatacacagctctcttgcgtattcgagaaaaaaaatggtctggggttcgatgcagcctctctgcaaaaatacaggggtga

SEQ ID NO: 30416 - DNA, 276 bp, Zea mays
  Peptide Sequence Number=SeqID_72195
atgaccatctcatcgaagtttgagttcctccccaactctagctacaactccgacaaggaatttctctccatctattcatcttccggggcaacccggaacatcgccgtgaccggctccgcgagagctttgtcaccgcgcttttggttcgtcgattggatctcttattcattgttaatatgcgaaacaaacaagatgtccaacagcaacgtgagattgaagggcttagttggaagccctcataatttattaaaaatacgatatcttataggtcaataa

SEQ ID NO: 30417 - DNA, 648 bp, Zea mays
  Peptide Sequence Number=SeqID_72196
atgaagcagctgagactgagagatacaaatgcttccctgcacattattgagtccttgttgggttggtcggtagcagctgatgtttctaaacaaaaacaatactctggatatataccgacgacgccaggagttccatggagcgaggaggagcacaggcagttccttgccggcctggacaagctgggcaagggcgactggcgaggcatcgccaggagctacgtgccgacgaggaccccgacgcaggtcgccagccacgcgcagaagttcttcctccggcagagcagcatggggaagaagaagcgccggtccagcctcttcgacatgcggcaggtgccgatctgcgagaacagtgcgagcatctccgatccgctggacgtggcacgccatggcgtcgcctcggcagactccgagagggcggccgtggacgtggacctgatgaattcgacgacggagggtgacgacggcaggagcagggacgtcgtgtcgtcggcgtcaggtgcagggaccgcactgcggttcccggcagcggcagctcagacggagccgctgcatccttcgtcatcgcatggccatgggcgcggccaccactgctctccgttggacctggagctgggcatgtccctgcccgccccatccgtcggaacgtga

SEQ ID NO: 30418 - DNA, 171 bp, Zea mays
  Peptide Sequence Number=SeqID_72197
atggcctgctcgcccgcgccagcctcccccttctcaatcgacgccgctgctgtgagaaaaattttaatgtcaattttggaccctttgctcggcgccatagcctatggcgctgaggtaacacaggtcggcgccatagcctatggcgccgagattttttgtttatatccttga

SEQ ID NO: 30419 - DNA, 750 bp, Zea mays
  Peptide Sequence Number=SeqID_72198
atggccatgaccgagcgtcgtcttctcacggccaggtgtcgtccctggcaatggcagtgtcgatttgggatggagattggagagtggggaataactcacgaaggggaaaggtgttacacccagaatggcgaaggccttgtcgacttccgaagacccggcgcacgcaacacgaaggctactgtcactacccgagcgctgttgctaaagcgagcccgtgtggaaccgccctgggtcgcctggccccacttgaataacgtagataaccaggggcatcactatatttaccaaggtgagatcgtcccctggttccctataaatacccccgcattgtaccctgatgggcgctcagtccctctagctgcaaacaattccttcatcctgaggacctttggcagagaaggagaccccaacatagccctcgttgaagacacccctcatgaggccctcgaggatgaggcattcgacaacaagcgacatcgccaagagaatctgcccaccccgagggcactgttcgcacatgcagctctgagggattacctcgggcacctccgccaggcttcacccccagaggctgatgacatcatcaaagacggtgaagtcctaggcatctcagccgaggatcagctcaagttgcgagcccttcgcatcaagagcaatcacctacagaagcagaaggagatacttgcagttaagagccagcgcatcgccatgcaggccaaggtcaagcagatgatactagatgatgaatag

SEQ ID NO: 30420 - DNA, 411 bp, Zea mays
  Peptide Sequence Number=SeqID_72199
atggccgagcccggcccgcgccttccctgtcctcttccctacgtgacatctctgacgtatgttcatgccgacaaaagaatcccaagaaaatgtagagaagcaagcctttggtcgatgttcaagtggtcggcgaaaggccagaacaagaatcatcaccgtttatgcggagttatacttaatatgaaaagattccaagaattgtggatggaagagaaagtgaagcttcgtgctatactcgtcagctgctcgatcgaagacttcaatcgaagactatcgtcgttcccgccaacactgaatcaagttgataacggtacgctaaataatcgcgtgatgcggaagacgacccaagtcgaccccaagcgcgggctactccgcaggatggtgctgatggacgaatcggaagatggataa

SEQ ID NO: 30421 - DNA, 348 bp, Zea mays
  Peptide Sequence Number=SeqID_72200
atgtcgaggagactcagccggcagaggaaaacggagcgccggccatgggaaagggaggacaacagggcgcgacgctgggagatccggccgggctgggagagcgacgaccgggcaagcgacggctgggcagagggtgagcgggagctcgagacgagctcggcagggaggaaaacgcgtcagggggctgcgcgcagaggagcagggcgagatttgagctgggcgccatgggagaccagggagaagctcggcgcgcagagctccacggcgagctcgcgcggcaacagagctggagcagggagatgggtaggagcgactggcgctggagagggcgagcagggcacgacgtag

SEQ ID NO: 30422 - DNA, 389 bp, Zea mays
  Peptide Sequence Number=SeqID_72201
atgtccggtgctccaaggaagctcggcctcctgaactcgccagcctcgggttcgcgcggcagccgctccgctaaaattcaccggactgtccgcgcgcgcagaagtcagaatcgcccataccggtgcaccggacatcaaacagtacatgtccggtgtgcaccggacacccaggagggcccacaagtcagaagctccaacggtcagaatccaacggcagtgatgacgtggcaggggcaccggactgtccggaggggggatgtaccgtttgatgtccggtgcaccggtatgggtgattcagacttcagcgcgcgctgcgcgcgcattaaatgcacgcagggagccgtggcgccgcagggagccgttgctccgctggcacaccggacagtccg

SEQ ID NO: 30423 - DNA, 905 bp, Zea mays
  Peptide Sequence Number=SeqID_72202
atgcggagctccgtcgcctcggctgcgctgctggtgacctgcctggtggtggcggcggcggcgaggtcgacgggaaggacaacgctcagcgtcctgtcgttcggagccgcggggaacggggtcacagatgacgcgcaggcacttgtagcagcatggcaagtggcatgccgagtcccccgcgccaccgtgctagtgctcccatcagggcaccggttcctcctctcgccggtcacgctgcaaggcccctgcagcgcaaaactcacccttcagatcgacggcaccgtgttagcgccaccggaaatgggctcctggccgaagcccaggaggcctctgcagtggctcaacttcaagtggctgcaaggcttcagcattcagggaaccggcgcggtggacggtggccagcagaacctagaccttgacatgaagtgttgtctctccatcactcacttctatctgcagacatctacgggtaccgggcactggcattcgccaggagtcaagcctacgctgataaggttctacaacagcttcaatgtcagcgtgcgcaacatccggatcagcaacagcccgcagtgccacctcaagttcgacagctccggaggcatcagggtgaagaacgtcaccatctcctcccccggagacagccccaacaccgacggcatccatcttcagaacaccaaggacgtcgagatcaggagctcgaccatcggctgcggcgatgactgcgtgtcgatacagaccgggtgctcaaatgtccacatgaagaacgtggtctgcaatcccggccacggaatcagtctaggaggactcgggaaggacaacagcctggcctgcgtctctgacgttgttgcagagaacatcgtcgtccagaacgcactgtacggggtcagatcaagacgtggcag

SEQ ID NO: 30424 - DNA, 234 bp, Zea mays
  Peptide Sequence Number=SeqID_72203
atggcttcagggttggcatgggtggctagtcaggcgtgccataaggatggtaccctcatggcggtgagtggtacgggtgctgagtcccagcaggggcgggagaaccatactcctaatgacggcgctctgcgcgctcagcccacaactctgcgatctcagcacgagccctactcagctcatcaagagtgtggtccagctctgaaaggaacaaaagaagacaaagcgagaaactag

SEQ ID NO: 30425 - DNA, 1839 bp, Zea mays
  Peptide Sequence Number=SeqID_72204
atgagatgttaccgttgttttcttctggctcctgtcgtaattgcctgtttcttctcccggataacaaccactaccctggccgaccctcgggcgacggtggttcgtgagttgtgcaacaaaaccaaagatgacggtcctggggcggtttgggccaacaacttcgtcgtcgccttcgacaacctgaactcggatctcgagcaaaagggatggggggtaacctccgttgggcaagatcctatcaccttctacgcgctcgtgcaatgcctagaagatctcagcacggttgactgcacactgtgctactcagagataaggtctcttctcccgaaatgctatccggagatcggaggccggatatatctcgatggctgctttatgaggtacgcgaactactctttcttcggcgaggccgtggactcgttggatacaagcgtgtgctcttccagtaaccgcagctcagagaagcggggcttcggttcagctgtggatgccgtgttgagcaacgtgacttccttggctgtcaagagcggcaaagggttcgcagtcacttcagctttcggatcaacagaatttgcagcttatgcacttgctcagtgctgggagaacctgaacacttctagctgtgcagcctgtctcagtgcagctgcaggttcggtggccaaatgtgcaccggcagaggaaggccgtgcactctttgccggctgcttcgtcagatattcgacagcacctttctggaactcggaggattctggctccagctcaaagaagcacgttgttccttggacagtcctgggtttctcggttggtctcgttcttgtactcatcggttcagtactggcatggaggaagaagaagaaagcttgcagggcaggagaaggatcattgagggcaagactgcaaagggcctggcactcaaagaggttgcaacaatttcacacgcaggctgttcttcctggtgggaatgaagtcgctgcaaagagattgttcctgaacacgaaacaatgtctcgatcagttcttcaatgaagttgacgtgataagccaggtacgtcacaaaaatctggtgaaactgctcggatgcagcgttgatggcccggaaagcttcttgatatatgagtaccacttgaacaggagcttagatctgtccatattcgctgatggccagcagaagaggcgtctggattggcagcaaaggttcgatgttatttttggcgtagcagagggcctctgctacctccacgaagagtcagaaactcggatcatccaccgggacatcaaagccagcaacgtcctgttggaccagaagctgaagcccaagataactgactttgggcttgctcgagtcctatgcggtgacaggactcatcttaccacagggattgccgggacagttggttatatggctcctgagtatgttgtccatggccacctcaccaagaaggccgacgtgtacagcttcggcgtgctggctgtcgagatcgtcaccggaaagcggtgttgtgggtcgacagggtctcactctggtcactcacttctagcacaggtttggcatagttacaagaccaacacgacggagaaagtcgttgacacgaggctgcagcaagagagtgctccgttggacttggaggagatcacgcgcgtcgtgcaggtcgggctgctgtgcacacaggcaaaccccgacgagcggccggccatgtcgagagtggtggagctgctgagggacagagacggagaacgtggcgatgcggacttcatcctaggcgaccccccgtttttcgaggtcgaaatcgacgccgccgggggaggcgtcgacggcgaagcatgcacgctgctgccctga

SEQ ID NO: 30426 - DNA, 579 bp, Zea mays
  Peptide Sequence Number=SeqID_72205
atgatgaattacaaatgtaccttcggcttgaaggaaagagaatacaagcgtgacgcaaaagtgaatgccaaatcagcgagaccaaagatccggccagctctgatgtcaggagctagtggctcaaccgggcgcgcggccccgcggtacgccccggatgacctgacgttgctcaagccgtggcgcggcctcgtcgacggcaccaccggctacctgtactactggaacccggagacgaacgtcacgcagtacgagcggcctatgccccctgagaatcagctgcccccgcccccgcccccgttgcctcccccgcctccccggagccgcgaccggcgcgacaggtccagatcccgatcccgcacccctcccaggcgcgaccgccgcgaccgcgaccgtgacgacgagcatgcgtcctccaagacggcgtcttcccaccaccatccggctccgatagccgtcgccgactatccgtccaccgaggcataccgacgccgccatgagatcaccgtcacgggggataacgtgccggctccaataacttcatttgaggctggtggcttcccatcagaaattctgaaggag

SEQ ID NO: 30427 - DNA, 664 bp, Zea mays
  Peptide Sequence Number=SeqID_72206
ttcccggtggggcggcgccgccggtacgcgccggtggtcgacgccgagtgcgggtgccggcccgcgccgcccgaggctgctcagcctgccgtccttcctcagacggccctgcagccagctgatggacggtgttaaggcggctgcgacgacgacgacgacgaggggcggcgtcggcgagcagtactcctcctgcgcctccacctccaccgccgcctcgtcggcggccacacgcagcaccggcggctacgcgtcggcctactcctccgactactactactgctacccctcgcgcgtcgcatacggagctggagccgcagccaaggcgcagcaggcgaccaagaagaagaagaaggagaaggagaagcggggcgagaaggcggaggcggaggcggacggcttgggcgtggcggtggagaaggagtcgtcggacccgcgcgcggacttccgcgacagcatggtgcagatggtgttggagatggggctgtgcgactgggacggcctccgcggcatgctgcgccgcctgctcgccctcaacgcgccgcgccaccacgccgccatcctcaccgccttcgccgaggtctgcgcgcagctcgccggcgcggcggccgctgccgctcctcctgcgcacccgtcgccgccagcgccgtgccagtaccggcgctag

SEQ ID NO: 30428 - DNA, 1935 bp, Zea mays
  Peptide Sequence Number=SeqID_72207
atgccgttcggcttgaggaatgcgcgcgcgacgtaccagcggtgcatgaaccatgtgttcggcaaacacattggccggacggacgaggcctacgtcgatgacatcgtagtcaagacgaggaaagcctccgacctcctttccgaccttgaagtgacattccgatgtctcaaggcgaaaggcgtgaagctcaatcccgaaaagtgtgtcttcggggtaccccgaggcatgctcttagggttcatcgtctccgagcggggcatcgaagccaacccggagaagatcgcaaccatcgtcagcatggggcccatcaaggacttgaaaggcgtgcagagggtcatgggatgtcttgcggctctgagccgcttcatctcacgcctcggcgaaagaggtctgcctctgtaccgcctcctaaggaaggtcgagtgcttcacttggacccctgaggccgaggaagccctcgggaacctgaaggcgcttctcacgaatgcgcctatcttggtgcccccagccgccggagaagccctcttgatctacgtcgccgcgaccactcaggtggttagcgccgcgattgtggtcgagaggcaagaagaggggcatgcattgcccgttcagaggccagtctacttcatcagcgaggtactgtccgaaaccaagatccgctacccacaagttcagaagctgctgtacgcggtgatcctgacgcggcggaagctgcgacactacttcgagtctcatccggtaactgtggtgtcatccttccccatgggggagatcatccagtgccgagaggcctcgggaagaatcgcaaagtgggcggtggaaatcatgggcgaagcaatctcgttcgcccctcggaaggccatcaagtcccaggtcctggcggacttcgtggctgaatgggtcgacacccagctcccaacagctccgatccaaccggagctctggaccatgttcttcgacgggtcgctgatgaagacaggagccggcgtaggcgtactcttcatctcgcccctcgggaagcacctacgctacgtgctacgcctccatttcccggcgtccaacaatgtggctgagtacgaggctctggtcaacgggttgcggattgccatcgagctaggggtccgacgcctcgacgctcgcggtgactcgcagctcgtcatcgaccaagtcatgaagaactcccactgccgtgacccgaagatggaggcctacttcgatgaggttcggcgcctggaagacaagttctacgggctcgagcgcaaccacatcgctcggcgctacaacgagactacggacgagctggctaaaatagcctcggggcgaacaacggttcccccggacgtcttctcccgagatctgcatcaaccctccgtcaagatcgacgacacgcccgagcctgaggcaccctcggcccagcccgagaaggcacccgggggctacacgcacctgttggtcgccatcgacaaattctccaagtggatcgaggtccgacccctaaacagcatcaggtccgagcaggcggtggcgctcttcaccaacaccatccatcgttttggggtcccgaattccatcatcaccgacaacggcacccagttcaccggcagaaagttcctggacttctgcgagaatcaccacatccaggtggactgggccgccgtggctcaccccatgacgaatgggcaagtagagcgtgccaacagcatgattctgcaaggactcaagcctcggatctacaacgacctcaacaagttcggcaagcgatggatgaaggaactcccctcggtggtctggagtctgaggacaacaccgagccgagccacgggcttcacgccgttctttctagtctatggggccaaggccatcttgcccacggacttagaatacggttccccgaggacgagggcctacaccgaccaaagcaaccaagctaattga

SEQ ID NO: 30429 - DNA, 854 bp, Zea mays
  Peptide Sequence Number=SeqID_72208
ggaagatcgaggttcgacaggctcgacgatacgcgaagctatcaccagtgagtagcagatgtgggcaagcagagcaggctggatgccgggcgtcacgagagcacgcggcgaaatccgagctggccgagcgcatggcagggagctgggggataatcgtggcgcgagcaggaaccggctacggcaagcatagggacacggatgcgcgcggccaacaggagagctcgagggagctcgactgcgcggtgaccagggagcgattgaccggacgagcaaggagccgaggcagggagggagacgcgctggagaagacgggagggcgccgaaggagctgcacagcagggatcgagctccgcggagcacgagcgagcagagagagacgcgtagagggagacgcgcacgcatggatccggagccggccacggcgagtaggggagagagccaagggatgctcgcgcctagaggctgacgaccatggatccagagtaccccgcgaccactatgggagacgagcagaaaaacttgcgcgggctggaagagaaagggagggcgcggtcatggtagagctgggcatgcggcggccatgggaaaccaggagaaggagaccgagcgagctggagaccgggagggcgctcgaccatggacaggggctcgcggcgctggacaccaggaagagcgcccgcaggaagaagaagagggagatgggcatgggcgtggccgacgagcagaggggagagggaggggtttggcacgggagaggagcaaacaccagggagctcagcgtgcaagagaggcaagtcaggcgcgcgcgctacgcagaggagggagaggaaggagatgggcgcgcggtgtgctag

SEQ ID NO: 30430 - DNA, 141 bp, Zea mays
  Peptide Sequence Number=SeqID_72209
atggagcagagaagcatgaaggcaaaggggcgcaaccgattgggacagaatgcgaaaagggaaacccttccgcatgcccctgaattgtcgcaggaaatcccattcgacgggcaccaaggacctaggcaacccagtctgtga

SEQ ID NO: 30431 - DNA, 384 bp, Zea mays
  Peptide Sequence Number=SeqID_72210
atggcgcacagaggcgcatcagtccttcggtcccgccgccaccacgaccatctgggggtgatcacccccagggacaccagtagtagcaacagcaacagcagcagcagccacaatagcaagagcgacgatcgtcatgcttctagggtcactggaaggtccagggtcccaaggcttcttccccctctgctcctaaggtcacgcctcctccgccagataccaggcccaccgacgggtctggctctcggcagcaagaatctgctgagggtggtgctggcggtccgcccccggctgctgccaagacagctccagcggcttcccataccccagccggggaaccggcggcagcggcaacagcgtcggttggcatctcgccggtggaggaag

SEQ ID NO: 30432 - DNA, 825 bp, Zea mays
  Peptide Sequence Number=SeqID_72211
atgagcatcgcctccgactatgccatccagctcccaatgcacgttcgatcttccatcaacatgctaccaacagttcatactgaaatcattctcacatccagacagagtataagagcaatgaaaaccaaggatctattcatgctaataaaaagaaatgacgaaagaatcctagaagaacattaccacgacctgtcccagttcgagatcgtcgcgcacaggacgtgccgtgtcaacaccgtcccatccaggcttgatcgtgcctactgcgacgacggcgcctccggtattatctcatcacccaaccccatcttggtccacgcgtcactgacccgtacacgtgcggacgtggggacgacggctggacgcattttccacctaaaaccaggaccagcacggccgctcggcagtggcggggaggaaaccaggaaatctccatctggccatctcccgcccccctgctcacgcatgctcctcaccatctttagcctgggtcccacctcccgtgccctcctctgggccgctcctcccagcttcctcgttccaccgaccagatccaccctactcaggccagcaatgtcggcgctaccgctgacgtcgggggagccgttccgtgtgttcgtggggtacacccgcgggagcacgaggcgtacgaggtgggccgccacagcctgcgtcctctctcgtggatcccgctggacgtgcgccccatccgacaggatgcgtgatttgggaaataccttccctggcgtggaggttatttgggaaggactgacctgtcgcgactgccatgaaggggagcggggcacgactgccatggatggaagt

SEQ ID NO: 30433 - DNA, 432 bp, Zea mays
  Peptide Sequence Number=SeqID_72212
atgaacgtatgtgagctcacccttgctatactcacattccctccaggtcaaggacagcaaatgctactcgggtgtctacatcgttcgtgctcaaggaaaatgatgcacagcaaaaactacgactggatcccaactatctccatcataactcaggcgacagtggtctccccaaacgtgggtcgcgacatcgttgtaaccatcatcaacatagtggaaggctttatctatcacattgatatatctgagcaaactgaggaaggagtcgaaatagactccaatccaagtggagacgaaagcgacgatgaggagaaacacgatgatagtgaggatgaatctacatcatcacaaggtacattttcccgtatttcttccgctaatgatgattacagggaaaatgagacaaaggatgtgggagaagaagaaattcgctag

SEQ ID NO: 30434 - DNA, 3642 bp, Zea mays
  Peptide Sequence Number=SeqID_72213
atgtgttctcgcggcagtcgtcccggttccaggacgaggaggaggacgacgaggaggcgctgcggtgggcggcgctggagcggctgcccacgtacgacccgggtgcggcgcggcatcctggcgctgcacgacgccggcggcgagaaggtggaggtggacgtggggcggctgggcgcccgcgagtcccgcgccctcgtcgagcgcctcgtccgcgccgccgacgacgaccacgagcgcttcctgctcaagctcaaggagcgcatggaccgcgtcggcatcgactacccgaccatcgaggtgcgctacgagaacctgcacgtcgaggcgcaggtgcacgtcggcgaccgggggctccccacgctcatcaactccgtcaccaacaccatcgagtccatcgggaacgcgctccacgtcttgcccagcaggaagcagccgatgaccgtcctccacgacgtgagcgggatcgtgaagccccggaggatgactctgctgctcgggccccccggctcaggcaagaccaccttgctcctggcgctggcggggaagctcgacaaggacctcagggtctcggggaaggtcacctacaacgggcacgggatgaacgagttcgtccccgagaggacggcggcctacatcagccagcacgatctccacatcggggagatgactgtcagggagaccttggccttctcggcgcggtgccaaggtgttggcaccagatatgaaatgctgaccgagttgtcgaggagggagaaggcagcaaacatcaagccagatcatgatattgatatctatatgaaggcctcagctatgggtggacaagaatccagtattgttacagactacatactgaagatattaggcttagaggtctgtgctgatacggtggtaggaaatgagatgatgaggggtatttctggtggtcaacggaagcgtgtcacaacaggtgaaatgcttgttggtccggcaagagctcttttcatggacgagatctccactggactggacagctcaaccacataccagattgtgaactcgctgaggcagaccatccacatcctcggcggaactgcagtcatttccttgctccagccagcgcctgaaacgtacaacctgttcgatgacatcatactcctatctgatgggcatgtcgtataccagggcccccgtgagcatgtcctcgagttctttgagttcatgggcttcagatgcccagccagaaagggcgttgccgactttttgcaggaagtgacatcaaggaaagaccaggggcagtattggtgtcggcaggacaggccataccgttttgtgcccgtgaagaaatttgcagatgcattcagtacattccacgtgggccggtccatacagaatgaactttcagagccgtttgacaggacccggagccaccctgctgccctggctacttcaaagtttggtgccagcaggatggaattgctcaaggccactattgatagggagcttctgctcatgaagaggaacgcatttatgtacattttcaaggctgttaaccttactgtcatgtcgtttatcgtgatgaccacatttttccgtaccaacatgaaacgagatgcgtcgtatggaagcatctacatgggggcgctcttctttgccctggacacaatcatgttcaacggtttcgctgagcttgccatgactgtcatgaaactgccggttttcttcaagcagagggatcttctcttcttcccagcgtgggcctacaccataccgtcgtggatccttcagatccccatcacgtttctggaagtcggggtttatgttttcaccacatactatgtcattggattcgatcccagcgtgatcaggttctttaagcagtatctgctgctccttgcactcaatcagatgtcgtctgcgcttttccgcttcatcgctggaataggaagagacatggttgtgtctcatacctttggccccttagcactactggcttttcaaacactgggtggctttatacttgcaagacctgatgtgaagaaatggtggatttggggttactggatttctcctctatcgtatgcacagaatgccatttcaacaaacgaatttttagggcacagctggagcaaaattgaaaatggaacaaccgtgggaattcgagttcttcgaagtcgcggtgtctttactgaagcgaagtggtactggatcgggctcggtgccttggttggatatgctctcctcttcaaccttctctacactgtagctcttgcagttttgagtccattcactgattcccacgggtcaatgtctgaagaggaattgaaagaaaagcatgccaatttaaccggtgaagtggcagagggccacaaggaaaagaaatctaggaggcaggagttggagctgtcccactcccacagcgttgggcaaaaccttgtgcatagcagtgaggattctagtcagaacaggaagggaatggcgctcccgtttccaccattgtcacttaccttcaatgacataagatactcggtagacatgccagaggcgatgaaagcgcaaggagtggcagaggatcgtttgctgcttttgaagggtgtcagtggttctttcaggccaggagtcctaactgcactgatgggtgttagtggcgctgggaagaccacccttatggatgtcttggccggcaggaaaactgggggctatatcgagggagacattaccatctcagggtacccaaagaagcaggagacgtttgcacgcatatcaggatactgtgagcaaaatgacatccattctccgcatgtaaccgtgtacgagtcactcctgttctctgcatggctgcgccttccttcagacgtcaacttagaaacaagaaagatgttcatcgaggaggtcatggatcttgtagagctcacatcactgaggggtgcactcgttgggcttcctggagtgagtggcctgtcaaccgagcaacgcaagaggctgactatcgccgtggagcttgtcgccaacccttcgatcgtcttcatggacgagccaacctccggtctcgatgctcgcgcggctgcgatcgtgatgaggaccgtaaggaacaccgtcaatactgggaggactgttgtgtgcaccattcaccagccgagcattgacatattcgaagcatttgatgaggtgaccgattcctcttgctatgatgttgctagagaagatcatcttttcctaatgaagagaggtggagaagagatatacgtcggcccagtgggccagaattcgtcaagactgatcgagtacttcgagggaatcgaaggcattagcaacatcaaggatgggtacaacccggccacgtggatgttggaagtgacctctagctctcaggaagagatcctcggggtcgatttcagtgaaatctacaggcgatcagaattgtaccaaaggaacaaggcactcatcgaggagctgagcgcgccacctccaggctctagcgacctcaacttcgccacgcagtactccagatcgttcttcacccagtgcctagcgtgcctgtggaagcagaagaagtcgtactggaggaacccgtcctacacagccgtgaggctgctgttcaccatcgtcatcgcgctcatgtttgggaccatgttctgggacctcggacgaaagacagcagtgtag

SEQ ID NO: 30435 - DNA, 312 bp, Zea mays
  Peptide Sequence Number=SeqID_72214
atggcggaggtcatgcatttgcgatggtatgtgggccgatggtggttctgtgcgctggatggcgacgagggaattgggttgcgattacttccatggcggcgaggcgtggattgcgtttggggcgcaaaggatatgggcgaggcatccgcggtgcattggaagaacgatttggcagggtggtcctgcgcgtcgtcaacgatgggattcctgctgttggattgctgcgaggcgtggatagcggcgaggggatgtgtttccttctgtggcagtgacgggatttttccttacatagccgaggcattgatcgggtga

SEQ ID NO: 30436 - DNA, 1048 bp, Zea mays
  Peptide Sequence Number=SeqID_72215
atggcgaggagggacaggaggtcaggggtgagattcatcgaggacggtagggaccggagcctcacgttcttcaagaggcggtccgggctcttcaaggcggcgtccgacctgtccaccctcaccggcgcgagggtggcggtggtgctggagtccgagagcgggaggttctcctccttcggcaccccggaggccagccccatagtggacgctttccttctcgggagcgcgccgacggaccttgacaccagcgaagcagacaaggcttccatcaccaacctgcagaacgaggtgttccagctggagaaagacaaggccatggaggacaagcggaggaaggagagcctggcgcggtccagcaggaaggtccagcaggcctcgaaggtggccaggtatgtttacggcagcgtagacgatcttgacgccaccgagctcttcgagatgtaccgtgagctatcgcgggtgcagcaagagatcagcgatcgcttgccgacgaccttgctccacgacgcgagcaaagcagacgccggtggtggccgtggccgtcttagagacccgtcgctgctgcggcccacttggtggcgtgcaagctcgcttccagttccagcaacatccatgggcggcgtcatccacgtctcctcccgctgtgctgccaaggtcatctggctccccgcttccgagctcggcgatcctcccgtcaccgctggcgccgcagaatccgtccttcttgcgacatcatcaccctctggcaccgcataccacccctcccacatcggccggcgtgcaattccaagcacccaggacgccgggcacctacggaagcccagaacccttacacctactacatccgtggggatcgacatcatcagtggtaacagctcgcacccgtcgtcactatcgcctgtcatgccgtcgtcttcaccgacgccccaccagcagccgtcgtcgttgcgagctccaccgtcagatgattcgtctcctctatctttgtcgccgcgagtttcatacccgctgcacgtagggtcgccgtaccaccaacagcttcctttga

SEQ ID NO: 30437 - DNA, 744 bp, Zea mays
  Peptide Sequence Number=SeqID_72216
gccaagagcccaaaccaacgaaagacaccggtcgtactcgatccctatgacaccgacttcaagagttaccaagacctttgtacggggcggcgccctgatgtgccttgccaaaggagccctcgggatactacagacgatcgcgcgttcattggggcaggtgcggcgacctttggccgtcacgattaccccgggagtgcgacaaccccctgggcaaggctcatcggcccagtcggttttgggacttccgtcccggcgtccgaggtgttgggctccgattcggggtggtcgggttcgaaggcacgctcctccagattgtttggagcgcacagaacatcaagttcgactcggtgggcaccctcgacgtgcctcttgctcaaggtgggggtcaccttccacgtcatcaaggacgtatccggcctcatacacaagtacatatgcgacgcggaggacgaggctttcaagacgctcggcatgtgtgagaggaactccatgctgtcggggacgcactctgcagggcgggccctgatcgaacaggtcgagcccaaagttgggatggacaaggggaggataagtcccaccccctcgacccctatcagaatgcgcaagcgctccgccgaggacggacaggccaccacgggcgagggcctcgactggggcgtcctcttcggcttcggcccgggactcaccgtcgagaccgtcgtgctccacagcgtccccatcaccaccggagcggccaccgcctga

SEQ ID NO: 30438 - DNA, 225 bp, Zea mays
  Peptide Sequence Number=SeqID_72217
atgaaccacgctgcgtcagtaagaatcgtgctggaagctggctccgggaaacctcaccggcggcggctgccacctctgcatcagcggatcgccagcggcagcaaccacctctacaccagcagcgacaacgaccaccactccgagtggtttgccagtagcagcgtccacctcagggtgtgcgtcgttgcaaggaggtcctcgcccccgtcctcctacggggggtga

SEQ ID NO: 30439 - DNA, 795 bp, Zea mays
  Peptide Sequence Number=SeqID_72218
atggcggtgaccttctgcttaagctttcgccctgtcgtcgttcggtttccagtgactactgactacacaggcgcagacatgctggaagacggcagagctttgtcagaaaaatggaaggttacattcgttcccactaggttgttgcttgttgggccatcatttgatgtccgtgcaattggtccggcccaccgcagcatagttgacacttcgtccggcccacgaaagaacctcggttcattcacggttctgccgacaaagtttaacctggttcagaccgatggatcgggttggttcttcaagctagcagaattttaccaagacccagagttcgacatggtcggagcggcagccacccgtgatgagcaaagcaggcagcggccccgggtccgacggggcgacggctgcggcggcgtccgccgcggtgcagaagcagaagtcgctgatgtagaaggcgggcccagccgtctccagcctcgtcgacaatttctcctccctcatcaacatcgctcgagtacatccgtgcgccatccacttgaatctggcagcctgaagcactccagactaatcctaactcgaaatgccatggttaggtcaacgatccgccagtgcacaactcacaggaggcctttcagatggagatgcgcgctgtccgcatgggggattgaagtgctgggtcagcaagctaagggaactgagagaatgctggaaaggattgggcaggaggtagcagcgagcctcaaggagctagaggcacactactactcatatgttgtgcgatcaccatcctatgattga

SEQ ID NO: 30440 - DNA, 533 bp, Zea mays
  Peptide Sequence Number=SeqID_72219
gttccgtcacgctcgaccctaggctcagtgccacggggttcgacccggggcagttccttttcgggttgacccgcgacggctacgtcttcacgaggcgcaccttccttggacgtggcctacctctatttattgtggtgccgagggatatcgaggctgaggtggagctgctctattcttggcttgttaggtccaacagttgcatgacaggggaccgtctaggggcttgcctaatctttttggtcttactctcccacgcgcatcccctttctgggtatgaggggaggatccatgtgcggggtctgctgcggaccgtcctcatactcccaggcaccgactcatatagttgtcgatcccattcaaccaggaccaatgactcactgcctcttttcatgataaactatgagtacgagtttcccaggactcaaacacgagctggtgacacccttaatgcttcacgcgtcaaggcgcgctcctcgcgcttcaacctggcttttgggtcgccgaggtgggacctaggccacgcttccttttag

SEQ ID NO: 30441 - DNA, 417 bp, Zea mays
  Peptide Sequence Number=SeqID_72220
atgaccgtattgaagctcactcttgctataatcacatcaggtcaagagcaagaaccgtcggagaagtatcatgaggatgagtttagagagttgtcaacaactagttccaaagtacagctaacatggacagttggcgcgctaggtagcggacttgcgcgttccgcgacgagaccatccaaactccagatgactagcaacaacagcggcatggtctggactactgggatggacattcgcttcgagagtctggatttcatcgacaacaaagaaggagagatgatgagggcttcagaagacccgtctcccttggcaagcgacttgctcgacaagccagaagcctcggcgacctccgacttgacccgccgctggactaccatgggtcgcagggctcgccacgacccaatcgtactgaggtag

SEQ ID NO: 30442 - DNA, 438 bp, Zea mays
  Peptide Sequence Number=SeqID_72221
atggcctctagtgccactccctatcttggtgaattggtacccatcatgatgtactctatctcatcggtggacatggcaacactatttttcttggggaaattccctgacgcaaaggtttcgacggaacagttattctaccaaactaatgctagatttatgtacgcttacaattcaggagtgctgagttcgcaggacagagctggtgctaataggattgaagaaaacgccttggtttggacaattgaacagaagagttcagagtttactctttttgacctttctgagttactggaggccacaaaatcctttgcagaagaaaatagacttggacagggaggtttcggccctgtgtacaaggaaaatggaacagttacaggattattaagtgccttgcaagttacaaccatcatcagagaacaccatgacaatagacattag

SEQ ID NO: 30443 - DNA, 1431 bp, Zea mays
  Peptide Sequence Number=SeqID_72222
atggcagttacagctctactgaactacaacatcgacaatgaactggacatggcagtgagtagcatgctaaatgggaagcatccgctagcagcacttaacagaatgacaaataacatgacatcattcctgaagcattcgaacatacttgacaaaataccagaggatacacttaaatggaaaatgaagctgatcaaacgggctgcttcttacgccaattatcgtctacaatcggttcaggccgatgtgctactgttagtcaggttacttccaagcaaagacgaagctgacaggctgcagaggttgttaccaaagtgtaaaatctacttctttgagaagcacgggcacagcttactactggaatacggtgttcatgttgcaagtatcatcaagtgcactgacctctaccgccactcgaggcagcaccaccgggtgttcgactacatccctccatctgcaactgaactaaacgaagtagacaaagctacgtgtgatctgagattcaggacttgcccagcgatgtactccactctggaggacggcacagtggtgaggggcctcgctggagtgccccaggacggcccagtgctgctggtcggcaaccacatgcttctggggatcgagctcatctcgctggcggcggagttcctgcggctgaagcgggtggtggtgcgcggcatcgcgcacccgctcctgttcccaaacaagaagagagcgtggtctgagggccatgacttcttcgacttcctcaacctgtggggcggcgtgcccatgaggtacaagtccatctacgacctgctgcgcgccggcgagttcgtgctcctctaccccggcggccaccgggaggcgctgcatttgcaaggtctttctccttcatgccagcaatgggcaactatatatccaattccaagcttactcttgtgggtacttgacgcgtatgagattgatttgcagggcgaagagcacaggctgttctggccaacccagacggaatttgttaggctggcagcacagtttaacgcaacgattgtgcctttcggagtcgtcggggaggatgatctgttagaactgctctgtactttcgacgacatcaggaatgcacccttcggcaaggaaatgatccaagcgtacagcaaccatctgaagctaagggacgttgaccatgaggtgatcttcccgggaatgtatctgaaaatgccgggccggttctactaccaattcgggaagccgattccgactagagggaggcaggacgtcctgaccgataagcatgctgcgcatcatctctacatgcatgttaaatcggaggtggagcgtatcatctcctacttgctggagaagagggtggaggacagatacaggaacctcatcccaagaatgttgtaccaggctgctcggggaccgacgtgtgaagtcccagcgtttgatccctaa

SEQ ID NO: 30444 - DNA, 1254 bp, Zea mays
  Peptide Sequence Number=SeqID_72223
atgcgctttccatcaggcatgagaaacttcggtaattcctttggttcatggaattcaggcatgggtggaaagatggatgccaatttgatgccctcacttctggaggaattcaagagcaacaaaagtaaatcatatgagctctccgaaatagctggccatgttgttgagtttagtgccgatcaatatgggagccggtttatacaacagaagctagaaacagccagtactgaagaaaaggacatggttttttcagaaatcatgcctcaagctctcacattgatgactgatgtatttggaaattatgttgtccaaaagttttttgagcatggaagcactgcccagataaaggaattggccggtcagcttattggacgtgtccttgctcttagtcttcagatgtatgggtgccgggttatacagaaggctatagaagttgttgatttggagctgcagactaaaatggttgcggagctggagggccatgtcatgcgctgtgtgcgtgatcaaaatgggaaccatgttatacagaaatgtatagagtgcattcctcagcatgctattgagtttattatctcgacattctatggccaagttgtaatgctatccactcatccatatggttgtcgagttattcagagggttctagagcattgtgatgatcctaaaacacagcaaataatgatggatgagattctccagtctgtttgcttgctggctcaggaccagtatggcaactatgttgttcagcatgttctggaacatggcaaaccccatgagagatcagctattattgagaagctaattggccaaattgtgcaaatgagccagcaaaaatttgcctcaaatgtcatcgagaagtgcttagtctttggaaatcctgtagaacgtcaggttctgattggtgagatgcttggatccactagcgaaagcgaacctcttgaggtaatgatgaaagaccagtttggaaactatgtggtgcagaaggtgttagaaacttgtgacgatcagcagagagagatgatcctaacaaggataaagacacacctgaacacactcaagaagtacacatatgggaagcacatagtagcacgcgtagagaagcttgttgctgctggaggtatcttcattcacttatgtctccaggacttgacattatctgtgtatcatgttggtctagggactaataatgatgtatatgttgtcgtgcccacagagaagcgccttgggcttcaaccagcatgcaccgccgcctga

SEQ ID NO: 30445 - DNA, 249 bp, Zea mays
  Peptide Sequence Number=SeqID_72224
atggtgatgcgagttgaaacaagtcgtttatcctggttcgggctaggagaggtcctacttccagcaaaaagggatatcgagggcagagccaagctcgggcaaggcagaagtctgcccgaggtcatgaccgagccttccctagaatttgacaacgtgcgccatagtcaatggagaggcttcttgtatcccccatgggagcaggtggccgaggccaggcttgggcaagccggagtttgtactcgagggtga

SEQ ID NO: 30446 - DNA, 774 bp, Zea mays
  Peptide Sequence Number=SeqID_72225
atgccgtcgccgccggaggacgagtcgggagacccgggcctcgcggagtgcctgcgcctgctggaggccgtgccggccgccgcggcctcctgcccggccttccgccgccactggccgtccatctccgcctcgctcgccgcgctgtcggactctctgaccagccacgccgtcccgcccgcgtcgccgctgctcgcgccgctcgccgcggcgctgcgcgcgctgctgtccgtgtccgccgcgggggacgcgcccaggctcggccacctccacaccatctcgctgctttcctccaccgccgccacgctctcccagctggccgccgacgcgcgcctcctcgccgcgcccgccacctccggcgccgaccacggttccgccgcggacgcgctcgtctcccggctccgcctggggtccgcggcgtcccgcgccgccgcgctggacgagctggcgagcgccgcgccgtccctgccggagccctccgcggccgcggccgtgtccgcggtggcggagctgctcgactcgggcggcggcggcggcggaggggacctgcgcgagcgggccgtggcggcgctggccgcgctggcgtgctccgacgccgcgcgcccggccctggcgcaggaggccggtgccgtggtgccgcacctgtgccgcgcgctggagtccggctccagatccggcgcggagcacacgtgcgcggcgctgctcccgctgactgcggcgtcgcgagactctgacgcggcggtggacgcgcgcgggggctttgcttttctcttataa

SEQ ID NO: 30447 - DNA, 1776 bp, Zea mays
  Peptide Sequence Number=SeqID_72226
atggcctcggatgtcctctccactgacgagctcctccagtgggtgaagggggcagtggggaaggcacactacaccacccccgtctcgatgcatcccgaccaaggctacatatccctaccccgaggcttggctttggtccaagccggcctcggcgggcccatccggccatgcggatgcgcctgcgcaaggggcgacagcgtccctgtccgatgcgccgatgctcctacgcaaggggcgacagtgtccctgtccgtggcacgggtgtcagccgagcagagccatgtccctgcagttgtagaggaggcggtggccatggaggagatcgccgttgcccaccccaggtgcccaccatggcgctcgtggagaagagggtcgtcgtcccgctctaggtgcccgcaacggggccgagggccgaggctagcggtcgtgccccggtctggcacaaagggtagggcccatgacccgacctttagtgccactaaggcggtgaagtccggtgtggagacgtcggccggggccgcggcccgctcacacgcgtggctcgacgctggccaagaggccatccagcgaggcgtcgaggtggcccaacttgccctcggcaggcaggctgggcaggagccccgaggtggcagtgtcgaggaggctggcccctcaaagcggcccgaggaactggctagggatcaagccgtgtctcctctcgtcgccgaggtgagcagcgacattattcgtgccaggccagacccctcggcctggggggggttgatggcgaagactgcggccaagtccatcttcatccgtcatgagcgcgacctgaaggacgaggttgcagttgtgcgtgcgaaggtggcgccactagaggaggaggtgcggcagctgagggtagacctcctagcgatgaccgacgaacaagacgagtatcggcaccaagccaccgaggcctccacccaagcctactccctcgcaagggatctggaggccgagcaatctgatgtccaaggcctaaaaggccaaatgggagattttggccaaagccttggagccagggatgtccccttgggtgagtccttgtggagccacatgcaagccctgagtggctacatgcggagcgaactcctcaaggtcatccaccgtggggtgaagcgggtgttggtcgtagtcgtctcccactacgagatcaatctcgagcggaggctcaccgatgttgtcgaggggccggggtcggcgctggcgcacttcttcaaggaggaggtggttccaccagtgtcgccctctcctaccgggtcctactccaccgtgacgcctcctgatggcaccgaggatgatgcctcgcctcccccagaagtaaggctcaggcatggtgcggagcaagatcgttgttgctgtgaggttttgactagcccagtgaaaggccaagggtgcttcggtcttggcatcttccataaagagacggtgtacgtcgcgtgccttggcgcgtgcgccctcgtcaaggaccttgtcggctgcttccttctcgaggacctaccggagctgttgcggtcattgttgctcttctccaagcttagcatgcaactcgtgaagttgttcgagttatccgagctgtcggagagtagctcgtcgcacgcaaacaggaactacggcatggactcggggtcgcaaagcccggagatgtccatgccaatgcccggaccatcttcctccttggagttgagacatccagaggggaaagaaagaccagcatataggttggcgagagagctggtgtcaaaacttggctaa

SEQ ID NO: 30448 - DNA, 981 bp, Zea mays
  Peptide Sequence Number=SeqID_72227
atgggcgtgtctgacctctgcgcgcgctggcgcgcattaattgcgcctgcagggactaggtgtaaacctaattccctttcactttcaaccaattcctccgaagatttttcagactaccttgcttacacccgtctaaagggattgttcttgagcaaggctttgaagaacaagagaaatgttgagggcaaagccacccaaagggaaatagttaagctgaggttcgaggtttttgagcttcggtttgattgcggagggaaggagaaatcatttaaaatcctagaaaaagattttattgaaagtcgaatcgaagttcgaactatctctaaagagagtaacaaagttaaggaaacaatggtaaagaaaatatcagaactcaaagcttcagatgatgagaaggataagcgcgtcgcactactcaaagctgagctaaagcaagcaaagaaagagtatgagactgaaactactagattaaggcaagtatccgtcgaaacgactgttaatcttagggctgcccaagtgaagatagaagaccttaatgatgaaataaatcaaacgaggcggcttaatgaaaattatcgaattctgatgaccaactgctatactctaggcaataggtgttgtaacgagctgatgaagaccttctcctccaccggagccaaatctcgagagaaaaattttacgggtggtgacttggaggggatgatgcgaggtggaaaggaaatcagcattgatgaatcaaggaagaatatggagaaggcccaacaagcagctgaaaaagctatagacattagaaataatttgcaaggcaagaaagccgaagaagtttctactttacaggtgatcattgaagtaaagcaaactgaagccaaagctaaggatgctgctattgaagccgaagcggtagctgccagggctgcaaagaaggccacaaatgatgttgttcttaaaatctgtgagcagatctatgatgagatgatgtag

SEQ ID NO: 30449 - DNA, 576 bp, Zea mays
  Peptide Sequence Number=SeqID_72228
atgaggtccgtggtcgccacggtgagcggttaccacggcgacgagcggcataggcttgtaaacctcattgcggagaccggtgctagctacgtaggatcaatgagcagatccatcacccacctggtgtgctggaggctcgaggggaagaagtacgacatcgcgaggaggctggggacacgcgttgtgagccactggtggttcacggagtgtctcagggaggggaggcgcctcccagaggacccgtactttatggtaagaaaaaaacatttctgcctggtacacagtggtgaagaagcagggccagtcccagagctgccttctcgttcccgtaaacaagtcaagaaaaatgccatcatggaggacagagttttccaagagttacctgatgatttctgggacactcctcgagctagagccagctataaagttaagcttgatgattctgattctgattttgagtctgccctgctagaacaaacccatgatgttgtattgtctaatccagtgtgcaattcatcatgtttcttatatcttgatgattctgattttgattttaagtctaccctgcgagaataa

SEQ ID NO: 30450 - DNA, 2238 bp, Zea mays
  Peptide Sequence Number=SeqID_72229
atggacgccgacggcaagaaagattttagcacggcgatcctagagcgcaagaaggcgccgaaccgcctcctggcggacgacggcgagggggaggtggccatagacaactcaatggtggcgctcagccccgccaccgcgttccagctcgagatcttcacgggggacctggtgctgctccgcggcaagcgccgccgggagaccgtctgctacgcggtgttcgacgcctcctgtcccgacggcagggtgcgcctcaaccgcgctgtgcgcggcaacatccgcgtccacctcggggacatcgtctctatcaaccgtatcgacgaggtcccgaccggcgcgcgcgtccagatcacgccgttcgatgacactgtcaacggcatctccggcaacctcttcgacgtctacctaaagccctacttcggcaacgacgcgctgcggccgttatgcaagggcgaccgcttcatcgtgcacggcaacatgcacgccgtcgagttcaaggtcgtcgacgcggaacccgccgaccgcgtcgtcgtccggccggagacggcaatctactgcagcgaccagccagtcaagcgggaggaagaggagcggctcgacggccctggctacgacgacgtgggcggcgtccgcaagcagctggcccagatccgcgagctggtcgagctgccactgcgccaccccaagctgttccagacgctcggcgtcaagccgcccaaagggatcctgctttacggcccgcccggcaccggcaagacgcttctggcgcgcgccatcgcgtcggagtccggcgcacacttcgtggttgtcaacggcccagagattatgtccatgattgccggccagagcgaggctaacctgcgcaaggttttcgaggacgccgaaaagttcgcgccttccgtcatcttcatggacgagatcgacgccatcgcccccaaccgcgacaagacgcacggcgaggtggagcgccgcgtggtctcgcagcttctcacgctcatggacggcctccggccgcgcgcgcaggtcgtggtgatcggtgcaaccaaccgccccaacagcctggacccggcgctccggcgctttggccgttttgaccgggagcttgacatcggcgtgcccgacgaggtcggccgcctcgagatcctccgcatccacaccaaggacatgccgctagccgaggacgtcgacctcgagcgcatcggcaaggacactcacggcttcgtcggcgccgacctcgcggcgctctgctccgaggcggccctgcagttgatccgcgagaagatggacgtcatcgacgtggaagaagacactatcgacgtggacgtgctggactcgctgtgcgtctgcaacgagcacctcaagcacgccatggaggtgaccaagccctcggcgctgcgcgagagggggctggtggaggtgcccaaggtatcgtgggacgacatcggcggcctgcagaacgtcaagctggagctccaagagacggtgcagtacccggtggagcacccagagatgttcgagatgtttggcatgtcgccgtcgcgcggcgtgctcttctacggccccccaggctgcggcaagacgatgctggccaaggccatcgctaaggagtgtaaggctaacttcatcagcgtcaaaggccccgaactgctgaccatgtggtacggcgagagcgagtccaacgtccgtgacctgtttgacaaggcgcggtcggcggctccgtgcatcctcttctttgacgagctggactcgatcgccgtgaagcgcggcaacagcgtgggcgacgtgggcggcacgtccgaccgcgtgctgaaccagctgctaacggagatggatggcatcaacgcgaagaagacggtgttcgtaatcggcgccaccaaccggcctgacattatcgacccggcaatgctccggccggggaggctagaccagctcatctatatcccgctgcctgacgagccctcgcggctgcagatcttcaagtcgtgcctgcggcggtccccagtttcccgccacgtccacctgccagcgctggcgcgcatcacggccgggttcagcggcgccgacatcacggagatttgccagcgcgcgtgcaagctggcggtgcgcgacgtgatccagtggagcttgaagcgactcaagggaggaggcttcgaggacgagaccatcattgctgccccgatggggacgcagccgctcacgatcacggagatagaggaggaggacgacagctcgctctactga

SEQ ID NO: 30451 - DNA, 951 bp, Zea mays
  Peptide Sequence Number=SeqID_72230
atggcacctgtagatctaacccccaagcagcccaggaaggcctacggcggcgacggcggcgcctactacgagtggagccccgccgacctgcccatgctcggcgtcgcctccatcggcgcagccaagctctcgctcgccgccggcgggctcgcgctccccagctactccgactcagccaaggtcgcctacgtcctccaaggcacgggcacctgcggcatcgtcctcccagaggcgacgaaggagaaggtggtggccgtgaaggagggcgacgcgctggcgctgcccttcggcgtggtgacgtggtggcacaacggccccgccgcgccgaccccgctcacggcggacgcggcggcgctggtgtcgagccagccggcctcgggcatcgtccgggcgtcctcgtccccgctgccggcgccgtcgccgcgggaccgcgagggggtggcgctcaactgcctggaggcgccgctggacgtggacatcccgggcgggggccgcgtcgtggtgctcaacacggccaacctgccgctggtcaaggaggtcgggctgggcgccgacctggtccgcatcgacgcccactccatgtgctccccgggcttctcgtgcgactcggcgtaccaggtcacctacatcgtccgcggcagcggccgcgtccaggtggtcgggcccgacggggtgcgcgtcctggagacgcgcgtcgagggcggcttcctcttcatcgtgccccgcttccacgtcgtctccaagatcgccgacgcgtccggcatggagtggttctccatcatcaccacccccaacccgatcttcagccacctggccgggaagacgtcggtgtggaaggccatctcggcggaggtgctgcaggcgtcgttcaacaccacgccggagatggagaagctgttccggtccaagaggctcgactcggagatcttcttcgctcccccatccaactga

SEQ ID NO: 30452 - DNA, 312 bp, Zea mays
  Peptide Sequence Number=SeqID_72231
atggcgacccccgacgacggcccggcgccggccggggggcgcaagttctggcgctccgtgtcgtggtccgaggcgcgggagccgccgccgccggccccgccggacgtcgcgggcgggcagtcccgccgcggcttgccgccgccgccgctcaccccgcggtcgatgagctccaaggcgcggtcgtgcctcccgccgctgcagccgctcgccatcacccgccgcagcctggacgagtttcccaaggcggggtccgacgacgttggcgagtggcgacccacacgccgcgcctccagggcgggcggcggcggggcg

SEQ ID NO: 30453 - DNA, 252 bp, Zea mays
  Peptide Sequence Number=SeqID_72232
atggccatggagcttcctctcttcctcggggacggcccggacgccgccctcttctcctccctctggtcctccttccccgacgacctgcagccgccgccgcaacaagagtcctgcacggacgtgatgtgtcgacgtcggtgcggctgcggcatggccgccgcagacctccttgcaccgccccacgtcattgcgtctcgagttctcgactcgtcacattcaccacaagcagataccgtggtcaagccgggttag

SEQ ID NO: 30454 - DNA, 771 bp, Zea mays
  Peptide Sequence Number=SeqID_72233
atggcagaagcaataatccttgctctgagaaagattggtagcgctttagcagatgaaactgccaagaaaatgctggccaaattgtctgaaaaggttaacaatctgagggatctgaatgataagatcgagtcaataagaatgcaactgacagccatgaacaatgttatatgtaagattggcacaatatacctcactgatgaagtcgtcaggggatggattggggaagtgcgcaaggtggcctaccatgttgaggatgtaatggacatgtactcctatcacacacttcaaatggaggaagaatggttcctgaagaaacagcgttcgcacgataactacccactactttttaaagatgaagatcttgtggggattgaagataacaggagaaggctcaccgaatggctatattctgatgagcttgacagcacagtgataacagtatcaggcatgggtggacttggaaaaactacccttgtaacaaatgtttacgagcgtgaaaaaaccaatttttctgctacaacatggatggtcgtgtcccagacctacactatagaagccctgcttaggaagttactcatgaaggttggtcgtgaagagcaggtgtcacctaacattgacaaattggatgtccatgatttgaaagaaaacataaagcaaaagctcgataatcgcaaatgtttgattgtattggacgatgtatgggaccaggaagtgtaccttcaaatgtctgatgcattccaaaatcttgcaatgacaagctgctggagatag

SEQ ID NO: 30455 - DNA, 444 bp, Zea mays
  Peptide Sequence Number=SeqID_72234
atggctcgaacgcctgacacggcgtgtccctttgttcacctcgtcctattgctgggcgccatctcgcctccctcgccgcgttgctgtgcgtgcctctaccgtggcgacgtgcccaagcacgtgaccgaggccaacctgctcgtcttgttctgcgaggtcgccactgtcgaggaggtcatcatcatcaaggacaaggccaccaaggtctctcaaggttggccgttctgggagatatggacaccttggtttggcagtgaacttgaccacttacaaagattgtttcaacttagagaggagaagaatgtggagaaagacatcagggtggctgccaagcgcaatgacatgggatctgcaaagttgaggaaactatggtctgattggcagcctgtgcctcggatgccactagaggctgctccagatttgaattcttgtttactacattag

SEQ ID NO: 30456 - DNA, 204 bp, Zea mays
  Peptide Sequence Number=SeqID_72235
atggaaggaggcaagggcgactggggttttatcgccctacgtggtcaaacggttcacgcggtcacgcccatgccgagaagctcggcggcagctgcgcccaaccgtgcacgagtgaaggtcgaggaaatagctgacagcaaggccccacccattagtgagaatgagaggcaggtgtggtaccggatgacagtaggtcccacgtga

SEQ ID NO: 30457 - DNA, 354 bp, Zea mays
  Peptide Sequence Number=SeqID_72236
atgacgccttcgtcgtccagggtccagcttcgccgactagtcagggaggatggggagcgcttgagggagtcggttggtgggcgcatctggcacaagggcaatcggtgcgccgataattggtcatcgatgtcgtggtaccgcggtggagtcgccaggcaccgtggccagcacctatggatctcgtcgcagggattttgtgcgggccgtgcgctctcaccggcgttgccgctctgccataggtgtgggaccactgtcgttggacaaatcgggttggggtatcatcccagtgatttcggtgtcgtatgcatcttctttgtttaccaagaattgtcggaattagtgatctttgcgtag

SEQ ID NO: 30458 - DNA, 459 bp, Zea mays
  Peptide Sequence Number=SeqID_72237
atggctcccacggccagccgccaacccacccaggccacggccgagcagggcgccaaagcacctaggccggccgagcggcggccaaacagctccccaggtgctaattccttatgccgaatgcctgcaggttctgcagaacagaggattgtactttacttggagctttatgcaagctgtgtggagtacatcacgccgctaagagacagcatgtcatcagtgtttccctcagcacatttagcttttgccagcatcgacctgaatgcacacactgtctttgcgatcacaacggccttggcaattctccaaacagtctgtctcaggaacctcagtctcctctcgtatctttctggctctgatactcccatgtgcgtgctacctctccatcaagaagggcgcagtgccattgtgggaggtaaacaacacttccagaatcccaaccccgaaatagctggacactga

SEQ ID NO: 30459 - DNA, 507 bp, Zea mays
  Peptide Sequence Number=SeqID_72238
atgaccaagcagaggaccgagcaggggatagcggctgtcggaccggcgtgtctagcccgaggaagacgacggaaccaccccgagcgagagactagagccgacggcgttgggcatatgagccagggagagcgcgcaccacgcgtggctagaggaggaccaactgacagtcggcgcgagctcaatggcgcggacagagaggaactcggcgtactggagctggaggccaagcccgacgagatggggcgcgcgtttcagggcgggacttcgggtggcggtgcgttgggagatggcctaagcgagcttgagcaggctgggagtttgaaggcgagctccaccaccaggggtaaagaaaggggcggccatcaggggcgcgagcacaggaagcaagagcgagctccatggctggaagctgagagcgagcccgagcagccagggaaggagctgcgcacgaccaacagtgaggaaggatgcccggccaccaggacgtggcggtggtcgaccggatga

SEQ ID NO: 30460 - DNA, 303 bp, Zea mays
  Peptide Sequence Number=SeqID_72239
atggctgagtctgctctagggctctttgtcgtgcagggaacagttaaaggagtggccttctacgggattcgcggggggcaggcggccgaggccgagctcggggttgtcctcctgcccgagacgggctcgggcgaggcggaaatggttgttccgtggagaggggacctcgggcgggatgaagattttcctgagcgctgcacttgcctgagggtacactcgggcgaggcggagtttcaagtgccccaagtgggggctctagcgaatcatggctcatactttcttgacctcggggaatgtgtctga

SEQ ID NO: 30461 - DNA, 1068 bp, Zea mays
  Peptide Sequence Number=SeqID_72240
atgaagcttttatctggacgaagaggagttgctatactgtatgcttacatgctactgggtttgggctttcttagagctatatcccctgacttcggtcatctctcaggccaagaacaagaacttgaaggaacattcaggttcatgcactcgagactgcggacacatgctgaatcaattgctttctttggtggtggttcaagagaaaaagcgatggttgaggctaaattcgtcaagttaattaaccactcaaagattcttttgaggaaacagtggctttatggagagttggcacatgctctgcggttcttggcttcagtggtgtcacagagcttcatagccttcggcgacattcttgagttacataagaagttccttgaactttctggtggcattaaccggatctttgagcttgaggagtttacacgcttcgctcaaagaaatactgtggtgtctcccaatgccatcagtgcagcctcaaaagaaacgatttcgtttcatgaagtggacattgtaacaccatcacagaagctattggctagaaaactctcgtgcgatgtggtcccaatggtagtggaaagagttctatttttagagtgctcagggatctctggcccaccttctctgggagagttaccaagccctcagaaagggatgtttcacgtcctcagcgcccatataccagctagtgctacgagtgttgatgtcgaagagcatctgtacagacttgcaactagcatgggcataactgtgatcacttcctctcaaaggcctgctttgatacccttccatgccttggagctgaagctcattgacggcgaagggaactgggagctatgtgcgatccagcaacatcagaaaattgaatcaggtgtggatgggaaattgtgcaaggtggaagctacctttgctatgcaattggtgcctgcgttcttcgctccgttccatgcccgtacacatatgggctgctttgccaaaacagaaacagcatctgttccattcatttacaagcaagatgccaatactacacaacatctgttccattcatttagaagaaacaagaaatggtaa

SEQ ID NO: 30462 - DNA, 225 bp, Zea mays
  Peptide Sequence Number=SeqID_72241
atggtgctggaggggggcggttcacagcgaggcgactcggcggtggcgcaacactactccggcgagcaatcgcgcatgaccgagggcaatcaagggaaaatacaggcgaggctgggttgcttacctcgagagaagactccgggacctttgaacggcggtagggacacgacaagggcttgggtcgatggcgacggctctccggctgtgcgtgggaagctccggtga

SEQ ID NO: 30463 - DNA, 1023 bp, Zea mays
  Peptide Sequence Number=SeqID_72242
atggcggcgggcgcgttggaggcgaagaaaccctacctgatcgccctcgccgtgcagatcatcggcaccggcatgttcgtcatctccaaggcagccttcgacgacggcatgagcaccttcgtcttcatcttctacaggatggccctcgcctcgctcatcctcgtgcccacagccattgtgcagcagaggaacactttcagcttgaacacgtacaacctgaccctgaagctgacgtctgcgacggtggggtccgcgctggccaactccgtgcccgtcttcaccttctgcctggtgctgctgctgcggatggaggcggcgaacctgaggacggtcgccggcgtggccaaggccgccggagtcgcgctctgcgtcgccggagtgctcgtcctcgccctgtacgccgggccggcgatgagccccgtcaaccaccaccgcgccttcgccgccgccgccccgccgcgtgcctccaccagcagcagcaggatgacgtggatcacagggacgctgctcatggtgctcgccaacgtcacgtgggcgctctggatcgtcctgcagtcggcattgctcaaggagtaccccaacaggatgcttgtgacggcgacccagtgcgtgttcagcatgctgcagtcgttcgtcgtggccgtggtggcagagaggggtgacttgtccaagtggaggctccgctgtgacattaccctcgtagccgtcctttacgtgggtttcgtggtgacgggactgtcccattatctccaagcgtggtgcatggagctgaaaggcccggtgttcctggcgatgacgaacccgctctgcttcgtcttcaccatattcagctcctccttctttctgggagagatcgtgcaccttggcagcgttctgggtggagctctgcttgttgccggcctttacagcgtgcactggggaaagctcaaggaagaagacatggcatctgatcaggaaaagaccaacaagcaggaagaagaagcagcagcagcaggggcatcctcagcgctccaacaaccgtga

SEQ ID NO: 30464 - DNA, 456 bp, Zea mays
  Peptide Sequence Number=SeqID_72243
atgcaggtggcatgcaaccgcaccgcgagagcgcaccccttcggcttcgtcgcatccagcatggaggcccaggcccacacgtcatgtaaccggcgcgccggttactacgtgcaaggaaccgcactgccacttgcgccaatgtcgcgcctcctcgactgcggaaccggtgccgcgactcgaggcaaccccgcacatggcccaacagtgccaatcgagcacaacaatcacggggaccgggaaaggggatatttcgaaagggatccttctctacgaaggaagcgagccccgagccctcctactgatcaggggttcgaaggctggcccctcggaagggttcgacagccgccccagagcactcgggcttcaagctcattactgatcaggggttcgaaggctggcccttcaaaagggttcgacaaccgcctcagagcactcgggctccgcgcccactactga

SEQ ID NO: 30465 - DNA, 213 bp, Zea mays
  Peptide Sequence Number=SeqID_72244
atgccgtggcacggcctcgtcaacgacatcaccgactacctctactactggaacctcgacatcgacatcacgccgtacgagcggcccgcggccgcgcctctgcctctcatgggtccttgggttcccggccaggcgtgcttcgacaatctgtttgcaaggctcaacgcaatcagcatggtgctctccagcagcacgccagcaccagcggcctag

SEQ ID NO: 30466 - DNA, 201 bp, Zea mays
  Peptide Sequence Number=SeqID_72245
atggctccgggtggtcgagcacaaagggaaggtgtccatgagcgcaccagaaagcaagcgacatctgaaggatgggcccccgcgaccgacatgggaggatccgtcgttctggaccacaactgcctcgagcgccaagtgaaaaatgttcatcctataggtaccacgccgcatgggacagagagccagaggggcacgcggtag

SEQ ID NO: 30467 - DNA, 2138 bp, Zea mays
  Peptide Sequence Number=SeqID_72246
atggccccgtctcaccaccgcctcagcctcttccttgccgtcgccgccaccattgccgcagcgctgctagcttccgtcgctgcggaaaacggcatgaacgacgttgaggcgctgatgcagctcaagaagtccttcaccaactcctcgtcgctctcgtcgtggctcattaccgataaggacgggaacaggtccccctgcgcgccggactcgcaccactggcacggcgtggtgtgctcccatggagtggtcaccggcctccgcctgaacggcctcaagctcggcggcaccatcgaagtcaactcgctcgccagcttcccgcgcctcaggtccatctccttcgccagtaacaacttctccggcccactccccgccttccaccagatcaaggcgctcaagtcgatgtacctctccaacaaccagttcaccggcagcatccccgacgacttcttcgtcaatctcagccacctcaagaagctctggctcaatgacaaccagctctccggctccattccagcttccatctcacaggccacgtccctcctcgagctccgcctcgatcgcaacgccttcacgggggagctcccctccgtgcctccgccggcgctcaagtcgcttaacgtatctgataatgaccttgagggcgtcgtcccggaggcgttccgaaagttcgacgccagcaggttcgccggcaacgagtacctctgcttcgtgccgacccgcgtgaagccgtgcaagcgcgagcagcctgtcaccagctcgtccaggcgggctatcatggtgctcgccacgttgcttctctcggccttcgtgatggtcatcgccctgcacttgtgcagcagccagcctagcagcagccgccgtgcccgcaagctcgacatggagggcctcgaggagaagtcgcccgagtacgtggccgtcaagaaggcgtcgtcgacaccgcagaagagctcctcgtggctcgggaggagggcagggtcgtcgcttggtgggcttggacacagacgggccgcttctgccgcgaaggtggacgatctaagcagcagatccgcgggggatctggtcatggtgaacgaaagcaagggcgtctttgggctcacggacctcatgaaggcggcggccgaggtgatcgggagcggtgggctcgggtcggcatacaaggcggtgatggccaacggcgtggccgtcgtggtcaagcgctcccgcgacatgaaccgggcgaccaaggacgcgttcgaatccgagatgaagcggctcggcgcgatgcggcatgccaacctgctgccgccgctggcctaccactaccgcaaggacgagaagctcctggtctacgagtacatccccaagggcagcctgctgtacgtcctccacggcgaccggggcatggactacgcggcgctggactggccgacgcggctcaaggtggccgtcggcgtcgcgcgcggcacggcgttcctccacacggcgctcgccggccacgaggcgccccacggcaacctcaagtcggccaacgtcctcctcgcgccggacttcgagccgctcctcgtcgacttcgggttctccagcctcatcagccacatgcagtccccgaactccctgttcgcgtaccgcgccccggagtgcgccgccggccaccccgtgagcgcaatggccgacgtctactgcctcggcgtcgtcctactcgagctcctcaccggcaagttcccggcgcagtacctccagaacgccaagggcggcacggacctcgtcgtgtgggccacgtcggcgatggccgacggctacgagcgggacctgttcgacccggccatcatggcggcgtggaagttcgccctgccggacatgacgcggctcatgcaggtggcggtggactgcgtcgagacggacctggagaagcggccggagatgaaagaggcgttggtgagggtggaggaggtggtggcgacggctttagccacggtgagggagaggcaacaagatggtagcggcagcgaggggacgatgagcgcgcagtcggcagactcggccagcagaagttcgcacgcctcgtacgtgcgagaggggtcgatacagcggatggccagcgtcggcgagcggtcgttgcggcgaggaagcaacgacccctcgtacgggtacggcatctc

SEQ ID NO: 30468 - DNA, 3982 bp, Zea mays
  Peptide Sequence Number=SeqID_72247
gaatcctgtttcttcccaacgtgggtgtgaccgcctgatcgattttcatggcttgcatgtgaacgaagcaatctacatcctgaaaggccaccacaccaggggctctcgcactgcgaggttgcctatcgttgtggagcagttcctcctagatgaaggtgatccagtctccacgggaagcgggactgagctcccctccactctcacccctccgccccacagcctccacctccgttctccatgcgcgcctagttcccttccctccacccatcaccccgaggacccaaagctcatgtcttcgatgacagtcacctcctcaccattacccttcctctcctcttcgtcctcgttaacgtgccatctccgccgagcgggcaccgccaccgctacggcagcgtcatctgcttctgaagacttcgactaccctctcgccgacccctctcttcgatggccccaccttcgcttcccgtacctccccgcgccgcgcttcccagccaccgtcgccgcggcacctccggtccccgccagaccaccacaggaagtggaggaccccgtggcgacttccggctcggcatcttcactcgtggagccgctggacgcgcgtgctcatcgcgggagggtgaaaaagctgagtaagctcgcgctgcggcgggcgcaggactggcgcgcgcgcgtggccgggctcgcggacgccgtcctcgagctgcctcccggggcgcctgtcgacgacgtgctcgacggcgctcgggcatcgccggacgaggtcgccttcgtcgtgcgcgccgtcggggagagctcgtggcggcgcgcgttggatgctttcgagtggctcgcccggagcagcgccccggcttcacgcgccgtcgccgtcgtcctcggcgtcctcggtcgcgcgcgccaggattcgatcgcagaggaggtcttcctccgattcgccggagagggcgccactgttcaggtgttcaacgccatgatgggcgtttatgcgcgctctggccgattcgatgacgcacggcagctgcttgacacaatgcacgaccgggggatcgatcctgacctcgtcagcttcaatactctaatcaatgccaggtccaagtctgggtgtttggctgctggcgtcgcccttgacctgctatttgaagttcgacaatctgggctaaggccagatgttatcacttacaacacgctcatcagtgcttgctcacagagttctaatctcgaagatgctgtgacagtgtttgaggacatgatagcttcggagtgccggccggatttgtggacatacaatgcaatggtgtcggtgcatggccggtgtgggaaggctgaggaggctgagcggctgtttagggagctggtggagaagggttttatgcctgatgcgatcacttacaattctcttctctatgcttttgcaaaggaagggaatgttgacaaggtggagcacacatgtgagcaattggttaaggctgggttcaagaaaaatgaaataacatacaacaccatgattcacatgtatgggaagatgggcaggcttgacttagcagtgggtctgtatgatgagatgagggctatgggctgtactccagatgctgtgacgtatacggtcatgattgattctttggggaagatgaataggattgctgaggcagggaaggtgctggaggacatgacagatgcgggattgaagccaactttaatagcttttagtgctttgatttgtgcatatgccaaaggtgggaggcgggctgatgcggagaatacatttgattgcatgattgcatcaggtgtcaaacctgatcgtttagcgtacttggttatgctggatgtttttgcaaggtcaggtgatacggaaaaaatgttgtgtctgtatcgaaaaatgatgaatgataattatagaccagatgatgacatgtaccaggtcttgcttgttgcacttgcaaaggaagataagtgtgaggagattgaagaagttatccaagatatggaattactttgtcgaatgaatctgggaataatatcaacaatgctcattaaggcgagaaagcagacgagcatttctgcctatgaacagtacagtcaaaggttaatgttaaaataccctggtcaaaactgtaacttgtatgagtacttgattacatgcctcattgaagctgagtttttttctgaagcttgtcaagtgttctgtgacatgcagtttattggcatagaagcttctaaaagtatttacgagagcataatttctacctactgtaaactgggattcccagaaacagcacacaggttaatggatgatgctttgcaatctggtattccgttaaacattctctcttgtcgggtaattataattgaagcatatgggaagataaagctctggcagcaagcagaaatcttggtgaaagggctgaggcaagcatcaggtattgatagaaggatttggaatgctttgatacatgcatatgcagagagtggactttatgaaaaagcaagggcagtctttgataatatgattaaaacaggtcctctgccaactgttgattcagttaatggaatgatgagggcattgattgttgatggcagattggatgagttgtatgtcgttgtagaagagcttcaagatatgaactttaagatcagcaaaagtacagtgctccttttgcttgatgcttttgcaaaagctggggatgtattcgaggtaatgaaaatctataatggaatgaaggctgcaggatacttgccaaatatgcacctctacagaagtatgatttccttgctctgccatcacaaccgattcagggatgtggaattgatgattgcagagatggagggagcagggttcaagccagatcttgccatacttaatgctcttcttaatatgtacactgccgctgggaactttgataggacaacacaagtatatcgaagtattctagaagctggcttagagcctgatgaagatacatacaatacattgatagtcatgtactgtagaagctttaggccggaagaaggttttacattattgaatgaaatgggcaaacgaggtctgacaccaaagttgcaatcctacaaaagcttgcttgctgcatctgcaaaagcagagctgagggagcaagctgaccagatttttgaggaaatgcgatctaagagttatcaattgaatagatcaatctatcatatgatgatgaaaatttacaggaatgctggcaaccactccaaagctgagaacttgctagcagtaatgaaaagaggatggcatagagccaacaattgccactatgcatattctcatgacttcttacggcactgctggacaacctcgcttctgactgaaaggacaccatcactgttaagtgagattgccaattatctggaagagcttgaagcattagaagattctgctgctttgaactttgtaaatgcagtagaagatttgttcgtggcacaaaaggactggggcgctgacttccggaagctgtctgctggggctgcacttgttggtcttactttgtggcttgatcacatgcaagatgcttcactccagggttcaccagaatctcccaaatctgttgtactggtcacaggggagggggaatataacatggtatccctgcgtaaaaccatcagagcctaccttttggaaatgggctccccattcttgccatgtagagctcggtcaggtcgctttgtggtaaaggattactctcttaagatgtggctgaaagattctcctttctgcatggaccttgagttaaaagatgctccagctcatcctaagttaaactcaatgaagctgatcgaaggatatttcatgagagctggttttgtatcagcatttaaagatatacatgagagacttggggaagtatggccaaaaaagttttccagagatgaacaagctttggatattattcggcagtgtgcacctatgcagtgcgccttgggctgcgctgatgctttcatggggagcgcactagtgtggcagtaa

SEQ ID NO: 30469 - DNA, 204 bp, Zea mays
  Peptide Sequence Number=SeqID_72248
atggcggctggcggagctgcaggacctggcgacggcgatccacctgctgttgtcggcgcgggcgcgggcgctggtgctgcagtcgccaccgacggggcagtagcaggagctacgtggacacggagcagacgacatgcggtactggcggcgcaccaatcaaccagcatcaacgggaaagacgacgtttgtggtcgcagtgtgtga

SEQ ID NO: 30470 - DNA, 525 bp, Zea mays
  Peptide Sequence Number=SeqID_72249
atgaggatgatgcatatgaggtataagggcgggagcgaggtgatgagcaaagcgacggcggcttcgaggacggggctgagcgcgcggccggaccccgtcggggaagtcaagcagcggcttgagaatgtgggcgatgcccatcgccacgcagacagacgcgtctttgaggttggccatcgcctcgcctcgcgcaccagctgcgtcctgtttcgtaggagagcacacagacgcgtcagctgctcgaccggtgacgagaggagagctcggagcagagaagacgatggagaagaagaagattgctcgctgtttttgagaagaacggaggccctggtctcaaaatcgacaagaaaggtatggagcaaaaatgttcctcttcgcgtgaagctctccatgcatgtcgtcgatgatgcgctgttggaggcgtacgccgttggacaagatgcagtcatcccaccgatgaacgccatccctacacgctgtattcaagtgcagaacgtgcacttttgcgcgatctatgctggatag

SEQ ID NO: 30471 - DNA, 168 bp, Zea mays
  Peptide Sequence Number=SeqID_72250
atggcgatgcttgtggtggagacaatgggtcagaaagaggatgaagagcagcatgtgaagtttgaggagaccttcccactgaggtccaaatccttcgtttcatccttccttagacgagattccttgtacatgaccaggatgctcagggttaccgacaccagccgttag

SEQ ID NO: 30472 - DNA, 174 bp, Zea mays
  Peptide Sequence Number=SeqID_72251
atgtggttaatgatgaaccttcaaagacttgacgtgcaactcataacagtgtttgcattggaccattggatatgcttccttatttatcctaaggttggaaaggtgctggtgctcgactccttggattacgaccctttgacctatgcaaaattcatcagcatcttagagttgtaa

SEQ ID NO: 30473 - DNA, 354 bp, Zea mays
  Peptide Sequence Number=SeqID_72252
atggaggatgaacgagcaccgggagagagtcggttagatctaaatttccgtggaggtgagcttggacgaggtcagactaaggtattgcattttttacctggggttgatcttgcaaaggttgagtgcacgtgcaaggaaatgaggaatcttgcattagatgatagtatttggaagaagcttgtattcaagtatgaaaattatggtaagggctgtagggggcgagcaagagtgcgaaggccatatttggagaagcttggcaggccaataagagatggcagaagaggcctaatccaaccttttggtacaatggctggggaaacaattcttttagccatccacttaggctgccattga

SEQ ID NO: 30474 - DNA, 180 bp, Zea mays
  Peptide Sequence Number=SeqID_72253
atgaaacatcattcccttgaggataatgagccttggacgaaggttgatgagaatataattacgaagagaggtgacaagaagaagaagaagatgaagaaggtcgtctactacgagaccgactcttcgtcaccctccacatcaagctccgagtcgtccactgcttctaagcgctatgagtag

SEQ ID NO: 30475 - DNA, 588 bp, Zea mays
  Peptide Sequence Number=SeqID_72254
atggcgccctgcatactctgtgacgacggcggctctcagcccccttacggaagcaagaggacgtcagcaaggactcaacagctccgacagctgtccctccgccaggctccatcgctcctccgacggccacgacatcacaccagctgggtgccaagatctctccggctgccacaacggcatggccctcttagagagggttggccgcgcgggaacgaggacgagcgcgatgatccatctgtgcatccgcaggagtgcagccgagcgtgcgagtcccagcgctgcacggcgccgctgatgcgctacggcaagtactgcggcgtgtcctacacggggtgccccggcgaggccccctgcgacgccctcgacgcctgctgcatgctccacgacgcctgcgtccaggccacggacaacgactacctcaacatgtggtgcaaccagagcctgctggactgcgtggccgcagccaggcctacggcgatggcggacacgttcgaggggaaccggtgcaacgtcacggacgtcgccgacgagatcaccgccatcgtggaggccgccgtgtacgccaggggcatcctgcacaagccctag

SEQ ID NO: 30476 - DNA, 411 bp, Zea mays
  Peptide Sequence Number=SeqID_72255
atggcgcgggggctgggtcccacacgtcatacaagccggctcagagcggaagaagccaaaccgtcgtgcgcggagaagcgggcgacgcttcgccttcgccataatgaccgtgtcaaaaaagggaccgggaaaggggaataccccgaaaaggatccttccccgagaaggaaccaggctccgagccccctactgatcagaggttcgaaggctggcccctcggaagggttcgacagccgcctcagatcgcatgggccctacacccactactggtcagaggttcgaaggccggcccctcggaagggttcaacggccgcctcaggctactcgggctccgcgcccattactgatcaggggttcgaaggctggcccccgaagggttcacagccgcctcagacgccgagcgagggatga

SEQ ID NO: 30477 - DNA, 267 bp, Zea mays
  Peptide Sequence Number=SeqID_72256
atgggcggtggccgcgaatttggacgagacacgcggcggtcggaggtgaagaagaagcactggccgcgtgagttcgtggccaacggcgtggcagtaactccggtgagtcacggagagttcagagaaggtcacggcgacacggtgaaagagtggagccacgcggcacatggccgagaggcggcagtcgacggcgagcccttgaccgcgggcgtttttgcacataggcccctaaggtttggttttagggttttccagggttccatttag

SEQ ID NO: 30478 - DNA, 2043 bp, Zea mays
  Peptide Sequence Number=SeqID_72257
atggtgggggcggcgcccgcggcgcgcccgagcgcgtcgtcgcgggtggagaaggccacgagccacctgctcatggggcccgactgggccgtcaacctcgaaatctgcgacatcctcaacgccgacgtatggcaaacaaaggatgtggtgaaggcagtgaaaaagagattgcagaacaaggacccaaaggttcagttttttgctttaacgcttttggagacaatgatgaagaactgtggtgaatatgttcagtttgaagttgctgaacaacatgttctgcaagaaatggttaaaattatccagaagaagagtacattttttaacgtattggttgatgagccatgctataaagctatgggactatgggagagagttatcgagcatcatctgagaggaataacgaggatcattataaaccaatttgaaagagaccttcaaaggcatcaatgcgtagttggattccaaggcacgataacaatagaaagagaggcagggaaggccgaagttgacatggtaagggacaaaatattattgcttttggactcctggcaagaggcatttggaggacctggaagtaaatacccacaatatcattgggcataccttgaagtaaagacgacaggtgtggtgttcccaaaacgtcctatggatgccccaccaatatttactcctccagctacacataattctgagacctatggttcacccagatattctgcgggaagtctaagtgacagaatgtcctcagatgttgagactctgagtttaggagatttgaataagattcgaaatgtgacagacctactgaatgatatggtgtatgctttaaacccatctgatcgaatggctattaacgatgaaattatcacagatcttgtgacccagtgtcgctcaaatcaacaaaagcttctgcagtttgtcagttcatcagggaacgaacagttactaaagcaaggactggagacaaatgatctcttacaaagcgtactttcaaagtatgatgctgtggcctctggtgctcctttggcggttgaagcatctgtgagagaggcaatcgaggctcctgcagtaaagtcatatgcaccccctgaacataatgataatgttaacgaagaggaagatgagtttgcccagctagctcaaaggaaaaacaaatccgtcgtaagtagtagcgacgatgcatcatccagcactttgggggaccttgcccttgtacccattgatcaagcagtttcagaatcgccatcttctgttgcaagcaatgcgctggttcttcttgatcctgctcccagtactagcactgaatcaaaagagctggacatgatcgaccttctaagcctcaccttgtgcagccctactcctgaaacttcaacagattcttcagcacaggatcaaaatggaccccagcaacctgcagttacacataatcaaaaagggcttcaggaacctacagttacaaatgggcaacaatatccttctagtgtgccacagtatccttcaaactaccagcctcacactgcaaaccaggcatatgctccacagaccagcaactatgtggcaccttgggcccagaccggagcatatccacctcagcctccggcatatgcatctggctatgcctaccctgcaccgccatgggtggcgcctacacatcctgttgattctaacccttttctttcggtcaattaccaagatccacgccctgctgccacttctgttgctcaaacagcaacatatgcacctcccccagcttcatatcccccttcaatatcttatgcacagtttgcaaccccccagtcaattcagcatagcaattctgtggcttcaccgagcaatggtcagattgcaaatcaagcacaaatgaatgtgaatcaacaaccaaaagattcttcggcagcatctagcagaccatactacatacctgataatctattcagtgatttgatcgatgcaaaaagttttggcggtggaaacaagatgggcgggcccactacaatgggtagctcaaatggtggccagcctatgattggtggaaagaaatag

SEQ ID NO: 30479 - DNA, 486 bp, Zea mays
  Peptide Sequence Number=SeqID_72258
atggatgtgtctgtcggatcaagagctcgacacttgactgatgtggatggtgacttgtgggatctggtcaggagggatctccaactaaaggccaccttcttgtacattgacctgaaccgttgcaggcaatcaaacattgattacacatcttcgcaggtgccatttaggataactgcaacaggatgggtccaagaattcaacaatactgctagaattgtgaagaagataaagctcacaggcacaccatgcaagatatttaagaagactgcactaatcaagggaatgttcacatccgatttagaggttgctaggtttgaaggtgcttccattcggactgtaagtggaatccgaggacaggttaaaaaggcagcaaagattgagccaagagatatgttgaagagaaaaggggaaaatacagaaggaatcgcaagatgtacatttgaggacagaattcttatgagtgacattgttttcctgcgtgcctag

SEQ ID NO: 30480 - DNA, 249 bp, Zea mays
  Peptide Sequence Number=SeqID_72259
atggattcagaccctggagtggagaaccaggtactgcagcagcgtaaccgtaaccgtaaccggccaggaaatagatacaggagaatggatcaatggatggccgtcggcttctgcgtcaacacatgtcacgcagtgacagtgccgaaagttacgtctcgcctcggattttggatccgccggccgccctcctctgttggcctgatacgcatagcgcttagagggagaaaggttgcttgcttgctcggttaa

SEQ ID NO: 30481 - DNA, 339 bp, Zea mays
  Peptide Sequence Number=SeqID_72260
atgcccgcctatgacaggaacaaggaagttgaagacaaccatttttttgtttttctggacaagggtaggaaaggttccagggtaggcctagttaaacccattggtaatcccaaagacaagcaactgagcagtgaactcaccaagaagggtgcaatggcggttgacgtcgtcgaagaaggaccgctcctctggcagcagcagtggggactcctcatctacctccatgccctccagcactccagcgcgccacgcatcgtgtccatggccttctgctctattcgtgaacccttccactactgcagcgaagggaagagaccgcgctacgccaacgatgaatag

SEQ ID NO: 30482 - DNA, 1122 bp, Zea mays
  Peptide Sequence Number=SeqID_72261
atggctgccgcctcggatctcgtcaacggcggcgtagcggccctgcagattgaggagccggaggaatcaaagaacaatgcagcagcggttgtggcgttcgccccaatcccctggctgcctgccgtggcggagcggtacgagcgccgcgagaagctgggcgaaggcatgttcggcgacgtgtacaaggcctgggaccgcgtgcacgaccgcatcgtcgccgtgaagaggctctcggggaggaccgacgaccgcttcgtgaagacctccatccccgacttggcgcgagaggtcatgtccctcgcggcgtgtcgcggccacccttccgtcgtacagctcctggcgacgcacgtcgacggcagccgcgccgacggcgactgctacctcgtcacggaacacgccgggcctatgaacctgcgccagtacatggccgtccgtcgccttaacggccagccattcggcgaggacgaggtgcgcgacgttatgaggcagctcctcgccggcgcagagcacacgcacagggcgggcgtcctgcacagggacatcgtcccggagaacgtgatcgtcggcatggacggggacagcgcgaccgggaggatggtgtacacgatatgcggcttcggtatgtccaagccggcggggcaaacagagaaggacgactccgggctgttggcgtcgcccagcccgtaccgagcgccggagcttttcctcgggtgcaaggactacgacgggcgggtggacacgtggtcgctcggctgcatcatggccgagctcgtcaccggcaccggcgtgcctttctttggcggcgcgctggacaaagaggtctttgacaaggtgctgcacgtggtcggcaccagaggcattgccaaatggcaagggctggagcgtgtggcgccgcgcgaaaaggtggcctgccttcggaagacggcgagccaggagcgcggctacctgctgaagatgttcccgccgaggctgctgtctccagccggcttcaaggtcttggaagggctgctgcaaagcaacccggaccatagactctcggcagctgatgcgcttaggaagccatggttccggcgccgattctcgttgggtgcctgctgcttcatgcctcatgctgctgcgtag

SEQ ID NO: 30483 - DNA, 387 bp, Zea mays
  Peptide Sequence Number=SeqID_72262
atggccgagctcgtcaccggcaccggcgtgcctttctttggcggcgcgctggacaaagaggtctttgacaaggtgctgcacgtggtcggcaccagaggcattgccaaatggcaagggctggagcgtgtggcgccgcgcgaaaaggtggcctgccttcggaagacggcgagccaggagcgcggctacctgctgaagatgttcccgccgaggctgctgtctccagccggcttcaaggtcttagaagggctgctgcaaagcaacccggaccatagactctcggcagctgatgcgcttaggaagccatggttcccggcgccgatttctcgttgggtgcctggctgcttcatgcctcatgcgctgcgtagtagactagtagtccagtattaa

SEQ ID NO: 30484 - DNA, 186 bp, Zea mays
  Peptide Sequence Number=SeqID_72263
atgaagataccagagaaggacaatgaggactacgactcagacgaggcgacccaaatcatccaccacaactcccaagctacaaagatggagttcatcgaaagggagctcaggaggtttgccatcaacaagggagaagatacacaagagatgtacaaccggctcaaggcattggcgaaccaaatctag

SEQ ID NO: 30485 - DNA, 806 bp, Zea mays
  Peptide Sequence Number=SeqID_72264
gccgcgcgacggcgactgctactcgtcacggaacacgccgggcatatgaactgcgccagtacatgcccgtccgtcgctttaacggccagccattcggcgaggacgaggtgcgcgacgttatgaggcagctcctcgccggcgcagagcacacgcacagggcgggcgtcctgcacagggacatcgtcccggagaacgtgatcgtcggcatggacggggacagcgcgaccgggaggatggtgtacacgatatgcggcttcggtatgtccaagccggcggggcaaacagagaaggacgactccgggctgttggcgtcgcccagcccgtaccgagcgccggagcttttcctcgggtgcaaggactacgacgggcgggtggacacgtggtcgctcggctgcatcatggccgagctcgtcaccggcaccggcgtgcctttctttggcggcgcgctggacaaagaggtctttgacaaggtgctgcacgtggtcggcaccagaggcattgccaaatggcaagggctggagcgtgtggcgccgcgcgaaaaggtggcctgccttcggaagatggcgagccaggagcgcggctacctgctgaagatgttcccgccgaggctgctgtctccagccggcttcaaggtcttggaagggctgctgcaaagcaacccggaccatagactctcggcagctgatgcgcttaggaagccatggttccggcgccgattctcgttgggtgcctgctgcttcatgcctcatgctgctgcgtacagacgaccatgttacataacagatatgttaatcatgtccgtctag

SEQ ID NO: 30486 - DNA, 1512 bp, Zea mays
  Peptide Sequence Number=SeqID_72265
atggaaatgcagtcgacggccgctggaactttggcacaatcgcaggctgcagcagctgggactgggaatagcttcacgtacgcggacctgcacgccatcacggatggtttctctgatgaaatcggccgtggtggtttcggagtggtttatcgggggaaactgccgcagcctgatggggaagaggtcgccgtgaagaggctgacgacgacgacggacaacaacaaccccaagcaaccggccggcgacgacgatgatgagcagttcgagaaggagctcggagcggtcaggagcatccagcacgagaacatcgtggagttcgttggctactgcaacgggtatacaccgtcgtccactgttctgcctgacggacgccctgtctacagaaagataagagccctctgcttcaagtacatggagaagggaagcctgaggaagcatgtcgctgatgaatcacttgattggcagtcacgctatgagatcatcaagggggtctgcgagggtttgaaccacctccacagcaaaggcattgttcacagggacttgaagcttgacaacatactcctggacggtgccatgaagccgaagattgcggattttggtctgtcgagattcatgggcgcgcaagaaaccacccggatcacgagaaacattgtagggacgtttggatgcatgccacccgagttcttctgcgatgggcaatactccaagtcgtttgacgtgtacagtctgggcactgtgatcaaagaaatactagcaggacctgctgctgccgacgacggctccatctacggctactacgatcccctcaaaaaggcaaggagattatctctgttcgtcgccatatacatgcataagcaggcaagtgagtactgggagcaaaggctggtggaggatgcagatgtgcaaagagtgaaggcctgcatcgagctagtgccactatgctggggtctggacaggaagaaaaggcccacgatagagagggttctcgatacgctgaattatacagacatttcagttcagaaagaacagcactactactgttcccggtcgtctggaccgcagcctgagaagagcaggctggagggaggagcaggaggcgagctccgcgacatcgacatggaggtgacgccgccgccgcaccgcctcaaggcggtgtggctcaagcacggcgcggtcatcgactcgctccagttctcctacaccgactgcgacgggcgtgaacaaggcgcaggtccatggggcagccaagacgcctgggacaaggttcttcagctcgagccctacgagttcctggtcggagtctccgggacgacgggcgggtacgcgggcctgccgacgagcgtcataaggtcgctgacgtttgtcaccaacgtgaggacctacaggacgcgcggggcgcccgtgggagaccccttcgcgttggaagcgcctgccgggtcctgcatcgttggcttccacgcgcgcgctgggcacttcctcgacgcgctcggtgtctaccatcgccctatctaa

SEQ ID NO: 30487 - DNA, 222 bp, Zea mays
  Peptide Sequence Number=SeqID_72266
atgggggacctgcgtgtcggcgccttaagaccggagctgcgcgtcctcactgctgcatgggccctttcgtcggagactcaagatggcgcttgcgctggtgttgttgcgatgtgggacccggatttcggaaccgtccccctcgcgccgggatcgagatcctctgacgtggggagagggcactgccgcgtggcccccgcgtgcgacagggcccgcgtgcagtga

SEQ ID NO: 30488 - DNA, 456 bp, Zea mays
  Peptide Sequence Number=SeqID_72267
atgggcaagggtactaagcgcaagcgcgagccgactcctccgtcggaggatttcggtgactcggaatactcggaggaggagttctcctccgagtccgagggatccccggctcccgtctctcccccggcgtcgtctgatgattcagacgactcccaggggattgccgcggaggtctggacgtacatccgggccgtcgagcgctccgggctcgagggctcggatgagtccgagttctcctcggacgaggaggactcggacggcggcgaggacgatgatgacgacgacgacgacgacgacggtggcgatggcgacggtgacggcagcaacggcggcgggggcagtggcggcaagggcagcaccggaggcggcagcagcacggggagcaccagaggcggcgctctaggcagcaccaggggcggcggcggcaagggcagcaaacgaatcaagctgatcatc

SEQ ID NO: 30489 - DNA, 435 bp, Zea mays
  Peptide Sequence Number=SeqID_72268
atggaccacgcggcggaggcgcagcggacggacctgatgacgatcacgcggcacgtgctcaacgagcagagccgccacccggagtcccgcggcgacttcaccatcctcctctcccacatcgtcctcggctgcaagttcgtcgccgccgcggtcaacaaggccggcctcgccaagctcatcggcctcgccggagagaccaactgtgtcctcgtgtctgaagagaacgaggaggccatcttcgtcgacccggccctccgcgggaagttcgtcaatcctttgctcctccatcccgacctcgtaaaagttccgcaacgccgtactgtcgctttccctgatcgcgtgttagttctctctctctctctgttcaggtactgcgtctgtttcgacccgctggatggctcctccaacatcgactgtggtgtctcaatcggaacg

SEQ ID NO: 30490 - DNA, 636 bp, Zea mays
  Peptide Sequence Number=SeqID_72269
atgagccagaccaggagaacggaggcaccaacggacagcaacgccgccgacgtgatggaggtggagccgaagcgccgggcgccgcggctgacgagcgcatcctgtcgtcgctgtcgcggaggtcctgaagctccggccgtcttcaacgtcgtcgtggagatcaccaaggggagcaaggtgaagtacgagctggacaagaagacggggctcatcaaggtggaccggatcctctactcgtccgtcgtctaccctcacaactacggcttcgtgccccggacgctctgcgaggacaacgaccccatggacgtcctcgtgctcatgcaggaacccgtccttcccggcgccttcctccgcgccagggccatcggcctcatgcctatgatagatcagggagagaaggacgacaagatcatcgccgtctgcgccgacgaccccgagtaccgccactacaacgacatcagcgagctctcccctcaccgcctccaggagatccgccgcttcttcgaagactacaagaagaacgagaacaaggaggtggccgtcaacgacttcctgcccgccgccgctgcccgcgaagccatccagtactccatggacctgtacggccagtacatcatgcagaccctgcggcggtag

SEQ ID NO: 30491 - DNA, 545 bp, Zea mays
  Peptide Sequence Number=SeqID_72270
acaccaatgcttcgccaggttgcattgcacgtcaagccaccgagccggcgatcgccgacgccggtttcgcgcttcccttcgagcacggccttggcctacaaaacctgatgaggcccgtcgctcggggccttgccctgaaaccgctgaaccccatcgcagccgcagcgaagggcacggttccgaacagggcgtgctacgggctcctccggcccctcctccttccccgcaccagccattcgtctccgctgcccgcgccctcctgtcgtcgtagcgtgcgaggaacggggcgccgccagtgcccggcgccgatggcgaaggctcgcgacgagacagagcgtgagccccaggcgccgccgccggcgatgatggcgaagcaaggcgaggaggagaaggaggccgcgccagagcgcaagccggccggggagcgcagcatggcgtaccagatcttcgcgggcctctacgtgtgcgcctacgtcttctgctggaggacaggcgagctcatcttcctgaatgcgcaggatgctctcgacaggctccggcgacac

SEQ ID NO: 30492 - DNA, 159 bp, Zea mays
  Peptide Sequence Number=SeqID_72271
atggccacagctctggcccagacacggcatgccggcctgctgactgtgtcagcctggcccgttagcccatcggactatttggttaaatcagcggtgccgggccagcactatgggcagaggctacagcccaagcacggcacgacgctcatgtcgggctag

SEQ ID NO: 30493 - DNA, 1065 bp, Zea mays
  Peptide Sequence Number=SeqID_72272
atgccgaacggtggcggcaagaggtggctgctgctgctgccgctgtcgcggtgggttctcctcctcggcagcctccagctcccggcggtcggcggcagcggccatgtcgtcacgcgcatgcgcgggttcgacgggccacttccgttctacctcgaaaccggcaaaggtgtgcagctcttctactacttcgtgcgctcggagcgcgacccctacgaggacccgctgctgctgtggctgtccggcggcccaggctgctccggcatctccggccttgcctacgagataggacccttaaaatttgatgcccgagggcaaggtgaatttcccactcttctctaccgaccggagacatggaccaaggtgagcaacatcatatttgtggactcgccggtggggactgggttctcgtacgccaagtccgaggaagggctcgagaccggcgacaccaagcaagtgaagcagctagtcattttcctcaggaagtggctccaagaccatccccggttcgtgatgaatcctctttatattgctggagattcatacagtggtctcatcattcctactcttgcattagaaattgacagaagcatagaactcggtgaaaagatatttttccggtctcaggggtacattgctggcaacccgttgactggcggacagtttgatacagacagccaaattccatactttcatgccatgggacttgtatccgatgaactttacaagaatgctagggagaactgtggtggaaagtatagtgctccactgaatgctgtatgtgcagaggctgtccaagctatcaacaatgaagctttatacattctatcctacgcttgggggaatgatgatacagttcaggagagcctcggtatccgcaaggggacaattggagcatggaaacgatacagccatgcattgccttacaattatgatatccagagtgtagtggattaccattcaaggctagccacaaaaggatacagggcgctgatatacagagcggcgaccacgatgctgttgtaccccatgttggcacacaagcatggattagatacctcaacttga

SEQ ID NO: 30494 - DNA, 684 bp, Zea mays
  Peptide Sequence Number=SeqID_72273
atgtgtggtgttcccttttcacagaagaatgccgtggaagacccagacgaagccgccacgttctcggctgctcatcgaagactacccgccgacaccgagctgcagtcgtggtacacggaggccgtgcagacggggcacgcggacaagcgcggcgcgccgtggtggccgcgcctgacgacgcccggggacctggcgtcgctgctcacgacgctgctgtggctgacctcggcgcagcacgcggcgctcaacttcgggcagtacccgctgggcggctacatcccgaaccggccgccgctgatgcggcggctggtgcccgccgagggggacccggagcacgcgcacctggtggccgacccgcaccgcttcttcctgtcggcgctgcccggcctgacgcaggccaccacgttcatgaccgtcatcgacacgctgtccacgcactccgccgacgagcagtacctcggggagcgccccgacgaggcgtggacggccgacccggccgcgctggcggccgagcgcgagttcgcggacgaggtgcgccgcgccgaggaggagatcggccggcgcaacaccgacgcgggccgccgcaaccgctgcggcgccggcgtgctgccctatgagctcatggcacccacgtccggcccgggcatcacctgccgcggcgtccccaacagtgtcaccatttag

SEQ ID NO: 30495 - DNA, 420 bp, Zea mays
  Peptide Sequence Number=SeqID_72274
atggcaagcggcgcgtcgaagcaagaatggcggcggtggagggctagggcggaggatgtgggccgcggacgcacttccatgaacgacgtggtcgaatacgcatggtcctcgccccatcgtataggtgggcctcgcgttggtgcaccattacaggagagggtggacacgagggctattggagcggcgtgcccatgcgagattgtcgagcggggatggcgagcggcgtgccgatgcgagattaccgggggagggcgagggcggagcatgtgggccgcggacgcgacctctgcagggatggggcgggcgccgatgcaagattgccgagctaggatggcactacgctgcgagattgccgggggcggggagggcgagggcggaggcgtggtgacgcccggtggacgctctcggtatcaacatatg

SEQ ID NO: 30496 - DNA, 402 bp, Zea mays
  Peptide Sequence Number=SeqID_72275
atggggaggctggtaatggtaggataccaacagagaggtgttttaaagctcctaccgaagaacaatggtgctgtgatggagagtaatgattgcaaggtggatgaagacactggggacgataggatttcaatgaagaacactaaggtggttgatctgcaagccacatctggccatgtgctcaacaagcttgaaatgaagaagccaaaaggaggacccctcaacaaacataagcaggatctcaggaacaagataaaacatttgcttttagataatgggtggaaaattgacataaggcagaggaaaaacaaagattatgaagactcggtctatgtttctcctaacgagactgactattggtgcagttttccaagaacagtttcaaaatatgggtcactcatctaa

SEQ ID NO: 30497 - DNA, 2016 bp, Zea mays
  Peptide Sequence Number=SeqID_72276
atgcccggcataccgagggatgtcgccgagcactcgctggatattcgggccggagcccgacccgtcaggcagcctctacgccgattcggcgaggagaagcgcagagtgatagccgaggagatccacaagctaatggcagcagggttcatcaaagaggtattccatcccgaatggcttgccaaccctgtgcttgtgaggaagaaaggggggaaatggcggatgtgcgtagactacactggtctcaacaaagcatgtccgaaggttccctaccctctgcctcgcatcgatcaaatcgtggattccactgctgggtgcgaaaccctgtctttcctcgatgcctactcagggtatcaccaaatccggatgaaagagtccgaccagctcgcgacttctttcatcacgccgttcggcatgtactgctatgtcaccatgccgttcggtttgaggaatgcgggcgcgacgtaccagcggtgcatgaaccatgtgttcggcgaacacatcggtcgcacagtcgaggcctacatcgatgacatcgtagtcaagacaaggaaggcttctgacctcctctccgaccttgaagtgacattccgatgtctcaaggcgaaaggagtcaagctccatcctgagaagtgtgtcttcggggtgccccgaggcatgctcctggggttcatcgtctccgagcgaggcatcgaagccaacccagagaagatcgcagccatcaccagcatgggacccatcaaggacttaaaaggcgtacagagggtcatgggatgtcttgcggccctgagccgcttcatctcacgcctcggcgaaagaggtctgcctctgtaccgcctcttaaggaaggctgagtgtttcgcttggacccctgaggccgaggaagccctcgggaacctgaaggcgctccttacaaaggcgcctgtcttggtgcccccagctgatggagaagccctcttggtctacgtcgccgctagcactcaggtggttagcatcgcgattgtagtcgagaggcaagaagaagggcatgcattgcccgttcagaggccagtctacttcgtcagcgaagtactgtccgagaccaagatccgctacccacaagttcagaagctgctgtatgctgtgatcctgacaaggcggaagttacgacactacttcgagtctcatccggtaactgtggtgtcatccttccccctgggggagatcatccagtgccgagaagcctcgggcaggatcgcaaagtgggcggtggaaatcatgggcgaaacaatctcgttcgcccctcggaaggccatcaagtcccaggtgttggcggacttcgtggccgaatgggtcgacacccagttgccgacagctccgatccaaccggagctctggaccatgttttttaacgggtcgctgatgaagacgggagccggcgcgggcctgctcttcatctcgcccctcgggaagcacctacgctacgtgctacgcctccatttcccggcatccaacaatgtggccgagtacgaagctctggtcaacaggttgtggatcgccatcgagctaggggtcagacgcctcgatgcccgcggtgactcacagctcgtcatcgaccaagtcatgaagaactcccactgctgcgacccgaagatggaggcctactgcgatgaggttcggcgcctggaagacaagttcttcgggctcgagctcaaccacatcgctcggcgctacaacgagactgcagacgagctggccaaaatagcctcggggcgaacgacggtcccccggacgtcttctcccgggatctgcatcaaccctccgtcaagatcaacgacgctctcgagcccgaggcaccctcggcacggcccgaggcaccctcggcacggcccgaggcaccctcggcccccgaaggcgaggcgctgcacgtcgaggaagagcagagcggggccacgcctgattgaaattggcaggccccgtacctgcgatatctccgccagggagagctacccctcgaccaagccgaggctcggcgggtag

SEQ ID NO: 30498 - DNA, 189 bp, Zea mays
  Peptide Sequence Number=SeqID_72277
atgtcaatgatgaacgaattgaactacttccttggatttcaagtgaagcaactcaaggaaggaatgttcatatcccaaagaaaatatactcaagatttgctcaaaaggtttgggatgaatgacgcaaagcccttcaagacgctaatgggaaccgacgggcacttggacctcgtcaagggagaatattaa

SEQ ID NO: 30499 - DNA, 306 bp, Zea mays
  Peptide Sequence Number=SeqID_72278
atgccgccggtgaaacccctttcgcgccagtgttccatcccctgcgcgtggccgtgtgggtgcaccagtgttcgggagatccgtccgtgccctcgggacgagctgggcgacctcaaattgaggggaattccaaactggagtgcgcaacaggagcggaaatatccctccccgtggtcggctcgcttgcacagattaacatataaacccatggcaaactgtgaaataaacctgcaatcctctgtagtaatagaatccttaccagcgggtcctgaattttactggttagcccccgagccctcagaatga

SEQ ID NO: 30500 - DNA, 408 bp, Zea mays
  Peptide Sequence Number=SeqID_72279
atggggaggcgtccatggacttcgcggttgggaaagccgactggtgccgcatcaattgctcgccggtgtaccagcgccatcgttgattcctcggctgccgcgggcagcgtcgtctgcgccttgaccgttgctcgaatcctagagtatggagtaaggccgagggggagcggttctgcgggtcgctggtggcgctccatcgcggcgggttaccgaggccgccgtgagtcagagcttcgccatgggcaggggcctgggcgcatcgtttcatggataggggttagccatgagattcatggaggtcgagcgttcgtgaaaacggagtctgacgagcaagccactgtggaatctgaggttcaacaagtagagatagctgagcaggagctcattgaaggcaagttgtgcccttga

SEQ ID NO: 30501 - DNA, 138 bp, Zea mays
  Peptide Sequence Number=SeqID_72280
atggcccaggccgaagctgtgttctccatagatgatacaaaggatccttcagctgaagcaaccttgatgggcgaaagaaaagttccttatagaggaatagctcttattgtaatactttttgaaatggacaatgtatga

SEQ ID NO: 30502 - DNA, 399 bp, Zea mays
  Peptide Sequence Number=SeqID_72281
atggagcgccaccagcgacccgcagaaccgctccccctcggccttactccatactctaggattcgagctaaacgaacgataggcgtgatgggcaaaggtgtacataccaacggtcaaggcgtagacgacgctgccccacggcagccgaggaatcaacgatggcgctggtacaccggcgagcaattgatgcggcaccagtcagctttcccaaccgcgaagtccacggacgcctccccatggggctcgataggggctccaaccagtcgccgaggatctaccgacgctgtgatggtggggctcgatccaagggttgcgggagccgcaggacgcttggtttttgtagctggggaggtgtatgaccaagtcgagaggtggcccgtgattatcgcgctcggttga

SEQ ID NO: 30503 - DNA, 372 bp, Zea mays
  Peptide Sequence Number=SeqID_72282
atggcggcgacgctgcacgcgccggcgctacgccgtgagcggcctcacggtgccaagcgcgctctccctcaccaccgaacgggcccgatgctcacctaccgcgctctcccccaccgtctgtgttgctcgcgtgccggcgcgacggttgctatgggagacagtcatgtcgctaaagcattattgcttcatactggttgctacacattgctttgcaaaataccttgcaagggtccgcataaatctaatatgaaattagggggctatatttaccaaaattgtccattttacaatgtcatgaaaatgttaaatggttcttaccattgtgttcctctcctcgagatggttaaaacatatattaaacgttcaatttag

SEQ ID NO: 30504 - DNA, 258 bp, Zea mays
  Peptide Sequence Number=SeqID_72283
atggcagaatttattaaaaacaaaattgagacatttaatgatttaatgatattcttcctcgtgttttctattagatttacatcatggcaggtagaatgtgtttcctcagctcttgaagatgctgtgcaaatcggttggagtttgggcgcagcgaccaagatgcttactgtcaaaaagccaaaggctcagatcaaccagaagcttgatgcgagcaaactgcagcgcctgactgagtgtgttttccaccttgagcactga

SEQ ID NO: 30505 - DNA, 396 bp, Zea mays
  Peptide Sequence Number=SeqID_72284
atgtatcaaaaagtggtattcatgggcccaaattggatagtggcagagcgggctctgtttctctggaacaatgaccatattgaaaccctaattaagcaaaactacaaggtgctgttaccgatcatctatccagcactcgagagaaactccagagatcactggaaccaagctgtccgtagcctgacactgaacgtacgcaagatcttctcagaccatgattccacattcttcggggagtgcgtccagaggttcagtgacgaggagctcaagcaggcggaatctgattcaaaacgagacgccatgtggaagcgcctggaggaaatgggtgcctcaaaacctggcgggaaccatcccttaggtgcacccaatggcaaacccagtcacgctgctggctag

SEQ ID NO: 30506 - DNA, 411 bp, Zea mays
  Peptide Sequence Number=SeqID_72285
atgtaccatgttcctattcctcgatcccatcaatccaggaacctggttactaagaccgtgtccagcaattcacctatatcatcaccaaaaacatcggtttgcactgtagactgcactgttcgcagaatggagtttgaatatgggtatagggatgggttcttgaaagattgtgatcgtcccagtgcagtggtgaaagtcgtctcactgaatcaccaggtcacgaattcgaggcagcctctccacatttgcggggagaaagcttgcctctgtttgtcccttccccagaccccactaaagctggagccacctgtacagggtctgccctgtttaatccatactccacaaagcacttcaaggaatttcataaatgagggaaccagggtggtgttcaatactggcactgcttgttaa

SEQ ID NO: 30507 - DNA, 336 bp, Zea mays
  Peptide Sequence Number=SeqID_72286
atgaagctgtggaaggagacttccaggagttccaagactacgacgagttctaggtgtggaaacgctcttggcttctggcctacgcagcgccaggtcagaacgtgtgggcactgcaagccaaagctagccccaaccgaacctacccaccgttccattctgcaagtacccggatctgaccagactgcagcaccgcaccgcagccccgcctcatttgacagtgtttgtctggatgacgaccgtagcattcagttcgatctcgaggacttgaacccaaactaccttcttctaaaatacgcgctgccacaacttgattcgtcggaaatgctgtacacgtaa

SEQ ID NO: 30508 - DNA, 876 bp, Zea mays
  Peptide Sequence Number=SeqID_72287
atggcatcatctcctactacatttttgatggatgtctcatggcaaaatgctggaacaggtactccgctgtggcggaatgggccaccagataagccggtgctctgcaatgcgtgtggctcgaggtggagaacgaagggttcattggcaaactacactccaatgcatcgcaatgacaatattgatgatgatgaacccagagttagcaagctgaagccaccgacgtcaaagttgaagtcacagaagaaaaaaacaaatcacattataatggagaatggaccattctctggtcagaatttccgaaagatgggggatgttgacccaagctatcggtctagttcaggatctgcagtatcatactctgagagttgtgccccatatggtgctgctgatgcaagtgaaatgactggttcagcacagtcacatgcttgggagtccctagtgccatcaagaaagaggagctgtgtcacccgtccgaagccttcacctgttgaaaagcttgcaaaagagctgaactatatcatgcatgaagagaagttatattacctttcagaatcatcagaggaagacctactataccatagtgaaactcctatcggttcctttgaaataggctctggaagtgtgcttctaagacatccaaactcgaaatcactggaggaagaatcaaaaacaagctcaattcctgcagataataaatcatatattacaagtgaatcctattcagactctgcctcatttgtcgttcacagtggaaacaaggcagcaattaacttaaatcttccaactgcaaggccgaagaagtcgccgctgcatatggaagacaatgctagaagggataaacttcattatgagatcagcatgtcctggagagtgtga

SEQ ID NO: 30509 - DNA, 198 bp, Zea mays
  Peptide Sequence Number=SeqID_72288
atgtccaacaacatcgtgagcgaagcgaagaggagcatcgacagcaccattagggaggacgcgaacatggagtccaagcgaattgtaaaggacatagaatattactttaaagggttaaatttagagtacgttgctgaagagagtcttaaacctaccacattcttgattcttgctgcaccttctgatggccaagcataa

SEQ ID NO: 30510 - DNA, 738 bp, Zea mays
  Peptide Sequence Number=SeqID_72289
atgaagggagaggcagaagcctccgggacgtcgacgccggagtgcaccttcgccaccaactgcccggcagcaacagcagcctacgatgcagacgacgacggggtgctcgaggaggaggaggaggaggctgcgcatctcacagtcactgcaagtccgcaaccaccgctgaaactacacaccacacgtactccgttgcggagagggacgtgctggggaggagaatgtgacgaggcgcagcggtcacaggctgaagataaccgtcctgttgcaatgtgggagcatattactcgtgaaacattgaataagatcagcgcagataaacccaaatataaatgtcatagtgatcctccttctccatcaaggttcaagccatgtgatgatgcttttgttatggaagatgaacttattaagttattaagtcttggaatgatttggcctcaaccaccattggatatgttggcccagtgtcttccagacaacacaaagttgtttgcttcaggaaaagttttaagatcatatctgtctttccagtcagcaaacggagattctggtccatttgctgaggataattcagttcctaattttaagatcaactatgcagcagcaaaaagaaaaagaccatactttgtaaggataataagcaaacatatgggttggagtgtacctatcaacaatatgggtacgaagaagcctctaacagcacattcaaagtctacaagtatcaactacaacctctag

SEQ ID NO: 30511 - DNA, 672 bp, Zea mays
  Peptide Sequence Number=SeqID_72290
atgaggagtcctctaagagttctaaaatccggggctttggctcttcagtttgaaagttcatctttgccaaaatctggctatgccaccgaagattcaacctgcactggaggagcacctaatctattcatgttacccctagaaaagctaccattactggtcccttctcagtatgccgtctctgatcaagacttgctgctggaaatacctctcaacgcacgacacccagaggcagaacttctctgtcaaccatctcagctgatgagctctataaccagcagctccacctctatgggtggggttgctgaaggagaaggcgtgtcattacagcatactttattacagacgtggcccaacccgctctgctcacgtggcaacctgcgggcgaggccttacaacatgggccggcttgcacacgggccccttcttgcattgagggagacaaagccttctaacccccgcggcctcggtcatccggtccctgaagtctgtgatggtcttcgcctcggctcgtcggagcgaaggggggcgctcgggccttcgcatgggcgacgccagcggcctggctggcagagcctgctgacggagccttcggtctgtggaacgttgatgtggaaatcctcgagcgaggggaacgtgttcgtcttcgctccaacagaccctaaccctaattag

SEQ ID NO: 30512 - DNA, 1119 bp, Zea mays
  Peptide Sequence Number=SeqID_72291
atgccagctgccaagagaaaggattttgggtttgttacaattgatacgcatgataatgctgttgcatgtgctgaagggataagtaactctgaaattggtgaaggtgatcacaaggcaaaagtaagggctagactgtcgcgaccactacagagaccacctagaatgaagcatggattgagaggaaattttagagtcgggcatggtgccccacggggtggccgtttacagtacgctcgtgctcctccacctcgcaggcctccaccacgccttgttcggcctgctggtagtcgcttaccaccaatcaggagccatccattgaaacgacccatatacatcagagatagacgtcctgctatgccaatgctagatagagctaggcgtttacctccttcagggagatcttatgacaggaggcccccagctccagtttacctgaagaaaagtccaaggagagaatacgggaggcgtgatgaacttcctcctccaaggagcagagctatgattgattacagtcctagagttccagttgatagacgtccctctttgagggatgattatttaccccggggatcaggttattcagacctaggtcctcatagtgctccccatctttctgataggcgagcttatgctgatgatagttatggggggaagttcgaccggcctttaccggtctatagggagggtcgtggccatgattatgacaccgtttctggatcaaagcgtccatatgcagatatggatgatgcgcctcggtatcaagaaattggtgttcgtcagtccaaggcacgcttggactatgacattggtggcagcagtgctcgctatggagatacatacaacgagaggcctggacgaccacatgcgggatatagcagtagtcggtctatccctggtcatgattcagcatatggtagcagccgtaatggcatgagttatggaggttctgctagcagtgctgatgctggtggtatgtacccaccgagttacagtggtagctatgggtctcgtggatctgatgttggtgggagttcatattcttcgctttactcaggccgcaatttgggtagcagcagtggtggctactatggaggtagcggttccggttcatattactaa

SEQ ID NO: 30513 - DNA, 294 bp, Zea mays
  Peptide Sequence Number=SeqID_72292
atggtcccggtcgagaaaaccctcaaaccctggccccccatcactaacaggccgatcaactgtccactctgcaatggcccagccgatatctctgttgatattcgtcctgacataaactcatttgatcattttttaagcatgcgatacattgcaacagatagaccctggctgaaattatatggaataagagttcagcctgtgccaccattcagcagtttgagctacaaacctgatccagcgctcattcatcattgcctacctgatgaactaatgctcgaggtgatggttatatga

SEQ ID NO: 30514 - DNA, 279 bp, Zea mays
  Peptide Sequence Number=SeqID_72293
atgaggcgagtgggggaggtggtggacagtggggatgtcgctgtcgagggtcggagatcgtggcgctccttgcgagcggcgacaagcgcgcccttgagggccagttgtggcggcacagccaaggagaagcaacatggagcccgcgtacttgcagagctctgcatcggaggattgggcacaaatcaggggaggaggtggccctggcgaccctcggtgaagtcgtggccctggtggtggagcgcgacaatggcggtaatctcagggggcgagggtcactga

SEQ ID NO: 30515 - DNA, 417 bp, Zea mays
  Peptide Sequence Number=SeqID_72294
atgcagagctctgcaagtacgcgggctccatgttgcttctccttggctgtgccgccacaactggccctcaagggcgcgcttgtcgccgctcgcaaggagcgccacgatctccgaccctcgacagcgacatccccactgtccaccacctcccccactcgcctcatcgtagtgctcaccctggcgcgggccctctgcggctctgcccgcggcagcgagggtgatcaagagcggcgagctcccaagtcgctcgctgccttctcctcgaaggatgtcgtggacatcgctaggagcggcgagctgtccaaggcggtgactggcgctgagctctctaagggactctgcgtccctctttgtggagaggatgcagcacacgtggtgtcacacccggttttagaaggcaaaccgaatgcgaaccat

SEQ ID NO: 30516 - DNA, 303 bp, Zea mays
  Peptide Sequence Number=SeqID_72295
atggtggttgcaaaagaattctgcgaacgtcagggagattattatgagaacctgatcctccgtttgatggaggacccggacaagcgcgaccaggttcggcgggagcatgcctacaagatgaaggagcggtgcgagcgcaccaaggcggcgtggagcctccctctgcgcccctacagcttctggaccttcgaccgcttcaactcgcagctctcctgggacctgcagatcagccaggctgccggtcgccgggacccttacgacgacctcatcacccgccactccggctccccgccgtcttcctaa

SEQ ID NO: 30517 - DNA, 1113 bp, Zea mays
  Peptide Sequence Number=SeqID_72296
atggacgactggagaaagccttacatagtggccatcatcgtacgggtgatcatcaccggcatgttcgttatcaacaaggcagcaatggaccacggattcaacagcttcgtcttcgtcttctaccgccaggtagccgcgtctgtcctcatggtgcccatcgcagtccttctcgagaggagaaatgcaagatccatgtcgtccgtgttgctcttcaagatctttgtgtgcgccttgatcgggatcacagttagtagcaacctgtacaacgtgagcctgaagctgacgtcggcgacggtggtcgcagcatcgaccaacgccatacccgttatcactttctgcctggcgcttctattaaggatggaggaggtgaagctgaggagcgcgtcaggcatggccaagctgactggtgtggcgttgtgtctcgccggggtcttagtcatcgccttctacgccggggagctgctgagcgccgtcaaccatcaccatgccttcggtgctcctgctcccacccatgctgcctcttccaccgcagcggcgaaaacgatgacgggagccgcgtggatcaaggggacgttcatcacggtgctcgctaccctggcgtggtccctgtggctcgtcctgcaggccgccgtgctcaaggagttcccgaacaggatgcttgtgatggcgacgcagtgcttgttcagcgtggtgcaatcgttcttcgccgcagtggtagctgagagggacttgtcgatgtggaagctccggctagacgtcgccttgctcgcggtcctttactcggggtttgtggtggctggagtgaactactatctccaagcatggtgcatggagatgaggggccctgtcttcctcgccgcttggacgccactcagctttgccctaacagtattctgttcctccttctttctgggagagatggttcatctcggcagtctgctatggggtaaaagcagggaagcaaagaccgtgcagcgcaacatagaggcctccacggccgatggcgatgctcaagatgaggttcactgctgggaactagaaggggagaaggaaaatgaaggcagggaagagcgagagaatggagacttaagaacatgtgttcaacaagattga

SEQ ID NO: 30518 - DNA, 294 bp, Zea mays
  Peptide Sequence Number=SeqID_72297
atggcgaggcttcaccttcactgctttgcttcacggtttcactgcttgcttgctttgcttcacggatggaggctagccggccaggagcctaggacctggaaggagcgcccgcggcggtgctccggcctccgggcgcgacacggcgcgaggcgagtgacggctaccggccaggagcccaggaccaggagggagcgcccgcggcgccacgggcccacggcggtgctcaggcctccggcctacgggcgtgagacggcgcgaggcgagtggcggctgccggctacagggaaggcgtag

SEQ ID NO: 30519 - DNA, 396 bp, Zea mays
  Peptide Sequence Number=SeqID_72298
gaaaaatttattcgcttaaatgccaatctggagaatttccggaaacaggctgaaaaggacggtgccaagtttacatcaaatatacgggtggatgttgtccagagcctgttacctctggttgatagttttgagaaaacgaaattagagaacaccccagggactgagaaggagcaaatggtcagcacaagctatcaaggcatatacaagcagttagttgaaacgctaagatatttgggtgtaggagttgtggaaacagttggcaatccgtttgatcctttggtccatgaggccatctcacgagaagcatccatgcaattcaaggcaggtattgtcatgcatgaagtccgcaaagggttccatttgaaggagaaggatgctaaaggcctgctactgtga

SEQ ID NO: 30520 - DNA, 159 bp, Zea mays
  Peptide Sequence Number=SeqID_72299
cctcggagcgaagacctactttgagccagatggaccatgttcttggtcgtcgaagcctgtggctcatgggcaaggagacctggaccgaggagttgtcgcggcagccgttatccaacacagccatagccaatgtgtcaccgcagtccaccgtgtgcagag

SEQ ID NO: 30521 - DNA, 294 bp, Zea mays
  Peptide Sequence Number=SeqID_72300
atggccgacaggttcaaggccattgatggcattcacggagcttcaatgagggacagagaaacggatgcattgaagttcattaacaccaaagacgaacggacggctgcggggtcggtgtcggttcctgcgggcgacttcgtggcggtcggggtcgcagtcgttggcggcctggtgcggtcggggcgtcgggatgcaggggctctgcttggggaaggccggttgggcgcggcgcttggccggtcggcttcggtcgtggcggcatcgcagctggcgtcctggcggcttcgctcgtag

SEQ ID NO: 30522 - DNA, 324 bp, Zea mays
  Peptide Sequence Number=SeqID_72301
atggtgaggatgagcaaggcgcatgaaagcatgggagagggttctaagatgtgggatcgtttgtggggctcggggaagtacttaaagaccaagagcggggtaggcaaggaagggaattggccgggattgatctggctggatctccatggccatggcaatatggtggcgttcatgcagaaggaaggagagcagggagagaaagaaagagagctcgaggaaaaggaaatgaggcttagtccgagcagggaaggtgatcacgtggtcggtcgtccacgcgtctttatagaattcatgagacatttagaaatagaatatcttatctaa

SEQ ID NO: 30523 - DNA, 120 bp, Zea mays
  Peptide Sequence Number=SeqID_72302
atgtcggttggcttgtggaaacccataggttcttttgctttgcggcatttatgttcatttgaacttagaagtgtggccctaaccatggttcctctaagtgtaattcttgtgccaatttga

SEQ ID NO: 30524 - DNA, 1446 bp, Zea mays
  Peptide Sequence Number=SeqID_72303
atggaacacaggcatttgttttgcgtggacgcgtggatctccaacggcagcgtcgctcgcgcaacggcggtgtttgatgagtaccggagagcgctctgcggcatcgtgagcgggttagctttgcattgcaactcaatttcaggaagccggcacgaagatggcggtgttcatgggctgcgacaacggagagatcgaggtcgggttgtcgtcgagcacctcggcgccagcggtggcgacccactgcaggactcgctcctggaggagctcatgcaggcagcgccaacggtgccttcgtcttcatcgtcctccatgccgtccctctccatcgggagccccgagtactcctcgctcatccgctcaatggccacatcgtctgctgccgcagcggctgccgccaccggcaccaccgagccatcttctcaacaacggcagctgcaccgggctgtgccgctgcccggcttggccgcgccggtgtacggcccacgcgggcaagcgccgttcctggaccccgacagcgagcaggctgcaatgacgcaggcgattctcgccgtcatctcctcctccgcgccgccaccgctagcgtccatagccgtgcctccggcgtcctctccatggctcgtccgccaccgggctcagcggtcgtcgccgcggcgttggaggggggcgttcagggcgtacaacgcggcgctctcgcccagggcgcggccacggcctggcgtgccggggcagaggatgatcaagacgtcgatcgcgctcatggtaagcttgcaaatggcaatgcgccaccgggagctcgcagaagcgcgccagcaacatgaagatgccgtcgccgccacgcagccgcccacgacgacgcagcagcagcacaccagcagccagcttcaccacatgttctcggaacggcgccggcgcgagcgcctgaacgagagcttccagaccctcagggcactgctccctcccggaacaaagaaggacaaggcaactgtccttgcgaacacgacggagtacatgaagaagctgatcgccgatgtgtcggagctcgaggagaggaaccggaggttggaggcgcagcttggcttgcccggcgagacccagcaaacgccgagcgacgacgacccgtcggaaagagtggccgttgatgtgaccaccggcgcatcgacctcgagttcaacgtcctgtcgacctcggcaagtgagtattagggtgacagcgcgggctgagtgcgatctgtcggaggttgtggtcgccatgctcgctcagattaaggagatggggcgcttcaccgtggtgaccgtcgatgctcggcagcggagcggcgcccatgcacaagtcgccatcatattgcaagccacgggtggcaacgacgatctggacgagacatccctcaaggaagctgtcgcgaaggctgtcgaggatgcggtggcaggaccttcatcgccgccgtag

SEQ ID NO: 30525 - DNA, 633 bp, Zea mays
  Peptide Sequence Number=SeqID_72304
atggaggcgccccctgccccaccccagggcatctcggctgcaggaggagctgatggagcagatcctgacagcaacggcgatggcggtggcagtttgagccacaacactatgctttctgaggatcgtgggttatacctggaccgctgggaggctacctgcttggtgcgccgaccagaggacgacctccggggtgcagaggtctgcttagagcattatcctatctctgagagggacactgtcgaggtagccatgcaggatgctgcacatcgtgcacttttgcagtattgcacgttgttcagtggggtggcttacggtcttaacctaaagtattacccctgccgctcaactagtagcactagaagtgtgattatctcaccgataggtgaagacaatcctaggttgaacagcgtagccaacctagtcgttgtggtcaacacggagctagaacactctcttgacgagctgagtagggctcgtgctgagatcacagagttgcggtgcgcagagcgccgtcatcaggagtatggttcttgtgcccttgctgggactcagcacccgtaccgctcaccgccacgagggtaccatgcttatggcaagcctgactgtagaaccaaactagatttggatcagtag

SEQ ID NO: 30526 - DNA, 1707 bp, Zea mays
  Peptide Sequence Number=SeqID_72305
atggagcgagtcgaggaggtggaggaggcggccgaggcaatggagcgagtcgaggaggtggaggagggcggcgaccccgccgaggcaatggagaggaggcggaggccgaagagaggatcgttgagtgaccgcctgcggcacgagccgagctacaagttcctgtccttcaactccgggcccaggagctgcatcggcaaggacgtcagcctcagcaacatgaagatcacggccgcgtccaccattcacaacttcaaggtcgagctgcttcaagaaagcggagcaatggagatggtgccatggcttctcggcttcctcggcaggtacccggagctcatggtgtccctcgcttgcttcctcctgctgtttcgtaggctgaaccagcgggacgggctgccgacgaactggccggtggttggcgcgctcccggcgatcaccgtcaatgccgggcgcatgcacgagtgggtgacggagttcctgcgcgccgcggggctgtcgtacgtcatgaagggcccgtggggatcgccggtggacgtgatcatgacggccgacccggccaacgtggcgcacgtgttcacgtccaacttcggcaactaccccaagggccaggagttcgccgcgctgttcgacgtgctcggcgacggcatcttcaacgccgacggcgagtcgtgggcgttccagaggcgcaaggcgcacgcgctgctgtcggacgcgcggttccgcgcgggggtcgccgccagcaccgcgcgcaagctccgcgacgctctcgtgccgctcctcgacggcatcgccgcgtcgggcgcggtggtggacctgcaggacgtgttcgtgcgcctcaccttcgatctcaccgccatgttcgtgttcggcatcgaccccggctgcctcgcccctgacttcccctacgtcccgttcgccgccgccatggacaccgtcgaggaggtcctgttctaccggcacgtcgcgcccgtgccgtggctgatgctccagaagtacctcaggactgggcacagcaagaagatgtggaacgctcgacgggtgctcgacgcgtccatcgccgagttcatctcgctccggcgagagcgcgccgccgaggccgaggccgaggccgacctgctcacgtcgtacctggcgtgccacgacgagataggcaagtccggcgccgagctcgagcggttcttgcgcgacaccacgcttaacctcatggtcgccggccgggacacgacgagctcggccttgacgtggttcttctggcttctgaccaagcacccggacgtggaggccaaggtcctcgaggagctccgcgcgcacccgccgttgtccggcgcgggaggccatcgcaccgcggctgagctgaagcagctggtgtacctgcacgcggcgctgtcggagtcgctccggctgtacccgccggcggtgtggggcaaggactgctcggagttccggccggagaggtggctgaccgcggcggggcggttccggcacgagccgtcgtacaagttcgtggcgttcaacgtggggccccggacgtgcctcggcagggacctggcgtactcccagatgaaggccgtggtcgccgccgtgctgccgcggttcagggtggaggtggacgccggcgccgtggtgcggcccaagttgtccatcatactccacatgaaggacggcctcaaggtgagggtgcacaagagagaagaagatggcctatgttaa

SEQ ID NO: 30527 - DNA, 318 bp, Zea mays
  Peptide Sequence Number=SeqID_72306
atgacggtgccagttctagaaacaaatgctacgaggagctattttcctccggtccccaactctagaaatcagagggcccagctagagctagttgctgctttgccattgcctttctccttctgggagaaactggagaaaattgcttctgaaggtcgccaagacagcaggagttcagaagcatcacaggtccagcgaccgcgttttcctcgctttgggtactacttgtatacacagattatcagtgccacagagagagcgataattgccagaactgtgaagatgagagcctgcaaggaacgatcaaagtgtggctgttag

SEQ ID NO: 30528 - DNA, 528 bp, Zea mays
  Peptide Sequence Number=SeqID_72307
atgggctcaatgtgttcgatgaaatcgcttacccaagttatcttatctaaggaagtactgcggcggacaggcaagaattggatgttggtatacctgtcatgtgtaaacatcagcatggggtgtgctggcaagtatgcactactcagagacgaagaaaacccacgattggcaatctttgagaggcggctgccttgctgtggttgtgggataggatggtctacttttcttttaggtttcttgtgtcctttgatttggtactttgcagccatactttactgctgcaagtactacaacaaggatcctcgagagcgccctggtctagctgcatcagctgttgcgaatttggggcctgggcgagtgtcagcgtttggggaagtcatacccctagatgctggtaaaacactctctagaacttcatcagtagaaggtagacctacaatggggctttggtgccagtctggcatccattgggccctgtgtcccgaggccatgccctacaagctgagggctttatgcaggaggccgtga

SEQ ID NO: 30529 - DNA, 1095 bp, Zea mays
  Peptide Sequence Number=SeqID_72308
atgctacgtgctgcaactgataactttgctgagagcaataggcttggtgaaggaggttttggtacagtctataagggtgtccttcctgacaaccaagaaattgcagtgaagaggctctcacagagctcagggcaaggaatacaagagctgaaaaatgagcttgttttggttgccaagcttcagcacaagaatcttgtcaggcttgttggtgtttgcttgcaagaatatgagaaactgcttgtgtatgaatacatgcccaacaaaagcatcgacaccattctttttgattctgagaaaagcaaggagctagattggggaaagagagttaagataatagatggaattgctcgagggttacagtatctccatgaagattctcagttgaagattattcaccgggaccttaaggcgagcaatgtccttttaaactctgattatactcctaagatatctgattttggcctagcaaggctatttggtggggatcaatcacgggaggtcacaaatcgagtcgtcggaacatatggatatatgtctccagagtatgccatgcgtggccactattctataaagtcagatgtcttcagcttcggcgtcttgatcctggaaatattaaccggaagaagcagcagtggttcctttaatatcgagcaatctgttgatctcttaagtcttgtaagacattacactatacccaaacctacaaaagtatttgcctcagaaatgataacaaaatttgcatttgacacaggtctgggagcactggacaatgggaacaattgtggagatcatggatccatctctgagaggcaaagctcctgcagaacagatgctgaaaaatgtccatatcgggctactgtgtgttcagataaccctgttgatagaccgaagatgtcaacagtaaacatcatgctcagcagtggcactatgcctctccagtctccattaaagccagcattcttcattcccaagagcggctactactcaactgttcattcagaatcatatcctatagcttcccgatccgtcgataatggcaagccaggggcgatatcaccaaacgaagtgtcaattacagagctggaaccaagatga

SEQ ID NO: 30530 - DNA, 562 bp, Zea mays
  Peptide Sequence Number=SeqID_72309
atggcgcctcctgttgacgtggctggtctgcgccctaggttgggcgatgtggaagctcctccgaagccgaggtcgagtctgtcttccgtggctgaggtcgagtccgagcccctgggtcgggcgaggcggaggccgtcggctgaggccagggcggagtccgagccctggggtcgggcgaagcggagttcgtcgtcttctggggctgagcccgagtccgagtcctgggttgggcggagcgaagttcgtcgccttccggggctgagcccgagtccgagccctgggtcgggcggagcggagttcgccgtcttccgggacttagcccgagtccgagccctaggtcgggcggagcggagcggcgctgtccttctgtcaggccggtcagtggagcagcgaagtgacggcggtcacttcgtctctgccggctggggggtgcgcgtcaggataaagggcctcgggcgagccggaaatatgttcgtcgttggaggggggcctcgggcgagacagaaatcctctgggctttatgctgatgggagttaccagctgagaattaggagccttgagg

SEQ ID NO: 30531 - DNA, 465 bp, Zea mays
  Peptide Sequence Number=SeqID_72310
atgcctgatatgactgatgcatctttcaatagcttattgcagcaaatgtattccatcgagatctcaaaccaaaaaatattctggcaaatgctgattgattatgttgcaactaggtggtaccgagcaccggagctgtgtggatcatttttctcaaaggcaagagattgtgtcctctgtttttatgcaacccaaataaacaaagcatgtccatctttaaaaagcagaggaagtgggaggcgagaggaccagaggcatatccggttggaggacaaggcggatacccaggacgtcaaaggcagacaccatatgggatcaagtcatggtgaccttgatgaccagactttgggtttgtttggttcaactttttttctgacgagcttttatgagaatccagattcttggagaatttggctgtggggagaatctgaacatcgtgggggcttacgtgcagaggaagatgaatag

SEQ ID NO: 30532 - DNA, 231 bp, Zea mays
  Peptide Sequence Number=SeqID_72311
atggcggcggcggttgagagcgtggtggtggtccataacgtggcgaagcggcacaacgtggggacgctggcgcggagcgcgacggcgttcggcgtcgcggaggtggtcgtcgtcggccgccgcgatgatgagagaggatgtgacatttgcggcgtggaaatcaccgacgacgcgcagccggtgaccgcccacccgttccgtcggagcactgcgttcctcttcggcaatgag

SEQ ID NO: 30533 - DNA, 318 bp, Zea mays
  Peptide Sequence Number=SeqID_72312
atgacgagtactcacctttactgttcgacgacagcattagcaaagctcgcgggttgtgcctactggagaatacgccggcatcggaaggcaggccagtgggggactgacggtgggaggcgcaacaatccggtggcggagtccgacagcgctgacggaggccagcacgctggagagcaggccagtaggggactgacgacgaaaggcagtccgaggattaacatcggagggaaaaattcaaatgcatctcacatgtgtgtcaggctcaagttcacatatataataactcgttgtacagaaatcaatgtcacaatcttttag

SEQ ID NO: 30534 - DNA, 243 bp, Zea mays
  Peptide Sequence Number=SeqID_72313
atggaagaacctgatggctccatcaagctgcataagaagaagggtgacaagaagaaaaacaagatggtctactacgagaccaactcatccacgccctcaacctccgacgccgaatcaacatcttcaaagcgccaagagcgcaagaactctagtcttggtgttcgtctttgggtaccacctaagaacagaagcaacaaaaatttgtcgcttcctcacctaaaacaacgtgggacaaagccctaa

SEQ ID NO: 30535 - DNA, 486 bp, Zea mays
  Peptide Sequence Number=SeqID_72314
atgggcctcaatatggaagcaggcctcctccacgccgagttctccctgcagccgctgtccctgaaccgtgaccgcgcgagctacctcgtcaacatggcggcttttgagctctgcactgtacaaagctttggagcagcaccggacgaagactctgctgtctgctcctacctgctgctcctggccatgttggcgtacagggaggaggacgtgcacgagctacgggtgaggggtctcctgcagggaggaggtgggctcaccaacgaggacgcgctccgcttcttcaccagcctccagggtctacgcctcgggaaacgctacctccacgtcatgcaacagatcgcgaggtaccaggagaacaggccaaaacggaccaagtggaacgagttttggtatcacaacaagaaaatcgtcacaacagtttttgcctgccttgtttcacttgccggtatcacagggacacttgtgtctatcaagaacgccctttaa

SEQ ID NO: 30536 - DNA, 150 bp, Zea mays
  Peptide Sequence Number=SeqID_72315
atggccatgatcagtgatctggaggttttccaggcgtacgagagggagagttacaacaagctgattgccgacatcgaggcccagcccagcaaggcagtccagagtgttttgaagtccttccttcacaagatctacaagagggacaagtaa

SEQ ID NO: 30537 - DNA, 276 bp, Zea mays
  Peptide Sequence Number=SeqID_72316
atggccggcgcggtgtcggcgctcttcctgctggacatgaagggccgcgttctcgtctggcgcgactaccgcggcgatgtctccgcgctccaggccgagcgcttcttcaccaagctcctcgacaaggagcacaacaatgtcttcctcctcaccgccgctcgccagaactgtaacgcggccagcatcctcctcttcctccaccgtgtaatagatgtgtttaagcactacttcgaggagctggaggaagagtcgctcagagataacttcgtcgttgtg

SEQ ID NO: 30538 - DNA, 1977 bp, Zea mays
  Peptide Sequence Number=SeqID_72317
atggacgccgccgtgtggggaggggcgaacgtcggccccgccaataggattcctaagattcgacggagtggagctgcggtagttccacaggccaaggaactggcctccaaggtcagaggtcagaatctttcgtctagccaaccaggcccgcttgtccgcccccgacagcgacaccaaccagctcgcaaacataagtcccgcgacgcccgggcaagagcagcaccggtgaagagcgctccgctgccgtgcgcgcccccgcgccggcctcccactggatcgctccacctcatgctccaaatctttattggtttccacgttgccccctcgccgtccccaaccatcgaccgcgccgcgcccgctgccgcctcccagctcgctctatataaacaccacgcgagcggtgacatggcggagggggagttcaagcccgcggcgatgcaggtggaggctcctgccgaggcggcggcggcgccgtccaagccgcggttcaggatgcccgtcgactccgacaacaaggccaccgagttctggctcttctccttcgcgaggccgcacatgagcgccttccacatgtcgtggttctccttcttctgctgcttcctctccaccttcgcggcgccgccgctgctcccgctcatccgggacacgctggggctcacggccacggacatcggcaacgccgggatcgcctccgtgtccggcgcggtcttcgcgcgcgtggccatgggcacggcgtgcgacctggtgggcccgcgcctggcgtccgcggccatcatactcctcaccacgcccgccgtctactactccgccgtcatcgactccgcctcgtcctacctgctcgtgcgcttcttcacgggcttctcgctcgcgtccttcgtgtccacgcagttctggatgagctccatgttctctccgcccaaggtggggctggccaacggcgtcgccggggggtggggcaacctcggcggcggcgccacgctgtcggccgtcgccgtgctggcgttcgacaaggacatgcccgacggcaactaccgcaagctgcacagctcgccgtggacaaacatcgtcgcgcagtacttctacgaccgcttcggcgtcaagctcagcaccgccggcttcatcgccgccagcttcgggatggccaacatcgtctcccgccccggcggcggcctcctgtcggactggctctccagccgcttcggcatgcgcggcaggctgtggggcctgtgggtggtgcagaccatcgggggcgtcctctgcgtcgtgctcggcgccgtcgactactccttcgccgcgtccgtggccgtcatgatactcttctccatgttcgtgcaggcggcctgcgggctcacctttggcatcgtcccgttcgtctcccgaaggtcgctggggctcatctccggcatgaccggcggcggcggcaacgtgggcgccgtgctcacgcagctcatcttcttccacggatccaagtacaagacggagacggggatcaagtacatggggttcatgatcatcgcctgcacgttgcccatcacgctcatctacttcccgcagtggggcggcatgttcctggggccgcggcccggggcgacggcggaggactactacaaccgggagtggacagcgcacgagtgcgacaagggtttcaacaccgcgagcgtacgctttgcggagaacagcgtgcgggaagggggacgctcgggcagccagtccaagcacactactgtgcccgtcgagtcctcgccggccgacgtcctcgggcgcgatagggagctccgcctcgcccgacctcaggcctcggcctcagccttggcctcgggagaaggtctgcgcctcgcccgaccccaggcctcggcctcgggaggagtcacatcctcgcccgacctcggcctcggcctcaggagaagtctccgcctcgcccgacctcggcctcggaccgactacgctacaggggatacatcattaccctacccgtag

SEQ ID NO: 30539 - DNA, 243 bp, Zea mays
  Peptide Sequence Number=SeqID_72318
atggccctccagccccagctcgcccctgccctcagctatggcgccttgccgccgccgcccctgctttccatggcggcacttcctgcttcctggtggtcggcgccctccccaacctctctgctgcagtataatggcgttcataatttgtcggggaccataattagtggtaccctcaaggctcctaattctcagctggtaacccccatcagcataaagttgcaaaggcctgatgtgcgcgattaa

SEQ ID NO: 30540 - DNA, 543 bp, Zea mays
  Peptide Sequence Number=SeqID_72319
atgagagagttggggtcctctctctccccgccgtctgtaaccgtgctcaccatcgcagcccacgagctccgctgccggtgcgctccatacgacggctacaatggagacgacgacttcgagctcacgcctctccttttcaggacccggcgcagcgcgcgcaccgagcgtccaagaatcgtcgccgtccaggtcgcggccattacggtcgcccagccgcagcctccccagcgccctcgccgcggagcgccaagcggcgtcgcggcggtggcggccacgccggcgccagcgccacaaaggaagaagcagcagcagcaggtgcggtggcacgacatggcgttcgggaccgtgcgcctgccggcggccacgagcatgggcgagatcaggaggcgcttgagggcgcggcaggctctgcaggctggcggcgccgcgaacgagccgtcctcctccgccgcggcgtgggcaccatggaggctcatacggtcgctgagctgcaggggcgtcgaggccgtgtcggctgccgcggcgccggtcaggctggtctag

SEQ ID NO: 30541 - DNA, 1332 bp, Zea mays
  Peptide Sequence Number=SeqID_72320
cgcctgctctctatctcctcctcctcgccgctgcccaggtcaccaccgtcgaccaccgtctgcactgctgcatcgagctgccccagcttgtgctgctccgtcctccctctggataagggcaaggcagtataccttgagcaacaagggggcaagaagaagaggcggttggatagagccacccgtgcagcagttgccacagcagcagcggcagatcaggcagagcagggaggtcagctgaggatttcctccgatcagatcgccttcctagttcatcgcctctcgtctcgaacttactcctccactgctcggtccactccctcagacccagtcaccactccacctcccacttctccagctcctgccactcacgagaattctaccacacctgctgcgcccaccacctccaccacaccagcttccactgcccctgctcccatttccgctccacccattcctccacctcgcttccgggagcgtgatgagactgaggtgcgacctcttgctgttgatcctccggtcggtgcagagtcagagggtcatatcacttatctggatggcttatattccttgctgaccttcggtggcagatatgttgaggagtggatcagagtgttttatgccacagtttggatcgacccagatcatcagtggatgaggtttaggtttgagcgtgactatgtgactttgcatgctgctcagatcagagagctatttggattccctgagtcgtcgacgaggcttcaaatctttaatgtggttgattttctgatctgtgcgatcgaagacactatgttggatggtctccatgctcggcgtcagctgccctacgctcactatctctgccacatctttgctcagctgatccagcctcttcagttccaggctcctcttgaggcctcgagacttcagtttggtttctaccgcccagctcctgaggacactgctccagctctagttgatccactagcaccgaatttcagggttgaggacaaggccatcagacagtttgaggatcagggtgcaactgcagagacttcttccgatgatgatgaggatccgaggattccgctgccacctcccgtgccacctcgttcccatgatcacgaggctggtggctctagtgctactccttcggctactcctccaatgattgaccctactttggctaagatccttcagtcacttactcagcagcaggctcacatggcagtagagcaggcccgtcaggcagccgagcaggccagacgggcagctattcaacatcagttatctgagcagatgccggtcaccctggacttctcgacccaggtggtcggaccagtcaacacttaa

SEQ ID NO: 30542 - DNA, 408 bp, Zea mays
  Peptide Sequence Number=SeqID_72321
atggcggaggatttacaggaaatcaatcaccgtcgccggttcagcgcggcaaacggtgagatctcacaaaccaaggcctgtgtcggtgccgatcgacggagtagcggagcatcgggcgtgccaagccgaggaacgaaggtctttgataccaactgtcatgaccccgtggcagccgcacactgcgaacgacgtgagaaaggaagaatgcgtggggaagaagatatcgtcaggaacgggcgtgacaccgcaccacaacatcaccgcagaatagaatggaatatggtttggagccctagggcgcgaatcgagtatcccatccatggcaccgccgtggatgtcagggcgccgccgccatggttcgattgggcgatgaacataaggtaccagtttagatgcgatcggatctaa

SEQ ID NO: 30543 - DNA, 360 bp, Zea mays
  Peptide Sequence Number=SeqID_72322
atggagcgcgacccgcccaaccaggacgaggacgacgaccagcccgcgaagtggatcgcgcatgctgcccgcctcccccggcgtcgccgtgtccaaatcggcaccgcgagctcgctccaacttggaacgtggctgagccggcgcccgcccggggacgagcttttttgctggattgaaagcagctgtccgtcgcacgtaaagacggcagcaaaagcagctcccgtgtttcccggtcttgaccccgcgcggcggaccaggtcggcggtgtgcgtgtgcgtgcatgggccgccccgcgccgcccgtgtcggtgggagctgggaggaggaggaaacaaacagcgccgcgcagcgcagggcctga

SEQ ID NO: 30544 - DNA, 1806 bp, Zea mays
  Peptide Sequence Number=SeqID_72323
atgccgttcggcttgaggaatgcgggcgcgacgtaccaacggtgcatgaaccatgtgttcggcgaacacattggccggacggtcgaggcctacgtcgatgacatcgtagtcaagacgaggaaagcctccgacctcctttccgaccttgaagtgacattccgatgtctcaaggcgaaaggcgtgaagctcaatcccgaaaagtgtgtcttcggggtgccccgaggcatgctcttgcggttcatcgtctccgagcggggcatcgaagccaacccggagaagatcgcagccatcaccagcatggggcccatcaaagacttaaaaggcatacagagggtcatgggatgtctcgcggctctaagccgcttcatctcacgcctcggcaaaagaggtctgcctctgtaccgcctcttaaggaaggctgagtgcttcacttggacccctgaggccgaggaagccctcgggaacctaaaggcgctcctcacgaatgcgcctatcttggtgcccccagctgccggagaagccctcctgatctacgtcgccgcaaccactcaggtggttagcgccgtgattgtggtcgagaggcaagaagaggggcatgcattgcccgttcagaggccagtctacttcgtcagcgaggtactgtccgaaaccaagatccgctacccacaagttcagaagctgctgtacgcggtgatcctgacacggcggaagctgcgacactacttcgagtctcatccggtaactgtggtggcatccttccccctgggggagatcatccagtgccgagaggcctcgggcaggattgcaaagtgggcggtggaaattatgggcgaagcaatctcgttcgcccctcggaaggccatcaagtcccaggtcttggtggacttcgtggctgaatgggtcgatacccagctcccaacagctctgatccaaccggagctctggaccatgttcttcgacgggtcgttgatgaagacaggagccggcgcaggcctactcttcatctcgcccctcgggaagcacctacactacgtgctacgcctacatttcccggcgtccaacaatgtggctgagtacgaggctctggtcaacaggttgcggatcgccatcgagctaggggtccgatgcctcgacgctcgcggtgactcgcagctcgtcatcgaccaagtcatgaagaactcccactgccgcgacccgaagatggaggcctactgcgatgaggttcggcgcctggaagacaagttctacgggctcgagctcaaccacatcgcccggcgctacaacgagactgcggatgagctggctaaaatagcctcggggcgaacaacggttcccctggacgtcttctcccgagacctgcatcaaccctccatcaagatcgacgacacgcccgagcccgaggcaccctcagctcggcccgaggcaccctcggttcagcccgaggcacccatggcccccgagggtgaggcactgcgcgtcgaggaggagcgaagcggggtcacgcctaatcaaaactggcagaccccgtacctgcaatatctccaccgaggagagctgcccctcgaccgagccgaggctcggcggttggcgcgacgcgccaagtcgttcgtcttgctgggagatgggaaggagctctaccaccgcagcccctcgggcatcctccagcgatgcatctccgtcaccgaaggtcaggaactcctacgagagatacactcgggggcttgcggccatcacgcagcgcctcgagcccttgtcggaaacgctttccggcaaggattctactggccgatggcggtggccgactga

SEQ ID NO: 30545 - DNA, 342 bp, Zea mays
  Peptide Sequence Number=SeqID_72324
atggccctcttacagagggttggccgcgcggggacgaggacgagacaggcgctcactcgacttgagagggtttcagaggaggcgcacagtagccgactgcagttgtgtggcaacggacagacacgcacctttctatcctcttctttggccatgacaactgacaaggtgaactggtctctctgcagaaaccaaagcaaaggtgacgtggacttgaaagagctgcctgtactacacgtcctctggaacgaaagcgccggctatgcatggattcccaaggagcagagcgctgcagcagccctgcaggtgcatgggcaaagccgggttcggaacgacgaagcataa

SEQ ID NO: 30546 - DNA, 297 bp, Zea mays
  Peptide Sequence Number=SeqID_72325
atgcaggcggcatgcaaccgcgccaagtgggcgcacttctccgacttccaacgcgcccagcatggaggcccaggcccacacgtcatgcaaccggcgcgccggatgctgcgtgcgagcgactgcaccgccacccgcgccactaccgcgcctcctcgactgcggaaccaatgccgcggctcgaggcgacccagcacacgacccggcagcgccagcctggcgcgacgggaccgggaaagggggataccccgaaaaggatccttctccgtgaaggaaccaggctccgagcctccctactga

SEQ ID NO: 30547 - DNA, 1044 bp, Zea mays
  Peptide Sequence Number=SeqID_72326
atggacccggaccgcaaggttaccagagtcaagcgaggggcgcccggggtcgaacatagcggggggagacggcggtgtcaatgcggcagcgtccatgttgtttcgagaagacgacccggagtacgccgagacgctgctcacgagcgcaagggaaggcgttcgagttcgcggacacgtacaagggcgcgtacagcgacgacccggacctcagggcagggggctgccccttctactgcgacttcaaatggctaccaggacgagctgctgtggggggcagcatggctgaggagagcctccaaggatgacacgttcctccagtacattcagaacaacggcaagaccctgggtgcagaggacagcagcaacgagttcgggtgggacaacaagcatgccggcctcaacgtcctcgtctccaaggagttcatagaaggcgccgcgctgcctttgcagtcgtacaaggagttcgcggacagcttcgtatgcacgctcatcccggagtcgtcttcttccccgcacatcacgtacacccccgggggcatgatctacaagcctggaggcagcaacatgcagcacgtcacctccatctctttcctgctcctgacctacgccaagtacctctccaagtcctctcataccgtcgactgcggagacgtttcagttggccctgaaactcttcagctgcaagccaaaagacaggtcgattacctgctaggagacaacccgatgaagatgtcgtacatgatcgggtacggcgaccggtacccgcagcggatccaccaccgggcctcgtcgttgccctcgatcagggaccatcctcagccgatggcgtgcaaggaaggcacgccgtacttcaactcatccggtgcgaatcctaacccgctggtcggcgcggtggtcggcgggccgggggaggacgacgcttacgaggatgaccgtgcggatttcagaaaatctgagcccaccacctacatcaacgctcccttggtaggggtccttgcgtacttcgttggcaacccgaatcctggtcataacaccagacattga

SEQ ID NO: 30548 - DNA, 1400 bp, Zea mays
  Peptide Sequence Number=SeqID_72327
atggaggcgcgggcagcgtcggtcccggacctttcgctgcacatcagccttccgagcagcgccgcgtctccgtctcccgccccggggctgggcgctggaggagtagggcgtggtgcgcagccgtccggaggggacccgtggcgccgtctgaacggatccacggcgtcgaccgagctgtcgctctcgccgccgccgccgcggcaggaggcggctgccggggacgtccttccatggcggctccggccgccagcggcgaattactcctcgtccaccgcggaggcaacgttcttgccggtgaccgtgccgcggctttcgttcgacgccgcggcggaggcggcgccggcaaggccaatcaacggagtgcccgtctacagcagcccgcggaccggcgccgcccatccttttcttggcgccggcggcgaataccggcagtgccaccaccacaaggccgccgtgggggctatacaatccctaccactcctcgtcgtcgtggccctcgtccctgcggtcgacgacgacggcgccccttggcgccgtggcgccgccggcgtccgaccccacggcgtcgtcggcgtgctcgccgacacgctccgcggctacggcagcgggcaccaccaccgccagcacttgggcagcctggccgcggcccgctacatgccgaggctcccggcttcccggcgcggcatgcgcgcgccgcggatgcggtggacgagcagcctgcacgcgcgtttcgtccacgccgtcgagctcctcggcggccacgagcgggcgacgcccaagtcggtgctggagctgatggacgtgaaggatctgacgctagcgcatgtgaagagtcatttgcaggttgagttccggccgatgaggaccgtgaagagcactgataagccgcctgcagcaacctcatcaggagggggagggccgcctgtggacggtggtggcgggtccggcgacgacgaccacccgagcgattggcggcgggctccatcctcatcagctggtcgggacgtcagcccgcaggcgttcactggacaccggtcagcctcctcggacggcgcggcaagccatgcgggcggcgacgttgaatgctcctccgccgacgattccgacggtggcaggccgcgcagtgcttctccgccaagggaaggagccacccttgcagcgaggttgcggaccgttcgtgccgccgcagagggcatcgccaggcggtacaccgctagggacgaaggttgcagatctacaaaaatctcaagaaaaggtctcaacgttgtttctccagacagtgacacaaggttgactaatttaccgatcgctaagcatgaggaattagaagactacagggagaaggtggacgaggagttccagcaacaaaaagctcagtggcgcgaggtggctgagaagtg

SEQ ID NO: 30549 - DNA, 402 bp, Zea mays
  Peptide Sequence Number=SeqID_72328
atggcagagccaccagatacgccagctaccaagtcgtggtcacatcttgcagccccacgtgccatggagacaccagcacctccgttgagaaatcgttgctccgcggcgcagctagatttgaagcaaaaggcatttagtcctagccactcgggcccacctatcatccactccagagagagcttcttctatgctggtctagcaaagaacacaagtgggtggaggtcacggctgcaaagccaatggagcgtggagaagggaaggagaagctgtgcgacagagacggtgccggggcttggaggttgtggccgacggctggagatggtggattggtggccggcgttggaggaggctgacggcgctggggaagacgagcaaccggagcaaagcaggggcgagctctag

SEQ ID NO: 30550 - DNA, 405 bp, Zea mays
  Peptide Sequence Number=SeqID_72329
atgcagcttttatttttccagaccacagtgaacgcgcctcaccgtagaagtattcaacgtactccgtggaatgggatcgaaggaaactgtgcaatgtggatgagggtgaagcaaaagatcgttcagctctgcaggcagttgaacaagccggtcatcgtcgcctcccagctcctcgagtcgatgatagagtaccccacgcccaccagggccgaggtcgcggacgtctccgaagccgtccgccagcgcgtcgacgccctgatgctttccggtgagtcggcaatggctgaacctgcagtgggatctgacagaggagggaggaaggaaatggcgctgcatgcgagaggaagacagagaaggaggagaaatgggaaacagacggcgtgcgttgaggccgtaagggcataa

SEQ ID NO: 30551 - DNA, 720 bp, Zea mays
  Peptide Sequence Number=SeqID_72330
atggcgagcaccgagaagggcacggaagagggaggggtaggcgatgggcttcacctcatagcgatgaaccacatagggagcgtgaacttcggcggtgtggctgcgcagcggctcaatggcggcctgggctggttcgaccgggcttcggccacggcgagcgagcgccgcgccgagcacggcaagaggcgaggagggaagaatcgcgggcgtagcttgctccaggcggcggcgaggcttgacggtgagaagagtgaggaaccgcacggggtggctgaggggctaacttcaatggttatcctcaaccttgcgccgaacggcgaggagaggccgggggttcggcgcggcggctcgggcgacgttcacgatggcggacggtccggcgagctcgggcaaggcatggccgaggcaggggctcggaatggtagggctcggtgcagccgtggatggtctgggcggggcttggacagtccagcgagctccggcgtgggcgtgggcgtggccgggagtgggggcaacagcgacggcttggaatgggagatgatggcgagctcggcaggggagagggagagggtcggcttgtcgttttatagagggagaggggaagggttcatggtgccgagggagggaggtggtcggcggccatcaaggccattaatggtgtcggttaatgggagagttataatgggagaggaggggagaagaaggggtggtcatttctag

SEQ ID NO: 30552 - DNA, 234 bp, Zea mays
  Peptide Sequence Number=SeqID_72331
atggcgagcactgagaagggcacggaaaagagaggggtaggcgatgggcttcacctcacatcgatgaaccacagagggagcgcgaactttggcggcgtggctgcgcagcggctcaacggcggcctgggctgtttcgaccgggcttcggccacggcgagcgagcgccgcgccgagcacggcaagaggcgaggagggtatggatggagagaggaagatgatgcccaaataacttaa

SEQ ID NO: 30553 - DNA, 291 bp, Zea mays
  Peptide Sequence Number=SeqID_72332
tgccaacacaagcgcttttgtgttaatctatgcaaagtggtggacaaagtgcaaatcaagtcaaaagccaagtctgcgcagtctgggtgcaccggactgtccggtggtgcaccggactgtccggtggtgcaccggacagtgtccggcgaagtcatcggcctcgggaagccatcaacggcgtacggctataattcaccggactgttcggtgaggcaccggactgtccggatcaccttttcacgccccccctctaggtgctctcaattggtatcaaagccattctcttcatga

SEQ ID NO: 30554 - DNA, 345 bp, Zea mays
  Peptide Sequence Number=SeqID_72333
atgtgcgcgacgcaacggggaggtagcgagctggagctcctgctggctgtgcacgtgagagggagggggaagtggcgtgtaggtggaagaagccggaagagaggttcggcttttaaagggcaccatcgcgggtcgcggctgctactgatcaagaggggcggcgtcgaccattggtgcagggctgcggcacctgccggttggctatggccgctggccaagctcccacgcggttggctgctctacgccctgacaggagcttgcatgcagcgaggagccgaggaggtctgcgtgcgtgagcaggtttacgctcgtgacccgagttataaaaattcgagggctttctaa

SEQ ID NO: 30555 - DNA, 1017 bp, Zea mays
  Peptide Sequence Number=SeqID_72334
atgccgctctcgtcgggggcctacaccggcacgggccagtacttcgtgcgcttccgcgtgggcacccccgcgcagccgttcgtgctggtggcggacaccggcagcgacctcacctgggtcaagtgccgcggcgctgctggaccaccggcttcggacccgccggcgcgcgagttccgcgcctccgagtccaggtcgtgggcgcccctcgcgtgctcctccgacacctgcacctcctacgtgcccttctctctcgccaactgctcgtcgccggctagtccctgcgcctacgactaccggtacaaggacggctccgcggcgcgcggcgtggtgggcaccgacgcggccaccatcgcgctgtcggggagcgggagcgaggacggcagcggcggcggcggcaggcgcgcgaagctgcagggcgtggttctgggctgcaccgccacgtacgacgggcagagcttccagtcctcggacggggtgctgagcctgggcaacagcaacatctcgttcgcgtcccgcgccgccgcgcgcttcgggggccgcttctcctactgcctcgtggaccacctggccccgcgcaacgccagcagctacctcaccttcggcccggggcccgagggcggcggcgccccccgccgcggcggacgccgctggtgctcgaccgccggcctcaccgtcctcgccaccccggcgtaccgggccgtggtcgccgcgctcggcgggcgcctcgccgcgctgcccagggtcgccatggacccgttcgagtactgctacaactggaccgccggcgcgccggagatccccaagctggaggtaagcttcgccgggtcggcgcggctggagccccccgccaagagctacgtcatcgacgcggcgccaggggtgaagtgcatcggcgtgcaggagggcgcgtggccaggggtgtcggtcatcggcaacatcctgcagcaggagcacctctgggagttcgacctcagggaccgctggctccggttcaagcacacgcgctgcgccctatga

SEQ ID NO: 30556 - DNA, 354 bp, Zea mays
  Peptide Sequence Number=SeqID_72335
atggatttggatctgtggatctccaaggtcaaggagggtcagcacctcgccgagcacgagcttcagtccctctgcgaatatgtgaaggagatcctcatcgaagagtcgaacgtgcaaccagtgaacagccccgtgacggtttgcggtgatatccatgggcagttccatgacctaatgaagctcttcgcgacgggtggccacgtcccagagacgaactatattttcatggtgcggccttttcctttgtcgctttttcatggaagccgtggttgttggaagggtgattttgtggaccgtggcttcaatagtctagaggttttcaccatcctattgctactaaaagcgagggtttga

SEQ ID NO: 30557 - DNA, 207 bp, Zea mays
  Peptide Sequence Number=SeqID_72336
atggcggcggaggtgtcggatgaggaggatgtggcggcgggacgataccctctggatgaatccgtaggcgagcagcgcatggacagagtggccgaggatgtccgtgagtccgtggccagacgcgtatccctatcatggcggaggaagacaaacaacgatccagaggagggagacgacgatggaggcaggaggctagcgtggaggtga

SEQ ID NO: 30558 - DNA, 182 bp, Zea mays
  Peptide Sequence Number=SeqID_72337
gacgccgaggccggggagttcctgcagggcggcgcccgcgggcgcgcaatggggcgggaggggacgcggccctcgccgcgtgtcggccggactgcctcgccgccggcgtcggatcgggggcggaggaactggttttggcgaaaccaaaatggtttcgtcacgccgatcctaccaggtggcag

SEQ ID NO: 30559 - DNA, 225 bp, Zea mays
  Peptide Sequence Number=SeqID_72338
atggatctattcggcccaatagcttacaaaaccatcgtcgggagaaaaatcacaaacccaagagactttgaagggattcttgagacgggctctgtcggcgtttccaacccgggggtccctggaccgacgagtaaattgtcgccgcatgccccagcccagatgggtcagcgcgagacgaagcgcgaaggggggaagaagccggagggagacaggcgtgagaggtga

SEQ ID NO: 30560 - DNA, 255 bp, Zea mays
  Peptide Sequence Number=SeqID_72339
atgtcatccgaggcggtgaaggtgacaatgctagaatcgatgttccgcagacggaagcgtgaggagcagtgggctgtcaagaagaagaaggccatgcccgagaagaagaagtccatcgagagacgcaagctcatattcagtcgtgcaaagcggtgggtagtagggcttgtgtgtggcatgccattttcgtccttatggccagtggaatctaggtttgattgggttggtccatggctttacgttgatccgagatga

SEQ ID NO: 30561 - DNA, 858 bp, Zea mays
  Peptide Sequence Number=SeqID_72340
atggcgcggcacgcgggcacggcgctcctggacctggtggcggggcaggtggacccgggcgcgccggggttctggcgcgacttcctggtcggcatgctcaagccggcggcggccacggccgtggtggccatggccgtcgggctcagcttctcgcagcgcctgggggctcgagggcgagatgctctacgccatcgcacgcgccttcctccagctctccgccatcggcttcgtcctccagttcatcttcgcccagaagaacgcgctctggatcctcctcgcctacctcttcatggtatgtatgtgacggtcgccgggtacacggcggggcagcgcgccaggcaggtgccgcgcgggaagcgcatcgcctgcgtctccatcctcgtcggcaccgccgtcaccatgctcctgctcgtcctcctcgacgtcttccccttcaccccgcgctacatcatccccgtcgccggcatgatggtcggcaacgccatgaccgtcaccggcgtcaccatgaagaagctccgggaggacgtcaagatccagaggaacctggtggagacggcgctggcgctgggcgcgacgccgcggcaggcgacgctgcagcaggtgaagcggtcgctggtcatcgcgctgtccccggtgatcgacagcgccaagacggtggggctcatcgcgctgccgggcgccatgacggggctcatcatgggcggcgcgtcgccgctggaggccatccagctgcagatcgtcgtcatgaacatgctcatgggcgcctccaccgtcagcagcatcctctccacctacctctgctggccggccttcttcaccaaggccttccagctcgacgacagggtctttgcagactaa

SEQ ID NO: 30562 - DNA, 264 bp, Zea mays
  Peptide Sequence Number=SeqID_72341
atggcgctcgcggcccacgcctccctcctgcagccgaagatcaccgcgtctgtgccgatcggggagaaaggaagcgagacgcatggggccgccgcacagggcctcgtctgcgtaggcatgcccgcctggttgcggtccgcccaagccatagccggtgatgagcaagctcatccgcccgaggccggaatacttcatcaattcgacgccggtgagttgttctgtttggtgtcctactggttcgatgagtcgcgatgcgcagggtag

SEQ ID NO: 30563 - DNA, 459 bp, Zea mays
  Peptide Sequence Number=SeqID_72342
atgggcaagggcaggaggggtagaggcttgcctcgctgtgccggcagcaagcgtaagcgtgcttcgagtcctccttcggaggacttcaatgattcaaaggggctgtccaccgcagtccgggcgtactggcgtgccatcgagcgcgtcgggctcggtgggtcggatgagtcgggaatctcctcggatgaggtggacttgtccgactcctccgaggagtggagcggcggtgacggtgacggcaagggcgacggcagcagcaacgacgatgacggaggcgacggaagcagtggtcatgatgaaggaggcgacgacggcagcatcaacgacgatggcggcaagggcgacgatagcaagggcggcgatggtgacggcagcagcgacagtggcaagggtgacagcggcaatggcggcggcagtagcagcaagaccagtgtcgcaatgccactggttaaatattag

SEQ ID NO: 30564 - DNA, 126 bp, Zea mays
  Peptide Sequence Number=SeqID_72343
atggggaaagggtacccgacatccggctttataaatactagcgatcggtccagggaaagcggcaacagaaccccggttcagcgtgagaatcgcgacattggtagcggtggcccggacacgagataa

SEQ ID NO: 30565 - DNA, 732 bp, Zea mays
  Peptide Sequence Number=SeqID_72344
atggcgcctcctgtcgacgtggtcggtccgtgccctaggttgggcgatgtggaggctcctccgaggtcgaggtcgagtctgtcttccgaggccgaggtcgagtccgagcccctgggtcgagcgaggcggagaccgtcggctgaagccagagctgagtccgagccctggggtcgggcgaagcggagttcgtcgtcttccggggctgagcccgagtccgagccctggggtcgggcggagcggagttcgtcgtcttcctgggctaagcccgagtccgagccctggggtcgggcggagcgaagttcgtcgtcttccggggctgagcccgagtccgagccctgggtcgggcggagcggagttcgtcgtcttccggggctaagcccgagtccgagccctggggtcgggcggagcggagttcgtcgtcttccggggctgagcccgagtccgagccctagggtcgggcggagcggacctcactctgccgagtggcacagcagtcggtgcggcgcaggcggcgctgtcctcttgtcagagcgatcagtggagcggcgaagtgactgcggtcacttcggctctgtcgactggagggcgtgcgtcaggataaagctttgtgctgatgggggttaccagctgagatttagaagccttgagggtacccctaattatggtccccgacaggttgtcttcaagacaattatgaccttaagggttgatggatacgagaaacagtcgtga

SEQ ID NO: 30566 - DNA, 831 bp, Zea mays
  Peptide Sequence Number=SeqID_72345
atggctcctctgctcctgctcctgctcctcttccccgtccagctccagctcctgctcctcctagccgtagccgacgccgtccccggtctctgcgccagagccacatgcgccggccatgtcatccagtacccgttctggctcaactcctcggcgcccgactgcggccaccgccacgggatcggccttgtctgcgagggcaactcgacgctgaccctcccctacatgtcccacagatacgtagtgtccagcatcgactacaagacgcgtaccgtgctggtctcggacgccgacatcggcgacgagtacgacgcggccggctgcccgcgtgtccgggtgaacctcaccatcgacaccgcctggctgcggcccgcggcctccgacgccaacatcaccttcctgtacgactgcaagaagagcatcaccctgccctccgccgtggaactgagtgggtgccattggcaacagcagcagcagcaacaggattattgccgtaggtcgtacgtgctgccggacggcgggatcacgggcgcggaggcgcaccagtacgggtgcgaggacgtggtggtggcgccggtgctggacgcgcacaggagggagatcctgggcgcgcccccggcgaacggatccctccgccgggtgctgcagggcgggttcgagctgaactacgacacccactccgagctgtgcgaccggtgcggggcctccggcgggtggtgcggctaccgacgcgacgaggcgcccgccgccggcgccggcggcgggctgacgttcgcctgcttctgcgacggcggcccgacgaccacgggcctgtgcggtgccgcttttttctga

SEQ ID NO: 30567 - DNA, 1128 bp, Zea mays
  Peptide Sequence Number=SeqID_72346
atggggatgtggaagtttctcccacagggaaaaaattctcctccgacgggatcaaaaagaaaagaagcagcacctattgttggtgctgttgccgttgcattcctgtgtctagtcattctcacatccttcttggcttgtagatatggtttgcttcccttcaaatcgaagaacaaaccagggacaaggattgagtccttcctacagaagaacgagagcatacatccgaaaagatacacctacgcggacgtgaaaagaatgacaaaatccttcgctgtgaagctaggccaaggtgggtttggtgctgtatacaaaggcagcctccacgatggccgacaggtagcagtcaagatgctcaaggacacccaaggtgacggcgaggaattcatgaacgaggtggctagcatcagcaggacttctcatgtcaacgtcgtgacacttctagggttttgcttgcaagggtcgaaaagagcactgatctacgagtacatgcccaatggttcgctcgaaaggtatgccttcaccggtgacatgaacagtgagaatttgctaacctgggaaagactatttgacatagcaattggcacggccagagggctcgaatacctacaccggggatgcaacactcggatcgtgcattttgacatcaagccacacaacatcctgttagaccaggatttctgccctaagatctctgactttggactggccaagctatgtctgaacaaagagagcgctatctccattgttggcgcaagagggacgatagggtatatcgccccggaggtctactcaaagcaatttggaacaataagcagcaagtctgatgtctatagctatgggatgatggtccttgagatggttggagcaagggacaggaatacaagcgcagatagtgaccatagcagccaatatttccctcagtggctttatgagcatttggacgactattgtgttggtgcttccgagattaatggtgaaaccacagagctcgtgaggaagatgatagttgtaggtctgtggtgcatacaagtgattccgactgatcgaccaacaatgacgagagtcgtcgagatgttggaagggagcacaagtaatctagagttgccacccagagttcttttgagctga

SEQ ID NO: 30568 - DNA, 166 bp, Zea mays
  Peptide Sequence Number=SeqID_72347
atgggcgcgtcacacattcctccagtcctggttcttctgggacttttcctgccgcggctcctccgctccgcagtccgcatcacggtccacggtgcacggacgatgcctcccgcgcccactccaacgagcccgtactccttgcctcgagcaggcaacataaaaaact

SEQ ID NO: 30569 - DNA, 1254 bp, Zea mays
  Peptide Sequence Number=SeqID_72348
atggcggcgagggcggctgatgagaacagaaggccgggggtggggaggccccgcgccatgcgtccgaggaagagcagaagggacgaaaagaagacagcgttgccaagcagccggccgatgacaaggaaattcgtcgcctccttggcgagcaaagggcaacctgaatgtcagccgaccggagctgatccagaacccggagttgatcaacggaaggaaccaatcggcgatggcatcattgatatcgacgtggaactggacgagccggtcgacgatagtgattgtgacgtcgacatgggtgatgagacagagaacaaggacattatgaaccaagatgaatcgctcatggatattgatagtgcagactcggggaacccgcttgcagcaacagaatatgttgaagagctttacaagttttacagagaaaatgaggctaagagttgtgtaaaccctgattacatgtccagtcagcaagatataaatgcaaagatgagagcaattctgattgactggctgattgaggttcactacaagtttgaactgatggacgagacgctatttcttacggtaaacgtaatagatagattcttggaaaaggaagtggttccaaggaagaagctacaactggttggaatcacagctctgcttcttgcttgcaaatatgaggaggtctcagttccagttgttgaggaccttgtgctcatttctgaccgtgcctacacaaaagggcaaattctagaaatggcttctacacagtcttgttttttagggtgtacacttgaccatgatgatatccatatccatatagaaaagttgattctgaacacgctgcaattcaacatgtctgttccaacaccttatgtcttcatgaagaggtttctgaaagcagcagacgcagataaacagcttgagctagtgtcatttttcatgctggagctctgcttggtagagtaccaaatgctgaattataggccttcacatctggctgccgctgcggtttatactgcacaatgtgctattaaccgttgccagcagtggacaaaggtttgcgagtcacatagcagatacactggcgaccaactcctggagtgctcgaggatgatggtagactttcaccagaaggctggaaccggcaagctcactggcgtgcacaggaagtacagtacctacaagttcgggtgcgcggccaagattttgcccgcgcagttcatgctggagttaggagggacagcaccgcctccttcaggtgcaatctaa

SEQ ID NO: 30570 - DNA, 1422 bp, Zea mays
  Peptide Sequence Number=SeqID_72349
atgtcgtccagcagggaggtgatggtgctcagcgacagcgaggtgcagtccgccccgccaacgccgcgaccaccgcagccggtgtcggccccgccatcgcagatacacatacactccccgtcgcccgcccgctcgccgctcgccagcccggtcaggaaggcggtggcgggcgtcaagggctacctggaggaggaggtgggcggccacgtcacgcggctcgcggacccgcgcgacgcctggctgcccgtcaccgagtccaggagcggcaacgcctactacgccgcgttccacagcctcagctccggcatcgggttccaggcgctcgtgctccccacggccttcgcctccctcggatggacgtgggcgatcatctgcctgacgctggcgttcgggtggcagctctacacgctgtggctgctcgtcaggctccacgagcctgtcgccggcgccacccgctacagccgctacatgcacctcgccaccaccgtcttcggcgacagatgggccaatatcctggcgctgctcccggtgacgtacctgtcggcggggatctgcacggcgctcatcatcgtcggcggcggcagcatgaagatgctgttcggcatcgcatgcggcgggtcgtgcctggcgcggccgctcaccgccgtggagtggtacctcgtcttcgtgtgcgcggccgtggtgctgtcccagctccccaacctcaactccatcgccggcgtgtctctggtggccgcggccgccgccgtcgcgtactgcaccatgatctgggccgtgtccgtggccaggggtagggtagccggcgtctcctacgaccccgtccacaaggcccccgacgacgacgtggacgccgcactcggcgtcctgaatggccttggcatcattgccttcgccttcaggggccacaatgtggtgctggagatccagatacctcccaatggcatcctgagcgccctgtacaagttccacagccgcgacgcgtccaggcttgtgctgggggtcaccacgctgctggtcatcatcaactgcctgaccacgtaccagatctacgccatgccggtgtacgacaacatggaggccgggtacgtgcacaagaagaaccggccgtgcccgtggtggatgcgctcgggcttccgcgccttcttcggcgcggtcaacctcctcgtcgccgtcgcgctgccgttcctgtcggagctcgccggcctcttcggagggatctcgctgccggtcaccctggcctacccgtgcttcatgtgggtggcgatcaagaagccgcggaagggcaccgccacgtggaacgtcaactgggcgctgggaatccttggcatgagcataagccttgtcctcatagtcgggaacctgtggggtctcgtggagaaaggcatgcgggtcaagttcttcaagcctgccgatttccagtga

SEQ ID NO: 30571 - DNA, 315 bp, Zea mays
  Peptide Sequence Number=SeqID_72350
atggagaagaaacaatttaaaacatctaatttgttggttttcaatgctgtcaaaccacctgggcagattggtttgaagaagccacttttttctactgtggggataaattttgatcaacataagcaggggacattgcatgagtctgggtcttctttgaatgcagtgtcaggcaggcaagccttggctacaagtcaaaattctacggctgttgaggctaagttgtctcctcagtttgagaaaatgaccattacagatcaactctcgactgccggtgctcgacctgctttggagaaggccgatgatgtggctcattga

SEQ ID NO: 30572 - DNA, 423 bp, Zea mays
  Peptide Sequence Number=SeqID_72351
atggccatccttggtattcagctcaatgcaatttctgttgtaaaccttgttatgtcgataggaattgctgtcgagttctgtgttcatatcacgcatgcctttatgattggcactggggacaaagaaactcgtgcaaggcaggctctatccacgatgggtgcgtctgtattcagtggaatcaccttgaccaaacttgtgggagttattgtcctacgttttgcgaaatctgaagttttcgtggtttattacttccaaatgtatttggcacttgtcatcattggattcctgcatgggcttatcttcctaccgaatcccgtaaaagaacttcaccgaaatctttcaggtccttttgagtttatgtggccctcctacaaaatgggcgaagccaaaagaacaaagtcagccaccttcagcttcaagtga

SEQ ID NO: 30573 - DNA, 414 bp, Zea mays
  Peptide Sequence Number=SeqID_72352
atggccatccatggcggggcatcctggctcgctgctgtaagcctgtcgttgctcgcgctcgcgctgcagggtgcggcggcggagacgctcgtgccggcgatgttcgtgttcggggactccacggtggacgtcggcaacaacaacttcctcgagaggtgcaacgtcagctgcaaagccaactacccgcacttcggcgtggactacatcgaccaggcacccaccggcaggttcagcaatggctacaacctggcggatcagctagcgcagctgcttggcttcgccgagagcccgccgcctctcctgtcgctgtcgaacgcgacgagcctcatctcgcggatgagcacgggcatcagcttcgcgcacggtttacaaaaccgttttagatgtaaaaaccgccccccaccgaaaaattga

SEQ ID NO: 30574 - DNA, 474 bp, Zea mays
  Peptide Sequence Number=SeqID_72353
atggctgagcaggtcaggaacttcacgaaccttgctcgactgtgggcaagtggtaacgacaacaggtcatcggccgccgatctcttatcccaatctctcttcttcatcagcaccggcagcaacgacctgttcgagtacgcggacataggcccccagaacaacgacaccgagctgttgcaaggtctcgtcgcctcctacgcagcctatctgaagctggccatagctcacgaccccagcaaccccaagggcatcgacaagtacgggtgcttcgccgcgctgaacaacctctccggccagctctaccccatgttcgacgccatgctgcagggcctcagccaggaactgcccggcatgaactactccttggtgaactcgatcaagatggccgagtgggtcttcgagagccccgccacgccaacctacagtaataatcgacatcaggctcagctcctccgatcccgatcccgtaattaa

SEQ ID NO: 30575 - DNA, 192 bp, Zea mays
  Peptide Sequence Number=SeqID_72354
atggaggtggacggcgacgcaggggcgcggcccaagcgacggctgagaggggagggagtagaggagggtggcggcggctatgcctggaaggaggggagggcaggcggccggagtcaagacgatgcgtcacactgcggcatggaatctggacgcacaagagacgcttcactcaccttcattgcagattgttaa

SEQ ID NO: 30576 - DNA, 390 bp, Zea mays
  Peptide Sequence Number=SeqID_72355
atggactgtatacctccaaatctgcctatagagcttttttcattggagcggaatcctttgagccctgaaaaagaatttggaagagctgggcagcccctaagtataagaagagatttagactttgctgaatggtggagaaagacttcatctaggattcctaagagcaaaagaaaggggtttaatagtatgatgaaaattttcccatattccgtgttctatatattttttgagcaatacctgagcgtgtggaagacagctatcatgaacatatgtgtttgccttgaaactagtgagttccttacccagctttggcggacctggagagagaggtcccagtcaggttatgaacagttgcacaatgttctggccgaagctgtcccatccagctag

SEQ ID NO: 30577 - DNA, 889 bp, Zea mays
  Peptide Sequence Number=SeqID_72356
atggacagcagcaaccctatagtcgatgaagctaaagaccttgagctcccgagaccgattgggcagaaggctgctaagaaggttgcttatgatgctactgacaaggttgctaagaagggtgctaagaaggctgcttatgatgctactgacaaggttcttgaaatgcaacagaagataagcaatgacaagatcgaggcatcaaaattatctctgcaagcagcaaaggatgagaaggaagcaaggttgctcgaaaaagagtctaagatgctagaaacttacgcttgtctcctcaagcaagacatgtctgcaatgcatgatgaaatccgagctgaacacattgccgcactcaaaaatgcattaccaaagatgtcaggagcaaatagaccacaagaaagtgccaattattcacagggcgacgatgaagaattggagttcaatgatgctaacgacgtttacacagtagaagatcttcttaccgaagaagaatttctagatggctttcttgatggaattggccaggatatcatctccaatttgcaagaacaatcgccacaacggagatgctaccgtagaaggtttgttccaaggcctcgtcaggtagcaaatgcagatcttgttgcttgctatttttctgctaatccaatttataccgatgagatgttccgccggagatttagaatggggcgaccattgttcttgaaaattgttgctgcacttagtgagtggtcaccatattttactgatagattggactcaagcacagctttggaatgcttgggtaattttgctaaaggagttatagatgtttttggtgaagaatacttgaggggtccaagaactgatgaggttgaacacctcctccaagtcgcagaagctcgtggttttcctg

SEQ ID NO: 30578 - DNA, 639 bp, Zea mays
  Peptide Sequence Number=SeqID_72357
atggcgtgcccgcccacgtggccaaggctggccggagccgctggtcgaagccgatgtggcctacgccggtcggagccgcctggattcgagggcggccgagttgcccgccgccggctttgcgcgtccgcggaggcaagccagagccagtccgcctgggagcagccgccagggaggacgtccgcgcctggggctcggcgattggtcatggccgagggcctgaccgtgccgagcgcagggagctgcgccgccaaccgccaggggtcgcgcccgcggctggcttggctgagccgcgcttgcaccgggctcccgccccacgcgtcggggaccgtcgcgcccgcgccggtgccgctgcacccgcgccgagggccgtcgcgcccgctgccgggccgccgccgtttgcgcccgagccgagaagccgggggctcagccgccagactcagggccaaccgcgcccgcacccgggccggccgcgcctacgtccagagaggtcgaccgcatccgggagcctgcggggccgagcgcccgcactcgtgccgagggtgcgcgccgtgctcgactttccggcttctcctctctcgccaggaaacaaaggccgtgctcgactttccgcattccggcgtcactgcgcgcaagcaatag

SEQ ID NO: 30579 - DNA, 1557 bp, Zea mays
  Peptide Sequence Number=SeqID_72358
atgaatggtgcagaggaggaggagccgcctcacgtcagcagcatgcccaagacacaagacggtgttaccaagcccagtctagggaaagagcccatcccagggagcgagctctggacggatgggctcatctgtgcttttgagctggtcaagagtcacaggaagcctgttcagcacaaatcatggctggcaactgagcagatacaggagaagggccccactatgtgcacgaggaagcactcaagaaggaatgggcaccagatcactgagccgaaagtggatgagagcattgtgttggaaaacccccagcagactgatttcagtaacgatccttcagtgctcaaagataggccattgtatgctggggagattttggatcataaatgggtgcctattggatggaataggatcgccgagctggtcctgagggttcagtcagactccagctgggagaatgagttgatggagatgagtgatagcgaggatgattacaccgtggctgatcttgcagctccatactggcagcgccctgtgggacctacttggtggtgtcatgtcaccgcaggccatccttcaatagatgcatggttgaatagcgctcactggatgcatcctgccatcagaattgcactgagagatgagagcaaactgataagcgaccggatgaagtacctgctctacgaggtcccagttagagttgcaggagggctgttatttgagcttcttggccagtcaataggagacccaaatcatgaagaggaagatatacctattgagttgcttcttgctggtggaagccaaacacctagatcagtgcatgaagtaattgcacatttggtcagccgtctttcacgttgggatgacagggttaaatggtcacttcatgcaagggaagagatattaattgagcttctcagacatttgaggggtaatgccacaagagctattctagagagtattagaaagtgtacgagggacatgttggaagagcaggaagctgtgcgcgggcgcttgttcactattcaggatgttatgcagagcactgtccgtgcatggctacaagatagaagcctcagagttacacataatctggcaatttttggcggcggtggcatggttttatccataatcactggccttttcggaatcaacgtcgatggcatacctggagcgcagaacaccccctacgcttttggtttgttcgcgggacttctcttctttgtagggatcgtcctaatcggcatggggatgctgtatcttgggttacagaatccagttaacagtgagaaggtgaaggtgaggaagctggagctccagcacctggtttcgatgttccagcacgaagcggagcagcatggcaaggtcagggaaggtgttagccggcatggcgcctcgccgagttcatccacggcctctgatgaaggtaggaggagcaacggagtaagcgtcgttgcttttaagcccgtatgcccacgggcgcgagtgccactgccagtgaccatcaaacgctatagttctgtttctgaaagccctcgccaccgggaggtcccagttctgtag

SEQ ID NO: 30580 - DNA, 282 bp, Zea mays
  Peptide Sequence Number=SeqID_72359
atgtaccccgtcaagcagctccagtgcaccgacaccttcctcggcataagcttgtcaccggatccggatggagtgagagcaaagcgaccacctgacaagcacagcggattgacagaggtggtgctcagcggcagcgtcacactgctccgctcagcagctggttgcgcgggacgctgtcgcctgtcgtggaagaaaacgcctttgtcccggctcgcactggacccggagcaatgctatggcgccaaggtaacacatctcggcgccatagtctatgacgccgag

SEQ ID NO: 30581 - DNA, 711 bp, Zea mays
  Peptide Sequence Number=SeqID_72360
atggatggattcagatttggcgaaagcgacggcgacgccctcccggtcccggatctaggccagcgagcgagggctggccggccggctgcctggctggtggctgctgctactcgagatgttgaggcccggctgccgtgggccgtcccgaaagtgtcgattcgtcttgcacggtggagcacacatgccgaggaaggtgtcggtgcactggagctgcttgacggggtacatggctttgattcccatatctctagcggcccacagtttctttctcgtggagcttggtaccgactatggggtcgaggatggaggcttggagaatatgtagctcatgaattccggttattcgcatcacgtgacctaaaacacaagatcgttctccactgcctgactcctatatacctcttgaaggcttggtcgcatttgctgaggatgtcgtcgcagccaagctcgcatgagcctgttttgtacggccaatttctatgtatctgtggatgcagacaaataaatctagattgtatcggtttgcggactgatagcaggtcagatgaagtgtttgaggaaccattgagagcgccacctcaatgctccaaacaacaagaccatactgtggttgagcttgagcatggcatgatgtcggtcatgtgccatatgaccgaaaaccccacgaaagaggaaagaggctttgattcccgtatctctagcggctcatag

SEQ ID NO: 30582 - DNA, 405 bp, Zea mays
  Peptide Sequence Number=SeqID_72361
atggccggcctcggagctccctcgctccaaccactgcccctggccgcggtcaccgcgccattgagctccgcgaggctaagagtcggcgtcgcgcggttatcgatgtgcatcttcgcggacacctgcccgcaccgcctcgcgccgctctccaaggggcatatcgacaacagggggcgcctctcgtgcgtgtaccacggctggtgcttcgacagtgtcggtgcctgcaacttcatccccaaggcacccaccctcggcccactgatgcacacgagcagtgggcacatgtgtggcgtcgtacccatgcgtggtgcagaacaacatcctcagcacgtggatagtgacgcggtggtggagggctcgcatttttgttgcccaacggcaaggacgttaatgaggcctgcgtga

SEQ ID NO: 30583 - DNA, 390 bp, Zea mays
  Peptide Sequence Number=SeqID_72362
atggagcaggccgacaggggaccgagtagaggaagctccggcgcgtgtagaggagcctggccgggcgcgacagcgggcgcggccatggaggcagagcgcgcgcagcagctagaggccgagctgggaaagtccaggtcgcagggaaggaagagcgctggcgcgccagcagtggagcttcacggtgagctcggaacaaggagtaccacgcagaggaactgggggagggagcttggagagggacagccgcgggagttgagggagaaggaagctccctggaggagctgctcgcaggagaggccggcgcggtggaggagaccagaggggagaagacacggctgggataaataccagagaaattgcgtgcgtgaagaggatcagaacgacggctga

SEQ ID NO: 30584 - DNA, 249 bp, Zea mays
  Peptide Sequence Number=SeqID_72363
atggtggattcgtttaatgtatctgttgcagctggaatcctcatgcaccatgctgtttgtgatagagtttcccgcctgtcgtatggtcctgatcagcaaaataatcatgtttttagtcgtcagtctggtctgactggctattttttcctggagtttaccgctgatccctaccagattgctgggaagacgaggatccaagcccaatcattgagcagagctgttaacgattacgcatatggttttcagtga

SEQ ID NO: 30585 - DNA, 525 bp, Zea mays
  Peptide Sequence Number=SeqID_72364
atggccgcgccacgcgcgcttgccatgccacttgacgtctccacctctcttctattctcgagaccagataccggtccacagatcgctatgcctataattaatccaaccacgggccgtattcctgctccacgcctccgcctgttggctcgtgatgatgacgagacaggtcgggtgttcaagagtcgaagctcggtagcaaagagctcggcgccatatgctatggtgtcgagctctgacgtggcagcgacgagcaaggcttgtatggacgctgatatagccgtagctcggcgtcatagatcttggcgccaagctagggatttaccaacgcgctgggatcctcctgcccattttcttccctgtcgcgccgtcttcctcgccgccccgccgcgtaggaacgccgccccgcaccgccgccgagcctcgcatcgctcctccaagccccgcaccgccgccgagctccgctgccgaggtccccgccgagccttgcagtcggacctcctccccgcgatcgagccctacgcctag

SEQ ID NO: 30586 - DNA, 3495 bp, Zea mays
  Peptide Sequence Number=SeqID_72365
atgtctcccctgctcctcgggttcctcggcttactcctcgtcgcaggtgagttggtggttgtgcccaccggtgcgcagaacagcgacggtggcgacgacgacaaggaggtgctggtggagctcaagcacttcctgcaggacaacaacaaggtgaaccgcggcgcctacgacgcgtggcaggagtccgacgcgtcgccgtgcgaatggcacggggtgcagtgcgacacggccgaccgcgtcacggcgctggacctgtccggctcgagcatctccggcccggcgttcggcaacttctcgcggctgcccgcgctcgccaggctcgacctctctgacaacaccatctgcgccgcgggcgacatcggccaatgcctcggcctcgtgcacctcaacctctcccacaacctcatcaacggctcgctggacctgtccggcctcaccaggctgcagacactcgacgtgtcggggaaccggctgtcgggcggcgtcgcggccaacttcacggcgatgtgcgccgacctggccgtcttcaacgcctccaccaacgggctcacgggcaatatcaccggcatgttcgacggctgcgccaggctccagtacgtcgacctcagctcgaacaacttcaccggcgagctgtggcccggcgttacgaggttcacgcagttcagcgcagccgagaacaatctcaccgggagcgtaccgccgaccacgttccccgacggctgcaagctcgagtcattggacctgtcagcaaattacctcactggaagcttcccggactccatcgccaagtgcgcgaacctgacgtacctatcactctgggggaatgtcttcaacggcttcataccggccggaattgggaagcttcccgtgctcgagacgctggttctaggcaagaacagcttcgatcgccggataccgtcggcgctgacgaactgtacgaagcttcagttcttggacatcagcagcaacatgtttggaggggacgtacaagacacctttggcaggcttgcgagtctgaggtaccttgtgctgcaccacaacaactacactggcggcatcgtcacctccggcgtgctccagctaccgctgctcgcgaggctggacctcagcttcaacgagttctccggcgagctccctcccgaggtggctgacatgaagagcctcaagtacctgatgcttgcctacaaccaattctccagcgggataccgccggcgtacggccgtctcaccgagctccaagcgctggacttgtcgtataacgagctctccggccggataccggcgaccatagggaacctcacgtcgcttttgtggctgatgctcgctgggaatcagctatccggagagattccgtcggaaatcggcaaatgcgccagcttgctctggttgaacctggccgacaacaacctgaccgggaacatcccaccggagatggcaaacatagggaggaaccccggcccgacgttcgccaagaaccggaatggttcaagcgtgctcgccggctccggcgactgtcaagccatgaggcggtggatcccggcgagctaccctccgttcagcttcgtgtactccatcatgactcgggagaactgccgcagcatatgggaccgaatcctcaagggatacggcatcgttccggtctgcaccaacccttcgtcgccggtgaggtcctacacgatctccgggtacgtgcagctgtccaggaaccagctgtcaggagatatacctccggagatcggcgcgatggtgaacctgagcctgctccacctcgacggcaaccggctcaccggaatgctgccagcggagatcagcaggctcccgctcgtcgtgctgaacgtctcgagaaacaacatctcaggcgcgatcccgtcggagatcggccgcatcctgtgcctcgagatgatggacctgtcctacaacaacttctccggcgagctgccggggactctgagccagctcacggacctgaccaagttcaacgtgtcgtacaacccacttctcacaggcagcgtccccaccaccgcccaattcggcaccttcgacgagcgatccttcctcggcgacccactcatctcattcgggacgggcaccggtaagcagccacctccggaagctgcgggacctcgaaggtccggcatgagtccaagaagcatcgcggtgtggttcctgttctccctcctcgccgccttcgtcaccggggccttggtgttcttcatggccaacctgcgtgcgcggttccccgtggagcaagacccggaccccgagtcgttctcgtttgagaaccccaagtgcagctccaggaagtgctccttgcagatgtcgacgccgtccgggtcatcgtcgtcggcgaccgggtgctcctcctcctcctcctcctcgacagagggcgtgaaggtgttccagctcggcagtaccgcgttcacctaccgcgacgtggtggcggccacggggaacttctcggagcacctggtgatcgggcgcggcggctccggcgtggtgtaccgcggcgtgctccccgacgggcgcaccgtggcggtgaagaagctcgcgaggccgcgcgacgacggcgacggcgacggcgactgcgagcgcgagttccgcgccgagatggaggtgctcgccgaccggatggggtcgtcgtggccgcacccgaacctggtgacgctgtacgggtggtgcctgtccgggtcgggcaaggtcctggtgtacgagcacctggacggcggcagcctggagtcgctggtcggcgacacggcggcgttcgggtgggggcggcggctggaggcggcggtcggcgtggcgcgcgcgctggtgttcctgcaccacgagtgccggcccgcggtggtgcaccgcgacgtgaaggccagcaacgtgctgctggaccgggacgggcgcgccagggtgacggacttcgggctggcccgcgtggtccgccccggcgacacgcacgtgagcacggtggtggccgggaccgtcgggtacgtggcccccgagtacgggcagacgtggcgcgccacgaccaagggcgacgtgtacagctacggcgtgctgctgatggagctcgccacgggccggcgcgccgtggacggcgccgaggacgagtgcctggtggagtgggcccggcggatggccagagaagggtggagttcggcgggcgccgtcgtcggcaccgtgtcctgggagctcctgatgctcggcatgcggtgcacggcggacgcgccgcaggagcgccccgacatgccggacgtgctcgccgcgctgctggacgtgggcgagcacggcggcacgcggctcgaattcacttgcaaagtggcagcgtccctttcctcgtacctcgggagcattcgcccgccgtcgcttccggttctgaaattgcaattgtctgaacctgaacctcaacacgcatttcacgcacgcacgcacgccggcctacgattctacgaacgtcgcggcgtgccgtacaagcgattaatgcgtccggtcaaagaccactag

SEQ ID NO: 30587 - DNA, 915 bp, Zea mays
  Peptide Sequence Number=SeqID_72366
atgacgcagtattggattcccacagggatcttccaaagagggatccatggccggttgggaccacaggcgggagccaggcgcgtggaccttggaccgggagtgaagaagagattggggagaatgtgggttcccaaggtgaatttgaacacctgcaactttacacctttggcgccttccccagactgttgtggggctcctccttctcctgttgctcaaagggaggaggccactgatgttgctctaggtccccaggttacacttatccccctggaggatctgcctacagttgtggctactgagaatctggttgatcttgaagagggtgatgggaggatttctccctgcagcccagttgaggaatctgaaagtaggttggcacctttgaaccctgtggtgagagcacactctgctggctgtgaccttccatccatagccgcaaatacgggtctgagagtgtatgctaggaggagacttgagtgcaagaaggcagacatgttgcaggaccattatgataatgtaccccatgaggatccgtcgactgtttccccaacattgatggcctttgaagttaatgtgctttcacccccacatcctaattctgagaatttggtcctgaatgccagtgtaaatgaggtggaacagcccggtgatgttgttgaactgccaagttttgatcatttgtcgatgacaccaccacctttgcaaggctgctcccccactccttgtcttgtgtactcaagaatgaggctcaaaaagaagctgctgtcagatgacaatgaagaaggggtgaatgttgcttcaaatgagagtgatgaaggtatgggtcatggttcccaggtccttccagtttgcagcagagttgttgtccctcctgttcctcatttggctagtccaacctcactaacagcagaatag

SEQ ID NO: 30588 - DNA, 559 bp, Zea mays
  Peptide Sequence Number=SeqID_72367
cagggactctttccccgtgccacggacgacaatgactgccgacgcggcgctcctcgccatcatcgtcgccttcctcctcccgctacgcctcgtctccctcggcctcagcctggcgtccgggcgtcacggtactagctccagacgcgtccgccgttcctgtgccgctttggccgtcgcagccgcgctcctcgcagtcatcttcgccctcccgcgtgaccacgtccgggagtgcgccgctccgatcgcttctgtctccagtgccggggatgatgacggcggtttccgcgaggagctgcggttggaggtcgagcagcttaagcagcagctggcgcggcttgaatctctttgggatagtaaatcgaaagctgtggatgataaacttgattctttagaggaggataatggccgtgtaatgagagcaatggcactcgatgtccagtctctgatcaatgagcgggaaaatatcaaggaaaataacagcgtcgtcagcataaagaaagactatgctgcaagtttctggatgataagggctgcagtaaaccttcctcttcggctttga

SEQ ID NO: 30589 - DNA, 264 bp, Zea mays
  Peptide Sequence Number=SeqID_72368
atgaaccaagacatacccctcgatgtatcgcagaaggtcctggccacggtggagggcggaaccgcggcacattttctgcgacgtgaagcccccaggcacgacaccaaggacgcggtggtgaagagcgctcgggtcgactatggcggctaccctttccgctcggtgctcacgacaatgtggtttacggggaagaggatggggtcccgatggcgcgtggcggtacagggtgagatggtcaagaaagcgaggaggttttacggttaa

SEQ ID NO: 30590 - DNA, 1092 bp, Zea mays
  Peptide Sequence Number=SeqID_72369
atgaaaggaagcagttgtaacatatttttgtatgatgcaacagggatgctctgtcaacggggtgattctgtgggctggagtgacacagttaaatttagaactgcaccagcagctggttcagatgagctatcctttgtgatctatggtgatatggggaaggctccactgggcccgtctgtggaacactacattcagcctggatcggtttctgtggccaaggcagtggctaaagagatccaaacaggaaacgtggactccattttccatataggagacatcagctatgccacaggattcctggtcgagtgggacttcttccttcacctcatcacgccactggcctctcaagttccctacatgacagctattggtaatcacgaaagggattacgtgaactctgcatctgtttatgtgactcctgattcagggggtgaatgtggggttgcctacgaatcatacttccccatgcctgctgttagtaaggataagccatggtattctattgagcaagggaccgttcacttcattgtgatgtccactgagcatgagtggtcagagaagtcagagcagtacaattggatggacgaagatttgtcatcggttgatagatcaagaacaccatgggtgatcttcattggacatagaccgatgtattcctcctatggtgttatacttcccaacgtggattccaactttgttgcctctgttgagccactcctgctcaactaccaggtggatctggttttctttggccatgtacacaactacgagaggacttgtgcggtataccaaggcaattgcaaaggcatgccaacgtcggacaaaagtggaattgacgtttatgacaacaacaactacaccgcacctgttcatgtcattgttggtgtaggagggttcagcttggacaacttccctaacaaaggggaggcctggagcttatcaaggatttcggagtttggctatggcaaggtgcatgctacaagaaccgatatgctggttcagtttgtaaactcaagttcgatggagatacgagaccaatttaggattgtgaagggagctccggcaaacaagtcactgagcctgataatttaa

SEQ ID NO: 30591 - DNA, 390 bp, Zea mays
  Peptide Sequence Number=SeqID_72370
atggcctatcgggccctgcccagccccaccactcaaaagagtcgtttgaagagtggtagcttttatgtgtcacatcagacatatctggatgcccgtccaacccatgtccatgatgccattcactttgaagaagaggtcaatggggctgggccagacaaccatgtccgcgctggggttgcgccggaggccgaggcggacgaggagcaggacggcgacacgaatacagccgttgtgaaagcaggggagatcgtcgcgtcgtgcggctgggcggcgctcgccggcgtctcctcgtcgtcgccgtcctcgtgggcgcgcaccgtcagcccttgcgacgacgcttgcatccctgactcgtgcctgcttgccgacggcgtggagaagcggcagtag

SEQ ID NO: 30592 - DNA, 294 bp, Zea mays
  Peptide Sequence Number=SeqID_72371
atggcgccgaagaaggacgacaagctgacggaacaccggcggtccacccgcgatgagcaaagcaggcggcggccccggctcggccccggtaccgacggccgcggccgcggcggccgcggtgcagaagcagaagtcgctgctgcagagcttgctgcgagaatttgggcggtcgatccggcgcggcggccgggtatggcggccgcggagcagctgaaggagctgggggagaagctgcaagcggtggcgccggctcctgcggacgaactcgccaagctcctcgaggtgagcccctag

SEQ ID NO: 30593 - DNA, 3240 bp, Zea mays
  Peptide Sequence Number=SeqID_72372
atggcggtggtcctggatgctttggcatcctacatccaaaacatgctgacacagatggcgaaagaagaggtggacatgctgcttggggtctccgttgagattgacaaccttggcgccaagctcggggacctcaaaaacttcctcgctgacgctgacaggaggaacgtcaccgaccgaagtgtgcgggcatgggtgagggagctcagagacgccatgtacgacgccaccgacatccttgacctgtgtcagctcaaggccttggagcgaggttcgtcatcatccctggctacggggtgcctcaaccccttgctgttctgcatgaggaaccccgtcttcgcccacgacatcggcagccgcatcaagaagctcaacaagaggctagacgccatcaagaagaacagcgctaccttcagcttcatcaaccttggttcctatgaggaccgcggtgggaaggcggagactccatctcgcctcgccaaccgcgagacctcggcgcagctcgaccggtctagtgtggttggcgagcagattgaggtcgacacaaggaagctagtggagatgctaacagaagaccctggaacgaccactgctacccatgaccaaggtacggtcttggccatcgttggcattggcggaattggcaagacaaccctcgcccaaaaggtcttcaacgacgacaccatcagccgtgtcttcaccaagaagatttggctgagtgtcaacaaggacttcagcgtggcagagatcctaaagagagccatcatcgaagccgggggagatcaccatgcagctggcaatgcaaaagccacacttcagcggacgcttcagaatgccttggatgggcacaagactattctggtcatggatgatgtttgggatgacaaggcatggggcgatgttcttaaaacgccatttgtcaatgctgttggtggtggtagccgagtcctcgtcaccacaaggcatgacttggttgcacgagcgatgaaagccagggagccctaccaccacgtcgacaaacttgaccccaaagatgcctggtccttgctcaagaaacaggtaatcagaaatggagataatgaacctcttattgatatgctagaagatattggaatgaaaattatagaaaaatgtgattgcctgccacttgctatcaaagtaatgggaggactcttgtgcaagaaaatggcaagacgaggagactgggaaagggtattgaatgatgcgatatggtcagtatcaggaatgcccgaagagctaaattatgcaatctaccttagctacgaagatttgcacccttctctaaaacaatgctttttacactactccctcatccctaatgagagcacagtgttcttcgtcgacgacattgtgagcatgtggatcagcgaaggatttgtggaggggaactctgacgaattagaagaattagcgatggagtactacaatgagctaatattgaggagtcttatagaaccagatcttctgtatgttgaccaatgggtttgcaacatgcatgatgtagttcgctcatttgcacagtatgtggcaagagatgaagcacttgtagcacgaaaggggcaaattgatgttggtgaactcaactcaaaaaggatcattcgactatcactggaatctgaggagttagaatggagcactctgcaaccacaaaaatcactaagaacactactagtagctgggcacatagggattacagttggtaactcactgggtgcctttccaagcctacgaaccctgcatatagactcaacaaactttgatgtagtggctgaatcactgtgtcagctcaaacacttgaggtatttctctgtcacagaccctaacatgtctaagctgccggtaaacattggaaatatgaaattcttgcagtatataagccttgacagctgcaaaaacctggctaagcttcctcgtagcattggaaagctacaacagcttaggtatcttagcctaatgggaacaaatatacacttcataccgagagggttctctgtctcaactagtctgaggaagctctttgggtttccagcccacatggatggcaactggtgtagcctgcaagtgttggagcctctttcccggctcatgggcctctctatatatggtctagaaggtgtgtcttcttcctccttcgccgcaaaggctaggcttggtgagaaggtgcatcttagctatctggagttgagctgcaccagtagactcaaggatgacacgcaactagtcaaagaagatgatgaaggcttctctgaggaagagcaacagcgtattgtggaagtgtttgatgagctccgccctccaccctgcctagatgctcttgaaattgaagggttctttgggcggtgcttcccaaggtggatgggaccaatggcagctgtaccccttgaaaacctgcggatcctagcgatggatgacctaccttgctgcactgagctccccaatggcctgtgtcgtctgccgtgcttggagttgcttcaaatctgtcgagcaacagccattgagcgtgtcgggctagaattcttgcagccccatcaccaccatacacaccagttgactgatgtgtttcctagactacacgacttaaccttaacggaaatggtggaatgggaggaatgggagtgggaggagaatgtgcgagccatgccattgttggaagagtttcttctagagagctgcaagttgaggtgtatccctgttggcctttcttcccacgcgaggtccttgaaaaggttatatgtacatgacgtacaacacctcagcaccctggagaactttgctgccgttgttgagcttgaagcatatgacaaccccgacctgacgagaattgctcatttccctaggctgtggaagctagacatctctgggtgccaaaagctaaaggcattggaggggttacctgcactcgagaggcttgagatgacagattacaacatggtgacactccctgcttacctgaaggatgtcaacccaaagcatttgcaaatagactgcaccttaccactgttgagttccatagccgcaggaaaatctagccatgagtgggacaagtttaatcatatccgacaagttaagagaatggtgacaaagatgctccaaggaagggcgacgcaacctggagggcctggtggcgcgaccggcggtggccggtgggcgcgacttggagggcctggcggatgcgtggctccttacgcgcgcattgtgcgaggcagcaggtggccggcatga

SEQ ID NO: 30594 - DNA, 585 bp, Zea mays
  Peptide Sequence Number=SeqID_72373
atgaacgcccaccgcgacgaggaggccgtctcgccgctcatcgcagcgcccggcggtcggagccacgccgccgacgcgcacgtcctctcggcagccttcctcttcgtcttctccgcctacagcgccgcccagaacctccagacctccgtcaacaccgaggacgacctgggcaccgtctcgatggggactgtgtacacctccttcacgctcttctccgtggcctcgtcgcccgtggtcacgcgtataggccccaagcgcgcgctcgtcgtcggcaccagcggatacgtgctcttcatcctcgccaacctcgtcccgtcatggtacacaatggtcccagcttcactctaccttggttttactgcatcgatcatttgggttgggcaggcacctatacttcaattccagggtacataccttacatcagctgccctcagtcacgcaagagaaaataatttgcccgagggtccaactttagggagcttcaatggggagttttggggaatgtttgctagcacacaggtgattggaaatttgatctcgcttgctctgctgagaaatggaaagatgtggaagtatcgcatgtaa

SEQ ID NO: 30595 - DNA, 840 bp, Zea mays
  Peptide Sequence Number=SeqID_72374
atgcagcttcgcctcaaatcatccttctcgagcggcgggtccgggtgcgtcggcttgggcggcgtcgatgggtccttctcacagcgattcgtgtgcagcagcagcggcgtgccgagctcgtgcgtgtccccgcagcgggacaactacgcgtcgctgcggcgggagaaccaggagatgaagctagagatctcgcggatgcgggtgcggctgacggaggtggagcgggagcaggggctgatgaagcagcaggggaggatgcgcggtgggacggcggcggcgggcggggcggcggcgagcacgaccgtgccttcctcgcgtcgctgtcgaggggcatcgactgcaccaccatgttcggcgggcccgccatgccatgccctagaagcccgtctgcggttgccgctccaatcccttccgcggatgccgcataatcccaaccgacgcaatcagcgccccgtctgcggttggttgccgcagaagcaccatcaacgttcatcgttccatcctcccatccgcggttggttgccacagaatcacatccgaagtaatcatgctctcggccatgccctgcctcgaatccgggatctccaatcccggacgccatcagcacccgccatcaccaatttggaaacaccgggtggaggggattctgcagcaaccaaccgcggacgggagatccacaccaatattaaaaggatggcagcccctatcatcatccgctcatcctcttctcatcctcctaaacgtccagttactgtgttcgcgtcattcttttcatctggtagttcctgtgtgcgctccttcccattcatctgtctgcgcgccttcactttcatctggtga

SEQ ID NO: 30596 - DNA, 135 bp, Zea mays
  Peptide Sequence Number=SeqID_72375
atgacccgcacggagttcggccgagctgttgaaggtgatcgcctcgacatgcgagccccagacgacagcgagaacccaggcccacaaatcatagacacagatggtcccacaagttatagacagtggatcacataa

SEQ ID NO: 30597 - DNA, 357 bp, Zea mays
  Peptide Sequence Number=SeqID_72376
atggtaccactgtgccacaaatcgcactcgacggatgctgcgtttccggtgaaattgggatacaacgatggcgctgcccaggccactggtaacactgaccaagtcacgctggcgccggtctggacatcgggaaatggtttcgcacttcaggctctgacgggcgatgacttctcaacaacaagggtaaggaacaggaatgagccaaaggagatgacgagagccgcggccatcaggagaagcatggcttgcagcgtgatgcttgggctcaggaagaagatgactgcgatggcgcccgactgccacaccttcagctgtgcaaaggcagcctcctgcataggccatggtgtcaaattttag

SEQ ID NO: 30598 - DNA, 1077 bp, Zea mays
  Peptide Sequence Number=SeqID_72377
atggcgccaagaaaagagatcatggctggtgaccatggcggcggcgaaggggaggaagtagtggtgcttgtgggagactacgactacgagctagaggaggaagacgaagacatgctccccgggttccggttccaccccaccgacgaggagctggtcaccttctacctccgccggaaggtggccgggaaacgcctcaccatcgagatcatcaaggacttcgacatatacaagcacgacccatgggaccttccaaagtcgagctccatctcgggagagaaggagtggtacttcttctgcctgcgggggaggaagtacaggaacagcatcaggcccaacagggtcaccggctccggattctggaaggccacgggcatcgacaggcccatccactccgccgcgtccggccgcgccggcgaccccatcggcctcaagaagtcgctcgtcttctaccgcggcagcgccggcaagggcaccaagacggagtggatgatgcacgagttccgcctgccgccgcgcgccgacaccgcccacgcctcgcccagcgagcaggaagcggaggtctggaccatctgccggatcttcaggaggaacttcacctacaagaagcaaggtgtccactgcagcagcaaggtgtccagcgccgccgcagttgtcgcgcagcccggcgagtcgagctctgtcacggcgggcagcatggagtcggacacgggggacgagtacaccaacggcctgctgccacagaccccgctgctgcaagatccggtgaatatgatcgacggctacagctacagctacggctacgaccaccaccaccaccagcagcagcagcttcagcacggccagtggaacagccacgcgctgcacgcggcggccacggccccgctgccgtcgccgacgacgatggccgcattccatcacggcgtgcttagtagcccgcctgctgctgccagcgggccgctagacgacatgtactacaaagacgggtccagctgggacgacattggcaggatggtgatggagctcacggaccccagccccagtgtgttctccttctatgacactagatcgtacgcctag

SEQ ID NO: 30599 - DNA, 261 bp, Zea mays
  Peptide Sequence Number=SeqID_72378
atgtcgctgacatacctgagcgtggcgtcctggcagccagagaacgtcactgagaaggctggacctgctgatgctcgaatacgcgctacatggcatattgggtgccctgtctggtgtgccatctggtgcacacatacatgtccaatgcactcatcttcagcacaatctttagtacagttgtggtttcgagaactagggataataagatttgtgttcggtggggatgctagcgtggactcactccgaatgatgaattactga

SEQ ID NO: 30600 - DNA, 246 bp, Zea mays
  Peptide Sequence Number=SeqID_72379
atggcgtcggactgggacagcgactatgaaatacacatgattgaccatcctcgcgagcgtcgtgctggtgctgctactcaggcagagaaaggaaaggttatggccgataccggtacatcttcaagtgttggtgtgatggtgttggatcaacatgcgaaaccagtgaagttaaatggaccaattgatgtgacttggagccatatcctgtgcctcatggggctggctttaagtgcttttattgtttga

SEQ ID NO: 30601 - DNA, 294 bp, Zea mays
  Peptide Sequence Number=SeqID_72380
atggtcatgcaaaatgaggtagaagccgcagtgaagatttccctattggcagctttgggctcgactacaaataaacttgccaaaggtcagttagatgatctcacagtaacgacgttaaggaaatcggaggagaaagcaaagtttcttgtcggagagagagatcgtttgcttacagagagagattctgctcttcaagaagctcagatgtggcgctcagagctaggaaaagctagaggaaatgctgcaattctagaagcagctgttgtcagagctgaagagaaagctagggtctaa

SEQ ID NO: 30602 - DNA, 780 bp, Zea mays
  Peptide Sequence Number=SeqID_72381
atggaagcgatcctgatggccgacgacgaagactgggtttacgtcctctcacctgaggagagggtggaggctgttgctgtcgccgttgaggagacggtggacgaggaagtggaggctgttgctgtcgccattgaggagacggtggacgaggatgtggaggatgttgctgtcgccgttgaggagacagtggacgaggatatggaggatgttgccgttgaggagacggtggaggaggacgcggaagctgttgccgttgccgacgccgtcaccgtgaccgtcaccgccgccattgcaggagaggacaatccacaggacgccgccgccgccgaggagcaggaggagagcgacgaggaggaggaggaagcgaaggtcggagcgcagccagcggcggaagagctcctgcccaacatcgacgagcaaggagaagacgaggagccggcggctgccctcgacgacgtcttgccgtatcttctgtaccactacttcggctaccgcggcgcgtacggccccgctacacgatctgggtacggctactactactacggcggcgaggctacaggatctggttacggctacagcgagacgtaccggtacctgccgggatacgagacgatggtggtgtaccaggcgccgccacatgccttcagcgccagcttcttgtacccgtacgggtacccgggccccgcgtacgtgccgtcggtccgtcgccgtcgagccgtcctcgcacgccgtggctcctacgcagccggagcccggatcttggcattagtcatgatttaa

SEQ ID NO: 30603 - DNA, 4575 bp, Zea mays
  Peptide Sequence Number=SeqID_72382
atggccgccactccggaccgagccaatgccgacctccgccatggcctctccgtcgacacccccctgccgccccagattgccagaggtttagtcaatgcttattcatttgatctctgtacagaagagaagcaaggccttgatactgaaatacccctttctcctcagtggcttatgaaggtgggggaaaacaaggatcctgtttcacatggtatccgctcagatgtttcaaaaacatcaggggctggtgaagaccaaggctacaatacgaagaaaaaggatgttttcagggcttcagttcttgatggtgaaactgggcgtcgtgaccgctggcgcgatgatgaaagggaaccaaattcaacccatcggtggagtcgctggagggagacagataaggaacatggcgatgcacgcaaagcggaaagatggtcagatgacacctccaagcattctgtggatggacgtcgtgttccgcaggagcgctggggcgattccaataataaggatggcagttatgaccaacgacgtgagaataagtggactgcacgttggggttccaatgataaggagtctgaaaattggcgtgataggtggggggattcaggcaaagagggtgatgcttaccgtgaaaaaggtttatctcaccatgggaaggatgccaacagttatgaaaaggatgacaatatttctcgttcatggaaacctagttattccgcaggccgtgggcgtggagatttgccaaattatacttctcagacactgccgaaatcacctgctccttctggatatggtagggggaagctagacaatgattttgcaaagtttccaaacagtcgtggaaagttcacatctggtacaagtgcaatcagtagtggatcttcacgaccattccatcttggtcttctttctgacagacctggtggtatatcagatcgttcggcattcagatacagtaggctgaaattgcttgacatataccgaaattgtgatgtcactgattttaagttatctgttgattgtttggaggaactctctgtgttcatgcaagaggatgttttagaacctttagcactatctgctcctgttgctgaagaagcgaccattttaaaagctattgacaaaggggatatcgtaaacagtggtgtccatcaggcttctaaagatggttctgttggaaaagctggtagagaagaccagccaggaggtgtggaagtctcaggtcttgctggaaatactgatttggcagcaagaggggaaccaatgcatcctgcgacatctacttatgttgttccacaaaggtcacagtttattggagaacataaacttggaccatctgaatttgggcatcaaatacctaatttcttaaatcaagaatcaaaaactgttggcatgttgggttttgataactttgccagtccagtgcattctcatcctaatccagaaaacctctctctatactataaagatccacaaggtcaaattcaaggccctttttctggtgccgatattattggctggtttgagactggttattttggcattgatttgctggttcgtccagtgaatgcaccccatgatgttcctttcttaatgcttggggatgttatgcctcacctgcgagcaaaggtaaggcccccaccaggatttgccacttcaaagccaagtgatatgctagctccagagaccctacctacagggaagtttgtcagctctagcatgcaagcaggatcaactggcattggaatatttgacagtgggccaatcaggaaagataatgctgttgaggctcaaaatcgtttcctggagtcacttatgtccaatagtgcgcggaatccttcggcaggcactatctctataactggaggtatgaatgaacttgttagtactagctttggcaacatttctgtgcgcggaggtgagagcggggtcaatctgaactatcttttggcacagaaaggactgttggagagacaaaactctttgcaaaaccctgtttcatattggacaggagatgctccagcatcaaaagtacatcccatggctgatacatctcgccaatctttgcaatctcaaaatgttgatttactagccatgctgcaaccaaaggagaagcctcaagttcctactggtaattcgggtctgccactatgctccaattaccctgaagcaagtatcgttaatcccaacttgcatagtggagatcttgctcaaggggctcttaatatgcgtcaagatatgcagaactcccagaacattggtattggagttcaacaacacaacttaatgccacaaaaccgaccagctttggctcagttgccatctgagaagcttgctgagatgtctcaagatccacaactgttaaatatgattcgtcaagatctgcagaactcccagaacattggtattggatttcaacaacacaacttaatgccacaaaaccgaccagctttggctcagttgccacctgagaagcttgccgagatatctcaagatccacaaatgttaaatatgcttcagcagcaatatcttttgtcacaactacagttgcagtctcagacaccttttacacctcagcctccactctctatgttggacaagatgttattgctcaagcagcagcagcagcagcagcaactgcagcagcagcaacaacaactgcaacagcaactggagcagcaacaaaagctattgttgcagcagcaactgctctctcagatggtgcctcacgcgcatcctaatcaacacactgatgattcttatgcattgaagtatacttctgtgccatctgatgattctaccagtcttggttttagaagaatgcaagaggctattgaagtagatcagaaattttctgtccatggtatgcaagtgggtcaacaacctagtcagtcaattatgaattttagaaatatggatggtatagctttattgcaaaatcctgtaactgcactgccggtgccccatgaaactgctgtgggtgcacttccaaaagaggaccactctcgtcctggaatgtcggaagattttgcaaatgtcgacttacaattgaaatcaactatggtacactcaaagctggtggaagttgcagataggaacgagggttttaaatctcacgaagtggacactgcagcagaaaaaaataaaatgtctgaaaaggagttgaattctggatctactataatcatggggagtgcttctgatgaagctaagaatttgcatgaaccaccactagatccaaagtcagaaaatttatcttctgatatttctggtcaggttcaagagtcaaacctgtctgcagaagatacgcctcctggcatcacagcagctgtggcaactgaaaaaagaaaaggaagcaaaagaaaaaacagggctgctgcagatgctggcaaaggaacatcaaaggcggttgtagcccagcagcaaaggcaggaaactgaggttgacaattctgatattggtggtaataagcatgatttaacagatgatacagaggaactattttggggttcacctatcagagtgcaaaatgagattttaccctccaaaagttttccagaggaacatgacgctgacaaagctgaatcgcagtttagttctctatcatctgatcctcatagcatggcaagccagcgtgcatggaaacaacctactcaaggtctcaggcctaagtcactgctagaaatccaagctgaggaacaactgcgtgcacagaaaggattaactactgaaactgctaagccagcagcttcagttccttcaatttcttggagtggcatgtcaatatcttccgagcaacattatgggggttcaaatatatcattgggaagtatggaaagtgctgttgagagaaataaaagaagccagttgcatgatttgctggcagaagaagttctggcgaggtcaagcattgcagataatgagaataatgccaacgatgcatttttctctcctctgtcgcctgctgctgttcaggctgatgctcctgcccttgatgataatgacttcattgaggccaaggacaaaaagaacaaaaagaggtcagcaaaaacaaaagcttctactgtgaaggctccatcacctgttgtttcctttgatccaccagctatttcgatgccttctgaaaagggaaagtctgccaagcaagcacaacaggagttagaaatattgccagctccaccaagtggtccatcgtttggagattttgttctttggaagagtgatcagactagctctgtgcctgctccagcatggtctaatgactcagcaaaggtgcagaaacctttgtctttgagagatattcagagagaacaagaaaggagaaccgcatctatccagcaacaagcaccctcaccaactccagcaaaggtggccccgaaccaaagaagtcatgtgaatgcttcttcctggcaagcttctggaccacctccatcacaggcagttgcccctgtccaaatgagttccaatgctcccagtcattccaggtcaagtgctgaagatgatttgttttggggcccttctgagcactccaaacaagatacaaagcagtatgtcttgcagcagctcttgcatttgaattga

SEQ ID NO: 30604 - DNA, 780 bp, Zea mays
  Peptide Sequence Number=SeqID_72383
atgattcggatgaacaatgatccgttgattcatgtgtgcagcgataatttctttcagtttgtcgttcatgatatgtatttgttattacctacagtgctcaaggtttctgtcaaaggaaacaatggcaatgattcttctgttactgttcggttgtatggaccaaatacagacttggtgattgatcggaaaagggaattgcaggcgataccgtatctctcagctgcagggttcggggctcggctgcttggaatgtttgaaaatggagtagttcagtcattcatctatgctcgaacactgtcacctgcagacatgaaagaacctaaaatagcagctgaaattgccaaggagctacgcaaatttcatcaagtagatataccagggtctaaagaaccacaattgtggaatgatatattcaagtttttgaagaaagctgcagcattgaagtttgaggataacgagcagcaaaagagatatgtaaagatctcatttacagaaatacaagatgaagttaaagaacttaaggatctcttggacattctgcatgcacctgtggtttatgcacacaatgacttgctttcaggaaatctgatgctcaatgatttggaagggaagctatattttattgattttgagtatgggtcatacagctaccgtgggtatgacattgcaaatcatttcaatgagtatgcaggatttgactgtgactttaatttgtacccagataaagatgcccagtatcacttcttcaggaattatctgcatcctgatagacctagtgag

SEQ ID NO: 30605 - DNA, 339 bp, Zea mays
  Peptide Sequence Number=SeqID_72384
atgtggtctggggatgaaatgcatgcgtttattataattgctttcatttcatccctttcttatttgcttgaacatgcttgcaatcatggcatttccgagggaggcctggttgcacttgcacgggaggatggctggaggttctccagcagcagcgagcacaagaacaagaaccgttacattcttgctctcaagggacaaatgcagctgcaggccggagctgtcgatgtcagcagtagcgagtacattatactccacaggaacaacaatttagcaacagctgcactctaccactcctacacacttgccttctctgacttgtactccatggaatgggattaa

SEQ ID NO: 30606 - DNA, 381 bp, Zea mays
  Peptide Sequence Number=SeqID_72385
atgaggttcccgttagacaacgaggcgctggcctcgccgcagtcgcgggcgaggaggcggtggggcagcccggagaggccagcggcgatgttctcggctgctgctgcagcggcggccgactcgcacagggaccctgtccaagggcctcaagaagttgctgagctacgtgaggaaaggcggccggagcggaggaggcggcggcggcgaccagcctttcccggcacccagcccgcgcgggagtgggaagcccgtcatgtggttcgacgagccagagcatcaccgctcactgcacttccctgtgcctccctgcttgctggtgcgaaacagagttcagagactggccccaaactagcgagctgtgaagtcggtgtagagtactag

SEQ ID NO: 30607 - DNA, 192 bp, Zea mays
  Peptide Sequence Number=SeqID_72386
atgcaagacgagaagctgggaggctcctgggaggatggtgggccccagttcctcagtcaatggcctgaatcctggcgtgcggcttggcttcgagttgggcccacatatcatagacgtgtgaagcctggtgactatgactatgacttctccatcctctatggtgtcttcggcctctgggggagcgaagcctag

SEQ ID NO: 30608 - DNA, 162 bp, Zea mays
  Peptide Sequence Number=SeqID_72387
atggcatatttcaagttcccttgtgctgttggcattgggcctattatgtccatcccccatctttacaagggccagcttacaacatatgatgtttttgctttggatggtgaaataacaatagctgtagcaccagccccgaaggacccccatgaaacatcatag

SEQ ID NO: 30609 - DNA, 521 bp, Zea mays
  Peptide Sequence Number=SeqID_72388
gtgaaccacaagattcgggaatatcattgcagactattcttgaattaggcccaaccatcccaatttttggagtttgcatgggtctgcaatgcattggagaggcatttggaggaaagattatccgtgctccttctagagtgatgcatgggaaaagctctccagtttattacgatgaggaattaggaaatgcattgttcaatggcttgtcaaatttatggtacgtactcctgagtaaagccttccgagttgacgccgccttggcaccctttgcttccatggacaacccttttactgccgtgaggtaccacagcttggtcattgagcaagaaaccttcccacatgatgctttggaggctactgcatggactgaagatggacttatcatggctgctcgccacaagaagtacaaacacatccagggtgtccaattccacccggagagcatcatcacccttgaaggcaagaaaatcgtcctcaacttcgtcagattcattgaggaactggagaagcagcgttcatag

SEQ ID NO: 30610 - DNA, 840 bp, Zea mays
  Peptide Sequence Number=SeqID_72389
atgggtcggtgcgagacggagcgcgaagaggggaagagaagccggagggagacaggcgtgagaggtgaaacccgcggccttcgtggtaatgatggcgcctcctatgacgtggtcggtccgagccctgggttgggcgaggtggaggctcctccgaggtcgaggtcgagtctgtcttccaaggccgaggtcgagtccgagcccctgggtcgggcgaggcggagaccgtcggctgaggctagggctgagtccgagccctggggtcagccgaagcagagttcgtcgtcttccagggctgagcccgagttcgagccctggggtcgggcgaagcggagttcgtcgtcttccggggctgagcccgagtccgagccctggggtcgggcgaagcggagttcatcgtcttccgaggctgagcccgagtccgagccctggggtcgggcgaagcagagttcgtcgtcttccgaggctgagcccgagtccgagccctggggtcgggtgaagcggagttcgtcgtcttccggggctgagcccgagtccgagccctggggtcgggcgaagcggagttcgtcgtcttccggggttgagcccgagtccgagccctggagtcgggcgaagcggagttcgtcgtcttccggggctgagcccgagtccgagccctggggtcgggcgaagcggagttcgtcgtcttccggggctgagcccgagtccgagccctggggtcgagcgatgcggagtttcctatggcgcctgaagccggacttggctgctgtcagcctcactctgtcgagtggcacagcagtcggagcggcacaggcggcgctgtcctcttgtcaggccggttag

SEQ ID NO: 30611 - DNA, 165 bp, Zea mays
  Peptide Sequence Number=SeqID_72390
atgattttatctactggctgccctctgaaggtgccggagggcgcggggacggtgaaggtgcgggagggcaagatctgccgggcgctggagccgctgtgcctcagggtcgtcgccgccatcatcggggccgccggcgatgccatcgtccacgccatgttcgtcgag

SEQ ID NO: 30612 - DNA, 237 bp, Zea mays
  Peptide Sequence Number=SeqID_72391
atgcaccaacttcgtcgtcgcgtgttgaagcctcgggagcctttgcccaagctcgaaggatgccagagacccaccgtcgacaccgtcgtgccccagttcgcgccagcgtgtgtggaccgagcgttgtcttccaccgttcgaggagtcaagcccaccgtcaagctcaccttcgaccgtcgcttctcccagacccttgccctgcttgactcaccaccgaaaacctttggaaattcataa

SEQ ID NO: 30613 - DNA, 1665 bp, Zea mays
  Peptide Sequence Number=SeqID_72392
atggggcccatcaaggacttgaaaggcgtacagagggtcatgggatgccttgcggctctgagccgcttcatctcgcgcctcggcgaaagaggcctacctctgtaccacctcttaagaaaggccgagtgcttcacttggacctccgaggccgaggaagccctcgagaacctgaaggcgctcctcacgaatgcgcccatcttggtgcctcccgctgccggagaagccctcttgatctacgtcgccgctaccactcaggtggtcagcgccgcgatcgtggttgagagacgagaagaagggcatgcattgcccgtccagaggccggtctacttcatcagtgaggtactatccgagaccaagatccggtacccacaaattcagaagctgctgtacgcggtgattctgacgcggcggaagttgcaacactacttcgagtctcatccggggcgggcgtgggcctgctttttcatctcgcccctcgggaagcacctccgctacgtgctgcgcctccatttcccggtgtccaacaacgtggctgagtacgaggctctggtcaacgggttgcgtatcaccatcgagctaggggtccgacgcctcgacgctcgcggtgactcgcagcttgtcatcgaccaagtcatgaagaactcccactgtcacgacccgaagatggaagcctactgcgatgaggttcggtgcctggaggacaagttctacgggctcgagctcaaccacgtcgcccgacgatacaacgagactgcgaacgaactgattaatatagcctcaggacggacaacggttcctcccgacgtcttctcccgagacctacatcaaccctcagtcaagaccgacgacacgcccgagcccgagaaggcctcggccctgcccgaggcaccctcggctcagcccgaggcaccctcggcccccgagggtgaggcactgcgcgtcgagaaggcacccgggggctacacgcacctgctggtcgccattgacaaattctccaagtggatcgaggtccgacccctaaacagcatcagaaagttcctggacttctgcgaggatcaccacattcgggtggactgggccgccgtggctcaccccatgacgaatgggcaggtagaacgtgccaatggcatgattctgcaaggactcaagccgcggatctacaacgacctcaacaagttcggcaggcgatggatgaaggaactcccctcggtggtctggagtctgaggacaacgccgagccgagccacgggcttcacaccgttctttctagtctatggggccgaggccatcttgcccacagacttagaatatggttccccgagggcgagggcgtacgacgaccaaagcaatcagaccaaccgagaagactcactggaccagctggaagaggctcgggacacggccttactacactcggcgcggtatcagcagtccctgcgacgctaccacgcccgaggggttcggtcccgagacctccaggcgggcgacttggtgcttcggctacgacaagacgcccgagggcggcacaagctcatgcctccctgggaagggccgttcgtcatcgccaaggtcctaaagcccgggacatacaagctggccaacagtcaaggcgaggtctatagcaacgcttggaacatccgacagctacgtcgcttctacccttaa

SEQ ID NO: 30614 - DNA, 255 bp, Zea mays
  Peptide Sequence Number=SeqID_72393
atggcccttatcgcacttgtcctcacaaaagcccatcactatgggccgaatcacacatgggcctcccccggcgccttcgtccgcgcgatgagaagacgaagtcgtagagcaaagggtggcgtgttcgcctttgccccaacaatgatcaaagctcgtagtagaggttacaagcgggcaagagagggaggagaggctcccaagtctcttatcatggtggaggtggagctaagggttacagactggagtcctaactaa

SEQ ID NO: 30615 - DNA, 201 bp, Zea mays
  Peptide Sequence Number=SeqID_72394
atggccgacagcgacagggacctcatctttgacgcgctctgcatggactcggactcggatctgagtccctttaagaacagtgaggaagaaccccccagcgacgaggagaacgaataccacccggcttctgcagccccatcggggataccagcaaagtggggcactacgcatgttaggagtcggagggatcgccggtcgtaa

SEQ ID NO: 30616 - DNA, 267 bp, Zea mays
  Peptide Sequence Number=SeqID_72395
atgaacttgaaagaaatcattagttttcacaagatatatgctaaactcttcctcaatttgtgcatgcaagagtacacaaagtacacttatgcacatcaacaatacaagatgatgaaaattaaaccaattgaaggtttaaggactgaaagtatatcaattgaagtcttgaaagcccatgaaccaaagcaaaatggcccaaaggccaccaagaacggaagcgcccaacccaagcgccgtgtggcccgtgtccctgttggctgctgctag

SEQ ID NO: 30617 - DNA, 186 bp, Zea mays
  Peptide Sequence Number=SeqID_72396
atggcgccagtgccctgcacagcgtccccctcccccaggctcctagcgcgcagagcatttctctgggtccgagctcgagcagccgctcccctcaacaactccctcaacgccgacctcctctgccccagaaattcccccctgggcgatggaggtgccaagctcgcgctagagcatggcaaggcttga

SEQ ID NO: 30618 - DNA, 357 bp, Zea mays
  Peptide Sequence Number=SeqID_72397
atggccacccgaggaggcgtcacccacgaccgcggcgaggaactcgccggagacgaaggaagcgggtttctgagggtcctagggcggtcggatggtctagggagccttgcaacttgcaagtgggtcccattgaacctttcctttctcctgttcatcttcgcgagcaaaccaggcgctaccttctcgtctcgatggaaaaagccgcagccaccaaacgcgattggaatgcgccactgccggtccacctccgcccaggtggaaaagagaagggaaatgatgcttcgactgaccgagctccaaaagaagattgacgaagcagctgagaaaatgcgaaatattgcgcaggatactgagtaa

SEQ ID NO: 30619 - DNA, 684 bp, Zea mays
  Peptide Sequence Number=SeqID_72398
atggccgagtacgaggctctggttaacgggttgcgcatcgccatcgagctaggggttcggcgcctcgatgctcgtggcgactcacagcttgtcatcgaccaagtcatgaagaactcccactgccgcgacccgaagatggaggcctactgcgacgaggtttggcgcctggaagacaagttctacgggctcgagctcaaccacgtcgctcgacggtacaacgagactgcggatgagctggctaaaatagcctcggggcgaacaacggttcccccgaacgtcttctcccgagacctacatcaaccctctgtcaagaccgacgacacgcctgagcccgaggaggcctcggtccagcccgaggaggcctcggtccagctcgaggaggcctcggcccagcccgaggcaccctcggccgccgaaggtgaggcactgcgcgtcgaggaagagcggaatgggaaggcacccgggggcttcatgcacctgctggtcgctatcgacaaattctccaagtggatcgaggtccgacccctaaacagcatcaggtctgagcaggcggtggcgttcttcaccaacatcatccatcgctttggggtcccgaactccatcatcaccgacaacggcacccagttcactgacaggaaattcctggacttctgcgaggaccaccacatccgtgtggacccatga

SEQ ID NO: 30620 - DNA, 1423 bp, Zea mays
  Peptide Sequence Number=SeqID_72399
atggccgcggcagtgactcgccgggtcggtctccacgtcgaggcgaccaatggcggcgccgacgacgagagcaggcgcaatagctcggcagctgaccactcgccagtggccaagcggatcaacgacgccgccgccaacgccaagcgcaacgacgtctgggtggccgcccaggagggagaaatgcctgcagctgcaggcaactccagccagccgcccctgctgttccggaccatgaaggtcaagggcagcatcctgcacccttacaggtttgttattcttctgcggctggtcgccatcgtcgcattcttcatatggcgcatccggaaccggaaccgcgacggcgtgtggctctgggccatgtccatggtcggcgacgtctggttcggcttctcgtgggtcctcaaccagctcccgaagctgaaccccatcaagcgtgtcccggacctcgccgccatcagagaccagtacgagcagccttccgcctccggcggcgagtccaacaacaagctgcccggcatcgacgtcttcgtcaccaccgtcgaccccgtagacgagcccatactgtacacggtgaactccgtgctctccatcctcgccaccgactacccggtcgagaagtacgcctgctacctctcggacgacggcggcacgctggtccactacgaagcgatgctcgaggttgcgagtttcgccaggctatgggcgcccttctgccggaagcatagcgtcgagccgagagctccggagagctactttggagtgaagaggcgccaaccgtacacgggaagcgtgcagggagagttcacaagcgatcacaggcgcatgcgcagggaatacgaagagttcaaggtgaggatcgactctcttttcagcaccgtctgccaaagatctcaagcgtacaacagaaagcatgccaaggacgacgaagctggtatggtgatgaaggcgacgtggatggctgacgcaagcatcgacaatccatttgacttcagcaacactgacacgcgcctccccatgctcgtctacatgtcccgcgagaagcgcaccggctacaaccaccagaagaaagccggcgccatgaacgcgatgctccgggtgtccgccttgctctccaacgcgccgttcctcatcaacttcgactgcgaccactacgtcaacaactcgcaggctttccgcgccagcatgtgcttcatgctggacccacgcgacggccggaacacggctttcgtccagttcccgcagcgcttcgacggcgtggacccgacggaccggtacgcgaaccacaaccgcgtcttcttcgacggcaccatgctcaccctcacgggctgcaagggccttcctacctcggcaccggaaccatggtccgccgtgccgcgctgtactgatggaaccaccgcggtggagaacgactggcagcgtcaag

SEQ ID NO: 30621 - DNA, 291 bp, Zea mays
  Peptide Sequence Number=SeqID_72400
atggccacggcgcacggcggtactggcccggccaaagtgctccggcgagcaattggtgcattaccggaggatatccccgcccggaaggtccacgaagacgtgcgggtaacacaagagagcatccccaatcgcaagccgagaccagagcgacgcccaggtcgagaatccccggcggcggacgacagactctctttctcggcattgttttctcggtcgcgggagggtggctggcttcgtggggctttcggtttcgtggttaggggattggagccttggaggggcgaggcgtga

SEQ ID NO: 30622 - DNA, 2091 bp, Zea mays
  Peptide Sequence Number=SeqID_72401
atgaactctatcctgtccattcttgccgtagactacccaatcgataggactgctacctacctctcggatgatggagggtccataatccattacgagggcttgcttgagacagcaaatttcgcgacactctgggttccattttgccgaaaacatagcattgagccgagagcccctgagagctattttgctgtgaagtcgcgcccatacactggaaatgtaccagatgagtttgctgatgatcatagacgcatgtctaaggagtatgatgagttcaaggtgcgtttggatgcactttttactaaaatccctgaacgctcagatgcacacaatgcagaggccaaggaaggtgtaaaggcaacctggatggcagacggaacacagtggccaggaacatggtttgaccctgctgaaaaccacaagaaagggcaacatgctggaattgttaaggttatgttgaatcacccgggcgatgaacctcggtttggtggaccagcaagtgctgaaacccctctggacttcagtgccgttgacgtgcggctcccaatgctcgtctatatctcccgtgagaagagtccaagccatgaccaccaaaagaaagcaggcgccatgaacgtgcagctgcggatctctgcgcttctgaccaacgctcccttcatcatcaattttgatggtgaccactacgtcaacaactcacaggccttccgagctgcgatgtgcttcatgctggaccggcgggatggcgagaacaccgcttttgttcagttcccgcaacgctttgacgatgtcgacccaacagacaggtactgcaatcacaaccgtgtcttctttgatgccaccttgctcggcctaaatggcatccagggaccctcctatgttggcaccggttgcatgttccgccggatcgctgtctatggtattgatccacctcgttggagaactgatgccttcaagcttgtggacaaccccagcaagtttggcagctcaatgctcttcatcaactccataccatcggctgcgaaccaagaatggtccatggcgtcaccaccggcacatgaggagtcggtcatggaagagctgaataatgtcatgaagtgcgcatatgaagagggcactgagttcggaaaggaaatcggctgggtgtacaacattgctacggaggacgtggtgaccggcttccgagtacaccggacagggtggcgatctatgtactgccgcatggagccggatgccttccgtggcactgcaccaatcaacctcacggagcgcctctgccagatcctgcgctggtcgggcggctcccttgaaatgttcttctcacactgcccgctccttgctggccgtcgactgaacttgatgcaacggatcgcctacaccaacatgacagcctacccaatctcatcggtcttccttgtgttctacctcctcttccccgtcatatggatcttccgtggcgagttctacatccagaagccgttcccgacatacgtgctgtacctcgtcgtcatcatagcaatgacagagctgatcggcatggtggagatcaagtgggcaggcctcacgctgctggactggatccgcaacgagcagttctacatcatcggggcgacagccgtgtacccgttagcgacgctgcacatcgtgctgaagctagtccttcgcgggaacggcgtttcgttcaagctgacggcgaagcaggctacgagcgccgtgaacgagaagtacgctgagatgtacgtggtgcagtggacgccactgctgatccccacaatagcggtgatcgccgtgaacgtcggcgcgatcggggcggcgatcggcaaggcggtcgtcggggggtggtcgctcctgcagatggccgacgcgtcccttggactggtgttcaacgcgtggatcctgctgctgatctacccgttcgcgctcggggtgatggggcggtggagcaagaggccctatatcctgttcgtcctgttcatgattgggttcgctgtagtggcggcggtggttgttgccatccatgctgcgcgcactggttctgttcggttccattccggacattcaggcggtgctagcttccctacaagctgggggttttag

SEQ ID NO: 30623 - DNA, 2490 bp, Zea mays
  Peptide Sequence Number=SeqID_72402
atggcccacgccgccgcggcagcgctcgcccttctcgtcttcttctgcgcgcaagcgcgggacgcggccgtccatgtcgtcgacgcggcggcgacgctgtcgcaggggcagtcgctgggcgccaccgacaagctgtccaccgagcagaccgtgccgtgggtggcccaccgcgacgtgcccgtgagcgcgggctccgcgtactcggcgaccgtcacggccgccggggagctgcatgtactggagggcgaccgcgtggtctggcgcaacgacaactccgcgacgacgacgtcgcagaaaacagcgggaggcgaacaagcagcgaacgtgacgctcaccgtgctcgacaccgggaacctccagctggtcgcgggcgacgggggccccgtcatctggcagagcttcgaccaccccgcggacaccttcctccccgggatgagcatcaccctggaccggcgcggcggcggggccgtccgccggacgctgttcacgtcgtggcggagccccgcggaccccggcaccggggacttcacgctggggcaggacccgctcggctccgcgcagctctacatctggcagacgaccggcggccagaacaccacctactggcggtccgggcagtgggccaacaccaacttcgtcggcgtgccctggcgctcgctctacgtgtacggcttcaagctcaacggcgaccccaacaacggctccggggtcatgtcctacgtcttcaacacgtacaacagctccgagtaccggttcatgctccactccaacggcaccgagacgtgctacatgctcctcgccaccggcgactgggagaccgtctggtcgcagccgaccatcccgtgccaggcctacaacatgtgcggcgccaacgcccagtgcgccgccgccgccgacggcggccaggcagtctgcacctgcctgacaggtttcgagccgaggaacgtatcggagtacagcaacgggaactggacgcaggggtgcgtcaggagctccccgctgccctgcggcggcgagccgaactcgtgcctgggcaactgctcgtgcggcgcgtacagctacagcactggcaccggctgcctcacctggggccaggacctgctggacatctaccgcttcccggatggagaaggatacgatctgcagatcaagatgcgtcacgccatctctacggatttattgcctgtctttgttcgacgacgcgttaagactaatcgtgccaagacgggctccaaaaggaggcgatggacgacagttgtcgtcgccgtagtcgtcgccgtggctgtattggcaggatgcggccttctcctgtggaaatgcaggagaaggatcaaagagaaacttggcatcgttgttggcagtgaggagacgaaggcgacgcagccgtctctgcttcctttgagggaagcaaggcaggatttctcagggccgaagcagactgatcaagaggaagcagagggcggcaagaagttcgagctgcctatcttctccttggagacggtagcggcggccaccggcgacttcagtgccgacaacaagcttggggagggaggctttggccatgtctacaagggaagacttcccggggccgaagaggttgcggtgaagaggctgtcccggggctcagtgcaggggatggaggagtttaagaacgaggtcatcctgatcgccaagctgcagcaccgcaaccttgtcaagttgttaggctgctgcatccagggggaggagaagatcttggtgtacgagtacatgcccaacaagagcctggacggcttccttttcgatccggcgcggcgaggcctgctggactggaagacgaggttccacatcatcgagggcatcgcccgagggctcctgtacctccacagggactcgcgtctccgcgtggtgcaccgcgacctcaaggccagcaacatcctgctagaccacgacatgatccccaagatctccgacttcggcatggcgcgcatcttcggcggcgaccagaaccaggtgaacacgaaccgcgtcgtgggcacgctggggtacatgtcacccgagtacgccatggagggcctcttctccgtgcgctccgacgtgtacagcttcggcatcctcatcctggagatcgtctccgggcagaagaacagcagcttccaccacatggagggctccctcaacatcgtcggctacgcgtggcagctgtggaacgccgacaggggggagcgcctgatcgacccggccatcctgccggcgtgctccgtgcgggaggcgctgcgctgcgtgcacatggcgctgctgtgcgtgcaggaccacgcgtgcgaccgcccggacatcccctacgtcgtcatggcgctcggcagcgacagctccgtgctgccgatgcccaagccgcccacgttcacgctgcagtgcacgtcgtcgtcggacagggacgggatcttcccggacaaggtcgacgagtcctactccgcctgcgatctcaccgttaccatgctgcatgggaggtag

SEQ ID NO: 30624 - DNA, 1335 bp, Zea mays
  Peptide Sequence Number=SeqID_72403
atggcggccgcgggtgcgcgactaccattagctctgctgcttcccctgttcgttactttcttcgcctcccccgcctccgcgactgacaccatcaccgccaactcttccctcagcgatggccagacgctcgtttcagcgggcggggtgttccagctgggcttcttcaccccggccagctcgacggcgaggttcttgggcatctggtacatgggcctcgctccccagaccgttgtctgggtcgccaaccgggaagccccgatcaccggcaccacggcgagcctggccatcaacgccaccggcagcctggtgctcgccgacccctctgggcgggtgttctggtcgtcgccgcagtccaacatgagcagcactggctcccctgtcggggcgcagctgctggacagcggcaacttcgtgcttcaaggagggggtggcgccgtcctgtggcagagcttcgattacccttccgacaccctgctcccgggcatgaagctcgggtgggacctgaccacggggctcgaccggcacctgacgacgtggcggagcaccggcgacccgtcgccgggcgactacacgttcgggttcgacctccgcggcgtccccgaggggttcatacggcgcgacggcacggtgcccgtgtaccggaacgggccgtggaacgggctgcagttcagcggcgagccggagatggagcccaacaacagcaacttccagttcgagttcgtcgacaacgccagcgacgtgtactacacgttcctggtggacggcggcggcggcagcggcaacggcggtgtcgtgtcgcggttcgtgctgaaccagtcgagcgtgcagcgctacgtgtggccgccgggcgggcaggggtggagcctctactggtcgctgccgcgggaccagtgcgacaactacgcgcactgcggcgccttcggcgcctgcgacaccagcggcggctcggcggcgtgcgcctgcgtgcacgggttcacgccggcgtcgccgcgggactgggagctcagggacagctccgctgggtgcaggcgcctcacgcggctcaactgcaccggggacggcttcctgccgctgcgcggcgtgaagctgccggacacgacgaacgcgacggaggatgcgaccatcactgtcgaccagtgcaggcagaggtgcctcgccaactgctcctgcctggcctacgccgcttccagcatcaagggaggcgatagtggctgcatcatctggagctcgccgctcattgacatcaggcatttcccttccggtggccaggatctgttcgttcgcctggcggcatctgacctgcgtacgatctctcagctcatctcttctcattag

SEQ ID NO: 30625 - DNA, 1260 bp, Zea mays
  Peptide Sequence Number=SeqID_72404
atgacatggacagcatccgacggagacggttccaggaagaagaacgtagtcgtcgccgttgtcgtaagcctatcggccgtcctccttgtcggcgtcggcggattcttcctctggaagaagcttttcagaaacaaagctgggaggttccagagcgcgcagaggttcagctcgtttgactccagcgtccctcttaccccggtccaactccaagacaggagcaaggaggacgaagccggtcagagcagcgacctgaacgtcacgctctttgacatggacgccatcgctctctccactgacaacttcgcggcgtggaacaagctcggggaaggcggcttcggcgcggtgtacaaggggcaactggaaggagggcaggcggtggcggtgaagcggctgtccaagtactcgacgcagggactgggcgagttcaagaacgaggtgatgctcatcgccaagctgcagcacgtgaacctggtcaggctcctgggctgctgcgtccatggagaggagaggatgctggtgtacgagtacatggagaacaagagcctcgacaacttcatctttggtaacaagaaccgatccgcgcagctgcactggtccaagaggttcgacatcatcctgggcatcgcacgcgggctcctgtacctgcaccaggactcccggtacaaggtgatccaccgggatctcaaggccggcaacatcctcttggacaaggacatgaaccccaagatctccgacttcggcgtggccaggatcttcggcgacgacaccgactcgcacaccaggaaagtcgtcggaacatacgggtacatgtccccggagtacgccatggacggcgtcttctcggtgaagtccgacgtgttcagcttcggcgtgctggtgctggagatcgtcagcggcaggaagaaccggggcatgtacagcagcggcgagcagacgagcctcctcagccaggcgtggaggctgtggagggaaggcaacgcgctggcgctgctggacgaggcggtggtccgcgccggcacgcaccggagctccgaggtgctgcgctgcgtgcaggtggcgctgctgtgcgtgcaggagcggcccgacgaccggccgcacatggcggcggtgttcctggcgctgggcaacccgagcgcggtgctcccgcagcccaggcacccgggctactgcaccgaccggggctccgcctccaccgacggcgagtggtcgtccacatgcaccgtcaacgacgtcaccgtcaccatcgtggaaggacggtga

SEQ ID NO: 30626 - DNA, 234 bp, Zea mays
  Peptide Sequence Number=SeqID_72405
atgaccctcaaaacccttggacaaccccgaagccctcaaatagtcctaacgacatggatggccttcacgtccctagaggccatcgactccctcataggccttgagagcctcaagaatgtcctatatgatagcgtctttgcaccaataagccacttggaacacgctaagataagttgtgtcttcaacaagcagcagtcgtgccaaacaggaccaatgaaaagctctaaggtctag

SEQ ID NO: 30627 - DNA, 423 bp, Zea mays
  Peptide Sequence Number=SeqID_72406
atgggcaagagcaagaaaggcagaagctcgtcgcaccactccggcgacaagcagaagcgtgagccgacccctccctcagaggacttcggcgattctgagtactcggaggaggagttttcctccgagtccgaggggtcgccaatctacacctcgcccccggcatcgttcgatgactcggacgattcccaggggatcgccgctgaggtgtggacatatatccgggctgtcaagcgttcagggctcgagggttcggatgagtcggaggtctccttggacgaggagaactcctctgactcgtcggaggaggggagcagcggtgacggcgatggcgagagcgacggtgacgacggaggcgacgacaagggcgacggcaagggcggcagcggcagcggcaaggccagtggcaaagcgccacttgcttag

SEQ ID NO: 30628 - DNA, 1773 bp, Zea mays
  Peptide Sequence Number=SeqID_72407
atggacaccatcgaggagtgcggcgacggaggccgccacctgctgctgggcctcggcaccaggatactcgtcggcgtgccggacaactcccgcggctgctccgagctgctgtcgtgggcgatcggcgccgtcgccaagcccagcgactccgtcgtcgccgtgcacgtcctcggagggagggggaggaagcggaggctgcagaaggccaacgccttcgtcatctacatgctcggcgaattcgtcaaagcttgtgaggccaagcagattaatttggaggccaaggtgatatgcagctcaaacattgggagagccctgacccaagaagctgcactgactgatgggaacatcctcattgttgggaggagccatttcgagattgcaaactactgcttcatgcatgctccaaaaaactgctcggtgatcgctgttggaaggcaaggcgtagcacagagtagtactcggttgagacctcggtcatttgatgtagcagatagcaccatctcctcaagctcaacatggagcaggagattcccgccgcttcagaagctgctcagaacaaactcgacacggaagctggctcagtccgacgacaagagctcgccgagagcagttctggacggcccagagggagagggaggggagaaccaagagtgctacagcacgtctagccatgaggtgagccggcgcggccacaacggcctgtggaggcggctgtcagacatgaagctctggctcccgttcctgaggaacatcggcgatgacagcaccaggggcagcgacgtcggttcggccttcgctgaagatcacaagcctgcctggaggtgcttcagcttccaggagatttcagtggccactaatgacttccacccagacaacatggctggaagaggaggctatgcagaagtatacaagggcaccctagctgacggccatcttgtagccgtgaagaggctagcaaaaggcaccccgagcgagcagaaggaaaaggagttcctggcagagctagggatccaggggcatgtatgccatccaaacacatcctaccttcttggatgctgcgtggagaatgggctgtacctgatattcgagttctgcacgaatggcaccctagcatcggcactgcatgggaagggtgggagaacccttgaatggcctctgaggtacaagatcgcggtgggcgttgcgaggggcctgcagtacctgcacatgttctgcaggcaccggatcatccaccgcgacatcaaggcgtccaatgtgcttctcggccatgacttcgaacctcagatttcggacttcggattggccaagtggctcccaaagcagtggactcaccattctgtcgtacccatagaaggcacattcgggtacttagcaccagaatacttcatgcacggcattgtcgacgaaaagacggacatcttcgcctttggcgtgctgctgctggagatcgtcaccggaaggagacccattgactgctccaagcaaagccttctacaatgggcaaagccactgctggaagctgggcaggtgactgagcttgcagacccaagcctcggggacgactacgacaaagatcagctgaacaggatggtcgcggtcgcgtcccgctgcatcatgcgaccggcgatgtggcggccttcgatggccgaggttctgcatttcctgtctactactgatgagtgtctgaacgagcccgagaaatggaacattcccgacgacgaggtggacgacatggatgattgtacactgttctctgaatccttttccatgtaa

SEQ ID NO: 30629 - DNA, 306 bp, Zea mays
  Peptide Sequence Number=SeqID_72408
atgggccgggcaattggaaatagtggaagcaggccgacccaggaacgcgatgggctagcgcccaagctagtcacggttttgacatgtagagggaactctgcaccacatagcaaccccacccaagaagaaatcctcctcaggaatgccacagggagctgcaaggaaaccacgagtcgtgcccccgctaacagcatgacagggcatggtcccgcgcaagtctgggctcagaagtccccagagggtagaaggccaatcaaccacggcctccccaacttggtgaactccgttctccacctcgcctactaa

SEQ ID NO: 30630 - DNA, 375 bp, Zea mays
  Peptide Sequence Number=SeqID_72409
atgtcgcctgaggaagttcttggcaaatttgtaagtgggtgcatgatggtgagagaagcaaggtctcatcgcttcagaaaatctcgaagaatccgagcggtacacccaatgggtgtgcccaacggcgtccccgtggcgtcatatgatgattcagacgattccatggggcagtccaccgcgaagcgggcatatatccggtccatcgagcgcgcggggctcggcgggggcagtgacgacagcgatgaaggcagcagcgacggtgacggcgagggtagtggcgacggtgcctgctgtgaaggcaaccgcaggggcagcgacggcagcagcaggggcggcggctatggtgatgccagtggtagagtgccaccggcttaa

SEQ ID NO: 30631 - DNA, 775 bp, Zea mays
  Peptide Sequence Number=SeqID_72410
atgggtcggcgcgaggccgagcgcgaaggggggagaaaggtggccggagacgggcgtgagagaggtggaaatcccgcggccttcgtgttcgtcccgcgcccaggtcggcttgggggtagggtgatgatggtgcctcctgttgacgtggctggtctgcgccctaggttgggcgatgtggaggctcctccgaggtcgaggtcgagtctgtcttccgtggccgaggtcgagtccgagcccccgagtcgggtgaggcggagaccgtcagctgaggccagggctgagtccgagccctggggtcaggcggagcggtgttcgtcgtcttccggggttgagcctaagtccgagccctgggtcgggcggagcggacccgagtccgagccctgggtcgggcggagcggagttcgccgtcttccggggcttagcccgagtctgagccctgggtcgggcggagtggagttcgccgtcttccggggcttagcccgtgtccgagccctaggtcgggcggagcggagttcgccgtcttctggggctgagcccgtgtccgagccttgggtcgggcggagtggagttcgccatcttccggggctgagcccgagtccgagccctgggtcaggcgaagcggagcttcctacgatgccttctgcagggcctgactgcctatcagtctcactctgtcaagtggcaccgcagtcggagtggcgcaggcggcgctgtccttctgtcaggccgcttcatgctgatgggggttaccagctgagaattaggagccttgagg

SEQ ID NO: 30632 - DNA, 411 bp, Zea mays
  Peptide Sequence Number=SeqID_72411
atggggctcctcagctccctgccgccccatcgccggggcgccttctcgggtggcggatggcagtggtcgttcctcgacgtcgtatggggggtcttcctcatcgccgtggtcgtcttcctcgcgctcgtcttcactccgcggcgcggggaccccatcctaaccaccccctctgtcgcccgcgccggcggcacggtgccgccgtgcgctgcctctgaggtggacctcctcccctgcgaggacccgcgccgcagctcccgcctcagccgcgagatgaactactaccgggagcgccactgcccaactcgtggcgaggcgctcgcgtgccttgtgccgccgccccgaggttaccgcattcctgtgccctggcccgagagcctccacaaggtgcatgttgtcggcattggcctttga

SEQ ID NO: 30633 - DNA, 1167 bp, Zea mays
  Peptide Sequence Number=SeqID_72412
atgtcgaacgccgccgacgtggaggcgggcgcccaggcgagggcggcgccggcgacgacggggatcaagccgcccccggggcggtacaacaacatgaccagcaacgggccgtacacgccaccgtcgccgttctactacgaccccgcggcggcgcacgggcggcaccactggtcgtggctggtgccgctggtggtcatcgccaacgtgctcatgttcgtgctggtcatgttctacaacaactgcccgcgcagcggcggggactgcgtcggcccgcggcttcctccgccgcttctccttccagccgctcaaggagaaccccctcctcggccccacggccgccacgtaagaatcgccacctctcgccgcgcgaattcatctccttcccttccatccagcacaatccgctggactcgcgacgcctctctgggtctcatctcatctcgtctgatctctaatctcccacgtcgtcgtcccgccgcgcgcaggctgcagagatacggagccctcgactggtacaaggtcgtgcacgggaaccaggcctggcggctggagtcgtgcacctggctgcacgccggcctcatccacctgctcgccaacatgatcagcctcatcttcatcggcgtccgcctggagcagcagtttggattctggaaggtgggcctggtgtacctcgtctctggcttcggagggagcgtgctctccgtcttcttcatcaggaagggcgtctccgtgggcgcctccggcgcgctcttcggcctcctgggagcgatgctgtcggagctcatcaccaactggtccatctacaccaacagatttgcagccatgctgaacctgatcatcatcgccgccatcaacctggcgctcgggatactcccgcacgttgacaacttcgcgcacatcggcgggttcgccacaggcttcctcctcggcttcgtgctgctgatccagccccagttcgggtggctggagcagcccttcggtgccaagaccaagtccaagtacaaggcatatcagatcatcctcctgcttgctgccctcgtcttgctggctgcagggttcgctgttggattggtaatggtgttcagaggagagaacggcaacgatcactgtagctggtgccactacctgacctgcgtgccgacgtcaagctggaagtgtgacaattga

SEQ ID NO: 30634 - DNA, 1140 bp, Zea mays
  Peptide Sequence Number=SeqID_72413
atgccttatggtaagattgctgaaagaaaaggtcatcaagggtggatgaagcatgaaggttcgtacttcatttttcctggcggtgggactatgttccctgatggagctgaacaatatattgaaaagcttagccagtatgttccaatgaaaactggtgtcatcaggactggtcttgatatgggatgcggggttgctagctttggtggatttttgcttaaggagaatatcatgacactttcatttgcaccaagagattcacataagtctcaaatacaatttgctttggagagaggagttccagcatttcttttgatgttgggcactcgccgtcttccttttccagcacagtcctttgattttgtccattgttcccggtgtttgataccttttactgcctataatggatcttactttattgaagctgaccgtctgctaaggcatgggggctatctaatcatatcaggcccccctgtgagatggaagaatcaggagaaggaatgggatgaacttcaagcaatggcaggagctttgtgttacaaattgatcactgtagatggtaatactgccatttggaagaaacctgctgaggcttcatgtcttcctaaccaaaatggatttggccttgatctttgtagcaccgactatgatccagatgaagcatggtacttcaagttgaataaatgtgtcagtaaaatttcagtggcggaagagacagctataggttccattctcaagtggccagataggctgtctaaaccttctgctagggcatcagttatcaacaatggagcaaacttgtttgaagtagatagtcagaagtgggttaggagagtgtcatattataagaaatcgcttggtgtgaagcttgggagcacaaacatacgcaatgtcatggacatgaatgcattctttggaggattcgcagccgctataatatctgatcctgtatgggttatgaatgttgttcctggtcagaagccattgacacttggagttatttatgataggggccttataggggtttatcatgactggtgtgaaccattctcaacgtatcctcgtacctatgatcttattcatgctgatgcaattgactccttgataagtggcccgatttcaggcactagcagaaatccataa

SEQ ID NO: 30635 - DNA, 336 bp, Zea mays
  Peptide Sequence Number=SeqID_72414
atggcgcccctggcaaggcctgactgcctgtcagactcactctgtcgagtggcaccgcagtcggagtggcgcagacggcgctgtccttctgtcagaccgctttatgctgatgggggttaccagctgagaattaggcgtcttgagggtacccctaattatggtccccgacagcaatctaatcagctgtggatcacacgagatgaacttgagctacacttaattatggctttcggtataccaaggagcacacactgcttggatctagaaaacaaaataggcattgcattgggatctaagacaacatgggcattgcattgggaactttctgacgagtaa

SEQ ID NO: 30636 - DNA, 3363 bp, Zea mays
  Peptide Sequence Number=SeqID_72415
atgcgccgccgccacctccccctcccccttccccttcttccccttgtcttactccacctcctcttcgcggcgtcctctggctcgccttcgtcagaggtcgccttcttgacggcctggctcaacaccacggccgcgcgcccgccggactggtcgccggccgcattgtccccgtgcaactggtcgcacgtctcctgcgccggcgggacaggcgagacgggcgccgtcacgtccgtgtccttccagtccgtgcacctcgcggtcccgctcccggcgggcctctgcgccgcgctgccggggctcgtgtcgtttgtcgtctcggatgccaacctcacaggcggcgtccccgatgacctgtggcggtgccgccgcctcaccgtgctagatatcagcggcaacgcgctcaccggctccatcccgtcatcgctcgggaacgccacggcgctcgagaacttggcgctcaactccaaccagctctccgggcccatcccgccggagcttgcggcgcttgcgcccacgctcaggaacctgctcctcttcgacaaccgcctgtccggggagctcccgccgtctctcggcgacctgctcttgctcgagtcgttgcgcgccggcggcaaccatgacctggcgggcttgatacccgagtccttctccaggctgtccagcctcgtcgtgctcggcctcgccgacaccaagatctccggcccgctcccggcgtcgctgggccagctccagagcctccagacgctgtccatttacaccacggcgctctccggcgccatcccgccggagctcggcaactgctccaacctcaccagcatctacctctacgagaactcgctgtccggccctctgccaccgtcgctcggcgcgctgccgcggctgcagaagctgctgctgtggcagaacgcgctcacgggccccatcccggagtccttcggcaacctcacttcgctcgtctcgctcgacctctccatcaactccatctccggcaccatcccggcgtcgctcgggcggctgccggcgctgcaggacctcatgctcagcgacaacaacatcaccggcaccatcccgccgttgctcgccaacgccacgtcgctggtgcagctgcagaaccagctggagggcgccatcccagcgacgctcgcgtccctggcgaacctccaggcgctcgacctctcgcacaaccacctcaccggcatcataccgccgggcctcttcctgctccgcaacctcacgaagctgctgctcctgtccaatgatctctccgggccgctgccgctggagatcggcaaggctgccagcctcgtgcgcttgcgcctcggtggcaaccgcattgcggggtcgatccccgcgtccgtgtctggcatgaagagcatcaacttcctcgacctcggaagcaatcggctagccggtccggtgccggccgagctgggcaactgctcgcagctccagatgcttgacctgagtaacaactcgctcacggggccgctgccggtgtcgctcgccgcggtgcacggcctgcaggagctcgacgtctcgcacaacaggcttaacggcgctgtaccagacgcgctcggcaggctggagacgctgagcaggctcgtgctcagcggcaactcgctgtcgggaccgataccgccggcgctcggtcagtgccgcaacctggagctcctcgacctgagtgacaacgtgctcaccggaaacatccccgacgagctctgcggcatcgacgggctagacatcgcgctgaacttgagccggaacgccctcaccgggccgatcccggcgaagatctcggagctgagcaagctctcagtgctcgacctctcgtacaacgcgctcaacggaaaccttgcgccgctcgccgggctcgacaacctcgtcacgctcaacgtgtcgaacaacaacttctccgggtacctcccggacacgaagctcttccggcagctctcgacgtcctgcctcgcaggcaactctgggctctgcaccaaaggcggggacgtatgcttcgtgagcatcgacgccaacggtaacccggtgacgagcacagccgaagaggcgcagcgcgtgcaccgcctcaagatcgccatcgcgctgctggtgactgcgacggtggcgatggtcctcggcatgatgggcatactgcgagcgcggcggatgggctttggggggaagagcggcggccgcagcagcgactccgagagcggcggcgagctgtcgtggccgtggcagttcacgccgttccagaagctgagcttctccgtggaccaggtggtgaggagcctggtggacgccaacatcatcggcaagggctgctccggcgtggtgtaccgcgtgagcatcgacaccggcgaggtgatcgccgtgaagaagctgtggcctagcacccagaccgcggcgacgtccaaggacgacggcacgagcgggcgcgtccgggactcgttctcggcggaggtgcgcacgctgggctccatccggcacaagaacatcgtgcggttcctcggctgttgctggaacaagagcacccggctgctcatgtacgactacatggccaacggcagcctcggcgcggtgctccacgagcggcgcggcgcgggcgcgcagctggagtgggacgtgcgctaccgcatcgtgctcggcgcggcgcaggggatcgcgtacctgcaccacgactgcgtgcctccgatcgtgcaccgcgacatcaaggccaacaacatcctcataggcctcgacttcgaggcatacattgccgacttcggcctggccaagctcgtcgaggacggcgactttggacggtcgtccaacaccgttgccggctcctatggctacattgcccctgagtacgggtatatgatgaagatcacagagaagagcgacgtgtatagctatggcgtggtggtgctggaagtgctgacggggaagcagccgatcgacccgacgatcccagacggcctgcacgtggtggactgggtgcggcggtgtagggaccgcgccggcgtgctcgacccggcgctccggcgacggtcgagttcggaggtggaggagatgctgcaggtgatgggagtggcgctgctgtgcgtgagcgcggcgccggacgaccggccgacgatgaaggacgtggcggccatgctcaaggagatccggctcgagcgtgaggacgtggccaacgtggacgtcctcctcaagggaggctcgtcgcctcctcatcatgttcatgccaacgccgcggcgatagctgacaaggccacgtcgtcaacgtccagcacgccgccgtgcccgcagggtccgagcaacagctgcagcagtagcagcttctctgccatctactccttgtccaacaaggccaagtcaccctttggctga

SEQ ID NO: 30637 - DNA, 687 bp, Zea mays
  Peptide Sequence Number=SeqID_72416
atgcaaatagtcgcaaaggccacggaccagacacacaagcatgatacgcctgaagggaacacggtttctgaagcaaatgcagatgttacctgctctttgaatgaatcgatgggtaatggcagcaatttgtcactgccaggatcctttcttcctaaatgcgacagcttgaacatggaaatctcatgtataaatccttggggatggatgaaaaaaaagacttgtgagcggaagccattgccctgtgatggctgttttgcatggcatcctctgagacatgctcccatggttgccattgaaaatgctgctgagagggatagaacgatgttcccttctttggcttcaataaccaagacagattcaaatggcaatctagagaagtattgtgataatgaacaagcaaaaaggctaaagacagatacaaaagtcaaatttaaacatcaggataatgagccgtcggcatctgaatcattctgtggtgacttgtctgaaaccagcagaccatatctctgcacaggatttgatatctaccttgtttgggaaccatgcacaatgtgtgcaatggcacttgtacaccatagattcaagcgcgtgttctatgctttccccaatcctgtcaccggagcgctcggtggagtctacatgttgcatgggggagagaagtctaaatcatcactacattgtatttag

SEQ ID NO: 30638 - DNA, 324 bp, Zea mays
  Peptide Sequence Number=SeqID_72417
atggcgcaccgtgtgcggtaccgagggggggacctggtggctgggaaactcctcaccggaggaggacctctaccgcaggtccgcggtggcgtgtgggcgatgtggtggctacgcgcggaagcctcagttccggttgaattcctcaccggattcatgttggccgtagatctgcttagaccggaaacaacgatgccgctgggcgttggacaagctccctccacggcttcaacggccgatcattatgttaatgggaacatggagaaccacccgggaaaacagtgctaccacaagcgtttaatgggacacccttggctgattaactag

SEQ ID NO: 30639 - DNA, 237 bp, Zea mays
  Peptide Sequence Number=SeqID_72418
atgtggccggccgggtcaggcctcgagtgcctcccgtcctccggcgccggctctcctgactacgcccccctacgacatacctccatatggcgtgccaccgacgaccccggctccaccccagctcccgcctccgggtacccccactgcgactccctagtccccgcttgctggaggctaggaccccgcctccctcggcgctgcctacagcaccatggcgttggccccaccctcacctga

SEQ ID NO: 30640 - DNA, 492 bp, Zea mays
  Peptide Sequence Number=SeqID_72419
atgtcaggtgaacacgccaagaatgagaaggtgacgtcgggaggaaaacccgagtcgtcggggtccaagctcgaagacaaggtgccatcaagagggatgaagccatctggagacaagcacaagcacaagcagcatgaggaagaatccaccggcaccactaagttgcacaagaagaaagacaacaagaagaaaaagaagaagataaagaaactggtctactacgacacttactcctccatgtcatcgacctcatacatcgagtcaacatccttcaagcgccaagagtgcaaaaagagtaaaatggggcatcacctaacctcactccacgaaattatttgggatattgttgagtttggtgcacagggtccacaagtgggcaatgaggactatgattcggatgaggccgcccaaattcaacatttcaactcccaagcgaccaccatactccttgtttccttgttttcacacctggttttggaagttgctcgttag

SEQ ID NO: 30641 - DNA, 252 bp, Zea mays
  Peptide Sequence Number=SeqID_72420
atggtgggcgccataaccggagttctgcagctgccgttggcgcaaccgtcggagcgggatcctcgcgtaagagttggtgaggagctaaatactttatgccaccgtcgattactgccaaacaccgtcgtgagggtctgcgggctgtgcccggaagcttccttaggccgccgcgggggtgctcgtttatcgacttgggcgcgtgcgacgattggcgggcaacaatttctcgtcggagtgggcgcgccgccgtag

SEQ ID NO: 30642 - DNA, 222 bp, Zea mays
  Peptide Sequence Number=SeqID_72421
atggagcactacaaggaactaactattgagacattgaagctagagttggcactagaattgatattgccactactagaagttgctgctgtaaggcatcctgacggtcctgaatggtctgaaatatggagagcatctgctcggactgctactgctgaactgctacctgtcgagcctgctcggcgaccaaatgagcttgctattgactcaactgctaaagaatag

SEQ ID NO: 30643 - DNA, 1011 bp, Zea mays
  Peptide Sequence Number=SeqID_72422
atgtacacctatataggggtccgacgcctcgacgctcgtggcgactcgcagcttgtcatcgaccaagtcatgaagaactcccattgccgcgacccgaagatggaagcctactgcgatgaggttcggcgcctggaggacaagttctacgggctcgagctcaaccacatcgcccgacaatacaacgagactgcggacgagctgtctaagatagcctcggggcggacaacggtccctccggacgtcttctcccgagacctacatcaaccctcagtcaagaccgacgacacgcccgagcccgagaaggtctcagccctgcccgaggcgccctcggctcagcccgaggcaccctcggcccccgagggtgaggcactgcgcgtcgaggaagagcgtaatggggtctcgcctaatcgagactggcagaccccgtacctgcaatatctccaccgaggagagctgcccctcgaccgagccgaagctcggcgactggcgcggcgcgccaagtcgttcgtcttgctgggggacgggaaggagctctaccaccgcagcccctcaggcatcctccagcgatgcatatccattgccgaaggtcaggagttattacaagaaatacactcgggggcttgcggtcaccacgcagtacctcgagccctcgttgggaatgccttccgacagggtttttactggccaaccgcggtggccgatgccactaggattgtacgcacctgccaagggtgtcaattctacgcgaagcagacccacctgtccgctcaggctctgcagacaatacccaacacctggctgtttgctgtgtggggtctagacctcgtcggtcccttgcagaaggcacccgggggctacacgcacctgctggtcgccatcgacaaattctccaagtggatcgaggttcgacccttaaacaacatcaggtccgaacaggcggtggcattcttcaccaacatcatccattgctttggggtcccgaactccatcatcaccgacaacggcacctag

SEQ ID NO: 30644 - DNA, 491 bp, Zea mays
  Peptide Sequence Number=SeqID_72423
aagcactagttacagtaaatttcagttttcattcacacctttatctggaaattgtatcaataaatgtgttgcaaaatagcgcaaagggtgaagtggattgctcgttttatatgaagacaggcagctgcaaatatggttctatttgtcgcttcaaccatcctgatcggccagggccagctgcggatatagcttttatggttccactggttcaagctactcttccttcatcagcacccattgtccctgcagtggttgaacctttgccaatgatctatcctcaaaggccaggagaaactgtttgtgatttttacatgaagacaggatcttgcaagtattctcagaaatgcaagtttcaccaccccatcagtcgttttgccccgcattccaaagaaaacggggatcctcaacagcctgcgacacttgctagcctgccaaggagagagactcaccctcgttgtaatgggtcaggtccaattactcaagtctattaa

SEQ ID NO: 30645 - DNA, 684 bp, Zea mays
  Peptide Sequence Number=SeqID_72424
atggcctcgcaggcgctcccttccccaacgatcgccgacctttcctccaccgtgcgacatctctccctcctcgcctcatccttcaagtttctcctatcgttggcgtcatcgccccctgtttggttgaatccggcgctggccactgcttggctgacccccgcccaccccttcatcaccttcgttgggtccgtcgctgccgcggcctttcggccggatccacgtcgctacgaccttctcggctcgatcctgacggggttccttgacgtccggacgatcgaagaagcagaaatgtcggtctgctggtgcttcttttgttgtgtcgctctgccgatcgttgacgctcgaacgtcgacctcggccacctcgacttcggctaactcgacatccaggggctatcgccttctcggaatccacaccagtctcttctccagtcgcaacattcgctccctcacgacgctgcaactgtgggggtatttcaacccgtcggctcctactttcggtctctacttcagtcttatcgacgctgaggcttgtgccttctacatgaggtctggcatgtgcaggttcggtgcgcactgcaagttcgaccaccctcctcgcgaggaggctatttccgagctgcaggcagccggaaaggaaggaatagaagggccgagcctcgtccagcgcgaccatgatgtctaa

SEQ ID NO: 30646 - DNA, 726 bp, Zea mays
  Peptide Sequence Number=SeqID_72425
atggagtcggccgcagcatccgccatagccgatgcggcatctgccgcggccctagccaccgtcggcgcctccacgaccagcgtcgccctcaacgtccctctggccgccgccggcgaactcgtcgtggggcttggccaccagcaccgccggcaaactcgtcgcgggcctcgccaccagcctggccaccaactgctcgacttccactcctccggtggtctccgcctcacccccgatcgcccctgtcggcccccgtcgggtttcactcttgctgctcccacattgatggctcccgacggtgaccccacattgctcgtcgccatcgccacagtccagactgtcgtggctgcttcgcaggagtgcgagcgtgccgcatccctcaccccgactacgcagatggccatcacgcaacgccccatcctcggccaccctccagtcgcccaggttgctcctctggtcactcctaaggctccccttgcctctagactcgacgctgaccacatcgccgctctccacgctcaggctgtcgggctgcacaacatttggtcccttatgtccatcgtgttggacccggcgtcctcccactccgtcgttggcgggggcgagtcctcacgcttcggcgatacgctctcgccgaccacgttctcgatgatctcgttgccccgtcgtcttcatcctattccaccagttctctcaggggatctctccgtgggggagtactaccgttag

SEQ ID NO: 30647 - DNA, 234 bp, Zea mays
  Peptide Sequence Number=SeqID_72426
atgggaagctcctgtgccgatgggaggaggggcgcagtggaggaagggcacctgcttgcgttcggaccagaggaggtccctacggaccggaggtggaagaagggcgccggtggtctgctgctagcatacaaatttttgctcctgcggaattcgtctctacagagaacggagcgaattggagttccgacgaacgggacgattgagcgattaacttcgcccgagagtctgatctga

SEQ ID NO: 30648 - DNA, 173 bp, Zea mays
  Peptide Sequence Number=SeqID_72427
atgataggaagagccgacatcgaaggatcaaaaagcaacgtcgctatgaacgcttggctgccacaagccagttatccctgtgatgtgccgccccagccaaactccccacctgacaatgtcttccgcccggatcggcccggcgaggccgggccttggagccaaaaggaggggcg

SEQ ID NO: 30649 - DNA, 174 bp, Zea mays
  Peptide Sequence Number=SeqID_72428
atgagcattatatgttgcccgagaaggggtatgatgcagcttcatatccttagagatatgaaggcagaagtcattactggatctgtagccatgtgcattcatgggagaagtgtggaatctgatatgtggatgtggatagcacctgatttctgctttgggaaagaagggatgtag

SEQ ID NO: 30650 - DNA, 297 bp, Zea mays
  Peptide Sequence Number=SeqID_72429
atggctgaacagtacaaaatgcatgtcatgaatgaaatacaatgggattatttttcagttgaattgttagacattcaacatgtgcatattaaattggtttctacagacacatgctttattgatctcaaccttgccaaacgcctctcatggaagctcagaggatatgtcaaggtcatgatcgacaaacagatggaggtgctccgcaagcagatctccatctatgccaccatctgcgagcagcttgttgagatgcatcgcatcctcaccgagcacgaggacaccattgcagaaaactag

SEQ ID NO: 30651 - DNA, 384 bp, Zea mays
  Peptide Sequence Number=SeqID_72430
atggccgagctcgtcaccggcaccggcgtgcctttctttggcggcgcgctggacaaagaggtctttgacaaggtgctgcacgtggtcggcaccagaggcattgccaaatggcaagggctggagcgtgtggcgccgcgcgaaaaggtggcctgccttcggaagacggcgagccaggagcgcggctacctgctgaagatgttcccgccgaggctgctgtctccagccggcttcaaggtcttagaagggctgctgcaaagcaacccggaccatagactctcggcagctgatgcgcttaggaagccatggttccggcgccgattctcgttgggtgcctgctgcttcatgcctcatgcgctgcgtagtagactagtagtccagtattaa

SEQ ID NO: 30652 - DNA, 1385 bp, Zea mays
  Peptide Sequence Number=SeqID_72431
ccatatccgggagcagatcgacggacacatcctgcccatatataatacccgcgccgcagcctgcctcaccagcaacagcaatagccagcagcgcgcctcaaccaccagcagcagcgcgcgttcatccggtcgagccgcgccttccgtcttcgcctcaactagcagcagcaaagcgccgccttcatccggtaggatctttcgagccgcgtagcggatcgatggctgccgcctcggatctcgtcaacggcggcgtagcggccctgcagattgaggagccggaggaatcaaagaacaatgcagcagcggttgtggcgttcgccccaatcccctggctgcctgccgtggcggagcggtacgagcgccgcgagaagctgggcgaaggcatgttcggcgacgtgtacaaggcctgggaccgcgtgcacgaccgcatcgtcgccgtgaagaggctctcggggaggaccgacgaccgcttcgtgaagacctccatccccgacttggcgcgagaggtcatgtccctcgcggcgtgtcgcggccacccttccgtcgtacagctcctggcgacgcacgtcgacggcagccgcgccgacggcgactgctacctcgtcacggaacacgccgggcctatgaacctgcgccagtacatggccgtccgtcgccttaacggccagccattcggcgaggacgaggtgcgcgacgttatgaggcagctcctcgccggcgcagagcacacgcacagggcgggcgtcctgcacagggacatcgtcccggagaacgtgatcgtcggcatggacggggacagcgcgaccgggaggatggtgtacacgatatgcggcttcggtatgtccaagccggcggggcaaacagagaaggacgactccgggctgttggcgtcgcccagcccgtaccgagcgccggagcttttcctcgggtgcaaggactacgacgggcgggtggacacgtggtcgctcggctgcatcatggccgagctcgtcaccggcaccggcgtgcctttctttggcggcgcgctggacaaagaggtctttgacaaggtgctgcacgtggtcggcaccagaggcattgccaaatggcaagggctggagcgtgtggcgccgcgcgaaaaggtggcctgccttcggaagacggcgagccaggagcgcggctacctgctgaagatgttcccgccgaggctgctgtctccagccggcttcaaggtcttggaagggctgctgcaaagcaacccggaccatagactctcggcagctgatgcgcttaggaagccatggttccggcgccgattctcgttgggtgcctgctgcttcatgcctcatgctgctgcgtacagacgaccatgttacataacagatatgttaatcatgtccgtctag

SEQ ID NO: 30653 - DNA, 1122 bp, Zea mays
  Peptide Sequence Number=SeqID_72432
atggctgccgcctcggatctcgtcaacggcggcgtagcggcactgcagattgaggagccggaggaatcaaagaacaatgcagcagcggttgtggcgttggccccagtcccttggctgcctgccgtggcggagcggtacgagcgccgcgagaatctgggcgaaggcatgttcggcgacgtgtacaaggcctgggaccgcgtgcacgaccgcatcgtcgccgtgaagaggctctcggggaggaccgacgaccgcttcgtgaagacctccatccccgacttggcgcgagaggtcatgtccctggcggcgtgtcgcggccacccttccgtcgtccagctcctggcgacgcacgtcgacggcagccgcgccgacggcgactgctacctcgtcatggaacacgccgggcctatgaacctgcgccagtacatggccgtccgtcgccttaacggccagccattcggcgaggacgaggtgcgcgacgttatgaggcagctcctcgccggcgcagagcacacgcacaaggcgggcgtcctgcacagggacatcgtcccggagaacgtgatcgtctgcatggacggggacagtgcgaccgggaggatggtgtacacgatatgcggcttcggtatgtccaagccggcggggcaaacagagaaggacgactccgggctgttggcgtcgcccagcccgtaccgcgcgccggagcttttcctcgggtgcaaggactacgacgggcgggtcgacacgtggtcgctcggctgcatcatggccgagctcgtcaccggcaccggcgtgcctttctttggcggcgcgctggacaaagaggtctttgacaagatgatgcacgtggtcggcaccagaggcattgccaaatggcaagggctggagcgtgtggcgccgcgcgaaaaggtggccggccttcggaagacggcgagccaggagcgcggctacctgctgaagatgttcccgccgaggatgctgtctccagccggcttcaaggtcatggaagggctgctgcaaagcaacccggaccataggctctcggcggctgatgcgcttaggaagccatggttcaggcgccgattctcgttgggtgcctgctgcttcatgcctcatgctgctgcgtag

SEQ ID NO: 30654 - DNA, 201 bp, Zea mays
  Peptide Sequence Number=SeqID_72433
atggccacgctcgcgttgcctggggcagcggcgccagcctgcgtttcggcgtgcgccgcccgcgggaggctcgtcgtggcgcagctgcgccaggggggtcctgacgacgatcttgttgatagatcttcaacaacctcacgtgttgatatatctgagccatatccgggagcagatcgacagacacagcctgcccatatataa

SEQ ID NO: 30655 - DNA, 622 bp, Zea mays
  Peptide Sequence Number=SeqID_72434
atggctgccgcctcggatctcgtcaacggcggcgtagcggccctgcagattgaggagccggaggaatcaaagaacaatgcagcagcggttgtggcgttcgccccaatcccctggctgcctgccgtggcggagcggtacgagcgccgcgagaagctgggcgaaggcatgttcggcgacgtgtacaaggcctgggaccgcgtgcacgaccgcatcgtcgccgtgaagaggctctcggggaggaccgacgaccgcttcgtgaagacctccatccccaacttggcgcgagaggtcatgtccctcgcggcgtgtcgcggccacccttccgtcgtacagctcctggcgacgcacgtcgacggcagccgcgccgacggcgactgctacctcgtcacggaacacgccgggcctatgaacctgcgccagtacatggccgtccgtcgccttaacggccagccattcggcgaggacgaggtgcgcgacgttatgaggcagctcctcgccggcgcagagcacacgcacagggcgggcgtcctgcacaggacatcgtcccggagaacgtggatcgtcggcatggacggggacagcgtcgacccgggaaggatgtgtacacgatatgcggcttccg

SEQ ID NO: 30656 - DNA, 132 bp, Zea mays
  Peptide Sequence Number=SeqID_72435
atgacactcggcgccggtggaagctgggcggccgtggctcggggctgggggctcgagcagaccgaagatggcctcacggccagccggccaggcacagcggcgtcaccgcttaatgtgggtgagcagatataa

SEQ ID NO: 30657 - DNA, 165 bp, Zea mays
  Peptide Sequence Number=SeqID_72436
atggggctagggatggacatgcttaagaagtacataaggggtaaagctattggggaactgtattggaatttggaagacaggggattcacatttctgaccaagccttatgaaggtcgttttcatggcaacttattggacaaggttatggagcgtccagtaaaataa

SEQ ID NO: 30658 - DNA, 138 bp, Zea mays
  Peptide Sequence Number=SeqID_72437
atggcaacgtcccccacagaacttcgcagggctccccaatattcagatattgatatatatgttccctcaacaatctggaatggcatcaggattattggaaatagaagctttgttctgtctgacctttttctgcagtag

SEQ ID NO: 30659 - DNA, 399 bp, Zea mays
  Peptide Sequence Number=SeqID_72438
atgacaactggcgaagtcgacgacgagccgatcgaactaaaactatacgacacggaccggcacacgggaagacgggcagagggagcagaggctttggcgccggcgagcagctgcaggggagatcgcagtccgagcgccgagcagggaggaatccgcggcgcgcagggacgcggcgaactggaggagcagggagggcgcggcccaagcttggccatgggcgagcaagaagttcacaggggcggcggctgggcgcagggcgagcccatggagatgggcgccgagctccatagatgcatggcgagcagaaggaacgaggaggaagacgcagggagggagcgctgcgacgagcgcaggggctccacggcggggtatttgaagaccccaggggcggcgccgtga

SEQ ID NO: 30660 - DNA, 1233 bp, Zea mays
  Peptide Sequence Number=SeqID_72439
atgggcaacagcctgcggtgctgcctggcgtgcgtgctgccgtgcggcgcgctggacctggtgcggatcgtgcacctcagcggccgcgtcgacgagtacggccgcgccgtgtcggccggggaggtgctggcggcgcaccccaaccacgtgctcagcaggccctgctcgtcgccgcagggggtcgtgcgcaggatcctcatcgtgtcgccggactcggagctcgagcgcggggagatctacttcctcatcccggccgcgtccgtgccggacgccaagaagggcggcggcggggctagcacgccaggccgccacgtgcgcagcaactgggggctcggcgccgagtcgccggaggaggcggcggccgcgcccgcggccaagaagaagaatcagcagcagcacaagagggccgccgcgcagcagcaccggcggcgcatgagcaccggcagccacgccgcgccctggcagccgcaccttcgcctgcatcgcggaggacctctgagtgccttgccgctaccggttcggcgagcacccgtgtggactcggcccacttcattgggcctctactgtacgaagcacagtgactgcttcctctgccaacgacggttttctttggccttcgacttgtttctctttcgtccgcttgcacgacccgcacgttccgcgctcggcgcttccccatctcttccccacgcaccaactcgtccggccgcgctagccccggccgccacggcgccgcgggagcacgagcaccgcgtgcccggctgctcgccctcctgtcccacgtgccagcgatctggtcctgcaaactgcagcctccacgtgctcgccctcctcctcccagaccgttcccgcccacgaataatctggacgctgcgccgcctccgcatgctcgacctctctagcaattgcctacagggcgggatccccgcggtgctcgcctgcgtcgccctccgggaccttgcctacaacaacgccgtcgacgtcgtgatgtgctgtgcatgtgctggccgtgaacatcgacgtgcgcgcggccacgtcgcggtcggcgcggtcgtccggactgctgcgcccgatcaggccgccgatgacgagtacgagtacgaggtggaggccaccacagtaattgacgctcgcctctccgctgtgcgggtccatgcggccggcgagcgttccttggcagtttggcacccagccgttgacgacggtggttcgtgcgaacaccatgctggatag

SEQ ID NO: 30661 - DNA, 240 bp, Zea mays
  Peptide Sequence Number=SeqID_72440
atgggcctaggaaaccagtcgcacagggatgactcaggctcgtatcccttacgtgtgggcccagaccgacagtgcactttcaacctcttctccgagatggccgcaacagaccccgcgtccgtcggcgagggctaccggtcgtggcttcctctccccgtcgtggactcgctctctataaaacggtcgcgccgccccgcatcccggatccctggtgttgaggccatccaaagcgcaacgtga

SEQ ID NO: 30662 - DNA, 2504 bp, Zea mays
  Peptide Sequence Number=SeqID_72441
ggctccgtgatgccggcggctctcgacccaggacagcggcttctctgttggcccaagtgcacgcgactgactgccggtgctggtgccttgaaatgcggcagccgttctacggccggcctcccgtccagatgaaggtgcagctggtggaacaggaaggctccaaggggatgggttcttccgggtgcgcggagatagtcgagctggcggacgacccgaaagctgctcgtcctgctgcgcatctgagagtgagggtcaagcccgtggggcaggaggatggggcgcggtcgtgctcgctggaggatgaccttgaccagctcatcaggtcggtcaacgtgcgcacgtcggcgagggcttctgggcagaggagcaccgatagatggcttattgggctcgggaagtcgccggtgtcgggctcagagattgtggagtccgtgagcctgaagcaggcccttaggaagatgtgcatctcccaggcgtcggaaatggcagccatgaagaggctgtcaaaaccgacaggggcgtccaccccttctgattctggggcgaccaagaagctatatggctctgttgcagttcaagccaacggggagcaagatgacaagagtaaggtgggcaacgtttatatgctgcctgagaaactggcaggaagttcgattggtaaggcaaatgaaatcagcaaggggcagagtaagagctcagccaagaagaatttgagatcagcatctcctaccgcagtcaaggttcgcaaaaccagaatccaagatgtgatcagtaacaagtcatcagaggcggttgaagatgtttctgtaggagcaacactgccaaggcaaaggaaggggaaatctgtgaaaacgtctagcccccgggctgttccggtcggtggctcacggctggtgaggccaatgtttcggaacaaaacctcgaccaaaaagaaggtcaaacctgaacctgctatagtgcccgcatcgcacaagcattgtgagacgaaaggtcctaagtctcacgctagtaaacagaaggagtcccttcaggatgaacccagaaccccagcaccagctaacaagaaggctgctgtcagctccactgttgatggatctgattttggcaccaaagggtgtggcactggtgtgatccatggcccgaaggttggtgagctgtcaagatcaaaggagaagggtgaatgctcccaaagctctaagagtagcattggtgattatagcaccagcaccagcatcagtgaggacagttatggcagcttcagtgctaacggaagcaggcctcacatgtcaaaggatgtgagatggggagccatcaggtgcatggctatccaacaagggagcttgggattgaagaacttcaagcttctcaaacaacttggttgtggggatattggcactgtttatttggctgagttagtgggatcagactgcatgttcgctttgaaggttatggacattgagtacctcataagcagaaagaaaatgctcagagcacaaactgagagggagatactgcaaatgctcgaccacccgttccttccaactctgtattctcatttcacgacggacaacctttcttgtctggtaatggagttttgccctggtggtgacctgcatgttcttaggcagaaacaacctaccaaaaccttttcggaagcagctgcaaggttttatgtcgctgaagtcctcttagccttggagtatctccatatgttgggggtcatttaccgtgatctgaagccagagaacatacttgttcgagaagatgggcacatcatgctctcagactttgatctgtctctgaggtgctcagtgagcccaatgcttgtgagaatatcatccgtaggcagagatgagcccagcaggccttctggtccttgtgcacaaagctgcattgatccgctgtgtatccagccatcctggagcaattcctcttgcttcacgcctcgtctggtttcgtcacgaaggcctagagccgagcttctgaagaaaccatcacttccacagctcgttgttgaacctacggaagcaagatcaaattcgtttgttgggacccatgaatatcttgccccagagattattcgaggagatggccatggtagttcagttgattggtggactcttggaatcttcctttacgaattactctatggcaagacaccattcaagggacctggcaatgaggaaacactctcaaatgtgatctcacagggcttgaagttccctgataatccagctgtaagcttccacgctcgagatctgatcagagggctgcttgtgaaagagccagagtaccggcttggctcgtcgagaggagccactgagattaagcggcatcccttctttgaaggcctgaactgggccttgatccggtggaccgcaccaccagagaccctgaagaacattgacactgcaccaacacctgtaacgacacgcaagaaaaaggaaggcaaatgtctggaattccggctgaatggtgacgacatcgagttcgagctcttttag

SEQ ID NO: 30663 - DNA, 216 bp, Zea mays
  Peptide Sequence Number=SeqID_72442
atggcgaccaacggacggagggagagcctatcgagctgggcttcggatacctctggaatcctggagcagatttatgtttctaaactagccctgagaaagagacaaaaaaaaatggcgccgtacgtgcacggaccctcgcaatcattatcccatcctggtcccacagtggatctgatcaatggacaccggattttcgtaactgcacggcaaaagtga

SEQ ID NO: 30664 - DNA, 591 bp, Zea mays
  Peptide Sequence Number=SeqID_72443
atgacgggcgttcggcgttcccaagggctacgtgcgagattcccacgtggtgcgcctagccttcagtcacggaaatgcccccaccgcgccacagggcagggcagggcaggcccaccccgtccgtcgcgccgcctgccgcgggcgcccgtcgcacaatcgcatttgcgtcggcggcggtgctcggacgaacagatagatgattatgcgctcgcgcggcagggacgatcgtgcggtgggcgcggtggtggtggggtgcggcgcgagcaaagacgcacacgaggcgcctgtgactctgtagtaggtttgaatttccagcaggggacggcaacgcgaccaaaaggaaaagcaggctcctctcggctagtagttgtcacagctccacaacgggaaaaggaaaagagcgctgccgctttcgccccacttgaagcttcaactccacttccccagtctcgccgccgtttcggcctaaaactcccgcaaatcctcgcccgccgcacccagattctccaggtgggagcagcgcgcgccgccgccgccgccgacgacgaccgaacgcgggccgcaccagctccccgctgccgccgccgtccg

SEQ ID NO: 30665 - DNA, 429 bp, Zea mays
  Peptide Sequence Number=SeqID_72444
atgcagcagctgctgctgaaggaacagcaagcggccgaacggtgcgtcacctcgctgctgcagacggtgtgcggtgaaagtaccatcatagtaggatgtccggtcttttccagcatcatctcactcgtggcggccgctgcagcagcgaaaatcgaagtcgtccggggtaacggagaccggaccagacccagcgcggcggcggcggcggacggaggtgtggcgtggcggtcgagcacggcgcaaggatggggagaggcgccgtccaaagtccagcgagatggaagcggaaaggccgaaagtgtggggactgggactactctctgcatcgagttggacgcgtggatcaggcactctagaatcgaacaggtgtattgttctcctagtaatgtagaggtaggcagagttccgagcatcaccctcactggataa

SEQ ID NO: 30666 - DNA, 414 bp, Zea mays
  Peptide Sequence Number=SeqID_72445
atgggcaagagcaacaaacgcaagcgcaagccgactcctccctcggaggatttcggcaactcggaatactcggaggaggagttctcctccgagtccgaggggtctccggctcctgtctctcccccagcgtcgtctgacgattcagacgactcccaggggcttgccgcggaggtctggacttatatccgggccgtcgagcgctccgggctcgagggctcggatgagtcggagtactcctcagacaaggaggactcgtccgaggaggacgatggcggcgatggcaaagacgacgacgacgatgacgacgacgacgacggaggcgatgacggtgacggcggcggcaggggcggcaactgcggcagcaagggtggcaacggcggcagcagcaggggcagcaacaaggccagtggctag

SEQ ID NO: 30667 - DNA, 486 bp, Zea mays
  Peptide Sequence Number=SeqID_72446
atgaaactaaagatcacaacatacgctcgagttcggggaggcagcgctcagctcggggaaagggacagggcagcgcttagctcgggctcggggacggcggcgctcgacgctcgagctcagggacggtggcgctcggcctcgggctcggggacggcgtggtcggcgctcagctcagggagcacagttgatcagcctagcggcgcaactgtgtcagcttggtcgggtgttagggctaacactttaaatggcgaacagccatacccttgggacctacttcagctccaggatgtgatgagccgacatcgaggtgccaaacaccgccgtcgatatgaactcttgggcggtatcagcctgttatccccggagtaccttttatccgttgagcgatggcccttccattcagaaccaccggatcactatgacctgctttcgcacctgctcgcgccgtcacgctcgcagtcaagctggcttatgccattgcactaa

SEQ ID NO: 30668 - DNA, 240 bp, Zea mays
  Peptide Sequence Number=SeqID_72447
atgggttggttccttgtcattttagtcctgacaagccatggcgccgcacctagcagagcaggccagcaccaggcgacacacgggtggctgaagaaggctgtgcatgggtggccggagcggcggagccaggggcacacgaacgtccggaggcccgaaacaagcgagcagactgctggaggcctggagttagtggtgggggcgtggactgaaggcgaaggcgacatcgagtcggtcgacgag

SEQ ID NO: 30669 - DNA, 165 bp, Zea mays
  Peptide Sequence Number=SeqID_72448
atggaagaaatggtagcaataccagttcgggatggagaacaaccagaatctccaactgcgccgccaataaaagctccacaacaacagtttctgcaaatgatcaacaactttagtgtcaactcgaggctgagcagcaagaaaaagatggacttcaggaagaagtga

SEQ ID NO: 30670 - DNA, 102 bp, Zea mays
  Peptide Sequence Number=SeqID_72449
atggacagaaatgacattccaagatcatggaatgcagatgagcttcgaaggtatcttcggactcagattatgaatatgaagtacgatcaggacgaagcttaa

SEQ ID NO: 30671 - DNA, 372 bp, Zea mays
  Peptide Sequence Number=SeqID_72450
atgaagtcgacggagctagggcgggtgcaggctacaggggctccgaggtcaccggagttggccaggaccgacaagaagggcccggtgaactcactagtggggttccggccaaaagaccgagaccagggtgagagaacgacagagggaaatctccgggcagatcaagggaactctggcgaggaatccaggccgcggggagggagaatcaggtgcgctaaggctcgaactagctccgtcgagggaagaggagtgctaaggaccaacacaagagcacagtgcgatgctgaatcggccaaccaccgcgagggacgtgacgaaccggcgcggatgaacttcagcaaggctaaattggctacgaccaggtgcgaataa

SEQ ID NO: 30672 - DNA, 195 bp, Zea mays
  Peptide Sequence Number=SeqID_72451
atggccgataaaggcaaaggcaagggcatcatcattggtgatcctcacatatcaaatatatcacaaaaggagattgctcgaaaggctccggatgaacaggctaaaaagttcggaggcgccgaggggcagttgctctccaagaatgctagcaagaagaccgttctgcgtgatcggtcaacggagaaaccccgatga

SEQ ID NO: 30673 - DNA, 429 bp, Zea mays
  Peptide Sequence Number=SeqID_72452
atggcaagggaggtccatggaccagaatatgatatgagaacggatgacattgacggagaagtcctcatgagggcccagctagaagaagtgtggaggcaatgtgtggagttggaggcgaggatgaggaccgagtgggaggctgagcgggtgactcgcttagccgagcagcaaaggatgacagagattcttcagtacatgcacgttgcaacgggtgtacctctgccagctacgttgttcgctccacctacacctgcacctcctccccagttttctactcctatgagtatggaaggtactagggatgtccagaatgttgggggccatgcagaggcatcaaggccatctgaaggcgttaggatcatccatgggtcttgtggccttctaggcagtcagggtcttcaagctcatcatgacgtgtcatgttcgtga

SEQ ID NO: 30674 - DNA, 813 bp, Zea mays
  Peptide Sequence Number=SeqID_72453
atgcgctgccgaggtgtcgaggacgcaatctcctcgctcgtggccgagctggaatgcccgttgcagtcgctggactcgctccgccgcacgtcgatggagctctggctgctggccaagcacaacccggacaaccgagtccgcatcgccgcggcgggcgacgtccgctcgctcgtctggttgctgtcgcacgcggacccgctgctgcaggagcacggcgtcacggcgctgctcaacctctccatctgcgacgagaacaaggcgaccatcgtcgaggcgggagcgatacggccgctggtgcatgcgctcaagtccgcggcgtcgcccgcggcgcgggagaacgccgcgtgcgcgctgctccggctgtcccagctcgacggtgcctccgcggccgcgcttgcgccatcccgctgctggtctccctgctcgagaccggggagcgcgaggcaagaaggacgtcgccacggcgctatacgcgctctgcagcgcggcgtggagaccggcgccgtgcgacccctgctggacctcatggccgacccggagtccggcatggtggacaaaaccgcgtacgtcctccactctctggtgccctccggcgagggccacgccgccgccatcgaggaaggcgacatccccgtcctggtcgagatggtggaggtcggcacctcgcgggagaaggagatcgccaccctctccctcctgcagatcgagatcgatcgcgatggggcggacggggatcaccgagcagagggcggaggatgtcggcgagatagtgcgcagattgcgggcgggggcgggtctggcggcggacaatag

SEQ ID NO: 30675 - DNA, 366 bp, Zea mays
  Peptide Sequence Number=SeqID_72454
atggccttatatgttccgctcatctctgaactatcagtaccacatggccttatcctttatataagactgtcggtccaagaacccggtctgccggagcacggcgttgcggacgttgcggaggtcgcggcccttgaacgggcgcccgggcgcccctccagcacggacgaagaccgcgtgtggcgccgcaccgcgaccacgtgcggcggcaccacctcctcgccgtcatcctcgtcctcgtcggccttactaccgcctgcgcgccacccgcccgccggccacgccgccggcacgcgcaccggcgctgactgtctcggcgccatcgccctccccggcacgggcacgggcaccccaccgccgcagccttag

SEQ ID NO: 30676 - DNA, 288 bp, Zea mays
  Peptide Sequence Number=SeqID_72455
atgaccaaagctttgctagcaccatcattcggtcatcatcggagcaatctgcagttagctcagctaccaccaaattgtgggggtgctagatatgataggttcactaccggaatcacgttctttgccgagtgtctaagacactcggcaaaggccattttacggcaaagaatactcagcaaacattttatcgacaaagggttctttgccgaatacttttttcggacactcagcaaagactttgttgaatgtcgaaaagcgctcgacaaagaaaaacattcggcaaattaa

SEQ ID NO: 30677 - DNA, 225 bp, Zea mays
  Peptide Sequence Number=SeqID_72456
atggcgcaccagacactgtccggtgactcatcggacagtccggtgaattatagcggagctgcgcctgggaaacctgaaggtgaagagttcgagctgaggcaccctggtgcaccggacactgttcggtggcacaccggacagtccgaccatgcttgcaccaattgttttgtttttgcaaactcttttggaaattcttttcaaagtgttttgcaaaatagtcaatag

SEQ ID NO: 30678 - DNA, 1020 bp, Zea mays
  Peptide Sequence Number=SeqID_72457
atggagatcacggaggagcagcggcgtcgcgccgaggccaaccgcctcgccgccctcgagaagcgcaagcgctacgcagaggccgcggctgccaccgcctttcccacctccggtgcctccacattccctgcctacgacactgccgccgccgccgagtggaggctcgccaaatgcccaagaatcgccccgcccgcgcgccagttaccgtttgtaccgctgccccctcgtccttccccaccgccgctgccgccgactccgcctcagccgccggtggggttccaggttgtgctggaggtatgcggccccgacgagttctgggtggcggtggtgccggtagaaggcagggcctaccctggggaggccgagtgcctcggcgccgtccaggactgcctcgctgcggcttcggttgtacaatactctgcaacacagtcgctaagtcaaagcacacatcttcgtcctgtatttaagcttgtggactatggtgtggtgttgaaatgccttaagaaattacctggagcttctgtgcaagaaataccttctagcacaaagagaattattcagaatatacctaggtatcacgtccaaaagtgggcttctgatgaagaagtacatgagcttctcaagaaactgccacagcaaataaaagatgcgcttttacccttccaacttgaaggagtgatgtttgggcttcgaaggcgtggacgttgcctaattgcagatgagatggggctcggcaagactctccagatttatgacttgttaaatgatgtgaatagacctccctatttgttctttgttattcatttcagatttgatgacttggttttagattatatgaattggcctaccaatttgcctatattaagggagcgagcgattgcaatagcatgctgtttcaaggacgagggctctatattaatagtatgtccagctgtattgcgttattcttgggcagaggaattggaacgctgggatccttcatttatgccaaaagatattcatattggaacttttgaataa

SEQ ID NO: 30679 - DNA, 1351 bp, Zea mays
  Peptide Sequence Number=SeqID_72458
caccgagggtgtagagggacccgaagctattgtatctggcgatcacgctcttggaatgaagatccttcacagaaaggccaagagggtcaaattcgacagaacaattgttatcagaagatccagttcatggagtccatggcacagtcggggaggcaggaaccacagggcgctgctgcagagtcctgagcggatgctgaaccgacccgacaggctgggtaaagtgacacgacagaggggtgtactgggtcggagcagcgaagagcgcctgttgtggtgcgccctggtgtgcaggcggacgtccgccacgctgctgtccagtagggccgggccacatcgtgatttgcccggtccatggattgtacaacgaaggccaaggcgactgagccttgcctcatccgctgttgttggggcgacgccgtcaacgaccactagcagaggagcccccgccataggtgttgctagtgggtcggctggtaccaccagcgggcgccgtgacacctccagggggaggggcgatggaggaagcagtggtactggcgacgagagcggtggccggaggcagaggtggcacatcttcaccaaggggctgcccacttttgtcttctccgagtttcgatccagtcttaatgacttctctaagggcacacggttgacagagttaaatgttttgctcagtcaaactgtcatgattaggcgactgaaggagcatttgttgaatgaactgccccccaagcggcgacaaattattaggttgaagctaaaggcaccagatatcagggcagccacatcttcatgcggcaaaagggtgaaccctaacagttgtaatggaactcttacaattgaattgcccagtaaaagcaatgatgatgaaaatacaaaagaggaagaagaagatgattgcaagaaatctccaaggagtctcaccccacaagagattggtatcgcaaagttatctggatttagtgaatggttctcaaatcatttcatcatgaatggatttgatgctaaccataacctggatccccagtctagctgtcagaaaacaataatatttgcacatcacttaaaggttctagatggaatacagaagaagcaccagcctggtgcagtggtgagagctatctcactgaatcaccaggtgtttatctctgagaatgagatcagatttgttcgcattgatggaagcacacttcaaagggaaaggaaagaagctgttgattctttccgtttggatccagaggtgaaggttgcaataattggaattactgctggtggtgttggcttagacttctcatctgctcagaatgttatttttgtggagctcccaaaatcagcttcagaattgcttcag

SEQ ID NO: 30680 - DNA, 1128 bp, Zea mays
  Peptide Sequence Number=SeqID_72459
atggacagcggctgtcgccctgctgcagataatcaagatcaccgcgactctgcctgcaatggcagccacctgcgcagaagcagcgacggcagcgacggtgcagatctgcagtcctacccggcgcagaagtggcgagggcgcagatctggatcaggcggacagcgcagaaatggtgacggcgcagagcagggcgcaggcggacggcacaaatctgaggcggacagcgctgatctggtgacggcgcagagcagaaatccagcgagatccgaccgagatccgctcctggcgggcacaggaagagggcggcggactcctggcgggcacaggaagagggcggcgcagaccgagatccgcccctggcggcggacgttgcaggcaagggggaaggccgcgcgacgaagagacggcgcgacggccagagggctgaccggagagctggccgcgatggcagcacagcgacggcaccaaaaatttggatcagggtcgggtttagatgggatacttaaagggggaagtaagaggcgtgctgcatcattgaatgatgtcagtaatcctttgccagaaaatgctgaatggagacaggtggtgttgcgtaatggcacctgtaaagagagacagtacactcagggctggaccattgatgatgaacctctctgcaaactttgtcaaggactttgcaatggaaggcttgcaaagtcaccagaatattttgaagatctattctgtagtttagcttgtttccaggaatacagattaagaaccagtggcagggccctccggcaggcactgtttcaaatagaacgtggcaagtgctcccaatgcaagctcgattgttgcaagcttgtcaaacacattaaactcttacctttgggaaagcgagaagaatacatcagaaaggttgctccaaacattgcaagtagaaagaaactcctagataaacttgtccgtgaaccaattgatggaaatgcttggcatgcagatcacataatacctgtttataaaggaggaggtacgccaagtgaagcaacagaagaactagatgacgaatcgttgctgatagctgtcccgggtagtgcctactccttaggatttcctggcaacggatctgatgaaaaggctgctgaatag

SEQ ID NO: 30681 - DNA, 2277 bp, Zea mays
  Peptide Sequence Number=SeqID_72460
atgaagcgggggaagggggcaaggaatgggttgctgccgagctcgctgcggatcatatcgtcctgcctcaagacggtgacctccaacgctggctccgtcgcgtctaccgtgcgctcggcgggcgcctccgtcgccgcctccatctcctccccttccgaggacgagaaggaccaggttttgtgggctggatttgataaactggagcttcaaccatcatcattcaagcatgtcctgcttgttggttattcaaatgggtttcaagtgctcgatgttgaggatgctgcaaatgtttgcgagttggtctcaaaacgtgatggcccagttacgtttttacaaatgcaacccactccagttagctctgaaggcattgaaggattcagagcatcccatcccatgcttctagttgttgctggtgatgagacaaatggcctgggtgcggttcaaggtggtcgcttaagtgctcttatcagagacacaaacagtgagcctcaagctggaagttgcatttctaccccaacggttgtccgtttctactctttgaagtctcacacctatgtacacgttcttcgattccggtctgctgtatatttagttcgctgcagtccaaggattgttgctgtagcacttgcagcacaaatctactgctttgatgctgttactcttgagaacaagctcagcgtcttgtcatatcctctgcaaggtgcacctggggtaaatattgggtatggcccgatggctgttggccccagatggttagcctatgccacaaatactcctttattgtcaaacacaggccgtctaagtccacagaacctcacaccttcaccaggagtgagcccatctacttctcctagcagtggcagtttagttgctagatatgcaatggagtccagcaagcaattagcttctggtattattgacatgggatataaaacattttcaaagtaccgccaggaacttctaccagatggttctaactcccctttgtcatcaagcccaggcaggagatctggtaaaattccttccagtgtgcatccactggaagctgacaatgcaggaatggtagtcatcaaggatttcacttccaaagctgtggtctcacagtttagggctcacacaagtcctatatctgctctttgttttgatcctagtggaacacttttggtgacaacctctgttcatggccataacataaatgttttcaggatcatgccaacttgcgttgctaatggcacaggcgcaacgcgctatgattggacagcatctcatgttcatctttataaactgtatcgtggcatgacatcagctgtcatacaagacatctcgtttagtcattttagccaatggatatctattgtttcatctcgtggtacctgccatatttttacattgtccccatttggtggtgatgccagcctgcagccacagaattctcacagtgatgggccacctcttgcgccatgtcagtcaaggccatggtggtcaaagccgtcctttctgatggaccaacagcttcatcaagttccctcaactgtgacaaattcggtagtcagtaggataaagaataacaattctggttggctaaatactgtcagcaatgtggctgcttctgcaagtggaaaactatctgtaccatctggcgctgtaactgctgtttttcataattccatctaccagggttctttgccagttccatctaaggctaatgctttagaacatctactggtgtattcgccatctggtcatgttattcaacatgaacttttaccttcttcaggttctgagtcctctggtagcagcccaagagttggttcaggtcataactcgcaactccaagatgatgagatgcatgttactgctgaaccaattcaatggtgggatgtgtgccgtaggacaaactggcccgaaagagatgaaaacattgcaaacattgtactgtataaccaaagaagcagtatgatggctatggatgtttctgactgtgaagatagcgagcattcggattccactgcatcaaatgatggtatctctgggaaagagattatgagagtccgagaaagattgagagtgacaatcaatcatgttttgcagatttgcttctatgtgatggaccatcctgctgcagagtcggtcgaatcagttagcagtggtggagaaattgagatcgagaagttacctcttcatgaggttgagatcaggagaagggaattgctccctgtattcaagcagttcctatattctgagcgacattctagtgataggcgaattgtgttatga

SEQ ID NO: 30682 - DNA, 207 bp, Zea mays
  Peptide Sequence Number=SeqID_72461
atgaagaagcattcgactgtcaacgcggcggaggcggccggtggcgacggcgagcgcggagtcgagcttctcgacgcgctcgcggagctcctcggcctcggcgtcgcgctcggcgagctgcgagcgcagcgcgccgcctcggcctcgaagcggccgaggcggtgcgagagcgcgatggaggtgatcttgcgcgccacgtccagctga

SEQ ID NO: 30683 - DNA, 501 bp, Zea mays
  Peptide Sequence Number=SeqID_72462
atggacgcacaggagacactgctgcgggacaactctgcgctgtccaacaccgttaggaagctgaacagagatgtcgccaagttggaagttttcaaaaagacacttgtgcagtcgctccaggaagatgacagcagtgataatactgctcccagggcaagcgttgcagcaacttcaaacttctctgcgccatcagatgaagattctgcatttccaacttccaaatcatcacagatttcagaaactgcgagttcagtttcagaggaaaatagccaagttgaaccagatggacgaacaagagttgatggaaaggagttctttcgtcatgtcagaaatcggttgtcgtatgagcagtttggtgcattcctggctaatgtgaaggagctgaacgcacacaggcagaccagagaggataccttaagaaaggctgatgagatctttggtcctgaaaacaaggacctgtacaccgtttttgagagcctaataactcgcaacattcgctaa

SEQ ID NO: 30684 - DNA, 2679 bp, Zea mays
  Peptide Sequence Number=SeqID_72463
atggcgacggcggcgaggaaagggagcagcagcaggagtgccgcggcggcggccgcgactgtggccgtgttgttcctcacagtagtatcggccgccggcggtgctgcggctactccgcggcggctcctggtggacacggacatggacaccgacgacttgctcgggcttctctacctcctcaagcagaaccggtccgagatcgacgtcaaggccattaccatcagcgccaacgcgtggagcgacgccgggcacgccgtcaaccatctctacgacatgctctacatgatgggccgcgacgacatccccgtcggcgtgggcggcgacggcgggatatcctacgccggcgacgtgcaacgcgacgtcggtggctacctaccactgatcgaccagggcatgtcgacggacggcggctgccggtaccggcaggccatcccgctctcgggccggctggacgtcgacacgaactccggggtccggaagggcttcctcccgcggggctcccgggcgtaccggccgctccggcagcccacggcgcagcgggtgatggcggacgcgctgtccgccggcccgacctcggtgctcctcctgggcacgcacaccaacctcgcgctcctcctgatgtcgcgcccgcgcctgaggcggaacgtggagcgcgtctacgtctccggcggcgccgtgagggcggcgggcaacctgttcacggccgccgccgccaacccggtcgccgagttcaacgtattcggcgacccattcgccgcctacctggtgctccactccggcgtcccgatcactatgatccctctcgacgccaccaacaccatccccgtgacggaggcgttctactccgagttccagcggcgccagaggacgtacgaggcacagtactgtctcctgtcgctggacggggctctggcgcggcagaggaggcggtccgacagccatgacaacacggcaagtcttgttcctcttcttcttccatgcttgctcttgcatattgcattgcaagacggcttctacttgtgggatcccttcgccgtcggggtggccatctccagcatgcgccatggcgatggcgaaaccagcaacgagtttgccgagcttgagtacatgaacgtcaccgtggtaacgtccaacaaaccttacggtgcgcgtgacgacggctctaacccctttttcgatggacgaactactcccaagtttgggctgcgagagggtggagttcacagcggccatgttgagaccgggataagagaccccttctgcctggtgcccggaagcaaccgaggcagatgccaagatgggtacactaaagaagtggccggtccagaagcagtgcagatgcttgtggcaacgagggcgaggccgaacaccaacaaaagtagcccactggacaagaaatttatggagaccttcctagaggttctaaatctcccccaaaacactggacgtttcaacataagcacacagtttccgtactatagagaggttctctacaagccggattccatcatgaacgtgacccgcaggggcgggaagccaaagccagtcgtttttgacatggacatgagccctggggacttcgtgtcgctcatatgcctcctgaaagaacccagacacgagatcgatctgaaggctgttttggtcaacgggaacggctgggctaacagcgctagcattgacatcgtgtacgacgtcctgcatatgatgggccgtgacgacatcccagtcggccttggcaatgccactgcgctgggcagcccgacgcttgggtgcaacaattcctacgcgatcccgcaagggagtggtgggtttgtagattcagacacgctgtatggactggctcggtcgttgccgaggagtcctcgaaggttcatctctgatgatctagaccatcccgagcgccggcacccgagcgctttcgatgtttggcggtcagttaggaagcagctcggtccaggccagaagatcacggctcttaccagcggacctctcaccaatctagccagcattatttcactgtctgacatggacgccggctctgtcatagagagagtttatgttgtcggtggagtggttagagatggaggtgatgacaggggaaacgtgttcaccgttccctccaacagatacgcggagttcaacatgttcctggatccgctggccgcaaagacggtgctagaatctggtctaaatatcacgctcattcctctcaacgtgcagcggaaggtttcttcatttgagggcgtcctcggagctctgaagcaacacacccagcatactcccgagtcaaagcttgtgcgccgtttgctgttgctgctccagcagctccagagggaacaacggaaattctatcaccacatggacatatttcttggagaagttcttggcgcagtttacatggtccaaggatctaacttggagccctctgtggaagtgaagtcaatatgcattgttgccaacacaaccgaaagcataaatgggcttattttggtcaagaagagcgcaaagccagtggatgtattgtatagtttgaatactggagcatattacgaccacctggcaaattctttggttaaccataagcaatctgctcctattggcagctttggagagcaaaaggcaatttggagcaggccacaaaaacatttagggacggacatagcaaaggatagaaaataa

SEQ ID NO: 30685 - DNA, 279 bp, Zea mays
  Peptide Sequence Number=SeqID_72464
atgtgcattgccaatcgcgcgcccttcgcctacgccacagcccacaggccacagcccaacagccgaggccgaagccgaggccgccccgcgccgcgccgtgccaacgccttcgccttccctgatgaccagacgcgcaccggcgccttcccacgtttgcacagcgcccaccgactgcgacgcgggcgcatccttccaagtccaaagtcaaacccgtggcgcggggcagccgagagggcgcgcctcgccatcacaaagagacttcccgccacactagcctaa

SEQ ID NO: 30686 - DNA, 774 bp, Zea mays
  Peptide Sequence Number=SeqID_72465
atgtctagatgcgtagtaaaaacaatgaacgttgcaaatggaaggagtaatgcaaatggaggttttcagaatgtcttgtccgtcatcaatgatgtacaatatggctctgtaaaggataatggtgaatatgaaaccaaatcggtggctcctttgtctgggttttacactgatacgagggaaacggttaacacaaatggtctagctacgcaaacattctctggacctggctcagctgttaatcttcagcaagtggggaagcgcaattctattgaatctcctaatgctgcaattttggctggcaaggcagagaatgatagcaatggctatatatccacgccacctgaaacaaatgcatctatcagatccttgagcagctattgtctcttggatggatctgttaacggaatgccgtctcctgcaaatagcgcatcatgcaagcctgaaacaaccaataattctgtgctcagcaatgttgcaagcactgacgtaacaaatgggtgtctcaccactgtcgattctggacagcaggaggcgtctgattctcacagctcagtggagtttacccagtatttccaagagggctattgtaaaatatcagaactcgatgactgccgtgagttaactgaagctgttactgatgctgacagcagcagcagccactgcgagagagagaagcctgaggaagatggggataacgatgacttgcttggaggagtttttgccttcagtgaagaaggttctacacttctacccatttattcatataagttatag

SEQ ID NO: 30687 - DNA, 390 bp, Zea mays
  Peptide Sequence Number=SeqID_72466
atgcccagtgccacaaatggtgctctataccggacatggatgtacatttcggtcccgctgctgctctacgtcggtgaaaggatgcttagagccttgaggtcaaatgcttataccgtgaaaattctcaaggtgtgtcttctacctggaaatgtgttgaccataacgatgtcaaagccctatggatttcgttacagaagtggacagtacatatttcttcaatgtccaataatttctccatttgaatggcatcctttctccatcacttcagcacctggagatgactacctcagtgtccacatccggacaaacggtgactggacacaggagctcaagcgcatatttgtggagaactacttctcgccgcatctcaactgtttgagcttcgtttag

SEQ ID NO: 30688 - DNA, 492 bp, Zea mays
  Peptide Sequence Number=SeqID_72467
atgcaggcggcatacaaccgcgccaagtgggcacacttctccgacttccagcgcgcccagcatggaggcccaggcccacgcgtcatgcaaccggcgcgccggatgctacgtgcgagcaactgcaccgccactcgcgccactgccacgcctcctcgactgcggaaccagtaccgcgactcgaggccaccctacgcacgacccagcagcgccagcctggcgcgacggaaaaatcgaattggaaatgagatggctttgttcagccaagtctgctcagtctgggagcaccagactgtcaggtggtgcaccggacagtgtccggtgcgccaggctggctcgagcaaagtggccactctcgggaattcaccggcgacgtacgactataattcaccggactgtccggtgtgcaccggactgtccggtgagccaacggtcggccgggccaacggtcggccgcgcgatctgtgcgggacacgtggccgagccaacggctag

SEQ ID NO: 30689 - DNA, 225 bp, Zea mays
  Peptide Sequence Number=SeqID_72468
atggctcttggctgggctgctagacgaagtgcaccccaggtggatgatgagctagatggcgtgatggcgccgtcgccggatgaggtgcccaaaacaatccaagagtcgccggtattggcgatgaccatgaggtccctctactggacgatagacagcgcggtgcagtcgctctggactgcatccaagcggcggctgcgccggagcttagcacatgcggccacgtag

SEQ ID NO: 30690 - DNA, 243 bp, Zea mays
  Peptide Sequence Number=SeqID_72469
atgccactcgagattgtaagcagcgcgccagccgtgcgtgaaggccggaagtgccgttgggacgtggggtacaacccggtacagggagtgatggtggtgtcggtgcccgccggagtcaaacccgcccggagcatgcttggctgtttccagcccggagacatgctcggagccgccgccccgcccccggtcgagatcgtcaagggaagcgacgcgtcccgtgtcgggtcgggtccgtccggctag

SEQ ID NO: 30691 - DNA, 1068 bp, Zea mays
  Peptide Sequence Number=SeqID_72470
atgtttggcttggtctccctcctgccaccgcagctgatcgtgctcagcgcgtcggccaacaagctggcaaagctcaaggagcaggcggaggagtacgcgtcgctcatcatggaggagctcgacccggagaagcttggctacattgagctgtggcagctcgaagcgctgctgctccagcgcgacacctacatgaactacagccgcccgctgagcacggccagcggggcccagtggagccagaacctcggcgtcggcggcgcgctgacgataacagggggaggaggagacggcggctgcggcgtggacggcgaccacccggggcctccgcgcgagcgtcgccggagctggggcgtgcggaaggcggcggcgcgggtgcgcgtggcggcggaggagaactggcgccgcgcctgggtgctggcgttgtggttcgcggccatggcggcgctgttcgtgtggaagttcgtccagtaccggcgcatggcggcgttccaggtgatggggtactgcctccccacggccaagggcgccgcggagacgctcaagctcaacatggcgctcgtgctgctccccgtctgccgcaacacgctcacgtggctccgctcctcctgggcccgcttcttcgtccccttcgacgacaacatcaccttccacaagatgatcgcgacggcgatcgtggtggggatcacgctgcacgcggggaaccacctggcgtgcgacttcccgcgggtgatcgcggcgagcccggaggagtacgcgctcgtcgcgggcgcgttcggcgcggacaagccgacgtacgcggggctcctgtcgggcacggagggcgtgacgggcgtggccatggtggtgctgatgaccgtctccttcacgctggccacgcacccgttccgcaagggggagcccaagggcgcgggcgcggccgccggcacgtcgcggctcccggcgccactgaaccggctcaccggcttcaacgccttctggtactcgcaccacctcctcggcatcgtgtacgcgctcctgctcgcgcacggctacttcctcttcctcgtccggaggtggtacgagaagacg

SEQ ID NO: 30692 - DNA, 639 bp, Zea mays
  Peptide Sequence Number=SeqID_72471
atggagtcggggcaccagagtctgcgtggttatctggacaaggcggaggcctccaccagcacaggggtcgaccgagcacatgcattgctcgtggacgcgtaccggcagcttggtaccaccccctttgatgcgtctggcgtggaggtgggccctcgctttctcgggtggctgcaggaggagctagatttgctcccatctatcatgatgggtctcatgtcctttgcctcgcttattacctgtgagggggctgcgaatgctttgtcccatgaggggatgcaggcacttcgaagttctttaaccaggccaatgaggacttcaaccgtggagtcttctaggtcgaagacgaggatgtggggccctcacggccgcgacactgtccgagagtggtctgaccgggcgatggagcagatggcgaatgatgaagaagttgacgacttcagcggcctggagagcttggggacccgagcagaagatgcgaggatgggggttggagagcaactggtgccacctaccggctctagcgaagaccctgcggcggccgccatgccggctggcgaagacactccgatggcacctacgcaggctgccgaagaccctgcagcgccggctgccccttcgcaggtggcggggtcatgttag

SEQ ID NO: 30693 - DNA, 435 bp, Zea mays
  Peptide Sequence Number=SeqID_72472
atggcgacacaagcaagaagaggtgccggtgagtggtttgtcggcgtcacgatgacgacatcctccctgccgccgacaacttctatggaaaccttccctctgggtttcgagtcatttcttggtcctggtgttcatggtagatgggcggtgccgtggttgggggagggggccggggtggtgttcatggtagatggggtgccgtggttgggggagggggcctgggggcgtgggggggcactggtcactggagatggcggcgagcatcgtgccgactgtcaagtgcttgatgtccgagatgagtgccggcaactgatatgcatgatggataatttagtgatctggataattgtctccattgcatccgaggacgcgatcgatcgatcgactgggtatttgcagaacttacaaaggtgcccaaggcaacgttcagactag

SEQ ID NO: 30694 - DNA, 1344 bp, Zea mays
  Peptide Sequence Number=SeqID_72473
atggcgtcggtcaggtcgtgcgcgtccgtgaagtccgccgtgaggagtcctgtcagttacagatccacgagggccgtggcggccggctcgggaaggctgcgcgtacgctcctcgtcgctgcaggcgctcgccggctgcgccagcggcggcggcggcttcggcttgctcggcagcgatgatgggccgagggtcaggcggggcgggcgggaggtcctcgccacgtgcagcgcgagcttcgacggggtccgccccgccgtcgtggcgggcgccgccgctcagcccgggtcggcggcgttccccgagcgggccaaggtggtggcgctggtggccaccatcatgctgctctgcaacgccgaccgggtcgtcatgtccgtcgccgtcgtgccgctcgccgcccagcacggatggtccagctccttcgtcggcatcgtccagtcatcgttcttatggggatatgttttctcatccatggttggaggagctttggcagacagatatggcgggaagaaggtgatggcaggtgctgctgcgctatggtccttggctacaatcctcactccgtgggcagcctctcgctccaccatcatgttgcttgctgtacgtgcactatttggcctcgcggaaggtgttgcatttccgacgatgagcaccttcttaccgaagtggttcccaacacatgagcgtgctactgccgttggcatttccatgggtggattccatcttggaaatgtcataagcttcctagcaacaccaatcatcatgtcacacataggcctctcgggaacatttgccttcttcgcatcgcttggttatttgtggatctctgtatggatgatgaacgtagaaagtgacccacttgacagccatactataagcaagtctgagttgcaattaattctagctggaagagctggatctaaagtccaaggcagtaataaattcccatcccttagggaattgttctcaaggactgaattcttggctgtcactttggccaatgtggtcaacaactggggctattttgtcctattgtcgtggatgcctgtgtacttcaaaacggtttataacgtcaatctgaaacaagcagcgtggttcagcgccataccttgggcagtcatggctatgtccggctatgttgcaggagcctctgcagatttcctgatcaaatctggtttccccataggactagttcggaaaattatgcagtccattggttttatggggccttgcgtggcattgctatgcttaaggtttgcccaaactccatcagttgctgcagttctcatgaccattgccctgagcttgagttctttcagccaagccggatacttttgcaatatacag

SEQ ID NO: 30695 - DNA, 717 bp, Zea mays
  Peptide Sequence Number=SeqID_72474
atgggatgcttgtgggatccgccatcgtgcaggcagagggtagagagaaggagggagtgcgccgccgcggtctgtgttcgtgaatcccgcaacacgccgtcaatcggtgcccgcgggtggccgtggaacatcgccgtcgatcggggaaggtgcgaggaccatcttcgggcggacttcggactgtttgcgcgggcaatttctcaccggaaatctaacaccgcggcggggccgccatttgccgtggccgggacgttctacaaccgcatcgtcggtaagaagttctcctctgtgctcgcctcgtcctcctcgtcatgtagcaccgatcaatttagatttaggggcactagttcggtagatgaccgtatgccggcgagggcctccgccgtgctcgtgggcggcgccgccgctctgtcgacctgggagaagagagtttgggggaaacgacgtggggcgttcatccggagatctacggctgagatcaattggcgcatagcgttttgtcgtattgaactgggaccgtccgatcgggatcggatggcggtcatcgctctgggcttcattaaaccaggggcgtcggatctggatcccagcggatcgcgcagcgtaccggttcgccgcgatccaggcctaatctcgagcgtccaagttcgatcgtgcagccagaaacaactcgtaccccttcggccaactcttttgcataagagcccctgcttttag

SEQ ID NO: 30696 - DNA, 585 bp, Zea mays
  Peptide Sequence Number=SeqID_72475
atggccaggacgccgctcggagatgatctgcgagagcggcgcaccccacgccagccaatgggacacccgcctgggaccaggcgcccactggggtctacggtgctaccacggcaaagtctttatcgaggttacagccctcgatgttgtgctggcgctctcgcgtcctctctagtgagacgcgggcatcttcacccaccccgcctgcggttgagttctgcccgcaggtcattagacttctctcgagatactggagcatcttttgccatgcgccggcggctgagctctgccctcaagtcttcagtcagtgctgctctcatcgagggtgagcgcacggatgccgacgcctcatgttggcatcaggatgaccacggcctcgacctggtcgagccggagtgcaccattccaagcagccggtcgacgtcttcacgccattgcctcatgacccctgctgaggccatggagattgggggggtggcgcaacaactccctggctgccgacaacgctcacgaagctgtcctggggagagtccgggatgtctgcgcagctgtatgctgccgcgcaacatgcacgacagcagtgtctag

SEQ ID NO: 30697 - DNA, 594 bp, Zea mays
  Peptide Sequence Number=SeqID_72476
atgaccgccctcgcagcaaaatcatcccaagggcctccctacactgaccactcccctactgcccttgcccctttcaggtaccaacttgcttctcaggtgacacgtgacctcatgctagtcgtagcaatacagacaaacatgaccgcccgactaggatccagtggccccgcacccatctccaagctctggccggaccctggcggcggtgcaggacaccgcagcggcgccgcacaccagcgcaacccgaccagaccgcgcccgatgccccacttcgattctgaggagcaatacgcaggggaggacgcgacgaatagcatggaaaggtttctcacctgcagaaaggttgcggaggaccttgcccacgtgcgagcggagcacacgcgcggcggaggagcggctccggtgagcaattccggcagtccggagcatggcttcgcccaagcaaggccacggtcaaataacgcacatcatggtgaagctccctggcccagatccaaggctcgaacggcatcccaggcgaggtcccgcggcggcgcaggttcttcttacgtcggctccattgcagcggcacaacaaagcaccatcaggggataa

SEQ ID NO: 30698 - DNA, 270 bp, Zea mays
  Peptide Sequence Number=SeqID_72477
atggcgagcgcattgaggtggtcgccgctgctggcgagccactggcgagctgctggtgcagagatgtacttagtccgggaggccaagttgcatgtccggaccccctggactgtggctctagatactagggtcctcgccgcagagtggtggagcgtgcaggcttacggtacaggaccaggctatgcagctactcggcttcggaccaccccaggagatgagtgtccattctttggagccggaccccaggttgtcggacccatagaactatag

SEQ ID NO: 30699 - DNA, 1101 bp, Zea mays
  Peptide Sequence Number=SeqID_72478
atgtcgtgcgtgttcgactactactgtattaaggactgtggcatcatctcggcaccggaggtgacacagaggaggaccaacaacaatgaccagttcatcatcctcgccactgtcggcgcgtacagtggtgtgtgcctgatgactgacgatgtacgagggaacttcttccggaagctccccgatcccgcacaggcgcacaccgatctcgctcctatcgcgccccgaaaccctctcgtctggaaaccgtcgcccccgacctcccatctcctcccccgaaaccctctccttgccctcaacgccgtccctcctgcaatcccgcccccgcccacgctgtgccttccctccatcccgcccccgcccgcgcctacatcccgcaccgcccccgcactcccatccgctaccccatctatctcgccgtcgacctcgcccaccctacctcccacgatggggagcgccatcagcgaccgccacatccgtgacctagcccaccctgcctcccacgatggggagccacattcgcgaccgccagcatgccaagcgtggatctcgcgcaactcccagcgcgcagccgctaatggcgcccagccgccgctgatcccatccccgcgctcccctccgctaccccatccatctcgtcgtcgacccgctctgatccaccaccggctcacggcgcgcgccgcacggagcgggggcgtccaccggcggtactacaagacgagcgggcacggtcggtgctacggcaacagcacgggcccaccgtgcgcggggtgggtggagatgatggtgcccgtgttctcgcgcgcggcgtggcggtgcgcgtggcacatgatccagaacgacctcatctacgcctggggcatggactacaagctcgactactgcatgcagggcgaccagagccgcaacgttggggtcgtcgacagcccgtacgtgctccaccggggcatccctacgctcggcgacggtggcaaggcgacgatgacggctgccatgtcggcattggggacggcagaccagttagcggccaggaagcggtcctacaccgagctgctgctgttcaacaggaggtggaagaaggccgtggtggagaactggtgctag

SEQ ID NO: 30700 - DNA, 249 bp, Zea mays
  Peptide Sequence Number=SeqID_72479
atggcgcccgcgttgaggtggccactgttgctggcaagccacccgggaggattccgcaaggacggatgcacgctcaatgtgtcgaggttggattccagcgtacttgaaagagttggcaacaacccccaggaggatttagtctgggaagccaagttgtgtgtccggaccccctgggccgcggttctagatactaggacacctgtcgcagagtggtggagcgtgcaggcttacagtacgggaccaggctaa

SEQ ID NO: 30701 - DNA, 246 bp, Zea mays
  Peptide Sequence Number=SeqID_72480
atgaatcccgcaggaggtcactccgacgactatggcgcacgtcaggaaggattcagtcatcacctcaggaagacttctgcctcgcccgagctcgactccgatctcgatatctgcatcaaaggacaccccaacctcatcaaatacagaagcgccgacgtatcccgtaagcggcttttctccatagctaagccctattacaaccactacggtatgggcaacccctcccctgggggctcggacatgtag

SEQ ID NO: 30702 - DNA, 282 bp, Zea mays
  Peptide Sequence Number=SeqID_72481
atggcgcaccgggacagtctgacgaccgttggcgcttggagccgttgctccgcctggctcaccggacggtccggtgctacaccggacagtccggtgaattatagcggagtggctcctagaattcccgaaggtggcaagtttggagttgatctccctggtgcaccggacactgtccggtggtgcaccggacactgtccgggcgaggtgggacttgctgagtacctttgtgttcacccgttattttttacagaggatcttgatttcatgtcggaggaattttga

SEQ ID NO: 30703 - DNA, 1320 bp, Zea mays
  Peptide Sequence Number=SeqID_72482
atcgacatacggcaaggacctcttggtgatcttctcagaagtgcatatagacctttgaaggatctgtcaccaatttttgctggagtaggagcagatctgatgcctccaattatggattcactacagcaagaggctcagaagatggatccacatggttccagagtttctaaccgccttttctacttgtcaatacctcctaatatattcttggatgttgtaaaatgtgcaagcaaatcagcatcttcggtgaatggttggacacgagtaattgttgagaagcccttcggccgagactcagaatcctctgctgcattaacaagcggtctgaagcagtaccttgtagaggaccaaattttcaggattgaccattatttgggaaaagaactggtggagaatttgtctgtcctgcgcttctcaaatctcgtttttgagcctctctggtcaagacaatatataagaaatgtgcaacttatattctcagaagactttggtactgaaggacgtggaggatactttgatggctacggtattattcgagacataatgcagaatcatctcattcagatactagctttatttgctatggaaactcctattagtttggaagcagaggatataagaaatgagaaggttaaagttcttcgttccatgaagccgttgcagctggaagatgtggtcgtaggacagtataaaagtcacacaaaaggtggtaccacataccctggctataccgatgataagacagtgcccaaggatagtgtgactccaacgtttgctgctgcggcgcttttcataaataatgccagatgggatggagttccctttcttatgaaagctgggaaagctttgcacacaaaacgagctgagattagggtacagttccgacatgttcctggaaatctctacaaggggagttttggcacagatcttgatagggccactaatgagcttgtgatacgtgtgcaaccggatgaagcaatttacctaaagattaacaacaagattcctggtctcggtatgcgactagataggagtaacttgaatctccattatgccgcaaggtactcaaaggagatacctgatgcttacgagagactcctgcttgatgccatcgaaggagagcgcaggcttttcatccgctcagatgagttggatgctgcatggtcactcttcacacccctcctgaaggagctggaagagaagcggatagctcctgagctctacccatatggaagccgtggacctgtcggggcccactatctcgccgccaagtacaacgtaagatggggtgacttgagtgcggagcactacaaggcatga

SEQ ID NO: 30704 - DNA, 474 bp, Zea mays
  Peptide Sequence Number=SeqID_72483
atggcgctctcctgcatgaggtgccccgcgggcgccggcgccgcctccgcccgacgcgccgcagcgcagccgttggccgcggaggctgcggtctccttcgccagatgccgcggcttcgggaggtccgccaccgctgcgactgccgcctggttttggcgcaaccatgccgttgcctcacagggagtgaaagctcccatggatgctgatgtcaagaatgctgtcatacctcctacctcaccaaaggtggaaagtggctctccttcagaaatcactctggatgaatttgaagacttgagcgctctatgcaagaatgatgattctactgttagcatcacagtagttggagcatctggtgaccttgccaagaagaagatatttcctgccctttttgctctctactatgaagattgccttcccaaggcatgtgtatatatatcaccatttgattatgacgtttgcatctattttccttaa

SEQ ID NO: 30705 - DNA, 1623 bp, Zea mays
  Peptide Sequence Number=SeqID_72484
atgacggcctgtcgcgtgccgacacgttgcaccttcttcggacttgacgtccatgccttctggacgcacggccgcgcttcgcgctcacgagtcacgagtacgctactggcgacgccaagccctcgtgaggccctccacaaacgcccacgtagcctcgtccgcgctctccgttgggtctcacgatacagcggtgctccagttcttcctcgcctgctgctgggatgggagcagtggccgttctcaccgagccgacgcgacacgttgctgacaattggtatcaaagctgttgatctctggacaatctcgctacgctacccaccttccgtcgagccgtgcgaccatgacgggtgcgaccgattccagtctggcaggggcgatggaggcgcagtcgcaggcgatggaggcgcaggcgcaggcgttggcgactcaagccgcttgcttcaacagatctgtgatctccttgatgctcaggatagccattggggagtgctcgaacggacggtgtccagtaacgccacctccatcgaccccgacgaggtgctcgacaaccactgcgtcggcgagcccatcgccaccttcgcatctgcggccgatgctaccttctccagcactgccggcgtcgagtgtggcacgatccatagctacgcggctactaacaccgagatcaccgacaactggggcagcgacttcaacgaaggagaagacctattcgagccgaacagactgcggcaacacgcgatgctcgacgccgtcaccgcggacgtgcttgaggactcctcgctctctgatacaaagaccatgatcggcaaccgcggccccaacttccctaacctcgtcatcgcagacctcttcactgctagcatcaaaggtacacctcccaaatgtttggtgaaatgcttgaacgtcttctcaagcagcgacgggcaccacgcgcgcgacgacggacctgtcttcgacacactgggcaacgacgacatggatgaccgccaccacctcctcgggcggcggaaacagactgcagtagcgggcgacgtcgacgtccgccctggccctgcagagcgagcagctggcgttgccctggagccaggcgtcgaagcagccgacgcggaagacgtggaggagccgggcgtcgaagcagccgacgcggaagacgtggaggagccgcaccccaacgtcaccgcgttgcatgacgtgtacgaggacgcgtgcggcgtgcacccggtcctagagctctgctcatgcggcgagctgttcgatcgaatcaagcaccttgcctccgacctccatgtgccttcgatcccgcccattcccaccgctgccttgtcggtgcccaaagcggccgagcttgagctctacggcatcaccgacgacctccgtgagttcgtcaagagcatgaccataagcacggtgggacgacatgacctgagctcgaaggagctcgacaacctgcggattcactttgcacggatatgcaccaacggcgagaatgcgacgctggcgaagttcgagcaggtgctgaaagcgatgaagctagaggcgctgagcccactggcgccgcgcgtgttcgacctgttcgacaatgccacgtccatgtctggaagcagagcaacacatgccagatag

SEQ ID NO: 30706 - DNA, 177 bp, Zea mays
  Peptide Sequence Number=SeqID_72485
atgctgccgcaaccttcaccgcgagtgcgagggtcgcagcccccgatgcttggcttcctccccagcgccggcgcggggattcgcttcgtgctcacgtccaccttcggccccgcacgctggtggatggcgcgtgctgttaactctgaataccgcacagcagctaaggttataacttag

SEQ ID NO: 30707 - DNA, 639 bp, Zea mays
  Peptide Sequence Number=SeqID_72486
atggaggctagcagccgccgccgcgtctcacttgtgccactgctgctggtgatcatcgggtgctgtgcctgccgcgcccagatcccgatcccggcgaggacggacgggttcgtgtacggcgggaagccgccggcgtggggcgagacggtggtggtagaggcgttcttggacccagtgtgccccgacagccgcgacgcgtggccggcgctcaagaaggtcgtcgagcactatagctcacgcgtgtccatcgtcgttcacctcttcccgctgccttaccacagctatgccttcattgcgtgccggtcaattcatgcggtgaacaaactaaatccgtcgttcgtgtaccgtctgttggagaagttcttcaaggatcagagctacagtggtacggttgatgaaataaccaagaaccttgttgtgcccatcatcggtgaaactaatttggcggcattcagagcaggttttaacgattcacattctgatcaggctacaaggatatctttcaagaacggctgtgcacgaggtgtgaccgggacaccctacttctttgtgaatggcatacccatcaacgattcaggttctcctctggaatacaaggactggatttctatcctgggtcccttggttggaaagatgtag

SEQ ID NO: 30708 - DNA, 207 bp, Zea mays
  Peptide Sequence Number=SeqID_72487
atgacgtcggtggttctcaagccccctacggaagcaaggagaagtcagcaggatcccaacagcatcgacagctttgcttctacaggactgagacacttctccgacggccacgttatcgcgtacataggactcaagcacttctccgacagccacgttgccatgtacacagggctcaggcacttctctgccagacacattagcgcatag

SEQ ID NO: 30709 - DNA, 99 bp, Zea mays
  Peptide Sequence Number=SeqID_72488
gtcgttgagttggaccccttggtggctgagctagcaaagaaatattttggcttttcaatggatgagcaattgaaggtcggttctcatactctcctgtaa

SEQ ID NO: 30710 - DNA, 264 bp, Zea mays
  Peptide Sequence Number=SeqID_72489
atggggattatcgtctcagccaagggcgcgacgcgggcacgaacggctgacagattctccgcctctgccgagggtgcagggtggactcggacggctgacagaatctctacctcgctcaaatggcttgtcgtgtcgcccgagggcgtggcacggggcccaggggcaatgacgcaggtgcagacatggtgggtgggtagtcagacctcggggcagacggttagggttaggctcgggttaaaaatcggatcgttagattcagagtga

SEQ ID NO: 30711 - DNA, 567 bp, Zea mays
  Peptide Sequence Number=SeqID_72490
atggaggccaaaaagcacaaccaccactccggtcggcgcaagggcaagtgtgagtacacctccgataagcacaagtccaaggggaggtttgacaaggatgggatcaagcagaagtatctcatagcgaccttgaccatgactctgatgacatttcttcttcctacaacgacgaagagctcgagaggctggttgaggacaagctcaatggactctgcttctttgccgacaccgcaagagtcctatgcaccatgtcacttggacaagttgcttaggcttgcttctcatgagaggaaagaatacaagtgcaagtatgagactactcttagggagcttgagtctgctagagcttctgtagtggtgttcaacgagactgaatgtgatgagtgcactctccacatgttgaacatcaccacattgcagaccaagtatgccaccctgctagatgactatgacgagttacaatctagatctattttgttgggtgcgtgtaagacttgtgttggcttccaaactgagctagtagagaagaacgctaggatagccttgttgagaagtctagctcaatga

SEQ ID NO: 30712 - DNA, 318 bp, Zea mays
  Peptide Sequence Number=SeqID_72491
atgacgcttgtcatcaaaagattcaagcaagtcttcaagggccagaagaacaatgataacaagccaagtcggaagcgtgcatgcatcaaatatgagcttacgctttgtgtcatggaagttttgatgattaggaaccttggagaggaccatcaaggacttgggaaaagccaagatatcaaggaggagaagctaggacgttcacaacaaaagaaagccaagtccgactcaacttcgtctccacctcggagttcaggaccagtctcactaaaatgggcgcccaggatgcatctacctccgattaggttggactttatatag

SEQ ID NO: 30713 - DNA, 588 bp, Zea mays
  Peptide Sequence Number=SeqID_72492
atggcggtaacttcagaaataactggtccaatggttgtggaagatgttgtctatgaaaatgctgatggagatcaaggttccatgtctgagaaaatgttccgtcgtcttatttttggaagaagttctggtttagtgcaatctgaagcgttgttaatcagagatcctcccagtgatgagatgcaaccacagttgtttcaaaggcaattcgtctatttgttgggacacgatagatgtgtgataatctatatgggttctagccagaattgtaaacatcatctgatttactcggataatagaaagaataataataataaatatctggaatataaatcccctagtgatctgttgaatgttggaactgctacaggatccaagaacagtctgagaattgaccataaatttcttggtagctcatatcacagcagtatcatatctgggctttctttagttgcatcttctctgagtgctgctgcttcatctggagaaaaagtcagcatcaccgttgtaggccttggtgctgggtgtttccccaatgtttctccgtggatgtctgcctttcgtagatattggacgaatctcagaacctaa

SEQ ID NO: 30714 - DNA, 498 bp, Zea mays
  Peptide Sequence Number=SeqID_72493
atggcgaccacgacgccgcctacggcgatcctaggcaccctcgtcgacttcacatcgcgggagaactgggacaagttcttcgcgctccgcggcacgggggacagtttcgagtggtatgcggagtggcctaacctccgggccccgctcctcgacctcctcggggaccgcggcgccgcagcgggggcggcccaggagatcctggtgccagcgtgcgggagttcggtgctgtcggagaagctctacgacgcggggttctgccgcgtcaccaatgttgatttctcccgcgtcgtcgtcgccgacatgctccgccgtcacgcacgcgcgaggccagagatgcgctggcgtgtcatggacatgaccgacatgcaggcatgtggtgttatggagatgatgttgattactggatatagtgtcaatgtagtgtctgagtttattgtctatcacctagcatgtcaacagttgatccatgagctcaatgtttctgggcgatttgagtag

SEQ ID NO: 30715 - DNA, 459 bp, Zea mays
  Peptide Sequence Number=SeqID_72494
atgtggaatcgcatccacatgaagaagaggcttcaggtcatggagatattcctgctaagtagtgaatcgtctgagatatttaaagcactggaaagagcaaaactgatggttggcaataggaaagaatcatgctactcgaggtgtggaagaactgacaaaggagtttctgctactggacagagttggtcagagaagttaagtctgcagggcccagagatcacaacatcacaacttaaaaactgggaggaggttggtccagatgctgcccggaagttcttaggacacacactgtggcttattgtagtgcaaaaaagaacaaatccgtccagcaagaagggatcccttgggtacccactacaggttgcaagctggggtgcttatctcttgaataggaacatcatcaccatgtcgtttgcgtcaagggatccacatgaggcacagcggctcaccgtgaagtaa

SEQ ID NO: 30716 - DNA, 291 bp, Zea mays
  Peptide Sequence Number=SeqID_72495
atgaaggtactcgacgcgggtgcaggtgctggccgaggtgcgcaagatggtggagctgtagcacaggcggggcgagtagacccgctacgtgaccaaatattggcactgcgaggggaagatgtgttcaaggtcaccaatgaccgtgagtatgctcatatccttgctgcgctaccatcaggggttaacgttataaggatgcttctactgaggttgggacttatgaaaaatgaggatatggttaaaccgatgaaccgctctggagattacaggtcatggcactctggtaactaa

SEQ ID NO: 30717 - DNA, 300 bp, Zea mays
  Peptide Sequence Number=SeqID_72496
atgccgtcgcggagttctatcaccacctggagcaaccccatgacttcaatcggaggtccaaggacctataccggtggtaccatcaagctcaactcgtggatcccagatgagcagccacccattatccctgcatcggttcgagttggagaagacgagcttccaccgtcttgggaccctataccctcgcctttagcaatggatgtgacactaagagatcaccttagaaagataagggatgaggatgatgatgatattgttgggggtcttcggcttccaaaggtcctcaaaaatatgatttga

SEQ ID NO: 30718 - DNA, 558 bp, Zea mays
  Peptide Sequence Number=SeqID_72497
atgagcctccccggggggcggcggctggtcctagggctggcggcggctgtggggttgggaacggggaatcaaccaaattctggacagaccgttggctacaaggtccatttgggagatggcatcaagttcattgaagacagtgttgctgcaaatcagtcagtaaatggcagtaccagaaatgcattcaaaatacttatcctcgatgttgattcatctgatctaagctctgggctgtcttgcccaccagaaaactttgtcgaagatcctttccttctaatagcaaaggagttccttttggagggcggcctttttgtcatcaatttagtctcgcggtcaacctcagtgagggaaacggttgtttcaagactgaaagcggtcttcgaacacctgtactcactgcaacttgaagaagacataaatgaggttctgtttgcatcaccgagcggaagatacctagaaatcaatgacattagtgcaggagcctccaaactgcaggacttgctcaaaattccggtggatgtagaatcagatatacagaagttgcagaaactccagtaa

SEQ ID NO: 30719 - DNA, 384 bp, Zea mays
  Peptide Sequence Number=SeqID_72498
atggcgaggggcagtgtgcgaggagagggatctgggggtgacgaactgcacaggagaaaagatggggcgcaggcggttctagcttggggctgtaggcgcggacttgcgaagagtgttgatacgcacttgatgaagatgctaccaactctggtcttgactgatcaagagaggttggaggttgccaaccagacaggtgcaagagaaaagggtatagatagaaaaggtaagatagaaaagaccaagggtcacaacacatcaacactcattccaaagaagcaaatcagtcatagcagaaggacaaacgtcatgagcacacaacaacaaacatcttgttgctacacgttaatgctaacaagatggtggtcttctctaaaaagggaataa

SEQ ID NO: 30720 - DNA, 294 bp, Zea mays
  Peptide Sequence Number=SeqID_72499
atgtcccttgtcgtgtcctcgcccgcccccagtgcgtgggtctcaggaacccaagcagccagccctagcgggcggtctgttgcgaccagctcggtggctcatgtccccagcgcgcggtccgtccccggtgcaaggtccaacacatccaatgtcctgccgtccgctacgttctcggagcagcttccctggccgagcccagcaccccctgcatgcccccatgcacagctgtatgtcatggtcgtacaccttgtgagccccggtgacccacaccctgctgaccgcgacttcccctag

SEQ ID NO: 30721 - DNA, 432 bp, Zea mays
  Peptide Sequence Number=SeqID_72500
atggcgaggtcgttgggcttccgcgccgctgcaaggggctcacgatcgcacggggatttggttaagcataagaacagggatcagaatgagaagactccatgcacgtttacttcatcccgccggcggcgcgttaaaatcgtgagggatattctgtacggcgagggcaatagtgagaggcatgatgatggtgcgaggccgacaggaaagggaggggaggagccgtgggagaacacaggaagagacgtgagggtacaacagcgcgtgggagcaccaaaagcggctacgaagttgttcataaagatggcaaagggggcggcagggactagccctccgttcccccgaaacccattcctcatccccgccctatttagcttaatggggacaaaaatcattcatatcctcgtccttgcgggtcttcgtggagaacaatag

SEQ ID NO: 30722 - DNA, 702 bp, Zea mays
  Peptide Sequence Number=SeqID_72501
atgaagtcacatcggaagggtgacaagaagaaaaagaaaatgaagaaggtggtctaccacgagagcgactcttcatcaccttacaccttcggcacagagtctgccacttcgaagcgccaagagcgcaaggagtatacccttcttcccttccagaaagggcagaaaagaaaatccagtactaaaactagagtccccactcctgagcagggaaaaacagaaatccttggaatcagccatggagtctaccgcgcttatgaacgcgaaataccactgctgacctctggctcccgttccaaacccctcccctttgcttccttcaccagggcggcttgccgtctcgcctccgcccccttctccggcagcggcagcgtcgtcctgctgtcgcgccggagccgcgactatgctggcgttggttccttggtctccgccgcggcggatcctggggatacggcggacgccggatccgagtccatcctgctcagcgtccaggggatgatgtgcgacgggtgcgccgcgagcgtgaagcggatcctggagagccaacccgaggttacttctgctaccgttgattttaaggaagcaagcgcagtcgtgtggacaacagatgaggccaaggggacacaaggttggcagaagcagtatggagagaagcttgctaagcaccttggcacttgcggatttgagtctcgcctacaaggttag

SEQ ID NO: 30723 - DNA, 273 bp, Zea mays
  Peptide Sequence Number=SeqID_72502
atgaggtttaagtatttgaacaagttgttgcacatacgtaatactatgtttcttgcatggttgcttggctgggaacctctcaagaagagccaaaagaagatagagaagtttggctcaaaaggacaagtctgggacccaccggactgccaagtgaaacttatgaccgaagacacggctcaaagacatagagcttgttcggctgcgatgaatggagcactgttgcagctgcaaaatactgttgcagctgcaatccctagagataaaatactgtag

SEQ ID NO: 30724 - DNA, 1167 bp, Zea mays
  Peptide Sequence Number=SeqID_72503
atggagaggccggcgcccgtgaggaagtcccacacgtcgacggcggacctgctggtctggccggaaggtgcgccgcaggagttgcccgccgggtccacgccgccatccaaccgccggccgcaccagccgtcggaggcgctcaggaaggtggtgttcggcgggcaggtgacggaggcggaggccgagagcctcaacaagagcccttcatggaattgccatctcaccaactatgttggagtactgcaaactgaccgtagccatcaaaatgctccccgtaagtttcattggttatttagattccagagtaccacccgagtggaaggagatgacaagctgttcttttcccccttcaggaaaccatgctctgctcccaagtggaaggagatgacaggaagcggtatatttgcagctgggggcgagggtgaagaagatgaatccgccaatgtctctgcaacttccgtccggacggctccaaagaattatcagcatactcactgtagcatcaagtttctattccataatcagcttgatgtttggcttcaagaaagaaagcattttcttgatgctggcttgcgtagctggaacactactgttacacggactaatcctgctgcattttcacaaacacaggcaatcagtactataagccacatctcatttgccgaggaagaaagcatctctccaaagaagccaacttcgatatcagaggtcgcaaagcagcgcgagctaagcggcacgcttctgagcgaggacgacagcaagatgaagaggcagatatcggacctgaaatccaaggagctcagcggccacgacatctttgcccctccggaggatcccaggccacgcaactcggagaacggctcgacctcgcagactccgggcaaaaatgcacacgtaagcaacttcaagttcggcgaggccgacgaggacagcgcggtgaagaccgcgaagaagatccccaccaagaagttcaccgacctcgcgggcaatatcttcaagggcgacgacgaggcacccgggacggcggagaagcaccacctgagcacggcgaagctgaaggagatgaccggcagcgacatcttcgcggacggggaggccccctcccgggactacctgggcggaatccgcaagccgcccggcggggagagcagcatcgcgctggtttaa

SEQ ID NO: 30725 - DNA, 228 bp, Zea mays
  Peptide Sequence Number=SeqID_72504
atggaaaaaagcgatttgcgtttgggcctcaacacccacgcgcccgtagatgtccttattgggcttctctttcaggcagaacggctgaacgtcgtcaactgcaccacccccaacttcaccagaattatctctttgatggaccccagtaggagttgggcagctcgttggttgagaattggtgacccttgttctcgtgtatcctgcagtttgtttgcctcttcaatctag

SEQ ID NO: 30726 - DNA, 687 bp, Zea mays
  Peptide Sequence Number=SeqID_72505
atggcgtacaccggcagcgacagttccccgccgtcccctggcgcgccggcttccgctttcctagacgaccacgcgctcttcctcgaccagtccagcagctccttcttccccggcaccacctcgcatgagcccctggcgcctgctgcctcggcctcatcgtcagcggcgcggaagcctccgcggaagcgcccgcgggcatcgcgccggccgcccaccaccgtggtcaccacggacacctccaacttccgcgccatggtgcaggagttcaccggcatccccgcgccgccgccgccgtcgttcgcgccccacctcggccccgccggcatgctctttggcggcccccacgaccccaccttggcaggcactgcgcgcccgcccttgggcttggagctactgatgcgcccgtcgcctctcaagctccatgccgctccgcacgcctcgcctcccgccgcggccggttcgttcgcgcactccctgttcgcgagcagcaacgcggatcctgctggcccaagctccgaaccgtacagcggcttcgcgccgtcgttctccggtgccgtcccgcgatacgacggcagcggcggcggcggacgattggatgcggcggaagacgagagagtgctgaggcatcatgaccatggtctcttctcgtctttcttgcacgccggggatacgtttcacagccactag

SEQ ID NO: 30727 - DNA, 429 bp, Zea mays
  Peptide Sequence Number=SeqID_72506
atgatggtccccgcctcagttgccgccaccttgttcgtcgtcctatttcttttccctctcccctcatgcctccgcctccgcctccgcgccaccccattctcgacacagggcgtgagagcaggtgcctcctccccatattcatctgacaccagccttgacaccgacccgcgcagtggctattgcacgtccatgaggacgtttcacaacacgcccacaccatcgttttcgctgtcgtcggacgtcctgttcgtcttcccggtcttcgccctgttcttcctccccaacctgctgcccctgcccacattcacagccgcgagccgactaacgtttgttgacgcgggtacgccaaaattgctaaccttgcctgacaaccttatggtctttatcttggtccttcctccaccatcgcccctacgtctacgtccttag

SEQ ID NO: 30728 - DNA, 615 bp, Zea mays
  Peptide Sequence Number=SeqID_72507
atgggcgacgacgacggcgcgaaggcggcgtcgggcgtgaagcagatcgtgcggctgcgagagctgctgcacaggtggcatttcacggcgctgggtgcgaagcagcagcagcagcgggaggaggagggccgtggccatgccggcgtgccggagggggcggtggcgccggcgatcccgccgttcgtgctgcggcggctgcggcgcacggagacggcggactcggtgtcggacgacgagagctgccacagcccggagccgccgccggacgtcccgcggggctactgccccgtgtacgtggggcccgagcagcggcggttcgtgatccccaccagctacctggcgcaccccgtgttccggctgctgctggagaaggccgaggaggagttcgggttccggcaccaaggcgcgctcgccatcccctgcgagaccgaggccttcaagtacatcctccagtgcgtcgagcgccacgaccagggcctctccggcggcggcggcggcgacgaggcgggcgaaccacccgacgacgaccgtgctggagcaagaaccagcggtgcgtcgtgcgtaaatcctagactaggtgttgtggtgtggtgttgtgttgcacgctatttataa

SEQ ID NO: 30729 - DNA, 288 bp, Zea mays
  Peptide Sequence Number=SeqID_72508
atggagaagggcaaattactcgctggcgtcgcggaatcctcagaataccgccgtgcgcgcgtggacgagactcctgggaacataatcctcgccaggggtgtggttgccgtcgatcttggatctggcggatctgggttggtccccgctgatttaaatccgaaccgcagatccatcatcgaacgtatccaggttggtctccggtgtttaaagatctcgactgttaatgatcgggcgaccgaaaaacgagaatacccattcgaccaggcagatttgcaaaatagcccttaa

SEQ ID NO: 30730 - DNA, 240 bp, Zea mays
  Peptide Sequence Number=SeqID_72509
atgcccgagctccaccgtgtcgcgtcgtgcctgagctccgccgcatccgccccagtgaccatttccgcctcgtccgacgacgagcagcccgtggttcgtgagtgtgttgtcgaagatcttcctgagcaacaacctagtgaaggggactcaggccattttcctaagtacctctcctgcttaggaggagatgctggcaacatggaggactttgaggagttccaggactacgacgagttctag

SEQ ID NO: 30731 - DNA, 336 bp, Zea mays
  Peptide Sequence Number=SeqID_72510
atgcaagatgttgcacgacatgcactttcgcagtattactcgttgttcagcggggtagctgacgggctcgacctgaagtactaccctcgttgtttgaccgacagtactggaggtgtgattgtctcgcccgttggtgagggcaatcctaggctgaacagcatggtcaacctggtcgtcatgctcaacaccgagctagaccacgcccttgacgagttgggcaagatgtctgagcacaggcatagaggtggaaggcgtgctcagcaggagcagcaggcaccccaggaggaggcagatcaggagcagttgccaccgccacccccgatgactattgagtag

SEQ ID NO: 30732 - DNA, 1881 bp, Zea mays
  Peptide Sequence Number=SeqID_72511
atgaaggagtccgaccagctcgcgacttctttcatcacgcccttcggcatgtactgctatgtcaccatgccgttcggcttgaggaatacgggtgcgacgtaccaaaggtgcatgaaccatgtgttcggcgaacacattgggcggacggtcgaggcctacgtcgatgacatcgtagtcaagacaaggaaagcctctgacctcctttccgaccttgaagtgacattccgatgtctcaaggcgaaaggcgtgaaactcaatcccgaaaagtgtgtcttcggggtaccccgaggcatgctcttggggttcatcgtctccgagcggggcatcgaagccaacccgaagaagatcgcatccatcaccagcatggggcccatcaaggacttaaaaggcgtacaaagggtcatgggatgccttgcggctctgagtcgcttcatctcgcgcctcggcgaaagaggcctgcctctgtaccgcctcttaaggaaggccgagtgcttcacttggaccccggaggccgaggaagccctcgggaacctgaaggcgctcctcacaaatgcgcccatcttggtgccccccgctgccggagaagccctcttgatctacatcgccgcgaccactcaggtggttagcgccgcgattgtggttgagagacgagaagaggggcacacattgcccgtccagaggccagtctacttcatcagcgaggtactgtttgagaccaaaatcctctacccacaagttcagaagctgctgtacgcggtgatcctgacgcggcggaagttgcgacactacttcgagtctcatccggtaactgtggtgtcatccttccccctgggggagatcatccagtgccgagaggcctcgggtagaatcgcgaagtgggcggtggaaatcatgggcgaaacaatctcgttcgcccctcggaaggccatcaagtcccaggtcttggcagacttcgtggctgaatgggtcgacacccagctcccaacagttcctatccagccggaactctggaccatgttcttcgatgggtcgctgatgaagacaggagcaggcgcgggcctgctcttcatctcgcccctcggaaagcacctacactacgtgctacgcctccatttcccagcgtccaacaatgtggctgagtacgaggctctggtcaacgggttgtggatcgccatcgagctaggcgtccgacgcctcgacgctcgcggtgactcgcagctcgtcatcgaccaagtcatgaagaactcccactgccgcgacccgaagatggaggcctactgcgatgaggttcgacacctggaagacaagttctacgggctcgagctcaaccacatcgcccggcgctacaacgagactgcggacgagctggctaaaatagcctcggggcgaacaacggttcccccggacgtcttctcccgagacctgcatcaaccctctgtcaagatcgacaacacgcccgagcctgtggcaccctcggcccagcccgagaaggcacccgggggctacacgcacctgttggtcgccatcgacaaattctccaagtggatcgaggtccgacccctaaacagcatcaggtctgaacaggcggtggcgttcttcaccaacatcatccatcgttttggggtcccaaactccatcatcaccgacaacggcacccagttcaccggcagaaagttcctggacttctgcgaggatcaccatatccgggtggactgggccgcagtggctcaccccatgacgaatgggcaagtagagcgtgcaaacgacattattctacaagggctcaagcctcggatctacaacgacctcaacaagttcggcaagcgatggatgaaggaactcccctcggtggtctggagtctgaggacaacgccgagctga

SEQ ID NO: 30733 - DNA, 255 bp, Zea mays
  Peptide Sequence Number=SeqID_72512
atgccagagatcccggtggcttctgttgaagcatggcgatcccggggcggtgaagaccacccaggcgagctacaggctgacttcgcgcgggcgattgccgggcagcgcggattcgttgtgaggttcacggcgtgggttgcacatcaaaatggcattccgatctctacggcctccaccgcgttcatggtggaaggaggcttctgcgcgacagggcccaaacggcagagaccggtccaaatgttttcaaatatgtaa

SEQ ID NO: 30734 - DNA, 489 bp, Zea mays
  Peptide Sequence Number=SeqID_72513
atgtctgaaccatgcgtcctcgtgtgtcaccgtgatcggctggccactgctagtgctagcctcacaccgcgacccaccaaggatcctctccgtcacaggctcacagcctcacaggcacagccacaccactctcttgccgagggaagtggagcccaccacctgctcgtgcaaatgcgcaagacgacggccaaaatacggcagcgcccctcatcgtgcgccagattactagggaaccacaggatcttttccgttcttttactacctgtgaatgacccttctatgaccacttgtattccttatgaccttaccagaagaaagaaatggagatcttcactcattaaagtggatggcacagaactggcacgcggttacgcgccgacggctatggcctaccgcctatggctcacttcgattgtaaaggtgaagctgctgataaggaaagatggtatgctgatatttttacctgcccttataattgtcttcctatga

SEQ ID NO: 30735 - DNA, 642 bp, Zea mays
  Peptide Sequence Number=SeqID_72514
acagcagtacagtactcgctcaaggctgaagcagtgaagcccaacaaccgcattcaaatttgcgcacgctcgcctcggacgtcgtctggccgttctctcccgccaccaccaccaccgtaccatctaccatacgtgccccgcacccgcaaccgaaaagcgggaccccgtggaggcgtccacgttcgtcgggggccccccagcgcgcggtcgccaaccgccacgttgccccgcggcgcggcgtcccccagccccatcaccagcacagcagcgcgggcaccgccgtggtccgtaggagggacggccgacggcggcccccacaccgcgcggtcccgccgtttgccgggcgcttccgtgtcccgcctccgcgaccgcgagcggccgagcgcacatggggcgtggcgtggcgtggcgtctggggcgcacccaccgacgcagacgcagacgcagccgggagccggcctcggggcacgttctcgaacggacaagcgccctgcgactcttgtgacggaacgggacagcgacgacgacatgcgagtggaggggtcgaggaacgaacgcgcgacagaggtcacgaatcacgaagatcatcgatttgtccaggatctaggaggattatccgtgatgcaatgcaaccatgcatga

SEQ ID NO: 30736 - DNA, 435 bp, Zea mays
  Peptide Sequence Number=SeqID_72515
atgattgcttaccttgaacaatggccaacgctagaaagggagaatagtatctctttactaggggcaactgaggctctgaaagcaagcaccctgcgcctgccagttacattgggagcaaaggctaacacaattgctctcaagaacgctgtaagctcagctgttgatgtcatgcaagttttgggctcatctgtttgctgcattcattcaaagtttgagaaggtgtgcaccttgaggtttgttttgattaacattagaatatcttaccagatcacggacagcacatccttggtttcagaactctctgtcatagcaggacaagagaagatcatgcttgatgaatgccgagaactcttagctacagctgcaaaactgcaggtgcaggagtcgagcctacggacacatcttgtgcaacagagacaaaggcttcaggattga

SEQ ID NO: 30737 - DNA, 360 bp, Zea mays
  Peptide Sequence Number=SeqID_72516
atgcaggcggcatgcaactgcaccacagggatgcaccctttcgacttcaacgcacccagcatggaggcccaggcccacacgtcatgctcacgtcccctcctggggcagcaggagagccctctcccacggcgtaaagacgagggcaggcgacacctttggcaggcgaagcgggcgacgcttcacctccgccatgatgaccgcgtcaaaaaagggaccgggaaaggggatactccgaaagggatccttctccgcgaaggaagcggggcccgagcccccctactgatcagaggttcgaaggctggcccctcggaagggttcgacagccgcctcaggccactcgggctccgcgcccactactga

SEQ ID NO: 30738 - DNA, 2949 bp, Zea mays
  Peptide Sequence Number=SeqID_72517
atgagggcccgcacggccattctcctcctgatgctaatccttgtcgtcctcttcctcgccgcgtcgacgtcggccggcgacgtaccggggcggcagaagcgacaggccctgctgcaggagaaggcgactctgctggccctgaagcaggggctcaggctgccatcggcagcggccttggcggactggaacgagtccaacgcccacgtctgcggcttcaccggcgtcacctgcgactggcggcaagggcacgttgtcgggctctctctcgccaacgtgggcatcgccggcgccatcccaccggtcattggcgagctctcgcacctccggatcctcgacctgtccaacaacaaaatatctggccaggtaccggcgtccgtcgccaacctcacgcggctggagagcctcttcttgaacaacaacgatatctccgacaccatcccttcgatcttcagcagcctgttaccactccggatgctccggaacgtcgacgtctcctacaacctcatctccggtgacatcccgctggccctcggcagcctgattggggagcagctccagagcctcaacgtctccgacaacaacatctccggcgccattcctctgtccatcggcaacctgactcgcctcgagtacctgtacatgcagaacaacaacgtctctggagggatccctctggccatctgcaacctgacaagcctcctggagcttgagatgtccggcaaccagctgacggggcagattccagccgagctctccaacatccgggaccttggcgcgattcacctccgcggtaaccaactccacggcggaataccgccttccctctccgagctgacggccatgttctatctcgggctcgagcaaaacgacctgtccgggaccatcccaccggctatcttgctgaactgcacacagttggccctcctcgacgtcggcgacaacaatctttctggcgaaatcccccgcgccatctcgagcgcccgctgcctgttcgtcgtcatcaatctctactccaacaatctgaacgggacgcttccacggtggctcgccaactgcacccaactgatgacgctggatgtggagaacaacttgctggacgacgagctgcccacaagtatcatctcgggcaatcaggagctcacgtacctgcatttgtcgaacaaccgtttcctgagccacgacaacaacagcaacctggagccgttcttcgtcgcgctgtccaactgcacgctcttacaggaggtggaggccggcgctgtggggatgcgtgggcagctgccatggcggctgggatcgctgctcccgatgaacacggggcacctcaacctggagctgaacgccatcgagggcccaatcccggcgtctataggggacattatcaacatgatgtggttgaacctgtcgagcaatttgctgaacgggacgatcccaacgtccctctgccggctaaagagactggaacggctcgtgctgtccaacaacgccttgacaggcgaaattccggcgtgcattggcgacgccacgggcctcggcgagatagatctgtcgggcaacgtgctgtcaggggccatccccagcagcatcaggagcctttccgagctccagactctcaccctgcagagaaacgagctgtctggcgccataccttcaagcctcggccggtgcaccgctctgctggtcatcgatctctcctgcaacagcttgaccggggtgataccagaggagatcaccggcatcgccatgaagacactgaacctgtcgcgcaatcagcttgggggcaagctgccggccggcctcggcagcatgcagcaagtggaaaagatcgacctgtcctggaacaacttcaacggcgagatcctgcccaggctcggggagtgcattgcgttgacggtgctcgacctgtcacacaactcgcttgccggcgacctccctccggagctcggcggcctgaagaacctcgagagcctcaacgtctcgaacaaccacctgagcggtgagatccccactagcctgaccgactgttacatgctgaaatacctcaacctgtcatacaacgacttcagcggcgtcgtccccaccaccggccctttcgtgaatttcagctgcctctcctacctcggcaaccgtcgcctctctggtccggtgctgaggcgttgcagagagcgccaccgctcgtggtaccagtccaggaagttcttagttgtcttgtgtgtctgctcagcggttctggcgttcgcgctgacgatcctctgcgccgtcagcgtccgtaagatccgcgagcgggtcgcgtcaatgcgggaggacatgttcaggggtcgccgcggcggcggctcgtcgccggtgatgaagtacaagttcccccggattacgtacagggagctggtcgaggccaccgacgagttcagcgaagaccggctcgttgggacgggcagctacgggcgggtgtaccgtggcgcgctgcgcgacggtaccatggtcgccgtgaaggtgctgcagctccagacggggaactcgaccaagagcttcaaccgcgagtgccaggtcctgaagcgcatccggcaccggaacctcatgcgcatcgtcacggcgtgcagcctgccggacttcaaggcgctggtgctgccgttcatggccaacggcagcctcgagcggtgcctctacgcggggccgccagcggagctgagccttgtgcagcgggtcaacatctgcagcgacatcgccgaggggatggcgtacctgcaccaccactcgccggtcaaggtcatccactgcgacctcaagccgagcaacgtcctcatcaacgacgacatgaccgcgctcgtctccgacttcggtatctcccggctcgtcatgagcatcggcggggtggccaacgccgccgacgtcggcgcctccaccgcgaacatgctgtgcggatccatcggatacatccctccaggtacgcactag

SEQ ID NO: 30739 - DNA, 480 bp, Zea mays
  Peptide Sequence Number=SeqID_72518
atgcacaaagagaggacaaattccagcgcacacacagaaaagtttaaatcttctgttttgaaaagtgaaactggagtgattttgccagggagaccgaggaaggaagaaggagctaaggagagaggccgcatcgggaataacaccgccgttctcgtccaccccctcgacgacgctaaggtacaagaagaggatgaagcacacacattcttcccctggtcctactgcatccccgctagccggatctctcactccaccgtcgctgccaaacgacaccacgtgctctccacttccgccgcatctcatcacctcaacacccccgcctacgttgtgtgccggatccgagggcacaagcaagaggatccgatcagtgcgaaggacaaggccagcgtgatgtacgtgaaaggacaaggaggggtgggtgctgattcactccacgacgatctccggctcggtgggaggacaaggttccattttccatag

SEQ ID NO: 30740 - DNA, 117 bp, Zea mays
  Peptide Sequence Number=SeqID_72519
atggggaagacgcacccgaccagcgggtcccacacgcacgtggctatgcgcaaaaaggaagggctggcacggtggggcctggggcagcgaccagtccaaatgtttgcaaatatgtaa

SEQ ID NO: 30741 - DNA, 231 bp, Zea mays
  Peptide Sequence Number=SeqID_72520
atggatagagaaggaaagagcagtgaactcgccttggtggcatactatgatgccgcggagaaggccagagttgaaaggatcactgaagaaattatggctagcctatttgattgcgaacacaagggacgatggtcaatggcgaaggtgaaggttatgcaggttcatgccgatggacctggagcggtgaaggacgagcgctgggacttgaccgagggaccaaagtccgggtga

SEQ ID NO: 30742 - DNA, 393 bp, Zea mays
  Peptide Sequence Number=SeqID_72521
atggcactctggcacgacggcatgggggcaagcagcccgacagcgacgctgcaccatgcggtttggaggtccgcgtgggtaagggtgcgccgtagcgcgcagagtggtggatggttcctacttctcgacgcacgccatgggtcttcaatcgagctagcaggggggcgagtgtgctgcttgtcgtcatcatcagtcgagagaaggcagttggcctcctcggcattgaggaagggagaggggaggggtagacgcagggagggtctcacctcaatggacgtgggcgtcaacggcgagacggacgtagacgatatagggcgggcacacggacggggatgggagtcggcagaagccccggtgtggcaagataaaggcgtgcgggtcgtgggcatgtga

SEQ ID NO: 30743 - DNA, 914 bp, Zea mays
  Peptide Sequence Number=SeqID_72522
atgggcgagcaatccctctcccagcccaagccccagcctctctccccgttcccgtcgcctcccgcctccgccgcgttgccgccccccgcctctgcctctgcctctgcctctgcctctgctgcctccacctcccgcaccaccagcgccgcggcctcgcgccccaagaagaaggtgacgaacccatcgcccgaccgtaacccggcaaagaagccccgcctgacgttctcgatcccgggccggcccctgtccgcagtcggcgaggtgggcgtggccatccgctacctgcgcgccgcggaccccgccctcgccgccgtcatcgacgcgcacgagccccccgtgttccagtgcccgcaccgcccgttccactccctcgtccgatccatcctgtaccagcagctcgccttcaaggccgccgcctccgtctactcccgcttcctcgcgcttctcggcggcgagtcctgcgtggcccccgatgccgtcctcgcgctcaccccgcaccagctccgccagatcggggtctccccgcgcaaggcttcctacctccacgacctcgcccgcaagtatgcctccgggatcctctccgacgccgccatcgtcaacatggacgaccgctccctcgccgccatgctcaccatggtcaagggcatcggctcctggagcgtccacatgttcatgatcttctctctcgcgcgccccgacgtgctcccctccgccgacctcggcgtgcgcaaggggcgtgcagatgctctacgccctcgaggacgtgcctcgtccgtcgcagatggacaagctgtgcgagcggtggcgcccctatcgctcagtgggggcttgagtatgctacagcagcaagaacaacagcaacagcagactgtcatccaaatgatcgacccccttcagatgctcccagggatggg

SEQ ID NO: 30744 - DNA, 762 bp, Zea mays
  Peptide Sequence Number=SeqID_72523
atgccgtccaccaccttctcgctcttctccccgctgccctgcagcaccaaggctcatcaatacgcgccggcggactggttcgacgacgacgacagcaacagcgccgtcatcgccacccctccatccccgtcctcctcctccacgggctccgtcgactgcacgctctcgctcggcacgccctcgtcgcgcctcgccgcgcccaagcagcgcccgttgccggcgtcgtcttgcggaaccatgccgtgggacgtcgccgccgccgctgaccagtcctgctgctgctgccgccgccgccagggcagcagcagcagcagcaggccctctgtcgttgtgaacaagagcgccgtcatgccgtgcgccgggcaggaccccttgctcgtggaccgccgctgcgcgaactgcggcacctcgtccacgccgctgtggaggaacggaccttgcgggcccaagtccctgtgcaacgcctgcggcatcaggttcaagaagaaggaacggcgcgcggcggcgacggcagccatggaccagggcggttgcgcctacgtcgcggagcgggcgcagtacggggcggcggccgggagggcgtactacggcagctgcgaggggccggcgttcccgtgcgacggtggtgacgtcgcggacgccgaggcagcgccgcagaatttcctcgcgtggcggctcgacgtcgtcgctccggcgcaggcgcaggcggccgcgttcgctgcggtctggccggagcagacgaccttgttccagtacaactaa

SEQ ID NO: 30745 - DNA, 219 bp, Zea mays
  Peptide Sequence Number=SeqID_72524
atggcgatggcgctggtgctgctgctgggtggtggtgttgcagtggcggagcatggtccgcagtgctgggttttaaagcgaggcggcggcgccgaggaggagagaagatccggaactgaacttcggtgcgaggatgtggacggcagcggtgcagaggcagcaacaatccgtagggagaatcaatggagcaggggcggcagcagcatacaggcaggctag

SEQ ID NO: 30746 - DNA, 342 bp, Zea mays
  Peptide Sequence Number=SeqID_72525
atggcgatggctatggggatgaaccctgtcacggtggacgctgtggaactctcgcggctgcatcggaagctaccactgcgtccgaccgtggatgaggtggaggcatcgacggtgatcctgacctcggcgaatgcgaaggaggcgtgcctcgctaaaatcaccagggaagagaaggcggctcgagcgttggcacagggcgtgctggtcgagctcttcgacgtgttaattatgagaagcagaactgatgcagaactgaacctttgtgtgattcacatagatgtggcagaatcgaaaatgcctgctccttcaagcttagcggtaagatcgtacgtctggaaatag

SEQ ID NO: 30747 - DNA, 387 bp, Zea mays
  Peptide Sequence Number=SeqID_72526
atggcggaactatcgacatcttcggatggattggtggacgaagaagcgaggcagcaggaaccaggacaaggaagcgctgaaggtagccatggtctgcaagacacaaaggagcaggacataaaaaagggaaaggcggctcttgtttccactgaactgctgagggaggatctggttcagagtgctgttagttttctgaaacacccgaaagtagtagcctcttcagatggacagaggcgatctttccttgtaaataaaggactcaccatggatgaaatagatgaagcatttcgacgtctacaagggtgtttgatcattcatgcaggattactgaggtcagcacaaactacaaataatagtatttggccaggcatgactgcaagaaattaa

SEQ ID NO: 30748 - DNA, 581 bp, Zea mays
  Peptide Sequence Number=SeqID_72527
atggcggaggtgaagcgtcgcccgcttcgcctgccaaaggtgtcgcccgccctgccgcaaagtgccaaaggttcacaaatagccaatgaaaaagaccaagaaaagggttcaacaaagagagcaggggataaccgaaggcacccttctggcgcaccggactgtctggtgtgccaccggacagtgtccggtgcaccaccggacaatgtccagtgcaccaggggactccaagctaaactcatcaccttcggcaaaactcagaggcgctccactataattcaccggacagtgtccggtgctccaaggagaagcgactctgaactcgccagcttcgggaatccgctccgctataattcaccagacatgtccggtgtacaccggactgtccggtgtgacagcggagcaacggctatgtctgcgccaacggtcacctactacagcattaaatgcgcgccagcgtgcgcagaggagcagagcacgctcgggtggcacaccggacagtctacagtacttgtccggtgcaccaccggacagccaggcgaccccaccagtcagagctccaacggtcgaaccctaacggccag

SEQ ID NO: 30749 - DNA, 1419 bp, Zea mays
  Peptide Sequence Number=SeqID_72528
atgcctgctgtgcttaacgagaacgaggatggcgccgccgctgccgatctcgagaggcagcagtgctggtgctcctgctcctgctcctgcctgccgttatgcctctggccgggcgcgtccgggtcccggggtcccaggaaacccggcggcacgggagcgaagaggaggcggtggcgtcgcaggctcaagctgtcatggctggtgtggccgtggtctccgaagagcggcaagggggatgcgggcggcggcggcgatgacagcagcaaggaggggatgaagaagcggaggaggaaggacgggcggcgcaggctcaagctgtcatggctggcgtggccgtggtcacggagaagcgacaagggggacgcgggcggcgacggggacgacagcagcaaggaggggaagaagcggaggaggaagggagggcgacgccggctgctgctgctgctgacgacgacgacgtcgctgcagctcaagaaggcgctcgcgtcggtcgtctccggggagagcgccctactgcctgcgccggccaaggccgcactcccgctcggccgcgcctggcctgccggcgcgcagcggcagcgtgctgcaggctctgcagcagcttgggcgctcagttgcgggctgctccgctgctgcctgctcgcttgctggctgctccagcctggccgcctccctgctcgcctgctgcctgctcgcttgctggctgcttccgcctggccgcctccctgctcgcctactgcctgctggctgctcctgtgcttggctgcttggtgctcgctcgtgctgcagcctccagctcaagtgagcagtttcggcgacgccaagaagcaaagcaaccgcaggccacgacggccaacggcagaggacgcggcacgcggaagccgacaaccgcaaccctcggcaactgctgcgaccgcgagcaccggatcgaccacggcggtgcctgctggttctcggccggagacgacgagccagccgagccctaaaccaaccgaagggtccgctgcctccggccgcacctggcgggcgccgtcgaggcgccagcgccactcgcttcatcagcccgactgctcctgctccagcagcggcctgtggacggcggcgacgacgctgggcgtgatcgtgctcctcggccgcgtcatcgccgtggtcttcctatgctcgtgcctgtacggcgcgcgcttcgtccgggcctgggctgccggcgacgccggtgccagcgccaaggcccagctgagcggcgaaggcggcgtcgttggcgttggtagcagtagccggtgcttcagtgatccggtggcggtggccggcgacgaggtcgcggcggagatgtgcaccacggaggagcgcaagaagaaggtggtcatggcagggttgctcgacagggccggcaaggcaccctcgtcgcgctttcgtaggtga

SEQ ID NO: 30750 - DNA, 1623 bp, Zea mays
  Peptide Sequence Number=SeqID_72529
atggacaccgccgtctcgcaaaacgccacggttgccgcggcggccggtgccggaagcggcggcgggctggcgggcctgctcccggaggtgcagacgctggaggtgctggtggccgtgtccatcttcgtggccatccactcgctacggcagcggcgcacgcagggcttgccgacgtggccagtggtgggcatgctcccgtcgctgctcctcggcatccgcggcgacatgtacgagtggatcacgggcgtgctgaaggcgcgcggcggcacgttcacgttccgggggccgtggttcaccaacctccagtgcgtggtgacggccgacccgcgcaacctggagcacctcctcaagacccggttcggcagcttccccaagggcccctacttccgcgacacggtgcgggacctcctgggcgacggcatcttcggcgccgacgacgaggcgtggaggcggcagcgcagggcggccagcctcgagttccactcggccgagttccgcgcgctcacggccagctcgctcgtggagctggtgcacggccgcctgctgcccgtgctggccggcgcggaggccgccggcgccgccgtcgacctccaggacgtgctcctccgcctcaccttcgacaacgtgtgcatgatcgcgttcggcgtggacccgggctgcctccgcccgggcctccccgagatcccgttcgcccgcgcgttcgaggacgccaccgaggccaccaccctccgcttcgtcacgcccaccgcggcgtggcgcgccatgcgcgcgctcggcgtcgggcacgagcgcgtgctccggcgctccctggccgccgtcgacgagttcgcgtacgacgtgatccgcaggcgcagggaggagctcggcggcgacgacgccggggccgggcgcaggtcgtcggacctgctgaccgtgttcaccaggatgcgcgacgaggacgggcggccgtacacggacaagttcctccgcgacatatgcgtcaacttcatcctggccgggcgcgacacctcgtccgtggcgctcgcgtggttcttctggctgctccgcaggaaccccggcgcggaggccaggatcctggaggagatcgaggggatcctcgcggcgcggaaggaggccggggaggtggtcgtggaggaggaggtcgtgttcaggcccgaggaggtgaagcggatggagtacctccacgccgcgctctccgaggcgctccgcctctacccgtccgtccccgtcgaccacaaggaggtcgtggaggacgaggtgtttccggacgggacggtgctgaagaagggcaccaaggtggtctacgccatgtactccatggggcggatggagagcatctggggcgacgactgccgggagtacaggccggagcggtggctccgggacggccgcttcatgagcgagtccgcctacaagttcaccgccttcaacggcggcccgcgcctgtgcctcggcaaggacttcgcctactaccagatgaagttcgccgccgcctccatcctccgccgctaccgcgtcgacgtcgtcgagggccaccccgtcgcgcccaagatggcgctcaccatgtacatgaagtacggcctcaaggtcacgctgaccaagagagacaagaccaagctctga

SEQ ID NO: 30751 - DNA, 771 bp, Zea mays
  Peptide Sequence Number=SeqID_72530
atggcggcggcggtgcggcgagcggaggagctggtggagagggagatgggcgggcgcgatgcctcccacgacgccgcgcacgcgctccgcgtccgagaccttgcgctctcgctcgcagccgaagagggcctctccgctcccgaccgcctcctcaccgtggaactggccgctctcctgcacgacgttggtaacttcctacgcctccatattatcctttatcgatttcatttgctttacctctccaatccatttgagtatcactattttttgtgcaggagattacaagtataccaatggatgttgggtaggaacaatgtggaggatataagcgtcgttgagatgtttcttcaagaggtaggattggatgaaggccaaaaggatgaaatagtggcaattattaaggggatggggttcaaaaatgaagtttcaaataaatctattgttgagcccactcttgaatttgcaattgtacaagatgcagatcgcttggatgcaattggggcaattggtattgcaagatgttttacatatggtggtagcaagaacagcgcattacatgatcctagaattctgccacgtgatagcttgtcgaaggaaaagtacatgtccaaggaagagaagcagacatcaatcaatcattttcatgagaagctttttaaactgaaggacatgatgaagacagaggccgggaaaaggagagctgagaaaaggcataggttcatggaggaatttgtggctgaattctacgaagagtggagtggcagggcttga

SEQ ID NO: 30752 - DNA, 1074 bp, Zea mays
  Peptide Sequence Number=SeqID_72531
atgctactggggttcatcgtctccaagcggggcatcgaggccaacccggagaaaatcgcggccatcaccaacatggggcccatcaaggacttgaaaggagtacagcgggtcatgggatgccttgcggctctgagccgcttcatctcgcgcctcggcgaaagaggcctgcccctgtatcgcctcttaaggaagaccgagcgcttcacttggacccccgaggccgagcaagccctcgggaacttgaaggcgctccttacaagtgcgcccatcctggtggtcagcgctgcgatcgtggtcgagagacgagaagaagggcatgcattgcccgtccagaggccggtctacttcatcagtgaggtactgtctgagaccaaaatctgctacccgcaaattcagaagctactgtacgcggtaattctgacacggcgaaagttgcgacactacttcgagtctcatccggtgactgtggtgtcatccttccccctgggggagatcatccagtgccgagaggcctcgggtaggatagcaaagtgggcggtggagatcatgggcgagacaatctcgttcgcccctcggaaggccatcaagtcccaagtcttggcggactttgtggctgaatgggtcgacacccagcttccaacagctccgatccaactggaactctggaccatgtttttcgacgggtcactgatgaaaacaggagcgggcgcgggcctgctcttcatctcacccctcgggaagcacctccgctacgtgctgcgcttccatttcccggcgtccaacaacgtggcagagtatgaggctctggttaacgggttgcgcatcgccatcgagctaggggtccgacgcctcgacgctcgtgtcgactcgcagcttgtcatcgaccaagtcatgaagaactcccactgccgcgacccgaaaatggaagcctactgcgacgaggtttggcgcctggaggacaagttctacgggctcgagctcaaccatgtcgctcgacgatacaacgagactgcagacgagctggctaagatagcctcggggcggacaacggttccttcggacgtcttctcctga

SEQ ID NO: 30753 - DNA, 486 bp, Zea mays
  Peptide Sequence Number=SeqID_72532
atggacagcagaggcggcggccgcaacaaacaacggaacctagatcgcacggagtcgccgccgccgcggcggcggtcacagagcggtaacaactcaccgtccgaagcgtcgcagtcgcagatccaagccgccggtggcagcaacagcaccggcagccgctcccgcggagccgagcgaccccggagtgttccggtccagacgacgcaaacgcccaccgagccgagcaaaacggggtccggcggcgtgggcgcgttcgaattcggccctgtggtggggctgtccgtggtggtcgcggtgtccatggcgggactgctgggcgggtggctctgggccgtggcctgcgtgtgcgcctggctggccgccctgtctaggcttcggcggaggagggaggcggcggcggtcgacgaggactcggcagatcacgagaaacccgccgtgctccggggaatgctcgagcggggtcggaggaaggccgcggcgacataa

SEQ ID NO: 30754 - DNA, 144 bp, Zea mays
  Peptide Sequence Number=SeqID_72533
atggcaaaattcattcaagttggagctagaggacctttcgaaggcttcacaatccaagacgggtccatgacaatcgaggttttgaagacacccctctccttgcacatcatcatcacgctggcattagggcgcgagaaagtctga

SEQ ID NO: 30755 - DNA, 192 bp, Zea mays
  Peptide Sequence Number=SeqID_72534
atggcctttgccagctcgctgcttcccgtgccgccctaccgcgtctgcgcgacccccgcgtcggaggtcgccgccttctcgccggccaagaagagcgtctcgctcgccgctgcgcgccagcgccgaggatcccgtcacggagttcaaatgagcaccgatttcattgccagttgtaggatcatgctcctgtag

SEQ ID NO: 30756 - DNA, 615 bp, Zea mays
  Peptide Sequence Number=SeqID_72535
atgggagccacctcgttttcattcacaacggcagcagccattctccacctcgccctcctccttgcagcagctcgacggcacggcgcgacggactacaccgtcggcgactccgccgggtgggccatcggccccaactacctcatctggtcgcagaagtacaacttcaccgccggcgacaccctcgggtgtgcttctacgatagacatttcctttctcctccagctgaccgacgggcctcagtcaccggaggctttttcctatgcgcgcttgctgaccgatgggctccagagaccggggaacttatccccgacaatagcccccaagcctctttggggagagtatctcccatcgggagctgatgaagggaggcttgttcgggttcatggtgggggctacgatttgcgtctccttgatatcctagcccgtgtgtgcgagaccgtggaactcggaactcaccggggcatggcaatgactcttgctattgtgctgctacacttcggtggtaatttccatgatgccatcaatccgcttgagggttcgtcaatggcagatctggacctattgttaggagatttcgatgccgctgcgaacgtcgtgctcggggtggtgttgtga

SEQ ID NO: 30757 - DNA, 348 bp, Zea mays
  Peptide Sequence Number=SeqID_72536
atgggtcgagtgacgccagcttcgtcggctcccccacctgtgggtcgcgaggcaccagcttcactaactcctcctatggattgggaggcaccagcttcgccgactccccctcctacggaccaggaggtacaggctccaccatttgccaggggagaaccatcggtgttcaatcccatcccctttcaagcaagcttcgacataaacacctgcaccagcatgtatgctgatctccacttcccctcgaggtacctagactccgaggaggaagacggtctcggtcctggcttggacttctctgggtccgtgatcctgaggccactctgcgagctacacgccaagtttggatag

SEQ ID NO: 30758 - DNA, 540 bp, Zea mays
  Peptide Sequence Number=SeqID_72537
atgtcgatgggtggagcactggtggctgtgtcagtatggctcaataagctttatgacagactagtagaagatgaagatcttccacagttagcatctgttgttgtattgagaggagaaatggagaaaagcacagttacaagaggactgccaatcgccaaagtcgtctactcctttctaaacgatacactatcagcgtccttccattttccaaaatggaacaagggacgaatcatatgcttgaagtcccaactaaaaaggctgcagtcggccgtagactcctcaaatgggtctcttgcagctggttttgtcgacatgacaaactcccgtctgccggctcccggttccaagatatacacaagcgaggaccaattggataatggttcacgccatttgcctgacgaaccgttggcggaggaaaaggagtcggagcttctcgcactgattttagctcgttgtagggagaacgagcttatggatgttgttgactgtgtatggcatccttgtgcgtccagctcaagtgctcaactctgtaaaacatga

SEQ ID NO: 30759 - DNA, 402 bp, Zea mays
  Peptide Sequence Number=SeqID_72538
atgtccgtgggttgtgcgtcgcttgcgggcgggcgggagatcggtcccggtctgggtctcggggacctgttcacggaggcagagctggcggtggcggaccacctcgtgcagctcagcggcagcggcgaaggggacgagacggcgtcggggccggagtcgccgcggtccgtgaacacgtgcgcgggcgtcgcggcgtgggaggaaagagcggaggtggccggtctcggcctgggaacgatggagctggacaggagggcgaggaagaggtgccgcctcctgtcggacgtctacgccgccacgaggccggtgatcggcgccgacgcgggcaacgccaggaagaggaagcggggacgtcgatcagctacgcggagatcagtgctactaggctctctagccttctag

SEQ ID NO: 30760 - DNA, 642 bp, Zea mays
  Peptide Sequence Number=SeqID_72539
atgtcgtcccctccatcctccccctcgccccctgacgcgccaccgtcgcggcaggctcggcctcctctagaagctcccctccacccgtacgtgcgccgtcctgctcgacaccgatggacacgtgtcagatgcctaggcagttacgaactgaataacagaaatccagatattggaatcattcttgtgtcttgcttacctggagagttcttcctcggttgtcaccgtggtggcctcgtccgtagcaaggagagctcacgtcggagtagatctgctaccctcggccacgggtcatcacaactggtatcaaagcctttggagtcggcgttgggaagaggaggcgccacggctccaccagcgaaaccgtcggtacaaactcgtttcctgcttgaggcgatggatgagagagatcggttggtgcaggaaaattgggatcgcatgttcgagtcaatggaggcgatgactggaagactgaaggaagttgagcgggtgcaacaacaattattgatgcagtctgagttggcggctgtggttgctgaacaagctgcaactgagaggaatgatttgcaccgcaaattggaagagactggtcatactgtcccaattaaggctggaacagatgggaagagaaacgaatcaagctga

SEQ ID NO: 30761 - DNA, 750 bp, Zea mays
  Peptide Sequence Number=SeqID_72540
ggccccgcgctgctcgacaagtgcctcgaggtgttccacgacctccccgccgagtcgcgcactgcgctctcctatacctccctcatcgccgcctacgcgcgcaacgcgctgcacgaggaggcccgcgcgctgctcgaccagatgaaggccacgggggtcgcgcccaccgccgccacctacaacaccgtgctcgccgcctgcgcccgcgccaccgacccacccgtccccttcgacatgctcctcggcctgttcgctgagatgcggcacgacgcgtccccctccgtgcgccccgaccttaccacctacaacaccctccttgccgccgccgccgaagcctatgttgctttcaacatgatgactgaaatcggtagcttgccaactcttgagacctacaatgctcttgcatttgcatatgctaggggtgggctcttccaggaggctgaggccatcttttctcggatgagtaacaatgctggcattcagaaaagcaaagactcatttgacgccctcatcgaagcatattgccagggctcccgattggatgatgcagtgaaggcgtacatggagatgcgtaaatccaggtttaatccagatgagcggtcccttgagggagtacttaatgcctactgcatagcaggggtcatagatgagagtaaagaacagtttgaagaacttcaatctagtgtgactatgcccagcgttattgcctattgcatgatgctgtcactatatgccaggaatgacaggtaa

SEQ ID NO: 30762 - DNA, 909 bp, Zea mays
  Peptide Sequence Number=SeqID_72541
attgtaaggttcaaagataaagagtctcatcagatctttcttgaacctgagggtagaaatgttcctgaactatatctacagccgtttcagaacaccggctattgcttcgatcagataaatgctgatagtcgtttgacccctttgggacgagagattggtttaatagatgatagacgttgggagctttatcagtcaaagcaagcccgcattaagcaagagaaagaacggttgagatctacaaaagttccaggaggtgaatttgctgctgaagttactgcagtatccaaccaacctgtaaaggattcatctacacttgaagccatattaaagaagccacacatcgtaaaccaagaacacaggaaacttcctgaagatttggattaccactcaatgacaaatctatcacttgaagctcgtgagaaactttccaaggtgcgtccacaaacaataggtcaagctagcagaatcggcggtgtgagcccagcagacatgacagttctcctcatttggatggagagcaaccgacgcatggctacccacaggagacagcgagagcagctgggatcagttgcagtcgagtcggatgggagcctgcgcgtctgtggtacaacgatgcagggaggcgccaagttgaacccatattatctcgtatttgagaaatcaaggatcaacctgtcggggaccataattaggggtaccctcaagactcctaattctcagctgggctcggactcgggctcagccccggaagacgacgaactccgctccgcccgacccagggctcggactcgggctaagccccggaagacggcgaactccgctccgcccgacccagggctcggactcgggctaagccccggaagacggcgaactccgctccgcccgacccagggctcggactcgggctaa

SEQ ID NO: 30763 - DNA, 1128 bp, Zea mays
  Peptide Sequence Number=SeqID_72542
atgattgcaggattctgtcgtgaggaagcagccgacgtcgctagagaagctttgggcctgtattcagagctgcagagccgagggatgcagccttctgagttctcattctcaagtatcctgcgtgcatgtaacctggccggtgaatttggattcgggaaacagatacatggccaagtgctcaagcacagcttccaaggcgatgtctatatcgggagcgcactcattgacttgtactctggctctggttgcatggaggacggatacaggtgtttcagatccctgcctaagcaggacgtcgtcatctggacgtcagtgatttcagggtgcgttcagaacgagctttttgaggaggcactgaggctgttccaagaatcagtacgctgtggactgagacctgatgttttcgcgatgtcgagcgtgatgaacgcatgtgccagtttagctgttgcaaggaccggtgagcagatccagtgccttgctgtaaagtctggctttaaccgcttcaccgccatggggaattccttcatacacatgtgtgctaggtcaggggatgttgatgctgccacccggaggtttcaggagatggaatcgcgtgatgttgtctcttggtccgcggtgatatcaagccacgcgcaccatggctgtgcaagggatgctttatgcgttttcaatgaaatgctggatgcgaaggtggcaccgcctaacgagatcacttttctcagcatccttactgcatgtagtcatggaggattggttgatgagggactcaggtattatggaattatgaatgatgaatatggattgagcccaaccataaagcattgcacctgtgttgttgatcttcttggacgagccgggaggttagccgatgctgaggctttcataagggattcagcattccatgacgatgctgtggtctggcggtctttgctggcctcgtgtcgtatccacggagacatggagagaggccaacttgtggcggacaagataatggatctggagcccacttcctcagcatcctacgtaattctctacaacatgtatctggatgctggcgagctgtcctcggcttcaaaagactcgagatctgatgaaagagcgaggcgtgaagaaagagcctggtcttag

SEQ ID NO: 30764 - DNA, 417 bp, Zea mays
  Peptide Sequence Number=SeqID_72543
atgggttcaatcaaagagtattaccatcacacagaggaggaaaccaaagactacgaaccacgtagcaaggtcttccacccaagaatcaccaagcattgtgatctcaggggcaagggagtggaaaaggagtttcttgcgattacacaaagggggttttatagggagtgttttgctttgagcgggataggaactggggagctggtgggggggggggttattagtgagctgcatgtgatggtggtgctcggagtgaagaatggtggtggatggagcatgtgccacgcagaagtaggtgtgatggagggaaaggggaatggtgttgctgatggtgatggtggcggtgggtgtgctgcaaagggggagtgggcagtggtagtgcgcatggaggcagggcacgcgtgcggggggcatggatga

SEQ ID NO: 30765 - DNA, 300 bp, Zea mays
  Peptide Sequence Number=SeqID_72544
atgaagttcttcgggttcacggttttgatcaccatgttgtcaacgaataaactggacgagcgcgccttcctatttggcagtgaggctagaaccgatgatcgtcgtattgctctcgtcggagaaaccaaggacctaccaatcgatgagcttctactgccttttgctctcctgggacccatggcccccaaagatgaagttgacctccctatcaatgcgtgggaagggcgtaggcttcgcgtggccgatgaggtcttgtgcccgttcatcggcggtgacatagatgttcgcctctcgaaatag

SEQ ID NO: 30766 - DNA, 798 bp, Zea mays
  Peptide Sequence Number=SeqID_72545
atggcgacgccgccgaaccctcctcctccgagcactcccatagctgcggcggcgcccttattgccagcagagttcaccagattcaccttccgggccttgtacgtccgccggaccggcccaagcagcagggagatgattcagccggggagaccttacgatgagctgggcagaagactcaccagtgactacccggtgtacgatggccgtggctccgacgccgcccttgtcgctcgcatgcaggggatcaccgtcctcgtcggtaacgcgcaccagctgttcaccatcgtgttcgagaccgggaggttcaagggctccacgctcctcaccaacgggatggacgacgacgatggctccgccgtcaccaagattggactatggggtgggccgggaggatcggcacaggacatcacgacgacagaggcaccaaggcgtctgaacagcgtcaccattcgcgccggtattgccgtcgactcgattgagttcacttacactggcaaggacaggcagaggcgcacagctgggcgatggggtggacttggcggcaatgttcgaacgatcgatcttggcgacaacgaacacatcagggaggtgtcaggaacgtacggcacatttgaaggtgctactaccctaacctcgctcaggttcatcaccagcaccagagcctggggcccatggggcaccgagaacgggacacgcttctgcatcaccgcgcccatcggcagcagcgtcgtgggattctacggacgcgcgggaaccaggctcgtcgacgctatcggtgtctacctgcgtcaactttga

SEQ ID NO: 30767 - DNA, 153 bp, Zea mays
  Peptide Sequence Number=SeqID_72546
atggagtcgggtggcgtcgcatcgggaatgggtcaacaacggaaacggggcagcgagcagactggtttaggtggtgtcggaaatgttgggcgccttcggcttccgaagggatcttcgaacaagagcccacggtatgaagaagcacggaaataa

SEQ ID NO: 30768 - DNA, 340 bp, Zea mays
  Peptide Sequence Number=SeqID_72547
atggcacctcctgttgacgtggctggtctgcgccctaggttgggcgacgtggaagctcctccgaagccgaggtcgagtccgagcccctgggtcgggcgaggcggaggccgccggctggggccagggcagagtccgagccctggggtcgggcggagcggagttcgccgtcttctggggctgagcccaagtccgagccctgggtcgggcaaagcggagttcgccgtcttctggggccgagcccaactttgtgctgatgggggttaccagctgaaaattaggagccttgaaggtacccctaaatatggtcctcgacgtagcccccggagcctcgaaggagatg

SEQ ID NO: 30769 - DNA, 477 bp, Zea mays
  Peptide Sequence Number=SeqID_72548
atggcggtggcaggcaggcaggagcagcggccccgtcgtcagccaagctcacgtcccatccgggggcagcgagagaaccctctctcacggcgtgaagacaacgcgcccatgctccgttcctcgaacggctcgcgcacgcgcaacggccgccccgccaaccactcgccccgtcgcatcaactccgcgggaccgggaaagggggataccctgaaaaggatccttccccgtgaaggaaccaggctccgagcctccctactgatcagaggttcgaaggctggcccctcggaagggttcgacagccgcctcagatcacgtgggccctacacccactactggtcagaggttcgaaggccggcccctcggaagggttcaacgaccgcctcaggctactcgagctccgtgcccactactgatcaggggttcgaaggctggccctcgaagggttcacagccgcctcagacactgagcgagggatga

SEQ ID NO: 30770 - DNA, 342 bp, Zea mays
  Peptide Sequence Number=SeqID_72549
atggaaagtgtaggccctgcagggagtgacaaagcggactacggtagcgtgggagcgtcaatagctgtgcacgcaatacagtcagagaatatcagatgcttccaagcccgtgcaaagcgagcagcgagctgcatcacaaccggtgcaaacttggcatcaaatggacgggggtactggattggtctatgcagcaaagcatcccacctccaacctcctgatgaaagtggagaatggaagttgaatgacaaaaggaggcctcgcaataacccaccgccatcctccatttttggaggaaccattattgttattgagaggccgttgtcttttgcagagagctactaa

SEQ ID NO: 30771 - DNA, 900 bp, Zea mays
  Peptide Sequence Number=SeqID_72550
atggcatgcttgattcggctgctaccgggcggcggggctattgggcaaaaagagaaaaagaaagagaggaaaggattagttgagctgctccactgtcgcaacaactctcggaacgtgctgcgcgtgacgatcgaggtgccggacgccggcgaggtgaacttccactgcacgcacctggaccacctggacgaggggtggaggatgaagcaggtggacgccatcatgcgctccggcggcgacggcccgcacatcctcgccggcggcctcaacgcgctcgacggcaccgactactccgccgaccgatgggccgacatcgtcaagtactacgaggagatcggcaagccgacgcccaaggtggaggtgatgcagtacctcaaggcgaagcagtacgtcgacgccaaggacttcgcgggagaatgcgaggcggtggtggtcgtggccaaagggcaagacgtgcaggggacgtgcaagtacggcacgagggtggactacatcatggcgtcgcccaactgcccctacaagttcgtgcccggatcctacacggtcgtctcctccaaagggacgtcggaccatcacgtcgtccgggtcgacgtcgccgtacctcacgccagagagcccgatgacgccgaggccaccgcgaacgggcagcgcagcagagtggctcggagtgacttcggctggacgttctctgtggttcaaggcattgcacattgcatcacactcacacctggttgtggttgcccgaaagccaacagcactatgatatacgttgatgccacaaccaaccctgagatcctccaacgacagaacaaggaacatggccctagcgaccgaagggtgtacaccacctacgttgccagataccacgcaggtggcgctggtcactgtagatgcaagtga

SEQ ID NO: 30772 - DNA, 660 bp, Zea mays
  Peptide Sequence Number=SeqID_72551
atgggtggagccaagtggaaggaggaggagatggtgaagacgttgaggccatcggtgtggctcacggaggacttccccctgagcgtcgacaaattcctgccgttgctggacatcctggccagccatgtgtgcgccgtgcgctggctccgcgtgctgctcaccaccaagttcccacaggggactttcccagtaaagttatttccatgcctctcaataattccgacttccctcgtattaccaccatctccaggtaccgtgccgatggaggaaaggagaaacaagattgaggattatgagaagtatttaatacagctaagcaaactaactaaggttatggctcgttctctgccgcttgacaagcatacccttgtgaaaaacctgcgaggtatgttcagggaggtggttgctgtgacaggtgatggtaccaatgacgctccagctttgcatgaagcagatattgggcttgcaatgggcatagcaggaacagagaggaaaaacaatagagaaaatactactgggagattagaactgtactttcattcacatgttaatgttaaggttattcatgggtcaacatcattcgagcatttgactattgcttgtcacgtgcacctgttatttttgcatcactattttgaaccaaattttaagataccgtag

SEQ ID NO: 30773 - DNA, 417 bp, Zea mays
  Peptide Sequence Number=SeqID_72552
atgagtggtggaagggaggctattgaccatggtgaggaggcacccatcgttgtggaggacgttctgtggggaggcaagcgacaacatggtggatggcaggtgaggccactgtggatgggagctcagcacacagggaagtgggggtggcttgaggtaggtgtcgtgatggggagggaggcgagtcgccatgttaaggaggcgaccgtcgacgtggagaacatcaggacacaaaggcgcttggtcgtggtgtcatcggtgggcggggagctgcagaggcttggcctggtaggaggttgcatgacagtgaggcgagggagtggccacgatgaggcggcacatgaacgtgatggggtgacgacgttgatgcgagccaccgacgtggagatggccatcaacattgacaaaatgcgcgtgtga

SEQ ID NO: 30774 - DNA, 210 bp, Zea mays
  Peptide Sequence Number=SeqID_72553
atggaggtgagcccaccatctaattcacgatcgcctctgcatcgttttgcgtcagcgcttgtggtgaatcggtcgctggagagctttgaagtgggccggggacctgcgcacgccgacgagctcgccgtctgggactgctcgggcgccgccgctctaagcgctcaatggggaagacaggggatggtcctagacttcgagatatacggctag

SEQ ID NO: 30775 - DNA, 438 bp, Zea mays
  Peptide Sequence Number=SeqID_72554
atgccgtcaccaccatctgtcgatccgtcccatcgccactgtgtgccaaagcatcatcggtgctcgccacctctcctcccccctccccggccgcctataaaaggaccaccccgagcttccccaactcctcacaccggcctcggcctccccaaatccctccccaagctcaatcgagccgtgtcgccacgcccttcctctgctccggtgagctcctatgtcccctctctagtggcttatggtcaaattgctctagctcttaagctccgtcaaagcgccaccagcctaccacgcacttcttcttcgcctattgcgcccggtagcaccaccggcgacctcaccgccgcgggagcccgccacctcgtcgaggatcgaccgtcccgaacactctccgagcaaattgaccccgccaccatgaccccctacccctacccatgctaa

SEQ ID NO: 30776 - DNA, 324 bp, Zea mays
  Peptide Sequence Number=SeqID_72555
atggctccaccagatccagaagacataagtagagaagagaagcgaaccaaagcaagcaagcttcaagaacaaggggagggggaggaggaggaggccatgcggctgccgtccgacgtgtcgcacggccacttcgcggtgtacgtgggcgagtggtggcgccggttcgtggtgcacatcgcgctgctggaccgccccgagttccggtccctgctgcggcgcgccgaggaggagttcgggttcacgggcgccggcggcgccctcgtcctcccctatgaggaggtcgccttccgctccctcacctccgcgctcgcctgcgcccggtga

SEQ ID NO: 30777 - DNA, 1545 bp, Zea mays
  Peptide Sequence Number=SeqID_72556
atggcgctcctatctcttaggacccctccctggggatacccgcaaggagacagtggcggccgcagtcgtggccggaagcttcgcgggccccgccgcctcgacgtcgtcgccatccgaagcgccgctttcttccttcggcgagatcgacagccatttgaaactttaaagtctcgattacaaataggtgtaaaccctggtacaatcgtgattaatttgtcagctaggattgctccagcagcagccccctctatgttcctggccccttcatcttcacctgcagaaattttttatgatggttcaatggaggaacccgaacatcctgatataaagcttctaatgacacttcagagaaatccgccaaaggagtcatccccttttctcaaagaagaggcgcctctttggtcaacagcagctgatgaagagcttatatatgcaaagaaagaaatcactaatgcaccattgacctcagatgaccctgatctttatgcacccttgttccggaatgtatccatctttaaaaggagttatgaactgatggagagacttcttaaggttttcatatatcatgatggagcaaaacctattttccattccccagagttgaaaggtatctatgcgtctgagggatggtttatgaaattgatggagacaaaccagaattttgttgtgagagatccaaatacagcccatttattctatcttccatatagctctcgtcaactggagcataacctttatgtgcctggctcaaatacaattgagccactgtctatctttgttaaaaattacattgaccttatctcggccaagtacccatattggaataggacaaaaggagctgatcatttctttgttgcttgccatgactgggggccttacacaacaaaattgcatgatgaattgcggaagaacactattaaagctctctgcaatgcagatctctctgaaggattttttatccgtggaaaagatgtttcccttccagaaacattccttaggtcaccaagaagacctctaagagatattggaggaagaccagctgcgcagaggactatcctggccttctttgcagggcagatgcatggtcgagttcgacctgtacttctcaagtattggggaaacaaggatgatgatatgagaatatatagtaggctgccacaccgaatcaccaggaagagaaattacgttcagcatatgaagtcaagcaagtattgcatctgtcccatggggtatgaggtaaatagcccgagaatagtggaggcaatatattatgagtgtgttccagtaataatcgctgaccattttgttctcccgtttgatgccgcactcaactggagtacgttctctgttgtcgtaccagaaagcgatgtacctaagctgaagcaaatcttgttggcaatacccgagagtcgatacataacccttcaggcaaacgtgaaaagggtgcagaagcattttatgtggcatccgaatcctgtcaagtatgacattttccacatgatactacactcagtctggtttagcagggtgaaccagatccgttag

SEQ ID NO: 30778 - DNA, 1980 bp, Zea mays
  Peptide Sequence Number=SeqID_72557
atggccgtcctcctcctccccccttgcctcgtctttctcctcctccagctattttccgcgccgtcagacggcgccaccgccgagtacgcggagtacacgtgcaatgggaccacgggcaacttcacctccggcagcgcgttcgccgccaacctggaccgcctcgtcgccgagctgccgggcaacgcctccgcctccccgttgctcttcgcgtcggcatccgcccccggctccgccgacgccgacaccgcgtacggcctcgcgctgtgccgcggggacgtgacggacgcgcgggcctgctcggcctgcctggcggacgccttctcccgcctgcgccgcctgtgcggcggggaccgggacgccacgttctacgccgacctgtgcacggcgcggtactcgggcgccgacttcatggcgcgccccgacgacaactcccccgtcgtgaacggcatggacgcgaacgcgtccacgtaccccgggtgggacgcggccaacgccaccagccggagcttcttcctctccctcgtggggacgctgttcggcgagatgtccatgtacggcgcgtacaactcgtcgcgccgcctcgccaccgccgtcatgttcatcaacgcgggcctgcccaccgtgtacggcctcgcgcagtgcaccccggacctcgcgcccgcgcagtgctggcactgcttccagggcctcggcgacctcaaccgccagtggtacgacggacgcgagggcgggcgcgtctccggcgtccgctgcagcttccgctacgagggctaccagttctaccagggcacgccggacgtcaggatcggcctgcaaggtggcccgtcctcctcgccggacgatgatggaaccagtgcaagcaaccacaaaaaggtcttaatcatcgctcttgtcgtaccaatcgctcttgtctgtggcgtgctggtcgccggccttctcctcaccagagcacaaaggaaacgagccgcgggaaacctgcgcgcgcgcaatgatccaggaaagacgaggctgccgacgcagatgcattctagaaacagctccaagacggaggaggcgctgaagctgtggcggatcgaggagaggagctcggagttcacgctctacgacttcgccgagctggcggccgcgacggctgacttctccgacgacaacctgctcggcaaaggcggcttcggccccgaggaagagaagatgctggtgtacgagtacatgcccaaccgcagcctggactgcttcatcttcgaccagcagcgggggccattgctggactgggagaagcggcgccgtatcatcgaggggatcgcgcaggggctgctctacctgcacaggcactcgcgggtgcgcatcatccaccgggacatgaaggctagcaacatcctgctggacaaggacatcaaccccaagatctccgacttcggcatggccaggatcttcgggtccaacatgacggaagccaacaccaacagggtcgtcggaacatatggctacatggctcccgagtacgcttccgagggcatcttctcggtcaagtcggacgtgtacagcttcggcgtgttgctgctggagattgtcagtggcaagaggaacagcggccaccaccagcaccagtacggcgacttcatcaacctcctcggatacgcctggcagctatggagggaagggagggcgttcgagctgatcgacccgacgctgggagagtgcaccgaggtggccgacatcgttcggtgcgtcaaggtggcgctgctgtgcgtgcaggacagcgccacggaccggcccaccatgaccgacgtgacggcgatgctggcaagcagggatggtggtgcggcggcgtcgctgccggacccgagacgcccgccgcacttctcgctcagggtcagcagcagcgacgacgggtcgtcggaggtgcggacgcggtcgcacggcaccgcgtcgttcagcaccaacgacctcaccatcaccaccgtccaagatggcagatga

SEQ ID NO: 30779 - DNA, 1149 bp, Zea mays
  Peptide Sequence Number=SeqID_72558
atggcgagcaaagctgtagcagctctgctgacgcttgctgctattctcatcggcttcctctcgccggtgactcccgcgaagaccgctcacgggtttcgtgccaccctcgctcacgtccaccagcaccccggcagctactctgcagcggcacgtcgcgacgggcgccgcctcgcgttgctctcatccccgggcgcggaaggagatggtgcggcgacgaccacgagcagcatcgccacctctccccgccatggcctcctcgaggcgctggtggagaacggcgcgagggcataccacatgagtctatacaatgataccaggcatcccatatgtctgacgattgcgctcgaggagcagtccaggctcctgcgcgtcatctgtcaccggttctcggcacaggatgcgcgctgggcttcgctcgagtccaccaccaccgagcacctccatgaggcttctccggcaactcgtgtcggcacgctggaatcgtggagctcaccgaaggaggtgatcaccgatgactggggcggcctcttcggccgaggcatcgactccgacaagcagctctgcgattcgctccattccacgtcgattcgctctctggaggaggcatttgcccgtgaggatcccattccctcgcgggcgcatctcgggatccaactctcggccaccaccgagcgcctcgatgtcgtggagcctgctgtggcaactcgcgtcggtgcgctggagtcgtggcgtctgcgtgtcgaggcccgcgcattggtccacctctatggattcttcgatggcgctaacgccaccaagctgcctaccacctgttcgacttcggggctcacaaccgaactttccatggcgcactatggctcgcatctacccaacgataagggaggttctgtcgcatcgtggcagccggtgcggtcgctggcgctcgcggtccacgttgagtcgcagtgccagcatgcgtgctccgcgcgcggcatgctggccatggccagcatggggaagatgagcgtcggggacctcacggaggccgacctcaaggggaagcgcgtcttcgtgtgcgccaagctccacgagccacccgacgagaaccagaacagcaccaatgacatcctccctgaaagggaattaggcttacacctattttctaaatga

SEQ ID NO: 30780 - DNA, 168 bp, Zea mays
  Peptide Sequence Number=SeqID_72559
atgcagcaaaaggaccacaacactagggtcaagatcaaggcgaggacgacactaagcgttagggaatggcatgttgcgatcacgcgtgatggacacctggatatcgcctctgttctgagccacatacagagaggggtcttgaatcccttcaagcctcgagaaacctga

SEQ ID NO: 30781 - DNA, 2360 bp, Zea mays
  Peptide Sequence Number=SeqID_72560
atgtacgccaccggtgagaatgagatgatgcctccactgcataggcatgagtacatggatccgccaggaactagctgggctaccaataccatgcttgtcctcttgcccctcctcctcctcgcggtggcgtcctctccggcgccgacgacggcgggcgacggaggcggggccgttccagtggggaacatcttctccttcttctgcagccccaccaactcgagcgtcctgcggacgtaccagcccaacagcacgttcgcgggcaacctccagaagctcgtgtccgagctcccgtcgaacgcgtcggcggcgtcgggcttcgcggcggggaggttcggcgccggcgcgggccccggcgcggcgtacgggaccgcgctgtgccggggcgacttcctcggcggccagtgcgccgactgcctcgccgaggggttctcgcaggcggccagccggtgccccggcagcgtggacgccaccatgtactacgaccagtgccagctccgcttctccgaccaggacttcctcctcgccgccgcctccgccaacaacatgccggagagcaccgcctggaacatgaacagggtgtccgcggggaacgtggccgcgttcgacgccctggtcaaggggctcgtggccgcggcgtccgacgccgccagcgacaggagcagccggtacgccacgggccaggccgggttcccgccggagagcatcaacgtgtacgcgctggtgcagtgcgcgcaggacctcacggcgcggcggtgccgggagtgcctggccggcctcatgggccagatgggcaattttttcgccgggagagtgggcgggaggattctcggcgtgcgctgcgtcatcaggtacgagaaggatgtcttcttcgcgcaaaccccagatatgctcacggtcgcgccgctgctgggttcgacttcgaccaaaggcggccgcgcgctggcacgagtagctaccagcaccagctacgtacgtgtacgtagctttgctagagctgcccgtaacgtaacgccccctgttgacatgcggccttttgttttcaagaagatcggctggaccagtgtgagagccttagcacactgcacgtaccaggatgggtcagatcacttggcggtcacaaagtccgcgccagacgccgaaatggttaagctgctcaccacgctgtgggtcgtcgccgtcgccgtccccgtgtccgtgctcctggcctgcttcctggcgtgcgtcctgtggatcagaaagcggaggaggagagtgaccaatgtgtcaggcacggtgagcgtgcccacaatgtccatggagatggagcaggtgctcaagctgtggcgggtcgaggagagcgactccgagttctccctcttcgacttcgaccagatcgccgacgccaccgacaacttctccgacgaccacaagctaggccagggcggctttgggcccgtgtacaagggtgagctgcccggcggcctggaggtcgcgatcaagcggctgtcgtccgtgtcggtgcagggcctgatggagttcaagacggagatccagctgatcgccaagctgcagcacaccaacctggtgcgcctgctgggctgctgcgtgcaggccgacgagaagatgctggtgtacgagtacatgcacaacaagagcctcgacttcttcatcttcgacggcggcgacagagggagggcgctgacctggggccgccggttccgcgtcgtcgacggcgtcgcgcagggcctgctctacctgcacaagcactcgcgcctgcgggtcgtccaccgcgacctcaaggccagcaacatcctcctggaccgcgacatgaaccccaagatctccgacttcggcatggccaggatcttctgctccaacgtcaccgaggccaacaccacgagggtcgtcggcacgcatggctacatcgctccggaatacgcgtcggagggtctcttctccgtcaaatccgacgtcttcagcttcggcgtcctgctcctggagatcgtgagcgggaagaggaccgccgggttctaccagtacggcaagttcttcaatctcacaggatatgcgtaccagctgtggcaggacgggaaatggcacgagctggtggacccggcgctgggcgacgacctccccgtgggcgaggtgatgaagtgcgtgcaggtggcgctgctgtgcgtgcaggacagcgccgacgaccggcccagcatgtcggaggtggtggccatgctggggagcgagggggtcaccatgccggagccccgccagccggcctactacaacgtccggatcagcagcctcgccgtgtcttcggactcgttcgccgagtcgtcctgcaggatgatcagcaacatcaccctcacggaccacgaggaaggcag

SEQ ID NO: 30782 - DNA, 984 bp, Zea mays
  Peptide Sequence Number=SeqID_72561
atgagggccaccatctgcccctggtcggactgcggcgatgtgtccatcaggcacgcattgtcagatcttggcacgatggccatgaacaggcgcgcgcacgacgtcgtgcccgtgccgactgcggagggcagcggtggattggatgaggaagccaagcggcagcagccaagggtgatgctagtgtgtcgagcgatcacgggaagggtgaagcggcccaaagaagaggagcaggcggcggtcgtcgccgacatcgagggcaaggaggagtacgactcagtgacgaggttgaccagggtgaactgtcgttctgatttcatcatctggaggagtctgttcgacgcgtgctgcaggctgtgcaagttgttcaactgccaggagctcaagctcatagacagccaatctacattgaccttgattgatgctcaagtggtgtttgaggaaatgcagcaaagtgctacctcggttggtgtcccgcaggatgccttcaacacgttctgcaccaagactggttccagcaagcagatggccagagccatctttgtcgaccctgagcatggtctgtacccccagctcttccacccagagcagctcatctcagggaaggaggacacaactaacaacttctcccgtggctactacactattggaaagggaatggtgctggtagctaacaactttggtgatgacctccctgctcgccgtagaaaaggccaagttcagaagtcggataggttgtttaaagtggctgagaagaatggcatcggaacgggtgttgtcatgtacaatgctctgatcaatagccgctgcacagatggaaatatggaaagagcatatgagatcatggtagagatggagaagaagaggattgccccagataacgtgagatacaatacgctgatgagggagttttgcttgcttgggcaacttgatgaagctcacacactcattgacgagatgacagaggggtactgctgtcagccgtga

SEQ ID NO: 30783 - DNA, 343 bp, Zea mays
  Peptide Sequence Number=SeqID_72562
gcgactttcactccccacttcgtgcaacactgtcgtggacgtcgtgaagcggtgccaacgcctgtttctgctcgcggactcgaccggcgcgttcgacgctaccgtggcggtgcgggtgacccagatggtcatgtcgtcgccgaccgagaacgcaacacccacaggctcctcacaggagagcacggcgtgttggttctcgtgcaacaacaagagcagcaagcaactgcagcatggcgggccgttgttggatgggtcgtcgttgggtggaccgtcgttcagggccggcttgcagttgaggcggctatcagggtgctacgagtgccacatggtggtggtcccctga

SEQ ID NO: 30784 - DNA, 399 bp, Zea mays
  Peptide Sequence Number=SeqID_72563
atgcggcggaactgcatgttgctgctcgttgctgccgccgacgccaaaagcccgctcttctgccccaagccgcgacgccccgcgacgccgctgcggtgccaccagagcggtggcttctccgacgccggtacggaactgctcgacctcctcctcttgaagggcgacgagagcggcctgtcgtcggcgtccccgcagccgccgctgttctacggctcgccgccgcggcgagcgtcaaatccggtggtccacgacagcaggttcggcgcggactgcccgcccgtgcccgtgccggggctgtccgtgcaccggcctagcccgcggccgtcgtcggcggcgccgtccatgtcgccgcgcgggtgcgcccgcgcgcggttcgcgttccagcccgcgaatagttag

SEQ ID NO: 30785 - DNA, 993 bp, Zea mays
  Peptide Sequence Number=SeqID_72564
atggaaaaaaaaattctatattacttcatatttggcaaggaccatctcttctacatgtataatgtgaagggagcagatctaaactggtcaaaacgcctgcacataattaatgggatagctcaagggcttctttaccttcacaattattcacggttatgcgttgtccatagggatttgaaagcaagtaacattctcttggatagtgaaatgaatccaaaaatatcagattttgggatggccagaatattctgttcaaacgcgaaagaatcaaatactacaagaatagtgggcacacatggctacatacctcctgaatatgcttttcatggggtttgctccatcaaatcagatgtttttagctacggggtattgacattggaaattctaagctcaaagaggacggtccaattctatgagtacaaccaaaagctatataatctcatctcatatgcttggcaactttggacggacggaaaatcagatgagctgatttattctcctccaggcaatgtacgtgaagagatagaaaggcacattcaggtggcactcttatgtgttcaagaaaatgcggagcatcgacctgatatggagcgagttgtcacaatgctaaacagtaaggatgtggacttacccaagcctatgcagccagcttacttccatgtaaatcctagtgaggaagaagtttcatcacgaagcattaatatgactatgagtatcacgctggaaagcaaaaagcgaaaagaggggattcgtaaggccgaacctcggttcaattggcgcaatgtctgtgccagcacctgcgcgaagctgtacccggagaatgtcgcggtggtagtccgcggccgtacccgtcgcaggcatggcgcgtccctggcgggcggcgcaagggtgctctccgtcactgttcgtcaccactacccagttccattccacttcgaccccgttgtcgccactcggcagtcccgctcaggcatgcctgggccgtgggcttaa

SEQ ID NO: 30786 - DNA, 297 bp, Zea mays
  Peptide Sequence Number=SeqID_72565
atggggaggcctatagttgatcccccacatctctcccccaagacgcagattcaaccactgattcccaagccgcagattcaaccaagaatgagttctgagaatgagctcgatgtttctgagattgttgcaataagggatatcatacctcctgctgttgaaggttgtgctgctcttggtaaattgttggagccacaagattgtgtagctcacattcttctagtcattgtcaatttctcccagagctcttcctttttcctcttccgacctaaagattttctgcagaaggtagaattctga

SEQ ID NO: 30787 - DNA, 429 bp, Zea mays
  Peptide Sequence Number=SeqID_72566
atggcgttgattgcggcctcggcaaccttccatgacggtggtgctgatatcgcatacggttcggcgtggatcctcggccaccttctgctatcggagatgaggacagtggggggggagggcccacgccgtcaatggcacgcgcagacaacgaaccatgatggcggtgcgcagatcctcgccaaccttccactattggagacgggcggagcagatgagggcgttgatggaaggttcgaggaggagggtggggcagatcggcgtggggaggagggcccacgccatcgatggcacgcgcaggaaaccttccatgacggcggtgctgatatcgcgtacgagtcggcgtggatcctcggccaccttccgctatcggagacgggcgttgatggcgcggatcctcgcgaaccttcccctattggagatgggcgttga

SEQ ID NO: 30788 - DNA, 348 bp, Zea mays
  Peptide Sequence Number=SeqID_72567
atgaaggacacggtggccggctctatgggcggcgcacggcaagagaacacgagagaaaggagaagtaacggctgcaataaaactccattaacactgggacggcgaacggacgacgcgggctcggagtcggtcgtggggcgcgaggtcgcgacgtactgtgggagctgcgcgcaggtgcgcatggcgcggtgcacggggttgggctggggttcctgcgcggcttctcggctggcaggtcgcggggtcttcggctgggcgcgggcaggaccggcctgtcggatttctaggcgcacggagaggctacaacactggggcggctctgctggcgatcctcggtcgggcgcatag

SEQ ID NO: 30789 - DNA, 294 bp, Zea mays
  Peptide Sequence Number=SeqID_72568
atggctggaaaaggattcactgctggcagcgaggtgtactatgcatttattagtgcttatgagaagtctgaaaattatgagatgagggagatgcaactccccttttatttgaggggagatgggagatttgttttggtgaccaccaaaaaaagggagagctattggggagctgttggagcaatggaattgcctcatctcccccaatatgacagttttatggggatgagggatggtattggagagctactggatgctctatcggatctgatatttggcttggatattgcacagtga

SEQ ID NO: 30790 - DNA, 333 bp, Zea mays
  Peptide Sequence Number=SeqID_72569
atggggaacacaggaaccgatggatctcggtcgtgcatgcagactgggcgccacggaaggagctggaggggctgttgcttgcaaacagggagggagttcgtccgcgccatggaggagacggccccctactgcagccactcgccgggagaagaagcagagcgtgctgctgtgttccagggagccaagcgccatggggtgatcttggccagcgcccatggagaagaaagcccctgcgcaagggaagccagggaggtgcttgctgctgcacggcaggaggaggaaggagagcgtggggaggaagagaaggctgctgttggcggcagaaaaatttga

SEQ ID NO: 30791 - DNA, 369 bp, Zea mays
  Peptide Sequence Number=SeqID_72570
atggtgcccaggcagccggcaacagaaacaccgcacttgatgatgacaaacggctactcgatgagatggcgagaggcaattaaagcactttcccctcagatcaatgggcatcgaaataggaaggggcttagaatgggaggagctccgtcgacgagcacgacggccaagaacttgcacccagccatcgccatcctcccggccagaagaagggaggacagagcttgtagaagataccagaacgtccttgtacgaagcttgcagtttgaaaggcctctggggtacgtcagaggagtaaccaccgtcttcactccagcgctgcgacttggacgacaggcagggatggaagcaggagaatcacccggtgcctag

SEQ ID NO: 30792 - DNA, 402 bp, Zea mays
  Peptide Sequence Number=SeqID_72571
atgacgcgcatccaccgcctccgccccctcttcctcttcgttctcttggcgtcgctgcaatgcggtaatgccgccaaaaccctagccgggctctccgccgccactgtggcgtccacactcgagtctccactggaccagtcctcgctcttgtttcactcactacacggtctgtcacttgatccgattgcaggtgcggcgacggcggcggctggatacggaggtggcgccgaggggttctgctcggcggagccgtccagcaagtgctccggggatcagccgctctactggaaggtcacccatcccaccctcgcgcccgcgcacctccaagatgaaatgagttggctcaaatatgctaacgtctacatgagaacccaagggttcttaggagctcaaataatttaa

SEQ ID NO: 30793 - DNA, 339 bp, Zea mays
  Peptide Sequence Number=SeqID_72572
atggtggattcttatggatatcttcctgcaaacacaaagcattctatgatctcagatgaaccaaccactcttgtaatatttgagaggaggtacaatgccattgaggattcccatcctgatctaattgtgggttcaacagataagcaaccccttctcgaaaccccgggagaggtatttcaactaaggaagctgctaccgacttctctgtcctatgactttaatatccatataatggactttcaaccaggcgaatatctcaatgtaaaggtatcccgtgcaagctggggataccatttggatggcaccgtttgttcctcagtggtatgctgcccttggtaa

SEQ ID NO: 30794 - DNA, 483 bp, Zea mays
  Peptide Sequence Number=SeqID_72573
atgggcagaattaatgcagcaaccttgagcattctctggtgcttggaccgacaggaactcttcgaccatgacacgttcaccaaggacgacagcatgggcaacgccgagttctccatcctcaacttcgtggagatcgccaagcaggacctgagcgacgtccccgacggcacggtgatgaagacgatccacacggagaagggcagctgcctcgccaccgacagccacatcacgtgcaaggacggcaaggtctcccaggacatcctgctcaggctcagggacaccgagaccggcgacctcgtcctgcgcctgacctgggtcaacatccccggcgtcgcgcgttctgataaggtgtgcaagaaggctcatgctactgggagcaatgcttctgcggcccagcctggggctccagctcctggcaaaatgcagttttgcagagcttcagaccacagtacaaaactgacaataagcatacttgaacagtga

SEQ ID NO: 30795 - DNA, 216 bp, Zea mays
  Peptide Sequence Number=SeqID_72574
atggagtgcctgctggggctgctcaaggttagggtggtgcgaggagtgcacctggccatctgcgaccccctcacccacagcagcgacccctacgtcgtcctccgccacggacagcaggtttctcataagtcaatcactgtcaactttgaccggttatatagagaatcacaaactcatgtggacggagggatgacttgttgttataacccgtcctag

SEQ ID NO: 30796 - DNA, 711 bp, Zea mays
  Peptide Sequence Number=SeqID_72575
tgtgcatataattctgcaaaatctaagaacaaatttcatttttggggaagccattggagacatggagatgcattgcttttttcattagcatgtgcccaggattctgtttccaggttatgtatgctttttgttatgaggcctgaaagcttacctaagtcgtaccaagaatttatccttaagacaggaccagtagcagaacctgtctacaaggttgtcaaagaatgctgcagaggtggtcctgtggatctaactgccctctcagcccatttatcaaacaagaggaatccggatttgataaatttaacaacaaatccatccattatcccatgttctgtgatccaccctgacagagcatcatgcttggctcaaaatgttaatgttgtttcatcaacattcaagaagacattccctctatatttctcattgacatttgtgccctttgttgtcctacgtcttcaaaaggctgctatatgtttgcaccgaaaagttgcgaacaaagaccacaaacttgtgtattggtttgctggtttgatgtcgggtctttcaattcttttggaaaagaaagctagaagggctgagctagccctctatgtgcttccacgtgctggagattccctatggtatatattgatcaaccgccacctgctcccaaatattaaaaatgctgaggtattccccactcactttgcaatctgttttctggttatttag

SEQ ID NO: 30797 - DNA, 270 bp, Zea mays
  Peptide Sequence Number=SeqID_72576
atggccgacggcgagcgcgtcgttgccaaggttcggtttggagaagaaacagaaattgggggtctctatgcaaatgtcagagagacagtgaatagtggctcggggttcttcactgaaaacgaagaagaaatagttgaagaagaagttgcaccgccgactgaaattccacatgtctgggacaatatctactttgacgtttgtggaacagatcccgagtcccctacgacacaaggcaagccccgatgcatttatccttccttgctattttaa

SEQ ID NO: 30798 - DNA, 621 bp, Zea mays
  Peptide Sequence Number=SeqID_72577
atggcgccgtgggtgtgggtggcgttgcaggcggccgccgtggctgcgtccgcggcggaggcgctgagcctggacgtccaccaccgctactcggccaccgtgcgggagtgggcggggcaccgcgcgccgccagccgggacggcggagtactacgcggcgctcgccgggcacgacctccgccggcgctcgctggcgggagggggggaggtggccttcgccgacggcaacgacacgtaccggctcaacgaactgggattcttgcattacgcggtggtggcgctggggacgccgaacgtgacgttcctggtggcgctggacaccggcagcgacctcttctgggtgccctgcgactgcatcaactgcgcgccactagtctcacccaactacagggatctcaagttcgacacttacagccctcagaagtcgagcactagccgaaaggtcccatgcagcagcaatttgtgcgatgaacagagtgcatgccgtccatactacaacataagcatcactggtgctacggtggggagtaaatccattcacaccaagttcaacgctattgttgactctggcacctctttcacagctctgtctgatccgatgtacactcaaatcactagcagc

SEQ ID NO: 30799 - DNA, 693 bp, Zea mays
  Peptide Sequence Number=SeqID_72578
atggagaagaagcagaagcagaagaagcacgctaggtcaaggagcttcaccggcggcgggctggcctccttcctcaagtccaccgtcgccttcttctcgttcaccttcccgtccgccagcgtcgggaccaggtcctcattcaaccaccgcaacggcttctcgggccccattgtctccatcgtcccgccggaggcccgcggcggcggaggcaggaaccggtccgggtacatgacgcccgagccgtcgtcgcccaaggtgtcctgcatcggccagatcaagcggagcaactccaggcgccagaggaaggtcaacccgtgcggcaagaacggcggcggcgcctgcccgctgccgccggcgccggcggaggggaagcccagaggctcgctcgtcaagcggctgtcgttcttccggcgcggcaggtcgcgtcctcggtcaagggcagacggcctcgtcggtaacggcaaagagtgcgacggcggcgcgacggcggcggcggcggctccagctccggcgggtctcggccagatgaggcggttcacgagcgggcgcgccgcgtttcaggacttggactggcggcaggagtggaggagggccggccgtgtcagcgacgaggaggacgaggggttcgttgcgcattcagcgccgcttccccatggctcctcctcccaccccacttcagattccctaggctag

SEQ ID NO: 30800 - DNA, 511 bp, Zea mays
  Peptide Sequence Number=SeqID_72579
tcctccgtggaccatggaggaggtgtggacagcgtcgtcgtcttcccgccgatccaccgcccggccgcccgtgctataaagaggaaggccaaccacggacacccatgccaagcagaccaagatttatttgttcgtcgcattcgattcattagcagctccctgcttgccttgcacgtggtgactggtgagttcattcactttgccaagtcatcacgtcagcagcagaccaagaccaacagagacatgggtggaggcagccgcatgcagaccgtgctgttggccccgggcgttaaggacaagaagctgctctcctacacccgccgcaacgcgctcaaggaaaaggacgccgtcaccgacctcatccgctccatcatcgccacgtccagccccgttcagcggaccgccttccacgtctttctcattgacacgtcttcgagctctactctgcctggtgtcgcggtcctctccgactgtgtccctactatgccgtcaattgcaacccggagccggg

SEQ ID NO: 30801 - DNA, 1635 bp, Zea mays
  Peptide Sequence Number=SeqID_72580
agattcgtccgctgctttgactttgactacccatcctcactcccccctactcacacaaaaccctgcgctaaaccttggctatcgatggggaactgcgccgcctaccgccttgccgccggcgggagcggcgacggcggggaccccgtggccgtgtgccgcgaccggaagcgcctcatcaaggcggcggccgaccgccggttcgcgctggccggcgcgcacgccgcttacgcggcggctctccgttccgtcgccgacgcactcgacgtcttcgtcgcgcgccacaccgcgcctgcgccgatcctcatcacgctccccacccccagcagctcgccctcggcttcccccaagccaacgcaggttcaagtgcaggggcttccctctctcgccacgccgccgccgccgcctccgcaggagggggaggaagaagaggaggcgccggcatcaccgcccgccgaggaagatggggacggcggcgtgcagacgccggagatggagtgcccgtactactacgcacccccggcggtgacgccgccaccgccaccgctccctgcggcgtcgccggtcggcggctgggacttctttaacccgttctacgggacggaggaggtggctgcggccatcagcgacgaggagatgcgagcggtcagggagcgagagggcatccccgaactggaggaggcggaggaagaggagggggcgaaggcggcggcggcggcggaaaccaagcccccaaaggcacagccctctcttggacttggagtcttgacgccccaagaggaggctagagatgcgtgcgagatggcggggaacaacggcgggctggaggtggccgtggcgccgcaggggcgcgagctgctcgcagcgctcaaggaggtggaggagctcttcgcggccgccgccgaggcaggcaaggaggtgtctgccatgctcgaagcagccacgcgcgtccccgacctcaaagcggaatccatatctgatagaatacaaaagttacgggacgaggaactgcagccacaactcgtcgagctgttgcagggctttacaaaatcttggaaaataatggtggactcgcatgaaacccagaggcagattatgttcgaggtgaattcatttacatgccctgcttatggcaaattctgcaacgatgcacagcgtcatgcaactctgaagttggaggttgagctgaggaactggagatcctgctttactagctatttcaatgctcagaaagcgtatatcgaggctcttgaaggatgggtatccaagtttgttctgaccgacaccatccggtactcgcgggggatctcgtcgattgctccagatagagctggtgctccaactctagttgtgatgtgccatgactggtacactacaatgtccaagtttccgagcaagcgggtctcgttcaccatgaggaattttctcaggagcgtgagggtgctatggctgaagcaaggagaggagcagcttcataaaatgaaggtggacagcctggctaatgatctggacaataagctgaccgcctacaaaagggcagagaacaggatcatatgcaccaagcttctggagcacagtcctgagacagacgccaaagcagcgcatggagcacctgtcggagaagaaagaggtgcttaa

SEQ ID NO: 30802 - DNA, 1131 bp, Zea mays
  Peptide Sequence Number=SeqID_72581
atgcttcgacaaagtggccttcgaggtgttccacggacctcccccgccgaatcgcgcactgcgctctcctatacctccctcatcgccgcctacgcgcgcaacgcgctgcacgaggaggcccgcgcgctgctcgaccagatgaaggccacgggggtcgcgcccaccgccgccacctacaacaccgtgctcgccgcctgcgcccgcgccaccgacccacccgtccccttcgacatgctcctcggcctgttcgctgagatgcggcacgacgcgtccccctccgtgcgccccgaccttaccacctacaacaccctccttgccgccgccgccgaagcctatgttgctttcaacatgatgactgaaatcggtagcttgccaactcttgagacctacaatgctcttgcatttgcatatgctaggggtgggctcttccaggaggctgaggccatcttttctcggatgagtaacaatgctggcattcagaaaagcaaagactcatttgacgccctcatcgaagcatattgccagggctcccgattggatgatgcagtgaaggcgtacatggagatgcgtaaatccaggtttaatccagatgagcggtcccttgagggagtacttaatgcctactgcatagcaggggtcatagatgagagtaaagaacagtttgaagaacttcaatctagtgtgactatgcccagcgttattgcctattgcatgatgctgtcactatatgccaggaatgacaggagccgcgaggagcagcgccccagcctgcaaccaagaccgcgcgcgcccctgctcatccggtcgcgcgcccaggcgccctgccagagccgcccggccacctgcgccaagccccgccactcccgacgccgcgcgcccaacgccgctcagcccggtgccgccgcaccgaccggcctcggtcccgtgcagcaaccgcgaccgagccgcccgtccccaagctcgcggccctacgcgcctccgtttgttgctgccgcgcccggcgccgctctcttctccgcgacccgcctattttgcggcgaaactgtcgtccgcttagcccatcggacccacgcccaggcgcgccttgatgtttcgccgtttggtttcatatttgttgttttcgtccattag

SEQ ID NO: 30803 - DNA, 1037 bp, Zea mays
  Peptide Sequence Number=SeqID_72582
cggcctggcgccgcggcctccccgacgtgcgcccctactacgccgtcaagtgcaacccggagccggcgctcctcggcgccctcgcggagctcggcgccgggttcgactgcgccagccgcgccgagatcgaggccgtgctcgcgctcggcgtcccgcccagcagcatcatctacgccaacccctgcaagtccgagccgcacctagagtacgccgccgcggccggcgtcaacctcaccacctacgacaccgaggaggaggtcgccaaggtcaagcgctgccacccgaggtgcgagctcctgctccgcctcaagggccccgacggcagcgagaccacgtgcgacctaggcaccaagtacggcgcgcgcgccgacgaggtggtgccgctcctgcgcgccgtccagcgcgcgggggtcaccgtggccggcgtctccttccacgtcgggagccccgtggcccgcgtcggcgtgtaccgcgccgccatcgaggccgcccgcgccgcgttcgacgaggccgccgccctcggcatgccccccatgcgcgtcctcgacatcggcggcgggttcacggccggcgccagcttcgacgacgccgcggccgtcatcaacgacgccctcgcgcgctccttcggcgacctgccgtgcgtcgaggtcatcggcgagccgggccgctacttctgcgagaccgcgttcaccctcgccgcgcgcgtcatcggcaagcgcacgcgcggcgaggtgcgcgagtactggatcgacgacggcctctacggctcgctcaacaacatactcatggaccacaaggtcccgcgcccgaggccgctggccaccccgcgccccggcgacaggacgcacacgtccacggttttcggcccgacgtgcgactcccaggacgaggtggtcaccggctaccagctgcccgagatgagcgtcggcgactggctcgtcttcgacaacatgggcgcctactccacaggttccggctccaagttcaacggcttcgacacgtcggagattaagatctacgtcgcctactccagctga

SEQ ID NO: 30804 - DNA, 801 bp, Zea mays
  Peptide Sequence Number=SeqID_72583
atgtctgagacagtgcgtacgaagaagggaggcgagaacaaggaagcaccgaatcacacctcaagaagttgtctgccccatcctgatcttgtctcttccactgctgacgctgatctaggaaccaccggaagtagttctgcgttccacattcctaggttccaaacataccctaatggtgtgtttggtttgtggagtcaccatatgcttcatgaggaccgagcaaatgaaatctacaagaaagttgaagatctcaaatctatcaggggaagaaatcaagatgccatattagctgcatgcctatatattgcttgtagacaagaagatcggcctagaactgtgaaagaaatatgttcagttgctaatggggccacaaagaaagaaattggcagagcaaaagaatttatagtgaaacaactggaagttgagatggggcaatctatggagatgggaaccattcacgctggaaattttctgagacgtttctgctcaactcttgggatgaacaatcaagctgttagggcagcccaggatgcagttaagcactcggaggagcttgatataaggaggagccctatctcaattgcagccgctgtcatttatatgataacccaactctcagaggacaagaagccacttaaaggtattgattctggagaatctgttgcagatatatccttggctactggtgtagcagaaggcaccatcagaaattcgtacaaggatctgtatccttatgcctcaaggctcatcccgaatacctacgccaaggaagaagacctgaagaatctctgcacaccttag

SEQ ID NO: 30805 - DNA, 597 bp, Zea mays
  Peptide Sequence Number=SeqID_72584
atgtcgggagatcacgccaagaaggagatggagaccggcgaaaagcccactacaagccacgggagcacttcatcggaagagtcctgcaccaagaggaaggagaagaagaagagctcctccaacaaagggaaggagaagaaatcttcttctcaccacaaagagaagaaggagagatcttcctctcacaagccacatcggagtggggacaagcacaagaggatgaggaaagtggtctactacgagaccgacacttcatcaacatcaacctccggctccgatgcgccctccgtaacttctaaacgccaagagcgcaaactgaaagggaaatgtgcccttgggccatttctaagtattttggtgattgagcgccaacacaagtgcttaaatgtgaatctatgcccatggatggacaaagtgcaaatcaagagaaaagtgtccggtgtgcaccggactgtccggtgtgcaccggactgtccggtgcgccagacgatagaaggcaaggatggccttctaaatttgctctcaacggctcctagctgccttggggctataaaagggacccctaggcgcatggaggagcataccaagcaaccttag

SEQ ID NO: 30806 - DNA, 435 bp, Zea mays
  Peptide Sequence Number=SeqID_72585
atgtcttcagaggaggcgagggcaagcttttcggagttggtggttggttcgccaacccggacagagggcgaaacttattcttcaggtgatatgtcgtctgaggagggtgcacacgtcacttgtttcacagaggatcttcacgatgtaacacttcactttcagatagtgaggttttctaaacagatatacgtgtgggttggatgcaacacagcaaagtttggccatttatatgctgctgcaaccactagaccgaaaggttgcaccctacatgtcccagtgctgaagactggcctgaacatagtcctggcatgcaacatcccaaaggacagccccatacttgaggctgctgcggagaggaagctggttgagaagctgaaaggtttgggctacattaaaaccccagctgtgggggctaacacttcctcggcacaatga

SEQ ID NO: 30807 - DNA, 1785 bp, Zea mays
  Peptide Sequence Number=SeqID_72586
atgcccgcgccgctgatactacccacagtcgcgcgcgagctggcagagctcctcgtcgccctctccgccgcccgcgcgctcccaaaaggacagcagctccacggccatctcctcaaggctggacacgtccccgccaccgcctcctcccacgcgctgctcgcgcaccacctccttacgttctacgcgcgctgcgcgctccctgacctctccctccgtgccttccttgacctccccgcgccgccccttcccgctgcatggtcttccctcatctcctccttcgctcagaacggcctcgccgccgctgccttcgacacgttccgccgcatgctcgccgcgggcgtccctgccaccgaccgctccatccctttggctgcaaaggccgttgccgctgccgagaccttgtcgcgccctccgttctcccctcacgcgctccacggccttgctgccaagactccgttcgctggcgacgtgtttgttggctcggcgattgtcgacatgtatgccaagtgcggccaccttgcagacgcccgccggctattcgatgatatgccagaacggaatgttgtttcttggtctgcactcatatgtgggtatgctgacgcggggatgcatcctgcagcgatgggaatcttccgcttggcacttgaggaggctgtgcctgtgaatgactacaccgtttcttccatcatccgtgtatgtgctgcagcgacgctctttgagcttggagcccaggtgcatgccagggctacaaagacagcgcttgacgcgtcaccttttgtgagcagctcacttgtctcggtttactcgaagtgtgggcttgtagagtgtgcttaccgtgtgttcaatgaagcacctgagaagaaccttggcatttggaatgcagtgctcattgcatctgctcagcatgggcatactgctgcagcatttgagcgatttatggagatgcagaaggctggattccagcccaatcacataaccttcctgtgcttgctcactgcttgtagctatgctggccttgttgatgaggggaagcgatatttttctatcatgaaagattatggcattgaaccacaggctgaacattatgcttcgatggttgacctacttggtcgtgtaggacttataaaggaagcccttgatcttattgagtccatgcctatggaaccacctgagtctgtttggggtgcactgctcatgtcatgccgcatatttaaagatgctgacactgcagcaattgctgcaaagaggctgtttgagactgggtctcgcagctctggagcacatatgcttttatcaagcacatatgcagctgcaggaaggcatattgatgcagctcttgctaggaaagcaatgcgtgatgcaggtgtacggaaagaaacgggacttagctggttggaagctgcaggggaggtgcatacctttgcatcgaactgcaggagacaccaacgaagcgaggaaatttacaaggtgctggagaacgttggtgagaagatggaggcagctggttatgtggcagacactagtgcagttgttaaggatgtagatggggatgagaagcgagcaacagtgaggtatcacagtgaaaggctagcaattgggttaggtcttttgattgttccacatggtgtgccaatccgagttatgaagaatttgcgcgtgtgtgacgattgccacaatgcaattaagtatctaactaagtgcacaggtagagttgtggttcttagagataatcgtcggttccaccgatttgaaggtggggtgtgttcttgtggggatttctggtaa

SEQ ID NO: 30808 - DNA, 1075 bp, Zea mays
  Peptide Sequence Number=SeqID_72587
atgcaccgctccttcctcctcgtctgtgcactcgtagccaccgcgctttccaccgacaccaccgttgccgccgcccagagccagagccagagccagagccagaggtcatgggccgaactcagcgggcgggacaactgggacgggctcctggacccgctcgacggcgacctccggcgcgccgtcatccggtacggggagctggcgcaggcgacgtcggacgcgttcatcggcgacccggcgtcgccgtacgcgggcgcgtcgcggtacgcccccggcgcgttcctccgcagggcgcaggcgcccgacccggacgcgtacaacgtgacgaggttcctgtacgcgacgtcgagcgcgcgcgtccccggccagttcatcacgcggccggcgccgccgggggcgtggagcgccgagtccaactggatggggtacgtcgccgtggccacggacgccggcgtcgcgaggctggggaggcgggacatcgtggtggcgtggcgcgggaccaagcgcgccgtggagtgggccaacgacctggacatcacgctggtgccggcggcgggcgtcgtcgggcctggccccgggtggtcgcagccggcggtgcaccggggtttcttgtccgtgtacgcgtcgaggaactccacgtcgcggttcaacaagcaaagcgccagagagcaggaacatgcattttcatcttgtatagaatcttgtaggaacgggaacatcttaggtgttggtgtccacaagaatttgccgagaagcaacaagacagtgttggccgagattagaaggctattggacgcgtacaagggcgagaactgcagcatcacgctaaccggccacagcctgggcgcggcgctctccacgctcaccgccatcgacatcgtcgccaacggcctcaacgtccggggccccaacaacgacacggtccccgtcgccgccatcgtcttcggcagcccccgcgtgggcgacgaccagttcaagaaggcgttcgactcgacgcccggcgcccggctgctccgggtccggaacgcgcccgacgtcgtgccaccgtctgcccaacggcttctacagatgtcgc

SEQ ID NO: 30809 - DNA, 1272 bp, Zea mays
  Peptide Sequence Number=SeqID_72588
atgaatattcgacaatcactgttgcaattgaatgagtcgtcatcagacgatgatgacgaaattagtttcgccgagtatcatatctttcatcagccttcacacagtaaaagaaagcatgatgggtctatccccggacatttagttaaatttcgagacagacaagcaggacatgcaagaatgtatcaagattacttagcggaaaattctacgtttagcttaactgatttcagacgaaggtatagaatgagtcgcgatctatttaaacgtataatggctgctgtagaagatcatgatgactacttcaaattcaagttcaatgcagccagtacacctggattaagttgtttccagaaagtcaccgcagtatttcgtatgataacatatggagtagctgcggatgctacagatgagtatgttcgtatcggagaaagtacggttatagagagtctgaaaaagttcgtgaaggcaattattaaagtgtttggggatgaatatttgagagcacctaatgaaatggatacatctcggttacttgcaattggacaagaaagaggatttccaggaatgcttggttctatagattgtatgcattggaggtggaagaattgtccttcatcatggcacggcatgtattcatgccatttacatgagcctacaattatattagaggttgttgcttcacaaaatctatggatttggcatgcattttttggtttgcctgggtcgcacaatgatatcaatgttcttcaccggtcaccactgttttcaaaacttgctgaaggccaagctccacaagtttactacaacatcaatggacatgactataccatgggttactatttagctgacggcatatatccatcgtgggcaacctttgtgaaaactataccagaaccacaagggaataagcgaaaatattttgctaaagcccaagaagctgtacggaaggatgtcgaacgtgcatttggagttttacaatcccgttttgctattgttcgtggaccggctcatttttgggatcaggaaacattaggcgacataatgaaagcatgtgttattatgcataacatgattgttgaagacgagggtgaagtcgaccctgatgaacgttttcaagacggtggcgataatgtgcagccttcccatgatcaacatcccgatttggacgaatttatagagacacatcgaaaaatcagggacaaagaaactcatcatcagctgcaacaggaccttgtcgagcacctttggcaacatcattcagatcagtattga

SEQ ID NO: 30810 - DNA, 270 bp, Zea mays
  Peptide Sequence Number=SeqID_72589
atgtcgccggaggatgctaccgaggccaccggatcggaggagaccggacgacccgcactaaccaataaaaagtggagcaagaggataaagtggcacgagaggacgtgtgtggcgactgcccaggaggtgcagtggcatgacgacgaggcagtgacaaggaggagcagggagcacgaggccgatgggcagaagaaggatggggctagacagtggagggggaggctgtcacacccgggttttgggggcaccaagacccggacgcaaacataa

SEQ ID NO: 30811 - DNA, 171 bp, Zea mays
  Peptide Sequence Number=SeqID_72590
gcgctgccgaatcagcaggttgtggattaccccagcttcaagctcgtcatcgttggcgacggtggaactggtgatttcctctgtccttcctttatgcctcgcctgtttgggacgcagaaattggaaaacacaggaacagaatgctctaacatcttgaatcctatggattga

SEQ ID NO: 30812 - DNA, 1113 bp, Zea mays
  Peptide Sequence Number=SeqID_72591
atgcggcggggtgccgtcctcctcgtctcccttgtcctcctgctcatcaactcgccggtgggcttgtgcggctgcttcaagcgcatcttcagcttcggcgactccatcatcgacaccggcaacttcgcgagcaccgtcggttcggccccgataaaggagctcccatatggcatgacctacttcaaccggtccaccggccgtgtctgcgacggccgtgtcatcatcgattttctacggtggagtaatgagtacgtaccgcaagcgctcggtctgccgctggtcccgccgagcataccggaggaggaaacctccccgttccccaccggcgccaacttcgccgtgtttgcggccacagcgctgtcgccggactactacaggaccaactacaacttcaccatgccgtcgccgtcccacctggacctgcagctccagtccttcaagaaggtgctcgcgcggatcgcaccgggagatgccacgaagagcctcctcggcgagtccctggtggtgatgggcgagatcggcgggaacgactacaacttctggttcttcgcgctggactcccgcgacacgccgagccagtacatgccggcggtcgtcggccgcatcggcgccgccgtccaggaggtggtcaacctcggcgccaggacggtgctcgtcccggggaacttccccatcggctgcgtgccgcagtacctgtccatgttccagagcagcagcagcaacgccagctcggactacgaccagtacggctgcctcgtctggttcaacgacttctcgcagaagcacaaccagctgctgcggcaggaggtcggccggctccggtcgcagaacccgggcgtccagatcatcttcgctgactacttcggcgccgccatgcagttcgtccagaaccccaagaactacggcatcgatgatcccctggtcgcgtgctgcggcggcgacggccggtatcacacgggcaaagggtgcgacaagagtgcgacgctctggggtaacccggccacgttcgctagctgggacggcatccacatgacggagaaggcgtacagcatcatcgccgatggggtgctaaatgggccgttcgcggacacaccgctgctcaagacctgctaa

SEQ ID NO: 30813 - DNA, 384 bp, Zea mays
  Peptide Sequence Number=SeqID_72592
atgaaagatcgtagtgcaatctcgtctaggctatatttaacccccacaatttgcaaaacagtctcacttttcacctttttaaagaaaaccagaaccagtttgacaacgtggaacggttatatttgccatgtcagctatgacgtgattagtgtgatcatgcaaagaactacaatgaggtttattgatattgttattggttggcctggcagcatgacattctcacgcctgataaaatgctctggttttttcaagctctttgaagctagggaacatttgaatggctctgccaaagtttcagcagagggtgcagagatcagggaatttggcataaactcaaaaactattcagacctttgatcaaaaaaatttccagcaaaaaacttag

SEQ ID NO: 30814 - DNA, 549 bp, Zea mays
  Peptide Sequence Number=SeqID_72593
atgacggtgtcccccaggaccatctggacgatggtggaggtgacgagcgcgaggccaaagggccaaatgtcccctttgtcgtggcgatggagcgtagaaaaggaggtgtgggatggagaaggggaggggaagacgacggggtcggttgggaaaggggaaggcggccaaatccatatcataacaaggagggggcgccgacgacgagggtgggcagcgacacgtcgaggaggagcatctcagcgaactcggttgtggcccgcttgtcggcaggcaaaacctgcttgcctccttcccatgggtttatgcacgtggatggggtgcgccgatggaaagggattgcaaggtgcggggcgaggatggtgggggcggtcgcggaggatccgccttccatcgatggagcgtgggagtggtgtgatgatgaagggtcgttatgaagggtcaaccgagagtgaggcgggggaggggatgtcgagggcaggtgcacggtgcataggggtggataacgagccagctcggctcggctcgcccgagttcgagctggctcgttaa

SEQ ID NO: 30815 - DNA, 3123 bp, Zea mays
  Peptide Sequence Number=SeqID_72594
atggaggaacctctgttggaccatgaatcttcttccttatctgaagcaacaggtcgtagatcacttttctcagatgctggattgtttagtaatatcaccttttcttggatgggtcctttacttgatcttggcaagaggaaaacactagaccttcatgatgtgccattcttggatgacagtgacagtgtccacggaatcacccctaagtttaaatcaaagattgcctcgatttctgccacagggcaatacactgatgttacaacagttaagttagtcaaatctcttgtgctcacaacatggaagctaatcattatcactgcagtttatgccctaatccgtaccgttacttcatatgttggtccctatctcatcgagcacttcgttgactacttaaatcaaagcacacgatccactaaaagaggataccttttggtgttggcatttgttgctgcacagctgatggaaggtctctcatcaaggcatttgctctttagatctcaacaattaggcttgcgcgtgcattctgctcttattgcaattatttaccaaaagggtcttgccctctccagccaatccaagcaaggtagttcaagcggggagctgatcaatgttgtgaacattgatgctgagcgagtaggagatttcaattggtctctgcatgaactttggctgctcccagtgcaaattagtctcgcaatgattatcttatactctactcttggcttggcatcattcgctgcccttgctgcctgtgttttgacaatgttggctaacatacctttggggcggattgagcaaaattaccaggagaaaactatgaatgccaaggatgctagaatgagtgctatgtctgagatattacagaacatgcatattctcaagcttcatggttgggaattggttttcttgtcaaagattaaagagataaggaaggttgagatgaactgggtaaagaaatatgtctacacctcatcaatgcttatatctgtatttttttgtgcccctgcatttgttgctatgatcacttttggaacttgtataattatcggcatcccattagaaacagggaaagtattatctgctctagcaacatttaggcagttgcaaggtccgattcacagtctgccagacgcgatctcatcaatcattcagacaaaagtatcacttgacaggatatgttcatttctctgccttgaggaattagcaagtgatgcagtaactaagcttccgagtggtagcaccgatatatccattaaggtgagaaatggtagcttctcctggcaaaaattctctcaggtgcctactctccaagatctggacttgtgtgtgcaacaaggaactagagttgctatctgtggaactgttggatcgggagaaagaggaatcaacttaagtggtggacaaaaacagaggatacagattgcccgtgctttgtatcaagatgctgatatcttcctatttgatgatccatttagtgcagttgatgctcgcactggactgcacttgttcaaggagtgcttgctagaatttttagcttcaaaaactgttatatatgttacccatcatgttgaatttttaccttcagctgatcttatcctggtcatgagagatggaaaaataacacagtcaggggattacactgaaattctgaaatctggagaagatctcttggaattagttgcatcccataaagatgccttatcaactttagacatgctggagcgccctattgaaaattttgagagtacatatcatcctggtggcaatgaaagtaacctgtttatagcgggggataagaaagaccagaacgaggaaggagatattcaaaatggtcagctagtacaagaagaagagagggagaaaggccgggttggatttattgtctactggaagtatattatgatggcatataatggagcacttgtgccacttattttgctagctcagataattttccaagttcttcaaattggatgcaatttctggatggcttgggcagcaccaatatctgaaaatgtgaatcctccaatcagtagtttgcagatggtaaatgtgtactttgcattagcaattgttagctcattgtgcatattcattcgatcacatcttcttgtcatgaccggatgtaagactgctaatattctatttgagaacatgcacaactgcattttccgagcaccaatgtctttctttgactccacacctagtgggcgaatcttgaacagagcttccacagatcaaagcacagtggatacaagaatttttgacctgatgggctatcttctatttcctgctattgagattctaggaacagttattctgatgtcacatgttgcatggcaagtcttcatagtttttgtccccattattactgcatcgctgtggtatcaggttcgatatgcaccgcagctgccttttgttctaaaaggcctgacgtgcaccttactcggaggaaagaagacaggtattgttggtagaacaggtggtggcaaatcaaccttgattcaggcactatttcgcattgtggacccatgtattggccaagtgtttatagatggcactgacatctgcaccattggactacatgacctccggacaagattgagcatcattccacaagatcctgttatgtttgaggggaccctgcgaaccaatattgacccccttggggagtacagtgacgagaaaatctgggaggcattggattcatgtcatcttggggatgaagttagaaagaacgagcttaagcttgactctacagtgacagaaaagggcaaaaactggagcacaggtcagcgtcaacttgtgtgtctgggaagggtgattctgaaacggaggaagatcttggttttggatgaggcaacttcatccgtggatccaattacagacagcttgattcaaaaaaccttaaaacaacaatttctcaaatgcacaatgattacaatagctcaccgtatcacatcagttcttgatagcgacaaagtcttgcttctggataatggtgaaattgcagagcatgacgccccagcaaaactgctagaggacagttcatccctattctccaaacttgtatctgagtataccatgggatctgataagtggcgaatgcaagaaagcagctaa

SEQ ID NO: 30816 - DNA, 192 bp, Zea mays
  Peptide Sequence Number=SeqID_72595
atgcagatcatgcagcaagaaattcactttcttaaaaataaggaaagcatacttaaatcagcaaataaaattcttcaacagaaggaatgcatcctgaaagcagcaaacgaagttctccaacagaaggaaaatgagcacaatgaatttataaacaacagattggtcttttctggtttcatctccattggctag

SEQ ID NO: 30817 - DNA, 312 bp, Zea mays
  Peptide Sequence Number=SeqID_72596
atgaatggtggggtggactcatccgagccttcgagcccggcgcgctcgacggcccggatatacgtccagacctccgcggctatcccctgggagtcgtccgagtcatcggacgacgccgggggagagacgagagccggagacccctcggactcggaggagaactcctcctccgagtattccgagtctttttactcctccgatggaggagtcggctcacgcttacgcttgttgttcttgcccatggttgaagatttgggagagaagaaagggaagaggcttaaggagcagcgaagagatgtgaaaaaaccatag

SEQ ID NO: 30818 - DNA, 201 bp, Zea mays
  Peptide Sequence Number=SeqID_72597
atggcgcggtggccaatatccgtgcttgcttggaggaggcggaacattgcgtcgtggtcgggctacgagctcggcactagcgagctgctcgaggacgccctggctggtgccctagaggatttcggagatgacttcggcagtgccgccgaggccatggtcgacatcctccgaccaacagatgtagtcaaaggatccccctag

SEQ ID NO: 30819 - DNA, 555 bp, Zea mays
  Peptide Sequence Number=SeqID_72598
atggctcgcctaggcaaggccttgtatgacaagaaaggcaaagccaaacaaacccaacctcctgaggataacactactacaggagtgaacaagcctgtggagggagaaaccatggtttgtagactatgccacaaggaagggcacaagtcttaccaatgcaaggtgaagaccgaggataagcaaaagctcaagcaaaagccaacaagcaaaatctccaacacctacatcaaccaggtggacaaaaaggccgctacacgatatttgatcaagaagaaaaagaatggaaaggtgatagcaatcaaggccaacaagcaagccaacaagggaaaggcggccaaacgcatctgggtaccaaaggagattatttccaccatgaagagcaccaagaaggtttggatcccaagagggaagtctgccaagtgtgacctacatgacaacggcaaaggcatgaggcagcatgcggacggtccgataacccggtctcacgcgccagcggcagaagtacatgggcgcaccgaactgggcaatgggccctattcccaatctcaaatataa

SEQ ID NO: 30820 - DNA, 717 bp, Zea mays
  Peptide Sequence Number=SeqID_72599
atggcgcggggtgcagtgatcgacgacctgtacggcgtgggtgctgtgatcggcggggtgcacggagatagcacgggcgtcaaccgacgaaggcgcggacggcacaatggagaagcaaacacgggcgacgaggctaggggcaggtatagacgctcgaggtcgaggtcgagcacggacggcaaggtcgggcctagccgccaacgctggaagccggggtgggcacgacagccaacgccgagcgtaggcgatggcatggatggcgtgggcgtggcgttgggcaatggcaatcgcgacggcaggatagtctaccaagtcccaattgtctggcatttcatcacaattcacatgcatatgcatgaaaagcacgggtacagcagcggtgcagccagcaccgatcaccttatgaggatgagctgcaaaataaagcgtggagagttcctgtgcaaggtagcagtcacatgcatgcatatgcaatgcaaatcctctttgctactcattactactctactcccagatgcagttcttgcaacatctagcttcttgttgcttctctatcctacccctctgatgcacaattttgaccgctgcgctgcttgctgttcttgtgctaacgctggtcggcaggatggaacattgaggagaacatttccaaccatcctcattagtatgctccaagtattcagctggcacggcggtggtattgtgcgtaaattatag

SEQ ID NO: 30821 - DNA, 156 bp, Zea mays
  Peptide Sequence Number=SeqID_72600
atggcgcacggtggctctgtggtgaccagtgatgtgccgacgagaaattccttcctcgccgcccgaagattcggccatatgaggccatggtcgcatgcggaggacactcgagagcagccggatcccagcatggagtcccagatgtttgaaatatga

SEQ ID NO: 30822 - DNA, 162 bp, Zea mays
  Peptide Sequence Number=SeqID_72601
atggcgatttggagacgtagcctggcgaggaggtcccacaactcagtgaccacgagggaaatcaggtgtgagacactggagagcgggacccgcggggtagcgacacgcgtgcgtgaaggaactctcgcgggggccctattcaatttccaaattgaattctga

SEQ ID NO: 30823 - DNA, 288 bp, Zea mays
  Peptide Sequence Number=SeqID_72602
atggcggatctgctcgatctcaagatttggcgggtgcggcagacgggattgacgaaggcgtatggggcggggcaggagatcgcgcggcgggccagggtcgcgcgtcgtgaggaaagtgctcgtgcccacctggtgggagcatcaatcggagaaaccagggaccgctcgccagagattctaaggtgccgcggaggtgcaccttgccatggtcagggcaacaaccgcattagaggccagtatgggttccctcctcgtgctcattttgtttccagacagcttcgtaaataa

SEQ ID NO: 30824 - DNA, 762 bp, Zea mays
  Peptide Sequence Number=SeqID_72603
atggcgactcggcacggacgagacgtgaatcttggcagaggagactccaaccatcaccccatggcggccacagacttcgaccccacctccatctccacccgcctgcactgcgcgaatgttgggtgtgatggtgagatcgacgtggagctaaagcacgcaagggaggctatggcgaagaaaggccaggcactacacgaggagcgggacatggtcaagaaggtcgccctcgccacgctcgacatcctcagcgtcggtgctagccgtagtggactctcctcctcccgtgcgaccacggcagccagccacggcctctcccaagcaactgtagcaagcagcagtccccactcggctatcctggcacctagccccagtaactgcaggcagcggcagcgcggtcgccccagagccctccgctctcccaaccgccctccaagagaaccatttggccccctgctacactttgtgcctcttaaccttgggtggatcaagaagttagatcaagtttgttattgtaccaggtggatcaagaacaataacttctgggtttgctcctctattatgtttgacagagaagttgaatcatgtttgaagtacattaaggcagttccatggaacgagagtgaggaagaaaagctgaaacatgtttttgccagatgcactttcgatgaatcaatatgcaagagtgtgggctccaacattgcgcaccacatggcgacgcacgctgccgcagatgggaacttcgggtatttcttaatttcctaa

SEQ ID NO: 30825 - DNA, 270 bp, Zea mays
  Peptide Sequence Number=SeqID_72604
atggagcacctcggaccctcgtcggaaacgctttccgacaagaaggcacccgggggcttcaagcacctgctgatcgccatcgacaaattctccaagtggatcgaggtccgacccttaaccagcatcgggtccgagcaggcggtagcgttctttacaaatatcatccatcgctttggggtcccaaactctatcatcatcgaccatggcacgcagttcactgggaagaagttcctggacttctgcgaaggccaccacatccgtgtggactag

SEQ ID NO: 30826 - DNA, 306 bp, Zea mays
  Peptide Sequence Number=SeqID_72605
atggccgatggcaaaggaggcaagggcaagcacgtccagggggaaggaaagcgcaagcatcctacaactcctccgtcggaggacttcggagactcgaagttctctgaggagaacttctcctctaagggcaacgactccccgccaccggctcccccctcgttgttgtccgattactcagacggcttaatggagttgtcgacggccgagcgggcctacatcagatccatcgagggagcatggcacaataccataagggataaagttgggtgcatctcatatatacgccaaagaagacaacacatataa

SEQ ID NO: 30827 - DNA, 459 bp, Zea mays
  Peptide Sequence Number=SeqID_72606
atgtcccttattgcttcagacttcagctatcttccagacgttagcatacctggtgacagggctccattggtttcatcaaagaaggatgggaagacatcagatcatcgcaactactttgatgctcagggtgacgcggacatcttcttcccaaccgacttccggctcctggagcagatcgaccataactgcgctggcttctcaaaggagcagaagaatcccggcgcattcaaacccgtgaagaagaggagaacgatcatacgtattggactaaaactaactgatgtgtcggccatcgtgcaaatccagcttgatactgcagccttcatggaggagtttggcatgccgctgaagacgaggaccaaagacgggtataatccgcttctcgacgatttcaagaacacaaagttctatctcagcgtccctacacacaacgttcctacccatagcaggaggaactag

SEQ ID NO: 30828 - DNA, 2202 bp, Zea mays
  Peptide Sequence Number=SeqID_72607
atgactggcgtgccattcaatcggtttgcacagctcgagcagttccgcaagaaaaaagcggcgaagaaggccaatgcagctggtgcagagcaggcaaaagtgcctgctcctgatgtagagccaaaccaagcgagcacgtcttcggtgccatgggctgtatatgagaatggcccagagagtgcttccagcggtgcagaattcctgtcaaatgctccggtcaatgtatatacttctgttggtgttagtagtgttagaccccagcaagatgctgttactgatggaggaagtaagttctatgggaacttaagcttctctgatcttgttaatggtcatcatgagaactggagaggcgatgaagcccgtaaaagggatgagcacagccctgacaaggatgtgcaatcaacatctaaattaagtgcctttgggaacagcagtttaactttaccttctactgacaacatgccaagttggggaagaatttctttatcaagtcaagtacatgataccaagcaatctagttcatattcatccagcaccctttttggaaagtctgaaaatgcttactctcaggactactccacaaagagtgatacctctagtcagttgagagatacctccaaagactcttcccaagtggagcaatctctgtatgccagcactcgggattatggcaatgccttcaatagttcaaggactattgttactgtagagcatgatacaaatgttggaataactcggacatctgcagattccgcacctggtgttaattttgaaagacaggatccttttctgtcatctggttatccaactacatacactcgttcaaggccatcgtttcttgattcaattggagtacaaagagtccctccaacaactcaagcctcatatagggagcctgcaaaggctaatcaactatcccacaattcgaattatcagagttcatttgtgaagcaatcaaatcaacaacccacttcaagtaatgctgcagatatttcttttgcatcagaaagtcaggaatatagtcatgaaaaggggtcatatggcagctccaaccatcctgatttctcacttcctaaagaagaaagaagtatacaacatggtaaacaaacattccaaaattttgcaactcatgggaaagatgacgattttgcaacattagagcagctcattgaagatttaacaaaagagaagttttccttacaacgatctcttcagaaatctcaagagctagcagaaactttggccacagataactctgcactaactgacaagttcaaccaacaggcacatgtaatcagccagttgacatctgacatggagagattgcaggaagaaattcaagctcaattgttatcaaacatccagggagttcttggtttggtatctcatacatgtgacgtctctctggctctggagtctgtcaggaccgagtatgctaatgcacaactagaatgcagtgctgcagatgagagggcaaaagtacttgcagctgaagtcattctactagaagataaggctttgagactgagatcaagtgagctaaaacttgaaaaggaagttgaaggtttgcattctgagatttctgcttacaggcgcaaagtttctagtctagaaaaggagcgccagcatcttcaatccactgttgaagctcttcaagaagaaaagaagctcctatattctaaattgaggaacattcctgtgaatgagagggcaactactgtagagaaaccttcagttgataaaaaagatgcatcaaccgtgacagaagatttagatactggggaaatcagctcttcagagacactgaccagcactgttgacatattggaagacgctggaacatctgttttgcgttccaacattgtgtctgattttccttcctcggaacaggtctcatctagcattccagatgatcagcttagaatgattgacaacatcaattctttgatgtcagagttagcagtggagagagaagaactgctgcgagcactgagaattgagtcatccaactgctccaagctgaaggaattgaacaaggacctaacacaaaagctggaggttcagacacagaggcttgaactattgacttctcaaaggatggctaacgagaatgccctggcgaaaccaattgacacacgccccatcaacgaggcaacaatgtatgcggatgaaggagacgagagtatggttccagtgttttag

SEQ ID NO: 30829 - DNA, 348 bp, Zea mays
  Peptide Sequence Number=SeqID_72608
atgggcggaaccgtggttggcagggccatgctccaggcctaccgccaggccatcgtcaaggctggggctcgaacctgggaccttctggttacagacgatgcaaacaaaactggagctgcccaagaagctataaatggtattagacgggctagcaaggccatgactgagcaagaagcccggcaaattcttggtatcagtgaaaattcgacgtgggaagagattgtccagaagtacgacacaatgtttgagaggaataacaaaaacggcagcttctatctccagtcaaaggttcatagagcgaaagaatgcctggaacctttatatcaaaagcctgatgtactgaactga

SEQ ID NO: 30830 - DNA, 454 bp, Zea mays
  Peptide Sequence Number=SeqID_72609
atggcaccccgcaagccctgtgacgacggcgactctcaactcccttacggaagcagggggacgtcagcaaggactcgaccgctccgacagctgtccctccgccaggctccgttgctcctccgacagccacgacatcacaccagcagggtgccaagatctctccggctgccacatcggcatggccttcttagagaaggctggccgcgcggggacgaggacgggacaggcgctctcttggggccgctcgcttccctcacccgcgtggacgcttgtaacccccctactgcaagcgcacccgacctgggcgcgggacgaacacgaaggccgcgggatttccacctctctcacgcccgtctccggccacctcgctttccccccttcgcgctcgcccacgcgctcgacccatctgggctggggcacgcggcacactcactcgtcggcttagggacccccg

SEQ ID NO: 30831 - DNA, 696 bp, Zea mays
  Peptide Sequence Number=SeqID_72610
atgacggcagcttcagcgcctccaatctacttctgcgccgcccccgctttctgcccttgccggccccacgccaagcctgacagcaaggatgtcgatgaggcccgcgtgacgatggctcccacaactccaatctgccttcgcgtcgccccaactccccgtccatgtcgagttcgagtaggacgaggacgaggagggcagcgccaacaaggtggaagggatgggctcgacaccttcatgctcttctacaccgtcttctctgtcatcgaccccaagtgcgacgcccgcgactcacacgtcccgatgagcaccaaccaacggcaagaccccatacaagagggccagtccatcggcgtcatcgccaacgacgttgacaagaacggcaagccacacaagagccgctgcccgccctcgtgcggtggaaagactcagagctgttattggggtgccatgttttcattagaggaaagggttccatcaagatccagggaagcatggcttacctatcatactcttgccaatatcatactcttgccaagggagcctctgcatgggctcaacacttttcatcttgctggaaggggtgacatgaatgtaactcttggtataccccggctgaaagaaatactgatgactgcatcagataatattaggacgcctgttatgaagtgtcctttgctcgaacatatttctgagtga

SEQ ID NO: 30832 - DNA, 169 bp, Zea mays
  Peptide Sequence Number=SeqID_72611
atacagtcggcatgataaacggtccaagttgcctgggtggatactctcgcatttgcatgatgcgcacctaaatctgagcactgatatggctctccatatagctcgtgaggagcgctatagtatcaggtttgtggcgttcacaacttacaacctgcatggaccactgtag

SEQ ID NO: 30833 - DNA, 1869 bp, Zea mays
  Peptide Sequence Number=SeqID_72612
atggccgcccccacgcagaggctgagcgcattgccagagcagcgttcgatgccgggatatgctctcaccggagcaacatccgaggcgggccgggctcgccgaattaggactgcgcccgtaccgtggtcggggcagcgcccgcacgccaagaagcgtcaagccagggacgtgccatggccgcgctctggatgggttgtgctcgcgcaccagggatgccaaggaagccttctgcgcgcgctcgtcggcgatgagcggttcgttgttgccgagtggtcgctcacggtcgccgcgactgacgtgcaccacggtggttcctcgccagactctacaccgcccaccatgggatgtcgtctccgccgtgcccatgcaggtcccgaacctgcggccttcgtgcgctcgatggagattagccatcgccggttacaatcagactgccatgaccgaaaccgctcggtggagagcaaaggtgctgataacgttttgaaggagaactctgtttatatacaggtgaaggggtgcgttctcaaggggcaatctgagttgtctctggcagagatggataggctcgacggctctgcccgcctcctgctcgtctctgatctggaccagacgatgatcgaccatgatgaccgggagaacctgtcgttgctgaggtttgaggcgctgtgggaggcggagttcgcccaggactctctgctggtcttctccacggggaggacgccggtgagctacaagggcttgcggagggacaagcctctggtgacgccggacgtgaccatcatgtccgtggggaccgtgatagcgtacggcgaggagatggtccgtgacgtcggctgggaggagcggctggacagcgactgggacagggccgtcgtcgtggaggagacggctaggctgccccagttgacgcgcatgcagccggagaggaaccagggtccccataaggtgagcttcttcgtcgacaagcagggtgctcaggaagtgatggactatctccccaagaagctggagagacgtggggtggatgtgaagatagtctacagcagcgggaacgccctggacgtgttgccacgaggtgcaggcaaggggcaggcgctggtgtacctgctcaagaaactggattccaacgggaagccgcccaagaacaccctcgtctgtggcgactccggaaacgacgccgagctattcggtgtgccgtctgtacatggagtcatggtctgcaacgcccaagaggagctggtccagtggtaccaagagaacgcgagggacaatcctaggatcatccaggcgaccgagagatgcgctgccgggatcatgcaggccatcgggcacttggggctagggcccaacgtctctgcgagagaccttgttgggttccctgcttattatcccaacaacaacaagaagggggcagctgccaccgctaagcccgcagatgtggtggtgaggttctacgtcctctacgagaagtggcggaggggggagctccccagttcgaattatttttcttcttcgtcagccatgcgctacttgaaaagcatcactcatccgaacggtacaatcattcacccttgtggatcggagcgttctcttcacgcgtctgttgacgctctgctgagttcttgctacggggacaagaagaacttccgggtgtgggtggacaggctggtgacatcgcccatcggcacaagcagctggttggcgaggttcgatagctgggagatggaaggtggcgttcggtactgctgccgcactactattctgctcaacatcaagcctgagagtccagagggcctcgagctcacacacatccacaagacctgggtccaagggcactctgcagggccagggagtgcgctcgtcttctag

SEQ ID NO: 30834 - DNA, 966 bp, Zea mays
  Peptide Sequence Number=SeqID_72613
atgtcgaccaagggtaggaccatgcggaccaaggtggagaagcggatggcgagggagaccggccgcacgcagcgggagctccgccgcgccgtcaagctcaggaagaagctcatgacggaggacgagaagttcatctacaacctgcgcagggccaagaaaaaagttgctttgcttctacagaagctcaagaagtatgagctaccagacttacaagctcctcgtcatgatcctgagctgttaacagctgagcaactacaagcatacaagaagattggattcagaaatagaaactatgtgcctgttggagttcgtggagtctttggaggtgttgttcaaaacatgcatatgcactggaaattccatgagacggtgcaagtttgttgtgacaatttcccaaaggaaaaaattaaggaaatggctgcaatgctgacaagattgagtggtggaatagtgatcaacattcataataccaaaacaatcatcatgtttcggggaagaaactaccgtcaaccaaagaaccttatacctttcaacacacttaccaaaaggaaggctttattcaaggctagatttgaacaagcgcttgaatcgcagaaactaaacatcaagaaaatagagacacaactccgtcgtaaggggatcaatccagaggacccagttgctatggccagcatccagcgtgttgcctctacgttcttccgagccatagatgagcagcaaggtactccctatattttccgcggggacgcacaagcttctgctgggactcctgaaataaaagaaccacgtgatgaaccatctgaagatagtgaccaggaggagcttgacaggttcatctcagagatagaaactgcagcagagaagcaatgggaggaagaagaggctgcagagaaagaagaatcttcaagaatgcggtgttgggagagggaagatgtaggtgaccggagggagtgcgtgaagttatga

SEQ ID NO: 30835 - DNA, 588 bp, Zea mays
  Peptide Sequence Number=SeqID_72614
atgagcctggagaccattgagcgcatgcttggtagttttggagaggcgacttcgattgccagggtgtcgatgacgcgagattttgtcccttttggccatgtggaattggagcagttacgcgcgagggccgcccatctcgaggtcgatcgacttcaaggtgaggcgtcgagcctacgcacggagcatgacgttgcgcgaggtgatgcaaatcgcctccgagaggagaggtctcaactccaaggggtcctccgcgagacaagggccctggtcgaggaggctaagtcgactcttacgcttatgaggaatggggtggtgatggatcaacccattctattccccaaaccaaataaaaaagtgaggagtgagaagaagatggatcacttcattcctcaaatcaaacacactcttagggaggccaacgctcgtttggagggggcaaactctgagctcctaaaagagcgcaatgcagtcgaagatggcttcgcctccggtcaaagcgatgaggacctggacaatattgaggagcaggtccgcccttgcctggtcgatcatgggctaggtcaacctgatgttcctcatgagtcatga

SEQ ID NO: 30836 - DNA, 285 bp, Zea mays
  Peptide Sequence Number=SeqID_72615
atggcccgtcagaagccaatatatgagtactccggcgttcttgaccccgatcgccattccactgatccactcgcgctatccaaaattgaagcccgggtcagagtcgtcattgcattgtcgtcggggttcttcatggaagaggattcaccccttcctttgtccaaggatgtttcaagcagtttactcgaggtgagcgcaagccacatccaaaacaacaaaccaagtagggccgacaacacttgttctgctggtgatcttgacagtgcacacgaccacaccacatag

SEQ ID NO: 30837 - DNA, 1848 bp, Zea mays
  Peptide Sequence Number=SeqID_72616
atgcggtttgacctggatggcctgcccgtgcacttcccgtacgcggcgatctacccggagcagcacgcgtacatgggggagctcaagcgcgccctcgacgcgcgcgggcacgcgctgctcgagatgcccacgggcaccggcaagacggcggcgctcatctccctcatcacctcctactccctcgccaacccggcccgcccgctccgcctcatctattgcacccgcaccgtgcacgagatggagaagaccctcgccgagctccgcctcctcttcgcccacctcccgcccgcggcctcccgctccctcctcgcgctcggcctctcctcccgcaagaacctctgcatccacccgcaggcgtccgccgccgccgcccgggactccgtcgacaccgcctgccgccgccttacggcctcctgggtccgcgagaaggcctcctccgacccggactccaccccgctgtgcgagttctacgagacgttcgaccgggccgctgccgccggcgacctcgcctccttcatgccgcccggggtgtacaccctggcagacctccgcgcgctcggaagggagcgccgggtctgcccttacttccttgccaggcagatggtcaagtacgccaatgttgtggtgtacagctaccagtacctgctcgaccccaaggtggccagcattgtgtccagggagatgcagaaggagtgtgtggtcgtgttcgatgaggctcacaacattgacaatgtctgcatagaggcgctgagcgtcagcatccgcaagcagacgctggaaggcgcagagcgaaatctgcggcgcatctcgcaagagatcgacagctcacagtattatgcttcttgtgatgaagtatcggatgcttggctcgcgaatccgtctttgcctgatgacatcttgaaggaagctgttcctggaaacataaggagggctgaacattttcttgctgtcttgcggaggcttgtgagattccttgatggccggcttgaaacagaaaatgttgagaatgaaatgccagtttcctttgttgcctcaatccattcccaggctggaatcgaccaaaaaatgctgaggttttgttatgaccggctacactccctaatgatgacattagagataactgatacagatgagttcatgcacatacagaccatatgtgactttgccacactgattggaaacttatacacggggcttttctattataatagagccctgagttgccatgatgcttcactcgcaataagacctgtttttgatcgtttcgaaacggttgtgatcacttctggaactctcagcccaatagatctttaccctcgtctcttgaattttaatcctgtcataagcagaagcttcaccatgtccttaacaagagattgtatttgtcccatggtcttgacccgaggaagtgatcagctacctgtgagtacaaagttcgatatgcgtagtgatcctggtgttgtgaggaattatggccgcctcttgctggaaatggcttctgctgttccagatggcatagtttgcttttttgtcagttattcctatatggatggcattgtcaacagctggcacgaaatgggaattctgcaggacatcatgcaacataaattagtgtttatcgaaacaccagatgtcgttgagacaacattggctcttgataactacagaaaggcatgtgattgtggaagaggtgccattttcttctctgttgccaggggcaaagttgctgaaggtattgattttgatcggcactatggcagattagttatcatgtttggtgttcctttccagtacacattgagtcggatattctctaggttggagtacctgcgggaaactttcagataa

SEQ ID NO: 30838 - DNA, 165 bp, Zea mays
  Peptide Sequence Number=SeqID_72617
atggcgaaggccagaaagacgagcgagacttccgacagcggcgaaaacaatggggctggtgtcagacgaatatggggaggaggcgtctgcttccacaccctccgcccgagaatggggtggcacggaggcggaggcatgaggggagagagaaaagaagtaggatga

SEQ ID NO: 30839 - DNA, 495 bp, Zea mays
  Peptide Sequence Number=SeqID_72618
atgtcgtacttggagatatttgtcggcaccctcactttcgtagggatctgcgccttgcggattgcgtgcccgaaggcgcgtggccctggcctagacggtctggggcttcactggtgccttcgttcgggtggctattcaacctcctcatgctctcgtcaccgattgttgagaaggtatcgaccaggaggttataggccttattttaggtaccccgatcctgggtacccgacagcagccctcgagccctcaaaatgttacgtgaatggcgacaccaacacatgtcgctcgttggtatacatcccagcccaggagagatctagcaggtcgaggcacaacactcctactgctattgggccagcagggagcacacaggagcaggccaaggcgcaaggcaagatgcggctgacgggcatggctataccgcactgcgtcactgccagctgggtacccgaccgtattttacctgtatctgacctggagtatccgggtgcataa

SEQ ID NO: 30840 - DNA, 765 bp, Zea mays
  Peptide Sequence Number=SeqID_72619
atggcggggcaggggcagcgcctgaacgtggtgccgacggtgacgacgctgggcacggtgaaggcgcggctggcgggcgccgcccgcggccacgcgctgctcaagaagaagtcggacgcgctgacggtgcagttccgcgccatcctcaggcgcatcgtgtccgccaaggacgccgtgggcgacgccatgcgcaccgcctcgctctcgctcgccgaggcgctgtacgcggccggcgcgccgctccgccacgccgcgcagcagtccgtgtccggcccggccaggctccgcgtgcgcgcgcaccaggataacatcgccggcgtccgcctcccgcgcttcgagagctgcctgggcgccgccgacggaagctcgtcgcccgcgtcgctcgccgggctcgcccggcggcgggcagcaggtgtcggcctgccgcgcggcgcacgcgcgcgcgctccaggtgctggtgggagctggcgccggctgcagacgtcgttcctcgcgctggacgcggccatcaagaccaccaaccggcgggtcaacgcgctggagagcgtggcgagctgggacgagcacgagcgggaggagttcttccgcctcaagaagatccaggggtacaagcagcgcgagctcgagcgccagaaggaggccgccagccgctacgccgaggagaaggccgccggcgaggtcgcgctcaagcgcggcgtttccgtcgccactgcggagagcatgctggagaacggcgacagggacgaggaggatatcatcttttga

SEQ ID NO: 30841 - DNA, 882 bp, Zea mays
  Peptide Sequence Number=SeqID_72620
aaggccccggagcgggcgcggcgagccccggcaagggagtgcagctcgacccctcgcgagggcgaacgagtaggggcactcggggagtcgctcggctccctggcggcgcggtcaaatcgccctgggcggcgacgacggctcgatctgcggcgtgttggctggtgtcggcgcaagaagctgggccggcgacctggatacaccgagcagcgcctggatgcgcgcgggcctcacaagggtcgcagcgccgcagccctgctcctcccgaccttgtggaggagcgccttgacctggccgcgcaggagcgcctccccggaggcgggcgtgcgacgcggggccctgcggcgggtcttagcgcgggagaagagggcggcggtgtccggcccggcggcggcgctcttctgggaagatgcggcggctgctgaatcagtagcaactcatgatggtatcttcggaacagagtataatataaggattgaccgaggagccgtcatctttcgtgagctgcaccctgaccctccccacctggaagaaatcccgagggtggggtttggacaggccttggcagcggcggccctcggcgaccgtcttcttggagttgagttcgtgagaggtcggccttcctttcccttcactagtgacctccttgcgccgagggtggttctcgcacctccgccgctgaagttctctgcggccgttgatgcagcctgtgacaccgtgagtgcttctgctgccgcctgtgtggtagctggtgatctctatgccacatcatcagtaggagacattggccaaaatactatcagagttgattatgccagttcatatggttgttctattattgagcccagttatggtgcatatggctgtttgttgctgtttcattga

SEQ ID NO: 30842 - DNA, 1209 bp, Zea mays
  Peptide Sequence Number=SeqID_72621
atgaggaatttctcgttggcgggccgtttgactcttgttaaaacggtgatcacctcgcaagcaatctacatgctatccgcccttaacgcgcccaaggaaattagaaatctccttgactccaaaagaagacagttcctttgggcgggttcagataggctaactggaggaaaatgcaaagttaattggaagcgtgtggcgaggccaaaagccctcgggggcttgggggtctcgcatttgggtgcttttgcgcgtgccttgcgcttaaggtggttatggcaaatttgcacatctccttataatgcctggggaaatttggaaacgccttgcactaatgttgattgtctgctttttgcggcatcaacagaaattaagattggagatggctccaagatatcattttgggacagcgcttgggcagggggaaggaggccgaaagacttggcacctagtctattctccatatcaagacataagggcaaatcactagcaggggcggttagggacaatgcgtggatcacaagtctcgcactgctaggcagtgtaattacgacccaccaccttcatgagttctttattctttggtccgaggttcaaaagatccagcttgacccaggggctcaggatatcatcacctggaaattcactgcagaccatcgctactcagtgaaatcagcatatttggcacaatttttaggctcagttcgcactaacttagacctcatcatttggaagaattgggcgcccccaaagtgcaagtttttcagctggctagcgattcaaaatcacatttggactgccgaccgtttagctaccagaaattggccccattccccgacttgtgttctttgtcaaggtgttctggaatcaggtctacatctatttgtggaatgctggttcactaaacagatttgggaggagattgctgtttgggttgccattgaggatttgaagccgtctaactgggagctatctcacacgctgatgcattggtgggagaacttggctatgatatcggggtgtagcagaaaggggctcagatcattgctgatccttgttaattggataatatggcgggaaaggaatgcgaggacttttgatcacaggttttcgtccagtcagcagatcataactctgattaaatgcgacgcggtagcctggattgcagccggggctaagcaattagctaccctcttatcctcgtcaacttag

SEQ ID NO: 30843 - DNA, 336 bp, Zea mays
  Peptide Sequence Number=SeqID_72622
atgcccacgtcgcgggagtcggccgtgttcaccgtcggcgaccgtggcggctggagcttcagcaccagcacctggactaatggcaagcgcttcaaggctggggacgtcctagtgttcaagtacgactcgacggcgcacaacgtggtggcggtgaacgcggctggctacaaaggctgctcggcgccgcgaagtgccaaggtgtacacgtccggcaacgaccgcgtcacgctggcccgcggcaccaactacttcatctgcagcatccccggccactgccagtccggcatgaagatcgccgtgccgcgggctacatacatctacctatcgactgcctga

SEQ ID NO: 30844 - DNA, 2052 bp, Zea mays
  Peptide Sequence Number=SeqID_72623
atggcctttcggccactcgaggtgtggaaccgttgggccatccagatcctgctgctgctgagcctcggcatgcacgtcctcctcctacccctcgccggaatccgtcgacgtcgagcccctatgctgcttcgggttcctctgtggctggcgtaccacctggccgacaccgtcgggatctacgcgatcgggctcctgtccctgagcagcgcggtgcgcgaccaccggctgatgccgttctgggcgcccttcctcctcctgcaccgcggcggcccggacagcatcggcgcctacgcgttccacgacaaccagctctggctgcgccacctgcaggtcttcgtcgtcaaggtgctagcggtcacctacgtcctctacatacatctcccgaggccgccggccgctagaggcgacaccttccttgttctggccgccctcctgatgtgggccgtcggcgtcgccaagtacggggagaaggtggcggcgatcaggggcggcaacaagagcagcatccgtagctctctcacgaaggaaccgcccgccgccaggcaccaccacatccaccactgggaccacggcctgccgagcaaggacgccgccgtcgacgaggaagaagcttacctgcgccaggcacatcacatgttccacatctccaagcgcgccgccgtggattcctggctggagaaagaccccgagcacaacaccctggagatgctcagggcgctcaggaagcaggacggcaggggcatgtgggcgttcgcggagctgcagctctccctgctgtacgacgtcctctacaccaaggccgccgtgatccacacctggccgggctaccttgtccgtctcgcctcgtctctcgccgtcgccgcctcgttccttctgttccgtttcagcgacggcggccgtcgatacgaggtcgacgtggtcgtcacctacgtcttgctggtcggggcgttcgggatggagatggtgtcggtgctgaacgcgctgggctcctcgtgggcgtacgcgttcctgtgcaccacgcggtggagctggctccggtacgcggctctgtgcaccggaagatgggaccgccttcgtcagcttgtcaagacaatacagggaagatctggcagcattaggaggtggtctggcgagatggggcagtacagcatgttgcacttctgcagccgtcacacaagggctcacagaccccttgcaggtaggatggccatggcgctgggattcgaggactggtggaaccggaagcattactcggccacaactcacatctctgacgacctgaggcaggggctgttccggtacgtgcagaggctgaccgagacgggtctcaactcgcagggcgtgatcaggaagagctggggtcaggaggcgcttgaaagagaggacaaggatttgtacgaacgcatcaagcgagacaggaacctcggcgtggagttccaggagggcgtcatcatctggcacatcggcacagacatcttcctcgccagaagcagcttagaggcaggagatctgctgctggtgaagtcgatcaggaccctgtccaactacatgatgttcctccttgtgaaccacccaaacatgctgccaggccttgcccagagcatggtgtaccggagaacctgcgacaacctagccgacaggtgcagggatcatcagcaaggacatcggattagcagagatctcggcacggtgctcaggcaaatgttcagcctgcaggatggccctgctagtgtcactggacaaccgagccatgtctatgagcttgccagcaacgtgtatgaggaaaagcccaaatacagccagagtgtccctcgcctctgctacgcccatggagtcgccgtagagctgcttgccagagtgaaggagaaaggcgtcgaggccgtcttgagattggtccttgacgtgtggatggatttcgtggtgtatgcggccaatcggtgcagcagggagtcccacgccaagaagctcggcagtggcggcgagttgactagcgttgtctggattatgacagacttcctcaatcaagaagcttatgcacgacgcaaagattga

SEQ ID NO: 30845 - DNA, 483 bp, Zea mays
  Peptide Sequence Number=SeqID_72624
atggccggcaacaaaggtaagggcaagcatgaccaaggggaaggaaagcgaaagcgccctccgtctcctccgttggatgacttcggtgacttggagttctcggaggagcacttctcctctaagggcgacgactctcctctgccggctcccctctcgccattgttcgattactcgggcgactcaatggggttgtcggtggcggagagggcctacatccgatccgtcgagcgagaggaggactccgagggggaggactatgaggaggatgactccgaggaggaggacggtggcggcgacgggagcgactatgagggcggtgacaagggcggtagcagtggcaatgaaggcagcgcaggagtcagcggtgctggcggcggcgacgacaacgactatgacgacggcgatgagagcggcgaaggcagaggcaacgacgacagcaacggcaacgacgacagtgtcggtggcagggcgccaccagcatga

SEQ ID NO: 30846 - DNA, 549 bp, Zea mays
  Peptide Sequence Number=SeqID_72625
atgagggagaggatggaggcgtcgctttccaaatcgccggagagtcgccaggagcggaggagccgaggagtcgcggagcattcgagagatagtgagagatacagatccatccaagggaagggaacgaaccgagggttgtcctgggtcactggtgacgaggcaaagctcaccgaggcaacagacatggcgagggctcgacgacgaccgcagaacaagcacgggaccacgacagacagtgacgatgtcttcgctggtgcgcgcgacgtgaggtcgtgcgtgcagacggttgggagagacgcgtccgacaagcggagcccatggaccagcgagagcgggcgagcgaacgggcattcagcgctgacgcgtgggtcccacgggatagagagagagcagggcgcatgcgcgaatgaaactggcgctgataggtcggccccaccgggcagagggagagggggagtgagagcgcgcgagcgcgggctagcgctgataggcggggcccacctgtcagggagagtgagcgcgcgtgtgcggcttgctgggctgagctag

SEQ ID NO: 30847 - DNA, 369 bp, Zea mays
  Peptide Sequence Number=SeqID_72626
atgcgcagcccgcctcccctgctgagcgccacacccagccccttcctccatggcttcctcgtgcgcgcgcatagcccaggtgcggccagcggccgagcaacccgcccctactggcgtccctccctgcgcggccggccagcaggccacatcgcgtccgtgtccgcaagttcgtcgcacccacgcctcgccgaccagcagttgctcgggtgctcatcaatgtcgcgccacgaccccgtcgagcgcctccacccatgctccatccttgtcaacgtcgttcgccagagcagcgtctcgccgtgggatacgtcgtcgcactattatcgtcgctgcgcagcagggtctacatcgctcccatcatcgccgaggtga

SEQ ID NO: 30848 - DNA, 1305 bp, Zea mays
  Peptide Sequence Number=SeqID_72627
atggctatggtgtatattcgttctgccttcatcctcatattcttgagttcaccctgtcaatccaacgaccagctgactcaaacaaagccactcttgctcgaagacacgctcatctcggagggcggggactttgctcttggcttcttttcccctaccaattccagcaagaagctatacataggaatttggtaccaccgcgtcacagaacgcacagtggtatgggtcgccaaccgtgacaatccaatcaccacaccttcagccatgctcgccatcaccgacaatttagagctagtgttatcagactcccaaggacacactctttggatggcaacaggaaacacaagtggagatgctggaggagctgcttctgcggtgctactcaactctgggaactttgtccttcggttgccgaacggcacggaggtatggcatagcttcgatcacccgaccgatacaattcttccaaccatgaggatcctcctaagcttcaagacacaaccggcaacacgtttgattgcttggaagggccctgacaatccgtcaactggggatatttcttctggcatggattcaacgaaccttcagatgttcatttggaaaggggcactgccatactaccgtttccctgttgttaatgatatggcagtcgccggtgctatgtaccagcagagcaatggaaacgccgccatcatgtatgaaacgagggtgaacgcaggggatgcgttgtattatacgtacacagtctcgtccggttcaccctacacacgcttttcacttgactacacaggcaaagggagattactgagctggaacagcaccacatcgtcatggacagtcattatcgagcatcctcatagctgtgatctctatgcttcttgtggtccattcagctactgtgaccaaatggggccactaccgacgacatgccagtgccctgatgggtttgagctcctcaacagtctaaatttctctagaggatgccggagaaaggaagagctgaaatgcggagtggggaactatttcatggccatgtctagtatgaagcttcctgacaagttcttgcacattaagaatagaacctttgaccagtgtgctgacgagtgcactagaaactgctcctgtatggcatacgcctatgccaacctaagcagcattggtgctgtgggtgacacatcaaggtgtttggtttggagcggggatctcatcgacatggagaagaacagcttttcagaggtcttgtacatccggcttggtggatctggtacgtgcattccgaacacctcatccttctttcgtcaaaggtga

SEQ ID NO: 30849 - DNA, 1059 bp, Zea mays
  Peptide Sequence Number=SeqID_72628
atgcttggagcccttgtctggacatgtaaaagcagaggcaaacggcaaaagaagagagttcaaaagagaaggatgctagaatacttgagttctactgatgacgctggggacaagaacataaacttcccatttattagctttgaaaacattgtcacagcaacagataatttctctgaatctaatttgcttgggaaaggaggttttggcaaagtgtacaagggaatgttggaaggcacaaaggaagtagctgtcaagagacttagcacgggttccggccaaggcaaggaggagttcaaaaatgaagtagtcctaattgcaaagttgcagcacaagaacctagttaagcttctcggttgttgtattcatgaagatgagaagctgttagtttatgagtacttacccaacaaaagcttggattacttcctctttgcttctgcaagaaaatcaatgcttcagtggccaacaaggttcaagataatccagggggttgctagaggaattatgtatctccatcatgactcaagattaactgtaattcatcgagatctaaaagcaagcaacatcttgctagataaggagatgaacccaaagatatcagatttcggcatggctaggatattctctggtgatcagctccaagcaaatactaaccgagttgtagggacatatggctacatgtctcctgaatatgcaatgaaaggtgcattttcagttaagtctgacacctacagctttggtgttcttatattggagattgcatggaacatgtggaaagatgggaaaccagaagattttcttgactcatctgtaacggagagttgctccctcgatgaagtttcacgatgcatccatataggactcctgtgcgctcaagacaatccgagttgcaggccactcatgtcaacagttgtgtccatgctggagaacaaagcaacaccactgccaacaccgaagcaacctaaagattttgcacttcgggactacaatcctggaaacgaaggtgtccacagggaattgtccgtaaatgatacaagtctcactatggtggagggccgttag

SEQ ID NO: 30850 - DNA, 301 bp, Zea mays
  Peptide Sequence Number=SeqID_72629
atggcgagttctgcgctgcgatccaatcgttcctgggcagcttatatacccatggagggcagagtccgtgtgggaggcgctaggctgcggaacgaggtcggacggcggagacgaggtcgaggtctgcggcctcctcagcttgcgcaaggcggcctcctcggcgactcgtgcacggcggggcagctgcggacgaggtcggactgcagggacaagctcgctgttgcctcctcagctgcttctcgtgagtacttctttttctttcattcttgccttcgcatccaccacccgcgcctcgctgcag

SEQ ID NO: 30851 - DNA, 1368 bp, Zea mays
  Peptide Sequence Number=SeqID_72630
atgacgacctttagcaaggctagcaggttgtgtggtgcagtgactatgcaatcaaaacagttgtggagtctactactctcgagaatcttgcctaagctgctcggttttcctggtattttgctgaagaaattccgaaaggaaggtgtgatggaattggatgctgctgcattgccagagctgccacaggatgtgttgatggacatctttggtacacttgaggtccctgacctcatccgtgcaggctcggtttgctcgtcatggcatgctacctacaaatgcctgctcgacctcaggcaatacaagcaaccccagacaccatgcttgttctacacttgtgaatctgccggtagcaatgtagggtttctatatagcctcaaggaaaataggtcctacaagttaactctaccggagccacccatccgcagtaggttactgatcgggtcctccaacggttggttgattactgcagatgagaggtctgagctgcaccttatgaatcccataactggagaacaggttgcacttccctctgtgattaccatagagcatgtgaagccaatctttgatgcatcaggtactatccatatgtacgagttgtcatatgagacaccaccagacctgtttgatctcggcgatctgcgcgatgagctctacttcaaggcatttgtgtttcccgatccatccaccactggaagctacatcgtggttcttattcacgagccatattcacggctttcgtttgcacgaccgggagatgacaagtggacctgggttggacaaggtagccaatataaagactgcacatatgtggatggtcttttgtatacagtgaattactctggagaaattgatgcgtttgattttaccgcgtcccctgttaaaatgacagtaattatgaaagagctgaagtatcctgtatgtgaaaacatgtacattattcaggctccatggggtgatctgttgcatgtttggaggactcttggcgttccacccaatgctccgccgtgggtccctggaaaatgcttgttcgaaaccttaaaaatacaagtgcataaagtggacttggaagcaaagcaacgggtggaaataaacaggttgcagtgtgatagtgttttatttcttggccacaacgattcactttgccttagtgctcaagtacatccagaactcaagtcaaatcatgcatacttcactgacgattttaaagaagtgactgttttatttaaaaattgcatacgtgatatgggggttatggacttggaaaatagtgtcaacaaggaaattgtctctcaaatttggtccaactggccctgtcccacttggataacacccaatcttatgaagttgaatcaggcattcaacagatag

SEQ ID NO: 30852 - DNA, 333 bp, Zea mays
  Peptide Sequence Number=SeqID_72631
atgcccgtgttcgacatgctcgagacgttcctggtgaagaaactccggttcaagccaggcatgcctctccgtttgatagcgcgctcgctctatgttgtgctgacagctctggttggcatcgccgtgccgttcttcggggggctgctagggttctttggtggcttcgcatttgcgccgacaacctactacattaagaagccaaagaagttcagcctctcttggttcatcaactggttctgcatcatagtcggcgtgctcctgacggtgcttgcgcccattggtggcctccggtcgatcgtcgtcaacgcctccacctacaagttcttctcgtga

SEQ ID NO: 30853 - DNA, 1056 bp, Zea mays
  Peptide Sequence Number=SeqID_72632
atgggggagcttatcgatgcagagaaacttagtaacacatttggtgagaacctatatttccgggtccccacctcaccagagcttaaggattttaccagttcaccttgtaaagctttaaatgctcatgttaccaagatgtcttgctcacagaagaaccatttgtctaatgttaggtgtggtcagaatgaaatgtttttcaagtgttttctctttgtggatcacatttatgcagtaagcaagaagaagagcactgtactaaagattgtacccgtggctacggcgaacttgggactgaaaaatctagatcttccatcagttagctttgaagacatcatcactgcaacaaataatttctctgagcacaagttgctcggggaaggtggttttggaaaagtttacaagggagtgctggaaggtggcaaggaagttgctatcaaaaggcttagcaagggttctgttcaagggatccaggagtttataaacgaagttattctgattgccaaactgcagcacagaaacttagtcagacttcttggtttctgcattcatgaagatgagaagttacttatctatgagtacttacctaacagaagcttagatgctttcctttttgatatgtgtcccaagatatcagattttggtacagccaggatttttagtggaagcgaacaacaagtaaatacaacacgagttgctggaacatacggttacatgtctcctgagtatgccatggaaggctcattctctgttaagtctgacacctatgcttttggtgttctgctacttgagattgcatggagcttgtggaaagatggaaatgcattggaattggtcgactcatcaatttctttagggcttttgtgcgtccaagaccctccaaatgcaaggccactcatgtcatccatcgtgttcatgctagagaatgagacagctccacttcctacaccagaagaacctctatattttacagttaggaattacggaactgatcgatcaaatgaatacatgcagaggtctctgaataacatgagtatcacaactctagaggcgcgttag

SEQ ID NO: 30854 - DNA, 2133 bp, Zea mays
  Peptide Sequence Number=SeqID_72633
atggcatacctttacctgcctgttttcatattcttgctgtccatggcttgttcatgccaatccgacgacaggctaacacctgcaaagccactcctgccgggcgacatgttgatctcacatggtggagtctttgctctcggcttcttctccctgacaaactcaagttcgagttcatatgtcggcatatggtacaacaacatccctgagcgcacatacgtgtggatcgccaaccgcgacaacccaatcactacagatgtgccagggacgaagctagcttttaccaacagttctgaccttgtcttgttagactccacaggccacactatctggatgacgagaagcagcatcagtgcaggaggcggtggaactgctgccgtcgtcctgctcgactcggggaacttggttatccagtcgatagatggtactgccatatgggagagctttgatcacctgaccgacaccgtcatccctggtgtaagtttatcgttgagctcgtctgatgctgctgctagtgctaggcgccttgttgcctggaaggggcctgatgatccatccagcggcaacttctccatgggtggcgactcaagctcagatctccagattgtcacttggaatgggacgaggccattctggcggagagctgcgtggggtggtgaggtgacattcggcacattcgaggacaacaccagcttcacgatgtacgaaacaataacaggcggcacaggggatgactactacatcaaactcaccgtctctgatggcgcaccgatcatacgcgtaagcctggattacacgggcttgtttacctaccgaagatggaacctcaaaacatcctcttggacagtctttgtacaattccccagttcagcctgtgaccgttatgccttctgtggcccgttcgcctactgtgatagcactgagactgttccgtcttgcaagtgccttgatgggtttgagcccattggtcttgatttttcccaaggatgtcggagaaaggaggagctcaaatgtggtgatggagatacattcttaaccttgcccaccatgaagactcctgacaagttcttatacatcaagaatagaagctttgaccagtgcactgcagagtgcagcaacaactgctcctgcacagcgtatgcttatgataacctgcaaaatgttgactcgacgattgacacaacaaggtgcttggtctggatgggggagcttatcgatgctgagaagttcggtaacacatttggtgagaacctgtatctccgggtctccagctcaccagtaaacaagatgaagaacactgtactaaagattgtactgccggctatgattacttttcttcttttaacccacatgcatatggcttctatgcaagttaagaggtgttcgtttctgctagggaaacaccaaacagggaatgttcagaacaatctactatgcttgaatcctcccaacgaatttgggaatgaaaatctagattttccatcattcagctttgaagacatcatcattgcaacaaacaatttctctgattataagttgcttggggaaggtggttttggaaaagtttacaagggagtgttggaaggtggcaaggaagtcgctgtcaaaaggcttagtaagggttctgtgcaagggattcaggagtttagaaatgaagttgttctgattgccaaactgcagcacagaaacttagtcagactccttggtttctgcattcatgaagacgagaagttacttatctatgagtacttacctaacaaaagcttagatgctttcctttttgatatgtgtcccaagatatcagattttggtatggccaggatatttggtggaagcgaacgacaagtaaacacaacacgagttgctggtacatacggctacatgtctcctgagtatgctatgcaaggctcattctctgttaagtctgacacctatgcttttggtgttctactactggagattgtaagcagcttaaagatcagctcatccctaataaactttccaaacctcattgcttatgcatggagcttatggaaagatggaaatgcatgggaattggtggactcatcaatttctgtgagttgttcacttcaggaactgcgtacaattacactagccattcgtgcttgtacatga

SEQ ID NO: 30855 - DNA, 459 bp, Zea mays
  Peptide Sequence Number=SeqID_72634
atgataaatcccaatggagataaagtggatgatgccaatgacaagattccaaccccaatagtggtgaaaaagaaggatgagtcacatggatatctgctgaatggaatgaaaaacaacaagaagactaggagaatgtttgggtacaagattaaaccacctaaacctcaagcagaagccccaaagctcatgaatacccaaacaagagaatcaaatcaagctcatctgttcaacatgaagacaatcaatcaaccatcatctgctggcaatcaagcaaagttgactcacagagaggttaaagcaagtggtgattgtttctactgtaaggaagaatggtatttcaatcgccaatgccttaataagcgtctagaccggctcgagaagaaggcctcaaagcataactcaatcggtgataatcaggaggaagttgtctttacccgctcaaagtacaaaataatttag

SEQ ID NO: 30856 - DNA, 231 bp, Zea mays
  Peptide Sequence Number=SeqID_72635
atggggttcaaggttgttcttggcatagcaagaacaacacaaattggaggcggtgtaactgtcgctaaggcgcaacgcaacccttgtggtgttgtagtcgagcagcacaacgtcgatcctcgtcaaatcgtgttatcccctactctcatcaaaaagtcgggagcaaaccccagcgggttccatcaaagagaagatgcttttttgttgccgccacgttctgtgggaggataa

SEQ ID NO: 30857 - DNA, 159 bp, Zea mays
  Peptide Sequence Number=SeqID_72636
atgtgcaagggtctttacatcacccaacaggtgcgaagggtaaggaagctagtcggactaactgagatccatttaggtagttggaatgtagcatcatttacaggtgtgtccgtagggataaataagccaaaattacgaaaacaaagtggtggaaactga

SEQ ID NO: 30858 - DNA, 627 bp, Zea mays
  Peptide Sequence Number=SeqID_72637
atggagcgattgggggctccggttctctgtaatttccagcttggtgacaatcgtcgtcctcagcctcttgtcctggatacgccggcgctcgacgtctgggcgtccggccgctggcggtcgatcctgctgtggttcgtgacgcgcgtcgtctggttggcataccagggcgccgagatagccgcgacgggcgccctcggaagcctgtccctctccggctccgatgggtcggcggaggagcagcaggtgatagcgttctgggcgctgttcctgctgctgcacctgggcggcccggacaccatggccgcctacgcgctggaggacagcgccttgtccgtgcgcaagttcctcgagatggtcttccaggtcgggggcgccttctacgctcagtacaagtacatatatcgcgcgcgcacctggacgccgctggcgacggcgtcggccatcatgttgcccataggcattgtcaggtatgtggagaagtggtacgcgctatggaaatccaaaagcatgatggaggaggaggaggggccagggaaaaaattctcggcgaaaaaatttcgagaaaaccgaaaatcacgtttatcggtggaacccggttttttatttatcggccgaaattttcattga

SEQ ID NO: 30859 - DNA, 1233 bp, Zea mays
  Peptide Sequence Number=SeqID_72638
atggggagcgcatgtgcaaaggtggtggagatggagctctcgctcatgtacgaggccctgtacaccaaggccatcgtgctgcacacctgcccggttgcaggctatctcaaccgtctagtgtcgcccctcgccaccgctgccgcagtgttgctcttcaaccagtatatcggcagccgcagccgccgggccatcatcatcaggagatctttcgtcgacatcacctacctcttgctggttgttgccttcgccatggaccagatgtggctgctcagagcccttggtctacctggacacatcaggacactctggggtcagcaggccctggaggacgccaagacgaacctgttcggtcgcggccgtaaaaatggtaggaaaacaagtaacaagaaaccgaaattgcccagcttcggccgtgaattcgaggaggacgtcctcatgtggcatatggccacctgcattctcttctcatcatcaagcggcaaggagagcatagtcagcataccagggggatcctcggccgacgccgccgatgcccatgtgacggcgatcaaggtgatgtcagaatacctcatgttcttcgtcgctgtacgtcgacacatgctgcctggccttgtgctccacagcctgctcgagaaaatccgccaaactttgcacgagatatgggacggcggcaagaagaaaactactggtggttcgtcgtcgtcgtcgtcgtcgtctacagcagccaaagatactccgcctcctcaagacaggcttgccgaaatgctgctagagagactgaaagcaggtcggagatggtttgaccgaaacgaaggcaggctcgttgttggtaatgcagctgcgcttgctaatacactaatagagactggcattagtgtgcagaagcgacggcaagtgccgcagctgctggagttcatcttcaacgtgtgggtggacaagctgctctatgcggccgccagatgtagcgtggagagccatgccaagcagctcagccgcggcggcgacctcaccaccatactgtggcttattgcccaacatgctggcctatttcgcatcggagaattaaaaccgaaggaggagaaggaggtggaaaagaaggaggaggaggaggaaatgaagtctttctggccacggtcgaagccagcatatccagttcattactttgaagatgatgaagaatctgacaatgccgaagaagatgatgacatgacgaggcatgttatactgtactag

SEQ ID NO: 30860 - DNA, 465 bp, Zea mays
  Peptide Sequence Number=SeqID_72639
atgggccttacccggaagtcggcccatcttcgctgtggcgcgctcggcccaactgggcgccacgccgcgctgacatgcggagccctgcagtcagccagacgtagtcacgagagcgagcttgtccttcctatcggccgcactccctggatgccaggtggggccaccttggtcggatcctcactcgcgctatcgtgggcactgcacgaagctggattccgcgccgatctctgcgcgagtaacgctgactcctcaaccgaactcccttggtatcataaagccatgcgccgggggctcagtttcttccccttttcccccagcaaccctaatcgccgctaccgaattggaggatttgtgggcgtaagggacgttcctcggtttgtttccgcgcggccggtgacatctcggtctacaccaacattcgggtgggggagaggtacgccattgctttgccatctcatggggtag

SEQ ID NO: 30861 - DNA, 285 bp, Zea mays
  Peptide Sequence Number=SeqID_72640
atggaaggcctcatcccgttcatctacagggccgtcgtgcggtacaggaaggaggaagggcgggtctccctcggcgacctcttcttcgacgagccctcctcgccgacgtcctacttccgtctcccgggcggcgccgactccgcccggtaccagcaggtgacgtcgagcgacctgttgacatcccagacgactacgtcgacggccagctccggtgcagccggcgtggcgcgacgacgctctccgatgaggaggtactccaaaaggagaggtttttccttggagtga

SEQ ID NO: 30862 - DNA, 216 bp, Zea mays
  Peptide Sequence Number=SeqID_72641
atggcgcagaggctagggttactgcttgacgagccggacggtccgcgcgtgcacaggggtggcggagttcgccgacgacgtctggatctcgctcctgggagggaccccgtcacggaggagagagatcctagggtgtgtcttgggttcgacaggccaaccaagacgcctgagccgaagaaaggcatcttgccacatactaggatggtattgctttag

SEQ ID NO: 30863 - DNA, 468 bp, Zea mays
  Peptide Sequence Number=SeqID_72642
atgagggccagaaatggaccctatactggtcggagccacatacacagtgtgaggtgcacaagctatgcggaccgtatggtagctacaaccctgacgcaaatgctacgagcgcaaatgctgggagccctgaggattgtcagttgggagaaggcgcctttggctcaatgttcagaggtcaacttcctgcaggcccaagctccactcccaattgcagtgaaaaggctggatgggtttcaacatggggacaagcagttccgtgccgaggtgtccactgtcggaatgatcaatcatgtgatgaacttggtacgccttcttggcttctgtgctaaaaataccagcaggctccttgactacgaaagtgatactggttccttgtttccatgttgggcagcaatccaacaagtttattcctggattctactggagggaacagaacaaccaagttcacggtttaacttcataccataa

SEQ ID NO: 30864 - DNA, 342 bp, Zea mays
  Peptide Sequence Number=SeqID_72643
atggcgcacagcgccggggatgagacggctcagggcgggctgccgtgtgaggtaactgctaataaaaacttgaccaacttattaaaagcaatgctcacctttaacccttacttgttggtcagccttacaattcacatgaactcccacctttgtatagcagggaattttagcatgtaccaccataagatggtcaatacgaggaagggaggcagaatcgatctacctgccaacccacacaaccgtaggattgttagacaacaacaagcaaaaatgaatcctctgaatccagtggttgcaactcagatgcagatgctgcaacagatgtcaaatactacgacataa

SEQ ID NO: 30865 - DNA, 147 bp, Zea mays
  Peptide Sequence Number=SeqID_72644
atggaggcaaccagcaacaccaggttagccctcgggatcctggtggccgacagtgtggtccccgtcggcgagaaggtgacctccaagctcttccagatctcgcgctccgctgacaagtggaaagcttttgagaatgacatttcttaa

SEQ ID NO: 30866 - DNA, 375 bp, Zea mays
  Peptide Sequence Number=SeqID_72645
atgtaccgtaccactgccggcgaggaccaacttgttgccgacgccggtgaatgtgtgatcgcagagctcgtcccaaccgacgcagaggccaccgtgctggccatggtgttcgtgtggctttggttgcttgtgcccagttggagagaagctgcgcgaagccccgccgccaccacaccaccaccaccaatggcaggaatcggatcaaaggccctcgccgtggtcgccgtcctggcggccgtcgtcctctcggtggcctccgcggccgaggcgcccgcgcccagccccgtttccgccgccgccggcgcgtcggcgccgttcgccgcggccctcgtcgcctcctccgccgccttcctcttcgccgccgtccgccactga

SEQ ID NO: 30867 - DNA, 336 bp, Zea mays
  Peptide Sequence Number=SeqID_72646
atggcggtgatgatggcacacagtggcgacggaacagctcgagcaggcgggggtgaagggatggctcgggcacagtgcgcggggcgcaaggcgccaaacctttctggcaagcgcgttaatggcgaggcaatgcagcgagcggcggccggcggtgatcgcgtcgatagcagatcacgggcgggggagagagaactaataggcggggcccgcctatcgaagggagagggtgatcgagagggggagggcgcgcttacgagtggggtcgggttgatagtggcgtggcgcgagcgcgggcgcggggaggtgggccatgctgggcttcggacggggagatga

SEQ ID NO: 30868 - DNA, 195 bp, Zea mays
  Peptide Sequence Number=SeqID_72647
atggacgatcgcccagtgcatgcacctcttctgaacaagagcagggatgagtggatgactacaggtcgcccagtgcatgcacctcttctgaacaagagcagggatgagtggatgactacagttccatctaaaaagccactacaagcaggtccaggggtgctttcagatttgcactacaagaaaatcggcttttag

SEQ ID NO: 30869 - DNA, 240 bp, Zea mays
  Peptide Sequence Number=SeqID_72648
atgggtcctggggcttcgtcgggtgctcggggtcatgctcgttgcggcgctgggatcagaaaccggctggttatcggggaattcctcaccgtcgttcgtgggccgccatggatccgcccccgcccgtggtcggggtacctcgacgtcctaactatggccatggccaccgccgcgacttgccctgcgccgccgccgttcctggctggaggtgggggatcaggcacgctgccgttgatctag

SEQ ID NO: 30870 - DNA, 168 bp, Zea mays
  Peptide Sequence Number=SeqID_72649
atggctggcgcgcagggcccaaacgccagcgagcgacagaggcgcggaatccacggcagaggcacgcgacagcttcagcgtgaggttgaagctgacagcgcgggcccacaagaaatgctttcaacatggattacttaccacatttatttccataacatattagtttga

SEQ ID NO: 30871 - DNA, 573 bp, Zea mays
  Peptide Sequence Number=SeqID_72650
atggtaaggtggctgccgccgccggtgacagcggacggcgagctacccttcggccacgacgccgtaacgttttccttcttggtggcgtgcgtggccgccaccgtcacgctcgcgtcgtccatcggcagccaggaggctggcggcgcggaggaggcggcggtagaggaggaggtggtgaggctgtcgccggagctggcgatgcacggcgccatcgagccggtggcgctgccgtcgtcgacgtcgaggcggcggctgtccatcagcgtgagcaagaagctgagcctgaatatcccggacaagctgcggctgagccggcgggagcacaaggaccaccaccatcacaaggtggagtcggaggacacactgtggaagaagggcatcatcctcggggagaagtgcaggatcccgggggagcgggaggcggagtgcgccgaccccgacgacgacgacatcgccgccgccaacttccgccggtccagctactcacggcccgtgtcgcggtcaagctcgttcgccatgcaccagccgcagcacgacgcccccgggcccgccttgcacgcctcggatacttga

SEQ ID NO: 30872 - DNA, 429 bp, Zea mays
  Peptide Sequence Number=SeqID_72651
atggacgacgcgagcgtgacggtggcggccacgcacgccaccaagaaggaaaacgttacggcgtcgtggccgaagggtagctcgccgtccgctgtcaccggcggcggcagccaccttaccattgtcaccggcgggatcccagcgatgggaaaggaagttatttggctagctgctcgccggaggcttttcccgcgttgcgggggcaaccacccgttttcaaattggaaaccggagagggccgaggagaaatgttgtagcacagatgggggcaatgtcatgcctgcccgtgtaaaaacctccagcagtccagacagacttgacaagtatcagacaccaacagccaattggaagacgactaacctggtgcagcttgacaatactggttatgagcacttaaacagggagcttgacaccaaggcatcatactaa

SEQ ID NO: 30873 - DNA, 318 bp, Zea mays
  Peptide Sequence Number=SeqID_72652
atggcggggagtgtccaagaggaggtcggaagcggagcaccacttgcgcgtggagaaggcctacaattctatatggagttactcgaccgggtgcttcgccctcgtgtgggtgtccctttgggtaggagcaccaacgaggaattgtcagaaccttgcgtggttctggatacctcggtaaaaataccgattagcgagatttttagaagtcctaattcacgccccctcttaggcatccgagttcctttcactgctgaacgtttggactttctatgcaaaagtcggttgaaccaatttcgaccccagttgaaccgcccctga

SEQ ID NO: 30874 - DNA, 309 bp, Zea mays
  Peptide Sequence Number=SeqID_72653
atggaggcaatccattccttgtctgcttcagaaacaagatatgctatggctgatctgacccagctctttatgacagcttgccaggaagggaaaagagcagaatcgcaaggccggattctccgggtggtgctcatatactgccgttcctctacaaagccacagcatcagtggcccgtgaagccaaagaatttcaccctcgacataatctatctccacgacaagccaaatcctgacaactgcccacagaagccgaacctgcacagaatgaagatgccgctccagtctccagccaacagtagggtcttctag

SEQ ID NO: 30875 - DNA, 186 bp, Zea mays
  Peptide Sequence Number=SeqID_72654
atggcgacagcacgttcgacatccagttttctcccttattctctggttgcccgatggggacggtcgtgctcggtttatgctttagagatcagcattctgctttctggaattcaggattcattgcgtgcacctaaagtgcacccaatgggtgtagcccacgagcttcgagtggattacagaaaatag

SEQ ID NO: 30876 - DNA, 312 bp, Zea mays
  Peptide Sequence Number=SeqID_72655
atggcggatggcgtagcaaatgacgatgaggtatggcgacgacagcatgatactgtggacaacgacggcatgtggcgcatagcgagcagtgagcgcggtgcggagctagcggcggctgcattggccggcgatgaggacgacagctttgggagctgcattggaacggcggcaagtgcagacgcggtgcagcacagcaatgacaagcaacaacacggcgtcgaggcgagtacggacatgagtgggcgaaaaggggaggagggaagctgggagtcggcatggtggcatgacgagaacctccaacgagcagcatag

SEQ ID NO: 30877 - DNA, 449 bp, Zea mays
  Peptide Sequence Number=SeqID_72656
tggcaaagagaacgtctgtttttgatgatcctacattagagattcaagagctgacctcagttatcaaaaaggatatcacggctttgaatactgctgtcgtagacctacaagctctctgcaattcacaaaatgagagtggcagtctctccaaggacacaacaaaccattccactacagtcgtggacaaccttaaaaatcgtctgatgagtgcaacaaaagaatttaaagaagttcttaccatgcgaaccgagaatttgaaggttcatgaaaatagaaggcaaatattttcttcgtcagctgcaaaggatgagtcaaatccattcatccgtcaacgaccccttgttgctagggatccatcggagtcctctgtgcccccagcaccatgggccagcgactctgcatctaccccactattccagaggtacggttacacacacaatactccatga

SEQ ID NO: 30878 - DNA, 213 bp, Zea mays
  Peptide Sequence Number=SeqID_72657
atgaatcctaaaggtaaggggatgctgatcaatgacaaggagaaggagaacctatacatcaacgagccaaaagacgacaagcctactgactcaggctcaagtcacaagaagagggatggaaagaagaagaggtgtataaagaacatcatctactatgacagcgatgcctcctcctcctcaccaagggatgacgacgacgaagactcttcgtag

SEQ ID NO: 30879 - DNA, 669 bp, Zea mays
  Peptide Sequence Number=SeqID_72658
atgggaagagatgcaagaaaaactaccacattgacactgagccaaattgtactgaacgacgttgagagtgacgacgaggaccttgatgacgaggaccttgatgatggagctgagcatgaagtggaagatgccccagccgaacttgctgtcaaaacagttgaagccctggctgcgccacccaaagatacagaaaggcagctgtctaaaaaggagttgaaaaagagggaactagcagaacttgatgcagtattggctgagctgggactttctgggaactcaaccagcgctgcacaggatgctgagaaggaaggtgccaaccaagctggtgatgcagagaaaaaggaagatgctactgtcccctcagagagcagacctccaagaagaagaaaaagaaggacaagagttcaaaggagggaagaaaagaaacacaagaagcagccgaggggtcagaggagactgccagtgcaggacctgatgaagaagatacccactgctgtggacgtgaaggagcgtttgaagaagatggcttcaatgaagaagaagagatcgagcaaagagacggacaccggtgccaaaatcgccgctgccgaggccacagcaaggagcgcaaggcttgcggcggccaagaagaaagagaagagtcattacaaccagcagcctgtgcggtaa

SEQ ID NO: 30880 - DNA, 426 bp, Zea mays
  Peptide Sequence Number=SeqID_72659
atggtgggaggggggaggcggggaggagcggcggcggaggaggtgaagctcaacaccggcaacgtgttcgcggcgctcgagtccctcaagaagaagaagaagggcgacaagggcagggcggccgggccgtcctccaggaagaagcacggcgcgggggccgcgcagcagcagcaggagccgccgcagaaggatgtcttctgggctcccgcgccgctcaccaccaagtcctgggcagacgtcgaggacgacgacgacgacgactacttcgccaccaccgcgccgccgcgccccgtatgggccgccgccgccgccgccgagcccgccaaggaggaggaggacgtcgaggatgctgtccgcgccgcccttcaggagatgcacttatttcctgtggccaatatggcaatcaaaggatgcctgacaagatga

SEQ ID NO: 30881 - DNA, 298 bp, Zea mays
  Peptide Sequence Number=SeqID_72660
ctcgcgcccgccgccagcacgcgctttccgcgccgccaccgcgcgccctgccgctgccaccccgcgcaccccacgccgccaccgccgcgtgccccgctgctgccaccccgcgcgccctgcgccgccagcccgcgcctccaccccacgcgccagctcgtgcgtcgccccgcgcgccgtgccgcccgcttgcacctaccattctggagaggaggtgacgcaggagcgcctggacgagctcatccgcggatacgccgcgctcgtcaacgtggtcccctccatgaaggcctttcactggtaa

SEQ ID NO: 30882 - DNA, 435 bp, Zea mays
  Peptide Sequence Number=SeqID_72661
atggaggaaaccgtggctaacgtggagggagcgcagggccagctcctgaagtacctcaacagcatttcgtccaacagatcgctcgctagcgctatacgggagtgtgcccagctacttccggcacatgctactctgactgttcctggtggctggtatctgctgtctctcttttcatacgctaacttcagatggatcctggcatcatggacgatgcctccttttgcgctgagccctatttttgtttcatttgtaatttttattgcgcttttagcacggttaaaacgacttgatgcgaacctgatgatatcatggctggtggtgatactatacaactaccctgctctgcaatttcacatttctacaggttccatgcgtatgccgcaggcgagtcctctttctgagactggcagctggcgtcccacatcaggcgcgtga

SEQ ID NO: 30883 - DNA, 231 bp, Zea mays
  Peptide Sequence Number=SeqID_72662
atggcgcgacgaggaggatttggggaaggagctccacagtgccacgacaccgttgtccgcgtcatccgggtggtggagctgacacagtggacccacaagtcagtggtgctccgcgtgcacacagggttagaaataaataatagtgaatttggagtgcggaagataattcttcttgctatgagttgctcaatcaatgcggataactttgggatcaaacttaaaacaatgtga

SEQ ID NO: 30884 - DNA, 786 bp, Zea mays
  Peptide Sequence Number=SeqID_72663
atggtttctatgaaccaaagtgcatttgtgaaagggaggaacattcatgataatttcctcctggttcaacaagtggctaggctcctgcatcaaagaaaggaaccacatatccttaaattggatattagcaaggcttttgactcggtctcatggtcttctcttttagaggtgctgcgacatattggttttgggaacagatggtgtaacatcatatgtctgctcctatccatggcctctagagttttagtcaatggagaggcaggattccctatcgatcaccgttgtgggctgaggcagggtcttctccagcacagaatctcaatctacccagatgatgttgtgttatttctgcaactttgtgctactgatctctctcttatcaagatgtgcagcaaagttgtagttccaagttcaatcatcgagacatttgagactctattatcatctgctgtaacaatattagatgatgagactggcaatccttcgtggcaacctcgtgcggacttctatgtttattgtattttggcttcacttccatgggctggtccagaattgtttgagcaagttccagatgagttcgagagagttttatttggtatacagtcttacataagtatcaggaggcattttgatgatattgctttctctgtctttgagacagatgaaggccactctcctaacaaaaagggcgtgtttggttcccaccttgggaaacacgcctgggcctgggccctggggttggatgtggctgtttggcgcagcttcccaggcgaggactcgaactaa

SEQ ID NO: 30885 - DNA, 180 bp, Zea mays
  Peptide Sequence Number=SeqID_72664
atgtcaggcatggcatcggaggctcggagcacaacacatcccatgctgaggggtcccaggcgcctcgaggggagagtggagaggaagatgggaatgacgcagagtgtaggggggaggagggcgctgatcacccagatcacctgtgccggcgttgtgcctagccaggatgatccaagatga

SEQ ID NO: 30886 - DNA, 318 bp, Zea mays
  Peptide Sequence Number=SeqID_72665
atggcgaccgtagaagtcaccacagtcgtcaccacggtcgcgacaggtgccaccacgaccgccgttggtactgccgcacccgccgtagtttggcagaacttcattgtcgtcgatcgtcgtgtggtcctccaactaaacaccgtcggttggccctgtctccacctgcgccaaccgtcgatcatgggtgtcaaggcggccattcatggtgggggagtggagaggaagatgggaatgacacggagcgtaggggggaggagggagatgatcacccagatcacctgcaccgacgttgtgcctagccaggatgatccaagatga

SEQ ID NO: 30887 - DNA, 828 bp, Zea mays
  Peptide Sequence Number=SeqID_72666
atgagggactccattctctggaaatggacggcagacggagcatattccactcgcttggcataccgaatacagtttggtggctcctacggacctttccggttcggccttatctggaaagcacatgctgaaaacaagtgcaatgtcgtttttgttgtgctagatctaggcgtgcgagtgtccctttttctgtcctgcgtattcgagaaaaaaacaagtgcaaggtcaaactttcaattcatttggccttggcaggagtggtcttatgtcaaggacctcccaaaatgggctccacaacgggtttttgtccaggaagtactggaaagggaagttcgcttgtcgtactttgaaaaaatcaagcagagtatcgaggatgctgctgagttagaagaactgctacccccaaaagctgggcctaatttcaaattccatagcgatgaaagcaacgaaagcactgatggcctgaagttatccaaggaacttattggcttgattagaggaaagaagtctacatatgatattattttatgggttgaggaacaaataattccaaaaaatggtactgaatttgcacttgatgttgttagccagacgcttcttgacatgggttcaaaaagtttcacccatcttgtcactattttggagagatataataagataatctctaagctatgtccaaatgaggaaatgcagctactgttaatgaatggagtcagtgcttattggaagaacagtacccagatgactgctatagctattgacagaatgatgggttatcgcctgatatccaatttggctatagtcaaatgggttttttctcgttttgcttga

SEQ ID NO: 30888 - DNA, 201 bp, Zea mays
  Peptide Sequence Number=SeqID_72667
atggccgataaaggcaaaggcaagggcatcgtcattgacgatcctcgcatgtcaattatatcacaaaaggagattgctcaaaaggcttcaggcgagaaggctaaaaggtttagtacatatgcttttggttcgtcaatcttcaccaaaaggcaggggcatgtgttagaagccaaaaaggcctcgcggacggtccggccctga

SEQ ID NO: 30889 - DNA, 375 bp, Zea mays
  Peptide Sequence Number=SeqID_72668
atgagcgcgggctggaggacgctgttgctgcgcatcggcgatagatgcgccgagtatgggggctccgccgaccacaaggaacacatcgaaacttgttatggtgtactatcccgagaatatgaacactccagagatgcaatatttgagtttctccttcaatgcacagaacaattgcctcacaagattcctttctttggagttttgattggtttgataaacttagaaaatgaagacttcagtaaggctattgtagataccacacaggctaacctagaggatgccttgcacaatgaaaatcgtgataggattaggatattgctgcgatttctcagtggtctgtgtaatttcatgaacacatgcttcttaaggtggtaa

SEQ ID NO: 30890 - DNA, 1068 bp, Zea mays
  Peptide Sequence Number=SeqID_72669
ggaaccagggaaggcggattactccgtcgtggtgccgatgcaccccgagcagggctacgtgtgcttggggctccaggcctttcggaccgcccaactcccagtcccagaggtcatgactgccagggaggtgcgtcggctggcggtcgaggagaagaagaggaagatggacgaggagaagaagggggcccgcaagaagattctggccaacgattcactggagaagcgccacagagcgcaggcgagggagggccttccgctcgaggcctctcccagcactgaggacgaggaggacgacgacgatgatgagggggcagaggtctgcatgggcttcagccccgaggttggccccgagtctacgccggcttcggcgggcccttctagcggcgtagccccttttgcgcaggggccgatagccgaggaatgggacccacccgccagcctcgtcgttcaacggatgccgcctcatgatagttggtcactgaactgtgggacccgcttcatagctccacaaccgcaatggccgcaatcacctcctccgaagaagctccgtcttatcaccctgaacgcgtttgcggcggagtcaaggtgggaggacgatctgggcgccaccaattcgtcgttgtcgctgcgtgtccgtcgtgtgccgtcggtggggcaggaccccgcgcgagctgtctggggtactagcgaggggctcaccaagggtttcgacgacgacgtgcaggcgctgcgcagatcgagcgaagcacacgatgcagaggggatctgggccttgctgctgcgtgcaaggtctcggctcggggagcagcgcgagtacaaggccgccgcgggggtcgatgctgtcacggacaggctgcgaacacccgaaggggagtgcattgctcctacaaaaggctacgagctgagtgccaaggagcaggtgccggggcgggatcgctatctgggcgagccgaagaccaagaccttggtgctgtccagcgggaagggatggctcggcctacatccaccatggctgggcattgaagcactgagcagatccctgcgccctcacgcccttggagtagggag

SEQ ID NO: 30891 - DNA, 1221 bp, Zea mays
  Peptide Sequence Number=SeqID_72670
atggggacggttgatgtgtatggggacggagtgcctcgccacatcgtcactggtgatgctgaatacactgatgacacaccaacacctcccaatactttgtatgctgctttggtgctgagtaagaaggctcacgctcgcatattgtctattgatgattcacttgccaaatcttcccctggctttgctgggctgttcctttcaaaatacattccgggtgttaaccatactggaccaattatccatgatgaggagttttttgcatctaacattgttacttgtgttggtcagatcattggaattgttgttgctgatactcatgataatgcaaaaactgctgccaacaaagtacatatcgagtattgtgagctcccagcaattttatctatagaggaagctgtcaaggttggaagctttcatccaaataccaagaaatgccttgtgaaaggcgatgtagaacaatgttttctgtctggtgcatgcgataaaattgtatcaggacaagttcatgttggaggtcaagagcatttttacatggaacctcagtgcactcttgtctggccagtggattttggaaatgaaattcatatggtctcatctactcaagtagaagggagcattaagataaatcccataactagagtgggtggacatgatgataagaaggtgatgattcctactataataactttgcgagacatgtttactcatgctgagttgagaattactgcaggcaagcgattgccagatctggatttgtggagccaacacctatctattaaaatttctggatttcacaaatcacaagagagttgtagagagttcgagctgagcagagatctcggagaactgcgcattaatatattaagaaagaaaaaaggaaaaggtctgagaacagaccgggtacaaacgactccttgtggaggtaaaggaaagaacggttctaataactcttccattgttgctttgtactcaccatttgcaatactgatagttccttttaagctgggttttggtcaatcaatgatttccgctaataattcttatgctgaccaacactgtagcctgttttatccttattcaatgggggcaacagtacgttctgttgattctgggtcagatgatgggttcaagaatggttctgatatgccaatagagatggcaatggcgagaatgacgaagaaaatcgatcggattcccatcttatttatacgtgaaagatga

SEQ ID NO: 30892 - DNA, 639 bp, Zea mays
  Peptide Sequence Number=SeqID_72671
atggcggggtcacggccggcgagcagggaaaccacatggagcagtaaaaacggccgagtagacgaggacgggattcgacggcgccgggatcagaggggcgtacgcagccaccagagcacacgcagcaagcagaggagcctcgcacacggccatgggaggaagacacgcaaggaaacttcgagctacggccagcgcgcagaaagcaaagcacgcgcgcacggagccggagggcgtgccaccaaggaagggcttcggcaggacgcgagcgagcaggagcttgggggaaagccacgacacgcagactggagaactgagcagggagctccggccatggatggagctcggcgcgcgacgcaagagaagcagagaccgagccaggggcacgctcgtgcggcattagggaactcaaccaccatgggagcaggggagcagggagaggatggggctaggcgtgcgcagcagggagaaggggagggagaagaagggagggagcgcgccatggggataaggaagctgcgtgcactggaaacaatcagaggactgcggtcggctaaaaaatcagaggaggagaagagcggcggggaaaaatctgaagagtggcggatgaaacaaaaaatctacgaggagagagatctatga

SEQ ID NO: 30893 - DNA, 898 bp, Zea mays
  Peptide Sequence Number=SeqID_72672
ggaccttacagatccgtactctccaaccctggtgcaaatcgtgcaggttttggaaaactttggcgtctgcaaggtgatagcatctgggcaccaggatttcaaggttggcgatcttgtgtgggggatgaccggatgggaggagtacactctcatccataacccggagtcatttttcaagatcaagcatcctgaattgcctctgtcctactacacaggcgttcttggcatgccgggccttactgcttgggctggatttttcgatgtgggcaagcccaagaaaggcgactatgtcttcgtctcagcagcatcaggagccgttggtcagcttgttgggcagtttgctaagctcacaggatgttatgttgtcggcagtgctggttctgacgagaaggttaatcttctgaaaacaaagtttggcttcgatgaagcattcaactacaagaaagagcaggacctcgatgccgccttgaggaggtacttcccagagggcattgacatctacttcgagaacgtgggtggcagcacactggaagccgtgcttcccaacatgcgtatccatggtcggatccctacctgcggaatgatctcgcagtacaatctggaggagccagagggtgtgcacaacctatttgaaatcatcactaagcgcctgcgcatggagggtttcatggtcttcgactactacggccagtaccacaagttcgagcaagagatggtcgggtacctcaaggcggggaagatagcctacgtcgaggacattgctgaggggctagagaaggcgccggaggcactcatcgggctcttcaccgggcgcaacgtcggcaagcaactgttttgtgctgttcgtgtgaaatgtttcgattttctgccgtttgttttctgggcgatatgcgtgtga

SEQ ID NO: 30894 - DNA, 573 bp, Zea mays
  Peptide Sequence Number=SeqID_72673
atggcgcagctcagctccatagaggacctccgcccgcgtgccgtcatcctctctagaaagccccactcagtacacgccccagggcaccctcctccctcgagggattcctgggctttgccactgctgcgggcgctcaagtgtctcacgcagtccctcggcggtggcgtcggaagagatctctcaaaggtcttagggcaaagaatcacacgtttggctgctcagcagggggatagaacaagagcagaaacaaacctccatgtgttcaacgtgcactgcgctcgccagagcacgcccgacgcccgccccagagtaccccgcgtcacgccaagccagcccggcgctgttgcccgcacccgtgcctataaagccaccagaggcttcgaccgtactcccccgcacgcgctcgacctcaccggagcactagatcaccggcgttgccccgcgcacggcatgcccgcggccacccgatcccccgccaccgccggagcactcgccgccgacgagttcacccgcctgcgcacgtggaccggccgattccggccaccaccgccgttgagccgtacctcgctgtga

SEQ ID NO: 30895 - DNA, 246 bp, Zea mays
  Peptide Sequence Number=SeqID_72674
atgtgtgatgatgtccaattatgtaatagttgtgtattttctaccgaggagactgatattgaggctgtgcaaactgacaagccaaaggttgaaatgctgaaggttctgttgcttgcacctacgaagtttttaattttattgttggataaaaagaaggatgaagagggggtcgcagagatgccaatccaagacaaagtttccttggccagtttgcaatcagaggtgtcctcaaaggttgttccgtag

SEQ ID NO: 30896 - DNA, 1248 bp, Zea mays
  Peptide Sequence Number=SeqID_72675
atgtcgccgagcactcgctggatattcgggccggagcccgacccgtcaggcagcctctgcgccgattcgacgaggagaagcacaagtgataggcgaggagatccacaagctaatggcagcagggttcatcaaagagactacactggtctcaacaaagcatgtccaaaagttccctaccctctgcctcgcatcgatcaaatcatggattccaccgctgggtgcgaaaccctgtccttcctcgatgcctactcagggtatcaccagatccggatgaaagagtccgaccagctcgcgacttctttcatcacgccgttcggcatgtactgctatgtcaccatgccgtttggtttgaggaatgcgggcgcgacgtaccagcggtgcatgaaccatgtgttcggcgaacacatcggtcgcacagtcgaggcctacgtcgatgacatcgtagtcaagacaaggaaggcttccgacctcctctccgaccttgaagtgacattccgatgtctcaaggcgaaaggagtcaagctcaatcctgagaagtgtgtcttcggggtgccccagggcatgctcctggggttcatcgtctccgagcgaggcatcgaagccaacctggagaagatcgcggccatcaccagcatgggacccatcaaggacttaaaaggcgtacagagggtcatgggatgcctcgcggccctgagccgcttcatctcacgcctcggcgaaagaggtctgcctctgtaccgcctcttaaggaagactgagtgtttcgcttggacccctgaagccgaggaagccctcgagaacctgaaggcgctccttacgaaggcgcctgtcttggtgcccccagctgatggagaagctctcttggtctacgtcgccgccaccactcaggtggttagcgccgcgattgtggtcgggaggcaagaggaagggcatgcactgcccgttcagaggccagtctacttcgtcagcgaggtactatccgagaccaagatccgctacccacaagttcagaagctgctgtatgctgtgatcctgacaaggcggaagttacaacactacttcgagtctcatccggtaactgtggtgtcatccttccccctgggggagatcatccagtgccgagaggcctcgggcaggatcgcaaagtgggcggtggaaatcatgggcgaaacgatctcgttcgcccctcggaaagccatcaagtcccaggtgttggcggactttgtggccgaatgggtcgacacctag

SEQ ID NO: 30897 - DNA, 559 bp, Zea mays
  Peptide Sequence Number=SeqID_72676
atgccgtccggatctcccgctcccgctcatctgcgccaccgctgcatcgcttctctggagctcgccatggacgttggccacagctgcgtgctcgccccgaccttcatccccaacaccgttgaccctgcctggactcgccaagccgcgacttcgccttggccccctgctgcagctcgcctcaatggccgccggagttttcttgtcgttgcgtcctcggccgcccccacctctgctcctccctcactcggctcgcggatctcctggccggtgcacaactaccagcccatcaagctcatccccatggcacccagctcggatctcgccctggtcgcccgccgttcccagcgtcgctgcctcccagctcggaccacctgtctctgctccatctcccatggcgcgcccctcaagctcgcccgctttgctcttgttgtcgtgaagactccaccagcgccctgcagcagcgcgcccctcgccgagctcgtggtcatgtacctcttccgatacgcacctggccgtgctttgcctcctcgtggtcagcaccatttgggccatgagggcg

SEQ ID NO: 30898 - DNA, 240 bp, Zea mays
  Peptide Sequence Number=SeqID_72677
atgggtgcggttgtcaaaccgtttgagccagggctacgactctactaccctgacatcctcttcatcgacgggagagtagacgatgaccccatttccgacgacgagccaatgtggctttcttgcatagaaattgcaaaatcaaggccaacaaaatccatggacgcaacataccaagataaggctaaaaagactaagaattgggctctaaaacataagaggattttgtgtgagaccaagtag

SEQ ID NO: 30899 - DNA, 501 bp, Zea mays
  Peptide Sequence Number=SeqID_72678
atggtgatggtggaacgactttcacagtggcggggttgcgagcgtgtggagcaaagaaaaatgggcatgggagtggtgcgagtgaggggcaagggtgtgcgcggagttcagggtccctgttttgaagcccaggaaaacagcgccgcctgccctgctccgactgctgtgccacctgtcagggtgaggctgacagcagccgagtcgagcctcaggcgccataggaagctccgcctcgcccgaccccggggctcggcccccgcctcgaccttggaagatggtctccgcctcgcccgaccccagggctcggcccccggaagacggtctctgcctcgcccgaccccagggctcggactcaacctcgacctcggaagacggtctccgcctcgcccgaccccagggctcagcctcaacctcgacctcggagaagtcaccgcctcgcccgaccttgggctcggaccgaccacattacagggggtacatcattaccctacccctagctag

SEQ ID NO: 30900 - DNA, 231 bp, Zea mays
  Peptide Sequence Number=SeqID_72679
atggctgagccgacgccgtcgcagtcgccagcgcagacgccgcccccgccgccgacgcagcagactcccgcggcgggtgggctcgaggacatgctggcgtgtgtggcggcgctggaggccgcgctgctgccgtgcctccccgcgcgcgagctccaggccgtcgaccgctccctccagtcctcccaccagagtacggccgacccccatcatttccccactctcctcctctag

SEQ ID NO: 30901 - DNA, 435 bp, Zea mays
  Peptide Sequence Number=SeqID_72680
atgcaacaacgcacgacgaggcttcaacatggtggctcggggcgttgtgagaaatcgacgtgtccaagagagctagcaacacacggtcgaagtcccggcacatccagcacgaccgagcaggacgcagagtcgtcggctggtggagctccagcaaggacgcagtacgacaggcgtgtgacgcagcagcagtcgttcttcggtggcagagaggctgagaggatgatggcgaggtcgctgcgtgagctcggcgtagggctttggcgagctagcagtgttggacgacaacgaacagcgatcgacagtgcggtgttcggtgagcaagacgtggtgcagcgtgttttttgggcgagctccggcgacaaaactcgaccacgctggcctggccgcgcggcacaagtagctcgacgaggagggcgcaacaaggggactaggtga

SEQ ID NO: 30902 - DNA, 276 bp, Zea mays
  Peptide Sequence Number=SeqID_72681
atggacgccgagacagtacaccatccggcgctggccctcaaacacccctacggacaggtctatgtacagacacagtgggcgcgccggtcgggcaccggaatccgatgcgtttcctttgcatctggaccgcccgtgcaaagagaacggacccaacccagcctgctggtgatggcggatgagtgcacgcacacgggactgctgtgggatcacgtctccatctatcgccaggctactgttcgcaaagtgaagtttaaatatgagtataaaaatggataa

SEQ ID NO: 30903 - DNA, 417 bp, Zea mays
  Peptide Sequence Number=SeqID_72682
accgacgagttcgtcgcggatgactcaccggacagtccgatgtaccaccggacagtccggttgttgggggccttcggcctccgaaggtcctcaaaaacacgatttgacaatgttttccaagtgaaatatgtgaacatgtatcttcggaattgggttactgcatttgagaacaagttcccaacaccggtgatttatagtcgtacaactccatcgattcccgagagcggctggttcaacgtcggccagcctggggcgccggacactgtccggtgcgccaccggacagtccgtcttcggcgagctagatggccggggaggcaggcgtgggtctccagcgagcgacgtggccgaggatcctagcgacgtgcgcgagtgcgcgctcactggtccaccgcaggcgcggggagggcggaactga

SEQ ID NO: 30904 - DNA, 303 bp, Zea mays
  Peptide Sequence Number=SeqID_72683
atggcggaacagaccgtgttgtcggtgcggtcgagtactagcgtgacacgtgtccaggacatgggggacgtgcacaacgatttgttggattgggccttgttgggggtctgcttcatcaccaaagcatttgagaacaagtcccgaataggcctcaaaacaaaacggcgctaccgatggcaggttttgcggagtttgggcctcaaaactcggcggcggcggttccagtgggaatcggtggcggcacatggcatcacagcgatgggtgcatcaagtcgaagcaacttcgtgtggagcgagtggtag

SEQ ID NO: 30905 - DNA, 174 bp, Zea mays
  Peptide Sequence Number=SeqID_72684
atgacggggtctctctcggggcgagatccaggtgccattggcgaacgccgccagccctacacacacgcggatcatccggccaacaggcgcagactgtccggcttggtgcaaggaaccctgctcctactgccagggttccggctctcatcaagtgactcatccccctcacgatga

SEQ ID NO: 30906 - DNA, 234 bp, Zea mays
  Peptide Sequence Number=SeqID_72685
atggaggcaaatccaatggagtcgtaccccagtaaagaggtggagaacttgagggagaagctggttgaagaaaatttctacctaatcactgagatactgcccccacattttaacttctgccaaagcctattggctaacgtggtaaaaaatttaagctcctcagatgatgtagtaagatacaccatggttctaggtagcagaataactttattggttcatcttacagtggtctaa

SEQ ID NO: 30907 - DNA, 594 bp, Zea mays
  Peptide Sequence Number=SeqID_72686
atggggctcaccagggcacggctagatggggtggatgcccgagggaatagcgacgcccgatcttatacccgcgagggcaccgcaacgactgcccccgctctaccgaacgcccgcgcgaaacgccagcacgcccgcctaccccggcagcgcacgctccacgaatcctgcgtgcccgccgccgtgaatcccgccggtaccgaactcccgctcccggaaaccacgcgcacgcctccgccctaccacccgcccccacgccgcaatcccaccgcggcagcaatagccgcagcctccgcgacagcagtgaacgccgtgaaccgcccacccgcacgccacaatcccgccgcggccggagcaggcgtcgcgacctccgcgaaccccccacgcgacaatcccgccgcggtagctacagccgcagccgcccccggaccagcccgcccgcacggcgcaaaccaagtcgcgaccatggcgaaccgccctaacgcccgccctaccgcccgcacatgcccccgcctcccttccgtgcccctgcctccgccaatgccgcgaccgcccccgcgcctgcgctcgcgcataccgagacctctccctccgtga

SEQ ID NO: 30908 - DNA, 183 bp, Zea mays
  Peptide Sequence Number=SeqID_72687
atggccaacctggtggcggggaatttctcgccgtggaacagcctatgcctgggttcgccgaaatccaaggatagtgccctctgcgtcgtgttcaccgtgcgctgggcggaggaaatccagcgagctcccagggtggagctctgcttcgtcgccgccgtgctcaaccaccaggagagaagatga

SEQ ID NO: 30909 - DNA, 201 bp, Zea mays
  Peptide Sequence Number=SeqID_72688
atggttaggccggagccctcgccgccgacgaactcccctacatcctcgaccaccttgccggagcaatctcgtcgccgaaatttaagaaaggcagtgaaaaataataaacagagaaggaacatatttttcctagtatacttaagtgttaaagaacataggaaaaatacagagaaccctagtccagagctagttcaaggttaa

SEQ ID NO: 30910 - DNA, 831 bp, Zea mays
  Peptide Sequence Number=SeqID_72689
ggcgactcggaagtccactcgcctgtggtctacgacgacgccggcgtcacgtacatgttcatccagcacaacaatgtcttcctcctcaccgctgctcgccagaactgcaacgcggccagcatcctcctcttcctccaccgtgtcgtagatgtgtttaagcactacttcgaggaactggaagaggagtcgctcagagataacttcgtcgttgtgtatgagttgctggatgagatgatggatttcgggtacccacaatacacggaggcgaagatcctaagtgagttcatcaagacagatgcgtacaggatggaggtcacacagcgtccacccatggccgtgacaaatgctgtgtcatggaggagcgaggggatccgttacaagaagaatgaagtcttcttggatgtagtagagagtgttaacattctagttaacagcaatgggcagattgtgagatcagatgtggttggggcactgaagatgcgaacatatttgaggtgtgtacgtttagctagattcgagaatgatagaactatatcgttcatacctcctgatggatcttttgatctaatgacatacaggcttagcactcaggtaaaacctcttatctgggtcgaagcacagattgagaaacattctagaagccgtatagaactcatggtgaaggcaaggagtcagttcaaggaaagaagcacagcaacaaatgttgaaattgaagtgcctgttccttcagatgccacaaacccaaatataagaacttcaatgggttctgctgcatatgctcctgagagagatgcaatggtctggaaagtaaaatcattccctggtggcaag

SEQ ID NO: 30911 - DNA, 297 bp, Zea mays
  Peptide Sequence Number=SeqID_72690
atggcgtcatcacgccgtccagctcatcgtccacctgaagcccagcctgccacgacgatggtcgttctgacgttgcgagtagcgcatccggtggtgatacggcaggtgtactacctcactgatgagcccgaggtgcacttcatctggcagcccagccaaaagtcatcggtactcgccatatcgcgcgcgtttgatgactactatgtcaaggactgtggcgtcatctcggcgtcggagatgacgcagaggaggactgacaacaagaccagttcatcatcctcaccaccgtcggggtag

SEQ ID NO: 30912 - DNA, 444 bp, Zea mays
  Peptide Sequence Number=SeqID_72691
atgccgcctccctctagatccaccgcttccctgcccctgctcatcgattcggctctactacccaccacgccgtccctatgtcagtctaggtttacccctcctgctcctgtgtcagtctcagttcctagctctgcatctcaaggaagcaacattttcaagaccaggattgaagatgcaaacaacgttgatgcagatatctatctgattgatgaaccaagtgcttatcttgatttggagcagcgtattgtggcctcaaaggttatcaagagattcattcttcacgcgaagaaaactgcatttattgttgagcatgatttcatcatggcaacatacttggctgacaaggtcattgtttatgaggggcgaccttctattgactgtactgccaatgcaccacagtctttagtatccgggatgaataaattcttatcagtaagtgcatga

SEQ ID NO: 30913 - DNA, 174 bp, Zea mays
  Peptide Sequence Number=SeqID_72692
atggcttctgttttcgtgttcaaacagaaggtcgtcgtctcttggatctgcttgagttttgtcatggtttatgtggcctgcgcaatgcaaaggaatattccgttcttatgtgtcgccacatgcaagtcctccaagaacgtcctctccatgtatgaaatgaagacattatactag

SEQ ID NO: 30914 - DNA, 2145 bp, Zea mays
  Peptide Sequence Number=SeqID_72693
atggcgcagcagcagccggagaagccagcaggcgtggggcggttcggcttcacgggcggtctggagttcaccggcctcacgtacacggtcgtgaagaagcagcgcggcgccggcggggagtgggagaagaaggacgtggacctgctgcacgagatcaccgggtacgctcccaaggggtgcgtcacggccgtcatgggccccagcggcgccggcaagtccacgttcctggacgcgctcgccgggcgcatcgccagcctcgacggccgcgtggcgctggacggcgtcgagatgagccccagcctcatcaagcgctcatcggcctacgtcatgcaggacgaccgcctgttccccatgctcaccgtctacgagacgctcatgttcgccgccgacttccggctcggttcctccgtctccgcctctgacaagaagctccgcgtcgagaacctcatcgagcagctcggcctcacctcctcgagaaacacgtacatcggagatgagggcacgaggggggtgtccggcggcgagcgccggcgcgtctcgatcggcgtggacatcatccacgggccggcgcttctgttcctggacgagccgacgtcggggctggactcgacgagcgcgcacagcgtgatcgagaaggtgcacgacatcgcgtgcgccggtagcaccgtggtgctcaccatccaccagccgtcctcgcgcatcctgctgctgctggaccacctcatcatcctggcgcgcgggcagctcatgtacagcggtgggcccaaggaggtgaccgcgcaccttggccgcatggggcgcaaggtgcccaagggggagagctccatcgagcacctcctggacgtcatccaggagtacgagcagtcggagttcggcgtgaaggcgctggccgagttctgcctcaccggcctgaagccgcccaagctcaccgccacctacggggccgaggggctgtccaccgtgtccagcatcgtccagacgccaatctcgggtcccggcggcggcgacgacgacgacttcgatcgcagcctgaggagccagcactccaagtctccgtggagcggcgtgcgcctgacgccgtcccggcgccccaggcacaaggaccagcaacacgggaggccaggccccggccccggccccggcaaccacaggtacacgccggacatcgtgatgggaacgccgacgccgctgagcagcgcgtacacggtgaacgaggacgactacctgacgccgacgcaccgcgcggccccgaacgcgacgggcgcccccggggtgggcgtcaacgcgctggggcacaggggcaagttcgccaactcgtacgtcggggaggtgtgggtgctgatgcggcgcaacttcaccaacatctggcgcacgccggagctgttcctgtcgcggctgatggtgctgacggtgatggggttcctgatggccaccatgttcaccaagcccaaggacaacgcgcagggcatcaccaaccgcctcagcttcttcatcttcaccgtctgcgtcttcttcttctcctccaacgacgccgtgccggccttcatccaggagcgcttcatcttcatcagggagacgtcgcacaacgcgtaccgcgcctccgcctacgtcgtcgcggggctcatcacctacctccccttcctcctgctccagtcggccacctacgccgccatcgtctggttcgcgctcaagctccacggccagttcctctacttcctcgtcatgctctacgcgtcgctgctgtccaccaactccttcgtcgtcttcatcagctccgtcgtgccaaacttcatccttggctacgctgcggtgatcgcgttcacggcgctcttcttcctcttctgcggctacttcctggacagccacagcatcccggtggcgtggaagtggatgaacaccgtctcgacgatgaagtacccgtacgagggcctgctgatgaacgagttcgacggggaccgggtgttcgcctcggaccccgccgtcgggctgaccctgaccggcaacaacatcctgcagcagctgggcatcagcgtggaggaggaccgcaagtggtggatggtgctctacctcctcggctgggccgtcttctaccgcgtcctcttctacctcgtcctccgcttcgcctccaagaacaagaggaagtag

SEQ ID NO: 30915 - DNA, 2004 bp, Zea mays
  Peptide Sequence Number=SeqID_72694
atggcggcattcgcagccccctccttgtcctcgctcatcctcctcgcctcgccccactccgcgcccactctcctccgcctgcgccgcgcgggcggccgctctctggagctgtcgtcacggcgcggcgggagcgcgcgccttcgggtcgttcgacgagcggtgacggaggaggagagcgaggccgcgcgcggagacgaggaggtggaggaggccccggaggagccagtggctggccgcgacctcgtcacgctcgccgcctgcctcgtgggcctcctcaccggcgtctccatcgtgctcttcaacctctcggttcatgaaatacgtgacgtattttgggacggtattcctttgcgaggcgcttcatggctgagggaagaaccgattggtgaagtctggcagagagtgatatttgttccggtcagtggaggtgttatagtgggtggattgaacgctctaagaagtcagatagaaactaactcagatgcccctgtgtccaagataaagagtgcatttagaccattcttgaaagctgtggcagcatctttcactcttggaactggcaattcactgggtcctgagggtcccagtgtggaaattggttctgcaatagccaaaggatttggtgatgtatttgagtgggacggtgggaaaaggctgtctcttgtggcagctgggtcagcagctgggctttcatctggttttaatgctgctgttgctgggtgtttttttgctgtggaatctgttttgtggccttctgcggattcctcatcccttgccaactcgacacctatggtgatactcagttcagtgatagcatctgttgtttcagagattggtctaggttctgatcccgctttcactgttccggaatatgattttcgctccccaacagaacttcctctataccttttgctgggtgtcttctgcgggttggtgtcaattgcattatcaagatgtacatcacttgctatgaaggcagttgaaagtttacaaaggacaacagggttaccgaaggctgcatctccggctttaggtggcctcattgttggtctccttgcacttttgtaccctgaagtattgtactggggctttgaaaatgttgatatcttgctggaatcacggccatttacaagcggcctctcaacgaccatattggttcagcttattggagtgaaaatattagcaacatctttgtgcagggcttctggattggttggtggttattatgcaccatctctttttattggtgcagctacagggatggcatatggcaaattcatgaagtttacatttactggccctgaaccattgctgcatgtcccattcttagatgtggcatcacctcaagcatatggcctggtaggtatggcagctaccctcgccggtgtatgcaaggtgcctctgacatctgtcctactactttttgagcttacacaagactatcgtatagttctacctttgctcggggctgttgggttatcatcctggattgcttctcctcaaaggttctctaaaagaattaggagtaagctggattcttgggaggataaatcgagtattcctcagcaagcaaacgacatgctcactgaaaacaaagaggccacttccatggatgcagctgatttgtcgttagaattatataaaattgaaagctccctttgtgtctatgatgccaacgacagcaatatgttcaaaaatcttactgttggtgaggccatgaaaactaactacttctctgtctcaatgacaaccccattaattgaggcactagatcttatgcttgccgagaagcagccctttgttatgataactgagaataacacatctgcaagaggcttgctggcactaaagaatatccaagatttttgcaaagctgcaaaaactaccagatcacaagctgagataaaggaagcttatattgaaaataccaagtcattacatcaagaggatacaaatccttggtacagaacttccggcctctgcctaatgcacatatccaactaa

SEQ ID NO: 30916 - DNA, 348 bp, Zea mays
  Peptide Sequence Number=SeqID_72695
atggtgtattacgaggacacgagaatgattctaccggatggcgcggaggagttcttcctgaagcccgtgaagccggccgacatgaagaagctcaagtcacacctgctgaagcggaagcagcccaaccagaagaacaagcctcaggcgcaggcggtggagtctcctgagcagcagctggacccgcatccgcagccggtgcacgagccggaggaagccgcggcagatcgcaacggcgtcaacaagaggaaggcagcggccatggaggaggggctgaccgtggtggtgacggcgccggagagcaccaagccgaggaggctgtctacgagcagcctgactgtggagacctga

SEQ ID NO: 30917 - DNA, 679 bp, Zea mays
  Peptide Sequence Number=SeqID_72696
atggcgcctcctgtcgacgtggtcggtccgcgccctaggttgggcgatgtggaggctcctccgaggtcgaggtcgagtctgtcttccgtggccgtggtcgagtccgagcccctaggtcgggcgaggcggagaccgtcggctggggccagggctgagtccgagccctggggtcgggcgaagcggagttcgtcatcttctggggttgagcccaagtctgagccctgggtcgggcggagcggagttcgccgtctttcggggctgagcccgagtccgagccctgagtcgggcggagcggacagtcggagcggcgcaggcggcgctgtccttctgtcaggccggtcagtggagcggcgaagtgactgcggtcacttcggctctgtcgactggaggatgcgtgttaggataaagctttatgctgatgggggttaccagctgagaattaggagacttgagggtacccctaattatggtccccaacaatttcagacttcggatcttaaaaattgttgcgatgtcagcaagcgcgggctgcccgttgtgctcaagttctcccaagacatcaagcgtgtgcgtgtccccacaattgagatgctcgatgccaacgcgtccaccgctgtcgctgtcgccttccgaatgttgctagaggagcgacgaatggtggagttcgtggaggttgtta

SEQ ID NO: 30918 - DNA, 432 bp, Zea mays
  Peptide Sequence Number=SeqID_72697
atgacggtgctggacgccgagtcgcggttccatgtcctggcggtggacgacagcatcatcgacaggaagctcatcgagatgctgctcaagagctcgtcttaccaagtgaccacggtggattccgggaacaaggcgctggagctgctggggctgagggacaacggcgcggaggacgcgtcgccgccgtcatcgtcctcatcatcttcgtcgtcgtcctcccctgaccatcaggagatcgacgtgagtctcatcatcactgactactgcatgcccggcatgacaggatacgatctgctcaagcgagtgaaggggtcctcatcgctcaaggacattccggtggtgatcatgtcgtctgagaacgtgcctgcccggatcagcagttcattacaacaacaacaacaaagcctttttgtcccaagcacgttggggtag

SEQ ID NO: 30919 - DNA, 3114 bp, Zea mays
  Peptide Sequence Number=SeqID_72698
atgtcggacgtctcgttggatctcggcggcatccgggcggggcccgtggagcgtgacatcgagcaggccatcactgctctcaagaaaggagcatacttgctgaagtacggacgtagaggaaaaccaaagttttgtccatttaggttatccaatgatgaatctgtactgatatggttctcagggaaagaagagaaacatctaaggttgagccatatatccaagataattcctgggcaacggactatatgcaaagataaagatgaagctgaagtatggttcgctgggctgaaaacactgatttcacgttgtcaccaaagaaaatggagaactgaatctagaagtgatttgctttcctctggtgcaactagtccgaggacttacacacgacggagttctcctttgagttcacctttcagcagcaatgacagcatccacaaggatggcagtgacaattatcgactccgtactccatatggaagcccaccaaagaatggattggagaaggcattttctgatgtcatgctgtatgcagttcctccccgtggtttctttccatcagattctaatgctggatctgtccattctatgtcttctggacactcggataacacaaatgggcaccctagaggcgttccaatggatgctttccgagccagttattcaagtgcagttagttcatctagtcatggttctggtcatgacgatggtgatgctttaggcgatgtttttatatggggagaaggaaccggggaaggaattcttggtggtggtggttcaagagttggaagctcctcaggtgcaaaaatggactgccttgtaccaaaaccgttagaatttgccgtgcgacttgatgtgcagaacatatcttgtggaggaaggcatgctgcacttgttactaaacaaggcgagatatactcatggggtgaggaatcagggggacggcttggtcatggtgttgattgtgatgtgtctcagccaaaacttattgatgctctttctcatatgaacattgagcttgtagcatgtggtgaatatcacacttgtgctgttacactatctggagatctttacacatggggggatggcacatttaaatttgggcttttaggtcatggaaatgatatcagtcactgggtaccaaagcaccttttcacatttggtgatggatcttttggggttctgggccatggagatcgtgagagtatctcggtccccagggaagttgaatctctcaaagggctacgcacggtgcgggcagcttgtggtgtttggcacactgctgcagttgtagaagtcatggctgggaattcaagttctagcaattgttcttctggtaagatatttacatggggtgatggtgataaaggtcgcttaggtcatggtgacaagggaccaaaacttgtcccaacttgtgtggctgctttggtggagcccaatttttgtcaggttgcttgtgggcattgcttgacagtagccctaacaacttctgggcatgtgtatacaatgggcagtgctgtctatggtcaacttgggaatgcacaagctgatggtatgcttcctgtgcgtgttgaagggaagctacacaaaaactttgtggaggagatttcatgtggcgcttatcatgtggctgtattgacttctaagaccgaggtgtacacatggggaaaaggtgcaaatgggcggttaggtcatggcgatactgatgataagaatactcctacattggtcgaagcactgaaagataagcaagtcagaattgttgtttgtggaattaatttcactgcagcaatatgcattcacaaatgggtatctggagttgatcaatcgatgtgctcaggttgccgtcagccattcaacttgaggagaaaacgccataattgttacaactgtgctctagtattttgtcattcctgcagcagtaaaaaatccctgaaggcttcattagcacctaatacaaacaagccctaccgtgtctgcgatacctgctacagcaaactgacaaagggacttgagacggatatgcattcttcagcgaagcgagctgctactgtaccgggagtcagtgatgcaaatgaggaggatctggaaacaaggtcaaatgctcaactatcaaggttgtcttcaatggaatcttttaagcatttggatagcagatattccaagaaaaataagaagtttgaatttaatagcactcgtgtttcccctgtgcctaatggaagttcacattggagtggactaaacatttcaagatctttcaatcctgtatttggatcttcaaagaagttcttctcagcatcagttcctggatctagaattgtttctagggcaacatcaccgatttcaagaagagcaagccctccacgatctacaacaccaacacctactctgggtggtctaacatctccaagagttgttcccaatgatggcaagccaacaaatgatgcattaagccaagaggttctgaatttgaggtctcaggtggagagtcttgctaggaagtctcaactcctggaagtggagctggaaagaactaccaaacaactgaaggaagctatttctattgctggtgaggaaactgcaaagtgcaaggcagcaaaggaagtaatcaagtcactcactgcacaattgaaggggatggcagagagattacctggaggagcagccaagaacactaagttgccacctcttcctggaattttcattccaagtgacattccgtctatgcctacggagagtgagggcagcccaagcagctctggagaacaaatcataaatggtcataatggattgcttacttctaatggacaaagttctattaggaataaaacgagccatccagaagttggcaagaatggaggtaggctgcctgatgctgaatcttgccacgatgctgaatgggtagagcaagatgaaccaggtgtttacattactctcactgcgttgcctggaggcgccagagatctcaagcgggttcggttcagccggaagagattcagtgagacacaagcagaacagtggtggcaacagaaccgggcgagggtataccagcagtacaatgtccgcgtgattgacaaatcgaccgccagtgtcaacagtgacattgcggctaactga

SEQ ID NO: 30920 - DNA, 147 bp, Zea mays
  Peptide Sequence Number=SeqID_72699
atgggcaacatcaccatctatgacatcgagttcatccagaccatccggcaatgtcgacaccatacgatcaagaccattgtgactcaacccccattatggtggttgtggatcgctcaaatctcccgacaccagatccctcgacactag

SEQ ID NO: 30921 - DNA, 453 bp, Zea mays
  Peptide Sequence Number=SeqID_72700
atggagcgcgcgaggagggcttcgcacgccggctcttggtacaccaacgatgccaggaagctggaagaggaactcaatggttggctgggggcagccggtctaaccaagtctcctgatgttagggcagtaattgcaccccacgctggttattcatactcgggccgatgtgcagcttatgcttttggcaacatcgatccaactaacatttctcgggtgtttctgcttggcccttctcatcactactacactccaaaatgtgctttaaccagggcttctgtctactgtaccccaatcggggatttgccagtagaccaggaaggtagctggacctcggctacagagttcgtagtctcagacaataatggtgtgggaatttccccccggacaccctatggtgaagggggtgagattaggaagaagggagattggggaaatgaatctgttattgcttaa

SEQ ID NO: 30922 - DNA, 303 bp, Zea mays
  Peptide Sequence Number=SeqID_72701
atgccatgctttaatatgtacatgagctcttctgtcatggatgatggtggtatacaaggaggatacacaagtctattacttggagttgatcaagatgctgcatcagctgtcaaagccggttcagtttttgacaacattttgatttgcgatgaaccagactacgcaagacatgtcgtagacgaaacttttgctgcaaataaggaggctgaaaaagaggcctttgaaggagctgaaaagaagaggaaggctagagaagaagagcgccagcgccacaggcactacgactatcatgacgagctatag

SEQ ID NO: 30923 - DNA, 917 bp, Zea mays
  Peptide Sequence Number=SeqID_72702
atgcgcggcatcagggagagcctcagaacggtgcagggcagcctgctgcgcctggaggcagtcgtgctcctgagcgcgctcatcctcgccgccctggtgctctacggctccgccaaccgccgcagcagcgacaagctgctccgcggcgccatgtggatggcctactccatgtcctacgtggtggtctcctacgccgtggggatcatccaggacgggcccttccgcggcgagacgttcgtgctctgggcggccgcgctgctgctcatccaggcgagcgcgtactcggcgcccgtgcacagccgccgcgacgtggaccagcgcaagaagctgctgctgcagcacgtcctccagacgggcctcgtgctctggctcatcgtcaacgccaccggccacaacgccagctaccgcgccgccatctgggcgttctgggcgctcaacgtgctcaagacggctgccaagatagccgagatgatcgaggtcagccgccccgacctgtctgtcagggttgtcgccgagtacatggccgagtacatggctgaggctgacggcgtccagcagcagcctgcagctgaccccgccaccatgcaagggtacgcgtacatcttccacggcgaggaggtgatggagccggtcatccacaccggcggccaccgcgtccgggaaaacatgctctcccagagcgccgtcaagtcggtcgtcacgatcgaccaagtttaccagtggatcgatcagcagccggacagcgatgtcgagaaggacagggccaaggacttctgcctcgcgttcgccctgttcaagctgctgaagcgccggttctacgggtacgttccggcggaggccggctcggagaaggcgcgcagcctcgtcctcaacgggctcatcctcatggacgccaccggccctgacgccgccttcgg

SEQ ID NO: 30924 - DNA, 537 bp, Zea mays
  Peptide Sequence Number=SeqID_72703
atgacggcaggagaggttgacatgtttctttttatcaaatggtctgttggtgcccgtggggactggggagctagaagtatattcttgtatatcctcaaggatgtgatgtctctaatcatctttcattattcctttgcgttgctaatcatgacaaacttctcccaggcattaatcatggagaaagtggatagaccttttcgttgccttgatcgtccttaccggagagaattgatccgcatctatatgacaaatgtggaacaaatataccgacgttttattgaggagcgaagaagtaaattaagcaagctcattgaggacaaaataaaatggtccagttttcgtgctttctggtcagcaattgacccaaacaccaggcatcgcatgtccagggaaaagactgacaccatattgaaaatgttagtgaagcaattctttgtagagaaagaagttacttccacattagtgatggactccttgtatacgagtctgaaggcacttgaataccagatgaatggcaggaaaggcaaacaaaattag

SEQ ID NO: 30925 - DNA, 2839 bp, Zea mays
  Peptide Sequence Number=SeqID_72704
tggaattgaagttgcgtaccaagaagctgttgcattgaaaaggcaagaggagcttattcgtgaggaggaggaggaggctgggcttcttgaacatcagatgaaggggaagcgtggtggtggtgtaaatgaaaaggacaagcgtgccaagaaaaagcagaccaagcaaaagaagaaccgtaaggctaaagacaaggaaagagatgagaaatgcgaggttaaaattctggaaaggcttcgtgatgaaactgccattgataatagtgatggcttaccatctcaggtggaagtgatagcaaagattgatgccttggaagaaggttcttcagatgggtcagacatgtcaaatagagggaaaaatcagcgtaacaagggcttaagcattattagctttgccgaggaaggtgatggtcttccctccacctctaatgtcactggtggtttaggccgcaatagttctggctgctgcacagctccaaaactggatcaggatactgttctacttaccttgagagatagacttcgtaagttggggcagcgtctgcatgagaaaaacattgaggggcagaaacttctcaaaaaacattttgaagctagggacgcaaaagcgaaggaagaaccttctgactcatctaattctttggataagccacctgatgttccagagatcccggtgcattcatcagaagataccgttgatcttaaagtgaatggaacaccaaagaaggatgcatctgtggtcaaccctgttctggaggattctgtttcaggcataccagtcactgcaaacaatgaacctgtgccttctcccaccacaacaaaaatggacccagtttcaaacaaagttaatggatcaagtttgaaaatgaaagtcaccatggcatctccttgctccaaatcacatccagctgatatggataaagatgcctctcttccttctaaatcaccacgaaccaatagagctgctccagttcctcctaagctgccttcagctgataaagcaacgctagttccctcaaagctaccttcggttgataaagctactccagttcctcaaaaatctccgttggtaaacaaagtagctcaggcccgtcccaaatctccagcagttgacaaagcaactccacatcgtcccaaatctccagcagttgacaaagcaactccagttcgttctcaatctccagcagttgacaaagccactctagttcgccctcaatctccagcagttgacaaagcaactccagttcgtcctcaatccgcagcagttgacaaagcaactccagttcgcccaaaatctccagccattgataaagcaactccaattgctcccaaatctccaccagttgataaagcctctccagctctgccaaaatcattatcaggtgctaaagatgcgctttttccttctaggtcgctgcagattgataagtttactccagccgccccaaggttatcacaagatgataaggctgctctgccttcttcagaacagtcacatatatctccagctactagttctgaagctcaaggggcaactactaggaaggtcacaactaccacctcactttcagaggctgctgcagcatggaggccttcaagtgctcctgtgttacccacaccaagatcaaccgggccagctgcttcacatattcaaacttccacattgctttcccgctcgatgagtgaagcagctgggagaaggccagtaaatgatccttcattttctgccccatcttatactccacagacctaccggaatgcaataattggtaagtctggtctgtctatgacctccgcaagccttgcgtatcagccgtcttctctggatcaagacactgctccttcacggcctctatcagcatatgcatcaagtacagtcatgatgcctcctgcaggaagatctgatcagtcatcagctaggcatggattcaagtctgggcctggtaagttagaagcacatgacggctggcagcagtggaaaggtgacagtaatgttgatatgcatctctggagggaccacgctccttaccaacaaatgaccaacagtcaagcatatgagcagtctcggagggacgatacttatcagcaagcatgcagcagaggaacagaaaagttcagcaggcatgcaggactgcaagctaggcagcagttccaaaccgagacacccgccagtcatgtatggcatcaaccgcaggggccagtggcagaagaatttccacaccttgacatcataaacgacttgcttgaggaggaccagatcaacggcagtataccggagtcgtttcgtcaagactacaacgtgtttggcctgccgttttcaccgagaggaaacttgtcagacatggaaatggcttctgttagaagtcccgctcggttcaattcacccaagtacgatggtggattgtcgggggcttatgacatgaatgctgtcaatgggttgagggaacggcagtttccctcgttggatatctactctaatggcctgtctgacgtgagtgcttctaagccttggctgaatggctctgccagtccatcggtgagccttggggtcaacacaaatggataccacccccagctaaatttggcggtggcctgtgggagagagaagaacggtatgaaggtgagtgtgaatgtggagccaacaaccaagagcggatatcacctccttacgcagaacggcacccgcgccacgctgctcgactacagcctcctcgacggtgccacagcgaaggggcacgtggccgcaaccaccgaccaacatgtctccacgtcctcattcgacctcgacgtgtcatggcaagccgtcggacgccagcaccagactgacgatacgggtctctga

SEQ ID NO: 30926 - DNA, 795 bp, Zea mays
  Peptide Sequence Number=SeqID_72705
agcatcgcgccgccggagacgaggtactgggaagacaaggtcggccagtacgtgctcctgaagcgattcgaacgccggccgtgtaacctgctctcgtggctgacgctttacctggtggagccgcgtcggcagggccagaagcggggcaggaggaagccgctgcctcccgaggtgaagcgcgccgtgctcctctggctcaaacagaaccattgccacctcagcaatggtgtggcgacactgcgaaagcaccatctgttgccgcgtctggcatgggcgtgcaggcttcccatggtcaccgatcagatcttggcgtggcacgtggtcaccacgagctgtgactggtcttatagtttccgtccagctggccgcttcgcagccggtgacgaccaccatcggctcgtcgcgaagaagttgtccaactactgcgcctacctggtggcgttcgtgccggagatgctgccggaccccagctacaacgccgagcagatattcgacacggcggtgcagcaggcgcgggaccacctggacggctgcaaaacgcatagcagcataatcgccaggctagaggagatggagatcgcagagcggccggcggcctttggagtcgacgacgcgcggcggtgggaggtgctggccgagttctggacggagctcgtgctgttcctcgcgccatcggacaacgtggacattcacgctgagatgctcggcgccggcggcgagttcatgacgcagctgtgggcgctgctgtctcatgccggcgtcctggagcgaccaccaatcatgcagaggcaatga

SEQ ID NO: 30927 - DNA, 1365 bp, Zea mays
  Peptide Sequence Number=SeqID_72706
atgggggcctcgctcgccgcccttgccgccgccggcgtcgcgggcatcgccgtcgagctctggtggggcgtcatcgagcgccaccgccccggggagtacgactgggccggctacctcgagctcgccgccatggcccgacgccacggcctccgcgtgcgcgccatcctcgccttccaccagtgcggcgccggaccacatgacccgccctggattcctttgccacaatgggttcttgaggagatggataaggttccggacctgtcatataccaatagataccagaagagaaacagagaatacatatcactgggatgtgatattcttcctgttctgaaaggaagatcacctatgcaagcttactccgacttcatgagaagcttccgcaatactttcgaagattaccttggggccatagtaacagtttgtattctccctgtttttaaaacacataagattaattctgaacaaccaaaggatgtatctctaataacattgtatctcaggaagttcaagttggaatgggcccaggagtttatgcaagcatcattaagtgctcgtgcacaaatttttgggttacaagaatggggtaatgatggttcaactggcacagatggttcgcagaagaaccttgaagaagcaagtttttttaggcttgatggaggatattgggatacaccttatggtcactttttccttgagtggtattcaggaatgcttcttctccatggagagaggctatgcatgatagctgatgcaatcttctctggtactggtgtgaccatctcagggaaggttgctggcatacattggcactactatacttgttcacatccatctgaactgacagctggctactacaatacactactaagagatggctatcttcctatagctcaaatgtttgccaaatacaaagctgcattgtgctgcagttgtttcgacctgagggacacagaaagaacagattctgagagcagcccagaaggtactctccggcagcttgcgggtgctgctaaaatgtgcggccttcctcttaatggtgagaattctatgacaaggctggatgatgcatcactgaatcaagtcataagaagctcaaggctatactcaggccgtacttcaggaacatccttttcctttaactatgttaggatgaacaaaagcttgtttgaatttcacaattggaatcgatttacaaagtttgttaggcagatgtcagatgctaggacctttctagcaagactgtatgtcaggagagggcagcaatgcttgtcttcaatgtcggttgtttgggtgctgcagcagtccaaacagctgcaacagtgtcggcttgcagcctgccgaacacgcccatggctcatttag

SEQ ID NO: 30928 - DNA, 114 bp, Zea mays
  Peptide Sequence Number=SeqID_72707
atggttaggagcgaaggggtcgacaaaggtaggaggctacaagtggtaaacgacctcatccaaggactcagggagttagaattggttcttagtgtaggcgagaaagatgactag

SEQ ID NO: 30929 - DNA, 279 bp, Zea mays
  Peptide Sequence Number=SeqID_72708
atggagtaccaaaggcaacaagctgagtaccagaagaaggacgagtattattcaaacctccaggctcataatcaagctctactatcgcaactgacacaacaagcgggtgtcccgatgtcgacatatgggatgtcgtctcctgactttgcactgccgatgccaacgttgtcgcctccacctccgcctccatcacaattccctatgggatttcagacacctcctgcttcagttgccgcatctagagatgtgtctggtcaagacgacgcatcgaattcttag

SEQ ID NO: 30930 - DNA, 426 bp, Zea mays
  Peptide Sequence Number=SeqID_72709
atgactagtataaccccaagttcagtctctgattcacaattagacgagaccttcacgcatgggagccgcatcacctttggctcccttgacttcctcgccaccgccaccgacgagctccgcctcgttgattctgacacgcttgttaaggcaagcatgggaggacccacacgcttcaccaccgctacgagtaaggtggagaagagatgccttaagagccatgtcgccgccctcaagcggtgccttcacaagctcgccgctacaatcaagcacaaggttgagggagcgtcaccctcaacatttatggccatcatcgaccaccaaccaacctccatcctcgaccttctcaaggatgactcaagccacggctcaatggaggagcccaacattgacgctgtaaggaaaatgtaccccgatccatttggctaa

SEQ ID NO: 30931 - DNA, 429 bp, Zea mays
  Peptide Sequence Number=SeqID_72710
atggcgccggcactgtcttccctgcgctacggcaatagcctctcggtggtgagcatcttcgcgcgcgacggccgtgctctacgggggcatctaccgtaccatcgcagactgcccgggaacgaccccaccgactgctccatgatcttccgctacttcctctgctccatgaccatccgaaccaacctccaaaaactgcttgacttcgccccgccagcaccgttcccacccgttgaagcttcatggtgctcctcgaccgggcccaagcaaacaagctcaccggcgggcgggacgctggcggcatccaccaaggccggctctagactagcctctccgcgtgcctccttgtctaccggtgctgcggtggcggcgccaacgagctttcccccgtgctggtgcctgctcccaggtgtcgggcggatgggaggatga

SEQ ID NO: 30932 - DNA, 429 bp, Zea mays
  Peptide Sequence Number=SeqID_72711
atggcgccggcactgtcttccctgcgctacggcaatagcctctcggtggtgagcatcttcgcgcgcgacggccgtgctctacgggggcatctaccgtaccatcgcagactgcccgggaacgaccccaccgactgctccatgatcttccgctacttcctctgctccatgaccatccgaaccaacctccaaaaactgcttgacttcgccccgccagcaccgttcccacccgttgaagcttcatggtgctcctcgaccgggcccgagcaaacaagctcaccggcgggcgggacgctggcggcatccaccaaggccggctctagactagcctctccgcgtgcctccttgtctaccggtgctgcggtggcggcgccaacgagctttcccccgtgctggtgcctgctcccaggtgtcgggcggatgggaggatga

SEQ ID NO: 30933 - DNA, 141 bp, Zea mays
  Peptide Sequence Number=SeqID_72712
atggctcagcgcggcgtggggcgcgcggggtcgggcgcaggcgtgctctggcgcgctcagagcgcgtcgaacatgtctcgtcgagatcgcaagcgtgcgaatcttggcaaaaatctggcacaggcctcctcctgcacctag

SEQ ID NO: 30934 - DNA, 165 bp, Zea mays
  Peptide Sequence Number=SeqID_72713
atggagccctcaaacctgcagcaagccggtgtgctcacgttcaggaagtccaaggtagaagaagacccctatgcctatgacaagtgggcccaaggccagatgaaaaagattattgatttgcttgttatttttggatctatagctccagtgctccaaatggattaa

SEQ ID NO: 30935 - DNA, 315 bp, Zea mays
  Peptide Sequence Number=SeqID_72714
atggtgcagcttctccaattggctggactaaccagccacaaggcgatgaagcagacgctcctcgagatgagagggcaagaaaggaatgactggcttctgtgttgtgtgtctaagatgagcccatctacaaaagacatcgttaacggtcctacagtcagcatggctttgataccacttatgtcacacccggttttagaaggcaaatcgaatgcgaaccatgtagccgactcggggtttgccgctaacccatgcctagaactcatcgtactcttggaactcctgggaatcctccacctcgacttcatcttctcctga

SEQ ID NO: 30936 - DNA, 357 bp, Zea mays
  Peptide Sequence Number=SeqID_72715
atggctgagctcgcccatggggaagagatggggccgcgcaccatagaggagcagaggcaaagcaactcaccgctgatgaaggtggagcaggggagggaggcgaccgaccacatctcctcgcgggcctcgaggccattctggttcgatgacaggtgggtcttgagtgcctccaggtcctccctcctttctacgtgttctgtacgacggtgggcaggagcaagggcggggccagcgagtgaggccgaaggcggccgcgacatgcagggccagggcgggtgcgccggcgggagcggcttgcgcgggtgggagcaggcgtgcggcggcggcttcaatttggtggaagagacacgagagtga

SEQ ID NO: 30937 - DNA, 144 bp, Zea mays
  Peptide Sequence Number=SeqID_72716
atgaagacaaacgatccgagacatatacaactctgccaatacggcactgctatagttggtcttgacagggtgaatcgaataggctgtctcatgagcttccttgagaatcaactcccgaatggactggacattgggaacacataa

SEQ ID NO: 30938 - DNA, 351 bp, Zea mays
  Peptide Sequence Number=SeqID_72717
atgcctttggatgaggaatttgaggagcatgctgagaaggcaaagaccttgcctgagagcacgagcaatgagaacaagctgatcctctacgggctctacaagcaagccacggttggagatgtgaataccgatcgtccgggcatattctaccaaaaggacagggccaagtgggatgcctggaaggctgttgaagtgttctacatggatgtatctattccaatagcatcacaaggtattacagtacttcttgctcagactcttgagatcttggcaggcaaatcgaaggatgaggcgatgaatgactacatcaccaaggtgaagcagctccaggaggaggctgccgcctcttaa

SEQ ID NO: 30939 - DNA, 1245 bp, Zea mays
  Peptide Sequence Number=SeqID_72718
atggcggggaaggaggcggcggagagcagcagggccaggaggcgcatggatctgaacctgtacgtgggcctcccgccgctgtcgccgcctcgactctggctcgacacctcggcgccttcccgaacgacgtgggtgtcccactcgggtcccggtgccgcgctggacgctccaaggacacgcgagcccgaggaaccgctcgccccggcggcggcggcggcggcggcctactcgccgtcgaacgcgctcttcgccccggacccggaggagcacccggtgtttgatcccttagtgtactcctggctcgacggcagcggtgaagagtacaccgatgctcctgcgctgtcggcgccggctccaacgccggtggatggtcatggtgtctctgggccgcagtttctgatggctgccactgggctggacggggacgatcttgcggtaccaaggcctgtgcaccctagccgggtggcggcggctgctgctgctgctggtggactggagatggtcggcacgatcgtacttgggcagtccactcaagatccggatggcggcggcgacaaggtgcgtggaagcgacgccgcagagaaggacgggtcctgtgactgcaactgcgactccagcttcgagtgcaacatctgcctcgagcgggccaagcagccggtggtcacgtcctgcggccacctcttctgctggccgtgcctgtaccggtggctgcacgcgcagtcgcccttctgcgactgccccgtctgcaagggcgaggtgttgctaacgagcatcacaccgatctacgggagaggcggcgacgaagaaggggactccggctcctccgccgtccccgacctgccgcccaggccgcaagcgaaccggagggacagcctgaggcagcagctgcagacggcgacggacgccagagggatcgccgcggtgctgagggagatgatccagaaccagggcatcgtgacctcggttcccgcaggccggcaacgggctggtagcgctcggaggcagcgaaggcagggtagcaacgcgtcgcgctccgcggtggtgaacgcgggcaatgctgcccctgagggcagcgatccgatccagccgccacactccaatggcggcaacggtgagcaggttgttcatgcagctcctcaacaaccaccaccggctgttgtgctgggcgagcctgggccaagtaggcggtcgaggcattcggagtccgcagccataagaaggacaaggaggaggccacagcagtag

SEQ ID NO: 30940 - DNA, 297 bp, Zea mays
  Peptide Sequence Number=SeqID_72719
atggacgagacaccagtcaaaaacaggaagagcgagcgagcctccccctactccgagaatggcacaatgccggaggtcaggatccaaatggggtccagcaaaatcgaacctccggcacgaacctatggagacttcaccggaatttggcggcgccggaggagggccgaggttctctcaggccccaccatcagcggcgatagcggtggggaggagcgtccgaaactggttccaggaagttcaatgcggtcggagactcgagagtgggcccggactgtcaagaccacggcacaggagaaa

SEQ ID NO: 30941 - DNA, 396 bp, Zea mays
  Peptide Sequence Number=SeqID_72720
atggcggagggcattgcactacggggctacaccgctatcaccttcgacatacgagacgacagtcgcgtcatctcggcgccagaggtgatgcagaggaggaccgacaacaatgaccagttcgtcatcctcgtcaccgtcggagaagacgacgaactccgcttcgcccgaccccagggctcggactccgccctggcctcagccgacgacctccgcctcgcccgacccaggggctcggactcggcctcgaccacggaagacagactcgacctcggcttcggaggagcctccacatcgcccaacctagggcgcaggccagccacgtcaacaggaggcgccatcatcaccctaccccgagctgactcgggccgcagggaaccagaccgacgtcccatctag

SEQ ID NO: 30942 - DNA, 166 bp, Zea mays
  Peptide Sequence Number=SeqID_72721
atggggacacagacctcgacggtcgtcgtcgatggctctcgggggtgggcacagtggtgggataggtggggagtggacgacggtgcatgggtttgggactggggtgtgacggcggatgcggccgttagggctagaaacgagccgagtcgagccaggctcggctcgg

SEQ ID NO: 30943 - DNA, 348 bp, Zea mays
  Peptide Sequence Number=SeqID_72722
atggctccattcggcgacggcggtgtcggctgtggcgatggaggggaggcgctgcgtgggtgggaccctctgcgcagtggcagcgcgccgccaacgatggagggcgcggcggcggcagcggcggcggcggagaggagggtatttggcggcggcggtgacggcgcgtcgttcttctccgggatcgacgggctcatgtttggcgcgaggatggacgagttgctgttcattgatgagattacgtatgatatggatggtgttttcgtttacttttcgatttttgaccgttaccgatgcatttctgttcggaatagttcattttcgtcatcccgcacatcccgtgtccgataa

SEQ ID NO: 30944 - DNA, 678 bp, Zea mays
  Peptide Sequence Number=SeqID_72723
gttttggaggtagttgataaggatcgaaagattgacattgttcatgagctcaggaatcatattctgaaatgtattggtgatcaaaatggtaaccatgtgatccagaaatgcatcgaagttattcagagagttttagagcattgccatgatcctgtgactcaaagtgctaccatgaatgaaattgtgcagcaaaccttccatctgacagatgataaatttgggaactatgttgttcagcatgtgttgaaacatgggaaaccagaagagcgttcggccatcattcaaaagctctctgggcaagtggtcatcttgagcaagctaaagtatgcttctaatgtcatcgagaaatgtttggagtttggaactcttgaagaacgtgatagccttattggggagatcatttcttctggtcaaacatttcaggaattgatgaaggatcagtttggtaactatgttgtacagaaagtccttaagacatgtgatgaaagatacctagagatgatcctctcgagcatcaagttacacttgaatgaactgaagaattacacgtacggaaagcacattgtgacacgcgtcgagaagctaatcgttacaggagaggaacgagcaaggatggcctccctgagcggccagcgtcagcagcagccaccaaactgtacagctgtcgacgcacactaa

SEQ ID NO: 30945 - DNA, 459 bp, Zea mays
  Peptide Sequence Number=SeqID_72724
atggccctggtctctagatgtggttcttcccctaactcctcacctattatgtttgctttgtcttctttgttgaccgtcacagaggagcaggtggagagcctcggggatgaggagctagcacttgtgtcggtgcaaggacaagcggagcacacctctagcaagcacaagtctagggggaggttcaacaaggaggcgctcaagaagaagtacctcgagaaggcgaagatcaaggagagcaccttccccgtctccctgagcgacctcaaccatgactctaacgagtcgacctcttcattgagcgatgaggagctcaagaggcacgtttatgacaagctaaacgggctatgtttcatcgctgacactgcaagaggcctttgcaccatggcccttggtgatgatgcgatggacatcaatgacgaggacattggcaatgactctgcttatgagtttgcatactga

SEQ ID NO: 30946 - DNA, 385 bp, Zea mays
  Peptide Sequence Number=SeqID_72725
gaccccgtctcttagctcactcgtcttccgcttcagcgcgagctctgctccgctcctcccatcccatgggcaacatggcatcaacggtagatctacctactatgattatgacgacattcccacctactcggatacctataaatattccagcactcatttgccacccatcgttcgtgatacgacaaaacaatcccgcgatggccccaagaaagcgacttccaaggccaccacctctcttgatgacgcgacgaaggcgtccctcactgacaagaaatgcaaggcagccctcaccatcgacgctccccaagatgcacccgaaaacaacaacgaagcggtcaacagcaagcatcctcgaacagagaacccacccagcctcggaggctga

SEQ ID NO: 30947 - DNA, 2991 bp, Zea mays
  Peptide Sequence Number=SeqID_72726
atgcgggatgcgagggctccgcagttccagaggcggggccagggcggcgtcggcgtcgtcctcctcccgctgatgctcctcctcgcaggcaccgccagcggccagcagcagatccagccgcccccggtacctccggcggacctgccggacgtggagaggcggctcaacaacctgaccgaccacgtcgccaccaccatctccgacaagttccgcttctgcgtcgccgacccgaaggaggactggaacgaggcgttcaactacacatcggacctcagcttcgtggatcgctgccttaccgagacccaaggcgacctgcctcagcgtctctgcggccccgatgaagtcaagttctacttctcaagcttgtacgaccgcgatggggacaagaacatcaacctcaagacaaacataaactgcaacatgtcttcttggggcaagggatgcgatgccggatgggcctgcgccaccgatccagttccagaccgccccagcaaccgtggtagcaacgatatcccgctgagaacaagcagctgccaggcatgctgcgagggcttcttctgcccccgcggcctcacttgcatgctccgcactattgcagattgggttccacagctgaggagaggtgcgttgtgcctgctgcttcttgtcatatacaactgctcagacaaattcctcagcatccgtgaacggaggaaagcaaggtcaagggagaatgccatccggctagctcgccagcagctaaaggcgcaggagggatggaaagcggcgaaacagtttgccaggaggcatgtgagtggcatgcagggtcatctttcacgcacgttttcgcggaggaggtcgtttcgtcagcaggtagacgcagacaagtctagccatagggtgcaggaagcgccgctgatgggtcaggtccagatgcaggaaatgtcggattctgctgtgtttgcttctgagagcgcaaatgagataacagaggcgatgccatcagtcattgtagatgtcagtgatggggaagttgttgctacaaatgaaaatcctgcgccgaaaggaaaacatagatcaacccacacacaagtgttcaagtatgcgtatggcgagattgagaaggagaaattccagcagcgacaggacaacaagaatctaacttttactggggtgatcgccatggtgaaggaccagcagaaggagataactaggcctttgctcaaggttgagttcagagacctgacactgatgctagggaagaagaagctgctgaggtctatcaatggtgaactccggccggggcgtgtaactgctgtcatgggcccatcaggggctggcaagaccacatttctcaatgccgtcactgggaaggtgaacggctacaagatgacaggttctgttcttgttaatggaaagaatcttaatatccgttcctacaaaaaggtcattggatttgtgccacaagatgacattgttcatggaaacttaacggtggaggaaaacctctggttcagtgcaaagtgcaggctatcagcaagcatgaagcatcgcgacaaggtgctcctagtggagagagtgatagattctctggatcttcagggaatcagaaattcattggttggcacagttgaaaagcgtgggatttctggcgggcagaggaagcgtgtcaatgtgggcatcgagatggtgatggagccgtcgcttctaatcctggatgaaccaacatctggcctggatagctcctcgtcacaacttctcctcagagcccttcggcatgaggcgctccaaggcgtgaacgtctgtgctgttgttcatcaaccgagctacacgctgtacaacatgttcgacgatttgatactcctcgcaaaaggggggttgatggtctacaatggcccagtaaagacggtcgaggagtacttcacagctcttggaatccatgttcctgaccgcgtaaaccccccagaccactacatcgacattctcgagggcattgtgaagcctgattcttctgccatcaaagcgaagcacctaccagtgcattggatgctacacaatggctacgaagtaccaagtgacatgcaagatgatgtcaaggaaatcggtgaacaagccccacaattcaggtccagctcctcgacatctggctcgccctctcctcactgcctccccatcagaaatgcatttgcagaagagcgtgaccgtctcgaacagcgtttgtcaaaaccgaaggacttgtccagcagaaaaacaccagggatcttcatgcagtacaaatattacttgggaagggttacgaaacagcggctgcgtgaagctaggctgctcatggttgatttcctgatactaggcctagctggtatctgcttagggacgatagcaaagctcagtgacaaaacattcgggatgcctggctacatatacactataattgcagtctctcttttgtgcaagatcgcagcactgcggtcgttttcgttggagcgattgcagtacttcagagagagagaatctgggatgagctctctggcatacttccttgctagggacacgattgatcatttcagtactgttgtgaagccgatcatttacctgtctatgttctactacttcaataacccaagatcaacaattgctgataactacattgtgctcctcgcgcttgtgtactgtgtgactgggataggatacacttttgccatctgcttcagtcctggctcagcacagctgtgttctgcgcttatcccggttgttctaaccctgttatccactcaaaagagtactccaacattaatcaggagattgtgctactcaaaatgggcattggagggcttcataattgtaaatgccaagaagtatcctggagtttggcttataacccgctgtggcctgttgtttcagagtcaatttgatattcacaactacaagctctgcattttgattttgttcatgtatggtctgttcttcaggatggtggcatttgctgcaatgattttactgaagaagagatga

SEQ ID NO: 30948 - DNA, 219 bp, Zea mays
  Peptide Sequence Number=SeqID_72727
atgtccctcattgggcaacagtcatcacgacgttctccggggcagtggcaagctctattggtaaaaagaatatatgagccactacctgatccaaatataaaatcaataaaatgttcgtactctagactgggcacctccacgttgtctctgcacaccatgaaagcacagatcagcaacgggcgtggtggttgcctggctttggctttggccgataggtag

SEQ ID NO: 30949 - DNA, 222 bp, Zea mays
  Peptide Sequence Number=SeqID_72728
atgccgacggaagcaagggaggccctggatgcctggacttcgacttctcgtataggaggagcaggagagaggaatacctccccgcagaaaaccctacgaagaaaccgaacgctcggctatgagcagagtacatcaacaccacgcgccgcgctgcctgtgttccggagagggagacgaccgaggggatctggggccgacggggtttgcggcgggcgggcgtag

SEQ ID NO: 30950 - DNA, 456 bp, Zea mays
  Peptide Sequence Number=SeqID_72729
ctggacacgagcctggagcttcccccgttccccgccatgcactccgagctcccggcacgaagcttctggcctcagattcttccgccgcaccaggagtggtcaccgccgatgcgcgtgcgcgccggtgctacaccccgcacgtaccgcgtgcgtcgtcggtgctgcctgctctgctcctcctctgtctgggtctcctcaccggctcacctacctgaacctgataatggccccagccccacgcgaaccaagaccgccgggcgcggggggcaggtgcggtgctcgatcaacgtgttcggcgtccgtgtcgttgacggccccgtggtcctcctgtgccgcacatcgcacgagcgcgtcgcggcgtgcctgctggcgcgcggcgcggtgacgcacgcacggtgcgcgaggcgcaggagcacgcagcaagtcaaggaactgtgctgtcctggacagtactag

SEQ ID NO: 30951 - DNA, 693 bp, Zea mays
  Peptide Sequence Number=SeqID_72730
atgactctgtttcatcgtccgtcggatgcaactctgcagcaaccaacgccgaaacacgcccacgcctcgcgcgagcactggctcccccgaggccccgatccatccctcctccccacgcccctctctcacctaactgccccgctccgatcccgccgccgacgccctggccccgcgcaagcaccagctccgaccccgccgcgtctctcccacgccgccatctgcacggctctggcatcctatgcaggtctcctccagcctcgcgggctcctctacccggccctcaccacggcgtcgcacgatgacctcgaaggggcacgctgcgtcgctcctgcatcctctccggagctgacccgaacgccgtcgtcgcccatcccgtctccctctctccgggaggacacctcgatggccaacacgagctctggatcggctagcttcggcacgcttcctctcggtctgccgcagcgtcaccagcgggggtcatccatggcgccgcggaatccaccggatccgcggtgggggaccatggcacccaccggagacgacgcccttgcccccttctcggtgcctgctccactgcctcgacctggcgccatcgtcgacgtcctgcgagacgcgctcgacaacctccacacgtgcgtctactgcaaggcgtcccagcagctatccactgcgctgggcaccaccgagagttga

SEQ ID NO: 30952 - DNA, 213 bp, Zea mays
  Peptide Sequence Number=SeqID_72731
atggcgaggacctcgtcgaccgggaaggagcgagtccgcctccaacgtctgctccacaacgacgagaaaatccgcacggttgaggtggaggacaagaccgtaaagctgcagattctgatggctgatgctgcatgcttcaacagtgggacacagcagggcaggagcggttcaggaccatcacgagcagctactaccgaggagctcacgggataa

SEQ ID NO: 30953 - DNA, 153 bp, Zea mays
  Peptide Sequence Number=SeqID_72732
atggcggagcaggaggagcggtgcagtgcagcccacgcagacccaatgaacaaaatcttggcacaaagaaaggggcaaagttacacaaaaacacaccggaacattagggccaaaactgatgtgtttgtcaagcatgatatggcagatgtgtaa

SEQ ID NO: 30954 - DNA, 624 bp, Zea mays
  Peptide Sequence Number=SeqID_72733
atggcggctgtccggatagatagaggcacagaggaggtacagatggccgtaggcatgcagagcggacgtgcgatatctccgacggggaagggggcgatagatgtcagcgcagcagcccggcccagttcgttgtccgcgcccgccctgcccacggcggcaggggagcagggtgtacgcatggcaggattcgtggatcgtgtaaaccggcggagtagagtgttagagagaggtggatcgatcgagtctttagaggtcgtagctctcgcgccgttgcgtttcgtgctgggagaaggaaagaatctcctctgcaataaaggacatcgctgtcatttgtctctctcaatctcgttaccacggagtagattacaacacgttatcagcactgctcgcgagatcagagaagaaaagaagaaagaagctactcttagcggaagattttttttccggcgatgctcccagtgcgcaccggtgattgaccgaggaagcatgaaggctttcaatcataatgcaaaagaacaactaagtgggatgacgccaggcaggaacaaaggatgccgctacacacgccaaaaagaaaaggagaagcatacagcgacgctttattgtccacatctagcactatga

SEQ ID NO: 30955 - DNA, 222 bp, Zea mays
  Peptide Sequence Number=SeqID_72734
atggtcggaggaacactcgccctggccggcagagcccgcgccgggccgccgtgcccgcctggacggggtcgtgcgccggttgccgcgcgctgccggggccgctgccgccgggccgccgtgcccgcctggccggggctgtgcgcccgcgccgaggccgcctgccgtcgacccgagactgcggtcgcgcccacgcctagccaaaagaggacgccgaggccgtga

SEQ ID NO: 30956 - DNA, 894 bp, Zea mays
  Peptide Sequence Number=SeqID_72735
atgttcaggggctgcggcctgttcgtctgcgcccgccgggggcgcggcgacctcaggaagcgtggcgagctaggcggcgcgagctcgcgggtagcgccggccgagccggtgtgcgtggacgagtcagaggacagcggcgccgcgcggcagctggcgtgggcggaggtggaggccgccacgggtggcttctcgtccaaggtggtcgggccgcggcgggttcagcacggtgtacctcgcctcgctctcctcctcctcctcgcgggctcggcgccgtcaaggctccacgggggcgcggccggcgtccaggtcctcccctgggcgcgtcgcgtggcggtcgcgttccaggtggccacggcgctggagtacctccacgagggccgcgacccggccgtcatccacggggacgtcaaggcctccaacgtcctcctcgacgccagcatggacgccaggctctgcgacttcggcttcgcccacgtcggcgtcgcggccacgatgggcggccggccctcggatcgcgccgtcatgggatccccgggctacgtcgaccctcacctcctccgctccggagtgcccaccaagaagagcgacgtgtacagcttcggcgtgctgctgctcgagctcttgacgggcaaggaggccgtctgccgcgagacagggcaccggctcacggccgcggtgaggcccaagctcagcgacggtcaattgccggacgtcctggacccgaggctgcgaggagactgcgacgtctctgaggcggcagccgtggcggagctcgccatgcagtgcgtgagtgatagccccgggctccgaccgtccatcgccgacgtggtgcgcgtgctccaggagaagacctccgccgatggatcgagattgggccgcaagatgttgtcctaa

SEQ ID NO: 30957 - DNA, 543 bp, Zea mays
  Peptide Sequence Number=SeqID_72736
atgaagaccgtgagagcagtcattaggctcgtcttgtacgctggcaccctcgttgccatagatgcaagaagaaaggagaaaggcaaagcggccctacggcatcgccaggtttatcatgggtcgttgaagattgcgattcttttctccagtgcaagggagcagtttaccatgaactgtaaaactagtcaagttaagttacccaaggggacgttccagcaggagaagacgaggacgaccccgagcggctccggcaccacctgcgcggtcgccggccaagcgatcagcgggacccgcacctgcgttcgccgacacagaggcgtcagagagcaacggttgccgaagaagaaaccattactggactactggagcattatgttcccgtggcttgccttctccggggccatccatttgccgagctgctgcagcgcgccgttggcggacttgatgagcactccgacctggcaaaccagagaaaatccaaccgaaccgacccgagaggccgagacaatgtcgatcgatacatcaaacagaggcaaaggctaa

SEQ ID NO: 30958 - DNA, 282 bp, Zea mays
  Peptide Sequence Number=SeqID_72737
atgggccgcaccgaggcggcggacgacggcgccgagtccggcgggctgggcctgggggtgggggtgggggtgggggagacagtgcgcgagctgcgggaggcgtacgagagcggcaggacgcggagcctagcgtggcggcaggcgcagctgcggggcctcctccggctcctcgaggagaaggaggtcggagtgctcatcaagtccgccaacggcgcgctgcagcagctcggcaaatggatggccccggagaaggcaagccacgggaacataatgctccagtag

SEQ ID NO: 30959 - DNA, 336 bp, Zea mays
  Peptide Sequence Number=SeqID_72738
atgacgcacagacattatgtcgaactcgtggtatgcactggctggagatggtgctcatcagatggtgctggagatgtcctctccacgttcgtctcattcccgaggtaccactaccggaatcgtaggctttgccgagtgtctgatgcactcggcgaagctttaaaaacactcggcaaactctttgccgagtgtggcactcagcaaagagggctcggcatacagtgcatcggcaaagccgtctttgtcgagtactttttctggggcactcggcaaagaggtttgctgagtgccagagagcactcgacaaagaaaagcaaccgttacggcgacgcgtga

SEQ ID NO: 30960 - DNA, 267 bp, Zea mays
  Peptide Sequence Number=SeqID_72739
atgggggcagagtcaccgcggaagcaatactgtgtgttccttgctctcatgctgttgggggatcgttcgggggcatctccaattcatagggagtgtacccctggcactgttgcatgctatatcatcgccatcgatgactggttacccaccggaattcgtcatgccgccgtatgtggagacaaataccttcgacatcatggccacgttgatatggatcgggcggctctgggtgcccgatacctcttcgtggtgggcggtattgcataa

SEQ ID NO: 30961 - DNA, 267 bp, Zea mays
  Peptide Sequence Number=SeqID_72740
atgagcaggccggagcacgcgtcgctgacgagcccgaccgcctatgcacgcggccagccctactccggtcatcaccgccggcaatccgcccctcgacgtgaccgccagaagcccccggacctcacccgaccctccaccggacctctcctaccgtcgattgtaaccttgctgacggagagtacgtcctcattccggagcaaggagttgcttaggaaggagtccaagagccagcaccagagcctgccactgaggatctccctgccctag

SEQ ID NO: 30962 - DNA, 417 bp, Zea mays
  Peptide Sequence Number=SeqID_72741
atggccaactccggcaaggcgcgggcgtgcggtggcgagctccagcgggtctgggcacgggaaagggagagggagaggcgtcgaggggagaaacggccggtcatcaccacgccattgatggccatcaatggtggtctccattatggggaggaaattgggagggggaaggaggcggtggtggcggtttcgggtgcacaggaagccgaggggacgcaagctggttcgggcaggggcgagggtcggcgatcgggcgggtcacggtggcacgcgaggtgcgggcaccaggcggcggcacggctcggaggaggaaaaaggggcctgacgggtgggccccgtctggcagtgagagagggagggaggaaggggtggcacgacggctggttgggccctggtgggccaaaacggccatgcggctag

SEQ ID NO: 30963 - DNA, 381 bp, Zea mays
  Peptide Sequence Number=SeqID_72742
atggactcctcctacctgggaaagcgcaagctggacggcggcgagagggagccgcccgcggctgcgttcctcccggccgtcgcgctcgggtacgagtacgagtacggcgacgcggaggcggtggaccaccggccctgtcgcgcggcggcgggcgagatggacttcttcaagaaggaggagaagagggagaggaaggctgccgccgccctggtgccgtcggacgaccttggcatcaaggaagatgaagtcacaatcaacatgggtctgcaccacgtcgacaggaggaagagcagtagcgaggagtccatcgtcatcgacgacggcgtatcctccaacgatgtcgatcacagggaggccaaagctgaggtgagggaaaaatga

SEQ ID NO: 30964 - DNA, 1209 bp, Zea mays
  Peptide Sequence Number=SeqID_72743
atggttaagcctatttccctttcaatctctcttccccttgcccttgtttttgttgctggcggtaggagcagagggacggggaggcccactagagggtacatagaatgggtggtatatgatggctgccagagctgggagacatcattcataattcaagcattttgcgctacagatcttgttaatgactatggttcaactcttcagagagcctatgagtttatgaaaaattcacaggtcatgaggaaccatcctggtgaccaacgttattggcatcgccatagatcgaagggttcatggacactttcatctgcagacaatggatgggctgtatctgacactacaggagaagcacttaagacgagtaaagctaccttttttctctcaaacttgaaggctgtactgttgctgtcaaagatctcaaacaaaaacaaccttgttggggatccaatagaaagagaaaggttgcatgacgctattgattgccttctatcttttgcgaacaaagatggcaccttttctacatatgagtgcaaaagaacttattcttggttagagattctaagtccttgtgagactttcccaaacattgttgtcgattacccttacccagaatgcacttcatcagtgctccaagctctgatattgttcaaagacttatatcctggttaccgcacagaagagatagaagcattagttagaagtgcagcaacgtttattgagaccaaacaacaagaagacggttcatggttaggtaattggggtatatgtttcacctacggggccttcttttcgattaaaggtttagtcgcttctggaagaacgtacaagaacagcccttgcatacggaaagcatgccacttcatattgtcgaagcagctcagtactggtggatggggagaaagtcatatcgctattgaaactcaggtgtatgtaaatctcaaaggtgaccgtgctcacgctgtgaataccgcctgggcaatgctcgctttaatttatgctggacagtttgaacgagatccaacgccattacatcgtgctgcaaaggaattgatcaacatgcaactggagacaggagagtttcctcagcaagagcatgtaggatgcttcaactgcagcctctacttcaattacccaagctaccgcaacttgttccccatctgggctctcggtgagtaccatcgtggccttcgtgcaaagaaagacaattga

SEQ ID NO: 30965 - DNA, 282 bp, Zea mays
  Peptide Sequence Number=SeqID_72744
atggccaacaacaacagtggtgttgtttggaccctcggaacgaccattcgttttgggagtctcgacttcgtcatcaacgataggagaacaatggccaggaccccggagccctggttcccccaacgagctacttgctcgacattgccggaggcctcgacagcctccgactcggttccccacgaggtggtgacgggcgacgacatggcccccgccaacatcgcgaagtactttggggaatcaaaccccatcctatggctaggatactacctgctggcatgttag

SEQ ID NO: 30966 - DNA, 357 bp, Zea mays
  Peptide Sequence Number=SeqID_72745
atgactaaccttgctaacgccgacattatcagcgctttcatctcaaggaccactagcgagacccaggtgcataagctagggcgaaagagcccgcaaacaacgaaggagcttcacgacatcacaaccagtcacgcgttaggggaagacgcgttgggacgatcttcgaccaccgtaagcagaaggccaaacaccactaggagttcaatgggggctgatagagggcaaggcccgatcttccgtgagtttctaattgttgacatcttggcctttcccaagtccttgctggtcctccccaaggttactaatcaccaaaacatccatgtaacgaagcgttctgaaacacaattgactaggtaa

SEQ ID NO: 30967 - DNA, 273 bp, Zea mays
  Peptide Sequence Number=SeqID_72746
atgtgtgcaggcgaccgttggcccggaggtagccgttgctccgctggcacaccagacagtctggtgaattatagcggagcggcctccagaattcccgaaggtgagcagttcggagttggagtccctggtgcaccggacactgtccggtggcacaccggacagtccggatccttggaggacatggttgctagagtgacttggccgtccatcttgccaccgggttggacagtcgagtgggaccctacctcggtcgaggaggagcatgaggagtga

SEQ ID NO: 30968 - DNA, 309 bp, Zea mays
  Peptide Sequence Number=SeqID_72747
atgggcgctaggtcgagcccatgcacgccggtgtcggggcgattggagcaagggagttggcgtcaccaggagttgcattcggaagggaggtcgtgggcgcaacaatggatatccacgaggaaattctggtgctttgcccgtatggtatatctaccaatggcttatctttatggcaagaaatttgttggaccaattacaccaactatattggcactaagagaggaaatctatgacactccttatggaaagattgactggagtgatgctcgtagtaaatgcgcaaaggagaactacacatctttatattaa

SEQ ID NO: 30969 - DNA, 522 bp, Zea mays
  Peptide Sequence Number=SeqID_72748
atggcgccatggctgctgcccgagcaggggctccctgctgatgcgcgaagaagaaaagagggggcgtccatggaggtcgcaggggctcggccatgggagagtggccagcgccatgggaggtgtacctgctggcagccgtgggaactagggaggaggaaaagggggcgctggctgctgttgcgcgagggacaaggagcagggggcgtcgaggaagctggagccgagggggagaaggggaggacgccatgggagagagctagaaaaatctgggcgccatggttggagcaggggcgcccgcggccatggaggttgctgggagatgggagccgctggctgctgttggccggagagaaggaggaggacggccgagcgagggaggaaggggctgctgctcgccaggaagaggagcagaggtccggccgtggggagagagccacgtccatgcttgctgccgtgaagcagggaggaagaaggtgtgtgggaaaaaaaataggtggctggtggaagagaagtgacggctag

SEQ ID NO: 30970 - DNA, 426 bp, Zea mays
  Peptide Sequence Number=SeqID_72749
atggctgtgggccataagggccgcgatcccccctggggcgtgacacaggtggggtggaaacatctcagggatgttgctagagccatcaagggggctgacctttttatgccacatagtgtggggaggcttgctaggattagaagaaggcccacatatcatcgtatgatgggtcaggcagaggccaccgagggcctccatgacggtgtcgagattcctaagcgaaaggggtcgggctttcgaggccttgaccatttcccctttgctgttgaggacgaagtcgaggctcctaaaatggatggtcattatgagggtccaaacaacatcgtggtcgaccatccagagcttggagaagaaaacgtcgggaacatgcaaggcccctacctggcgcaccaattgtcggtgtttcgaaccagctccgataagtaa

SEQ ID NO: 30971 - DNA, 716 bp, Zea mays
  Peptide Sequence Number=SeqID_72750
cgcccgtcgcccacccgcctcctgctcctctcgtcggccgcggcaggagcaactccgggagcaaggccgattcagaagggtacaacttgaatgaaaaggccgatgatgatggcatacacgagtcaatccgggatgggaatgatggcctgaactctaggcagtggaacttaaatgagaaagcagaggatgcttaccacagcgaagcagagcaatatgagtctggccagtcaggtttgtacgcatcaaggcagcatgttcagagaggaggcagatcgtctggtggtccatggggcacaaattttctgaaggattccaggtccaaacagacggccaaggaagttgcatcaaatagcggtagaggaatggatgctgctaactcgcatgatgacatggatggtagcagagaggatgatgaactgaatagagcaaatggtgaggtgcctgctgaggaaatgctctcagatgactattacgagcaggacggagaggatcagattgaatcgttgcatcgtggcgggatgaagcagtcaagctgttccacttctggtggagcagcaaagtctggctcacgacaaatgaagaagatgtcaaagtacaatgcttatgataacgatgagtataatgatgagaatgatgatgacagcgatgcagatgaagatgatcctgctgacatggattttgagccagacggcgaaacagacaaggctactgataag

SEQ ID NO: 30972 - DNA, 738 bp, Zea mays
  Peptide Sequence Number=SeqID_72751
atgccaattcaagaagatattgcagtaaacaccgtaaatgacaaatggatatacatcactggtccagctgcgtcaacagacgacttcacagttgaatttaaggattacaaagataacggtgaagtaattgcactcggagagactattgtttacgatgtagagcttgaagctaccgactcattaggcggaactgctacatacacaatccacttgacgttcattgatgatgaaaatgatccactaacactatcatgcatcaagaaaactccggtaggtgccatagacaataactggataacacttacatccatatctactggtgttgaagtaagaggcactacacctgcggataattcttatgccggcacttatgtgataacttgcacaattgctgacgaagaacttagcaacagctatgatttcacacttactgtaaatgctaaccaacccattgtgataacaaatatcgctgatgtttctatcgaagaaggtgtgttgtccttaggagcaacttactcagatgcacagttgtatgatgttgcatttataggaattgataatataggccaagaagctgaagtagatttcactattgaaatactagggtgttacagtaattgcgaaagttgcgatggcatcctcgcaaatcaatgcacctcttgcattgcaaactatttacttctcaaaaagcaatgcgtgacttcatgtccagagggcactttcacagatacagcttaa

SEQ ID NO: 30973 - DNA, 501 bp, Zea mays
  Peptide Sequence Number=SeqID_72752
atgtttgtgcaatttgttatggatccattggttaaagagtacaataagttatttaatagcgatatgctgaccaattctgctgagtataaggaagctcgtaacaagatcaaaacattattttctaaatggatgccaatggagaagggtcaaatggttaatgtcatcgggccaaagcacggtattaatgatcaggttgatatcaaggaagccaaaattgaccacatcttcctgttaatgggtggtcagaacatccaaattatagatgaagcacccgcaggtacaattgttggcatcgctgatttggaggatatcgtgctcaagacagccactgtgtctacatctactctttgccctaatttcagcaagtccaaggccatttcacaaggactggtcaaggttgcactggaaactgagaatttaagcgatatggagacactcaagagagggcttatcaagttggacaggtctgatccatctgtacagttttacataaaccattag

SEQ ID NO: 30974 - DNA, 639 bp, Zea mays
  Peptide Sequence Number=SeqID_72753
atggcgcagagggtcgtcttcttcgcaacagacctagatctcgccttccgggagggaccccgttggggaggagatatcttagggtgtcttggcgtcggcaggctatccaaggtgcctctagtcgacgcagagctgaagagaggaatagggatggcaattggacccgtgggtatggatacccacgggtttcgtacccggtggacatggatacgggcgctcatcccagccgccagacccaggaggcaggaccccagcgcagcagcgccccacgctagtcgccacatccccgcgcccccgcccagcagccagtccccggcggccaggccacatccccgcccagcagccactcccaggcggcggccgccggccaggccacatccccgcgcgtgctacgcctgtggcctgcgtggctgcgacctgcgacgaggagcctcgcgcgagctacgcctgcggcctgcgacgagccccgagcggtcgagctgcgcctgcgtggctgcgaccggtgaccgtccccaagctgcgactgcgactgcgactgtgactggcgaccgtctccaacctgcgacgtcctcgagccctaggcccgaccggcgtccccgagctgtgcctgcgccgtccccaacctcaggtactcagtag

SEQ ID NO: 30975 - DNA, 3327 bp, Zea mays
  Peptide Sequence Number=SeqID_72754
atgcctctgtcgcggcatacggtccggagcgagtacgcgctgggcggccgcgacctctaccgcggcgccgaccagcacgacccggaggccgtcctcgatggcgccgccatggccgggctcgtcggcgtcctccgccagctcggcgacctcgccgaattcgctgcacaggtgttccacggcctgtacgacgaggtgatgagcacgtctgcgcgagggcacggcctcatgctccgggtgcagcagctggaggcggagctgccgctgctagaggaagactcctgccagagaaactacctgcacgtcgttgcctctaacaggggtgtcgactggcatccaaatccaagggtggaccatggggttgtcgcaggaggcgacacgcctcgcttcatcatggagtcggtcaagcagtgccgcgggccgcccaagctcttcgtgcttgacaagtacgatgtcggtggcgacggggcgtgcttgaagaggtacaccgacccgtcctccttcaggacgggctccgcatgtcctacgaccttgctgcaggaaggaactcgagatgatagaagacctctgagagccgtggagatcagtcctaaccttcagaatgctgagattttcagatcccccaatgcagccgacaatttctccaaactggagaccggttcatcggctggagctctggatgaagtgcccacaaaccgcagacgactcaagttccgccagctaaatggatccgtgtttcaaagcttcagaccgctcatgcagaatctgcatgaaaagccttcatcagaggagagactcatcacaggcgaccactcaaaagtgcatgtatttatggttgagtcacctgaaccaggtgctgaagagagagatgtcatggtagacacgtccgacaacatggagaaaggcaagctcaccgttcgcaggaaaagatcagtttctgaagaagcactgtcacgttcgtctgatgctcggtcagcaggaagcagcaggggcggctacgactccgaactggatatctacgtggacgcattaaccacgatggattctgaagatttcagtgctccggagtctggagcaagagagcaagctactgaagaagaagaagaagagcagagatgcaatggcagtgtcaccagtgctgtatcaaatggcacacgagatattactaagaagaccaaggaagtcaaggagaactccaagaaaatagcaagcaagaggtccaagtatgttggcagcatggagctcactgcttcaaaagttggcattctgccaagggagctctccgagaagcatgcccctttctctggttccctccggtacatggcgaagcaactccttgaactgaggtatgatggcactcaagacagcgaattatatgacgttgaagcagacggcgtgggacgtgatgtcaagtaccaggaaatttctgaccatgctgttgaagctaaggagagtgatgctgtgcacaaaattctgtcaggttcaccctatgatgatgcgggtttaggaaaatgcccgcaggaagaaattaaccatgggcaggagcatgatgttccacctactgacagtccacatgattcggcccctgatgaaggaaatgggtttcaggactccaacatggcctacttggtaggcatcatcacatcttccagttcccaagagggagaaggatgtacaagtactgcactgcatgagaattcatctatggcagtgctcaaccatgttttggaacatgctcaagagaggtttggggaagatcttgacaaggaagtggatgtggacattcatacagaagccatttctgagaatacatctgataagtgtgaggacttgaaagaagtcagcatttacacggagcaggtgaatgtggaagatatggaggaaatcaatgaatctgatgtatatgcgttggacgatgaaagagccgagtacatagaacagcaagtagtttcagatggtagtatctcttcaccggtttcatccaagcaatcggatgatccttgctggataactccactcaccctcgcagatgaagatgatacagtggcatgtaaggtcgtcgacagacctgaaggggatcatgttatattatcagaaacattcaagggcattgatctacctaatgtggtaactgagtcagtaatcaacagcaaacatgacatgccaaataatggacagtactatttacatccaaaagctacttttggacaagatctgtgtcttggcagctataagattgttggagaaaatggggaagttccactatgcagctcaaccactgcgactacaactccagaactaactgtaaacacagagacaaagcatgagtttcatcaagctgtgtatcaggaaccatcgaattcattcaatagcagtgctgaagtttttggagatccactagctcccgactccagagatgatgcaccgtcagtcatctcaagctttgattggatgctcaatggtgcaacgcagaagtcattcaatatctttccttctcatccaactaatggaaatgcagaagaaaatggttcttctgaagatgtgccaccgcttcctcctcttccaccgatgcagtggcgaacaaacaagatacagactgggccatcaccgttatctgcgaaaattgggagaccaccaaggccaaaaccttcagtaaaacaacaacaaagtgaagcttctcatgttcttcaggagaacagtctgcacaaaggcttgagtttgcagaatgaactagtgcaggcaaatatttctagtgaccatgagaaaaaccaaattcttaacatagattttcgtgaaagtcatcaccaggaaggagaggagtatgatgcacaggattctaatccatttgcctcgtcagaagttgaatgcttggccgaagttgcttcgctacctgagcttatagttgttctggaagaggcatggtcagagttcggtaatataaaattcatgccagaacaagaaggaaaattccaactaagcaatggactttctgtttggaatgacttgtgcacttctggtagtgacgaagttgcagattcagaagaaaacaaaccaaatggtgctgttaaacatctgcagaatcctgacttgccagcacaacagaaagacgacatacatgattgtgatggcaaggtaacaaagttttcctctgcattagaagaggactcgtcacaatcaccaactcatacagtgtcaggaccacctagatatcctctacttcctgttacttctcacgacagaagcatgataagaaaggctccaactttggttcagccttcgagtatgcttgcagatgagaagaacacactactggaacagataaagaacaag

SEQ ID NO: 30976 - DNA, 964 bp, Zea mays
  Peptide Sequence Number=SeqID_72755
gaaatacaaccacaagggtcaagcagtttttatggctgctgctctaggtatagtacttgatactgacaagaatgagatgaaagtatttggtggtcaagagactaagatggttgccaagaatgttgctgatgattcaaagttccatatggatgatatcttatcactcgatgttagtgcagatagaaagacagtcgtaactggtcaagttggaaaagctccatcagttcacatttgggactctgaaacttgcgaatctaagggcttcttcaagcttaaggaaggatcaagaggtgttgctgccatctcagttagtccttgcttgagatacgtagcatgtgttgatcttcataatgatcatcgtgttgttattcacaacattaagagaaataagcaactcctagttattgaaggtagcaaagagaaaattattcactgcgcttggtctaagaaggtagatgatctcagattctgtactgttggtgtgaaagaaattaagttctggaacccagcagatgcaactaagagattatttgctaagggtactgttggcacaaaagctaaacttacaagtttcaactcagtttgctttgatgttgagggaactgcttatacttcaggaactaatggtggcaaagattgcaagctcgtaatatacagcgctaaaggtggtgaatacaatctcgaaaaaactattgattttgaaacttcttacccaagatctctggattatttcaatggaaaaatcttggctggtctcagaagcggtagcatttttgaagtcaatgaagagactgaggagagaagacttttacttgcttctcatcacgaaggtgaagcttggggtcttgaaatcattcctgaagataaaactattctttcaattggagatgataacaaagttatggtcttcgattatgaaaataagagattcttaaagaaaggaactatttctgagaaagattag

SEQ ID NO: 30977 - DNA, 216 bp, Zea mays
  Peptide Sequence Number=SeqID_72756
atgccgtcgtcgagggctcaccgtccggtcagggagcttcacccggtccccatgaaggtttccatggcattgctaagccggagggagcctcgttgtcaccgtgatttgctcgctggagtcgcaggctcgcgcagagccgacattcatcgtgggagggagactacacaacctgatcaccggctcgtcggggcacccatatcagccctctccggctag

SEQ ID NO: 30978 - DNA, 321 bp, Zea mays
  Peptide Sequence Number=SeqID_72757
atggctagaagggggcaccggactgtccggtgtgcacaggacatgtccgttttgaagttttacaggatcacctattcacccccctctaggtgctctcagccctggggtcgggcgaggcggagaccgtcttccggagtcgaggctgagtctgagccctggagtcgggcgaggcggagtccgtcttctgaggtcgaggctgagtccgagccctggggtcgggcgaggcggagtccgtcttccgaggtcgaggttgagtccgagccttggggtcgggcgaggcggagtccgtcttccgaggccgagacgggggccgagccctag

SEQ ID NO: 30979 - DNA, 252 bp, Zea mays
  Peptide Sequence Number=SeqID_72758
atgaatacaatccatttcctgaacacacggttagaggttaagttaaactacaactatgatgccatgcgccactgtgtacgacaagctccggcgcagccgccgtttggacacggtccagaggtgctgcaccgtgttgtccatcgtcaagcatgggacctcatggtcgtcgcgaatgtcggcgactctcgggttgttcttagcaccacatccgacgacggcgccatcacgccgtctagctcatcgtccacctga

SEQ ID NO: 30980 - DNA, 405 bp, Zea mays
  Peptide Sequence Number=SeqID_72759
atggctcatcttccaccccacggtggccagacgcacgatgagagcccatcagctgcggcgccatggccggtgtcgtgtacttcgtgcattagagccccaaactcgaaaccgaatagagcaacacgaagcagagatcagtacaaaactatggggaaggtcctcaccagcgatgatgacatgatgaagccttaccacggcatggtgcagttggcggtgatttcccaactttggaaggtcactaacatgtgcgaacggcccctgcgagtcatcacgaccacacgccatgccggagcgatgctagaggtgagacatccacacgacaatcctcccccactctcccctatttggcgatggtgccatttgatacaggcgaagggatgggaaccagcaccatggcttttgtag

SEQ ID NO: 30981 - DNA, 435 bp, Zea mays
  Peptide Sequence Number=SeqID_72760
atggccgtgactaccctaggcatgagaggcggtggtcgcgtctgcccgaggcgcgagtggtgtcggcaaccgcgagctcccgaggcgcgatcagtggcggtggcaatgaccttcggaggcgtgagcggtgttggctgtggtgactgtccatggtggaatatgaagacaatgatctccttcgatacagcgcatctcggacgtcctgctcctgctccgatgaccaccttcgatctaatggcatctaagacgtcctttgatctagcggcctcgggattcgtcctcctcgacgaactatccaatccatgttatgtcatcgatgaattaggcgtgggtggaggagcgcacccgacaacctggcttggcgtgtgggtgggcatgtcggcttggtccatccaggtcgtaggggtggttggccagagcttcctttttctttga

SEQ ID NO: 30982 - DNA, 471 bp, Zea mays
  Peptide Sequence Number=SeqID_72761
atggatcagattgttcatcgctggaggatgatcccgaggctgcaaaatcaaaggatgcctcagaggccattggatcaaaggtggtcgtcgtcggaggacacccgagatgtgccacattataggatatcgttgtcttcagattccaccatggacggtcgccacagccatcgccgctcgcgcctcggaagctcgtcgccatcgccaccgatcacgcctcaggaggtcgcgatcaccgctacctctcacgccttgggcagacgcggccaccgccactcacgcctagggcagtcacaaccaccacgacgctcgcgtcttgggctgccactcgccggcatcgctggggctaccgctcgtgccatacgcagccactcgcctctcacgccgcaggaagccgtcgtcgacgtccggccgaccctcgccgccgctcgcacctcacgcgattgcaaccgctggcaggccccaaaaccctaa

SEQ ID NO: 30983 - DNA, 1245 bp, Zea mays
  Peptide Sequence Number=SeqID_72762
atggccacgggcaccggccggcgctttcgccgcgccaagctcaagatcctgctcgtcgtcattgccagcaacctcgtctgtgtccacctcttctccggcgcgtcgctgtccgtgcacattccggcgtccgcgccgcggatccacctgtgggactcggccgcgccgctgcggggcctgaacgccacgcgcgccgcgctcgccggggcccgcgcggagctcgcggcggtgcgggcgcagtgcaacgcgtcgtcgtacctgctcgagtccgtgctcgcgggccccggcaccgtgcacgggggcacgccggaggagattgcactctgcctgcgccatgaccgcgtccagggccatttccccgtcatcctgtgcctgccgtgcatgtcgcacgacgagccgagaaaaagctcgatcgtgcagctgcttagcatggcgggggaagcggatcagaggccatttatatttacaagtaatgcacagaaaaggttgcatgatttgacaacagaaaacctctctgtccagctcccagttctcgccatggtgatcatattctggcacaccaccagttcgtcgcgttcatcgctgaccgctgagccccaccggctgcctctcggcttccacgccaacttcggcaccgacgagctcttcccggggttgggattcgcattcgcctgccgcaacttccaggaggagctggcgcggtacatgacgtacaacgtcggtggcgagtgccccgaggatgacgcgctcgcgctgcaggtggcgctcaaggggtgcgagccgctgccccggcgctgctgcaggccgagggagccggcgaggtacgcggagcctgtggtccgtcggtccgtcccgccggacgccaccgtgcgctgggcgctgtacacgtgcaggaactacagctgcctcgtgaagcgcgcgcgcgccaggggcgggccatacttctgcaaggactgcttcgacctggaggggaaggagcggcggcggtggcaagccgacaacggcgtgctggacatggtgcgctccatgaacgtgctcagcgactgggtgcaccgtgcccgacgccgtgctcgagtcgacgctcttcgacatctactaccggctcaacacaacctacgtggctacgtgcccatcttcgaccgcgtcggcttccgccggctgcggtggaaggccggccggaagctcgacctcggcgccgagaggaacgagtggtacgtgtcggcgctgctcgagaaacccatgacctga

SEQ ID NO: 30984 - DNA, 207 bp, Zea mays
  Peptide Sequence Number=SeqID_72763
gcatggagcataaggatggtggtcaatggcgaagtgactgacacctgggacacgcactggtgcgaggacatagcagagcgaatcgtgtcaccgatgcggccgaggactggcgggtcatgtttcaccgagctaaggcctcaaaactcggtggtatggttccggtgggaatcagaggcggcatgtggcgtcatcgcgaagggtgcatag

SEQ ID NO: 30985 - DNA, 432 bp, Zea mays
  Peptide Sequence Number=SeqID_72764
atgaacgtcgtcgaggggcggttctccaacaacagcagggacgccgaggccttgtcgacggcgtgtggtgctgcgaactctaggagtcggatctgggagcggttgagagtttgcggtgggtggccacggcgctggcgaactgagcagcaagcaacgagcaagggagcacgcggcgtggggaatctagtggtggtcttctccggcgacgagggggtgcggaagccgggtcggctgcggcgcgagctcgctggacggacggaggaaggtgaacggcggcagcgtgcgtacagactacataggagcggcatgacacaggtgagtgcgagagaacgagcagccggggtggggaaagaggtgagcccggccatggcttttatagccgaggaggagggagcgaaggggcgtcggattgaagagcatcaagaccattaa

SEQ ID NO: 30986 - DNA, 1341 bp, Zea mays
  Peptide Sequence Number=SeqID_72765
atgtttttcgacgggtcgttgatgaagacaggagcaggcgcgggcctgctcttcatctcgcccctcgggaagcacctacgctacgtgctacgcctccacttcccggtgtacaacaatgtggccgagtacgaggctctggtcaacgggttgcgcattgccatcgagctgggagttcgacgcctcgacgctcgcggtgactcgcagctcgtcatcgaccaagtcatggagaactcccactgccacgacccaaagatggaagcctactgcgatgaggttcggcgcctggaagacaagttctacgggctcgagctcaaccacatcgcccgacgctacaacgagactgcggacgagctagctaagatagcttcggggcgaacaacggttcccccggacgtcttctcccgagacctgcatcaaccctctgtcaagaccgacgacgcgcccgagcctgaggcaccctcggcccagcccgaggcaccctcggctcggcccgaggcaccctcggcttggcccaaggcatcctcggcccagcccgaggcaccctcggctcggcccgagaaggcacccgggggctacacgcacctgctggtcgccatcgacaaattctccaagtggatcgaggcggtggcgttcttcaccaacatcatccatcgcttttgggtcccgaactccatcatcaccgacagcggcacccagttcactggcagaaagttcctggacttctgcgaggatcatcacatccgggtggactgggccgccgtggctcaccccatgacgaatgggcaagtagagcgtgccaacggcatgatcctgcaaggactcaagccgcggatctacaacgacctcaacaagttcggcaagcgatggatgaaggagctcccctctgtggtctggagtctgaggacaacgccgagccgagccacgggcttcacaccgttctttctagtctatggggccgaggccatcttgcccacagacttagaatacggttccccgaggacgagggcctacgccgaccaaagcaatcaagctaatcgagaagactcactggaccagctggaagaggctcgggacatggccttactacactcggcgcggtaccagcagtccctgcgacgctaccacgcccgaggggttcggtcccgagacctccaggtgggcgacctggtgcttcggctgcgacaagacgcccgagggcggcacaagctcacgcctccctgggaagggcctttcgtcgttgccaaggttctgaagcccggaacgtacaagctggccaacagtcaaggcgaggtctacatcaacgcttggaacatccgacagctacgtcgcttctatccttaa

SEQ ID NO: 30987 - DNA, 522 bp, Zea mays
  Peptide Sequence Number=SeqID_72766
atggagtcccaggcccacgcgtcatgcaactggcgcgccgattgctacgtgcgagcaactgcaccgccactcgcgccactaccgcgcctcctcgactgcggaaccagtaccgcgactcgaggcaaccctgcgtatgacccaacagtgccagctaggcgcatcggtcacgggacaggcagcacctttggcaggagaagcgggcgacgcttcgccttcgccgtaatgatcgcgtcaaaaaaggtgtgccacgtcattcgatttcgtatccttttcctctttctctctcttacaacagggaccgggaaagggggataccccgaaagggatccttctccgcgaaggaaacgggccccgagcccccctactgatcagaggtttgaaggctggcccctcggaggggttcaacagccgcctcagagcgctcgggctctgtgcccactactggtcagaggttcaaaggccggcccctcggaagggttcaacgaccgcctcaggccactcgggctccgcgcccactactga

SEQ ID NO: 30988 - DNA, 213 bp, Zea mays
  Peptide Sequence Number=SeqID_72767
atgggcgtagccctgaccgcccaaatggccaccgcgcagcacctcatccttggccatctttcgatcgatcatgagggggatctccccatgagggagtactatcggcagatgaagggcatggcggactccctccgtgacctcggcgagctggtcgccaaccgtaccttggtgctgaacctttgtgtggcctcagccctcgctacgaccacctga

SEQ ID NO: 30989 - DNA, 435 bp, Zea mays
  Peptide Sequence Number=SeqID_72768
atggtgattgagacacccgctttggcctcggccctctacaacgctcctcccgatggtcaggcgtctttgggggggggcaagcccctcaccctccatcaaccgggctgctgcttgccctcctcttgccgtccccgtgacccctcgtctctcccgcaagggcaaccgcgggggtggcggctccacccggggtggtccctccagccgaggtggcagccaggcatggtcgtcattctacaacccctggaccgggaccatctccatgtggccgggccagtccccgagtgcctcccgtcctccggtgccggccctactgatagcacctccctatggcgtgcctgcgccgccctcataaggcgtgccatcgacggcttcggctccaccctagctcctgcccctgaggacccccacctcgattatgtggtccctgctggctag

SEQ ID NO: 30990 - DNA, 1713 bp, Zea mays
  Peptide Sequence Number=SeqID_72769
atggaggcctggagcagagggggcgcagtcggagcagagggggcgcagtcggagcagagggccgctggagccgaggggacacagccgcgcgctggagaagggacgacgactactgtgcggctactgtggtacaggagatctggttgttttctttacaaacctgagatggaacggacatgctgcccctcatatacgatacgcttgaaggcaaatgatttcatttgttccaaagagcaagctcgggtacttaaaaagatacaaaggttccttgatggcgagctcgatccacagattggaagccctcagtgtaaggcaagtccaacaaagcgctcactgggtgaacctctgaattcaccaacctcgaaagtatcaaaggtatcagcggaagagtttcaaaaaggcacaagtccaaatatattgaaagaagatgacatcatttgttgcctggcaaacaaaatcaatgaggccacagctacatgcttccgaggtggggtatttggttctgttcaactccccaaagctgttgtgaagaccgttaaacctcaagtcaaaaggaaagttggagaagcagtgcaagaaaagaaagtaggagaagcagtgcaagctttggtttatacgtgtaatataagtttccaaatagtggcagcagttagacgggcattgcctaaagaaaatggtgctactcaaactgaagtaccagcagatctttctccaaattctgttgcagaaaagctatccgtggcaatggaacgtcttggagaactagctggttttgaagtaaaagcttgtaatgggcatctaaatttctatttggcctccaatcaggcaatgcagaaccataccagcgttgttgtacctgtgcaagcttcagacaaatctagtggttcaaagccaagctctgtgaaccaaactaatgcaaaatatcctctgaaaaggaaaaacctggagattaggttgagcacatctcattttgatcctgaggagtttgctctgtaccgaaggtatcagacaaaggtgcataaggagaaggcagttacagaaagctcatacaagagatttctagtagatacaccaatcctgtttgtccccccaaagactggtgataatacagttccaccgtgtgggtttgggtcttttcatcagcagtacaggattgatggaaaacttgtggctgttggtgtagttgatatccttcctaaatgtttgtcaagcaagtacttgttctgggatcctgaccttcctttcttatctcttggaaagtgggttcgctatgatttagccaagcctctactggatgccagtcaatactccgttctatctgattatgctacaatgcaaggtgaagtgccccagcctcagatttgtggtccctctgatgactcttcagcaaaagttgaccaccatgagtctcccagcgatgaggatgaggacgacgacgatgaagatttcgacaactatgaatcagatatgatggtcgatgaagagacaattcattcagaaaaacccgatacagctgaaggcagttccgagataaatgacataaacaacatcaccctggacctgaaaggctcgagggttaaatttaagggccttcagcaagtttttgggccaatcgagaggcgacacctcaatgcgctagaaaggcaactgagcagatacgtcaaggttgttgggaaggagctgtctgatcgaatggtgtattgtctttcttga

SEQ ID NO: 30991 - DNA, 334 bp, Zea mays
  Peptide Sequence Number=SeqID_72770
atggcgtgcggcgaagagcggatccacggcgattgcgccgcgccggtgaaaaattcgtcgatgcctgtgcacaatcctactagccccggacgcgagcacctccccactaatccagcggagctcctggagctagcaatgcggaaatggtggcggcggtacgcgatctccgcggatttcggcggcagttggcgcgaccgagtgggtattacaccgttcgaccggcagtgctggaggcactacaagaaactggttaaaaacagaagtaagttcgacggccccgtcgaacttaaggttaagaacgtgggtaccgtcgaacttagcattaagaacgtgg

SEQ ID NO: 30992 - DNA, 159 bp, Zea mays
  Peptide Sequence Number=SeqID_72771
atgatgaagcattcgagagcaaggatcaacagctacccaactcttgttgggtcctacaagataggcatggttcttttgagagctactagtcataggagccttccccagataaagaggagattggatgtcctcagtcttgtaaagttcttggttagataa

SEQ ID NO: 30993 - DNA, 333 bp, Zea mays
  Peptide Sequence Number=SeqID_72772
atgcgcggcctcctccttgcgctgcagctgcctggtagttctggttggttgctggggcaggaaggcaaggtgcctggttgttctggcactggtacgaatttcttccttgttggttgttctgacggtactgctggtgctactaaagaaactgcctctgatactgctgctggtggtgctgatgctggtgaccttgcttcaactgctaagtccttcaggcacatggtaacgacagaagttgtccctgaactcctcccaggtgatggcttcagggtcagcatgggtggtgaaagggaaatagtctcaacatttcctataatcaattttggtgtttga

SEQ ID NO: 30994 - DNA, 444 bp, Zea mays
  Peptide Sequence Number=SeqID_72773
atgggcaagagcaacaaacgcaagcgcgagccgactcctccgtcggaggactttggtgactcggaatactcggaggaggagttctcctccgagtccgaggggtctccggctcccgtctctcccccggtgtcgtctggcgattcagacgactctcaggggcttgccgtggaggtctggacttatatccgggccgtcgagtgctccgggctcgagggctcggatgagtcggagtactcctcggacgaggaggactctttggactcatctgaggagggcggtggcggcgatggcggagacaacgacgacgacgacggaggcgacggtgacgacggcgacgatgacggtgacggcggcagcaggggcggcaacgtcggcagcaagggcggcaacagcaggggcagcaccgcgcgcagcagcaagggcagcaacaaggccagtggatag

SEQ ID NO: 30995 - DNA, 813 bp, Zea mays
  Peptide Sequence Number=SeqID_72774
atgcaggcggcatgcaaccgcaccaagggggcgcaccctttcgacttcgacgcgtccagcatggaggcccaggcccacacgtcatgtaaccgccactcgcgccactaccgtgcctcctcgactgcggaaccagacaggcggcacctttggcaggcaaagcaggcgacgcttcgcttccgccataatgaccgcgtcaaaaaagggactaggaaaggggatatcccgaaagggatccttctccgcgaaggaaacgggccccgagcccccctactgatcagaggttcgaaggctggcccctcggaaaggttcaacagccgcctcagagcactcgggctccacgcccactactggtcagaggttcgaaggtcggcccctcgaaagggttcaacggccgcctcaggccactcgggctccgtgcccactactgatcaggggttcgtaggctggcccccgaagggttcgacagccgccttagacgcagagcgagggatgaccctgggaagctccgcctcgcccgaccctagggctcggcccccgtctcggcctcggacaacgaactccgcctcgcccgacccagggctcggacttagcctcggctccgaaagacgacgaactccgcctcgcccgacccagggctcggactcggcctcggccccagaagacgacgaactccgcctcgcccgacccggggctcggactcgacctcagaagacagactcgacctcgacctcggaggagcctccgcctcgcccgacccagggctcggaccgaccaagtcacagggggggccatcattatcctacccctagctag

SEQ ID NO: 30996 - DNA, 363 bp, Zea mays
  Peptide Sequence Number=SeqID_72775
atgagcttcaacacgcgttggcgttcttccacgtccctgtcacacactccgaacgatggtgaaggaccacggcggcgacattcttcctcctcggcgacgcacggtccctctcggtgcccccacggttcatggtgcaacaataggaggaagaggggagagaaccacttgatgctttgcggcaaggtattgcgacttatatgccccgcagagaggccgcaacgaccgagcagatttcctgggagatggccacaagggtcgcgtcaattctgttacgggcaagaagatggatctgacgagacgggcccacaagtcagtgacaaggaaaaccagctcacgcgcgcgcgaaatcaagtgcataagtaa

SEQ ID NO: 30997 - DNA, 1107 bp, Zea mays
  Peptide Sequence Number=SeqID_72776
atggataactggcgagacagtgcctcctcgtcaggcgatcaggccgatccggagcgcgcgggcggagcagttctcgtgccgcaagcatatatgaggcatggcaacacgccgtcgatcagtggcgttgggaattggaatcttccacctcagcctcgcgtgttttgggcagacaccaaagcaggaatcatcggcggcaggcggagggatggggctgagggagatgagtcgacattgccgccggggttcaggttctatcccagcgacgaggagctggtatgccattacctctacaggaaggtggccaacgagcgctccgtgcaggggacgctggtggaggtcgacctgcacgcgcgggaaccatgggagcttccagacgcggccaagctgacggcgagcgagtggtacttcttcagcttcagggaccgcaagtacgcgaccgggccgcgcacgaaccgcgccaccaagacgggctactggaaggccaccggcaaggaccgcgaggtgcgcgacccggccgcccgcgccgtcgtcgtcggcatgcggaagacgctcgtcttctaccagggccgtgcccccagcggcgtcaagtcatgctgggtcatgcacgagttccgcctcgactcgccgcgtacgacgacgacgccaccgaaggaggactgggtgctgtgcagggtgttccagaagcggaaagtcgacggcagcgagcaagacaacggcgtctccccctcgccgccggtctttgccggcgcatcgcagtcgcagggggtcgtcctgccgccggaccagccctgcgtggtggacgcgtacgtcgtggtagaccagccgggctcttcttccgtcggactcgcgccgccgcaggagaacctcggtagcggcctggacgcgttgctgacgaacggagcgatgtggcagtacacctcgtcggtcttcggtcacttgttgccgcaggaggcgaccagctccccgccggtgatggacctaggctccaggggaggagaaggaggagactacgggtgcagcttcttctacgacagcagcttcgaggacatggccaacatcgggttccgacaaagggtggatgggctgatccaggaccaggaagcacac

SEQ ID NO: 30998 - DNA, 1119 bp, Zea mays
  Peptide Sequence Number=SeqID_72777
atggatatggcttataatgtcctcattgaccatgcacttgcagaaagtgatcgtagatcattgactacccattttcctattttggacaatattttgaaccagcccagcagttgttccgagatgcgtgtcattgttaaagagatatcttatccgttggtgaaatttgtttgcactaaaacaatcaaggattttgtcttcaggtccttactttctcaactaactccagaagttattagcaacagagaacatcttgaatcgaaggaatgccatagctcacctgattttatatcatcagcaagtgaaaaagttgatgtgggtgaacctgtagatgatagcaaatatatatccttcgacattttaagctggcgatggcatgtgtatggcgaacggcagtcgtccttatctgccaaagaaagaagcagtgattttgtgggtcttcaagattttcatatacatggttttcttgaagtcggtgctgcagctcttctagttggggatatggatgcgaaaattaatgatcaacagtggaaatattctgttatccaggaatttccagatattgatttgttacaaccttcatcttctgccgcaagtacttttgcgtcatcacaaagtcatttaaaagcaataactgcttcaaaacgcatgagatcagctccaaatcaagtctggatgaacataccaataaacacattccagcctcgagcacggcctctttttcagtacagatactacagtgagcagcaacccttaagattgaatcctgctgaaatttctgaagtcatagctgaagtttgttcagaagcaacttcaaatgcaaatcagttgattgttccatcaagattgagcacccagagtcggcaaccttcagcagatgtggcattcagtgtccttatcaaacttgtcattgacatgtatatgatggactccgagactgctgctcctctgacactttatatgcttgagatagaggagcgacaagagatcgtgtgggcctcagctttgagttgtctattttactttgtttgtgatggaggaaaaattatcaggagtagactgggaggtctggacataaggcatttctcagtcttgattttcagacacatctgtataatgtag

SEQ ID NO: 30999 - DNA, 393 bp, Zea mays
  Peptide Sequence Number=SeqID_72778
atgatcagggccccagaagccctagttcccccaacgagtgaattatttgacattgccggaagcctcggtggccttcggcttagctcccctcagggaagtggcggccaacaatgcacactgcaacctgcctatgaggagatcgtgggaatgctagacctcgtccgagactcattccacgacctcctcctgtcggggtcagagagcggccttagctccccatccagacaggctagccacgatccggcccaggagtgcattgtggccaattcgctggagggccgctccccgctcatagagagcctcaaggggacccccaccagtgccatgatgtgtgtgtggcatccgccccaccttgactcgacccgccttcccaaaagccacttcaaggactaa

SEQ ID NO: 31000 - DNA, 1053 bp, Zea mays
  Peptide Sequence Number=SeqID_72779
atggctggaggacgcctcctccgcagagctgggggatggtttccaccccagaagctagaagaagaggtggtccgccgacccgcacgggagctggagctccggctcgcctcgccctccgccccagccaggatgatgaagatccttgaagctgagggcggggcagaggtcgcagcccggtttgcttctccccaccatcaagctagtgccggcgcagaccgagtcttctccaacacgctccaaggtcctccccctacgacacgggggctgggtcccacgcgtcatgcaagctggcccagggcagaagaagccaaaccgccgcgcgcggtgcgcgtaactgcccagcggctacaagccctcctccactttcgcccagaccaacgggtgaaagagcggaccgccatgcaggcggcatgcaaccgcaccaagggggcgcaccctttcgacttcgacgcgtccaagcatggaggcccaggcccacacatcatggaccgggaatggggatactccgaaagggatccttctccgcgaaggaagcgggccccgagcccccctactgatcagaggttcgaaggctggcccctcggaagggtttcaacagccgcctcagagcactcgggctccacgcccactactggctggcccccgaagggttctgacagccgcctcaaagcacgcagagcgagggatgaccctggggctcggactcaacctcgacctcggacggcaaactccgcctcgcccgacctcaaggctcggactcagcctcggttccggaagacgacgaactccgcctcgcccgaccccagggctcggactcagcctcggctctggaagacgacgaactccgcctcgcccgaccccagggtttggactcagcctcggctccggaagacgacgaactccgcctcgcccgaccccagggctcggactcagcctcggctctggaagacgacgaactccgcctcgcccgagcccagggcttggactcagcctcggcctcggaagacggactcgacctcggcctcggaggagcctccgcctcgcccgacctag

SEQ ID NO: 31001 - DNA, 444 bp, Zea mays
  Peptide Sequence Number=SeqID_72780
atggctacaggaccgacatcaagtctgctttatgccatacagaacggattaccatgcacttttcaccttacttaccactgtgtcaacaactacgactcagacaacgtctccattagacaggctcgggtcgcgttcgagcccagactctggcctcggctctctgctcagtcaaagatgcaaatacatggaccagacatcctcctggctcaagtcagcagcaagtacaaaagccataccaaagaccataccatctatagaggctcagacacgtctcctctccaatacgcgacaaaccatggcacccccggagccccccttgatgttataaatagaggagcccaatgcttcattcaaggaggagaacacttcaccggttttcaacccaacagcgttattggcacttgccttaatcaccagggacttgagaacttctccctctcctga

SEQ ID NO: 31002 - DNA, 270 bp, Zea mays
  Peptide Sequence Number=SeqID_72781
atgctctgcctagagatcttcaagtgccttcttcgttgcctccaccgcctggggccctggtgttgcctgcgccgcctggaacccttgttgtcgtctccctacggaggcgatgtagaggccatcaaggccaagatcatctcgcacccaggctactactcgctcctcactgcctacctcgagtgcaacaaggtgggggcaccaccggaggtgtcggcgaggctgacggagatagcacagaaggtggaggcgcagcggtgcacggcggcctag

SEQ ID NO: 31003 - DNA, 1842 bp, Zea mays
  Peptide Sequence Number=SeqID_72782
atggtgaaatcatttgaagtcacggatttaccagttcgttcggctaaatttattgcacgtaagcaatgggttgttgctggtgccgatgatatgttcatccgtgtgtacaactataacacaatggacaaggtcaaggtttttgaagctcacactgactacattaggtgtgtggctgttcatccaacccagccctttgtgttatcatcgtccgatgacatgctgattaagctgtgggattgggataaaggctgggtgtgtactcaaatatttgaagggcattctcactatgtgatgcaagttacatttaacccaaaagatacaaacacctttgctagtgcttccctggatcgcacaataaagatatggagtcttggttctcctgacccaaatttcacactagatggccattccaaaggtgtgaactgtgttgattacttcactggtggtgatcgaccatacctaattactggctctgatgatcagactgcaaaggtttgggactaccagacaaagagctgtgttcaaacacttgaaggacatgcacataatgtgtccgctgtatgtttccatccagagctacctataattattactggttcagaggatgggacagttcgaatgtggcattctactacctacaggcttgagaacactcttaactatggccttgagcgagtttgggctttaggatatatgaaagggtcaagaagggttgtgattggatatgatgaagggacaataatgataaaaattggtcgtgaagttcctgttgctagcatggatagcagtggaaaaattatatgggcaaagcataatgaaatccaaactgttaacatcaagagtgttggtgcagacaatgagatcgcagatggtgatcggttaccattggccgtgaaggagttgggaagctgtgatctttatccacaaagcttaagacacaatccgaatgggagatttgttgttgtatgtggagatggagaatacataatatacacagcattagcatggagaaatagatcatttgggtctgcacttgaatttgtttggtcaactgatggagaatatgccatcagagaaagcacctcaaggataaagatttacagtaaaaatttccaggagaggaaaagtataagaccatcattttcggttgaacggatattttggtggtgtgttactttgctatgtgtacaaatgacttcatttgcttttaatgattgggtggaatgcagattgatacgtcgaattgatgtcaatgtgaagaatctttactgggctgacagtggtgatttagtaacaattgcaagtgatacgtcattctacattttgaaatataatagggatgtagtttcatctcatttagacggagggggttcagctgctgaggaaggtgtggaagatgcctttgaactgcttcatgagatcaatgaacgtgtccggactgggctatgggttggcgattgttttatctacaacaattcttcgtggcggcttaattactgcgtaggaggagaggttacaaccttatttcacttggatcggccaatgtatttactaggatatcttgcaaaccaaagccgtgtctatcttattgataagcaatttaatgttgtggggtatactttactccttagtttgatcgagtataaaacacttgtaatgcgtggggattttgatcgtgcaaatgatgttttatcatctataccaaaggaacaatatgacagtgtggcacgtttcttggaatcacgtggaatgttggaggaagccctcgagatagcaactgacactaattacagatttgacctggctgtgcagcttggtcgacttgaaatagcgaaggcataa

SEQ ID NO: 31004 - DNA, 429 bp, Zea mays
  Peptide Sequence Number=SeqID_72783
atgggttatcgagaggtcaccactcacattcagctctggctacttggtgccttgatctcacattcagagtttgatgtggttgatttccttatctgtgagattgaggacacggtgttggatgttccagggcaccctcgagccccacgcctcctgtttggatcctatcgtctagcccctgacgacccagtgccggtaccagatccagtgccagacactcaggctgaggatgtggcgttccaccagttcgagacccagggcacaattgtccctgatgatgatgattttgggatcccgccaccgcctcctgtgcctccacgctcacatgatcatgaggccgggagttccagtgctgcccctgctgcccctcctgccgttgaccctgctctggctgtgatccttcggtctctttcacagcagcaggctctttag

SEQ ID NO: 31005 - DNA, 646 bp, Zea mays
  Peptide Sequence Number=SeqID_72784
atggcaggccgcggcggcgccggccggcggcctcgcgccgtcttcatggccttcggcactcagggcgacgtcttccccatagcagcgcttgctgcagcttttgcgtgtgaccaacaggagtatgctgtggtgttcatcactcattcagcgcaccggtcctgtttaatccattggaacattactgaggtcagattttctgataactgcaggatccagcgctccacagccaatcagccgcaagaagaggcctcccacacccgacctgttgtcccctttgcgatcaagaggaagaagatatcaatcacctgctatcaacattcatctttgcccgcgaaatctggtccttcctcctgcatagagtggcttgcaagtgcttccccccagtctgatgagactacctttgatgcctggtatggtttcagcaaagaaattgtggagtgcccagataatgatgacgccttgagcatccacaatgctgcagatgtgctagttggagctatcaggtcagctttatcgccggaaaccaaagctcaggcggccagaattgctgataggctttcttctgaggatggaattggagaagccctcaggatattgaaggcgagagtgttgactcagaacaaaatcatcagctcattcatcgcaa

SEQ ID NO: 31006 - DNA, 201 bp, Zea mays
  Peptide Sequence Number=SeqID_72785
atggccgacatcgaccaggacgagcccctcaatccaaaggccctcaccgaccccaacagcagcttctacaagatcaacagcgtgaggctgcaccataagagcggcaacaatggaaggggatggaggagggtgttgatggcggggatcctcggccacctttcgttgatggaggagggcgttgatggtggagcagaggggtag

SEQ ID NO: 31007 - DNA, 171 bp, Zea mays
  Peptide Sequence Number=SeqID_72786
atggtggtgatggagggtaatggcggcgccggtaggatcaccattggcgtctgtgtcatggagaagaaggcgttctcttctccaatggagcagattctcgagcggctccgctcgtttggagaattcgaggtgtgcaagagtcttcctttgccccgtccgacgaatctctag

SEQ ID NO: 31008 - DNA, 693 bp, Zea mays
  Peptide Sequence Number=SeqID_72787
atgggatctaggagctccgtgcgcccccgccatgccgcatgcctccaccgcgccagtcgtgccaccgctagaaccacacatgaggatctccttgctcgccagcggatctctgccacgcacgtcgtgacctccgtcgcggcctcgcctcctgctcaaccccaccgcgcgccaccgcgatgggatctgggagcagcaaggccaccgcgatgggatctgggaggaggcaagcagtcctccatcttcggcaacgagctcaagctgaagagtgaggcggccctgctcgtcgccgccagcaccgagctcttcctaggcagcctcacggcagggggccacacaacgacggcgcggcaattccggcaagcggtccgtgccatgcacgtctggaccacggcctgcgggcactgtcccatgacagacttcccccttgactgcgtcgctgcgaagaggagtctccccgcgtctacttttggatccggtgcttggtacaggacgaagcagcagctcgacgaccatgggttccacatcttctacctccgccccttcctcctgcgcgtccgcgtcggttactgcctgactggatttggggttctgaggattagcctttggattatcccgggctgggatcgagcaatagaagctcgagccattcgtgcaggtgcctccaatctgcagcaggctgtggaatcaaggtga

SEQ ID NO: 31009 - DNA, 408 bp, Zea mays
  Peptide Sequence Number=SeqID_72788
atgcagagaattgagaatgaagacgagtcagttgctttttttcctgctagattgcatgagattattatttcaagtgagaaagcaaagaacacagaagggccagtggaatttccatggatggttgatggtgcaggattgcctgcaaatgcttcccagctcctgcctaagatggccaagttgacgaaagaagtgacttcacaagtaaagctgcttgctgaaggtgaagatgaaagacttgcgttgacgagcacattttcaaaatatgaccaggcaaaagctcttggaaagacaactattgatgtggctcgtattgctgccgggttgccatgtggtagtgaaagcttcctcttgatgtttgccagatggagaaaacttgagagggatttatacaatgaaagaaaggagtaa

SEQ ID NO: 31010 - DNA, 1773 bp, Zea mays
  Peptide Sequence Number=SeqID_72789
atgggttttagagcctccggaatagaaaatcacgatgctattgatactgctatagttggctcgctagctgatccaaaggaggcccgtattggtattctagaggttcatttcattccatttaatccgacggacaaaagaactgccttgacatacattgatagtgatgtgaagatgtaccgtgttagtaaaggtgcgccagagcagattctcatcctcgtctacaataagttggagatagaacgaagagttcatgctgtaatggacaagtttgctgagcgtggacttagatcacttgctgtagagtatcaggtagtgccagatggaaggaaagagagtcccggtgggccatggcattttgttgctcttatgccactctttgatcctccaaggcatgacagtgcagaaacaatacgaagggcattgaaccttggtgttagtgtaaaaatgatcacaggtgatcagctagcaattgggaaggaaacaggacgtcgcttaggcatgggtactaacatgtacccttcctctgctttgctgggacagaataaggatgagtctattgctgttttacctgttgacgatttaattgagaaagcggatggttttgctggcgtattccctgagcacaaatatgagattgtaaaacgtctgcaagcacgaaaacacatttgtggaatgactggcgatggagtaaatgatgcccctgccctaaagaaagctgatattggtatagcagttgctgatgccactgatgcagccaggagtgcttctgacattgtcctgacagaacctggcttgagtgtgataattagtgccgttcttaccagccgggcgattttccagaggatgaagaactacactatctatgctgtttccattacaatacgtattgtgctaggatttatgctacttgccctcatatgggagttcgatttcccaccatttatggtacttattattgcaattctaaatgacggtaccataatgaccatatcgaaggatcgagtgaagccttcgcctctaccggacagctggaagctggccgagattttcacaactggaattgtgcttggtggatacctggcagtgatgactgtcatcttcttctgggctgcatataagacaaactttttccctaggatcttccacgttgaaagccttgagaagacagctcaagatgattaccagaaactcgcctctgccgtatatctccaagttagcaccatcagccaagctctcatcttcgtgacgaggtctcgcagctggtcattcgctgagcgcccgggctttctactagtgtttgccttcctggtcgcgcagctgatagctacactggtagctgtatacgcggactgggggttcacttcgatcgaaggcattggatggggctgggctggtgtggtgtggctctacaacctcgtcttctacttcccgctcgacctcctcaagttcctcatccgatacgctctgagtggcaaagcgtgggatcttgtcattgagcaaaggattgcgtttacaaggaagaaggacttcgggaaggaggagagggcgctcaagtgggcacacgcgcagaggacgctccacgggctgcagccaccggatgccaagctgttccctgacagggtgaacgagctgaatcagatggccgaagaggccaaacggagggccgagattgcaaggctgagggagcttcacacgctgaaggggcatgtggagtcggttgtgaagctcaagggcctagacatcgacaccatccagcagtcgtacacagtctga

SEQ ID NO: 31011 - DNA, 105 bp, Zea mays
  Peptide Sequence Number=SeqID_72790
atgacctttagcagttttgtgctctcgtgtggggttgccgctgcctgtgttgtttgggcactctatgtcgacgatgactccctggatgactctcgtggtggctga

SEQ ID NO: 31012 - DNA, 2283 bp, Zea mays
  Peptide Sequence Number=SeqID_72791
atggagcaatctgcaggtgacgaatcaagagaaaccgaggctgagaatgctgtggaatataacaagaaggtggatcaagaagataccattaacagacaaggtacagctaaggaagacagtggtgtggagccacaagaggagaacgttgtggatccagatcaaggtgtggatgacttttctgtactagatgagggtaatgtggtggcacagtgcaccagtgatcaattgagaacaaccatggaagataatgctgcagagatgcaagaggtggtggagcaagaaggtgccatttttgaaaagggtgtgacctcagatggcattactgttgaagatcaagacaaggaaatggaacaatctgcaggcgatgaatcaagagtgaccaagggtgagaatgctgtgaaagataaaaaggtgtatcaagaagatgccattgacaaacaaggtgcagctgaggatggcagcggtgtgaagtcacaagaggacaacatggtggttccaggtcaatgtacagatggccttcctgtactagatgagggtaatgtggtgccacagtacacaagtgatcaactgagaacaaccacagataacaatgctgcagttgatccagagttggtggagcaagaaggtgttgatagcatagtgggtgcagccaaggttggtattgctgtggaagaatcgcgagaggacatcatggtggaaaagcaagttgaaggtgttcttttacaagatcaagatgaggcagtggagcaatgcaccagtgatcaactgaggacaatcacagatggtaatgatgtggaagatcaagaggtgcacagagagaagctcaaagcaaaactagaagtttcaagtttcccttccgaacaaagaaatcatgaagctgaatttctggaactgaaccgtgttggcctccccattagagaaggagcaaggaagtgtatctattacatgcgtaatggtacatgcagatatggaaagaaatgttgttttaaccatccagagcaagttcttgatgttcaacgccacactgcaacaggatgggatgatactaacttgcaatcttcaccacactcaaagaagtcacctgaacataaaactatggatgacatatcgtctggatctgaggttcttcctccaaacatacttcggatgcttttacctccccagaatgtgccccctagtacaaaagaaaaggaaatcaggataaaaaaagatgttatcgaccaaatccggggccatatgacctcagaaaccatgatacactgctcagatgatcctgattgggcttcagcttcagatgattctgatggctgctgctcggccgatagttcagatgggcctttgtgcaagcaggaacatgaggactatcctgagaggcctgaatgccctttccttcttagatttggtaattgtaagtttgcatcatcatgccaatattaccacccaaaagacaaatttccaagtacctaccatccagaagacaaattccaaagtcgataccatcaaaaagaaaaatcaagtcgacaccatccaaaaaaagagccagcactatcaggagaactgatggtttatcctgacagacctagtgaacctgactgccccttctatgtgaaaactgggtcctgtaaatttggggcaaactgtaagtttcatcacccgaaggatataactccaaacatgcagggtccagcaagtccaaaaaggtcggtcgctgcaaaagagcaccacgcagcagctagagcgacattacaagaccagatgtaccagcaacaaaaattccctgagcggcctggccaaccagattgccggtactacatgcaatttgggaaatgtaaatttcaatcagcttgtatattcaatcattcaaaagacatactttcaagtgggtggcatccagcagaatgcccattctacatgaaaactaggacatgccaatttggatcagcttgtgagttttatcacccaaaagatcggtgctcaggcagagggggagtgattgatggtactgactatggacatgattttgccacgaagtcacggaatgttctgcaggaactggcaatatatcctgaaaggcctgatgaacttgagtgttctcactacatgaagcatggctactgtaaatataaagatgaactgcaaatttcatcatccaagagatcgtcttccaaagaaataggtactgcatttcctgtttaccaggtacacgagaatcacactaggagatacctttttgcaattgctggaccatttgctacaaccactgttgtaactggctgtcgttga

SEQ ID NO: 31013 - DNA, 864 bp, Zea mays
  Peptide Sequence Number=SeqID_72792
atgacagagatcgatctgaggaagcagcagcaagagggagggaaggagcagaaggcaggctgtgtgcgcgtacgataccctgtacttttgacccctactgagaaacaaatggcaagagatgtctgcaatgcttttagacagatggtttgtggttttgatctcttaagatgtgatgggagatcatatgtctgtgacgttaatggatggagctttgtgaagaactcatataagtattatgatgatgctgcttgcatcttgagaaaaatatttcttgatgcaaaagctcctcatctttcatcaaccatccctccaactcttccttggaagtctgaaccagttcagcccactgaaggtcttacacgacagggaagtggaattattggtacatttgggcagtcagaagaactgcgctgtgtaattgttgtaatacgccatggcgatcggacaccaaagcagaaggtgaaattgaaagtgacagaagaaaagcttctgaatttgatgttgaagtacaatggtggaaaaccaagagttgagacgaaactaaaaagtgctgtacagttacaagacttgctggatgctacaagacaacttgtaccaccaactaggtctggtcgggagagtgatagtgatgctgatgatattgagcatatcgagaaacttcgtcaagtcaaagcagtcctagaggagccacaaagttcacggatcgatagggtcgaggaacagggtaggctacttgtgcgagacatttacatagtgggaacgaaaatgaccctgcgtatccgggtcggggaccacgtttctgggtcgagggtcattaccaccgtacccgtttcttgtgactatggtttgtattcatgtgtctag

SEQ ID NO: 31014 - DNA, 996 bp, Zea mays
  Peptide Sequence Number=SeqID_72793
atgccgacgttgttcgcagggaattcagccggtggtccgaggcgtcattctgtggagaatatagaggaggggattcgacgaaatggaggcgttggcgttggcttctctgttctggagacgcaggcgacagccaaactccaaaacggaaagaagacaacgcttggagctgcgttaacaggcgcgccgtggccgagcccttcgtcttcctcaacggctggttcgacatcggcaagcgcggcgccgggaagccagcggcggccaacgccgcgcgtgcagctcaacctcaccgtcctgggcgagcctgacccgaggttcgtcttcgagttcgacggcgagaccgagtacagcccgcaggtgctccaggttaaggggagcatgaagcagctccagtatggtacaagagtcctgggcgagcctgacccgaggttcgtcttcgagttcgacggcgagaccgagtgcagcccgcagttgctccaggttaaggggagcatgaagcagcccatgttcacgtgcaagttctcctgccgcagcaacagcgacctgcgctcgcggttagtggcagtggcaccaagttccttcccccctgatgccggcatcttcagcgccaggttgccgaccagcacccgcacgaacgggcacgggtccatggcctcgtggctagcagactgcaatgcctgcgacgccgacccttcctccttggtccggcgcgaagcaatgcggacgggatcggagacggagaggagtggggggggagaacctgccagagacggcgtagagacgaacagccagttgttggaagtataccctcaatcacattttatcctggttccgcccgtgaaggtccctcaatggagacagagggtgggcatacctgttgggtgctcgtcgctggtgaagggcacgatgaagatctggcaaagggaccgacgaagactcgagctcctggcgtgtgacagcgtcggcggagacctgggcgtatggcgcgacgcgaggtga

SEQ ID NO: 31015 - DNA, 306 bp, Zea mays
  Peptide Sequence Number=SeqID_72794
atggcccccaagagagcaacgtccaaggcagccgcatccatcgacgatgcagcgaaggcagcactcctggcggagaagaaaggcaaagccctcgtggacaccacccccaagaggccgtcgaaagatgacgctgtcaacagcaagagacagcgccaggatcaccccaccccgacggcactgcgcacacctgcagttccgagggcgcaccccaagcaccaccaccaggctttgctccgccagagggctggcacctaccccaaatacaacggcagcactgacccgactcagtacatcatgaactactag

SEQ ID NO: 31016 - DNA, 399 bp, Zea mays
  Peptide Sequence Number=SeqID_72795
atgaagcatgggtggaggtggcgcgacgttgatgagcacccgagcaactgctggtcggcgaggcgtgggtgcgacgaacttgcgggcacggacgcgatgtggcctgctggccggccgtgcagggagggcatgccagcaggggcgagcagcccggccgctggccgcgcctggcctatgtgctcgcacgaggaagccatggaggaaggggttggggtggcgctcaacaagggaggcaggctgcgccggcaccggggaggcttgctggagcagcaggcgacaggagcacacggttgggagcggcacgcaggtttgggcgcacgacacgagccattcccagagatgcgtggctatgagcagtttgtcggtggccaaggcggcgtgacagtttcgccggactag

SEQ ID NO: 31017 - DNA, 156 bp, Zea mays
  Peptide Sequence Number=SeqID_72796
atggagaaggcactggcgaggctgctcgggcgcaaccccgctgtgccggcagtgttcatcggcggcaggctcgtcggctccaccgacaaggaaataaatggttggagattaagtgaaaatgaggatagggctcgagtatatggggtactatattga

SEQ ID NO: 31018 - DNA, 483 bp, Zea mays
  Peptide Sequence Number=SeqID_72797
atgggcaagaacaagaagggtggaagttcgttgcaccactccggcgataagcggaaagcgcgagccaagtccccctcgaagaactttggtgactccgagtactcgaagaggagttttcctccgagtccgagggggcaccggtctacacctctcccccgttgtcgtccgatgactcggatgattcccagtggattaccgccgaggtgtagacgtaaatccaggccatcgagcgctccgggctcgagggctcggatgagtcggaggtctcctcggacgaggagagctccttcgaatcatccgaggaggagagcggcagtgacggcgacgacgagggcgacgacggcgatggcggtgacggcggcaatggcggcgacgacgacggcaagggcgacggaggcaacagcggcaagggcgacggtgacggcaagggcagcggcggcaccagcaaggccaaaggcaaagcgccactggtttaaatattag

SEQ ID NO: 31019 - DNA, 138 bp, Zea mays
  Peptide Sequence Number=SeqID_72798
atgacgaaggtgatgcttgctgaaggtgttcgaaactcaaaaaatggaaatcattatgttaatgggaacatggagaaccacctgggaaaacagtgctaccacaagggtttaatgggacgcctttggctgattaactag

SEQ ID NO: 31020 - DNA, 111 bp, Zea mays
  Peptide Sequence Number=SeqID_72799
atggtgcgactgtaccggtacaactttgcattgtactttcccgaggaggggtacgatgcggcttcataccctaagaggcccttgatgcttatcaaggggagtgaaaagtag

SEQ ID NO: 31021 - DNA, 483 bp, Zea mays
  Peptide Sequence Number=SeqID_72800
atgcggtacgggcggtgctcgacgaagcggggtgatggagcgcgacaaggctctagccccacggcgcggggctgcactgggcgcgttgatggcaagggagccgtaggggcttcaacaacggccctcctcggccatgtcaggcctgcgtccacagagcgggctcgccggctggcaggggcgcgggctgggaggctcgcctgggcggcggcgggcgcgccacgcctgccctgggcacctggtcgctgcgcagcggccgtgcaggccgcgctggctgccatggccgagccgcgctgggatgccgcactactatgggcaagctgctccaccgggccacctcacaaggcgagccgctcctggccacgccgcgccgccgggggcatgggcgggaaaacagctacgatggtgtttgaggctgtagggagacttcaggcagaacgcggaggggctgctgcacagggatgcgagacaaggcgaggggtgtga

SEQ ID NO: 31022 - DNA, 561 bp, Zea mays
  Peptide Sequence Number=SeqID_72801
gcacaatctattcttgcactctgccctggtactctcaaggaacactccgtcatcagtaagaggaatcaatccgagaaaaaatggctacaaatcaatcagggcacatctgttcgctcgtttgcatttcaggatgcttgcaggttcttccttcttgaaagtggtgtagcgatgttcgtggcacttctcatcaacatatgcatcatctctatctctggaactgtctgtaactccagcaacgtctcaccagatgactctgcaaaatgcagtgacatcaccttggactcctcgtccttcctcctgaggaatgtgctaggcaacatcagtgcggttgtgtatggtgtggctctcttggcttgtggaataagctcttccatcactggtacttacgctgggcaatacatcatgcaggtggatgcagcgaccttccttcacggacgacctcctcatcgccttcttccagagcaagatggtgcacgcgagttccactccatccacctattccttccttcctccggttcagttctgctgggtaattttgatcaacagactcagaaatcttga

SEQ ID NO: 31023 - DNA, 150 bp, Zea mays
  Peptide Sequence Number=SeqID_72802
atggcgttggtagagaatgatttaggaattagagaggaaaatgtgaaggagaaactctcccatttttgccatgttccggcagcaaatattatcactttgtatgatgtttccaatatctggcgcattcctttgttgctacatgtatggtga

SEQ ID NO: 31024 - DNA, 177 bp, Zea mays
  Peptide Sequence Number=SeqID_72803
atgtccgagtcgagcggcgaagaaaagggggagaccctgacagtgcgggccccgtgtggaagtggaaggcagagtgagctgagcgcgcccgtgaccgacaagctgggcccgcttgtcggcgccaagcttcgagtgggcagcgcgggggaaattccctggtgggctgaagtaccctga

SEQ ID NO: 31025 - DNA, 1173 bp, Zea mays
  Peptide Sequence Number=SeqID_72804
atggccgtcgtggccacgatccgccagcggcgttgcttcgtcctggtgctcggaacggccattgtcgtcgccttctccgccttattcggcacgacgtccggcgccgcgctagtgggtgactcgtgcagagcgtcatcgtccacctcggacggaggcggctgcggcaaggggcttcgttgcaccacctgcgtgcctccaccggggacgggtccggccgcgtgcgcgcggaccacgcccgtggacccaaagacacacggcacgggtctccccttcaacaggcaccaagtcgccgctggggtctgccatcatctctccgcccaaccaggaggactcggtgaccgaccagctgaagaacggcgtgcggggcctgatgctggatgcctacgacttcaacgacgctcctacgtgccggcgctgagcgtgcttacggaggtccgggtgttcctggacgccaacccgtccgaggtggtcaccgtcttcctcgaggactacgcggcgccagggtcactcagcaacaccttcaatgccgccggactgtccaagtactggttccccgaggctcaaatgcctagccctagtaagggcggcggtgactggccgctgctcagggacatgatcgccgataaccaccggctcatcgtgttcacatccaagaaagggaagcaggggacggaggggctcgcgtaccagtgggactacgtcgtggaaacccaatacgggagcgagggcatggcggatggcagttgcccaaagcggaccgagtcgaagcccatggactctaaggcccagtcactagtgctgctgaacttcttcaccagcaacccgagccaaagctgggcctgcagcaacaactccgcgccgctcatcagcaggcttaacgcctgctaccacgcctccgccaaacgatggccaaactacatcgccgtcgatttctacatggagcaacggcggcggagctcccctggccaccgacatcgccaatggccgcctccagtgtggccacgacaacatcgcacactgcaagatttcttctgcatcggcaccggcacccgcttcggcttcttcaccggcacccgcttcagcctcttcaccgtctcctgccccggcaccggattttgccgccacttctcccgccatctcatcgtctcctgggccggcgcctgggcctcttaa

SEQ ID NO: 31026 - DNA, 246 bp, Zea mays
  Peptide Sequence Number=SeqID_72805
atggcgagagtagcgtgtaccctccgtggcaagaggctgaacagtggatccactcttagtaagcatttctgcaaacagtcattgattattgataagccttaccttactccctctagccagcatacccttgagagtcttttctttagtcgggtgaagaagaggcaaacttttgctgcttttgttcaaaggtggtgcccaaggaggaaaaccaggagtaaagctgcgagaggaaaggatcctccataa

SEQ ID NO: 31027 - DNA, 360 bp, Zea mays
  Peptide Sequence Number=SeqID_72806
atgggagaagagatcaatccttctgatgccctcgccttgtaccgtcttgagtacaagccctatagctccaaaaggagcgccaagtcaaaactgtccattagtccactgaatgaaatccaacagcaaatggacaggctgactgcagatagtcctatggagagcaaacagactgctaggagcaagccaaaggctaaccagaagggtaccaatgcaaatattcatctgcatgttaacgcccataatcaagttaatgctcctaatgcttatcaagcaacaccacagggacttctcaaggtcatagctggtgttgataaaagcatcaatgtgacatccaagggtggagatgatgagttctcatag

SEQ ID NO: 31028 - DNA, 159 bp, Zea mays
  Peptide Sequence Number=SeqID_72807
atggtgtacacgctcgtcgaggccaaggttgtgctcgccatgctgatgtcccacttccgcatcgccatctccaacgactatcaccacgcgccggtgaacgtgctctcactccgccccaagcacggcatgctcgtccacctccggccgctgcggccatga

SEQ ID NO: 31029 - DNA, 393 bp, Zea mays
  Peptide Sequence Number=SeqID_72808
atgcctcagccgctcgcattgaatgcgagcggcgagcttgcttctagtcgaaggcttttgccacgcacctacgacctatgtggcagcaccggacccctgtccaagtggatagtggggaccaagggtgcatgttgccatgaagacttgggccttgcctgccgagggtctgaatgtcagatgaccaagtcttgcttgagcaaccctgcgaggcggactgaccgacctagtcttggcgagcaactttgcgaggcgaaccatccgaccaagtcttgtcgagcaactctacaaggtgaactagttgaccaggtcttggtgagcaatcatgcgatgtggggaagcacaaggtccgcaatggcatacgtggaggtccaaaacctgcccatgggagtctag

SEQ ID NO: 31030 - DNA, 567 bp, Zea mays
  Peptide Sequence Number=SeqID_72809
ctgttcgcgcttcacgcccgacgccgcgtgcgcgcgctcgagtacatgatgagggagaggatcctcatgccggcctactacatgttcgacggccgggacccggacctgttccgccactacgccgccgtcgcgcagaggctcggcgtctacaccaccgccgactacgccgacctcgtccagttcttcgtcgacaggtggggcgtggcggacctaggccccggcctcaccggcgaggggaggcaggcgcaggactacgtctgccggttgcctgagagggtgcgcaggatggaccagctggacgcgcgacgaaggctgcagccccagactcgtcagagcccagagctatcaattctgttactgcgtctcctcctctacttctacttcctcctcgttggccactccgtagttccaggaggagccgctcctgcgccaggtcgtggaccgtccgggcatgtgccgcggatcgtccgtgcctccgcagagagcaccgctaaatggtctattcctgtgtttggcgtcggcgccaacacactttttggcgactccgctggggacaaagatgtctag

SEQ ID NO: 31031 - DNA, 252 bp, Zea mays
  Peptide Sequence Number=SeqID_72810
atggcgcacggcggattctgcggtggcgatgaactccgatcttcggccggtacttatgcactcggagctaggggatttgcacagggaagcaaagctgtcggatcctggttattcggtaaagcttcgccggttgttacggccgagtccggtgcgagggagacgcttctggcaaccgggcccacgcaacagcgacacagcgaggcgacaaggacacaggcccacatggcagcgagtgcccgcggcgcggcgtga

SEQ ID NO: 31032 - DNA, 543 bp, Zea mays
  Peptide Sequence Number=SeqID_72811
atggcgcgcacaggtggcataattatgcaaagagcccaaaatttgacatctagacgtgatcgctgtggatgcaagcctacaaaagaagatgttaagagatgtttcatgttagattttgacagagcagcttttataattgcatcaactgctagtgaagaagaaatgcttcgctggtacaatgaacgagtcgtgtggaccgataagcagctgaacttaaagcttctgaggaaaggagtgctgactcgcatatacaccccaatgacaattgttcagagtctgcgcgaatccggtgtcttcacttccgccattacagctggccaacctgctgtgaatgccaaactctcacccaaggaaaccaatgcgcagagccaaaatgttaccgcacctgggaacatgacaagagtggtcagatctactgattcaaaggcatctggcagaaagatactgcaagccgttgatcttgccttcagcgatactaatgtaactgctgttccaccgttgtcgccgcccagtttggacgaacacaggcatcatagtgaataa

SEQ ID NO: 31033 - DNA, 4578 bp, Zea mays
  Peptide Sequence Number=SeqID_72812
atgcctcacccaagtagcgacaccagatgtttgattgtgaccggctggggtcggatcaacctgtctggtatggccacccagcttagcgctatcatgcttgctggtgttacatgcctagcttttggttgcagtgtaattctctctatcttggatccgcacatgcctcttcctcctgacatagacctctgcaaaagttcagtgcatgagattgataaagtgcctttggctgttttggataatcatgcaccacagccatgcaacccagaaaatattgctgggcgagatgcatctgaaacaactattcgtcctgaaaattttgaacagtgcagctttctgtttgctcctgaagaattaaaccaatctgagttgactagtctttataccttgaaaggaaaaggccatgatgtaataactcaaacaagtctgaaccatgacattcctgaaggcagaagtaaagagaaactatcatctgaccctttcctgctagataatgttgttgcagctgattattttgattcacaggctgattatcaacagctggaaaactaccaggactgtgagttaagagctcaagaatttcatcgcatagcactcaacctatgcatgcaacaagaaccaacattagaagggcataatgctggaattgatgctttgctattagccgcagaatgttatgttaatccattttttctattgggattccagtctaatttagagcctctggacaagattgaacgtattcattcagagttgatgcaagggaatgcttcctctgtatcaaaaaatttgcacttgaaagatttcaacaaaaaaacaatctacaatttggagaacaagcgtgatagatctgttatagatttactcctacaagccgccagatttgactttgaatatcatggaaagatacctgaaggggaactatatccaaatattgctgaagatggcaagcgatctgtagaaatctcacctgaagctcttcagtttgctgatgctgtaactttggtccgaaagaaccaggctatgctgtgccactttattatgaagcaattccaaaggaaaggacacttgggtagtgaaattcttctccagagcttgttgttcctgttgcactcagcaactgatctattttgtccaccagagaatgtagttgatataattttgaagtctgctgaaagcctcaatgatcagcttacatgtctttacagtttttttagtgcagggaataagaaattggataggataaaaatacatggtctaagaagacgttggatgcttctccagaaactggttctggcttcatcaggcagtgatagtactagagaacttgccagaaataaaagagatggtttccattttagaagtttagtccctccatcaacatggatacaaaagatatctgatttctccatgttttctagcccactccctcgatttttcggatggatggcagtgtcttgctatgccaaggaatatttaaatgagaagctgtttcttgcttctgatttctcacagcttacatctttgctatcaatttacatggatgaactttgtttgatggatggagttgcaatcccgaaagtcaggtctgcaaaaggtgaacaatttagttgtacggacttgtttcttaaaaaggaaactactctgtcagaccaaccaagcatgaccgaacagtttaaaatcttacttccggagctacatttcttctttccaagcatgggtaaattgtttaatgcatttggggagagcatcttggaggctgttgggctacagttaaaatgtctgcccaatagtgcaataccagacgtcctttgttggttttctgagttgtgcttatggccttatctcgaacacattaaggagcatcttgtagttgcaaacggagttagttatataagaggaagtattgctgctaatgcaaaatcagttgtcttctacctacttgagtctattgttactgagcacttggaggctgttattcctgaaatgcccaggatagtgcacattcttgtgtctctctgtagagcttcttatactgatgtggccttcctaaaatctgtgctatgtctaatcaagccactcatctcctacttcttaaggaagggaactaatgaaacaaaagtactgggccatataaaggagggcagcaattttgagttgctttgttttgaagaattgtttgaaattgttcgctgtggtaaagattcggtggatacaactgaagataatattcaggcaccgttggtcatcttcattctgggatctatgtttcttgatttctcatttgagagaaggattgaaatgttaggctccttgttagtatggattgattgcatcagttccgatccaccatcgttattatgcaactatcttcaaggtttccagacacttctagatggttttgaagctgtgctaattcaaaatattgaactacttggtgtcggcatcctttctgcgacaaactcgtctatagaatcttctgattccttgggcattgatggcactatgctactagagaagaaggcacaagataatgaagaacaaacactaatgaaatccgtaacatactgtgagaacgatggaaatcataagggtcttcgtaatctgcatcctaatagtatcatagagttttgtggcaccctggagaagtttattttgcaccttacttcatatattgaggatagttggaaatggcaccatcagttggcctctaggatctctttgtctatggcaaagtgtttgttgtttgcaaaatttttgaagtccatagcgcaagaagacacaatatctagtagcagtgagcaagatgtcgctgtgaaaatttcctgtgagcttgcacaaaagcattggcaaagtgctcttgaaggtctaggagataccattttgataaatcaggaaacacagttctggcaggtggcatcagctatgcttgattatataatggggataccaaacgtccttgcttggggtaatgttcttaatactacatgctctgcggtcaagcacttctgctcccatgcacctaggctatcttggaggctgcagacagataagtggttgtcattattagtttcaggtggaattgagggcttcaaaaacagtgagatctgtttgattgatcttttctgtacaatgttgaatcattctgaaccagagcagcgttttgttgctgtacaacagcttgggaggattattaactcaacaagttctactgaagctgatttgaaatatccaaactatgaccaaaatttcctcatatctgtttcgacagtaacatcccttttggtaactcatacatgggacagagtagcagcattggctctccatgactcttctatgctattaaggaatcatgcaatggcattgcttactgaatatgtgccttttgttgataggaagcacctgcagtccttcctttcatccagtaacggaggttttggatatatggagaaagatctctgcctagctctgtgccaactaaaaagtgaatcagatgctacaactgtactgccccttcccaccccctctccggttgcaaaagttctttctggatgtaatagtcaaccagtcagccctgatttcaagagcatccgtgaatcaatccttcaggtgatgtcctctttgagttctattgaagcatactttgagttcttcgcagccagatctgcacaagaacatgaggaacttgaagaagctgagattgaattggagcttattgaaaaagagaagtcagttcctaactttgttgagcataccaatgatacgatggtgcttgccatgccatcatatgaccgtgatggtagtgaggttaataaacggctccagcaaatccgggaaaatattcggtccctggaaaggtctaggctgaaagaggaaattacagcgcgcagacaaaagaagctgcttctaagacatgcccgtgaaaagtacctagaagagacacgctccagggaaacggagcttatgcaagagctcgacagggaaagagctctcgagatggaacgtgaagtagaaaggcagcgtcaactggatattgagcgtgcaaagtctagggaactgcaattcaacattgatttggaaaaagagaaacaaactcagagagagcttcaacgcgaactggagcaagtcgagttggggcggtcatcaaggcgtgagttctctgccaatcccaacagccgctccagggagaggtaccgcgaaagggatggtggaggcagagcacagcaggaggcggggagcctgaggtcttcgagcagccgaggccaggaggggggctctgcccaggcgcccgcaccggccgggccgggccctaccgtcatgctcgccgggtcaaggacgttctcgggggccaaccttccaacgattctgcagcctcgcgagcgcgctgccgacgaggacagcgcttgggccgaggacgctagcagcaacggagatcctgaactggacggcgtgaggccgcatgggccgcgaggcagcaggtcatcctcctctaggcaggttgcggagaggagggagcgggatggcactgctgccggcacgggcaggagagaagggaaatgggagaggaagcagcacccgtga

SEQ ID NO: 31034 - DNA, 237 bp, Zea mays
  Peptide Sequence Number=SeqID_72813
atggcgctcgcctccggcacgtgccgccccctcctgggtggccccgccagcaccgcgcggctccacctcgctgtctcctcgtcctccaccgcctgctcgatccgcttcccccgcggcgccggcggtggcagggcggccgtctccctccgcgcccccgcgcctccagccacaatagcacccgagagtgaagctttggagaagatcgaatataagcatattgtccatgattttctttaa

SEQ ID NO: 31035 - DNA, 392 bp, Zea mays
  Peptide Sequence Number=SeqID_72814
gcgactttcaggagcgcgccaacggtatgattttgcagggactgaagccgaggatctacaacgacctcaataagttcggcaagcggtggataaaggaactaccctcggtggtttggagtctgaggacgacgccgagccgagccacgtgtttctcgctgttctttctagtctatggggccgaggccatcctacccatggacttagaatacggttccccgaggacaaaggcttacgacgaccaaagcaaccagaccaacagagaagactcgttggaccagctggaagaggctcgggacgtggccttactgcactcggtgcggctggccaacgatcaaggcgagatctacagcaacgcttggaacatccaacagctacgtcgcttttacccttaa

SEQ ID NO: 31036 - DNA, 586 bp, Zea mays
  Peptide Sequence Number=SeqID_72815
gccgatctcttggatgatggaggaggaccagcagatagtcgctggcgtggacgccgcggcccgaggcggcggcggcctgggccgcgcgggagccgtctttctcaccgcgacctgcgccgcagccacctacagcgcggcggcggcaggggacgtcccgtccgtggcgttcgtggtcgccagctacggcgcgctcctgcttctgctgcgctccctgcgcgcctacgagctggcgccgccggaggcggctgcacgcagggaagcgctcaggcgcagggtctgggcgctctgcacgctactcagcgtgatgttcgcgtggaaggttgcgagcgtcgtcgcgacgccgtggccggtcgctgtcggcgtctgggccgcggcggccgtcacatctgccgctgggttagattgcccgtgcaatgcatgcatgcacgatgatgatgttgtgcatatgttattgaaggttttccgtgtgctggtgctggtgctggcctggctggcgtttggtttccccgagataatagaatctgcagcgggtggggtatccgaggaaatacgctgcgagctcctgattgtgagattctgccagtag

SEQ ID NO: 31037 - DNA, 1932 bp, Zea mays
  Peptide Sequence Number=SeqID_72816
atgcctgcgctctacgcttacggagatgacgggtgcctcgtctcggcgccggctgagctggccggactcttctgccgcggcgccgtgcagcagcggaagcgcacgctagtggccgcgtccgctgtggccgccgcggccgcggagtgcgtgagggcggccaagaagcagaggcagcttccgtcgctcgacgcgctcccggacgagtgcctcttcgagatcctgcgccgcgtgcccggccgtcgcggcgccgctgcctgcgtctcccgccgctggctcgcgctcctcggcagcatccgggtctccgagttcggccaggccgccgcggcggcggacaccccgtcgctgccggacctgaacgaggagttcgtcatggaggaggataaggaggaggtccccgcggatcggtgcgttgacagggtcctcgagggcaaggaggccaccgacgtccgcctggccgccatggccgtcgtcgccggatcctgtggcgggctggagaagctctccgtccgtggaagccacccggcccgtggcgtcacagaccaaggactctcggcggttgcacgcggcagccccaacctcagctcgctcgcgctctgggacgtgcctcttatcaccgacgctggacttgtggagatcgccgccgggtgccccttgctggagcgtctggatatttctcgatgccccctcatcacagacaagggcctcgccgcttttgcgcaggggtgccccgacttggtgtctctgaccatcgaggcatgctctagtgttggcgatgagggcttgagggcaattggccgcagctgcatgaaactgcaagctgtgaacatcaagaactgtcctcttgttggtgaccaaggcatctccagcctggtgtgctctgccactgcttcgcttgctaagatccggctccagggactgaacataactgatgcttcacttgctgtgattggatactacgggaaggccatcactgacctttcacttactcgtcttgctactgttggtgagaggggtttctgggtgatggctaatgctgctggcctgcagaatctcaggtgcatgagtgttacctcttgccctggagtcactgatcttgcgctcgcttctattgccaagttctgcccaagcttgaagaagctttacctgaggaagtgcggacatgtgtcggatgctggccttaaggccttcacagaatcagcaaaggtgtttgagaacttacagcttgaggaatgcaaccgtgttactcttgttggtattcttgctttcctcaactgcagccagaagttcagggctctctctttggtgaaatgcatggggatcaaggatatctgctctgtgccacaacttcctttttgccgttcacttcgtttccttacaatcaaggactgcccaggtttcaccaatgcaagcttggccgtggtagggatgatttgccctcagttggagcaggttgacttgagtggtcttggtgaggtcactgataatgggcttcttccattgatccagtcttctgaatctggtctgatcaaggttgacttgagtggttgcaagaacatcacagatgtggctgtctcctctctggtgaagcgacatggaaaatctctgaagaaagtcagccttgagggttgcagcaagataacagatgctagcctcttcaccatgtctgagagctgcaccgagcttgccgagcttgatctttcaaactgcatggttagtgactatggtgttgccatgctggcatctgcaaggcacctcaagcttcgtgttctctcactgtctggttgctctaaggttactcagaagagtgtgccgttcttgggcaaccttggccagtctctagagggcctcaatcttcagttctgcaacatgattggcaaccacaacatcgcatccctggagaaaaagctctggtggtgcgacatccttgcatag

SEQ ID NO: 31038 - DNA, 147 bp, Zea mays
  Peptide Sequence Number=SeqID_72817
atggagctcatgcaatttaagacaaatctcattagcagttttcaaggtatccgaaaccacgcaaggtcccaactaatcctcattggtgcccctatgcaaaggatagcccacgcgagggtcaagcaccacggtcgagtaactccgtag

SEQ ID NO: 31039 - DNA, 147 bp, Zea mays
  Peptide Sequence Number=SeqID_72818
atgccctccctccgctccgctcttgagcttcaccactccctcacgaacacaacacaccccttcccttcacctattgcgcccggcaacctcgctggcgatcccaccgccatggacgcccgccacctcgccgtggactggccaccctga

SEQ ID NO: 31040 - DNA, 135 bp, Zea mays
  Peptide Sequence Number=SeqID_72819
atggaaactgatgagcagggggcagggacgaccttcaaggatgagctgcacgccggcgctggtggagagccctggaggctgaagcagcagccgccggcagaggacagaaagtttaggagaggggcgcaggcatag

SEQ ID NO: 31041 - DNA, 498 bp, Zea mays
  Peptide Sequence Number=SeqID_72820
atggacgtggtgaaggcggcgcagctgtcggggcggacgctggaacgtgttgtggtgcaccccctggtgctgctcagcatcgtcgaccactacaaccgcgtcgcccgcgacacccgcaagcgcgtcgtcggcgtcctcctcggcacctcctcccgcggctccgtcgacgtcaccaactcctacgcggtgccgtttgaggaggatgacaaggatcctaggatctggttccttgaccacaattaccatgaatcgatgttctccatgttcaagaggattaacgccaaggagcatgttgttggctggtacagcactggcccaaaactaagggagaatgacttggatgtccatgcattgttcaacaggtgtggtgaacctgcaagtgaagttatgtcctcttatggttgttcttttaaactcttaatacaacccctgagctatagacaaatatgtaaatttccaaaccaaagacactcaggccttacactccgttcggcataa

SEQ ID NO: 31042 - DNA, 165 bp, Zea mays
  Peptide Sequence Number=SeqID_72821
atgggttctgtctgtggattagggtttaggtcgagctgctggcctgtagctggcagtggtgactggcaggctgatctggttggacatggagagcgggctgctcttggcaccaggattggcaccatcaccggcacgcttgtctccaatctccatcgatataattga

SEQ ID NO: 31043 - DNA, 351 bp, Zea mays
  Peptide Sequence Number=SeqID_72822
atggattttataattctctggactgggcgcattattaacagaaactctaggggctactgcgtaaattatccaatgactcagactattctgagttggatgggcgaaagggtatcgactaatccaagccgtgagatcaaccagggacaactacgattagatctgatctcccgcgaagcggggaagggcgagtccgcgcagagggaaattcgttggcggggaagggaagaccccgagatccccggcgacggccatggcgggattgcgcgcgtccgccgcggactccgttctgaggtggacggacgagctgacaactgggacccacgatccagtgtgagtccagagcgagcgtga

SEQ ID NO: 31044 - DNA, 1899 bp, Zea mays
  Peptide Sequence Number=SeqID_72823
atggcaacttcgcagaaggaggaggagaggtgggagaagatgtggcgcattctggaccggctagaccaccaactcgagaattgggaggtgggacaacacagactgcagggccaggcggaactggttactgcgaggaagacggaggagcatggtagtcacaactgcgttccagtgatacttggaggtaccaatttctcagtgtttggtgaaaagtctgctgagaagatggatgttgaacctaatgtcccatggatgtttgttggaatgccacaacaagcaagtacatacccagtgtctagtgaaatgggtcttacagtggcatgggacgaggagatgcaagttgaaactcacacacatgagggattactgcagcaacttgctcaaggtggagaagctttagaagaattggctgagaagaagggtgatgttgtagatgagaccagcaagtctgacccatcaagtatggcagttgctatggttatgaaagttggaagcatggaggggcttcttcctgctagtgttatcagtgtgcttggggaaagccctgagaaggagcagaatgctgaaaatgttgatgctactagtgctggtggcatcctttctcaagatttggtttcagaatcaacccatgaaactaatggtgcaggcgagattataagtgcccctaaggttgatgatgaggattgggagatactacaggttagagaaatcagtgaagaagaggtggaagattactttgtggtatctcaagaaggggctgtggatgaggtgatgcaggttgagttagcagatggtgggactggggaagaggaaatgctctgtggaaaagaagtagcagggaatttggtgcaggtgatagttatgagtgcagtaaggtggatttgtgatggtcaaggtttgcccgatgaaattcttagtaaaattcagtgggataaggagttttcatctaacctgagtatgcgcagaggtttacttagagatatggttgtggaaaggagttatctcaatgttttccattcaggtgaaggggtgctgatcataacaccatcccaggggtaccaccctgaagagatgctagatctcagtttggttgatactgacatcttatgcattgtgaagcttctaaaggttaacaatagcttgctacttgaagcacatgggtctggttttgtgttgatttttgatgggaggcagaacaatggcagtgttcattatgtgatatttgagctaacacaagggtggctacctgcttctagcccaggaaacagtgatatggcatttcagtcacaactggacattcaacgaaaatccatgaacaagttaatgagcttacagttcagaatggtgtatgataaaggcaaggagaacatagtaactgatgattatgctcaggatctgtggtctatggtgactggtcacatttcatgtcaggatgtattctcaggacagagggttgttccttatcactggttcaagagtttatttggttggacagatctgaaaatcggtgttgatcagttggtaaggcagtgtccagttttccaacaaacacaacaagggcagcagcttcctattgggtcattgcatcaggcttccatgggtggttacttctttaactcattgtataggtatgcagtcttggtgttggcagtccctatgatcaaagggagtgaggacttatgggtggctgtttggattcaacagcaggctgctgacagttctgtgttcaaagagcaaggtactctagaccatataaagtgttggcaatggttggggcaatggcataccgtctgcaactttcagccaaggcacatgagggctcgttttcctactgtccttgcttggggacaagcaagttttggcgaagggggtaatgtcaggatcgtggatggtgcctag

SEQ ID NO: 31045 - DNA, 609 bp, Zea mays
  Peptide Sequence Number=SeqID_72824
atgaagagcacttcgtcttctagtcgttgtctttcccagcagcaagctggtctccttcgtcgcaccccgccgaggattgacggctttgataccaattgtcacaacccgttggtgatggagcaccgccaaacaccggtcagcgtgaggctcggccgggtcgcgccgggggacatcgtgctgatgatctcccccgaggacccgcgcaagtcggtcgtcaagcgcgtcgtcgggatgcaaggggactccgtcacctaccttgtcgaccccggcaaaagcgactcctcctccagaaccgtcgtgatcctcaatgaattagaactatgtgctggtaaaaccttgcactatgctaccctcggtatatttaccccgccagaccagaaggtaccgcaagatcatgtctgggtgcagggtgacaatatctttgcttctaacgattcgaggcaatttggagctgtgccttatgggctgattacagggaagatcttttgccggctgcgacgagtactgacagtggctctgttggatcctaggtttggccgccggagagtttcggcgcaattgatgacgcaaccaagcagtcttaacgctgaggaggagccgaggaggtag

SEQ ID NO: 31046 - DNA, 240 bp, Zea mays
  Peptide Sequence Number=SeqID_72825
atggcgcaccggacagtccgtgaacagttcactgtccggtgcacaccggaaagtccggtgcgggtccggtgtgccactaaaattcatttccgagactgcgctctcgggtttctgcgactgggagagtccctgccgtggaccagcctggcccacctggcagagggtgcaccggacagtccggtgcacaccggacagtccggtgccccaaatccagaaactctaagtcttgttttcagctga

SEQ ID NO: 31047 - DNA, 286 bp, Zea mays
  Peptide Sequence Number=SeqID_72826
caagtcccgtctcgacgaacctgtcgataggaactcgccaagattcggtatgatctgtgccctcggcaccctgaaggataagcagttctggaggatatacttcctgctcgccaagagttacatctcaccgtatgaactacgtgccatacagaaggaaaaactcagacggatggagacagaaaactgcaagccaaaacaagtgatctctgttgaggtggagatgcaagaatcgaagcgcactagtctctcacaagcatcagaagtagatctagaatctcaggtttag

SEQ ID NO: 31048 - DNA, 1551 bp, Zea mays
  Peptide Sequence Number=SeqID_72827
atgctgcaggtggaggaggcgctggcggcggtgctgtccgcggcggcgggccacgcggagccgcacgccgtgccgctgcagggcgcgctcgggctcgtcctcgcggaggacgtctgcgcgcccgatccgctccctcccttccgcgcctccatcaaggacggatacgccgtcgtggcctccgatgggccaggggagtatcctgtggtcacggagtcgagggcgggcgacgacgccctcggagtggttgtcgtccccggcacggtcgcctacgtcaccaccggagggccggttcccgatggcgccgatgccgtcgtgcaggtggaggacaccgagcagctccctggcggagcggatgggtccaagagggttaggattcttgcgcgggcctcccaaagacaggacatccgcagtgtgggatgtgacatagagaaggattcgattgtgctcaagtctggtgagcatataggtcctgcagaaattgggctacttgcaacagtgggtgtaaccactgtcaaggtgtaccctcggccaacaatcgctgtattctccacaggggatgagctagtgcagccagccactgccaccctcagccgtggtcagattcgtgattccaatcgagccatgcttctagcttgtgctattcagcagaaatgcaaagtggttgacctaggtattgcagaggacactgaagaaagtctcaaggagcatatggatgcagctttgcgttctaatgctgatataatcattacttctggtggtgtttccatgggcgacagagatcttgtcaaaccttgcctggcaaagatgggtaaaattcactttgagaagatccagatgaaaccaggaaagccgttaacctttgctgagatcaccacacaagacacgccaaagccatctaaaacagttcttgcatttggtttgcctggaaatccagtagtaatcctcattgttacaatgttgtcagttttgttctcaccttacactattcaacgtattccttataactctataaccagagtgcatgtgcgcatatcacatcctttaagagcagacccacatcgtacagagtttcaccgtgcagcaattagatgggtgcttgatgatggatctggtcgacctggttttgttgctgagagtactggccatcaggctagtagccgtcttcttagtatgaaatctgctaatgccctgctggaaataccatccactggacaaatattggcagctgggacatctatccaagccatacttatttcagacataataacttcttcagataaactgcctactccttcaaatccgtatccatctcgtggtccttctgcaaaaagtatttccgcagatgtatctcagattgcatctccacaggatgctgaagttaaagtcgcaattctgactgtaagtgacactgtttcatcaggtgctggccctgataggagtggcccaagagctgtatctgtagtgaattcttcatcagagaaactgggtggtgcaactgtggttgccactgcagttgttcctgatgaagtggacaagatcaagggcattctg

SEQ ID NO: 31049 - DNA, 659 bp, Zea mays
  Peptide Sequence Number=SeqID_72828
ctcccggggacgcccaaggaaggttcctcgtcggccccacggtctctccatctccactagcagtcgccagaggcgatacggagcgggacccgattcagcagaggctcgatggccgggacgaggggtcggaggtgtacgtgtgcttcgggagcacgtgctcgctgggggagacccagcttcgtgagctggccaccgggctgcgcgcgtcgggccggccgttcgtctgggtggtctcgacgacgcctcgcggggacggcggctgcgcggagcgggaggcgcgcgcgtccagcaacggcatggtggtggccgggcggtgggcgccacaggcggagatcctggcgcaccgcgcggtgggaggcttcgtcacccactgcggctggaactcggtgctggaggccgtgtccgccggagtgccgctcgcgacgtggccgctccgcgcggagcagttcctgaacgagctgttcctcgtggaggtgctccgcgtgggcgtgcgggacgaggaggtgttagcggcgaggaaagccagatctcgggagctcggggccgcggcgcgcgccgccgtggcggagggtggctcgtcttccggtgactgggcacggctggtatatgagctcaaggcgttccatggccgccacaacgatccacagacgtacaaatga

SEQ ID NO: 31050 - DNA, 276 bp, Zea mays
  Peptide Sequence Number=SeqID_72829
ggagatgttgtgattccaagcttggagagtcataatgtccgtcagctttatccaaagggccccaatattgacttcaaaaaggagctaaggaccctcaacagagagcttcaattgcatattttggagctggcagatattttagttgagagaccatctcaatatgctcgtagggtggaagatatcacactcatattcaagaacttgcatcatcttctcaattccctacgacctcatcagtaccttttaggcaagagccacattgattcacatgcttga

SEQ ID NO: 31051 - DNA, 278 bp, Zea mays
  Peptide Sequence Number=SeqID_72830
atggaccatggagacagcatgactgtgaaccatcgttttgttcttgtgaagtgtaatgtgatgactgcagagtgctcactggctcactgtgtgactgtgtttatggctgtaggaagctgctatcgggtatcaagtttcattacccgaatttttcaatacccgaactaccccgaccccgaactaaacggggtaaccccgaatgcccagtcttacgtgggggctcgggcgtacggccaacccctcggcctcggctctcagcgggaaaacatcaagcccaa

SEQ ID NO: 31052 - DNA, 234 bp, Zea mays
  Peptide Sequence Number=SeqID_72831
atgaacccttttgctcaagcatcacttgtagaggctagaaagcttgttctgctgacctggcgtcctggcggagtggcgggggcagggcagcgggctccggagtgggagtgtcgaggtctctccgggcagggcacctggcgtcctagcggtggcggactgtcaaggtctctccgggcctccggcgtggcggcgtccggcgatccgacctccgggcaggcggcgagcggcggctag

SEQ ID NO: 31053 - DNA, 351 bp, Zea mays
  Peptide Sequence Number=SeqID_72832
atgtccggtgcaccagaggactccgactgccaactcgccaccttcgggaatttccagaggcgactccgctataattcaccggactgtccggtgtacaccgcacatgtccggtgctccaaggaagagcggcctcaggaactcgccagcctcgggaattcacttcatctgctccgctataattcaccggacatgtccggtgtgcaccggactgtccggtgtaactacgcgacaacggctacttccggcgccaatggctacctgctgtgcattaattgcgcgccagcgcgcgcagaggtcaggcacgcccatgctggcgcaccggacaatctacagtacatgtccgttttttga

SEQ ID NO: 31054 - DNA, 396 bp, Zea mays
  Peptide Sequence Number=SeqID_72833
atgtcgctacagtcttcaccgtctttccgtgtccgccgtctcggtctgcgtgtcccccacggccaccgtaaccaccaccacctccactccatccccgccaacgtccggatccaccgccccgatctcccgcaccccgccgcggggccccaggagcgcgccagggacatcttcgtggtcgtcatcgggctcctctttggcgtcgcctgcggagcgctcaccgctgcttccgtgtacctcgtctggtccatggtcgccggagctgctgcggtctccgcgtacgacgagctctacgacgacgaggacgaggcgtccgacatcgagagccccaagaaggtcggctacgtcatcatccaggagctcgaggtcgatgaaggcgttgggacttgggagccttag

SEQ ID NO: 31055 - DNA, 384 bp, Zea mays
  Peptide Sequence Number=SeqID_72834
atggcggcggcgaggagccggatctgtgcctggggaaagggcttcctcggagaaaataataaatggaacttggatgaggtcgactctgcagccgagggatgcccggggaggggatctcaccgtgacccaaacgacgatgttgaggggcggcttgatggcgagtttcttgctccagagagcaatccacgtgtccccggtcgcacatcacgaccaaatatgccacagacacgcgtgacagtgtcacgtgctcctctcggaccctttttcaaggttgccgaagtccatgatgctttgcctctctctgcgctcgtcgtgcttggtggtgtggacaacatcctcgtcctcacgtttgattcttcggcgctggtacttctcattatttag

SEQ ID NO: 31056 - DNA, 1230 bp, Zea mays
  Peptide Sequence Number=SeqID_72835
atggcgtccgtgtccacggcgccgcgcgctccactcccggcggcagcgtcgtcctcgttatccgcgcggcaggtggatccgaaccctagcggcagccacttcctcgacgggcggcgcctccgcgtcgtccgccgcctcgccggcgcggccccgtcgcggcgcgctccgttggtctgctgctccgcgcgtagtccggacgcggacgccggcgacgagcgacgccggcggggttgggacgcgatgcttcacgacgccttcaagggtgccgtgcgacggtggagcgagtacgtcagcaattactggcccccaccgacctctgttaaggaggcgggtacggggaagagggttgggaggtctcacgaggaagaggtgatgaatggggatgaagaggagaggaaggttggggaggaagagggaaagtggagctgggcgaggtggaagcggcactttgctctcattgaggagagcgggcgtctcgttgatgagctccagtcggacagatgggcagaggagcgtgaggaatgggacgatcgaaggttgaaggagatcctgacaggaaacaggacggccctgatgtcatcagatgccagtgagaattgccaaatgctacatgtcatctctgtcgcaacgggagcaccacaaacgatgagactggagcagaagccgaagatgatagcttctggatgccgaggtaaccgaagtcgagatggtcgtgatcgactgacacgtaacgacgacctcgttcttcagggggggtcgacgttcgagcatcaacgatcgacggggccgcggtgcgacactgaaggacctaccaggtgctggggaccttcttgcttctctcgtccggtcgtcaggaaccccgccaaggaggccgacgtcgcgcacgcgtctgcgccggtcaagacggcgggcggtgctggagatggagcccgccatggcgtcgatcggcgcgtcgatggagtaggggcacaagcaccattgacggagggagcagaggcgctgaggaaggccgcgcaccctggaggagctcaggcgccgagtgccatggagaccgagcagaggggcaggcgactccatggatggagagggggcgctgaggacgacggtgcaggggaggggcggccacggggaggggaggtccgaccgctggggtgttggccggctctgggagggaaggatgagcatcccgaggatgacaacgcaggagcagatggcggctgttggaggtag

SEQ ID NO: 31057 - DNA, 276 bp, Zea mays
  Peptide Sequence Number=SeqID_72836
atggacgagcttgctacacaggatcactgcaacgtgctaagcttccaagacgcgtggagcatgatcgttaagaggctaacagcggtgaagatcatcctggccagccgtagtccaaagggcacgaatcgtggcggcggcgcggatcacgatgtgagggtcaccagcggcgagggggatgaatctgaagatctttctacacacactatagcgtcagatttctcatcagggtgcctgacagagcgatttcaggagcctggatcttcaattttcatgtaa

SEQ ID NO: 31058 - DNA, 405 bp, Zea mays
  Peptide Sequence Number=SeqID_72837
atggctggcagagggtgggcgagattcgacggtgcccgcggccgaacacacaaggaaaccctcgctgccacaaacgccaccaagtggatccccatccaacctgggcgagcagggagagcggagaaagggggaactcgccaagtcatggctgaggagagcaccatggccaagagggaaaatccgagcgcaggggtgagcagggaagagcgaccgagcggagctcgcagcagcacgcagggaacagagcgtggacgacgggacctgggtgagcgcagcagggaacctgatcgcgcggccatgataggagccaagcgctgggacacggtggccagcgcgcaggaagcaaagcgtgccatgggagggagccgacgagctggagtatcggcgagccataggcgcgggtga

SEQ ID NO: 31059 - DNA, 474 bp, Zea mays
  Peptide Sequence Number=SeqID_72838
atgtgcgggatcgtctccggggatggtcggagtaggccgatccacgtgcgcatgcggaggaagctcgtcggcggcgagggcttcggcccatccagggcagtagagtttaatttaaactgggcttcgattctcgcttggagaagcttcacagctcctcggggaagctgtccaaaggctcggttgaggctgaaggtctctagaaatggctggtcgcggtggccggcgctcgggtggatcgggcgggtggcgcagagctcaccggagctaagggtggtctctggccagcgaagccttccccccttaaaggaatatcgtcccaagattcaggtcagagtcctccagggtgaagcgaagactcaaagggcagggggaggggttgggcatggttatgtaccagttccattaggtagacaatcggggaagttcgaacgtagaaattcctccgcctcccaagtagtctcttcctctgagtga

SEQ ID NO: 31060 - DNA, 255 bp, Zea mays
  Peptide Sequence Number=SeqID_72839
atggccagtcagtcgtcttctccacttgattgggagatgcgcttcctgatagcccttggagcggctgaagggctttcgtacctacaccgcaaaatcaaatctagtaacaacattttattggatgagaacttcgaagcccttgtcggtgattttgggctggcgaaggtgatcgaagtcgatgtctgcagttgcagccgtgtattctccattcctatacgtcttcatggtatcagaaaaggctacgtccttgcctaa

SEQ ID NO: 31061 - DNA, 927 bp, Zea mays
  Peptide Sequence Number=SeqID_72840
atggcgccgccgcagcagctgcggctgaccgcgccgttgcaggtcgctgcggggggcagcggcagcgactcgtcctcctcgttcgtgccccccgctcgggactacacccaagacctgcccgacgagatcctcgcgctggtattcgcgtcgctctcgcccaccgaccgcaacgcctgctccctcacctgctcccgatggatggaggtcgacgccaccacgcgccaccggctctccctcgacgcccgcgccgcgctgggcaacgcggccaccgcgctgttctcgcggttcacggctgtcacgaagctcgcgctccgctgcgcgcgcgactcaggattggacagcctctccgaccacggcgctgcggcgctggccgccgcgcttccctcggagcgcctcgccaggctcaagctccgcggtctaaggaagctctccgacgccgggctagcctccctcgctgccggcgcaccagcgatccgcaagctctctattgcgtcctgcaccttcggacccagggcattcgtcgccgtgctccagtcgtgccccctcctcgaggacctctccgtcaagcgcctccgcagcgtagcagacacgtccggtgccgccagttccattgctgaggagatcaagtttccaccggctttgtccctgcgttcggtttgcgtcaaggatctatataacgctctgtgctttgtgccgcttgtggcgtcctcaccgaacctccgctccctcaagatactgcggtgctccggcgcctgggacctgccattggagcgatgggctgcgctcaagaagctctgcatcaagggttgccccgtgtcagatcgtgggatggaagcactaaatggggggtgccccggtttagtcaaggtgaagctgaagagatgtcgtggagtgtcatacgagtgcattgagaacctgaaggtttga

SEQ ID NO: 31062 - DNA, 519 bp, Zea mays
  Peptide Sequence Number=SeqID_72841
atgcccaggtcgaaacgttatgcacttctaatcccagccgcagaatgtacgatcaacagccacaacgtttatcttctaccccggccaacacaggtggcgccgccaatcccccacggcggaagttcgccggcgaataggtggcccgtggccctggcgccccaagtcgcgattcgaaaggttctacgcgcagaggaggagaatgcgaatccggggaaggaagtttcaccacgagacgaagcacaggcaaagctgcccacggcgccacgcgagtcagcagccaccttctggccccggcaagcgattgcgccaccaccgatcgccccaccgccgattggacgcatcacaggtttccgcctagggccagaggatttaaagtccaaatccatgataaagtttaggaattcaaatttttattacatactcaaaatcaattatgaagtcatagattttgggccttacatgggccgaaaatggggaaggaggggggagaggagaaggaaaaggtttttctttttctaa

SEQ ID NO: 31063 - DNA, 297 bp, Zea mays
  Peptide Sequence Number=SeqID_72842
atgcagttattcgcgcccgaggccaacctcgggcacgacacaatcatggctcgtaaggccaacctcaggcgcgagacgcaatcgcggctcgcccgagaccaatctcgagcggaagacgcagtcacggctcgcccgaagccaatctcgggcaggagacagtcacagctcgcgaggccaacctcgtgtgggagacgcagtcacgactcgtccgaggccagcctcgggtgggagacgcggtcatgggttgctgaaagggaaatgtgcccttgggccatttctaagtattttggtgattga

SEQ ID NO: 31064 - DNA, 1377 bp, Zea mays
  Peptide Sequence Number=SeqID_72843
atggcgacgtcgttcgaccgctgggagaaggaccccttcttcctcgccgccgaggaggagaggagcgggggcgattccgaggcggcaagcgtcactggaggccctacagctgcgcagcttcgccgcgagctgcacacggcgcttggtaccgccaagtggcagcttgatgaactggcgcgggcagtcagatcgaacgatctggttatgtcagcaggaaaagacacaagggctaggcatgatgattttgttacagcaatcggctatcgcatattagaggtcgagaactacttgaaagaatccaatcttgcggacgggagggggccattgagctgggttcacttggatgaggatgaaagggacgaccttgcagcttttctatctgccagtccttttcaacagaaagacaaagtggtcacaattccttcagcaggtgacattgaagtgggcagcaatgcagcaaggatgaaaaatgatatatcaactgacagctccaaggattcagctggttccacggatttgatttcaggcacagcaaagcaagatttgcatcgtgggcacagaagagcagctagtgccagtgctgatataggctcatggagcatgtcaatccctaatgaatgtgaaggaactacagaacagttatctgatggctcagacaaattgcctttgcataagatagtgaaaacatgtgctttgacaagtaccttgcaatctaagactagaacgaagtggaaaaatggagctgttaggtgggcaggcagtaaccaacaggatgttgaagaggctatccctctgaatacttctcagttgagtcaggtgctgccgcacgtccccggcggcgtcgagctggcgtcgcgggcggcacccgcggcgccggtgccgggcgccaagtccgtgctggtcccggagcgcgtcggcgtgcggatccaggtcgaggtcggagaggcgggccccacgggcggcacggcgcgcggtgaagagctcggaggcgctcgtcatgccggcatacccagcgtacgaagcgaagtgacgcacggttcagtacccccacgcaagagaagtccacggaaaacgacggcagataattggaggcaaggtgttttccagctacgcgccaaaggaacaatccccccagattggtggggctcccgcttcgttttatccatcatccacggcaggcgtgcgatggcgccattgtgtggcctggcttccgttccgcccgccgaggccagtgtggcaggcagctcccgcgcgagcgcgagcgcgatccagaggctggcgcacctgcgtcactcgctccgcgctgccgcgatctcctctgacgtcgaagtcgcccgggggatgacacagggggaaggggtggtgtgggaggggtga

SEQ ID NO: 31065 - DNA, 459 bp, Zea mays
  Peptide Sequence Number=SeqID_72844
atgccgcagtggtggggccgagaagcgcagggtgacggtgacgtcacgtcggtggtggtgaagatggaaagcccggactgggccgtccggaagccagaggtggcgagggggaaggccggccgcggcaagaacgctcgccagatcacgtgcgtgcttctgctcaaggcgcaccacgccgcggggaagctcacgggcgccgcctccaccgcgctgtccccgtctacaccgaaggccctcgctgcgcaatgcctggagcacggcgcgctgcttcttcacgtgttggccgacgctttcgctggcaagctcgacaatagtggttgcagcctctccgatctcaagaggaatatgaggagtttacagagccggaatcacctacagcaccattctgagggcaaagtgaagctgaagagctacagattgacatatctgacacaaaagcaatgctttgacgactcatag

SEQ ID NO: 31066 - DNA, 291 bp, Zea mays
  Peptide Sequence Number=SeqID_72845
atggcgctaaggggggtctggcagctgcagaagctcgtggtaaactactgcgactggggagggagcagcaggggcatcagggccttcatggaggcacatcttccagcctttaaggaaaagaatccacacttagaggtggtgacagagcttgtccgcgtaagatcttggttactttctttcattgcaatttatgatttacttttctccaccggcttcctcatagggatacaacttatggaagtgccattagatatctggattggcattgagatgacttacaatatagcttaa

SEQ ID NO: 31067 - DNA, 1394 bp, Zea mays
  Peptide Sequence Number=SeqID_72846
ccccggacgcggcatcggatcccatcacgaaggcagccgcggcggccaaaagttggcgaaaggcaggtcagggccagggccaggccatgatggtttggttcacgtcgcgggagaaaagcatcgatcgagccgccgttgtcccgggaccggattgccttcatgccgatatgggcgtggaccatcacgtttccggcgtcgagcgacaggcacctgaccaaacaacagattggcccatgcccacacaggcacacacacagcaaggcggcgaaacgggacgcctcaagcacgtgaccccggccctcgcgcgcgcagtacctgctgatccatcgcacggacggaccagtctcggctcctgctggacagtggacattttgacgtggaccagccctgcagctgcagatgagccggccgccgcaccccctgcatggcagtggcagtggcactggcaccggtcaccgttgcctgtaataaaaaagctgcggtgggaggcgaaggcgtccattctcggccccggtttcggctgcctcgctctcaagcaggcactggcaggcagcccgccaccacatgcgcgcaccgccaccgctggtcccacggcgcggcacgccgcgtccgctgtcgtttcttttcgtcgccgatgcggaataaacaaatcgcgtagccagcccagcccaaccacagaggcacaggcactgccggggcagggcagggcaggccgtcaggcacatcggcacagcagcgcgagccggcctagtcggaggagaaaaccccacacgcgcacacactggctgggtagacgccgctcgcgctccgccgctagaggctgcctgttttgctgccgcctcattgcttcgctcctcctccctcgccgccgcctcctcgtggcgagcgagtcgaatccattccctcccaccccacgggcgccggccgataccgacccagagctcggacgcgccgaggcgaggccaccgccggaagcattctcgcctgctcgccgcggggacgtgcgtgccgagatgttcgcgagccggccggtggtgcacccgctggaggtggcggcgcccgcgcatccggtgcagcagccggcgccgggcgttctgatgaaggacctgcccgggatgccggggacgcccggaggcctcggcctccgcgtcctgcagctcctcttcgcagccatctcgctggccgtcatgtcgtccaccgccgacttcgccagtgtctccgccttctggtacgccagctctcttctgttccatccaccacctcaccatctagcttccttctccagtcgcatgcctaggatctcggaatcgcattgtggttttggtggttcagacagagataaaaaacgcaagttcctgccccttgccaaaatccagacaaatgtgttcaactag

SEQ ID NO: 31068 - DNA, 309 bp, Zea mays
  Peptide Sequence Number=SeqID_72847
ttgcgaggtcaacatcggacaggagatggtcacggctcgcccgaggcctcggacgggagacacagtcacgactcactcgaggccaaccccaggcgggagataatcacagctcgcgaggccagccccagaagggagacgcaatcacggctcgccctaggccagcctcggtctggagatggtcacggctcgctcgaggctagcctcggtcgggagacgtcttcacgcatcgcccgaggccaccctcggatgggatatgcagtaatgcctcgcctgaggccaatctcgggtaggagtcaaagtcacgcctag

SEQ ID NO: 31069 - DNA, 726 bp, Zea mays
  Peptide Sequence Number=SeqID_72848
atggcagcggcctccgcatcagacccggcgccggcaccaccccatcacggccaggcgcgcgcggatcgctggcctcgttcaccgagccctgccgccgcgcgggggggggaggaggaggcgcgcttcaatgggggctcgctcgcctgcgcgggtcagggtgggcagggcaacgcacagatcagggtagataaagttcacgagcgtcatcgggacggttctggtgattgttgggggtcttggggacctacaccttcctatgggccaaagcaaatgagctacatcagcagtgaatatgtcagggagcccaagttcatagagatttccatgcctctcggggtggaaacacaaatagagggcggtctagtggctgcaagggaccaagggtcgctgcaggcctcagccgacatggactacaactccgacgggtcagggtcggtcacgccatcgccacagctgtgggcgagccaccccgagcaccaccagttcgaccaacattactcggtaggtgtcgctaagcatctcgccgtcgtgagcgtaggccatagcggccgggggtactgccgcgagatgctcgagctcatccggggcctcccgcagtccgcctacgagctctcgctccacgacatcgtcgagcacccatccgtcacccctgtcctcgcaccgcactcctccctctccaccgcgccggcggcgccgacacctagcgcagccgactgcaagcgatga

SEQ ID NO: 31070 - DNA, 1776 bp, Zea mays
  Peptide Sequence Number=SeqID_72849
agggttttagccaaggagacagagctgcacttagcccagaaagagttgaataaatacaaggaacagctgaataatgctgagacaacgaaagtgcaggctctctctgagctagagaaagctaaaaaaactgtcgaggagctaacaaccaagctggatgtggttaacaagtccaaacagttggccattcaggcaacagaggatgcaaagactcgaaccaagcagcttgaaggtggcagcacaaatgaatgtctaggaacagatggtcctctgaggcaggaactcgaaagtgcaagggagcagcatgctatcgctttggcagaacttgatgcagcaaaacaggagcttagaaagctcaagaaggattttgaaacatctttggatatgaggttgtgtgctgcccagcaggaagacgaatcactccatacaactgaagccaacaaagaaaaagctaaccaacttcttggtgagattgcggaaattcaagaatcgcttatgcatgttaaggcagctacggtgcaagcacacgaagaagaggcacaaatccttgctgagaaggatgttgctagggccacgtataaacaagctttggaagaaacacagaagaaattgttgtctttgaggaatgattttgaccctgctgcttatgatagtctgaaagaaaaactagaacaaaccaattctgaggttgcatctatgcaaaaaaagatagaagatgctcgggctcaggatttagagtctgttgctgttgtcagcacagagttggatgatgctaaggaaatgttgcaaaaagtagcagaggaggaaagttctcttcgaagtttggtggaatcactgaaagtggaattggaagctgtaaaacaggagcacaaccagctcaaagagaaagacacagaaactgaatccattgtcggagatttacatgtcaagcttcagaaatgtaaatctgtgctggaggctgctgtggctgctgaatcaaaagctacgtcagcttctgatgacctgatgctggcccttcagcaactgtccgcggagtcaaacaatgcattgcaagaagctgagataatgcagaagagtgcggcggagctaagagaggaagccaaaaaggctcgggctgaactagcagaagccgaacaaaagttgcagttgacgttaaaggaagcagaagaggctaaagcagctgaagcaatggcccttgaccggatcaagcagctctcggacagagcaagtgccgctagagcatcaacttcagagtccggagcaaatatcgcaatttcaaaagaggagttcgaatctctaagccgaaaggtcgaggagtcagagaagttgagtgagatgaaagtcgctgctgccatggctcaagtggaagccatcagagccagcgagaacgaggcgatcaagaaactagaagctgctcgcaaggagatggaggacatggagttggcaacagaagaggccctaaagagggcagagatggccgaggcagccaaaaaggccgtggaaggtgagctcaagagatggcacgagaaagaacagaagaaaaccgcagaggccgcacagccttctgcgggggcagaagaactgggaagtgctgcgtcgccccctgtacgtcagacttctgccggaaaagcttccgagaagaacgaggggcatcagaggagcagtaaagcgctgctgaagaggagcttcatgctgccaaacatcgccagcatgttccataagaagaaaagccatccttccagttctccctcgcaccttcctggggaaaaatctgtgtga

SEQ ID NO: 31071 - DNA, 339 bp, Zea mays
  Peptide Sequence Number=SeqID_72850
atggcggaggtcgcgtcgcgggtccttggtgttatcgaagagtccggcggcggcggtgctgcaacgaaagctgcgatggactgtagtatacatgagcgaaattgtggttggttaaatgtccagatagggataaaaattaacgcctctgcagatgaatatgaacatcttatgtatttggttatgtgtgttgaaaagttctgggctgtgatgtttgaggattacacagctagggaaaaagatgaatatgaacatcttatgtatttggttatgtgtgttgaaaagttctgggctgtgatgtttgaggattacacagctagggaaaaaggatgcagtgactaa

SEQ ID NO: 31072 - DNA, 645 bp, Zea mays
  Peptide Sequence Number=SeqID_72851
atgttcgtggccggcaccgacacgacgttcgcgaccctggagtgggtgatgacggagctagtccggcatccacgcatcctgaagaaggcgcaggacgaggtgcggcgtgtggtcggtggcaagggccgcgtggaggagtcggacgtcggcgagctccactacatgcgcgccatcatcaaggagaccttccggctgcacccggccgtgccgctgctggtgccgcgggagtccgtggcggcctgcacgctcggcggctaccacatcccggccaagacccgcgtgttcatcaacaccttcgccatgggccgggacccggagatctgggacagcccgctggagtaccggccggagcggttcgagaacggcggcgagatcgacctcaaggacccggactacaagctgctgccgttcggcggcggccggcggggatgccccggctacaccttcgcgctggcgaccgtgcaggtgtcgctggccagcctgctgtaccacttcgagtgggcgctgccgcccggcgttgctgccgaggacgtcaacctcgacgagtgcttcggcctcgccaccaggaagaaggagccgctgttcgtggtcgtcacaaagagcgaggcctacgagttcaagggggaggagcttaacgaggtttaa

SEQ ID NO: 31073 - DNA, 405 bp, Zea mays
  Peptide Sequence Number=SeqID_72852
atggcgcaccggacactgtccagtgcaccaggcccgtacacactcaaatcagccactctcgggaattcagcaggcgcgctccgctataattcaccagactgtccggtgtgcaccggactgtccggtgagccagcggagcaacgactccctgcgcgccaacagtcgacttcaaaagtctacattggcaaacagtgccgcgcagaagtcagagatcgtcggactgtccggtgcaaccaaaagacaaagggctccaacggtcaacagctccaaaccctaacgagcgcgctaacgtggcgcgcaccggacagtgaaagtgactgtccgaaatttgaagactacatgaagaagttgtacgaggagttccaccggcaacaagctcagaaaagtgagaaggcaaagagttga

SEQ ID NO: 31074 - DNA, 234 bp, Zea mays
  Peptide Sequence Number=SeqID_72853
atgaaggcaaatatgggcacaaaagctcgtccactatctgttgacgcagacaaaggagagattggcgaaatagatacaagggctccttttgaatctgttaaagctgcagtgagtttatttggtgaagtcaaggtttcatctgacatatcagctgcaagaaagcctaaggttcctcaagcagaggttcagaataggcagtatgatggaaaggaatttcagtcagaaatagtttga

SEQ ID NO: 31075 - DNA, 195 bp, Zea mays
  Peptide Sequence Number=SeqID_72854
atgacgtggaggaatccaaatgaaggggcaatttgggttgtggcgttgggttggaaggatgatagaagggagagtatatacattattacgctcctgatgataaatgaaaagatgcgtaccacaccttttcattattgggatccaatgtccttggatattatgggtgatgatgtcaaccttaagggccacaactag

SEQ ID NO: 31076 - DNA, 168 bp, Zea mays
  Peptide Sequence Number=SeqID_72855
atggtgcctcatggttggacaaatgtagatggtacaaatcttcccttctatcatccaccttgtcctttcctcatatcacttgtagtagacaccacatgctgccccactattggcctaggtgaatgccaattcttcgacattcaccacatcttcatcagccttagttaa

SEQ ID NO: 31077 - DNA, 399 bp, Zea mays
  Peptide Sequence Number=SeqID_72856
atgaaagaaaatacattaaggcctggtttgttgaccggtgtatcaagcattcatatctttcatttcattggtatctttcttatgttcatgtacgttggagctccagataactgggagacagttcttggaggcattaaaatcatgaggttatctggtgaagcccccatagatacgaagggctgtgtaaaagctggttctctccttccacccaagttcttagtacctgaaatccaggaaatgactggaaccgatgcaccaatgactattctggctatgatgcatctactggcaagctgttactgcccctcgaaagaagttcccaagcgggcagcactggatgatctacaggactacaaccttttctcaaatccatcacttcagagcgggccacatgcataa

SEQ ID NO: 31078 - DNA, 492 bp, Zea mays
  Peptide Sequence Number=SeqID_72857
atgagagatagagatcttctctctcggtcgccgtgcgagtccaatgtcaccgtgctggcctcgcggtctcacgcgtaccaccggcgcggtctgtgggcgatcaaggctaagcacgacggcgccttcccgaaggccgagaagcccaccgtggtcgccgagcccaagttttatctcgccgatgacacgaagccgcgcaagcccagcacccgcaagccgaagcccagaagcttagtggaacgttgtagattgaacattagtcagtacagtcgtcttggagttgaaatgcttgatgttgaagttaatattgtcttgaaatttgatgactactatggaaatctgtttctgctatctgtctttgcattcgatgatggaaactacttgtattgcagtgatattgaattttatggacgtgttttatttggaaatgagagtctcaataattgtgtgtatagcaaatccaacacattgatcagaaatggttggaactactag

SEQ ID NO: 31079 - DNA, 1194 bp, Zea mays
  Peptide Sequence Number=SeqID_72858
atgacccgcgccgtcgccgacgtctccgccgcgcgctccgcgctgcaggtgctcggcccgcgccccgaccacgagctcgtcgactcctcccgcgccatagtggccgccgccgaggccggggattcgcggatccccgcgggcgacgtcgaggcgtgccgcgcggtggtgcgcctcgatgagacccacgacgcctacgaggccctgctgcacgaggccgagtccaggctcgagagggtgtaccgctccgcgatggaggggacggacctggatgacgaggcggcggagagcgtcaaggatcaagggccggtcgcggggcctgagggcggggacgcggcggtgggggaggaggtggtggcggtgctcaagcaggccgaggagggcaagccggtggacagcgtgcgcctcgtggatcgccagcttcgccatctgcccgaggcgttcgggaggatcctggggctccgtgtgctcgacgtctcccgcaaccagcttgagattttgaatgtatcaagtaataggcttagggcactgccagatagcatctccaagtgcaggtcgctagttgagcttaatgtgagctataatggtcttacttatctgccaaccaacattggttatgacttggtaaatctgcgaaaactctggattcatatgaacaaattgcgttctcttccatcatctgtctgtgagatgagatcgttgtatctcctggatgcccattttaatgaactatgcggtctaccatctctcttcgggaaacttagcggccttgaaattctcaaccttagcagcaacttcagtgatttgaaagagcttcctccctcgtttggtgacttgctaaatctgcgtgagcttgacctaagcaacaaccagattcatgctctccctgacacttttggtcggctggataaactggagaagcttaacctagagcagaaccctctagtcatgccaccagaggacattgtgaacaagggcgtggatgcagtaaaagagtacatgtcaaagaggtggctggacatattgctcgaggaagaacaaaggcgcattgcggcagagaccccagaaatgtcatcgactcctaaagcttggctgactcgcagcgtctcctgggtcacggacgtttctgagagtttggcagggtacctaggtgggaacaagtcagagaaagatgcatatctggaccagcagttttga

SEQ ID NO: 31080 - DNA, 540 bp, Zea mays
  Peptide Sequence Number=SeqID_72859
atgcgccgggccactgttgagcccctgttgtctgaggccaacctcccgttcaaccctgccactgtctttgctccaccttatgacactgtctcgtcgttcactagaggtcagcatcgcgtcgctgaaaatgagatattggtgctgaggtattatcctcgacggcggccttgctgggatgtggtgaaggacctgggaggtcactcgctttttgtgggaaggaacaatgcggtgtcgatgtatggagagggtgtgccaggactgaggggcaactgtgtctactggattggtgggcgtggtagggatcaaggcatggtttttgacatggaatctgggaggtccacgccgtgcagggttcctcctgttggctttttacctgggcatccgcatagcacaatctgctggtatttcttgagcgatgtaatgagcatcaataactgctacagcaatagtgtcagcagcagcaacagcagtggaggaagaaaaatttatcaaactcgagcaagagcacgagcagatcttgcacaagacatggaagaatga

SEQ ID NO: 31081 - DNA, 576 bp, Zea mays
  Peptide Sequence Number=SeqID_72860
atggcagctggagatccagggattgtgcctggttcttgtccaaacaggaaggaatcgcagccactgaactcaaggccggcatctctatttctgcaaaattacttccccacgatccccgtgcagaacgaagcatgtaaagagaattctgggctaccacaaatggcccaggcttgttatgccgcagctgggaataggatcccgaacttcatagctgtgaatttctacatgcgaagcgacggtggtggtgttttcgatgttcaagacagaatcaatggccgcaccttatgtgggtgtgacaccattgctgcttgccaggctctagttttcatatatctggacctttttcccacctactgtatagctgaaagtaacatcagcttttgttgtgagcttgctttctctattgggatgacgatatatgcatgcgtgttgcacctagaccgaaattttgttcacatcaatggaaaccgcgtcttctctgtgccctctactgacgggtgggtcaccacggtcagcgaccatggcggtgctaccaaggctgacgggtggggtcaccacttaccttactcaaattaa

SEQ ID NO: 31082 - DNA, 1425 bp, Zea mays
  Peptide Sequence Number=SeqID_72861
atggagaaagatgtgggttctggtagcgttagtgccttccctaggcaagctaaaaactgcctggcagaaaactcatcgacaagaaatggagctgatacagtattagagtcactaacagtgaaatcaaatatgctagcaaaaattcctgagtgtggatcttatggaatacaccatgcaggctcctcaagttcagcagagcctgaacaagtgcatcaagctgaacctaaagtgagcagaagacaagcagatggacatcctgtggcttatggtatatttaactccgtggatgtggatggcaaacctccggctttggttagttctgacagtagctcgtgtgttcctctgagcagccatgacaaggaacatcaaacctcttccttgtatcggggtgtagtgcagtatactgcagatagagaagatgatgaaaattcttctgggtgcacgcatccaagcaccatagaaactagtgggacatcatttgctatggaaggtcaaaataaatcatgtgaagctgagaattaccatgttaagctaagaatcaagtcattcaacatcccagaattgttcattaaggtcccagaaaatgcaaccattggatcactgaagagagctgttatggatgttgtcaatagtataatggaaggtggcctacgcgttggtgttcttcttcaaggaaaagatatccaagacgacaacaagacactttgtcaggctgggatatgccacgataaaaagctaaataacatagacttcacgctggagtgcgagcgtgagcgcgagcctccctctggagtcattatacaagaacagatggatttcctcaccacagatatggtggagccattagctaggatgaagtgtgaggaaccttttcctgaagccgacgtcggagatgacagccagcagcctagagcgccttatcgaagccgctctctctctgacctgtactctgtccattgtcctgttcagatggcttcacaggacacgacggcgagctcccaggccatcgtccctgtttcgcctgcgccttcagacgtgggcgctctagccattgtgcccctttgtaagtccaaggggtctgaagtcgggcagaggcgcatgaggaggcccttcactgtcggcgaggttgaggcgctggtgggagcggtcgagcagcttgggactggaaggtggagagctgttaaaacgcttgcattcgacagtatagatcaccggacctacgtcgacctcaagttaaaagacctacaaaagcagccagttctggtcgatttcaatgctgtgctggacaagtggaagaccctggttcacactgcgagcatatccccgcagcaacgaagagggcagccggttccacaagaacttctagaccgtgtcctcctagcgcaggcctactggtcccagcagcagcagcaggcgaggctctag

SEQ ID NO: 31083 - DNA, 1176 bp, Zea mays
  Peptide Sequence Number=SeqID_72862
atggacgggaaccaaacctggccgccccctaccccctcgccgccgcccttctcctcccggccccgcgcgtcgccgtccccggcgacgcaccgccggcgccgccggcactccaaaaaacataagccccggcccgcgccggcgccgacgccgcagggcgcggacttctccgcgctcccgccggatctcgtccaccgggccctcgcggccgcgtgcgcctccgacgtcgcggcggccagccgagcgtgccgcgcgtggtgggacgcgctgcggccgttgcgcgaggccgcggcgctgcacgcgtatggccgacgcgtcaagcacgaccccgtgacaggagccagagccgtagccgcagccgctgcctcgcgcgggggaggcgaacgtgtggagacggagaggcagcgcgctctggggctgttccggcgggcggcgaggctgggctccgcggcggcgatggtggacgccgggctgatgtgctgggaggacgggcgccgggaggaagccgtcggttactaccggagcgctgcggacctgggacatccccattgggatgtgcaaccttggggtctcctacctcgaagttcgttactgataaattgtcttgttaatctcaaggcattgcatctgatattgctgctaaatgtttccgcagctgatccacccaaggccgaggaagctattagatggttttatccatcagcatctgcaggcaatgctcgtgctcaatacaacctaggcctttgcttgcagaacgggaagggtgtcaagcggaatcagaaggaagctgcaaaatggtatttgcgagctgcagagggagggaatgtacgggccatgtataacatttccctgtgttacagctacggtgaagggcttgcacaggatccagtgcgtgctaagaggtggcttcaactagctgctgattgtggtcacaagaaagctctttatgagtgtggtattaagctttgtgcgagtggatgtgcgggtaacataggcaaggcaggagacaaggtcaagtgtctcatgtatctagagctggcgacacggcgtggagaagctgctgctgctcacatgagggatgtaatacttgaatcgctctcggttgtgaatgcgcagcgtgccatgtcggatgctgataaatggaagcctaggacactccatcctagacctagaaggtga

SEQ ID NO: 31084 - DNA, 318 bp, Zea mays
  Peptide Sequence Number=SeqID_72863
atggacaccgagagtgacaccccattaccatcaagcatcgtggctggaggcacttcaagggaaaatttgtttgagtgggctaagaaaaatgtgggagacactcacgttggtaagcgaaatgtgcaattcatgttaccaaaaacgagaaagaaaggaaagaaagcagtggcaagcggtgacgagatcgatatggagataaaagtccatggtaccaagagtcccaatacatttcacatatactaccaaatgttggtggactcgtggagtacgacttctacgtggaccagacagacttggtcgggacaatacgaaaattga

SEQ ID NO: 31085 - DNA, 657 bp, Zea mays
  Peptide Sequence Number=SeqID_72864
attttgggccttacaaatctgtcggggaccataattaggggtaccctcaagacgcctaattctcagctgagccgaggtgaccgctgtcactccaccgctccactggccagtctgacagaaggacagcgccgcctgcgccactccgactgcagtgccactcgacagagtgagtctgacaggcaattaggccttgccaaaggcgccacggcgaactccgctccgcccgaccccagggctcggactcgggctaggacccggaagacggcgaactccgctccgcccgaccccagggctcggactcgggctaggacccggaagacggcgaactccgctccgcccgaccccagggctcggactcgggctaagacccggaagacggcgaactccgctccgcccgaccccagggctcggactcgggctaagacccggaagacggcgaactccgctccgcccgaccccagggctcggactcgggctaagacccggaagacggcgaactccgctccgcccgaccccagggctcggactcgggctaagacccggaagacgacgaaactccgcctcgcccgaccccagggctcggactccgccctggcctcggccggacgacttccgcctcgcccgaccccctggctcgggctcggccacggcaactga

SEQ ID NO: 31086 - DNA, 336 bp, Zea mays
  Peptide Sequence Number=SeqID_72865
atggcggcggattacctaaccgatggctctcggcttcctctcttctctgcactgggtgacgggttggtcggcgtttttgattttgggaggacgagaagctccggccgcgcgcgcttttatggtccagcaagggcggtttgttcggaatcgtgtggagcctacggcggcgcggagatcggcgcccagttgagattggggcggagtccgcgtggaggaggcgagctgggaggagactccgcccgtgcgacccacgcactggtgatggcgtgcgcggatcctgtggagttcggccgaggagatggcggcaaatcccaacaaacccggttgttacggtga

SEQ ID NO: 31087 - DNA, 756 bp, Zea mays
  Peptide Sequence Number=SeqID_72866
atgggcttcgatgccgctgtgtatgggtggggcaggggttcgggggttttcttgacctgtgtcgttagaagtgttggcccatggtcagcaggaacagctcaaatcgaaggaagcatccataatgcctatttttctcttattgaaaaggcagaacattttgtttacatcgagaatcagtttttcatttcaggtctttcaggggatgacacaattaagaatcgtgtattagaagcactatataggcgcatacttagagcagaaaaagagaaaaggcgcttccgggttattattgtcataccacttttacctggttttcagggtggcattgatgatggtggagctgcgtctgtgagggcaattatgcattggcaataccgaactatttgtagaggacctaattcaattcttaaaaatctgtatgatgtggttggctcgaaggcggatgattatatctcattttatgggcttagagcacatggaagatcagatgatgggggtcctctggtcaccaatcagatatatgtgcacagtaaattgatgattattgatgatcgcatggcattgattggctcacccaacataaatgatataagcttgcttggatctagggattctgaggggtggtggctcgtgatggcctgggctggcgctcggaggcggcgacgacgactgagtgtccggaggcagctggctttggttgtgggtgccagggccgccgacgacagtcggcatcggctctggcacgtgacagtgtga

SEQ ID NO: 31088 - DNA, 624 bp, Zea mays
  Peptide Sequence Number=SeqID_72867
atgacgagtatgcctccgagggctggccacgacgaagtgttcacggtggcgcggaaaacggatttgggggaaataggaaattgggaggctctggtggatgatcagaggcaagggctggtgcattggatgcgtaattacttggcggaactcactggggcatcaatttatagagtcctacggcggtggcgtctaattttgagaaggcgcgctggcggccggagagaggggaatgcactagcgcgggtgatcgtggctttcaccgtggcgaagcctccggcgatggacggactcactactatagttcactgcgacgtgttaaagctcctaggcacgtggcgcacgggcggcaagcggccaacgccggcgaggattaacacggccggccgtagagcaagtgggtacagtgaaccgtccagtgaccgggtccaagattatctgggcgccaagatcttttactcccctcggttatctactttgcgtcgagcacgaatcgcggcgaccggcgtgaattcggacacggagtcaccggcggcgaagtgcagtgaatctgtgatctttttcagtctactgtacaatgggaagccccattcagagtacgtgacagagcgctttgcagggctttga

SEQ ID NO: 31089 - DNA, 168 bp, Zea mays
  Peptide Sequence Number=SeqID_72868
atggcattcactggcgcgtcgactcagaggacaggcatgctacctattgcgaccaacggcgacgtggtaaccaaagttcttctaatcgaagataatcccaaggctgctcataactgtccttacggagaggtactcaggaaacagcctgagccccctaaagaatcataa

SEQ ID NO: 31090 - DNA, 612 bp, Zea mays
  Peptide Sequence Number=SeqID_72869
atggagttcaggtggcttctatataagaaggcctcacaagtgctatatctacattttgcattgaagagacgtgcatttcttgaagaattccatgagaaacaagaacaggtcaaagaatggcttcaaaatttggggataggggagcatgtgccagttgtacatgatgatgatgaagccgatgatgtgcatgttccttcacagcatgacgaaaactctgtcaaaaacaggaatgtcccttcaagtgctgttttacctgttattcgacctgcccttggccgtcagcaatcaatttctgatcgtgcaaaggctgccatgcaagaatacttgaaccatttcttgggaaacttggatattgtcaactcaagagaggtctgcaagtttttggaagtttcactgttatcatttctgccagaatatgggcctaagctaaaggaagattatgttacagcaaggcacttgccgaaaattgagatggacagtaaagagagatactgttcatcctgttgttttagtttttgcagtagtagctggcaaaaggtttgggctgtactgaagccaggattcttggctttacttcaaagatccattttgatcctaagctcttggacataa

SEQ ID NO: 31091 - DNA, 710 bp, Zea mays
  Peptide Sequence Number=SeqID_72870
atgtccccggcgtcagggcgcgagacctggacgatcctggcccgcggcagctcgtcgaacacccgcaccgactccggcaggcggaacgacgcccgacgacgcgggcggccaacccctccggctcggggcgggctccggaggcatcctgacgtacctgtggccaccgtgctcctgctcctcctcgccggtcatagattcctcggggggatttatatggatggtttgttttggcgtttgggagtgcgggcgagacacgaagcggaagccgaaggggaggagcggttcgaggaacgaaggaaaggggcggtgagctggactgccgcgccgtggcaggaaaagggttgcacgccaaattttgagccactgttgagaggccgcgctggaacagccgcgcgcgagtcggagctccacggccgcgcgcctcgagcacgcggaagcggcgctcgtcggccgcgtgcctcgtcgggccgcgcgtctcaagcatgcggaggcggcgctcgtcgaccgcgcgtctcgacgacgcgggaacagccacgcgcgaagcggacctcgacgacgcggagccggctctacttcggcttcaactccgacgacgatggcgtgctcccctcccctccgagctcgcgacgaggaggccgatctggcgaaagttcccacactgccgtgacggtcgtcggttgttgtgcctgtgctgggagctcagcttaccc

SEQ ID NO: 31092 - DNA, 213 bp, Zea mays
  Peptide Sequence Number=SeqID_72871
atgctgctctcctacaccatcgaggtccactacaagcaggtccgtccccgggcgccgcctcttcccacctccggattcgtctggcctagctcttctcgttgggcggtgatctcaatcttcgattatcgcttgatgtgccgggaaactgagttgctcgttcgattcgggttctgtgagtgggttgtggttctaaatggaaaactaatgctctga

SEQ ID NO: 31093 - DNA, 630 bp, Zea mays
  Peptide Sequence Number=SeqID_72872
atgccgttgtgcgagatcaccgatgcgttccacaaccaccagtgcgtcgaggagtcactcatctacttccccaaccgagaagcacttcttcaagctggatcagctccccaacccggcggcgagtcaatcagccgatcatgcaatctgaaagcactgattgagacacacgcgaagcatggtgaaccactctcggaagttggtgctatcgaaggtgacgaagggaagtggcacaaaaggggtggaacgagaagccatgttgagtgggattgggaggacgaaggtgcggctaggaggaaaagcttaaaggaagagggcacaacgagggcggggggcgagcgcacagacaggcaggcgtggcgacgtgagctagcagggggcgactggccggcgctgggctgggaggcagaagggccacaggcagcgggcgcggctagagggttggcggtgcggcctgttggtgacggccggcaagcggaagagcgtgcagtgggtggcgctgcaggcagtcacgcgacaaccgacaagggcgggcggcgacgctccaggcgagcacgtggcggcgcgcgcgggtggaagccgcggccggtggcgacggcgggtggcaggaaccctagctcagtaccatgttag

SEQ ID NO: 31094 - DNA, 666 bp, Zea mays
  Peptide Sequence Number=SeqID_72873
atggagccactccattcttctctactcaaccaaacacaccctaagtcagaggttgaaaacatgtttgggttatcaaattttgttcctatcctttttggaagcaaacagttgtgttctgaactagagaggatacatgatgctctttgtggttcttacagtgaaaataatgtacttggtgagttactcagtgcttcttctgatcctcatgagcaccggaaactttgtagttctgtgatgtctggattcctgatcgacattggatggcttatcagaaagcctactcctgacgaatttaaaagtgtgctgagttcaacaaatatacagagatggatatgcatgttgaagtttttgatacagaatgatttcatcaatgttctggagataatcgtgaagtcaatggacagcatcatgggttcagaggttctttcaaacttggaaagggggaggttggaagatcatgtaacagcatttcttggatatgtaagccatgctcggaatattgctgatcgtagagctaaccatgacgagaaaacacagattgaaacaagaggcattattgttacttctccaaatcagccaaacttaggcgcctcagtgccatttgctagtgaagtaagtgctattatgttggaaagattttttgtgataattaaaaatgtaaaatag

SEQ ID NO: 31095 - DNA, 2679 bp, Zea mays
  Peptide Sequence Number=SeqID_72874
atggcgacggcggcgaggaaagggagcagcagcaggagtgccgcggcggcggccgcgactgtggccgtgttgttcctcacagtagtatcggccgccggcggtgctgcggctactccgcggcggctcctggtggacacggacatggacaccgacgacttgctcgggcttctctacctcctcaagcagaaccggtccgagatcgacgtcaaggccattaccatcagcgccaacgcgtggagcgacgccgggcacgccgtcaaccatctctacgacatgctctacatgatgggccgcgacgacatccccgtcggcgtgggcggcgacggcgggatatcctacgccggcgacgtgcaacgcgacgtcggtggctacctaccactgatcgaccagggcatgtcgacggacggcggctgccggtaccggcaggccatcccgctctcgggccggctggacgtcgacacgaactccggggtccggaagggcttcctcccgcggggctcccgggcgtaccggccgctccggcagcccacggcgcagcgggtgatggcggacgcgctgtccgccggcccgacctcggtgctcctcctgggcacgcacaccaacctcgcgctcctcctgatgtcgcgcccgcgcctgaggcggaacgtggagcgcgtctacgtctccggcggcgccgtgagggcggcgggcaacctgttcacggccgccgccgccaacccggtcgccgagttcaacgtcttcggcgaccccttcgccgcctacctggtgctccactccggcgtcccgatcactatgatccctctcgacgccaccaacaccatccccgtgacggaggcgttctactccgagttccagcggcgccagaggacgtacgaggcacagtactgtctcctgtcgctggacggggctctggcgcggcagaggaggcggtccgacagccatgacaacacggcaagtcttgttcctcttcttcttccatgcttgctcttgcatattgcattgcaagacggcttctacttgtgggatcccttcgccgtcggggtggccatctccagcatgcgccatggcgatggcgaaaccagcaacgagtttgccgagcttgagtacatgaacgtcaccgtggtaacgtccaacaaaccttacggtgcgcgtgacgacggctctaacccctttttcgatggacgaactactcccaagtttgggctgcgagagggtggagttcacagcggccatgttgagaccgggataagagaccccttctgcctggtgcccggaagcaaccgaggcagatgccaagatgggtacactaaagaagtggccggtccagaagcagtgcagatgcttgtggcaacgagggcgaggccgaacaccaacaaaagtagcccactggacaagaaatttatggagaccttcctagaggttctaaatctcccccaaaacactggacgtttcaacataagcacacagtttccgtactatagagaggttctctacaagccggattccatcatgaacgtgacccgcaggggcgggaagccaaagccagtcgtttttgacatggacatgagccctggggacttcgtgtcgctcatatgcctcctgaaagaacccagacacgagatcgatctgaaggctgttttggtcaacgggaacggctgggctaacagcgctagcattgacatcgtgtacgacgtcctgcatatgatgggccgtgacgacatcccagtcggccttggcaatgccactgcgctgggcagcccgacgcttgggtgcaacaattcctacgcgatcccgcaagggagtggtgggtttgtagattcagacacgctgtatggactggctcggtcgttgccgaggagtcctcgaaggttcatctctgatgatctagaccatcccgagcgccggcacccgagcgctttcgatgtttggcggtcagttaggaagcagctcggtccaggccagaagatcacggctcttaccagcggacctctcaccaatctagccagcattatttcactgtctgacatggacgccggctctgtcatagagagagtttatgttgtcggtggagtggttagagatggaggtgatgacaggggaaacgtgttcaccgttccctccaacagatacgcggagttcaacatgttcctggatccgctggccgcaaagacggtgctagaatctggtctaaatatcacgctcattcctctcaacgtgcagcggaaggtttcttcatttgagggcgtcctcggagctctgaagcaacacacccagcatactcccgagtcaaagcttgtgcgccgtttgctgttgctgctccagcagctccagagggaacaacggaaattctatcaccacatggacatatttcttggagaagttcttggcgcagtttacatggtccaaggatctaacttggagccctctgtggaagtgaagtcaatatgcattgttgccaacacaaccgaaagcataaatgggcttattttggtcaagaagagcgcaaagccagtggatgtattgtatagtttgaatactggagcatattacgaccacctggcaaattctttggttaaccataagcaatctgctcctattggcagctttggagagcaaaaggcaatttggagcaggccacaaaaacatttagggacggacatagcaaaggatagaaaataa

SEQ ID NO: 31096 - DNA, 765 bp, Zea mays
  Peptide Sequence Number=SeqID_72875
atggtgggggaggcgccaaccgaggactttgggctgcccgctgagctgatggccgtgctaccatcggacccgttcgctcagctggacgtggcgcgcaagatcacctccatcgcgctctcgcaccgcctcggccgcctcgaggccgaggcggcgcgcctgcgctcgcagctcgccgagcgcgacgccgaggccgaggagctccgcgagcgcgtcgagaagctcgactccgcgctcgccgtcgccaccggccgcctccgccgcgctgaggaggaaaaggagacactgctgcgggacaactctgcgctgtccaacaccgttaggaagctgaacagagatgtcgccaagttggaagttttcaaaaagacacttgtgcagtcgctccaggaagatgacagcagtgataatactgctcccagggcaagcgttgcagcaacttcaaacttctctgcgccatcagatgaagattctgcatttccaacttccaaatcatcacagatttcagaaactgcgagttcagtttcagaggaaaatagccaagttgaaccagatggacgaacaagagttgatggaaaggagttctttcgtcatgtcagaaatcggttgtcgtatgagcagtttggtgcattcctggctaatgtgaaggagctgaacgcacacaggcagaccagagaggataccttaagaaaggctgatgagatctttggtcctgaaaacaaggacctgtacaccgtttttgagagcctaataactcgcaacattcgctaa

SEQ ID NO: 31097 - DNA, 528 bp, Zea mays
  Peptide Sequence Number=SeqID_72876
atggtcgccgctgccgaggtggaggacgtggcgacggagttccttgctggcgcgcggaagaagactaagactgctggtcgccgtggcaaagcggaagctgcaggtactgccggaggaactgtccgcgcggcggtggcggagatgaagtgccaagtgcctggctgtgaggcggacatacgggagctgaaagggtaccatcgccggcaccgtgtgtgtctgcgctgcgcgcacgctgctactgtcatgctcgatggtgtccagaagcgctactgccagcagtgcggcaagttccatgtattactagatttcgatgaagataaaaggagttgtagaagaaagttggagcgtcacaacaaaagaagacgaagaaaacctgattccaaaggaacattagataaagaaattgatgaaccattggatatgccagcagatgttagtggcagcgatgaacttagagaagccctccagtcaactacagtggcaattgtttcagatagagttggcgccggtgcccaatctagattctag

SEQ ID NO: 31098 - DNA, 213 bp, Zea mays
  Peptide Sequence Number=SeqID_72877
atgaacgccggaggaggccgcctcctggacctcttgtatcacgctacggtcatcttgttgcgttgtttggtgggtgagaatgtttctgctccatttatgatatttgagtccactggatcccccagatatactgagagagattataacatgtggctgaggtttccttattcttgtctgccactaaatgaacaaaagaacttcttcatgccttga

SEQ ID NO: 31099 - DNA, 465 bp, Zea mays
  Peptide Sequence Number=SeqID_72878
atgggtgaggcctatacggcagtacaagtcactgttggttcaaatggccccatagcattgagtgcatacattcagacatataacccaaactatggggccccgtatagagcaagcgacctcaggatgagctcccgaagagcagaagcaccggcaaatgccacatttggcatccctcttctatcatttgaagaacaaactggacattcagagaagttccttcaaacaacagcagcattcttgtgcttccaaacttcccagtcaacaagaataactacaaaattgaatcccttgcgtaatatcttggcgaccgatcttctagacctgcaccaccattcctggaaacgacatgtagagatggggctagaacctaagaaagtggcaatcacacattttatcgtgacttgtgaacaagcaatggtcaatcttgtggtctttgcttgtgttcattgtgacaaaccatgttag

SEQ ID NO: 31100 - DNA, 399 bp, Zea mays
  Peptide Sequence Number=SeqID_72879
atggcggagccatggctggccatggtcgtcccacgccatggtgcttcaagttcaaaactgaatgccgcaaaatcgtatggaggacaaagcgaagtgtcaagggactttttacctggatatagtacgcccacatatcccgcccacggtacaggtggctccgcggtggcgcccccaggttcgatgacgaattccggacgagtcccgccattccccgccccgaaaggtcacgcaaacacacggtgtatgtctgtgaagcactcagccctcccaatttggcctgaccggcaaggcagccgaaaggcaccgaggagggtgagtccgcgtagagggaaattcgttggcggggaagggaagaccccgagatctcctgcgacggtcatggcagccactagaggttga

SEQ ID NO: 31101 - DNA, 1575 bp, Zea mays
  Peptide Sequence Number=SeqID_72880
atggacgcggatagcctcgtcggccaggacccgaggtcgggggtgcggccaagcggtggtgagcgcgactgggcggcggccgtgctggagccagtgcggtggatgcggatgctgtgccgggagctgggagcgacgttcgtggctggggtggtgctggtgtacggcctcagccagggcttcgccggctccttcttccgagtggcgtcggactactactggaaggacgtgcagcgggtgcaaccagccactgtgcagttcctctccgtcttcttcttcattccatgggtgctcaaaccgctctgggggatcatgaccgacgtctttcccatctgcgggtaccgccgccgcccgtacttcctcttctcaggaatacttggaacggtttcagctgctatcgttgcagtaactattggattgccaatgagttctgctgtactttgcttgatgggaatctcaacagcagtcgccattgctgatgtaacaatagatgcttcaatcgcaaagaatagtattgataagccggcgctggctccagacatgcagagcctttgtgcattctcctcatctctaggtgcacttgttgggtatgctacaagtggattatttgtccatcatcttggagcacagggtgcgttaggtgttatggctatacctcctgccacagtggttttccttggttttttcatatatgagctgaaaacacatcaacataatgttaaagagaagaaattgaaattcttccgaagtgaacctagcgagttaactgaagagagtggtgatgcttatgtgtgtggatgggttttaaacaaggttggtggggcagtgaaaggaatggttcggactataaggtatccagtagtgtggaggccatctctttacatgttcctttcgctggctctgagtatcagcacccatgaggggcaattctactggtatactaacaagacaccacctaatcctggattttcacaggaattcgtcgggctggtccacgccatcggcgcggtggcgtccatgctgggcgtgctcgtctaccacaagtgcctcaaggattacccgttccggagcatcctcttgtacgcgcagctcctgtacggcgtgtcggggcttctggacctcaccttcgtgctccggtggaacctggcgctgggcatccctgacgcggcgttcgtgaccctggaggagtgcgtctcccgcgtggtggcccgcgtccggctgatgccgatgatggtgctgagcaccaagctgtgcccgccgggcatggagggcaccttcttcgcgctgctcatgtgcatcgacagcctcggcatgctggcggccaaggccggcggcgcggcggtgctgcgcgcgctgcgcgtcaccaggaccgacttcggccacctctggctcgccgtgctgctcaggaacgtgctcaggctcgccacgctgggggccatcggtctcgtgcccaccgcgggccagactgacgtgctggtgccgcgcgagctccttgtgagctcgccggctggtgtggccgatgacgaggaagagaggctgcagctggcgatgctcacttcacacactgacgatgtataa

SEQ ID NO: 31102 - DNA, 747 bp, Zea mays
  Peptide Sequence Number=SeqID_72881
atggaagaatgtatgggtgcttgtgattgtatcattacaaaggcaggacctggtacaattgcagaggcaatgatccgtggcttaccaattattctaaatgattatattgctggacagcagactgccgcaatttggaagatcaacaaaagactgccaggcacaagcggtcctagaaagagcaccatggatgctacagatgtagcttctgtggcactggttggtgatgatctccacagcttggctctgctagacaggacgatcagtacgagagcctctgctgctgcaactgccactgccacggtggaagaagcacatgccacagttcaacacagaagtgcctgtttgactcaagcgcgtgcttgtgaagatactgccgatgggcaggctggtccaaatagcagtctagctaacccgtatggaaactgtagagtgggttttgacaggctggtttcacgggttggattggaagctggcaatgtcccctacgttgttgaaaacggatgtgggaagttctcgaaatctccaaaacaaattgcgaagatagttgccgactggtttggcccaagattgggttacgaacccaacccgatgaaattttcaatggattacttggacgacatggattttcttgggacatgtaggtctaactctaatcctggaaagttgaaaggagctggtaggatctggtcaaagtcaaacaggctggtaggatctggtcaaagtcaaacatgcgagcacagctcttaa

SEQ ID NO: 31103 - DNA, 963 bp, Zea mays
  Peptide Sequence Number=SeqID_72882
atgaggggcaccatgcatggtggcggcggcctaggaggccaacgactaggagaagaagaggtcactgtttggtgtcatggggaaaggagatggatttcagatattaaaggggctctcacagctggagctctaattgagtatctccatgtttgggaagctctctcagatattgatatgcagcccaatatagaggataagcatattttcagctttgcttcagatggaagatactctgcaaaggctgcttataagagtcttttcttgggatcaagctcctttggacattatagaagggtgagagatcttgggccccatcaaaatgtcaattcttcatttggctggttacccaaaacaggtgttggacggctgacatattggctaagagagactgctgctttggatggtgaaactgacttgaaaacaagaaccattcctccaatttctgctaacttgtcagtagagcagctaggaaaagtcaagggtgtaattgagtgccccaacccagacaatgacatacggaggtttgatgctaacatgcgcttgttcctccctataattgacaatgaaaaaagtcctttgactatcaacaatacacttcttcagtcatgttaccttcgatacactgaatgggcttgtggagttgcagtttacacaggcaatgaaacaaaatctggaataagtaggggagctgcggagcccaagttcactgctgctgatgtaataatagacaagctcactattgcaatattcatgttccaagttgttgttgtacttgttctgggttattttgggaatacttggaaggacactcaggggcttaagcaatggtatcttatgtatcctatggaggtagagggcccatggtatgatttcttgattatcccgttacgctttgagctgttgtgctccataatgattccaatctccataaagtcctgtttggttttggcctccagttactaa

SEQ ID NO: 31104 - DNA, 552 bp, Zea mays
  Peptide Sequence Number=SeqID_72883
atgggggcaaggacaaagaagaagaaatctggtgatgataaggatgaagaggacaaggacaagtctgaggaggaggaggggacagatgatgatgaggaatcatttgagggggagaaggggaacaacaatgggggcaaggataagaagaagaaatcaaagacaaagaaaaagaaaaccaatatcaaggactctttgaaaatttctgtaaggagtaaaatgacaaaaggctacaaaccctgcgatttcaagatagcagataattggacccagaatttgggtaataaagaactgcgacagcaactctcgagaaagatagttgacaataaagattataagagtgttcagttcatgagtcctaagagtgacactgctcgtagagacactgatacatggaacttaacgggaagcgatattgcaaaaagctttgtggataaaactctttgtgaagacacggtggtgacgttttatgtacagtgtctcatgtatgatgaaggtcaactaggagctgatgaaaaaactgtgttttccacggacacttcagatcatctgtaa

SEQ ID NO: 31105 - DNA, 237 bp, Zea mays
  Peptide Sequence Number=SeqID_72884
atggaggaggtggaacgaggtgcctcagggagacaaccaggttcaaccgagctgagggactgctccgtcgcggcggcagaggccgccaccgtgaggatcgccgacgagggcggtacagaggaaatacgagcggacaggcgggggagccgagtgaacgggcgggagagtcgagcggtcgcatggctaaagtgtttttataactattggtgctcacaaaggcacaaataccatctctag

SEQ ID NO: 31106 - DNA, 2190 bp, Zea mays
  Peptide Sequence Number=SeqID_72885
atgctccgcagagccgcgccgtccctcgctttctggaggtggcggccgcaggacaacgatgcgggccggaaactggccgcgcagctcctactacagcctctttcccacacctcattggcagtgccagaccgcatcgctcagcagcgagccacgcaggtttccttccctcgcggccgcacccgctacttgttcgacggaacgcgtcatcgggatgcgatctcttggaacgccgtggtctctggccatgcgaggcacggtaacgtcccagacgcgctggacaccgcggcgcggatgcatagctcgggagtgccgttcactgaggccaccttcgcgtcggtggttggcgcctgcgcacgcgggcggatgttctgcgcggggacgcaagcgcacggccaagtgatcaagtccgggtgcgagggcttcgcggtcaccggggcgtccctcctcgacttctactcctcgtgcttcgacctccgtgcaactcgcactctctttgagtctctgcgtccgaagaacgagctgctgtggagcccgatggttgttgcgcttgtgaggttcggcttgctggctgaggccttggacttacttcaaaatacaccagcgccacgtgatgtgtttgcatggacagctgtcatatctggctatgctaagggcacagatcagtgctgtggcaaggcgctgcagctgtttgtgaagttattggctgatgatggtgtcatgccgaatgagtacacttatgacagtgttttgagggcatgcgtgaggctgggagcattggattttgggcgatctgttcatggatgtttgatcagatgtgggtttcggtctgagcagttaatcactagtgctcttgttgatctttactgcacttctgatgctttggatgatgcactgctggtctacaatgacttggataggccatcctcgatcacatccaatacactgattgcagggcttatatccatcggtaggacagagcatgctaagatggtattctcgcagatgccagagcaggactcaggttcctacaatctgatgattaaagcatacgctatggaaggggagcttgaacattgccgaaggatatttgagaagatgcctcggagaaacatggtgtctttaaactccatgatgtcggtattgcttcagaacggaaggttggaagaggggttgaagctatttaaacagattaaggacgagagagacacaattacgtggaattctatgatttcaggttacattcagaatgacaaaccttcagaagctctgaagctatttgtggtcatgtgccggttgtctattgaatgcagcccatctacattctctgctctattgcatgcctgtgcaactattggaactcttgagcaaggcagaatggtgcattgtcacctctgcaagacttcgttcgactccagtgatcatgttggaacagcccttgctgacatgtactttaaatgtggttgtgtgattgatgcacaatctgcatttacctatgtcacatcgcctaatgttgcttcatggacatctcttataaatggtcttgcacagaatggtcactggttggaggcactgtcacaatttgggaggatgctgaagcatcatgtcaaacccaatgaaatcacttttctgggtcttcttatggctagtgctcgtgctggtttggttaataaggggatgaaaatcttttactccatggaaaactttggactagttcctacagtgcagcactgtacttgtgttgtcgatctccttggtcgaactgggcgtaccagagaagcagagaagttcatctatgaaatgcctttgccagcagatggtgttatctggggagccctacttactgcctgctggtattcgatggacctagagatgggtgagaaagttgcccagaggctgtttttcatgggcacaaaacataggtctgcttatgtcgccatgtctaacatctatgctaaattggggaaatgggaagatgttgtcaaggtaaggacatggctgaggagtctaaatgctgaaaaggaaccaggttgcagttggattgagatcaagggtatagttcatgtattccttgtggacgaccagaatcatccggagagagagactatgtattcaatgctagaagctttagtatctcatatatcattacattcaaaacctgatgatatggttattcagagcctgaattcttga

SEQ ID NO: 31107 - DNA, 243 bp, Zea mays
  Peptide Sequence Number=SeqID_72886
atgaagctcatcgtggttgtaagatcatcggaggtgggtgccaatgttggtcacttgtttccaattgttacatggcatcaaaaacaaggcaacacaaaattgagaaatgagaaccttcgtcctcaagcatttttagtatgtccctcattacattggacgtatttacaagtatacctccggctcctgagcaatgggatgcacggaggttttgcgaaggctaagcactacaaagcaggggtctag

SEQ ID NO: 31108 - DNA, 174 bp, Zea mays
  Peptide Sequence Number=SeqID_72887
atggggatatcctacacatccaatggggccttggggacgcccccatggccaacacagccactttcgtcaccagcgaaaagagttaagaacgtgggtacccacgttcttaaggttaagaacgtgggtaccgtcgaacttaatggcagccctcgccgacccacgcaggacctataa

SEQ ID NO: 31109 - DNA, 321 bp, Zea mays
  Peptide Sequence Number=SeqID_72888
atgaagggactaatgctaaacaaagccttgagaatgcaacaagaaaaagaagaaaaagaatgttccactctacaagacgaagttgctgaacttcgtaaaacattagaggaaaaagatgcaaagatggcgtctttgaaggaaaaggcagaaaaagctgaaaaggaaattgacgaagcaagaaagatacataatggtgatgtttcaaagttaaaaaaacaagataaacttatcaaagagcttcaggccaacctagaagcagaaaataggggcaatgccgataaagatatggaaaatcaaaagttattggaaattttaaagtag

SEQ ID NO: 31110 - DNA, 130 bp, Zea mays
  Peptide Sequence Number=SeqID_72889
atgaccttaaacagtgtctgggttcgcacagaaaatattcctagctctaagttcactaaactaaaggaacatgccaagtccaagacgcagattagtttcattgtgatgctgtcacacccggttttggaag

SEQ ID NO: 31111 - DNA, 195 bp, Zea mays
  Peptide Sequence Number=SeqID_72890
atggtcaaggcgaggccggcgaggaaggcgagcacggtggcgactggcgaggtcgatcgcgcaggtggcctctcccgagtcccgatcgaccttacgccacagctcgtcgtggctgaggctgcccacctcggcgccgcacacgagcatgacgacagggacggtggccagtaccgtaatacacattttatgcattaa

SEQ ID NO: 31112 - DNA, 396 bp, Zea mays
  Peptide Sequence Number=SeqID_72891
atggagggaggtgctgctcagggaatgacgaactctactggcacatggggacgagcgatagaaaaggaagctcggcgagctcaaccaccaggggcacggccgggtagggagcttggtgttggggctagggcgccaagggagatggcagagcaagttgaagcaagatgcagggacgcgccatgggagagcggcagcagggagatgggtggatcagcgcagtggagcaggcgacccgaggcgcggcgaccatggcccagaaacgtcgggcagggagaagacgccgaccagcagagcaccgagggggagagggcggcgtcggggaatgagatgagggcagaggacgccggctctaagggcactggggaggggctcggccggcagcaagacatgagctag

SEQ ID NO: 31113 - DNA, 927 bp, Zea mays
  Peptide Sequence Number=SeqID_72892
atggtggatgttaccacctcgtcacctgagcaagcgcagaatcctgatcaaacacaaacggtcgtgcgtggtgtttggaagcggcgcgccaatgtccgggtcagtggtcctgagtgggcgcttgagggagtccgtcatgtgggcgatctgtcaggtgggcctcgtggcggagaatgcgcgcgtcgacggctcccacatgccgggtgtgctgggttcccgcgagtcggcactggtacgcccattgtcaccagagatggcgccgacggccccagatttgggcactacgacgacttctatcaccgggatagcgggccttggcatcctggtgccaatgtccgctacccagtcaagggaagaggtggaatcctcctcgccaccgagagtctggtcgtggtgatcctcactatcctgcctggggaccttctaaataagcagctgttgttaatcaacgtttggggaaggcaccgattgacagtttccaagtggatagctcctactcctacatcatccatcgacatggagctaccacaagctagatggtctgtccatggtctcgaattctgctgctcctttaaagttatccctgttccatattatgatgttatattgggcatggattggctggagatgtttagcccaatgatagttgactggaaacataaatggctctccttaccacattcaggttccacagtggtgttacaaggttgtcaaccattggttcctgtcggcactatactggagctctggccggtgatggtaacggaacctgcatcagccaaactgcgttctattgaggagttgtttttgcctgctccagttgtgcagctgctccgcaattatgtgagcctgttccagcaacccgctacattgtcgcccagtcgattttgtgaccattctatccccttattgaaggtgccagactag

SEQ ID NO: 31114 - DNA, 414 bp, Zea mays
  Peptide Sequence Number=SeqID_72893
atggagccagttcggatttcctcttcccttcccttgctcatttctcctccgtacttgctacttattgtgtcgcgccgcgtctgctctgcttgttgctggtcgctgcgtggtgcacgtcatcatgccattgctattgtcgtgtcgtctgagtttgtggatgcctttgctgctcaaccttcgtgcctcgcccgttacctgcactacgccactactcgtctctgcacgccatcgtcggagctgctacgctgctcgacgtcgtcggtgttctgctccgtgttgtatcgctccaccattgtctcgctgctcgtggtcgtgccatcgtcgcgccaacagctacgtcattgtctctgccacgccagagccctgacatatgtacccccaatcgttgtctacatcgtccttgttgctgcttga

SEQ ID NO: 31115 - DNA, 219 bp, Zea mays
  Peptide Sequence Number=SeqID_72894
atgccgagaaatatggtaaatcgtggactttacccctcacgcgacatgagacgtggtctcccattccggttatggtgggtacaagtgcggtcactgcacgacggcagtcggggttctctggaggacatggttgctggagtgacttggccgtccatcttgccaccgggttggacagtcaagtgggaccctacctcggctaaggaggagcatgaggagtga

SEQ ID NO: 31116 - DNA, 222 bp, Zea mays
  Peptide Sequence Number=SeqID_72895
atggacagagggatttcaggccagaattgtgcaattaatggagggattagggtcgctaggggtggaattaggtgtcgaacgaaaaacgaagaagaagtgattgtcgaagaagaaactgccccacaacctgaaattccacctgtcgagaacaatttctactttgacatttgtggaacatatcctgagtctcctacaacacaaggcaaggcccggtgcatttaa

SEQ ID NO: 31117 - DNA, 288 bp, Zea mays
  Peptide Sequence Number=SeqID_72896
atgcggcagagcctcgaagcgagcatcaccaacccctcgaggctcgagggctactatcgggtaccgaaattagggcgccgcccgccccgctctggctgctatgccaaccgcccgggcgaaaccgacaacggtcaagataagcctcgggcgcaacaggaagctccgcctcgcccgaccccggggctcagcctcggcctcggcctcgggaggagatctccgccttgcctaaccccagggctcggcctcgacttcggcctcgagaagagtcacatccttgcccgactgtag

SEQ ID NO: 31118 - DNA, 462 bp, Zea mays
  Peptide Sequence Number=SeqID_72897
atgtggggagcatccaaccgcaccacggttgcgcaccctttcggcatcatcgcatccggaggtccagcatggaggctcggtcccacatgtcatgtaactggcgtgccggttgctacgtgcaaggaaaccgcaccgctgcttgcgccaatgctgcgtcttctcgactgcggaacctgcgcagcaactcaaggtagccctgcgcgtgacccaacagcgcctgttgagtgcggcgatcatgggtcacccagccgcggagataggcgcgacagtcgatatgatcagaggcaggccggcagtaattgcggcaacaggcatgcggaagccgtggtccaatcacctacagggaccgggaaagaggaaattatgaaaaggatccttcccagcgaaggaaatgggctccgagccctcctactgatcaggggttcgaaggttgcgccctctggggttcggcaactgccctag

SEQ ID NO: 31119 - DNA, 231 bp, Zea mays
  Peptide Sequence Number=SeqID_72898
atgggctgccgtgccggcctggcccggcctaagtttcagatattcgcggatatggaggaattaggtgtgcgtccggacgaggatacaacgagacggatcggaaaggcattcgtggcttccggccaagaagaaaaagagaagcatgtcctagagaaatacttgaagaagtggaagtacatccatttcaacggcgagcgcgttcgcgtgcggagggacggaccattggtgtag

SEQ ID NO: 31120 - DNA, 180 bp, Zea mays
  Peptide Sequence Number=SeqID_72899
atggcggctgccgtggtgaccaccaccaccaacagtagcagcagcagagacagtgacatcggtggcggtggctcgacgatcattgggagtgagttccttagttgctgtaggcttaaagataataaagcttccgagttactcctgaaaggaaaacgaatacctaggttccccagtttgtag

SEQ ID NO: 31121 - DNA, 678 bp, Zea mays
  Peptide Sequence Number=SeqID_72900
atggctttagaggaatcttacatgttacatgtttcgaagttaccaaatgaaagagaagctatttatggtgcattggacaagtggagtgcttttgaacctgaatttcctattatagcagcagcaaaagctttggggatgttgaaaaggcgacgacaatggttaagaataatccaggtaaccaagtggttgatgagcaaaggacaggtgctgacatggacaacatatgatacacttctgctcgcacttcttatggataaacgggtagatgaagctgagtcagtttggaacactgtaatacagactcatacccgctcagtgcccaagaggttgttctctcggatgatcttgatctacgacattcaccagcgtccagataaagttttggagtcatgtgctgttcaatgttcaaggctaagcagcattcatgtggtcaccgtcaccgtcacccatctagtactgttcatggagcctaaccataagcgacagatattcgcggatatggaggaattaggtgtgcgtccggacaaggatacagtgagacggatcggaaaggcattcgtggcttccggccaagaagaaaaagagaagcatgtcttggagaaatacttgaagaagtggaagtacatccatttcaacggtgagcgcgttcgcgtgcggagggacggaccattggcgtag

SEQ ID NO: 31122 - DNA, 660 bp, Zea mays
  Peptide Sequence Number=SeqID_72901
atggcggcaccggcactggcgcggtccagtgcaggcggtcctccggtggcgcgggcatgcggccctagccccggccccagcctcggcggcgaccaaccgccaccaggcgggcgcggccacggcacggcggggcggccacggcggcgcgggcaacggttgcctgggcgcgcaggccctagcggcgcgcagccccggcgcacgcgcgggtgcggcctgtgggacaccggcgttccggacgtggccccgcacggcggcggcggcccgtcccaagcctcggcgcgcgggcgcggctgcgctggccccggccccgtcgttttggcgcggcggctcccagccccgtcgacgcgggcgcgggtgctctgttcaggcgcgcggccccccggcccctcggtggcttggcacagaccggcgcacgagggcgggcgcggctgctctgcgcaagcgcgcggcccctcggcggcggttcgcggcggcgcgggcgaggcccctggcccgggcgatggaatcccctgcgcaggcgcgctgtcaggcagccctgaccttggcacacgaacccggctgcagcgtgggcagatggcccctgcgcacagcccagcggcggtgcggccaagcgaccctggcgtagccacgccgcacaggagcgggtccggcctggcgtga

SEQ ID NO: 31123 - DNA, 128 bp, Zea mays
  Peptide Sequence Number=SeqID_72902
atggccggccatcaccatggcggcggctacagggagaaaaatggaccggttagggttcccaaccctaaccgtccttataactgggccgccgctaatgggccacctcgacaggccggctcctggggcat

SEQ ID NO: 31124 - DNA, 2574 bp, Zea mays
  Peptide Sequence Number=SeqID_72903
atggcttcgccggcaccggcgggcgatgccgtgtatgcggccaatggcggcctcactgacccgcttctagtgagcgcgaacggccatggtgccgccgcgaggaaggctggccacggcgccaggggcaggtactgggtggcctccgacaaggccgagaggcgcgctgccaaggagtccggcggtgaggacggccgcgcgctgctgttccggaagtataaggtcaaaggcgccctcctgcacccctacaggttgctgatcatcatccgattagtcgctgtcctcgccttcttcgcgtggcgcatcaggcacaacaaatccgacatcatgtggttctggacaatgtccatcgtcggcgacgtctggttcggcttctcgtggctcctcaaccagctcccaaagttcaaccctgtgaagaccatcccagatctcgccgccctccagcggcactttggctaccctgacggcggcgcctctaggctccccggtatcgatgttttcgtcaccactgccgaccccattgatgagcccatactctacaccatgaactgtgtcctctccatcctgtctgtcgattacccagtcgatcggctagcctgctatctctcagatgatagtggggcgctggttctctatgaggcactggccgaggtcggaaagtttgcgcctctatgggttccgttctgccgcaagtactccattgagccaagggcaccagaaagctattttgagcatgtggcaccgccgcaggctggaagggtgacgcaggagttcttgaatgattataggagggtgcagatggagtacgatgagttcaaggcgcgcttggacaacctccctgatgccatacgcaagagatccgatgtttacaatagcgtgagagatgcaggaggagctcaaaaggcaacttggatggcaaatgggacgcagtggcccggcacatggattgatccagcagagaaccataggaaaggacaccatgctccaattgccaaggttgtgctgaaccatccaagccgtggacaacaccctattactgaaagcaatcccagcattgccaccactgatgagcgcctcccaatgcttgtttacgtctctcgtgagaagaacccaggttatgaccacaacaagaaggcaggtgccctgaatgcacagctgcgggcctctgctctcctctctaatgcccaactcatcatcaacttcgactgcgaccactacatcaacaactctcaagccctaagctcggctgtgtgcttcatgctggatcaacgggacggtgataacaccgcatttgttcagttcccacagcgcttcgacaatgttgaccccacggaccgctatggtaaccacaatcgtgtcttctttgatgggaccatgcttgcccttaatggtttgcaagggccctcatacctcggtactggttgcatgttccgtcgcttagcactctatggtattgacccaccccactgtagagcagaaaacatcacggccgaagctagcaggtttggcaactccacaatcttcctagattcagtgtcaaaagccctgaaaaatgacaggacaatcacaccgccaccaattgatgacacattccttgctgagctagagagggttgtgacatgttcttatgacaaaggtactgactggggcaagggtgtagggtacatctatgacatagccactgaagatatagtaacaggattccgcatccacgggcaggggtggcgctctatgtattgcacaatggagcacgatgcgttctgtggcgttgcaccaatcaacctaactgaacgcctccatcaaattgtgcgctggtctggtgggtctttagagatgttcttctcccacaacaatccattcatcggtggtcgccggattcaaccccttcagcgtgtctcctacctcaacatgacagtctacccagtcacatcagtcttcatcctaatctatgctctaagcccggtgatgtggcttatccccgatgaagtatacatccagagaccattcactaggtatgtcgtgtaccttcttgtaatcatcgtgatgattcacatgattggctggcttgagataaagtgggcgggggtcacatggctggactattggcgcaatgagcagttctttatgatcggctcaacaagtgcatatccaatggcagtgctgcacatggcagtgaacctcctcacaaagaagggcatacacttcagggtcacttccaagcaaacagccgcggacgacaatgacaagttcgccgacctttatgattttcgatgggtgccaatgctcatcccaacaatggcagttctgatctgcaatgttggtgccattggtgtagccctgggcaaaactgtggtatacattggaacatggacagcggcgaagaagatgcatgcagcactgggtctgctgttcaacatatggatcatgtttctcctctacccatttgcactagcgatcatggggcggtgggcgaagaggccaatcatccttgtagttctgctgccggttgtctttgcacttgtcgcgctgttgtatgtaggtatccatatcctacttgctggtctgattccattctag

SEQ ID NO: 31125 - DNA, 687 bp, Zea mays
  Peptide Sequence Number=SeqID_72904
atgaggagccctatccccttcctcgatgtccgtgcaggtcgagctgcacatcgtcgggagcccaatccactcaagcgtctcttcctgatgagctgcacgccgccaggatccccatctccatccctagccttcttgcgttcacaacgctattggactcttccaagttccatcctaatgagcggtggaacaaaactattttggttgaacaaggactgtgtgtttagagttttgcagaatggtcttgctatcgatgtggagtcacataatcagattaaggagaggaagaacaaggctaataagatctgtggtgtgaacaagacaactggctcgaattgcaacaaggtgaatcgtgcagtctgcaagttctattcgaaagaggttgtggataccacacctggaagagttggtggcggattcttcatcaactcaaaggcagaaggaagacttttaagctgcccactttctgacaagggcgagcggcaatacactagtgtttactatcatagaaggatggcagagacagagaaggatatttttcgcagcatggatgagtcgagattcatggttggaggaaggtttaagaaaatgacggggtccacattgagcatcaagaaggtgatggtcaaaacttcgggcttccaagaaggggttgaaaaatttgtagttggagcgaccattaggtcatga

SEQ ID NO: 31126 - DNA, 2502 bp, Zea mays
  Peptide Sequence Number=SeqID_72905
atgctgcagcaccagctccgcgggacggtgcgcctggccgccgaaggcaagtgcgcgctcgagctcacccgcttcgacctcctcgccgcctccccctccgcgcgcttctgggcctccgacggccccaccatgtccgacctcgccgccggtcgcgcgttctcgccgctcccgctcaacaaaaccttccagaacgcctccctcgagctccccttcgctcgaccgctcccgcgcctcctcgcgctctacgaccccgacaccttctcggacttcgggcacgtcttcctccccaacggcacagatcccggcctcgatgccgccgccgagccggcgcccaccatgttcgacaactgcatccctctctcggaggcggagacctaccgcctccgctggacgctcaatgcctccgccggcaccgtcgagatcggccttgaggctgccgtgggctccgagtactacatggcattcgggtgggcggaccccaaggccaactcacccgcaatgatccacgccgatgtggttgtcgccggcttcacagaggaaggtactccatttgccgaggactactacataagtgactacactgagtgcaagcttgggaaggaggactctccagtgtctggggtttgcccagataaggtctatgagggcgggagcaacgattcaatcctggtgtatgggcaccgccaggatggagtgtcctttgtcaggtatgcgaggaagcttgatgctgaggatgccaagtatgatgtgccagtgggtgccacggaggagatggtggtgctttgggccattggtaggttgcggccaccagacacaatgcgcccacactacctcccacagaaccatggggggccaagggacacgacctttgggtttgcccggttgaatttgtcggagacggtggacaattgccttggaccgttggatgcggataataaggaggatcaggagaggatcattgcagatcgcaagacaccacttgtggtgacatctgctccagccgtgcgctacccgaacccaccaaaccctgacaaggtgctttacatcaacaagaaggaggcgccgctgcttaaggtcgagagaggtgttccagttaagttctcggtgcaggctgggcatgacatggcactctatatcacttcagatcccattggtggtaatgctacactgaggaataaaacagaggtcatatatgctggcgggcctgatgcccatggtgtactagctaccccaaaagagcttgtttggctgcctgatcggaacacgcctgacctagtctattatcagtcactgtatgaacagaagatgggatggaaggttcaagtggttgatggaggccttagcgacatgtacaataacagtgttgttttggatgatcaacaggttacgttgttttggactctctccgtggattataaatctatatctatagcagctcgaggtgagaagaaaagtggatatcttgctattgggtttgggagtgggatggtgaatagcttcacctatgttgcttgggtgggcaatgatggggttgggcgagtaaaaacttattggattgatggaaagagtgcaacaggcattcacccaacatctgagaacatcacttttgttcggtgtaagtcagaaaatggcattattacatttgaatttactcgccctcttaacccttcttgtaccggaaaagtagaatgcaagaacatcatcgatccaactacaccacttaaggttgtctgggccatgggtgcaagctggtcgggagatgatctgacagacagtaacatgcattcagtcacaagcagtcggcctatacgtgttttgttgttgagaggttcagctgaggcagaacaggatttgcgtcctgtcctggctgttcatgggtttatgatgtttgttgcctggggaatcttgcttcctggtggaataatggctgcccggtatttgaagagcttaaaaggagatgggtggttccaaatacatgtctatctgcagtattcaggaattgctataatgtttcttggcgtccttttcgctgcggctgagctccgtggcttctttgtcagctcagtgcatgttaagtttggtgtgctggccctgttattggcagttctgcagccactaaatgccaaatttcgtcccagtaagccagctaatggtgaggttccatctcacaatcgaatcatgtgggagtacctgcatgttatcacagggaggtcggcagttattgtaggaatcgtggcgcttttcacaggaatgaagcatttaggccataggtatgacagtgagaatgtagaggagctcacttgggccttaatgctgtgggtgctttcagttatcgttgttgtgctgtgcttggaatataaggaagtcaaaagaaggatcggtgacagaagtgccagagggcactgggtattaggcaacaccgaggaggaggattcagttgatcttttgcatcctgatggtgcagccaggaattcagaatctagcgctactggtgtaatggag

SEQ ID NO: 31127 - DNA, 165 bp, Zea mays
  Peptide Sequence Number=SeqID_72906
atgggggtcgccggcgccaccgtgtctgggcgcgggattggggaagacacacggggaccgttggatggcacatcagtggatgaagttagatctgtagatcggacggttacaatggcataccgattcataaccaatgaaggattgatcggggcccttgatttctaa

SEQ ID NO: 31128 - DNA, 219 bp, Zea mays
  Peptide Sequence Number=SeqID_72907
atggcgcaccggacactgaacagtgcctgtccggtgcaccaccggactatcaggtggcccagaagacagaagctccaacggtcggaatccaacgatctggtgacgtggcaggcgcaccggatagtgtccggggcgaacttagaagattcaccagactcaagaaacagtggcatgaggactgcgggttgttttctaataagttcagggactcttatgtaa

SEQ ID NO: 31129 - DNA, 384 bp, Zea mays
  Peptide Sequence Number=SeqID_72908
atggcccttggtgatgatgtggtggttggcgatggccaggacatcgacaacaactttgagtatgagactaagctagtggagagaaatgctaggatagcctcacttgagaaggcgagcttagtgagtgcatctgcacctgtgtactgggtgtcgtgcagtgagccctacttgggcaagatggacagtcagttcaagaggggaactggtggactagggttaggctttgttgttaaggatgtgagtgtcgcttgctttggaatggttggaccctcgtccctcgaagcattatctccttatgggaataatgctcctcagacgaaggtcaagaagcacgggatgcagcccgagcaaaagtacatttatgtccttaatgtttacacatga

SEQ ID NO: 31130 - DNA, 258 bp, Zea mays
  Peptide Sequence Number=SeqID_72909
atggttgtaactttgatattatttattttacttcatattgtttacttatggaaagggcttacatgtcatcgccacacaacttcacctccaacttggggaccacccaccatcttcacctccctcagattcgagtacgatgacaaggtgctcccctccatcagcaacaaggtgctcaaggtcgtcgtcgcccagttcttcacgaagctcccacgtggccaggtagagaaagagaggcatgctcccatgcctgctgcatag

SEQ ID NO: 31131 - DNA, 291 bp, Zea mays
  Peptide Sequence Number=SeqID_72910
atggagggagagaggaagggacaccaggggagtcataatagaggaggaaatgggggagagaggggagaaaagagggcggcggttatgggttcggggaagacgaaggggtggctcggctggcgtcaaagcggctcggccgcgcgggcagtcggccgggcatggtggtcgaccgggcgcatcggtggccacatgctcaggcgcgacacgaggaagacaggggtcacggtgggtcccacctacaagagagataggcagaggggatgggagaggtggaagcctattgggccctag

SEQ ID NO: 31132 - DNA, 921 bp, Zea mays
  Peptide Sequence Number=SeqID_72911
atggggacgggaagcgaaaggaaggcacccccaaggcgtccagccaacacaacccgaaaagggcaaaaagaagacgcaatagggtccgcccaaggccctcgccgccaagctcgtcaccgtagtagagaagcacaaccctcgagcccccaaggggggccaggggtcttcgacaagatgctgaaggagttgtgcccttaccataagggcccaatcaaacactccctcagtgagtgcgacatgctccggcgcttctacaacaagcccggtctctcggtagaagggggaaataagaaggcccccgacggtggagacgacgacaaaggcggcggcttctccgatgtgcgtaactgctacatgatcttccggggagacaccgttaacctatcctcaaggcagcgcaagcaggaacgccgggaagtcttctcggtcgaggtagcgaccccagtctacctagactggtcggatcgcgccatcaccttcgaccgagatgaccattcggaccacatcccgaaccctgggaggtatccactcgttgtcgaccccatcatcggcaacacgcacctcacgaatgtgctcatggatggaggcagcagcctcaacatcatctatgcacacactctggatctcctagggggttccaaggtacgtaccatgctgtgctcgggcgtccatgttacaccaatcggtcgcatgtactatcacgcctacgagtgcgacgtcgactgcgttgaatatgccgaggcgcaagccaactatgaggccctcatcgcagatctagaaaaccttgcaggagaggtacccaacaccaagaagcacgctggcaacttcgagccgaccgaagacacgaagaccatccccctcgaccctagcgactccggagagaagacgttgtggatcggctctcaacttgagcccaaatag

SEQ ID NO: 31133 - DNA, 669 bp, Zea mays
  Peptide Sequence Number=SeqID_72912
aacgcgaatgtccccgatagcaacgtgctcacagacgaagtgaagatcgacctcaacatgctttgtgtgctggtgttggatcgggttgatggagagcccaatatagaggataagcatattttcagctttgcttcagatggaagatactctgcaaaggctgcttataagagtcttttcttgggatcaagctcctttggacattatagaaggactgctgctttggatggtgaaactgacttgaaaacaagaaccattcctccaatttctgctaacttgtcagtagagcagctaggaaaagtcaagggtgtaattgagtgccccaacccagacaatgacatacggaggtttgatgctaacatgcgcttgttcctccctataattgacaatgaaaaaagtcctttgactatcaacaatacacttcttcagtcatgttaccttcgatacactgaatgggcttgtggagttgcagtttacacaggcaatgaaacaaaatctggaataagtaggggagctgcggagcccaagttcactgctgctgatgtaataatagacaagctcactattgcaatattcatgttccaagttgttgttgtacttgttctgggttattttgggaatacttggaaggacactcaggggcttaagatggttgcatttataagaaattga

SEQ ID NO: 31134 - DNA, 558 bp, Zea mays
  Peptide Sequence Number=SeqID_72913
atggggtcatgcctaatcgaaactggcagaccccgtacctacaatatctccaccgaggagagctacccctcgacagagccgaagctcggcaactggcacggcgcgccaagtcattcgtcttactgggtgacgaaaaggagctctaccaccacagcccctcaggcatcctccaacgatgcatatccatcgccgaagaaggtacctgggggcttcacgcacctgctggtcgccatcgacaaattctccaagtggattgaggcggtggcgttcttcacccaacatcatccatcgctttttgggtccccgaactccatcatcaccgacaatggcacccagttcactggcaggaagttcctggacttctgcgaggaccaccacatccgtgtggactgggccaccgtagctcaccccgtgacgaatgggcaggtagagcgtgccaacagcatgattctgcagggacttaagccgaggatctataacgacctcaacaagttcagcaatcgatggatgaaggaactcccctcggtggtctggagtctgaggacgacgccaagctga

SEQ ID NO: 31135 - DNA, 189 bp, Zea mays
  Peptide Sequence Number=SeqID_72914
atggtggagaatcctagttacagggggctggaccaacatatggtggagataactggcaaagaggttctggtcagtatcctagcccaggtgaaggacaaggaaactggcaggaaaagagaagatgagcaatcaaacctcagagctctcacacaccaagtgaaagaaatcacaagatctctgatatcataa

SEQ ID NO: 31136 - DNA, 384 bp, Zea mays
  Peptide Sequence Number=SeqID_72915
atggagcgaacctctgtggtgagcccccatcgcaccccgagtggcaacatccaacagcagcgagcgcagtatgaagggacgggtgaagcaatgctatataggggaggtagaagtccgaggcgagggttggtcggtgaaccattttgcagagatcgtggttggttgatagtctgcgaagataggagggagaagcaacttggggggcgcgattttgtagccccaaaggctcagcggccggtccggagatcaggtaggatcccaacaacccagccgtcaccgagccacgcgaggaagaagatcccggtcagggcggcccacagtcagcgagaaaagagaagtgggtacgtggagagggaaaaactgggcagcgggtcccgcccgtaa

SEQ ID NO: 31137 - DNA, 276 bp, Zea mays
  Peptide Sequence Number=SeqID_72916
atggcggcgaagggcacaggcacaggcggcgtcggcggcggcgggctcgggcggtggcggcgacggcggcgatggctaagcagacggcgacagagagaggacggacacggaaatgaaacggcgcgcgaatcatatggagaggtttatcgtgctgactggaacggaacagtggatacaattctggacaaagaaaattttacattggaagaacttcttgatgaggatgaaattattcaggagtgcaaagcactgaactcaatactcataaacttgtaa

SEQ ID NO: 31138 - DNA, 390 bp, Zea mays
  Peptide Sequence Number=SeqID_72917
atggcctttttgggaaggtgctcgctggtggactatcaggcgttgctgcacaggtgcaatgggctggattttgataaactcgaatgtggaggtggcttgctacggcaagccttgttactggcttataaatctggcttccaagtgtgggatgtagaacatgttgatgatttttacactaaaaccgtctcaacgacatgtacagaaaccttctcagcgaaacgtgtgcaatattcacgccgtcagttgggctccattctctgttatgtaacagatccaggatttacgctaaaacttgtaactgtttacgttgttttggttcacgttttacgctttgatttgaccgaaccagaaacacatgcatcgggcgcgtgcgggggtctgcctggctag

SEQ ID NO: 31139 - DNA, 189 bp, Zea mays
  Peptide Sequence Number=SeqID_72918
atggcgtcgccgaccggtgcgcattttggatgtgattacaaatccgtgaattacgttggttatttggatgtgaatgttatgttggaatttttgggtgtgattgtaattctcgatgtgaatgctggaatgggccgggccggggcaacttcctacggttatagcttcagcaaccgtcgaagttatagatga

SEQ ID NO: 31140 - DNA, 237 bp, Zea mays
  Peptide Sequence Number=SeqID_72919
atgaaggcttcaatggtcgctacggaaagtgagtttgatgagcagaaggaccaggttgcagtcgagcaaattttgcgggtggtattcttggacgctgagcgcccgagcccacaaatggacaaactcaagcgccagctcgctgaagcagaagccgcgctggaggcacgcaagaagcctccggaggacaatggcacccgtattgtcggcgaaggccttgtgatcgatgaatggcgctga

SEQ ID NO: 31141 - DNA, 426 bp, Zea mays
  Peptide Sequence Number=SeqID_72920
atggcggttgagggcgaggcgtggggacggcggttgaggccgaggcgcggcgacggtggtgacggtggtgttgggggcgcggcggtggtggtgaaggggcgctacggtggtgtctgggcggtgggcgggctaaggagaggggcgcgggcgcggcaggtgggcacggccacggcgagggccgggcgcggccactgcgaggggcgggcgcggcctcgatcgcaggcacttggcaaagacggctttgccgagtgtcaactgacatgtactcggcaaagttctgttctaggttctttgccgagtgccaaggggatggcactcgacaaagaagattctttaccgagtgtccaccggctgacactcgacaaagaagattctttatcgagtgtcatctttgaacactcgacaaagtacatttttattttttaa

SEQ ID NO: 31142 - DNA, 159 bp, Zea mays
  Peptide Sequence Number=SeqID_72921
atgacgaagggcggattcactgtggcacttcaaatccgacgagcaattggttacccacacctgcggcaggcacccgtcgatcacccccagccaaggaatttgagtacagtagtgtcttctcctggtttcatgggcggcggctccttcggctccctctag

SEQ ID NO: 31143 - DNA, 366 bp, Zea mays
  Peptide Sequence Number=SeqID_72922
atgacggagttgtcgccagagatagtcatcccgcgccccgagaccttcccacactgcccgactagcgctacacgaactggagggcatggcgaatccagagaagcaaatctcaccgagtttggaggtgtggaattccctgcccacggagaggcgcgaccgtggcagacgcccctgctccggcgagcaattcgttacgagtcgcctgccgcttgcgttgggcgagtccacacaaaccctccagcggacgtggcgcagcacccggcctactcgattgggtcccaacggcgtcgtggggatgaagacgacggtggcggtcagctttctccgctcggtgatgaccgccactggagaaatctcacacgatag

SEQ ID NO: 31144 - DNA, 216 bp, Zea mays
  Peptide Sequence Number=SeqID_72923
atgccgcgccatcagctatgccgctacagggctcaaggcacttctccgacggccacgttactacctctacagggctcaaggcacttctccgacggccacgttactacctctacagggctcaagttggtcccacgacggccacgttattatctgtacagggctcagggcacttctctgcaggccacgttagctctaagctacacccccattgtatag

SEQ ID NO: 31145 - DNA, 297 bp, Zea mays
  Peptide Sequence Number=SeqID_72924
atggcgaatccagagaagcaaatctcaccgagtttggaggtgtggaattccctgcccacggagaggcgtgactgtggcagacgcccctgctccggcgagcaattcgttacgagccgcctgccgcttgcgttgggcgagtccacacaaaccctccagcggacgtgccgcagcacccggcctactcgattgggtcccaacggcgtcgtggggatgaagacgacggtggcggtcggctttctccactcggtgatgacgccgctggcgaaatctcacacgataggaggtgtaggtggttga

SEQ ID NO: 31146 - DNA, 693 bp, Zea mays
  Peptide Sequence Number=SeqID_72925
atgcctctgtcacaccggaacctcctcctcttcattccctctgtcatcgttctcgttgtcacctccgccgccgccctatccgtctccaccccggttgagctcacaggccgcccctcccgcatccgcgacccgtctcgcttcttccacgcgcttcgactccgcgccaacgccacccgcccccacggcctcgagctctgcttccacagaaatgccacagtggggccatgcaagtgcgccgcgtcccaatggcagaaaatgcccaagagcgggctctggatgcaggtcatctcaccatacgactaccggattcttgatttccgaatgcctgctgacccttcgagttctagtttgtttccctctgtttcctgcagttcttgtttgcaggaattcttgctccacagggtggtgttctttgtcgtaggattggtgctcatggtggtggcacacacattgagcgagtctgtagtgttctactatggtggagcaatgactattggcattttccttgtgatactgattatactctttcagggaatgaagcttttaccaactggtagaaagagttctcttgctatttttgcatactcctcagtcgttggcatgacgacatattttcttcactatttgtcgggtatgctgcgctcagttcttgtggaaattgggattgctgaagacatgcataatcctgtataa

SEQ ID NO: 31147 - DNA, 219 bp, Zea mays
  Peptide Sequence Number=SeqID_72926
atgacttttagacttggttttgggcacattgcaaaccctggtgaaatggaggaaaaaagggaagctaccaagaagagtcaaaaagatttgaagaatataggctcaaaagagccaaagttctgttggtctgggcctcaccggatcaatccggtggtgcatcggatcgggttcgtgaggggcctacacttaggcaccaggctagctgttgcaccgggctag

SEQ ID NO: 31148 - DNA, 303 bp, Zea mays
  Peptide Sequence Number=SeqID_72927
atggccgagccaacaatcggatggtcacaccggactgtccggtgtgcaccggacagtgtccggtgcgccaacgggaccaaagacccaacggtcggcttcgccaggaaaggaaggagatcatgcatcggacaagaactgttcatgtccggtgcactactcaacagaaggcaagaattgataggaacggggtgcctgatcttccgtcaggtgaaggatcacctattcacccccctatgggtgctctcaattggtatcagagccgtactcttcattaaagggacttaccgtccaaagagatggtga

SEQ ID NO: 31149 - DNA, 429 bp, Zea mays
  Peptide Sequence Number=SeqID_72928
atgaggatggttatgattatgcttatggtaatggtaggtgtaaacaaatgcaaccttggaagaggagacccttgtgcaggagcagacacggaacaggaggagctggtgtcgtcggaggtggagcagaaggccaagcacgatgaccagcaccaccaggcgcttgaaatcgatgacatgcatggagagggagggtgctcttaccaaagtgctcggggacggcggccggcgctcgtggcgctcgggctcggggacgacggcgctcggtgcttgggctcggggacgacagcgctcgacctcgggctcggggacggcagcgctcgacctcgggcttggggacggcggcgctcggcctcggggacggcagcgctcggcctcgggcttggggagcctggcggcgcaacggtgtctgcttggtcgggagttagctag

SEQ ID NO: 31150 - DNA, 328 bp, Zea mays
  Peptide Sequence Number=SeqID_72929
gcgtgacggatggcggggtcggggtggccagcggcatagaggcagaagggaccggggaagacgtggcgccgacgagcgaagagccagggaggttgggcgcgggcaccagtgaggagggcgtgggcactggcgaggaggacgtggatgatgagctggacggcgagacggcgccgtcgtcggatgcggtgcccaggacaacccgagagtcgcccggcgttggcgacgaccataagaggtcaaactggcagtcattaagctttttctcgtcgtcgatgagcgacgccaacgcgagcgcctcctgccagtggtgtttgttcggtgtttccat

SEQ ID NO: 31151 - DNA, 114 bp, Zea mays
  Peptide Sequence Number=SeqID_72930
atgaaggggtatgggcagattctggccacacaattagaattccacggtccagattatatcaaactgtgccgaagcgatgaacagtacccccgtattgttcatgctggattgtaa

SEQ ID NO: 31152 - DNA, 395 bp, Zea mays
  Peptide Sequence Number=SeqID_72931
atggacagcaaacttgtatcaaagatggtagcttatggcaatgaggaagcggatggaaagaagattcagatccagctgacagggttcatggaaaagaacacagtgaagttcatgaaggagctctggagccttctcctcagtgcgcagcagaatgccagtgggctgtgcaagggcgtgggttttgttcacggccgcggggtgctccaccgtgatctgaaaccgcacaacctgctcatggaccgcaagaccatggcactcaagatcgctgacctcggactcagtcgtgccatcaccgtccctgtaaagaagtacacgcacgagattctgacgctgtggtacagggcgcccgaggttcttcttggcgccacacactactccatgccggttgacatttg

SEQ ID NO: 31153 - DNA, 795 bp, Zea mays
  Peptide Sequence Number=SeqID_72932
atggaaggttgcgccaccaaatcacgcggatggaaggtccacctcctcctcctctccccaaatcgtgcatctgtcgcgccctcaaatcttcgcgggcgttcactcttttctcggtcaccgtcatgggaaggtcccagatctcttctcgccattaccgcgcccgccccgtcaatttcccatatcccttctcgccattctctcggagcatccattgccattcatggacggcagacgattccatcctctcggttcatgaaggtgctcttcctacgcctcggcttctccggcgtcgcggatttgaagatccgccgctccgagtggggcggggccctggtcgcgccgcgaaggtccgggtcgctgtcggcacgcatcagcgccgcgctgtccggtggcctggtgctggcgccaccggcggtggaggagaaggtggaggtcaactccgccatattccccaagggcccgccggtgccactcccggttcagaagatggccacgcacatcgacaccaccgaggtgagcaggggccccgacgacctgccgggctactgggtcgtcaccggcgccaagctctgcatggaaggcggcaaggtcgccctcaaggtcaagtactcgttgctcatcgcagtgcaagaggaccctgaaggacactacgctttgaggcctccattgccatcgtccacgcctcaactctgtctgtctgttgtgttgccgcggtgtaaagttcagttgtgggcaactacgttgtacagaatacagtgtgcccagaggctgatgttttttggtttgttcacttag

SEQ ID NO: 31154 - DNA, 312 bp, Zea mays
  Peptide Sequence Number=SeqID_72933
atggcggacggcgtaactccggtgatgaggctccacgaatggcggacgaatggacgaatggcatggtcacagtcactggggtgctgcacggatgagcttcacggtggcgagttgggcatggcgcgagcaggactcgacggcgggcgcgggaatggggagagcgcgagagagagggagctcggggaggagaagagctcgtgtaggggggagcaagggctcgtcggattttatagagagagggtgggagaggaagggtcggccagggaagaaaatggtggtcggcgtgatggcattcatggagagaggacttaa

SEQ ID NO: 31155 - DNA, 228 bp, Zea mays
  Peptide Sequence Number=SeqID_72934
atggcgtgccgcgcacttgccctccgcttcctgctcctcccggacccgctacaccgcctcccggccacgccgccatctgttgggagggcatccggctcccgcggtggtcgccgtccgcacctccgctgcagctccggcggcgggggtggggagcccgggcagccgccgcaagaagctgtgctcgaggccatatccattggactcggggtcgggggttacttcggatag

SEQ ID NO: 31156 - DNA, 393 bp, Zea mays
  Peptide Sequence Number=SeqID_72935
atgccggagccggcggggtacgcgccgctgggcgcggccgagaggcagcggcggcgggcgctgttccttcagagctaccggttctcgtcggtagacgacgacggcgtccggcagcggcggcggcagtggctgggcctggcgggcgggcgcctcgcgcggatgctgcgcgaggcgggcggggccgtggtgagggcggccgggcgcgcgcgctggtgtgtgggcgccgggctcgccagggcgtggcgcgggtggaggccccgcgcggacccgctgctcggctgcttcggctccgcgacgcaccacaagattcatttataccgcatcgacgacgcatcttctagcacactgtctgtgcgctacgtgtctgcgccctttgtgaaatgcatctgctaa

SEQ ID NO: 31157 - DNA, 1473 bp, Zea mays
  Peptide Sequence Number=SeqID_72936
atggacgaggaccggagcgccgatcccgctcgcagcggccgcctcctctcgccgacgagcggtcagccccaaacccagacacagtcacagcccccgctccccatggacctcgcctcccagtaccaacgcctctttgcaccgtcggttttcctcccaccgatggcgcccccgccgccccgcctggcgtccagctcctgcttctcggccttcagcaactatcagagcctaccgacgctcgcgcccgcggtgggcgccggatcgcatctcgctcgctcggtccctaagccgccgctcttctcagtggactctctagctccgcttccgtactccaccagtccagcggcgagggcagcggcaggggcaggggcggcggtcccgcgttccccgccgtcgccaggcagctccgagctgcaaggcccgtccgcgtccggcctgccgccgcgtggggcggggcaccggaggtcccgtagcgatttcctcgtcgggttctcgggggcgaaccagctgcacctgccgatgactcctgcggctggggcgtacaggccgagggacgcctccgcactggaggagctattccgctcatacagggatccgaatctcggctcctccggggataacaataatgaaaggaacgatcacttaagtagacaactgaccggccaacgcgcttggagccccggtgataacagcgacaacgaggctgagagctgggcggtcagtggcagcgcagacaccagcgctagccatcctcgccattgccgcagcctgtcggtggacagcatcatggccaatctcaattttggaggcctggaccaggtttctctgagagtgccacctctgtctccagtggcagacgccagtgtcagcctctcgcgcactggaaccggagcatcgggcggtgcggctgcggctgcttcttctgaacttaccaacggagagttcagcgaggctgagatgaagaagatcatggccaatgatcgcctagctgagatcgctctttctgatcctaagagggtcaagaggattctagctaatcggatctcggcagcaaagtctaaggagcgcaaggtgaagtacatgggtgagcttgagcgtaaagttcgtgtgctgcagacggaaactaatacattatcttcgaaagcagcattgtcgcagagggaatgcgaggcacttcgaactctgaacaatgagatgaagatcaggctgcaagcaatggagcagcaagcacagctgaaagatgctctgaatgaagcactgacagctgaagtgcagcgcctgaaacaaatggctggcgaggccagtgatcttcatgtgccgaacggttcgcatcatcatatgaaccgccagattctcgaacagcagctgcagcaggtacagaagcagccatcagaggcccagcaggctcagcagcagcagcagcagccacaggaaccagagcagttcaaagctcagcaaaagcagtggaaccattaa

SEQ ID NO: 31158 - DNA, 432 bp, Zea mays
  Peptide Sequence Number=SeqID_72937
atgccactcatgagaacgcaacaacagtttggagcactgaatgttagtacaatgacaccatctctccaccactgcaaaaccctgtccccgcaagttcacccgttcatggccatcaaaccaatcctgccaaaaaaaggcatcaaagtacctgctgctctccatctcgaggtgccactggcatgtggcctcatgatgctgaaccctgaactcaacatggacgtcgctgtttgccggacgaggatcgcacgtgtatgtatcagggagaggtcaagcgtcggaatgaaacctccactcggcgaagatatggatcaaatgagtggacgcgggacctgggccgggtcagtgtgggggcgacacgcgtcccccatcgggggagcgtctgggggtggcatcggacgctgcagatccagagcacaggtgctgttgatctga

SEQ ID NO: 31159 - DNA, 414 bp, Zea mays
  Peptide Sequence Number=SeqID_72938
atggagaaatttacaatcaccattctccacgagaggggctggtttggtgacctggaaaatgaatccagatacaaccaaacaaggcataagggattcagacattcagtcctcacagagcttacatgcgcggaagcagtgctagccagtagcagagagaaacggtaccacttggtgacgctggagatgtggacagcccaggtgagcagcgagagcgcgttcaccggtcaccggccgccaggcccaccccacacgtcaaacggactgcggagggcggtctccgcagctcacgtcgaggtggcggaggaggacagaggaccggagggcgctagcgttgccacgagccggagggacgcggacgcggcgggactgcgtgaggtcggcgtcggcgttaacccgaacccggcaagtcgttga

SEQ ID NO: 31160 - DNA, 414 bp, Zea mays
  Peptide Sequence Number=SeqID_72939
atgacgaagacgaaggtcatgaaggacataccttcgttattgcagtacatgttaatgaaaggagaaacatatgaaatacgatgtggacactgtgaggaagatcatatccttgctaccttaacaaaaatatgggagcatcatcatcatccttcacaacttggaggatttgagccaaatgacctcgcgctcttgatcaggaagatcgtgacatttaagatgtcacgcaagatgtgtgaagaagaaccaacctcttcaaagccatatgctttcacttgtgatgaacacaaaaagatgaaagacaagaagaaggttgcaagctcaagttactcaagtgaagaagaggaatatgaaaaagaagatgataataatgatgatgatcaacctctacatcatccttcaaggacgaagagatga

SEQ ID NO: 31161 - DNA, 681 bp, Zea mays
  Peptide Sequence Number=SeqID_72940
atgaaaatatggttattattggaagacgtcatggaagacatcgcggaggtcatcaccgctgacgaactaagggtggtcacttggtcactgcgcgtgggccacgaaatttcatcatgcagatggctctcaataaagagggggagccctgacccaaattcatcatctaggttcaggcatccacaaccgtggaaccaaaccaaaaccgcatgtgtcccatgcataaggaagcaacaaaccgtcaacccacaatcaaaggcactttcttctccacgacttcctaaatttcagtttcctcatttcgctccgccaaagcaacgcgacgcaaacctcatcctctgcaatgtcttccatccgttcgaatcgagcgctgaaatctgcggcaccattcccccaccacgacacatggaggtcgtctatcggtcaacaacaagcggtacatcgaggggaagcaccgccgccgtggacacccgcctcctcctcgtgctcctcgccacgcgcgacggtcgcgagtacgacgtcataacagcgcagctactcagtactgctccatctcttgcttttttactgcctcttgttttgtctcatctgatcccttccttgcaacatgctagcccaaggcttacacagacctgttttgacaagagccgagcagcgatgcttccatttcggaccacgacctag

SEQ ID NO: 31162 - DNA, 588 bp, Zea mays
  Peptide Sequence Number=SeqID_72941
atggtgcaagaacttgaaagtgatccccatcttttctcatgcatcctgtcgaaaggcaatttgaaggtcaaagaaatgcaccactttactcaagatgatttaatgacagaagatgtttttgttctggactgtcacacgagcatattcgtttgggttggtcagcaggtggatgttaaactcaggttacaagctctggatgttggggagaaatttattgtgcttgatttccttatggaaaaccttgcccgtgaaacaccaattttcaccattatggagggaagcgagcctctcttcttcactagattcttcacctgggacttggcaaaatcactgatgcatggaaattcataccagaggaaactcgcaattgtaaaaggtggaggtgctccagcgttggataaaccgaaacgacgaacatccatctattcaggaaggagtactgcacaagataaatcccaacgccccagaagcatgtccttcagccctgagcgtgtccgtgttaggggaagatctccagcattcactgcattggcagctacttttgaaaagttcaagcaacagaaatctttcgactccacctgtagttaa

SEQ ID NO: 31163 - DNA, 2568 bp, Zea mays
  Peptide Sequence Number=SeqID_72942
atggctgcgcggtgcagcggcggctgcgacgggcgcgaggacagcgccgtggaggcgctggtgcagtggcagaaggtgagcgacttcctgatcggggcgtcctacatgtccatcccgctggagctgctgcacttcgccacctgcgccgacctcgcgccgctgcggtgggtgctcctccagttcggcgccttcatcgtgctctgcggcctcgtccacctcgtcgccatcttcacctacgcccgcccggactcgcgccgcctcctgctggccatcaccgccgccaaggcgctggccgccgtcgccgcgtccgtcgccgccgtctccttctccaccttcgtcccggcagctgctccgcttcaagacccgcgaggcgctgctccgggacaaggcgcgccagctggaccgcgacgtcgccctcgtcaggcgccgcgaggagaccgccacgcgcatcgtccgcgccatcacgaagcacgtctgctgcggctgcacggcggagcctctctcgcgcccgacgtgctgcgcaccgctgtcttccacctctctgacgccctcggcctccacagctgcgccgtctggatgcccgcggctgcggcggcggccagtgatggtggccccagcttgctgcacctggtacatcggctgcctgaagatgaccaccaggacccgacgacgaggctggccatttgcagcactgaccctgacgtggccgccgtcatggctagcaagaacgccaaggtgctgaggccgggctcggcgctcaggaggacgacgtcgacgtctggtcatgggcacgcgggtgcggctgccatacggatgccgatgctcagagtgtccaacttcgtcgacgcatcatcctcattatccgatgggcagggagctggtgtcagctacgcgatcatggtcttggtccttccggctccagctccgaccactaagaatcacaggactagaggacccagaggagaaggaggaggaggagcacgagagtggagcaggcaggagctggagatcgtggaggttgcggcggaccagttagccgtggcgctgtcgcacgcggcagtgctgaaggagtggcagctgactcggcacaagctggccgagcggcagagggtcctggtgcatgcccggcatgacgcagcggtggccaccagggccagggacgcctcgcagagcgccatgcgcgacggcgtgctgaggccgatgcactccgtcgcggggctgctctccctgatgcaggcgcagcagcacgaggacgaggccttccgttgcaccgagcagagggtcgcggtgggtgccatggccaggatcagcgccctctccaccacgctgaccgacgacgtcatggcggcgctgctgacgccgacggctgccggcgtgagcttggcgcggaggccgttcgacccccgcgcgctggttaaggacgcggccggcgtggcggggtgcctcgcccgctgcagggggctcggcttctcgcatcgggcggagatgagctctctgcccgccggatgctgggtggtcggcgacgacaggcgagtgttccacctcctgctgcacatggttggcgttctgctggaccagtgcgaatgccattgccatgacctctgctttgccgtggacactgttccggtgggtgaccaagagaccatgtcaggctcaggccttcctgattggatcacccccaacttctctggctgcaacacggtgtgcgtcaggttccgatttgggatcacaagacacttcagaaacggcttactgctctcgtccagcccacgacctcaagaaagaatcacaagacgcaccagcgtcagcatcagttcagccagctccaagacgcggctaagcatcgctacgtgcaacaagatcgtgcagatgatgaacggcaagatgtggtgggaatccacgccagcgtccggaggccagcatgaagagcacatgagcctcatcctgcacttccagctcgtctatggagtggcatcaccctctgcctcctccccggcaggcggcggcggattctaccacatcggtggcagattcggagtgccctcgccgtccaccagtgctcctcctcagcacaacttcaacggcctgcgcgtcctgctcttgaacactgatgacaccagccgggaggtgacgcggaagctcctggagaggctcggctgccaggtgcttccagttccatcggccgcccgctgcctcagccttctactggggagcgccaccgccaccggcggcggcgatcagccgtcattccagtccccgtacttggtactgcaggcggtgcttgtagacctccacacacctgccgcagctatcgctgacgccgccactgcaatggatgatgggtttgaggttgccctcaggatccgggaggtcaccggcgacaggttcagctggctgctcatacttgtcgcgctgccactgccgccgagagcgagccgcatcgacgttcgcgacgtgtgcaagcggacgggagtgaatggcgtgatctacaaacccatcagtccatcacgctgccagcgctggcagctgagctttacagggttctccaaaacgacaactgaccggtga

SEQ ID NO: 31164 - DNA, 294 bp, Zea mays
  Peptide Sequence Number=SeqID_72943
atgacaagaacagaagagaagaatgctttagctttagttgggacggttgctcaggctatggacaattggcgatgggtaagggatattgtgagtcatctttctctggttgggcagcagcagtatttgaagttatgggatgtgattggagaggtgacgctttcacaggagggcggacaggctagtttggatgcacacggcttctgggcagttctcctcaggtcatgtataatgccttcttggggttcatctcctttgagcttggaaaagattgtggaagactcgggctccccctaa

SEQ ID NO: 31165 - DNA, 474 bp, Zea mays
  Peptide Sequence Number=SeqID_72944
atgtcgtacaacatcaacaacaacgccaacgtcacctcggacccggcccggttcgagcgcctcctcgccgccctcgtcaacgccaccgccgagcacgccgcgtccaactccacccggcgattcgccacgggggaggccgacgccgacttcgaccggcagttccccaaggtgtacgcgctggcgcagtgcacgccggaccagacgccggcgcagtgccgcaagtgcctcgccggcctcatatcgcagtcgctggacgggttccagaacaacatcggaggcagggtgctctgggtcaactgcacctggcggtacgagacctcgcccttcttcaatggaccggccatggtgcgcctggcatcgtcgtcgagccctccggcagcggcagcggcaggtggagggtttcatcctataaggtcatttgaaagcaaatttaatataattattggaataacagaaactctaaccctacactag

SEQ ID NO: 31166 - DNA, 384 bp, Zea mays
  Peptide Sequence Number=SeqID_72945
atggcctgccagagctccacgccgcgaagctccaacgaccacatcgaattacccggtgcaaaatgtaattggaatatgggtggtgcagaggagccctcaatcttctctggtcgcgatccttgtaccgaggtgacacaccctgaccacacggcggacaccgtgcaacgacggaggcaaggcaagggcgtggcggcttcctttcttcccaggcgcaaatggcgcgctaacaacagtgcccggtgtagcagagctctggttagatgggcgagacggtcgtggaccctgggttatatagtgcggagtccgatgtgttcaggggtggatctgcgtccggggctgcctaggctgcagccccggtcgcggcccaggaactcaagcgaatag

SEQ ID NO: 31167 - DNA, 225 bp, Zea mays
  Peptide Sequence Number=SeqID_72946
atggcaaaagagggtgggatgtttttgaaaacaaaacttgatggtggatccatcatggtcgtgatgggttcaacatcggaaaagatgtacctctaccagcatacccttgagagtcttttccttagtcgggtgaggaagcaagaaacttttgttgtttctgttccaaggtggttccaaaagaagaaaagcaagagtaaagctgcgggaggaagagttcctccataa

SEQ ID NO: 31168 - DNA, 279 bp, Zea mays
  Peptide Sequence Number=SeqID_72947
atgctttccaagagctcagaaggttatagcactggtggggaaggctatgacccaacccgggagtgcctccacgttgacttggagatccctgacgaaggcgatcaccttggcatgccacgaataggagaccagcctccactatgcgttcaggaagcagtggaaccaggcggggcccagaccctcttgggagccacttggctcacctcaagcaactctgagagctacacgacaagctcagggaggaacaacagcagcagtagtagctacgacaagcgctag

SEQ ID NO: 31169 - DNA, 315 bp, Zea mays
  Peptide Sequence Number=SeqID_72948
atggcatgcacgccgagggtcggatctcgccgagaaccacacttgaagagccaccattaccgagcccgcgtgaagaagaataccgcccggttggattgtggatgctctggcgtcgggctcgcgatatcctggctaggtgctccatggggtcctcagggaggtacccatgaccttctcgggcaggatgaacctccgaggcaattggaatttctcaccgtgcctgtgacacaaccgcgatccgcgccgctacatgggcaatatgctggcgccccaatccgaggtgaggtctttaccctcgtattcgctagaacctga

SEQ ID NO: 31170 - DNA, 147 bp, Zea mays
  Peptide Sequence Number=SeqID_72949
atgtggcactattatggttggcaaggtaccaacgggtgctacaaagggactaaagagcgaaagactcaaggtgagacagttgtgaattatggacttcaaaggccaatccacgaagggctcgcggacgctccagtgaaaactgagtaa

SEQ ID NO: 31171 - DNA, 417 bp, Zea mays
  Peptide Sequence Number=SeqID_72950
atgaggccgcgccatgacactgacgaggctgcgtgccaagggccacgcaggtggtcgcgccgagcaccgggcaggactgcgtggggcagggggccgccgagtggggagcgcgtgcaggtaggcggccgccgcgccaagggcgggcaggggcgccgcgccagggagggcagggaccaccagggatgccgaggagggatgagagggagggggcttaccacgagcatgacgaacggtggaaaccacaactcttcggggatcctagcgagggctgggagggagtgggagaggaggaagagggagaagggaagcggcggtttcttctctcctagatcatgggtgcgcgcgggagaagggtggggcagttgggaggtggcgcggggccgcgcgccaggctgcttctcctcgtccttcctttaa

SEQ ID NO: 31172 - DNA, 336 bp, Zea mays
  Peptide Sequence Number=SeqID_72951
atgagttggccaagcgtgaccatgttccctgcgcgactcaccatccatcctacgcaacctgctgctagacttttcccaagtcatatcctcactcaggtggaaaaccatgtcctactaatgggtcttgccgaggaagacacatgcctctacattgatagtcatcgtgatgcactggacaacattgaggtgtcacatgcacagtggcacgacaaagagctaaggtccatgatcgcttgggcaaccattatccatcctgaacatgctcgtggtggtgagcaggcccttcgagtggtgttcagggtctctgccttcaccgacagactatgtgtggtataa

SEQ ID NO: 31173 - DNA, 378 bp, Zea mays
  Peptide Sequence Number=SeqID_72952
gtaactgaagcaaggtctctcaataaagagaggttgcaagccgaagtcggattgcctgtggactccagcatccctgttatagttttcgtggggcgtctcgaagaacagaaagggtccgacatactcattgtagcaattccagagttcgtgggcgagaatgtccagataattgttcttatccccatctgttcatccattggaggacttgtcgacacggttgaggagggtgtcaccggattccacatgggttcttgcaatgtcgagttcatgttttacgctacaatctgtccaagtaagaactcgtgcccaatgggacgcacgctggtacgggacgtggctatacctggctggggcttcctgatatacccagtttcttag

SEQ ID NO: 31174 - DNA, 300 bp, Zea mays
  Peptide Sequence Number=SeqID_72953
atggatctattagatgcaattgtggacaatactccacaattcatcaccctcaatcaaagaaccaaatcaaacaggggtcactttaggtacaagattccaaagtgtgaaatccacttggtctttagaagtgaaaagaacatctcggcattaggggaggaatgcccatatagtgtaatgcctcaatattctattaaacgcacaaaagccaaactagacttgtcattcgatgagtactcatgtgtatatggagtttgccagaaatcgttgagtaactatattggtttgaacgcttctacttga

SEQ ID NO: 31175 - DNA, 360 bp, Zea mays
  Peptide Sequence Number=SeqID_72954
atggttcaggcggcgaaggaggactctggcgagcaattcccggtcaccccactgctacctgtgcacgccaacacttgcgctagctcccacatgtcccggcgacgctccatggtaattcctcaaggacctggcgatggtgaaccgcgggttcaactgtggcgacatgttccactctctgcttcagcgtcgacactctccatggagatggtggcatacgaacccagttgtggtggcgaactcgacggtggatacgtaggtgggggcgggcatggggagtacccaatgcacatggaccgtaggatcacaatggaaggtcgataccgtgagagggggagcgcgcagatgccgccatttggctaa

SEQ ID NO: 31176 - DNA, 1176 bp, Zea mays
  Peptide Sequence Number=SeqID_72955
atgaccgcgtcaaaaaaggtgtgccacgtcattcgatttcatatccttttccacttcctcctttcctctcttgctacagggaccaggaaaggggatactccgaaagggatccttctccacgaaggaagcgggccccgagcccccctactgatcagaggttcgaaggctggcccctcggaagggttcaacagccgcctcagagcactcgggctccgcgcccactactggtcagaggttcgaaggctagcccctcggaagggttcaatggccgactcaggccactcgggctccgcgcccactactgatcaggggttcgtaggctggcccccgaagggtttgacagtcgcctcagacgcagagcgagggatgaccctgggcgccataagaaactccgcctcgcccgaccctagggctcggactcgggctcggctccggaagacgacgaactccgcctcgcccgaccccagggctcagactcggactcggcctcggctctggaagacgacgaactccgcctcgcccgaccctagggctcggactcgggctcggccccagaagacgacgaactccgcctcgcccgaccccagggctcagactcgggctcggctctggaagacgacgaactccgcctcgcccaaccccagggctcggactcgggctcggctccagaagacgacgaactctgcctcgcccgaccccagggcttggactcggactcggcctcggctctggaagacgacgaactctgcctcgcccgacctcagggctcggactcgggctcggccccggaagacgacgaactccgcctcgcccgaccccagggctcggactcgggctcggccccggaagacgacgaactccgcctcgcccgaccctagggctcggactcggcctcggccccggaagacgacaaactccgcctcgcccgaccgcagggctcggacccagccttggcctcggacgacggtctccgcctcgcctgacccgaggctcggactcgacctcgaccttagaagacagactcgacctcgacctcggaggagcctccacctcgcccgacctagggctcggaccgaccacatcacaagaggggccatcattaccctacccctagctagctcaggctacggggaacaagaccgacatcccatctggctcgccccggtaaacaaataa

SEQ ID NO: 31177 - DNA, 2040 bp, Zea mays
  Peptide Sequence Number=SeqID_72956
atgaaagagtccgaccaactcacgacttctttcatcacaacttttggcatgtactgctacgttactatgccatttggtttgaggaatgcgggtgcgacgtaccaaaggtgcatgaaccacgtgttcggcgaacacattggtcgaacggtcgaggcttacgtcgatgacatcgtagtcaagacgaggaaagcctccgacctccttcccgaccttgaaacgacattccggtgtctcaaggcgaaaggcgtgaaactcaatcccgagaagtgcgtcttcggagtcccccgaggcatgctcttggggttcatcgtctccgagcggggcatcgaggccaacccggagaaaatcacggccatcaccaacatggggcccattaaggacttgaaaggcgtacagagggtcatgggatgccttgcgactctgagccgtttcatctcgcgcctcggcgaaagaggcctacctctgtaccggctcttaagaaagaccgagtgcttcacttggacctccgaggccgaggaagccctcgggaacctgaaggcgctccttacgaacgcgcccatcttggtgccccccgccgccggagaagccctcttgatctatgacgccgctaccactcaggtggtcagcgccgcgatcgtggttgagagacgagaagaaggacatgcattgcccgtccagaggccggtttacttcatcagtgaggtactgtccgagaccaagatccgctacccgcaaattcagaagctgctgtacgcggtgatcctgacgcggcggaagttgcgacactacttcgagtctcatctggtgactgtggtgtcatccttcgccctgggggagatcatccagtgccgagaggcctcgggtaggattgcaaagtgggcggtggaaatcatgggcgagacaatctcgttcgcccctcgaaaggccatcaagtcccaagtcttggcggactttgtggctgaatgggtcgacacccaactcccaacggcttcgatccaaccggaactctggatcatgttttttgatgggtcgctgatgaaaacagaggcaggcgcgggcctgctcttcatctcgcccctcaggaagcacctccgctacgtgttgcgcctccatttcccggcgtccaacaatgtggccgagtacgaggctctggtcaacgggttgcgcatcgccatcgagctaggggtccgacgcctcgatgctcgcggtgactcgcaacttgtcatcgaccaagtcatgaagaactcccactgccgcgacccgaagatggaagcctactgcgacgaggtttggtgcctagaagacaagttctacgggctcgagctcaaccacatcgcccgacgatacaacgagactacggacgagctggctaagatagcctcggggcggacaacggttcccccggacgtcttctcccgagacctacatcaacccttagtcaagaccgacgacacgcccgagcccgagagggcctcggctcagcccgaggcgccctcggctcagcccgagaaggcacctgggggctacacgcacctgctggtcgccatcgacaaattctccaagtggatcgaggtccgacccctaaacaacatcaggtccgaacaggcggtggcattcttcaccaacatcatccatcgcttcggggtcccgaactccatcatcaccgacaacggcacccagttcaccgacagaaagttcctggacttctgcgaggatcaccacatctgggtggactgggccgccatggctcaccccatgacgaatgggcaagtagagcgtgccaacgacatgattctgcaaggactcaagccgaggatctacaacgacctcaacaagttcggcaagctatggatgaaggagctccccttggtggtctggagtctgaggacaacgccgagccgagccatgggcttcacaccgttctttctagtctatggggccgaggccatcttgcccacagacttagaatacggttccctgagggcgagggcctacgacgaccgaagcaaccagaccgaccgagaagactcactggactag

SEQ ID NO: 31178 - DNA, 396 bp, Zea mays
  Peptide Sequence Number=SeqID_72957
atgctgggagaacaggtcgcggggccttcatggcagatgacgtggattcgcggcgggccgtcatctctcgattcacagaacatcgcagcggcaatcgatgacaggtatgttccaatgtttggggagaaagagtatgatccgaactgccagtacatgtatgttccaatgagacaccatatgaacttgtataatttgttgtgccaaaattttgattctagattggcagaatgctgccatcatgagagaatcagcttgctggcttatagcccaatggcaatgggtatactttcaggaaagtatcacttatctgataactgtggtccactagacgcaagaatgaatcttttcaaagggagatactctaaaggtgaatcccggtacaaactgcatttgtaa

SEQ ID NO: 31179 - DNA, 339 bp, Zea mays
  Peptide Sequence Number=SeqID_72958
atggtgccatggatcgcctatgagcaagctacgaaatggtccaagcccgatccatccttcaagaaacatgcaagattgctacggaatggtccaagcccgatccacctccgcggcagcggctccagcgccagacccagcgtcggctccagtggcgggctggccggctgccccaccgccgaagctcgtgctgcagggcacagccgtcatgtgcctcctcgcctctatcgcgacgcgccagcgagactgcaagcgtgggcggacgaggaggcttacacggatgcggaggcggggctgcctccccgtcggtcacccacgttctacagctccgtgttcacgtag

SEQ ID NO: 31180 - DNA, 972 bp, Zea mays
  Peptide Sequence Number=SeqID_72959
atggggcggcctggtggtgctctagctagggtggcgaggccgctgacgcccaggccggggccgaccaagctaggtgcacctagcctggcagaggctaggtcgccacctgtagagtattattcaacacctggaggatgcaaattcggtaaaacttgcaaatacctccaccgtgagggaaatggagggaaaacagaggttgaaaaagctgagctaaactttctaggtcttccactgcgaccaggtgaaaaggagtgcccatactatatgcgcactgggagctgcaaatttgcgactaactgcaagtttcaccacccagatcctactaatgcatcttcaaaagaaccagggttggaacatgagaatggcgatgtaccactgcaaaatgtccaaggatcctctcagcctagccttcagatgtggcctgaccagagagcattgaatgaacagcatgttccttttcttgctccagcaccgtcatacagtggagggatggttccacctcaaggaatgtatccatcttctgattggagtgggtatcatcaggtacctttgaatccatattaccctcccggtgttcctttcccgcattttccagctgcccatatgaatcacccgatgtacaaggctgcagatataccaggacatcaaccaccaccatctgatgagtatcccgagagacctggccaacctgaatgccagcatttcgttaagagcggtttctgtaaatacaggatgaaatgcagatatcaccatccaaggtcgcgccagtctgcaccaccaccagcaggtcttagccccatcggcttgcctatcaaacctgatcaacctgtgtgcacttactatggacgctatggcttctgcaagtatgggccagcctgcatgttcaaccaccccttcaacttcgggcctcccgtgccggcagcaggaccacccctccctgggcagtaccctacgcatggaaacttcgcctag

SEQ ID NO: 31181 - DNA, 642 bp, Zea mays
  Peptide Sequence Number=SeqID_72960
atggcggacgccgacgccaagtcccagccgcccgacgccgcggcatccccggatgcctcgatctcctccccctcctccctaggcggcggcggcggcgacgcggccgacgcggacgcgatcgagaagcagctcgccggcctgggcatcgccgtcgccggtgggttccccgagccatcgggatgggacgatggccccgtaccagtccccatcccggccgatgtccttgtcggcggtgatgagggtgccggcgagaagccgcgggcgccggcgccggcgccgactggggcggtggatgtgaaggtgcggttcccgcgccggcccggggagccggactgcagctactacctcaagttcggcacctgccgcttcgggatgaagtgcaagttcaaccaccctgcgaggaagaagaagactagtagggtgagaggcgtcgggagcaacggcagcgggagcaacagcagcagcaataaagcatcttctcctgatgatgatcaggttttccttcagcttttagcagcaatttgtgccaaatctctggcgaagaaaacattatatgtattttttgcttgccacaactatattgtggcaaactatggggacaatcccaacacactccaagtacgaaaggtctacatagtctaa

SEQ ID NO: 31182 - DNA, 765 bp, Zea mays
  Peptide Sequence Number=SeqID_72961
atggcgcttcctgttgacgtggcgggtctgtgccctaggcagggtgacgtgggggctcctccgaagccgaggttgagtctgtcttctgttgccgaggccgagtccgagccatggggtcgggcgaggcggaggtcgttcggccgaggccagggcggagtccgagccctggggtcgggcgaggcggagtttcgtcgttttccgggtcttagcccgagtccgagccttggggtcgggcgaggcggaggtcgttcggccgaggccagggcggattccgagccctggggtcgggccaggcggagtttcgtcgtcttccgggtcttagcccgagtccgagccctggggtcgggcggagcggagttcgccgtcttccgggtcttagcccgagtccgagccctggggtcgggcggagcggagttcgtcgtcttccgggtcttagcccgagtccgagccctggggtcgggcggagcggagttcgccgtcttccgggtcttagcccgagtccgagccctggggtcgggcggagcggagttcgccgtctttcggttcttagcccgagtccgagccctggggtcgggcggagcggagttcgccgtggcgcctttggcaaggcctgactgcctgtcagactcactctgtcgagtggcaccgcagtcggagtggcgcaggcggcgctgtccttctgtcagactgctttatgctgatgggggttaccagctgagaattaggcgtcttgagggtacccctaattatggtccccgacagtag

SEQ ID NO: 31183 - DNA, 222 bp, Zea mays
  Peptide Sequence Number=SeqID_72962
atggccaggagacctcccttggccctggccagagagaggctcgactttggatcgtttatacgaggtgtgcctgtaaacactgtgaaaatatgtgcacctctaattgctatgaattatgccatacttgacggtgtaaagaaccataaccgcgacggtggcgtgcaacattggccacaacagcacgccaaaatcatactctgtgtacgtttacaacaaaaatga

SEQ ID NO: 31184 - DNA, 207 bp, Zea mays
  Peptide Sequence Number=SeqID_72963
atggcgcccaagcagcgcccccatggcagggaacttgacaccgtccagctccagtctgagttccctgcgcccctctcctgcacggcgcccctccctacgagctccacctcccctgcaatggacgccgcgcagaagcttctccatggcgccccctgcaatctccccctttccttcctctgctcctccatgtttcaacgcctgaaataa

SEQ ID NO: 31185 - DNA, 594 bp, Zea mays
  Peptide Sequence Number=SeqID_72964
atgcagtggcctctctctctctctctctctctctctctctctctctctctctctctctctctctcgtgtaaggaccaaaacgcacaaagctgcaaaggcctgataggcgcgattcaggacaaggctccgtccactcaagggacacgatcccgcctcgcccgagcccagcctcgggcaaaggcaggcgacccagaaaacagcgtcgcctgccctgcttcgactattgtgccactcgacagagtgatgctgacagcagccaagtccagcctcgggcgccataggaagctccgcctcgcccgaccccagggttcggactcaacctcgacctcggacgacggactccgcctcgcccgaccccagggctcggactcagcctcgacctcggacgacggactcagcctcgacctcggacgacggactccgcctcgcccgaccctaggactcggactcagcctcgacctcggaagacggtctccgcctcgcccgacctcagggctcagactcgacctcgacctcggaggagcctccgcctcgcccgacctcgggctcggaccgaccacgtcacaggaggggccatcattaccctacccctaa

SEQ ID NO: 31186 - DNA, 363 bp, Zea mays
  Peptide Sequence Number=SeqID_72965
atggggcagagaactgatttcagtgaactgacagttaagcaatttctttccactgtagagattaacattgaagatcagttgattgtttggatgataggttttaagagatatgtggccatttttgttgagtttgccattgcaaacaatctggattatgatgtgatctctaatggggttgatctatatatagaggatcagtttgaagactatatccagtattatgaacctgcgaggctgggtatccctaggagatatggagagactccagggctgaggcatcatcctgctgttatcaataagattgccaaggtcactattcttcccaatggtggggataaaagcaagaacagagataagttctag

SEQ ID NO: 31187 - DNA, 141 bp, Zea mays
  Peptide Sequence Number=SeqID_72966
atggctcgggcaggtggtgacgggatggctcggctggcgcaaggggacagggacgcaaggcggcaactgtgctggtggagcccacctgtcagacggcgcgggcacggccccgctgggctggactgggccggtttgggctga

SEQ ID NO: 31188 - DNA, 294 bp, Zea mays
  Peptide Sequence Number=SeqID_72967
atgatcccctacccctgcccgtgccttgccaccactccatcgtcacagaaccgggaccccgacggagaaccgccgcggggcctcaccggcggtcgagccccagccggttcgccccctccctcgtccgaccacccaacgccgtcagcctcccctccctctggcacgtgggcccacgcccacggcgccgtccccgcgtcgttcccccgctggcgggccaagtgggccgcctgcccacgcggccgcgcgcgcccgcgctcggctgggccgaattctccccccggcccaactagctga

SEQ ID NO: 31189 - DNA, 762 bp, Zea mays
  Peptide Sequence Number=SeqID_72968
atgtacatggttcgtattcggtttgccttccaaaaccggggcaccccaaatgttggaggagatcctgacaaaggcgatgacggtggaagctcagaccacagtactgagcttttagaggggcaggagccagaaggatgggttgcccaacccatcagttgtgacaccgctcgcgattgtcacttccatgacactctcgacatcctgttgtgtcgagcttttgaccgacacacctggtcgattgagtaccgttgtgtagtctatcagtatagtcgcgggacgtacctgaatcattgggaggctacatgtctggtgcgttgtccggaggatgacctccagggtgcggagacctgcttagagctctatgctatctctaagaaggacactattgaggtggccatgcaggatgctgcacgacgtgcgctatcgcagtattgcttttgttcagtggggtggctgacagtcttaacctcagatagtacatggagcgtgattgtctcacccattggtgaaggcaatcctaggttgagcagcacagtcaacctagtcgatgtgctcaacagtgagcttgaccacgctcttgaccacctgggtagggctcgtgctgagatcgtagagctacgtgctgagcgcacggagagctatcaccaggaggatgcttctcccgcccccactgaggctcagcacccgtatcactcgccaccacatggacaccatgcttatgacacccctgactgtaggaccaagatagatctagatccttag

SEQ ID NO: 31190 - DNA, 179 bp, Zea mays
  Peptide Sequence Number=SeqID_72969
atgtcggggcgaggatctcctctggcagggaggcgccgcccggggaaggcgcgctatggagggtccccgagcagagaagcacctcgtctggccggcgtctgcggcagaacgctctcatgtggctgccacgggactgatagaggagaggagaggaggagcttatctcggctcgaacgatg

SEQ ID NO: 31191 - DNA, 207 bp, Zea mays
  Peptide Sequence Number=SeqID_72970
atggccggagccaccacgccggcatcaggcgccctcgtcaggctctgcctgccttcgctcctcctctttctgtaccggtgctgcagatgtgaggctgttgagatggagagaacccttgcgatgatcaagcccgatggtttgtcagtggtccagttcttgctatggttctggaaagacctgacgccgttgcgcaatggcgcactttga

SEQ ID NO: 31192 - DNA, 171 bp, Zea mays
  Peptide Sequence Number=SeqID_72971
atggcgatctggccaaggttgcttctctgcaaagactggacctcgggcgagccgaaggtagcgcgacgctggcatggcgacgcggccagggctacaggcagggaggcagcggcaaagggcaccttgttagacaagagtatttcaccgggtttatatttataccccttttga

SEQ ID NO: 31193 - DNA, 588 bp, Zea mays
  Peptide Sequence Number=SeqID_72972
atggcagcatatattaagagtttggacagaaagcatcttattacagtgggtactgaaggattttatggccctgggagaggtgagagactgggcgtaaatcctggagactgggcagcttcagtctgctctgactttatacagaactcagctgtcaaagatattgattttgcctcggttcacgcctatcctgatagctggctaccaaaggcaagtatggaagaaaaagtcaagtacctttctgtctgggttgattcacacttgaatgatagtgaatacgtcttgagaaagcctgtcttgtttacagaagtaggttacctccaacatgcagaagctaacagcacagttgatggagacattcttctaaaagttgtctatgataaactatacgattcggcaaaaaagctgcaagcaggaagtggcgctcttatttggcagttgatggtcgaaggcacgcagatgtaccatgatgacttctccatggtggcacgggatcgtccgtccacatataagctgatgaaggagcagtcatgccgactgcagagtctatatggaaaagagggagaccctacttggaaatgctcaccctaa

SEQ ID NO: 31194 - DNA, 597 bp, Zea mays
  Peptide Sequence Number=SeqID_72973
atgtggagggggacgcgcatgtacagcctcctaggcgtcctcctcctcctggccctggcctacctgaactggcatccaggccacggcccctccgccggcggccctggtgggttcaagctccccatgccgtggctgcagccgcggatgtccttcgtgggccgcgccggcacccacttcgtcgacaccctcactggcgcgccgatctacatcaacggctggaactcgtactggctcctctcggcccggtctccctcgttgtccgtcgagatgctgcgccgcggccgccgcatggggctgacgatatgccgcacatgggcattcagcgacggtggccccggcgcgctgcagatctccccaggccggtttagcgagcctgttttccagatgctggattatgtgatatacgagtcccgaagaaatcatgttagattgatcctatgccttgtcaacaatcttgataactttggagggaaggcccagtatgttcaatgggcacaagcagctggtgttaatgtcacaaattctacggattcctttttctttcacccaactattaaaggttactacatggagtatgtaaaggattatgcattgtaa

SEQ ID NO: 31195 - DNA, 106 bp, Zea mays
  Peptide Sequence Number=SeqID_72974
atggctgatataccagttttacattctacacatgttgcacatctttacccacaagatgtgttccctttgtcgcctcgggttgatcggacccttaaacactaccaag

SEQ ID NO: 31196 - DNA, 1290 bp, Zea mays
  Peptide Sequence Number=SeqID_72975
atgtctagtgggcctaccttggattatcttcacagaccaaagaaactgtttgatgttaggagtatttttgtaaaatggcacttggtgctaatgatagatctatgtcacgatccctgcttagggaacacaagaaggtttagctctgatccagaaacaactatgggacttgtacaacatgaaggaggtccttgtggtgttttagcaaccgtgcagaaaattgatgcagctttggaagatctttctgtcgaatcagcagtggatctgcagaaagttcttaaaacaagtacatttacttcaaggaaggatgcattcaacacccttttggctaacattcctttgtttcaaagtcgactgggagccatgctatttcttatttctgctttgctttcacgaggattggaagacatccaagcagacagggatgatccaagccagccattggtcactgctccatttggtcatgcttcacaggaaattgtgaatttattactctgtggagaggctgttccaaatgtatttgatggcaagatggaccttggtggtggcatgtccttgaagggcataccaaacaatgttgaagttggttttcttaccctcctggaatcactaaatctctgcaaggttggtcagtacttgaagtgcccaaagtggccgatatgggttgtgggaagtgaaagtcactacacagtcctttttgccttgaaccccaacgttcaagaggagaatgagctggaagagcgcgaatcaaaaataaggagggcttttgatgcccaagatcaaagtggaggtggaggctttatcagcgttgagggcttccaacaagtcctcagggatactgacataaattttccttcggataaactcgaggacctatgtaatgctggaattatagtatggagtgaattctggcaagcattgctacagttggataaaagggctggaggcatgaaggatccaactggtcttatgggcaagaagcaattcaccatcttccacttcaatggaattgccaagtctgtgccgaatgggaatgcaagtgcaggtggttcatgtcctatacagagacccaggttatgcaagctaaatgtcactgtccccccaaggtggactcaagatgagtatctggctgatgttgtaagcgcatcaaccagcagcagcaaggacgacagtattctttctctagctcccccaggtcagactaatcagcacgcaccattggtggactgcattaggacacggtggccacgagctgtttgtagctgggttggagatgttccaagcattgtctga

SEQ ID NO: 31197 - DNA, 1167 bp, Zea mays
  Peptide Sequence Number=SeqID_72976
atggccagtggcggcggcaacgcggcggcggacgccaagcacgtcgatgcggaggtcgtcatcgtgggcggcggcatcgcggggctggcgacggcgctggcgctccggcgggcgggcgcggcgcggcgcgtgctggtgctggagcgccacgcggggcatcgtgccaccggcgccgcgctcaccatcttccccaacggctggttcgcgctgcgcgcgctcggcgtcgcgcacaagctcgcctcccgctacgacgcctacgaaacatccagggtgaccaatctcgagaccggggcgacgcaggtgtttcgctttgccggcaacaagaacaagggcgaagaagtcagagtgagggcgcttgacaggaaggcgctgctggaggcgctcgcggaggagctgccgccgggcaccgtccgtttctcgtccaaggtcgtctccatcgacaccgagcgagcagccggcgactcgtcggtgaccgtcgtccttggattggacgacggcacggtgatccgagccaaggcaagtgaagtcactgccgcatgccacttcggtgccagtccttcagagctcagctcagacgcgcgcgtgctggtggtgcctgcgtttgcagagaaagaagccgccggggacccggtgaagaccctgctcgaggtgaccgacaacctggccaggcacatgccagcggagtacctggacgtggtgcgccactccgaccacggcaacctctcgtgggcgccgctcctgtaccgcaacccggtgtccgtcctcctgggccccgcggctcgcgggcccgtcacggtggccggcgacgcgttccatcccatgacgcccgacatggcgcagggcgggtgctccgcgctggaggacgcggtggtgctcgcccgggcgctgtcgcgtgaggcgacgccggccgagggcgtgtccgcgtacgtggcgcagcggcggtggcgcgctgcctggctggtcgccggagcctacctgtcggggtggatccagcagggcgggaccaacgtcggcggcgtgcgcggccgcctggtgaaggtgttccgggactggatcttctacaggttcgtgttcccccggctcgcggacaccatgtggttcgactgcggcgacctcacgccgccgccgcccacggcagcagtaggcaagagccaccacatcgagtga

SEQ ID NO: 31198 - DNA, 222 bp, Zea mays
  Peptide Sequence Number=SeqID_72977
atgtcgggtgaacatgccaagaaagaggtgcccactagggaaatgcccgattctttgggaaagaagcatgaagttaagactccatcaaaggaggccaagatatacggcgacaagaataaggaggacaaggaagaatccgctaactccatcaacttgcacaagacgaagggcgataagaagaaaaataagatgaagaaggtggtctactacgagactaactga

SEQ ID NO: 31199 - DNA, 273 bp, Zea mays
  Peptide Sequence Number=SeqID_72978
atggcgcagcctactacggccgctgggacgctgaccctggcgctccctacagatggtggtgccattgcaccaaagtcagcatcaaggttgtggtcctcgatttttgctggtgctcatgcgccctctccaaggagacaggagcatcctcgccggcacatctgtagtcgagctctgcccgcaagtcctctgtctatgtgccctcacagaggaggagttgaggtgctcgacaatctgaaccatcatgccgagcaggaaaacaggcgaaaaacctaa

SEQ ID NO: 31200 - DNA, 903 bp, Zea mays
  Peptide Sequence Number=SeqID_72979
gcaccagcggccagccggaggcccggacgactggactgccattctgccaaagccgtcgtcgccacagggaagcgccagtacgccgccgcgccgtcccagttgttccggcgagtggcgactatcagcttcagagcttccccaaatcagccactagaaagcaccatggatgtaaatcacatcactgagatggaggatggtttaaatgatgatgaaatggaatatccatttgagggtgatgctaatgccagtaacaatgatcagatagtagaggaccatgctgatgatgcccctattgctagtggtgagaatgccatcgtccaacagcaagttggtctgagaaagaagaagtacatgtatgtgaatgaccatcgtgttgtgaaacaacggaaactagtaccaacagtgacaattcccgctatgaacaaggataaaggtccaatgccaatgagtatctccaagatgaaaaccaagaagccaatcggtacccctactagcagcaagctaatggcatctgcattcaaggtcacatcaagcaagaatgaacttatggttttaatgcaaaaatcagctgaagttgtgcaacctgcaattgcaagtgctaccgctagtgcaaacgcaagtgcaagttcaagtgtaagggcaagtgcaagtgcaagcataccagcaagtgcccaagcaagtgtcggcgacgatgaaaaacaagtagatggccagattgggaaaagactcacttcatgggtctggcaacatttcacaaggtatgaaatagatgttgagcaacctgatggttccagtgttaagcaaaagtgggcaaaatgtcttcgatgttcacataaagctaaggctgatgcttcaaatgcactgttagacttcagcgggcagttccagttcacacggccatag

SEQ ID NO: 31201 - DNA, 261 bp, Zea mays
  Peptide Sequence Number=SeqID_72980
atgggaagctacgtgagaatgaagctaggaacaaaaggagtttatcatagagatttgaagcctcaaaacttgcttcttgactctcgtggaaacttgaaactttctgattttggacttagcacattgtctcaaaatataactgcagctcagtactcatgcccatattggttctctccaggagccaagtcattgatccagagaatacttgatccaaatccaagaactcctatagtgtgtgtgaaactctacgaatcaagctga

SEQ ID NO: 31202 - DNA, 378 bp, Zea mays
  Peptide Sequence Number=SeqID_72981
cgtatcactattgaagaaataagagaagacccatggtttaagaagaactacgtaactattagatgtggtgaagatgaaaatgtcagcctagacgatgttcaagctatttttgacaatattgaggacaagtatgtatcagacgaagtaacgcacaaggatggtggtcctcttatgatgaatgcctttgagatgattgcactatctcaaggtttggatctctcagcattgtttgataggcaacagtggaccattgcatggacatacttaggtgaccctgaacccaagaagcacaaccatgctgatgtctggcatccacatcacaagggaaaggacataggagattctagaaaccttggtaaacaaatcagcaagctgtaa

SEQ ID NO: 31203 - DNA, 222 bp, Zea mays
  Peptide Sequence Number=SeqID_72982
atgagagcacatgagcagcagaaaaaaagaagcctctacatcaaggaggaggatgccgaggcacgagcagagattaaggatgattcgatcgctatagcggagtgcctccgtgacctcaatcagcctttgggttgtggtgttcaaagctattcgtatggggttgtcgtggcccttagtgctgatttggtgatccgggataccgggaggattggaaaggattga

SEQ ID NO: 31204 - DNA, 336 bp, Zea mays
  Peptide Sequence Number=SeqID_72983
atgtcaccttcaaattggctccacggacacacgtacgattgtatccgcgcttggtccctggtccggcaagtgggttgcattcagcctcgcctgaccaccgccaccaaaaatgggatggagatcaaaagggaaatatctatcatgaagatcgtaagacatcccaacatagttaggcttaatgaggtgttggccggcaggacaaagatatacatagtcttggaacttgtcactggaggtgaactgtttgatagaatacaacaacctttgcacgagataaatatgccgctcaaatctggaagaaatgggtactccatgaacctagaaggttataggtga

SEQ ID NO: 31205 - DNA, 419 bp, Zea mays
  Peptide Sequence Number=SeqID_72984
gtggttatgagattgatggttttggttatgactatggtgctggcgaagatgaagccgtggaaggagacttccaggagttccaagactacgacgagttctatgtgtgggttagcggcaacccccagtcggctgcctgtgaaggccgcggcacacggggccaagcccaaggccgcgccggggcacgcgaggcgggcgcgcgcacgccgggcgccatgggcaaggggcggacgcgccacgccgcgccgtggcggccgctgcgtagggagggaccgaacggggtggggagctgggccgcgggcgaggccgcgcgggcacaccatgccaaggccgcgcgccacggccgcgccgaggacaggacacgagggcgggcgagtctgggcctggctgctcgcaacgtctggctaggtcaggccgagtga

SEQ ID NO: 31206 - DNA, 507 bp, Zea mays
  Peptide Sequence Number=SeqID_72985
atgacgccgcccgtctccgcggcaaggtcctgtcggaggcgggggctcggccccggcgaagacccagggtactgggggaaaggactcgagcgcactcagtgcgacatggcagactcaaccgtgggcacaacaccggcgcgggggcaccagagggcacagactgcgactgcgcgaacttgctctggcaagcaatcgcgcgaaggacagggcaacaaacagggaaataagggcatgggggatagctcacctcgagaggaaactctggaatactggagcaatgccggggacgcgggatgcctcgggtcgacggcgtcggggcttcggctgcacgggggaaacgacggtgagcgcggactgggcaaaacaaagagactgggggcaaaccagaaggtttcccgcgttgttggcgaaggggcagagctcaccaaggcaacagacgtagcagacgctcgacaacggccacataacggcggcgagtctttggtggagctccacgggcgcgtgtag

SEQ ID NO: 31207 - DNA, 186 bp, Zea mays
  Peptide Sequence Number=SeqID_72986
atgggcgttcacggtgacccagggcggtctagttcaatcagaggggtcaaggagcttgaggaggacttaaggatgctagaactaatgactagagagcttgaactaacctggagcaagctggccacggcaaggtgtttctacgggcaaactcctcctaatttggaagttacaaagcttcaaagttga

SEQ ID NO: 31208 - DNA, 237 bp, Zea mays
  Peptide Sequence Number=SeqID_72987
atgggagtatatgatgctatgaaattttgcaaagctgatgtgtcaactgtttgctttggattggcggcttcaatgggtgcatttttacttgctgctgggacaaagggtaagaggtactgcatgccaaatgcgaggattatgatccatcagccatcaggtggcgctggcgggaaaggctggtttgatgataagggaattgtatgggatccatgggacatgaaatcccttgctatttaa

SEQ ID NO: 31209 - DNA, 315 bp, Zea mays
  Peptide Sequence Number=SeqID_72988
atgagggtgggcctggagcttcactatgttcccacggaagtgattgtggacacgcctaggcgtattggcgactgggcgcaatggaattgctcatcgaagttgatccccaccgtgaatccacccatcgttgtggactacccatctgctacctccaccatagcaccggtcagaatgaaggttggagaatcgaagtacagggatgaccgtcaccggcgagtcctccaccgcgtgaacgagcggcaccaccagggatctcggtcggatgatggagataaagcattgtccgtcgatccggtggcgggcggtggggattag

SEQ ID NO: 31210 - DNA, 327 bp, Zea mays
  Peptide Sequence Number=SeqID_72989
atgaacgtatgtgagctcactcttgctgtctcacaccccccacaggtcaagaacagcttcaccgacagcatcgtcgaaggctcgaagcaactgtcaacgcacaagccgagcaagattgaagaccctgatcccggccttgcttgcaagttaaaggatacaactgcactatactccctccagatcctaaaacacgtcgttaaagcatccttcctgtcataccaagtcaacttcatgataagttgccggtactggggacaacaacaaccagcagcggatgcaggagagcgttggttgaatcgaagctactgctactcgtatctcgcatga

SEQ ID NO: 31211 - DNA, 837 bp, Zea mays
  Peptide Sequence Number=SeqID_72990
atggcagctacttaccaaactggccttgtggccgagccacagttgctgaacactgaaattatcactcgaagggccacctactttgttgctgacactaacagaaaagacaaatgcgtcggctacttggatgtgtttgtacaccaggcacgcgacatccacaatgtttgtgtctatcacaagcaggatgtgaatgcaaagctgtgcctcacgagcagccctgatattttgtgctcaaccaaggtgatcagtcgtgctgggcgcaacccagtatttgaatgttgtcctcatatcatcacccaaaagtccccatcaacagtggatgattctggaaatgatcatgtggttcctgctcaacttgagaagattgtgttcccagacctaaatgtggagaaggaagatgagatcatggtctcaaagtatctcgagatgacttcagactccgaaacccctataaaagttgagaacgacatgtcgctgcattctacaaatgatgatgttccttctaaacttgaaaagatcaagttcatagattcgggaaggacgagcgcggtgtgtcctgacggtgctggaagcagatggtggccaccggcgcgtgcgggttcctgcagggactggtggcctccgatgttgtcgcgcggcggggtggcggcgttgctagccgcctgcgcctacagcaccccggcagcgcagaccgcgacggccggggtgctgcggaacctcgtcgtgttcccggatctcctcccggcgttccgcgatgagggcgcgctgcctatgctcctacaactggtctccctcggcacgccgcgcgcgcaggagctggcgctggcctgcctctag

SEQ ID NO: 31212 - DNA, 225 bp, Zea mays
  Peptide Sequence Number=SeqID_72991
atgtatggtttacaggtggtgatgaggatgatggttatgattatgactatggtactgctagtccactacagccaaacgggacattttgctgagtatgttgatgtgtactcacccttgctttacacatcaaaccccccaggttgtccacgttgcaaccactgctcaggtgaagatgaagtcgtggaggaggacttccaggagttccaagagtacgatgagttctag

SEQ ID NO: 31213 - DNA, 1299 bp, Zea mays
  Peptide Sequence Number=SeqID_72992
atggacgggctcctgtcgaagctccgcagcctggacgcgtaccccaaggtgaacgaggacttctacagccgcaccctctccggcggcatcatcacgctcgtctcctctgctgtcatgctcctcctcttcgtctccgagctccgattatatctccatgcagttactgagacaacactaagggttgatacttcaaggggagaaacacttcgcataaattttgatgtcacctttccagcccttcaatgttctataattagcctggatgcaatggacatcagtggacaggagcacctagatgtgaaacatgatgtattcaagcagcgaattgatgcccatggcaatgttattgcgactaggcaagatgtagttggtgggatgaagacccaccaggtcgggtccttaggtacttgtggattcaaaagctcaagaaaagcatcaccctatgctggtcaaagaacagcagtagatgctattcgtacagtgggtttgcaacagaagctatggtcctgcatacctgatctcctcaggaagattgcggaagaatgcagaatgtgggggatggctggaccgctggagcttcgaaacttcaggagttcctggtctggtcccagtttggaaatgcttaatgcttggttgatctccctgttctgggtgtttggtttgaggaatgagttgtctgatgatcaatgttgtaacacatgtgaagatgttcgtgaagcctacaggaaaaaagggtggggtgtatcgaatccagatttgcttgaccagtgcaaaagggagggctttcttcaaagtataaaggacgaagaaggcgaaggatgcaatatttatggttttattgaagttaataaggttgctgggaatttccattttgctccagggaaaagtttccagcagtcaaatgtgcacgttcatgacttgctcccgttccagaaggacagcttcaatgtcagtcataagataaacagactaagttttggagaatactttccaggtgttgttaatccacttgatggggcaaattgggtgcagcattcatcatatggaatgtatcaatacttcatcaaggcactaaagcaggtagatgtagggctgggaaaattgaaaaccaaatctgcccacaaggatgtgctatggtttcttcctcctggtcacaaaaaggagaagcctgagtggggcaagcctcttttagcaagtcggtttgccatccaacaacgattattggtcacaaaaaggtacatatctgccgggaacaaagatgatgaaaagcaccaagcagccactcgaagacctcactga

SEQ ID NO: 31214 - DNA, 153 bp, Zea mays
  Peptide Sequence Number=SeqID_72993
atgactctgctcgctcgcagcctcgaagacagtattgttcaatgcgaggtggcacttggctacgccctggtcatcacagtggtcggagattaccttgacgacccggaggtggccatcaagtccctcgtctccgttcggtttgaggtcgtataa

SEQ ID NO: 31215 - DNA, 939 bp, Zea mays
  Peptide Sequence Number=SeqID_72994
atgatgcatctggacggcgtcgacgacgagctcggcgatggcgactgcgccccctctaccgcgcgctttgagctccaggaggatccttccttctggaaggacaacaatgtgcaggttgtgatccgtatccgacccctgagcggcagtgagatatcgcttcaggggcagaagcggtgcgtcaggcaggatagtagcaagggccagtgccttgcatggactggaaatcccgagtcccgcttcactttcgatctcgtcgcggacgaacatgtctcgcaggaggatatgttcaaagttgctggggtgcccatggtggagaactgtatagctggctataacagctgcatgtttgcttacgggcaggaaaaggaattaagaatagatgaaacgctcaggtttacatgtaaatgctcttttctggagatttataatgagcagattctggatctcctcaaccccaattctgtaaacttgcagataagggaggattccagaaagggtgtccatgttgagagtttgacggaacatgaaatctccaatgctcgagaagctctgcaacaacttattgagggagcagcaaaccggaaggtagcagccaccaatatgaaccatgcaagtagccgctctcatagtgttttcacgtgccttataaaaagtaagtgggagtcaaaaggtatcaactaccaccgcttttctcgactcaaccttgttgaccttgcaggctcagagagacttgtcattacgaacctaattgctgtgtcaaacaaaaagtcacagcatgttccgtacagagattcaaaattaacattcctccttcaggattcccttggaggaaattcaaaaacgaccataattgcaaacataagcccatccagctgttgtgctgctgagacattaagcacattgaaattcgcacaacgagctaaatacataaggaacaat

SEQ ID NO: 31216 - DNA, 420 bp, Zea mays
  Peptide Sequence Number=SeqID_72995
atgggcaagaacaacaagcgcaagcgtgagccgactcctccatcagaggactttggtgattcggagtactcagaggaggagttctcctctgagtctgaggggtctccggctcccatccccctgcgtgagtcgtctgatgattcagacgactcccaggggcttgcggcgaaggtctggacttacatccgggccgtcgagcgctccgggctcgagggctcggatgagtcggagtactcctcggatgaggaggactcgtccgaggaggacggtggcggcgatggcgaggacgacgacgacgacggcggtggcggcgatgatggtgacggcggcggcaggggcggtagcagcggcagcaaggatggcgacggcggcagcggcggcggcggcagcagcaagggcagcaacaaggccagtggctaa

SEQ ID NO: 31217 - DNA, 1665 bp, Zea mays
  Peptide Sequence Number=SeqID_72996
atggactacgtggtcgcccggatgcaattgcaacaagcagcagtgccgccgcctgttcactccatcgccgaccaccgtcctccgcctgtgtcgcagaggacgcggggcagcgcgacgatgcaacgacagcggcgtgaggcactcgaacaggaggtggcagagctgaagcagcagctatccaacgagcagacggtgcaccagatcctggagcgcgccctgcagcccagcagctccatggccctcgccaacatccccgccttcatccccaccaaggccaaggagctgctcgcggagctgctgctggtggaggaagagatcgccaggctggaggaccagataaaaaggatgaagaagtccgccgccacgcagcagcagcagcagcagcagacggagcactgcaagtccatgttcttcatcagccaggccatggacggcgaggcgtacctcagcacggtggtgaacaacaagaggcattccctggcgtcgtcgtcagatgggcatgcggtgttggagaagaagatcgcccagcacgagctgcccatcaccaagaagagccccacggtgatagcaaagaggagggcgagagaccagcagcagccgcccaacaagctgtcggagaggatcctcaagtgcctggtgtgcatcttcatgcggctgctccggtcgtcccgggcgtccgagtccgccgcgggcaacctcggcggcttcaggatggacatggggctcgtcaacgtggctgcagctgcggcggccaaggagaaggagaggggccagcaggatcactacggcatcttcggcatccaggactccatggtgagggacatcgggccctacaagaacctcgtcaggttcaccacctcggctggctccggctccggctccggctccggctccctggacctccacctcctcagcagagggttctcggcgtcgcccctggtaagcaaactgagggagatgctggaggcgctgcagcaggtggatgtgcgctccttgaatcaccaccagaggctggcgttctggctcaacatctacaacacatgcatcatgcacggcattctgcagcatggtttgccctcaaactcggacaagttactcgcactcaagaacaaggcaacaatcaacgtgtcagggcaaactttcaatgcgttggtgattgagaattttatcttgaggcagccgtcaagtgtgaaacagcatatgcatgaacgaataatccagcaggagttgtggcaatgcgacgtggatgtggaagaagaacaggcggtgagggaggtttatgggctcaagacttcagaacccaacattctctttgcactctgctgcggcatcagatcatcgccagcacttcgcatctacaaagcagatcgtgttcttgtggatctggacaaggcaaagcttgagtacctgcaggcatcgctggtggtgacatccaccaggaggctcatgatcccaagcctcctccactccaacatgcatgactttgcaaaggacacggagtcgctgcttcgatggatctgcgagcagctgcccacgtcctggtccatcaggaaatccatggtggattgcctcgccgccattaccaacaacaacaacaagctggaggaggtggtcgtggatgtcattcccttggactacgacttccaatacctgctgcccatgtga

SEQ ID NO: 31218 - DNA, 369 bp, Zea mays
  Peptide Sequence Number=SeqID_72997
atggtagaggagcggccacgcgatgctctgaagactgacgacgttggaggccatggcgtgctccacgacttcagatgggtgatggccatggatgggaaaggtcatgggagcagccgtgagggagttgaggctgcagaagggagcaggggcggtcgacgctgggggctagggcgagcgtgtccaccaggcagagggcaggagcgagctcaacgacggcgtggagaaggggctagagcagaggcgaggaggagccatggacaagcaccagcgagcacagggagccacgggcgtgagctggagggagcaggcgcgcgccgctgggagaagaacggcggctccaggaaaatcagcggaggagataagggatga

SEQ ID NO: 31219 - DNA, 573 bp, Zea mays
  Peptide Sequence Number=SeqID_72998
atgtggcttcctcctctgaggaagacgagcatgccatggttgtattgcctcacaacgagatttgttcttaacacttgcaagcgcttgaaggagaagaagtcgtaccttgtctggaatgctgttggctgccttggtgtcactgctgtcaatgatcttgttagagaggtggaggctattcagaagtgtggtgggcagactattgctgatggaagccgctttcgcactggtggtggaattctctggaacatcttaaagtcgcgggaacccaaggcttacaaggaaataatggcaaagggaaaggaacttgagaagcagtttaggtgtacgaaacgaccacagattagcagaaacgaagatgcaagttcacagggcagtgctttaattgatgatgaaattgaagcgcgagaccaaaaggaaacattggatgaccctaagcaattggatgatgtggagatacacgtatcagacaataaagctcaacgcaaaccactggcggacagaattcgcgctcctgttgcatatgatgatctgtttgaagagggggagatacacgacggagaaccacgtagttag

SEQ ID NO: 31220 - DNA, 171 bp, Zea mays
  Peptide Sequence Number=SeqID_72999
atggaggtcatggtcaccatgttgctgctagtgttcaccatgtgcggtctctcattaatgtctaagacatgtttcattggccatactactcttaaagtaaagcttgttatgctgatggatgaatgcaatctgaataagctcatttattttatggctcacgacgtcacataa

SEQ ID NO: 31221 - DNA, 468 bp, Zea mays
  Peptide Sequence Number=SeqID_73000
atgccccctagccccacaaccgtcatccacgtgccatccaagcatgcgctcgcgattcctggatccgccatccttccatcggtgccgatgatgtggcagtcgccgtccgctcccccctacggcacctgtgtggcacaacaagccaccgcccaggaatctgcaatccaccccctccccccattgccagtgatgtggcagcggtcgtccacttctccagcaactgctggagatctcggtccgttggagatcttggtcgtggagagctacacgaaccacgcccacttcgcgaacctgctagcgtacgagcagagtcagggccaatgttttaagatgaatacagagttagcagagctcttaggcatgatttctcttaagggctcatttggtgctaagggatcccaagaggattcatggggtaggagttcccttggactgcaaagatctattggaggcgatttaactgggtga

SEQ ID NO: 31222 - DNA, 279 bp, Zea mays
  Peptide Sequence Number=SeqID_73001
atgccaactaacggcccgggatttacgaagctccacgaccgggcctcaggaaatgcacacaaaaataaaaagcccagcattgaagcatgtggtcatttttggggggcttttgttattttatttattggtttaagtgagatgttcacttgtgatgtggaatttgctccgataccagctgtggcagaaccacccgaattattccagcttaagtgcctaagtcacgcctcaggggtcgcaacacacttaaatcggaataacccgtcagtcactcagatctag

SEQ ID NO: 31223 - DNA, 204 bp, Zea mays
  Peptide Sequence Number=SeqID_73002
atgtcgagtccccaacactatagtggtcaggtgtgtgcgatgagctttgtgaactacgaaggggcgcctattcgagtttcgctttggtcagaggatgatagtgaccttgaaggccttcagggtttcttacagctggtgtgtcgatcgtgtggaaaaacacgtcggatgacttcgtacgacagagagatattgcatgaggactaa

SEQ ID NO: 31224 - DNA, 243 bp, Zea mays
  Peptide Sequence Number=SeqID_73003
atgggtgcattcgtccattgcagcgccccgtctacttttgacgttgttcccctaggagaagtgattcataatctggaggccgttgggagaatcgccaaatgggccctcgagctaatgggatatgggatttactatgtctcgtggacaacaatcaaatctgttggtgcaagtgatgaaagactcagtatgtcgcaatcccaagatggcaacatactgcaaggaggtatgacgcctcgaggatag

SEQ ID NO: 31225 - DNA, 335 bp, Zea mays
  Peptide Sequence Number=SeqID_73004
atgatgacagaagccccagggttgaccgggcccgggaatccccccgcaccaccccccatgagcagatcgatatcatccgcagaggtggaccgcttcgcgggaggtgcgggctcccctccatcgtcgtcctcgtcggcccaatcgccggtcaggtcgaccccaggtcgccgaactcatcgtcttcctccatcgcggtgggatccgaggaggtggaggatgcgaggcggcggcggctggatggaccgacccatgctgcctccttccccgtcgaggactacctcgtcgccacatgccacctaagcccggtgcaggcgctcaaggccaaggagatctag

SEQ ID NO: 31226 - DNA, 2349 bp, Zea mays
  Peptide Sequence Number=SeqID_73005
atgggaatcaaggcaagaagaagtgatggttcactagcttttaagggtgtattagacggcaaactttatttagttgattttgcaaaagaagaggccggtctagatgcatgcttaatggctaagacttgcatgggctggctgtggcatcgccgcttagcacatgtggggatgaagaacctccacaagcttctaaagggagaacacgtgataggtctaaccaatgttcatttcgaaaaagatagaccttgtgcagcttgtcaagcagggaaacaggataagtctgaaacccaagggaccctcaagcgcttcctcaggagagctcaaaatgagtttgagctcaaggtgaagaagataaggagcgacaacgggtccgagttcaagaaccttcaagtggaggagttccttgaggaggaagggatcaagcacgagttctccgctccctacacaccacagcaaaatggtgtggtagagaggaagaacaggacgctaatcgatatggcgaggacgatgcttggagaattcaagacccccgagtgtttctggtcggaagccgtgaacacggcttgccacgccatcaacagggtctaccttcatcgcctcctcaagaagacgtcctatgagcttctaaccggtaacaaacccaatgtatcttactttcgtgtatttgggagcaaatgctacattctagtgaagaagggtagaaattctaagtttgctcccaaagctgtagaagggtttttgttaggttatgactcaaatacaaaggcgtatagagtcttcaacaaatcatcgggtttggttgaagtctctagcgacgttgtatttgatgagactaatggctctccaagagagcaagttgttgactgtgatgatgtagatgaagaagatgttccgacggcagctatacgaaccatggcgattggagaagtgcggccacaggaacaagatgaacaaaatcaaccttcttcctcaacaacggtgaaccccccaactcaagacgatgaacaggttcatcaaaaggaggcgtgtgatcaagggggagcacaagatgatcacgtgatggaggaagaagcgcaaccggcacctccaacccaagttcgagcggtgattcaaagggatcatcccgtcgaccaaattttgggtgatattagcaagggagtaactactcgatctcgattagttaatttttgtgagcattactcctttgtctcttctattgagcctttcagggtagaagaggccttgctagatccggactgggtgttagccatgcaggaggaactcaacaacttcaagcgcaatgaagtttggacactggtgcctcgtcccaagcaaaatgttgtgggaaccaagtgggtgttccgcaacaaacaggacgagcacggggtggtgacgaggaacaaggctcgacttgtggcaaaaggttatgcccaagtcgcaggtttggactttgaggagacgtttgctcctgtggctaggctagagtcaattcacatcttgctagcatatgccgctcaccattctttcaggttgtaccaaatggatgtgaagagcgctttcctcaacgggccgatcaaggaggaggtgtacgtggagcaaccccctggcttcgaggatgaacggtaccccgaccacgtgtgtaagctctctaaggcgctctatggacttaagcaagccccaagagcatggtatgaatgccttagagactttctaattgttaatgctttcaaggttgggaaagccgatccaactctttttactaagacatgtgatggtgatttgtttgtgtgccaaatttatgtcgatgacataatatttggttctactaaccaaaagtcttgtgaagagtttagcagggtgatgacgcagaaattcgagatgttgatgatgggcgagtcgaactacttccttgggttccaagtgaagcaactcaaggacggcaccttcatctcccaaacgaagtacacgcaagatctgctaaagcggtttgggatgaaggacgccaagcccgcaaagactccgatgggaaccgacggacacaccgacctcaacaaaagagattccgactatgctggatgtaaggtcgataggaagagtacatcagggacgtgccaattcttaggaaggtccctggtgtcgtggaactctaagaaacaaacctccgttgccctatccaccgctgaggccgagtatgttgccgcaggacaatgttgcgcgcaactactttggatgaggcaaaccctccgggactttggctacaatctgagcaaagtccactcctatgtgataatgagagtgctacccgcatggcggaaaatcctgttgaacacagccgcacaaagcacatag

SEQ ID NO: 31227 - DNA, 384 bp, Zea mays
  Peptide Sequence Number=SeqID_73006
atgggcaagagcaagaaaggtagcggttcttcacaccattctggcgacaaacgcaagcgcgagccgactcctccctcggaggacttcggcgactcggagtactcggaggaggagttctcctccgggtccgagggatctccggctcccgggattgccgcggaggtctggacctacatccgggccgtcgagcgcgccgggctcgaaggctcggatgagtcggagtactcctcggacgaggaggattccttggactcgtccgaggagggcagcggcggcgatggtggtgatgacggcgatgacggcggcgatggcaatggcggcggcaatagcggcaggggtggtgaggacggcgacagcaagggcagcgacaaggccagtggctag

SEQ ID NO: 31228 - DNA, 1671 bp, Zea mays
  Peptide Sequence Number=SeqID_73007
atggatgctcgattaggatgcttgtctgtccacctggatactccacaatgcttttctgcagaaatatatgcagttgatctaaatgtttctggagcacaagaagatctcaaggacagcccgcgtgcagcggccaagagggtgtcgccggcgtcgtggcggctggacaccgccgcggcggaggcggagacgggcgcggggggagcggcggctaaggggccgagggtctgcttcaggccgccggatgtgatggagacggtgcacgaggtggccatttacatccaccgcttccacaacctcgatctgttccagcaaggatggtatcagatgaagattagtgcactgtgggaggaaggtggcaacagaacaccggcttcgcctgccagggtcgtgcaatatgaagcttctgatgttggtggagacgatgcattaggcatttggaaaatagatgatattgataatagcttccacacacagccgttccggatcaagtatgccagacaagatatctatctgtcggttatggtgtctttcaacatattcaacagtgaagaggagggtccagcagcttcagatgtgatgatgaagtttgagctgatatatgccccaacactagacaatgggtctgagcttcatgcttctagtgccacatcttcagcagctgtgcacgaatttaggatcccacacagagcacttctgggtctacactcatactgtcctgttcactttgatgcgttccactctgtgcttgttgatctgacattgcacatagtgtacctgaaagctggtgcagctaaatcatcactgaaggtaccagagcaaggtttacgtcctacatcatatcacattgttaaggcattattaacttctagaaaaatgttgcttgaagaactgaacaaaatcagtggtgctattggtaagacagtagaggatttagatgttgctgacttgaatcttggtaaatatgagtcatttaatccatcaaaatcttggctaccgaattctagtaaagtgttccccgaaactggcaaaggtgtgggacagttggctggaattttacatgacttcttggagagtatgagtgatgactcaccccaccgttattctcttagagtttctggctcaaggaagttccatgatgaccatgtacagagctctgcttcacgggcggaactacacaggaaaagcatagcacaaatgaagattaatccacattatgttcaagatatgcatatatatggtgatccttcacgtgttcctgttgttcttatagaacaacatgtcatggttgttccacagcatagttccagcaaggatatggcttcaaatgtttctgaacaaaaggatactattgtggtaccgaaactacaaggagagcctctggatggctacgtaccatatcattcagcgagaatcgagctctgcccagctgcatcatcggacacgtcaaagaagggccaagtcttcacagaaatgctgaacaactgcttggaccagatccgcacgccctcgtccgacacccggacattcatgcgctgcgacgtgaatttcgaccagtccaaccaagggcgaagcctgaacaccatgattggcagagcggcccacatcgagttcctggaaaccgacctctacgccaagttcatcatgtggtcctttcccgacctgttccgatga

SEQ ID NO: 31229 - DNA, 1304 bp, Zea mays
  Peptide Sequence Number=SeqID_73008
gcgagagagacgagatccgctccggaccggcggcgagaaggatcgccggaggccgggcgatgccggtgacggaccaccagagctcatctccctcgcccttctccttcggacgctcgctgctctcgctgcgcagggaccccaccgccatgccgtcgggcgaggaggccgacctcgaggcgttccagcgccacgtggcgtcgacgctcgcggagcttctgcccgcggcggaggccggggtcggtggtagcgacgccaccgccggggcgggcgaggagttcctctccgccgcgtggatccgccgcctgctcgaggccttcgtgctgtgccaggaggagttccgcgtcttcgtcgcccaggcgcgccgccgtgctggggcgctgcccgcggcggccgagaagacggtcgccgagttccacgagcgcgccgtcaaggcgctcgacgtctgcaacgccgcgcgcgacggtgttgaccaggtgcgccgctgggagcggctcgccgacatcgccgcctccgcgctgcgggcgccgggggaggtccacgagggccagctccgccgcgcgcgcaaggcgctcaccgacgtcgccgcgctcctcgtcgacgacaccgccgcgtccggcgccggcggcgtcgcctccttcctgtcctcccaccgcaaccgctccttcggccgcgcgcgcgcctccccgtcgcgcagcgccggcgccagcgccagcgcctcagcctcagcctcccacttccgctccctctcctggagcgtgtcccgcacatggtccgccgcgcgccagctgcaggccattggggccggcctggccgcgccgcgcgcgcacgagccgggcctcgccgcccccgtctactccatgggctgcgtgctgcacctcaccgcgtgggcgctcgtcgtcgccgtcccgtgcccggaccgcggcaacgcgctacaggcccatcacctgccgggcgcgccgccgcgcgccacgttcccgtgggcgccgcccctcctcaccctgcaagaacgcctcaccgaggagggcaagcgcaaggacaggcgccattcctgtggcctgctcaaggagatccattcgctcgagaggtccacgcagaggctcgccgaggcgatcgacgcagccccgatcccgctcttcggcgacagggaggccgacgtgcgggaggctgccgcggagctcgctgccgtgtgtgaagccatgagggacggcctggagccgctggaaaggctgctgcgcgaggtgttccaccgcattgtgcgcagccgtgtcgatggcctcgattcatccatgcacaacgccgactga

SEQ ID NO: 31230 - DNA, 216 bp, Zea mays
  Peptide Sequence Number=SeqID_73009
atgccgtccttgtctgtttgttatgctcgtgcgagtgctgccttgaccgttgaaaaaacagtgctggttgatctttttttttcctcagcaccgggtcaagggctcaaggcgacgaacagtgggagcctggtcatcgtgccgccgacctccggtgactttggtgatgtgacagcgagctggtgccctgtctgtctgtcgccgccagcggaaacgtga

SEQ ID NO: 31231 - DNA, 195 bp, Zea mays
  Peptide Sequence Number=SeqID_73010
atggtgccgccgggggatgttgctgggcggctcaccgtgcactgctggcttctctgccgcgtccaggctcatgggattgaagaaacgttagcaccgttagatcggcacggggcggtccagatcgggtgtccacactgtgggaagcctgagtctgggaaatatttcgagttagcccctgcgtttctctgtttatga

SEQ ID NO: 31232 - DNA, 666 bp, Zea mays
  Peptide Sequence Number=SeqID_73011
atggagtacagctccagcgacacggccgtctgcaccgtggccgcggccgcggccgcggcgtcgtcgtcacctccgtcgtcgccacagccacagccacagccggcggcggtggtgctgagcccgtgcgctgcgtgcaagatcctccgccgccgctgcgtcgaccgctgcgtgctggcgccatacttcccgcccacggagccgcacaagttcgcgaccgcgcaccgggtcttcggcgccagcaacatcatcaagctcctccaggagctgccggaggagcaccgcgccgacgccgtgagcagcatggtgtacgaggcggcggcgcgcatccgggaccccgtgtacggctgcgccggcgccatctgccagctgcagaagcaggccaacgagctcaaggcgcagctggcgcgcgcgcacgccgagctcgcctgcgcccgcgcccagcacgcgcacctcctcgcgctcctctgcgtcgaggtcgccgccgccgccgactcctcctcctactccgcctcgcaccaccagatagccgtcgtcgccgccaaccccatggtggccgtggcagccgccgacgcgcaggcagccgacgcgctctatgtcgtcgacggcgccggtgccgcctgcctgcagatgcaggccagctggggcgacgaggcgctctggacatga

SEQ ID NO: 31233 - DNA, 666 bp, Zea mays
  Peptide Sequence Number=SeqID_73012
atgctgcggctgcgctggcgtgccgtcctccccccactcccactccctccgctgcctggcttgcttcgccgcctgcctccgcaccggcgcgccctctcgtcctcttccggctctatcccgcttccaccgccggtgatggaggcttcctacaagtttgggccctacaaaatcgacgccagggaggtcttccacgccacgcccctctcctacgccatggtgaatctccgcccgctgctcccgggccactgtctattgattgctcactgcagtatagttcatgaaactttacttacctttgtgttggttctcttctttttagacctgcgtgaagtgaaaagattcgccgatctaagttctgatgagattagtgacttatgggttactgcaaaggaagttggtgcacgtcttgagcagtaccacaaagcatcttcacttacctttgctatccaggatggtcctcaagctggccaaacagttgcacatgtccacatccacctcatcccaaggaagaaaggggattttgagaaaaatgatgaaatatatgatgcgattgatgtgaaggagaaagaattgaaggagaagcttgacctggacatcgagaggaaagataggagcatggaagagatggctaatgaggccaatgagtaccgtgctctttttagttag

SEQ ID NO: 31234 - DNA, 2454 bp, Zea mays
  Peptide Sequence Number=SeqID_73013
atggctgcaaccaaaggtggtgacagaaatcgttcccttttcgactcatcttcttctccgattccaattcgcagtgagcaaacacgtgttgtgctgacgagcgctgcgtacgtccacttgaagcaagcagatatttctaagtacaccaggaaccttgctccagccagccgtacaatcctgctgtcaggtcctgcagagctctaccagcagatgcttgccagggcgcttgcccactattttcaagcaaagttgctcttgctagatcctactgatttccttataaagatccatagcaaatatggcacaggtggcagcacagagaagacggttaaaagatcaatctccgagacgacgcttgaacgtgtgtcgggattgcttggatctctttctattcttccacaaaaggaacagcccaaaggaactatacgtagacaaagcagcatgatggatgtcaaattaaggagttctgagagtatgagcaacttaacaaagctcagaagaaatgcatctacttcctctgatatgagtagcatggcttcgcaaggaccttcaactagtacagctcctcttaggcggtcaagcagttggacttttgatgagaaaattttagtgcaagcattgtacaaggttctgctttcagtgtcaaagaagtacccagttgtactctatataagagatgttgagaagttccttcacaagtccccaaaaatgtatctcctgtttgagaaactactaaacaagcttgaaggtccagtgttaatcctcggatcaaggattgtagatatgaacagtgatgaggaatcggatgacagattgactgttctgttcccatataatatagaaatcaagccacctgaaaatgaaaaccaccttgtaagttggaactcccaattagaagaagacatgaagatgattcagtttcaagataaccgaaatcatattatggaagtgcttgcagaaaatgatcttgaatgtgatgatttaggttcgatttgcctatctgatactatgtgccttagcaagtatatagaggaaattgtggtgtctgcagtttcgtatcacttgatgaataacaaagatccagagtatcgaaatgggaaattagttctatccacaaagagcttgtcccatgcattggaaatttttcaaggcaacaagataagtgataaggacagcatgaaattggaagcgacagatgacgccttaaagatgcctaatttcctgggtattctcgtttcacttgtctggaaacatttaaaaagtgctgctgaaaaggcaactgctccaaccactgcaaaatcagaaacaaaatcagcaacatcactgccacctgctcgggctccggctgctgctgctgctgctcccgctagtgcccctgctcctagaattgagagcaaaacagaacttgaaaagaaggataatccacctccagttgcaaaagcaccggaagtaacacccgataatgagtttgaaaagcgtattagaccagaagtgatacctgctaatgaaattggagtttcatttgatgatattggtgccttggatgatatcaaagaatcccttcaagagcttgtcatgcttcctctaagacggcctgacctcttcaaaggcggtcttcttaaaccctgcagaggtatattactttttggtcctccaggaacaggcaagactatgcttgccaaggctatagcaaatgaagctcaagcaagttttataaatgtctctatgtcaactatcacatcgaagtggtttggtgaagacgaaaagaatgtccgagcattgttcacgttagcggctaaagtatcaccaaccatcattttcgtcgatgaagttgatagcatgcttgggcagcggaacagagctggagagcatgaggcaatgaggaagatcaagaatgaatttatgacacactgggatggcctcttgtcaagaccggatcagagaattcttgttcttgctgcaaccaaccggcctttcgatcttgatgaggctataatccgtaggttcgagcgaagaatcatggtaggtctgccatcgatgggaagtcgggaactcataatgcggcgacttctgtcaaaggagaaagttgatgaagggctggacttcaaggagctagcaaccatgacagaaggatatagtggaagtgatctcaagaacctgtgcacgacggcagcgtatcgccctgtgagagagctaatccagaaggaaagaaagaaggagctggagaagctgaagtgtgagaaaggagaaactccgtcggatcctccgaagaaggaaaaggaggagaccatcattctaaggccgctgaacatgacagatctgaaagaagcaaagaaccaggtggctgcaagtttcgctgctgaaggcgccataatgagcgagctgaggcaatggaacgagttgtacggtgaaggcggctccagaaagaagcagcagttgacatacttcctctga

SEQ ID NO: 31235 - DNA, 675 bp, Zea mays
  Peptide Sequence Number=SeqID_73014
atgaaccagtacgtcaacaacaggttcagcaaccagtacaaggccaccatcggcgcggatttcctcaccaaggaggtccagatcgacgaccgcctcttcacactgcagctgggctcagagcctgaatcgacaaccatcgccttctatcgtgtgggttgcttattggagatgccgagtggttccagtccacaccgtgccacgctgggttcagttcacactgtaactcctctgatatgggatacggcaggacaggagcggtttcaaagtcttggtgtggcattttataggggagctgactgctgtgttcttgtatatgatgtcaacgtatccaagtcatttgaaaagctcaacaactggcgtgaggaattcctaattcaagccagcccatcagacccagagaatttcccatttgttgtgcttggtaacaagatcgatgttgatggtggtaacagccggactgtttctgagaagaaggctaaagcatggtgtgcttcaaagggaaacatcccctactttgagacgtcggctaaagagggcttcaatgtagaggctgcatttgagtgtatagcgaggaatgctgtaaaaaatgagccagaagaagatatgtatcttcctgatacgattgatgttgggggcgctggaaggcaacagcgttcgtcaggttgtgaatgctag

SEQ ID NO: 31236 - DNA, 453 bp, Zea mays
  Peptide Sequence Number=SeqID_73015
atggacatcacaaagaaagtgccattccgggctctgcttgaggaaaaaacagaaaagctgggagaagaatgggaaagaggtacttgttcccatgttgctttgcatgctttcgctaatcataatgatagggaagatgagaccaaggacatgcaagaagaggagattcaccggttctacacccatcttaacaaagaagacaaagtgctcttgatgaagttgttgagaaggaacaaggaacaaggcgagatgcttctcagactagaggagactctcatcaagaccaacaacagcctagagaaggtgaccaaagtacatgaggagctaaggagctctcatgatgacttggtccaatgctatgattcgattttaattgagcaaagaaataatgaacatgctttatcttgtgtttctcaatttaaagtcgaaaatgccatgctcaagagtcaagtataa

SEQ ID NO: 31237 - DNA, 1740 bp, Zea mays
  Peptide Sequence Number=SeqID_73016
atgaagagggttgggcagggaagggagaagcagagtctcagccgcgcggagaccatcggagaggcatgcaggcatgaattagggccagcagattctcatgggatcaaggttatagataggcacagatgccaaggtccgtttcaggtgcgccaagttcgtgaagcagacgtattgaagcagaaggcttatatgttattttatgtacgtaacagtattgggaagtcggtggtgtgcaaagataataatgctgctaatttgctcaagaagaaaacctctgaaaaaatctcaagtttgaatggtattgcacaaaccaatgtaagagcacaaaatttgaatggtgtgtctccatttggtgataagacgcacggcacaatcattggctactctacaatttccagcaagactaaaacaatccactgttcaaagaatgaggtcaaagctgaagatgctccagcctctcaaaacaatgctctaccttccacacaagcccccatagctcgaaatgatgttggtatcttgccaactaaaccaatgcagtttgctgtaaaaaatgaggagaaaacctcatcccaccaacctgcgccatttacaaatacttgtggtgaacaaacagttgttgggaggcccttgcaggaaatggaacctaaggctggtgcaggggaaaatacttctgttgtctctgctgttgctaatgatgccgctacattgtccaaggcagacaaactaacttctcagcctcaaacagctccatcttccaagccaactgccaatgtaaaggacacagctactgagtttgctacactgtctttatcaaagaaggattctgttgtttcaaatggtgctgtgcttagcattggatgtctcacatccggtgagaaagcaatgaacttatcagaatctgtggatcaagctaatgaaatcacaaaggcacttcctacgagtcagaacaatactgcaccagtaattgctcaagcagattgtggagtagagatcagctctggtgtcatcatgcacgttgctgtgtctgcttcatgcaatggaactacagagaaaaaggtgaattcgaagtcaaagaagtttgtgaggtatcctgttgtgaacatgtggttagggtccagacatctaaagccagggaagaaagcgaaccgcaagagaagtaaaatgataagacgtgttgtagcctgcaaggacgcggcaaatttatcttgtttgagtgagcagctgacgtcaacatcgtccactgcatgctctgaaaccgtagaatgtacctccagccatcagaaacggtcacatgctagtgcaaggtccaaagatgacgcccagtcctcgcaaaacaagcagaaggtcgacggagctcgtgtcggtgctggcacaagtgcaccttcttgcagtgccggcgttccaaagtctgatccgaacccttccacagatgctaaggttgtagcgacccagcctgccagtattcgcgcaacggacctgatggaagctaccgttccgcgctgggatgacgtagacatgccaaacataaaggtcgctgagccgcagtccaaacgcaagagcggtggctacatcttagatgagtgggacgaggagtacgaccgagggaagacgaagaaggtgcggaggtcaaagcaagactttggcgggccaaacccgttccaggaggaggcggactacgtatcgcagcggaggacgaagcagaaatcctaccgaggcaagtcttggaacaagcgggcctaa

SEQ ID NO: 31238 - DNA, 534 bp, Zea mays
  Peptide Sequence Number=SeqID_73017
atggcgggggtttcgatggcggcggcgcctgagggggtgctgcaccgccggattgagtttcatcttgcacggagaccgcatggctctgtggcggtgggcggcggcgggttccggatggagacgctgaacccggacgccgctggtaaggtggggcccggggaggcggtcgggagcagcgagggggatgcgaggaggccggagaagggagacagtggcgggatcgatccggagctcagcgtcgcaaggatctacctcgggagaattttacttgatgtctcacagggtgctggattggaaaatcttgggaatacctgctatctcaactcagttctgcaatgcttgacgtacacggagccgttcgctgcctatttgcagagcgggaagcacacgtcctcatgcacctttcagtcacagtggactaacagcagggctgatagagcatcctctgatgattctgcagaaactgttgaagatcgggcaccgaacattggccatccaaatgtgccctttgtacctgatgactccttgagttaa

SEQ ID NO: 31239 - DNA, 672 bp, Zea mays
  Peptide Sequence Number=SeqID_73018
atgtttcgcctcaatccagtgactggagaagatgttatgttcagcaccattggtggaagtcaatctagtgtggagatcaatgttctccaaggagaaagagagatcgtgaagacagcaagtctcttgatcaaagtcaagttcgatattgatgctaacggtatcctttctgtcaccgctgtgaacaagggtactgggaagaagcaggatatcaaaattactggtgctagcaatctgccaaaggacgaggtggataggatggttggcgaagctgggaagttcacagaagaggacaagcagaaggcacgcaacatagaagctactgaagaaaatgctattgctgctgagagtaacacaggaaccatcacaaatgttgttgaagaaaaaatccctaatgaagaaattattttaggcactatctcttttaacatggcaaacaacagtgttaaggaggaaaagatgtataacgaagaagtgaacaagggcctagtcagaggtaaggatgaaagcacgggtgcagaccctgtttcacacgagaccaatctggcacaaaccagcgatggtgctgatgaagagatgatcacagagcctgctgttgacactgggcaagaggagcatctaagggaaaatcacgatgaaagtggaatattggcattcatatttgcagcctgttga

SEQ ID NO: 31240 - DNA, 1206 bp, Zea mays
  Peptide Sequence Number=SeqID_73019
agaataattggcaaaaaaaaagagtacaaccgagcacacctggcgcgcgccgcgagcggggtggacgagcagccgtcgccgcggtcgctgctgtcgcgtatcctgctgcgtggcggcggcgacggcgggagtggcgggggaggagggttcgggtgccgggtgcggctgccgcggcggtacggcggcgggctgagggaggaacggaaggatggcgccgagcagggagagactccccgggttaaggtcgtcgagccgccgccgccgccgctgccagagctgcccctcgagacgccgcggagttcgctagggaggaagaagcccgaggaggagctggtgtccatgaacctgggcctgggcgcgagcctggtgctcctgctgtccaagagcgccgtggagctgaacaagatggtggagctgcgcgcgcagatggaggccctggtgtcggagatcaggcaagcgtcgcggtacagggaggaggaggagaagcaggcggcgagccaccctacttctgctgctgctgctgccgtcgctggtcccgccacgtcgcaggaatccgacggcggcagtagcgccaccaccaccgccgtgaaggacccgatcgcgttccccgcggccgacgccgacgccgacgccgcgtccaactgctcccgcacggcggtggtgatggacctcatggaggcggagctccaggccgagctgagccgcatgcagcagcagcgtgggcgcggcggtacggtggtgcacggccacggcggcgacagccggatcgccccgacgcgaggactcgagttgccgctgctgaaggtgaagacgaagggcgacgcccccgacagcgcgtcgcgcagctgcgtggactacgacggcggtggctgcgacaagcacgacgataatgatgaagtggacggcgagggcgaagaggacgacgacggcgatgaggaggaggaggaggatgacgtggagtacggcgaggacaggatgagtcccccgcacggcggcgtgtcggcgcgcgcgctggagcggcggctccacgagctgctgcagaagcggcagcaggaccggatcgtggagctggagtcggcgctggacagcgcgcagcggcggctccacgagaaggagcgcgaggtggtgtggtggcgcgacgccgccaagctcgtctcccaccgccgcgacgagtcgcgccggattgccaccgccagtgccaggtag

SEQ ID NO: 31241 - DNA, 303 bp, Zea mays
  Peptide Sequence Number=SeqID_73020
atggtgctgccctccgccgtgggcgggtgtctgcatggcaaaaacatgcaatgctcagctttaaccatctcctttggtaagccttacacttcacatgagctcccacctttggaagtcaaatccggtcgtatgcccacggatgtggaggtgtatatgcaagggcataggggttctgattctcagaatcttgatgttttatggactcagacaaccaccgatcatctagcttcgtatgggcaggactacgattggaggagccagccaatcgaccctcagacagcatatgctagcacaggaggataa

SEQ ID NO: 31242 - DNA, 792 bp, Zea mays
  Peptide Sequence Number=SeqID_73021
atgcgggccacccggacagtcccgatggtgtaccggacagtcactgttcactgtccgatgtgccttctgactcctgctctgacttctgcgcgcgcagacgtgcactgtagtgattcattgttcctttgcatacgaccgttggcgtggtatagccgttactccgctggcacaccggacagtccggtgctacacccggacagtccggtgaattatagtggagtggctcctagaattcctgaaggtggcaagtttggagttgatctccctggtgcaccagacactgtcatgtggtgcaccggacagtccggtgtaagcctatttccctttcaattgcgtcgaatgggaaacgaggacggcattgcgacgggcgggcgggagctgcctattcccaatgctatcggcaagaggccttcttcaccccaacaggatatgcctaatgggttgctggacaggcctctccgaggagctcccccccccacgtcttctatcatgtcccacgagtctacgcctttgaaagtctacttcaggaagaacttgaagcatcagcagcagcatgatcaattggctcagaatggatctgatgccaaagatgaaggactcactaggagatcacgcaaggaggattttatcaacaacatttgcagaaggccttctggtatgggtagggatggcaatggatgtgatttatctccatactcgcgggaaaaaaacctgttgggcacggatttgggtacgagcatgtacccgtggatacggatacgggtagcatttgatattcttggatatttttag

SEQ ID NO: 31243 - DNA, 699 bp, Zea mays
  Peptide Sequence Number=SeqID_73022
atgcttcggcgccactttcacaaggccgggccacccgcggagggtggcagggctcgcgacgacgataagaaggaagatcaccagacaggagagttccccgaggtccgcgactgcttcatgatctacggtgggcaagcggcgaacgcctcgactcatcaccacaagcaagagcgtcgggaggtatgttcggtaaaggtggcggcgccagtctacctagactggtccgacaagcccatcaccttcgaccaagccgaccaccccgaccgcgtgctgagcccggggaaatacctgctcgtgtcgaccccgtcatcggcaacggagaccctcacgttcgaggtggtcgggttccgaggaacctaccacgcagtgctggggaggccatgctacgccaagttcatggtcgtccccaactacacctacctcaagctcaagatgccgggacccaacggggtcatcaccgtcggccccacgtaccggcacgcgtacgaatgcgatgtggagtgcgtggagtacgccgaggccctcgccgaatccgaggccctcatcgccgacctggagagcctctccaaggaggctccagacgtgaagcgccatgccgacaatttcgagccagcagagacggtcaaatccgtccctctcgaccccagcaatgacgcctccaaggagatacggatcggctccaagctcgaccccaaatag

SEQ ID NO: 31244 - DNA, 1761 bp, Zea mays
  Peptide Sequence Number=SeqID_73023
atgacgaattcatcatcaactccaccacgatcggtatcagtggcaatccagcaacgtctgctgggcgcagccgtatccggcaactccgcggaaatgaaacacatggccctgcgagccccgggggtgctgctggggaccactcctcaggggaacacctgcctccacatcgcctgcatctatggccacgagaggttctgcagggacgtcctggcgctgacgacgaacagccagcagtctccggcggcggcgcctcttctcgtgaccatcaacgcggatggcgagacgccgctgctcgccgccgtggccagcggccacgtctccgtggccttgtttatcctcgggcgctgtcgggaggagcggctgagcgaggcgatcctgacgcaggacaagcgcgggttcaacgcgctgcaccacgccatccgcaacgggcaccgggggctcgccctccagctggtcgacgcggagcccggcctgtcgaaagccgtgaacaaacacgacgagtcgcccttgttcatcgcggtgatgaggaactacgcggacgtcgcggagaaactgctggagatccccgattctgctcacgtgggagcgtatggctacaatgctctgcatgctgccgtgagaagtggcaatccagttgtggcaaaaaggatcatggagacacgtcctgagctggcaagacaagaagacaagcacaaggcgaccccaatgcacatggctgtgcactgggataagattgacgtgctgagagtgctgctggagcatgactggtccttagggtacgtactcgactccagtggtatccctattcttgcttcagttgcgagtcgaggatacgttggtgctgcccaagagcttctcaggcattgcccagatgctccctatgcccctacaaatggcctgttgacatgccttcaccaagccgttcagggtggtcacatggagcttctagaattcttcctgcggtcaaagcatctacggaagctagtcaacatgcgagacggagcggaagagactcctctgcacgacgccgtccgaaagtgcaatcccaagatagtcaatgctttgctgcagcatccggacaccgacgtcacagtgcttaaccggtcgggtaacccggctacctggctactacggggcgaccacgccaagactttaaactggaatgaagtctccatgcttatgttgaaagctgatcctgatgcagcaaacgatacatataaccttcataagcaaatcaaggatcgagtaacttctgaatcaaggaaggatataaagttattgactcaaacatacacaagcaacacttcattagtggcaatcctcattgcaacaatcacctttgctgctgcttttaccttgcctggaggatacgacaatgatgctggaagtgaggggctacccatcatgtcaagaaaggttgcctttcaggcatttttgatctctgactgcttggcaatgtgctcctcactggctgttgccttcatatccatactagcaagatgggaagattttgagtttttagtttactacagatcgtttactaagaaacttatgtgggttagctacgtagcaaccaccatagcatttgcaaccggtctatacacagttttagcccctcgcctcctatggttggctataacaatttgccttatgtcagttctactgccatttcttacttggttactaggtgaatggcctgtcttgaagcttagatttcacctgggcaaaacattcaagtctgagctccttgatatggtctga

SEQ ID NO: 31245 - DNA, 351 bp, Zea mays
  Peptide Sequence Number=SeqID_73024
atggcaaccgagaccgaatccttctattccgcccagtcatcgccagagccagaggtggctcccatggcgcctaacgtcgaaccagcatcccagccggcggaaccagcagcaccccagccagtagaaccagcatcccagccggcggaaccagcagcccggccggcggatagattggaaatcctgattgagcttactcaacgaactggtcttgatggaggggcttcttctgcaacttcctcggcctccgcggaccgaacattatctaagcaagtcttcaccctccgcgctgatactctgggcccgccccacgcgctccgcctcaacgtcgtgccctgtgtgccccacgcctag

SEQ ID NO: 31246 - DNA, 1695 bp, Zea mays
  Peptide Sequence Number=SeqID_73025
atggcaaccgagaccgaatccttctattccgcccagtcatcgccagagccggaggtggctcccatggcgcctaacgtggaaccagcatcccagccggcgaaaccagcagcacctcagccagtagaaccagcatcccagccggcggaaccagcagcccggccggcggatagattggaaatcctgattgagcgagggctcggccaacgtagagagggcgagagcagcatgatgaccatcttccgtgtccccgcccatgtccgggacgccagcaaggagctgtacgagccacggctggtgtcgatcggcccctactaccgcgaccgggcggcgctacgcacgatggagcagcacaagtggaggtacatgcgcgagctgatgaggcggccgcactcgctacccccgctggacagttacgtcagagcagtccgcaacgtcgagcaggaggcgcggtgctgctacagtgagaggaccgacatcttcggctccaccgcccagagcgaaccatctggcggcggggagatcgaagaagcgcactcccccggcttcgcggagatgctcatgcttgacggctgtttcatcctcgagttcttcctgaagtggcataaatctgagaaggacaagctctgcgacgtcgcctggggacttactctgctgcactccgacctgctgctgctggagaaccagatccccttcttcgtcctagaggcgctcttgcacgtggtatatcctacggcgacgaggttgcatctcttcatgctgatcattccctatttaaagttctcctactacaaactgtcgacgcccgaggacctggaccgatccgagatccagccgcaacacctgctgcatctcttctacgaggccatcatgccgggggacgatgagacggcctcggcccaccaggattcgacgccgtcatggatggtccagctgcgtgagatgatcatcaggttgaagaaggccgcgtccacaaggttcgtcttcatccgcgacatgccgcgagtgccgcactggatgaagacgactctgccggccacccttctccgtaaggtcggcgcctggttcagcaaactcttgtccttgatccggagcacatcggcggactccactcctactctggtggtgccgtctgtcacccagctccgcgaggctggcgtccggttcgagaagaaggagtctccccgccacatgttcgacatagcgttcgacaggaatacgggcgtcctggagatgccgcaaatggagctcgactacgcgaacaaggcgctgctcgtgaacctcgtcgcgttcgagcagaccagagacctgccaggcgcggccaagcggctgtcgagctatgtggcgctggtgggcgccctggtgaggacaggtaaggacgtggagcacctgcagaagcacgacatcattcagaacctcctcgacggcgacgatgaggcggccacaaatttcttccagcacttgggcgactgcagcagcttggactacaaaaaccacatgttcgctgacatgttcaaggaactcagagatttctacgactcgagctggcagagacacagggccaagttcctccgtgaccactgcagcagcccatgggcggtgcttgcgctcgtcgtcgccatttgtgggttttgcttcgttctcttcaagctgtcaaccaccatcttcaaccttgctcatcctgattgtcactgctag

SEQ ID NO: 31247 - DNA, 216 bp, Zea mays
  Peptide Sequence Number=SeqID_73026
atggcaccggggggaggggctgcgggcatcacgccgggggagggggaggggggcgcggccatcgcggcgtcggggaggagggacaatcgcggcgctgacacgggatctgcgcgcttgggactggagaggatcgcggaggggagagagggcagaaccgtgcaccacatggatgtgtacgtctacactactgtcttaaaaagtagtatagatatatga

SEQ ID NO: 31248 - DNA, 420 bp, Zea mays
  Peptide Sequence Number=SeqID_73027
atgaggcatccgcgccgcgcgagcctctggcccggcaccggtgcggcgtcactggaggccgagggcggcacgagacgggcgtcgccgtcggtggtgctgcaaacatctcttattgtcctcaggcacaacaaggtcagctgcacagctggtgatgccaacgtagatcatcccattagattcggtatgcctgccactgcatactcggagctgctcgacaggagagccatcagtggcgctgcaaacatctcctatcgtcctcgggcacatcaagcatggctggaggcgggcattagcggcgacttcccacttgattcgttgtataataaatactgtgagaggatgctggtgtttcataagataatcgtgcagctcatgaaaatccaggatattgtaacagcagccgagttcttcttgctttga

SEQ ID NO: 31249 - DNA, 216 bp, Zea mays
  Peptide Sequence Number=SeqID_73028
atggtggcagacagtttcgagctatgggggccgaagcgaggaaggaatggggcctacaccctgctttatattgctccagatgagccggttcaggggtggatgaacgaacttgtgagattcccgccgatgtactctggagagctcaggctcaagctttggaaagccaatgttgcaaatcacattcttcactatggttgcctcctccaagttgggtag

SEQ ID NO: 31250 - DNA, 513 bp, Zea mays
  Peptide Sequence Number=SeqID_73029
atgaagggaattcttactcaaagcggcaactcctgcgaaggttatccagaaggagcaaagaaaagaaactctaagaagtgcctcggcttcgtctcatggagctacatagatactagagatctgactagcatgttactgactatgaagggaaaaaatgaagaggaagctgcggttaagactttagctcctgtggcgccaagagtttttggaaccccatcatctgaggagggcaacgagagcccaagcctaaggctggatgtcgaagggattgctggcacacctttgccaaaaatgaaaaaggctcctgagcctaagaaagcagttaaagaaccaccgaaggccatagagctaggagtcaaagcaatatctccttctgaaagggaatcaagagaagagattgatttttatattcgacacattgccgatggggagcttaacgttgaggttgtggccaatatgaaggatcacaccgaagcctcgggtatcctgctagggcaactatcttcgcgctga

SEQ ID NO: 31251 - DNA, 798 bp, Zea mays
  Peptide Sequence Number=SeqID_73030
atggagattggagaccttgtccaggaaccttcaaattcctcccctggccctatctctccatccgcgcgctctgctctccctgcccgcaccccgcagatcccgaatggccatgcctaccgccgcctgcaggtcggggccggatgcactgcaagctgcggccccgagcaccgggctgaactgaagaggcatctgatggctggggtttataaatggaaactggcatcttataaacagatggaacgtacgaaagttgcatcagagaggttgtcattaagatctaatagcaccaagcatcacgatactgtacatcttggtcttggtcattttgggaaggatggcaatctcatttgtcgttcacttaagtcaatattaaaaccaaaggcaagacagtatgctattgtcaaggtacataataaagatgttgacgagggttgcagctccaaagacaatgagattatttctagtccatctgataggaaagaaggaagtcagctgagggcactggaatcttatttttctaaattcaatccctctcagcagttatactctttgcctcagaagaagcacaaaagtggtccatcatcgtcaaatgaagttgatgcaatcattgctgatgaggatgctaatttgaagaacagggcagactctttgcaggtacagattgacagaggacacacaggtatcaagagtaatcaaaatactcccaacgaggtttacaaggagtacttgatatttgatgaaaaaagtctcctggacatgcatacagatgatcaagcgtctggtttctgtttgacataa

SEQ ID NO: 31252 - DNA, 447 bp, Zea mays
  Peptide Sequence Number=SeqID_73031
atgacggtggcagctcaagccacaatacctagctttctgaggagcaggagcctgaaggatggatcgcctgaaaccatcacccatgacgccgctcgcagttttcactttcacgacgctcacgacaccctgttgcgccgggctttagaccaatacacctggtcgatcgagtatagttgtgtagtctaccagcatagtcgcaatcctaggatcagcagcacagtcaacctagacattgtgctcaacactgagctggaccacactattgacgagttgagtagagctcgtgctgagatcgcagagttgcgggctgagcacgtaaagtgccatcaccaggaggatggttttcctgcccccaccgggactcagcacccgtaccgctcaccactacgtggacactatgcttatggcactcctgactataggacaaacatagatatggatccttag

SEQ ID NO: 31253 - DNA, 225 bp, Zea mays
  Peptide Sequence Number=SeqID_73032
atggcctcggaacctctaggcttgtggaataggggcacgggaagcgcgcgcacatggctcaacggatcggatgactcgaaggaggaggtttcctcggaggaggaggactcctcggactccgaggagggtggcaacgacgagggtgacggtgacggcagcggcgacgacgatggcaaaggcggcggcgaaggcaccgacggcgactgcgatgacgccggtggctag

SEQ ID NO: 31254 - DNA, 852 bp, Zea mays
  Peptide Sequence Number=SeqID_73033
atggcgaagtttcagaatatgcatgattcaagacagctcatggctgctgctaaccttgccaataaccagagcaacaccaaactaatggggaccaaagaagaagcaagtgcttctgcgaccaaccagactcctggtgtcggagccatcggcaataatgctcttcagcatgccacacctctaaacagctaccagaatatgctcagaagctccagtgcaaatccagtcttgctgcagcaggaggcatcgagtgtcttcaaaggtcctacagcaatgcacagtggcatacagctggaagcagccagatccttccgtggacctaaccaagtgcagttccaacaccctgcggcgattcagcagcagcagcctatgccgcagcagagcaatttccagggctttggtggtgttaacccacagtaccagcaccatgtgcttaatcagcttctgcaggaagttaagaacaataaccacgtgaaagcacagcaactgcctccagatgcacctaaagcgagcggcggtcttgcaccaggagttgctattcccaacgttgctgctgctggggagcagggacagcatatcaacagtaatacccgtgaccataacggcgcggtgaagggtgctgctccagctggtactggcccaagcaatgtgatcaacaacacagccagcatgccccccggcagaaacaacagcttcaagtcggtgagcagcagtccagctgctgctaccggtggcattgcggtgaactcgaaggtcgacgactccttccatcaactggaggacctcgacctcgacggcttgatcacaaacgaactgatggagagcgggttgttcggcgccggacaagggtggtga

SEQ ID NO: 31255 - DNA, 447 bp, Zea mays
  Peptide Sequence Number=SeqID_73034
atggcaggcctgctacaacacgctagtacatcaggccaggcctgcgaggacgttgtcgtggcactcaccctcaagatagccgctggtggctccgccaaacatactttaacttatagcctctcctttgatccaatcctggatccaccactggaagtcagtgctctggatgacgcattgaaatcagagatgccagacagcagatgcttgttccccctgtggagagagagcatcccagcggccattaaccattcctgtcgtgatcatggtcacaattgcgctcaagacatgtcttggtctttaccttctgaagactctgagtcaccgctgatcgtgctaacaagccacatgcccacattgtctgaggtgagctgtcatcatcgcattagacctttggcagatggaattgtgcttcgtcgcacgtttcattatatacagataagtacatga

SEQ ID NO: 31256 - DNA, 1629 bp, Zea mays
  Peptide Sequence Number=SeqID_73035
atgctcagggcgggcagcacgcaccggtggagccccggcgcccgcgccttctccacggcgccggctacgcggaccaccgtgccgctcgcgcacctggctgatctcccggcgtctctgccagaatcgggctacaccgtcacgccgcctgtccaaccctggccgcgccgcctcacggcgcggtcgctgtcccgtctcctcctcggcgcggccacgcccgagctcgcggtcctcgccctccgccacgcgctcttccacgccgcgcatcctctgccgccctcgctccccgtcttcgccgcggccctctcccgcctctcccacgccgacgctggcgccgcggcccgccacctgccccccgtcctctccctgctccgcgcctcccgcctcccggccttctccgaccgcccgttcctgccgctcctccgcgcgctgcggccgctcccgtccctccgccttttcctctccctcccgtccttcaactcccgtccttccacccgctcctttaacgcgctcctccactctctcgtctccgcgcgccgcctccgcctcgccgccgcgctcttccgcgccgcgccaaccaagttgtacatcacgccgaaccttgtgtcctgcaacatcctgctcaagggccttgttggcatcggtgacctcaactctgcgctgaaggtgctcgacgaaatgattggctgggggatcgtcccagatgtcgtcacttacaccacggttctcactgcctactgtgccaaaggggatctcgagggtgcacagcagctctttgacgatattattgccagcgggcgtaggccagatgctactatgtacacagtgctcatagatgggtactgccaccataggaagttgcaagatgcagcaaggatcatggatgagatgggagctgctggggtgcagccaaatgaggttacatactctgtggtgattgaagcgtgctgcaaggagagaaaatccacagaggcgcgtgatttgacaagggagatgctaggggcaggatatgtaccggacacaccactgtgtgctaaggtggttgatgtgctatgccaggatggaaaggcaggagaggcgaatgagatgtggagacagatggtgaagaagagcgtccctccagataacactgtcgtcagcacattgatctactggttatgtaagaaaggaatggttcaggaggcgaggaagctatttgatgagctcgagagggggttcttgcctagcttgctgacgtataactcgcttattataggattatgtgagaatggagagttacaggaggctggtagggtgtgggatgacatggtcgaacggcggtatgaaccaaatgcaatgacttatgaggccttgatcaagggtttctgcaaaataggcaaatcaaatgaaggttatgcgctatttaaggagatgatgtccagagggtgcactccaagcaagtttctttatcaagcgttggttgatagcctttctaagccaagtcatgatgatactgtttgcactattgttgaagctgcagctttacgtggtcaggatttcttggatggccattcatgggaaatatttatcaaaaaaatggtagatacaaatgaaacttggaaaaagtatctggatttggtgctaaatatgtag

SEQ ID NO: 31257 - DNA, 381 bp, Zea mays
  Peptide Sequence Number=SeqID_73036
atggtgatcaacacaaagacacatgtgatatgtttcccgaggttcaactcgaagactccgacgttggaggctatcagacagtctggtgcctcaccggaccagtccggtgccctagctccaataatgtcattttacatgctctatgcgaacttggtccggatagccaccgagacggtccggtgcgcaagcagcgaaatggccaagtctgcccccctgctcggatggtctgctagcttagaaggaagcccagacaactctacaaggacttgctgcactgcaccagtcagtgatccttggaccagccacgagtttggagcacgcatacagggacacaaagtgttgaaagcaatgtgggaagatctgaagcggccatccctttga

SEQ ID NO: 31258 - DNA, 495 bp, Zea mays
  Peptide Sequence Number=SeqID_73037
atggagtggctctacgtgcaatggaccacgagcgcaggaacagcagaggcagggatgcgcgagatccggtacgcgcgggaaaggaccacggccaagaatgcgctcgaggaagacgacggcctgcacccagtgcgcgcggggacgaccggaccagctcgagttcccggacaagggaggaaaggcgtgggaagagggaggacgcgcgttggtctccgatccaagagaaatcgtgttagtgctagtttaggaaccacaatttccgagagtgctcacccgtacaaatatgctggagagaaggttgatgtgcaaggttttgatattttcaagggtaaagttagtgtagcagatatgatatccttctcaccttctgaagtagcatcatcaaaatatgatggagctctgaaaagctgggagaattctattactcttgtcaacattattcgaaatgagatccgtgatggccagttgagcttcaggggcaagcgggttctagag

SEQ ID NO: 31259 - DNA, 270 bp, Zea mays
  Peptide Sequence Number=SeqID_73038
atggtgcacccggaggtgggactcgtgcgggtgaccgggactttgtcgtccgactccgggtgctccacgatcgagccgtcgcgccttggtgaacgagcttctacgttgtctaaaccatcgataatgggcgtacaacttcgggtagtggatagggaccgtagatcgggcaaagggcagctaggattagggttggggagaagatgctcaggggccgttgatctcgacatggacggtctaatgggaaagggattaaggattcacgtatgttga

SEQ ID NO: 31260 - DNA, 159 bp, Zea mays
  Peptide Sequence Number=SeqID_73039
atggcgaacgttataggggagttattaccggggattggagcgccgaggcttgcggtcgacggggtattacatttaatgactcaaggttggtcgctacagagacaggtggacatccgacggttggtcgctatagattgtcatgtgactgttggtggctaa

SEQ ID NO: 31261 - DNA, 1227 bp, Zea mays
  Peptide Sequence Number=SeqID_73040
atggtgatcgataggcggagcgtgcagcgcgccgcgctggtcgtcctgccgctggtgctcttcgtcgcggcgcgggctgtctctgccgtcggcgatggtcctctgcagaacggcaacttcgaggactcgccagaccagtcccagatgagcggctcggtggtggccggggagcacgcgatctccggctggaagacgtccggccacatcgagctcgtatgctcgggccagaagcagggggacatggtcctgacggtgccggacggcgcgcaggccctgcggctgggagccggcgcctccatcgagcagcagatcagcggcctcacgcagggctcgtactactccctcacgttcgccgcgtcgcgcacctgctcccaggacgagacgctcagcgtgacggccgcccccgcgccgtccggcgccggctccccggcgccggcccagaccggcgaactccccatgcagacggtgtacaccagcatcggctgggactcctactcctgggccttcagggcggagggcgccggcctcatgtccgtcgtaatcacccacaactgcgggcaggaggaagaccccgcgtgcggccccatcgtcgacgctttcgccatcaaggcgctccacgaccagccgcctgaccaggcggcggcggacaacaacatgctgcggaacgggggcttcgaggagggcccgtacatcccgccgggctcgccgtggggggtgctggtgccgccggtggacgaggaccccgtctccccgctgcccgggtggaaggtcatggcgtacaagaagtccgtcaggtacgtagactcggcgcacttcgcggtgccgcgcggcgcgcgcgccgtggagctcgtgtccggcgtcgaagccgcgctcctgcaggaggtggacaccaccgtggaagggagctggtacaggctcgagttctcggccggggacgccgccaacggctgcgcctcgtcgtctgatggttcctcgtcgtccgggatgaagctcaaggcgtacgccgggacgagtgaaaccaccgtggacatcgatttccgcggcgctggcggttccaaccgagggaagatcgagttcagggccgccgcgagccccaccagggtggtgttcgtcagcctgggctaccacaccaagtccgacaacagcggcacgctctgcgggcccgtcgtagacgacgtctcgctcgtccccataccgccgccgtatgctcgccggctgcttctctag

SEQ ID NO: 31262 - DNA, 567 bp, Zea mays
  Peptide Sequence Number=SeqID_73041
atggacgcaccggacagtacggtgaccactaaatatgcaccgttcactgtccagtgtcctagccacatcaagagcaccgggggtggccggcctcggcgccgcgttcttcgccgtcacggaggccctcgaggtcaacgagaacgtcggcaccgtgagcgaccactcgccgtcgccgatgaggagtttgttcccggtactccctgtggcagtcctcaacgctgtgttcgtgtactggatcttcagctcgttgtcgaagacgctgaacaagctcaagtcgaaaaaagaatgacgacgaagctggagatgtatcggaggttgaacaacgccttgatcatcgcggtggccatgtcactcgtctggatcacatttgagagcgcggcgaggtacgcctacctggatgacgaggaccgtgacatggaggacacgcggccgctgattaggcccggcccgctgtcgtatgtggacaaccgggcgatctctgtgtccaaggacaccaccaccatcatcttgagaaccgactcccgcgtgtacgcgaaagccgccgacgatggaggcaagtgggtgtag

SEQ ID NO: 31263 - DNA, 763 bp, Zea mays
  Peptide Sequence Number=SeqID_73042
ggcagacgacgtgctggacttcaccatcgaggaggtgaaaaagctccaggacgcgctgaacaagctgctccggcgcgccaagtccaagtccagctccagctccagctcctcccgcgggtcgggcgccagcgccaccgacgaggaccgccgcgccagccacagccagctgccgctcgacaggttcctcaactgcccctccagcctcgaggtcgaccggagggtctcgctgatcaggcacgacggtggtggcgagagcggcgagttctcgccggacacgcagatcatactcagcaaggccagggatctcttcgtccacagcaacggcaccgccatcaggaagaagtcgttcaagttcctcctgaagaagatgttcgtctgccatggcggcttcgcccccgcgccgagcttgaaggatccagttgaatcgagaatggagaagttgttcagaacgatgcttcagaagaagatgaatgctcgcccgagcaacgctgcagtgtcatccaggaagtactacctcgacgacaagccgagcgggaggatgatgacacgggatggtcgtcgtcgtcacgatggagaggacgatgacgagaagggctctgacagaatcaagtgggataaaactgatactgactgcaattcgttgctggtgctaaaattttgtggtggtttgatctttatttcgcagcttacgagtggtggtgatgaccttgagtcagaggagaaatccactacaataatccgtattaaaggagtgttcagttga

SEQ ID NO: 31264 - DNA, 1380 bp, Zea mays
  Peptide Sequence Number=SeqID_73043
atgagggccaggaaggcgaagacggcgacgtcgtcgtcgttttggaggtcgctcctgggcggctgcctcggcggaggcggcggcggagggcgggcggcgggggacaggcagcggaaggtgcggccgggcggcgggggcgggcggctgtcgttcacggacctgagcggcgccgcggaccaggacctgtcggcgtcgctggtgggctccaacctgcacgtgttcagcgtggcggagctgcgcgaggccacgcgcggcttcgtctccggcaacttcctcggcgagggcggcttcggccccgtctacaggggcttcgtcgccgacggcgccaagaaggggctcaaggcgcaggccatcgccgtcaagctctgggaccccgagggcgcccaggggcacaaggagtggctggcggaggtgatcttcctggggcagctgcggcatcccaacctggtgaagctggtgggctactgctgcgaggacgagcaccgcctgctcgtctacgagtacatggagcacggcagcctggagaaccacctcttcaaacagattcctgccgtgctgccctggtcgacccgactaaacattgcagtaggcgccgccaagggtttggcgttcctccacgacgccgagaagccggtcatctaccgtgacttcaaggcctccaacatcttgctcgactcggactacaaggccaagctgtcagacttcgggctggccaaggacgggccggagggcgacgacacgcacgtgtcgacgcgcgtgatggggacgcacggctacgcggcgccggagtacatcatgacgggccacctcacggccaagagcgacgtgtacagcttcggcgtggtgctgctggagatcctcacgggccgccggtccgtcgacaagacccgccccagccgggagcagaacctggtggactacgcgcggccgtgcctcaaggacccgctcaggctgggccggatcatggacccggccatggagggccagtactcgccgcgggcggcccagagcgcggcgctggtcgcgtaccggtgcctcagcgccagccccaagaaccggccggacatgtccgccgtcgtccgggcgctggagccgctgctcgacctccacgacgacgtgcccgtggcgcccctgggccacgccggccccgtcgtgctgttcgtagcggccgccgccgaggaggagaagaaggagcgggccccgaggaaggacgtccacgtccaccggcgcaggcccatgtcgcccaaggcgagccccaggaagcgccccggcaccggcgccggcaccaaggaggagttctgggtgtggcatctgccggtgccggccgaccataagacacgtccgaccttgggcggcggcgttgtgcaagcgtgtgcgtga

SEQ ID NO: 31265 - DNA, 300 bp, Zea mays
  Peptide Sequence Number=SeqID_73044
atggatgctgctacaaaggggaacaaaaatctctacacagtaactccatcctcatttgatcttgctctatttcagtgcatcttgggaacacaatcagcaccacagatgactgaattagtgataaccaggggcaggctggagcatggcttgcagcgcaccgcgtaccatgataagaagccagataaggggctcaccgtgccgatggggcacgtgatggaggcggtgacttcggtattgacgcccatggccgcgcaggcgccgatgagggtgatgagcgcgggcttcgccttgaaggcataa

SEQ ID NO: 31266 - DNA, 558 bp, Zea mays
  Peptide Sequence Number=SeqID_73045
atggagatggttgagagtgaaatgagtgacttttgtgttaccgatgaactgagtagaggctacttccaagactttgccgagatccgcgagaacgctggcaagattgcgacagcgagtaaggtcatcatcccagaggtagatgctgtgaagtttcctgatcttgatgtggattcccctgatggaggggcactgcatctgcctcttgttgcaccaactctgcaagctgatgatggtgaggctggagaccataagattcctggtgcttcattggtgtgcctttccttccgcgcaagctcgctggtgtccagtgcccctctcctaattcttagcctcgccaagatcagccccaatcgtcctctggctctgcagcctctgggggcgttccctccaacaataggcatggcaagcaccgtggcaagagggcctccagtggcagccaaggcagctccagtggacagtagggatggcaacatatcaaagttggatcggatattgcacatatctgcccatgaccatatccgcggttgcaaccaatatctacgactagattggatatga

SEQ ID NO: 31267 - DNA, 381 bp, Zea mays
  Peptide Sequence Number=SeqID_73046
atgagctcagggaaggtgtttttcggatcttcggcattagggatggcaatgggttgggttcgaatcgggctactcagtgtcgccagggacgccgccctgctgatgctggccgtcgtggggccgtgccgcttcccgcccgaaggtgcggacggtggccaccagcagcccagcgaggtgaagacccggctccccgccatggatacccgcgacaaagatcacggcggcgagactcactggcggagaaatagctctggcgaagtggtcgtcgacgttggggaggtcacgacggtcacttggaggtggctggagttggtccgtcttcgcgtgcaggcgggggagctcatcggcgatgaggattccggcctaactgagagcacctag

SEQ ID NO: 31268 - DNA, 183 bp, Zea mays
  Peptide Sequence Number=SeqID_73047
atggagttggggaactcaacaaagtttggagtaaagacaagcattggtgctaccagtggcgcaccggacattgtccggtgcctaggccaaggcacccatgaactggccgctctcgagtttttcctagagtcactccgctataattcaccggactgtccgggtcttagtgacccaagtgattaa

SEQ ID NO: 31269 - DNA, 231 bp, Zea mays
  Peptide Sequence Number=SeqID_73048
atggaccggttgattccggccacccccgtcgtcgagtcatacctcgctgtgaccgccagaacctcccggagccaaccccgcccctcgccggacctccctcaccgccgagaatacatcctcgtgccggagcaaggagttgctcaggaggtagccccggatccagcaccagagcctgccctagaggatctgcctgccccagctttggaaggcaagcctcggttttatgcataa

SEQ ID NO: 31270 - DNA, 765 bp, Zea mays
  Peptide Sequence Number=SeqID_73049
atggagacgtttgtaatgatcataataaaaaggctcaaggatgccaaccttttcgtgtcacaaggagggctcatcattctagcacaggaagttgaggagtgtttacttaaagttgagcagtcacctcctgaaagcacatcgaatgctcttcaagtagcaactgcagctcttgatgtattctctttaattgtggaggccttcaagcatctggatgacatagagagccccttctttggaaggagaacttcaatttttgatacagtcgcaaaagttcggtcctgtgtggtgatgctagatcttgaatgtgacgatttgataaatgatatgttccatcacttcttgaggactgttaattctgggcattcagaagccatcatatgctgcatggaaacaataataatgagattggtaattgaggagagtgaggatgtccaaccacagattgcttcatgtctactccaaaatgttagaaaagaagaaaaggtgtccacatgcgcgtgttctgcctccagaaatctcggtctgcaaactctccatctcacgccgaagctcgtgagcgggagcgaccacggcaacggtgtggactggtgggcctttggcgtcttcctctacgagctcgtctgcggccgcacgccattcaagggccacaccaaggaggccaccctcaagaacatcctctccaagcagaccacttacctaggttttagtttgtccggctttgctcgtcattttgtacttgttcttctcacatatttgttcgcttag

SEQ ID NO: 31271 - DNA, 270 bp, Zea mays
  Peptide Sequence Number=SeqID_73050
atggccatgcatctttatgagaggttccaacaacttgatcaaggagccaaggtgaagagcggtgccccagaccacgccttagctgcgccaactgtgatggaggcgatggtggagcaaagggaggagatgagggtgatgcgaggcgaccaccaccattgccgcaacgtgtgcgtggaggcgggggcacccgtcgtcgtagtggtcaatggtgaagccgatgacggtgaggtgggcatggggagcgtgggaggggcggagcagatgggatag

SEQ ID NO: 31272 - DNA, 639 bp, Zea mays
  Peptide Sequence Number=SeqID_73051
tcggtacagcccactagctaccaacaacgtcctgaaaagatcacgcgcgagcgttctcgtggtgaaggtggtatccttagaaatagtgaagggccattgaaggaccacatttatttgcatctgaaccatctgccgcctgaggttctcaaagaaaggctccctggtatttctgaaactgctgctatttttgctggtgttgacgttacaaaggagcccattccagttttgcctactgtgcactacaatatgggtggtatcccaacgaactaccatggggaggtagtggatatcaagggtgataatccagatgctgttatccctggtctaatggctgctggtgaagcagcctgtgcatctgtccatggtgcaaataggctaggcgcaaattcacttcttgacatagttgttttggcagagcttgtgcaaacaggggaggctatgaaggggctggacatcagaaaggtgttggaggcgcccaaggaggtcaagtgcgtgcccatgaagaatgtgctcgagcccggagacatccccacgcttgctgagctcggtctcactactccaccaggcatggcacaggtacaactagaaaggtttctggcattcagtaccatgatgcgttctgtcgttgaacctgtttga

SEQ ID NO: 31273 - DNA, 2342 bp, Zea mays
  Peptide Sequence Number=SeqID_73052
cgacagatacactctcgcgcggtggttcgctggccggagacgcgaggcttgtctccagcaacggcaagtacgcactcggcttcttcgagaccaacagcaacaatcccacgcacaacgcctccaactcgtatcttggaatatggttccacaaagtccccaagctgacacccgtgtggagcgccaacggggacaatccggtctccagccctgcttcgccggagctcatgatctccgacgacggcaacctggtcatcatagccgacgacggcaccaaggtctggtggtctacccaggccaacatcacggccaacaccaccgtcgtcgtcgctgttctgttggccgacgggaaccttgtcctgcggagctcctccaactcctcggacgtattctggcagagcttcgaccacccaaccgacaccctgctgcccggtgcgaagctgggcagaaacaaggtcaccggtctggaccgccgttttgtttcaagaaggaattcgaacgaccaagctcctggtgtttattccatgggcctaggtcctggcgcccttgatgagagcatgaggctctcatggagatctacggagtactggtcctccggtgagtggaacggcagatacttcgacgcaataccggagatgtcgggtcctcgttactgcaagtatatgttcgttaccagtggcccagagttctacttctcctacaccttggtgaacgagagcacagcgtttcaggtcgtgctagatgtctctggccaatggaaggtgcgcgtatgggactgggacagaaacgactggatcacgttcagctactctccaagaagcaaatgtgatgtctatgctgtctgtggagcctacgggatctgctctaacaacgcaggtccgttgtgctcctgcatgaagggattctctgtaaggtcgcctgaggactgggaaatggaggacagggctggcgggtgcatcagagacactccattggattgcaacgcgacaagcatgacagataagttctatcccatgccatttagtaggctgcccagtaatggcatgggtctgcagaacgctacaagcgcggaatcatgtgagggatcttgtttgagtagctgctcttgcactgcatattcctacggccaaggcggttgctctctgtggcacgacgacctaaccaatgtagcagctgatgatgacactggcgagactctctaccttcgccttgccgcgaaagaggtccaaagctggcaagaccgccatagacatggaatggtcaccggtgtaagtgttgctgtgggcgtaagcactgccactgtgatcaccctagtgttggtctctctaattgtgatgatgatctggaggcgaagcagtagtcatccggcggacagcgaccagggtggcatcgggatcatcgcattcaggtacgctgatataaaacgcgcaactaacaatttctcggagaagctaggcacgggtggcttcggctccgtatttaaggggtgcctaggtgagtcggtcgccatagccgtgaagaggctagacggcgcccaccagggagagaagcagttcaggtccgaggtgagctcaataggcatcatccagcatgtcaacttggttaaactcgtcgggttctgctgcgaaggtgacaggagactccttgtctacgagcacatgccgaaccgttccctcgacttccacctgttccaccagagcgcgcatggcggtggcaccaccggtttgcgctgggacatcaggtatcagatagctctcggtgttgccagaggcatagcgtacctgcaccatagctgccgagactgcatcatacactgtgacatcaagccgcagaacatacttctcgacgcgtccttcgttccgaagatcgcggacttcggaatggccaagtttctcgggagggatttcagccgcgtcctgactacgatgagaggaactgttgggtacctcgcccctgaatggatcagcggaacagccatcacatcgaaggtcgatgtttacagctacggcatggttttgctggatatcgtatcgggaaggaggaacgccggcagagaagcttccaccgacggtgattgttgccatgccaagtgttgtttccctgtgcaggtcgtggacaagcttctcaacggaggcgtcggaagccttgtggatgcaagcttgggcggcgatgtcaacctagacgacgttgaaagagtctgcagagttgcgtgttggtgcgttcaggataatgagtatgatcgccctacaatggttgaggtggtacagtttctcgaaggcctgtctgagcctgatatgcctcccatgccaacattccttcatgctatcgctggtggatcgccttga

SEQ ID NO: 31274 - DNA, 417 bp, Zea mays
  Peptide Sequence Number=SeqID_73053
atggctacaaggcctacgtcaagtctgcttatgtcatacgggatggattaccatgtgtttttcaccatacttatcattgtgtcaacaactgtgactcagagagcacctccatcagacaggctcgggtacgcgtttgagccccggaccctggcctcagctctctgctcggtcaaagatgcaaaaacagggaccggatgtccgcctctggttcaagtcaacagcaagtatgaaggccatgccgatggtcatggatccctccttgaggctataaaaggaggagcccagggcttcattcagggaggagaacactacaccagttttcatccgccgcagcgatattggcagttgcctcaatcaccagggcttgggaacctctccctatcccgaccggcttgtatcccctatgaaagcatctag

SEQ ID NO: 31275 - DNA, 2394 bp, Zea mays
  Peptide Sequence Number=SeqID_73054
atgcatctcctcgccgttctttgtggcgtcattttctccctgctacagctgcacactcctacacgctcggcagcgacagatacgctctcgcgcggtggttcgctggccggagacgagacgcttgtctccagcaacggcaagttcgcgctcggcttcttcgagaccaagagcgacaattccacgcacaacgcctcaaactcgtatcttggaatatggttccacaaagtccccaggctgacgcccgtgtggagcgccaacggggacaatccggtctccagcactgcttcgccggagctcatgatctccgacgacggcaacctggtcatcatagccgccaccggcaccaaggtctggtctacccaggccaacatcacggccaacatctccgtcgtcgctgttctgctggccgacgggaaccttgtcctgcggagctccaccaactcctcggacgtattctggcagagcttcgaccacccaaccgacaccctgctgcccggtgcgaagctgggcagaaacaaggccaccggcctggaccgccgcttcgtttcaagaaggaattcgaacgaccaagctccaggcgtttactccatcggcctagctcctgacggcgttgacgagagcatgaggctgtcgtggagatcctctacggagtactggtcctccggcgagtggaacggcaggtacttcaacgggataccggagatgtcggatccctcctactgcaactacatgttcgtcagcagtggcccagagttctacttctcctacaccttggtaaacgagagcacggcgtttcaggtcgtgctggacgtctctggccagtggatggtgcgcgtgtgggactgggacagaaacgactggatcacgttcagctactctccgagaagcaaatgcgacgtctacgctgtctgtggagcctacgcggtctgctctagcaacgcagacccggtgtgctcctgcatgaagggcttctctgtgaggtcgcctgaggactgggaaatggaggacaggactggcgggtgcatcagagacactccattggactgcaacgccacaagcatggcagataggttctatcccatgccatttagtaggctgcccagcaatggcatgggtatacagaacgctacgagcgcgaaatcgtgtgaggggtcttgtttgagtagctgctcttgcactgcatattcctacggccaaggcggttgctctctgtggcacgacgatctaaccaatgtagcacctgacgacactggggagactctctaccttcgtctcgccgcgaaagaggtgcagagctggaaacaccatagacatggaatggtcatcggtgttgctgtgggtgtaagcgctgtcactgccaccctagtgttcatcttcctgatctggagacgaagcagtaggcggtctagtcatccggcggacagtgaccagggtggcattgggatcatcgcgttcaggtacgctgatataaaacgcgcaactaacaatttcacagagaagctaggcacgggtggcttcggctccgtatttaaggggtgcctcggtgagtcggtcgccatcgccgtgaagaggctagacggcgcccaccagggagagaagcagttcaggtccgaggtgagctcaataggcatcatccagcatgtcaacttggttaagctcgtcgggttctgctgcgaaggtgacaggagactccttgtctacgagcacatgccgaaccgttccctcgacgtccacctattccaccagagcgcgcatggcagtggcaccaccggtttgcgctgggacatcaggtatcagatagctctcggtgtggccagaggcctagcgtacctgcaccatagctgccaagattgcatcatacactgtgatatcaaaccgcagaacatacttctcgacgcgtccttcgttccgaagatcgcggatttcggaatggccaagtttctcgggagggatttcagccgcgtcctgactacgatgagaggaactgttgggtacctcgcccctgaatggatcagcggaacagccatcacatcgaaggtcgatgtgtacagctacgggatggttttgctggaaatcgtatcgggaaggaggaacgccggcagagaagcttccaccgacgatgactgttgccatgccaagtgttgcttccctgtgcaggtcgtggacaagcttctcaatggaggtgttgaaagcgttgtggatgcaagcttgggcggcgatgtcaacctagacgacgttgaaagagtctgcagagttgcttgttggtgcgtccaggataatgagtatgatcgccctacaatggttgaggtagtgcagtttctcgagggcttgtctgagcctgatatgcctcccatgccaagattgcttcatgctatcgctggtggctcgccttga

SEQ ID NO: 31276 - DNA, 189 bp, Zea mays
  Peptide Sequence Number=SeqID_73055
atggcgtctatcctcaaccctcctccactgcaggcgaatgacagcggtaatcaaggcggcggtggtgaccctgctcctcctccaccgcgccaagatcaatcctcaccgctacaaggcacaagagcaggcgtcgcccgcctcacaaacgttgcccttcatcaaggaagagtagatcaattctatgtttaa

SEQ ID NO: 31277 - DNA, 252 bp, Zea mays
  Peptide Sequence Number=SeqID_73056
atggcgcgcaccgcgcggcagtcctcgtatgtgccgcggaccacgcggagggaggtgaagtacagcaccacccgcccgccgccgcaggcgcccggtgctggcttctttgccgcccggcgggggactgggacgcggatgctggatcgcgcggaggacccggagcgccgaggcggcgacgcggaggccggtggaagacgcgcggcgccggggaggcggaggagtccggcgaaagcagggaccggaggtccttga

SEQ ID NO: 31278 - DNA, 641 bp, Zea mays
  Peptide Sequence Number=SeqID_73057
agcttgactcgccgccaggtgggaccaccacgacagaaccttcttcacctgcgcggactccgcaacgaacgccgtcgaagccgcgcgccatccgcaagcttcggtaccgtttaaccgctcagtaccccacctcgcctataagcattgatcccacgaactcgtccgctcgagcccctcttgctttcctgccatcgccactccgcgccagctcttgcaccgccgcgacccacacgaacaactcttcgttgccgtcgacccaggttatcagcaccggcgaggtctcggatttgggcctgggcacttcgggtggtcgcacgggtggtgtgcgtgctcttcccgtgggtgattgcgggccagcgacaccgcgatttctcgtcgtagttggaagaccgccgtggatccacgccacctcgtggacagagggtttctcaccgcgaatcgaggtaagattcagtgtcattccgttcgttttcccctcggtgtggtatcgcacgattcaaattagaagtctagcgccctacggcgtgagatgtgggcacgccagccatggcgccgccgcgccgggtagccgcgccgtcggtcagttagtcgggtttgagcaggagagtgttcctccgtccgattttgtttgggcggtctag

SEQ ID NO: 31279 - DNA, 198 bp, Zea mays
  Peptide Sequence Number=SeqID_73058
atggcggacttctggggatccagttggattgaaggacaggcaccaaggactattgcaccaaatctatacaagaaagcaagaagaaagagcatcacggtgtccaaggctcttcgaaacaattactggatacagttctgcgcgcctttcactcgggaggatgaaattcgaatcggatacacgaaatatcgtgtcacatga

SEQ ID NO: 31280 - DNA, 571 bp, Zea mays
  Peptide Sequence Number=SeqID_73059
atggacctatccgtcaacatgtgcttactagggcaagcagctttgctgctagatcttcttagtggactgccagcggtctcggagctcacactatcgcttgcccttcttggttaccgaggaggccagtctgagcgtgcactgatcaagtctcttctcaaagctgctgagaacctggtgtcggtcaccctttacatccaccccatcttacagaattcgttgctcctgccgacggacgcgatatccgaaataaaggattatcctcgggcgtccaccaggagatttcctcctagtgaggatataaaggagagcaaggacgacctcttcccctgggatggggcagacgagtcctcagagggcgaggaggatgatgcatcctctgaggaggacccaatggatgatgacgacgacgacgaaggcgacaaggacaccgacaagggagctggcgacaccggcggttccattagcagtgatggcgacagcgacagtgatgacgacgatgactgggaggacgacgacgacggtaatgacaatggtggcggtgaggacggcatggatcccccgtgcaagtgtc

SEQ ID NO: 31281 - DNA, 336 bp, Zea mays
  Peptide Sequence Number=SeqID_73060
atgaggaaccgcatccccaacatcactgaggtagcaatgaatgaggacttctaccggggatctcatgatgaggctttcgtacatgccatcctccaatgggatctagcgacctctgagaaactcgtacgtgacatcgacagatacatcaccgctacaaacgagcccacgacctcatcgaccagcgaaaaatacatgtccatgaataaagaagatgtcctgcgggagttcaagaactcaatcggccatggccgacctttcccagagctaccaacaccacctgcaaggcagaaccataacccaccaccactaccaccactatgggaagacaatagctaa

SEQ ID NO: 31282 - DNA, 150 bp, Zea mays
  Peptide Sequence Number=SeqID_73061
atgaagaagctcatgaggaatactttgacgatggtgaccatgagtactgagtctagcgactctccggtcatcttcctatatgggaaattacccaagatatttctgttgtactttgattatgataccattaagactcttaaatttggatga

SEQ ID NO: 31283 - DNA, 294 bp, Zea mays
  Peptide Sequence Number=SeqID_73062
atggggtggtttgaggccatgaagtcgcttggtatggccaagtaccataagcctacatgcccaaccgccctgcggccgaccctgttgcgtaaattaaaggataaggaataccagctggtggaccctatgggtgcactactaaaaattcctagccaagaatgtgtgcaggtcgagtcccagttgggagcgccccttgggggtcacgacaccagttactacttaagaatcctggcatccagccccgacacgtcgaggccatatcctaggggggccaagtaccaaggaagaagttag

SEQ ID NO: 31284 - DNA, 180 bp, Zea mays
  Peptide Sequence Number=SeqID_73063
atgacgatgctgctggttccgcagacgttgatgctgagtaatgtgcttttggacacgagcagcaccggctatggaggcccacttttgggaactgaggatcgcttttgggaactgaggatcgcttttgggaactatcccagttcatctaggttgctgttagaacttccccctgctgtgtag

SEQ ID NO: 31285 - DNA, 261 bp, Zea mays
  Peptide Sequence Number=SeqID_73064
atggacatgtctcgaatggagacgttgtatcatgctgacaaggagaagatcgaagcacttatcctggagctagctggtcgtgtggcttcatcatctaatcagcaaatcaggaaactccagtggaggtgtaaggtctcccatcaaatctccagtcaactcaccaacacaaaagggtgctgcaatcacaccgttgttgtgcaaaacaaacaatttgccactgattctcacccaagaggaccaggatatgctaaggggtgttaa

SEQ ID NO: 31286 - DNA, 1293 bp, Zea mays
  Peptide Sequence Number=SeqID_73065
atggaggttaaggtgctgagctccaagctcgtcaagcccgcttacaatgccggtgcgggcccagcgccggcggtcagtgcggatgagtacacccccctgaccatcttcgacgtggtcacgtacaagatgcagatggccatcatctacgccttcccgccgccggccccatcgacggcggccatcgagaacggcctggccgcggtgctggccgagtaccgcgcattcgcggggcagctgggcgtggccccagacggcacgcccgcggtgctgctcaacgaccgcggcgcgcgcctcgtggaggcggccgtggacgcggacctcgtggacatggcgcccgccaagcccaccccggagctgctccggctgcacccggacctggaggaggaggagctccaggaggtggtgctcctgcagctgacccggttccggtgcggctcactcgccgtcgggttcacgtccaaccacgtcgtggccgacggccacgccaccagcaacttcctcgtggcgtgggggcgcgccaccaggggcctcccgacgggcctgccccccgtgccccgccaggcggggctcttcaagccgcgcccttcgccccgcgtcgacttcgaccaccgcagcagggagtggtacctgccgtcgcccgccgagaccgagaagcagcacggccacggccgcgagggcgcggcggcggcggagagcatcgtgatccagaaggcgcatttcaccaaggacttcatcgcgcggctccgcgccaaggcatcggaaggccgcggccgcccgttcagccggttcgagaccgtcctggcccacctgtggcgcgccatgacgcgcgcccgcgggctgagccccgacgagacctcgcagatccggctgtccgtggacgggcgccaccgcctcggcctccccgccgagtacttcggcaacctggtcctctgggcgttcccgaccgccacggtgatccacgacgaggtggcgagcgtcgacggcagctacttcaggtcgttcatcgacttcgcgacgtccggcgccgcggagagggaggggctggcgcccagcgccgtctgcaaggacgtcctgtgcccgaacgtggaggtggacagctggctcaccttcccgttctacgagctggacttcggcacgggcagcccgacctacttcatgccgtcctacttccccacggaggggatgctgttcctcgtgccgtcctacatcggcgatggcagcgtcgacgcattcgtgcccgtcttccagcaaaacctcgaggcgttcaaggagtgctgctacgccatggactag

SEQ ID NO: 31287 - DNA, 786 bp, Zea mays
  Peptide Sequence Number=SeqID_73066
atgttcagcttgattcgttcgccggcacacgcacaccaccctgccgcggcccacggaggagacacccggcacagcgtcgtgatccacaaggcacacttcaccaaggacttcgtcgcggggctccgcgccagggcgtcccaaggccgcggccgccccttcagccggttcgagacgatcctagcgcacgtgtggcgcgccatgacgcgcgcgcgggggctcggcgtcgacccgctccagacctccaccgtgcgcatctccgtggacgggcggccgcgcctcgcggcgccggccggctacttcggcaacctggtcctctgggcgttcccgcgcgccacggtgggggacctgctcagccggccgctgaagcacgcggcgcaggcgatccacgacgccgtcgcgcgcgtggacggcgcctacttccagtcgttcgtggactgggccagctccggcgccgtcgacaaggaagtgctgcagaccacggccgtgctcaaggacgtgctgtgcccggacctcgaggtggacagctggctcaccttcccgttctacgagctggacttcggcacgggcagcccgacctacttcatgccgtcctacttcccccacggaagggatgctgttcctcgtgccgtcctacctgggcgacggcagcgtggacgccttcgtgccgctgttcgagcacaacctggaggcgttcaagcagtgctgctactccatggaggagtagctaagctagcgtcaactcgatcctgtattcctgtgcatatgcatgcatgcatgcatgcgtaa

SEQ ID NO: 31288 - DNA, 515 bp, Zea mays
  Peptide Sequence Number=SeqID_73067
atggccatcgtcatcataaacaacagcctagctagaaccttatatcagcaactcgctggagctctcgagacgctcgctcggcgccgaagcggacgaggagcagtcgtcggtgtctgttgccgcgtcctcaactccgccatctccttctccagctcgacgatcctctgcttcctgctcgtgacctccagcgcggcggcgtcgagctcggcgcacagccgttcgttcttggcctccagccgctccgcggtgtccctgcacctttggagctcggtcttcttggccgcgagcttggcctccaggactgcgccaaagccaaactgctactgctacaactccgccgcgctctccatggaagcttctgcgcctagatcgacagcgttcggccgctggtgcccggcgccaagctccacgccgtcatcgagcgtgccacaacgattctgtcctcgacctccccttcctctgcaacatgtccaggaccgggaactggcagtgggaggatcaccgtccaccgtcgg

SEQ ID NO: 31289 - DNA, 270 bp, Zea mays
  Peptide Sequence Number=SeqID_73068
atgtcgccgcgcgcgcacctgggcgtcgtcgcggtgttcctctgctgcgctgtcggggagcatcggcaagggaacctaggcacttcaccgaagtacctggggcaggcgcaggtcgacggcaagcctaggcctggccgccaccgaatcgcgcagataccttcctctcttcatcgagcttcatcgcaagatcattatgttaattggaacatggagaaccacccgggaaacagtgctaccacaaggtggtatgggacgcccttggcggactaa

SEQ ID NO: 31290 - DNA, 332 bp, Zea mays
  Peptide Sequence Number=SeqID_73069
atggccttggtgaggatgaaggagttcagagtcctggaagcgtctgtcgcaacgatcgtgtcggatgagccatccagccacgctagccgaggggaagaaaagaaagaaaagacttcagcgactcctgagactgaaagttttgtcatccgtatagaggtctcggatgatgtccctttggctgctcctgtgggtatgaccgagggtgcttcagcttctgagggtgtcgctaaggataacctagcccccgagggtggtgctgaggatgacccatcccccaagggtgccgagcctggttcatctttgtcacacccatttccgaagggtagagccag

SEQ ID NO: 31291 - DNA, 486 bp, Zea mays
  Peptide Sequence Number=SeqID_73070
atgggcagaggcaagagggggggcaagggatggcctcaccgcgttgacaacaagagcaagcatcctcagagtccaccctcggaggactttggtgactcgaagtactcggaggaagtttcctctgagtatgattggtcgcccgctctagtgtcccccatggcgtgtccgaggactcgaacgactccatggggctatccaccgcggtgcaggcatactggcgatccatcgagcgtgtcgggctcgatgggtcggatgactcggaggagacctccttggaggaggtggaagactcctccgactccatggagtggcggcgaggacgacggtggcagtggcgacgacggtggcaagggcggcagcgacggcaacgacgaaggtggcgacgatgagagcgacggcgagggcaacggcgacggcgacggcaagggtgacggtggcgacggggtgaggaggccgactcaagatgagtcggtctcaagtttgtaa

SEQ ID NO: 31292 - DNA, 161 bp, Zea mays
  Peptide Sequence Number=SeqID_73071
atggcggactcagctgtgggcacgacaccggcgcaggggcaccaaagggcgcagacctcgacggaccggcccaacggcggcgagcgcttgagtgacagcggggacgcagagagacctcgggtcaatggcggcgggccatcggctgcacggagaggacgccg

SEQ ID NO: 31293 - DNA, 306 bp, Zea mays
  Peptide Sequence Number=SeqID_73072
atgcggacacatgacggggtacctttcagacagaaacggcggggatatagccagccgcgggaaggtgtggatggtggaatacgcccgattaccggcgacgaactccaagggtactacgaacccgcgcacaccacaattcttctggcatgcaccacacgcccggccaagcacccacgaatgatcaccggtgtcccaatgtcggtggacgagcaggcccacgatggcggaccttcgcccacccccatggtccctgcagcggcgtcccttatgcttatgtgcctgcagtggcgcaagaagatgagatga

SEQ ID NO: 31294 - DNA, 210 bp, Zea mays
  Peptide Sequence Number=SeqID_73073
atggggaagcctgtcccatcactcctcatgctcctcctcagccaagtgaccgcacttgtacccatcataaccggaatgggagaccacgtctcaggtcgcgtgaggggcaacgtccgctgccaggttcaatcagattcatcggtgacattaggcctctatgttaaaaatcacagaaaaagacctactagatatttagttgtgattttctaa

SEQ ID NO: 31295 - DNA, 579 bp, Zea mays
  Peptide Sequence Number=SeqID_73074
atgccctgtctggccgagctgaaggaagcgcggaccagagacagagtgggcacctggggcgagttcacggcaacagacacacttgacaactaccgacgcagccggataactaaaaatactgtgacagccaagaatcggctcggagacgatgaccggcacgcaagagaggagctcgacgcggaaactcgacacgccattgcgagcagagaattttcgggaaaaaggtgcggtggccatggcgacgagctggagaccgagcatgagcaggggagagaaaggtccgcgtggcacaccgagctggagcagacagaacgcgcgtgcaggggacaggaagccagcacgccagcagtgaagctccggctgggcggttcagccggcgaacagggagaggaagaaggggagcagagaagctgggctaggcagccgggcggccaagcgccatgggagggagctcagccaggggcgccagagaagagagctggacgagccggagcttggaccggcgccaaaccgaagagccgcggctgggagggatccgagctagggagctatcatgggaggggcagggacgcgccatga

SEQ ID NO: 31296 - DNA, 267 bp, Zea mays
  Peptide Sequence Number=SeqID_73075
atggcggctgagcgattcgggagggaaggaatcgcgcactaccgcgatatctccggtccgtgctgtcgccggattgattcgcgccatggcgagtgtgggcggcgattgtgggggaccgtagtgatgcaccagcaggtttatgggcgtctaccaaagctagctggggaccttcgtgttggtggggaactgccaaccatgaacgccattgggggaccgccgtgcactagggagaaggctctgcatttcacgaatcatggtgctaaataa

SEQ ID NO: 31297 - DNA, 2037 bp, Zea mays
  Peptide Sequence Number=SeqID_73076
atggccctccgggatgctgccaacaagaccgctggcattgagccgaacaaagcagcatccaacaacaacgtcgccaccgtcgctgctgtatcgatcaaggaggccatcgccgccgtgcgccatgagggttggatggtccgctacggtcgcaggaagatcggcaggtcattcttccacactcgctacttcgtgcttgacaacagactgcttgcgtactacaagaagaaaccaaaggacaacatggttccactcaactcgctgctaatagacgggaattgcagggtggaggaccgtgggctcaaaacactccatggacaaatgatttatgtcttgtgcatttacaacaagaaagaaaaggagcaccagataacgatgggagcgtatgatattgaggatgcaatggcatggaaaaagaagatagaactcatcattgatcagcaacaagactctatgacagctaagaaccgtaaggcctttgcttcaatggactttgacatggaacttggagggcagtttttgttttcagatcatgacagcacgtcaataattcttcctcttaagattttttttgaagttgaagttgtcgctggtttgatattgccagggttgcgcatttttgaagaacttctggaagtagattaccctgcacgaggctgcagcagagctatgagggctgttggtgtagttgaagccacatgtgaagccatttttggtcttataatgagcatggatgtaacaagatacgagtgggactgtagcttccgtaacggtagtttagttgaagaggtcgatggtcacactgcaatactatatcataggctgcatctacactggtgcccaatgctagtctggccacgagatctttgctatgctcggtattggcgtcgtaacgatgatggaagttacgttgtgttgttccgatcaacagagcatcttaaatgtggtcggcgacgaggatttgtgagggcattcattgaaagtggaggtttcaagatttctcctctcaagtgtcgcaatggaagacctcgtactcaggttcaacaccttatgcaaattgatctgaagggatggttcctgaactactctctttcctttcagtatcattctttgttgcagatactaaactgtgttgcagatgacatccatataaccccaaggattcctgtaatggaaagcatgttcgatgcggattcagaaccaaaaaatcgtaagcttcaagaatttgacactaaggcaaatagaaacatgggaatgattgacgaagaatcagatgatgacgatgattatcaagttcctgaagctaatatagaggaagacgtgaacaaatctcatcatgatatcaagcgcacagatgagcctacagaaaaaattgatttatcttgttttttgagtattcttcatcgtgatcccgaggagaaaagtcgcaattgttggacaatacctgatagcaagatcttcaaagttcgtagcaaaaacttcccacaagacaaatcaaagatacctgcagcaagttatctcatggagcttgcagccattgactggtttaaggacaccaaacgtatggataatgttgccaggcaaaagggttgtgttgctcaggttgctgctgatcgagggatgcatacatttgttgtcaacatacaaggctcctggatagtgcgacagagtgttggaagcaccccttgtttgttgggaaaggctgttgattgtagttatgttcgaggtcctgcgtacttggaggtggacgttgacattgggtcttcggcggtagcaaatggagttttgggtattgtgtttggtgtggtgacgacgttagtagttgatatggccttcctaatacaggccaacacatacgaggagctaccagagcaggtgataggcgcagctcggttggctcatgttgaaccggccacagcagtagttcctgatcttagcaacacatcaaacgacagtagcaacagcaacaatgacaacaacaacaacaacaacaacaacaatgggtcctcagaggatgatttgtccaagaaaacaaactaa

SEQ ID NO: 31298 - DNA, 2580 bp, Zea mays
  Peptide Sequence Number=SeqID_73077
atggcggaggcgcacgcggaggccatggatgggagcacctgggaggacatgatgcggaggatccttcccccgggcactcccatccccgaggcgccgcccaacctcgactactccatcgccctcgagtacgacggcccgccggtgccctacgaactccccagggtagaccccgtggagatccctgcaatccccacggcggagccggtgtccggttcccaggtgctcggagggctcccggtggcgcctgttgttcagcccatccgcctcccagtctctaggatcgcccgctgcgcagatccggtggccgcgcaggctgctggcagctcagagtcagtcttgcacaaccaggagttcagtgacgacgacgaagaaggcgatgattcccgctcacagtcgcacggatcagcgcagagctcacctgggccacagaataggcctgaaagacaggagggcaggagaggtccggtcgtcaccttcggcttcacacccgacagcaagtatgagagcaaggagtttgaggagatgtctgagcagtacgtggccgtcacgaagaaggagaagaggagaagggcatgctatcgctgtgggaagaggaaatgggagagcaaggagtcgtgccttgtttgcgatgcaaggtattgcggctattgtgtccttaggatgatggggtcaatgccagaagggcgcaagtgtgtcaactgcatcggccagccaattgatgaatccaaaaggtcgaagctggggaagaactccaggacgctttcgcggttgctcagcccgttggaagttcggcaaatcttgaaagctgagaaggagtgccaagcgaatcagcttcggccagagcagcttattgtcaatggttgcccattgcggccagaggagttaaccgacctgctaagttgctcacggcctcctcagaagctaaagccaggaaaatattggtatgacaaggagtcaggcttatggggaaaggaaggagaaaaaccagacaggattattagctccaacctcaattttactgggaagcttcaggtcaatgctagtaacggaaacacccaggtttatatgaacggaagggagataacaaagattgagctgaaagttctgaaggttgcaaatgttcagtgtccccgtgacactcatttttgggtttatgacgatggtcgttatgaggaagaaggtcaaaacaacataaaaggaaaaatatgggaatcagctctggcacgttttgcatgcgcattattttcactgccggtgcctccggggaactcaaatggaaccagagatgaagttccatatacagcaagagctgtccctgattatttggaccaaaaaagaatacaaaagctgctgcttcttggaccacctggtgctggtacgagcactatttttaagcaggctaaatacttgtacgggactaggttcacccaagaagaacttgaaggtatcaaactgatgatccaaagcaatatgttcaagtatcttgggattttgctagagggccgcgagcgttttgaggaagaggctttgtctagattgaattacacgatttctcagggtgaagaaactcagcatgatgaaaataaagccaatggatcaaattcttgtatatactccataaatgcgaggctaaagaaattttcagattggcttttggatatcatagcaatgggcgacctagatgcattcttccctgctgcaacgcgtgaatatgctccgtttgttgatgagatgtggaaggaccccgccatacaagcaacatttaaaagaaaggaagaattgcattttctccctgatgtggctgagcacttcttgagcagggccgttgaggtgtcaagcaatgagtatgaaccttcagagaaagatgtaatcttcgctgaaggagtaacacaaggaaatgggctagccttcatcgagttcacacttgatgatcgcagcccaatgtctgaaccttatatcgacaacagtgaggcacattcgcagcctctcaccaaatatcagctgatcagagtcagtgcaaaaggcatgaatgatggctgcaaatgggtggaaatgtttgaagatgtccgcatggtaatattctgtgtagcactcagtgactatgaccaattgggaccccctgtaagtggcagcagtcggcctcttgtgaacaaaatgatgcaaagcaaagagttgtttgaggctacaatccggcagccatgcttctgcgatactccatttgttctggttctgaacaagtacgaccttttcgaggagaagatcaaccgcgcgcccctctctagctgcgagtggttcaacgacttctgcccggtgcggacgcaccacaacaaccagtcgctggctcatcaggcatactactacgtggccatgaagttcaaggacctgtactctgcgcagacgaaccggaagcttttcgtgtggcaggcccgtgcccgtgagcgccagactgtggacgaagcattcaagtacattagggaggttctcaagtgggaggaggagaaggatgacaactgctaccaggaggaatcattctacagcacgactgagatgagctcctccccgttcatcagagcggaatga

SEQ ID NO: 31299 - DNA, 141 bp, Zea mays
  Peptide Sequence Number=SeqID_73078
atggaggagtgcatgagccgcctccggagccgccacgacgctgacaaccgtggctggaacccgctccatgttgctgctcgcaagggagacctcaaggagatcatggatcccaaggccaccttggtctttgggctgacataa

SEQ ID NO: 31300 - DNA, 399 bp, Zea mays
  Peptide Sequence Number=SeqID_73079
atggtgcatagccgccgaagcgcacgcgcaagggacgacagcgcaaagctccacgcagcggcgcaggaggtgcacttccttccgttcaacttcaaccccatcgacaagtgcatggcgctcaccgcctgcatcgccgacggcaggtgtcaccgcgtcagcaacaagggtgctccggagcagatcatgaccctgcgcaagtgccaagaagaggatgtcacaaacaaggttgacgccaccatcgacaagcatgctgagcgaggcctcgccgtcgccagacatgaagtgccggagaagcgcagcaaggacgacggcactggcggtccatggcagttcgtcgccctgccccttctgccccttctcgacccgtcgcctacggaggacaacggtggaagcgcatag

SEQ ID NO: 31301 - DNA, 267 bp, Zea mays
  Peptide Sequence Number=SeqID_73080
atgaagcgcacgacttcccgtgaatgcgtgaggcttggagctctacccatggcagtcaaaggggtgcccagaaaagttatttacaaggtgttgtatttattaaatgatactctaacctataccattttagagaatgactctaaatatattattcaaggtttatcacccttgtcacctttgagcgggatgatcagggagtccctggtttgggagggccttaagaatattttgaaaaaaggttttgaaaggttcggcattgagttgtga

SEQ ID NO: 31302 - DNA, 621 bp, Zea mays
  Peptide Sequence Number=SeqID_73081
atggtggccttgaccgcggggatttccgtagctaccggcgtcgtgttcagccccgccggccgccggcgaggccgtggacacgccgcctttcgctgctcgtcgtcctctgccggagagaggcaggctctcttcagccgcatcgcccccgtctacgatcatctgaacgacgtgctcagccttggacagcaccggacgtggaagcgcatatgcgtctcttggtcgagagcgaagatgggggatcgagttcttgatctctgctgcgggagcggggatttggcgttcctgctgtctcagaaggtcggcttagatggagaggttggtgttggattcgcttatacaactacagactgctgctggccgtcaggagcaacggtggaagctgtgttacaagaacatcaagtgagcatcctcaatgtgaggagttgggcgatagacaatgttgtggttcctttagctagtggctatggactaactgaagaatacaagtacttgaaaagctccatatcacagtatctaacaggagaagagttggagaaactggccaaagaagctgggttctgtgcagcgaagcactacgagcttggtggagggcttatggggaatctagtagcgactagatga

SEQ ID NO: 31303 - DNA, 108 bp, Zea mays
  Peptide Sequence Number=SeqID_73082
atggctaagctggtattcaaatactggctcaactggtttcaggctggttcagctggtattcaaaaaccagctcagccgattttgactgtggtccacccaccggcttag

SEQ ID NO: 31304 - DNA, 408 bp, Zea mays
  Peptide Sequence Number=SeqID_73083
atgcccaaaggtagtgtgtgctaccccgacccattactggcccccaaacggcatcaaaggcggtggcgacatctcaaccctacttctcctaccgactggttcttcatgatgcaagcggaggtagcaaggggagccacggtgctcttaccagatcctgcgccgccgcccgcatggagtccatttgccaccgcgtacacagtaggcgtcagcgggttaccgaaggtaaagaacgtcgcggaagccagggcgagctccacggcagaccgcggccaagggagctacgccgggctccaccgatggagaaggcctggcgcgcgcgaccatggagcacgcgaaggtgtcccgcgcttgggcttgagggagtccacaggggtcagaggtgggagatggcgtcgcggagcatgctag

SEQ ID NO: 31305 - DNA, 408 bp, Zea mays
  Peptide Sequence Number=SeqID_73084
atggatgaggagctcgcgtcggcgccggtcgatccgaggactgcgggcgattctgttggagagaggtctgaccgcgtggccccacgctccagtcatagcgcggtggaaaatgaagctgctacacaggcccataggtcagtgggaaaacggaagcactggcgtgccgctgtgtttgacacgtgggacccggacctcagcgtcagtgtaacacagactattacaggaggcttcggctttgagatgaagcatctgagaacaaggaccaacattggcgcccacctctggtgtactcatttccacaaccttcggcaaagcatcaaacttcgttataccgcagaagaagacagcagcgccaagggctgcactgcagccactggacacgaactaggagacactccctctccgtga

SEQ ID NO: 31306 - DNA, 423 bp, Zea mays
  Peptide Sequence Number=SeqID_73085
atgcactttttttatgcttaccacgatctaggtgcgcagacgtccccctgcgacaagtcagaaggggaggtgggtacccgcttcctcaagtggttgcaggaggagttggagtccctcctctctatcgtgacagggctcatgtcctacgcgtcgcttgttacctgcgaaggggtagcgaatgccttgtcccgtgagggctacaagcatttcaaagccttcgaccagagtgacgaggacttcaaccaaggagttttccaggcgatgtgggacgaagaggtgaaaaacctcaccggcctggagagctcagtgtccaaacaagatactgatgaagaggcgggtatcaaggagcagtcatcgctcgctacggtgggcgttactgaccctggagcagcgagaaccttgcatccatctgcctctccgtag

SEQ ID NO: 31307 - DNA, 456 bp, Zea mays
  Peptide Sequence Number=SeqID_73086
atggggtccaccgaagccgagttcgtgatccacccatatctcgctaggtggtgcaatttatttgttctgcgactgattggacatttgatggacgttccctggctggtcttcacgtcgcttctgtcgaggaggagttctcctctgagtccaaggggtctccagcttccatccctctgcgtgagtcgtctgcttgcggcggaggtctggacttacatccgggccgtcgaacgctccgggctcgagggctcggatgagtcggagtactccttggacgaggaggactcgtccgagggtggtggcggcgatggcggcgacgatgacgacgacgacgacgacgacgaaggcggtggcggcaatgacggtgacggcggcggcagcggcggcagcaaggatggcgacggcggcagcagcggcggcggcagcagcagcaagggcagcaacaaggccagtggctaa

SEQ ID NO: 31308 - DNA, 525 bp, Zea mays
  Peptide Sequence Number=SeqID_73087
tctcaaaggaggtttgaaagggaaaaggtggacttggaccatgaaagacttccactgcactccaatgagaggccaaagtctgctcagtctgggagcaccggacagtgtgcggtgtgtcaggctggctcgagcaaactggccgctctcaggaattcaccggcgacgtacggctataattcaccggactgtccggtgagccaacggtcggccgcgcaatccgcgcgagacacgtggccgagccaacggtcggaagggggcaccggactgtccggtgtgcaccggacagtgttcggtgcgccaacggctcccaagtaccaacggtcggcttcgccaaagaaggaaagagatccgcaccggacagtgtccggtggtgcaccggactgtccggtgcgccagacgacagaaggcaagatttgccttccaacaatgctctcaacggctcctagctgccttagggctataaaagggaccccttggcgcatggagaagataaccaagcattctctaagcattcctaagcactaa

SEQ ID NO: 31309 - DNA, 300 bp, Zea mays
  Peptide Sequence Number=SeqID_73088
atggatgccctcgcaccgggggcaatccggacccaactggaagtggaagcgacatctcggggccaagcgccgctgaaaggcagctacgaagaagaaggggatcacgacggcaacgagtcagcagattctaaaaaaaatcctagaaacgcccctctgcctctcacgcgtgaattctcctctaccgaagggaagacactcgaaggttgtcgaggccgtttacgatgtagttatggccatattctctataaaacgaatttcatcttcatggcttctcacaaacttcgaaaatgggagcgttga

SEQ ID NO: 31310 - DNA, 366 bp, Zea mays
  Peptide Sequence Number=SeqID_73089
atgtcggcgccgccgctgacgtcgggggagccgttccacgtgttcgtggggtacgacccgcgggagcacgaggcgtacgaggcgattcgcggcggatccatctcgcgcaagggaaggggagcggggggcgcggcgcgcgagcagacgggcatcgagaggcagaacacggtgcacggatatgatatgaatacttgtgcaactaaccttgataagctaggtgcactcaaggtcaaagctaggtacattatcaagaagaggtttgccaacaatgatgtattaagaaaagttaacgccaagtataagcccccaagaaacaaccatggacgaagggcacttggctacagcccatccaagctcataacatga

SEQ ID NO: 31311 - DNA, 234 bp, Zea mays
  Peptide Sequence Number=SeqID_73090
atggcgctgcaacacctgtcctctgcggcctgcgggcttaactccctggcaccggggccatgctttcggttcgggttcgggctctccgttcctaggcagccgagattagaagagctccgattcctggcgcgaaaccgctacaaggtccgctgcgtcgtgattgccaagggacggggagattcgatgcgctggcggcggcggccggttacggcggagagtgcgagtgtgagctaa

SEQ ID NO: 31312 - DNA, 330 bp, Zea mays
  Peptide Sequence Number=SeqID_73091
atggcctggcctccacgccgccatgcacgtgttaaccccggtgccagggagttaagcccgcaggccgcagaggacagctccctgtttctgagcgcaaccgcggcgcagggggggaatggaaaatctacgccgtcgctgtcgagggtggcgtcttggcggtcgtcggtcgaccaagtgggcggcccgcgctatgggatattgggattcagcggcagcggcagcggcaacggcaacggaagcagtggtagcggtctagccgtgccgtgggcggctgggcgctggccgcggttctgcttccgatgcgagtgcggaactgcggataggcaatga

SEQ ID NO: 31313 - DNA, 321 bp, Zea mays
  Peptide Sequence Number=SeqID_73092
atggccgcctctgccttcctgctgtgtgcggctcgttgggcgttggccgcccggcggccgcacgatatgtctttgtcattgccataccttatttttgggtcgtgctccgccactgtcggtatgatcatgcgtgcttgtatcattacacacaacataatcattaaggatgaatatgaaggagcatatgatgtgcataactatgagttagtcgagttcttcgttgcaacactaaccatcacttttgaagtatccatgagctttgcagccattctgcaacgtgaggctgcaatccatgctagttcggctcatgatctgctctaa

SEQ ID NO: 31314 - DNA, 678 bp, Zea mays
  Peptide Sequence Number=SeqID_73093
atgaatgatatagttgcagatcctggccttagaaaaccaattgatgagtctcgccatgaaattagagatgatgctaaaagagattatttacaaatgggcccatgtcaaccatttggtcatacatttccacggacacctgttcttgttgagttcaacaaccgcttccctgaaagatcaactcagttacttggatgtgttggttgccttgatccaagggattcttttgccaactttgatttagagaagttaattgagctatcaaagatttatgatgctgattttagtgattatgaacgtacatgccttatggaccaacttctcttattcattgatgaggttagaaatgatgatggatttagagattgtaatgatcttggacaccttgctacaaagatagttaaaacatatagacacatatgtttcagtttagtgtatcgtcttgttgagcttgcattaatcttgccagtggcaactacaactgttgagaaggccttttctgctatgaacattatcaagactgaaagaagaaataaaatgggtgatgaatggatgaataacaacatgctatgctatattgagcgtgatatgtttgtagaaattcaagatgaaaagattttgaagcattttcaaggcttaagaacacagaagataaatttacctcgcagcatcaactcatga

SEQ ID NO: 31315 - DNA, 393 bp, Zea mays
  Peptide Sequence Number=SeqID_73094
atgtggacgcgtcacgcgtggtcgcggctcgcgggctctcggcggtgctccgggcgccggcggggtgagcggcgatgcggtagtgctccgacgagcttcctactaagcaaagccttgaagttgttgcaagagagtgaagataaggagaatgagcttattgtcaacgatctggaaaagaaggtgaagaaccttgaaaacatgttagaagaaaaggactctaagctcaaggttgtcgaagaaaatcttactgaagttcacctttgtaacaaaaatcaagtcatacaaatttctgatcataacaaaaaattggaaggattgagcaaagaacttgatcaagtaaagtcaagttttgaagatgctgtaacccactttaagcgtgaagccgaagaatga

SEQ ID NO: 31316 - DNA, 230 bp, Zea mays
  Peptide Sequence Number=SeqID_73095
atgtctggagatcacgccaagagggagatcatgactggcgagaaggccgcaagcttggggaggactctctcaagggagttcggcaacaaaaacaaggaggaatcctcttcctccatcaagtcgcatcagagaggtgacaagaagaagatgaagaaagtggtctactacgagactgactctttgtcagcctccacatcgagctccgagtcatctgtgacggaacctcccaa

SEQ ID NO: 31317 - DNA, 525 bp, Zea mays
  Peptide Sequence Number=SeqID_73096
atggaagcaaagcaggctgaagcacgctgggagaagatgatgctggccatcgagaagctgacaggcaaggttgatgccatggaggaagagaggacgctgtttcgcaagcaaatggaggagaccgggaaggctgtttctcttcttcgggtggaagccatggcaagggatatggatcgttatgggaatgaagaagcaggagaaagagacaacaaaaattctcagaatagaggagaaagaatgcacagagttatgtcccagctccctgctactgttcacaaggcacaactattggctcaagttcagcaggatattattgataagggaggaatgaagtttaccaagcaacctgttcttggtagattgggaggaggaaatagagcagaagagaaatttgaacctggtcatcaagcaaggtgccagagagggaatgcagtccagttacatgttctagttcctaaggacatggagaaggttttaactcctgaagtattggagcaaatagagcaagaggagaaacatgaataa

SEQ ID NO: 31318 - DNA, 690 bp, Zea mays
  Peptide Sequence Number=SeqID_73097
atgcaggtggcgtgcaaccgcaccgcggaggcgcacccttttgacctcaacgcatccagcatggaggcccaggcccacacgtcatggacagggaaaggggatatttcgaaagggatccttctccgcgaaggaaacgggccccgagccctcctactgatcaggggttcgaaggctggcccctcggaagggggttcgaaggctggcgcctcggaagggttcgacaaccgccccagagcacgcagagcgagggatgactctgggtacgtccgttacatggccgaggctcgggctacgctcccgagggtgaggctgacaacagctaagtccagcctcaggcgcaacaggaagctccgcctcgcccgaccttgggcctcggcctcaggaggaggtctccgtctcgcccgaccccagggctcggcctcaacctcggcctcggaaggtggtctccgcctcgcccgaccccagggctcggcctcaacctcgacctcaggaggaatcgcatcctcgctcgacctcggcctcaggaggagtctccgcctcgcccgaccttgggctcggaccaaccacgccacgggggccccctatggaagcaaggagcatcaacaaggtcccagcagccccgacagctgtgcttctacagagctcaatcgctcctccgacggccacgacaccacgtacacagggctctag

SEQ ID NO: 31319 - DNA, 189 bp, Zea mays
  Peptide Sequence Number=SeqID_73098
atgttcaccgtcttcaggaaatatcgtgcagtggataagaacctggacctcgccggcgataaggatatcaccgtggctcggcggcacacaggaatagtacaggaactattttccagttacccagaaccccagggacctttccgcaagatcgccagcgcgggcgcgcgcgcgggcgctttctccctctga

SEQ ID NO: 31320 - DNA, 1600 bp, Zea mays
  Peptide Sequence Number=SeqID_73099
gagccatgtcttcatccccattttcgccaacgccggcgccggcaccggtgtcgccagaatctttgacctctgtcgcgtctttacgggcaagcacatgtccttcctcatcgccctcctcctcatctcaccagccagggcacttcatgagaaggagcgaaggagaaaaggtagcatgacacgcaaccagttcttcacggtggcattcatctgcagtttcgcctactacatcttcccgggctacctgttccagatgctcacctccctctcctggatctgctgggtgtttcccagctctgtgattgcccagcagctcggctcaggcctccatggccttggcatcggtgcagttggactcgactggtcgtccatctcctcctacctcggaagcccccttgctagcccctggtttgccaccgccaacatcgcggctgccttcttcattgtcgtgtacataatcacaccgatcaactactggttcaatgtttacaaggcacgcaacttccccatctactcagatggcctctacacggtggctgggcagaagtacaacatctctagcatcatggactcccatttctacttcgatacagacgcctatgagaagagtgggccactgtacatcagcacgttcttcgcttccagctacggtcttagttttgcatgccttaccgcgacggtttcccacgttctccttttccatggaagtgaaatatggcagctaagcaaatcagctttcgaggataagaagatggacatacataccaagcttatgaggagatacaggcaggtccccgagtggtggttcatctgcatccttgtggctaagtacatcatggggtacctatatcccggacgacccatggcgaacatgtgcttcaaagtatacggctacgttggcccacatcaagcactagagtttttgcaagattttaagttgggccactacatgaagatacccccaagggccatgttcacggctcaggttgtgggcactttgattgcgggctccgtataccttggaacaatatggtggctcctggacacaatacctgatgtgtgcaacacagagcttctcccagcaggcagcccttggacatgcccttacgatcatgtgttctacgatgcatccgtattatggggccttatcggcccacgcagaatatttggtgatttaggcacttactccgctgtgaactggttcttcctgggcggtgccattgctcccctccttgtctggtgtacacacaaggcattcccagctcagaaatggatccggcatgtcaatgcgcctgtactgattggcgcaaccaccttcatgccacctgccactgcagccaactataccacgtggatactcgttgcgtttctgtcaggttacgtggtctataagtaccggcgtaactggtgggagcgacacaattatctgctgtcaggtgcccttgacgccggtttggcgttcatggctgtgttgctctatctatgcctgggactggagaataaaagtttgaactggtggggcaatgatctggacggatgccctcttgcttcatgccccactgcaaagggtataactgtggatggatgtccagtgcataactga

SEQ ID NO: 31321 - DNA, 306 bp, Zea mays
  Peptide Sequence Number=SeqID_73100
atggctgcggtgattgccagcactcaaaactgtcgcgttcgtgtgccagcactgatcgtgttcactgccgtgctgctggtgacggcggcggcggcaaccgtggagccggcatcagccacgggctggtccagtgtcactgacagcccgcagcggcggttactcggcgttcagcctgcagggcgcaagaaagctactgctgcaggacttgtgcataccgcaaggggagagggttcttttcttgccgctactgtcagcgtgctgtgctgtgctagctttggtttctatatggtccgtgttcagcgatga

SEQ ID NO: 31322 - DNA, 643 bp, Zea mays
  Peptide Sequence Number=SeqID_73101
atgcatcctgaacattgttgcttcttgttcatatcaaattatcagacgccttctctctccgtcgccaggtgctcccgcccgccgccgccgatcgtgtggttccgcctgccgttgacgccccgtggcgtggatcccctcgccgtcctcggagtcgaggaggcagcgaccggctgtggctcagctggctcgctgctgtcccgcgcgcagaagaacgagaagctcggcatggaagccatgggcatcgggaaccctcctcctcctcctccgtcaagtggttcgcagggctcaccgaacgagaagccagagccacccaaggcggaggaggccgagcagggcggcggggccgggtcggtgatgaacgccgagaacgacgacctgcagacggcggcgaacgtgggcgagcagcagtcgcctcgtcctcgcccccacccctccacgcgatggggccacgcgtgtcaaagctcacgtccctgctcgcgacgccaacggcgtgagaaggagcacgagcggcgccctcccgttgaaggccggtcctcgtggcactgcccgcacgagtttttgggggtcgccgtgttcctgcatccacgatgcttctgcgtaggaaggaaacattggcttaatccaaggaacgaaaatggcacat

SEQ ID NO: 31323 - DNA, 224 bp, Zea mays
  Peptide Sequence Number=SeqID_73102
gacgccttgaagggacacaaggagtagccaaacaagaacaggtcaaagggaaagcgtcctacttcaaatgcggactagctgccttctcctttgacaagtcctccctcttccccaatgaacatcacacttatctcatggctaaggagaagaaggataaatctaaaacccaaggtaccttaaatgtttcatatggagagctcaaaatgagtttgagctcaaggtga

SEQ ID NO: 31324 - DNA, 681 bp, Zea mays
  Peptide Sequence Number=SeqID_73103
atgggtagaggcaggaggggtagtggctggcctcgcctcgctgatggcaagcgcaagcacgctccgagccctccctcggaggactttggcgactccgagtactcggaggagacctcctccgaggctgatcgttcccctgctccggcttctcccccggcgtcatccgaggactcggatgactccatggggctgtccaccgcagcccaggcgtattggcgctccatcgagcgcgtcgggctcggtgggtcggatgagtcggggccctcctcggacgagacagactcatccgaggagtggagtggcggcgatggtgacgacgagggcgacggcagcagcagaggcgacggcgacgggagcagcggcagcaagggcaacgacggcgagggtgatggtgacggtagcaacggcgacgacaagggcgacaacgatggcagcagcggcgatggcgagggcgacggtgacaacgataggggaaacagcagcaagggcgacggcaacaacgacagcggcaatggtgacggcagcaggggcaacgacggcagtggcgatggtgacgaaggcagcagcggcaagggcgacagcagcggcaagggcgtcggcggcagcagcaaaggccagtggtataatgccactggtttaaatattagtatagatagtagtggtagcagtagaataaggtag

SEQ ID NO: 31325 - DNA, 105 bp, Zea mays
  Peptide Sequence Number=SeqID_73104
atggccaactgcagcgccgcagccggcaagctcatcgtcgcggagaccttctccaacctcagggagcaaggcaagtggttttatgtcgagtacacatcgtcctag

SEQ ID NO: 31326 - DNA, 159 bp, Zea mays
  Peptide Sequence Number=SeqID_73105
atgaggcgcctcgcgagtggcccgacgaaaccaccaggtgtgggggccgcaggtcagtcagccgaggggacggatatggaagttggcgtgaccgaaggcggattgacggcccgcttgtcggggctcagcattcttgtatgtgcctcccttaaactataa

SEQ ID NO: 31327 - DNA, 291 bp, Zea mays
  Peptide Sequence Number=SeqID_73106
atgggagctctcgctgggcgcgacatagggaagatgagcaggggtggagctcggcctgacggctgccatggcaacgggcagagggactccggcgtccagggcagggtcgacggcggcttgaagaagagagagagggagcgacgcggcaagtaccagcaagcagcagggaagagagtagagagagggagagggagacacagctgcccgcagaggagccctggccgggcgctcggccatgagcgggagcaggagacagctccacgaatgggaggaaaatcacaagtattttga

SEQ ID NO: 31328 - DNA, 261 bp, Zea mays
  Peptide Sequence Number=SeqID_73107
atgactcgccccagtctcaggcgactactctgggtccacaacagcgcccgactccaccacatgggcggatccgaagccgacacatgtctacagaaggtgatatactccaaagcatcaacagtaagtccggacttccacaggagagcgccgaacccctggatgtatggtccagaccccaaaggatacgggtactattcgggcgggtacccggtttctagatttagcttgggcctacttcctgttggctgttgggctgcttga

SEQ ID NO: 31329 - DNA, 931 bp, Zea mays
  Peptide Sequence Number=SeqID_73108
gcctcaggcagtcaggcatcttgttgattgcgaaatcattgaggttggttggacacctggacctggacgagaagaactcaacgagaacgtgggaggacaagacaggaggaggcagccggcgggcggcggcggcccacgggcacgggcgccacggccaaacgcgtgcgccatcagtcaaactccgcccacggactcccgtgacgtggccggcgagtgcgttggggccttgggggagctggccaacggttccgttgtcgctccatcgctgccgtccgccacgccatccccgacggaaactgccctgccgcggctgcctcactgtctgccagactgcccacccggccccgtctatcccttggaaagtcagacgagaaagcgtgctgggcaccgcaaggaaagcgaccacgaaaccgcgcgcctcctgcctctccatcttctccatatatactacctatcgaccgtgtcccggcgggccggacctctgtcgtcttggtgcgcgcgctcggtttcccttccttttccctcgcgcgcggccaacctagaaagcgacggcggagccggagagggaaggggaggcgggccggctggtcaagggcggacgatgtgctgcggcggcgacggggagtgccggccgctcgggtggctcctgggcctgcccttcgcgctgctcgccgtcctcgtctccttcgtcggcgccgtcatctggatcatcgggctgcccatctcgtttatgcccctgctgcctctgcgtgacggtgctgctggaggtggccgtggagctcgtcaaggcgccgctccatggaatccgcatgaaaatccgtctgaaattgcgagcggagcggttccagaatccaaacttgcaagttccgcctccgcctccgccggctggggcgaagattccgccgagtgggcctgggggtcgcttgggtag

SEQ ID NO: 31330 - DNA, 201 bp, Zea mays
  Peptide Sequence Number=SeqID_73109
atgacgttaatcggaacccgtagtcgtgcttgcgactatcgcgtcgaattagtcagggataaaagaggtctcaataggtctcagtattgcggaactgtaggtacgttaattgatcgcgcgatgcggaagacgacccaagtcgaccccaagcgcgggctaatctgcaagctgaagctgatgaatcaacctaaagatggttaa

SEQ ID NO: 31331 - DNA, 375 bp, Zea mays
  Peptide Sequence Number=SeqID_73110
atgggagtttcagcgacgagcgtaggggcgcggctgcaggggagcttgggcaccgaactaggaccaagccatggatgcggcacgcgtagggagaaacgccggctgctgagcgcgtacaggggagaagaaaaaccaagctggagcaagacgcgccagggaaatagtagggagagctcggccggacggctggagatggccggagacgcgagcaacaggcaggctctgggcatggtgcgctggagcagaggagtaccgcggctgaaagaatcagtcgcgcgtgggagaagcagcagctgggcgcgtgataaaaagagcagggaggcggcgtccacagataggaacgaaagattttttttcctcagagcagagcggtga

SEQ ID NO: 31332 - DNA, 261 bp, Zea mays
  Peptide Sequence Number=SeqID_73111
atgaaggtcgtcgcgggtggaacgatgggatgccaccgtcgtgggcgggtggtcggccttggggacttcaccagtgctccccatgctcgagtgcagcccgctcgactgctcatgggaagaccctttgggtggctctttgtacgcccagacttccgcacaggtggcttcggtgcggctgcaattcctcaccgggtctcaggcagtaccgccttgccgcactgctccgtggatggagacaatcatggcagtactctagggtga

SEQ ID NO: 31333 - DNA, 105 bp, Zea mays
  Peptide Sequence Number=SeqID_73112
atgaggctacttgggaaagagaagatgaacttagagcagaatttccccagttattctcggaagtttcttaatctcgaggacgagattctttttaagaaggggtaa

SEQ ID NO: 31334 - DNA, 147 bp, Zea mays
  Peptide Sequence Number=SeqID_73113
atggcgaactcgattagagcacgtaccgcagatggaggtcaatggagggagctggccacggagaagagcggacccgcggtggaggttgaagtgcgtttgaattcaaatttaaattcaaagtttgttatgagcttcacctttgagtaa

SEQ ID NO: 31335 - DNA, 660 bp, Zea mays
  Peptide Sequence Number=SeqID_73114
atggccacgctcgccaggcacctcatcctgtgctcctcctcgccatcgcagcgccgccggcgccccctgccgcccgacgccaccgcgggcacgcagcagcagcagcagcagcaggcgccgccgccgcagccgtccaccacgcgccgcctggcggtggccgcgtccgcggcgctggcggccacggccgcgctgtccgcgcgccggcccgcaccgcccccgcccgcgatggccgccgaggcggccgtgccgcccgcgccgccgacacaggcgtcccacgggaccgtgacgcgctgggacaccaaatcatacgtgagaaaacggttcttcgagcccgagctcaccgctgaggaggcggccgcgcgcatccgccagaccgccgagggcatgcgcacgctgcggcccatgctcgagaccatgtcctggaagtacgtgctcttctacgtgcgcctcaagtccaagtacctcggcctcgacctcaccaccgccatggccggcgtccccgcgggccgccgcgctgactacgtccgcgtcgccaacgagctcgtcgacaacatgacggagttcgatcgcttcgtgcggactcccaaggtctacgagtcctacctcttctacgagaaaacgttgaagtcgctggatgacgtggcagagttcctcgtttga

SEQ ID NO: 31336 - DNA, 234 bp, Zea mays
  Peptide Sequence Number=SeqID_73115
atgctgactccggggtcccgcgagccaactacgccgtctacgcgatgcgtggagcgtagtgtggcttcttcgggcagcagaccacctggctccacgtccacgaactgctctgcgctcgcaaaccacacaactgcacgaaacgaaagcccgcacgcagggagaggagcccctgaggtgacaaaaacaacttcggaacaacttcgcattaaagccaactacatctgcaatccatag

SEQ ID NO: 31337 - DNA, 861 bp, Zea mays
  Peptide Sequence Number=SeqID_73116
atggtgcctcctgttgacgtggtcggtccgtgccctaggttgagcgaggtggaggctcctccgaggtcgaggtcgagtctgtcttccaaggccgaggtcgagtccgagcccctgggtcgggcgaggcggagaccgtcggctgatgccagggctgagtccgagccctggggtcgggcgaagcggagttcgtcgtccttcggggctgagcccgagtccgagccctggggtcgggcgaagcggagttcatcgtcttccggggctgagcccgagtccgagccctggggtcgggcgaagcggagttcgtcgtcttctggggctgagcccgagtccgagccctggggtcgggcgaagcagagttcattgtcttctggggctgagcccgagtccgagccctggggtcgggcgaagcggagttcgtcgtccttcggggctgagcccgagtccgagccctggggtcaagcgaagcggagttcgtcgtcttccggggctgagcccgagtccgagccctggggtcgggcgaagcagagttcgttgtcttccggggctgagcccaacagtcggagcggcgcaggcggcgctgtcctcttgtcagactggtcagtggagcggcgaagtgactacggtcacttcggctctatcaactggaggcctcgcgtcaggataaagcttcgtgctgatgggggttaccagctgagatttaggagccttgagggtacccctaattatggtccccaacacctggcgggtggcacaacagtcggagcagggcaggcgatccttacattgaatgctcctgcgatccggtcggctggcgacgcgatctggccaaggttgcttctccgtgaagcctgcccgggctag

SEQ ID NO: 31338 - DNA, 759 bp, Zea mays
  Peptide Sequence Number=SeqID_73117
atggaagcagcggcaggaggagtggaggcggagggggtgatgagggtgctggtggtggacgactcccccgtcgaccgccgggtggcgcagctgcttctcagcagcgactcctgcgccggctcattccacgtcatcgccgtcgacagcgcgaggaaggcgatggagttcctcggcctcaaggacggcggcgaggagcaggccgtcgacatggtgctcacggactactgcatgccccgagatgaccggctacgacctcctcaaggccatcaaggtacttacaacttacttaccccgctgcaagaagcaatatcagtcgctgcggcattttatgcactgaaccccctggagccgatcccggtcgtcgtcatgtcgtcagaagacgagccccagaggatcagccgatgcctgagcgccggcgccgaggacttcatcgtgaagcccctgcagagcaaggacgtgcagcgcctccggaactgctccgccgccgcgaggcccagcaagggcgccgcgccgtgcgaggccgccgtcgtggccaagaggaatcaaaagccgccgcatcctgccggcgccgcgtcgccgtctggacggcgagcgagcctcgccggagtcgccatggtgctgcactcgtcgggcgtggagtacctgccgctcctgctcaagctcgtcgtgctggcgtacgcggcgctgtgcctgggagagctcctgcacaggtgggcgtcgtcggacggccgctgctcgctctccccgtggtgcgcctga

SEQ ID NO: 31339 - DNA, 1998 bp, Zea mays
  Peptide Sequence Number=SeqID_73118
atggtggccgcgtccaccgccgtctcaacggtgtccgcgatctccactcacattgccgccgggcacctcttcgcggccatcgacgccctgccctcgtgctccgcctccttgctcccgccctctctttacgcctcgctcctccgcttggcaacctcccgccgctccctcgccgccgcccgccggatcgcctcccacctggcctcctcttcgtcagcttccccttccacctcggtctcgttcactccaacattcctgttcaaccgcgccatcgagtgcctcgctgcctgcggcagtcttgccgacgcgcgggagatgttcgacgcaatgccacgccgggacggcggttcctggaacgccatcatctcggcctcgtcccgcgccgggcaccctgcagaggcgttctccctcttcgctgacatgaactctcttggcattcgccccaaggatgtcacgctggcatcagtgcttgcctgctgtgctgagtgccttgacctgcgtggtgcacagcagctacatggtcttatcgcaaagagggactttcagtccaatgtgattctaggcacggcactggtcgacgtgtacgggaagtgcctctcgcttacggatgtaaggcgagcatttgatgacatcctgcaacccaatgacgtttcatggaacataatcatccggagatatcgtcttgctggtatgggcgacatggcacttcatatgtttttcatgatggtacgggctggcgttaggccgctggtatatactgtcgcacatgcaatgcttgcttgccgggataactgtgcacttaaagaagggaagtgcatacatagttttgtgctccgccgaggatatgaccaccacatacatgcgcggagctctgttgtagacatgtatgctaagtgtggcgacattgatgcagcacaaaggctcttcaacttggcaccaaagaaggatgtggtgatgtccacttcagttgtgtcagggttggctgcttgtgggaggatcgctgatgcaaaaatggtgtttgatggcatggaacaacacaatttggtatcctggaatgctatgttgaccggttatgtcaagtccatggatctgactggtgctttagatttgttccagcagatgaggcacgagacaaaggagcttgatgtagttacacttgcttctgtactcaatgcttgtacaggcctgcttgaccttgggaaagagagagatagatacgcctggaactcaatcatctcaggttacgaacgccactccatgagtgaagacgctctgcatgccctacgtgagatgcaatccgaggcaaaacctagccagtcaacgttcagctctgcccttgcagcctgtgcgaacatatttctacttaagcatgggaagcagattcatgcatacatgatcagaaacaggtatgatattgacgatatactgcgaagtgcactggttgatatgtattccaagtgtaggctgtttgattattccacccggatctttgagttaggatcatctgatgatgtcatcctgtggaattctatgatctttgcatgcgcttaccatagtaaaggtgactatgggcttggattgttggatgaaatgcggaagcagggggttagaccagactctgtcacttttcttggtgctctggtttcatgtatctgtgagggccatgtcgggttgggaaggagttatttcactctgatgattgatgagtatagcatcgttccacgaatcgaacactatgaatgcatgatcgagctgttgggaaagcatggatacatggttgagctagaggatttcgtggaccacatgccctttgagccaacaaccgcgatgtggctcaggatctttgactgctgcagggaatatgggaacagaaaattagggcagagggctgcacagcgtatcaatgatagcaaacccctgactcccgttatatttgttgagtccgctccggtctacgaatgcagtgactgtgacgatgcagagcccatgtcattctgctga

SEQ ID NO: 31340 - DNA, 3615 bp, Zea mays
  Peptide Sequence Number=SeqID_73119
atgactgtgagggagaccttggccttctcggcgcggtgccaaggtgttggcaccagatacgaaatgctcactgagttggcgagaagggagaaggcagccaacatcaagccagatcatgacattgatgtctatatgaaggcctcagctatgggtgggcaagaatccagtattgttacggactacacactgaagatattaggcttggaggtctgtgctgatacgctggtaggaaatgagatgatgaggggtatttctggtggtcaacgaaagcgtgtcacaacaggtgaaatgcttgttggtccggcaagagctctgttcatggatgagatatccactggactggacagctcaaccacataccagattgtgaattcccttaggcagactatccacatccttggtggaactgcagtcatttccttgctccagccagcgcctgaaacatacaacttgttcgatgacattatactcctatctgatgggcatgttgtataccagggcccccgtgaacatgtgctcgagttctttgagttcatgggcttcagatgccctgccagaaagggtgttgctgacttcttgcaggaagtgacatcaaggaaagaccaggggcagtattggtatcggcaggacaggccataccgctttgtgcctgtgaagaaatttgcagatgcattcagtatattccacgtgggccggtccacacaaaatgaactttcagagccatttgataggacccggagccaccctgctgccctagcaacttcaaagttcggtgccagcaggatggagttgctcaaagccactattgatagggagcttctactcatgaagaggaacgcatttatgtacattttcaaagctgttaaccttactgttatgtcgtttatcgtgatgaccacatttttccgtaccaatatgaaacgagacgcatcttatggaaacatctacatgggggcactcttctttgctctcgacacaatcatgttcaatggttttgctgagcttgccatgactgtcatgaagctgccggttttcttcaagcagagggatcttttcttcttccctgcatgggcctacaccataccttcatggattgttcagatccctatcacatttttggaagtcggggtttatgttttcaccacatactatgtcattggatttgatcccaatgtgttcaggttcttgaagcaatatctgctgctccttgcactcaatcagatgtcatctgcccttttccgcttcattgctggaattggaagagacatggttgtgtctcatacctttggccccttagcactgttggcttttcaagcactgggtggctttatacttgcaagacctgatgtgaagaaatggtggatttggggttactggatctctcctctatcgtatgcacagaatgccatttcaacaaatgaatttttggggcacagttggagcaaaattcaaaatggaacaaccgtgggaattggggttcttcaaagtcgtggtgtctttactgaagctaagtggtattggattgggctcggtgtcttggttggatatgctctcctcttcaacctgctctacactgtagctcttgcagttttgagtccattcactgattcccacggatcaatgtctgaagaggaattgaaagaaaagcatgccaatttaactggtgaagtcatagaggtccgcaaggaaaagacatctaggaggcaggaattggagctgtcccacagtgttggccaaaactctgtgcatagcagtgaggattctagtcagaacaggaagggaatggcactcccatttccaccactatcacttacttttaacgacataagatactcggtggacatgccagaggcgatgaaagcgcaaggagtgacagaagatcgtttgcttcttttgaagggcgttagtggttcttttaggccaggagttctaactgcattgatgggtgttagtggtgctggaaagaccacccttatggatgtcttagctggcagaaaaactgggggatatatcgagggagatattaccatctcaggatatccaaagaagcaagagacgtttgcacgcatatcaggatactgtgagcaaaatgatattcattctccacatgtaacagtgtatgagtcactcctattttctgcatggctacgccttccttcaggcatcaacttagaaacaagaaagatgttcattgaggaggtcatggatcttgtagagctcacatcactgaggggtgcacttgttgggcttcctggagtgagtggcctgtcaactgagcaacgcaagaggctaactattgctgttgagcttgttgccaatccttcgatcattttcatggatgagcctacctccggtcttgatgctcgtgcagctgcaattgtgatgaggactgttaggaacactgtcaatactggaaggactgttgtttgcaccattcaccagccaagcattgacatatttgaagcatttgatgagcttttcttaatgaagagaggtggagaagagatatatgttggtccagtgggccagaattcatcaaaattgattgagtactttgagggaattgaaggtattagccagataaaggatgggtataacccagccacgtggatgttggaagtgagctctagttctcaggaagagatccttggggttgatttcagtgaaatctacaggcaatcagaattataccaaaggaacaaggcactcatagaggagctgagcaccccacctcctggctctagtgacctcaatttccctacacagtactccagatcgttctttactcagtgcctagcctgcttctggaagcagaaaaagtcgtattggaggaacccaacctacacagcagtgaggctactgttcactgtagtcattgcgctcatgtttgggaccatgttctgggaccttggacgaaaaactaataaacagcaggatctgttcaatgccatgggatcaatgtatgccgcagttgtatacatcggaatgcagaactctggctctgttcaaccagtggtggtggtggagcgaacagtcttctaccgagaacgagcagcgggcatgtattcagctttcccgtatgcatttggacaggtcgcaattgaaattccttatatctttgtacagactttgctatatggagtgctagtctattcaatgattgggtttgagtggactgttgccaagttcctctggtacctgttcttcatgtacttcacactgctttacttcacgttctacggaatgatggcggttggcttgactcccaacgaaaccatagccgtcattacctcatcggcgttctacaacgtgtggaacctcttctcaggatatctgatcccccgacctaaactgcctgtctggtggaggtggtacagctggatctgcccagtcgcatggacactctacggattggttgcctcccagttcggcgacatcgcgcatccgctggaggactcaccgacaggccagacggtggcgcagttcatcacggattacttcggcttccatcacgacttcctgtgggttgtcgcaggggtgcacgtcgggctgaccgtgctcttcgcgttcctgttcagttttgccatcatgaagttcaacttccagaatagatga

SEQ ID NO: 31341 - DNA, 3420 bp, Zea mays
  Peptide Sequence Number=SeqID_73120
atgggtgggcaagatgccaatgtggtcactgactatattctgaagatattaggactagagatatgtgcagacacaatggtaggggatgagatgctcaggggcatatctggtggacaacggaagcgcgttacaactggtgagatgctggttgggccagccagggcgcttttcatggacgagatctcaactgggcttgatagctccactacattccaaattgtgaactcgctgaggcagtccattcacatcctcggtggcacagctgttatctccctactgcagccagcacctgagacatataacttgtttgatgatatcatactcctctcagatggtcaggttgtgtaccagggtcccagagaagaagtgcttgagttttttgagtctgtaggtttcagatgccctgagaggaagggcgttgctgacttcctgcaagaagtgacctcgaaaaaagatcagaaacagtactgggcgcgacctaatgagccctacaggtttgtggctgtgaaggaatttgcgactgcattcaagtcatcccacacagggagatctataacaaatgagcttgctgttccgttcgacaagagcaaaagccacccagccgcactaaccaccacaagaaccttccagctgatgctcatgtcaatcattgcaatgactctcttcttccgtaccaagatgaagcatggcacggtgaatgacgggggtctctacatgggcgcactcttctttggtgtgcttatgatcatgttcaatggcttctctgagctggcactaactgtcttcaagctgcctgtattcttcaagcagagggatctccttttctttccagcatggtcctatactataccctcatggatcctcaaggtacccatcacatttatcgaggttggtggttatgtattcttgacatactatgtcattgggttcgacccaaatgtcggcaggttcttcaagcagtatctgcttctgttagtagtcaatcagatggcagcatcactcttccggtttattggtggggtatcgaggaacatgattgttgctaatgtcttcgcatcgttcatgttgctagttgtcatggtgttgggaggatttattctagtaagagataaagtgaagaaatggtggatctggggctactggatctccccaatgatgtatgcacaaaatgccatttcagtgaatgagatgttgggccacagctgggacaaaatattgaatagcactgcatccaacgagaccctaggtgtgcaagtccttaagtcgcgtggagtattcaccgaagcaaagtggtactggattggctttggtgctatggttggtttcaccatactcttcaacgctctcttcactgttgcccttacatatcttaagccatatggcaactcccggccatctgtatccgaagaggagctgaaggagaagcatgcaaacatcaaaggggaggttctggatggcaatcacttggtatcagcaagcagtcatcgatcaacaggagttaaccctgaaactgattcagcaatcatggaagatgattctgccttgactaaaaggggaatgatcctcccatttgtcccgctctcgctcacctttgacaacatcaaatactctgttgacatgccacaggaaatgaaagctcaaggtgtacaagaagatcgtttggagctcctcaaaggtgtcagtggatcttttaggccgggtgtgttgaccgcactgatgggcgttagcggtgcaggaaaaactactttgatggatgtgttggctgggagaaagacaggtggatacattgaaggagacatccgtatttcaggatacccaaagaaacaagacacctttgcacgtgtatcaggatactgtgaacaaaatgatatccactcgccacaggtgacagtctatgagtccctgcttttctcagcatggctccggcttcccaaggacgtcgattcaaacaaaagaaagatcttcattgaggaggtgatggagcttgtggagctgaaaccactgagaaatgctttggttggacttcctggagtgaatggtctgtcaactgagcagaggaaaaggcttaccattgctgtggaacttgttgcaaatccatctatcatctttatggatgagccaacctcagggcttgatgcccgagcagctgcaattgtgatgcggacggtgaggaacactgtcgatactggtagaactgtggtctgcacgatacatcagcctagcattgacatatttgaagcatttgatgagcttttcctcatgaagcgtggtggagaagagatctatgctggtccacttggacatcattcttcagatctaatcaagtattttgagtcacttcatggggtcagcaaaattaaagatggctacaatccagcaacatggatgctggaagtgaccacaacttctcaggaacagattctaggtgttgatttcagtgacatatacaagaaatctgaactctaccagaggaacaaggccttgataaaggaattgagccaaccagcaccaggttcaactgacctgcatttccctagcaagtatgcgcagtcttccattacacaatgcgtggcttgcctatggaagcagaacctgtcatactggaggaaccctccttacaataccgttaggttctttttcactaccatcattgctctcctccttggcaccatcttttgggacctcggcggcaaaacgtatacatcacaagacttgatgaatgccatgggatcaatgtactctgcggtgctgttcattggagtcatgaattgtacctcagttcagccagtggtggccgtggagcgaacagtcttttaccgtgaaagagctgctggcatgtactcagctttcccatacgcgtttggccaggttgtcattgagcttccatacgcactggctcaggatatcctttacggtgtcatagtgtactctatgatagggttcgagtggacggctgctaagttcttctggtacctcttctttgggtacttcacgctgctctacttcacattctacggcatgatggccgtggggctgacacctaactaccacatcgccgcgatcgtctcctcggcattctacgccatctggaacctcttctccgggttcatcatccccccgaccgctcattcccgttcttgcctgccgctccgctaccttcagaaagtgccgatctggtggaggtggtactgctggatatgccccgtggcgtggacgctgtacgggctggttgtgtcacagttcggtgacgtcatgactccgatggacgacggaagggccgtgaaggtgttcgtcgaggactacttcgacttcaagcacagctggcttgggtgggtggccgccgtggtggtggcgttcgccgtgctctttgcgaccctgtttggctttgccatcatgaagcttaacttccagaagagataa

SEQ ID NO: 31342 - DNA, 381 bp, Zea mays
  Peptide Sequence Number=SeqID_73121
atggagattggaaatggtaaatctacgctcctgtggcatgatcgatggaatgagcaacgtttatctgaaaagttcctggagctttggtcttttgcatctgtaaaggagctcaacatttatcaagctcggttggcttccccggatgaaatattccatacccctctttctactgaagcgttcgagcaacttctctctctgcaggacacccttgataatatacagctgcttgatcacgatgatatttggcgatgtagtgcctcttccaaccggttttcttctcagaaggtctattctcacttgactggtgcaattttgctaagcgatgttggcttcttttgggcttcctcccgccttgttctacggatctcctgcataccctaa

SEQ ID NO: 31343 - DNA, 894 bp, Zea mays
  Peptide Sequence Number=SeqID_73122
atgatgaagcaggcgccggcgctgccagcggacgacgtagacctgcggctgtcggacctggagcaggtctgccacctcggcgagggcacctgcggagttgtcaccaaggtgcgccaccgcgggactggcaccgagtttgcgctcaagacgtcctactacgcccaccccaacagagctatggacgaggaagccgaggcgctccgccgatgtgccggatcgccgcacgtcgtgcgctgccacgcggttctcagcggcgccggcggcgagcccgcctacgtgctcgagttcatggacgccgggacgctcggcgacctccttggccgccggggcgggcgcggaatccccgaatgcgccctcgccgaggtggccgcgcggtgcctccaggggctcgcacacgtccactcccgcggcgtcgcgcacctggacttgaggcccgacaatctcctcgtcaactcccggggcgacatcaagatcggcgatttcagcgtgtccaggatcctacatggccgcgccgacgagcgcccgcaagggtctccatctccgttggttcccccatggccgcgcggcgccatcgccgccgacgtctgggccttcggcgtcacggtcctggagctcttcttggggcggtgcccttttctgcccccagatggggttaggccgtcgtacgtgaaactgaggcaggcgatctgcgacggggagccgccgtctccggccgactacgcctgcgtggcggcatcgcctgagcttcgcgggttcgtggcagcttgcctacagaaggacccgaggaggcgagccacggtggcgcagctgctcgcccatccgatcgtcgcgcaacgccacgttgaggagtctcgtcgcgcgctgcgggaactcatcgtggacacgctagagtag

SEQ ID NO: 31344 - DNA, 306 bp, Zea mays
  Peptide Sequence Number=SeqID_73123
atggaggataaggaggagccaaagccagaggagtgggtctcccaacccatcacccgtgatagcccccatgtcagttccacgagtcataggagataccctgaccgccaagaggccacctgtttggtgtgccgcccagaggacgacctccagggtgaagaggttgtctcagagcactactccatctctgagagggagtctatcgaggcggcgatgaaggatactacacagcgtgccctctcccactatcgtgctctgtttggtgagttagctgatgatcttaacataagatactacacaccaccatag

SEQ ID NO: 31345 - DNA, 396 bp, Zea mays
  Peptide Sequence Number=SeqID_73124
atgggcgcaccggacaatccggtgcgccaccggacagtgtccggtgcgccgccacgtcatcctgccgttaggtcttggagctggtcgacagttggaggcgatgtcctcatgtggcaccggacagtccggtgtcgcaccggacagtccggtgcccctctgaccgctgctctgacttctgccgcggtactgttcatccgtcagagtcgaccgttgcgcgtagatagccgttgctccgctggtgcaccggacagtctggtgaattatagtggagctgcgcctgggaaacccaaaggtgaagagttcgagctgattcaccctggtgcaccggacactgtccggtgcgctagaccagggcagccttcggcttgctttttgctcctttcttttgagacctaa

SEQ ID NO: 31346 - DNA, 1443 bp, Zea mays
  Peptide Sequence Number=SeqID_73125
atgagattgaaggggcttggaacgaaggtggaaaggggccaagcacttgggacgacttctgccacaaccatccggtggatagcggacgggagcagtggggatgttggagcaaactcctactatctgtatagggaggacgtcagattgctgaaggaaatgggtatggacgcctacaggttctccatctcttggcccagaatattgccaaaggggacactcgagggaggcattaaccataaaggcatcgagtactacaaaaagctgatcaacttgttgaaagagaacggcatagaaccatatgtgacacttttccactgggacacacctcaagcgctggtggacagctacggtggcttcttagatgataggattgtaaaagactacacagacttcgccaaggtgtgctttgtgcacttcggcgacgtcgtgaagaactggtttaccttcaacgagccacagacattctcctctttttcctacggaaccgggatctgtgccccagggcggtgctccccgggacagaaatgtgctaacccagttgggaactcgctcaccgagccgtacattgttggccacaacctcctccgagctcatgctgagactgtccatcagtacaacaagtactacagaggtaacaaggaaggccacatagggatggcgtttgacgtgatgggtcgtgtgccatatgaaaagatgttcctcgacgaccaggcccaggaaaggtccatcgactacaacctagggtggttcgtggagccggtggtccgtggtgactaccccttctccatgagatcgttggtcaaggatcggttgccctacttcaccgacgaagagaaagagaagctagtggggtcgtatgacataatggggataaactactacacctcgaggttctccaagcacgtcgatatctcgacaggctacacgccggtactcaacaccgacgacgcatatgccacccaggaaacgaaaggacctgacgggaatactattggtccatctatggggaattcgtggatctacatgtaccctaacggcctgaaggacatccttatggtcatgaagaacaaatacgggaacccacctatctacatcactgagaatggaatcggggatattgacagcaaggagaaacctctacccgtaaaagatgcgttgaatgaccacgcaaggctagattacctccagcgccacatctcagtgctcaaagacgcaatagacctgggagcggacgtgcgtggccacttcacctggtctctgctggacaacttcgagtggtgcggcggttacacggagcgttacggcatcgtctacgtggaccgtagcaacggctgcaagcgccgcatgaagcgctcggccaaatggttgaagaaattcaaccgagccgcgcattccaagaagaaagacaagacgggcattattccgccgccgtcggcttattaa

SEQ ID NO: 31347 - DNA, 528 bp, Zea mays
  Peptide Sequence Number=SeqID_73126
atgatgtttcctggtgggcgattggtggaggaggtgagggtccttccgaaccagcaacactgcgggaagcgcatctgccacagccgcaagggccgaggcggtgcccgcagcgggaagggcctcactggtggcggtaggccctgcccccacgctggtccgagcgcagaggagggtggaacggacccccacgcccctggcaccagcgccgcgcgcgcccgccggagcggcaacgacggctgggaggggtggggaggggccggggggcgcccacccacgacggtcgcaacacggccggtcgcagcggcggccgagcccgcgcggccccccacggcggcagcagggcccgtgcggccaggagaggcggtggcggcggcgcgccggccaggggaagccgcccgcggccagaaggagaggggagggaagggctcgtccgccatgggagtagcggcgtggcgcgtgcaccagggaggagccgcggcggcggctgggccgcctaggatgagcagcggcggcggctgggccgcctag

SEQ ID NO: 31348 - DNA, 364 bp, Zea mays
  Peptide Sequence Number=SeqID_73127
atgggcggggcccaactgtcggcggcatggatcgcggtcacggtcatcgccttcctctcgctcatgcgtgttgccaggcgcactagttgtggccataggcgacacggggaagggaggacaccggacaatggcggatggctagaggagcatcgcacggtggtggagctcggtcgggacagtgctgcaggcagcggtggtgatcctctaggcgcagactcgtgcggggacctcagacatggcgatgatgagcgtagtgcaggcatggagggcatcggcgagacaatgcgagagcatgcggcgataggcagtgacaccgataggtggggcctgcggggcaaggagaggaggcgcgcgtgggcaagag

SEQ ID NO: 31349 - DNA, 384 bp, Zea mays
  Peptide Sequence Number=SeqID_73128
atggcctatggtgttcgtcgggtgtctgggtgggtgctcgggcgatccagggcgcacgggagaccaccttgtgcctgcaattgcttgccgaacttcatgctccgtcgtgaacccgtcgcgcgccatggacctgctatcctctgtcctcaccaccggttctgctcggggtgccgtcgtgcacggtctggaggtaggcgtaggttctggtgtcgtcgatatgggcgtggacggctgagattggctcagagtctggatggggctgttggttcgtcgcagccgtcggatcggcgatgggcgaacatggttagatcgcgctttattaaaaccgcaaccgtcgatctgcgatctgacggcccactcgtggatcagatctgggccgcatag

SEQ ID NO: 31350 - DNA, 957 bp, Zea mays
  Peptide Sequence Number=SeqID_73129
atggattttaggaaggaggccaacgagggctatgccttcgtcaacctgacctcgccagaggtggcttgtcagatgtgggggccccatgggggcctatcatgcgcatcggtgggctttcaagggcagctccaagacctacatggtcctctgcatcagccctacgttggccaccagctaggctccacggcgttcggggctgccatcgtcggccaccgactaagcttcgccctcgactctcatgaaggcagcacaagccgctacctaaccaaggagtctgacgcacaatgtcgctcggttgatgaggcccaagtttccataagtgccctccggaccccatctagaggaggtctgggggtgccacgtctccatacgctcccaacccctgctctccactcaagcagagatccggtgctggcacgtggcctatggcgcatgacggaagccaccaggcatagctcgacgcgtgcctctggtgtgggagccacccgtattaaatatgggcaagcggcgcacatgttcgcaccagtcacaggcggcgtgcgtcatgctttaaaggcaggcgacatgtgcagtctgcaaggcttgggccacgccagtaacccacgcgtcaccgaggcaaagaccattgaatctctgcgccacacatgggtggctctaatcatgactttcactattcccgctatagatacatgggatggagacatgcagaggggacaagatgacatcgtacttctactcccctatgcaagccgacgagacagtctacactgtagcctacacaagagccttcgcccacacgccaataaaacaaggcggaggcaagtctggccaaagagctcgcacgatgatcaagagaagatatctgcccaccacaggagaagaccttggtccaccagctctttctgtggctccacgccccatattattgtattcctaggcccacttgtcggggtctag

SEQ ID NO: 31351 - DNA, 1473 bp, Zea mays
  Peptide Sequence Number=SeqID_73130
atggctccacttcttcttgcttctcgcacagcctgtcatcctggccttacaagcagccgccatgataatggccggcacggcctttcttcttcaccgggaagtagtaagtggatagcggacgggagcactggggatgttggagcgaactcctactacctgtatagagaggatgtcagattgctgaaggagatgggtatggacgcctacaggttctctatcgcttggtccagaatactgccaaaggggacgctcgagggaggcattaaccataaaggcatcgagtactacaaaaggctcatcaacttgttgaaagagaacggcatagaaccatatgtgacacttttccactgggacacacctcaagcgctggtggacagctacggtggcttcttagatgacaggattgtaaaagattacacggactttgccaaggtgtgctttgtgcacttcggcgacaccgtgaagaactggttcaccttcaacgagccacagacgttctcctctttttcctacgggaccgggatctttgcaccggggcggtgctccccgggacaaaaatgcgctaacccaaccgggaactcactcaccgagccatacattgttgcccacaacctcctccgagctcacgctgagactgtccatgagtacaacaagcattacagaggtaacaaggacgcacagatagggattgcgttcgacgtgatgggccgtgtgccatatgacaatatgtttctcgacgaccaggcccaagaaaggtccatcgattataacctaggatggttcatggagccggtcgttcgcggcgactaccctttctccatgagatcattgatcaaggatcggctaccctactttaccgacgacgagaaagagaagctagtgggttcgtatgacataatggggataaactactacacctcgaggttttccaagcacatcgacatctcgccaaagtactcgccagtgctcaacaccgacgacgcctatgccgcccaagagacgaaaggaccagacgggaatactattggtccatctatggggaatccgtggatttacatgtaccctaacggcctaaaggatatccttatgttcatgaagaacaaatacggaaacccaccggtctacatcactgagaatggaatcggggatgttgacaccaaagataaacctctacccataaaagacgcgttgaatgaccacgtgaggctagattacctccagcgccacatttcagttctcaaagacgcaatagacttgggagcggacgtgcgtggccacttcacctggtctctgctggacaacttcgagtggtcggccggttacacggagcggtacggcatcgtctacgtggaccgtggcaacggctgcaagcgccgcatgaagcgctcagccaaatggttgaagaaattcaaccgagccgcgcatacgaagaagaaagatatgacgggcattattccgccgtcagcttattag

SEQ ID NO: 31352 - DNA, 1149 bp, Zea mays
  Peptide Sequence Number=SeqID_73131
atgtcaggaagggctttgaaagatctcaatgtttctcagtcagcagacctggagaacggaaaagacaattctgtgaaatcctgcatcaccaagcctgtgttgaatggcaacaaatgtgccaacaaggaagaaaaggctccgtctgcttgccacgacgctgtgactaatggaaatgcggctgccattgcagatgtggagtacattgattctgaaaatctagtagatctcccagatgtcgatgcagctctaagtaccttagctaaaagattggattcaaaggactgggttatgacatgtgaagctctcaacaatgttcgtcagttggcaatgtatcacaaggaacgattgcaggagcttctggagcctctagtccctcttatcgtgaaatctgtgaagaacccaagaagtgctgtatgcaaaactgcactaatgacttgtgctgacatctttaaggcctatggtgacttaatggttcactcaatcgatccactgctagtacaactgtttctgaaggcttcacaagataagcgttttgtctgtgaagctgcagaggcagctcttatatcgatgacaagttggatctcccctttactactcttgccaagaatgctgccttacctcaagaacaagaatccacggatccgagcaaaagcatcagtgtgtttcagcaagagtgtaccacgccttgatgtggtgggaatcaaagaatatggtatggataagctcatccaaattgcggcaacccaacttagcgaccagcttcctgaatcaagggaggctgctcgcaacctggcactggaactgcaagcattctatgagaagtctcaggcctcaacttctgacgaacacgaggtcgaggcctctgcctcgccagatgctgaatcatgggaggctttctgccagtccaagctctccgcattaagtgcccaagccattcttcgtgtgacctctactactacaaaagagtgcgtcacctctgccccaaaagaagggttggcttgttatacacaacagtccttattttttgtttttgatgctggtcctgttattttgaaggaaatgacatattttgtgtttcggaccttgatgttgcttcctgtatccgttaatcacctgcagcatgtccctgtgggtgtcactggatgttag

SEQ ID NO: 31353 - DNA, 627 bp, Zea mays
  Peptide Sequence Number=SeqID_73132
atgggtacaagtgtagaagctaagcaaaccacgcagcagataaatccagaagtaaccgatggggcaactgaggaatcggattcaaccaacaataccccagtcggagcaaagtggaagtccctacagtccagaaccactacattagagtatgctgagaagtactctagtcgaaacgcgactcctacggagggaaagcagcttggtttcggtgtggccccgtcgacggcggcgacacaagccctcacactccggcagctctccactaccaccctagatccaccgcaggagagcagcgcaattccaacgcccgccacagtcgctagaaaattaacacgtgaaacgggacagccagcccagatccgcgcggcggtaaatgccgcgaagcgcgagatcgtgacgagcaatcggggcaacggaaggttatgcgaggggaaggggaggggaggggaggggaggcaagggattacctggcacgagggtgcggcggcggcggcggctcgctctctgccgtcgtcggcctgggctgggactgaacggggctgcgtccggactgcaaatggcggcttatgtatagggcctggacacaatcacacaaatactacctcattggattccgaaaaaaaataa

SEQ ID NO: 31354 - DNA, 444 bp, Zea mays
  Peptide Sequence Number=SeqID_73133
atgggcaagaacaacaaacgcaagcgcgagccgactcctccatcagaggactttggcgactcggaatactcagaggaggagttctcctctgagtccgaggggtctccggctcccgtctctcccccagcgtcgtccgatgactcggacgactctcaggggattgccgcggaggtctggacttacatccgggtcatcgagcgctccgggatcgagggcccggatgagtcggagtactcctcggacgaggaggactcgcccgaggaggacggcgaaggtgacaacgacgacgacgacggaggcgacggcagcgacgacggtgacggcggcagcaggggcggcaacggcggcagtaggagcggcgacagcaggggcggcgacagcggcagcagcaggggcagcaacggcggcggcaacaacaaaggcagcaacagggccagtggctag

SEQ ID NO: 31355 - DNA, 816 bp, Zea mays
  Peptide Sequence Number=SeqID_73134
atggctgccaaccccaccaatttctgtaaaatttctgcgaacaccgagagaggcaaatatgtgcatgttgaaaaccaggaacctgctggtgactccaatgatgatgaagcatccacaagacgaccgagtgcactggagggtttgagaaggcaatttaatagtcagaaagctgtgtcattgccttcgtcgcccaataggtcaggtattcttggcctcaggagcccatctgactatacagaagccgatctgatggcgacctggaatgaggtgttgcagtcttcaccatttctgaacaagcctttattgccttatgaggaatggtgcattgagttttcagagatcactgttggcattcgtgtgggagtaggcaagggtctcatgtgcatgcaccggctaaagattgttcaccgggacctcaagagtgcaaattgcctcgttaacaaatactggacagtcaagatatgtgattttgggctctctcgagtaatgtcaaattctgcaatgaatgacaactcatctgcgggaactccagagtggatggctcctgagctcattcgcaacgagccattcacagaaaaatgtgatatcttcagcttcggggtcatcatgtgggagctttgcactctttgtagaccttgggaaggaattccacctgttcagatcgtttactctgttgcgaatgatggggcaagactggaaataccagatgggcctcttggaagcttgatagcagattgctgggcagaaccggagaggcgtccatgctgccaggagatcctgacccgccttcttgattgcgagtataccttgtgctga

SEQ ID NO: 31356 - DNA, 324 bp, Zea mays
  Peptide Sequence Number=SeqID_73135
atggacccgtacaagcaccgcccgtcgagcaccttcaacgccccgtactggaccaccaactccggcgccccgtgtggaacaacgacagctccctcaccgtcggcgcacgagaagccaaaccctctgccattggcgcccctacaagatgggtcgatgaaagaaaaatggacttcaaacttgtcaggttcgtgcaaggcctcgggaggaacctccgtctcacccgagcctagcctcggcctagataacatcgatgaaaggacgcccgatgccaccaacccttccgcaaagactgctgataatgggatggctacagaaaccgcatga

SEQ ID NO: 31357 - DNA, 280 bp, Zea mays
  Peptide Sequence Number=SeqID_73136
gcaagagcaagatgatggcaatagatccttcaaagtcctctcactaagaaacatcatgctcaaatcgacaaattctatggagggtaaaatgagttgttcatctcatagtgagccgaatgttgcaaatgccttctgtggtcgcagccgcgataaagttgtggatgaacatcaaagaactgcaagctcaaggctgccacaacacatagtctcctactgcgtaactctaatcactgaggcagtggtggatctaggcctaggtcagctgaggctgcatccctag

SEQ ID NO: 31358 - DNA, 282 bp, Zea mays
  Peptide Sequence Number=SeqID_73137
atggagccaccacctcttcctctcccctggtggcctctcacctccctcctcccctctacaaaagctggtcgagcccttgctccctcccctgtcgagctcgcccaagccatctctctcgcgctcgtgccgcgccccgtcctggtcgcgccgcgctgcccaccggggcccctgcacgaccccgaccgtgcctcgccgtcaccgttcgccgccttcgtcctccgatcggccacacccgtgcctcacctcgccgtgaccaaactcccccattcatcgcaaggttga

SEQ ID NO: 31359 - DNA, 171 bp, Zea mays
  Peptide Sequence Number=SeqID_73138
atgggaactcggtcgtcgccggacaccgacgtttcactttcaccggtggtcgtcggagccttggtgaaatatgcccacaccgacaccgaggtcgccggcaccggagcgtggagggcctgcatgtacttcgcgcatgggttctgcgagaatggctctacctgccgcttctag

SEQ ID NO: 31360 - DNA, 234 bp, Zea mays
  Peptide Sequence Number=SeqID_73139
atgtcgtcgtcgagtgttgctagttacatcaactgttacaggaacttcgcatttctgttccttcgacgaccattgtgtattgtgataatagcagttcgagcaatgagtgaaagcatgagacaaaatcgcctttcaagggagcagaaggatggtagtcttggatcctcaaatgattcaatgaaacatgacattcaaaacatgtcatccttgcttggaagacatcagaagaaatga

SEQ ID NO: 31361 - DNA, 366 bp, Zea mays
  Peptide Sequence Number=SeqID_73140
atggagctgaagcaagacttgcaaagtggcaagggaggggaaacaaccaaggacgggataggtaaaacaacactcacaaacagaagtgtgagagaggaggatttaaaatgtaggaacatgataagcatcaagacaaacacacaacaaatggtagatttaagacaaaactcgcaaggtgacaaaaagggggaagcaatcaagggtgaattaggtgaagcaccatattcaaattgggatgggaaacaagagcctttaaaggttaggttcaaatcaagaacaaggcaacccaaagtattaaatggttatgtcctttcgtcttcaagcattattccttgggatataacgatcttcggacgaaggttttga

SEQ ID NO: 31362 - DNA, 1695 bp, Zea mays
  Peptide Sequence Number=SeqID_73141
atgaagaaccccgacttcactgcagacaaagcgctcgccaaggacttcctgtccaacttcgtcggccctcacggcgaccccaagtacctgaacatcctgcaagatgtcgccaacaggaagatacgcgcggtccagatcgagctggacgacctgtttcatgtaccagctcctcacctccacaccattcagttcccttctgtttgccaattttgcggacgcaagcacaaggacgtcgatgaggagttcctgcagcgtgtcactgagaacacgcggcgctacgtcggcatcttcgcggaggccatggacgagatcatgccggagcccactgaggcgtacaccgtcgacgaggaccgggacatcctgatgacgcagcgtgtggacgagggggtggacggcggcgcggacggcacggacccgctgcagagaatgccaccagatatcaaacggttctttgaggtttacatcaagacattctcaaaggcaactccactcaccattagacaagtaaaggcatccaacattgggcagcttgtgaaaatatctgggattgttactcgctgctcggatgtgaagcccttgatgcaggttgctgtttatacatgtgaagaatgtggctttgagatataccaggaagtgactgctagagtgtttatgcccctcattgaatgtccatctcaacgatgcaagctgaacaaagcaaaggggaatctaatccttcaattgcgtgcatcgaagtttttgaaatttcaggaggtgaagcttcaagagttagcagagcatgtacccaagggccacattcctcgttctctgactgttcatctaagaggagagctgactagaaaggttgcacctggagatgtggttgagatgtcaggaatttttctccctatgccttactatgggtttagagcaatgcgtgcaggattagttgctgatacttacttggaagcaatgtctgtcacacatttcaagaaaaaatatgaggagtatgatctcaaaggtgatgaacaagaacaaattgacagattggctgaggacggtgatatctacagtaagttggcaaggtccttggcacctgaaatatttggccatgaagacgtcaaaaaagcactgctgttactacttgttggtgcaccccataggaagctcgcagatggcatgaagatcagaggcgacctgcatatatgcatgatgggagatcctggtgttgcaaagagtcaacttctgaagcatattatcaatgttgcaccaagaggagtgtacaccactggacgtgggagcagtggtgttggtcttaccgctgccgtccaaaaggatccagtaacaaatgagtttgtcctcgagggtggagcactggtactggcagatatgggcatttgtgctatagatgagtttgacaagatggaagagtcagaccggacagcaatccatgaggtaatggagcagcaaacagttagcattgccaaggctggcatcaccacctctctcaatgcgagaactgcaattctggctgctgcaaatccagcatgggcatacatatctgcagctagaagagtgattccttccgttcctagagagctcgaggaatacattgcgactgcatattccagcatccgccaagaggaggcgaagtcgaacgcgccaacctcctacacaaccatcaggacgcttctgagcatactccgtatctctatc

SEQ ID NO: 31363 - DNA, 471 bp, Zea mays
  Peptide Sequence Number=SeqID_73142
atggcgatctggccaaggttgcttctccgcgaagactgggccttgggcgagacgaagctttgtactggtgggggttaccagctgagattaggagtcttgggggtacccctaattatggtccccgacagtagtcgaactgtgcgagcacgaaaagtaggaaaaaagaacaaccatggagcttgcaagagtgaccgtgtttttgtaacgcgacagctcatgtgtgagatagccaacaacaggcatgatgaaagggaagaagaaagtctcctcttcgtaagccgccctatctgggaaggtcaagttcaagaacccattttaataaatgaacagtgggtgtgctacgacaagtgtgagaattggcaacttctactctatgggatgaatcgagatatacttcccaaaaatggcggtgtagtatgcagagttggtttggtggccttgctgctccaagatcccattgaatttgattaa

SEQ ID NO: 31364 - DNA, 309 bp, Zea mays
  Peptide Sequence Number=SeqID_73143
atgagtaccatgaagttttgccgtgaatgcaacaacatcctgtaccccaaggaggaccgggagcagaaggtgctcctctacgcctgccggaactgcgaccaccaggaggtcgcggacaacaactgcgtgtaccggaacgtggtgcaccacagcgccggggagttcacccaggtgctccaggacgtggccggcgaccccacgctgccccgcaccaagtccgtgcgttgctcctcctgcggccacggcgaggccgtcttcttccagctcatggttatgcaagtacaaattcttgaacagccacgtgcttaa

SEQ ID NO: 31365 - DNA, 1032 bp, Zea mays
  Peptide Sequence Number=SeqID_73144
atgacgaaactacccctgcctcttctccttcttcagcctccagccggcgccgcctccccgctccgctccctcctgccacctgcgcgcagcctcacggcgatgtcagcggccacgtcgacggcgccgtcgatcggagagtatccttccccggtgtcccctccctacccggccacctccaaggacctggagctccggcgcgccatgaccgcctccgcgcgctccgcggccttcgcgtctgcggacgtcgtgttcgaggacgagtggctcgccgtcgtcgacaaacccgccggcgtctactgcgacgccctcctcacctccttcccttgctctgccgtctcagagaatccagcaactaaacctaaccttcaccttgcaaacaggctggaccgtgatactagtgggctcatggttatcaccaaatgcaacaaagttgctgggaagctagtgaaggcattcactgaccataaagtcaagaaaacatatctagctctctgcataggtttcccaccggcatgggaaaagatcaagatatgttctggccatgggcgatcgaaacacggcgcttggcgtgtatatgctatgtctgatgttggccgttcactcccaggcggctctgtcgtacgggacatgagcacgcggtttgaagttctaggcgtcaacggtaaagggcagttcagagaaccctacagcttggacaccgacgatatcgagccaattactgtgcaagaaaaggcgactgaccagacttgtggcggtgatgcgaacagcagtgtcatcttggttagagcctatccccagagcggacggacacaccagattcgtctacactgccagtatcttggtctccctatcagaggtgatgtgaagtacggcggggtgatcgagtgggacggcgtagagtgtgagggccatgcactgcatgcggagagcttgtcatttgtacaccccatcactggattgcccatcactctccggtgcagttctgcacctgagctagttcttggtctggatggccattcgagtgacaactga

SEQ ID NO: 31366 - DNA, 897 bp, Zea mays
  Peptide Sequence Number=SeqID_73145
atgatcaggtctctaccaagcaagtcagatcagatccctgctaaggagtgtgaggcggaacgacggaccagatccctgccgagcaagttcgcgaggcggaatgaacgaccaagccccaccgagcaggactgcgaggcagagcgaccgaccaagcctctgccgagcaagttcgcgaagcagagtgatcgagcattccctgccgagcaagcctgcgaggcggggcaaccgaccaagtccctgtcgggcaagtccgcagagcggagcgaccaatcaggctacaaagcatcactggtacaattgaaatcccctagccgaagtgaccgcagtcacttcgccgctccactgaccgacctgatagaaggacagcgccgcctgcgccgctccgactactgtgccactcgacagagtgaggctgacaggcagccaggcttggcctcaggcaccgtaggaaactccgctacgcccgacccagggctcggactcgggctcagccccggaagacggcgaactccgctctgcccgacccagggctcggactcgggctcagccccggaagacggcgaactccgctccgcccgacccagggctcagacttgggctcagccccggaagatggcgaactccgctccgcccgacccagggctcggactcgggctcagccccggaagacggcgaactccgctccgcccgacccagggctcggactcgggctcagccccggaagacggcgaactccgctccgcccgacccagggctcggactcgggctcagccccggaagacggcgaactccgctccgcccgacccagggctcagactcgggctcagccccggaagacggcgaactccgctccgctcgacccagggctcagactcaggctcaactgagagcacctag

SEQ ID NO: 31367 - DNA, 621 bp, Zea mays
  Peptide Sequence Number=SeqID_73146
atggcctcccaccattccgagcccctcgaccccgccgacgctgacgacccctcagataacaacccagaattaccatgcccctcctatcatatcgttaccaaacctggtcaactcccagtcgagtttcttgaaccctcagctgcccagaagttggtaattggatttgactgtgaaggtgttgatctctgccgcaatggtgctctctgtattatgcagcttgcattccctgatgctgtttacctagttgatgctattgagggtggaaaagaacttattcaagcttgtaagcccgcacttgagtctgatcatatcaccaaagttattcatgattgtaaaagggacagtgaggctttgtattttcagtttggcataaaactgcataatgtgatggatacacagattgcttattctctgatagaagagcaggagcaggaaggaaaaaagatgacatctgatgattacaattacatatcttttgtcagccttcttgctgataaacgatactgtggtatgtactatactccgattcgagctgtatgccttttcatgaaaggaacatatatagtgcaaccatacagattggtgcaaccatgcagccaagacacaaacatggaggtgtga

SEQ ID NO: 31368 - DNA, 204 bp, Zea mays
  Peptide Sequence Number=SeqID_73147
atggacgtcgtcttcagcaacgtcatcaactttgttctgggtgatatatttcattttggatctatttcctacgtcgccgacaagagcggaactctacaccacgtcgccaatgtggggaaagaccgaggggcaaacaactgccacctcgatccggaaggaccattcactcaagcctgcaacagctccagtgatgactgtggctag

SEQ ID NO: 31369 - DNA, 453 bp, Zea mays
  Peptide Sequence Number=SeqID_73148
atgctggtggcggctgctgccctggaggtcgccgggatggggatcggtgaggtctccagtaccagattgttaggaatcaggatctggtgggttgataggattgcagatcctactggggacgtggcgcaacaaaaaaatgtgaaatgtatgactgttattgtaatacagagtgtttgcactgattgttgttccatgtttgtgatagatgacattgaggctgatgtttatgttcctgaagccgatatcctgtcagtcttagatgtgcctcctgggaaaatgggacgagttattggcagaaaggggtcaacgataatggctgtgaaagaatgttgcaaggttgaaatacatattggtggtgctaaggggcctccagacagggtgttcatcattggaccagagaaggaggtcaggaaagctgaggccatctttcgaggccgaatgctggagttctag

SEQ ID NO: 31370 - DNA, 261 bp, Zea mays
  Peptide Sequence Number=SeqID_73149
atgtcgcaggactccttcatggtgttccagcggcaggtgctggacttccatacgttgatcaccaaccacctgtcggcactgaccgctcagttgggggcgatcaaggtccagtctacgccggccccgtacatgatcgagccttcatcgtcgtcccatgtcttccctccgctgcgcaagattacccctacagccctcccggctatgggggcatccccacaatgcccgctgcagcgccctccctgcccctatcagccattgtga

SEQ ID NO: 31371 - DNA, 1293 bp, Zea mays
  Peptide Sequence Number=SeqID_73150
atggatcataacttcagcgatatgatctcgagcgagagcgcatggagcggcggcgtgggtgccggcgacggcgcgggaagcggcatgacggtgctggagaggctggtgctcgacgaggcgctggcagcggcgatcctggagctgcagggcatccagcaggcgcccgcctgcgcgggcaaggaggtagtaatggtagcggagccgacggccggtggtggcgtggttggggaggccgctgttgccttcccctcgatggggatggcgacgccaacgcccgcctacgcggacgttgacgcggatgtcctgcagcgacagcagcatcaccatcgccatcacggcgcgatggggatgcctcccgactacgacctcacaccagcaacacccgctgtcacggtaactgctgtgccgcccgcgttcacatccgccgcagcatacagcggaggcaacttcgtcgtcggacaatcgccggcggtcttctccaccagcaacgagacgacagcaacggcggcggccgtgacctcgacgacgagcctgaattgtgaacaaggcggcggaggcggtggtggccgaaggcaacgccgggccaacaggaagaggaaggccgccgccgagcggtcaccggtggcggcggcacaggagagcaccctgtgcagcctcctggcgtccaccaccaccgcgggcgaaggcggcatccagatcgcattcagcaacgccgccgccgccgccaagagatcagccaagccgtcgtcgctgagtagcagcggctcgtcgagcatcagcttcgacgggcggaaccccgagacgaactgcggcggcgtcgacgaccccatgtacgagccggacacggaggcgctggcgcaggtgaaggagatgatctaccgcgcggccgcgatgcgccccgtctccctcggctccgaggaggacgcaggcgagcgcccgcgccggcgcaacgtgcgcatctcgtccgacccgcagacggtggcggcgcggcagcggcgggagcgcatcagcgagcgcctccgcgtgctgcagaagctcgtcccgggcggcgccaagatggacaccgcctccatgctggacgaggccgccagctacctccgcttcctccagtcccaggtccgggagctgcaaaccctagaccgccggaactacggtctaacgactgcggataataatgccagcagagccaccgccaccatggctgcttctgggccactgatgagctacaacaatggccacggtgccttgccggccttcacgttcccggcagcagctggcgaaaccctatactag

SEQ ID NO: 31372 - DNA, 369 bp, Zea mays
  Peptide Sequence Number=SeqID_73151
atggatcttcataagatcacaatgggaagagaaaggaagaactcaagagcaaaagattccaaaaatttagcaaggacacaaactgaattgaaaccaactgaaagatatggggccgatctggcgacccttcctcaaatgaaacataaatctcacaggcacagtcgaagacaaaatcgttgcggatcttcctggcatagaggtgtccgccaccaaggctggtcaccctactgctccggtccatcagccaagacccagcactcgtccttcaccactctcggtccatcagcacgagctcgcatgaccttcacctcagacgtcggccatcgtccctgtgctccacccctgaccgccataagtcgaccgacatag

SEQ ID NO: 31373 - DNA, 2343 bp, Zea mays
  Peptide Sequence Number=SeqID_73152
atggagagctatctcaaggagaacttcgggggcgtgcaggccaagcactcgtcggacgaggcgctgagacgatggcgcaaggtcgtcggcctcgtcaagaaccccaagcgccgcttccgcttcacggccaacctcgacaagcgcaacgaggccaccgccatgaagcgaaataaccatgtaggcctccgctttcctgatctgtgctccctgcgtttcccctgcttcagcgccggcgttgctccgtcgagtgagtacaaggtccctgccgatgtcaaggcggctggtttcggcatctgcgctgaagagctgagctcgattgtcgaggggcatgatgtgaagaagctgaaatctcatggtggcgtgcagggcctcgcgtccaagctatccacttcggagtctgacggcctcaccacgtccgcggacaagctagcgacccggcgggatgtttttggcgtcaacaagtttgcggaggcggagtcccgtggcttcttggtcttcgtctgggaggcgttgcaggacatgacactcatgatccttgccgcgtgcgcgttcttctcgctcatcgtcggtatcgccacggagggatggcccaagggcgcacacgacggcctcggcattgtggccagcatcctgctggtcgtgttcgtcacggcgtcaagcgactaccgccaatccctgcagttcaaggaccttgacaaggagaagaagaagatcacggttcaggtcacccggagcggctacaggcagaagctctcaatatatgaacttctcgtcggcgacatcgttcacctctccattggtgatcaggtgccggctgacgggctgttcatgtcaggcttctcgcttctgatcaacgagtcgagcttgaccggagagagtgagccagttgccgtcaacgttgagtacccattccttttgtcagggacgaaggtgcaggacggttcttgcaaaatgctcgtcacgacagtcggcatgaggactcagtgggggaagctgatggccactctcagcgaaggtggtgatgacgagacaccattgcaggtcaagctgaatggtgtggccaccatcatcggtaagataggacttatctttgcagtggtcacattcgcagtgctcacccaaagcctgttccggcgcaagatcattgatggtacgtacttgagctggactggagatgacgcattggagctgcttgagttcttcgccattgctgtcaccatcgtcgttgtggcagtacctgaagggctaccgctggccgtgacactgagccttgcatttgcaatgaagaagatgatgaacgacaaggcactcgtccggcaccttgcagcctgcgagaccatgggctcagcgacctccatttgcagtgacaagacaggcactctcacaacgaaccacatgaccgttgtcaaagcctgcatctgtggtaagatcaaagaagtggatggtgtttcggatatcaagaacctgttctctgaactcccagactctgtcatggcgattctctcccagtccatattcaacaacactgggggagacgttgtcttgaaccaggatggcaaacgtgaaatactggggacacctactgagacagcgattctagagttcgggctgtcacttggtggagactttttggcggtgcgcaaagcaagcactcttgtaaaggtggagccgttcaactctgccaagaagagaatgggagtggtaatccagctcccagagggtgcactgcgagcacactgcaaaggtgcatcagagatcatactggcatcttgcagcaagtacctgaatgaagatggcaatgtcatccccctggatgcaggaaccattgatcacttgaaggccacgatcgatagcttcgcgaacgaggcacttcgcactctctgtcttgcctacatagaagttgaggatgggttctcagtcaatgatcagatcccaacggatgggtacacctgcattggcattgtggggatcaaagacccagtgcggcctggagtgaaggaatcagttgctatctgcaggtcggcaggtattacagtcaggatggtcacaggtgacaacatcaacacggcaaaggcaattgcccgggaatgcggcattttaactgaaggtggcattgccatagaaggcccagatttcagaaccaagagtgaagaagagcttactcaactgataccaaagatacaggtgatggcaagatcttcaccaccggataagcatacccttgtcaagcatcttcgaactaaactctacgaagttgtggctgtgactggtgacggaacaaacgatgcacctgctcttcatgaggctgatattgggcttgcaatgggcattgctggaaccgag

SEQ ID NO: 31374 - DNA, 524 bp, Zea mays
  Peptide Sequence Number=SeqID_73153
aagttgtgcagtttcagctcactgtcaatgtggttgctctggtggtaaacttctccctcagcttgcctgacagggagtgctcctctcactgctgtgcaattgctctgggtcaacatgatcatggatacactggaaacatcctgggacaggccttgtaccagttccttgtaatttggtacctacagacagagggaaagtggctgtttggaatcaagggcgataactccgatctagtcttgaacacactgatcttcaattgcttcgtgttctgccaggtattcaatgaggtgagctcaagggagatggagaggataaatgtatttgaaggcattctaaacaacaacgtgttcattgctgtcctcggcagcaccgtcatcttccagttcatcataatacagttcctcggcgatttcgcaaacactacccctcttacgctcaaccagtggatcgcatgtgtttttatcggtttcataggcatgcctatcgcagctattgtgaagatgatcccagttggatctacgtag

SEQ ID NO: 31375 - DNA, 1401 bp, Zea mays
  Peptide Sequence Number=SeqID_73154
atgggggatgccgccgccgccgcagcaacggcctccacgtccgctcccgccacgcccacctccatcctcatctgcctggaggacggcagcgaccttctctccgacgcctacgatggcgccggcgccaccgacttcgtcgtcgcccgcgacgagcatctgcttgtcgaggaccaggacgaggagtacgtcgcgctgctcctgtccaaggagagcgcggcagtatgcgccccggcggaggaggaaacggaggagtggatgaagaccgcacgctccggatgcgtccgctggatcatcaagaccacggcgatgttcgggttcggcgggaagaccgcgtacgtcgcggtgacttacctcgatcgcttcctggttcaacggcgagtcaatagggggaacgagtgggctttgcggctgctcacggtggcgtgcctgtcgctggcgatcaagctggaggaggagcacgcgccgcggctgtcggagttcccgctagacgaggacgagttcgacagcgcgtccatcctgcggatggagctcctcgtcctgggcaccctcgagtggcggatgatcgccgtcacccccttcccctacatcagctacttcgcggcgcggttccgggaggacgagcgccgggcgatcctcatgcgcgccgtggagtgcgtcttcgcggcgatcaaagtgataagctcggtggagtaccggccgtcgaccatcgccgtggcatccatcctcgtcgcgcgcggccgggaggagactcccgccggcagcctggacgcgctcaaggcgatcctggggtcatcgtgcccgcaactagacaccgggcacgtgtactcctgctacagagcgatgattcgggaggacgacaagtcgccgacgcactcgacgtcgacgggggtggcgtcctcgggcgtctctgtcgccgggaacgggagccccagcccgggcgccaataatgccgctggctccggcccgcctgcaaccccggatagccacaagcacaaccacaaccagaggagacggttgcgctcacctcagcgacagggtggccagaacgcccgaatccaagcgggggcgagatctgattcttcggatcttttcccgggatcaaagtgggagggcagtgtaaagactagaccaaagctgaaacagagcaaagctcttgctcaaagcgccaaggcctcagccggtcagacctcacaggttgccgtgcatggcaggcatcgcgaggatcgtgaaagaaacgctctgcagcaccagcagctgcgcgttcctctttctgacggcgttgccttctgtgccgtgtcatcaaatcgcctgctcgttttgcttgctgctcgcagcgaccatggtcagcatcacatatggttgcagctgcaggaggctgcagcagtagggcaggtgagatag

SEQ ID NO: 31376 - DNA, 263 bp, Zea mays
  Peptide Sequence Number=SeqID_73155
atggcacctgctcctgctgaaaaaaggagccaccagagtaaacgggggaacatcaaagcgggctggcaaatgaaatacgggccgcgactgagctcaaggcccaagaccagcactgtgctgcgcgacctgtggggcacggggaaaagcgattttaaaggcgattttttcaccatgaatgattgtcgcgtgagtccgcaaccgagtgtccccatgaaagtgatctgcgccgggcaaagcgacgctggcatggcgttctccgcccg

SEQ ID NO: 31377 - DNA, 1056 bp, Zea mays
  Peptide Sequence Number=SeqID_73156
atgacgacgagggagccgcgcgaggcgtcccggcgcgatgggcgcgactcgcacgggaggcgcccccactcctcgttcaggtcgcggagggacgatcccagtttcttacaagatacaatttttcgaatctcttttggtagcccaaggagaagagatgacaggaggcgtgaatcggacagggcgcaccacagaagtcgagatggagaatttttggaggtggtggaccatgatcagaagcggaatagagatgctgcgcagagcgctgaccctccgaatgctgagtcgaagtcagcgagtgatatgaagaatggcccctccaccaggcatgagagatcacctaggggaaccaaacgattttctgagtcgagtgaggcatggcggcctcggtctttctttcagaatcatctgaagtgtggagactacctgtgcttctatgtacagcacaatgagcgtggaagtgctgggcaaggtggtcggcattatgaccgccaggctagtgactatggaaggcaaagggagcatctctctgatagagataaacagaagacagagagacacagtttgcagggaaagattgagctggaccagcaaaagaaggatggtgattcaacatggaagcatgatggatttttccagttggaggaagcagcaccccttgccaagaagaggccaccatttcaggagatgaagatacaagaatctgctgacactgtaacagaaccagattctagatcaaggaattatcaggcacggggatatggaaatcatcgacccttcctaaggccagatgatcgaggctttagaagggggtttcctgaccacaggagtgatggccagaggaatgggcatgatataaggggaagattttctgttaggggaggaatggacagagacaggtttaacaattcatatggtgggagaagcaacgcagagcaggcttctggtgatcaagaagaaaaatggaagcatgacctctatgatcagacaaacaggagcccgcctccaaagactgaggaagagcagattgccaaagttgaagcgctgttggcactgtag

SEQ ID NO: 31378 - DNA, 411 bp, Zea mays
  Peptide Sequence Number=SeqID_73157
atggcccgtcaacatgctagtcgtgtcggcccggcccggccttctccctaccgggctaccgcggagaagacgcgtcgcaagttcctggtctttgaattgaagaacgcgctgcgccggtggtccatctccgtccgcacctcgcaggaactatcttcttcaccgtacggaatatacaaacggaggacgcgcttggaattgttcgagtccccattcaatcaacctgcgagtgcgaggatcgtgggggcatgttctgtagcagtagcgtttctgcaaaagatgtcgattgattctcctcgcttcctgcctccactcgcggcagctcaatcaatggacctcaacctcttgtcatcctgggttacatgtctgccacaaccacaccacaagcttatggttttggggtctaatttttag

SEQ ID NO: 31379 - DNA, 336 bp, Zea mays
  Peptide Sequence Number=SeqID_73158
atggccaaccgcggtgccgcggccggcaagctcactgtcgcggagaccttctccaacctcagggagcaaggcaagaatgtaacacgagaggtttcatgggcgttggactggtccgacaagtgcgccgcctgcgccgctccgactgctgagccactcgacagagtgaggctgacagcagccaagtccggcctcaggcgtcataggaaactccgcttcgctcgaccccagggctcggactcgggctcagccccggaagacgacgaactccgcttcgcccgaccccagggctcggactcgggctcagccccggaagacgacgaactccgcttcgcctag

SEQ ID NO: 31380 - DNA, 1714 bp, Zea mays
  Peptide Sequence Number=SeqID_73159
tcctattaaaaaggagacttcagaacataatgaccaggcatttgatatagtagaagtatcagccttagagtgtgtcagaagtatggctgaattgttgcagaagactgcaactgggatacctgttaccataaaggacagcaagtgtgttatcaaaatagaagactgccgtaacactgtatgttggaaaagattgtcatgcagcatgtcttgcataggaggatttttgcagggacttaattcagcattagaaagcacattcaatgatcacccaatagcaagcccagaggacaggaagatgttgcttcagtattgctcaagatttagcagttatgtcgctaagtttgggacctttgtagatatttgtgttcatgtcttgtttatggataacaaagattctgcctctatagatttagtctctgttcatcttccacaagagctagattgtgcgaatggttttctgaatattgaagcaatcatggatgaattgacaaagtgtggaagtcatggagttgatctgtctaagatacagtacatggaaaatgttcttctggaaaacctgttgaaaggtgaatgcccactcatatcattcactttgagagagatatacagtatatctgctgctatcattaaatttcatggttacctatccttttcaagtgatgtttctaggcagacttgcagccctgtcgaacagctttcattgggtaccatgcttgggatagctttcatcactctacagaaagttgcagacatgtctagctggccacacatgttttgtcttgtatggattgatggggtattaagatatcttgaagtcttaggaagtgcatttacattgtctgagctcaatatttcaatagaactgtatactcagattataaatgctttattgagggctgttggtaaatgcatcttacttcaacagaagaatgctactctccctactcatgagattggctcaagcacgaaaacactgcaattacagaatgcatctggttatgcttttcctaaagatttcattgatacacagaatagattaaattcattgaaatcgaggcttcgactagtacttggaaaatttgtcagtattgcatcaaacacacatctaaatgcagctctacaagtaattgaaagggcattggttggagtgaatcattgcagtcattcaatataccaaatttacactggaaatcctgatggtgggacagtttcttctgatgttgctgctgggatcgactgcctctatatgattcttgattttgtgccaggcgccataggaaactccgcctcgcccgaccccagggctcggactcgggctcagcctcggaagacgacgaactccgcttcgcctgaccccagggctcggactcgggctcagccccggaagacgacgaactccgcttcgcccgaccccagggctcggactcgagctcagccccggaagacgacgaactccgcttcgcccgaccccagggctcggactcgggctcagccccggaaggcgacgaactccgcttcgcccgaccctagggctcggactcggccctggcctcggccgacggtctccgcctcgcccgacccaggggctcggactcgacctcggccttggaagacagactcgacctcgacctcggaggagcctccacctcgcccaacccagggctcggaccgaccacgtcacaggaggcgccatcattaccctaccccaagctag

SEQ ID NO: 31381 - DNA, 351 bp, Zea mays
  Peptide Sequence Number=SeqID_73160
atggcgccctggtggccgcgatgtgcccctgatccacccgccgcccaaccgaaatactcacccgtcgccaggaagctcggactccccttccatgtaggtcccacacgactgctgtccctgcaacctcggcgttatcaaaacagaaaccgtggcgagctcctctatagcaaatcggactccgcccaacagatcaccatgtgccgcgcgttcctcgtaactaactccgctacaaactccgatcttcttggtcgacatgagatcctctcggagtatataaacagccacgccctcggcattgcagcagataagagaagaactgtgctccaagtcttgttggtgaccgcagagtga

SEQ ID NO: 31382 - DNA, 219 bp, Zea mays
  Peptide Sequence Number=SeqID_73161
atgtcgggatccgcgacaccttccattggcggcgcggtggaggcgtgcatcgtgggcgagatccgcgggtgggttccatcgtggacacggcaaggtggagcacagggggagggagaggcgttgatatctttattgatggaaacaaagttctcgatcttccgtcagattgatgataactatcgatttagggcgagacacatgttcgccttaagatcataa

SEQ ID NO: 31383 - DNA, 267 bp, Zea mays
  Peptide Sequence Number=SeqID_73162
atggttgtagttgtgccacaccttaattcgtatccggcctccactgtgacaagggccgctggttgccgccacattactatggaggaacattttgttgcaaagatctgggaggcaccagcattaaagagcgacatagtcacaagaaacgggtatagtggtagcgaccctcgactcggaaacgtcgtccccgacccggaaacgtggggtcattttcgttaccaccatgtaaaaacctctcacagttccctgtacaagtttgagttgtaa

SEQ ID NO: 31384 - DNA, 1059 bp, Zea mays
  Peptide Sequence Number=SeqID_73163
atggggaaaactactagggaaaaccgagatgcaaaagaggaaaaatatgatgcactaaaatcaaggcaacatttattaggaaagcaatgcgttaaattatgttttcctcatgctgtgcttgatcagataattgagaaagatgttagctccagtgatttttgtacacggagggaatttgcaagatggtttgttaagttaagctcaaagtttgagaggaaaaggatgtgcaggattgttcctaataaattaacttctgacacagtccaatgtgcctttgatgatgtaaatattgacgacccagatttcctgtatatccaatggagaatctggtatcgtatcccagccagttacctatctcgattcgatcttgtcaactggaaagtgcttgttgagcatccacgcgcattgagaatagacgaaaagataccgagtcaaaatgtttgcattttggatctgcgagcttgcccagatgtgtctccatccatgctcatagagctaatggctggtgaaaacaacatcatcagcagagtttttggaaatactagacgccttcaaccgggcaaacctgtaactaaagcgcaagcagctgctgcactgactagtggccgaatgaaggaagcagttcatgaagaattgaataaacttgaagcagaaaaccaagcccatctttctcttatagctgaaataatggaagagttaattagtaggggagatatacaacaacaatgggagcaaaagatgaaaaaggagcaagaacgggctcttgaagttgacaataatcttcaacatgtattgcatgagcatgcaaatgagaggacagacagagaagaggaactagcagacttgttgaaagaaagagcagctctagaatgccagaatcaggaactcataaatttaagcaagcatcaagctgtcaatgaagctaaatcatatcttgaagctgagaaggaagctcttactatgttaaggacttgggtggaagatgaagcaggacgtgtccatgaacgagctgagacacttgagaaggctttgagaagatggcgaatcccagaagattga

SEQ ID NO: 31385 - DNA, 1194 bp, Zea mays
  Peptide Sequence Number=SeqID_73164
atggttttcataggttatgagtcaggctcaaaaggttatagactatttgatcctatgactaacaggctagttgttagccgaaatgtaatttttgaagagagtaaaccatgggactgggaaaatttcatagacaactcaggctttcagttgactgaaacttttatagttgatcatcaattgcctgttcaagctacgacaacagtagaagacagtgaaggttcagtaccgatggcatctagagaaggtctcagcgtctatgttagcggggcagttgcatgggcagtgcagcgagccgcggagcagcgaacatgggatcagcagtcacagattgtcatgaattgtgaccccaacagaaaaacaattgttgacatcactacaacagaacttgacaaaacaagttcagaaatcaacagacacaaagttaacgtaactacaagtgagaagttggtgaaaaggttaaccaagggcattgaggagtccaagaaagatagagaaaaactttctgctgaaacagagaagatgatgtctatgttcaaagagattgagaagaaagtatttgttgttcaggaagagtataagaaaacacaggagatgatagacaaccataaagttgagcttgacaaaactaaggaagaatacaccaaactaaaaaaagcaatggatgaactgagagccacagaggttgacgctgagtacaaattgcaagatacaaaaaagcttgccaaggagtgggaaatgaaggtgaaaacattcaagaaaaggcttgatgaaattcatataataatccaaaaggatgctgttgatcctgagaaactcaaagcgactccaggtgatgagcaactaaatgacacatatgacatgaaaagggcaatggagatggtagcattgttagaggcccagattaaagatttgaacccaaatctggattccatagcagagtaccgcacaaaggcttgcttgtacggtgagcgtgttgatgagttaaatgctaccactcaagaacgtgatgatcttaaaaagttgtacgatgggttaaggaagagaaggctggatgaattcatggctggattcaacataatatctttgaaactgaaggagatgtaccagataatggaaacatttggcttcaatgcttcatcctcagacaaattagcaacttatttgaaccaattgactggactgagtttaacataa

SEQ ID NO: 31386 - DNA, 408 bp, Zea mays
  Peptide Sequence Number=SeqID_73165
atggggagggaggcacagagagggcgtcgtcgcgccggacggccggttgaggcagcatggatgtcgggggcgcagagaggggtggtttgggcgaaggggatttcgtgggggaaggagcacgatgtctgcggggcgccattgattggcaacgagataatgatggtagaattaaaggacgtgtacgactcgctggacatccacgtcgtccactgcctctccgtgctggtcgacgctgaccaggcgctcggcgactactacatggtggcctccacgcggttcatccacgacgtcggggccgcctccatcgtcatccgctacgccggctccagcagcgccccgccgacgcccaacatgactgagtcgccggccggctgggcatggtccatcaaccaggccaggttgttttga

SEQ ID NO: 31387 - DNA, 555 bp, Zea mays
  Peptide Sequence Number=SeqID_73166
atggtctcccgcggccacatcgacggcaagctccgctacatcttcaacgacatctcccacagggacaccgagacccccccaagctcgccgagtacttcaacgtcactaacggggtgttcagctacaactagatgggcgacgtgcccctcgccgtcaacgggccactccatgtcatccccaaagtcatcatcgccgagttgcatctatttgatcatatctgcaacctggtcagcttggcggaaacgttctcctttattcacaaactatgttgattttcttaccaagtttccttccttacagatccatagaaaatatggtacaaatggcaacacggataagagacgtacagaaagttgcagaacgaccatattacagcaaaagaacgactttagtaagaacatggtactaatatgtcatgttgtgtttagtggaatcctccctatcttgaggtttcttcttgatcatggtgatgatctccatgaagaaggcagcctagaaggtcatgacaggttcaccgttcttcatacaactacaaagaaagatataattgtgtag

SEQ ID NO: 31388 - DNA, 456 bp, Zea mays
  Peptide Sequence Number=SeqID_73167
atggcgtgctccaagtgctatgaaacgtcggcggtactaagtttaaaattcttgaatcataggaatcgccgtacaattaagagggatccgcgacggttaatgtataaagagaagaattatatagagaaatgtggtttttacccggtccagatatcctccaatgtgggagcggtgttgctcctcccgctgttgccccgatgccctctgttcgttgaggaatctttgggtcatgttgtagcagagctcgggcacgagcagcgcccccgcagagctcgggcatctcattgtagcgaagccgaagctaaggtcgaggcagccattgagctcctttgggtccttctccgtgaggcacttcgtcctggcactacgttggagatggtcatagggaaggggagcgacgaaggcacacacttccatgaacggcgcggaggcgaaccttacatcgaatgcgtgtga

SEQ ID NO: 31389 - DNA, 366 bp, Zea mays
  Peptide Sequence Number=SeqID_73168
atggctgggaaattctggatcgggcctcattttctggggcccttatgcgaattagcctggccgaaggggtatcgggggagatgggccattggatccttattggacgacccagaatctaatcctacgcgcagatcacgcgatcgacggctcctacacctttcttctacctctgaccgaccgaccgccatggcacttgctagcccactacggcgcacgacaagcacagtgcccggggcactcagcccccacgccaacgggtgcaacgagacccatgaagaaaatcgaatcaacaagggtcatcttaccacgaatcatggagacaggagctcgtcccacggtgcggcgacaacagagaattcccggtga

SEQ ID NO: 31390 - DNA, 282 bp, Zea mays
  Peptide Sequence Number=SeqID_73169
atggcgagcaaggagctaggcgggttcgatggccacggacgagcgcaaatcagcgcgacagagacaaagaccgggcgcggcagcaggaagagcacgccgacgagcagagaaacgggcagggagcagcgcgcgcgggaagccgctcggctgtgcacgcgcaggagctgtgcgatccgccgagcagagaggaagaaagatagggaagaagcgaccaacagaactggggctaggcgcggccacgacaaggcggagaacgagatggaggccgactgccgcaagtaa

SEQ ID NO: 31391 - DNA, 138 bp, Zea mays
  Peptide Sequence Number=SeqID_73170
atggatacactccaagaggcccccttcagatctcttttttttctaaaccatggtacaatgccatactctgtatatatgtgcggctgcactgatgcattgcccatccctgtcaagttgattataggtataggccagtga

SEQ ID NO: 31392 - DNA, 268 bp, Zea mays
  Peptide Sequence Number=SeqID_73171
atgaatcctccaaatcctccactggttggaatagatcaagtggttgccaccccaaatgatggtaatacaacaaatggaaaatatggttaccaaaatgcaaaatcagataagacaagaacacgaggaaatacgtcaggaccggctggagatacgtcaagaaataagacagtcacggttggaaagacaacaacgacaacgcccactacctccaccaccaccaccagctccaccaagctacataaacatatgtcacaaccagtttttgaag

SEQ ID NO: 31393 - DNA, 231 bp, Zea mays
  Peptide Sequence Number=SeqID_73172
atgggaaagagagctgggttcaagcttatccatgatgaggtatgtgaccagttaaagggtcctagatcagcaggccaacaatcggtgataaaacatttaaaacacaaggaaggggcaaatgcgcacgggaaggctgaagattgcaggggagtagcgtacaccaccatgggcgagctggaggagcgctggagatggagcaggagcgccgtgagggagaagcaaaggaagtag

SEQ ID NO: 31394 - DNA, 318 bp, Zea mays
  Peptide Sequence Number=SeqID_73173
atggccaaggagcaaaaggatgttgcttacccttcaggttcaaaggaaggtagcgcccctagcggggtagaagagaacgtcaaccacctctgcgcccttggcagccaagtcagtagctcgggacccatgacatttgggatagccgtcgttagcacccaacatgctccggatacggccatcaccgacccgtcgcaggatgttgcttacccttctagtctgaaggatagtggtactccaacaaggcaaaaaaggtgtgaggccaatgacggctacaacgacatcaatcttgtcgcaacaaagacaactcgtcgcccgtga

SEQ ID NO: 31395 - DNA, 1320 bp, Zea mays
  Peptide Sequence Number=SeqID_73174
atgggccccatcaaggacttaaaaggagtacagagggtcatgggatgccttgcggctctgagccgtttcatctcgcgcctcggcgaaagaggcctacctctgtaccgcctcttaaggaaaatcgagcgcttcacctggacccccgaggccgaggaagccctcgggaacctaaaggcgctccttacaagcgcgcccatcttggtgccccctgctgccggagaagccctcttggtctacgtcgccgctaccactcaggtgaagctactgtacgcggtaatcctgacgcggcaaaagttgcgacactacttcgagtctcatctggtgactatggtgtcatccttccccctgggggagatcatccagtgccgagaggccttgggtaggattgcaaagtgggcggtggagatcatgggtgagacaatctcgttcgcccctcggaaggccatcaagttccaggtcctggcagactttgtggctgaatgggtcgatacccagcttccagcagctccgatccaaccggaactctggaccatgtttttcgacgggtcattgatgaaaacaggagcgggcgcgagcctgctcttcatctcacccctcgggaagcaccttcgctacgtgctgcgcctccatttcctggcgtccaacaacgtggccgagtacgaggctctggttaacgggttgcacatcgccatcgagctaggggtccagcgcctcgacgctcgtggcgactcgcagcttgtcatcgaccaagtcatgaagaactcccactgccgcgatccgaagatggaagcctactgcgatgagcccgaggcaccctcggctcagcccaaggcaccctcggcccccgagggtgaggcactacgcgtcgaggaagagcggaatggggtcacacctaatcgaaactggcagaacccgtacctgcagtatctccaccgaggagagctacccctcgacagaaccgaagctcggcgactggcgcggcgtgccaagtcattcgtcttgctggtgcctcgagcccttgttggaaacgccttccgacagggtttctactggccaaccgcggtggccgacgccactaggattaaggcacccgggggctacacgcacctgctggttgccatcgacaaattctccaagtggatcgaggtcagacccctaaacagcatcaagtccgaacaggcggtggcgttcttcaccaacatcatccatcgctttggggtcccgaactccatcatcaccgacaacggcacccagttcactggcagaaagttcctggacttctgcgaggaccaccacattcgggtggactggctgccgtag

SEQ ID NO: 31396 - DNA, 315 bp, Zea mays
  Peptide Sequence Number=SeqID_73175
atggggatatcctacacatccaatggggccttggggacgcctcccatagccacaatcactttcatcaccagcggtgcctttgtcatattgagctacttctcaattctcaaatctcacctacctcttctgttggctgttgctttgaccacgagcgcgaacgcggcagggctcggttcctggctccctctcctgccctaccacgttacaccgcgtacgtggacgctgtggcatggggcatggctggctgcgttcccacgcgcggcccgtgcgggtgagcaggagccccagcagcggccgcctcctcgtcctcgttga

SEQ ID NO: 31397 - DNA, 443 bp, Zea mays
  Peptide Sequence Number=SeqID_73176
gtggtcaagctttatcacatgatgctcctcagctttattggctgacaattgtttttctggcatttgatgttttctttgtggtcttctgtattgctttggcttgtgtgattggaatcgctgtttgttgctgccttccgtgcattattggtatcttgtatgctgtaactgatcaggaggagggagcatctgaagatgacgtaaacaacctttccaaattcaaatttcggacaatgagtgatgcagacaagctagctgccggcattgcagcacctgtgggtggagtgatgacagagtgcggtaccaatcctcctgtcgaacatattctttcggctgaggatgcagagaactgcacatcattattgttggaatataatataagtgaattgcccacccctcctatcagcttaagcttttgggttgaattggttggtgcatgcaactga

SEQ ID NO: 31398 - DNA, 705 bp, Zea mays
  Peptide Sequence Number=SeqID_73177
atggccggggagaaagcgccgcgcgcgttccccatcgaggagcttccaggccacctcatcggggaggtcctgacctcgggcgggctcgcggccgccgacctcgccaggctcgaggccacctgccgcgcgctcaggccgctcgccgaatacgccgcgtccaagctctgcgccgcgcgggcggcgttcgcggctatggggcccgccgcgcgtggggggctgctagagaggtgcgggggaagctggaagaaggtgctcaggttcctgcagtccgtcgagcagtcgtcaggcacggtcgagaccacatcgggcagcatgcaagtagccacaggaagatatcacacacttttggtccatgactcttctgtctattcttgtgggtccagcttgtgtggtgtgctaggtcatggcccagatactacacagtgtgcggcattcagtcgggtttccttcccatcactttcttgtgttataaacatctctgcttcacacaaccatgctgcttttgttttggaatctggggaggttttcacctgtggtgataactcatcattatgctgtggtcatggcgaagtgggaagaactatatttcgaccaatgcaagtagaagcgcttaaagggattccctgcaagcagtacaaaaggaaacagcaggccagggggcatgcggcaggagaaggggatcaaggctgggacagccagcagtaa

SEQ ID NO: 31399 - DNA, 690 bp, Zea mays
  Peptide Sequence Number=SeqID_73178
atggcaggacttcctgtggcattaacaggcatgagagtgtgcacccgaggaggccccgttgcagggctcgtagtaacttgtggatccttctccctaggtgctgatggcatcagggctgtcttgaacttccaattttttagtagtaatttgaatgccctcaacacggaaccaaagtcctctgaggaaatcgaaagttcgagaccgatccttgagcatgcaatggatcacccgctgtcattgaacccagaaaataaaacagacgctcaagtggattatgggccgaataatacaagtacgaccggaagagctcactcggggaggctggtttctacggtggcgccgggcgatggcaaagaagatgacgacaacaacggagttgaagccgaggaagcgagagacgagagagacgaagtggtcgacggtgacaactctgctctcggtggggcagcagaggcagaggacaagacgacggagatctccatctcggcgtggcggtggttcgagcggacggtgacgctgagggactcgagaggcacacgcacaaattggtgctctagacacaccaactccagcgcacacatctgccatgtcgccgctgccgttggtgccaacgctgcaaacaagcagcctgcgacggccgtgaggcggtgggatctctgcaccgtctgctgccgcgggagaaggcgatag

SEQ ID NO: 31400 - DNA, 612 bp, Zea mays
  Peptide Sequence Number=SeqID_73179
atggtggacgaacggacggggcgggctgcagggacaccggcggggtcgggctcaacgcgcaccggcgaccggcggcatggggacgagctgggcatgcagcgagcgcgcagcaactcggctgcgacgcgcaggggcgagacgtgcgacgtgcatgaaaatagtggagccatgcatgtgggggccattcagttttcttgcaactcatgcaacctggagtttcgcgtgggcgtgggagggcaggggacagagctcgcgcgcgggggctgtgccggtcgcgccctggggcctctagagacctgcctacagcaggcgggccgctcggccaaggccacaacggctggccatgactgcgcgctggctgaggcaaggcacgccaggggccgctcggccaaggccgcaatggcggagcagggcgggcgctatgtggtagcggcgtccatgaaggcgcatgcggctggcgggggcacgtgggacgcgaggcgagcgacgagtgcaaggcaaaacggtttcctggccgcgtgggacaaggccgagaggaggggacacgaagggagctacgcgaggaagaaggggtccgaggcgaggaggaagaaggctcacctatgcacgtag

SEQ ID NO: 31401 - DNA, 342 bp, Zea mays
  Peptide Sequence Number=SeqID_73180
atggcgccgcgggcgcggaggatcaaaacctcgacctcgccggccgccgcgcgcgagcgtaccgtatccgcctccacctcaaggcgacggccacgaccagagcatctccccctcgacatcgacactaatgccaccgccaccgccaccgccaacggctcggacgcctctcccagccccgcgccatcctcctcccacaccccgtgccccacccctaccggcgccggcggaatcgggagccggcacaaccaggcatgcgcggcgtgcaagtaccagcggcgcaagtgcaactcgcactgcgagctcttttttttttccccgccgagcagcagcgccgcttcctaa

SEQ ID NO: 31402 - DNA, 1053 bp, Zea mays
  Peptide Sequence Number=SeqID_73181
atgggtgggggcggtttttatacccctgagggtgctgcagaaggcttcaaggagaagtcacagattacatggaagggcgcgcatccgtgcccatcacgacgtatgtctccggagactacggcgcaaccgcgccgcgatgctattgtaaggccgccgctggtgctcgcgggttcgcacccggtggcatcgagatatgcaccaacgtcttctggcttaggggaagcaaccgcttcaccctccacggttttggatcccaatgggtatgatcctattgttgctgaattggttgctgagattaaaccaagatatcacattgctggcacaaaaggtgtcttttactcaagggaaccatatgtcaatgattctgctgctcatgttacccgctttattggacttgctaatgttggaaacaaagagaagcagaaatttattcatgcgatttctcctactccagcatctgtcatgtccagtgctgatatcaatgccaagcctccaaacgccactttgtcaccatatgttggttcagcaaaatcagttcctatcgaagaagctccaaaacgtgcagcggagaacatagattcacaatattggcgttatgatgtcaagcggcaaaggcatggggaagctggtgggggtggattgtgtttcaaatttgtatcctcaggatcctgtcaaagagggagtagatgcagttataggcatgatgaagaggcagtggagcattaccagagaaatgtctgttttgattttctaaacaaaggaaaatgtgagaggggcccagaatgcaagtttgttcacagtctttctggggagactgctctaagggatgcaagacctcctagtgaaagaagacgagtggagagcagttgctggttctgcttgtcgagtccagatgtcgagtcacatcttgtcattagcatcggtgaaggttactactgcacacttgcaaaggggccacttgttccaaatcacgttctaatgattcccgtgggaacactgccccagtacattgatgatgcctccggaagcagaggcagaacttgggagatataa

SEQ ID NO: 31403 - DNA, 447 bp, Zea mays
  Peptide Sequence Number=SeqID_73182
atggtagtcatgaccgccctgttgctgctttgtcgcgcctgctggagtgctgctgcctcgctgagccccttctcttcactctgcctgctcaccactgctctctccttctcgccgagtgtcgagcccgcgccacgtctccttggctccgcgctgctcgctgacgtcgccgtgattgctgctgtgccgctcgccagcatttctctggtgctccatgtgcgctgcaatcacgcgtcggtgcatcgtcgaccccaaccgtcgtgctcaaggtcgtccctacgtcgcccctcacccctgctacatgcgaccagagaggccgaagccaaacgcctgcatcccttgcagcgacacaaatatcttcttgtcctgtgctgccgtgctgcttcaccactggagcttcctccctacaccgccggcaatcccatcgtcgaaccctccctgaccacatga

SEQ ID NO: 31404 - DNA, 273 bp, Zea mays
  Peptide Sequence Number=SeqID_73183
atgcccgattacaagcttgctcaacgcaccgggtgcgcgctccatagtaccagcatgatgtctcaccgccctccacgctcgacgcgtccagttcctttggcgtcatctaggtgctcctccgcccgatcccggaggttcaaaacacctcgcctcaatccatctgacatcaagccaaatctgttgggtctaggtttagaaccccctccagatagtggatcaatcattctttctcttcgtcgtactgcagttccatcttctttccgtttgtcgtaa

SEQ ID NO: 31405 - DNA, 192 bp, Zea mays
  Peptide Sequence Number=SeqID_73184
atgccctcgctcggctcctccaaacatgttgccacaaattctctaggtgttgttgagaccatgcttcgtcgccgaaggtcctgcaaaaagaaacagcttcggctgaagctgcttgaacatgctgccgaagacgccgttcatgaagcttcggaactacagcatatccgaagacgaagggtcgaaccgacttaa

SEQ ID NO: 31406 - DNA, 372 bp, Zea mays
  Peptide Sequence Number=SeqID_73185
atggcgccgagttcggcgacgtcggcgccacgtcaacccattgtcaccagcggagcaagtacctcgatgccaagatctgtggcgccgaaccgtgttatctcggtgctacgatattttgtattagattttcagtatcctattggatccaaactgtgccaagataaagaggataacttgcagcagtggcgtcaccatcaatgtgcgcagaatattcacaggcgcagctcgtggcacggcggcctgtctctgtctgtcggtctgcctctgtacgggcccgtgatcgggttcaatgcacttgtggcactggccaccattcctgctcttgcgcccttgccttctcccctctgcacctctgcttctctgctcgagtag

SEQ ID NO: 31407 - DNA, 287 bp, Zea mays
  Peptide Sequence Number=SeqID_73186
atggtactcctctacctcgaccagccggagatctgcccaggtggcccgcctcaacagcgccttccacggtgcagcctcggcggactgcgtctgggcccgcccagctccccgccaactaccgctacctttgcggccctaacagcggccgccgatgacgagggctgtggcgatggagatgccagcggcaagcgcttgaccaaaaaggagatttacgctcgcctgtgccgatccacccttcttttgatgccgcagaaacgtaaactcatttggtcattccttccatggag

SEQ ID NO: 31408 - DNA, 330 bp, Zea mays
  Peptide Sequence Number=SeqID_73187
atgcagaacctgcacatccagtgctgtgtcaccggagccgcgtccgtgccgcgcgctgccgggccaagggcccatgccgtcggagactacggccgggaggccgcacccgccatgggaaaccgcgccgccgtcggatccacgcgacggctcgtcggtcctggcggctcgtcacgccataacaacaggccgcatgccctcctctcctccccaatcgccccgcgccgcggaatccacaccaccgatagaaacatcgccgcgccactcctcgggttgccggctcgggccacattttcgccgtttgagtgcgctgtggtgtcctcccgggtgtag

SEQ ID NO: 31409 - DNA, 1070 bp, Zea mays
  Peptide Sequence Number=SeqID_73188
atggcgagcccaggcaggatgggccgcgtaaaacaggtcgggtggaatcggaccacgctctcgccggcagggcgggaggggatgcggcgcgggatggcggttttcgtcaccgagcttatcaggggagcggatccatggacggagcggcagtggactgcgcgtttcgccgtgaattggttaggagccgatttggcaacagggaagctctcgaatgggagatccagcggcggcagtggcggcggaggggagatggtgagcggaagctttagccggagcacatccgcgcggctcacgtcgaggggtggagtcgggagcccgcgtgtctcgactcctggagccgtgcaccggaactggtggccgccggcgccgtcggggccgtcgttcgatcgcgtcgtcttggcctttttcctggcctccgtcgcgctcgtgctctcctgcgctctctacctctacgtattccggtacttgggccggagccgtgtggtcgcggagttcgccggcgagaatctcgagtcctgcgacgtgttcgacggcgtctgggtgccggatcagaggcaccccttgtacaacagttcgcagtgcccatttgcagagagggggttcaattgcctggccaatgggcggaaggacaccgagtacctcaagtggcggtggaagcctcggggatgcgatttgccgcggttcagtgcccgggctctgttgcagtggctgagagggaagagggtcgtgtttgtgggggactccatgagtcgaacgcagtgggagtccttcatttgcatgctcatgacaggggtggatgatccagagacggtttatgaggttaatggcaaccagatctcaaagacaatccagtttttaggagtgagatttgagtccttcaacctcagtgtggagttcttccggtccgttttccttgtgcagcagatccctgcgcttcgccatgggcgcagaagggtccgtgccatcctgaagcttgataagttggatggtttaagtcaggaatgggtgaactcagatgttcttattttcaactcagggcattggtggactgccagcaaattatttgacat

SEQ ID NO: 31410 - DNA, 307 bp, Zea mays
  Peptide Sequence Number=SeqID_73189
atgagccgcgcgctcctctcccacgtcctccaccgtccgccgcacttcgcgtacacctgcgcggttgaagccgttcccggccccaccgaggaggtgcctgctcctcatgcaaggaaatcgaggatgagacggctccaccagatccagaagacggaagtaaagaagagaagcgaaccaaagcaagcaagcttcaagaacaagcgctgccctattcgattccatttcgtgttcctctgtgctgctgcaggggagggggaggaggaggaggccacggggctgccgtccgactgccgcgcggccatttgcg

SEQ ID NO: 31411 - DNA, 225 bp, Zea mays
  Peptide Sequence Number=SeqID_73190
atgtggagtctagtccccgacgaagacaccctcggcggccgtcacgagacgaggggtccaacgggcggcgaaggcttcagaaatctttcgtggggcccaacttcggccgtttgtggcatgacctcacttgtcttcaagacgaagatcttgtctggaagcaacgatggcaagtgtcgaagcttccaccatcttcggtttagaccaaatagaggaggaaaatactag

SEQ ID NO: 31412 - DNA, 291 bp, Zea mays
  Peptide Sequence Number=SeqID_73191
atgtggacaaaatccagtaatgatggcactctgacttttgtcgccaacacggatcgcaccctactcaggaaatctcggagatatgccagaagacctatgggaaagggcactgacacacgacaagatttaccgagggtgaatcccttttttacctcacattacgctcccttctgggagaaggcattatacgcacagaaatcccgttttccggcgggccaagcgcacatgagccacactacgcttatccagctagccaatcaggcgcatagtgatggcctcgggacactatag

SEQ ID NO: 31413 - DNA, 1944 bp, Zea mays
  Peptide Sequence Number=SeqID_73192
atggcggcggtgtggaagtggaagcatgccgtcttcctcgtcctcgtcaccatgatgcgcccgcaggcggccgaggccggtggcgccgccaacgccacggcggcgtgcccgctcgacctgggctacgtggccacgctcccgtgggaccgcgcgccgtgcgagccgcccgtgaccaacggcaccgcctgctgcatgacgctcctctcggtgttcgccgtgggcctcgcgtcgcggctccgcgccacgggccgcttccgcctcccgtccgcgcgggcctcggcggcctgcctccgcgccttctcggcggcgctcgccgcgccgccgctctcgctgccggcctccctcgtgccgggctgcttcccggtccagtcccagttcgccatctccccggactactgcgccggggtcaccaccgccgcggagtacgtcgcggtcgccggaaacgcctccgccgccggtctcaacgcctcctgcggcgccgacgtcacctccatgtcgctctgcaaccgatgcctcgccgccggggtcgacgcctcggcgcgcctcaccgcggccgccggcaacgaatccaagtccctcaactgcttctacctcaccgtgctctacgcggccgggatctccagctccgccggccccgagtcccccgtcactgcgaggtgtgccctcggcctcgctctctccacgcctcccccaacctcgtcgccaacctctagctccgccacccacaccaccaacatcgcagtagccgccaccgtcccgatcgcctcgctcctgctcgtctccctcgtcgctctcctcgtctggaggtataggcatgagctctccaaggacagacggagcatccaaatctcggaggagcggcgctcgcgcccgcggccaaacaccggctccgtcatgttcgacatctgcgagctggcgaaggcgaccggcggtttcgccgagcgcaacctcatcggccgcggcggctttggagtcgtgtaccgcggcgtgctcgtggacggcaccgtcgtcgccgtaaagaagatgctcgagcccgacgtggagggcggcgacgaggagttcaccaacgaggtggagatcatcagccacctccggcaccggaacctggtgccgctgcgcgggtgctgcattgtcgacgccgacgctgaccccgaccccgacgagggcaagcagatgttcctcgtgtacgactacatgcccaagggctcgctggaccagtacatcttcgacgacgcccaaggcaggcggcggccagcgttgtcgtgggcgcagcgcaggaccgtcctctggacgtggccagggggctcgagtacctgcactacggcgtcaagccggggatctaccaccgggacatcaaggcgacgaacatcctcctggacgcggacatgcgcgcgcgcgtggcggacttcggcctcgccccggcggagccgcgagggccaatcgcacctcacgacgcgcgtcgccggcacacacggctacctctcgccagagtacgcgctctacgggcagctcaccgagaagagcgacgtgtacagcttcggcgtgctggtgctcgaggtgatgagcggtcgccgcgcgctcgacctgtccgacccgtccggggtcgtgctgatcaccgactgggcgtgggcgcacgccaaggctggccggccgggggatgtcctcgcccaggcgctgcggaaggagccgagcaccagcgtggcggccatggagaggtacgtgcttgtcgggatcctgtgtgcccacgtcacggtggcgttccgcccgaccatgccggaggcactgaggatgctggagggggatatggacgtgcccgacctgccggacaggccgcagccgttcggccagaggatcgcgttcgacgaaggcgaaaccaatttcagcgcctcatcgattctgagcggcggcggcccattcgtggactttggagacatgctcaggtga

SEQ ID NO: 31414 - DNA, 1530 bp, Zea mays
  Peptide Sequence Number=SeqID_73193
atggattgcttcagcatgagtggcgagggcgaggcaagcggtatagtaaaagtcaattttatccctgctttaaccacgttggcgccactccggagctcaaaggacgaggatcgcttgaggcggccaagcttctcggcgtcagcaccccagtctggtgtgctcggggggattccccatttggaccagctagaggtaaccggtgagccaaccaggacggaggcgccggagcccaggtcacgagagctcatacttctcacggcggcggcggcgggaaggaggactgggccggcggctgtgagctgccgccgagtcccaccggcctcgacatggggggtcgtggtcgccgacagctgggacgccatgctcggcaacgccgctgcggcggcgcaggaccagacgttcttgaactggttcattggggccgccggcgacttgaatcagtcaggaccgccgcttcccgtgcaccaccagccgctcctcgacaatgtgggcttcgggttcccggcagcggaccctctgggtttcacgctcgatccccacctcggcggcgttgcctctgacatgtcgtcccctggtgcggtgtcgcaaactaccaacagtggcggcggtggcaacaaggcgtcctcggccttcggcctcttatccccggagtctgcttccttccagccgccgccgtttccggtgctgttccaagaaggcatcgacacaaagccccctcttgatacgcagtcgcccggcctcctccaccagtaccggcaccagccgacccccgccgcaaccttcctcatgaacttgcgcgggtcccgccgccgcgcgttctcgccggggtggacgaaggggcactccatccagtcgtcggaccgcgtcggtgttctctggcgcaagaacactcgaagtctggctaggggtagattagtacgaaggcgggagtccgcggcggcggtgaagatgattatcccagtgcgctgcttcacctgcggcaaggttattgggaacaagtgggatctatacctcgacctcctccaggccgactactcagaaggggatgctctggatgctttggaattgttccgctactgctgcaggcgaatgctcatgacacatgttgacctcattgagaagttgctcaactacaacaccgacggcgctgcacaaactactgccacgatctacgcgagctggaccttggcagaagcttcaggctctcagcgaccggtccttgtacgctcaggcgcccagccagtgcaagaagctcagatgcttgaatctgtgcgggtgcgtgagggcagcttcggacaggtcgctacaggccatcgcctggactgtaactgtggccagctgcagtcgttgaacctggctgctgtgatagcatcactgacaagggagtcaccagcttggcttcaggatgtcctgagctcagggctgtggacttgtgccgctattagagcgtggttgcgctggcaaacggctgccctcgcctgcgctccctgggatttacacggccgtttactggagatggccaatatataa

SEQ ID NO: 31415 - DNA, 270 bp, Zea mays
  Peptide Sequence Number=SeqID_73194
atgctccatacacgcggtggaggggcgccaacttccttgccatgggggagcacaacggacacagtggagggcgcccagtctgcgtgccaacttccttgccacgcagtggagactggaggcccctgtgtcgtcgcctacacccctacgcctgcacacccgtcaacgccatcaagtggaaccgcatcagcaccagcgagtgccccctactcgtgctctcatcctcttgtctatgtctggaattacaagttcaagctacttgtttataactaa

SEQ ID NO: 31416 - DNA, 228 bp, Zea mays
  Peptide Sequence Number=SeqID_73195
atgtggcgggctgcaagctgccccctgccctcgaaaccagttgaggtatatgaggagaaaatagggggaaccgctgcggaagatgaaaaacaccagcaggatatcgcactgagcggcagcatgggagatcttgagctgggctaccatactgaccgcgacttggcggcccagatgccaatcaccttccgcatgcagcccagtcatcccaacttgcaggataacaattag

SEQ ID NO: 31417 - DNA, 189 bp, Zea mays
  Peptide Sequence Number=SeqID_73196
atgcacgaccttctacttgtgctggggctgcttggccattttggttggttgctggggcaggaagacgagctgcctggttgttctgatggtactgttgctgctgctgctaaggaaactgcctctagtactggtgctggtgctgacgctgatgctggtgctggtgctggtggggaatgtgtggttcattag

SEQ ID NO: 31418 - DNA, 177 bp, Zea mays
  Peptide Sequence Number=SeqID_73197
atggaggactttgaggagttccaggactacgacgagtttctagtttactttagtggcaacccccaactctgtggatgtcttggacatgttgatgtactagagtacctttccactatttatttcgagcattgtgtgatgatgtccaattatgtaatcgctgtgtactgtggttattaa

SEQ ID NO: 31419 - DNA, 558 bp, Zea mays
  Peptide Sequence Number=SeqID_73198
atggcgctcggccgcccagctgtttcttcctccttgcgctcggatttcctctgctccatggcgaactcgccccagcccccagctcggatccctgcctctgctcgcgccggtgctcgcccctctgctatctccatgcccgagctcgtcctccaggttgccccatggcgctcggcctcacccccttgccccagcgccatcggctccccgtccagcttcaacctcgccgtcggtctcgtctctgttcaagccgccatcgcgccgtgccagttgtccatctttgatcctcgcctcgacgtcatcttgccgtgcaacgcttgcttggtgctcgacaaaacgcctaaatcaggaccatcgtcgttctcgcgatcatcgagttggtttaggtcgcatcgtattatctcgcgccatttctctgaatgttcattcatgtgcattatgcatctcattaggtacgctagttggtcacgtgatgcaaaggtcaagagccaagtattcccccaagaggatgcaaagagtggacatctccgcaagacgatgtcatcagtcgggccaacctga

SEQ ID NO: 31420 - DNA, 1110 bp, Zea mays
  Peptide Sequence Number=SeqID_73199
atggggtgcctcttcggctgcttccgcgcgtccggcgacggcggcgatgcgaagggcgccggagaccgcaacacgtccctggcccccgcgacgacgacgacgatccaacaggatggtacgggcaggaggatcaggccaccgtcgaggaacgcgctctccgccgtgttccagcgagaagatgagggatcgagggcggcgcaggcggcgagctcgtgggcggaacagactggtgagagcaagaggatggatcaggagcttgagccccagaaggaaacacattcaggatgtcttcctgttatgtctgatgatgtacatttcatggaagcgccaaaggttgagaactgtgaaaactcctccaaggtctcatcagagctccactgtaccagatgcaacgagggtgaagaacaacaacaagctctggatcttgctgaggattttgaagaatgtggggtttcaaaagaagatttcttcccccctgaaaaattagaggatccaaagtgtgcaaagaatgaccatgtggtctccatggaaatttcaatatccgatgaatgttcccttttccagagctctgagggttctgtatcaccttctaacaagataagagggagcatgaatacaacatctacggagaagtcaccgaaaactgaggcaactattcatgccaccagaaagaagttactgaagagcaatacttcagaactggagctcccaagcttagctcaatggttgaagcctccaaatcctaagaaagcattcagagatgaggctgtgacaggagacagatctcattcagctaagagttcagatgaggataggcctattattggaatggttgcagcacactggaaagataaagagccagcaaatttcacctctaaatggtgggatggaaatggcattcccaattcaacaaataagtacaaagaagaccaaaaggtgagctggcatgcaacaccatttgaggagaggcttgagaaggctttatctgaagagaagtcgctctctgaaaggaactgctcgagtggaaaaacatctcagtttttaggagtggaaggcgaggagagtgatactgctggatctaaccgtctatatgctactgcttatgcatga

SEQ ID NO: 31421 - DNA, 678 bp, Zea mays
  Peptide Sequence Number=SeqID_73200
atggaaggagagagagccagggcggagtcagtggagtggtgttggccgggtgggaggacggcccgacccgatgggaaggctaggccatggggctcgtccatcggctacaagcagttgttgggttcaatgttgtcgaagcacctggccgacgacgaagagaactgctggtactgcgtcggtggcgctgaggcggagtgcggcgtcgatgacgagttcagggcgacggatctgcgccctctatcactgttgtcgccgcacacgcaggcgttccaccttgcctcgctctccctcttcgcctgcttcttcgcggcctttgccgccccgcccatcctccctgcgctgcgacctgcgctcgtgctcacgccctcggacgcccccgccgccgcagtgggctccctctccgccacgctggtcggtaggcttaccatggggcccgcatgcgacctcctcggcccgcgccgcgcgtcggggttcgccagcctcctggccacgctcgccgtcgcggtcaccgcgtcgtcgcccgcggggtttgtcgtgctgcgcttcgtggcaggcctctccctcgccaacttcgtcgccaaccagcactggatgtcgggcatcttcgcgccctccgtcgtggggctcgccaacgccgtcacggccggctgggccaatgtcggcagcgccgcggcgtag

SEQ ID NO: 31422 - DNA, 432 bp, Zea mays
  Peptide Sequence Number=SeqID_73201
atgggggcctcgaacgctagcctgcttttcgagtactcgagaaccagctccaccgaccaactctacgagacgaactcgatgaccaactctccgataatgaacaactctcatatgatgaccaactctccgatgatgaacaactctcggatgatgaccaactctcgaatgatgaccaactccccgatgaccaactccgccgatcaactttgtgagacggaccggatgaccatctctctgatgatgaccaactctcggatgatgaccaactcttcggtgatgaccaaatcttcgatgatgaccaaatcttcgatgatgaccaactctccagtgatgagcaactcttcgatgatgaccaaccctctcatgaccaactctgacgaccaactatccaccaatcaactttggcggaccgattctctatcgagcaactag

SEQ ID NO: 31423 - DNA, 1448 bp, Zea mays
  Peptide Sequence Number=SeqID_73202
atggccaaggtgcccgatctcggctccgacttcgcccagaagctgctcagggacctccgccgccgccgggagcggctcggcttcgactccaccgccgccgcgcctcgggctcggggcgagctccaccagctggatctccagggagcccctgcgaccttggccatggccgacctccacttctcccttggcaggcgctgccctcctctggtccgagctcgagcaggtgagctcgccccatggcctcggctcctagcctccaggctcggctacgaggacaccacgctcgccctcaccctccgcctcccgggctccgactccggccgttcctcctcgctcgccgcgccctccgctgcgccgtcacccaaggcgcgggtggtggggtggccgccggtgaggtcgtaccgcaagaacgcgctcgccgactccagcaaggccaaccgcgcagccaatttcgtgaaggtggtcgtctcccgccgctcctcggcctctgctcctcccgcgcccggttcccatcgccgctctcttccccagcgcgtcttcttccccagccgcgccgtgtcgagctgcttcttgcgcacgcgccgtgccgagctcgcccccgaactctgctcttccctggcgcgtcgcgttcttccctgcacttgcccatggcggccgagctcccagcctgcgcgccctccggttctctgtgtcgcgcgctgctccagctcccacggcgcgcagcctccctctcggctcaccggatctcccagcgccgcgcccagcttctttctccctcagctcccgcggttctctctccatctccctccgttctctgttgcgtgcccagcagaactcccttgcgcgcccggattctctccttccctactcgaatttggtcaggcccgtgcagctccctggcgccctgcttcctctgttctctccctggacgcgcacagcgttccgtcgaactcctgcgccgtgccctgctcaggttccatggccgcaccaaattccctgcgcgcgctggcctacaactcgactgcacacctccctacttgtcatggccaccgtgccctgctccctgatttctgctcgccgcgcgcgctcatctctctgttcgcctctgcgcacaactctccgagctccatggccggttccctgctcgccggggatgctcctgctccagctcaacctcgccttcaccgacaaggcagcagcagcagctccattgccagaccagggacgccgcgccgccatgacgcgccggccatcgccgattcgcacgccaccgtgccgttacaaggaggacgaggaggcaagcagacggcgcccgcggcgaacgccggcggcgtggacgtgcagatggcgctggccctcgcgctcagcaacagcggcaagctccagaacgtgcatctcgtggcgcgccagggcggcagcggcggctcctcgttcttttggctagtcgt

SEQ ID NO: 31424 - DNA, 153 bp, Zea mays
  Peptide Sequence Number=SeqID_73203
atgagggagtgcatctccgtccacatcgggcaggccggcatccaagtcggcaacgcgtgctgggaactttactgcctcgagcacggcatccagtcacgccaattcttgacagatagcgatgtcgtattaagtcatctgccgttccgtgaccag

SEQ ID NO: 31425 - DNA, 165 bp, Zea mays
  Peptide Sequence Number=SeqID_73204
atgggttgtatgggcaccacattatgcagttatcaaggggccgcgcggacgcgtaccccctctgccacaaattatgacgtccactctcccacttgggaagatggtaggccagcgcacctgccaagtgcaatgcaggccactgacctagaccacgggccttattga

SEQ ID NO: 31426 - DNA, 153 bp, Zea mays
  Peptide Sequence Number=SeqID_73205
atgaagcttacctgtgtattgtcagctttcaatctcgatgaaccaactgagaaagtactgcttatgaagctggagaaggatggaaggacttttcttgaatcaaaggcaaaagaagaagttggaagagttttgatttgcatgaaggataggtga

SEQ ID NO: 31427 - DNA, 1249 bp, Zea mays
  Peptide Sequence Number=SeqID_73206
cgcccggtgggagatcggctccgccgcgggcaggctgcactgcgccgtgcgcgacggcggcgacgtcctggtgttccggctcgacgacaggcgcggtggctgggagctggccaccgtggtctccgtctgcgagatactgcagcggccttggcaaccggagaccacttttgagctgtccgactccgaggacgacgacgacgacgaggcggcggcgggtcaggcagagttggagcgcgtgggtgctgtcattgccgtggccaacaggtacagcaggagcagggtacgggtgccgagagacgacgtgaggctgctgccgtttcagggcgccgatgtggaggtggtgctgctgtccggctggagggtggtggcgttcgagacggtgacgcggcgccggcgtgaggccgtcctgccggtgccgggtcagccgaccaccaaggattggggcgttgtggagtacatcgcgcacaccaacacgctcgcgctggtcggccccgtggtgttcatggagcctccggatgatcaggaagaggtgtcatcggtcttgtcggggaccataattaggggtaccctcaagacgcctaattctcagctggtaacccccatcagcataaagctgcaaaggcctgatggtgccactcgacagggtgagtctgacaggcagtcaggccttgccaaaggcgccacggcgaactccgctccgcccgaccccagggctcggactcgggctaagacccggaagatggcgaactccgctccgcccgaccccagggctcggactcgggctaagacccggaagacggcgaactccgctccgcccgaccccagggctcggactcgggctaagacccggaagacggcgaactccgctccgcccgaccccagggctcagactcgggctaagacccggaagacggcgaactccgctccgcccgaccccagggctcggactcgggctaagacccggaagacggcgaactccgctccgcccgaccccagggctcggactcgggctaagacccggaagacggcgaactccgctccgcccgaccccagggctcggactcgggctaagacccggaagacgacgaaactccgcttcgcccgaccccagggctcggactccgccctggcctcggccgaacgacttccgcctcgcccgaccccttggctcgggctcggccacggcaacaaagggcaaactcaacctcggcttcggaggaacccccacgtcgccctgcctagggcatag

SEQ ID NO: 31428 - DNA, 450 bp, Zea mays
  Peptide Sequence Number=SeqID_73207
atggaccccgcaccggagccgattgctggaggcggtggcctccagcgccgccccgcggccgccgcaaggagcggagtgggcgcacaggagccgcctccgcgcgggcagcttgccatccacgctgacgtcgaaccgccgccgcggccgtggcccgggatgcagaagctggccatcgtcgccatcgtcgtgctcggatgcctccagtttctcccggccacgcacttccgggaccccaacgacccccagcgcaactggatccccttcgacggctcgcggaatccaacgttctgtagtgcttatgtgaatagtttagttgatactgagatgcatacatacacacaagtctttagttcagtaaatgggagtatggctagaagtggaacccatagaaaaaccactcaagggtccatcacacagggatgggttggttttccatgcacatccctatag

SEQ ID NO: 31429 - DNA, 2083 bp, Zea mays
  Peptide Sequence Number=SeqID_73208
atgctcatgatgctccaggacgctacagactacatggaaatggggagctcagggaacgacggcaaggtgctgctgctggagggcactgagagctggaagaggtccgcgccgcgttcgacgagctctgcctctgcaaggctggtagagatcgtcgacgatgattcagggaccgagcaggccgacgatgcgaagagctcgtcagatacgttcatgcagatcgttcctcacggcatgtctcagagttacagacggaaccacatctcgccctcgcagctcgccggtgctgcaaccaattgcaagagcaatgcttcgagtggcgagaaggatggttcaaaggtgaggatgcccggtctgattgccaagttgatggggctggaaaaccttccgtcagcgaagacggctgcagagcgcaaggagacagagaggtttgtgaaacctgaggcggtgccaagaaaatcaacggcggcaactgtgatggctggcacattaccgatacgaattatagcttcggaacggatgccatccagagggcagctcaagaattttcagacaagagagtggaatattagcctgacaaagtctgaagaacctgtactgtcaagtagattttcacatctcaaagttgacaagcaaacaaggcagaccatgaggcagatgttaagcaaacaggaaggtacggagagaagagctagtgtaaaccaagtagctgatgagaaaatcgttcatcaggatacgaagctggctgaagacagcaaccagcaaaagacaacagtcagtgcaggaagaaagatgagtttccttcagaggtttaggaagactggaaagaacaaaccagccacagaagagaaagtcactgttgaagaaaataaacagaagctcgggaagaagcaaaccacaagcacaaaacagagagacagtgaggtgaagccgaggaagacgagagagaagtttaacaaggagaaccttgccaatcctggaaacaagactctaggaaataatggcaaaactgccaagactgatcaaacgagaaggcaagcacaaagtaaaccttcagataagcaagtcatggaaaagaaggtgcagagttaccgtcgaatgcagagtgaaacagccattcagaacctagaacagaagaggccactgaaaccagaaccagcgcattcgaacacgaaggagaagcttcagtctgttacaccgacagaaccacagaatggagaaggcacaaaagtagatgataccagaagccagaaaccatcagacaacacgcccggtgatgatggtgtatgcgaacaatctgcagcggagatggaagatagcggcacaaaagctttgccgtaccaatcggaaaaggaattgactgaagaaaccattgatccgatcaccgcagcacaggctacacctgaatcaattgctgagacaaatgatgacagcacagtcagtgaggctatacagacaccggaaacatttcctgaggaagaacagcagcaacaaatgaaagaagtgaacgatgaatcaacgaatggactggatcatctcatgaaccccagtaacccgaatgatttgagaaaccacaatatggatgttgtctcatgcgattccttcacagagaaccagctcctgcttgcagagatgttgctgaaggatccctacctactcgaaaccacgaaggcgatcaccgggttccacgtcccagccagcgcagctcaggttaacacggggaaatggctagacgaaggcaacagggttctttcagacatcgggcgcgaagtgatcagaaggaaaggcaagcgaatggaggcgatggtggatgtcagcgcgacacgtgccgctaacctgaagctgcggactctggacgatctggtcagggaactggacagcgacatccagtctctccacgtcccgaggaaaattcagcaacggggggatgaccacagcacagctgagaacctgaggatggtcctccgctacgacatggagagcacgcactcggacgctaactcggtgtgggactttggttggaaccgcgcgtgggactgcggtcgagaagacgaagtcgtcaggatttggagagacatattgggtg

SEQ ID NO: 31430 - DNA, 405 bp, Zea mays
  Peptide Sequence Number=SeqID_73209
atggccgaaatagagagaggtcaccgcggggaaagaaagaggaagaaggggctgacctcggtgacaagaggacggtggcacggacggcgagccggtcatggcgagcacatcagggcggttccgatttggggggtcgtggatgaacgtacgatggggaaacaaagaaaatggggggagcagttatcggagaagatgaactgggcgccgtggggagaggatggagaggggatgtggctaagcgggtgcatgacatgggcgccgaagggagcggcctcgcggctgggcgagcgcgcccgtgcgccgtgcgggcagggcggcggcaccaagatttggggaggagcgtgctgcgccggtgggcctggttgggccacgcggctgcacacgggagcgggccggctaggctag

SEQ ID NO: 31431 - DNA, 372 bp, Zea mays
  Peptide Sequence Number=SeqID_73210
atggggtccctcctgggattgcacaatcaaaactcagatggggagggtgccgactgtggaaggggctggagccagggcgagcaccacaactggaaggtgagggagagggtgacgtccacaccattggaagtgagcaggagagatgcagcaatcgggagagaccatggacgagtagaaaggcatggcgagcttaccatgggttggccatgggaggaagagcagggagcagaggaaagcgtccttgctgcagggagtggagatgccagccatcagggagaggagggcgacatccatgggaagctggggctgatccatgccatggagagggatcgagggggagccccatgggagggagcaaggggcggccaatag

SEQ ID NO: 31432 - DNA, 225 bp, Zea mays
  Peptide Sequence Number=SeqID_73211
atgccgaccggcgagaccctgcgctgccctgtcgtgctccggccatcaccactttccctccttccccacgtgatcccatcctcccctgcggttgccgttcgtgtcgagcatgggagagagaaaggtggtcacgaggatgatggttttggttatgattatggtaatggtgaagatgaagtcgtggaggaggacttccaggagttccaagagtacgatgagttctag

SEQ ID NO: 31433 - DNA, 393 bp, Zea mays
  Peptide Sequence Number=SeqID_73212
gggaggatgggatcacgtggggaagaagggaaagtggtgatggccggagcacgacagggcagcgcagggactcgccggtcagcatgcaggggaggggcgcagggctgtgccgttaacgcggccaagcggaagcacgcagggacgggccacgactgctcgcgcacggaaggaggctgcacggccatggacaaggctggagcagggagggagctcggactggggaggggcttggcggcgtttggatggattggaggcgcgcgcacggaggctcggcccaccatgggtaccgccggccatgggggaaggggtgctggccgcaccggccatggcagcaacaatagtttggctgcaaacatgtcattccggatcgatggtagggaatggggcgcctag

SEQ ID NO: 31434 - DNA, 255 bp, Zea mays
  Peptide Sequence Number=SeqID_73213
atgacagtttctgcaaagatgcttcgccacgtcacttgccacgtcatcacattttatgatgaaaatgttcgtcacaaatgtattgccacaggcacttatgacgaaatagagcgtcatagatgtagtgacaaatctgatatgcgtcataaaatctatgacgatttattgatgatcgtcattgtagtccatttaacacgcaccttctgtgacgatggcctttatgtcacaatgacgtcacaaaaatacaacccgtga

SEQ ID NO: 31435 - DNA, 330 bp, Zea mays
  Peptide Sequence Number=SeqID_73214
atgaagcacattaacaaggaattgacaggtctggaacattcgcatttgagaaaattaagtgacagtagcggatgtggagcgagtgctggagaagagaaaggaattactattgcaaagcccgatgctggactcctcggtgttgatggtgtaaaggacgccctcatacccgatctcgctcttcaaagtcaagctaatgcagctcccgatgtacaactatgcggatctgaccaccccaccgctggaggcagaggtagccgcgaggtcgaggaggaggacgttgaagccgacggtggtgcttcggccgccatggctgtcataggatcacggtga

SEQ ID NO: 31436 - DNA, 180 bp, Zea mays
  Peptide Sequence Number=SeqID_73215
atgcaagggaggagctcgctgccggggctgctcgccatgggtgccgagctagcagcagggggaaccttcggccagggaaaaaaatggggcgagctctgctggaatttctgggcaccgtccaaggggccgacggccatggaagtcgcaggggagctatgggagaaggagctcgcgccctag

SEQ ID NO: 31437 - DNA, 309 bp, Zea mays
  Peptide Sequence Number=SeqID_73216
atggccgctgcggacgtgagcccctatggacggtccgtccataagcagagcgagcaccttccttatgtccctgacattcaccttcgatggtggcgccatggacgcgctagacgcgacgagaggcaagagcaggtgagcaagtatgatgaaggggttgggcgggcctgctaccgccaggatggaagcgctggaggcgagcctcccgaggcgcacgacgtggcgtgcggcggaggcgagcaggaggagataggactgcctggacgacgaccgcgtagaggtgccgaggacctcggcaaggagacccggtag

SEQ ID NO: 31438 - DNA, 387 bp, Zea mays
  Peptide Sequence Number=SeqID_73217
atggccttttctgccgccctcgcctgggccgccacgcaactcctccgcgggagcctccctcctgcccgcttcgccgctgccgtctcgcctctcacatacagcagcagccgccaactctgcagtacccccatcgccaacgattcctccgccgcaggaccgtgggacgaggccgagacggagatcctccgcgacgtcgagcccatcgtgaatatcgtcaaggacatcatccactcccgcagcttttgggatcttgtgagactagaaacacttgtgaaagacaaaaatctactgcaatcggggaagattaattcagggaaggcatggaatggacgtgcccctgttgcttgcataaatgcttttgtttgtgataaagaagcctgttcttag

SEQ ID NO: 31439 - DNA, 369 bp, Zea mays
  Peptide Sequence Number=SeqID_73218
atggccgttcttgccaaggtcgcgtcgattatgctccagtgggcgccgacggttgcagcgcacattgaagtgcagttcgtggggagggtacattcgtccaacaccatgttgctacactcgctacttgctcccttcctccagatcccagatgcctttggagctgaggatgagcgcataatggcgcaccgtctagcattggctgcccgtgagattgaaataccacgaacctttgtctatgctgagagcaaaatattgttgtttccaagtgggctacttgccagtttagcgtctggctcaatccaacagggaatggagtgtaagcataacactcatggtccaacttttatggtaaacatggttggcacataa

SEQ ID NO: 31440 - DNA, 357 bp, Zea mays
  Peptide Sequence Number=SeqID_73219
atggccgcctcgcgaaccactcgcccggtcgcattaactccgcggcgggacaggcggcgcctctggcaggggaagcaagcgacgcttcgccttcgccataataaccgcgtcaaaaaaggaccgggaaagggggataccccgaaaaggatccttctccgtgaaggaaacaggccccgagcctccctactgatcaaaggttcaaaggctggcccctcgaggggtttaacagccgcctcagagcgcgtgggctccgcacccactactggtcagaggttcgaaggccggcccctcggaagggttcaacggtcgcctcaggccactcgggctccgcacccactactgatcaggggttcgtag

SEQ ID NO: 31441 - DNA, 213 bp, Zea mays
  Peptide Sequence Number=SeqID_73220
atgaacacaggcattttatgcaaggaaatgcttcgatgtgtacgaaaagaagggaaggtgtttttcgccttcagctcaaaagttacacatgggtttcgtccacagcaaagcaattcgcacatggatggaaaggaagtcataaagggaagcttcagcccaacaaccttcggaatgcgctttggattactaaccttcggcaccgccatcctgtag

SEQ ID NO: 31442 - DNA, 165 bp, Zea mays
  Peptide Sequence Number=SeqID_73221
atgtcaaagctcacacaagcaccgctgctgcaactttctgattttgataagacatttgagcttgagtgtgatgtgagggattggaggagtgctcatccaaggaggacgttatactatgttgtgcccacccttatcataaaaaactttggtttgggagacatataa

SEQ ID NO: 31443 - DNA, 510 bp, Zea mays
  Peptide Sequence Number=SeqID_73222
atggctttcttctaccttgagctcgtgcgtagggaggggttcggcaagggggaacgggatggggtggtgcggcgaaatttggacggggctccggcgaacggtggctgggcacggcgcggcggcggacggcgcatctccgacgaggcgcacaaggcatgggcgcggctgagcaaaaacaaggtggcagacagcgagctcgggcggggaagagaggagagggagagagagcttgggcgaggggacgggagagaggtccggtcggccggtttatatagagaccaaggggagagggacgaacaccggggagggagagaggacggcgacgatgccattaacgccatcaatggagtgccatcaatgggagcaagaatgggggtagaggaagggagagggccggccgtttcgggtgcgaagggaggtgagacggcgcgacgcgggtttgtcggggtcggctcggctggggaggctgagcggcgtgggcgcgcgtgcctcgcactgtggcgtgagtag

SEQ ID NO: 31444 - DNA, 291 bp, Zea mays
  Peptide Sequence Number=SeqID_73223
gaagaggtggctaagacgaccaagcagcgggatttaaaaagatccgatcgagcattcagtaaagctgttccaaatgacgaccgaccaactatgccagtgtccaagcctccagctatagatgacaagcttgctgccctttatgcctacaggaaagcaaaaggcctctgttataagtgtggcttagcatatacccgtggtcacaaatgtgttgatattgttcaactacacttggtcgatgagatttggcaatttccttcaactccccggcgaagtggagccacccacatctga

SEQ ID NO: 31445 - DNA, 366 bp, Zea mays
  Peptide Sequence Number=SeqID_73224
atggaccgggttcctccggttgaagctgtagccgacgcgtacgacgccgcgcgagcagctgtcgttgctgcagtagaagcgcattcggtggccatcattgcggagaaggaggcaatcgctgctatgaagtatgctgcaattgctcgtgaaaagtttgaaggagctgttgattcagtgaagaacccaacctttgtatatgctaatgccactattgaggctttggacaatgttgattttgtacaggacaatgttgatttgaagtatcatgttagcatcaaaaattctctgcgatacgcgattcaagagatgacgatacaatcaacactgcttgttagtcggcaatggtctgaacattcaatggtctga

SEQ ID NO: 31446 - DNA, 365 bp, Zea mays
  Peptide Sequence Number=SeqID_73225
atggcgccccgcggcacggggctccgccgctccgggcgagcacagtcagcaatcggcagccgcgcggcccccgctcccccagccacgcgccgctggcgggtgggcgccgggggccctatggcagtgcccgcagcagcctcgcgctcttgtgccgccgagcgtgcgccgcgacgtggacatgctggaatcgcagtcctcgcgcctccgcggtacggtggggtcttggactcttgggagcgaggccggaccacagcccttctttgcgacgctgatgcagcagaaaagcagagggaaggtagtggcggcccagaggccagagggccggtctctttccggtggcatcttgacgaggaagatgatatctg

SEQ ID NO: 31447 - DNA, 1267 bp, Zea mays
  Peptide Sequence Number=SeqID_73226
atgctgggagacttttctcataatccttgtggtatactctgcatgggtttccccatttgagtttggcttcattcagaaaccaacgggcgccctagctgcagtggacaatgtcgtgaatgcgttcttcgcagtggacatcatcctgaccttctttgtagcttacttggatagaatgacatacttgcttgaagatgatccaaaaagaatagcttggaggtatactaccagttggtttgttcttgacgtggcctccaccatcccgagtgaatttgctcggaagatactaccaccagacctcaggtcatatggatttttcaacatgcttcgtctatggcgtctccgtagagtcagctctctctttgctagattggagaaagatagacatttcaattacttctgggttcgatgcgcaaagctcatatgtgtcacactttttgcggtccactgttcggcatgcttctactatcttctcgctgatatgtatcctaccccaacagatacgtggattggtaattcaatgccagattttcatcagcggggtttgtggattcgctatgtagtgtcagtatattggtcaatcactacgcttaccactgtgggttatggtgatttgcacgcggagaacacaagggaaatgatattcaacattttctacatgttattcaaccttggattgactgcctatttgattggtaacatgaccaatctggttgtccatggcaccagccgtactcgaaaatatgtgagccgtttttcacctttttgtttagtcttggctgataccaacctttataagggtcatattgaagttgcacctaatactttacttttcctgttatgttttggacgaaagagagatacaattcaggcagcgaccagctttgcactaaggaatcaattaccaagtcggctccaagatcagatgatctcacatctttgcttgaagttcaggacagattcagaaggtcttcaacaacaagaaacgctcgatgtcctccctaaggctataagatccagcatttctcagtatctatttttcaatcttgtccaaaaggtttacttgtttgaaggggtgtccaatgacctcatttttcaactggtttctgagatgaaagctgaatattttccacctagggaagacgtgattttgcagaatgaagcacccacagacttttatattttagttactggtagcgcggagttgatagagttgcaaaatggcggagaacaggcaagtttatgttctttgatgctcaagtggcagtga

SEQ ID NO: 31448 - DNA, 333 bp, Zea mays
  Peptide Sequence Number=SeqID_73227
atgggcaagagcaagaaaggcggaagttcgtcgcaccattccggcgacaagcggaagcgtgagccgagccctccctcggaggacttcggcgattttgagtactcggaggaggagttttccacagaggccgaggggtcgccggccatcgagcgctccaagctcgagggctcggatgagtcagaggtctcctcgggcgaggagaactcctctgactcgtccgaggaggagagcggcggtgacggcgacgacgagggcgacggcgacggcggcaagggcgacggcaagagcggcagcggtagcagcaaggccagtggcaaagtcccactggcttaa

SEQ ID NO: 31449 - DNA, 288 bp, Zea mays
  Peptide Sequence Number=SeqID_73228
atggccgaggtgaggaaaggtcccggccgatacgggagggaattcaaattgggaggcggactggcggtgaagagcaagggagcagagaagccgaccaagggtaggaaggcgaaggccggcaaggaccccaacaagcccaagagggctcccaatgctttctttgtgttaatgggcgagttccgaaaggagttcaaggagaagaacccgaagatcaagtctgttgctgcggtggaactgaactttccaggttggaaaagctgtcggcgacaggtggaaatccctgagtga

SEQ ID NO: 31450 - DNA, 3207 bp, Zea mays
  Peptide Sequence Number=SeqID_73229
atgcccggcataccgagggatgtcgccgagcactcgctggatattcgggccggagcccaacccgtcaggcagcctctgcgccgattcgacgaggagaagcgcagagtgataggcgaggagatccacaagctaatggcggcagggttcatcaaagaggtattccatcccgaatggcttgccaaccctgtgcttgtgaggaagaaaggggggaaatggcggatgtgtgtagactacactggtctcaacaaagcatgtccgaaggttccctaccctctacctcgcatcgatcaaatcgtggattccaccgctgggtgcaaaaccctgtccttcctcgatgcctactcagggtatcaccaaatccggatgaaagagtccgaccagctcgcgacttctttcatcacgcccttcggcatgtactgctatgtcaccatgccgttcggtttgaggaatgcgggcgcgacgtaccagcggtgcatgaaccatgtgttcggcgaacacatcggtcgcacagtcgaggcctacgtcgacgacatcgtagtcaagacaaggaaggcttccgacctcctctccgaccttgaagtgacattccgatgtctcaaggcgaaaggagtcaagctcaatcctgagaagtgtgtcttcggggtgccccggggcatgctcctggggttcatcgtctccgagcgaggcatcgaagccaacccggagaagatcgcagctatcactagcatggggcccatcaaggacttaaaaggcgtacaaagggtcatgggatgtctcgcggccctgagccgcttcatttcacgcctcggcgaaagaggtctgcctctgtaccgcctcttaaggaagaccgagtgtttcgcttggacccctgaggccgaggaagctctcgggaacctgaaggcgctccttacaaaggcgcccatcttggtgcccccagctgatggagaagccctcttggtctacgtcgccgcgaccactcaggtggttagcaccgcgattgtggtcgagaggccagaagaagggcatgcattgcccgttcagaggccagtctacttcgtcagcgaggtactgtccgagaccaagatccgctacccacaagttcagaaactgctgtatgcagtgatcctgacgaggcggaagttgcgacattacttcgagtctcatccggtaactgtggtgtcatccttccccctgggggagatcatccagtgccgagaggcctcgggcaggatcgcaaagtgggcggtggaaatcatgggcgaaacgatctcgttcgcccctcggaaggccatcaagtcccaggtgttggcggacttcgtagctgaatgggtcgacacccagctgccgacggctccgatccaaccggagctctggaccatgtttttcgacgggtcgctgatgaagacgggagccagcgcgggcctgctcttcatctcgcccctcgggaagcacctacgctacgtgctacgcctccatttcccggcgtccaacaatgtggctgagtacgaggctttggttaacgagttgcggatcgccatcgagctaggggtcagacgcctcgacgcccgcggtgactcgcagctcgtcatcgaccaagtcatgaagaactcccactgccgcgacccgaagatggaggcctactgcgatgaggttcggcgcctggaagacaagttctacgggctcgagcttaaccacatcgctcggcgctacaacgagactgcggacgagctggctaaaatagcctcagggcgaacaacggttcccccggacgtcttctcccgggatctgcatcaaccctccgtcaagatcgacgacacgcccgagcccaaggcaccctcggcacagccagaggcaccctcggctcagcccgaggcgtcctcggttcagcccgaggtaccctcggcccccgagggcgaggcactggacgtcgaggaggagcagagcggggccacgcctgatcgaaattggcagaccccgtacctgcaatatctccgccaaggagagctacccctcgaccaagccgaggctcggcgggtagcgcgacgcgccaagtcgttcgtcttgctgggcgatgaggaggagctctaccatcgcagcccctcgggcatcctccagcgatgcatctccatcgctgaaggtcaggaactcctgcaagaaatacactcgggggcttgcggccatcatgcagtgcctcgagcccttgtcgggaatgctttccggcaaggcttctactggccaacggcggtggctgacgccactagaattgtctgcacctgcgaagggtgccaattctatgcgaagcagacccacctgcccgctcaggctctgcagacgatacccatcacctggccctttgctgtatggggtctggacctcgtcggtcccttgcagaaggcgcccgggggctacacgcacctgctggtcgccatcgacaaattctccaagtggatcgaggtccgacccctgaacagcatcaggtccgagcaggcggtggcgttcttcaccaacatcatccatcgcttcggggtcccaaactccatcatcaccgacaacggtacccagttcaccggcaaaacattcttggatttttgcgaggatcatcacatccgggtggactgggccgccgtggctcatcccatgtcgaatgggcaagtagagcgtgccaacggcatgattctacaagggctcaagcctaggatttacaacgacctcaacaagttcgacaagcgatggatgaaggaactcccctcggtgatctggagcctgaggacaacgccaagccgagccacgggtttcacgccgttcttcctggtctacagggccgaggccatcttgcccactgacctggaaaacagctccccaaggacgagggcctacaacgatcaaagcaaccaagctagccgagaagactcactggaccagctggaagaggctcgagacaaggccttactacactcggcgcggtaccagcagtccctgcgacgctaccacgcccgaggggtccggtcccgagacctccaggtgggcgacctggtgctttggctgcggcaagacgcccgagggaggcacaagctcacgcccccctgggaggggccattcgtcatcgccaaagttctgaagcccggaacatacaagctggccaacaatcaaggcgagatctacgacaacgcttggaacatcaaacagctacgtcgcttctacccttaa

SEQ ID NO: 31451 - DNA, 138 bp, Zea mays
  Peptide Sequence Number=SeqID_73230
atggctacaacagctgccgcattagctgctcatcgcccccacaggcgacgacgccagccaaaagcaaggatccaactccaaacctccagcttcaagatcatgaagatagggttgtttggactgaagattgcaagctaa

SEQ ID NO: 31452 - DNA, 129 bp, Zea mays
  Peptide Sequence Number=SeqID_73231
atgtatgcacaaggtacaccatatcagcaggcaccaatgccaccgggttcacacccatacagtccttatcctatgcagtcaccaaacgggacagttcaaactccaggttactgcaacaacagtaattga

SEQ ID NO: 31453 - DNA, 408 bp, Zea mays
  Peptide Sequence Number=SeqID_73232
atggaggctaggggaggaagagctgctgctcccctgcgccatgggagagagaaaagacccctactgccggtgaggtgtgccagggaggcggccttcggagctccggcgcagaggtcgcggggccgagcgccatgggcagttgagggaggtgagcagctgctccctgggagcgtctgcacgctgggagatgggagcgactgctccctgctcttggggaagaagggcgtcgtggagggagggcacctgctcgcgttcggaccagaggaggtccctgcgggccggaggaggaagaaggggcgctggtggtctgctgctggcgtgagggagcagtggaagagctgtcctagttggagctcgggtagagggaggaagaagacagggagaacccaggaaacgcttctgcgctaa

SEQ ID NO: 31454 - DNA, 507 bp, Zea mays
  Peptide Sequence Number=SeqID_73233
atgaatcggcgcccaagtgccccaccgcccacgccaacacgttctacgcaaagccgagatgacgctgaacatgaagggaagtttcttaccagcagttgggccacgagaacacccgccgacggcgcggcgcgggtttatggcgacggcgagaaattccggtggccacgagagttcgcggatgacaaattggtcgagtgcctggatttatacccggacagaaggagggggggtccgcatcccacgcgccacggaacgagccccaacggccgagcggagatccagaccgtgcgcgcggcgacggattcgcgttctgttgaaagaagctggaggggaaagaagatggatcctgacgaggtcggtccagtgtcagtgaggggcaatcagcgtatgagcaaaggatatgaggctgacaggtgggccccgcagtccggcgaggcatgtgcgcgcgtgagagcggccgactgcaatgtgggctcggggtggcagagacacaaaggccagaggtag

SEQ ID NO: 31455 - DNA, 528 bp, Zea mays
  Peptide Sequence Number=SeqID_73234
atggacatctgttgtggatcaacagcgtctgtggtaaggatgcagaatgagactaataaggaagactacaggaaggcttcctatcttctagatgctcaaagtggaatgagtgtgtcccctagagttgctgcccaggatatgaaagaaagccaagaagttaaagaagcactgagagcgcagatggaagtgcaacgaaggctgcatgaacaagtggaggtccaaaagcgcgtgcagatcagaatggaagcacttgagaagtacatcgacagtatcctagagagcgcatgcaagatggttactgaacaatttgcttcgagtggcttcagtatctccaaccctgatctcccggagatatcccctggaggggtcatgtgtggctccacggacacgttgggctcgtcggtgttgaaccagctttctgtgagctccatcgactcgcacagtccaggaggcaaaccttctccatcaggcatggaaggtccgacactgctccagaagtcgcctgagctcaagcggaggtcctcttga

SEQ ID NO: 31456 - DNA, 396 bp, Zea mays
  Peptide Sequence Number=SeqID_73235
atggccactgcgccctggctcctgctcggccggagctctctggctcgccgcggtgtccgtctccctacgcgcgcgcccgggttcctgctccctgttcccctcgcgtccccctggtgctttcctgcgcgcgcttgctcccctgtccagctcgaccgaccgtccctgctcgcgcccccacggtgcagctcgagtctggtgctgcaaaagcggaaagaagcagccgagttcctttgcgcgcagccgcattcctcgcgccgatccgcgcttgccctcgtcgccttcatcggcaagctcggtgatgacgagttcggtcgcatgctcgctgctatcctccgcgacaacggcgccaacggcgagcgcgagttcatgttctatcgcaaccctagcgtcgtgtag

SEQ ID NO: 31457 - DNA, 222 bp, Zea mays
  Peptide Sequence Number=SeqID_73236
atggcggtacggcggctaggtcggcgtgtggtttctgcgcagggagagggcaggaagactcgcggggcgtccagggggtcttatccccaggtcaaggcgtacctcaacggaatctcggagcttacggatggcacgcggcatgcacggagatggtcgacgcgtgaggaagacggagtcgcgcggcagttgagagtctgcccggtgggtcccgcgaagcagtga

SEQ ID NO: 31458 - DNA, 918 bp, Zea mays
  Peptide Sequence Number=SeqID_73237
atgggtctagcagaggagctcgcgcgcgcagcccaggatagagatacggagctgggcacacgacaacctgaggctggacaagcgcagcatgcggcacgacgaccagcagggtgctgctgcaggacagacctacacggcgctggggttgcgatagaacatgaactcgcgctcgccgttggcgacaacgccgttgtcgcggaggatagcagcgcgcatgcgaccgaactcgtcaacgccgagcttgccgacgaaggagacgagggtgagcgtggatcggcgccagagaacccgagcgcacggttatcaacagcatgggaggtggacgcgaacagggcaccaagagtgggctgctcggccaccaacgagggagtacgtcgggcggggaaatcgccatgggcgaggtggaggtccggccagaaccgaggaacgcggctgcgcgcaaaggaactcggctgcttctttccccgtttgcagcaccagactcgagctgcaccgtgggggcgcgagcagggacggtcgaccgagctggacaggggagcaagcgcgcgcaggaaagcaccagggggacgggaggggaacagggagcaggaacccgggcgtgcgcgcagggagacgggcaccgcggcgagccagagagcttcggccgagcaggagccagggcgcaggggccatgggagatgggcgcgcagcagaggagcaagcagcgggcgcggtagaggagcgcggcgaggaagctccgagctgtgcgcgagcgagcagaggggaggcgagctgagggggagagaagggagcggctgggaaaggggctggcgtcagccaacagggtaccgggagaaagagagagcggcgtgccagggaagaagaccgcacgcgaggaaccgctggaaaattctgagcaggggcggcgagataggatag

SEQ ID NO: 31459 - DNA, 226 bp, Zea mays
  Peptide Sequence Number=SeqID_73238
atgaagaggatgttcgagaagaaggagcttggtgtggtgctacgcactccctccatccctttgaggacggagtggtcggaatggttgttagcagtgccttcggggttgcgccagacccagagatgggtccactatggggtgcaagataccctactgatctgcgatgcaggagatgtatccaaagtggaagatctctccggcattgaaggtgatcatggtgttgaag

SEQ ID NO: 31460 - DNA, 216 bp, Zea mays
  Peptide Sequence Number=SeqID_73239
atggagaaaaccgtcagtgttcatggccatcaatggtggtattccactgattcaagaaacggtcacgggaggaggaattgccgcaattgcgcgggtgtgacgtggcaacacgagcgggcgaatcggcgattgccactaaggcggggacgcgaagcgtcgaggcggcggctcggctgccgaacggcggcggcgtctctgaaacgaatgaagaaatga

SEQ ID NO: 31461 - DNA, 240 bp, Zea mays
  Peptide Sequence Number=SeqID_73240
atggcctcgcccaacagcatcaatagaagaacaccttacaccaccgaccctcccacaaataccgctgaaaacgggatggctacagagaccgcaaggccaatgtcaaatctgctttacgccatcccggatgacgcacgggacggattaccacgaactttttaccatgttgagcgttatttcaaccactacaactcaaaacgtctcatccacaggacagactcgggtactgtaacaccctaa

SEQ ID NO: 31462 - DNA, 315 bp, Zea mays
  Peptide Sequence Number=SeqID_73241
atggcgcagcagagtagcaactctggcgaggtcgatgcgcagaacagagaccagcagggcgcgtgggggacgattcggctaatgtgcactagggaggcgagcaggggcaggggcttggctggccgcataggtgggacgacgggcacgagcgggagaactccgacgcagccacgcaggtcatcgacggcgcgtcggcaagcatcagctgccgaaagatggggagacgagtggtcgtcggtggagcgcagaaagacggacgccattgatgcacaccagcaatgggaagggggagggacagccgtgcgcagtggctag

SEQ ID NO: 31463 - DNA, 390 bp, Zea mays
  Peptide Sequence Number=SeqID_73242
atggcgagcaacagtgggaagccaggcgacggcggcgcactgacgcgagaaagcgaggcggtggcgcagtgggggaaacagccggcagcgtggggggcgagggcatctggtcgctggcacgaagcacgacgctcgaattcggtggcgccctggcgggatggcggccgggctggcaggggcgcaaccgcgcaaggcggcgcgtcgtgcgccctcgggcgtcgacgcctcggcggcgggctactgcttgctggccgtctaggggctacgttgctgggtgtggggagctgggaacgtgaggtgcaatgcaagtgctcggtggatggtggctcggccgctcggggctacgggttggcgagtgggacgcaggctgcgggttggcctgggagttga

SEQ ID NO: 31464 - DNA, 135 bp, Zea mays
  Peptide Sequence Number=SeqID_73243
atggcttatggggagtatttggaccaggagacctcatcagccacacttgcggtgcgccgcctcgtgaaggaagctgttcgcgagaggcgatgcaaggataactgcactgctgttttgatcgtcttcaggcactag

SEQ ID NO: 31465 - DNA, 261 bp, Zea mays
  Peptide Sequence Number=SeqID_73244
atgtgggtgaaggtcgacgcagtcatggagaacagggctcatggcgcgactgaaggccacgaaggtgccctagacaagttggccgtcatggaggaggacgcgcacaatgagggcagtagagttgggcggagccaagggcgcaacgggcgaggcaagagccgtcgagagaggtactactgtatagagcagcaacagagggcgcgccagggaggcgacgtggaagtaggggcggcgaaggagctcaccgtggtgaaccggtga

SEQ ID NO: 31466 - DNA, 240 bp, Zea mays
  Peptide Sequence Number=SeqID_73245
atgtcggtgaggaagtcagtccttgaccttgtggccgcgctcgccgcactcaaagcatcaccctcggtagcggctactgccatgcctgttcctcgagctcgacaacttcaaaatatctcctatgttgatgatgttggaaacaatatgctccaccatgacatgacacgacaagtcatcacgggcatggtttttaaagcggtaaggcggtccaaggcgttggagaaccgcctggacgcctag

SEQ ID NO: 31467 - DNA, 525 bp, Zea mays
  Peptide Sequence Number=SeqID_73246
atggcagagaatcgcgcacggtcctccagttgccgccgcaagaattccccacgcgcgagccctcagttcagggtattctaccgggatgaagatggcaagttcatacatgtctgtcatgttgatggtgtgactcgtcgtggcacgatcaataaatttttgagccttcaccgtcgactcatgagaatgagccccactcttattccaagcatcatatatccatcagtgattgttgggtacctgggaatagggtacccaaagaaggccccaaggtctcccaaaaacggcctgcccgccaagcagttcagtgggaaggcccaaaaggccactcgggggacagcccaccaattcgaccctcccaccgaaggaaaatccgtcagcgaggcggggctgccgaccaacctggtcatcgagcaacccagcgaggcgaggttgccgaccaacctactcaccaagcaacccagcgaggcaaggctaccaaccaaccggtccttcgagcaacctagcacgacgacaaccgactcctag

SEQ ID NO: 31468 - DNA, 264 bp, Zea mays
  Peptide Sequence Number=SeqID_73247
atggggtcgtcaagccatcgcagcccgcaggtgaaagggcctaagcgtattggggcactctatgttacctgccagctattcaaaatttacttcaggcttggaacagtaaacctttgccgtagtgtcataagaagtatcgaaactgcaaggaattttgattttgaagactttccagtgaaagacaaggtcacttatatgtactacactgggcggttggaggtgtttaacgagaactttcttgttacctgggtgtttatactataa

SEQ ID NO: 31469 - DNA, 345 bp, Zea mays
  Peptide Sequence Number=SeqID_73248
atgggcaagaacaagaagggcggaagttcgtcgcaccactccggcgacaagcggaagcgcgagccaaacgattcccaggggatcgctgccgaggtgtggacgtacatctgggccgtcgagcgctccgggctcgagagctcggatgagtcggagatctcctcggacgaggagaactcctctgactcgtccgaggaggagagcggcggtgacggcgacgacaaggatgacgacggcgatggaggcgacgacggcggtgatggcaacggcgacggcgagggcgacgacaacggtggcaagggcgtcggcggcagcagcaaggccagtggcaaagcgccactggcttaa

SEQ ID NO: 31470 - DNA, 462 bp, Zea mays
  Peptide Sequence Number=SeqID_73249
atgaccaagaaaagagaaaaaggatggaagaaagaatgcctaagtcagccaaaccagcaccagcctgtggcgcaccggactgtccggtggtgcaccagacaggtccggtgcccagactggcccgacggcgaactagctgctcttgagaatttgcgcggcaacgtggctataaatcaccggactgtccggtggtgcaccagactgtccgatgagtcatcggcgcccgcgcctatgtcttcggcgacgaactcgtcgctcttgggaaaagtcgaaggcgccgcggctaaaattcaccggactgtctggtggtgcaccggactgtccggtgagccaacggcgctcgcgtccaatggtcgcctgcgcgatcaacgggtgacacgtggcttagccaacagtcggatgatcgcaccggactgtccggtgtgccaacagatccgaagaacaaacagttggcttcgctag

SEQ ID NO: 31471 - DNA, 405 bp, Zea mays
  Peptide Sequence Number=SeqID_73250
atggtgaatcccctcctcatcttcctccccttcctcagtgtcatcgccttgcccggcaccatcgacgccgcagggccggacccctgcgcaggacgacggatccacatacgcggcctgcccccacacttcaacaccgccctcctccgccattgcggcgccaacgccttcccgctcgccgacccatccgtcgcggccacctcggtcccaccctacgagtcgctcgccgaccacgggctcggccctcgcactcaccctcgcaaccggtcctggtaccgcaacgacgcgaggctcctagaggccttcttccaccaccgcatcctggaacgggacttcctcgccgacgacccagccgatgccgtgttgaaagttccctttgcccgtgaacaggatatggatgtcacctag

SEQ ID NO: 31472 - DNA, 594 bp, Zea mays
  Peptide Sequence Number=SeqID_73251
atggtgcccagcccctgttcctcgcttctccttgttcctgctgcggccgccgtgtggaagatgcagctggcggcggtgcaggctgacgccgaggtgatgctgccgagcagctccatcgcgacgctcctctccctggtgcttttctgcgccgcgccctgctctctggcgccgcaggctcaccggcgctcttccctgtgcccccaccgtgttcgcgcggacctctgcacctccatacgtcgcgcccagccgttcctcctccttgctcgccctgctctctgtccggccatggagatcgctcctggctcggatccggcgctcggctccttcttctcccttcccatggccggcttggggatcttgctcgcgagttcctggtcggattccctgcgtcctctccatcccccagttccagctcgcgacgctctctgtctgcttgccatggccgttgtgcgccgcgcgcgctgctccctggtgctcgctgcgctcctctgccggcttctcatgtgcaacgacctcccctacggggcatctcgtcgcctaaccatcagccttggtgtccattccactctccagcaaacctatggtggtagataa

SEQ ID NO: 31473 - DNA, 471 bp, Zea mays
  Peptide Sequence Number=SeqID_73252
atggcaagcagacagagagcgtcgcgagctggaactgggggatggagaggacgcagggaatccgaccaggaactcgcgagcaagatccccaagccggccatgggaagggagaacaaggagccgagcgccggatccgagccaggagcgatctccatggccggacagagagcagggcgagcaaggaggaggaacggctgggcgcgacgcatggaggagcagaggtccgcgcgaacacgacggggcacagggaggagcgccggcgagcccgcggcgcagaaaagcaccagggagaggaacgtcgcgatggagctgctcggcagcatcacctcggcgtcagcctgcaccgccgccagctgcatttcccacacggcggccgcagcaggaacaaggagaagcgaggaacaggggctgggcaccatgggcgagcgcaggggattcaacgagctggagctggaggaacgcgcggcatag

SEQ ID NO: 31474 - DNA, 306 bp, Zea mays
  Peptide Sequence Number=SeqID_73253
atggagaaggcgcgaccccggagcttcggtgtccgaggagcaagggatatggagtcgtcgctgctccatgcccgtgaacagagaggagggaggtggcatggggaggaagaggtggagatggctggtgggagagggtgggctgccatttatagagccaagctctggacatgtcagactgcaccagcaggtgccaggtgtgacagcgccaacattggacggccgtttttgtctttttctatttggaatcagacccggatcactgcagaagatatgttccttgagatatactctacaaatcttgtatag

SEQ ID NO: 31475 - DNA, 282 bp, Zea mays
  Peptide Sequence Number=SeqID_73254
atgaacgtatgtgagctcactcttgctgtctcacccccacaggtcaagaacagcctcgcatgtgaagaagctcgttatgaaaaacgacctagccctgcaaaggggctactattgggggtcttcttctccgctgaaggtcctcaagacgaagatatcgtttgcaagcaaacggtgagggtcttcttctctgccaaaggttctcaagacgaagatatcgtttgcaagcaaacattgaggatcctcttctccgctgaaggttccagcgatgaaggcattgtctga

SEQ ID NO: 31476 - DNA, 1080 bp, Zea mays
  Peptide Sequence Number=SeqID_73255
atgggtcagcgcgagacagagcacgaagggggcaaaaaggggagacaggcaaaaggggaaacccgcagccttcgtgttgccctgcgcccaggtcgagtccgagccccgggtcgggcgaggcggagaccatcgtctgaggccaaggccgagtccgagccctggggtcgggcgaggtggagttcgtcgtcttccggggccgaggccgagtccgagtccgagccctggggtcgggcgaggcggagttcgtcgtcttccggggtcgaggccgagtccgagccctggggtcgggcgaggcggagttcgtcgtcttccgaggccgaggccgagtctgagccctggggtcgggagaggcggagttcgtcgtcttccagggctgaggccgagtccgagccctggagtcgggcgaggcggagcttcctatggcacccgaggctggacttggctgctgtcagcctcactctgtcgagtggcacagcagtccgagcggcgcaggcagcactgtcttcttgtcaggccggtcagtggagcggcgaagccatccttgcattaaatgctcctgcgatacggtcggtcggtgtggcgatccggccaaggtcgcttctcggcgaagactgggcctcaggcgaaccgaagctttgtgctgatgggggttaccagttgagattaggagtcttgggggaggaggtttcctccgagtccgaggggtcgcttgccctcgcctctcccctgacatcgtccgacgattcgaacgactcccaggggatagctgtagaggtgtggacttacatccactctgtcgagcgcgccaggctcgaggagtcggatgagtcggaggtctcctctgatgaggaggactccttcgactcgtccgaggagtggagcggtgacgacagcgatgacgagggcggtgacggtggcggagacagcgacgacggcgacggtggcgaaggcgaagacgacgacagcaagggcggtgaaggcgacaacagcggcaacggcagcggcggcggcaaggccagtggcaaggcgccactggtttatatagttgttggggacttgttcttaaatgctatgaattaa

SEQ ID NO: 31477 - DNA, 366 bp, Zea mays
  Peptide Sequence Number=SeqID_73256
atggagactggtagagtggactcattattgacaatgttgaaagaaggaaaggtgggattacagggatggggtaaggagcggtgtgaacataaataccacagtagcgtggcggccctttcgagggtcaatggaggctggagggtggtagagcacgaagcagtcacaaagatcagggttcatgacctgatcaaaggctacgaacatgtccgggagaagctgaatggcgtgaagggagacacatacatggtgccatgcgcccgtgtcgtgggtgggatcgctagcacgagggtgggtgatgaggccggcaccaaggagtggagacatgctggtgaacttctggcgacaccaagagaagggagggcctag

SEQ ID NO: 31478 - DNA, 534 bp, Zea mays
  Peptide Sequence Number=SeqID_73257
atggcgcttcctgttgacgtggctggcctgcgccctaggttgggcgatgtggaggctcctccgaagccgaggtcgagtctgtcttccatagccgaggtcgagtccgagcccctgggtcgggcgaggcggaggtcgtcggcagaggccagggcggagtccgagccctggggtcgggcgaagcggagttcgtcgtcttctggggctgagcccgagtccgagccctggggtcgggcggagcggatcggagtggcgcaggcggcgctgtccttctgtcaggccggtcagtggagcggtgaagtgacggcggtcacttcggctctgccggggggcggcctcgggcgagccggagatatgtccgccgttggagggggacctcgggcgagacggaaatcctccgggctttatgctgatgggggttaccagctgagaattaggagtcttgagggatcccgaagagtcgacgagctgatgagtgatgagaaggcaaagtgcgcagcagcgggcgggttaggtcaccgacttactggtcagtag

SEQ ID NO: 31479 - DNA, 429 bp, Zea mays
  Peptide Sequence Number=SeqID_73258
atgtccgaggacgccgcacacagccgtcatcgcgctgggtcgatctggcctagtcgcgctagccgcagcaccggaggtagccacgacgctcccgaaaatgatgaccagcccgtagggaaagcccggtcgccacagcacacccaatttcttggaaccctagcagtggccgatggatgcaaatatgttggtcagaggcagcttcgatgcgctggagaacaatacgctgaacggctggagaacgagaaaggggggcatgtgttgaatgcaatttttgtggagctgttagagcaggagatatccagagccacctgccacaagaaagcagaggaagaaaaaaacaaaacaaattattggtcggtgtatggatatacagtgatatacggccagaaaaagtggaagaagagcacctgtacaagcatctacggatga

SEQ ID NO: 31480 - DNA, 444 bp, Zea mays
  Peptide Sequence Number=SeqID_73259
gtacgcagagggcttgacaaagcagaaatatacagcattgcattgtcgcccaatgtgcagtggttggcagtgtccagcgacaaagggactgttcatattttctccctgagagtcagagttgctggagtggattcaagcaatgagcaacgcgctcttgaaggtccacggatggatcaccagaactcttccagttctattgatcctcttattcaggcgaacactggatccaatgctagttcatcactgtcttttatgagagggatcctgccgaagtatttcagttcagagtggtcatttgctcagttccatttaccagaagtcactcgttacatagtagcctttggtgcccagaatactgtgatgatggttggcctggatggcaggtatgaaaaatacatcagccagtggaaacaacaacagtttgtgtcatgcctagaagtgtag

SEQ ID NO: 31481 - DNA, 462 bp, Zea mays
  Peptide Sequence Number=SeqID_73260
atgaggaacacgacgagtgggagggggagacgatggaaaggggagggagagcggccgagcagagacagtgggaagggtcggtcgggggaggggtgtttatgcgaagggaggccggaggtggctgcgtgcgtcggcacgcacgggcacggcgctgggcatttggctcatgcactccgcctcatggacatggtgggtgcctgggtgaaacgccctcaaacacgccctcagaagcttcggaaactctgcacatgtcgaattatacagcagtacatgtcaacgactgtactgaagaagagaagcaagacaaaggcgccggagacgtgggccaagaggtgcatcaggaagaccacacgtctgggccgagcagagaacaacccaggagaagtcatcgagtaccgcggcccaacaaacgtttcacaggtgatgaatgatgtatatgagagagggcccatggggcagtga

SEQ ID NO: 31482 - DNA, 1212 bp, Zea mays
  Peptide Sequence Number=SeqID_73261
atgcgggcggtggccagcgccgtcgtgtggaccgcggtcgtgcaggtcgcctccatcgccgggctgttccgcccgcgggtcgtcgccgactgcggcgggaaaggcggcggcggcgccgcggccgggctcgccgctctcgccggcgaggacagcgccgccgcgaggctgtcgccgccggcgctcgtgcccaagagaatttacaagagcaacggctatctacgagtgacttgcaatggtggcctcaaccaaatgcgagccgggatatgcgatatggttactatagcacgccatctaaatctaacgcttgtggtccctgaattggacaaaaggtcgttttgggctgacccaagtgattttggagatatttttgacgtggaccacttcattaattccttgagagatgagctgatgatagttaaagagctgcctttgaaactccagttaataagaactaagaagagactgtactccatgtctcctgtcagctggtcgaatgaaacatactacctaaagcggatactacctcttgcaaggaagcacaaagtaatccatttcgataaatcagacgcccgccttgcaaacaacggccttccagttcagctccagatgctgcgttgccgtgtaaacttcgatgctttgagattcaccccacagattgaggcccttggcagacagcttatctccactctccagagaagcgggcaattcgttgtgcttcacctgcgctatgagatggacatgctctccttttcaggctgcacgcatggctgctctactgaagaagctgaggagctcactagaatgagatatgcttatccatggtggaaagaaaaagagattggttctgaagcgaagaggcttcagggactttgccccctcacgccagaggagattactctagtgcttaaagctctagggttcacaaaggacacgctgatctacattgcttctggtgagatctatggcggcgaaaggcgcttggcagtgctcaaggctgcgtaccctaaactagtaaggaaggagaagattctatctcctgatgaactgcggccgttccagaaccattcgacccagatggcagcgctggattacatggtctctctagcgagcgatattttcattcccagctatgacggaaatatggcaagggttgttgaaggtcaccgcaggtccgcatctctggattccgttcggaacattaataatcactag

SEQ ID NO: 31483 - DNA, 837 bp, Zea mays
  Peptide Sequence Number=SeqID_73262
atgacggtggcagacgggcaggagcagcggtcacatcgtcagccaagcttacgtcccatccgggggcagcgagagaaccctctctcatggcgtgaagacgacacgcccgagcccgaggcaccctcggcccagtccgaggcacccttggctcagtccgaggcaccctcggcctcgcccgaggcaccctcggcccagcccgaggcaccctcggcccagcccgagggtgaggcactacgcgtcgaggaggagcagagcggggtcacgcctgatcgaaactggcagaccccgtacctgcaatatctccaccgaggagagctacccctcgaccaaaccgaagctcggcggttggcgcggcgcgccaagtcgttcgtcttgctgggagacgggaacgagctctaccaccgcagcccctcaggcatcctccagcgatgcattcccatcaccgaagaaggcacccgggggctgcacaggtggatcgaggtccgacccctaaacagcatcaggtccgaacaggcggtggcgttcttcaccaacatcatccatcgctttggggtcccgaactccatcatcaccgacaacggcacccagttcaccggtaggaagttcctggacttctgcgaggatcaccaccttcgggtggactgggccgccgtggctcaccccatgacgaatgggcaagtagagcgtgccaacggcatgatcctgcaagggctcaagccgcggatctacaacgacctcaacaagttcggcaagcggtggatgaaggaactcccctcggtggtttggagcctgaggacaacgccgagccgagcaatcaagctaatcgagaagacttag

SEQ ID NO: 31484 - DNA, 321 bp, Zea mays
  Peptide Sequence Number=SeqID_73263
acgagggagttttgtgctctggtgaagcatggtgtgaagcctccagcgcctatgttcgcggggtcggtagagggggcgttggctgtgtttgacagggcagtagagctagagcagcagcggggccgcgggtggggacaagggcagggggcgccgttgcaaggttggagcagcgacatcgtggtgagcagtggcgaaggggagggcttgaccaccggcgacgtttgtggctggagcagcggcggagccgtcggcttcgcctttggtgcgagcgaggccaggtgcaggaggcgccatcgtgaggctgcagcagcaacattgtag

SEQ ID NO: 31485 - DNA, 948 bp, Zea mays
  Peptide Sequence Number=SeqID_73264
atgcttgcaaagaagggagaacaattcattgatgtcccttatgttgtgaagagtatggatgtgtcatttagtggcatattgagctttattgaagctgcggcgattgaaaagcttaaaaataatgagtgcacacctgcggacctatgctactcattgcaggaaactatctttgccatgcttgtcgaaattactgaaagtgccatggcacactgtgattcaaaggacgttcttattgttggtggcgtcggttgcaacgaacgtttacaggagatgatgaagattatgtgctcagaaagagggggtaggctgtttgcaactgatgaccgctattgtatagacaatggggcaatgattgcatatactggtttactggcatatgcacatggcatgaccactccccttgaggagtcgacatttacacaaagattccgaactgatgaagttcatgcaatttggagagagaaggagatgccgccttctccaggcacatggcaggggctcagaatagttgtgctgttgtatgaactgcagcagtattcgtacataccgtggtatttttttggaactatgaaaaatagagccctcatgtgggctgagaagctcagagaagattcttttgtttttgatggtgctacaagaaatataattgactgggcacgaagggaaatggaggatgacgcccaggctaacaacgaggacataggaagatgcatgtttcttgagttcttaatgttcatgacatatgaggctatgctcaacagcagatcctcaaaggctacacatatgcttacagaaaaaagttttgatcctgctagcagcagcatgattagaaaggaggtgaaaatgagattggctgtaattgcttgtttattgctgaaccagaccttcctgatgaatcccaaatacccctccttttgcctaattaacccctgttacgagcgcctataa

SEQ ID NO: 31486 - DNA, 192 bp, Zea mays
  Peptide Sequence Number=SeqID_73265
atggcggcgatgtcggcttttccttggtctgtaatgcaccctctgtggtgccttcgattgcttcttcttgatgccagatggagagtaattctggggttccaaatagccgctacatcctgccttttaccttctttcagccttctgtatatattcactgttgatgatgtcattctgtcggctgttgatgaatga

SEQ ID NO: 31487 - DNA, 201 bp, Zea mays
  Peptide Sequence Number=SeqID_73266
atggacgatggtctgcgaatcgcggcgtacaagaactggatttgggtgccgagtgacctcaagacccgtacgatagatcccaccgcgggcgaagatcctgtggcatcgtgctttggcgtgaggtggaagatgcacagcagccgtctgatgtcaaagctgtggtcaggatttggctacggtgacctccctgggatattttga

SEQ ID NO: 31488 - DNA, 687 bp, Zea mays
  Peptide Sequence Number=SeqID_73267
atggaagccatgttcaccgtaaggaaacaacagcgggtattgcaaaggcattcatctgcacctgtagaattgtctgaagctgagactgaatactcagttaatgtcgtgaagcatatttttgatggacatgtgctccaatacaactgtaccaatacaattcctgaacaattgcttgaacaggttactgtttttgttgatgcttctgaggctgatgaatttttagaagttgcttcgaagcctttagaatcattaccatatgattctcctgggcagacctttgtcgcttttgagaagccagaaggtgtcattgctactggcaagttctcaaatatcctgaaattcattgttaaggagccatgcctgtcactggtgaggcatgggagcgagggagatgactactggttgcacgtggacctgcacggcgtcacagaccacataaacagcgtcatccgacgtcgaggcgatgacgaccgcgcatgggagctcgcgtcaatcaacggaacgcaagctggcgtacaccgtggacgtggccgatgtggggcccgcccggcacccggaggcggtcgcatctgcggaacggacccccgcggcctgtctgtgactctgggtacgcgcgagcgcaacggagggcggtcgcgttcctcggagtcgacgatggatctgttcaacggcggctgtgttccatag

SEQ ID NO: 31489 - DNA, 1515 bp, Zea mays
  Peptide Sequence Number=SeqID_73268
atggataattggtccacaattgcactcaccaagaaccttgttcttcatgatcgaagttcacctggcatgcaattacctatggctgcataccttggagagcttgttctaagcaatgatgttaagatattaattgaagccggtattcttccgcctctcatcacagacctctttactgttggcagtaatcagcttccaatgagattgaaggaggtctcagcgaccattcttgcaaatgttgtggcatcgggtgcacgttttgagtccattccacttgatcataataggcagaccttggtgtctgaagacattgtacacaatctgcttcatctcataagcaacactggacctgcaattgagtgtaagttgctccaggttttcgttggtctaactgactcttcgacatctgtacaaaatatagttgatgctatcaaaagttcaggtgctattgtcagtttaattcagtttgttgaagcacctcaaagggaagtacgcatgaattccatcaagctcttgaataacatatcaccttatatgggtcaagaacttgctgatgcttttcgtggaaacttcagtcaactaagcagcttggtcaaggtaattgtcgataacaatggtatttctgaagagcaagcagctgctgctggccttgtagctgatcttcccatgggggactcagtcctcaccagacgtcttcttcaagatggggcattcgcagcaatcatttcaaaagttttaagaatccgacaaggggagattcgtggggggcgttttgttaacccattcctcgaaggtctggttagaatagtctcccggatcacatttgtcttggatgatgatccggatatcattgctgttgctcgtgattacaatcttgcttcactcttcactgatctgcttcagatgaatgggcttgacgtagtccagattgtctctgctgtttcactagagaaactctcgcagcagtcaaaacatcttacgaagatactgcctgctcccagcccagggctgtgcttttcaatatttccatgcctcagccagaagactgtagcaactggggtctgtagagttcactgtgggatttgttccgcaagggagagcttctgtctcttggaggggaaggcagtggagaagttagttgcctgcttggataataataacgagaaagtagtcgaagctgctctagcagcgctgtccactttactggaggatggagtggacattgaacaaggtgtcatggtgctgtgtgatgcagaaggaatcaacccgatactcgcggtattgtgcgagaacagaaacgaggcactgcgccagagagcggtgtgggcagtggagagaatcctgaggacggacgaaatagcgtatgagatatctggaaaccagaatgttggtacagccttggtggaggcattcaggcatggcgactctaggacaagacaagttgcagagcgagcattgaagcatgtagataagttgcccaatttctctgggatattttctaagatgggagcacaatga

SEQ ID NO: 31490 - DNA, 975 bp, Zea mays
  Peptide Sequence Number=SeqID_73269
atgccgtggtgtattttttccggcccatcaacagccctttccggcccacaagccctcggcgtccgcgcctcctccgtctcgccgccgttctcgacgcccgccgatccaacaccgggtctgcccaacagcccaagtgtttcactagtgatggcagaagtccaggatggtcattatgattcaatgtcacaggccactgatagcttgcgtgttgaacctatatatgagtcgttcctatgcccgcttaccaaacaggttatgcgggatcctgtttctattgacagtggtgttacgtttgaacgcaatgccattttgaattatttcaatgaatgtcttagcagtggaaggaggcttgtctgccctgtaactaagatggagctcagcaacactgagttaaatccaagcatagctctgaggaacactattgatgaatggatgaatcgcaacgaggcggccaaacttgacgtcgctcgtaagtcattgacttctgacagcacagaaagtgatatcctacaagcactccagtatgttgatgagatatgtcagagaagtcgatctaacaggcaggttgtgagaagagatgggttgataatcatgattgctgacttgttgaagaatagcagtacgaaagttgagattgccgctggagacaatattcgcacaattgtaaagttcttaaatcatgggcagactcaggaaaaggagcaagcggtgtcactgttgtttgaactttcagaaaataaggctctttcagaaagaattggcagtgtttctggagctattcttatacttgttggtttgtcaagcagtaaagtagaaaacttgctcattgttgacagagctgagaagacattggaaaatttagagagctgtgaaaaaaatgttagacagatggctgaaaatggacgattgcaacccctcctgaggctgcttcttgatgttagaagtgtctccctgtttcaccaggttcacctttaa

SEQ ID NO: 31491 - DNA, 297 bp, Zea mays
  Peptide Sequence Number=SeqID_73270
atgggccattgggctcgtgaatgtcgcaagaagagggacaaactgacccatgttgggcatgagtgtgatatcctggcccaagtggatgtcgcgtcgccaagagctagagatggactcaccatccagatcgtgggtggaggcagcacatggtgggtgttcgcagaggaaccggagcctatggcgctcatggctctagctttcgccagtggcaccaagctgcctcccgcgaaggtggttcccacctcgacatcgaagctccacctcaacgagatccgactattcgtccaactcacgtag

SEQ ID NO: 31492 - DNA, 2379 bp, Zea mays
  Peptide Sequence Number=SeqID_73271
atgacgcagcttggtcatcatggtgtctatattccccatgccgaggatgaatggcaacgttaccacgtccaacagggacacgggtcagggactaggccatgccatcgcaacatgctcgaccagccgcaccatctaactgcggaacgcacgtcgagatggggccgacggaggatcacattcgaacacggcatcgacaatatttccaccccaagggagtgtggcagctctcccacagatcctacccaaaccacaatctcgccgcggtctccaatgggagccgagccggtggacttctcgccgccgccgccgccggagccgacgctttcgccggagccggagatctccggcaaggacagaggaggggtaagcatcttgtcgctggttctattcctgtcctcctccaggttccagctggtgggagtgggattgtcttccgatttcgtgacagcttacgtttatgtgcgtgcgtggcgtgggactgggatccagaactggaaggcggacatgatgtcagctctcggggagtcggtttccttcggccgcttcctctcggagccgctcgaatgggggaagaggtccgccttcgcgcacaaccgctacctcgaggaggcggcggtgcaggcgcgcccgggctcagtcgcgcagaagaaggcattcttcgaggcgcactacgctaggaagaagcgcaagagcgaggaccacgccgccgccgccagtgatgatgttgcaggcggtgatggcgagctcgaggcggcagaggatggtggtgccgcgtcgtggtcgttgtctgctactgagtcttcctgcatgacggatgaaccaccggcaccagcagaggaagtgtgctgcggttgggaggaggacagagtggtggattgtggtggcagcgccagcgacaagccagtacacgtgccggaggagctcgcggacatcaccgatgccgttgggccctgttgcaggatggatgcgcccacggatgagacacagcacatggagggcggcgacgaagtggttggagcagttttgcccttgcagaagcaggatttgtgcatggatagtttgacggctgttgatgccactttgaaggatatcacagattctgtcaagagaaggaggatccagatggcgtccctgcttccaaagccggcaaagctcagctctccccccacagcaaagaaagggcagaattcctcagctaaaagaaggtcaatgcggcattctgcaaaggagaataactcacctcctagtgcaggcagtaacaagctaagaacaacttcgacccccaaaaagaggtcaacgctgtcagccttgcatatgtctatgagtttcccgagatgtgaatctggcaatacttccatggcgtcaagaaatcttggtaccacaatcgctgctaggattagcgagttggaacatgcaaatgcaaccaagcctgcagaaaaaaacactaagcctcatgatttgaggctaccaagaaagaaattttccagcgctttaccagaaattgctccaaggacatctcaagtcgatgaagaaagttctgaccaggctgggccttggatggcgctggaaactaggttttacgggggccgaccttatcgtactgggatttggacaaatgtaacctcgttatgcgggaagagttcattctcatgctacctttcggacgtaaggtttggggtcgacctaaaccgcccgagctctgccgcgcatctgacttcgaggggtgagcagtgcctggttgaggctgttggctgctaccctgaacaccatgagcttgtggccgacggcttgggtctggggaacactggcatggagagcttccatgggccctcctcaccgcggctggctacctcatgcatgatgaggttgtcgaaggcgcaactcattaatggcttgcttgctggtctccacccgcacgtcgagggatttgggactcaatcccctcaagtttgtgcggtggaatgccgtggccgccacatacgctgggggaccaggatgcagaccagcatagtggactgcgctagccttgctcctggcccatgggaccccaccaatgggatcgccgcctgcgatctcgggcatgacagagcctgggtgagagcctacggtcgtaacctcaagcaaagtgctcgagactcccatcgccttcttcctagtggcgtcggcttggctgttgtggcgccgcttgagatcgacgacgagcatcttgagatgttgcttttcagccttttgccatacgccggcgaatcctcctcgattgagcttgttgggaaactgtcgtggtttttggaactgtgggacaataagcgtgaggagtttggtctccagcttctgggcctcgcagcacctgttgtctcgtctgttgggtcatgcttctag

SEQ ID NO: 31493 - DNA, 264 bp, Zea mays
  Peptide Sequence Number=SeqID_73272
atgctcgcctggccccgcatgtcaacccgccacctcgcgcttcccgcctgggcccgccagtcagcacgccgcccagcgctgtccgactggccccgcctgtcagcccgccgccccgcgctgcccgcctggccccgccagtcagcccgccgccccgcgctgcccgcctggccccgcctgtcagcccgccgccccgcgctgcccacctggccccgcctgtcagccgctcaggccgccgcgcgctcgcgcacccgcccggggatctaa

SEQ ID NO: 31494 - DNA, 312 bp, Zea mays
  Peptide Sequence Number=SeqID_73273
atgcaggtggcgtgcaaccgcaccacggggacacaccccttcgacttcgacgcatccggcatggaggcccaggcccacatgtcatggaccaggaaaggggatactccgaaagagatccttctccgcgaaagaagcgggccccgagccctcctactgatcaggggttcgaaggctggcccctcggaagggttcgacagccgcctcagagcactcgggcctcgagccctcctactgatcaggggttcgaaggctggcccctcggaagggttcgactgccgccccagagcactcgggcttcaggctcgttactga

SEQ ID NO: 31495 - DNA, 552 bp, Zea mays
  Peptide Sequence Number=SeqID_73274
atgtctagaggtagaggagtagactcctcacaccggaaggcgcccgggggctacacgcacctgctggtcgccgtcgacaaattctccaagtggatcgaggtccgacccctgaacaacatcaggtccgagcaggcggtggcgttcttcaccaacatcatccatcgcttcggggtcccaaacaacggtacccagttcactggcaaaaaattcttggatttttgcgaggatcaccacatccgggtggactgggccgccgtggctcatcccatgtcgaatgggcaagtagagcgtgccaacgacatgattctacaagggctcaagcctcagatctacaacggcctcaacaggttcggcaagcgatggatgaaggaactcccctcggtggtctggagcctaaggacgacgccgagtcgtgccacgggtttcacgccgttcttcctggtctacggggccgaggccatcttgcccaccgacctggaatacggctccccgaggacgagggcctacaacgatcaaagcaaccaagctagccgagaagaatcgttggactag

SEQ ID NO: 31496 - DNA, 441 bp, Zea mays
  Peptide Sequence Number=SeqID_73275
atggattcctgtctgacgaatgatgatgcatttgttgttggcgggtctgaggatggttatattttcttctgggagttggtggatgcacctgttgttgcaagattcagggcacatagttctgtggtattgttctttccagaattgcaccatatgctgtccaccagcttaacttacatgtacctaacactatttcttttggcaggacatgagatatcctcctccaagtttgagagcattgtccctaattcctttgccagaggccctgttatggcacacgccaaacctaaattgatttgcctggcccagcagagaaccctaactcctcgcttcccactcgcgcacgctacctcccctaccgctatcgagccagctagcctagcagtgtggccaggcggccaggcccaacccccaggcagcctcccgtgctcgagtagcgcctag

SEQ ID NO: 31497 - DNA, 528 bp, Zea mays
  Peptide Sequence Number=SeqID_73276
atgggcgtgattcaggaaaacagcgccgcctgccctgctccgactgttgtgccactcgacagagtgaggctgacagcagctaagtccagcctcgggtgccataggaagctccacctcgcccgaccccagagctcgggctcaacctcgacaccggacgacggactccgcctcgcccgaccccagggctcggactcagcctcgaccccggacgacggacccagcctcgacctcggacgacagactccgcctcgcccgatcccagggctcagactcaacctcgacctcggaaggcggtctccacctcgcccgaccccagggctcggactcaacctcgacctcggacgacgatctcagcctcgcccgacccccgggctcagactcaacctcgaccccggacgatggtctccgcctcgcccgacccccgggcccggactcagcctcgacctcggaggagcctccacctcgcccgacctcgggctcggatcgaccacgtcccagggggggcatcattaccctacccctagctag

SEQ ID NO: 31498 - DNA, 246 bp, Zea mays
  Peptide Sequence Number=SeqID_73277
atggcatcgtttcaggtcaaattgctggataccaatttgtttttgtttgatactttgatttgtgataagttttcccaaggagaggatggatttgttaattctcttgccatagcaaaatctggacgttttattgttgctggtgttggccaggagcctcgccttggaagatggggacgagttcgatcggctcaaaatggagtcgcaattcacccaatccgactaaaagatgtgaaagaggacttgtag

SEQ ID NO: 31499 - DNA, 393 bp, Zea mays
  Peptide Sequence Number=SeqID_73278
atggccgccccattttgtcgatggcttgggcggccgttacgccatggcgacttcacctttgtcgcgccggggatggtggttcctccgacgcttgttgaggtgctcccgatgctacttctttatgacgctcatgttgtcggcatcgcacgacctctttccctagcgggaagatgcgatgttaaggaggctcttccccccaacgaggtggaaggggaggaactggatgatcaggtgatcatccttgatcctcaccatgcggcaggcaaggtgatagtcttccaaccagacaccaagattggtggttctgtcgtacttcgtgatgggaacacacaacctcatggactgggagggatgtgccccttgctccaggatgaggtcgtgtgggcgtggtag

SEQ ID NO: 31500 - DNA, 432 bp, Zea mays
  Peptide Sequence Number=SeqID_73279
atggcgctgtcactcaatgtcattatagacttagtcaagtttttggatgagggcattgtgtttctcctgctgctgcgggaggttagcctcgttggtgaggatgtgcgcccgacgctggcgctagtattcttcttcctggttactgggttcctagtccccccagcattttcatttcgtggcggtgtggccacaaaacgagtccttcgctttgccttaatgacgatggagttgggcgagcaggtggtggagcacgcgggtcctcccacgcctatcgtgatagacgtgtcagagtcaacgaggcataactcgccggtggcggtgggcatttttataggtcacgttgttggagatgctctaaggaagttaagggatccaaacatgatatgggtccgaagcgtaaaggtctcacagttggtgaacgctgatgactaa

SEQ ID NO: 31501 - DNA, 270 bp, Zea mays
  Peptide Sequence Number=SeqID_73280
atggcaaggcatatcaacaacgagggtaagcaatatgcttcatgggagctagagttggcgggcttggacgtggaacttggtggtacactcagacacccaagacagcgacaaactcctagggagagaggtttgctcatcaggttgagcctcacccttagggggttacttttgcggagaaggctaaataggaccacgaccaccggcatgcaagatccacgaaaggtctcgaagacgttagcaaatactacactccttagcaaggtagcctag

SEQ ID NO: 31502 - DNA, 1942 bp, Zea mays
  Peptide Sequence Number=SeqID_73281
gtgctactggattgccctctcaggatatctattgtgcttacagctgatctgtgagagatcactgacacaatcgactggaggtccatcaggacccaacactccaaattttgtaagagccgaagtgcttcctagtggctatctaattcgaccctgtgagggaggtggctccatgattcacattgtggatcatgttgatttagatgcttggagtgtgcctgaggtccttagaccactttatgaatccccgaagattcttgcacagaaaacaactattgctgcactgcgtcacattaggcaaattgcgcatgaatctagtggggaaatgccctatggagggggccgacagccagcagttttgagaacatttagccagaggcttagcaggggtttcaatgatgctgtcaatgggtttccagatgacggttggtcactgatgagcagtgacggtgctgaggatgttactattgctatcaactcttctccaaacaaacttattggtcctcatgtcaactcttcccagctgtttactgcgatcggaggtggcatcctgtgtgctaaggcatcaatgctgcttcagaatgtgccacctgccctactagtacgatttctgagggagcatcgctccgaatgggctgatcctggtgttgatgcttattctgccgctgctcttagggctagtccatatgcagttcctggcttgcgtgctagtgggtttatgggcagccaggttattctgccgcttgcacataccttagagcacgaagagttcttggaaggtattaggcttgagggacacagcctctgccatgacgaagttgttctgtcacgagatatgtatcttctgcagttgtgcagtggtgtggatgaaaatgcagctggtgcatgtgcacagcttgtgtttgcacccatcgatgaatcttttgccgacgatgcgccactgctaccctcaggcttccgtgtcattccactggatgcaaagacggatccaccatcaggcacacgcacacttgacctcgcatctaccctcgaggttggatctggtgggacaacgcgtgcttcgagtgacgcctccagcacctgcaacacaagatcagtgctgaccattgctttccagttctcatatgagaatcacctacgagagagcgtcgcagccatggccaggcaatacgtcaggactgtggtggcgtcggtgcagagggtagccatggcaatagctccttcgcgcattggtggacagcttgaaatgaagcaaactccaggatctcctgaggcacacacgctggcaaggtggatcggcaggagctacaggttccacactggagccgaactcctccgcacggacacccaatgcacggatgcttccttgaaagcgctgtggcaacactcggactcgatcatgtgctgttccctgaaggctgctcccgtgttcacctttgccaaccaagccggcctggacatgctggagacgacgctgattgcgctccaggacatctcccttgagaagatccttgatgacgatggcaggaaggcgctctgcaccgagtaccctaagattatgcaacagggcttcgcgtacctccccggtggcgtgtgtgtgtcgagcatggggcggccggtgtcgtacgagcaggcggtggcgtggaagaggccacctgagctggcgatggacaggaaggagaggtggagaagagaaagctacggctcagggcacctgaggatggcgatgggccgcctaaccaccccggacccggtcgccgccgcgtgcgctggcgtcggtcgtgtcgccaaactcgccgcgttttggcagaggattctcgcgtccgcggaccgcggcgctgtcgaagtcgaagggtgtacgtgggcggtggatgatgtcagcgatccggcttggatcggaggaatggatgggaagccttttgtagttggttcgttccaaccatga

SEQ ID NO: 31503 - DNA, 231 bp, Zea mays
  Peptide Sequence Number=SeqID_73282
atggagaagcaggtccccgcgggcaagtcctccggcaaggcaggacgagggtgggtccccgcgggcaagtccgtcggcaaggcgggacgaggcttcagagcagtgtttagtgaagaggaagaggaaaaggtggaatccagctcgtcgaagacgacccactcccactttggatctgttttctgtgacaggctagatccgccgctcccacctgacgccgcgcctctggactag

SEQ ID NO: 31504 - DNA, 258 bp, Zea mays
  Peptide Sequence Number=SeqID_73283
atgaggagagagggtcaaggcttcagatactcgaccatcccaggcaccgtagttagcacccccgagatccacggcgaggctccgccatgctcggcgcgacggttggagatgggtattgactacccgggcccacccggtcttgtagtcttgcaagagtacaccaatcgtggttgtggtgtggttgtagtcgtgtaccaaaaggaacaagacccacaaaagtttggccaaaagtttgatagtgaatacgacatggaataa

SEQ ID NO: 31505 - DNA, 312 bp, Zea mays
  Peptide Sequence Number=SeqID_73284
atgctggtggaggcgttcgcgggcaacgtcacgcagaaggtgccgttcgattccgccgggaaaggcgggttcaagacggcggcgttcaggttcgtggccggcggcgtccgcacccgcctcaccttctacagctcctactaccacaccaaggtcaccgacggcgtctcgctctgcggccccgtgctggaccaggaatggcatatcggtatgaattgtctttataaattaacagatcaatcacaaggttccttcgaagaatctttgcatcgtacagacaaagacataagagaacaaaaacatattatcttgtag

SEQ ID NO: 31506 - DNA, 422 bp, Zea mays
  Peptide Sequence Number=SeqID_73285
atgatccccaacgagctatcacattcggggatggaaatcaaggtttggtcaaaggacttggtgccaaaggttcacactttagccaataaaaagaccaagaatgggttcaatcaaagagagcaagggataaccgaaggctgccctggtctggcgcaccggactgtccgagccgctccgctaaaattcaccggattgtccggtgctccagaggagagcgactctgaactcgccagcttcgggaatccgctccgctataattcaccgggcatgtccggtgcacacctgactgtccggcgggcccagcagtcagagctccaacggtcggaacccaacgacctggtgacgtggctggcgcaccggacactgtccggtgaccgttggcgcgaagtagtcgttgctccgctggctcaccggacagtcag

SEQ ID NO: 31507 - DNA, 2769 bp, Zea mays
  Peptide Sequence Number=SeqID_73286
atggctgtcaagttgcttcactccatggctggacttgatgataaactttttgaggaggagtttcacaacattgcaagactccaacacaagaatattgtgcgtcttgttggcttttgccatgaaactcaacgccaattcataccgcacgatggaaaaatgatttttgctgatagcaaatatatggccctttgcttcgaatatatgcataatggaagccttgacaagttcattattgatgaaaatagtgtccatgactggtccacacgctatgcaataatcaaggggatctgtgagggcttgaaataccttcacgaggaattgaatcctcctatttatcatttggatttaaaaccagctaatattttgttggatgacaatatgatgccaaagcttgcagattttggcttgtcaaagatttttgaacaggaacgaacacgaatcacacaaagttgtgtaggaacacatggatatctaccaccagaatatatagacaggaaagtaatctcaaataagcttgacatattcagtctgggtgtcatcatcataaagattataagtggacctacaggttacacccagtgtgctgaaatgccttccaaacaatttgttgagcttgtacatgaaaaatggaggaataagttacaaacaacaatggatgcagctgcattggagacatattgtgaacaagtagtgagatgcattgaaatggctttaagttgtgtggagaccgatcggcacaaaaggccgagtataggggctattattgatgagctaaataagatggagacaaataccgaccaggtattttcagtggatatatgctcgactccagcacaaacacaaccaccaccccttcctgattctagccacagcacagaagaaacaagcaacacaaagggagttagcagactgggaccgagagagtacgtacagagcacaatgcgggacctggtaattgggataaccaagtcggtggtggagggggtgatcagcaaggcccagtcggtgatggaggaagaaaatatgctacttattagcatgcagcatgacctccacttcatcaccgatgagtttcagatgatctattcattccttagcatcactgatgaggagcgtatcaacaacgcggtagtgaggatctgggtgatgcagacgcgtggtctggcctatgacctggaagactacatggatgccttctcctgcctggacaagaccagaaaatggtggtcccgcttgttccgagcatgcctggcaccaccggggtctccatacatgtcagtgacatctctggccgtggaactcaagcatctaaaggcaagggtcgaggacgttagccacaggaacactcggtataacctcatcagcgacgccggctcaaagcccggcctcgtgaggcaacagccggtgcctcctggtgctgtggcatacgaaaacgacacaagaaggaaacacatcttaggggatctcacccagcttatcaccaacaaggacgatgctgatcttcaattgatttcaatgtggggtgcaggtggaggcaccgggacgacatccatcataaggaagtgctacagtgatccagagatcatccaaaatttcatatgccgagcctgggtcaacctcagccatccattcaacccccatgagtttgtgcggtctttgatggctcacttttatgcaaacagttgccaagaaagacaaggagggatcatcggtgttgatgtcctaactagcatggatgcgactgccacccagggggatctcctcagcgagttcgttcagctagttgacaagaacaggtaccttgttgtcttggaagacctgcccaccatggcagagtgggactctatcaggacgttccttcccgacagaaagaatggcagctggatcatcgtgtcctcgcagaaatatgaaattgcaagtttatgtgtcggacatccctaccaaatattggacctgaagcagtcctcgcccactgagcactccgtatgtgccttcttgagagaggaggtcacattaaaagaaaaaaaaggaggcaatagaaaagaaaaaatttatgtcggagatgaaagcgaggtgaacaacggtagtacatcaaccaacagcaaggtgatatcaactgagtatgacttaagccataaccataggatggtcgccaactctaaatggaaagaagccagagactggatgcagaattcttcccttgtcggacgcagattgcagatgtatcaaattcatcgctgtatagctgaagcacaaaggaaccattcccatgttatgtctgtttggggaatagttggcgttgggaaatcagctattgtcagaaatttttactgcgacaggatacttgagaatcagcaatttcaagaatacggttgggtggatttatcacactcccaacccttcaatttgaaggacttctcacagaacttgcttacgaattttcaatcagattctcttcaagccaatgaaactacaccctctcgtggtatactggggacagtccgaaaatgttgtgagtttctaagtacacgtcattgcctcgtggtcatagatggccttcagtccaaagaggaatgggatttgatacaatcatcattggtatctagatactctaaatctaatactattatcattgtgataacaactgaagcaagcattgcagcatactgcgcagataaggatgaccttgtgtttaatgtcaaaactttagaaactgatgcagcctttgatctcttcgaaaatgagattggaacatatgagggtgaataa

SEQ ID NO: 31508 - DNA, 1311 bp, Zea mays
  Peptide Sequence Number=SeqID_73287
atgaagcttgtgtacatggtgaccctcctaccgttgctcttcatgtccggcgttcttgaggctgcaggagcgggcaatgacagctcggctgacggcacgaacggcaacttgcacagctctggcaccagcagacccgccgccgcgcccaggggaaggtcgctgcaagcatcgcagagcagcgtgtacagcgtcgaccgctacggtgcccgtggcgacgggaggaacgatgacacgcgggcgctggaaatggcgtggaaggcggcgtgcgcctcgccacggccggccgtcgtgctcgtccctgacggcaggcgttacctgctgaagctcctcaccctccgcggcccgtgcaagtccagcgtcacgctcacggtgaagggcactctggttgcatcgccaaaccgggcggattggagcgacaatgacaggaggcactggatcgtgttccggagcatcgacaagctcaccgtcaacggcggtggcgccatcgatggcaacggcgagaaatggtggcctcactcgtgcaagatcaacaaggctctcccttgcaaggaggctccgacggctctgtcattccactactgcgtcgacctgaaagtggaggatctgaaaatcgtgaacagccaacagatacacatgtcagtcgaggattctgcaaatgcgctgctggcgcggttgtccatcacagcgcctggcaccagccctaacactgacggcatccacatcactcgcagcaaagatgtacgcgtcacagactgcaagatcaagacaggggacgactgcatgtcaatcgagaacgggactcacaacctccatgtctccaaagttaactgtggtccagggcatgggatcagcatcggaagcctaggagacgacaactcaagagcagaagtctccggcatcaccatagattcagtgcaactacacggcacaaccaacggagcacgcatcaagacgtaccagggaggcagcggatacgccaaggacatcacgttccaaaatatggttatgtacgacgtcaagaacccgataatcatcgaccagaactactgcgacaaggctaagccatgcggagaacaagagtcagcagtgcaggtcagcggtgtcgtcttcaagaacattagagggacgaccagtaccaaggacgccatcaagatgaactgcagtgagaacgtcccatgccaaggcattaccttgcagaacatcgacctgaaaatgcaggacggcaagggcaacacaagaagcacttgtcagaatgcaaaatggacagaatttgggacagttcgcccgcagccttgcactgccataaagtag

SEQ ID NO: 31509 - DNA, 312 bp, Zea mays
  Peptide Sequence Number=SeqID_73288
atgccattggcagagctaatcacgctgcagtgcaggttgttatttgcaacccgggctcgaacagtcaagctagcgaacaagatcagaacagaatttatagatatactgcagctcttgttgcaagctgctcaggttggtgctggttgctggatgcttggattggatgctgacctggtgatgacacgccatgccccatgcgtgcaggcatcgatggatctggacatgagattcttaataaggcatgatcgcaaggagataaatgtgcccgaactgattatggctgaatcgagtccaccacctgcaggtgcttaa

SEQ ID NO: 31510 - DNA, 1293 bp, Zea mays
  Peptide Sequence Number=SeqID_73289
atggcgcctctcctcccgttgctcttcatgtccggcgttcttgaggctgcaggagcgggcagctcggctgacggcacgaacggcaacttgcacgggtctgtcaccagcagacctgccgccgcgcccaggggaagatcgctgccggaatcgcagagcgtgttcagcctcgaccgctacggtgcccgtggcgacgggaggaacgatgacacgcgggcgctggagatggcgtggaaggcggcgtgcgcctcgccacggccggccgtcgtgctcgtccctgccggcaggcgctacctgctgaagctcctcaccctccgtggcccgtgcaagtccagtgtcacgctcacggtgaagggcaccctggttgcatcgccaaaccgggcggattggagcgacagtgacaggaggcactggatcgtgttccgaagcatcgacgagctcactgtcaacggcggtggcgccatcgatggcaacggcgagaaatggtggcctcactcgtgcaagatcaacaaggctctcccttgcaaggaggctccgacggctctgtcattccactactgcgtcggcctgaaagtggaggatctgaaaattatgaacagccaacagatccacatgtcagtcgaggattctgcaaatgtgctgctggcgcggttgtccatcacagcgcctggcaccagccctaacactgacggcatccacatcactcgcagcaaagatgtacgcgtcacagactgcaagatcaagacaggggacgactgcatgtcaatcgagaacgggactcacaacctccatgtctccaaagttacctgtggtccagggcatgggatcagcatcggaagcctaggagacgacaactcaagagcagaagtctccggcatcaccatagactcagtgcaactacacggcacaaccaacggagcacgcatcaagacgtaccagggaggcagcggatacgccaaggacatcacgttccaaaacatggttatgtacgacgtcaagaacccgataatcatcgaccagaactactgcgacagggctaagccatgcggagaacaagagtcagcggtgcaggtcagcggcgtcgtcttcaagaacattagagggacgaccagtaccaaggacgccatcaagatgaactgcagcgagaacgtcccatgccagggcattaccttgcagaacatcgacctggaaatgcaggacggcaagggcagcacgagaagcacatgtaggaatgcgaaatggagagaatttgggaccgttcacccgcagccttgcactgccacagacacagagtag

SEQ ID NO: 31511 - DNA, 642 bp, Zea mays
  Peptide Sequence Number=SeqID_73290
atggccgcgacgttctggcttgcccaggggaatcacgaggcccatcaggcccagccccgcgcgcgcccgccgcccctgacaggcggaccccgcctgtcggcgccagcccacgcccgcgcgctctcctctccccctccctttgcccactggggccgggttgtcggcgccggtcgcctgctcgctcctgccccccctttctatctctgcctcgcagacccgtttcgtcagcacaccgagtcgttctctctgtgcgcccgctccccctcgctgtgcagtgggactgccctgccagctccgccttccccgcaaaccgtcgtggaccagcgcgcacgcacaccgagatccctggccacgtcgcctgcccacgcaccccagctctcttttgagccccgcccttacccgcactcgctcccctaccccatttcgcgcaagcttaccctctctcgcgctctgctctcgctgctcggcctcgccggagttccgcgcccccgtgctggccatccaacccgccagaagccgcgccaagccgcctcgagctccgtcccgagccccagtggcctcggaaccgccgtagcccacacccgccccagctctggtgacctcaccgtcgtgagcaagagcggcgtcggccgcaaccgttaa

SEQ ID NO: 31512 - DNA, 162 bp, Zea mays
  Peptide Sequence Number=SeqID_73291
atggcggggacagggccaagaatccatgggaaaagaggggagaacgtcggtgaggaggtctcgggcgggtcggagaaactctgggttttcaaatccaaattcaaactaggtttcaaattcaaattaattcaaacatgcgcaacactccaaagaatattttaa

SEQ ID NO: 31513 - DNA, 510 bp, Zea mays
  Peptide Sequence Number=SeqID_73292
atggcgcttcctgttgacgtggctggcctgcgccctaggttgggcgacgtggaggctcctccgaagccgaggtcgagtctgtcttccatggccgaggccgagtctgagcccctgggtcgggtgaggcggaggtcattcggcagaggccagggcgtagtccgagccctggggtcgggcgaagcggagttcgccgtcttccgggacttagcccgagtccgagccctgggtcgggcggagcggatcggagtggcgcaggcggcgctgtccttttgtcaggctggtcagtggagcggcgaagtgacggcggtcacttcggctctgccggggggcgtgtgtcaggataaagggttgcttcttagcgaaggcagggccaagggcgagccagagctttatgctgatgggggttaccagctgagaattaggagtcttgagggcactattaaatggatcgtgcctcgggccggctcgctagacacggcacatttgaccatctatacctccgcacgataa

SEQ ID NO: 31514 - DNA, 432 bp, Zea mays
  Peptide Sequence Number=SeqID_73293
atggacctggcactgaagccgcgcacgcatgtgcctctgtggtgtgggccgagtcactgcctgtggacccctcttgccgtcaatctccttcttccccgtgaagttagcgcgacacgaacaaaccacaccggttctctcgcctgggagctcgccaaggttgtttccgtgctccctggagtccataaatgtagacctggtccaccacttcgccgcgcttcggttacctcccctgatccacatcatcggagcctcgtttaccggtcgtcgtctccacggacatggcggatctcgcctctgctaaccatccggagtaatcgccaactaaccgcggctgttgcgcccgcgcctccgggctataagaccccgagtcctgtcgccgctgccttggctcgaccttgctgcatcctcgacccagaacgcatctcgccgtga

SEQ ID NO: 31515 - DNA, 207 bp, Zea mays
  Peptide Sequence Number=SeqID_73294
atggcagcggcggcgacgatgatggcaagggcgggcgacagcaagggcgatggcgagggtgatggtgacggcaagggcgacagcgacgacagtaagggtggtggccatggcggcaagggcgacggtgatggcagcatggatgacaacgatgatggcaagggcgacgacgtcgatggcaaggccagtggcataatgatgctggtttag

SEQ ID NO: 31516 - DNA, 468 bp, Zea mays
  Peptide Sequence Number=SeqID_73295
atgctggccaggaggcccctacacggctacacggatcaggatacactcctcgccgtcgggggatatgcttggatcagagtagggagggtccaacatctaaagaagaagttctattttcgcttccaagattatgttgatcttatcatatggaagatttgggttagacaaacttataaggttcctagagtccatgtcactaaccctgggttagcccttctatttgaagcaagtacaaaaatatcattttctcataaaacatttttttcaagaggtccttacagcatggtagttgatgaggcacagtttttggaccgccatcacctatttgtcaagttcggtagtgtggatggaggggtttctcggagtactaaccaaaacctagcattctttgccgtgtacaacatggagacaacagatatcgtttcacttcatcagaattcttcggaggatatctatgcgtggtactga

SEQ ID NO: 31517 - DNA, 414 bp, Zea mays
  Peptide Sequence Number=SeqID_73296
atgggcgcaccggacaatccggtgcgccagccacgtcacccaaccgttagggttctggagcagttgactgttggaggcttgtcttcaagtggcatcggacagtccggtgccgcaccggacaggcgggggcagcatgttggggaggaagatagggcgaagaccggcaagacaaacgggacgtccgacaacggcgaaaacgatgggctggagtcggacgaattcggggaggatgcaccttctcccacgccctctgccaagaattgggtggtgcagaggcagaggcatgaggggagagagaaaagaagcaggatggcgaacgaggtggcggcaactgaggcgaggaccatcattatcatgcggagggcatgggttcaaaccccacctcttgctccgctttttaacattttacgctga

SEQ ID NO: 31518 - DNA, 819 bp, Zea mays
  Peptide Sequence Number=SeqID_73297
atgaccgcgtcaaaaaagggatcaaaaaaggggatactccgaaagggatccttctccgcgaaggaagcgggctccgcacccactactgatcagaggttcaaaggctggcccctcggaagggttcaaacagctgcctcagagcgatcgggctccacgcccactactggtcagaggttcaaaggccggcccctcgaaagggttcaacggccgcctcaggccactcgggctccgcgcccactactgatcagaggttcgaaggctggccccgaagggttcgatagctgcctcagacgcagagcgagggatgaccctgggtacgttcgatacataaccgaggctcgagctgcgctcccgagactcggggtcggccccggaagacgacgaactccgcctcgcccgacccagggctcggactcgggctcggcctcggaagatgacgaactccgcctcgcccgacccagggctcagactcgggctcggccccggaagacgatgaactcttcctcgcccgacccagggctcggactcgggctcggtcccggaagacgacaaactccgcctcgcccgacccagggctcggactcgggctcgaccccggaagacgacgaactccgcctcgcccgacccagggctcggactcgggatcggccccggaagacgacgaactctgcctcgcccgacctagggctcggacacgaccttgacgttggaagaccgactcgaccccgacctcggaggagcctccgcctcgcccgacccagggctcggaccgaccacgtctcagggaaggccatcattaccctatccctagctagctga

SEQ ID NO: 31519 - DNA, 774 bp, Zea mays
  Peptide Sequence Number=SeqID_73298
atggagggattcggtcgcggtgagacaaggcgttcggacgacgatgcgcggatggtccagtcggtgcactgcgcggtcgcgtcgacgacggatggcgtaattccggcgatgtgttcagacggtggggtgcgaactccggtgaggctccacggatggcgaacggtgtacggcacgcaagcactggctcgtcagcgggtgcgcgtgagcagagcgatggcgtgggcgtggtcgatggggtgctgtgtgggcgagctccggcgcagtggcgtcgacaccggcgagggagagagaaccgagaggagggagcgagcttggggtaggaagagaggaagggagttcggccacttttatagagcgagagggaagagaaacggtgtaagtgtcttcaatcggccatcaatggcgttcatcaaaagtgggattaatggggagaaaacagatgacttgaactccattaacgcacggacggcggacggcgcgggatcgcgcggctacgcggctgcgcagtcgagcgggcctggcgtcaagcgcgcggtcggttcttcggtcgcctggtgctggggcagggcgaggtggagcgtgcgcggggccttggcacgcggctcttgggtcgctgcaggcgcgggtgtcgcgggcgcggctgggatcacgggtgcagctgggcacggtgcgtcgactgggaagggaggcagggggcgcgcggcacggggctggctcgacgactgctgctgtcgggtgcgcggcgtgcccatggcgcgaggcgggtgctcctag

SEQ ID NO: 31520 - DNA, 672 bp, Zea mays
  Peptide Sequence Number=SeqID_73299
atggcgaacggtgtacggcacgcaagcactggctcgacagcgggtgcgcgtgagcagagcgacggcgtgggcgtggtcgatggggtgctgtgtgggcgagctcctgccggtggcgtcgacaccggcaagggagagaaaacggagaggagggagcgagcttggggtaggaagagaggaagggagtttggccacttttgtagagcgagagggaagagaaacggcgtcagtgtcttcaatcggccatcaatggcgttcatcaatagagggattaatggggagaaaatggatgaattgaactccatgaacgcatggatggcggacggcgtgggatcgcgcggctacgcggctgcgcagtcgagcgggcctggcgtcgagcgtgtggcgcaggtgtcgcgggcgcggccgggatcgcgggtgcagctgggcgcggtgcgtcggctaggaagggaggcagggggcgcgcggcacggggctggctcgacggctgctgctgtcgggtgcgcggcgtgcccatggcgcaaggcgggtgctcctggcgcgctgagggagagagtggaagaggagagagaaggtgcgggtggagagagaagagagagaaaagaagtaagtggagagtggagtcctggcggcggcggctgtggagggcaacagggcgcggcggctaggagttag

SEQ ID NO: 31521 - DNA, 417 bp, Zea mays
  Peptide Sequence Number=SeqID_73300
atggtgaagaaaatagagacattgaaagagatggaaattcagatagtatctaatatacttggagggggtgtggacaatgttcaaatccctatatcgatacgttccttggaacaggtggacgcagatatgaatgagagtggtggccatacacaaaatgtagatactagaaagaaactggattttgctgtcgatgggataagcttggcaagaccaaataatgcaaaaccaaagggaagaacaatcaaggggagtgaacaaaaggagaatagagttcgattggctagccttgctagacgtaagagaggacgaccgcctggatctaggaacaaggttggaagtaacgctcctcattggaatgagacaacaacttcaaaaaacacgcagttgatatcgacaacatatatgagaactgtataa

SEQ ID NO: 31522 - DNA, 159 bp, Zea mays
  Peptide Sequence Number=SeqID_73301
atgtcttcaccttctcgaccaccttgggaggggacagagctctgcgccgccgtgtctaagtcatcaggattgaggcatttaggggccctagcactagatttggctgaactacagtcgtgggtcaccgcgattccgggcagcggcgcagcgttgggctag

SEQ ID NO: 31523 - DNA, 537 bp, Zea mays
  Peptide Sequence Number=SeqID_73302
atggcgaaaaactcgcccggattctcatcctttctatcgtgtgcttgggggaggtggacttcgcctatggggggggggcataaaacccgccgcgacttcttgcatcgcctctatgattccctagtcaagccatcatcctccccgtcgcaaattgtgaggaagagacgccgccgccatggaaattgtgttccgtcttcgcttgaggcgcaagctcgggtcagtgggcttcgtcggggtacggtggtgatcattgtggcactcgcaggtggaagaagcctttcgtgctgccccaatttctcaccggcaccaataattgccacggaaccacacttcgtcgcgcctggggactgcatgacacaaccacccataagattgctcatcatcgcgttcggggtagctcgccaaatagctgatccgtcgtttgccgacacgctcataacagtggattggccgggcagcgccgccgcatctggttgcggcttggggaagagggggttcggccgttggatgatgaaagaacggcatggattagaatag

SEQ ID NO: 31524 - DNA, 1599 bp, Zea mays
  Peptide Sequence Number=SeqID_73303
atggggcccatcaaggacttaaaaggcgtacagagggtcatgggatgtctcgcggccctgagccgcttcatctcacgccacggcgaaagaggtctgcctctataccacctcttgaggaaggccgagtgtttcgcttggacccaagaggccgaggaagctctcgggaacctgaaggcgctcctcacaaaggcgcctatcttggtgcccccagctgatggagaagccctcttggtctacgtcgccgcgaccactcaggtggttagcgccgcgattgtggtcgagaggcaagaagaggggcatgcttgcccgttcagaggccagtttacttcgtcagcgaggcgaaagttgcgacattacttcgagtctcatccggtaactgtggtgtcatccttccccctgggggagatcatccagtgccgagaggcctcgggcaggatcgcaaagtgggcggtggaaatcatgggcgagacaatctcgttcgcccctcggaaggccatcaagtcccaggtattggcggacttcgtagccgaatgggtcgacacccagctgccgacggctccgatcgaaccggagctctggaccatgtttttcaacgggtcgctgatgaagacgggagccggcgcgggcctgctcttcatctcgcccctcgggaaacacctacgctacgtgctacgcctccatttcccggcgtctaacaatgtggctgagtacgaggctctggtcaacaggttgcggatcgccatcgagctaggggtcagacgcctcgacgcccgcggtgactcgcagctcgtcatcgaccaagtcatgaagaactcccactgccgcgacccgaagatggaggcctactgcgatgaggttcggcgcctggaagacaagttctacgggctcgagcttaaccacatcgctcggcgctacaacgagactgcggacgagctggcaaaaatagcctcggggcgaacgacggttcccccggacgtcttctcccaggatctgcatcaaccctccgtcaagatcgacgacacgcccgagcccgaggcaccctcggtccagcccgaggtaccctcggctcagcccgaggcaccctcagttcggcccgaggcgccctcggttcagcccgaggtaccctcggcccccgagggcgagacactgcacgtcgaggaggagcagagcggggccacgcctgatcgaaattggcagacaccgtacctgcaatatctccgccaaggagagctacccctcgaccaagccgaggctcggcggaaggcgcccgggggctacacgcacctgctggtcgccatcgacaaattctccaagtggatcgaggtccgatctctgaacagcatcaggtccgagcaggcggtggcgttcttcaccaacatcatccatcgcttcggggtcccaaactccatcattaccgacaacggcacccagttcaccggcagaaaattcttggatttttgcgaggatcaccacatccgggtggactgggccgccgtggctcatcccatgtcgaatgggcaagtagagtgtgccaacggcatgattctacaagggctcaagcctcggatttacaacgacctcaacaagttcggcaagtga

SEQ ID NO: 31525 - DNA, 4071 bp, Zea mays
  Peptide Sequence Number=SeqID_73304
atggccaccaccagcgacgccgccccagtcgcgcctgtggaggaagagagcacctccccggcagccgcagaggaggagccgcccaagaaagtcgaggcgtccatggccaccaccgacgtcgctccagtcgcgcccgcccccgtggaggacgagaacctggcctcggcggcggccgaggagagtccgagcaagaaagtcgaggcggcggcggcccaggaggaggtggaggaagtggtggaggcgccaaagaaggtcgtggcgggtgggggagaggaggaggaggtgagattggaggggatagatgagggctttgggggtccggaggccgagaacggccaggcgaagggtgtcggaggaggatatgatagcggggatgtaaaagaggcggatgcggaggataaaggtgggaatttgggtccgacagaggccgaggccgagaccgatgacggcggcgaggaaccggcgtcgggggacggggaaacacccgcttctttggcagcgcccatgccagtggtggaatccaagtcggagaacgccgaattgggggatggagatccttctctggttttccttgatgcgctggaaggtgatgagatgggcgaattacgggaggagcaggacgaggacacaggtgcttcagtggaggtaaaggttgtggataaggtggcagatgatgccgagccaccggtgactgaggaggagaaactggagccagaagttgagaagggcgaggaggtaggtcctcggagtggagatggtggtgagttgagcaatgagaaggaggttgaggtcttttctcttagagaggaggcggtggaaccacaggatatggtagcccatgtttctgaagctaatggtgaattgggtgatgagaaggaagcaagtgatgatgtggtggttcttggagttgaagaagccccagaagaaccatctaacaaggatactgatggtgatgaagtcctggttctcggaggtaaagaagcaccagaagaatcaactaagaaggatgatgatgttgaagacgaagccaccaagcctgagccaatgagtgaggcaagtccagtggtaagtcagcatcctcaatctgatttagttgctagtagtcttgatgtcggtggggacgtaaacaatgcaaatgttacactgacccaggttctgaatgacggaagcatagaggagcttgctcctgcaagtgctgacagtgtgcttgaggatagccttgagaaggagcagaatgctgaaaacctggccactgccagtgaagcggtggaagatgttggtgccgaggttgagaatgttgctgctcctagtgtcgatggtatcttgtctcgggagttggctccagaatcaatcaatgaaaataatggcgctgatgagattgaaggtgccactgaggttgttgatcgtgaagaggaggttgcttataatgacataattgaggctgtgccagatgacgaggatgggattgataatgaggctgatgatgataatgacggggcaaactctaacacgagtcctgcacgggttgcaatcttagagagctctgaagccgcgaagcagatcatgaaggagcttacagaaggctcctctagtggtaatgtctcaagagacttcaccaatagcatggatgggcagattatgcttgatgattctgaggatgatgatgatggggatgagaaggaatttgattctgctgccttggcggcccttctgaaagcggcaactggtggatcctcagatgggaatgtcacagttgcttcacaagatggttctagaatattcaccatggatcgacctgctggtcttggttcatcagccccttctctcaggccgactgcacctcgccaacctgccaggtcaaacctattcagcccctcagagctagcagttactgctgaccctacagaagagatgacagaggaagagaagaagctacacgacaaggttgagttgattagagtaaagtttctgcgtctggtttacaggctgggagctactcctgaagaaacggttgcagcacaagtgctgtatcgtctgagccttgctgagggtatccgacatggtaggcagacaaatcgagcattcagccttgataatgcacggagaaaggccttacttcttgaagcagagggaaaggaggatctgaacttctcatgcaacatacttgttctaggaaagactggagttggcaaaagtgcaactatcaattctgtatttggtgaagagaagtccaaaactgatgcttttagctcagcaaccactaatgtgcgggaaatcattggggatgttgatggtgtcaagattagaatcattgatacacctggccttcgtcccaacgttatggaccaaggatcaaacagaaagattcttgctgctgtcaagaaatataccaagaaatgtccgccagatattgttctatatgtggatcgtctggatagtctgagccgtgatctcaatgatttgcctcttctgaagacaattacctctgttcttggctcatccatatggttcaatgccattgttgccctcacacatgctgcgtctgctcctcctgaaggcctcaatggtgctcccatgacatatgaggtcttgatggctcagagatcccacatcatccagcagtccatcaggcaggctgctggagatatgcgcttgatgaacccagtagcccttgttgagaaccatccttcgtgcaggaaaaaccgtgagggccagaaagtgcttccgaatggccaaagctggaggcatcagatgctgcttttgtgctactcctcaaagatattatcagaagccaactcacttctgaagcttcaggatcctaatcctggaaagctttttggcttccgtttccgctcaccacctcttcctttcttgttgtcctcactcttgcagtctagagcccacccgaaactttctgctgagcagggtggcaatgagggcgattctgatattgaattggatgactactctgatgtagaacaagatgatgaagaagaagaatatgatcagcttccacccttcaagcccttgaccaaagctcagcttgcaaggctcacaaaggagcagaagaatgcttattttgatgagtatgactacagggttaagcttctccagaagaaacaatggaaggatgagatccgcaggttaaaggagatgaagaagagggggaaaactgatctggatgattatgggtatgctaatatcactggtgaggacgatcaggatcctcctccagagaatgtgtcagttcccttacctgacatggtactgcctccttcatttgattgtgacaatcccacataccggtaccgctttctagagccaacttcgactgtcctagcaagacctgttttagatgcgcatggatgggatcatgactgtggttatgatggagtgagcgttgaagagacactagctatccttagcaggttcccagcaaatgtagcagttcaggtcaccaaggacaagaaggaatttagcatccatttggactcttccatcgcagcaaagcatggagagaacacatcatctcttgctggttttgatatccagactgttgggcggcagcttgcatatattctccgtggggagacaaaaatcaagaatatcaagaagaacaaaaccacaggagggttctcagtaactttcctgggcgacattgtggcaactggactgaagattgaggaccagctctcccttgggaagaggttgtcactagttgctagcactggcgcgatgcgagcccaaggggacactgcatatggagctaacctggaggcacgcttgaaggacaaagactatccgatagcccagtccctctcaaccttgggtctctctctgatgaagtggcgtcgggaccttgctctgggcgcaaacttgcagtcccagttttccatcggaagggggtcgaagatggcagttcgacttggtctgaacaacaagctgagtgggcagatcaccgtcaggacaagcacctcagagcaggtccagattgcacttctgggtctcgtaccggttgcagcctccatttaccggagtttccggcccagtgaaccatcctttgcttattag

SEQ ID NO: 31526 - DNA, 291 bp, Zea mays
  Peptide Sequence Number=SeqID_73305
atggatgaggatccgggcgagtttttcgccatttctgttgaaaccaacgccgaggagacggcgcggatgtcgcaacagaccgagtcgaagaccaccctgaccgtgggccccacacggcagagattcccccgggataatcgacttcaggtgcgcggaactggagctcagccacagactcaatcaacccgcacgatcccgagcagcccgcgtggagtgaagaagaccgatccgacaggatggccccacgatgcagtgacacagcgaaaaggaggccggaggattaagtactag

SEQ ID NO: 31527 - DNA, 99 bp, Zea mays
  Peptide Sequence Number=SeqID_73306
atggaaattgttttccgtcttcgcttaaggcgcaagctcgggtcagtgggcttccttgggattagatctcgcacaccggttcgggtggttggatcctga

SEQ ID NO: 31528 - DNA, 2016 bp, Zea mays
  Peptide Sequence Number=SeqID_73307
atgcctagcataccgagggatgtctccgagcattcgctggatatccgagctggagcccgacccgtgaagcagcctctgcgccgattcgacgaagaaaagcgcagagccataggcgaggagatccacaagctgatggctgcagggttcatcaaagaggtattacatcccgaatggcttgccaaccctgtgcttgtgagaaagaaaggagggaaatggtggatgtgtgtagactacactggtctaaacaaagcatgtccgaaagttccctaccctctgcctcgcatcgatcaaatcgtggattccactgctgggtgcgaaaccctgtctttccttgatgcctactcagagtatcaccaaatcaggatgaaagagtccgaccagctcgcgacttctttcatcacaccctttggcatgtactgctatgttactatgccattcggtttgaggaatgcgggtgcgacataccaaaggtgcatgaaccacgtgttcggagaacacattggccgaacggtcgaggctttcgtcgatgacatcgtagtcaagacgaggaaagcctccgacctcctttccgaccttgaaacgacattcaagtgtctcaaggcgaaaggcgtaaaactcaatcctgagaagtgtgtcttcggagtccctcgaggcatgctcctggggttcatcgtctccgagcggggcatcgaggccaacccagagaaaatcgcggccatcaccaacatgggccccatcaaggacttgaaaggagtacagagggtcatgggatgccttgcggctttgagccgtttcatctcgcgcctcggcaaaagaggcctacctctgtaccgcctcttgaggaagaccgagcgcttcacttggacccccgatgccgaggaagccctaggaaacctaaaagcgctccttacaagcgcgcccatcttggtaccccccgctgccggagaagccctcttgatctacgtcgccgctaccactcaggtggtcagcgccgcgatcgtggtcgagagacgagaagaggggcatgcattgcccatccagaggccggtctacttcatcagtgaagtactgtccgagaccaaaatccgctacccacaaatccagaagctactgtacgcggtgattctgacgcggcgaaagttgcgacactacttcgggtctcacctggtgactgtggtgtcatccttccccctgggagagatcatccagtgccgagaggcctcgggtaggattgcaaagtgggcggtggagatcatgggcgagacaatctcgttcgcccctcggaaggccatcaagtcccaagtcttggcagactttgtggctgaatgggtcgacacccagcttccagcagctccgatccaaccgaaactctggaccatgtttttcgacgggtcgttgatgaaaacaggagcgggtgcgggcctgctcttcatctcgcccctcgggaagcacctccgctacgtgttgcgcctccatttcccggcgtccaacaacgtggccgagtacgaggctctggttaacgggttgcgcatcgccatcgagctaggggtccgatgcctcgacgctcgtggcgactcgcagcttatcatcaaccaagtcatgaagaactcccactgccgcgacccgaagatggaagcctactgcgtgaggtttggcgcctggaggacaagttctacgggctcgagctcaaccacatcatctgacgatacaacgagactacggacgagctggctaagataccctcggggcggacaacggtccctccggacgtcttctcccgagacctacatcaaccctcagtcaagaccgacgacacgcccgagcctgagaaggtctcggccctgcccgaggtgccctcggctcagcccgaggcaccctcggctcccgagggtgaggcactgcgcgtcgagggagagcggaatggggtcacgcctaatcgaaactggcagaccccgtacctgcaatatctccaccaaggagagctacccctcgacagagccgaagctcggcgactag

SEQ ID NO: 31529 - DNA, 252 bp, Zea mays
  Peptide Sequence Number=SeqID_73308
atggcgcaatgctcagctctaaccatcctctttgatcaccatctaatccaatatgatcaaatcaaaaatggcaactcgaataaaggccaaagaataccaaccatgtcaaaggaggataagcatcaactcaagtcttcaaagatcaagttggatcgccagaagaatcaagatctagagttcaggatgaagtctttccttaatatacccttgccacaacctctacttgccataaccgtacctcatctgacctaa

SEQ ID NO: 31530 - DNA, 276 bp, Zea mays
  Peptide Sequence Number=SeqID_73309
atggcggagctcctggactatcgagcaccagccatccaactgcggcctcctccacacgtcgacttcactgggaacgaccagaatagcatgatgccctcacggttgatccccgaacttcgagcgccgatgcaggcaggcatctatggcggcggacaaccttcttctttctcccttgctcactgcgccgttgatgtggctgactggatgcgggggagtcgtggccagtatttataccagaggataggggcaaggtccgagcagaaaaggaggcggtga

SEQ ID NO: 31531 - DNA, 486 bp, Zea mays
  Peptide Sequence Number=SeqID_73310
atggaagcaagcgagatacttcaccacgaaccgagagctggagaacccctgttccggctcgacgctgcgactgccctgcgttcttccgcgccgccaccttgggtgcttggtcgccggtaccgtgtgggcgaacaagccgccgtggaggagagagatgcaagaagagagaaaatagagcagggcttcggctacgcgattgctgacgactcccaggggatcgccgcggaggtatggacttacatccgggccgtcgagcgtgccgggctcgagggctcagatgagtcggagtactcctcggacgaggagaattcctccgacccgtccgaggagggcagaggcggcgacggcggtgacggcgacgacgacagagtcgacggtgatggcggctgtgacagcggcaagggcggtgacagcagtggcaagggtggcagcggcgacggcggcagcaagggcagcagcaagggcagcaataaggccagtggctag

SEQ ID NO: 31532 - DNA, 201 bp, Zea mays
  Peptide Sequence Number=SeqID_73311
atgcagtacaaggggtcaagcagtctcattagctgcgagaagcagacgattcgaatcaagtttttaaaccttacaaggttcatgcttcggaggtcagcattttgtattgttggacttcgaacttcattgggtgcaccgaaggtgcacccaatgggtgtagcccccgagcttcgagtggatttttgcaaacaatccacttga

SEQ ID NO: 31533 - DNA, 474 bp, Zea mays
  Peptide Sequence Number=SeqID_73312
atggggaatcccatcccgacgcataaaactctatcccatagtcgtgtggcgttgaagcgcaaggtgtacagcgagcaattcctgctgcaccaagggtctgcggcacgattactcccgatctacacctccgccggttcgccggagatcaccccgtggcactcgagctgtacgggcagcaaggaatcacgacaacgtgtggaggattgcagagcaaaattgtgcggccccatggagaaggtggcacgccgacggaggagcctccgcgccacacgggtgagactgacaccactggcccacgcaccagcggtaaggggcatgcggtccacatgccagggatttgtggcgcgggcgagcgatgcggacaagcggtcactgacaaggcgggacccaatcctcatactcacatctggtgcgcgcgagggcgagtggacaacaccgcagtcccaccagtcggcgcagggcttcggtggctag

SEQ ID NO: 31534 - DNA, 174 bp, Zea mays
  Peptide Sequence Number=SeqID_73313
atggctgctggaggcgcctactccaagggagctcggccatgcgtccaagcagggaggggcgtcgagggcgagcaacagcaggggagggagctcgtccacgccatggaggagaggagctcggctccaagggaagaagacacgcgcgagggagaagaagctgctggtggcggctaa

SEQ ID NO: 31535 - DNA, 246 bp, Zea mays
  Peptide Sequence Number=SeqID_73314
atggagagaaggggaggagctgctgctgcaatttctgggcgctgtgcagaggagggcgcaaggggcggcgtccatgctggaatggagctcggccatgggagggaagatggcagggagggcgctggagaactaggaaggggcgagcaacagcaggggagggagctcgtccacgccatggaggagaggagctcggctccaagggaagaagacacgcgcgagggagaagaagctgctggtggcggctga

SEQ ID NO: 31536 - DNA, 135 bp, Zea mays
  Peptide Sequence Number=SeqID_73315
atggcgatactggagagcgatgacgagaactacaacccgatgtacaagaagatggtgcccaaggaggttcttggaaagttcctaagccacgagatgatggtcaagcactccaaatacaccgatgacttagcgtaa

SEQ ID NO: 31537 - DNA, 585 bp, Zea mays
  Peptide Sequence Number=SeqID_73316
atgtggaggttaaagatcggagagggaagagggccgtggatgcagacggtgagcgacttccatggccggcaggtttgggagtacgacccggacgccggcaccgaggaggagcgcagcaaggtggagcagcttcgccgggagttcacagagaaccgcttccgaaggagggaatcgcaggacctcctcatgcgtatgcagtgtgatatgatgtatgacgcacatgtatgtaagcagttaactggacaaaaacatctgcatgcggacgatatgggagcggccaccaagatagaggatggcgacgaggtgacggaggagaggttgcgggagtcgctgaggcgagcgctggggtggatgtctgctctccaagctgaagatggccactggcctgattttcgccctgcacatcacaagggatcccatcggatgttgtcctatcgaaaagaagcaatagacgtggagattctgccgccatatctacaaccatccaggttattggtgtatatgattggcgtggcaataatccagttgtacctgaactgtggttggtaccacgtttcctcccaattcacccaggcagttccttaa

SEQ ID NO: 31538 - DNA, 759 bp, Zea mays
  Peptide Sequence Number=SeqID_73317
atggccgaggagagctgccacccgcgcgccctctcgtggttcgtgcggtcctgcatccccgccgaccccgcccaccacaccgctgtcctggtccccttcacggcccccgacgtcgaggatcccgaacccgaaccccccatcgcgggactccccgacgagctcctgctggatatccttcgtccatgccgcgaactgctcctccacctccacgcctccgcctccgcgtcctcgctcgaggtcgccgtgctacccctgcccacgcgctgtggcggcgccgcgtttgcgcacgcgcgcgctgtggcggtggggcggcacgtgtacctagtcgaccgcggcgccacgttgcgggtggacccgctgacaggcgcagcgcgggcgggcgctgacgctgttcccgcggagcaagttcctggcggccgtcgtgtgcgcgcggatctacatggcgggcagctcggcgcgcaccgcctcggtcgaggagtacgacccggcgaccgaatcatggcgcgtcgtcgtggaggccccgcgccggaggcgactccgccaccgctgcagccccttctcctcgtcgtccccctccgaccaccagccccgcccgagtctgccttctcctcccacaccagcaacgcttccatggcctccctgttcccggtctgctccttctgtcactgctacaaccgtgtgtccctcctcgacctcgcatcccgcaaccgctctatgcacatggccgacgacacctgggtgctcggcctcaccgcatga

SEQ ID NO: 31539 - DNA, 906 bp, Zea mays
  Peptide Sequence Number=SeqID_73318
atggacttcggtctccaggttctcctcctattcgttggtcttctgggcgtcttctcatctgggtctgtccttgcgctgtccatccgagagaaagaacccttgagtgcccgagccaaagaaccttcatgtgtccgggggatgacctcctccttttataggctaaggagggggtcggcctgtggtgccttccttgggaaggagctaccaggcgatggccagttaatgaggcgggtcatttatgatgaatcagtcttgggccaggagtgggatccactcgagtggtttcccttcagcacgcctgccccctgtccgtttccaccatgcccgaccctgggctcagtgccacaggccattcgatcactggtcaccctaggcctatctttctcttcggctttttccataagtgcaccttcagccgggtcggtcaatggatatcgggtcgctggaacgtcgtgctccgtgggacatgagtcaagggtggtcgctgccgatcaggaggtcacatcatcacctgtaggatcgctaaggctaggctccttatctccttcctctctcccaaaggtgtctccagggagttgtgatgtctctcacatggcacaagaggccgtcgaggccgaggccgagctgctttgcacgcagcttgctgaagctgacggtggtgtctttcagtctggacaatgcctcataccgtatccggacaataccgtctttggcgtccataggggagccacgggggcactgctcatgggggagatctacttcggctaccaccttcgtgacatcgttggttctccttcatcccttttggacgaagggttggaggacatgctggaaggttatgacaaggtggccagtcatgtcgtgttttgggtgtcagctcatgacatcgtgcgtgatgcgcgttga

SEQ ID NO: 31540 - DNA, 156 bp, Zea mays
  Peptide Sequence Number=SeqID_73319
atgaatatcaatattgaggacctggtagaattgatactgtggtctctggagaagattatggagcataaggccaaggtgctacaaaaacaatctagcggcaaaggaaacaaggtcgaattcaataatgcaaggaacatggaaaatgcatttgcatag

SEQ ID NO: 31541 - DNA, 210 bp, Zea mays
  Peptide Sequence Number=SeqID_73320
atggctaacattgccgccgaactcatagaatcctcactaggggcttgtgggctgccacgagccctacgaggtggcataactgtagccacaggagaacatgttggtagcaccaactgctctgtatacttcaactaccccaactatcgtattttgttccctgtttgggctcttggagagtatcatcgcaaagtatgtaccaaaagtaattga

SEQ ID NO: 31542 - DNA, 270 bp, Zea mays
  Peptide Sequence Number=SeqID_73321
atgtcatacccatggtatttgcccctgacaataacccctaaacctctagaggagcttgacgcttcatcgaagagatgtacggggctaggccatgccccacaattcctcattggacaaagtggagagcctagtgagttgataacaggattcatgggtacttgtaggagaagaggggaggtcaacggtactaaggtgggatcgagcgatccttggttctacgcatctccgtcctactacatgaggagctcctcagcggtagatgatagctaa

SEQ ID NO: 31543 - DNA, 318 bp, Zea mays
  Peptide Sequence Number=SeqID_73322
atggactgggcctcgattaccagaaagatcagggctctcggtgtaagtttcctaaggcacagagaacagcagccatggacggcgggtgccaaaggttcaaaaaagccaatgaaaaagaccaagaaaagggttcaacaaagagagcaggggataaccgaaggcaccctggtctggcgcaccggcctgtccggtgtgccaccggacagtgtccggtgcaccaggggacttgaagctaaactcatcaccttcgggaaaaatcaaaggcgctccactataattcaccggactgtccggtgctccaaggagaagcgactctga

SEQ ID NO: 31544 - DNA, 594 bp, Zea mays
  Peptide Sequence Number=SeqID_73323
atggagccatttcatctaaatgagcaccagaaccgaacactgctcagagttccaagacaagctcagcagctccagacctcaccagaggcacctaccacaccgcccgccgccgatcccgtcacccgtctcctccccgctgcggagcgtctccagccctgcccggtgcccgcccagatggcaaacgcggcgtcagggatggccgtggacgacgactgcaagcgccggttcctggagctcaaggccaagaggacgcaccgcttcatcatctacaggatcgacgagaagaagaagatggtggtggtggagcaggtgggcaagcccgtgctcggctacgacgacttcgccgccagcctccccgccaacgagtgcaggtacgccatcttcgactacgacttcgtcaccgaggagaactgccagaagagcaagatcttcttcatcgcctggtctcctgacacggcgcgcgtgaggagcaagatgatctacgccagctccaaggagaggttcaagcgggagctggacggcattcaggtggatctccaggccaccgactccgccgaggttggccttgacgtcatccagggccgtgcaagctga

SEQ ID NO: 31545 - DNA, 390 bp, Zea mays
  Peptide Sequence Number=SeqID_73324
atggacgcgtcgtcttctgccatgctcttctactcagtctctagctctccgatcgtgctccctccctcgtgtgtctccatgtccatctggaacccgtcaaccgaagcagtgacatactactcgattaatgctccaaccaggttcggctgccgcccgcctcatcgacgcgggcatggccctccacctcccatcctcaagcacgccgacgttctaggcgttcttacctgcctccttcacgatccactcttgttgcagcgacaacagtctgtggtggcgttctgctgcaacggcttagctcgtcactgccccggtcacggtatcatgtggtttcgggtgcgccgggtcactggatatcgggcgagtgggggcaccggctatggcgccgcctaa

SEQ ID NO: 31546 - DNA, 924 bp, Zea mays
  Peptide Sequence Number=SeqID_73325
atggattcctcagccgcagatgaccctatggcagatgaagccggagtagaagatgccttcacacaggagatcaccgattattcgtacgtccctagataccatgtgttgagttggatggaaactgtggaggggatggtggccggtgtggcggcgcttccgccggtgtatttgatactgaacagagagatatatgatacatgctcctgcttgctcatgatgccgaagcctgatccatttggatggattattgctgaaaagagtgccctgattgctgcagccaaattgttgccaattaacttgcaccattgcaaaaacaatcaaaatgctttccagtgcctcaagatggagaaggcacttctcaggtactgtgctagctttctcactcctgacgacaaaaggatgatcctcgggatcaaggaccaggcaaagcaaatgatccaatcagaggtgcttcaagcaatggttcaaatgggtgtccttgttcctactggagatatgactgttgtcagaagaaccgctcaatttttccttaatagctttcaagagtgcctaatagcacaaaggaaggagagagaaatggcaaccgcagaactgggtttcaaaaagcaattaactaaggaggagaagtttgaaaagaggaagcagagacttgctgcaatcggagaggatcttttggcgattgctgctgatcaaccatttcgcttccctgccacatttacatttgtggtcagagcattctcagttctagatggtactgggaaaggccttcatcctaggtttcatattacagagattgctaagccaaatgccaaggaattgctaagatttaatgacgctggtgttgaaatagttgtgaaggcaagtttcaacatttggtcaaagctgttaacctatctctatgatagcacatctcctaagggttag

SEQ ID NO: 31547 - DNA, 453 bp, Zea mays
  Peptide Sequence Number=SeqID_73326
atggacggcggcggatcttccgcacatgctcccggctacggccgcaccttctacgccacccgcgacgctgaggatatcaaatcggaggggaaaggcagcgacaatggatttgcttacgtgcgcccgggagactacacgagtgagagagagagagaccatggctcccactttatcgcccagctcgagggagactccgagcgttgggatggactacggaaggtgaggatacgggtgaatcctacccgggtttttcgtcaacgaccccgctggaatcccgcgctaggaacggaggtgggtgacggctgcttccattcaagaccgagcggaatctgcggcggaaagaggaataggagcgtgggtctgttgcgggcaagacgacgctggtggtgtgggtcccacgcgtcggtgaaggacaccgacacggcgcgcacaggggaggttatcttccactaa

SEQ ID NO: 31548 - DNA, 453 bp, Zea mays
  Peptide Sequence Number=SeqID_73327
atggacggcggcggatcttccgcacatgctcccggctacggccgcaccttctacgccacccgcggcgctgaggatatcaaatcggaggggaaaggcagcggcaatggatttgcttacgtgcgcccgggagactacgcgagtgagagagagagagaccatggctcccactttatcgcccagctcgagggagactccgagcgttgggatggactacggaaggtgaggatacgggtgaatcctacccgggtttttcgtcaacgaccccgctggaatcccgcgctaggaacggaggtgggtgacggctgcttccgttcaagaccgagcggaatctgcggcggaaagaggaataggagcgtgggtctgttgcgggcaagacgacgctggtggtgtgggtcccacgcgtcggtgaaggacaccgacacggcgcgcacaggggaggttatcttccactaa

SEQ ID NO: 31549 - DNA, 456 bp, Zea mays
  Peptide Sequence Number=SeqID_73328
atggagcatcatatggttcatgatgtaaacatggttttagatctgtctatactcacactcaagaaccagccaaaatgtgatattccacaacctgagagaaatcaaaatgaaatcatgtacaacatagagaggagggcgcagcttgattcaatccatgtcaagtcagaggctgctgcgagtttggtgtctatctcagtgtacctacactcagttggaaaacttcaaccacactgcaacaaggtttataaaaggtttgctatgaggaaaaacaaatttatgggctcaaacaaaaaccaagccaagaaaacagatatcaactgtgacgccacactcaaaagcttgtttggtgggagggacaaggttgggatgctggagatctccgagcttttgagccgtggcttcccgaaaatctccaagcttttgtggtccatggagccagggatggctctttggtaa

SEQ ID NO: 31550 - DNA, 471 bp, Zea mays
  Peptide Sequence Number=SeqID_73329
atggctccaagatctcccttggaggctctggaaaaaacgattcgttcctcaattgatccagtagttaaaaggagccacactaattgtttgaattgcaatgagcctgttcttccgtcatcacaaactgaaaacgtgctctgtcaagtttgcctagagtcaaagcaacctcaagaccctcttaccacatcatatacatgtaatggcagttcgagggataacagactacacaaattggtctttaatgttttgcttgatggcacagaagtagcttactatgttgatgggcaggtttataatttgcattgcatgatgcagagaaaggttgacggggttagcccatcagcatttgaagctcatgcgggtgagggatcaaggcgcaaaccgtatgataacatattcacatcaaacggagtatcattgcatgagctggcaatgaaaatatcaaaggatatggaactgtcagaaccttga

SEQ ID NO: 31551 - DNA, 336 bp, Zea mays
  Peptide Sequence Number=SeqID_73330
atgtcgtcttcttcttcgtggacgttcgccgcgactgcatcctcgaacgcgccgtcgtcggagaaggcaattagtgatccggcggtggttgtggagctacaacacgagcatacgatggagtttggtacatcgaggatttactcgggccacgtgctcgagatgcagtgtctgggttattttggaaacgaagttgggagggtgccgggggatcaagatataccggagccggagggagagttggttgtgttcgaggcatttttcgctactggtctttgcttaccggcacatcaattcatggtggaagttccacggaagtttgaaattcaaattcattag

SEQ ID NO: 31552 - DNA, 1128 bp, Zea mays
  Peptide Sequence Number=SeqID_73331
atggagaaggatcgccaagagatccagcggaagaagcggaaagccccgctacgactggtggatccgcgtcacgatgccaaggagttgtctgtggacgactacttggtgggtggtgtcaccattgtcgacgcccagaccgggttgccgcctgctagggcagaggctgggcaactggtggtgatgccgtctaaggtgactgccggcccaaggggtacaatgaagagtgataccaggacttcgctggacccatggttgaaattttgtgccgcggctgatgacggaggcgaagtcgccttaggtgctactgccaacgacgtagcagcatctgttacgcaacaactacgatatgcggcggtctttgccgaccaggttgcttccgcggcactgacctcacaactgtgttccgagaggaaacgactcaaggggaggattgagcgcctttcggacgcaacataccgaggcaatcaggaagatgcggagaatgcccacgcgaaggcccaagctgcccaccagcgtgtcgctgacctagagcttgaggtgaggaacatgcgcggctaccgcgagaagatgaagtcggccacccgtgctagggtggatcgggcgcacacactttttgtggatgcgtaccacgaccttggtgcgcagactacccccttcgacaagtcaggggaggaggtgggtacccgtttccttgggtggttgcaagaggagttagagtcactcccgtccatcgtgacaggccttatgacctatgcgtcgcttgtgacctgtgagggggctgcaaatgccttgtcccacaagggatgtaggcacttcaaggccttcgatcgaggcaacgaagacttcaatgctggtgtattccagattgaagacgatgtgctaaagcgctctgctggggcgctttacgataggatgtggggtcctcacggccgcagcatcgtccggaagagggacgaccgagaatttgcaaatgcgatgagggatgaagaggtggaggacctcgccagcctagagagctcggtgatccgaaaggacgccaaggtggagacgggagcggaagagcaatcctcactaaagaaaggtggcgctgagggccctgcgatggcggggacttctgcgctggtttaa

SEQ ID NO: 31553 - DNA, 156 bp, Zea mays
  Peptide Sequence Number=SeqID_73332
atggccaagtcatgtttcggggagggggatctacgggctctttttgatggcgaagagttgagactgatgctgttcaatttctgtgaagctagccttatcccgaaagaagagccaatctgcatccttggattacttcacactgttaggtgtcgttaa

SEQ ID NO: 31554 - DNA, 378 bp, Zea mays
  Peptide Sequence Number=SeqID_73333
atggatgactcggatgacttcgatgaggagggcggcggtggcgaggatgggagcgactatgatggcggcgacagccgcagcagcggcaacgacaacaactacaatggaggcgatgagggcggcaacgacaagggcgataggggcagcagcgacaggggcggcagcggcaatgtcggtggcaaggcgccatcgacaaaggatgagtatctcgatatccctatgaaggatagtgttgggggccttcgtcttccgaagatcctcaaaaacacaactaacatgttttccaagtatgatacattcatagggaccttcggcctcggaatgaagctgtacacgatacgaaaagcatggtctgggagaaggttgaaccaattctga

SEQ ID NO: 31555 - DNA, 381 bp, Zea mays
  Peptide Sequence Number=SeqID_73334
atgcagacggaccgacggatgacaaacctgctggttggtgcgggcgaggcacttgcggacgatctgaccctcgagggctcgtcgctcgtcgatggaggtcctcgtagtaccgccccagccgtgtctagccctgcttcatatgggcaggagatggttccgcgccatgggcaggactatgactggaggagccagccaatcgaccctcaggcggcatatgctagcgcagagggcaagcccatggacagtgagaaccttgcactgccgccgctaatgctgtcgcctccacctccgccacaatcccttgtggacattgagacacgtcctgcttcagttgccgcacgtgtagatgtttctggtcaagatgatgcctcgactacttag

SEQ ID NO: 31556 - DNA, 435 bp, Zea mays
  Peptide Sequence Number=SeqID_73335
atgccagatgaagatttcagcatagttctagaagcagtattgatgtacgacagacgtgtcgctgcagctttaggtgaagatgattcaacggatgaggagcaactttggattgatatcaagaatgggaagcaatttgtctacccaagattattgtttattgttacaggtaaaggacctgataggaagaaatacgaggatcagataaaaaggttgaagttgagacgtgttgccttgcggacaatgtggcttgcatcagaggactaccctctattgctcggtccggttacaccagtagccccttggaggtcagggctaagtggccctattcagaaggccctcatatcaggtttgtacggcccaaattatgttttccaagtgtctcttgggcctgtgcaaaactgcctgaagccatcatttattttgaaggttgtatga

SEQ ID NO: 31557 - DNA, 234 bp, Zea mays
  Peptide Sequence Number=SeqID_73336
atggcggctgcacggttgcccctatccgcggttgcccctatccgtgcgtgtgttcgtgaggagagaaaggagatgctagccacacctgatcccacgtctatagattttctgttgctgcacctcatgtgtgatcctttgtgtggttgcctttggtgcaacctatgctcaggtaaagaagaaggcgtcgaggcggatctccaggagttccaggacttcgacgagttcgaggattag

SEQ ID NO: 31558 - DNA, 240 bp, Zea mays
  Peptide Sequence Number=SeqID_73337
atggccgaccggagctctgggggaggcgaggtcgttagaggggaggaagctgagggcggtgctgggttgggcatgcgggaggctgagcccagaacagcgttggctggctgcaccgaaatggaaggagcaggccatggatgctggtgcgccatggacaaggaagagcagggaagggagtctggcgagctggatgtggaggcaaggcttgaggtgattcgggcactggttagagagttatag

SEQ ID NO: 31559 - DNA, 762 bp, Zea mays
  Peptide Sequence Number=SeqID_73338
atgaccaaatggatttctactcaagtgcatgatctcctgttaacaaagccgccgcacagccttcatctccccgcccagcccctctctctggcgagcttgacctggcatcgagctctagcggtcctcctccgctgccaatcgttggaccttgcccctgctgcgacgtcggcggctccccacaccctctcctccctggctcctgagcttcaaccttggagcttgtgccctctctgctcgccggcgacctgcgtcttctccagccaagccatagccaagctcctctccatagccgacgcccttgccctcctgctcgccatggctggccatcggatgccgcacagcaacctcgccgtttccgagcccgaccccgccatggagctcacggcgcctcctgctgctcaaccttgggcgccgtcgctgagctcgccctgctcccttgtgcttcctgctcgccgtctctggccgtctggcgagctggctgtcctacccgtcagggtggcgcgtgctccatatcccatggcgcccggtcgcccctctctgcttgtcttcgccgtcgggccagtctctagctcgctgcgccctcgcctcctttctttgtttatgcttctctcttctccctcatcactggttcactgtgatagcgcaggttgtggtggtacgctgcaggacatggttgatggtgtgacttggccttccaccctgccaccgggttggacggtcaagtgggatgctgctctagcaggagaggagcaggaggagtag

SEQ ID NO: 31560 - DNA, 465 bp, Zea mays
  Peptide Sequence Number=SeqID_73339
atgcagccacaggtgtccccacggaggaccgctgatggcctgaagccacacctcgcccaaagtggtggacacaacacaggcgaggttcacccggcggcctgctcgccatggagccacacggtggctctctccgtctccaagctttatccggcgcagcgatggtgccccagtccggagcagaggcagagcgcgcggcaacgactgggcttgcggcagccaggttgtcgaggcccacagaaggcaccggttttccggaagctacaggtaacagcggtaccacggccacagttggcgattgaggctgggaggcggtggaaaagagatttaactgagatccggtgcatgcgggtggttgcaacaaacttcaggaagaagcttccgccaactgggtcccatgcgccaaggaaaaagtggcacgacacatgtgttctcggggagcaaggtgctggccccaaggatgagtag

SEQ ID NO: 31561 - DNA, 252 bp, Zea mays
  Peptide Sequence Number=SeqID_73340
atggacgacggcgagctcgctgcggctgctgttttgtggggaagagaggaggagcaggggcctagagctgggcgacattgctgctgctgctttgcatgggagagaaaaaatagggcgcagggaacagcagctacggacagggaaagtggagggaggaagaagggcgccggcttgctgctcgccatggagggcagcgcgcagagctgctgcgtgagggagaagaaggcagggggaaaagggagtggcggctag

SEQ ID NO: 31562 - DNA, 384 bp, Zea mays
  Peptide Sequence Number=SeqID_73341
atgcgcggcgatcggaggaacaaggagttactggcgcaaggaattcgtggcatctaccgtggcagcctcacaggcgatggacagagggttacaacgagttatgatgatgcgatggatgtgctaaggcacgtcgcgcaaggccgtgaagcggccgtcaacggtgagctcatctggagcgatcctagcgagctcgggcatgatttctatagcaaagttattccccttccatggatctacaaaattgatgtggtgacctatgacaaaaactttatgatttggaagttacaaggcctcaaagttgagctaatatcaccaatttcagacttaagcaaatggagtataagtgggactcttttgcaaataagtccaaaactcaaggtttag

SEQ ID NO: 31563 - DNA, 411 bp, Zea mays
  Peptide Sequence Number=SeqID_73342
atggcagcatttgtaaacaatggcagcgaaaatgtttacaatatattctctaaaaatgttgataaagtaaatatacgcacctgtaatcaggaagcatccacgaggcatcaatgttgttgtccagagggttttgcacagatgcagctggcgacgaagcttcaggttgtgcatgtgttgcatgaccgtcgttcgtggggctgcgatgattatcttgtgacgatggatgccaacctccacaaatcgtacctatggcggcattcaatgcagaccgacgggttttggcgctggccttcggtccatcgtgctagaatccgaggacgatggggcaatgagaaggtgaagggggcaatggggaagtacatgccgtcgttgggtgggggttgggatcataaggagctggtcataccttga

SEQ ID NO: 31564 - DNA, 207 bp, Zea mays
  Peptide Sequence Number=SeqID_73343
atggtcctcaactaccgtcgatcggccgcggcgaagctcaactcctccaaccactccaccgtcgtcgccaagctctttgccatccaaagctttatcccgagtccgaaggttcctgaacatacattacacttgggaaacattgttaatcatgtttttgaggaccttcggaagacaaaggtccccaacagtagcccctcacagtattaa

SEQ ID NO: 31565 - DNA, 2265 bp, Zea mays
  Peptide Sequence Number=SeqID_73344
atggtcgcagggttcatcaaagaggtattccatcccgaatggcttgccaaccctgtgcttgtgagaaagaaaggagggaaatggcggatgtgtgtagactacactggtctaaacaaagcatgtccgaaggttccctaccctctgcctcgcatcgatcaaatcgtggattccacagctgggtgcgaaaccctgtctttcctcgatgcctactcagggtatcaccaaattaggatgaaagagtccgaccagctcgcgacttctttcatcacgccctttggcatgtactgctacgttaatatgtcatttggtttgaggaatgcgggtgcgacgtaccaaaggtgcatgaaccacgtgttcggagagcacattggtcgaacgatcgaggcttatgttgatgacatcgtagtcaagacgaggaaagcctccgacctcctctccgaccttgaaacgacattccagtgtctcaaggcgacaggcgtaaaactcaaccccgagaagtgcgtcttcggagtcccccgagccatgctcttggggttcatcgtctccgagcggggcatcgaggccaacccggagaaaatcgcggccatcaccagcatgggccccatcaaggacttgaaaggagtacagagggttatgggatgtcttgcggctctgagccgtttcatctcgcgcctcggcgaaagaggcctacctctgtaccgcctcttgaggaagatcgagcgcttcacttggacccccgaggtcgaggaagccctcgggaacctgaaggcgctccttacgaatgcacccatcctggtgccccccgctgccggagaagccctcttgatctacgtcgccgctaccactcaggtggtcagcgccgcgatcgtggttgagagacgagaagaagggcatgcattgcccgtccagaggccggtctacttcatcagtgaggtactgtccgagaccaagatccgctacccacaaattcagaagctgctatacgcggtgattctgacgcagtggaagttgcgacactacttcgagtctcatctggtgactgtggtgtcatccttccccctgggggagatcatccagtgccgagaggcctcgggtaggattgcaaagtgggcggtggaaatcatgggcgagacaatctcgttcgcccctcggaaggccatcaagtcccaactcttggcggactttgtggctgaatgggtcgacacccagctcccggcagctttgatccaaccggaactctggaccatgtttttcgacgggtcgctgatgaaaacaggggcaggcgcgggcctgctcttcatctcgcctctcgggaagcacctccgctacgtgttgcgcctccatttcctggcgtccaacaacgtggctgagtacgaggctctggtcaacgggttgcgcatcgccatcgagctaggggtccgacgcctcgacgctcgcggtgactcgcagcttgtcatcgaccaagtcatgaagacccactgccgcgacccgaagatggaagcctactatgacgaggttcggcgcctggaagacaagttctacgggctcgaggtcaaccacgtcgcccggcggtacaacgagactgcggacgagctagcgaagatagcttcggcgcgaacaacggttcccccaaacgtgttctcccgggacctacatcaaccctcagtcaagacaaacaacacgcccgagcccgagaaggtctcggccctgcccgaggtgccctcggctcagcccgaggcaccctcggcccgcgagggtgaggcactgcgcatcgaggaagagcggaatggggtcacgcctaatcgaaactggcagacctcgtacctgcaatatctccaccgaggagagctacccctcgacagagccgaagctcggcgactggcgcggcgcgccaagtcattcgtcttgttgggtgacgggaaggagctctaccaccgcagcccctccagcgtcctccagcgatgcatatccatcgccgaaggccatcacacagcgtctcgagcccttgttggaaacgctttccgacaaggtttctactggccgaccgcggtggccgacgccactagaattgtccgcacatgccaagggtgtcaattctacgcaaggcagacgcacctacccgctcaggctctgcaaacaatacccatcacctggtcgtttgtcgtgtggggtctggacctcgttggtcccttgcagaaggcacccgggggctacacgcacctactggtcgccatcgacaaattctctaagtggatcgaagtctga

SEQ ID NO: 31566 - DNA, 570 bp, Zea mays
  Peptide Sequence Number=SeqID_73345
atggcgccggcgtgggagcgtgccaggcgcgcgctcaccgccaggttctgcatgcgctttgcggcgaggcgcgtggtcgtcgaggacgcgccacgtgggatggtcgacatagaggcgccttttccggtggcggtggcggaggcggagcagcagcaagagcagccggaggacgagagggagatgttgctggccgcggtgtcctccgaaccggtgtccgagcagctggcgtcgtcgaggtctgggagccggagttcagcggaagctccgcctcgcccgaccccagggctcgggctcaacctcgacgctgaacgacagactccgcctcgcccgaccctagggctcggacacagcctcggcctcggaagacggtctccgcctcgcccgacccagggctcggactcaacctcgacctcggaagacggactccgcctcgcccgaccccagggctcggactccgcctcgacctcggaagacggactcgacctcgatctcggaggagcctccgcctcgcccgacctagggctcggaccgaccacgtcacacggggggccaccattaccctacccctag

SEQ ID NO: 31567 - DNA, 450 bp, Zea mays
  Peptide Sequence Number=SeqID_73346
atgcccggcataccgagggatgccaccgagcactcgctggacatccgagccggagcccgacccttcaagcagcctctgcaccgattcgacgaggagaagcgcagagccataggcgaggagatccacaagctaatggcggcgggattcatcaaagaggcgaaaggcgtcaagctcaatcccgaaaagtgggtcttcggggtgccccggggcatgttcttggggttcatcgtctccaagtggggcatcaaagccaacccggagaagatcgcgaccatcacgcagcaccccgagcccttgttggggacgcccgggggctacacgcacccctgggaagggccgcttgtcatcaccaaagttctgaagcccggaacgtacaagctggccaacagtcaaggcaaggtctacggcaacgcttggaacatccaacagctacgtcgcttctacccttaa

SEQ ID NO: 31568 - DNA, 281 bp, Zea mays
  Peptide Sequence Number=SeqID_73347
cgaatcgctgtgaagaggctggacaaggcttcggggtaaggcctgaaagagctgaggaacgagctgctgctggtcgccaagctccagcacaacaacctcgccaagcttctaggcgtttcgtgaagggacaggagaagctgcttgtctacgagtacatgccgaatcggagcctggacacctacctcttcagtacacaggccatactgcccagcaccagagtccagaggatagaaagtcgccccgaggtcactcccaggcgcggcggccgggcgcaagtctga

SEQ ID NO: 31569 - DNA, 2214 bp, Zea mays
  Peptide Sequence Number=SeqID_73348
atgggagtggggggcagcttctgggacctgctaaagccctacacgcggcacgagggcgcggggtacctacgcgggcgccgtgtcgccgtcgacctctcattctgggtcgtctcccacagcaccgtcgacctctcattctgggtcgtctcccacagcaccgcacctccgccaggaaggaggaaggagcataccggtgagaagcggccgctagagcagatcgacgccggagagaagaatgttgtgtccacagccgtcgttaaggtccagccgaagaaggttattcaaccgaagaaaagtacacaacctgctaaacaggagtccagtgatgacagcagctctgagagctcctcagacgatgaaccttccaaaaaaccagttgccggttcaaaaaagcctcctgccagtagtagcagcagtgatgatagcagtgacagtgatgatagcagctctgatgaggaaccagcaaagaagcccacggtcctttcaaagaagcccactgtcctttcaaagaagcccactgtcctttcaaaaaaacctgtcacagcagtcagtaatggttcaaaacaggttaaacctgatagcagcagctctgacagtagctcagatgaggatgaaaaacctgctgctagcctaaagaagcctgttgttgcctctgtgcaaaagaagacccaagaatctgatagctctgacagtgattctgatgaggatgaatcagaagatgatattcctgctaaagctcaagtagtagccaagaaaaaggaagagtccagtagcagttctgattctgatagtgattctgagtccgaggatgagaaacctgctgctaacctaaagaagcctccggttccctctgtgcaaaagaagacccaagaatctgacagctctgacagtgattctgatgaggatgaatcagatgatattcctgctaaagctcaagtagtagccaagaaaaaggaagaatctggtagcagttctgattctgatagtgaatttgagtctgacgatgaggatagcaatgcgaaaacagtacaacctgccaaggctgctgctattaaaaagaaggaagattctagtgagagctcagaaactgactcacagtcagattcagaagattcagaacctgaaaaacctactgtccctgcgaaaaggcctctagcaacaaataaaaagaatgaacaatccagcgagaaatctgatgacagctctgatgagagttctgatgaaagtgatgaggaacctccacaaaagaaaactaagaattctgcaccttctggtgctgcaaaggctgccactaatgtttcaaagaaaaaaagcagcagtgatgaagatgatgaaagttcagaagaaagctctgatgatgaggatacagaacaagttgaaactaagcctaaaactcctgccaaaagccaaagtcaggctactggttcaaagactatttttgttgggaatttagcctacagtatagagcgtgaacaagttaaggaattttttgaggaggctggtgaagttgttgatgttcgtttggctacttttgatgatgggagtttcaagggttttggacatgttgaattcgctactgttgaagctgctcagaaggctcttgaatttgttggtcatgacctgatgggacggcctctaaggattgacatggctaccgagaggggtgcatacactcctagcagcgggaaggacaacggttctttcaagaagttcgctccaaggtcaggcaacaccgtgtttattaagggctttgacacctctggtggagaggaccagatccgcaccgctcttgaagagcattttggatcatgtggagatatcacccggatttcaattccaaaggattatgacactggtgtaagcaaaggaatggcgtacatggatttcaaggacccagattccttgaataaagcatacgagttgaatggaaccgaccttggtggctacagcttgtatgtcgatgaagccaagccgagacctgataacagcggtggcttcagtggtgacaggggtggtggcagagggaggagtggcggcttcagtggtggcagaggagggaggagtgacagggggcgtggtggtagccgtgggcgtggatttggaggccgtggtggaaggggtgacagaggccgtggtggaaggggtacgcctttcagacagaccgctggtacagctagtacaggaaagaagaccacctttggtgatgacgattga

SEQ ID NO: 31570 - DNA, 282 bp, Zea mays
  Peptide Sequence Number=SeqID_73349
atggccaaattaagggtgcgggagggttgctcgcctagagtggaagtgctggagtcacggggcaatggtggaggcgtaaggacgcgacggggcgacgtcgatggggctccggcggtgcaagaatcgctccggtattccattggagtcgaccttaaggcaaaggtgtctccagcgtatcatcatcttggatgtgtatcccaccattcaaactcattgcatctagtgagtcagatcccaatgagcattaaggtcacctacacttatgcatattggcagatttga

SEQ ID NO: 31571 - DNA, 264 bp, Zea mays
  Peptide Sequence Number=SeqID_73350
atggcgcaccagatagtgtccggtgtgcaccagacagtgttcgatgcaccaggccgagcaccaagcgaacatgccactctcgggttttcccagggcgcgctccgctataattcaccggattgcctggtgtgcaccgggcatgtctggaaatacaagactctaattttgatgtctagctttgtagaacaaaatgaagagccttattttacattgaaagttcatcaatggtccatgttcccccaatatagtggtaccaagttctag

SEQ ID NO: 31572 - DNA, 273 bp, Zea mays
  Peptide Sequence Number=SeqID_73351
atggctcaccggattgctcggtctacgcgcggctgcgagcgaccgaagtccggcgacgatgatcttgctgttctgatgagacagggcttcgattctcgcttggagaaccttcatggctcttcgaggaagctgtccaaaggctcggttgaggctaagggtctctataaaaggctggcccaggtggccggcgctcgggtggctcgggcgggctgcgcagagctcgccggagctaagggtggtgtctggccagcgagggcttatgggttttgctga

SEQ ID NO: 31573 - DNA, 294 bp, Zea mays
  Peptide Sequence Number=SeqID_73352
atggcgagggcgagaggcgagcggctactcgtttgctggtggcgaattaggaattatgaatttgcacgaaatataagaatatcacttgtaaggatgataccacttgttgagatattggtccagaaaattcctttgtttatgcaagactgctactcacagacagtccgcagtgggagctcggatggtctgtggcctgatctctcggactgtccatggcctaggaccggacggtccgatacctggaacttgcactccattgagctgactgttaatttctcgatagttgaattttaa

SEQ ID NO: 31574 - DNA, 312 bp, Zea mays
  Peptide Sequence Number=SeqID_73353
atggagctcttcggcggcgagggctccggcctatccagggcgggcttcgatccttgcttggagaagcttcacagctcctcggggaagctgtccaagggctctattgaggccgagggtctttggaagtggctggccatggtggtcggcgcttgggtggctcggacgggtggcacagagctcgccggagctaaggatggtgtctggccagcgaaggtgcgtgaagagaggcttatgggttttgctgactggagccaaagatatggagtgatgagggatcaaggtgaacatgctcaggttctaggtgagggctga

SEQ ID NO: 31575 - DNA, 276 bp, Zea mays
  Peptide Sequence Number=SeqID_73354
atgggtcgaaaaccgggccaccggcggcaaaccgccgtcgagcccaccggcggccggcttccccccggccgctcggccggttcgccacgccgtctggccgcaacgccgttttctcactccgctctcgctggcgagtgggcccgcagcgacgccgtcaccctcgtgcaccgcgccgtctccccctcgctcatgggccgccgctgggccgtaagcgctcccgcgcgcgcgctccgcgcccaggaagaaaacgaaaagccgcagatccggaacctgtag

SEQ ID NO: 31576 - DNA, 621 bp, Zea mays
  Peptide Sequence Number=SeqID_73355
atggacgcgcggcacgacgtcgaaagacgcgcgacggcggttcttcctcgttggtgcctgggagcagccgagcacgatggcgacttgctgaccgaacagggccacaagccgcgccgccgcgggctggctggccacgccgccgtgcaggcaggctgtcgagccagacgagcgcccgggcagaggccgggacgcgggcggttctggctgagctgggcgcgagtgggcgagaaaactgcttcgtgggctctcttcggggaagatgaacaggggcaaggcgagatcgtggcggcgatttccatttgcaaggcaccagcgatagacgggcagcagcgcatcgtagccagcggccaggagcagcggcaaggcatggcgagcgtgctgagctgcggcgctgcaccgcggctaggccgcgcagagcgcagctgcgcagggacgagcatgggggagcgacgcgctgggctacgcagtggcgggcgtcgagatcggctgggatggcggaggatcgagagatgctggggtttttttatgcgcgaagttaggaaggggtggttgcagacttgcagttgcagcttcgtgcgttcggagtgggagaagcagttttctccacggaagcgcgggtga

SEQ ID NO: 31577 - DNA, 639 bp, Zea mays
  Peptide Sequence Number=SeqID_73356
atggatttggtttcaaaagggaaccaagaacttaacaagcaaaacgtctccaactctatcaaggagaaagagaaggcacctatggctagtagtttgcattcttttcatgacacgaaaaaccatgtctatttgtatgcttatattaagaataccactaatgttgctcatcatgatagttgctatgatcatgttgtttttcctgtatgtcatgatgatgtctttagttctcacgccatgtttgcatctaccaattcttcgcatgttcatgcgtgccaggcagggaagcaagtgggaactactcatccaagcaagaatgtgatgacaacatcaagaccactggaacttctccatatggatctctttgggcctgttgcttatcttagcatcgggggaacccaaaatgaatttgagcttaaggtaaaaaagattaggagcgacaatggatttgaattcaagaatcttcaagtaggagaatatcttgaggagggaggtatcaagcctgagttctctgctccctacacaccacaacaaaatggtgtaatagagaggaagaacagaatgctcatcgacttggtgaggacgatgcttggagaatacaagatgaaagcatctaggcccctggttggttttagtgattaa

SEQ ID NO: 31578 - DNA, 249 bp, Zea mays
  Peptide Sequence Number=SeqID_73357
atgacgaaggttgatgcttgccgaaggtgttcagaactcaaaaagtggaacttcggctctgcgctatccttcgtattctttgtgcttcctcatattgtggctttggcttatgtccgaagactaataccagaaaggccaacacgcaatgggagtggagagatggcaagagtagcgtgtaccctctatggcaagaggctggactgtggtgtatctgtgctctcggttggcgtgaacccagtctggacttaa

SEQ ID NO: 31579 - DNA, 516 bp, Zea mays
  Peptide Sequence Number=SeqID_73358
atgaagttatctaacaagaaggcctctaagaaagaagagcgaaatgagtctggtgatgaagaaacgaaggatgctgaaattgatagcgacgaagaatcacctttggacagggccactcccttgaagaggaaaaaaactaaaattgctaagatggaagtggagatgacaactacacaagaacaatggaaaggaagttatgaggacatcaactgcaacacgagaaacaatctttgtgataaggctgatcttgcaccagcaaggcacgggcaaaggggtaatgctttggcacctaagatggtagagggatccccagtgggagcgaagagcccgcagatcgaatctcttgttgaggcagtttttagatctttgtcactagaggaagaagacgatgaagctaaaggcaccgagggtggtgaatctttgggatcagaaaagggggtcgaagagcaaagagttgctcttgaggcagacatatttggacctactagctcttatgtcgaggaaatgggtgaataa

SEQ ID NO: 31580 - DNA, 270 bp, Zea mays
  Peptide Sequence Number=SeqID_73359
atgaatacttctatgaccctaaagtccaagagtagcttgaaggttgcggaggatgaacatgaagatcggtcaacaaagccaagctatattgagatgggtctgtccattatgaaggacaaagatttgaaggaaatgaaggaaattgggtattttggtgacaaggtcaaggtacgacttggtagcaatgagacaaccccaaagccaaagaacaatgaaagggttttagaagcttcttttgagctggccttcagttaccgatgtaccagatga

SEQ ID NO: 31581 - DNA, 318 bp, Zea mays
  Peptide Sequence Number=SeqID_73360
atggactttgtgaaggcatcccttggcaactcgatggtcctcaaggtggtcgactgcttcttcaagtacgcccactttctacccctggccatccatacaccgtcgtcttcattgtcaaaacattgttcgacaacaatgttgttgggcctgacacacatagacccaagcactccaaagcaggagatcaaaaaaggtaattatgacacccatcattgtgaagtggagttccaggctcccaagtactatgagcccttccaagttcttgagcgtattgggcctaatccctacaagcctaccaccatgggcttgtatgcataa

SEQ ID NO: 31582 - DNA, 1188 bp, Zea mays
  Peptide Sequence Number=SeqID_73361
atggggtttgacgggctggtcgtggtgtcagatccttacctgcagcgccgcttcacgcaggccgaacttcgcgcgctccaggcccagtatgcggcgctgcgggacgcgtcgcctaacgggaggctgcggatgcgggacctccccgccgccatctctggcgtccgcggtgcggccaagagcagggacgccgagaaggagaatagcgcgccggagccaggcccctgccatggcctcactgacgaggagtgggcctccgtgcttaaggccgtcgcgcgtgctgacgagaagccgcaccaggacgcgagcttcgagctcttcctccgcgtctacgctgagatgcagctgcgactcaaggcagtaagcgtctgctccggccgcgccggaggaatcgtgcgctcctcctcctcctctgctgttgccttcctcacggcggccaccaccacactgcttcacaccatcagcgagtccgagaaggcgtcctatgttggccacatcaacgcttatctcgcggatgatccgtccctgaagagcgccctccccatcgatccggcgaccgatcacatcttccatatcaccaaggacggcgtgctcctatgcaaactcatcaacttggctgtaccgggcaccatcgatgagcgagccatcaataccaagagggtccttaatctttgggagaagaacgagaaccacacgctttgcctcaattctgccaaagcgatcggctgcactgtcgtcaacatcggcacacaagacctcgccgaagggaggcctcatctggtcctgggcttaatatctcaaataatcaagatacaactgttggcaaatgttaatctgaaaagcacacctcaattagttgaattggttgaggacagtaaggatagtgaagcctatgcttgtctattgaatgtcctagcacctgaatgcagtgcaaaaccatctgcgatgtctgtaaaagatctacttcatagagcaaggttaattcttgagcatgcagataggatgggctgcaaaaggtacctgactccaaaagacatagttgatggtttacccaatctaaatcttgccttcgtggctcatattttccaaaaaagatacaaagaaattgcattatgcaatgttgacttgatgcaattcatgcatagatatgtctcaaaccagaaatgttatattatctctgcaagaagataa

SEQ ID NO: 31583 - DNA, 501 bp, Zea mays
  Peptide Sequence Number=SeqID_73362
atggagcttggcggtccagtgttgttgaaggagctccgacgagcaattgtcggagttgtggtgcccttctactcccccgatgaccacccgcacatccgcgatgaccaaccaaacaccccgaagccacacaccgagaccaatcggcggcgcaggcgcgattcctccgtcggtcgtgcgtggcctacttctaccgagcgctgcgctgcttgggttctagcgttgggagcgttgacggggaatggattcgcaggcgcgttgcggtcaagaggggaaaggaactcccgagcttataggctcgacgagacggaacatgcgcgacagcctcaccgcggtcttcgcggatccgttgcaatggcaaagaagcagctgacaggtggggtcacttaccagcggcagaccagcacaagcgtatgcgtgagggagactgggcagtgggtccttcgcgtcggtgaggaaccggttgcgtcgcgggcgtggggaatcgaccgattccaaaattaa

SEQ ID NO: 31584 - DNA, 258 bp, Zea mays
  Peptide Sequence Number=SeqID_73363
atgggctgtgcgaacgccgccgtgttctgctcgggcaccgcccctgcctttatccgggtgaggaagatgggcctctaccgtcgatcggcgaacgctcggtctggattagatccacaccgtaccggttcaagggttgatcctagcccttggatcgagatctcacgcgttagaattgattgcaacactttaaactcggagccatcggatctatatcggacgactctaggcgcgtaccggttcgaccgagatgtgatctaa

SEQ ID NO: 31585 - DNA, 372 bp, Zea mays
  Peptide Sequence Number=SeqID_73364
atggcgcacacggaggccagcaccgtacgatgtccgcaaccatggaggcgacgcatcggcagaattagagccgagcagctgagggagatcgacaaccaacgaggacgaagattcgacgaggctgcagccagaaacgctctctgctctcctccctgccagtggcgtacaacgctcgagatccgctctcctccctgctcggctcttccaagctctagcggcgggtttgccatggaggagccaccgcccctatgccctagcggcgggtggatggctctcctcactggtgctgtatatgtaggagtagtaggttataggggccgattaaccgcgttcgtttctcctctggtctctggtgttcgtccaggtgggtga

SEQ ID NO: 31586 - DNA, 669 bp, Zea mays
  Peptide Sequence Number=SeqID_73365
atggcctgcctgcacgaccacagctgcgaggatcacaactgcgccgccgactggtcgctctacaaccacatcgacgtccccaaggtggtggctctcaacgaatcggtgcccgggagcgtcaagtccgtcttcaagccctgggagcagcgccttgacacctcggggggttttctggagagtaatgagggtgaccctgagctacttattttcatcccgttcacatcagatgttaagatcaagagcatttctgttgttggtggtgctgatggaacaagcccgtcaagaatgagagcgtttatcaatagagaaggtattgacttttctgatgctcaaaacatgcagccagtgcaggaatgggaattagcagagaacctgcaaggagctcttgagtaccaaacaagatattcaaggttccaaggtgtggctaacctaactctgcatttctctgacaactttggtggtgatacaactaaaatttattacattggactacgtggtgaagccactcagaaaaaacagtggaacgccatactgattcttattgcttcgtgctgcttgtcccagaacaaaagggatgtagttgcaacaattgtatatgaagtcatgcccaatccttctgatcacaaaacaaaatctgagactggaggaggtttctcgcatgtggagtag

SEQ ID NO: 31587 - DNA, 534 bp, Zea mays
  Peptide Sequence Number=SeqID_73366
atggacactgctctcccattccagtcattgttctcgaacgactctagatgggacatgcacgcgtctaggcacaacctcaccctcgggagagaacttcgcctcgcccgaagacagcttcagccttgggagaaaactccgcctcgcccgagcttggcctcggtctactgccatggcaacaactcccagcgaatcccgcaggaggccactccggtgactgttctaacaactccctacacgactgcatacccagccgtaggtctgaccatggcctcgggaataacctccgcctcgcccaagcatggtctcggcctagataacatcgacgaaaggacacccgaggccaccaactcttccgcagagacaggtgacaacgggatggctacagaaactacgaggttggtgacaaatctgctttacaccatacttatcactattccaacaactacgactcggacaatacatccacaatataggctcgggtacgctcccgagcccccgatcttggcctcggctctctactcggtcaagatgtga

SEQ ID NO: 31588 - DNA, 1539 bp, Zea mays
  Peptide Sequence Number=SeqID_73367
atgaggactataattgctaaagtggagcacccaggcataggtgctactgagatgatactttcaaatggcatgcggatttgttacaagtatactgattttcttgatgaccaggttgtttttactggctttgcctatggtggtctgtcagaattatctgaagctgagtatacttcatgctcaatgggttcgaccatagcaggagaaattggcacttttggctacagaccttctgtcttgatggacatgcttgctggcaagagagccgaagttggtacaaaagtgggggcctacatgagaacattttctggcgattgctcaccttcagatcttgagacagctttgcagcttgtttatcaactatttacaacaaatgtggagccaagggaggaagaagtaaaaatagtgatgcaaatggcagaggaagcaatctatgctcaagagcgcgatccatacacagcatttgcgaatcgtgttcgtgaaataaattatgggaactcatacttttttaagccaattagaataagtgacttgaagaaagtggatccaatcagagcgtgtgaatatttcaacaattgtttcaaggatccatcagcttttacggtggtaatagttggaaaaatagacccagccatctcacttccactggttctgcagtacttgggtggaatacctagggtacaggatgctactcaaccacttagtcgtgatgatctaagaggattgccatttaagtttcctgcaaccatcattagagaagttgtccgcagccctatggttgaagcacagtgctttgtacaactagcatttcctgttgttcttaagaacacaatgatgactgaagatattcactatgttgggtttcttagtaaacttctggaaacaaaaatcatgcaagtacttcgcttcaaatatgggcagatctattcagttaatgtagctgtcttcttggggggcaacaaaccctcaagaactggagatgttcgtggagatataagcgtgaatttctcatgtgatccagacatatcatctaaactggagaattacttctggttggatcgtattctacggagctatcaatcaaggcttttttctggagatattggatccacctttgcgttccaagaggaggggcgtataaaggttagggatgctttgacaccacagagcatgcaatcagccttgcaacgagttatacctttcccttgcagaaagcagtacactgtggttattcttatgccaaagtcatcctgttgggcgtcagtgaagtcaatgcttagctggagttctaatggggtcagcagagatgctaagcatgctgaacttgagaactgcttgcagatcctcgctggcatggctggtgcactggtgttggcaaacgaggaaaaatctataatgagcaggaaatgtgatattcctttatgctgctccgttggttttcatatattggctaggacagcgtccaagggtagcgttgggaaccgcgacgtccaagaaaggatagtgttgaaacttgtgacgtttaaggaggtgtttgtttga

SEQ ID NO: 31589 - DNA, 212 bp, Zea mays
  Peptide Sequence Number=SeqID_73368
atggaactctcgcccttgccgatgctcgctgcctcccgcttcctgtccctgtcgccgctgctggcgccaacatgcccccagcggaccgctccttcagtccgcgtggccacgcagacgctggaagcgccggaggcgcccaacccccgcggccgtcccccaggcgcagcgccgtcgcgtccccgtgcccttgaccccatcgccgccctcaacag

SEQ ID NO: 31590 - DNA, 441 bp, Zea mays
  Peptide Sequence Number=SeqID_73369
atgaatagtaggtcacagccaacggaagaggcacaccaatattcgagtaaccgggccggattgggccgtatagttgggctgcgtcttgtaaaggattaccttttgcgtcggcctgcctataaaaagaagcggatgacttcacctccgggcatgatgaatgagaataacaaagttccaacccctacattcttcttctacctctgccatcctctctgtatttttcccagctcctatcttctcttcgtcgtagtgctgcccttcagcgaggtgctggactggagcaccttctcggtggtgctcgccgagagaagggcataccggcggacctcaagaacttcctgtggcacgccgcacgccacgcccatcaagtacgacttcttccacatgatcctgcactccatctggttgagtagagcgaaccaggtcgagctcgacggctga

SEQ ID NO: 31591 - DNA, 708 bp, Zea mays
  Peptide Sequence Number=SeqID_73370
atggcgacgggccctcgccccggcccactgtcgtcgcagacgtcgcccgccaccaccaactctcctactccgtcgggcgtctccgacgccgtcgagagcggccagagcacgcccaagcgcgcggagacgaagctgccgctgtcgtcgccggccgtcgcggtgcacttcgacccagtcgaggaggccgtcacgtcgccgctgcgcctcggcaaggcgcgcctcgaccagcagcagcagcagcagcacgcggcgggggcggcggagagcggggcatccgtggtccccggtgtggcggcggccgtggccgcggtcgccgagcggagggagctgttgctggcgctgcgcctggccacggcggtgctcagcctcgcggccttctcggtgatcgccagtgcccggacgtccggatgggccggcgactactacgcccgccacctgcagtacaggtacgccgtcgcagtgaacgtgatcgtgttcgcctactcggtcgcgcagtcattgggcaaaatccgccacctggttctggcgtacctcctcatgtcggcgtcgtcggcggccgcgtcgcgcaacgacctgtgggtgtccaggttcggcacggacgccttcgtcaggaagatcaccggcgccctgtggctgtccttcgtcgcgttcctggtgctcgctctgaacgcggtcatctccacggctaatctcttcagcatggtctga

SEQ ID NO: 31592 - DNA, 1443 bp, Zea mays
  Peptide Sequence Number=SeqID_73371
atgctgctgcgtcggctcgtcgctggcgtcctcccagccggcacgccgccgctggtgggcgcgctgctcctcctgccgccgccctccgcccggcgccacgccgtggtgatcgaggagttcgacggcgccttctacaaccgggtcttcctagcggtcagggcgtacgtctccacgctcctcgccgcggcgccgaccggcgcgccacccgtggtcaaggccagcctgccgcgcggcgccggcgccggcgcggagcagatcaggctcgccatgggccccggcacggccgtcgtggacgtgttccgcggcgccgagctcacgtggcgcctgaggagtcacggctcagcttcgacgggcagcacagggacctggcgctcggcgccctacctgccgttcgtcatggcccgcttcgaggccatggcgcgggaccggaggcaggccaagctctacagcaacgagtgggggaagtggcggtccgtcaggctccgcaacgcctccacgttcgcgacgctggccatggacgcggcgctgcggcaggacgtgctggacgacctgggcaggttcctgggccagaaggagtactacgagcgcacggggtgggcgtggaagagaggctacctcatccacgggccgccggggaccggcaagtccagtctcgtggccgccatgtccaaccacctccacttcgacgtgtatgacctcgacctcggcgccgtccggtcgaacaccgagctgaggaaactgctgattcggatgaagagcaggtccatactgctgatcgaagatgtcgactgcgcgtcggtgacagcgcagagcagagaagccgatgcgagcaacccggctcccaagcatcaaaaggtcaccctgtccgggctgctcagcatggtggacgggctctggtccagcagcgggcacgagcgcatcctcgtcttcaccaccaaccacatggaccggctcgacccggcgctgatccggccgggccggatggacaagcgcatccacatgggctactgcggtttcggcgccttcaaggagctcgcggccatctaccacggcgtcgacgcccaccgcctgttcccggagattgaagcgttgctgcgggaggtggacgtggcgcccgcggagctcgcggaaaagctgcttgcgacggacgacgccgacgccgcgctcgagacggccgcgaagctgctgagggatagggaggcggggatcgaggaggatggcggcgggtacgtcaaacagaagctgcacgtggggccgacccgggcccgaccccgcccgcggccagtgccggcgccggcgcggggtgtgagtgctgcgcgacaggtggtgtttggcgaggaaatcgtgctgggcatctcgcggcgacaggggcacgggtctgggcggcgcggtgccggtcaaggtggaagtggaatgcgcggactgggaaggggacggcgatag

SEQ ID NO: 31593 - DNA, 372 bp, Zea mays
  Peptide Sequence Number=SeqID_73372
atggccaccaagaagagcatcgtcgtcatggagttcgttggaggcggttccctcaacgcctacctcgtccaccacgatggccatggcatcggcgaggcctcggtgcgtcgcgcgtcttccagcagctcgtgtatgcactcaactactagcactcgaatactcaagcctgataagatcctcgtcgatgccacgagcaacatcaaggtcactaattttgggctctcaacccttacccgcacggcacagcaggcggcacatgtctacatcgtctataggatgtccatgttcagatgttcctatggtgtcctcttcccgctcgtgacgatcaaggaaaatctttggttcaagaagggcttcaaggagatccaatag

SEQ ID NO: 31594 - DNA, 513 bp, Zea mays
  Peptide Sequence Number=SeqID_73373
atggcttccctgaaggccgcgaagcccagcggagttgcggcgcagggcaaggagccggcgcccaagctcagcgagacggcgacgaagccgtcagccgcgaagagcggcggcgttaagaaggctgagcagaagccccgggaaaccaaaaggaagtacgtgcttcccatgatgaaaccaggtgaagagcagcaaacaggcggcggcggccaaaaagtgacgtacaaccaaacacaaatgacccctagatcccgatccttgagaacctctttgggaggcggtgagctgtccgcggcggattatccacgactatcccacggaccacccgggagcggaccgtccaaccacaaggttggaccatccgaccgtgcccgatgccaaatatggtgctcaacagatgatccctgccttttggtagagcttggcgaaccaaaagcacccgatactactatcctctttcagaaaacaatagattacacaacatgccttgttcccaaaacacgaaatctaggctga

SEQ ID NO: 31595 - DNA, 927 bp, Zea mays
  Peptide Sequence Number=SeqID_73374
atgtgttcagcttatgatgaggccctagaagtcaggaggctacaggacaaagctgctgatttttcaggtggaagtgttgcacttttcatgggaccagggaaattggaaagcatctgtaccagatcagaacaagaaattgctgcactgcgagcagcttttgcacaagaagttgttgtctggcataagcttgaacatccgaacgttactaagtttattggtgctataatgggtgcaagagatttaaatatacagacagaacatggacatcttggcatgcccagtaatatttgctgcgttgttgttgagtacctccctggaggtgcactgaaaagttttctgataaagaacaggagaaggaagcttgcctttaaagttgtggtccaaatagctcttgacattgccaggggattatgctatctccactcagagaagatagtgcatcgtgatgtcaagactgaaaatatgcttctggacaaaacgagaactgtaaaaattgctgattttggtgttgcccgagttgaggcttcaaaccctagcgatatgacgggcgaaacagggacacttggttacatggctccagaggttctcaacggccatgcttacaacaggaagtgtgacgtgtacagctttgggatctgcctgtgggaggtatactgctgtgacatgccgtaccccgaccttagcttttctgaagtcacctctgccgtggttcgccagaacctgaggcctgagataccgcgctgctgcccgagctcgctagcgaacgtgatgaagcgatgctgggacgcgaacccggacaagcgtcccgagatggcggaggtggtgtccatgctggaggtgatcgacacgtccaagggtggcggcatgatccccaaggaccagacgcagggctggctctcgtgtttccgccggtaccgaggcccctaa

SEQ ID NO: 31596 - DNA, 1290 bp, Zea mays
  Peptide Sequence Number=SeqID_73375
atggcggcgccggcgcaggcgcaggcgcaggtcctgcctctcctccggtggagccggagcgcctccttcctctgcgcctcgtcgcgccgcctcttctccgccctccaacgcccctctgccgctgctcgctgcgaggccggctccaaggccatgctcaaggggatggactactcggaactcgaggcgcaggggtttcggccaggccaggccatgatgctgtggaaatgcctgtacgggaacaacgtttgggctcattgctacgacgagttggctggtttaaataaggatttcaggaagatgataaccgagcatgctgatctcaaggcattaactatgaaggacatccatattgcatcagatggaacccgtaagatattgttctctcttgaagatggttcagtgattgaaacagttatcattccttgcgctaggggcaggacaactatctgtgtttcaagccaagttggttgtgccatgaactgccagttttgtttcactggaaggatgggtttgagaaaacatctctcgacagctgaaattgtcgagcaggctgtgtttgctcgtaggttattctcagatgaattgggatcaattaacaatgttgtatttatgttagcttttaataacatctcatcgtgtagcctacaagatctaaaaagttatgctgtttttgttgagttgatgggcatgggtgaaccatttcacaatattgacaatgtaataaaagcctcagcaataatggttgatgagcaaggtcttcattttagccctcgcaaggttactgtctccacaagtggtcttgtccctcagttaaaacgcttcctccaggaatccaattgctccctggctgtcagtcttaatgcgacaacagatgaggttaggaactggataatgcccataaacagaaagtacaatcttaacttgcttcttggcactttaagggaggaacttaacctcagacaaaaacaaatagtgctatttgaatatgtcatgctttctggagtgaacgacagtatggatgatgccaagaggcttatagagctagtccaagggatcccatgcaagataaacctcatctctttcaatccccacggcggttcccaattcaagcccacaccagacgataagataattgagttccgcaacgttttaattcaaggtggcctcactgtttttgttcggctcagcagaggggatgatcagatggctgcctgcgggcagctaggagagcctggaggctatcagctacctctgctccgtgtgcccgagaaatttcaggtcgccttgtga

SEQ ID NO: 31597 - DNA, 969 bp, Zea mays
  Peptide Sequence Number=SeqID_73376
atgtccgcgaagcaaattcccgaggctggcgagttcctgaggccgctcttccttggagcaccggacactgtccggtgtacaccggacagtccggtgaattatagcggagtgcctctggaatttcccgaaggtgacaagttcagcgtgaagtcccctggtgcaccggacagcacacattttactttagtcctgacgctgactttctatttatgctcaaagaggaacactgctctacgaaaaactgagtcaattatattcacaagctctgttcatgtttgggatttttcagggcagacaaacctgatattaatgaatgaatggaatggactatatgactgcttccatgcagatcaagcggtagcatcagctgccatatccgatccatctatatgccatcttagaagttttaaagctccttgtttacatgtaattcaaaatttactattagccattgttcctgaacagcccttgattttatttcttgaatgtacacctgattcgtctaatggaatcatggaccataggttgtgcactgttttggttaagagttacaatgatcctaaggcgtctgttttgtcgggcgaggcggaggctcctccgagatcgaggttgagtccgagccctgggtcgggcgaggcggagtccgtctttcgaggtcgagtccgagccctgggtcgggcgaggcggagaccgtcttccgaggccgaggctgtgtccgagacctggggtcgggcgaggcggagtccgtcgtccagcgtcgaggttgagcccgagccctggggtcaggcgaggtggagcttcctatggcgcccgaggctggacttagctgctgtcagcctcactctgtcgagtggcacagcagtcggagcgacgcaggcggcactgttttcttgtcaggttggtcagtggagcggcgaagtgactgcggtcacttcggctctgtcgactgaagagcgcgcattaggataa

SEQ ID NO: 31598 - DNA, 360 bp, Zea mays
  Peptide Sequence Number=SeqID_73377
atggcttcagctagagaacattacgccatggttgtagcttcgagcaccttcgccatgtctaccagtgccgctgtttgctccagccgagctattctactagagccgaaatccttgtcccgaggttctagtagtgccactgtttgctccagcacgcggctgtggctgccactgttgaggccaggtcctccaccgcggcatggaagctccgcctcgacggctatggcacggtggtccagtggtcctccttccccatgtgatggtcctcctcctgtctcaactacgcggggtcataggcatggtgccgctgctagctcaattgtgcggacgttgctcggagacgaggacacccatgcacgctga

SEQ ID NO: 31599 - DNA, 678 bp, Zea mays
  Peptide Sequence Number=SeqID_73378
atgggcgacgccgtggagcacctcaagagcgggttccagaagttcaagaccgaggtgtatgacaagaagccggagctgttcgagcctctcaaggccggtcaggcccccaagggcccactgccccgttgccttttagcattgagagaacagacacgcggttgcatctgccgtgctgatatggacacccacgtcccagtacatggtgttcgcctgctccgactcccgcgtgtgcccgtcgtgaccctgggcctgcagcccggcgaggccttcaccgtgcgcaacatcgccgccatggtcccggcctacgacaagaccaagtacaccggcatcgggtccgccatcgagtacgccgtgtgcgccctcaaggtggaggtcctcgtggtcatcggccacagctgctgcggtggcatccgggcgctgctctccctccaggacggtgcacccgacaacttccacttcgtcgagaactgggtcaagatcggcttccctgccaaggtcaaggtgaagaaagagcacgcctccgtgcccttcgatgaccagtgctccatcctggagaaggaggccgtgaacgtgtccctggagaacctcaagacctaccccttcgtccaggaagggctggccaaggggaccctcaagctggtcggcgcccactacgacttcgtgtccgggaacttcctc

SEQ ID NO: 31600 - DNA, 201 bp, Zea mays
  Peptide Sequence Number=SeqID_73379
atggatctagctatcaagttgtatagtcttctacatgatgtactaccccagaagctcaaattttgctgtatttttagttgcgagaagctgtatactgtttattacttgtcagttaatctgataaatccatttccaacattatctttgaaaaaggctcttggagaatcagttctgccaggtgcagtttataatcgcacatga

SEQ ID NO: 31601 - DNA, 2365 bp, Zea mays
  Peptide Sequence Number=SeqID_73380
atgaagaagatgaggcagaggttggagaagattaaggaagaagcaaaactggatatattcaattttaaggctgattgttgctccttggatgaaaatgttaatagcagggctacgttttcttgtatcagtgaagatattgtggggaggtccacggagaaagaaactatagttgctatgttgacaacatatagtgaagaagagattttgaccatctgtatttatggttttggtggccttggtaagaccactcttgccaggttagctttcaatgatgaaaatgttgggggagttttcgattaccgagtatgggtctacgtatctatgaaatttgatctgaagaaaattggtgaatctatactttctgaaattgatgaaggcaactgtggccaccacggaaaccttcaggaggttactcgtcatctccaaagagtacttgatggcaagaaattcttggttgttcttgatgacttatgggaagacaattggatccaattgcaaaatctgaaggcaatgctcagctgtggtgcaaaaggaagtaagatcgttgtgactacacgcactgggaagattgcttccctgatggatcattgcatgccttacaagatggatgtcctatctgatgatgattgttggattttgtttaagagaagagcctttgttcctggaagggatgatcctaggatagaagtgattggaagggatatagtgaagaaatgcaatggtgtgcctttgtctgcacaagctttgggtttcatgatgcggttcaaggaaggggtggctgcatgggaagcagtgagggacagtgaaatatgggagatagaagatcagaatattatgccatctttgaagcttagttattgtctcatgccttgtcacctgaagttgtgctttgcatactgtgtagttttctccaaaggagctgccatagacaaggacatgctgatacagcagtggattgcacttggattcattcaacccactagtggaagcttgacacatgtaaagcgcggtgaggagtacatccgtgaactactttttgcattgcctgagagtgttactaagctcacaaatttagagcacctaaatctgtcatgctgcattagccttgaaaagatgcctggagactacggcagcttaaagaaacttaagcttctgaacatatcatattgttttaaggtccgtatccctaatggcatagccaatatgtctaacctgaaatgtttgatggcggttgggttggacggttactcttgtgggaataaggatgatttcaatattgtaagtagcttactgtgtatgcctaggatagatttgagtaaaaaggacagccccattggtgacttccatgggatcttgaagcacaaaagactacatctttttggtctcggcaacgtgcaaagcattgatgagtttgagaacttgggattatgcaggcatcagcagctcaactcactaagacttagtagctcctacatgaatggtaatgaagtggctaaatttatcccagatgacattgtacttgaaaagatcatacctccaaggaccctggaacactttgaacttttgggctatcatggttcagaatttcctgagtggatgctgaatctgacaaccattttgccaaaccttgtacaccttaagctttctggccttgctacatgtgaccatctgccgcctcttggccagctaccaaatttgcagtccctggtcatagaatgtataccaaatgtcaaggctgttggagaagtttttgctggtggcagcagagcgtttctgaaattaagggacctcactatcagtggtatgccaaacctagaaaggtggctgacaactctatcaactaccaatgaagaggcccatgtgtatgtgttccctaaccttcaccatctgaagcttccattcttgcggcagctacaaattgtttgttgcaacgctaagttagagttacctggtgaaataaccagagccatcttggctcgtattccaaatatcagcatacacaatgtcggatgtgtcaggcatatagaacaggagaatggtatatgccaaaatgtttcagttgacaagaatccagcagttgttgccaggaggatggttctgaagtcaccacgcctaaggatcaaaaggcctgtcgtagtggcacagctgatgaagggcagccaccgcaagcggcccgcagccaggaaaacaagaactggggacaaggcttcgagtagcacccgccagggaacgccgaatgacagcaatatcacgggtgaggtagatattggagatcttatcgacttccttcgggaggaagtcattgaaaaaaatgcaaacgtgaaggcggctcaagacggcttcgccaaaatgcccactgagccat

SEQ ID NO: 31602 - DNA, 192 bp, Zea mays
  Peptide Sequence Number=SeqID_73381
atgggactgcctagtcgaggagaagcttcgctggcgccgcgccgccccgcattcgtcgacgagtggataagatggttgggaattgcagatattcatgctaaatcactgtttaaacgattttcattcacagttcgacaggcccagtgctgccggctcccatatgagtggggtagtaaccgagccaagacttaa

SEQ ID NO: 31603 - DNA, 1524 bp, Zea mays
  Peptide Sequence Number=SeqID_73382
atggctggatcttatgagagtgatcaacttgtggatcatgaaccttttcaaaggagtaatacatctgactggcattctggaatggacattgatggttctgaagtttcagaaaatagctccttggtaaagaacattggcaaagttgttcgtgatcttagatgtattggttttacatcgatgactgaagatgcttattcctctgcaataatctggcttttaaagtctaaggtttatgaactagctggtgatgattatagagtgtcagtcctttggtgtgtgaagaagtggattcagtttctgcatgctcttttaacatatctcggtgactctgtggaccatggcagtggatcttctggtctcaaatcaccattagcttcacgcccttcttccttcccagggattggtgttccttctgaagcccttgtgagatggcacatgcgccttgaatattttgcttatgaaaccttgcaggacctacgaattggcaaactttttgaaataattgtagattaccctgagagctctcccgctattgaagacctaaagctgtgtttagagtacacgggccaacactctaagcttgttgactcatttatctcatcgcttcgatatcgtctacttactgctggtgcatcaacaaatgatatattgcaccaatatgtgtccactataaaggcattgcggacaattgaccccaccggggtgttcttggaagcagttggtgaaccaattagggattatctgagaggtagaaaagacactatcaaatgcatagtgacaatgctaactgatgggtcaggaggaagtggaagtggaacaggcaatgcaggtgacaatcttctggaagagttgaacagagatgctgaaaaccaggaaaatgctgattacgacgatcatgcaaacattgatgagaaacaagcatggctcaattctgaaagctgggaacccgatcctgtagaagcagacccattgaaaggcaacaggaacagaaggaaggtcgatatacttggactaatggttagtataattggctcaaaggaccaactagtcaatgaataccgtgtaatgctggcagaaaagctgctcaacaaatctgactttgaaattgattcagacattcgcacattggaactcctgaagattcattttggtgagagcagcatgcagaagtgtgagattatgcttaatgacttgattgactcgaagagaaccaattcgaacattaaaacatctttgctgaagtcatctcaaactgttcctgggcaagaggaggcagaagtgtctcatgatgttttggatgccactataatatcatctaatttttggccaccaattcagcggcgctacccggtggacaaccttccgttcgggaccggatccgtggcctccctggtctgccttggtcgtggtggctggtggtggcggctgcgtggtccccgcgatgtggcaagtgttgtcggcgggtatcgcattggtgagcagcgggctggtggtgcgggtgctgctgctactggcgtcggttaa

SEQ ID NO: 31604 - DNA, 780 bp, Zea mays
  Peptide Sequence Number=SeqID_73383
atgccgcgggtgccgtcggtgctgctgctggcggggacgagcacacccaccggaacaaaacgcaaccgagaaagagtgaggctgacaggagccaagtccggcctcggcgccataggaagctccgcctcgcctgaccccagggctcggactcaggctcggccccggaagacgacgaactccgcctcgcccgaccccagggctcgaactcgggctcggccccggaagacgacgaactccgcctcgcccgaccccagggctcggactcgggctcggccccggaagacgacgaactccacctcgcccgaccccagggctcggactcgggctcggccccggaagacaacgaactccgcctcgcccgaccctagggctcggactcgggctcggccccggaagacgacaaactctgcctcgcccgaccccagggctcggactcgggcgccgtcccggaagacgacgaactccgcctcgcccaaccccagggctcgaactcgggctcagccccggaagacgacgaactccgcctcgcctgaccccagggctcggactcgggctcggccccggaagacgacgaactctgcctcgcccgaccccagggctcggactcagccctggcctcagccgatgatctccgcctcgcccgacccaagggctcggactcggcctcgacctcagaagacagactcgaccccgacctcggaggagcctccgcctcgccctacccaaggctcggaccgaccacgccacaggaggggccatcattaccctacccctagctag

SEQ ID NO: 31605 - DNA, 870 bp, Zea mays
  Peptide Sequence Number=SeqID_73384
atgagcagcgcccggcggcgccgcttcggcctggaggcgtcgcgggggatgctgcccctgctggctctgcagtatggcgacttgacgcgctttttcctgtcacccttctaccacttgagtgaaagtcacctcttctacaacatgacgtcgctgctgtggaagggcattcatctcgagacatcaatgggtagtgccgagtttgcttccatggtcgcggtgctgcttggcctgtcgcagggtatcacgctgctcctgtccagaggcttactcttgctcggtgacgataccatgtactatgatcagcatgccgttggattctctggtgttctgtttgccatgaaggttgtgctgaacgcctggtcagacgatttcgtgtatctgcacgggatggttattccagcgaaatacgctgcctgggcggagttgatcctcatccaggtttttattcctgggacatcctttcttggccatcttggtgggatacttgctggactggtttacctttggctgaagcgtgcatccaatgggccagatccgatcactcttttgatctcaagcgttgccaatgttgtgacctggccagtgaggttcgctcagaatcttctacggtctgcccgttcacagggccgcgtaacaggtcggggcagggttgggcgccgcatatcagcaagagatagccctcgaggtttttggagatgcccaacctgcacctatgataattcagtttccacagatatctgtgagatgtgcagcactgcacgagataaccatgcttttttgcggagacagcatcatcaagccgtaggtaacacggtggaactccctgttgatgagatgcgccgtaggaggctgcaaaggtttgacagatga

SEQ ID NO: 31606 - DNA, 447 bp, Zea mays
  Peptide Sequence Number=SeqID_73385
atggacaagagcaagaaaggaagtggttcttcacaccgttctagcgacaaacgcaagcgcgagccgactcgtccctcggaggacttcggcgattcggagtactcggaggaggagttctcctccgagtccgagggctctccggctcccgcctctcccccagcgtcgtctgatgattcaaacgactctcaggggattgccgcggaggtctggacttacatccgggccgtcgagcgctccgggctcgagggctcggatgagtcggagtattcctcggacgaggaggactcctcggactcgtccgaagagggcagcggcggcgatggcggagacgacgacgacgacggaggcgacggtgacggcggcgacgacaacggcaggggcggtgacggcggcgacgagggtggcagcggcggcggcagcaagggcagcaacaaggccagtggctag

SEQ ID NO: 31607 - DNA, 897 bp, Zea mays
  Peptide Sequence Number=SeqID_73386
atgggccgtgggccgtggcttttaccggctgaaaaggaaggcgcttcagcacaaacggacgaactccatatggaagcatatgctgggcccacaggccatcttcttccagcagggcgactaccacgcccgcctccgccgcctcgtctcccgggctttctcccccaggccatccgcgcctccgtgccgaccgtcggggccgtcgcgctgcgctcgctccgctcctgggacggcctcctcgtcaacaccttccaagagatgaagctggatgggagttgttgttgctgttcttgttcttcttcctcctacatcacatgctctgttccgctccgtgcctctgttcgttgttgtatcctgtccgtctgcttccccagcctacgcgtggcccagcgctaccccccgctggcccactcacgcgtcgctcgcccacccgccccgcgcacgctgcgcgctctgcgcggggacgctcgcccacccgcccgcgcacgctgcgcgctctgcgcggggacgctcgcccgcgcgtgcatgcactccccaggcgccgccaagccctgtttctttttctccgaccgtcctgcactcatgtccttggccctcgccttccctctccctcggatgacagttcacttctctctcacacaccctgcccagcgcgctggccctccgccttctcgccgcatggaagagctccccagccagcccagcgcgacgatcggcgtgactcacctgtgcagccccggcgcggccagcgcagcctgcgcattccgtatcgacccttgcgcgaccccggtgcagcagtctcgccgtcgtcgtgcctcgtcacgagctcatctcgccgtccgctgttgtcgcgaggtgagcttcgtctaccctggtctgcacataattagcatgttgtag

SEQ ID NO: 31608 - DNA, 111 bp, Zea mays
  Peptide Sequence Number=SeqID_73387
atgtggagaagaagcggcgtccgtggtcaatttatagcctaccggccggaatcggatgagaaccgcggacatttgattgcgcaggtctacaagtttgatgtggtaacctag

SEQ ID NO: 31609 - DNA, 213 bp, Zea mays
  Peptide Sequence Number=SeqID_73388
atggagagaggaaaggaaaagggagagaagaagagggcgagctcacctcggcgagacacaggcgacctgcacggcgacggcggcgctccgggcggggcgcggctgctacggtggttcatggcgagatcgtggcgagaaagctggggcgacgagcggaacaaactgcgcaactggcgaagaaaactgcgcgtcgggcggtttctggggagataa

SEQ ID NO: 31610 - DNA, 777 bp, Zea mays
  Peptide Sequence Number=SeqID_73389
atggggtccaggcacagtgcttgctctgccgaggctgagtgtcgaggttctttcgttttgcttttgttagtcaccctcctgcggggagaggatccatggaacgggttctacaccctcgtcgagagtgggggcaaagtaaccagtttggctaatgctgagggggttgcagctagagcagtgaaggccttcacatgggccactgaggccatgaagcctgctgttgagaagttttgttatctggaggctgcgaaggtagagttggaggccaagattgaccgtttgctggtcgagagtaccgataggatgcaagccaagtcagctatggagtcaaagagctggcgcctcctagagatgggacaggctacccacgagcgtgttgccgcactagagtctgaattatcaacagtgaaggccggtcgagagagggtggagattgtgatgagtgtcggcatggggagggctcatgcgttattctgcgaagcttatcacgactttggtgctgagacgacgccctttgacagggccgggaaggggctggtcacccgtttccttggctggttgcaggaggagctagcaagtcttcccttgatcgtgacaaggatcatggcttatgcctcccttgtcacatgtgagggcgttgtcaatgcactatgtcgtgaaggctgtaagcacttcaaaacttttgagcagagcaacttagacttggatcgagaagtttttcatgtcaaggacctgtcttttaagcgtcctactggtgccctatttgagcgaatgtag

SEQ ID NO: 31611 - DNA, 903 bp, Zea mays
  Peptide Sequence Number=SeqID_73390
atgacggctgcgagagcactgcgaggcgctgtgcacgcgcgatttgacgtgcgtgacacggctgaagggggcgattcgcccgcggcggagtgggccaggcgcaccggcgaccagagggatggggacgagctgggcatgcggcaagcgcagcgactcggctgcgacgcgcaggggcgaggcacgctgcgcagttggccggggctagggcctcctggccgcaaagctgggcagcgacagagcggggtctcgccggtgaagcgggacacggctgctacggcgctagacgtcaacgcggctgggcgtgctgagcggccagaggaggaggagacacgagggcgtccgggccggctcagccgagccccggtcgcggcgagcgaacggcgaggaggagagcaatggagagaggaaaggacaagggagagaagaagagggcgagctcacctcgccgatacacaggcgacctgcacggcgacggtggcgctccgggcggggcgcggctgctacggtggttcgtggcgagatcgtggcgagaaagctgggcgacgagcggaacaaactacgcaactggcgaagaaaactgcgcgtcgggcggtttctggggagataaacagtagtgctggcttcctgacacgtgggtcccactgggtggcgacggcagcaggcgctccacgcactgggcgcagttgtgtacgcgcaacgcgcgcttggccgattctgcgcgcgcggggcggagctgggccgcggcgctgtgctgggccgccaggcgcgcgcagtcgagctgggctggcgggcgaggcgcggtgggggagctgggttgggggctggcgcgcgcgcgctgggaagctgggggcgctggcttgggccgaggccacgcgcgggcccacgagggaggaggctggcgcg

SEQ ID NO: 31612 - DNA, 1287 bp, Zea mays
  Peptide Sequence Number=SeqID_73391
atggccgtgtcgccggaccagcagcagccacctgcaggggtagggtctcccttgccgtctcctcgcctccgcgtccgcgtccgcgacaccaccctcgtgccgccgtctccgtcaccaccggagacctcgctcccgctcaccttcttggacatcttctggctgcactccccgcccgtcgagcgcctcttcatctaccgcctcgcccccgacgctgacgtcgacgccatcatctccagactccgggactccttgcaccaggccgtccgcgccttctaccctctcgccggccgcctccgcctcacccccggcacgtccgaccgctacgagctgcactaccgcccgggtgacgccgtcaccttcaccgtcgccgagtgcgacgacgatgacgcggacgcgcacttcgacgccctcgccaccgacgagccccgcgaggttgccaagatcgccacgctcgtgccgccgctgccggagcgcggcgggctgttcgccgtccaggccacgctccttcccgcgcgccgcggcctctccatcggcgtcaccgtgcaccacgccgcctgcgacggctcgggctccacgcatttcctgcacacctgggcggtcgcctgcagagccggcgcagaagcgccgccgccgccgccgcctgtcatcgaccggtcactcatcgccgacccaaggcgcatgtacgacgtcttcatccaaggagcgccgagcactgaagagtacgagttcgtcaagatgtccgccgaccagctcttcgctacgttcgcgctgtccaaggacgaactgaagcgcatcaaggacgctgtggccgaggaggctgcgaggcgcggcgtcgcgccgccccgcctcccctgccgggacaagtacctcggcaactgcgtcggcccagcgttcgcgctggcaccaacaggcgagctggcccaggccggcgcaggcgggttctttagcgcgtgcgccgccgtcgcctcctccatcgacgaagctgtacgcgacatcgagacatcaaacgtggaggtgtggtttgaccgcatcagggatttaatcccgatgggttttctgaccgtggccggttcgccgaggttccgcgtctacgatatggacttcggattcggccggccggcgaaggtggatgtcgtgtccgtggcgaggaccggcgcagtggcggtggcggagagttgggatggtaacggcgggatagaggttggggtctctctacagccggctgccatgaagaggtacaggaagtgcttcgcggatgctatcgcgtggctccaccagaggacatga

SEQ ID NO: 31613 - DNA, 702 bp, Zea mays
  Peptide Sequence Number=SeqID_73392
atggaggtcttcgctaagaactactgcctccacaggcagaagaaggatgctggcgacaagattgtgcagtttggtacgtttatcttttcatcgaggatgggtaggacctcgactgaagtcatgaagcttgtgtcatgtgtgaagaataagtggggaactggtgggactactagttacttgttcagatggaagacaacaaagggttgcgagggtaggactctagcatttgtcagggaggtggaggccaaggcggtgaagttcatcaggaagtattcaacaaagacagggttgccaagaagttgggctattcgaggctccaacggcccctatccagaggaggccaccgatgacgctgatgatgttgtggtgggcaagaaaaaccggctaggcaaacatgtcgtaagggatgaggggtcctctaaggggaaggatgtggtttcaccgttaaggaagagaaagaagtctaaacttggctcgactggtggcgatgttgggggtcgtggtttagtgcaaggggtgaaggctagttttaccgaggacttggctgggacatgcgcgaaaccgtgggaagttatgccttcggctactctccgggaggccaccaaactaatgctaaagatgataggggttgagtggcacaatgacgtacctgtccctagggcctctagcaaagactatattatgtcttggctagcttggtga

SEQ ID NO: 31614 - DNA, 315 bp, Zea mays
  Peptide Sequence Number=SeqID_73393
atgctgtggggtgtgcgggcgggattcgcggctggcgctggtacgtgcgggcgcttcggctgcggatggctgcgggcgggattcgcggctggcgctgctgctgagcttgtctgtcatcacgtaagaaaaggtcttggactagacttcaaaaatgcgtccaaaatctgtgtatccgtggagcaagacaggctgtccggatactttaaggatgtgtttggttgcttggcccaacctgagccaggctcaaaacagaattgtatgaactataaccagcaaacagaattgtatgcagaaacagaattgtatgaactataa

SEQ ID NO: 31615 - DNA, 1620 bp, Zea mays
  Peptide Sequence Number=SeqID_73394
atggacccagcggggccgcgcgtggccacggatcccgccggatcgggtgccgcaccgccgcgcgaggaattggacaggagaggaggggcgtgcagcggcgccgcagcggcggaggggagcgcgtcgcggctcgcgggcgctggactgggagatccgagggctggaattctggaatcttcaggtcaagcagaagcatatttgcacacatgtaccatggatgtttctcagttgactgctgaaggtgtcacccagtgtggagctagagtgtctttattaccccagattggggcacttcagtcagaaactccttgtctgaccttgggccgtgattccagtgcagaatcaatggagaagctgcatggcagtgagtccttgccatgctgtaaagagaacatcggaacagttcgccaacctaagcctgatccagaacatgttgacaataggatgagtgttgcacgtcttgggttggaccttaacacagtagatagttctgatgcagcagagcttaaccctttcttcccttacaagaagctgggacagtcgaaagtcagtgatccatcggaatgtggcagcactactgctgctacagcagaaagtgagtcacacaggaaatggagagaaatgaagcggaatggctttctttcttcgtctcatggaaatgcagtggtgcctaggccacgtggtcggcccccgaaaaggaaaaaagatgatgaattcaaaaggagcacttccacacagcatggccaggctaacaagtctgttaaggttgctgctcctagtggcctattatctgggctaaaccctggaatcattaaccatgtgagaaatagcaagcaagtttactccataataaaggctatggtacactctgagaggcttgagaatgagaagcagcctgcatttactagtcaaacaggtggaagagggagagaagccagtgagggaattcaggatgagaaatatggtgctggtttcaagaagtgccatatgttgatgaaagacaataatgcggtgtttcaccaagcactgcctaccacatcacagttccttgcacaggacggcgataggctcaaactgcaactctcatcagcagtcactatgtcttcagacagggcctgcagtacatcagctgatgatccagcaactaatcatgattacatgactgtactgtcagtaaaagctttaaagcgcagcaggaagagagtcagaaatgctcttcatacagaattgccttacctaatctcgacagaattttcatctaaccaagagaatgaatcatccattgcaaatacgtgtgatgctggatgtactgaaaaagcagtttcagaagcgcatgtggcacgatggaggtctctgtttgtccagatggaccgagcacttcaggaggaagggaaacagctggagaaccggttgaagcaagtgcaagaaatgcaatcgaattgtgataaaggcctcaaacacatgagctgtgaagctcctctgctaggacctattcctgagctatggaagctgaagaacccagatatttctgagagtgagtgggcggtgcaagctgccgccgcatcaatctactcgacctgcaacatggccatgagaacggagaacgtgccttgcttctga

SEQ ID NO: 31616 - DNA, 156 bp, Zea mays
  Peptide Sequence Number=SeqID_73395
atggagagctgggagctggcagctctcactgattttcagaggcgtttctcttcaactctcggaatgaccaatcaagctgttaacgcagcgaaggaggcagttcagcgctcagaggaccttgatataaggtttggaatttcagactctacatgctag

SEQ ID NO: 31617 - DNA, 1848 bp, Zea mays
  Peptide Sequence Number=SeqID_73396
atggccggcgccgtctccgtctccgctcaccggcggcaatggcggtacacgtgggaagccctaaaccatcttcccctcctccgcctctacctcctaccccgcgccgcgctgcccttccgcatcccctcggacctccgcgccgacctccgactccagggctctctcctccacctgtccttctcgctccccggggacggggctgccgtcgcgctcagggtccccgtcccgagggtgctcgtagacccttccgcccccgtagagtgccgcgccgccgccgcgggggaccacctcgagctccgcctcgcgctcgtcctgcccgtcgaccaccctgtcgtcgccgccgcgttccctccaccccccggcgcggagcctccggcttctctagcgctgcgcgatgatttgaagagtttatctactggagacgttcacttgtattgcaaaaattgttcgtcaaggttgacaaaacagccactaagactagagtcagattgcttgtatcttccaccaaaaatggatgttgataatcctagaaatcttattgcgaatagtaatgcgaggaaaatcatggaaatgccatctgtagattgggtagatgtggctgacaattgggttggtggatgttgcacctcatttggtggtgcaggcgagaaacttgtatctcagtttattagggcatatggtcgtttagaaggaacaagtctactggatgcaacttccattactgtagaaacagacaatcttgaaacagatttagtgtctcaggtagcttgttcagcacttagtagacattttgttgctataaaagaagatatatttaatgttagtgtagaaaaagatcataccactgggaagataaagttgaagaattcagaagagcaagcaaatatcacagctactcatgcacaaccacctattattttggaagaggggcctagtgttagttgtagtgaaacaaacggagtcactcagactaatcagcctggcatttctcagacagaagctgatactgatgcatactttgagaagtctgaaaatgactgttgtgttgagaaagtggggaaatctaagaaagaggttgatttgttgctggtagatccatgccgttgctgttgtgtcaatggatacagtgagaaagctgaagataacccttcacagttgtccttggtcaatgagaaaaagcagaatatgttggagattaaaagagattacaaattaacaaaaactatttctcttggtagtagcttcattgttaaagcatctaaccttttgaatgattttgagtgggttgaacttctctgtggtcaatgttcatcacctcttggctcatacccttctcagtgttcgcttggtccagctgatggccgcctacgactcttcaagtgctacacatctacagaaattcctgtaacagggcctcatgatgtgtttagggggcatacattggaaagagtttttgtgaatctgttgcttgaagttgcagaagacgaaatatcttttcgcacattagtcagagatttgaaaaccaaaaggcccatgctgcaattagttcttcttagttcaaaagcatggttatcttctggttgctgttatgaaaatgatatcgatggttcacatggaacaacagatctgcagccaagtgttaaactcttgtattctgattatagcaatgcttcagaagcagatttaaggatagtagaagcgtgggcatccaaatatcgggctgaagagctgtacatgatgaagcgtcagatagacgaacttactgaatgcctaagctcaggaaggaacaactttccagtttcttgttcttcccttgaagggatgcggctctcatcgcttaggcgctga

SEQ ID NO: 31618 - DNA, 345 bp, Zea mays
  Peptide Sequence Number=SeqID_73397
gtgcaaggtgttccgcgactgcactggtgggacaaggcgaggttcctgtcggtgctccggcggtgcgcggccagcggcaaccccgaggcgtcctacatctttgggctggagctgttctgcaaccggccggggagagaagccagcgggctccgccgcgccacggagcgcggccacgccgccgcggcctacatggtcgagatgctcacgctgcaccacgcgcactcgccgcctggcggcaccgagcgggcgctgcaacgcctggactactgctcgtccgccggcgctggacacggcgcagggccgcctccgtccgcagagaggccgtgtcgttcgtgcgcaggctga

SEQ ID NO: 31619 - DNA, 708 bp, Zea mays
  Peptide Sequence Number=SeqID_73398
atggcgcctcccgttgacgtggtcggcccgcgccctaggttgggcgatgtggaggctcctccgaggtcgaggtcgagtccgtcttccgtggtcgaggtcgagtccgagcccctaggtcgggcgagacggaggccgttggctaaggctagggaagagtccgagccctggggtcgggcggagcggagttcgccgtcttccgaggctgagcccaagtccgagccctgggtcgggcggagcggacccgagtccgagccctgggtcgggcggagcggagttcgtcgtcttctggggctgagcccaagtccgagccctaggtcgggcggagcggagttcgtcgtcttccgggacttagcccgagtccgagccctgggtcgggcggagcggagttcgccgtcttctggggctgagcccaagtccgagccctgggttgggcggagcggagttcgccgtcttctggggctgagcccgagtccgagccctgggtcgggcggagcggagttcgccgtcttccggggcttagcccgagtccgagccctgggtcgggcggagcggagcttcctatggtgcctgcggccgggcctgactgcctgtcagcctcactctgtcgagtggcaccgcagtcggagcggcgcaggcggcgctgtctttctgtcagaacggtcagtggagcggcaaagtgacggcggtcacttcggctctgtcggctga

SEQ ID NO: 31620 - DNA, 705 bp, Zea mays
  Peptide Sequence Number=SeqID_73399
atggcgcccacggatgaatcggctgctgatacgccagcgccaccaccgccgccacctcacttcgttatcgtccccctcgtggcgcagggccacaccatccccatggtcgacctcgccctcctcctggcggagcgcggtgcgcgcgcgagcctggtgacgacaccgctgaacggcgcacggctgcgtggcgtcgccgagcaggccgcgcgcgccaagctgcccctcgagatcgtggagctcccgttcccgacggacgtggacggcctgcccccgggcatcgagaacatggaccaggtcacggacaacggccacttcgtccccctgttcgacgctctgcagaagctcgccggcccgctggaagcgtacctgcgagcgcaggcgccgcgcccgagctgcatcgtctccgactggtgcaacccgtgtgcggccggcgcggccagaagcctcgggatccatcgcctcttcttccacgggccgccgtgtttctactcgctctgcgacctcaacgccaccgaccacgggttacgcgagctggccgcggcggcggcggcggctgacgtcgacgacgggcaggagaggttcgtggtgccgggcatgcccggtgcacgtagaggtgaccaaggccacggcgccgggcttcttcaactcgccgggttcgtgtcgtgctacgaggcggcgctcggcaaacccgtgacgaatctctag

SEQ ID NO: 31621 - DNA, 549 bp, Zea mays
  Peptide Sequence Number=SeqID_73400
atgactgcttctgttggcatgcaagctcgagtgctcctaaatggtcgtcgtattagctgttatgacatcgatctgaacaggccatgctcgtggcttggtggtgccgaagtgtgccgtgacattggaattattctcgccaagaagggagtagtagtattacctgatatctatgctaattcaggtggcgtggtcgttagctacttcgagtgggtacagaacattcaaggcttcatgtgggctgaggagaaagtgaacgatgaactagaaaagtacatgagcagtgcttttcaacacatgaaggccatgtgcaaatctttggtgctgccgaaggtggcggttccctcgggcgagcgagcggcggtggcggtttcctctggcgtgcgagcggcggcgatcccgggggctagcggctgtggcgcgccgaggcgggcgaccgacgacgacgctcctatggcggactggcaagcaccgacggcgctcctgagccggacgagcggcaacagtggcggtttcctcgggcgtgcaagcagcggcaatctcgggggctag

SEQ ID NO: 31622 - DNA, 315 bp, Zea mays
  Peptide Sequence Number=SeqID_73401
atgatggaccacggtggtgaagaggcagtagccatcaacgttgacctatttgtcgtggtcgaggcgaaagaccatgggagtcggcgcccgtggaggacttccacgcgatgccccgctcccagatctggtggaggtggcagaggggagggggcgaggagaggaagcgagtggggtgcagcgaccgacggcatgtcgtccatgacaggggtgggtgacagtaggtgcgtcgtgtgtggtggggcgggcgcagcggttgccgatgccgagggcatcgcccgagcggctaaggacaaggagctgtgtccaagggcgtaa

SEQ ID NO: 31623 - DNA, 306 bp, Zea mays
  Peptide Sequence Number=SeqID_73402
atgatggaccacggtggtgaagagacagtagccatcaatgtcgacctatctgtcgtggtcgaggtggaagaccatgggagtcggcgcccatggaggacttccacacgatgccccgctcccagatctggtggaggtgatagaggggagggggcgaggagaggaagcgagtggggcgcagcggccggcgacatgtcctccatgacaggggtgggtgacagtaggtgcgtcgtgtgtggtggggcgagcgcagcggttgccgacgccgagggcatcgcccggggggcgaaggacaggcggccatcgtaa

SEQ ID NO: 31624 - DNA, 234 bp, Zea mays
  Peptide Sequence Number=SeqID_73403
atgacttgcatcgagctgagtccttacttcggaaacaaagtaactcgcgacaccccgggtgacttgctaatccagagcaccctaaggtctctcccccagggggcaggatctaggtcctatgaggataagatgaccctacgccattgcggaccgtccggcccagagcgcggacgtctggacagcccgcaggaaaggcaccgcttctaccggcaggtcacagaccgtctggcctag

SEQ ID NO: 31625 - DNA, 345 bp, Zea mays
  Peptide Sequence Number=SeqID_73404
atggctttggcgcactattccacgatccgaaactctctacacaatttacaggccatagtgaatcgtagtggagagatctcaccggaggttttgttgcatagactctcgtccacggcaccggcggttccactgttgctgtcctacgactttgggtgtgaacgggaaggaggagggaaggagcacccccctaggtccacgcgggagattagtagacgtggtcaaggctgtcgagcggcgccgtacttcaaggggcagcgcacgtggggaaggagacttggccgcgtgactgggattcggttggggcctccgagatgcgcggcatttgccaagttcgatacgagctag

SEQ ID NO: 31626 - DNA, 1701 bp, Zea mays
  Peptide Sequence Number=SeqID_73405
atggcctctgccagtcagccctcctcgcagcaacctccacctccaccgctcactgccgaaatcgttctccgcctcgcctcgcgcgacccctccaccgcggtgcccctcctcccggagctcccgcccgacgatctcgccgatatcgttgcctcgctcaccgccacctcccccgcgggccacctctcccttctccccgcgatcctcgctctcttaccctccccatcctctgcctcctccgcgttcgccgctctcctctccgcgcccagctggccctcctccacgctcctcgccgtcgccacactactccgcgacctcccgccggcctaccgcacccgcatccccgccttcctcgggaagatcatctctctccttccaagtgcggatgcccaggacctccctgctctctcctaccagctcctcctgctcgcgtccaagccgctctacccgcgcgtcgtcctcgcgggactcctgcgcttcttcggcggccgccgcggcgcccgcgttcgcgcgccgccgtctatcgcgcggcaggtcgagagcaccgcgctgatgaacgtctcgttcgcggtcaagcaggaccccgcgctggcgagggaggtcctggccgccatcaaggctgacgccgcgggcgctctcagtggatttgcggtggcagtgatgctgttcgtggccagggtgccgaggttcaacgagggtgccgtgagtgtgctccgggatgcggtcgtggtgtcccgccgggattaccgaatgtcaagatggcggatgtctctcaggcggtgcaagtggttgccggattgtatggaaggggaatatgcacgggccactcaatgtgtcgagaagggaatactaaaatctgtcgacgagagcattgttggcagggagcatgttgtgccaagcattgttcaggtggcttttcgcctgttagaagtctcagaaggtgatcaaggtgaggaagctggcttaggtgaaggagtaatgagcaccgaagaaataggcattaatatgctcaaatcattgtttgaggtccatgaaatggcacggactgagataattgaacagtgcaagttccggattctctcggcaaagcctcagcaaagtgtgccagttctcaggttgattggatgcttgattttgagtcatccatttccaatgctggaattcattgcacatttaaaggagttgttggattatttttcttttatgaatgacaagatatcaactgctttgatcagttgcatcttgccactcacaaagttcagccgtgatctgaaggattacgtaatactggttgtaagaaaggcgatgttcaagagggaggacatggttcgaattgctgctacaaatgctataattgagctgattattgcagaaaacaagaaaaatgaagccaatccttttgaagattcaacaagtcagccaagctctagccaacagcctgaaacacatctagagtttggtttcactggtttcattatgatgtactaccatacaactgcttcatctctagccagtgtcaaagaggtcttgtacgagggtcttatacgtactgctatctctgatccagctgtttctgacaatatccttgattttctctggcctcacttccaaaactattactcagagttggcctcatgggtttttgtttctgatttttttaggatgcagaatgtcctcttaaaattggttcatgcttcaaagtag

SEQ ID NO: 31627 - DNA, 285 bp, Zea mays
  Peptide Sequence Number=SeqID_73406
atggatggtacattaatcagcagccatgctgcctctgccctccgcagcagcagggattataataatccatatccaacaatcaattattctgccatggatggtacattacagcctgctgttggagctgacagaaggaaaggggaggctcaaggcaatgttcttgttgcatcaattgagaatatgcaatatgctgttactgtagatgttcttcaaactgtgttctcatcatttggttcagtccaaaaaattgctatttatagaagaatggggggacacaagctttga

SEQ ID NO: 31628 - DNA, 231 bp, Zea mays
  Peptide Sequence Number=SeqID_73407
atggccgagcctggtcgtggtggtgttgtggtgtggcgatgtcgtgcgcgtcacgacagctgtcttggtcgcgaagcagtccgagccatagagttcgcccggccacggtctcgtcaaattgcgaagcttcctcgccgtacgttaattaatcgcgtgatgcggaagacgagccaagttgaccccaagcgcgggctaatccgcatggtgatgctgatggacgaacctgcctga

SEQ ID NO: 31629 - DNA, 1467 bp, Zea mays
  Peptide Sequence Number=SeqID_73408
atggacgccaccgtcgtcgccatcgccgacgaccatgatgactccgactgccgccgccccctgctcgcccagaacgaagagatccacctctacacagagccccctaaccgtcaacatcctccactggatgctgcggcgacgcagctcgaggagcagcggaagccggagagagtggcctctctggacgtgttccgcggcttcaccgttgccgcgtggactctggttgcgtgcgtagatgatgatactcgtggacgacgccggcggggcgtggccgggcatcaaccacgcgccgtggttcggggttacggtggcggacttcgtcatgcctgccttcctcttcatcatcggcgtctccgccgcactcgtattcaaggtaatgttcgactgcagaaaatggcaaacaagacagctgcaactaagaaggctgcaattcgggcttcaaaacttttcatattgggtgtgattttgcaagggggatacattcatggacgacacaaattaacttatggtgttgatttggatcatattcgatggctaggtgtgttgcagaggatagctattggatactttgtagcagcaatgtcagagatttggcttgtcaacaataatttggtggattcacctgtaccatttgtgaagaaatacttcatagagtggatagctattggatactttgtagcagcaatgtcagagatttggcttgtcaacaataatttggtggattcacctgtaccatttgtgaagaaatacttcatagagtggttcatggccatagctattacagtactttatgttgccttggtatttggcctttatgttgcaaactgggaatttgaaattcaaactagcaattcaaccctttctatcccaagcaattcaattgaaacaaagatgatccaatgtggagtcagaggtagtcttggaccaccttgcaatgcagttggcttggtagatcgagttttgcttggtgaaaatcacctatataagaacccagtctacaaaaggacaaaggaatgcagtattaattctcctgattatggaccacttcctccgaatgcaccagattggtgtctggctccatttgatcctgagggtttattaagcaagcctttgtatacagtgaactacatgctactcactggaggagtatctgggttcttgttgctgctgttgtactacatagttgatgttattcatattaagaagcccttcgtactattccaatggatgggcatgaacgcacttatagtctatgttctcgctgcttgtgagctattccccacccttattcaagggttttattggcggtcacctgagaacaacctggtggatgttactgaatccctgctccaggccatcttccagtcgaaacgatggggcaccttggtgttcgtcctcctagagatagtcttttggtgcttggccgccggcttcctgcacatgaaaggcgtttacttgaaactgtag

SEQ ID NO: 31630 - DNA, 237 bp, Zea mays
  Peptide Sequence Number=SeqID_73409
atgtggctcaaactgccaccatcgtcgtcgtcgtctccgtctccatcagggtctcctccagcaactgggatgccctgtgctggtgcagaggcatctctggctgaggtgatggggaaggatgcctcccagactccgcctcctgctgaggcgaaggggaagagtcttattgctcctgctcttagcgtcgacgctcctacttcttgtgcaggcggtgatgcagtctctacaggtggctag

SEQ ID NO: 31631 - DNA, 414 bp, Zea mays
  Peptide Sequence Number=SeqID_73410
atgggcacgacaccagcgcagaggctccagagggtgcggtccgcggcggagcagcccaatggcggcgcaaatcactctggtgagcgattgcgtggacaacagggcattacacaggaaattaagggtgtgggggagttgctcacctcgagaggggactctggagcgcttgagcaacggtggggacacatggaggccttcggtcgacggcagcggagctccggttgcacagggagaagaccggtgagcgtggactgggcaaaacagaggggctgggggcaaaccagagggtgtctcgcgttgctggcaaggagacggagctcaccaaggcaacagacgcgacagaagctcgacgacggtgaaggaacagttgtcagacctcagcgaagctccacgggcgcgcgcccagtgccctag

SEQ ID NO: 31632 - DNA, 537 bp, Zea mays
  Peptide Sequence Number=SeqID_73411
atgggagcaagcggcagggtaggtggttgccggaacctgggcggcagacggcgagctgttggtggaatgaggggcgccggagtagcagcttcaaattggaatggaaaaggctctttcctattcacctcgagtactgctgtgtatgactgcagtgacaatggattctgcagtgaggattctccttgtgtacccattggtcaaagcactcgtactgatgtgcttctaaaagctgaaaatgttgtccttgaggcaggcggctgtgttcttaggctagatgcagcctctcttgtaatttccatcatgaaaaagagattacggagctgcatctttgtgggttgtgacaacgagcctctgtccaggctagagatcatggaccgtgtcaacagaagcaggaaatttgacacacagtttcatggcttcactgggactgatggtccgctggggaagaggatggacaactccaaaactcgggcaaagcttggatggcagcccaagtatccgagctttacagagttccttggtctcagcaatctctaa

SEQ ID NO: 31633 - DNA, 942 bp, Zea mays
  Peptide Sequence Number=SeqID_73412
atgcctggaactttcaaggacgcgctcctgaggacgacggcagtggacgctccccggcgggttcggtgcgggagcttccgaagtcgcccgggattgcggtcaaggcctccattccctcctggcgtcgccagtggaaggcctcgagcaacgtccgctcgagtgatgatgggtggcaggtcgtcaagtccctttggacctccgaggctccctggtcaccgggttgctatctgtccagttgtacctagtccggtggactcacccatgcaagttgctctgccggggcctctgttcagggaagggcctctttttaggatcaagcctccccttccaagcgtggaagaaagcgacggaggcgccctcaccataagagcacggaagcacacctctctcaggcagcctgctttggaggtggaggtgggtgctgatctccagtgtgatccgcacccggtagatagtagcaccacggttccggctgctccgggacgcagatgtgtgatggaattctaccctgccatcgcacgcgaagaaatcaggctaagggcagctttgttcgtcaccgttgtgggtacaaggccatcagtaacaccttctgaggtaattttggaagttgcacaaatatatgatctgcctgaatcaagtttcaccattcacaaggcctggccagaagatttcatgctagtttttcaagatgaggatactgcagtacgggtgtttgataatggaagagtgcttcactgcccggattttgagttgaagttcaagaaatggtcacggtttgctcattccactggtgtttccttgccagttttggtggatgtggaactttgtggcatcccagctcacgcatggaaaaccttcgcctcctcaactctgcctttatcacattgttgccaaaaagggagggcgctcatggtgctgctgattttcgccccattagcctga

SEQ ID NO: 31634 - DNA, 378 bp, Zea mays
  Peptide Sequence Number=SeqID_73413
atgcacaatgggcagggcatgagctcattttctaagctggcccttgaactgttagaaggtcactactcgaatgcccacataacaagattagacttgttttctcctgtaggacacaatccagattttgtctatatatcccttcttatcttgccactaggacacatgtattttaggtttggcaccattgattatattggaagactgtatcctatggagggaaagatgaagccacagttttttcgctgggtaaatgaagagaaccatttagtggctgtcaacttaccaatgttctgctttgcagttgtgaagcctgagagtgttcatgctggagctacactggaagttccttccgaggagatcctttcaaagttgaagtag

SEQ ID NO: 31635 - DNA, 252 bp, Zea mays
  Peptide Sequence Number=SeqID_73414
atgggggaaaggtggcagtggcgcccgtgcgcgcctgctttgggcggcggcgtggctagcgaccgtgctagcctgctcacggtggcgacgtggccagagcgcatgctcgcctactcgcggcggtggtgcggcccgattctgcggcgtggccagactcatgctcgcctgctggcgccggtggcgaggccgacagcagaggcggtggcgcgacaagcctacgtgttcctcgaccgcggcgtcggcgcgcggtga

SEQ ID NO: 31636 - DNA, 834 bp, Zea mays
  Peptide Sequence Number=SeqID_73415
atggaactagtgctctggccttcggccaagatcgtggccatgagggatcaggtgccggcgatagagcgtcggtatgatccgacctccattaatcatgaactagtgttgatgggtcaaatcctagatgacgtggatgacgtgcatgatggtctagaggatctctttggttccactacccctacccctaccatcaaccttggcgatgacaatgtcgttgtcgagggtgaggctctcctagatggcagtggtgttgctactgctactgcctccactacgacaagcacgggtaggaagaggaaatgcacatccaatgtctgggaggacatggataagattttcgccactgaaaatggtgtgcagacccactatcaccctagagaagagggtgctacacttttaactgaagcacattggtatgttgctgaaaaaatattggagttccttgaaaggttctatgattctactgttgtgatgtctgatgacattggtagtagttcttcaatggcacttgttgctggtctagatgcctttggtgccagtgccagttcttccatggctcataaactctcaagtcgaacatctgctagtgctttgtttcatgcaacaatcactcctggtatttctggttctgaactagctgcttatctagatattgacacttttcagaagtttgatgatgacttcaatctcctagattggtggcatgatcataaactcacttatccaatgctttcaatcttagctaaagatatcatttcagttcttgtctctactatgagttcagaatcaacatttagtcttgcaggtagggccattgaagagcggcgtcgttga

SEQ ID NO: 31637 - DNA, 312 bp, Zea mays
  Peptide Sequence Number=SeqID_73416
atggcggcggcagcggaaggtttggctgcctacagggcggtgctgcgggcggcgcggcggacgttcgcgggcgaccagctgatgctgaaggagtctgcggtggagatccggcgccgctttgaggaccaccgtggtctaaccccgggctccgacgatgcagcgcgtgccctcgccgacgcccgcgaggcggcgcacttcatcacccatatgatagtccaggccacacgcgcaccctccggatccttcgggggcagggacgaccttgagaggggcagccgccggcgatggtggacggtggagactggaggctag

SEQ ID NO: 31638 - DNA, 612 bp, Zea mays
  Peptide Sequence Number=SeqID_73417
actgcctccgctccttatctcccgccccgcaacggccgcacgccccaccgtccgccgcgcacccacgcgaccccagacgccgccgcaaaaccaccgctcctgcacacccgcgccgcgaaacaaccgctcccgcacgcccgcgtcgtgaaaccaccactcccgcaacgcccgcgccggcgaatcccgcacgcccgcaacggctgcagccgccgcacgacccgctgtccgtcgcttcccccaatccctcaaaggccgcccgcgccagcgaaaaccccatcccccacctaccccactgccatggccgagctccaagacgaccaccgccccgaggggtacgatcccgactcccgcgccggcgccggcgccgaaccggtcggcatcgagatccgccgctcgcgggcggggctcggggcggaggagcctgtgttggctccgacgccggcgcgggcgccggtggagaagcctcgggaggtgtcgaagcgggagcgtaggcagcaggaggagatggcagcagagctaagggcgaggaagagcacgcagtggaagggccggagggtggtgtgggactaccgcaaggccgagagggcactcgcgcagctggagaaacgggag

SEQ ID NO: 31639 - DNA, 240 bp, Zea mays
  Peptide Sequence Number=SeqID_73418
atggatctcaatggtaataaagtcttcattcagccaaaagtggccgataaagcgcctctgctcgcggcccggagccgctgggacgccaccgcatccactccccgcggcgcacttggcatggcgatgaatggagatgggcggttgagggcggcgattagctgggacgacggcgacaacggcatggctgtgcgacctggtgctggtgatcggcttcgagtggagcaagctaggcggatcaag

SEQ ID NO: 31640 - DNA, 483 bp, Zea mays
  Peptide Sequence Number=SeqID_73419
atgggagagatgagtgctttgtctcaagttagtgctgcatgcattaagcttgaagaataccaaactgcaaaggctgctcttgagttgggttcttcttatgcatcagacgattcaaggtttgctcgtctattgaaggaatgtgatgagcgcatcgctgaggaatctagccaggcaccagtaaaaaatgttgaggctactgtggctgctactattgaggacaaggaggatttcacaaatatggagaatacaccaccagtgatagaacccccaagcaaaccaaaatacaggcatgacttgctagtttttttgctaaatttttatcttaaacaatttgtgctgcaggaatctagccaggcaccagtaaagaatgttgaggctactgtggctgctactattgaggagaaggaggatttcacaaatatggagaatacaccaccagtgatagaacccccaagcaaaccaaaatacagatacatgtgctaa

SEQ ID NO: 31641 - DNA, 574 bp, Zea mays
  Peptide Sequence Number=SeqID_73420
atggcgttgtcgccgtctgcgcaagcgacaagcccgctcgcgcgccagctgctgcgccacgtgtcgtccggcctggtcgccgccgccttccaccgcccagctccagccatcagtctgccaagcgcgccgcggggagcagacgacgtggccctggcggcgtctcaccaccagcggctccggcccgctccgtcaccgaaagggcgcccccggcgcccccgaagcaaggggagcggcgggcaagtccacgcagctccggcgatggcgacgatagcaagcgccgttatgccgcccacgaacgccgtgacggcggcggcggcgaccacgcacgtggtgacgcgaggacccgcccggcctggtctcccggcacaaggcggcggcggcggcaaaacgcatggcgcaccggcggcggcgaaagcgcgcgcggctatgccaggacctgctccgccggcccgccctaaggaaggcagcggcggaaaggttcatgtcgcgtccccggcggcgatgtcgagcgcaagtgtgcttatgcgagggcccgcgccgcctggtcacccggcagaaggcgccggcggccgtg

SEQ ID NO: 31642 - DNA, 222 bp, Zea mays
  Peptide Sequence Number=SeqID_73421
atgggcgtgcctgacctctgcgcgcgctggcgcgcaataaatgcgctgcagcatgtcttggaggttgagctcattacatttgtccgcgtacaccttcacctttggggcgccatacacgagattagtggggaggactgccccagctccataagccatgaagtaaggcatgtatgtggtcaaaaggttcaaggtagtcctcaggctcctaaggacagcggttag

SEQ ID NO: 31643 - DNA, 825 bp, Zea mays
  Peptide Sequence Number=SeqID_73422
atggcgtgcctcctcgtgctcgtcatcgctgccacagtactaacggtgcaacacgaagccatagcccgatcagaacatgattcagagacgcagctgggtccaccgggaaaactgacgcacgccgctcggacgtcgccggcggaggccttctggcatgcggccctccccggcgctcccatgcccgaggccatccgcgagctcttgcgcccagctggtgctgccgggaccaacgctccagacgccgctaggtccaggcaccacgacgccgatccgccgccgatgaacttcaagtacgaagactacaggtcctcgcgtcggaacgaagccaccgccacctccgccgaggccctggaccgcgctggcggcgccgggaacgcggccgcgtcgccggcggtgttcttcctcgaggaggcagtgcgcgtcgggggtgtcctgcccttccgtggtatggtcccgcggggcaccgccagcgtggcagtggcctcgcctccgatgcggctgtacaaggtccgcgccgtgcgggccatcgacgggcgcaggttcatggtgtgccgccgcgaccgcgaggacggccccgacggcgacgccgtgtacgggtgccgcgcgacgggccccgcgagggcgtacgctgtgggcgtggtcggcgagcgcggggagacggtggccgcgaccgtcgtgtgccgcaccgacacgtcccggtggaaccgggtgcgtgccgcgttcaggctgctcgacgtgaagcccggaggcgcggcggtctgccacgcggcgctcggcgcgcaggtaatcccagtcaagaacgacagtggctcctccttggtgtga

SEQ ID NO: 31644 - DNA, 408 bp, Zea mays
  Peptide Sequence Number=SeqID_73423
atgggcagcgacagagagcgtgttgaccgcacgatcaaaattaaatcagggcaggttgaaatccaagcaagacttttgccccaaaccaacgtggtcattgttgcacgaccacccgaaccattggacacaagtgttgacgcggagatctggatggccagagggcaaggagtcgcgatagaggccaaggaagcacttcggatggttgaacctgatatttgctcttatacaactatggtcttagcttatgtaagtgcttctgacatgaatggagctgagaaattctttcataggattaaagaggatggtctgaagcctaatgttgtggtttatggtactctgatgaaaggttattcaaagttagataatgttgagaaacttatgcatgcgtatgagagaatgcgggtctag

SEQ ID NO: 31645 - DNA, 237 bp, Zea mays
  Peptide Sequence Number=SeqID_73424
atgccggcgttcaatcacattgacgccgccatcgaagctgcccacccgtccatctcccgcaacgagttccggcacgtgagaggcggaatcgtcgagatgctgtgcgacgccgaagacgacgacgagagagcggagcatgtctgcttgggtctcgacgccgtcatgttggagtccctcgtctcgctgatgcaggtgcccgtggcgttgggggcgctggcatcctgcgacctcatttga

SEQ ID NO: 31646 - DNA, 336 bp, Zea mays
  Peptide Sequence Number=SeqID_73425
atgcagggttcttgcctgaccgccatcgcagcaaaatcaaccaaggacctccctacactgaccactcccctactgcccttgcccctttcgggggatggggcatcggctgggctttataggggcgagcagagcagtccccaacggaattctgaagcttgcggtgagcggcagcaacaacccaacatgcccagcgcggaagctacgggggagaagtccatcagacgaggcggagtccgcggggttgttgccctgtcgcaacggaggaaaacggggaagaagattccgacccaggggccccatctgtcatccaatgcccggaagcaagcgtgcgcatag

SEQ ID NO: 31647 - DNA, 231 bp, Zea mays
  Peptide Sequence Number=SeqID_73426
atggagaaagtgaaaggggctacatcgctcctgatgaggagccagaagtacgccatgctaaagcagcagctcgccttggccacccaatttgaggattacaaggaagtagcgaggctaagggacttgccgaggtcgttcgaggaggagcctgtgttgcagcaccagatgatgaagaaggccattgaggaggagagatttgctcatatattaactgaactaccaacattttag

SEQ ID NO: 31648 - DNA, 456 bp, Zea mays
  Peptide Sequence Number=SeqID_73427
atgggtctccacggaggcgtcgtcgtgctccgcgcggccgtgctcgccgccgtcctcggcttcgtcgccgctgccgggttcatctcaaattgcccggtgagcttcgagggcgccaactacacggtgatcacgagccggtgtaagggcccgctgtaccagccgacgctgtgctgcggcgcgctcaaggacttcgcgtgcccttactccacctacatcaacgacgtgagcaccaactgcgccgccaccatgttcagctacatcaacctctacggcaagtacccgccgggcctcttcgccaatacctgccacgagggcgacaagggcctcacgtgccccgaggacaccccgcagatcgaacccgggcagaaggcctccggcgcggccgccgtcgccgcgccggccgcggccctggcggcggccgcgttggccgtctcgttgctgctcatgtcttgctga

SEQ ID NO: 31649 - DNA, 348 bp, Zea mays
  Peptide Sequence Number=SeqID_73428
atggccggcgcaagcaaccatggatccctcaccgacgaatggttgccgccccctacaccaagcccaagaagtctcgtgtcaagctttctgaatgaagaattcagccccgggccattctctgagcgcagggctgcaagagcaggtttcagtgtcccgaaaattgatacttctcgagttggttcatcagcagttattcgatctcctgtgtcaattccacctggtctaagtccaactacactactgggagtctcctggtttttctttacaataaaatggtatgtgatatttcccttattgggtttcttggggcccccagatttatctgttcccttttggcccaaggtttaa

SEQ ID NO: 31650 - DNA, 207 bp, Zea mays
  Peptide Sequence Number=SeqID_73429
atggcgcgggtgcgtcgggcggcttctggtccggctgggcgcgggcacttggccggtcgggctggtcgcggcaggggcgtcgggctgcaggggcgcgctcagctggggcggctgcgtgcctgggcgccgatggtttttggtcctcctggcggcgctctgctgggagagaaagggggaagggatgacgaatctcagaacgtctgtgcc

SEQ ID NO: 31651 - DNA, 264 bp, Zea mays
  Peptide Sequence Number=SeqID_73430
atggagaaccgcccgggaaaacagtgctaccacaagggtggtgataatgaggatgatggttttgattatgattatggttatggtttctggtattctttctgtttggaaaggctaaacgggacaattgttgagtatgttgatgtgtactcacccttgctttacacaccaaactccccagcttgtccacgttgcaaccactgctcaggagaagatgaagtcgtggaggaagacttccaggagttccaagagtacgatgagttctag

SEQ ID NO: 31652 - DNA, 399 bp, Zea mays
  Peptide Sequence Number=SeqID_73431
atggccgacgaaagaaatcaccaatcgaagtgggacagagaggaagtgcggtggagattcgttacctgctgttgctcggagctgcagtacccgaggtcggctttcttcctcggtgttctggggatgctaggcaaacgtggtggacgcaaggggcttttctatgcaaccgcgactggttttatagaggattcagcagcagttggcgcggttgacgcggccggtgagcatgcagcggcagaaggggcggactcggctcaacaaaaacaagaggacgacttgacccgtggggcccaggcggcagtgatagtgcgcgcggtgcccaggaaggccgtgcgggatttggcgcggctgggccgaatgggccgcacggacgagggaaccaggtggaccagaagctga

SEQ ID NO: 31653 - DNA, 288 bp, Zea mays
  Peptide Sequence Number=SeqID_73432
atggaaatggctagcgtcattttatttattcaactggtggaatataaaaatggccgcgagaaagtacaccttttgctgtcatataaattgtatattgcacggtttgttaccgtcacaatgttgttttattctacttatctatattttttgacttatcgtgcttcagtggcaaggcaagttccgctcgccgggtggaggctccgaggtcgagggaggcaccgggttattggagaaaagttgtcagatttctttagaatcatgctggaaaatggcaatacaattatataa

SEQ ID NO: 31654 - DNA, 186 bp, Zea mays
  Peptide Sequence Number=SeqID_73433
atggtactgctgctgctgctgagggaactgcctctggtactggtgctggtgctgatgctgatgctgtccttcaggcacatggtaatgacggaagttgtctctgaactcctcctaggtgatggcttcagggtcggcatgggtggcgagataaagaggaaagcagaattaaagggattacccaactaa

SEQ ID NO: 31655 - DNA, 202 bp, Zea mays
  Peptide Sequence Number=SeqID_73434
ggcgcgcaagttgcgcaacggccactccgaaccggcgacgtcgaggcttagcagggatgcctttgctggctgttcgccgaagccgaccaagacgccgaccgagggacggggagggggctgctggtcgctgtgcgcgaggaaacgaccttggagcctcgccttcgcaacgggctcggccaaggccggccatggcgagcactga

SEQ ID NO: 31656 - DNA, 246 bp, Zea mays
  Peptide Sequence Number=SeqID_73435
atggcacttggtgaggatgaggtgggccgcaacaacaaggacatcggcgatgactccacctctgaggtatcacactctactgatgacctcatcactgaggtagaggagctgatgactgcgttggctagtcaggataagttgcttattcttgctactctgagaggaaagttttcaaattcaagtatgagagcatgcttaaggagcttgagcctgctagatcttctgtcatggtgtctgatgagatag

SEQ ID NO: 31657 - DNA, 486 bp, Zea mays
  Peptide Sequence Number=SeqID_73436
atgattcccctgggaagccagaatgtcgcatctgccatggtgctccttgaaaagcttcctgaggttgagactccgggcgaatggaggacccaccatgaaattcgggatcttttcaaccttgttgtgcaacaacaagctgagagttccatgtcgcggtgccatgagcctagggttggccagcatacaacatccacaccattagaaaacaacgcttcgtcgggacaagtgctcgagtacaaggaggaaggcacgacatgggtctcatcccatcggcgcccaaggacgagcagaaacgcgaggagcatgcccaatcctaggccctgggaaaaggacaagaggagtcagtcatcgtccatcggtacaatcagcacagtagaggatgctttaatcctgatgaggatcgaacatagggaaagggccaagcatgacaaagagcccaatggaggcatcgatggacatcccaataaaagaaaaaacgaaggatag

SEQ ID NO: 31658 - DNA, 180 bp, Zea mays
  Peptide Sequence Number=SeqID_73437
atgaggggcatcccaagagaagtcatagagcactctctgtgggccaagcctggatccaaacttgtgaaacaacaactgcatcattttgacaaagaaaaacacagggccatcgtggaagaggtcggcaagctccccatgatcagctcaatggttcgtgctgggagcatgagagagagatag

SEQ ID NO: 31659 - DNA, 4441 bp, Zea mays
  Peptide Sequence Number=SeqID_73438
atggaggcatacgtctcggctaccggccgcgcaacctgcagcagcgtgccaccggcgtcgagcagcagcccgcggtacgccggtgccagcctgccggccgcagcgctcgctgccaccagacgccgcgccatgcctgagcgggaaacagcgctactgcgggccgcgaatgggaccgccggagcgcaccggaggagcgccgccgcggcgggcggcatctccaagaggcgttcgccggcgagtccgcgggaggcacgaggtcggcaggcgcgacgcgcgaatctcaaagcacaggaggggtgtgcggactgcggaggcctagggcatcggcaccggtacacctacacctccattgtgttcccgaagcattaccttgaggccctaactctcgtgccagctgagatctcctcatccaatttctttgtccgattgagcaacttgatttccctgacctccacttactcccaagttgttgtggtcaaggatcttgcctcggcatatgtgcagtttctgtccactacagggactcctgatgaagcagtgctcgctgccacaaagctttatttggagatcctctttcttgagaattccctccctctccaccggacactcatatcagtgcttgccaagtgcaagaaattctccacagtgatcagtgggtgttttgccttgctctgtgaggagtatggtggctctggtagtaaggcaaagaagagatttatggtatctcgagcagccttgtcgcttattgggtacccaaagttgggatttttggatgaggcagtagagaggtgtgcagagatcatggcactggatgttgttgatgggcttgatggagtgacaaaagacattggtgaagggtcacggccatctccagtcgtgatggagcagtgccaggaggccatgtcttgcatgtactacttgctgcagaggtacccgtataagtttattggccttgacaaggcgtcaagtgtcttcaagagtgctgtcaggacaatactatctgttcttaagtcatctgccttttcaagggattgcctggtggcctctggagtaagcttctgtgcggcaattcaggttttcatgagcacagaggagatttcctggttcatttctcaaggtctatttggcatctatgcaaatcatgaagatagaaaaaatcagtctgtgcacaatgtattttcggactttgatctgtgtgaacaaatcagagacctttcagtgttgagtagactttgtctactaagagggattttgacatctattccaaggacagtactcaacatgcaccaacttcattccagtggacctttatggactgttttatatgatggaattttacctgagctttgcaagcattgtgagaacccagttgatagccacttcaatttccatgctcttacagtgacacaaatatgtttgcagcagataaagacatcggtttcatctgatatcaccgacttctctggggactataagcctttttcaagagatgttgtcaaccgtatattgggaatcatatggcgcaacctggaagatcctttgagtcagacagtaaaacaggtgcatttgatctttgatctcctattagatattgaactatgtattgcatcagaagaccgtgaacataacaacaacttgttcctttgcaatgttgcaaatgatttacttcgcttaggtccacgatgcaaagggagatatgtccctttagcttctttgacaaagcgattgggtgccaaatctcttctaacattgaaatcaaatctgctttcagaaacagcttatgcgtacatagatgatgatgtttgttgtgctgtcaccacatttttaaaatccttcctggagactttaagaggtgaatgttggaatgacgatggtgttgagctaggatatgatgccttcagagctttgtgcttgcctcctttcatgcggggacttgtatctggaaattcaaaactacgttctaacttaaatacttatgctttacctgctctaattgaagttgatgcagagagcatattcacaatgcttggattcatctccattggccctagcacaaatgaaactaaactagatgttgttttgaaaaatgaccagtgtatagctgcactggtttctctgcttaaggtctcacggaatctggctcttgttgaaggggacattgatttagatcctgatgaattgtcacagattcagcagatggatagtaagggtgctgcagttatatctgttaaagggattaaagttacagttccttttaattggtttgctttggcactgacacacagtgatgaaagtctccgtatagatgcagctgaatccctctttctaaatccaaagacatcaagtcttccatcctccttggaactgagcttgctcaaagaagctgttccgttgaatatgcgttgtagctcaacggcatttcaaatgaaatggacaagtttatttcggaagttttttgctagggtgcgaactgcacttgacagacaggtaaaacaggggtcttggattccatcattaacgtctagtgttaaaggggctggctctattgatacttctaaggccactgttgtcaagagggctgaagatctcttccaattcatgaagtggctgagttcctttctgtttaattcttgttacccctctggcccttatgaaaggaaaacaattgcaatggagctcattcttacactactagatgtatggcctatttgccgctctgaagggaaaattgatctttatccttacaatgatagcataatattgccagactcaacaatttcatttgttgggtctataattgatagttgggacagattaagggaaaactcttttcgcattctactgcagttcccaacaccgcttcctgggatttccttgagtacatccataaatgatgttatcagatgggcaaaaaaacttgttctaagcccacgtgtccgggaaagtgatgctggtgctttaaccttccgccttatatttaggaatttactttttggaaccatcatcaggaagataccattgcctggctgttctcattcagcttcatctcagaatggcttgcctgacagtattgaagagacaagtatatctgaagaaattcttgatgtggggcagttaaagatgatgggtgaccattttttacaggttcttcttaaaatgaagcataacggtgcaatagataaaacaagggctgggtttactgccctttgcaaccggcttctttgctcaaatgattcaaggctgtgcaaaatgacagagtcatggatggtgctactaatggataggacaattgctaaagggcaaactgtggatgatttgataaggaggagtgcaggaattcctgctgcatttatcgccctgttcctggcagagccagaaggaacaccaaagaaactacttccaagggcattagaatggctgatagagtttgctaagaactctttagctaatttccagaaagactccaaccagaggtctggagtaatgaaagagctgttggaatcacagtcagaaactacaagtgtatattctaatggtaacctatctaaaggtcgagatgagggtgttgttcccactgtgcatgtgttcaatgtgcttaaagctgctttcaatgatgcaaatctggcaaccgacacttcgggtttcagtgctgaagcaacaatagttgctatacgagcattttcatctccctactgggaagtgcgcaatgcagcttgccttgcgtatactgcactagttcgtcgcatggttgggtttctgaatgtgcagaagcgtgaatcagcacgacgatctttaactggccttgaattcttccacaggcaagttcataactacgttattagtgatatactggataatttacctcgtggaagtcacaaagcaatggctcacagtgttcagcatactgatcctgccatatcagctaatatgggaaaagcaaatgtacttctgctgtctaagtcattcaattcaatacatggccttttgctgcagctggcttctcttctggataacaactttagaggtttgacagacggtagcatgaaggatcagattattggcctattactggaggttctttcaagatgctcttggcttggctgcacgaaattatgctcatgccctatcgtaattacatcttacttgcgggtattggatctcatgcttgatgttgcaaggacagggaaaagcagacatactgaagtcattcaggcattgctgctagagttaacttcccagtgcttgagcaacacagcatcaacccagtacgcattccatgatccaacccgtattgaactaaaacaacaagcaactgaatcatttttgagctgtgttggtctttctaagaaaaccgatgaaactaacgatgatgatgtgcagttgcaaatactcggtgaaccaactttagagatgcctagagtggattactcccttcagaaag

SEQ ID NO: 31660 - DNA, 552 bp, Zea mays
  Peptide Sequence Number=SeqID_73439
atgccgcccgccgcggcggcgctcctccggtgcgctccggcggtcccattcgcggcccgcagtagcgctgtttcccgctcaggcatggcgcggcgtctggtggcagcgagcgctgcggccggcaggctggcaccggcgtaccgcgggctgctgctcgacgccggtggcacgctgctgcaggttgcgcggccggtagccgagacgtatgcctccatcggccgacgttacggtgtgacgaagactaagaagagaatcatggaggggttcaagcgggcattctccgcgccatggccgaagacactcaggtaccagggagatgggcggccattctggagaattgtcgtggcagaagcgaccgactgcactgatggtgattatttcgaagaagtgtatcagtattatgcgcatggagatgcttggcgattgcctactggagcagacgcagcactgcgtgagctgaaggatgctggaggtcagatgctacttcctctgttctcgccttctcggttcttgaatcttgattttcaattctcagttgtttactgcaattaa

SEQ ID NO: 31661 - DNA, 450 bp, Zea mays
  Peptide Sequence Number=SeqID_73440
atgccgttcaatctgaataatgcaggagcaatgtaccaacggtgcatgattaaatgctttggtgacctcattgggagggtcatggaagcatacgtcgatgacatcatgatcaagaccaggcggtctgaaggccttgtatgtgatcgtgggttgatgttcgataggatgaaatccaatggcatcaaactaaatctcaagaaatgtgtctttgacgttccagcgggcatgctcttaggcttcttggtcttcgaacgagggatcgaggaaaactctgagaagaccaccaccatctcgaacatgggacaaataggagaccttaaaggggcgcaacgggtcacggggtacctatcctcccttagcctctttatctcatgcctcggagagcacggactaccactctacatgttgctaccgaaggccgattgcttcgaatggacagtggaggcatag

SEQ ID NO: 31662 - DNA, 537 bp, Zea mays
  Peptide Sequence Number=SeqID_73441
atgtccggtgcaccagatgactcgaactcgaatttccagaggcactcgcgctataattcaccggactgtccggtgtgcaccggacatgtccggtgctccaaggaagggcggccccaggaactcgccagcctcggcgcatttattgcgcgccagcgtgcgcagaggtcaggcacgcccatgctggcgcaccggacactctacagttcatgtccggtgcgccaccggacatcaaggcgggcccagaagtcagaactccaacggtcgatttccaacggcactgaccttgagctcttcaggtttgatgccattgtggtgtcatccgaggtcggatatgagaaaccttccccagagatcttcaatatagcattggatcaaattggcgtggaagccagcaaggcaatccatgttggagacgatgaaactgcagacatggcaggtgccaatgctacaggacttgagtgctggctgtggggtaaggatgtgacgacgttttcggaaatacaggagcggattctgacaacagatggtcctcaatga

SEQ ID NO: 31663 - DNA, 651 bp, Zea mays
  Peptide Sequence Number=SeqID_73442
atggagttcgggaggaagcccttgagccttgtggagctctgcgtgcggaaggccatcgacaacctccgctacatgggcagcgtcgacggcgtcgagatggatctgctcaagcgcatcctgccgcactgcacgatggagcagctcacccgcgtagagaacagcaccgagatggatcttagcttggtaactgatccgctgtggaggcgattctaccagcgagattcggcgaaaaaagagaaacagaaggaagttgaggataagatgcttgacaaattcacaaagaagtttcaggcagagagagctgagaaacaaagcaagcaaatcaaactctgtacaaaggtgcctccaagcagcaaaaggagtttctttggaggatgtattcttgcaggaagtggacctagcagtgtatccagttccagctacaagagccctatactgaagaaggctaggatagaggttaacagtcgagcaagattgcagtctgctatgcaaaagaatacttttgcgaggtcatctcagccaataaggacgacctctgttagtggacagccagtgagaacaactaccattcataggcccaattcaaccgtcaccatcaccaaaccgatgggaaaaagcaggcaaattcagaacagcaggcccaaattctag

SEQ ID NO: 31664 - DNA, 1020 bp, Zea mays
  Peptide Sequence Number=SeqID_73443
atgacgagatcaaaggactcatggaatgcgctacagtccagtaggccgagttctgcttcccgacttcgaaagctcgccttggaacaccgagcggtgccctcccgccaggagagagaagctcggtccatcccgagctcgcaagagacaaagcccccgcggttcgagaccgccttctcgacaaccgtcagaaccatgatgtccgagcccgccttgaagccagatgaaaccctgcatgagtacatccgacgtttctccaagcagcgcaccgatttgcccaacatcatcaactcggatgtcatcggggcattcgtcgccggcaccacctatcgggatctgggggaagcgaaaggaggacaccccgaggcgaccacccaacacaaccctaggaagaacaagaagaaggcgttgcaggggaagcacgaagcccttgaggccgatcttgttgccactacggaccgtggaaaccctcgagcccccccggaggtcccaacgtgttcgacaaacatgctcaaagagtcatgcccctaccacaagggccctatcaagcataccctcgaggaatacaagaccatcaccttcgatcgagatgaccaccaagattacattccaaacccaggaaagtacccgctcgtcatcgaccctgtcatcggcaacaccggactctccagggtcctcatggatggaggcagcagcctcaacatcatctacgcagaaaccctggaactcatggggtttagctggtcccaaatccaagccggagttgaaccattctatggcatcacccctggcaagcgagtccagcctctcgggcaaatcgatttccccatttgctttgggaccccctctaacttcatgagggagatcctcatctttgaggtggtagggttccgaggcacctaccatgctgttttggggaggccattttacaccaagttcatggccctcccaaactacacctacctcaagctcaagatgtcgggcccgaagggggtcatcaccgtgggttgtaacaccccgtag

SEQ ID NO: 31665 - DNA, 294 bp, Zea mays
  Peptide Sequence Number=SeqID_73444
atggacgggcgacaacgacattggtgcggcgataaagttggtgagcacagaaggggagctaggtgtgccagtgacactggggcaacacagaagggggcaggcgacaaagtcagggtcgctaaatcccttcctggactgtatgcgccttcaccagcaaagcaggaagacatggcctacataaacctcagacctgctagcaggatgttggcttcaggcagctgtgcaacagctgagttgaaatcaaatggttgctccattgagacttggacatttttgtgtttagagaatgtttga

SEQ ID NO: 31666 - DNA, 270 bp, Zea mays
  Peptide Sequence Number=SeqID_73445
atggaggcgaggtccccacggagggcaaagggaattgaagagaatgatgcgattgagaagaagttgcggggtggccttgattggcttttgaccacatgccaaaagttaacgctagcagacacgctggcgagcaggtcccaccttcttgaaagtcgtctagaggagagttgctcaaagaatgcagatgacgtatgggagccaactcagatcaatactagcaaggaaacgttagagagggaaaacaaatcaaacgagaatcaaagcgagtga

SEQ ID NO: 31667 - DNA, 198 bp, Zea mays
  Peptide Sequence Number=SeqID_73446
atggcgggggccgaaggtgtcttcatcgagctttccgtgatcagctacaccaagaagatggaggcctccacccgcgccgggatgatgaatgaggaagaagtcgaggacctcgccggtcttgagagcttgatgacatggacgggtggcgcggaggaggtgggagctgaagtgctcagcgccttaggctggttctggtga

SEQ ID NO: 31668 - DNA, 225 bp, Zea mays
  Peptide Sequence Number=SeqID_73447
atgggtaagctttgcctcgggcagactaaggcccagaataagataccacgcaatgggagtggagagatggcaagagtagcatgtaccctctgtggcaagaggctagacggtggtgtatctattctctcggtgaagaagcgacaaacttttgttgtttctgttccaaggtggtctcaaaagaagaaaaccaagagtaaagctgtgggaggaaggattcctccataa

SEQ ID NO: 31669 - DNA, 672 bp, Zea mays
  Peptide Sequence Number=SeqID_73448
ggcgtgggagaagcggctgagctggaagcaggcgaagctgcccacgagctgcaggaggggcaaccacaaccggctgcaagaaggaggccgagctgggactccaaggcaccatgggagatggacgtagggaggagcagccgacgcggtggagaagctcgggacgcgcggaactcgacggtgcgacacgcacagatgagccggaccaggggagacacggccatggctggagaggggcacagtgcttggatccagactggggcagggaggaagacgcggcgccatgggagcaggggcgccgagggagcaaggacgcacagcgtggggaggaagaacaaacaatctagtagggctacgccttcctcaacctcatcacgacgaaggtggtctatcgaccgcgaggaacatcacctcacacctgggaaccttacgaaggcaaggccagggcctacactggcccgcagcgcccgtcatctcgaaccaagctccggtatgaccctgctagaggcagtcgccggtcatgatggtcccccctggggcctgtcacctgtgccaccggtgttccaagggcagggtagtgcccagacctatgcagtccactacgtcggcacgttgctaggcctcgcatcgccaaggctcaacccgttgaccgcggcacaagccccatggcgttaa

SEQ ID NO: 31670 - DNA, 246 bp, Zea mays
  Peptide Sequence Number=SeqID_73449
atgggcgaagagagaagcgttgccgcacctgaattccggtgttgctggcgatcagacgatgagagggacctctatggattagtagtcaagtgggaatcacgtgcattcacccccttgcacgcggaagactctggacagcggagtgaatggtcgctggagcatcaggaccaccgcggagctcggactctcgcggccagtgctcgactccgcgtcaccctcgtagcgatcaacttagatcaagattag

SEQ ID NO: 31671 - DNA, 348 bp, Zea mays
  Peptide Sequence Number=SeqID_73450
atgggctcaaactctaagatccggcccatctctcgtttttccctctccagcatgctcggcccaaccacccggttctgcgtcgacatgtgggccccgccccgtcggtcacgcacgcgcaaggctcgcccaatgccgctgaccccgtgggacccagctgtgcaggacccgaagcgcctaaccttttccatgtgtgccgacaacacgggggttcatacaccaaccactcctgggtacgccggcgctgactcaatggggtggggggggcccccctggtatcccgggccactacaaagcttgcaaccccggggggggttgtcgtggggagctctcctcctttctcagggttaa

SEQ ID NO: 31672 - DNA, 321 bp, Zea mays
  Peptide Sequence Number=SeqID_73451
atggcgggaggagctactgcggccatgctcccgatagtctccaccatgtctaaggccacctgtattggcctccagataggggaaatagtgcatgaggtcatcgttgtcggccagcgaccgagcacgggcgaggctgactctagccctcaggcactgtgttccatggtatgtggattcgtcaccccaaccccaggggtgacttattctacctaccattgggtttcaggaagccgtaataacaagggctatgcctttgtaaacattctctcctcctggaaatccattggtgggatcccatgggccgtgccagggtccgcatag

SEQ ID NO: 31673 - DNA, 387 bp, Zea mays
  Peptide Sequence Number=SeqID_73452
atgtcgtcgccggccttcaccggcggctacacaatggagaagagagaacggggtacagagaaaagaaagatcagtcggcggcttaactcaggtgcagctcgaccggggtggggctttggtcgacggtggcggtcctcgggtagggacaccggggcggccttgtcgtggggctctagtgcgtgggcggctcggtgggcgcgtgtaaccggcgagcttggagcgttctcttcagggcgacacattgatttcggacgtgggctaatcttcataaacaagatggggtatctaaataaaggaagcttgccgtcggttggagtccgcagctcttcggattttggcgcaacatggatggagtgtgttttgggaggtttgtccctcaatgtgtga

SEQ ID NO: 31674 - DNA, 378 bp, Zea mays
  Peptide Sequence Number=SeqID_73453
atgggcatcacgctggcgcgggagcaccagagggcgctgcacacgcgaggcaagctaacggcgacgcggatcaactccgacgagcaatcacgcgagcaaaaggcagtaacgaccaaattaagggcgcggggcaagttgctcacctcgactgcgaactccggagcgcgtggaggacggcgaaggtgcggtggaacctcaggtcgacggcggcggggctccggctgcgcaagaactgctccggtgagcgcggaccgggagaactcgcagtcgtgggcgcgtccacggcgtgggatcgtgggcgggaggttggggatgactgacaagtgggctcggcgggacagagagagagcgggcgcggggaaaagtgagagcacctag

SEQ ID NO: 31675 - DNA, 123 bp, Zea mays
  Peptide Sequence Number=SeqID_73454
atgcctgtccgcgccttgaagctgtgcatatcaatggctgtgcatatcaatgcctgtccgcgccttgaagctgatttctaccactctacagggcattctggagactgtctgatggaagccaac

SEQ ID NO: 31676 - DNA, 276 bp, Zea mays
  Peptide Sequence Number=SeqID_73455
atgaaggtggtggcgcggctgcggtcggagaggatagctgctaggggaggcggagaggacgaagacaaagagaaggaggaggaggaggaggaggcgtgccggagcttcgagagctatctgatggagatgctggtggaggaggggaaagcgagggacctgaaggacgtcgaggagctcctgcaatgctgggagcggctcaggtcaccagtcttcatcgagctggtgtggtccttctatggcgagctctgcaatgacctgttccacgcaaggggttga

SEQ ID NO: 31677 - DNA, 588 bp, Zea mays
  Peptide Sequence Number=SeqID_73456
atggcctcgaccaccctctccaccgacgagctcctccggcgagtgaaggggacagtggggaaggcgtattacaccctccccgtcccgatgcgccccaaccagggttatgtgtccctgggctacgaggataccaaatcgcccgccctccggtcccagaggacgcggtcggtcgaacggcgtgtcggttggccaccaaggaaaaaagaggaaggacacaaagaagaagcgggcccgcgagaaaagggtggcctacgacgtgttggagaagcacagccagacgcaggagagagaggggtgacgttagagccctctcccatcactgaggatgatgacgacgaggaggaggaggggatggaggtccagctgggcttcagcctcgaggtcaggctttggtccgagccgacctcggtgggcccatccaggaacgaggacgtgcccacacctagggcgacagcgtccctatccgcggcatgggtgtcagccgagccgggacctaaccccgtaggcgaggaggaggcagaggtggtggagaaggccgatgtcccgctccaagtgcccaccgtagggccgaagggcctgaggagctga

SEQ ID NO: 31678 - DNA, 288 bp, Zea mays
  Peptide Sequence Number=SeqID_73457
atgtgtccgccgttaaaaggggggcctcgggcgagacggaagtccctcgagatttttatagatctttttaataatgacctcggtggaccctatgcatttcttgaggcatgtgttggcctcaatgggatgatgcttggtggacgtgtacatactgttgtgcatgtgtttcctaattctcctgtggagcatgaggcaggcaagaagagagttgctgaaagttccgtgctaaaaactcctctatctgataagaaagcaaaagttcaagttgcgttttctacatggccatag

SEQ ID NO: 31679 - DNA, 375 bp, Zea mays
  Peptide Sequence Number=SeqID_73458
atggcttggtgcgggtccgcagtggtcgcttcccagcccgcggcggtgtccgccgccccgaagcccgagcaggtccagcgatccccacccgctcgtgctccacgctatggcaccgaggagaccacaaacgaggctccgatgatgcggatcaggggaggtagtcgacgcgcggcgaagtggtggaccggatctgcgcatttatggcccccagggaacaaggaaaccacccaagcgagcacccaggcgagaaactcggtccatgcgcaacctcctgggaagaagaccgagctgacctccgtggcccacagcacagcgtcagtcacagaggctgcagaccgggcccttctgtcagcgagcggggcacagaaacgatag

SEQ ID NO: 31680 - DNA, 426 bp, Zea mays
  Peptide Sequence Number=SeqID_73459
atggaggagatgaaaatggtgtatgaatttgaaatgacgaagctaaggcaattgtctgccgaagtggctatcaaccttagcagcgctcaagtaaagatgaatgatatgaaggctaaaataaacccatgcaatagatgccacaaagagatgttgaagaccttctctgccgtcgaagccgagtgcaaacatgtgaaggcctgcacagaccctgatttcaaggcaaggcaagcagctgaaaaggctgtggatatcataaaaagcttcagaacaataaatttgaaggtcatgattgacgtgaaacataccgaagttgaagctaaggatgctgctgccgaagccaaggccattgctgccagagctgtagagaagactgaagatgatgagatcttgaagatctacgaacaaatttatgacgaagctatgtga

SEQ ID NO: 31681 - DNA, 456 bp, Zea mays
  Peptide Sequence Number=SeqID_73460
atgctgccgcagggagcactgtcattggtatacctcgcagtgattggcgcccagatcggcgccaacacactttttggcgactccgctggggaaatcgagttcaaggaacacaaggagcagctggtcaaggaagcgcaggtgaaattcctagccaacttcaaggtgggcaggaatcacaaggtcgttctgcagcaagcgactgatctggcttcactccgacctgctgcagctacccccaaagccgaagtcagctcgctgaaccaatctaaggataacgtggattatgattttgcggagggcagcacggtcatccgccctacgaagcccagccatgtggacttcaggaaatccaagatcaaagaagggcacatcgaggaagttcgaagtcaaggaatagaatttgatgccgaagctttctgtgaggccttcagtcatattcatgaactgcatttctag

SEQ ID NO: 31682 - DNA, 382 bp, Zea mays
  Peptide Sequence Number=SeqID_73461
atggcggcgcaaggggcgggaagggcggttttctcttctctggctaagtctctcgggttgcgaaaacctaagagggaggcaggaagcggagcaaagaaccgtcaccagaccctctcccgggaaaagcgggcgacgcttcgccttcggcaaaataaccgcgccaaaaaagggaccgggaaaggggataccccgaaaaggatccttccccgtgaaggaaccaggctccgagcctccttactgatcagaggttcgaaggctggccccccgaagggttcaacagccgcctcagatcgcgtgggccctacacccactactggggttcgaaggctggcccccaaagggttcacagccgcctcagacgccgagcgagggatgaccatgg

SEQ ID NO: 31683 - DNA, 291 bp, Zea mays
  Peptide Sequence Number=SeqID_73462
atggtcacggcgcacggcggtactggcccggccaaagtgctccggcgagcaattggtgcattaccggaggatatccccgcccggaaggtccacgaagacgtgcgggtaacacaagagagcatccccaatcgcaagccgagaccagagcgacgcccaggtcgagaatccccggcggcggacgacagactctctttctcggcattgttttctcggtcgcgggagggtggctggcttcgtggggctttcggtttcgtggttaggggattggagccttggaggggcgaggcgtga

SEQ ID NO: 31684 - DNA, 318 bp, Zea mays
  Peptide Sequence Number=SeqID_73463
atgatctctaccctgggcctggtgcaggcttctaccctcacagtggcattgggagcggtggcagcatgcatgttgccagggcttaatggttattttggcgcaacaggtcctaatgatccgcgcttctttccttctaatcccttctctgccccatttggtgggcttgggagtgttccaccaggtagtcgctatgatccaattggcccacctgacgtcccagggtttgagccatctagctttgttaggcgtccaaggcggcctccaggcgggagcacccaccccgacctcgagttcttccagcaaggcccagacttctga

SEQ ID NO: 31685 - DNA, 1140 bp, Zea mays
  Peptide Sequence Number=SeqID_73464
atggatcgcgccgagctcaccaccgaacaggttctgaagcgagatattccatgggagcattacatgtcaactaagcttatctccggaacgtgccttcagcttttacggcgatatgaccacaaaccggagagccagcgagctcctttgcttgaggagatcttactttactttgactatagtgcacgaccaaagcttcagaatggcacacttccaaatggagatgcttcgaattcgaagagcaagcttacttcaacacacgatgtattgagaggtttggttgattggctctgttcacagctgaggaatcctacacacccgagctgctctattcctacttctatccattgcctctccactttgctaagagaaccatatgttaggacattatttgttcaagctgatggcatcaagctgctcattcccttaatttccccagcttccacacaacagtcaattcagctcctttatgaaacttgcctctgcatctggcttttatccttttatgatgctgcagttgattatttgtccaccacaagggttatgccaagacttgtagaggttgtcaagggctctactaaagagaaggtggtcagagttgttgtgttgtccttccgcaatttgctggcaaagggtgcatttgctgcccagatgatcgatcttggattgccacaaatggtacaaaacttgaaagctcaagcatggactgatgaggatctgttagatgctctgaatcaactagaggtgggactcaaagaaaacctcaagaagttgagttcctttgataagtacaaacagcaagttcttcttggtcatctggactggtctccaatgcacaaagatccaagtttctggcgtgagaacattaacaattttgaagaaaatgatttccagattctgcgagttctcatgacaatcattgacacatcaagtgacaccaccgctcttgccgtggcctgctacgacctctcacaattccttcagtaccatccatctggccgaatcgtggtggcagacctcaaggctaaggaccgagtcatgaaactcatgaatcatgagaacactgaagtgaggaaaaatgcattgatctgtgtgcagaggctcttccttggcgcaaagtatgccagtttcctgcaggcttga

SEQ ID NO: 31686 - DNA, 435 bp, Zea mays
  Peptide Sequence Number=SeqID_73465
atggacagcatgggcaacgagatgctcgggaagagaggcgagatagctctacaccatcaccaggccctgggagcggtggagcaccaaggagtacgcccgcttcgtcgaggctctgctcatgtttggacgcatctagaagaaattggggagcatgtcggcaccaagacaaaagtccagttgaagacagtccttcccacatgcagggttaatacatttgcaatcgtggatggtggtaaagaacatgtgtatggtgcatccaacaatgcagctcgatccacaacaaacagaaaggctgcaaagaggctatttacaaaagaacttggaaggggagacattgctgatgaggccaggcgccaaaaggaagttgaagtgagactattagaggaggagacgacaaaaagagttgagcaagctattaggaagaaggttgagtag

SEQ ID NO: 31687 - DNA, 747 bp, Zea mays
  Peptide Sequence Number=SeqID_73466
atgccctctcagggcaccccatacgtggtcttcgagaacattatacaggggtatgacgaggccgcctgcgaggggtatctgggtgttgagcccaacctcaccttatggcggtacttcttctgcgtcgagctgttgcgaaagagggaggagcaaaggctccctgtcatcgaccggagcactccgtctgaggcaccctttaattggagctccgatgctacacccaaggagaaaactcgaatccaaagccatctgtcgggggtgctcttccaccgagaaaaaggcgtcatagaagtggacgtcattggagcctaccttcaacgaagggatggctcctctgaaggtttgatatatgccctatacaagatggggaaggatttttcatcattgggtgtcgaggtccttccaagcgactcagacgttgctcgatggatgagacaagctttggaaatatggaaagaggtgcagggggcggcgtggccatccttgcctatagccctcgagtgcccaccgatgcggcctgagccgagcttcatcgaatttgcgctgtcggggactgccgtccccactgtacatccctcgttggcggcccgagagcctaccgtgatgggtgtagttgaagtcaggccagtagggtctgagttcggccaaccggcgtggcctgagcatctaaaggtcaagacgaatgatggcctcccaacggcccatctaggtctcgaggagacacggtcgccatgcggtcgtgtctag

SEQ ID NO: 31688 - DNA, 330 bp, Zea mays
  Peptide Sequence Number=SeqID_73467
atggggcagaagtcgtcgtacctcctgctgctcgtcggcctcctcgccatcgccatgctctgcgccggcccgggtcacgcgctgagccaactgaacgacgccaacgacggtggcctggagttctccttgggctccaaggaagccatggcgggggccaagaccgagccgctggacccgtccctgagcgaagactacgaggatggctatggcgttgcgctggggctgcgcgttgtggtctggggcaggttgtggttcgtgcaggcgggcacgcgggtgggtggtgggggcactgtggacgcctatgttttaggcttaataggagtagtatag

SEQ ID NO: 31689 - DNA, 468 bp, Zea mays
  Peptide Sequence Number=SeqID_73468
atgtggggcccacctagaagccgcacagccgcgctcactccccatcccctgatcggtcgggcccgttcactagctgaccgcatccacacaacgacacgtgggccctttctgtcggacgcaagaagcctccgtggacgccactctcatgtgactaacaagccgcccccacgtttggccatggtgtttggtgcctcgaccatcggatggccattgcctgtgtggaacagggcggcggcggagaggattgccactgtgcagacaccgtgggttggggaaggtagggcatgtcgtcgatctgttgatggacgactccgattagcgcacgcgtaccccttcgatagagttccctcgggtcgtcggatcatgatcccgagatccagatttgatctaggacgttttaaatcaacaccgtggatctctgatctaacggacataattttgtaccggttcggaaaggcactgatttaa

SEQ ID NO: 31690 - DNA, 276 bp, Zea mays
  Peptide Sequence Number=SeqID_73469
atggctcgactggcacctcgagaagacgtctgcgtcaaccaagcgagggccctgatctcgatgagtgttgcagagaatctcgacgtcatcacgcgccaggacgatgatgcaccccgtaagaagctattggctcatacatcagcgctgttacaaccactacggcatgggcgacctctccctcgggagctcggacatacggacgacccctcggtcttggcctcagctctccacgggaagccagcaggactgggaacgtcccttctccctgtgctgtaa

SEQ ID NO: 31691 - DNA, 258 bp, Zea mays
  Peptide Sequence Number=SeqID_73470
atgtcgggagaacacgccaaaaaggagaaggctggagacaaacaaaaagagcacaaggaggaatctgccagctccatcaagtcacataggaagggtgacaagaagaaaaagaagatgaagaaggtggtctactacgagaccgattcttcctcaccttccacgtccggtgccgagtccacttctttgaagcgccaagagcgtaagaagtatagcaaaccaccatattttgatggtgaaagattattgtatgtggagtga

SEQ ID NO: 31692 - DNA, 1563 bp, Zea mays
  Peptide Sequence Number=SeqID_73471
atgtccggcggcgggtgcagcatacgcgccatctggatccttacgcccaacgacacagtagccttctccaggcggttcgctgtggtggagaagcggtggcgtgccgcgtgggaggaggaagaaggagacggagagagacaccgttggggcaccggggcggcgaagatgccgctgcccgccgaccacgaggtcgccgccgcattcgccgagcgccggagaagggagggcactgcacgcagttcaggcatccgaacaaacgtatcatctgtgggactggattcttgggttgatgatccaattacccgccacattatctcattacacatggataaagaggaaggagatccctttatgctgtggcctgtggtcctacaaaagcgtggagggtactatgtccttgtgttgcctctggtggatcctcagccatttagagcatatgagaatctcttgaaaagagcatttatggttgcacaagttgttggggacataattactggtgatattgctgaacctgaggtgattgttagctctgggccatctgttggtggactcttggattcattgactggaagtataggtatttcagcacgagcgaagcctattgccgcacctgttgcagcaccaactgcatcagtctcttcccctgttggtgctgctcaatcagactccttaaaagggggtgtaaggccttttgacaaggatttactgcagaacttcatcattggtgcaatgccttttggcacacctcaagatctcaattatgccaatgttacttcgattagaactactggattttctggtgaccctcttccaacagaccagaaacaacctgcctggaagccctacctgtacaaagggaggcaaaggattctgttttctagcttggagactataaatgctgcactgtatgaccgtgatgatgttccagatttcctttctgtttcaggacaggtgacctgtagggctgaactagaaggactacctgatgtttctttgccattgactggtttaaaaactgctcatattgaggtttcatcattccatcactgtgttcaagcttcagagcccactgctaataagcaaaccctggtttttcagccaccattaggaaattttgtattgatgcattatcaagcaccatgcaacattgctcctcctgttaaagggttctatcagttgtccatggtttctgaaaatgaaggtgcttttctatttaagctgtcattgatggagggttacaagtctcccttcattatggacttttgcatgattacaatgccattccctcgaagaagagttgcatcatatgacggaaatccatcaattgggacagtttcaatgacagagcattcaattgaatggagaattgtctcaagtggacggggacttagtggtaggagcattgacgctaccttccctggtactgttaaatttcagcctagaacgacacagagaataaattcatcatctcgattcatttcaagcactggatatactgaagatagtgacagtgaacaagataacgttaagaatggagctagcttggatgactactacctataa

SEQ ID NO: 31693 - DNA, 231 bp, Zea mays
  Peptide Sequence Number=SeqID_73472
atggctaggagggaggaggagccgcacccggcggtaccgctgacgctgctgctgcgttgctgcgggacgaggtattttattggagatattcaatggactgctggaccgaggttgcctgcatccgcctctagcggcaaggatcatcatcggagcatggggtcatcatcggagcatgggggcattcaagggacacatgctcctaggcaccctattcctactagtggggttcta

SEQ ID NO: 31694 - DNA, 663 bp, Zea mays
  Peptide Sequence Number=SeqID_73473
atgcctgtgagcaggatcgccgtgggtgctccgggcgagctgtcccaccccgacaccgccaaggccgccgtcgccgagttcatctccatgctcatcttcgtcttcgccggctcaggatcgggcatggccttcagtaagctcacggacggcggcgccaccactcccgccggcctcatcgccgcgtctctggcgcacgccctcgccctcttcgtggccgtctccgtggctcctgggctccgtcgtcgccctgtcttcttcttaaagatcgccacgggcggcgcggccattggcgccttctcgctgtcggcgggcgtcggcgccatgaacgccgtggtgctggagatggtcatgaccttcggcctcgtgtatacggtgtacgccacggccgtggaccccaagaagggcgacctcggcgtcatcgcgcccatcgccatcggcttcatcgtcggcgccaacatcctggcggggggcgccttcgacggcgcctccatgaaccccgccgtctccttcggcccggccgtcgtcaccggcgtctgggagaaccactgggtgtactgggtcggcccactcgcaggcgcggccatcgcggcgctcgtctacgacatcatcttcatcgggcagcgcccacaccagcagctgccaaccacggcagcagactactga

SEQ ID NO: 31695 - DNA, 225 bp, Zea mays
  Peptide Sequence Number=SeqID_73474
atgaaggggcgcttaaccgtggggcgattgcatgccattgtgcgacggttcgccctcctgactgctggttgccccgaagatgaaggggcgcgtaaccgcggggcagttgcacgctccttcttcaggagtgcaaccccatgggggttggcatccttccgccatcgctcggcttcaaggattttcatcacgcagcctggctgcaatttcccaccagtggtcatctag

SEQ ID NO: 31696 - DNA, 339 bp, Zea mays
  Peptide Sequence Number=SeqID_73475
atggtcgggtatccgtatccgactcaaggaattcgggcttatctagttgactgcatccaaacaccagttgagccagctaactctgaactggatgaccttccctctggtccaggcgtccagctgaaggcagttaaggagaaggagagtgtcaggtgccggacgaggaggactgacggcaatagcttagtgggctgcggcgaggtcatgtgggcttggcgttgggctcatctggcatatgtgccgaggaattggcttgggcctgtaacggaattgaagggtattacgtatagtggtgctagtacccagtcaggagcatgtagtataggagaggatgaatga

SEQ ID NO: 31697 - DNA, 369 bp, Zea mays
  Peptide Sequence Number=SeqID_73476
atggccgttggggaaggctgctgtcgtatggcacaccagacagtccggtgcaccatcggacactgtccggtgcgccagccacatcacccaaccgttagggttcgaccgttggagcttctgacatgtgggccaccagacagtccggtggtgcaccggacatgtcctgttcactgtccgatgaccgttggcgctgtagccgttactccgcttggcacaccggacactccggtgaattatagcggagtggcttcccaaattcccgaaggtggcaagtttgcagtcgatctccctggtgcaccggacagtccggtgacaaattatagcacaattggccattgtaaccacaagcttttttcaaatgacaagtga

SEQ ID NO: 31698 - DNA, 978 bp, Zea mays
  Peptide Sequence Number=SeqID_73477
atgggtctgggtccggttacagcagcgtacatcggtgggagtgacttctccatctcattcaaagttgggaccaagattctatggcccctacaagattgtgaagacagacacaaggatactgtcggcacagtggctttcagttcagatgggaatttgttggcttgtggaagttttgatgggcaaataaatgtgtggaatacagctgcacgagctctcaagggaacccttgagggttctgggtcaggttttgagtggcttaaatggcatcctcggggacatttgataattgcaggatcagaggattgtaatgtatggatgtggaacgctgaccataatgccattataaatacatttgttggacatagtaacacagtgacatgtggtgattttactccagatggtaaacttatatgtactggatcagatgatgcatctttgaggatatgggacccaagaagtgcacaaagcaggcatgttattcgaggccatggttatcatactgatggattgacatgcttatcaatgactttggattcacaaacggttgttagtggctccaaggacagttctgtgcacgctgtgaatgtaaactcgggccagatcgttggctcactagtaggccacaccacttccattgagtgtgttggtatctcatcaagctatggctgggtagctacagggagcatggatcaaaagctgatcatatgggacctcacacaccagtccagccgatgcacttgtgaacatgatgagggagtgacatcactggcatggttaggttcgtcaaggtatgttgcgtcaggatgcatcgacggcaaggtgcgcatctgggacagcctctctggggattgtgccagggagttcagtgggcatgcagatgtagtacagtcgatggccatcacagctgacggcaacgccatggtctcggtctcatcagatggctccgcccgtgtgtttgacatctccatgttcaagtga

SEQ ID NO: 31699 - DNA, 732 bp, Zea mays
  Peptide Sequence Number=SeqID_73478
atgccgcgaggaagcttggagaaccatcttttcaggacctcacgtttccagccgctctcctggaacctacgaatcaaagttgccctgggagcagccaagggccttgcgttcttgcacagcgacaaggccagagttatctaccgagatttcaagacatccaacgtgctcctggattcgaactacaacgccaagctgtctgacttcggtttggcaaaggacgggccaaccggcgaccagagccacgtgtccaccagagtcatgggcacctacggatatgctgctccggaatatctcgcaacaggtcatctcacgccgaagagcgacgtctacagcttcggcgtcgtgctgctggagatgctgtcgggccgccgcgccatggacaagaaccgcccggccaccgagcacaacctcgtcgactgggcgcgcccctacctcagcagcaagcgccgcgtctcccgcatcctggacgaccgcctggccggccactacccgctgccggccgtccaaagggcggcagcgctggcgctgcagtgcctctccgaggactccaggaagaggccaaccatggaccaggtcgtcgcgtcgctgcagcaactcacagccgcccaggaccacgacgatgcccaccggtcgtcgcgcaggtacccaaaagatcaccgtcaggctgcggcgctcaacaaccggaatctgaacgctcatcgccgcctgtccgccttgcctctacccgagtga

SEQ ID NO: 31700 - DNA, 446 bp, Zea mays
  Peptide Sequence Number=SeqID_73479
atgcccttcgatagctccagggaggagctaggcacttgtttcctcggctggtggcaggaggagctggcaagtctcccggacagggaggaccggatgtggggtctgcacggtcgtttcgtggtcagggagaggactgggcgggcggtggagcaggtgatggatgaggaggtcgaagactttgagttgctttgtacgctggagactagtggagctgaggcggacatggagcagcagccttcgtggcctggcgttgccgatatcgagcctggttatgcggagactacgcactgtgctggcggtgacgcatgggccttggcggggcctgtttcgtgggtctcgcttcaggaggcatcgggcactgagtgggatccccgatctttgtcgtgtcgtggagtggagtcggagcttaggacactcttcgaaggcgaggaacttgaactgatgtt

SEQ ID NO: 31701 - DNA, 330 bp, Zea mays
  Peptide Sequence Number=SeqID_73480
atgggctggtggcctgcttcttccctcagtatccgggggataagggcgtttgcctgccttgtgaaggaggcgaacttcaggtttgcggggctgggccgactgcaggtgccgccagccaccgcgtgccagaaggtggtcgctgccgctggtggggctgaggtggtcgccgccgctggtgaggctgcccactgtagaggtggttgcctccgctggcgagaccatcagtgccatctgctaccggacctccggctctttggctttaatggcctcattgtcgccccccgtaggaaggcgggggcgaggaccctttcgcagcggcatacatgctga

SEQ ID NO: 31702 - DNA, 1316 bp, Zea mays
  Peptide Sequence Number=SeqID_73481
atgcttcgtggctccgccgccctcctccgccgcctcgcccctcgtatctcgggcggtggctgcggaaacacgactcaccggcgccttcttcctcccatcgcccccttcctccgcgcccgcttcttgtctgccccgactacctcttcaccgccttcttcgtcttcagctgcctgccacgaggaggatgcggaggacagagacctccccgagatctccaatggtgatgcaggtgcccggctcagcatctccgtcgaccgctccgggctctacaaccccacagagcactcgcacgagccgtcgtcggaatccgagctcgtcaagcacatcaagagcatcataaaggaggtgctgacgaacccacagtcaggattctacatcaaccgtgacgtgtttggggaatcaggggatttcatcacctcgccagaggtcagccagatgtttggagagatgattggtgtatgggcaatgtgcctctgggagcaaatgggaaagccagcgaaggtgaatctgattgagcttggcccaggacgaggaacactcttggctgatttacttaggggatcggccaagtttgctaacttcaccaaggcactgagcattaacttagttgagtgcagccctacattgcaaaaaatccagtataatactctgaaatgtgaagatgaacatgttggtgatggcaagagaacagttagcaagatttgtggagcccctgtttgttggcatgcctccctcgaacaggttccctcaggatcctctttaatctacctcgccaagcgttgtggttgggctagctccgaggagcttgagaagattgagcacattgaagtctgccccaaagcaatggagcttaccgaacaaattgcagatagaattagttcggacggcggaggcgctcttattattgactatggaaaaaatggaatagtgtccgatagtctccaggccatccgcaaacacaagtttgtggacatattagacgatcctggctccgctgatttgagtgcctacgttgattttgcttcgatcaagcgctccgccgaggaagcttcagacgatatctcggtccatgggccaatgacgcagtcccagttcctgggttctctcggcatcaacttcagggtagaagctctcctgcagaactgcaccgaggagcaggcggaatcattgcggacgggctactggcgactggttggagacggggaagccccgttctgggaaggccccgaggaccaggcggcacctgttggaatgggcaccaggtacttggccatggccattgtcaacaagaagcagggcacgcccattccgttcga

SEQ ID NO: 31703 - DNA, 192 bp, Zea mays
  Peptide Sequence Number=SeqID_73482
atggcccctggtgatgatgcggtgggcggcgacggccaggacatcagtgatatctctacttctgaggtatcacattccgccgatgatctcaccgctgaggtagaagagctaaacactgctttgaggggtggccttatctcagtagaaaacaactctagaacacgttctccaattttatcatgtccaaaatag

SEQ ID NO: 31704 - DNA, 300 bp, Zea mays
  Peptide Sequence Number=SeqID_73483
atgggccgtatttgttctctgattacagagaaggaacaatttcatcctggggaggatgagaatgatgggtgcccagccttggcgagctctttcacgaacagtccaatagtccatgtcatcgacgatggtcagcatgatattgtaactgcagtcgaggttcttgcttttgatcttgactggcttcttatccttgagcagagcctaatcattcattcagtagtgaacgtgatcgaggtcgacgcattgtacaagtcgttcaagaagatcaacaacaccttcatcgatgatggggctgattaa

SEQ ID NO: 31705 - DNA, 375 bp, Zea mays
  Peptide Sequence Number=SeqID_73484
atggcgacgacgaaagcgcgaccaccatccgggagcaagtgcgcggggggagggcgggaggtgtcggatcgggctgcaggggctcgccgtggtgccgacgaagaagatggtgccacccccactgcatctccagcggagggggaggcaggtggggggatccgcggcatccgtttgcgcgttgatggcggggagcagagggggaggagggtggggacggcggcttgtcatggaggaggtccggatcttgaagcgcggcgaggaaccgcccgctccagctccctcgccagccccgacgctggtgatagcatccccctgtggcgcaagccgtggcagttgaccagcgcgccatctgctccactggtagagagtgggtag

SEQ ID NO: 31706 - DNA, 2406 bp, Zea mays
  Peptide Sequence Number=SeqID_73485
atgccgttcagtttgaggaatgcgggcgcgacgtaccagcggtgcatgaaccatgtgttcggcgaacacatcggtcgcacagtcgaggcctacgtcgatgacatcgtagtcaagacaaggaaggcttccgacctcctctccaaccttgaagtgacattccgatgtctcaaagcgaaaggcgtcaagctcaatcccgagaagtgtgtcttcggggtgccccggggcatgctcttggggttcatcgtctccgagcgaggcatcgaagccaacccggagaagatcacagctatcaccagcatggggcccatcaaggacttaaaaggcgtacaaagggtcatgggatgtctcgcggccctgagccgcttcatctcacgcctcggcgaaagaggtctgcctctgtaccgcctcttaaggaaggccgagtgtttcgcttggacccctgaggccgaggaagctctcgggaacctgaaggcgctccttacaaaggcgcctatcttggtgcccccagctgatggagaagccctcttggtctacgtcgccgcgaccactcaggtggttagcgccgcgattgtggtcgagaggcaagaagaggggcatgcattgcccgttcagaggctagtttacttcgtcagcgaggtactgtccgaaaccaagatccgctacccacaagttcagaagctgttgtatgcagtgatcctgacgaggcaaaagttgcgacattacttcaagtctcatccggtaactgtggtgtcatccttccccctgggggagatcatccagtgccgagaggcctcgggcaggatcgcaaaatgggcggtggaaatcatgggcgagacaatctcgttcgcccctcggaaggccatcaagtcccatgtattggctgacttcgtagccgaatgggtcgacacccagctgccgacggctccgatccaaccggagctctggaccatgtttttcgacgggtcgctgatgaagacgggagctggcgcgggcctgctcttcatctcgcccctcgggaaacacctacgctacgtgctacacctccatttcccggcgtccaacaatgtggctgagtacgaggctctggtcaacgggttgcggatcgccatcgagctaggggtcagacgcctcgacgcccgcggtgactcgcagctcgtcatcgaccaagtcatgaagaactcacactgtcgcgacccgaagatggaggcctactgcgatgagaccccgtacctgcaatatctccgccaaggagagctacccctcgaccaagccgaggctcggcgggtagcgcgacgcgccaagtcgtccgtcttgctgggcgatgaggaggagctctaccaccgcagcccctcgggcatcctccagcgatgcatctccatcgccgaagcgcctcgagcccttgtcgggaatgctttccggcaaggcttctactggccaacggcggtggctgacgccactagaattgtccgcacctgcgaagggtgccaattctatgcgaagcagacccacctgcccgctcaggctctgcagacgatacccatcacctggccctttgctgtgtggggtctggacctcgtcggtcccttgcagaaggcgctcgggggctacacgcacctgctggtcgccatcgacaaattctccaagtggatcgaggtccgacccctgaacagcatcaggtccgagcaggcggtggcgttcttcaccaacatcatccatcgcttcggggtcccaaactccatcatcaccgacaacggtacccagttcaccggcagaaaattcttggatttttgcgaggatcaccacatccgggtggactgggccgccgtggctcatcccatgtcgaatgggcaagtagagcatgccaacagcatgattctacaagggctcaagccccggatttacaacgacctcaacaagttcggcaagcgatggatgaaggaactcccctcggtggtctggagcctgaggacaacgccgagccgagccacgggtttcacgccgttcttcctggtctacggggccgaggccatcttgcccactgacctggaatacggctccccgaggacgagggcctacaacgatcaaagcaaccaagctagccgagaagaatcgctggaccagctggaagaggctcgggacaaggccttactacactcggcacggtaccagcagtccctgcgatgctaccacgcccgaggggtccggccccgagacctccaggtgggcgacctggtgcttcggctgtggcaagacgcccgagggaggcacaagctcacgcccccctgggaggggccattcgtcatcaccaaagttctgaagcccggaacgtacaagctggccaacaatcaaggcgagatctacggcaacgcttggaacatccaacagctacgtcgcttctacccttaa

SEQ ID NO: 31707 - DNA, 390 bp, Zea mays
  Peptide Sequence Number=SeqID_73486
atggtgagggccttgtggctcggtggccgcgcggccgccgcagcgaggtggtgcacctgccggcgcgccaccgtcgccctctgcgtggccaacctcgtcgccacgctgctcgtgacccgcgcgctctacgctcccggctccttcgcatttgcacccaaacgtgaagaagctgcgaaggcattcgcgagggaagagaagacacgaaaagggctgccgctggagctgaagcagaaagtttcactggagactctgcagatactgcacgatttgggggaaggttctaataccacggaacaacaagaagctatagaagcatggcgtgttgggaagcttagggacatgagaagtacatcttctaagaatttatcaaattttggcctctttcagtga

SEQ ID NO: 31708 - DNA, 1158 bp, Zea mays
  Peptide Sequence Number=SeqID_73487
atggacgccttagccctgggtagggttgggggaaggggtaaaggaggaggtgaggtcacatggtttagtttgggatacagaggagctgtcgactgggaacctttggtggtggcggtggctctcccgcggcgactactggctcccgctgccctccggtggcgcgcggcgcacctgttggggcctgggccgtttatggtccactggaagggagaggagagcgggaggcacgcaaggaaggtcgctagagccgctcctacatacttgggaatacaaatatttaggttttacttcaaatgcactaaatgctctgctgagatcacattcaaaacggaccctcagaattctgactacacagtggaatcgggggctagtcgcaattttgaaccatggcgtgcacaggacgaggcagcagacaaagaaaagattaaacgagatgctgaggagatgggtgatgcaatgaaagcgttggaaaatagagcaatggattcaaagcaggatatggacatccttgcagctttggaagagatgcggtccatgaagtctagacatgctggtgtctctgttgaccagatgcttgaaattttgaagcgttcagcacacgagaaggaggaaaaagcaattgcagagcttgatgaagaagatgaggaacttataaaatcaatcactttccgaaactctggattctatgtaaagcggatagaagatgacgacgacgatgatgatgaggatttggctcctggccaatcaagtagaacaataaaggatgaggggactgttagagctaaaaaaaagcaatgcacgaattttcaaattgtaaccggtgggtgcatttggatcacttgctctcgccttgctgggcaagaagctggaaatgcaatcaatgaatcttctgaatctgtgactaagccaacagatgttttaagcaaaaataacggatcagaggttgccaataaagaagggagcaagagctggatgcccaaatttattgtgaaaccgaagtctgcaagcgcagattctcataagagacagaagattgaatccacggctgtccaagacaccgggaaaggccaagatgatgaacaaaaaagtgaacctgcgaagcaaaccaatgttctccagtccctctgccagaactacgatagtgatgatagtgaatga

SEQ ID NO: 31709 - DNA, 666 bp, Zea mays
  Peptide Sequence Number=SeqID_73488
atggcctcctccgctacctatctcatgctcgccagcgcccacgctcccctcgctcctctcataaggccaccgccgatggcccttgtcgcgagaaccgccgcaacctccatcactaggcgcgaaagagccagtgtccctctgttagtcaaccccgctgcgtgccggccgggactgcggcgccgtggctgggcccatatctgcagagactcgtccctccagggcccttcgggcgccgattctcctgctcaggagcaagaggatctgaagaagagcgaggcggtgtcagaggctgcggctcggattgccggaggcactggcgggacgttaagcgactggagcacgtcggtgctcatcttcgggatctgggcgggactcatgtactacgtcttcctgctcgcgcctaaccagacaccataccgagacacatacttcttgcagaaacttttaaatctgaagggcgacgatggctttcgaatgaatgatgttcttgtttctctatggtacattatgggcctctggccactagtctacagtatgttgctccttcctactggtagaagttgtgatgatgagaggaaggtggccttccctagtagcataacacaaccgaaccaagaagagaaaaacaaggccacaagatatccacaatatggggggccattttag

SEQ ID NO: 31710 - DNA, 1800 bp, Zea mays
  Peptide Sequence Number=SeqID_73489
atgacgggggagaagaacatgttcacctcctacgtcaagaataaggattcccatgacacgatcatctttggagatgggaaccaagacaaggtaaaggggataggtaaaatagcgattactaccgagcattccatttctaatgtatttttggtagaatcgcttggatataatttgctttccattagtcagttatgtcacatgggttataattgcttatttacaaatgttgatgtaactgtctttatacgaagtgatggtccattagcatttaaagatgtatctgacgacaagctttatttagtagattttactaaagaaaatgacgatctaaatgcatgtttacttgataagaccaacatgggctggctttggcatcgctgtctagcacatgttgggataaagaaccctcataagcttctaaagggagaacatgtgttaggactaaccaatgtctattttgagaaagatagaccttgtgcagcgtgtcaagcaggcctgttgcttatcttagcattagtggaagataaatctgaaacccaagaaactctcaagcactttctaagatgggctcaaaatgagtttgagctgaaagtaaagaagattaggagcgacaatggatctgagttcaagaatcttcaagtggaggaatatcttgaggagaaaggcaccgagcatgagttctccgctccctacaggccacaacaaaatggtgtagtggagaggaagaacatgacgctaatcgatatggcaaggacggtgatagcaaaatacaagacgccgaaatggttttggttggaagctgtaaacacgacttgccatgccataaatcgtctctatcttcatcgcctcctcaagaagactacatatgagctactcactagtaacaaacccaatgtttcttactttcgtgtatttgggagcatattctacatcttgatcaagaaaggtaggcattcaaagtttgctcccaaagccgttgaaaggtttttccttggttatgactcaaatataaaggcatctagggtcttcaacaaatctttaggtttagttgaagtcactagtgacgttgtatttgatgagactaatggctctccaagagagcaagttgatcttgatgacatagatgaaaacgaggttctgatggctgcaatgaggactatggcgataggcgatgtgcgactacaggaacaacaagtgcaagatcaaccttctaccacaacaatggtgcagcccccaactcaagatgaggaacaagtacatcaagatgatggcatggatcaaggggagcacaagaacaagaaggaagggaggaggaaggagtaccacaggcacctccaacccaaatccgcaccaacattcaaagggatcatctggtggatcaaattcttggtgacattagcaagggagttacaacttgttcacgtattgcaaaattttgaatgtcaccttgtggatgtgaagcgtattcttcaatatttagttcatatgccttacatcgggctctggtatcataaggggtctacctttgacttaattgactattcagacttcgactatgctgggtgcaaggttgataggaagagcacattagggacttgtcagtttctgggaaggtcccctagtgtcttggagttcaaagaaagaaacatctgttaccctatccaccgccgaggccgcgtatgttgccgcaggccagtgttgcgcgcaactactttggatgaggaaaatcctcctggactttggctacaatctgagaaaagtccccactcatatgtgataataagagtgcaatccgcttga

SEQ ID NO: 31711 - DNA, 185 bp, Zea mays
  Peptide Sequence Number=SeqID_73490
atgccggactatccgatggtaaatccggactgcccggttgtattcgctactatcgagacgccacgtggtagtcctggtgcagccccggactgtccgacaaggaaagcgggacgatccgagcaaaggctcggacgatccaaccatgtccaagggcgccaatctgccaagcagggacagcggtggtg

SEQ ID NO: 31712 - DNA, 138 bp, Zea mays
  Peptide Sequence Number=SeqID_73491
atggcgacaaactgcaatattacggctgcaactgcaatattacggcgacgactaatagacttgttatttgcaggatttcttcaggtgcgatgctggatacgaggccagggcggatgtggtgtctacgacgtgctgtaa

SEQ ID NO: 31713 - DNA, 468 bp, Zea mays
  Peptide Sequence Number=SeqID_73492
atgcagcggcgccgggtcctcatcaccaccacgatcattactccctggcaccggcgccaggtcctcacggacatcaccgccatcaccctcaacctcgctatcacgccccggcgccagctcctattcaccacggccagccgaccggagctcctagtcccgacaaccatggcgggcacaactctccggcaccggtaccagttcatgctgaccatccgggcaacgctccggtgcctgctcctgccagcgcgccgagcccgtacatcagtggcgtccacgctgctccagctccggctcctgcaagccaggtgtcctgcgccccgagcccgtaccaacatggcggccacaacgctcgagcgccaacgccaactccagttcaaggctaccagccagccagcgctcctagtccgtaccgccatggtgatcgtggtccctacgagagcgtggaaagtaacatggctatgcgcatag

SEQ ID NO: 31714 - DNA, 228 bp, Zea mays
  Peptide Sequence Number=SeqID_73493
atggaggtgaggggaggatggaaccatactgcagggaggaaagggcgccatgctgaacttggagagggtgccgaccatccatggaagaaggcagagacgcgccatgggagggaccgagcagatgcagctgggaggggaaccgcggcgctgggagggagatgggtggccgagcggagggatccgccatgggtacttatatccgaagatttggatctgggcgatgtctaa

SEQ ID NO: 31715 - DNA, 417 bp, Zea mays
  Peptide Sequence Number=SeqID_73494
atggcggccaaggctcccgagcgcgcggtgttggacgagatccacccaaggcggtgctccgggtgcgggatggcgcagggtagaggagggttcggcccaggtcgatgggcacccccgagccacacgtggatttcggctaggagcgcgccatgcgcgggatctatggcgaggttgctcaccgacgcgaggggaaaggggatgagtgaggtattcggtgtgattctgtcgtggaccaaggaccatgaagaaatagaagtatgggggtttatgcgcaattgtcagcgaaacatggaaacagtgtgtgggttctttactggtttttcaaatcccctaggacctttgcgcaaaatcgccagcgcgggtgcatttcgcccagtaatgggccgacctgggctggtttcagtccagtactgttga

SEQ ID NO: 31716 - DNA, 159 bp, Zea mays
  Peptide Sequence Number=SeqID_73495
atggcgcgactatggtcgacagacactcccgcccaagctctagatcggcaggcgacaatagctaattggtcaagttgcccatcacaaggttctcagtgctcgaggaagaccatactcttgaaccctaccaagatgccttcacagtcaaacgaggaataa

SEQ ID NO: 31717 - DNA, 606 bp, Zea mays
  Peptide Sequence Number=SeqID_73496
gttagcgcgatccagattagacagcttaaccaacgtttccacagtcggatggttcaggcgcatctgactcactccaaacagaggccagagatgattagagtagagacagaagggagtaagcagctgtccagcactctagagaagtccacgtcggcgaggccggaaactgagattgaactgttgcagctgtccagcgcactcaccatcgacgattcgttcctggacacgataccggcggcaccctcctcctcgccggcgccacaacccccggtccaacaccacagcctgcttactcccgtccccttccccgtcgcccattatggtaggccaaagcgacagtgtgtcattgtaaggagcggtttcggaggtgtggccaccattcgagatccggagagacagactatgggggattcgaagagacagactctaggcaaactcgagattcggaggagatttgttacctggacggcggcgaagacttggcgccggctgctggcgtccgaggaggagggaggcctgggtggcggcgcggcgctggcgtccgaggaggaggaggaaggctcgagcggcgccgagcgagtgaatcggggtgttgattccggctag

SEQ ID NO: 31718 - DNA, 228 bp, Zea mays
  Peptide Sequence Number=SeqID_73497
atggtgaaccaaacactacccatatggctttgtccaaacttggactacacaagcacattgtatattggcatggtcgtacgggactgcacacacaactaccttacaagcaaccggtggctgaaacgattccgggtgcaatccgacgtaaatgaacaaggcctaaataggtggtgcaacctttacaggttccaaaggcaacttgccgtagcagttgaaaaagggtattag

SEQ ID NO: 31719 - DNA, 423 bp, Zea mays
  Peptide Sequence Number=SeqID_73498
atgtcagcaagtcacatgggcaactaccttgttaacaacaatcagccaagcagagggaagtatgcttcatgggcgctcccggtcgaccgatgtggagggcagggtcggagcgtgcagactctgctctcgctcaccgtgaaacagaccatggacgcggcgcaagccagcggtgataggtctaatttcgccatcaacgacgttgaggtgtctacgaaacttattcactattacaatggaatgagaaccgcacttacactagggagcttgtcgaacgcacttggacgtcagccgagtgcaaggtgcagggtcagctctaagggcaagccggcattatcattgacgagaaaaatggtcccttttctgccactcatcgatcatgacatcaccaatgagataccgagtcaccttcaaagaaagcaatag

SEQ ID NO: 31720 - DNA, 165 bp, Zea mays
  Peptide Sequence Number=SeqID_73499
atggggagccgaagtgttctttcgtcactcggtggttttaactccctttcgtgctgtcctgatccatgcaaagtcttcgtgataatggcttctggccttctagaatatttaccacctgcggccaagcgtgtgaaaattcctcggaaagattggcaagctgaatga

SEQ ID NO: 31721 - DNA, 933 bp, Zea mays
  Peptide Sequence Number=SeqID_73500
atgtcctcatctccatcttcagtgaaccgagagcacgggcccgctagcgttggggctggagtccttggggaagaagatcagcatcggctggtctccgtcccgggcggcatcctctccatctcgtgtcgcacctacgcgaccccactgggccatggcttctttccccggtatacctcgcaacaccatcttgcgcacctcctccctctcctccgcgccgcgctcgctgagaactctatccgtctgggttgctttccggctaacatttcacatcatccaaattctcagccttggccgttcgcttgcagtgacacctctgtcgggatcgcgagggatgcgttcaacacgttcttcagtgaaacgggcgcagggaagcacgttccaagggccctgtttgtcgacttggagcccactgtgattgacgaggtgaagaccggggcgtaccgccggcttttccatcctgagcagctcatctcacacaaggaagatgctgcgaacaacttcgcccgtggacattacacaggtgtgacatgttcccctcaccctgagctatttcccggagaacagaaaatgtttttgcaacttaaaatgcaatattggttcaaactgtattcttatcagcttgtcactgttatgcaggctcaaaatgttcttggaaacaaggggactgaaattgcaaaggtagcacatcggcgaactgatgcggaggcgggcgtggaggcgctcgatgccgtccagcaatcagtagttgtcgctgcatcggcgacttctttcccccaccagcatggccgcgtgaatggttcagaaaactccatctggaagtgcacgacagccactacagttgactaccgatgtaaccaagatgatgcaaaagcatcagctggaaacgccatagttgctgctactgagtaccatccttatatccttatttcctaa

SEQ ID NO: 31722 - DNA, 369 bp, Zea mays
  Peptide Sequence Number=SeqID_73501
atggcgaagggagggtggtcgaattcattgccgttcattcttcattcctcgttgcgaggggaaagaaacttctccccggtgatggtggatgcacagcaccaagcaggatgtggcaccagttttaacttctcccctggagcgttgaatgggaaaagaaacagagatggaaggagaagaaacacgcaggttgttgttgacgagatcagtcggtcagaggcggcatttccgtccagtctaccacaagcgtccagtctaccacaaggtgagagccgccgggtcaacagggacagggaaggaagccgccgggtcaacaggagaggagaagaggggagcagtggttgttgtttggtggttggcgtactacagtga

SEQ ID NO: 31723 - DNA, 600 bp, Zea mays
  Peptide Sequence Number=SeqID_73502
atgatggactgcgctggaggccgagaccccgtggaggacttcctcctcggcggcgccggcgccggcgacgacggagatctcgtcgccgtcttctgcgacgacggagggggtagagatgaaccatgttcatctggcccaacatccaaagcttgccgtgaaaaaatgaggagggacaagctgaatgacaggttcctggaattaagttcaattatgaatcctgcccgtatggtggcacaacttagaggtgaggcagaaaagcttaaggaatcaaatgagaagttgcgggagaatatcaaggatctgaaggaggagaagaacgagctccgtgaagagaaagtgagactaaaggtagaaaaggataggctggagcagcaagtcaaagctatgagtgtagctcctacaggatatgtcccccatctccctcatccagcttcataccatcctgctgcgttcactccatttgcgccgccacagcaagctccagccaacaaaagtgctccaatcccagcaccgttccctgggatggcgatgtggcagtggttgcctccgaccatcgtggacacaactcaagatccaaagctctggcccccaaatgcttag

SEQ ID NO: 31724 - DNA, 150 bp, Zea mays
  Peptide Sequence Number=SeqID_73503
atggcttccacaggcttcggcaccgagttgagcgagtatccgatggcggcgcggaggaagtcatggcttgcggtggatagacagaagggcgtgcatagcaagattcttataaccagcggcggagggggcaagtccgagctgccaggctag

SEQ ID NO: 31725 - DNA, 855 bp, Zea mays
  Peptide Sequence Number=SeqID_73504
atgacgctggaggacgtgatgaaggcgacgcgcaacttcgacgcatcctgcatcgtcgggtgcggcggtttcgggatggtgtaccgcgcgacgctggcggacgggagcgaggtggcggtgaagcggctgtccggcgatttctggcagatggagcgcgagttccgcgccgaggtggagacgctgtcgcgcgtgcggcaccggaacctggtgccgctgcaaggctactgccgcggcggcgcgctggcgtggccggcccggctgggcatcgcacgcggcgcggcgcgcgggctggcgcacctgcacgcgtcgtcggagccgcgcgtcctgcaccgggacatcaagtcgagcaacatcctcctggacgcgcggctggagcccaagctggcggacttcgggctggccaggctggtgctcccgacggacacgcacgtgacgacggacctggtgggcacgctggggtacatcccgccggagtacgggagctcgtcggtggccacctaccgcggggacgtgtacagcctcggcgtggtgctgctggagctcgtgacggggcggcggccggtggacatggcgcggccagtcggcggcggccgggacgtgacgtcgtgggcggtgcggatgcggcgcgaggccaggggcgacgaggtgatcgacgccagcgtcgacgagaggaagcaccgggaggaggcggcgatggtgctggacgtggcgtgcgcctgcgtcaacgataaccccaagtcgcggccgacggcgcggcaggtggtcgagtggctcgaagccatcgccgcctccgcctcgctggcgccgcgggtgactgacacagtgcacaccgtgaatacttgtaactggaggtga

SEQ ID NO: 31726 - DNA, 1809 bp, Zea mays
  Peptide Sequence Number=SeqID_73505
atgctcgccgatggcgtccgcgagctggacgagcttggcctctgggcgtcgtggagctccggtgccagtgctcggctgggcctcagcggtgtcgtcgagatggagatggggaggctcggttttaggaggaaggtgtatctcatgggacggagcaggcctgaccacgacgtggtgccgctcctcgagagcttgggagtgcgtctctcctcggccaagctcatcgcgccttacgtcgcttctgcgggccttactgtgctgattgatagggttaagtttttgaaggaaatgttattttcaagcagtgattatgcaatactaattggaaggaatgctaagcgcatgatgacatacttatcaatacctgcagatgatgcactccaaagtactttatctttttttgaaaaaatggaggctagatatggcggtgttagcatgttgggacatggagacatgtcatttccttacctcattgaatcatttccaatgcttcttctctgctcagaagataatcatctcgagccgttagttgattttctcgagcacattggaattccaaagccaaagattgcatcagttttgctgctatttcctcctatcattctttctgatgttgaaaatgatattaagcctagaattcgtgaatgggagaaggctggcattgaacacgactatattactaggatgttgttgaagtatccatggattctttcaacgagtgtgatagagaactacagtaaaatgttgttgtttttcaaccaaaaagggatttccagtacagtcctcgctattgctgtgaaaagttggccacatattcttggctcctcttcaaaaagaatgaattcagttttggagctgtttcgtgttctgggcatcagtaaaaaaatggtggttccagtcattacatcaagtccacagttattactgagaaaacctgatcagtttatgcagaatgttttgttttttagagaaatgggtgttgataagaaaacaacaggaaaaattttgtgtcgttcgcctgaaatatttgcttcaaatgtggataacactctcaagaagaaaattgactttcttatcaactttggtgtttctaaacaccatcttcctcgcatcattaggaagtatccagaacttctattgttggacctaaattgtacattgctccctaggattaactacttattggagatgggtttgtctaagaaagatctgtgctcaatgatctctaggttttccccacttctaggttacagtatagaacttgttatgaaaccaaagcttgagtttctgctaagaaccatgaagaaaccacttaaagcagttgtagaatacccaaggtacttcagttattcacttgaggggaagatcaaaccgcgtttttggctattgcagagtagaaacatagactgcactctgacagagatgttagcaaagaacgatgaactctttgctgaagagtacttggaacttggaggattgctcgagaaacctgtacaatcaagcataggtgtgcactatgctgaagctgttcagctttatgcttggattggtgaggctgtttttcagatgggaggccacttttttttcctgaaaacgaaggagagctgtgtttctttgtattcaaatgtcgtggctctgataaccattgcagttgaatctcacgttggtaaaggtattaacactcttttctggaccgataaatggctgcttggttcctgtatcggagatgtggcgccagctgttcttgctatggtaccagcaaaaataattaaaacaagggctgtggctgacgcactctcaaacaacagttag

SEQ ID NO: 31727 - DNA, 243 bp, Zea mays
  Peptide Sequence Number=SeqID_73506
atgggcggtgaccatggcggtgggcacgccggcggcgacttccgccagaaggtatggagcatgacgggcggcccgtactgccgccccgtccactggcgccgtaacaccgccatcgccatgttcggcgtcttcctcatctgcatccccatcgctatgaagtccgcagagctcgagattgcatcaaagagggacatcgaggaccaggacagggtcggcacacaaaccagttatcggcgcctctag

SEQ ID NO: 31728 - DNA, 783 bp, Zea mays
  Peptide Sequence Number=SeqID_73507
atggccagatgggctggccggggccggctggcccgactgggcttgtttgcatgtgccattaagctggagtccgaggttctcaaggatgtcgtctcccagatagttcaggatgccaagaagaataggaagttcactgagactgttgagcttcagattagtctgaagaattatgatcaacaaaaggacaagagtttcagtggctctgttaagttgcctcgcatccctcgtccaaagatgaaggtgtgcatgcttggtgatgcccagcacgttgaggaggctaagaagatgggacttgactacatggatgttgaggccctaaagaaaatgaacaagaacaagaagcttgttaagaagcttgccaagaagtaccatgcttttttggcatcagagaccatcatcaagcaaattccacgtctccttggtcctggcaagttccccactctggtcactcaccaggaatccctggaatccaaggtgaatgagacgaaggctacagtcaagtttcaactgaagaaagtcctttgcatgggtgtcgcggtcggtaacctgtctatggaggagaagcagatccaacagaacatccaaatgagcgtcaacttcctcgtgtctcttctgacgaaaaactggcagaatgaattctggattctaaagaacaagggagccctttgcatgagtatatcatcaaaggcaatgactattaccgggatagatgatcggaggtactggagccacctcgtcacagaggaatcgaggttttgtagcatcattgtcaaaagttattga

SEQ ID NO: 31729 - DNA, 405 bp, Zea mays
  Peptide Sequence Number=SeqID_73508
atgagaggcccccagataagacacttggactttactgtcattggtagaatgaaacaggtcagggcaatgaacaagctcaagaaagttgcattgaagatgaaagagattatgggcctaaaagaaatgttcagatccctggatacagataacagtgggacaattactcttgaagagctaagatctggtttaccaaaacttggtacaaaaatttctgaatcagaaattaaacaattgatggaggcggctgatgttgatggaaatggtaccattgattatgcggagtttatatcagccacaatgcatttgaatagattggagaaggaagaccacatactcaaagcttttgaatatttcgataaggatcacagcggatacacaaccgtagatgagttggaagaagcttga

SEQ ID NO: 31730 - DNA, 1383 bp, Zea mays
  Peptide Sequence Number=SeqID_73509
atggcaagcatcgccgtactggattgccgagccgtgctttggtcgaatgggtggatctgtctggtgcctttcctcggtgttactatggagttcatcggcagcggcaaggacgtcgtcaagaagatccagctggtggcggccggcgggctgagcaccgagctgccgtcgtcgtcgtcgtcgagaggagaaggggacgcgctgccggcgctcctggtcaaggctccgtcccagaccgtcgccggcttcgactgcgtcggcgccgacgacgtcgccgtgtccctgcacgagatggacgacaaggtggaggagctgcagggccgcccgggaagcaacaaggacactgccatcagagcctacgacgacgcgcacgtcgtcccgtactccgtctcgctcagcatgccggcgtcgccgtcggggttccacctgtcgcagttcatgcccgtggcgccgaccgaccacgtccatcgtcctgaacctacggcgcgatcgccgcggctggtcaagcagacgcggttccactcgcagcccatcgtcctgaacatgaacctgcacccgtcgtcgtcgaccaacaagaacgtcgacgaggcgcggcggtgggacagcgcgcgcgacaagcggttcgacccgttcaagaccttctcgggccgcctcgagcggcagctgtccaacctgcgcggccgcccgcaggaccccgtcgacggcgtatcgtcgtccccggactccgaggaggagaccgatcaggtccccgccgccgaccgctacttcgacgccttggaaggccccgagctcgacacgctcagggccacggaggtgccggtgctgccgaaagacgagaagtggccattcctccttcgcttccccatcagcgcgttcggcatgtgcctgggcgtgagcagccaggccatcctgtggaagacgctggcgtcggcgccggcgacggcgttcctgcgcgtgagccccgcggtgagccacgcgctgtggtacgtggcgctggcgctgacggcgctggtgtcgtccacgtacctgctcaaggtggtcttctacttggaggcggtgcggcgcgagttctaccacccggtgcgcgccaacttcttcttcgcgccgtggatcgcgtgcctgttcctggcgctgggcgcgccgcggctggtggtggcggagatgcaccgcggcgtgtggtacgcgctgatggcgcccatcttgtgcctggagctcaagatctacgggcagtggatgtccggcgggcagcggcgcctgtccaaggtggccaacccgtccaaccacctctccgtcgtgggcaacttcgtcggcgcgctgctgggcgccaggatgggcctccgcgagggccccgtcttcttcttctccgtcgggctggcgcactacctg

SEQ ID NO: 31731 - DNA, 321 bp, Zea mays
  Peptide Sequence Number=SeqID_73510
atgggccgggcacaggcgtgcgcgcaggccgcgggagctgggctggggcagcacagggatgggctgcaaggccgagttggtgggggtgttacagatctaacccccttaacaggaatctcgcccctgagattcaagaagaagctagcaagaaagcaagcggctaacccccttaacaggagcattgatttgcacttgatgacgctgctgctgtctctgatcttgactgatgccaattggataggtgcaagagaaaaaggggaaactactttaaggccatcaaaagacaaggagaatgataagacatgcaagataggggcatga

SEQ ID NO: 31732 - DNA, 519 bp, Zea mays
  Peptide Sequence Number=SeqID_73511
atgacgcttgggcccaaagcctacaaaaccggcccatttccccttccacttccgccggcccacgcgcgcggagtcgctgccatatgggcccactcgtcagcatacctgtttgctcaagccggctactgcgttgtagggtcagcgggtcagcttcttcctcgtgagaaccggagcgtgcgagagactaccggaatcgatcgcaacggcgctggctcaactgcgcgcgaaaacctcgcccggatccctattcctcagccgttttcctcgggcgtgagatccgctgttggctctgctttcaaccaccgtgacagactccaacgaagcttgccatggccgccgggatcggggcttacggttgtatcgcgagccgtggacggggagagattcagtgggaaggagatggtcgccttgtgcttcgattccgcgggccgcaccgagcgggagcggagtactgcctcggcgcaggatctgggggcgccggtgttgactaaggggagaagatgggttcctggccgttag

SEQ ID NO: 31733 - DNA, 225 bp, Zea mays
  Peptide Sequence Number=SeqID_73512
atgtgggacgaccaagtctccgtcgagcaagtctgcgaggcagaacgaccaaccaagtcttcgtcgagcaagtctgcgaggcggaatgaacgaccaagtacctgccaagcaaggccagcaacgtgggacaaccaagtccccaccgagcaagtctacaaggtgaaacggtcgaccaagtacccactgagcaaggcctgcaaggcgggacgaccaagtccccgctga

SEQ ID NO: 31734 - DNA, 282 bp, Zea mays
  Peptide Sequence Number=SeqID_73513
atgcggctcccactcgtcgtgccccccgtctcccctccgcgcacgccaacaaacccccgccagccgccaacaacctcctccggcatgcagcagatgcggcgggaggttgctggcacctgtataaccctgctcacggggccctctacttcaaggcgtgtgacctgccgagatcgtcctgcctcctccgctgacatcgcccaaggaggaaccggcgtaggaggaccaaatcccgccgctgacagagaaggaggaggccacccgtcgccgcaggcgaaagtctag

SEQ ID NO: 31735 - DNA, 705 bp, Zea mays
  Peptide Sequence Number=SeqID_73514
atgcagaagtctgatcatcatgagcagaagctaacttcaccaagagggttaatccataagatacttcgtcgtacaaatagcaggcgttctcccactgcagctgaccaacaaccttctcctgtatctccagaaacaagcaactcatcaatattctcaaagcaaaaggatgttgatgatgccatcaaggattcagaaaagctgagcacacatactatcagaattgaagatgagaaatctgatttgctagggtctgaaatttattctggaaagcttacattagataacaaaacaaaaagttcatcaaatgaacagtctggatcaggatctagtagcaattgctttgatgctaggctcagcactgaagccctaatatggggttctaacatccttaagcttgaggatattgtatctgtatcatataattatggtctccggtatttcaccgtgcatgcttgtcctcttgaaaaaatatccagtggactctcctgctttatgaagcctagaagaacccaaacggacttgaagttcgtatcctcttctccgcacgaggcctttcggtgggttaatagtttttgcggatcagcaatgttactctccaccaaagatacttgtcatcttgaaatcctcgatctggacatggtagatctagcaaagtttttcatggaaaagtggaacccatatttaaggaataggttgtacaaataa

SEQ ID NO: 31736 - DNA, 363 bp, Zea mays
  Peptide Sequence Number=SeqID_73515
atggggaggattgctcagatatccaaggttatatctgagggtggctacgacaagatatttcagcagacttttgagtgctcgcctgatgagaagctcaacaaggcatatattgcattcggtagcgacagccctgtgaaatatgtgactgaggacaacaaaactgagtcatccttttataaggttgttttaccccttcatcacctgagatcagttactcccacagcaagtcagcaaaaccctgcagagaggtacattcaggtcgtttcagtcgacaaccacgagttctggttcatgggtttcgtgaactatgatagcgctgtaaagaatcttcaggagtctgttcgagttgttcacggggcctag

SEQ ID NO: 31737 - DNA, 831 bp, Zea mays
  Peptide Sequence Number=SeqID_73516
atgaacacgattgcttcctccaaagtaggaaggcttataagctggtaccgcaatgtttggctggccggtatggtacaatatttgcgcagcggtgacaacgacggtagtccgcgtgggctgtgttatttggtgcggcccactagcatgcctagcacgccgcacttatctggcactggcccagcttaccgtttcagtcccccgccaacgctctcactgctctgtggcccccctctagctctccctcgcattgtctctcgagaggctgagacgcggcgtcgccttcgtcctcgcaaccgctgcgacgtcttcggtccatgcccgcatcccccatcttcacgacctccacttcgtcagctcttctcctccttgatctctagcacgcgcgcgcaaatgatgcagataaatggaaaccgtgcggaacctaggtcgagcgagggcttgccgcacactctgacacgctctgcatctgtcgttggggcttcgatgcacgcacccaccacgcgctcgacgtgctcgtccaccgcgaggcctccatcgacgccttcgtctcgctcgcgctcgaccacctccactccatctccaccaagggctcaccaccggctccggatccggcgcccgccgccgatgccagcacgaccaagggcctacgcgtactccactgcgttcctaggatttgtggtggcccaccgcaaggagtggaacacactatgggcagaggtgccgaccgcgctcaagctctgcgtggatccgaacaagttcatcatggacgtcgtcaccgacgtcttccccgtggaccgccacgaggtccgaagctctgccgacctagcctag

SEQ ID NO: 31738 - DNA, 132 bp, Zea mays
  Peptide Sequence Number=SeqID_73517
atggccggcatatgcccttctttcctgttggagctaaggatgacctctatattaactgcagtcttttctcaacttgaacaacttgatcttgctactgtcgagaccgatgttgatgagaaagtcaaagataag

SEQ ID NO: 31739 - DNA, 372 bp, Zea mays
  Peptide Sequence Number=SeqID_73518
atgccacttgcttcctttctcattgccactagaactaccaccacttctctaggtaatgctatacgtggatatgaaggtcaatggtgtacatttgaagcccaaccgtataaatctacattatacacccccctgaatcaaaatttatctgttgtttttgacaacgacgactacttcgccaccaccgcgtcgccgcaccccgtctggggcactgtcggtgagcccgccaaggaagaggacgacgtcgatgatgttgtgcgcgcctcccttcaggaggtactgaagacactttttgagatcatgctctttgaggatgttggtaatcagtgtaggctgcgtcgaccaatattgagcctgataatgaccagcgaatag

SEQ ID NO: 31740 - DNA, 285 bp, Zea mays
  Peptide Sequence Number=SeqID_73519
atgactgagccgccaagatctccctccgctcctggtgctgatgttgatgcccatcacaccgctgaggagcacgcgcgcacggaacaagaggctcaggaccctgccttggcgcgcgccctcaaggccgaccgtaaagctactgtcgtcaagaaagagatcgaggcggccttcgagcgccttcgtgccgctcaagaacatatgcagcccacgagcggaccacggctgcaccacttcgggttgaggatctcgctcccgatggagcgattgatgtcccgccacttctag

SEQ ID NO: 31741 - DNA, 2451 bp, Zea mays
  Peptide Sequence Number=SeqID_73520
atgcagttggaaggggtattttgtcccctgaaggatcaaagaacctttgtttcatccccgaaaatcaggatctcgcctcagggaaagtatattgctacgttggatttgactggttttgtaaactttttttcacttgatggtgacttgcgcactgttccacttcaaactcttggaaaggctagacacctaattgatgttaaggacatcagttggtggacagataatgttcttatgttggtaagaaaagatggtagcattagcatgtacagcatcactgaagacaagatagtttccaatgatgacccggttttatctacaccaatattggagaaggcaaaggctactgaaggacatgcttttgttttgcaatctaggagatatggaacaaacactccagttaataagcggatggatagtgactcggaaccttgtctgctgagtggttctggggagcaccaacaaacagaaggggatgaaatgtcctggagtctgatatcattctccaaagttacagtagcagaaatgtactctgttctgataagagagaaacgatacaaggacgctttagattttgcttctagatacaatctagataaggatgaagttcttaaagcatgctggttgcactctgatgccaatactcatgagatagactcgtacttagcaaaaattaaagaccaagtatttgtattatcagaatgtgtaaacaaagttgggcctacagaagcagatttaagggctctactttcttttggactttgtataactgattgttacagattttctgagttagataacagcagtaagggctcaacatgggacagtcgcaccattaggcttcgtttattgcggcacatagacatgttagagacattcttgggcattaatatgggaaggtatgcagcaggagaatatagcaaattccgttcaatgccattggtggaaacagccatagcattagccgaaagtggcaaaattggggctttaaatcttatattcaagcgtcatccatatactgtctcttcagatattttacgtgttttgtctgctatcccagaaacccttgctgttcagacttatagtcagttgctgccagggaaatcccttcccagtgttgtcatattaagagctggtgattgggttgaatgtgaacagatggcttcatatataaacaattgccctgccgagttggacaaggtcgaagagatcaaaacggaaatacttgtaaagcactcaaaaggcttttcatggccttcagttgctgaactttgtgagtggtataagaacagagcaagggacattgactgcttaagtggacagctggaaaactctctggccatgatagagcttgcatgtcagaagggcattgtagagttgcagccattctttgatgatattaaatgcctctaccaggttgtatattctaatgaattgaatgagtttacaatgaatcttttgacatgggaagatctgcctgattatgaaaagttcaaaatcattctcaaaggagtcaaagaagatacagttgttcaacggctagaagaaaatgctatccgttttatgaagaaattatatgaacacaaacaagaatcctaccttgttagttggctgaaagaggtagctgctaaaaatgagcttttgatttgcttagctgtcattgaaaatggttgtggggaatcaccaatatatggtctcttcaaggatcttgctgagatgatagaaacctctgttcactgcatttatatgtgcagtgcaactaaccagtggaataccatgtcatcaatattatcaaagtcactctataaaacaaagagggagaaatcgttagtggctagtgaagaagactgcaatctgaaagatgctaagcatgctcttggttcttctatggtttcttatgaggagatgcaatgtgtctgtgctgatatcttatctggtctgggcaatgctccagaagatttttatcactatgattcagtacctgacaaacctaatgatgtcaaatatcttgatatattggagaagaggctaaaagttgctgaaggccatgtagaagtaggacggctctttgcttattatcagagtgccatcactgttcggatcctcatggattttcatagcctatgggatattgtcaactcggtggagctacaaccagatgtggatgatcaaccagagaaccggtcaaagaaccagtcttgttgcggaggttgttggagcgtcatggtctggaagttggctgctagcctgctgatcctagccttgagacaaagagggatggatgggtgtaggagggacgcaccactgactagcccattggccaggaggatcgatgacgtaggactgcgacgcctgctgtggcttgtagggcgccttagggcgtggaggtgtcagggctcgtcagttcatggacccagccacatgttgatggcgccggtccacgagttctggtag

SEQ ID NO: 31742 - DNA, 222 bp, Zea mays
  Peptide Sequence Number=SeqID_73521
atggggaaaagagagacgatgcgagcacgagctcagctcgcggcggtcatggaggtcggtgtcgggtggaagaaagacgagagcaagagagtgagggcaagttatttatttttgaacgcgcagaagtttgagaagaggtacaagattagacttagaaaaatcagggttgtccccatttctttttggtttttgaagaaacttcattcatcgggcacacagtaa

SEQ ID NO: 31743 - DNA, 483 bp, Zea mays
  Peptide Sequence Number=SeqID_73522
atggccaccctcgcgacctacttcggcatcgggaagcagaagcacaggggcctggaccacgcgcgcatgaacctcgaggtgctcaagcactgcgccaccgtcctgctgctggagtccagcctgccggacgtcctctgcgcgcagcagtctcgccgagccgcggtcaccaggaggacgtcgcaggcgcagaccatcaagccgccacctaaacatgctgtgcaccaccacctgcggcccggcggcgtcgtcatgtcgcagacaaagctaccatttaccgctgtaacagctacacctgcacctgcggccgccaccccctgcggcaagaggaatagcctgggcaaggtggtggcgagggccgtgacggcggcgaccactgccccattgagtagcagtagcagcacaagcacaaacactaggcgccccgtgacggcgaccacgcccttccacatgatcctcaggcactccagggccatcctcagatga

SEQ ID NO: 31744 - DNA, 408 bp, Zea mays
  Peptide Sequence Number=SeqID_73523
atgaagaaggtggtctactacgagaccgactcttcgtcgccttccacctccagctccgacacgccgtccgtcacttctaagcgccatgagcgcaagaagtttagtaagatccccttacgctatcctcgcatttccaaacgcacacctttactttccgtcccactaggcaaaccaccagtttttaatggtgaagattattgtatgtggagtgataaaatgaggcaccatctaacctcactccacgctagcatttgggacattgttgagtttggtgcgcaggaaccatctgtggatgatgaaggctatgattcggacgaggtagcccaaatccggcacttcaactcccaagccactactatactcctcacctctctaagtcgagaggagtataataaggtgcaagggtga

SEQ ID NO: 31745 - DNA, 870 bp, Zea mays
  Peptide Sequence Number=SeqID_73524
atgtcctggccgacgtcgcctccatctgcacgcgcaggcgcgggcgaccaaccaggcgctgccgcgggcggcgcacgcgcagccgtccagcctgctgccgcggtcggccaggcaggcgttgccttgggcgcctcacgcgcaagcagccaggcggtcgctgccttgggcggcgcaggcagccaggcggtccctgccttgggcacctcacgtgcaggcagccaggcggtccctgccttgggcgcctcacacacaggcagccatgcgctcgctgctgcgggcggctcacgcgcaggcggccagcttggcgtccccgcggtcggcgcacgcccagtatttcagccagcggctggacagcgcgcggccgggtctggacgtgctgcatcgaccaaaaaagctagagatgatgatcaggagatacctggtgttgggaaatttaagaataggcctctccaaaatgaagatgatatgaaggtgatgtttgggagcatcattaatgaagagacagatcattggaatcctatgtcttccaacccgatcatgccacctagtccagatcaatcccctcacattgatttggagaatggtgaggataatgttgaggagaatggtgaggagaatggtgaggagaatggtggtcaagatattggtgatgatatttttgaagtctctcctacacctagcaacaaacctaagacaaaggctaccattattcttgacaaacctaagaagaaatcaaagactagcactggacttgttatccaggaacatatttcgaagatatcaaagagtgctgatgcttttgtatctttttggctaggagggatcagtattgatgaagtcatggggcatgtcatgcatacgaatctctag

SEQ ID NO: 31746 - DNA, 201 bp, Zea mays
  Peptide Sequence Number=SeqID_73525
atggggctggacgagctgatgcacatagaggggaaaagaaaggggggcgaacagggagatttgctcgaccaccaagggaaacggctggcatctagggcgccatgggaggatctcctgcatgtagagaggaggagggaacatggcgagcgccatgggagggatggggaagacgccatggcggcctacgctggaggaagatag

SEQ ID NO: 31747 - DNA, 165 bp, Zea mays
  Peptide Sequence Number=SeqID_73526
atggggacggttgatgtatgtggggacggagtgcctcgccacgtcgtatgtctaggtttaccttgttctctggaggacatggttgctggagtgacttggctgtccatcctgcccaccgggttggacagtcaagtgggaccctacctcggcaaaggaggagcatga

SEQ ID NO: 31748 - DNA, 537 bp, Zea mays
  Peptide Sequence Number=SeqID_73527
atgagaaagcgaaaccactgcgcgcggaagaccccccttttttcaaggaagggctccccgcgcaccctggagaaatcctcctggtgcacacctagcgcccgaacaactcggtcactgacaaaagggcccggacccacgagtcatgtgactaaggcgctggcctccgtgcgcgggaaaggcaaaccgtcgcacccgctcccacgtcaccttggggccaccgccggaggatattctcaacataggcaaggccagcagaacaccccatgcatgcggggcgcgaccgaaccgccatgcgtgggggccacacgctggtcaaccacaaaaaccgacgtgacggttggtgtagccagtagcgagctggatacaggttttggccccacctacaggctcgcaccatcccctgaggtgggcccgggggccactgtcggtacctcgaaacaggggtaccccttctgcagtatgaagacgctgcacccgtacgacacccctaggtcacgtggggagcagcacccgaccccaccacatgggcagggctag

SEQ ID NO: 31749 - DNA, 297 bp, Zea mays
  Peptide Sequence Number=SeqID_73528
atgtcttctatacctcacgcaaggacacaccaggaagaaattcgacgacgtcaagctttggtggacgaggtcagcaacgtcatggtgttcggcgcgggatggaaagcagcacaacagcacggatataatgacgacgtcgagcaagcgcaacaattgatcgacgagcagcaggagggcgcgagctttagcgtagagaagcttggcgaggaggcggtgatgcctggttgcttccgacaaccgcggcgaactgcacgcgcggacagtggaggtgacgctcggagagaggcaagcagatga

SEQ ID NO: 31750 - DNA, 3771 bp, Zea mays
  Peptide Sequence Number=SeqID_73529
atggacaccggacgacggcgcgcaaagaaggacgacgctgccgcggcgctggtggcgctggggtcttcggtgttcgtgcacgcggacaccgtcgacgtggccctgatggtgctcggtctggtcggcgcgataggcgacggcatggccacgccgctgcggctgctcgtcgccagccgcatcgccaacgacctcggcagcggccccgaccacctccaccacttcacctccaggatcaacgcgaacgtgatcaggatcatcctcatagcgtgcgcctcctgggtaatggcgttcctagagggctactgctgggcacggacggcggagcggcaggcgtcgcggatgcgggcgcggtacctgcaggcggtgctgcgtcaggacgtggagttcttcgacctgaagccgggctccacgtccgaggtggtcaccagcgtgtccaacgacagcctggtggtgcaggacgctctgagcgagaaggtgcccaacttcgccatgtacgtcaccacgttcgccggcagctacgccgtgggcttcgcgctgctgtggcgcctcacgctggtgacgctgccgtccgcgctgctcctcatcatcccgggcgtctcgtacggccgcgtcctcacgggcctcgcgcggaggatcagggagcggtacgcgctcccgggcgccgtcgcgcagcaggccgtctcctcggtgcgcacggtctactccttcggcgccgagagggccaccatggcgcgcttctcatccgcgctcgaggagtcggcgcgcctcggcctcaggcagggactcgctaagggcgtcgcgctcggcaccaacggcatcgccttcgccatctacgccttcaacatctggtacggcggacgcctcgtcatgtaccacggctacccgggcggcaccgtcttcgtcgtctcctcccttatcgtcatcggcggcgtgtcgctggggtctgcactgtccaacgtcaagtacttctcggaggcgaccgcggcagcggataggatcctcgaaatgatacggcgggtgcccaagattgactccgaaagtgccgccggtgaggagctgcccaacgtcgccggcgaggtggagttcagaaacgtcgacttctgctacccgtcgcggccagagagccccgtcttggtcgacttcagcctgcgggtgccggctgggcacacggtggcgctcgtcgggcccagtgggtctggaaagtccacggcgatcacgctgctagagcggttctacgacccctccgccggggaggtggcgctagacggcgtggacatccgccggctccggctcaagtggctgcgcgcgcagatggggctcgtcagccaggagcccgccctgttcgcgatgtcgctgcgggagaacatactgttcggcgaggaggatgcgacagaggaggaggtggtcgcggcagcaatggcggccaacgcccacagcttcatatcgcagctgccgcagggctacgacacgctgtcatgtgcgaaacgaaaacaaaaacaggttggtgagcgtggtgcacaaatgtctggagggcagaagcagaggatcgccattgccagagcgatcctgaggtcacccaagatcttgctccttgacgaagcaacgagcgcgctggacaccgagtccgagcgcgtcgtgcaggaggcgcttgacgtggcctccgtaggccggactaccatcctcgtcgcacaccgcctctccaccgtccgaaacgccgacagcatagctgtcatgcagtccggcgcagtccaggagctgggctcccacagcgagctcatcgccaagaacggcttgtactcatcgcttgtccatcttcagcagaacagggattcgagcgaggacaccggcgaggccgccggaactcgtcgtgcatctcctagtgcagggcaatgcagcagcgatgatagcaagatggcgccttcagctagctgcagatcaagttcagcacgctccatcatcggtgatgatgcaagagacggcgagaacaccgacgagaagccaaggcctcccgtgccatccttcggaaggctgcttctcctcaacgcaccggagtggaagcacgcactggtggggagctcgtgcgcggtcctctcaggggccatccagcctattttcgcgtacggcatggggtgcacgttctccatctactactccagagaccatgaggagatcaaggacaagacggagaagtatgccttcgtcttcctcgccctcgtcgggatctcgttcctgctcaacattggacagcactacagcttcggtgccatgggggagtgcctgaccaagaggatcaggaaacagatgcttgcgaaaatcctcaccttcgagatcggatggtttgaccatgacgacaactcgactggcaatatatgctcacagctcgctaaggacgccaacatcgtaaggtcactggtgggcgaccgaatggctctgctgatccagacggcttccatggtggtgattgctttcaccgtgggtcttgtcatctcctggcggctggcccttgtcatgatagcgatgcagccgttcatcatcgcttgctcctatgctcgccgtgtcctgctgaagaacatgtccacgaagtcgatacaggcgcagtccgaaaccagcaagctagctgccgacgcggtctccaacctccgcaccgtcaccgccttctcgtcccagggccgcgtcctacgcctcttcggccaggcgcaggacgggccgcacagggagagcgtccggcagtcgtggttcgcgggtctagggctcagcgcctccgtgagcctcacgatattctcctgggccctcaattactggtacagcggcaagctcatggccgagcggctcatcaccgtggaggcggtcttccaagccaccatgatcctggtcaccacagggcgcgtgatagcggatgcgtgtagcatgacgacggacatcgccaaaggcgctgaggccgtctcgtcggtgttcgcaatcctcgaccgccaaaccaagatcgacccggacagccctgaggggtacaagccggagaagctcattggagaggtggaagctgtaggggttgatttcgcgtacccatccaggccagacgtgatcatcttcagaggattctccttgagcatggtggcaggcaagtcaaccgctcttgtcgggcagagcggctctggcaagtcgaccatcatcgcgcttatagagcggttctacgatccactcaagggtgtggtgaacatagatggcagagacatcaaagcgtacaatctccaggccctgcgtcggcatattggactcgtcagccaagagccgacactgttcgcgggcactataaaggagaacataatgctggaggcggaggcggcgagtgaggcggaggtggaggaagccgcaaggtccgccaacgcgcacggcttcatcagcaacctcaaggacgggtacgacacgtggtgtggagaccggggcgtccagctgtcgggagggcagaagcagcgcgtcgccatcgcccgcgccatcctcaagaacccggccatcctgctgctggacgaagctacaagtgcgctggacagccagtccgagaaggcggtgcaggaggcgctggacagggtgatggttggccggaccagcgtggtcgtggcgcacaggctcagcaccatccagggctgcgatacgatagctgtgcttgataggggagtggtggtggagaagggcacgcatacgtctctaatggccagcggtcgctctggaacctactttggcttggtcgctttgcagcagggaggcaagcagcactga

SEQ ID NO: 31751 - DNA, 456 bp, Zea mays
  Peptide Sequence Number=SeqID_73530
atgcaggcggcatgcaaccgcaccaagggggcgcgccctttcgacttcggcgcgtccagcatggaggcccaggcccacacgtcatgtaaccggcgcgccggttgctacgtgcaaaaaactgcaccgccactcgcgccactaccgtgcctcctcgactgcggaaccagtgtcgcgactcgaggcaaccctgcgcatgacccaacagtgccaaccaggcacatcgatcacggggaccgggaaaggggataccccaaaagggatccctctccgcgaaggaaacgggccctgagccccccttctgatcagaggttcgaaggctggcccctcggaagggttcaacagccacctcagagcactcgggctccgcgcccactactggtcaggggttcgaaggtcggcccctcgaaagggttcaacggccgcctcaggccactcgggctccgcgcccattactga

SEQ ID NO: 31752 - DNA, 495 bp, Zea mays
  Peptide Sequence Number=SeqID_73531
atggccatgacagcatcacttttcccatttatgtgctttggaattggcctggtgcttaacactattgctattttctatggatcgttagctgccataccatttgtatcttttattgagatgtactttgtcttcacatcgttctggaactttaaggtctactatgtttatgggttcatgttgctggtctttctgatactcatcattgtcaccatatgtgtaacaattgtcggtacatatttcttgctaaatgcggagaactaccactggcaatggacttcattcttctctgctgcttccactgcggtgtatgtttacctctactccatatattattaccacatgaagaccaagatgtctggattcttccagaccagcttctatttcggctacactctaatgttctgcctaggcttaggaacactatgcggtgccgtcgggtatcttggatcgacattgtttgtgaggaggatctacaggaacataaagtgtgactaa

SEQ ID NO: 31753 - DNA, 1158 bp, Zea mays
  Peptide Sequence Number=SeqID_73532
atgatgggaaatgggttcaggccagacgccgtggtgctatcgagcgtgctcaaggcttgtgcgcatctgggtgctcttgagagggggcggtgggttcataggtttctcaaagcagaggggcttgggaggagtccggataatgtcatgcttgagacggcgcttgtcgatatgtattgcaagtgcgggtgcatggatgaggcatggtgggtctttgatggagtccagagccaagatgtggtgttgtggaatgcaatgattggtgggcttgcgatgaatgggcatggaaaacgcgcacttgagttgttcagaaggatgcttgatatggggtttgtgccaaatgagtcaacgtttgttgttgttctttgtgcgtgcacccacacaggtcgtgtggacgaaggtaaggagattttcaggtccatgtgtgaccatggcatcgagccacggagggagcactacgggtgcttggctgatctccttggacgtgcaggactcctggaagaagccgaggctgtgttgctggacatgccgatggagccacatgcatcacagtggggggctctaatgtcatcatgcttgatgcacaacaatgttggtgtgggtgaacgtgtaggaaagaaacttattgagctagagccagatgatggtggacgttatgttgttctgttcaatctgtatgcagttaatggtttatgggaagatgcaaaagctcttcgtaagatgatggaagagaggggagccaagaaggagacaggtttgagctttatagagtggaatggtttagtccatgagttcagatcaggtgatacaagacacccccaaacaaggcagatctatgcattactggaagatatggagcagagattacaactgattggctatgtcaaggataccagccaagtgctcatggacatggacgacgaggaagataagggaaataccttgtcctaccacagtgagaggcttgcattagcatttggtattctaaacactccccgtcacatgcctattcgaattgtcaagaatcttcgagtgtgccgtgactgccatgtctatgccaaacttgtgtccaagctctaccaacgtgagatcattatgcgtgaccgccatcgcttccacttgttccgtggtggggtttgctcctgcaatgacttctggtga

SEQ ID NO: 31754 - DNA, 264 bp, Zea mays
  Peptide Sequence Number=SeqID_73533
atgagcgacctcatcaaatcaaggaaggataagattcaagccagatcttcaaaaactaaaagccgaattacaaaccaatccttatgtgtcccttttcttacaaatctcgaggacgagatttctgttaagggggatcggctgggtcacctccccattgctcgccgaagcacctcggctgcgctagaaccgccgtgcaccgtggccatcgtcactgcccgcttcactaccggtaaggacacctccaactacaccgcaatcacctga

SEQ ID NO: 31755 - DNA, 678 bp, Zea mays
  Peptide Sequence Number=SeqID_73534
atgcctgtcgccacaggcataggacccacgctccacaaggagcaaggcggagaagcgatgcctcaagaggcgtgttgccaccttaagcggcgccttaactggctcattaccgccatcaagaactcgacaccattatacagcatcatcaccagccaccaagcctatccactcaggtggatcactctgcccgtcacattcggtgacccctccaacttctgcaccgagcgactacagttcgaggtggtggacttcctagggtcttacaacaccatccttgggatgtcgtgctacacaaagtttatggccatccctaactacacctacctcaagctaaagatgtctgaatcacacatggtcatcatggtgtctgcctcattcaagagaattggtcgagcactaggaagcagcccccagggcgccccagacgctcccaaggacagctccaacaccttcaagtctgctaaggacatgaaggatgtcccgatcgacgctacccacatatccaagtgcattcgtattggggcgtcgctctccgacaaactagaaagcgcagttgtcggcttcctccaggctaaccacgacgtctttgtctggaagcctacgaacatgccgaagatcccaagggaagtcgttgagcacactctgaacatccagccaatggccaggctagtcgcctag

SEQ ID NO: 31756 - DNA, 1491 bp, Zea mays
  Peptide Sequence Number=SeqID_73535
atggagctgcctccttgctcatccccaccaaatctggcgtcgcctgggtcatctgtagcagaggcggctgctgctggagatggggatcggagggagcagcagcatgcggtagggaaggagatgagcgtgcgcatcatgagggagggagggtggtgctgcacctgtgtgagccatgagggaggagatgcggcggtgttgcgcttgtgtgaaggagaagtagagagcccgcaggcgaatgtgctgcagaaagctgtggagtgcttacatggaatagagcagtcaccagtatcatcagtgatggaagctattcaaccaagtctaaaggctgttaccagagaagaattgctgaagcatgaggatgacaatgtcaaagttctcttggcaacatgtttctgtgaaattacaagaataactgcacctgatgctccctacaacgatgacattttaagggatatattctatctgatcgtgggtacatttggcggactcaatgatgttaatagtcaatcctttggcaggaaggttgctattcttgaaacagttgctagataccgagcatgtgttgtgatgttagatcttgaatgtgatgatctcatcacaaacatgtttcaaacatttttagttgttgtcagtgagagtcatgaagaatacattgtaaagtcaatgcagacaataatgacccttattatagatgagagtgaagatgtacacgagagtcttctacgtgtactgttgtcagcattggggcagaaaaaaactggtgctgcaatgtctgcgcgtaaacttgcttgcagtgtcatcgagcattctgctacaaagcttgaaccttatctaaagaaatttctaatgtcatcatgggctgggaatgtcagttcttctaatgatcaaattgatcaccagggagttgtatttgatttatatcagtgtgctccgaaggttcttaaggtgatcgtgccatatattactggggaactactggcagatgaagtagataatcggtccaagtcagttgaattacttggggaaattttttccttacctggatcccctattgtggaatgcttcgagactcttttcacagagtttctcaagagactgaccgatagagttgttgaaattcgtatttctgtggttgagtatttgaagagatgtctaatatcaaatccttcccgagctgaagctcctgaaatcatcaaggcactttgtgacagactgttggattatgaagaaaatgtccggaagggagtggtagctgcactttgtgatgtagctacccattctcctgatgctattccaattgatacaattaaagtagtagctgagcgtgtccgtgataaatcgttggctgtgaagtgctataccatggagaggttggcagatatttacaagctatactgccagaggggttttgatagctcaacaaattctgatgattttgagtggatacctggaaaaatattaagatgtctttatgacaaagattttaggtaa

SEQ ID NO: 31757 - DNA, 210 bp, Zea mays
  Peptide Sequence Number=SeqID_73536
atggcggccgtggagcagttgaaggagctgggggagaagctgcaggcggtggcgccggcgcctgcggacgaactcgccaagcttctcgaagtgagatatccccaagcttctccgttttggttggctgcgaaccttagtcatggagtcgatggtttagggtcgggctttgcgtggatctgtggctcaggcgggacaattcggcaagtttag

SEQ ID NO: 31758 - DNA, 485 bp, Zea mays
  Peptide Sequence Number=SeqID_73537
atgaagaagcctaatgagggtgaaaccatggtgaagaataggggagaaaagaagaagccaacaagtaagatcttcaacacctacaccaacaaggtggacaagaaggctgcaacaccatacttgatcaaaaagaagagcggaaagggcctgcaacacccgaataccttgtctagaatcgatgacgagacttcgcctagaatcgacaacaaagccttcgcccacaacgccctacgggaagatgagggctcattggccgctgaggctaagtcagttgcaggcgataactcggcacccccacgacgaggggtgaagggtccgatattagatccaacagtaccaagagcaagggagaaggtcaataggaccgaggtacctaaagtcaaggagaagaagaggttcttgcaagtggtcatggttaatcaagctgagaagaggcatggtgcattgaagaccacaacatatggacatggcataaaggcaatgag

SEQ ID NO: 31759 - DNA, 847 bp, Zea mays
  Peptide Sequence Number=SeqID_73538
ccgtgtggacgcctaccagatctcggtcgcgatattccagcgattctacgtcccgccgccgccatcatcgcccccaaactcgcgctctgctccgcggcctccacgcccttcccccgcccgactctcctcgcccgactctcctctctcccgcaatccccgcggcctcgccccagatcaccgtcccggctccccagaaattcgcctagatcgccgccccagctctcgatcctcgcccacgctctccatggaaggcgaatccgtccgcgacagcccgatctccatgcaaggcgcgtcctccgccccggattgctgccccggctggctggttccttccttccggcttcccccgtcaaccaaatcaactcgtgaggggagcgaggcctcgatcgcagcggaccccgatgccccgcattctggcccctccggcgacatcggcggcagcggaggcatgatccgaggggactcggcggacctgccagccatggacgccgccgcacgcccggccattgtcatcgacaacggcacagggctcccacaccttgcaggacgtcggagcctcgccggcgcccaacataaccgagccgccggccggctgggcgactgggcctggtccatcaaccaggccaggtcgttccgatggaacctgacggccagtgtcgcacgccccaacctgcagggctcctaccactatgaccagatcaacatcacccgcaccatcaaggtcatggtatcccgtggccacatcgacggcaagctccactatggcttcaacgacatctcccacagggacaccgagaccccccctcaagttcgccgagtacttcaacgtcactcacggggtgtttag

SEQ ID NO: 31760 - DNA, 702 bp, Zea mays
  Peptide Sequence Number=SeqID_73539
atgcagtctgaagcatggaatggatacagaaagccaccatcagaacaaaagtactctgaggatgtcggtcatatccaccaaggactcaatttcgagcccaccagggaggagctggatagcttatcgaaagcgtgtagccgactttgggagcttgatatgaaccgtatcgttcctggtaaggactacataatcgactgtggcgaggggaagaaagtttatcagaagggtgatatggcatccgaaagcttgttcagctggctaggcgacgatgtgctaagaaaacccacctactcacgtttttgcgcacttctggataactataacccccaccaggataagcacgaagaaatagtttttgttgaagagatcgccagaacatcgctaattaagtacttgcaccggtacttagtgcagaagggggttgtgcctcaggactatgaggacttcaagaaaatgctgacatccctatggtttgatttgtatggaagaggtggcaactctagctgctctactgcctttgaggcatgtgtttgttggtattccatgacgaatttgcagttttacttggaagaagccaagggaaatgtggattaccaaggggaagataaccgcgtcgatattggcccatacagtgtgaacgtcaagtgctaccgattggggaataacaaaattggatcaacctttcccattgcagagaactga

SEQ ID NO: 31761 - DNA, 699 bp, Zea mays
  Peptide Sequence Number=SeqID_73540
atggcgcctcctgttgacgtggtcggtccgtgccctgggttgggcgatgtggaggctcctccgaggtcgaggtcgagtctgtcttccgaggccgaggtcgagtccgagcccctaggtcgggtgaggcggagaccgtcggctgaggccagggctgagtctgagccctggggtcgggcgaagcggagttcgtcgtcttctggggctgagcccgagttggagccctggggtcgggcgaagcggagttcgtcgtcttccggggctgagcccgagtccgagccctggggtcgggcgaagcggagttcgtcatcttccggggctgagcccgagtccgagccctggggtcgggcgaagcggagttcgtcgtcttctggggctgagcccgagtccgagccctggggtcgggcgaagcggagttcgtcgtcttccggggctgagcccgagtccgagccctggggtcgggcgaagtggagttcgtcgtcttccggggctgagcccgagtccgagccctggggtcgggcgaagcggagtttcctatggcgcctgaggctgggcctggctgctgtcagcctcactctgtcgagtggctcagcagtcggtgcggcgcaggcggcgctgtcctcttgtcagaccggtcagtggagcggcgaagtgactgcggtcacttcggctctatcgactggtgggcgcgcatcaggataa

SEQ ID NO: 31762 - DNA, 1167 bp, Zea mays
  Peptide Sequence Number=SeqID_73541
atggcgtcggtggcgaggacggccgtggcagcggctgggcggcccgcggctgggaggccgcactggaggggcacgcgatgggggaggccggggaggggtgcgcagcaggccgcgccaggggaggttagcgagtgccaaagttgcattaactgcagccatgttttgttctctttacttatgttttggaaccgcgactcccaggatgctgatggtttgcacaaagcactggaagcatccattctaagaaatgagggttcatggtctggttcatctcattcctcagccgctgaaagaacactgcccttccaagttaaaggtggtgagtgggaaatcgacaaacgacttctgaagatgggagggatggttgcttctggttcttgtggggacttgtatcacgggacttaccttggtgaggatgtagctgttaaagttataagagctgagcatttgaataagaatgtttggaacgagtttacgcaagaactttctaggattgctagtaacctgctgaaaatatttttagcctcgctttttaaccaatataaaaacaactcgatctgcggagaatacatgtctggaggaagcctatatgactttgtgcacaagcagcataatgttctaaacctcaggactttattaaagtttgcagttgatgtatgccgagggatgtgctacttgcatgaaaggggtatcatccatagagacttgaagactgcaaaccttctaatggacaaagatcatgttgtgaaagtggctgattttggtgtagctcggttccaggatcaaggaggtgtcatgacagctgaaactggaacatacagatggatggcacctgaggttataaaccatcaaccctatgataacaaagcagatgttttcagctttgctattgtcatctgggagctgataacgtctaagatcccgtatgaaagcatgacccctctccaagcggctgtaggtgtgagacagggattgcgcccaggacttccaaagaagacgcatccaaaggtattggacttgatgcagagatgctgggaagcagacccatctgcccggcctgctttcccagacattttagccgaactggaggatcttttggcacaggttcagggaacaccgggaaagacggcccatgctccatcaaataactcgaacacgaaagattaa

SEQ ID NO: 31763 - DNA, 192 bp, Zea mays
  Peptide Sequence Number=SeqID_73542
atgtcgcgcgcgttcgatgactactatatcaaggattgtgacatcatctcggcgttggagatgacgcagaggaggaccgacaacaatgaccagctcatcatcatcgccgtcgtgggggtgtggaatgtgttgttcaatgatgggactatggcatatatcgaagtctgcatgatactgatggttgcaatgtag

SEQ ID NO: 31764 - DNA, 1140 bp, Zea mays
  Peptide Sequence Number=SeqID_73543
atgactattaacctcaatgggaacctaaatccgcagagtctcgaaggaccctgtgaccttttgcatttgttagacgttaagaagtctgggagaggtaaccatgtccaaggagaagggccaaactgggttcttgttgctggcggggttttgcttagcacgctttcagtcaaggttgtgtgcaaactaaagcagttgttagacgggaagcagcaaaataatacttccgaaggtcttatgccatctcatgcccccatctgcagttgcaatcttgattttgtgtctgtattctttgtacgctgcctgcttactgttcaaattgcagctaaaggaaggcctgaagcatgcaagctgcattcagatctctaccggttcagtgaccaaactggctgctactactggcttgcaaatggtggagtggaagtcaagcaaacacctgcaagtcctgtacccaaatcagttgaatcctcacttccacttgtcaagatacccacaccagaatcaagcaaagagaacagcggtgttatgtggatatcctcacctgatcggcttgaagatcctcgaaggccatttcagtactctaacagttctggctctccctgtgtttcagaatcaggatctgacatttatagcaaaagagaggtcatacagaagctaagacagcacctcaagaaacgtgatgagatgatcatggagatgcaaactcagattgctgatcttaagaactctcttaacattcaggtgacacagtccagcaatctgcagtctcaattggatgctgccaatcgtgatctgtttgaatctgaacgagagattcagcatctaaggaagattattgcagatcattgtgtcacagaagcactctctcatgataaacctttgcaagctgcgcattggcagccagatgccgcaaatgggcattctaatggctatggtgatggttgtgttgatgatgctgacctgcattgtattagcatcgagaagaggaaggtagaagtagagagggtggagatgctcaagaaagaggtggttgaactgaaggaagtcattgagggaaaggactttgtgcttcagagctacaaggaacagaaggtggaactcttctcaaagatcagggagttgcaggaaaagctctcagcacaa

SEQ ID NO: 31765 - DNA, 417 bp, Zea mays
  Peptide Sequence Number=SeqID_73544
atgggcaagagtaacaaacgcaagcgcgagccgactcctccatcggaggacttcggcgattcggaatactcggaggaggagttctcctccgagtccgaggggtctccggctcccgtctctcccccggcgtcgtctgacgattcagacgactcccaggggattgccgcggaggtctggacttatatccaggccgtcgagcgctccgggctcgagggctcggatgagtcggagtactcctcggacgaggaggactcttcggactcgtctgaggagggcggcagcggtgatggcggagacgacgacgacgatagaggcgatggtgacgacggcgacagcagcaggggcggtgacggcggcggcggcaggggcgacaacggcggcggcagcagcaagggcagcaacaaggccagtggctag

SEQ ID NO: 31766 - DNA, 396 bp, Zea mays
  Peptide Sequence Number=SeqID_73545
atggctcagccttcagcgttcaacgacagcaagaccttcgcacctggaagccacatcaccttcggctccctcgacttcctcaccaccactatcgaggtcggtatcctggatccgctcgaagcagtgcctcggcatcagcaatgcactgctacgtattcattcgacgccactgctcgcgaggtgctcgatgaaatgcaactgatggaagtctgccttactgagaagattgtcggtcgttgtggtggcgtcgagcgccgcatgaacgcgcggtgcgacgagctccacagccacttcatagtgtgctgctacaccatccagcagcaagcgtatgtggtcatctatgacaagtcaagcgaccatgacggttgtggcgaggagctcttctatgtcaactga

SEQ ID NO: 31767 - DNA, 297 bp, Zea mays
  Peptide Sequence Number=SeqID_73546
atggatggtcaattgatgacaaggtttttatttcattgtcagcaaactaattatgtgttagatgcccctcttgggggtgctgatcatgatgaaccatcatgcagacccgacggtaagaatgagaaacaaaagctaagacaacgttcgaccatggaagttgtagactatctaattgcaaagaagaaagattctggccttgaaaaggacttgaagaaagaggagaggtgcaataaagcctttgctctacaggaagaaaggatcaaattggacaaagaaaagtttgcattccaaagatag

SEQ ID NO: 31768 - DNA, 126 bp, Zea mays
  Peptide Sequence Number=SeqID_73547
atggccagcgacgggaacgcaatgccgatctatgcaaacgtctgggctgtgacatgtggttttggtgatcaacgttgttgggatgttggggctcattctattgcttcgcatgatcaccttctctag

SEQ ID NO: 31769 - DNA, 320 bp, Zea mays
  Peptide Sequence Number=SeqID_73548
cgtggagattggaggcggcagctgggggcggagacgcgatgcaaagcgcgctcacgatggggagggctagaggggaaggaggcgaagatggtaggctttcggcacacgctcggaggagagcggggatggtgggatgtgcgggtgggcatgggtccggcgcctacttgcaggagctgcggcgccggagacaggatgtgtggggcgcggatgtcgcaccccagcactggagacaggatgtgtggggcacggatgtcgcagagtgggtgggagtggagacgggggcattcaagggtgtggacgcccacactgctgtcttatag

SEQ ID NO: 31770 - DNA, 414 bp, Zea mays
  Peptide Sequence Number=SeqID_73549
atggggtttccgaagcttgagcttggtttgtctgctatgacgaaggatcagcttgcggacaacctcgcttacaatagcttaaaggaagataatatagttatcgtagttcatgttattctactaaaacacacgaggagttgttttaccaaactatttgtaaaagacactagctcctatagaagagctactcctttgaaggagccggagacggagccattttcagaggagtctgagcccaggggcggacccaggatcatggccgcctgggccacgacccagggcgcaggtccaaatttttttagaagagctcgtgtccgactaccgcctctagagtctggctggactgtgctgaagagctacaagcctgcatttgctgccgtcgtgctgcgtcgcctctaccagtctgccctctag

SEQ ID NO: 31771 - DNA, 468 bp, Zea mays
  Peptide Sequence Number=SeqID_73550
atgatgactgcgtcaaaaaaggctagcccctcggaagggttcaacagtcgccccagagcacgcagagtcagggatgaccctgggtacgtccgttacatggccgaggctcgggctacgctcccgagtcggcaaggtcgaagtgaccgcagtcacttcgccctttcactgaccaatctgacaggaaaacaacgatgttcgccccgcttcggctaccgtgccaaccaccagggtaaaactgagtcacgatctcccacgagttcgacctcgggcgcaacagggagctccgtctcgcccgacctcaggcctcgggagaaggtctgtgcctcgctcgaccccaggcctcggcctcgtgaggagtcaccatcctcgcccgaccttggcctcgacctcaggagaagtctccgcctcgcccgacctcagcctcggacagactacgctacaggggatacatcattaccctactcctag

SEQ ID NO: 31772 - DNA, 408 bp, Zea mays
  Peptide Sequence Number=SeqID_73551
atgaataccaagggcaagagtgaccgcggcggggaggagggcgtcctcgacctcaacctctccctgcagcggaccctggtggcgcccgagccggagccgctgatgggttacttcgtctgcacctactgcgacaagaaattctactcctcgcaggcactcggcggccaccagaacgcccacaagttggagcgcagcgtggccaagcgcgcccgcgagctggccgccgctcgccgtgcgggccagggcggcgagcgcgccagtgctgccgaggaggaggcgaggatgggcattgcgaggacgacggtctcatcaccaagatcctcctcgtcgtcgcaccagatcaggatgtcgccggtggcaagctggaataatctcaccgacgacatcgacctcaccttgaagctatga

SEQ ID NO: 31773 - DNA, 1588 bp, Zea mays
  Peptide Sequence Number=SeqID_73552
actgatgaagcccaccaccaccttcgaattcgaagcaaacctccagaaccagaaaaatgccggcgagggcagtgacaatcccgacggcggtacctgggtggtgctccagccgtcccggatagtctacatcgtcatgatctccaccgccttctgggcctttgtcttatactactacatgcaaaatggcgacggcggcgtggcgtccgtcctgttcaagccgtctgcgttctcgctccccctgctgcccagcatcaccggggcccagagcccgcgacccgtgcaacccgagcagaagcacgccggaccgggacaggcgcccccgccgccggtgctggccgatcgctgccacgggcgatctggatggatatgtgcccgtacgtggtcaactgcggcatgggcccggcgatgggcgacgaggggggcgccttctccggcccgcggctggttcgccaccgaccagttctcgctcgacatcatcttccacggccggatgaagcgctacgactgcctcaccgacgacccgtcccgcgccgccgccgtgtacgtgccgttctacgccagcctggacggcgggcggtaccagtggaacagcacgtcgatccgggacgcgctcggcctggacctcgtcgactggctggcgcggcggccggagtggcgcgccatgggcggccgcgaccacttcttggtggctggccggaccgcggtggacttcggccggaactccgacctcgaccacgagtggggcaccaagctcctcaacttcccggccgtcgagaacatgacggcgctggtcctggagaccaaccagtggaagcccaagaagcggcgcaatttggctgtcccctacccgacgtacttccaccccgagtcggcggccgacgtggtcgcctggcaggagaaggtgcgcaacaccgagcgcaactggctcttctccttcgccggcgggccgcgcccagggaacaccgagaccgtccgcgccgacatcatccagcagtgcgccgcgtccacccgctgcagactcttccactgcggcgccggccctgacgccggcgccaactgcagctcgccaggcggcgtcatgcgcgtgttcgagagctcggtcttctgcctccagccgcgcggggacacgctgacgcggcggtccacgttcgacaccatgctggccggctgcatccccgtcttcttccacccgggctcagcgtacaggcagtacacggcccacctccccaaggacccaaatagctactctgtgctcatcatgcacaccgatgtcaccggccggaacgtcagcatcgaggacacgctgagcaacatctcgccggcggcggtgaaagccatgcgcgaggaggtcatccggctcatcccgaggttggtttacgctgacccgagatcgaggcgtgtcgatttcactgatgcgttcgatttggcgacggaggcggtcatcaaccgcgtggccaagcggcggcgtggtcgggtgaccggcaaggcaagtagggcacacagggcgatgggcagagaggcagggccgttcctcacggggtgcaaggtgcggccgcaccaggctcctaaaaataaagggctcccttag

SEQ ID NO: 31774 - DNA, 2292 bp, Zea mays
  Peptide Sequence Number=SeqID_73553
atgccggaggacggtgattttcctaggccggtgcctcgcgccgacatcccgcgggagctagctgtggtccccgctccggcggggggttacgacccacaactcgagcaagtccgcgaggcgcaggccaggctcaacgagggaacaggagcgcttgagccgatccgtcgaggcgtcgggcaggtatgggcgggccaacccccggccggagaaatacgtcacctgccccaaggtctccagcaccgcgtcgccaacgatgtcagggtcaggccgccgcccgcatccagcggggttggccagaacctggcagccgcagcgatgctcctccgcgcgatgccggagccatcaaccaccgagggtcggcgaatccagggagagctcaagaatctcctggaaggcgctgcggctcgacgggccgagagcactgcctcccgaaggcagggatacccctcggaacctcatgccgcgacttcccgattcatgcgggaagcctcggtctacaccgggcgcacgcgcaacaccgtgcctgcggccccgggccacctcggcaacgagcaccatcgacgcgaccgtcaggcccacctcgacgaaagggccttcagtcgggccatccgacgggcgccgttcccgacccggttccgacccccgactactatcacgaagtactcgggggaaacgagaccggaactatggctcgcggactaccgccttgcctgccaactgggtggaacggacgacgacaacctcatcatccgtaacctccccctgttcctctccgacactgctcgcgcctggttggaacacctgcctccggggcagatctccaactgggacgacttggtccaagccttcgccggcaatttccagggcacctatgtgcgcctcgggaattcctgggaccttcgaagctgccggcaacagccgggagagtcgctccgagactacatccggcgattctcgaagcagcgcaccgagctgcccaacatcaccgactcggatgtcatcggcgcgttccttgccggcactacctgtcgtgacctggtgagcaagttgggtcgcaaaacccccaccagggcgagcgagctgatggacatcgccaccaagttcgcctctggccaggaggcggtcgaggctatcttccgaaaggacaagcagccccagggccgcccatcggaagaggctcccgaggcgtctactccgcgcggcgccaagaagaagggcaagaagaagtcgcaatcgaaacgcgacgccgctgacgcggaccttgtcgccgccgccgagtacaagaaccctcggaagccccccggaggtgcaaacctcttcgacaagatgctcaaggagccgtgcccctaccatcaggggcccgtcaagcacactctcaaggagtgcgtcatgcttcggcgccacttccacagggtcgggccacccgcggagggtggtagggcccacaacgacgacaagaaagaagatcaccaagcaggagagtaccccgaggtccgcgactgcttcatgatctacggtgggcatgcggcgaatgcctcggctcggcatcgcaagcaagagcgccgggaggtctgctcggtgaaggtggcggcgccagtctacctagactggtccgacaagcccatcaccttcgaccaggccgaccaccccgaccacgtgccgagcccggggaaatacccgctcgtcgtcgaccccgttgtcggcaacgtcaggctcaccaaggtcctgatggatgggggcagctgcctcaacatcatctacgccgagaccctcaagctcctgcgcgtcgatctgtcctccgtccgagcaggcgctgcgcccttccacgggatcatccctgggaagcgcgtccagcccctcggacgactcgacctccccgtctgcttcggaacgccctccaacttccgaagggagaccttgacgttcgaggtggtcgggttccgaggaacctaccacgcggtactgggaaggccatgctacgcgaagttcatggccgtccccaactacacctacctgaagctcaagatgccgggccccaacggggtcatcaccgtcggccccacgtacaaacacgcgttcgaatgcgacgtggagtgcgtggagtacgccgaggccctcgccgagtccgaggccctcatcgccgacctggagaacctctccaaagaggtgccagatgtgaagcgccatgccggcaacttcgagccagcggagacggttaaggccgtccccctcgaccctagtggcgacacctccaagcagatccggattggttccgggctcgaccccaaatag

SEQ ID NO: 31775 - DNA, 534 bp, Zea mays
  Peptide Sequence Number=SeqID_73554
atggtggtgctcggtagggcaagagatggcacgacaggagcttccacggcgacgaagaaatgggggctaggcgcaaggaacccaaggggcacagtgtcggctgctgggacgaaggggggacgtctggaggtgggaccggagaagatggcgaggttggaggtgatgtggggggcgttgcaatccgccggcaaggaggagaggtcgagaaggggcagagatggtcgccggcgttggggacagtggctcccgccgtcgggggagaggcagtggtcgcctggaggccaggcaagcccgcggggtaggcggtgctggcctccggcggggaagagaggccaaggacgaagcagaggggtcgctgtcgtgcggagcagtggctcccgctgtttgggaagaatgagcgtccgtcgggatgtgaggacccctggtctagggtttcgccgacccttggatctgcacccaagtatggctttccctctccctaggattcatccgacgcgaggtttcccccttggccgaatcaaacaagaaccctaa

SEQ ID NO: 31776 - DNA, 1455 bp, Zea mays
  Peptide Sequence Number=SeqID_73555
atgaagccaatgaagccgagcttccagaaagacggcgccgacaaggttgatggcggcacaggtggcgtactctggccgtcgcggatctgctacctcgtcgttctcgccaccactttgtgggccgtggcgtccatcttgttcccgccgtcggcgttcccccaccccctggtgtccagcgtcaccgtcagccaccaccctgctccgcacgattcggcgtcggaggacaaccggaccgcgaccgagaccgccgaccgttgcgcggggcggtacatctacgtgtaccgcctgccgccgcgcttcaacgacgacatcgcccgcggctgccgcacgctccgcccgtggatggacatgtgcccgtacatgcccaactgcggcctgggccgcctgctgggcgacgagggcggcgtcttcccgggccgcggctggtacgccaccgaccagttcatgctcgacgtcatcttccgctgccggatgaggcgctacgagtgcctcaccggcgaccccgcccgcgccgcggccgtcttcgtgccggcctacgccagcctggacggcgggcggtacctctggaacagcaccgcgacgcgggacgcgctggcgctcgacctcgtcgcgtggctggcgcggcgcccggagtggcgcgccacgggcggccgcgaccacttcctggtggccggccggaccgcctgggacttcctcaggaagaccgacggcgacgacgactggggcaccaaactgctcagcatcccggccgtccggaacatgacggcgctcgtcctggagatcgacccgtggacccggtccaacaacctcgccgtgccttacccgacgaacttccacccggccacggccgccgacctgcgcgcctggcaggagaaggcgcgcgcgctggaccgcaggtggctcttctcgttcgcgggggcggcgcggcccgggagcaacaagaccgtccgcgcgcagattttccagcagtgcggcgcgtcgagtcgctgcgggatgttccggtgcaaaaaggggtccgaatgcgaggcctccccgggcgccatgatgcgcctcttcgagagctccaccttctgcctccagccgcgcggcgacacgacgacgcggcggtccacgttcgacgccgtcgtcgccgggtgcatccctgtgttcttccaccccgactcggcgtacacgcagtacgcggaccacatcccggcggatcccgagaggtggtcggtgctcatcatgcacaccgacgtgacggaccggaacgtgagcatcgaggaggcgctcgccaagatcccgccggcggccgtgaaggcgatgcgcgaagaggtgatccggctcatcccgagattggtgtacgcggacgcgagatcggcgcgtgcggacttcaaggacgcttttgacattgcgctggacgtcgtccttgaccgggtggccaagcggcggcgacgggatgtggacggacgctga

SEQ ID NO: 31777 - DNA, 282 bp, Zea mays
  Peptide Sequence Number=SeqID_73556
atgacccgcagctggtcccatggttcagcatctaggcctgattcatatgacacgactttctccagtcatcgtgggccctacgtcgtcctcccgtgtgtggggatttgttcatccgagcagcgtgctcaaattataagaaaggggcgtacagttgtgctgtcaactatcgcgtgggctcctagtgacatgctctgctgtggtcaacacttgctcagcagggagcttggtcatccgcccatcctcgtagacttgctcggtagaggacttggcttgctgggctga

SEQ ID NO: 31778 - DNA, 1683 bp, Zea mays
  Peptide Sequence Number=SeqID_73557
atgaagcggcacaacgcgggcgagttgccgctgtcgtcgccgccgggtgacggcaggcggctgctgccgaaggaggaggcggaggacaagatggacaagtacgacaaggggcgggtgcgctgctccaggctctgcttcctcttcgcgctcgccgccacggtatccatcctcgcgcgccactgctacgacgccgggcctggccggcggcgatggtgccggcgtggtgcgcatcgagaccgtgcctccgtcgccaaaacatcgtccaagcagggctcgccctcgggagctcatgctcatgctcacaccgagcagcgcgccggccaccccttcgcccgcgcgctggccgcggccgacgacaaggccgacctctgcgggggccagtacatctacgtacacgacctgccggcccgcttcaacaaggacatggtccagaattgcgacaagctgtctccgtggacggacatgtgcaggtacaccaccaacggcggcttcggcccgctgctccccggcggcaagggcgcgttccagggcaccatcgccggctggtacgacaccgacgagcacgcgctggacatcgtcttccacgagcggatcaagcggtacgagtgcctcaccgacgacccttccctcgcggccgccgtcttcgtcccgttctacgccggcctcgacgtcgcgcggcacctctggggcaacaacgcctccgcgagggacgagctggcgctggacctggcgggactgctcgccaagagccccgagtggcgcgccatgggcggccgcgaccacttcttcgtggccggccgcgccacgtgggacttccggcggaaggacgacgcccatgctgagtgggggagcaggctgctgaaccttcccgccgccaagaacatgaccgcgctcgtcgtggaggccagcccgtggcacctcaacgacgtggccattccctacccgacctcgttccacccggcgagcgatgaggacctcttcttctggcaggaccgggtgcgcgcgttggaccgctcgtacctcttctccttcgccggcgtgccgcgccccggcgacgccaagtccatcgagggccacctcgtcgaccagtgcagggcgtcggactcctgctcgctcatggagtgcagcaccacgggtccagacaacaggtgcgagtccacggccagcgtcatgaagctcttccagagctccacgttctgcctcctgccgcgaggcggcaccgacacgcgccgctccgccttcgacgccatgctagccgggtgcatcccggtgttcttccacccgggctcggcgtacgtgcagtacacctggcacctgcccaaggcccacgccgactactcggtgtacatccccgaggatgacgtgcgcaagaagaacgagagcgtggaggagaggctccggaaaataccgccggagacggtccgggaaatgagggacgccgtggtcgacctcatcccgtcggtgacctacggcgacgcgacgtccaggctcgagacgacggtgaaggatgcgttcgacatcgcggtggccgccgtcatcagcaaggtgacgaagctgaggagaggaatcgtcgagggtcgagcggaggcggagaagctggagaagtatagctggaagtacccgttgttggcagaagggcagaaggcagaggaccatcatgaatgggatcccctcttcaattag

SEQ ID NO: 31779 - DNA, 270 bp, Zea mays
  Peptide Sequence Number=SeqID_73558
atgtggccgaagatttacacaggaatcaacattaagagctcatatcagtattgctcatgtagaagaatggtgaacactagaaggttgtggagtcctaaagacgagcaagcctgggtccatgatagatttgatgagatggatatgcatggttttcatggtgacaattatactacaatatttgtttcagtattctatcagactaatgttcacaaatattgtggtattcctctacattctgctggttcaccattccctgctactatccattga

SEQ ID NO: 31780 - DNA, 153 bp, Zea mays
  Peptide Sequence Number=SeqID_73559
atggtggtgaagtggtctggcaggggtaagtcccaagcaaagagtcaccaaggaaggccccacgacaacaatgggttctatgagagtgcttgggctagaggcgcccaacgctattttaagaagtacagggcatccattgtccaggatgattga

SEQ ID NO: 31781 - DNA, 932 bp, Zea mays
  Peptide Sequence Number=SeqID_73560
cttgttgctgctgctgaaggaaaagacaattttctccttacctcctgggctcaggcctcaggcgcacagccttctgcttctcttcctctcctcgcgtccccccaccaaaccctaacccgagcacccagcccctcctcgcgtctgctcgcgccggcctttggggctctcactctgagcggcagggacccgcagggctccggttgtgtccaggaaacatcccagttgttggcgagagaccaagaaatggcggagaaggagggagcgaaggttggagcggaagagatggaagagcgggagcaggaaggggaggcagaggaggtggaggtgaagtttcgtctcttcgatggctctgacatcggtcccgtgcgctgcaacgccgccgccactaccgtagccgccctcaaggatcgcgtcgtcgccgattggcccaaagataaatcaattatcccaaagactgctagtgatgtgaaactaataagtggaggcaaaattctagaaaatgacaagaatgttgcacagtgcagagctccttttggtgatcttcccagtagtgctatcccgatgcatgttgttgttcaaccatcacacagatgctggtccctgagcgtgaggtacgtgtgcgcgttcgaggacgacgacggggctatcacggctcccggctgcctcgtgtgggccaaggacaagaccttcgcctggaacaatgccgcgacgctcctctcgttccgcactagattcccgcacctcgtcggcaccgccgtggacattgtgctagtcaaggtcgcgcgccgtgtgtttgccgccctctcgtgctgctgctactacgagccgggggcgacagggatgagcgactctgatcgcgacgtgcacctcgacgtgaccgtcgtgccgccctcaacctcgccagacccttccccggagctctaccgccgccg

SEQ ID NO: 31782 - DNA, 264 bp, Zea mays
  Peptide Sequence Number=SeqID_73561
atggcgcgcgattttcacgccgtaaatttggtatacgaaacagtgccgtgggggtccagagggtgtatctcaggtcctcgtgcagtggtcagcttaatgctcaagggtttagttaacggaaaacacttatgcaaggagtatataagctatttcggcttatataagcgtaacacttatcctgaactcgccgtcgccagaggaaaatccatccccgcttccacgggtcggattggcgggcgtgaagacctggagtatataagctag

SEQ ID NO: 31783 - DNA, 303 bp, Zea mays
  Peptide Sequence Number=SeqID_73562
atggccgcttcttcctcctgcaaggtcatcgactcccacctgcacgtctgggccacgccacagcaggtgcgtaagcaggcaacgcgcgcgagcccagtttccgcgtcctggggctcctggcggcccgcggggggagttcagcccaaggaggagtacccgtacttcccaggccaggaacccacgatgcgtggcgacgccgacttcttactcgaggtcttcacgcccgccaatccgacccgtggaagcggggatggattttcctctggcgacggcgagttcaggataagtgttacgcttatataa

SEQ ID NO: 31784 - DNA, 174 bp, Zea mays
  Peptide Sequence Number=SeqID_73563
atgccgcgaattcgtgtctttcgtcgtggcaacctcaccggcgacgatgagacagcgatagggagtcacgctgatgcgacgggggtgcccggatacgtggcacaaggccgtgcgatggcggttcaccagcgaggctatccgcaccaaccgcaaagcttgtatggggagatgacg

SEQ ID NO: 31785 - DNA, 528 bp, Zea mays
  Peptide Sequence Number=SeqID_73564
atgggccttgccaaggcggagctgcgtgagcccagcacgctacaggtggaggcatcggctgcgggcaggataggcccccttgtggccaatgcttctccagtttatgatgtgccatcctttgatgttatcatctcttctgcaagtctcagcttttcactttttggtattgttgctaaccttcttgaaagatacatgctcagacatgttcttgaaaaatgtatgagtgaagctggagtggacggggctgttattgttcaacctattaatcatatgtttgatcattcgttggtaactagtgtgttgaagaaatacccatccaagttcgttggttgctgtcttgcgaatcctgcagacgatgggactgggattaaacagcttgaacatctgattgtacaagaaaaataccgtgctgtgaggttcaacccaaacttatggccatctggtcaaaagatgaccaatgaggttggaaggtcattattttcgaaggcaggagaacttggagtaccacttggaataatgacgatgaag

SEQ ID NO: 31786 - DNA, 784 bp, Zea mays
  Peptide Sequence Number=SeqID_73565
aaagcccgccgtcgcagggatacgggttgtccgttttcggcggaggtggcgcgaccgcgcgcttccgaacagatggcatttgaagaacgcgtggaaggccctaaacccggacttcaggacgcccttcgcctccgtcgaggacgccgtcagcaggctgctgccctaccacgtattcgcagagtatgaagagaacgacgacctggaaggctttttcgagcacttcgagaagcaggtgctgacctttcaacgtcatgactcatcaacatgcggcaggactcaccgcgccgaggaacagctcattcttgggatgtctatggtggaagacgagcggcggcagttggagcgcctccgcgcggccgtttcgcagcaccagcagcaggaggccgcgcgcgcgcgtcttgcgttggtgcaggcgcaagcacaggcgcaggcgcaggcgcaggccgcgggcgggtggcatgcgttcgtggctgtgggacgcggcgaaggtgcctcccgcgggcaggccgtggcgatgcagcagcaggagacgatgatgaccccgggcgcctggcaggcgctcaccgcagcggcgtcgcgcggcgagggtggttccaatgagcaggctctgatacaggccgtgatggtgcagaacatgcagcggcagaggcagcaggagatgatggcagcggcgccacgcggagtgggtgcaacctgcgggcaggcgctgccaccggccatggtaacacagctaatgcagcaacataaccagcaggaggaggacatgatgacgacgaatctctag

SEQ ID NO: 31787 - DNA, 237 bp, Zea mays
  Peptide Sequence Number=SeqID_73566
atgaaggcacgctctgctataattcaatggactgtccggtgtgccatcggactgtccggtgagtcagcgggcaacggttatccagcgccaatggtcgactctgcaaagtgctacagtgagctacagtgccgcggtagaagtcagagcaggaagtcagaggggcaccagactgtccggtgccgcaagaggacaaagctccaacggtcgacttcgctccgaaccctaacggttgggtga

SEQ ID NO: 31788 - DNA, 516 bp, Zea mays
  Peptide Sequence Number=SeqID_73567
atggtggacacacaagggctatggcacagctcacacggtcgtgtattccctcacggctatcacgccagcgcaacatggatgagggctcggctaaatagatccgcgcagaggagcagtcggtcccagcaagccgcccaggttgttacgggtttggggaaatctcaacaacctgctccgagcgtggcggcatcggaatcggcattcgcctcaggcgcaacagtaagctccgcctcgcccgaccttgggcctcggccctcaagaggaggtctccgcctcgcccgaccccagggcttggcccccgcctcagcctcggaaggaggactcggcctcgcccaaccccaaggctcggccttggcctcgacctcggagggtggtctccgccctcgcctgaccccagggctcggcctcgacctcgaccacgggaggaatcgtgtcctcgcccaaccccggcctcggcctcaggaggagtctccacctcgcccgaccttgggctcggaccgaccgtgccacgggtga

SEQ ID NO: 31789 - DNA, 378 bp, Zea mays
  Peptide Sequence Number=SeqID_73568
atgcaggcggcatgcaaccgcgccaagtgggcgcacttctccgacttccaacatgcccacgcgtcatgcaaccggcgcgccggtcgctacgtgcaagcaactgcaatgccactcgcaccactgtcgcgcctcctcgactgcggaaccagcgggcaggagcagcggtcacgtcgtcagccaagcttacgtcccatccgggggcagcgagagaaccctctctcacggcgtgaggacgacgcgcccgggttccgttcctcgaacggctcgcgcacgcgcaacggccgccccgcgaaccactcgccccgtcgcattaactccgcggcgggacaggcggcgcctctggcaggagaagcaagcgacgcttcgccttcgccataa

SEQ ID NO: 31790 - DNA, 2016 bp, Zea mays
  Peptide Sequence Number=SeqID_73569
atgccgttcggcttgaggaatgcgggtgcgacgtaccagcggtgcatgaaccatgtgttcggccaacacattggctggacggtcgaggcctacgtcgatgacatcgtagtcaagacgaggaaatcctccgacctcctttctgaccttgaagtgacattccgatgtctcaaggcgaaaggcgtgaagctcaatcccgaaaagtgtgtcttcggggtaccccgaggcatgctcttggggttcatcgtctccgagcggggcatcgaagccaacccggagaagatcgcggccatcaccagcatggggcccatcaaggacttgaaaggcgtacagagagtcatgggatgccttgtggctcttagccgcttcatctcacgcctcggcgaaagaggcctgcctctgtaccgcctcttaaggaaggccgagtgcttcacttggacccccgaggccgaggaagccctcgggaacctgaaggtgctcctcacgaacgcgcccatcttggtgccccccgctgccggagaagccctcttgatctacgtcgccacgaccactcaggtggttagcgccgcgattgtggttgagagacgagaagaggggcatgcattgcccgttcagaggccagtctacttcatcagtgaggtactgtccgaaaccaagatccgctacccacaaattcagaagctgctgtacgcggtgatcctgacgcggcggaagttgcgacactacttcgagtctcatccggtaactgtggtgtcatccttccccctgggggagatcatccagtgccgagaggccttgggtagaatcgcaaagtgggcggtggaaatcatgggcgaagcaatctcgtttgcccctcggaaggccatcaagtcccaagtcttggcggacttcgtggctgaatgggtcgacacccagctcccaacggttccgatccagccggaactttggaccatgttcttcgacgggtcgctgatgaagacaggggccggcgcaggcctacccttcatctcgcccctcggaaagcatctacgctacgtgctacgcctccacttcccggcgtccaacaatgtggctgagtacgaggctctggtcaatgggttgcgcatcgccatcgagctaggggtccgacgcctcgacgctcgcggtgactcgcagctcgtcatcgaccaagtcatgaagaactcccactgccgcgacccgaagatggaagcctactgcgatgaggttcggcccctggaagacaagttctacgggctcgagctcaaccacatcgcccgacgctacaacgagactgtggacgagctggctaaaatagcctcggggcgaacaatggttcccccagacgtcttctctcgagacctgcatcaaccctccgtcaagatcgacgacacgcccgagcccgatgcaccctcggcccggcccgaggaaccctcggctcagtccgaggcaccctcggctcggcccgaggcaccctcggttcagcccgagaaggcacccgggggctacacgcacctgttggtcgccatcgacaaattctccaagtggatcgaggttcggcccctaaacaacattaggtccgaacaggcagtggcgttcttcaccaacatcatccatcgctttggggtcctgaactccatcatcaccgacaacggcacccagttcaccggcagaaagttcctggacttctgcgaggatcaccacatccgggtggactgggcagccgtggctcaccccatgacgaatgggcaagtagagcgtgccaacggcatgattctacaagggctcaagcctcggatctacaacgacctcaacaagttcggcaagcgatggatgaaggaactcccctcggtggtctggagcctgaggacaacgccgagccgagccacgggcttcacgtcgttctttctagtctatggggccgaggccatcttgcccacagacttagaatacggttccccgaggacgagggcctacgccgaccaaagcaaccaagctagtcgagaagactcgctggactag

SEQ ID NO: 31791 - DNA, 541 bp, Zea mays
  Peptide Sequence Number=SeqID_73570
atggtggatctggccgggaaagccgcggcagtgacggatcctgctgtggaggcaacaaagaaggggtgggcagcgggtcgggtccagccgggtaggggcctgcgtcagctggctgcacgggtgcgcgacagttggccacgggtgtcggtgtggattctcgcgcatggtttggcggcgacggagagggagccgcgcacgggccggacgaagcagcatcgacaatgttggtcggaggaggggtgctgccgcggcggtggcgaggcttcccgcgtctacgatagtggcagtcggttcgaggagcttgacagatgctggaggggaaggaggccggcaaccggggggtggccggcagcgggggatctgagtcaccgggggagaggcggcgccaggggaggggtcggcgtcctacagatgggaaaggagaggcggaggctcggtggaggggcagcgactgcgcaggcctgctcctgtcgcccgctcggctcgtgccctgctattggcggcggcgtcccgggaggcaatgaatctctagaacgttcat

SEQ ID NO: 31792 - DNA, 279 bp, Zea mays
  Peptide Sequence Number=SeqID_73571
atgctggcggtgttcgatcccacggtggccaagtgcccggagggtctccgcagccccccggtcgccggggcggccgctggagcaggcggggccggcgcgggcgcgctgatgaagggcttctccgactcgcacgacggcgccgtcaccgtcagcctgggcccctccggcgcgctggcctactcggcggccaaccagagccccctcgtgccaagtttattggggatagcgaacggcttagggtttcgaccagtgctgcggatgctttccacgccgatttga

SEQ ID NO: 31793 - DNA, 696 bp, Zea mays
  Peptide Sequence Number=SeqID_73572
atggacgtaaagagtgccttcctcaatagaccaatcaaggaagaggtctatgttgagcaacctcccggctttgaagatagtgagtaccctaaccatgtttataaaccctctaaggcgctttatgggctcaagcaagacccaagagcatggtatgaatgccttagagattttcttatcactaatgacttcaaagttggaaaggtcgaccctacactcttcaccaaaacacttgaaaatgatttgtttgtatgccaaatttatgttgatgatattatatttgggtctactaacgaatctacatgtgaagagtttagtaggatcatgacacaaaaattcgagatgtcaatgatgggggagttgaagtatttcttgggatttcaagtgaagcaactcgaagagggcaccttcctaagccaaacgaagtatactcaagacattctaaacaagtttgggatgaaggatgccaagcccatcaagacacctatgggaaccaatgggcatctcgacctcgacacggaaggtaagtccgtggatcaaaagaaagagcacatcggggacttgccagttcttgggaagatccttggtgtcttgggcttcaaagaaacaaaatttcatagctctttctaccgccaaagccgagtacattgccgtaggacattgttgcgtgcaactactttggatgaggcaaacccttag

SEQ ID NO: 31794 - DNA, 312 bp, Zea mays
  Peptide Sequence Number=SeqID_73573
atggtgacgcccctctgccccacccctgccactacgagaacattcaggttgtcggtcgcacggttcctcgtgccacgtgtcccttctcctccgtcaccgcccgactccctcgcgtggacagcgctgcgcaacacaggagagcgggctgctacttcgtcccaggtcaaggtgagcctccctctccctgatccgacacgaagtgttgagcatctcgtgggcgtgctcgtcgtcatggaggtcgagccagcactcgagcggctgtccggaggcgacacacgcggcggtaacagatccgacccaggtcaaggatga

SEQ ID NO: 31795 - DNA, 570 bp, Zea mays
  Peptide Sequence Number=SeqID_73574
atgccgaacctcgagtgccggatgtatgagcagcggttcccggaggtggatgccgcggtgatgatccaggtgaagcacatcgctgacatgggcgcgtacgtctccctgctcgagtacaacaacatcgagggcatgatcctcttctccgagctctcccgccgtcgtatccgctccatctcctccctcatcaaggttggtcgccaggagcccgccatcgtgctccgtgtcgaccgcgacaagggctacatcgacctttcaaagcgccgcgtctccgaggaggaggcgcacgcatgcgaggacaggtacaacaagtccaagctcgtgcactccatcatgcgccacgtcgccgagacgctcgaggtcgacctcgagccgctctaccagcggattggctggccgctctaccgcaagtacggtcacgccttcgaggccttcaagctcatcgttgcggaccctgacgctatcctcgacgtactcacctatgaggaaaaggaggtcggcccagatggccaggagaacacgattttaagtctttttattgttagacctctccagtctccactcttttag

SEQ ID NO: 31796 - DNA, 624 bp, Zea mays
  Peptide Sequence Number=SeqID_73575
atgtacaccgcgaggaagaagatccagaaggagaagggccttgagccctccgagttcgaggactccgttgcccaggctttctttgatctggagaacgggaaccaggagctcaagagcgacctcaaggacctgtacatcaacaatgctatccagatggatgttaccgggagcaggaaggctgttgtcatccacgtcccataccgcctgcgcaaggccttcaggaagatccatgtcagactcgtcagggagctggagaagaaattcagcggcaagagtcaagtttgcaagaatgcttatcatgcattttacctggcacaggatgtggtaattgttgctacaaggaggattgtgaggccacccaagaagggttcagctgttctgcgccctcgcaccaggactctgactgctgttcacgatggcatcttggaggatgttgtctacccagctgagattgtggggaagcgtgtcagataccgtctggatggttccaagattatcaagattttcttggacccaaaggagaggaacaacactgaatacaagctggagacctgcactgcggtctaccgcaggctgtgtgggaaagatgtggtctttgagtaccctatgaccgaaaatgcataa

SEQ ID NO: 31797 - DNA, 906 bp, Zea mays
  Peptide Sequence Number=SeqID_73576
atggctgcggatttccgcacccctgaccgcctcctgcccgccgcaactgaggagccgacgaccccgcagggccaccctcccaatccggtgctcagcacccccaccgtccccgacgccacccacgatggcctccgcttctggcagtacatgctcgccggctccgtcgccggcgtcgtcgagcacacggcgatgttccccgtcgataccctcaagacccacatgcaggccagcacgccgccctgccgcccgacgctatctctgagggcggccttgcgtaacgccgtggccggcgagggcggcgccctcgccctctaccggggactccccgccatggcgttcggtgcgggccccgcccacgccgtctacttctccgtctacgagttcgccaagtcggccctcaccgaccgtctcggccccaacaaccccgccgcgcacgctgcctccggggtcgtcgcgaccgtagccagcgacgcggtcttgacgcctatggacaccgtcaagcagcggctgcagctcaccagcagcccctacacgggcgtagggcactgcatccgcaccgtgctgcgcgacgaggggcctagcgccttcttcgtttcctaccggacaaccgtggtcatgaacgcaccctacacggccgtccactttgccacctacgaggcggccaagcggatgctcggggacatggccgccgaggaggagtcccttgccgtacacgccactgctggggccgcagcaggggcacttgccgctgcggtcaccactcccctcgatgttgtgaagacgcagctacagtgccaggctggcccgacggtggatggtggagtggcgggcggtctgtggtggtggaggcagcagttggagcgcaggggcgggggaggcaacttgccgacggagccgatggcttag

SEQ ID NO: 31798 - DNA, 1206 bp, Zea mays
  Peptide Sequence Number=SeqID_73577
atgcccggcataccgagggaagtcgccgagcactcgctggatattcgggccggggcccgacccgtcaggcagcctctgcgccgattcgacgagaagcgcagagtgataggcgaggagattcacaagctaatagcagcagggtttatcaaagaggtattccatcctgaatggcttgccaaccctgtgcttgtgagaaagaaaggggggaaatggcggatgtgtgtagactacactggtctcaacaaagcatgtccgaaggttccctaccctctgcctcgcatcgatcaaatcgtggattccactgctgggtgcaaaaccctgtcgttcctcgacgcctactccgggtatcaccaaatcaggatgaaagagtccgaccagctcgcgacttctttcatcacacccttcggcatgtactgctatgtcaccatgccgttcggcttgaggaatgcgggcgcgacgtaccagcggtgcatgaaccatgtgttcggcaaacacattggccgcacggtcaaggcctacgtcgatgacatcgtagtcaagacgaggaaagcctccgacctcctttccgaccttgaagcgacattccgatgtctcaaggcgaaaggcgtcaagctcaatcccgaaaagtgtgtttttggagtaccccgaggcatgctcttggggttcatcgtctccgagcagggcatcgaagccaacccggagaagatcgtagctatcaccagcatggggcccatcaaggacttgaaaggcgtacagagggtcatgggatgcctcgcggctctgagccgcttcatctcacgcctcggcgaaagaggtctacctctgtaccgcctcttaaggaaggccgagtgcttcacttgcacccctgaggccgaggaagccctcgggaacctgaaggcgcttctcacaaaggtgcctatcttggtgcccccagctgccggagaagccctcctggtctacgtcgccgcgaccactcaggtggttagcgccgcgattgtggtcgagaggcaagaagaggggcatgcgttgcccgttcagaggccagtctacttcgtcagcgaggtactgtccgaaaccaagatccgctacccacaagttcagaagctgctgtacgtggtgatcctgacgcggcggaagctgcgacactacttcgagtctcatccgataaccgtggtgtcatccttccccctaggggagatcatctag

SEQ ID NO: 31799 - DNA, 282 bp, Zea mays
  Peptide Sequence Number=SeqID_73578
atgggaaaccgaagaacaggagagagagagagagagggccgcgcaggcggtgctagctggtggcggaaaaatgcagtgaccggcgccgaggaggccactggcgcgttggtaagcacccaggggttgtcttcctcgtcctcctcgcgggagcaggagccgcgcgaggccgcgacgcccggcggctccgagtccgcagcgcgcaaggtgagggaggaggacagcgagtactaccggggaagccggcgccgccgccgccgccaccgtgtctatcgtaaaccctaa

SEQ ID NO: 31800 - DNA, 564 bp, Zea mays
  Peptide Sequence Number=SeqID_73579
atgtgcttaaaattactggttaaggattcactggtgaagaacataaggaggaggatgacaccgcagccactcaagatccgtgctgatatagagatgaagtgcttccagtttgatggagtgctccatattaagcaagctatgaagaaagctgaagctgcgggcaatgataattgtcctgtgaagattaaactagttgctcctccactttatgttctgaccacacagacccttgacaaggttgacattattttagtacttaatatattccttactggaaaagggtctgattactggttatccttttgctggaaggaccaagggatttcagttctcactgatgcagtcaaggcttgtacagcagagattgaaaaatacaaaggaaagttagtagtgaaggaaccaccaagagctgttagcgagcgggaagacaagctattcctcgaccagattgattccctaatggaacaaaacgcagaggtcgatggtgacgtggacagtgaagaggaggaagatacaggaatgggcaacgttgatcttacaaattctggcgtcactgcttactaa

SEQ ID NO: 31801 - DNA, 771 bp, Zea mays
  Peptide Sequence Number=SeqID_73580
atgccgcctccgggaccccgcctgccgctgcttctccttatcctcctcctccttggggccgcctgcagctgcggcctcacagtcacaggtgcgggggaaggcggctcctgcgagttctccgtcgcgcgcggcagcgagctctacagcttcgacctcgcggcgccgacgccggcgcaccgccacggcgtgctcagcgaggacgggttttacaaggtggctgtgaatgattccatactctggttccagctttgtgatgaaatgctattcaactttgacccacctatgtgccttaattgtgaggattgtggtggtcctttgaggtgtggaactcagtgcagtgcacttgtgtcaaataatattggagggtatgatgtctgcacaaccattggaggattatctaaatcccatatatctctagttgatgagggtaatcctcggaagggtatcattgttaagatgttctcatcaaagtgttctatatctgtttccgttatttgcgattcaaatgcaatccaagctacaacacttgaacacccttctggttgtccaaggtctgtttctgcttctggaagtggctggggatggctaagcactctgttcataacaattctgtgccttcttggagggtacattttgattggagcagtttacagatattatttccttggcattcattctgtagaggccattccgaacctggaattttggattggtttgccccaacgaattaagactgtctttgttcctgcaacaagaagtcatatgcaatga

SEQ ID NO: 31802 - DNA, 486 bp, Zea mays
  Peptide Sequence Number=SeqID_73581
atggagcgagagtcttgcgagactacatcaatcgagtttgtggtgtggcagccgtgtaccagagggaacgaggcccgcgacgtttcggccggaagcttgatagtgaagacgacagggagcatccaagaggagccagaagcgaagaccacttgcatgtggagaagagattctatgtttaccggtatgatcgattcgacggagttgcggtctcatggtagctcttcatcgctggcgggttgtggtagcagccatagtcggtgctcgagcatggaggaggccatgagggagcagcaagaaaggtttcgtaaagagggatctggggttttgagccacaacacgccaccactggtgataccagcaccaggacaagcttgtggaggggaggaaactactacagaagaaactccaaaccagatagacgacttcgtaaacaacttcttcgcttctggaggtagtggtcacaactcaaatgacccttatatgtga

SEQ ID NO: 31803 - DNA, 615 bp, Zea mays
  Peptide Sequence Number=SeqID_73582
atgtcgcagaggcgcgtgccgcactgcatggacgtggagatggcactgaggccagttcaagcccactttctggcacaccctgttatgctccttgtgttggttggccacgcataccagcgtcacggggagttccaaggcctcgaactccgtcaccagctgctccatggtcagcttggcggggcgtctcacgagagtcacgagccccaccaccacgtatgtcggttaagtatgtcgtcgtgcgccatcagccacgacaccaaaggctctaagttgaaggggtgcttgcccgtgagccggacaagcgccgggtggcgccgcacccacgcgtcagatgtggcctcgccacgcgagtcgcagacgactggctccacctcgaggcacaggaggtacgatgatcgccagtccggcgggaatgttgtatttttccatggaatcaaaatcggggcgggtgcgacgcttgcctcctgggccaccggagcagaacatgttgaagctcttgggaggcacaatggtcgaccacgggtgggggggcaggtgccgctcaacagaggtcgccattatcggcacgagctacgagaacgatttttaattgtgatgtccagagctcgaggttaa

SEQ ID NO: 31804 - DNA, 264 bp, Zea mays
  Peptide Sequence Number=SeqID_73583
atggtggctggcacctatgacatgcacggttgtgaggacatggcagagcagatcatgttgtcagcatggttgatggctggcaggacacatgtctacgtgcttcctaatgagcccgagcttgtcgacaccgagatgtggaggctgaccaacgtcgtcgaggggctagggtcttcgctggcccgccacttcgaggctgaggtggttccgcctcctccgtcgctgactgctgtcgtaccccctgctggccctcctccaaccgcgtag

SEQ ID NO: 31805 - DNA, 2201 bp, Zea mays
  Peptide Sequence Number=SeqID_73584
caggcaggataaaagttgatgaccgccgagccctcgaagtgtccaagaagtacacaactgcgcaagcactccacttcaagctcccaccttcaccggggcaccatcggtggcggactggcggtggggcacacaaaccgttcctcccgtgctcgtcatctcccttgtctcttcatcgttccttccgtcagcccgcacatctcacctgcgcgcgcgccatgggacctgcgtgcaaaaccgcagcgcggccgcgcgtgctgctgctgtgcagcccgtgcatggggcacctcatccccttcgcggagctcgcgcggcgcctcgtggccgaccacggcctctccaccacgctcctcttcgcctcggctacatccccgccctcggagcagtacctcgcggtggccgccgccgtccccgacgccgtcgacctcatcgcgctgccggcaccgccgccagacgcgctgcctcccgccacggccgcgcgcgagcgcgcggagctcgccgtcgcctccaacgtgccacgcgtccgggagatcgcgcggggagctgggcgcggcggcgccgctcgtcgcgctcgtggtggacatgcccgcgccggggagcaccgggacgccgcggagccgatccggctccccggctgcgtgccgatccacgcccacgagctgccgacgtccatgctcgccgaccggagcagcagcgcgtacgccgggttcttgtccatggccaagggcgtcgcgggagtcgatggcgtccttgtgaacacgtttcgtgaactggagcccgcggtgggcggcgacggtcgtctgcagctgccggtgtacccggttgggccattggtttggaccaggccggccggcgtggacacggaccacgagtgcatgagctggctggacgggcagccacgtggctccgtggcgtatgtgtcgttcggcagtggcggcacgattacatggcagcagacggctgagctggcgctggggctggagcttagccagtgtaggttcatctgggctatcaagaggccacaccagagctcaacaatcgcggcgttcttcgggactcaaagaggcgatgagcacagccccttggattttttacctgaagggttcatggagaggactagagggatggggttggtggcccagtcttgggcgccacaaacagctatacttggccacccttccattgggtgcttcgtcacgcattgcgggtggaactcggtcctagagagtgtgatcaacggtgttcctatggttgcttggccactctacgccgagcagaacatgaatgctgcgatgatggaggtccaggttggtgtggcattgcgggctaaggtcggagctgatcgatttataaggaaggacgaagttgcgaatgcgattcgacgtgcgattgtaggggaggaagctgaaaggctgaggaagcgatcaagcgagcttagacgccaatcagcgcaagctctgagcaaggatggttgttctactcggccactctcttccctggattggctgctgtcgccgccgccggcggccagtcttagcaccagcagggacctcgtctcctgcagccgccatctgggctgctcgccatcaccatgtcatcgtcaagggtcctcccgcttcagaccatgttgcaaatattgtcggatgatgttacaaggagcaagtcacagaggtccttcgcctttaagaggtgggctcggggcaggtgttatcgttgcctcgctcacgaccaccaaatcaactcatgcaagaactccttctgttgcatccgttgtcgctgccccggtcatcgggagcggcattatcgctttcggtcttcctcttcctgtccatcgagttaactgctccgtgcaatgtgaccatcctcaacaaacgagtacttgtgctaaggacaccagtgcaaacgccacagcctttgtccttggcgagaagcccacaaggatatctggtacaaagattcatagagagacgaaccttagcactaatgaggcggtcgcagggacatttgaagcagattctcgccaaatgatgtccaccgagcagaccattgaggtgccttcggataccttcacattgcttcaggctataacctctgttgaagatgttgttttggtggaggatgcatcatatgatgaggaagctactttggttatgcaaactacttttgatggccccatctttattaccaccatcgactatggttaa

SEQ ID NO: 31806 - DNA, 126 bp, Zea mays
  Peptide Sequence Number=SeqID_73585
atgtctctcagcttatggtgtggaggtgtggagcacagggacggtgtcaacgatgaaggtgaaggtcatgcaggtaatcaatattggattgttttgcatagtgcttcggtgttttggagtctctag

SEQ ID NO: 31807 - DNA, 1257 bp, Zea mays
  Peptide Sequence Number=SeqID_73586
aggccacctccttcgtccctcccgcccccatcaagattccgacccaaatccctctccgagctcgaccaaaaaccaccctcccagtacgtacattcccaccacctcccagtgcagcgccagtctgtaacccataaccataaccataccatggtggtcctcaccaagggcgagctggagcagatcgcgctgccggccgtgcagcgcgcatcgccgccgccgccggccgccgtgccggaggtcgacctggcagccggggacgccgccgccgccgcgcgcgcggtggccaaggcgtgcgaggaccacggcttcttcaaggtgacgggccacggcgtgccgccgcacctcctggcgcgcctcgaggccgccgcggccgcgttcttcgcgctcccgcagcgggagaaggacagggccgccggctgcccgttcggatacgccagcaagcggattggcgccaacggcgatctcggctgggtcgagtacctcctgcttgccgtcaccgccgccggcgcagcggccgcgccggggtctgcgtgcgagggcgcggagccgtcctgtttccgctgcccctgctcgatgagtctgatgacgagagcctatttcctgcatcctccgccgtgcgtagcacctgctaaacgtggcaaggaaacgtcgagctcatggtgcccgctgaatttgtgctgtactagtgctgtgctggacgagtacgtggcggcggtgaggcgcatgacctgcacggtgctgcagctgatggcgcaggggctgggcctcgacgacagggacgtgttcagccggctggtgctggaccgggacagcgactccatgctgagggtgaaccactacccgccagcggcggagacgaggcggctgacggggttcggcgagcacaccgacccgcagatcatctccgtcctccgctccaacgacgcgtccggcctcgagatcacgctgcgggacggcacctgggtgtccgtgccctccgacacggaatccttcttcgtcaatgtgctgaccaacgggcggttccggagcgtgcggcaccgggtgatggtgagcagcgcgcggccgcgggtgtcggtgatcttcttcggcggcccgccgccgcgggagcgcctggcgccgctgccgggtctggtggaccgggagggcggccgacgccgctacagggagttcacgtggagggagtacaagaactcggcgtaccggaccaagctggcagacaacaggctctgctccttcgagaccatggcgacgagctag

SEQ ID NO: 31808 - DNA, 354 bp, Zea mays
  Peptide Sequence Number=SeqID_73587
atggccaaatgggcgtcacggcacggcccggcccgggcacggccaggcacggttaggggtctaatcgtgccgtgcccgtgccggcccagcgtgcctgatgctcggcccaggcacggcactacctatcaggccgtgccggcacgggcccgacaccagccgtgccgtgccgtgctccgggccggcccgattagcccggcacggctggccatctatagctgcggcggcgacggccgcgagtgccggccgctgggttggctgctggggctgccgttcgcgctgctcgccgtcctcgtctccgtcgtcggcgccatcatctggatcatcgggcaagtacctttccttaccgcgccttga

SEQ ID NO: 31809 - DNA, 447 bp, Zea mays
  Peptide Sequence Number=SeqID_73588
atggcggcgatgaggtgcagcggctcagagtggaggcgttccaggaggggcccactcggcgaccggtccgccacccgcgccgaggccgccctagcgctcgcggagctctgcggcaacgcgggcaaggccggcctacggcaggaggccgtggtcgcggacgccgtctcgcggctggtgtggaggctggaggccaagcccgcgggcgagcgcgacgccacggcgcgcgagctggcggcggtcctgggcgcgtcgggcgggtgccacaaggcgttccggaaggacgagtgcggcgtggtgaaacgcggtgcagctgctggacccctccgcgcccggcgtggagacgtgactcggcaaggggaagatgcttggcgtgttcccacggatgtgacgctcgctggcgcatcaacctcagctgtatgtatgtgctcctacttctatgtgctataa

SEQ ID NO: 31810 - DNA, 1221 bp, Zea mays
  Peptide Sequence Number=SeqID_73589
atgacggacggcagcgacgagtacaagcgcgacgagtcggtgatcctgctggtcatcgtctccctcgccgcgctctcgctcctatccctcatcgccgccttcgcctactactgctacattacgcgcaaggtctcccgccgccttcagtcactccatctccccaaacgttccagctctcctcctcctcctcctcctccccgggctctgccgccgccgcaacagcaggggaaggacagcccgttcagcagctccgccagcgatggggccgctgcggcggcggcggcgatgtcggttgtggttgctggggagaggggcgtgcaggtgttcagctaccgtcagctccacgcggccatgggcgggttcggccgggcgcacatggttgggcagggcagcttcgggaccgtgtaccgcggggtgctccccgacgggaggaaggtcgcggtcaagctcatggaccgcccagggaagcagggcgaagaggagttcgagatggaggtggagttgctgagtaggctccgatcgccgtatttattgggccttattggccattgttcagaaggtgggcaccgtctactggtatacgagttcatggccaatgggggtctacatgagcatctctacccaaccagaggttcctgtggtggaatctcaaaattggactgggacacaagaatgagaattgcacttgaggcagccaaagagacttcaagagtagcaatattctcctggacaaggacttccatgcaagagttttcagactttggtctagccaaacttggatctgatagagctggtggccatgtctcaactcgagttttgggcacacaaggctatgttgcaccagaatacgcattgactgggcatttgactaccaaatcagatgtgtacagctacggtgttgtgcttttggaattacttactggcagagtaccagttgatatgaagaggcctcctggagaaggtgttttagtaaactgggcattgcctatgctcactgaccgagaaaaagttgtgcggatcttggatccagcattggaaggtcaatactccttgaaagatgctgtccaagtggctgctattgctgccatgtgtgttcaaccagaggctgactacaggccattaatggctgatgttgtccaatcgctggttccacttgtcaagaaccgttctaatcagaaagcttgcaaccccaacgtgcaatcgtccaagccacttgactag

SEQ ID NO: 31811 - DNA, 318 bp, Zea mays
  Peptide Sequence Number=SeqID_73590
atggctacgctccaggcccaaccccagccatcgcacgtggccaccgcacagcctgcctccgccgacgccccgggcacgaccggtgccacctcaatctgtccccaacgcaccctcgcccccaacgcctaccacgtgcgcccagcttgcccccacacgctgtccctaatgcaacctcgcctgctcgcactgctccacctcccccatacgttggaggagttccacgcctgcctcctctgctcccacggccgcaacggcaccacgacgcgcgtcgtcgggagccaccaggatgtctgctacctaccccttctcaaggagtag

SEQ ID NO: 31812 - DNA, 402 bp, Zea mays
  Peptide Sequence Number=SeqID_73591
atggcgtggcaattcgagctggataagatccggcaggagctcaacgctaccagcaaaaagatcggcaagctcaaagccagcaagcaagaagaggaagcgaagaagctcatggatagcacagacgaaattaagaaaaggttggcagccaaagaagttgaggtgcaggaggccaagagcaccctcgacgccaaggtcatgacgatttgcaacatcgtgcatgagtctgtgccattcagcgatggcgaggcaaacaataaaattgtacgggcatttggagagaagagagtagaggataatttgaagaaccacgtggacctttgcaggatgcttgatattgtcgcattggaaaaggcttggtgtgtggttcacttgatagaaatgaaatctaacttgtggacttaa

SEQ ID NO: 31813 - DNA, 2103 bp, Zea mays
  Peptide Sequence Number=SeqID_73592
atgaagggtagacctagtgcagtggtgacagctatcttgccgagtcaccaggtcacgggtttgaagcagcctctccatatttacaggggaaaggcttattatgtttgcagcaatgttgcccaggctgatgctaagaacactttccagcctccatctcaagtgaaacatggttggggtggtgttccaggtcgcccttccatggctgaaatagtgaagatgggccggcctcaagctaaagttgggagcagatctgttgcaagtagcattgtcatgccagctattggtgattcagccattcccaatacaccaaatcttgcgcccaatgaatacaaccaaactgtatttgcatcagaagtaggccatggtgcagcagataaattgccaaatgttgccgatgaggtgcactctgtatctaaagatgcttcctcacttgatatgttaccttcagcagagggaacagatgttgaagccccttccatgagtgctaacatgcaaggttcatcaacgccagatgccaatgaagatgacgttgaaaaagacacaaatttggaagagggcaatacagaaagcttgacgactcctggacaagtttctgcttctggtaaagatctgaatggagatgtgtctacaacgacaacacaatttgatcatttgactctgcttgatggaccaaaattgtctgatgagaatccggctgtaataatccctggccatcttcaggtttcaaacgctgattgtgcgcacttgacatttggtagttttgtgtatggaacacttgatgcgtccttgacaacaaaacctcttgagagtcatggggatatcgtaacaattcctgacgatgattatgaccaatcagagggcaggcatgttccttctttttcttttattttatgcactctatttttatcatgtatctcttataaaccctttatcttcagaatccatgacgatgaaagcaaggtaacattagcgcctgctgctaatgaatatgttacttctacgtcaaacagcaatgtagagaatcttgatattacatcagtacagcaatctgaagtcactagatccaatttcctggatgtcacgagcaatacggaatacaacctatcatcacccccagattatgcaacttcaagtgcagcgctgcaagattctacttcacagagttatctacaggaaaatcgacaattccagagcatttctcctctcccaagcttcatgcaaatacaaaatggtctcatgtcaccagcaattccaccattgcgcgaatttgatccagcattctcactattgctcactaatcctcctattatgcatggtacaacgtcatcatccatgagcagtgcaactgtttctacgcagccccaagagaatgccaatccagttggtttacccaaccctcaattgactcaatctcagccaagcaccagcattgctccagggcctccactccctcagcatcttcttcatccctatgctcaaacaacccttcctcttggatacgcaagcatgattggctatccatctcttccaccaagctatgcatatctcccacctgctgcttttcagcaaccatacatgaacagtggcatgttcctccaccaagcagcagcagcagttcccaactcaagtgtgaaataccctctgccgcagtacaaaagcaacattgcccttgctagcttaccacagccaggctctttgctctcaagctatgtcgggggctttggaactgcaaacaacatgcctggaaatttccctctgaaccaaagtacaacgtcggcaaccgcaactcttgggtttgatggaacggtcccgtcacatttggaagatggaaaccagtttgtttgtcttcagcagaacgagaaccctgcaatgtggatgcatggagctggttcacgagggatgcccccacttgcagccagtaccatgtatggctatcaagggcagagtcatcagaccggccttcggcagggccagctaccttcacaatatggctctgctctagggcagtcacagccgggcctgggccccgaacaccgaaatcctagcgatagtaacctaagtggtgctgctcaggctaaccagatgtggccaaacagctactga

SEQ ID NO: 31814 - DNA, 177 bp, Zea mays
  Peptide Sequence Number=SeqID_73593
atgggggaagggctaggcgaggtcgaccatggggttgagggcgaccatgggaaggaaacccctgcacacagattagaaaggaggcgtccatgggggaactgcagggcagccgacgagcacaggtttaacataggcataaatggattggaccaaaaggagattgacttcagtatttag

SEQ ID NO: 31815 - DNA, 1515 bp, Zea mays
  Peptide Sequence Number=SeqID_73594
atgacaagctcggtcatggctccatccagcaagcttgtgaagacgacctcactcccgagccaccagcgtagccttgtccaaccgctccgatctcctaggcacaagcgcatctcggccatgcgccgagcacttgagtcgtcgatgccccaagaagagttggtcaccgccgccgccggtgacgccgatcatcagccaagggcaaggcgcgcctccgacgagactctcgccgtgcacgctggggaaaagctcgggaagaaggacgcgggtgtgggtggcagtggcactggcatagagacagactcgatggccaccccgatcgtgagcggcacgacgcactggttcaagagctccgaggatctcattgccttcaaggaaggccggcggcacagcttcgagtatgggcggtacagcaacccgacggtgaaggtgctggaggagaagatcagcgcgctggagagagccgaggcgaccctggtgacgtcttccggcatgaacgccatcacaacgacgctcctcgccctcgtcccgcccggcggccacgtcgtgaccacgaccgactgctacggcgaggcgcgcgcattcatccgtgacaggctctccgtgatgggcgccatccggtcgacgttcgtcgaccttgacgacgacatggagtcgctgaaggccgttcttgatgagaacgacgacgtggccctcttctacgccgactctccgacgaacccgttgctcaagtgcgtggacatcaggcacgtggctgagttgtgtcaccggaagggtgccctggtgtgcatcgacagcaccatggcgtcgcccatcaaccagaagccgctcacccttggtgccgaccttgtcctgcactccgccaccaagtacatggccggccaccatgatgtcatcgccggatgtatcagcggttcagaggcgctcttctccaggatacgcgcttggcaccatcagctcgggggtgctatctctccggtatgtgtccatcgtcgtgccgctgtacgtcgtcggcagatgatattatatgtgcagcatgcgatactaactctaagcaaacaatcttgcagaacgcggcatatacggtcatccgtgggctcaaaaacgatggcgctccgcgtcgaggcacataacagcactgcgctgcgcatggcacgcatgctagagcgccacccaaagatcgagcgggtgcactaccctgggctggagagcagcccctggcatgaggttgcaaggactcagatgtccggctacggaggcgttgtcaggttggagttgaaggcggacttgcgtggtaccatgagttttgtcgatgcgctggaaatccccttcatcgcgacctcgctaggcgggtgcgagagcctggtgcagcaacccgcggtcatgtcattctggggccggagccaggaggacaagaccaagaacgggatcaaggacaaccttgtcaggttcagttttggaatagagaagttcgaggatctccaggatgatatacttcaggcgctaaacaggatttaa

SEQ ID NO: 31816 - DNA, 519 bp, Zea mays
  Peptide Sequence Number=SeqID_73595
atgttgcatttcatgcacacgccccgaggagatctgcaatatcctgattccatcttatctgacagtagttccatgatcaacaccggattgctaaccgtcttctccaatgacggtgcactcgacgatgtggtcgcgacagatgataacaaagaagaagatggcattatgcaccgtctatggtggcgtgcgattagtttcaccctagccagatcgccggcgagaggacaaagcgaaggaccacaacacatgaagggggctcaccgcatccctgcgcacgtgtcccaagggcataaactctcccaaactgcgaggtccaagtctctgcaggatgagggaggcacgacttcgcggggtcaaggttgcagcgtgcaagtgaaggtcgtgttagaaggcagtggggcccaggcttcgccgcgccaccgtctaggcccatctgtttaccttgcaaggttaaaactcgattcaaatcgtaagcttctcacatctaatgagactgctagatctattgtactgcattga

SEQ ID NO: 31817 - DNA, 1404 bp, Zea mays
  Peptide Sequence Number=SeqID_73596
atggctccgtccagcaagctagtcaagacgaactcactcccgagccaccagcgtagccttgtccaaccgctcggatctcccaggcacaagcgcgtctcggccttgttccgagcacctgagtcgtccctgctccaagaagagtttgtcaccgccgcctccggtgaagctcatcatcaggcaagggcaaggcgcgcttccgacgagacgctcgccgtgcacgctggggagaagctcgccggaaagaaggacgcggacgtgggtggcactggaacagagacagactcgacggccaccccgatcgtgagcggcacaacgcactggttcaagagctccgaggacctcatagccttcaaggaaggccggcggcacagcttcgagtatgggcggtacagcaacccgacggtgaaggtgctggaggagaagatcagcgcgctggagagagccgaggcgaccctggtgacgtcctccggcatgaacgccatcacaacgacgctcctcgccctcgtcccgcccggcggccacatcgtgaccacgaccgactgctacagcgaggcgcgcgtgttcatccgtgacaggctctccatgatgggcgccatccggtcgacgttcgtcgacctcgacgacggcatgaagtcgctgaaggccgtcctcgacgagaacgacgacgtggccctcttctacaccgactccccgacgaacccgatgctcaagtgcgtggacatcaggcacgtggctgagctgtgtcaccggaagggtgccctggtgtgcatcgacagcaccatggcgtcgcccatcaaccagaagccgctcaccctcggtgctgaccttgtcctccactctgccatcaagtacatggccggccaccacgatgccatcgccggatgcgtcagcggttcagaggcgctcatcaccaggatacgtgcttggcaccatcacctcggcggcgtcatctctccgagcgcggcatatatggtcatccgtgggctcaaaacgatggcactccgcgtcgaggcacataacagcacggcgctgcgcatggcacgcatgctagagcgccacccgaagatcgagcgggtgcactatcctgggctggagagcagcccctggcatgagcttgcaaggactcggatgtccggctacggaggcgttgtcagcttcgagttgaaggcggacttgcgtggtaccatgcgttttgtcgatgcgctggaaatccccttcatcgcgacctcgctaggcggctgcgagagcctggtgcagcaaccggcggtcatgtcgttctggggccacagtgaggaggataaggccaagaacgggatcaaggacaaccttgtaaggttcagttttggaatagagaagtttgaggatctcagggatgatatacttcaagcactaaacaagatttga

SEQ ID NO: 31818 - DNA, 264 bp, Zea mays
  Peptide Sequence Number=SeqID_73597
atgggcaggggtaggaggggcagtggctggcctagccgcgccgacggcaagcgcaagcgctctctgagacctccctcaaaggacttcggcgactcaaagtactcgaaggaggcctcctccgagtctgattggtcgcccgctcggacttctccccggcgtcattcgaggactcggatgactccatggggctgtccaccgtggcccaggcataattttggtggttcaatgcccaacacaaataatggactaactagtttgctctag

SEQ ID NO: 31819 - DNA, 174 bp, Zea mays
  Peptide Sequence Number=SeqID_73598
atgtatcctcatactacatccatacatcatacaggaccacaggaggaagtacaagtgggaattgtcgaggagctgccagggattctcgtggaagagggtgaacccaaagctgaagcttatgagtttcctgatcaccgccccagttccttcgagaaaggtaaaggagttgattga

SEQ ID NO: 31820 - DNA, 246 bp, Zea mays
  Peptide Sequence Number=SeqID_73599
atggcgaatgagatggtgtccacggcttggcgattcgcgaacggagatgttcggtccacgcgcgccggcgagaaccgaagaacgatgacgtcgacagtggtgcttgaggccttctccaagctcgagcaaaggctccaggtttgcgcacttgacgtcgaagaggttgcgacttggttcactgacaacggtggcctccaaactttggtttgtcagcactacacaaaacagtggaaactggctgtctaa

SEQ ID NO: 31821 - DNA, 2094 bp, Zea mays
  Peptide Sequence Number=SeqID_73600
atggggcccatcaaggacttgaaaggcgtacagagggtcatgggatgccttgcggctctgagccacttcatctcgcgccacggcgaaagaggcctacctctgtaccgcatcttaaggaagaccgagcgcttcgcttggacccccgaggccgaggaagccctcgggaacctgaaggcgctccttacgaacgcacccatcctggtgcctcccactgccggagaagccctcttgatctacgtcgccgctaccactcaggtggtcagcgctgcgatcgtggttgagagacgagaagaagggcatgcattgcccgtccagaggccggtctacttcatcagtgaggtactatccgagaccatgatctgctacccccaaattcagaagctgctatacgcagtgattctgacgcggcggaagttgcgacactacttcgagtctcatctggtgactgtggtgtcatccttccccctgggggagatcatccagtgccgagaggcctcgggtaggattgcaaagtgggcggtggagatcatgggcgaagcgatctcgttcgcccctcagaagaccatcaagtcccaagtcttggcggactttgtggctgaatgtgtcgacacccagcttccagcagctccgatccaaccggaactctggaccatgtttttcgacgggtcgctgatgaaaacaggggtgggcgcaggcctgctcttcatcttgcccctcgggaagcacctctgctacgtgttgtgcctccatttccgagtgtccaacaacgtggctgagtacgaggctctggtcaacgggttgcgcatcgccatcgagctaggggtccgacgccttgacgctcgcggtgactcgcagcttgtcatcgaccaagtcatgaagaactcccactgccgcgacccaaagatggaagcctactgcgacgaggttcggcgcctggaagacaagttctacgggctcgaggtcaaccacattgcccgacaatacaacgaaactgcggacgagctggctaagatagcctcggggcggacaacggttcccccggacatcttctcccgagacctacatcaaccctcaattaagaccgacgacacgcccgagcccgagaaggcctcggcccagcccgaggcaccctcggcccagcccgaggcaccctcggcccagcccgaggcaccctcggcccccgagggtttctactggccgaccgcggtggccgacgccactagaattgtccgcacctgccaagggtgtcaattctacgcaaagcagacgcacctacccgctcaggctctgcaaacaatacccatcacctggccgtttgctgtgtggggtctggacctcgtcggtcccttgcagaaggcacccgggggctacacgcacctactggttgccatcgacaaattctccaaatggatcgaggtccgacccctaaacagcatcaggtccgaacaggcggtggcattcttcaccaacatcatccatcgctttggggtcccgaaatccatcatcaccgacaacggcacccagttcactagcagaaagttcctggacttctgcgaggatcaccacaaccgggtggactgggccgccgtggctcaccccatgacgaatgggcaggtagaacgtgccaacgacatgattctgcaacgactcaagccgaggatctacaacgacctcaacaagttcggtaggcgatggataaaggaactcccctcggtggtctggagtctgaggacaacgccgagccgagccacgggcttcacaccgttctttctagtctatggggccgaggccatcttgcctacagacttagaatacggttccccgaggacgagggcgtacaacgaccaaagcaatcggaccaaccgagaagactcactggaccagctggaagaggctcgggacatggccttactacactcggcgcggtatcagcagtccctgcgacgctaccacgcccgaggggttcggtcccgagacctccaggtgggtgacttggtgcttcggctgcgacaagacgcccgagggtggcacaagctcacgcctccttgggaagggacgttcgtcatcgccaaggttttgaagcccgggacgtaa

SEQ ID NO: 31822 - DNA, 447 bp, Zea mays
  Peptide Sequence Number=SeqID_73601
atggcgttttcagttgaaaacagaagctatgggcagacaatcaggtccaaggcccccccacctacgtacagctccaggtggcgaagagccgacatcgaggtgccaaaccttcccgtcgatgtggactcttggggaagatcaacctgttatccctacagtaacttttatccgttgagcgacgacccttccactcgacatcgtcggatcactaaggccgactttcgtctctgctcgacgggtgagtcttgcagtcaagctcacttctgcctttgcactcgaggaccaatgtccgtctggcccgaggaacaaggttcaaatcgtatgaaaactttggtgtggctcctgggtgcaacggctcctcaactacagcagcactgtagcaggagtggaaggagccctatgaaaactagacccgctggctccttcctatggttcattttagactag

SEQ ID NO: 31823 - DNA, 1932 bp, Zea mays
  Peptide Sequence Number=SeqID_73602
atggaaagaatcgtgtacgacgtagtagaaggagactacggtgaattcatcaaggtgctccgcagggtgctcgccgagtacgaacccgccggcgaccggcagagcgtgctggactaccagcacgcgccccaccccgtgctgccacggcaacgcagccctcgccgcccggcgcggtggatcctcatcaccctgcgggtccgcgacgagggccacgagaccacgctggcggtccgcgacgacaacgtctacctcatcggcttcagtaaccggcgggggaagtggttcgaattcggcttcggcggcggcgacggcggctgcaggagcgcgcaggtgctcccggcggattggagctccaccttcctggagtgcgacgtcggctacgggggcatgatggtcggcggcgccatgaggctggtgggtctggggctcggcatgtgcttcgccagagacgccgtgcgccggctctcgtcctacgagcaggaaccaggcgtccaagtggacgaccggaccaagcggcacctggcgcggctcatcgtcatggtctgcgaggctgccaggatgatcccgcactgcgagacggtgctcgacgactgggaccgcagctcggccgccatcaccgagcggcaggtgcacttgctgtggaactgggggcgcatgtcgcacgccgtgctgatctgggactggtggagcaggcacgggagctggaacgggatacctccgccgtggccccctgagctgctagctccgcaagttgatgtcaggaacgtgggacaggcgctgcagatagtgcagctgctgcttaactggtcggaggcggggccgacggcactaccgtcgtggcagccgccgccaccacctcaggaaacggcgggagagggtgacgacagcagcgacaacttggggcgctactggaacggcggtgccaccatcccccacgtcctcggccaacaagccggccaatgcaggctggagatcttcggcgtgcgcgctggtttctacatgcgcggcgccgccaccatctcggtctttgacgggaagcgcggccaggtcatctacagtaataacgacgacgacaagctggacggcgacgatgacattgctggtcgaagaagaaccatgctgggctcactggatcacgagaatggtgactgtgacagccaccatggacgacatttcagcgagtggaggatgttcgcccaactgcgctccttctacaatcgggctggagttggatttggtggctgggccatctctgcgtacgggagcgtctccgttgaaatcgacagctccaccacgacagactcctccaactcctacattgaacttggcatctccactgcagagatagactacgtcagaatcgacgtctccaagaaagatacccgccgcagcagcgacgacgacggcaggacaacgacgacgctgctctgggattgctacaacgaggaaggcgacgacgtagcgtacgacacggtgttgacgcggaccatcagcaccagccatgggcccgttgacgtgacctacgcggtgctgagcaacgcggtcgaagccaccgtgcaggtcaggctcatcctgctcgccggccaaggcgacggcatcatcctcgtccatggcaggatcaccgctggctaccaagatctccgtgcccggagcgtgctcttctgccaggacgcggaggagaaagtggctatcgtcaccggcggcgacggctcccacgtcgtccccctgtcgcggtccgtcgttgcggtgccactcacctcgctgctcctcatagaggccgccctgcacacctcggtcgcttcttctaaccacacggcgaaggccgagggtcatcccctccctgaacccatcgttgctcgtttccgccccgaacccgccggacaggatgaggtgcagcggttcggcatcgacggcggccacgtcgaaatcaag

SEQ ID NO: 31824 - DNA, 180 bp, Zea mays
  Peptide Sequence Number=SeqID_73603
atggcgccgccgtggggagcctcgccccgtcgccggagtccggcccgtgggggcaaacaaatctcggacattgataggactttcaacggttcagatcattatgttaattggaacatggagcgaccacccgggaaaacagtgctaccacaagggtataatgggacgcccttggctgattaa

SEQ ID NO: 31825 - DNA, 233 bp, Zea mays
  Peptide Sequence Number=SeqID_73604
atggccgccaacttcatggcggggaccttatcccaagtacacggcagcactgacccagcacagaattcatggagttatcagtccgccgtgcatcatccggagggggacgaaggccacatgcagccattcattactcggccctcgaaggccaagcctcacctaataacagttgcctccattgccatgcactctcttgggagagttccggaacaattctttgtccacttcccagg

SEQ ID NO: 31826 - DNA, 510 bp, Zea mays
  Peptide Sequence Number=SeqID_73605
atgggcaagaacaagaaagatcgaggttcgtcgcaccgttccgacgataagtggaagcgcgagccaagtcctccctcggaggactttggtgactctgagtactcggaggaggagttttcctccgagtccgaggggtcgccggtctatgcctctcccccggtgtcatccgatgacttggacgattcccaggggatagccgccgaggtgtggacgtacatctggttcgtcgagcgctctgggctcgagggatcggatgagttggaggtctccttggacgaggagaactcctctgactcgtccgaggaaggtggcggcgacagcaacgacgagggcgacggcggcaacggaggtggtggtggcgatgacagcgatgacgacggtgttggtactcgctcttccgagcaagtggatccaacggaggagtggagagagtgtttgcaaagtttaacggggaatggcaatagctctgttaatctgcccgctcaagggtactgtacggggtatttatag

SEQ ID NO: 31827 - DNA, 201 bp, Zea mays
  Peptide Sequence Number=SeqID_73606
atgacccaccgtttgcagccgcagcccctgcgcggacttctctgtggcgtccttctcccagcgcaggcgccgcctccagctccacgctatgggatctgctcgtccttctctacccagaccttgcatataaagaagcagacacctttgggcttcatcgttggcacggacgaacaacctccagctcttagctgggctgccctg

SEQ ID NO: 31828 - DNA, 297 bp, Zea mays
  Peptide Sequence Number=SeqID_73607
atggaggcggccgcctccagcctctcgacgctgctctccaccttgcgcgtggacgggccctggacgcctccgggaacctgggagtcggccatccctgagagtggcgccgctcgcgttacagacctcggaggacgcctgcagccgatctacgagctcgcatcggttactgatgatgctttgattcatctggccttgcatgcgctgtatggtgtcaaatcatcgttagatgagattgaggagctttcagtgctgttctcctcaaatccagctgacagaacctctaaccgtgttacaaat

SEQ ID NO: 31829 - DNA, 1515 bp, Zea mays
  Peptide Sequence Number=SeqID_73608
atggccgcggcggcgaagggacgacctattagtgccccgccagagtggcgggtgacggtgcccgagggcgcctcggtggcggtggagcacgaggcggcggcctgccgggccgcgcgggcgtgggcgtggctggtctcgtgcgtgctcgcgttctgggacagggggcttggattcggcaggcgtgtctggaggatcggcgccgacgaccccaggagggcggtgcacggcctcaaggtcggcctcgccctcacgctggtctccgtgttctactacagcaggactctctacgacggcgtcggcggcgctgccatgtgggccgtcctcacggtcgtcgtcgtcttcgagtacactgtcggtggctgcgtgtacaagggcttcaaccgagccttcgcgacggccagtgccggtgcggtcgcgcttggcgtgcattggatcgccagcaagtccggtgacaagctccagccgttcatcacaagtggatcagtttttctgcttgctgccatggcgacgttctcgcgcttcatcccgacggtgaaggcgcggttcgactacggcgtcaccatattcatcctcacctacagcctggtagccgtgtcgggctaccgcgtcgacgcgctcctggcgatggcgcagcagcggatgtgcaccatcgccatcggcgtctccatgtgcatcgccatctgcgcgctcatctgccccgtgtgggccggccaggagctgcaccgcgccaccgtgcgcaacatggacaggctcgccgacgccgtggaggcctgcgtcgatgactacttcgccgccggcgccggcgcggaggcgagctccaagcccaacacgaaggcggacgaggggtacaagtgcgtgctcaactccaaggcgtccgaggacgcgcaggccaacctggcgcggtgggagcccgcgcacggccggttcgccttccgccacccgtacgaccagtacaggagcgtcggcgccgccatgcgccactgcgcctactgcgtggaggccctgcgcggctgcgtccgctcatcggcggcggcgccctgccacgccagcaggcggcacctggccggcgcgtgcacgcgggtggcggggcagtgcgcggcggtgctccgcgcggcgtcgacctccgtgaacacgatggcggcgccgtcgcggggcctggacttggccgtgctggagatgggcgccgccgtggaggagctgcaggccgacctgaggacgctcccgtccagcctgctgcttgctgccgaggcaacggcggcggcggagcccgcggctccgacgacgatggtaatggtaggcgcggcacagctgttcaccatcgcctcgctgctggtagaggtgtccgtgaggatcgagggcgtcgtggacgccgtcgacacgctggcgaacctcgcgggcttcgacctcgagtcagcaggcgacgaaaacgagaagcctgcagagcccgcgaaaaacgtgaccgaacagtcggaagggaataataacgggtcgacgacgatgaagatgccagcttga

SEQ ID NO: 31830 - DNA, 402 bp, Zea mays
  Peptide Sequence Number=SeqID_73609
atggccattggacagcgagacagatccctgtggcaagtgctcttcaatgtcaaagctcagaaagctgtgtgggcttcggtcatggcgtcgccacgtactgtcgtctcaatccccctcgctcggccaactttctccagccactgtttccaccacgcacaggagatcagtggtccatctgacaggggctttgctccctttttggagcacctactcctgttgcacacgcgcgccggagaggctggaggttctccagcagcagcgagcacaagaacaagaaccgttacattcttgctctcaagggacaaatgcagctttgtagctgacaacaatttagcaacagttgcactctaccactcctacacacttgccttctctgacttgtactccatggaatgggaataa

SEQ ID NO: 31831 - DNA, 351 bp, Zea mays
  Peptide Sequence Number=SeqID_73610
atggacgccactggcatcggagggggagggaaggcaaaaaacggagcgaccaggcgcaaggttggcgagcccagcaagaagtcggcgtggagtttaagttatcgcgacatcttttataataacttgaataagttttcactctttaatccacaggccataaaacaaaagcagcaatcgttgtcccttgaagcacatgattattgtgtgaatgcaattcctgatttgagcaatatgatcaaagcagttcagggtctagttgcacagtgtgaagatttaaaattgaagtgctatgaagagatggataagaggaagaaactttataatattgttcaagagacaaaaggtttataa

SEQ ID NO: 31832 - DNA, 345 bp, Zea mays
  Peptide Sequence Number=SeqID_73611
atgcaagcccagctgctgcaaaggaggcactcatgcactggtgatgagcaagaggagttcctgcgcccaccaccacctctgaaaagggcccggatggggtacgagagcatgcagggactgggaagccatggagtcagtgatgcgcggaccgcagccgctgccgggggcctgtactgcatcgatgattacatgcaagccatggcggccatgggctggagaataaaggaggagggactcaccagatggcagtggcagaggagggatgctgctgcgccttccgacctccaagccatgggatgtttggtgcaagaacctgacccctttaaggcgtgtttggacccctag

SEQ ID NO: 31833 - DNA, 1944 bp, Zea mays
  Peptide Sequence Number=SeqID_73612
atggcaagttcggcgctgaagaatctcgccaccggacggcccaacggcagagaggacatcatccgcctctgctccactggtcgcgtcaaggaggctctccaccgccgcttccgcgagggcctgtggtcggaacctggcctcttctcccacatcttccgggcatgccaagccctcccgctcctccgccagctgcacgccttcgccgccacgtctggcgccgccgccgaccggttcacggcgaatcacctcctcctagcttacgccgacctgggcgacttccccaccgcgcgcggcctgttcgagaggattcctaagcggaacgtcatgtcctggaacatcctcatcgggggatacgtcaagaacggtgacctggagaccgcgcgtaagctgttcgacgaaatgcccgcgaggaacgtggccacgtggaatgccatggtcgctgggctcaccaactcgggactcaacgaggagagcctggggttcttctttgccatgcggagggagggaatgcagcccgatgagtatggcctcgggagcttgttccggtgctgtgccgggctgagggacgttgtgtccgggcggcaggtccacgcgtacgttgtgcggtctggactagacagggacatgtgcgttgggagctccttggcacacatgtatatgcggtgtggttttcttcgagatggggaggctgctctccgagcattgccttcgcttaacattgtgtcgtgcaataccactatctctggaagaacacagaacggagacgcggaaggggcactcgagtttttctgcttgatgaggggtgctggtgtggaagcaaacgcagtcacattcgtcagcgccgttacttcttgctccgacttggcagctcttgcacaaggtcagcagattcacgcactggctatcaaaactggagttgacaaggttgtgccagtcatgacttctcttgtgcatatgtattctcgatgcgggtgcttaggtgactcagaaagggtttgccttgagtatagtggtacagatcttgtcctttgcagcgcgatgatctcagcttatggattccatgggcatggacaaaaggcagttggcctgttcaaacagatgatggctgcaggagcagaacccaatgaggttaccttcttgaccttgctatatgcatgcagccatagtggtcttaaagatgaaggcatgaattgttttgagcttatgactaagacttatggactgcaaccaagtgttaaacactacacttgtattgtggatctccttggacgttcaggttgcttaaatgaggcggaggaccttatcctgtcaatgcctgtgcaacctgatggggtcatatggaagacactactgtctgcatgtaagacccagaaaaagttcgacatggctgagaggatagcagaacgtgtcattgaattggaccctcatgattctgcctcatatgttcttctatcaaatattcgagctaccagcagcagatgggaggatgtcagtaaggtaagagaaaccatgagggaacagaacgtgaggaaagagcctggagttagctgggtggagctcaagggtcagattcaccaattctgcaccggagatgaatcccattcaaggcaaagggagattgttgaatgcttggaagaaatgatgaccaggatcaggcaatgtgggtatgcaccggacatgagcatggttttccatgacatggaggatgaggagaaagaagttagtttggctcaccacagtgagaaattggctatagcatttgcttttctgagcttacctgaaggagttcctattcgtgttatgaagaatctacgtgtatgtgatgattgccatgttgctattaagttgatgtctaaggttattggacgtgagattgtggtccgagatgttagccgttttcaccatttcaaagatggaaaatgctcctgtggagattattggtga

SEQ ID NO: 31834 - DNA, 450 bp, Zea mays
  Peptide Sequence Number=SeqID_73613
atggcggtgaccagtgccgacgaggtcggcgggggggcagtggcatcagcccacgtagtggctgcgcaggcggggaaccgcgtcgccgcagcagctgttgctgcgcaagggagaggcgtcgaggaggggcccgaggccagagatgtagggggtcccaccacagcgagctcgggaagagggccggggggcgaccagagaggggaccgcgaccagggaggcaccgaccgacggcaaggtggcgacgcctgcgcgcaggcccgcagcgacgcgcgctcctgggccgacagcagcgcctgctggcagggccgcgacagcgctcgcgccctggccggtagtcaggccggcggcgacggcgacctcgcagggaggggtggccgcgcgttggcgccggcgaggtgggagatgtgcgccatggccggcgcacgcaggggaggtggcggcggcacctag

SEQ ID NO: 31835 - DNA, 603 bp, Zea mays
  Peptide Sequence Number=SeqID_73614
cccctcaactacgcccgcatctacctcgcggacctcctgccgcgctccgtctcccgcgtgctctacctcgactccgacctcctcgtggtcgacgacgtggcccgcctctgggcgaccgacctcggccccgacgccgccctcgctgcccccgagtactgccacgccaactttacctcctatttcaccgacgcgttctggagccaccccgagtacaccgccgtcttcgccaaccggacgcgcgtcccctgctacttcaacaccggggtaatggtcatcgacctggacaggtggcgctccggtggaagcaggagggccaggatttacgagctgggctccctcccgccgtttctcctggtgttcgccggcgaggtgaaagccgtggagcaccggtggaaccagcacgggctcggcggcgacaacgtggcggggcagtgccggcagctgcaccccggtccggttagcctgctgcactggagtgggaaggggaagccgtggctgcggctggacgccgggcggccgtgcccgctcgacgcgctctggatgccctacgacctccttcgccgccgcggcgctcgggacgatctcctcgccgccgtctcctga

SEQ ID NO: 31836 - DNA, 441 bp, Zea mays
  Peptide Sequence Number=SeqID_73615
atgacaacctttatgttgatgtactcttttattgctgagaaagcaccaaaacacccagttctcctatgtgcatccagagatccatgcatgtgcatgggtgactatgacttgctttattatgtcccagatgtgacaaagtcaacatggcaatcactcgtgatcgagagcgagcttcctgtcctggttgagttctcggcggcatggtgcgggccatgcaagatgatagaaccagttgttggcaagctctcgaaggactacgaggggaagctgaaatgctacaagctaaacacagatgagagcccggacatcgcaagccagtacggggtccggagcatccccaccacgatgatcttcaaggatggcgagaagaaggattcggttatcggggccgtgccagagagcacactggtcacatgcatcgagaaatttgtcgagaggtag

SEQ ID NO: 31837 - DNA, 255 bp, Zea mays
  Peptide Sequence Number=SeqID_73616
atgaaaaattccctagcgttttcttcttctgaatcacattttcaaactgacactgagaatgagttcaaggctattcagtcaaagattgtacgtctacgagcagaaatttcaggagccattgatcatggggatcctactcatgtggtagatgagaatgatttatccttgaagagattaggggaattgaaggagcatcttaatgatcttcagacagaaaagaatggaaggctgcaaaaaattgacatccacaagtaa

SEQ ID NO: 31838 - DNA, 246 bp, Zea mays
  Peptide Sequence Number=SeqID_73617
atgtggtggtcagggtcggagcgtgcagactctgctctcgctcaccgtgaaacagaccatggacgcggcgcaagccagcggttgaactatggtgtggtgttcaccgtgaagagcttacaaggagctcaagatcttgtaaaagaaacttattcaccattacaatggaatgagaactacacttacactagggagcttgtcgaacgcacatggacgtcagccgagtgcaaggtgcagggtcagctctaa

SEQ ID NO: 31839 - DNA, 279 bp, Zea mays
  Peptide Sequence Number=SeqID_73618
atggtccatattgtggcaaccaagacacaaataaagaacaaatgggacaggttgaaagaattcaaggcatggaagaagttgatgaggaagacatgtactggacattccaagttgtgggaacttcaaaatatggaggaactagaaatatgttttggcagcatcacaagtattggtgttgatcactggtctcctcatatggccactgctttcaccattgctgaacaaggagcagaagcagttggagagtttggtaaatctactggcagagacaaacagtga

SEQ ID NO: 31840 - DNA, 706 bp, Zea mays
  Peptide Sequence Number=SeqID_73619
gcttcaggttcaggctttcaacaaggcaaaacagccatacgtgatacgcccatggacatgggcagcaaacaggccaacagccatactacaacatgaagcaaataatcactggaagagcacaccagaaaacagggacaagctaagctctgaatctggattctggagaccgtacctgcaggccggctgctggcgccgccgcgccggggatggaggaggggccgagggggacgatgccgccgtatcccccgtcaccggtagcgcgccgccgtcacctgttccgctagggttcctccctcggcagctggttgcctggttcgtgtcgtttgtgcctgggcgttgctctgttggctcttggttgtgctgcttctgctcacgtggtgggaattgggaaaaaggaacctggactgggccgctggaatcaatcgctgggctaatctggtcgtccaccaatgaagagttccaagacgaatgcatcgggcttcttgggctaggctcggaatatgacgtgtcggaaggaccagttcgatcgtcgatctgtgagaagatgatccatatcatcgagatgaatgataccaaagagaacgcagaggacaacgtgccgtatctgttcgagtgcgagaagctggatggaggtagcgagctggacgccaaacatagccgtaggcagttagccacactccagttagccaaactagtctatatttag

SEQ ID NO: 31841 - DNA, 552 bp, Zea mays
  Peptide Sequence Number=SeqID_73620
atggagagccctatcgccgtgtcgcgaggggccgagcggcggctggaccgtggataccgcgttggggctgagctgacctatttttcgtgggccgtttttactgggtcgcgaccggggctgcagatccgcccctgctgccggatgtcggagtcaccgtgccggcttatccgcttatggtctcccgcaagcacccagccgaacgagttttttgctattatatttcggatacgtgggtggggagcaaactggaaggagttcctggagcttgatgccctggcgcgtgagactccagtagagaaatgggatggcacactcttaatcacaactactggaatcaatgatgaagccatttatcgttatcgaattaatcttcaagaagagatatcaagtgcaagattgagcaagctggctaccacatacagaaatcatgcacgattcagtggaactgaagtctgcctttgtctctcaaatgatgcagatgttgatgattttatattatggttggttggcttcttcagaaaggttttttgccatatctatttatatgcttaa

SEQ ID NO: 31842 - DNA, 519 bp, Zea mays
  Peptide Sequence Number=SeqID_73621
atgtaccaggaatgtttggattgttgtattttgacattgtttagttcaacatattcaaggttatctgcatgcttccttggatcagggcaacctgatagtcgcgttgaagctaaagcgatagctggcatgtataagattgtttatgtttgccacgagacaatattaagattaatggattcgttgaagaaacttgcaaaaaagctagggattgcactttttgccattgatgaggtccactcttgtgtttggtactcaaggaatgttcctcatgagaatggtcatggcaaatcattgggcactaagttgcacacgcttggcagtctgccttcacgtgtactacttaatggcaccgatggggatgatcatagtgaccatttgaagcaaggtttcgtgacaggtggtatggttgctagatcatccaatgttaaatgcgatgaaaaggctgtaattatcatgtctacaagttttgtctactgtgacaatgttgttatggataaggctgaagatgaagaaccttag

SEQ ID NO: 31843 - DNA, 1683 bp, Zea mays
  Peptide Sequence Number=SeqID_73622
atgccgctccccgtcgagagccacaggaaggactcggtggaaatggagttcttcaccgagtacggagaggcaagccagtaccagatccaagaagtcattggtaaaggcagctacggggtagttgctgcagctgtagatacccgcaccggtgagcgggttgctatcaagaagatcaacgatgtgtttgagcatgtctcggacgccacacgcatactgcgggagatcaagctccttcggttgcttcgtcacccagacatagttgagattaagcacatcatgctccctccatctcggagggagttccaagatatttatgttgtttttgagctcatggagtctgatctccatcaagtgatcaaggccaatgatgacctcacccctgaacatcaccagtttttcctgtaccaacttcttcgtgctctcaagtacatccatgctggattatgtggcaacgaggtgtacactcctgcaattgatatttggagcattgggtgcatatttgctgaacttctcactggaaggccactatttcctgggaagaatgttgtacaccaattagatattataacagatcttcttggaactccatcatctgagaccttatctcggatccgaaatgagaaggccaggagatacttaagctgcatgcggaaaaaatatcccgtgccctttactcataaatttcgaaatgccgatcctttggctcttcgtcttttagagcgtttacttgcatttgatcctaaagatcggcctactgcagaagaggctctagctgatccatactttgcatcccttgctaatgtggaacgtgagccatcaagacacccaatttctaaacttgagtttgaatttgaaagaaggaagctggccaaagatgatgttagagaattgatctatcgagagattttggagtatcatccacagatgctggaggagcacatgcaaggtggagaacagattagcttcctctacccgagtggagttgatcggttcaaacggcagtttgcacatcttgaggagcattatagcaagggagaaagaggttctccactgcaaagaaagcatgcttctttaccaagggaaagagtggttgtatcgaaggacggtgatactgatcaacatattaatgaccaggagagaagtgcagattctgtcgcccgcaccactgtgagccctccaaggtcagaagacgacgacatgagcgatgtgaaatccacaagcttaagctctcggagctacctgaagagtgcgagcataagtgcttccaagtgtgtcgttgccacgaagaaacacccggaggtagtgcctccaccactactcacgtttggtttctctgctaggacgatggaatcgctgaggaaatggaaggcgccgtcaatggattgtctgaaaaggtctccaggatgcactcgtaagcaggactgcccctggcaacagcaaccttgttgcaaggtttctgtctctggtacactgtattccgacgacagccttggaaaggcaaacactgtatgtcacacagcagtacagcacactgtgctgcgaggttgggttttgcttgcgtacatccatccacagctagttcgactttacctgggtggaagaggaacacaccaccgcctgatggccctttcttcatcgtctgcatttccaccgtgtcatgccagcgctgcgtggcacctctag

SEQ ID NO: 31844 - DNA, 108 bp, Zea mays
  Peptide Sequence Number=SeqID_73623
atgacaaagtgtaccttcggcttgatagaaggtaaaagtacaagtgtgacgcacgagcgaatacaagtcaacgtgaaaagtatgggagcactgttcatctatttatag

SEQ ID NO: 31845 - DNA, 231 bp, Zea mays
  Peptide Sequence Number=SeqID_73624
atggtcgtcttctaccttgggctagagcttgtgagcggggaggatctcgacaggggagggctcggtcagggaaggcgagcgggcgggccagggcacggctcgggcgtggacgccaaggggtgggcgtgggagctcggcgcgggcgagtcgtggggcgcgggcgtgccttgcggcggcggcgcgaccaggggaaggagaggaaggtgccagggcgagccccacctgccatag

SEQ ID NO: 31846 - DNA, 108 bp, Zea mays
  Peptide Sequence Number=SeqID_73625
ttccacaacgcagatgtcgaagtaaaagttgttctccgctggaggattctcagtctgggagacaacctcttcttcttctacgatttcttcctcgtgttctatacatga

SEQ ID NO: 31847 - DNA, 147 bp, Zea mays
  Peptide Sequence Number=SeqID_73626
atggcgaactcgattagagcacgtaccgcagatgggggtcaatggagggagctggccacggagaagagcggacccgcggcggaggttgaagtgcgtttgaattcaaatttaaattcaaagtttgttatgagcttcacctttgagtaa

SEQ ID NO: 31848 - DNA, 720 bp, Zea mays
  Peptide Sequence Number=SeqID_73627
atggcgcgcccttcaccgccaggtcatgccgccacctcctggccacgcatcccgctgcaggcacccggatctgtgccaccaccggcccatccgaggcagcgacgaggtacctcggtcgcctgcgtcgaagacctcccaccaccgctgcgacttgaggaatggcaggcattgttgtgccttcaacactgtcgcgatgtcgtcgacgcggcccatctgaggcagggacgtcgtacccccgtcgtcgaggtcgaagacctcacgccaccacctcgacttgaagccttcaccctatcgaggtacccatcccctagcctgccgccgagttactttgagttttggggacagggcttttctactgggcttcctgagagattgcaattgtcccttgtgcgaactataccagggctggagaactgcctaatgctaagacctgcatatgcagttgaatatgattacttacccgcatatcaatgctcaagatcacttatgacaaagaagattgagggtttattcttctctggccagataaatggaacaacgggatacgaagaagctgcagctcagggtataatttctggaatcaatgcagctaggcattctgatgggaaatcattaattattcttgagagggaaagcagttatataggaactcttattgatgatcttgttacaaaagatcttagagagccctatcgcatgtgtctaatcaaatatgactaa

SEQ ID NO: 31849 - DNA, 136 bp, Zea mays
  Peptide Sequence Number=SeqID_73628
atggctaatgttaggatacgaggttccaaatctgtgcttgcattggcaactaagggtgaactcaaaatttggaggggccgtctgtatggactacaaatcctaaaccgaaacaagggtacaaagtttgttgaagcag

SEQ ID NO: 31850 - DNA, 396 bp, Zea mays
  Peptide Sequence Number=SeqID_73629
atgagccagtggagcaacggctccctacgcgccaaaggtcgactgcaaaagtctatagtagcaaacagtgccacgcagaagtcagagcgcagaagtcggagatcaccggactgtccggtgtggcaccggactgtccggtgcaacaaaaggacaacatctccaacggtcaagaagctccaaaccccaacggccgcgctgacgtggcgcgcaccggacagtgaacaacgactgtccgatcacgccaagaaggagatcacgaccggtgacaagtccatgggcttggggaggactatatcaaaagagtccgacaacaagtacaaggaggaatcatcttcctctatcaagtcacataggaggggtgacaagaagaagaagatgaaggatgtggtctactaa

SEQ ID NO: 31851 - DNA, 828 bp, Zea mays
  Peptide Sequence Number=SeqID_73630
gtgagggactgggttgacaggatcgctgccgactggcgattccgacggataatcccttgccacttcgcagccccaataaacgcgagccggtcagactttctggctgcctttgccttcctcgacgagttcctccccgaacgcgccgccgcggctcccggcctctcgctgctcctcgcctccttcatggggaaggcggccagctacttccctccggatgacatgaagacgctctcgtctctggacgagttcctggtctccgttggcgctgtcaagaaaaccgtctctgggaggaagaggctgcagtgcagtgtgcacaagactgagggtgagggccatcggcaaggagttatggagtgtttgggctgcctccacgagcaggcgcacgccaaggtttgcttcacgcggcagggcgtcgaacagcaagctcattatgaccacaggcatcgcagttcaacacttcacaggccgaaacgcctgctgcgtcgcttactattgtctgacactgacagaagttccatattgcacgggcggacgtctcgaaaccagccgagcctcgtggatttcgttgaggcccgacccccgctggcgcacgttcacccgacccgattcaccttggccgttgcgcggagggcggcggggaacgggggtgatctcacatcggcgatgacgaagacgacggtgcagtgcggtcaggtcctctcacaggaggaagcagagcgcatttacttgcggcgcggtgctgctgctccgcaacaacgccgacgcgacgccgaccacagcgaggagagtaacgcgcgcatgacgccatctgcagccgccgaactctga

SEQ ID NO: 31852 - DNA, 621 bp, Zea mays
  Peptide Sequence Number=SeqID_73631
atggccatgtcaatggcgacggcgttcacgcaggggggcagagatgagcagacgggcatcttcggcttttgcagggacgcaggacgagggagtggtcacgggcatagcacggcgaggcacacgacgcacgggcgcacggtgtgcatcgaggtcgagggacgcacgcagcaacgcgtggagcgtggcatttcactgagcacctggcgtgcaagtaactgggcacgtgggctgggctccacacgtgcactagcgatcttccaacaatccagagtgtcgtcacggctggccaccggggccatgtacggctacgcgtgcatatatggagagcgtggctggcatgcatgcatcgcgttgcttacgacgcaaggtgaaggtggtgctgcgcgcaacggccgcgtcgcacacccaataaggaccgatgcgccgcagcagccagcagctttggatcggaacaatgtgccgcgcaaaaaaggggtgtcgcgacaagcaggaaggaacaagctaggctgtggggcgcagcgcaggcctgtagcggcttttgcattgcttactccggtgcgtgccaatgcggcggggcacggggcacggggcagtggcgaagctagagcaaaactgaggagg

SEQ ID NO: 31853 - DNA, 559 bp, Zea mays
  Peptide Sequence Number=SeqID_73632
atggcgccccgcatactctgtgacgacggctgctctcagccccctttacagaagcaagaggacgctggctcaggcgaacttgccgctctcgggaattcgtcggcggcgtacggctataattcaccggactgtccagtgagccaacggtcggccgggcctacggtcagccgcgcgatccgcacgagacacgtggccgagccaacggtcgggagggggcaccggacagtgtccggtgcgccaacagctcccaggcaccaacggtcggcttcgccaaataaggaaggatatccgcaccggacagtgtccggtggtgcaccggactgtccggtgcgccaggcgacagaaggcaagatcagccttcctggaatgctctcaacggctcctagctgccttggggctataaaagggacccctaggcgcatggaggaagataccaagcattccttgagcactcttgatcacttgcactccattcttgcgcacttgttcgacattctactcggcgccaagatctgtggcgccgagctacgaggccgcgccgccacgacgtcggggccgg

SEQ ID NO: 31854 - DNA, 279 bp, Zea mays
  Peptide Sequence Number=SeqID_73633
atggcctcgggaggaaccttcgcctcgcccgtaaatggcctcggcttatataacatcgacgaaaggacgtccgatgccgccaacccctccgcggagacagctgacaacgggatggctacaaaaactacgaagttggggccatacatcctccccctgatccaagtcaaccgcaagtacaaaggccattccagcggccatgctgctacagggctcgggttcgcctcctctcctcgaaacgacaaacctgggcgctccaaggatccctccttgagtctataa

SEQ ID NO: 31855 - DNA, 349 bp, Zea mays
  Peptide Sequence Number=SeqID_73634
atggcagcagcagccgtcgcctccagttccaccccgcggccgctccggttggcgcagcgcggggcggtctctgcgcacgcgtcccaccacgtcagcgccccgccccaccgctcccgcaggccgcggctctccgtctcggcctcagccggggtggaggggaccagcgggtcggagcggttctacttcaacttcaccgggttccccttcccgctcggcccgttcctcaaccgccgcaccatccgcaccgaggcggtgaagggcagcatatggctgttcgagcaggagcaggcgctgggcttcagcagcgtctccaccaacatccgcatgacggtcatcaagctcaagtccg

SEQ ID NO: 31856 - DNA, 258 bp, Zea mays
  Peptide Sequence Number=SeqID_73635
atggggggcggcggcggatcctccgggccggagctgtcgacggacaacatgaaggggatagtcctggcgctgctctccagcggcttcatcggcgccagcttcatcatcaagaagaagggtctccgccgggccgctgtcgcctccggcgtccgtgcagggtctgtggtcattgttatccacgctccacaggagcaggagattacttcagttaaggaaatatggaacatggcgacacaacctggaagtggaatatcatga

SEQ ID NO: 31857 - DNA, 387 bp, Zea mays
  Peptide Sequence Number=SeqID_73636
atggcggttcccctgcttctcctcctcctgctgtccgtgttcacagcctcatatgcggcgttctgcgtgtgcaagccgggcatgtccgaccagatgatgcagtcggccatcgactacgcctgcagcaagggggccgactgcgcctccaccaccaagggcgcgccgtgctacggcaacggcaacaaggtggccgtctgctcctacatctgcaacagctactaccagagccgcagcggcatgggcgccacctgcgacttcaacggcgtcgccaccctcaccggcaccgaccccagctccgggacctgcaagttcgcctccggccccaggtatatacccacctcgcatcgcatcgcatcgcatccatcctccgttgatgtgtactcctag

SEQ ID NO: 31858 - DNA, 234 bp, Zea mays
  Peptide Sequence Number=SeqID_73637
atggcgtcgaagcaggcggcggctggcgaagcccttgcggcccaaatcaacggcatgtcccgccctgagatgtacgacatgatgtccaagatgaagaccatgatcgaccacgaccaggagacggtgcgccgcatgctcgtcgacaacccggacgtcacccgtgcgctctttcgggctaaaattgaagcctgggcaccgctggtgggaggcgaggggcggcagcaccgcacctag

SEQ ID NO: 31859 - DNA, 255 bp, Zea mays
  Peptide Sequence Number=SeqID_73638
atggtcagggtgaggtgcaacctcgccttcgccaagaagcctgccggcgaggagacagccggcaagttcgagtaccaggctaaggttagccgcttgctggacttaattgtacacagtttgtacagccacaataaggtatttctctgtgaacttgtaaggggatgtgacccagctgtggtcgtccgcatccccaggtctaggtgcggtgctgccgcccctcgcctcccaccagcggtgcccaggcttcaattttag

SEQ ID NO: 31860 - DNA, 117 bp, Zea mays
  Peptide Sequence Number=SeqID_73639
atgtcccatggtacagtatacctgtggggatcagatggacagctcggctcaccgccgatgaccttcgtcgtgatccgtgccgaccggcgtcaagattcacgcccggtggatctttaa

SEQ ID NO: 31861 - DNA, 834 bp, Zea mays
  Peptide Sequence Number=SeqID_73640
atgcagaactgcaatggccaccacaaccacggcggtagcgtccctcactaccctgtcccccgccgtcggcaagcggtttgtcctctcgtccccgtgcctctcattctcctctcaccgcctgaccatcgccggcctccgccatcgataccacaccgccgcggcgtcgaggacagcgaggaggcgggcggcgtccacgtccctagtggtggggagctgaggacggtgacgctccccgacgcgatgctctcctacttcgacccggctgatggggagctgaggacggtgacggtggcggagctgactgcgggcaagaaggtcatcctgttcgcggtgcccggcgcattcacgcccacgtgctcgcagaagcacctgccggggttcatggagaaggcgggcgagctgaaggcgaagggcgtggacacagtggcgtgcgtgtcggtgaacgacgcgttcgtgatgaaggcgtggaaggagttgctggggctggccgacggcagcggcgtgctgctgctgtcggacggcaacctggagctgacgcgcgcgctgggtgtggagatggacctctccgacaagcccatcgggctcggcgtgcggtcaaggagatacgcgctgctggccgaggacggcgtcgtgaaggtgctcaacctcgaggaggacgacgccttcaccaccagcagcgccgaagagatgttgcggcttgcatgcagtgatgcagtggccgcggaacgcgcaataacatgcggcttttgcggcttgcatgcagtggcagtggcccaggtgggcgatgctaagcggcttgcatgcagtgacccaggtgcatgcgacgtgggatag

SEQ ID NO: 31862 - DNA, 414 bp, Zea mays
  Peptide Sequence Number=SeqID_73641
atggagaaggatcgccaagacgcgcagcagaaacgttgggcgttcgcgagggtcggggacccgcgccgcgaggtcaagatggcgcgggggagcgcaaagtctaccgcccccggctccagcaagcctccgtctggcgcgaagtctaccgcccccggctccagcaagccggtccctgatgtgcccacacaggagcgaaggcctccgtcgccaccgcatactgctgagacggaagtgggtggggtcaccgaggtctccatggatattttcgtggaggactatcttgtgagcggggtcgcgattttcgacgcccatacagcgtggggacctatcaggtcggaggctaggcaactggctgttgtcccggcgccggctgggtcggtggctgtggtgactggggcgaagggatcttcgtag

SEQ ID NO: 31863 - DNA, 201 bp, Zea mays
  Peptide Sequence Number=SeqID_73642
atggcggggatcgcggagcagatgggtaggagagcgttgatggcggtcgcgcaccctctccatgccctcaacacgcgcgccataaacgcgctgctcccccacgacgtcgacgtcgttggggatccgtgggcgggcgcggagggagctcgggatccgcgaggatggaaggtgcacgaggatggaagcacttgcctgcgatga

SEQ ID NO: 31864 - DNA, 936 bp, Zea mays
  Peptide Sequence Number=SeqID_73643
atggagataatctttggaagaagaccttcaaatagattatcttctaaaatctactcaaaggtcggggactacacccattggaagaggggcgacggggagccaccatccgagtcaaggctgatggtggaaagggccaccatccgagtcaaggttgcgccgtccgtggtgctcgccgcccgtggtgaagcagttgcgggtacgcggttcctgggcacctactggggcaccgtgagcacggccttctgcgccgagatcgtggagtccgccgacgcctacctcttggcgggccccatcttcaacgactacagctccgtgggctactctatcctgctcaggaaagacaaggcggtggtggtgcagccggaccgcgtcaccgtcggcaacggccccaccttcggctgcgccatgatgagggacttcctatcggtgctggccaagcgcgtgcgccccaacaccaccgcctacgacaactaccggaggatcttcgtccccggcgggcagccgcccgagtgcgaggccggcgagcccctccgcgtcaacgtcctcttcaagcacatccagaggatgctcagcggtggcagctccgtcatcgcggagacgggagactcgtggttcaactaccagaagctgcggctgcccgacggctgcgggtacgagttccagatgcagtacgggtccatgggctggtcagtgggcgcgctgctcggctacgcccagggcgcccccgacaagcgcgtcatcgcctgcatcggcgacggcagcttccaggtgacggcgcaggacgtgtcgacgatgctccggtgcgagcagaggagcatcatcttcctcatcaacaacggcggctacaccatcgaggtggagatccacgacgggccctacaacgtcatcaagaactgggactacacgggcctcgtcgacgccatccacaacggctag

SEQ ID NO: 31865 - DNA, 567 bp, Zea mays
  Peptide Sequence Number=SeqID_73644
atggccctgtgcgccgccgctgcctccacggccaccgcctccgcgtcggcccatctatcggcctccaccgctcgcccgcggggcccctcctcgacgtcgctgccgtcgtccttcgtcggcgcgttcccgtgcgcggtcgctgcgaggacgaggaggaggcgcgcggcggcggcggcggcccgcgccaccgtcacggtgcgcgcggaggccaggaagagcgtgctgatcgtgaacaccaacggcggcgggcacgccgtcatcgggttctacttcgccaaggagctgctcgccgccgggcacgccgtcaccgtgctcaccgtcggcgacgaggcctccgacaagatgaagaaacccccgttctcccgcttctcggagcggacgagcgccggcgggaggacggtgcggggcgacccggctgacgtcggcgcggccgtgggaggcgcgtcgttcgacgtcctccacgacaacaacgacaaggacctagcagcccacaagatcgttccttactcctcgcgccccctctgcattcgcttcgccatagcacgaaccaagctaattttatcctaa

SEQ ID NO: 31866 - DNA, 273 bp, Zea mays
  Peptide Sequence Number=SeqID_73645
atgacctccgtcgtgatccgtgccgaccggcgtcaagattcacgcccgggtagttacgcaaccagtgaagcaactcgtgcttcgaatcaccccctagagctcgcaaatttctcgtttcccccaaattggttttccgccgccgcgatgaacacctccccgtgggccagcccaactcagaccctcctcaagctctacgacccacctaatggagctaaaccaccctgggtcgccgtgaacgcccgtgttcttccccgatgcccgcggtcgccgtag

SEQ ID NO: 31867 - DNA, 852 bp, Zea mays
  Peptide Sequence Number=SeqID_73646
atggaattcaatggaactgacgagctcaggcaggaggacggtgtggggtggaggacggaaaaatcagcgcggccgtgggaggcgcgacgtttaataacgtcatcaaaacaacggcaaggacctcgacgccgtcagccggtggcggactgggccaagacggccggcgtggggcagttcctgttcatcagcagcgcgggcatctataagccgacggaggagccgccgcacgtggagggggacgccgtgaaggagagcgccggccacgtgggcgtggagaagtacatcgcggagcagttcggcagctgctgggcgtcgttccggccgcagtacatgatcggctccggcaacaacaaggactgcgaggagtggttcttcgacaggatcgtgcggaaccggccggtgccgatcccggggaacgggatgcagctgaccaacgtggcgcacgtccgggacctgtccagcatgctgtcgctggccgtggagaagcccggcgcggcggccggcagggtcttcaactgcgtgtcggaccgcgccgtgacgctggccggcatggccaagctgtgcgcggcggccgcgggcgccgacgccgtggatatcgtgctctacgaccccgccgccgtcggcgtcgacgccaagaaggccttcccgttccgcaacatgcatttctactcggagccccgggcggcgaaggaggcgctggggtggacgagcaccaccaacctgccggaggacctcaaggagaggtacgccgagtacgccgccagcggccgcggcgacaagcccatggccttcgacctcgacgacgtgatcctcgctgccgtcggcaaggcgccggcgagcgtcgccgtatag

SEQ ID NO: 31868 - DNA, 243 bp, Zea mays
  Peptide Sequence Number=SeqID_73647
atgtcgcagggcggcaaggacagtggcggccgccgtaggcatcggtaccgcatcgagaccagggcgctgtcctacgtgctcccgccgcgcgcgcgcatcccgttcccgtgggccgccgcccgggggaaggaggagaggctactgctgcgcggcgtcacctgcgaggcgccgccgggggagctggtggcgatcgtggggccgagcggggcgggcaagaccacgctactgtcgagttatttatga

SEQ ID NO: 31869 - DNA, 321 bp, Zea mays
  Peptide Sequence Number=SeqID_73648
atgggcagcccgttgaccagcacctcgccgggccgccacccgcgccggcttcggtgtcgtagacatggaggaggagagcggcgcggcggcggcggccgcagcggtggaggagatccggtggctgccggccccgtgggaaccgagcgctccgagagctgcgcctgcctgatggccgtgcagggcgcgagcacggccctggccgggggcaccgcggcactggtgaccatgccgctggacaccgtgaagacacgactgcaggtgatggaggccgacgcggcggcgcggcccacgctggccagcaccgtgcgcgggctgctctag

SEQ ID NO: 31870 - DNA, 380 bp, Zea mays
  Peptide Sequence Number=SeqID_73649
atgttccgccgcgtgtccgggcacgtgccgcaggacgacgcgttgctcccggggctcaccgtcgaggagtcgctcgtgtacagcgcgcgcctgcggcttcgctccggcgggacgtcgtccggcgccgaggaccgggcgcgggagctcatggcggagctcgggctgggccacgtcgcggcgtccagggtcgccgacgtgtccggcggcgagcggaggcgggtctccatcggggtcgagcttgtgcacgacccggccgtgctgctgctggacgagcccacgtcgggcctcgactccgggtccgcgctccacattgtcaagatgctcagggacatggccgccgcgcacgccaagaccgtcgtgctcaccatcccccagccggg

SEQ ID NO: 31871 - DNA, 614 bp, Zea mays
  Peptide Sequence Number=SeqID_73650
gaggaagcaccctggagcgggagatctcccgcggcgcctaccgcgtgtcctcctacgtcgcctccaacgccggcgtcttcctgccattcctcctcgccgcggcggtgctctacgcggcgcccgtgtactggctcgtgggcctggcgcgcgagcccgccgccttcgcctacttcgtgctcgtcgtgtggctcgtcatgctcaccgccaactccttcgtcgcctgcctcggtgcgctggtaccgaactacatcgtggggaactccgtcgtcgcgggcctcatcggctgctttttcctcttctccggctacttcgtggccggcaagaacatcccgcgttactgggtgttcatgcactacgccagcctgttcaagtacccgttcgaggcactggtggtgaacgaatacggcggtgcgcgtggcgccagggagtgcctcgcctcggccggcggcgccgggggcctctgcgtgctcgatggcgcggggctgctgcggcagcaggggatgcgagagggcatgcggtggagcaacctgggcgtcatgctcggcttcgtggtcgggtatagggtgctctgcttcgtcttcctctccttcaggtgccaccgcacgtggaggtga

SEQ ID NO: 31872 - DNA, 252 bp, Zea mays
  Peptide Sequence Number=SeqID_73651
atggcgggtgccggtgcgatgggcttcccacgggagctgatggttcagcgtatacagagcttagtggaggaggggttctgggacgcgctccgccgccacaagctcgacgtcctcggcaccgacgactcccccatcccaatcaccggtccgctcgcccacaaccccctctcctcgctgtttgttggtagaattcgcgatttatggcagggaatgaaagctgatcccatacatttccgcgccccgcttacgtaa

SEQ ID NO: 31873 - DNA, 567 bp, Zea mays
  Peptide Sequence Number=SeqID_73652
atgggggacgaagaagatgatcctgactggctccgcgcgtttcaggcaccaactgtggcacctgtgatgctttcttctggttcagatacctcccctgaagctagtcctacaagaaccagtacatctagaaaacaaaacaagggagagaagcacgctagtccagatcatgcacgtgatagagatggtgcttcacaaaataaaaacaaaatctcagcagctactagaagaaaaaaccttgtcagtaaaaaagaggggtcaactatggatgaaaaacaagctaatactcctagacgcttggtatggattttgagtgttgttttagattccctgtctccgattcatgatatcttggtaactaggctgactccaaagaaggatatggtaacactttcatctggttctgatgcttcaccgggaaacagcctttcgagggcccatgaagataaccatgaagagggctcacttagcactgccaagagaaagaatgctcaacaaactaagactaaaaaaacaaaggatgctggaacaaaaactggtgcagaccaagcagggagtaaggcactttaa

SEQ ID NO: 31874 - DNA, 536 bp, Zea mays
  Peptide Sequence Number=SeqID_73653
gagaggatcttttggtgattgctgctgatcaaccatttcgcttcccttccacatttacatttgtggtcagagcattctcagttctagatggtattaggaaaggccttgatcctaggtttcatattacagagattgctaagcccttgcacatcttcacatatccaattgtttcaacaattggatatgtgcggtgcagggacaacgagctatgcagcgccgccggcgccaaggtggtggtgacggaccaagcgcggatgtcgaaccgcacagccctggtgctgagcgccgcggcgtacgcggccatagccagcgccggcaaggccgcgcgcctcagggaccggcgcgttgtcgacgtcgagtacaagagggtaccctacgagtacgcgaaggaccgcaacctgtcgatacgcgtggaggagaagatccggccgccaagcaacctgtccatcaggatcctgtaccagggcggccagaccgacatcgtcgccgtcgacgtcgccaccggcgcccgtaagggcgccgcctgttctagttag

SEQ ID NO: 31875 - DNA, 234 bp, Zea mays
  Peptide Sequence Number=SeqID_73654
atggcgctggtttgggacgaggcagaggtgggggatgaagtagggctggcggctgtggtgggtgcggcagatggaaaagcagcagtggatgcagcggatgaactggaagagttggatcgacgtgaccgtgataccaggttgtcaagggccttagtgtctagagtaggaggccctcggctacgcagcgcccagtacaaggctttaatagcctgccgcatgcaacaaacctcctaa

SEQ ID NO: 31876 - DNA, 144 bp, Zea mays
  Peptide Sequence Number=SeqID_73655
atgaggtggagcctagcatgtctggcccaaagagaaccacccgggaaaacagtgctaccacaagggtttaatgggacgcccttggccgattatttaggaaagctagtggaagactacccttacccgaaagggcaagggcagtag

SEQ ID NO: 31877 - DNA, 471 bp, Zea mays
  Peptide Sequence Number=SeqID_73656
atgcctgcccctgccgcgagcccctgctccccggccgtgccctggtggctgcgccctcgccgcgcgccccggtggctgtgcccggccccgcgccctggtcgcccgccctcggccgcgcccctgcccgcacccgtgcccggccccacgccctggtcgcccgccctcggtcgcgcccctgcccgcacccgtgccccggcgactcgcgtcccgcgcgcctgcatggaagctccgcctcgcccgaccccagagctcggactcaacctcgactccggacgatggactccgcctcgcccgaccccagggctcggactcaacctcgactccggacgacggactccacctcgcccgaccccagggctcagactcaacctcgactccggaaggcggtctccgcctcgacccggactcagcctcgacctcggaggagcctccgcctcgcccgaccccaggctcggaccaaccacgtcatag

SEQ ID NO: 31878 - DNA, 708 bp, Zea mays
  Peptide Sequence Number=SeqID_73657
atggcgacccggacaggaggcaacaagcttacagacatcaagcacaagtctatccgagcaaaagccctcactcgattggatgggacaaccctaattgatgctcgttcacggtcacggaggcgcaaggacctcagtgagcgcgttctggacacgtcgcgctatgatcgtgatacagccattccgacgacatcgtggaccaacggggaaaagcggcaccggcggtcagattaccagccgaagaggtaccagccaatcctggccatccgatcagcccaggacgggggcatcttcttcatccgcccggacgcaaacaccaagcacgaacggggcgcatgcccgggacggcggcgcccacaccggaaaaaggcgaacgcgacatgtaaatattcccccgccaaatccgacgtgtgctacactaatttggagaggaaggcgaacccagtagagggatccttaccgaaaggaggagatgaagagagggtccaccatggtgaatggtggcccatggccggatttgacgacagcgaggaaccaccgaccccacggcggcggtcttctcttgccgaggacacgcgcatgcgcgacggcatcccgcgacgcgccagggacacccgccgggcctgcgaagtcggccccaagctcccaacggttgatgggatacgcggcacaggacacggcatacgcgaagtagaaattgcgttctgttga

SEQ ID NO: 31879 - DNA, 132 bp, Zea mays
  Peptide Sequence Number=SeqID_73658
atggcggtcatgagtggctacacaggcgtctctcttgtcttcgctcgattccgccgtggcttccgtgtcggtagatcggttgcgtgggatggccgtggtgggataactgtggcatatgatcccaaatcttga

SEQ ID NO: 31880 - DNA, 549 bp, Zea mays
  Peptide Sequence Number=SeqID_73659
atgaacgtatctagagattcgtcacaaatgggattgcgatcaagtaattatttctattgcaaagacaggttacatattttcatgatggacagtggtgagagctgtccctacttcaggttacatattttcatgattccacttatatatgcctatagaagggcagactggtacaatggtgaaaaaggtgtcgggtccaatggcaaacctcttcactataagggaacaccattccatcgtattatccctggcttcatgattcagggcggtgacatagttagaggcgacgacaaagggagtgagtctatatatggaggcatcttcccagatgagaatttcactgtaaaacatacacatccagttttacataactactatcaagacaagctggtgagttgtgttgtacaccacgtctcaccaatgattgacttggaagctgcagctcctgaaatgggtgatccaaggaatggataccgtgtacgccatagaagggggcgctgggacttacaatggcaagccaaggaagaaggcggtgatcaccgacgctggtga

SEQ ID NO: 31881 - DNA, 471 bp, Zea mays
  Peptide Sequence Number=SeqID_73660
atggctcaccggagttactccggcccgcccgaggcattctcatcgccgttgtccccactctgcccggggattcatggccccttccctgccattgagttcgctgtggcgccctcttcctctctgcccaactccggtgaccccggaacccgcctagcacatgcctgcctcaactctggcgacctcaccgtcgcaagagagtggagtcctgtcgagcggccgcccaagaactttaacgtctccaagctcatgcgcaacatggaggagtatgcccgcacggaagacgatgagctccgcgaggcccagccaccagttgccagttggggcgcggaaatcgtccgcagaacaccatcaacacaccgaagcatttggcgaaatctggcatgggaatggatcagtggcgtcctcctttcaataccttacctcccatccagcccgaaagggatacacagagcacatgcgaaatttctttaa

SEQ ID NO: 31882 - DNA, 604 bp, Zea mays
  Peptide Sequence Number=SeqID_73661
agattcgtcggaccgtggaagcaattcggcccagctccacgttgcgcgtgcgctcagccctgggctgaccaacatgccccactcgccagactcaatatcacagcagcgtgggtcaggcccgtctgctagtactaacgccgcgcgcgcagtctctgaaggcgggctccactggacagattctttccccttccttcgtcaacgtccgacgcggaaatccggatcacaacgagctgcgcggaatccgcgggaagctagccatgaaccccacgatcgactcagccataagacctacgttcctcgacttctttgccctttcgccctcggttgtgattgcttaggtagccacgggattgccagggcggggaatttggagccgtcgccatcgaccgtcgtggggagctctgatttcggccggggttgcactggcgtcgccgcattggactgcagggcatgtgcgcactgcatctccgaggctcggacacctggcgtgcgcccaattatcgcgccggtgagttttgccgcggctctgctccgttcgtgttcggcgcctcagctcgtcaccataggtaagccccccaaaccgttgcttacgtttgcgcaatag

SEQ ID NO: 31883 - DNA, 480 bp, Zea mays
  Peptide Sequence Number=SeqID_73662
atgagctcacgggcaggcgaggtcactgaaatgacagaagaggaatttgagaatatgcgcaaaggggtggtgagaggcacggctgcacagagagatagggagacagagagggaaaagcagaggggggaggagctcaccgagagggaaaggagccgagcacagtcactggaggtcgccggagcacggtggtcgccggtgagggagagggaagatcgccaggagggagttgagccagagagcagagagggaagtgggcctctggctcaggtgccaaaggttcacaataagccaataaaaagagaagaaaagggttcaaacaaaagagcaaaagacaacccggaaggcaccctggtctggcgcaccggactgtccggtgtgccaccggacagtgtccggtgcaccagggcactcgaagccaaactcgctaccttcgggaatttccaagggcactccgctataattcgccggactgtccggtga

SEQ ID NO: 31884 - DNA, 858 bp, Zea mays
  Peptide Sequence Number=SeqID_73663
atgagcgacgtgtccgtccgcttcgtggccctggccctggccgccatctcgctcgccgccgccgccgccgccgcgcacgactacggcgatgcgctgcgcaagagcctgctctacttcgaggcgcagcggtcggggcggctgccgtacaaccagcgggtgcggtggcggggccactcggggctgacggacgggctggagcaaggggtggacctggtgggcgggtactacgacgccggagaccacgtgaagttcggcctgcccatggcgttcacggtgacgctgctgtcctggggcgtcctggagtacggcggcggcgtggccggcgcgggggagctggcgcacgcgctgcaggccatcaagtggggcacccgactacttcgtgaaggcgcacacggcgcccgccgagctcggcccgaggacatgaccacgtcgcgccgcgcgtacaaggtggacgcggagcacccgggctccgaggtcgccgccgagaccgccgccgccatggccgccgcgtccgccgtgttccgccgcgccggggacgcgcactacgcgcacctgctgctccaccacgcgcagcagctgttcgaattcgccgacacccaccgcggccgctacgacgaaagcgtcgacgtggtcaagagctactacccgtcctccagcggctaccaggacgagctgctgtgggcggcgctctggctgcaccgggccaccggccgccgcgactacctccgctacgccctcgacaacgccgaggcgttcggcggcaccggctgggccgtctccgagttcagctgggacatcaagtacgccggcctccaggtcctcgcatcccagcgttatcctttttatggtgtgatctga

SEQ ID NO: 31885 - DNA, 1032 bp, Zea mays
  Peptide Sequence Number=SeqID_73664
ctgctgatttcgctgtgtttgcagaagaaggtgaaggccaaggaggagcggctgcggctgagcgcggaggaggtggcggtggtggagcagctgcggtccaacgcggagtactacgtgtgctcgtgcatgaaccggaaccccggcggcgcgaagcacaacgccggacgcaccccggcggggctgctcttcatccggccatggaacaacctgcagtacgtctccggcgccgccttcctcctcaccgtctactcggacgtcctcgcctcgctgggccagcccctacgctgcggctccggcgacgacggtggcgaacccgccgccggcgacgcgggcgacgtgctggctttcgccaagtcccaggccgactacatcctgggcacgaacccgatgcgcaccagctacctggtcggatacggcgcggcgtacccgcggcgggtgcaccaccgcgcggcgtcgagcgcgtcgtaccggcacgaccgggacttcatcggctgcctgcaggggttcgactcgtggtacagcgcgcggcatgagaacccgcacgacctcttcggcgccgtcgtcggcgggcccaacggcgaggacgtcttcaacgaccaccgcgggcctggaggggcagtcgccacgcccggcgccggcgccggcggaggatctttgataggagaggtcgttttccttgaaagagatggggtggagccgtggagggctcgagagtcgaggctctgtgtgtggaagcccgcgtcgggacaaccgttgcgctctacaggacaggagttcgacggaatgccgcaccaccgccgtcgccgctttccctggccttgggctgcggcgctgcctgagctgctcgacgacggagtcgggctagttgcgcaaccggcaccgccgcaccggaggcaatgcgcgtcgacgttcgccagcttgacgccgcgagcgatcgaggggcgacttcctcggccgcgctatgaccttgaccacgcgtgccgggggccgcggggccagtgccttgcgtggcggctcactcgtgggctgtag

SEQ ID NO: 31886 - DNA, 2748 bp, Zea mays
  Peptide Sequence Number=SeqID_73665
atgaagctgagtgctgctgttctcttcttctccatcttgttgcagtactgcaccagcagcggccagccagatagccgaggtttcataagcatcgactgcggcatcccggagaactccacgtaccaggacctcacctccaccatactctacgtctccgaccgcggcttcgtcacctccggcgagaaccgcaacatctccgccggctacatcagcccgtccctcgcgcagcgctactacaccgtccgcgccttcgcgtccggcgttcggaactgctacaccctcccctccctggtcgccgggaacaagtacctcgtccgcgccgccttctactacgcggactacgacggcctgagcacgccgcccgtcttcgacctgtacctgggcgcgagcctctggcacgaggtcaggttcagggacgcggccgcgatcaactggatggacgtcgtggccgtggctcccaccgacttcctgcaggtctgcctggtgaacaagggcaccggcaccccgttcatctccggcctggacctcaggccgctgcggagcactctttacccggaggcgaacgctagccagtcccttgtcatggtcaacgccaaccggtgcaacgtgggacccacggacaagtctgtggttcgcccaaccaaagcacatttctctggcccaacaagcaggtacccgctggacccccacgaccggatctggctggcgtacggcgccgtcccggcctggaccgaggcgtccgccacgtccgtcgtccggaactacctcgccgacccctacgacgcgccgtccgccgtcatgcagagcgccgcgacgccatccgacggctcggtgctcagtttctcgtgggacacgtccgacgaccgctccgtggacgccagcagcgccacgtacctcctcgtcctctacttcgccgagctgcagcgcgtgtcggcgagcggcgagctgcggcggcagttcgacatcgccgtcgacggcaccgcgtggaacagggaaccttactctccgccgtacctcttcgccgactccttctccggcacggtgcaggggcaggcgaggcatagcgtctcgcttactgcgacgaggaacgcgacgctcccgcctcttctcaacgccatggaggtgtacttggtgaggccggtggatgaagctgcaaccgaccctggagatgctaaagccatgatcgcaatccaagaagcttatgttgtgagcaaaaactggatgggtgatccatgtgctccaaaggcttttgcatgggaaggactggactgtactactgatcctccaactggtactccaagaataacagcattccttttatttcctgaactcggacatgaaattaagctgacaaatagtaccactgaaacattcgagctatttcttacaagaactgttacatataccagggacttgtcacacaataacttgtctggctccattccagattgtcttggacagcttccattcctagtgttcctggatctctccagcaatgacctccgtggaccagttccttacactcttcttcaaaaatcccacaatgggactctatcgctaaggcttagtaacaacccaaatttgtctgggaacggatcgggtccaaagaagttgaatggggccgcacttctctccgcgataatcatcccaacagttgccgccactgccttgtctgttaccttcattgctctgctgctccgagcactcaaggaacaagctagaagacgggctgttgatccaactccgagagatgagacggcgttgcttgagaaccgagaattctcttacagagaactgaagcacatcacgaagaactttagcctggagattggcagaggtgggtttggagctgtcttccttgggtacctggggaacggaaacccggtagctgtgaaaatccggtcggagtcgtcttcgcaagggggtaaagagtttctggctgaggctcaacatctgacgagggtacaccacaagaacctggtatccttgattggctactgtaaggacaaagaccatttcgcccttgtctacgagtacatgcctgaagggaacctgcaggatcatctgagactgagaggtctggagtacctgcatgtggcatgcaaaccagcgctgatccacagagacgtgaagagcaggaacatcctcctgaccacgggccttggggctaagatcgccgactttggtctgaccaaggctttcagcgactcggagacacacatcaccactgaaccagctggaacaatgggctacttggatccagagtattaccgcagctaccgggccagcgagaagagcgacgtgtacagcttcggcgtcgtgctcctggagctggtgacaggccagtccccggtcgtcccggtggacgacagcgtgagcgtccacgtcggcgagtgggtgcagcagagcctcgaccggggcggcggcgtcgagagcgtcgtggatccgagcatgggacggtgcgagcgcggcgactacgacgtcaactccgtctggaaagtcgccgacctcgcgctgcgctgccggcgggaggcctccagggagcggcctacgatgacggacgtggtcgcgcagatcagggagagcgtggagctcgaggcggcccgccggagctcggcgtcgggtgctgctgctgctggtggtggtgggggtctgaggagttgtgccggcgagagggacgcgtttgaggtggtggaaggaagcgttggggagacggcgggggccgcgcctggtccggcgatgatctga

SEQ ID NO: 31887 - DNA, 246 bp, Zea mays
  Peptide Sequence Number=SeqID_73666
atgccgtcctcttcctcttctgctgccgatacaccgccgaccgacggatcatctgaggagatgctgagcaatgtggcggcggaggagttgcgtcccggcgacaaagtggaattcggcgcgtcgcagatgtcctcggtccgcgtgcaagacatgcaacagcttgggtattttggcggcggagtgggacggtgggcgccaaatgttggaacttgctctcctgggcaagttgatccaacggggaagtga

SEQ ID NO: 31888 - DNA, 339 bp, Zea mays
  Peptide Sequence Number=SeqID_73667
atggcatcgttgtcccgcaccgctgctgccgctgtcgtggccctgaggtcggcggtccgctccgcgccccttaccggccgcgtcctcggagcgccactaccttcctttgcctcgccttccgctacccgctccgcccggatcctccgcaggtcggcggccgcggcgtcggcggggctggaaacgctaatgccgctgcacagcgcggtggctgccgcgcggcttaggtcctgcatcgccgtcgactcctcctgctggtgctcgctctcacaagtgatgaataatgaatgcattcaacgtgcctttcagagttacactagtgtgaaggacttaaaatgctag

SEQ ID NO: 31889 - DNA, 189 bp, Zea mays
  Peptide Sequence Number=SeqID_73668
atggtggatcactctcgcaagcaaggcacacaattgatgccattttcaaatgatgctataatggaattgcaagtagttcaaacgaggagcggcaggtgcagctcgcctcgctgtcataaaggcaaagcatatcctatatcaccaaatataagagcaagtcaggccatggagacaaggcatgccatatga

SEQ ID NO: 31890 - DNA, 2142 bp, Zea mays
  Peptide Sequence Number=SeqID_73669
atggaggtggcggcggctgccgcagggaagccgctgacgccggaggaggaggcactccggcgcagcaccgactgcgtctacttcctcgcctcgccgctcacctgcaagaaggttctttgcatagagttcttctccaacttctctgggcgctataatcagccaacatttattcgggtgcgagacccaaactggctcatatggacgaaccagatgggtaatgaatgcgattttcgtcacagtgagggtgctaggatgaaccctagggactgttggtactggttgaatggcagttgtttgaatcccaagtgtgcatttcgccatccgccaattgatggtctctttggtgccccaacttctggactacctccagtttctgcgcactacggtgcctataacttgggcaagcagatggtcccatgctattacttccagaaagggaactgcttgaagggtgatagatgccctttctatcatggaccacaaacagctagtaatgatcttgcagagcaagcggcgaaggtttcttcctttcctttggaaccgtcccaggctcaaaataacgaagaggctgtagctccaaataattcaacgcagcaagaggcccgaatgactgaaaacaggacttcgattcatgtttccaagagtggtgtgggtgcaactcccgctgatgtagcttccaatgcattgaagcctgggaccaacttcgagcaggcacccagtaatacgcttgcagcaaagaaaagttccacaactgaggatcatcctatgcactatcagaaccaggttcctgtggagatcgatcctgtcaaagactggaaccaaaattttgaagtgtctcctactgattacctgccacaggatagtagggaggctgatgatattttgggggagtcctctcctggttttgatgttcttgtagacaatgatgtagatgttgctgaagattttgcaagggatatgtacccggtagaagattacgagtatgttacatctgattttgatgctcgggcccatcatgaaagtgagcagttcaacgatggaatgggtgtgaatggacggattggacagtatgatggctatgagaggaaacgccgtagatcttcatctgagaggaacctagacagacattaccatccagatggaaggtttcttcacagagagcttgatcgtggcgagatagatggatcagatctacgccatcagctccgcaggagaagaataaatgggccctcaacaaccattagcccagaacgggctaatggggaccgacatgggagggatgaaccctacagagaaagggcacatggtggtcaccacacgtacagagatcgctatcagggcccacgaggaagcaatctaagttcccgtctgcaggccagaataaagcttcctcgaagatcacctgatagagttgatactcgcttcgaggatgagcgagacaggagaagattcagggatatgttttctccaatgaggcgtatggatttccatggtggtaggcatcaagaggctggacataatcaagaaaggggccacaggaagttaagcgagcttgtctctactgtcaggcatgcagatggcctctctgctagaagagatgcagtgggttcaactcattttgctgctcgcagaaacttgggagagccaaggaaggcaaatggtcttgtggaatccgaagcatctcttgattttgagggcccaaaaccccttagtgtcatcttacagagaaaaagggaggcagcacagggcaataactatgagaaatttgctgaggttgcagtcacgcagacaggttctctggatgaaactgagaagaaaagctgtgacaacgttaccaggtttgcagattgcaagagtggttcaggtgacgaagagtataaagagcaagatcatatccttgtggatgcacacaggcagtcttcggatcatggtgataagtttgaggctgggtatgctgctgaagtggatgcagaaggaaaacaagaggcagatgactatgaccagagagagggcgagtccgacgactacgagacatttgaaggccatgactacaaatctgaagatgaaaatgtgtaccaagacgacgaggatttcgatgataatgatgactttgctcggaaagtaggggttttattgccttag

SEQ ID NO: 31891 - DNA, 480 bp, Zea mays
  Peptide Sequence Number=SeqID_73670
atggcggggatgtctcgcgcgatccgcaacttcgccgccgcgtcccggcgaaccctgaccgctgcttcggggccggcgctgccgaaggaggcggcggcggcgggggcgcgggtgagggcggcggcgcccgggcgcatggggcgggatcaggaggacgggaggcgcgtgcagtgggtgttcctcgggtgccccggggtggggaagggcacctacgccagccgcctctcgcagctgctcggcgtcccgcacatcgccaccggcgacctcgtccgcgacgccctggccacccctggccccttctccaacaagcatgttaacgaactcgtcacaactgcaactacaatctctacggattgcacttgcatgcattctgctatcatggcatacgccagccgcctctccctctacataggtaggaagcactatagttcacgaaggtgctgcctgtggctgctttgcacgacccattgctttcggtag

SEQ ID NO: 31892 - DNA, 990 bp, Zea mays
  Peptide Sequence Number=SeqID_73671
atggggtccggcaagaggggcaaggtcactttcctcttctcgctgaagcaggcgaggacagaagctgtgacgtggctggcggacgcctcgcttccgcgaagcttcgcaggtcgatcggtcagggccgaccacgcccccgcgctgcctgtcgccaaccgcccggtgaacgtatcacggccgttcgcctgtcctcacacggcgtacgggcgcgctcgaccatcagacatgggcgtcagcgacggcgacggcaacggcaacggccccaaggcgagcgaggaggcggtctcgtgcgaagggagtcccgagtataggttgccgttctccaagccgcacgtccccagcccaccgcaggtgaccgacccgacgaactacgccatgactggcaagatcctgctcgccgcggcgggggcgttcgcgggcgtgctcctggcgctcgtcgcgctgcacctctacaacagcacacggcggcggcgcctcggcggcaaccagcggcggctgttccggagcctggccatcgccggtggcgacgaggaccgccgcgacggtgacggagagggagcgcctcccccccatcgcggcctcgattccgctgtgctcgccgcgataccggtcgtgctgatcgaagcgggcgcggatgcggggggcggggactgcgcggtctgcctcgcggagctcgagcccggggagaaggcccgcgcgctgccgcggtgcggccaccgcttccacatcgagtgcattggcgcctggttccgggggaacgccacgtgcccgctctgccgcgccgacgtcgtcgtcgtggcgccgggcgctatcgtgccagccgagggcggggcgctgtcggaggaggtgcggatagacgtggccggggacgccgtcgccgcgacgcccaatggatccacggtagtgccggtgatggggaggttgcatagcggccgggatcttgagaaagccaggcgggtctttgcttccacccgattctcttccttctga

SEQ ID NO: 31893 - DNA, 408 bp, Zea mays
  Peptide Sequence Number=SeqID_73672
atggtggccctccatgccgggagccggagagcgtcgtcggacgggtcccatgcggggacaactggatccatggcaggggaccatagatccaaagacgagctccccggatctggccgaagacgcgccggagccccacccaacgtcgacgaaggggagggagagaggagagcagggtggggaggggacggagagagaagaggaggcacgagtgggaggtcgcggagaagccgacttgggtcgacagccaccgctagccgccactgccgccggctgcgacggcaccggccggcaagggcaagtgtggagtggaccggtggtggcgcggcctggttgcctgcccccgagacgccccaagcggagcgacgcgagggcgtcctttactgcgagcactttgtttacatattgtaa

SEQ ID NO: 31894 - DNA, 778 bp, Zea mays
  Peptide Sequence Number=SeqID_73673
atggatgagcacgacgtcaagagccaaggcgcagggcaaggatggtcagagaagcccgaaaccaactctaatcgtcagagcttcgataatgactgcaaaatcggaggaatgcctggtgcatctcagacaccacgaataacggagctgcatgtaagggtggactgcaacggctgcgagaacaagatcaggaaggccctgcgtgccatcgatggtgttagcgaagtgtatatagatcaagcaagccacaagatcactgtggtcgggatggccgacccatggaggatggtcaaggccatcaggaaggccaagagggtccccaccatcttctcccacaccgacccggccgccgcagccgaggctgatcagccgccgcctcccgctgccgaagccgaagaagccgaagccaaaggggaggcccaggcgccagcgccagcgccaccacctcccgccgacccgccagcagccggcgacagagcagaggagaccgcgccagctgatacgtccgcgccggaggagcacaaggaggccaaaccggcagaaaccccggcggctgtggacgccaccgtggtggtgcgcacagtacgtgaccacccgtacgggtacggcgctggcggccatggccaccgcatgtgcagtgaggcgaaccaccccgtagacagcttttacagccaccatcgcccgacgagcccttacgtggccgagtacggcgccggcggcggctatgctggctttccggtgcaagaaggcaggggcaaagaggatgccatcaatatcactt

SEQ ID NO: 31895 - DNA, 399 bp, Zea mays
  Peptide Sequence Number=SeqID_73674
atggacggctcgttaaagcctttgggcgatgaagcttccccggtttttggtttgctttccttccgttgctacctcaggcgaaggtattttttaccttttcaaaaaaaggtccccaccagtttgctagggttccttagccacagcattctcagcgcgacagccagtgaggcatcaagccaccacatcctcgtgacagctggtgagagcggccgcggcggaaggttcaataaggcggaggtggagtggtgggtgctggcgtcggaacgagctgcgactgggtgtcagcggcgggctctctccgtcgccgccttcggcagcacaaagtcccggatctacggtggggccctcatcatagaactaccatctggggttgattgtattctgtcaggacatctttag

SEQ ID NO: 31896 - DNA, 715 bp, Zea mays
  Peptide Sequence Number=SeqID_73675
ccaaatgatgcagtactcgtgcaagcgctacttcgtgctcgaggacaccacgctccgctggttcaagtttgcgccatcctccaagcgtgaggcgtccacactttcctcggcgcacggttctgcctctgcagccgcgacacccgcgcgtgccctcacctccgccgccgcgatgccctccgccctcgcgacgctgcggcctcccccgcgatgcccgcgcctccgtccccgcgatgctcgcgcctacccctgcgacaccgcgcgcgcacgcctcctccccgcgatgccggcccccgtctcctccaccgcgtacaaccggctccgcaatcctcggccccgcgctcccagagtgggcgcaggtgacaccatggctgtgcccgcgactcccctccgcaatcctcggcctcgcgcttgctctctcgagctcagatgggctcccgccctagcccctgacaccatgctgtgcccaaccctaaacctagccaccacgccgtcaacaacgccaccttccttccttgccaccacaccttctttagatggaaggcgcgactgggatgtcgctctgcggtcctcacctcctcgtcgttggcggtcgcgcgacctcctgaccatcgtctctgcccgcgagatcccccccgactcgcccacctctccgtccacagccgcctccatcacgcacctcctccacgccgatgaaaaaggggcgcccacctcctag

SEQ ID NO: 31897 - DNA, 1223 bp, Zea mays
  Peptide Sequence Number=SeqID_73676
atgacgatgggagagcagagcggggcggcgtgctcgctccgcctcctcgacgccgcctacgacgccggcgtcaacttcttcgactccgcagagatgtacccagtcccacagcgcagtgagacgcgcgggcgtagcgaggagctcctcggccgctggttgcgggcccgccgggccccacgggacagcgtcgtcgtcgcaaccaaagtgagcaagagccctcagatcctgcccctacttcggttgcttgtcgcggggccttcagggcagatgacgtggattcgcggcgggccgacatctctcgattcacagaacatcgcagaggcaatcgatggctggtatgttccaatgtttggggagacagagtatgatccgaactgccagtacacgtctgttccaatggaagagcaactggaggctctcggaagagcaatagatgctggcaagttgagtaaggattctcagttgcttccaaagctactgacactgcagaactcgtataatttgttgtgccgaaattttgattctggattggcagaatgctgccatcatgagagaattagcttgctggcttatagcccaatggcaatgggtatactttcaggaaagtatcacttatctgataattgtggtccgccagacgcaagaatgaatcttttcaaagggagatactctgaaggtgaatcccggtacaaactgcagagccccaaagtgaaagcagctgtgaaggaatacacacagatttctgcaaagtatggcatttctccagtgaccttagcgattgcatttgtcttgagacatccacttgtggcatcggctgttttcggtgcgactaaattgtggcagcttgatgaagttcttcaggcaactacagtccatctttgtgaggaaattgttgctgagatcaatgatgatcacgccgcctgccactccgacgcgtcccgcgcgccgtgccgcagaagcctccgcgccgtgtcgtcccgcacgcagcaaattcccgcccggcacacgatcctgccgccagaagcctccgcgcggtcgacggggacgcgtcccgcgcccggcacaggatcccgccgcgtcgtcgtcgcccggcacaggatcccgccgccagaagcctccgcgcagtcgacgaacacgcgtcccgcgcccggcacaggatcccgccgcgccgtcgtcgcacggcacaggattccgccgccagaagcctccgtgccgtcgtcgtg

SEQ ID NO: 31898 - DNA, 174 bp, Zea mays
  Peptide Sequence Number=SeqID_73677
atgcttgctcccctggctagaggaggggcacccagacctctgccaccactcagacctctctcccgtagatttgatccccaggctacccctcttcggtcaccatatgtggtcaacgctggacctgcttgcaacctctccaacctcagagcacgtgggctccgaggcagaggatga

SEQ ID NO: 31899 - DNA, 927 bp, Zea mays
  Peptide Sequence Number=SeqID_73678
atggccgacaccgcgctcccgccctcccacaagctcctccctacggtttccctgccgctcctcccctcgtccacccgcgccgcgccgctcctcctctgcgccagccgccgcctgccgcccgcgcccctcgttgcctcatccgacgccgtcgagacgaacattgaatgggtcgacgacgacgaggaggaggctggagaagccttcgacgaggagggtggggatgttgaggaggaggtgctggcctcaggcgacgagggtgagggggagtacgccgcggtggagccgcccgaggaggcaaaggtctacgttgggaacctcccctacgacatcgaaagcgagggactcgcgcagctcttcgaccaggccggcgtcgtcgaggtcgccgaggttactgttgctgttaagaaatattcctttagtgacatttgttctattgaggtcgttatttacaacaaagagactggccagagccgtgggtttggctttgttaccatgagcactattgaggaagctgataaagccattgagatgttcaaccgctatgacattagtgggaggcttctgaatgtaaacagggcatctcctaggggcactcgcatggaaaggcctccgagacaatttgcgcctgctttcagagcttatgttggcaacttgccatggcaagctgatgactctaggctggtgcaattgttcagcgagtacggagaagtcgttaatgctgcggttgtctatgatagagaaaccgggcgctcacgaggattcggttttgtaacgatggtgtcgaaggaggaactcgacgacgctatctctgccctggatggacaggaattggacggccgccctcttcgggtgaacgttgcagcagagcgaccacaaggggcttttgatgcgggcggcggtacgagagagatggctgcttgtttgtga

SEQ ID NO: 31900 - DNA, 198 bp, Zea mays
  Peptide Sequence Number=SeqID_73679
atgtgcatccagaaggaaagtgctctagctgaggccgcagcggcagccgaggcgtcccggatcgaggcttcgcagtggaaggctcaggcggaagaatttgagcggggttttcatgtgtctatcgagacgtccaagacgctcactcgagccgtcgacgagaagagtgctgagtacgacgccctgtccgacgtaggttga

SEQ ID NO: 31901 - DNA, 996 bp, Zea mays
  Peptide Sequence Number=SeqID_73680
atgacgacataccacctagatgtagagtccgggggaagcacgcatgcatctctagtggaggtggcgaaatcggcagcaagcgaggtatcagagtcaattgtgggaggggcagtgggggagcagagcaggaaggtatttgtgcaaatggaagttaatgggttttacatgaccttgttgaatgatggtgattatcctgttgctttagaaaacttgggcgctataccagatatatctcaacaatcacccataatggataatgcaccctcatcaaagccaaagcataagcatacagggaaaaactttaatgaagacgaagacagacttctagctacagcttggttgaatattgagaccagaaatgagagcggggcaactatttatgacagggtggagcaacatgagaagttgtttaagagtcaagatgccaataagaagtcgttccaatttaggcacaactggttgcaattgaggaatcaacctaagtggcatgagaggttgaaccaattagcatctctgaaaacaaaagttgatggtagccctcaagatttaaatgttggtggtagccctcaggatgtaaatgttggcggtagccctagagataacattcctacaaatctagatgcaccaaagagaccaatgggtaagaagaagacaaaagaagttatacggcgaggcgggagtgatgcatgcatacaagctttagacattttgtgggcaaagaagagtgaggctgatgcggagaagcaacaaaagaaagaggagtggtatgccaagacatttgctctagatcaagagaggcttcagttggaacaaaagaggcttgcaattgaagaaacaaaggaaattaatgaacaagagaggcttcacagacaaagaattgctgaagaagagagaattatgaacatagatatgagttgcatggctgagatgcaaaagaaatactacatgagcctacaagttgaagtcatggctcgtcgcattagcaactctggttga

SEQ ID NO: 31902 - DNA, 192 bp, Zea mays
  Peptide Sequence Number=SeqID_73681
atggcgaagatcaagccgaaggccttgctcgcgcaaagcaaggtgaagaaggtccccggccaaatcagcgtggccacgatcgtcacctacatgatcctcggcgtcctggttgtgtcctccgtttacgctgcctacagcaaatggggttcatgggacatggataggttgtatgttgatacggttacaccgtag

SEQ ID NO: 31903 - DNA, 699 bp, Zea mays
  Peptide Sequence Number=SeqID_73682
cctgaaaattcgcttccacggagagtcgaacctaggacttgaggagtgctactcagaccatctaccaactcaactagaggccctttcgctgttccagttacagaagaagggagttattgaacagagacatctcgctaccaaaaagattgctgatgcaaagctagctaaagatttccaagcagtcctaaaagaattccagaaagctcaacgattagcagtagagagagaagctgcatatgcaccttttattactcaagcgggcctgccacagagctacaactcaagtgaagtgaacaatggtgctgataagttggcagagcagcgcacgcagcttctagaatctagaaggcaggagttggtcttcttggacaatgaaatagtgttcaatgaggccatcattgaggagagggatcagggaatacaagagattcaacaccaaatcactgaagtaaatgaaatcttcaaagatcttgctgtgctagtccatgatcaaggagcaatgatagatgacattgattcccatatagagaatgctgttgtagcgacttcgcaggctaaaggtcagctttcaaaagctgccaagactcagaagtcgaactcttcgctgatatgcttgttactggttatcttcggcgtggtcctgctcatagtgataataccaggaatggatcctggcatccgcctggatgtatccaggcg

SEQ ID NO: 31904 - DNA, 135 bp, Zea mays
  Peptide Sequence Number=SeqID_73683
atgccacatcgcgcgagggcgtcgctgcagaacccatatctgcctccgattgtccacctgggcgcaatctggtgccgtaccggcaggatcgtcgctgtggctgaaattgtcgtcgtggccgcatgtgggaggtag

SEQ ID NO: 31905 - DNA, 201 bp, Zea mays
  Peptide Sequence Number=SeqID_73684
atgaacgagtgggttatagtgactcattgcgacgcggttaaagggtcagggcatgtcacgatcaacgcaggcggcatatgcctcgatgacggccgctgcgccacgtcgtcggcgcagctctacaaatttgatgtgttgaccgagggcaaaattcttataaatttgaaggtacaaggcttcaaagttgaccccattcactga

SEQ ID NO: 31906 - DNA, 318 bp, Zea mays
  Peptide Sequence Number=SeqID_73685
atggtgttcctgccgccgggggccacggtggtgcagatcgtgccgtggggtggcctgcagtggatcgcccggatggacttcggcgatccggcggatgccatggggctcaggtacatccagtacgagatcgccgtgcacgagagctcgctcgcagacaagtacccgagagatcacgagatcttcaccaacccgaccgcgttgcacaagaagggcttcaagttcttgaggcacaccttcttgatcggacaggatatcacactcgacgtcgatcgcttcagggtggtgctactccaggcgctccggaacctcaccgagtaa

SEQ ID NO: 31907 - DNA, 141 bp, Zea mays
  Peptide Sequence Number=SeqID_73686
atgtcgtgcgcgttcgatgactactatatcaagaactatggcatcatattggcaacagaggtgacgcagaggagtactgacagcaatgaccactcgccatcgtcggggatcgctgcaacagccatgcaactaaactcgtaa

SEQ ID NO: 31908 - DNA, 681 bp, Zea mays
  Peptide Sequence Number=SeqID_73687
atggaggctttcagtttcagcgtcgatggaattatgagccactctccaagcactagcagggaatctctaccaacgaagaatacctaccaacgaaggcctgcagctgaaaaagacgacgacgcgacagcggcagcgatgatggccggctggcgcggtggttcgcagggccatatcgtgaagaggaatgcgcttgctgtcgtccatggtctgtcgcggacgtcgacggcggtggcatcagtttcttatcagacatatataacacagagtgcgcatgctgaagttctgccaaacaggcagcttctgcagcagcttatcagttcagctgcttctcaaaatgaactaaaagcagccaacaagcagaagctgctttttaccagcttatcagataagctgctttttcaacaagcagcagctgtcccaaacagggccttagcttcgctccgacctgctgcggctacccccaagcacgagggtaagactagggaaaatgcacgccatccatcggatgcaaaatggcatgaccaattacaaccattgtatgggatgtcgatatacacatatcttggacaaccacagtctcctgcgcaaatcaggggtaaatccaccaatctacgcacagtcggaccgtcctcgcctgagtgtggaccgttcggaccagcggtggctggccccgttttctaa

SEQ ID NO: 31909 - DNA, 1110 bp, Zea mays
  Peptide Sequence Number=SeqID_73688
atgaagggcgacaaggcgggcgggagggacaggggcggcgccagcaggccgctgcgcctcgagtcgcagcggttcaggctgctgtccatcgtcgtcggctgcttcgtcatctgcctcgtcttcctcctctcctcccgccccgacgccgccgccgccttcggcaccgtgagtgtgagccccaaggcgtcgctggtggccgcgcgccgtccggtggcggtcaagaccgtgcgggcttcctcctccgccgacggagccttaggtggagatttccacgtggacatcctgccgcagcatcgtcaggagcagagcctcgagcggaccggcgacaagacggccacagaatgggtcagagacacggtgatcgtggaggagaggagcggcgccgagaccagcgaggcggagacggaggagaccgagcccgaccgtcacgacagtgccactgccactgccgcggcgtccaacaccgacgaccagcctgcagtaccaggtgcggagaaggcagtccaagacaccgccgcgatcaccgggcagccggctgccgaaacaacgtcggcgactgcgccggacgggacagaatctggcggggaccagcagcagcagcagccgcggccgccgctgtgcgacttctccgacttccgcagcgacatctgcgacttggccggcgatgtccggatggacgccaacgtgtcggcgttcgtcgtcgtcgtcgacccggcgacgagcggttccgatcaggaggagcacaaggtccggccttacccgcggaagggcgacgagacgtgcatggggcgcatcacggaggtcacggtgcgcgcgacgggcgacgcggcgggggcgccgcggtgcacggagacgcacggcgcgccggcggtggtgttctccatcggcgggtacacgggcaacatcttccacgacttctccgacgtgctcgtgccgctctacaacacggcgcggcggtaccgcggcgacgtgcagctggtgatggccaacgcggcgccctggtggctggtcaagtacgacaggctcctccgggcgctgtcgcgccacgcgccgctggacctggccagggcaggcgcggcgcgggagttgcactgtttccctcgcgccgtg

SEQ ID NO: 31910 - DNA, 333 bp, Zea mays
  Peptide Sequence Number=SeqID_73689
atggagctcgcgcgaccggcgaaagtcgacgcgaccaggggaggggaggacggcgaggagcaggcacgggtcgaggcgatgcgaggactgccggcgactggcgggcaccatcggcgtgaccagagcaagtgctcggcgcggggtgccgcgacgtcgggcttggccgccacgggacaccggaccaccgcgttgggcgagccgcgccgaggggctgctgtgcgtgggcgtgagggcgctgtgaagaggaagacgacccagcgccatcgcggaccgtccgactccaagcgcggacagtccggaagtgtgcaggaaaggcactgctcctgcgcttag

SEQ ID NO: 31911 - DNA, 99 bp, Zea mays
  Peptide Sequence Number=SeqID_73690
gagaacggacgagctcgttgacggccccaacgcgtcccacatctcggcgctggcgctggactactgggagacgcggctggtggagggaagtggcggcgg

SEQ ID NO: 31912 - DNA, 681 bp, Zea mays
  Peptide Sequence Number=SeqID_73691
atggttaccggtggcaagattgcgcagtttggcacatgcttgttcacactgaggaccaagaagacttctggtgaagttgtggatctcgtgccatgtgctaagaacaagtgggggaactgcgcacggtgggaggtgggcgtggtgaagttgctgcttatgtcgtttttgaagaaccagaaggtgctaagcctggcctttgccgtggagttgagggggcaggacgctgtggcgttcgttagggaagtggaggctgaggcggtaaagaatgttggcaagtattcgttgaagacggatcctgtggagggctctgctgacgatgtagacgtcgatgaacgcataaagaaacgcggagtgaaacatggtgcgacagacgaggggtgttctaaggggaaagctttgtattttaaagtttttccttacgggcggaatattggcattgttataacatttgtgatggacaaagatctccaggagtcttcaaataagaaaaggaaggctctgttgcggatagtggaccctcatcgcgagacgaaggctcttcgcactagcgtggctgggggatcaaaagccgaagctgcgaaggctgcgacttccttcacgacaatgcctccacctgtggtgccttctgcagcggctgcaatgtcgccttcacctgcaaggctagccagggcgagggagtga

SEQ ID NO: 31913 - DNA, 719 bp, Zea mays
  Peptide Sequence Number=SeqID_73692
atggcgcctcctgttgacgtggctgatctgcgccctaggttgggcgatgtggaagctcctccgaagccgaggttgagtctgtcttccgtggccgaggtcgagtccgagcccctgggtcgggcgaggcggagttcgtcgtcttctagggctgagcccaagtccgagccctgggtcaggcggagcggagttcgtcgtcttctggggccgagcccaagtccgagccctgggtcgggcggagcggagttcgccgtcttccgggacttagcccgagtccgagccctgggtcaggcggagcggagttcgccgtcttccagggctgagcccgagtcccgagccctgggtcgggcggagcggagtttcaccgtcttccgggttttagcccgagtccgagccctgggtcgggcggagcggagtttcctatggtgcctttggcggggcctgactgcctgtcagtctcactctgtcaagtggcaccacagtcggagtggcgcaggcggtgttgtccttctgtcaggttggtcagtggagcggcaaagtgacggcggtcacttcggctctgccggctggggggcgcgcgtcaggataaagctttatgctgatgggggttaccagctgagaattaggagccttgagggtacccctaattatggtccccgacagaaggcatcaccagaagaccaatcaaggaaggaatccatgtgggagttcataagagaaag

SEQ ID NO: 31914 - DNA, 1002 bp, Zea mays
  Peptide Sequence Number=SeqID_73693
atggggccacagccaccgcttcaccttcccgccgccaacggcgacagcatcgtcgaccgcgacgtttggctcgcctgcgccgtcccgctctcccgcctccccgccgtcggtgccgaggtctactacttcccgcacggccacgccgagcagtgccccgcgcatctcccggcgccgctcccggcgccgcacctcttcccttgcaccgtcgccggcgtcagccttggcgcggacgacgagaccaacgaggtgttcgccaaaatctccctcagcccaggcccccaccgcgggcccgccgccgcttgtcgtaccgaccccaccagcgactgcccgccgcaggagctcagttacttcaccaaggagctcacgcagagcgacgccaacaacggcggcggattctccgtcccgcgctactgcgccgaccacatcttccccacgctcgacttcgacgccaacccgcccgtgcagaagcttttcatgcgcgacaccaggggcaacccgtggcagttccgccacatctaccgcggcacgccacgccgccacctgcttaccaccggctggagcaggttcgtcaacgccaagctgctcgtcgcgggggacatcgtcgtcttcatgcgccgccacaacggcgacctcatcgtcggcctgcgccgcacgcccaggtacccgctcgtcttccccagggtcgggtccggagccggggtcgacccggaccagcccccgccccgcaacgcgcgcgcgcgggtaccgccccaggacgtcattgaggccgcacgcctcgccgcggagggcaggtccttcgcggtcacctacttcccgagacaggccgccggggagttcatcgtcccgcgcgacgaggtggagggcgtgctcgccacccgctgggagccaggcgcgcaggtgcgtatgcaggtcatggaggccgaggacacgcggcgcaccgtgtgggccgacggccacgtcaagtcgctccaccaaaacatctggcgagcgctcgaggtctga

SEQ ID NO: 31915 - DNA, 234 bp, Zea mays
  Peptide Sequence Number=SeqID_73694
atggcgccgccatgggcattctgtgccgctatgtgcagagttggggaagagagagttgagggtgatgtgggagaggagccctggccgtgggatcttgatcctgtgatcgggactgggtaccggttcgtggggagatcatgggcattgaagtttaatcgagcggacaggatggatctgacggttgagatgtgcccataccccttcgacctcgcaaaatcattaaagagaccctag

SEQ ID NO: 31916 - DNA, 261 bp, Zea mays
  Peptide Sequence Number=SeqID_73695
atggagccagaagccaattccgcgagctctcacccttccgccgagaaggagatcgctgatcgagttggtgtcttcactgaactagtggcgtccgacaccccagtccattttgcgacctcgcggttgcatgtcgagaggactgagctgaagaataagtttgagcgcctccggaccgataataccgaagctagacgggacaagtcggcatccgacctgaagagtcaacgcctgggagataaggccaacactcttgaaaaataa

SEQ ID NO: 31917 - DNA, 228 bp, Zea mays
  Peptide Sequence Number=SeqID_73696
atggtcgcggtttcctctctccctcccccatctctctccagtttctgtgccctgctcctgctccccgagctcgccctgcgctcggatctccctcctatggcgctcggacctgctcggccctcttcccctgcgcgcgagctcagcgtctccctgcgcgcctctgcttccctctccagctcgctgctcctgcgcgtcgctggccctctaccgagctcgcccatggcctga

SEQ ID NO: 31918 - DNA, 1779 bp, Zea mays
  Peptide Sequence Number=SeqID_73697
atgagtaccattcaatcagggtatgttgatgttattcttcagcttatagacaaagctggagattttgtaagtgatgatatatggtatcgagttgtacaatttgtcacgaacaacgaagatctacagtcatatgctgcagctaaggcaagagaatatcttgacaagcctgctttacatgagacaatggtcaaggtgagtgcctaccttcttggggagacaagtactgtagctattcttctctcaacctatgccaagatattgatccacactcaacctcctgatgttggactgcagcaacaaatcctcacaatatttaaaaagtacgagagctatattgatgttgaaatacaacagagagcagttgagtattttgaactaagcaggaaaggccctgctttggcagatgtgttggctgaaatgccaaaattccctgagcgtgagtctgcacttctgaagaaggctgaagacgctgagattgacacagcagagcaaagtgctataaagctacgcagtcagcaacaaacttccagtgctcttgttgtagctgatcactcccctgcaaatggatctgcaccaccagctaatcatctcactcttgtgaagatgccaagccaaattgtttctgacactcaggagagtggggtaattcatgaagaagttcctaatcctcctgttgaagctcccaaagaaaatgggactcccgtcgaagtggaaagcagggacacaaacattactggaatcaacaatgaggttaaaactgaaccaccctctacatcgcattctacctctcccgcggacctcctggcagatcttttgggtcctcttgcgatagagggccctcctgccgtagagcaaaatcctacccaaggattgaatagtaatcaaagtccagttggtgacttggcacttgctacccttgatgatcaatccaactcagttcagccaattgtcaacgtcgaggaaaagttccatatattgtgcacaaaagatagcggagtgctgtacgaggatcctcacattcagattggtatgaaagcagagtggcgtgcccatcatggccgtcttgttcttttcctgggtaacaaaaatacttcagcccttacgtcagtgcgggtgctgattttgcctcctagtcatttgaaaatggaactttcgtctgttcccgatactattcctccaagggcgcaggtgcaagttccacttgaggttgcaaatctccgtgcaagtagagatgttgcggttttagatctctcatatacttttggaacttcactggtggatggcaaacttcgacttcctgttgtattgaataaatttttgcagcctataactcttacccctgaagaatttttcctccagtggaaagcgctgactgttcacttgctgaaggttcaagaagtggttaaaggtgtgaaaccaatgcctctttctgagatggctaatcttttcatgagccttcacttggcggtcgctcctggacttgataacaacccgaacaatctggttgcatgcacgacattcttttctgaagcaacacgggccatgctttgtctgataagacttgaaacagatccacaagacaggacccaactgcggctgacagttgcctcgggcgatcaacatttgacattcgagttgaaagagttcgtcaaggaacatttgattgatatcccaaggactcaggctgccccacctatggcaatggtccagccacagttgcttactgcagcacctgccacatacaatgaccctggtgccatgcttgctggattgctatga

SEQ ID NO: 31919 - DNA, 1545 bp, Zea mays
  Peptide Sequence Number=SeqID_73698
atgggtaaattcttcagtgtcagggggacaaagggcttctgcgacacatgttatgggactatacttctcatagaatccaaagatgaaagtgcaataaaggttgattttgatgacatactcagctgggagtacctgttcaagctatattggttagatctgaaagggaagctttcattaacattggaagaacttactattgccaagactagatggaatgttcctagcacttctgctaggaaagaaaaagatgagtcgtctgatgacctgtatgacgctaataatgatgatgatgctggtactgactgctcctcaggaaaacgaaggcgaactaattcaaggaaaaagggtcaaaaatgccggaaggtaaataaagattgtagtgttcctgcaaaaaaggtcgagcttccaattacaaatactgagagcgttcccacagaagtgacaaatgaacgagtgccattgccagtagacacaaaagtaccaaatggatgggtacccttgccagtagacacaaaagtaccaaatgaatcagtgcccttgccagcaaacacaaaatgggcatcaccagagctactggagtttgtaggacatatgagagatggcgatcaatctttcatttctcagtttgatgttcagactcttctgcttgattatatcaagaagaataaccttcgcgatcctcagaggaaaagccaaattatttgtgacttgagacttcatcgcttgttcaggaaagcacgggttgctcactttgagatgttaaagcttttggaaatgcattttcttatgaatgagacttcaacagtaactgatagtagacaagtgactatcgatctcaattcagcttatgtagataccaatggatacaatgacatggctgcaaaattttctcctgataagaggagaaagatccatagaaagatggaaagagatacccaagttaatcttgaggactatgcagcaattgacatgcataatataaatttgatttttatgaggcgcagcctgatggaggatttagttgatgatgccaaattctcagacaaaattcatggtggttttgtgaggattaaaatttctgatgtgtatcagaaacaagacatataccgtctagtaaaagttactggaacgcacaaggttccagaaaagtatagcattggaaagaagatgacaaattttgcactcgagatattgaatttaaacaaaaaggagattattacaatggatacaatatctaatcatgattttacagaggaagagtgcaaacgtttaaggcagagcatgaagtgtggcgtgattagcagactaaaagtgggggatatcctagagaaagcaaagatattgcaatctgtaaaagtgaatgattggtttgaaaatgaaaagcagaggcttgggcatcttcgtgaccgtgcaagtgaaactggacgcagaaaggaatatcctattagaccatactatgatgtgcttcgccaaaggtcttttaatgctagaggcatgcttccaatagctcataatcctctgctcaggaattgcgaatattcataa

SEQ ID NO: 31920 - DNA, 363 bp, Zea mays
  Peptide Sequence Number=SeqID_73699
atggatcctcgcacatatatgctatgcattcagttttgccccaaaaaccgggacagttctgaagagattgtggtgacaccgactccatcacaagaacctcatgcctttgttgctggagcttcttcttcagcaccacatgtgctagtagcccaagcccctactcctagagttgatgaccttgataattctggtgatgatgaagacaatgatgatgatgaagaggataaccaagacgacaataatggtgacgccaacaacaacaacaacaaacctgaccaaaataatgattttgttgggttgtgtcctatagctgagcattacacctcgatgtttgagatgggtcacttcccaaacttactgtag

SEQ ID NO: 31921 - DNA, 348 bp, Zea mays
  Peptide Sequence Number=SeqID_73700
atggatggagatagagggttcaggactctctcgtctcacgagtctttgacgccgttgtccacctacgctgcttcggtcagcaatgctgcacgaagagctttgtggtccctgatccatacttatcgtctacagctgcacgacatggcatacaagcatcttcctctacgtcctcgtggtgagagccaaaccagcgtggttccaggagaagctggagaagatcgcctcaacacccttgtaggtgtggtggcagctcttaacactgacctatacaatgctactctggatctttcaaggatacatgaggagcttgaaaacactcatgtgaggattgcaacactggaggcctag

SEQ ID NO: 31922 - DNA, 822 bp, Zea mays
  Peptide Sequence Number=SeqID_73701
atggacggcgacggcgcgacgtgggggcagccgatgctggagaagcggccgagccaccgggagcggcatttcacggcgggggaagtggtgcgggacgtcatcatgggggtgtccgacggcctcaccgtgcccttcgccctcgccgcggggctctccggcgccagcgcgccctcctcgctcgtcctcaccgccggcctcgccgaggtcgccgccggcgccatctccatgggactcggagggtaccttgcggcccagagcgaggcggaccactacaagcgggagatgagaagggagcaggaggagatcatcaccgtcccagacaccgaggccgctgagattggagagatcatgtcacggtatgggctcgagccgcaggagtacggccctgtcgtcgccgggctcaggcggaaccctcaagcttggctagacttcatgatgagtcataaacaaccgaccgacggaaggcagatggttttgttttcttcagctaaccagcaggccggggaaaaatgtgtgtccaggttcgagctgggactggagagaccggatcccagaagggctctgcagagcgccttcacgatcgcactgtcctacgtggtcggcgggctggtccctctcctgccctacgtgctcgtctccgccgcgcaggatgccatgctcacatccgtcggagtcacgctggccgcgctgcttttcttcggctacgtcaagggccgcttcacggggaaccggccgttcgccagtgccgtccagaccgctgtcattggagcgctcgcttcggcggcggcgtacgggatggcgaaggctgttcaggcgaggtag

SEQ ID NO: 31923 - DNA, 318 bp, Zea mays
  Peptide Sequence Number=SeqID_73702
atgctggacgcgctgctcagcggcaacgagggtaccagggcgaagctcagcgacgaccagatcatcgaccttctcatcaccctcatatactctgggtacgagactgtgtcgaccacctcgatgaaggcggaagtacctgtccgacaaccccaaagctctcgacagataaggaaagagcaccttgacatcaggaaggctaagtcgccagaggatccccttgactggaacgattacaagtccatgaccttcaccaaagctattgagcttcccttacattctacagatgccagtggaagctccacgatgtatatggtgtga

SEQ ID NO: 31924 - DNA, 249 bp, Zea mays
  Peptide Sequence Number=SeqID_73703
atgaggcatggttccctgacgctaggcgtggttgaagctctggacgccacgagggccactgcagtcactgccgaggaagcgcgcactaccgccaaggagatggagaagaaggccgccactactgcaaagctagccgccatcgctatggacaaggtgggatttgtcgtcgtcgttgtggccagtgtcgtcgccgaggaagccaatgccttggattcagtggcacatcgctatttggctgtgaacttatga

SEQ ID NO: 31925 - DNA, 339 bp, Zea mays
  Peptide Sequence Number=SeqID_73704
atgacggttcagcaacggtggacatttgtggtggctgcaagccagatcgagcctgcaacacctggcacccggcaatacgctgctgggcgtgttggggagaagaatggcatgtacctgttcgaagcatggaaccagacggaactcgacaggcacgcggaggacgggtcaccgccgttgcggtcgccgcagccgcgcgacgcgacgaacttcctcccaccgcgctgcggcctggcggcagcggccccgtgccagcagtgccagcgtcggcaccacgacgagcgccaccagcgccagtaccagggctgccgccgaggacgaatctgcctcctcctccattag

SEQ ID NO: 31926 - DNA, 312 bp, Zea mays
  Peptide Sequence Number=SeqID_73705
atggcggagaaggagcacggtggaggtgtgcggcgggggcagacaggggcaggcgggaatcgcgggatccatcagcggtcgctgcgctctagcatggcgaaacctacggcgggtgcgggggaggaaggtgacgggctgcgggggagaggaaggagtgcggcgggggagaggaaggagtggggcggcgtcggcgtctggtgcgaccgccgcggcgcgggggtgggcgcgatgaggtggagcaggagcgagtcgagcgggaccgaggagcggttgccagcgcgcggaggagaactgcgaacgggagggggctga

SEQ ID NO: 31927 - DNA, 144 bp, Zea mays
  Peptide Sequence Number=SeqID_73706
atgggaacattttctccaagtgctacaataacgaagattgttagggcatttacagcaccattaaatatatgtatcttgagcggtctcaagggagtttttaacacatactacgagcaacaaatattcaaagacggagattcttag

SEQ ID NO: 31928 - DNA, 296 bp, Zea mays
  Peptide Sequence Number=SeqID_73707
atggtgctcacgccgccaccgtcgcatgcggcaattcctgccgttcggatcccagggtggtggtcggaggcgataaccagtgaccggggatcgtgcgcaagcttgctatctggcataagcgtcgccctggaccaaagaatttctcgccgccgtccattcctcctctggaatccgctgaccaccgtgggcagggctgctgccacaccagaagctggctcgactcttccagcctccgactccgcatccgcctccccggcggagcctctcgccaccgcacagcctagatccgcccagag

SEQ ID NO: 31929 - DNA, 291 bp, Zea mays
  Peptide Sequence Number=SeqID_73708
atggcgattgctctgttgatccagcctctcaagggcactgtacgggggtatttatatgtgcctgagtgcctaacgtctcaatcgagactgacgaaggctggagcgaagggtagcgtcttcgccttcgccccaacacttgccgtgcttcaccggcgaaagggtgatagctcgcggaactggcttctggctccaccgtctggtgtagactttcagatccggccttcacgagacgacacgaacgctctgataacaggagggtggattggaggcgaagcgacactatgcgcgtag

SEQ ID NO: 31930 - DNA, 180 bp, Zea mays
  Peptide Sequence Number=SeqID_73709
atggtcgccagcgccaacagttggccgcgcaatcttcgcgtgacacgtggaactgctccaacgccttactctagagcattctttgagatctttattgtaagggcgagaggctccaacttgtggagattcctcacaaacgggaacaatactctaaaggaaaaattgaggtattcaagttga

SEQ ID NO: 31931 - DNA, 753 bp, Zea mays
  Peptide Sequence Number=SeqID_73710
atgtcgatgatgggcgagttgaactacttccttgggttccaagtgaagcaactcaaggatggcaccttcatctctcaaacaaaagtacacgcaagacttgctaaagcggtttgggatgaaggacgccaagcccgcaaaagactccgatggggaccgacggacacactgacctcaacaaaggaggagtgtcacttagtggcagtgaaacgaatccttagatatttagtcgctacgccttgcttcgggatctggtatcctaaggggtctacctttgacctaattggatattcagattccgactatgctggatgtaaggtcgataggaagagtacatcggggacgtgccaattcttaggaaggtccctggtgtcatggaactctaagaaacaaacttccgttgctctatccaccgctgaggccgagtatgttgccgcaggacagtgttgcgcgcaactactttggatgaggcaaaccctcagggactttggctacaatctgagcaaagttccactcctatgtgacaatgagagtgctatccgcatggcggaaaatcctgttgagcacagccgcacaaagcacatagacatccggcatcactttttgagagaccaccagcaaaagggagatatcgaagtgtttcatgttagcaccgagaaccagctagccgatatctttaccaagcctctagatgagaagaccttttgcaggctgcgtagtgagctaaatgtcttagattcgcggaacctggattga

SEQ ID NO: 31932 - DNA, 231 bp, Zea mays
  Peptide Sequence Number=SeqID_73711
atgaaggctggcctgcgcgcgttcttcgacctcgatgacgccaaatgctgcaacagcaacgtcatcaccggctgcggcacgtcgcgcccagctccaccaaccccgctctacgaggcctacgggctcctcaacgccgccgcgcccgtcgacgtcgacgctttttgcgcgctcgtcgacgcgccgccaggccgccacacaaaacaaagattcgtgcaggcgtggagcagctga

SEQ ID NO: 31933 - DNA, 1206 bp, Zea mays
  Peptide Sequence Number=SeqID_73712
atgacgaagatggaggtggtggagacggcgatggtggtgacgccgagcgaggagatgcgccgacagggtctgtggctgtccaacctagatctccaatctccccacatctacacgacggtcctcaactactacccagctccagcagggcgcccagagcacgggggcggcgcgtgcgaccctgagcggctcaaggtggcgctggccagggcgctggtgccgttctaccctctggccgggcggctctgcctgggagaggatggccggcggtatgtcgactgcaacggagagggcgtgcgattctttgttgcccgtgcggacgtgactggcccggagctgttcaaagactaccagccgtcgccggaggtgacggagacattcgtgccagacatgccgcccgaggagctcccctgcatggtggccttgtttcagctgaccttcctcaagtgtggcggcgtggtgctgtcctcaagcttccaccacgcagtcgtagacggcaccagcctattccacttcatgcagtcatggtccaggctagcccgaggcctcgacgcggccgaggctgtcgggccacaggcgccgttccacgaccggacctccctccgcgcgcgcgcaccgccgctccagcagatgggtgcaccaccagcaccagcagcccactcactgaacttcgccgccaccagctgcccccgcgctttcgtcgcccgcgtctacccgttcccgcacactctcgtccacgagctcacgtcgcgatgctgcggatccggagccaccggcgtctccagcttcttcggcaacgccgcgctgcaggcgcccgccctgccacggcgggtcggggacgtcattgacggcccacccgcgtccgtggttgggatgatcatggacgcggtgaacagtgtggacgacacgtacgtacgcgccgtggtggactaccatgagctgccgaaggagaatctcgtcctgggggcgatggagccaccggaatcagatgtggccatggtcagctggctggggatgccgctgtatgacgctgacttcggctggggcgtgcccgagctcgtcatgccgacgacggtgtctgtcttcagcggcatggtcctcgtgctgccgcgtggtcttgacaaggagagcggaatcatcgtggtggtcaatctggagcccgaatacctgccggccttgaaaaagctcctctatgacgtcgtcctgtga

SEQ ID NO: 31934 - DNA, 180 bp, Zea mays
  Peptide Sequence Number=SeqID_73713
atggcgactggattatatagggcccgggtcttaaccgaaacggccccaccaggcgcggttcacggggacccaatgatggcggccatgttccgcccgctgttaggaactgaaatcccgattggtacggggaggaaggataccagatgggatcacggggaaagagggaagatgttctggtaa

SEQ ID NO: 31935 - DNA, 801 bp, Zea mays
  Peptide Sequence Number=SeqID_73714
gctctatgccgtgggtatcctacagagtttgcatcatatttccattattgccgttcactgcgatttgatgacaagcctgactattcctacctcaagcgattattccgtgacctttttatccgtgaaggttttcagtttgactatgtctttgactggacaatattgaagtatcaacaagctcaaattgccactgctccaccccgtgcggtagtgagcttctctaatgttcccttgttgagttatccaccaaacatgcacatttgtgtaaccgtctgcagggataactttgatgtcctacctttgttacagggccatggcgctgggccttctgggttggcacctgcattacagaatgataggcaaccaggccctgaggaagcaaggactagtggttggtcatcaatggatcggcgtcgtgccccactaccaattacaagtgtggggacattatctaagcagaaagcaccggtagggaatgatgctactgtttctagagacgctgtgatatctggaccaaatttcttgggaaggtcaagtggatcttcaaggaggcctgttatctcgagtagccgcgatgcggtggtcaccgatagttccgagccttcacgagcgcgcacaactgatgcaagccctggggttttccgcagagcctcaggtcctcagagaagctcacctgtccactctgcagaacagaagcgctcatcctcaggccgtcatccatctaatgcgaagaactacgattccgctctcaaaggcattgaaggccttactttagatggcgacgagagggttcagtactag

SEQ ID NO: 31936 - DNA, 1122 bp, Zea mays
  Peptide Sequence Number=SeqID_73715
atgtgggagtcggtggcgctgacgctggcgggcaccgccggcaataacatcggcaaggtcctgcagaagaagggcaccctcatcctccctccactctccctcaagctcaaggtggtcaaggcgtacgcgtcgaaccagctctggatcagcggtttccttatggacatgtgcggtgccgcgctcatgctcaccgcgctctctcaggcgccggtgcgttgcctcctgcctcttattcctgtgcgtggtgattgggtcgtttatggtcctttgctgacggtggcgcaggtctccgtcgttcagcccattgctggttgcggtctcgcaatactctgcgttttctcccatttttacctcaaggaggttatgaacggcctcgattggattgccatcacgctagctggtctcggcaccataggtgtaggtgttggaggtgaggaacagaaagttgaccagatacctcttttaaatataccctggctagtgctctccattgtcatcttgtttgtactgctcaacacttggcttcatatgtataaaaagcaaaggcgtgagcaagagttgcgccatcccatgcagactggacctgaagtgattgaggagatcatatatggcttagaatcaggcattttgtttgggatttcttcagtgatctctaagatgggatttgtgatgtccgagatgggttttccaaagattgttgtgcctgctgccatatcttgtagtgtttgctgcagtgcagtgggatttgtgtatcagactcgaggcctcaagcatgggagggcaattgttgtatctacatgtacatcagtggcatctatagtgtccggtgttgttgctggcatgattgcacttgatgaacatctgcctaaagctcccacagctcgatttttcctcttactgggatggttcttcatcatcacaggagtaatactgcttgttagttcaacccgattgattgcgcgtctacctaggcctgttcagaagtttttgaagagcaacatagagcgcacccacagcatcaggaggcctggttcagcacgagggaaggatcccatcccaacaacaacgatccatacgtcgtcactgcacttgcttgcttctccaacaaaggagaaggcctag

SEQ ID NO: 31937 - DNA, 351 bp, Zea mays
  Peptide Sequence Number=SeqID_73716
atgtacgaaggagaagcggcactcgatacagcttcggacgtccaggcgtacatcccgactgggcacaccaatacaccacacggtgagcagacaggtcattcgcagattacagaagcagatggctggagggaccaaacaaaggtgtacatcccgttcctggcctgcggggatctcagcggctacgactccgaccgctcgtacccgctgcccaacacggacggtggctcgtaccggagcctggaccccgtgcagcctcccatcgccccgtcttacaagaccgctctacagatgaagaaggcttcttgccacaacgcctgtgcggatgccatcaagccgtccgcagactcctga

SEQ ID NO: 31938 - DNA, 1251 bp, Zea mays
  Peptide Sequence Number=SeqID_73717
atggcgcgggtgcgagaaacccagccatggcggcaccggccccaagcccaagccctggcggcggcgcgccatcaagccccggtcccaccggcgggcgtggtcctcctgggctgcctgccgctgcgtagatgggacgagctcaatgtgttcttacagaaaaccaggccaaggatcgtttttgggctgaatgctctgaacggtcgggtcccgatgcctgacgattctttaggggggccatggaattacacgaacgcagcttctttcattcgctacaccgtgagcaagggatacgatgtacatggatgggagctcggaaatgagctcagtggcagcggagtcagggctcgaatcgacgcggatcagtacgcagcagacgtgatcgctctaaaacacatcgtcgatagcgcctaccagggcaagccatcgaagcctctcgtgcttgcgtcaggaggcttcttcgacgcggtctggttcacccaactcgtcagcaagacaaagccagaccagatggacgcgatcactcaccatatctacaatctaggccccggggttgacgaccatctggttcagaaaatccttgacccttcttaccttgacggcaaggcgagcacgttcagcaactttcagcaaccttcaggggatactcaagtccgcaggcacgtccgctgtcgcctgggttggcgaggctggaggcacgtatctggatcagctttagtacgacacaaagagctactgcagacagaccttggttggaggcaactatggcctgctcaacacaatgctttgctgtggcaccgcctcatgggcaccaaggtcctctcgacgacattcaacagcacaaacaagatccgtgcctacgcacactgcgtgaaaaactcagaagggatcgctctgctcctgatcaacctggacggcatcagcacgaaccgcatctacgtgacgagccaaggcgcgcacgcccagagcgaaaggaagaaggggagcgggacctccgacgtccacatcatccctgtagggctcggcgaagcagcagccgcgctcacgagacaggagtaccatctgactcctaaggacgggaacttgcagagccagcagctgctgctgaacggcaacgtcctggcaaccgacgccgacggggagatcccggagctggagcccgtgcaggtggaggggacgcagcccataaccgtgggcccttactctaccgtgtttgctcacgtccccagcttctacgctcctacgtgcctgtag

SEQ ID NO: 31939 - DNA, 1320 bp, Zea mays
  Peptide Sequence Number=SeqID_73718
atgggggcgtcgggcaagtggatccggacgctggtgggactccggccggcagcagagagggagagacccggcgccgtggcgaaggggcggaagtggagccggctgtggcgaagctcgtcctcgcagcgggggagcagcgcgccggcgtcggaggcgccgtccgaggcgtcgtccactgccgacatgctcagcagctctgtcgtcgcggccgtcgtgcgcgcgcagcccagggacttccgcgtcatcaggcaggagtgggcagccgtccgcattcagtccgccttccgcgcattcctggctcggagggcgttgagggcactgcggggcatcgtgcggctgcaggcattggtgcgcggccgccacgtgcgcaagcagctctccgtgacgctcaagtgcatgaacgcgctcgtcagggtccaggagcgcgcgcgggaacgccgcttccggatctccgcggacggccgccactcgcaggacatcctcgacgaccgaagcggccttgctgatcctgtcaaggaagcagaggcaggatggtgtgatagtcaaggtactgtggatgacctaagatcaaagatgcatatgaggcatgagggtgcggtaaagagagaaagagcaattgcttatgctctttcccaccagcgaagttcaagccacagtggaagacccagctcccctgctgcatctctcaggaatcatggaactggcagaagcaataaagattggagccatttggatgggtcgatggcgacgaaaccatgggagagccgcctgatggagcagacccacaccgaacactcgaacaattcacggtgttcagaaagcatcgaggagatgaacgcagccagctcaaagctctcagatgcaagctcagtcaaagtcagaagaaacaatatgacgacaagggtggcagcagctaggccgcctccttccacaatctcagcttcttcgtcagatttcgtttgcgacgccagctgctccccatcgacttcctccgtcaccccagccgcctctggcaccagtttcctaacatcagacagaaggtctgattacgggccgaactacatgaactggactaaatctgcgaaagcaaggttgaatggttctggcacagcacataggctaccgctccaaaggcaacgatcttctgatctgcaccaccgcatcagcaggatagcgctatcttcggcagatgctcaaagcaccgctggatcggaagtttcggttacttctaagaggctgaacagtctgactctgagaggtcgaggcgctagaagaagtttggacaggaagaacgatgaccagcctgttgccttgttttaa

SEQ ID NO: 31940 - DNA, 1230 bp, Zea mays
  Peptide Sequence Number=SeqID_73719
atggccgcccccaacagcaacgacgcggccagcgccagtggcaccggcccggctggtgaggaggacatctccatcgaggcgttggcgcggcgcgtgcaggagcacatgaccctcagttccaaccccgccgctcgccgccacaagttctgggaaacgcagcccgtcggccagttccgcgacgtcgccgacacatcgctaccggacggccccatcgagccgcccacgccactctccgaggtgcgcgccgacccctacccgctacccgccgccttcgagtggctcacctgcgacctcgatgacgacgcgctcctcgccgacctctactcgctgcttgcccacaactacgtcgaggacgacgagaacatgttccgcttcaactactctccggccttcctccgctgggcgctcaagccgccgtccttcttccgggcctggcacatcggcgttcgcgccaaggagtccaagaagctcgtcgccttcatctcgggcaagctccgatccaagcgcctggcgcccgtgctcatccgggaggtcacccgccgcgtccaccaggagaacatttggcaggctgcatacaccgcgggggtcgtcctcccaacccccatcaccacctgccgctactggcaccgatccctcaaccccaagaagcttatcgatgttgggttctctcgccttggtccacgcatgacaatgagccgcacggtccggctatacaagctgcctgacgcgccgctcacccctgggttccgcagaatggaactgcgggatgttgctgcggtcacacggctgctgagggcttaccttgcgaggttcgtggtggcaccggattttgatgaggtggatgtggagcactggctgctgccgcaagaggatgtcgtggacagctaccttgtggagagccctgagacgcatgaggtcacggatttctgcagcttttacacgctgccctcgtcggtgctgaacaatgctaactatgcaacgctcaaagccgcatactcatattacaacgtctctaccaaaactgcattgcagcagctgatgaatgatgctctgattgttgccaagcagaagaattacgatgtgttcaatgctctcgatgtcatggagaatgagtcgttcctcaaggagctcaagtttggtcctggagatgggcagctccactattacctctacaactaccgtattcgcaatggcatcaagccctctgagcttggtcttgtgctactatag

SEQ ID NO: 31941 - DNA, 1152 bp, Zea mays
  Peptide Sequence Number=SeqID_73720
atggcgcgagacgtgaccgggcggcaacggttgccggatcgacctggcctcggtcgcgtcgtcctggcagggcagcagtatgctgtgccgcccgtggcatgcatcggctgcggatccgcgggcgccgccgaaactcaggcgccgcccgcccagcaaccgcgtccacattgccatgttctgccacccgcagccgccccgccccgcagccgtgtggacgcctaccagatctcggtcgcgatattccagcgattctacgtcccgccgccgccatcatcgcccccaaactcgcgctctgctccgcggcctccacgcccttcccccgcccgactctcctcgcccgactctcctctctcccgcaatccccgcggcctcgccccagatcaccgtcccggctccccagaaattcgcctagatcgccgccccagctctcgatcctcgcccacgctctccatggaaggcgaatccgtccgcgacagcccgatctccatgcaaggcacgtcctccgccccggattgctgccccggctggctggttccttccttccggcttcccccgtcaaccaaatcaactcgtgaggggagcgaggcctcgatcgcagcggaccccgatgccccgcattctggcccctccggcgacgtcggcggcagcggaggcatgatccggggggactcggcggacctgccagccatggacgccgccacacgcccggccattgtcatcgacaacggcacagggctcccacaccttgcaggacgtcggagcctcgccgacgcccaacatgaccgagccgccggccggctgggcgactgggcctggtccatcaaccaggccaggtcgttccgatggaacctgacggccagtgtcgcacgccccaacctgcagggctcctaccactatgaccagatcaacatcacccgcaccatcaaggtcatggtctcccgtggccacatcgacggcaagctccactatggcttcaacgacatctcccacagggacaccgagacccccctcaagttcgccgagtacttcaacgtcactcacggggtgttcagctacaaccagatgggcaacgtgccccccgccgtcaatgggccactccatgtcatccccaacgtcatcacagccgagttgcatctatttgatcaattctag

SEQ ID NO: 31942 - DNA, 216 bp, Zea mays
  Peptide Sequence Number=SeqID_73721
atggcggtgcgggtgggagtgggaggcagaaccgtgcaccatatcagtgtggacgtctacactatgttcttaatagtattagagattattccatctactagggattgtgtcactcagaggtatagcgtcaatgttctcgccggccgttcgaacaagatggggaggtcggggaaacagggcagggcacaagcaaacaaagcatgttgcagcaactga

SEQ ID NO: 31943 - DNA, 255 bp, Zea mays
  Peptide Sequence Number=SeqID_73722
atgccaaatatgagcgactcaaccggtacaggctcatatttaccagtcattgctgcagatttaccagtcattgctgcagctgctaatatatctactttgccatctaagctcggaggtgagaaggtagtttatgatgctaccaagaaaatcttctcaagctccagtggtctagctgaagatattctattcttattcacagattggttgtcactacttagagagattgtcaatattgaaacaagggtacacacctaa

SEQ ID NO: 31944 - DNA, 795 bp, Zea mays
  Peptide Sequence Number=SeqID_73723
atggaggagacggatccacaatcgcccacctcggataaggatggattgaccctccgctcctcaactgccaccaccccgttcatgcgcgtggccgagcgtctcaccgcatccgccgcctccctgtgcccctcaactgctgccacctcgtttgcctacattgtggagaagaagatgaaggttcgtgcatcggtgaagcgcatgtgccgtttctgtatggtgttgaagcgttggggcatcgttttcattcacaacacctccaacgccaacacaagcaacgctagggattctccaccatcgctgaagccaccatctcgtgcaagccccaaatttctagagcagaggggtgtgggttcaagtgctcattctgcactagtttttgtgggcgctgggcgtggggaaggtaccgatgtgttgttgggttcctatatggcttatgaagttatccagttcaagcatgcttgggtattatcgaagcccatttgtgttaggacttattacgatgatctccagtataggggttcatggcctcaaaacactatcaatctaactttcatggtggaaataattgccaaacttgtctgggcaactagggatcattacttcttagaccccacattatctcttgaattcctttatcacttgtatctatcgtttgtttgcaagctgagagctggatcctctttggcatctgatgccactcatgtgtcaattcttcttagtttactgaaggttgtcaacatacatgcttcttgtgaaatatttagaacttactatgatgagtaccttactgcataa

SEQ ID NO: 31945 - DNA, 324 bp, Zea mays
  Peptide Sequence Number=SeqID_73724
atggcccagcgtctccgaaggcgccaaggatcttgtgaggagaatgctcatcagggacccgaggttggtggtttggctcctgacaagccgctggactcggctgttctttctcgcatgaagcagttctcggccatgaacaagctgaaaaatatggctctcagggatgaagtggagatggatggtcgggtggtggagcagaaagtgcagatgacggcggtggtggtggagatccggaagaaggaatccggcgagctggtggccatcgggaggcagtggatgacggcctccaggcccaaagtcgctgctgctcacagcaagatatga

SEQ ID NO: 31946 - DNA, 222 bp, Zea mays
  Peptide Sequence Number=SeqID_73725
atgtcattcaagtccgctggtgataagctgaagttcggcctatttacaatgcccaactatgacttcatcaagagcatcaacctcgccttcaatatgatcaaagatgcctggcagaaaaagcgccttctagattgtatcttcgcccgtctcagcttcgatagttacagcttcggcgggggcagcctcggttgctgcggtatcttcggcagctggtatttttga

SEQ ID NO: 31947 - DNA, 156 bp, Zea mays
  Peptide Sequence Number=SeqID_73726
atgcccggaaattctgttgggggcggagctgacatgtggggtctagctgtaatcgagataggggcatgtgacgaaaggatgggcacgcggaggaagcggctggccagtgggccccgtttagccgcgacacggcgtggacatgatattgcgccataa

SEQ ID NO: 31948 - DNA, 297 bp, Zea mays
  Peptide Sequence Number=SeqID_73727
atggctgggcgctacacagagggaagcgggatggccagcagaggactccggccggcgttggaggaagcgcgccatgggagcaccgcgagggagctgcgtggagagggagagctcggctgggaggagtggaagaccactcggctgagcgagggagaagatcagtggctgcaaacaaataatctgtcggatgggaagcggcggcagcagataacttcatctaccaatcgaacacttgatcgctctgtcatagatgatttattggagaatcaaatctcaattaaaaactctcggatgtga

SEQ ID NO: 31949 - DNA, 1101 bp, Zea mays
  Peptide Sequence Number=SeqID_73728
atggagggtggtgcttcaggatctgcagctgtgactgactctgctatggcagaagctagtgcagttgaccctgacttagcgttggatttgttggcatcattgcacaaccagggagaggtttctttatttctcttcttaaacagcaagagaagaaggaagacaactcatgactcatatgctttcttgataaattggttggaacggttcccacagtacaagcatcgtgatttctacatcactggagagagctatggaggccactatgtccctcaattgtcttggttagtgtaccaaaacaacaaaggaattaagaatccaaccttaaacttcaaaggcttcatggttggaaatgcggtaattgacgattaccatgactacatgggcacatttgagtattggtggacacatgggcttatctccgatgaaacttatgcaaagttgtgggaggattgtaaaaatgatgtgtctgagaacccctccgaggaatgccaaaagatttatgaggttgctgaggctgagcaagggaatattgatttgtatagcatctacacacctacttgtaagaagacttcattgcaaaagcgcagactaataaggggaagaatgccctggctgccgagaggatacgatccttgcaccgagctgtacatcacgaagtactgcaacttgcccgaggtgcaggacgccttccatgccaatgttactggaataccatacgcctgggtgggctgcagtgacccaatatatgagtactggaaggattcgccgaggtccatgcttccgatctaccgtgaactcatctcggcaggcctaaggatatgggtcttcagcggcgacaccgactccgtcgtgcccctcacggcgacgaggtactccatcgacgcgctgtctctgccaacgatcaccaagtggtacccttggtactacgacgaagaggttggtggatggtgccaggtgtacgagggcctgacgctggtgacggtccgaggcgcggggcacgaggtccccctccaccgtccgccgcagggcctcaagctgttcgagcacttcctgcggggcgagcccatgcccaagcctgtcgagagcgtccagtcgttctag

SEQ ID NO: 31950 - DNA, 377 bp, Zea mays
  Peptide Sequence Number=SeqID_73729
atggcggggaccgagcaaaaaggggaggagcgctgggagcggatgatgctggcggtggaacggttgaccgggaagatggaagcgatggagatcgggcagaagaaggcagaggaagatcgagcactgttggctcgacacatggaggagaacgagagaactattgcgcagctgcgattggatttgcaagcgaaggagcaggaaggtaatgacacaaactctgagcgcgagctgcgtgttcctcgaggggatgatcggggtggaggaatggagcgtggaagagatcgtagagagcagtggggtggaggaagagagaataggacaggcccatttccgaagtggacatttcccaagtttcagggcagtgatccgggagtctg

SEQ ID NO: 31951 - DNA, 816 bp, Zea mays
  Peptide Sequence Number=SeqID_73730
atggccgccaccacgccggcgcctccctcccacggcggcgggcgcaacggcaccctccctccgccgctgccttccaacgagtccttctccaagttcttcgagtcctggatctcggagcagtcccgcgacctcgaggagctgcgcgccgcggcgtccgcggacccccccgcgcccgagtccgagctccggcgcctcgtgggccaggtgctcggccactacgcgcagtactaccgcgccaaggcggcggccgcggccgacgacgtgctctgcatgttcaccccgtcctggacctccaccaccgagaacctctacctctggtgcggcggctggcgccccaccgccgcgatccagctgctgtacaccaagtccgggatgcagctgcagcaccagctccccgccttcctcgacggcgggggcctcaaggacgacctcggcgacctcggcgccgcgcagctccaggccgccgaccagctgcagcgccgcaccatccggagggagcgcgagatcgaggacgccgccgcgagcgcacaggaagcgctgacgacggcgacgatggtggagctcgcgggcggcggcgggagggacgcgggggccatggaccgggagatgcaggcgaaggccgcggggatgaggcgggtgctggagatggcggacgcgctgcgcctcgaggacgatgcgcgaggcgtcaatttatctcacgcaacaatttcacgctatggcgccaacacgtacatatggcgcgacaagggtcgtcatgttagcggaatggaggttctatcatatcgcgctagcgaccatgcagatagtttggcgtga

SEQ ID NO: 31952 - DNA, 138 bp, Zea mays
  Peptide Sequence Number=SeqID_73731
atggcttcagcgagcctctctctgtctctatctctgtctgtctatctgccgtatctcatggtgtgctctcatcgacgctggcctcctggcacgtacctgttgacgtcaacgacggtatgtagccatgcaataatgtaa

SEQ ID NO: 31953 - DNA, 1158 bp, Zea mays
  Peptide Sequence Number=SeqID_73732
atggcttcggattattaccagtctgatgatttgctgaccagtgaagagcgctctatcaggatgaaggtcaggggtattatggaaaaagaaattgctcccattatgtcagcgtactgggaaaaggcagagtttccatttaatgccattcctaaacttgcaagccttggtgttgctggtggtacaataaagtttaacatcaatttaagtgctccaatatttctcaagtttgatgcgggtctggcttactgcagggttatgggtgcccaggactttccattactgccagtgctgttactatgtcagaaattgcacggaacagctctttgtggatccgaggctcagaagcagaagtacttgccatcccttgctcaacttactactgttggctgttgggctttgacagagccaaactatggaagtgatgcgagctccttgagaactatagcgaccaaggcacctggtgggtggcacatagatggtcaaaaacgctggatcggtaacagtactttcgccgatgtgctcgtcgtgttagccaggaatgcagacacacaacagctaaatgggttcattgtgcggaaaggagctcctggcctgaaagctacaaagatcgagaacaaaattggcctcaggatggttcagaacggtgacatagttttgaacaaggtgttcgtccctgacgaagaccggttgccaggcatcaactcgtttcaggacatcagcaaggtgctcgccatttcacgcattatggtggcatggcaaccggttggcatatcaatgggggtcttcgacatgtgccaccggtatctgaaagaaaggaagcagttcggagtccctctggcggcgtttcagctgaaccaagagaagctcgcccggatgctcggtaacgtccagtcgatggtcctcgtcggctggcgtctctgcaagctctacgagtcggggaaaatgacgccgggccacgctagcctagggaaggcttggaactccaggacggcccgcgaggtggtctcccttggccgagagctgctgggtgggaacgggattttggccgacttccttgtagccaaggcgttctgcgacctggagcccatctactcgtacgagggcacgtacgacatcaacagcctggtgaccggcagggagggaactggaggcgaataa

SEQ ID NO: 31954 - DNA, 896 bp, Zea mays
  Peptide Sequence Number=SeqID_73733
gtgcaccaggtatgactagcagggtcccaacagggagggcttactatcctgtggttggaagcagcagcagcagctcaagtgttggtgctgtcccaactatccacggatcatctggcgctgcaatgtttgctaacggtggctatgttcctagtagtgttcatgctggaactgttccgatcttccctaacccagcgcctgctacttcatctggctccagagccatgccccaccagatggtcattcagagtcatccagctgctacttccgcagcaacatctacatccatgcggaccgcccaaccatcattacctgccagaaccgcagcggcttccagacatgcaaggcatgtgtcagcagggcttgccaacaacggaaggtacagaagggccaggagctcttactacaggcttcatccattgatggtagaggcagaggtagatagcctttttcttccctactgtttcaatgaagttgagtttaagtctttgtcgaacctgaaactgatgttgctgctggtcgtgaagcggttcatgatggaccacttggtcttctacgaatcgagagcagcagctgctgacccccacagggacatgagactggacattgacaacatgagctacgaggacctgttggctctgggagaagctatgggcaatgtcaacacaggcctggccgatgaaaaagtttccgagtgcgtgaaagaagtggtctgctgcagttctgaccacacgcagatggaccaagacgacggaagctgcgccatttgcctggaggactacagagacaaggaggcgctgggaatactcaagtgcaggcacgacttccacgccggctgcatcaagaagtggctgcagacgaagaactcgtgcccggtgtgcaaagcggccgcggcctag

SEQ ID NO: 31955 - DNA, 732 bp, Zea mays
  Peptide Sequence Number=SeqID_73734
atgcagagactcgtgcgcgtcctcgtggtgctgggcgtggccgccgcggcgtcggcgcagggcccgacggcggcgccaacgacgcccacgccggcaacccccgcggcgcccgcgcccgcgacggcgtccagcaacatcacgggcgtgctggccaaggccgggcaatcgacaaccaggtcgccaacggcgggaacggggttcacggtgttcgcgcccacggacaacgcgttccagtcgctgccctcgggcacgctcaactcgctgtcggaccaggacaagaacgcgctggtgcagtaccacgtggtgtccaccgccatccccatgtcgcagttcgacaccgtcagcaacccgctccgcacgcaggccggcagcgcctcgccgggggagttcccactcaacgtcacctcctccgagggccagcaggtcaacgtcaccacgggcgtcgtcaccgccaccgtcgacaactccctctactcgggcgacagcctcgtcgtctaccaggtcaacaaggtgctgctccccatgaagctcttcggcgccgcggaggcgcccgcgcccgcgccgctcgcgccggccaagaagaagggcaagacgccggcggccgtcgccgactcgcccgacgcggcggaggcgtccccggacgccacgaccacgtcgctcgcgcccgcgaggctgacgcggggtggcctcgccacggctcttgcgctcgccggcgtttggtgggggctgtag

SEQ ID NO: 31956 - DNA, 303 bp, Zea mays
  Peptide Sequence Number=SeqID_73735
atggatggttgttctagggacccaaactatgccactgtcgttgttgaccatccggaacctggagagttcgtcaagaacgcgcaaggcccctacctggcaccaaccgtcagtgtttcgaaccttcgctccgacaagctaaaatgggggtcgactgtcggtggctccctcgagaaggagccactataccgtggtaaaactgggtgtcttaccccggcgaggccgctttgtccgtacgtgtcttgctgcctagttgtctctgtttgtgctcattatgacggatggtgtgagcggcacgggccctag

SEQ ID NO: 31957 - DNA, 150 bp, Zea mays
  Peptide Sequence Number=SeqID_73736
atggccaacgcaggcgcgggcgcgtgcgcgagcgcgcttctgcgcaagaaaaatcctaaaattgtgaaaccaaatttcctagacttcttattttctctagaatttaataaaaatagtttcatgaattttagtttaaataaggaattttag

SEQ ID NO: 31958 - DNA, 405 bp, Zea mays
  Peptide Sequence Number=SeqID_73737
atgggcaagagcaagaaaggtggtcgttcctcacaccattccggcgataagcggaaacatgagccgactcctccctcggaggacttcggcgactcggagtactcggaggaggagttctctgagtcagagggctcactggtccctgcctctcccccagcgccgtatgatgattcagacgactctcaggggatcgccgcagaggtatggacctacatccgggctgtcgagctcgccgggctcgagggctcggatgagtcggaggtctcctcggacgaggagaactcctcggactcgttcgaggagagcggcggtgacggcgatggcgagggcgacggcgacgacgaaggcggcggcgaaggtggcagcaagggcagcagcaagggcagcaacaaggccagtggctag

SEQ ID NO: 31959 - DNA, 1476 bp, Zea mays
  Peptide Sequence Number=SeqID_73738
atgagtttgatatcccagaacgcggtccagaagcgctgcctcagaaaaagtgaagctgataatggcaatgatgaggacattggctctccgacctctatagttgcagaagttgggaaggaagcaaaattgaagaatcacaataaggaaaggaagaagaaaaagactaagttgttggaatcccagcagaacaaagaggaagaggagatgcggcagctggagagctcattgtttggttccctttatgctccactagagtttggcactgaggtaggggctgcagtagctcctgaccgggatgcgcctttgtttttcacagataggtctgctggtggtggcatggattattttcctacatatgaggaggatatggcccatgaagatgaggaagacatggtgggtatcaagaggaggaagcctgtatgggtggatgaggaggaagaaatgacagaggtggacattgtgaaggttccaaggttgaggaagctgagaaaagaggaagatgagcatttgatttcagggaaagagtatgaggccaggttgcgtggtcagcatgcgaaattgaacccctttactggctgggctgatatggaccagaaaacttctcttcctgctgcgtcagatggtttggacaagcatctgaggtttttccagattgatggaaagagaaaccccaagatccagagcatatttattggggactgtccagtacacaaggcttcttttctacccgatggctctgaggtgatcctatcaggcaggaggaagttcttctactcatttgacctggtgaatgctgctgttagcaagattggacctttgacgggacgcgaggagaaaagcctggagagctttgagatatcacctgattcgagaaccattgcttttgttggcaatgaagggtacatccttcttatttctgccaagacaaagcagctcatcacaaccctcaagatgaacggaagcgtgcgttcactggcttttgcggatggtgggaaccagctactgagcagcggtggagatggccatgtttaccactgggaccttggaacaaggaaatgcatccacaaggcaacagatgacggttccctggctggcctctcgctctgcacctcgcgggatagctctttgtttgccacaggctccagcagcggcatcgtgaatgtgtacaagagggacgattttctcggcgggaagaggaagccgatgaagactatcgagaacctgaccactgatatcggtgagatgaagttcaaccatgacgcccagatcctggcgatcagctcgaggaaagagaggaacggcatgaggctcgtgcacgtcccgtcgttcagcgtgttccagaactggccggggcctcggtttagtctccactatccacggtgcctggatttcagccccggcagcggcttcctgtccgtcggacatgcaggtggaaaggtcctgctgtacaagctccaccattacgagaatgcatga

SEQ ID NO: 31960 - DNA, 680 bp, Zea mays
  Peptide Sequence Number=SeqID_73739
acgcccaggcgccccactcccctgacgacgacgacaacgactgcggccgcggcaacggcgccgccgccgagcccgacgctgtccccgccgtctgcgcgcagggctcctgcgcggccaaggcctcgtctcttgagtccggtggcggcggcggcggcggcagcggcagcggcagcagcatctccgagtacctcaccaacatctgcccaggctggcgcgtcgacgacctcctctttgacgactcggcgttctcagcggcatcggtatcgtcctcgccgtgctccgttctagtatttctatatccacagccgtatcacgctaacgtacggatcggtctctcgcggcggttcgaacggaagcagaaggccgacagctgcgacgacgggcacgagcaggtgccgtccctggacgccgacctcttcgacgtggtggctggcgccggctggccggggaagcgcggcagcgcgtggtcaggagtcggagctctgggcttcgacaaggtgccggcctccgttgttgtcgtcccgacggcggccaagcaacagcaggggtgcgtgagggagaggacctgggactcggacagcgacagcgacgtgttcgcggtgccggagctcccgcaaccaccgcaggccaagaaggcgcggccggcgccggctccggcgccgactttctggtgcttctga

SEQ ID NO: 31961 - DNA, 182 bp, Zea mays
  Peptide Sequence Number=SeqID_73740
cgcctggtcgaccaaggcttcgtttcgaggtcaccttcgtcaacaccgaggtcgaccacgcgttggtggtagcggcgctagctaggcggcggcacggcatccacctggcgtccatccgagacgggcaggccgacgaggacgacgaccgcaaggacatcatcaacaagctcgtggacgcctag

SEQ ID NO: 31962 - DNA, 114 bp, Zea mays
  Peptide Sequence Number=SeqID_73741
atgacaagggaagctggacaagaatctggatcctcagagcgcatgggatggttcaactacatgagtggaagctctgtgcctcaaaatttaacctcctacataaaatgcatttat

SEQ ID NO: 31963 - DNA, 129 bp, Zea mays
  Peptide Sequence Number=SeqID_73742
atggcctggtctcatggaacatctccattatttccaggctttgctggctcagttttagtggctctgcgtcaggcattcagcattcctgtgcttaatttagttattcgttattctttgctacttccttag

SEQ ID NO: 31964 - DNA, 273 bp, Zea mays
  Peptide Sequence Number=SeqID_73743
atggcagcaagagatgccgagttcaagagccacgggaagacacgtcgctacgcccatctctaccgccacaatcgtatccaagaaaccgtcatcgcacgcaggcgccagatcgagcgtgtctcgtgcaggcctgtccagtggatctttgctgatgggcgatatcttgcgagctgtgacctcgtcagtatcccgatccgccgggataaaacaacttcttcggatgacagaatccgtggacctttcatatgcgacgacccagtttggatcttgtga

SEQ ID NO: 31965 - DNA, 522 bp, Zea mays
  Peptide Sequence Number=SeqID_73744
atgaaggacggaacgtcgtcggggggaggggcgttcgctgcgggcagcgatccaaggcagccgtcgacggcgaagccatacgcgccgccgaagctgtcgccccaggacctacccatcgactatgcaggcttcctcgccgtcgccttcggcgtcctcggcgtcatgctccgctacaaggtgtgctcgtggatcgcaatcatcttctgcgctcagtcgttggcaaacatgaagaactttgagaacgatctgaagcagctttctatggccttcattgccctcaaggtccaaatctccctgattagtgttgatccgtcagtccgcctatttgacatatacatgacaccagaagacgccactcctgtcttaatggagattctatggctggcaacacttctgttcagtcgggcacctgattcccatcgtggaaaagaaaagaatgtgtcattcctctccggtggatgttgtttgattttgaattttataattgtgccacttgaggttcataacttcaaatatcattaa

SEQ ID NO: 31966 - DNA, 1650 bp, Zea mays
  Peptide Sequence Number=SeqID_73745
atggccgcagggttcatcaaagaggtattccatcccgaatggcttgccaaccctgtgattgtgaaaaagaaaggagggaaatggcagatgtgtgtagactacactggtctaaacaaagcatgtccgaaggttccctaccctctgcctcgcatcgatcaaatcgtggattccactgctgggtgcgaaaccctatctttcctcgatgcctactcagggtatcaccaaatcaggatgaaagagtccgaccagctcgtgacttctttcatcacaccttttggcatgtactgctacgttactatgccgtttggtttgaggaatgcgggtgcgacataccaaaggtgcatgaaccacgtgtttggcgaacacattggtcgaacggtcgaggcttacatcgatgacatcgtagtcaagacgaagaaagcctccgacctcctttccgaccttgaaacgacattccggtgtctcaaggcgaaaggcgtaaaactcaatcctgagaagtgcgtcttcggagtcccccgaggcatgctcttggggttcgtcgtctccgagcggggcatcgaggccaacccggagaaaatcgcggccatcaccaacatggggcccatcaaggatttgaaaggcgtacagagggtcatgggatgccttgcggctctgagccgcttcatctcgcgcctcggcgaaagaggcctacctcagtaccgcctcttgagaaaggccgagtgcttcacttggacccctgaggccgaggaagccctcgggaacctgaaggcgctccttacgaatgcacccatcctggtgcctcccgctgccggagaagccctcttgatctacgtcaccgctaccactcaggtggtcagtgccgcgattgtggttgagagacgagaagaagggcatgcattgcccgtccagaggccggtctacttcatcagtgaggtactgtccgagaccaagatccgctacccacaaattcagaagctgctgtacgcagtgattctgacgcggcggaagttgcgacaatacttcgagtctcatccggtgactgttgtgtcatccttccccctgggggagatcatccagtgccgagagaactcgggtaggattgcaaagtgggcggtggaaatcatgggcaagacaatctcgttcgcccctcggaaggccatcaagtcccaagtcttggcggactttgtggctgaatgggtcgacacccagctcccggcaactccgatccaactggaactctggaccatgtttttcgacgggtcgcggatgaaaacaggggcaggcgcgggcctgctcttcatctcgcccctcgggaagcaccttcgctacgtgttgcgcctccatttcccggcgtccaacaacgtggctgagtacgaggctcttgtcaacgggttgcgcatcgccatcgagctaggggtccgatgcctcgacgctcgcggtgactcgcagcttgtcatcgaccaagtcatgaagaactcccactgccgcgacccgaagatggaagcctactgcgacgaggttcggtgcctggaagacaagttctacgggctcgagctcaaccatgtcgcccgacgatacaacgagactgtggatgagctggctaagatagcctcggggcgaacaacggttcccccggacatcttctcctga

SEQ ID NO: 31967 - DNA, 1374 bp, Zea mays
  Peptide Sequence Number=SeqID_73746
atggcgtccgcggcggcgtgcgcaccgaagcgctgctactacgaggtcctcggcctatctcgcgactgctccccgacggatatcaagcttgctttccgccgcctcgcgctctcgctccaccccgacaagcagccccccggctccgacctcgccctcgccaccgccgccttccaggagctccagcatgcccactctgtcctctctgacccgcaggagcgcgcctactacgactcccaccgctcccagatcatcttctctcacccagcctccgccggcgccaaatccgcttccaccgtccccgatctcttcgccttcttctcctcgtccgctttctccggcttctccgacacgggccgcggcttctacaaggtctacggggacgtcttcgacagggtcttcgcgcaggagcttgcctatgttcgccggatgggggttcccgagcccgctgcgccgccggtcattgggaaccttgattccccctatgcgcaggtcactgctttctacagttattggcttgggtttggctcgggcatggatttcggatgggcggctgcgtgggacgctgcgcgtggggaaagtcgccgtgttcggaggctcatggaggaggacaacaagaaggcgatgcgtaaggcacggcgggagtacaatgacgctgtcaggggccttgttgccttctgcaagaagagggataagagggttgtggacatggttttaaagaagaagctggaggaggagaagagaaaggcagaggagaaggagaggaggaaggaggaggacaagaggaagaaggagcgagccatggcatatcaagaacatgagtgggcgagggcagaggagggactgtatgatgaagacgaagaagaggagatgagggccaagaagagctatcgtactgcgcgacgtgcaataaaagttcaatcggacaaacagtggaagaaccacgagcagtcgaagaagcataggaataagattgctgaactgaggaaggcatttagggaggaggagtctttgaaaaaggcagaggagggggaaggtgattggaatgaagttgatatggggttcgattttaagcctacacaggagtcagatgatgcgagtgcattttcagatgctgcagaagagttagctgaagaatttgaaagtaattatgctggcaatgggcatcatggtaaatgtgaggttcagcctgagggttcggtccatgttaatgatgttgatgatatcatggaagggccatcctcttttaatgtcaacaatggtgcagtaataatgtgttataatggctgctccatctcaggtgtaattttaagagctggacagtcttctcttgaacagaattgccccgatcttgtttggaaacagtgggagcactga

SEQ ID NO: 31968 - DNA, 351 bp, Zea mays
  Peptide Sequence Number=SeqID_73747
atgccacgtgctcaggagcgttaccatgtcgcaatgaaccgtaataggaagtctgtccatcgccggaagctctgcctcagtgaatgccacgaaaacgaagaagtagtagttgttgaagacgaagttgcaccacgagttgaaattccacctgtcggggacagtttctactttgacatttgtggaacagatcccgagtcccctacaacacaaggtaagccccgaccaataccagaaaggcgaacacgcaatgggagtggagagatggcgagagtagcgtgtaccctccatggcaagacgctggacggtggtgtatctatgctctcggttggcgtgaacccagtctggtcttga

SEQ ID NO: 31969 - DNA, 1134 bp, Zea mays
  Peptide Sequence Number=SeqID_73748
atgaccattcaaattggtgaagtacttcagatgcaaattaaggttcagagaaagttaaatgaacaacatgagggagagatgagagagagcgactcctctgcgccggtgcccactccggggccggcggccacttccttgccgttcccttcgcctagggcggtgaccaccactcaaacctccgttgcggccgtgttccccccgcgacgaccttcatcgtctcctctttttcggggcgatgctcgtttgaagtctggcgggaggaccaagttcgagcgatggggaggagttagcccgggcagcgtgccatcctctgggctcccctttcgcgacgacgtgttttcttccagtcctccggccaccgctgcggttcgtcttcagccggagtcccgtccgcctccccttgtttggggttccaccttccgtatgacgcctcgactccctacgggggcggatgccgaggggtgggagttggtggagtcgaggagggcgaagcggctgcgtcttcgggcgcttcgggtccgtcgtcatgggccctccccctctgccttcaatggcgtttgcttcaactgcctttcacctcgtcacctggcccgccattgccgcctggattcaagatgtttcaattgcctcgcgttgggccataaagctgcgtcctgtcccggggaccctgccacctctccggtgcctcgagttcattcctccaccgctgtgcaccctgtctgggcgaggcttggcggctcagtggcggccggttcctctgtttggtcgcggcttggtggcacaaagggcccggggcgccccatctcggtctggggaaggatttcccctcccatggatcgctcggacgcggggaggcagcggctagttcatgctcctatgaggagacttgccccctcctttgaggagggcaacctggttccccatcgtttggagcgcactacccaggtttcgccctctccgggtgttgctggttcgtccggttcctcccttgtatcctggggttggagccatgctatgtcatctgctgaggaagatctgaagaaagcgggtggtgatctcggtgatcagcgagcgtacaactgttccagggaggaggtggcagccctgcttgcgccctgggtaaagttgaggaag

SEQ ID NO: 31970 - DNA, 213 bp, Zea mays
  Peptide Sequence Number=SeqID_73749
atggcgccccagctcgcggcgtccctattttttttcctgtcgtcggcgctctgctcgctctctggtcttcctgcgcgctctccactcggcttctgcttattccaatgccgcgcatggtatgtatgccgcgacgattattccgcttgtagctcagacacgtatttagttgacgcttgtaggaatatggggatacatgtagcatgctgcatctag

SEQ ID NO: 31971 - DNA, 1155 bp, Zea mays
  Peptide Sequence Number=SeqID_73750
atggcgtccgcggcggcgggcgcaccgaagcgctgctactacgaggtcctcggcctatctcgcgactgctccccgacggatatcaagcttgctttccgccgcctcgcgctctcgctccaccccgacaagcagccccccggctccgacctcgccctcgccaccgccgccttccaggagctccagcatgcccactctgtcctctctgacccgcaggagcgcgcctactatgactcccaccgctcccagatcatcttctctcacccagcctccgccggcgccaaatccgcttccaccgtccccgatctcttcgccttcttctcctcgtccgctttctccggcttctccgacacgggccgcggcttctacaaggtctacggggacgtcttcgacagggtcttcgcgcaggagcttgcctatgctcgccggatgggggttcccgagcccgctgcgccgccggtcattgggaaccttgattcgccctatgcgcaggggccttgctgcctttctgcaagaagagggattaagagggttgtggacatggttttaaagaagaagctggaggaggagaagagaaaggcagaggagaaggagaggaggaaggaggaggacaagaggaagaaggagcgagccatggcatatcaagaacatgagtgggcgagggcagaggagggactgtatgatgaagacgaagaagaggagatgagggccaagaaggagctatcgtactgcgcggcgtgcaataaaaagttcaaatcggacaaacagtggaagaaccacgagcagtcgaagaagcataggaataagattgctgaactgaggaaggcctttagggaggaggagtctttgaaaaaggcagaggagggggaaggtgattggaatgaagttgatatggggttcgattttaagcctacacaggagtcagatgatgcgagtgcattttcagatgctgcagaagagttagctgaagaatttgaaagtaattatgctggcaatgggcatcatggtaaatgtgaggttcagcctgagggttcggtccatgttaatgatgttgatgatatcatggaagggccatcctcttttaatgtcaacaatggtgcagtaataatgcgcctcatagaggacatcgagcaggtcattctgctagcctccgactag

SEQ ID NO: 31972 - DNA, 951 bp, Zea mays
  Peptide Sequence Number=SeqID_73751
atggattcgagaggccgtttgaggactgggcatccacagcatttttttggtgaagcacgtcttcccccgcccgacatcagtgttcgcgtcctctctcccgcaatctccgctctctcctacaatccccgtcctctctccccggatcgccgcttgaccatcccacaccatcagtcacgtttatggcacaccagcatccgcatctatggcacaccagcatccgccaccaggaaatctcgcgtctatggcacaccagcatccgccaccacgcgtcgcgtttcctatcccacaccagcatcccccaccacctcctcctcctcctcgccccacatgccccgagatctcgcatccactccgtctatggaaggccctcacaccatcagcggaaagggcgcacctcggcgcgcccagccatcctcggattccgcgccccatcctcggattcgatggcaaaataggcatccacaaccatgtgcccccgccaggcgaggccacgcgtccgccccgcgcccccacctcaccgcggcctccacgttccgcatcccaccgcgcatgcctgagatctccgtcgtccccctccccctctcatgctcgtccctcgccctcgccctcgccgtcgctcgatatctctgtcgctaccccctcgcctgtctatatttaacgcagttgagtcacgacctcgtgtcgttgtctagcccggtgactccctgtacaccctcgccctctttcccttcctactcggccacaccttccaccctcgtcgcaaccatcagacacgctatcattgccgtcgtccactggagggggaaggtccccgccatcgacgctatcatccggtgggtgcgcgatctacatcatcttcacactcattgggtctccaatcagagccgtggtgaatgtggacggcagaggctggaagagggtgtctgcttctcctcgtggcatcatctgtag

SEQ ID NO: 31973 - DNA, 450 bp, Zea mays
  Peptide Sequence Number=SeqID_73752
atgggcaagaacaagaagggtggaagttcgtcgcaccattccggtgacaagaggaagcgcgagccaagtcccccctcggaggactttggtgactccgagtactcggaggaggagttttcctccgagttcgagggtgcgctggggatcgccgtcgaggtgtggacgtacatccgggccatcgaccgctccgggctcgagggctcggatgagtcggaggtctcctcggacgaggagaactcctccgactcgtccgaggaggagagcggtggtgacggcgacgatgagggcgacggcgacgatggaggtgacagcggtgatgacggtgacggcgacggcaagggcgacggaggcgatagcggcaagggcgacggcgacggcggcaagggcgacgacgacggcaagggcagcggtggcagcagcaaggccagtggcaaagcgccactggtttaa

SEQ ID NO: 31974 - DNA, 450 bp, Zea mays
  Peptide Sequence Number=SeqID_73753
atgggcaagaacaagaagggtggaagttcgtcgcaccattccggtgacaagaggaagcgcgagccaagtcccccctcggaggactttggtgacttcgagtactcggaggaggagttttcctctgagttcgagtgtgcgccggggatcaccgtcgaggtgtggacgtacatccgggccatcgaccgcttcgggctcgagggctcggatgagtcggaggtctcctcggacgaggagaactcctctgactcgtccgaggaggagagcggcggtgacggcgacgacgagggcgacgacgacgatggaggtgatagcggtgatgacggtgacggtgacggcaagggcgacggaggtgatagcggcaagggcgacggcgacggcggcaagggcgacgacgacggcaagggcagcggtggcagcagcaaggccagtggcaaagcgccactggtttaa

SEQ ID NO: 31975 - DNA, 216 bp, Zea mays
  Peptide Sequence Number=SeqID_73754
atggcacttcagctcgaactcgtcaccttcgggaaaatcagagggcgctccgctataattcaccggactgtccggttggtcagaaaatgcaatttacatcgggtttgtcatctcaaggaaatgattttgagggtattttatcggatttgcgatgggaagaagaaggacctcaacatgtacccaatgggggtgttatgtacctcaaacttggattag

SEQ ID NO: 31976 - DNA, 138 bp, Zea mays
  Peptide Sequence Number=SeqID_73755
atggctgggagcgtggcgcgcacgcttgggctcgccgtcgggtgtgcacgcgccgccgtcctagctgcggtaaggaagaagatgggcgccggcgccgctgtccctggggaaacgcaccaactcggattgcctatataa

SEQ ID NO: 31977 - DNA, 678 bp, Zea mays
  Peptide Sequence Number=SeqID_73756
atgatcagagccagtgacggcgtcgacgctcatggcggggtctccattgttgaggccggtgaatcgagcgccatcaggagcaagaccgggagctggttccacaactcgatccgttccgagaaacgagacagctgtgctcccctgccccgcggcgccgccgccagcctctcgtgcgccatgccaccgcgaaagcgcccggcgctgccgccggatgagccctccccttcctcgaagcatcaacctgaagcacatccgtccgaaccctccaaaccctcacccgattccgagcagccgatcatctcggcggcgatcctcgcccaactgcccccccaggagcgcctggcgtacaagctcatcttcgaggcgggcaacaagggcatgtggatgctggatatccgcaagaagttgttgatgggccccaacatcgccaccaaggtcgtgcgtaccctcgtgacgcggcggctcctcaaggaggtcagcgatgtgcgccaccgtagcaggaagatcttcatggccaccgacttcccaccttctgccgagatcaccggcggcaactggtacttcgacggccgtccttggacactgacgccgttactcacctgcgcgctcgctgctgccagcgctaggtcgagaggttcgatgccctcaccggtgcaaatgatccatcacgggttttaa

SEQ ID NO: 31978 - DNA, 258 bp, Zea mays
  Peptide Sequence Number=SeqID_73757
atgtgcctgagtttatataatggtctagacactgtgagcatggatctggagcaagttcttattggtctgcaacctctacttgaggattatgaagcccttggcttgtacgatgatttccaatccgatggtgatgttcatggtgattgtaatgagcagtgtgtttcagatgaagacaactctttggactccgaggagatcaatgatcgtcgtctaacacatttcagtgtatctgagctatttgtttctgagagagtttag

SEQ ID NO: 31979 - DNA, 489 bp, Zea mays
  Peptide Sequence Number=SeqID_73758
atggcgggtgtggatctgagcttggcgcctggtggccaccccccttctgggataaaagcaggtccctccgcgaccttctccctgcgggccgctcaaccaaagcgcgtggcagcaagaggaggccgagaactcatcaccacaggagggcagcagggagagagagagagagccgatggaagccgccatgggagagaccggggaaccccgccgctcgagctcagtcgcaggatctgggcgactcgctgggggtacgttgatggtgttggcggcctcgatgtgctcagcttaacggttggcgttagaggaattgctcgccggagaaccatcttcgtcgtgttgccgcatcctgccgagggcatcatcgaatccttcgccactgcctgtaagataccccctaatcgattcgcttgtgtctcaatttcctcttgcaccgagtcgtggtacacaaagatcactaggtcttcgaatccgtgcacgctggcaggctag

SEQ ID NO: 31980 - DNA, 177 bp, Zea mays
  Peptide Sequence Number=SeqID_73759
atggcggaaagaggaaccgacttaaaggggaaaaggttgtctagtccccgttggattgtccataagtcaatagtaaatatagagggcatgaatgtatgtccttcacaaccttcatctggagatcgttatatcctcagggaaataatgcttcaaaggatgaaggacattgaccattaa

SEQ ID NO: 31981 - DNA, 121 bp, Zea mays
  Peptide Sequence Number=SeqID_73760
atgctcttccaatttggctgctggctgctcgcggcgattccctgcggctttgcgacggaactgctcgagataaagtccaaagagtcgtccctccacgtgctgcttcttgctgggaacccag

SEQ ID NO: 31982 - DNA, 300 bp, Zea mays
  Peptide Sequence Number=SeqID_73761
gaacatctctggttatctagagttggcggtggccttttcattcatggttgcctgcactcatcctcggagggttgcagcaatgtcggtctccaggtgcattcttcatcacttaaaggatgcagagggctagcctatctgcgactccgccgagcgctgtcgcgtgctatggtcccaagggggattggtgtcaaggcggtggaggaggagcagggtcgtggtcctgaagcacgggaggaagagcacaacatcacggttagtgagatccccatatcacaaatgatttcagtttgcacttattaa

SEQ ID NO: 31983 - DNA, 336 bp, Zea mays
  Peptide Sequence Number=SeqID_73762
atggatgctatcgatatgcggggaatggtgttcctaacctggcagaaatgctacataaaggcactcaaagactcaccaggctcatactatacagtatggaggttgaactctatgccaagaagagagaaggtgccctcaaagttgaacacaaagatctccccaagaccatatggaggcctcgagaagcttcataaactatcattgagcaaagttgatcaagggttgccttgctgtggtcctaacacaaaagttgggggagtggcatgcatcgagtggtcgcattacccattgtccgtggaggctgtaaggaaaatggaccccgggccatttggctaa

SEQ ID NO: 31984 - DNA, 591 bp, Zea mays
  Peptide Sequence Number=SeqID_73763
atggaccaaatacaaatagagggtgcatttgtcggttcaaaccaagacctgtttcctggtccagctcccactatggttctaaccagcaatatttcggttcagaagaccttgtacgaggttttatctgtgagtgaagacgctacatacgatgagatccgcgcagcatacaggtctgccgctctgaacacgcaccctgacaaagcgcagacaactctcgagtcatcatccgtgccttccactgagcaacaggaattttctagcgtgcagaaagcatgggaagtcctacgacatcctacatccagagcatattatgacaagcagctgcagtcatccagacaaagcatcgagatcatcgcatctgaaatccaagtcggggacatgatcgtcgagagcgctgctggtgctctagagctgctgtacccatgcaggtgtggcgattatttctccatcacttcgggtgaacttagcgggatggggattgtcgtcactggggatggagaagagctgaatgaatgcctgttgtttttgatagctgctgatgagaaagaagtgttggctgcggccgttggtgttgtattgaataacttgtga

SEQ ID NO: 31985 - DNA, 435 bp, Zea mays
  Peptide Sequence Number=SeqID_73764
atggcgctcgccctcgccatcttcttcctcgaagggtgtcctaaggccgtgcaagaactccgggaggagcatctcttcattgctaggagacaggctaagaggggcgtccaaattgagctaggaagactacaaggaaatggttttcacgcagtgtctataagggtgaacacccgttgtgcctgcaacattctgaaacaaagtggcgatgtcaagatgtactcaagggatagtgcgagcctggcctacggtgttggcttaattgcctacggtgaatattgcaagcagaagctgaaggctcctgattcagagttgcatctccagaaaggcaggagaacaagtgaagacttacgctctgagagcgctactgactattttgctatccataatcgttgttgttggtttgcacctattgtggaaagaactgcaaaagcttga

SEQ ID NO: 31986 - DNA, 1182 bp, Zea mays
  Peptide Sequence Number=SeqID_73765
atgctggaaattttgtgcagagttgttcacacactcagccataattttcgcaatgctacaagacttgagcgtgtgcaactgagatttcctatcaaagcgcatagtgctctggttaaaataatatatgctggcgtaaatgctagtgatgtcaacttcagttcaggacgttattttagtggtaatcctaaagaaactgcttcacgccttccatttgatgctggttttgaaggtgtgggaattgttgccgctgttggagattcagtcagtcatatcaaagttggcactcctgtggcccttatgacttttgggagctatgctgaattcacggaggttccagccaaacatcttcttccagtgccaagaccagaccctgaggttgttgcaatgttgacatcaggactgactgcatcaattagtcttgaaaaggcaggacaaatgacatctgggcaagttgttttagttacagcagctgctggtggaacaggacagttcgcagttcagctggcgaaattagcaggcaacaaggttgttgccacatgtggaggtgaaagtaaagctgaacttctggcttccttaggagttgatcgtgttatcaattacagaaatgaacgagtcaaagatgttctgaagaaagagtttccaagaggtgtagatatcatatatgaatctgtaggtggggaaatgtttgacttgtgcttgaatgcacttgcagtccatgggcatctcattgtaattggtatgatctcccagtatcaaggagaggatggctggaagccaaagaactacactggactatgtgagaagattctagctaaaagtcaaactgtgatgtcgccgctatttatagattggctgttggaaacgacttgtaaaaagaaatggagggagtacctattagaagatgaactttctatattcccatattgtgacctatatgtgcatcagcagcaacacttcgggcatccaactattcttagacgtgaaactgaatgtgccatatcactgggagaaggaatgcaacatgtagctgaatattatctaacaaattgccttgctgaactttacatagaaggatcaagtgtgatcctgtggagcagccactgtacacctggacttgcatggtcaaagcttgtcttggccttggttatgccattgcctgcatggcagaatgagctgctgtag

SEQ ID NO: 31987 - DNA, 231 bp, Zea mays
  Peptide Sequence Number=SeqID_73766
atggggagacggaactgggtggagacccaggtgaagaagcaaactgagtacaggggaggtccagaggtcacaatgaaccaggtcaaaagcctgctcagccctatagaaagatgtaggaaaagggagacaggtcctgggtggccgagacgacgatgccaagtggtggaggtggcggtggagaccaggacgggaggtggagacacgccggtggacgatgcccggagtgtgtag

SEQ ID NO: 31988 - DNA, 2097 bp, Zea mays
  Peptide Sequence Number=SeqID_73767
atgcccggcataccgagggatgtcgccgagcactcgctggatattcgggccggagcccgacccgtaaagcagcctctgcgccgattcgacaaggagaagcgcagagtgataggcgaggagctccacaagctaaaagaagcgaaaggcgtcaatctcaatcccgagaagtgtgtcttcggggtgccccggggcatgctcttggggttcatcgtctccgagcggggcatcgaagccaacccggagaagattgcagccatcaccagcatggggcccatcaaggacttaaaaggcgtaaagagggtcgtgggatgtctcgcggccctgagccgcttcatctcacgcctcggcgaaagaggtctgcctctgtaccgcctcttaaggaagaccgagtgcttcgcttggacccctgaggccgaggaagctctcaggaacctgaaggcgctcctcacaaaggcgcctatcttggtgcctccagctgacggagaagcccttttggtctacgtcgccacgaccactcaggtggttagcgccgcgattgtggtcgagaggcaagaagaggggcatgcattgcccgttcagaggccagtttacttcgtcagcgaggtactgtccgagaccaagatccgctatccacaagttcagaagctgctatatgcagtgatcctgacgaggcggaagttgcgacactacttcgagtctcatccggtaactgtggtgtcatccttccccctgggagaaatcatccagtgccgagaggcctcgggcaggattgcgaagtgggcggtggaaatcatgggcgagacaatctcgttcgcccctcggaaggccatcaagtccctggtactggcggacttcgtagccgaatgggtcgacacccagctaccgacggctccgatccaaccggagctctggaccatgtttttcgacgggtcgctgatgaagacgggagccggcgcgggcctactcttcatctcgcccctcgggaaacacctacgctatgtgctacacctccatttcccggcgtccaacaatgtggctgagtacgaggctctggtcaacgggttgcggatcgccatcgagctaggggtcaggcgcctcgacgcccgcggcgactcgcagctcgtcatcgaccaagtcatgaagaactcccactgccgcgacccgaagatggagtcctactgcgatgaggttcggcgcctggaagacaagttctacgggctcgagcttaaccacatcgctcggcgctacaacgagactgcggacgagctggcaaaaatagcctcggggcgaacaacggttcccccggacgtcttctcccgggatctgcatcaaccctccgtcaagatcgacgactcgcccgagcctgaggcgccctcggtccagcccgaggtaccctcggcacagcccgaggcaccctcagctcggcccgaggcgccctcggttcagcccaagaaggcgcccgggggctacacgcacctgctggtcgccatcgacaaattctccaagtggatcgaggtccgacctctgaacagcatcaggtccgagcaggcggtggcattcttcaccaacatcatccattgcttcggggtcccgaactccatcatcaccgacaacggtacccagttcaccggcagaaaattcttggacttctgcgaggatcaccacatccgggtggactgggccgccgtggctcatcccatgtcgaatgggcaagtggagcgtgccaacggcatgattctacaagggctcaagcctcggatttacaacgacctcaacaagttcggcaagcgatggatgaaggaactcccctcggtggtctggagcctgaggacaacgccgagccgagccacgggtttcacgcccagtccctgcgacgctaccacgcccgaggggtccgaccccgagacctccaggtgggcgacctggtgcttcggctgcggcaagacgcccgagggaggcacaagcacgcccccctgggaggggcccttcatcatcgccaaaattctgaagcccggaacgtacaagctggccaacagtcaaggcgaggtctgcagcaacgcttggaacatccaacagctacgtcgcttctacccttaa

SEQ ID NO: 31989 - DNA, 222 bp, Zea mays
  Peptide Sequence Number=SeqID_73768
atggagctgaagccaggcttgtcggccctcgtcaccggcggcgcctccggtatcgttgtgccgggctccatttctccaatgagcacctggccccgtagtctgggccgcctggcccgtttgagacgtttgactgctcgagcctgggtttctccttggctcgacaaaactctctgctccgccatcggcggtgctgcagctgctctagacatgcgggcctcctag

SEQ ID NO: 31990 - DNA, 858 bp, Zea mays
  Peptide Sequence Number=SeqID_73769
ccccacaaaagaaaaaaagccgccgccagcagcagcatcagctgctgcagcaagagggggaggcggaccggttcggcgcggcgcgcctcgggagcctgcttcctttgccggcctccccgctcgcggcgctcgcgcgggtggccgacgtcctcgcgctcacgctcgccgacgcgggccccgcgctcgccggtgccgaaccatgcgtcgccgcccacctcgacgcgggcgtctggttcttcgactcctgcaacgccatatccgcgggcctcgaccgcctccgcaggcgcctcctcctcgcgcgcctcgcgctccacctcgtcctctccccctccccctccggggggcgagcacgcgcgcgcgcggcgctcgcggaccgcggcgaccacccggcgccgtccccgctcccttcgctcccgttcgagcagccccgcgggcggctctcggccgccgcgcgcgtcctcgccgccgtggacgccatctcctcgctcgcggcagcggccgcggccgccgtcctcgtcggaggacccgtcactttcccccgggtatccggcggcgtcggcgacctcccctgggcggagccgttcaacgcggtgtccggccagctcgcggcgctcggcgacggcgaggtggcatcgttagacgaggccgtccggaggctcgcgtcggcgctggacgcctccggcgagggtgctgccgacgacgaggcggccgtgcgcgctgcggcgcaggaggcggagaggcgcgccgaggaggtcgcgccgctgctggaccacctgtctgacgccgtcggcggcgtgttccgcgccgcgctgggcctccgcaacgccgaggtggactccttcatggtgggacccgcgg

SEQ ID NO: 31991 - DNA, 750 bp, Zea mays
  Peptide Sequence Number=SeqID_73770
atgtcgttgcgcctcggcttccacaacctggagccggcgctcgccgcggcggccgaggcgctgttcggcacccgctccccgccgcgcgccgtcctccgccgcgcgcgcgcgctgcacgcgctcctcgtggtctcgtccctgccgtccgcgccccgcccgcccaccttcctcgtcaaccagctgctcgccctctactgccgcctctccgcggtccccgacgccctcgccctcctccgctccacgccgtgcccctccgtgatctcctacaacaccgtcctctccgctctctcgcgcaccccaaggcacgcgcaggacgccttcgggctcttccgcggcctgcactcgtcgggtctccgcccgaccgcccccagcctctgcgccgtcctccgcgccgccggcgcactgcgcgacggccgcgcgggggccgcggcacacgcgcatgcctcggcgctcggcttcctcgccagcgacattgtgccgaccgcgctgctccagatgtactccgggtgcgggtcgccgagggacgctaaccaggtgttcgacgaaatgatgacgccggatgtggtggcgtggaactgcgtgatgcactgcaacgtacggtacgattacctggaccgcgccctgcggaagttctgccggatggtgagcactgggctggcgcctacagagagcaccctttcttcggtgctgagtgggtgcgggcgctctggggacttgcaccatgggcgtgcgctacatacgaatctttag

SEQ ID NO: 31992 - DNA, 420 bp, Zea mays
  Peptide Sequence Number=SeqID_73771
atgtctatcctcctcatggctcctgttgtcgacagtgcaacccagcgtctcctggaggaaaataatcagttgcttaaccagatttctgcaaataatgaaacattcaagacagtggagaacacagatctttttctccgcacgagtaacaacatcaaaacaattttaagcagaatgagcgaaacgcctggtatcatgagtcagatgcccccattgcctttatccataaacgaagaccatataaattctcttattcaactgaacagactgcctgcctgcccaccaattcttgaagcatttggaagaagtctgcagttgtggttcgagagccgcaagctatttgctgctgtttctgtttccgttatccagcatgtagaccagagtatcagacagtggatcctggtctctgcaaatgacctgtaa

SEQ ID NO: 31993 - DNA, 204 bp, Zea mays
  Peptide Sequence Number=SeqID_73772
atggacacaaccgatccaagctcaattcccttaacgctgctgttgatgactgatagctctggtgctacttaccagcctcttattttgtttctgaactcaggatcttatgctggtcctacaagcattgctggttgtcttgaagaagatgatggtgggctcttcccaccactagcagctatagaggaaggggaaatctgtggctga

SEQ ID NO: 31994 - DNA, 303 bp, Zea mays
  Peptide Sequence Number=SeqID_73773
atgaatgaaacagcaaaggttaatgttatcaatggatcacttactaatagaactacaaatattagcggtaggtactcactgaaggaaaatcttgaggttgacagaaattatttaccaatacactcaagacaagaaatggttttcggtgatgaatacaagccagttggcaagccgatcaagaaagtcggggcagagctccaagcttctgtacttcctctgttccaaattatagacgttttagtacaaaacaacaagaagatggatattgccccttcagaaaaaatgagcggggagtggcagtga

SEQ ID NO: 31995 - DNA, 234 bp, Zea mays
  Peptide Sequence Number=SeqID_73774
atgacatatgcgtctgacacaaattcaagtgaacttttgagaaagttgattgggaggcgtccgagcatatcggtagtcctcttgtctgattacagagcaacttggtgctcccagtcccagacgccgaagaggagggccacccgcagcggcgacgacgagaaggggctgctacggctgaacctgcagagccgggtggtggagctggagcgggcgtgcaaggagatgaagggctag

SEQ ID NO: 31996 - DNA, 684 bp, Zea mays
  Peptide Sequence Number=SeqID_73775
atggcgctcgcgcccacttccgctgccgtgctcaagaccccgttcctcggggccaggcgcgcgctcgccaatgccgccgccaagcccgcgcctcgccgcgcgctggtcgtcgccgccgcggccgccgccaagaagctccccggcgacttcgggttcgacccgctggggctgggcaaggacccggcgttcctcaagtggtaccgggaggcggagctgatccacgggcggtgggcgatggcggccgtgctgggcatcttcgtggggcaggcgtggagcggcatcccgtggttcgaggccggcgcggacccgagcgccatcgcgcccttctccttcgggtcgctgctgggcacgcagctgctgctgatggggtgggtggagtcgaagcggtgggtggacttcttcaacccggactcccaggccgtggagtgggccacgccatggtcccgcaccgccgagaacttcgctaacttcaccggcgagcagggctacccgggcggcaagttcttcgacccgctcggcctcgccggcaccgtcaaggacggcgtctacatccccgacgtcgacaagctcgagcggctcaagctggccgagatcaagcacgcccgcatcgccatgcttgccatgctcgccttctacttcgaggctgggcagggcaagacgccgctcggcgcgctcggcctatga

SEQ ID NO: 31997 - DNA, 432 bp, Zea mays
  Peptide Sequence Number=SeqID_73776
atgagcccatgcccatccagcatccatgggcaggcagcaccagcagaggccccttcgctgccgaggtccctcgccggacggggggtgaaggacgaaggggaagaaagagttgcagttgcagcgacgactccaactccaacgaggggatccacgcctggactgttctgttccaacgaggggatccaactccaactcagcggcaggcagctagctgtcctgttcgaaattcaaaacccggccagatccgtgcttgcgctgctcgccggggctgctttgtccactcaggccatcgatctccagttccatgccttctgcaacgcgggaggcgggaggggatttcgcgcgattcccgagggtgaggcaagaatatatgggattattgtcacctgctggacatcaggggcgtccttaatgactgtctcacatagctag

SEQ ID NO: 31998 - DNA, 981 bp, Zea mays
  Peptide Sequence Number=SeqID_73777
atggcggaggcggagcgggagcagcgcccgctgccggaggtggagcaatctgtcacgtccataccggaagatcatgaagcaacatgttggggctgtgggcttcggcttgtctttgcgagctactcacctatctacaagtgtgggtggtgtggagccgtcacgcagagcaacaaccagactgcaaggaaacctgatagtatatggttttcccactggaggcgcctacgggacaggctcttcgtggctgtgctcgtcctcttcatgctcttcgttatatgtggtggggtctgggcggtatatcctgttgttttctcagtcagcaagttctgtggcgtatttcactgcacggtagcagctgtgttggctgtatgtaccgtcacaagctattgcttggcctctttgaaatgtgcaggcgcaccaacagacataagtcgacttgtttattcatcccgtcctctttctgttcaagtgcagattggcaactgcgtgggagcatcaaaccatcaagtgtttgtggtttttctcatttctgtggttatcagttgctcttatgtcgctgggatgaccatatacgcgagctaccagatatggccctccattgaattcccagacctagcatcatcatctcgtcactcgatgagttcttggaaaacggtgctggagatgatcactacggttgcaggctccgccttcttcttgtcagccaggggtctagtcctggtgtatctggcgtttgctagctcgtcagtgaatgctggtatagctgtgttgctgtgccagcagctgagctatatctacgaagggaacacgtacctcagccgtctgagctcaccaccgaatgccttgcagcatggagagaggggtttgcagaacatcgttcggtttttcgggtgcccgtatccagtctccagagctgtgttgcgactgcggtactccaacgctgccaagttgcaggatgattcagggtcgaaacttctttag

SEQ ID NO: 31999 - DNA, 285 bp, Zea mays
  Peptide Sequence Number=SeqID_73778
atggccatgtccatccccttttacctcggcccctacttcggcagcctggtgcgcctcgtgtgggaccgcctggacccggcccgggccaaggcattcgcgccccccgtcgcgtcgggcctcatctgcggcgacggcatctggacgctgccgcagtctgtgttggccctcgccggcgccaagccggccgtccatctgcatgaagttcctgtcccgcagcaccaacgccaaggtcgacgctttcctccgcagctagctcctagcgagcgagctacctctacctcctga

SEQ ID NO: 32000 - DNA, 585 bp, Zea mays
  Peptide Sequence Number=SeqID_73779
atgctgggcgcgcgtgtgcagctgaaggggtggcaacaggcagctgttgcatttggttctgcgtttggggccttgcttgaccctaggagggctgatcttatagctgctcttggagagactactgggaaaccagcgtttgagcgtgtgctgcaacgaatgaagaacagtgcagaaggcagggtttcccatgcctgggacctgcctcagaacacatttggcgcggcgtatgctcagttcatgggatcaaggaacttctcaccagacgatcgcccgcctgtccgtttcatggacaccgatgagctcgcctacgtcgcgacacgtgctcgcgaggtgcacgacttttggcacgtgctgtttggtcttccgacgaacctgattggggagaccgccctcaaggtgatagagtttgaacagatgttcctcccaatgtgcatgctgtcagtcgtcgggggctctgcgaggttcagcgacaaacaaagggcgctgtttttccagcactacttcccatgggcaacaaaagctggtctcaagtgtactgatctgatgtctgtatattacgagaagcactttcacgaagacctggag

SEQ ID NO: 32001 - DNA, 408 bp, Zea mays
  Peptide Sequence Number=SeqID_73780
atggcagctgactccagcatggggtttcaccaggggatcaccgcctctctgtacaaccatcacatgctctcgttccagtccaacagcgacgtcggcatcggcggcggcgacgacgctaccggtggcatggtcatggccccggggagtgtgagtgggggcagtggcaacgccgggctgttcctctccccaaacacaggggtcgtcggcaacgcaccgggggttgccccgttaatgaactcgtcgggggatgcgttccgtggcactgggacgcccaagtataagtatgtcactggttctccttccgattggagtgaccgtgaggtagacatactgaatgaagggcttgtgaggttactgtggaacggcacttgtcttctccatgagcacttctttgtagccacgttctag

SEQ ID NO: 32002 - DNA, 249 bp, Zea mays
  Peptide Sequence Number=SeqID_73781
atggcggtggcaggcgggcgggagcagcggtcacgtcgtcagccaagcttgcgtcccatcccggggcagaaacaggctccgagcctccctactgatcaggggttcgaaggctggcccctcggagggtttcgacagccgcctcagagcgcgtgggctccacacccactactggtcagaggttcgaaggccggcccctcagaagggttcaacggctgcctcaggccactcgggctccgcacccactactga

SEQ ID NO: 32003 - DNA, 276 bp, Zea mays
  Peptide Sequence Number=SeqID_73782
atggaggtgactgaggagccctcagccttagaggtggctactgcagaagacctagcccccgagggtggtgccggcagttacccagcccccgagggtgttgccgatagtgatccagctctggtgggtagtgcaagctacaacctagccccgagggtgttcagattgttcctgctgatcttccttcgtcgagccatgacacagctcctcctgccttgggtctaccactgttcctctccaatcttcaggttattgtcgatggaatatctgcccagctga

SEQ ID NO: 32004 - DNA, 708 bp, Zea mays
  Peptide Sequence Number=SeqID_73783
atgggcttggttaaggggatttgggcccaaccggcgagacagagggagcgggaggagctgggctgtgagggatgtggcccagaacgcaggtgttacaccaagcactcactcaactcacgtccctccattgtattggtgactaaccttcctcgtagggcggtggcctcaaacgttagaggagaggtcatatcgctttcatcctctacattgtcggagggtcttcaagcacgattggccatcatggaggcccatgcgatgagtcaggaaactgagttggtgaagctacgctgggaggtcaatttagtgacccaaagcatccaagcacgtggagcaactcacttgcaacgtccgctcgacattctgagccacgttcggaacatcatggaccttagcatccaccgtggagctgctattgccttggccatcgcccgatttcacactagggttgacctccgtgctataggtgatgccttctcggggcgccccatccgtggtcttcgagaaccttatctaggggtacgacgaggccgcctacgaggtcgatggtgccatgtcagtggaggacctgatctaatgggctccctcgggcccttctccagggttcatcttttgggattcgtagcacgggcaaccgccctcgtcgctgtgtcgggcgttaggacggaaggtggggagacaatcgggcttcccacttttcttagtcgttag

SEQ ID NO: 32005 - DNA, 327 bp, Zea mays
  Peptide Sequence Number=SeqID_73784
atggatcacagtaagtgtctggctctagagtgctctcaccaagatcggtccaagcgccgcctgtcaaaggaaagtttatgggaagagcacttgcaagaatccctcgtctcacagccatcgcaggaaaatcaacacgagaacctccctgcatgcaactcccctactgcccttgcccctttcagagagaacaagggtctctgcgcaaagatcctaggactcaaagaacagtcaaactggattgcgggtttaaatacctctaaagaggagggctcatatgcaaaaggtctgggcgaaggggtatctgttgatatgggccgtcaaatctga

SEQ ID NO: 32006 - DNA, 489 bp, Zea mays
  Peptide Sequence Number=SeqID_73785
atgcccatccttgagaaaggtgaggtcacctcaacctcatcattcaatgaagaaatcgatcccaaggtacttgacctttccatgaagatcgctgaaaggatgttcttcatgatgaaggtggatgaggcgataaagaggcttgaagaagaagaagaagccaagaaaacaaccaaagaagaacaagcaaaagataaagagaagaagaaattggagtacaatgatgacttggttgagctctttgtgtcaaaggtgatccaaaagccacgagatatagaattgggtaattggaaagtgaactcgcaagatcataccaagaaaacagtagtgactaaggaagaaagcgaagttcacacgctcaagaaagtaattgagagctcaagtgatgactatcaagataatgcagctacgttcattaaacgcttcaagaaacttatcagaggaggtgataagtatcaaagaagagaccatgatatgaatgtggcaaaatag

SEQ ID NO: 32007 - DNA, 402 bp, Zea mays
  Peptide Sequence Number=SeqID_73786
ctccgcggctggaccatggacccggacctggacctcgacctagacatggatatggagacgctcgccggcgacagcggcggcgaggccgagcgcaacgaagccgccgaggccgaggctgaggtggagcggtacgaggccgccgaagccgaggccgacatcctccgcgaccgattccgcctcgccgtcatcagcatcgccaccgccgaaggaaagaaggccggaatgacggtcgccgaccccgttgtttcctgcatcgccgacttggcgttcaagagcgcagctcacaggaacgagcatcttatgggcctgctgcggaccttctctcaggagctgaagggaaaggagcctgccagtgagaggaagagaaagaaatcgtccaagaaggatgagacggtgatcgag

SEQ ID NO: 32008 - DNA, 504 bp, Zea mays
  Peptide Sequence Number=SeqID_73787
atggctcgggtcgacagcggcgggcttcggctgcacggggaagacgccggtgagcacggaccgggcgaattagagaggttgggggccaaccaagaggtgtcccgcgttgcctgtgaaggggcaaagctcaccgaggcaacggacacgacggacacgcgacgacagtcacggaacggcggcgatccttcggcggagttccacgggtgtgcgcagagcgagagagagggcgagggtgctcggctgagggcgcaactgagcgaggggaccgctgatgtgcaggggcagaccgtccggacaaggggcacggaccatccgtggttggcagaacaagggcaacaactaggaagtgaacacgccaaaaaggagttgatcaccagggaaaagcccggatctttggggaagaagaatgaaagcaagactctgtcaaaggagaccaagatatccggcgagaagcacaaggaagacaaggatgaatccgctggctccatcatgaaagtcgcctag

SEQ ID NO: 32009 - DNA, 255 bp, Zea mays
  Peptide Sequence Number=SeqID_73788
atgcggtccattgaaaaagatcagagggctgttaaaaaacaaaaaaaaattcagcggagcgaaagaattcggctcctaagaaatgcgaaggtacaagatgtaccagagaagactgtcggcacctcatcgtcctcctctgtcggtgttacagaaatattgaagtcaaaggagaagggggttgaaaagagcgcgaaagagaagaagactgctttagcaactgagggaagtgtggagggtgtcacaaccgggttttag

SEQ ID NO: 32010 - DNA, 657 bp, Zea mays
  Peptide Sequence Number=SeqID_73789
atgacgtcgtcgcacttcctctcgagtctcgaccatgcctggcagcacaacgtgctttactcgcatgacgccctcgacgttgaccaagatcaggatgcgcatcagctcctcgcccacctcgtggagcgaagtagcgcgcgtatggataaggcagtccgtcgtggccctggaaggagtcttgagcgcctcaacgcaggccacgagcccctcgagatacttgccggaggcgcgggtattgaggaggaggcaaagggagaatgtgagggaagggaccaaggggggtctctcacggcggggcaaggggccgaggaggcaggggcaacacacgggggcaggcgcgggcggggccggagtggagggaggcgaggatggtgggtgtttggtgtggccgtagacaaggcaaggagcgcgagatgtgcgacgggagccgagccgtgcgggcgcgtgaagggagccgcgcgtggcgtgaagggagccgagccgcacaggctcggtcaaactggcgcgccgtcggtccagcataagctattacagggagcttcgtctttaggatgcaagccttttcctcatgatgaaggcatacgagatgaagacagatttaaagatgataagaataaacgccgaagctatcgccagattgacagcttcggctcataa

SEQ ID NO: 32011 - DNA, 1227 bp, Zea mays
  Peptide Sequence Number=SeqID_73790
atgggtgtcggcggagagaagttccagctggggacggtgggggcgctgagcctatccgtggtctcctccgtctccattgtcatctgcaacaaggccctcatgagctccctcggctttaacttcgccactaccttgacaagctggcatctgctggttacattctgctcccttcatgtggcattatggatgaaattctttgagcataagccttttgattcaagaactgtcatgggatttggagtacttaatggaatctccattgggctcctcaacttgagtcttggcttcaactctgttgggttttaccagatgactaagctggcgatcatcccgtgcactgtcatcttagagacactttttcttcaggaagaagttcagatgacaaacactatccagaagaagttcaaggtctcatcgacccaactgctctaccagtcttgcccttatcaatcactgaccctgtttctcattggccccttccttgatggctttttgactaaccaaaacgtctttgcttttaattatacatcacaagttgtgtttttcattgtgttgtcatgcctgatatcggtctcagtgaacttcagcacttttcttgtgattggaaagacgtctcctgttacttaccaagtcctgggccatcttaaaacatgccttgttcttacctttggttatgttttgcttcatgacccatttagctggagaaacatacttgggatcctaattgcagtagttggaatggtcttatattcatacttctgcacagtggagacccagcataagaacactgaagtctccccacagcaggtgaaagaaagtgaggcagcccctttgatctcagactctttgagcaaagttgaaaatgggggcggtgttgttgatgacgagcctttgaagcgtcacgatctactactggtaaaagggtctgtttcttgggaggatcttaccttcaagattgccagatatacattgaaactagacggcagatattgtatgattgtatctggacatgttccacatcgtctaactgtaacttccaactggtacatggcatgcctatatccaaagatagatttctttttttttgtatcagaaagatccgataggtcactcgacctttgcaactacgtcctctgggaggctactatctgcaactgcttctcgcacgaacctggaaagcacatggcatcaatgacaagccccagattcataggtgtgccggagtga

SEQ ID NO: 32012 - DNA, 3162 bp, Zea mays
  Peptide Sequence Number=SeqID_73791
atgtctcagacaacatatatggcccctgtaggcactctcggcttctcgctgccgttgatcatcctcttggcttctctttcggcgctactagctactacacctaacgacgacatggaagcgctgctctgcctcaagcaccacctctcagcctcatcagaccctacggggacactaccttcatggaagaatgattccacgcagttctgcagttggtccggcgtgacatgcagcaagagacactcgtcccgtgttgttgcactggaccttgagtcactcgacctccatggccaaatacctccttgcatcggcaacctcacgttcctcacaaggatccacatgccaaacaaccagctgcagggtcagatcccggctgagcttggccagttaaaccggctgcggtacattaacctcagctccaacaattttatcagcggcgagatcccggagactgtctcatcgtgccttgccttgcaggccatcgatctttcgaggaattccctcagcggaagcatccccgaaggtctggggagcctcctcggcaacctctcggatttacgcctttcaggtaaccatctgacgggcagcattccagcttcacttggaagcagctcctcccttgtctccgttgttctcaacaacaacagcctcactggacccatcccgtcgctactagctaacagttcgtcgctccaacgactggggctaagaaacaaccgtctcagcggactcattccccagtcgctgtttaacagcacgtcgcttgagatgctagtgcttgcagggaacagctttgctgggcccatacctgctgtctcaaacaccgtcgttgactcgccgccgccgcccttgcagtatctgatactggactcgaacgatctaacagggcccttgccttccactctagggaacctcacttctctcctctggctcacgcttgggggtaacggttttcatggtagcatcccgacgagcctgggtgcactcgtgaacctgcaagtgctggacatgactaacaatgctttgtcggggactgttccggcctccatctacaacatgtcagcgctcacacacctcggcatgggcatgaacaatctcaccggggaaatcccagctaacgttgggtatagccttccgagaatcgtgaacctgatcatggctcgaaacaagttcactggccaaatccctgtttcgctgaccaaggccaccaatctccagatcattaatctctgggacaacgcacttactggtactgtccctttgttcggagccttgcccaacttagtcgagctggatctaacgaagaaccagctcgaagctggccgggactggtcgttcttgacatccttgacaaattgcacgcagctggtgactctgtacctggacagaaacactctcggaggagtcttgccgaaatccataggggacctgcccagtggactggaggtgttgtttttaagtgcgaatggaatatctggcaccatccccaatgagataggacgcctaaaaaacctcaagcttctttatctggacaggaacctccttgctggaagtattccctactccctagggcatcttccgaacatgttcgcgttaaacttagcgcagaacaaactctcagggcagattccagcctctctcggtaacctaagccagcttagcgagctctacttgcaagaaaaccacttgagtggcccgataccaggtgctttaggacgctgcaagaacttagacaagctgaacctctcttgtaacagctttggcggtggcataccggaggagctgtttactctttcttccctctctaacgaactggacttgtcgcacaaccaactctcaggagagataccactagagatcggcagcttcgtcaaccttggcctactaaatatttctaacaacatgctggccggacgaataccgtccactctaggtcagtgtgtgcatctcgagtccctccacatggaggggaacctacttgatggtaggatcccacaatcgctccaaggattacgaggcctcgttgagatggacatgtctcggaacaacttgtctggtgaaatcccggagttctttgaaacatttagctccatgaagcttctcaacctgtccttcaacgacctcgagggaccagttccaacaggtgggatatttcaggatgcacgggatgtgtttgttcaagggaacaaggacctatgttccagtacccacttgctacagctaccactttgcactacagatactacatctaaacggcataggcacacctcctcctatgttctgaagttagtaggatttacagctctttctttagtcttgctattatgctttgcggtcgtccttttaaagaagagaaagaaggttcagcaagtagaccatccatccagcatggatttgaagaagtttacgtacgctgggctagtcaaagcaactaacagtttttcctcagacaacttggtgggctcaggaaaatgtggattggtgtataagggaagattttgggatgaggaacatgtagttgccatcaaagtattcaaacttgatcaactcggagcaccaaacagcttcctcgctgaatgtgaggccctgaggaatactagacaccgcaatctcgtgaaggtgatcactgcatgctcgacgattgattcagagggacatgatttcaaggccgtcattcttgagtacatgtctaacggcagcctggagaactggctctatccgaaattgaacagctattcaattactcatagttcttctacaagcttgattggaccaagaggatcaatcggatacattgcaccagagtatggcttcgggagcaaactctctacacagggcgatgtctatagctatggaatcaccgtcttagaaatgctcacagggaagcgccccacagatgagatgttttctaagggtttgacccttcacaaatttgtgaaggaagcatttcctcaaaagattcatgaaattctcgatccttctatattcccggttacaagagatggtgataatcacacaacggatgaaataaccagaagcatcatgaaccttcttaagatcggtatctcgtgctctgcagatgcaccaacagaccgaccaacaatagatgatgtttatgctaaagtcatcacaatcaaagaaacatttttagatctatgccactaa

SEQ ID NO: 32013 - DNA, 165 bp, Zea mays
  Peptide Sequence Number=SeqID_73792
atggcgaaggcgcaagaatacgacggggcaacggcggtggggctccgactacgcaagaatcgctccgattctgatgttatatgttacatttttgggggaatttggcccttgtattgcattgggctaaacaagaaaaataaaaattacaacctatggccccattaa

SEQ ID NO: 32014 - DNA, 207 bp, Zea mays
  Peptide Sequence Number=SeqID_73793
atggaggaacgagtggggaaggggctcggctgggaaatccagccaggtgcggccgtgagaagctcgagccgcgccatgggagccgcgcggtctgccgagcagggagctggcgcgcagggagctccgagcagagggacgcggccatggaggacggatcggcgccatgggcaagagagcaccgagcagaaggagcttcgatatttttga

SEQ ID NO: 32015 - DNA, 192 bp, Zea mays
  Peptide Sequence Number=SeqID_73794
atggtcatagtgaaatgcgaccgaattgcgagagggggtgaagtcgagcgaagtgaggcgaggggtgtgcgcggggcactggcggggctcttaaaagcggagctgggcgcgtgggtgggcgttgtgggcgagaaacccggctacgtgcgcgagtgcgcacgcgccgggttttcaaatccaaattcaaactag

SEQ ID NO: 32016 - DNA, 147 bp, Zea mays
  Peptide Sequence Number=SeqID_73795
atggccggtacataccacgtcagggatgatctgcgtgcgtgccgtggtcaggggcattcgcggggaagagatagaagatggagggcatttctgcaatttgtcagtggcacagaggaacaattaactaaggaattttgggttatttaa

SEQ ID NO: 32017 - DNA, 228 bp, Zea mays
  Peptide Sequence Number=SeqID_73796
atgggatttgacacagattgtggcgtggggctggagtgcaggaagactactgctggatgtgctgatcacgacatttcatccttgattttggagtataccgcaaatataccgaatataatggttgaagacatgctagtggcatttcataaatggcatgagaagtttgaggtagcaccctctattgatgcatatgacaagatcgtctctatctgttgcgattcatcaaag

SEQ ID NO: 32018 - DNA, 1206 bp, Zea mays
  Peptide Sequence Number=SeqID_73797
atgtggaagcgcctcctggagaccaccaagcaggtcgtctcctccaagcaggccatcccctacgcagccgtcacccccaagcccgcgacccccgccgccgccccgtcggcatccaagcgcggcgcccctgttgctgcgccgaagctatccaccctgaagagtccctcctacaggcgacgcgccgccgccggcccagccaccaccgtcacgcaggcatccctcctgcggctcaagcaggccgcggcctcgaagaagaccaacttgccgtcctcccccccactgaatgacgcccacgccctagatgaggatgacccgccagaggctctcaccaaggcgctcatgttcgtcatagatgcacctgaagaggtggaatgtacgacttccccggaagcgctaccggagggctccgaagatgttggggaggttgccaggggcaataagatattggactttgagtggttccaggccgaaccatcgagggacccgctgatgctttggaggagggaggtggccagggagaagaagaaacactacatattcaagaatgtggagagccaccactacacaaatttgatgcgtatttgcgctaataagcttgggatggaatcgacaatagaatttcttggaaacttggggcgggaaacaggggtcaaggagttcaattcgatgattaaggtttgcctaggcaaggcaaaggcttgcagggatattgactctgctgtggagtatatttatcgggcgtatcaccttttcaataccatgaaagataaggggttcacgattgagaaagatatctatgacccattcctcttgtatcttatggacacggggatgtttgaggaatttgaggtgttcagtgcattctttaaggaggcgaatccgaagtccttctctagaatagcttattatgagatgttgctttgtattagagttcaagatgaagaaaaaatccaggaactttgtcactctgttgaagactacgatgagaaagttcactatgacctagcagagagttacatgctggcctttgctgaaagcggcagaaaggaagatctggttgccttgttggatttggttgatctatccaaagtttcaggttcaaagtacataactaatattttcaaatcattgggcaagctagaactagagaattatgtggagaaacttcttgagaggatgatgtcaaaagtttatgtagaaagatag

SEQ ID NO: 32019 - DNA, 1014 bp, Zea mays
  Peptide Sequence Number=SeqID_73798
gtcgagtctgtcttccggaggtcggaggtcgagtccgagccctggggtcgggcgaggcggagttcgtcgtctccggggcccgaggccgagtccgagccctggggtcaggcgaggcggagttcgtcgtctttcggggccgaggccgagtccgagccctggggtcggacgaggcggagcttcctatggcgcccgaggccggacttggctgctgtcagcttcactctgtcgagtggcacagcagtcggagcggcgcaggcggcgctgtcctcttgtcaggccggtcagtggagcggcgaagccatctttgcattaaatgctcctgcgatacggtcggtcgtcgtggcgatttggccaaggttgcttcttggcgaagaccgggcctcgggcgagccgaagctttgtgctgatgggggttaccagctgagattaggagtcttggggggtaatgatggcccccactgtgacgtggtcggtccgagccctgggcgaggcggaggctcctccgaggtcgaggtcgagtccgagccccggagccgaggccgagtccgagccctagggtcgggcgaggcgaagttcgtcgtcttccggggccgaggccgagtccgagccctggggtcggacgaggcagagttcgtcgtcttccagggccgaggccgagtccgagccctggggtcgggcgaggcggagttcgtcgtcttccggggccaaggccgagtccgagccctggggtcgggcgaggcggagttcgtcgtcttctggggccgaggccaagtccgagccctagggtcggacgaggcggagttcgtcgtcttccggggccgaggccgagtccgagccctggggtcgggcgaggcggagttcgtcgtcctccggggccgaggccgagtccgagccctggggtcgggcgaggcggagtttcatatggcgcccgaggccggacttggctgctgtcagcctctctctgtcgagtggcacagcagtcggagcggcgcaggcagcgctgtcttcttgtga

SEQ ID NO: 32020 - DNA, 1152 bp, Zea mays
  Peptide Sequence Number=SeqID_73799
atgacgtttcggttcccggtgaagaaccagcagggcacgatcgacggcagtccgtttgcgccggcgacggcgagggtgtcgatgttccggaggctgatggtgcgggtgaccccggccgagcggctggcagctggggacggcaaggagagagagaaggacgagaggggaggggaggcggaggctgggtcggtggggctggacaagatggtgctcagcttcatggaggagtcctccgcggccgtggagcggccgtcgcgcgggcggtgcggcaactgctttaacggcaaccatcaggacggcagcgacgacgaggacttcgacttcctgccctccgcctccgcgcccgccgcggcgccggccgcgggcggcgacgccttggagctgctgaagggcctggtgcagtgcgcgagcacggcggagcggaacctcctggcggacgcgtcgcggatcgcggagcgctgcgggcggaagaaggcggacgcccggcgcgccgtggcggacgggctccgcgcgctcgggtacgacgcggcggtgtgcacgtcgcggtgggacaaggccccctcgcacccggccggcgagcacgagtacatcgacgcggtggtggcggaggcggagcccggggcgacggacggcgtccgcgtccgcctcgtggtggaggtggacttccgggcggagttcgaggtggcgcggcccaccaaggcgtaccgcgcggcgctgcaggcgctgccgccgctgttcgtgggcaccccggagcggctggcccgggtggtggccgtggtggcggacgcggcgcggcagagcctccgcaagcgcgggctccacctcccgccgtggcgcaagcacgagtacatgcgcgccaagtggctgtccccgcacgcccgcagcggcggcggcggcggcccggacgagacgccggcgctcgcgacgccggttcccgctttctccggcgtgttcgagccgcggttcggcgagaagccgaaggcgcccggcgacgacggcattcccgacggcggagatgacaagaaggccacggtcgtggtgccgccgtcgccgtggcggcccgaggcggctagcaagctgagcccgcagccgccgcaggcaaggaggaaggtggtgaccgggctggcgtccctgctgctgctcgccagctga

SEQ ID NO: 32021 - DNA, 1845 bp, Zea mays
  Peptide Sequence Number=SeqID_73800
atggccagcgccgcccactcccttctgcacacaccggaggcccacagggccgccacccgctcgcccttctctcctcccgcgcccactcccttcctccatctccgccctcaccgcctccccctccgcctccgctccacctccccgaccgcctccgacctcaccgccttccccccgaacccgaacgggatctttgcgtccgaccggcccatcgacgtggacgccgccacggaggccgagctgcgggagaacgggttccggagcacgcgccgcaccaagctcgtctgcaccgtgggccccgccacctcgcgcccggaccagctcgaggcgctcgccgtcggcgggatgaacgtggcccggctcaacatgtgccacggcgacagggagtggcatagggccgccatccgcgccgtcaggagcctcaacgaggagaagggcttcgccgtcgccgtcatgatggacaccgagggcagcgagatccacatgggggacctcggcggcgcatcctcggtcaaggcggagaccagagtgaacgcgcctcaccgtagaagtcttcaacgtattccgtggaacagtttcgaaggaaactgtgcaatgtggatgagggagaaaggagagagggtcaagggtctgggcgccaagattttgttaaaagtgacagacagtgaggatggagaagtatggacgttcagtgttagatcatttgaattgcctctcccagaacgaactattaatgtgaactatgatggatttgctgaagatgtgagagttggtgatgagctccttgtggatggtggaatggctcggtttgaggtgattgagaagataggaccagatgttaagtgccgttgcacagatcctggtttattgttgccacgtgccaatcttacattctggcgtgacggcagtatcgtccgtgagaggaatgctatgcttcctacaatttcatcaaaggattggcttgacatagactttgggattgccgaaggtgtagatttcatcgctgtttcatttgtcaagtctgcagaagtaattaggcacttgaaaagctacatagctgcaaggagccgtggaagtgacatggcagtcattgcgaaaatcgagagcatcgactctctaaagaacctggaggagatcatccgagcgtcagacggcgccatggtagccagaggggacatgggggcgcaggttcccctggagcaggtcccctcgatacagcaaaagatcgttcagctctgcaggcagctgaacaagccggtcatcgtcgcctcccagctcctcgagtcgatgatagagtaccccacgcccaccagggccgaggtcgcggacgtctccgaagccgtccgccagcgcgccgacgccctgatgctttccggcgagtcggcaatggggaggtacccggacaaggctctcagcgttctgaggagcgtcagcctgaggatcgagaagtggtggagggaggagaagcggcacgaggcgctggagctccggagcgtctcgtcctccttctccgacaagatatcggaggagatctgcaactcagcagctaaaatggctaatggcctgggagtggacgccgtctttgtgttcaccaagaccgggcacatggcctccctgctctcgcggtgccgccccgactgcccggtcttcgccttcacgacgtcgacgtccgtcaggaggcggctgaacctgcagtggggcctgatccccttccgcctcgccttctcggacgacatggagagcaacctgaaccgcaccttctccctgctcaaggccaggggcatgatccagtctggggacctcgtgatcgccctctcggacatgctgcagtccatccaggtgatgaac

SEQ ID NO: 32022 - DNA, 348 bp, Zea mays
  Peptide Sequence Number=SeqID_73801
atggcgagcagggggagaggaggggtgtggggcgaactgggcgagagttatggttctacaatttatagggctacggagggagtaacagacggtgaggaagatcaagcggcagccagcgtaccattaatggagggaggggcactggtcccggtggcgctggttcctggcacggctagcggcgtccatgggcgtgcggttctgggtgcgcgcgtggagcagagaggagaggcagggaggaggagagagaaacgggagaaggagagagattggatggcggcggccacagggagcagggtgggcgcgctgctgggaccagggcagggcagcgggggctgccaggagaagtga

SEQ ID NO: 32023 - DNA, 768 bp, Zea mays
  Peptide Sequence Number=SeqID_73802
atggcgtggctatgcttgacagcagcaacaaaaagaaggaatggcgagcagggggagaggaggggtgtgggggcgaactgggcgagagctatggtgaaacggacatgggacgtgggtgtgctcggtcggtccctggcgcgcgtcgaggctcgggtcgtctgggcagtgtgcgcgttgacgttgcttcctgggcgcgcatggcgtggtcctgcacggggccggggcctggcagcgcgcggctcggccggcttctgtcttggcgcgcggtcggcatctgggcaggcggcgtgtagggcgcggacgtcgggctacgcgcggtgcgcgggggcgctcgggcgcgtgcaggggcactggtcctggtggcgctggttcctggcacggctagcgacgtccatctgcgcgcggttctgggtgcgcgcgtggagcatagaggagaggcagggaggaggagagagaaatgggagagggagagagattggatggcggcggccacagggagcagggtgggcgcgctgctgggaccagggcagggcgacggtggctgccaggagaagtgagcggcggcttaggggatcgggaaaggggatatttcgaaaagggatcctttctcggcgaaggaaacgggcctcgagccctcctactgatcaggggttcgaaggttgcgtcctccggggttcggtaaccgccccagagcactcgggctccgagcccattactgatcaggggttcaaaggctggcccctcggaagagttcgacagccgccctag

SEQ ID NO: 32024 - DNA, 1671 bp, Zea mays
  Peptide Sequence Number=SeqID_73803
gtatatgggtatggggttccccccgttgaggtggatatcggtggctccaaggtgtctgttctatacctggacaccgaaggatttgagagtgttggaaaatcaaatgtatatgatgataggatatttgctctggcaactgttttaagttctgttctgatctacaatcttcctgaaacaattcgtgaagccgatatatcgagactttcatttgccgtcgaaattgctgaagaattctatggaagtttgtcctttgctaacatatttccattttgccctttggcttgtggtaaactagagtcaagaagtatatcaaaatcatgccgtggggctctgcaggggcaagatgttgcttttgagccagccaaacttctgtggttgatccagagggattttctccgtacctacatttttgaaagtaacttccatgatccagaaggaaaatcggttcagcagatggttgatgaagctctccaacgggtacctaacaacaatggagacacaaatattgacgagttcttattgaagaaaataacgttagtgttacatcagctcaaccaaatcagagactctttggcggttatgggagataacagtacagcttttagcttaccacagcctcatctgcaaaggacaaagttatgtgatatggaggaccaggaacttgatccgttgtatgtaaagaagagggatcagttgaaagaagtcgttgcatccatgataaaaccaaaaattgtgcagggtagaactctgaatggaacagagtttgtatccttcctagggcagatagttgatgctttgaataaaggtgaaattccatcagccgggtcgctggttgaaattttcaataaggccattcttgaacgttgcttgaaggtgtacagtgaaataatgggcagagcaggtctaccagtgtcagtggatgaacttcgggagttccacgacctggcaaaagatgaagctagaaggcttttcaacaagcagcatttcggtaaacatcatgctgctcggtccatcctcaagcttgatgaagagattaaaaaggtgtacagaaacttgggccaagctaacgagtatcagtcatcaaagctgtgcgaagcacggttctcagagtgcgaagataaaatggaacgactccaagtcttgaagcttccgtccatggcgaaatttgatgccggattccttctctgcaatcgaagttttgaaacggactgtgtggggccagccaaggaaagctatcgacaccggatgtcaaagatgctggcaaggtcccgtgctcttttcatcaaggagtacaacaacaagctcttcaactggctcgccatattctccctggccatggttgtcgttgggcgcttcttggtcaagttcttcctgctcgaagttgctgcgtgggtgatgtttgccttcctagagacatacacgaggctgttctggtcgtcggagtccctgtactacaaccccgcctggcacgcgatcgtctcttcttgggaaaccgtcgtctacagccccgttcttgatcttgacagatgggcgttcccgatctgcgctgtcctgttgtttttggcgttttattggcgttgcctcggtggaaggaggggaattgcccggtcactgctacctctgtacaacggggcttattacagaagctccagtcgcacaagaacagactga

SEQ ID NO: 32025 - DNA, 159 bp, Zea mays
  Peptide Sequence Number=SeqID_73804
atgggctgtgccccggtggtgtgggccgcggtgtggttgcttgctgccgcggtggcagggttcgccgatcccggcggcctcgagcgcgcgttattggcccctatcggtcgggcaaatcttttcttctcaaccaacttctctccctatcatgtgacaatg

SEQ ID NO: 32026 - DNA, 1059 bp, Zea mays
  Peptide Sequence Number=SeqID_73805
atggggacagattacgttcttgtcgaaccgacgtacagacgtgacgcggaggaacggaacagcctcgctcggcaagccacgcacacgcacgtaaccggcgcggctgccgacccgagtcgtctgtcaccgtcggtcatcatggccggcagccgccgagggaagagatcccgtcgtgtctgcgtgccgggcagtagcttgtgcggcacggcacgcagtagtggagccgtaacgcccgaactttttgacaaccgtgaaatcctgtcccctgcaacttacaagcccggagtccgtctacgtgtcggcccgtgtcagctgcgcggtgaccacgcggcatatgatatgagcgcgggcgcgcgcggagctagcgctgccgctgaatctgaccaagtaaggagaagtgaccggatggagctggagctcgggctcgcgctgccgacccggcaccgccagccgctcgccgccggtctcctcggcggcgaggcgggtgcgcgcgggacgaagagggtgttcggcgaggcgttcgggtccgccaacgatgccacgctttccgctccttcctgcgcgacgacgacgacggcgacagaaggcggcggcgtggaccgcgacggcgtcggccagcatgacccaaacaccaagaagacgaagaggctgctggtggggtggccgccggtgaagtgcgcgcgcaggagcggcggcggcggcgggtacgtgaaggtgaagatggaaggggtggccatcgggcggaaggtggacgtgtccctccacggctcgtaccaggacctgctccgcacgctccgccgcatgttcccttcggctacccaacgaggtgcgggtgcgggtgcagatcacgaggaggaggaggaggaggtggtggtggaagaggtggcctcgcacgagcgccgccgtctgcatcgtccttacgtggtgacctacgaggacggggaaggggactggttgctcgtcggagacgatgtgccgtgggaggtctttgtgaagtcagtgaagcggctcaagatacttgcgcggacagcagcaggcgacggcttagctcactgctag

SEQ ID NO: 32027 - DNA, 162 bp, Zea mays
  Peptide Sequence Number=SeqID_73806
atgtgctcattgtggaccaccctgccgggttcaacacaggcgtatgaggatccggacaggcaacaagccagccgccgccaacaggtacctgtagctcatgtgacatatcagggtggatggcgctgcctggcggaagttgcaactcgtatgccacctggttaa

SEQ ID NO: 32028 - DNA, 712 bp, Zea mays
  Peptide Sequence Number=SeqID_73807
gtgtgggggcctgctggacgtgggacagaccgaagatctgagaacgaaacgtggcgtggcgtgcaggaacctgatgcccacctccgccgacgagggccagttcctcaacatgctcatcaagctcatcggcgccaagaagaccatggagatcggcgtctacaccggctactcgctcctcgccaccgcgctcgcactcccggaggacggcacggtcgatctgccacccacccagaccaaggatctttacccctctctgtctctctctctgttgctcgtccccccgcagatcttggccatggacatcaaccgcgagaactacgagctaggccttccctgcatcaacaaggccggcgtgggccacaagatcgacttccgcgagggccccgcgctccccgtcctggacgacctcgtggcggacaaggagcagcacgggtcgttcgacttcgccttcgtggacgccgacaaggacaactacctcagctaccacgagcggctcctgaagctggtgaggcccggcggcctcatcggctacgacaacacgctgtggaacggctccgtcgtgctccccgacgacgcgcccatgcgcaagtacatccgcttctaccgcgacttcgtcctcgccctcaacagcgcgctcgccgccgacgaccgcgtcgagatctgccagctccccgtcggcgacggcgtcacgctctgccgccgcgtcaagtga

SEQ ID NO: 32029 - DNA, 531 bp, Zea mays
  Peptide Sequence Number=SeqID_73808
atggccatgagagacctctgcattctcaccacacttgtctctttccttgtatcgttatcctctgtttctgctgcatacgaccacagctaccttgctagaggctcctccatctccacccaggatgtaaccacccccatcctagtgtcgcccaatggtgccttcacctgcggcttctacaaggtggccaccaacgccttcaccttttctatctggttctcgtgggcatctggcaagactgtctcctggacggctaaccgtgatgcgccactcaatggcaggggctccaggctcatcttccacaagaagggggccttgatccttgtggactataatggcatggtcatatggagcaccaacacaaccgcgtccggcagtgatcgtgcgatgcttctcgatagcggcaaccttgttgtcatggatacagatgggcgtcacctctggagaagcttcgactcaccaactgatacacttctaccatggcagccgatgactagagatactaggtttctatgccttctacttcgccactaa

SEQ ID NO: 32030 - DNA, 134 bp, Zea mays
  Peptide Sequence Number=SeqID_73809
atggaatcgcgagatgatgaacttgatcgagaaatcaacaacctcgaagctattcgtcggcaagtcatgaagcagaagaagatgcttcgactttctaagcttcagaagaaaattgatgacacaaatgagcaaat

SEQ ID NO: 32031 - DNA, 138 bp, Zea mays
  Peptide Sequence Number=SeqID_73810
atggactccatggagtttgaggttgctgaattggatagagtagcaatgatatgtcatgctaacagtaaaaggaaatgttatttgttggtttcaaacgttagtaattgctacgaagtactgtcacacccggttttgaag

SEQ ID NO: 32032 - DNA, 237 bp, Zea mays
  Peptide Sequence Number=SeqID_73811
atgggggcaccatggttttcgccgttgtcggacttcccattcaacttcccggccttcgccctgttctacctctccaacctgctgcccccgcccacggtcgcaaccgtgagcccaccgacgctcgtcgatgcgggatttagagatccatgcgggcactaccactaccacagggtgctcgtccttgtgtttttggctcttgcgtgcattaggtcatttttaagacccacattggtgtaa

SEQ ID NO: 32033 - DNA, 1503 bp, Zea mays
  Peptide Sequence Number=SeqID_73812
atgtggaaacagttcctgagcaagctgccccggaggtcgtcggcctccggggactcgggacattgcagcagtggcgccggcatacagcgcacgagcagctgcggcagcatcccgccgggccgccccccggcctccgccattcggcgcatgtcatccgccgtcttcccctcgagcgtcgtggctggcatcgagccgctggtctcgttcaaggacgtgcccagctcggagaagcagagcctgttcgtgagcaagctgagcctgtgctgcgtcgtgttcgatttctcggacccggacaggagttcggtggagaaggatatcaagcggcaggcactgctggatcttatagagttcgtcgagtcgaccaacgctcgcttctcggaggcggcggtcgtggcctgctctaggatgtgcgccgtcaacctgttccgggcgttccctgcaagttgcaggtctggcggctcatcaggcgtcggtgagtgcgacgaggacgagccaatgttcgatactgggtggtgccatctgcaccttgtttatgagctgctactgaagtttatcggatcctcgtccttggatgcaaagatagggaagaagcactttgatcactcgttcattgtgaagctccttgatcttcttcactccgaggatccaagggaaagggattgcgtgaaaaacattctgcacagggtgtatgggaagttcatggtgcaccgtcctttcattcgcagagcggcgagcaacgtattctaccagttcgtcttcgagactgatcgacataatgggatcgcagagctgctggaggtctttggcagtgtcattagtgggtttgcactgcctctgaaagaagagcacaagacctttctttggagagttttggttcctttgcacaaaccaaaatctcttggtgcgtaccttcagcagttgacctactgtgtgacacagtttatagaaaaggatccagagctcgcaagcccagtgataattggtttgttaaggtactggccaataacaaattgtcagaaggaagtgatgtttctcagcgagatcgaagagatcttggaggctaccagccaggcagaattccagaaatgtatggcaccattgtttcggcgaattgctcattgtatcaccagtgctcacttccagtatcccaagtgccatatggaatcagattcattctatattacttgttcctaccgcttgcattataaacctaatctcattggtgcgctagagcagaacattcagaatcactggaaccaagcggtcctgaatctggctgtgaatgtcaagaaaatgttttctgagatggatggtgaccatttctcgtcgtgcctggccaggtacaaggaggaagaagaaagacttgtgtcgctagaagcgaagcgtaaacttacctgggagaagcttgagtcagctgcagccttccagccagtgactggccaaacagccgtcctagtaggccaccagccgtcagcaaatatgatcgccaacctgatcttctag

SEQ ID NO: 32034 - DNA, 133 bp, Zea mays
  Peptide Sequence Number=SeqID_73813
atgtcgagatcattcccagcggcgttcaccggcggcaccgcggcgttcccaatgagacactgcagtagagatgaaaagggcagcgtcatgagcttcactggcttaaggagattaccgaacacaagtgacacag

SEQ ID NO: 32035 - DNA, 1125 bp, Zea mays
  Peptide Sequence Number=SeqID_73814
atggagtcctacggcggcggcggcggcacgcggacgtcggcgtcctcgcggcgcccctgcacggcggcggcggtgccctcccgcgccggctcgggcgccttcgcgtacgacggcatgcgcgccacgcctctgtccacgtccacggccaacttcacgcgctccctccgcaaggcggcctccttcgcgcacaagaaggcgccccccagcgccgacgcgccgccgccgcggcgcgcgctgagcagcaaggagaacagcagcagcgccaccatcggtgcggcgtcgaaggaggcgctactggagtcgccgcaccggccgtcggtgccggagcctgcatccgccgtgaacggtcggccctgggagccgacaaggcggaggcggagcaccgggacggtggtgaatgaggcgggcgcgctgcgggagaccgtggcgccgcgcaggaagcaggagccggagccggagaaggaggaggccgcgcaccgggcgcgcatgctgacggcgcggctgctgcagtggcgcttcgccaacgcccgcctggagaaggccgtgggccgcgccacctccgccgccgagaacaagctgttctacacgtggctgcgcgtggcggagctgcgcaacatccaggcggcgaagcggatcgtggcccagcggcggcggcagaagctggagctggcccggctgctccgcccgcagctgcccctgctggccgcgtgggaggccctcgccaaggcgcacacggacgccaccgcggacttcggccgcgtcctctccgccgcctgcaccaacctcccgctagccgccggcgcgcgcgccgacgtggacgcgctgcacgaaaccatgcgctcctgcgtgggcaccgtggacgagatcgaagccagcatcaccgacgtgttctacgccacggccggcgcggcgagcggcgcgctgggcgagctcgcgcggacgatccagcaggagatggagtgcctggaggaagcgacgcggctgtcgagcatcgtcaccggcttgcagatgcaggaggtgagcctccgggcaaatctgatgcaggcaaagcagaggaggattggcctggggctggggctgggaccggccgcaccggcgctcgcgacttctggctggtgtttttga

SEQ ID NO: 32036 - DNA, 663 bp, Zea mays
  Peptide Sequence Number=SeqID_73815
atggcgagcttctctaccgcgtccctcgccgcgtgcggctcatctccttccgctcttcttccccgaaatccgcgccgagctcaactacctcgcgcaaccgactccgtagaaatcggcggcgccgttctgaccggcacggccccacggtacatatataccgaggcgctctactcatccgggccattagacgtcgctacctccgaccctgttccctctggatgtaaggtcgataggaagagtacatcggggacgtgccaattcttaggaaggtccctggtgtcatggaactctaagaaacaaacctccgttgccctatccaccgctgaggccgagtacgttgccgcaggtcagtgttgcgcgcaactactttggatgaggcaaaccctccgggactttggctacaatctgagcaaagtcccactcctatgtgacaatgagagtgctatccgcatggcggagaatcctgttgagcacagccgcacaaagcacatagacatccggcatcactttttgagagaccaccagcaaaagggagatatcgaagtgtttcatgttagcaccgagaaccagctagccgatatcttcactaagcctctagatgagaagaccttttgcaggttgcgtagtgagctaaatgtcttagattcgcggaacctggattga

SEQ ID NO: 32037 - DNA, 336 bp, Zea mays
  Peptide Sequence Number=SeqID_73816
atggagcttcgagttccgcgggcgcttccgccatggacgggcaaggtggttgaagtcgcggctgacaacccgggacaatgtgccagagagacaggcgcgacgagcagtactggagagccatcgctgaccaggcgggacccgcgtcacagtgacattggattaaaccaagttgctatagtgagagctcttgagaagaaatcaatcacagagaaaaacggcactagagacacagtgtttttatccgtggttcgaccaaggaacacttgcctacttccacgttgtggtgtcccaatggaccgaagggttgcattcaaccccctttcagtgatccaatga

SEQ ID NO: 32038 - DNA, 1374 bp, Zea mays
  Peptide Sequence Number=SeqID_73817
atgccgcgcacggtggccgtggtcggcgcgggcgctgcagggctggtggccgccgcgcccagctgctccgcgaggggcctcgacgtcgcggtcttcgagaagtcggggcgcgcggggggcacctgggcgtacgaccctcgcgcagacgccgacccgctgagccgcgacccgggctcccccagcgctgtgcacggaagcctctacgcgtcgctgcgcacaaacctgacgcgcgacctcatgggcttctcggacttccccgatggccggctgggtgttcgcgggcgacgcgcgcgcgttcccgggccaccaggaggtgctcgcgttcctcgacgccttcgcggaagagtgcggcgtcgccgcccgcgtcaggctccgctccgaggtgctgcgcgtggcgggggcgcccctcggccagcgggggcgcccctcggccagcgggagcggtgggcggtctcgtggcgccgcgaggacggcgaggtggcggaggaggtgttcgacgccgtcgtggtctgcaacggccactgtacggtgcccagggtgcccggcattcgaggtgcctgccatctcctagtttccctcttttgtttctcatccaatacaatggagtttcgaggtgcccggcatccaatgcttgtgtcacaggaattgacaattggagcgggaagcagattcacagccacaattatcgcacccctgaaccgtttcgggatcagcactccaaaagattcctcatcagtaacgttgtgccacccactcacaaattttccacaagagccacagaacgttgtcgttgtaggattctcgaccagtggaatcgacattgcttcagagatctcacgtctcgccaaggaagtgcacgtagcagacaggtatcgctaccatttcccgtttctcgacctggatgggctcaccgtcgacgacaaccgtgtcgggccactgtacaagcacgtcttccccccaaagtacgcgccgaacctgtcattcgttggtctaccagtcaagaccatcgtcttccaggagctggagcaggaagccaagtgggtcgcggccgtgctgtcggggcgggccacgctgccaagcgaggaggacatgatggcgtccgtgaggagccattaccaactgatggaggaggccgggaggtcgaatcgccatacgctcgcactggcagctcagtgggcagagcacatgaactggctcgcggaccaggtcggcgagcctccagtggagccgtggaagtgcgaggtgttcgataaggtacttgcgagcatcttggcgctcgacgaggcctaccgagatcgctgggaacaagaggaggacggtggctccagtgggcatcaggaaggcattaggatcagagcgagctccatcatgtaa

SEQ ID NO: 32039 - DNA, 159 bp, Zea mays
  Peptide Sequence Number=SeqID_73818
atgtgttcacgattaagagttctttgtaggctaaatgcatacggcttgtttgaggtgagagtatctggtgatggaaattgtcagtttcgtgcattctcagaccaactatatagatcacctgattattacgagcgtgttcgaaaggagattgtaaagcag

SEQ ID NO: 32040 - DNA, 243 bp, Zea mays
  Peptide Sequence Number=SeqID_73819
atggaggttgcaccggaggcgaggatcctctaccaccgccgcaacagaacactcaaaggaggaggagatggccatggaggaggcgggtcaacgttgcaagacaccaccgccattgcagtcgtggccatgaacaacagcaaacgatatgtttatctaatacctctcagtgggctcacaaagtgcaaccctatagagggttctagcagggctacgcctgtggtgcacagcggcctcgttcactag

SEQ ID NO: 32041 - DNA, 618 bp, Zea mays
  Peptide Sequence Number=SeqID_73820
atgacaccggattcctcgccgacctccacctcacgtgcctcgcctccacctccactcgcctccacctccactcacccccacctgacatctcgacccggtcccgatacgacgaagagaaaggggaggaggcaagctcctacggagatgcagaaggatagggccccgtcgctgccccaaccaccccgacgccgatccactccctctggctcccttcgactgtccgacctccagtgcgccgccttcttgcctagatcccttcgcctctcgccccactacggactcagcggctcaaccaggcacctaggcaccagcaataggcaccaccactaccaccacgcccatgtccaaagcaccggagggcagggagccggaggaggaggaggaggggagctggcgagccgggcgaaggcggcggcgcgcgcgtggccatgttgtgatagctgcggcgggtgcaccaggccggagccaccgtggtgccagcgcctggacgcggcgccctgcgggtgccacccagcctgcagggactgcgtcaaatccagcctaagcatcgacccgccggtgtaccagtgcatggaccgcgtccccagcttctgcatcgccgccgccgccgcgcactga

SEQ ID NO: 32042 - DNA, 159 bp, Zea mays
  Peptide Sequence Number=SeqID_73821
atgtcgtctccttccatggaaatgcaagtcggcgccctccctgctgcttgtgcgttcaggaagcccaaggaagaagaaccccctgtgcctatgacgagtgggcccaaggccatgatctgtagctctagtgctccaaatggattcaaatttatacagtag

SEQ ID NO: 32043 - DNA, 1532 bp, Zea mays
  Peptide Sequence Number=SeqID_73822
gtgctcagtttaaagctttcgtggaatatgcaccatcacaacaggttcccaagtcaactatcaagaaggatggccgtgaaggaactattatgaaagatccggagtacttggagtttcttgagtttatttcaaagcctactgagcatctgcctagtgctgaaattcagctcgaaaggaaagaagctgaaagggcagctgctggaaaggaggcacctgttgtgacacctcttatgatgtatgtccgccagcaaagggcagctaagagtatggttcatagacctggaagtagacttagcagaaaacttgcaagtgtcgtaagcagttccagtcctaaaaggtcttctgagaagcgcagatcctccacgtatgttgtacgagacaacactaaggagaaaccaacctatatcatggtgccaaagagagaggagcatacacaaagggaaaaagatgttgctggaaattcaggcgtacactatgtaaaaatctcggcacttttggtactaccgattcaatctaattatgggaatgatgccacaagtgggggaacatctggatctggtcagttttataacttttattattatggacctatgtttgatcaatttttaccacagacacctaatggagcaactcagcactcatcaacccctatcaagaatgtgccaccatcgcgttctagacaagaccagcgacttgaagccagtggaaaaattattaagactatactatcaaacaaggaagcccgcagttcaaatccttctgaacatgagcaggaaggtcacatgtttaatactgagaaggataagcggccaccacgggctttcaaccctcgtaccattgtgaaagatcaggtagttgaaaatgctgagaggagccattttgatgagaaggctaatcatctccatggctccgttcccattggtgagaaggttgaaaggcatgctagaaacagagatagacccgatcgtggtgtatgggcagctcgccgctatgacaaatctacatctgcaggtagttcacatccttcgtcgtcagagttccctcaaatgcagtcacattctggagataatattttgcaactagcagatgtctcaaaacttgaactcaacacaggtcatggagacagaaagacagacacaaggggtcaaggtggtagccgtggtgttcctgttgaaaatggtttgtatgcaaaaataagatgtgtagcttttctagatcagtttcatgacacagtttttaatccaggacataggcacgccaaccgtcgtggccttccacgtggaccaaaggaaactgaaatatctgcaagtgtgcctgatgcgaagaattcaaagaggggctctgctagctatggtgctcatgaggtgaggttgtgggtgcacactcagaccacccatgtccaagtcctcattgaggagaatttagagacaagtatgggttcagaagtcaagttcaggctcgtgagtttgttcattgatggtatgctgtgctactctactttattcattgtcttcaagcccttctacggatag

SEQ ID NO: 32044 - DNA, 408 bp, Zea mays
  Peptide Sequence Number=SeqID_73823
atgggcaagagcaggaaaggcggaagttcgtcgcgccattccggcgacaagcggaaacgcgaaccgacccctccctcggaggacttcggcgattccgagtactcagaggaggagttttcctccgagtccgaggggtcgccagacgattcccaggggatcaccgccgaggtgtggacatacatccgggccgtcgagtgctccaggctcgagggctcggatgagtctgaggtctcctcagatgaggagaactcctctgacccgtccgaggaggggagcggcggtgacagcgacgacgagggcgacaacgacgacggaggcgacggtgatggtgacggcgatggcagcaagggcgatggcaagggcggcagcggcagcaacaaggccagtggcaaagcgccactagcttag

SEQ ID NO: 32045 - DNA, 246 bp, Zea mays
  Peptide Sequence Number=SeqID_73824
atgccctgcgccatgctcgtggtctcgccagcgagctcgtgggcctgcacccagagcaccgccgcgcgtgctcggccaggggaatgggaacctgacaaccagggcccacccatcagccccaaccccgctcccttattttcccctcattgggtcgccaacgggcggaccccacccgctcgtgcgatttcgcatctcaccgcaccctgcaccggcctcgtcaccgaccagcgggccccgttccgttag

SEQ ID NO: 32046 - DNA, 267 bp, Zea mays
  Peptide Sequence Number=SeqID_73825
atgaaggacccggcgcaccgcacgaaggtggtgctccggcggctgccgccggcgatcgcgcagcaggccgttgtggaccaggtcgacttgcgcttcgctgggcggtacgactgggcgtgcttccgccccgggaatgccagccaaaagaaccatagacattctcgactttaccttaatttcaagcgccccgaggatgttgttgagttcgctgaggtcttcaatgggcacgtatttgtgaatgaaaaggttacaagcactgactattaa

SEQ ID NO: 32047 - DNA, 444 bp, Zea mays
  Peptide Sequence Number=SeqID_73826
atggctgagggggtgctgctgcacagtagagagaagagctgggcacagggaggaaggggccgagctgcttgcatgcagggagcaagcgctagggggaagaagggcgccctgctgctgctgcgcaagggagatgcatcaggggcgtcgagcagctggaggagggagagctcgtggccatggggggagaagaaagggcaccgtcgagggagcttcaacagtggagtactcggccctggccgagcttcatgcgtgctgggagaagggcgcctgctctccctgctgggggaaaaggttcgcaggggcgcgtgccaggaggaggaggacaaggagggcgctcgactgccatggaagggagcgagtcccccgcgcgctgccgtgagcagggaggaagaaggagagccggctggagaagagagaagggaagtggcggctgaaaaattttga

SEQ ID NO: 32048 - DNA, 1524 bp, Zea mays
  Peptide Sequence Number=SeqID_73827
atgacgcctccagttgcctctttgctaccggaaagagcggcaccacttataaataaaaaggttgtgacgagatggaggcctctcaagctggtgtatgaccacgacattaggcttgggcaggttccagagaaatgcagcttccgaacacttcgtgagtttgtagctaagaggttcccatcatccaaggcagtgttgattaaatataaggatgctgatggtgatctagttaccatcacatcaacagaagagctccggttagctgaattattcattgataaagttggccacgaggttgtagaaaatgggagggaggatgacaataagctcccggtgttgaggctgcaccttgttgaagttagcccagaacaggaaccaactttgccattggaagaagagaagttggaggaggatgaggaattgttgatcaatggtgaagatagcactttacatgctttagcagtggtaaccgacgcagaggtggtgaagcaagatgttgagaacagatctgctgatcaaagtgtggagacagggaagaatgattgtggccatgccgagtgcaaggaagctgagattgatgattggttgcttcagtttgcagatttgttccggaaccaggttgggattgatgcagatgcacatttagacctgcatgagttgggcatggagctgtgctccgaggctctcgaggaaactgtgacaagcatggaggctcaggtcctttttgagttggctgcttctaaatttcaggaggttgctgctttggccttattcaattggggaaatgtgcacatgtgtgaagcaaggaagcgcatccctctcgatgaatctgctccaaaggaagtcatggctgctcagctccgcacagcttattattgggtgaaggagaggtatgctcttgcagggcacaaatatgaggaggcccttaaaatcaagccagacttctatgaagggcttcttgctttaggccagcaacacttcgagactgcaaagcttcattggtcatatgcactggcagataaggctgacctatctacctgggattctttggaaacattcaagctttttgatagcgctgagcagaacatgagggctgcaacagagatgtgggagaaggtggaagaacagagaatggcagagttaaaagaaccaggcgcatgtgataaggatggggtactgaggaaaaggcagcacggtgcaggtggtcaaccggagttgacaccagaagaagcagctgagcaggcagcagtaatgaggcaacagattcacctcttctggggtaatatgcttttcgagcgttcccaagtggagtttaagctcagtgttggtgactggaagacaaatcttgatgcatctgttgaaaggtttaagttggctggagcttcagaatcagatattttgacagtgttgaaaaatcacttttctaatgtagcctctgagtgtgaagagaagaaagtcatgacttcaggcacagaaatttcccaaacaaatgacaatgttgaggataagtgtgtggttgaaacctaa

SEQ ID NO: 32049 - DNA, 1263 bp, Zea mays
  Peptide Sequence Number=SeqID_73828
atgaaggacacaaagaagcccacgcgggcgtcgtctcgcttaggcgggagggtcgtcggcgtggcatccatgcttctcttcgtctcgttggggttcgttctcggcgtgacctcctccaacgccatgttcatccgatactacctccctttcatgccaccgttacgctctagtgctgcgccgtcgtattcgcctccgccgctgacgacaccactgacaccgtcgcaaacgccgccgccgccaccgccgctgccgcaaaacccgcagctgcggtcggcgggcttcctttccccgagcggcgtcatgcacaacatgaccgacgaggagctgtactggcgagcgtccatggcgccgatggtccgccgcacgccagacagccgcgtgcccaaggtggctttcttgttcctggtcaggggggagctgccgctccggcccctgtgggagaagttcttcgcgggccacgaaggccggtactccatttacgtgcacgcccacccgtcctacaccggctcgccgccgacggactccccgttctacggccgctacatcccgagccaggtaattaccaagatcatcccagaacatgcacctcgaccaacgcaactacacattaacttcattcatctcggtggttctattgcattgcaattgcacgcagataacgaaatgggggcgacggcgagccctggtggaggcggagcggcggctcctggcaaacgcgctcctggacctgggcacgagcggttcgcgctcttctccgaggcgtgcatcccggtgtacgacttccccaccgtgcacgccttcctgaccggctccgacaccagcttcgtggactgctacgagaacggcggcagccggtcgcgctaccggcccttcttcgccacccgcaacatcacgctgggcgcgtccgtcgcggacggctcctgcttcccggcgttccgcgacttttgcgtggggcggagggagtgcctcatcgacgagcactacctgccgacgctggtgagcctgctggggtggggccgccgcaacgccaaccgcacgctcacgtacgcggactggaagcggcccgtcaaccggcacccgcacacccacggcccggacgaggtgacggaggagcggatcagggagatcagggaggaaggcggcaggcggtgcttctacaacggcgccaggagaggcatctgcaacctgttcgcgcgcaagttctcgccggacacgctcgagccgctgctccggctggcgcccaaggtcatggggttcgggtga

SEQ ID NO: 32050 - DNA, 189 bp, Zea mays
  Peptide Sequence Number=SeqID_73829
atggcgcgcgcgttgagggtgtggggaggagtagaagaaattttggaccatatgttcttccagtgcccctttgtttcctcatcttcggggaaatatgatagcaccatcgcgaagatgaagagctactacacgtcggtgagggggcacagtgatgattgtaaggaaaatggactcgggccatttggctaa

SEQ ID NO: 32051 - DNA, 429 bp, Zea mays
  Peptide Sequence Number=SeqID_73830
ttgggatcgtccccggccaaggtggcggctcggtcggcggggtaccgcgcgcccgaggcgcccccgccgcccaggccctgggcgtcgcacaggggcgacgtgtacgcgttcggcgtggtgctgctggagctcctgacggggcggttcccgggcagcgagctgccgaacggcggcgtcgtggtggagctgccccggtgggtgcagtccgtggtgcgggaggagtggacgtcggaggtgttcgacctggagctgatgaaggacaagggcatcgaggaggagatgcggcccaaggtcgggtacgtggtgaagatggtcgacgaggtccgcgcgtgcggggagacggcgtcgccgtcgcacgagtccatggacgagtcctccggcgtctcggactcgcccgccgtgtcggagggcggcgcgctcagccagtga

SEQ ID NO: 32052 - DNA, 909 bp, Zea mays
  Peptide Sequence Number=SeqID_73831
atgcctcccaacggcagcactgctctgctgctcctcctgccaccgctgctgctgctgctgctgctgcgttccttcgccaatgccggctctctggatgccgacgtcgcggctctgtcggatttcaggctcgtcgcggacccgtccggcgccgcgctggcgacctggaacgtgtccgcgaacccggcgccgtgcgccggggcgtggcgcggtgtcacctgcgccggcggccgcgtcacgaggctggtgctcgagggcctcggcctctccggcgccgccgcgctgccggcgctcgcgaggctggacggcctccgcgtgctcagcctcaagggcaacggtttctcgggcgaaatccccgacctctcgccgctcgcggggctcaagctgctgttcctcgcggggaacgagctgtccggcgcgattccgccgtcgctgggggcgctgtaccgcctgtaccggctcgacctgtcgtccaacaagctgtccggcgccgtgccgcccgagctcagccggctcgacaggctgctcaccctgaggctggactccaaccggctcagcggcggggttgacgccattgcgctgccgaggctgcaggagctgaacgtctccaacaatctcatgtccgggaggattccggcggcgatggcgtcgttcccggccgcggccttcggcgggaacgtcggcctgtgcagcgcgccgctcccgccctgcaaggacgaggcgcctcagccgaacgcgtcggcggcggtgaacgcgtctgcggcaggggactgccctccggcttctgccatggtggcgtcctcgccttcgggtaagccagcgggcgccgaggcggcgagcggcgtcaaggggaagatgagccgcgccgccgtgttgcaattgtggcgggggacttcgccgtggtggggctaa

SEQ ID NO: 32053 - DNA, 351 bp, Zea mays
  Peptide Sequence Number=SeqID_73832
atgggagagaagcagggaaaatcgcggcttgggaaaatgccagggagagggacgcgccaccataggcgagcgctggggcacgcaggccgagcagggagcgcggcggccatgggagatggtggccaagctggagctgagcgcgcgcagagaagggaccaggaggagctgaatataaaacacctggggtgttacaggctaggttcaaagtaccttcggactcggaataaaactatacacgacatggaaagcatgatcgagacgaagattgatgcagttccgaagctacgcgcaagggtgcttcggctcaatgataaaaagaggaaccggcttaaaggggaaaagaccatctag

SEQ ID NO: 32054 - DNA, 1572 bp, Zea mays
  Peptide Sequence Number=SeqID_73833
atgggcgagataggcacggaccaccgcggcctagccgaggccgaggccggcgtcggcggcaaggaggagggcatcgtcctcggcggccacgaggaggaggaggagacttcgccggtggagcaggtgcggctgacggtgccgtcgacggacgacccgtcgctgccggtgtggacgttccggatgtggagcatcgggctgctgtcgtgcgcgctcatgagcttcctcaaccagttcttctcgtaccggacggagccgctgatcgtgacgcagatcacggtgcaggtggcgtcgctgccgctgggccacttcatggcccgcgcgctgccgcgcgccaggttccgggcgcccgcgctgctgggcggcggggagtggagcctcaacccggggcccttcaacgtcaaggagcacgtgctcatctccatcttcgccaacgccggcttcgcgttcggcaacggcagcgcctacgccgtcgccatcatcgacatcatccgcgccttctaccaccgccacatctccttcttcaccgcctggctcctcgtcgtcaccacgcaggtgctcgggtacgggtgggcagggctgctgcgcaagtacgtggtgcagccggcgcacatgtggtggccgggcacgctcgtccaggtctccctcttccgggcattgcacgagaaggacgaatccgccaaagcctcgcgccagatctctcgctccaagttcttcctggtggtgctggcgtgcagcttcgcctggtacgccgtgccgggctacctcttcccgacgctgacgtccatctcgtgggtgtgctgggtcttctccaggtccgtgacggcgcagcagctggggtcgggcatgagcggcctcggcctcggcgccttcacgctcgactggtccaccgtctcctccttcctcttcagccccctcatctcgcccttcttcgctaccgccaacatcttctttggctacgtgttcttcgtctacgtcatcatgcctgcagcgtactgggggtttgacttgtacagcgccaagacgttccccatcttttcctcgcacctgttcatgtcgaacggcagcagctacgacgtccaatcgatcgtgaacaaccggtttgagcttgacctggacgcttatggtaagaacggcaaagtcagcctcagcgtgttctttgcactcagttacggcttcagcttcgccaccattgccgccaccatcactcatgtcgggctcttctatggaaaggaaatctactaccgtttcagatcgtcgcagaaggagaagcctgacatccacacgaagctgatggagaggtacagcgaaatcccagcatggtggttctactcgttgatggcgctatcaattgtagtgtcccttctcctctgtaccgtgctgaagcgtgagacgccaggtctgaatgtgatcactgagtatgctatgggtctaattatgccgggctctcctatcgccgtcgtctgcttcaaagtctatggctacatgagcatggcacaggctgttgccttcctctcggacttcaaacttggccactacatgaagatccctcccaagtccatgttccttgtccag

SEQ ID NO: 32055 - DNA, 402 bp, Zea mays
  Peptide Sequence Number=SeqID_73834
atgacaaaagaagctggccaaggatctggatcatcagagcgcatgagaggacgaacagaaaggttaacagaaagggtgctccgtctcgcgcgcgaccagctgctcgcctgctcctcctgcgggggcggcgtcgccgcctcagcccgcctgccagcgccgggaggagtagaacggcttgcagatgacggggaggagcagaacgacttgcagatgacgggcctgaatctcatggacaagacgatggccgtcaggggagcaaggattgcctacaacatctgcgatgtggcagacaccgtcgacaatgttaaagccaagatcgaggacaaggaggagggcatcccctcagaccggcagaggctcatctttgctggcaagcaggcaagcagcagccagagggcacgg

SEQ ID NO: 32056 - DNA, 431 bp, Zea mays
  Peptide Sequence Number=SeqID_73835
acagagaactaaggcgccctacagagaatattaatcatcgacgaggcgggcacggtctaaataaacgccctcacaagacgtttcccggccagaggtggataccgctgatcaacctcccggtgctcttcggcgcgacggcctacatgcccccggcgacggctgtcaactacaactcgtggctgctcgtcggcaccgtcttcaacttcttcgtcttccggtaccggaagaagtggtggacgcggtacaactacatcctctccgccgctctcgacgccggcgtcgcgttcatgggggtggtgctgtacttctcgttgaccatgcagaacaagagcatcgactggtggggcaccgcaggagagcactgccctctcgccaggtgccccaccgcgaaaggggtggacttgggtgacggcgtctgcccagtgttctga

SEQ ID NO: 32057 - DNA, 171 bp, Zea mays
  Peptide Sequence Number=SeqID_73836
atggtggccgccgtgcgggtgggcggcgctgttgcgcgcatgacagcgtaccgcttcgtgaagttgatcaatgccgtcagatggggatcagacgggtgttcgagcgcctcggttagtttgatccagtccgttgatcgaaaatctgatggctatttccgcgcgctggtttag

SEQ ID NO: 32058 - DNA, 632 bp, Zea mays
  Peptide Sequence Number=SeqID_73837
atggcggtgaaggcgagggtctcgccgacgggcttgctcgccgccgcaacgtgggcaggcttattatcactcgtggctgcctccgccctcgacgtgccgaccgtggccttcgacgagcgcttctcgccgctcttcggcgacggcaacctcgtccgctcccccgacgacaggagcgtccgcctcctgctcgaccgccggtccggagcgccgtgcggccgcaccgctcccgtgttccgctctgggctcaggtcgtcggtgctgggcacagcaccgtgcgatctcgcgtctccgctccggctctgcgctcttcgtctccgctcctccatggtgggctcgtcgcggccggagctcaaggctcatgtcgtcgcggccagcagcgcgatggccagcagcgcgaagcccagcagcgcggccaggaacgccgaacgcgcacgcgaaggccagcagcgcgatggccgccctcgccgcgacgaccgccgtgctcgggccggcacgggcttctccgtgggccgtgctttccgggccagcccggctcgggtgggccggctcagtgccgtgctcggctggagagatcatccggcacggcccggcacgattgatgaaccgggctacgaatcaagccgaacatcaaa

SEQ ID NO: 32059 - DNA, 1083 bp, Zea mays
  Peptide Sequence Number=SeqID_73838
atgcaggggcggcttgctacccacgtgggtggcagtcgcgggatgcacgtctggcttccggttacccgtctttacgccgggctgcgatcgattttctgccagtgccgctctgcacaggactggagggcgaccacgctcgtcacgtcccacgcccgcgaccaccacgtccgggtctggaccgtctgtgccgccgtcgtctgcgaccacgtccgcgccaagaaggcggccacgctgccggccaggtcgtcgctcctcctgcaccccttcgccaagcggcggccgcacccgcaccgggacaccgtctcctgcctcgtgctgcatgccgtggcggggctgctctacacggcctcccacgaccacaccgtgaaggcgtggcggctctcagacgggagctgcgtcgattccttcgtggtgcacgacgggccggtcaacgctatggcggtgaacgaggcggacgggtgcatcttcactggcgtcgcaacaaggcggtgcttcctctacgcggggtcctcggacggctatgtgaacgcgtgggagaaggaggcgacagtggggcggccgacacacgtggggtacctcaagggccaccgcctggcagtgctctgcctggcgtccggttgcggcgggcgcgtggtggtgagcgggtcagaggacgccacaatgcgcgtgtggaggcgggaggggatcaacagcaagggcggaggcggaagtgcggcgcacacgtgcttggccgtgatcgaggggcaccgaggcccggtgcggtgcctggcggtgggcggcggtgaggcgggggaggtggagggaagcatggtggtgtacagcgccgggctggacaagagcgtgaaggtgtggagggtacgtgtggtggggaaggaagacgacgaggaggacgacgacggtgaggactgcggcgacgatcccgaagcggcagcggagatattaatggcaggtgagattgggaaggctttcgacgacggcgaaacgcacgtgagggacgacgtggaggaggacgagttcgtggctcccacgccggtgctgtcgccggtgtgggtggagaagcggcggcacacgagccgtgggtga

SEQ ID NO: 32060 - DNA, 414 bp, Zea mays
  Peptide Sequence Number=SeqID_73839
atgggtggagggaaaggaacgtggagactaacctcgacggacggcaggaccgagaggagggcgcagcggcggcggggggctctggaagcagatgcgattagggtttttgcccagcggaagcgacaggcggtgcatcttatattgcaatcggcctggtggacgcaggcagcacagacacaagccttgctgggccaagtcaccgtccagcaagctcaaaaaatcccatgggctgtccagcaagccgaagaatcacaacccaacttgacagatagaaaagttggcccggccgacctatgtgctcactgctcagggctcagcgtgaccggctctgttactctgtcattgtttagtgatgttatcaaccaaacttcatgtgtcgggtcgacatgcgagggaggtgacattgggaggtag

SEQ ID NO: 32061 - DNA, 519 bp, Zea mays
  Peptide Sequence Number=SeqID_73840
atggtgaagggtcagcgtgctcaaatgatgctctcaaagtccatgtacaatgctgaaaagatagggaaacgtcaggtcatgatcaggccgtcatccaaggtgatcatcaagttcctgacggtcatgcagcgccatggttacattggcgagttcgagtacgtggatgaccacagagctgggaagatcgtggtggagctgaatggaagactgaataaatgtggtgttattagcccacgttttgatgtaggtgttaaggagatcgagggatggacggcgaggcttcttccatctcgccagtttggctacatcgtcctaacaacttctgctggaattatggaccatgaggaggcccgccatgcgtccaagaactcgtctgatgttttgagaaattgggatttttatgagatgtacctgcgagagccctgtctgtttcgattttcagatattggttttgatttatgcgatacaaacaggtcctttagtccatataactttttgatgctgactttattggtgtaa

SEQ ID NO: 32062 - DNA, 297 bp, Zea mays
  Peptide Sequence Number=SeqID_73841
atgaagtttaccaagcaacctgttcttggtagattgggaggatggagtaaggagagacagctaaaggagtatagaagagtgaatggtctatgcttcacttgtggagagacatttgaacctggtcatcaggcaaggtgccagagagggaatacaatccaattaaatgttctagctcctgaggtcatggggaagattttaactcttgaagtattggagcaaatagagcaagaggagaaacaggaagaagaggaactgaagttgtctctgaatgctattaatggggctgatgactcttaa

SEQ ID NO: 32063 - DNA, 225 bp, Zea mays
  Peptide Sequence Number=SeqID_73842
atgcctctttttgaagcttttgtttcccagaagcaacaccgttactgctttctgggtaatggggatgaagtggagatggatgggcgggtggtggagcacaaagggaggatgacggcggtggtggtggagatccggaagaagaaatccggcgagctggtggctatcgggaggcagtggatgacggcctccaggcccaaaggcgctgctgctcacagcaagatctga

SEQ ID NO: 32064 - DNA, 381 bp, Zea mays
  Peptide Sequence Number=SeqID_73843
atgacaatagagcagatgttcttgatacagactcaggcagtccaagccattggtcagactctggccgctatgcagcagtgttggggcgaaggcgaacacgcttcccttcgctctacgactttgtcttctcatcgcgcggacgaaggccacattcacagaacacgtcagaacaagccaaaggcaccgaccggacggagaccggtgcggtccccttcgctctcatgttgcaagacgagggccttgacgaagtttgcgggcctcctgcactgtcaccgccaggagaggcccatgtggaatttggcccatggtgatgggctccgtgaggacaagcatgataagggtcatgtctgtaataaggttatccttaatgactatatgtaa

SEQ ID NO: 32065 - DNA, 630 bp, Zea mays
  Peptide Sequence Number=SeqID_73844
atggtcactggtgagaatgctcctggtaataataaaatgagttgcccaaatgtccaaaaagatttggttcgagcttgtgcggaggagacaagtgaggctattaaagctgagataggtggtcgtctatttgcagtgctcgttgatgaggctcgggatgcatcaattaaggaacaaatggttgtggttgtaaggtatgttaatgataaaggccatgtaattgagaggtttcttggtgttcaacatgttcctgatactacatcatcttcattaaaggtagctctggatgatatgctagcaagatatggtttatctatttcaagagttagagggcaaggatacgatggagcctcaaatatgagagggcagtttcatggattgcaaagattggtattggatgaaaacccatatgcattttatattcattgttttgctcatcagttacagttggtggtagtttctattgccaaatgttgtggctcagtatatgatttctctaattacatctcattgattgtcaatactgttagtgcatcttgcaaaagaaaagatcaacttcttcagagacatcatgataaaattgtggaagaattagatagtggtgctatatttcctgggagaggaaaaaactaa

SEQ ID NO: 32066 - DNA, 891 bp, Zea mays
  Peptide Sequence Number=SeqID_73845
atggatgttgtagctccccgcagctgtcaccatgatggcatgcagaagggacggcatgttccaaccagcatgagagcccaaacaaccactaggatgagtggagaaatcgtttcagtgacaaagcatcgtcgatggaattgtgtaaaatgtctaaatagagtgaaaagtccaggccccacaactacatctgaaactgtttcaatacaacaggatggaactaatgatggttgctctatttcaatagttcggactttgcctaataattctgattccagaagactgttttcttggacacaacaatcatctcaagggaatgatcaatcaaccctttcaaagagtgcccaagaatgcaattcaaaatgcagctctccttatggcagtagagcagttactacagtgaatgttccagacacattaactgaagcaaatgttccagacacattcaccgaaggcagtgttccagcaacagaaggtttatggagctctttcaataatattgatgtatcagcaaatatcctgaatgatgtctccatggatatcagtgatttacctgatgatgtttctcgaatgatatcaagcatagaagaaaatggcacacagaatctacacggtccaaaaccttgtgtggtgtcaattgaagatgataatagaacagctcaagatgttcctagtgatgactgcaatgagcctaatgctcgtaaaccgaaatctgggcacaatgtctctaaacaaatatctgcgcacaaaaccaaccaagtccgcaaccaggttccacttcaagcatctttaaaaaggaatgttggatctgttgataagaagaaaagggaccaatctgccaacttagctgatatttcagatctcaaattttgtcagaggaagccaaaaagatga

SEQ ID NO: 32067 - DNA, 1044 bp, Zea mays
  Peptide Sequence Number=SeqID_73846
tcactacacacagcagttcaggcatctgatagctcaccgctggaggtccagattagaacccaggatgatatcccatcaaagtacagttcaatgaaagtggggcatccagtgctaagaattgaaggtagtcacttactagcagctgtcgtagtcagtatagataaaggaggaaaggaattgattgttgctgtaagttttagtcttgaagcttctgaagctgtagctgagctaaggtcatcttttcagttgaagcgttgggaagcctatgctaggcttcataaaaaggtttctgagaagtggtggtgtgcacctggacatggtgactggtcaacaaatctggagaggtacacactatgccaggatgggatatttcataagcaagaccaatttgggagacttttacctacatttattcaaataattgatttggcggaagaggaagaggaagagtattggatggttgtatctgccatattcgagggaaaggaaacttgcagtctaccatctgaatcgagttatgctgataaatcatcatctgaacctccaagttctactccattaagcgaccccatcaacaataaggtgcatttgctcagaaccatgcttcaatgggaggagcaagttcgtcgtggcgcatctttggcagagaaaagtctcagtgcaagcatctgcacaaaggcaatcctgcgtgaggtggccataatattctggcctaatggcaagattatgagaatgagcactggtagcacagctgctgacgctgctagaagaatgggcgtcgaagggaagctgctctgggttaatggccaactagtgctgccccaaacagagctaaaggatggggatatagttgaagtgaggatgattgtcaacaagttaaataactctgtctctatgatgctggttaatgagccgacttgggagaccttgccggctgacgaacagctccagttcgaggagcacaaggagcagctgattcaagaggcaaaggcgaagttcctggccaacttcaaggtggacaggaacaataaagtcgtccgataa

SEQ ID NO: 32068 - DNA, 459 bp, Zea mays
  Peptide Sequence Number=SeqID_73847
atggggtgcgtgctgctcgaccacgtggcgccgcggctcgcggtggcctcggccacgctcgtgggtgcccgggaggtgatcgcggcggctgccgccgcgggcgcggggggaagcggcgcggtgcacggcgccgtggcgtcgacgctcgcgcaggtagcggtcacggccgtggcgattgcatcgggggcgtgcctttcgaccaaggtcgacttcctctggcctcgcatcgaccagttgccaggggtcccttttatagccccaaggcagctaggagccgttggagatcaacttggaaaggcaattcttgtcttctgtcgagtggtgcaccggaacgtccgcctccgtgacctcggggactgtgtttctcatggtgcgcaacctttttccttttcacgggaaagtcacatccccacggcgcttgctggatttgaggtcccatggttgcggtggcatgtctga

SEQ ID NO: 32069 - DNA, 2379 bp, Zea mays
  Peptide Sequence Number=SeqID_73848
atggaggcggcgacggccatggatttccacacgctctcgcgccgggagctccaggcgctgtgcaagcgcaacggcgtccgcgccaacatgaccaacgccgccatggccgaggcgctgcagggcctaacctcggtcgacggggtcgacgagatcggcacgactctctgtctgccgacggcgacgccaggaaggtcggcgatgaagtcggcggcgaagatggtggccgtcgaggagcagcagcacggtagcccgctcccccgcggccgccgcgtatcggtaaaatcaccagaggccatccggatggaggttggaggagaggacgagatgaaggagaacgtgaagactcccggcgtggtgctgcgcagcactcgccgcggtattcgggccacacccgcgcctcttcctactccggttccggcgtccagtgcgcgcgcaacagcgaggaggactgccgttcgtaggacgggcgaggtggcgccgaccccagccacccggaggagggcggcctctcgcaaagccgcgggggcagtggaggtggaccgccccgccgaagatgtatccgaggacaagacatcgaagatgacgagagctttggatcaggaagccgaggtggtggcggtcgcatcaaaagaggagaaggggcagcaagacgaaccgagagccgtggtcttggatgtgaaatgtgatggcccagagcaggaggaagttgtccagtttttggaaggggacaacaaagtggaggaagtggaggagggtgaggaagttgattcttctgatgcaaccacagggtctgcagctgttttgggtaagagctgcaatgatcctaaggtggaggaagtggtggttgtcatggaggaacagttcacagagccccatgaaggaattgtgaaagagcaggaacctatcagtgttgagagatctgcttcagtggaagtcatggatgattcaccaatcctaggtgtgattgagaagaaacaggatgcctcagttgaagattgtgaggacttggctgagttctcacctgcaagggagatgactgatgaggccattcctgttactgaagataaggaagtggccatcagtgaggagtctgttactgaagataatgaagtggcaatcagtgaggaggctgttactgaagataaggaagtggccatcatgaggaggctgttactgaagataaggaagtggccatcaatgaggaggctgtttactgaagataaggaagtggccatcagtgaggaggccatcgaggaagatggttttgctaacactgttgagactgatcctaccccaaaggagattcttctgactgaaggtgaaatcatactcattgaaggcaaagaaggtgctgctaatgagatgccacaggctggtgagaccagtgaagaagatgaggaagattaccttgctgaattgaaagaaggggctgctgatcaggtgctgcaggctgagctggcagacaatgaaacaagtaaagaagatgaagatgacctaagtgaaaagagagaagggactgctgctaagatgctgcagggtgaactgacggacgatgagaccagcgaagaagacgatctcgatgaagatgaggaatgggtttcagatgatgatgagaacaccgaggaagattaccttgctgaattgaaagaaggggttgctgatcaggtgctgcaggctgagctggcaaacaatgaaacaggtgaagaagatgaagatgccctaagtgaagagagagaagggactgctgctaagatgctgcagggtgaaccgacagacgatgagaccagtgaagaagacgatctcgatgaagatgagggatgggcttcagatgatgatgagaacactgaggaaattggctctactgacgagaccgatgaagatcctgatgagaccaatgaggagagttacacctctgatgcagtccaaatgatgcagggatctgggatagctgaagatgccaacgaagatgcctctactgaagatgatgatttcagtggcgacctaccaccagagtttgaaaatatcatgatattcagtggtgctgaaaccgagagtgacattgctcctccagtgctcgaggaaaacaaggatgctgttgtatctgcaacaaaaactgcaaagtccctggatgattctgccttaaaaacagggcaggaggaggagggtcctgaagaggttgacaacgttgtgaagtccctggatgaagaggtagaatcaaaggagatgcagaagcagcaaccacaggattataatagcatgagcctcaggaagcttaaagccacacacaagaaatatctcattgctgcaaaggaggaggtcaccgaagggaagaggcttcctctcgaggaggtggatgaaaacgcctgcatcgaccactga

SEQ ID NO: 32070 - DNA, 1259 bp, Zea mays
  Peptide Sequence Number=SeqID_73849
cagatactcttatatttgaaggagtggaggtgacaggataccagatatttgaggatcccaaggctgttaacacaattgtggctggcattcttcacgatgttgtttgtgatacatcagagagcttgaagagcatagaagagcagtttggggctgatgttgctagcttggtatctggtgtatcaaaattaagctacataaaccagctacttcgcaggcatcgacaaaaaaatactggtgggagcactcttacttcagaggaagcaaataatctacgtgttatgttattggggatggttgatgatcctcgtgtggtgctcatcaagctggcagatcgcttgcacaatatgcggacaatttatgctcttcctgtacctaaagctgaagctgttgctcaagagacattggctgtctggtgctcacttgcttctcgattgggagtctgggctttgaaagctgagctggaagatttatgctttgctgtcctccaggtaatcagcatcttggtggcggcgctgatggccctagcatggtccacgatgggacaagcagaagcgaaaagccaaagaaaaaggaatacaacatcgtctcacctgggccctggcgcctactcggtagttgatatacatctgggggccctaacttttggagtccctgaacagtcgcacatgttgcacactaatcctcaaatcttcaagaaaatacaatctgaacttactttaatgtggaatcgtaccggaaaatctaaaaatatgagaagatcatcaattcgaaacgaattacttgcttcaatgaaagatgggaatatggtgtccatcaatgatttgtttagttcatgtaaccaagaaagaccaaatatgaaggacttattgcaggcagttttgccatttgacatctttttggatcggaagaggcgttcatacttccttagcaatctcaatagtaattctggagaatctataccaaatcctaagatagttgacgatgctgctgttgcattagcatctttagcatcttgtgaggaagaacttgagcgagaattactcatatcaacatcgtacatacctgggatggaagtgactttgtcgagtagactcaagagcttgtacagtatctactgcaagatgaaaagaaaagaagtaggaattaggcaagtgtatgatgctcgtgcattgagggtgattgttggagacaaaaatggtgccatgcatggatctgctgtccggagttgttacagcatccttgatatagtacacaggtga

SEQ ID NO: 32071 - DNA, 676 bp, Zea mays
  Peptide Sequence Number=SeqID_73850
atggcaggttctgaccacccactcaggctcgggacgacgaacaggttcgggagtcttgagttcatgtcactcggcatcgagtacaacatggcgcagctccactataattcaccggactgtccggtgcaccaacggagcaacggctatcagcgcgcaacggtcgactctgacagtgaacaagggcctgtgccaacattactggcaccacctgctctagcgtgggggtcaccactcccccatggcgtcgagcaaggtgcatcagcagcacctgccctcctactcgcggggcaggaggagtcggatgctccctggagagacatgggaggaaacgggagagaaccgtccgtgttcaaccctattcccttccaaccgcgttttgataccagctacgacgctcagatgtacgtcgggctgttgttcccctccgggtgcctagaatccgaggagcaagatggcccaagcttcgccctagacttctctaggctaagagaccctgagtccatgctacaagttccttcaaccgttggcgatttggagccgttggcgcaccggacactgtccggtgcacaccagacagtccggtgcccccttcagaccgttggcccggccacgcgtcacgcgcagattgcgcggccgaccgttggctcgcccgaccgttggctcaccggacagtccg

SEQ ID NO: 32072 - DNA, 723 bp, Zea mays
  Peptide Sequence Number=SeqID_73851
atgtccgaagatcccgcgggatcccgccgctggcggtgcgacctcggcggcgacgagcgctggctctcgggggccgctggtgatgaccaattcgaccgcctcccggacgcgctcctcctcgtcatcttcaatcgcatcggcaacgtcaaggcgctcggccgctgctccctcgtctcccgccgcttccacgagctcgtgccccttgtcgactccgtcctcgtccgcgtcgactgcgttatccccgatgagcccccgtcctcctcgtcctcctcgtcgacgccatcctctcctacggcgtccgtgcgcgcccgcggggtcttctcacagattgcgcgcatcgtgctcggcggcatcgtgaagcccatccaggcgcttggtcagatcctctcacccgccaactccgcctccggctttccggcatggagcagagaggcgcgcagactaaaaagccgttcatctcgagcaggtaggcgcggcgctttgcccgagcgcggtcacggcctccttcatggggcccgtcgaaggcgccgggcgccgagctcgtcgaggtcctttcccgccggcgtcgccgatgggcttgatgaccacgagcgtggcgccgtggatcctggtgccgtccgagagctccagcaggcggcgggtagcgcagcttcatgttgcaggcgggcacctgggttcggttggcggcggcggcgggcgcggcggcgagcggactgtccctga

SEQ ID NO: 32073 - DNA, 1209 bp, Zea mays
  Peptide Sequence Number=SeqID_73852
atggcgaccgcggtctccaaatccgccgtcaaatcccaccccaggttgcccaccacagcgcagccgccgccgccgaaccccggctccaacgccgcgtcggctggcggaggggcggcgcctccgccgccgccgtctcccgccgccggcgcgacgccgtcgaagaacgcggcgatggcggagctcaagtcgcgcgtgctcgccgcgctcgccaagctctcggaccgcgacacgcaccacatcgccgttgaggagctggaccgcatcatccgcgcgccgccgtcgaccgacgccgtgcccatgctgctcaatgcgctggcacccgactccccggggctcgcctccccggccaggcgcgagtgtctgcgcctcctcgccacgctctgcacgtcgcacccggatgccgccgcgtcgcacctccacaaggtgctcgcccacctcgcgcgtcggctaaaggacccggcgtccgacacttccgtgcgcgacacgtgccgagacgtcgcggggcagctcgcggcagtgtacctccgccctctgtcggcttcaggcgtttgcgaggcgggcaatgcgaccgtgacgctgttcgtgaagccgctgttcgaggtgatgggggagcagagcaaatcggtgcagggcggggcggccgcatgcttggccaaggcggtggaaggggcgggacctgggcccggtgccatcgggatgtttgggaagctcggtcctaggatttgcaagttgctcggtgggcagggcgtgcaagccaaggcgggattactaggcatcatgggaagtttggcgcaggttagggtttccagcgggttcattcctgctttgtggtactgtggcttgtgtatctcacagaaaagtctagggttgacacttattagttttctaactgctggtgaaacatcactgagaatggtgggagcaatcagttcccagaatatgcagcagactctgcaaagtatccgcgactgccttgagaacagcgattgggctactagaaaagcagctgctgatacattatctgtctttgctacccattctgttcacttgataggtgacggaacagctccaaccattgctgctctcgaagcttgccgttttgataaggtaaggcctgtcagagatagcatgattgatgcagtacagttgtggaaaaagttgactggagaagatgcaaatgcagatggtagaaataaggatctttgctga

SEQ ID NO: 32074 - DNA, 396 bp, Zea mays
  Peptide Sequence Number=SeqID_73853
atgaccaccagccttgtggtggagagaagtgagccgggctgcggcctccccctgtcctcagcttcaaggatgttcatcatccgcgctggggaggagggcgagccaagttggggtcccgccttccgcgtggactggtggcccgcttcttcctccagcatttgggggagaagggcgttcaccagccttgcgaaggaggcgaacttcgggtacgcaggaccggccaactgcgggtgccgtcggccactgcgtgcccggttccccggcttggatggcctcggcgccgcctccgacgctgccttctgccgccttgttggggcgtggctatccgtccaccgcacgggcgacggtcgcgtcgtgcacagtgaggacaggagcgaggacctcttcgcgcgctag

SEQ ID NO: 32075 - DNA, 228 bp, Zea mays
  Peptide Sequence Number=SeqID_73854
atggcaaatgggacggtgatgcccgggtgggaagctgctaagggaaaaaagatcataagaaaatctgctgggtacaacgttatagagttagatggtaggatgcacaagttcctggttgaagataagtcgcatccaagatctgagaaggtatatgacgccctggatagcatcacgctggccatgaagcttgtcagctcggaaaatcctgaagtggaaagcagattttaa

SEQ ID NO: 32076 - DNA, 222 bp, Zea mays
  Peptide Sequence Number=SeqID_73855
atggcggtgcgggtagcattagggaaatccagccactgggtgtggcagcaggaggtgggtgtaccaatttacttagaaggaacagaagctatggaagaggcaaaaatcaagaatattgaaaggatacattttagtggttctagccttcttgacaccatggtgaagctaacaatgatagctcgtgtcaccgatggacgtccactagcagaaggggttggatga

SEQ ID NO: 32077 - DNA, 609 bp, Zea mays
  Peptide Sequence Number=SeqID_73856
aacgtgctgaagcgtgaagtcgctattggcaccggtataccatggacgtcgttgctagctgttcttgttattgtacgcgactgcagcagtccaaacagctgcaacagtgtcggcttgcagccaaccgaacacgccctgaggaaaaagataaaggcgtcagcagcagggccacgacaggcagaggatctagcgctggctggcagcggcagtctggatgcggagcgaagacaaagggagctggcaggcattggctctgctcacgtgtactgccatgcctacccggactgtagggcgccgtccgtgctgcgcggcgcggcgcggcgcagttggttcgtccgttcgttctgggcactgggcttctggctctggctctctgccggtgctggcccggcgaccggcgcccgtcaaaggaactgtccggcggcagcaaacaggccaacgaacgacgaggcaagcaaatccttgcgcctccaagacgcactcggaaccggaacgaccggcgccccggacccacgtgtcggcgaaggacagcgcctccgcccaaacggccgaggaatgtccgtcctctctcctcgctcagagaagtcgatgcaagcgttctgttattaa

SEQ ID NO: 32078 - DNA, 1464 bp, Zea mays
  Peptide Sequence Number=SeqID_73857
atgaggcttaacggcaccttgggctacaacatgaaccagctcactgcactagttcagctggatatgagcaataataatcttggaggcagtgacattccttataatcttcctccgaatctccagagcttaaatcttgcagtaaataacttcactgggactgtaccttactccatctcccagatggttgcacttagggatttggatctatcatacaacacattctctggtgatatcccacatagctttaactccttgacaagtttgaaaacactttaccttcagaacaacaaatttaacggcacaatagatgttctcactgatcttcctcttactgacttaaatgtcgaaaacaaccaactcaccggttggatacccgataaactaaagggaatcaataatctccagacaagtggaaactcgtttaacaatggccctgctccaccacctccaccatcaccattatcacctccatcgacaaatacccctcctccctctcggcagcatgctgttccaagtagcgctggtaaaaataccccatctgaaaatggtggaaaacactcgaaacttggtggtggtgcagtagcaggaatcataatatgtttgctggttgttagcgcaatagttgcattccttgtgatcaaaaggaaatcatggaggttatcacagggacaagaccctgaacaaaatgaacctctcagcccttttgcttcaggacttaaacagatgaaatcgatcaaatctatcaaaatcgtatcaacaatgggaaaagaagaattgcagaagactgtttcgatgagtttgaagcctccaacaaaaattgacctgcacaagtcctttgatgaaaatgataccactaacaaggccatctcaaggaatgtaagcttgtcttccatcacaatacctgcatacacagtggcagaccttcagatggcaacgggcagcttcagtcctgacagttttatcggtgagggatcggtaggccgtgtttacaaagccaaattcggtgatcagaaggtcatggctgtaaagaaaataaacttctctgtatttccaagccatccttcagatttgttcattgagttggttgcaaacatttcaatgttaaatcatccaaaccttgctgagcttgctggttactgttcagagcatggacaatgcttgctggcatatgaattctaccgaaacggttctcttcatgatttccttcatctgaaagatgaacacagcaagccattgtcttggaacaaccgtgtcaagattgcgcttggatctgcaagagcattagagtacctacatgagacttgttcaccctctgtggtccacaagaatttcaagtcatccaacattttattggatggtgagctgaccccccacctctctgattctgggtttgcaggccttcttgcaaaccaggaattccagaagaaacgcttttcatcattatttctttgtggaagtacctag

SEQ ID NO: 32079 - DNA, 2085 bp, Zea mays
  Peptide Sequence Number=SeqID_73858
atggaatcgagttatgccaccgaagagagtaactctaaaggctcttctgcaaatgcatcttcatctccaacaggaagttcagaaacttctgtggatttacaaactcctcctgcagccaaggaaattcctggacgtattgatcatgagggaccaagctggcatgaggtcttagaaatgcgggttcctgatctatcagaagacattgcagaatcacatgcgccttcggatacagatcctgacatactgtctaattcaggaccaactgaggcatacataagctcaacaaatgataaggcagattatccttcttcagtaggcacaagcgaagtgaacggtgtgcctgtaaatgtttcgaacggagctggaactacgctaaaggatgaaatgaaacctaaagaagatgatacgcaccatcagattgatagggatacaaagctgaaaatgaaacaagattcagcaacaacacctgaaagtccgtacagaggccttattgacactgctgcaccctttgagtctgttagagaagctgtcaccaagtttggaggaattgtcgattggaaagctcacaaagctcagatgatggagaggcgcaagctcatacaagttgaattagaaaacattcgaacagaaattccactttgcaaggaggaactagaagccgctgagatgactaaatctcaagttgtcgatgagctagagcacaccaagagacttattgaggagctgaagcatcaactggagaaagtacaggttgaagaagctcaggcaaagcaggactctgagcttgcacaactcagggcacaagaaattgagcacggagtagctgatgaagctagtgcgatagccaggacacaaatggaagtcgccaaagaaaggcacgaaaaggctgttgctgaacttaagtcagtaaaagaggagttggcgtcagtacatgaacagtatgctgccttggtagatgaaagagacacagcaatcaaaagagcagaagaggtcatatctgctgggaaggacattgagaagcgagtggaacaactgacattagaactgattgcgtctaaagggtctcttgaattggcccatgctgcgcatcatgaagcagaggaacgtaggatcggtgcagcattggcgaaagagcaggattgcaatgcttgggagagagagttgcgtcaggcacaagaggagctggaacgattagacagtaagcttgcgttcagtaacgatatgcagcacaatattgatgcaaatttgcacaagttgcttagcctcaattcggagctgtctgcctatgtggcgaacaaactgactgaagaagctgaaggtgtttccaaggatcatgagtccgaagattctagacacattagcaacgcagttaaggaagctctagcatcgaaacagaaagaacttcaggagctcaaagccgacattgagaaggcaaaggctgaggccaacgtgctaagatttgctgccatgacactcagatcagaactggacaacgagaacgcttcacttgtcgcgttgcagcagggagaggctatggcatccgttgctgtttcttcactagaagctgagctcaaccggacgaaacaagagatagaatctgtcaggtccaaggaggcagaggcccaagaaaagatggtggagcttcccatggttttacagcaagcgactcaggaggccgaggacgccagggtagcagctcacgcggcccacgaggagctgaggaaggcgaaggaggcattcgagcaaaccaaggctgccgcagctgcagcagagaccaggttatctgctgttgtgaaagaaacagaagcatccgtagcatcagagaggctagcacgcgaggcgcttcaagctttgcaagaaagcgaacaggcaagagaaactaaggattctcagcgaggagtggtgcttcctataagcgagtactacgaacttagcaagagggcacatgaagccgaagaacaggcgagcgagaaggtagcagaagcactggcacaggtagtgtcggcaaaggaatcagaagcaatgagcctggagagcctaaaggaagcgtccgatgaatttggacgagaagaaggaagctcttga

SEQ ID NO: 32080 - DNA, 989 bp, Zea mays
  Peptide Sequence Number=SeqID_73859
atggccggcggcgaccacctcccggcctactgctacttcttctccagcgccccgacgagcccgtccagggcgagctgcaactgcaaccccgcgtcgtcgccgccgggtggcgacgaggccagcacgttcgacttcacgctcgggttcagcgggcagctgcaggaggccacgccgaccctcgcggccgccgacgagctcttcgagggcggcaggattcggccgctgaacgcgccgcacccgagcattctgcgggtcgccaacgacgcctcctccggctccgccgatggcactcggtgctccccgaggagagccggcggcgcggatcgtcaagcggaggcggcgccgttggagagaggcaggtcgggctgcaggccctcctccgccgccgctgcggcgccttcttcgtcgaggagcaggagcaggagggccacgcggtctctgtccccgttcaggggcggcagtggcctggacgccgccgccgctgacgacgtcgacgacgagtcccctcctccgtctccccgagcctcctccatgatacgtggctgcggcagcggcagcggcagcaggaagtggcggctcaaggacctgttcctcttccgcagcgcgtccgagggccgcgccaccggcaaggacccgctcctcaagtacaccgcgctgtcgtcggcgtcgttctggcacccccacggccagccccagaggctaagcagcgcgtccatgtccatgcgcaagggaagagggtcggctgcgtcggccggcgacacgccgtacgccacgatcaaccgggcggccgccgccgaggacgtgcggcgccggacgaccaccgccaccaccacgccgctgccgttccaccgcaacagcctgttcggctacctgcgctccaacccggcgatccacagcatcagcaggaagctggggggcagcggccactccggctcgtcctcgtcctccagccgcggaggcaggcaggcagcaggccgacatgacgatcc

SEQ ID NO: 32081 - DNA, 165 bp, Zea mays
  Peptide Sequence Number=SeqID_73860
atggcccgagccgccgctcgcttgcctgctcgcctggaatggctggtgccttccggaaaaggaaaactgaaaccttttttgttcgtcgccatctgtccagggtctgcaggacaggccagcgtggtacaaggagaaggtttatccagaaaacaagtcttaatttag

SEQ ID NO: 32082 - DNA, 651 bp, Zea mays
  Peptide Sequence Number=SeqID_73861
atggtgtcgggctacgcgcagaacgggaggcatgaggaggcggtgcgcacgttcctggacatgtgggacggggccggggtgcggcccaacgagctcaccgtcagcagcgtcctgcccgcgtgcgctgcgctcggggccctcgcgctggggaggaaggtggagcgctatgccagggggagagggatgctcaggaacgtctatgtcgccaacgccttggtcgagatgtacgccaagtgcggcagcatccaccgggcttggaaggtgtttcggggcatggggacgcagagggatctttgttcttggaactccatgatcatggcgtttgtcgtgcatggcctctggacggaggcgctgaccttgtttcataaactgaggatgacaggggcaaaaccagatggcattacatttgttggagtcattttggcctgtactcatggaggcttggtggatgaaggcaagctgcttttcaactcgatgagaggggagttcggtcttaagccaagaatcgagcactatggttgcatggttgacctgctggggcgtgttggtctgttaaaagaagctaacagtctgatcgcgagcatgccaatggagcctgacgccgtaatctggggagccctgcttggagcctgcacttccatggcaacttag

SEQ ID NO: 32083 - DNA, 168 bp, Zea mays
  Peptide Sequence Number=SeqID_73862
atggagggcgaccaggctgaagaaaagctcaactcaactggagtcaagtttaatctagctgaagaaaaactcaactcagctaaagtcaagttcaacccaactgaagaaaatctcaactcagctgaagtcaagttcaacccagctaaagaaaagttcaactcagcttaa

SEQ ID NO: 32084 - DNA, 1329 bp, Zea mays
  Peptide Sequence Number=SeqID_73863
atggatttctccggcggcggcggcggcggccgcagccgcgccgagccggcccggtggctcgagatcgcccggaagctactcgccgcgcgggacctggtcggctgcaagcgactggcggagcgcgcggttgaggctgacccgtacctccccggtgcggacgagctcctcgccgtcgccgacgtcctcctcgcctcccagcgcctgctcccctccggccgccccgatccggtcggcgtgctccagctccagcccgccccgggccttgaccccgccgccgccaagcgctccttccaccgcctctcgcagctcgtgtcttccccgcgtaatccccgtcccgccgcggacaccgctcttcatttcatccaagaagcctttgctgatctctccagcaacgcctccgctgatccacctcctgctcctgctcctgctgccgctcctgttcctgttcctgcccctgcccctgctgcccctcctgctcctgttcctgctcctgctgccgctccttctcttatcccagctcctgctcctgtttctggggacgccttggcctcggctgatggcaatgcgttctggacggtgtgcccctactgctgccatgtgtatcaataccagcgtgcgctggtggggcgcgcgctcaggtgccagagcgcgggttgccggcgagcgttcgaggccacagagatcccgaacgcgccgcctattgtgcccggcacagacatgtactactgcgcgtggggcttcttccccatgggtttccctaaggcagctgatttgagcaccaactggaggccattttgccccatgtttcctgggaattctgaatctccgctgcagccagcacctgcggtcactgtgaatgttgatgtacagaatcttgagaataatggcggcactgatgtacaaaatgttgagaataatggcattgacgacaattcaacgccagcaagtgtgcagcccccaggtaagagtggtgacattgaccgtgcagcaggtccatctagaggaaggatgaagaagacaacagcccgcaagaaagttggtgctgtatctaagaagcacagttccagtggcgtggacagtggcattgagccatctatgcttggggcagattcgttgaatgggaatgcaggaagtgggcagacagtgggtactagagagatcaacataaatgaggtggcaatgccaactgatagcgccacaatgcttaattttggcggggatgaggatatcaggtttgatttggatgttgatgcgactgatgctatattggggaatttgcacaacttaccattcttgagggaggatggcaataacagaaggatgttttag

SEQ ID NO: 32085 - DNA, 595 bp, Zea mays
  Peptide Sequence Number=SeqID_73864
atggcatataaactggatctgccgacgtcgtcttcaatccaccccgtctttcacgtctcacgactgaagcaagcggctcccagtgatcggcaggtgctcgtcaagtggtccggatggccggtctccatggctatgtgggaagaggaggagcgtctttgccaagagttcccaggcgcgctctctctagccggcgacgattgggcgagcggcgccactcaacgccaggtcttcgtgaaaaccatcgccggcgatgagtttcaaccagataactctggaaccattgatgcaaaagagctcaatgttgccatgagagccttgggatttgagatgactgaagagcaaattaggcaaatgattgctgatgttgacaaagatggcagtggagcgatcgactacgaggagtttgagcacatgatgactgccaaaatcggagagagggatagtaaagaggagctttcaaaagcattccgcattattgatcaagatggaaatggaaagatttctaacattgatatccagaggattgccaaagagctgggtgtaaatctcaccctcgatgagatccaagacatggtgcaagaggctgatagaaatg

SEQ ID NO: 32086 - DNA, 1356 bp, Zea mays
  Peptide Sequence Number=SeqID_73865
atgggagggtgtcacgcgaagccgctcacccacgacgcggaccgctcgccgccgcacgcagcgccggcgaccccgcccccgggctccgccacgcccgccacccccggccccgggaagaagcactggggcggtgtccccgttcttcgcgttctccacgccgagcccgagccccgcgcaccacctcttcggcggctccgcggcatcgccgcgcaacacatccgggcggcgctcgccaggcgccacggcccgccgcggccgtctatccccgaggaaggcggcggcgagggggagggcggcggcggcggaggcaggggcctcgacaaggggtttgggttcaacaaggggtttgcggccaagtatgacttgggggatgaggtcggacgggggcacttcggctacacctgcgccgccacggttaagaagggcgcgcgcaagggggagtccgtcgccgtcaaggtcatccccaaagcaaagatgactacatccattgctatagaggatgtccgaagggaggttaaaatcttgaaagctttagcaggaaacaaaaacttggtccaattttatgatgcctacgaggacaacgacaacgtgtatatagtaatggagctgtgcgaaggtggagagctacttgacagaatactttcccgaggcgggaagtactccgaggatgatgcaaaagctgtcctggtgcaaatattaaatgtcgtcgctttttgccacattcaaggagtggttcatcgagatctcaaaccagagaattttctttttacatcaaaagatgatgattcccatcttaaggccattgattttggcctatcagactttgtaaaaccagatgagaggctcaatgacatagttggaagtgcttattatgttgctccagaagttctgcatagatgctatagcacagaagctgatgtttggagcataggtgtaattgcatatatccttctttgtggcagtcgtccattttgggcacgcacggaatctggcatattccgttcggttctcaaagccgatcccagttacaatgaggcaccatggccttctctgactccggaagcaatggattttgtcaagcgattgctgtgcaaggatccgcgtagaaggatgactgcagctcaggctttaagtcatccatggatcagaaattataatgacattaagctgccgttggacattcttatattccgacttatcaaagcttatattcgctcctcatctttacggaaagctgctctgagggctctgtcaaagaccttaaccgtagacgagcttttctacctgaaatcacagttttctctattggaaccagacaggaatgggtgcatcactcttgacatatcagatggttag

SEQ ID NO: 32087 - DNA, 2634 bp, Zea mays
  Peptide Sequence Number=SeqID_73866
atggggagcaaaatccatgtttccagagacggtgtttctggatgttggaacctgcatatgaacacattgtgctggtacaatacagagaggttgctgagggcagatattattcatcacaactatcaaatggccccccagaacctctttcatccttgggatatccaaatgccatctgtggaaaccaataccacagatccacttctggcactagtgagggcagagtacaacaaaaatgatggcagtttactaagcataccagaggttggacacacttgtcaacaaaatcagactggtaatggtaactcaaaaaataaatctgagcttaatatggctttaaagaagatagctgagcagttaagtttgggtgaagatgatgatgatgactatatttactcaaatcaaactcattccatgggaggtgacaaccaaataaaacaaattcgacaagaaggaacacagaaaggtttgagtaggaatatagcaccatcatgggaagatgtactgcactccagttcaggtttaccaacttcatccatataccagcaatctgatgtcaagtatcagaaaaaatcagaataccagccaccggaaatcctggacagcagtgatttgcgcatacaactttctgctactaaaaggtttcttttaggaccagaagccagcattgactcaccatctttgaactctgtgctgagaaacagagtcaacagtgtaactgataccatttcagcttatgacagtagatttgaaagctctctgaacccagattggcaaacaaaaacagcattaacatttcaaagcaattctcagggctctgaaataacggagttgtttgaccatgatcattttgaaccctactccagagaagatacaacaatttccttaggacagacaaacaagtttaacattcgtgaggtctctccagaatgggcattttcctatgagatcaccaaggtcatcattacgggagattttctgtgtgatccatcgaatttgtgttgggctgtgatgtttggtgacaatgaggtacccgttgaaatagttcagccaggtgttctccgctgtcacacaccactgcacagcaatgggaatctcagaatctgcattacttcgggaaacagagaagtttgtagtgaattcaaagactttgagttccgctcaaaaccaacctcttctagtttcacagacattgcaccatcttctagacatctgaaatccagtgaagagttattacttcttgcaaaatttgctagaatgcttttgtctgggaatggaaaccgtgaagttccagatggtgatccccaatctggacagtgtccaaaacttaagacgaacgaagagctctgggataggttgattaacgaacttaaagtagggtgtgaaaatccattaagctcggttgattggattgtggagcaactgctgaaaagtaatctacaacagtggttatcagtgaagctcagaggattcaatggaacggattttttatccaagcaagagcagggtattatacacttaatctctgccctaggctatgagtgggcattgtctccagttctcagtgctggtgttggtctaaattttcgtgattcaaatggatggactgctcttcattgggctgcttattttggaagggaaaagatggttgctgcacttcttgctgctggtgcatcggcaacagcagttactgatcccactgcacaagacccagtgggtaaaacagcagctttcctggcttctgaacgagggcatacgggacttgcaggttatctttctgaagtgtcgctaactagctatcttgcatcactcactatagaagaaagtgatgtctcaaaaggatcagctgaagttgaagcagagagagctgtggaaggcatatctcagaggaatgcccaacggcatggtggcacagaagatgagctatcaatgaaggattctttggcggcagtgaggaatgcagctcaagcagcagctcgcatccagaatgctttccgtgccttctctttcaggaagagacagcagaagactgctcgacttagggatgtgtatggaatgacccaagaggatatagatgaacttgcagctgcatcaaggttgtaccaccaagctcatgcttcaagtggtcagttttatgatagagcagctgtttcgattcagaagaaatacaaaggatggaaaggtcgcaaacattttctcaacatgagaagaaatgcagttaaaatacaggctcatgtaagaggccatcaagtgagaaagaaatacagaacaattgtaagcactgtcagtgtgctagagaaagtaatacttcggtggcgccggaaaggtcatggcctacgtggcttccgagctgagcagcaaccaatggtcgaagcaatagaggaagatgatgaggaagacgacgatttcgatgatgatgaagcagtcaaggtcttccgtcggcagaaggtcgatcaagctgtaaaagaggctgtgtcaagggtgctgtccatggtagactctaccgaagcgaggatgcaatatcgacgaatgcttgaggagtttcgccaggcaactgcagaattggaaggatcaaatgaagtgacatcaatatttgacagtgacttagagttattagggatcaacaatttcatgtaa

SEQ ID NO: 32088 - DNA, 795 bp, Zea mays
  Peptide Sequence Number=SeqID_73867
atggcctccgaggcggcgcgacggcggcaggaggtggcggtggaggggcagcggcacctggaggagaccatcgcagccgcgttccagatcctcgtatccatgaacgacgagctctgcaacgccggtctctggtcctcctcttccgtatcggcagcagcagctgctgccgcttccgctggctcccagcaccaccaatcggctactccgccgccgccacactctgcggattccgacgctgccgacgcagggggcgcacccggccctggcgggtcgctcgacgaggcgaggcaccgctacaagtcagccgtggtggcgctgcgggactccatctctgctgtgtcgtcctgccctcagaaacatgattactgcatgccgcatggatttagatactgtctcaatcaagacatttttttgaagaaacattttggggatgctattgaccaaagttttaaaacgtgtctggggagaactaatatgcccaaggcttctggactaaagagaagcggaaggcgcctaagaaaatggacgaagggagtaattattaaggacaaagccaactggcttcttatccctcccacatatgacttgtctaagatcatgcattctccacttcgtcaggacattggttcaacagaatctgaagttgaccaggcggagattgagagattggaagagcatgcttctgctttaagaaaggaaattgaaagcaaaaacaagcaagtaaagctcctcatggatcagctccgtgacctaataactgacgtagccatgtggcagagcccttgctctgtgtga

SEQ ID NO: 32089 - DNA, 189 bp, Zea mays
  Peptide Sequence Number=SeqID_73868
atggcggcgggcggtagggtttcaatcccggcaggggcgcggcgcacgatcgcggacatcaaggagatcgccggcggccacaccgacgaggaggtctacgctatgctccgcgagtgcaacatggatcccaacgagaccgttcagaggctcctcctcgaagggtttttggatattcaggtggctgcttga

SEQ ID NO: 32090 - DNA, 676 bp, Zea mays
  Peptide Sequence Number=SeqID_73869
gatgagcgagcgagatgcgcgtgacgatgggaacaccaccggccgcagcgcgccggccgcgggcatcgactcattctcgcagctgccgttcatccgccctctagcccgcgagaagcagaaggcgctgggtgggcaccagaacgcgcacaagcgggagcggcagcacgccaagcgcgcgcagttccagaccgccatggccatgcaccagcaccgcagccagtactactacccgcacccggtcccggaccccgcccacctctaccccgccttcgcggcttatagacaccaccaccgcttcgccgccgccacgccgccgccgcactacccctcgtgggcgggcgccaccagcaggcactacagcagcgggcccgggtccatctcgcagccgatcgacggcagcccggtgacgccgccgtccgggctgtggctgcaggtccccacgggcggcggcatcctagtgggtggtgctccgtctccgttggccgccgcgcgacgtcaagaacagcccgtgcaaccacttccggtactcggagctgaggaacccgcagtggtggggcggggagctgctggctcagcgcccttctcgccgtcaacctcctcctcgtcatcgccggccgcttcgcctcataagcgccccgccccgccggagaatgtgagtttggatctgagcttgtag

SEQ ID NO: 32091 - DNA, 402 bp, Zea mays
  Peptide Sequence Number=SeqID_73870
atggaggatgcatcagacaaggaggaagctaccttggttgcacaaactacttttgaggatcccatctttcttaccaccaacgaagatggtccttctcattctatgattgaggacaatatagaacatgttttggtggaggacgcattagatgatgtggaagcaaccttggttgcgcaaatgacatttgaggatccaatctttcttactaccatcaaagatggtccttctctttctatggttgaggataatacagaacctcgactgctagaggatccttcgatagagacaatgtcttcttcatccaccaaagctagagaggatgaggatcttgcatgccctcctttagctcccccctcaccatcgactacaacagttaggcatcaatgtcttcctctttattga

SEQ ID NO: 32092 - DNA, 1513 bp, Zea mays
  Peptide Sequence Number=SeqID_73871
taacagtttgttgagtggtctttgcaacggtccatatcaatcagttgatcctgctgctgtgctggtgtctagttctagtgctgttggtgataagtctggttcaacagccttggctgatcttacaggtggtcttccattcaaagatgtagtcgctactatagatccaaattcactgcaaccattgaaaccagcaccaccatcagatcctgtggttgtatcttttctcaactctcacagccttggtgacgttggtgcttccagacaaactattggaatcaagaagacatcagtagaacataaggtggggcgtgatgtatcaacagacaaagcaaccgaggatgctaccgtacatgataatgtacctttggctgctgctgacactatcacccaatcagctccagtaccgaattcagctggtacagaggattcgttgaaggtggacatatgtttaaatgatctacagttatcagataagcagcatgtgataattccagatcatcttcaagtttctgagtctgaaaagtatgttctaagctttggaagcttcgacgtcagttttcagcaaactaagggctcttcagatcctgattatgtgaagagctctttaccgaaattcagttcgtctcatgagttggatggcaacattgatgaacttcagtccatgcaaagagatcagaattcaacatctgttgtccaagaggaagctggtcatgttcctcaaccttctgcaaagctagaaaaatgtgcaccctcagcaatggagatttcatctattgcccttatggaatcaaaagactgtgatgacgattcagccacttcaggggatccccaatctacaggaactcatagtgcaccatcttatgtgacatatggatttgcaccacaatcacattcgtaccatcccacaactgatgctgatgaacggctgtccccttctcttgctactcaagctgctcacaagtatgggaatatcccagttgttcccacacaaactggccaggatcaagaggggaacgactcacctgtgattatttcatctgtttctgcttccgttgctacccctgctgctggagttctgtcggcttcagttgctatccctcaacagtctgttcctgtatttcgccagcctttaggtgttcatataccacatctcccgatgaattatgtcccttacaatcagtacatttcaccattttttattccaccccctacccttcacccttttatgggtaatgctacattttctcagccaccttcaacaggggtcatgtacccaactcctggaaccgcaagagttcttccacctgtcaaattcccagttccttcattcaagcctggtgctaacattgggagccaggcatctattggagttcctggttgctatggaacatatggttctagtccatcggtttacactaataacgcacccgtgtcatctggaaatctagcagaaaatgacaatgttacttcatctcagttcaaggaaaataacatctattttgctgggctccag

SEQ ID NO: 32093 - DNA, 165 bp, Zea mays
  Peptide Sequence Number=SeqID_73872
atggagaacaaggctcctcaaatcgcgctatcagaacgactgaagaagatggccatggaactggtgtcaaccaaatttggttgtcagtctctgcgcattccggccagtacaggttcaccggagggcacgctcaccgtcgttcacgtcgtggacttgacgctgtga

SEQ ID NO: 32094 - DNA, 307 bp, Zea mays
  Peptide Sequence Number=SeqID_73873
gcactcactgccgtcaggaacaaggcgggtgcttgtgtcccgcaggctgaaggagatgaaggaggcactaagtcaggcggctgacttcgcagactgcgtggcgtcgggggccctgatggcagttgtgtctgccgaagtcgagagacttcgggcgcaacatgccgacgccgtccgggaaaaattggctgccgacagcaagtgccgcaagctggctgttggggaccttcggcgtccgaaggaaagcttcggcgtaacagcaaagagtggaaccgacttaaagatgaaaaggctatccagaccccgatag

SEQ ID NO: 32095 - DNA, 303 bp, Zea mays
  Peptide Sequence Number=SeqID_73874
atgaatgggctccggaccccttcaacaggactaatggcctcggacccacgacctgcacggggacaggttcagggttgccatgtgtcctggaggaagagatgctcaggagttgcacttgtgagtctagacccctatgaatgggctttggaccccttcgaccggattaatggcctcggacccgcaacctacacgaggataggtccttggttgccacgtgtcccagaggaagagatgctcagtagatgcacttgtgagtccagacccccatggatgggtctcgggcccccgtttgtgtcgttctag

SEQ ID NO: 32096 - DNA, 525 bp, Zea mays
  Peptide Sequence Number=SeqID_73875
atggagttccggtgtcgagatactgagggagacacacgtagagaccgagctgttggcgacatggacagacaggtccgagcagggagattggcgcgctggagcagcaagacaagaccgcgcccaggcgagctggagcaggggcaagctggggagccggcgcccaccagagaagaagatccggcgcagagagcaaccagagagaggggcgccgaactgaaacagggaggagcgccggcggtgaagcgtccgggcgagctggagactaggcgaccgagcgccatggcacagggcaaggccgagcagggcgcaatccgagttgggcgagctgggcgcggcgctggaggagagatggagggagagagaagcaagggggcgcgccatgggaaggaccgagctggagctggagctaaagccggcggcggggtgctggagcgtggtgggcgcgacctgcagagaagcttcgcgcgtgcggagagaaggaagaagccgagggaggtggctggagggggcttggctggcagatga

SEQ ID NO: 32097 - DNA, 279 bp, Zea mays
  Peptide Sequence Number=SeqID_73876
atgggtgggatgttttcaaaaacaaaacttattggtggatccatcatggccatgatgggttcaacatcggaaaagatgtacctctgccaggtgaagaagcaggaaatttttgttgcttctgttccaaggtggtgcctaaagaagaaaatcaagactgaagccgcgggggaagtgtcctcctttaagaaaaactttttactgtttatcgggaggggtttttgcctcccaggttatgtaataatattactcctgcactcctatattcgctctggtctgtaa

SEQ ID NO: 32098 - DNA, 378 bp, Zea mays
  Peptide Sequence Number=SeqID_73877
atggctggcgcccagcagcagccatgcgcagtgtcgctgctccattccctctcccagctcggcctcgccattgcgcagggaagagcaggcgcccagaaattcccgcagcaagcagcgcacgtcctgctgtccatggcgagtagtcgagcgccctccctgtcttcttcctcccctggccgagctactacacaagcagcagcagcagctcccatggatggcgcccagattttcgcgccctcagccatggcgcccaagcctgcgcacttccctatccatggcgtccgagttccctgcgcccagctcttcgatccaaaaatagctgccctgcgcagcgctcctctccgagctcgccccttcgcttctctttcccatgactag

SEQ ID NO: 32099 - DNA, 222 bp, Zea mays
  Peptide Sequence Number=SeqID_73878
atgcgccaactgtgtgccaacagtgcgccaacagtgagccaacggtgcgccaacagtgcggcgacgatgtgcagcccatggctatttctgacacaccggacagtcctgtcagccaacggtgcgccaactgtgtgctacagtgcgccaacggtgagccacggtgcgacaacagtgctcaacgctgtgcagccgactgatagtcctatacaatatcagcatcag

SEQ ID NO: 32100 - DNA, 360 bp, Zea mays
  Peptide Sequence Number=SeqID_73879
atggctgaaggcgcgaaaatctgggtgccatccatgggagctgctgtcgctgcttgtgtagtagctcgaccaggggaggaagaagacacggagggcgctcggctgctcgccatggatagcaggacgtgcgctgcttgctgctggaatttctgggcgcctgctcttccctacgcaatggcaaggccgagctgggagagggaatggagcagcggcgctgcgcatggctgctactgggcgccggccatggagttcctgctcgccagcagggagcagggaaggcattgtgaagggcgtcagcttgcacccaggaagctcctgctcctgctgcaaggggcagagggaggaggacgccatggataa

SEQ ID NO: 32101 - DNA, 1977 bp, Zea mays
  Peptide Sequence Number=SeqID_73880
atgttcgaccatgagagccagtcggtcaattggatggcgcagagtgcgcgggcaaagggtgccaagacgcgcactgcatggttccgctggccaacactgaagctttgctcaacggagttgcggaaggagatcgtgggcaagaagaagggccggcgacgggatgccgcggttgggctgtttgtcttcccggcgcagtctcgcgtgaccggtgccaagtactcctaccagtggatggcgctggcgcagcagaatgggtggcatgtgatgcttgatgctggtgcacttggccccaaggacatggattcactgggtctctcgctattccggccggacttcattataacttcgttctacagggtctttggtgcagacccaactgggtttggttgccttctgatcaagaagtcagtaattgggacactgcaggggagaaacgggtgtaatgcatcgggaatggtgaggattgttccggtgtttccacagtatctcagtgactcggttgatggctttgatgcattcgatgggtttgaagatgatccaggcgttgacaaagatgaaaagccctcttctaatgctcaaaatgggtcgcagctgccggcattttcaggtgtctacacgtctgctcaggttagagagacttttgagagtgatcctggtcgggacagcagctcggacagggatggggcaagcaccatctttgaagaaacggagagtgtctctatgggtgagatcatgaggagtccagcattcagtgaggactgttcatcagagaactctttctgggtagatgttggccatagcccattggggtcagagaagtctggtcagttcaagaaagggaaactgggttcaccattaccatcttcttggtttaatggaagaaagtgtaacaagaggatgtccccaaacttaagttccaggatatctagaagtccactttatgatggtcatgtgatttcctttgatgcagccgtgctatcagtctcgcaagatgcagactgcctcaaggaagaccctgaagaagaaaattttgagaatgggcggagagctcatttcaggcaggttagtgaaattcaagaggagccagaggccgaagaggtggcatgccaacgtgctatgaatggtggcgcggagcacaaagaaagcgcaataagaagggagactgaaggggagttccggctactgggaggtagggatggcaacaacagatttaccggggggcgactcttcggtgttgaagagattgatggaggtttaagcatggggcgcagagtttctttcagcacagaagctaatatcattgctgacaggctgaatcgggcctcagatgctgctgaagcttctggatatacattccctggtgatgatggttgtgcaagtgatggatatgatgatgctcaggactggggcaggagggagccagagataatttgcaggcacattgatcatgttgatatgatgggactcaacagaactactcttaggttgagatacttgatcaattggctcgtaacttcacttttgcaactgaagttatcagactcaaaaggtggcgatggagtccctcttgtacacatctatggccccaagattaagtatgaaaggggagcagctgttgcttttaatgtgaagcaaaatgatggaacatttgtgaatgctgaagttgttcaaaagatcgctgagaaaaatggcatatctgttggcattggttttctcagtcatataaaagtagacatgaagcagaaacagttaaatggcacgctcgatataccggaggcttcattttataagaatggacgcagagacaataaaaaggtgaccataagagttgaagtcgtgactgcttcacttggcttccttactaactttgaagatgtttacaagatgtgggcttttgttgccaagttccttgatccttcatttcttgaaagtgaacgccttaccattgctgctgaccactcagaagggcaaacttga

SEQ ID NO: 32102 - DNA, 450 bp, Zea mays
  Peptide Sequence Number=SeqID_73881
atggctacaggcctacagcgagcgggcgaggaggcgtgcgcgacctccagttccaatctgagcgactttggtggcatggacttcctgttcaccatcgccggcttcctcaccatcatcagctttggtggcggacatgagaggagagaagaatccttcgaggtggatcttgatttaactcttaatgagcttggagatggggaggacactcaaggatctgaagaaaaggagaaagaactccatgctctgaagtgcctcgcggttgagtcagaacaaggcacagatgggtgcgacagagctgtgggatctcttggcctccggctcagagcaattcgtggagatgtacagggtgtatcaacacctcaggctgaagaactggtttgtaaggtcaggactgcagtacaggcagactttgttgctcactgtcatcgtccgacactagtgcactcgtag

SEQ ID NO: 32103 - DNA, 1086 bp, Zea mays
  Peptide Sequence Number=SeqID_73882
atgtttttcgacgggtcgctgatgaagacgggggccggcgcaggcctcctcttcgtctcgcccctcaggaagcacctacgctacgtgctacgcctccacttccaggcgtccaacaacgtggctaagtacgaggctctgctcatcatcgaccaagtcatgaagaactcccactgccgcgacccgaagatggaagcctactgcgatgaggttcggcgcctggaagacaagttctacgggctcgagctcaaccacatcgcccgacgctacaacgagactgcggacgagctggctaaaatagcctcgggacgaacaacagttcccccggacgtgttctcccgtgacctgcaccaaccctccgtcaagaccgaggacacgcccgagcccgaggcaccttcggctccgcccgaggcaccctcggctcagtccaagaaggcacccgggggctacacacacctgttggtcgccatcgacaaattctccaagtggatcgaggtccaacccctaaacagcattaggtccgaacaggcggtggcgttcttcaccaacatcatccatcgctttggggtcccgaactccatcatcaccgacaacggcacccagttcaccggcagaaagttcctggacttctgcaaggatcaccacatccgggtggactgggctgccgtggctcaccccatgacgaatgagcaagtggagcgggctaacggcatgatcctgcaaggactcaagcctcagatctacaacgacctcaacaagttcggcaagcggtggatgaaggaactcctctcggtggtctggagtctgagaacaacgccgagtcgagccacgggcttcacaccgttctttctagtctatggggccgaggccatcttgcccacagacttggaatacggttccccgagggcgagggcctacaccgaccaaagcaaccgagccaaccgagaagactcgctggaccagctggaggaggctcgggatgtggccttactacactcggcgcggtaccagcagtccctgcgacgctaccacgcccgaggggttaggtcccgagacctccaggtgggcgacctggtgcttcggctgtga

SEQ ID NO: 32104 - DNA, 630 bp, Zea mays
  Peptide Sequence Number=SeqID_73883
atgactactttgcacccgagatcaaaaaacagtgggggtactagcaaggggctcaccaagggtttcgacgacgacgaggatgggctgcgcagcaagcacgagattgatgacacgcgacgaggggagtggagaatgaacgagagggctgctgcgccgatgcggacaatgcgcagcgatgaaggctatgcgatgcagggacgaacgacacgcagcttgctgcgcttttcgtcgagcaggttcaatgcgaggcttgagggtgtgttgctgctgctatttggtgcgacacgatgcccgggtgcgtggcacaagcttgcagcgacacggccaccacgcagagacttgcgcgtgaactctcgaacacacgacgagcatggatgggccacgcccggacatgtcggcaagcacgcagcgagcagaatccgacgaggtgggcagggagaggaaagtggcgacctgggagatgagggcgagcttggggaaggagcagagacctacgaccaccatggcaggcgctaccggggtctcagtgttgatggaggcaagggcgcgacgctgggaacgagggcttgccgcacgtccctagcattgctcgagcagagaggagggtggccgtcgaggtcagagcactag

SEQ ID NO: 32105 - DNA, 492 bp, Zea mays
  Peptide Sequence Number=SeqID_73884
atggcgagggagcgtcgggagataaagaggatagagagcgcggcggcgcggcaggtcacgttctccaagcgccgccgcggcctcttcaagaaggctgaggagctctccgtgctgtgcgatgccgacgtcgcgctcatcgtcttctcctccacgggaaagctctcccagttcgccagctccagtatgaatgagatcattgacaagtacagcacacattctaaaaacctggggaaagcagaacagccttcacttgacttgaacttagaacatagcaaatatgcaaatttgaatgagcaacttgtggaagcaagccttcgactcaggcagatgagaggtgaagaacttgagggattgagtgttgaagaactccagcaattggagaagaatctggaatctggtctgcatagggtccttcaaacaaaggatcaacaattcttggaacagatcagcgacctcgaacaaaagttgttggatcgtgatacactgaaatag

SEQ ID NO: 32106 - DNA, 801 bp, Zea mays
  Peptide Sequence Number=SeqID_73885
atgggcgacatggcctccggcggacggcgtgctaagcgcggcaaggcgccaatggcaagaggagggcgcggaagggaggtgcacgacgtgggcgccaaaggggcggttgttcctgtgaggaagaagaacagtgggctgggcgccactgacaggcgggcccggcgactcggcgaacggcgtgggcgagcgcctctgctcgcgcgcccacacgcagggtggcggctgtggcggttgggggaagagcgcgcccgcgcgctgctggagggcgacggcagagcgcagctgctgggccgcggctggcgcgctagggtttgggaggtgggctgcgcgctgcagggtgggccggagaggagctgggcctcggctggcggcctgggcaaggatgggcggcgcgcgcgcaatgggccggggaggggcgttgggccgagcaggccgcagggagaagggggggtagtagggccgaggtgggctagagaaggaggagggattgttgggctgggctcggacttgggctcagccccagaagacgacgaactccgctccgcccgaccccagggctcgggctacgccccgacctcagccgacgatctccgcctcgcccgacccaggggctcggactcgacctcggccacggaagacagactcgacctcggcttcggaggagcttccacatcgcccaacctagggcgcagaccagccacgtcaacaggaggcgccatcatcaccctgccccgagctgactcgggccgcagggaacaagaccggcgtcccatctggctcgctccgccagatagggaatga

SEQ ID NO: 32107 - DNA, 450 bp, Zea mays
  Peptide Sequence Number=SeqID_73886
atgggaagctccgcctcgcccgacccagggctcggactcagcctcgaccccggaagacggactccgcctcgcccgaccccagggctcagactcagcctcggcctcggaagacagtctccgcctcgcccgacccagggctcggactcagcctcggcctccgaagacggtctccacctcgcccgacccagggctcggactcagcctcgacccctgaagacggactccgcctcgcccgccccagtgctcggactcagcctcgacatcggaagacggactcggcctcgcccgatcccagggctcggactcagcctcgaccttggaggagcctctgcctcgcccgacctcaggctcggacccgccacgtcacagggaaggccatcattaccctacccccagctagctcaggttgcgggggacaagaccagcgtcccatctagctcgccccggtaa

SEQ ID NO: 32108 - DNA, 561 bp, Zea mays
  Peptide Sequence Number=SeqID_73887
atgggtagacgggtatgggtagttccaacccgtacccgtacccgtacccgtctacccaacgggatgacagtctcctcagctgatgatgacccgagggatgttggagttatgaccagagaagaactgaaactagatttttcaaaatcagatacgcgtaacacagagaatgctgaaattactaaaaggagaagggtgctctttcgggagaacatacctgttgattccaagctctgtgcaaagacatctttgctatattgctataaaagatctacaagggcttctgttttctcactggaacaacttcaatgggataactttgctgatagttttgaggtaacatctcaaaaaatggatgttcaggtttacgatcctttttttatcttgcgattctcaattcatactcttcacatgggttacattgaacctgctcaatttgcccgattagggcttcttgcaatcacacttgttagtatagcatctcctgatcatgaattaaggatgttgggctacgagtgcctaggaacattcaaaaaatcccttgaggtacctgttgtttcatga

SEQ ID NO: 32109 - DNA, 270 bp, Zea mays
  Peptide Sequence Number=SeqID_73888
atggaggagctgctggcccggatcatggcacacacgacgtggccaggcggtggtgacgccgacagacgacgacgctcggacaagagcgagagcaacgagggagaatctgagtatcattacgattacgtgtggagaaagataaattttgttcatagggctcaggatctagaaagtgatggatttctactattacaacgactcaaccgattatgtgtttatgttgattttagatggtttttgcccccaacgaattttatagaagctgactga

SEQ ID NO: 32110 - DNA, 507 bp, Zea mays
  Peptide Sequence Number=SeqID_73889
ttacgttacgataatggtccatttgcggagcccaaaagagttgcaggagaagaccctaagcactcgtatgggtgttatgaagacggtatattagctacactcactgttaagagtggccttgggatcctctttgataagagatacaatggttatgattatggttttaattatggttgcccttggtgcaacccatgctcaggtgaagaagttgctattgaagcagatctccaagagttcaagacttcaacggatatgaagaccagacctgagatctcccccagtcagtcgatgcaggcaaatgtacgttgtgcaatccctcgaacggcgcaggcgacgaagagcctgataagcgctgatcgaacggatgaggcgagcagccatgagtactctccccaaaaatctgatcgcccgcacacccgtgcaagtgtagctctacggacgacgatttcagaggcctactctcccactctttctgtgctcgcagaaggtgggacgagaatgggctga

SEQ ID NO: 32111 - DNA, 420 bp, Zea mays
  Peptide Sequence Number=SeqID_73890
atgccagtttgtttcaggactccatacaacttccgaaaggaaaccctcacgttcgagatggtcgggttccaaggaacctaccatgcagtactagggagaccatgctacgccaagttcatggtcgtccctaactacacctacctcaagctcaagatgtcgggccccaacggggtcatcaccatcggatccacgtaccgacacgcgtacgaatgcgacgtggagtgcatggagtacgctgaggccctcgccgaatccgaggccctcatcgccgacctggagagcctctccaaggaggtgccagatgcgaagcgccacaccggcaacttcaagccagctgaggcggttaagtccgtccctctcgaccccagcaacaacacctccaagcaagtccggatcggctccgagctcgaccccaaatag

SEQ ID NO: 32112 - DNA, 194 bp, Zea mays
  Peptide Sequence Number=SeqID_73891
gccgctccgtcgaagaatcaggtcgctgtgccttcgaagaatcaggccgcggcgccggtgaagaagcaagccgcgacaccgaggatataccagggcaccaggcagcggagatccgtccacaaccggcctccgcgtcgtcgaagaatcaggccgccgcgccggtgaataagcaggctgccctcgctgccgaggat

SEQ ID NO: 32113 - DNA, 174 bp, Zea mays
  Peptide Sequence Number=SeqID_73892
atggctttcgcaacagcacctggatctaactatcaggagggatcccgtcatggaggagagttccgagggtttttcttgggattgacacctccagacgacgcagagtcgaatcgaggtgttgagaacaagaatggggaagaagaaaagcgatccaagcgacaagaactcaaatga

SEQ ID NO: 32114 - DNA, 306 bp, Zea mays
  Peptide Sequence Number=SeqID_73893
atggagagatatatgagaaatcataaaacaaggccagcgcactttggaacattcactgaggagttggccgtagttgattggcgtgccgaccgggtgatgagcgtggtgcaccggcggctaggaatggacgcaccggcgggtggggaggaatgcgccgatgagtctgggctcatcgtgcaggtggcacgtcagtcggtctgcctcgtcgtgcgggtggtgagggaggcggccggcgggtccgggggcagagctccctgtgcggaacgagaccatggcacctgggagatgggaatgatgcgggtgtag

SEQ ID NO: 32115 - DNA, 246 bp, Zea mays
  Peptide Sequence Number=SeqID_73894
atgtccatagtagggactaggccatacccgcacacaacagctaaagagccattcagggcggatggtacgacgatatctctcactggggtcgacggcagcggcgtatggggatggcggtggcgtcgggctgcagcggtggaggaccagcggagacaggatgccggcgagacatcggcgtgccctaccggggcgaggcatctcgcggcggtcgcaggtcgatggggagaaattgtcaatactaattag

SEQ ID NO: 32116 - DNA, 594 bp, Zea mays
  Peptide Sequence Number=SeqID_73895
atggctaaggagtactttaactttctcaataagtaccttgccacattcaaagggtcagatgaagaatcagagtcatgtgatttgctcaacatgccagctgtttcacagcttgagaaggacgaaaagtatcagttggtgtatgaactactaaagatattccttactaagaagcttgattcctacttggagtttcaaagtgcaaactctgacttgctgaaagattatggtctcgtccatgacgaatgtgtaaccaaaatgcgcctcatgtctttgcttgatctgagcagccgatgctctggtgaaatcccttattctgcaatcactgttgaactcaggatcaatgatgacgaggtggagcaatggattgtgaaggcaattgcatccaagatattggattgcaaggttgaccagcttaaccagactgtcattgtcagtcggcacacagagaggatctttgggatggaacattggcatgctctgcgcacaaagctcggagcttggaggggaaacattgccagagctatcaacacaatacaagctaacaaagtcaccgaagagggggcacaagggatgcaaggcttggcgatccactga

SEQ ID NO: 32117 - DNA, 690 bp, Zea mays
  Peptide Sequence Number=SeqID_73896
atggctcgggcgcgggcgcgggcgaccccgacagcggcgtgcggtcccccgactcccctgcacgggcgcggcggctcggccccgacctcggcacgcaggcacgacggcactggccgcgggcaccggtgcaggctcgggcgtggccttggccccggcctcggcgtgcaggcagttatcccggcggcgacgcacggtctcccgactcccctgcgcgggcgcggcacgcgcgacggtccagccgcggcgttatggggcgcggccccctcgcagcgcagtccccagcgcgcgggcacggcctccggccccgacggctcgggcgcggtccccgtacgggacctccccgacgcgtgcgtcaacggcgacacgggatctggtggcgaggcgctgcctcggcgcgtctatggctcggacgcagcctcgcttgtggggcctggccagacgggatctggcacgtgggcacgtgcaaacagcccttatgcgcgtgggcgcggtggcctccggcgctcagccgcgcaggcacagctccggccattcgggcgcggaggcgagccccggcgtcccacgggcgaggcccgagcagccctgggcggcggcgtggtgggcagtcccatcgcgcggcaaccacctccaacgcgaagacgcagcatccggccatggccgaaaacaccaatcgagaaaaagaaattctaa

SEQ ID NO: 32118 - DNA, 468 bp, Zea mays
  Peptide Sequence Number=SeqID_73897
atgggcaagaacaacaaacgcaagcgcgagccgactcctccatcagaggactttggcgactcggaatactcagaggaggagttctcctctgagtccgagggtttcgccctatttaccccccccctctatgcgactatcactcctgctcccgtctctcccccagcgtcgtccgatgactcgaacgactctcaggggattgccgtggaggtctggacttacatccgggccgtcgagcgctccgggctcgagggctcggatgagtcggagtactcctcgaacgaggaggactcgcccgaggaggacggcgaaggtgatgatgacgacgacgacgacggaggcgacgacagcgacgacggtgacggcggcagcaggggcggcaacggcgacagcaggggcggcgacggcggtagcagcaggggcagcggcggcggcggcagcagcaagggcagcaacaagggcagtggctaa

SEQ ID NO: 32119 - DNA, 1312 bp, Zea mays
  Peptide Sequence Number=SeqID_73898
atggcgcaaccgtcgacgccatatccacaagaaagtgccacacgtgagaagctccagaagcttgcttctccctgcacaccacctgattcgtacgaatcataccaccgtgaccatcctctaccacacctacttccacaactctcgttccctctaccgctccaccggttcctacctcatttccgagagagcgacgagatagagtatccaaactcaggagtccttctaccgcacccagctgacagctcagatcgccttgagggctcaccgtcgattaacctgacagctttccattcagtagctggtacagagattgactccggccatcagtggatgaagtttcgcttcgagcatgagtacgtcactatccatactactcaaatcttagagctctttggattccctaagtcgtcgacgaggctccacagtctttgttatggtaactcagaccctcctcatcgccctcacggtggagttgctcctaataccgctcacgtcgcaacactcttcaggccacccttcatagataactcacggtgctctcctgtagacttcaccttagcggtgaagttcctctatgagttgatgagacgcaccctgttaccatggatgggatacagagaggctaccactcacattcagctttggctcctaggtgctctggtatctcactctatgttcgacgttgtagacttcctgatctacgagatagaagacacattgttggatagcctccgtgctcggcgtcagctgccctatgcgcactacctctgccacatcttcgcgcagctgatccggccacctcagttccaggccgaacttgactccaccagactgaagtttggtttctaccgcccggcacccgaggatacgattcccgtgaatgctcctttggatcctttggcccctgagcatcgaaatgaggacaaggtgatccgccagcttgaggaccaggccacggttgttgatacttctttggactctgatgacgaggacctaggaattccaccacctcctttgccacctcgcacccatgatcacgaggccggtggttccagtgctgctcctccctctacacctcctgccatatatccagccctaacagctataatacagtccttgacccagcagcaagctcacttggcagttgagcagacactagctcttgttagaaagggcggagcactaggccttcatgactcacatccttcagcacaacggtgttctcgtgcctctagtgtagcctgctccgcctccagctctccagacttcaatggtcgtcggagctataagtgctcaaccaccagggccaccg

SEQ ID NO: 32120 - DNA, 732 bp, Zea mays
  Peptide Sequence Number=SeqID_73899
atgcctggcataccgagggatgtcgccgagcactcgttggatattcgagctggagcccaacccatgaagcagcctctgcgccgattcgacgaagaaaagcgcagagccataggcgaggagatccacaagctgatggctgcagggttcatcaaagaggtattccatctcgaatggctagccaaccctgtgcttgtgagaaagaaaggcgagaaatggcggatgtgtgtagactacactggtctaaacaaagcatgtccgaaagttccctaccctctgcctcgcatcgatcaaatcgtggattctactgctaggtgcgaaaccttgtcattcctcgatgcctactcagggaatgcgggtgcgacataccaaaggtgcatgaaccacgtgttcggagagcacattggtcgaatggtcgaggcttacgtcgatgacatcgtagtcaagacgaggaaagcctccgacctcctctccgaccttgaaacgacattcaagtgtctcaaggcgaaaggcgtaaaactcaatcccgagaagtgtgtcttcggagtcccccggggcatgctcctggggttcatcgtctccgagcggggcatcgaggccaacccgaagaaaatcgcggccatcaccaacatggggcccatcaaggacttgaaaggagtacaaagggtcatgggatgccttgcggctctgagccgtttcatctcgcgcctcggcgaaagagtgaaagggaattag

SEQ ID NO: 32121 - DNA, 1239 bp, Zea mays
  Peptide Sequence Number=SeqID_73900
atggatcttgtcgccggcgccgtgggcaatatcatccgcaagctcagtcctgcgactgatcctcgccaccttcgtgaggtcgacgacgtcgccgttgcctccctcagggcagcggataatgctgcacgctatactagacccaagccatatctaagggccgagccgccgaggctgatcccctttcccgtctccgcaccgcacacgcatcgagcggctcggcggctccgtctcatgagagccgtcgctgctgccgcctcgcccccgctccgcgccctcctcctcctctcccgccacccacgccgcgcaggcttcaccaactggccgtcgctgcctaggggccagaacgcaggacccacagccccgccggccgccaccgcccccaagcctgctgcgccgtccaggaggcaaggccgcggcctcactgccagcctgcctcgccaagtcgcccggatctcgacgccccacctgcggccgccggcgaccccgccaaggtgccctgacagacgccatcagagccacggagttcgtgcgctggctggttgtccgcggaagacggtccgccacctccctgctccaacctcgcacctccggttcaccatgaacccttcgtcgtcctcctcctcctctggcgggtaccactccagggccgctgccttcgcttccccgcagccacgcggcggtggcggcagacggcgtggtggcggccgcggccaagacgggagcgaccgcatcgacgcccttggccgcctgctgacgagggtgttgcgccacatggcggcggagctgcgcctagatatgaggaccgatggatacgtgcgcgtccgcgacctgctgaagctcaaccttcagaccttcgccaaggtccctctcaagtctcacactgttgacgagatcagggaggcagtcaggcgggataacaagcagagatttagtctgttggaggaagatggcgagctgttgatccgggcgaaccagggacacacagtaacaatggaaatgatttttgcaataacatctactggtacaatggttagtggtcctctgtccttctattgtttactgcttgagtcagcatatctcctttgggtatttattccagtattctcggttgcggcctgctgtgctgctcccatatttctcatgaagacatctagacctggaatccctgactcgccggacctcggctacgtagctcgtagccgtcggccgtcttctccggtcggggttatgcccccctaa

SEQ ID NO: 32122 - DNA, 267 bp, Zea mays
  Peptide Sequence Number=SeqID_73901
atggctgtatgggcagtcactgactggaaagctgcagcgggactcaagcttctcccagttttattggatggatactgtcggcgtttcgagaccggggggtccctgagccgacgagtgagtgtgccgcgtgccccagcccagatgggtcgagcgcgtgggcgagcgcgaaggggggagagcgaggtggccggagacgggcgtgagagaggtggaaatcccgcggccttcgtgttcgtcccgcgcccaggtcgggtgcgcttgcagtag

SEQ ID NO: 32123 - DNA, 372 bp, Zea mays
  Peptide Sequence Number=SeqID_73902
atggcgtcacggcgtgcttggttgaaattgagggcggagcttggggctatacggcggcaagggactctagttttaccgtgctcaaccaatttgggaggagggggcagaggcaaagacacagtgagggagatcgcggcatgggtgacaccgcggcaaagtcactgggtcacggtggccgctggtgaggtctccggctggactcgggaaatggtgccacgtatgcgttatctaactccggcgttatctgttccttaccgagcccaaattggaatggtggcgacacaaatcgcggggcgagtcaccgacggtgagatgcacgacacctcagatcttttgtcactgtaccatggcgaagatcatcagccgacctga

SEQ ID NO: 32124 - DNA, 187 bp, Zea mays
  Peptide Sequence Number=SeqID_73903
atggcaaaggagcttttcgacattgcgaccgaccatgcgtttggggaggacgtagtgagggtcaccgacagtcgtcacaaatggaggactgggtgtgacaaggggtcggacgaagacgtcgacgaccacctcaatgtgaaaagggataaggggccgacgacaacgagccgatgtgttggcggctacg

SEQ ID NO: 32125 - DNA, 1908 bp, Zea mays
  Peptide Sequence Number=SeqID_73904
atgccttctgcatccaagtccaaggcaaaagaaagatcagctgcaaaagttgcaaaagagcaacccaaggttgctgcaaagccaatgggaaatgctacacttgcaagttcttataacaacctgtctggaaagttccatgttctggaaccatcaagctctttgttgggtagccaaggcatcgataaattcaggaatacagatgaaatagatgagcattctcgcagctcccatggtacaggggatttcgattgtgcctccaacaatggtagctgttctggtgactcagaggatacaaaggaaaaatcaaccagcactgcgtcccgagtagactctgttcctggatgtgatattgataaacgtgagaagattagacagaaaaatgagaagaagcatcaaagacagaaggagaggcgtgcccaagagttacacgagcgttgtaagggatacattatgtccagaaagttggaagcacttgcgcagaagcttgttgcgatgggtttctcagcagatcaagcaacgatggctcttatacaaaatgagggttgcgttgaggagtctgttacctggctctgcaactttgatgccagtgaggaagctaaacaacaacttgtagctgatcaacagtctggagttaacttgaagattgatatagctgatgagctttcaaagattgtgagcttggaggcaaaatataagtgtacaaagcaagaagttgaaagggcagttgtttcctgtgaaggtgatctagaaagggccgaggaggccttgaagacacacaagcaagaatcaactgcaatcccaccaaagcctgaggggtctggctattcaagtggcttgcctaataagccgcaagttgtacttgcacagaaccctgcaaggcctcaaacaaatggattatcatcagtaggatctcatcagatgagaagagaggagaaggacataaactataagcttttgatgaatggtagtggtccaaaggaacctgcaattaaaggttttcagccactggcaacaccgattaagccagatttggtccgtcagcaatttgttcaacctgagaagagacgtctcaatcccaactcgaatccatcagttccttctgtggcatcgtctcctttgcctgttgcagtgccacaagtgaagccagacatgcggcatgtggcagggaccaatgaggtgaaaagtttgatgcccaatggaagcttgcgagagtctgtgattgtaatgcagcgtcctcaatctgcaggtaccaaacagagcctaccatccactagccatagtatgtttgtgtcagaaccatctgcaagggattggtacttaaatggcgtgtcaggtgtggatatgatgttgaatgggggcttaggtcatggactaaggaatatgagtttggacagtgctagttctgccaggtcgtttgggcatgcaaaccatcaacaaaatttggtttctaatcctatagagctggctgccaatggttggggtggcacctggagttctggaggtacatcatcttcccgttctgtggtgtcatcactcggggcatttagagggtggaatgcatccgagtcctctgcattgcctcattctgattggagaaccaacggggcagcaccttatgactacacctcagtagactggagcgtcgacacaacactattgaacccagcagcaaagagcgagctgctgtcggacacatggtcaaccatgttcatgggtggcaaatcaacaaggacacctgggaacctcagtggtgcaggcatcgctgggttgtatgacagtaaccgtccaatggatcctgctccttcggctcgtccatatgagtgcgctactttctgctgggacgatcttcttagtttccccaaccctgtaggcaagaggccattgaataaaaaaattgcagttggttga

SEQ ID NO: 32126 - DNA, 324 bp, Zea mays
  Peptide Sequence Number=SeqID_73905
atggccggagcgctgcgccccaatgactgtgcgccccaagctatgggtcaatcgaagctacatgagcaggattcaacagtgaaccaaacgagacccttcttacccaagatggctgtgaaggtggtgtttcccacgacgatgcgcggcacggcacaccctcctaaccccgatgagaacttctccatgcctggcctagcttcgggcacgataacggccttgcataggtcccagacgtcctggcgattctccttgtttgctccttggtctccaagcagcgtcgaaggtagggcgtcggcggcagcggccctcagcttcactgtgtaa

SEQ ID NO: 32127 - DNA, 489 bp, Zea mays
  Peptide Sequence Number=SeqID_73906
atggcgcttgcgatgtcattcacatacctcgccgtctccccgctcccgtggggcacgccgccacacgtcgcggtttctaggtttcgtgaacgttggcctaaagccatgggcggaggggcgacgtacgccggtattattaggcaatacctggcgactccgcccatgctctacgccttcgcgtcgctccttaatgtgcagcgctttgtcgccgctaggttcacgttcccatcacggctcacaccatggctcctggcgatgtcgttcacatacctcaccgcctcctcgttccagtgtggcacgccgccacaagttgtggcgacgttccacgacataatattccgcacggacgtaggcgtgatgtgtcgtgcggccgaggcgctcgatgttgctttgtcccgcctcgacgacctcgatccactatcgctcatgtcctctctcctctcgctgactcgctccgtcatgcggggtgccttgctgaaagtcgcctag

SEQ ID NO: 32128 - DNA, 267 bp, Zea mays
  Peptide Sequence Number=SeqID_73907
atggccctcacatctcgtcgaccgaggcccccacccgtcctcctgccaccacccctgcggcccctcgtccggcctccaccaccgacgacagtcgtcgcccccgcaagggcggacgtgggggtgacaactctacacgtggaggatctggccatcaggacccctctcgcccgatgtgacagcaccgggccactctacacactcagcccttcgtcctccgttaggctgacatactcgtctctcgtttcccacttcatcttctcgggctga

SEQ ID NO: 32129 - DNA, 462 bp, Zea mays
  Peptide Sequence Number=SeqID_73908
atgaaggccaatgaaatcatggactctatggttgaccaaaaaatagcttgtttggcaaacaaagttctagaagaacctaatgaccttgtgatagcgaaagatgtcagtgaaaaagaagatggtaggacaacattagaacctgtgaagacgacgcaccggcccttctcgactccgcgccggagcccctccgcctcgaaggcgcgatggatctcctcaccacggaccttgctcctcagacgctctccatcacagattggcgctgctgtagatcctacagccgtgtgccgcagtgcgggatgtcttcgcgctcgcccacactgctgccaccgagatcctatcggcaccctcctctgtgtgcccccgctgtcgcacggaaccaacccgttcgcctgttcgtccactcggcgacattcacgcccgcacctcgccgtggggcagcaccgcactctccaccgccgtatg

SEQ ID NO: 32130 - DNA, 210 bp, Zea mays
  Peptide Sequence Number=SeqID_73909
atgtacttgggcgtgggcgcagaaggctcaccggacagtctggtgcaccaccggacactctttttgtattttagccacgtcgcctcgccgattcctgagagcacccagttggcaccgagcgagcctggggcacctgacactatccggtgcatcactggacagtccggcggtgatgcagtctctccaggtgactcgatgaaagtcgcctaa

SEQ ID NO: 32131 - DNA, 1836 bp, Zea mays
  Peptide Sequence Number=SeqID_73910
atggacaacgcgacagcggaggccttgaagcccatgaaggcaacgtcggacggcgtgttccagggagagaacccgctacactcggcactcccgctcgccatcctgcaaatttgcattgtcgtcgtgctcacccgcgtgctcgccttcatcctccgcccgctgcggcaaccgcgcgtcatcgcggagatcatcggcgggattcttcttggtccgtcggcggtgggccgcagcaccgccttcctgaacaccgtgttcccgaagcagagcctaaccgttcttgataccatcgccaacattggcctcctctacttcctcttcctggtgggcctcgagctggacctccgcgccatacgacacactgggagcacggccctcgtcatcgcggtcgccggcatttcccttcctttcatcatgggcatcggcacctcctttgtcctccagcacaccgtcgcccgcggcgtgcccacggctccgttcctcgtcttcatgggtgtcgcgctctccatcacggcgttcccggtgctggcacgcattctcgccgagctcaagctgctcaccaccgacctcgggcgcatggccatgtcagctgccgccgtgaacgacgtcgttgcgtggatacttctggccctggccatcgctttgtcaggcaccggttcccctcttgtctcgttatgggtgctgctagcgggaactggctttgtcctcgcggcgttcttgttgctccgcccgggcctcacctggatggcacggcgatcccctgaaggcgagccagtgaaggagctctacatatgcgcgactctggccatcgtgcttgccgccggattcgccaccgatgccattggcatccacgcgctctttggagcgttcattgtcggcatcatcgtccctaaggacgggccgttcgccggggttctcctggagaaggtggaggacctcatatctggcctgttcctgccgctctacttcgtgtccagcggcctcaagacgaacgtaatgaccataaagggcggtgactcgtgggccctcctagtcctcgtcgttgccaccgcgtgcataggcaagatcggcggcacggtgatcgcgtcgctcatcgtccgggtgccgttccgcgaggccctcacgctcgggttcctgatgaataccaaggggctcgtggagctcatcgtcctcaacatcggcaaggaccggcatgtccttaacgacgagactttcgccatcctcgtgctcatggcgctcatcacaaccttcatcacgacgccggtggtcatgacaatctacaagccagcgcggcggggggcgccgtacaagaaccgcaccgtccagcgcgcgaacccgcacgacgagttccgcatgatggcctgcttccacagcacgcgaaacatccccaccatcatcaacctgatggagtcctcgcgcggcacgcggaagcgtggcatcaccgtctacgccatgcacctcgtggagctctccgagagatcgtccgccatctgcatggtccacaaagctcgtcgcaacggcatgccgttctggaacaggcggcgcaacggcgacggcggcggcgaccagctcgttgtcgccttcgagacgtaccagcagctgagccgcgtgtctatccgggccatgacggccatctccgacctggaaacgatccacgaggacgtcgtcaccagcgcgcaccagaagcgagccgcgctcatcgtgctccccttccacaagctccaccagatcgacggccccgaggagtcgcttggcgaccagtaccagcacatcaattttgtttttctccaccacgctccctgctctgtaggcatcatcgtcgaccggacgattctctag

SEQ ID NO: 32132 - DNA, 483 bp, Zea mays
  Peptide Sequence Number=SeqID_73911
atgacgaccacgaggaaatcgcactgcggcaggatccacggcaatggtgggtcacggccaaatctttttgagctcttcctctccctcccccattcactctcccctcatgaaaccgacgccgccattattggagttaatggctaccggccacctccctcccccggcgccctctcctcttccccctctccttctataaaatggcagccgagcccttccctcacctctccctcgccctcaccgaaccgcctcgccggagccgccattcaccgccctcgccggagttcgtcgagcccttgccggagtccaccgagccccgtcggaccctcgaccgcgctcgcccgagaccctaccgccccgaccgagcctctaccgtccgtgccacgccaagcccccgccattcgtgtcccggccgagctgtaccgttcccgcgccgagctcctttctgcgtccgcgtcgtgccctgttcctcgccgttcgtctaag

SEQ ID NO: 32133 - DNA, 2355 bp, Zea mays
  Peptide Sequence Number=SeqID_73912
atggtgaagaatttgaagcaagtgcaagcacgcctacaaaatttgacagttctgaaagacagatatggcatcacagtagttggacctggtggtggatcatcaagccataataacagtcgtaagaattacctgtctgaatcttcctacctgaatgatgatggtgatggtgtaatggtaggcaacgaagatgaagtaaagaagttgacagaatgcatagatggtgctggtgcagatcgtgcagttatctccatctggggaatgggcggttcaggaaaaacaatccttgcaaggggcatctatagaaaacgagaagttagaaagaacttccagtgctgtgcctggataacagtatcactgaattatcaagtcgaagaccttttgaacaagctcataaaggaactccacatccaagatgtgcctgatgcaactgacagtacacatttggttgctaggatccagaatcatctcaaggacaagaggtaccttgttgttttggatgacatgtggaacagggagtcttggttattctttgatcgagtatttgtcaagaatctttatggaagtagagtcatcgttaccactcgaacagaagctgttgcgtcaatagctgagctgaaccatactataagaattggccttctttcacagggggagtcatggaagctcttcggcagaaaggcattctcaaagataggcaaggaagaaccgacctgccctcagggccttgttcaatgggcaaacaaaatcctcgagagatgccaaggtctgccacttgctattgtagccatagggagccttctgtcatacagagaaatggaggaacaagagtggagactcttctacaatcaacttaattggcaactgacaaataacccagaactcaacttcgtatcgagcgtcctaaagctaagcttgaatgatcttccaagccacttgaggaattgcttcctgtactgtggcttgttccccaaagactatcaaatacgtcggaagtgtctaatcagactgtgggtagctgaaggttttgtggaagaccggggaacagagattacactggaagaagtggccgaggagtacctcaaggaactcacacggcgttcactgtttcaagtgatggaaaggaatgaattttcacggccaagaagattccaggtgcacgatcttgttagagagatgacactggccatatcaagaaatgagaggtttggtcatgtaagtgaccagccagatgtaacagacattggcgatgtaggaaaacgtgtatcagtgcacagtgggggccaaatctatcagccaggtccgtcttcgcagcatctgcgttcatttttgttgtttgacaaacacgtgccgctttcatggatcagcatcgcttcatcggacttcaaactgttaagagtcctgtgcctcaggtactccctccttgaggacattccagatgccatgacttgtttgttcaatctgcaccatctagactgctctcgtactaaagtaaggaaggtaccaagatcagtggcaaggctgaagaaactagagacattgcatctcaggttcgcccgtgtgagggagttgccgtctgaaataacaatgctcacaaacctccgccacttgtctgtgagtgacgacttgtatggcacatcaatttgtggtactatccgcagtctcaagcacctgcaaactcttcgagaggtgaaagtcaacaaagatttggctaaaagtcttggttacctgacacaactaagaagcttaggaattactggagtcatacaaagccacaatgcagatctttgggcttctatcaggaagatgactgtccttaacaaactagccgtcgcaactcctggcgagagtaacgaagtgcttagttttgaagagctgaggccgctcaagaacctggagaagttctacttgaccggcaagttggcagaagggaagctttttccagtatctaatggttttcagaaacttaaggtcctaacaatgcgctggtctaagctaacacacgaccccctaagttccttatgtcaaatggaaaatctcgtctaccttaatctttactgtgcatacgatggggaatgcttgatcttctcttctgggtggtttccaaagctcaagcaactctacctaggcaagcttgagagactgaggtcaattcaaataagtgatggcgccattgaaaatttaacatacctggaacttcatgagctgtggaatctaaaaagtgtccctgaaggccttgtataccttaggtctcttcagcacttgtatgcacgaaagatgcctgcagatttcgtggaggaactggagggaagttgccagggctttgttcggcacattgccaacattgaatgtatgtga

SEQ ID NO: 32134 - DNA, 303 bp, Zea mays
  Peptide Sequence Number=SeqID_73913
atggagctctccctccccagccgagcctcctcccccaagttctccctcgctcctcacattcgcgccctgctcttgggactgcctcgccggaacctcgccagtgtcaacgccaccgcaccagagcctgcgcagcaccccgtcaagaacccctgcccgcgcgcgcagcagcaccaccgctcgccgtcgtgcctcgtcggagttcgtccacaccgttcgccatccatggaacctcaccggaattcgtgcccgccatccaaacgcatcgccagagttacaccgtttgttgtcgacgcgatcgcgtag

SEQ ID NO: 32135 - DNA, 1038 bp, Zea mays
  Peptide Sequence Number=SeqID_73914
atggggaggctagaaccccaggcagaatgggaatcaaggcttatgggtaaaggtgaggaagctgtccacttcagcgtcgtcgacgccaaggactgcaaacagagtgcctttgaagtcggcgataagacgtatgttatttgtagatcagatgatgatttgaaaacatctgctgttaaaattcacgacaagctcactcagacttggctctcacccacaatacttggggaacagccacttctaaccaagtcacagtctgtgattcctgtcagtgatgagaagatattagttatcgagaagggtgttcccttgaatgagtccatctggttccttgagatagacaccccctttgttaagcaacaacggaaaatcaaggaaacagaagttgtttcttggagcaagggagtaatcggcgttggccaaaaaccagttgtgattagtggtccttctggtgttggtaaagggacattgattgcaaagttgatgaaagactatccatcgaagtttggtttttctgttagccacactacaagatctccaagggaaaaggaaatagatggtgttcactaccacttcacagaacgaatcaagatagagaaagatataagcgagggcaaatttcttgaattcgctcatgttcatggaaatgtgtatggcacaagtatcgaagcagtcgaatctgtaactgatgagggaaagaggtgtattctcgacattgatgtccaaggagctcgatccgtgagggcttcttctcttgaagcaatattcatctttgtatgccctccatcgttcgaggaactagagaagcgccttcgggcacggggtactgaaacagaggagcaaatccagaaacgactcagaaatgctcaggctgaacttgatcagtccaatgaaccaggtctctttcatcatcttttggtcaacgatgaccttgagacatgctatgagaatttgaaggcggtgcgcctggacgaacaaggggccttaagattggctcagttaactccttttgacaagggcttatattggcgttttagatga

SEQ ID NO: 32136 - DNA, 216 bp, Zea mays
  Peptide Sequence Number=SeqID_73915
atgcctccccgccgtctcgcccccgccgccgcgtcagctcctctcctgctctgcttcccccgcgacgaaccgtgctctaactctctttcgtttctgaaccgtgctctgcttccccccgccgtttctgaagcgaggagaaggagagaagagagagaagggacaagacgagaaagcaggggtaagataagaatttggaacaaaaatccagacctttaa

SEQ ID NO: 32137 - DNA, 1347 bp, Zea mays
  Peptide Sequence Number=SeqID_73916
atggggacctgtgggaggagagttctgggggtatggtttttcttctggttcttgttgacacttgagcagtgcacatccctgaatcgtgaaggtgctgctctgctgagatttaaggcggcgatcgaggcagacccatatggtgctttgttggactggaatcaagagagtttgagcccctgtacttggtttggtgtggaatgctccgatgatggactagtcatgtctctgagcttagcaaatcttggtctaaagggcgttttgtctccagagcttggaaagcttatgcaaatgaaatctctaattttgcacaacaactcattctatggtaccatacctagagaaataggagacctgcaggatctaaaaatgttggatctgggatataataatttcagtggatcaattccatcagagctacaacacatattatcgctagaatttctgtgcagatttcttgaagggataactttattcagacgatctgagcttgaaacagcctgtgaaggtttcagcaacataattgacacactacctggatttacactgtttaaaggaactctcccatgtggagcagaaatagctgtggcgtctacatcggtggcttatgcaggaggttggtccgctatagatgaagcacattacatgaataaggttggagctttgtcaaaggtaaaccataagaatcttttgaaccttgtgggttattgtgaagacgaaaaaccattcattcggatgatggtgttcgagtatgcttcaaatggatcactatttgagcgcttgcatgttaaagaagcggagcatctgaattggcagtcacgcctacggatagctatgggagtactgtactgcctgcagtatatgcaccagcagaacactcctgtaaccctaaagaatctaaacagttcatacatatacttgactgaggacgatgccgcaaaggtttcagacatcagcttcagcgttgacaagagagaagatgatgagtatgatgctcctgatgagtatagcacagtgtataagtttgctttgctactgcttgagaccatctccggaaggcgtccatattctgaagacgatggcctccttgttctatgggcacgcagatatctcacctgcgctagcccggtgatgggtatgattgatccaacgctaaattcagtccccgaggagcatgccagagcattatcagagctgattcggttgtgcctaagtgaggaccgaaggcagaggccgacaatggcagaggtcaccaagaggatgcaagagatcactgggatcactcaagatcaggcgattccgaggaacagcgcactttggtgggcagaacttgaaatcatgacatcatga

SEQ ID NO: 32138 - DNA, 204 bp, Zea mays
  Peptide Sequence Number=SeqID_73917
atggggctcatgttcgggaagctcttcagccggctcttcaccaagaaggagatgcgaatcctcatggtcggtctcaacgccaccggtcaggaggaaggacacaggtggacggcgtcaaccgtgggttccgacgaacctacaagctcggcctgccataaaaccggagataagatccgcgagaggaagctgatcctggcgatatag

SEQ ID NO: 32139 - DNA, 168 bp, Zea mays
  Peptide Sequence Number=SeqID_73918
atgcccaaggttgctggtcgatttcatcgtgctggagccgcacgggtcgttgagaaccataacgatgagctcgttgagttagggcagcttcctgatgacgttgacgacatggaagatgttgttgttgtcttgttcggtgtcggtagaagtgatgttcctgtcgactag

SEQ ID NO: 32140 - DNA, 1149 bp, Zea mays
  Peptide Sequence Number=SeqID_73919
atggctgtgcctctgcggtgggcgaacctcaacatcaacctggtgatcgagatcgtgaaccgcgtcccgtgcgcgatcgaccgcgaacggatggccgccgtctgccaggcgtggctcgcggcggtcgtgcaggcaaagcctctgacatatcagctcccgtcgctcttcctcccgcccgcgaacgtgtctggcgtctactgctacctcagcggctgccgcgaccacaacatgttgcccgggccccgctacttcggttcgtacgacggcggctggttcttcctcgcctacggtcagactcgcgggcaccggctgttcaacatccgcaccggaggctcccacgagctacccgacgtggtcgcggatctcttcactactgtcggaacctacagcatggtcgtcctcgccgccaccctctcgctcccgcctgatcacctggcatgcgtcgccgcgggcatcgtcacctaccagccggacctcgacgcgccgcgccgacgccacgtcgcgttctggcgaccaggggataagatggccgtctgcaacgttgtgcccaacgagtcagttgggccgggtttggaaccggaggacgtcgtgtactaccgggactccttctatttcctcacccaagatgggcatattctcgtgtcccgaccgtactataatcgtgtgggggatatcctgggagcgctatcgaagttaacgcgcttccagttccaggaaggggggtgcagtgacgagcagttcgtccgcgctcgctacctcgtatcatcccgcggggaactattgatggtcgtcaggctcgctgcccaccatcacgcgccgacgtcgtcgttcaaggtgttccggatgaccctataccctaggacctggttcgaggaggatgcattgtgtggccggatgttgttcgtgggacgaggatgctccaggtcctacgaggtgagtcagtacccggggttcaaggacggcatcttcttcttggatgatcggagcttctacgatgccgagatgatgttccgcagagtcaatgagaggcagtacccctgcagcgacatcggcaagtggtcgccggataggccgtctccccacgtcgacctctacttcccagagcgggttccttcttacaactctcctccggcttggcttctcccttag

SEQ ID NO: 32141 - DNA, 1185 bp, Zea mays
  Peptide Sequence Number=SeqID_73920
atggggaagaaggagaacttgtcaaaggaggtggtggctaggcctatgtcatcggagtcagacgatgagcaactggaattccactccttgccaatattgctgcagctcggctacaaccagctcacatggagcattccaacccagctgggccacctaaacaagctcactattctcgcccttcagttcaaccagctcagcgacgcgatcccggcatccctcggggacttgtcggcgctggcacggctagacttgagctccaaccaactcttcggctcaatcccctccaagctcgctgagatccctcgtcttgcaacgctagacctccggaacaacacactttcaggaagtgttccatcttgtctgaagaagctgaacgaggggtttctgtacgagaacaatccggagttctgtggagcgcagttcgattctttgaaagattgtcctaacgacgacaacgacgacgacagaacgccccggaaacctgaatcgacctttgtcaagccccagcagattcaaaagacggccgacctcaaccggaactgtggcacggaggctgctcgaagccttcgacgctctctagaggggctgttgttgccggaacagtcgtcatcgtggcaggagcagcctccgtcgtcgaagcagaacctcgctccagcgggtcagggagcagcgggccctcttggcggggtggtggcaggtacaagatcgtcgccgaagatcgaggaggacctcttgctgcacactaccgcagacatggtggccccgccccgaccgccacctcgctgcgccgccgccgattccgttcgcggacgccgaccgcgctactcgccccttacggcgccggacaccatctggcccgccggggtccggcgggtgcgcccctcctcgcgcggtgatccacggtgggatggtcttaggtttgggctcgggagaggcacgcccgaggtgccgtgtctggaggcttggcggcgacagaagtctggagatgggggcacagaagaacgcgacgtctatcgcagcggggcaggggctggggaggcaggcaacgtgcaccccgaccaacatgctggtgtggttgacgaaggctggggcgaggaccgcgggaccaacggagcgtgggcgagagggtgtcgtaggcagaaccatggtgcacaagttgtggactcctatactgtagttttatag

SEQ ID NO: 32142 - DNA, 180 bp, Zea mays
  Peptide Sequence Number=SeqID_73921
atgacctcccatatcctcatggctagcatagtaagggagaatgttctatcagtccgtgcattttggtggctacagctcccatgctactgctcgattcttgtcccctccatgggagggcattaccactcatgtcttggccccatcggcaggataggaggtgtctacctcttcctcctctga

SEQ ID NO: 32143 - DNA, 165 bp, Zea mays
  Peptide Sequence Number=SeqID_73922
atgtctgcattcttctatcttcaggcagcagtatacatagctggttcagtttgtgcagcattcgttgccaacatagatggtcactctgataaactgtcaccttcaatgggaggatgctcaggttttgagaccgaacctatatgtaccaccaaaacaatatcctaa

SEQ ID NO: 32144 - DNA, 1944 bp, Zea mays
  Peptide Sequence Number=SeqID_73923
atggctaaaccagaggggccgaccattggcgtgaagctgtccgtggacaaagagaagaagaaggtgctctttgctgagtccaacaaggagttcgtcgacgtgctcttcagcttcctcaccgttctgctcgacaccatcgtccgcctgctggacaagcagtctcagttgggttgtctcgaccaactgtacaagagcgtggaggacctcaacttggagtacttccaaaccagtgcttgcaaggcgatgcttctgaaaccgctcaacgcggcttccggccactgctgtcgcctcaagatcaacgtcgatggaagcgttccaagggtggtctatgtctgcaaggacacgcggtgcagcgctcttagcgacaacgcgttcagttcgttccctggcacgatctgcaaatgtggtaaggtcatggagtccattggacagtgcccaaaatacgatggtgacactgaaaccgccgccgccacttgttcagaggatggagtttttgtgaaaggttgcttgaagtttatcgtcactgatgatctccaggttgcgccagcatctacctctcttatgatgtctgtcttcgagaaatttggtgtgcttgatccagctgtcctagagcagcaggttctgcagttcagttcagaaaagataacatgcttgctgaagagattgttgacgtctaagcaacctctcactgatcattatttcgaagctcctgttccacaagatgatgcaagcctagaagcgcttgttcagaacttacatcctaaacaagaaaacgaggaccaggaaatgccaggaaacctgaagatcagggttcttctgacgaaggacaactccgccctgctgtatgctgaagttggtgtcgattttgtggactctctcttcggcttattaagcattccactgggatccgcaattaagttatatggccagtgctcggcaaaaggctgcctcggtaatgtttacatgagcatagatggtagtgtccaagtattcgtcagagaggagtgccagagtctccttctggacccaaagttgccacccttctttggttgctgcgcttctaagatccttcaggttgacgaattagctccaagagaactgacgatcaaagcctgctttgtttgcttcaagagtttagggttttcaggttgtagtcgttgtcacgatatcccttacaaaaattctttgcgacgctatgaagctttttgcgcaaatacggtgaagtccattaaactttgtgaggcgaatccaaaagaaccaaacggtggaagcgagaaaggcgaagtatatgtaagtgggaagacgaatttcctggttactgatgacctgcgtgttcttccactctcattaacatccactgttaagattgttagtgattccaaaattcagacgtcgaatcttgtggtcaaagaaattacactaacaaagtccaaggttatggagctacagagggttgtcctgctgctgagtcgtaccacactcagctccgtgcttctacatcctaagaagaccaagaagctgcaccattaccatcgcgttaggacaaaagcaacggacgtcggggtgctcctccaccctggaaccacaatttcactacaccggcaggggcatggtctgcagcacctcccatctgaagagacggaggcgacaccgctctggatctgcttgtccatgaaccgcgacacattcatcgtggcgacttcgagcttgcttctcccgcaatggctctcaaggtcgaaaagaatgcggcaaacaggtgggatgtgcgggtgtgagatgattggggagactttgcctcatgcaaatatacgggatgaatcgccagagaagcgtcaccgcgaaaaaatgggaaggatgcgggttctattggaggcggagaaaatggagtttccctcaaatacgttttttcagggccttttagcaatctcttggagatgctcttag

SEQ ID NO: 32145 - DNA, 264 bp, Zea mays
  Peptide Sequence Number=SeqID_73924
atggagccttggccggcgccccgtccttggctcgtccttgccggcgccctgttcggcggatcgtcgggcgccgtgtggagatcggtgccatactgccatggaacccaaggtgttcaaaaatacgctggtccacttcatgtacaccaacacgctggcacccatggagaaagaacagcagggcgtcgtcgcaatgatctaggatctgctcgcagcggcgcatcagtacaagctcaagatgctgaagttcttgagatgctgtgttag

SEQ ID NO: 32146 - DNA, 189 bp, Zea mays
  Peptide Sequence Number=SeqID_73925
atgaccgcgaggagctgtgtcgctggaggaacgacggtgaactgcgcccgggacagaggagtgaaggatgatgtgaagaaccaccagacaggaactactgctacgcatgaaatagatatcttagccattgaagtaaatgtgctgatatattgtgttaagaagtttatgattgctcagagttgggaataa

SEQ ID NO: 32147 - DNA, 357 bp, Zea mays
  Peptide Sequence Number=SeqID_73926
atggctctgctccctgggtggcttttcctggcgatcttcatgactatatacttctttgttgtgaggcggaagtggtcgccacacttcttgcgcttccacatcatattggctatcctgcttgacacgggctcacaagctctggccactgcctgcaactggaacccaagcattgcttttcagggcaaacaaatggcacatttctggatggcaatggccttcattcaaatcttcacggttgccgagtgtctgccttgtgataaatcaccaggccccgatttggtttcacaggtcgcttttgttgtcaacgtgttcaatgccttgtttgaaataggtgcaaaggagccttcacttggttaa

SEQ ID NO: 32148 - DNA, 297 bp, Zea mays
  Peptide Sequence Number=SeqID_73927
atgggaagaagtgatttgaaacccaggattgaactcaaaactgttgaggtggctaaaatcaccttgctcaagaggataaaatacaacaaaagggatggcttagaatacttgaatggactcaaggaacacttgtttaagtcatacaagtgcctaagacagaagccaaagccacaaccatacatgttatgcaattgttactcgtcagaggtgaagcctttaagaaggttctgtgtcacccggagagctcctgagcttgtggagagcctaaaaaagtttgtaaaacgtttaagatcatag

SEQ ID NO: 32149 - DNA, 273 bp, Zea mays
  Peptide Sequence Number=SeqID_73928
atggcgaagggtggcggggagaggggcacgctgctgccggtctcggcggacgacgggaagggcaacgacggagggggaggcggcgacgacgccgtgctgttcaaggggtccgccatgacccgccgaggcggcgccgcggcgctctcctacatggcatgctccggatggttgactcgtgctttgggcctctcgtcctttggcaacacgaccgagcttttggggacataccattttcgtagttctgttgctatgggttatacgcaaagtacatag

SEQ ID NO: 32150 - DNA, 867 bp, Zea mays
  Peptide Sequence Number=SeqID_73929
atggcttcagcgaacaactggctgggcttctcgctctcgggccaggataacccgcagcctaaccaggacagctcgcctgccgccggtatcgacatctccggcgccagcgacttctatggcctgcccacgcagcagggctccgacgggcatctcggcgtgccgggcctgcgggacgatcacgcttcttatggtatcatggaggcctacaacagggttcctcaagaaacccaagattggaacatgaggggcttggactacaacggcggtggctcggagctctcgatgcttgtggggtccagcggcggcggcgggggcaacggcaagagggccgtggaagacagcgagcccaagctcgaagatttcctcggcggcaactcgttcgtctccgatcaagatcagtccggcggttacctgttctctggagtcccgatagccagcagcgccaatagcaacagcgggagcaacaccatggagctctccatgatcaagacctggctacggaacaaccaggtggcccagccccagccgccagctccacatcagccgcagcctgaggaaatgagcaccgacgccagcggcagcagctttggatgctcggattcgatgggaaggaacagcatggtggcggctggtgggagctcgcagagcctggcgctctcgatgagcacgggctcgcacctgcccatggttgtgcccagcggcgccgccagcggagcggcctcggagagcacatcgtcggagaacaagcgagcgagcggtgccatggattcgcccggcagcgcggtagaagccgtaccgaggaagtccatcgacacgttcgggcaaaggacctctatatatcgaggtgtaacaaggttagaactttga

SEQ ID NO: 32151 - DNA, 1266 bp, Zea mays
  Peptide Sequence Number=SeqID_73930
atgaggctcatttatgggataatagttgtagaagggaagggcagagtcgcaagggtaggcaagataagcaactacgaaaaagagctagaagaaatgaaacatatgactagacaggagtacattgcatacctaagaagaaatagcagtggattttctcgtggggcatcaaagtatcgtggagtaactagacatcatcagcatgggagatggcaagcaaggatagggagagttgcaggaaacaaggatctttacttgggcacattcatttttgtctcaaagttgtctgagaaaatcggggcatgcggtcaaaggggtcgagcagaaaaccctagtgctttgaatggcacagtgtgcacccggcctgctgcatgcatgcaatatcgtcgtgcattggggaacgacaaccctaatcatgcaccctgtgctgtgaagctaatcgtcgtgcacattccctcgtacgtaggcaccgaggaggaggcggcggaggcctacgacatcgccgcgatcaagttccgcggtctcaacgccgtcaccaacttcgacatgagccgctacgacgtgaagagcatcctcgagagcagcacactgcctgtcggcggtgcggccaggcgcctcaaggacgccgtggaccacgtggaggccggcgccaccatctggcgcgccgacatggacggcgccgtgatctcccagctggccgaagccgggatgggcggctacgcctcgtacggccaccacggctggccgaccatcgcgttccagcagccgtcgccgctctccgtccactacccgtacggccagccgtcccgcgggtggtgcaaacccgagcaggacgcggccgccgccgcggcgcacagcctgcaggacctccagcagctgcacctcggcagcgcggcccacaacttcttccaggcgtcgtcgagctccacagtctacaacggcggcgccggcgccagtggtgggtaccagggcctcggtggtggcagctctttcctcatgccgtcgagcactgtcgtggcggcggccgaccaggggcacagcagcacggccaaccaggggagcacgtgcagctacggggacgaccaccaggaggggaagctcatcggttacgacgccgccatggtggcgaccgcagctggtggagacccgtacgctgcggcgaggaacgggtaccagttctcgcagggctcgggatccacggtgagcatcgcgagggcgaacgggtacgctaacaactggagctctcctttcaacaacggcatggggtga

SEQ ID NO: 32152 - DNA, 420 bp, Zea mays
  Peptide Sequence Number=SeqID_73931
gttgtgcttctattttcatgcatcttagcatttctactgaactacaccatcttctggaacacaatcctgaattttgcactcacacaatctatgtgtggcaacttgaaggatttcttcaccgttggaattggttgggtgctatttggtggtcttccttttgatctttccctaagagaagtgatatttgttttgttgaccggtggagggaagccctgtcctaaattcctaaaggcaataaaaatggattcaacagcgttgtcattctggggcttggatccttggaaacatagaaatagatgtgtctttgatgaagcagtccttgccttgctaatctggtcgagggtttcagggaagaacaggtgccaagaacttgaagactatttgatccaggttgagaggcatgaatttctcttgttttag

SEQ ID NO: 32153 - DNA, 165 bp, Zea mays
  Peptide Sequence Number=SeqID_73932
atggacacatcaagccctgaagcacttgtcgatgcaaagaatttgaacatgtttgttgggcaaagaatgcgcgcggttgttcaagtacaacacaatgaaggaacatccttagctgagacctcgtgcttcacaaatgacaaatgcagaaatcgacataggttctga

SEQ ID NO: 32154 - DNA, 420 bp, Zea mays
  Peptide Sequence Number=SeqID_73933
atgattctcccgagagatttgcgagataatctacagaatgaacctagaaaggaccaacttctggaggtcattctggatttgggaagacgaccagaggcacgattccttggtgactccggtggatgctacgatctacaggacagtgagatctcacaaaaagagttggaggatgctcagaaggctgtaggagagtttggaggtgacaaccgtgcaggaattgccacaggatcagagcagaccgacaaggcatccatgcttgacgaggccattgtgtatcttaaggcaatgagctccaagtataggagtggagatgagtcgtgtttggctgctcatgtacaacaacacgccatccccgagcctgggcgtgatccaccacccatagctgcaatcatggatgttccttttaacaaattatgttag

SEQ ID NO: 32155 - DNA, 501 bp, Zea mays
  Peptide Sequence Number=SeqID_73934
atggtggcgctcgcctcactctcgtctctctgtccctgcggcatcgcccgccgccgcgctgctgccgcctcctcacccgccgccgtttccatctcgtgctgtgccgtcgcgaccccgtcctcctctgggaaagggccccaggaatctagaaccccccgaagaaggctgaggaaaactgagggtgcctccaagagcttggaagattcggtcaagcgaaagatggagcagttttatgaagggtccgatggtcctcctctgcgagtgctccccatcggcggtcttggcgaaataggcatgaattgcatgcttgtggggaattatgaccgatatatcttgattgatgctggagttatgttcccggaagtacatgatttgggagacaaggtagccgagcttgagggcacgattgttgtggtcgaagaagccatgctgaaggttgttgtcgtggaaggcggcgatgccaaggtcgacatagttagggccattgtagacgaaaggtga

SEQ ID NO: 32156 - DNA, 118 bp, Zea mays
  Peptide Sequence Number=SeqID_73935
atggcaagtagtccgggcgggagcggatgctcaacaatgagcagctcgaacgtagggcgttggtggctcagcagcggcggcctcgtgcacagggtcggtggcggcctcgcgctcacag

SEQ ID NO: 32157 - DNA, 270 bp, Zea mays
  Peptide Sequence Number=SeqID_73936
atggcgccggtaatgggagagttagtggggagggagaaggggaaacggcagccgttaacggctcagcatcaaggggcggacgtcgtccccggcgcgcgggggtatccgggcgcgggcagtcggccgcgggggagggcgtcaggcgagacagctgcgaaggctggagcgcgtcgggtcacggggtcctgggcgcgctcgggatgtgactggcagcacgagtcgcggcgccaggttcctgacgtcggtgcttggccgcggcatgggacttag

SEQ ID NO: 32158 - DNA, 168 bp, Zea mays
  Peptide Sequence Number=SeqID_73937
atggggagtcatgacccccaggcagaacgagaatcacagctcatgggtaaagtgtgcgacctttacagagggttagaaactggttgtccccattgcaaccatttctcaggagaagatgaaggcaatgtggaggatattcaggaatttcaggacttcgaggagttctaa

SEQ ID NO: 32159 - DNA, 411 bp, Zea mays
  Peptide Sequence Number=SeqID_73938
atgacggactccgcttcgcccgaccccgggctcggacacagcctcgaccttggaagtcggtctccgcctcgcccgacccagggctcagactcagcctcgaccccagggctcagactcgacctcgacctcggaggagcctccgccttgcccgacctagggctcggaccaaccacgtcacaggggggccatcattaccctacccctagctcgctcaggctatgggggacaagaccgacgtcccatctggctcgccccggtaaacaaataatgatggcgccccgcgtgctccatgacggcggcggctctcagccccttacgaaagcaaggagacgtcagcaaggattcgacaaccccgatagctatccttctacagggcccaagcgctcctccgacgaccacgacatcacatga

SEQ ID NO: 32160 - DNA, 492 bp, Zea mays
  Peptide Sequence Number=SeqID_73939
atggaggcaagaagagcttcgaggtaccaagtgcatgggagaaggtcaaagaggttgaggaacccaaagccaagggtgaagaagaagacttgcaaagtcaagccaacttcagctcggcctggcacaccggattgtccggtggtgcaccggacagtgtccggtgccccaggctggctcggcgatgaactgcccgccctcgggaaacagagaggcgacatggctataattcactggactgtccggtggggcaccggactgtccggtgagccaacggtcgtcagcaccaacggtcggccgcgtgatcaacgcgcgacacgtggccaggccaacgattacttgatcgcaacggactgtccggtgcgccaaggggaacaaagggccaatggtcggcttcgccagaaaaggaaggagatcgagcaccggacaggaactgttcatgtccggtggtgcaccagactgtccggtgcgccacccgacagaaggcaaggatag

SEQ ID NO: 32161 - DNA, 249 bp, Zea mays
  Peptide Sequence Number=SeqID_73940
atgccgccgttgagggctcctattatacgtctagtgcattccacccggcgggctccatttgtcaatgattttcgctattctagcgaatggaaggtgttttttcggaccttcggcttaaggcctttgttcacatcggaccttcagccttgggatgaaggtgtacacgatatgaaaggcacggtttgggagatggatgatctagttccaaagctaccaatggagaagcttcggcttggcggtggaaaatga

SEQ ID NO: 32162 - DNA, 836 bp, Zea mays
  Peptide Sequence Number=SeqID_73941
gaaagaggaagagaggaacagaaaggaggttgttatcgaagaagcaaagttgccaggaccctggaccattctctgcgtatcaccaagaaattgcatcttgcaatgaatccagaaaatccacccacagaaggattgaaaatgacccttctaccgaggtgaagcttaaagttggtgatgtgagattggcaaacattgatgaaaacatcaacaagcccagtgggactgagagagaaggaatagaatttttttgtggtcctgatgatgggacaaaagagcaggacatggcattgcgcaaagcttacttcagtgcccgaccatccccacatttctggaagagggtttcaaaaatggtgccagggagatctgctgaagattgcttcaacagaatttatactgacctctcaacaccgactccaattgccccacgtcccagagcaaattctctaggcaagcacagtggaaggtcttcagcacgaaagaaaccattttcaaggttaagaactaaatcatctgatcccagcccaggagttctaaagcctataaagaatgttatcctacatgagaggtacattgataaattggcacgtagagaaggagcaaaaaggcctcgcagaagggctccagctggctctaaagctgctgattctgggaagtctctttctgagcagcaagctggtagtctgaaggctgctaaaaatgctctcatctcagaagcaaccgacttcataagcagttttaagacgctgcaagccaattcgcttgcgcatgctgtggagaatagtgaagacgagattgaatgtgatgccagtaattgtagccatgatgataaagaataa

SEQ ID NO: 32163 - DNA, 369 bp, Zea mays
  Peptide Sequence Number=SeqID_73942
atggagttcatctcaaaaagatacccaaacgcccagcccatcttcaggccggttgtcggcgacgagcacccaccagagctattggttgaacatgtgtacacaccaatgtcgccatggaaagggcggctgcgctctcaccacgcgacccctcaaagttttcccaagaggaggcccccttcccagaccaagaacccggaggagaaagaggagctccaaacatgtaagaagcatactgcccgcaagaagaccgcgagaggtcgccacgctggagctgctgcacagcagcccagggctctcttacgcgggtcgtcgcggctcgctggaagagaccatgagcatccaattatgatagacgatgatgtaaacgag

SEQ ID NO: 32164 - DNA, 147 bp, Zea mays
  Peptide Sequence Number=SeqID_73943
atggttggttggcgtggcgatctggccaaggttgcttctctgcgaagactgggcctcgggcgagccgaaggtatcttcggaatcgggttacgggtatacaagagtatggtcaagacgaagcttgagtgggatggaaggcgatcatga

SEQ ID NO: 32165 - DNA, 252 bp, Zea mays
  Peptide Sequence Number=SeqID_73944
atgcagcgtacctttaccataacagatgaactagagtacgagattagattagataatgtgtaccgatcagacatactgattgacaatgtggaaggcaacatgatcaacgatatggaagccagcagggtcgacaacatggaagcatacaaggttgatgaagcggtagtgttgacaatgatgccggatctcgaagacaacgagttccggagacctgctttctcgatcacagatacacgtcagcgctcaggatga

SEQ ID NO: 32166 - DNA, 327 bp, Zea mays
  Peptide Sequence Number=SeqID_73945
atgaggaacatgctctcattttatacagatttatatttgttgacgcatgcacagatcggagcaaaggcagggtctgatggcgaacaatcgatgcgcaaggctctggaggcacagaacaagaagcttgtgctcatttcgaaccagggcagtgtgtccttgtctgcacaagcgttacatgagcgaggccctggcgctgaagccggtagtctgcaaataggcctgaggaatattttcgaagcgatggagaacttcacctctgcatctgcaaatacgtacagggagcttcatctttgcgccgaagaagcgatggagaatttcttgttgtaa

SEQ ID NO: 32167 - DNA, 447 bp, Zea mays
  Peptide Sequence Number=SeqID_73946
atgggcaagggcaggagaggtcaaggcttgcctcatcataccggcgacaagcggaagcgcgatccaagtcctccctcggaggacttcgacgactctgagtactcggaggaggaggtttcctccgagtccgaagggtcgctggccctcgcctctcccccgacgtcgtccaatgactcggacgactcccaggggatagctatggaggcgtggacgtacatccgctccgtcgagcgtgccgggctcgaggggttagatgagtcggaggtctcctctgatgaggaggactccttcggctcgtccgaggagcggagcggtgacgacagcgacgacggtgacggcggaggaggcgacgacgacgacggcaggggcggtgaaggcgacgacggcggcaatgacgatggtggtagaggcggcggtagggctagtggcaaggcgccactggtttaa

SEQ ID NO: 32168 - DNA, 1134 bp, Zea mays
  Peptide Sequence Number=SeqID_73947
atgcctcgggatggcgcgcaggcggcgccgccaccggagcgcggcgagatggacgaggtggtagaggcggacccggatacggaggcggaggatcaggaggagaggtgggcgaggctgctgccggagctgctctccgacgtggtgcggcgcgtcgaggcgtccggcggcgagcggtggccggcgcggaaggacgtcgtctcctgcgcctgcgtgtgccgccggtggcgggaggccgccgtctccgtcgtgcgtccgccggcggagtccggcaagatcaccttcccctcctcgctcaagcagtggcaggagccgctagagacaggaggtgggcagagtgggggcgccagagccaggagaacaactatgagaggaatgaaaggagtcgtatggagggcagtagtggaggaggaagaccaaaggaccttatcagcagcagcagaggaagcacctgtggataaagggaagtttctcatggctgctagaagatttaggcgtggtccccataccgagtacattatatctcttgatgcagaagacttatcacaagggagcaatgcatacatggggaaactgagatctgatttctgggggacaaacttcaaaatatatgatagcaagccaccatatgatggtgctaaagcatcaagtagtcgatctagtcgtcgtttcggaagcagaaggattagtccccaggtatcggctggcaattatgaagttggacaggtttcatacaaatacaacttgctcaaatccagaggccccaggagaatgtattgcactctcgaatgcccttcagcccaagagacttgggaaaactcactcaagacaaagttcaggcgccccctgggccccacaactttacgaaataaagcaccccgctggcatgagcacctgcaatgctggtgcttaaacttccatgggcgggtaacagttgcatcagtcaagaatttccagcttgtggctgctgccgaccccagtgagcctactaccaacgtggatgatgaaacggttctgctgcagtttggtaaggtcgatagcgatatgttcacaatggattaccggcaaccactctccgcgtttcaagcatttgccatcagcctcagcagctttgggaccaagctagcctgtgaatag

SEQ ID NO: 32169 - DNA, 255 bp, Zea mays
  Peptide Sequence Number=SeqID_73948
atgtcgcatcatcctttgttgactttattgccctcagcggggcaagcgttcgtacaggctgcatttaatgcgcacgtctgcgcctgtgagaactttggccgtgactgggctcgtgtagagatgtcaatggatgaggcagcgcggcggaggctggacagcatgcaacggaggttgaggctgctggaacagcagatggagacgctcgaggccgaggtaggagaagccaccagcagtagaatgcacacctacgcctag

SEQ ID NO: 32170 - DNA, 2892 bp, Zea mays
  Peptide Sequence Number=SeqID_73949
atgacggcgccaccgaatgctagcatgggaccgctcagtttgggtggctgcggggctctcctctccactcctcagcctaattcgtggcattgccgcgggttctcgattcctgagaggagcgtctttatgttgccactgcgccggggtttgtcaaggaagaggggctgggttcttgattcaagaagtaacggtgctgtggctcgtgatgaggtcggtgccgggtcgtcagagcttcggcacatcgagaaggagctgacgttcagcccgactttcactgactatgttaaaatcatggagtcggtgaagttggacaggagcaagaatttacatggcgccgatggccagagtttgaggagaaggttcgcgggtgatggccgacaaaggaataggaggtctggtgatgcaaggaataaatcatttgaaaggaatcaggggcctcagagggacttggcgaaggatgagaatcagaaggatgttacaggctttgtggataaaagagcaactggtcatgtaaaaagtagcaatcgcaggcaaggggaggttgaagactatgcacagagaagaataattcgtggtggtacaagaggaaatggagacaatgggcagttctcatcacctgtgaaggctaaagatactaggggtagtatgtctgttcataggttggtgacgaacaaacagactcagtcagttgcagggaacgatttacaagggcgagcaacttatactccatctcggacttctgcccttccaaatagcagtattccatcaaagaatgctaaggttcaaatgagaaaatacgactatactatgacaagtagcagaatagacttaaaatatcctagagagacatttcccaatactgaggtcaacgctgacagtaatgttcaaagaaatcagcaaagagtggagaccttagggagaaactttgtagtacgtaggtttggggagattggcaccgactctaagaagtctaccgtaagcaaaatttatgggagtacacaggcaatgcctgagcatgatagccattcaagtgataatttggagagtgatgaacgtaggacagttcaattgcatagaggagcaaatgttaaaatggggaaatttgttagtagggatgctgaaactacagattttgatgatagagctgctttcaaaacttttgaggtatttactgatgtcaggaataggccacggatccttcgaatggaaatggaagagagaatccagaagttagctagtcggctcaatgctacagatgtaaatactccagagtggaaattctccaaaatgattcatgatgcaaaaattaaattctctgatcattctatcctaaggattgttcaaatgttgggtcgatatggaaattggaaatgtgttttgcaagtggttgaatggctccagtcacatgaaaggttcaaatcctacaagagcaggtatatttacacaacagttctcgatgttctagggaaggcaaagagaccattcgaggcgttgaatgtattttataccatgcagaaccaattgtcatcttatcctgacatggcagcttatcattgtattgctgttactcttgggcaagctggtcttataaaagaattatttgatgtgattgattgcatgtgttctcctcctaggaagaagttcaaattgagccctcttcagaattgggatcctcgcttggaaccagaccttattgtatacaatgcagttttgaatgcttgtgtgcaacaaaagcaatgggaaggggcattttgggtactgcaacagttgaaagagaagaacatttgtccaacaaattcaacatatggtcttgttatggaggtaatgcttgtctgtggaaagtacaatttggtttatgagttcttcaataaggtggataaatcatcaatacctggtgctctgaactataaagttcttgtaaatgcactttggagagaaggaaagattgatgaagcagtgatggctgtgaaggatatggaaagtcgtggaattgttggttctgctagtctgtattatgacctagctcgatgcctttgcagtggtggacggtgcaaagaagcacttctccaggttgaaaagatatgcaaggttgccaacaaaccgctggttgttacctacacaggactcattcagacttgcatagacaatggtggcatggaagatgctaaatacatattcaaccacatgtgcaactactgttcacctaattctgttacttgcaacatcatgatgaagtcatatattaaacatggaatgcttgaagacgcgaaagacctgctccatgatattctgaattgcaggataaggagtaaagcggattctaatcaagtggcaaccgctgacaagtttactttcaatactttcatggaggcctgtgctgcagcaaaaaggtggaatgacttcgagtatgcgtttcgtgagatgttattgaatgggtaccatttcgatgagcgaagacaccttcggatggtacttgacgcttttaggcatgggaaggaacagctgttggatgatctatggcactacctgtgccgtcacagccgtgtcccgccctcccctgtcataatggaaagattctgcctaaaactgatgcagggagatacactggcggcgatctcctgcgtcagcagcttccatgagggcaagatatgcaacgtctcctccatgtcatggctcaatctgctgagccgcaatgcagataggctgaaggaggagcatgttaccaagttagctcatgaactcaacagcctcattagcttgaggagttcctctgatagcattagtcttagcctgtaccaaaaaattattagtagctgtacggcattcctctctggagccacagttgtagaaaaggcaccttctggccaatcggtggtgttacagaaattataa

SEQ ID NO: 32171 - DNA, 1098 bp, Zea mays
  Peptide Sequence Number=SeqID_73950
atggcccggttcagagacagtaatggaggaggcctcgctcgggacgatggcggagccactgctggtgagagcaatcagagggaaaaaggtcgagagggcaccaatctggctcctgaggcaagccgggagatggcaaggacacagaagaacaaagccactgctcaccatcttggtcttctgaagcaagaaggggtcaaatttgggagctttgacatccttacagataatgatgttcgtgaaggtatgaagaagttctccaactggcccactgttcctcaactctactgcaaaggcgagcttcttggtggatgtgatattgttattgctatgcatgacagtggtgaattgaaggatgtttttgaggagcacaatattcccctcaaaccacagggtagcaaaaatgaagaagcaggtcagcccgagtctgcaactgagaagggtggtgcagttgctgaaccaatcgggcttactgatgctcagaaagctcgtttggaaagccttattaattccagcccagtgatggtattcatcaaaggtacaccagaggaaccaaggtgtgggttcagtgggaagttggtccacatacttaagcaagagaatattcctttctcaagttttgacatcctttcagatgatgaggttagacaggggctgaaagtgctctcaaactggcccagttaccctcaactgtacataaaaggtgagctggttggcggctcagacatagtgatggagatgcacaagagtggtgagctgaagaaggttctgtctgagaaaggggttattccaaaggaaagcctggaggacagattgaagtccctggtttcctctgcaccggtgatgcttttaatgaagggcactccagatgctcctcgttgcggcttcagttcgaaggttgtgaacgccttgaagaaggaaggggttagctttgggtccttcgacatcttatctgacgaggaagttaggcaaggtttgaagacgtactccaactggcctaccttcccccagctctactacaaatcggagctgattgggggatgtgatatcgttcttgagatggagaagagcggagacctgaagtcgaccctgtcagagtag

SEQ ID NO: 32172 - DNA, 411 bp, Zea mays
  Peptide Sequence Number=SeqID_73951
atggctacaaaaagtcgtaccgaggtccctcaagcgatagtggtggtggatctgctcgccgccggtggcctgacactctccagctactctgactcgcctacgtcctccaagggcattgacagcaaatcaccacccataggcacgacgacgggcattggcggcaaggcgccaaccttcggcacgacggggggcattggcggcaaggcgccacttttggcatcagggggtactgtagttgacatagggggcagcgcggcggtgttcgacaccacatggatctgtggcacggcgtccaccgcgagaaccgtcggtggcgagcatcagtggaagggtggccacaggcatgatcgacggcttcgacacgacaggaatgcctgggacgacaataggagcgacggggacagggcgtga

SEQ ID NO: 32173 - DNA, 816 bp, Zea mays
  Peptide Sequence Number=SeqID_73952
atggccgagtacgaagctctggttaatgggttgcgcattgccatcgagctaggggttcagcgcctcgatgctcgtggcgactcgcagcttgtcattgaccaagtcatgaagaactcccactgccgcgaccggaagatggaggttcagcgcctggaagacaagttctacgggctagagctcaaccacatcgctcgacggtacaacgagactgcggatgagctggctaaaatagcctccgggcggacaacggttcccccagacgtcttctccagagacatacatcaaccctccgtcaagaccgatgacacgcccgagcccgaggaggcctcggcccagcccgagaaggcacgtgggggcttctcgcgcctgctggtcgccatcgacaaattctccaagtggatcgaggttcgacccctaaccagcatcaggtccgagcaggcggtggcgttcttcacaaacatcatccatcgctttggggtcccgaattccatcatcaccgacaatggcacacagttcactgggaagaagttcctggacttctgcgaggaccaccacatccgtgtggactgggccgccatagctcaccccatgacgaatgggcaggtggagagtgccaacggtatgattttgcaggggcttaaactgaggatctacaacgacctcaacaacagtctctgcgacgctaccacgcccgaggggttcggccccgaggcttccaggtgggagacttggtacttcggctgcggcaggacgcccgagggcgccacaagcttactcctccctaggaagggtcgttcatcatcgccaagattttga

SEQ ID NO: 32174 - DNA, 309 bp, Zea mays
  Peptide Sequence Number=SeqID_73953
atgttggagatactggatttaagcaacaacaacttgagtggggaagttccacaagagattgcagaaatgccatcacttaggcagttatcgctttccaataactgctttcagtggcctctgatccaacattcctatgggaactttgatcaggaaaatggtttcaatatttatgataatctcgggagaggtaatatgaatcaaagagctgagaatgggttggaatcaggttcttcttcacatgagaacaaaaaggacactagcaacctttctggtaatccaacggactatactaagctcaagtccttataa

SEQ ID NO: 32175 - DNA, 435 bp, Zea mays
  Peptide Sequence Number=SeqID_73954
atgggaagagaaagtgtcgcgcatgtagaaagatccgcatcttcagtggaaaccacggccccctcccaattaatggattgtgattgtgattgtgtaggcagcaaccagcatgtgccaggcttcatcacacaggctgagcagctcaaagccaagggtgtagacgagatcctgcttatcagcgttaacgaccccttcgtcatgaaggcgtgggcgaagacctaccccgagaacaagcacgtgaagttcctcgccgacggatctggagcgtacaccaaggcgctcgacctcgagctcgatctcacggacaaagggctgggcgtgcgctcgaagaggttcgctctcctggccgacgacctcacggtcaccgtcgcaaacatcgaggaaggcgggcagttcacgatctccggcgctgaggagatcctgaaggcgctttag

SEQ ID NO: 32176 - DNA, 558 bp, Zea mays
  Peptide Sequence Number=SeqID_73955
atggttaaaaattttagcagcagaacagtgcaaatagcaatgaatgccgtggtaacttcacacctactcgtctgtttatatagtactgcagcatttgagaacaagtccccaacatggctggagaatatctttaaaacaaaccataaagactggataagactaacaacaatagtcaccgcctctcccgagttcagcctcgggcgcaacagggagttccgcctcgctcgaccccggcctcggcctcgggaggaatcgtcaccacgcccgagcacggtctcggcctcgggatggatctccgcctcgctcgacccaggccacggcctcagcctcggcctcgggaggagatctacgccttgctcaacccaggcctcggcctcggcctcgggaggagatctacgcctcgcccggcctaggtctcggcctcagcctcggcctcgggaggagatcttcgcttcgcccgacccaggcctcggctttggagacatcaccgcctcgcccgagacggcctcggaccgactacgcgaacggggaatacggcactgtcctccccctagctag

SEQ ID NO: 32177 - DNA, 195 bp, Zea mays
  Peptide Sequence Number=SeqID_73956
atgaccaagcgaagccatggcatgggcggtggcgcgggcgtagagcagaagagcacgaaggcaaaggggcacaaccgattgggagagaatgtgaaaagcggcaacgaggcgccccgcgtgtggcccgatgaaaccaccaagcgtgggggcccgtgggtcagtcagccgtggggacagatatggcagttggcgtga

SEQ ID NO: 32178 - DNA, 336 bp, Zea mays
  Peptide Sequence Number=SeqID_73957
atgcaggaatcccttgcaggaccgccatcgcagcaaaatcctcccgagggcctccctacactgaccactcccctactacccttgcccctttcggatactaaagcgaacacgtgggggaaggtattaccgaagttcatggttgtggagatgcttgaccccgagagacgtcgtgctggagttccttccgccagtaagagcacgaccgcgctcgatgattaccgacgaggtccaccgattccccagtacggccaaaatgctggtgcaatccgagattccaccgcggctgaaatcattcaatgcaacgatggctcgctcgtagttcctcccgttggttaa

SEQ ID NO: 32179 - DNA, 132 bp, Zea mays
  Peptide Sequence Number=SeqID_73958
atgagggaggagatggatttgggtgacatcgtgctctcctggtcggtgcaggagatcacgaacgacgacctctacaagacgaagttattgcgtcatttgtgtgaggaggtcgattcgtggagtcatggttag

SEQ ID NO: 32180 - DNA, 318 bp, Zea mays
  Peptide Sequence Number=SeqID_73959
atgagtactgaggaagtgaggaggcggttcgtctctcccctctgttccgcggccgtggcctcgtctcctcgggcttcgagagccaccagacgggccgcgcagtccgccaaggtcgacctcgccacatcgtccgccagattcaccctcgacacgccgtccactgagctcaccacgatcgagctgaaggaggacgcgcgggccgtgccaacagtcgtgctcagcgaggatgtgctagccaaagtcgtgctcgctagggccgcctcgccggcactccctgggacagccatggctgccgcgttgagcaccgttctggcgtag

SEQ ID NO: 32181 - DNA, 2070 bp, Zea mays
  Peptide Sequence Number=SeqID_73960
atggttactgaagtttgtaagaatgatggatatcagaaggggttcaaagagaaagtttcaaatagtattggtttagaaggagaccagagtaaacttgtgcatgcagcatctgttgataatataatggctaacatgcgtatatgtaaagcactttgctttgactcaagcatgaataataattttacaataatcatagtcactgttagcccccagaaatatgagctaccaccagttaatctaaatcagtcacaattggatgccattgaatctatcatctctgctgtaagatgtagacatttgaacctcacaaaacttatatggggcccaccaggtactggaaagaccaagactgttagtgctctattgtgggctttggcttgtttgaaatgccgaactcttacatgcactcccacaaatgttgctgttgttggtgtctgtactcgattccttcaaaatttgaaggaattcagcaagcagattgacatatgtggtctacctctttctcttggagatgttttgttattagggaacagggacaatatggacatttctgaggagatccaggaagttttcttggattatcgtgtggatgagcttacagagtgcttttcattattgtcaggatggaggcacataattgtttcaatgatatcattttttgaggaatgtggttctcgatacgatatgcttcttgaatgtgatggcggcagtgattctgtatgctttttggatttcctgaaaaagcagtttgatgttgcagcaaaagctgtaaagaaatgcatgatgactttgtgggttcaccttccaaagaagtgcttttcacatgaaaatgtcagcaatatatctatggtgttacgtttactagaaaaaattaatgccttcttatgtgatggagatttaactgatgagagtgcgaaaaggggatttgattttcgatcaactgagaactctatttatgagccaatatcttacattgagaaggaattaggtgatgcaaggtctctatgccttaaattgctgaaagatcttcagagttcacttaatttacctgttgcctctagttcttatcggttgcataatgcagagattgctccgcttgatatgttgattgttgatgaagctgctcaagtgaaagaatgtgaattggtgattccactacgtttgtgttggttgaaacatgttgttttggtgggggatgactgccagttgaggccactggtatgcaaggaagctggatttggaatcagtctttttgagagattagtcatactgaattttgaaaagcatttgctgaatatacagtatcgcatgagcccttgtatcagcttatttccaaatgctaaattttatgacaaaaagattttagatggtcccaatgtccattcttcctacaacaaggattgcactggccttctttttggtagctatgctttcataaatatcactgacgggagggaacaaaaggaaggtgcaggaaacagttggcagaacttggttgaagttgctgttgttatgcacttgatccgaaccatctttaaatcttggagaaagagagaccaagggattagcattggtgtagtttcaccttacagttctcaagttgccgctatcaaagatagacttgggaaaaagtatgatacatctgacaactttcatgtcagggtcaagtcaattgatggtttccaaggagaagaggatgacattatcatactatcaacagttagatccaacgagaggggcaatgttggatttcttgctgacatccaacgaacaaatgttgctcttacaagagcaaggtgtggatttattttttgtttcacagttgttgaaggcattgtctctggattcttgggaatgctaatacactgtataaaagtgggacagtctggacagaccttgtttctgatgcgcagagacgtaaatgtatttccaatgccactactgaccctgaattgtctcagcagttttcagcaataccagatggaaggttgttcgatcttttcagcctacatagtcttagttattgaacatattgacatagacttgtattggagtgacatcttatgttaa

SEQ ID NO: 32182 - DNA, 1482 bp, Zea mays
  Peptide Sequence Number=SeqID_73961
atgaaggaaatggttaaccctatttccctttcaaacccaccctcccctgaccacggggccgacgtctgcttcgtctcctcttcggcgtcggtaacgacgcgggcgtttggtgccacgaaggtgttatatgacaatgagcggcagtgggattctctctcctccctgatctcaggactgtcggcggcggcggtgatgggtcagatcgggatcgattggcaggagatgtttcgcaactcaccctcccccgaccgtggggccaacgtctgcttcgcctccccctcttcggcgtcggtagcaacacgggcacggacattgggcgccgcaaaggcgatatcggacgacgaacggcggtggggttctctctcctccctgatcttaggactatcggcagcggtgatgggtcagatcgagatcaattggcaggagatgtttcgcaactcaccctcccccgaccgcggggccgatgtctgcttcgcctcctcttcggcgtcggtagtggcgcgggcgtgggcgttgagcaccatgaaggcgttatcggagaacaagcggcgatggggttctctctcctccctgatctcaagaatgtcggtggtggcggcgatggggcagatcgggatcgattggaaggagatgtttcaaaactcaccctcccccaaccgcagggctgatgtttgctttgcctccccctctttggcatcggtagcgatgcgggcgcaggcgttgggcgccactaaggcgttatcggacaacgatcggcggtggggttctctctcctccctgatctcaggactgtcagccatggcggcgatggggcagatcgggatcgattggaaggagatgtttcgcaactcaccctcccccgattgcggggccgacgtctgctttgcctccccctctttggcgtcggtagcgacaccggcgcgggcgttgggcgccgcgaaggcgttatcggacgacgagcgacgacggggttctctctccctgatcttaggactatcggcgatggcaacgatggggcagatcgagattgattggaaggagatgtttcgtagctcaccctcccccgaccatgaggctgacctctgctttgcctcgccctcgtcggtgtcagcagcgacgagggcgcggacgttgggcgtcgcgatgacgttatcgggcgacgagcggcgatggtgtcctctcttctccccgatccgaggactatcgaaggtggcggcaatggggaggatcgaaatcgattgggtggagatgtttcacagctcaccttctcccgatcacgaggccggcgttggctttgcctccccctcgtcggcatcagcagcgatgcatgcgcgagtgttgggtgtcgcgaaggtgttatcgggcgacaagcggcggctgagtcctctctcctccccgatctcatggctatcaggcattggcggcgatggggtagatcaagatcaatttggaggagatgtttcacaactcaccctaccctga

SEQ ID NO: 32183 - DNA, 498 bp, Zea mays
  Peptide Sequence Number=SeqID_73962
atgacaaggaggatacactataatggcaattacgtatccatgaatcctattcacatttctgtagcctcttcaacagctatgctaacgcagaacacattgactgaacaggcatgcaagtaccgtggtcaccctattgagcttgtcaccccaaataacgcaaaatggacttgtccaataaatgaacagcttgcagcttctgatgttactgacactgctaggcttgctggatttgaagagatattgcctctcctagacgtgactcgagattgcagctctaaggttaccatggatgagaaggcttcaaggattctggagaggctggagcccccaagggcgaagaaacagagagcgagcttcagcaaggccagcacaaacgcagcactggcacctgccagtaaacagatcaagaagccgttgctgccgcgtgagccgagcgcaacccagccgctgcgatcttccttcaacaggcttaagaagaaagctccccatctgacctga

SEQ ID NO: 32184 - DNA, 3201 bp, Zea mays
  Peptide Sequence Number=SeqID_73963
atggactggagcatcgacctcgacaggggtctccgctcccgccaaccagcaacgcgcgtccgcgccgtcgacgccgccggcccacgcctccgccagctctgcacttgcgccaccgcccccgcgcccgtcgcctccgcgtacggcgtcttgcccggggaggcgcgcgtcttcgcggagaccatgctcctccgcctcgccaccgaattcaggagcgccgacgtcgccatgcgggtccgcatcatcaagaccctcctcaattctgccacgggtccaggggcgctagccggggcgcgcatcacggagcctgaccagctgctcaggagggtcaaggtggtctacgacactgggaacaagcgggacagggcgcttgcactgcgcatgttcgggtgcttcgccgacatcgccaaggacagcgtgcacgtccgctctctcatactttccagtttgagtgcctccagtgctttggaggtcaaggctgcaatttttgcggctagttgcatttgtcatctgtcagatgacttctcaaggataattcttgaagtgttcagaagattgatatgttctcagacatcagagccacaagtcatcatgtcagcagctaaggctttctggaagcttggttctacgttggctgttatccataaagttcatgaggttggaaaacagatggttctaggcacactggaagacgtcttcaaatctgaaatgctcttttcactctcaagactgtcatccaagtcgatcattttgttttctgaccaggtggatttattgttactgtttatggatcataattcctcttctatgaagtctgtggcgttaaaatgcatgtgttttatgtttcggagaaatatctgccattttccagttattaggaatgtttttggcagattgtttccattaattgatgatgaggattttccacttgactgtaagagcgatgtgttaaggattctgcagaaggtgcaaggtaccgctctggaaattcttgtggaaatcttttgtattctcaaggaagttgggtcagataacatatcagttctcaagggttcgtcatttgcacatgctgagtggcaaggaataacgaacaatgtaccattaactgaagataatagtatgaacggacctctgtgtaagatcattgcaatgattgtgaatcatattatatccctggccaatgaagttgctagcagagatatctgcatatcatctgcagtggataaggcatacaaaactcctttcagacttatgctaaagcttgtttcatgctacccttctgctgctgctgtaactcttcatatactgaaaagccttgtaaaagaactgtttctaattaatggaagtgattactctgaagtttctgttacatctgttgaaccattccagacaagtgttgcccttaaagaattgagtacttcagatgacaatgttcaactgttagctacatgcatcaaagcttcctgcattggaacacttattggcaatggaaaactggattttctcaaaattgattgcaagaatagaaagtccataatgcatgatctaatttgttgcatgctcaaatttgcaaatgcttgtcatgaggtgctatgtgaaacatctggtgctagatacaatcttcatgatagcatcaagggtctaatcaagtatgtgcgtcaggatgcccctcagcactggagcacatatgaatccttccatttgataatgtgtgcttgtgttacccggaatacttgtaaaatcaatcgtggtaatcaagaatctggtgattcaaaagagcatcataatacactattcactccttctgtttggataactcaggaattatgtgcacttcgaatgaccaaaatgcttataaagaagcagaaatactgggaagcttataggtcttctatgtactgttgttgtaaaggtctttggttcacagcttcttttgtcttcagaaaactggcagatgcttttgaagcaggctctttcagtttttggctcaaatcgttgctacttttttctgctggcgaaattgagatgaagctattgtttttttcctcagcaactataaagttagttggtgagctaaaaatggagggtgatttaagtgaggatctttactgtaatgaaacagatgctgatagcaccctcagtagatcatcagagttacatggtttccaagcaaagatatctgatatttgtggcagaacattattagcaaataatgctcttgcatccagtgcctcttcagatcatgacttcgtattccagaggtggttcatcagccttaggtcatcatttcttgaggtcctaacaaaagttcttgatatccttaatgcacactcttcctatgaagcaagaggagaccatttatctttgtctggagagtttgtcaaagaccaagtgcttgctttggatcattgctctctaagattaagtgacttggcaaaaagttatgaccttcttgctgcatcccatatggacctggagcgacatggctcaagtagtatagccaggcttgctttcatgtgctcacttttggcattttgtactgcatattctgtttatttctcaaaggcatgtaactacgtagagtactgcaagcttccaaagaggttttcccatgcttcaatcctacaagatttgtatggaagagtagatgggtctgactggcaggttgtttcccagctgcgacagtttatgtccacttcttttgacgaacttgacagcttacagtccagcacatggatcagtggttcatgtaatctggagaaggatttgtattctctttgtcattttgctgtggcatctttgcttggtgtatgtgatagtgctgaagctgaaaaaatacaaaatggagaggattgtttatctgctttgcaaggaggattgcaagtgttgtccagcatcttgcagaagtatttggaattgccttttgtggttcccaagtactttttcagagtaaagccttgccttggtgctgaactttacatatttgattcaaatcatttgaatgaaaaaggaatgtctatagagcctggttttctattgtctctaaccctctgcatgaagtggaagtgtgtgttagaaagaagcaccattcgcatcgtgaaattgtactgcattttggccgcaagcttagagacctgcttggatacagcaggaacaagaagcaagcagtttgatcagcacaggaccgctgaaatgtcgtattga

SEQ ID NO: 32185 - DNA, 306 bp, Zea mays
  Peptide Sequence Number=SeqID_73964
atggctctctggaatagggcatcatatgcagtttttgctgtatattcccctgaactagataacctccagatatgcctgtcaggaatatcctcatgcaactctattgtggtcattgatctggcaacttctcttgcaaaagttgcggatgtggatagaaatcttggtaacgaaagtaccgcagttgagggttttgaggaagcaattcgatgccttgagaagttgaagctggattctgaacaaactaccctcgaacagcggcgcctctcggttctcgacttcctgcacaaccagttggccgataagtaa

SEQ ID NO: 32186 - DNA, 378 bp, Zea mays
  Peptide Sequence Number=SeqID_73965
atggggcagatcgattcggaggagatgtttcgcaactcaccctcccccgaccgtgaggccgacgtctccttcgcctcccccttgttggctttgggcgtcgcgaaggcgttatccggtgatgagcggcggcgagatcgggatcaattggcaggagatgtttcacaactcaccctcccccgactgtggggccgacgtctacttcgcctccccctcttcggcatcggtagcaacacgggcgtgagcgttgggtgccgcgaaggcgatatcggacgacgagcggcggtggggttgtctctcctccctgatctcaggactctcggtggcggcggtgatgggtcagatcgggatcgattggcaggagatgtttcacaactctaa

SEQ ID NO: 32187 - DNA, 411 bp, Zea mays
  Peptide Sequence Number=SeqID_73966
atggctccggcgtccgagacggagctgcaagcaccaccaccaccaccggcgtcggctaaggagatcaagtcgccggaggtgctgccggagccaggctcgctgtcagcgctgcagcgcaagaagctgggtgcgcacttcatggagagcgacgagcgccgcgtctcccgcgccaggacacctctcggcgccgcctatgaaccgccctccgccgccgctggcggcggcggcaccacgccggtgatgcaccgcccggttcgcaagctccgcaaacgccgtcaacaacttccctcggaatctcccaagtgtcctccgtgttgggtggctttcctcgccgacccctacctggggcgcttcgggaccatcgccctcttcacccccagaacctggcgggggctattcaggttaccgtga

SEQ ID NO: 32188 - DNA, 687 bp, Zea mays
  Peptide Sequence Number=SeqID_73967
atggcgggcggaaatacgctcgccggagctaaggaacggtggctggccggtgagggagccgcccagctcttccagatcctctttcaaggctcaaaaactacaacaccaattaagaaagctctgttaaagccagcccaaggtttagaagactccatcgaggccgagctttttggaaccaagtattataatcctttcaacttcgaaattttgctatcggggtgtgatttagccgatccgcagtcgctgttacgacagtccatctcactgctccaattcttagaacggatcggcgctggagctggagctcgtcttgtccgacggcgctcctgggcgctcctctccctggtcctcggccctgtcatcgctgattggttggagctccctggcccgacggtcttctctgcccgagctccctcccggcggcaagccggtcccgttcaatcccggcggagctcccatccatctcttcctcgcgcctcgtcagttactgtcgagttaccgcgcggccgtgctgaacttgaactatcaggttacctcagtagcttgttttctgaatttaagcgcttgggagagggagtaaacattgcagtgtcaactgcattaggaaccatgaaaaccttctctagagatatcccagacctcaagacagtgttctatttgcttctaagtgagacacatattgcctga

SEQ ID NO: 32189 - DNA, 249 bp, Zea mays
  Peptide Sequence Number=SeqID_73968
atgggagaaggtttgggttttctgcaatctgtcgtctcctcttctgctgggtatctccgttattattctaatgaagagggctacgagttgggtttttgtagatcattcgtattgtatccttcctcggattgcttcttttgttctactacgaatatgctccacatggcagggagaggtctcgaggtcaagcctggacccactgtcaagtgtgtgcttggacatgactttatcctgcactttccagtgtaa

SEQ ID NO: 32190 - DNA, 639 bp, Zea mays
  Peptide Sequence Number=SeqID_73969
atggaagaacctaaccaattgctagcaataattagaaaggaagacgaagatgcatcacctggtgttgagaccatgcttgtgttttctgatcatgtccggagctttgtgaaccctgtttggacatcgtcaggcagaccagttgatagaaaacgcactggaccacgacttgagcaagcactggcactgagaccagctaaaccatcattgtcaccagtccttcaaagcttaaattatgttcttgaagacattttgattcccaaagagtccaagagcggttctttgtttggaggttttgcatccctggaggaacgagataagtcttatgacataaaagactcgatgactgtacattatggatttgtaagagggaaggtacctggtcttaatactgggtttgacatagatgaagctgatcattctgagatgcagctgtgccagagtacagttgttgcctctgctatttttggtaactacaactttggatttcagtcctcgttacaaattgcttttacacttgcttacaaatactatgtacacttgcttacaaatttctcagctcccctccccaagggcgccaaaattttgtcagggattgttgatagagagctgaaattctttgttgtaaataaacatttttag

SEQ ID NO: 32191 - DNA, 762 bp, Zea mays
  Peptide Sequence Number=SeqID_73970
atgggtggcttgggccgtgcacttgcgttcctccttagcaagcgagtagcattggcctattggagagcagtggtggtgtatagattggcggtgaccgtgccgacaccggcttttgcgctagaagcagcagcaccaggaggcggcgtaggagggccccttgccatagcagctggtgcgatgtgtgatgcacacgtagggagcggcgatggcaagaagctgaaggctaaacttaggcaagaggcatatggtgaagcatcatctgattctagtgatgatgaagaatggtctgggaagaacacgccaataataaaaagcaatgaagagggtgaagccaattctcctgcgggaaaaggctccagagttgtgcaccataatgatgaactgactacacaaagcactaaaaaaagcttgcattctattcatggttcagtagatgagaaacctggagaccttacttctaatggcagcaacagcacagccaggaaaggacattttggcccagtaattaatcagaagctacatgaacattttaagacacaaccataccctagtcgttctgttaaagaaagtctggcagaagaactagggttaacatttcgtcaggttaacaaatggtttgaaactaggcgtcattccgcaagggtagcttcttccaggaaaggcatcagtctagataagcatagcccccaaaatactaatagtcaagtgacagctagtatggaacctaaagaacctgaggggactgtggttggaagaatctaa
